(19) United States
(12) Patent Application Publication
(10) Pub. No.: US 2022/0090207 A1
(43) Pub. Date: Mar. 24, 2022

(54) DETECTING CANCER, CANCER TISSUE OF ORIGIN, AND/OR A CANCER CELL TYPE

(71) Applicant: GRAIL, LLC, Menlo Park, CA (US)

(72) Inventors: Oliver Claude Venn, Menlo Park, CA (US); Alexander P. Fields, Menlo Park, CA (US); Samuel S. Gross, Menlo Park, CA (US); Qinwen Liu, Menlo Park, CA (US); Jan Schellenberger, Menlo Park, CA (US); Joerg Bredno, Menlo Park, CA (US); John F. Beausang, Menlo Park, CA (US); Seyedmehdi Shojaee, Menlo Park, CA (US); Onur Sakarya, Menlo Park, CA (US); M. Cyrus Maher, Menlo Park, CA (US); Arash Jamshidi, Menlo Park, CA (US)

(21) Appl. No.: 17/384,251

(22) Filed: Jul. 23, 2021

Related U.S. Application Data
(63) Continuation of application No. PCT/US2020/015082, filed on Jan. 24, 2020.
(60) Provisional application No. 62/797,176, filed on Jan. 25, 2019.
(60) Provisional application No. 62/797,174, filed on Jan. 25, 2019.
(60) Provisional application No. 62/797,170, filed on Jan. 25, 2019.

(51) Int. Cl. C12Q 1/6886; C12Q 1/6809; G16B 40/20; G16B 20/20

(52) U.S. Cl. CPC C12Q 1/6886; C12Q 1/6809; C12Q 2600/154; G16B 20/20; G16B 40/20

(57) ABSTRACT

The present description provides a cancer assay panel for targeted detection of cancer-specific methylation patterns. Further provided herein includes methods of designing, making, and using the cancer assay panel to detect cancer and particular types of cancer.

### CROSS-REFERENCE

[0001] This is a continuation application of International Appl. No.: PCT/US2020/015082, filed Jan. 24, 2020, which claims the benefit of U.S. Provisional Application No. 62/797,176, filed Jan. 25, 2019, U.S. Provisional Application No. 62/797,174, filed Jan. 25, 2019, and U.S. Provisional Application No. 62/797,170, filed Jan. 25, 2019, which applications are incorporated herein by reference in their entireties.

### SEQUENCE LISTING

[0002] The instant application contains a “lengthy” Sequence Listing which has been submitted via CD-R in lieu of a printed paper copy and is hereby incorporated by reference in its entirety. Said CD-R, recorded on Jan. 23, 2020, are labeled “CRF”, “Copy 1”, “Copy 2” and “Copy 3”, respectively, and each contains only one identical 243,821,056 bytes file (50251-849_601_SL.txt). Said CD-R and identical copies are hereby incorporated by reference in their entireties.

### BACKGROUND

[0003] DNA methylation plays an important role in regulating gene expression. Aberrant DNA methylation has been implicated in many disease processes, including cancer. DNA methylation profiling using methylation sequencing (e.g., whole genome bisulfate sequencing (WGBS)) is increasingly recognized as a valuable diagnostic tool for detection, diagnosis, and/or monitoring of cancer. For example, specific patterns of differentially methylated regions may be useful as molecular markers for various diseases.

[0004] However, WGBS is not ideally suitable for a product assay. The reason is that the vast majority of the genome is either not differentially methylated in cancer, or the local CpG density is too low to provide a robust signal. Only a few percent of the genome is likely to be useful in classification.

[0005] Furthermore, there have been various challenges in identifying differentially methylated regions in various diseases. First off, determining differentially methylated regions in a disease group only holds weight in comparison with a group of control subjects, such that if the control group is small in number, the determination loses confidence with the small control group. Additionally, among a group of control subjects, methylation status can vary which can be difficult to account for when determining the regions are differentially methylated in a disease group. On another note, methylation of a cytosine at a CpG site is strongly correlated with methylation at a subsequent CpG site. To encapsulate this dependency is a challenge in itself.

[0006] Accordingly, a cost-effective method of accurately diagnosing a disease by detecting differentially methylated regions has not yet been available.

### SUMMARY

[0007] Provided herein are compositions comprising a plurality of different bait oligonucleotides, wherein the plurality of different bait oligonucleotides is configured to collectively hybridize to DNA molecules derived from at least 200 target genomic regions, wherein each genomic region of the at least 200 target genomic regions is differentially methylated in at least one cancer type relative to another cancer type or relative to a non-cancer type, and wherein the at least 200 target genomic regions comprise, for at least 80% of all possible pairs of cancer types selected from a set comprising at least 10 cancer types, at least one target genomic region that is differentially methylated between the pair of cancer types.

[0008] In some embodiments, the at least 10 cancer types comprise at least 2, 3, 4, 5, 10, 12, 14, 16, 18, or 20 cancer types. In some embodiments, the cancer types are selected from uterine cancer, upper GI squamous cancer, all other upper GI cancers, thyroid cancer, sarcoma, urothelial renal cancer, all other renal cancers, prostate cancer, pancreatic cancer, ovarian cancer, neuroendocrine cancer, multiple myeloma, melanoma, lymphoma, small cell lung cancer, lung adenocarcinoma, all other lung cancers, leukemia, hepatobiliary carcinoma, hepatobiliary biliary, head and neck cancer, colorectal cancer, cervical cancer, breast cancer, bladder cancer, and anorectal cancer. In some embodiments, the cancer types are selected from anal cancer, bladder cancer, colorectal cancer, esophageal cancer, head and neck cancer, liver/bile-duct cancer, lung cancer, lymphoma, ovarian cancer, pancreatic cancer, plasma cell neoplasm, and stomach cancer. In some embodiments, the cancer types are selected from thyroid cancer, melanoma, sarcoma, myeloid neoplasm, renal cancer, prostate cancer, breast cancer, uterine cancer, ovarian cancer, bladder cancer, urothelial cancer, cervical cancer, anorectal cancer, head & neck cancer, colorectal cancer, liver cancer, bile duct cancer, pancreatic cancer, gallbladder cancer, upper GI cancer, multiple myeloma, lymphoid neoplasm, and lung cancer. In some embodiments, the at least 200 target genomic regions are selected from any one of lists 1-16. In some embodiments, the at least 200 target genomic regions comprise at least 20%, 30%, 40%, 50%, 60%, 70%, 80%, 90% or 95% of the target genomic regions in any one of lists 1-16. In some embodiments, the at least 200 target genomic regions comprise at least 500, 1,000, 5,000, 10,000, 15,000, 20,000, 30,000, 40,000, or 50,000 target genomic regions in any one of lists 1-16. In some embodiments, the at least 200 target genomic regions are selected from any one of lists 1-3. In some embodiments, the at least 200 target genomic regions comprise at least 20%, 30%, 40%, 50%, 60%, 70%, 80%, 90% or 95% of the target genomic regions in any one of lists 1-3. In some embodiments, the at least 200 target genomic regions comprise at least 500, 1,000, 5,000, 10,000, 15,000, 20,000, 30,000, 40,000, or 50,000 target genomic regions in any one of lists 1-3. In some embodiments, the at least 200 target genomic regions are selected from any one of lists 13-16. In some embodiments, the at least 200 target genomic regions comprise at least 10%, 20%, 25%, 30%, 40%, 50%, 60%, 70%, 80%, 90% or 95% of the target genomic regions in any one of lists 13-16. In some embodiments, the at least 200 target genomic regions comprise at least 500, 1,000, 5,000, 10,000, 15,000, 20,000, 30,000, 40,000, or 50,000 target genomic regions in any one of lists 13-16. In some embodiments, the at least 200 target genomic regions are selected from list 12. In some embodiments, the at least 200 target genomic regions comprise at least 10%, 20%, 25%, 30%, 40%, 50%, 60%, 70%, 80%, 90% or 95% of the target genomic regions in list 12. In some embodiments, the at least 200 target genomic regions comprise at least 500, 1,000, 5,000, 10,000, 15,000, 20,000, 30,000, 40,000, or 50,000 target genomic regions in list 12. In some embodiments, the at least 200 target genomic regions are selected from any one of lists 8-11. In some embodiments, the at least 200 target genomic regions comprise at least 20%, 30%, 40%, 50%, 60%, 70%, 80%, 90% or 95% of the target genomic regions in any one of lists 8-11. In some embodiments, the at least 200 target genomic regions comprise at least 500, 1,000, 5,000, 10,000, 15,000, 20,000, 30,000, 40,000, or 50,000 target genomic regions in any one of lists 8-11. In some embodiments, the at least 200 target genomic regions comprise at least 40%, 50%, 60%, or 70% of the target genomic regions listed in List 4. In some embodiments, wherein the at least 200 target genomic regions comprise, for at least 90% or for 100% of all possible pairs of cancer types selected from a set comprising at least 10 cancer types, at least one target genomic region that is differentially methylated between the pair of cancer types. In some embodiments, the plurality of bait oligonucleotides hybridize to at least 15 nucleotides or to at least 30 nucleotides of the DNA molecules derived from the at least 200 target genomic regions. In some embodiments, the DNA molecules derived from the at least 200 target genomic regions are converted cfDNA fragments. In some embodiments, the cfDNA fragments are converted by a process comprising treatment with bisulfite. In some embodiments, the cfDNA fragments are converted by an enzymatic conversion reaction. In some embodiments, the cfDNA fragments are converted by a cytosine deaminase. In some embodiments, each bait oligonucleotide is conjugated to an affinity moiety. In some embodiments, the affinity moiety is biotin. In some embodiments, each bait oligonucleotide is between 50 and 300 bases in length, between 60 and 200 bases in length, between 100 and 150 bases in length, between 110 and 130 bases in length, and/or 120 bases in length.

[0009] Also provided herein are compositions comprising a plurality of different bait oligonucleotides configured to hybridize to DNA molecules derived from at least 100 target genomic regions selected from any one of Lists 1-16.

[0010] In some embodiments, the at least 100 target genomic regions comprises at least 200 target genomic regions. In some embodiments, the at least 100 target genomic regions are selected from any one of lists 1-16. In some embodiments, the at least 100 target genomic regions comprise at least 20%, 30%, 40%, 50%, 60%, 70%, 80%, 90% or 95% of the target genomic regions in any one of lists 1-16. In some embodiments, the at least 100 target genomic regions comprise at least 500, 1,000, 5,000, 10,000, 15,000, 20,000, 30,000, 40,000, or 50,000 target genomic regions in any one of lists 1-16. In some embodiments, the at least 100 target genomic regions are selected from any one of lists 1-3. In some embodiments, the at least 100 target genomic regions comprise at least 20%, 30%, 40%, 50%, 60%, 70%, 80%, 90% or 95% of the target genomic regions in any one of lists 1-3. In some embodiments, the at least 100 target genomic regions comprise at least 500, 1,000, 5,000, 10,000, 15,000, 20,000, 30,000, 40,000, or 50,000 target genomic regions in any one of lists 1-3. In some embodiments, the at least 100 target genomic regions are selected from list 12. In some embodiments, the at least 100 target genomic regions comprise at least 10%, 20%, 25%, 30%, 40%, 50%, 60%, 70%, 80%, 90% or 95% of the target genomic regions in list 12. In some embodiments, the at least 100 target genomic regions comprise at least 500, 1,000, 5,000, 10,000, 15,000, 20,000, 30,000, 40,000, or 50,000 target genomic regions in list 12. In some embodiments, the at least 100 target genomic regions are selected from list 8. In some embodiments, the at least 100 target genomic regions comprise at least 20%, 30%, 40%, 50%, 60%, 70%, 80%, 90% or 95% of the target genomic regions in list 8. In some embodiments, the at least 100 target genomic regions comprise at least 500, 1,000, 5,000, 10,000, 15,000, 20,000, 30,000, 40,000, or 50,000 target genomic regions in list 8. In some embodiments, the at least 100 target genomic regions comprise at least 40%, 50%, 60%, or 70% of the target genomic regions listed in List 4. In some embodiments, the DNA molecules derived from the at least 100 target genomic regions are converted cfDNA fragments. In some embodiments, the cfDNA fragments are converted by a process comprising treatment with bisulfite. In some embodiments, the composition further comprises cfDNA fragments from a test subject. In some embodiments, the cfDNA fragments from the test subject are converted cfDNA molecules. In some embodiments, the cfDNA fragments from the test subject are converted by a process comprising treatment with bisulfite. In some embodiments, each target genomic region comprises at least 5 CpG dinucleotides. In some embodiments, each bait oligonucleotide is between 60 and 200 bases in length, between 100 and 150 bases in length, between 110 and 130 bases in length, and/or 120 bases in length. In some embodiments, the different bait oligonucleotides comprise a plurality of sets of two or more bait oligonucleotides, wherein each bait oligonucleotide within a set of bait oligonucleotides is configured to bind to the converted DNA molecules from the same target genomic region. In some embodiments, the ratio of bait oligonucleotides configured to hybridize to hypermethylated target regions to bait oligonucleotides configured to hybridize to hypomethylated target regions is between 0.5 and 1.0. In some embodiments, each set of bait oligonucleotides comprises one or more pairs of a first bait oligonucleotide and a second bait oligonucleotide, each bait oligonucleotide comprises a 5′ end and a 3′ end, a sequence of at least X nucleotide bases at the 3′ end of the first bait oligonucleotide is identical to a sequence of X nucleotide bases at the 5′ end the second bait oligonucleotide, and X is at least 20, at least 25, or at least 30. In some embodiments, X is 30.

[0011] Also provided herein are methods for enriching a cfDNA sample, the method comprising: contacting a converted or unconverted cfDNA sample with a bait set described above and enriching the sample for cfDNA corresponding to a first set of genomic regions by hybridization capture. In some embodiments, the cfDNA sample is a converted cfDNA sample

[0012] Also provided herein are methods for obtaining sequence information informative of a presence or absence of cancer or a type of cancer, the method comprising sequencing enriched converted cfDNA prepared by a method comprising contacting a converted or unconverted cfDNA sample with a bait set described above; and enriching the sample for cfDNA corresponding to a first set of genomic regions by hybridization capture. In some embodiments, the cfDNA sample is a converted cfDNA sample

[0013] Also described herein are methods of determining a presence or absence of cancer in a subject, the method comprising capturing cfDNA fragments from the subject with a composition described above, sequencing the captured cfDNA fragments, and applying a trained classifier to the cfDNA sequences to determine the presence or absence of cancer. In some embodiments, the likelihood of a false positive determination of a presence or absence of cancer is less than 1% and the likelihood of an accurate determination of a presence or absence of cancer is at least 40%. In some embodiments, the cancer is a stage I cancer, the likelihood of a false positive determination of a presence or absence of cancer is less than 1%, and the likelihood of an accurate determination of a presence or absence of cancer is at least 10%. In some embodiments, the cfDNA fragments are converted cfDNA fragments.

[0014] Also provided herein are methods of detecting a cancer type comprising capturing cfDNA fragments from a subject with a composition comprising a plurality of different oligonucleotide baits, sequencing the captured cfDNA fragments, and applying a trained classifier to the cfDNA sequences to determine a cancer type; wherein the oligonucleotide baits are configured to hybridize to cfDNA fragments derived from a plurality of target genomic regions, wherein the plurality of target genomic regions is differentially methylated in one or more cancer types relative to a different cancer type or a non-cancer type, wherein the likelihood of a false-positive determination of cancer is less than 1%, and wherein the likelihood of an accurate assignment of a cancer type is at least 75%, at least 80%, at least 85% or at least 89%, or at least 90%. Some embodiments further comprise applying the trained classifier to the cfDNA sequences to determine a presence of cancer before determining the cancer type.

[0015] In some embodiments, the cancer type is a stage I cancer type, and the likelihood of an accurate assignment is at least 75%. In some embodiments, the cancer type is a stage II cancer type, and the likelihood of an accurate assignment is at least 85%. In some embodiments, the cancer type is prostate cancer and the likelihood of an accurate assignment of prostate cancer is at least 85% or at least 90%. the cancer type is breast cancer and the likelihood of an accurate assignment of breast cancer is at least 90% or at least 95%. In some embodiments, the cancer type is uterine cancer and the likelihood of an accurate assignment of uterine cancer is at least 90% or at least 95%. In some embodiments, the cancer type is ovarian cancer and the likelihood of an accurate assignment of ovarian cancer is at least 85% or at least 90%. In some embodiments, the cancer type is bladder & urothelial cancer and the likelihood of an accurate assignment of bladder & urothelial is at least 90% or at least 95%. In some embodiments, the cancer type is colorectal cancer and the likelihood of an accurate assignment of colorectal cancer is at least 65% or at least 70%. In some embodiments, the cancer type is liver & bile duct cancer and the likelihood of an accurate assignment of liver & bile duct cancer is at least 90% or at least 95%. In some embodiments, the cancer type is pancreas & gallbladder cancer and the likelihood of an accurate assignment of pancreas & gallbladder cancer is at least 85% or at least 90%. In some embodiments, the cfDNA fragments are converted cfDNA fragments. In some embodiments, the cancer type is selected from uterine cancer, upper GI squamous cancer, all other upper GI cancers, thyroid cancer, sarcoma, urothelial renal cancer, all other renal cancers, prostate cancer, pancreatic cancer, ovarian cancer, neuroendocrine cancer, multiple myeloma, melanoma, lymphoma, small cell lung cancer, lung adenocarcinoma, all other lung cancers, leukemia, hepatobiliary carcinoma, hepatobiliary biliary, head and neck cancer, colorectal cancer, cervical cancer, breast cancer, bladder cancer, and anorectal cancer. In some embodiments, the cancer type is selected from anal cancer, bladder cancer, colorectal cancer, esophageal cancer, head and neck cancer, liver/bile-duct cancer, lung cancer, lymphoma, ovarian cancer, pancreatic cancer, plasma cell neoplasm, and stomach cancer. In some embodiments, the cancer type is selected from thyroid cancer, melanoma, sarcoma, myeloid neoplasm, renal cancer, prostate cancer, breast cancer, uterine cancer, ovarian cancer, bladder cancer, urothelial cancer, cervical cancer, anorectal cancer, head & neck cancer, colorectal cancer, liver cancer, bile duct cancer, pancreatic cancer, gallbladder cancer, upper GI cancer, multiple myeloma, lymphoid neoplasm, and lung cancer. In some embodiments, the cancer type is sarcoma and the likelihood of a detecting sarcoma is at least 35% or at least 40%. In some embodiments, the likelihood of detecting stage III or stage IV renal cancer is at least 50% or at least 70%. In some embodiments, the likelihood of detecting stage III or stage IV breast cancer is at least 70% or at least 85%. In some embodiments, the likelihood of detecting stage III or stage IV uterine cancer is at least 50%. In some embodiments, the likelihood of detecting ovarian cancer is at least 60% or at least 80%. In some embodiments, the likelihood of detecting bladder cancer is at least 35% or at least 40%. In some embodiments, the likelihood of detecting anorectal cancer is at least 60% or 70%. In some embodiments, the likelihood of detecting head and neck cancer is at least 75% or at least 80%. In some embodiments, the likelihood of detecting stage 1 head and neck cancer is at least 80%. In some embodiments, the likelihood of detecting colorectal cancer is at least 50% or at least 59%. In some embodiments, the likelihood of detecting liver cancer is at least 75% or 80%. In some embodiments, the likelihood of detecting pancreas and gallbladder cancer is at least 64% or at least 70%. In some embodiments, the likelihood of detecting upper GI cancer is at least at least 60% or at least 68%. In some embodiments, the likelihood of detecting multiple myeloma is at least 65% or at least 75%. In some embodiments, the likelihood of detecting type I multiple myeloma is at least 60%. In some embodiments, the likelihood of detecting lymphoid neoplasm is at least 65% or at least 69%. In some embodiments, the likelihood of detecting lung cancer is at least 50% or at least 58%. In some embodiments, the composition comprising oligonucleotide baits is a composition provided above. In some embodiments, the plurality of genomic regions comprises no more than 95,000 genomic regions, no more than 60,000 genomic regions, no more than 40,000 genomic regions, no more than 35,000 genomic regions, no more than 20,000 genomic regions, no more than 15,000 genomic regions, no more than 8,000 genomic regions, no more than 4,000 genomic regions, no more than 2,000 genomic regions, or no more than 1,400 genomic regions. In some embodiments, the total size of the plurality of genomic regions is less than 4 MB, less than 2 MB, less than 1 MB, less than 0.7 MB, or less than 0.4 MB. In some embodiments, the subject has an elevated risk of one or more cancer types. In some embodiments, the subject manifests symptoms associated with one or more cancer types. In some embodiments, the subject has not been diagnosed with a cancer. In some embodiments, the classifier was trained on converted DNA sequences derived from a least 100 subjects with a first cancer type, at least 100 subjects with a second cancer type, and at least 100 subjects with no cancer. In some embodiments, the first cancer type is ovarian cancer. In some embodiments, the first cancer type is liver cancer. In some embodiments, the first cancer type is selected from thyroid cancer, melanoma, sarcoma, myeloid neoplasm, renal cancer, prostate cancer, breast cancer, uterine cancer, ovarian cancer, bladder cancer, urothecal cancer, cervical cancer, anorectal cancer head & neck cancer, colorectal cancer, liver cancer, pancreatic cancer, gallbladder cancer, esophageal cancer, stomach cancer, multiple myeloma, lymphoid neoplasm, lung cancer, or leukemia. In some embodiments, the classifier was trained on converted DNA sequences derived from at least 1000, at least 2000, or at least 4000 target genomic regions selected from any one of Lists 1-16.

[0016] In some embodiments, the classifier is trained on converted DNA sequences derived from at least 1000, at least 2000, or at least 4000 target genomic regions selected from any one of Lists 1-16. In some embodiments the trained classifier determines the presence or absence of cancer or a cancer type by (a) generating a set of features for the sample, wherein each feature in the set of features comprises a numerical value; (b) inputting the set of features into the classifier, wherein the classifier comprises a multinomial classifier; (c) based on the set of features, determining, at the classifier, a set of probability scores, wherein the set of probability scores comprises one probability score per cancer type class and per non-cancer type class; and (d) thresholding the set of probability scores based on one or more values determined during training of the classifier to determine a final cancer classification of the sample. In some embodiments, the set of features comprises a set of binarized features. In some embodiments, the numerical value comprises a single binary value. In some embodiments, the multinomial classifier comprises a multinomial logistic regression ensemble trained to predict a source tissue for the cancer. In some embodiments, the classifier determines a final cancer classification based on a top-two probability score differential relative to a minimum value, wherein the minimum value corresponds to a predefined percentage of training cancer samples that had been assigned the correct cancer type as their highest score during training of the classifier. In some embodiments, the classifier assigns a cancer label corresponding to the highest probability score determined by the classifier as the final cancer classification when it is determined that the top-two probability score differential exceeds the minimum value; and assigns an indeterminate cancer label as the final cancer classification when it is determined that the top-two probability score differential does not exceed the minimum value.

[0017] Also provided herein are methods of treating a type of cancer in a subject in need thereof, the method comprising detecting the type of cancer by a method described above, and administering an anti-cancer therapeutic agent to the subject. In some embodiments, the anti-cancer agent is a chemotherapeutic agent selected from the group consisting of alkylating agents, antimetabolites, anthracyclines, anti-tumor antibiotics, cytoskeletal disruptors (taxans), topoisomerase inhibitors, mitotic inhibitors, corticosteroids, kinase inhibitors, nucleotide analogs, and platinum-based agents.

[0018] Also provided herein are cancer assay panels comprising: at least 500 pairs of probes, wherein each pair of the at least 500 pairs comprise two probes configured to overlap each other by an overlapping sequence, wherein the overlapping sequence comprises a 30-nucleotide sequence, and wherein the 30-nucleotide sequence is configured to hybridize to a converted cfDNA molecule corresponding to, or derived from one or more of genomic regions, wherein each of the genomic regions comprises at least five methylation sites, and wherein the at least five methylation sites have an abnormal methylation pattern in cancerous samples.

[0019] In some embodiments, each of the at least 500 pairs of probes is conjugated to a non-nucleotide affinity moiety. In some embodiments, the non-nucleotide affinity moiety is a biotin moiety. In some embodiments, the cancerous samples are from subjects having cancer selected from the group consisting of breast cancer, uterine cancer, cervical cancer, ovarian cancer, bladder cancer, urothelial cancer of renal pelvis, renal cancer other than urothelial, prostate cancer, anorectal cancer, colorectal cancer, hepatobiliary cancer arising from hepatocytes, hepatobiliary cancer arising from cells other than hepatocytes, pancreatic cancer, squamous cell cancer of the upper gastrointestinal tract, upper gastrointestinal cancer other than squamous, head and neck cancer, lung adenocarcinoma, small cell lung cancer, squamous cell lung cancer and cancer other than adenocarcinoma or small cell lung cancer, neuroendocrine cancer, melanoma, thyroid cancer, sarcoma, multiple myeloma, lymphoma, and leukemia. In some embodiments, the abnormal methylation pattern has at least a threshold p-value rarity in the cancerous samples. In some embodiments, each of the probes is designed to have less than 20 off-target genomic regions. In some embodiments, the less than 20 off-target genomic regions are identified using a k-mer seeding strategy. In some embodiments, the less than 20 off-target genomic regions are identified using k-mer seeding strategy combined to local alignment at seed locations. In some embodiments, the cancer assay panel comprises at least 10,000, 50,000, 100,000, 200,000, 300,000, 400,000, 500,000, 600,000, 700,000 or 800,000 probes. In some embodiments, the at least 500 pairs of probes together comprise at least 2 million, 3 million, 4 million, 5 million, 6 million, 8 million, 10 million, 12 million, 14 million, or 15 million nucleotides. In some embodiments, each of the probes comprises at least 50, 75, 100, or 120 nucleotides. In some embodiments, each of the probes comprises less than 300, 250, 200, or 150 nucleotides. In some embodiments, each of the probes comprises 100-150 nucleotides. In some embodiments, each of the probes comprises less than 20, 15, 10, 8, or 6 methylation sites. In some embodiments, at least 80, 85, 90, 92, 95, or 98% of the at least five methylation sites are either methylated or unmethylated in the cancerous samples. In some embodiments, at least 3%, 5%, 10%, 15%, or 20% of the probes comprise no G (Guanine). In some embodiments, each of the probes comprise multiple binding sites to the methylation sites of the converted cfDNA molecule, wherein at least 80, 85, 90, 92, 95, or 98% of the multiple binding sites comprise exclusively either CpG or CpA. In some embodiments, each of the probes is configured to have less than 15, 10 or 8 off-target genomic regions. In some embodiments, at least 30% of the genomic regions are in exons or introns. In some embodiments, at least 15% of the genomic regions are in exons. In some embodiments, at least 20% of the genomic regions are in exons. In some embodiments, less than 10% of the genomic regions are in intergenic regions. In some embodiments, the genomic regions are selected from any one of Lists 1-3 or Lists 4-16. In some embodiments, the genomic regions comprise at least 20%, 30%, 40%, 50%, 60%, 70%, 80%, 90% or 95% of the genomic regions in any one of Lists 1-3 or Lists 4-16. In some embodiments, the genomic regions comprise at least 500, 1,000, 5000, 10,000, or 15,000, 20,000, 30,000, 40,000, 50,000, 60,000, or 70,000 genomic regions in any one of Lists 1-3 or Lists 4-16.

[0020] Also provided herein are cancer assay panels comprising a plurality of probes, wherein each of the plurality of probes is configured to hybridize to a converted cfDNA molecule corresponding to one or more of the genomic regions in any one of Lists 1-3 or Lists 4-16.

[0021] In some embodiments, the plurality of probes together is configured to hybridize to a plurality of converted cfDNA molecules corresponding to at least 20%, 30%, 40%, 50%, 60%, 70%, 80%, or 90%, 95% or 100% of the genomic regions of any one of Lists 1-3 or Lists 4-16.

[0022] In some embodiments, the plurality of probes together is configured to hybridize to a plurality of converted cfDNA molecules corresponding to at least 500, 1,000, 5000, 10,000, 15,000, 20,000, 30,000, 40,000, or 50,000 genomic regions of any one of Lists 1-3 or Lists 4-16. In some embodiments, at least 3%, 5%, 10%, 15%, or 20% of the probes comprise no G (Guanine). In some embodiments, each of the probes comprise multiple binding sites to methylation sites of the converted cfDNA molecule, wherein at least 80, 85, 90, 92, 95, or 98% of the multiple binding sites comprise exclusively either CpG or CpA. In some embodiments, each of the probes is conjugated to a non-nucleotide affinity moiety. In some embodiments, the non-nucleotide affinity moiety is a biotin moiety.

[0023] Also provided herein are methods of determining a tissue of origin (TOO) of a cancer, comprising: receiving a sample comprising a plurality of cfDNA molecules; treating the plurality of cfDNA molecules to convert unmethylated C (cytosine) to U (uracil), thereby obtaining a plurality of converted cfDNA molecules; applying a cancer assay panel provided above to the plurality of converted cfDNA molecules, thereby enriching a subset of the converted cfDNA molecules; and sequencing the enriched subset of the converted cfDNA molecule, thereby providing a set of sequence reads.

[0024] Some embodiments further comprise the step of: determining a health condition by evaluating the set of sequence reads, wherein the health condition is a presence or absence of cancer; a presence or absence of cancer of a tissue of origin (TOO); a presence or absence of a cancer cell type; or a presence or absence of at least 5, 10, 15, or 20 different types of cancer. In some embodiments, the sample comprising a plurality of cfDNA molecules was obtained from a human subject.

[0025] Also provided herein are methods for detecting a cancer, comprising the steps of: obtaining a set of sequence reads by sequencing a set of nucleic acid fragments from a subject, wherein the nucleic acid fragments are corresponding to, or derived from a plurality of genomic regions selected from any one of Lists 1-3 or Lists 4-16; for each of the nucleic acid fragments, determining methylation status at a plurality of CpG sites; and detecting a health condition of the subject by evaluating the methylation status for the sequence reads, wherein the health condition is (i) a presence or absence of cancer; (ii) a presence or absence of cancer of a tissue of origin (TOO); (iii) a presence or absence of a cancer cell type; or (iv) a presence or absence of at least 5, 10, 15, or 20 different types of cancer.

[0026] In some embodiments, the plurality of genomic regions comprises at least 20%, 30%, 40%, 50%, 60%, 70%, 80%, 90%, 95%, or 100% of the genomic regions of any one of Lists 1-3 or lists 4-16. In some embodiments, the plurality of genomic regions comprises 500, 1,000, 5000, 10,000, 15,000, 20,000, 30,000, 40,000, 50,000, 60,000, 70,000, or 80,000 of the genomic regions of any one of Lists 1-3 or Lists 4-16.

[0027] Also provided herein are methods of designing a cancer assay panel for diagnosing cancer of a tissue of origin (TOO) comprising the steps of: identifying a plurality of genomic regions, wherein each of the plurality of genomic regions (i) comprises at least 30 nucleotides, and (ii) comprises at least five methylation sites, selecting a subset of the genomic regions, wherein the selection is made when cfDNA molecules corresponding to, or derived from each of the genomic regions in cancerous samples have an abnormal methylation pattern, wherein the abnormal methylation pattern comprises at least five methylation sites either hypomethylated or hypermethylated, and designing a cancer assay panel comprising a plurality of probes, wherein each of the probes is configured to hybridize to a converted cfDNA molecule corresponding to or derived from one or more of the subset of the genomic regions.

[0028] Also provided herein are bait sets for hybridization capture, a bait set comprising a plurality of different oligonucleotide-containing probes, wherein each of the oligonucleotide-containing probes comprises a sequence of at least 30 bases in length that is complementary to either: (1) a sequence of a genomic region; or (2) a sequence that varies from the sequence of (1) only by one or more transitions, wherein each respective transition of the one or more transitions occurs at a cytosine in the genomic region, and wherein each probe of the different oligonucleotide-containing probes is complementary to a sequence corresponding to a CpG site that is differentially methylated in samples from subjects with a first cancer type relative to samples from subjects with a second cancer type or a non-cancer type.

[0029] In some embodiments, the first cancer type and the second cancer type are selected from uterine cancer, upper GI squamous cancer, all other upper GI cancers, thyroid cancer, sarcoma, urothelial renal cancer, all other renal cancers, prostate cancer, pancreatic cancer, ovarian cancer, neuroendocrine cancer, multiple myeloma, melanoma, lymphoma, small cell lung cancer, lung adenocarcinoma, all other lung cancers, leukemia, hepatobiliary hepatocellular carcinoma, hepatobiliary biliary, head and neck cancer, colorectal cancer, cervical cancer, breast cancer, bladder cancer, and anorectal cancer.

[0030] The bait set of any of claims 140-141, wherein the bait set comprises at least 500, 1,000, 2,000, 2,500, 5,000, 6,000, 7,500, 10,000, 15,000, 20,000, 25,000, 50,000, 100,000, 200,000, 300,000, 500,000, or 800,000 different oligonucleotide-containing probes. In some embodiments, for each of the different oligonucleotide-containing probes, the sequence of at least 30 bases in length is complementary to either (1) a sequence within a genomic region selected from the genomic regions set forth in any one of Lists 1-16; or (2) a sequence that varies from the sequence of (1) only by one or more transitions, wherein each respective transition of the one or more transitions occurs at a cytosine in the genomic region. In some embodiments, the sequence of at least 30 bases in length is complementary to either (1) a sequence within a genomic region selected from the genomic regions set forth in any one of Lists 1-3; or (2) a sequence that varies from the sequence of (1) only by one or more transitions, wherein each respective transition of the one or more transitions occurs at a cytosine in the genomic region. In some embodiments, the sequence of at least 30 bases in length is complementary to either (1) a sequence within a genomic region selected from the genomic regions set forth in in any one of Lists 5 or 7; or (2) a sequence that varies from the sequence of (1) only by one or more transitions, wherein each respective transition of the one or more transitions occurs at a cytosine in the genomic region. In some embodiments, the sequence of at least 30 bases in length is complementary to either (1) a sequence within a genomic region selected from the genomic regions set forth in any one of Lists 4, 8, or 8-12; or (2) a sequence that varies from the sequence of (1) only by one or more transitions, wherein each respective transition of the one or more transitions occurs at a cytosine in the genomic region. In some embodiments, the sequence of at least 30 bases in length is complementary to either (1) a sequence within a genomic region selected from the genomic regions set forth in any one of Lists 13-16; or (2) a sequence that varies from the sequence of (1) only by one or more transitions, wherein each respective transition of the one or more transitions occurs at a cytosine in the genomic region. In some embodiments, the sequence of at least 30 bases in length is complementary to either (1) a sequence within a genomic region selected from the genomic regions set forth in any one of Lists 13-16; or (2) a sequence that varies from the sequence of (1) only by one or more transitions, wherein each respective transition of the one or more transitions occurs at a cytosine in the genomic region. In some embodiments, the sequence of at least 30 bases in length is complementary to either (1) a sequence within a genomic region selected from the genomic regions set forth in any one of Lists 4 or 6; or (2) a sequence that varies from the sequence of (1) only by one or more transitions, wherein each respective transition of the one or more transitions occurs at a cytosine in the genomic region. In some embodiments, the sequence of at least 30 bases in length is complementary to either (1) a sequence within a genomic region selected from the genomic regions set forth in List 4; or (2) a sequence that varies from the sequence of (1) only by one or more transitions, wherein each respective transition of the one or more transitions occurs at a cytosine in the genomic region. In some embodiments, the sequence of at least 30 bases in length is complementary to either (1) a sequence within a genomic region selected from the genomic regions set forth in List 8; or (2) a sequence that varies from the sequence of (1) only by one or more transitions, wherein each respective transition of the one or more transitions occurs at a cytosine in the genomic region. In some embodiments, the sequence of at least 30 bases in length is complementary to either (1) a sequence within a genomic region selected from the genomic regions set forth in List 9; or (2) a sequence that varies from the sequence of (1) only by one or more transitions, wherein each respective transition of the one or more transitions occurs at a cytosine in the genomic region. In some embodiments, the sequence of at least 30 bases in length is complementary to either (1) a sequence within a genomic region selected from the genomic regions set forth in List 10; or (2) a sequence that varies from the sequence of (1) only by one or more transitions, wherein each respective transition of the one or more transitions occurs at a cytosine in the genomic region. In some embodiments, the sequence of at least 30 bases in length is complementary to either (1) a sequence within a genomic region selected from the genomic regions set forth in List 11; or (2) a sequence that varies from the sequence of (1) only by one or more transitions, wherein each respective transition of the one or more transitions occurs at a cytosine in the genomic region. In some embodiments, the sequence of at least 30 bases in length is complementary to either (1) a sequence within a genomic region selected from the genomic regions set forth in List 12; or (2) a sequence that varies from the sequence of (1) only by one or more transitions, wherein each respective transition of the one or more transitions occurs at a cytosine in the genomic region. In some embodiments, the plurality of different oligonucleotide-containing probes are each conjugated to an affinity moiety. In some embodiments, the affinity moiety is biotin. In some embodiments, at least 80%, 90%, or 95% of the oligonucleotide-containing probes in the bait set do not include an at least 30, at least 40, or at least 45 base sequence that has 20 or more off-target regions in the genome. In some embodiments, the oligonucleotide-containing probes in the bait set do not include an at least 30, at least 40, or at least 45 base sequence that has 20 or more off-targets regions in the genome. In some embodiments, the sequence of at least 30 bases of each of the probes is at least 40 bases, at least 45 bases, at least 50 bases, at least 60 bases, at least 75, or at least 100 bases in length. In some embodiments, each of the oligonucleotide-containing probes has a nucleic acid sequence of at least 45, 40, 75, 100, or 120 bases in length. In some embodiments, each of the oligonucleotide-containing probes have a nucleic acid sequence of no more than 300, 250, 200, or 150 bases in length. In some embodiments, each of the plurality of different oligonucleotide-containing probes is between 60 and 200 bases in length, between 100 and 150 bases in length, between 110 and 130 bases in length, and/or 120 bases in length. In some embodiments, the different oligonucleotide-containing probes comprise at least 500, at least 1000, at least 2,000, at least 2,500, at least 5,000, at least 6,000, at least 7,500, and least 10,000, at least 15,000, at least 20,000, or at least 25,000 different pairs of probes, wherein each pair of probes comprises a first probe and second probe, wherein the second probe differs from the first probe and overlaps with the first probe by an overlapping sequence that is at least 30, at least 40, at least 50, or at least 60 nucleotides in length. In some embodiments, the bait set comprises oligonucleotide-containing probes that are configured to target at least 20%, at least 25%, at least 30%, at least 40%, at least 50%, at least 60%, at least 70%, at least 80%, at least 90%, at least 95%, or 100% of the genomic regions identified in any one of Lists 1-16. In some embodiments, the bait set comprises oligonucleotide-containing probes that are configured to target at least 20%, at least 25%, at least 30%, at least 40%, at least 50%, at least 60%, at least 70%, at least 80%, at least 90%, at least 95%, or 100% of the genomic regions identified in any one of Lists 1-3. In some embodiments, the bait set comprises oligonucleotide-containing probes that are configured to target at least 20%, at least 25%, at least 30%, at least 40%, at least 50%, at least 60%, at least 70%, at least 80%, at least 90%, at least 95%, or 100% of the genomic regions identified in any one of Lists 4-12. In some embodiments, the bait set comprises oligonucleotide-containing probes that are configured to target at least 20%, at least 25%, at least 30%, at least 40%, at least 50%, at least 60%, at least 70%, at least 80%, at least 90%, at least 95%, or 100% of the genomic regions identified in any one of Lists 4, 6, or 8-12. In some embodiments, the bait set comprises oligonucleotide-containing probes that are configured to target at least 20%, at least 25%, at least 30%, at least 40%, at least 50%, at least 60%, at least 70%, at least 80%, at least 90%, at least 95%, or 100% of the genomic regions identified in List 8. In some embodiments, an entirety of oligonucleotide probes in the bait set are configured to hybridize to fragments obtained from cfDNA molecules corresponding to at least 30%, 40%, 50%, 60%, 70%, 80%, 90% or 95% of the genomic regions in a list selected from any one of Lists 1-16. In some embodiments, the entirety of oligonucleotide probes in the bait set are configured to hybridize to fragments obtained from cfDNA molecules corresponding to at least 30%, 40%, 50%, 60%, 70%, 80%, 90% or 95% of the genomic regions in a list selected from any one of Lists 1-3. In some embodiments, the entirety of oligonucleotide probes in the bait set are configured to hybridize to fragments obtained from cfDNA molecules corresponding to at least 30%, 40%, 50%, 60%, 70%, 80%, 90% or 95% of the genomic regions in a list selected from any one of Lists 4-12. In some embodiments, the entirety of oligonucleotide probes in the bait set are configured to hybridize to fragments obtained from cfDNA molecules corresponding to at least 30%, 40%, 50%, 60%, 70%, 80%, 90% or 95% of the genomic regions in a list selected from any one of Lists 4, 6, or 8-12. In some embodiments, the entirety of oligonucleotide probes in the bait set are configured to hybridize to fragments obtained from cfDNA molecules corresponding to at least 30%, 40%, 50%, 60%, 70%, 80%, 90% or 95% of the genomic regions in a list selected from List 8. In some embodiments, an entirety of oligonucleotide-containing probes in the bait set are configured to hybridize to fragments obtained from cfDNA molecules corresponding to at least 500, 1,000, 5000, 10,000, 15,000, 20,000, at least 25,000, at least 30,000, at least 50,000 or at least 80,000 genomic regions in any one of Lists 1-16. In some embodiments, the entirety of oligonucleotide-containing probes in the bait set are configured to hybridize to fragments obtained from cfDNA molecules corresponding to at least 500, 1,000, 5000, 10,000, 15,000, 20,000, at least 25,000, at least 30,000, at least 50,000 or at least 80,000 genomic regions in any one of Lists 1-3. In some embodiments, the entirety of oligonucleotide-containing probes in the bait set are configured to hybridize to fragments obtained from cfDNA molecules corresponding to at least 500, 1,000, 5000, 10,000, 15,000, 20,000, at least 25,000, at least 30,000, at least 50,000 or at least 80,000 genomic regions in any one of Lists 4-12. In some embodiments, the entirety of oligonucleotide-containing probes in the bait set are configured to hybridize to fragments obtained from cfDNA molecules corresponding to at least 500, 1,000, 5000, 10,000, 15,000, 20,000, at least 25,000, at least 30,000, at least 50,000 or at least 80,000 genomic regions in any one of Lists 4, 6, or 8-12. In some embodiments, the entirety of oligonucleotide-containing probes in the bait set are configured to hybridize to fragments obtained from cfDNA molecules corresponding to at least 500, 1,000, 5000, 10,000, 15,000, 20,000, at least 25,000, at least 30,000, at least 50,000 or at least 80,000 genomic regions in List 8. In some embodiments, the plurality of oligonucleotide-containing probes comprise at least 500, 1,000, 5,000, or 10,000 different subsets of probes, wherein each subset of probes comprises a plurality of probes that collectively extend across a genomic region selected from the genomic regions of any one of Lists 1-16 in a 2× tiled fashion. In some embodiments, plurality of oligonucleotide-containing probes comprise at least 500, 1,000, 5,000, or 10,000 different subsets of probes, wherein each subset of probes comprises a plurality of probes that collectively extend across a genomic region selected from the genomic regions of any one of Lists 1-4, 6, or 8-12 in a 2× tiled fashion. In some embodiments, the plurality of probes that collectively extend across the genomic region in a 2× tiled fashion comprises at least one pair of probes that overlap by a sequence of at least 30 bases, at least 40 bases, at least 50 bases, or at least 60 bases in length. In some embodiments, the plurality of probes collectively extend across portions of the genome that collectively are a combined size of less than 4 MB, less than 2 MB, less than 1 MB, less than 0.7 MB, or less than 0.4 MB. In some embodiments, the plurality of probes collectively extend across portions of the genome that collectively are a combined size of between 0.2 and 30 MB, between 0.5 MB and 30 MB, between 1 MB and 30 MB, between 3 MB and 25 MB, between 3 MB and 15, MB, between 5 MB and 20 MB, or between 7 MB and 12 MB. In some embodiments, each of the different oligonucleotide-containing probes comprises less than 20, 15, 10, 8, or 6 CpG detection sites. In some embodiments, at least 80%, 85%, 90%, 92%, 95%, or 98% of the plurality of oligonucleotide-containing probes have exclusively either CpG or CpA on all CpG detection sites.

[0031] Also provided herein are mixtures comprising: converted cfDNA; and a bait set provided above. In some embodiments, the converted cfDNA comprises bisulfite-converted cfDNA.

[0032] The mixture of claim 187, wherein the converted cfDNA comprises cfDNA that has been converted via a cytosine deaminase.

[0033] Also provided herein are methods for enriching a converted cfDNA sample, a method comprising: contacting the converted cell-free DNA sample with a bait set provided above; and enriching the sample for a first set of genomic regions by hybridization capture.

[0034] Also provided herein are methods for providing sequence information informative of a presence or absence of a cancer or a type of cancer, the method comprising: processing cfDNA from a biological sample with a deaminating agent to generate a cell-free DNA sample comprising deaminated nucleotides; enriching the cfDNA sample for informative cell-free DNA molecules; and sequencing the enriched cfDNA molecules, thereby obtaining a set of sequence reads informative of a presence or absence of a cancer or a type of cancer.

[0035] In some embodiments, enriching the cfDNA comprises amplifying, via PCR, portions of the cell-free DNA fragments using primers configured to hybridize to a plurality of genomic regions selected from any one of Lists 1-16. In some embodiments, enriching the cfDNA sample comprises contacting the cell-free DNA with a plurality of probes configured to hybridize to converted fragments obtained from the cfDNA molecules corresponding to or derived from the genomic regions in any one of Lists 1-16. In some embodiments, the cfDNA sample comprises contacting the cell-free DNA with a plurality of probes configured to hybridize to converted fragments obtained from the cfDNA molecules corresponding to or derived from at least 30%, 40%, 50%, 60%, 70%, 80%, 90%, 95% of the genomic regions in any one of Lists 1-16. In some embodiments, the genomic regions are selected from any one of Lists 1-3. In some embodiments, the genomic regions are selected from any one of Lists 4-12. In some embodiments, the genomic regions are selected from any one of Lists 4,6, or 8-12. In some embodiments, the genomic regions are selected from List 8. In some embodiments, the cfDNA sample is enriched by a method provided above. In some embodiments, the method further comprises determining a cancer classification by evaluating the set of sequence reads, wherein the cancer classification is a presence or absence of cancer; or a presence or absence of a type of cancer. In some embodiments, the step of determining a cancer classification comprises: generating a test feature vector based on the set of sequence reads; and applying the test feature vector to a classifier. In some embodiments, the classifier comprises a model that is trained by a training process with a first cancer set of fragments from one or more training subjects with a first cancer type and a second cancer set of fragments from one or more training subjects with a second cancer type, wherein both the first cancer set of fragments and the second cancer set of fragments comprise a plurality of training fragments. In some embodiments, the cancer classification is a presence or absence of cancer. In some embodiments, has an area under a receiver operating characteristic curve of at least 0.8. In some embodiments, the cancer classification is a type of cancer. In some embodiments, the type of cancer is selected from among at least 12, 14, 16, 18, or 20 cancer types. In some embodiments, the cancer types are selected from uterine cancer, upper GI squamous cancer, all other upper GI cancers, thyroid cancer, sarcoma, urothelial renal cancer, all other renal cancers, prostate cancer, pancreatic cancer, ovarian cancer, neuroendocrine cancer, multiple myeloma, melanoma, lymphoma, small cell lung cancer, lung adenocarcinoma, all other lung cancers, leukemia, hepatobiliary hepatocellular carcinoma, hepatobiliary biliary, head and neck cancer, colorectal cancer, cervical cancer, breast cancer, bladder cancer, and anorectal cancer. In some embodiments, the cancer types are selected from anal cancer, bladder cancer, colorectal cancer, esophageal cancer, head and neck cancer, liver/bile-duct cancer, lung cancer, lymphoma, ovarian cancer, pancreatic cancer, plasma cell neoplasm, and stomach cancer. In some embodiments, the cancer types are selected from thyroid cancer, melanoma, sarcoma, myeloid neoplasm, renal cancer, prostate cancer, breast cancer, uterine cancer, ovarian cancer, bladder cancer, urothelial cancer, cervical cancer, anorectal cancer, head & neck cancer, colorectal cancer, liver cancer, bile duct cancer, pancreatic cancer gallbladder cancer, upper GI cancer, multiple myeloma, lymphoid neoplasm, and lung cancer. In some embodiments, at 99% specificity the sensitivity of the method for head and neck cancer is at least 79% or at least 84%; at 99% specificity the sensitivity of the method for liver cancer is at least 82% or at least 85%; at 99% specificity the sensitivity of the method for upper GI tract cancer is at least 62% or at least 68%; wherein at 99% specificity the sensitivity of the method for pancreatic or gallbladder cancer is at least 62% or at least 68%; at 99% specificity the sensitivity of the method for colorectal cancer is at least 60% or at least 65%; at 99% specificity the sensitivity of the method for ovarian cancer is at least 75% or at least 80%; at 99% specificity the sensitivity of the method for lung cancer is at least 60% or at least 65%; at 99% specificity the sensitivity of the method for multiple myeloma is at least 68% or at least 75%; at 99% specificity the sensitivity of the method for lymphoid neoplasm is at least 65% or at least 70%; at 99% specificity the sensitivity of the method for anorectal cancer is at least 60% or at least 65%; and at 99% specificity the sensitivity of the method for bladder cancer is at least 40% or at least 44%. In some embodiments, the cancer classification is a presence or absence of a type of cancer. In some embodiments, the step of determining a cancer classification comprises: generating a test feature vector based on the set of sequence reads; and applying the test feature vector to a classifier. In some embodiments, the classifier comprises a model that is trained by a training process with a first cancer type set of converted DNA sequences from one or more training subjects with a first cancer type and a second cancer type set of converted DNA sequences from one or more training subjects with a second cancer type, wherein both the first cancer type set of converted DNA sequences and the second cancer type set of converted DNA sequences comprise a plurality of training converted DNA sequences. In some embodiments, the type of cancer is selected from the group consisting of head and neck cancer, liver/bile duct cancer, upper GI cancer, pancreatic/gallbladder cancer; colorectal cancer, ovarian cancer, lung cancer, multiple myeloma, lymphoid neoplasms, melanoma, sarcoma, breast cancer, and uterine cancer. In some embodiments, the type of cancer is head and neck cancer, and the method, at 99.0% specificity, has a sensitivity of at least 79% or at least 84%. the type of cancer is liver cancer, and the method, at 99.0% specificity, has a sensitivity of at least 82% or at least 85%. In some embodiments, the type of cancer is an upper GI tract cancer, and the method, at 99.0% specificity, has a sensitivity of at least 62% or at least 68%. In some embodiments, the type of cancer is a pancreatic or gallbladder cancer, and the method, at 99.0% specificity, has a sensitivity of at least 62% or at least 68%. In some embodiments, the type of cancer is colorectal cancer, and the method, at 99.0% specificity, has a sensitivity of at least 60% or at least 65%. In some embodiments, the type of cancer is ovarian cancer, and the method, at 99.0% specificity, has a sensitivity of at least 75% or at least 80%. In some embodiments, the type of cancer is lung cancer, and the method, at 99.0% specificity, has a sensitivity of at least 60% or at least 65%. In some embodiments, the type of cancer is multiple myeloma, and the method, at 99.0% specificity, has a sensitivity of at least 68% or at least 75%. In some embodiments, the type of cancer is a lymphoid neoplasm, and the method, at 99.0% specificity, has a sensitivity of at least 65% or at least 70%. In some embodiments, the type of cancer is anorectal cancer, and the method, at 99.0% specificity, has a sensitivity of at least 60% or at least 65%. In some embodiments, the type of cancer is bladder cancer, and the method, at 99.0% specificity, has a sensitivity of at least 40% or at least 44%. In some embodiments, the total size of the target genomic regions is less than 4 Mb, less than 2 Mb, less than 1 Mb, less than 0.7 Mb or less than 0.4 Mb. In some embodiments, the step of determining a cancer classification comprises:

[0036] generating a test feature vector based on the set of sequence reads; and applying the test feature vector to a model obtained by a training process with a cancer set of fragments from one or more training subjects with a cancer and a non-cancer set of fragments from one or more training subjects without cancer, wherein both the cancer set of fragments and the non-cancer set of fragments comprise a plurality of training fragments. In some embodiments, the training process comprises: obtaining sequence information of training fragments from a plurality of training subjects; for each training fragment, determining whether that training fragment is hypomethylated or hypermethylated, wherein each of the hypomethylated and hypermethylated training fragments comprises at least a threshold number of CpG sites with at least a threshold percentage of the CpG sites being unmethylated or methylated, respectively, for each training subject, generating a training feature vector based on the hypomethylated training fragments and hypermethylated training fragments, and training the model with the training feature vectors from the one or more training subjects without cancer and the training feature vectors from the one or more training subjects with cancer. In some embodiments, the training process comprises: obtaining sequence information of training fragments from a plurality of training subjects; for each training fragment, determining whether that training fragment is hypomethylated or hypermethylated, wherein each of the hypomethylated and hypermethylated training fragments comprises at least a threshold number of CpG sites with at least a threshold percentage of the CpG sites being unmethylated or methylated, respectively, for each of a plurality of CpG sites in a reference genome: quantifying a count of hypomethylated training fragments which overlap the CpG site and a count of hypermethylated training fragments which overlap the CpG site; and generating a hypomethylation score and a hypermethylation score based on the count of hypomethylated training fragments and hypermethylated training fragments; for each training fragment, generating an aggregate hypomethylation score based on the hypomethylation score of the CpG sites in the training fragment and an aggregate hypermethylation score based on the hypermethylation score of the CpG sites in the training fragment; for each training subject: ranking the plurality of training fragments based on aggregate hypomethylation score and ranking the plurality of training fragments based on aggregate hypermethylation score; and generating a feature vector based on the ranking of the training fragments; obtaining training feature vectors for one or more training subjects without cancer and training feature vectors for the one or more training subjects with cancer; and training the model with the feature vectors for the one or more training subjects without cancer and the feature vectors for the one or more training subjects with cancer. In some embodiments, the model comprises one of a kernel logistic regression classifier, a random forest classifier, a mixture model, a convolutional neural network, and an autoencoder model. In some embodiments, the method further comprises the steps of: obtaining a cancer probability for the test sample based on the model; and comparing the cancer probability to a threshold probability to determine whether the test sample is from a subject with cancer or without cancer. In some embodiments, the method further comprises the steps of: obtaining a cancer type probability for the test sample based on the model; and comparing the cancer type probability to a threshold probability to determine whether the test sample is from a subject with the cancer type or another cancer type or without cancer. In some embodiments, the method further comprises administering an anti-cancer agent to the subject.

[0037] Also provided herein are of treating a cancer patient, the method comprising:

[0038] administering an anti-cancer agent to a subject who has been identified as a cancer subject by a method provided above. In some embodiments, the anti-cancer agent is a chemotherapeutic agent selected from the group consisting of alkylating agents, antimetabolites, anthracyclines, anti-tumor antibiotics, cytoskeletal disruptors (taxans), topoisomerase inhibitors, mitotic inhibitors, corticosteroids, kinase inhibitors, nucleotide analogs, and platinum-based agents.

[0039] Also provided herein are methods of treating a cancer patient, the method comprising administering an anti-cancer agent to a subject who has been identified as a cancer subject by a method provided herein. In some embodiments, the anti-cancer agent is a chemotherapeutic agent selected from the group consisting of alkylating agents, antimetabolites, anthracyclines, anti-tumor antibiotics, cytoskeletal disruptors (taxans), topoisomerase inhibitors, mitotic inhibitors, corticosteroids, kinase inhibitors, nucleotide analogs, and platinum-based agents.

[0040] Also provided herein are methods for assessing whether a subject has a cancer, the method comprising: obtaining cfDNA from the subject; isolating a portion of the cfDNA from the subject by hybridization capture; obtaining sequence reads derived from the captured cfDNA to determine methylation states cfDNA fragments; applying a classifier to the sequence reads; and determining whether the subject has cancer based on application of the classifier; wherein the classifier has an area under the receiver operator characteristic curve of at least 0.80. In some embodiments, the method further comprises determining a cancer type, wherein the sensitivity of the method for head and neck cancer is at least 79% or at least 84%; wherein the sensitivity of the method for liver cancer is at least 82% or at least 85%; wherein the sensitivity of the method for upper GI tract cancer is at least 62% or at least 68%; wherein the sensitivity of the method for pancreatic or gallbladder cancer is at least 62% or at least 68%%; wherein the sensitivity of the method for colorectal cancer is at least 60% or at least 65%; wherein the sensitivity of the method for ovarian cancer is at least 75% or at least 80%; wherein the sensitivity of the method for lung cancer is at least 60% or at least 65%; wherein the sensitivity of the method for multiple myeloma is at least 68% or at least 75%; wherein the sensitivity of the method for lymphoid neoplasm is at least 65% or at least 70%; wherein the sensitivity of the method for anorectal cancer is at least 60% or at least 65%; and wherein the sensitivity of the method for bladder cancer is at least 40% or at least 44%. In some embodiments, the total size of the target genomic regions is less than 4 Mb, less than 2 Mb, less than 1 Mb, less than 0.7 Mb or less than 0.4 Mb. In some embodiments, the method further comprises converting unmethylated cytosines in the cfDNA to uracil prior to isolating the portion of the cfDNA from the subject by hybridization capture. In some embodiments, the method further comprises unmethylated cytosines in the cfDNA to uracil after isolating the portion of the cfDNA from the subject by hybridization capture. In some embodiments, the classifier is a binary classifier. In some embodiments, the classifier is a mixture model classifier. In some embodiments, isolating a portion of the cfDNA from the subject by hybridization capture comprises contacting the cell-free DNA with a bait set comprising a plurality of different oligonucleotide-containing probes. In some embodiments, the bait set is a bait set provided herein.

[0041] Also provided herein are methods comprising the steps of: obtaining a set of sequence reads of modified test fragments, wherein the modified test fragments are or have been obtained by processing a set of nucleic acid fragments from a test subject, wherein each of the nucleic acid fragments corresponds to or is derived from a plurality of genomic regions selected from any one of Lists 1-16; and applying the set of sequence reads or a test feature vector obtained based on the set of sequence reads to a model obtained by a training process with a first set of fragments from a plurality of training subjects with a first cancer type and a second set of fragments from a plurality of training subjects with a second cancer type, wherein both the first set of fragments and the second set of fragments comprise a plurality of training fragments.

[0042] In some embodiments, the model comprises one of a kernel logistic regression classifier, a random forest classifier, a mixture model, a convolutional neural network, and an autoencoder model. In some embodiments, the set of sequence reads is obtained by using an assay panel provided above.

### INCORPORATION BY REFERENCE

[0043] All publications, patents, and patent applications mentioned in this specification are herein incorporated by reference to the same extent as if each individual publication, patent, or patent application was specifically and individually indicated to be incorporated by reference.

### BRIEF DESCRIPTION OF THE DRAWINGS

[0044] The novel features of the disclosure are set forth with particularity in the appended claims. A better understanding of the features and advantages of the present disclosure will be obtained by reference to the following detailed description that sets forth illustrative embodiments, in which the principles of the disclosure are utilized, and the accompanying drawings of which:

[0045] FIG. 1A illustrates a 2× tiled probe design, with three probes targeting a small target region, where each base in a target region (boxed in the dotted rectangle) is covered by at least two probes, according to an embodiment.

[0046] FIG. 1B illustrates a 2× tiled probe design, with more than three probes targeting a larger target region, where each base in a target region (boxed in the dotted rectangle) is covered by at least two probes, according to an embodiment.

[0047] FIG. 1C illustrates probe design targeting hypomethylated and/or hypermethylated fragments in genomic regions, according to an embodiment.

[0048] FIG. 2 illustrates a process of generating a cancer assay panel, according to an embodiment.

[0049] FIG. 3A is a flowchart describing a process of creating a data structure for a control group, according to an embodiment.

[0050] FIG. 3B is a flowchart describing an additional step of validating the data structure for the control group of FIG. 3A, according to an embodiment.

[0051] FIG. 4 is a flowchart describing a process for selecting genomic regions for designing probes for a cancer assay panel, according to an embodiment.

[0052] FIG. 5 is an illustration of an example p-value score calculation, according to an embodiment.

[0053] FIG. 6A is a flowchart describing a process of training a classifier based on hypomethylated and hypermethylated fragments indicative of cancer, according to an embodiment.

[0054] FIG. 6B is a flowchart describing a process of identifying fragments indicative of cancer determined by probabilistic models, according to an embodiment.

[0055] FIG. 7A is a flowchart describing a process of sequencing a fragment of cell-free (cf) DNA, according to an embodiment.

[0056] FIG. 7B is an illustration of the process of FIG. 7A of sequencing a fragment of cell-free (cf) DNA to obtain a methylation state vector, according to an embodiment.

[0057] FIG. 8 illustrates extent of bisulfite conversion (upper panel) and mean coverage/sequencing depth (lower panel) across varying stages of cancer.

[0058] FIG. 9 illustrates concentration of cfDNA per sample across varying stages of cancer.

[0059] FIG. 10 is a graph of the amounts of DNA fragments binding to probes depending on the sizes of overlap between the DNA fragments and the probes.

[0060] FIG. 11A summarizes frequencies of genomic annotations of targeted genomic regions of List 1 (black) and randomly selected genomic regions (gray). FIG. 11B summarizes frequencies of genomic annotations of targeted genomic regions of List 2 (black) and randomly selected genomic regions (gray). FIG. 11C summarizes frequencies of genomic annotations of targeted genomic regions of List 3 (black) and randomly selected genomic regions (gray).

[0061] FIG. 12A illustrates a flowchart of devices for sequencing nucleic acid samples according to one embodiment. FIG. 12B illustrates an analytic system that analyzes methylation status of cfDNA according to one embodiment.

[0062] FIG. 13 is a shaded matrix presenting numbers of genomic regions selected for differentiating each target TOO (x-axis) from a contrast TOO (y-axis).

[0063] FIG. 14 provides data for verifying selected genomic regions using cfDNA and WBC gDNA. Fractions (y-axis) classifying each TOO (x-axis) correctly are provided.

[0064] FIG. 15A depicts a receiver operator curve (ROC) showing the sensitivity and specificity of cancer detection using methylation data for the target genomic regions of List 4. FIG. 15B is a confusion matrix depicting the accuracy of cancer type classifications for subjects determined to have cancer using methylation data for the target genomic regions of List 4.

[0065] FIG. 16A depicts a ROC showing the sensitivity and specificity of cancer detection using methylation data for the target genomic regions of List 5. FIG. 16B illustrates actual cancer type vs. predicted cancer type using a classifier generated with the genomic regions of List 5.

[0066] FIG. 17A depicts a ROC showing the sensitivity and specificity of cancer detection using methylation data for the target genomic regions of List 6. FIG. 17B illustrates actual cancer type vs. predicted cancer type using a classifier generated with the genomic regions of List 6.

[0067] FIG. 18A depicts a ROC showing the sensitivity and specificity of cancer detection using methylation data for the target genomic regions of List 7. FIG. 18B is a confusion matrix depicting the accuracy of cancer type classifications for subjects determined to have cancer using methylation data for the target of List 7.

[0068] FIG. 19A depicts a ROC showing the sensitivity and specificity of cancer detection using methylation data for the target genomic regions of List 8. FIG. 19B is a confusion matrix depicting the accuracy of cancer type classifications for subjects determined to have cancer using methylation data for the target of List 8.

[0069] FIG. 20A depicts a ROC showing the sensitivity and specificity of cancer detection using methylation data for the target genomic regions of List 9. FIG. 20B is a confusion matrix depicting the accuracy of cancer type classifications for subjects determined to have cancer using methylation data for the target of List 9.

[0070] FIG. 21A depicts a ROC showing the sensitivity and specificity of cancer detection using methylation data for the target genomic regions of List 10. FIG. 21B is a confusion matrix depicting the accuracy of cancer type classifications for subjects determined to have cancer using methylation data for the target of List 10.

[0071] FIG. 22A depicts a ROC showing the sensitivity and specificity of cancer detection using methylation data for the target genomic regions of List 11. FIG. 22B is a confusion matrix depicting the accuracy of cancer type classifications for subjects determined to have cancer using methylation data for the target of List 11.

[0072] FIG. 23A depicts a ROC showing the sensitivity and specificity of cancer detection using methylation data for the target genomic regions of List 12. FIG. 23B is a confusion matrix depicting the accuracy of cancer type classifications for subjects determined to have cancer using methylation data for the target of List 12.

[0073] FIG. 24A depicts a ROC showing the sensitivity and specificity of cancer detection using methylation data for the target genomic regions of List 13. FIG. 24B is a confusion matrix depicting the accuracy of cancer type classifications for subjects determined to have cancer using methylation data for the target of List 13.

[0074] FIG. 25A depicts a ROC showing the sensitivity and specificity of cancer detection using methylation data for the target genomic regions of List 14. FIG. 25B is a confusion matrix depicting the accuracy of cancer type classifications for subjects determined to have cancer using methylation data for the target of List 14.

[0075] FIG. 26A depicts a ROC showing the sensitivity and specificity of cancer detection using methylation data for the target genomic regions of List 15. FIG. 26B is a confusion matrix depicting the accuracy of cancer type classifications for subjects determined to have cancer using methylation data for the target of List 15.

[0076] FIG. 27A depicts a ROC showing the sensitivity and specificity of cancer detection using methylation data for the target genomic regions of List 16. FIG. 27B is a confusion matrix depicting the accuracy of cancer type classifications for subjects determined to have cancer using methylation data for the target of List 16.

[0077] FIG. 28A depicts a ROC showing the sensitivity and specificity of cancer detection using methylation data for a randomly selected subset of 10% of the target genomic regions of List 12.

[0078] FIG. 28B is a confusion matrix depicting the accuracy of cancer type classifications for subjects determined to have cancer using methylation data for a randomly selected subset of 10% of the target genomic regions of List 12.

[0079] FIG. 29A depicts a ROC showing the sensitivity and specificity of cancer detection using methylation data for a randomly selected subset of 25% of the target genomic regions of List 12.

[0080] FIG. 29B is a confusion matrix depicting the accuracy of cancer type classifications for subjects determined to have cancer using methylation data for a randomly selected subset of 25% of the target genomic regions of List 12.

[0081] FIG. 30A depicts a ROC showing the sensitivity and specificity of cancer detection using methylation data for a randomly selected subset of 50% of the target genomic regions of List 4.

[0082] FIG. 30B is a confusion matrix depicting the accuracy of cancer type classifications for subjects determined to have cancer using methylation data for a randomly selected subset of 50% of the target genomic regions of List 4.

### DETAILED DESCRIPTION

### Definitions

[0083] Unless defined otherwise, all technical and scientific terms used herein have the meaning commonly understood by a person skilled in the art to which this description belongs. As used herein, the following terms have the meanings ascribed to them below.

[0084] As used herein any reference to “one embodiment” or “an embodiment” means that a particular element, feature, structure, or characteristic described in connection with the embodiment is included in at least one embodiment. The appearances of the phrase “in one embodiment” in various places in the specification are not necessarily all referring to the same embodiment, thereby providing a framework for various possibilities of described embodiments to function together.

[0085] As used herein, the terms “comprises,” “comprising,” “includes,” “including,” “has,” “having” or any other variation thereof, are intended to cover a non-exclusive inclusion. For example, a process, method, article, or apparatus that comprises a list of elements is not necessarily limited to only those elements but may include other elements not expressly listed or inherent to such process, method, article, or apparatus. Further, unless expressly stated to the contrary, “or” refers to an inclusive or and not to an exclusive or. For example, a condition A or B is satisfied by any one of the following: A is true (or present) and B is false (or not present), A is false (or not present) and B is true (or present), and both A and B are true (or present).

[0086] In addition, use of the “a” or “an” are employed to describe elements and components of the embodiments herein. This is done merely for convenience and to give a general sense of the description. This description should be read to include one or at least one and the singular also includes the plural unless it is obvious that it is meant otherwise.

[0087] As used herein, ranges and amounts can be expressed as “about” a particular value or range. About also includes the exact amount. Hence “about 5 μg” means “about 5 μg” and also “5 μg.” Generally, the term “about” includes an amount that would be expected to be within experimental error. In some embodiments, “about” refers to the number or value recited, “+” or “−” 20%, 10%, or 5% of the number or value. Additionally, ranges recited herein are understood to be shorthand for all of the values within the range, inclusive of the recited endpoints. For example, a range of 1 to 50 is understood to include any number, combination of numbers, or sub-range from the group consisting of 1, 2, 3, 4, 5, 6, 7, 8, 9, 10, 11, 12, 13, 14, 15, 16, 17, 18, 19, 20, 21, 22, 23, 24, 25, 26, 27, 28, 29, 30, 31, 32, 33, 34, 35, 36, 37, 38, 39, 40, 41, 42, 43, 44, 45, 46, 47, 48, 49, and 50.

[0088] The term “methylation” as used herein refers to a process by which a methyl group is added to a DNA molecule. For example, a hydrogen atom on the pyrimidine ring of a cytosine base can be converted to a methyl group, forming 5-methylcytosine. The term also refers to a process by which a hydroxymethyl group is added to a DNA molecule, for example by oxidation of a methyl group on the pyrimidine ring of a cytosine base. Methylation and hydroxymethylation tend to occur at dinucleotides of cytosine and guanine referred to herein as “CpG sites.”

[0089] The term “methylation” can also refer to the methylation status of a CpG site. A CpG site with a 5-methylcytosine moiety is methylated. A CpG site with a hydrogen atom on the pyrimidine ring of the cytosine base is unmethylated.

[0090] Should also cover methylation status at a site, i.e., presence or absence of a methyl group. Where the presence of a methyl group is a methylated site/absence of a methyl group is an unmethylated site or non-methylated site.

[0091] In such embodiments, the wet laboratory assay used to detect methylation may vary from those described herein as is well known in the art.

[0092] The term “methylation site” as used herein refers to a region of a DNA molecule where a methyl group can be added. “CpG” sites are the most common methylation site, but methylation sites are not limited to CpG sites. For example, DNA methylation may occur in cytosines in CHG and CHH, where H is adenine, cytosine or thymine. Cytosine methylation in the form of 5-hydroxymethylcytosine may also assessed (see, e.g., WO 2010/037001 and WO 2011/127136, which are incorporated herein by reference), and features thereof, using the methods and procedures disclosed herein.

[0093] The term “CpG site” as used herein refers to a region of a DNA molecule where a cytosine nucleotide is followed by a guanine nucleotide in the linear sequence of bases along its 5′ to 3′ direction. “CpG” is a shorthand for 5′-C-phosphate-G-3′ that is cytosine and guanine separated by only one phosphate group. Cytosines in CpG dinucleotides can be methylated to form 5-methylcytosine.

[0094] The term “CpG detection site” as used herein refers to a region in a probe that is configured to hybridize to a CpG site of a target DNA molecule. The CpG site on the target DNA molecule can comprise cytosine and guanine separated by one phosphate group, where cytosine is methylated or unmethylated. The CpG site on the target DNA molecule can comprise uracil and guanine separated by one phosphate group, where the uracil is generated by the conversion of unmethylated cytosine.

[0095] The term “UpG” is a shorthand for 5′-U-phosphate-G-3′ that is uracil and guanine separated by only one phosphate group. UpG can be generated by a bisulfite treatment of a DNA that converts unmethylated cytosines to uracils. Cytosines can be converted to uracils by other methods known in the art, such as chemical modification, synthesis, or enzymatic conversion.

[0096] The term “hypomethylated” or “hypermethylated” as used herein refers to a methylation status of a DNA molecule containing multiple CpG sites (e.g., more than 3, 4, 5, 6, 7, 8, 9, 10, etc.) where a high percentage of the CpG sites (e.g., more than 80%, 85%, 90%, or 95%, or any other percentage within the range of 50%-100%) are unmethylated or methylated, respectively.

[0097] The terms “methylation state vector” or “methylation status vector” as used herein refers to a vector comprising multiple elements, where each element indicates the methylation status of a methylation site in a DNA molecule comprising multiple methylation sites, in the order they appear from 5′ to 3′ in the DNA molecule. For example, <Mₓ, Mₓ₊₁, Mₓ₊₂>, <Mₓ, Mₓ₊₁, Uₓ₊₂>, . . . , <Uₓ, Uₓ₊₁, Uₓ₊₂> can be methylation vectors for DNA molecules comprising three methylation sites, where M represents a methylated methylation site and U represents an unmethylated methylation site.

[0098] The term “abnormal methylation pattern” or “anomalous methylation pattern” as used herein refers to the methylation pattern of a DNA molecule or a methylation state vector that is expected to be found in a sample less frequently than a threshold value in a non-cancer or healthy sample. In a particular embodiment provided herein, the expectedness of finding a specific methylation state vector in a healthy control group comprising healthy individuals is represented by a p-value. A low p-value score generally corresponds to a methylation state vector which is relatively unexpected in comparison to other methylation state vectors within samples from healthy individuals. A high p-value score generally corresponds to a methylation state vector which is relatively more expected in comparison to other methylation state vectors found in samples from healthy individuals in the healthy control group. A methylation state vector having a p-value lower than a threshold value (e.g., 0.1, 0.01, 0.001, 0.0001, etc.) can be defined as an abnormal/anomalous methylation pattern. Various methods known in the art can be used to calculate a p-value or expectedness of a methylation pattern or a methylation state vector. Exemplary methods provided herein involve use of a Markov chain probability that assumes methylation statuses of CpG sites to be dependent on methylation statuses of neighboring CpG sites. Alternate methods provided herein calculate the expectedness of observing a specific methylation state vector in healthy individuals by utilizing a mixture model including multiple mixture components, each being an independent-sites model where methylation at each CpG site is assumed to be independent of methylation statuses at other CpG sites.

[0099] The term “cancerous sample” as used herein refers to a sample comprising genomic DNAs from an individual diagnosed with cancer. The genomic DNAs can be, but are not limited to, cfDNA fragments or chromosomal DNAs from a subject with cancer. The genomic DNAs can be sequenced and their methylation status can be assessed by methods known in the art, for example, bisulfite sequencing. When genomic sequences are obtained from public database (e.g., The Cancer Genome Atlas (TCGA)) or experimentally obtained by sequencing a genome of an individual diagnosed with cancer, cancerous sample can refer to genomic DNAs or cfDNA fragments having the genomic sequences. The term “cancerous samples” as a plural refers to samples comprising genomic DNAs from multiple individuals, each individual diagnosed with cancer. In various embodiments, cancerous samples from more than 100, 300, 500, 1,000, 2,000, 5,000, 10,000, 20,000, 40,000, 50,000, or more individuals diagnosed with cancer are used.

[0100] The term “non-cancerous sample” as used herein refers to a sample comprising genomic DNAs from an individual not diagnosed with cancer. The genomic DNAs can be, but are not limited to, cfDNA fragments or chromosomal DNAs from a subject without cancer. The genomic DNAs can be sequenced and their methylation status can be assessed by methods known in the art, for example, bisulfite sequencing. When genomic sequences are obtained from public database (e.g., The Cancer Genome Atlas (TCGA)) or experimentally obtained by sequencing a genome of an individual without cancer, non-cancerous sample can refer to genomic DNAs or cfDNA fragments having the genomic sequences. The term “non-cancerous samples” as a plural refers to samples comprising genomic DNAs from multiple individuals, each individual is without cancer. In various embodiments, cancerous samples from more than 100, 300, 500, 1,000, 2,000, 5,000, 10,000, 20,000, 40,000, 50,000, or more individuals without cancer are used.

[0101] The term “training sample” as used herein refers to a sample used to train a classifier described herein and/or to select one or more genomic regions for cancer detection or detecting a cancer tissue of origin or cancer cell type. The training samples can comprise genomic DNAs or a modification there of, from one or more healthy subjects and from one or more subjects having a disease condition (e.g., cancer, a specific type of cancer, a specific stage of cancer, etc.). The genomic DNAs can be, but are not limited to, cfDNA fragments or chromosomal DNAs. The genomic DNAs can be sequenced and their methylation status can be assessed by methods known in the art, for example, bisulfite sequencing. When genomic sequences are obtained from public database (e.g., The Cancer Genome Atlas (TCGA)) or experimentally obtained by sequencing a genome of an individual, a training sample can refer to genomic DNAs or cfDNA fragments having the genomic sequences.

[0102] The term “test sample” as used herein refers to a sample from a subject, whose health condition was, has been or will be tested using a classifier and/or an assay panel described herein. The test sample can comprise genomic DNAs or a modification there of. The genomic DNAs can be, but are not limited to, cfDNA fragments or chromosomal DNAs.

[0103] The term “target genomic region” as used herein refers to a region in a genome selected for analysis in test samples. An assay panel is generated with probes designed to hybridize to (and optionally pull down)nucleic acid fragments derived from the target genomic region or a fragment thereof. A nucleic acid fragment derived from the target genomic region refers to a nucleic acid fragment generated by degradation, cleavage, bisulfite conversion, or other processing of the DNA from the target genomic region.

[0104] Various target genomic regions are described according to their chromosomal location in the sequence listing filed herewith. Chromosomal DNA is double-stranded, so a target genomic region includes two DNA strands: one with the sequence provided in the listing and a second that is a reverse complement to the sequence in the listing. Probes can be designed to hybridize to one or both sequences. Optionally, probes hybridize to converted sequences resulting from, for example, treatment with sodium bisulfite.

[0105] The term “off-target genomic region” as used herein refers to a region in a genome which has not been selected for analysis in test samples but has sufficient homology to a target genomic region to potentially be bound and pulled down by a probe designed to target the target genomic region. In one embodiment, an off-target genomic region is a genomic region that aligns to a probe along at least 45 bp with at least a 90% match rate.

[0106] The terms “converted DNA molecules,” “converted cfDNA molecules,” and “modified fragment obtained from processing of the cfDNA molecules” refer to DNA molecules obtained by processing DNA or cfDNA molecules in a sample for the purpose of differentiating a methylated nucleotide and an unmethylated nucleotide in the DNA or cfDNA molecules. For example, in one embodiment, the sample can be treated with bisulfite ion (e.g., using sodium bisulfite), as is well-known in the art, to convert unmethylated cytosines (“C”) to uracils (“U”). In another embodiment, the conversion of unmethylated cytosines to uracils is accomplished using an enzymatic conversion reaction, for example, using a cytidine deaminase (such as APOBEC). After treatment, converted DNA molecules or cfDNA molecules include additional uracils which are not present in the original cfDNA sample. Replication by DNA polymerase of a DNA strand comprising a uracil results in addition of an adenine to the nascent complementary strand instead of the guanine normally added as the complement to a cytosine or methylcytosine.

[0107] The terms “cell free nucleic acid,” “cell free DNA,” or “cfDNA” refers to nucleic acid fragments that circulate in an individual's body (e.g., bloodstream) and originate from one or more healthy cells and/or from one or more cancerous cells. Additionally, cfDNA may come from other sources such as viruses, fetuses, etc.

[0108] The term “circulating tumor DNA” or “ctDNA” refers to nucleic acid fragments that originate from tumor cells, which may be released into an individual's bloodstream as result of biological processes such as apoptosis or necrosis of dying cells or actively released by viable tumor cells.

[0109] The term “fragment” as used herein can refer to a fragment of a nucleic acid molecule. For example, in one embodiment, a fragment can refer to a cfDNA molecule in a blood or plasma sample, or a cfDNA molecule that has been extracted from a blood or plasma sample. An amplification product of a cfDNA molecule may also be referred to as a “fragment.” In another embodiment, the term “fragment” refers to a sequence read, or set of sequence reads, that have been processed for subsequent analysis (e.g., for in machine-learning based classification), as described herein. For example, as is well known in the art, raw sequence reads can be aligned to a reference genome and matching paired end sequence reads assembled into a longer fragment for subsequent analysis.

[0110] The term “individual” refers to a human individual. The term “healthy individual” refers to an individual presumed not to have a cancer or disease.

[0111] The term “subject” refers to an individual whose DNA is being analyzed. A subject may be a test subject whose DNA is be evaluated using a targeted panel as described herein to evaluate whether the person has cancer or another disease. A subject may also be part of a control group known not to have cancer or another disease. A subject may also be part of a cancer or other disease group known to have cancer or another disease. Control and cancer/disease groups may be used to assist in designing or validating the targeted panel.

[0112] The term “sequence reads” as used herein refers to nucleotide sequences reads from a sample. Sequence reads can be obtained through various methods provided herein or as known in the art.

[0113] The term “sequencing depth” as used herein refers to the count of the number of times a given target nucleic acid within a sample has been sequenced (e.g., the count of sequence reads at a given target region). Increasing sequencing depth can reduce required amounts of nucleic acids required to assess a disease state (e.g., cancer or cancer tissue of origin).

[0114] The term “tissue of origin” or “TOO” as used herein refers to the organ, organ group, body region or cell type that a cancer arises or originates from. The identification of a tissue of origin or cancer cell type typically allows for identification of the most appropriate next steps in the care continuum of cancer to further diagnose, stage and decide on treatment.

[0115] The term “transition” generally refers to changes in base composition from one purine to another purine, or from one pyrimidine to another pyrimidine. For instance, the following changes are transitions: C→U, U→C, G→A, A→G, C→T, and T→C.

[0116] “An entirety of probes” of a panel or bait set or “an entirety of polynucleotide-containing probes” of a panel or bait set generally refers to all of the probes delivered with a specified panel or bait set. For instance, in some embodiments, a panel or bait set may include both (1) probes having features specified herein (e.g., probes for binding to cell-free DNA fragments corresponding to or derived from genomic regions set forth herein in one or more Lists) and (2) additional probes that do not contain such feature(s). The entirety of probes of a panel generally refers to all probes delivered with the panel or bait set, including such probes that do not contain the specified feature(s).

### Cancer Assay Panel

[0117] In a first aspect, the present description provides a cancer assay panel comprising a plurality of probes or a plurality of probe pairs. The assay panels described herein can alternatively be referred to as bait sets or as compositions comprising bait oligonucleotides. The probes can be polynucleotide-containing probes that are specifically designed to target one or more genomic regions differentially methylated between cancer and non-cancer samples, between different cancer tissue of origin (TOO) types, between different cancer cell types, between samples of different stages of cancer, as identified by methods provided herein. In some embodiments, the target genomic regions are selected to maximize classification accuracy, subject to a size budget (which is determined by sequencing budget and desired depth of sequencing).

[0118] For designing the cancer assay panel, an analytics system may collect samples corresponding to various outcomes under consideration, e.g., samples known to have cancer, samples considered to be healthy, samples from a known tissue of origin, etc. The sources of the cfDNA and/or ctDNA used to select target genomic regions can vary depending on the purpose of the assay. For example, different sources may be desirable for an assay intended to detect cancer generally, a specific type of cancer, a cancer stage, or a tissue of origin. These samples may be processed by whole-genome bisulfite sequencing (WGBS) or obtained from a public database (e.g., TCGA). The analytics system may be any generic computing system with a computer processor and a computer-readable storage medium with instructions for executing the computer processor to perform any or all operations described in this present disclosure.

[0119] The analytics system may then select target genomic regions based on methylation patterns of nucleic acid fragments. One approach considers pairwise distinguishability between pairs of outcomes for regions (or more specifically for CpG sites within regions). Another approach considers distinguishability for regions (or more specifically for CpG sites within regions) when considering each outcome against the remaining outcomes. From the selected target genomic regions with high distinguishability power, the analytics system may design probes to target fragments from the selected genomic regions. The analytics system may generate variable sizes of the cancer assay panel, e.g., where a small sized cancer assay panel includes probes targeting the most informative genomic regions, a medium sized cancer assay panel includes probes from the small sized cancer assay panel and additional probes targeting a second tier of informative genomic regions, and a large sized cancer assay panel includes probes from the small-sized and the medium-sized cancer assay panels along with even more probes targeting a third tier of informative genomic regions. With data obtained such cancer assay panels (e.g., the methylation status on nucleic acids derived from the cancer assay panels), the analytics system may train classifiers with various classification techniques to predict a sample's likelihood of having a particular outcome or state, e.g., cancer, specific cancer type, other disorder, other disease, etc.

[0120] Exemplary methodology for designing a cancer assay panel is generally described in FIG. 2. For instance, to design a cancer assay panel, an analytics system may collect information on the methylation status of CpG sites of nucleic acid fragments from samples corresponding to various outcomes under consideration, e.g., samples known to have cancer, samples considered to be healthy, samples from a known TOO, etc. These samples may be processed (e.g., with whole-genome bisulfite sequencing (WGBS)) to determine the methylation status of CpG sites, or the information may be obtained from TCGA. The analytics system may be any generic computing system with a computer processor and a computer-readable storage medium with instructions for executing the computer processor to perform any or all operations described in this present disclosure.

[0121] The analytics system may then select target genomic regions based on methylation patterns of nucleic acid fragments. One approach considers pairwise distinguishability between pairs of outcomes for regions (or more specifically CpG sites). Another approach considers distinguishability for regions (or more specifically CpG sites) when considering each outcome against the remaining outcomes. From the selected target genomic regions with high distinguishability power, the analytics system may design probes to target fragments from the selected genomic regions. The analytics system may generate variable sizes of the cancer assay panel, e.g., where a small sized cancer assay panel includes probes targeting the most informative genomic regions, a medium sized cancer assay panel includes probes from the small sized cancer assay panel and additional probes targeting a second tier of informative genomic regions, and a large sized cancer assay panel includes probes from the small-sized and the medium-sized cancer assay panels along with even more probes targeting a third tier of informative genomic regions. With such cancer assay panels, the analytics system may train classifiers with various classification techniques to predict a sample's likelihood of having a particular outcome or state, e.g., cancer, specific cancer type, other disorder, other disease, etc.

[0122] In some embodiments, the cancer assay panel comprises at least 500 pairs of probes, wherein each pair of the at least 500 pairs comprises two probes configured to overlap each other by an overlapping sequence, wherein the overlapping sequence comprises at least 30-nucleotides, and wherein each probe is configured to hybridize to the same strand of an (optionally converted) DNA molecule (e.g., a cfDNA molecule) corresponding to one or more genomic regions. In some embodiments, each of the genomic regions comprises at least five methylation sites, and wherein the at least five methylation sites have an abnormal methylation pattern in cancerous samples or a different methylation pattern between samples of a different TOO. For example, in one embodiment, the at least five methylation sites are differentially methylated either between cancerous and non-cancerous samples or between one or more pairs of samples from cancers with different tissue of origin. In some embodiments, each pair of probes comprises a first probe and a second probe, wherein the second probe differs from the first probe. The second probe can overlap with the first probe by an overlapping sequence that is at least 30, at least 40, at least 50, or at least 60 nucleotides in length.

[0123] The target genomic regions can be selected from any one of Lists 1-16 (TABLE 1) In some embodiments, the cancer assay panel comprises a plurality of probes, wherein each of the plurality of probes is configured to hybridize to a converted cfDNA molecule corresponding to one or more of the genomic regions in any one of Lists 1-16. In some embodiments, the plurality of different bait oligonucleotides are configured to hybridize to DNA molecules derived from at least 20% of the target genomic regions of any one of Lists 1-16. In some embodiments, the plurality of different bait oligonucleotides are configured to hybridize to DNA molecules derived from at least 30%, 40%, 50%, 60%, 70%, or 80% of the target genomic regions of any one of Lists 1-16.

[0124] The target genomic regions can be selected from List 1. The target genomic regions can be selected from List 2. The target genomic regions can be selected from List 3. The target genomic regions can be selected from List 4. The target genomic regions can be selected from List 5. The target genomic regions can be selected from List 6. The target genomic regions can be selected from List 7. The target genomic regions can be selected from List 8. The target genomic regions can be selected from List 9. The target genomic regions can be selected from List 10. The target genomic regions can be selected from List 11. The target genomic regions can be selected from List 12. The target genomic regions can be selected from List 13. The target genomic regions can be selected from List 14. The target genomic regions can be selected from List 15. The target genomic regions can be selected from List 16.

[0125] Since the probes are configured to hybridize to a converted DNA or cfDNA molecule corresponding to, or derived from, one or more genomic regions, the probes can have a sequence different from the targeted genomic region. For example, a DNA containing an unmethylated CpG site will be converted to include UpG instead of CpG because unmethylated cytosines are converted to uracils by a conversion reaction (e.g., bisulfite treatment). As a result, a probe is configured to hybridize to a sequence including UpG instead of a naturally-existing unmethylated CpG. Accordingly, a complementary site in the probe to the unmethylated site can comprise CpA instead of CpG, and some probes targeting a hypomethylated site where all methylation sites are unmethylated can have no guanine (G) bases. In some embodiments, at least 3%, 5%, 10%, 15%, or 20% of the probes comprise no CpG sequences.

[0126] The cancer assay panel can be used to detect the presence or absence of cancer generally and/or provide a cancer classification such as cancer type, stage of cancer such as I, II, III, or IV, or provide the TOO where the cancer is believed to originate. The panel may include probes targeting genomic regions differentially methylated between general cancerous (pan-cancer) samples and non-cancerous samples, or only in cancerous samples with a specific cancer type (e.g., lung cancer-specific targets). For example, in some embodiments, a cancer assay panel is designed to include differentially methylated genomic regions based on converted (e.g., bisulfite) sequencing data generated from the cfDNA from cancer and non-cancer individuals.

[0127] Each of the probes (or probe pairs) may be designed to target one or more target genomic regions. The target genomic regions can be selected based on several criteria designed to increase selective enriching of informative cfDNA fragments while decreasing noise and non-specific bindings.

[0128] In one example, a panel can include probes that can selectively bind to and enrich cfDNA fragments that are differentially methylated in cancerous samples. In this case, sequencing of the enriched fragments can provide information relevant to detection of cancer. Furthermore, in some embodiments, the probes (or a portion thereof) are designed to target genomic regions that are determined to have an abnormal methylation pattern in cancer samples, or in samples from certain cancer types, tissue types or cell types. In one embodiment, probes are designed to target genomic regions determined to be hypermethylated or hypomethylated in certain cancers or cancer types to provide additional selectivity and specificity of the detection. In some embodiments, a panel comprises probes targeting hypomethylated fragments. In some embodiments, a panel comprises probes targeting hypermethylated fragments. In some embodiments, a panel comprises both a first set of probes targeting hypermethylated fragments and a second set of probes targeting hypomethylated fragments. In some embodiments, a cancer assay panel includes not only probes that are designed to target a region that has a first methylation status (e.g., hypomethylation), but also includes probes that are designed to hybridize to the same target region with the opposite methylation status (e.g., hypermethylation). The targeting of probes to both hypo- and hyper-methylated fragments from the same regions can be referred to as “binary” targeting (see information in the Sequence Listing) (FIG. 1C). In some embodiments, the ratio between the first set of probes targeting hypermethylated fragments and the second set of probes targeting hypomethylated fragments (Hyper:Hypo ratio) ranges between 0.4 and 2, between 0.5 and 1.8, between 0.5 and 1.6, between 0.5 and 1.0, between 1.4 and 1.6, between 1.2 and 1.4, between 1 and 1.2, between 0.8 and 1, between 0.6 and 0.8 or between 0.4 and 0.6. Methods of identifying genomic regions (i.e., genomic regions giving rise to differentially methylated DNA molecules (or anomalously methylated DNA molecules) between cancer and non-cancer samples, between different cancer tissue of origin (TOO) types, between different cancer cell type, or between samples from different stages of cancer are provided in detail herein and methods of identifying anomalously methylated DNA molecules or fragments that are identified as indicative of cancer are also provided in detail herein.

[0129] In a second example, genomic regions can be selected when the genomic regions give rise to anomalously methylated DNA molecules in cancer samples or samples with known cancer tissue of origin (TOO) types. For example, as described herein, a Markov model trained on a set of non-cancerous samples can be used to identify genomic regions that give rise to anomalously methylated DNA molecules (i.e., DNA molecules having a methylation pattern below a p-value threshold).

[0130] Each of the probes can target a genomic region comprising at least 30 bp, 35 bp, 40 bp, 45 bp, 50 bp, 60 bp, 70 bp, 80 bp, 90 bp, 100 bp or more. In some embodiments, the genomic regions can be selected to have less than 30, 25, 20, 15, 12, 10, 8, or 6 methylation sites.

[0131] In some instances, the genomic regions can be selected when at least 80, 85, 90, 92, 95, or 98% of the at least five methylation (e.g., CpG) sites within the region are either methylated or unmethylated in non-cancerous or cancerous samples, or in cancer samples from a tissue of origin (TOO).

[0132] Genomic regions may be further filtered to select only those that are likely to be informative based on their methylation patterns, for example, CpG sites that are differentially methylated between cancerous and non-cancerous samples (e.g., abnormally methylated or unmethylated in cancer versus non-cancer), between cancerous samples of a TOO and cancerous samples of a different TOO, CpG sites that are differentially methylated only in cancerous samples of a TOO. For the selection, calculation can be performed with respect to each CpG or a plurality of CpG sites. For example, a first count can be determined that is the number of cancer-containing samples (cancer count) that include a fragment overlapping that CpG, and a second count is determined that is the number of total samples containing fragments overlapping that CpG site (total). Genomic regions can be selected based on criteria positively correlated to the number of cancer-containing samples (cancer count) that include a fragment indicative of cancer overlapping that CpG site, and inversely correlated with the number of total samples containing fragments indicative of cancer overlapping that CpG site (total). In one embodiment, the number of non-cancerous samples (nnon-cancer) and the number of cancerous samples (ncancer) having a fragment overlapping a CpG site are counted. Then the probability that a sample is cancer is estimated, for example as (ncancer+1)/(ncancer+nnon-cancer+2). This principle could be similarly applied to other outcomes.

[0133] CpG sites scored by this metric are ranked and greedily added to a panel until the panel size budget is exhausted. The process of selecting genomic regions indicative of cancer is further detailed herein. In some embodiments, different target regions may be selected depending on whether the assay is intended to be a pan-cancer assay or a single-cancer assay, or depending on what kind of flexibility is desired when picking which CpG sites are contributing to the panel. A panel for detecting a specific cancer type can be designed using a similar process. In this embodiment, for each cancer type, and for each CpG site, the information gain is computed to determine whether to include a probe targeting that CpG site. The information gain may be computed for samples with a given cancer type of a TOO compared to all other samples. For example, consider two random variables, “AF” and “CT”. “AF” is a binary variable that indicates whether there is an abnormal fragment overlapping a particular CpG site in a particular sample (yes or no). “CT” is a binary random variable indicating whether the cancer is of a particular type (e.g., lung cancer or cancer other than lung). One can compute the mutual information with respect to “CT” given “AF.” That is, how many bits of information about the cancer type (lung vs. non-lung in the example) are gained if one knows whether there is an anomalous fragment overlapping a particular CpG site. This can be used to rank CpG's based on how lung-specific they are. This procedure is repeated for a plurality of cancer types. If a particular region is commonly differentially methylated only in lung cancer (and not other cancer types or non-cancer), CpG's in that region would tend to have high information gains for lung cancer. For each cancer type, CpG sites are ranked by this information gain metric, and then greedily added to a panel until the size budget for that cancer type is exhausted.

[0134] Further filtration can be performed to select probes with high specificity for enrichment (i.e., high binding efficiency) of nucleic acids derived from targeted genomic regions. Probes can be filtered to reduce non-specific binding (or off-target binding) to nucleic acids derived from non-targeted genomic regions. For example, probes can be filtered to select only those probes having less than a set threshold of off-target binding events. In one embodiment, probes can be aligned to a reference genome (e.g., a human reference genome) to select probes that align to less than a set threshold of regions across the genome. For example, probes can be selected that align to less than 25, 24, 23, 22, 21, 20, 19, 18, 17, 16, 15, 14, 13, 12, 11, 10, 9 or 8 off-target regions across the reference genome. In other cases, filtration is performed to remove genomic regions when the sequence of the target genomic regions appears more than 5, 10, 15, 20, 21, 22, 23, 24, 25, 26, 27, 28, 29, 30, 31, 32, 33, 34 or 35 times in a genome. Further filtration can be performed to select target genomic regions when a probe sequence, or a set of probe sequences that are 90%, 91%, 92%, 93%, 94%, 95%, 96%, 97%, 98% or 99% homologous to the target genomic regions, appear less than 25, 24, 23, 22, 21, 20, 19, 18, 17, 16, 15, 14, 13, 12, 11, 10, 9 or 8 times in a reference genome, or to remove target genomic regions when the probe sequence, or a set of probe sequences designed to enrich for the targeted genomic region are 90%, 91%, 92%, 93%, 94%, 95%, 96%, 97%, 98% or 99% homologous to the target genomic regions, appear more than 5, 10, 15, 20, 21, 22, 23, 24, 25, 26, 27, 28, 29, 30, 31, 32, 33, 34 or 35 times in a reference genome. This is for excluding repetitive probes that can pull down off-target fragments, which are not desired and can impact assay efficiency.

[0135] In some embodiments, a fragment-probe overlap of at least 45 bp was demonstrated to be effective for achieving a non-negligible amount of pulldown (though as one of skill in the art would appreciate this number can very) as provided in Example 1. In some embodiments, more than a 10% mismatch rate between the probe and fragment sequences in the region of overlap is sufficient to greatly disrupt binding, and thus pulldown efficiency. Therefore, sequences that can align to the probe along at least 45 bp with at least a 90% match rate can be candidates for off-target pulldown. Thus, in one embodiment, the number of such regions are scored. The best probes have a score of 1, meaning they match in only one place (the intended target region). Probes with an intermediate score (say, less than 5 or 10) may in some instances be accepted, and in some instances any probes above a particular score are discarded. Other cutoff values can be used for specific samples.

[0136] Once the probes hybridize and capture DNA fragments corresponding to, or derived from, a target genomic region, the hybridized probe-DNA fragment intermediates are pulled down (or isolated), and the targeted DNA is amplified and sequenced. The sequence read provides information relevant for detection of cancer. For this end, a panel can be designed to include a plurality of probes that can capture fragments that can together provide information relevant to detection of cancer. In some embodiments, a panel includes at least 500, 1,000, 2,000, 2,500, 5,000, 6,000, 7,500, 10,000, 15,000, 20,000, 25,000, 30,000, 35,000, 40,000, 50,000, 60,000, 70,000, or 80,000 pairs of probes. In other embodiments, a panel includes at least 1,000, 2,000, 5,000, 10,000, 12,000, 15,000, 20,000, 30,000, 40,000, 50,000, 100,000, 200,000, 250,000, 300,000, 400,000, 500,000, 550,000, 600,000, 700,000, or 800,000 probes. The plurality of probes together can comprise at least 0.2 million, 0.4 million, 0.6 million, 0.8 million, 1 million, 2 million, 3 million, 4 million, 5 million, 6 million, 7 million, 8 million, 9 million, 10 million, 12 million, 14 million, 15 million, 20 million, or 25 million nucleotides.

[0137] The selected target genomic regions can be located in various positions in a genome, including but not limited to exons, introns, intergenic regions, and other parts. FIG. 11. In some embodiments, probes targeting non-human genomic regions, such as those targeting viral genomic regions, can be added.

[0138] In some instances, primers may be used to specifically amplify targets/biomarkers of interest (e.g., by PCR), thereby enriching the sample for desired targets/biomarkers (optionally without hybridization capture). For example, forward and reverse primers can be prepared for each genomic region of interest and used to amplify fragments that correspond to or are derived from the desired genomic region. Thus, while the present disclosure pays particular attention to cancer assay panels and bait sets for hybridization capture, the disclosure is broad enough to encompass other methods for enrichment of cell-free DNA. Accordingly, a skilled artisan, with the benefit of this disclosure, will recognize that methods analogous to those described herein in connection with hybridization capture can alternatively be accomplished by replacing hybridization capture with some other enrichment strategy, such as PCR amplification of cell-free DNA fragments that correspond with genomic regions of interest. In some embodiments, bisulfite padlock probe capture is used to enrich regions of interest, such as is described in Zhang et al. (US 2016/0340740). In some embodiments, additional or alternative methods are used for enrichment (e.g., non-targeted enrichment) such as reduced representation bisulfite sequencing, methylation restriction enzyme sequencing, methylation DNA immunoprecipitation sequencing, methyl-CpG-binding domain protein sequencing, methyl DNA capture sequencing, or microdroplet PCR.

### Probes

[0139] The cancer assay panels (alternatively referred to as “bait sets”) provided herein can be a panel that includes a set of hybridization probes (also referred to herein as “probes”) designed to, during enrichment, target and pull down nucleic acid fragments of interest for the assay. In some embodiments, the probes are designed to hybridize and enrich DNA or cfDNA molecules from cancerous samples that have been treated to convert unmethylated cytosines (C) to uracils (U). In other embodiments, the probes are designed to hybridize and enrich DNA or cfDNA molecules from cancerous samples of a TOO (or a plurality of TOOs) that have been treated to convert unmethylated cytosines (C) to uracils (U). The probes can be designed to anneal (or hybridize) to a target (complementary) strand of DNA or RNA. The target strand can be the “positive” strand (e.g., the strand transcribed into mRNA, and subsequently translated into a protein) or the complementary “negative” strand. In a particular embodiment, a cancer assay panel may include sets of two probes, one probe targeting the positive strand and the other probe targeting the negative strand of a target genomic region.

[0140] For each target genomic region, at least four possible probe sequences can be designed. Each target region is double-stranded, and as such, a probe or probe set can target either the “positive” or forward strand or its reverse complement (the “negative” strand). Additionally, in some embodiments, the probes or probe sets are designed to enrich DNA molecules or fragments that have been treated to convert unmethylated cytosines (C) to uracils (U). Because the probes or probe sets are designed to enrich DNA molecules corresponding to, or derived from the targeted regions after conversion, the probe's sequence can be designed to enrich DNA molecules of fragments where unmethylated C's have been converted to U's (by utilizing A's in place of G's at sites that are unmethylated cytosines in DNA molecules or fragments corresponding to, or derived from, the targeted region). In one embodiment, probes are designed to bind to, or hybridize to, DNA molecules or fragments from genomic regions known to contain cancer-specific methylation patterns (e.g., hypermethylated or hypomethylated DNA molecules), thereby enriching for cancer-specific DNA molecules or fragments. Targeting genomic regions, or cancer-specific methylation patterns, can be advantageous allowing one to specifically enrich for DNA molecules or fragments identified as informative for cancer or cancer TOO, and thus, lowering sequencing needs and sequencing costs. In other embodiments, two probe sequences can be designed per a target genomic region (one for each DNA strand). In still other cases, probes are designed to enrich for all DNA molecules or fragments corresponding to, or derived from, a targeted region (i.e., regardless of strand or methylation status). This might be because the cancer methylation status is not highly methylated or unmethylated, or because the probes are designed to target small mutations or other variations rather than methylation changes, with these other variations similarly indicative of the presence or absence of a cancer or the presence or absence of a cancer of one or more TOOs. In that case, all four possible probe sequences can be included per a target genomic region.

[0141] The probes can range in length from 10s, 100s, 200s, or 300s of base pairs. The probes can comprise at least 50, 75, 100, or 120 nucleotides. The probes can comprise less than 300, 250, 200, or 150 nucleotides. In an embodiment, the probes comprise 100-150 nucleotides. In one particular embodiment, the probes comprise 120 nucleotides.

[0142] In some embodiments, the probes are designed in a “2× tiled” fashion to cover overlapping portions of a target region. Each probe optionally overlaps in coverage at least partially with another probe in the library. In such embodiments, the panel contains multiple pairs of probes, with each probe in a pair overlapping the other by at least 25, 30, 35, 40, 45, 50, 60, 70, 75 or 100 nucleotides. In some embodiments, the overlapping sequence can be designed to be complementary to a target genomic region (or cfDNA derived therefrom) or to be complementary to a sequence with homology to a target region or cfDNA. Thus, in some embodiments, at least two probes are complementary to the same sequence within a target genomic region, and a nucleotide fragment corresponding to or derived from the target genomic region can be bound and pulled down by at least one of the probes. Other levels of tiling are possible, such as 3× tiling, 4× tiling, etc., wherein each nucleotide in a target region can bind to more than two probes.

[0143] In one embodiment, each base in a target genomic region is overlapped by exactly two probes, as illustrated in FIG. 1B. Probes that extend in both directions beyond a target genomic region are useful to pull down cfDNA fragments comprising a portion of the target genomic region and DNA sequences adjacent to the target genomic region. In some instances, even relatively small target regions may be targeted with three probes (see FIG. 1A). A probe set comprising three or more probes is optionally used to capture a larger genomic region (see FIG. 1B). In some embodiments, subsets of probes will collectively extend across an entire genomic region (e.g., may be complementary to non-converted or converted fragments from the genomic region). A tiled probe set optionally comprises probes that collectively include at least two probes that overlap every nucleotide in the genomic region. This is done to ensure that cfDNAs comprising a small portion of a target genomic region at one end will have a substantial overlap extending into the adjacent non-targeted genomic region with at least one probe, to provide for efficient capture.

[0144] For example, a 100 bp cfDNA fragment comprising a 30 nt target genomic region can be guaranteed to have at least 65 bp overlap with at least one of the overlapping probes. Other levels of tiling are possible. For example, to increase target size and add more probes in a panel, probes can be designed to expand a 30 bp target region by at least 70 bp, 65 bp, 60 bp, 55 bp, or 50 bp. To capture any fragment that overlaps the target region at all (even if by only 1 bp), the probes can be designed to extend past the ends of the target region on either side.

[0145] The probes are designed to analyze methylation status of target genomic regions (e.g., of the human or another organism) that are suspected to correlate with the presence or absence of cancer generally, presence or absence of certain types of cancers, cancer stage, or presence or absence of other types of diseases.

[0146] Furthermore, the probes are designed to effectively bind and pull down cfDNA fragments containing a target genomic region. In some embodiments, the probes are designed to cover overlapping portions of a target region, so that each probe is “tiled” in coverage such that each probe overlaps in coverage at least partially with another probe in the library. In such embodiments, the panel contains multiple pairs of probes, where each pair comprises at least two probes overlapping each other by an overlapping sequence of at least 25, 30, 35, 40, 45, 50, 60, 70, 75 or 100 nucleotides. In some embodiments, the overlapping sequence can be designed to be complementary to a target genomic region (or a converted version thereof), thus a nucleotide fragment derived from or containing the target genomic region can be bound and pulled down by at least one of the probes. Additionally, probes can be designed to cover both strands of a double-stranded cfDNA sequence.

[0147] In one embodiment, the smallest target genomic region is 30 or 31 bp. When a new target region is added to the panel (based on the greedy selection as described above), the new target region of 30 bp can be centered on a specific CpG site of interest. Then, it is checked whether each edge of this new target is close enough to other targets such that they can be merged. This is based on a “merge distance” parameter which can be 200 bp by default but can be tuned. This allows close but distinct target regions to be enriched with overlapping probes. Depending on whether close enough targets exist to the left or right of the new target, the new target can be merged with nothing (increasing the number of panel targets by one), merged with just one target either to the left or the right (not changing the number of panel targets), or merged with existing targets both to the left and right (reducing the number of panel targets by one).

### Methods of Selecting Target Genomic Regions

[0148] In another aspect, methods of selecting target genomic regions for detecting cancer and/or a TOO. The targeted genomic regions can be used to design and manufacture probes for a cancer assay panel. Methylation status of DNA or cfDNA molecules corresponding to, or derived from, the target genomic regions can be screened using the cancer assay panel. Alternative methods, for example by WGBS or other methods known in the art, can be also implemented to detect methylation status of DNA molecules or fragments corresponding to, or derived from, the target genomic regions.

### Sample Processing

[0149] FIG. 7A is a flowchart of a process 100 for processing a nucleic acid sample and generating methylation state vectors for DNA fragments, according to one embodiment. The method includes, but is not limited to, the following steps. For example, any step of the method may comprise a quantitation sub-step for quality control or other laboratory assay procedures known to one skilled in the art.

[0150] In step 105, a nucleic acid sample (DNA or RNA) is extracted from a subject. In the present disclosure, DNA and RNA may be used interchangeably unless otherwise indicated. That is, the embodiments described herein may be applicable to both DNA and RNA types of nucleic acid sequences. However, the examples described herein may focus on DNA for purposes of clarity and explanation. The sample may be any subset of the human genome, including the whole genome. The sample may include blood, plasma, serum, urine, fecal, saliva, other types of bodily fluids, or any combination thereof. In some embodiments, methods for drawing a blood sample (e.g., syringe or finger prick) may be less invasive than procedures for obtaining a tissue biopsy, which may require surgery. The extracted sample may comprise cfDNA and/or ctDNA. For healthy individuals, the human body may naturally clear out cfDNA and other cellular debris. If a subject has a cancer or disease, cfDNA and/or ctDNA in an extracted sample may be present at a detectable level for detecting the cancer or disease.

[0151] In step 110, the cfDNA fragments are treated to convert unmethylated cytosines to uracils. In one embodiment, the method uses a bisulfite treatment of the DNA which converts the unmethylated cytosines to uracils without converting the methylated cytosines. For example, a commercial kit such as the EZ DNA Methylation™—Gold, EZ DNA Methylation™—Direct or an EZ DNA Methylation™—Lightning kit (available from Zymo Research Corp (Irvine, Calif.)) is used for the bisulfite conversion. In another embodiment, the conversion of unmethylated cytosines to uracils is accomplished using an enzymatic reaction. For example, the conversion can use a commercially available kit for conversion of unmethylated cytosines to uracils, such as APOBEC-Seq (NEBiolabs, Ipswich, Mass.).

[0152] In step 115, a sequencing library is prepared. In a first step, a ssDNA adapter is added to the 3′-OH end of a bisulfite-converted ssDNA molecule using a ssDNA ligation reaction. In one embodiment, the ssDNA ligation reaction uses CircLigase II (Epicentre) to ligate the ssDNA adapter to the 3′-OH end of a bisulfite-converted ssDNA molecule, wherein the 5′-end of the adapter is phosphorylated and the bisulfite-converted ssDNA has been dephosphorylated (i.e., the 3′ end has a hydroxyl group). In another embodiment, the ssDNA ligation reaction uses Thermostable 5′ AppDNA/RNA ligase (available from New England BioLabs (Ipswich, Mass.)) to ligate the ssDNA adapter to the 3′-OH end of a bisulfite-converted ssDNA molecule. In this example, the first UMI adapter is adenylated at the 5′-end and blocked at the 3′-end. In another embodiment, the ssDNA ligation reaction uses a T4 RNA ligase (available from New England BioLabs) to ligate the ssDNA adapter to the 3′-OH end of a bisulfate-converted ssDNA molecule. In a second step, a second strand DNA is synthesized in an extension reaction. For example, an extension primer, that hybridizes to a primer sequence included in the ssDNA adapter, is used in a primer extension reaction to form a double-stranded bisulfate-converted DNA molecule. Optionally, in one embodiment, the extension reaction uses an enzyme that is able to read through uracil residues in the bisulfate-converted template strand. Optionally, in a third step, a dsDNA adapter is added to the double-stranded bisulfate-converted DNA molecule. Finally, the double-stranded bisulfate-converted DNA is amplified to add sequencing adapters. For example, PCR amplification using a forward primer that includes a P5 sequence and a reverse primer that includes a P7 sequence is used to add P5 and P7 sequences to the bisulfate-converted DNA. Optionally, during library preparation, unique molecular identifiers (UMI) may be added to the nucleic acid molecules (e.g., DNA molecules) through adapter ligation. The UMIs are short nucleic acid sequences (e.g., 4-10 base pairs) that are added to ends of DNA fragments during adapter ligation. In some embodiments, UMIs are degenerate base pairs that serve as a unique tag that can be used to identify sequence reads originating from a specific DNA fragment. During PCR amplification following adapter ligation, the UMIs are replicated along with the attached DNA fragment, which provides a way to identify sequence reads that came from the same original fragment in downstream analysis.

[0153] In step 120, targeted DNA sequences may be enriched from the library. This is used, for example, where a targeted panel assay is being performed on the samples. During enrichment, hybridization probes (also referred to herein as “probes”) are used to target, and pull down, nucleic acid fragments informative for the presence or absence of cancer (or disease), cancer status, or a cancer classification (e.g., cancer type or tissue of origin). For a given workflow, the probes may be designed to anneal (or hybridize) to a target (complementary) strand of DNA or RNA. The target strand may be the “positive” strand (e.g., the strand transcribed into mRNA, and subsequently translated into a protein) or the complementary “negative” strand. The probes may range in length from 10s, 100s, or 1000s of base pairs. Moreover, the probes may cover overlapping portions of a target region.

[0154] After a hybridization step 120, the hybridized nucleic acid fragments are captured and may also be amplified using PCR (enrichment 125). For example, the target sequences can be enriched to obtain enriched sequences that can be subsequently sequenced. In general, any known method in the art can be used to isolate, and enrich for, probe-hybridized target nucleic acids. For example, as is well known in the art, a biotin moiety can be added to the 5′-end of the probes (i.e., biotinylated) to facilitate isolation of target nucleic acids hybridized to probes using a streptavidin-coated surface (e.g., streptavidin-coated beads).

[0155] In step 130, sequence reads are generated from the enriched DNA sequences, e.g., enriched sequences. Sequencing data may be acquired from the enriched DNA sequences by known means in the art. For example, the method may include next generation sequencing (NGS) techniques including synthesis technology (Illumina), pyrosequencing (454 Life Sciences), ion semiconductor technology (Ion Torrent sequencing), single-molecule real-time sequencing (Pacific Biosciences), sequencing by ligation (SOLiD sequencing), nanopore sequencing (Oxford Nanopore Technologies), or paired-end sequencing. In some embodiments, massively parallel sequencing is performed using sequencing-by-synthesis with reversible dye terminators.

[0156] In step 140, methylation state vectors are generated from the sequence reads. To do so, a sequence read is aligned to a reference genome. The reference genome helps provide the context as to what position in a human genome the fragment cfDNA originates from. In a simplified example, the sequence read is aligned such that the three CpG sites correlate to CpG sites 23, 24, and 25 (arbitrary reference identifiers used for convenience of description). After alignment, there is information both on methylation status of all CpG sites on the cfDNA fragment and which position in the human genome the CpG sites map to. With the methylation status and location, a methylation state vector may be generated for the fragment cfDNA.

### Generation of Data Structure

[0157] FIG. 3A is a flowchart describing a process 300 of generating a data structure for a healthy control group, according to an embodiment. To create a healthy control group data structure, the analytics system obtains information related to methylation status of a plurality of CpG sites on sequence reads derived from a plurality of DNA molecules or fragments from a plurality of healthy subjects. The method provided herein for creating a healthy control group data structure can be performed similarly for subjects with cancer, subjects with cancer of a TOO, subjects with a known cancer type, or subjects with another known disease state. A methylation state vector is generated for each DNA molecule or fragment, for example via the process 100.

[0158] The analytics system subdivides 310 the methylation state vector of each DNA fragment into strings of CpG sites. In one embodiment, the analytics system subdivides 310 the methylation state vector such that the resulting strings are all less than a given length. For example, a methylation state vector of length 11 may be subdivided into strings of length less than or equal to 3 would result in 9 strings of length 3, 10 strings of length 2, and 11 strings of length 1. In another example, a methylation state vector of length 7 being subdivided into strings of length less than or equal to 4 would result in 4 strings of length 4, 5 strings of length 3, 6 strings of length 2, and 7 strings of length 1. If the methylation state vector resulting from a DNA fragment is shorter than or the same length as the specified string length, then the methylation state vector may be converted into a single string containing all CpG sites of the vector.

[0159] The analytics system tallies 320 the strings by counting, for each possible CpG site and possibility of methylation states in the vector, the number of strings present in the control group having the specified CpG site as the first CpG site in the string and having that possibility of methylation states. For a string length of three at a given CpG site, there are 2\hat{ }3 or 8 possible string configurations. For each CpG site, the analytics system tallies 320 how many occurrences of each possible methylation state vector appear in the control group. This may involve tallying the following quantities: <Mₓ, Mₓ₊₁, Mₓ₊₂>, <Mₓ, Mₓ₊₁, Uₓ₊₂>, . . . , <Uₓ, Uₓ₊₁, Uₓ₊₂> for each starting CpG site in the reference genome. The analytics system creates 330 a data structure storing the tallied counts for each starting CpG site and string possibility at each starting CpG.

[0160] There are several benefits to setting an upper limit on string length. First, depending on the maximum length for a string, the size of the data structure created by the analytics system can dramatically increase in size. For instance, a maximum string length of 4 means that there are at most 2\hat{ }4 numbers to tally at every CpG. Increasing the maximum string length to 5 doubles the possible number of methylation states to tally. Reducing string size helps reduce the computational and data storage burden of the data structure. In some embodiments, the string size is 3. In some embodiments, the string size is 4. A second reason to limit the maximum string length is to avoid overfitting downstream models. Calculating probabilities based on long strings of CpG sites can be problematic if the long CpG strings do not have a strong biological effect on the outcome (e.g., predictions of anomalousness that predictive of the presence of cancer), as it requires a significant amount of data that may not be available, and would thus be too sparse for a model to perform appropriately. For example, calculating a probability of anomalousness/cancer conditioned on the prior 100 CpG sites would require counts of strings in the data structure of length 100, ideally some matching exactly the prior 100 methylation states. If only sparse counts of strings of length 100 are available, there will be insufficient data to determine whether a given string of length of 100 in a test sample is anomalous or not.

### Validation of Data Structure

[0161] Once the data structure has been created, the analytics system may seek to validate 340 the data structure and/or any downstream models making use of the data structure.

[0162] This first type of validation ensures that potential cancerous samples are removed from the healthy control group so as to not affect the control group's purity. This type of validation checks consistency within the control group's data structure. For example, the healthy control group may contain a sample from an individual with an undiagnosed cancer that contains a plurality of anomalously methylated fragments. The analytics system may perform various calculations to determine whether to exclude data from a subject with apparently undiagnosed cancer.

[0163] A second type of validation checks the probabilistic model used to calculate p-values with the counts from the data structure itself (i.e., from the healthy control group). A process for p-value calculation is described below in conjunction with FIG. 5. Once the analytics system generates a p-value for the methylation state vectors in the validation group, the analytics system builds a cumulative density function (CDF) with the p-values. With the CDF, the analytics system may perform various calculations on the CDF to validate the control group's data structure. One test uses the fact that the CDF should ideally be at or below an identity function, such that CDF(x)≤x. On the converse, being above the identity function reveals some deficiency within the probabilistic model used for the control group's data structure. For example, if 1/100 of fragments have a p-value score of 1/1000 meaning CDF( 1/1000)= 1/100> 1/1000, then the second type of validation fails indicating an issue with the probabilistic model. See e.g., U.S. application Ser. No. 16/352,602, published as U.S. Publ. No. 2019/0287652, which is hereby incorporated by reference in its entirety.

[0164] A third type of validation uses a healthy set of validation samples separate from those used to build the data structure. This tests if the data structure is properly built and the model works. An exemplary process for carrying out this type of validation is described below in conjunction with FIG. 3B. The third type of validation can quantify how well the healthy control group generalizes the distribution of healthy samples. If the third type of validation fails, then the healthy control group does not generalize well to the healthy distribution.

[0165] A fourth type of validation tests with samples from a non-healthy validation group. The analytics system calculates p-values and builds the CDF for the non-healthy validation group. With a non-healthy validation group, the analytics system expects to see the CDF(x)>x for at least some samples or, stated differently, the converse of what was expected in the second type of validation and the third type of validation with the healthy control group and the healthy validation group. If the fourth type of validation fails, then this is indicative that the model is not appropriately identifying the anomalousness that it was designed to identify.

[0166] FIG. 3B is a flowchart describing the additional step 340 of validating the data structure for the control group of FIG. 3A, according to an embodiment. In this embodiment of the step 340 of validating the data structure, the analytics system performs the fourth type of validation test as described above which utilizes a validation group with a supposedly similar composition of subjects, samples, and/or fragments as the control group. For example, if the analytics system selected healthy subjects without cancer for the control group, then the analytics system also uses healthy subjects without cancer in the validation group.

[0167] The analytics system takes the validation group and generates 100 a set of methylation state vectors as described in FIG. 3A. The analytics system performs a p-value calculation for each methylation state vector from the validation group. The p-value calculation process will be further described in conjunction with FIGS. 4-5. For each possible methylation state vector, the analytics system calculates a probability from the control group's data structure. Once the probabilities are calculated for the possibilities of methylation state vectors, the analytics system calculates 350 a p-value score for that methylation state vector based on the calculated probabilities. The p-value score represents an expectedness of finding that specific methylation state vector and other possible methylation state vectors having even lower probabilities in the control group. A low p-value score, thereby, generally corresponds to a methylation state vector which is relatively unexpected in comparison to other methylation state vectors within the control group, whereas a high p-value score generally corresponds to a methylation state vector which is relatively more expected in comparison to other methylation state vectors found in the control group. Once the analytics system generates a p-value score for the methylation state vectors in the validation group, the analytics system builds 360 a cumulative density function (CDF) with the p-value scores from the validation group. The analytics system validates 370 consistency of the CDF as described above in the fourth type of validation tests.

### Anomalously Methylated Fragments

[0168] Anomalously methylated fragments having abnormal methylation patterns in cancer patient samples, subject with cancer of a TOO, subjects with a known cancer type, or subjects with another known disease state, are selected as target genomic regions, according to an embodiment as outlined in FIG. 4. Exemplary processes of selected anomalously methylated fragments 440 are visually illustrated in FIG. 5 and is further described below the description of FIG. 4. In process 400, the analytics system generates 100 methylation state vectors from cfDNA fragments of the sample. The analytics system handles each methylation state vector as follows.

[0169] For a given methylation state vector, the analytics system enumerates 410 all possibilities of methylation state vectors having the same starting CpG site and same length (i.e., set of CpG sites) in the methylation state vector. As each methylation state may be methylated or unmethylated there are only two possible states at each CpG site, and thus the count of distinct possibilities of methylation state vectors depends on a power of 2, such that a methylation state vector of length n would be associated with 2ⁿ possibilities of methylation state vectors.

[0170] The analytics system calculates 420 the probability of observing each possibility of methylation state vector for the identified starting CpG site/methylation state vector length by accessing the healthy control group data structure. In one embodiment, calculating the probability of observing a given possibility uses a Markov chain probability to model the joint probability calculation which will be described in greater detail with respect to FIG. 5 below. In other embodiments, calculation methods other than Markov chain probabilities are used to determine the probability of observing each possibility of methylation state vector.

[0171] The analytics system calculates 430 a p-value score for the methylation state vector using the calculated probabilities for each possibility. In one embodiment, this includes identifying the calculated probability corresponding to the possibility that matches the methylation state vector in question. Specifically, this is the possibility having the same set of CpG sites, or similarly the same starting CpG site and length as the methylation state vector. The analytics system sums the calculated probabilities of any possibilities having probabilities less than or equal to the identified probability to generate the p-value score.

[0172] This p-value represents the probability of observing the methylation state vector of the fragment or other methylation state vectors even less probable in the healthy control group. A low p-value score, thereby, generally corresponds to a methylation state vector which is rare in a healthy subject, and which causes the fragment to be labeled abnormally methylated, relative to the healthy control group. A high p-value score generally relates to a methylation state vector is expected to be present, in a relative sense, in a healthy subject. If the healthy control group is a non-cancerous group, for example, a low p-value indicates that the fragment is abnormally methylated relative to the non-cancer group, and therefore possibly indicative of the presence of cancer in the test subject.

[0173] As above, the analytics system calculates p-value scores for each of a plurality of methylation state vectors, each representing a cfDNA fragment in the test sample. To identify which of the fragments are abnormally methylated, the analytics system may filter 440 the set of methylation state vectors based on their p-value scores. In one embodiment, filtering is performed by comparing the p-values scores against a threshold and keeping only those fragments below the threshold. This threshold p-value score could be on the order of 0.1, 0.01, 0.001, 0.0001, or similar.

[0174] P-Value Score Calculation

[0175] FIG. 5 is an illustration 500 of an example p-value score calculation, according to an embodiment. To calculate a p-value score given a test methylation state vector 505, the analytics system takes that test methylation state vector 505 and enumerates 410 possibilities of methylation state vectors. In this illustrative example, the test methylation state vector 505 is <M₂₃, M₂₄, M₂₅, U₂₆>. As the length of the test methylation state vector 505 is 4, there are 2\hat{ }4 possibilities of methylation state vectors encompassing CpG sites 23-26. In a generic example, the number of possibilities of methylation state vectors is 2\hat{ }n, where n is the length of the test methylation state vector or alternatively the length of the sliding window (described further below).

[0176] The analytics system calculates 420 probabilities 515 for the enumerated possibilities of methylation state vectors. As methylation is conditionally dependent on methylation status of nearby CpG sites, one way to calculate the probability of observing a given methylation state vector possibility is to use Markov chain model. Generally, a methylation state vector such as <S₁, S₂, . . . , Sₙ>, where S denotes the methylation state whether methylated (denoted as M), unmethylated (denoted as U), or indeterminate (denoted as I), has a joint probability that can be expanded using the chain rule of probabilities as:

P(<S₁,S₂, . . . ,Sₙ>)=P(Sₙ|S₁, . . . ,Sₙ₋₁>)*P(Sₙ₋₁|S₁, . . . ,Sₙ₋₂>)* . . . *P(S₂|S₁)*P(S₁) (1)

Markov chain model can be used to make the calculation of the conditional probabilities of each possibility more efficient. In one embodiment, the analytics system selects a Markov chain order k which corresponds to how many prior CpG sites in the vector (or window) to consider in the conditional probability calculation, such that the conditional probability is modeled as P(Sₙ|S₁, . . . , Sₙ₋₁)˜P(Sₙ|Sₙ₋ₖ₋₂, . . . , Sₙ₋₁).

[0177] To calculate each Markov modeled probability for a possibility of methylation state vector, the analytics system accesses the control group's data structure, specifically the counts of various strings of CpG sites and states. To calculate P(Mₙ|Sₙ₋ₖ₋₂, . . . , Sₙ₋₁), the analytics system takes a ratio of the stored count of the number of strings from the data structure matching <Sₙ₋ₖ₋₂, . . . , Sₙ₋₁, Mₙ> divided by the sum of the stored count of the number of strings from the data structure matching <Sₙ₋ₖ₋₂, . . . , Sₙ₋₁, Mₙ> and <Sₙ₋ₖ₋₂, . . . , Sₙ₋₁, Uₙ>. Thus, P(Mₙ|Sₙ₋ₖ₋₂, . . . , Sₙ₋₁), is calculated ratio having the form:

$$\frac{\# of \text{<} {S}_{n - k - 2} , …… , {S}_{n - 1} , {M}_{n} \text{>}}{\begin{matrix}\# of \text{<} {S}_{n - k - 2} , …… , {S}_{n - 1} , {M}_{n} \text{>} + \\ \# of \text{<} {S}_{n - k - 2} , …… , {S}_{n - 1} , {U}_{n} \text{>}\end{matrix}} \qquad ( 2 )$$

[0178] The calculation may additionally implement a smoothing of the counts by applying a prior distribution. In one embodiment, the prior distribution is a uniform prior as in Laplace smoothing. As an example of this, a constant is added to the numerator and another constant (e.g., twice the constant in the numerator) is added to the denominator of the above equation. In other embodiments, an algorithmic technique such as Knesser-Ney smoothing is used.

[0179] In the illustration, the above denoted formulas are applied to the test methylation state vector 505 covering sites 23-26. Once the calculated probabilities 515 are completed, the analytics system calculates 430 a p-value score 525 that sums the probabilities that are less than or equal to the probability of possibility of methylation state vector matching the test methylation state vector 505.

[0180] In one embodiment, the computational burden of calculating probabilities and/or p-value scores may be further reduced by caching at least some calculations. For example, the analytic system may cache in transitory or persistent memory calculations of probabilities for possibilities of methylation state vectors (or windows thereof). If other fragments have the same CpG sites, caching the possibility probabilities allows for efficient calculation of p-value scores without needing to re-calculate the underlying possibility probabilities. Equivalently, the analytics system may calculate p-value scores for each of the possibilities of methylation state vectors associated with a set of CpG sites from vector (or window thereof). The analytics system may cache the p-value scores for use in determining the p-value scores of other fragments including the same CpG sites. Generally, the p-value scores of possibilities of methylation state vectors having the same CpG sites may be used to determine the p-value score of a different one of the possibilities from the same set of CpG sites.

[0181] Sliding Window

[0182] In one embodiment, the analytics system uses 435 a sliding window to determine possibilities of methylation state vectors and calculate p-values. Rather than enumerating possibilities and calculating p-values for entire methylation state vectors, the analytics system enumerates possibilities and calculates p-values for only a window of sequential CpG sites, where the window is shorter in length (of CpG sites) than at least some fragments (otherwise, the window would serve no purpose). The window length may be static, user determined, dynamic, or otherwise selected.

[0183] In calculating p-values for a methylation state vector larger than the window, the window identifies the sequential set of CpG sites from the vector within the window starting from the first CpG site in the vector. The analytic system calculates a p-value score for the window including the first CpG site. The analytics system then “slides” the window to the second CpG site in the vector, and calculates another p-value score for the second window. Thus, for a window size l and methylation vector length m, each methylation state vector will generate m−l+1 p-value scores. After completing the p-value calculations for each portion of the vector, the lowest p-value score from all sliding windows is taken as the overall p-value score for the methylation state vector. In another embodiment, the analytics system aggregates the p-value scores for the methylation state vectors to generate an overall p-value score.

[0184] Using the sliding window helps to reduce the number of enumerated possibilities of methylation state vectors and their corresponding probability calculations that would otherwise need to be performed. Example probability calculations are shown in FIG. 5, but generally the number of possibilities of methylation state vectors increases exponentially by a factor of 2 with the size of the methylation state vector. To give a realistic example, it is possible for fragments to have upwards of 54 CpG sites. Instead of computing probabilities for 2\hat{ }54 (˜1.8×10\hat{ }16) possibilities to generate a single p-value, the analytics system can instead use a window of size 5 (for example) which results in 50 p-value calculations for each of the 50 windows of the methylation state vector for that fragment. Each of the 50 calculations enumerates 2\hat{ }5 (32) possibilities of methylation state vectors, which total results in 50×2\hat{ }5 (1.6×10\hat{ }3) probability calculations. This results in a vast reduction of calculations to be performed, with no meaningful hit to the accurate identification of anomalous fragments. This additional step can also be applied when validating 340 the control group with the validation group's methylation state vectors.

### Identifying Fragments Indicative of Cancer

[0185] The analytics system identifies 450 DNA fragments indicative of cancer from the filtered set of anomalously methylated fragments.

[0186] Hypomethylated and Hypermethylated Fragments

[0187] According to a first method, the analytics system may identify DNA fragments that are deemed hypomethylated or hypermethylated as fragments indicative of cancer from the filtered set of anomalously methylated fragments. Hypomethylated and hypermethylated fragments can be defined as fragments of a certain length of CpG sites (e.g., more than 3, 4, 5, 6, 7, 8, 9, 10, etc.) with a high percentage of methylated CpG sites (e.g., more than 80%, 85%, 90%, or 95%, or any other percentage within the range of 50%-100%) or a high percentage of unmethylated CpG sites (e.g., more than 80%, 85%, 90%, or 95%, or any other percentage within the range of 50%-100%).

[0188] Probabilistic Models

[0189] According to a method described herein, the analytics system identifies fragments indicative of cancer utilizing probabilistic models of methylation patterns fitted to each cancer type and non-cancer type. The analytics system calculates log-likelihood ratios for a sample using DNA fragments in the genomic regions considering the various cancer types with the fitted probabilistic models for each cancer type and non-cancer type. The analytics system may determine a DNA fragment to be indicative of cancer based on whether at least one of the log-likelihood ratios considered against the various cancer types is above a threshold value.

[0190] In one embodiment of partitioning the genome, the analytics system partitions the genome into regions by multiple stages. In a first stage, the analytics system separates the genome into blocks of CpG sites. Each block is defined when there is a separation between two adjacent CpG sites that exceeds some threshold, e.g., greater than 200 bp, 300 bp, 400 bp, 500 bp, 600 bp, 700 bp, 800 bp, 900 bp, or 1,000 bp. From each block, the analytics system subdivides at a second stage each block into regions of a certain length, e.g., 500 bp, 600 bp, 700 bp, 800 bp, 900 bp, 1,000 bp, 1,100 bp, 1,200 bp, 1,300 bp, 1,400 bp, or 1,500 bp. The analytics system may further overlap adjacent regions by a percentage of the length, e.g., 10%, 20%, 30%, 40%, 50%, or 60%.

[0191] The analytics system analyzes sequence reads derived from DNA fragments for each region. The analytics system may process samples from tissue and/or high-signal cfDNA. High-signal cfDNA samples may be determined by a binary classification model, by cancer stage, or by another metric.

[0192] For each cancer type and non-cancer, the analytics system fits a separate probabilistic model for fragments. In one example, each probabilistic model is mixture model comprising a combination of a plurality of mixture components with each mixture component being an independent-sites model where methylation at each CpG site is assumed to be independent of methylation statuses at other CpG sites.

[0193] In alternate embodiments, calculation is performed with respect to each CpG site. Specifically, a first count is determined that is the number of cancerous samples (cancer count) that include an anomalously methylated DNA fragment overlapping that CpG, and a second count is determined that is the total number of samples containing fragments overlapping that CpG (total) in the set. Genomic regions can be selected based on the numbers, for example, based on criteria positively correlated to the number of cancerous samples (cancer count) that include a DNA fragment overlapping that CpG, and inversely correlated to the total number of samples containing fragments overlapping that CpG (total) in the set.

[0194] Cancer of various types having different TOO can be selected from the group consisting of: breast cancer, uterine cancer, cervical cancer, ovarian cancer, bladder cancer, urothelial cancer of renal pelvis, renal cancer other than urothelial, prostate cancer, anorectal cancer, anal cancer, colorectal cancer, hepatobiliary cancer arising from hepatocytes, hepatobiliary cancer arising from cells other than hepatocytes, liver/bile-duct cancer, esophageal cancer, pancreatic cancer, stomach cancer, squamous cell cancer of the upper gastrointestinal tract, upper gastrointestinal cancer other than squamous, head and neck cancer, lung cancer, lung adenocarcinoma, small cell lung cancer, squamous cell lung cancer and cancer other than adenocarcinoma or small cell lung cancer, neuroendocrine cancer, melanoma, thyroid cancer, sarcoma, plasma cell neoplasm, multiple myeloma, myeloid neoplasm, lymphoma, and leukemia.

[0195] In some embodiments, various cancer types can be classified and labeled using classification methods available in the art, such as the International Classification of Diseases for Oncology (ICD-O-3) (codes.iarc.fr) or the Surveillance, Epidemiology, and End Results Program (SEER) (seer.cancer.gov). In other embodiments, cancer types are classified in three orthogonal codes, (i) topographical codes, (ii) morphological codes, or (iii) behavioral codes. Under behavioral codes, benign tumor is 0, uncertain behavior is 1, carcinoma in situ is 2, malignant, primary site is 3 and malignant, metastatic site is 6.

[0196] In some embodiments, a cancer TOO can be selected from a group defined by the guideline that will be used to stage a detected cancer. For example, the reference, Amin, M. B., Edge, S., Greene, F., Byrd, D. R., Brookland, R. K., Washington, M. K., Gershenwald, J. E., Compton, C. C., Hess, K. R., Sullivan, D. C., Jessup, J. M., Brierley, J. D., Gaspar, L. E., Schilsky, R. L., Balch, C. M., Winchester, D. P., Asare, E. A., Madera, M., Gress, D. M., Meyer, L. R. (Eds.), AJCC Cancer Staging Manual, 8th edition, Springer, 2017, identifies groups of different cancers that are staged together following standard guidelines. Staging is typically a next step in cancer management following its detection and diagnosis.

[0197] The analytics system can further calculate log-likelihood ratios (“R”) for a fragment indicating a likelihood of the fragment being indicative of cancer considering the various cancer types with the fitted probabilistic models for each cancer type and non-cancer type, or for a cancer TOO. The two probabilities may be taken from probabilistic models fitted for each of the cancer types and the non-cancer type, the probabilistic models defined to calculate a likelihood of observing a methylation pattern on a fragment given each of the cancer types and the non-cancer type. For example, the probabilistic models may be defined fitted for each of the cancer types and the non-cancer type.

### Selection of Genomic Regions Indicative of Cancer

[0198] In some embodiments, the analytics system can identify 460 genomic regions indicative of cancer. To identify these informative regions, the analytics system calculates an information gain for each genomic region or more specifically each CpG site that describes an ability to distinguish between various outcomes.

[0199] A method for identifying genomic regions capable of distinguishing between cancer type and non-cancer type utilizes a trained classification model that can be applied on the set of anomalously methylated DNA molecules or fragments corresponding to or derived from a cancerous or non-cancerous group. The trained classification model can be trained to identify any condition of interest that can be identified from the methylation state vectors.

[0200] In one embodiment, the trained classification model is a binary classifier trained based on methylation states for cfDNA fragments or genomic sequences obtained from a subject cohort with cancer or a cancer TOO, and a healthy subject cohort without cancer, and is then used to classify a test subject probability of having cancer, a cancer TOO, or not having cancer, based on anomalously methylation state vectors. In other embodiments, different classifiers may be trained using subject cohorts known to have particular cancer (e.g., breast, lung, prostrate, etc.); known to have cancer of particular TOO where the cancer is believed to originate; or known to have different stages of particular cancer (e.g., breast, lung, prostrate, etc.). In these embodiments, different classifiers may be trained using sequence reads obtained from samples enriched for tumor cells from subject cohorts known to have particular cancer (e.g., breast, lung, prostrate, etc.). Each genomic region's ability to distinguish between cancer type and non-cancer type in the classification model is used to rank the genomic regions from most informative to least informative in classification performance. The analytics system may identify genomic regions from the ranking according to information gain in classification between non-cancer type and cancer type.

[0201] Computing Information Gain from Hypomethylated and Hypermethylated Fragments Indicative of Cancer

[0202] With fragments indicative of cancer, the analytics system may train a classifier according to a process 600 illustrated in FIG. 6A, according to an embodiment. The process 600 accesses two training groups of samples—a non-cancer group and a cancer group—and obtains 605 a non-cancer set of methylation state vectors and a cancer set of methylation state vectors comprising anomalously methylated fragments, e.g., via step 440 from the process 400.

[0203] The analytics system determines 610, for each methylation state vector, whether the methylation state vector is indicative of cancer. Here, fragments indicative of cancer may be defined as hypermethylated or hypomethylated fragments determined if at least some number of CpG sites have a particular state (methylated or unmethylated, respectively) and/or have a threshold percentage of sites that are the particular state (again, methylated or unmethylated, respectively). In one example, cfDNA fragments are identified as hypomethylated or hypermethylated, respectively, if the fragment overlaps at least 5 CpG sites, and at least 80%, 90%, or 100% of its CpG sites are methylated or at least 80%, 90%, or 100% are unmethylated.

[0204] In an alternate embodiment, the analytics system considers portions of the methylation state vector and determines whether the portion is hypomethylated or hypermethylated, and may distinguish that portion to be hypomethylated or hypermethylated. This alternative resolves missing methylation state vectors which are large in size but contain at least one region of dense hypomethylation or hypermethylation. This process of defining hypomethylation and hypermethylation can be applied in step 450 of FIG. 4. In another embodiment, the fragments indicative of cancer may be defined according to likelihoods outputted from trained probabilistic models.

[0205] In one embodiment, the analytics system generates 620 a hypomethylation score (P_{hypo}) and a hypermethylation score (P_{hyper}) per CpG site in the genome. To generate either score at a given CpG site, the classifier takes four counts at that CpG site—(1) count of (methylations state) vectors of the cancer set labeled hypomethylated that overlap the CpG site; (2) count of vectors of the cancer set labeled hypermethylated that overlap the CpG site; (3) count of vectors of the non-cancer set labeled hypomethylated that overlap the CpG site; and (4) count of vectors of the non-cancer set labeled hypermethylated that overlap the CpG site. Additionally, the process may normalize these counts for each group to account for variance in group size between the non-cancer group and the cancer group. In alternative embodiments wherein fragments indicative of cancer are more generally used, the scores may be more broadly defined as counts of fragments indicative of cancer at each genomic region and/or CpG site.

[0206] In one embodiment, to generate 620 the hypomethylation score at a given CpG site, the process takes a ratio of (1) over (1) summed with (3). Similarly, the hypermethylation score is calculated by taking a ratio of (2) over (2) and (4). Additionally, these ratios may be calculated with an additional smoothing technique as discussed above. The hypomethylation score and the hypermethylation score relate to an estimate of cancer probability given the presence of hypomethylation or hypermethylation of fragments from the cancer set.

[0207] The analytics system generates 630 an aggregate hypomethylation score and an aggregate hypermethylation score for each anomalous methylation state vector. The aggregate hyper and hypo methylation scores are determined based on the hyper and hypo methylation scores of the CpG sites in the methylation state vector. In one embodiment, the aggregate hyper and hypo methylation scores are assigned as the largest hyper and hypo methylation scores of the sites in each state vector, respectively. However, in alternate embodiments, the aggregate scores could be based on means, medians, or other calculations that use the hyper/hypo methylation scores of the sites in each vector.

[0208] The analytics system ranks 640 all of that subject's methylation state vectors by their aggregate hypomethylation score and by their aggregate hypermethylation score, resulting in two rankings per subject. The process selects aggregate hypomethylation scores from the hypomethylation ranking and aggregate hypermethylation scores from the hypermethylation ranking. With the selected scores, the classifier generates 650 a single feature vector for each subject. In one embodiment, the scores selected from either ranking are selected with a fixed order that is the same for each generated feature vector for each subject in each of the training groups. As an example, in one embodiment the classifier selects the first, the second, the fourth, and the eighth aggregate hyper methylation score, and similarly for each aggregate hypo methylation score, from each ranking and writes those scores in the feature vector for that subject.

[0209] The analytics system trains 660 a binary classifier to distinguish feature vectors between the cancer and non-cancer training groups. Generally, any one of a number of classification techniques may be used. In one embodiment the classifier is a non-linear classifier. In a specific embodiment, the classifier is a non-linear classifier utilizing a L2-regularized kernel logistic regression with a Gaussian radial basis function (RBF) kernel.

[0210] Specifically, in one embodiment, the number of non-cancer samples or different cancer type(s) (nₒₜₕₑᵣ) and the number of cancer samples or cancer type(s) (n_{cancer}) having an anomalously methylated fragment overlapping a CpG site are counted. Then the probability that a sample is cancer is estimated by a score (“S”) that positively correlates to n_{cancer} and inversely correlated to nₒₜₕₑᵣ. The score can be calculated using the equation: (n_{cancer}+1)/(n_{cancer}+nₒₜₕₑᵣ+2) or (n_{cancer})/(n_{cancer}+nₒₜₕₑᵣ). The analytics system computes 670 an information gain for each cancer type and for each genomic region or CpG site to determine whether the genomic region or CpG site is indicative of cancer. The information gain is computed for training samples with a given cancer type compared to all other samples. For example, two random variables ‘anomalous fragment’ (‘AF’) and ‘cancer type’ (‘CT’) are used. In on embodiment, AF is a binary variable indicating whether there is an anomalous fragment overlapping a given CpG site in a given samples as determined for the anomaly score/feature vector above. CT is a random variable indicating whether the cancer is of a particular type. The analytics system computes the mutual information with respect to CT given AF. That is, how many bits of information about the cancer type are gained if it is known whether there is an anomalous fragment overlapping a particular CpG site.

[0211] For a given cancer type, the analytics system uses this information to rank CpG sites based on how cancer specific they are. This procedure is repeated for all cancer types under consideration. If a particular region is commonly anomalously methylated in training samples of a given cancer but not in training samples of other cancer types or in healthy training samples, then CpG sites overlapped by those anomalous fragments will tend to have high information gains for the given cancer type. The ranked CpG sites for each cancer type are greedily added (selected) to a selected set of CpG sites based on their rank for use in the cancer classifier.

[0212] Computing Pairwise Information Gain from Fragments Indicative of Cancer Identified from Probabilistic Models

[0213] With fragments indicative of cancer identified according to the second method described herein, the analytics may identify genomic regions according to the process 680 in FIG. 6B. The analytics system defines 690 a feature vector for each sample, for each region, for each cancer type by a count of DNA fragments that have a calculated log-likelihood ratio that the fragment is indicative of cancer above a plurality of thresholds, wherein each count is a value in the feature vector. In one embodiment, the analytics system counts the number of fragments present in a sample at a region for each cancer type with log-likelihood ratios above one or a plurality of possible threshold values. The analytics system defines a feature vector for each sample, by a count of DNA fragments for each genomic region for each cancer type that provides a calculated log-likelihood ratio for the fragment above a plurality of thresholds, wherein each count is a value in the feature vector. The analytics system uses the defined feature vectors to calculate an informative score for each genomic region describing that genomic region's ability to distinguish between each pair of cancer types. For each pair of cancer types, the analytics system ranks regions based on the informative scores. The analytics system may select regions based on the ranking according to informative scores.

[0214] The analytics system calculates 695 an informative score for each region describing that region's ability to distinguish between each pair of cancer types. For each pair of distinct cancer types, the analytics system may specify one type as a positive type and the other as a negative type. In one embodiment, a region's ability to distinguish between the positive type and the negative type is based on mutual information, calculated using the estimated fraction of cfDNA samples of the positive type and of the negative type for which the feature would be expected to be non-zero in the final assay, i.e., at least one fragment of that tier that would be sequenced in a targeted methylation assay. Those fractions are estimated using the observed rates at which the feature occurs in healthy cfDNA, and in high-signal cfDNA and/or tumor samples of each cancer type. For example, if a feature occurs frequently in healthy cfDNA, then it will also be estimated to occur frequently in cfDNA of any cancer type and would likely result in a low informative score. The analytics system may choose a certain number of regions for each pair of cancer types from the ranking, e.g., 1024.

[0215] In additional embodiments, the analytics system further identifies predominantly hypermethylated or hypomethylated regions from the ranking of regions. The analytics system may load the set of fragments in the positive type(s) for a region that was identified as informative. The analytics system, from the loaded fragments, evaluates whether the loaded fragments are predominantly hypermethylated or hypomethylated. If the loaded fragments are predominately hypermethylated or hypomethylated, the analytics system may select probes corresponding to the predominant methylation pattern. If the loaded fragments are not predominantly hypermethylated or hypomethylated, the analytics system may use a mixture of probes for targeting both hypermethylation and hypomethylation. The analytics system may further identify a minimal set of CpG sites that overlap more than some percentage of the fragments.

[0216] In other embodiments, the analytics system, after ranking the regions based on informative scores, labels each region with the lowest informative ranking across all pairs of cancer types. For example, if a region was the 10th-most-informative region for distinguishing breast from lung, and the 5th-most-informative for distinguishing breast from colorectal, then it would be given an overall label of “5”. The analytics system may design probes starting with the lowest-labeled regions while adding regions to the panel, e.g., until the panel's size budget has been exhausted.

### Off-Target Genomic Regions

[0217] In some embodiments, probes targeting selected genomic regions are further filtered 475 based on the number of their off-target regions. This is for screening probes that pull down too many cfDNA fragments corresponding to, or derived from, off-target genomic regions. Exclusion of probes having many off-target regions can be valuable by decreasing off-target rates and increasing target coverage for a given amount of sequencing.

[0218] An off-target genomic region is a genomic region that has sufficient homology to a target genomic region, such that DNA molecules or fragments derived from off-target genomic regions are hybridized to and pulled down by a probe designed to hybridize to a target genomic region. An off-target genomic region can be a genomic region (or a converted sequence of that same region) that aligns to a probe along at least 35 bp, 40 bp, 45 bp, 50 bp, 60 bp, 70 bp, or 80 bp with at least an 80%, 85%, 90%, 95%, or 97% match rate. In one embodiment, an off-target genomic region is a genomic region (or a converted sequence of that same region) that aligns to a probe along at least 45 bp with at least a 90% match rate. Various methods known in the art can be adopted to screen off-target genomic regions.

[0219] Exhaustively searching the genome to find all off-target genomic regions can be computationally challenging. In one embodiment, a k-mer seeding strategy (which can allow one or more mismatches) is combined to local alignment at the seed locations. In this case, exhaustive searching of good alignments can be guaranteed based on k-mer length, number of mismatches allowed, and number of k-mer seed hits at a particular location. This requires doing dynamic programing local alignment at a large number of locations, so this approach is highly optimized to use vector CPU instructions (e.g., AVX2, AVX512) and also can be parallelized across many cores within a machine and also across many machines connected by a network. A person of ordinary skill will recognize that modifications and variations of this approach can be implemented for the purpose of identifying off-target genomic regions.

[0220] In some embodiments, probes having sequence homology with off-target genomic regions, or DNA molecules corresponding to, or derived from off-target genomic regions comprising more than a threshold number are excluded (or filtered) from the panel. For example, probes having sequence homology with off-target genomic regions, or DNA molecules corresponding to, or derived from off-target genomic regions from more than 30, more than 25, more than 20, more than 18, more than 15, more than 12, more than 10, or more than 5 off-target regions are excluded.

[0221] In some embodiments, probes are divided into 2, 3, 4, 5, 6, or more separate groups depending on the numbers of off-target regions. For example, probes having sequence homology with no off-target regions or DNA molecules corresponding to, or derived from off-target regions are assigned to high-quality group, probes having sequence homology with 1-18 off-target regions or DNA molecules corresponding to, or derived from 1-18 off-target regions, are assigned to low-quality group, and probes having sequence homology with more than 19 off-target regions or DNA molecules corresponding to, or derived from 19 off-target regions, are assigned to poor-quality group. Other cut-off values can be used for the grouping.

[0222] In some embodiments, probes in the lowest quality group are excluded. In some embodiments, probes in groups other than the highest-quality group are excluded. In some embodiments, separate panels are made for the probes in each group. In some embodiments, all the probes are put on the same panel, but separate analysis is performed based on the assigned groups.

[0223] In some embodiments, a panel comprises a larger number of high-quality probes than the number of probes in lower groups. In some embodiments, a panel comprises a smaller number of poor-quality probes than the number of probes in other group. In some embodiments, more than 95%, 90%, 85%, 80%, 75%, or 70% of probes in a panel are high-quality probes. In some embodiments, less than 35%, 30%, 20%, 10%, 5%, 4%, 3%, 2% or 1% of the probes in a panel are low-quality probes. In some embodiments, less than 5%, 4%, 3%, 2% or 1% of the probes in a panel are poor-quality probes. In some embodiments, no poor-quality probes are included in a panel.

[0224] In some embodiments, probes having below 50%, below 40%, below 30%, below 20%, below 10% or below 5% are excluded. In some embodiments, probes having above 30%, above 40%, above 50%, above 60%, above 70%, above 80%, or above 90% are selectively included in a panel.

### Methods of Using Cancer Assay Panel

[0225] In yet another aspect, methods of using a cancer assay panel (alternatively referred to as a “bait set”) are provided. The methods can comprise steps of treating DNA molecules or fragments to convert unmethylated cytosines to uracils (e.g., using bisulfate treatment), applying a cancer panel (as described herein) to the converted DNA molecules or fragments, enriching a subset of converted DNA molecules or fragments that bind to the probes in the panel, and sequencing the enriched cfDNA fragments. In some embodiments, the sequence reads can be compared to a reference genome (e.g., a human reference genome), allowing for identification of methylation states at a plurality of CpG sites within the DNA molecules or fragments and thus provide information relevant to detection of cancer.

### Analysis of Sequence Reads

[0226] In some embodiments, the sequence reads may be aligned to a reference genome using known methods in the art to determine alignment position information. The alignment position information may indicate a beginning position and an end position of a region in the reference genome that corresponds to a beginning nucleotide base and end nucleotide base of a given sequence read. Alignment position information may also include sequence read length, which can be determined from the beginning position and end position. A region in the reference genome may be associated with a gene or a segment of a gene.

[0227] In various embodiments, a sequence read is comprised of a read pair denoted as R₁ and R₂. For example, the first read R₁ may be sequenced from a first end of a nucleic acid fragment whereas the second read R₂ may be sequenced from the second end of the nucleic acid fragment. Therefore, nucleotide base pairs of the first read R₁ and second read R₂ may be aligned consistently (e.g., in opposite orientations) with nucleotide bases of the reference genome. Alignment position information derived from the read pair R₁ and R₂ may include a beginning position in the reference genome that corresponds to an end of a first read (e.g., R₁) and an end position in the reference genome that corresponds to an end of a second read (e.g., R₂). In other words, the beginning position and end position in the reference genome represent the likely location within the reference genome to which the nucleic acid fragment corresponds. An output file having SAM (sequence alignment map) format or BAM (binary alignment map) format may be generated and output for further analysis.

[0228] From the sequence reads, the location and methylation state for each of CpG site may be determined based on alignment to a reference genome. Further, a methylation state vector for each fragment may be generated specifying a location of the fragment in the reference genome (e.g., as specified by the position of the first CpG site in each fragment, or another similar metric), a number of CpG sites in the fragment, and the methylation state of each CpG site in the fragment whether methylated (e.g., denoted as M), unmethylated (e.g., denoted as U), or indeterminate (e.g., denoted as I). The methylation state vectors may be stored in temporary or persistent computer memory for later use and processing. Further, duplicate reads or duplicate methylation state vectors from a single subject may be removed. In an additional embodiment, it may be determined that a certain fragment has one or more CpG sites that have an indeterminate methylation status. Such fragments may be excluded from later processing or selectively included where downstream data model accounts for such indeterminate methylation statuses.

[0229] FIG. 7B is an illustration of the process 100 of FIG. 7A of sequencing a cfDNA fragment to obtain a methylation state vector, according to an embodiment. As an example, the analytics system takes a cfDNA fragment 112. In this example, the cfDNA fragment 112 contains three CpG sites. As shown, the first and third CpG sites of the cfDNA fragment 112 are methylated 114. During the treatment step 120, the cfDNA fragment 112 is converted to generate a converted cfDNA fragment 122. During the treatment 120, the second CpG site which was unmethylated has its cytosine converted to uracil. However, the first and third CpG sites are not convert.

[0230] After conversion, a sequencing library 130 is prepared and sequenced 140 generating a sequence read 142. The analytics system aligns 150 the sequence read 142 to a reference genome 144. The reference genome 144 provides the context as to what position in a human genome the fragment cfDNA originates from. In this simplified example, the analytics system aligns 150 the sequence read such that the three CpG sites correlate to CpG sites 23, 24, and 25 (arbitrary reference identifiers used for convenience of description). The analytics system thus generates information both on methylation status of all CpG sites on the cfDNA fragment 112 and which to position in the human genome the CpG sites map. As shown, the CpG sites on sequence read 142 which were methylated are read as cytosines. In this example, the cytosine's appear in the sequence read 142 only in the first and third CpG site which allows one to infer that the first and third CpG sites in the original cfDNA fragment were methylated. The second CpG site is read as a thymine (U is converted to T during the sequencing process), and thus, one can infer that the second CpG site was unmethylated in the original cfDNA fragment. With these two pieces of information, the methylation status and location, the analytics system generates 160 a methylation state vector 152 for the fragment cfDNA 112. In this example, the resulting methylation state vector 152 is <M₂₃, U₂₄, M₂₅>, wherein M corresponds to a methylated CpG site, U corresponds to an unmethylated CpG site, and the subscript numbers correspond to positions of each CpG site in the reference genome.

[0231] FIGS. 8A-8B show three graphs of data validating consistency of sequencing from a control group. The first graph 170 shows conversion accuracy of conversion of unmethylated cytosines to uracil (step 120) on cfDNA fragment obtained from a test sample across subjects in varying stages of cancer—stage 0, stage I, stage II, stage III, stage IV, and non-cancer. As shown, there was uniform consistency in converting unmethylated cytosines on cfDNA fragments into uracils. There was an overall conversion accuracy of 99.47% with a precision at ±0.024%. The second graph 180 compares coverage (depth of sequencing) over varying stages of cancer. Counting only sequence reads that were confidently mapped to a reference genome, the mean coverage over all groups was ˜34. The third graph 190 shows the concentration of cfDNA per sample across varying stages of cancer.

### Detection of Cancer

[0232] Sequence reads obtained by the methods provided herein are further processed by automated algorithms. For example, the analytics system is used to receive sequencing data from a sequencer and perform various aspects of processing as described herein. The analytics system can be one of a personal computer (PC), a desktop computer, a laptop computer, a notebook, a tablet PC, a mobile device. A computing device can be communicatively coupled to the sequencer through a wireless, wired, or a combination of wireless and wired communication technologies. Generally, the computing device is configured with a processor and memory storing computer instructions that, when executed by the processor, cause the processor to perform steps as described in the remainder of this document. Generally, the amount of genetic data and data derived therefrom is sufficiently large, and the amount of computational power required so great, so as to be impossible to be performed on paper or by the human mind alone.

[0233] The clinical interpretation of methylation status of targeted genomic regions is a process that includes classifying the clinical effect of each or a combination of the methylation status and reporting the results in ways that are meaningful to a medical professional. The clinical interpretation can be based on comparison of the sequence reads with database specific to cancer or non-cancer subjects, and/or based on numbers and types of the cfDNA fragments having cancer-specific methylation patterns identified from a sample. In some embodiments, targeted genomic regions are ranked or classified based on their likeness to be differentially methylated in cancer samples, and the ranks or classifications are used in the interpretation process. The ranks and classifications can include (1) the type of clinical effect, (2) the strength of evidence of the effect, and (3) the size of the effect. Various methods for clinical analysis and interpretation of genome data can be adopted for analysis of the sequence reads. In some other embodiments, the clinical interpretation of the methylation states of such differentially methylated regions can be based on machine learning approaches that interpret a current sample based on a classification or regression method that was trained using the methylation states of such differentially methylated regions from samples from cancer and non-cancer patients with known cancer status, cancer type, cancer stage, TOO, etc.

[0234] The clinically meaning information can include the presence or absence of cancer generally, presence or absence of certain types of cancers, cancer stage, or presence or absence of other types of diseases. In some embodiments, the information relates to a presence or absence of one or more cancer types, selected from the group consisting of breast cancer, endometrial cancer, cervical cancer, ovarian cancer, bladder cancer, urothelial cancer of renal pelvis, renal cell carcinoma, prostate cancer, anorectal cancer, anal cancer, colorectal cancer, hepatocellular cancer, liver/bile-duct cancer, cholangiocarcinoma and hepatobiliary cancer, pancreatic cancer, upper GI adenocarcinoma, esophageal squamous cell cancer, head and neck cancer, lung cancer, squamous cell lung cancer, lung adenocarcinoma, small cell lung cancer, neuroendocrine cancer, melanoma, thyroid cancer, sarcoma, plasma cell neoplasm, multiple myeloma, myeloid neoplasm, lymphoma, and leukemia. In some embodiments, the information relates to a presence or absence of one or more cancer types, selected from the group consisting of uterine cancer, upper GI squamous cancer, all other upper GI cancers, thyroid cancer, sarcoma, urothelial renal cancer, all other renal cancers, prostate cancer, pancreatic cancer, ovarian cancer, neuroendocrine cancer, multiple myeloma, melanoma, lymphoma, small cell lung cancer, lung adenocarcinoma, all other lung cancers, leukemia, hepatobiliary carcinoma (hcc), hepatobiliary biliary, head and neck cancer, colorectal cancer, cervical cancer, breast cancer, bladder cancer, and anorectal cancer. In some embodiments, the information relates to a presence or absence of one or more cancer types, selected from the group consisting of anal cancer, bladder cancer, colorectal cancer, esophageal cancer, head and neck cancer, liver/bile-duct cancer, lung cancer, lymphoma, ovarian cancer, pancreatic cancer, plasma cell neoplasm, and stomach cancer. In some embodiments, the information relates to a presence or absence of one or more cancer types, selected from the group consisting of thyroid cancer, melanoma, sarcoma, myeloid neoplasm, renal cancer, prostate cancer, breast cancer, uterine cancer, ovarian cancer, bladder cancer, urothelial cancer, cervical cancer, anorectal cancer, head & neck cancer, colorectal cancer, liver cancer, bile duct cancer, pancreatic cancer, gallbladder cancer, upper GI cancer, multiple myeloma, lymphoid neoplasm, and lung cancer. In some embodiments, the samples are not cancerous and are from subjects having white blood cell clonal expansion or no cancer.

[0235] Cancer Classifier

[0236] In some examples, the assay panel described herein can be used with a cancer type classifier that predicts a disease state for a sample, such as a cancer or non-cancer prediction, a tissue of origin prediction, and/or an indeterminate prediction. In some examples, the cancer type classifier can generate features based on sequence reads by taking into account methylated or unmethylated fragments of DNA at certain genomic areas of interest. For instance, if the cancer type classifier determines that a methylation pattern at a fragment resembles that of a certain cancer type, then the cancer type classifier can set a feature for that fragment as 1, and otherwise if no such fragment is present, then the feature can be set as 0. In this way, the cancer type classifier can produce a set of binary features (merely by way of example, 30,000 features) for each sample. Further, in some examples, all or a portion of the set of binary features for a sample can be input into the cancer type classifier to provide a set of probability scores, such as one probability score per cancer type class and for a non-cancer type class. Furthermore, in some examples, the cancer type classifier can incorporate or otherwise be used in conjunction with thresholding to determine whether a sample is to be called as cancer or non-cancer, and/or indeterminate thresholding to reflect confidence in a specific TOO call. Such methods are described further below.

[0237] To train the cancer type classifier, the analytics system (e.g., analytics system 800, FIG. 12B) can obtain a set of training samples. In some examples, each training sample includes fragment file(s) (e.g., file containing sequence read data), a label corresponding to a type of cancer (TOO) or non-cancer status of the sample, and/or sex of the individual of the sample. The analytics system can utilize the training set to train the cancer type classifier to predict the disease state of the sample.

[0238] In some examples, for training, the analytics system divides the genome (e.g., whole genome) or a subset of the genome (e.g., targeted methylation regions) into regions. Merely by way of example, portions of the genome can be separated into “blocks” of CpGs, whereby a new block begins whenever there is a separation between nearest-neighbor CpGs is at least a minimum separation distance (e.g., at least 500 bp). Further, in some examples, each block can be divided into 1000 bp regions and positioned such that neighboring regions have a certain amount (e.g., 50% or 500 bp) of overlap.

[0239] Furthermore, in some examples, the analytics system can split the training set into K subsets or folds to be used in a K-fold cross-validation. In some examples, the folds can be balanced for cancer/non-cancer status, tissue of origin, cancer stage, age (e.g., grouped in 10 yr buckets), and/or smoking status. In some examples, the training set is split into 5 folds, whereby 5 separate classifiers are trained, in each case training on ⅘ of the training samples and using the remaining ⅕ for validation.

[0240] During training with the training set, the analytics system can, for each cancer type (and for healthy cfDNA), fit a probabilistic model to the fragments deriving from the samples of that type. As used herein a “probabilistic model” is any mathematical model capable of assigning a probability to a sequence read based on methylation status at one or more sites on the read. During training, the analytics system fits sequence reads derived from one or more samples from subjects having a known disease and can be used to determine sequence reads probabilities indicative of a disease state utilizing methylation information or methylation state vectors. In particular, in some cases, the analytics system determines observed rates of methylation for each CpG site within a sequence read. The rate of methylation represents a fraction or percentage of base pairs that are methylated within a CpG site. The trained probabilistic model can be parameterized by products of the rates of methylation. In general, any known probabilistic model for assigning probabilities to sequence reads from a sample can be used. For example, the probabilistic model can be a binomial model, in which every site (e.g., CpG site) on a nucleic acid fragment is assigned a probability of methylation, or an independent sites model, in which each CpG's methylation is specified by a distinct methylation probability with methylation at one site assumed to be independent of methylation at one or more other sites on the nucleic acid fragment.

[0241] In some examples, the probabilistic model is a Markov model, in which the probability of methylation at each CpG site is dependent on the methylation state at some number of preceding CpG sites in the sequence read, or nucleic acid molecule from which the sequence read is derived. See, e.g., U.S. patent application Ser. No. 16/352,602, entitled “Anomalous Fragment Detection and Classification,” and filed Mar. 13, 2019, which is incorporated by reference in its entirety herein and can be used for various embodiments.

[0242] In some examples, the probabilistic model is a “mixture model” fitted using a mixture of components from underlying models. For example, in some embodiments, the mixture components can be determined using multiple independent sites models, where methylation (e.g., rates of methylation) at each CpG site is assumed to be independent of methylation at other CpG sites. Utilizing an independent sites model, the probability assigned to a sequence read, or the nucleic acid molecule from which it derives, is the product of the methylation probability at each CpG site where the sequence read is methylated and one minus the methylation probability at each CpG site where the sequence read is unmethylated. In accordance with this example, the analytics system determines rates of methylation of each of the mixture components. The mixture model is parameterized by a sum of the mixture components each associated with a product of the rates of methylation. A probabilistic model Pr of n mixture components can be represented as:

$$Pr ( fragment \vert \{ {β}_{ki} , {f}_{k} \} ) = {\sum }_{k = 1}^{n} {f}_{k} {Π}_{i} {{β}_{ki}^{{m}_{i}} ( 1 - {β}_{ki} )}^{1 - {m}_{i}}$$

For an input fragment, mᵢ∈{0, 1} represents the fragment's observed methylation status at position i of a reference genome, with 0 indicating unmethylation and 1 indicating methylation. A fractional assignment to each mixture component k is fₖ, where fₖ≥0 and Σₖ₌₁ⁿ fₖ=1. The probability of methylation at position i in a CpG site of mixture component k is βₖᵢ. Thus, the probability of unmethylation is 1−βₖᵢ. The number of mixture components n can be 1, 2, 3, 4, 5, 6, 7, 8, 9, 10, etc.

[0243] In some examples, the analytics system fits the probabilistic model using maximum-likelihood estimation to identify a set of parameters {βₖᵢ, fₖ} that maximizes the log-likelihood of all fragments deriving from a disease state, subject to a regularization penalty applied to each methylation probability with regularization strength r. The maximized quantity for N total fragments can be represented as:

$${\sum }_{j}^{N} ln ( Pr ( {fragment}_{j} \vert \{ {β}_{ki} , {f}_{k} \} ) ) + r \cdot ln ( {β}_{ki} ( 1 - {β}_{ki} ) )$$

[0244] In some examples, the analytics system performs fits separately for each cancer type and for healthy cfDNA. As one of skill in the art would appreciate, other means can be used to fit the probabilistic models or to identify parameters that maximize the log-likelihood of all sequence reads derived from the reference samples. For example, in some examples, Bayesian fitting (using e.g., Markov chain Monte Carlo), in which each parameter is not assigned a single value but instead is associated to a distribution, is used. In some examples, gradient-based optimization, in which the gradient of the likelihood (or log-likelihood) with respect to the parameter values is used to step through parameter space towards an optimum, is used. In still some examples, expectation-maximization, in which a set of latent parameters (such as identities of the mixture component from which each fragment is derived) are set to their expected values under the previous model parameters, and then the model's parameters are assigned to maximize the likelihood conditional on the assumed values of those latent variables. The two-step process is then repeated until convergence.

[0245] Further, in some examples, the analytics system can generate features for each sample in the training set. For example, for each sample (regardless of label), in each region, for each cancer type, for each fragment, the analytics system can evaluate the log-likelihood ratio R with the fitted probabilistic models according to:

$${R}_{cancer type A} ( fragment ) ≡ ln ( \frac{Pr ( fragment \vert cancer type A )}{Pr ( fragment \vert healthy cfDNA )} )$$

[0246] Next, for each sample, for each region, for each cancer type, for each of a set of “tier” values, the analytics system can count the number of fragments with Rcancer type>tier and assign those counts as non-negative integer-valued features. For example, the tiers include threshold values of 1, 2, 3, 4, 5, 6, 7, 8, and 9, resulting in each region hosting 9 features per cancer type.

[0247] In some examples, the analytics system can select certain features for inclusion in a feature vector for each sample. For example, for each pair of distinct cancer types, the analytics system can specify one type as the “positive type” and the other as the “negative type” and rank the features by their ability to distinguish those types. In some cases, the ranking is based on mutual information calculated by the analytics system. For example, the mutual information can be calculated using the estimated fraction of samples of the positive type and negative type (e.g., cancer types A and B) for which the feature is expected to be nonzero in a resulting assay. For instance, if a feature occurs frequently in healthy cfDNA, the analytics system determines the feature is unlikely to occur frequently in cfDNA associated with various types of cancer. Consequently, the feature can be a weak measure in distinguishing between disease states. In calculating mutual information I, the variable X is a certain feature (e.g., binary) and variable Y represents a disease state, e.g., cancer type A or B:

$$I ( X ; Y ) = {\sum }_{y ∈ Y} {\sum }_{x ∈ X} p ( x , y ) log log ( \frac{p ( x , y )}{p ( x ) p ( y )} )$$

$$I \approx \frac{1}{2} ( p ( 1 \vert A ) \cdot log ( \frac{p ( 1 \vert A )}{\frac{1}{2} ( p ( 1 \vert A ) + p ( 1 \vert B ) )} ) + p ( 1 \vert B ) \cdot log ( \frac{p ( 1 \vert B )}{\frac{1}{2} ( p ( 1 \vert A ) p ( 1 \vert B ) )} ) )$$

$$p ( 1 \vert A ) = {f}_{A} + {f}_{H} - {f}_{H} {f}_{A}$$

The joint probability mass function of X and Y is p(x,y) and the marginal probability mass functions are p(x) and p(y). The analytics system can assume that feature absence is uninformative and either disease state is equally likely a priori, for example, p(Y=A)=p(Y=B)=0.5. The probability of observing (e.g., in cfDNA) a given binary feature of cancer type A is represented by p(1|A), where f_{A} is the probability of observing the feature in ctDNA samples from tumor (or high-signal cfDNA samples) associated with cancer type A, and f_{H} is the probability of observing the feature in a healthy or non-cancer cfDNA sample.

[0248] In some examples, only features corresponding to the positive type are included in the ranking, and only when those features' predicted rate of occurrence is greater in the positive type than in the negative type. For example, if “liver” is the positive type and “breast” is the negative type, then only “liver x” features are considered, and only if their estimated occurrence in liver cfDNA is greater than their estimated occurrence in breast cfDNA. Further, in some examples, for each region, for each cancer type pair (including non-cancer as a negative type), the analytics system keeps only the best performing tier. Further, in some examples, the analytics system transforms feature values by binarization, whereby any feature value greater than 0 is set to 1, such that all features are either 0 or 1.

[0249] In some examples, the analytics system trains a multinomial logistic regression classifier on the training data for a fold, and generates predictions for the held-out data. For example, for each of the K folds, one logistic regression can be trained for each combination of hyperparameters. Such hyperparameters can include L2 penalty and/or topK (e.g., the number of high-ranking regions to keep per tissue type pair (including non-cancer), as ranked by the mutual information procedure outlined above). For each set of hyperparameters, performance is evaluated on the cross-validated predictions of the full training set, and the set of hyperparameters with the best performance is selected for retraining on the full training set. In some examples, the analytics system uses log-loss as a performance metric, whereby the log-loss is calculated by taking the negative logarithm of the prediction for the correct label for each sample, and then summing over samples (i.e. a perfect prediction of 1.0 for the correct label would give a log-loss of 0).

[0250] To generate predictions for a new sample, feature values are calculated using the same method described above, but restricted to features (region/positive class combinations) selected under the chosen topK value. Generated features are then used to create a prediction using the logistic regression model trained above.

[0251] In some examples, the analytics trains a two-stage classifier. For example, the analytics system trains a binary cancer classifier to distinguish between the labels, cancer and non-cancer, based on the feature vectors of the training samples. In this case, the binary classifier outputs a prediction score indicating the likelihood of the presence or absence of cancer. In another example, the analytics system trains a multiclass cancer classifier to distinguish between many cancer types. In this multiclass cancer classifier, the cancer classifier is trained to determine a cancer prediction that comprises a prediction value for each of the cancer types being classified for. The prediction values can correspond to a likelihood that a given sample has each of the cancer types. For example, the cancer classifier returns a cancer prediction including a prediction value for breast cancer, lung cancer, and non-cancer. For example, the cancer classifier may return a cancer prediction for a test sample including a prediction score for breast cancer, lung cancer, and/or no cancer.

[0252] The analytics system can train the cancer classifier according to any one of a number of methods. As an example, the binary cancer classifier may be a L2-regularized logistic regression classifier that is trained using a log-loss function. As another example, the multi-cancer (TOO) classifier may be a multinomial logistic regression. In practice either type of cancer classifier may be trained using other techniques. These techniques are numerous including potential use of kernel methods, machine learning algorithms such as multilayer neural networks, etc. In particular, methods as described in PCT/US2019/022122 and U.S. patent application Ser. No. 16/352,602 which are incorporated by reference in their entireties herein can be used for various embodiments. Still further, in some examples, the TOO classifier is trained only on cancer samples that were successfully called as cancer by the binary classifier, thereby ensuring sufficient cancer signal in the cancer sample. On the other hand, in some examples, the binary classifier is trained on the training samples regardless of TOO.

[0253] Exemplary Sequencer and Analytics System

[0254] FIG. 12A is a flowchart of systems and devices for sequencing nucleic acid samples according to one embodiment. This illustrative flowchart includes devices such as a sequencer 820 and an analytics system 800. The sequencer 820 and the analytics system 800 may work in tandem to perform one or more steps in the processes described herein.

[0255] In various embodiments, the sequencer 820 receives an enriched nucleic acid sample 810. As shown in FIG. 12A, the sequencer 820 can include a graphical user interface 825 that enables user interactions with particular tasks (e.g., initiate sequencing or terminate sequencing) as well as one more loading stations 830 for loading a sequencing cartridge including the enriched fragment samples and/or for loading necessary buffers for performing the sequencing assays. Therefore, once a user of the sequencer 820 has provided the necessary reagents and sequencing cartridge to the loading station 830 of the sequencer 820, the user can initiate sequencing by interacting with the graphical user interface 825 of the sequencer 820. Once initiated, the sequencer 820 performs the sequencing and outputs the sequence reads of the enriched fragments from the nucleic acid sample 810.

[0256] In some embodiments, the sequencer 820 is communicatively coupled with the analytics system 800. The analytics system 800 includes some number of computing devices used for processing the sequence reads for various applications such as assessing methylation status at one or more CpG sites, variant calling or quality control. The sequencer 820 may provide the sequence reads in a BAM file format to the analytics system 800. The analytics system 800 can be communicatively coupled to the sequencer 820 through a wireless, wired, or a combination of wireless and wired communication technologies. Generally, the analytics system 800 is configured with a processor and non-transitory computer-readable storage medium storing computer instructions that, when executed by the processor, cause the processor to process the sequence reads or to perform one or more steps of any of the methods or processes disclosed herein.

[0257] In some embodiments, the sequence reads may be aligned to a reference genome using known methods in the art to determine alignment position information. Alignment position may generally describe a beginning position and an end position of a region in the reference genome that corresponds to a beginning nucleotide based and an end nucleotide base of a given sequence read. Corresponding to methylation sequencing, the alignment position information may be generalized to indicate a first CpG site and a last CpG site included in the sequence read according to the alignment to the reference genome. The alignment position information may further indicate methylation statuses and locations of all CpG sites in a given sequence read. A region in the reference genome may be associated with a gene or a segment of a gene; as such, the analytics system 800 may label a sequence read with one or more genes that align to the sequence read. In one embodiment, fragment length (or size) is determined from the beginning and end positions.

[0258] In various embodiments, for example when a paired-end sequencing process is used, a sequence read is comprised of a read pair denoted as R_1 and R_2. For example, the first read R_1 may be sequenced from a first end of a double-stranded DNA (dsDNA) molecule whereas the second read R_2 may be sequenced from the second end of the double-stranded DNA (dsDNA). Therefore, nucleotide base pairs of the first read R_1 and second read R_2 may be aligned consistently (e.g., in opposite orientations) with nucleotide bases of the reference genome. Alignment position information derived from the read pair R_1 and R_2 may include a beginning position in the reference genome that corresponds to an end of a first read (e.g., R_1) and an end position in the reference genome that corresponds to an end of a second read (e.g., R_2). In other words, the beginning position and end position in the reference genome represent the likely location within the reference genome to which the nucleic acid fragment corresponds. In one embodiment, the read pair R_1 and R_2 can be assembled into a fragment, and the fragment used for subsequent analysis and/or classification. An output file having SAM (sequence alignment map) format or BAM (binary) format may be generated and output for further analysis.

[0259] Referring now to FIG. 12B, FIG. 12B is a block diagram of an analytics system 800 for processing DNA samples according to one embodiment. The analytics system implements one or more computing devices for use in analyzing DNA samples. The analytics system 800 includes a sequence processor 840, sequence database 845, model database 855, models 850, parameter database 865, and score engine 860. In some embodiments, the analytics system 800 performs one or more steps in the processes 300 of FIG. 3A, 340 of FIG. 3B, 400 of FIG. 4, 500 of FIG. 5, 600 of FIG. 6A, or 680 of FIG. 6B and other process described herein.

[0260] The sequence processor 840 generates methylation state vectors for fragments from a sample. At each CpG site on a fragment, the sequence processor 840 generates a methylation state vector for each fragment specifying a location of the fragment in the reference genome, a number of CpG sites in the fragment, and the methylation state of each CpG site in the fragment whether methylated, unmethylated, or indeterminate via the process 300 of FIG. 3A. The sequence processor 840 may store methylation state vectors for fragments in the sequence database 845. Data in the sequence database 845 may be organized such that the methylation state vectors from a sample are associated to one another.

[0261] Further, multiple different models 850 may be stored in the model database 855 or retrieved for use with test samples. In one example, a model is a trained cancer classifier for determining a cancer prediction for a test sample using a feature vector derived from anomalous fragments. The training and use of the cancer classifier is discussed elsewhere herein. The analytics system 800 may train the one or more models 850 and store various trained parameters in the parameter database 865. The analytics system 800 stores the models 850 along with functions in the model database 855.

[0262] During inference, the score engine 860 uses the one or more models 850 to return outputs. The score engine 860 accesses the models 850 in the model database 855 along with trained parameters from the parameter database 865. According to each model, the score engine receives an appropriate input for the model and calculates an output based on the received input, the parameters, and a function of each model relating the input and the output. In some use cases, the score engine 860 further calculates metrics correlating to a confidence in the calculated outputs from the model. In other use cases, the score engine 860 calculates other intermediary values for use in the model.

### Cancer and Treatment Monitoring

[0263] In certain embodiments, the first time point is before a cancer treatment (e.g., before a resection surgery or a therapeutic intervention), and the second time point is after a cancer treatment (e.g., after a resection surgery or therapeutic intervention), and the method utilized to monitor the effectiveness of the treatment. For example, if the second likelihood or probability score decreases compared to the first likelihood or probability score, then the treatment is considered to have been successful. However, if the second likelihood or probability score increases compared to the first likelihood or probability score, then the treatment is considered to have not been successful. In other embodiments, both the first and second time points are before a cancer treatment (e.g., before a resection surgery or a therapeutic intervention). In still other embodiments, both the first and the second time points are after a cancer treatment (e.g., before a resection surgery or a therapeutic intervention) and the method is used to monitor the effectiveness of the treatment or loss of effectiveness of the treatment. In still other embodiments, cfDNA samples may be obtained from a cancer patient at a first and second time point and analyzed. e.g., to monitor cancer progression, to determine if a cancer is in remission (e.g., after treatment), to monitor or detect residual disease or recurrence of disease, or to monitor treatment (e.g., therapeutic) efficacy.

[0264] Those of skill in the art will readily appreciate that test samples can be obtained from a cancer patient over any desired set of time points and analyzed in accordance with the methods of the invention to monitor a cancer state in the patient. In some embodiments, the first and second time points are separated by an amount of time that ranges from about 15 minutes up to about 30 years, such as about 30 minutes, such as about 1, 2, 3, 4, 5, 6, 7, 8, 9, 10, 11, 12, 13, 14, 15, 16, 17, 18, 19, 20, 21, 22, 23, or about 24 hours, such as about 1, 2, 3, 4, 5, 10, 15, 20, 25 or about 30 days, or such as about 1, 2, 3, 4, 5, 6, 7, 8, 9, 10, 11, or 12 months, or such as about 1, 1.5, 2, 2.5, 3, 3.5, 4, 4.5, 5, 5.5, 6, 6.5, 7, 7.5, 8, 8.5, 9, 9.5, 10, 10.5, 11, 11.5, 12, 12.5, 13, 13.5, 14, 14.5, 15, 15.5, 16, 16.5, 17, 17.5, 18, 18.5, 19, 19.5, 20, 20.5, 21, 21.5, 22, 22.5, 23, 23.5, 24, 24.5, 25, 25.5, 26, 26.5, 27, 27.5, 28, 28.5, 29, 29.5 or about 30 years. In other embodiments, test samples can be obtained from the patient at least once every 3 months, at least once every 6 months, at least once a year, at least once every 2 years, at least once every 3 years, at least once every 4 years, or at least once every 5 years.

### Treatment

[0265] In still another embodiment, information obtained from any method described herein (e.g., the likelihood or probability score) can be used to make or influence a clinical decision (e.g., diagnosis of cancer, treatment selection, assessment of treatment effectiveness, etc.). For example, in one embodiment, if the likelihood or probability score exceeds a threshold, a physician can prescribe an appropriate treatment (e.g., a resection surgery, radiation therapy, chemotherapy, and/or immunotherapy). In some embodiments, information such as a likelihood or probability score can be provided as a readout to a physician or subject.

[0266] A classifier (as described herein) can be used to determine a likelihood or probability score that a sample feature vector is from a subject that has cancer. In one embodiment, an appropriate treatment (e.g., resection surgery or therapeutic) is prescribed when the likelihood or probability exceeds a threshold. For example, in one embodiment, if the likelihood or probability score is greater than or equal to 60, one or more appropriate treatments are prescribed. In another embodiments, if the likelihood or probability score is greater than or equal to 65, greater than or equal to 70, greater than or equal to 75, greater than or equal to 80, greater than or equal to 85, greater than or equal to 90, or greater than or equal to 95, one or more appropriate treatments are prescribed. In other embodiments, a cancer log-odds ratio can indicate the effectiveness of a cancer treatment. For example, an increase in the cancer log-odds ratio over time (e.g., at a second, after treatment) can indicate that the treatment was not effective. Similarly, a decrease in the cancer log-odds ratio over time (e.g., at a second, after treatment) can indicate successful treatment. In another embodiment, if the cancer log-odds ratio is greater than 1, greater than 1.5, greater than 2, greater than 2.5, greater than 3, greater than 3.5, or greater than 4, one or more appropriate treatments are prescribed.

[0267] In some embodiments, the treatment is one or more cancer therapeutic agents selected from the group consisting of a chemotherapy agent, a targeted cancer therapy agent, a differentiating therapy agent, a hormone therapy agent, and an immunotherapy agent. For example, the treatment can be one or more chemotherapy agents selected from the group consisting of alkylating agents, antimetabolites, anthracyclines, anti-tumor antibiotics, cytoskeletal disruptors (taxans), topoisomerase inhibitors, mitotic inhibitors, corticosteroids, kinase inhibitors, nucleotide analogs, platinum-based agents and any combination thereof. In some embodiments, the treatment is one or more targeted cancer therapy agents selected from the group consisting of signal transduction inhibitors (e.g. tyrosine kinase and growth factor receptor inhibitors), histone deacetylase (HDAC) inhibitors, retinoic receptor agonists, proteosome inhibitors, angiogenesis inhibitors, and monoclonal antibody conjugates. In some embodiments, the treatment is one or more differentiating therapy agents including retinoids, such as tretinoin, alitretinoin and bexarotene. In some embodiments, the treatment is one or more hormone therapy agents selected from the group consisting of anti-estrogens, aromatase inhibitors, progestins, estrogens, anti-androgens, and GnRH agonists or analogs. In one embodiment, the treatment is one or more immunotherapy agents selected from the group comprising monoclonal antibody therapies such as rituximab (RITUXAN) and alemtuzumab (CAMPATH), non-specific immunotherapies and adjuvants, such as BCG, interleukin-2 (IL-2), and interferon-alfa, immunomodulating drugs, for instance, thalidomide and lenalidomide (REVLIMID). It is within the capabilities of a skilled physician or oncologist to select an appropriate cancer therapeutic agent based on characteristics such as the type of tumor, cancer stage, previous exposure to cancer treatment or therapeutic agent, and other characteristics of the cancer.

### EXAMPLES

[0268] The following examples are put forth so as to provide those of ordinary skill in the art with a complete disclosure and description of how to make and use the present description, and are not intended to limit the scope of what the inventors regard as their description nor are they intended to represent that the experiments below are all or the only experiments performed. Efforts have been made to ensure accuracy with respect to numbers used (e.g., amounts, temperature, etc.) but some experimental errors and deviations should be accounted for.

### Example 1—Analysis of Probe Qualities

[0269] To test how much overlap between a cfDNA fragment and a probe is required to achieve a non-negligible amount of pulldown, various lengths of overlaps were tested using panels designed to include three different types of probes (V1D3, V1D4, V1E2) having various overlaps with 175 bp target DNA fragments specific to each probe. Tested overlaps ranged between 0 bp and 120 bp. Samples comprising 175 bp target DNA fragments were applied to the panel and washed, and then DNA fragments bound to the probes were collected. The amounts of the collected DNA fragments were measured and the amounts were plotted as densities over the sizes of overlaps as provided in FIG. 10.

[0270] There was no significant binding and pull down of target DNA fragments when there were less than 45 bp of overlaps. These results suggest that a fragment-probe overlap of at least 45 bp is generally required to achieve a non-negligible amount of pulldown although this number can vary depending on the assay conditions.

[0271] Furthermore, it has been suggested that more than a 10% mismatch rate between the probe and fragment sequences in the region of overlap is sufficient to greatly disrupt binding, and thus pulldown efficiency. Therefore, sequences that can align to the probe along at least 45 bp with at least a 90% match rate are candidates for off-target pulldown.

[0272] Thus, we have performed an exhaustive searching of all genomic regions having 45 bp alignments with 90%+ match rate (i.e., off-target regions) for each probe. Specifically, we combined a k-mer seeding strategy (which can allow one or more mismatches) with local alignment at the seed locations. This guaranteed not missing any good alignments based on k-mer length, number of mismatches allowed, and number of k-mer seed hits at a particular location. This involves performing dynamic programing local alignment at a large number of locations, so the implementation was optimized to use vector CPU instructions (e.g., AVX2, AVX512) and parallelized across many cores within a machine and also across many machines connected by a network. This allows an exhaustive search which is valuable in designing a high-performance panel (i.e., low off-target rate and high target coverage for a given amount of sequencing).

[0273] Following the exhaustive searching, each probe was scored based on the number of off-target regions. The majority of probes have a score of 1, meaning they match in only one place. Probes with scores between 2-19 were accepted but probes with scores of more than 20 were discarded. Other cutoff values can be used for specific samples. Probes targeting hypermethylated regions tend to have significantly less off-target regions than probes targeting other regions.

### Example 2—Annotation of Target Genomic Regions

[0274] Target genomic regions identified by the process outlined in FIG. 4 were analyzed to understand features of the target regions. Specifically, selected target genomic regions were aligned to a reference genome to determine alignment positions. The alignment position information was collected for each selected target genomic region, including the chromosome number, beginning nucleotide base, end nucleotide base, and the genomic annotations of the given genomic region. Target genomic regions were positioned in introns, exons, intergenic regions, 5′UTRs, 3′UTRs, or controlling regions such as promoters or enhancers. The number of target genomic regions that fall within each genomic annotation were counted and plotted in the graph provided in FIG. 11. FIG. 11 also compares numbers of the selected target genomic regions (black bars) or numbers of randomly selected genomic regions (gray bars) that fall within each genomic annotation.

[0275] The analysis shows that the selected target genomic regions are not random in their genomic distributions and they had higher enrichment for regulatory and functional elements such as promoters and 5′UTRs and less representation of intergenic sequences in comparison with randomly selected targets of the same size. For example, target genomic regions were found to position in promoters, 5′UTR, exons, intron/exon boundaries, introns, 3′UTRs or enhancers, rather than intergenic regions.

### Example 3—Cancer Assay Panels for Detecting Cancer and Cancer Types

[0276] Samples used for genomic region selection: DNA samples for this work came from various sources.

[0277] The Circulating Cell-free Genome Atlas Study (“CCGA”; Clinical Trial.gov identifier NCT02889978) is a prospective, multi-center, case-control, observational study with longitudinal follow-up. De-identified biospecimens were collected from approximately 15,000 participants from 142 sites. Samples were selected to ensure a prespecified distribution of cancer types and non-cancers across sites in each cohort, and cancer and non-cancer samples were frequency age-matched by gender.

[0278] The Cancer Genome Atlas (“TCGA”; Clinical Trial.gov identifier NCT02889978) is a public resource developed through a collaboration between the National Cancer Institute (NCI) and the National Human Genome Research Institute (NHGRI).

[0279] Dissociated tumor cells (DTC) were acquired from Conversant.

[0280] Non-cancer cells were provided by Yuval Dor and Ben Glaser (Hebrew University) and originated from human tissue obtained from standard clinical procedures. For example, breast luminal and basal epithelial cells were from breast reduction surgery; colon epithelial cells were from tissue near the site of re-implantation following segmental resection for localized colon pathology; bone marrow cells were from joint replacement surgery; vascular and arterial endothelial cells were from vascular surgery; and head and neck epithelium was from tonsillectomy.

[0281] WGBS was performed on more than 1000 genomic DNA samples collected from healthy individuals and individuals diagnosed with cancers of various stages and tissues of origin. The samples included formaldehyde-fixed, paraffin-embedded (FFPE) tissue blocks, disseminated tumor cells (DTC) from cancers of different TOOs, bone marrow mononuclear cells (BMMC), white blood cells (WBC) and peripheral blood mononuclear cells (PBMC). The DTCs were subjected to negative selection to remove WBCs, fibroblasts, and endothelial cells using a negative selection kit prior to gDNA isolation. The negative selection yielded purified tumor cells that allowed differentially methylated regions to be more clearly identified.

[0282] The TCGA data was collected by hybridization of bisulfate-converted DNA fragments from 8809 samples to methylation-sensitive oligonucleotide arrays. β-values from this study represent the relative abundance of methylation at 480,000 individual CpG sites. 75,000 of these CpG sites were analyzed after excluding CpGs from noisy genomic regions (360,000) and CpG sites with cross-hybridizing probes (45,000). The TCGA data was analyzed using different algorithms because it describes methylation of individual CpG sites, whereas WGBS data reveals the methylation pattern of strings of adjacent CpG sites on DNA fragments.

[0283] Tissue of Origin classes: Each sample was categorized into one of twenty-five (25) different Tissue of Origin (TOO) classes (i.e. Cancer Types): breast cancer, uterine cancer, cervical cancer, ovarian cancer, bladder cancer, urothelial cancer of renal pelvis, renal cancer other than urothelial, prostate cancer, anorectal cancer, colorectal cancer, hepatobiliary cancer arising from hepatocytes, hepatobiliary cancer arising from cells other than hepatocytes, pancreatic cancer, squamous cell cancer of the upper gastrointestinal tract, upper gastrointestinal cancer other than squamous, head and neck cancer, lung adenocarcinoma, small cell lung cancer, squamous cell lung cancer and cancer other than adenocarcinoma or small cell lung cancer, neuroendocrine cancer, melanoma, thyroid cancer, sarcoma, multiple myeloma, lymphoma, and leukemia. These TOO classes encompass 97% of the cancer incidence reported by the Surveillance, Epidemiology, and End Results program (SEER; seer.cancer.gov), after filtering out liquid, brain, small intestine, vagina & vulva and penis & testis. Rare incidence cancers like sarcoma, and neuroendocrine cancers were aggregated to guard against misclassification. International Classification of Diseases for Oncology (ICD-O-3) topographical, morphological, and behavioral codes and World Health Organization (WHO) topography designations were used to categorize individual samples into the TOO classes. For example, the 34 TCGA studies were mapped to 25 TOO classes as shown in TABLE 1. The TOO classification was iteratively refined against observed classification performance.

TABLE 1
Tissue of Origin (TOO) classification of TCGA types

| TOO class | TCGA type | N |
|---|---|---|
| Breast | BRCA | 779 |
| Renal | KIRC, KIRP, KICH | 657 |
| Brain | LLG, GBM | 654 |
| Upper GI | ESCA, STAD | 580 |
| Melanoma | SKCM, UVM | 550 |
| Head and neck | HNSC | 528 |
| Thyroid | THCA | 507 |
| Prostate | PRAD | 498 |
| Uterine | UCEC, UCS | 484 |
| Lung adenocarcinoma | LUAD | 444 |
| Bladder | BLCA | 409 |
| Colorectal | COAD, READ | 382 |
| Hepatobiliary carcinoma | LIHC | 377 |
| Lung squamous | LUSC | 370 |
| Cervical | CESC | 307 |
| Sarcoma | SARC | 261 |
| Adrenal | ACC, PCPG | 259 |
| Pancreas | PAAD | 184 |
| Leukemia | LAML, LCML | 140 |
| Testicular | TGCT | 134 |
| Thymus | THYM | 124 |
| Mesothelioma | MESO | 87 |
| Lymphoma | DLBC | 48 |
| Hepatobiliary biliary | CHOL | 36 |
| Ovarian | OV | 10 |

[0284] Region selection: For target selection, fragments having abnormal methylation patterns in cancer samples were selected using one or more methods as described herein. Use of these methods allowed the identification of low noise regions as putative targets. Among the low noise regions, fragments most informative in discriminating cancer types were ranked and selected.

[0285] Specifically, in some embodiments, when WGBS data were used, fragment sequences in the database were filtered based on p-value using a non-cancer distribution, and only fragments with p<0.001 were retained, as described herein. In some cases, the selected cfDNAs were further filtered to retain only those that were at least 90% methylated or 90% unmethylated. Next, for each CpG site in the selected fragments, the numbers of cancer samples or non-cancer samples were counted that include fragments overlapping that CpG site. Specifically, P (cancer|overlapping fragment) for each CpG was calculated and genomic sites with high P values were selected as general cancer targets. By design, the selected fragments had very low noise (i.e., few non-cancer fragments overlapping).

[0286] To find cancer type specific targets, similar selection processes were performed. CpG sites were ranked based on their information gain, comparing (i) the numbers of samples of a specific TOO or other samples, including both non-cancer samples and samples of a different TOO, (ii) the numbers of samples of a specific TOO or non-cancer samples, and/or (iii) the numbers of samples of a specific TOO or a different TOO that include fragments overlapping that CpG site. The process was applied to each of the 25 TOOs and the comparison was done for all pairwise combinations for 25 TOOs. For example, P (cancer of a TOO overlapping fragment) was calculated and then compared with P (cancer of a different TOO overlapping fragment). An outlier fragment in each TOO having much greater likelihood under cancer of a TOO than under cancer of a different TOO was selected as a target for the TOO. Accordingly, genomic regions selected by the pairwise comparisons included genomic regions differentially methylated to separate a target TOO and a contrast TOO.

[0287] Additional target genomic regions were selected according to methods described in the section above titled “Computing pairwise information gain from fragments indicative of cancer identified from probabilistic models.” The numbers of genomic regions for differentiating each target TOO (x-axis) from a contrast TOO (y-axis) are provided in FIG. 13.

[0288] When TCGA data were used, CpG beta values indicating intensity of methylation was used to identify target genomic regions. This is because array data are not at the CpG site levels, and thus they are prone to result in false positives. To avoid false positives, CpG sites were converted into 350 bp bins across the genome. Beta values of each bin were calculated as the mean of CpG beta values in that bin. Bins with less than 2 CpG's were excluded from the analysis. Next, bins were selected with beta difference of >0.95 between (i) samples of a specific TOO and other samples, including both non-cancer samples and samples of a different TOO, (ii) samples of a specific TOO and non-cancer samples, and/or (iii) samples of a specific TOO and a different TOO that include fragments overlapping that CpG site.

[0289] Genomic regions selected as described above were then filtered based on the numbers of their off-target genomic regions as specified in 4.4.7. Specifically, numbers of genomic locations that have >=45 bp alignments with >=90% identity were calculated as the numbers of off-target genomic regions. Genomic regions having off-target genomic regions more than 20 were discarded.

[0290] Various lists of target genomic regions selected as described in this section are identified in TABLE 2. These lists have different but overlapping sets of target genomic regions. They differ in their total numbers of target genomic regions, the total of the lengths of their target genomic regions, and the chromosomal locations of their target genomic regions. Lists 1-3 are small, medium, and large panels. The target genomic regions of lists 4-16 have subsets of the CpG methylation sites found in the target genomic regions of List 3. Lists 4, 6, and 8-16 were filtered to exclude previously known target genomic regions.

TABLE 2
SEQ ID NOs corresponding to Lists 1-16. For each list, the
table identifies the total number of target genomic regions
in the list, a range of SEQ ID NOs corresponding to all target
genomic regions in the list to be found in the sequence listing
submitted with this application, and the total of the lengths
of all target genomic regions in the list. The sequence listing
identifies the chromosomal location of each target genomic
region, whether cfDNA fragments to be enriched from the region
are hypermethylated or hypomethylated, and the sequence of
one DNA strand of the target genomic region. The chromosome
numbers and the start and stop positions are provided relative
to a known human reference genome, hg19. The sequence of
the human reference genome, hg19, is available from Genome
Reference Consortium with a reference number, GRCh37/hg19,
and also available from Genome Browser provided by Santa
Cruz Genomics Institute.

| Target | | Panel |
|---|---|---|
| Genomic | SEQ ID NOs | Size |

| List | Regions | First | Last | (Mb) |
|---|---|---|---|---|
| 1 | 34844 | 1 | 34844 | 6.43 |
| 2 | 67431 | 34845 | 102275 | 12.14 |
| 3 | 94955 | 102276 | 197230 | 17.72 |
| 4 | 23941 | 197231 | 221171 | 4.63 |
| 5 | 56624 | 221172 | 277795 | 16.42 |
| 6 | 52850 | 277796 | 330645 | 10.45 |
| 7 | 14284 | 330646 | 344929 | 8.48 |
| 8 | 1370 | 344930 | 346299 | 0.39 |
| 9 | 2842 | 346300 | 349141 | 0.79 |
| 10 | 7483 | 349142 | 356624 | 1.94 |
| 11 | 12328 | 356625 | 368952 | 3.08 |
| 12 | 14725 | 368953 | 383677 | 3.65 |
| 13 | 3814 | 383678 | 387491 | 0.62 |
| 14 | 7730 | 387492 | 395221 | 1.26 |
| 15 | 19424 | 395222 | 414645 | 3.23 |
| 16 | 38061 | 414646 | 452706 | 6.58 |

[0291] SEQ ID NOs 452,706-483,478 provide further information about certain hypermethylated or hypomethylated target genomic regions. These SEQ ID NO records identify target genomic regions that can be differentially methylated in samples from specified pairs of cancer types. The target genomic regions of SEQ ID NOs 452,706-483,478 are drawn from list 6. Many of the same target genomic regions are also found in lists 1-5 and 7-16. The entry for each SEQ ID indicates the chromosomal location of the target genomic region relative to hg19, whether cfDNA fragments to be enriched from the region are hypermethylated or hypomethylated, the sequence of one DNA strand of the target genomic region, and the pair or pairs of cancer types that are differentially methylated in that genomic region. As the methylation status of some target genomic regions distinguish more than one pair of cancer types, each entry identifies a first cancer type as indicated in TABLE 3 and one or more second cancer types.

TABLE 3
SEQ ID NOs identifying target genomic regions that are
differentially methylated between pairs of cancer types

| Target | |
|---|---|
| Genomic | SEQ ID NOs |

| First Cancer Type | Regions | First | Last |
|---|---|---|---|
| Anorectal | 1377 | 452707 | 454083 |
| Bladder & Urothelial | 1411 | 454084 | 455494 |
| Breast | 1748 | 455495 | 457242 |
| Cervical | 2011 | 457243 | 459253 |
| Colorectal | 1321 | 459254 | 460574 |
| Head &Neck | 1624 | 460575 | 462198 |
| Liver & Bile duct | 1810 | 462199 | 464008 |
| Lung | 1863 | 464009 | 465871 |
| Lymphoid Neoplasm | 2660 | 465872 | 468531 |
| Melanoma | 1378 | 468532 | 469909 |
| Multiple Myeloma | 986 | 469910 | 470895 |
| Myeloid Neoplasm | 1595 | 470896 | 472490 |
| Ovary | 1041 | 472491 | 473531 |
| Pancreas & Gallbladder | 1682 | 473532 | 475213 |
| Prostate | 1395 | 475214 | 476608 |
| Renal | 1236 | 476609 | 477844 |
| Sarcoma | 1418 | 477845 | 479262 |
| Thyroid | 895 | 479263 | 480157 |
| Upper GI | 1606 | 480158 | 481763 |
| Uterine | 1715 | 481764 | 483478 |

### Verification of Selected Genomic Regions:

[0292] Some of the selected genomic regions were verified (1) without reference (using cfDNA from the CCGA1 30X WGBS database limited to cfDNA from samples with a log-likelihood ratio indicative of cancer greater than 0.9) or (2) with reference (using tissue and WBC samples). FIG. 14 provides the verification results based on correctly-classified fractions. The results are from (1) verification done with cfDNA over genomic regions trained on cfDNA; (2) verification done with cfDNA over genomic regions trained on all different types of samples used herein; and (3) verification done with tissue and WBC gDNA sample over the selected genomic regions. The verification data is summarized in TABLE 4, additionally including data from verification done with all samples. The verification results demonstrate that genomic regions selected by the method described herein can provide information for detection of cancer and various cancer types.

TABLE 4
Verification data

| | cfDNA trained | cfDNA trained | Tissue + other | |
|---|---|---|---|---|
| Cancer type | on cfDNA | on tissue | non cfDNA | All samples |
| Leukemia | 1/5 [20%] | 4/5 [80%] | 49/66 [74%] | 53/71 [75%] |
| Lymphoma | 22/23 [96%] | 22/23 [96%] | 39/47 [83%] | 61/70 [87%] |
| Multiple | 13/14 [93%] | 14/14 [100%] | 17/23 [74%] | 31/37 [84%] |
| myeloma | | | | |
| Sarcoma | | 0/1 [0%] | 5/6 [83%] | 5/7 [71%] |
| Thyroid | | | 11/11 [100%] | 11/11 [100%] |
| Melanoma | | 2/2 [100%] | 13/13 [100%] | 15/15 [100%] |
| Neuroendocrine | 1/7 [14%] | 1/7 [14%] | 0/2 [0%] | 1/9 [11%] |
| Lung | 86/95 [91%] | 84/95 [88%] | 51/55 [93%] | 135/150 [90%] |
| Head & Neck | 10/16 [62%] | 13/16 [81%] | 36/43 [84%] | 49/59 [83%] |
| Upper GI | 17/25 [68%] | 15/25 [60%] | 43/49 [88%] | 58/74 [78%] |
| Pancreas | 23/30 [77%] | 26/30 [87%] | 15/15 [100%] | 41/45 [91%] |
| Cholangio & | 4/9 [44%] | 5/9 [56%] | 2/5 [40%] | 7/14 [50%] |
| Biliary | | | | |
| Hepatocellular | 9/11 [82%] | 11/11 [100%] | 5/5 [100%] | 16/16 [100%] |
| Colorectal | 50/58 [86%] | 49/58 [84%] | 70/72 [97%] | 119/130 [92%] |
| Anorectal | 6/7 [86%] | 6/7 [86%] | 0/1 [0%] | 6/8 [75%] |
| Prostate | 3/3 [100%] | 3/3 [100%] | 58/58 [100%] | 61/61 [100%] |
| Renal | 2/5 [40%] | 4/7 [57%] | 50/56 [89%] | 54/63 [86%] |
| Bladder | | 0/2 [0%] | 28/32 [88%] | 28/34 [82%] |
| Ovarian | 11/14 [79%] | 13/14 [93%] | 43/50 [86%] | 56/64 [88%] |
| Cervical | 0/6 [0%] | 1/6 [17%] | 21/23 [91%] | 22/29 [76%] |
| Endometrial | 1/5 [20%] | 3/5 [60%] | 47/49 [96%] | 50/54 [93%] |
| Breast | 69/83 [83%] | 71/83 [86%] | 117/118 [99%] | 188/201 [94%] |
| Total | 328/416 [79%] | 3457/423 [82%] | 720/799 [90%] | 1067/1222 [87%] |

### Example 4—Generation of a Mixture Model Classifier

[0293] To maximize performance, the predictive cancer models described in this Example were trained using sequence data obtained from a plurality of samples from known cancer types and non-cancers from both CCGA sub-studies (CCGA1 and CCGA22), a plurality of tissue samples for known cancers obtained from CCGA1, and a plurality of non-cancer samples from the STRIVE study (See Clinical Trail.gov Identifier: NCT03085888 (//clinicaltrials.gov/ct2/show/NCT03085888)). The STRIVE study is a prospective, multi-center, observational cohort study to validate an assay for the early detection of breast cancer and other invasive cancers, from which additional non-cancer training samples were obtained to train the classifier described herein. The known cancer types included from the CCGA sample set included the following: breast, lung, prostate, colorectal, renal, uterine, pancreas, esophageal, lymphoma, head and neck, ovarian, hepatobiliary, melanoma, cervical, multiple myeloma, leukemia, thyroid, bladder, gastric, and anorectal. As such, a model can be a multi-cancer model (or a multi-cancer classifier) for detecting one or more, two or more, three or more, four or more, five or more, ten or more, or 20 or more different types of cancer.

[0294] The classifier performance data shown below was reported out for a locked classifier trained on cancer and non-cancer samples obtained from CCGA2, a CCGA sub-study, and on non-cancer samples from STRIVE. The individuals in the CCGA2 sub-study were different from the individuals in the CCGA1 sub-study whose cfDNA was used to select target genomes. From the CCGA2 study, blood samples were collected from individuals diagnosed with untreated cancer (including 20 tumor types and all stages of cancer) and healthy individuals with no cancer diagnosis (controls). For STRIVE, blood samples were collected from women within 28 days of their screening mammogram. Cell-free DNA (cfDNA) was extracted from each sample and treated with bisulfite to convert unmethylated cytosines to uracils. The bisulfite treated cfDNA was enriched for informative cfDNA molecules using hybridization probes designed to enrich bisulfite-converted nucleic acids derived from each of a plurality of targeted genomic regions in an assay panel comprising all of the genomic regions of Lists 1-16. The enriched bisulfite-converted nucleic acid molecules were sequenced using paired-end sequencing on an Illumina platform (San Diego, Calif.) to obtain a set of sequence reads for each of the training samples, and the resulting read pairs were aligned to the reference genome, assembled into fragments, and methylated and unmethylated CpG sites identified.

### Mixture Model Based Featurization

[0295] For each cancer type (including non-cancer) a probabilistic mixture model was trained and utilized to assign a probability to each fragment from each cancer and non-cancer sample based on how likely it was that the fragment would be observed in a given sample type.

[0296] Fragment-Level Analysis

[0297] Briefly, for each sample type (cancer and non-cancer samples), for each region (where each region was used as-is if less than 1 kb, or else subdivided into 1 kb regions in length with a 50% overlap (e.g., 500 base pairs overlap) between adjacent regions), a probabilistic model was fit to the fragments derived from the training samples for each type of cancer and non-cancer. The probabilistic model trained for each sample type was a mixture model, where each of three mixture components was an independent-sites model in which methylation at each CpG is assumed to be independent of methylation at other CpGs. Fragments were excluded from the model if: they had a p-value (from a non-cancer Markov model) greater than 0.01; were marked as duplicate fragments; the fragments had a bag size of greater than 1 (for targeted methylation samples only); they did not cover at least one CpG site; or if the fragment was greater than 1000 bases in length. Retained training fragments were assigned to a region if they overlapped at least one CpG from that region. If a fragment overlapped CpGs in multiple regions, it was assigned to all of them.

[0298] Local Source Models

[0299] Each probabilistic model was fit using maximum-likelihood estimation to identify a set of parameters that maximized the log-likelihood of all fragments deriving from each sample type, subject to a regularization penalty.

[0300] Specifically, in each classification region, a set of probabilistic models were trained, one for each training label (i.e., one for each cancer type and one for non-cancer). Each model took the form of a Bernoulli mixture model with three components. Mathematically,

Pr(fragment|{βₖᵢ,fₖ})=Σₖ₌₁ⁿfₖΠᵢβₖᵢ^{m}^{ᵢ}(1−βₖᵢ)^{1-m}^{ᵢ} (1)

where n is the number of mixture components, set to 3; mᵢ∈{0, 1} is the fragment's observed methylation at position i; fₖ is the fractional assignment to component k (with fₖ>0 and Σfₖ=1); and βₖᵢ is the methylation fraction in component k at CpG i. The product over i included only those positions for which a methylation state could be identified from the sequencing. Maximum-likelihood values of the parameters {fₖ, βₖᵢ} of each model were estimated by using the rprop algorithm (e.g., the rprop algorithm as described in Riedmiller M, Braun H. RPROP—A Fast Adaptive Learning Algorithm. Proceedings of the International Symposium on Computer and Information Science VII, 1992) to maximize the total log-likelihood of the fragments of one training label, subject to a regularization penalty on βₖᵢ that took the form of a beta-distributed prior. Mathematically, the maximized quantity was

Σⱼ ln(Pr(fragmentⱼ|{βₖᵢ,fₖ}))+Σ_{k,i} ln(βₖᵢ(1−βₖᵢ)) (2)

where r is the regularization strength, which was set to 1.

### Featurization

[0301] Once the probabilistic models were trained, a set of numerical features was computed for each sample. Specifically, features were extracted for each fragment from each training sample, for each cancer type and non-cancer sample, in each region. The extracted features were the tallies of outlier fragments (i.e., anomalously methylated fragments), which were defined as those whose log-likelihood under a first cancer model exceeded the log-likelihood under a second cancer model or non-cancer model by at least a threshold tier value. Outlier fragments were tallied separately for each genomic region, sample model (i.e., cancer type), and tier (for tiers 1, 2, 3, 4, 5, 6, 7, 8, and 9), yielding 9 features per region for each sample type. In this way, each feature was defined by three properties: a genomic region; a “positive” cancer type label (excluding non-cancer); and the tier value selected from the set {1, 2, 3, 4, 5, 6, 7, 8, 9}. The numerical value of each feature was defined as the number of fragments in that region such that

$$ln ( \frac{Pr ( fragment \vert positive cancer type )}{Pr ( fragment \vert non \text{-} cancer )} ) > tier \qquad ( 3 )$$

where the probabilities were defined by equation (1) using the maximum-likelihood-estimated parameter values corresponding to the “positive” cancer type (in the numerator of the logarithm) or to non-cancer (in the denominator).

### Feature Ranking

[0302] For each set of pairwise features, the features were ranked using mutual information based on their ability to distinguish the first cancer type (which defined the log-likelihood model from which the feature was derived) from the second cancer type or non-cancer. Specifically, two ranked lists of features were compiled for each unique pair of class labels: one with the first label assigned as the “positive” and the second as the “negative”, and the other with the positive/negative assignment swapped (with the exception of the “non-cancer” label, which was only permitted as the negative label). For each of these ranked lists, only features whose positive cancer type label (as in equation (3)) matched the positive label under consideration were included in the ranking. For each such feature, the fraction of training samples with non-zero feature value was calculated separately for the positive and negative labels. Features for which this fraction was greater in the positive label were ranked by their mutual information with respect to that pair of class labels.

[0303] The top ranked 256 features from each pairwise comparison were identified and added to the final feature set for each cancer type and non-cancer. To avoid redundancy, if more than one feature was selected from the same positive type and genomic region (i.e., for multiple negative types), only the one assigned the lowest (most informative) rank for its cancer type pair was retained, breaking ties by choosing the higher tier value. The features in the final feature set for each sample (cancer type and non-cancer) were binarized (any feature value greater than 0 was set to 1, so that all features were either 0 or 1).

### Classifier Training

[0304] The training samples were then divided into distinct 5-fold cross-validation training sets, and a two-stage classifier was trained for each fold, in each case training on ⅘ of the training samples and using the remaining ⅕ for validation.

[0305] In the first stage of training, a binary (two-class) logistic regression model for detecting the presence of cancer was trained to discriminate the cancer samples (regardless of TOO) from non-cancer. When training this binary classifier, a sample weight was assigned to the male non-cancer samples to counteract sex-imbalance in the training set. For each sample, the binary classifier outputs a prediction score indicating the likelihood of a presence or absence of cancer.

[0306] In the second stage of training, a parallel multi-class logistic regression model for determining cancer tissue of origin was trained with TOO as the target label. Only the cancer samples that received a score above the 95th percentile of the non-cancer samples in the first stage classifier were included in the training of this multi-class classifier. For each cancer sample used in training the multi-class classifier, the multi-class classifier outputs prediction values for the cancer types being classified, where each prediction value is a likelihood that the given sample has a certain cancer type. For example, the cancer classifier can return a cancer prediction for a test sample including a prediction score for breast cancer, a prediction score for lung cancer, and/or a prediction score for no cancer.

[0307] Both binary and multi-class classifiers were trained by stochastic gradient descent with mini-batches, and in each case, training was stopped early when the performance on the validation fold (assessed by cross-entropy loss) began to degrade. For predicting on samples outside of the training set, in each stage, the scores assigned by the five cross-validated classifiers were averaged. Scores assigned to sex-inappropriate cancer types were set to zero, with the remaining values renormalized to sum to one.

[0308] Scores assigned to the validation folds within the training set were retained for use in assigning cutoff values (thresholds) to target certain performance metrics. In particular, the probability scores assigned to the training set non-cancer samples were used to define thresholds corresponding to particular specificity levels. For example, for a desired specificity target of 99.4%, the threshold was set at the 99.4th percentile of the cross-validated cancer detection probability scores assigned to the non-cancer samples in the training set. Training samples with a probability score that exceeded a threshold were called as positive for cancer.

[0309] Subsequently, for each training sample determined to be positive for cancer, a TOO or cancer type assessment was made from the multiclass classifier. First, the multi-class logistic regression classifier assigned a set of probability scores, one for each prospective cancer type, to each sample. Next, the confidence of these scores was assessed as the difference between the highest and second-highest scores assigned by the multi-class classifier for each sample. Then, the cross-validated training set scores were used to identify the lowest threshold value such that of the cancer samples in the training set with top-two score differential exceeding the threshold, 90% had been assigned the correct TOO label as their highest score. In this way, the scores assigned to the validation folds during training were further used to determine a second threshold for distinguishing between confident and indeterminate TOO calls.

[0310] At prediction time, samples receiving a score from the binary (first-stage) classifier below the predefined specificity threshold were assigned a “non-cancer” label. For the remaining samples, those whose top-two TOO-score differential from the second-stage classifier was below the second predefined threshold were assigned the “indeterminate cancer” label. The remaining samples were assigned the cancer label to which the TOO classifier assigned the highest score.

### Example 5—Classifier with the Target Genomic Regions of Lists 4-16

[0311] The discriminatory value of the target genomic regions of Lists 4-16 was evaluated by testing the ability of a cancer classifier to detect cancer and any of 20 different cancer types according to the methylation status of these target genomic regions. Performance was evaluated over a set of 1,532 cancer samples and 1,521 non-cancer samples that were not used to train the classifier, as shown in TABLE 5. For each sample, differentially methylated cfDNA was enriched using a bait set comprising all of the target genomic regions of Lists 1-16. The classifier was then constrained to provide cancer determinations based only on the methylation status of the target genomic regions of the List being evaluated.

TABLE 5
Cancer diagnoses of individuals whose
cfDNA was used to train the classifier

| | | Stage | | | | |
|---|---|---|---|---|---|---|
| | | | | | | Not |
| Cancer Type | Total | I | II | III | IV | Reported |
| Non-cancer | 1521 | — | — | — | — | — |
| Lung | 261 | 60 | 23 | 72 | 106 | 0 |
| Breast | 247 | 102 | 110 | 27 | 8 | 0 |
| Prostate | 188 | 39 | 113 | 19 | 17 | 0 |
| Lymphoid neoplasm | 147 | 15 | 27 | 27 | 39 | 39 |
| Colorectal | 121 | 13 | 22 | 41 | 45 | 0 |
| Pancreas and gallbladder | 95 | 15 | 15 | 19 | 46 | 0 |
| Uterine | 84 | 73 | 3 | 5 | 3 | 0 |
| Upper GI | 67 | 9 | 12 | 19 | 27 | 0 |
| Head and neck | 62 | 7 | 13 | 16 | 26 | 0 |
| Renal | 56 | 37 | 4 | 4 | 11 | 0 |
| Ovary | 37 | 4 | 2 | 25 | 6 | 0 |
| Multiple myeloma | 34 | 10 | 13 | 11 | 0 | 0 |
| Not reported | 29 | 8 | 5 | 7 | 6 | 3 |
| Liver bile duct | 29 | 5 | 7 | 7 | 10 | 0 |
| Sarcoma | 17 | 2 | 4 | 5 | 6 | 0 |
| Bladder and urothelial | 16 | 6 | 7 | 3 | 1 | 0 |
| Anorectal | 14 | 4 | 5 | 5 | 0 | 0 |
| Cervical | 11 | 8 | 1 | 2 | 0 | 0 |
| Melanoma | 7 | 3 | 1 | 0 | 3 | 0 |
| Myeloid neoplasm | 4 | 2 | 1 | 0 | 1 | 0 |
| Thyroid | 4 | 0 | 0 | 0 | 0 | 4 |
| Prediction only | 2 | 0 | 0 | 0 | 2 | 0 |

[0312] Results from the classifier performance analysis for Lists 4-16 are presented in FIGS. 15-27. In each figure, part A is a receiver operator curve (ROC) showing true positive results and false positive results for a determination of cancer or no-cancer. The asymmetric shape of these ROC curves illustrates that the classifier was designed to minimize false positive results. The areas under the curve are tightly clustered between 0.78 and 0.83, as shown in TABLE 6. These results indicate that a determination of cancer is not grossly compromised by using smaller panels of less than 1 MB, such as Lists 8, 9, and 13, compared to larger panels of greater than 10 MB, such as Lists 6 and 6.

TABLE 6

| Target regions | AUC |
|---|---|
| List 4 | 0.81 |
| List 5 | 0.83 |
| List 6 | 0.81 |
| List 7 | 0.83 |
| List 8 | 0.80 |
| List 9 | 0.81 |
| List 10 | 0.81 |
| List 11 | 0.81 |
| List 12 | 0.81 |
| List 13 | 0.78 |
| List 14 | 0.79 |
| List 15 | 0.80 |
| List 16 | 0.80 |

[0313] Classifier performance was also evaluated for randomly selected subsets of the target genomic regions of List 4 and List 12, as shown in FIGS. 28-30 and TABLE 7. Again, the smallest panel (Random 10% of List 12, 0.36 MB) had similar results to the largest panel (List 4, 4.63 MB), indicating that methylation status results for at least a substantial majority of the target regions in all lists are informative of the presence or absence of cancer.

TABLE 7

| Target regions | AUC |
|---|---|
| List 4 | 0.81 |
| Random 50% of List 4 | 0.81 |
| List 12 | 0.81 |
| Random 10% of List 12 | 0.78 |
| Random 25% of List 12 | 0.79 |

[0314] A Cancer Type (i.e. TOO) determination was attempted for all samples with a determination of cancer. Panel B in FIGS. 15-30 shows the accuracy of these determinations. For example, the value in the top right corner of FIG. 15B indicates that 151 samples classified as lung cancer based on the methylation status of the target genomic regions of List 4 had been obtained from subjects known to have lung cancer. The “3” value 3 positions to the left in the same confusion matrix indicates that three samples predicted to have lung cancer were from subjects who actually had an Upper GI cancer. Overall, the vast majority of cancer type determinations made using the target genomic regions of any of Lists 4-16 fall on the diagonals of the confusion matrices, indicating that the classifier determined the correct cancer type. Similar results were obtained using randomly selected target genomic regions from Lists 4 and 12,

[0315] These classifier results are further summarized in TABLES 8-23, which indicate the accuracy of cancer detections and cancer type determinations made with a specificity of 0.990, indicating a false positive rate of 1%. These results are delineated by cancer stage. They show improved cancer detection and cancer type determinations for samples from individuals with later stage cancers (e.g. stage IV) compared to samples from individuals with earlier stage cancers (e.g. stage I). For all cancer stages (no segregation by stage), the cancer type determination was accurate approximately 90% of the time for all target genomic region lists and for random subsets of List 4 and List 12. For Stage I cancers, an accurate cancer type determination was made approximately 75% of the time. In particular, 75.6% of the cancer type determinations were accurate for the smallest assay panel, List 8, with only 1370 target genomic regions having a total size of 395 kb.

[0316] The same accuracy results are broken down according to cancer type in TABLE 24, which demonstrates highly accurate cancer type determinations with the target genomic regions of all lists for common cancers such as liver and bile duct cancer, rare cancers such as sarcoma, and hard-to-detect cancers such as breast cancer.

[0317] The sensitivity for detecting 20 different cancer types using the target genomic regions of lists 4-16 or randomly selected portions from lists 4 and 12 is presented in TABLES 25-40. Sensitivity results are presented for a specificity of 0.990 (a 1% false positive rate). Sensitivity is presented for all cancers of the specified cancer type and for cancers at stages I through IV. The sensitivity was generally higher for later stage cancers. For stage IV cancers, the sensitivity was greater than 60% for all cancers with more than one sample and was greater than 90% for breast cancer, ovarian cancer, bladder & urothecal cancer, head & neck cancer, colorectal cancer, liver cancer, pancreas & gallbladder cancer, upper GI cancer, lymphoid neoplasm, and lung cancer. At stage II, sensitivity was best for head & neck cancer, liver cancer, pancreas & gallbladder cancer, upper GI cancer, lymphoid neoplasm, and lung cancer. List 8, the smallest group of target genomic regions, provide a sensitivity of at least 50% for these stage II cancers.

TABLE 8
Classification accuracy using the genomic regions of List 4. Data
for Cancer Presence and Cancer type at a specificity of 0.990
show percentage accuracy, a 95% confidence interval in brackets,
and the number correctly assigned over the total in parentheses.

| Stage | Cancer Presence | Cancer Type |
|---|---|---|
| I | 13% [10-16.6] (55/422) | 78.6% [63.2-89.7] (33/42) |
| II | 34.5% [29.8-39.5] (134/388) | 88.1% [81.1-93.2] (111/126) |
| III | 72.2% [66.9-77.1] (226/313) | 91% [86.1-94.6] (182/200) |
| IV | 85.1% [81-88.6] (309/363) | 91.9% [88.3-94.8] (274/298) |
| All | 49.2% [46.6-51.7] (753/1532) | 90.5% [88-92.6] (627/693) |

TABLE 9
Classification accuracy using the genomic regions of List 5.

| Stage | Cancer Presence | Cancer Type |
|---|---|---|
| I | 20.9% [17.1-25] (88/422) | 77.3% [66.2-86.2] (58/75) |
| II | 45.9% [40.8-51] (178/388) | 88.3% [82.4-92.8] (144/163) |
| III | 82.7% [78.1-86.8] (259/313) | 89.9% [85.5-93.4] (223/248) |
| IV | 90.6% [87.2-93.4] (329/363) | 92.1% [88.5-94.8] (291/316) |
| All | 57.4% [54.9-59.9] (880/1532) | 89.5% [87.2-91.5] (740/827) |

TABLE 10
Classification accuracy using the genomic regions of List 6.

| Stage | Cancer Presence | Cancer Type |
|---|---|---|
| I | 13.3% [10.2-16.9] (56/422) | 76% [61.8-86.9] (38/50) |
| II | 36.3% [31.5-41.3] (141/388) | 87.7% [80.8-92.8] (114/130) |
| III | 72.5% [67.2-77.4] (227/313) | 91.1% [86.3-94.7] (185/203) |
| IV | 85.1% [81-88.6] (309/363) | 91.6% [87.8-94.5] (271/296) |
| All | 49.6% [47.1-52.1] (760/1532) | 89.9% [87.4-92] (633/704) |

TABLE 11
Classification accuracy using the genomic regions of List 7.

| Stage | Cancer Presence | Cancer Type |
|---|---|---|
| I | 21.3% [17.5-25.5] (90/422) | 77% [65.8-86] (57/74) |
| II | 45.9% [40.8-51] (178/388) | 88.5% [82.6-92.9] (146/165) |
| III | 82.1% [77.4-86.2] (257/313) | 89.8% [85.4-93.3] (221/246) |
| IV | 90.4% [86.8-93.2] (328/363) | 92.7% [89.2-95.3] (292/315) |
| All | 57.4% [54.9-59.9] (879/1532) | 89.6% [87.3-91.6] (740/826) |

TABLE 12
Classification accuracy using the genomic regions of List 8.

| Stage | Cancer Presence | Cancer Type |
|---|---|---|
| I | 13% [10-16.6] (55/422) | 75.6% [59.7-87.6] (31/41) |
| II | 33% [28.3-37.9] (128/388) | 89.2% [81.9-94.3] (99/111) |
| III | 67.7% [62.2-72.91 (212/313) | 89.9% [84.7-93.81 (169/188) |
| IV | 84.6% [80.4-88.1] (307/363) | 91% [87.1-94] (262/288) |
| All | 47.5% [45-50.1] (728/1532) | 89.5% [86.9-91.8] (582/650) |

TABLE 13
Classification accuracy using the genomic regions of List 9.

| Stage | Cancer Presence | Cancer Type |
|---|---|---|
| I | 12.1% [9.1-15.6] (51/422) | 76.3% [59.8-88.6] (29/38) |
| II | 35.1% [30.3-40] (136/388) | 88.1% [81.1-93.2] (111/126) |
| III | 68.4% [62.9-73.5] (214/313) | 92.1% [87.2-95.5] (174/189) |
| IV | 85.1% [81-88.6] (309/363) | 90.7% [86.8-93.8] (264/291) |
| All | 48.1% [45.6-50.6] (737/1532) | 89.9% [87.3-92] (602/670) |

TABLE 14
Classification accuracy using the genomic regions of List 10.

| Stage | Cancer Presence | Cancer Type |
|---|---|---|
| I | 14.2% [11-17.9] (60/422) | 72.3% [57.4-84.4] (34/47) |
| II | 36.9% [32-41.9] (143/388) | 87.2% [80.3-92.4] (116/133) |
| III | 71.9% [66.6-76.8] (225/313) | 92.6% [88-95.8] (187/202) |
| IV | 85.1% [81-88.6] (309/363) | 90.9% [87-93.9] (269/296) |
| All | 49.7% [47.2-52.3] (762/1532) | 89.6% [87.1-91.7] (627/700) |

TABLE 15
Classification accuracy using the genomic regions of List 11.

| Stage | Cancer Presence | Cancer Type |
|---|---|---|
| I | 13% [10-16.6] (55/422) | 78.3% [63.6-89.1] (36/46) |
| II | 35.3% [30.6-40.3] (137/388) | 90.7% [84.3-95.1] (117/129) |
| III | 72.5% [67.2-77.4] (227/313) | 87.7% [82.5-91.8] (185/211) |
| IV | 85.1% [81-88.6] (309/363) | 91.1% [87.3-94.1] (277/304) |
| All | 49.3% [46.8-51.9] (756/1532) | 89.4% [86.9-91.6] (641/717) |

TABLE 16
Classification accuracy using the genomic regions of List 12.

| Stage | Cancer Presence | Cancer Type |
|---|---|---|
| I | 13.5% [10.4-17.1] (57/422) | 73.5% [58.9-85.1] (36/49) |
| II | 36.9% [32-41.9] (143/388) | 88.5% [81.7-93.4] (115/130) |
| III | 72.2% [66.9-77.1] (226/313) | 92.5% [87.9-95.7] (185/200) |
| IV | 84.8% [80.7-88.4] (308/363) | 91.5% [87.7-94.4] (269/294) |
| All | 49.6% [47.1-52.1] (760/1532) | 90.1% [87.6-92.2] (628/697) |

TABLE 17
Classification accuracy using the genomic regions of List 13.

| Stage | Cancer Presence | Cancer Type |
|---|---|---|
| I | 9% [6.5-12.2] (38/422) | 78.9% [54.4-93.9] (15/19) |
| II | 29.9% [25.4-34.7] (116/388) | 86% [76.9-92.6] (74/86) |
| III | 57.5% [51.8-63.1] (180/313) | 92.1% [86.3-96] (128/139) |
| IV | 80.7% [76.3-84.6] (293/363) | 90.7% [86.3-94.1] (215/237) |
| All | 42% [39.5-44.5] (643/1532) | 90.1% [87.1-92.6] (445/494) |

TABLE 18
Classification accuracy using the genomic regions of List 14.

| Stage | Cancer Presence | Cancer Type |
|---|---|---|
| I | 8.5% [6-11.6] (36/422) | 75% [50.9-91.3] (15/20) |
| II | 30.2% [25.6-35] (117/388) | 85.9% [77-92.3] (79/92) |
| III | 61.3% [55.7-66.8] (192/313) | 91.4% [85.7-95.3] (138/151) |
| IV | 81% [76.6-84.9] (294/363) | 90.2% [85.8-93.6] (222/246) |
| All | 43.4% [40.9-45.9] (665/1532) | 89.6% [86.7-92.1] (474/529) |

TABLE 19
Classification accuracy using the genomic regions of List 15.

| Stage | Cancer Presence | Cancer Type |
|---|---|---|
| I | 10.2% [7.5-13.5] (43/422) | 70.4% [49.8-86.2] (19/27) |
| II | 31.7% [27.1-36.6] (123/388) | 87.4% [79.4-93.1] (90/103) |
| III | 62% [56.4-67.4] (194/313) | 91.7% [86.3-95.5] (144/157) |
| IV | 82.1% [77.8-85.9] (298/363) | 90.5% [86.2-93.7] (237/262) |
| All | 44.7% [42.2-47.2] (685/1532) | 89.7% [86.9-92.1] (514/573) |

TABLE 20
Classification accuracy using the genomic regions of List 16.

| Stage | Cancer Presence | Cancer Type |
|---|---|---|
| I | 10.2% [7.5-13.5] (43/422) | 65.4% [44.3-82.8] (17/26) |
| II | 33% [28.3-37.9] (128/388) | 88.5% [81.1-93.7] (100/113) |
| III | 65.5% [59.9-70.8] (205/313) | 90.9% [85.4-94.8] (150/165) |
| IV | 83.2% [78.9-86.9] (302/363) | 91.3% [87.3-94.4] (242/265) |
| All | 46% [43.5-48.6] (705/1532) | 89.7% [87-92] (532/593) |

TABLE 21
Classification accuracy using a randomly selected
subset of 10% of the genomic regions of List 12.

| Stage | Cancer Presence | Cancer Type |
|---|---|---|
| I | 10% [7.3-13.2] (42/422) | 78.1% [60-90.7] (25/32) |
| II | 32% [27.3-36.9] (124/388) | 87.5% [79.9-93] (98/112) |
| III | 61% [55.4-66.5] (191/313) | 89.6% [84.1-93.7] (155/173) |
| IV | 82.9% [78.6-86.6] (301/363) | 90.5% [86.4-93.7] (247/273) |
| All | 44.1% [41.6-46.7] (676/1532) | 89.3% [86.6-91.6] (542/607) |

TABLE 22
Classification accuracy using a randomly selected
subset of 25% of the genomic regions of List 12.

| Stage | Cancer Presence | Cancer Type |
|---|---|---|
| I | 11.8% [8.9-15.3] (50/422) | 71.4% [55.4-84.3] (30/42) |
| II | 33.2% [28.6-38.2] (129/388) | 90.8% [84.2-95.3] (109/120) |
| III | 65.5% [59.9-70.8] (205/313) | 89.9% [84.7-93.8] (169/188) |
| IV | 84.6% [80.4-88.1] (307/363) | 91.5% [87.7-94.5] (260/284) |
| All | 46.5% [44-49.1] (713/1532) | 89.9% [87.4-92.1] (589/655) |

TABLE 23
Classification accuracy using a randomly selected
subset of 50% of the genomic regions of List 4.

| Stage | Cancer Presence | Cancer Type |
|---|---|---|
| I | 11.4% [8.5-14.8] (48/422) | 73.8% [58-86.1] (31/42) |
| II | 33.2% [28.6-38.2] (129/388) | 88.5% [81.5-93.6] (108/122) |
| III | 64.9% [59.3-70.1] (203/313) | 92.9% [88.2-96.2] (171/184) |
| IV | 83.2% [78.9-86.9] (302/363) | 90.4% [86.4-93.5] (263/291) |
| All | 46.3% [43.8-48.9] (710/1532) | 89.8% [87.2-92] (598/666) |

TABLE 24
Cancer type classification accuracy with various genomic target regions.

| | List 4 | | List 5 | | List 6 | | List 7 | | List 8 | | List 9 | | List 10 | |
|---|---|---|---|---|---|---|---|---|---|---|---|---|---|---|
| Cancer Type | % | Fxn | % | Fxn | % | Fxn | % | Fxn | % | Fxn | % | Fxn | % | Fxn |
| All Types | 92 | 613/666 | 91 | 740/815 | 91 | 622/686 | 90 | 747/827 | 91 | 576/633 | 90 | 593/656 | 91 | 627/688 |
| Thyroid | n/a | 0/0 | 0 | 0/0 | n/a | 0/0 | n/a | 0/0 | n/a | 0/0 | n/a | 0/0 | n/a | 0/0 |
| Melanoma | n/a | 0/0 | 100 | 3/3 | n/a | 0/0 | n/a | 0/0 | n/a | 0/0 | n/a | 0/0 | n/a | 0/0 |
| Sarcoma | 100 | 3/3 | 100 | 3/3 | 100 | 3/3 | 100 | 3/3 | 100 | 3/3 | 100 | 3/3 | 100 | 3/3 |
| Myeloid Neoplasm | 100 | 3/3 | 0 | 0/0 | 100 | 3/3 | 100 | 3/3 | 100 | 3/3 | 100 | 3/3 | 100 | 3/3 |
| Renal | n/a | 0/0 | 92 | 12/13 | n/a | 0/0 | n/a | 0/0 | n/a | 0/0 | n/a | 0/0 | n/a | 0/0 |
| Prostate | 91 | 10/11 | 90 | 17/19 | 91 | 10/11 | 92 | 12/13 | 90 | 9/10 | 90 | 9/10 | 91 | 10/11 |
| Breast | 100 | 13/13 | 95 | 80/84 | 100 | 13/13 | 90 | 18/20 | 100 | 15/15 | 100 | 14/14 | 100 | 13/13 |
| Uterine | 97 | 60/62 | 86 | 19/22 | 95 | 62/65 | 93 | 82/88 | 97 | 57/59 | 97 | 60/62 | 96 | 63/66 |
| Ovary | 100 | 8/8 | 96 | 26/27 | 100 | 10/10 | 91 | 20/22 | 89 | 8/9 | 100 | 8/8 | 92 | 12/13 |
| Bladder & Urothelial | 100 | 28/28 | 100 | 2/2 | 100 | 27/27 | 96 | 26/27 | 96 | 22/23 | 92 | 23/25 | 96 | 26/27 |
| Cervical | n/a | 0/0 | 50 | 2/4 | 100 | 1/1 | 100 | 2/2 | 100 | 2/2 | 100 | 2/2 | 67 | 2/3 |
| Anorectal | 0 | 0/1 | 100 | 1/1 | n/a | 0/0 | 40 | 2/5 | 0 | 0/1 | 0 | 0/1 | 50 | 1/2 |
| Head & Neck | n/a | 0/0 | 75 | 46/61 | n/a | 0/0 | 100 | 1/1 | n/a | 0/0 | 100 | 1/1 | 100 | 1/1 |
| Colorectal | 73 | 37/51 | 99 | 93/94 | 69 | 38/55 | 73 | 46/63 | 76 | 37/49 | 71 | 37/52 | 73 | 37/51 |
| Liver & Bile duct | 100 | 74/74 | 95 | 18/19 | 99 | 73/74 | 99 | 94/95 | 100 | 63/63 | 99 | 64/65 | 100 | 71/71 |
| Pancreas & Gallbladder | 95 | 18/19 | 90 | 68/76 | 90 | 18/20 | 95 | 18/19 | 90 | 17/19 | 90 | 17/19 | 95 | 18/19 |

| Cancer | List 11 | | List 12 | | List 13 | | List 14 | | List 15 | | List 16 | |
|---|---|---|---|---|---|---|---|---|---|---|---|---|
| Type | % | Fxn | % | Fxn | % | Fxn | % | Fxn | % | Fxn | % | Fxn |
| All Types | 92 | 627/684 | 91 | 620/681 | 91 | 416/456 | 91 | 450/497 | 92 | 488/533 | 91 | 513/565 |
| Thyroid | n/a | 0/0 | n/a | 0/0 | n/a | 0/0 | n/a | 0/0 | n/a | 0/0 | n/a | 0/0 |
| Melanoma | n/a | 0/0 | n/a | 0/0 | n/a | 0/0 | n/a | 0/0 | n/a | 0/0 | n/a | 0/0 |
| Sarcoma | 100 | 3/3 | 100 | 3/3 | 100 | 2/2 | 100 | 1/1 | 100 | 2/2 | 100 | 3/3 |
| Myeloid Neoplasm | 100 | 3/3 | 100 | 3/3 | 100 | 1/1 | 100 | 1/1 | 100 | 2/2 | 100 | 2/2 |
| Renal | n/a | 0/0 | n/a | 0/0 | n/a | 0/0 | n/a | 0/0 | n/a | 0/0 | n/a | 0/0 |
| Prostate | 91 | 10/11 | 91 | 10/11 | 100 | 3/3 | 100 | 3/3 | 100 | 6/6 | 100 | 6/6 |
| Breast | 100 | 14/14 | 100 | 13/13 | 100 | 5/5 | 100 | 6/6 | 100 | 10/10 | 100 | 9/9 |
| Uterine | 97 | 62/64 | 94 | 63/67 | 98 | 39/40 | 98 | 42/43 | 98 | 47/48 | 98 | 50/51 |
| Ovary | 100 | 11/11 | 92 | 11/12 | 100 | 1/1 | 100 | 2/2 | 67 | 2/3 | 100 | 2/2 |
| Bladder & Urothelial | 100 | 26/26 | 100 | 27/27 | 100 | 16/16 | 94 | 17/18 | 95 | 18/19 | 96 | 21/22 |
| Cervical | 100 | 2/2 | n/a | 0/0 | n/a | 0/0 | n/a | 0/0 | n/a | 0/0 | n/a | 0/0 |
| Anorectal | 0 | 0/1 | 0 | 0/1 | n/a | 0/0 | n/a | 0/0 | n/a | 0/0 | n/a | 0/0 |
| Head & Neck | 100 | 1/1 | 100 | 1/1 | n/a | 0/0 | n/a | 0/0 | n/a | 0/0 | n/a | 0/0 |
| Colorectal | 69 | 38/55 | 70 | 37/53 | 71 | 25/35 | 68 | 28/41 | 64 | 27/42 | 65 | 30/46 |
| Liver & Bile duct | 99 | 75/76 | 100 | 71/71 | 100 | 54/54 | 100 | 56/56 | 98 | 63/64 | 100 | 64/64 |
| Pancreas & Gallbladder | 95 | 19/20 | 95 | 19/20 | 93 | 13/14 | 82 | 14/17 | 94 | 15/16 | 88 | 15/17 |

| | | | Random 50% | | | | Random 10% | | Random 25% | |
|---|---|---|---|---|---|---|---|---|---|---|
| | List 4 | | of List 4 | | List 12 | | of List 12 | | of List 12 | |
| Cancer Type | % | Fxn | % | Fxn | % | Fxn | % | Fxn | % | Fxn |
| All Types | 92 | 613/666 | 91 | 578/635 | 91 | 620/681 | 91 | 531/586 | 91 | 567/622 |
| Thyroid | n/a | 0/0 | n/a | 0/0 | n/a | 0/0 | n/a | 0/0 | n/a | 0/0 |
| Melanoma | n/a | 0/0 | n/a | 0/0 | n/a | 0/0 | n/a | 0/0 | n/a | 0/0 |
| Sarcoma | 100 | 3/3 | 100 | 3/3 | 100 | 3/3 | 100 | 3/3 | 100 | 3/3 |
| Myeloid Neoplasm | 100 | 3/3 | 100 | 3/3 | 100 | 3/3 | 100 | 3/3 | 100 | 3/3 |
| Renal | n/a | 0/0 | n/a | 0/0 | n/a | 0/0 | n/a | 0/0 | n/a | 0/0 |
| Prostate | 91 | 10/11 | 89 | 8/9 | 91 | 10/11 | 100 | 7/7 | 90 | 9/10 |
| Breast | 100 | 13/13 | 100 | 13/13 | 100 | 13/13 | 93 | 13/14 | 100 | 14/14 |
| Uterine | 97 | 60/62 | 93 | 57/61 | 94 | 63/67 | 96 | 54/56 | 95 | 58/61 |
| Ovary | 100 | 8/8 | 88 | 7/8 | 92 | 11/12 | 83 | 5/6 | 100 | 7/7 |
| Bladder & Urothelial | 100 | 28/28 | 96 | 26/27 | 100 | 27/27 | 100 | 19/19 | 100 | 23/23 |
| Cervical | n/a | 0/0 | n/a | 0/0 | n/a | 0/0 | 100 | 1/1 | 100 | 1/1 |
| Anorectal | 0 | 0/1 | 0 | 0/1 | 0 | 0/1 | 0 | 0/1 | n/a | 0/0 |
| Head & Neck | n/a | 0/0 | n/a | 0/0 | 100 | 1/1 | n/a | 0/0 | n/a | 0/0 |
| Colorectal | 73 | 37/51 | 71 | 37/52 | 70 | 37/53 | 72 | 33/46 | 69 | 34/49 |
| Liver & Bile duct | 100 | 74/74 | 99 | 69/70 | 100 | 71/71 | 100 | 65/65 | 99 | 66/67 |
| Pancreas & Gallbladder | 95 | 18/19 | 94 | 17/18 | 95 | 19/20 | 95 | 18/19 | 95 | 18/19 |

TABLE 25
Classification sensitivity with 99.0% specificity using the target genomic regions of List 4.

| | | | | | | | Myeloid | | | | | | | | | | | | Bladder & | |
|---|---|---|---|---|---|---|---|---|---|---|---|---|---|---|---|---|---|---|---|---|
| | Thyroid | | Melanoma | | Sarcoma | | Neoplasm | | Renal | | Prostate | | Breast | | Uterine | | Ovary | | Urothecal | |
| Stage | % | Fxn | % | Fxn | % | Fxn | % | Fxn | % | Fxn | % | Fxn | % | Fxn | % | Fxn | % | Fxn | % | Fxn |
| All | 0 | 0/4 | 43 | 3/7 | 29 | 5/17 | 25 | 1/4 | 20 | 11/56 | 9 | 16/188 | 27 | 67/247 | 18 | 15/84 | 87 | 32/37 | 38 | 6/16 |
| I | 0 | 0/2 | 0 | 0/3 | 50 | 1/2 | | | 0 | 0/37 | 3 | 1/39 | 2 | 2/102 | 14 | 10/73 | 25 | 1/4 | 33 | 2/6 |
| II | 0 | 0/1 | 0 | 0/1 | 0 | 0/4 | | | 0 | 0/4 | 1 | 1/113 | 33 | 36/110 | 33 | 1/3 | 0 | 0/2 | 43 | 3/7 |
| III | | | | | 40 | 2/5 | | | 50 | 2/4 | 11 | 2/19 | 85 | 23/27 | 60 | 3/5 | 100 | 25/25 | 50 | 1/2 |
| IV | 0 | 0/1 | 100 | 3/3 | 33 | 2/6 | | | 82 | 9/11 | 71 | 12/17 | 75 | 6/8 | 33 | 1/3 | 100 | 6/6 | 0 | 0/1 |

| | | | | | Head & | | | | | | Pancreas & | | | | Multiple | | Lymphoid | | | |
|---|---|---|---|---|---|---|---|---|---|---|---|---|---|---|---|---|---|---|---|---|
| | Cervical | | Anorectal | | Neck | | Colorectal | | Liver | | Gallbladder | | Upper GI | | Myeloma | | Neoplasm | | Lung | |
| Stage | % | Fxn | % | Fxn | % | Fxn | % | Fxn | % | Fxn | % | Fxn | % | Fxn | % | Fxn | % | Fxn | % | Fxn |
| All | 27 | 3/11 | 64 | 9/14 | 84 | 52/62 | 65 | 79/121 | 86 | 25/29 | 68 | 65/95 | 73 | 49/67 | 77 | 26/34 | 73 | 107/147 | 64 | 168/261 |
| I | 13 | 1/8 | 25 | 1/4 | 86 | 6/7 | 8 | 1/13 | 60 | 3/5 | 33 | 5/15 | 11 | 1/9 | 60 | 6/10 | 27 | 4/15 | 12 | 7/60 |
| II | 100 | 1/1 | 60 | 3/5 | 77 | 10/13 | 36 | 8/22 | 86 | 6/7 | 60 | 9/15 | 58 | 7/12 | 69 | 9/13 | 85 | 23/27 | 65 | 15/23 |
| III | 50 | 1/2 | 100 | 5/5 | 75 | 12/16 | 68 | 28/41 | 86 | 6/7 | 58 | 11/19 | 79 | 15/19 | 100 | 11/11 | 78 | 21/27 | 75 | 54/72 |
| IV | | | | | 92 | 24/26 | 93 | 42/45 | 100 | 10/10 | 87 | 40/46 | 96 | 26/27 | | | 80 | 31/39 | 87 | 92/106 |

TABLE 26
Classification sensitivity with 99.0% specificity using the target genomic regions of List 5.

| | | | | | | | Myeloid | | | | | | | | | | | | Bladder & | |
|---|---|---|---|---|---|---|---|---|---|---|---|---|---|---|---|---|---|---|---|---|
| | Thyroid | | Melanoma | | Sarcoma | | Neoplasm | | Renal | | Prostate | | Breast | | Uterine | | Ovary | | Urothecal | |
| Stage | % | Fxn | % | Fxn | % | Fxn | % | Fxn | % | Fxn | % | Fxn | % | Fxn | % | Fxn | % | Fxn | % | Fxn |
| All | 0 | 0/4 | 43 | 3/7 | 53 | 9/17 | 0 | 0/4 | 23 | 13/56 | 13 | 25/188 | 35 | 86/247 | 30 | 25/84 | 92 | 34/37 | 63 | 10/16 |
| I | 0 | 0/2 | 0 | 0/3 | 100 | 2/2 | | | 0 | 0/37 | 5 | 2/39 | 5 | 5/102 | 25 | 18/73 | 75 | 3/4 | 67 | 4/6 |
| II | 0 | 0/1 | 0 | 0/1 | 25 | 1/4 | | | 50 | 2/4 | 5 | 6/113 | 45 | 49/110 | 67 | 2/3 | 0 | 0/2 | 57 | 4/7 |
| III | | | | | 40 | 2/5 | | | 50 | 2/4 | 11 | 2/19 | 89 | 24/27 | 60 | 3/5 | 100 | 25/25 | 50 | 1/2 |
| IV | 0 | 0/1 | 100 | 3/3 | 67 | 4/6 | | | 82 | 9/11 | 88 | 15/17 | 100 | 8/8 | 67 | 2/3 | 100 | 6/6 | 100 | 1/1 |

| | | | | | Head & | | | | | | Pancreas & | | | | Multiple | | Lymphoid | | | |
|---|---|---|---|---|---|---|---|---|---|---|---|---|---|---|---|---|---|---|---|---|
| | Cervical | | Anorectal | | Neck | | Colorectal | | Liver | | Gallbladder | | Upper GI | | Myeloma | | Neoplasm | | Lung | |
| Stage | % | Fxn | % | Fxn | % | Fxn | % | Fxn | % | Fxn | % | Fxn | % | Fxn | % | Fxn | % | Fxn | % | Fxn |
| All | 46 | 5/11 | 71 | 10/14 | 92 | 57/62 | 83 | 100/121 | 86 | 25/29 | 85 | 81/95 | 85 | 57/67 | 74 | 25/34 | 71 | 105/147 | 74 | 194/261 |
| I | 25 | 2/8 | 50 | 2/4 | 86 | 6/7 | 46 | 6/13 | 60 | 3/5 | 60 | 9/15 | 22 | 2/9 | 50 | 5/10 | 27 | 4/15 | 20 | 12/60 |
| II | 100 | 1/1 | 60 | 3/5 | 92 | 12/13 | 77 | 17/22 | 86 | 6/7 | 80 | 12/15 | 83 | 10/12 | 69 | 9/13 | 82 | 22/27 | 87 | 20/23 |
| III | 100 | 2/2 | 100 | 5/5 | 94 | 15/16 | 85 | 35/41 | 86 | 6/7 | 84 | 16/19 | 95 | 18/19 | 100 | 11/11 | 85 | 23/27 | 89 | 64/72 |
| IV | | | | | 92 | 24/26 | 93 | 42/45 | 100 | 10/10 | 96 | 44/46 | 100 | 27/27 | | | 80 | 31/39 | 93 | 98/106 |

TABLE 27
Classification sensitivity with 99.0% specificity using the target genomic regions of List 6.

| | | | | | | | Myeloid | | | | | | | | | | | | Bladder & | |
|---|---|---|---|---|---|---|---|---|---|---|---|---|---|---|---|---|---|---|---|---|
| | Thyroid | | Melanoma | | Sarcoma | | Neoplasm | | Renal | | Prostate | | Breast | | Uterine | | Ovary | | Urothecal | |
| Stage | % | Fxn | % | Fxn | % | Fxn | % | Fxn | % | Fxn | % | Fxn | % | Fxn | % | Fxn | % | Fxn | % | Fxn |
| All | 0 | 0/4 | 43 | 3/7 | 35 | 6/17 | 25 | 1/4 | 20 | 11/56 | 9 | 17/188 | 29 | 71/247 | 18 | 15/84 | 87 | 32/37 | 44 | 7/16 |
| I | 0 | 0/2 | 0 | 0/3 | 50 | 1/2 | | | 0 | 0/37 | 0 | 0/39 | 3 | 3/102 | 14 | 10/73 | 25 | 1/4 | 67 | 4/6 |
| II | 0 | 0/1 | 0 | 0/1 | 0 | 0/4 | | | 0 | 0/4 | 3 | 3/113 | 34 | 37/110 | 33 | 1/3 | 0 | 0/2 | 43 | 3/7 |
| III | | | | | 60 | 3/5 | | | 50 | 2/4 | 11 | 2/19 | 85 | 23/27 | 60 | 3/5 | 100 | 25/25 | 0 | 0/2 |
| IV | 0 | 0/1 | 100 | 3/3 | 33 | 2/6 | | | 82 | 9/11 | 71 | 12/17 | 100 | 8/8 | 33 | 1/3 | 100 | 6/6 | 0 | 0/1 |

| | | | | | Head & | | | | | | Pancreas & | | | | Multiple | | Lymphoid | | | |
|---|---|---|---|---|---|---|---|---|---|---|---|---|---|---|---|---|---|---|---|---|
| | Cervical | | Anorectal | | Neck | | Colorectal | | Liver | | Gallbladder | | Upper GI | | Myeloma | | Neoplasm | | Lung | |
| Stage | % | Fxn | % | Fxn | % | Fxn | % | Fxn | % | Fxn | % | Fxn | % | Fxn | % | Fxn | % | Fxn | % | Fxn |
| All | 27 | 3/11 | 64 | 9/14 | 81 | 50/62 | 68 | 82/121 | 86 | 25/29 | 70 | 66/95 | 69 | 46/67 | 79 | 27/34 | 72 | 106/147 | 65 | 169/261 |
| I | 13 | 1/8 | 25 | 1/4 | 86 | 6/7 | 15 | 2/13 | 60 | 3/5 | 27 | 4/15 | 11 | 1/9 | 60 | 6/10 | 20 | 3/15 | 12 | 7/60 |
| II | 100 | 1/1 | 60 | 3/5 | 77 | 10/13 | 41 | 9/22 | 86 | 6/7 | 67 | 10/15 | 58 | 7/12 | 77 | 10/13 | 89 | 24/27 | 65 | 15/23 |
| III | 50 | 1/2 | 100 | 5/5 | 69 | 11/16 | 71 | 29/41 | 86 | 6/7 | 63 | 12/19 | 68 | 13/19 | 100 | 11/11 | 82 | 22/27 | 76 | 55/72 |
| IV | | | | | 89 | 23/26 | 93 | 42/45 | 100 | 10/10 | 87 | 40/46 | 93 | 25/27 | | | 80 | 31/39 | 87 | 92/106 |

TABLE 28
Classification sensitivity with 99.0% specificity using the target genomic regions of List 7.

| | | | | | | | Myeloid | | | | | | | | | | | | Bladder & | |
|---|---|---|---|---|---|---|---|---|---|---|---|---|---|---|---|---|---|---|---|---|
| | Thyroid | | Melanoma | | Sarcoma | | Neoplasm | | Renal | | Prostate | | Breast | | Uterine | | Ovary | | Urothecal | |
| Stage | % | Fxn | % | Fxn | % | Fxn | % | Fxn | % | Fxn | % | Fxn | % | Fxn | % | Fxn | % | Fxn | % | Fxn |
| All | 0 | 0/4 | 43 | 3/7 | 53 | 9/17 | 0 | 0/4 | 23 | 13/56 | 12 | 23/188 | 35 | 86/247 | 30 | 25/84 | 89 | 33/37 | 63 | 10/16 |
| I | 0 | 0/2 | 0 | 0/3 | 100 | 2/2 | | | 0 | 0/37 | 5 | 2/39 | 5 | 5/102 | 25 | 18/73 | 75 | 3/4 | 67 | 4/6 |
| II | 0 | 0/1 | 0 | 0/1 | 25 | 1/4 | | | 50 | 2/4 | 4 | 5/113 | 45 | 49/110 | 67 | 2/3 | 0 | 0/2 | 57 | 4/7 |
| III | | | | | 40 | 2/5 | | | 50 | 2/4 | 11 | 2/19 | 89 | 24/27 | 60 | 3/5 | 96 | 24/25 | 50 | 1/2 |
| IV | 0 | 0/1 | 100 | 3/3 | 67 | 4/6 | | | 82 | 9/11 | 82 | 14/17 | 100 | 8/8 | 67 | 2/3 | 100 | 6/6 | 100 | 1/1 |

| | | | | | Head & | | | | | | Pancreas & | | | | Multiple | | Lymphoid | | | |
|---|---|---|---|---|---|---|---|---|---|---|---|---|---|---|---|---|---|---|---|---|
| | Cervical | | Anorectal | | Neck | | Colorectal | | Liver | | Gallbladder | | Upper GI | | Myeloma | | Neoplasm | | Lung | |
| Stage | % | Fxn | % | Fxn | % | Fxn | % | Fxn | % | Fxn | % | Fxn | % | Fxn | % | Fxn | % | Fxn | % | Fxn |
| All | 36 | 4/11 | 71 | 10/14 | 94 | 58/62 | 81 | 98/121 | 86 | 25/29 | 86 | 82/95 | 85 | 57/67 | 79 | 27/34 | 72 | 106/147 | 74 | 194/261 |
| I | 13 | 1/8 | 50 | 2/4 | 100 | 7/7 | 46 | 6/13 | 60 | 3/5 | 60 | 9/15 | 22 | 2/9 | 60 | 6/10 | 33 | 5/15 | 20 | 12/60 |
| II | 100 | 1/1 | 60 | 3/5 | 92 | 12/13 | 73 | 16/22 | 86 | 6/7 | 87 | 13/15 | 83 | 10/12 | 77 | 10/13 | 82 | 22/27 | 87 | 20/23 |
| III | 100 | 2/2 | 100 | 5/5 | 94 | 15/16 | 83 | 34/41 | 86 | 6/7 | 84 | 16/19 | 95 | 18/19 | 100 | 11/11 | 85 | 23/27 | 89 | 64/72 |
| IV | | | | | 92 | 24/26 | 93 | 42/45 | 100 | 10/10 | 96 | 44/46 | 100 | 27/27 | | | 80 | 31/39 | 93 | 98/106 |

TABLE 29
Classification sensitivity with 99.0% specificity using the target genomic regions of List 8.

| | | | | | | | Myeloid | | | | | | | | | | | | Bladder & | |
|---|---|---|---|---|---|---|---|---|---|---|---|---|---|---|---|---|---|---|---|---|
| | Thyroid | | Melanoma | | Sarcoma | | Neoplasm | | Renal | | Prostate | | Breast | | Uterine | | Ovary | | Urothecal | |
| Stage | % | Fxn | % | Fxn | % | Fxn | % | Fxn | % | Fxn | % | Fxn | % | Fxn | % | Fxn | % | Fxn | % | Fxn |
| All | 25 | 1/4 | 43 | 3/7 | 41 | 7/17 | 25 | 1/4 | 20 | 11/56 | 11 | 20/188 | 26 | 64/247 | 16 | 13/84 | 84 | 31/37 | 44 | 7/16 |
| I | 0 | 0/2 | 0 | 0/3 | 100 | 2/2 | | | 0 | 0/37 | 5 | 2/39 | 2 | 2/102 | 11 | 8/73 | 25 | 1/4 | 33 | 2/6 |
| II | 0 | 0/1 | 0 | 0/1 | 0 | 0/4 | | | 0 | 0/4 | 3 | 3/113 | 29 | 32/110 | 33 | 1/3 | 0 | 0/2 | 57 | 4/7 |
| III | | | | | 40 | 2/5 | | | 50 | 2/4 | 11 | 2/19 | 85 | 23/27 | 60 | 3/5 | 96 | 24/25 | 50 | 1/2 |
| IV | 100 | 1/1 | 100 | 3/3 | 50 | 3/6 | | | 82 | 9/11 | 77 | 13/17 | 88 | 7/8 | 33 | 1/3 | 100 | 6/6 | 0 | 0/1 |

| | | | | | Head & | | | | | | Pancreas & | | | | Multiple | | Lymphoid | | | |
|---|---|---|---|---|---|---|---|---|---|---|---|---|---|---|---|---|---|---|---|---|
| | Cervical | | Anorectal | | Neck | | Colorectal | | Liver | | Gallbladder | | Upper GI | | Myeloma | | Neoplasm | | Lung | |
| Stage | % | Fxn | % | Fxn | % | Fxn | % | Fxn | % | Fxn | % | Fxn | % | Fxn | % | Fxn | % | Fxn | % | Fxn |
| All | 27 | 3/11 | 71 | 10/14 | 81 | 50/62 | 59 | 71/121 | 83 | 24/29 | 64 | 61/95 | 69 | 46/67 | 79 | 27/34 | 69 | 102/147 | 62 | 161/261 |
| I | 13 | 1/8 | 50 | 2/4 | 100 | 7/7 | 15 | 2/13 | 40 | 2/5 | 27 | 4/15 | 11 | 1/9 | 60 | 6/10 | 27 | 4/15 | 12 | 7/60 |
| II | 100 | 1/1 | 60 | 3/5 | 77 | 10/13 | 23 | 5/22 | 86 | 6/7 | 53 | 8/15 | 50 | 6/12 | 77 | 10/13 | 85 | 23/27 | 57 | 13/23 |
| III | 50 | 1/2 | 100 | 5/5 | 63 | 10/16 | 56 | 23/41 | 86 | 6/7 | 47 | 9/19 | 68 | 13/19 | 100 | 11/11 | 74 | 20/27 | 74 | 53/72 |
| IV | | | | | 89 | 23/26 | 91 | 41/45 | 100 | 10/10 | 87 | 40/46 | 96 | 26/27 | | | 80 | 31/39 | 83 | 88/106 |

TABLE 30
Classification sensitivity with 99.0% specificity using the target genomic regions of List 9.

| | | | | | | | Myeloid | | | | | | | | | | | | Bladder & | |
|---|---|---|---|---|---|---|---|---|---|---|---|---|---|---|---|---|---|---|---|---|
| | Thyroid | | Melanoma | | Sarcoma | | Neoplasm | | Renal | | Prostate | | Breast | | Uterine | | Ovary | | Urothecal | |
| Stage | % | Fxn | % | Fxn | % | Fxn | % | Fxn | % | Fxn | % | Fxn | % | Fxn | % | Fxn | % | Fxn | % | Fxn |
| All | 0 | 0/4 | 43 | 3/7 | 35 | 6/17 | 25 | 1/4 | 21 | 12/56 | 10 | 19/188 | 27 | 66/247 | 17 | 14/84 | 81 | 30/37 | 44 | 7/16 |
| I | 0 | 0/2 | 0 | 0/3 | 50 | 1/2 | | | 3 | 1/37 | 0 | 0/39 | 3 | 3/102 | 12 | 9/73 | 25 | 1/4 | 33 | 2/6 |
| II | 0 | 0/1 | 0 | 0/1 | 0 | 0/4 | | | 0 | 0/4 | 4 | 4/113 | 31 | 34/110 | 33 | 1/3 | 0 | 0/2 | 57 | 4/7 |
| III | | | | | 40 | 2/5 | | | 50 | 2/4 | 11 | 2/19 | 82 | 22/27 | 60 | 3/5 | 92 | 23/25 | 50 | 1/2 |
| IV | 0 | 0/1 | 100 | 3/3 | 50 | 3/6 | | | 82 | 9/11 | 77 | 13/17 | 88 | 7/8 | 33 | 1/3 | 100 | 6/6 | 0 | 0/1 |

| | | | | | Head & | | | | | | Pancreas & | | | | Multiple | | Lymphoid | | | |
|---|---|---|---|---|---|---|---|---|---|---|---|---|---|---|---|---|---|---|---|---|
| | Cervical | | Anorectal | | Neck | | Colorectal | | Liver | | Gallbladder | | Upper GI | | Myeloma | | Neoplasm | | Lung | |
| Stage | % | Fxn | % | Fxn | % | Fxn | % | Fxn | % | Fxn | % | Fxn | % | Fxn | % | Fxn | % | Fxn | % | Fxn |
| All | 27 | 3/11 | 64 | 9/14 | 81 | 50/62 | 61 | 74/121 | 83 | 24/29 | 68 | 65/95 | 69 | 46/67 | 77 | 26/34 | 69 | 102/147 | 63 | 165/261 |
| I | 13 | 1/8 | 25 | 1/4 | 86 | 6/7 | 15 | 2/13 | 40 | 2/5 | 27 | 4/15 | 11 | 1/9 | 60 | 6/10 | 20 | 3/15 | 10 | 6/60 |
| II | 100 | 1/1 | 60 | 3/5 | 77 | 10/13 | 32 | 7/22 | 86 | 6/7 | 67 | 10/15 | 58 | 7/12 | 69 | 9/13 | 85 | 23/27 | 65 | 15/23 |
| III | 50 | 1/2 | 100 | 5/5 | 69 | 11/16 | 61 | 25/41 | 86 | 6/7 | 58 | 11/19 | 68 | 13/19 | 100 | 11/11 | 70 | 19/27 | 74 | 53/72 |
| IV | | | | | 89 | 23/26 | 89 | 40/45 | 100 | 10/10 | 87 | 40/46 | 93 | 25/27 | | | 82 | 32/39 | 86 | 91/106 |

TABLE 31
Classification sensitivity with 99.0% specificity using the target genomic regions of List 10.

| | | | | | | | Myeloid | | | | | | | | | | | | Bladder & | |
|---|---|---|---|---|---|---|---|---|---|---|---|---|---|---|---|---|---|---|---|---|
| | Thyroid | | Melanoma | | Sarcoma | | Neoplasm | | Renal | | Prostate | | Breast | | Uterine | | Ovary | | Urothecal | |
| Stage | % | Fxn | % | Fxn | % | Fxn | % | Fxn | % | Fxn | % | Fxn | % | Fxn | % | Fxn | % | Fxn | % | Fxn |
| All | 0 | 0/4 | 43 | 3/7 | 29 | 5/17 | 25 | 1/4 | 20 | 11/56 | 10 | 18/188 | 28 | 69/247 | 19 | 16/84 | 84 | 31/37 | 38 | 6/16 |
| I | 0 | 0/2 | 0 | 0/3 | 50 | 1/2 | | | 0 | 0/37 | 3 | 1/39 | 3 | 3/102 | 15 | 11/73 | 25 | 1/4 | 33 | 2/6 |
| II | 0 | 0/1 | 0 | 0/1 | 0 | 0/4 | | | 0 | 0/4 | 3 | 3/113 | 34 | 37/110 | 33 | 1/3 | 0 | 0/2 | 43 | 3/7 |
| III | | | | | 40 | 2/5 | | | 50 | 2/4 | 11 | 2/19 | 85 | 23/27 | 60 | 3/5 | 96 | 24/25 | 50 | 1/2 |
| IV | 0 | 0/1 | 100 | 3/3 | 33 | 2/6 | | | 82 | 9/11 | 71 | 12/17 | 75 | 6/8 | 33 | 1/3 | 100 | 6/6 | 0 | 0/1 |

| | | | | | Head & | | | | | | Pancreas & | | | | Multiple | | Lymphoid | | | |
|---|---|---|---|---|---|---|---|---|---|---|---|---|---|---|---|---|---|---|---|---|
| | Cervical | | Anorectal | | Neck | | Colorectal | | Liver | | Gallbladder | | Upper GI | | Myeloma | | Neoplasm | | Lung | |
| Stage | % | Fxn | % | Fxn | % | Fxn | % | Fxn | % | Fxn | % | Fxn | % | Fxn | % | Fxn | % | Fxn | % | Fxn |
| All | 27 | 3/11 | 64 | 9/14 | 82 | 51/62 | 68 | 82/121 | 86 | 25/29 | 72 | 68/95 | 70 | 47/67 | 79 | 27/34 | 69 | 102/147 | 67 | 174/261 |
| I | 13 | 1/8 | 25 | 1/4 | 86 | 6/7 | 15 | 2/13 | 60 | 3/5 | 33 | 5/15 | 11 | 1/9 | 60 | 6/10 | 27 | 4/15 | 17 | 10/60 |
| II | 100 | 1/1 | 60 | 3/5 | 77 | 10/13 | 41 | 9/22 | 86 | 6/7 | 67 | 10/15 | 67 | 8/12 | 77 | 10/13 | 89 | 24/27 | 70 | 16/23 |
| III | 50 | 1/2 | 100 | 5/5 | 75 | 12/16 | 71 | 29/41 | 86 | 6/7 | 68 | 13/19 | 63 | 44184 | 100 | 11/11 | 74 | 20/27 | 76 | 55/72 |
| IV | | | | | 89 | 23/26 | 93 | 42/45 | 100 | 10/10 | 87 | 40/46 | 96 | 26/27 | | | 80 | 31/39 | 88 | 93/106 |

TABLE 32
Classification sensitivity with 99.0% specificity using the target genomic regions of List 11.

| | | | | | | | Myeloid | | | | | | | | | | | | Bladder & | |
|---|---|---|---|---|---|---|---|---|---|---|---|---|---|---|---|---|---|---|---|---|
| | Thyroid | | Melanoma | | Sarcoma | | Neoplasm | | Renal | | Prostate | | Breast | | Uterine | | Ovary | | Urothecal | |
| Stage | % | Fxn | % | Fxn | % | Fxn | % | Fxn | % | Fxn | % | Fxn | % | Fxn | % | Fxn | % | Fxn | % | Fxn |
| All | 0 | 0/4 | 43 | 3/7 | 35 | 6/17 | 25 | 1/4 | 20 | 11/56 | 10 | 18/188 | 28 | 69/247 | 18 | 15/84 | 84 | 31/37 | 38 | 6/16 |
| I | 0 | 0/2 | 0 | 0/3 | 50 | 1/2 | | | 0 | 0/37 | 0 | 0/39 | 4 | 4/102 | 14 | 10/73 | 25 | 1/4 | 33 | 2/6 |
| II | 0 | 0/1 | 0 | 0/1 | 0 | 0/4 | | | 0 | 0/4 | 3 | 3/113 | 33 | 36/110 | 33 | 1/3 | 0 | 0/2 | 43 | 3/7 |
| III | | | | | 60 | 3/5 | | | 50 | 2/4 | 11 | 2/19 | 85 | 23/27 | 60 | 3/5 | 96 | 24/25 | 50 | 1/2 |
| IV | 0 | 0/1 | 100 | 3/3 | 33 | 2/6 | | | 82 | 9/11 | 77 | 13/17 | 75 | 6/8 | 33 | 1/3 | 100 | 6/6 | 0 | 0/1 |

| | | | | | Head & | | | | | | Pancreas & | | | | Multiple | | Lymphoid | | | |
|---|---|---|---|---|---|---|---|---|---|---|---|---|---|---|---|---|---|---|---|---|
| | Cervical | | Anorectal | | Neck | | Colorectal | | Liver | | Gallbladder | | Upper GI | | Myeloma | | Neoplasm | | Lung | |
| Stage | % | Fxn | % | Fxn | % | Fxn | % | Fxn | % | Fxn | % | Fxn | % | Fxn | % | Fxn | % | Fxn | % | Fxn |
| All | 27 | 3/11 | 64 | 9/14 | 84 | 52/62 | 65 | 78/121 | 86 | 25/29 | 71 | 67/95 | 70 | 47/67 | 79 | 27/34 | 70 | 103/147 | 66 | 171/261 |
| I | 13 | 1/8 | 25 | 1/4 | 86 | 6/7 | 8 | 1/13 | 60 | 3/5 | 33 | 5/15 | 11 | 1/9 | 60 | 6/10 | 20 | 3/15 | 13 | 8/60 |
| II | 100 | 1/1 | 60 | 3/5 | 77 | 10/13 | 27 | 6/22 | 86 | 6/7 | 67 | 10/15 | 67 | 8/12 | 77 | 10/13 | 85 | 23/27 | 65 | 15/23 |
| III | 50 | 1/2 | 100 | 5/5 | 75 | 12/16 | 71 | 29/41 | 86 | 6/7 | 63 | 12/19 | 68 | 13/19 | 100 | 11/11 | 74 | 20/27 | 78 | 56/72 |
| IV | | | | | 92 | 24/26 | 93 | 42/45 | 100 | 10/10 | 87 | 40/46 | 93 | 25/27 | | | 80 | 31/39 | 87 | 92/106 |

TABLE 33
Classification sensitivity with 99.0% specificity using the target genomic regions of List 12.

| | | | | | | | Myeloid | | | | | | | | | | | | Bladder & | |
|---|---|---|---|---|---|---|---|---|---|---|---|---|---|---|---|---|---|---|---|---|
| | Thyroid | | Melanoma | | Sarcoma | | Neoplasm | | Renal | | Prostate | | Breast | | Uterine | | Ovary | | Urothecal | |
| Stage | % | Fxn | % | Fxn | % | Fxn | % | Fxn | % | Fxn | % | Fxn | % | Fxn | % | Fxn | % | Fxn | % | Fxn |
| All | 0 | 0/4 | 43 | 3/7 | 35 | 6/17 | 25 | 1/4 | 20 | 11/56 | 10 | 18/188 | 28 | 69/247 | 18 | 15/84 | 87 | 32/37 | 44 | 7/16 |
| I | 0 | 0/2 | 0 | 0/3 | 50 | 1/2 | | | 0 | 0/37 | 0 | 0/39 | 2 | 2/102 | 14 | 10/73 | 25 | 1/4 | 50 | 3/6 |
| II | 0 | 0/1 | 0 | 0/1 | 0 | 0/4 | | | 0 | 0/4 | 4 | 4/113 | 35 | 38/110 | 33 | 1/3 | 0 | 0/2 | 43 | 3/7 |
| III | | | | | 60 | 3/5 | | | 50 | 2/4 | 11 | 2/19 | 85 | 23/27 | 60 | 3/5 | 100 | 25/25 | 50 | 1/2 |
| IV | 0 | 0/1 | 100 | 3/3 | 33 | 2/6 | | | 82 | 9/11 | 71 | 12/17 | 75 | 6/8 | 33 | 1/3 | 100 | 6/6 | 0 | 0/1 |

| | | | | | Head & | | | | | | Pancreas & | | | | Multiple | | Lymphoid | | | |
|---|---|---|---|---|---|---|---|---|---|---|---|---|---|---|---|---|---|---|---|---|
| | Cervical | | Anorectal | | Neck | | Colorectal | | Liver | | Gallbladder | | Upper GI | | Myeloma | | Neoplasm | | Lung | |
| Stage | % | Fxn | % | Fxn | % | Fxn | % | Fxn | % | Fxn | % | Fxn | % | Fxn | % | Fxn | % | Fxn | % | Fxn |
| All | 27 | 3/11 | 64 | 9/14 | 81 | 50/62 | 66 | 80/121 | 86 | 25/29 | 76 | 72/95 | 70 | 47/67 | 79 | 27/34 | 69 | 101/147 | 65 | 169/261 |
| I | 13 | 1/8 | 25 | 1/4 | 86 | 6/7 | 15 | 2/13 | 60 | 3/5 | 40 | 6/15 | 11 | 1/9 | 60 | 6/10 | 20 | 3/15 | 13 | 8/60 |
| II | 100 | 1/1 | 60 | 3/5 | 77 | 10/13 | 36 | 8/22 | 86 | 6/7 | 73 | 11/15 | 67 | 8/12 | 77 | 10/13 | 85 | 23/27 | 65 | 15/23 |
| III | 50 | 1/2 | 100 | 5/5 | 69 | 11/16 | 68 | 28/41 | 86 | 6/7 | 74 | 14/19 | 68 | 13/19 | 100 | 11/11 | 74 | 20/27 | 75 | 54/72 |
| IV | | | | | 89 | 23/26 | 93 | 42/45 | 100 | 10/10 | 89 | 41/46 | 93 | 25/27 | | | 80 | 31/39 | 87 | 92/106 |

TABLE 34
Classification sensitivity with 99.0% specificity using the target genomic regions of List 13.

| | | | | | | | Myeloid | | | | | | | | | | | | Bladder & | |
|---|---|---|---|---|---|---|---|---|---|---|---|---|---|---|---|---|---|---|---|---|
| | Thyroid | | Melanoma | | Sarcoma | | Neoplasm | | Renal | | Prostate | | Breast | | Uterine | | Ovary | | Urothecal | |
| Stage | % | Fxn | % | Fxn | % | Fxn | % | Fxn | % | Fxn | % | Fxn | % | Fxn | % | Fxn | % | Fxn | % | Fxn |
| All | 0 | 0/4 | 43 | 3/7 | 35 | 6/17 | 25 | 1/4 | 14 | 8/56 | 9 | 16/188 | 21 | 52/247 | 11 | 9/84 | 62 | 23/37 | 38 | 6/16 |
| I | 0 | 0/2 | 0 | 0/3 | 50 | 1/2 | | | 0 | 0/37 | 0 | 0/39 | 1 | 1/102 | 8 | 6/73 | 25 | 1/4 | 50 | 3/6 |
| II | 0 | 0/1 | 0 | 0/1 | 0 | 0/4 | | | 0 | 0/4 | 2 | 2/113 | 25 | 27/110 | 33 | 1/3 | 0 | 0/2 | 43 | 3/7 |
| III | | | | | 40 | 2/5 | | | 25 | 1/4 | 11 | 2/19 | 67 | 18/27 | 20 | 1/5 | 68 | 17/25 | 0 | 0/2 |
| IV | 0 | 0/1 | 100 | 3/3 | 50 | 3/6 | | | 64 | 7/11 | 71 | 12/17 | 75 | 6/8 | 33 | 1/3 | 83 | 5/6 | 0 | 0/1 |

| | | | | | Head & | | | | | | Pancreas & | | | | Multiple | | Lymphoid | | | |
|---|---|---|---|---|---|---|---|---|---|---|---|---|---|---|---|---|---|---|---|---|
| | Cervical | | Anorectal | | Neck | | Colorectal | | Liver | | Gallbladder | | Upper GI | | Myeloma | | Neoplasm | | Lung | |
| Stage | % | Fxn | % | Fxn | % | Fxn | % | Fxn | % | Fxn | % | Fxn | % | Fxn | % | Fxn | % | Fxn | % | Fxn |
| All | 27 | 3/11 | 64 | 9/14 | 71 | 44/62 | 55 | 66/121 | 83 | 24/29 | 60 | 57/95 | 54 | 36/67 | 65 | 22/34 | 62 | 91/147 | 59 | 154/261 |
| I | 13 | 1/8 | 25 | 1/4 | 86 | 6/7 | 8 | 1/13 | 40 | 2/5 | 7 | 1/15 | 0 | 0/9 | 40 | 4/10 | 20 | 3/15 | 8 | 5/60 |
| II | 100 | 1/1 | 60 | 3/5 | 77 | 10/13 | 18 | 4/22 | 86 | 6/7 | 60 | 9/15 | 33 | 4/12 | 54 | 7/13 | 89 | 24/27 | 57 | 13/23 |
| III | 50 | 1/2 | 100 | 5/5 | 44 | 7/16 | 56 | 23/41 | 86 | 6/7 | 37 | 7/19 | 37 | 7/19 | 100 | 11/11 | 70 | 19/27 | 68 | 49/72 |
| IV | | | | | 81 | 21/26 | 84 | 38/45 | 100 | 10/10 | 87 | 40/46 | 93 | 25/27 | | | 77 | 30/39 | 82 | 87/106 |

TABLE 35
Classification sensitivity with 99.0% specificity using the target genomic regions of List 14.

| | | | | | | | Myeloid | | | | | | | | | | | | Bladder & | |
|---|---|---|---|---|---|---|---|---|---|---|---|---|---|---|---|---|---|---|---|---|
| | Thyroid | | Melanoma | | Sarcoma | | Neoplasm | | Renal | | Prostate | | Breast | | Uterine | | Ovary | | Urothecal | |
| Stage | % | Fxn | % | Fxn | % | Fxn | % | Fxn | % | Fxn | % | Fxn | % | Fxn | % | Fxn | % | Fxn | % | Fxn |
| All | 0 | 0/4 | 43 | 3/7 | 29 | 5/17 | 50 | 2/4 | 16 | 9/56 | 9 | 16/188 | 22 | 55/247 | 12 | 10/84 | 65 | 24/37 | 38 | 6/16 |
| I | 0 | 0/2 | 0 | 0/3 | 50 | 1/2 | | | 0 | 0/37 | 0 | 0/39 | 1 | 1/102 | 8 | 6/73 | 25 | 1/4 | 50 | 3/6 |
| II | 0 | 0/1 | 0 | 0/1 | 0 | 0/4 | | | 0 | 0/4 | 2 | 2/113 | 26 | 28/110 | 33 | 1/3 | 0 | 0/2 | 43 | 3/7 |
| III | | | | | 40 | 2/5 | | | 25 | 1/4 | 11 | 2/19 | 74 | 20/27 | 40 | 2/5 | 72 | 18/25 | 0 | 0/2 |
| IV | 0 | 0/1 | 100 | 3/3 | 33 | 2/6 | | | 73 | 8/11 | 71 | 12/17 | 75 | 6/8 | 33 | 1/3 | 83 | 5/6 | 0 | 0/1 |

| | | | | | Head & | | | | | | Pancreas & | | | | Multiple | | Lymphoid | | | |
|---|---|---|---|---|---|---|---|---|---|---|---|---|---|---|---|---|---|---|---|---|
| | Cervical | | Anorectal | | Neck | | Colorectal | | Liver | | Gallbladder | | Upper GI | | Myeloma | | Neoplasm | | Lung | |
| Stage | % | Fxn | % | Fxn | % | Fxn | % | Fxn | % | Fxn | % | Fxn | % | Fxn | % | Fxn | % | Fxn | % | Fxn |
| All | 27 | 3/11 | 64 | 9/14 | 79 | 49/62 | 58 | 70/121 | 83 | 24/29 | 57 | 54/95 | 60 | 40/67 | 65 | 22/34 | 67 | 99/147 | 58 | 151/261 |
| I | 13 | 1/8 | 25 | 1/4 | 86 | 6/7 | 8 | 1/13 | 40 | 2/5 | 7 | 1/15 | 0 | 0/9 | 40 | 4/10 | 20 | 3/15 | 5 | 3/60 |
| II | 100 | 1/1 | 60 | 3/5 | 77 | 10/13 | 18 | 4/22 | 86 | 6/7 | 53 | 8/15 | 42 | 5/12 | 54 | 7/13 | 85 | 23/27 | 61 | 14/23 |
| III | 50 | 1/2 | 100 | 5/5 | 63 | 10/16 | 61 | 25/41 | 86 | 6/7 | 42 | 8/19 | 53 | 10/19 | 100 | 11/11 | 70 | 19/27 | 67 | 48/72 |
| IV | | | | | 89 | 23/26 | 89 | 40/45 | 100 | 10/10 | 80 | 37/46 | 93 | 25/27 | | | 80 | 31/39 | 81 | 86/106 |

TABLE 36
Classification sensitivity with 99.0% specificity using the target genomic regions of List 15.

| | | | | | | | Myeloid | | | | | | | | | | | | Bladder & | |
|---|---|---|---|---|---|---|---|---|---|---|---|---|---|---|---|---|---|---|---|---|
| | Thyroid | | Melanoma | | Sarcoma | | Neoplasm | | Renal | | Prostate | | Breast | | Uterine | | Ovary | | Urothecal | |
| Stage | % | Fxn | % | Fxn | % | Fxn | % | Fxn | % | Fxn | % | Fxn | % | Fxn | % | Fxn | % | Fxn | % | Fxn |
| All | 0 | 0/4 | 43 | 3/7 | 35 | 6/17 | 25 | 1/4 | 16 | 9/56 | 9 | 17/188 | 23 | 56/247 | 13 | 11/84 | 65 | 24/37 | 38 | 6/16 |
| I | 0 | 0/2 | 0 | 0/3 | 50 | 1/2 | | | 0 | 0/37 | 0 | 0/39 | 1 | 1/102 | 8 | 6/73 | 25 | 1/4 | 50 | 3/6 |
| II | 0 | 0/1 | 0 | 0/1 | 0 | 0/4 | | | 0 | 0/4 | 3 | 3/113 | 27 | 30/110 | 33 | 1/3 | 0 | 0/2 | 43 | 3/7 |
| III | | | | | 40 | 2/5 | | | 25 | 1/4 | 11 | 2/19 | 70 | 19/27 | 60 | 3/5 | 72 | 18/25 | 0 | 0/2 |
| IV | 0 | 0/1 | 100 | 3/3 | 50 | 3/6 | | | 73 | 8/11 | 71 | 12/17 | 75 | 6/8 | 33 | 1/3 | 83 | 5/6 | 0 | 0/1 |

| | | | | | Head & | | | | | | Pancreas & | | | | Multiple | | Lymphoid | | | |
|---|---|---|---|---|---|---|---|---|---|---|---|---|---|---|---|---|---|---|---|---|
| | Cervical | | Anorectal | | Neck | | Colorectal | | Liver | | Gallbladder | | Upper GI | | Myeloma | | Neoplasm | | Lung | |
| Stage | % | Fxn | % | Fxn | % | Fxn | % | Fxn | % | Fxn | % | Fxn | % | Fxn | % | Fxn | % | Fxn | % | Fxn |
| All | 27 | 3/11 | 64 | 9/14 | 81 | 50/62 | 60 | 73/121 | 86 | 25/29 | 60 | 57/95 | 63 | 42/67 | 68 | 23/34 | 70 | 103/147 | 59 | 154/261 |
| I | 13 | 1/8 | 25 | 1/4 | 86 | 6/7 | 15 | 2/13 | 60 | 3/5 | 20 | 3/15 | 11 | 1/9 | 50 | 5/10 | 27 | 4/15 | 5 | 3/60 |
| II | 100 | 1/1 | 60 | 3/5 | 77 | 10/13 | 27 | 6/22 | 86 | 6/7 | 53 | 8/15 | 50 | 6/12 | 54 | 7/13 | 85 | 23/27 | 61 | 14/23 |
| III | 50 | 1/2 | 100 | 5/5 | 69 | 11/16 | 61 | 25/41 | 86 | 6/7 | 37 | 7/19 | 53 | 10/19 | 100 | 11/11 | 70 | 19/27 | 69 | 50/72 |
| IV | | | | | 89 | 23/26 | 89 | 40/45 | 100 | 10/10 | 85 | 39/46 | 93 | 25/27 | | | 80 | 31/39 | 82 | 87/106 |

TABLE 37
Classification sensitivity with 99.0% specificity using the target genomic regions of List 16.

| | | | | | | | Myeloid | | | | | | | | | | | | Bladder & | |
|---|---|---|---|---|---|---|---|---|---|---|---|---|---|---|---|---|---|---|---|---|
| | Thyroid | | Melanoma | | Sarcoma | | Neoplasm | | Renal | | Prostate | | Breast | | Uterine | | Ovary | | Urothecal | |
| Stage | % | Fxn | % | Fxn | % | Fxn | % | Fxn | % | Fxn | % | Fxn | % | Fxn | % | Fxn | % | Fxn | % | Fxn |
| All | 0 | 0/4 | 43 | 3/7 | 41 | 7/17 | 25 | 1/4 | 16 | 9/56 | 9 | 16/188 | 25 | 62/247 | 13 | 11/84 | 73 | 27/37 | 44 | 7/16 |
| I | 0 | 0/2 | 0 | 0/3 | 50 | 1/2 | | | 0 | 0/37 | 0 | 0/39 | 1 | 1/102 | 8 | 6/73 | 25 | 1/4 | 67 | 4/6 |
| II | 0 | 0/1 | 0 | 0/1 | 0 | 0/4 | | | 0 | 0/4 | 2 | 2/113 | 30 | 33/110 | 33 | 1/3 | 0 | 0/2 | 43 | 3/7 |
| III | | | | | 60 | 3/5 | | | 25 | 1/4 | 11 | 2/19 | 74 | 20/27 | 60 | 3/5 | 80 | 20/25 | 0 | 0/2 |
| IV | 0 | 0/1 | 100 | 3/3 | 50 | 3/6 | | | 73 | 8/11 | 71 | 12/17 | 100 | 8/8 | 33 | 1/3 | 100 | 6/6 | 0 | 0/1 |

| | | | | | Head & | | | | | | Pancreas & | | | | Multiple | | Lymphoid | | | |
|---|---|---|---|---|---|---|---|---|---|---|---|---|---|---|---|---|---|---|---|---|
| | Cervical | | Anorectal | | Neck | | Colorectal | | Liver | | Gallbladder | | Upper GI | | Myeloma | | Neoplasm | | Lung | |
| Stage | % | Fxn | % | Fxn | % | Fxn | % | Fxn | % | Fxn | % | Fxn | % | Fxn | % | Fxn | % | Fxn | % | Fxn |
| All | 27 | 3/11 | 64 | 9/14 | 81 | 50/62 | 62 | 75/121 | 86 | 25/29 | 64 | 61/95 | 64 | 43/67 | 68 | 23/34 | 71 | 104/147 | 60 | 156/261 |
| I | 13 | 1/8 | 25 | 1/4 | 86 | 6/7 | 15 | 2/13 | 60 | 3/5 | 20 | 3/15 | 0 | 0/9 | 40 | 4/10 | 27 | 4/15 | 7 | 4/60 |
| II | 100 | 1/1 | 60 | 3/5 | 77 | 10/13 | 27 | 6/22 | 86 | 6/7 | 60 | 9/15 | 58 | 7/12 | 62 | 8/13 | 85 | 23/27 | 61 | 14/23 |
| III | 50 | 1/2 | 100 | 5/5 | 69 | 11/16 | 63 | 26/41 | 86 | 6/7 | 53 | 10/19 | 58 | 11/19 | 100 | 11/11 | 74 | 20/27 | 71 | 51/72 |
| IV | | | | | 89 | 23/26 | 91 | 41/45 | 100 | 10/10 | 85 | 39/46 | 93 | 25/27 | | | 80 | 31/39 | 82 | 87/106 |

TABLE 38
Classification sensitivity with 99.0% specificity using a randomly selected subset of 10% of the target genomic regions of List 12.

| | | | | | | | Myeloid | | | | | | | | | | | | Bladder & | |
|---|---|---|---|---|---|---|---|---|---|---|---|---|---|---|---|---|---|---|---|---|
| | Thyroid | | Melanoma | | Sarcoma | | Neoplasm | | Renal | | Prostate | | Breast | | Uterine | | Ovary | | Urothecal | |
| Stage | % | Fxn | % | Fxn | % | Fxn | % | Fxn | % | Fxn | % | Fxn | % | Fxn | % | Fxn | % | Fxn | % | Fxn |
| All | 0 | 0/4 | 43 | 3/7 | 29 | 5/17 | 0 | 0/4 | 16 | 9/56 | 9 | 16/188 | 25 | 62/247 | 11 | 9/84 | 65 | 24/37 | 38 | 6/16 |
| I | 0 | 0/2 | 0 | 0/3 | 50 | 1/2 | | | 0 | 0/37 | 0 | 0/39 | 2 | 2/102 | 7 | 5/73 | 25 | 1/4 | 33 | 2/6 |
| II | 0 | 0/1 | 0 | 0/1 | 0 | 0/4 | | | 0 | 0/4 | 2 | 2/113 | 29 | 32/110 | 33 | 1/3 | 0 | 0/2 | 43 | 3/7 |
| III | | | | | 40 | 2/5 | | | 25 | 1/4 | 11 | 2/19 | 78 | 21/27 | 40 | 2/5 | 68 | 17/25 | 0 | 0/2 |
| IV | 0 | 0/1 | 100 | 3/3 | 33 | 2/6 | | | 73 | 8/11 | 71 | 12/17 | 88 | 7/8 | 33 | 1/3 | 100 | 6/6 | 100 | 1/1 |

| | | | | | Head & | | | | | | Pancreas & | | | | Multiple | | Lymphoid | | | |
|---|---|---|---|---|---|---|---|---|---|---|---|---|---|---|---|---|---|---|---|---|
| | Cervical | | Anorectal | | Neck | | Colorectal | | Liver | | Gallbladder | | Upper GI | | Myeloma | | Neoplasm | | Lung | |
| Stage | % | Fxn | % | Fxn | % | Fxn | % | Fxn | % | Fxn | % | Fxn | % | Fxn | % | Fxn | % | Fxn | % | Fxn |
| All | 27 | 3/11 | 64 | 9/14 | 77 | 48/62 | 59 | 71/121 | 86 | 25/29 | 62 | 59/95 | 60 | 40/67 | 74 | 25/34 | 65 | 95/147 | 59 | 154/261 |
| I | 13 | 1/8 | 25 | 1/4 | 86 | 6/7 | 8 | 1/13 | 60 | 3/5 | 33 | 5/15 | 0 | 0/9 | 50 | 5/10 | 20 | 3/15 | 7 | 4/60 |
| II | 100 | 1/1 | 60 | 3/5 | 77 | 10/13 | 32 | 7/22 | 86 | 6/7 | 53 | 8/15 | 42 | 5/12 | 69 | 9/13 | 89 | 24/27 | 48 | 11/23 |
| III | 50 | 1/2 | 100 | 5/5 | 56 | 9/16 | 56 | 23/41 | 86 | 6/7 | 42 | 8/19 | 47 | 9/19 | 100 | 11/11 | 70 | 19/27 | 71 | 51/72 |
| IV | | | | | 89 | 23/26 | 89 | 40/45 | 100 | 10/10 | 83 | 38/46 | 96 | 26/27 | | | 80 | 31/39 | 83 | 88/106 |

TABLE 39
Classification sensitivity with 99.0% specificity using a randomly selected subset of 25% of the target genomic regions of List 12.

| | | | | | | | Myeloid | | | | | | | | | | | | Bladder & | |
|---|---|---|---|---|---|---|---|---|---|---|---|---|---|---|---|---|---|---|---|---|
| | Thyroid | | Melanoma | | Sarcoma | | Neoplasm | | Renal | | Prostate | | Breast | | Uterine | | Ovary | | Urothecal | |
| Stage | % | Fxn | % | Fxn | % | Fxn | % | Fxn | % | Fxn | % | Fxn | % | Fxn | % | Fxn | % | Fxn | % | Fxn |
| All | 0 | 0/4 | 43 | 3/7 | 29 | 5/17 | 25 | 1/4 | 20 | 11/56 | 9 | 17/188 | 27 | 66/247 | 14 | 12/84 | 78 | 29/37 | 44 | 7/16 |
| I | 0 | 0/2 | 0 | 0/3 | 50 | 1/2 | | | 0 | 0/37 | 0 | 0/39 | 2 | 2/102 | 10 | 7/73 | 25 | 1/4 | 50 | 3/6 |
| II | 0 | 0/1 | 0 | 0/1 | 0 | 0/4 | | | 0 | 0/4 | 3 | 3/113 | 32 | 35/110 | 33 | 1/3 | 0 | 0/2 | 43 | 3/7 |
| III | | | | | 40 | 2/5 | | | 50 | 2/4 | 11 | 2/19 | 82 | 22/27 | 60 | 3/5 | 88 | 22/25 | 0 | 0/2 |
| IV | 0 | 0/1 | 100 | 3/3 | 33 | 2/6 | | | 82 | 9/11 | 71 | 12/17 | 88 | 7/8 | 33 | 1/3 | 100 | 6/6 | 100 | 1/1 |

| | | | | | Head & | | | | | | Pancreas & | | | | Multiple | | Lymphoid | | | |
|---|---|---|---|---|---|---|---|---|---|---|---|---|---|---|---|---|---|---|---|---|
| | Cervical | | Anorectal | | Neck | | Colorectal | | Liver | | Gallbladder | | Upper GI | | Myeloma | | Neoplasm | | Lung | |
| Stage | % | Fxn | % | Fxn | % | Fxn | % | Fxn | % | Fxn | % | Fxn | % | Fxn | % | Fxn | % | Fxn | % | Fxn |
| All | 27 | 3/11 | 71 | 10/14 | 79 | 49/62 | 61 | 74/121 | 86 | 25/29 | 65 | 62/95 | 64 | 43/67 | 68 | 23/34 | 67 | 98/147 | 62 | 161/261 |
| I | 13 | 1/8 | 50 | 2/4 | 86 | 6/7 | 15 | 2/13 | 60 | 3/5 | 33 | 5/15 | 11 | 1/9 | 50 | 5/10 | 27 | 4/15 | 7 | 4/60 |
| II | 100 | 1/1 | 60 | 3/5 | 77 | 10/13 | 27 | 6/22 | 86 | 6/7 | 73 | 11/15 | 33 | 4/12 | 54 | 7/13 | 85 | 23/27 | 61 | 14/23 |
| III | 50 | 1/2 | 100 | 5/5 | 63 | 10/16 | 59 | 24/41 | 86 | 6/7 | 42 | 8/19 | 63 | 12/19 | 100 | 11/11 | 70 | 19/27 | 72 | 52/72 |
| IV | | | | | 89 | 23/26 | 93 | 42/45 | 100 | 10/10 | 83 | 38/46 | 96 | 26/27 | | | 80 | 31/39 | 86 | 91/106 |

TABLE 40
Classification sensitivity with 99.0% specificity using a randomly selected subset of 50% of the target genomic regions of List 4.

| | | | | | | | Myeloid | | | | | | | | | | | | Bladder & | |
|---|---|---|---|---|---|---|---|---|---|---|---|---|---|---|---|---|---|---|---|---|
| | Thyroid | | Melanoma | | Sarcoma | | Neoplasm | | Renal | | Prostate | | Breast | | Uterine | | Ovary | | Urothecal | |
| Stage | % | Fxn | % | Fxn | % | Fxn | % | Fxn | % | Fxn | % | Fxn | % | Fxn | % | Fxn | % | Fxn | % | Fxn |
| All | 0 | 0/4 | 43 | 3/7 | 29 | 5/17 | 0 | 0/4 | 18 | 10/56 | 8 | 15/188 | 25 | 62/247 | 17 | 14/84 | 81 | 30/37 | 31 | 5/16 |
| I | 0 | 0/2 | 0 | 0/3 | 50 | 1/2 | | | 0 | 0/37 | 0 | 0/39 | 1 | 1/102 | 12 | 9/73 | 25 | 1/4 | 33 | 2/6 |
| II | 0 | 0/1 | 0 | 0/1 | 0 | 0/4 | | | 0 | 0/4 | 1 | 1/113 | 29 | 32/110 | 33 | 1/3 | 0 | 0/2 | 43 | 3/7 |
| III | | | | | 40 | 2/5 | | | 50 | 2/4 | 11 | 2/19 | 82 | 22/27 | 60 | 3/5 | 92 | 23/25 | 0 | 0/2 |
| IV | 0 | 0/1 | 100 | 3/3 | 33 | 2/6 | | | 73 | 8/11 | 71 | 12/17 | 88 | 7/8 | 33 | 1/3 | 100 | 6/6 | 0 | 0/1 |

| | | | | | Head & | | | | | | Pancreas & | | | | Multiple | | Lymphoid | | | |
|---|---|---|---|---|---|---|---|---|---|---|---|---|---|---|---|---|---|---|---|---|
| | Cervical | | Anorectal | | Neck | | Colorectal | | Liver | | Gallbladder | | Upper GI | | Myeloma | | Neoplasm | | Lung | |
| Stage | % | Fxn | % | Fxn | % | Fxn | % | Fxn | % | Fxn | % | Fxn | % | Fxn | % | Fxn | % | Fxn | % | Fxn |
| All | 27 | 3/11 | 64 | 9/14 | 76 | 47/62 | 63 | 76/121 | 86 | 25/29 | 60 | 57/95 | 66 | 44/67 | 74 | 25/34 | 69 | 101/147 | 63 | 165/261 |
| I | 13 | 1/8 | 25 | 1/4 | 86 | 6/7 | 8 | 1/13 | 60 | 3/5 | 20 | 3/15 | 11 | 1/9 | 50 | 5/10 | 20 | 3/15 | 13 | 8/60 |
| II | 100 | 1/1 | 60 | 3/5 | 77 | 10/13 | 41 | 9/22 | 86 | 6/7 | 60 | 9/15 | 50 | 6/12 | 69 | 9/13 | 85 | 23/27 | 61 | 14/23 |
| III | 50 | 1/2 | 100 | 5/5 | 56 | 9/16 | 63 | 26/41 | 86 | 6/7 | 37 | 7/19 | 58 | 11/19 | 100 | 11/11 | 67 | 18/27 | 71 | 51/72 |
| IV | | | | | 85 | 22/26 | 89 | 40/45 | 100 | 10/10 | 83 | 38/46 | 96 | 26/27 | | | 77 | 30/39 | 87 | 92/106 |

### Example 6—Detection of Cancer Using Cancer Assay Panel

[0318] Blood samples are collected from a group of individuals previously diagnosed with cancer of a TOO (“test group”), and other groups of individuals without cancer or diagnosed with a different type of cancer (“other group”). cfDNA fragments are extracted from the blood samples and treated with bisulfite to convert unmethylated cytosines to uracils. The cancer assay panel described herein was applied to the bisulfite treated samples. Unbound cfDNA fragments are washed and cfDNA fragments bound to the probes are collected. The collected cfDNA fragments are amplified and sequenced. The sequence reads confirm that the probes specifically enrich cfDNA fragments having methylation patterns indicative of cancer of a TOO and samples from the test group include significantly more of the differentially methylated cfDNA fragments compared to other groups.

[0319] While preferred embodiments of the present disclosure have been shown and described herein, it will be obvious to those skilled in the art that such embodiments are provided by way of example only. Numerous variations, changes, and substitutions will now occur to those skilled in the art without departing from the disclosure. It should be understood that various alternatives to the embodiments of the disclosure described herein may be employed in practicing the disclosure. It is intended that the following claims define the scope of the disclosure and that methods and structures within the scope of these claims and their equivalents be covered thereby.

1.-63. (canceled)

64. A method of detecting cells of a cancer type in a subject, the method comprising,
a) capturing cell-free DNA (cfDNA) fragments from the subject or amplification products thereof with a composition comprising a plurality of different bait oligonucleotides, wherein:
(i) each bait oligonucleotide in the plurality of different bait oligonucleotides is at least 45 nucleotides in length;
(ii) the plurality of different bait oligonucleotides collectively hybridize to at least 200 target genomic regions;
(iii) the at least 200 target genomic regions are differentially methylated in at least one cancer type relative to a different cancer type or relative to non-cancer;
(iv) the at least 200 target genomic regions comprise, for at least 80% of all possible pairs of cancer types selected from a set comprising at least 10 cancer types, at least one target genomic region that is differentially methylated between the pair of cancer types; and
(v) the capturing comprises separating bait-bound DNA from unbound DNA;
b) sequencing the captured cfDNA fragments or amplification products thereof to produce sequencing reads, and
c) detecting the cells of the cancer type with a trained classifier, wherein:
(i) the trained classifier detects a number of sequencing reads above a threshold for a plurality of the at least 200 target genomic regions that are identified as hypermethylated or hypomethylated in the cfDNA fragments;
(ii) the likelihood of a false-positive determination of cancer is less than 1%, and
(iii) the likelihood of an accurate assignment of a cancer type is at least 75%.

65. (canceled)

66. The method of claim 64, wherein
(a) the cancer type is a stage I cancer type, and the likelihood of an accurate assignment is at least 75%;
(b) the cancer type is a stage II cancer type, and the likelihood of an accurate assignment is at least 85%;
(c) the cancer type is prostate cancer and the likelihood of an accurate assignment of prostate cancer is at least 85%;
(d) the cancer type is breast cancer and the likelihood of an accurate assignment of breast cancer is at least 90%;
(e) the cancer type is uterine cancer and the likelihood of an accurate assignment of uterine cancer is at least 90%;
(f) the cancer type is ovarian cancer and the likelihood of an accurate assignment of ovarian cancer is at least 85%;
(g) the cancer type is bladder and urothelial cancer and the likelihood of an accurate assignment of bladder and urothelial cancer is at least 90%;
(h) the cancer type is colorectal cancer and the likelihood of an accurate assignment of colorectal cancer is at least 65%;
(i) the cancer type is liver and bile duct cancer and the likelihood of an accurate assignment of liver and bile duct cancer is at least 90%; or
(j) the cancer type is pancreas and gallbladder cancer and the likelihood of an accurate assignment of pancreas and gallbladder cancer is at least 85%.

67.-75. (canceled)

76. The method of claim 64, wherein the cfDNA fragments are converted cfDNA fragments.

77. The method of claim 64, wherein the at least 10 cancer types are selected from:
(a) uterine cancer, upper GI squamous cancer, all other upper GI cancers, thyroid cancer, sarcoma, urothelial renal cancer, all other renal cancers, prostate cancer, pancreatic cancer, ovarian cancer, neuroendocrine cancer, multiple myeloma, melanoma, lymphoma, small cell lung cancer, lung adenocarcinoma, all other lung cancers, leukemia, hepatobiliary carcinoma, hepatobiliary biliary, head and neck cancer, colorectal cancer, cervical cancer, breast cancer, bladder cancer, and anorectal cancer;
(b) anorectal cancer, bladder cancer, colorectal cancer, esophageal cancer, head and neck cancer, liver/bile-duct cancer, lung cancer, lymphoma, ovarian, cancer, pancreatic cancer, plasma cell neoplasm, and stomach cancer; or
(c) thyroid cancer, melanoma, sarcoma, myeloid neoplasm, renal cancer, prostate cancer, breast cancer, uterine cancer ovarian cancer, bladder cancer, urothelial cancer, cervical cancer, anorectal cancer, head & neck cancer, colorectal cancer, liver cancer, bile duct cancer, pancreatic cancer, gallbladder cancer, upper GI cancer, multiple myeloma, lymphoid neoplasm, and lung cancer.

78.-79. (canceled)

80. The method of claim 64, wherein:
(a) the likelihood of detecting sarcoma is at least 35%;
(b) the likelihood of detecting stage III or stage IV renal cancer is at least 50%;
(c) the likelihood of detecting stage III or stage IV breast cancer is at least 70%;
(d) the likelihood of detecting stage III or stage IV uterine cancer is at least 50%;
(e) the likelihood of detecting ovarian cancer is at least 60%;
(f) the likelihood of detecting bladder cancer is at least 35%;
(g) the likelihood of detecting anorectal cancer is at least 60%;
(h) the likelihood of detecting head and neck cancer is at least 75%;
(i) the likelihood of detecting stage I head and neck cancer is at least 80%;
(j) the likelihood of detecting colorectal cancer is at least 50%;
(k) the likelihood of detecting liver cancer is at least 75%;
(l) the likelihood of detecting pancreas and gallbladder cancer is at least at least 60%;
(m) the likelihood of detecting upper GI cancer is at least at least 60%;
(n) the likelihood of detecting multiple myeloma is at least 65%;
(o) the likelihood of detecting type I multiple myeloma is at least 60%;
(p) the likelihood of detecting lymphoid neoplasm is at least 65%; or
(q) the likelihood of detecting lung cancer is at least 50% or at least 58%.

81.-98. (canceled)

99. The method of claim 64, wherein the total size of the at least 200 target genomic regions comprises 0.2 MB to 20 MB.

100. The method of claim 64, wherein:
(a) the subject has an elevated risk of one or more of the at least 10 cancer types;
(b) the subject manifests symptoms associated with one or more of the at least 10 cancer types
(c) the subject has not been diagnosed with a cancer.

101.-102. (canceled)

103. The method of claim 64, wherein the classifier was trained on converted DNA sequences derived from a least 100 subjects with a first cancer type, at least 100 subjects with a second cancer type, and at least 100 subjects with no cancer; optionally wherein first cancer type is selected from thyroid cancer, melanoma, sarcoma, myeloid neoplasm, renal cancer, prostate cancer, breast cancer, uterine cancer, ovarian cancer, bladder cancer, urothecal cancer, cervical cancer, anorectal cancer head & neck cancer, colorectal cancer, liver cancer, pancreatic cancer, gallbladder cancer, esophageal cancer, stomach cancer, multiple myeloma, lymphoid neoplasm, lung cancer, or, leukemia.

104.-106. (canceled)

107. The method of claim 64, wherein the classifier was trained on converted DNA sequences derived from at least 1000 target genomic regions selected from any one of Lists 1-16, or complements thereof.

108. The method of claim 107, wherein the trained classifier detects the cells of the cancer type by:
a) generating a set of features for the sample, wherein each feature in the set of features comprises a numerical value;
b) inputting the set of features into the classifier, wherein the classifier comprises a multinomial classifier;
c) based on the set of features, determining, at the classifier, a set of probability scores, wherein the set of probability scores comprises one probability score per cancer type and per non-cancer; and
d) thresholding the set of probability scores based on one or more values determined during training of the classifier.

109. The method of claim 108, wherein:
(a) the set of features comprises a set of binarized features;
(b) the numerical value comprises a single binary value,
(c) the multinomial classifier comprises a multinomial logistic regression ensemble trained to predict a source tissue for the cancer; or
(d) the method further comprises determining the final cancer classification based on a top-two probability score differential relative to a minimum value, wherein the minimum value corresponds to a predefined percentage of training cancer samples that had been assigned the correct cancer type as their highest score during training of the classifier.

110.-113. (canceled)

114. The method of claim 64, further comprising administering an anti-cancer therapeutic agent to the subject; optionally wherein the anti-cancer therapeutic agent is a chemotherapeutic agent selected from the group consisting of alkylating agents, antimetabolites, anthracyclines, anti-tumor antibiotics, cytoskeletal disruptors (taxans), topoisomerase inhibitors, mitotic inhibitors, corticosteroids, kinase inhibitors, nucleotide analogs, and platinum-based agents.

115.-143. (canceled)

144. The method of claim 64, wherein:
(a) at least 3%, 5%, 10%, 15%, or 20% of the probes comprise no G (Guanine); or
(b) each of the probes comprise multiple binding sites to methylation sites of the converted cfDNA molecule, wherein at least 80, 85, 90, 92, 95, or 98% of the multiple binding sites comprise exclusively either CpG or CpA.

145.-151. (canceled)

152. The method of claim 64, wherein the plurality of genomic regions comprises (a) at least 20% of the genomic regions of any one of Lists 1-16, or (b) at least 500 genomic regions of any one of Lists 1-16.

153.-205. (canceled)

206. A method of detecting cells of a cancer type in a subject, the method comprising:
a) processing cell-free DNA (cfDNA) from a biological sample with a deaminating agent to generate a cfDNA sample comprising deaminated nucleotides;
b) enriching the cfDNA sample or amplification products thereof for informative cell-free DNA molecules, wherein:
(i) the enriching comprises contacting the cfDNA sample or amplification products thereof with a plurality of different bait oligonucleotides;
(ii) each bait oligonucleotide in the plurality of different bait oligonucleotides is at least 45 nucleotides in length; and
(iii) the plurality of different bait oligonucleotides collectively hybridize to at least 100 target genomic regions selected from an one of Lists 1-16, or complements thereof;
c) sequencing the enriched cfDNA molecules to produce a set of sequencing reads; and
d) detecting sequencing reads for cfDNA molecules from the cells of the cancer type, thereby detecting the cancer cells.

207.-208. (canceled)

209. The method of claim 206, wherein the at least 100 target genomic regions comprise at least 30%, of the genomic regions in any one of Lists 1-16, or complements thereof.

210.-215. (canceled)

216. The method of claim 206, wherein the step of detecting sequencing reads comprises:
a) generating a test feature vector based on the set of sequence reads; and
b) applying the test feature vector to a classifier.

217. The method of claim 216, wherein:
(a) the classifier comprises a model that is trained by a training process with a first cancer set of fragments from one or more training subjects with a first cancer type and a second cancer set of fragments from one or more training subjects with a second cancer type, wherein both the first cancer set of fragments and the second cancer set of fragments comprise a plurality of training fragments; or
(b) the classifier has an area under a receiver operating characteristic curve of at least 0.8.

218.-220. (canceled)

221. The method of claim 206, wherein:
(a) the at least 100 target genomic regions distinguish at least 12 cancer types;
(b) the at least 100 target genomic regions identify one or more cancer types selected from uterine cancer, upper GI squamous cancer, all other upper cancers, thyroid cancer, sarcoma, urothelial renal cancer, all other renal cancers, prostate cancer, pancreatic cancer, ovarian cancer, neuroendocrine cancer, multiple myeloma, melanoma, lymphoma, small cell lung cancer, lung adenocarcinoma, all other lung cancers, leukemia, hepatobiliary carcinoma, hepatobiliary biliary, head and neck cancer, colorectal cancer, cervical cancer, breast cancer, bladder cancer, and anorectal cancer;
(c) the at least 100 target genomic regions identify one or more cancer types selected from anorectal cancer, bladder cancer, colorectal cancer, esophageal cancer, head and neck cancer, liver/bile-duct cancer, lung cancer, lymphoma, ovarian cancer, pancreatic cancer, plasma cell neoplasm, and stomach cancer; or
(d) the at least 100 target genomic regions identify one or more cancer types selected from thyroid cancer, melanoma, sarcoma, myeloid neoplasm, renal cancer, prostate cancer, breast cancer, uterine cancer, ovarian cancer, bladder cancer, urothelial cancer, cervical cancer, anorectal cancer, head & neck cancer, colorectal cancer, liver cancer, bile duct cancer, pancreatic cancer, gallbladder cancer, upper GI cancer, multiple myeloma, lymphoid neoplasm, and lung cancer.

222.-224. (canceled)

225. The method of claim 206, wherein at 99% specificity the sensitivity of the method for detecting cells of head and neck cancer is at least 79%;
wherein at 99% specificity the sensitivity of the method for detecting cells of liver cancer is at least 82%;
wherein at 99% specificity the sensitivity of the method for detecting cells of upper GI tract cancer is at least 62%;
wherein at 99% specificity the sensitivity of the method for detecting cells of pancreatic or gallbladder cancer is at least 62%;
wherein at 99% specificity the sensitivity of the method for detecting cells of colorectal cancer is at least 60%;
wherein at 99% specificity the sensitivity of the method for detecting cells of ovarian cancer is at least 75%;
wherein at 99% specificity the sensitivity of the method for detecting cells of lung cancer is at least 60%;
wherein at 99% specificity the sensitivity of the method for detecting cells of multiple myeloma is at least 68%;
wherein at 99% specificity the sensitivity of the method for detecting cells of lymphoid neoplasm is at least 65%;
wherein at 99% specificity the sensitivity of the method for detecting cells of anorectal cancer is at least 60%; and
wherein at 99% specificity the sensitivity of the method for detecting cells of bladder cancer is at least 40%.

226.-229. (canceled)

230. The method of claim 206, wherein
(a) the cancer type is head and neck cancer, and the method, at 99.0% specificity, has a sensitivity of at least 79%
(b) the cancer type is liver cancer, and the method, at 99.0% specificity, has a sensitivity of at least 82%;
(c) the cancer type is an upper GI tract cancer, and the method, at 99.0% specificity, has a sensitivity of at least 62%;
(d) the cancer type is a pancreatic or gallbladder cancer, and the method, at 99.0% specificity, has a sensitivity of at least 62%;
(e) the cancer type is colorectal cancer, and the method, at 99.0% specificity, has a sensitivity of at least 60%;
(f) the cancer type is ovarian cancer, and the method, at 99.0% specificity, has a sensitivity of at least 75%;
(g) the cancer type is lung cancer, and the method, at 99.0% specificity, has a sensitivity of at least 60%;
(h) the cancer type is multiple myeloma, and the method, at 99.0% specificity, has a sensitivity of at least 68%;
(i) the cancer type is a lymphoid neoplasm, and the method, at 99.0% specificity, has a sensitivity of at least 65%;
(j) the cancer type is anorectal cancer, and the method, at 99.0% specificity, has a sensitivity of at least 60%; or
(k) the cancer type is bladder cancer, and the method, at 99.0% specificity, has a sensitivity of at least 40%.

231.-240. (canceled)

241. The method of claim 206, wherein the total size of the at least 100 target genomic regions comprises 0.2 MB to 20 MB.

242.-247. (canceled)

248. The method of claim 206, further comprising administering an anti-cancer agent to the subject, optionally wherein the anti-cancer agent is a chemotherapeutic agent selected from the group consisting of alkylating agents, antimetabolites, anthracyclines, anti-tumor antibiotics, cytoskeletal disruptors (taxans), topoisomerase inhibitors, mitotic inhibitors, corticosteroids, kinase inhibitors, nucleotide analogs, and platinum-based agents.

249.-263. (canceled)

The application's sequence listing, which the Patent Office published only in electronic form, follows.

SEQUENCE LISTING (483478 sequences)

SEQ ID NO: 1 - DNA, 30 bp, Homo sapiens
  chr1:569477-569507
  hyper
acaccccttatccctatactagttattatc

SEQ ID NO: 2 - DNA, 44 bp, Homo sapiens
  chr1:859756-859800
  hyper
cggaataagttgctgccgccggcggagagcggggctgcggagcc

SEQ ID NO: 3 - DNA, 30 bp, Homo sapiens
  chr1:860007-860037
  hyper
cgctccgccccccgcgcgcctacctcagcc

SEQ ID NO: 4 - DNA, 36 bp, Homo sapiens
  chr1:877626-877662
  hyper
cccaggtgaggaggcgggtgcgcatcccctgggagc

SEQ ID NO: 5 - DNA, 30 bp, Homo sapiens
  chr1:894192-894222
  hyper
ggggcagaggtcggcgatccttaggccttg

SEQ ID NO: 6 - DNA, 96 bp, Homo sapiens
  chr1:935361-935457
  hyper
ccgcgcctccccgtgccgggtggagcgcgccgccacggaccacgggcgggctggcgggcgagcggcgagcgcgcggcgatccgagcccctagggcg

SEQ ID NO: 7 - DNA, 31 bp, Homo sapiens
  chr1:935826-935857
  hyper
gggagccggggctggacggagctggggctgt

SEQ ID NO: 8 - DNA, 30 bp, Homo sapiens
  chr1:936595-936625
  hyper
ccgggctttcaatccgggcaggaggcagat

SEQ ID NO: 9 - DNA, 320 bp, Homo sapiens
  chr1:955516-955836
  hyper
ggcccgcgcgctcctccgccgcctctcgcctgcgccatggccggccggtcccacccgggcccgctgcggccgctgctgccgctccttgtggtggccgcgtgcgtcctgcccggagccggcgggacatgcccggagcgcgcgctggagcggcgcgaggaggaggcgaacgtggtgctcaccgggacggtggaggagatcctcaacgtggacccggtgcagcacacgtactcctgcaaggtgcgcccacccggaccccggcctcccctcgcgacgcctgccgccccgccgggacccccgccccaggccgtgggaaccagccc

SEQ ID NO: 10 - DNA, 30 bp, Homo sapiens
  chr1:999664-999694
  hyper
cacatgagtcagagcgatcctgggggcttc

SEQ ID NO: 11 - DNA, 31 bp, Homo sapiens
  chr1:1003647-1003678
  hyper
tgttccctccagcccccgcccagtgtgtgtg

SEQ ID NO: 12 - DNA, 80 bp, Homo sapiens
  chr1:1014972-1015052
  hyper
gctcccggctgacactcgtgccggaggcaaaggtgaggaaaggccggaggaatgtgtggtctcggcgccaggccaggcct

SEQ ID NO: 13 - DNA, 157 bp, Homo sapiens
  chr1:1072535-1072692
  hyper
ccccctgccccctctgcggtgcgttgggagctcccgtcctcctgcgcacactcagggaaagaccggaggaaccgtggcgggggtcgaggccggcgtggggtgggggcgccaggggggcgggcggggcccagagcccgggacacgcgacgaggggccg

SEQ ID NO: 14 - DNA, 30 bp, Homo sapiens
  chr1:1136386-1136416
  hyper
acagaggtggcctccggcccttttctcaaa

SEQ ID NO: 15 - DNA, 30 bp, Homo sapiens
  chr1:1310108-1310138
  hyper
gctgggaagtcaggcgccccaggagcatgg

SEQ ID NO: 16 - DNA, 30 bp, Homo sapiens
  chr1:1342780-1342810
  hyper
tgcgtgttggggagcggatgtggggccgcg

SEQ ID NO: 17 - DNA, 31 bp, Homo sapiens
  chr1:1434134-1434165
  hyper
tgcagtggtgagatctcggcggctcactgtg

SEQ ID NO: 18 - DNA, 42 bp, Homo sapiens
  chr1:1475601-1475643
  hyper
gggaggtgggccaggcggcgcgcgcgggcggggagcaggggg

SEQ ID NO: 19 - DNA, 30 bp, Homo sapiens
  chr1:1510583-1510613
  hyper
ccggcctccggccccggctcatacaagcag

SEQ ID NO: 20 - DNA, 31 bp, Homo sapiens
  chr1:1535609-1535640
  hyper
tacgggtgcgggggatcgggggtggggggga

SEQ ID NO: 21 - DNA, 30 bp, Homo sapiens
  chr1:1550871-1550901
  hyper
gggctcccgcccttcgggtcccacagtttc

SEQ ID NO: 22 - DNA, 30 bp, Homo sapiens
  chr1:1709188-1709218
  hyper
tactggatggcagccgcctgtaggaacatc

SEQ ID NO: 23 - DNA, 57 bp, Homo sapiens
  chr1:1737899-1737956
  hyper
cctccagtccctaccttgttggtggtgtagctgtcccagatgataagtttaccatcc

SEQ ID NO: 24 - DNA, 30 bp, Homo sapiens
  chr1:1747213-1747243
  hyper
gcatggcgtagatcttggccaggtgccccc

SEQ ID NO: 25 - DNA, 32 bp, Homo sapiens
  chr1:1850721-1850753
  hyper
gcaaagcccggcggcgcggctttatggggccc

SEQ ID NO: 26 - DNA, 61 bp, Homo sapiens
  chr1:1935145-1935206
  hyper
ctggcctgggtcccaggttctcgggctccggaggcacagacaccccgggctgctcaggcag

SEQ ID NO: 27 - DNA, 168 bp, Homo sapiens
  chr1:1935231-1935399
  hyper
cgcggcgccggcggcgtggtttggggcgggcagctccatggcaacggaagactccatcgtggccggagggggagcctcgcccgttctgctccccggctggagcgggtggtttggtccgacccaccaccgaccgcgcgggccggggccggggcaaggaggtcgcgggcc

SEQ ID NO: 28 - DNA, 703 bp, Homo sapiens
  chr1:1981268-1981971
  hyper
gcgtccttgacctgggcgaagtgagcggttgcactcacgagtgtggacggcccttccctacaggggaccttggattcgctgggggcggagtgggggctggggcccagagaacccgagtccggacgctcccgtccgtgaccctggccgggttctccgctcctcgcagcttcagtccgcaagtgtgagatgtcaggggacccctggacggcggggccctcgggctggcagcgcgcgccgcaggagtttcgattcggagggtctgggcgaaggccgagaactcgcgtttccagcgagttcccgggggcgccgctccgtcccagaggccggggcccctccggttgccgggcagagccgcgccgcgcgcggtcccattggcgcaggtgcgccgcgccccgcccaacaggtagccccgcccgacaggtagccccgcccgcgcctcgccattgggccgcggccgggtgtcccccgaggattggcccaggtggcggccccgcctcgccctcattggccgcaggtgccaccgcccgccccgggaccgcccgccccgcggattggccgctggctccacctcggtccgccatgttcggacaccgccccccgcccccgccggacggtcccgccccgcgcgccccccgctcccgccccgcgcgccgccggagttccgcggagttgaccgggtcggcgccgtcggtcctgagcgctg

SEQ ID NO: 29 - DNA, 36 bp, Homo sapiens
  chr1:2136303-2136339
  hyper
tcccgggcacctcccacgccccgccctcaagccccg

SEQ ID NO: 30 - DNA, 362 bp, Homo sapiens
  chr1:2165808-2166170
  hyper
ggggcagcagggtcacggtgggggggctagtcctctctttcagcatcttgtttctcagccgtccctgcggctatttgtgcaatgtctgtctgtctgagtctccgggtgagggcagacaggatatggtgcgaggaagtctggggtaagtgtgagccgaaccccgccctggagtctctcggggttgtggggccacagccccagcttaggttaggccttcactgctgctggcagggcctccagagagaaggcggtggttccggggcctgggccctgactgtctggcaggaggtgtccacgccggcggcccggctctctgtggcaataatgtgtctctttctaaggattgcgaaagttgagggagg

SEQ ID NO: 31 - DNA, 30 bp, Homo sapiens
  chr1:2343721-2343751
  hyper
gggacgggcccaggcgaccgtgaccacaca

SEQ ID NO: 32 - DNA, 765 bp, Homo sapiens
  chr1:2374845-2375610
  hyper
cagcgcctgggcaaacgcccagcctggagatgggaagcgctctcggccccgcccccttcccggtcccgccggctggggccacggggagccggagggaggcggagggggaggtgtggggagcggaaggccgcaggagcatctttgcggagaaagtactttggctgcggcgggcgcagggcgggccggctagccccgcgccccacctgttctgtgcgtcgcgctcgcccggttgcgcccgatctgcctccagcccggtgcccgccgcggagcccgcgcccccggccccctcccggcgcggggcgggcagggggtgtggtgcgggcggcacgagtgacagcgcgctcctcgcgcggcgcctccacggggcgcagtgtcaccgcgcacagcccgccgcgggccgcccgagctggcggggcgatgccgcgggagccggagccccagcccgagcccgagcccggccgctgactgcgcctcccggcccgcagcccccgcccccgccgccctcgctgccctcgctgcagccgccacggagacaatggacgcgggagccgccccgcagaagcacagtaggtgccgctcctgccgctgcgccgctgccaaccgggatgcgcgggtggacgcgcgggggcgccgcagccctggtgcgggtcggggctgagccgcctgggcttcagactcgggagcggaggctcggatcgcggtggcacgggcaggggtgcgggcgcgggactgtgggcgggacgggcggagcggtcttgagctctc

SEQ ID NO: 33 - DNA, 30 bp, Homo sapiens
  chr1:2458024-2458054
  hyper
attttgaaagtgcccggccagctcatcagc

SEQ ID NO: 34 - DNA, 30 bp, Homo sapiens
  chr1:2458283-2458313
  hyper
atgttcttttaccgcgctgtccacaggctt

SEQ ID NO: 35 - DNA, 782 bp, Homo sapiens
  chr1:2460746-2461528
  hyper
gaatggggctcctgcgggccggccagcttggggccagagccttccggagaagggcgcgtccaagcccggggcggacgacggcgggaaggcgcttccctacaggcgagaggagcaggctcgccctctggtcgtcgggccgcgcgcccgcaggtcccgccgggtcaccagggccgccagaggccgcaggcgggctggtgcgcggcggcggcggcggcggtggccttggcggagagcgcgggcgggggcgcggcgcccggcgccttgggctccttggcgggcgcggcgggcgcggccgggggccgctggaagtggtacagcagcttcatctgcgtgtcgctggcggcgtggagcgtcaggaactgcacggcctcctgcaggcaccacgagtagccttcgctgtagtcctggtgcaggctcttggggccggcggcggcgacgaaggctgcggggagacgcggcggcggtgagcgggcggcggggcgcgggggagccggggcgcggtgggaactcggggcgcggggggcccgggcgcgctcacctttgctgtgcttcaggtagctgacagccatctccaggatgtcggccttctccagcttggagttgggctggtgccgcgcgaactcctgctccagcagcagcttcagctgctcgatgctgctgttgatgcggtcgcggcgcatcttctccaccaccggcttccgcagctgcgggaggagggggtgtcaggctggcccggcacggcgcagggacccccgaggaccggaggccgcggggacagcgcg

SEQ ID NO: 36 - DNA, 144 bp, Homo sapiens
  chr1:2461950-2462094
  hyper
ggggcctgatgccgggagccccgcgcctcaatatgctgccttttcccaggccgccaaacgggaggggggcaggaaggagggccccctcccccgccctcccctccgctcccctcccctgcctctccccagcggcttcccactgct

SEQ ID NO: 37 - DNA, 30 bp, Homo sapiens
  chr1:2462357-2462387
  hyper
ggggcccgtgctccacgtggagcccggcac

SEQ ID NO: 38 - DNA, 30 bp, Homo sapiens
  chr1:2472321-2472351
  hyper
ttgctctattataacgcggagccagatggt

SEQ ID NO: 39 - DNA, 31 bp, Homo sapiens
  chr1:2477831-2477862
  hyper
cgccgccgccgcctcccggccgccctccgcc

SEQ ID NO: 40 - DNA, 30 bp, Homo sapiens
  chr1:2478638-2478668
  hyper
ccccagccaggccccgcagctggaccccgg

SEQ ID NO: 41 - DNA, 30 bp, Homo sapiens
  chr1:2480416-2480446
  hyper
ctgaagccatgagtcgctgccactgctctt

SEQ ID NO: 42 - DNA, 30 bp, Homo sapiens
  chr1:2517410-2517440
  hyper
gccccaaggtttggcgggttaaaagctgat

SEQ ID NO: 43 - DNA, 60 bp, Homo sapiens
  chr1:2574438-2574498
  hyper
cccgacccgtagttcacggcccggggtggtagtgaagcctcggcccgcgcaggacccgca

SEQ ID NO: 44 - DNA, 616 bp, Homo sapiens
  chr1:2984306-2984922
  hyper
ggagggcaaggccaggagcctcgcggggcggcgcagagaccccgcatcgcgggcgcgacccctgcctcgggctcaggctgactctgcggcagctccaagtcccgttgccgggcaggacttcggtgctccggaagggtgcggggcagcaacctggccagggcagcgcctcggtttccttccaattcattctcgattcccagatactcagatgagaaatccgcactcaggccgtcaggctcctgggcccgggccaccctgcctgcgctcagcccggcccctccgccgcagcgcctcggagtttgggggctacaggggaagaggaagcgtctggtcggctcccgtccgagctgctccacctgcgccgctggcctttccgcccgctacgcacctgggccccgagaggccagaggggagtgtccccagtggcccgggtccccgaaggtggcccagctcgggcgctcgcgcagccgggtactcaccttgggggcgcggcggcaggagagcgcgggcggagaggtgcgggcgccctgggacgaccagccgaggacgcctggtgtttggacggctgcccccgcgctgtccccccgtgcgaggcgtgttggcctccgtggcctcg

SEQ ID NO: 45 - DNA, 30 bp, Homo sapiens
  chr1:2987332-2987362
  hyper
ggccgtaggccccgcgctctgtgcaccagg

SEQ ID NO: 46 - DNA, 191 bp, Homo sapiens
  chr1:3310353-3310544
  hyper
tgcgcggattcccgttcacctctgacccccgaagcagttggaggcaggtcggggacccccgcccccgccccgccccgcctcgggccctgcgatcagcagtaatagcgattaattccgactgtggctccaagtcccatggccaaggcgccctcctcctgcaggtccagggccagggagggggagcccgcggc

SEQ ID NO: 47 - DNA, 1 bp, Homo sapiens
  chr1:3310755-3310756
  hyper
c

SEQ ID NO: 48 - DNA, 525 bp, Homo sapiens
  chr1:3325225-3325750
  hyper
gagagtgtgtgagtgtgagcacgtgagccggtgcatgtgttggcgtgcatgagagtgtgtgagtgtgggcgcgtgagccggtgcatgtgttggcacacgtgagagtgcatgagtgtgggcgcgtgagccggtgcgtgtgtgtgagcgcgtgtgggcgcgtgagctggtgcgtgtgttggaggatgtgagagcacgagggtgggcacgtgagctggtgcgtgtgtgtgtgagagcgcatgagggtgggcgtgtgagccagtgcttgtgttggcacgcatgagagtgaggggcgtgtgagccagtgcatgtgttggcacgtgtgagagcatgtgagggttggcgtgtgagccggggcatgtcagtgtgtgtgagtgtgggcgtgtgggccggtgcgtgtgtcggcgcacgtgacagcgtgagtgtgggcgcgtgtctgtgagtgcgagtgtgggcgtgtgagttgatgcatgtgagtgtgtgagtgtgggtgtgtgtgagtgagtgtgggcacgtgagttggtgcgt

SEQ ID NO: 49 - DNA, 175 bp, Homo sapiens
  chr1:3371087-3371262
  hyper
tgacctgtgacgcaggcggcgccgccacaggtgcccgggacgcgccccgccccctccccggccctccccgcccgggccctcggacccggagcagccccgcccgcccagcgcccacctgcggggccgcagccgccgccctccagccagaccgcgcaggaagcggaggaggcgcccc

SEQ ID NO: 50 - DNA, 401 bp, Homo sapiens
  chr1:3447572-3447973
  hyper
aggaaacaaagggagcgcgccggggagcgccctggccccgcccgccctgcccaggctcgcccggcgcccacctggcctctggtcaccggcgctcacggggtagccggcctggcccaggtgacatgggtagcagcccctccagaggtagcggtagtgcgtgcccgcgacgcgcgccaggccccccaggagcccaaggcaccagagcgcggccagcccgcggtcccgggacgcccccatggcctggtaggccggcgggcgggagggggcgaggaccaaccgcgctgcgccctaagccggcggccgggcgacggggcaggcggctcgggctggttctgggttccgggcgggcgcgcaatcccagccccgggatccgctccgctcggcgccgcccgggagccgct

SEQ ID NO: 51 - DNA, 36 bp, Homo sapiens
  chr1:3448358-3448394
  hyper
cgtcctggccgggccgcggggcgggggaggggggcc

SEQ ID NO: 52 - DNA, 57 bp, Homo sapiens
  chr1:3501583-3501640
  hyper
aggtgtgagtgacacacgtcctgtgtgtgggagtgagtgacacgtgtcctatgtgtg

SEQ ID NO: 53 - DNA, 49 bp, Homo sapiens
  chr1:3540866-3540915
  hyper
cacacatgttccacctcgaactgcgagcgctgaccgggatctctgggca

SEQ ID NO: 54 - DNA, 30 bp, Homo sapiens
  chr1:3541371-3541401
  hyper
gtgacggtcgcttccggcccggcgaggggc

SEQ ID NO: 55 - DNA, 97 bp, Homo sapiens
  chr1:3567247-3567344
  hyper
agatcaaggagagaacgaatttgccgctgactgggcagagcgagcgcgtggatcgcggccaccgcccgttcatcacccgcgcgcatctgggctggca

SEQ ID NO: 56 - DNA, 481 bp, Homo sapiens
  chr1:3663486-3663967
  hyper
ggatgagcgcttccgcgtgcagcgggggctggagtgggtccgtccgagctggagtggtctccgaggggcggcggatgctcggagggggcggatcccttagggctgggggccaggacgatcccacccggagaagcctcgcgggcgagaagagggtcccttcctgcgggggcagatggaggcgcgggagccttccccgggaggtgaccgaggccagtcagcggccccggggacccaaggccggggactctcggcggccggtggacgggcagggccggcccgcctgggcaggcggcggggtgaaggtgtccagggcctgaggcggcaaagtgccgccgccgtcagccccgactgccacccaccaggcacccggcccatccccggctcccatctagggatccacacccgggcgccgcggcgccgcggtttaaagcctgtgagatcccgcaacaacccggatccggaagcgcggggtcgcggctgg

SEQ ID NO: 57 - DNA, 30 bp, Homo sapiens
  chr1:3713081-3713111
  hyper
tccggggcagcgcgcgccacttccgacctg

SEQ ID NO: 58 - DNA, 30 bp, Homo sapiens
  chr1:3816827-3816857
  hyper
gcgcgccgcggcggcgtccgacgtcagcac

SEQ ID NO: 59 - DNA, 126 bp, Homo sapiens
  chr1:3817968-3818094
  hyper
ctcctccaatggccgcgccctatcaggtctggatggacacacggcggccacgcctcctccagcaaacacgcccctagcaggcctgggctgctgtgatgcgtcctctttggccgccgctgagggagg

SEQ ID NO: 60 - DNA, 44 bp, Homo sapiens
  chr1:4004557-4004601
  hyper
tgcccccaccctgagtcgggatctgtgccgcggtatagactgca

SEQ ID NO: 61 - DNA, 112 bp, Homo sapiens
  chr1:4715427-4715539
  hyper
cgccgcgcagatggcctgggcgagccaggtctgaggccccgctccccgaaacgtgaccatgtggattcaacagcttttaggactcaggtgagcgacccggccggcgccgggt

SEQ ID NO: 62 - DNA, 1019 bp, Homo sapiens
  chr1:4715574-4716593
  hyper
cggcgctttcctctatgttgcaaatcaagggacccctcttcgcttcccgcaagcgggcaacggggtgcaccggtagccggaaaggggcgcccgcccggagcctggagcagcaccgcggccctggcggggagcggccgggtctccagggttccgcgcgtccggggtcggggcagcggcgcccgccccagcaacccgggaagtggggccggccaggcgcgcccgcagctctaggagccagcagcgcagtgtcctggccggctgccccggcgcgcctcctccccggggcccggggcgaggcgccggccgctgggcgcggcgggcgcgggggccggggctgccggggaaagctaaagctccgggctcccagcgagagcttcgcaggcggagttggaggaaaccacagccaaacagccactccgctcccccttctcctttctcggggccccggggctgagcaggggcctcccaggctcccagctgccgacccagctgtttgcgggtgacctccgggcccgacgggcgctcacagctggcgggcagctggggcgggagagctggggttcttggggagctccggcggccaccccgctgtaaacacacacgcacatacgcccgccggcgcgcccggggcttgtctgtgtctgggactccagggccagatggaagagggggttcgagcctagagcccgtggtgggggtgtccagaaagacccttctcggcaaactttgccagcccgccggggttctcgggcttctctggcttctgcctggggtggcccagggcccaccagagcacagctgtcgtttttgctgggcaggctgcctctgagccctcgccctcctgccggggcattcaccgagctcgtgcatttgggtcccgggttggaaccgcgagcggggaggacagaggtggaggcggagagcagcgtgcggttctcgagtttgtccactgggatgcactgcgctcccgcgttggggacgaaaaggccagtagttgttagcccgctgcttgagccgcc

SEQ ID NO: 63 - DNA, 31 bp, Homo sapiens
  chr1:5805925-5805956
  hyper
caccagccaatgcctgcgtccaggttgctgc

SEQ ID NO: 64 - DNA, 79 bp, Homo sapiens
  chr1:6052047-6052126
  hyper
gccaaacggcacccagcggccccgaccccaagtgtcccgacgaggggggacgcctgcgactaacgcggggacagccccc

SEQ ID NO: 65 - DNA, 197 bp, Homo sapiens
  chr1:6086203-6086400
  hyper
ctgtctcctgccccatctggccgctgctcatccaggaaggtcggagatgtcgggccctcccacctgggtcacgcgctaggcatgcctgagagcaaaggccacgccccgacaccccacggggccctggcgcgccaggcttctcagccctgcggcggcagtgcatagctctggcacgcgctgcaccaacttcctgttgg

SEQ ID NO: 66 - DNA, 31 bp, Homo sapiens
  chr1:6137275-6137306
  hyper
cagcatgggaaaggcccgtgacagccaatgg

SEQ ID NO: 67 - DNA, 170 bp, Homo sapiens
  chr1:6265379-6265549
  hyper
actccgcctcccaagcgctggaaagtcggtggaggggcgtccgctgctctctggcgcccccaattggccgccgaggaaatgaggcggcgatgacctgttcagacccaaatgggatggaagagtggggattagcgggggtagggggtggggtttggactcttttttttttt

SEQ ID NO: 68 - DNA, 997 bp, Homo sapiens
  chr1:6265788-6266785
  hyper
gcgtgagccaccgcgcccggcctacccttgaagaccccgcagccaaggtcctccggccccgctctgcgcggcgctctggtcttggggctccggactctgtcatgccgggcaggggccagtccgatccttgcacccttgcctggcaccgtccctggagccttggcgtcctggcctctcctccccgcgggctggaggtggagtggccgggccggaaccagtgcgcaaagcagatggcgagcgcggaggtcggttcggccccgccgcgcctcaaggcagcagccaccctggggaaggtggatgccggaagaggcgtcgcctgcgggtcacccagaggacacccggcggggaattccgagggtgggagtgaggagaggtaggagaggccacggcagagggaggccccgcgcagagtgggaaccatcgcccggtgcgggcctgaacttccagggccggctactcctcggcagagcgaccgcgcggtgtctcagagcgcggcccggagccgcactaagagcgctggacggcgggagagaggctcggaggaccggtagctcccagcaaagcggcccagcgggtaggtacaaggccccgcccctcgccagtcctcactgcctgttctccctgcgccggggagctccaggccccagccctaacctgggccctagcggctccccactccatgacctctggacgcccagtcgggtccaggcgcgatagggagggcgcgggcgcccgggcagaggggccgcgggagctcaagcggggctccgtgcgtgccccagccgcccgcttgcgctgtcgctgcagatgtcgggagctatcttcgggcccctggagggcccgagctccctggatgccccgagcatccacccgctggtgtgcccgctgtgccacgtgcagtacgagcgcccgtgtcttctggactgtttccacgacttctgtgccggctgcctgcgtggccgcgcgaccgacggccgcctcacctgcccgctgtgcc

SEQ ID NO: 69 - DNA, 38 bp, Homo sapiens
  chr1:6296162-6296200
  hyper
cccgcccgcccctccccgcccctcggggacatccgggc

SEQ ID NO: 70 - DNA, 30 bp, Homo sapiens
  chr1:6310060-6310090
  hyper
gacctgtcaggacgcggctggcttttaccc

SEQ ID NO: 71 - DNA, 216 bp, Homo sapiens
  chr1:6321177-6321393
  hyper
gggcgcatgtctccgccggggcctccgcaccgcccctcggcccgccccgcccccgcccgctcagaggcgcggccgtctgtcggtctgtcagcccgtccgtccttccgtcagtccgtccgtacgcagcccacccgtgtccccgcgtccgcccgcggccggcccgagcctccctgggctggtggcgcctcctgacagcgccgcgcccctggctcccag

SEQ ID NO: 72 - DNA, 31 bp, Homo sapiens
  chr1:6474547-6474578
  hyper
gccccccaatggacctcgggtaacaagacac

SEQ ID NO: 73 - DNA, 798 bp, Homo sapiens
  chr1:6480152-6480950
  hyper
ctaccgcggggtggcggcccccagttttccccgagcacctgcgggagagtggtaaaggcgccatcgggggccttcgctgcgtgaccccgagggcaggagggccaggtggggccaggccttgcctgactggagctacggtccctcctctccaatgctgcccttcattcattccccaggctcgggttcagcgtcttctctgagccccgccctgggccgcagcaggggacccagcggttacgggagctcccatgagggacagcagcgggagggacttgcacccccagctgctttatcgggtgaagggctgagctggacgggaaatccgagttccggagaaaggtcgtgacttgctccagtcctcgacgctgggaacaggccgagcctggacaagggccccagtcgctggacgcccggctctaaggagcccgtagaacccttcggcggcttgcctagttaagagtcttttggttaccccactccaggctttgggtggggaaacggaatcctagagaagcagaggcagccctggagccctcggagctcgttttcattcccaccggctaggggtccgggttctcgcccgcaagacagtcagggctcatgtgacgcgcgggcaggacagttttgggtgcgggccccagtggcccgcccaggaccgccttcgcgccgcgtggccgttgctgcggcaaactggctggcgtcccccgcccatctgctccgggctcccctcccccgaccggctggcggggcaacggccacgcccgcgaaccacactgcgaactgccgggcagagagatg

SEQ ID NO: 74 - DNA, 30 bp, Homo sapiens
  chr1:6485186-6485216
  hyper
gaagccgccctccccgccgcggcccgcgcc

SEQ ID NO: 75 - DNA, 203 bp, Homo sapiens
  chr1:6507052-6507255
  hyper
aggcagagggggccctggaatcgctgagttcccaacgcagactgttggccccgcccaaatccacaggacaggtggcccagccagtgccccgtctccaccgttgagcccaagtgccaggtctgcgtggtcccctcctggctgtgtgagccccctcccggctgtgtgcgtccctccgggctgtgtgcgcccctcccggctgtgtg

SEQ ID NO: 76 - DNA, 21 bp, Homo sapiens
  chr1:6507490-6507511
  hyper
ggtgtcgcatttcctgcaacg

SEQ ID NO: 77 - DNA, 935 bp, Homo sapiens
  chr1:6507794-6508729
  hyper
gacgcgacccggagccgggggccaaatatgagaggcctcctctgcccacagtcagccctctcccctctcgggcggggatgaaggtgggggctcagctcccagcttagggagaggcgcagggggcggggtcacatctggccggggacgggtgcagagccgcggccaggtgtggcaaagtagttggcgccccctgtggcatccgcgacggctgggggggttcagcctgggattggcgggccccgggtgatgtcaggccgtcggagcccataggctggctgtgcgcgggtggctgtaacctgagaggaagtatcaggtaacgcaggtgtcgggtcctgccgcccccacagccaggtgcacagcgggggccaccagcaccgtggcaggtaggagcagcccccggacgggcaaccggggtccgtggcaagccggagcctccgagagcacaggctctggagggggctccctccggccccggacccccgaaagacagggctccgcggagccctggggacccgcagtccttctgacagccgagagcggagtgcggccgagggcctagtgagggctaagctgggaggtgccccttcgccagctccccctggcgtcggggctgggccaccccgcccctgggcccgcctcttctggcctcagtgggggcccctgtgccccttggccggtgcccagaacccctccctgtaaggcgggcggagcctgcccttccaccgaggcccccatgaccctcgcccgctgcccactgtgagaaccagggggtctaggaagtcagctgctgcacccctcgacggccgctggccgcgagtccccaggaggtgaagagctgggtggggaggcgtggggggcgcctaccgggcaggtgcccgagccccaccggtcactgtcttcccgcagctgagctcctgtgacggccacgacgggct

SEQ ID NO: 78 - DNA, 30 bp, Homo sapiens
  chr1:6508938-6508968
  hyper
ccgctcccccgcaggcggcgctgcttcctg

SEQ ID NO: 79 - DNA, 771 bp, Homo sapiens
  chr1:6545271-6546042
  hyper
cgcggggcccatagtcacgggcaccccctccctggcctcccgcacaggactgggcggctgcaggcgagaactgggcacccagccccgttcccgccccgtcccggccccgtacctggctatcaccgtcgcgggcacgacccccggcccaggagggctccgagtcccggaggggcagccccgggcccggcctggaggctgctaggcgtccggagacaccgggtcctgtccccatggcggccggaggaagccgcggtctgcgccgcccgccggacaaagcgcggagccccgcttcctgccattgtgcggccgcgcccgcccccgccgagcgcggggaccccggggagggccgggcccggaacagcccccagccccccaggaaggcggacacctccctcccgcccgggccctcgccacccagccccggggatccccgcctccccgcccgggaacccctacacccccgcctccgcctgcccgggcgaccccccgcctccccgcctctgcccagacccggggactccacacccctacctctgcccggccgggggacccccacagccccgcctccgcccagtccccgggacccccaccttcccacctctgcctggcccggggtacccccacctctgcgcctctgcgcggccccgggcccctctcttctctgactccctcctcaacaccaatgccgggctcagagggctcctcagaacttgctctttctcctggggagctccttgaatgctggaggcagggggcgctggtgacaccccc

SEQ ID NO: 80 - DNA, 30 bp, Homo sapiens
  chr1:6546559-6546589
  hyper
ccgtgggcagaaggcgggctgctctgagag

SEQ ID NO: 81 - DNA, 30 bp, Homo sapiens
  chr1:6663254-6663284
  hyper
cgacccacccggcccggctgctgaacccaa

SEQ ID NO: 82 - DNA, 30 bp, Homo sapiens
  chr1:6663649-6663679
  hyper
agtttccgagtctgcgtcgcagctgcaggc

SEQ ID NO: 83 - DNA, 30 bp, Homo sapiens
  chr1:7831141-7831171
  hyper
tgacctgcgttctgcgtttcagagcccgga

SEQ ID NO: 84 - DNA, 124 bp, Homo sapiens
  chr1:7843508-7843632
  hyper
cacgggcggtgaaaaccgtgggaacccagaaagacggccaaagcacgatgaggaccgctgccggcagcccgccccaccctgggctcctccccacacccgctcgggcagccgggagccacctaca

SEQ ID NO: 85 - DNA, 41 bp, Homo sapiens
  chr1:7843652-7843693
  hyper
gagcgctggcctgagccgcccctgctcgcccccagtccccg

SEQ ID NO: 86 - DNA, 178 bp, Homo sapiens
  chr1:7844223-7844401
  hyper
ccgggcgcaccggctcgcgccccgccccagggccaatggaggcctgcggagtcggccccgacgaccaatcgcacggcccgggggcgggaccggtcacgcggcggcagggggcgcggcgccggctgctgaccggcacgcggcgagcctcgagactgcgcgagggcggccccgggggcga

SEQ ID NO: 87 - DNA, 30 bp, Homo sapiens
  chr1:8085686-8085716
  hyper
tgtgaacaagacaacgcaacccccttttta

SEQ ID NO: 88 - DNA, 140 bp, Homo sapiens
  chr1:8086075-8086215
  hyper
cgcggcgaccctccccgcgccctccacgcccccgccctcgcgtcggggagccgcctggatcccggcgcccggcgcggggccccctgagggaacggagcgctgcgtggccctccccaccccctcagcgcgccaggcccctt

SEQ ID NO: 89 - DNA, 113 bp, Homo sapiens
  chr1:8086573-8086686
  hyper
gggctgaccgcggccgcagctccgctcctctgcctgagccgtgcggcagccctgggagcctctcaacgccgagctttcctcagaagcccgcggcgacccgggcctcggccgct

SEQ ID NO: 90 - DNA, 22 bp, Homo sapiens
  chr1:8277775-8277797
  hyper
cgcagggaaaaggaggatgcta

SEQ ID NO: 91 - DNA, 30 bp, Homo sapiens
  chr1:8482674-8482704
  hyper
gagtctgagcacagcgcagggttaaaggaa

SEQ ID NO: 92 - DNA, 255 bp, Homo sapiens
  chr1:9188650-9188905
  hyper
aggggtcggcctgtgtcgggggctcctggaaaagcagcgccaccgccacccacctgacgacatggaaggcccaaagcaggcgatctgtgcgaggcccgcgcgcggcgcggacgatgctgaggtacaagtagagcgcaatggccacggtccagaagaaggagctggtgttggcgaaggtggacagcgcgccctgcagcacgcagtcccacgacgggcccgcgaagttctgcagcactccgtagaagtaggaggcgg

SEQ ID NO: 93 - DNA, 274 bp, Homo sapiens
  chr1:9188943-9189217
  hyper
cgccgtgcccggctgcgcaggtcgggccacagggcgtgcgtggccaccagcaggcccgagccgagcgcggagagtgcgcacgacagcagcaccacggcgcgctccgacggcaccagctcggtgggcggcggggacggctgcatggcgtggggggccaggagccggagcgccgcgaggacagaagccgggccgcgcgtgcggccacgccgccgccgtctgggcaccgaggcgccctaggctcgcgtccaggcgcccgccccgcccgcgtccggcc

SEQ ID NO: 94 - DNA, 31 bp, Homo sapiens
  chr1:9352659-9352690
  hyper
acgcgtttcccaaagacgcctccggagggac

SEQ ID NO: 95 - DNA, 54 bp, Homo sapiens
  chr1:9353032-9353086
  hyper
ggggaggaggcgacttcgctccctgcggcgggcgcggcccgggcgcccgagcct

SEQ ID NO: 96 - DNA, 31 bp, Homo sapiens
  chr1:9353825-9353856
  hyper
ggtggcgtccaggttccggtgaggacgggac

SEQ ID NO: 97 - DNA, 166 bp, Homo sapiens
  chr1:9489049-9489215
  hyper
atctgagagcgccacgcgcggtcccgaaaacctgagcaccctctggctaaggcgttgctgtagagacggtgcgccagccccgcccccgaggcgggattggaggaaaactggacagctgacaagggtgacgtttcgaaagcgcgcgggaggccgtgctgggacgcag

SEQ ID NO: 98 - DNA, 95 bp, Homo sapiens
  chr1:9600352-9600447
  hyper
ggctaagccagggacccgaactcatatgaggtctggaaggtgtgttgagacacttctcgccggctggtagacgcttccaacgccagagaccgcag

SEQ ID NO: 99 - DNA, 30 bp, Homo sapiens
  chr1:9649501-9649531
  hyper
gcctcgcatccgcgcgtttcagagccacag

SEQ ID NO: 100 - DNA, 1090 bp, Homo sapiens
  chr1:9711924-9713014
  hyper
agctgcggctgcgctcgggggcgcggggctggctggcgggcgtctctccggcacacacagcccgtgcgccctggccctgggcgcctccccgagtctagcgagccgggtcctgggagccccgggggccgggctgctgggacctgggcgggggctgccctagaggcccggggccgtcccccgtgggcccgccgagaggggcgtgcgcagctccccggcgcctgcactgcgcgccttgcccgcctggcccggcagcggggtttcagctgcgctcacagcggcggtgcggcctccggtgcgccggctgaggcgcgaggatactggaagcgctcagcgcgtgcgcccgctccgagcgctgactagaggaccaggggcctcctctgtacggcagcggggtccacagagagcgcgctggtgatgtcgcccgagtgccctggcgcggagagagggctgcgcacagttcgccggcgcccgggtcctgtgcgcccttcccagcctgggcaagtggggagcggggctgcagaggggccggggtggaagttttcggggcttcctcccggctcgtggacccgcgccccgcctcccagtcccgggcctcccgcgttgctcgccgcgtttgctgcagcggcgcaggcgagatcagctccggatctgcggccgagccggggttacgccggcaaaaccgcccccagctttgcatttccggactttttaaaaaaatactcttacccgtaattcagcctgaatgaggctttttaaaaaaatcgagtttcctgtttttatttaggcttcctcatttgcacctcctcctttgaggtagagaagaggggaactgggacgacctttcgtgggcaccaggatgggggcgttgcagggcggggagacgggggtccagagaaccggggaagggccgctgggaggtcccgaaaagtgcgctgtgggtggggcgagggtgaagcaggtaggggcgagatttccggggtcgcgggtggggggcgccctggagcggccaaggtgcagggtcctcgcgtggcacccttgggatctgcccagtttgcggatggagcgcggggctgatcgggcaggtctcact

SEQ ID NO: 101 - DNA, 155 bp, Homo sapiens
  chr1:9747556-9747711
  hyper
gggtcccagctgccctcggatgtctgctgcaccgctcccctccctcaggcgggggacggcaggaaggagggagagatgggagggcgtgggggcggggccgggggcggtctccagcccccggcccgggctccgccctctcccgggatctgtgaaag

SEQ ID NO: 102 - DNA, 152 bp, Homo sapiens
  chr1:9749326-9749478
  hyper
tctggggctcagggtgcgaaccccaagggccccgcctggcagcgtcctgggcctccgggcgagaacagcgggggtcggggaggatttgcagcgtccactcctctctccgccgcccgtgtgagctcgggcgcttctcccggctgggggtgtga

SEQ ID NO: 103 - DNA, 30 bp, Homo sapiens
  chr1:9971100-9971130
  hyper
gtgagtggatttttcgggggaagggtgccc

SEQ ID NO: 104 - DNA, 30 bp, Homo sapiens
  chr1:10057153-10057183
  hyper
gaggcggccgggagcgcagcggcttctagg

SEQ ID NO: 105 - DNA, 31 bp, Homo sapiens
  chr1:10271340-10271371
  hyper
ggtgggcatcgggcttcggctgggaatgtgg

SEQ ID NO: 106 - DNA, 78 bp, Homo sapiens
  chr1:10532823-10532901
  hyper
cttattttgcatgacgatgcacacgcatgtatactgtattgaatttttagagcattcctattcgcatatgagatgcat

SEQ ID NO: 107 - DNA, 455 bp, Homo sapiens
  chr1:10853672-10854127
  hyper
acaggaggcataagatcgctggaaacctgattactgaagttcaacaatattccccataaactctccttaaccgcctctaaggtggctaacaagaagggggtgggtggcgggggggcggggcggcgatctctccaattcgccggactctggggacagagatggtggctacctcctggaaaggagaagttctccactctgccctgaagagggtccaggagctcccgcgaggggcacaccctaaaaaccgaagtttgggaagtgggaaagcggctgggggtcgggggagtggcgcgggcggccggagattgcgcaggtcgcgacgcccgcccgggacgcaccgcctggtcgccaccaggacgcaaacccggcgctttgcgctcgggcgccgaacggcccagcgccccctccgggcacgtggagcgcagccccggctcagcccccggggaacaactacc

SEQ ID NO: 108 - DNA, 1402 bp, Homo sapiens
  chr1:10854430-10855832
  hyper
gtaccgggtgtcggcgggacaactacgcacaatgagggccgcacccccacactccactcggtcagaaacgcacactccgccccgtggcccagtgatccaggtttgggggagctccatactcaggagaggcgctactgccgcttttccggtgggcacgcacccgcacccgcaccgtagccagcgtggctggaaggaggtcctcgccgcgcccagagccggctttccaagctgaagctggggcagaggaacttgtgtggaggaagagggggtcccctgcctccctcagcgctccactagcctcccccaactccggacccgggtcggggatgacttggaagaagaatctgcgcccaccccttagagaaaaatctattattattatcttaatctacgcccccaaagtgtccctccagccgtgattgacggcgcatacacctgttcccttcgcggaggagcttccagcgccggggacagacattcgcccaaacgctccgcagcggcccagcaaccgcccgcccgcccgcgcccggccagcccccgccagcggccccagcgcgcctctgcccgcacctcgccaccccggcggccgccccctccccttccagacccggctgcccggcccgccagctcccggcagtgctggcttcggaaagagagagaaagaacagaaagcaaaacttcctggcggccgacggccatcagctgcacattctgcaaatgccaccgagtaaaaataaaccggccgccgctccgcccgtccggctcaccccgggcgcacgaatcggccccctgccccgggagatccctgactcggtctggcccgatcccccattcccgcgcgccccctggatccccgctccccgacgctcctccgtcagtcaccacgctctcctttgccgttaagccggaccctaagtgaccgggaaaccggctctctccctttggtgttccctgcgcccccacaaactacttttttctctgtccttcaccaggtgcctatttcagccctgtgcccttggattcagggctcctcctccccaattgttgagctccgaggtcaccctcagcccaccctgggggaacagaccccgaccgaccctctcccacgctgcagagcccccccggagcgcaccactctaccagcccgctagcccgccagcccagcgtcccacgtccccgggcgcaacttctcttctggcgcacacaacagccggcaacaactcgcccgaactttccccgggacccaggcgggctccagccgacagccgggcagctctgggccgatgccccggctccccgtgccctgtgttgccagcccttcagctggggaggcagggggtggggtggggaagggagtgaggaacgccacttgccgcgcctggagcagcgcacttgagataaa

SEQ ID NO: 109 - DNA, 555 bp, Homo sapiens
  chr1:10856337-10856892
  hyper
ggcattcccctggccacggcaggcaacgcgccgccccgcgcccgggtgccagccctccgtgccccctgcctccgcacggccggagttgggtggcagccgccgatcgcaggctggctggctggctcgctcgctcgctcgctcgcccgctccctgctgcaagcggcagccccgggggtggggggggtgcaccgggacagggggagagacggggaggcgccccgggaggcccgcggagctgggggacgtgggggggccgcggcggagggagcgccgagtctcttacctgcacttggggcggctttgggtgactttccaagtccgggggaaaaatgtgtgtgtgtttgggatggagcgccgcgggcgcgcatgcgctgcccaaagttgccggatcccggatttttcgctcccagtctccgctctcgcccgctgtgattatggaattctccgcggccgggcgggcgagtgggtggcatgcaaaacccgggccggatcgcggggccgggctccgctccaccctcacacccccagacctgcccctcccggatccttcccacc

SEQ ID NO: 110 - DNA, 30 bp, Homo sapiens
  chr1:10890877-10890907
  hyper
ttgtaatcacttgtgtaatgggaataataa

SEQ ID NO: 111 - DNA, 30 bp, Homo sapiens
  chr1:11120531-11120561
  hyper
tttacgttgttgcacggggcgagtagaacg

SEQ ID NO: 112 - DNA, 30 bp, Homo sapiens
  chr1:11333397-11333427
  hyper
gcgccgcttggcctcgtggggtgtaagacc

SEQ ID NO: 113 - DNA, 1087 bp, Homo sapiens
  chr1:11538908-11539995
  hyper
gccttgcgcttcccccgcccgcgggcgccagggccgggctgaaccaccgcgcggatcggcagggggagcggcggcgaagacagcgccagacagcgggtcccagagaccgcagcgcgcggcgtggcgcagggtctcgccggccactgattcaaggcgcggcggcgcggagcccgagaggcgccagggattgggcggcagcgcggctccggagcctggctcggacacccccgcgacccgtggtaggagcccggacccaaacaaaggcgggcggcgaataaaaggcggcggcggagcggagtgctcgggttgcgagctgaggactgggattcgcgcgcagcttcccgcggtctgcttgccctggagcggagggggagccccagcctcctgcggctccgagaagcttccccctgcgacttccgcgaggagacgagtctgcgcagcgtggtggccgccgccccccgaccctctgcgcactctctcccgcgccggcggctcagcctagccccgttcggccggccgaggtgagtgcacggccgcggggcgccatccgggcttggtctcggggctgggggatgcattgctaggaggagggggaagtcctccgcgccgtccgcaccccgacctgcttggcgccgcgcgcgaagttctctcgctctccagccagcccgggatgcgggcctcggagccccccgggaaagacggtcaggggtggacagaacccaagcttgccctctacgaccgggccccagctccgcaccatctccccgcgggactgcagcattcttggtcggccaaggggagttggatgttggatgtccaggaacggcaaggcttccgacctctggcccctgcttgtcccctctgagggatatctgggtccataaaagttgagcgtcagtctgaagccgcccttggatcgggctctcgcccatgctagagcggagggaggggacagagtaaggctaatgaccccctccacccactccctacctagcgtactcgtgctctcggagggacatttccccgattaacctggctgcaggtccggccggggagggcgcgtgggggcttggggcgggccgggcca

SEQ ID NO: 114 - DNA, 139 bp, Homo sapiens
  chr1:11540039-11540178
  hyper
cgcgaacgagggtggaggtggagtgggcagccgggcagtggcggcgctgagggtcgggaaagattcccagcgcaaggggcgccaagtcccgggagccaaccccaccgccgggagaacttttcccaactccctggggagg

SEQ ID NO: 115 - DNA, 36 bp, Homo sapiens
  chr1:11624041-11624077
  hyper
ggactggctagggaaacggcccggcactccctctgt

SEQ ID NO: 116 - DNA, 30 bp, Homo sapiens
  chr1:11715232-11715262
  hyper
attttaaggcacagcgtgggaaggggaggc

SEQ ID NO: 117 - DNA, 43 bp, Homo sapiens
  chr1:11740564-11740607
  hyper
agcccgccggcccagacgcccccgcccccgggcccgcaggtcc

SEQ ID NO: 118 - DNA, 6 bp, Homo sapiens
  chr1:11751808-11751814
  hyper
ctctcc

SEQ ID NO: 119 - DNA, 30 bp, Homo sapiens
  chr1:11779788-11779818
  hyper
ttgcacaagccgggcgatttgtttgtaact

SEQ ID NO: 120 - DNA, 30 bp, Homo sapiens
  chr1:11866374-11866404
  hyper
gtgagcgtgagacccgcacccccgaggagc

SEQ ID NO: 121 - DNA, 30 bp, Homo sapiens
  chr1:11994682-11994712
  hyper
ccactaggcaggcgcgggggagggcgtgga

SEQ ID NO: 122 - DNA, 336 bp, Homo sapiens
  chr1:12123217-12123553
  hyper
gggccagaagctgcctgcctccgctccccgcagcccaggtgcggcgggcagcacactccctagagccaggaccactagttccgtcaaatccggggcgggccattcaaacagctaagggaggcgtctcctagtgtgccttttcctgagtcatctctgcacgtgtttgcccccttttttcttcgctgcttgtagctaagtgttcctggaaccaatttgatacgggagaactaaggctgaaacctcggaggaacaaccacttttgaagtgacttcgcggcgtgcgttgggtgcggactaggtggccgcggcgggagtgtgctggagcctgaagtccacg

SEQ ID NO: 123 - DNA, 96 bp, Homo sapiens
  chr1:12123787-12123883
  hyper
cgcaagggaggacactcctcaccccgttccctgcccagctggagtgagggggcgcgggtgacaagcaggaacaccggaatatgctagcacccacag

SEQ ID NO: 124 - DNA, 30 bp, Homo sapiens
  chr1:12226897-12226927
  hyper
gaggtatcggcccagcgatgctggagtggt

SEQ ID NO: 125 - DNA, 694 bp, Homo sapiens
  chr1:12227254-12227948
  hyper
cagccgccccgcatgtccacccggctggtgcgcagccttcgggtgcccgggccgcgctctcccggggcgctgtcacgggctgggaggctgggagtcccagtcgccgccccccatccgcatcagacacgcgcgcctctggggacccgctggggactccgggcccggcacacgtgcgctcggggcacaactctggcccccgaagcccctcttacccgcgtcgtgacaggggcgcaccctggttcctccgcgagcgcaggccggggcatttggggctgagcagcgggtcctgggcagacccccgctagacccgggacccctcttccctcaccccggcgactgccgcgacagcccttccctcccacgcggtggagaaggggctgtgccggggcgctgccccactgcccacgccgggcaccctcttcaaaagacttccttttcctctgggcgacggttttccgatttcttagaaataccagggtcctgtgtctgaagagcaggaccaggtgtgtgtcaggtccactgagggcacagctggagggcgagctgcctgtctgcttcctccgatgcgtccgggggctactgcagagtctgttttctgcggcctctggggacagggcaagcgagggaggtctgggctggtaatcgagcaaggcaaatgaagtctccgggggccgcaggaaaatggagacagcag

SEQ ID NO: 126 - DNA, 31 bp, Homo sapiens
  chr1:12677601-12677632
  hyper
aggtggagggggaagccggaggtggaaagtt

SEQ ID NO: 127 - DNA, 30 bp, Homo sapiens
  chr1:12678340-12678370
  hyper
ggaggcttcactaccgttcctctgagtggc

SEQ ID NO: 128 - DNA, 150 bp, Homo sapiens
  chr1:12678626-12678776
  hyper
cccgggggagcttgcgtatgccttgatccaaccaggtcacccagggttttatttcaggtcatttggtcatcctcggcctccaggtaggatcaggaagccactcctcacctttgctcggacctcttctgtgttcacgtagagtggactttt

SEQ ID NO: 129 - DNA, 204 bp, Homo sapiens
  chr1:12679117-12679321
  hyper
ctggagggtgggaccgagctatttagagttgtctgttgcaggaagtctgggaggtgagtcactaaaaagcagccccagttcaaagtgctgatgggacttgcctcccgcccccctgcacgttcccggggccggaggagcgagagcgaagcagggagctgccctgtaatctggggcagccgtttccagcccgcgacttgttcagac

SEQ ID NO: 130 - DNA, 30 bp, Homo sapiens
  chr1:12679936-12679966
  hyper
cagcggctggtgtccgccaggcctgcgaag

SEQ ID NO: 131 - DNA, 83 bp, Homo sapiens
  chr1:13839685-13839768
  hyper
ggctaagcttcaccagcctcccggccgagcggaaggcgccggcgcccagctgggtcaagttgttgtagctgaggtcgaggaac

SEQ ID NO: 132 - DNA, 174 bp, Homo sapiens
  chr1:13840405-13840579
  hyper
gccgtcgccaaaacgcggccccaccctggcagctgatttccgagatctggcagtaagacgccgcgcgcaccgggcgggctgcactcgacgtctaagttcagctaccaagcccaggagcggtttccctaaggcgtgtcccgggcgtgcgccctgccccctcgcgcccgcctggtg

SEQ ID NO: 133 - DNA, 131 bp, Homo sapiens
  chr1:13910116-13910247
  hyper
aaagcccattttgccagggcccgcagtcctggcggcccccgcagctgcggccctgtaactttaaacctggcctgagatcatcgttttggcgccggccaaacagagcccgagggcgggcctagcgcgcccgg

SEQ ID NO: 134 - DNA, 446 bp, Homo sapiens
  chr1:13910310-13910756
  hyper
cgctcggaaagttctcaactgcaaagtttgctgtccggctgcctagggtctgggaagctcgggcaccctccctctccggggctcctgctcccacccctccggcccccccaccgtcgcgctcctccaggctgggcctgtggccgcggtgctttttaattttcccccagctcagaatcttgctgctcggcccccaggagagcaacaactcaacgggaacgatgtggaaggtgtcagctctgctcttcgttttgggaagcgcgtcgctctgggtcctggcagaaggaggtaagacccagcgcaagtggcttcctgccgtcgctgatggggacgagcgagcagagacttgctggaatgcccgggcctggtattcgaggttgtccaggggagcgcgggggagctgagggtgtgtgcgtgtcaggcggctgagcgccggaggaggagaggca

SEQ ID NO: 135 - DNA, 95 bp, Homo sapiens
  chr1:13910793-13910888
  hyper
cgcgggtgtgccgggaggagccccggaatccacaggctgcgaggtgggcagcacagggggcctccctccgagtcggcagcaccagagagatcggg

SEQ ID NO: 136 - DNA, 715 bp, Homo sapiens
  chr1:14026481-14027196
  hyper
cggtcggacttgccgcgacgccagccgccggggttccttcccgaggcgccgccatgggatccgcggtgacctacgaggggcggctgggtggtggccattgggcgacggcgcagggtcaagggccgggctctgggatcgtggggagaccgggggtcccggagccccccagccccgcaggccactgcctcgccgcccgacgtcacttccgactggagtcaagatggcggcggcgcggccgcgggcgccggggccggcgaaacagcggcggcggcggcggccctcggtgctctgaggcgctggcgcggcgggcgcgggtaaggagtggcgcgggtgggcggcctctgggctcgcgccgggacgctggtccctccccccgaggagcgcggcggcgacggcggcggcgacacgctggggacccggcgccgcagggatggccgggtcggcggacgcgccccctcagaggtcccgggcgtgccgggggccccgggacgaggcgcgggcctccgggtcggtggccccgcgggtgggtggcggcgccgggctcctccttgtcggccgtggggtccctgcggcgaagttcgggattcggtttgtcgccgtgaagagccgcgcgccccgcgggggacgcgtgcgggctgcagagactggccgggtgcgggcggcggtggggccacctggggccccacgtggggccgggcgccgtcccaattgtcaa

SEQ ID NO: 137 - DNA, 30 bp, Homo sapiens
  chr1:14075545-14075575
  hyper
tctcgtgcgtgggccgtcgtgaggctttaa

SEQ ID NO: 138 - DNA, 30 bp, Homo sapiens
  chr1:14924596-14924626
  hyper
gggctgtggagaggcgggagcaccagcggc

SEQ ID NO: 139 - DNA, 1325 bp, Homo sapiens
  chr1:14925063-14926388
  hyper
ccgaagtacgggggcgcgggaggccaagggtgcccccagcctccgaccgagaccccctcccgagccggcggcgaatggtaggctccatttaaagagtgcctggtggcgcgcggtgtccttcttggagcagctctcggcgcccgcccgccggggtctcggcgatcgctgctcctcctcctccttctcctcctcttttttctcctccgcctcctccccccgccgcctcgccaccgccgcggctagggctggaggcgccgctgtcattcctgtgccggaggaaccggcgctgccggtgcctgggggtcggggcgcgggcgaagccgggccgcggaggacacaacaggtagagccgggggtgcccggccgcgcgccccccgcgcatcatgcagctctttgtcacctctctcgcccccaggccaaaatcctgagcatgatggaagacaataagcagctcgcgctccgcatcgatggggcggtccagtcggccagccaggaggtgaccaacctgcgagccgaactcacggccaccaaccggagactggcggaactgagcggcggcggcggccccggcccgggcccgggagccgcggccagcgcctcggcggcgggggactcggcggcgacgaacatggagaacccccagcttggagcgcaaggtaggatcgccccggcgcccagggcggaggaaggcgagcagagcacgcccggcctcggaggtggccggggacccggggtcccccacacccggggcgaaatcgctttgcattctggcttgtaaccctttccgcccggcggtggccaccgctgctctccggctgggagttgcaggctgctgtcattcacgaaaacccgagcgcagtgtgcacggggtcacacggtcacaccggccccggccagcctgagcgaggcgcagccggcgggtcccttccggcatcagaaagtgccctttccgtggcaccagccccctagctccgtgcaaacttttcatgccggggccttttccccaccccccgcaggggtgaatggcacagttccccccacttccttaggctccttcccagagagagctccgggctctgccgccgtggttgggatagaggattgcactgctgtgcacttttctccgcggatgccaaatcccttggctcagttgcatctggactttattttcttctcatttgaggtctctcaggcattggaatctatagatgcaacagtagatgctcagctcagcagggagtttaaatttccgcaaatataaacaccgagagcactttccagggggatactgtagacctcaaaggttgagcggtagagaaatgaag

SEQ ID NO: 140 - DNA, 31 bp, Homo sapiens
  chr1:15250620-15250651
  hyper
ctgagagccgttcccacgtgagaggctccgc

SEQ ID NO: 141 - DNA, 125 bp, Homo sapiens
  chr1:15250889-15251014
  hyper
gcgcgtccgccagctcgcggcgcagggcgagccggcgccttcctgcggggcgggggccgggcccgcgcggcccccgggacccgcagcctgcgagcagtgcgtggacgcggcggggcccggcgatc

SEQ ID NO: 142 - DNA, 273 bp, Homo sapiens
  chr1:15251271-15251544
  hyper
ggctcgggggctgcaccggggggccaggaccgcgcttgccggagccaggcgatcccgcggcgcctggagacccagctccgggctggaccccgcgtctgctgggggaagcgtgggaaaggggccagccctgcgcgaagttggttcggccccctgggaccgcacctgtgagccatgtggcggcccccgcggagtgccgaggggagcccccttcaccgccgcccctccgaggcgaaattgatgcctcgcatttgctaggagcggagagattgctgc

SEQ ID NO: 143 - DNA, 898 bp, Homo sapiens
  chr1:15478909-15479807
  hyper
atgtacccatgaattccgcctttggaagtgaacttgattgcagcctattttcgtctggaggcggtggattcccggtaggaggcgccttcagtcctcggctcgatcctgtgacgccagccagctgcctatcggcttctcagtgtttgaacttcaaagggctggacgctcacccaagaaggggaccccggcctgacctctctcggaattcaaaaaaatctaaggctcagagagggaatgggagctggctcttccctctgtgtttagcatccacgttttttggcggtctggctgaaaccagcccaccctagttcgggcgccagagcaacgcagttccgagggcagatctccaaggggcggaggcagagccgcgggtgagaggcttccgcgccgacttcgggtttgcactccccggagccagaactccgtggcggctccgggcctccgtggatccgagcagagactggctgcccgcctgccactcgcaggctgggaaaacgccagccggtgcctcgccgggaaagttctcggcaaagctggggatgagccctcagcagggcaggctcccggtgcagcgcgcccccatccattgcccgcgcgcaagaacccggaatgggccccacctgggccgggactcgggcgtgcgatcccgagggcgccctggggaccacgcatcgggtggggaccctggccgagggcgtgagctgactcagtttttaaaaactcgcttcctccttccctacttgtgccggtcactcacctcgctgggaaccagcccagggcagaagggggagagggaggcggtggcctccccaggaaggaggagaggtgagtatcccgccaggtaaaggcggggcggctggcggagctgtgcctcggcgtctgcgcctggtgtgggagg

SEQ ID NO: 144 - DNA, 31 bp, Homo sapiens
  chr1:15480209-15480240
  hyper
cgcggtccctccctcccgcacgccggcgctc

SEQ ID NO: 145 - DNA, 321 bp, Homo sapiens
  chr1:15480538-15480859
  hyper
gtttgggtctcctgtccgtccgtctgtccgccgagcgcttcccgcctggggtcgaccaccgggaggactccgcaccccgcaccctctgcggccgcgccccgccggcgcgggacgctcccgcctcccgggcaccgcgcctggccagctggcctcggctggggaaggcagctggccttgggggccccctgttggcgggaacaggtgctatccgcccggcgggcttcgaacccttggcttcgccagaagcgctttcagcgcgtggttaggagcagaacttcccagtaggtcccaggaaaccaccttggcgctttgctcgcgcat

SEQ ID NO: 146 - DNA, 30 bp, Homo sapiens
  chr1:15853248-15853278
  hyper
attcgcccagtagacgccctcgacctgttc

SEQ ID NO: 147 - DNA, 30 bp, Homo sapiens
  chr1:15944302-15944332
  hyper
ggtacgccgggcagcgagccgggcctgccc

SEQ ID NO: 148 - DNA, 133 bp, Homo sapiens
  chr1:16085154-16085287
  hyper
gcggggcgggaatcccgcgccccctccccccgagcctcaccttttatggtaaagcggcgcggggcggcggggcggagggagccgagggggcggggagggcggacgggcggaggggacgggaggcccagcggct

SEQ ID NO: 149 - DNA, 30 bp, Homo sapiens
  chr1:16161658-16161688
  hyper
tttgtgcgggcgcacgccacctttactcag

SEQ ID NO: 150 - DNA, 30 bp, Homo sapiens
  chr1:16162194-16162224
  hyper
gaggtgtcgcggtgcgcttgggttttttcg

SEQ ID NO: 151 - DNA, 30 bp, Homo sapiens
  chr1:16176410-16176440
  hyper
ttgcagcattcgctcgctcctcagtgttat

SEQ ID NO: 152 - DNA, 451 bp, Homo sapiens
  chr1:16481895-16482346
  hyper
ccccctccccaaaatgcgaggcctgcacagtatgccttctccgcaaaacctcggcaagcgggttagtgaattcaggtcactaagaagctgagcccgcggaaagctgcccaaacacccccttctctaggggactccccacgccccccgccgggacgcgttcccgaagtcgccgcctggactgcaaccgcgtggcctgcgccgcgtcctcttctccgcagcctccgaggcccgtgcgaccaagctgaaaccgcttattctccggagcccctatgaccccgggtgggggccagggctcgcctcgatcgcagcccgtgcgccctccggactccagttcgccgggactgggcgacaccaggtaggttccaaagttgcgcgcgtcaaggagcgccgggctctagggggcactggggcccgggggccaggggtccagacgccgcgcgcactcaccttc

SEQ ID NO: 153 - DNA, 86 bp, Homo sapiens
  chr1:16482709-16482795
  hyper
gggccctctggactcgcgggctccccgcaggccttccaaagtttgagcgtctcaaagcgccagcgcccctacggattagcccccag

SEQ ID NO: 154 - DNA, 69 bp, Homo sapiens
  chr1:16514365-16514434
  hyper
ggcaatgagcaggctgcgctcggaggaccccgctatcccagccctgggctctgccgccctctggtggct

SEQ ID NO: 155 - DNA, 31 bp, Homo sapiens
  chr1:17278332-17278363
  hyper
tgggtggttgttaccacgcttctccaggagg

SEQ ID NO: 156 - DNA, 30 bp, Homo sapiens
  chr1:17306870-17306900
  hyper
cccttcccaattcgcgttctctctgcagag

SEQ ID NO: 157 - DNA, 478 bp, Homo sapiens
  chr1:17445630-17446108
  hyper
gattcttaggatttctgggctcgggggctcgggatgagggacaactcgggctggacaaaggctgtccacgtccccgagtctgagcgcgtctcaggatttctgggctcgagatctcggcccgggcatcacggtgggccggctcacctgtagacatcggtccagaggtaggtgcccagcacgtacaccgcctccacgcggctcccgtactgcagccgcacggtccgctcgcgcagcatcctccccgccgcagtgcccgcgctcgctggtccggggcggccgggagcacctgcagcaggtgcgccttctccagcagcctgcgccccacggccccgcgcgcagccttatccagcggccggtgggcggggcggcccgccccagtcctctcgcagtgggctgcgggcctgtccgtcaagcgtggtcccgcccctaactcgtcccgccccgctgaggtcgtggcgaagtcatcagggaccagttt

SEQ ID NO: 158 - DNA, 209 bp, Homo sapiens
  chr1:17591035-17591244
  hyper
ggttttatctcttgaacgcaatacccaaataacatggtctcattttatcatctgattttctgtggatgcagtcatatcatgtatgttcttttgcgttgggcgtcttttgccctatgctatgtttgtgagatttatccacttgttgcatggtggttgagtatcttttcacatgtttaaaaatcatttcaggccacgcgtggtggctcatg

SEQ ID NO: 159 - DNA, 762 bp, Homo sapiens
  chr1:17865939-17866701
  hyper
gaaggagcgaggaggtcgccgtgtggccggggccgggccccatccccgcgggcctcagtttcccccctgtactgtggggggccggtgggctgccgggaccgctgggggctcgcagcgggtcgggggaggccacgtctccctcgcggcgcgctgggagcagggagggggcgcggcggccgctgccccggccaccaggggttaagcggtgacctcagccgcggcgccccgggaccgggcgggcgggggcggcgccgcgtcgcgcacggcggcggcggcgggaccaggcctcggagcgcggcgggcgcgggcgcagtcccggcgggcccggacctcgcgggcgggcgggcggcgcggccattggctcgggtggcggcggctgcggcggtgggggcgccgtcccggccatgggcgcccgcggcggcctgcggagctggaggcgcggcgccggccgccaggcgcctttgtgagcggcgcggacgacaaaggcgcgggcccgggcagccgaggtgggtgagtgagcgcgggggccctgcctccgcgggatcctcgcgtgtgccggagtctgcgagtgcgcgggaggcgctccaggcgccagggtcctccgggtgtcctgggcgtgtcgccgtgggcgggcgggggccgtgtccgccgctgtgtccctgtgtctgggtgtgagagccccgagcccgcgtctcccctctgtgtgggtctctccttgtgtcactggagttctggtgttactagggcgagtggcctttgtgc

SEQ ID NO: 160 - DNA, 31 bp, Homo sapiens
  chr1:17908286-17908317
  hyper
tcagcaggacagacagcgtgtgccatgccct

SEQ ID NO: 161 - DNA, 30 bp, Homo sapiens
  chr1:18434099-18434129
  hyper
ataaatcggcttagcggacgagagccgaac

SEQ ID NO: 162 - DNA, 30 bp, Homo sapiens
  chr1:18434759-18434789
  hyper
gcgctggccggggtcgctccgagaggctcg

SEQ ID NO: 163 - DNA, 269 bp, Homo sapiens
  chr1:18435604-18435873
  hyper
agccccagggtccgcggccggcctcccacccagtgccgccgcgtagtgggtcttaaatggagctgaaccctttcgcgcagtgagcagagagccaacgtgaggctaaaagccaggagggagggaggcgggaccagcgaagagccgcaggcaccgagactacaggctccgcgtccgggatcctcctcggagcctggtgccaacctcagcctggctggagtcagagcctggctccgcctcggaggggagcgggacgcgaggtgccaaaaagt

SEQ ID NO: 164 - DNA, 641 bp, Homo sapiens
  chr1:18437043-18437684
  hyper
cgccctcgccggttctgcccctttgggtggcagagcaagggtgcccgacgctagagagtcgggtctggcaggaggaaggaggccgctgcccctcgcactggctgggccggaagtccttgccctggctccccacttcccagaatcagaccctccaaaggagaaacccacatttctcgggactcctgggcgtgtcctggggcgttttcaactcctccagcccccgtgaaccgtgcctgggcacttctgggaagtcctgcactggagcctgtgcagtggcgccgggctggggatggaggagtggtccttagccgctgttcagccctgggaaacgttccgctgagagcagggtgggggcagccccagttaggggtagcccacggccccagccgggggtctccgggattgcgcgggcggaggtgggcggccctgcgggttctcgggttctcgggttctctgtctccgcagccgcgtgtcagcaggtggatgggatggaggggctgtctccgctaggccgccgcaaccgcaacgccgagactgcgggggctgtgcgcgcgcgagcgggtgtgacgactttatatatttatcctcccttcacacgcccccttcccactgggcggggcctctggcgcggcagggtttct

SEQ ID NO: 165 - DNA, 641 bp, Homo sapiens
  chr1:18956747-18957388
  hyper
ggtagagtaagaaccggacaccggggctctgacattacacagaaaaggtcagaattcctcccttcaagtcaccctaggccggttcccggggagcctcactggaggaatttcagagggtgtaagacgagggagaagatgagaaatagggcggactctggccctcggaggccagagaaaaggcgagactccagagaggcgccggacccgaggcagacattcccatacagccgggactccgagagcagccgtgggcgacctgggggccggggactcggcggatccggcccattcatcaaaggaaggcactgggacaaagttggccccctccccttctcccccagcccccaactcgccgggatcggctccctctcttttcacggcggttcaaattctcccccaaaacgaggtcgagccggggattagaaaagagggaaaaaaatattcgttggcgatttcttttcgttattggtcctccgctcccttgcgccctggcccccttccctcctcatgaataaaagaaaagtccgaacctatcagatcgcgctcactgcctcctcctcctcctcctcctcctcctcctcgtacttcggtgaacacttttgcacaacttacccagctgatcactcgcgccccctcgcttt

SEQ ID NO: 166 - DNA, 24 bp, Homo sapiens
  chr1:18958358-18958382
  hyper
cgcttctgcgtgggtttcactgcc

SEQ ID NO: 167 - DNA, 30 bp, Homo sapiens
  chr1:18958909-18958939
  hyper
aaacatccagcgcccgcccggggagacccg

SEQ ID NO: 168 - DNA, 185 bp, Homo sapiens
  chr1:18959455-18959640
  hyper
cgcagaatactgaggagagccgagtgccggtcgctaaagaggctcttgaatataaagttgggcgctcgagagctcttgagcgctaatggcatatcccgccacggagaccgagtgactccgactttgcgacgcacgatttctgattaaatccgagagtggcttcagacaccgacttttacaaagag

SEQ ID NO: 169 - DNA, 799 bp, Homo sapiens
  chr1:18963121-18963920
  hyper
gggagagcccggctgcggggctgcgcgcctggtctaccccaatactgcggggagtgcgtcctcccgggctggcgttttggctgctactctcggcgtcgatcaattatttataggaaacttgggcaagggggcgggggacgggagggagggagagaggaaggaggagccggcccgcggctccctaaatgaatttgttaaccagacccccacacgctctctaaacggtcccttgaaaccccgcctgacagttgactgaccgctgcaatcaataaaaattagccagggccgccgcctgactcagccccgcgttgccagggcggactgggggacagagagtgccttcctctgtggcgtgcgccggcagggctgggagtggaggccaagttcccagatgcccagggtcggaggatcgcagtgggggagagacccaggctccacacaccctctccccattcttagcacggcttccgcgggcaggctggagtctgagtcctgcgccatgctttttctcaggatcagctaaggagggcgtttagttttcaagcgcccggaagcccgggaaaggggattgtgcttttgtttcttgacgggaggaagtttcgagagaaggaagggaaagtttttcctcattaccccctccccttcctcattgccctcataattcccctcctaagtctctttgagacttggtaagtgcacgttaaggggcgacagggagagaaacagaaatggaagacccagagtcacaaagactgacagttaaagaaaaggccccaaacacatacgcggagaggcggca

SEQ ID NO: 170 - DNA, 30 bp, Homo sapiens
  chr1:18964385-18964415
  hyper
ccacgggtctgcggcgggaggcagccctgc

SEQ ID NO: 171 - DNA, 30 bp, Homo sapiens
  chr1:18967005-18967035
  hyper
ggcgagggaggggacgaggatagtccattt

SEQ ID NO: 172 - DNA, 1087 bp, Homo sapiens
  chr1:18969672-18970759
  hyper
ggcagccgagctgagcgagggtggattgcgaggggcactggggccgccgcggagctctgcgtgtcggctgccagtgaattggccgatttccccagtctgagggtcagcgaacggacctttccatggcttggtcgccctggtcctggaggtgcgctgggcccgagctccggtggagaccaagggaggggtggggagaggcagcggagacagagagccacagaggaggagagagctagaaaattcagagtgagaaagtctgagcgcagcagaagagaatcttgcgcacagtttgaggacgctggaaaatgcggaggcgccgagggaggcgccgagcagcaggaagaaagacaaagagatgcagaatcaccgagagactggccctgggacaggcggatcaggagagccagcgggacctagagacagcccgcgggagagcacgggccgagagggcgagtgctcaaagccgggcagcggctaggggaagataggaggcgggcgagccgcggccgcccttttgatccttcgtggcttcgccttatcagaagcgctttcggtgacatccgcacaaaggcagttcatcatattacagcacgtcccggcggctcgctgcgatcctgccgcttaattagaggcgagcgagctgggccggcagggcgggagggaggccgaccccgaggcgggaggccgggttctgcgctccaacccggggcgctgggcaggggccagcccgcgtgcctggcggtgttgggacgtggagagagggagaggccgggaactgcattcagagcgttgctaaattaacaggccggcccgggcttcactgcccggagagtgaagctcgccgccttccaatttagccgccgccccttctaagttcttgggaagggatggcgctccggccactttcccctcttccaggctgcgaacgctgcggactggagggcgagtaatggggaggcaacccagggcgagctgaaggcttagtgcaactccgggtccaggtcgcacccaccagccccccgcggctgtgttccatcccctcctccgaccgccttgctctccatccgaacccaggtgtgccaggctg

SEQ ID NO: 173 - DNA, 452 bp, Homo sapiens
  chr1:18971625-18972077
  hyper
gtgtgtgtgcgcgcgcgcgcgtgcgtgcgcacgacagcagagtgtgtttgcggggctggggctgaatttggcagccagcccccaagctgacctctggagtggcccgcgtcggcgggctgggccttgcttcgccacgggttcgagggagaggcggagggaggagcggctgggctgcggagcctcttgccttcactgcactctttgtctgacaccacgaaaagaccgaagatcaaagaggcccccgagcgggacagaaaaaggggtggggcggcgggcgcgataagtagctcggaaaactccaccctaaacttttctgggtcctttccatgggacccagaccctacagaacctcacccaagtgggcgagtgggcggccggccgtgggttctctacagtcccaagcctccgcgagggcgacaggtggagagggacagctacggctgcgggctcca

SEQ ID NO: 174 - DNA, 30 bp, Homo sapiens
  chr1:18972421-18972451
  hyper
ctttcccccgcctcccgcggtcctcaccct

SEQ ID NO: 175 - DNA, 30 bp, Homo sapiens
  chr1:19043558-19043588
  hyper
tttgatccatggcccgaggccgcctgacag

SEQ ID NO: 176 - DNA, 30 bp, Homo sapiens
  chr1:19229759-19229789
  hyper
cctgagctggccaacgcttagcttttcatt

SEQ ID NO: 177 - DNA, 30 bp, Homo sapiens
  chr1:19283746-19283776
  hyper
cggggataagagggcgcccgtgccccacgc

SEQ ID NO: 178 - DNA, 305 bp, Homo sapiens
  chr1:19639207-19639512
  hyper
tatccctccaaacaggcggcccgcgccgggctgagtcaccaggagggagctgtggccgaggacgccgaggcctggagtgggtggtagccccgagctgggacgctcctccctccacaatctccccaggtctgcagggaccgagggcctacactgcctcctcccacgccgtgcttagggtaggtttccaaacgtgtaaatggagagtctgagtctggaagtgtgaggggtcccgggcctgggtcacaggtcatgtctaatcaacgcttactgaaggcgcctgtgtgcccggacgctggaggggctac

SEQ ID NO: 179 - DNA, 30 bp, Homo sapiens
  chr1:19811689-19811719
  hyper
gggactccagcttgcgccaagggcgggggc

SEQ ID NO: 180 - DNA, 31 bp, Homo sapiens
  chr1:20002970-20003001
  hyper
tgaggggtggggattacgatgtgcttcgtct

SEQ ID NO: 181 - DNA, 30 bp, Homo sapiens
  chr1:20208748-20208778
  hyper
ccaccactagagggcggaatagaacaaacc

SEQ ID NO: 182 - DNA, 635 bp, Homo sapiens
  chr1:20512379-20513014
  hyper
aggagagaaggaggccgcgggtccctgtcgcctccaggccaggcaatccactccaggctcgcaatccaccgacctggagttcacggcctccgccctcctggcccagcggcccccacccgaccccacccgaccccacccgacccaggccggttccggtcacgccggaagcacgtggccccccaccctgcggcgttgcccgggagaccagggttgtttaccagcaggacagagcccgggcgcaggcggcggatggagcggaacggctaggtgagagcggctgcccgatcccgcggcctgcccttggcctccgccaggcctggaaggggccgggggaggccagtccccgagaccccagcacatcacccgggagggcctccccagacccagcccgggggacgcaaaccccgggagacaggcgaggagcctggagaaaagtctgctcccgaggcaaagcaagcctggccagagctcacctttaccaaaatagggtgactcccgggctctgcagaaaccgagggacctatgcaaccgctgggccatgccctccaggctgggatgtagcgacggggacacagacccagggagagaaaaggatgtcccagtctccggcagggcagagacgagaaccagagggc

SEQ ID NO: 183 - DNA, 351 bp, Homo sapiens
  chr1:20618134-20618485
  hyper
agctctgcagggtgcccaccccggcagccgggctcatgcctgctgcccttcggatgccccgcagcttgtgaccatccccagagccaccggccaagggcacaccctttcctgagccccgtgtctcctgcaaggtaagaggggaaggagaaaaggtcctcgggcagaaggaggcggctagtggagaggaactcagcagcgggtgcagtgtggcgcctgctaacgcatcaagcctccgctggaagttccaccataacgtctgcggcagccccaacagttccaccccatgctcccgccgccggcaccacagcagcagaaggaggcctgtggggcgggggccagaacctttccctc

SEQ ID NO: 184 - DNA, 30 bp, Homo sapiens
  chr1:20669960-20669990
  hyper
tccccacccgcccccggtgatcctctcagc

SEQ ID NO: 185 - DNA, 30 bp, Homo sapiens
  chr1:20692999-20693029
  hyper
tgggctcccagcaccgcccctcgcgctcgg

SEQ ID NO: 186 - DNA, 30 bp, Homo sapiens
  chr1:20693318-20693348
  hyper
gagcaattagcctgcgcacacttggcagcg

SEQ ID NO: 187 - DNA, 30 bp, Homo sapiens
  chr1:20802803-20802833
  hyper
gggcagggaggccgcgcgggaggccgccag

SEQ ID NO: 188 - DNA, 514 bp, Homo sapiens
  chr1:20810323-20810837
  hyper
gcagggctcactgcgcggtgaaacagctccatcctccgtccctgccaggggtcccttccctgctttcctctgaaccacccaccaccctctatcctccagcctgcgtcccagctccattctgagaaaaggaaacagagggcgccaacccagccgctcctgctgcagccagggcgcgcactggcccgcgtcctccccgcaccaggcgcactaatttagacagaaatgtctggagctgggataggagagggagccaaagtctttgggtctcgggaccccaggtaagtcccgagcgcagctccggtgggcaaggctaggtgcggagatgagcggaaccaggaggggacgccaaaaccggttcccacgacgcgcagcgggtgggggttagggcctggcctgggcgggcgccccctcctgcgcgccctctcccagccgctggccgactgactcggccgccccgcgctccccgctgccgcagaggtcagagcctcccttcgctgcctgccagggacacatg

SEQ ID NO: 189 - DNA, 324 bp, Homo sapiens
  chr1:20810864-20811188
  hyper
cgacttagcctcgcctttctcagtccctccatcgtccctcggcgcgacggccggcagccgatcgaggtctctgtctctccctgtctaaggtgtcggtcgcccttattgtttcggcggcttctgcgtcctccccaaacgcgcgtcctcggctctgtctctcccgcttcagctcccctctcgggagctttgtctcggtctctgccaccctcggtctcccgcgtaccccctcccctccatccctgcgtctcagtctctctctgcagccgtcggtccccctcattgtccccgcgtctctggagctcctctcggagcctctctgcgtct

SEQ ID NO: 190 - DNA, 69 bp, Homo sapiens
  chr1:20811219-20811288
  hyper
cggatcgcccaggcctggcaaaccccctcccaagccaagtaacaatgaaaagcccgtgcgacccgaaca

SEQ ID NO: 191 - DNA, 30 bp, Homo sapiens
  chr1:20811626-20811656
  hyper
gggtgggagacctccgcaacccttgttcag

SEQ ID NO: 192 - DNA, 58 bp, Homo sapiens
  chr1:20812133-20812191
  hyper
gcaggactcacatcctcggcgcgctggggctctgggcgggggccgggccgggcggggc

SEQ ID NO: 193 - DNA, 30 bp, Homo sapiens
  chr1:20812806-20812836
  hyper
tcacggggccgcgccggccggcccgggctg

SEQ ID NO: 194 - DNA, 108 bp, Homo sapiens
  chr1:20813299-20813407
  hyper
agggaaggggcagccccgcctcccgcaggagaagggagcgcctcattacgccgggctcgcccgggatgcctggctcccggcgtccgctgcctccgctggggacgtccc

SEQ ID NO: 195 - DNA, 483 bp, Homo sapiens
  chr1:20878745-20879228
  hyper
ggggttcccgaatgcgccaaggggagcttggagaccagtagcgaggccaaataaattagcatggacgaagccctcctgtatatttcaggggattcctagtacttaacagccctctctacccccacccctccactaataatgattaaacccgttccaccgcgcctgtgcagggtcccgggcagcgcgagcctgcgtggggggaggggagaagagggcaaggggaggggacaagagagctagcggtcccgcccggtgatgtaggcagcccggggaggtggagccgcgacgcctgaaggagtccccaccgcagccgcgctctcggtctgccccactaagcagccgccagcggctccggcgacccaaattgcggcggcagggaccgcggaaatcccaccgtttgggcttggtggacgtccagcccacctcacccccagccccggcccctcctcgcttcccagacggctggagacactcccgggaaaa

SEQ ID NO: 196 - DNA, 181 bp, Homo sapiens
  chr1:20879255-20879436
  hyper
cgcacctcggctgctggcccggctgggcaccgggcatctgcgaagctagccctgcctggcactgggcatctccaggcaacgactgtccccggccctgcccagcttctcgcgactccagggcggtggacttctgcgcgccttccctcccccggtctcccgacaggacgccggtgagctccct

SEQ ID NO: 197 - DNA, 1252 bp, Homo sapiens
  chr1:20879462-20880714
  hyper
cgcgatgctgccctggagacgtaacaaattcgtgctggtggaggacgaggccaagtgcaaggcgaagagcctgagtccggggctcgcctacacgtcgctgctctccagcttcctgcgctcctgcccggacctgctgcccgactggccgctggagcgcttgggccgtgtgttccgcagccggcgccagaaagtggagctcaacaaggaggacccgacctacaccgtgtggtacctgggcaacgccgtcaccctgcacgccaagggcgacggctgcaccgacgacgccgtgggcaagatctgggctcgctgcgggcctggcgggggcactaagatgaagctgacgctggggccgcacggcatccgcatgcagccgtgcgagcgcagcgccgccgggggttcggggggccgcaggccggcgcacgcctacctgctgccgcgcatcacctactgcacggcggacgggcgccacccgcgcgtcttcgcctgggtctaccgccaccaggcgcgccacaaggccgtggtgctgcgctgccacgctgtgctgctggcgcgggcgcacaaggcgcgcgccctggcccgcctgctccgccagaccgcgctggcggccttcagcgacttcaagcgcctgcagcgccagagcgacgcgcgccacgtgcgccagcagcatctccgcgctgggggcgccgccgcctcggtgccccgcgccccactgcgccgcctgctcaatgccaagtgcgcctaccggccgccgccgagcgagcgcagccgcggggcgccgcgcctcagcagcatccaggaggaggacgaggaggaggaggaggacgacgcggaggagcaagagggaggagtcccccagcgcgagcggccggaggtgctcagcctggcccgggagctgaggacgtgcagcctgcggggcgccccggcgcccccgccgcccgcgcagccccgccgctggaaggccggccccagggagcgggcgggccaggcgcgctgagagccgaaggacaggactcgcagccccaggcccgacccgccagactcacagcctccaaccccggccctgcccgcttcggctgccccggcccccggcccgtgtctcccccgtggtctccgtgttgtccgccccgccgcctcattttggctcagggtgatgcctgatacgcccttggttattggggggtgttcctctctccccacacccggagtttcccgggcctgccattgtggacccgccccctatgctttacaccta

SEQ ID NO: 198 - DNA, 31 bp, Homo sapiens
  chr1:20959848-20959879
  hyper
aagtcactgctagaggcgccagtaccagcat

SEQ ID NO: 199 - DNA, 30 bp, Homo sapiens
  chr1:20987843-20987873
  hyper
cttcctcctcctgccgaaggacccagcacg

SEQ ID NO: 200 - DNA, 30 bp, Homo sapiens
  chr1:20988222-20988252
  hyper
gggcttgaccgtcgcgtcctggacagggtg

SEQ ID NO: 201 - DNA, 333 bp, Homo sapiens
  chr1:21563184-21563517
  hyper
ctctatctgtgctggacgccgcagcaccccctccaagtgcctggccagcctcaccttttccttggctgattttcgggtttcctcatccatccacttcagggtgctcaggctttcctcaaatgccttcttaatctccaggatgatctcggtggcctgaggagatacacatcacagcagtaaggtctgcgcactggtctcaggtaaatgcaacaggcaccccgtgcagaacaatgatggccagagattaaactcaattttccaagcgtcaggctgggtgagaaggggagccacagctgtgcttccaaaccacgctcctaacgtgaacaccctgca

SEQ ID NO: 202 - DNA, 30 bp, Homo sapiens
  chr1:21766353-21766383
  hyper
gccggggaaatcagcgatttggagggtcga

SEQ ID NO: 203 - DNA, 223 bp, Homo sapiens
  chr1:21835930-21836153
  hyper
cgccactccgcgcccgctatcctggctccgtgctcccacgcgcttgtgcctggacggaccctcgccagtgctctgcgcaggtaaggattcgacgctgccccgcgccctggttccccagggccccagcggacgtggtccatccccttctgcatcctccgctggccccgtggttgaactttaatggcagggccggggtctccagcgccacgccgcccacagcagc

SEQ ID NO: 204 - DNA, 30 bp, Homo sapiens
  chr1:21949206-21949236
  hyper
agctttgggtgcgtcgggctccccgagggg

SEQ ID NO: 205 - DNA, 30 bp, Homo sapiens
  chr1:21985727-21985757
  hyper
tgggtccgggagtccgccgcggtctcgggc

SEQ ID NO: 206 - DNA, 339 bp, Homo sapiens
  chr1:22140836-22141175
  hyper
agtagagttcggggtcgcgccgcgcggctccagtttccgtgccttccgctgcagccgacctggcggaactgtgcgggcagacgtggcagggggacgggctgctgctgcgctcgcacgccgcatcgcgcaggttctacttcgtggctccggacaccgactgcgggctctgggtgcaggcggcagcccccggcgaccggatccgcttccagttccgcttcttcctggtctacagcctgacccccgcgcccccggcgctcaacacctcctccccggccccggccgacccgtgcgcccccggctcctacctgcagttctacgagggcccgccgggggcgcccc

SEQ ID NO: 207 - DNA, 45 bp, Homo sapiens
  chr1:22263554-22263599
  hyper
gccccagccaagttggcgggaggcggcgagcgggaccggggcgcc

SEQ ID NO: 208 - DNA, 89 bp, Homo sapiens
  chr1:22889706-22889795
  hyper
tctggtcctggtgtcgccgggacgtcccgatggtggcttcgcgcactggggccctgagccctgagtccaagtgcgcagcgcggggcgcg

SEQ ID NO: 209 - DNA, 31 bp, Homo sapiens
  chr1:23000015-23000046
  hyper
gaactgctgactgccccgagtccctcaggat

SEQ ID NO: 210 - DNA, 520 bp, Homo sapiens
  chr1:23037774-23038294
  hyper
ggctttgtagccagcccggcgagcgccgcccagggctgggggctgcccacgcgcgctcgccgcccccggctcgggcagccgcctcgcgccggcctggtcttgctccgcacagggtggaggggcgcgggcccggccgtggcggggggcggggggggcgccggcgctcggtcggggctggaaagtttggcagggagcagagggagggaggcaccgcggccggccggggtgggggctcccggcccgcgcccccgagatggggcccggcgccccggagagcagggactggcagagtggaagggagcgcgccagcccccgcgtcggtgcctgcccatcgcccgcggcgtacaatggggtcccctccccgagaggactgcgcgggggatgggtctgtgggcatctctccgccgcgcaaggtctccgggcacccccgccggccaccgccccgcggccgcggcgctcagcgtggcggctggagccccgggaactctccagctgccgccggggccggaccagatgctct

SEQ ID NO: 211 - DNA, 30 bp, Homo sapiens
  chr1:23345694-23345724
  hyper
agtgaatgaacgaacgcacgcatgcaaacc

SEQ ID NO: 212 - DNA, 31 bp, Homo sapiens
  chr1:23346339-23346370
  hyper
aggccggccctactgtcgtgcctgggtctgc

SEQ ID NO: 213 - DNA, 39 bp, Homo sapiens
  chr1:23495415-23495454
  hyper
ttgtctgtaggccccgccccctccgtcctttttttccct

SEQ ID NO: 214 - DNA, 30 bp, Homo sapiens
  chr1:23695515-23695545
  hyper
taaccctgtaggggcgtgcgactgcgtcct

SEQ ID NO: 215 - DNA, 135 bp, Homo sapiens
  chr1:23748982-23749117
  hyper
gggcctgagctgcaacgtggaggatccgtcttattacaggaagtatgtcctcctctgcctaaccactgctgggcgggtccactttcactcccagagcaggccccacctttctcggccagacgcccagagctccat

SEQ ID NO: 216 - DNA, 31 bp, Homo sapiens
  chr1:23857852-23857883
  hyper
cccccccggaaagaacgcgtcctcgaggcgg

SEQ ID NO: 217 - DNA, 30 bp, Homo sapiens
  chr1:23865146-23865176
  hyper
ccccataaaaaggaatgaggtactgataca

SEQ ID NO: 218 - DNA, 299 bp, Homo sapiens
  chr1:23884854-23885153
  hyper
ggcaggagaggttcccggggtcccaggcagaacgggcgccagcacctgcgttctgggcgggggaggaaagaagaccaaggagcagtcagtttccgccgagcgtgccgaggcgggggccgtccgcagactggccggcgccagggaggaaacttggtctgtacctccagctgataactccgcgccccacgctgcccccacccagttggcgccaaagaccacaggcggagcttgcgctacccctcctacttggaattgacactagctgggagggggctgccgaagacagctccctatacaac

SEQ ID NO: 219 - DNA, 381 bp, Homo sapiens
  chr1:24126328-24126709
  hyper
tggacttggccaggtgcgcacctccaccctgaacaaactctgcgggtagtacggggaggaagccccagacactgaggcctttcattcccagcgaccgggcccgctgccgccttcctccacgctgcctctatccccttctgggctcacgcagctccaacccacttgaccaagagccctctgcgtgccaggctccgtaccaggcacttttgcatgattttcctgaattcccccagcatctcggtgagacaggtgttatcactggcactttacagatacagatactagggccagagaggtgaaacagttgcccttcggtcccacagctggcgacagcgggctggaatctggatcgccaggctcgcagcccggccctctccccag

SEQ ID NO: 220 - DNA, 30 bp, Homo sapiens
  chr1:24377790-24377820
  hyper
ctatcatcagtcaaatttgtggagaaggaa

SEQ ID NO: 221 - DNA, 39 bp, Homo sapiens
  chr1:24513458-24513497
  hyper
taggaaactggattcgtttcctgcgggagaggaatatca

SEQ ID NO: 222 - DNA, 808 bp, Homo sapiens
  chr1:24648323-24649131
  hyper
gcgccgggcctttcatgtggtcgcagcgctctgggtgcctggagcccgcagccctgggcagccccgggctaccgcagggcgcaagggatcctgggctgcggccgagggcgccggaagtcgccgccgaccgcctgggtctcgcaggaaaacagccggcgcccgcgagctgcccagcgtcgggttttcctgaaggtgcgtcggggcccccggggagctggagccgcaggcgacctccccggtgacctgttgttcccctctggagggccggccggcgctccaggcaggccccgttgacagcccaggaagggagagtttcgccgcaaaggggcttggcacacagtaggtctaaggcaccgaggcaggagcgtcccccgcggcctcgctccctgctctctgggccccaccgctgccgcctggagtctcccctcagcctcgcagagacgcgactcggttgggggaaggggactagaaccgtcgcagtcctgaccgcggccgccgccgccgttctatctgatctccaggagcgccggctccagactgcctggagcgctgaaagagttaatcaggaacgcctccccgctgtggttttgtggtcgaaaccatgattgccaggagcaaatttttgtcgtgcacgaggtgtgttattaaaagtcggagctacgctgctgctgaatgaaaagttaaaagccctctttgagttcgggctgtaaaactggcggactgggccgagaggcttgagccaaccctaacggcggcggcccgggcggcgcgggggtcctgcggctccgccagctgctgggagcgggca

SEQ ID NO: 223 - DNA, 30 bp, Homo sapiens
  chr1:24829136-24829166
  hyper
agcccccgccccagcgctacagcccaagcc

SEQ ID NO: 224 - DNA, 30 bp, Homo sapiens
  chr1:25255276-25255306
  hyper
taatgggagcagggacggcctcagcttcca

SEQ ID NO: 225 - DNA, 104 bp, Homo sapiens
  chr1:25255506-25255610
  hyper
aggggtcccccaatctcaactcgccattcgggacgcataatatccccgagcaaacgtctggagagcagtgccccgatcccggcctagcgccgtccggtaaaatt

SEQ ID NO: 226 - DNA, 903 bp, Homo sapiens
  chr1:25255920-25256823
  hyper
ggagccgagcgcgcagccagactgaaccgggtgcccgggtgtcgccgcggcgtctcgggcacctcccatccccactgctcccgaggctctggctcccgcagctcagacgcccggagccccagggccggcgccctcccgccccgggtcccgcactcaccttgaaggcgacgggcagcgtcttgttgcagcgccagtgcgagggcagcacggagcagaggaagttggggctgtcggtgcgcacgagctcgcctgcgtggtccgccagcacgtccaccatcgagcgcacctcgggccgggcgcgccctccgggccccacggccgcctgcgcgctcagcgcgccgctgttctcgcccatcttgccgccgccgccgccgcaggggaaggccggggagggaggtgtgaagcggcggctggtgcttgggtctacgggaatacgcataacagcggccgtcagggcgccgggcaggcggagacggcgcggcttcccccgggggcggccggcgcgggcgcctcctcggccgccgctgccgcgagaagcgggaaagcagaagcggcggggcccgggcctcagggcgcagggggcggcgcccggccactactcgccagggcccgcccgctgcgaggcctcgctggcccgacggccgcccgcagcctgcccggctagtcccgcatcctcggcgcgcggccccgcgtgcggccgcccctcgtggctgtcccggctgcctgggccgcggcggggcccgcgcggggctgtgccgctgccgccgcctcccgccccgaagctcgcccgcggccgccccgactccgcggccgcagccccagaacaaatcctccagaatcaagtggcggggccgcggccgcccgcgcggggttagtacccccggggcccgcggggcggggctg

SEQ ID NO: 227 - DNA, 14 bp, Homo sapiens
  chr1:25257156-25257170
  hyper
gggcctgtgacttc

SEQ ID NO: 228 - DNA, 81 bp, Homo sapiens
  chr1:25870705-25870786
  hyper
ccccagccagcagctgcggcggtcaggagcccactggcccgttctcccgccccctgcccgacccaccgggccaacttttga

SEQ ID NO: 229 - DNA, 30 bp, Homo sapiens
  chr1:25944087-25944117
  hyper
cccccgcctcctcgcgggaggactcgctcc

SEQ ID NO: 230 - DNA, 30 bp, Homo sapiens
  chr1:26232856-26232886
  hyper
cctcctccgagccccgcacccacctgctca

SEQ ID NO: 231 - DNA, 31 bp, Homo sapiens
  chr1:26248902-26248933
  hyper
gggaaaggaaaggccacggtgtgagagggag

SEQ ID NO: 232 - DNA, 651 bp, Homo sapiens
  chr1:26249184-26249835
  hyper
tgtgctaggagaagagaaggccgggctcactggcggtgcggagcccgccagggccaatccgcatccgggcggaggtgcaagcccgaccgcagtactgacacgtgccgcgacgtcccctcccggcagctcgcggggacctgggagcgggtggggtctctggctggcggggagccagggctgcgggaaaccgcacgaggtcgcgttcgcgagtggcggagaagcccagacccccgggcgcacgcggccgcgcccacccaggtcgctgggaggtgcccgcccgggaggcgccgcggccagtgcctgccgttagcttcaggaagaactaggattgagtaagaaacgactagggatggaagcacttggcactccgggtctcggagcaggctggggacgcccgcggcaggaacctggtcctccactccgggtgcggaccaaagtctgctagggcttccccgaagtggattcagtgactcgggagaggacccagcccctaggccccatccccggttaagggccagtcttggtctgggtgtttctctccgggagctggtcgcaggtttccgttttcctcttcaaggaaggaaagaccagcgagagaattcgagggaaagaacaaaagccgccggcaccgcccagcccaatttttggagc

SEQ ID NO: 233 - DNA, 30 bp, Homo sapiens
  chr1:26496808-26496838
  hyper
gacccggatcctggcgtcagggacaagcta

SEQ ID NO: 234 - DNA, 466 bp, Homo sapiens
  chr1:26551748-26552214
  hyper
caaccagtgagtgggcagccccgggacctcctgcgcagccgccgcagccttgcctgcaaagcagttcctgccgggcaggctgggtagccggactcccagctgcgccgtcttcacggaagcggtgctgatgcgggacctgggggactgcggtgctggggactggccagtcctaccgggggcggggcttgtggaagactgggcgggattttgaagacctaggtcttgtggatggtgaactcacttggggcggggagggaggtggggctaccctggggtcttgggcaaagtcctcgcctggccggcttcgctacccttgtgcttgcgttgcccacaagcttgtagtcagaagaactcgcctgggagggatcgctcctgggagatccgaacgcgggagggcctggagcgcggcggcagctggatagcattcgggcccatccgaataagcggtaaatggatcatttctggg

SEQ ID NO: 235 - DNA, 92 bp, Homo sapiens
  chr1:26560288-26560380
  hyper
gagaactgatagaccggcgttggaatggaaggagggtgaggcaagctgagtgggattctcgtgtccccagccccgcccgcgggccgccagct

SEQ ID NO: 236 - DNA, 30 bp, Homo sapiens
  chr1:26606831-26606861
  hyper
cccggacccggtcccgaggccccatcctga

SEQ ID NO: 237 - DNA, 836 bp, Homo sapiens
  chr1:26662523-26663359
  hyper
ctcctcctgcagccccgcctctgccccagcgcccccagccctccgcccctccacgttctcacctgccgccgtggacccggcaggactgaggtcggaaggaggcgggcagagcggcctggtcatcttcgaaagagaagtggtcgcccagaaagtcggggcgggagaaaagctgaatctggaggcagagaggggagatgaggggaaggaggacgatggagtggggccgagaacagcggggaggggaaaggtccgaaatgaggggagagacgtgagcccagcggctccctgcggagtccctgccttacctttgagacgaagtgcagatcgtgctccccgacctgaaggtagggaccgaatcgagaattagggagggtgccggcccctagccttgtcttctctaggtttcagtaccgtccaccccgcggccgcgccctcggccccgcccccttctaaggccccgccccaagcgcccaggcaggtcctccagcccgctacctctgcgtgggggcggggcgcacccgaactccaggtcccgccaccggggaggccccgccccccgcggccggcacgcacctgtaggaccggctgcagcgaggcgagggtgctgttgccagcgccccagtcctcgcagttacgatacacgcccttctccagcacgtactgttccccggagaagcccacctcctggtaggccacccacctgcaggaagggcggggcgcgagtcagctgggacggagcctgcacctctcctggaaccgcccccggctcgcccgggcccgccccgctcccggagcccgggtcacttacacgccgctgagcacgtggatggcctgtg

SEQ ID NO: 238 - DNA, 234 bp, Homo sapiens
  chr1:26735162-26735396
  hyper
tgggaatcaagacagcgtgactcaattcagcaccgtggacagagctgctggagccctcaggaccctggacagagaagcaggccgcgcattcccggggaaccgaattcgcatcacttgagaacccacctagagaagccagagcgttcaactcccctttccctcccttttcttcagccagacctcagccacttgctcctgagtcttaggaacagaggtacacggagcgaatatatt

SEQ ID NO: 239 - DNA, 30 bp, Homo sapiens
  chr1:26735614-26735644
  hyper
acctcccattccttacgctcaagttttcat

SEQ ID NO: 240 - DNA, 30 bp, Homo sapiens
  chr1:26737303-26737333
  hyper
caaccctttgccttcggacttctccggggc

SEQ ID NO: 241 - DNA, 30 bp, Homo sapiens
  chr1:26737696-26737726
  hyper
gtacgctaggggaacgcgggaggcgaccgg

SEQ ID NO: 242 - DNA, 80 bp, Homo sapiens
  chr1:26758476-26758556
  hyper
agtcctaagctgccttcgacggccgagaagcgcctcgattcttgcccctggctcatttccctggcgcgttttccagacgc

SEQ ID NO: 243 - DNA, 30 bp, Homo sapiens
  chr1:26827744-26827774
  hyper
ggagacaggaaccgcgcccattttccggat

SEQ ID NO: 244 - DNA, 107 bp, Homo sapiens
  chr1:26855979-26856086
  hyper
ttccaaaagagctgagcgggggagaacggtggccctggtgtggtgtgtccaggggtacaccactggaagggaaggagccagcagggcctctccggcggagccgagcg

SEQ ID NO: 245 - DNA, 30 bp, Homo sapiens
  chr1:27021694-27021724
  hyper
agtgggaaacgaatcgtctgaacaatgatc

SEQ ID NO: 246 - DNA, 561 bp, Homo sapiens
  chr1:27113545-27114106
  hyper
gccagaggctaacccggcccctggcttcgtttggagggcagataactgaaaccacataaggctttggaatcctgagaaacaagaaatccaccaacggagaaggatttatcatctgtttcctttaaggagggtgcaaagttgttctaacagtttccgttacaagggtacaaactggccgctccccccaatagacggttttgttgagttcgcctctttttttttcttctttttttggccccacttcctatgagagaaactgcttgggtgagggaggtgaaaggagccctggagggtgttctctgaggttttcttcaccatcctcattagccacctgaggtggggctgaggactaaagtaggacagaaggtctctggtagatagaggaggggaaaatcagggggatcccccactttcttcacacccaggacgcagggtgccgctgccggccacagaaaccccaagaatgtttttctttggctattcagaggacatctattgtgtgtcaggccctgtgctgagctgttgttgcctgacagcaggaagagcgcggctctggtttct

SEQ ID NO: 247 - DNA, 30 bp, Homo sapiens
  chr1:27152777-27152807
  hyper
gtgccccacctccccgcgcctgcctgcctc

SEQ ID NO: 248 - DNA, 100 bp, Homo sapiens
  chr1:27286514-27286614
  hyper
gacccagcctccctcccgtcccgacgctgttcctcggggtgagcaccagcgtttgtcccatcccgacgctgccccccggtgagtgcggcccccgcaccca

SEQ ID NO: 249 - DNA, 30 bp, Homo sapiens
  chr1:27320113-27320143
  hyper
ctgattggctgtgccgcccgtcgctccgcc

SEQ ID NO: 250 - DNA, 30 bp, Homo sapiens
  chr1:27648442-27648472
  hyper
ctataagtctccggcgctagactgcgaact

SEQ ID NO: 251 - DNA, 80 bp, Homo sapiens
  chr1:27719136-27719216
  hyper
cgcttctcccgcggccgcgggggcttctcggggtccacgcacgccctgcgccgccaggacccgagcggagcctccccgcg

SEQ ID NO: 252 - DNA, 30 bp, Homo sapiens
  chr1:27816441-27816471
  hyper
ccggccggggcccgcgcctcccagcggggt

SEQ ID NO: 253 - DNA, 93 bp, Homo sapiens
  chr1:27816749-27816842
  hyper
tggcctgagtaaaacgccagttaaataactacgcaaaagacgtactcacgggtaccctccccagagctccacccgggcgacttccgcaatcgg

SEQ ID NO: 254 - DNA, 31 bp, Homo sapiens
  chr1:27883559-27883590
  hyper
tcctttgtgcaaccctcgcccacccccttcc

SEQ ID NO: 255 - DNA, 30 bp, Homo sapiens
  chr1:27894940-27894970
  hyper
gctcggtctcaggtcgctcgcgtgttcagc

SEQ ID NO: 256 - DNA, 49 bp, Homo sapiens
  chr1:27902441-27902490
  hyper
ccgtcgcgatccgggtcgggctcgggctctgccccggcccggggactgg

SEQ ID NO: 257 - DNA, 30 bp, Homo sapiens
  chr1:27928401-27928431
  hyper
gtggccaccctgacccggaggcaaagcttg

SEQ ID NO: 258 - DNA, 30 bp, Homo sapiens
  chr1:27928820-27928850
  hyper
gacagccccagctcccgcctccggccagca

SEQ ID NO: 259 - DNA, 30 bp, Homo sapiens
  chr1:27929077-27929107
  hyper
gcgccctcaagcagcgagcagagattcagc

SEQ ID NO: 260 - DNA, 30 bp, Homo sapiens
  chr1:27960571-27960601
  hyper
atcgcctcctacctcggtcgggaagcccac

SEQ ID NO: 261 - DNA, 31 bp, Homo sapiens
  chr1:27986513-27986544
  hyper
ggcgcggccgccccaccgccccaccgcccca

SEQ ID NO: 262 - DNA, 30 bp, Homo sapiens
  chr1:28053263-28053293
  hyper
cagttggtggtcttcggtcttccctgacta

SEQ ID NO: 263 - DNA, 30 bp, Homo sapiens
  chr1:28286333-28286363
  hyper
gacccctgggctggcggcgggagcagagca

SEQ ID NO: 264 - DNA, 30 bp, Homo sapiens
  chr1:28286822-28286852
  hyper
gcgccgctgcctggcgctgctgcatctcct

SEQ ID NO: 265 - DNA, 30 bp, Homo sapiens
  chr1:28415098-28415128
  hyper
cgagcggaggaaaccgcggcgttagcgtga

SEQ ID NO: 266 - DNA, 30 bp, Homo sapiens
  chr1:28559015-28559045
  hyper
tacacagtgcctggcgttcgtgaatggcag

SEQ ID NO: 267 - DNA, 58 bp, Homo sapiens
  chr1:28833265-28833323
  hyper
tttctttttatttgatcgcaccactgcaacctccgcctgctgggctcaagcaattctc

SEQ ID NO: 268 - DNA, 89 bp, Homo sapiens
  chr1:28879901-28879990
  hyper
atccaaggactgaggcgcgctgttctgggaccggaggagtggggtttctaggtccaaggggaggctccctaaagcggggcaagcttgaa

SEQ ID NO: 269 - DNA, 30 bp, Homo sapiens
  chr1:29557378-29557408
  hyper
cgggggttcgcacccgccacagggtactgc

SEQ ID NO: 270 - DNA, 30 bp, Homo sapiens
  chr1:29563362-29563392
  hyper
ggcgattgtgtgcccggggtgttgcgtgac

SEQ ID NO: 271 - DNA, 764 bp, Homo sapiens
  chr1:29585831-29586595
  hyper
cctgcttctcagctacccctgcggtgagtcccagcccactgggggcgcaggggtaaggggtgtgggcggccgcggctcctgcctgcagggggtgcaggcccagctcacgatgcagctctaaccccgcagcaaaggccccacacttctcccgcctgggcgacgtggaggtcaacgcgggccagaacgcgtcgttccagtgcatggccgcgggcagagcggccgaggccgaacgcttcctcttgcaagtgagcgggagcggtgatcttggctgggggcggggtgggagggggttggtggctgcttctggccctgactccccccagattgctgagtccctgcttcatactccagcactgcgcacagcgtcccggccctcccctagctctgctctgcgctttcttgggtcccccattcccccaggttagagcgcggctccaggaacctatgtccgcgcggtgtagtagggacggctaaatggggcccgggtcagagcgagatcgggacccctcgctccgaggcgcccctgaccccctcactctcttccctgcagcggcagagcggggcgctggtgccggcggcgggcgtgcggcacatcagccaccggcgcttcctggccactttcccgctggctgccgtgagccgcgccgagcaggacctgtaccgctgtgtgtcccaggccccgcgcggcgcgggcgtctctaacttcgcggagctcatcgtcaagggtcagctggtggacgccggggagcgccgggacctcaccc

SEQ ID NO: 272 - DNA, 469 bp, Homo sapiens
  chr1:29804862-29805331
  hyper
ggggtccctgtaaggctcaggcggctgactggggaggcgatcccaggaggcacagtggggaggggatagcagggcggaaagaggctgaatcacaaggaggcgggggcggcggctcggtcccagggccatctcagggaccgtgtcggggggtgctgactctgcccatcaaggggagccggacatttatccgccaaagcccgtccctcgcggtgagggtcgctcctgggtgtgggacccctggcttcccgcgctgccctgcccggggctggtctcgtcccaggaccctggagagcggccccaggaggcgtggaggaggggagagagccgagggaagtggtcatggagcaggtgaacgcacaggggcttcggctggagcgccctcctgggaagagcccctcctctgcaaggacctgccgcagcttaaccagcctgcgctgctgtcgccagcgccagttttaaatagccaaac

SEQ ID NO: 273 - DNA, 30 bp, Homo sapiens
  chr1:31158011-31158041
  hyper
accgtcgaggaacccgacaaatgaattaaa

SEQ ID NO: 274 - DNA, 31 bp, Homo sapiens
  chr1:31192286-31192317
  hyper
cttgctgtccttgtcccggtaagaccgggga

SEQ ID NO: 275 - DNA, 30 bp, Homo sapiens
  chr1:31769902-31769932
  hyper
ggacctggagctgacgcctagtacgtatga

SEQ ID NO: 276 - DNA, 30 bp, Homo sapiens
  chr1:32083922-32083952
  hyper
gtcggggagcgtcgcggccctggggaccca

SEQ ID NO: 277 - DNA, 30 bp, Homo sapiens
  chr1:32110846-32110876
  hyper
agctcctgagtttccgcagatgagccgcgg

SEQ ID NO: 278 - DNA, 30 bp, Homo sapiens
  chr1:32135815-32135845
  hyper
agcaggaggcagagcgagaaggcaggaatg

SEQ ID NO: 279 - DNA, 728 bp, Homo sapiens
  chr1:32180092-32180820
  hyper
gggagagaagagcaatgcagacgtgactgtcctgccaggcgggggcgccgccgccagacgcacgaaaacaaccaaataaatcaggcccaggaactcctaatccttcccggctgtggctgctaccgcttgccccgccggcaccgccctgccaagggcgcagagtcgggccagcagagccggagtgatgccgggccatcgaggcgtcctcagcccccgaggtgggaggtggtgggggggcggggaggagaagaagaaggctctcccgacacggtgactcaggcctccttgacccgctcctgggtgggcacgttcctgcgccccggtctatttttagagccggctctgggcctgagcgcagactgaagggaaggggggcctcgtggggggcgcaggcgcctgaccagctcctccagctcggggctcaagccccaggccctccagctgtctacttggaaaagggtggaagcacatggagggtgggtgtcagggtgtgcggcgcaggcccagagaatgcgccccccttccccacaaggcctggcagttccagagaactgggcgcggcctcccaaataacgacctctgttaagtgggaccaggagcctcccgatggtcgctgtgtctgcccattggaccaggggccagggcgggcggggctttgggcgacagaactggctagggtgggagaggagaggaagctgccaggttctggggatcccgaccccaccccg

SEQ ID NO: 280 - DNA, 326 bp, Homo sapiens
  chr1:32181062-32181388
  hyper
tggcgggtgagggaacgttcctggcgccgcgaacgggaagcctccaggctgcaggacgtagctgcggggacccggcagtctgcgaggctggagtggccgaggccgccccgagcatagaaacagccctgtatacgtgggcacagaaaggcccagggaggcgcctgggcagaagtgtctaggacgatgcctctgccacggagccctggagtgggggcagctgatggctcaagacacatgagctctggtggcgagtacagggacgcggggtttggggaggcccaagtcaaggtccatccttctgggatgaggggcggaggatgggaggc

SEQ ID NO: 281 - DNA, 30 bp, Homo sapiens
  chr1:32226920-32226950
  hyper
caggccctcaggcccggtggccctgctaac

SEQ ID NO: 282 - DNA, 963 bp, Homo sapiens
  chr1:32237638-32238601
  hyper
cggcggcggcggcgcgggtgtggggccgcgcggccgggagcgggcggaagagagcgcgaatttgaatttcaaaggcatctggaacccaagtgcttctgcgttgcccgattgtgtgtgtggcgcttttgtgtgtccgcgaatgcgcgcgtgcgtgtgtggcgtgtgtctgggtgttttatgactgtcctccgtgaggccgtgtgtgagcccttgcgtgggccgtgagtgcggcagggagcgcggtgtccgggggccgcctgtcggtgtgtctgtgcgtgcttgtgcgctagcctttgcctctgcgagtgcgtatttttaggaccgagtctgtctatatgagcctgtgtctgtgtgtgtgcgctcccggccctgcgtgtgtctgtgagcgtctgccggggcgcgtgtgtgctcggaaccccgcggtggtgtgcgggtgtgtccgtgtgtctgtgcacgtgcaggcgagcgttcccatctgtgtgtgtgcatctgagtctgggctatgtgtgactcagggaccagtctatgagcctgcctgtgcctttgagccgatacctgtgtgtgactcagggacgagtctatgagccgatacctgtgtgtgcttgggtgtctgtgtcgtggtgtgtccctgcaagcgtttgtgcctgcaggtgctggagtgtgtagctgtgggaatgagtgcgtgtgagtgtgcggaaggggcaccgcgcgagggagcgccggtgcggaaggctaagcgagcccgcgccctccacggacggtgccgccaccccctccctccgccccgcgctatgtgcccctgtgtgcccgcgccgccggggccgtctctgggctccgggagggggctgagcgagcggccctttcctcccagggaccccgggcccgccgccagccctgggcacacccgccccttcctccagcggccccgctcgctgacccacgggcactcgatgggcactcggg

SEQ ID NO: 283 - DNA, 93 bp, Homo sapiens
  chr1:32410270-32410363
  hyper
agggagtgaagctgtgaattccgggagaagtcaagggtcgctcggggcgtgggtccgcgcgcggaggggctcgctgtcccggtgccagcggga

SEQ ID NO: 284 - DNA, 30 bp, Homo sapiens
  chr1:32574074-32574104
  hyper
gcaggcctgggcggcgctaaggtagctttc

SEQ ID NO: 285 - DNA, 30 bp, Homo sapiens
  chr1:32688092-32688122
  hyper
ctggggcccaattccgagcactgacgttac

SEQ ID NO: 286 - DNA, 30 bp, Homo sapiens
  chr1:32757387-32757417
  hyper
agaaagttggcctccgatctccaagcacgc

SEQ ID NO: 287 - DNA, 36 bp, Homo sapiens
  chr1:32757651-32757687
  hyper
gaggggacgggcggggcgggccggaggcccgccccc

SEQ ID NO: 288 - DNA, 102 bp, Homo sapiens
  chr1:32852879-32852981
  hyper
gatatgctttaaatcacgatattcataccaagtttcaaataacatgaaaaaaaggtatgtgatttttttttttttttcttgagacagagtctcgctctcgtt

SEQ ID NO: 289 - DNA, 177 bp, Homo sapiens
  chr1:32930360-32930537
  hyper
gggactcaaaagaccgaaccgagctgcagcctttcgctagcactggtcctcgccccttttggcatcttggtacttgtagttttgtccactctatctttacccgaaaagccagcgctgagaccacaactcccatcaccctgcgagcaccagcgccttcagagcgcatcctccgagggg

SEQ ID NO: 290 - DNA, 377 bp, Homo sapiens
  chr1:32930817-32931194
  hyper
cagtcatcctccttcggaccgcttggccctggcaactcctgggacctccgccccgcgagcccttctagcgtggggaggggcaggcgcggccgtggggccccagcttccctgtcattgggtgtcctccgcgtcgtccagccgggggtcgcggcgccgactacttccacggtgaatggtgcccaggcgtggggggctcggccacactggagaagtgccagcggcagcgatggccactttgtccgcgggaggccatgggaggggctaggccttggggtcccaccctcgggggccgtgccctgtagctggttctggtggcctctctgcaggtcgtctgatgctggacgggggagggtctgtcttgcgagcagtttagatgc

SEQ ID NO: 291 - DNA, 37 bp, Homo sapiens
  chr1:33005605-33005642
  hyper
cgggcgcggccaggggcgctgccggggaacctggctc

SEQ ID NO: 292 - DNA, 30 bp, Homo sapiens
  chr1:33116541-33116571
  hyper
gccgcgggagtgtgcggaccaaacctctct

SEQ ID NO: 293 - DNA, 30 bp, Homo sapiens
  chr1:33182357-33182387
  hyper
gttgccacatcagccgggtaagccctgccc

SEQ ID NO: 294 - DNA, 31 bp, Homo sapiens
  chr1:33207722-33207753
  hyper
cgaaccggccgccccccgggccaagaaggcg

SEQ ID NO: 295 - DNA, 413 bp, Homo sapiens
  chr1:33219373-33219786
  hyper
gagagagtgggcaacccgcctgccccacctggactggccaggccttcccctgtgcgccctaggctgggcggctcagccggtctcccaggtcccgggaggggcggagccgacgggatgcgcgccaggccccgcccctcctccgggcccgcccccggcctggccattggccgcagagctcgggggcgtggtcgagctggggctgggggcgcccgcggtgcccgcccgcgagtctcgctgcctccctcccggggctgcgggcccggcggccgggctggctgggccgcgcttgggttcccgcgccggctcccgcacccgcaatggggaactcacaccacaagaggaaggcccccagcggtccccgggtccgcagcttctggcggttcgggcggtcggcgaagcggccggcaggtagg

SEQ ID NO: 296 - DNA, 30 bp, Homo sapiens
  chr1:33282953-33282983
  hyper
tcagctgggctcggcgctccgcttactcgg

SEQ ID NO: 297 - DNA, 30 bp, Homo sapiens
  chr1:33283880-33283910
  hyper
ctggaaggcgacaccgtcccgggccgttgc

SEQ ID NO: 298 - DNA, 30 bp, Homo sapiens
  chr1:33429475-33429505
  hyper
cggggtgtcgggtgcgttcacaccactagt

SEQ ID NO: 299 - DNA, 30 bp, Homo sapiens
  chr1:33502693-33502723
  hyper
gtgtgcggagtgggcgggaaaacgcgaagg

SEQ ID NO: 300 - DNA, 30 bp, Homo sapiens
  chr1:33721354-33721384
  hyper
cacccctatgtcctcgtcttaaaaaaaaaa

SEQ ID NO: 301 - DNA, 35 bp, Homo sapiens
  chr1:33721671-33721706
  hyper
ccccgcgcggctcaggcgggcggaggggggcgagg

SEQ ID NO: 302 - DNA, 30 bp, Homo sapiens
  chr1:33722120-33722150
  hyper
tttgcgcgcggctccgcagcgagccagagc

SEQ ID NO: 303 - DNA, 30 bp, Homo sapiens
  chr1:33788139-33788169
  hyper
ccctgctttttttttaaaaaaaaatagggt

SEQ ID NO: 304 - DNA, 249 bp, Homo sapiens
  chr1:33896563-33896812
  hyper
gcccgcccgttacctgcggtcgcctccgcgctcctcctccacctggccgctctctcccgggggccgcccctcagcccgccccctcggctcggcgccgcgcaccctgctggctgctcggacgctgcccgcggaggaggggcgagggcgctattaccatatattagcataccagcgcgcgtcacgtggccgctccagccaatggtcaccctagaagggcggggattgggcggaacacgccttagtgctgct

SEQ ID NO: 305 - DNA, 423 bp, Homo sapiens
  chr1:33937918-33938341
  hyper
tctgaggctctcacttcgacccctcagtagaactgggcccccttctgctcgagtgccctcccattgggcggtgctgttatccggaagcctatggaaaaggccaggatcgcaacaggtcccgcccccatgtgtcgcgcccgttccgatttgttccagtgccagggtccgttagaagatgacatatctattggctgaagacgtctgaaaggcagcaaacggagggggccgcccccggcgctcgcgcggttccttctgggaattgtggtctcagacgttccattcccagggtggcgccgctcggactccgcgtcccagcattccccgcacgagcccgggagcacttccgccctgttgtgaagtgggtgtctcggtgggtgagtccgggtggcggggcgggggcagctgagacgcaggctctgggct

SEQ ID NO: 306 - DNA, 928 bp, Homo sapiens
  chr1:34628985-34629913
  hyper
aacctaagaaagtcccgtcagctaggaatgagagagccagagctggctcggggcgccctccctgaccaagaaccccaacatgccgcggttaagcggtgggcgacacggtctgcgaggacagactcacaagacgctgaaggccagagtgggccagagagctcgccactcactgacctgccagaggagaggcgcactttcccaagaaggggaactggggtggtccaggccaagccttcagaggttcaatcggtggtttcaaaacaaaacaaaacaaaacaaaaacaaaaacaaaaaagaaaacacggctccaggtcgaaggtgccctaggtctaggcctggccagcaggtgtttcggtttctcccccagtgggtgtcagcctcgcgggctaaatgaaaatgcggttccaggcatcccggtttggacccgtctccacccgggcacacggaactttctagcttgtagctagaactgagcttcggaggggtgctgtgggtaaagcgggagggcaccagtcgcggccagtagcctccacaggggaccgggttccctcgaaggttcgcgtacctcccccgcgcgctgcaagctgcagccagacacccgcgaagttccgggactctccgcacccgctagatctgccccttcccggactcggtcgtcgggagctggtcccgccgcccgcgccgccgctgccgctgccgcagccgaggcgctcggctgcagcagggcgcgggaaagggcactttggcgcggagtgagcaccgaggggaatgtggcagcgcgaagcctggcggcggcactccctcccccgcctcgggctacaacccccaccccctccttcccatccctcaacaccctccagcccccacctgcaccctcctgcaaggaatgcgcgggacccccaccgtgggcacgcgtccacctgaaccc

SEQ ID NO: 307 - DNA, 141 bp, Homo sapiens
  chr1:34630138-34630279
  hyper
cccggaaagtttatcgggaaaaagcctagcaccgtgggggctgggaggctggagaaactgaagccacagaccaggtgccccgcaaccccgggcggggatgtctgtctcccaggcccccacaccggccgcatccgtccaagt

SEQ ID NO: 308 - DNA, 436 bp, Homo sapiens
  chr1:34630502-34630938
  hyper
tggactcacccgcggcggccgagacgctgagcaacccacagcccagcaacagcagcagaggcggcggcgttggcggcggcgggcggccccagcggctcccggcgcccggcacaagcgccgaaatcccggtttcgccgcgagccctccccgcggggcagccgcagcgccccagctcccgtccccgcgagcgcggcatggcgcggccggcagcgccgagggagaggctccgctcgccgccgaggagaaaggaggtcaggagagctctggagcttttttctgctcggaaaaaatcccggtacgcgggagccctgagcttctgcggctggaatgaaccaagtgtccgcccggccggggagaggcgcgctgcgctctcggaaatgactcgctccaatcccgcttcgcggggttcgcgccggggggcgggagggggtgaatt

SEQ ID NO: 309 - DNA, 30 bp, Homo sapiens
  chr1:34642884-34642914
  hyper
aacgcccaggcgagcgcctcctgcggggcc

SEQ ID NO: 310 - DNA, 31 bp, Homo sapiens
  chr1:35208445-35208476
  hyper
ctctgctgccccccagcggctgaatggagca

SEQ ID NO: 311 - DNA, 858 bp, Homo sapiens
  chr1:35351016-35351874
  hyper
ccctcaccccagccccgaccgaccagggtcagagccctcgtgggcgcctccccgttccatacctgcaccccaatggacggccgccacttccgctgccgcgccaggctccgcagctcctccctgccagggatggtcttgatgatgagtgtggggggcttggggctggcccggggcggcaccggcgccaactccagtgtgcgcgcacccatggcggggccgtccagcccgtcggcggagctgcagcgccgggcggggccctcggccgccgtgaagctctcgtgcgcggagtcggtgctgctctgggcggtgatggagatgcggggcggggcctggcttcccggcgggatggggggcggggcctttctgaagttgaaggctgtggccggcgagcgcagagacgcagtgggtgaggctcgcggccctgcctgggtcctgggcccgcgcccgactcccaccctcaagaggccctacgggaccctgcagcggcgcgcactccacatgctgctgcacacacgccaacggacgctctccccgtcatccgaccccgggagcgagcgatctgcgcgggtcacagcacagtcgagggggaggccagaacccggacccagggcgctctcctgcctagggccgggccaggggcaggaaggtgtactcacaggagccgggcctccctgagacagcggcaggggtagcgaggaggggcaggcagtcgtcgtcttgagagcagccggcctggatggcccggaggtagctgtggctccgcatgcggaaacagccgggcaggtccagggcgtccacggcctgggactccagctccccaaacaccgacccgcacacggcctccagctgctggttcaa

SEQ ID NO: 312 - DNA, 102 bp, Homo sapiens
  chr1:35390565-35390667
  hyper
gcctcattcagcactcgggacagctccgaaggagcaaatccccgccgaatcccactcagcacccgggacagttcccagcgacattgccggccccggtagcca

SEQ ID NO: 313 - DNA, 36 bp, Homo sapiens
  chr1:35394629-35394665
  hyper
cggcacagacacacagcgacacgcactcacattcac

SEQ ID NO: 314 - DNA, 943 bp, Homo sapiens
  chr1:35395081-35396024
  hyper
atggtgccggcggcccgggccgggggcgctgcggcgttgggcaggcgggcagggaccggggcccggcactgcggagcccccagctgaggggccgcgccggctgcggagccccaagcgagcgccgagcggcagcgggcgcgggagcgggaggcggccaagccacggaggctggatttcccggggaccgggaaggggaggcggggggatcccgcccgcgcgctccgcccccgcccccgcccccgcgcagggcagccgagcagggagagggagagggagaggaagagggagggggaccgagctccccgcccccgcgcggacccaggagggccgaggtcgccgcccgcgggcggccgccggggtcccggaggagcgcccacctcgctgagcgacggtgctgggggcgcccagcgtaggggcaggaatgagatccccctccccggggacccaggaacaggcacccgaagtgtcacggccacgcacagccgacctgggtacagggacccaagcccggcggcgggcgggcggtcggggaccagctcagcctcacggaccgggtctcgccccccgccgaggggcagtcacgccctgaatgtcacacacagcccccaggcccgtccgcttaggagactctccttcgggctttcccggtcggccgcctgacctcagctcctggcttggggtcagggagcccccctcttcggccccagcccctgccaggatggggcgctgtgcccggcctcggagccgctggcaggcgtcccccacccacagtccgcacagccgaggcatccccagtgtggagggagagccccgctgtacctgccgcctgtgctgggcccccgcccgtgcccactgtgcccgcccgcctctgggccctgagcctgggattgtgccatggcggggtcggggtggggggaaagggactgtccgaagcacagctgga

SEQ ID NO: 315 - DNA, 234 bp, Homo sapiens
  chr1:35544795-35545029
  hyper
ctgccagccagcgacgacttcaagggtaagatcctatgcgggccgtaaggactcttcccctccccctctcccacttcttctatcccaaagtcgctcttcccaattcagggagctgggaccaccctgagccagcggccctgcgcatgctcaaccgcagagcacgacgggagaggggcggggtcggcggggccgtttcgcttcgaagattgtttcagaagcgttgggcggggcgtc

SEQ ID NO: 316 - DNA, 30 bp, Homo sapiens
  chr1:35658266-35658296
  hyper
ggaggctggtggtgcgctgcctactccggg

SEQ ID NO: 317 - DNA, 1211 bp, Homo sapiens
  chr1:36042458-36043669
  hyper
cgggacgcggccgcgcggactcacgtgcacaaccgcgcgggacggggccacgcggactcacgtgcacaaccgcgggaccccagcgccagcgggaccccagcgccagcgggaccccagcgccagcgggaccccagcgccagcgggaccccagcgccagcgggaccccagcgccagcgggaccccagcgccagcgggtctgtggcccagtggagcgagtggagcgctggcgacctgagcggagactgcgccctggacgccccagcctagacgtcaagttacagcccgcgcagcagcagcaaaggggaaggggcaggagccgggcacagttggatccggaggtcgtgacccaggggaaagcgtgggcggtcgacccagggcagctgcggcggcgaggcaggtgggctccttgctccctggagccgcccctccccacacctgccctcggcgcccccagcagttttcaccttggccctccgcggtcactgcgggattcggcgttgccgccagcccagtggggagtgaattagcgccctccttcgtcctcggcccttccgacggcacgaggaactcctgtcctgccccacagaccttcggcctccgccgagtgcggtactggagcctgccccgccagggccctggaatcagagaaagtcgctctttggccacctgaagcgtcggatccctacagtgcctcccagcctgggcgggagcggcggctgcgtcgctgaaggttggggtccttggtgcgaaagggaggcagctgcagcctcagccccaccccagaagcggccttcgcatcgctgcggtgggcgttctcgggcttcgacttcgccagcgccgcggggcagaggcacctggagctcgcagggcccagacctgggttggaaaagcttcgctgactgcaggcaagcgtccgggaggggcggccaggcgaagccccggcgctttaccacacacttccgggtcccatgccagttgcatccgcggtattgggcaggaaatggcagggctgaggccgaccctaggagtataagggagccctccatttcctgcccacatttgtcacctccagttttgcaacctatcccagacacacagaaagcaagcaggactggtggggagacggagcttaacaggaatattttccagcagtgagcaggggctgtatgggacgcgggaggagctcagaggaggcgcggagagtgcccgag

SEQ ID NO: 318 - DNA, 30 bp, Homo sapiens
  chr1:36107280-36107310
  hyper
cttgccttatgtgacgcccagtttctctgt

SEQ ID NO: 319 - DNA, 79 bp, Homo sapiens
  chr1:36173594-36173673
  hyper
ggggcagtaaagggcgctcgggactgtgcggatcaacagtctgtgcggggcggcgcgtgggggcgggcttggccccgcc

SEQ ID NO: 320 - DNA, 30 bp, Homo sapiens
  chr1:36235784-36235814
  hyper
ggtaccaggcgagccgtggtctttgacctt

SEQ ID NO: 321 - DNA, 30 bp, Homo sapiens
  chr1:36549704-36549734
  hyper
actggagctcagagcggggggcgcggagag

SEQ ID NO: 322 - DNA, 57 bp, Homo sapiens
  chr1:36615128-36615185
  hyper
actagtggtccggccgacgtgggcaactcccgcccaacaaacgtcagactacaacac

SEQ ID NO: 323 - DNA, 31 bp, Homo sapiens
  chr1:36789069-36789100
  hyper
ccgcttcccggctgcccggccccagcgcgtc

SEQ ID NO: 324 - DNA, 30 bp, Homo sapiens
  chr1:36862992-36863022
  hyper
tgggcatggcctaacgaccagccacccggc

SEQ ID NO: 325 - DNA, 86 bp, Homo sapiens
  chr1:36863494-36863580
  hyper
ccgggcgcagagtgcgtcagtgctctgcaagtcaccgcgtcacggagaaactacaatccccagaatgcttcgcggcgcggggctcg

SEQ ID NO: 326 - DNA, 31 bp, Homo sapiens
  chr1:36883607-36883638
  hyper
ataaataagaaatagacgtaatggcttcact

SEQ ID NO: 327 - DNA, 867 bp, Homo sapiens
  chr1:36931642-36932509
  hyper
gtacacccaagagtgtctataaacaacaacaaaaactgcaaaccaaaaactagtttacaatactgaagttataggaaacaagcacaaaaggccattgggtggggctggatggagcatgatctggtccttaaagtatgcagatcgcctgggaggcccagcctatggagattgggaggagagggagatgctggtgactggagatggtgagagcctgggctggggtagtttttagtcatgggcttatggaccctcccctcttctccagctagctcaggcctttaagaggcaggcccaagaagggaaccccaggaagccctagaagctccccagcgcctccatcccatggacccggatcccctgcaggagggggaagttgagcagtggcccaaagacacagtcgtcctcctggcttggggctggggttaccagggtccccaaggggctggcctggaaccagaggttctcataggacttggggctgggggtgaggcccgccaagaggggctgagtggagtcacagcggagatagtgccctggccctgggcttgtggggctgcccagcagctgcccataaaggacctgatcgctggtgccagactgggattggggctgggtggaaactgctcttgggtccccctggagcacataggtctggaccagagtggggaggccacaggtctctgagctgttatgggactcccagggcaccggcttcttttcatcctcctccagcactgtgagcttggtgatgggtggcgtgccaaggccgggcagctggaaggcatcctgcacacaaggatgtggggtgagagcacggctcatttcagatgtctgccccagccactgtccctgtctgggtccgggcag

SEQ ID NO: 328 - DNA, 219 bp, Homo sapiens
  chr1:36933229-36933448
  hyper
gatgatgtgtagctccgacccctctgcagtgagggcagggccggaagaagttagaatgcatgttgggaaggctgggtctcctccctccgaccaggggattcaaagtcagtccccagctactctcaaaatcagcatcctttgggtggggtaccctccaaacagccatctctgcccagcccccgtctccccttacctggggtcaaggtcatcagggtgagg

SEQ ID NO: 329 - DNA, 126 bp, Homo sapiens
  chr1:36937115-36937241
  hyper
tgaaggcaggtggaaggtgcagctgagctctgtggtgttgcagaggggcaggatggccccagcctggcctgagggtctccaagaaaccacataaccttggatccgtccgctgtcttcctccagggg

SEQ ID NO: 330 - DNA, 78 bp, Homo sapiens
  chr1:36937668-36937746
  hyper
tccagaacagctgcactgtcctggggtccagctgcctctgccgccaccatgtgtccagtctgacagtgggggctgtgg

SEQ ID NO: 331 - DNA, 30 bp, Homo sapiens
  chr1:36938251-36938281
  hyper
ggtccatggtccgcagcatggggggctcca

SEQ ID NO: 332 - DNA, 30 bp, Homo sapiens
  chr1:36939051-36939081
  hyper
aagacacagttgtggggacatgctggtccc

SEQ ID NO: 333 - DNA, 30 bp, Homo sapiens
  chr1:36939438-36939468
  hyper
ggttgtgaggttcatgaggcaggagaggtt

SEQ ID NO: 334 - DNA, 30 bp, Homo sapiens
  chr1:36945020-36945050
  hyper
tggccatactcacttccggggagcagcagg

SEQ ID NO: 335 - DNA, 35 bp, Homo sapiens
  chr1:37498532-37498567
  hyper
aggaggaaggtggccctggctcggcggagtccggc

SEQ ID NO: 336 - DNA, 247 bp, Homo sapiens
  chr1:37498597-37498844
  hyper
cgagtgaacccaggcggcccaggtgtccggcctggtggcgggcgcagggcctgcggtgatggaggctccgtcttagcccggccaggcccagccctgccggtcgtcggcccgggacatgcgcggcgctcaggcctgcagggtgccttgggcggccacaacaaagttaaagaccggagtaagagtctccggcgagaagagacgcggagaagccggagccccggaaagccgcgcgcagccccgccagccg

SEQ ID NO: 337 - DNA, 794 bp, Homo sapiens
  chr1:37498888-37499682
  hyper
cgtccctgggccgcctgcccgggccgcactgggcggcctccatcgtcccttccctctacctgcactgccccaggcgggagagaggccttggccccgagggaccagctgcagcgggcagcggggtcctgctcccccaacccccgccccatggcacggggctgaaccggtaccaccgaggccaagggcgaccaccaggagagaagaccggctgccctcgtcatgcgaatctgtgccctgcgacctcgctgcggctgctcgagctatgccagaggtggggacgaagggcccgcggggagtgaggtgggcagaggagagaagttggcgccttccccagggtccccactctgcggagaagcccgatcgcagaactcggtcggctgcggttcatgctggcagtcaccgcgaaatgcgccctcgactcgggatcgcactggaaaccttcgccacactgtgccaggtctgacctcccaggagcgcgccaagggcccctcgcccactgcggcccggcggcctcctccccaataagtaaggcccgtgaccccgactctggaactttgtcctcacagggaggagctcctggtggtcaccgatcggctcagcagctcggagagaggttaggaaaatctctccggaacgcgttgggaggccccctcattcccgccccctcccgggcgcacggagacccccggctccagggagcgcttaccgatccggatgacgtggggcatcccgcgcgagtccgggatccagaaggcgcacacgaggagcccggcccagtattcccaaaccagact

SEQ ID NO: 338 - DNA, 231 bp, Homo sapiens
  chr1:37500343-37500574
  hyper
acgaggactctcctcgcttcccagacgtccccacccgccccgccggccccagtcccttctactgcgagggcacggagcccgggagccaggcgtggagcgcgagagctggcaccgcgagctgggagacggcggcagcccagcggccggaccagctggaggagacgcgcccgccgggagcagcgagaccgggagcccgccgtctgcggagcctggcctcgcggctcccacgcg

SEQ ID NO: 339 - DNA, 203 bp, Homo sapiens
  chr1:37500602-37500805
  hyper
cgggagactgacccgggaaccggcttccctccccaaccccattcctcctggcagcagagttggggctgggggttcggagaggcagaattcaaagcgaattgtctacgctgggccaggggagctgagggagttggtagaggtgggagagcccaagtcagaccccctgctgtgggaagctggacttgaccgcgcacaggtcctgg

SEQ ID NO: 340 - DNA, 153 bp, Homo sapiens
  chr1:37721111-37721264
  hyper
ggagccattttcgggcgaagccaggggcccacgtgggagggagctccaggagagatcagtctctgctggcgtggagggggcggggagggggctgtccgtggtgctgaacccaagctatcctaggattgccaggcagtacgaatgaacgctggt

SEQ ID NO: 341 - DNA, 30 bp, Homo sapiens
  chr1:37939709-37939739
  hyper
ctgcctccaaggtgcgtggaccaacctccg

SEQ ID NO: 342 - DNA, 201 bp, Homo sapiens
  chr1:37940668-37940869
  hyper
gggaagccttgggccccgcaacgcacttccagccccaggattccatctgagagccccgtccctgccttctgggtcccctgggttggcgtgggggttcgaggctttacagctggggtagttccagtcttagttcagactaagttccgatcttcgagccaccagctaacagctggatgaccttgagcacgtttttaatgtctg

SEQ ID NO: 343 - DNA, 30 bp, Homo sapiens
  chr1:38019537-38019567
  hyper
acgctagccctgcccgcctttctgaatgag

SEQ ID NO: 344 - DNA, 30 bp, Homo sapiens
  chr1:38019906-38019936
  hyper
tggacttccgcttccggggtgcccaggctc

SEQ ID NO: 345 - DNA, 30 bp, Homo sapiens
  chr1:38061486-38061516
  hyper
ttcccaagcccggccgaagacacccgcctg

SEQ ID NO: 346 - DNA, 135 bp, Homo sapiens
  chr1:38100357-38100492
  hyper
caagttgctcaatctgcggacggctcacgccctcggggccagcgccccacccggcgcatcggtcctccggggcggctcggagctgccctcgttctccgcagcacccgagcggatgccctactctggccggtcgct

SEQ ID NO: 347 - DNA, 58 bp, Homo sapiens
  chr1:38100533-38100591
  hyper
cgctcggccggagctcccagcccggagaggggccagtcctctgcgagcaccagggagg

SEQ ID NO: 348 - DNA, 30 bp, Homo sapiens
  chr1:38158180-38158210
  hyper
gttgactgtagagccgctctctctcactgg

SEQ ID NO: 349 - DNA, 30 bp, Homo sapiens
  chr1:38230058-38230088
  hyper
gcgggctccagtatcgccgacagcctcaaa

SEQ ID NO: 350 - DNA, 72 bp, Homo sapiens
  chr1:38230830-38230902
  hyper
gggcggagtctcaccgctcaccatcatccatgggaaccaatcactaggcaccgccgcgggatgccaaccaat

SEQ ID NO: 351 - DNA, 137 bp, Homo sapiens
  chr1:38412696-38412833
  hyper
gctgccccaggttccgggacagtgactacatttcccaacagcccctgcgccacatggtggtcagtcagcctgcaagtcccagcatgcccgagtcaatcgtggggtggggagtctctccatccgtgttaaccccttag

SEQ ID NO: 352 - DNA, 38 bp, Homo sapiens
  chr1:38461632-38461670
  hyper
tccgcctgcccagggccgggcctcgctgcaggcagctg

SEQ ID NO: 353 - DNA, 30 bp, Homo sapiens
  chr1:38478687-38478717
  hyper
gagcttcgtgggaacgagtggaggggattt

SEQ ID NO: 354 - DNA, 555 bp, Homo sapiens
  chr1:38510178-38510733
  hyper
gagcgcagacccctccggcgtggccgggaaccaagccggggctcggatgaaacgaaacgaaaaatgaacactcgaattttttttgttagttttttttttttttttttgcttttttttggggggagggtagggtagggaaatataaggggaaaaataaattaggctagattaaagctttggctatttcctgcttttatacacagacgcggctctcgcgacctcccctccggggccccgataaatacagtatactgcgatttaaattaagggcgcgggcggagttagaaggaccccaggagccgagaggctccacgaataaataaaaaccgtaaaaaaccaagcccggagaaaggggaaagcggggtggggcgcatccttataggagagaagaggcgtgtagcgaataaagtgacagccccccaccctggacccgcaggctcaggagtccacgcggggagaggggatggagaactctcctcgcttcgtcctctctcccggggaatccctaaccccgcactgcgttacctgtcgctttggggaggccgctgccgggat

SEQ ID NO: 355 - DNA, 1026 bp, Homo sapiens
  chr1:38510773-38511799
  hyper
cgaggggatgggggcagagagcaggcggcgggcaggatgcccggggtgagttggcgagttccggatcttcgctcctctctcccggggctcgggcgacgcagcctaccgggctgtcttcgccgctcaccggagagggtcgtccgggtgtttggttttgttcgaaagtttctgggcttttttttttttttgtaaaatccaaagcaaccgaacaaaaagagtccaggccgcgcgggcgggctgcgcgcccgcgccctgcagcgcgccggcgggggcccggcccgcggggtcactgcactgagccgggcagtgtgtggtggtggtggtggtgcagcgccgccggcgggggcggtgggggcgcggagggtggcgatgcgccgcccccgccaggccctagctccccaggcgcgtatacatcgtccatgggcgggtggcccgcgccggccgcaggggtcatgcgcttctccttctgccgccggttgcagaaccagacgcgcaccacctccttctccagctgcaggctgtctgccaagccggtgatctcgtgcgccgagggcttggggcacttgagaaagtggctctcgagcgcgcctttgacccccacctcgatggacgtgcgcttcttgcgcttgcggccctgcgccgcgatcttgtccaggttggtggggctgccgctggacgagtcggtctcctccagccacttgttgagcagcggcttgagcttgcacatgttcttgaagctcagctgcagggcctcgaagcggcagatggtggtctgcgagaacacgttaccgtagagcgtgcccagcgccagccccacgtcggcctgcgtaaagcccagcttgatgcgccgctgcttgaactgcttggcgaactgctccaggtcgtccgagctgggcgcatcctcgtccgagtgctcgcccaccgatgagccgccgccgcccgcgcccgggtgcaggtgcgccgccgccgcgtgcaggccgcccgcgtgtgcatgtccgtgtgcgtgtccgtgggcgcccagatgcg

SEQ ID NO: 356 - DNA, 231 bp, Homo sapiens
  chr1:38511821-38512052
  hyper
cgcctcgtggccatcctcgtgcagcgcgtggtgcaggcccggccccgcgccgccaccgcccgccgccagcatcccggccaggccgccgccgccgccccccgggtaggccgcctgcgcgtacagcccgagcggctggggctggtggcccccgctggccccgggcgagggcgacatggccgggcccaagtggtgcgctgtgctgccctgcgcccatgccgcgcccgcgtgggc

SEQ ID NO: 357 - DNA, 30 bp, Homo sapiens
  chr1:39338989-39339019
  hyper
agcggcgtagctggcgccggagaccgcgac

SEQ ID NO: 358 - DNA, 30 bp, Homo sapiens
  chr1:39483421-39483451
  hyper
agtgttgctgttttcataagttattagggt

SEQ ID NO: 359 - DNA, 43 bp, Homo sapiens
  chr1:39874198-39874241
  hyper
cgggaactcgagtggccgtcgccagagccggctagctggggga

SEQ ID NO: 360 - DNA, 60 bp, Homo sapiens
  chr1:39874756-39874816
  hyper
cgagctagcgagctagcgggtcgcgctgcgcgggggaggaggactcgccccccgcccgac

SEQ ID NO: 361 - DNA, 246 bp, Homo sapiens
  chr1:40105073-40105319
  hyper
tacgccgacacctgtggcccccgcgctcacctgcctctgcccaggcggtgctggagggctggcccgcctgctcggcgagcccgtcgggccgacccccaccccgctcgccctccgcctgctcggtccccgcatcccggcccttacctcagctggccctcttggcccacgtcgatgggtccgtcggactccccgtcggagccgctcggctccttgggtcgcttcatggcgaacgcaggctgcctggtc

SEQ ID NO: 362 - DNA, 30 bp, Homo sapiens
  chr1:40158061-40158091
  hyper
ctgggctgcactggcgtctgagagctcctg

SEQ ID NO: 363 - DNA, 850 bp, Homo sapiens
  chr1:40781095-40781945
  hyper
ttgcagaacaaacggcgtccttgtggtgcgggccggcgccgcctattggcgacgaggggcactacatctccgggcaccccgaagtccccacccccaccacagcgctcacaaagttctcctttgtctgccgcctccctcccgccctggtctcaggttagagacttacgtcgatgccgtcggatccaggcactcccggcggtcccgggggacccggggggccccgctctcccggtggacctctctgaaaaacacacacggggtggggcagtcctcagacagtgcaggaagctgggcgtccccggggctgcaagcgaccctgggagcggggtcctaggggcgcagctcttccgcgaactcccacgtattgagaatcttctgtatagcaggcactgtgtgccattacatgcattcattatcttacagaatactcagaaccgggaggcgggcgctattacgggccccagtttgcagtcgaagaaactggctcagaacgtgaagggtccatggtcactgagagtgggcggcggcgccaggagtccgccctggatctgcccgactccttccactgtgccagtttgcccttgcgcggtcgcggtggggaatagatggagacgtggacagctcaaataaatcacagatggaatgtaaggttgtgcctagcaggctgccggccctcagtgagcggtggctcgggttgttgttcttacgtgaacgacaggcagagacagcgcctcctcctctccccatggtgcgggaaaacccgacgggaaagtgggggaggcgcagagaaaggaggtgtagggaggtgaagcgggtactatcttcccactcggagcgccccttcggcagc

SEQ ID NO: 364 - DNA, 30 bp, Homo sapiens
  chr1:40782310-40782340
  hyper
tctctgccctacccgcgcgcccgcagcccc

SEQ ID NO: 365 - DNA, 238 bp, Homo sapiens
  chr1:41267898-41268136
  hyper
tggtgctgtgaggtggaagggcgaggccgaggcggcggtggcgtcgcgtcccccctctccgcccctggcctcggggacgcggcggcaccttcacactttccgcttggcccgctgctcgcctttcaggccgccgcgttttcaattgttaatttggaaacggaaaaagtagccggccgggcgggggaggccgcggggaggtaatcggagccgcagcaccgccccggcccctcccgctctc

SEQ ID NO: 366 - DNA, 653 bp, Homo sapiens
  chr1:41284000-41284653
  hyper
caggagccagggtgacgcctttactcccaatcccgactctgaccctggagacccgcacagattcagcggaccctccccctccctccccagtcccctgccacatccccagaagtccccgcctccgggtccgtgcgcggggtaggctggctgtgatctcgccgcccccgcccctgcagacttcatcgtgttcgtggcctcggtggccgtcatcgccgcgggtacccagggcaacatcttcgccacgtccgcgctgcgcagcatgcgcttcctgcagatcctgcgcatggtgcgcatggaccgccgcggcggcacctggaagctgctgggctcagtggtctacgcgcatagcaaggtgaggcctgcaagccgcgcgcggagacccgagggcgtgtctggggcacgaccagagcgggcagggcggagagggcgaggtcagaggggctgtctccgtgctgggaaggggtgtggcctgcgggggttggagccctagcaggaggcgaggtctaagcgggtggggcgaagtggattctgaattaggtaggggcgggcctaggagtccggaccggatcagggggcggggccggagaggcggggcttgagggtttcccctggatgcttctgggtttgaagggaccactcgtaccacaaagtgg

SEQ ID NO: 367 - DNA, 3 bp, Homo sapiens
  chr1:41327843-41327846
  hyper
gcc

SEQ ID NO: 368 - DNA, 75 bp, Homo sapiens
  chr1:41328099-41328174
  hyper
cattggctgggcgagacgcttctgggcgggccgcgcacgcctgcatctaggtcttggccccgcccctcccactgg

SEQ ID NO: 369 - DNA, 36 bp, Homo sapiens
  chr1:41446123-41446159
  hyper
gagctcaccacgtttgcgtggcgcccttccgtccac

SEQ ID NO: 370 - DNA, 205 bp, Homo sapiens
  chr1:41832017-41832222
  hyper
gttgctggcacgcccggcagactcccacgaccacctgctcacacccacccacgagcgctggcgcgcttcgggcccttccggcttcccgggcctcccggcgcccctcccccgccgccgtgcccagcccccccaccccgctctgctccccgcggaccccctcgctcccttccggccccacggcggccgcccccgccacaccccccgc

SEQ ID NO: 371 - DNA, 30 bp, Homo sapiens
  chr1:41832463-41832493
  hyper
ggggtttgcgggttcgaaagttcagcgccc

SEQ ID NO: 372 - DNA, 1592 bp, Homo sapiens
  chr1:41847296-41848888
  hyper
cggcacaacctgtcgctgcacacccgtttcatccgcgtgcagaacgagggcaccggcaagagttcgtggtggatgctgaaccccgagggcggaaagacagggaagaccccgcggcgcagggccgtgtccatggacaacggggccaagttcctgcgcatcaagggcaaggcgagcaagaagaagcagctgcaggcgcccgagcgaagcccggacgacagctccccgagtgcgcccgccccggggccggtgcctgccgcagccaagtgggccgccagccccgcctcgcacgccagcgacgactacgaggcttgggccgacttccgcggcggcgggagacccctgctcggggaggcggccgagctggaggacgacgaggccctggaggccctggcgccatcatcgccgctcatgtacccaagccccgccagcgcgctgtcgccggcgctgggctcgcgctgtccgggtgagctgccccgcctggccgagctgggaggcccgctgggcctgcacggcggcggcggcgcggggctgcccgagggcctgctggacggcgcgcaggacgcgtacgggccgcgggcccgcgcccaggcccggcccggtgctgggtgcgccgggggagctggcgctggcgggcgcagccgccgcctaccccggcaaaggggcggccccgtacgcgccgcccgcgccctcgcgcagtgccttagcccaccccatcagccttatgacgctgcccggcgaggcgggcgccgcgggcctggcaccgccgggccacgccgccgccttcgggggcccgcccggcggcctcctgctggacgctctgccggggccctacgctgccgccgccgccgggccgctgggcgccgcgcccgaccgcttcccggccgacctggacctcgacatgttcagcgggagcctcgagtgcgacgtggagtccatcatcctcaacgacttcatggacagcgacgaaatggacttcaacttcgattcggccctgcctccgccgccgccgggcctggccggggccccgccccccaaccagagctgggtgccgggctgagggccgcctcccgcctccgggcgccccgtcccgtccccagggggcctctgtcttcccatcctgattcccgggtccctgcccccgactctagctccccaggaggcggccccagcccagctagggacccctctcggaggccggccgccggggaaggggagggaggggccggggcaccccactgctcctgcccacactcctgagatccacccccttctcctgggcaggaagcctgggagaggaggctgaattccaggctggctgggagtagggaggagcggggtgggccgcctggtgtggacggtggtcggggaagccaactaggagatgggccagggagcgtttacaaatcttcagtttcatttgcggaggcctagccgtgaccccgcgcccaccccaaacacggatctgattcccacttgacacactttcccactggtcttagtctcacccacccgaagccagcaaccctctgcggaaaactcacacctacctatatccatccaccctgagcagccctccacccccaaatcgccct

SEQ ID NO: 373 - DNA, 340 bp, Homo sapiens
  chr1:41848942-41849282
  hyper
cgcttctcccctcccccgtcggagtcagtccctctcttcaaccgcccccaccccctagtactggtctcagcttctgcagcgggcctcagccccgtccacccccaaccccgacgcccctttctccgcgccagttctggcccttctcccatatttataagtgtccggccgggacgggcggtgggcgcggcgtccccggcgcgtatcgtaggcagtgtaccgtggccgtgccgtcagagtgtgcgtgtgcgtgtgtgccgtgtcgaggctgtgtagagtgcattgtacagcatattttcatgaataaaattgttttaaatatttcccgcgccttgggctagag

SEQ ID NO: 374 - DNA, 525 bp, Homo sapiens
  chr1:41981636-41982161
  hyper
ggagagtcaggaccagcgtctcctgatgtccagcagggagggctcctaaagatcctctttactaatgtggaagttgagacccagtgggggtaatggcccgtcctgggcactcagtgcatgaatgctggaagccaagagtcccctgcccagctcggggctggccggggcctccacatctgcgttcctgcagggcgctgagggaatgcccctggctgggcggccccgcccctgctgggatccaggccaacgctccacaaatgagagagcttgagcgcgcggcgggcgccgctgggagaggccacacggtggcgctagcgcccagcctggccagcaccatgggcagggccggggcgcctggctccttccaggcagttctcccacgcgccacctcgcgtcccacagacacgaactcctgccgctccccccggcatctgtctcgtcgcgggaagtggaaactccatccttcagtctcttgggccgtaatccttggagtcctccatggctccttttcgttcttccccctct

SEQ ID NO: 375 - DNA, 30 bp, Homo sapiens
  chr1:42846455-42846485
  hyper
cagggctgcagagacgcctggcgcacccgc

SEQ ID NO: 376 - DNA, 30 bp, Homo sapiens
  chr1:42922679-42922709
  hyper
gttcaccactttggcggactatttgcatct

SEQ ID NO: 377 - DNA, 364 bp, Homo sapiens
  chr1:42928781-42929145
  hyper
gaatgagttgtactatcgatacggccgggacaactccgcccccgacccgaaggccaatggtgtgagacataataacagtctccacaagaaccacagtctctggttccactggcgtgcgtcgtctctatggttcccgccggaaggacgcgtctgcgtctctgcggcgagcgcggttgctatgacgcccaggtctccgtaggcacctgcagctagcagctgagcgcgtaggggccgagcgaccccgggacgctcgcggcaccctccgcaggaaaatttccgacttggttcttgaggttcctgcctcagccccaaggaggaaagcacccattctcccctcttttccgcattacgggccttttctgct

SEQ ID NO: 378 - DNA, 30 bp, Homo sapiens
  chr1:43233136-43233166
  hyper
acggcgggagctcacggcttgtgttcctgg

SEQ ID NO: 379 - DNA, 911 bp, Homo sapiens
  chr1:43389628-43390539
  hyper
tacagcgtggagagcgctttgatggaggaaatacaagccgatgtagtgttcccgggaaaacctgatccagaaggcttccagggagaggagattttgcgcctaagatttcaaatgaaagatctcataacactgtcagtgaaacaactaagcactgctgggaaaagatggtggcctggagaacagtcccgttatctatttaccccttttcgtcagaaaccgtagacgtcaccttacgcgggataggaacccgggtgagctacgtccccagggatgcccagcgatacacaagtcaccgtcaccccctccagagtaaaccgcatcgcctggcaagcaggcgcccaggtcgtccccaagggccagcgcctggaaccgccagggtgtgattggtggagtcttggagcccgcccctcgtcgggcccaacaatgcgcctctgattggtggagaaaccacctggccccgcccatccccaatcgtgtccgtgcgccgccggtggcccggcttaggggaccgctgtgaggtctggagaggatgcgccatcgaccccggcagtaggcggccgaaccttggccccaaatcttctaccccggggtggattgcggcccctagaggaaaggcgtcaggggaccgaccggcagctgtgccgtcgcggcactctggaccacgctgagggcgggccggcttccctgcgcctgcgctgacattttgcagtttgggaaatggcggtgctcggggacgtcgatactgacccagggcgggaggcagctgcgagtggattgtcgggccttttcagaccggggtctgaacctctgggccggggcggggctcgggtgctgcctggctctgccaacgttctgggccctcgagtgtgaatgagctccgcccgccatccgccttgtagtcctcgcgtccg

SEQ ID NO: 380 - DNA, 41 bp, Homo sapiens
  chr1:43516647-43516688
  hyper
caacccctaaccttaacgcaggttgacgaaccatggtctat

SEQ ID NO: 381 - DNA, 30 bp, Homo sapiens
  chr1:43613591-43613621
  hyper
caggcaagagggcgcgtggcagcccaaggc

SEQ ID NO: 382 - DNA, 44 bp, Homo sapiens
  chr1:43803508-43803552
  hyper
tggcggagaagatgccctcctgggccctcttcatggtcacctcc

SEQ ID NO: 383 - DNA, 30 bp, Homo sapiens
  chr1:43803852-43803882
  hyper
gaagaggcagcgcccagtgggacataccag

SEQ ID NO: 384 - DNA, 30 bp, Homo sapiens
  chr1:43804341-43804371
  hyper
gttcctaaaccagactcggactcagcgagt

SEQ ID NO: 385 - DNA, 209 bp, Homo sapiens
  chr1:43805019-43805228
  hyper
cagctccagaaatcagtgatttcctgaggtacgaactccgctatggccccagagatcccaagaactccactggtcccacggtcatacagctgattgccacagaaacctgctgccctgctctgcagaggcctcactcagcctctgctctggaccagtctccatgtgctcagcccacaatgccctggcaagatggaccaaagcagacctcc

SEQ ID NO: 386 - DNA, 104 bp, Homo sapiens
  chr1:43814926-43815030
  hyper
ctcctagcctggatctccttggtgaccgctctgcatctagtgctgggcctcagcgccgtcctgggcctgctgctgctgaggtggcagtttcctgcacactacag

SEQ ID NO: 387 - DNA, 30 bp, Homo sapiens
  chr1:43817944-43817974
  hyper
taccttagggacactgcagccctgagcccg

SEQ ID NO: 388 - DNA, 269 bp, Homo sapiens
  chr1:43818176-43818445
  hyper
catctctcccagcccaaggccacagtctcagatacctgtgaagaagtggaacccagcctccttgaaatcctccccaagtcctcagagaggactcctttgcccctgtgttcctcccaggcccagatggactaccgaagattgcagccttcttgcctggggaccatgcccctgtctgtgtgcccacccatggctgagtcagggtcctgctgtaccacccacattgccaaccattcctacctaccactaagctattggcagcagccttgagg

SEQ ID NO: 389 - DNA, 30 bp, Homo sapiens
  chr1:43832811-43832841
  hyper
cagcgaaggtgccacgccgagggctggcac

SEQ ID NO: 390 - DNA, 271 bp, Homo sapiens
  chr1:43919256-43919527
  hyper
gcgacgcacccgggggcgtgttgatcagtacaagccgcagccccgcttctcgcgcggcgcgcgccagcgcctcaggcgtctccgcgtacggccaggccacctcgacggcctcgaagcccgagctgcccgcggcccgcacccgcgcggggaggccggagagctcggggaatagccaggacagattggcggagaagcgcagcggcgccatgcctggggaggccgggccgggcggagtccgcgggatccaaaggcggcgggcggcgggcggcgg

SEQ ID NO: 391 - DNA, 119 bp, Homo sapiens
  chr1:43919541-43919660
  hyper
cggggctctccttgctggccctgcgaacgaacgagcactgttcgtggttagaaaagcgaagtgctgtaaaaacccgggccttcacgaaaagcgcctacggttagcgagagagggatcac

SEQ ID NO: 392 - DNA, 31 bp, Homo sapiens
  chr1:43997400-43997431
  hyper
ccccaaccgggtgcaacgccctggaggccct

SEQ ID NO: 393 - DNA, 49 bp, Homo sapiens
  chr1:44444660-44444709
  hyper
ccgctaagggactccacggtctgcacccgctcgccggtccgacctctaa

SEQ ID NO: 394 - DNA, 30 bp, Homo sapiens
  chr1:44457136-44457166
  hyper
cttgggtcagggctcggtggagcgccgagg

SEQ ID NO: 395 - DNA, 330 bp, Homo sapiens
  chr1:44872392-44872722
  hyper
tcggcctgggcgtttcgcctttgtgctttgtaagagaaagccttttcttccagggcacaacaaacttgggcggagagcttccgtgtggccccccgggcgaggccgcccacggtggtgaggccatccgaggggatgcccggttcatcccccagtccaggagcctctccgagagctcgcggcccaggtcgaccccagctggcgagggcgcgcaggagtcccgaagtagcggggactagggcagccaggaggcagggggaaagctctcgcttcccgttaagcacaccctgcattctcgggtcgtggatgcagctccagcggagagcccgtgtt

SEQ ID NO: 396 - DNA, 249 bp, Homo sapiens
  chr1:44872923-44873172
  hyper
ggactcggcttgaggggcaaaggggagagaaaggaaaaataaagaaaaaaaagggcggcagtgaggaagcagcgaggggactggggggagcagagtgggcaggggggctttgccttgcctggcctcctctttccgtctcgcgggctcttcctgcaaaggggaatgagcagaggggggaaaggcagaaagagcgtcgaggaagagcggtgctggcgtcttccgtgccgatccctcctggcccgcagagac

SEQ ID NO: 397 - DNA, 98 bp, Homo sapiens
  chr1:44873509-44873607
  hyper
gggtgacccccggggcggggctgctcgggggctggaggtccttggactttggtcgaaggctggcagctctgagcccctgccccgcgggccccgcgcgg

SEQ ID NO: 398 - DNA, 85 bp, Homo sapiens
  chr1:44883129-44883214
  hyper
cttggctcggcgcgccgctcgcctggcggctgggctcgctgtagttgtgctcccgctcttcccctgccctcgctccacgccgcgc

SEQ ID NO: 399 - DNA, 164 bp, Homo sapiens
  chr1:44883751-44883915
  hyper
cgccgtctgagcagaagagagtgggaaccggggtgacggataaggggggggcgcccacgcgacgtcggggtgcatgggagcgcgcgggaggcgctagtgggtgcacggggcgtgagggggacacagcgcgggcgtggggatggccactgcgcggggagggttct

SEQ ID NO: 400 - DNA, 43 bp, Homo sapiens
  chr1:45097399-45097442
  hyper
gggccgggcgatggggcggaaggagccccgcagcgggaggggt

SEQ ID NO: 401 - DNA, 87 bp, Homo sapiens
  chr1:45097717-45097804
  hyper
cgccgccctcgccggccgggcggccgtggggcccagagcgccggaggccagggctggggcggcaccgcgcagcggccacggggtccc

SEQ ID NO: 402 - DNA, 40 bp, Homo sapiens
  chr1:45098108-45098148
  hyper
ctccctcactgcctgccgctcctggcttgcctgggtctct

SEQ ID NO: 403 - DNA, 114 bp, Homo sapiens
  chr1:45098213-45098327
  hyper
cgctctcagtttccccgtctgtctaatggaggtatggcgcccagctcttgcccaaacctctctaaaggccctgaagaaccctgggggggcaataagtgccggagaatgaggaac

SEQ ID NO: 404 - DNA, 30 bp, Homo sapiens
  chr1:45139961-45139991
  hyper
aggtcacctccccgcgcctggacccaaccc

SEQ ID NO: 405 - DNA, 30 bp, Homo sapiens
  chr1:45252004-45252034
  hyper
gactcgcggttccgcgttcctgtcgcagtc

SEQ ID NO: 406 - DNA, 30 bp, Homo sapiens
  chr1:45285806-45285836
  hyper
acagtgcagaaatgcgcgcacagagggagt

SEQ ID NO: 407 - DNA, 30 bp, Homo sapiens
  chr1:45672720-45672750
  hyper
gagtgggacaaagtcgcaccaccccttgac

SEQ ID NO: 408 - DNA, 359 bp, Homo sapiens
  chr1:46913886-46914245
  hyper
cggcctcgggagcgctgggcaggcagcccgggtgggagcgcccacgtctcccgcggacacggacggacggatggacgggcggccgcgcaggcccgcgccccgctcccgccccgcctgccgcgcctcccggggcgcccgcattaaagcgcatatgcaagccatgaattatcaactgaaaggagtcaattaccggctctaaaaacgagtgtctgcgctcgcagcgccccgggccatccgcctatttacggagcgatctaccccgcccggctggggagggggcctcgggagggagagagacggagaaacggagcccgagaccgggagagagccggagaggcagggactggagagtctgggac

SEQ ID NO: 409 - DNA, 78 bp, Homo sapiens
  chr1:46914285-46914363
  hyper
cgcggagggccggacgggagccaaggcggctcagttcctcttctcccccgagcaggcgaggagaggtggggtctcagg

SEQ ID NO: 410 - DNA, 379 bp, Homo sapiens
  chr1:46954655-46955034
  hyper
gacacacaccttttgggaagccgagcctctgcctgattgagagccggccccagaacgtcctcttcctatgagccggttcccgcctggagggagcagagcgctggtaagagcaggaccatctcaggcccaggattttcccgaagtggaccggtcgccgagtgtgtttgttcccccagtcccggcgacaggtgcctgtgctgtgtgtgaagccgcgagttccagcccgcggcctcccggcccagaggccaacatccaggtgctagacaggtgagcggctgctaggagcgcaaaccagcgcacccgcggggtgtgtgggcggcgagttcagagtactggctgtggcgctgcatggtggcgcgggggtggcagtgttgttgca

SEQ ID NO: 411 - DNA, 30 bp, Homo sapiens
  chr1:46956153-46956183
  hyper
tgcggagccctgggcgggggctggggaggg

SEQ ID NO: 412 - DNA, 161 bp, Homo sapiens
  chr1:46956454-46956615
  hyper
ggtgggtgtttggggcgcagtggccctagttccctagaattcgttttgcctcccgcggcctcagccggcgtgggtcaggcgagctccggcgaggaacggcaggctggggccagtccccggagcggctctcggggcgcttctaggggagcagtcaaagggtt

SEQ ID NO: 413 - DNA, 487 bp, Homo sapiens
  chr1:46956684-46957171
  hyper
cgacaggccaggggccctgatggactgtgcagggtcccgggcaccaccggctgaactttctggcggtcacaaattcccggaacctgcgcaggggcttcgttggcactggtggttcacttaaggagcttgagggaaacctcctcttccccaaattcgcaccaaatctggggccccgacttttcctggattccagccacactcggtttgggaggcagtgggctcctcaggcttgtgatttgcggcaggaaggagtcccggaatggaagaacggggaggacgagatccgaggccttttcaccctctttgcaagcatgcagttcaccaaagccgagaacccaccgggcctggagcgcagcctcagcgctggttccgacccgggccccagaaggtctttttcgtttgagaaaagtcctcggaggccggggcagggtgcgccgatattggtttactaagggcgcctccagtttgagggcgttggggaaagagg

SEQ ID NO: 414 - DNA, 30 bp, Homo sapiens
  chr1:46957824-46957854
  hyper
aggcgaaggccatggcgaaggacaagcact

SEQ ID NO: 415 - DNA, 335 bp, Homo sapiens
  chr1:46998934-46999269
  hyper
cgaggccccggcggctacacacgcagcaggccgcgaagaagccgagcgccagcaccagcagcgccagccccacgacgagcagcgcgttgtgctcgggcaagaaggaggcgaaggcgcctgccagcgtcacgttcacgcccgccagcagcgcgcacagaccgcaggcgcagcacagcgccggcgacggcaggccgggcacccggccccgggcgcgttccgcgggcgccgggaccggtggcccctcgctcttttctgccggcggcatcggcctgcgcacgccaggcacgcatcaagctccctcctgccgccggcccggaacagcccaactgccagga

SEQ ID NO: 416 - DNA, 30 bp, Homo sapiens
  chr1:47009692-47009722
  hyper
gctgggtttccaggcggtgtcctgggccga

SEQ ID NO: 417 - DNA, 32 bp, Homo sapiens
  chr1:47070161-47070193
  hyper
ggtaggaggccgggcgcgacaggtgtaattaa

SEQ ID NO: 418 - DNA, 201 bp, Homo sapiens
  chr1:47078566-47078767
  hyper
gacactcaccaacacgcgtgggaaagacctcttcgtcgttgatgaggccttcgatccagtccatgagcaatgccatatagcgcggcgcagagagcttggcgggccgccggtactggcgctcgtcctgccagcggtactcgtagcggggcccgccggccatgaccgggcagctggtctcactgcagcgctccgccatagtgc

SEQ ID NO: 419 - DNA, 30 bp, Homo sapiens
  chr1:47644962-47644992
  hyper
cgcttcctttggagcgtgcagccaccaggt

SEQ ID NO: 420 - DNA, 30 bp, Homo sapiens
  chr1:47695460-47695490
  hyper
cgtgttgggaaaggcgaatagtcttcagac

SEQ ID NO: 421 - DNA, 58 bp, Homo sapiens
  chr1:47696462-47696520
  hyper
caaaacaaaattctttcaacccgagctagggccccactaacccggtccctcccagagc

SEQ ID NO: 422 - DNA, 196 bp, Homo sapiens
  chr1:47696620-47696816
  hyper
cgaatgtccccacccgaggctcgaggcctggtgaatgtgcccattgtcctttcggggcctctcccttggagcccggcggccgcacccacgaaactgaccagaaatggatgaagccggagtgcagcgggaaccgaagcccgcagctaccggctcgaaggcgccggcctcggcgagcgctgctcagcttcaagcctgg

SEQ ID NO: 423 - DNA, 611 bp, Homo sapiens
  chr1:47697335-47697946
  hyper
gatccctgctgagaacaccaacggagcacaatcgtacgcaacgaagaaaacgcagaagggcctcgaagggtccacatctacacaccccaaccgcgcaggcacaccacactcggacacagagcctgtcgccaagaagaccacacttagaagcagccaacgccgcccacagttctcatgaacgcactctcacaatcccaccgcatgcacacaaccacgaagaagaaatgaaaaccaaccacagcctcgcgcatttctgtatattgcgtaaggaaaagggggaaggaaggaagagagtctccgaggcgggaggggcggcggcagccggggcgggggcgtccgtggaaaatgcccccccaccgccccccccggccatcgaaaggaaccgagggaaagggagcgaagacctcttttgcggacgtggggaaaaagaggaggaaattgatgaagaattcggtgggaggccgcgggttgcttttcccctagaaaaaggccagaatgctcacgtttttccgctacgggggtacgcgtgtggccattttgaggcccggtcctgagcggcggcggcccggcccctcccgcggcccccgctcccccgcccgccccgcgcccgc

SEQ ID NO: 424 - DNA, 96 bp, Homo sapiens
  chr1:47698006-47698102
  hyper
cgaggcgcgccggggccgtgtgcgccgcagagataaggcactgccgcgggtccgcccgcccccgataagcgcctcggccattatgggccaaatgat

SEQ ID NO: 425 - DNA, 30 bp, Homo sapiens
  chr1:47779652-47779682
  hyper
cagggccccgctgccgcctctcaaggggaa

SEQ ID NO: 426 - DNA, 30 bp, Homo sapiens
  chr1:47800394-47800424
  hyper
ggctcggcccgggtcggggatggggaaagc

SEQ ID NO: 427 - DNA, 30 bp, Homo sapiens
  chr1:47903435-47903465
  hyper
aggcagccgctaggcgggagggacaatccc

SEQ ID NO: 428 - DNA, 238 bp, Homo sapiens
  chr1:47903679-47903917
  hyper
gcctgcctcagtcccccgccccctccccgcccgcgcgcaaaacgcactcgccccagaggcagcgcggccgagcccgagccgctgccggagcggagccggagagtggcggcggcggcggcagcggcaccatgaccctgggcagctgctgctgcgagatcatgtcctccgagagctccccggccgcgctgtccgaggccgacgcagacatagacgtggtgggcggcggcagcggcggggg

SEQ ID NO: 429 - DNA, 30 bp, Homo sapiens
  chr1:47910828-47910858
  hyper
cgccgaaatttcgtcgtcccggagtcggta

SEQ ID NO: 430 - DNA, 31 bp, Homo sapiens
  chr1:47974261-47974292
  hyper
cgacccgaggctgagccggggctccttcgct

SEQ ID NO: 431 - DNA, 30 bp, Homo sapiens
  chr1:48174651-48174681
  hyper
ccccccgcctgctgcggctcccggggccag

SEQ ID NO: 432 - DNA, 68 bp, Homo sapiens
  chr1:48175593-48175661
  hyper
ttcagcggggaccgggcggggtggggctgagcattctggcccctaggcttctccgactgttttggcct

SEQ ID NO: 433 - DNA, 147 bp, Homo sapiens
  chr1:48190743-48190890
  hyper
cccagcacaacagcgcggcccctcggcctccgcttaacctgggcgcgcgggctggctgggccggggccattatgcgggcgcatggccggccgcgccggggcgcagagcaaacttaaccttcatttgggagcgcccagcggccggagc

SEQ ID NO: 434 - DNA, 282 bp, Homo sapiens
  chr1:48190924-48191206
  hyper
cgtctaaatgcggagccgctgcctccgccccccgggtcagggcgcccccgccctcgccccccgctccgtgcaaaatggtgtttaccaaagtcaatattggccgcggcgcccgcccggggcacccgggagcccctctggcctcccccagcccaaggctggatctgggccaccagagcctcatcttggtgtcccaactagccccggccctgacaaggagtcttttgagggctagacacaggcgggtctcgcccagggtctcccaggacccgacctggagtctca

SEQ ID NO: 435 - DNA, 60 bp, Homo sapiens
  chr1:48463405-48463465
  hyper
ccctcctccttcccttcgccaggcgcgaccgggccgcagcttccccgtgcggccgccaga

SEQ ID NO: 436 - DNA, 30 bp, Homo sapiens
  chr1:48937430-48937460
  hyper
gggtcaggcctctgcgtggccggagtggga

SEQ ID NO: 437 - DNA, 40 bp, Homo sapiens
  chr1:48937983-48938023
  hyper
ggagtcgggcagggggcggggcttccgaaggggcggggtg

SEQ ID NO: 438 - DNA, 190 bp, Homo sapiens
  chr1:49242344-49242534
  hyper
gctctcgggcccggcgcccaattcctccgggccccggtacacggcgtacaccttctggttgtcaaaatccagccgcgagcgggggctgaagtcgcgcacgcacgacacgggcagcgcgtagcagacgttgtcctccaggaaccgcacaaaggcgtacatggtgggcgccgggggcgggccccggtcgggc

SEQ ID NO: 439 - DNA, 30 bp, Homo sapiens
  chr1:49242885-49242915
  hyper
ttgattaaaaggtgcgctgcgtgcaggatt

SEQ ID NO: 440 - DNA, 40 bp, Homo sapiens
  chr1:50489552-50489592
  hyper
ctacctcaggaagacgcggcacgacggttgcctgggcaac

SEQ ID NO: 441 - DNA, 108 bp, Homo sapiens
  chr1:50514107-50514215
  hyper
cctcctgagacttcccggccccaggggagagagctgaaacttgggttgacgcgcgccccctccccagcgacaggcgaccccgcagcagccccgcgccactcctctctg

SEQ ID NO: 442 - DNA, 670 bp, Homo sapiens
  chr1:50798646-50799316
  hyper
ccagctaaaggccagctggggcgccagacgactcgccctgccccgtcgacgccccagacggtgttgccgacctccgccccgcagcgctggtgtgggcgcggccggacctcactcagcctgcactgccccgcgccgctcgccgcgtccacactgtccttgggaggacgcgcggggaagccgcgcacgatgcggcagcgccccctgccgggctccgggcgctccgctcccagccggctcggcgagtgctccgggaaaggggtccggaccccacacgcactgggttccaggacaggctctcgctcgggctgggccgactctggcccgcctaggccccgggcacgctgcagtgaaggcggtaccctcaccacagtcacagaacgtgtcggctgcccgcgcgtcctcccaaggacagtggacgggagctggggctggagagggtaacgacctgcccaaggtcacacagcaccgcagtggcacagccaggactggcacccacacctcccgcggaaccttgcaggggcccaaaccacctgggttctagagctccttgaactggcctcttgggctttagggaagagctggggacgagggaatggggtggggccacaccacattagcacggacccttgggtgacttgggcggaagacggggcgtcagggccgcctgcgc

SEQ ID NO: 443 - DNA, 67 bp, Homo sapiens
  chr1:50799393-50799460
  hyper
cggcggcagccgcggctgccccctactggcggaaggaagagtcgccgctccggggcccttggcggcc

SEQ ID NO: 444 - DNA, 520 bp, Homo sapiens
  chr1:50881436-50881956
  hyper
gccatggagacgctccgggcccaggaacgggggacctcgggtgccccactacctcactcctagaacgcccaccgctcacgaagccttcctgagctctacccgaaggtgctgacagcctggagctgaggccaaggcgcttgggggcacgctgcttctccctgggcctcctatgttcacggaaggagagtttccgcaaacctctcactctcggccagcagaccccgcttcatgagaggaggagacccactaggggcggtggagaggcgaagtgatccagggtcccggaaagttggacaattccctggaccagatggctctcagtttcctcctctgtaaaatggggccggtaataagcaactctctggattcaccccggtttgctgcgaggatgaactaatataatagtctttaagtctgtgacgctccagatgttcttgggaatgagtaacgcgggtccacaggccgccccctcgggtccggccagagcatcggcaggaaccgaggagcctcgggggaccca

SEQ ID NO: 445 - DNA, 110 bp, Homo sapiens
  chr1:50882143-50882253
  hyper
cgctttctcccgcctgcctcttttctttctaactcttccctctcctgtctcctctcgccctcttttttctccttttttatccccttttcgtccatcgctcttgccggcat

SEQ ID NO: 446 - DNA, 133 bp, Homo sapiens
  chr1:50882895-50883028
  hyper
gtgaagactggggccgacgatccaaaaactaagagccggggcaaggtgacccctccgcaagggtgcccaagctggggtacacactgtgttccctctgctcagcggtcgcgggtccttcgggagttgtgagccc

SEQ ID NO: 447 - DNA, 30 bp, Homo sapiens
  chr1:50883314-50883344
  hyper
cccttcagtcagggcgtttggcgagtcccg

SEQ ID NO: 448 - DNA, 145 bp, Homo sapiens
  chr1:50884207-50884352
  hyper
aaccaccttagagtgagaagacgcccagccagggcgcagagagagcgctgggcgaagaggggtcgatggcccgcgggaacagggctggggttcctgtttggggaccggccggctgccaggcccctcgccctactgcttctccgga

SEQ ID NO: 449 - DNA, 197 bp, Homo sapiens
  chr1:50884690-50884887
  hyper
cgccatggcgccggccagcaagggtctgtggtgcggaggtgcggcgggccccgcctgcagcggcgcaggcagcccaggccccccggcggcggcggcggcggcggcggcggcgtcgacgcggctgggccacgcgtcgtctgcagctgctgcagcacccacggcggccttatctgggggcgccgcagggcccaggccgg

SEQ ID NO: 450 - DNA, 142 bp, Homo sapiens
  chr1:50885248-50885390
  hyper
cgagcctgagccgggccgcacctctggggacgacgtcccgggccccgagtctgcgccgtcgggtgataagggcttcaccggcggcggcagcgggctgcccgggcggcctgcctgcagcagcgtcttaggaaacaggtcaaac

SEQ ID NO: 451 - DNA, 1029 bp, Homo sapiens
  chr1:50886055-50887084
  hyper
gcaggcagtaggaagcgaagaggaaaagacataggaaagcagacctgagaaaccagggagggtgcggaagaaactagaaggagggagggcgcagcaagcggttgtccagagggcgttaggaacgcgagaaggggaaaagaaactagggcgtctcagaacctagggcgtctcaaaacctagggtgtcagttaaagggggggggattccttaagggagttgggaaggagcagagggaaagggcctgtggagaagcgcagagcgaacgaagatgcgcaggtttccacctggggagaagacgaagcaaagaagcagggacctgcctgcgtttgggtagaggcgagtaaaaaaattaaagcgtgtacatttcggcccgatgcaggagaaaggggtaaagtgcaaatgctccagaagcgggagaaaggagagtttctgtacccacgctccatacccgaggctgggcgagcggtgaaccctagcagtcgcggcgactggacacgggggttctactctttctgaaccgagacaagcccctgggccccgtgccccagagctacgatcctgctgcccctacctgcggcctggccgcgctctcacctgagccccctgcgccagctgctccgcctccggtccccgcgggcgctcccgctccaggtcccccgccgtcggcggcgcacactgaaccgaagacctcgtaggcgggcctcggggggatgatgccgttggcggcggccagcgccagcccctcggcagtgccgtagagcagctgcagctcgcgcgcctcgttctcctcctgcgcctgctgcctgcgcagcgccacctgcgccgccatgacacgctggcgctccgcgatgagcgtgcacttggcgcacaggcagtccttccagcgacagtagcgtttgtggcccttgagggccgacaccacgccatggttgcgacagcgcgcgcacttgggggtccgcgggtacttctcggctgcccgcagcaacagtggcggcccccgcagcaagccgcctgccacgctcaccggta

SEQ ID NO: 452 - DNA, 67 bp, Homo sapiens
  chr1:50887175-50887242
  hyper
gggcacgctgggcagctccgagcgcagctccatgacaggacctgacgggaaagaaggtgggagaggg

SEQ ID NO: 453 - DNA, 154 bp, Homo sapiens
  chr1:50888555-50888709
  hyper
tccccgcttctgccgcggtctcctctgcttcccgcgttccccgtccctgccagagcccgcgacagagtccttgtgtctccgtccgagagtcccagacctcctctctatgagcgttgcctcctctcccagacccttcgggcgtccctaaggccca

SEQ ID NO: 454 - DNA, 1232 bp, Homo sapiens
  chr1:50889123-50890355
  hyper
cgcccgctctattgttggtccttagggctccattagacagaattggacaacaatgtggcgcctgccattggccaggggaggcagacggcgctctgattggccgggcccgcgcccggggagccccgcattctgcagtgtccgaaagattcgaaactccaaaagctccactgcgtgcctctgggaggggagggggcgcgccaggaaaggagtggaaaaaagtgggcgaggaggagcgttgaaaatttcctgacaagtagtttccgtgcgcccgagagcgtgtgaattgctcctaattaccgtgtccggtgcgcctctctgcgtagacttgtgtaacctctcggcttctggggcgccggctcggctgcaccgctcttactggcctggggcgcttggcaaagccgagcttcccaagtggctctggagccctgaggcgggatggggggcaggtgacaattcaattactgcggtcggggtaggggcgggacaagggtgcgggggtggggaagggagggtgttcaaggcataaatgccaggacgatttttcctgccttcttcctgctatgtttcggcgcgctcccaaatccgacgagtttggggtagttgggggctgctttggttttttcctcctgtctccttaaagctcagttactttattttaaaagtcctgatacgatagtcatcctggagggtaagtgtggtttatgaagattttcgtgtttaaagagaagctcagcgaagagaaatgagattgcacttcctgtcggtgcccgccacgtccctcgcgccctgagcctttcctctccccgcccctcttttcgcgtccctcagccccttttgagctctcttttcctcacttttcagcatctcgatttcttttccgtggtggtgggattctttttgtcgttattgcaaatgaacaaatagcccccccccctttttttttcttttctaaacgaaagtaaaaagtggcctctgtgtctccgcagattctcttaaactcaggacgcgcatcggtctgtccgaccttcccggcaagagacaaagtcactgctgggaggccccctcggacagttttcagttttaactttcgccttattctcgtcttgtcttgatgtcacggccctgaggaacagctcgttctgcagaagaggtaacaggtttcagattttgtttcctttttgaaaggctgttgcctttcaaacatctggaattaatgccgcggccctcgggcg

SEQ ID NO: 455 - DNA, 444 bp, Homo sapiens
  chr1:50892978-50893422
  hyper
atgtgaacacacgcacgtgtacacacagacacgtagcgacattttcctccagatcaactcatgagtcatgctgatgaagaccctcagccgcgcacaccctctgtggacagggagacgcgcagcttggtttcctgtccccgtcctctgacaccgctaaaatggtcattttccgtggtcatagccacggatctatgccacgacctgggaccgggcataatttcggagccagaaagtactcctgtggtggcgccgggtttctcaggcgctcttccagctaagggccaggagcccagcgatttccctacagttgcttactgaagtcgcaccattctctgcgaggcaggtccgattattccacttgtcaggtgagaaaacagactcggagaggtgagatgacttgttccacattatcacaattagtgagtaacagtgcaaaaatcaaac

SEQ ID NO: 456 - DNA, 494 bp, Homo sapiens
  chr1:50893518-50894012
  hyper
cgttggccgggaacccgctggtgctcagcttctatccggaccccggacctaaaggccgggcagaacaaccaactgaaggtggaggagcgagggcactggtgctgattgagcggcaggagcccccgaggcggagtcccagcggctgcagccctcctttggatcaagccctcgcgtcttccgggcaggcggaagggaggcgtctgcccagtgtcgccaggcttctcacgattttctggttgggagcatctaagcctgagacaaacgcatggagagcggtgttcaccgccccactatttgtttctatttgtgagcgtctactgagtacagccactctgataaacactcggtgtgtgctctcttgcttggcacgcagtccttgggggaagatgcgatgttccacatttcagacacgaggtagccaaagttcaacaaggcgacataacttgcctggggccagagtgctgccgaacttcgaaaaagacagaaatccagat

SEQ ID NO: 457 - DNA, 30 bp, Homo sapiens
  chr1:51425670-51425700
  hyper
cggtaaccttcaggcgccccggccgcccgc

SEQ ID NO: 458 - DNA, 354 bp, Homo sapiens
  chr1:51442623-51442977
  hyper
atgtatttcccttatcgtattgatcaaaagaacgttgtggatggagtccgtggcccaggactggtttcgaaatctcagttcccaaaaaggtgctttcggcttttgccgggggtagaagtaaatagtccataggcgccgggcagtcacagtgctggagcaagaaaaggtcgtgctcacagccttcctggctgccctaagcaaccttcatcaaaaggctacgggggaaagtccctgtctcggtctctggagactgttctgcttttatatggcagtcccatgaaaacagctccacgcaggaacctagtgagaggcaggaaacaaatttcccacctgagaccccgggtaaagctctgc

SEQ ID NO: 459 - DNA, 34 bp, Homo sapiens
  chr1:52194843-52194877
  hyper
cccacgatgtctcaccggattaataaaaatatag

SEQ ID NO: 460 - DNA, 349 bp, Homo sapiens
  chr1:52194940-52195289
  hyper
cgacacaactttccggaagtaagcaaaatccgttatcaaggtgaaactccggggaccaggctccacagctgccataaactggatggcacgttagaagccggtgggtgtaggtgaggcacgctggcgcccgcgggcccttctccagccgctacccagtgggaatccgcggggctgaagccccgaaaccaggctgagcgtcccagagcgcaacctccctttcccccagcagcgccggcgccgcagaagccgcgtgtccccaggcgcactcccccaaggtgaacccccgccccccacggaggcggctgggtcgcgggtctgggcggggcgctccggacgccctcccgccgct

SEQ ID NO: 461 - DNA, 493 bp, Homo sapiens
  chr1:52195348-52195841
  hyper
cgccaatcgtctgcctctcacctcctacagcaggtgacccatggccaatcgccaggggtctctttgccaggagccgccagggccagccaatcggggcgacccctccgccggggaggggacgggaaaggggtggggggtgaagggggtgaagggggtgtcccgggggacgggctgaacctcagtcaggaccgcctgcaccgcagtccggggatcgggtcgaggggagaagaaaaaggggtgctcgggagcagcccccggctacctcccctggaggcacagagggcgggggccttggcgaatggctttcttgctggccacttgcggagtgagtagaccccgagggtctgggagaggggccggcccctacccctgagtccccggggtcccggccgccaggccggagcgcgaatgtcgtgctcaccctgcctccttcccgccgccccctggggtgagtaggacgacgtggctgcccgggcccctcttccttgggagt

SEQ ID NO: 462 - DNA, 403 bp, Homo sapiens
  chr1:53017721-53018124
  hyper
caaaatgaagaagcagatatacggtatctaagatctcacgcaaaattcatctaagacttcgaaatcttctgaaaagaaaatgtgtaatcaacgttgttaatacaacagtaattcatcccattcaagtacgactagaaatcccgctgatgtgcttctttcaggtctaaacatctcattctttcgcaatccagataccaacaggagtctgaaacccttcgcagaggcgtgcaacacactaggagagcgctatctgtttacaaatacgaatctcagttacccacgtcaaaaccgcgcattaccacctttcgactggggggcgggggagagagaaggcgggcgagcaagaaacaaaatccacacagacacctctgccttctccctacaaggacgagcccggggaaac

SEQ ID NO: 463 - DNA, 30 bp, Homo sapiens
  chr1:53068182-53068212
  hyper
gggcaaactggtgtcgctggagaagtaccg

SEQ ID NO: 464 - DNA, 519 bp, Homo sapiens
  chr1:53098744-53099263
  hyper
ccccgccactctggccgcgtcgtgctgtcgttgcgcacccagcgccctcgtgcaggcagggggagcgcagtggggagggggcaggaagcgcaggcagagccaggcgagcacgcggctcccggcccagctccccgcgtccgctccggctcctgccgcgttccagcagccgtcactcccgccgccggcccccgccgcccgccccgcctgcccctacccctccgcgcgggccgggcacctggccgccgctcggtcctcggggccccgcgctgctgtctctgtctcggcttctctcggcccctgggtctcttcgtctctgccgttctcaggctcagctccgtctcgctcggtccctcgcttccccgccgggctctagccggccgtctggtggcccgaggtggcggcgggctgggcgcggggcgcgatgagcggcgcctgcacgagctacgtgagcgcagagcaggaggtggtgcgcggcttcagctgcccgcggccggggggcgaggcggccgctgtcttctg

SEQ ID NO: 465 - DNA, 214 bp, Homo sapiens
  chr1:53308393-53308607
  hyper
tcgccgggcatttcaaaagctcgccggcagggcgcggcgctagctccgtgtgcctcgcaggcgtggtgggcgcgtcctggcagccgcccgcttggttctcgcgggatccgggctccggctcgacgccggctctctttttgacgccccgccgccggggttgccatggttcatttcttgcacccgggccacacgccccggaacatcgtccctcctg

SEQ ID NO: 466 - DNA, 375 bp, Homo sapiens
  chr1:53308907-53309282
  hyper
cggcgagagcccagtcccagagaccggggcgagcctcctcaggattcctcgccccagtgcgggctgctgtgagcttagacgtaggtgcagggcatggcactcggcttggcccgtagtggacggtgtttttgcagtcatgaacccaaacgccgcaaaccttgaccgtttccccacccgtgttgtggacgcagcgccccgcggaggcggtgaccctttggccgttaccacctgaggcctttgggcccggggccgggcgagtagcttagtccggctgggggaactggaacccgaagtctgagattctttcagttccgcgcgtccgcccccgtccccgtcccgtccccagcctttgccgaatgcctgttactcttagct

SEQ ID NO: 467 - DNA, 31 bp, Homo sapiens
  chr1:53387320-53387351
  hyper
gcaggaggcacagaacgcgcagcatcggggc

SEQ ID NO: 468 - DNA, 31 bp, Homo sapiens
  chr1:53401231-53401262
  hyper
agcctcagccacagtgcgagactcagtcaaa

SEQ ID NO: 469 - DNA, 30 bp, Homo sapiens
  chr1:53527561-53527591
  hyper
gaactaggaagcgtcgcggaccagacagcc

SEQ ID NO: 470 - DNA, 30 bp, Homo sapiens
  chr1:53528209-53528239
  hyper
cagaggctggtccccgtccccaggcccctc

SEQ ID NO: 471 - DNA, 30 bp, Homo sapiens
  chr1:53686482-53686512
  hyper
ctgactccaggattcggtggtgccacagac

SEQ ID NO: 472 - DNA, 30 bp, Homo sapiens
  chr1:53792906-53792936
  hyper
accctccattcagacgcactcacccgcaca

SEQ ID NO: 473 - DNA, 183 bp, Homo sapiens
  chr1:54204349-54204532
  hyper
gctgaatcctgcgacgcgaacccatcacgcgcagccgggacacccacattcctatgcgcagcggaggaatcgagcccgtcgcgcgcgcaaaccggcacagtgggcaatgcccacgcggccgccgccacacacccgcacacccgccgaggcacgcccggggacggacacgccacccacactgcc

SEQ ID NO: 474 - DNA, 13 bp, Homo sapiens
  chr1:54665606-54665619
  hyper
ctgaagtcctgga

SEQ ID NO: 475 - DNA, 30 bp, Homo sapiens
  chr1:54940518-54940548
  hyper
gatgggctgcgcagcggcggggaggcaggg

SEQ ID NO: 476 - DNA, 30 bp, Homo sapiens
  chr1:54954333-54954363
  hyper
tatcatgacttcatcggactccggggagcg

SEQ ID NO: 477 - DNA, 30 bp, Homo sapiens
  chr1:54965081-54965111
  hyper
gcaaagcgtggctccgcagggcaagaggga

SEQ ID NO: 478 - DNA, 30 bp, Homo sapiens
  chr1:55266722-55266752
  hyper
cggcgagcgcggctcgaagttcaactgcat

SEQ ID NO: 479 - DNA, 237 bp, Homo sapiens
  chr1:55352447-55352684
  hyper
cccaggaagtcctggccgcccccgcaccgcagctcccgtcgccacctcgcgtcccgctatccccgcgcacgccgcctccggccctgagtcccggccgcacccggcgccgctcacctgcttctggatgtcccgcacgcgctgctcgtgcaggcgcggagcgctgctgagcttgaacaccacccaggcgcgcacgtagtagtagatatcgaagataagcgagagcggcaggaggaagag

SEQ ID NO: 480 - DNA, 30 bp, Homo sapiens
  chr1:55353312-55353342
  hyper
tgccactcggtgtgcgcaaggtctccagag

SEQ ID NO: 481 - DNA, 521 bp, Homo sapiens
  chr1:55462369-55462890
  hyper
cccgaacatttccagcgcaccctacacacatgtccttacttaatccctagcccgactctgtggaagagcttaggtgagacccattttccagagttcctacctgtttcctacttgctactgaatttcttactcgtagttaccttattttttttttttttttttaagaggagaagcgactcagagagaaaaggggcgaagaaggctgggccgtgtagaggaaagaaaaggcgcgagagaagaagactgcccgggtgaccgcgaggcctctgaggaatggctgaagagcagatccatctacatggggctgggaggggaggtgcggtcaccgctcagccgccgactcagccgagggagaccttggccagcccctgccactccgcaggctcggtttcctcgcctgtgaaatgcgggcgatgactcccctccccgccgcgactgctcatcaccgggtccgagcccagccgctgaccccgggggaagcgccttgctcagcgccgggcggcccacgaggccctgcagga

SEQ ID NO: 482 - DNA, 184 bp, Homo sapiens
  chr1:55505174-55505358
  hyper
ctgcgcgccccaggcgtcaagcacccacaccctagaaggtttccgcagcgacgtcgaggcgctcatggttgcaggcgggcgccgccgttcagttcagggtctgagcctggaggagtgagccaggcagtgagactggctcgggcgggccgggacgcgtcgttgcagcagcggctcccagctccca

SEQ ID NO: 483 - DNA, 126 bp, Homo sapiens
  chr1:57044386-57044512
  hyper
gggcttcgggcctgggcggcgcaaaggctccccaggaaggctgcgggggccccccggagctgacggcgcggcgcggcgcggcgctgcgcggccccggactgggctgggacgcgcgccgagggacga

SEQ ID NO: 484 - DNA, 53 bp, Homo sapiens
  chr1:57044989-57045042
  hyper
gcgcgctgttgtggcgcgcgtctgagtgcgcgagcgagcgagtgggcagcgcg

SEQ ID NO: 485 - DNA, 30 bp, Homo sapiens
  chr1:57111184-57111214
  hyper
ggctgcctgacttgcgggaggccgagggga

SEQ ID NO: 486 - DNA, 1858 bp, Homo sapiens
  chr1:57887907-57889765
  hyper
cactgttaaagtgtatttaaccggccagcaggaagggagcaggaaggaggaagaaacgacggcgcggattctcgccccggtccccgccggctggctaggagctgcactggagcatccagctcgcaggagggctcgcccccgggctcgcccccgtccagctcccaggcggagaaaggcgctctcgctaccgcaagccctacatcgcccctctttctaatggagctaaacacaggcgtgcgccgacatccaaacgcacacgcagacaccgacccacgcgggcgcgcaccccagactcggcgacacatacacaccggagcgcacagatgcccgcgtcgcggcgctctccactccgcccgccgccaagagcggagcggtagccaagcgcccccggcctccccacccccacgccattccttcagactctcccagcctaagcggaagtgccccagcagacccccaacaatgaggatttgtgcgatgcagttgggggttgggggtagttcacacggagtgaaacgtacacagtctggcgggtctgggagcagccaagtggcgtccgcctctccaggcagcgatcccttgtgcccactgccccccatcaggcccaccagcaccaccaaaaaacaaaaacagagaaaagaaaaagcgccttaaaaagtgcagagaaaagatgcgccctcccaccaggggtcacaataatactcctcgggacgcagccagcggaggcagggtcctggctgcagcagccaccctggttttgaaatttactttgtacactcacccagtggcccctttcagacgccgcgacacgacctccccccatctcggactccctgcctctgggttctctcggcggttgacaccctcttgtgtgcctgctttatgagccgaaccacagagatttaaagtttccttggtagaaaaaaaaactgagctctctgcatccaagtcagagcgtcgagtctggagcagagagaaggaagaggggcgggctggggaggcgactagctgggcgtggggggagggggtgctggggagtggatggagggggacgagcggcagagaacagagtccacagaggatccgaagaaaggccggggtccgaggaacgcgggatccagttctcacggtgcccgcgaaagggctgggattactgggatagagtcggtttttcgagaggtcgaagccgaatctcagcgctacggaggagtagggaagtgagaacggggttcggccgaatgaggaaaagggtctggccaccagcgagggagggagggagtttcgggagcccaggacagcgggagaaggcaggctcgaggtccgatatagccaggaccgcaggaggaaagagggcgcagggggtcttggagagagacgcgtgtcaggggtggacaagtctggagacaggatcgcgcgtggtcggaagtagggagacaggggcgcggggatggggggcaggacagagaaagagaagtcgcccttttcctcccagcaagtggagggagaaggcgaaaaactgctgcagtcgccatcctcccagcacccctagccaaactgctgagtggcgcgtcccaggagccctcctccgcgccccggggctccagcgaagcctcctggctccccggcgccctgtcctcgcggggcacctgcggcgctgaactcaagggttgccgcgcgcccccgccgcgcctcacctcgcctagcccagagcatcctcctccgctgccgcagccgcccaggaagcggctccccatgcccggcgggcggcggcactcaggcgcgctctgcagcccggggaagcccgggcgagcgccgagctgggtccatcctccccgggagccaccggccccgcgtcaga

SEQ ID NO: 487 - DNA, 349 bp, Homo sapiens
  chr1:57890302-57890651
  hyper
agtgccaggaagggcgaaaccacgaggggagtctccgcgagggcatgttgcccccacgccccttggcaggagggggcgctcgctcccagccgccagtgcaggttcggcggctcctgttttgactgaggtttcccaggcaaagttcggcaagttgggagggagaaggctggcacgtgtcaagtttccgtcagtcctcaggagagacccgtgcccctgagagcacgcagaccacggttaactccggcttactccccgcgactcccctactcggctcttagaatgactgggagtaaacaatcctccgattcgaagctgtgcgggaggcggctccagcgagtacacagtcagt

SEQ ID NO: 488 - DNA, 58 bp, Homo sapiens
  chr1:58715268-58715326
  hyper
agaacgcggactgagcgaggaaatgctcaagaccacaggactgaaccccccggaagtc

SEQ ID NO: 489 - DNA, 495 bp, Homo sapiens
  chr1:58715359-58715854
  hyper
cgacgcggatgaagttgtttccccgggacaggaagggttaaatggctgcgcgtcaactcggcctcgactggggtgtcagggagcaagagccgcttgtctcgggggattccgcttggggggttcccaggggtcgccctggcgctccggccacaacttgggcggctctgtgcggcggccctcgcctgcgcctttgcgcgccacccaaaactttgcgcacactgcagccgccgccttcccgctcttcgcggtgagacgcgcgccgccaagtgccgcaggcagccctccacagccgccgcggcagccgctgcctggcttctggctccagacttttcccccactgcctccagttcccacccaggaggctccctcgcggccgcgagagctcggcgcccgacccacagtaggcagtgcgggcacagtgttgcagaccaccacctcgccaggtccgggcagcgcccactagacggacaggcgcccgcggccgcccctaccccg

SEQ ID NO: 490 - DNA, 70 bp, Homo sapiens
  chr1:58715978-58716048
  hyper
cgagcgggctccgcttttgttccctggggctggcaggtccgtgtggggccagggcgcgcgggagacgccg

SEQ ID NO: 491 - DNA, 927 bp, Homo sapiens
  chr1:59042065-59042992
  hyper
gctccacctgcaggggttctccgcgcacgcgcaagtccaggccgccgcggccctggaatagagactcgcccttgatgtccctctcgaagtagtaggcggcatcgccgatatccacgtcaccggcggccttctgagacgtgttctgccgcagctcgatctggatggtgggctgctcgtagtgcacggccgccacgaacttggggtgcagccgatagcgctcgcggaagagccgcctcagctcggcgtccaggtctgagtggttgaaggcgccggcggtggggcggtggcgcaggtcaatgaggatgtggtgggtgcgcaccagctcatcgcagcgtaggctcaggtcgcccttgtccgtgcggcgcacgcccaccgagttcacgcaccagcacaccgacgtctggttgcactggcgcgccttgaagcggccctcggggtcgcagtcggggtcgtagaggccatcgttgtccacgagcgcgtgctcactcggccgcaccagcgtgcgggcgttcttgggggcgctcatgcgcgccttgagcagcagacacttggaggtcagcgtggagcagtcgaccgccatgcccgagcccagcgcgcggcactggcagcggccgccggggccgtcggggctgcacacggtcatcttgttggtgggacacgtgcagttgtcctgcgcggccgtgtggccggtcaccgccgccagcaccagcagcagcagcggcagccgcagcggtggcggcgcgaggccggggccccgagccatggtggggcggaggaacgcggaccggacgcgggcggatgaggcgcggggactcgtcggggctcgggctccggcgtctgggatggtctgcaggcgtctgccgcccggccgctccctccggctcttatactctacccgacctgcccggctggttccaccaccgaccg

SEQ ID NO: 492 - DNA, 30 bp, Homo sapiens
  chr1:59249868-59249898
  hyper
cttctctgggcccgcggaggctcacgggat

SEQ ID NO: 493 - DNA, 184 bp, Homo sapiens
  chr1:59281466-59281650
  hyper
gtctctccccaacccacctatcgtcaccgagattgtaaaacttctaaccgggaagaatcaaatacatgcacaacgggttacaggttaacagacagatgggagcggaaagggacattccagcgcttccctgggcgtgtcgcacagggcaactccaaccacaggcgaattttcctgggtgacagtt

SEQ ID NO: 494 - DNA, 30 bp, Homo sapiens
  chr1:59369141-59369171
  hyper
gctgcccaacccagcgtaaccacaacgaca

SEQ ID NO: 495 - DNA, 44 bp, Homo sapiens
  chr1:59369442-59369486
  hyper
ccgctcgccacgtcagcgcacgcccgccccggcgctccgcccgg

SEQ ID NO: 496 - DNA, 110 bp, Homo sapiens
  chr1:59762086-59762196
  hyper
cacccatcaggggctgcggagagtccgcctgggtaagctccgcaaggtgagtccccagagccgggaactcgcagcctgagcagacgcagcgtagccgatcttgggtccgc

SEQ ID NO: 497 - DNA, 30 bp, Homo sapiens
  chr1:59799495-59799525
  hyper
actgtaagtctagatagatcagtgtggtga

SEQ ID NO: 498 - DNA, 71 bp, Homo sapiens
  chr1:60280812-60280883
  hyper
gcagcctaagctgcccctgtgcgacagcctcatgatctgggtgagtgcgaggaggcgagagggcgaggggg

SEQ ID NO: 499 - DNA, 181 bp, Homo sapiens
  chr1:60539399-60539580
  hyper
cgcggtccgtgcttctccccaggaagctgacactctcagacccggggacgggacggggcgtggggaccgagcccaggaatccggccaatcacagggcccgcatcgcgggcggcgcctgttccgccctggtcgctaaggacgctgaaggctgtttctgggcggggaccaggtttttctccac

SEQ ID NO: 500 - DNA, 30 bp, Homo sapiens
  chr1:61508940-61508970
  hyper
gcagagctgggctgcgatcagaaagtccgg

SEQ ID NO: 501 - DNA, 41 bp, Homo sapiens
  chr1:61516033-61516074
  hyper
ccgctggcccccactccgcttcctcccggcacccgcttcgc

SEQ ID NO: 502 - DNA, 30 bp, Homo sapiens
  chr1:61516540-61516570
  hyper
cgcgaccgaggaagcgtccccagtcacctc

SEQ ID NO: 503 - DNA, 73 bp, Homo sapiens
  chr1:61519331-61519404
  hyper
ggctgctgaactggtggaccacgaattaatgtggagaacgaggccgtccgggctaggttcccggggctcaaag

SEQ ID NO: 504 - DNA, 512 bp, Homo sapiens
  chr1:61519472-61519984
  hyper
cgtttatttaaagttcagttgtgttgggcatctgatccaggacaactcgcccaggagcccggcgggtttcagctgccaccacgaaagtaaggatcggttctgccgcgtcgccccctccttccccttgggatgtgccaggcgggcgacagataagggggcgcggcgcggggtcagccaccgagccagagggcggcgcccggttgcagcgctccacagccgcctcctgcagcctcgcggtcgtgaccttgccgagcagctcctgcgcctcaggctcggtccctgcacccgccctcactccagtccctctcagggcctgcagtggaagatccccgtggtccgggtgggtggcgatggagagcagaattgaatttatttgctctcaaattcccctaaaagctctgaaactgggaaagtccgcgggctgccagggacagtaatcactgtgtccccacccggacgcaggaggtctcgggaggagctccgaggccaagcgcccgcgacttctgggtgcc

SEQ ID NO: 505 - DNA, 314 bp, Homo sapiens
  chr1:61547870-61548184
  hyper
gagggggcgggggggccggggagcgagcgggagagcgagcaagcgagcgagcaaggagcgagccacggagagagccggggagcgagcgagccagcctgcgagcgcgagcggccgcggaggctcgggacccggctggccgcgcggcgccgcagccgccccctcccccacaccccctcccccccgcggcggcggcgcgagcgggcggcggctgtgcggtgcggtgcagagcggaggcggaggcgggcgcgcgggcagctcgcgggcacccggccgggccggcgcgggagcgggaaagggtgcgctatgcctttaac

SEQ ID NO: 506 - DNA, 30 bp, Homo sapiens
  chr1:61548768-61548798
  hyper
gcgttaattaatatcggggcgacggactgc

SEQ ID NO: 507 - DNA, 31 bp, Homo sapiens
  chr1:61549048-61549079
  hyper
ccccccgccgtcttcccgaactcttactttt

SEQ ID NO: 508 - DNA, 30 bp, Homo sapiens
  chr1:61549312-61549342
  hyper
cacgttgtgcagggcgccgaacgccggagg

SEQ ID NO: 509 - DNA, 602 bp, Homo sapiens
  chr1:62207659-62208261
  hyper
gactcccacatttacacgttttagaatattttattttgcgtcagcgaatagagaaaacaaaggagggatgagagaacaggaaaggaaaggggcaaaaagacaaagtgttaagcggattgacccaacgctttcatcgatatcctcctcaatttccttgatcttgggtctcgctctacacgcaggcctccaaccacaccggtctgtccggatctccctccccgtcagtggcggctgtccccaccacgcgcggtctgatccgccaccccgcccccacagcccacttttcccaggcccttggccatcccgcgcccggtaggaattcacctgcacgtaaacagccagggcaaccgtcctccctccttggagcccgcctcccgcggccccgggctccctcccccgccccctgcgccaccccggtgccccgccccgggcggggagagtcggggcgaggggagggcctgccaggtgaggcgcggtcaccctgggcctctcacttccgcccaggtgaggcagggccgacaccgagcccgcccgacccgggctcccacctgctcctccagcgcaccaggtaaagcgtgaggtcccggctgtgcagtgcgcgc

SEQ ID NO: 510 - DNA, 519 bp, Homo sapiens
  chr1:62208291-62208810
  hyper
cggccgggggcagctccctcggggcttcccgggcctgcctgccctgcccccgcgctctccccgcccgcccgcctggagtgggtgggagccggaggtggagggcgccgccgggcgctcagaggggccgcggcgaggatggggcgcccgcggcgtgcgtccgcgctgacccgggaggcggggcgggggcgccgtcctcctgcgtcgggcccgggtgaccccacggtggtccccgccccgccgcgcagggctcgccgaggccgcgggcagggaggggcgccgccccgcctccccaggcctttcgggcctcgaatctcggcccactggtattcgggggtggcacggatcctattttgcgcccagatcggtgcccctgtttcgctcccagagctgggcggagtctttccctccatcggtggccgtggaaggagggaacggggtgaggggacaaagaggagggggtgctcagagccgggctgagggggcgacttgggcccggccgcgtcgcggcgcctggtcatc

SEQ ID NO: 511 - DNA, 30 bp, Homo sapiens
  chr1:62785064-62785094
  hyper
ccagctgccaacagcgcccgagtccccgcc

SEQ ID NO: 512 - DNA, 31 bp, Homo sapiens
  chr1:63153559-63153590
  hyper
ttgggaagcggccgaccgcccttccataaac

SEQ ID NO: 513 - DNA, 30 bp, Homo sapiens
  chr1:63348082-63348112
  hyper
tctctgattcaaagttcatgtctttcagct

SEQ ID NO: 514 - DNA, 558 bp, Homo sapiens
  chr1:63539430-63539988
  hyper
taaagggggataacgcggaagagtgggggagggggtagatttgaggtgtgcaattcttaccacatctggggaaaaaaacaaaaacaaagccaagcgaagtgggcctgccagagttaactatgttcacagagtgcaattaagtgtttggaaggttctgtgccgtgtgctctgatttacggccgcgttcctgggacgcccctttagccgggcgaacgtggagggggccaggcccggccgtgcgcaccctgggagcggagccgggccgctggcgctccgggtcttgggcttggcaccgcggcgcaccgggtggcaagcacagcgcttagcggaggccacacctgcacctcatttgcttctgagcagtgccatgacccgcctgctgatggggcgccttccctttcatcctcgggattatgacaagttattaattgccaccattagccgcagcagcctgcccgagatctctgctgctctctggaggtgagaaaccgcgcatctgaatgccgagggaagaggcgctgagcagccagggcaaacggagcaacaatctgcccaaaa

SEQ ID NO: 515 - DNA, 148 bp, Homo sapiens
  chr1:63785618-63785766
  hyper
ggacccagcatcagatggtaacactgattgaacaagagattagcacaatagatctctaaccgaggggaagcgttgcttttcacgctacgcgccgtaattaatggtatgaatcaattaatttgacttttattgtgtcgaaggaaaaaag

SEQ ID NO: 516 - DNA, 201 bp, Homo sapiens
  chr1:63786078-63786279
  hyper
gccccgggcccctgcctttagggctgggcaacccaagcagagcaaaggaggttcctgaatgtgtaaatttccgctttttagctttttttttttttttttttggaccttccgacacttcggttgctgaggcagttgcagacgcgacctctgcagtcctgggcgatggccagccagctcagctcgggtcggtttcgcggaaag

SEQ ID NO: 517 - DNA, 400 bp, Homo sapiens
  chr1:63788366-63788766
  hyper
cgctcctgcgccccacgccagggccagaggccgaggaaggcgggctaagtgagggggcgcggcgtggagaaccgccggggccgggagcggtagcgagcgcctagtaccgagcgccagggacggcaggagttcgcggagcgcggccgctgggggcggacggcagagcccgcgccacgcgatgcggggccgccgagtgtgagctgagcccagcgggccccaagccacctgcggccccctcccctctccctgccccccatctttcgggggcactcaaaccctcttcccctgagctccgtggcagcccccgaacaccctcatcgcccgctgccccctccccgccgccgctaccaaccccgaggagggatgaccctctccggcggcggcagcgccagcgacatgt

SEQ ID NO: 518 - DNA, 577 bp, Homo sapiens
  chr1:63788919-63789496
  hyper
cggcaccccatcacggacagcctcagccgccccaccagcagcccctgacattgcccaaggaggcggccggagccggggccggaccggggggcgacgtgggcgcgccggaggcggacggctgcaagggcggtgttggcggcgaggagggcggcgcgagcggcggcgggcctggcgcgggcagcggttcggcgggaggcctggccccgagcaagcccaagaacagcctagtgaagccgccttactcgtacatcgcgctcatcaccatggccatcctgcagagcccgcagaagaagctgaccctgagcggcatctgcgagttcatcagcaaccgcttcccctactacagggagaagttccccgcctggcagaacagcatccgccacaacctctcactcaacgactgcttcgtcaagatcccccgcgagccgggcaacccgggcaagggcaactactggaccctggacccgcagtccgaggacatgttcgacaacggcagcttcctgcggcgccggaaacgcttcaagcgccaccagcaggagcacctgcgcgagcagacggcgctcatgatgcagagctt

SEQ ID NO: 519 - DNA, 63 bp, Homo sapiens
  chr1:63789728-63789791
  hyper
ggctcacagctcggcccgggcctgcagctgcagctcaatagcctgggcgccgccgcggccgct

SEQ ID NO: 520 - DNA, 63 bp, Homo sapiens
  chr1:63789849-63789912
  hyper
cgcggccgtcgttcagcatcgagaacatcataggtgggggccccgcggctcctgggggctcgg

SEQ ID NO: 521 - DNA, 33 bp, Homo sapiens
  chr1:63790252-63790285
  hyper
ggtcccggtcccgctgcccaatcctggactctg

SEQ ID NO: 522 - DNA, 194 bp, Homo sapiens
  chr1:63791984-63792178
  hyper
catttctccgctgtcgacgtgggctgggggtcgctttgaaagacacttccttgcaaatacccaatctgttttcctggtaaacggtaaacattattgtgtcttgagtaaacattccttcgggatcagggtcctaaaataaaacaagctgccgggggtgagatagtttaacttgataaacaagaacctgataacca

SEQ ID NO: 523 - DNA, 71 bp, Homo sapiens
  chr1:63792231-63792302
  hyper
cggtctccgggcgggtcccttctaatctccttttacaaggaaaactaaacggatctaattttgtttgtgtg

SEQ ID NO: 524 - DNA, 105 bp, Homo sapiens
  chr1:63792543-63792648
  hyper
tttgttacttataaaattactcgctcatatttccgcgcatagcagcaataccggccgagcctgcgccagcagcgtgacactcagccacaagccaccgccggagac

SEQ ID NO: 525 - DNA, 176 bp, Homo sapiens
  chr1:63792797-63792973
  hyper
cggacccagaccctcaagctgccagcggttgtttaaagtcctggcagatgtcaggaagatgggcccggccgtcgcaccctcaaaagctctttttcgtttaagctttttaaacctcgaagatttagcacaaaatgggaaatgcaaatatcatagacaatgatcgcaagcacttagtg

SEQ ID NO: 526 - DNA, 390 bp, Homo sapiens
  chr1:63793262-63793652
  hyper
tgaggcctgtggcccctagagcgttctcaggaccaaggtctgagttgggaccgcccgtatctagttcctcggaggggtggatctggatgtccggggaaaggcgaatgaagagtagagcaaaacatgtgccggctgttgagggctgtcgatgcgatggcagatgtggcctgtagggggcgacgagcagacggaaaacttcgcggtttgtctggaatggtccagccccagccccggacgcctctccttccctcccaggctctgagcctcctgacatccttgcttattctcaggccccggaagcctaggtcgaatctcgagaagctgatttcctcctttcccccgcctgtgtcctgggaggaacagagtcccgaggggagtttgtcctaaaga

SEQ ID NO: 527 - DNA, 804 bp, Homo sapiens
  chr1:63795342-63796146
  hyper
gaagggaaagacagacacagacgcgccgggccggtggaactcagctccgggaaggctgtggacctggaccctggggctccccgctgcctgggcgcctctagcccggcgatgagtggttctgcggggaccgacggccccatttccttcttgcctcgtgatgtgggagggaagaaagaaggcggcaactgcaggcccgaagctcccctcgcccagcggcccaaccacagtgctgtcgtgtcggggatcggtccccaagggagcccccaaccccctgcccacgccgagatcacccccgtgccaacctcgagggctcggcctgcgggactccagctgcccctgcctggagggagggaagggagaagagaatacgaattaattacgaaggaaacccaggtgtgaaaggcacccgccgcggagctgggcgtgcagcggggcgcgcggtgggacctctgctcccgtccccgtcccgcggctactcagttgcccgctcatgggaggctcgcgacggaaaataaatcccctcagagtgaacctgggaggccgagaggacccagcctgggatctctgggggaaataggggcaagtttaccacggtttaattaagccacagccctagcacgaggaccccggcgacccatccgggctgggggatggactggagtgccccccaccccaggccgcgaaccggcagcgagaagcacactctccgccatccccggccccgccgcttccgcctctgcggactccgcgtttgccatgctccttcccggggtccagggaccggagctgcggtgcacgtcttat

SEQ ID NO: 528 - DNA, 87 bp, Homo sapiens
  chr1:64239514-64239601
  hyper
aggggaggggagggagcgtgcccgagacgcgggagccgcgaccgctttctgcgaagtcggggagggtgcgggcgttgagaggctgca

SEQ ID NO: 529 - DNA, 26 bp, Homo sapiens
  chr1:64240532-64240558
  hyper
cgcgccccagccggtgttcaggcaag

SEQ ID NO: 530 - DNA, 30 bp, Homo sapiens
  chr1:64936232-64936262
  hyper
atggtggccgcccgcgctcccgcgctgtag

SEQ ID NO: 531 - DNA, 410 bp, Homo sapiens
  chr1:65210948-65211358
  hyper
ggcccctcagccgaagcgcacgagggcgccccggacccgatgcccgccgcgctgcaccctgaggaggtcgccgcgcgactgcagcggatgcagcgggagctgagcaaccgcaggaaaatcctggtgaaaaacctgccccaggacagcaactgccaggtactgggacggtgataggggcgacgcgtcccgaggggcggcggggcggcgctccgtgtccaggctgggatcgggggcgcctcagagcggtcctggggagtgggtcggcgccgagtggtgagagcggcccctcggtttgactgagttcttggggtttctagcctgcagacgccctgccagggaggggggcagattgggaaactgaggctctgagtggcgaagcggcttctccaaggtcacgggaatcaggggct

SEQ ID NO: 532 - DNA, 461 bp, Homo sapiens
  chr1:65468241-65468702
  hyper
accaagcctgcacccagggagcgctcagtaacgcagcgctgaggagtaggccaccccggagggctccaggtttcagcgcaggcttccgcggagccagctggatgcgtcaccatccgaaagtgcgagcctggccggcggcggcggaggcgggggcaccgcgcagttggaagcccgggcgctcttaccgaaagcgcgagcccggacttccccgccacgatcgatgtggccagtctgcgcctgccgcagttcccgctcgcaccccggcccctcgcagagtcccaggaaagcgctgtggcgggcgggcagtctctgcccccgggaggggacgcacgcacgcgctgctccttccaggtcccggcggggaagcgatgctttcttggcccgggcttggggccagcgggaaccgggctgtccggccgcgccgtcgcgcctcgcacggcgtgagacaacctagctttttt

SEQ ID NO: 533 - DNA, 30 bp, Homo sapiens
  chr1:65534727-65534757
  hyper
ctttcacagatcagcgtacggcacagttgc

SEQ ID NO: 534 - DNA, 31 bp, Homo sapiens
  chr1:65614106-65614137
  hyper
tgcgcgcggtcatcctcgggccgcccggctc

SEQ ID NO: 535 - DNA, 30 bp, Homo sapiens
  chr1:65614490-65614520
  hyper
cccgagccacccggccgagggaacgagaac

SEQ ID NO: 536 - DNA, 296 bp, Homo sapiens
  chr1:65614751-65615047
  hyper
cgcagcctcgggcctcggggcagagccctgggtggctttgaaaggcctgtctgttcgttgtcgccttctaaggtaaactctccccagcaactcccccccctcccgaagccgccgggcctggccgtcaggagactcggaggagactcgttctgataaattacattttgtaatgcagctttcctggaaatggcttcttgagctgcctcccttggcatgagatgcctcctttggctggcgtggtgaacttggggatatatagatcgcctgatttcttagtctgacggggttgagtgcgt

SEQ ID NO: 537 - DNA, 20 bp, Homo sapiens
  chr1:65622589-65622609
  hyper
cagggcgagactgtgtctca

SEQ ID NO: 538 - DNA, 40 bp, Homo sapiens
  chr1:65720328-65720368
  hyper
cagggtgagtgtgggcgcggccggtcgggacctgttaccc

SEQ ID NO: 539 - DNA, 237 bp, Homo sapiens
  chr1:65775512-65775749
  hyper
agtgcgggaagcggcggggttggcggcaagcagagagtgaacgccggggcagcggcgcggagtcccgcccgacagcctccggaccgcgccagcaccatggacagctcaggtagcgctgcccgaggggagtgcagcgctgagccccgcgcggcctccggagcctcccagtcgcccggcccgaggcccccccgtggtcccccagccccggtttgcgagagagccgggctggaggcgaag

SEQ ID NO: 540 - DNA, 31 bp, Homo sapiens
  chr1:65886883-65886914
  hyper
cagagttgaccgcgggcgggtgtcaatggaa

SEQ ID NO: 541 - DNA, 531 bp, Homo sapiens
  chr1:66258119-66258650
  hyper
ggctggggggccggcgagtgtggggttcaaaccaggattttcggtctctggctttggataggcacgcagggctgtgcgtaatccttcagctctggtggtaagggagatgcagtgagctcccggctgggagagagggttattttgcaaaactcccctggtaccgtgcccgcggaatattgcaggaggtctgtgaggtaggtgggggaaaaaataacctgggagggcaatcagggagaggccagacgactggggacggcgtgctttgcaccctagaattgacaggtggtggcctcagcagttacaacctactacacagcatctcgtccgtgcgatacggtcacattgttattccccgcacccggctgaggagcgcagcgcggcagaccaagtggcaccggcgagctgtctctcttccggggggcgggggtggacagtagggagagggggtttaaagggccagaggacgagagaagagctgaggggcgcgtcgccagcgcctgtgtctccctggcgcgggttccccaggctagc

SEQ ID NO: 542 - DNA, 428 bp, Homo sapiens
  chr1:66258671-66259099
  hyper
cgcccccggcccgcgcgccccttcccggggctcctggcctcgcctcagcggctgcaggctcttcgtcgcgggccgggctgcacgcgagcgccctccgggcagactttcgtcccccacccccgggagcgcggaaggctcactcgcagcgcatggtctacccgcgccgggcggagccccggcgtccagagcgctgcggccgcggcggtgcagcagaggcgcctcgggcaggaggagggcggcttctgcgagggcagcctgaggtaagggctgcctaggaggctgcgggtttatttttcctcattctcttacttcatcacacactgaagcctcaatggagagtgtagggtgctgtggggctgatgtggggcaaagagggaatggggccgccgggcctggatggtcgtcttgacggcgtcattgtcgcccct

SEQ ID NO: 543 - DNA, 907 bp, Homo sapiens
  chr1:66998816-66999723
  hyper
aaagctccccacctggggaagcgaggccgctcccgtgtgcgctcggcggggaggacgcggtggcggcgggactcgaactcggtcgtcgaagggcgccccgcagggtcccgtctgtagcccggacggcgagcccaggttggagtgggagggagccggcgtgcacagctgtctttggtcgggctcaggcttccgctccctgcctgctcccctttccagcctcccgccccagaaacgatctcgagcgttgccagtttgattccagagccccactcgggtgggttcttttgtttctttgttttaatgacagttcccagcccttcagcatgtcatgcgcaattaattccctggctctcacgaaggcagctggggtgaaatttcttctgcatcatccttttggggatgtttatgatgtgacgtcagtcggattgatttttctctcttgaatgaaggatgggaggggagaaagagagacggagagagagagagacgcacagatgtgcacggaggccacagacactgacatttggaattccttcagggtaaaaggacaccggaatgggagcttagaagtgtgttgctaagatttccggctgcacggaattattaagtttttcttaaaaaaacaaaaaaagaaagaaagaaagaaaaagaaaagaaccccctccgcagcgagccacttaggtgctgctttcacgccagagtcccctgttaaggtggcagcccttgataactaatctcgggcacccagccgcttctgtaagcttaaggagacgacgaggaggggcgggggaagtgcgtcaccaggtggggaaggggctgtgtatttggtgacaagcgggaggcgatgggggtggaggggaatggggacgggaaataggttctgtgtgctctccgggggtattgtgtc

SEQ ID NO: 544 - DNA, 241 bp, Homo sapiens
  chr1:67218065-67218306
  hyper
agagggccactcagcggccaagtccggccggggagggccgagggctctgtttgaggtcaccctggagaccggcctcagagtccagggagagtgcgcgggcggccgccggctgaatgaagcctgggacgcgggagccgcgccgcgcgcagtgtctgcagtgccggaggtctgggaggctccgggcgaagcctccctgctgcaggtagggtcgcctctctctgcagcgcgtctggaccccaaa

SEQ ID NO: 545 - DNA, 30 bp, Homo sapiens
  chr1:67773425-67773455
  hyper
cccgacccccgccccggcccgatcctcact

SEQ ID NO: 546 - DNA, 139 bp, Homo sapiens
  chr1:68001180-68001319
  hyper
cacactgtaaattagtcgagtttctccagttcaatacaggaaggctgagtgacttgcaggtggtgttcacacttttgccacatggggacgccaccaccgttggtagccggacatactggcactccgtcagggtggaata

SEQ ID NO: 547 - DNA, 30 bp, Homo sapiens
  chr1:68152066-68152096
  hyper
gcggacgaggacgacgacagagatgtggct

SEQ ID NO: 548 - DNA, 30 bp, Homo sapiens
  chr1:68297688-68297718
  hyper
agagaaggcacagacgcagaccctgcctct

SEQ ID NO: 549 - DNA, 394 bp, Homo sapiens
  chr1:68297988-68298382
  hyper
tgtttgtatacaaccacgcccggcaggatgaccaccagatgaccggccgcagcaatgcctccactcagtcccagttgggcaaagtttcactccactgcggcgacgtgaacaagaatcacggcttccttatcgtgagttatgaatgatttaagccaagtttacaggacacacaaagcgagggacgagtgagtgacgggaggtgctaagtgacagcgttttaaagttagctttaattgatatgccctaattaaaatgaaaaacagaattcaccctgccccacgggataactgtcggggcaataattaaaaaaaaaaaaatcacccaagactaagcctcaacctcccccttaccacttgcaaatacagtctgcagaaaagcagcctcgggtccccac

SEQ ID NO: 550 - DNA, 910 bp, Homo sapiens
  chr1:68298403-68299313
  hyper
cgtcatatgggctctcccctctgcgacccgctatttccctgctagacccccagcgcccagcggattccaaggctgcgctcccgccggctggtcccgggaggtagaaagtaggcagaggggcgtggcgtccctgtcgcccccacatgccagccctcctccaacgcctgacaccaccacaagccacggctgggaacactgggggcctcccaacccggcgcggggcgcacggccgcaggctggcgaggaggcaagcgagctcaaggggagacctttccttccacccccagccctagccccagccacagccgtgggggcggcttcccgcaacctcgggcggccgcccgtcgagggcgcgcgcgccgtttctgcctctgggtctcggtgtcccttggccccttcctccccctccccccggtctccggcgcccagcgcccagaccagtccccgccctccagcaggacactcttccctccttccttccttcctccgctccctccctccatctcgcttcccagcacccgggactcggaggcggcccccgaactcgctggccgacgccccgcgccgcgccccgaccccgcggggacccgactcaccacccgcgcccgccgcttggtactcacccgcctgccggtgcgctgccccgccgtcgccgccgggactcggtctctaagggctcctggagacggctccgacctctcctcctcctcctcctcttgctcctccgggcgccggctccgcctcgctggggtgggcggggcggcggcggccccgggctccttcctccgcgccgggccctgcctcccgcccggacgccctggctgtgctgtcccgggccggggagcccgcgttgtggccccgcaggaggaggggcgaggcctggcctgtggaagctcggtggacgtctggt

SEQ ID NO: 551 - DNA, 30 bp, Homo sapiens
  chr1:68696694-68696724
  hyper
tggactccccactccgcaaagtttaacaaa

SEQ ID NO: 552 - DNA, 171 bp, Homo sapiens
  chr1:68697351-68697522
  hyper
gcccctagcaaagacgaccaaatgcatttacaaccgtgcaagtatctcagccttgtaacagagctccgggtttgcgccgggcacagttccccgactcttctgttgttcctaataaagtcgattacgttgccctcccggagctgattggaagggaaccgagaggaaaagggg

SEQ ID NO: 553 - DNA, 108 bp, Homo sapiens
  chr1:68698098-68698206
  hyper
tcagaggtgctggagcgcggcgaggatgggaccgggacggaaggcgcccgcacggattcccccggcgcagccggctcgggttcccccaatgcccggagctgtgattgt

SEQ ID NO: 554 - DNA, 30 bp, Homo sapiens
  chr1:68698514-68698544
  hyper
aatcaccggtggaccgccttgcagaccttt

SEQ ID NO: 555 - DNA, 543 bp, Homo sapiens
  chr1:70033374-70033917
  hyper
taatttgggggagccggagtagaggtcagagggacaggcgaggatctcaaaaagagaccgagggttgtgaacatggttaccccctcctatcattggaaaatctccttgacatttttcacactttgaagcagctgcagctggtgtcgtcggaaaagggggtgggaaaaaagagagggggcggggagagcggtgagacacagccaagagccatgagcggcgcctcctcgcctgccaatcctggcacctgtgcgccgagccactgcaccgaggaggaccctactccgggtgaacaccgggcttgaagccacggacacccagccccagtgcagcgggttctcgccggcgggacctgcagccgcccactcgggccaccgccaccgcctcctgcagttgcggagcgctcagcccctccgagacgcccgctgcgccctggcccctggggatcctcgccctgcacaggcgcggcaacgggcaggggttgttacggagttgggtgcaggattcgcctttcctgcttgtctcttctccgcccaggatttattg

SEQ ID NO: 556 - DNA, 46 bp, Homo sapiens
  chr1:70034460-70034506
  hyper
gggagctgcttgtgcggtggccgagggaggcggcgaagatgtggta

SEQ ID NO: 557 - DNA, 598 bp, Homo sapiens
  chr1:70035029-70035627
  hyper
ctcctttgtgtggcacgagaagctggtgaacctgcctattcccaatccagcgctgggtccccttgaggatcttgcgtcctcctctccgagttattaaggatgcaggacgtgtttcggattcgacgtggaaagagggagggaagcacattagcattaaggtaatcatggcaccctggctcgtggactattagattggctaccagtggtctctaatcttactgtttgcagagtcaagaatgggggcgggggttgggggactgtatagattgccttttaaaatagtgtgacttcataataacggagatggctgaaagattgcttccttacactacttctcggccatcagggctgaataaaggacccgcctccgccctctactccggctcttctctggctgtctcttccccatcaagtcataaagcgagcgggttgggcgagagggcacagctcgaggcagagaagagacggggtcactttcacaactcccaggaatcggcttcagaaaggaaccatctgcgactcccacgttcctttcgaagttctccttcaaaaggaattacaaaaaaaaaaaaaaaaaaaaaagcgatgggggtgggga

SEQ ID NO: 558 - DNA, 30 bp, Homo sapiens
  chr1:71512958-71512988
  hyper
accaggtcggtgagcgccagccagccgatg

SEQ ID NO: 559 - DNA, 30 bp, Homo sapiens
  chr1:72748109-72748139
  hyper
ctgaggagcaccgccgccagccactggttc

SEQ ID NO: 560 - DNA, 1325 bp, Homo sapiens
  chr1:72748374-72749699
  hyper
ctctttttgtttttcggtgtttttgcctcccctcctcctcttcgctttccctccctccctcccctccctccccctggcaccacactacacctcctctcggttgcttttggccgcgtccggagtgtgtctaattctcgggcggctcgcacaccatctagcgaggaggcgagcgcgccggcgagtgagggaggaggcgcggcggcgggggaggaggcagggcgagcggcggcggcggcggctgcaatcccagcagcagcagcagcaacagcaacagcagcagcagaagcagcgcggagcgctgcgccggccgccggctcccgggctcgcgcgcgttgccaagcggccgtttccttagcaaccccgccaggggactggggatggagaagggagggggattaaaaaaataataaaaaaagaaagaaaaaagatagcaagaaaaaaaaaagaaaagcaagacaacgaaaaaaaaaataggaggaactgtatcacaattatgcaaactaagggggaaagagaggcaccttagaatgaaggctctccttactgtcgtaagcgctagagggattctttgctagaaaagtctccgtgtcagggctggggtgaagagagctgaggggcgctttgccttccctcaccggtgcgttttacctctcgaggcaccgtaagtttgaagtcctccaagttgtggtcggcgccatcatgacgccggcgactgtgagttgtttttttgtttattttcttctaatcttgcctgggtggctacgctgcagttagcgagcagccaactagttctctctgcgttttctcgggaataggtagggacggtggcggggcgctgcttttttgcggggacacgaggaggtgcaaggccttgcggcagagcagcttgcgtgtttgtggcggtcggcccgtatggattgcaggacgcccctcttttatctgtgggtgttgacactaagttgtgtgtgtgagtaggggattgtttatggtcaacatggagtgtgtgtgtgatagagagcgtgtcgtgcgcgcgggggcctgtgcacgcgcggcacgcaggcgcgctgggagggacggggcgggtcatgctgggatgtagagtcgggaaaagactgcaatcaagtgttttaattgtgtagagcccaggcggtccagttatgtaagaggcagtttaacccatttgagcctatcaggccgaataatcggcgcatccgagtcaaggcagggcagagttaaggggtttaacgagtcgcagggttgtatttcttaacagcctccacaccgcgttaacaggcttgctcctccgcggtgcagagcggtaacct

SEQ ID NO: 561 - DNA, 757 bp, Homo sapiens
  chr1:72749731-72750488
  hyper
cgccgggctgttttcagccctgccctggcccaaggcagaaggagatactaggcgtggggccacccctactcttttttcttctttccttcttgaactcatttccagattcaagatccttaagcttttccgggccatttgcaaatcaatgcgagaaccgaggctgagtcgttagcagttacaccaatcaatcttgttcagcgaggagtttgggaagcagagcggggaagtgaaaatggaaaataagtaattaaaaaataagctccctccccctcacacactttttcccttcctccaccccatccccctttagcagtgtttgaagaagatattctttgccagatcccagttcttcttttggaggaaatgaagcaaaacctcacacgtccgtaactcgttttccataatgctagcagggtcatttggcaaagcgcaccgaagcaagactctctgcaggggtcagcatccggctgcctccgcagactgagctctttacgaggcaggcagggagtcgttttgcttggtggtagcagtgttcagagtgatttttatcgccatgcacggggatatatggggaaagggaagggttcccatcacctgtgaccacccagactggcttacagacgaatccttaactagcaacacctccctgctgaactggcactccaaggctgggcagctaacggagacatttgcgtcaggagtcactgatgttagtattctgccttaactctcaaaaccgactcggaaactgagagtg

SEQ ID NO: 562 - DNA, 86 bp, Homo sapiens
  chr1:75595904-75595990
  hyper
tcttagactggaaacgcttcccctatttcttccgtagcggaccgggagagcttactggcgctctgcgaaccggctggaaagaaaca

SEQ ID NO: 563 - DNA, 41 bp, Homo sapiens
  chr1:75596135-75596176
  hyper
cgccagtggattcccgggtgtcccgcgtggagcaggcttgc

SEQ ID NO: 564 - DNA, 64 bp, Homo sapiens
  chr1:75596709-75596773
  hyper
gccctggaggtgggcggtgagggccgcgggccagggaaagctcgggtccgcaagagcagggctc

SEQ ID NO: 565 - DNA, 30 bp, Homo sapiens
  chr1:75600203-75600233
  hyper
cttttattagtggatcggggcgggggaggg

SEQ ID NO: 566 - DNA, 286 bp, Homo sapiens
  chr1:75600670-75600956
  hyper
tgatcgtggcggtccgggagagtgggtcgggaggactgggcggctgtcgggtggaaccggagacctggctcgtttcgttcggctgcccgcggacacttgcctgccctgaggcacacctccctctgcggggctccagaaaggcctccgggatccctgggcttgccgggagagccattttacctaaaatgccaaaagaaaaccgcagggcacaaaacgagtcacgcggtttgtctgagtagactggggaagctgacaagctctcacctcactcgggaggcaggacctg

SEQ ID NO: 567 - DNA, 489 bp, Homo sapiens
  chr1:75601917-75602406
  hyper
cggtgttccccgctccgctatgattgacgtctggaaagaaagagctttgtgaggggatgattgttattaacttgttatccccggcgggggggcggggaaccgacgtgcccgggtgagcgccggagacccggagcccggggagcgcgggacgagctaccagcgctcgggtggcggccgccagcggccagcgaaggaggctgcgcgccagcccgcccgcggcgcccgggctcaggcgccgtgacggctgcacgcgctgccccgcactctgagggccttcattagctcgctccccgcgccgaggctggggcgggcagcacgctcggaacttctgatctgtttctccatactttctccccctcctactccgcagtgtcaggggctcatgtcagaggagtgcgggcggactacagccctggcggccgggaggactcgcaaaggcgccggggaagagggactggtgagtgcggaggggctcgcgtgctggcaaga

SEQ ID NO: 568 - DNA, 41 bp, Homo sapiens
  chr1:75602831-75602872
  hyper
cccgctgtccccgtcgtcctcgccccggtccatggcctcgg

SEQ ID NO: 569 - DNA, 570 bp, Homo sapiens
  chr1:76080395-76080965
  hyper
aaggctcagtaagtcgctgcctcccaggtcattgggcccattgtgttgaaatccaacttcgaacgacgccccttccttgccaccatcctcaggtccagttcccccgcgcacagccttcctcaccgcgcatggtgtcgagcccacttccacctctctgcagtgctgcagacaacctctagggctctgcgagtcccccagcgagagctagggagccgacaagctgcgacctctgcgagtccgcgctgcgggagcgggtggcttgcacctgctccccgcgcgccggctctgcgacccctaggcaagacgcagcccaggaggctccctcccgagtcgcgccccggaccacgccgcaatgcctcgtcaccccagcaacaagctcttccttgtcctccccgccatcgcttctctccgcgaactttccaactttggaagcccgggttccaaaggagcaacagggagactgcttagccggagccactgcccgtctcgacaggttggggagcaggaagtagcctgcagggactcggccggtagcaagtccccttgaccgcagggaaaaggagaggcagc

SEQ ID NO: 570 - DNA, 569 bp, Homo sapiens
  chr1:76540088-76540657
  hyper
caactttgacaaagtgtgaaacgtctgtaaaaaggagttctctgatgtgtgagaggagacggaaccgagaagaaaaggccgtactctgccccccgcgggacccaggtccccgcctgctgcagagcgcactctgcgcacgtcgagccgcgaaaggttcacagaagaaaacaagagaaagaagtagcaggcactgaggagccgccggcgccggcgcccaggacggcacgtgacccgggggcggggccgcgcgggccgcgggccagtggatggggacgggggcggggccgcggctcggggggcggggtctgtggcggcgcagcttacaccgcggtccccttatttggatctgcgggaatgtgggctggagaggtcctgccgtggtaccagcctccagcctgcccccaggactgcccctgacccaggcgcgcccgctgctcggtggcaggagggccggcggagcgccatggcctgcatcctgaaggtaacgacttggatctgtggctcggacgcgtggttggccagccccttgctgctcagaggcacggagtcagccgcggtcccaccgcatc

SEQ ID NO: 571 - DNA, 457 bp, Homo sapiens
  chr1:77332976-77333433
  hyper
aagataaataagcccgcggaccaagaagtgggtacactggctcggttaactctctctccccagaaatttcactactgaaaagattattatttgggggcggggaaggggatgtagaggtctttaggacccagcaggcggcggcaggcggcagttgtgtagatcgctgagagactacgagggtccggttcagttttaattctgtctctaatctctgcaacagccgcgcttcccgggtcccgcggctcccgcgcgcgatctgccgcggccggctgctgggcaaaaatcagagccgcctccgccccattacccatcatggaaaccctccaggaaaaagtggccccggacgcgcgagcctgaggattctgcacaaaagaggtgcccaaaatgaagaccctgatggtgagtcagttgtggcaactccaccgggcaaagagggggatccccgggctcagggtcc

SEQ ID NO: 572 - DNA, 344 bp, Homo sapiens
  chr1:77333579-77333923
  hyper
cggggttgcctcgcctcctagatctccggcgagaggtccgagggggtggcggagagctgcaggagcgatggaggagtgggcagattgctcaagggatgggggtgcccaaaagcaacagcctgccaaaaactaagagggacggggaggggggacctttgcagactttcttcgttttcttagatttcaaacttgcaaggatcgcaaggatccagggccccaggaaaggaggggtgtgaaggactcaaaattccagcagcttggctggggtggctgcgccagacgggcccttccccaaagtgcaaacccacccctgtcctcggccccggcgcgctccctccctcagc

SEQ ID NO: 573 - DNA, 217 bp, Homo sapiens
  chr1:77334168-77334385
  hyper
cgcccgcccgcagcgccatggtctggcagtgtgtttagcgctcaccaccatgtgcaccagcttgttgctagtgtacagcagcctcggcggccagaaggagcggcccccgcagcagcagcagcagcagcagcaacagcagcagcaggcgtcggccaccggcagctcgcagccggcggcggagagcagcacccagcagcgccccggggtccccgcggga

SEQ ID NO: 574 - DNA, 348 bp, Homo sapiens
  chr1:77334408-77334756
  hyper
cggagtggcggaccacaaggtgacagcatgcccgccagcccgctcgccactcagcctggggatcccgcacacctgagccttccccctttcccggggctgggaggcgctgtgagtaggtgccgttcgaaggctggaggggagtggacccgctggggtagggtgggctagttccaacttggtatgaattcttatttggagaaagacacaaagttttgtagaaaataggggtgaggtgcgtggaccccaaagcctaatttcccagcagaaatcggccctggaactagaactccctgatccccagaattgcagctgcggatggaggtccggttcctgaagcctcgggtttgg

SEQ ID NO: 575 - DNA, 43 bp, Homo sapiens
  chr1:77747359-77747402
  hyper
gtgcgtacaaggtccggagaagcgaaacggtcgcaggttccta

SEQ ID NO: 576 - DNA, 575 bp, Homo sapiens
  chr1:77747831-77748406
  hyper
ggagggggtccctggcctgggcggagaggctgagctgagtgcgcgtgagaaagagggctgcaccgctgctcggcgcggactctgccagccccagcttcagccccggctcaggtcgccgcagcccgggagcctccccgcttgcgccccaaggcacgcgcggcacagccatgaacaccaacgatgccaaggagtatctggcccggagggaaatccctcagctttttgaggtagggctagagctggccgacgggcggtagcatccggggactgcatctcaggggttcgggttgaggcagccgcgccccgtcccaccttccccacacggggcatgtaatgaaggggcttgtagaagcgcactcgcccgctcccccgagggtagtcgcctttcccgcgggttgccagggtccttgtcagaaggctgggcttagaagcctgcatctcacagatcaagtttcagtcttccagcagggttctgaaagcagcctgctcccatcgcgcccctcggatgtggacacccagggtgggctgcagaccgcggccgggccgcactctctgggggcgagggccaggtcagg

SEQ ID NO: 577 - DNA, 30 bp, Homo sapiens
  chr1:77748713-77748743
  hyper
ccacctggagatagcgggtcggggagggag

SEQ ID NO: 578 - DNA, 69 bp, Homo sapiens
  chr1:78354048-78354117
  hyper
ctcgcgcacctagggccgggagacagacaaattctggcggaaagttggcagccacggtccccctcccct

SEQ ID NO: 579 - DNA, 85 bp, Homo sapiens
  chr1:78444894-78444979
  hyper
gaacagagacgtcgcgaggattaagtttaagacttcgcgagaacagaatttcttttggcacctcctctccgcgcgttcttggggt

SEQ ID NO: 580 - DNA, 814 bp, Homo sapiens
  chr1:78511527-78512341
  hyper
tggtgataggatgagggactacgtaactttctttctctccagatccatcccgggggaggctgggcgggcgggcggctgctccggtccaggggtggaggtcggggccctgacccgacgcagccaggcggaagcgcggctgccattggaggctgcttttacctgcgcggggcccggggcgcaaagtccgaggcgccggggggaggaggcggcggacggcagcgcaggtgggcccgcgctctcggccctgcaagatgcccctgaagctgcgggggaagaagaaggccaagtccaaggagaccgccgggctggtggagggcgagccgacgggcgcgggcggcgggagcctctcagcgtcccgggctcccgcacgcaggctggtcttccacgcgcagctggcgcacggtagtgccacgggccgagtggagggcttctccagcatccaggagctctacgcccagatcgcgggcgcgtttgaaatctcgccgtcggaggtaaggcgccaggtgctcaggctctcccgcctctccgccgcgccgcgccgcgccgcgcgtatttctgtgggcccaggagggttgagcggcgtttcccggagcgcgaaatccgatgccgtgttgagtccgccgggggcgtcccgggggaaagtgagtgtgccttccctggaagggaaaatttaacttggcaggaccgcagaaagtcacagtcccccttgctccgagatctggcctttgggaagcgggttgagggaggcaacctttcttccgcttgcaaatgtgtttgctccagatgtcccggattccgccggccgttcaaggcg

SEQ ID NO: 581 - DNA, 30 bp, Homo sapiens
  chr1:78956555-78956585
  hyper
agctctgatgcatccgagcacggtgccctc

SEQ ID NO: 582 - DNA, 15 bp, Homo sapiens
  chr1:78956874-78956889
  hyper
cgtcttctgctcctc

SEQ ID NO: 583 - DNA, 267 bp, Homo sapiens
  chr1:78957188-78957455
  hyper
tgcggggttccctgcgggcggcactgcgagttcctcacccgggcacgtcctcactccccgtgcccgggatgagggagaaaacagccctttggcgtttgagcaattgcagaaagtttcagcgagttcgttagtttggagggaatgttgcgaggccaggccgaagggcgggggggatagtaacgggcgaaagtcgaactgtgagtaagacctggagaaggcgaccgtcctgggggtagcctaggcagttccactcgggctgggcgcagg

SEQ ID NO: 584 - DNA, 114 bp, Homo sapiens
  chr1:82267908-82268022
  hyper
acggaggtaagagccgcaggagcgaacaatgtgcctctgtgcccagcttcggagacctgtttgctttgcgcctccagtccgggggtggatgctggaggcgcagggagccgcggg

SEQ ID NO: 585 - DNA, 30 bp, Homo sapiens
  chr1:82268786-82268816
  hyper
ggggcagggagcctcgggagcttggtttgt

SEQ ID NO: 586 - DNA, 30 bp, Homo sapiens
  chr1:82269243-82269273
  hyper
cccgccctccattccgttcttcccgataca

SEQ ID NO: 587 - DNA, 30 bp, Homo sapiens
  chr1:82269511-82269541
  hyper
atagatttaacggacgtagttgattcattc

SEQ ID NO: 588 - DNA, 983 bp, Homo sapiens
  chr1:84543198-84544181
  hyper
agctcgaaccacgaccgtgcctagggaccaggcttttcctgtggccgatgcggggcagatgcagacccagaggccacccttgcgcgcgatctccaacccgacggtgcggctcctctcggacctggagctgtggggagaaggcagccttttagtgaggagccgccgcgtggcgggacgcaaggaaaaccacccgagccgctgaacagtattccgcgactgcactccagggcaccgggaccgccagggtgaggagggactctgcgttctgcaaagctagcggttcccactccacctcccactatctcagcgatgggcacgcgagcgccagcccgggcgaccgcgggggaagaagcggtccacgccacctcaggcccccgccccaggctctgccagctgggggtccaccgcccgcccccggggtcccgggcctgcgcgtcacttccggcgcgcgcgcccgcctgcgaagatacagtcgggccagggcctggcctgggcgcgcggctgcccgggggcgcgcagagagggcggaccgcgcgaagggggagtgtctgcccgccgccgccactgctgctgccaccgccgtcgccgccgccgccgccgccgccgctgctgctgccggtgctaaggagttcgctggagccctttcctcagacccggcccggtcttcgcgcccggactcctggcgccagcgctaggcgcactcaccgctctgacgggtgcagacgcgggagttgtcccagactgtggagtggcgggcacggccccagccccccttcccttccctgaccccttcttgccatcgccccagacatggggaacgcggcgaccgccaagaaaggcagcgaggtggagagcggtgagttgaaggccgggtctgggtatccgctgggcgggccggcgcggggcaccgagcgccctccgggtcgcagcttctgaggccgcgggcacgggccaggcctagcagcggccgccgggagtcgttc

SEQ ID NO: 589 - DNA, 57 bp, Homo sapiens
  chr1:85040190-85040247
  hyper
gaagggcggggaggggcgggaggggcggggctccggggcgggcgtgggaggtcgggc

SEQ ID NO: 590 - DNA, 58 bp, Homo sapiens
  chr1:85359091-85359149
  hyper
tggtcggccggccccgagagggaaaagcgcccactaaaggaccgctagtacccacaag

SEQ ID NO: 591 - DNA, 31 bp, Homo sapiens
  chr1:85463079-85463110
  hyper
agggaggcgtggggcacgccaagggcgccgt

SEQ ID NO: 592 - DNA, 30 bp, Homo sapiens
  chr1:85527760-85527790
  hyper
tgtgaggcatggaccgagcctgttagacct

SEQ ID NO: 593 - DNA, 132 bp, Homo sapiens
  chr1:85666111-85666243
  hyper
tcttgactgtcactgccggcggcctgaggaaggaggggccttcctggcggtctcctttgccactgcgtatcacagaggaccccgctggatccctgaaagggcttcccgaggagcagccgtggtccttgcagc

SEQ ID NO: 594 - DNA, 51 bp, Homo sapiens
  chr1:85667112-85667163
  hyper
cgtgggagggtgtctgcggcaccccaggcgtctcccgcggctgccgaagag

SEQ ID NO: 595 - DNA, 31 bp, Homo sapiens
  chr1:85774285-85774316
  hyper
cctgtttttcaatgggcggtgtagagtaatg

SEQ ID NO: 596 - DNA, 59 bp, Homo sapiens
  chr1:85930019-85930078
  hyper
ctgccccctggagggacgcccagcctccacccgccctaccggagcggcacccctcgcgg

SEQ ID NO: 597 - DNA, 620 bp, Homo sapiens
  chr1:85930326-85930946
  hyper
cccgagggccaatggcgcgactccccaggcaacacggcggccggcggcgggggagggcctggcgcgcgccccggccgcgcccctcgagtcggcagttacctccttcctccggctcggcgccccgggtcgggtgatgagggccgtctcctcgcacaccacggccacgtcctccacgaagacgcagtccggaaggctctcgtcggccggcagctccaccacctgcagccccagcttgctgcccagcacgcccacgtagagctggtgctgccgttccgcgcgggcgacgtccacctcctcgcccttggcgcttctcagcgcgtgctggccgagcgactcgggtagcgcccgcaccacggcgtgggtggcccggccgaaggcggcggggtggccgagcccggccatggcttcgggaggcttaggggcggcggcggcggcggaggcggccgggtcctgccgcgggcagcgcgcgctgagcctgcgagcgcccgtcggctcctcttggcagccgctgaatgtggtgcagaaggagcccagctcgcgcccggagccctgcccgcgcgactgagcatgcccagagctccgggcgccggcccgcgcgcatcccgcgcgcccactccggc

SEQ ID NO: 598 - DNA, 184 bp, Homo sapiens
  chr1:86046432-86046616
  hyper
ggcgcctgggcagaccgcgagcgagagcgcccccgagcagcgcccgcgccctccgcgccttctccgccgggacctcgagcgaaagacgcccgcccgccgcccagccctcgcctccctgcccaccgggcccaccgcgccgccaccccgaccccgctgcgcacggcctgtccgctgcacaccagct

SEQ ID NO: 599 - DNA, 193 bp, Homo sapiens
  chr1:86046830-86047023
  hyper
atcgtttgcgggtagccgtttctttaagcactctccccctccccccgaagacgtgtcgggacctcttggtgggagcagccttccgaggtggccgggctggacgagatcagaggctccccgtcgatagggtcggagacccccgtccctcactgcggcagccgcggcgcccctcctgcgcaccgcgccgagtctc

SEQ ID NO: 600 - DNA, 190 bp, Homo sapiens
  chr1:86047064-86047254
  hyper
cgctgcctgccactgccccctggaggcgcccaagtgcgcgccgggagtcgggctggtccgggacggctgcggctgctgtaaggtctgcgccaagcagctcaacgaggactgcagcaaaacgcagccctgcgaccacaccaaggggctggaatgcaacttcggcgccagctccaccgctctgaaggggatc

SEQ ID NO: 601 - DNA, 71 bp, Homo sapiens
  chr1:87617677-87617748
  hyper
cagggaacctcagggcggtgctcgcctctgcccggcagcgagagagggacccggtgcgggcccgatgacag

SEQ ID NO: 602 - DNA, 30 bp, Homo sapiens
  chr1:87793848-87793878
  hyper
aggcaggtgaggccccgccctgcgtctcga

SEQ ID NO: 603 - DNA, 30 bp, Homo sapiens
  chr1:87907740-87907770
  hyper
cctaaggaaactccaagtcacccctgggta

SEQ ID NO: 604 - DNA, 135 bp, Homo sapiens
  chr1:88928347-88928482
  hyper
tgcgtgtctctgggcgcgtcctgcccgctccccgcgccgcccgcgctcctctcgccgcagctgccgctggggctgccgcgggcgccgctcagccggagcgcgcctccgcccggcccgcccgcgccccgcagcagc

SEQ ID NO: 605 - DNA, 30 bp, Homo sapiens
  chr1:89356949-89356979
  hyper
ctccagggcaataacgtcaacagctcggta

SEQ ID NO: 606 - DNA, 30 bp, Homo sapiens
  chr1:89664392-89664422
  hyper
ccgtgtgcagtctgcgcttgggaatttgtt

SEQ ID NO: 607 - DNA, 614 bp, Homo sapiens
  chr1:90098723-90099337
  hyper
aggcgccgccgtggccgcggccgcagtgctcgggcgcgacaagccatgagcagcgaccccgcgggcgacgccgccgtccctggcagccgctgagcccgacccccaggcagctcgccgctccctagcaccttctccagtcgacactctcgcgcccggaggtaagggcgggggatccgcggagggatggagaggggcagcccgcagagggccacccgctcggtccgctgtgcgcgccggaccgggactcgccccgcctcactcgcgtccttgcttccccccggctctcagacaggcagaatgtggttgcccgcccggcgtgtggtgctgggaaccttccgctactgcggctcaggagcccgccaacccctaccccacccaatccgcgctagcccgagcggccgcgcgaggatctcagcctggcgcccaacgccgcgccgcagcggcaggtcctgcagactgggcgcgggggtgggggggcggtccgcgaggggaaatgcgtccgtggccggggcgatcgttgttctttcctacctcgaaaatctctgagaccccggggccagtcctttccggtctatcacccccctgccacctccgaacccttgaagttagcactt

SEQ ID NO: 608 - DNA, 30 bp, Homo sapiens
  chr1:90286175-90286205
  hyper
atcagagttttagtcgacgggacagcctcc

SEQ ID NO: 609 - DNA, 30 bp, Homo sapiens
  chr1:90287508-90287538
  hyper
tgggctcttgggagcgggacttctgctcaa

SEQ ID NO: 610 - DNA, 30 bp, Homo sapiens
  chr1:90308584-90308614
  hyper
tggcagctgtgtgcacgctttctcttttga

SEQ ID NO: 611 - DNA, 768 bp, Homo sapiens
  chr1:90308852-90309620
  hyper
caccggcggaggaagcgtggagtccattgatctaggtacttgtggggaggggagaacccgagcagcagctgcaaacggaagggctgtgagcgagcgggcgggcgggtggctggcagcgaggccaccagcagggggggcccgggccgaggccgcgccacctcggcaccacgcgggcagccggtgcggcggggtcgccacggccaggggagcgctgggtgcccaccatggcagttatgcaagcggtgaccccctggtcttgcctccccgccgccctgcactccttcctccccgctgccgacacttggatctctctagctctttctctcccctgtgttttcaaacaggaagtgcacggctgtctataacgtgctgccgggtctcaggatggaggagtgaagtctcctgtcgccgtggttccagcctccggagctcgcccaagccgcgtccccagagagcgccctgagagaacagggtggccgcttggtccaggtgcgcggggtcgggtctgggtccagggagcgggtcgggaagtctgcggcacggagcactgctagtgtcggatctgcatctccagctctgtgctgcagcttcacttgcccgccccccaccactggcttctcacccggggtctctgccaaactctggctgctgccgccctgggttcgggccggcggaaggccctgggcgtgcgctgcggagccgcctgcgaggactccactagggcgctttccaggctggactgccccgggctgcgctggagctgccagt

SEQ ID NO: 612 - DNA, 30 bp, Homo sapiens
  chr1:90461125-90461155
  hyper
agtggaaattgccccgacgtctccaacttc

SEQ ID NO: 613 - DNA, 675 bp, Homo sapiens
  chr1:91172322-91172997
  hyper
agaatgaagtctgacggcgggaatgggggtgggtgggggcgggaatccatcagctccacaaagtgacagggcccttttatcgtaaatcaagttcaatctcgctctcgcgaaggtcctcttttttcggcggagctcccgcaggggcgactcgctgtcccagaccagatagtagcaagagctgggagagacccaaatctgcagggagagggcgcgggctgagagccgcggtggggagcagggcctgggcccagcgcgacctgcagggctgctgcctcgggagcgcttctgctctgcctgcggtggccgaggcggcggctcgccgagcgcgctccgagctgtgcgaacagaggaagtatgtgccagttagaagggttccgccggccacctcgtcgcagccgcggcgcaaggtcttggagccgcagacctgaggcccggctcctccctcctcggcttccactaagaacttattaaatagggacgattcacagttgatctgtcactgagcactacttaccccgagatctttgggtttttgaattactttattgatctgaagattttgttctttggaatgtgaccctgtttggacttagagctaatcaggaaacgctgccggggaggttgctttgtaatcactttgcttacctccccccgggcgccgccgacccttcctag

SEQ ID NO: 614 - DNA, 30 bp, Homo sapiens
  chr1:91173217-91173247
  hyper
tcagccggaaggaccgggggaaatagtccc

SEQ ID NO: 615 - DNA, 30 bp, Homo sapiens
  chr1:91182200-91182230
  hyper
tggcctgaagctctcgtgcactgcgttgct

SEQ ID NO: 616 - DNA, 108 bp, Homo sapiens
  chr1:91183087-91183195
  hyper
aggcgaaggcgaaggcgaaggcgcaggcgaaggcgaaggcgcaggcggcgggaagctacgccaaagccgccgccgccgccgctgccggggtctgcccacagcctggca

SEQ ID NO: 617 - DNA, 360 bp, Homo sapiens
  chr1:91183250-91183610
  hyper
gggcggccgcgcgccctcggaactcccccgcggctcccgaggtggcagccgcgcgccactcggcagccccgtagccgagtttctgaactttcttggaaagttgcggggcagacacggccgcagcggttgcggcaacccgaggaggaggaggaagaggaggacgacgagaaggagcaggcacagaaggaggaagcggcggagacgcgatgccgggcgactccggccgctgccgggcgcgttcgcttgtaatccggctgctggcgggcggcgccgaccccctcccgtgacgtcacggccactaccgccgctccccgcgccgcgccgcgccgggcccgcgcccccgccaccgaggccgcgcgt

SEQ ID NO: 618 - DNA, 241 bp, Homo sapiens
  chr1:91184275-91184516
  hyper
aatgcctggccagacgctttctcccgaacgggggagctaatgcccgaggcgttctctggtggcgagggcagccacggttcactgcggtgtcgggcgggcgcggggctcaggacccatagcggctggtctgcagcccgcgcccctgccgcgccccgcggcagtccgtccacctctgtcccccggcccctttcggcgagcgctcatttggaaaggaaacagtcactgcggatccacttgggac

SEQ ID NO: 619 - DNA, 40 bp, Homo sapiens
  chr1:91185268-91185308
  hyper
ccgaggcggggactccggacgtgctccatcccggcagggg

SEQ ID NO: 620 - DNA, 162 bp, Homo sapiens
  chr1:91185347-91185509
  hyper
cgggtgactgggccccgccgggtggggtcgggccactgtaggctggagcggggttggatcaaatgcctttggcgcgggaactgagtgctggcccgggagaccctccggagagctcgcgggctcggcctcggcctcggcctcggccttcggccgcggttaccg

SEQ ID NO: 621 - DNA, 256 bp, Homo sapiens
  chr1:91189124-91189380
  hyper
aaattgaaacctccccgccccgttttctgcctttggtgcaggcggggccgcgttcccagataccgtgagaggccttggggcgcggaggttgggggcagcctcggtcagctttctcagtctctcccaggtctacagaatacgccactggacaagtgcctaagcagcgacttctggtccagacacaccgcccggggagtaagtagttgcgtcgaagaacaactcattcagcagcagttaacaccgacgtttcctccta

SEQ ID NO: 622 - DNA, 30 bp, Homo sapiens
  chr1:91189724-91189754
  hyper
ctcccacccagcccacgcgcgcttccccac

SEQ ID NO: 623 - DNA, 226 bp, Homo sapiens
  chr1:91190088-91190314
  hyper
ccattggaagaagctcttttgcgtggtgggcgatgtgtgggtgggggacttgtggcatggcccacggtgttgtttctgtgcctgcgatgacacacgtatgtcttgagctgtgggctcgccttcctggaggtgcgcccgaccgcatctgctggtgggtctgagcgtgcttggggtgtcccaggagaactgagagaacggctcccacgtgcaaagttccaaagcatta

SEQ ID NO: 624 - DNA, 85 bp, Homo sapiens
  chr1:91190863-91190948
  hyper
ccagggtgggcttgtaaaagacgcttccgcagagcaggtcccgtcagggtctttttcctgttcctggtgccagcggtcggcccgg

SEQ ID NO: 625 - DNA, 250 bp, Homo sapiens
  chr1:91190984-91191234
  hyper
cggagagtgcccctcccgcaggcgccgtggcgagatcactctgaatatgtaacatatttgtaacgtgcgccgaggtgtgatgtgtgtgctgaaatagggggatgggggaattcgaagccggattgggaaggcgggggggaggcgcacagaactcacaatgtacttcgcaatctaacaatctgaacattcatttattaaaagctgctgcgtgacatttacactgagccaccagtctctgcctctaatccgg

SEQ ID NO: 626 - DNA, 200 bp, Homo sapiens
  chr1:91191289-91191489
  hyper
cgcggccggacagagcccatcagctacaacgcggaaggcctctgcacccccttgggggcgggaggaaagtactgccagtcctgcctgggggccgagggtaacaagcaccgagcctctcgctccacgcagggccagctgcccagctcagcgaagctcttgtgatctggtgcgtgtctctcgctcttccctccccatcaaag

SEQ ID NO: 627 - DNA, 45 bp, Homo sapiens
  chr1:91192436-91192481
  hyper
tggggcaaggaggccgcggaaacgcggaacggcttcggggagacg

SEQ ID NO: 628 - DNA, 203 bp, Homo sapiens
  chr1:91195143-91195346
  hyper
ccaggcgggggactgcgggccgcccgcgctgcagggccgcgggtcaccgcagggggcgccggggcgctacgggtcctcgggcctggtcttttccggtccctgcccgagcccgcgcctttcccgcctttcgggggagaaacctgcctggacactggaactgggagaaagcagcagcctaattgctcttccgatcgtcgcttggg

SEQ ID NO: 629 - DNA, 194 bp, Homo sapiens
  chr1:91196000-91196194
  hyper
acccaggcgcgcgcacgcacgcgggcacgcagcagcgatggggatgtaggtcaccccgcgggttagggccacgcgcccgcactcccgccgcagccgcaaccgcagccgcagccgcagccaacgcggccgcggagcgacgcagtccgcagcctcgaatttccagaaattccagcactggcagcagcacgtctagt

SEQ ID NO: 630 - DNA, 201 bp, Homo sapiens
  chr1:91196225-91196426
  hyper
cgcttaaagattttcgcaaaaagtgcactggggccaaaaatcaatcactctccctagcctgacccggtgaaaacagatgcataacatattcatgcgctgagcacgccgagcagcccagcgcggaacttttttttttttcttcttcttcttcttcttttaaataaagcgaggaggacttccgcggctcggcagtcctgctaa

SEQ ID NO: 631 - DNA, 977 bp, Homo sapiens
  chr1:91316201-91317178
  hyper
tggactaacagcatgtattagcgtgacagagactaaaaagctaagaaccgccgtgcgatggccggctttgggcaccgggggtgggggctacgctacgcgtgaagggcctcagtcctcgggctttagttcaggaagaaaatgaaagctggaggtctcgtgggcgggactggaggcggccagataggcaagaacccgcaacaggagtagggacattttttcttcaaattccaatcccatccagcgatagacaggcgcgtgggtctccctcctccacgaccaccacacaatggcacacacttttgctggaaactgaaatcgaagtctctgaggcaggctggggcccaggccggcagcggggaggggcagggtccagccacctcggcgtggccttggcgagcgctccggggtcagaggccgtcgttctcgccgcgctccacagcgcgtcacccgctgccctagcgacccccgggcgaccccggcatcgcctggctgcgccgtcccggcgggccggccctctccacgccctctcctggggtttgcggtgggcacagctccctccagactgggtctctccactagcctcctccccaactgcaacgtgggaaccagagctatccgagtcacgagccccaagtgcacacaaagcccccaacggggccacggcgcctccacgcctcgctacctccagctccaggagcgcagaacgcagcgccctgggtcaccgcgtctgccctgcggagcagccccactgaggggaagcctcgggcaggaggtgagaccccgcgcacgcaagcacccccgccccaagcagggccctctgcccgagggagactctcacctcaaataaacgggcgctgccgcctccagggggaggacagcgggcggagaatactcacgctgggcccagccgcgcggggacttcgctgggaaccacgcgcgggctcccgccggggagcggagccccagcctgcagtcct

SEQ ID NO: 632 - DNA, 30 bp, Homo sapiens
  chr1:91869999-91870029
  hyper
ggggcgccacacaccggaacacaagacaca

SEQ ID NO: 633 - DNA, 30 bp, Homo sapiens
  chr1:91904864-91904894
  hyper
agcagagcagtgctcaatctaagcctactt

SEQ ID NO: 634 - DNA, 30 bp, Homo sapiens
  chr1:91966403-91966433
  hyper
aagtgttgcgcaggcgcatccgatcgactc

SEQ ID NO: 635 - DNA, 31 bp, Homo sapiens
  chr1:92350693-92350724
  hyper
tcttcttccagcttttcgtgaggacaccaaa

SEQ ID NO: 636 - DNA, 277 bp, Homo sapiens
  chr1:92351378-92351655
  hyper
tgcagagcccacagcccgggcgggctgcagcgccgcggggctgggccggcacgtacctcggaggcggtgtgtccagcggagatccacccgcagcaagttggaggaaagcggcggcaagtttccccgcccagcgctcggcggcggcgagctccggcagctgctgcgccgcggcaaaactacgccatccggacccgctggggactctcacctcctgcagggagctccgggaatcgcgcagggaaagtggccggggcgcgagagccgccgactgccctcc

SEQ ID NO: 637 - DNA, 503 bp, Homo sapiens
  chr1:92495399-92495902
  hyper
agacagccaagctctgcaccccggcctggcccgccgcaccccgcaggcccggctctcccctgcgcgctccgggctgggcgcggcgcgtgtgcggagccgccgcggtgacacggaacgccggccgccccgggccgggggaggcgcgcgtcgagaggcgacggcgggctggcctggcgcgctgcggcgctcgctcacccgctcccgaggaagggcagtgggccccgccgccgcctcccaatggcgaggctgcgggattgcctgccccgcctgatgctcacgctccggtccctgctcttctggtccctggtctactgctactgcgggctctgcgcctccatccacctgctcaaacttttgtggagcctcggcaaggggccggcgcagaccttccggcggcccgcccgggagcaccctcccgcgtgcctgagcgacccctccttgggcacccactgctacgtgcggatcaaggtgaagggccgcgcgggcctggcgggagcgggagg

SEQ ID NO: 638 - DNA, 30 bp, Homo sapiens
  chr1:92764521-92764551
  hyper
ccggcgtcttagcccgctcttctggccccg

SEQ ID NO: 639 - DNA, 818 bp, Homo sapiens
  chr1:92948811-92949629
  hyper
caaaaacagcagcaaaagggacgttggggcagcccctcccagctccggactaatggtgtgccgaggtgcagtaggcatccgggggagcagccccgcctggcccgcgcgcgcctcgcacctgctcggctaggcgccggtacattctctaaacggagggaatagtctggtcctggggagcgcggctggtggtagctgtgagccttcttgcttttgacgagaaatgagcgcggcatggtggtccggcactttccccactgcgccccaagagtccctggagccgctgtcacccacggtcactccgagggcttgctcagccccagcccggaggagacctgagagggaaagaaaaccaggtggagacgtgggtcagtactctccggtgcggcggactgggcacccaggcggagggagagcgcgggccagggaggcgcgcagagggcccacgggaggaggggcttgaccctgctgcgccgcgcttaccaggtggcacttggacaggtggcgcgaacccgccgtcgttgccgccgccgccactgacacagctcagcggtaaaacctgtcccggggccctgtctcaggcccctttcctcctccctgcccacgccccccagctcctcccctttcctagcgaagctcgctccggcaatcaaactccctggagagctgtagttcccatcgggtgggttaccccaactcagctactcatcgcctgcctggctgtgctttacggctggcgagggagggcggggacacgcggatcggtttaggggccggggatgcccagtggtcgaggacccggaaggggcaaggagccaaga

SEQ ID NO: 640 - DNA, 1892 bp, Homo sapiens
  chr1:92949853-92951745
  hyper
ctcactagtgccccacgtaggagaaactttgcccttggactcccggctgcggcgggcaccggtcgaggctgcggcgagccatcccagaccatggagacctaacctcgggaatcaggtcccgggaaaaaagcactttccgttctgctcaccaaaaaatcttgtcctagggaggtggagcccgatccacgaacgttgactgggaaatgctaggtgtcccgagtcggtagtgcaccgacaatttagcagacaaaaaagacaggacgccagagcgcgcaggctgcattagcagagagcgggggtcgggcccgggcccgggagggaactagctgcccggggcgtcgctctcattaacccccaatcagttcacctaataccaggtcgaaatctgagcgcagcgggagggcgtggctgcgcctgccgctaggctccagccggctccgggggcggtaccccacagtcgaggtggtctggagtaaacgaatctgccttcctcccggggtgaaggcgatggtgaccgggttcacacgtgagctgcagtacagcagttctccgtggcctcggctggttcagaaacgagggtgctgggaactctgggccggggcaggacctgcagtcctccggcttcgcgctgtttccactgccggactaggagcccctcggcttcctaggcaagatgcaggccacacagtctacgtctgtccgttggcgctctcagctcaaacgagtcctacaggccttggtccctgtagggtgcaggccccctgctccagatccccagccccattgtgtccccttctccggaggaatgggaatagacctgggagaaaagacgcctgggacgtgtcgcggggctcccgcgaagtttcccgctacccaagcgccagaatgcccctaggggtgagagtgccatccgcctccctccggggtggctcctagggctagagctttgtcgcttcctgcacttctcgtccgtacaattagacgccacaaaccccaaacccaattctttaaacagccacgaaactcggaagaaaagaaaaacggagtggcgttgtcccgagggtcccgctgcagcttggacccacgttggctgggagcgggacagatgggggcggggtaactgtcagcgccggagctgggtctgggctggcgccaccagagaccaggcggacgcggaggccgcctccccacccgggctgtaagcccacgcctctctcgcaccccggcccgctttgctggttcctgtggggagcgacagagtttggaggagataggggccccggggcctgggccgagcgcgtgggaaggcaaccccgcgctgcagctggcgcgggaggtggggcggcccctccgcgcgctcaggcctctcctcaccgtccgggcccaggaaggagggagccgagggcgctaagggggcgtcctcccgagcgcagctgccgccgcctccccaccagatgtttccttccctggtggatttggctcccctgccgaaccaccagaccgcctgctgcgcgcccccagctccagatttccagtcacactgcgcgggtcgcgccctaacccagctgccggagctctctgggctcccgcacggcggtccgcagcaggtgggaaaccgcccgcgccctctgatcgcccccgcagtgccagtgctctgcgagtccccgcggccgcccccaccagggcaggaggcgcagaacaggctcggcggacctacctgcggagtcacggcgcgggcaccgcgctaggagagttttcaaacggaatcttgctttcgggagagaccgctctatctctctgacttaaaaaaaaaaaaaattctccttccgagctcagcccccaaaaccacaagcttcacttcctgagcgttactgagtcgctcgcatagccct

SEQ ID NO: 641 - DNA, 664 bp, Homo sapiens
  chr1:92951952-92952616
  hyper
tcttggctccagggagacttccgcagcgagagaagccacagattgaggacacagattgactggcgagagaggggtggggggcgccccgctccgaggaccctccccgcccctcaggcctcggtcacccgccccccccacccccgaccccgccgcctcctagggctgcaccacccccgggtcgggaccgtgaatcaccggcccgcggtgccgccggcctggagcccggcgagtggccacggcgtccgcagagcgaaacctgccccgcaggccccgaaatagcttgttgtggaaacacttggggataaatacgcccaacgaggctgaaaataccttgacacccaatccgagaggtttgctcatttcccttcggatttaggtaatggttaaatttggaagaggtgggcgagcgccgagcccccggcggagagggccctggcggcgcgtcccgcgggcgcccggcgggaccggtgggcgcaccctccctgcgcggagctcgccggctctcgaccgggtccgctcagccttcgactaatttccggtggtcggagctgcaaaattaaaggccgcgcgggggcagcgccggcggctgctaggctgactccgccctgccggggcaagccagggagagcgggacctcgcacgcgggctctgccaccgcctgagg

SEQ ID NO: 642 - DNA, 330 bp, Homo sapiens
  chr1:93250728-93251058
  hyper
caggttaggggccgggcgggccggccgagaaaaggagaaggcgaagggattggacggagtgcagaggaggcggggaaatcgctctcgccctccgcctctctttcaaagcaccagccttcagtcctgcaagtcgccgacttccccggccactggaaccgccccttccatgttaaaacggtagaagacacaccccctcgggggcccgaagcgaccccgagcttaggactgcaggcctcgcgctgccgcaccgacgcggagcctgactttcagggccctggcacgcggtgctgacgcgcatgcttcggaaggcagccccgagctcccccagag

SEQ ID NO: 643 - DNA, 30 bp, Homo sapiens
  chr1:93645945-93645975
  hyper
ctccgaaagagaagcgcagttctccaaagg

SEQ ID NO: 644 - DNA, 30 bp, Homo sapiens
  chr1:93646314-93646344
  hyper
ctccgagttgtgtccgaggcttccacgcgc

SEQ ID NO: 645 - DNA, 31 bp, Homo sapiens
  chr1:93913453-93913484
  hyper
cctgcaggaggagactcgaccagcgagaggg

SEQ ID NO: 646 - DNA, 674 bp, Homo sapiens
  chr1:93913791-93914465
  hyper
acagactgaaggacagcggcaccgccagacggccagaaagttccgccatgagctggggcacggagctgtgggtgagtcggggagaggggcgccccgcacggaccccggcccctgagaagcgcgggttgggcgggcgccgcggaccctcggcggtgaaagcgcgctccgccgtcctcggtccggcgctggcggagggtgagggtcccgctcgtctttgtgtgcagactcctcttcccttctcggccgggggtctagggggccgctagtccgtgctcccgcctttgccgccgtggtgcagctcgggcggcgcccgggacggccgggggagcagcccgcgggctcctgcgtgcgccgtgatcccctcttgttccttctccctcctccaccttcacttttcccgacgcctggcttcgcgcccggcggctcctctcttcctttgtatctctcctcccggaggcgggggagggggcccattgtccccaaggggcgctgttcgagggcggggaggggaccggccgcgattcctcgcccgggccaggtccgcggggctagggcgtcgcccgtctggggcggcgccgcccagagccctcgccccaggtatggggacccaggcggctttgttcggagcccggcctcgggccagccaggcccagcccacacgcacatttctctct

SEQ ID NO: 647 - DNA, 50 bp, Homo sapiens
  chr1:93914735-93914785
  hyper
gtgtctggccaaggtacgggcggagggtaataggtcggagaatttgctcc

SEQ ID NO: 648 - DNA, 202 bp, Homo sapiens
  chr1:94312191-94312393
  hyper
cgcgctcgagcgcgcgccctccgaccacatgcacccgcatacgcatgctcccagcgctcccacgcgtgctgacaccctcccggcttccgcccacgcagtcgcgggccccgggcgcgcgggctcggggcagctgcgcggcgtccttggaggcaggtgctggcggcaagacgagctctcggaggatgctgcggcgcggggcgcg

SEQ ID NO: 649 - DNA, 30 bp, Homo sapiens
  chr1:94374253-94374283
  hyper
ggagagagacggagcgacgtcctggccctc

SEQ ID NO: 650 - DNA, 611 bp, Homo sapiens
  chr1:94702466-94703077
  hyper
atagtgatcaggagcacggattccggagcaaaagcgcctgggtttaggtcctgacgctgccaaccactagtctgtgtgcttgggcaggtttttaacctcggtttccccgtgtgaaccgagtcgaacaatcatggagtgttctgaacattaaaagagttaaaatgtgcaaaggcttcagaacagcaggcggacccgttgtacgcgctgtgtgctaactttaattacgatcgtcaccgtctgctcccggccaccgctggcgtcctccccagctcgtccgcgcctccctcgccgggcgcgcccctagccccggccggacccttcccgtggactccagtcctggctcgaggacacccgtccctagcgcagcctgccaccgcttccactcggggccgccccgcgggcctcccggaccctggacggcaattcgcgggcgctcgcgcgggcaaccccagcccggagccacgaccgccgcggccggagcaagcgccacctcctcacactcaccacggcgctccatctcgcgtgccggacgcggacgcccgccccacacctacggccgccgccaccgccgagggctggagctcgctgcccccatcccccacggcctgcgg

SEQ ID NO: 651 - DNA, 425 bp, Homo sapiens
  chr1:94703103-94703528
  hyper
cgcagccgcagccacagccacaggcaccaccaccactgcagccgccaccgcccctgcagctaccgccacggccgcaccgcccgcccgccagccccgccccctggagcccagcccattggcccgcgctcccgggggcggggccggcgaccgcggcaggtacgggaggcaactagctcgcgcgcagaacgcgaccgtcagttgcgcgcggccggacgctgtcccagcatcacgggctgcgtcggctgcccttttggcttgcaggggacaggcagagcgactcagagaaaagtcacctgaggactagatgcggctaatggccagatgagcagctacatttcttatgagacacttctgtggatcgcctttttcctccctcttccaggggttagggcctggggaagggcgccacacgtctgaatgaagaa

SEQ ID NO: 652 - DNA, 287 bp, Homo sapiens
  chr1:94713017-94713304
  hyper
cctgccggaccctggacggcaactagccggcgcccgcgcgggcgaccccagcccggagccaccaccgccgcggccgaagcgagcgccacctcctcacactcaccacggcgctccatcccgcgtcccggacgcggacggccgccccacacctacggccgccgccaccgccgagggctggagctcgccgcccccatcccccacggcccgcagacgcccggccaagtggcagccgcagccacagacaccaccaccaccaccaccacagcggccgccgcctttgcagctac

SEQ ID NO: 653 - DNA, 43 bp, Homo sapiens
  chr1:94884614-94884657
  hyper
gtctaagtcacttggacgaggtttggctcgattcccgactaac

SEQ ID NO: 654 - DNA, 554 bp, Homo sapiens
  chr1:95006962-95007516
  hyper
ccgagtcccgtaggcgcgggggacaacatgggcgccccggggaaccagggcgagcccgctgccagccaggactgtcgcctccctcctgcgtgtggcgcgccccgggcttccaggggctggtgccactcacctgaagcgccggccacctgggcgaagacccagccgagcaggagcgtccgagcgacggcggtctcggggcgcgggacccggggccaggcaggggtctccatgtctaccagttggcggcgagatcgagcgggttccgtggcgcccgtggggctggggaggttgggctgaaggcgccctgggccggccagagggagtgcgagggggtgcggggagctcgcagtcttggggagccggtgccccgcgcgctataaagggccggcggcgcgctctcccgcgcctctgcccgcccccggcgcccgcccccgccgctcctcccgactccccgcccccggcccgggtcacttgccgtcgcggtgggcggcccccggcgagtccacacccctgccccgcctcctcccggtaggaaactccgggaccctgcaagg

SEQ ID NO: 655 - DNA, 30 bp, Homo sapiens
  chr1:95008102-95008132
  hyper
tgggagaattccagcgtgacatctgcagct

SEQ ID NO: 656 - DNA, 472 bp, Homo sapiens
  chr1:95285615-95286087
  hyper
aaggtcgtggcggcgccggctcagctttagtcgtcaaagtgcacatcctgggagccgctgcctcgaggtggttgaggcgagagggcagggaagcgtctgagcctcttcctcccaccagagcaggaccccagctgacagcgggtgagctgggcagaaacccatgccgggaagaggcggacccagtggaccgcagcgcccgcagtcgccgggccaggcgcagaggcgaacgggaggcggcgctgcaccgtgcccgcccctccccggcccggccccggctccagccccagccccagccccagccccggccccggccccggctcgcgggcgctgcgtctccgcgtacaggaggcggcggcggctcccagtcaccggcccccgccggcgagcgcacgatgcactgcctgggcgccgagtacctggtaagcgctcgcagcctcggccctcgggggaggagccccggggaagggtcgag

SEQ ID NO: 657 - DNA, 206 bp, Homo sapiens
  chr1:95391394-95391600
  hyper
gttctgtgcacagttccgcgccgattggctggtctctccccccagaaacccctgatgtcatgggcttggaatgcagggagggaggaaggaaggagaggatttggggagggggacgcctctcatctctttcccaggccaaaagtcctaaagataaacctaacgcattcttgggctcagtggcaaagctgagcgtcaccaaatcccaa

SEQ ID NO: 658 - DNA, 63 bp, Homo sapiens
  chr1:95391895-95391958
  hyper
tcggcgggacattaggcggtctctctccccgtggggaggcgcggagtccgccagcacccgggg

SEQ ID NO: 659 - DNA, 330 bp, Homo sapiens
  chr1:95392189-95392519
  hyper
aagccaggcgggtgcccgggagccggccccgcaagcccggggactggacgcgaccgggacaggcagagacgctcgcgccgcctcgacggcccctctccaggaaaacggtgagccacagcgcgaagagcaaacgaagcacggcccagcgccaggccagcccaagggtgccccgggggcccccgcgcccgcccgagccaggcgtaccttgttcttgacttcggccgagagcccataggaagggcccttgttgaagtgggtcatggtggttcgggcggcgggaagagacagcgctggggtccggggtctctcgcacttcgcttccccgctcct

SEQ ID NO: 660 - DNA, 30 bp, Homo sapiens
  chr1:95392910-95392940
  hyper
cgggctaggcagggcgcctgggggcttccc

SEQ ID NO: 661 - DNA, 205 bp, Homo sapiens
  chr1:95428538-95428743
  hyper
tgccatttcagttcctgttatcgtgctttgaggtgcactgaactgcagcaaacccaggggatccaaggctacgttgaaaagcctttgaccacagtgcagggagcagaagacattaatgacgtgatgtcgacacagcccgcactcaggatcctccaggaaaagaacacagagataaccccggatcgatggtactttttgaaaatgc

SEQ ID NO: 662 - DNA, 76 bp, Homo sapiens
  chr1:95583492-95583568
  hyper
ttcctctcgcgtttctcgggctgcacgattccggctgccctgtctgcctggcggtgcctctcgggtctgagcttaa

SEQ ID NO: 663 - DNA, 30 bp, Homo sapiens
  chr1:95699559-95699589
  hyper
acttctaagggccccgcccgccccgtctgc

SEQ ID NO: 664 - DNA, 30 bp, Homo sapiens
  chr1:95699850-95699880
  hyper
gggaggtgctgagccgctcaggtgactacc

SEQ ID NO: 665 - DNA, 20 bp, Homo sapiens
  chr1:98386546-98386566
  hyper
gccaagtgacagcagccgga

SEQ ID NO: 666 - DNA, 30 bp, Homo sapiens
  chr1:98511016-98511046
  hyper
cgatctggaagttccgcggggacccagccc

SEQ ID NO: 667 - DNA, 72 bp, Homo sapiens
  chr1:98514373-98514445
  hyper
agaggtgtgttttgcgggcagggggctttcagcaccttttgatctctcaaggccaccgcgactgattgacgg

SEQ ID NO: 668 - DNA, 419 bp, Homo sapiens
  chr1:99127041-99127460
  hyper
aaccctttctccaacgtagccggagtccgagagtcccagttccgcccctccagcccgccccaggccaggtggggatgcgcccggcccgggccagcgctggtcccggcagttccgcgtctgcgcagcgggcgaggggctggagcggggccggccggggaggtgcaggagacgtgggagccaatgggcacgctcgggggagccgggctggcggcggcggtggcggccggctgggcgcgcactctcgggatggagggcgagcgccgggcatcgcaggcgccctcctcgggcctcccggccgggggcgccaacggggagagcccggggggcggcgccccctttccgggcagcagtggctcttccgccctgctgcaggcggaggtgctggatctggacgaggacgaggacgacctggaggtgtt

SEQ ID NO: 669 - DNA, 30 bp, Homo sapiens
  chr1:99127692-99127722
  hyper
tttgaccttccgttcggcggggctgtggct

SEQ ID NO: 670 - DNA, 30 bp, Homo sapiens
  chr1:99469804-99469834
  hyper
ctgggggcttccttcgcacccaccctcacg

SEQ ID NO: 671 - DNA, 101 bp, Homo sapiens
  chr1:99470211-99470312
  hyper
cgggcagcaggggcatgcacgcctcccgggccgggccgagccgagccgagcgggcggtcgacgcggtgggccccctccccggtccgccgaggcagccaccg

SEQ ID NO: 672 - DNA, 234 bp, Homo sapiens
  chr1:99470582-99470816
  hyper
cgctgggtcaatcccccaggctagcccggaggaggcgctgcgtgggcggacggggcggcagccggcgggacagcggcacctgtacccctcacagggcggacgctgtggggctggagaagctcctggcgggggtaaaatcaaaagggggggaggggaggcagtagagatggagcttccagaaactcttccgaggcaccagctgagaggtttaagaaacccgcacaacgcctggga

SEQ ID NO: 673 - DNA, 41 bp, Homo sapiens
  chr1:100316317-100316358
  hyper
tacagcatttttatttcggtcttattcgttgtgctcaaagg

SEQ ID NO: 674 - DNA, 42 bp, Homo sapiens
  chr1:100437130-100437172
  hyper
gggattacaggcgtgagccaccgcacccggcccccaatatga

SEQ ID NO: 675 - DNA, 30 bp, Homo sapiens
  chr1:100503349-100503379
  hyper
ttaatagcttaggacgtctgtttccgtgag

SEQ ID NO: 676 - DNA, 30 bp, Homo sapiens
  chr1:100731519-100731549
  hyper
aaagcacaagcctgcgggataactggagga

SEQ ID NO: 677 - DNA, 277 bp, Homo sapiens
  chr1:101004539-101004816
  hyper
cacatccacctcctccaccaccggtggctcgctgctgctgctctgcgaggaagaggagtcgtgggcgggccggcgcatcccggtgtcactcctgtattcgggcctggccatcgggggcacgctggccaacggcatggtcatctatctcgtgtcgtccttccgaaagctgcagaccaccagcaacgccttcatcgtgaacggctgcgccgccgacctcagcgtctgcgccctctggatgccgcaggaggcggtgctcgggctcctgcccaccggctct

SEQ ID NO: 678 - DNA, 915 bp, Homo sapiens
  chr1:101004842-101005757
  hyper
cgctgggggcagctaccgcctgctacggggtgggctgctgggcctcggactcacggtgtccctcctctcccactgcctcgtggccctgaaccgctacctgctcatcacccgggcgcccgccacctaccaggcgctgtaccagaggcgccacacggcgggcatgctggcgctgtcctgggcgctcgccctgggcctcgtgctgctgctcccgccctgggcaccgcggcccggcgccgcgccaccgcgagtccactacccggcgctgctggccgccgcggcgctgctggcgcagacagctctgctgctgcactgctacctgggcatcgtgcgccgcgtgcgtgtcagcgtcaagcgggtcagcgtgctcaacttccacctgctgcaccagttgcccggctgcgccgccgccgccgccgccttcccgggcgcccagcacgcgccgggccccggtggcgccgcgcacccggcgcaggcccagcccctgccgcccgcgctgcacccgcggcgggcacagcggcgtctcagcggcctgtcggtgctgctgctctgctgcgtcttcctgctggccacgcagccactggtgtgggtgagcctggccagcggcttctcgctgccggtgccctggggagtgcaggcggccagctggctcctgtgctgcgccctgtccgcgctcaatccgctgctctacacgtggaggaacgaggagttccgccgctccgtgcgctcagtcctgccgggcgtcggcgacgcggcggccgctgccgttgccgccacagccgtgcccgcagtgtcccaggcgcaactgggcacccgcgccgcgggccagcactggtaacctagccggggcccgagggaagcggagatccccggcttccgacgtccttgggcaccgtcgcctccttccctcctagggca

SEQ ID NO: 679 - DNA, 420 bp, Homo sapiens
  chr1:101702424-101702844
  hyper
gaagaaaccacccagccttggcgcggcgctgggtgacttcgcgtagcaggcagggaactggccgcggcgagcgggactggccattggagtgctccgctgcggagggaggggaccccgactcgagtaagtttgcgagagcactacgcagtcagtcgggggcagcagcaagatgcgaagcgagccgtacagatcccgggctctccgaacgcaacttcgccctgcttgagcgaggtagggggcggcgaatggcgggggtcgcgggcgcggggagcccggttgtggtagggcttaggtgtcagaaacgaatttttaagtcgaacgaggcaaacaaaaacttagaaaacatgcatctccgggcgctgaaaatttgcatctctgggctactaaggagcccatctcgatcagattgttcttgggcac

SEQ ID NO: 680 - DNA, 88 bp, Homo sapiens
  chr1:101703554-101703642
  hyper
ggtggggtgggggggcgcggggggaggcggggagaataagaagaagaaagaaaaggcagtcgcttcacggaggcgctaagctttcctg

SEQ ID NO: 681 - DNA, 263 bp, Homo sapiens
  chr1:101775165-101775428
  hyper
cggcggctgcatcagcgtctcaaattgcgaaaacattttgggctgaagtatttctttgtagcatttcgtggagcccctttcctttgatatacactagccttccgacttccctttgttcttttttcacacgtcaggttttatcgctgacaagctccaacgcgtcaaaggcgttagatctgagggctgcagcagccttcgcggttccgcattgagctccttcctgcagccctctgcggaggtcacggccacgtgtgggcagggaa

SEQ ID NO: 682 - DNA, 122 bp, Homo sapiens
  chr1:102462575-102462697
  hyper
cagagctaggagtccgggagctctagagagtgggttgggctgcagtgggcgctggccgcggtgctgaagcgcctccaacccgcgcgccccagtttaccctctcccccgctgctatatagcta

SEQ ID NO: 683 - DNA, 139 bp, Homo sapiens
  chr1:103573575-103573714
  hyper
aagcagtaggaccgacggcaatctcccacctccccaaatccattttttcttacctcctctgacctctctagcttggaagaggaaggtcaatgcgagggttgttacggtgaaatcccagagccaccgtttcgttttccac

SEQ ID NO: 684 - DNA, 113 bp, Homo sapiens
  chr1:103573974-103574087
  hyper
gatccttcctctgccgggccctgccttcagaatgaaggcagatgaggggcttccaccaacaagctgagagtactgtgtgcccctaaaggcttcatgccgtcagtgggctggac

SEQ ID NO: 685 - DNA, 246 bp, Homo sapiens
  chr1:104068473-104068719
  hyper
taaatcattagcaccgcgcccttccccgaagagtcttcgaagggttgccgcttttcggtggcgcagttctcgcgagaaggtgactttctttctcggtatttcctggtttccagaatccttagcgcgaggcggaaaaaatatttctcccagcttgtgttgatgccgcgattttgactgagacttcttcccacgatttctgtttttgcttctccaaggaaaatggcagctcccgagcagccgcttgcg

SEQ ID NO: 686 - DNA, 1101 bp, Homo sapiens
  chr1:107682706-107683807
  hyper
gttgcctcagcgccccgaggtcgtggagcggcagcagctgcagccggagcagcaccagcaacagcaacagcgagcgggacggagttaggaccgctcggagcgcacaggtctcgaggtagtataaggtttgctatccttccacttgctggcagttgcagaagaagatctgctttttaagtgaaacgtacatgccacccctccgagggctgcggcttccccgggcttgcttctttgccgctcctctttccggctctcgcgctcactctttaattggcactggcccctaagtttgccaggagctcgctgcccgctcggagcagggtcccggccgggagccgctggtgggggcggggagtccgggagccgcaatccagaagcgtcgtgggccatgtatatttcatcaaacggactttgggtgcgtcgcgtctcactgccatcagtgctatgtgcagtgacatttctgacttgagtggaggaatgcgcgaaggaaacccgggcgaaattggtattagaggatcttcttggcgccaatgctaattgtcctgatttatgccccttctgactaagctcaacgtcttcatctgaaataaaatgaaagcggtgccaagcggcatagaaccgcctggccgctggttctgatccccgggaaccagaaaatcgtcctgcggcttgaaaaaaaaaaaaagaggaaaaaaaaaagaaatagaaatagaaaaaagaaaaaatatccctcagtaaaagtttaaggcgagaagtgtcagaggcagcggagcgaggaggcgcggaggagagccggcgagcaggggactgggctggcacgacctccgaaggctgagatctcattattaatatcactatatttttggagggagaggcacctttctcatcctctcttcctctccgcccacccttactccctccccctcatctacctgtcaaagtcactgatcttttgcatttcggaagaggacgtcaacgggaaggaattccccctctgggtgcgggctccgagagggggcgacttgcaggaggctccccccgggggcggaggcgaaggtaattaagcggcggggagtggcgggccggcgctgggttctcggt

SEQ ID NO: 687 - DNA, 30 bp, Homo sapiens
  chr1:107684240-107684270
  hyper
ccgaggaggcagcgcgcggagccctacgcg

SEQ ID NO: 688 - DNA, 30 bp, Homo sapiens
  chr1:108506276-108506306
  hyper
tagctgaggctctgcgtcatagaggattag

SEQ ID NO: 689 - DNA, 381 bp, Homo sapiens
  chr1:108506695-108507076
  hyper
taaacgggagcttgccggctggccaccagctcaggggccctgggggcggcctccgggttctgctccctgttcttccctttgaccaatgtcactcctggacagataacgggaccaaacgcccttcacttcctcgagtcctcatgtatgtcatggttcctcttttaggaaaacatgagtacaagacgcaaagcaaaagaagagactaaaggcaaattaccccatcacctcgtttcgtccctccccttcgttattatagaagagcttgatcaaattccctttgtcgcgccacacacacgcagagtaggtgaagggcaccctaagacaacttatttctttcccgcctcacagaaagcctttacgaaatcctcacaccatctccgg

SEQ ID NO: 690 - DNA, 227 bp, Homo sapiens
  chr1:108507148-108507375
  hyper
cgaagtggtcccaaagcagaaggctgggaagcagggcaagctcagcgcacctagacgtttgcatttacacaaagaaattagccgcatgattaatgggagctgccggctggaggcggggcgcccgtgccggcctcctcacctgggacatctgcggcctcaggttgatctccttcaggttgatggagtgcgcccggaggttgttaagcagctggcagagcaggactcca

SEQ ID NO: 691 - DNA, 112 bp, Homo sapiens
  chr1:108507494-108507606
  hyper
cgacggctccgggacgcggctgggccggggcgggcggcaaggatgcggccgccgccgccgccgccgcggttcctccgcgccccgccgacgccaacagccgccggccctttcc

SEQ ID NO: 692 - DNA, 872 bp, Homo sapiens
  chr1:108507657-108508529
  hyper
cgctaggctcggctccggtcccggcccgggtgcgccgcgacccggccgccgctgcagcgagtcccgcgcgctctccgtgcgccccggccggctcggcggcggctgccgcgcacaggcttccgactccagcgcccggcccgccactgagcatgcccagcacgccggccggtctcgctgcggtccgcaagtccccagacgcgcgggtgggagcgcgccggcggccggggctggggtctgtggccgagggcggggcgcgggggaggggccggcggaggggggcggcggccagaaaggggatcccgcgcccccgcctgcagccttgcggggctcacgcagcccccggcgtcctggggtcttctctcggggcggcttcccggctttgcggggagtgtggctgaatactgtaatacgatggggtcccccaggaccccctaaacaacaaatgctcaaaggagcgacggattaattggggcacccagactccccagagcaatgaaaaaagtgcctagagcatcagtagagcacggcgctgaaagttttagagatcgtcgccccctcgccccttgcagctctatcccctccattctctatagctgattcctcagcctattcctcctagttgcccctagtggtgttttggcaccctcaaagtgagtgagagtgcgtgtgtggagacgcctgcggaaaccgccccgatccctgagcctatttcctcgcgaggtgattttcacttggagctggtttgcccctgcactgtcaggctcggaactgtttgccgttgctgttctggcccttttgctgaccccacaaaaacctgcttgagaaaggcctgtgccacggtgctagactgcgcatgcgtcggcgactggcgg

SEQ ID NO: 693 - DNA, 38 bp, Homo sapiens
  chr1:108508549-108508587
  hyper
cgttagccctgggcagctcctgccgggctgttctggga

SEQ ID NO: 694 - DNA, 30 bp, Homo sapiens
  chr1:108742392-108742422
  hyper
tctgttaccggggtcgccggtcgcggcccc

SEQ ID NO: 695 - DNA, 656 bp, Homo sapiens
  chr1:109203572-109204228
  hyper
aaccctgctcactgaaaccaacgcttctgtctttgtacgggccgtcgcttccatcatcctgcggtaagcagcatgcccaaccgaaaaaacaaagctcgtcgcggagccgccagcgtcctcaactcagcgccgccctgacgcccgcgcacgcacggcctcgctgcgtgacgctaccgccgcggctacgccggcgcccgcacccgcgcctcggcctccccgcggggctcgccaacctcgtgcgctctcacggtcggccttgggccccgggagcctcatggtgcgccgagctccgtccctctaggctctcagttccaaggcgtcggttttgcgtctcgtaacggccgctgtggcgcatgcccagaagccattttcaaggtcctcttccgaaccttggcgaggacccctgcgcctgccgcgccgttgaccccgctagcgtgcggctgcgacgcggcacggtacggcagctgttggcgaaggcccccaactccgagcgcgtccgcagaccgcgagccggaaggcggcttgggcggctgttgagttcgtggcgctcccgaggcgtggcaaaggcctaaaaacggtcctggccagcggaaggcggcaagaggagcagcaaggctccacgcgaggcggccggcggctggagtcccagtcagcct

SEQ ID NO: 696 - DNA, 30 bp, Homo sapiens
  chr1:109257153-109257183
  hyper
tcttattcttgagagatctttaggattagc

SEQ ID NO: 697 - DNA, 31 bp, Homo sapiens
  chr1:109420435-109420466
  hyper
atctatagaataccttcgaataaaaaaaaat

SEQ ID NO: 698 - DNA, 31 bp, Homo sapiens
  chr1:109633007-109633038
  hyper
agctcaagggcagtcacggaggccgcaggtg

SEQ ID NO: 699 - DNA, 666 bp, Homo sapiens
  chr1:109656411-109657077
  hyper
gcttccactgtgttcttcacacgagccccgggcctgcctgttgggccggttgcgcaccccgggcgcgcgctctcccgcgcccacgccgcgcgcaccagcggcggcggctgccatggcgacccgcaggtgagctgcagaggcgcgcgtggtccctgccccacccgcgcggagccagagaggaggcggttgtcaaggcgacgtgggtaggaggagaggacagagggaggaggaaggatgggcggtgttggcgtagccgcagggaggtgactgaagcgagcctggcctcttgcatcctccgcctgtgtacctccctcccctttttttccgccttctgccagcagaagcagcagccgcagcacctgagccgctactgccgctcactcaggacaacgctatggctgagcctgggcacagccaccatctctccgccagagtcaggggaagaactgagaggcgcataccccggctgtggcggctgctgctctgggctgggaccgccttccaggtgacccagggaacgggaccggagcttcatgcctgcaaagaggtactgccgcccccctacccgatcccgctttggtcacaaaagtcttggatccaggcggagaccttggggacccaggcgcagagagtttcagacgccacggagtttagatttctttgggg

SEQ ID NO: 700 - DNA, 287 bp, Homo sapiens
  chr1:109940218-109940505
  hyper
ttgttggccagcttggcgacgaagtcccggacccggccgcactcctcgtcctcgcccggcgcgctgcgacgccaacggccgccgcggggaaacgcgcccccggctgcggccgcccgcagcccccagctcaccccgatggggccagaccagcgcggcagcggcgcagcgggcggcggcggcgcgtccagccggtcctggctgagggtcgacggcggcagcagctgcaggaggaggaggaggccgaggccatggggccagcgcgagaggccgtccgcagctccccaggg

SEQ ID NO: 701 - DNA, 31 bp, Homo sapiens
  chr1:109941101-109941132
  hyper
tgcaagaaggtgaatgcgaactgatgtgggc

SEQ ID NO: 702 - DNA, 31 bp, Homo sapiens
  chr1:110052254-110052285
  hyper
tcgctgcctccaggtccgcaggcctggcgcg

SEQ ID NO: 703 - DNA, 188 bp, Homo sapiens
  chr1:110185990-110186178
  hyper
actgtggtcagagccgtgccccttgcaggtgggtagcgctgagagcagagcagcgcccgcgggactggcctgaggatcccgcaggcaggagggaccccgcgggcctttccctacctgggaggtgcacggttggccaccagggcgcgctgctggactctccccagaaatcgggcggaggtttaggcctc

SEQ ID NO: 704 - DNA, 141 bp, Homo sapiens
  chr1:110453159-110453300
  hyper
cggtccgcagagggcgcggggaaggcagggtggggacgcggtggagcccgcgctcgtttgctgaaggcttggaagtgcagcgcagaagacagagggtgactaggaagacgcgcgagcggggctggccggccggcgggtggg

SEQ ID NO: 705 - DNA, 372 bp, Homo sapiens
  chr1:110453530-110453902
  hyper
ccgcatcccaggacagcggtgcggccctcggccggggcgcccactccgcagcagccagcgagcgagcgagcgagcgagggcggccgacgcgcccggccgggacccagctgcccgtatgaccgcgccgggcgccgccgggcgctgccctcccacggtaagcgacggccgcggcgctgggcccgggacgggctggggcgggggctcggcggccaggcggccgggagcggcccctcggagccgacagcctgggcgcgccggctgcactggcccggcgttcccgccgcggacgaaccgcctttgcgcacggactgggccctggcgccagggcggaggccggtggcggccctgcagctgcaccgggactgccaggct

SEQ ID NO: 706 - DNA, 139 bp, Homo sapiens
  chr1:110610758-110610897
  hyper
caggcgggagaagagcgaggtgcgccaggctctggggcgcgcaactgcccagcctcgtgaaagatcgcgccgcagatggggcgcagctgcgcgctcactcgtgtggactggaaacgctccgagccggttattttaaaaa

SEQ ID NO: 707 - DNA, 231 bp, Homo sapiens
  chr1:110611045-110611276
  hyper
cgttgaacaccggcaagagcgccagaggctagcggccgccaggatctctaccaggctctgctcgcacccgcctgcctccctttcgtttggcctgtcctccgttcaactgaaatcgttaattttcttacccccttgttctcattttgatatattctacgctttaaacatgctccgttttcttttgtttagtctgctccctccctctttgtcctttcccccttctctagttat

SEQ ID NO: 708 - DNA, 79 bp, Homo sapiens
  chr1:110611434-110611513
  hyper
cgctttctttggttttctttctcggtatttcgttgtcaaggccacccttgccgtcggatcccggggtgctgggtttctc

SEQ ID NO: 709 - DNA, 140 bp, Homo sapiens
  chr1:110611653-110611793
  hyper
gctgagccaggccgggtacctgtctctggcggtgctcaccgcactgcgcggcctctgccgtctggctgggatcagaggagccaggccaactgcttctcattaagtcccaactgtggtttttatcaggaaagcctctttca

SEQ ID NO: 710 - DNA, 823 bp, Homo sapiens
  chr1:110626790-110627613
  hyper
ccctcgcgtggccgggcgcagatccccgtgcacgggtcctccgcacacccttgccagcccgcagggattgttcgccgcgttggtgactccttcccaaaatgggaataaaagatcgaaatagctagtaagcatgcaaagtttattgtcaacctcaagtctctataaaaccagatcaaagggaacaggcgtttggtttcttcccagatcgctggggggcctcggggctcaggaagccccaggagtccagcccgctgccgctcactgcgctcttctctccagccgggtccaagggctcgagcatcgcaacctgcggcctgagttggccccgggcgcacgcgagggaaatggatgcagtgcccgtgaacttggggcctgaataattgataacaacccgctgggtgcccgtcgcgcggccaggcctgcggggagcggagccggaggcagcaagcaaaggaaacgcacgagccgggagcgcgggcgcgcggggccacgaaagaccgaccgactgtccgacgggcggtgggacaagaggacggatgctgtgggggggccccggaacccgccgccacaactcgcggcccacgcgggtcgcagccgccagccgtagggagctgccgagcagcgacgttccgcattccatcgggttcccgcgccctactgggcttgtgcggcgcagtgcctgcgtgtgctttcgttttctcaaggccattctgataaaacatacgtgctggttccctttcttttctcagaatgattcttcaaggcgaatgactcgaaatggagatttcttctaacaccgcgtgatcaccgacaacttttgcag

SEQ ID NO: 711 - DNA, 478 bp, Homo sapiens
  chr1:110672762-110673240
  hyper
ccttcccggctcccacgcctcttgctggggagggtggctcatttttcacgggtgccgcgtgactttccagactgtattttcagcctcggtttgacgtcaggctctcacggtcccaaaggatgggctttgtacatttccaggccgcagaccggagcctcccatccctttgggcctcttgggcggtccctacggccacctcccgcagctccctgggggcgggggaccgctggatgagggaggaggggaggtactggggggaaagggcggttggcgggaaggaagtccaggtgagacaggcccgcgttgggactatcgtgcgcggtatgtcggccggcaggtggggctggtccgggcgcaggaggcggtagagcaggagcagcagggggagccaggctggccgagctggggggtgagcacgtttgtctcaggcagctcatcgcctgacacccccgggaacgggctctgccccaaggcctaa

SEQ ID NO: 712 - DNA, 529 bp, Homo sapiens
  chr1:110692967-110693496
  hyper
cccccttgcaactccctctcccgccccacgcccaccctctccgcctacgtcggccatcagagcctcgctcgctgcccgagagcctcgcattgacgccggcccgcgcgtgagtcaagcctgcgtcacggcgccccgccgccagggtggcctttcggaaagcgagggaacagtgcgcgcagcgctccgcccagctccgttctgctccgcagagccggcgctgccagggcgcagggagggcggcactcggccccagtcttcgcaatcccgcgcgctctctccgccgtgggacctgggtccccgcgccgctcccctgagccccgagcgcgcggcgggcgggagccaggttgggactggtggtgaggcagggagtgaggagcgagcggagtcgcgtgcgccggcgcgcagctccgggtcgccccagccccagccgggggcctgtggcccgggggaggagctgtgcgtccgcgacccgtcggggatcgcagctgctcggccggagtgcacgggccgagtctgcgcgactacccac

SEQ ID NO: 713 - DNA, 121 bp, Homo sapiens
  chr1:110693736-110693857
  hyper
cgtacgcacgggttggacaccgggcttcagcttctggtgctcagaagggcccaagaactccggaggaaattgggcttagctgcggaggcaagcgcccgcggagaaccggagggggcctgtc

SEQ ID NO: 714 - DNA, 384 bp, Homo sapiens
  chr1:110753509-110753893
  hyper
tggggggaagaggccacatgccgccgccgccgcctcgtgttgaccgcaagcagcccgggcccacggagctccggctgccgtgagagtgtcggcctggccccggcagccgctcggaggacttgttgctgctgcgctgccgccgctgcggggaagccggctattccggggcttggtgcggtcttggagccggagggtggcccgtgtgagcgcgagcgccccggaccttcgcggtgcgcgtggactgtgcgcttcctcgtctttggtcggggtgaaggcgggggcgtgtccccggcccagagcgtttgtgtgtcccgtcgtagcgggggaccgcgtgtgtgcttgcttctacttccccgggtcctccctctctgcgcctccctctct

SEQ ID NO: 715 - DNA, 399 bp, Homo sapiens
  chr1:110753957-110754356
  hyper
cgtcctagggggataggcaggggcaagcccaagccgcagagggggccgccaccgcctcctgcctcctcttcgtctcctccccctcccccgtctgacgctgcctcctcgggaagggtgtttggagggcagcggccgccccaagccggagccccgcagcgcttcttatgatcagctcggtgtgtgtctcctcctaccgcgggcgcaagtcggggaacaagcctccgtccaaaacatgtctgaaggaggagatggccaagggcgaggcgtcggagaagatcatcatcaacgtgggcggcacgcgacatgagacctaccgcagcaccctgcgcaccctaccgggaacccgcctcgcctggctggccgaccccgacggcgggggccggcccgagaccgatggcg

SEQ ID NO: 716 - DNA, 991 bp, Homo sapiens
  chr1:111149037-111150028
  hyper
gaggaagccggcttccggactggccccctgccgacccaatcccgccggccccagggcggggaggggtctgggccctctccccatcgccccgggctccggccgggattccgttcggcgcactcagcgctcgcctccgcgcagaggaccagaccctcccgctggccgcggccgctagcgccaccttaaccccctcctgcccgcgcggtcggctcctgctgcgggcccaagcgcagttcagctcttaagcccccggcgtccagccgagggaccgccgaggctcagtgtccaacccaaaatcccggaacctgatctctgggggtggggagtagcctgcgccaggctgccgccccagatctcagcttccttttaagcgcgggggctcggcggcagcccacggccccagcgaaggggaaagccctctctgcagcaaagccgtttgttattctgtgccgaagaggcgaatgcagcccggccgtcccaagtggttcaggtcctaccaacccgcgctatttaccagacatggttatgctgccagctgcacttcccaccacccaccagctcctctccgtgccctccgccccgcgccacgcaaaccccagagggtcccgagcccattctgtgcactcttcttgagcagggtgcaagttccccttgatctccccggtctgggacctgccgagcagacggcagtggtcggcaagggcttgccgccgcggactcagcccaagcctgctgcgctgcaggctgcgccgccgggtgccccgcagcccctctgggcgccgcagccgggcagggaaggcagcacgcgccgcgcaacgccccgacacggatttacccttccggatgggcaccggggcctccatgttcctaggttacggccagcgccggcagaaccccggcagcgggcggcggcggggtgcgggcggccagccgggagccggctctgcagtcccgcgggcggcgcgtacggagctcccggccgccgcccgca

SEQ ID NO: 717 - DNA, 238 bp, Homo sapiens
  chr1:111216734-111216972
  hyper
ccggcccggagctctcggggtactcgaagagcagccacacctggcgctggaagtcgcggcggggcaagggccgctcctcctcccgcaggaagccctcgtcctcgcggaacttctccatggcctcctcgcccagctggtagaagcggatctcctcggagaaaatgtcgatgggcacgttgaccggccggcggatgcggcccccggactgatagtagtagaggatggcgtcgaagctggg

SEQ ID NO: 718 - DNA, 697 bp, Homo sapiens
  chr1:111217194-111217891
  hyper
gccacagccgccttgaggcggggcccctccaccatcggccacctccggctccagcaggtggtccccgggcaccacggtcatgtcgggcggcagctcgcggcctgcggcgggctccgcgtagccgtggttcaccagcgtgtgggcaccgccgctgctcgctgggcgctgaggagggtgggcgcggtggcgggctgagggcggcggcggcgagcgcagaaggctgaggcgctcgtccatgcggcggggaagaggcggcagcggtgaggccaggtcgctcctcctcgcgctccccgccctttcgccgcctccgcccccgagccgagcccaccgcctgttgcagccaaagccgcgatgctctgtctgggtctggcgcggtcagccgggctcccgcacggggacgcctcctccctccttctcgcgctctccgccccctcccctgcggggcgcgcgcccgcctccgcgtccccttaggattcccgcccaccgcgcgggcgcgcgtcccgctctcgggggcagccgccgggcctgcatttcttgcagccctcaaggcccctcggtgtcagcgaaagagccctcatgttgtacctcggcgccccgcgggaatgcccacccagcagagccggcccacggggagtcaggctgccggcccgggcccctaggctccgcccgcttctggtcagcgcccctcgcccccggc

SEQ ID NO: 719 - DNA, 56 bp, Homo sapiens
  chr1:111217923-111217979
  hyper
cggcccgtgggccgggagagctcccgccgcggccccgcgggcgccggccccctggc

SEQ ID NO: 720 - DNA, 30 bp, Homo sapiens
  chr1:111289424-111289454
  hyper
attccgtccccaagccgtggtcaacttcta

SEQ ID NO: 721 - DNA, 880 bp, Homo sapiens
  chr1:111506091-111506971
  hyper
cgccgcggagacaagcgcttcccgcctgggtggcgcactctgcgggctccaactcctctcaactacacagcgtccggaaacgacggccgactccacatccctaagacggacagaggggcagccgtggggaggattcgaaaccggtacttaccaacgcgaggcgttgcctgaattttcctctgcgggtttcaggaagaccctccgtaggttatttgacattttagtggggagaaaggggacacctcatccagaaaagtgggaagcgtggggccgagtttcccaatggggcgagaaccagagcgagggaatgttgggctggagttgcccacagcaactgtgaggggttcgaccttaacggagggcgacagcgggctctcgagagggtgtatccccaggcttcgggacgaggtcgcgcaccgcgcagaaaccggaaggctcctggcggtggactgcgccctcacagccctacgctgagagagaatcggcgtgagtctccgccctcagagcctacgacaactctccagactccgccggagcaggcgcagggggcgtggccttggtggcaccacccccaacagagcctggtcagtgctgaagactgcgtcagtctggctctgccgccccgcccactgaagccgatagctggagcaaagctcggtcgggcgtcttccggggtcgtcacgtccggttgccaaggtgactggctcgctaaagcccaacccttatgatgcaatccaatggcaagtgatatttgctatcttttcttccggatcaaggaacaaatcgcaaaagaaagctctcccgacacctacgcaaaataaaatgtttccggggtcaatcataaattttctgcttctgtgctcgccgctagcgtacgttt

SEQ ID NO: 722 - DNA, 30 bp, Homo sapiens
  chr1:111683411-111683441
  hyper
ttgtggctgggacgcgcttctggtcagcaa

SEQ ID NO: 723 - DNA, 365 bp, Homo sapiens
  chr1:111746974-111747339
  hyper
tggcccctggagtgcccggctcccgctcccagctccgcgctggccccgcccccctatccttgacctccgcgggtccgacactttcactttcacgcggggggaggcctaggggacaggttcggggcggcgcggcgcaccttccggactccggcccaacccccgggcgcacctgggcgggcccgctctgccctcgccctgggcagggcagcgtggggtggaagagggcgctcgacgcgcgtccgggactgggcggcgccacctcgttcccaccctccgtggggctcccggggaggcttgacttagcgaacaccctgcagtccgcaaaagcgcatgtcctggctgaaatcaccgtcttccaggtggcc

SEQ ID NO: 724 - DNA, 30 bp, Homo sapiens
  chr1:112532951-112532981
  hyper
gcggagtgtaccgacgcgggtgtgagcgcg

SEQ ID NO: 725 - DNA, 36 bp, Homo sapiens
  chr1:112938561-112938597
  hyper
ggaaagttgcagaccccgagccgggaggggcgcgag

SEQ ID NO: 726 - DNA, 14 bp, Homo sapiens
  chr1:113051670-113051684
  hyper
gttcggcacgccgt

SEQ ID NO: 727 - DNA, 161 bp, Homo sapiens
  chr1:113249255-113249416
  hyper
cccaatggtcacatcccgcccctattcccgccatacctccctcctggcctggaggaattcccaccccatcccactctaggtcccctgcggccgcccaccctgggggctggggcgtctgagttgaagttccctcgcccctcgcccggcggggcaggttccgg

SEQ ID NO: 728 - DNA, 446 bp, Homo sapiens
  chr1:113256959-113257405
  hyper
gccagccggccgctccgggcagggggtccgcttctttgccaggccagcacgagttggcaggctgaagggcatctaaatgggaccctcctctaccccgggcgtccccctccccgctcctggggaagctggcggcctcctggtgtcgcgggctatttctgggtgtggagggggaggggaactacggtaagagggacagggaactggggcgctggagccgggaagcgggtgagcgagtcttcccaaccgctatgtcccctattaaaaagaaccccgctccttcgtgaaaccccttttcccttagcctttaagctgccgggccgcgacggggaactggccaactcatccttcgccgggctctccgccctccgggctctggggcagaacagggtcctgaggcggcgtgggcgagggcagtcaatgagcgggaaggacgtgaagaaggtgac

SEQ ID NO: 729 - DNA, 30 bp, Homo sapiens
  chr1:113258351-113258381
  hyper
aggcgcttgggagccgctgggtatgaggcg

SEQ ID NO: 730 - DNA, 426 bp, Homo sapiens
  chr1:113497848-113498274
  hyper
caaagtaataaaatgttaaaacgcatgctggaaaaaaaaaaagacgtacttggaacaaaaaacttgcatcggaccaagtgtaacgctatcctccagatttctctcaacagggccgccttaagtccatgagtagaagggcgctgcggcggacgctggcagccacaggttgaatgacaaagagcccccgtcagcaccactcccaggagtctgcgggctgccccgtcccctccgcaaagtctactcgaaccctgcagtcacgccttggctgtggggaatgcggctctccgcaccactctcgcaagtcaccaggtggggcaaggatcggcgggccaagaaggttggggcggacaatgtcacgaatcataaataacttctgccccgagtcccttcccttggggcagaagcggccaggagagtctggaggta

SEQ ID NO: 731 - DNA, 30 bp, Homo sapiens
  chr1:113498746-113498776
  hyper
ttcgctcgctgcctcgtttgcttgttccag

SEQ ID NO: 732 - DNA, 706 bp, Homo sapiens
  chr1:113932572-113933278
  hyper
aaaggccccggaacctcggccggctcaggactccgcacgttgtcttccaatctaagcacaccggcccctctctgcgccccgcacaggctcagaggctccgcccgcgtctccgcctaactcgccggccacgcccccacttcggggagctcggtccctctcggattcgagttttcctcggctccagccgccgcgcagagggcctctcccggccctgcgacctacagccccttccactcccctgcccctcctctgcgccctccctcactctccaaacttcttttttccaccctctctaaacttcagtcattctagtgcccgcctcctccactcgcaccgaccaaccagtggtccccattctcgttggcggtccgcctcctgcccgccgggggccaatccctggcgcgagagtccagggccggggctcgttcccaagcgcccagcctgtgacggcagcgcgccgggcgccgcgcggcgggagggggcggggctctggatgagggatgggcgagggccgggggaagggaaaagggaggaggaggaggttgcggctggtttgaaagcggcagtttcctggcagcttgggcaggcgttggtctccgcgctacagctccgcagcggccacgatcgatcccgcgacgggtctacgcgcgcttctgcgcgccccccacggatttttcccgttcccggctcttcccccttcacctcc

SEQ ID NO: 733 - DNA, 767 bp, Homo sapiens
  chr1:113933305-113934072
  hyper
cgctcgggcgctgagcccagggaccagccggcggcagtgaccccgcccgaagccccttctggaacctcctggggacaattcccttttcctttcttcagcctaacccgcggtggccctcgcggagtccggtcagccccggggagcgcagccgggaggggcgtccaaggggcgtctcgcgtctgggaacggccgggcccccagcgggctgtggtcgcggggtgggggccggagcggcgaggccccccttaccgggctgcgcgggccgcccagggcccccgggctgagacggggccggagcggcgccccggccgcccgcgcggggtctcccccatggtgcagcggggttcgggatgtcgaagacgctgaagaagaagaagcactggctcagcaaggtgcaggagtgcgccgtgtcctgggccgggcccccgggcgacttcggcgcggagatccgcggtggcgcggagcgtggcgagttcccctacctggggcggctccgcgaggagcccggcgggggcacctgctgcgtcgtctcgggcaaggcgcccagcccaggcgatgtgctgctggaggtaaacgggacgcctgtcagcgggctcaccaaccgggacaccctggctgtcatccgccacttccgcgagcccatccgtctcaagactgtgaaaccaggtacgccggccctgcgtatctgtctcggggtgttggggagaggggcttcagggtgggcgtcctgggagcggcggcacctccccaccgcgtattgtcccggg

SEQ ID NO: 734 - DNA, 30 bp, Homo sapiens
  chr1:114354673-114354703
  hyper
gttggcggctgcgacgccgccggtgagggg

SEQ ID NO: 735 - DNA, 30 bp, Homo sapiens
  chr1:114355284-114355314
  hyper
agagtctggcggcgcgttcccattatcatc

SEQ ID NO: 736 - DNA, 224 bp, Homo sapiens
  chr1:114695512-114695736
  hyper
cgccagctcagtcgcgcaccggccccgagtccgagtccgagagggacggagggagcgagttataggggcgagagggggtgggggaaggacgccgcaacaccctcataccctcccccaccccgccccctgtcccccgccccccagcggagacgcggaaaaccactcgcagccggagagacacccggacacaaagacctcgtgccagccgcagacccaagtttctc

SEQ ID NO: 737 - DNA, 206 bp, Homo sapiens
  chr1:114695799-114696005
  hyper
cgcacggacccggggacctcgacactcgctaggaggcaagccctattcctcagccgggcgcccctcgtctcccgctctctccatggacccctctcctggcaaatcgcccgcagagcgagcttggagatgcgagggaaactgaagccccaagggtgccccgtcctgggagcctggctgtctgcggggtcccccgcattccgcagtag

SEQ ID NO: 738 - DNA, 114 bp, Homo sapiens
  chr1:114696349-114696463
  hyper
cgcctcctggcaccgaggcccgccggccccccacactccgctcatgccctagacacccaggcttgccgagcagcagctcgaacccgcgccccggccgcactggggcggggcacg

SEQ ID NO: 739 - DNA, 116 bp, Homo sapiens
  chr1:114696540-114696656
  hyper
cgcccctcacgtggcatcccgcggcagctggcgagtctggcgcctcgcggccgccccctctacactcagggactggcctgagtccggggggtgggggtttcgaggcgggaagccgg

SEQ ID NO: 740 - DNA, 30 bp, Homo sapiens
  chr1:114697098-114697128
  hyper
tctctccatggcaacgggagggaaaagttt

SEQ ID NO: 741 - DNA, 31 bp, Homo sapiens
  chr1:114697994-114698025
  hyper
gcagacacgacgcaggcgatactgtgcaatc

SEQ ID NO: 742 - DNA, 79 bp, Homo sapiens
  chr1:115124343-115124422
  hyper
tttgaaggcgggtccgcccggtatctagaaattgccgggctggtttgttttgggcggacgtgacgtaacgtcttggctt

SEQ ID NO: 743 - DNA, 46 bp, Homo sapiens
  chr1:115213228-115213274
  hyper
cacacatgcctaagcgctccgcctgcaacacgctcttgcttaggta

SEQ ID NO: 744 - DNA, 30 bp, Homo sapiens
  chr1:115252199-115252229
  hyper
ttggctgaggtttcaatgaatggaatcccg

SEQ ID NO: 745 - DNA, 72 bp, Homo sapiens
  chr1:115256505-115256577
  hyper
ctctcatggcactgtactcttcttgtccagctgtatccagtatgtccaacaaacaggtttcaccatctataa

SEQ ID NO: 746 - DNA, 95 bp, Homo sapiens
  chr1:115258667-115258762
  hyper
cacctctatggtgggatcatattcatctacaaagtggttctggattagctggattgtcagtgcgcttttcccaacaccacctgctccaaccacca

SEQ ID NO: 747 - DNA, 196 bp, Homo sapiens
  chr1:115631841-115632037
  hyper
ccttctcctcgcctccgcgtttgagcacccagccctccccacgagcgcgactcggacgccgcagtcagcagctcggggaccccggccccgcgcccgccacccggccccctgccctgaccggccctcccggctcctggtctcacccagaagagcaggttgaagccaagcagcaggtacttgatgcaccgcaggcccc

SEQ ID NO: 748 - DNA, 393 bp, Homo sapiens
  chr1:115632246-115632639
  hyper
ggagatcgagcagcccgagggagcacgttcgctcttctcccggacccagggaccaccttccttccctccagtgggcgcaccgccgccggctatcggagcacctgcagggcgggagcgcccaccggggactggggacccatttaatcagcgccctgtgcggagaccggtttgaggcccgggcgatgcttgagggataagcacttggtctcgtggctatggaaatctaggaaggtgacctcgggtagaagagctaagtggggtcggaggttgccccgaagctggcaggaccagtcgcggggcacctgactgagtgtccagggctgcggctccgcggcgcggagcaagcacacaagcagcttctaggggaccctccctccggcccctcccccctcc

SEQ ID NO: 749 - DNA, 5 bp, Homo sapiens
  chr1:115632692-115632697
  hyper
cgccc

SEQ ID NO: 750 - DNA, 648 bp, Homo sapiens
  chr1:115880146-115880794
  hyper
cctctacctgaggttgtccaacgcggctccgtggagggccccggtacgccggacggaccccggcgttggctcgcagacttcctgcgttaacccccggggccctcagtcacgactcccagcccttccgagacgcgctgagggaactgccccaggtctagcgcgccccgttccgctcctccccctacctgggggccgcgcagcactttccctactcggcgctcacctcagccagcgcgctctgcgctccccccgcggtgctggccgccactcctcccgccctggcgcgccagctgccggcgcatccctctccgcgcccattcgctctccctcacttgcgcgttatccacttctagccctcgagctagaccctggcatggccgtgggcttctgcaggcgccagggctgctccctggactgcaggccatcctgggactagggactccacgaccagaactaacgctgttccctcggtccgactcgtcctcccgcgagggtcccgcgcccccacacccactcgggacatttctcagggctgctcttcggcctgcgggagcctcgggggtaaccagagagctcgccagaccggtatccttgcaaactctcccgcgaagcccagccacccctgcccgcgcccgcgctgcgcccctc

SEQ ID NO: 751 - DNA, 8 bp, Homo sapiens
  chr1:115880872-115880880
  hyper
cgagctgc

SEQ ID NO: 752 - DNA, 1112 bp, Homo sapiens
  chr1:116184461-116185573
  hyper
tccgctgcaggtgggccggccccgcggcggggccggcagcgctagctgttcttggctcgcggccgcgccgggctcgcagggctgggctcgggctgcggggcggcgccgggacaggaagcggaaagcagcagtgcagcggcggcggcggcggggctctgcctctccaggagcccagcgcaggccgcagagccggggccgctgtgagccgagaccgcgggccgcggagctcgggcggccggcgcggaggtgagtcccgcgagaggccgagcgctgcgcggcggcggtccccggggcagaccgttggctgggagacgcccccacctcggaccccgcgtgcccctgcgccctcctcccgcattcgccccgccggacttcgaccccgggtggccggctcccgcctcgggccgggggctccctcccctcctccggagcgctccgggtagtgcttcctctgactccactcttctccccatgcgttgcgcccctcctggccctgccgtgcgatctccgccgcaccccactccttggggtcccggggttccctgctcacacctcggacgtccctttctccccgggctggcctttggagtgcgccccttcggtgcgcgtgccggggcggcgggcaggccggcagggagtggccgagcgttggaggcaccgggcggctgcagcagccgtgcagggcgggagccgggcgcgcaccggggttcccacccctggcggggctcgacccgggcgccgcctggcccttcgccaggaaccgggacagagctggtctgtgtgcacacctcgctcacaaaaaattgagccggccctggaggcctggggggcgagtccggttgcgcctcggagagcgcaacaggcaggtaggagtttactttcaaaaacgccggggtggagcagaggcgcctggcgggtctctgcccaaggtgtccctgctggaggaaatctcaccgcgccggggcagccttcgccaccggcaggacctcatttccttctgcagtctttgaactgccccaagcatcgcgcctagagaagtgtgaagctttataaaaatttaaacgcgtccgtggtggcggcagcagtggggcggagccgcggcctggctgctg

SEQ ID NO: 753 - DNA, 180 bp, Homo sapiens
  chr1:116371172-116371352
  hyper
gccgtcagaagacacgtcagtcaattcagtggaaaacacttccagtgtgaggcgttcgccggcgccccttagacgcggccgggtctgaggcgcctgccgagcgaggtggcgcggcccgggagctgtggtcgaagcccctgggcctggcgtgtaggctgcgcgggcggcggcgggctgggg

SEQ ID NO: 754 - DNA, 1584 bp, Homo sapiens
  chr1:116380294-116381878
  hyper
agccccagaagtggctcatctcgggtgtctccacgaggttctcctggcctggaaaatcccccctgcgagcccccgggctcgccagacaaccccacctgcctgcgtcggaaaccttccctcgtcgccctgctgaccagagagaacaggtagcgagcttcttccccggccgtctctcgaggcggccgtctcgctgggccaccgcagcctccgccacccgagcgacggcgcccgtccggatccgtagcgtttcgcggacgccgggacaggcggccccccgcggcgcaccccgccctacacgtccaggacgtggttgagataggagatgtagcagatggccaggcgcaggatctcgatcttggagagcttcttgtccgggggcagcgtgggcagcaatttgcggagctcggcgaaggccaagttgaaggcttccacgcggatgcgctcgcgggtggcgtgggccgagcggtacttggccgtggcgcgccggcggcggcgcttctcctcgcggctcagctgctgcgggtgcgggtagagcgcggctcggctgccgcccttgccgtcgccctcggcctcctccaccggctccaggtccgacacgctgccgagcaccttggtgtccgtgccgcccagggactccggatccgagtgcgccgagctgggatggtccgaatctgctgcttggtccggactcagcatcattttggaggctgaggaggggtcggaaaattaatcagtaaaaggaatcagggtattttgctggaaggatggctgccgaggcctaccacgccggtcctcccagcggacgcgcggcccgggccccctccccacagcaggccggcgcgcgacgcgggagggcgccgataggatctggcccgagggcgcgagccctgcgcctcgccctggcgcgggagccggcggggacgcggttgacccaggccgcatactagactggacacctcgacttgcagacggccacagcgggcctgtggccctgggcctggggaacaaccgcaggcctgtggggtcgcgactgggtttttgtgcctcttccggccaaatgccaaccgcgctattcctcctccctcccttcgtccccttcccggacaaacgagcgatttcgaacaacgaatacatctgggttttcacgggggcggggagacgcggggtgcacttctcgccccgagggcctccggcgaagcaacccggcagccgcggcgcccgagggcctggcgctggtctggggctgcgccgggggcgcctggctctggggtgcggccggtcaggaatccccatcctggagcgcaggcggagagccagtggctgggggcgggaaggcttcttggacccctcgcgcttctccgaaatcgtaaagaaatgactaaacaaacgtgggggagcctttaaaaagaaaattgactccgatgccctcgcaggctcccggagcaccatctgtcacgcagacagccacacacataggggacctagggacacggcgacgtgggatcagacaatgcgcccggcagtctggcgaccaccttgcgggaaaatgccggcagccgggccgctgagggaggagaggatgca

SEQ ID NO: 755 - DNA, 30 bp, Homo sapiens
  chr1:116382348-116382378
  hyper
gcgacgtataggagcgtttgcttctagaga

SEQ ID NO: 756 - DNA, 30 bp, Homo sapiens
  chr1:116518723-116518753
  hyper
tggtttgggcaaaacgacaggcattgctga

SEQ ID NO: 757 - DNA, 641 bp, Homo sapiens
  chr1:116710668-116711309
  hyper
gctgggatcgctgtccgcagcaccagccttctcctgggacgtgttcagaaagagggaggctacagtgggcggggagagaagaaggaagagaaggtgggcagaaagggggcaagatgaagcggcaaggaggaaggaaaggagaagctaaggagggaggatggggaggcggcgacaatggccgcgctaccggtcgcccactgtgctgcggtgggtcggggcccactgcccctcgctggggcacctggggagggggcgctggggcacctggagagggcgcgcaggagcagcgggccgagccttctgcggggatggggtgggaagagaagaaatgaagacacagaggagtagaacaaagaggcgggagcaccccgccaggggaccgggaagggtcgaggaaaactgctgccgcgccccactgggttttaacaacgcccgggatgggggaagggctcccacttgcgccccaagcgcatgcggagaaggttcggcagcgcctcctgccggccgcccggagggtccgcggtggcgccagccccgatcgcagccgcgcaggcccgagggcccctacccgcacggtgaattgtcttccacgcactagtattttctcctcgctttcaactgaatggcggcattggtttcac

SEQ ID NO: 758 - DNA, 30 bp, Homo sapiens
  chr1:116915294-116915324
  hyper
ccggggaggccatccgcaggtgggcgcggg

SEQ ID NO: 759 - DNA, 30 bp, Homo sapiens
  chr1:116961198-116961228
  hyper
gcttccggggagctcgcgcgacagcctggg

SEQ ID NO: 760 - DNA, 208 bp, Homo sapiens
  chr1:117209939-117210147
  hyper
ctctgcgcgcgacgcgtcccaggtggccccgctattgttttaccttgcagggtgtttatatctcgctgattggaaagaaaagaaaccggggaagaagggagtccggagctccgctttcagctgccggagcgcgctcgcagcgcgcccgcccagccaggggaggggtctcgggcccgacccggagctcagccggcgcgggcccgctccc

SEQ ID NO: 761 - DNA, 1088 bp, Homo sapiens
  chr1:117452333-117453421
  hyper
gccaacttttaaaggtcggaggaaagtttctcgtggggtgggggcccagaggggatggcagggtgggctccgacgcctcctcgcctttaagcgggtggccccggctcttcctccgttacctggagcggggaggggcttgggaaagtttgtgtttgttgctggcaaagcgccggatgggaggcgcgggcgggcgctgcggttcttcccttctgctttcgggaagcggtcggggctgcacactcggatcggcggggccggctcccgggcccggccggctggaggagggagggaaggaggcgggagggagcgagcggagccaggggcgcacgtacgccccagcgctgggatttatcggctcgcgaggagagcggagcaggcgcgcggcccaggcggaggagcgccgactctggagcagccggagctggaagaggaggaggaggagaggcggcggggaaggaggaggagggggagagtcgctcccgccgggcgagcatggggcgcctggcctcgaggccgctgctgctggcgctcctgtcgttgggtgagtgtgcgcggggctcagcggggcacacggggactggcgaggccctggagggctcggcggggcgcggctgcagcgcgcggcctggggcgccgagggtgcccgggctgctcccgggaaacccggccggggtgcgcgggttgttcggcccggcggggagcggccgcggggccgcccggagcctggcgcgaatccgctcgggccccgcgcgcggggtgcaagtggccgctccgccaggccgagcctcgcccccaacatgtgccggggggagtggcccggggccgtctttcccccaggtctccctacctgttggccgccgggagcccggctcaccttgaactcccggcccggaaggtgctgcggtcccggcccgggtcctcggctcgagagcggaaatgtgagcctttgatatgccccgccatagccgccgccggccgggtcgctcttcacccaacccgcgcggagttgcctttccagggaagcgagagaatcctccaacttccttccacgaaggtcacagggtggcccggagcgttacaatggaaat

SEQ ID NO: 762 - DNA, 31 bp, Homo sapiens
  chr1:117695844-117695875
  hyper
tggtattggagacttccgagaagttggctcc

SEQ ID NO: 763 - DNA, 30 bp, Homo sapiens
  chr1:117909184-117909214
  hyper
gcgacccaacccctcgctccctctcgccca

SEQ ID NO: 764 - DNA, 30 bp, Homo sapiens
  chr1:118149004-118149034
  hyper
agggccagaagagacgctccgaaagggagc

SEQ ID NO: 765 - DNA, 30 bp, Homo sapiens
  chr1:119168297-119168327
  hyper
atttttgctagttgatgcagacactattct

SEQ ID NO: 766 - DNA, 143 bp, Homo sapiens
  chr1:119530005-119530148
  hyper
cgacgaaaatgcaaggctcagtccagccccaaaaattggttccggtgaatttagggaggctcagggcatttgcgcgaagaaacagaaacctatgttggggcaaggcagggcgtcaatggcagggcctagctcctcacccgcga

SEQ ID NO: 767 - DNA, 306 bp, Homo sapiens
  chr1:119530201-119530507
  hyper
cgacgcactcacccgggtgaggctccaggccgtgtgccgccgcgtcctccgtgtctccgagtgggcccgcggggctcagcgcctccatagacaggtccagccccttctcctcccagtctcgcagtttccgttttttatttgagccgatcaaggcttcaacggagaaggcatgtgctcgcgagctcagggcgactgcagatcttctcctttcactcattttagccgcccacacccctgcctccgcttgcccccgctaccgagggagcagccggcgccctcaagctctgagcgcccaccgggcccggc

SEQ ID NO: 768 - DNA, 394 bp, Homo sapiens
  chr1:119530553-119530947
  hyper
cgggtctctccaccctccccctgcgtcctcctccgccctcctctgccggatccgacctgcgcccctacgctggcccagctgctaggaactagcgccccgagcgccgcccgctcgctgcatgagcgcccgagtcctgcttcccacccaccggggcaggcgctcacagactgtgtccactgaacttcatcttgtttttgttattattattattctctctcctctctctctctctctctctctcccctccctctctttttctctcctccccctctctctctcttcctctctgccttcccgtcctccctgtgatccaaacttctgggaaacttttttttccgctaaattcctcccttcccgaggaacagggggcaggcggtgcgctcctgtccgaggg

SEQ ID NO: 769 - DNA, 13 bp, Homo sapiens
  chr1:119543201-119543214
  hyper
aggggctgagtcc

SEQ ID NO: 770 - DNA, 37 bp, Homo sapiens
  chr1:119543273-119543310
  hyper
cgagattgagagctctttctgcggaacctgcctccgg

SEQ ID NO: 771 - DNA, 583 bp, Homo sapiens
  chr1:119543862-119544445
  hyper
ctgtgcgggcctgcgcgcaccgccctcaccttgcgcgccaggcatctcacctcagccgggcaggtgcagaggtgacaggcgcggcagccgcggttcgtccggccgaggggcaggaggaggctggccgccgccttctgctgcccgcaggctgagggggcaggggagggggaacagggctgggaaactgccgtcagcgggtcccggccccgcctcccgaacgcaacgtccaggaaacctcagaactttctattgtctgagaagcttcactgaacaaattgtccctaaaactttagagctgcgaagagcggatcagggcaggttctagtgtggccctgtgccccggagcctgcctgccataaagtgtgaccggaagcccccccccccccgcccactgtcagaaccactgaggagagaagagcgcggcgccttagtgccgccctgcgtcgtggtcgggaagccgagcaagcggtgtggacgccccaggagcagggggatccaggcctaaactcatgggttccgaatgggcaagggagcagaatcaagcatcggtgggcgcttatagaaagcgcgtctgtcttggaac

SEQ ID NO: 772 - DNA, 81 bp, Homo sapiens
  chr1:119544706-119544787
  hyper
ttgtgggtagattcccgagagggtcagggaatctcttatttttctcacagccttgggtgagaaaccggctacctcctctca

SEQ ID NO: 773 - DNA, 30 bp, Homo sapiens
  chr1:119545260-119545290
  hyper
gctttttttaaaggcgactcagaaagtagc

SEQ ID NO: 774 - DNA, 682 bp, Homo sapiens
  chr1:119549052-119549734
  hyper
accttaaactggtgaagcaaacgggttttccctttactaacatcgctcttgtttttccatttagtctttgggaacgtagcctcaatcttaaccgcgtatgatcgtttccactgcacctgtgcgggagagacaggcgcatatccccgtggcgtcggatctctaaattatctaatctggcggctgcgtacgactcagggaaagccctggccgcgagctttttcaccaggcttgagctcagcagccgggcccgcagtgttgccgccagtggggaggcagggaggctgtcggcgcgccggagccaggcgggaaagggactacagccgcccgccgttgtagcgcaggaagcgggcggtgccaacacacacctcgcagctctgcacgttcttcgtgtcttggaggagagtagagcctccgtgtgaagctccgtccgcacctgacgaagaggagggcgtcttgcgccactccagcgactctgcgatgttaagacgcagacccgctgctgcgcctgcctttgtcggggcgggcgggcagccgccgctcggagcaaggtggggctgcggggagggagagccgcggggcagatccctggccaaggtcctctagaaagcccgctctgcgcccaaacgcgccgctcggtccgtgggccacttcggacctgacgctgccggtgaattcacgcgct

SEQ ID NO: 775 - DNA, 55 bp, Homo sapiens
  chr1:119549914-119549969
  hyper
cgtctaccccaacccgggtattaccctcttttccgtcttctagaaggggaaaacc

SEQ ID NO: 776 - DNA, 30 bp, Homo sapiens
  chr1:119550176-119550206
  hyper
cgggtcgtggttaacgccgaggccaagccc

SEQ ID NO: 777 - DNA, 321 bp, Homo sapiens
  chr1:119551013-119551334
  hyper
cggggtagtgggcgggagacaagggtctcagaacagaggggctggcccggcgcggcgggccaggaactcccgggcgtgtgtgtgcagtggtgcggggtgggggtggaggtgaggtctcctttagttcctgggatctgggaatcccggcttctcgatctcatccggcgcggagatcttaagggtcggtggaccagttagtgtgtacggcctcacccctccgcctccagctttcgaggctctccgcttcagagctccaaaggaaaacttctgcgacttcaagaacgtcctgcgcattcacatggggtcgcttcctggctggtt

SEQ ID NO: 778 - DNA, 30 bp, Homo sapiens
  chr1:119551790-119551820
  hyper
tctgaaacaatagcgcgggctgctggagtc

SEQ ID NO: 779 - DNA, 30 bp, Homo sapiens
  chr1:119870463-119870493
  hyper
tctggccctggggacggtgcagcggaggag

SEQ ID NO: 780 - DNA, 293 bp, Homo sapiens
  chr1:120190519-120190812
  hyper
cggggccctgcgccccaggggagcggacaacggtccactttacgaggcacaacttcgcccagccgttccgccaccgcactcgaacacacaccccatccccgcagcggtcgggtctggtcccgatcagccccatccccgggaggcggttgagcccagccacagccacgctcctacctgcgaggcggctggcgcggcgaggagctagggcaccgagcgccccggcccgagccccgcaccgcagcgcgtctgcccttgtgcggcggcggcggctgcagcggccgctgggtggcccg

SEQ ID NO: 781 - DNA, 509 bp, Homo sapiens
  chr1:120190871-120191380
  hyper
cccggctgactcctcactggggcttcctgtagggctggacaaaggacatttcctgggaggagcgggagaatgttcccagcatgcctcgatttgtagttcccggggacttcctgccaccgcagcagcgggcgccctggaggtagctcgggccaggctaggactccgggacaggaggaaaggcgctcgctgcttctctaagcgctgtggggaagggagcggccggcgggtcttgccccacgccccgccccgcggcgctcaaggagcccgctgtcccggagcacgcgagatcccagcgctgcactccgagctcgcggcaccggttgcgggcagccggtgggacgctgccgctgagctgtcccatggttcgggagggctctgcggtgggagaggccttttctttaaaaactgggaagtttgtggtgggttcgctttttaaaaattaatctaaaaacacaaaatctatcttttaaaatagattttctttttgtcttttacgccgttgacatcct

SEQ ID NO: 782 - DNA, 30 bp, Homo sapiens
  chr1:120336067-120336097
  hyper
tcagactagggaatatgacttggtgtgttt

SEQ ID NO: 783 - DNA, 30 bp, Homo sapiens
  chr1:150521186-150521216
  hyper
gcacgctgtcctttcgctgagtcccgagtg

SEQ ID NO: 784 - DNA, 30 bp, Homo sapiens
  chr1:150534764-150534794
  hyper
cgcaggtggaggtgcggtcgcagcccctcg

SEQ ID NO: 785 - DNA, 30 bp, Homo sapiens
  chr1:150601728-150601758
  hyper
ccaaagcagcatgtcgtgttgaagctcacc

SEQ ID NO: 786 - DNA, 30 bp, Homo sapiens
  chr1:150602085-150602115
  hyper
cgtgacgttgcgaccgccccttcctatgag

SEQ ID NO: 787 - DNA, 30 bp, Homo sapiens
  chr1:150669240-150669270
  hyper
gaaactttaaaccttcgcggggcagggggg

SEQ ID NO: 788 - DNA, 459 bp, Homo sapiens
  chr1:150669480-150669939
  hyper
tgggttatggctggacgcaggctgtagcttgtgctgtattttagaaggacacctgttctccccaccccacccccgtcctagtaggtgaaaaacttagccacgcagagagcacaaacttcctgatccttcgatgcagagaaggaataacacatcagcttcctcaggatcactaggcaacctaccttggtgtttcttcattgcgccaatcagaaatcaccaaggttgagtcccgccaatcggagctcacagggggaggctctcccccagctattctgttgcgatccagacaaacaccaccaaaaggaggcaggtttgcgttcaacctgacagctggtcaatccaatgaaggaaccttggtggaagagaggaaagagggctgcgctccccacccccattaaaccagccaatcaaagcgctgagtgagctaacatgggctgccaatctcgaaaggtttctgtg

SEQ ID NO: 789 - DNA, 31 bp, Homo sapiens
  chr1:150947655-150947686
  hyper
actgctgtgcggcccccggtccccgccaggg

SEQ ID NO: 790 - DNA, 25 bp, Homo sapiens
  chr1:150980790-150980815
  hyper
gagttgcgggactacgtttcccacg

SEQ ID NO: 791 - DNA, 30 bp, Homo sapiens
  chr1:151020534-151020564
  hyper
tggccgacgccgaccgcctggctggaccag

SEQ ID NO: 792 - DNA, 30 bp, Homo sapiens
  chr1:151031280-151031310
  hyper
tctcccggtcccaccgcctctggccctaag

SEQ ID NO: 793 - DNA, 120 bp, Homo sapiens
  chr1:151043248-151043368
  hyper
cctctgtttctccacgagggggggttaaaggcccccaaaacatgcacacatgaaaagggcaaaaagtaaccgtccttgacagggagtcttaactagagaaggaaacgggactaaactggc

SEQ ID NO: 794 - DNA, 809 bp, Homo sapiens
  chr1:151512662-151513471
  hyper
gcccacctcacctcctcgcctatcgttagttctctgcgaaaccgcgaactgggggcgcggcctatcttcagccccgcccctgatgggcctatacaagggggcggttccgcgcgcgcccgcccagttggagccagacagcggggtggacaagtggcgtgtgtgctgcgaccccgagggaagatgaacgggacgcggaactggtgtaccctggtggacgtgcacccagaggaccaggcggcggtaagaaaaagcgctctcgctgtcttctccgttttgtattcccggtttctaagtccgccccttccgtgccccgcgccgtgttggctgacatcacctggtgcccggctcgcgcggtcagccctgcgcggcgcttctctctttttattcttttgcctgcgacgggcagtgggagtcgcggggtgaagactcctttgaggctggagggttcggggcgtccctgccctttggtaggacactgcggctcctgcctgggactcggcgccggcgagcccgtgcttgggccgcgggtctcaggcgtcttttgggcagccacattgggtcataagagaatgagctcaagcgactgggtccctgagcgcctttggacgttgtgtcctgccgaggaggcttaggctttcccgtgggtcgagggtcctggtgacctccgaggccctccaaagaatttcatcatggtgctttggatgatcagtaacaagaaaaatggtagagtaaattacagggcttggactggagggcggggggcaagtaggggacggtaggactcaaactattccgagattggctaggga

SEQ ID NO: 795 - DNA, 30 bp, Homo sapiens
  chr1:151566301-151566331
  hyper
ctggggaagcagaagcggtttggggagggg

SEQ ID NO: 796 - DNA, 212 bp, Homo sapiens
  chr1:151566652-151566864
  hyper
aggggatggactaagttcccttttagctctaaaattccatgggtcttcggaggggaagacaatgctttcagagcacgtttagccggtgaacctgaaaacgaggatttttttcatttgcgaagtggaggtactcctgcgcgcccaggatgcagccactagagggcagcaagtcttccagcacctgtgcaggtggccgccgccgggccccacag

SEQ ID NO: 797 - DNA, 35 bp, Homo sapiens
  chr1:151584887-151584922
  hyper
aacggggagctgtacgcgccgctgcagcatgtgag

SEQ ID NO: 798 - DNA, 30 bp, Homo sapiens
  chr1:151689366-151689396
  hyper
accctggagagggacgcacaatccaggcac

SEQ ID NO: 799 - DNA, 662 bp, Homo sapiens
  chr1:151693823-151694485
  hyper
tcagtcccccaatccgggaaaggcgatcctttagagacccaccccccaagcccccgccccggagctcacccctcagttccctcagcccctagcccctgcttcgctgaaggggccgggcttgggggcagggcggggccgggggcggggcctcgccggctcgcggccggtcgccttgacgaccgcagcaagatggagacgctgccaggcttgctgcagcggcccgaccccggggcgcttagcgcagcgcagctggagcagctgcgaaaattcaaggtgggtgcgcccgcgcccccatccagcgtccaccaaagtgtagctgccccaggactggggccccagactgggaagagagccgccgagagaaggggagcgggagcctgttccctgataaagtggggagggcgcaggggagacccccggcggacctctaggcgtctgatcccagcacagagcgcgacgggcatctgagagtgcaggaagaactaactcagggactcggccagagaaatgggccgaaattactgccagacacatccgaccttagtaaaggcccctcatcctgaacaagcggcagaatgatattttatctgtaagaagatgggtggcttaaactttcaagcatcctggggaaagacttgggttaaatgcgcacgccgtttccc

SEQ ID NO: 800 - DNA, 30 bp, Homo sapiens
  chr1:151762615-151762645
  hyper
cgggtccgttgtggcgtaagcgggtgactg

SEQ ID NO: 801 - DNA, 30 bp, Homo sapiens
  chr1:151966793-151966823
  hyper
tctgggggtctcggcggcctgcgccagtgg

SEQ ID NO: 802 - DNA, 30 bp, Homo sapiens
  chr1:152487841-152487871
  hyper
gtcgtgaggagctccgcgatgtcctctcaa

SEQ ID NO: 803 - DNA, 30 bp, Homo sapiens
  chr1:152488078-152488108
  hyper
ggttgctgctgctgcgggggcggcagccag

SEQ ID NO: 804 - DNA, 30 bp, Homo sapiens
  chr1:153425048-153425078
  hyper
gagaggcaggagtgacggcacagtgaactc

SEQ ID NO: 805 - DNA, 94 bp, Homo sapiens
  chr1:153438388-153438482
  hyper
acacggtggcgccaccgagcacccacctcgccagagttgcgaggcggttccacgtggctgggccgtccttgccggttctcgcccttatttaggt

SEQ ID NO: 806 - DNA, 30 bp, Homo sapiens
  chr1:153643807-153643837
  hyper
ttcattgccctgtacggcatacgtaatcta

SEQ ID NO: 807 - DNA, 1390 bp, Homo sapiens
  chr1:153651049-153652439
  hyper
cactgagtctgggaggggaagcggctgggagggagggttcggagcttggctcgggtcctccacggttccctccggatagccggagacttgggccggccggacgccccttctggcacactccctggggcaggcgctcacgcacgctacaaacacacactcctctttcctccctcgcgcgccctctctcatccttcttcacgaagcgctcactcgcaccctttctctctctctctctctctctctaacacgcacgcacactcccagttgttcacactcgggtcctctccagcccgacgttctcctggcacccacctgctccgcggcgccctgcgcgcccccctcggtcgcgccccttgcgctctcggcccagaccgtcgcagctacagggggcctcgagccccggggtgagcgtccccgtcccgctcctgctccttcccatagggacgcgcctgatgcctgggaccggccgctgagcccaaggggaccgaggaggccatggtaggagcgctcgcctgctgcggtgcccgctgaggccatgccggggccccggcgccccgctggctcccgcctgcgcctgctcctgctcctgctgctgccgccgctgctgctgctgctccggggcagccacgcgggcaacctgacggtagccgtggtactgccgctggccaatacctcgtacccctggtcgtgggcgcgcgtgggacccgccgtggagctggccctggcccaggtgaaggcgcgccccgacttgctgccgggctggacggtccgcacggtgctgggcagcagcgaaaacgcgctgggcgtctgctccgacaccgcagcgcccctggccgcggtggacctcaagtgggagcacaaccccgctgtgttcctgggccccggctgcgtgtacgccgccgccccagtggggcgcttcaccgcgcactggcgggtcccgctgctgaccgccggcgccccggcgctgggcttcggtgtcaaggacgagtatgcgctgaccacccgcgcggggcccagctacgccaagctgggggacttcgtggcggcgctgcaccgacggctgggctgggagcgccaagcgctcatgctctacgcctaccggccgggtgacgaagagcactgcttcttcctcgtggaggggctgttcatgcgggtccgcgaccgcctcaatattacggtggaccacctggagttcgccgaggacgacctcagccactacaccaggctgctgcggaccatgccgcgcaaaggccgaggtgagacgctggcacaccccgtcccgccgcttagccgcagggcctcccctctgacctgccggaggcatcgggactttctctctcatctgggggcactcttctttctcctcgccgttcttcattctactttcagc

SEQ ID NO: 808 - DNA, 177 bp, Homo sapiens
  chr1:153936614-153936791
  hyper
tccaggtgggtggggacgtggtgggaccggaatgcggggtgctgaagccgcgcccagggaagagcccccagcgcattccaggatatctgcgtaccgcgcctgcgggcgtctggccggttctcccacctgatttccagcccagctcccgccaccctcgccggtcggtttgctgtttgc

SEQ ID NO: 809 - DNA, 157 bp, Homo sapiens
  chr1:153940531-153940688
  hyper
ctgcagcagaaagggcgcggctacctacttcttaaattccgtttgtggaccctcagactcttagtcccctactcccagatacagcggccctaccgtggctcctggcaaggtggcatccacttttgtagtgtaaggctgggggcggggtttggctggc

SEQ ID NO: 810 - DNA, 331 bp, Homo sapiens
  chr1:153958646-153958977
  hyper
agtcttgcccacccccgagtccccgatcagcagcaacttgaagaggtggtcgtaggctttggccatggcggacaccgggggagccgggggaggggtggggagcgcccggcactggtaggcgggactggacggttggcaaacagagcggcacggagcccaggccaggaagaagttttcctccctctccgcccaggctccgggaaagaggagaggcggcacccctccgggctccaccccctgcccgcccacccttttgagcaggccaaggctgccagcccggcctctgttctctcggttttcccttcctagcttaggccggcctgtctctctc

SEQ ID NO: 811 - DNA, 27 bp, Homo sapiens
  chr1:153963224-153963251
  hyper
ttccgctttcgctcctttccggcggtg

SEQ ID NO: 812 - DNA, 30 bp, Homo sapiens
  chr1:154193254-154193284
  hyper
ggcgaggcggcacgcgcacgcttgcgtgcg

SEQ ID NO: 813 - DNA, 70 bp, Homo sapiens
  chr1:154297821-154297891
  hyper
tttcttttaagatgcggatggacgtacgtgtgggggcatcccagcccagccacgccgaggctcggaaggg

SEQ ID NO: 814 - DNA, 54 bp, Homo sapiens
  chr1:154298305-154298359
  hyper
caagatttgggagctgcggccagacggggcggggatggcggccgactggagacg

SEQ ID NO: 815 - DNA, 34 bp, Homo sapiens
  chr1:154474743-154474777
  hyper
gggcgccgggggcttccccctgctctttcctcct

SEQ ID NO: 816 - DNA, 80 bp, Homo sapiens
  chr1:154474987-154475067
  hyper
cggggtgagcgccatggcagaggcgggtcgggctgcgagctctggagaaaggggcggcggccgcacgtgcggatcggccg

SEQ ID NO: 817 - DNA, 67 bp, Homo sapiens
  chr1:154475371-154475438
  hyper
gtggccgccggggattggctgccggcaagccccgccccgtgcccccgggctcagagggggcggagcg

SEQ ID NO: 818 - DNA, 31 bp, Homo sapiens
  chr1:154816590-154816621
  hyper
cacagatctgggcagacgccctcaccctcac

SEQ ID NO: 819 - DNA, 30 bp, Homo sapiens
  chr1:154842702-154842732
  hyper
tggtcctctaggagcgtgtgaggccaggct

SEQ ID NO: 820 - DNA, 30 bp, Homo sapiens
  chr1:154909514-154909544
  hyper
cgactaccttcctccgaggggggtgacgtc

SEQ ID NO: 821 - DNA, 71 bp, Homo sapiens
  chr1:154955696-154955767
  hyper
ctaaagcctgagagcgacagttgaatacaccaatgggaccctggaagagtctaagcgacagccaaaatcac

SEQ ID NO: 822 - DNA, 30 bp, Homo sapiens
  chr1:154972125-154972155
  hyper
tttttcgagggaagcggaggcagcggagga

SEQ ID NO: 823 - DNA, 255 bp, Homo sapiens
  chr1:155036562-155036817
  hyper
cgaggggcgaggcgcgccctgggtctccccacagcccgcatgtgttggggggcaggcagaagaccccagccccaagggttgtctagggggtcttggagcatggagctgggggggcctttgcccgcactccgggctccgcccccctcgctgctctcctggcgatccccagcctcccgcaggctggagctgtggctgacgaacttgagagcgagggagggggctttactcttatgaaagagcgtgggttactctcct

SEQ ID NO: 824 - DNA, 480 bp, Homo sapiens
  chr1:155043391-155043871
  hyper
gagaactgtgggggtctcacccggctcccagcggccccaggccagcctccttttcgcagaaccaggcgggcgcgctcgctcccgcggctggggctggcgcgcggacgcgccgctgataacgcatgtgcgaaagagacgcggggcccagtcagctttctccgcactcagacgcacgccctaactgtcgggcgctcccacttgacacggacacacgcccctgccggccgcccagccccttgcaggtgcaagggcggatgcctcagcgaccacgggagccgggctggggaggttggtggggggcggggggagtcttaaacttaggcccgcccagccacaggcgctcaggcccagccggccttccctatacaactttcctcatagcatgcgcgggcggctgattcagtcccggggcgcgtccccatggaaagccagggctgagtccactcatggggccgagacgggctgcaggcgctgggaggt

SEQ ID NO: 825 - DNA, 30 bp, Homo sapiens
  chr1:155055151-155055181
  hyper
aagagagaacagtacgaaggggcagggcac

SEQ ID NO: 826 - DNA, 291 bp, Homo sapiens
  chr1:155099567-155099858
  hyper
tgttcgcacggtgtacgcgtgtgttgttacatatactcaggttattagcgctctttgacttatctaaaataagaacggccccctctcgagcccagggtcccgcgtgtcgctcctgcgggcaggcactgatgtgatggacagaggcgtccttagccccggccgcacacgttacacactcgatcacacaaagcgttgcactttattcccggcatctaggcgatgacacaatctccagaacaaagacaacattgacaaacccaacaaaaacaaacagccgcgtgtgtgtgggga

SEQ ID NO: 827 - DNA, 111 bp, Homo sapiens
  chr1:155100404-155100515
  hyper
gacccataggagacccgcgtccccgctcggcctggccaggccccgcgctatggagttcctctgggcccctctcttgggtctgtgctgcagtctggccgctgctgatcgcca

SEQ ID NO: 828 - DNA, 31 bp, Homo sapiens
  chr1:155147403-155147434
  hyper
gatggagtgccaacctcgcctggctatcggg

SEQ ID NO: 829 - DNA, 717 bp, Homo sapiens
  chr1:155164257-155164974
  hyper
tgcggcagcagtgcacgaggggaggaagctatcccaggccgcggcagcacgtggaacttgggtcccgcagtcgcaggctgcgctctaggccgacggaagcagttccgcctgtattcagaaaacagttctcagccccaaagacacaggttggaaagaacactttaaaaacacttcggcgaggcacgggattggagcgcatcagatcagcaggcgagagaccaccgctctcgcccgcgcgccgcgcggcgcccgaggcgcagctttgtgtgcggcgagaccctggggcaggcgctgggcggggtggggacatctgacgtcagcgcgcccgggagcgcgggccggggaggcggggagccccccaactcgcaggccggagaaaacacgagtagctaggtgggcggccccaaacctcaactcccggcattgccaagcaacagccattcagttcggttgctgggacacgcgtcaccatggcgacggctccgcgccgcgcagtctgagtacttaaagagcaagcgcgcgcaacgcccgggcgtcggaaagcggccttctgggactccgcaaactcccgttctccctcccccctcccccttgccattccctttgccttccgggcgccaagtctctctggcctccaaggtgaacccaactccccagcgcgccccgggttcccgggtcgggccggcttcaggcggtggggagcgggatcccgggccc

SEQ ID NO: 830 - DNA, 30 bp, Homo sapiens
  chr1:155178540-155178570
  hyper
tccatggcgacaggcggcgcagggcccgct

SEQ ID NO: 831 - DNA, 30 bp, Homo sapiens
  chr1:155827029-155827059
  hyper
gcctcggagcgccgcgccgcagtgcatcaa

SEQ ID NO: 832 - DNA, 30 bp, Homo sapiens
  chr1:155829534-155829564
  hyper
acagcctctgattacgacatggctgagatc

SEQ ID NO: 833 - DNA, 243 bp, Homo sapiens
  chr1:155830249-155830492
  hyper
gggctgggggatgacgtgatgtctatttctgggcctcctggcagcgccgacgctctccttccggggcctttgttccctgtttccctgggccgccttttcaaaaagggggactgaccagcgttgatgctggcgggggcgcgatccaggccggagggggaggggcgaaagaggcccagcccgggggaggccgctttgtgtaccgcagaaagcattacgtcatttcagagcggctggtccccgacc

SEQ ID NO: 834 - DNA, 30 bp, Homo sapiens
  chr1:155880492-155880522
  hyper
ccgtgagagcccagcggggctgctacagca

SEQ ID NO: 835 - DNA, 30 bp, Homo sapiens
  chr1:155946130-155946160
  hyper
ccctccccttccgaccggcccaaactgaca

SEQ ID NO: 836 - DNA, 30 bp, Homo sapiens
  chr1:155946491-155946521
  hyper
tcaaaaaacctcccccgccccccttggctc

SEQ ID NO: 837 - DNA, 30 bp, Homo sapiens
  chr1:156036296-156036326
  hyper
cgccccctcacttccgcacaatgctctgca

SEQ ID NO: 838 - DNA, 30 bp, Homo sapiens
  chr1:156084256-156084286
  hyper
ggcaagcttggagccgacagtgctgagcag

SEQ ID NO: 839 - DNA, 707 bp, Homo sapiens
  chr1:156215212-156215919
  hyper
gaagtcctcagtacatggtcccgatgcctccagtgctgttcgagagcagtgaggtgtgtcctctcctgtgcctccgccttccccgtccccactggaggggcctgggaacccaccgggagtagcaggagaggccggtgcacaggaaggagttgagtgcggcggcaggcacaaagaactggtgcaggtggccgtgcagccaggaggccggcatggagtaggcggcataggggaaggcgcagcctgcggtgaggtgggggcgtgcagctgaggcctgaggggcgcgcccctatgtcccgcgtcccacccctcgccccgctccgggacgcccagaccccgcgctcccgcgcctgtccggctcacccagactgtagaggctgagcgcgccgtagtcgaggaagtagcagatgtggcgcatgcggggcgacatggagctgaaggtgtgcgcgcagcacgacgcgaaggggtagaggcaggcgggcagcaggaagaccagcagcggccagtggtacggctccgcacggaagccggggccgcccgccagcgccaggagccgccacaggaagtacctgcggcgggcgcgtgctcaggccgccgcggacccccgcgactgccgctgcagcccgtgggcctggacggtccctgcccgcctgggtaccccctctgagctcaaggccgcggcctggggcggagcctcccctcaccaggtg

SEQ ID NO: 840 - DNA, 534 bp, Homo sapiens
  chr1:156357993-156358527
  hyper
tggccagagccccctcggccaggagttagaagctgctcctctgacctctggaggacccggcactccgaaccccgcgcagcctgggaaaggcctgagattccccgctattgggattcacatcacgacgcggcggccccaactcggggaggaattagacacggcgtgagtgtcccaagtgcggggcggtggccgtcccggggcagacgagcgcggctgccgcgtccccccacctcaccccgatattccgctcccaccgtcgggaactcccccaccgccgcctccggccctgcgcgccccttctcctttgtctggcccgcccactcccagccggtccgccgcgccgccccgcgcgccccggcccgtgcgcccgccgccgccgcccaggaacaatgcgggccaatgtctccgggcgggcgagccggctatgcaaatgcccaacggcctgtgagaatccccttcgccgccgcctgggcttccacggcctgaaaagggctggcggccgggcctgggtgggggaggcggccactgcatagg

SEQ ID NO: 841 - DNA, 801 bp, Homo sapiens
  chr1:156390086-156390887
  hyper
tcccgcccgtgaggccggctttccccgggcccctctgcgcagtgtatggggttatttttactttcggttatctagctttatgaagactccacaccactcatacagctagataaccaaagataacaaccaaccccgcctcctggctgctgtcgccgcctcttccacgcagcctcccggccgccgccgccgccagcacctccgcagcttcccggtcgcccgtcagcgggagtaggagggaagggacacgagtggagttgagggggagggtgaagagagaaatgaagtccgagacaaaacaacaacaaaaacctcagacacggagatacagacacgacagagaccgaaaaaggcgtggaaaggacgcgatgacccgtggcgtcgaagtcggggagttgaccccgatccagacccaaaaagtttctggtgccccatttcccgctctcccattcgggccaggagcaggagttccgctggtcccaggtggaagggacgcgcgggcttttcgtgccacccgggaagaccgcagcgacccaggcagaggcctccccagcctcgccgggtctccactgcccttctctggaagatcgagggcgcatccgacagccagagccctgccttcggcggagcccgagcctggcgcgggatggaaatggggagccgcggtgccggcccggccacgtcgccaactcagaaaggcgttggaagcgaagcggagcccttgtgggggaaagagccggattcaagaggccgactaaaaggggaaatgggcagccaaaccccggaggtaaaaaccccagagat

SEQ ID NO: 842 - DNA, 64 bp, Homo sapiens
  chr1:156391151-156391215
  hyper
acccagggttgtgaaaatggccgggggttcgaggcgagcggtgctctaggggtgggaaaggggt

SEQ ID NO: 843 - DNA, 359 bp, Homo sapiens
  chr1:156391242-156391601
  hyper
cgaagagggtgggggctcggccggcccctcgtggcggacgcgcgggcacgccggattccgaggcgctcgcccacctcgtgctccacgctggccaggccacttacatcgagcccagggtgcccatccgtgctctcccgcgcggtcctcccggccagttcccgcccctggagcgccagggccctgagttccagatgccggggctcagcgggcgccgggcagaggaggctgccctgctcttagcctccgccgagcctaggcgagcagggtggagcgggtctcacctcctagctccctcctctgcctctgccgcggctctggccccggcgcgctccggctccggacttttcattcatcctttc

SEQ ID NO: 844 - DNA, 30 bp, Homo sapiens
  chr1:156406334-156406364
  hyper
gcgcaaactccacgcggcagcctggactgg

SEQ ID NO: 845 - DNA, 30 bp, Homo sapiens
  chr1:156468707-156468737
  hyper
ttcccaggcagggccgtgggagctgggaca

SEQ ID NO: 846 - DNA, 30 bp, Homo sapiens
  chr1:156474709-156474739
  hyper
gggcaaagggcagacggcccaccctggagc

SEQ ID NO: 847 - DNA, 30 bp, Homo sapiens
  chr1:156589288-156589318
  hyper
ttgcaaaggcaatgcgcactcaggcaccag

SEQ ID NO: 848 - DNA, 1435 bp, Homo sapiens
  chr1:156593617-156595052
  hyper
ctacctcctgccccccatccacgaggtcattcactctcatcgtggggccacggccacgctgccctgcgtcctgggcaccacgcctcccagctacaaggtgcgctggagcaaggtggagcctggggagctccgggaaacgctgatcctcatcaccaacggactgcacgcccgggggtatgggcccctgggagggcgcgccaggatgcggagggggcatcgactagacgcctccctggtcatcgcgggcgtgcgcctggaggacgagggccggtaccgctgcgagctcatcaacggcatcgaggacgagagcgtggcgctgaccttgagcttggagggtgaggcccttccgctcccgccccattcctgtgtagcagcgggtccgcctcgcctgggtctcccagggctccttcccagtatctcctccgcacccctggggaccccagctccctctcccaggccgcgccgcccttcctccccctccgctcccatccgctggccctccccaggatccccgccaccccctaggtgtggtgtttccgtaccaacccagccggggccggtaccagttcaattactacgaggcgaagcaggcgtgcgaggagcaggacggacgcctggccacctactcccagctctaccagggtgagcggccgaacccagcacttcccaagccccgcggagctgtctcaggggcccgagagagggcgccaggcgagctcagtctggctcctgcctatgacgcctcttatccccgacctccgccgtctcccgccagcttggaccgagggtctggactggtgtaacgcgggctggctgctcgagggctccgtgcgctaccctgtgctcaccgcacgcgccccgtgcggcggccgaggccggcccgggatccgcagctacggaccccgcgaccggatgcgcgaccgctacgacgccttctgcttcacctccgcgctggcgggtgaggcgcgggacgaaggcagggtcttggggaggggtctgaaaaatgtgggggacgaggagtggacctcagcttgagatcagggcagggtctccgggtccctccaaggcaccgcccccccatcagcccgcccgcccgcccaggctccagctcacctctccaaaccctccctgcacttttgcctcgatcccccaactcctcttacccaagctcgatccagcacctctgcggtcccgcaccccaactccgcctcctgggtgtcagccgcccctctccgcccaccctgccctcggtcggtgacccgctgtggtccccaggccaagtgttcttcgtgcccgggcggctgacgctgtctgaagcccacgcggcgtgccggcgacgcggcgccgtggtggccaaggttgggcacctctacgccgcctggaagttttcggggctagaccagtgcgacggcggctggctggctgacggcagtgt

SEQ ID NO: 849 - DNA, 103 bp, Homo sapiens
  chr1:156595080-156595183
  hyper
cgctgcggggggctcccggatcccggagtgcgcagtttcggcttccccaggccccaacaggcagcctatgggacctactgctacgccgagaattaggcgccca

SEQ ID NO: 850 - DNA, 429 bp, Homo sapiens
  chr1:156626589-156627018
  hyper
ctagctcttttgcaccgccctcctgtcccccttagtcccgcccctctcggcctgcggtagtggaaggagaccagccccttccaggggacctggccctctgggttttggggccctaagatgcccgcccttatgtgccgcaggcctccgcttctgcaaccccggctgggacgccttccagggcgcctgctacaagcacttttccacacgaaggagctgggaggaggcagagacccagtgccggatgtacggcgcgcatctggccagcatcagcacacccgaggaacaggacttcatcaacagtgggctgggagacagggcgggaggggcccctgccatatgctctcactctctctcactcgcctaaccgccttcctcattaacccatgcacttattccttggttttctcaagcgtgcattccctcactcat

SEQ ID NO: 851 - DNA, 32 bp, Homo sapiens
  chr1:156627083-156627115
  hyper
cggagagtggaggttcgcgcagtagagtgcgc

SEQ ID NO: 852 - DNA, 30 bp, Homo sapiens
  chr1:156627557-156627587
  hyper
ccccagtcgaaccccgccgtctagctcact

SEQ ID NO: 853 - DNA, 30 bp, Homo sapiens
  chr1:156647989-156648019
  hyper
tgttgggtagtggacgccctctggcggctt

SEQ ID NO: 854 - DNA, 30 bp, Homo sapiens
  chr1:156675470-156675500
  hyper
cctggggggccctgcgcccccgccaccaac

SEQ ID NO: 855 - DNA, 30 bp, Homo sapiens
  chr1:156676041-156676071
  hyper
ccttaatgcgctgggcggacattgaagggt

SEQ ID NO: 856 - DNA, 272 bp, Homo sapiens
  chr1:156676359-156676631
  hyper
agagcggctttgaaacgggagatcaaagagggtgggaggagggcacggcttcctgcagagacccgagtgggagtgggcgagaccccagtggagatggcagggagacggagaaacagaaacggaggtcaggcggggagcctcggggacaggcctgggacccgaggccggaaaccgcagaggagcgaagcctggcgggatgcagtgattggagccaaaggaaccgtcccggcctgtccaacgcgggggggccttcggcccggtggccctgagcg

SEQ ID NO: 857 - DNA, 166 bp, Homo sapiens
  chr1:156716424-156716590
  hyper
ccagaggcagtggcctcgccagcctctcccagatcaggcctggaagcccaggccaagctgagccaggggtgggtcgtgggggaaggtggggcgggtggggactacaactcccagcagcacttgcagcagccccagcagccaggcttcccgccggacagaggccagg

SEQ ID NO: 858 - DNA, 67 bp, Homo sapiens
  chr1:156814885-156814952
  hyper
caaagacgaaggtggcggcgctgcagcccacggtgtgcgccgcgtggttgcaggcatggatgtcgat

SEQ ID NO: 859 - DNA, 358 bp, Homo sapiens
  chr1:156818570-156818928
  hyper
cctaccacggagtacaacttgcgggtcctggcttcctgggtcttcatagcctcgctgagctccgccctcacctgcctgtggtcccgaagaaattggcctcgtccggtcccgcccccgctccggccccgcccccggcactcacgactccttgtagtacacgatgaagctgagcaggtcgcgggcctccagtggctcatagcgctcccagcgtagcaggatgcggtctgcctccgtcacgttggacacgaagcgcagggtgcgagtctggcctgggtggggcgaggggcctgctcgcaaccgcgcctgccagctgcttgagcgcccaccctgaccccgcggcatcccattcccagtgaga

SEQ ID NO: 860 - DNA, 18 bp, Homo sapiens
  chr1:156863640-156863658
  hyper
cgcgccccctggcagggg

SEQ ID NO: 861 - DNA, 30 bp, Homo sapiens
  chr1:156893334-156893364
  hyper
tcacatcgggcctgcgctttctcccaggga

SEQ ID NO: 862 - DNA, 240 bp, Homo sapiens
  chr1:156897315-156897555
  hyper
aacatcgacgaccgcggggcgcaactcctgggccaggcgctgtccacgctgcacagctgcaaccggaccctcgtctcgctcaacctgggtttcaaccacatcggtgacgagggcgcaggctacatcgcggacgtgagtgcacggcggggagggacctgctgggagcaggggcggcttgggcggctcacgcgtccctgcccgcctcttagggcctccggctgaaccgttccctgctctggc

SEQ ID NO: 863 - DNA, 30 bp, Homo sapiens
  chr1:157108748-157108778
  hyper
ccgcagacttcagacgcaatttccctaccc

SEQ ID NO: 864 - DNA, 30 bp, Homo sapiens
  chr1:157963008-157963038
  hyper
ggggtatgtgtgtgcgcgcgttgtgggggg

SEQ ID NO: 865 - DNA, 30 bp, Homo sapiens
  chr1:157963680-157963710
  hyper
ggggcgcggagtaacgaggggctggggaga

SEQ ID NO: 866 - DNA, 484 bp, Homo sapiens
  chr1:158083064-158083548
  hyper
tgaagaaaggcatcccgggcaaaggcaccgagctcttggtgtggttctcctgggataagcccacagtcacaaacttgtgcaggaatgggggtaccgggaagcagcccggtgttccaagccttttgagattctccggacctgcgcgccgcccgctcggcagggggctcggcaggcgcgggcggcgggtgggggcgggaggctctgcccgctcggtggctgccgcggcctcctccgcgctgctctccacgcctggcttattatgcacgaggcaggcaatttgccttcctccccggggacccatctcggagacaagaaggtagtttgttctctgtaatggcttctgctggagtgcggcggggcccaggcgcgagcgggggcacgggcggggagttggcagcgaaggatgcgcccggcgccccccggcggccgcccggagcccgaggtcggcgcgggaggagcgctgactccgcgggccgagccctcc

SEQ ID NO: 867 - DNA, 506 bp, Homo sapiens
  chr1:158150550-158151056
  hyper
acataaataatggttgtaaagcgtcccacacgttgacccaaagtctcctttgaaacaggaaattgagacacgccggttgtgaaacctactgaagtgagcggcggcgccaggattcctgggaccccgacctctttgcagctcgcacagctaagggcgagggcgcccttcggcagaagcagcaaaccgccggcaagcccagcgaggagggctgccggggtctgggcttgggaattggctggcacccagcggaaagggacgtgagctgagcggcgggggagaagagtgcgcaggtcagagggcggcgcgcagcggcgctccgcgaggtccccacgccgggcgatatggggtgcctgctgtttctgctgctctgggcgctcctccaggcttggggaagcgctgaaggtgggtggaacgagggcgcttgagtgcactcgcgggagggcggagagagggagctgggtagggacggggagggcaacgcctgatggggactggtgagacccggg

SEQ ID NO: 868 - DNA, 60 bp, Homo sapiens
  chr1:159141702-159141762
  hyper
gatcgggagtctcgcggaaggagcctgttggctttgtttggaaccggggttaaagtcacc

SEQ ID NO: 869 - DNA, 30 bp, Homo sapiens
  chr1:159824902-159824932
  hyper
aacctcttgtctcccgcgcctccctccacc

SEQ ID NO: 870 - DNA, 30 bp, Homo sapiens
  chr1:159894046-159894076
  hyper
ggccctactgggcccgccctgccttggcct

SEQ ID NO: 871 - DNA, 495 bp, Homo sapiens
  chr1:159894399-159894894
  hyper
cgaccacaccctgggccgttacaacagatgagtcacccaccgccctcccgccgctggggtgacgcagtggtctgggcagcccgcccgtccgcccgcggccaccaccggctttcccagcagcagggggcacccggtgggggcagcggcgctcgggcagggtaaaagcagccaccaccacccccacaacctcacacagggcaccccggggcgcagtcagggctgcagcacccagacccccgaggtcaggggaccgtcatagagatgactggagcttcacagaaggtcaccgtgcgacccatgcagagccccctagccccagcccgtgacctcaagtccccagaatagcaagctagcaggaacaggaatgaaaagggcggcctcggggactcagagggcacgcagtgctcacacgtgctcctggaaccaggaagtgaagggtcgcgcgggaaagcccaggagcacgagctggcccagggccggcgccacgacccgggg

SEQ ID NO: 872 - DNA, 133 bp, Homo sapiens
  chr1:159895196-159895329
  hyper
agcacgcacatgtccccgacccccgtacccccgacctgctcaccgttcaagcgggctggagagcggcgcactgactcaaggcaagggctgcagctgcaagtggtgcgccctgcccagccggggattttcagga

SEQ ID NO: 873 - DNA, 30 bp, Homo sapiens
  chr1:159915359-159915389
  hyper
cacctgctccgcaccgctcggctccactct

SEQ ID NO: 874 - DNA, 145 bp, Homo sapiens
  chr1:160039832-160039977
  hyper
ccccttggatgggccgcggggcagcgggacagatggacggacggggcgggcaggagttaggagcagagctgtgcgacgggccgggccaggactcttaaacccggagctgggatcagataagggcttgtccgggggccggggccgg

SEQ ID NO: 875 - DNA, 30 bp, Homo sapiens
  chr1:160040180-160040210
  hyper
gcggggcaaggaagcggagacccagacagc

SEQ ID NO: 876 - DNA, 37 bp, Homo sapiens
  chr1:160040645-160040682
  hyper
gccggaaccctcagcgaagtgcgggaggtactgaagg

SEQ ID NO: 877 - DNA, 30 bp, Homo sapiens
  chr1:160093911-160093941
  hyper
tgtcagctcccaggctctaagatagagatg

SEQ ID NO: 878 - DNA, 31 bp, Homo sapiens
  chr1:160175619-160175650
  hyper
cccgcccctccctccccgctcaggcttcgga

SEQ ID NO: 879 - DNA, 185 bp, Homo sapiens
  chr1:160370193-160370378
  hyper
gggagcggcgactccgggaagagcggggccgcagacaatggacgcggcggtaggaggggcggcggctgtgggaacagccgggaggcggcacccgggagctcgcgctcccccgccccctgcaccccccaccctcatcccctccccctccgccccctcccccctgcgccgccggctcccgatctgat

SEQ ID NO: 880 - DNA, 30 bp, Homo sapiens
  chr1:160370828-160370858
  hyper
acccccttccggtccgcttccccactgcac

SEQ ID NO: 881 - DNA, 189 bp, Homo sapiens
  chr1:160526914-160527103
  hyper
ttaataccatcaattacgatctacattctataagtgaggaaactttggaacagagaggttaaacaacttgcccaagatcatacagctggcaaagtatgcctaatcccaacattagcgttctttccgctatgctgtccatcggtatagaaactgattcaatcatcttatattaatcgaacattcacaatt

SEQ ID NO: 882 - DNA, 30 bp, Homo sapiens
  chr1:160948028-160948058
  hyper
tttttattttattttattttttttgagaag

SEQ ID NO: 883 - DNA, 425 bp, Homo sapiens
  chr1:160983484-160983909
  hyper
cactttcagtgatgtcgatcagctggctcgggtcctctgaggatggcagaaagtggtaatggcagggtaagacaggctcgctttcactccctggctccctcccgccctctctgcagaatttccggttctacctgctcagctcccccgccaccccatcttcccagtgcaagggaaggtcgagccttccagcgcaggacttacttcaggggcccagcacccacttcctgccagccagctgcttcctcctgttccgcccctacattgtgaaacaaatgacgcagccggactttagacagaaaccctgcttatcagggagtccaggcagatgaactctgggttctcaatgccaggaaaaccctagtgtgtatccactctcacagtatgtgttcactcatactgctttccacaaccgtcacacaatagtg

SEQ ID NO: 884 - DNA, 937 bp, Homo sapiens
  chr1:160990380-160991317
  hyper
ctcccggctgcgcagcggggttcgtggatgctgggtggccgttggaggggcaggctggcccttcccaggtgcgtgtggagcgcgcgctgggtagatgagtgtggaagggtccttggcccgacggccctctccagtgaggacgaggagtgtacctctggtgtgtgcagatgggtcagctccctcctggtggccgtgaggggtgcggtcacaactcaccagtgtgggggaggggagccagccactcacccagctgtgagagtggtgaaagagggaccagccaggggtggaaaagataattcgcagaacgatataggaaggtttctgagctcctcccctcccgcgggctaggggcgtggggagagccttcctccaacctctgacccgaccaaccgattcctcccgaaactctgggaacttacacaacaggatcgccaatatgaagaggcacaacagtttcctctcgacttgcgcctttgtccccatcgcgatcaggctcccgacacaacagccgccgaaggactcctgggaacagacacagctccgcgactacagcgaggggactgagagccagccgccaggtggaaccccgcccggccccgccctccgcgcctgattggccagctccccacccctgcacgttccgattggtgtaaggaaccgctgctcttcagaacgagtcacctcggccaggtgttaccccgccgccactccccgcctcggcgcactggcgcctttccccacaggagctgcctcagattggcccaggagactgtcgcgtcaggagacgaattccgcaccttcagcaggtgacggccccctgattggttggtgttcccgaagtagcgacttcctgactggctgggttctcagttggagctagagggctgagaagtacctctaaggaggaagtaggaaaggcagtcgtggtgtgggattt

SEQ ID NO: 885 - DNA, 30 bp, Homo sapiens
  chr1:161087307-161087337
  hyper
gctctgcagcgtgacggcgattgtcaacgt

SEQ ID NO: 886 - DNA, 30 bp, Homo sapiens
  chr1:161129600-161129630
  hyper
cagcatccctggaccgcggggaatacgccg

SEQ ID NO: 887 - DNA, 100 bp, Homo sapiens
  chr1:161171824-161171924
  hyper
ggagtagggaaggaagcgccgcgcgtttccaagatacgcaggcgggctcggcgagagagcacgaagtatctgccccacgcaggaacggcaattttccctt

SEQ ID NO: 888 - DNA, 41 bp, Homo sapiens
  chr1:161275537-161275578
  hyper
gacttgacagcaggccggagctccgggctctgctcatcctt

SEQ ID NO: 889 - DNA, 546 bp, Homo sapiens
  chr1:161275639-161276185
  hyper
cgatcccccgcccggcccgctaaccgctatttcttatccttgcgagactcccccagccccttggccttcttctcactgacagctttggtgcttctgctgtggtccagcattgcatacagcactggcgtctgggggaggggcgcacacatcagtcaccgagcgactggggcttgactgttcccatcccacccctcactgctgcccggcggctcccagggttctccttcccatcttgtctaggccccaagtcccgctaacctgccgcccgcgcttcgacgcgtcctttcctggcttgtgcaatttccccttctccatagcactgcaagaagagagactgctgtacgtttggcctcgccggaaccccttgcaccgcggacacagcttcctcttccccttggccctcccacccactggagtagtctccgcccagatgggggatagtggggagagggggaggggagctaggctccgccccttacctgagcctcctctgcagggccgcctgcctgcgtagccagcagtaccgaaccacgtagaaaagcagca

SEQ ID NO: 890 - DNA, 578 bp, Homo sapiens
  chr1:161368923-161369501
  hyper
tgataccggcaatcagcgcaaagcgagataatcaccagcgcactcttggatctgtatacaggtttgtaaactatgtggaggaaaccgacccatcgcagtctcggccgaagaggccggagccggagccagagccagagcctgagcagggtctgaaaaaaggaccggccgttcaggactaggccctgaactacaacttgctcctcaggggtccgggtcggaagtgacgacttcattcactgagcagccatttccggttcccagtgtgtccgaagttccttctgggtgtcagaaaagacacaaaaactgacagggcggaaccgcgacacggtgcctgatgatatcaaaaggtctcacggctccggagggacccagtcgcccacagccgccaggggcgccgccggctccgagcccgttgtcgagagccgctcggctgctggggtctgcccttcagtccttccaactctcctcggacctagagttccgggatctcactgcgatctgggcgaattcttacgtagaattcgaaaggatatggggaaggaaaaaaacaaaaacgggaaccactttgtttccgcccg

SEQ ID NO: 891 - DNA, 698 bp, Homo sapiens
  chr1:161369560-161370258
  hyper
accaggcggtggcaggttttccacaaatgactctgaaaagtcagaggctcaccactgtgtctctgacccacgagaaaagtacccgggcgggccacccacagcttcgggatcggggcgcgcagggaagtagccagcaaagcaggtaagtcccgggctgctcgcggcggggtcatgactgagggcacaggggtgaactccatggtgcttcctcaggaaacttccggcgcagtcagggctgcagccagagcccggagatagttgggcagggctccaggcgtccccgaatgctcgtcgtggagttttcctgatcctgtcgggtccctaaggaacgcttggcggggagcgtggacgccctggggccaggccaccgcggtcactgagagccacccccccggaaactggagaaaaacggagtagaagagacctaggggacagacttggccgggtcaagggaaaccagctcatatttggaacaaaatacgccttatgtttgcccagcactgaatttagaagcattttcacattctcgagtttaactagttttgcaacagtgccacgagcaaattattaaacgtgttttaaagatgaagagactgaagctaggtaaattggacttgggtaagatggaagcgctacttaacgttaaggagagtctgcgaccctgatgttctcaggctgtatctcgcttagtgggacta

SEQ ID NO: 892 - DNA, 40 bp, Homo sapiens
  chr1:161410664-161410704
  hyper
ctcaccactatactaacgaggacgacggcgacggtcgccg

SEQ ID NO: 893 - DNA, 127 bp, Homo sapiens
  chr1:161494852-161494979
  hyper
gtacctgggccagcccgtgaagcacgcagtgatcaccgtgcccgcctatttcaatgactcgcagcgccaggccaccaaggacgcgggggccatcgcggggctcaacgtgttgcggatcatcaatgag

SEQ ID NO: 894 - DNA, 273 bp, Homo sapiens
  chr1:161591432-161591705
  hyper
aagtgacttggcagcccaggtcgccaacgcccgtttctgtagcgcgatcggttagcgccttcggctgttaaacgaaaggttggtggttcgttcccaccccgggacagaagtcccacttttgtgaaccttgagtttttgaaactttcactgaaaaaaaccgcgtgcgatgctatccgccgggagcgctggagccttggctctcaaaaccagccgcggtgctaaccgccgggatccctggcagctgacctccgcgttgtgtggttcccaatgtcc

SEQ ID NO: 895 - DNA, 30 bp, Homo sapiens
  chr1:161601157-161601187
  hyper
tgaggacacacacagaatctgccagagtgt

SEQ ID NO: 896 - DNA, 30 bp, Homo sapiens
  chr1:161736089-161736119
  hyper
ccgcctgccgccgccgtcccagatattaat

SEQ ID NO: 897 - DNA, 30 bp, Homo sapiens
  chr1:161993349-161993379
  hyper
tgggtgcggctgagcgggacgggagggtgc

SEQ ID NO: 898 - DNA, 782 bp, Homo sapiens
  chr1:162039283-162040065
  hyper
agggcacctcagatcccggcagtctggggccggggcgaagttgccggcgtcgcgcggccgggggcgcgggcagggccgggcgcgactctcccggggactttcacctgctcggctggcagcgcgggcagcgcgggggcggacccggcggcgggcggggcctctgagcccggcgggaggagccggcctgggcccgccccacaggaggagccgctcgctggcggctgatccagcgtctccgtgacaggcaccctgctccgccgccaccgccaccgccaccgccaccgtcgccttttcttcttcgtcccgggcggtgcgttccactgctctggggccggcgccgcgcccagtcccgcttcgggccgcaagccccaccgctcccctccccgggcaggggcgccgcgcagcccgctcccgccgccacctcctcccctgccgccctcctagccggcaggaattgcgcgaccacagcgccgctcgcgtcgcccgcatcagctcagcccgctgccgctcggccctcggcaccgctccgggtccggccgccgcgcggccagggctccccctgcccagcgctcccaggccccgccacgcgtcgccgcgcccagctccagtctcccctccccggggtctcgccagccccttcctgcagccgccgcctccgaaggagcgggtccgccgcgggtaaccatgcctagcaaaaccaagtacaaccttgtggacgatgggcacgacctgcggatccccttgcacaacgaggacgccttccagcacggcatctgctttga

SEQ ID NO: 899 - DNA, 30 bp, Homo sapiens
  chr1:162467740-162467770
  hyper
tgcctcaggcgtcgcgtcagctcccgtgtc

SEQ ID NO: 900 - DNA, 48 bp, Homo sapiens
  chr1:162530851-162530899
  hyper
gagagcgcgccaggcccgccctgaaagtttctccgcaggaaaatccac

SEQ ID NO: 901 - DNA, 432 bp, Homo sapiens
  chr1:162792155-162792587
  hyper
cagcctgtggtggaagatgtgcgaaagggatgggggaacgctgtggaccggtgtggagtctaggacgacaggtggtgggctctgtccccacgcgcctcgcggccagcagaggccccctcactgcggccgccgggcgggactggcgcgggcggcgctgggctgggcccgggaggctggcatccctgggtgctccggtgcggtactagggggcgacggctgagccgtgggtggagccgctgggtcagtctcggatagaaataaactgggaaactgctgtggtctctgttgcttgcgtgctcggttttcgtgcttatcacgctgatgatgaggaaggtggttttggttacggagtgagcaggtgaacgcctccccgtggaccccaccggactgggtggggaactcacaactctgacgccccgtgactgcatcccc

SEQ ID NO: 902 - DNA, 31 bp, Homo sapiens
  chr1:163378140-163378171
  hyper
acacactcttacacacacacacgcacacaca

SEQ ID NO: 903 - DNA, 90 bp, Homo sapiens
  chr1:163378350-163378440
  hyper
cacacccacacacacgcacgcacacacgcacacacacgctttttaaaaaacagaaatggctcggaaagcgcatgttgtttttaactcttg

SEQ ID NO: 904 - DNA, 30 bp, Homo sapiens
  chr1:164528670-164528700
  hyper
acagatttaagcgccgggagcccatttctg

SEQ ID NO: 905 - DNA, 30 bp, Homo sapiens
  chr1:164529155-164529185
  hyper
accgagggggagggcgggaggaagcaggac

SEQ ID NO: 906 - DNA, 79 bp, Homo sapiens
  chr1:165086961-165087040
  hyper
aattggctgtgacacgcgggccagctgttgtgagaggtggagcgcggcgggcgttttccaggacggaggctgagggcag

SEQ ID NO: 907 - DNA, 30 bp, Homo sapiens
  chr1:165205184-165205214
  hyper
gacagggccgaatgcgcgcgggggcttcag

SEQ ID NO: 908 - DNA, 30 bp, Homo sapiens
  chr1:165322591-165322621
  hyper
acggattcccccagcgccccccaccccagg

SEQ ID NO: 909 - DNA, 30 bp, Homo sapiens
  chr1:165323217-165323247
  hyper
gcttgagggcgaaacgggcctcaaagtgac

SEQ ID NO: 910 - DNA, 127 bp, Homo sapiens
  chr1:165323697-165323824
  hyper
cgctgcccgcccgggtactgcctgctctggcttccgctctcttccgaggctgggcaagtccaaaagttcccgaaaggggggttcaaagaggggcgctcagtgcacgtgatttcgtttcatctagggt

SEQ ID NO: 911 - DNA, 307 bp, Homo sapiens
  chr1:165324196-165324503
  hyper
agcctagggcccagccgcgcggtctaatccccgcgctgcgttgcctactggcccagaaaagtctctctcggccttgcccatggctgaaattggggctggagttggtgggggagagaagcctcctcgaacttgggcgctccaggcctcgggtctcggatgctattgcctctaggccgcgagaagagggcggcatttatgagacgtcgatcagctccgagattaaaaatccagccctgggtatttttaatcacttgccactcagacgcctacgaacaagctcgcccgcccctcgcggctttggggaatt

SEQ ID NO: 912 - DNA, 210 bp, Homo sapiens
  chr1:165324795-165325005
  hyper
tgttcgggccgggccgggaggacctgtagaggagaagaaacgatgcgtctgacgtccgtgcccgctgggactcggcgccagcagccaccgcactcctgggaaagaactgagggagtgtccagggcgaccagaatcagccaggaggatagggtccagccaagagaatgtagggtgggaggagagatcagtcacagcgaactgctctggctg

SEQ ID NO: 913 - DNA, 30 bp, Homo sapiens
  chr1:165325818-165325848
  hyper
gtcctaccagcccgcgtcgctcctcagcgg

SEQ ID NO: 914 - DNA, 242 bp, Homo sapiens
  chr1:165414317-165414559
  hyper
gagtccacatagtgcgtttgagacggctgtggcggcagcagctggtgcctgtcagtaatcacgcataatgctgccgccgccgccgccgccgccgtcaccgctactcttgccaccgccgtcgctgctgcttgagatcctgttgctagtttgattaactcagggttgggctgctgcgtgcgactcttccagctcccggcgcgtccccagaggtccctaccgggtggcacgatctattatctagg

SEQ ID NO: 915 - DNA, 30 bp, Homo sapiens
  chr1:165599886-165599916
  hyper
ggtacggcccaccacgagggcagggctcgg

SEQ ID NO: 916 - DNA, 825 bp, Homo sapiens
  chr1:165737819-165738644
  hyper
agcaagtaaggctcgcgatctttcccctggtggcacaggggaccccggggcccttcctcccggggactgatcaaacgtctgagaaatacccgctctcaccctctgcgagcagagccgtgcacacagagataaaaacgatgaggagagtgtccgcgaacatagtgctcatctcgcaccttcgtctctgcactctcacccgccagggggaaagcgctctacagccaggaaaagtgaagcgaaaacggcttccgtagactccgccaccaccgagtaacagaccaactctgacagcccgaagatcgcacttccgcttccggggcatagcaccggaaaggctcgtatcggagaacggtgtggccacgagagtctagaggaaaccaacccgcaactcactggagctgaagggctggtagtcaggccgaatctcgcgagaattggaactatttcagagccagaggaggatagtggcggcggcgaactttgcccggtagattttactgactggggtgctggcgcgcgcctttttctcggccagaatccagttattgggatagtcttgacttctacctcagcccaacttctgtggtcgtaatattagtttagcttgggtttgccgtgaagtaagaagactgacttccgcaaaggtactgaacgactgggtgtaggtgccagggcatggacgtgaagctggaaccgcgaaatgagttagttgtgggccgctggcctcaaggagcgaacgtcagcgcgaagaggagaagcttgtgcatacgctctgataagggttttaatagaggtattaccacagtgctgcgtgacacggttgag

SEQ ID NO: 917 - DNA, 30 bp, Homo sapiens
  chr1:165796842-165796872
  hyper
cctgggatgtaaaccggaccagccgctgcg

SEQ ID NO: 918 - DNA, 730 bp, Homo sapiens
  chr1:166134160-166134890
  hyper
cctaaaccttttagctattgtcgttgccacctgctcagagtctagttctgaaaggaggcgggtgcggagttatgaaaatttggtaaatataaaagtcccggacgcgaccgcccgtagcctgcggcccctggcggttgaggagccgcggcgatccttggtcttcaccgcagcagccaagcccggcgcgcaccaaccggcgctgctgaaagttggagagctcccagctcgccgatagaattcggcggtgggcgccaggggaatcccttccagtgccgcaattaggaaagttttaaaaagtaaggaccctagacagacaagagatccatcctttcctttagcataagaaacaccccgcgccgcgccagccgaacgctgctcgcacaaggctatccgcccttcttggccgggacgcactcggtgccttccagctccccaccagaactggtccagggggcgcggaaacagagaggcaactgtgtccggcttgtggttccagacggaaacgcctccgggctccctggcccgggggacaagggttcgaaacttcaacagtcgcgagggcaaggacagaactaccaactcccgctcggatgcccgggacctgctcttccaagcccgctccggtttctccaaaggacgcgcggcacagcccatgcgcccccggcactccactccactcctctatggtttcccccaaactcttcccggggagccccacaaagcacagacg

SEQ ID NO: 919 - DNA, 706 bp, Homo sapiens
  chr1:166134933-166135639
  hyper
cgcctctcgaaccctccttgtcgcgttcttcccgccccgcacctttctcctcgcgtttctgggaagtcagaagcaaaccacgagaaaatgccttcgcaaggagcctccctacacccgccctgtcactgaaacaaaagcgtagggaggagggaggtgggagaggaggcgggaggaaggtttagaaagacgatggggacagcagtaggaaggagctggggaggggggtcaaggtggcaagcagagctgggggcccagagtccgctcccgtgccgcgcggcgagtcgcttacatgcccaggtcgctgtaggtgttgaagaactccatctgattgcacgcctgaatccagcccaccacccaggtctcgtggcgggggatggggggcatgaccacgcgggcggaggctttgaagtagggggtcttgtagcgcaggacgatgggcgaggtctcctcgatgcgcgtggggcactggtcgatggtggcgcacacatcgtacaccacgatgttctcgcgccggatccgcgccttgcaggtgatgctttggatacagcccatcctgcagcccggtgccggcacggcgcggcgtggggcagcgcgggggcccgcgcgggcagccgggggcgcccgtcacgccggcatggcgacgcgccgctcgctcccggtcagactcagctcgcacctaggagcggggagccgccgggcatccttg

SEQ ID NO: 920 - DNA, 30 bp, Homo sapiens
  chr1:166846167-166846197
  hyper
tttctccttcacttcgcacactcccatgac

SEQ ID NO: 921 - DNA, 76 bp, Homo sapiens
  chr1:166916844-166916920
  hyper
ccaggggctgagccaatttctcggtgccacccactctcgcgcctgcccccagcccccgtttcctcccccgctcggg

SEQ ID NO: 922 - DNA, 13 bp, Homo sapiens
  chr1:166916936-166916949
  hyper
cgactacaatgca

SEQ ID NO: 923 - DNA, 149 bp, Homo sapiens
  chr1:166944963-166945112
  hyper
gaggcgcgggggaggccgccccgcgggccgcgccgagcggggagcgaccatcgcggcttctcccagggacgcccgcgctcgggaacccgggcgagaacgctggctggggactcgagcaggggagcctgtgtctgcgggcagccacagcc

SEQ ID NO: 924 - DNA, 42 bp, Homo sapiens
  chr1:167028535-167028577
  hyper
agaaaactaatgtttccgctgcagtggcgacaccttgtggtc

SEQ ID NO: 925 - DNA, 238 bp, Homo sapiens
  chr1:167190163-167190401
  hyper
tgagagttcagccgcggcggcagcagcagcaggtaatcattacagcattttacatattcatattcatactcaaccccggctcccgctgcccccccccgcgacttagcataatttattagtactcaggattattataattaacggcggggagatggggggccggggagcattgagcccccgccgggcgctgagcggagggggaaagaggctcggagcggccaggcggagggggaagaca

SEQ ID NO: 926 - DNA, 47 bp, Homo sapiens
  chr1:167423948-167423995
  hyper
ccgagtgagatgaaagcgcttttccgatccaccgaatcagtcccact

SEQ ID NO: 927 - DNA, 30 bp, Homo sapiens
  chr1:167503207-167503237
  hyper
atggggacctctagcggctgttttgtcgaa

SEQ ID NO: 928 - DNA, 30 bp, Homo sapiens
  chr1:167522407-167522437
  hyper
gcgtggcccagtggcggaggcttgtgggaa

SEQ ID NO: 929 - DNA, 597 bp, Homo sapiens
  chr1:167599248-167599845
  hyper
tcctgagaaacttcgcgagacagaggggcccggtggctgcccatccccatgtttgggcacatggagtcgtggctcccgctcttgagtcctgccctgggagggacagtatctgtttagatttgcgtctaaatttaaaccctgatcgtcggcctccctccccgctccccaccctcccctcccctccccttcctccctccctccctcctcctccttcctcgttctctcgcgcagggcccccgcggccggggcagtcccgcagccgagcgcagccgggcgcgcgccaccgcccactcgccctgtgcccgccgcagcccgaaactggccacggccgggagcggaggggacagcggggatcgtgagctccggcccgggcgagcgggtgcgtctgccgcagagtcggcacctgaaggacatggaggtaaaggaccccggagggagacgcggggctgagcggtgagcggtgtatcgggcgccccttccccgggcggctgcccctgccctgagcatggagcacgcggctcatcgctgctgccaactagaagggcaaatgcctgctgttccgacgcctccttgaccaactccgaaggatcgtccctg

SEQ ID NO: 930 - DNA, 30 bp, Homo sapiens
  chr1:168148606-168148636
  hyper
ccaggcgctgctttcgtcaactgtcaatcc

SEQ ID NO: 931 - DNA, 30 bp, Homo sapiens
  chr1:168194874-168194904
  hyper
ttcctgtgtaggcacgatcgcaatatggat

SEQ ID NO: 932 - DNA, 283 bp, Homo sapiens
  chr1:168311896-168312179
  hyper
ctggtcccacccctttcgtcctggtgatggggtgggacggcaggcgccagcctccgtttttctgcccgtgggtatgtgtggttgacctccttaaatcagagccaagcgcgtgacccagaactctgcacaatcacccacgcccacggcaaagcagatgaggctctagagcttgcaagtctttatctagggaactgcgtcatcctcctcggtcggacaccaggtggcagcaaagctccaactcatcagtcaccccaccctccgtccaggccgtcttctgacgcag

SEQ ID NO: 933 - DNA, 206 bp, Homo sapiens
  chr1:169074761-169074967
  hyper
atacccgccgccgaccgggcaccaagaaagtcctcggtggctgggtcacgtgcagatattgttgcctggggtctagactggcctgagtctcaattggtttctacgggacaactcactgcgggctaccgccctgggtgggtttggcaattgtcctgctcgaggtggttcaggccgcccacaaggggcacagccgggcagtcaggaac

SEQ ID NO: 934 - DNA, 191 bp, Homo sapiens
  chr1:169076134-169076325
  hyper
agtttctgggcaggaccggtggcagttggtgtaagtacggggtccgcagctcccggccgccgcgtctgatctttcccgggcggcgcatcccctgcgcagggtccgcggccggttccgcacccaccgcgctggccggggtggcgggggcgagggtggtggacgctgctgggtcgcgccggcctgggcttgca

SEQ ID NO: 935 - DNA, 257 bp, Homo sapiens
  chr1:169396431-169396688
  hyper
cccagctataccagacgtttatacctttaccctctatcccaccattaacatctccgcatcgtccttcccttctctccctctatatccctcttgcctgtgtaaaatgcggcggctgggatcacagagatggccgggggagttctcctctcctcctctttctaagctcttcacattgaggcaaaggagaccccggcacctgcctccgcggcagccaggaccacactgccatggcaacagcgtgcctctgcgtcctccat

SEQ ID NO: 936 - DNA, 200 bp, Homo sapiens
  chr1:169396730-169396930
  hyper
cgcatgcaatatcctcagaccaccgacccctcccggcacccatcccggtgcttgcgaagggccagtgaagctgaggtttctaaggggacgactaaggaatccacgcatcactaacgttatagagactcgcgaagtgccgctgtgttggttgtgaaatttccctcttgtagctgtctctcgtcagatttagaatttcttag

SEQ ID NO: 937 - DNA, 92 bp, Homo sapiens
  chr1:169454523-169454615
  hyper
aagccacattacaacacgatcagcatactgcctgacgcacaaggcacggggcctctggacgcgtgttctgagcccttcgcaggagactcgtc

SEQ ID NO: 938 - DNA, 30 bp, Homo sapiens
  chr1:169862706-169862736
  hyper
cgcagattacagggcgccccacaatcagca

SEQ ID NO: 939 - DNA, 37 bp, Homo sapiens
  chr1:170043653-170043690
  hyper
caggcgcggttatttccggggacggtggccaaagtac

SEQ ID NO: 940 - DNA, 30 bp, Homo sapiens
  chr1:170630382-170630412
  hyper
aaaggagggagaggcgaggagctgctctat

SEQ ID NO: 941 - DNA, 30 bp, Homo sapiens
  chr1:170630719-170630749
  hyper
ctggggagatcgagcgacttgcgcggcgca

SEQ ID NO: 942 - DNA, 209 bp, Homo sapiens
  chr1:170633365-170633574
  hyper
tccagctacgggcacgttctggagcggcaaccggcgctgggcggccgcttggacagcccgggcaacctcgacaccctgcaggcgaaaaagaacttctccgtcagtcacctgctagacctggaggaagccggggacatggtggcggcacaggcggatgagaacgtgggcgaggctggccggagcctgctggagtcgccgggactcaccag

SEQ ID NO: 943 - DNA, 30 bp, Homo sapiens
  chr1:170633858-170633888
  hyper
agggactctgtccgcggcggactctcttta

SEQ ID NO: 944 - DNA, 308 bp, Homo sapiens
  chr1:170640316-170640624
  hyper
ggaaactttcttaacgggcagagagagaatacacggaaactcggatgcagtaataaagttgacataggagtcggaacagggggctctttttggatctcacctttactggggcttgaggttgtggaatgggtggaagagtaattaactgaatgaagaattttaacgttgaaaacagagcccacagtatttttggttatagtggtgtggtctctgcctcggcaaagaaacaaacacccccaccccatcttcgcagttctcctctctgctgtagcgacgccaggcgctgctttccgccgggtaaattagcg

SEQ ID NO: 945 - DNA, 50 bp, Homo sapiens
  chr1:170640664-170640714
  hyper
cgaaagggggcgcgctcctcccaggctgcgctggtacctatcctgccttc

SEQ ID NO: 946 - DNA, 399 bp, Homo sapiens
  chr1:171220521-171220920
  hyper
gtctgcaagggacaggctccccgcagctggtgccccctcgagaggggcgctgccgcagttggtaccccgtgtgagaggcgctgccgcagtaatgacttactgataactcactgacttgaccgcgcgggttcttttcttaccttcgttttcgggcggttcgtcgcgtttccttcacagcattcctcacacagttcctcacacagcgcctcacatggggcaccagctgggggcagggctcctctcgaggggtcaccagctgtggggagtctgtcccttgcagacccctgacccaatgaccggtgaataaagtacgctgacacacagatattctgagggtcccaggtgcttacaggctccctgccgagtcgcaactgtttacagggctcagcagggagcctg

SEQ ID NO: 947 - DNA, 98 bp, Homo sapiens
  chr1:171220979-171221077
  hyper
ttattcattcatcgcgtggtcaggggtctgcaaggaacagacttcccgcagctggtgccccctcgaggagcgctgccgcatatgcacataaggagcaa

SEQ ID NO: 948 - DNA, 30 bp, Homo sapiens
  chr1:171455048-171455078
  hyper
gtgtctggggaagtcggcctccagcttggg

SEQ ID NO: 949 - DNA, 176 bp, Homo sapiens
  chr1:171751129-171751305
  hyper
ccagggagtttggctccgttgactattgggagaagttcttccagcagcgaggaaagaaagctttcgagtggtatggaacctacctggaactgtgcggggtgctacataaatatatcaagcccagggaaaaggtgaggagcgcgggttggtagcccttcgtacgtgctccggaaggt

SEQ ID NO: 950 - DNA, 202 bp, Homo sapiens
  chr1:171810194-171810396
  hyper
tgccaccctgggaggagtcatcgcggattctggagaagggcgtgacagaggagatttcctttcgggaagtgtagtctggcagcggtgccccggtggtggcggcggcggtgctgctgttgctggtgatcgtgtggtggtgttagcggcgatagtgctttccactgggctttggcttggtagccgctgaaagagaacaacgctg

SEQ ID NO: 951 - DNA, 773 bp, Homo sapiens
  chr1:171810513-171811286
  hyper
cgcctggcctggtggtccgatgggaagcccggggcggggcagccgcggggcgggggcggggcgtcgcggagataggccacgcccctgcccgcccgcgcaggcgcgctgcgggtcgttagctgtcagagccaagcggcgggctggcggcgggctccgacgtctgcgccaggacctggctggctgagcccggcgcagcagcagcagccagggcagcgcggcccctactccctgtcaggtcgtagaggcgagcagggaccagctggtcgccggcccctcgggcaagatggggaaccgggagatggaggagctgatcccgctggtgaaccgtctgcaggacgcgttttcggcgctgggacagagctgcctgctggagctgccgcagatcgccgtggtgggcggccagagcgccggcaagagctcggtgctcgagaacttcgtgggcaggtaagcgcgcagggcgcggagtaaggatgcggcagtggggcgaccccgctgcgggccgttggaacgtggacgggcagcgggagccagagggtggatggaccaggcgctgcggtggaatggggggcagagtggaatggggggcagagtggcggtgtccgtggggcgggcggggtcctccagctctgggcatcctccgtcccctgccaccccccgcctggtggccctcctgcctgcctttcatcgtgcgatacaaagccatttcctccctgtcctccagtcggggagtcgggggaggggtccgccccgggctcgacccccaccccctcggt

SEQ ID NO: 952 - DNA, 238 bp, Homo sapiens
  chr1:171811320-171811558
  hyper
cgccgaaagcttcccagtgcccctctcctgttttcccagctcaacacccccctccttttcctgtcgccctccgtgaggctccctgtgaggctgtggggctttatcccccgagccccctcccttaggtggagatgctttccttctcgccagggttctcgttcctctcagctgtctactgttgcctgcctctagctggggaggcggggtgcgaggagaaagacgtcgtttgttgtggtga

SEQ ID NO: 953 - DNA, 220 bp, Homo sapiens
  chr1:173638806-173639026
  hyper
tggacagaagcagtgtgaggacgctgagattgaagcccactcccctccagccctgcccgagcagcctggagggaagatgtccgtctaccccatcgcactcctccccaagtgcccaccccggcccacagcgccaggacccctagactcaccacacccgggccccggcctcctcggttaccatagcaacggcgcaacacgcgaggcagcgcctcctcctgcg

SEQ ID NO: 954 - DNA, 30 bp, Homo sapiens
  chr1:173793302-173793332
  hyper
cggggcgggccctgcgacttcactctggga

SEQ ID NO: 955 - DNA, 30 bp, Homo sapiens
  chr1:173793640-173793670
  hyper
cacttaaccactatcgtcaacctttccaat

SEQ ID NO: 956 - DNA, 31 bp, Homo sapiens
  chr1:173836777-173836808
  hyper
ttaacaatagcttactcgggtgactcggcat

SEQ ID NO: 957 - DNA, 31 bp, Homo sapiens
  chr1:173991621-173991652
  hyper
agtcaccggccaccaacgcccggagggagac

SEQ ID NO: 958 - DNA, 30 bp, Homo sapiens
  chr1:174128282-174128312
  hyper
aactgccagtagaacgcaccccggtcaggg

SEQ ID NO: 959 - DNA, 30 bp, Homo sapiens
  chr1:175091630-175091660
  hyper
aatcaagggagtatgtagtcatggaagcca

SEQ ID NO: 960 - DNA, 65 bp, Homo sapiens
  chr1:177133521-177133586
  hyper
ggactcacccagcacgaagtagggcagctccgtgttctccaggtcgtccaccacgaccatttctc

SEQ ID NO: 961 - DNA, 345 bp, Homo sapiens
  chr1:177133689-177134034
  hyper
cgtgatgcttttgagcttgcactccagctccttggatggatccacgtcgccggcggccgtggccagcaccgccgccggcccccagcagcaggcgagcagggcgcagagcccggctaaagccatcttgagccccggccgccttcctcctagcgctgcgatggtgggggaggaagcgagcggggagggagcgagggagcgagcgcgggaggcgggggaggttagggaggggatggagagccgggagagccctggaccccggaatgagatgccgcttgcagagtcctgggtttaagctctgatgtctggagagccccggattctttgtttcccggagctgcttatctg

SEQ ID NO: 962 - DNA, 74 bp, Homo sapiens
  chr1:177140099-177140173
  hyper
gcaggtgacactgcttaggtacggagcgcggagtcggagcggggacgcgccgggctgcagctctgggatgcaat

SEQ ID NO: 963 - DNA, 523 bp, Homo sapiens
  chr1:177140304-177140827
  hyper
cgagggagcggtgaagccggaagacctgtctctgcccatgtgcaaggcagtgatttcgggtgagagagcgggtgggtgagtctctttagagttggaaagaaggcaaaatcttgggtttctcctcggcggagggacaggggactcccccagttgggtcttgcacttcccttacctctcccaccccgcgtgcgccccggcccagtgccgaagccccacttcaaagatgctctgggagaccgggatcctggctgctcagcgggaaggcagcaggcaagtggtctaacgttggcggcggtggcggtggcggcggcggcggcaccgacagtaaagcggggagcaagagaatttgaaaagagacatccgctccctctcacacgctgagggggaggcattcgcgtttccccaaatgagaaagaaccacaagaaatcatgaagtaaaaactttggaaagctgccactggagatgttgcacaaaaacctggaatcttttaggagtctcctcccagtcgttgaaggtttgggg

SEQ ID NO: 964 - DNA, 296 bp, Homo sapiens
  chr1:177150841-177151137
  hyper
ggctgacgggtgtgccggcggctggcggggtcttgggaggcgccctgcacacgcctcttctttctgaaatctccgacctttcggatttgagccgcgagggaccgcggagcaagggcagcctcctccggaagcctcgggtcactagagacccctagaggcgaaaagctgtgttacaagcccccggccgcagaggcgcaggcgggattcttgccccggaggttgccgaggagtggccggtacctttcctaaaacccttatctgtaagtacactccggcaagctcgaaagggacagcag

SEQ ID NO: 965 - DNA, 1204 bp, Homo sapiens
  chr1:178062639-178063843
  hyper
ttctgtttaaatttcccgcacccttttacctccccgccttctcaaacggtctttactttgagcagcagagacccggaccgctcaatacccggctatccctgggagggtacttggaaagtaggcgggacaggccggatgaataattcggtgtccgacttttcctgcctgcggcgcagtccctccccggcttcgttactcgagtgcacacgcggccgggctctcggccctcgattgcttcagcctatcaccctgggatgccgcctgccgctgccgccgccgccgccgccgccaccgccaccgccaccgccaccgccaccgccgtggctgccgggtttgtgggatccgccgcggagcaggagccagagctgtggccggagctgtggcctgagagtcagggggcgggcaggctcattccagaagtgggggccgaggacaggcgggctagaacccggggccaccgccccctacccctcctcaggctgagggaacgggcactcggagcttctgaggcggcggcggcgggagccggtcagagggggcggcccctggcggcgacgcccccaagcccagccctgcccggccccgctccatccccagccagagcctggtctgaccgcgagagacgccggcggggctgaagaaggcggctccgaggaggtgggagggcgagcctcccctcccgggttcttctgcgtcctctcccgggagggacccacacacacctgagcccggacccacccttggtcggggccacgctggatcctcctcccggcctgggtcccgcccgccgactgcaggtgggctgcatcgcccgagcctcgggcagtgggcgacggggaaggaggtgagaggtgtccgcgccggctgccgctcgggtccctgccctcgctgcgcgctctcctcctccccttaccgcaggcagggcgcggagccgcgcgccagcccgccccgaagccgccgcctcgtccccctcccgcctcggggcaccatggagctctctccgtcgtccggaggagccgcggaggcgctgtcctggccggagatgttcccggcgctggagtccgactcgccgctgcccccggaggacctggacgcggttgtcccagtcagtggagccgtcgccggtggcatgttggatcggatccttctggagtccgtgtgccagcaacagagctgggtccgggtgtacggtaaggaccacagg

SEQ ID NO: 966 - DNA, 31 bp, Homo sapiens
  chr1:178694819-178694850
  hyper
ggcgccgtcctgaagccgggggcgctgcgac

SEQ ID NO: 967 - DNA, 31 bp, Homo sapiens
  chr1:178995254-178995285
  hyper
gagggcgcgcgacccccgcccccggcgcggc

SEQ ID NO: 968 - DNA, 30 bp, Homo sapiens
  chr1:179545151-179545181
  hyper
ggccgcgggcggggcgcacccggaaccccg

SEQ ID NO: 969 - DNA, 449 bp, Homo sapiens
  chr1:179711889-179712338
  hyper
cctcttcctgccagacttcaccgtcacagctctaatcacaccctgactgatctgatcccgccctgccacgaggcccgggtacccctcagcggcggggacatccaggtgtccctggatttccagggcacagtgcgggccggaaataggaacacagaggagcccttcgggaggctctcgaggcagtctctttccagtggatagcgacacaccctggtccctaagattctcatgctctccgaattttccgtcctggacccgatctgtagggcgcaaagtcccctgtactgaggcgttcccagggcgcccgcctcccgcgtttacatttcttaggcaaaaaggcagcggagctaagcaggggtgtttggaaggcgcccgttgcgctgtttgactgcgtggcttcacttggcccgcgtgcatcagcctctctggcgggggattctccccggact

SEQ ID NO: 970 - DNA, 143 bp, Homo sapiens
  chr1:179712410-179712553
  hyper
cgcccggagcagggcagtcctcggagcgccggggaggccgcggagcctcacgtgtgccgccccagccgctggcgcccggaaggacgcgctgcgaccccgtgggagccgaacgcgggagtcgctgcccgagcggagctgctcag

SEQ ID NO: 971 - DNA, 166 bp, Homo sapiens
  chr1:179712567-179712733
  hyper
cggggcctcatcgtgcaggggagcgagcggaggggcggggcggggcgcgggcgggctgaggagccgccgggctcgggctccgcgcggggatgtgtctggccaccgcgtactttcgagggcgcctcaacacccgggtaagcgcgccccggctgcctccctctgccca

SEQ ID NO: 972 - DNA, 15 bp, Homo sapiens
  chr1:179712830-179712845
  hyper
cgactcgggggcatc

SEQ ID NO: 973 - DNA, 13 bp, Homo sapiens
  chr1:179713161-179713174
  hyper
ttgagaccggggc

SEQ ID NO: 974 - DNA, 186 bp, Homo sapiens
  chr1:180123500-180123686
  hyper
gtggggtcttggtggtcgcagaccaagcgtccctcttctcacatctaattcacaacgtctcatcgctccgcgggagcccaggaactgccctacaacagccgaaatccgggtcgtctattccaacggactcctcttccgttggatacgggggccgtgagaggccaaacaacctccgcgaggctaccc

SEQ ID NO: 975 - DNA, 890 bp, Homo sapiens
  chr1:180123700-180124590
  hyper
cggcgggcgctccattcctttaccggactgtacacctcgcctcctggggcctgaggcgggaacccgggtcgcgctgctccgaggcctcggcggaccgcgaaaggatggctcaccacccggccagggccagcccctgcaacaagctcagccccgcccgctcccgcgcccaggagcggccggcggggcggggtggctgggccggcctcgggggcgggggctcgggggcgggggctcaggggcggggccacgtggctcctccttgcgggcggaggcaggcggtgccgcggcgccgggacccgactcatccggtgcttgcgtgtggtggtgagcgcagcgccgaggatgaggaggtgcaacagcggctccgggccgccgccgtcgctgctgctgctgctgctgtggctgctcgcggttcccggcgctaacgcggccccgcggtcggcgctctattcgccttccgacccgctgacgctgctgcaggcggacacggtgcgcggcgcggtgctgggctcccgcagcgcctgggccgtggagttcttcgcctcctggtgcggccactgcatcgccttcgccccgacgtggaaggcgctggccgaagacgtcaaaggtgagaagcgggggcggcccgctcccccgtgccccgccgcccggacccctccacctgcccggtgggcagcctcctactccgggagcgcgtccctcttccagtcacctccgcccacctcttcctctccgcgcatcccacgcccaccaccttcatgtttctcagctccatttttgcctcccgctcccttgccttttcctcttggccctcatcccgagcttctttccctctccgcggcctgggcccccagacctgccctgctcgcccggttcgtcccccgccaggt

SEQ ID NO: 976 - DNA, 898 bp, Homo sapiens
  chr1:180203721-180204619
  hyper
ggaagcttggaaagccgctgtcccagtgcgctccgcatgcggaattaactgttaaagccggacacggagcacgcaggtgcagcaggtgaggggcaaaggtctgcattgagcagtccgcagtgtcccgggaagtcgtaaagtcgggactgagaagaagcaggacctaactcaagtttatttcctctcttggccgaggtccgggctcgtggaaaaccagagctaggcggggctacgcagggctgagcaggagtggcgtcctagggtctgggagcgcgacccacatgacctcgctacgaccggggcagggctcctccgccccgcgggcagatgccggcctgggtggcccggggaacagacgatgaattctttaaatgagcgtttgctgcgcacccatgggcggctcacgatcctgggcactcgcccgggaatcccgggcgtgctctgggttttgggggactcgccggtggaggtagatgtggacagggcggccggcccttcgcgggtagccggctttgcgcttactgcgtcccgcagcggtgggtaaaggtcgtagcccagaaggggacaagggagggaccgcctctctctccccggtgcgctgcaatagaggttcctgcgccttggcccttgcagtccatccgcccagaggttcgcgcccgttttcggagcttattatctcaggtagcccagaggtccgactgagctggaattagccaggcctgggacccctttgctgccctttagagtggtggcagggacttttccagcaaggataggcgcggcaggcgcgagtgcggacggcgcgcccattaggaggaggccgggtgaaaacctctcttcctctccagacccatttcgttccaagcatttggaatgacaaaattaaaccccaaccctg

SEQ ID NO: 977 - DNA, 98 bp, Homo sapiens
  chr1:180204897-180204995
  hyper
cgccggggaaggcgaggtggcgcgggccaccgggtgcactcaccgcacgagaggccgcggctggactgggaccgagcgcatccctgtgtctcaggggg

SEQ ID NO: 978 - DNA, 30 bp, Homo sapiens
  chr1:180472185-180472215
  hyper
gaatcactgctctgcgtgtttcgctctcca

SEQ ID NO: 979 - DNA, 31 bp, Homo sapiens
  chr1:180606644-180606675
  hyper
gacttgacaagaagttcgccaaaaatttaaa

SEQ ID NO: 980 - DNA, 516 bp, Homo sapiens
  chr1:180881316-180881832
  hyper
cgtcggtttgggccgcggctgcagggaatgcccctggttgcgacccccgtcccgcgctggggaaagtgatctgctcgagagcccccaggaccctgagaaccggtccccacccaaggcggcggcgggcaattccggcaccgcggcagacgggatgcgcggagcgcgttccctccgggtttccctcacgcctctggagagcgggaaccaacgaccttgacctcggaggaaacggctctacggagcgatggacggccccacagagagggcggccggctcctctggaaaacttgtccacacaaaaggcattcctcagcttccaccccgaaaggcgagccctgggtgtagggttaccagcggcgcgcggagcccgccgagaacgtggtgcgcccccagctcctgcccgcgctccccggcctccgtgcgccccgcgcgcctccgctcttgcgcccgctttcccgcggggaaggggccaccgccctgcgaggctggcggccgccccgtcgtccccaagctcgg

SEQ ID NO: 981 - DNA, 30 bp, Homo sapiens
  chr1:180882272-180882302
  hyper
ggccgcactccctccggccccggattcggg

SEQ ID NO: 982 - DNA, 521 bp, Homo sapiens
  chr1:181058993-181059514
  hyper
cctggagcacagccatcgtggccttctgagcccttggcccccctgcggggaggaggtggagcagcgggcgtccccgaagtgagggccaggcccttcccggctgcgaggacgcccagagaccgcgggcgctgagcgcgttgggcagactggttgcctctgggcatcgcaaactgcccccgggcgcatctggcttatctggagacctgggagcttgaggctcattggaagaggacgatcgttaacttttgtgtttgtgtatgtctgtgtatgtaagtttgtcttgtggcattaagactattttgctcttctggaatgcaccactccttccccagggtttaagagattgggggcagacagggactttcctctgccggctgcgtggagaaggaagcggctaaaaggtttgggccggggagttccccattcgttctccggggagggagggactttacacctacccctcaccggaaagctagacccgcttcagggccaggagtggcgtttccgcacaggatttccta

SEQ ID NO: 983 - DNA, 58 bp, Homo sapiens
  chr1:181287286-181287344
  hyper
atgtgtctgtcttgcgccccgcatgcactgcctgcggggctgcgctgcactccccggc

SEQ ID NO: 984 - DNA, 197 bp, Homo sapiens
  chr1:181287621-181287818
  hyper
gagggggactcacgcgccgccggggagcggagccaggctccgagaagggagcaggctcgagccgctgggttttcgcaagccttggggcctctggccgcccttccatgcctccgggcgcgggcggctcagcaggtccccggcttcgggaagttttgtgcgcggatcgctggtggggagggcgcgcgggccagtggctg

SEQ ID NO: 985 - DNA, 346 bp, Homo sapiens
  chr1:181454935-181455281
  hyper
gctgtgcccctctcttaggggcgtgtttattcagacaggcgccctcccgtttctttgcggtagacaaagccgcccaaccgccccgcgggtggcaaagtgtgccagcagccatcgttggcacctcggacagcgccgctgaaactcccggcggcccggggctccccagttacccgggttcagcacctcgggtacttctggccgggcccagccttggagctgagaaaccaggcacgtttcctacaccacgtggtcaccttttttcacgttttctcttccgctgcaaagacaccgcctttccaccaggcgttgcgagcgcgcaaggtgcggctgtgagtcttactcctcc

SEQ ID NO: 986 - DNA, 58 bp, Homo sapiens
  chr1:182360259-182360317
  hyper
aaggcccccgggaccccgaggcgggagccggccgcccaaacaacgctcaccgttacac

SEQ ID NO: 987 - DNA, 30 bp, Homo sapiens
  chr1:182360887-182360917
  hyper
ctgctcacacgctccgctcttctcccactc

SEQ ID NO: 988 - DNA, 557 bp, Homo sapiens
  chr1:182583782-182584339
  hyper
cgacagagcggaggctccgtctccaaaaaaaaaataaaataaaataaaaggaaagtgtttgaaaagtgcttaagtgctctgaaaagtctgagatgctgtgcaaatagtgcggcattatccttatttttgttattaaaatgagcgagacttgccctgaccagcgacgaattgactcactcagttttgggggagggggcggaggagtgggaggagcgggaggagaggggccacgcttgtcttctccgagggatgggaatttccacccagctggaagtaataagcgcccgaggctcgggcctcactgtctccacccccgctttccctttcctctgaccaagtgacaactgctcggaaacagacaggacagagaatcttaaaatagagcagcaaatatccgcggctcgccgccccgggctctgtggcaccatcagcagcttgcgcaggacacagacgtcggctcacgcgccgcagccctcggccccggaagagccgcggccgcggagcagcgaacgcgtgcctgccagggaaaagcagtcaccaggaacgcggcgttttgg

SEQ ID NO: 989 - DNA, 217 bp, Homo sapiens
  chr1:182584403-182584620
  hyper
cggcctgcggctccggaaggcgaagctcttccaggaagcagcggcggccccactggccctctcaggctgcggagaaagggcgggaggccgcggggctctccaggactcagtggtttcggagaaactcgacttcccaggctcggagggccagtttgggattgttatagaacaaaacgtgggcggcataaagtgctccgaagtggagatcaccttgaag

SEQ ID NO: 990 - DNA, 287 bp, Homo sapiens
  chr1:182992749-182993036
  hyper
ccccaggctcaagcagcgaagcggcctccgggggacgccgctaggcgagaggaacgcgccggtgcccttgccttcgccgtgacccagcgtgcgggcggcgggatgagagggagccatcgggccgcgccggccctgcggccccgggggcggctctggcccgtgctggccgtgctggcggcggccgccgcggcgggctgtgcccaggcagccatggacgagtgcacggacgagggcgggcggccgcagcgctgcatgcccgagttcgtcaacgccgccttcaacgtgac

SEQ ID NO: 991 - DNA, 103 bp, Homo sapiens
  chr1:183386215-183386318
  hyper
tcctgcttctaaagtgacctccgcgtccctctttccgtgtctaaacgctcatgccccacgcctttgagtcctacgagcagctgcgaagccgcgtggcttccca

SEQ ID NO: 992 - DNA, 228 bp, Homo sapiens
  chr1:183386598-183386826
  hyper
cggctccggctcgcgcagggcctcccgcagcctccgcccggccccctccccgtcctaggcagcgggtccctgaggccgaacctaggcggaaaagggccccctccctattcactcagcatccacctcgcgcgggcaatacacggcccacaattcccaaacactggtccctgggccgcccagaatcaccagccaaatccgaaattaatcttgaagccccagcccctgtca

SEQ ID NO: 993 - DNA, 633 bp, Homo sapiens
  chr1:183386946-183387579
  hyper
cggcgccccaacctctgcccccatcccggtcttcgccagcctggtagccgaaccaccgcaccgccacactccagttctggtatctcgaacccctgcccagccccaaatgatactcatctctagtcccctcccatcccccacctttggccccctgcgagccgggtctggccccggcaagtgacgcctcggaaacgcagtctgcgtaccctcccctgagtccaaaatgaaggggccgacctccaccagctggatgagccggcccacccctccgaaggggcacacgccttcccgttcgatcgccctggaaaacacaggtgcctgggaaaggagaggagcggaagcggcttccagaggtgggcgggaggactcaccaaacatctgaatgtgccctttggtgatgggattgaagctgccgcaggcgagcaagataacgtgggtcttggtggtctcggtcatggtgcagatgggtccttcgcggtggtctaggggttgcctctctttttgtgtctcgttgtgtctgcagagggagaaaggaaggcgaggctccggcggtggatgctgtggactccaaggagccgctccagacgcaaaccgcgtcactctccgcctccccttaacgcttgcagctccggc

SEQ ID NO: 994 - DNA, 30 bp, Homo sapiens
  chr1:183440894-183440924
  hyper
agggtgaccctgtccgcacacatcggttac

SEQ ID NO: 995 - DNA, 554 bp, Homo sapiens
  chr1:183774207-183774761
  hyper
gaggagtctgctcctcgcttgctcgctcgctcgccgcgctccctttgtggcccgagtcgcgcgcaccggcggcggcgggggcagcgcggcgcgtgtctgtgcgctgcggtcgctcgggaccgggaccggggcgaggcgccgcggggctgagcccagcagacattgcgttggcctccgagcagggcgcatcatgcagcgttcgcgcaccggagagaaaactgagaatgaaattgctttggcaagctaaaatggtaacgagagctctctgccttctcccgaggcttctctggtggggaatcttctcccgctttcgctgggcgtgttttggactccctcggagtgaacggagcaatccgattccatacttgtgagctaaagctctctcactccgctttgtattcctctctctctgcgtgtcttctccctttcaaccgtacctactttctcagcaattgcctgtggtgtgtctggggcagatgcatgtcaggaggggagaactttgaaggaaaaagaactgttagtgtgggtgaaccgcggagcgcttctgcgtccca

SEQ ID NO: 996 - DNA, 213 bp, Homo sapiens
  chr1:184005519-184005732
  hyper
tcccagggcatcttcgtctctccccgggacgtggaaccccgatgcaccggcagggacagcccggagcgctcgcaggagaccaggcccacggtggtgccatggttgggcacactccgcgggctccgcccaatctccacccctaggtccaggtccccctaggagagctaggagcacatttccagcctggagcaggagcccggcaccggaaagtca

SEQ ID NO: 997 - DNA, 508 bp, Homo sapiens
  chr1:184355380-184355888
  hyper
atgcagtggtggatggcgatctctctggaccactccggacgcgcccagcagacgcagcctacgcctttaggtcctaggaggctgagaagggtggggagaggggggcagcacgatcttgtgtctttcctccccgtgccgcctctaccgaatcgcggatgcttcattaatcttgcaggcgccgcagctcgggtcagtatggaggcggatcggtggcagagcccgggcctctgggctgcgcccgcccgttcagcctggcccgggaggggagcggccgcgcggtgggccaaagacgcccggccttccctccgtctgcttccagcaggcacagccgggaggctgggctcaggggctgacccgaatctcccctagagctgggcccacccggctgccccccgagcagcctcgccgctcccacgccaccgcccaagtgacaggcccgggaaggccggacgggacgcagtcttcccgccggggtcttccctccggctggccggccgctgcagggcgc

SEQ ID NO: 998 - DNA, 279 bp, Homo sapiens
  chr1:184355935-184356214
  hyper
cacacacacacacacacactgccgcctccttcccgccccgcagccctagcagcccccaacccgctccccagcgcgctgcgccccggcggcctccgcaggccccgccccggggaggagagccaggcgcgcgcgggagctaggctcggggaggggccggcggtgggggagtgtctgctgcccccgcccctcgagtgagtgactgagcgaggagctcccctccctcgctcgctcctcgcaagctcccgctcgctccctgcccactcccggggggacgttccg

SEQ ID NO: 999 - DNA, 97 bp, Homo sapiens
  chr1:184356590-184356687
  hyper
cagggagggaggcctgcggggtgtctgccgcacggaagggatgggagccgcggtcgtggcgctgcctgcgcggggcccgggccggggctgctgctgg

SEQ ID NO: 1000 - DNA, 30 bp, Homo sapiens
  chr1:184464148-184464178
  hyper
ctgcagttcatctgcacagcatgtcatcgt

SEQ ID NO: 1001 - DNA, 245 bp, Homo sapiens
  chr1:184722804-184723049
  hyper
aaccagctagctcctcgttttaatctgcatctcctacgtttatggaggttgagtaacttttcatgtttatttaccacttccatttcctcttctggcttaaccgttcatgcctttctcccatttcctactggttcttcgcttttttcttattcatgtgtaggacctcgtgtatgtattactctgaattaaatggtgtaaatagaattgataattttaacacacttccaagacggataaaaactact

SEQ ID NO: 1002 - DNA, 171 bp, Homo sapiens
  chr1:184724679-184724850
  hyper
atcccccttttgcagacgagaaaacagaggcttagaaaagttggttaacaagagctcgtcacactgctgtattagaatccatccagcctctgattcggaagcccttgcatttaaccaccgcgcagtactacaaggatgaaggagcacgtgggtcctcgtacatgattaata

SEQ ID NO: 1003 - DNA, 30 bp, Homo sapiens
  chr1:185126176-185126206
  hyper
gccaaccaccaaaccgaacaaagactacag

SEQ ID NO: 1004 - DNA, 31 bp, Homo sapiens
  chr1:185287293-185287324
  hyper
accccaccaccttgcccgggagggagatctg

SEQ ID NO: 1005 - DNA, 30 bp, Homo sapiens
  chr1:185510393-185510423
  hyper
gaacatctctgatggtctgaggcagtccta

SEQ ID NO: 1006 - DNA, 184 bp, Homo sapiens
  chr1:185703320-185703504
  hyper
gtgccggtgggaaccgagctgacaccgtaagcgcttccctgggactgaattgaccctacaatcagtggagggaaaagtcaccctccgggggggcctccagagcaaaggagggaggacggcaactggccaatcaggaggcgaggccgagccaggcttcccctcgtcgctcgtgagctgcaaacag

SEQ ID NO: 1007 - DNA, 401 bp, Homo sapiens
  chr1:186649186-186649587
  hyper
gtgggaaagctggaatatccacggagttctttcgaactctagcggtccaagctctttcccaagtcacgtagcttctctattcggagagaagtcggagtactgggatagacccaggaggtcagagcggaaactctgcccgggtgcgtggaaccggagtccccggtgcgcggcgccaggtactcacctgtatggctgagcgccaggaccgcgcacagcagcagggcgcgggcgagcatcgcagcggcgggcagggcgcggcgcgggggtaggctttgctgtctgagggcgtctggctgtggagctgaaggaggcgctgctgaggagttcctggacgtgctcctgacgctcactgcaagtcgtatgacaattggtcgctaaccgagagaaccttcctttttata

SEQ ID NO: 1008 - DNA, 62 bp, Homo sapiens
  chr1:186649862-186649924
  hyper
tcgcagtctttgcccgagcgcttccgagagccagttctggactgatcgccttggatgggata

SEQ ID NO: 1009 - DNA, 30 bp, Homo sapiens
  chr1:189649417-189649447
  hyper
gggacctttgagaggatcattccactagtg

SEQ ID NO: 1010 - DNA, 30 bp, Homo sapiens
  chr1:190444761-190444791
  hyper
gttgccgtgagctgcggagaaatctccacg

SEQ ID NO: 1011 - DNA, 30 bp, Homo sapiens
  chr1:190447406-190447436
  hyper
cgggggcgctgtgccggtgaggcttaggca

SEQ ID NO: 1012 - DNA, 30 bp, Homo sapiens
  chr1:196577336-196577366
  hyper
ccactcacctgtcgtcgttttgccatcctt

SEQ ID NO: 1013 - DNA, 318 bp, Homo sapiens
  chr1:196577707-196578025
  hyper
acgctgccaaggaaccgcccccaggctcggcaccgcctctggtccccaggactagggggaggcgggtataaaaagttacttcgccgaaaaagacgcgcggtgcctagaaagaggggagaggggtgggagtgagcgccgcttgatggtgaagcactttccttaaaggcagttgccagatcctcccagagggcagcctcccggctactgttccctcgggcgggcttgcatccggcacagccctgagctggcgggaatcgggggcggtgggtttcggccccagacgcggccaacccggctctccccgcaatctccctgtgg

SEQ ID NO: 1014 - DNA, 60 bp, Homo sapiens
  chr1:197744742-197744802
  hyper
gggtgcagggggagcgctagtgcctgctgggatggcccacgtaccgctttgccacctagc

SEQ ID NO: 1015 - DNA, 827 bp, Homo sapiens
  chr1:197880004-197880831
  hyper
agccagggggttcgccgctcctggtttgttccttaccgaccctaaactgtatggcggagcttgtgggtcaggcgtggaggcggcatccactcccacgtgccccacatgcagcagcaatcccacgcggttttcgcaagcggctgggaggcaagcgggcgtccccccacaccccccccccactgcgccctggacccacgccacgcaccgccaaggagtagctatggtggcacgtggaggaggggcgggtaggcagggcggcaccatcaccgggaccagcatcttggaacggtcaatctcactgctcatactctcctccctaccggcgcgggagccttgctgtaatcccctgccaccccatctccgactgtgaggggcgcaccgggtgggggaatgggtaaataactggcccaaggcccagcttccaggtcctccctccactttcccgcggcctgactgcgccccgggcaacacagccccttgggaacctgcgaccaggtaatgtggcctccgccccgtcccgggtctggctgcatcccctctaacccctgcctgcccgggtccaagtgagggttttctcccggaaggttaatcaccacccccatcccctagccgggtcccgggaggaagagatgccccggctctctcgttgacccggcctcgaacgccgacctcgagcgcagaatactcccgagtgctgggttcctgatacccagcccgggagcgaggggagtgaaggagggaccgggacaggaaggcggggacgcggtgggtgaacaatcaatggcttagcctagtttccccgcaggagctaccgcccattcaccgtc

SEQ ID NO: 1016 - DNA, 406 bp, Homo sapiens
  chr1:197882134-197882540
  hyper
tgttgttcagtcctaacccagcgcagccgtttctgcgcctgatctcagcggacgcagtgcgggacttctccctttatttctgcagagctgagggcaggcggcgcaacaaatctcaggtaaaagagcatcagatttcagaagagctgtattctagacttggcgcaggcccctttggggagaagagcccaggggctatagagaacagaggtttgaaggaagcaaaagctggcgagaggttttttttttgtcgcgaagggtgagggtaggcagagaacgcgcgaaagggcagggccttggccgggaagtaccgcccagcgaaaggctggcaagggtgcgcagctggagcgtggcctcgggtacccctttccaggcagccgaactccccgtatcccagctctgcttggct

SEQ ID NO: 1017 - DNA, 165 bp, Homo sapiens
  chr1:197886901-197887066
  hyper
tggtcccttgcctccttcactcggatgagctgaaagccccgggcgtgtgtatatggaaatagtggggtgccgagcagaagacaactcgtgtcctttccgccccccagccatgctctttcacgggatctccggaggccacatccaaggcatcatggaggagatgga

SEQ ID NO: 1018 - DNA, 228 bp, Homo sapiens
  chr1:197887146-197887374
  hyper
cggcggtagccgggcacccctgcgccctctgttaaaccaagccgactccctggccggtggagaaccggagcggcgggtcgtagagacgtccgcttgagggtggcgggtgagttttctcccgtccacctatgcctacagggctaagaaacggtcgtttttctgaatcgaaatgtctgcagctggctatcctccgtcgcagctgattccgaaagagcagggagaggaact

SEQ ID NO: 1019 - DNA, 4 bp, Homo sapiens
  chr1:197888180-197888184
  hyper
cgtg

SEQ ID NO: 1020 - DNA, 1009 bp, Homo sapiens
  chr1:197888734-197889743
  hyper
gttttattttgtgtgcgtcgaaaaccacaatttttagcttgtaattatttgaattcggaaacgatcaccaaactgtagtcaatattttcctagtcctttttaagcgaggctccggatggctgggatgtctttaggttagtagtcccgggaggacgcgaacgccggttcaggcagacacggaagaaagcaagcgggccgcaaagagagaaatcacaaatgtttcccctgacttttgcctttgtgcagtggaccctggcccctgccgctctccctgcacaccctgggcttggtctgcctgggggagaaccccgcgtcgtgcggctacaccgcgcgccctcctcagccttgcggtgtgctttctttgcagggcatgcccccgctcagcccggagaagcccgccctgtgcgccggctgcgggggcaagatctcggacaggtactatctgctggctgtggacaaacagtggcatctgagatgcctgaagtgctgtgaatgtaagctggccctcgagtccgagctcacctgctttgccaaggacggtagcatttactgcaaggaggattactacaggtactcccctacacccccacttcctacgcccgagtacacctggaggggccatctgcctgagcccggaatcccctctccgtcccctaccttttgccccattccgggtgctgttatcatttcggagaccaggcaaacccactgcatatgccttcaagctgtaatctccctgaccgacggtgagggtgggtgggagggacattaaaaatctagagctttatcagcgaataccacgcactcccatcacttctcagcttggctggcggaacttggggaaatctggggaagagtaaatggacgtggtctccgtctaccgagacttgattgggtgtttgttttccgcttgctacgaattgggcaagttctgcgccttgaaactgaactagtggctcgggcagcagcaacagagtgttaggttttcgtaggtggcaggagactctgt

SEQ ID NO: 1021 - DNA, 297 bp, Homo sapiens
  chr1:199998193-199998490
  hyper
gagagcagcacacaaccatttcgcatctttttcgtcgggcagaaccgccgcggtgcgcaggcaaggagtccttcccggcagctccgcgcagctccggttccgcgtccggggccgcagctagagcgcgctcgggccggagacgcggactgcgcgcgcacgggggacgcgcgctcgggggctcgcgcccgcgcgggcggtcttgggctcctgctgcgcgcagccccagctggccgctgccaaaatagagttgagctgggtcgggagaccacgcacgccgatccctcacagtctccccca

SEQ ID NO: 1022 - DNA, 30 bp, Homo sapiens
  chr1:200009358-200009388
  hyper
aaagaggtgacctccgaaaggattgtctta

SEQ ID NO: 1023 - DNA, 408 bp, Homo sapiens
  chr1:200009744-200010152
  hyper
aacaatgctaggaaaagtcaccggtgctcttccatcctcgccccttccagggtgcaggatgtgcgggccggcgggcctgtgatcccggaacgcttcctgccatccccttgcgcgaacttgaaaggactgggaggtgttgagagcagagttcagggctggtgcactctgcggtgctgagtgggcggcgcgcccgggcgctcaggccgggggacctgtagtcgccctaccgcggaggggaaaatacgtagctggagggcgtgcgccgtgcgggttgtgatccgttaccccatcggtcatcctggggtctccccaagcctctaggtagggctgtgagagtcccctagagctgaagccccggaggctgacctgtgggtctggctgctatgggaacccggttggtccaaagaa

SEQ ID NO: 1024 - DNA, 742 bp, Homo sapiens
  chr1:200011397-200012139
  hyper
gcccgggaagagacgcgtcaactccgcgggtctgcgcgcagtccttagccgcaaagtgctgcaagtgacccccctgacggccctttccgaccgaagagctcgggaaccaaagagaaaaaaaataactttattttcaaaagaacaagtcatcactgcggcgatactgtggcggaggactttggcgatggggtgggggctatttctctttcctttttggtaaacaaatcagaggaaacttctgcccggccgtggctttccatcccccacctgccccaccccctgcaaacgccactgattaacttaaaacaaactcggctgcgtgtttgtgcgccgttgggtagcaggaggtagagcctaggcgagagcctggtgcgcccacgggtttcgccgaagagtgcccgggggagtgcgggcagggtcccggctgcgcagacctgcgggtgcccgcccacccgcgccccgcgctcccatacttgacctgtgtggatgtggagtctccgggaaataccggatcaggcacttcctggggtctcctggtcactgcccttcctgtgcatagtttgtcatctttttagctgcgaagacgccttcgtgggtctgcgtccggagcaaggcggttacccgatcccggcagtgagccgcgccgcgcgtcgtggcggcctgatttctgtttaactttaatagggcgatctcgaggtgtttatattttgctatgatgatcggaaacatgtgaggttcatta

SEQ ID NO: 1025 - DNA, 30 bp, Homo sapiens
  chr1:200379220-200379250
  hyper
ctaaggagccagggcgcctgcgccgcagct

SEQ ID NO: 1026 - DNA, 30 bp, Homo sapiens
  chr1:200379460-200379490
  hyper
gggactgtactacagcgtggcgtgggagat

SEQ ID NO: 1027 - DNA, 284 bp, Homo sapiens
  chr1:200379702-200379986
  hyper
agcactaataatgggcgcatatcctttgcatttatgggaggagcctgctttgaaaccgcaattagtggtaccgttgcaacaaaaaaaaaaaaaagaaaaagaaaaaaacttgtcttactgccaaccttcctgaaggctactggaagaggaaaccgagcgtaatccaggtgcagcagtcctgtaaaacacgcccacacacatacttcattatcattacatcttatttaaatgcccccgtaccttagcctggctaatcagtctgtttgccacgttatgaatgcctg

SEQ ID NO: 1028 - DNA, 206 bp, Homo sapiens
  chr1:200708654-200708860
  hyper
cgcggggcgggtggctcggaggggcgcgggcacggggcggacctcgcgcggacggacggacggagacggcgccgccacattcctatgcccgggagcggcggcggcggcggcggcggctcccgcgggaggcggcaggcgcgcggcgcggacagctgagcttctcctccgtcggcgcccgggcggacatcgcccgggccccgatggtt

SEQ ID NO: 1029 - DNA, 31 bp, Homo sapiens
  chr1:201050380-201050411
  hyper
agtcagttcacaagctcgctgctctggcttt

SEQ ID NO: 1030 - DNA, 222 bp, Homo sapiens
  chr1:201083308-201083530
  hyper
gctgagtctgtaggttcggtctgggctgagcgccagcagcaatctggcctcccatcccttcctctgggttcctttctcgaggagtaagcgtgctcccaaagaagtcgctagtatctgaggccatctggtggagagcagtggcatggtaaccgagggctcaaagtcgggctcgcatcccggggactcgcagagactggactgcgcctgcggcaaggaaggacg

SEQ ID NO: 1031 - DNA, 31 bp, Homo sapiens
  chr1:201122936-201122967
  hyper
ggccgtgcactgtggtcgtgaccaggtgctg

SEQ ID NO: 1032 - DNA, 483 bp, Homo sapiens
  chr1:201368375-201368858
  hyper
ccggctccctccggcgctcacctggacagcgcggaccagtccttcctgctgacagccatgctgcaggagccccgcgtggccgcccgcgccccgccggccgccgcctcacctggcgcccctccccttccagcccaggtgggatcacatggccgcttatctcacccccgcgcgccccggccgcgctccgatttgccgacccgggaatggcctctgggatgtgggcgtcccagacaaagccgcattgattgcagcccaggccggcccggccgcgaggccgcaagcactgggtggaccgtcggacggatcgcgggaccgaacgacggacgcccggggccggcgtggggctggtcggctgcccggggcgagggcgggagacttcctgctcagaaccagtccgaccagcttggcgctgggacgcctccccgcgctgtgccgcggcccggggtgccgaggagctgggctgggggcggggacccctgccgg

SEQ ID NO: 1033 - DNA, 234 bp, Homo sapiens
  chr1:201437932-201438166
  hyper
ggaaagctccaggctgcggcgggcgcggcgcccctctcggccccgcagcgcaggattctggcgccccgggctggcaggccgtgcgcgctgcccacctgcgccctgactgctccgcgcacccacaccgcggccctcagcacccggctgccggtgaggtggtgtcggtgcccccagcgcgctccgcgcccaccgccccgcttcagccggcacccgctcctccgctctaccccagct

SEQ ID NO: 1034 - DNA, 30 bp, Homo sapiens
  chr1:201449031-201449061
  hyper
cttggcttcagtttgatcagttataagtgg

SEQ ID NO: 1035 - DNA, 30 bp, Homo sapiens
  chr1:201476542-201476572
  hyper
gtcaggtgagaaggcggagatatgacctta

SEQ ID NO: 1036 - DNA, 31 bp, Homo sapiens
  chr1:201507612-201507643
  hyper
gagcacctactatttgcggggcacttgcggg

SEQ ID NO: 1037 - DNA, 429 bp, Homo sapiens
  chr1:201857925-201858354
  hyper
ggtggactcctgggcgctgcgcggagccgcgccggctgggttagcgcgggcggggcgcttagtcccacccccagaggaggcggaagaggagcccgagcctggccgcgggctgggccccgccgcagctccagctggccggcttggtcctgcggtcccttctctgggaggcccgaccccggccgcgcccagcccccaccatgccacccgcggggctccgccgggccgcgccgctcaccgcaatcgctctgttggtgctgggggctcccctgggtaaggggatggggagagatgcggcaggagtgggatgggggcggaggaaggggagggaccgatccgaggggcttgggctcggggcttctccgagaccctccggctgccacgggagccttgggtgttgctgggtcctcaagaagcgggaagagggagctc

SEQ ID NO: 1038 - DNA, 30 bp, Homo sapiens
  chr1:201915753-201915783
  hyper
gggcgggcctacctcgctgtcagagctgtt

SEQ ID NO: 1039 - DNA, 81 bp, Homo sapiens
  chr1:201977886-201977967
  hyper
tacaggtgtgagccaccggatcctacatttcaaatgcataaaaatctagatatgggctgggcgcagtagctcatgcctgta

SEQ ID NO: 1040 - DNA, 189 bp, Homo sapiens
  chr1:202112265-202112454
  hyper
caggagacactgggtcgagaaagggcagaggtcatttgcagagcatgtttgggaaaggaagccagtgttcaattgtgtaaccacaggatgcccgcccctcgagctttccatctgccttcatgcctcaggtccaatgaagtgacgtcccctgccttctaggacgctgagaactgtcgaggaggcccatct

SEQ ID NO: 1041 - DNA, 39 bp, Homo sapiens
  chr1:202612530-202612569
  hyper
gcggccctcgctcccgcgctcgctcgctctcgagtctct

SEQ ID NO: 1042 - DNA, 30 bp, Homo sapiens
  chr1:202777280-202777310
  hyper
cttgtggatgaaagcgaaggggtccgcgaa

SEQ ID NO: 1043 - DNA, 30 bp, Homo sapiens
  chr1:202780665-202780695
  hyper
gctccccaccccctcgccgcctctgacaac

SEQ ID NO: 1044 - DNA, 52 bp, Homo sapiens
  chr1:202830112-202830164
  hyper
cctctttgtccaggaccgcagcgggagaaatacggggcgggccctagatccc

SEQ ID NO: 1045 - DNA, 30 bp, Homo sapiens
  chr1:202858372-202858402
  hyper
tctggactctactgcgcaagcgccttcatt

SEQ ID NO: 1046 - DNA, 31 bp, Homo sapiens
  chr1:202935961-202935992
  hyper
gagcccacagccaggccgagcagagtgacca

SEQ ID NO: 1047 - DNA, 30 bp, Homo sapiens
  chr1:202937099-202937129
  hyper
agcggagagtgtaacgatgaaccagagaca

SEQ ID NO: 1048 - DNA, 223 bp, Homo sapiens
  chr1:203086993-203087216
  hyper
gctcctccttcttctcccttccgcgggaacccagcacctagcgcggcggagcagggaactcaggctgcgggactggggtctggccctgcccagctcctcgcccacgcccaggcttccgttaggccagcagggggaccccgagccccggacaacagccctgagctgggcggctgcttctggctctagatcccgctgctcagccgatccaccttccccacctccc

SEQ ID NO: 1049 - DNA, 88 bp, Homo sapiens
  chr1:203242475-203242563
  hyper
gtcaccattgctcacccgtctgacttactctgggtgtgtgtggacgggcgtgcatgtgaccgcgtctgtgcaccggggctgtgctgtg

SEQ ID NO: 1050 - DNA, 31 bp, Homo sapiens
  chr1:203561334-203561365
  hyper
tccagtgctgcctgatcgggctccccctcct

SEQ ID NO: 1051 - DNA, 47 bp, Homo sapiens
  chr1:203595792-203595839
  hyper
ccattcccccttaagacgaaccaggaagtaaccgcaagaatcgggcc

SEQ ID NO: 1052 - DNA, 30 bp, Homo sapiens
  chr1:203596175-203596205
  hyper
cccagcccactccccggccttagccagaaa

SEQ ID NO: 1053 - DNA, 175 bp, Homo sapiens
  chr1:203596925-203597100
  hyper
ggaaggagagtgcacgaattaaatttctttagctttgcagagaaacctcagcagtttctctgtgctgcttgcaaaacatcctcagactttcacatgtataattagctgtggaaaaagctgggagttacctcgtaccgctgttgtttgagtgtgtgtgagcgtccagaaccaactg

SEQ ID NO: 1054 - DNA, 824 bp, Homo sapiens
  chr1:204042250-204043074
  hyper
cgcagcagcgagccgcgagcgcccttctccagtcccggcttggaactgaactgtgtgagcacgggtcctggaacccgggcccagaaccggcgagcccaggtctgagcccagagctcagcggtcagcctcgtaggccctgactcggaatcgagccgaggcgctgaggttggagccggagagcgtgagagccgaagagcagggagggcgggccggctgcgcgtccgacgagtcgcagagcaggaccgcggaaggcagggagacggccgcaagcccagggcagagggcagagggcagagagcggcctggctcggcggagagggcgccgcccggccggaaccaagctcgccgcccgggacggcgggccccgtggggcgcggacccagggtggccgtgggtccgcagcgactccccggccgacggcggggggcgtgccccctcccagcccagcctccccaacccggcccgcccgccgcgtcgcgggggcatgtgagcgggaagcctaggctgccagccgcgaggaccgcacggaggaggagcaggagcgcggagccgcgagccccgagccccgagcccggcgcctggctgagtagtaagtgcacccctccccgccatgatcgcgccgtcgcgcccatttccccagctctctgaagtttgacacttgcgcccctacgtttctgggcacccaccggctctcttccctgcgagtttccaccctgtgcaaagtttttcgaggagagacggaccctcacctacccccaacaacgctgggcagtggcggctcctccctggccgacttgggtccttgtggagagggatggcagcct

SEQ ID NO: 1055 - DNA, 1004 bp, Homo sapiens
  chr1:204043133-204044137
  hyper
cgcgcgcgcgcgcgttcaccacgcgggtcgagcttagggtgcacccccaacccgctcctcgccgaccgcagaggactaggtctttctcatcagcccgactatgcgcctagtttaaggatttctcagcgggaagccgaagcgacctgcgcgcgtcctgcgtggggctcaggtgcctgcgacgaggcgcagagctcctccaccatggttgcgtggggtgctgggggacagacgcgctccccttgccacggtttcagggtcgttccccagcggaccagaccagcgcggcatcctgtttgttttctgctccggctgctcctgtcccacccccacccccaccgcaggctgcttcttgctacccccacctcccgccctgggatatcgtaggtgagccttttcatcccgattccgctgcaaacgctgatcgcgcctaggggtagggagatgcggagcgggtagtcgttcagttcccagcggctcgccattgttttcccaccccgcgcgttccgtacgtaaacacacacgcacacacaaggttgtgtgtgtgcgccggctctggctgcttcccgtccccaggcgcgcagggatcgcccgcgggattcgctcagctgcccgcatgggtcttcaggctggaggcgctccaggacttaactggagctggagaggacaagagacgtgggggttgccggacagtaccgggcggggcggtgagccgggcctgggcgggaagtgaattttgaacttcagccctggacctttccgggaggaccccgagcgctggagcggcggctcccgccctggagggcccgcggcagctgcaaagactccgctggcgctcttggcagccgcctcggtgacagaggcttggaggaagccgaagagttttcctgggaagtttgctttgactctctgggaatttccgggcaggacgcctcggcgctggcgctggcgctggcgctggtgaaggggtctggccaaagacggccagagacgatgctgctggctct

SEQ ID NO: 1056 - DNA, 30 bp, Homo sapiens
  chr1:204332590-204332620
  hyper
cccagcttgggaaccgggttatcaggggtg

SEQ ID NO: 1057 - DNA, 109 bp, Homo sapiens
  chr1:204347118-204347227
  hyper
gcgcggtgagtaattacgatgcctctcctgccgggactgttaacgggcagcgctgggtctccgttcctcctggctctgctgccctccagcctggcggagcccggagagc

SEQ ID NO: 1058 - DNA, 30 bp, Homo sapiens
  chr1:204380997-204381027
  hyper
gcaggactgttgggcgtctacgtccctagc

SEQ ID NO: 1059 - DNA, 31 bp, Homo sapiens
  chr1:204487762-204487793
  hyper
tggtcagcctactccacgtgttttctttcca

SEQ ID NO: 1060 - DNA, 219 bp, Homo sapiens
  chr1:204653941-204654160
  hyper
ccaccttgtccctccgcacagactcgcgagctccaaggaggagaaagtccccaggctctggagcgcttccagcctgccagtccgcccgtgtcacgccctccctaacctcactgccacctctcggctcctccacatctccagggccccactctacccagcaacagtttgggggaggttctggcctctccaggcgaaggcccaggcgccctctccctggcc

SEQ ID NO: 1061 - DNA, 30 bp, Homo sapiens
  chr1:205312680-205312710
  hyper
gcagtggcgccaggcgcttccactggaagt

SEQ ID NO: 1062 - DNA, 365 bp, Homo sapiens
  chr1:205399769-205400134
  hyper
caaagtggccaaaggaagagccggtcttccacacgcacacctccgcgcccacactgccccaggagcttcccactcagccgggggacccccaagcagccggcgaggcgcactgcgcacgcgcactcaggccgcggctccagccgccctccctccgcagtggggcgccccgcccccgcgccgctcagttttaaactcgcagcagacggaactcgacttaaaaataactattttgacagttcagatgtaaatatgtgagtgacgcgtggggctgtttttccttcacacttcccctcacccctcgctccctaccccagctcaattcggctgaggctgagatgatgggagagcgccgtctgcaggatgct

SEQ ID NO: 1063 - DNA, 141 bp, Homo sapiens
  chr1:205425929-205426070
  hyper
cgcgcgctcacgcccgcacacactcagggttataacaaaggaagaggggccagcgctgccttacttttgtctctcttctctcttttgcagccccccagccccggggccggcgtgcccggcccaccccgccctccgcgcccc

SEQ ID NO: 1064 - DNA, 116 bp, Homo sapiens
  chr1:205561300-205561416
  hyper
attttctcctacaacgtcgtcttcctgttcgtggggacggcaagcctgggcctgtttctcagcagcaccttccccagcatgctggcctacacggaggactcgctgcagtacaaagg

SEQ ID NO: 1065 - DNA, 140 bp, Homo sapiens
  chr1:205721777-205721917
  hyper
ttttttgaagaattgccgtatggattctccatcagctgtatcattttacactcctaccagcaatgtgcaagtgttccaatttccccatgtccttgccaacagtaagttttttacaatagccatcctaatgagtgtccata

SEQ ID NO: 1066 - DNA, 30 bp, Homo sapiens
  chr1:206955685-206955715
  hyper
ggagcataagaattttcccctggaaaaggg

SEQ ID NO: 1067 - DNA, 30 bp, Homo sapiens
  chr1:207038445-207038475
  hyper
cctcctgcagagggcgctgtggagtcccag

SEQ ID NO: 1068 - DNA, 774 bp, Homo sapiens
  chr1:207627526-207628300
  hyper
ctccccgcccacctcgtgccgggccgtccctcccgcttgtcccaccctcaccggcgccgcgtcagcccccaggccgcctgcaggtgtgcgctcagaactagcacgtgtgccggacactatttaagggcccgcctctcctggctcacagctgcttgctgctccagccttgccctcccagagctgccggacgctcgcgggtctcggaacgcatcccgccgcgggggcttcggccgtggcatgggcgccgcgggcctgctcggggttttcttggctctcgtcgcaccgggggtcctcggtgagctgggagggggagcacggaggtggggacgcgtcccgggcagggaaagtttctgtgccgcgatgcaaagcagggggccaaaagcgagacggtgggggcagtgctcgacgcgtgtccgcctcccgctagctttgagggaccactgcaataaaccgcctggtcctgattgtccccactggcccctccgggagctgggacctccagaattggaggctgcgccacagaggggcgctgtctggtcggcccggtgtggctggcggcgtgcgggtgctcgcggtctcctgccgggctccccgcccccaggattctgcaggtgctcatcgctctctggccggcggtcagcgctaccgctcgccacgggaaacctacccactgcatgaggcaccagctagccacgtgaggctgtttctgtacacccgaaccgcgctcttgcccagcaaaagcggcagaacctcggctcccttccctaaataaga

SEQ ID NO: 1069 - DNA, 412 bp, Homo sapiens
  chr1:207669375-207669787
  hyper
cagcaaggtgggctctgccagcgaaactcgttagaaacaatgcaaatggggagtaaacatgacctcgcccatgaaggggaagctgtggtcaaaagcattttgtcccggaaccccgcagccctccccacactctgggcgcggagcacaatgattggtcactcctattttcgctgagcttttcctcttatttcagttttcttcgagatcaaatctggtttgtagatgtgcttggggagaatgggggcctcttctccaagaagcccggagcctgtcgggccgccggcgcccggtctccccttctgctgcggaggatccctgctggcggttgtggtgctgcttgcgctgccggtggcctggggtgagaggcgggcgggcgtggggaggcgcccgggcggacgaggaacccggggcc

SEQ ID NO: 1070 - DNA, 201 bp, Homo sapiens
  chr1:207669828-207670029
  hyper
cgcgcccgggtccgaaggcagcgcgatgggtgggctgagcgcgcgacccggcagggcggcgggtgtaggatccttctgcgcactggagaccctcgctgcttctgggtaagcgtggagttcccaggtgcaggggcttaagtcgtgacgagcgcagtggaaggcgcagatgctgagcgggtgccgcacgaaattccttgcctt

SEQ ID NO: 1071 - DNA, 31 bp, Homo sapiens
  chr1:207995366-207995397
  hyper
ctcccccaaccaaaggcggacagcctgctgc

SEQ ID NO: 1072 - DNA, 572 bp, Homo sapiens
  chr1:208084083-208084655
  hyper
tccattggaaccagtcgtgctgaccgattcacacctcggctaacgcacactcgcgggggtgatggccttcccttcccctcccacccccgtcagctcccaggtgaggcgctggccccggggggaagcagctgtgggcggcagtgcgtgggttgggcaggggtcccttccctccgtgagactctgctctgctgttcagcctcccagaaagcctccaccctccccgcggcgaagccaagcggccgcggcgcgcgggcggtactcacgcagcaaactcagcaagcaaagcgcggtccagccccgcggcatcctgggccctgcgcgcgcgcccctgcggaccagcatccttcccgcgcggctcctagagagacgcaccgagtggaagacactactcggcttggccaggacgcgctcttcccgccccctccgcccgggagaggggtgggggattcttgcttttttcctctcttctcccctccctttttagtcttggcaaggcagcgcctctccttggctgctactaacttgagctcccctggttggtcccaaaggcggagggcgttaggagggaggct

SEQ ID NO: 1073 - DNA, 121 bp, Homo sapiens
  chr1:208416771-208416892
  hyper
ggctccagtgagcctgcgatcgcgcgcacgccgcgctccagcccgcgaaagtggccgagcccacgcggggactcgcccgccgcggccaagccgggtcttctggggccgggaccccaaagag

SEQ ID NO: 1074 - DNA, 176 bp, Homo sapiens
  chr1:208417126-208417302
  hyper
aattcattaaaatccacgtcaagccaccagacacttatctgtattcctgaagtcgctcctcggtctccgctccgcgcgcccctcagtcctccgtcgccccgcagcagcccggctgggcgctgtcgccggctctcagggggcacccggaggcgccgagggggcgtgtgggggcggcc

SEQ ID NO: 1075 - DNA, 31 bp, Homo sapiens
  chr1:208418635-208418666
  hyper
cacggctttccggaagcggcctgcaagctgg

SEQ ID NO: 1076 - DNA, 31 bp, Homo sapiens
  chr1:208418805-208418836
  hyper
acaacaaaaatcactgcgaatacctaaaagc

SEQ ID NO: 1077 - DNA, 31 bp, Homo sapiens
  chr1:209364335-209364366
  hyper
tgtatacccaggaattcgggtcacttaaaat

SEQ ID NO: 1078 - DNA, 506 bp, Homo sapiens
  chr1:209957700-209958206
  hyper
ggcataagtctgtctcacatacgttctttttccacgtccgctacaggttcgggggctcagaaactttttgcggcttcctgcctgctgccagaaaggcagctagtcccccacgcccagccgcaagtaacactggaaaacccgcctgcgctgggaagaccctcgcagcccgctctgctccagtcccgcaggcaccttcttgcgcatgcgcacccactcgagtgccgccctctttccccccattccgtgacgtcatccagccgctcgcgcgcctcgcgttagaatcactagctaggcagccttactgcgcgccggaagtttgggccaccgtgcggcccgccctttccggccagactgaacgcggccccatctgtcggcttaggaactgggaagggcggaagtaaacgagaaaaggcggaacctggtgaaactggtttcccgctgctgccctcattttgcttcgccgaacgtcctccctgtgttatgacgtctggtgtcccacttgactg

SEQ ID NO: 1079 - DNA, 227 bp, Homo sapiens
  chr1:210110983-210111210
  hyper
ctgtttctccacagcggagatctgagacgagtatgtggctgattcgggcaaaacaaaacaaaataaaaccaaacgaaaccaaaacagacttactattaccaaatctgagagtcagtgggtgggaatccttttcaaccaaggagacctgtccatggtcctgaccacatcatttgccactcgcctccttcatggacaccgtttgctccaagtaccggacgggagggcgc

SEQ ID NO: 1080 - DNA, 138 bp, Homo sapiens
  chr1:210111283-210111421
  hyper
cgtggctctccgggccgggcacctgtttcgaatcgaggcgcgaggcgcggtggggcggtggggtggggtggggtaggttggggtgggggcggggtggcgtcacgtgccagcggcggccccgggaaggttccatttctt

SEQ ID NO: 1081 - DNA, 126 bp, Homo sapiens
  chr1:210111796-210111922
  hyper
cgctgggacgccgggcccgactggctcgctcgccccggccttcgtggttttgccggcctcccggcggccgcacgcggggcaaagcgggctggcgggcaggtacagcgtccgggccgccgcctcctg

SEQ ID NO: 1082 - DNA, 38 bp, Homo sapiens
  chr1:210112036-210112074
  hyper
cggcaaaccatccttccgcaatacccaccttcctgcca

SEQ ID NO: 1083 - DNA, 30 bp, Homo sapiens
  chr1:210407458-210407488
  hyper
tttactttctcctgcggccagcggccgacc

SEQ ID NO: 1084 - DNA, 308 bp, Homo sapiens
  chr1:210465688-210465996
  hyper
agagacaaagaggcctgttcccgaggtgtccgacctcctgcccccttggcgggccccgcccgggttcctccagcaggaatcgccccaggcgctgggagccagagctggccgggtctgacacccgccccagactttccacgatcaggtttcagctcgactaacgagggggaaagaaagaacgcgcgacttccgcgggccggagccgcgcgggggcccgggggaaacgccggcctggtctgggtgggaggggacgcgaagaggctccgggctcggccagtgtctgccccgggactgggccctgggactag

SEQ ID NO: 1085 - DNA, 31 bp, Homo sapiens
  chr1:210502487-210502518
  hyper
gatgctgaattttctgcgtcagtttactctg

SEQ ID NO: 1086 - DNA, 275 bp, Homo sapiens
  chr1:212003415-212003690
  hyper
aggggcagagaagaggcgaccgcagcgcggggagccggtggagcctgcagcggtttccgcggatgtggaagggtcgtggcggcgggcgcggcccgcgcgccgggctcacctcggcgggcgcggacggcgggcggctgcggagagcgggggcgggtgtcccccgccgaggggtcgcggtcatggacgcggtggcggcccaagcggcccgaggcgctgcgcgagcgggcgcgctggcgccctactcccctcgcggctgcctgcggacagagggacgg

SEQ ID NO: 1087 - DNA, 130 bp, Homo sapiens
  chr1:212003920-212004050
  hyper
ctggccgggccccagccggggctttgggagtcagaggagccggaagaatgcatggccggcggcggggccggcggaagaaggcggtggcggggccctgccccgctccggctgtggcgcggcccgcgcccgt

SEQ ID NO: 1088 - DNA, 30 bp, Homo sapiens
  chr1:212395928-212395958
  hyper
ttcacatatccttcaacttccccaatctca

SEQ ID NO: 1089 - DNA, 9 bp, Homo sapiens
  chr1:212873750-212873759
  hyper
cgaagccgc

SEQ ID NO: 1090 - DNA, 259 bp, Homo sapiens
  chr1:212874023-212874282
  hyper
ggacccgccatgccacggttaaacggcccagatcatttttctttttcaagatttatctgctcgtgccaagctggggaccgggttgaggtagggcaagtccctgtccacctgcctgccagtcaaaagatgcgaagccaagacaattacccgtggtcctagcgaaggaaacactagcggccacaggctgtggtctgcatgctgtgagcaccgggaaagataaccgcgattcgggatgggcgggtgggaaccagaccagaag

SEQ ID NO: 1091 - DNA, 1033 bp, Homo sapiens
  chr1:213123589-213124622
  hyper
cgcggggtcacttctcgggtggttttgtttctcctctgcttccacagttgcaaaccctcgaagtgccacgacccctggggaaactcgatcttaagtcccatggccaaacgctccagcccgcggggctctcaggacaccacagcgatcggatttcgcgtggccgccaggctccccctactcctgtcccctcccgccagagaacccctggagccaatcagagcgtcgcggagcccggggttgtagagtcccgagcccgggacccgcccctctttgttgcggtggccaatagacgcattcggaacatcggcggctgcccgggtgacttggttatatgtcacagaataacattcgagaatgggacatggaatgaggcgacggccccagcaagccccagcagccccagccccagccccaggcccagcagcagcagcagcagcccctgctctcccgccgcccggagaggctctgcagccatgaagccaaccgtcccgaggtaggatcttggagctgccgcgcgcccttcctgcgcgccgcccgcctgcagccagtccctcccggtgataggcgctggaactcggggaaaagggggcggatggagctctttccactagatccccgccggggtccgggagggcttcctggaagaaagcgggccgccttgcaagccaaggctgctgcagcgccctcgcgccagctctgggcgctcacatgccagcacgttcgtggctcccctcctctcttggccacatctgaggacccaggaatgtgtggagccttgcgggaacctcctgttccttcatgctacacaagctgtctttcttctccccacatcttgcgctccgcatcccccaagctccttgtgcccctccatccccaaccccccgggtttaggtgtgtgtgaagcttcgtggcacattttgagctgcctttctaggtaatcgcagggctggaagcccgtcatcgattctcagggaggctgtcagcgtgcaggggggagcggggagtgtcgtggagacactccgggacccctcac

SEQ ID NO: 1092 - DNA, 297 bp, Homo sapiens
  chr1:213124668-213124965
  hyper
cgctgatttcaggcaccgccggtaagcagggagcctccgcggagctcccgccgccgctcccccttggtgagtcctgccgcagcgagaggcatggagaaggccgcccccgcggggcgctgatcccctcgccgcgcccgcgcgcacacgccccccgccgccgccgccgctgccgccgccgcgcgcccccagtacctcgctccccgcccaggccccaccatgaccggctccgcggccgacactcaccgctgcccccaccccaaaggcgccaaaggcacccggtcccggagcagccacgcg

SEQ ID NO: 1093 - DNA, 30 bp, Homo sapiens
  chr1:213189227-213189257
  hyper
gctcaaggagcatgcgcagagcgtgggacg

SEQ ID NO: 1094 - DNA, 30 bp, Homo sapiens
  chr1:213529200-213529230
  hyper
gtctattcatgattctgccacttactagct

SEQ ID NO: 1095 - DNA, 80 bp, Homo sapiens
  chr1:214156002-214156082
  hyper
tgcacgcccctcccgcggtcccgggagggagtcccccctcccaggtcgagcgcgtccaccggctgtccccacagcaacag

SEQ ID NO: 1096 - DNA, 144 bp, Homo sapiens
  chr1:214156134-214156278
  hyper
cgaaatcccccggccaccacgacgttccccggctctgcggcgcgccgggagcaggtggttgccctctgcgtccagggcgtgtactgagcccaggctagctgagcgaggctgcagcccctgcgatggcccgggaagaggcaagtg

SEQ ID NO: 1097 - DNA, 646 bp, Homo sapiens
  chr1:214156394-214157040
  hyper
cgctcgctctctctggccggagaggccgcgacacctagcgcggggccgaggctaggaagggcgggccggggagggaggagggcactgggaggaagccgcgggcgaggaagccccgctcctgccgagtgcctggagaggagattcccagccttcctgcccaacccgaaacttttccaacacacgcaggcgtattcctcgcaggattcggcggtcccgagtcgcagtcagggaggaggctcgggaagcacacgtgccctggcacactggaggaggtacacaggcacaccaggagggacagggcctcttgggaggcggctgagggcgtgaaggcagcaggcggccacacatccgaaagggactccctgcgagcgggatcgagcgcttaaaaccctgccacagcttggaagtgtagcggtgcccagaggctttgcgtaactttgcccactgcgcccccgcgtgcaaaggtgtccccttcacactcacaccctcaccccatctcactccccttgagttgcggcccgagactgcctttgtacttaagcgacagcaaaagatatgtggatttgaaccaaagatggtgggcaagagtgttgtaaattgtgtaaattccactcgcgggaacccccagatacgtagggagagcacc

SEQ ID NO: 1098 - DNA, 20 bp, Homo sapiens
  chr1:214158890-214158910
  hyper
tcgcgagccgggagcctctg

SEQ ID NO: 1099 - DNA, 182 bp, Homo sapiens
  chr1:214159036-214159218
  hyper
cgccagttcccgggcgtggtgtgtgcaaaacgtgcattcaagcgctatgtgcaattgacacaaacttgtgggctaaagtgcaagccatttttttcgcgtttgaatctttttctctgtccctgactcctttcttccccctactcccccctcctccttctctgctctccgcccttttaaatgtc

SEQ ID NO: 1100 - DNA, 296 bp, Homo sapiens
  chr1:214159531-214159827
  hyper
tagttggaggtgtgagtggtgcgtgtgcgctcctctgtgttgcttccgtgatagacgcgtggggggagtgtgtgggggcggcaaaaggggaaagaagaaggctggggatgctcccgcaatctcttttcttatcgccgacacctaacctgaccgacctaattttttttctccttttcactgtttgaaattcgtgccaaaagtttcctgccgggatagactcggacatactaacatcgctattcttattcaaagggagggcttaatatcctctttacggtttggtgaatttgaggctg

SEQ ID NO: 1101 - DNA, 111 bp, Homo sapiens
  chr1:214160080-214160191
  hyper
ataggatctttaggtcataaacgcggctgctttattaaaagccgtttactgtgcccggtgaaagggacgttctagctgcggctgaggctcgcttgcatttgtaacttgcaa

SEQ ID NO: 1102 - DNA, 95 bp, Homo sapiens
  chr1:214161291-214161386
  hyper
atcttgttgtggagcggagccctcagctgagggagcgctctgaaataatacaccattgcagccggggaaagcagagcggcgcaaaagagctctcg

SEQ ID NO: 1103 - DNA, 30 bp, Homo sapiens
  chr1:214161705-214161735
  hyper
accgtgtgtgcactcgcgtgttttcctctc

SEQ ID NO: 1104 - DNA, 30 bp, Homo sapiens
  chr1:214162024-214162054
  hyper
tccgtggaactcagcgctccgctcctccca

SEQ ID NO: 1105 - DNA, 85 bp, Homo sapiens
  chr1:214162589-214162674
  hyper
ggaaacgcgcgcggcgcccctcttccgagctcctggacccagggctgggtcaagttgagtagggtaaggcggcaccgggaggctc

SEQ ID NO: 1106 - DNA, 30 bp, Homo sapiens
  chr1:214360604-214360634
  hyper
cagcgagatccccgcgcaccgctcgctcgg

SEQ ID NO: 1107 - DNA, 61 bp, Homo sapiens
  chr1:214387716-214387777
  hyper
gaactgccccagtggcgtctgcgaggcgtttcctctataaagctgtcgtccctagctctgg

SEQ ID NO: 1108 - DNA, 30 bp, Homo sapiens
  chr1:214435167-214435197
  hyper
ttgaggagctgaaccgaataaccaggagta

SEQ ID NO: 1109 - DNA, 1210 bp, Homo sapiens
  chr1:214724404-214725614
  hyper
gtcccggggcgccaatcgcaagttggcgttgccagcgtctgcccaagtcatctgcagggcgcccggagcgccaaggcggcctccaacctcgggcccaactcccggcttggacggggcttacctgcttacatggcccccgtggcgccccggagtcccgcgcggaaaggctgtccttcgcggcggcggagccgattccccacggaattgattccagtgactggcggaggaggggcgaagggaaggagccgcaggaggcgaaaggggagggaggtttccgccgcgatcccggcgcgagagtccgagcagaggcgcaccgggggagaaaaggagaaaaacctaagcacggggctgtcccgcccgaggaggccggggaggatggctcagctgggaggggaaggagcgccagtggccacttgatgtctgtctagggctccccgaggacctgagccaggagagcaggcggctgagcccggagaagcacagcaacctgcccccgagtctgcgcccgctgcgctcactccgccgagaaaaagttggaaagaactttgaggggccgggagagccagagcggcaggaaatgcgagcggccgggagaggagggaggaaggggccgtgcgagtgggaggggacggagcaggcgccggcggccacggctcccccaccccagagccgggctccgcggccctgggggccgggaggcggagggagcgctgggcgcgcggccgggggcggggaggaatgcggcccgggagggcgcgcgccgggggcgccgcgggcgcgcgctgaaacgtggagccccagctcccgagctcccgagctggaggcgcgccgtccttggggacgtcacagcgctggaatccgaggaatgccgggctgcaggagctccttctgcaggcccggagaagtcgcacacttttaatggggtagttttggaaaatgttttaaaaggtgggggccgaggacggaggaccggatgaaactccctggagtaagagacgtggaagtggagagagcaaggcgaccgcagccaccccaaccctgggctgctcccgccgttggggagaaagaggcaaggcaaggaagagcccacctagacttccgaggaccgcagagacggggcggcggcaggaacttgctcaccccgacctacattcagaatagtccaccttatattggggaaccctccaagcaggacgtttcatgcagccac

SEQ ID NO: 1110 - DNA, 636 bp, Homo sapiens
  chr1:215255095-215255731
  hyper
agagagtttagaaacggattgaagttccactacatcacgtgtgttgttagagaattcgcctattacgacgacagcaacgtctgatctcctggctttcttcccctccttggtgggttccgttccgtccccctgtcgctgcgagtttggctgtccctacgccggggtcttggagtttgggcggggtctggtacctgccaaatacggatcctgatggggaggaggtcggggagcgctaagttcaggctggagtctgagttctcccaccctgctgctcccacccaccgcgcttagaaacctatgtttccagcaaaggggtcttgctctgagagaacctaaccgggttttcttccattccctttgcatctctagatgtcttcgccctggctccaggtgcgttccccatccttttcggtcccggacgttctgcagattatagcgcccagctcatgtccagcaccgccggaggtgaagtggggcgagctggtgactccttaacccttcccgaaggtgtagactggaagaagccagggtcttcattacctcccctactccagggctctcaaggcgccaacggggacacttccctgtacaggtctggggggccacgagggcgaggaggacgccctagtgcagggg

SEQ ID NO: 1111 - DNA, 35 bp, Homo sapiens
  chr1:215256091-215256126
  hyper
aaggggcgacaggagcgagccgggaagggagagca

SEQ ID NO: 1112 - DNA, 677 bp, Homo sapiens
  chr1:215256195-215256872
  hyper
cggggggagacacacaaagacatgcgaagaggggctgaacgaggctcgcgcacaaagacgccggggcgcacggcagctggggctgcacccaccgcccccgcgccgcgccgtgccggggccgggccagcgagcagcccggggctgagcgcgtggcggcggcggcggcggcggcggcggcgggcaggcgcgggacccgggtcgcccgcgctctccgggtgacccgggcccggcagcaggcgcgcgcgggggcggcggcgcccaagcccaacttggcctccgcctcgccctctgcccagcccgccggtgtcccctccttcccgcgatttcgtttcttctcacgctcccccccccgccccctcccgcgtccagccccgctctccccaccttgtaaaacaaagccggggaaaatgcctgcccgtgcagctcggagcgcgcagcccgtctctgaataagaagtgagtacaatggcgtgtttgtaaaaaaaagcttcaagtccgtctttttcaaaaaacattttgaatgctgcatgcctcatgcttcccagcgcctcgcgggagagacccggctatagagcaggaggtgagaccccccctccggtacccccacccctctggccgcacgctctcctgccccagccttttctgggaggactgcaaatgccccctctcagcaagcgg

SEQ ID NO: 1113 - DNA, 40 bp, Homo sapiens
  chr1:215256953-215256993
  hyper
cgccgcttctcccccctctcccgccggtgcccggggtttt

SEQ ID NO: 1114 - DNA, 149 bp, Homo sapiens
  chr1:215740889-215741038
  hyper
agccccgtgcaccccccgccctccggccgccgccgccccgctggccctgcagccgtcgccgctgcctcgggctacagccccgggctcggcggtcccggctggggaaggagggcggcgagcgcgtccggagccgccggagatggcgggag

SEQ ID NO: 1115 - DNA, 27 bp, Homo sapiens
  chr1:215744974-215745001
  hyper
tttttttttttttttccgagacggagt

SEQ ID NO: 1116 - DNA, 219 bp, Homo sapiens
  chr1:216774193-216774412
  hyper
tcacaggacacaaccgccgcgctctggttggacgcaggctgcatcctgtttcccggacacatttattcagcccaatctttcctgtctgaacacagactgttgatgataaaatagcatctcaaattatgagggagaaagagctgcttcggcgttcctccccggttctctgcctggattgggctcccgtgggttgctgaggccctcgcggaggcctaggaa

SEQ ID NO: 1117 - DNA, 41 bp, Homo sapiens
  chr1:216896837-216896878
  hyper
atatgcagtcccaccggcccagccgcgcagccgattggggg

SEQ ID NO: 1118 - DNA, 30 bp, Homo sapiens
  chr1:217263198-217263228
  hyper
tggtagcgtcggtccgcactccctgtgacc

SEQ ID NO: 1119 - DNA, 344 bp, Homo sapiens
  chr1:217307947-217308291
  hyper
ggcactttgacccgccgtgcgcgagtttccagccagccgctgcgcgcctgagagaaagagcgcctggctgcggctccgagcgcacagctcttccccgcgtgtttggcgcggctacgtttctcttgctccgggctgaggctcgaggaacctcgccagcctgctgtggtcccgtccccttgacgtttgatttctaaaaccgcatagtctgcggctctggcatttagaaaaagaggacaaggtcaaggcctgtggaccgaccgccgcgatccgcttgcacctttgctctcacagcaagcgagtcctggccgcagccgctggaaaaaggtgccgcagcgcccagttta

SEQ ID NO: 1120 - DNA, 30 bp, Homo sapiens
  chr1:217308668-217308698
  hyper
cttgactcattttgcgcccagatgcaaact

SEQ ID NO: 1121 - DNA, 48 bp, Homo sapiens
  chr1:217309145-217309193
  hyper
ctcggaagcgggcgcggggattcgggctgccgcgtgtagcctataaat

SEQ ID NO: 1122 - DNA, 17 bp, Homo sapiens
  chr1:217313025-217313042
  hyper
cccctctgcaattgccg

SEQ ID NO: 1123 - DNA, 508 bp, Homo sapiens
  chr1:217313068-217313576
  hyper
gcagaggccggggacttcgggcgcttgctaggtcaccgcgccgggcgaccgccgctcgccggctatttaatatacatggggtgggaacggagcgaagcggatctccgagcctgcctgtcctgcagaaaaaaaaaatcaatttgctatttatttttgaaatatatagatttagggaatgttttttccagctcgacccccttcaagaatggcggcccacatttaattacgtcttttaatgacttttcccttatttgccatcgctattccacgttaagggcgggggcggggtggagtttctttggggggttttcaattctggtatcttcaaaaagatttgccttatgtgttaattgcatgctgttaagcacatctgggactgtgtgctgaccaactcagaccaacttttaattaacacattgacccggagaagaagcagccgcccagcctccccctctaaatatgtatattagccacgcggaggcggctcggcccgcgccgccagatgcaa

SEQ ID NO: 1124 - DNA, 63 bp, Homo sapiens
  chr1:218520420-218520483
  hyper
ggtttagctctgcccggagctctcaaaaccgcagcagctcccgggatcgcccttccctctcgc

SEQ ID NO: 1125 - DNA, 33 bp, Homo sapiens
  chr1:218520774-218520807
  hyper
attggcgtggagcgcgccgaactggtgcacgaa

SEQ ID NO: 1126 - DNA, 600 bp, Homo sapiens
  chr1:219346992-219347592
  hyper
ttacagaagtccacacgaggctgacacacgtagaataccattattagcaaaactaaactcagtacagttacaactgcctcaaacttgaccccaaagtattgaaagctcctcagagagcgggccagcagcgctgcgcatgcgcgctcccgggcgtgctcccgcgcgtgcctgcgtatttgcgtgcgcggccccgcgcggcaacgcaggggcggaaccgcatgactggcagtggcatcagcgatggcggctgcgtcggggtcggttctgcagcgctgtatcgtgtcgccggcagggaggcatagcgcctctctgatcttcctgcatggctcaggtggatttcaattttacgtcctggttttctacagctcgggaaacatcctcccctcggttaccccagtattgcccaagtggaggtgtcgccgggcccaaatagggcccagtgggtggctcccccgtcgccagccccggctgtagatgcacgggcagcgccacctgcccccagcctcccccgttagtcttcctctttctatcgggcggtcactggtccaccaccctcgctttggggccttgtgtcccgccgctcagccagccctccatccc

SEQ ID NO: 1127 - DNA, 167 bp, Homo sapiens
  chr1:220101043-220101210
  hyper
gcatgcagaagaaaaagagggcgtggggtgagaagaaagggaccgggtgggaggaggaaggaagggccaagcggtccaaaggatgcaaccgaaaggcacctgctacgtttgcgaacacggtcgcccccttctcccgcttcctttccaccgaggtcccccggagggtt

SEQ ID NO: 1128 - DNA, 242 bp, Homo sapiens
  chr1:220101370-220101612
  hyper
cgcagtcctggaagatgagcagccccaccacgttgaccaacagccccaggacgccgacgatgagcaccagctcggggtcatcgatgcgctcgggccgggccaggcgcagcacggcctccacgaagatggtgaagcagagcgcggtgaggaagaccgcgttgctcagcgcgcccaccacctcggcgcgggcgtagccgtaggtggcgctgaagccccgggtggggcgccgggcgatgtagccg

SEQ ID NO: 1129 - DNA, 129 bp, Homo sapiens
  chr1:220101674-220101803
  hyper
cgcgatggagttgcccaggtagccggagaccagctccgccacgaagaaggcgacggtgagcaccagcatgaagagcagccggcacgtcttgccagagtagcggcccatctcgccaccagccccgggcgc

SEQ ID NO: 1130 - DNA, 234 bp, Homo sapiens
  chr1:220101864-220102098
  hyper
cggatccgtgaggcccggtacccgcctcccagattgtctcgccggccctgccccaccgctttttataacgcgaggccgagcgccaccagtccccgcacgtccagagtctaaaggagtggcgggggcagtatctgaacagcccgtgcaccgcctcccgcggcccttttcccctccctcgcggcctgggcctgacttggcaggtggccacgagccgatgtctctctttgtgggaca

SEQ ID NO: 1131 - DNA, 30 bp, Homo sapiens
  chr1:220700604-220700634
  hyper
aatgcactacagacgcgggtgcctacagga

SEQ ID NO: 1132 - DNA, 63 bp, Homo sapiens
  chr1:220700835-220700898
  hyper
gagcgagacgtcttccgccggccccattcccgaagaggccgcgccgtcgggggctgagaccca

SEQ ID NO: 1133 - DNA, 768 bp, Homo sapiens
  chr1:220701600-220702368
  hyper
accgagccgagacattcgcgccgggggatcgggcgccgccgccgctgggccccgggcgcgtggatgcggctgggtcgggcggcgccgtacacctgaggcggagaacggggcgcggcgcgggtgacgctgtcagggccgcggttcctgacgcccaggcgctcgccaggacgagccaggcagtgatttgaggcaccggcttcaccttcacccatggtccggagagcctagcggggctcgccaccgcctcccggctccccttccacgcctcatcctgccagcctcgccgccccgccagcgccgggcaaccgcctcgcccgaagccctccctcgttactgtccgcataccccggcggcgccgccgcgggaagcggctccccctcctcttcctccgcgtcctcttccctctttcccccgccggggccgcttgttgcaccgccccgcggcctgcgggagccgctcgccccggccttgtgctcgcgtccgcacccctttcctgtcgccccccggggcccgcaccacagcccggccggcgagaccccggccagaccccgctgcccgcacaaaatgtcggcccggacgccattgccgacggtgaacgagcgggacacggaaaatgtgagtaaccggagcctccctcgggagcagtgggggcgagaccctcctctgatccccacttcacccgcgcttgggccgtcccccgtgcctcggcgcggccacccgcggcagggtctccacctggagcccggcgtgaccctcacccactgctca

SEQ ID NO: 1134 - DNA, 40 bp, Homo sapiens
  chr1:220863639-220863679
  hyper
ggcccccccaatcccccgccccgtccgggctggggcggag

SEQ ID NO: 1135 - DNA, 30 bp, Homo sapiens
  chr1:220921517-220921547
  hyper
gcatgggtaactgtcgtgttgtaggggcgg

SEQ ID NO: 1136 - DNA, 30 bp, Homo sapiens
  chr1:220959916-220959946
  hyper
taatttcaaaatcacgctttgtcctgcaaa

SEQ ID NO: 1137 - DNA, 619 bp, Homo sapiens
  chr1:221052168-221052787
  hyper
atctcctgggaggcacgaggcggacgcggtgctgagttgggccgggactcagggcggcaacatttgggcaagggcccaggaaagatgaggggctttgccgaggacacggactcctggaataaaagcagaatgaggtcaagagaagggaagcaaaggggccaaagcgcgctccgctctccaccgggaggcgggctttgcagagccctaaagagtgagattaccgtcccttccccacgcccccaactcgccccgggtgacaagcgcttcaggaaagctcctgtgatcaaccctccttgccccgtggcggttcggagctgcagaagttagaagagagtcagagccctccggagcggctgcctggcccctacgcagagtagcaagaagcactgcgatgtgcgctactaagcccacgcggccgcagcaaaaactttggcgtggccggggcgtggctagggtccggccaggcccccttgttcctaattcccctccactccccgctcccattggtcacgaggatgaccaatgagcgctcggatcgaggtcctaccccgggcctgactcgaaagctcctgccaaaactttgggagtttttagagacgagtttttttttttttctatt

SEQ ID NO: 1138 - DNA, 31 bp, Homo sapiens
  chr1:221064929-221064960
  hyper
gaacacggaagagcaccgcagagcgggtaag

SEQ ID NO: 1139 - DNA, 30 bp, Homo sapiens
  chr1:221118798-221118828
  hyper
gcttcaatatatacaaggtcacttagtcat

SEQ ID NO: 1140 - DNA, 30 bp, Homo sapiens
  chr1:221915460-221915490
  hyper
aggttctgagggggcggactcgccgccgac

SEQ ID NO: 1141 - DNA, 30 bp, Homo sapiens
  chr1:222886475-222886505
  hyper
ttaacagctagatccgctgaatccccttgc

SEQ ID NO: 1142 - DNA, 30 bp, Homo sapiens
  chr1:223254691-223254721
  hyper
caggctcacagacccgtgtcacctctgacg

SEQ ID NO: 1143 - DNA, 93 bp, Homo sapiens
  chr1:223307233-223307326
  hyper
cggccggagagtcgagcggggcgcggggagctgcaagcgtccctgagctgagctccgctgggaagttcctatcgcttgcgcagtagagtgcat

SEQ ID NO: 1144 - DNA, 284 bp, Homo sapiens
  chr1:223538364-223538648
  hyper
cttggcctgggaggcgctcccgggggcggggaggcgggggtagcgggtgattggtgacacgcagaaggttgggtacctggaggaggggaggcttccggggtcgtagatgggaagccaagggggtcggtggtaattgccctcccagccccaagtggagagagttggcctggtcggtcccctgtctctgcgccgattctggtgtcggagctcagcccgcagtggttgcagctctcactcgccgccggctctgatcgcccgcggtcggtttcaagatagggaagccc

SEQ ID NO: 1145 - DNA, 38 bp, Homo sapiens
  chr1:223674887-223674925
  hyper
agaggacctacttagccgggacacggagctccatgacc

SEQ ID NO: 1146 - DNA, 112 bp, Homo sapiens
  chr1:223899974-223900086
  hyper
gctgcaaaggtggcctcgggttccggtgggagccccaactctggaccgcgattcgcgagcctccccggcgccgggccgcgccatcccgggagctgtccgcagatggcagcac

SEQ ID NO: 1147 - DNA, 63 bp, Homo sapiens
  chr1:223936689-223936752
  hyper
gggaggaagggagagcgggtgcggccagtctgacggttgctgtgtttgcagatcaccagcgcc

SEQ ID NO: 1148 - DNA, 69 bp, Homo sapiens
  chr1:223936995-223937064
  hyper
cgggcgccgggtgcgccgcgctgccacctggtggccgcagtggccggcgccaggggccctggttttact

SEQ ID NO: 1149 - DNA, 30 bp, Homo sapiens
  chr1:224302345-224302375
  hyper
cccccgcccggaagcgggccctctacggga

SEQ ID NO: 1150 - DNA, 37 bp, Homo sapiens
  chr1:224622583-224622620
  hyper
cctgtcacccagcacgtgcatcgggggctgtcccggg

SEQ ID NO: 1151 - DNA, 35 bp, Homo sapiens
  chr1:224622765-224622800
  hyper
agccgccctccgaagccgggcgtgcatgggatggc

SEQ ID NO: 1152 - DNA, 251 bp, Homo sapiens
  chr1:224691179-224691430
  hyper
gcaggaggagggctgtcgctgctgtctgcaaccccaccgggcctcccagagccgaggtgacagcctgggcctcggggaagcccgtgtctcatgggcggttgtccagctgctcaggcctgcacaggggcgggtcccctcctaatcttatcctcacacaaccctggcaaccgcacagggctgcctggtgtttagcaaggggaggtggagtgtggtcctcccccaggagaggcagcaggcgacttccctattga

SEQ ID NO: 1153 - DNA, 491 bp, Homo sapiens
  chr1:224803804-224804295
  hyper
ctgctggcttcaagtttcctccgagaggcgggcgtgcacagctgcagtggcggcggcagcggccaccaagcgcccggcggcgcttcgccacccacctttcctcagcccccggcgctgcagtctccgcccgccggggagggcgcgctcagcggaacaggagtcgagggtggggcgccgagaggagggaatcccgggtcgcaccgctacagttctcgcagtggcaaaggcggcggcggcggcggcggcagcggcagcagcaggtggagcgagctacagcgtttggcctgaaacccactgctgcagccacccgggctggagttggcccgttgggtggagccagtgctcgccccggtccgacccccggtttccgggacacttgggttgcggaggccggctggccggagtcacggttggggacgggcgcgcctcggagcgcacggctgcgctggaagccgcgtctggggcgcaggaccaacgggacctacctcctc

SEQ ID NO: 1154 - DNA, 291 bp, Homo sapiens
  chr1:224804395-224804686
  hyper
cgtttgcgccccggtggcgcgggagggtccggagcggagcgctcgtctctcctcagcggtttagtggagaaaagcagagagctcttcctggggcgaatgggacctcctccctcggtcctccgtggagtcgtcgcatcgcttgtcgtgttggtctcgaggggctcacagcttggcactaatttgcaggtgttcgctgctgatttggtttcttcttcgatttgcggacggttccctccagcgactctcgacacacgttttcctgtcttcgccggagggccgggtctggggtcg

SEQ ID NO: 1155 - DNA, 269 bp, Homo sapiens
  chr1:224804846-224805115
  hyper
cgtgtgtggtgggattggggtccgccggccatggccttcactttcgctgcgttctgctacatgctgtctctggtgctgtgcgctgcgctcatcttcttcgccatctggcacgtgagtaacacgctttggtctctcttctttcgccccaatttcgctaaatttccccgatttcaccccactttttccaccttgcgggcgtgggcgaaccggaaggttggaccttctgccgctccactgtcccggggcaggaggcagttcgctgcatcccg

SEQ ID NO: 1156 - DNA, 137 bp, Homo sapiens
  chr1:224805197-224805334
  hyper
cgtcccgggtcccgggcgccggggagtggcggctacaaccacaactaaccccttcctctcccgccccgtcctctcctgccggcgggaggcgaaggagaagcgccgccgtcggtcccggcaattagtcaagtagctat

SEQ ID NO: 1157 - DNA, 30 bp, Homo sapiens
  chr1:224805616-224805646
  hyper
atctgccctcttggcgtctgaagtccgact

SEQ ID NO: 1158 - DNA, 509 bp, Homo sapiens
  chr1:225117199-225117708
  hyper
caccccccttacccccagcaccgtcggtgtcacatcgggggccgccgcgtacccgcggtggaatctcgcaagagccagggcccctcctcacctgcccggcacccaggatcccttgcgccgcgttcgggaccccacccccattgtggcctcttcgccagggcgcaggcgtggctcttggtcaggcggttacggccaggaggcgtcggagcctggcgtggtagggctgtgctgcgcggtccttcccattcaccctagtctggcgctcgccggcgtgggcgggccggaccttcgccgcttccaggaagggccacaacggccgtcggaccacggcgcggcgggtaaggtcgtcagcgtcttcctgtcagcggtcggcagagcctcggcgggcgggcggcgcgtggggcagccggtgtcgcactgggagggctgcgtgggcgcggagggcctgggcgctccccacccagctgctgtgggagcgcctccgagtccccgcgcggaaccctcaccag

SEQ ID NO: 1159 - DNA, 21 bp, Homo sapiens
  chr1:225118300-225118321
  hyper
accatacttttttttttgaga

SEQ ID NO: 1160 - DNA, 605 bp, Homo sapiens
  chr1:225614687-225615292
  hyper
accagttactacaatgcgtaactacagatctacacgtgtttacgtgcaaggtccccgggggcctgttcaccctggcactgcccaggcgccgcgcctcgcgctgcaggtgtccacgcgcggaccacggtatctaccgcgccctcgtgtgaacacccgaccgggccccgtaatcactctgggaaagcgccttcaacaaagccctccgaaagcaagtgctttactaagtgccccttgaggctactggcagtgcgaggctggctgtcattagaacatttttctgaaccctcaaaaaggtgaaaaagcaggaccgtgctttagcaggaacacgcacacccgcctaaatacccgatttttgagactgtccgggcgaaggaattcaacgcataggagcgagcagccatgcagtgtgcctggagaatcaccaaaccgcgacgaccacgaccctcaaagccagtgacaagcagcgcgaatctaagcccacctcggccgcagacccttccccgtcccgccaggccgccgcgccctgtcagcctcctactgcaggaccgcggggccgcctgctcatctgtcagacgggcgctcggaggggccgggagccaggctgc

SEQ ID NO: 1161 - DNA, 31 bp, Homo sapiens
  chr1:225841440-225841471
  hyper
gaatcggggggcatcccggtcagcccaactg

SEQ ID NO: 1162 - DNA, 30 bp, Homo sapiens
  chr1:226069174-226069204
  hyper
ctgttagagcccaacgaacagctaggagag

SEQ ID NO: 1163 - DNA, 144 bp, Homo sapiens
  chr1:226070448-226070592
  hyper
gaagagctcttagacccgccccgggagagtggggttgcgggggtggtagcatggggagctcagcaggattcagcccgcacctcggctccgggtagtcgggaaccgcgcggagcgccctgcaagaggccacggctcccccgccgc

SEQ ID NO: 1164 - DNA, 31 bp, Homo sapiens
  chr1:226127349-226127380
  hyper
ggactgggacgggccccgaggaccctgcacc

SEQ ID NO: 1165 - DNA, 40 bp, Homo sapiens
  chr1:226297511-226297551
  hyper
cctgcccagggaatcccgggagatgcgaatatcgaagaac

SEQ ID NO: 1166 - DNA, 120 bp, Homo sapiens
  chr1:226411103-226411223
  hyper
gtccttcggggatgtggattgcgccgtccgggcgggtgggcggggaagaacacggagggggccgggacccaagttcacgcctccctcctgcatcccgcagccggcggaagcgattattcc

SEQ ID NO: 1167 - DNA, 173 bp, Homo sapiens
  chr1:226411246-226411419
  hyper
cgggctcgcacccggaggagacacgggtctccccgagcccacctttgatcgcaccgccccgccttcccagcccctggcccgggagggtataagtgcggcccgcgcccctccgagcggcgcgctgggttccggagcgatggccacagccgagtcccgtgcgctccagtttgccg

SEQ ID NO: 1168 - DNA, 268 bp, Homo sapiens
  chr1:226411632-226411900
  hyper
cgtcgcagcgccgcaagcgcacgtctttcagcgccgaacagctgcagctgctggagctcgtcttccgccggacccggtaccccgacatccacttgcgcgagcgcctggccgcgctcaccctgctccccgagtccaggatccaggtgagggcccgctgcgttcgcaagtgcgcgctggagcggaggcgctgcggactctaggtctggactgcgggctcctgaggccacacccgggacgttgcaggcacggtgcttcccctgaggctctg

SEQ ID NO: 1169 - DNA, 80 bp, Homo sapiens
  chr1:226924749-226924829
  hyper
tcgcgctgcaagatccgcagcttcctcttggcctcctccggccctggcggggagagggtaccggctgccaccacctgctg

SEQ ID NO: 1170 - DNA, 2083 bp, Homo sapiens
  chr1:226924900-226926983
  hyper
cgctgctactattcagcctgcgccggccgctccgccagcccccggggctccggggctcctcgggggacagcgactcggctggggggaagaggaaagaggcgcctctcccggggctgaaaacgctgccggggctcagcactgccctcctcgggggcgggggcgtctcgctgccactgggccccgggccgccgccgctcttcatctcgttggcgctattcatgatcaccaggctattgagcgcatagcagtacacagccatagtactgggtcccgcgctgcccgccgccgcggctcccgctcctgctccgccgccggcgcctcctcctcccggcgctcccggctcagccccggaggcccggcagccgcggctccgcgcgcagatggggcggcatggcctgggcagcgggctgggggcacgaccgcgggctcagcccccgcccaaagctccataaacaaccgtgcggctgtggagatacaaggagaaaagtcaggaccctggagggcgcgcggggggagttgggggtcgcctgcagaacccagagagagccccgggaacacaatctatccgggacccagcgccaccggacatctcacctatggggacggcgaggctcggcgagggcatgccccggctgcctcggtcgccagcgcggtttcgggtgtgcttccccgccccccacctcgccccaggctgcgatgcgctttatgaggtcccttcaaatcccaatcctaatactcgtctcgcggaccggcgagaagcgaggtccaagtccttggctcctaagtatgctgtgtgcggggcgcggctgactcagctctcccgggctgaggacaccccagccaccgtctccgggtctccccagcctgagcaaacattggctatccagggcaacccggcagccctcgccctgggcttcagggtctccctgctccaccctctcggggcatcagagaccgaccggctcggagggaacctaagcgggacctgccttgcccgagccgctgccagcgcccggatctgggagggcgcccgcgtgcccgccgtttaccttcctgaccctagccttggggctgtgtctctcggcctacgaaggcctgggcgggcagcggggccgcagccgaagcatttttcagggctagccttgtcgcctatccctagacaagtgttttgtgagtgtgggcgcaccgaggttctacacgttctctttaccggaaccagtacttgctgcccccctgccgtcgtcccctatgggggggtgtctgtgagtgtgtgtgtatacacgcgtgtgtgtatacgccgcacgcgcgcggagcgagtccgctctcagcgcgccctgttgccgaggacgcgactgcccctgcgggctcccggacccgcgcccactcggaggaacttaggggcgtgcatggctgcagccgggcagcagccctaggtgcacagagcctctagctctgcaaacctcccaggagccggcgctctaacaccccagggcagcgccgcggagcgcagggcttctccgcatcccgggcagcctcgcccggcgccagcagagccgccccgagaccccagcctggggactcctggagcgcgctgagggaggcggcgcggagtgagcggcccggaaggcgggtaggagaaatgcggagacctcgtctctccctattttctccccaccgccactccatgtcaccctccaaaatcaaacccccttccctgcctccccagcccacccctttgccctgtttcggaaccaggaacgccgagattcgctccagagcagaaagtgagggaaaagagggttgttcagaggcgagagccattaaaaggccgccaaacttacctgcagtttctcagattctcaggtcctgtgtagactacatgcccagaggcgcaaacctcgtagggacgagatggctttaaaagtaaaaatgctcagaaattattttctcacaagctatggaagacaaaaaagaggagtgcgaaagaggggggaaagctcttcggttcaggggcccggcgatcccggcagtggcgacgccaagccggccctgcacgcccttttcgaccgtggagatactgccc

SEQ ID NO: 1171 - DNA, 30 bp, Homo sapiens
  chr1:227016009-227016039
  hyper
tgagcactccgaggcggaaaccaaagggtg

SEQ ID NO: 1172 - DNA, 34 bp, Homo sapiens
  chr1:227058122-227058156
  hyper
ggtcgtcgcttagttccgacgtcgggatgaccct

SEQ ID NO: 1173 - DNA, 430 bp, Homo sapiens
  chr1:227505581-227506011
  hyper
tcagtcctattttcaacggattccggtgaaaactcttcattttcctcccggcttcaccctagggcctgaccggcggcgcggccgggggtggaaggcgggctgcgggcggcactggcaccgggctccggagaagcggctacttggccgcccgagcccactccatgtcggtggtcgctcgtgggccgagccgcgccgcgccgcgccgggcagagagcccggtctccccgacacccgcaccgggccgccgcgccggaggctcccgacgccccaggcgggggggtgcttctctgaattcaaaggacacaagcagcagcagctgcggcggcggcgcgggcggctctggcagctacttctcccccttcttcacacccctgggctaagggcatctttccacagcgaggagggaggcggcccggcgcaggaggagggg

SEQ ID NO: 1174 - DNA, 611 bp, Homo sapiens
  chr1:227506042-227506653
  hyper
cggcagcccggctcccaaccactcccttcctctcccttccagccctcccccgccttccctctcctctcgcgctcgcgccctgggctcagcgaggctcctccagtcccgccgcacagaggcggaggcttgcggacgagtctggatccaatatggcggcctggccccccggccccggcacacgcgcgcgcacacgccctccactccccgcccccgccctgcccgagcctcagccccagccggcggccaagccgggcggggtccggccggcgcgcccagcggaggcccccaagggggcgcgggctcggggcccgagtggctgcgccagcccgaggggaggggtgtggactgcctaggcggcgaggctgcggctgccgcagcgtggaatgcggagctgcgggagggctgagggaggcccgggcggcggtggcggagcatatggaggcgggatgaccgggccgcgccgggagctgcggcgggactgggcgcaggctgggaactgcgccaccgccgcgccgtggccccggctccccgaggcttctggtgcagatcgcgaaggggggctcctgctcgtcctcggagacatcacctgtctggcgcgtttgttaagggcg

SEQ ID NO: 1175 - DNA, 206 bp, Homo sapiens
  chr1:227652538-227652744
  hyper
aagatagcgcaggtagcgacagagaggagtagaggcacaccttgggtaagacattgacctcttgcatgtcccccattgccagccccaagcaggacaggtgcaggaggttggcagggccctactgtgggtctgagatctacgagcaggcagcagccagtgaggactcaggcagtagtgacgatgagcagaagcgcaccacgggtaac

SEQ ID NO: 1176 - DNA, 630 bp, Homo sapiens
  chr1:228134673-228135303
  hyper
cgctgcctcgcacggcgccaccctgcacctcagcgcgcccaaagcgcagcgagggtccctgtaaaggtcgcaggactgggcatcccagacctcagagagggggagggaagaaggaagggaaagaaaggaagagagagacgcgccgacagcccggcaaagcgctgctgcagagacacgtgagcacgggcaatgacaccgcgggacgccccggccgggccctgcgctcccggccaggttccatggacgcgctcccgcgggccggggcccgggccacagagtcagaagcaaagcgcaagaaaaataaattcctccagcttggaggatttctctctttctctctctctctccgtttggggctcagcgcgaggaacatctggattttgtacgtatttttgttattgttaaattaacttctcgagaagagaaagggggggaagctgctaggtgggcgatggccaggggctgaggactcaggctccagccttttggcaaggacacggcggcccaaggaagtcgggacctgatcccagtccctaagcgcgaggcagtcctgctcacggcggcgactacgacgacgacgactctgcggtcacggaggaccgcggcccggcgcaagccggacgggtccac

SEQ ID NO: 1177 - DNA, 388 bp, Homo sapiens
  chr1:228135362-228135750
  hyper
cgccaggcaacccggcggccccgccgcgccccggccccagccaccccgggtgcctcggggactccggacgaccccgccccggccccgccgcccccgcccaccagtgcgcgccggccgccgaaggcacctacccgaagtaggcggccgaagggcgcagcgcggcgagcagcagcgtcagcccgaaggccgcggccagccagcgcgccagcggggacccatccagcatcttgccgcgcctcggcggccgaccatcgcgctcccagctccgcgcagggcgcgccgcggccgccgccctcttatagcgcccggagcgcggccagctgggcccggccccgccccgcgcccgggaggggatcacgccggcgccgggggcgggccgaaacccgag

SEQ ID NO: 1178 - DNA, 237 bp, Homo sapiens
  chr1:228135899-228136136
  hyper
ggggcgaccacggcgggacggcattggggggccggaggcgggcatcgggaagcgggtagagcgttgggggcgctgcagtgggagcttggggcggcccccggggcgggattgagggggaggggaggggaggcgttggccgccgggctagccgccggcggggctccaggccgggacggtcggggatggttccacagaggacccagccgtctgccccgagctgggcgctgcgcggctgct

SEQ ID NO: 1179 - DNA, 30 bp, Homo sapiens
  chr1:228194901-228194931
  hyper
tgagtgagcctcctcgcgttcgcccctgcc

SEQ ID NO: 1180 - DNA, 1069 bp, Homo sapiens
  chr1:228195507-228196576
  hyper
aggggccctctctgcgagccctccgcatgggtccacctggcaatgaggggctgctgtagagagagttaagggtgagttaagcacggggtgtgaggggctccaggaccctcaatcagaaagcgctgtgctgcgccctccacaccagaaaaggcgcgttccgtgagaccctccccagcctggcgatggaagtgcagataaaccaaaggaagggtcccgaaaggtctctctcaggcctcccacctccactgcacatatcctgtgggagggggaacggtggccacactttcgccagggcttgtgatccctcagagccctcaccaagcaaggatcaccccagttccgaattaagggcgctctgagatgcccaagattgaggaacacaagtgggaggaatgtgggcgcgcagggccgggcgcagcgctggtaggacccacagttggagagaagcctccccacaagcatgcacactcccccccatccttctccgacggcagcctggaattataataattacgccgaggggaaggggggagacccagcgagccgaggtacatctaatccgataataatttttctcttcgagatggttcaggagcgggggctcccgcggtaggggcgccgggccaggagcagcggggaggggaaggggcagccctaggcagctgaagggcctggaagaggccacgaggccgcggggacgcgcttcggggacccccgcgcgcccctatttccgcgtgccccatttcccgtgcggcacctgctgcgcccagtggcccacctgagggtcaggctcggggctcgccttggggtgcggggatactgacgcgcgtccagacggccgcagggagccaggggcagcgcgtccgtccgagagagccccgagggctgccggcttacgcaccaggcttctaattagaacccgccgccgcgttcctgagcgcaaaaggaagctccttcgccccgcgcccttcccataaatgtcgccagcctcctggcaaccccgcgccctaggatctttgtcttgtcggccctgagggttcctagcctcggtccccatccacctcatatg

SEQ ID NO: 1181 - DNA, 581 bp, Homo sapiens
  chr1:228225421-228226002
  hyper
tccccagtgggaggggaaccccggccgactccccgccgcgtccggctgggagcacaatatcccagcgacggcgacaagattaagcacaaggggagagtgcaaatgcgcgggcggttcacacgcccttcgcggtgctgaattaaagcgtctgaatggggatttcccctcgcgccggacggcctggcgcgcggcgcatacttccaggttgctatgactggcctgcgctcgcctaatcaccgactagggggaaattcatataaaatatcgccggccattgtgggcctaactcggcgtgacagtggcgcacaaagccggattcaagcgccccagcgggtcagcacggcgcccggccgcgcgggccgcccggcggtgtcaggggccgtggccgcggtggggcgcgggccgcattccgctctcaggtggctccggggccttttgtgcaggccatgattaccaaatgccaccgcgacaccccctcccggccgcctggctcctcctggggccgcaggaatgagggaaggtgggcagcccccgaggggaggcgcccgggcgtcggctccggcgggctccggcggggaccg

SEQ ID NO: 1182 - DNA, 31 bp, Homo sapiens
  chr1:228444739-228444770
  hyper
ccatgccctcacttcccggtttcataccctt

SEQ ID NO: 1183 - DNA, 584 bp, Homo sapiens
  chr1:228463164-228463748
  hyper
tttcgaggcacaagggcctggcgtcttgttcagagcaggggagctggaggtgggagcggggcttaaggaagcttcctggtttcctcgcttaaagtcgcacccgggagggtgcgcagctgcggcccgcgtgtggccagggccgcgctgtttggattgggatcccggggcgcggtgccggcagctctgcctgggcccggctcagggcaggcgccggggctgtgcgggccctctgtaccttggcttgtccgtggaggagggcgagggccgccgtgacctcccctctcctgcgaccccagaggcgcctgtgctgttcaaaaagaagctggagccgcagacggtggaggagcggagctcggtgaccctggaggtggagctgacgcggccgtggccggagctgaggtggacacggaacgcgacggccctggcgccgggaaagaacgtggagatccacgccgagggcgcccgccaccgcctggttctgcacaacgtaggttttgccgaccgtggcttctttggctgcgagacgccggatgacaagacacaggccaaactcaccgtggagagtgagccgcgggcgggaaggg

SEQ ID NO: 1184 - DNA, 374 bp, Homo sapiens
  chr1:228633575-228633949
  hyper
agcccatgtatctagggaacacgtgatgctgcaagaaaccagtgacttaacgcgtgtaaaagcaggagagcgtcagaggttctgaccccgggggaggagcagacccgcggcagcgtgcggagacttagcgggcggaatctgccaccaacgcaacctggcccagaggttttgaactgaccaactgggagacgtccccgagcttgaataagggcctcaaaagcttagcgttttatgcagagtcgcaaccacccagcgctgggaacctgagcctgcacaacccactagaaagcacccgtgaccgtcccctgcgcccgttatccctgcgccccgcacccctgtatccccggcttctctgcagctgtacaccctgcact

SEQ ID NO: 1185 - DNA, 164 bp, Homo sapiens
  chr1:228633983-228634147
  hyper
cgcaggtctccaaaacgaatcccggcttggaggggctcagcggccctgggcctgtgcgccgttgcggccgggagggtcattttcatgcctaaggacccgccccttgcacgcaacctcgggtagccagccggaaacggcgtcccgggctccaaaggacatctctt

SEQ ID NO: 1186 - DNA, 387 bp, Homo sapiens
  chr1:228644856-228645243
  hyper
caaggggtggccacctgtggacgagggttccctgttgttaacagaacacgttgcccacctcgcaagtatgcagcccaatcagtccccagggtctcggttcccgttgcgcccttccccatggccactgcgctcattcatgagcctagggtgatcaggcctccggcctataaagaactgcaggatcagtgcggctcttttctcgagatagtaggtggctctgaaaagagcctttatgtccatcaaaggggccccgggggcggcgggcggcctcacttgcccttggccttgtggtggctctccgtcttcttgggcagcagtacggcctggatgttgggcaggacgccaccctgcgcgatggtcacgcggcccagcagcttgttgagctcc

SEQ ID NO: 1187 - DNA, 601 bp, Homo sapiens
  chr1:228645305-228645906
  hyper
cgccgcgttgccggcaagctccaggatctcggcagtcaagtactcgagcaccgcggccagatagaccggggcgccggcgcccacgcgctccgaatagttgcccttgcggagcaaccggtgcacgcggcccacggggaactgcagccccgcgcgcgacgagcgcgacttagccttggcgcgcgccttgccaccctgcttaccacgaccggacatttccgagtcaaggaaaaaagacaacggcaaccgaaaagcgagactaaaaacaagagggcagtgaaggccagcgagcccttatgtatggtacagaggtaggctagaccgcggcgttcgattggatggctatggtagccaatcagaaaaagaacctggcactcctaatttgcgtattcctttcccagcgatgacgtagaacaacgtttgatccaatcagaagtgagcaaatcctgagccttcatttgaatacaaaacgtacaaatagagttactccgagcgccgcgcgtttctgtttggagagactcagccatcatgccagacccgtccaaatcggctcctgcgcccaagaagggttctaaaaaggctgtcaccaaggcacagaagaagg

SEQ ID NO: 1188 - DNA, 121 bp, Homo sapiens
  chr1:228646025-228646146
  hyper
ttcgtcaatgacatcttcgagcgcatcgccagcgaggcctcccgcctggcacactacaacaagcgctccaccatcacgtcccgcgaagtgcagacggccgttcgcctgctgctgcccggcg

SEQ ID NO: 1189 - DNA, 361 bp, Homo sapiens
  chr1:228646205-228646566
  hyper
aagtgaggcgttcctcggcgtcctgaacccaaaggctcttttcagagccacccacacgatcaagaaagggtttcgaacacggtgaagggttatgtaacctaatgtgtctccatgcaccctagcggttgccgggtgcggccgaatctgagccgtgtgtgtgtgtgtgtgtgtgtgtgtgtgcgcgcgcgcgccggcacagaacgagaaaaactgctcgttacagaaatcggggtagaaactgctcaggtgatgtagctcagtaatgttgggaggcgatcaaggaccccctctccatcccctccctccgcgcagagctattaactcacgacgagatttcttttttttttctttctttcttttt

SEQ ID NO: 1190 - DNA, 66 bp, Homo sapiens
  chr1:228646865-228646931
  hyper
atgtcttttataagcaagtggtgcattcctggatgttgagcgcttgcgcccggttcaggaccgggt

SEQ ID NO: 1191 - DNA, 475 bp, Homo sapiens
  chr1:228651426-228651901
  hyper
gctaaggagggaggaaaggggcgggagaagaacggacccaagcgcctccgcccagacggcgcgataaccccctcacctccaaccccggacctcagtgagcacgtcctccagtctcagccgccaggaggcactgggggcggggacgtggcacaagatcttcccggaggtgacccacgctcctcgcgcgcagggcgtaagccacacacagatctttggatgggatccatggcgcaatcgcctgtactgccccctctctgactttgcctgtggccaacacaagacgaacgcagcctttctaagggaaatatgccgttacaaacaagaagcctaattttgtctctaagacttgcgcccccacggctcagtctactttccctcattactccaattgaatcacaggtcacaaccagaccaggtggcacgctccttttggagcttggaggtggctctgaaaagagcctttgggttcggggcg

SEQ ID NO: 1192 - DNA, 241 bp, Homo sapiens
  chr1:228652211-228652452
  hyper
cttgccgtccttcttctgcgccttggtaatggccttcttggagccctttttagaagccggagccgcccgcgatggctccggcatggcgaggtgacaagagcgcctagacgaacgcggatgcggggccggcagggctatttgccatctttatattcaaattaaggctccaaatttgtagtgtctgattggacggcctgactccgcggccgccactgggaggaatttctgtaaatagcagagt

SEQ ID NO: 1193 - DNA, 516 bp, Homo sapiens
  chr1:228783523-228784039
  hyper
tgcaggttagcccacactaagcggtcccgggctgttgtgtgggcttgggcgtgtgaaaagagggagcagatttacggtgcggttgagaagtacggcgaccaaacggtaaagagggaggaacttgaagtctaaacaagcctgcgtctcctggttttctcaagtggcgtttcatctaagtagcggtctggcccagaccctgcttatcttcacgagatcagaggagaccggacgccttcggggtggtatggccttagacgccggtagtgcagcctgtctgccccaaaggcgcggctcagccacgcccgtccgactccatgcgccacctctaatccagtgccatggggatcttatcgggacccgggagccgctcgccggaggtctggctgggttgctctccgtgtctacgcccaagcaccgttgcccgccgccttgcgccttctgttggcctcttagagccttccgtgattgcttgcgcctaggccactcgctggacctccgcggcgccaccctgtttcc

SEQ ID NO: 1194 - DNA, 1154 bp, Homo sapiens
  chr1:228870816-228871970
  hyper
cagccgggggctccacggagtgaataggaggcggctcaggcttcctggctcgcgtgggcgccagaaagcggaacctcccgggccagtcgcgcggtggtcaccctcttgggagctggggaggaggctgcggaggctggcccggctccttcgggcgtcgcttcccggaccgggtgcgcggggtcccccggaacgtgtgttccaggtcctcccgcgccagtgttcgcagtccccgcctggtcgcggcggcgcctcgggcgcgggtgcaggcgcgcggcgcgcaggcggggggcgctgtggtcttggcgcggggaccgagccgctcggccagacccgcctcttttccctccccgccagcccgcccgcctgcccgccccccacgcgtcgtgtcgccgggaagccgggcggagacagagcgcttgggatccacggcgctcggaccgctgtcctccaacagcgcagggcagagcggctggcgccgccggagcgcggagccacgaccctccctggccgcctttgtctactggccgtgcggcccggaaccgccactctccagggccggggacgcgcccgcagctgtcggtgacagctcctccctaccgcaaccctccggggcggaggggcggtcgggccgggccctgctagcccgcgaccgcaagcccgcgctcgcggatcgatgcccccgcagcagggggaccccgcgttccccgaccgctgcgaggcgcctccggtgccgccgcgtcgggagcgcggtggacgcgggggacgcgggcctggggagccggggggccgggggcgtgcggggggtgccgaggggcgcggcgtcaagtgcgtgctggtcggcgacggcgcggtgggcaagacgagcctggtggtgagctacaccaccaacggctaccccaccgagtacatccctactgccttcgacaacttctccggtgagctggccggggggccggggccgggggcgcgtggccgcggtccacccaggggaaggaaggtggcgcgagggtcgcgaggttcccaagggggctgcagggccccgggcgcggctccagctgggaagccggacaaatgaggagtgcaggacgtttcctgagtctcagggaccgggcaagcgcggagctaacacgaaaggaccacggcggagtgggctt

SEQ ID NO: 1195 - DNA, 100 bp, Homo sapiens
  chr1:229542852-229542952
  hyper
acgcagtccatgccacgggggataagtttttcacaagtggctttttttccccacagtgaagagacgtggcctgggtctggagttcctcaaccggcaaaat

SEQ ID NO: 1196 - DNA, 277 bp, Homo sapiens
  chr1:229543220-229543497
  hyper
cgagagggagctctggtccccgaggggctgtcccgggagggagcgaggtggggagggggagcaggccctgccccgagcaccccgcggactgagcgtctggcgtgcacggcggaggggttaccgcggggaggtgacaccccagggtggtgagggcacgcagatgaggctggcctgaggggtgcctgctttggggaaagcagtctgtggagggagggaaggagggcgatcgcggccccacgcgggttgtgctgctgaggctccgcgccgcaggaaaggc

SEQ ID NO: 1197 - DNA, 122 bp, Homo sapiens
  chr1:229569862-229569984
  hyper
ggttttatatagcccgcgggcattccctccgcgccaccccgcaggaatgtcgctgcccttctcgagccatatttgggtgttgggcactagagccccctccctcggccggttcgcggcctggg

SEQ ID NO: 1198 - DNA, 30 bp, Homo sapiens
  chr1:229570273-229570303
  hyper
tttcaactcctcttcgggttctttgctcag

SEQ ID NO: 1199 - DNA, 30 bp, Homo sapiens
  chr1:229643802-229643832
  hyper
gagatcacttaccgcgagcttagcgagcta

SEQ ID NO: 1200 - DNA, 220 bp, Homo sapiens
  chr1:230223229-230223449
  hyper
ccgcactgttaaccagcggttttcaatctggctgtacgttaggaacacctggggaaaactttgagctgtagatgcctatcacccaccctagactgattcagtcagaatgtctggctgtggggcccaagtgtgttttagaaaaagctccccatgtgtgaatgactctcacgcagtcaggtctggggacagctggttaggaaggcgtcgctgagagtctcca

SEQ ID NO: 1201 - DNA, 31 bp, Homo sapiens
  chr1:230468967-230468998
  hyper
ctctgttgtctctccccgtgacaatctcccc

SEQ ID NO: 1202 - DNA, 814 bp, Homo sapiens
  chr1:230561234-230562048
  hyper
ccacaagccagcccacggagagtctggactcgcccgccccagcacccacgcctcccccgcgcccggttccagcgccgcccccgacatccacccgcgggcagccccttaccgccggtatcctcgaagcgcgggggcgggcggtcccgcagcgctgcgctccagcccgcgccggcctcgtcctcctccggctcctgtgcgtccggggcgcggggcggtggcggggcggcccctgggggtcccgggggctcgcgctcgtcgtccgaggaggcggccgaggaggagcgcgaggcggccgaggtgctgtagaaggggttcccgccgctgtccgggccggactcgccgaacacgtcgtccgagatgtgcaggctctcgtagcgcgcgcgggcagcctcgagcagcgccggcgccctcctccgcgcgcccccgccgccctcggccatggccccggccgccgcccgcgcgcccgcccccacagtgcctcccagccgcacacgccgggccctgggcccgcgccgcggcccgccgccccccaccagcgcagcccgcagcacagcgcccgccgccccgtgcccggccggcccgccgtcttggccgcctcgggcccagcgcccggggaagcgccctcggagctcgggcgccgcaggctgcgggccgcggcgggaggcgagccgcgcgcggggctggcaggggcgacccagagcgggcgggacgcagaggctgcggccgagaccaggcgccgccgccgccaccgccgccaccaccgccaccaccgccgccgctgcgtctcctcggcgcccgccgcctccctgcccgc

SEQ ID NO: 1203 - DNA, 30 bp, Homo sapiens
  chr1:230562306-230562336
  hyper
cccgggaccgccacgcgcagcgcgggaggg

SEQ ID NO: 1204 - DNA, 30 bp, Homo sapiens
  chr1:230562576-230562606
  hyper
actgccagctgcgccgcatgctcccataaa

SEQ ID NO: 1205 - DNA, 31 bp, Homo sapiens
  chr1:231053307-231053338
  hyper
aaagtaccaatatatccgtaatcctgggtaa

SEQ ID NO: 1206 - DNA, 432 bp, Homo sapiens
  chr1:231296883-231297315
  hyper
cttcaatattcatatcgttgttaaataaacgatttcctaatttgtatctgtttcatgccagcgtgaaacttctgtaggcagagccggctgcgctgccagcactttcttctgctcgtccccacccacctctgcctcccccacccagccttccctcggcagcagcggggaagaacagccgagcagaccaaacagccggggccgcgggtgggaggctgttcccgcagctcgtggctggcgttggagaatgtggagattttcccattcataaaaggaacgtctccgcttgccgccttcccgtccgccgcacaccgccacatccgcagcggggtagggctgggtctgggggcgctgggttcccaggggtctacccgggcgcgctctcgcctttctcaggaaaccccattttgtgagcggcaccgcgtgtcctctctc

SEQ ID NO: 1207 - DNA, 1105 bp, Homo sapiens
  chr1:231297602-231298707
  hyper
tggcaggggcggggcggggcaggtcgttgtactgattcaagatacaatctccatccaaataatggattgttattaacaatgatcctccctgcaaaacccttaaaattgccccttgattccctagcagcaagaggcgagcccttattcgctgagctgaagcctcctcccccctcctccccattactctctgctctggaaattacaactcctcggcgcgccgcgcggggaggcagcggcagcggcgggagggaggcggggaggggattcccgagccagccggacgctcgccctccgcccgccggctgcagcgtcgcgcggcccaaggtcagaggcgccgcaggagcagcagctgggaaccagggaagcgggtcaatcccggccgcagggagaaagccccagggcgcagtcagccggcgtccacagccgcccaggagtagggtgagcggctgtctccgggccggtcgggtcccgccgaggtggccgcggccccagcgacccggcgggtggcggcccaggggtcggcgagcaggcagctggagccccaccttcggctcccgggcgctgtccgccgcctcgtggtgctgatcccagccccacggctgagcggccttcgcacctgcctgtctcacctcgctatcaccccgataaggagttgggccggggcagaaggggggcctcggggtagccgcccaccggagccaggggctgaagcagcgagcgcacagcagcccggccgctggtcctggggtggagaggaggcgcgcgctgcagccggcggcggcgctggtgctgattcatcacctaaagctcctcgcaggccaccgcgagggcagccgaccggctccggaatctggccgcaggttgaagccgctggtgcgggaccctcgggcaggaggtgaggaccccctcccttctctcgcccctcaatcatcttagggcggtggctacaggacagagagaggggcgtgcccctcggctgtgaagtgggcatgcccgtgtgatgcccccgcccgtcgtctcaccggggcgcaccgcgctggtcctcctccgccagtctcccgagctccggccattcatccccagcgcagagcagcgctggcagccg

SEQ ID NO: 1208 - DNA, 30 bp, Homo sapiens
  chr1:231557900-231557930
  hyper
aacctgggctcaggcgcgcgggcctgggga

SEQ ID NO: 1209 - DNA, 76 bp, Homo sapiens
  chr1:231664199-231664275
  hyper
caggtccaggaggacgcatcgtctttttagtaacagtgcatgctgtgaggcttgtagagtcgcctctctcttcagg

SEQ ID NO: 1210 - DNA, 438 bp, Homo sapiens
  chr1:232765098-232765536
  hyper
gagaagagcgctcgccggaggctcccggtcttacaaagagggatccgtcccggtgagggcgcgcgctccgggcgcaccccctctagaaggggaattagccccgcagcaagttcggcgtcagctggccaggcgcgccggggaagctgcgtcgggcaaccgcgagcccttccagagagcgttagtcagagcgaagttctgggcacctggagaagaccctcctcagtgcctgtgtcgccgagacgggaataacctttcagccgatcgataacttggagagaacaggcggcggcggctcctcttccagccggggatcgggagcgcgggcgcatctgcgtctacaagccggaccctgcgccgcgaccctcgcacccccgcgcccctcgcacccctcgccgccgtcagccccccaaagcgccccgaagggcatccccttcccct

SEQ ID NO: 1211 - DNA, 425 bp, Homo sapiens
  chr1:232765595-232766020
  hyper
cggattccccgacacgaaccttcgcaacgccgtccgccggaacctgctacagcctgtgcgcgccgggcggcgcgtacccgggctgccgcctcgccgcccgccgctgcccggggctgcccatcggcccggactctccccgcgccgggctccggcggaggcggcccggacccgctggctgcggctggagctctcggcctgcgctcgggcggccggcgggggcgcggtgctcctcctccgtcctcctcctcctctcgctccgccagctcctcccgggctcccagtctgccgcgccggctcccgatgccaccgcccgcccgcccagcggcaccgccccccgcccgctctgcgggctcccattggtcgctgcctgcaggccccctcggccccgccccacgattgggcgcggacgccgtcagtctcaccgt

SEQ ID NO: 1212 - DNA, 494 bp, Homo sapiens
  chr1:232941050-232941544
  hyper
acaccgcccgagacccgctggagcgcttccgcaaatctcgcgagatagcaggcagcgatgccttttgctccggtttctcgtgagaccccggggcttcagcttctcgtttgcggagcccgcggcggcgtttcctggggcaacagcaatggcggcctcgctgtccgagcggctcttctcgctggagctgctggtggactgggtgcgtttggaagcccggctgctgccgtcccccgctgccgcagtggagcaggaggaggaagaggaggaaaaggagcagggggaggcctcgtcgccgcgcggtctgtgccccgccgtggccttccgcctgctggacttccccacgctgttggtttaccctcctgacggccccggcgctcccgccgccgaaccgtggcccggtgtcatccgcttcggtcgcggcaagtcctgcctcttccgcctgcagcctgctaccctgcactgccggctcctgcggaccccgcttgccaccttgc

SEQ ID NO: 1213 - DNA, 30 bp, Homo sapiens
  chr1:233143151-233143181
  hyper
ggagcaaatactcagaatctgatgtcacac

SEQ ID NO: 1214 - DNA, 30 bp, Homo sapiens
  chr1:233463477-233463507
  hyper
ctctggctaaggagcgcgcggcgggcgggc

SEQ ID NO: 1215 - DNA, 15 bp, Homo sapiens
  chr1:233749715-233749730
  hyper
gaaggaagaaaaaca

SEQ ID NO: 1216 - DNA, 153 bp, Homo sapiens
  chr1:233749768-233749921
  hyper
cggaggagcggggcgggcgggcgcgcgggggagcgggcggcgggcgggagccaggcccgggcgggggcgggggcggcggggccagaagaggcggcgggccgcgctccggccggtctgcggcgttggccttggcggcggcggtggagaagatgc

SEQ ID NO: 1217 - DNA, 289 bp, Homo sapiens
  chr1:233750270-233750559
  hyper
aggtagggtatcctgcgcgccccctggccgccccggccacctcgcccacaacccacacaccccggccccggcgccccgggcccctctaaccctcccaccccaccccccacctttcgccatcccggctcctccagcccgcctcccctcactgtcctcccgaccctccgaccttccccttactggcgtccccggcctctgcctgggtgactcgggagggcaagccctgcggagccggaagccagagaggtgactccagacgtgacttggttgttgccgtccgtaactctgg

SEQ ID NO: 1218 - DNA, 125 bp, Homo sapiens
  chr1:234040355-234040480
  hyper
ggcggagcgcacgcccgggaggcgggaagtgggcagcagcgcccccgcctggcccctgtgcgccccgacccgacgcctccccgcccgaccaggtgcctcgagagcgcacagctgggagggctctc

SEQ ID NO: 1219 - DNA, 212 bp, Homo sapiens
  chr1:234041148-234041360
  hyper
cgctcgcccccggagggccccggccgcgctcttgctctcgccctgggatctgctcctcacgaatcccctcctctctgtccatgctccccctgcccacccacctgcccgtggcgcctgcgaccgcagtggcatgaggaggtcaccggacgtcagcccccggagactgtccgacatcagcccccagctccggcagctcaagtacttggtggtgg

SEQ ID NO: 1220 - DNA, 15 bp, Homo sapiens
  chr1:234041415-234041430
  hyper
cgggccggtggggct

SEQ ID NO: 1221 - DNA, 30 bp, Homo sapiens
  chr1:234508998-234509028
  hyper
gctctgtaacactccgtccagctctcgcac

SEQ ID NO: 1222 - DNA, 30 bp, Homo sapiens
  chr1:234745188-234745218
  hyper
ggtagcacgactgccgccgggacgcggccg

SEQ ID NO: 1223 - DNA, 142 bp, Homo sapiens
  chr1:234828213-234828355
  hyper
gccgccatgcccggcttatttttttcttttaaatatatcagatctcccccaagttaatacgatcaatgcaattccagttcgaagcctagcaagagtctgctttgtgtgttggagatgttccatgcatcgcaattccccacct

SEQ ID NO: 1224 - DNA, 30 bp, Homo sapiens
  chr1:235667931-235667961
  hyper
tgagcctaagcacgcgcttccgtcactcgg

SEQ ID NO: 1225 - DNA, 1100 bp, Homo sapiens
  chr1:235811919-235813019
  hyper
gtccactgtgggaagcggcacacctcactcatgagcagacgacaggactggcacgttttaatggagcacacgggcgcagcctaggcggccttttgctccggctgagaggcacgggcccggtgccagcatttgacagtcctgggaggcgacgggtagaggagagacgcggcagccgcggggccggggagacggtgggaggcccggcgtccatcatccactttattacttgatcaaactttaacattttcgggtttcctaacaccttagccccaaatactcgaaatgaagcaaatcttaaattaaggagtctttccccaccacgctctgtcctcctccccacttcaccctcccgccgtttcgcgttatttccaaggcaatttaaaaaatcaagccaaacaaagctccccggttgctgccgggcgcgcgcggcgaacgaagcacatttcagttcagcaccagcctcggggacagacgccatcaaggaggtgaggaaaaccaccctcagctgcggtggctccagcgtcaccccgagtgctcccgaggcggcgtctgggctgctggggagccaggagggcttcctcaggcactcgccagaaacatttccccaaagaaaacgcccaaccagccacgccatctcctgccactgaggtccttttccacgggggacgtccccgctgggaaaacagcaaacgctctgtgacctacaaatggaagaggggacccccgagcccccgcctgcctcatgccggagggaccgggcgcccccagccccggaagcccctggacgcgctccgagggggctgtccacacccgcgcgcgggcttccccggggcccggcgggaggtcccgggagaggaggccgagggaaccacaggtctttgtgtcgcgtgcagcagcagctggcggcgtgaggaccacaccggcgccagagccgtctccctaggtccggagactttcaccccgagtttcccttccgcgtctggctgcaccgggctgggctctccccgcggacacccggggctccggccgggcgcccacttacccggagcgggatcacgcgcgggcttcgtctgcagcgcggtgctcgcggggggcggcca

SEQ ID NO: 1226 - DNA, 15 bp, Homo sapiens
  chr1:235814009-235814024
  hyper
ggttctaggagcgac

SEQ ID NO: 1227 - DNA, 105 bp, Homo sapiens
  chr1:236227638-236227743
  hyper
tgccaagacacatccggagtccacacacaaatacaggaggctgccggcgaaactctcccgcagccacaagagtcccggggcccgcgcgcagactgcgatccagct

SEQ ID NO: 1228 - DNA, 151 bp, Homo sapiens
  chr1:236227769-236227920
  hyper
cgcgagaacctggctccacccgggaccggccaggtcctagccccgaagggactggacagccgagggacgcggactgacctccctgcggcgatgcagcccacagccgccggggaggaagctccgcggggtccatgggtgccggggtcacggc

SEQ ID NO: 1229 - DNA, 602 bp, Homo sapiens
  chr1:236228021-236228623
  hyper
cgccgtgcccggtgccccggcggccagcgggtccgggtccccgcctgctacgcccaagtccgtccggctccacgggcgcccccggcccgccgcgccctgcagcccctcgcccgccctcccggggctcactcacgtagactgcgtcgatgtcggatctgtcgtagaagcggagcgccccactcagctccagggcaggagagacgaagtcatccccgtcctccagctccaggtccccctgtccggggccgaagggaaagagctcctggcggctcaggcagcccacaggccccgccagcagcagcggcagcagcagcgcccgcgtccacgcagcccggatccggctgctcgaggccaacatgttcccgaactgcggtcccgcaaacccggtcccgcggccaggacagaggaaggcggggatgtaaccggacgcccctggcagccccctctcctcccgcctcccggcgttcccaccccgggaaataggggaggggagcggaggggagagcggagggccccgccccgtccagcgggcgcgccgcggggcagcccaatggccgcgagggggagggcgaggggcgaagccgaacctcccgccttgggcg

SEQ ID NO: 1230 - DNA, 46 bp, Homo sapiens
  chr1:236305442-236305488
  hyper
gggatggggaaggggccggggacgggtagcgcgcggcccctgggat

SEQ ID NO: 1231 - DNA, 30 bp, Homo sapiens
  chr1:236444197-236444227
  hyper
cacctctctgaaggcgaaaggatctggtca

SEQ ID NO: 1232 - DNA, 80 bp, Homo sapiens
  chr1:236444827-236444907
  hyper
tcaggtctctgctccccgggttttctgctcgccagaaatcacctcttttctggcccggccctgcccggccctccccgcgt

SEQ ID NO: 1233 - DNA, 451 bp, Homo sapiens
  chr1:236445120-236445571
  hyper
cggggccggggaacgacgggcggcccaggcgacgacccaaggggacggttcccagcggccgagcgactccagggtcagaggtctgcactccagtccggaggcaggcgactctttccccaacacccggcagctgcgagtgaggcaggaaaggcgagcgcccccacttcatcccccaggcggccccgcccccggctcgcttggctcctcggccacgcccccaagcgcggggccttgtgggagttgtggtcctgggcggtcgcctaggcgccgcggcaggaaggcggagccgctgaacgagaggactcgggaactacaactgcgaaggccgccccgcctccccgaggcctcgggctccgcggcggccaatgaggcgggaccacgcgggcctccaaaacaccggggggtgcgggcgggggaagcggggcgacctcttctccgggaaaccaggctg

SEQ ID NO: 1234 - DNA, 30 bp, Homo sapiens
  chr1:236445955-236445985
  hyper
tgacatagattgggcgcagatcccaactct

SEQ ID NO: 1235 - DNA, 553 bp, Homo sapiens
  chr1:236558653-236559206
  hyper
cggctcccgccccgcgcctctggagggaggtaccgagggacgcgcagcgaaggggctttgctaattgccaaagcaggaagtgagctcgtggaagaagcgaaggaggagaagaagaagggaggggaaggcggaggagggcaggggcgcgcagagccacggtttgctccaggcgcgtcggaaccgcaggacttttcatccccgtggtcccacggtcctcccgcgccccggaggcctgccagccccgctcggacgctcgtttgcccctaacccgccgccatggcttcaccggacgaccctctgcgcgcaggtaaagggacacagcgccgcgcccgctcctggagcgagcaccgcggggcgggagctcgggaggcgctcgcagcagccgcagggctatcgaggccgggcctcggcgacccccgagggaggcccgggaaccacccccgacccaggcgccagacccggagtcgcacggggctcccagtccagccccgcgagcggctgctgaccgcccctcccgcgctcgccagggcccctgccccgcgtcagccaccgc

SEQ ID NO: 1236 - DNA, 119 bp, Homo sapiens
  chr1:236559256-236559375
  hyper
cgggatgccaggttgagacacgtcctgcaaacctctggcagaaatgggcgcaagggggtggatttcgttttcgcctcccgggctttttctttctccccgctcacatgccttctcattac

SEQ ID NO: 1237 - DNA, 30 bp, Homo sapiens
  chr1:237093369-237093399
  hyper
tttaattagcaatcctccaggctgtgaaac

SEQ ID NO: 1238 - DNA, 64 bp, Homo sapiens
  chr1:237205159-237205223
  hyper
gcgatccgaagtgccgtggaagttagtgccctagcccagtccaggaggaaggggcgtcgtgccg

SEQ ID NO: 1239 - DNA, 164 bp, Homo sapiens
  chr1:237206101-237206265
  hyper
cgcggctagccggcggcaggcgcccgggctcggacccggggcaccggggacaggagcgtcggagctgcgggaaccgggagaggaggggacggccggtccggcctgcctggtggcacggctgggacctcccgggcggccgggggcagggtgcagagcagggtggc

SEQ ID NO: 1240 - DNA, 153 bp, Homo sapiens
  chr1:237206511-237206664
  hyper
ggttcccggggctggtgccatccgtggtggtgctgtgaccgcttgcaaagcgtggaaggcatgggaagcgagcgtgtgtttgcgtgtgtgcgcgcgcgcgggtggtggtggggagaacatcgtgaacgtgtcgttctctaaatgctggcttat

SEQ ID NO: 1241 - DNA, 1728 bp, Homo sapiens
  chr1:239549562-239551290
  hyper
aaccaatttaaaagcgaacacaacaaaactaacagaccggcaaaatctatctttgaagcgccgcgggaggcacaatttgggaacaggtgaggccatgctgggtgggtgaggcccccctctctcctgcttggtgttccgctttcagccaacccaccccaggagtaccctgggatctcctcgccccctgccaggcggagaacgcggagcccagcgggcacgcgggaatggagctaggcgccggcagggcaactgggcatgctcagaagccgggcaggttttggtctcaagcacgcagcctgtgcattacaccagctctctcagtccggggaggaggaggagcaggaggaacgcgaggaggaaggagaggaggagcggccagcagtagccacgaccgccaccaccaggcagaggaagagttcgtggggaggaaaagacctctcctcccccttggagcgccttctctctgcttttggagaaagggaatacacgataaagaaggagacggaaagaagagaaaaagtgaggcgggagacagagggaaaagggcgtgaacagaaagggccggagcgtgcaggggagcacagggcgcgggggcggcactgccgagccgggagcgctgccgcttgggcaggtgccgcggccgctgcccggaggcggcatgtgacgcgcggccgcagctgcccgcgggcggagcgctctcagaccccggagcgcacaccgcggggccatcggtgccatcgcggatctccaggctcctcatcagtccgccggggccgcagcagcgcttctgggaagacgggcgatgaactgaagggcggctccgggcaggggggcacgatcttaaggacagtcgctccctgaacgcggagccggaggagacgaagggaaggtggagcggacgccacccgcgcaccgggcaggcgcggagaccggcgtgggacagccacctggagcgcagctgccaggtagggacggcgcccgccacccaggcgctgggcagagcgggtggcggtagcggctgacctggtttcttgccttatctcgttgcgaaaggaggaaaaagttttcggcgcgggtaggagaggtcttgtgtttggagtccaaagaaggggctgggtagggacgagagaggctgttgatttggggaagatgggggcacttgaattccgacagcgcgatctggtgcggagttggagttctgggactgagggtggggaacgcccgctggcactcaagtgccccgaaagggacgggaatcatgcgagcggtggccgggagagagtcggggacgtcccaccccgctctccctcgcttcgattctctcttcgccactgccggatctgaggctccaaagtgcccgagcatgaggagctactgggctccgggtgtgtttgtgagcgcactcgtgtgttgagcgtttgtctcccatctccccatttggtttcctgtcatttctaagaaggctaaagctggcacccgccaacctcgcagtggggccgcaagttcggattgcatttcagggggcgagaaggcaaatttggcacttcgagtaacacttgggcgaaggtacctagcctagtgcgcatctttactgacccggggagagtctgcactcgcgaggcagcggccgctggactgcaccggttctcctctttggaacacttcctcagcatagcctcctaatagcgaggttaatttttgcgtgtttttaaacggcgggggcgggcg

SEQ ID NO: 1242 - DNA, 1220 bp, Homo sapiens
  chr1:240254938-240256158
  hyper
cagagtgcatcttccagctgacgatctcttcggtcggggacaatgcattcgattcgcacggtggagattaaagtccccgagatagaggaaacgtttttcgcgcccaggttcagcgaggagccgcgcgggggcagagggggcggcggcggcgggcggggagccaggcccgagctgcgttctgcgcagccattggtgggcgccgcgctctgcactgagcatgttcgcgccccgccggcccctagccgcagccgcagccgcagcgacggcagccacgggagccgccgcgcattatgcaaagcggcggcagatgcgagcggggccagccgggcgcgcgtcggcctcccctcccagcggctccccccgccgccgcctgactctcccgggagactccctaggcccggacctggggccgaggagggccgggatggcctgagtgcccgcggcgcggcggcgcagcagcgggattgcaccatggggaaccaggatgggaagctgaagaggagcgcaggtgatgctttgcacgaaggcggcggtggcgccgaggatgcgctggggcccagggatgtggaagccacaaagaaggggagcgggggcaagaaggcgctaggcaagcacggcaaggggggagggggcggcggcggcggcggggagtcgggcaagaagaagagcaagtccgactccagagcctcggtgttttccaacctgcggatcaggaagaatctgtccaaggggaaaggcgccggcggctcccgcgaagatgtactggattcccaggccctgcagaccggggagctggacagcgctcactccctgctcaccaagactccagacctcagcctctcggcggacgaggccggcctgtcggataccgagtgtgcggacccttttgaggtgaccggtccagggggtcctgggcctgccgaggctagggtcgggggccggccgatcgccgaggatgtggaaactgcagcaggggcgcaggatggacaaaggaccagctcgggctcggacacggacatctatagcttccattcggctacggagcaagaggatttgctttcagacatccagcaggcgatccgcctgcagcagcagcagcagcagcagctccagctccagctccagcaacagcagcagcagcagcagctccagggcgccgaggagcctgcagcgccccccactgccgtctcccctcagcccggggccttcctgggcctgga

SEQ ID NO: 1243 - DNA, 139 bp, Homo sapiens
  chr1:240256624-240256763
  hyper
cgctgtttcaagccctacccgctcatcaccccctgctacatcaagaccaccacccggcagctcagctcgcccaatcactccccgtctcagtcccctaatcagagccccaggatcaagaggcggccggaaccctccctga

SEQ ID NO: 1244 - DNA, 252 bp, Homo sapiens
  chr1:240775060-240775312
  hyper
ccactcagggctttcggtcctgaccagccacggaacaaacaacgtcaattcattctaagtgcctggtgaaggtagaaatcagaaaccgtgtctgtgtcacgttagtcgtgacaagctgcgtacctgcaatgacgtgatggaagcctcctcctcgggtcccttctctctctctctctccctctccctctgccttctctgagttctctagtccacagcggggtctaagtttggtctcccgccgccgctttcagt

SEQ ID NO: 1245 - DNA, 111 bp, Homo sapiens
  chr1:240775378-240775489
  hyper
cgagagcgcgccccgcgccgcgcggtcccaggctggctgctcctgcagatgtgaaaggagcccggagacttagctctgaatcctctcggcgctgcatggggatattatcag

SEQ ID NO: 1246 - DNA, 540 bp, Homo sapiens
  chr1:241520264-241520804
  hyper
agctggcggcaagcggagcagcgaggcagggtagcttcatcacactcgcggcggatgcggattccgcgccgccccggctctagctgctcaggcgaccgccaccctcgcctcgccgccgcccgtgcacaggcggctccggcagccgccactcgcgcccgctcccctgggccgcctcgctggctctctccctcctccgcttcttctcccggggactgggaccagccgagcgcgcgcgggagtcgagacgcccggcccgtgcgcgcgactgggaggagggaggaggggacagtcacgtgggacaggggcgtccgaaggtgccggctcggatgggctcggctcggccgccgccacaccgcccgggcctcccgggcctccccggcctcccgccctcgcgcccctcgggaggctgtagtcctgcccccggcgcggccagcccgcgctcccgcacaccccgcccgctcgcccgcgcgtgtgtacgtgcgccggaggcctggagagaccggagtttaacgcccagtgtaagccggaaagggaggaagg

SEQ ID NO: 1247 - DNA, 744 bp, Homo sapiens
  chr1:241587110-241587854
  hyper
gcagtcctgagcggccgctgccatcgcgccggctgcagcggaaaggtacaagcggtggcggcaggagccgctgtgggagcagcagtggcggcagtgggagccctgtgccacgcgtcccctgtgcgccgtgtccccaaggcagctgactacacctcccccaccctcctgcagcagggtggatcccacctagcgggactccccacccacccctccaggccttctccactccggactctggccacttgccaccgttgtcgcccgccgccgctgcagggagggtgcacggagggagcagaccgtctccggagcccgccgccctgggggctgcagtgatggggccgggctgaggcacctgccggcggggtagcagggcagtcgagcacggagggaggggcgggcctccaggggacttcagcgggagccgggcctggggcggtgccgcacttgcacacggagtgtggggggccaggcctgggaccaggagctggggccgggcttcggcgcagaggcaggaagaggaagcggcacccgcttcggggacccagccggcggccaggccaccgcgcccacccggccgatggcaccgtgttcctgcgcctcgggagggaggaggctctgcgcgggactgcaggttctgccccgcatcggagtgatcgctgagcctgacgctctcgaaggctgggcctggggcccgcaatctactccggaggctttcccactgggcagggtcgctagcagggtgag

SEQ ID NO: 1248 - DNA, 30 bp, Homo sapiens
  chr1:241683096-241683126
  hyper
cgcccaccggcctccgctcttatccaatca

SEQ ID NO: 1249 - DNA, 596 bp, Homo sapiens
  chr1:242687003-242687599
  hyper
acgcgggcaaacgccgctctaaagcccactaccatgcaacgccaggttgctcggagccacgctggtggcacttccccttcgtgctcactctgcacaggcacctccagaaccccgtgcaaatgaaccctaccgggagacgcaggtgggcaggtcgggtcggcagggaccaagagcctgaaagggaacctgccctcccctccccgcagcccggtcattaaggcaagaaactgcaggcagagaagcccccgaatccgacctaggacgtcggcgcctgccaggatcccctcgcctgccccccgcgccccgcgcgcgctcatgccaccaccacggggagggtgcatgcggcaggtgcctggccgaggcccccgggagcgagtcgcccttacgtgctccagcttgtctttcctccgaagccagacgctggcgctgtagtcctgctgcttgacgctgctgtagaagttcgcgcccactcgggtcaggcttggggagggctccttggggcggcttttgagcctcatctgctcgaagccctcatggggggaggccgagagccactcgtgctgccggatctccatcctgacatgaccgggcggccg

SEQ ID NO: 1250 - DNA, 423 bp, Homo sapiens
  chr1:242687610-242688033
  hyper
cggactcgggacgggcgcgcggggagccgggcgcggagggcgagcgggaggcccagcgggagccggaggtggagctggagactgagctggaggagctggaggagcgagcgggcgcggggagcgcggggtgctgagcgccagctgggagcgcggccgggcgggagggggcgatcgcgggaggcgcggggcggaaggagggagggcgaggtgcgggcgggggcgggggcgggggcggagggggacggacggggagaagggggacgagaggggacagggagggaaaggaacctgctccggggagacagaagtgcccggtgcggcggcgacgtcgcccggcggctgcggtcccgagcgggcgctccgctcgccggctccttgcggcacctactgggacccgggccggctcccggggcggcggcggcg

SEQ ID NO: 1251 - DNA, 163 bp, Homo sapiens
  chr1:242688080-242688243
  hyper
cgcgcctgcaggttggtgcagtgaggagccgccgccgcccctcccgccgcgcccaggcccgggcggccgcgctcccgctccgcacccgcctttcccgagcaggctacacctctccctggcgcatctttactggaaagccggcaggcgaggggagaagtgagcg

SEQ ID NO: 1252 - DNA, 419 bp, Homo sapiens
  chr1:242688277-242688696
  hyper
cgcggggatggctccggagggagacactcaggaaaccacctccgcccttcccccatctctatccagcggcgccccctcaccctgcccccggctcgcttgggctgcgccttcccccattctgaaagttcactaacttcccaccccaagggacttagagcagagggtgcccagcattcccccctgaaaatagccgagagacatgtgttttctggagccgtacacgctactttcatccgatggtgtggcgatgcaaatacgcccgggggcagtagcccctcgggcaggcacgcgggaccggttgctccccagccctcggtgtccacctagaaccgggctccccgggccgcacccattccgatcctgggagggtgatccagggctcctctgcaacgctccgcttgtgcggtgactgttcctta

SEQ ID NO: 1253 - DNA, 31 bp, Homo sapiens
  chr1:243418478-243418509
  hyper
ccggggccctcagctccgctgggcaataacg

SEQ ID NO: 1254 - DNA, 384 bp, Homo sapiens
  chr1:244013706-244014090
  hyper
catcaccagaaaacaccgctcgggcgggggccgggtcacgccggcggggcggcggctctgggccccggggcgcgcccggcgcggggaggggttctgcggcctcctcccgggctgcgcctcgctgaggggaccccccgccgcctccccgccccctccttcctcccgctcggggccgccgccgatcggttctcgccgtcgccgcggggcttgttgttgactttgaggaaaactcctgacgtcaggggctggctctcggcgactggcgggagcggcttccccgcgtccccggccctgcccgccgcctctgctcccctccctgcccggccctcgtcctcaggcttccccgcgcccccaaaccagcggtgccccgcgccccctctcctc

SEQ ID NO: 1255 - DNA, 30 bp, Homo sapiens
  chr1:244816650-244816680
  hyper
cgacatggtgagtgcggcccctggcggccc

SEQ ID NO: 1256 - DNA, 704 bp, Homo sapiens
  chr1:244893239-244893943
  hyper
atttttttgacggggcgtggtagctcacgcctgcaatcccaacgcttgggaggcttaggatcgcttgaccccaggagtttgagtccagcccgggcaacatagttggttttttttttttttctcctgtctcaaaaaaaaggcattgcagagattgaaaaccgtttcccaccttctcccctgcagtgtttaggaagagacaatccgcccccgattcagcgcttcccagcccgcagcaactgcgcagcggggggaacccagggctccgcggcacccgcaggctttagttactgctccgaggccctcggaccaaagagaggctgcgaggaggacgcggctcgtttagctcgctgcgaacctcaagataacccttggtttccatgcacatccccccaacattgcatgtgctttcattcctacggtgctggggttactttcatttattgcttttgttgaccaaaaagaaaaaaacaatcctgagcgtgcacagggggcgcaacgggggaccggctcctcgtggctgaccggcggcggggctggcgcgcgggggcggcctgcgcgggccgcccggggacgctgctctggggtccggccgcggcctcgtggccgccctgcgcgcggtccagcaccagcagcgggatctcctccagccggtccggccgctccttgcgccgcaggtagcgccgcctccacgtcgccagcctctg

SEQ ID NO: 1257 - DNA, 30 bp, Homo sapiens
  chr1:245133201-245133231
  hyper
aggaggccgggccgcgggctggttctatca

SEQ ID NO: 1258 - DNA, 30 bp, Homo sapiens
  chr1:246729203-246729233
  hyper
tctccgatcggttacgtaacgcttaaagtc

SEQ ID NO: 1259 - DNA, 90 bp, Homo sapiens
  chr1:246887449-246887539
  hyper
gccaggcttggaagcggactcgcccccagggccaccgccctaggaaacctcccgtcggaagcctcccaagcaagccgctcacccgcggct

SEQ ID NO: 1260 - DNA, 333 bp, Homo sapiens
  chr1:247170847-247171180
  hyper
ctcccacccaggaacctttcacgggagtcgggactctcccgacaacccctccgtcatcacagcacaatccagggaagacgcggcgctgcgggcgcggggctgccccgggagggctctgggccgtgccgaagtcaccaggcagagaccggacagtcacccagcggccgggatcccgctgccggcccggcccccacctgcgcgggacgggactgagggccgagctgcgccagcgggactcggccgcacactccggagccgaccgccgggaggcccggggccgccagcgctggttccagccaattccaaccgattccaaccaccccctctcccttc

SEQ ID NO: 1261 - DNA, 203 bp, Homo sapiens
  chr1:247171251-247171454
  hyper
cgcaatacctgcaggccacagggcgatggagcctgcggcagtcacccgggactctccgagaggcagcagacgggaacccagcaccccgccggccgcaaggagacaaaggccccgccagatccccaaggccgccccttcctctctggctgcacgcctgattggacagttctcacgctagcgccgctgactggatggggctccag

SEQ ID NO: 1262 - DNA, 256 bp, Homo sapiens
  chr1:247241958-247242214
  hyper
agcaacagaagctgccgcgggaccacttggacctcccagggataaggggaaggagcagcggagacgcaccgagctcgccacattcgcgctgcccaacacaaaagccgcgccaggtcccggaagctgctccctcctttcgcggcgcgcttgagagtacagtccccttcccagcgcccgattggacagggccttaggccccgccccttcagtcctgagtgacgggagatgcaatcagacacggcgctgagtgaggcca

SEQ ID NO: 1263 - DNA, 31 bp, Homo sapiens
  chr1:247278690-247278721
  hyper
tctctgtcagtgagaccgtcaactgtgatgc

SEQ ID NO: 1264 - DNA, 139 bp, Homo sapiens
  chr1:248020309-248020448
  hyper
gtttcctgggtgtgtgtgtgacgggggcggggaaccacaacgttaattttatccccgacatagggagcgcctgagtggtggcttttcaccgggtgtggctcgtctgagctcttgaactgaagccagcggacaccacccg

SEQ ID NO: 1265 - DNA, 115 bp, Homo sapiens
  chr1:248020515-248020630
  hyper
cggccgggagcgcagccctccgggaggcgggtcatggcctgggcgccgcccggggagcggctgcgcgaggatgcgcggtgcccggtgtgcctggatttcctgcaggagccggtca

SEQ ID NO: 1266 - DNA, 304 bp, Homo sapiens
  chr1:248020956-248021260
  hyper
ggcagctaccaggtgaggcgccccccggcgggggctgcgggcgctgcggtgaccgggaagcgggcgacagtccggagcggagccgccgaggccacccgtctcctgagcggctcccacggccgctccccccaccgcgcgccgtcccccccgcccacgcggctcactcagtgtgggtctctttgccttggctgtggtaaccccctttgcgacacacacccattattttacaccgtccgcccctcccccaagcactctcctgtcgtcgaactcgcgctgggctggtttctcccgatgcggatagtct

SEQ ID NO: 1267 - DNA, 235 bp, Homo sapiens
  chr1:249167653-249167888
  hyper
aacaaaagcatccattcgtcacttagtggcaagcgtttttccaactactttccgagtagtaactgcttgccagagtttccccagcttgggccggaaggtgaggcggtagctcgagctttgcctttctcaggcattgtcctgcgtttgcggggccaggcgctggcacacggtcactaacccctggtcgttagcttcgattcccggcctgggagagcgctatcggccactcctggct

SEQ ID NO: 1268 - DNA, 18 bp, Homo sapiens
  chr2:11722-11740
  hyper
gcccgcctcctggcagct

SEQ ID NO: 1269 - DNA, 62 bp, Homo sapiens
  chr2:45821-45883
  hyper
ctctggcccagggggcgcggccgggacactggagggcgccgcggaccgcgcggctggggctg

SEQ ID NO: 1270 - DNA, 476 bp, Homo sapiens
  chr2:46407-46883
  hyper
ggggttccgggtccagcggagacgcgctcgagtggtagagccagtcagtcccagggccggttccgaagtccgcgccgggtggggaacggcgccccagtgcccagctgcccaggcccggggttggggagaaccggagtctgcaccgattggcgaaactccccagttcccgcccctcccgacctcatcgcccacaccgactggcaccgcccccgcccccgcccggtgccccggccctggccgcgtccccgcatccccgctcgtccccgcccgtccccgcctcctcactcccgcccgggcccgcctccctggccgctctccgggtgccagcgcccgccctcacctcgcgtccggggtcccggccctcacctcctgcccggtgccgtccccgccccccctcaccttccggcggcgctgccaaccgcctggaggacgctggggcgagcaggctctgaacccccactcgctcagccccagat

SEQ ID NO: 1271 - DNA, 30 bp, Homo sapiens
  chr2:47135-47165
  hyper
cctcggattgggtccgactcggtcgctggc

SEQ ID NO: 1272 - DNA, 536 bp, Homo sapiens
  chr2:263890-264426
  hyper
gcatcgccggttttcccgtcctcctcctcccaccaccgcccagctcttgagaggggagggtgctgccggacaggtgggtccccgggtactcactgctgcccgcccggccgcggcgccccgtcccgaggctgcccaggaagaggaaggcgcgctgccccgccccgcggacaaggaggccccagcgagggcgtacctgcggcaggtgacgaaggaggcggcgcaaaacacccgccgtgtacgtttcgcgggacaaaaaccacgcgcccgccgggccgcgctcaggccttcgccctcagggacttcggaaccgccccgtcctcaagatcgaaaagcccagagccccgcggcggctccaagcacggtgttgggggtgggggtctcagggagcgcccaggcccaaggccgccctggtccggcgtggaccccgcggggctcaaggcaggttccccgcgtgacccgcccagcccctctatgcgaactcgaacgacaggcaccacagcccgccacgtgcgcgagactcgcgctgtgccccaacc

SEQ ID NO: 1273 - DNA, 31 bp, Homo sapiens
  chr2:288831-288862
  hyper
tcttcgtcagtccccccgcctcacctcgctc

SEQ ID NO: 1274 - DNA, 488 bp, Homo sapiens
  chr2:289666-290154
  hyper
aaatgtattatcaatcagttgcgcactttcccattcgattggtgctttctgggcaagagctggacgtcttccaagtccgcgatctgtttgggaaaggtgttctgagtgcaatcagagaggcggagtgggcgagaattaaaggcctgcaccatgatcggggcagtcgcaggaccgcggcgggaaggtgctggcccaggcgcacgtgagcgcgggcggtgcgggcggaaggctccgcgccccgatcccccagctcccggagaggccccgtctgcgcccgtccccgcgtcctttctctcttcctgcacggggtctgtctcctcaggaggagaaagtgtccggcagagctgggcggggaggcagcgtggagagagaagatatgaaatgtgccggttccggaccccgccccacacccttgggatctgcgttctctccgctcccttgaaaaacagatggtttgatttcacagcgaggcttttctttttcttttt

SEQ ID NO: 1275 - DNA, 118 bp, Homo sapiens
  chr2:468115-468233
  hyper
cgcgaggggcaggacgaggctgcatgggccagcgagggggtcgacaccgagccagagtgagcgcggggcctggggcgcagagcccgcccagggagccgggagacgccgcgcaagctcc

SEQ ID NO: 1276 - DNA, 287 bp, Homo sapiens
  chr2:468423-468710
  hyper
ggggctcctgcgcgccccttgaaccccgcctcccgcatcctcctgcaacagcctggagctccctgtgcaggacgcagcggggggcggggggcggtcttaggaggctgcggggcgcactcccacctcctgcctccccgagacccccagcgccttctccagggtttagagcggaggtgaaggggcctcgtcctgcaccgccactgggcgcctgggctgttcatcatcggttaccgccgattcataggaactcctcaacacattggctcggaaatgtacagtcataggca

SEQ ID NO: 1277 - DNA, 31 bp, Homo sapiens
  chr2:637196-637227
  hyper
ccctcattttagagaacggaaaatgaagccc

SEQ ID NO: 1278 - DNA, 240 bp, Homo sapiens
  chr2:677554-677794
  hyper
gtgggacttgtgctcgctccgccaggaggccgagggcgtctttagttcgttaacagaggagcaggcggaggcgggtggaatttaggaggtttgtttcaaaggctcagggcgctgtaccgccacgccagccctgtcccacctgggactccctagaagggtcagagcatcaatgaggacggtgtccgccccgagaccctgcaggagccggggacattgcccactcctcggaccctgcaggac

SEQ ID NO: 1279 - DNA, 30 bp, Homo sapiens
  chr2:945450-945480
  hyper
ggcctccgcgatgggcgctcgtgcctgggt

SEQ ID NO: 1280 - DNA, 536 bp, Homo sapiens
  chr2:945681-946217
  hyper
aacagcgggaaacgccgtctcccctggcgtctgagatctggggtcccctccccacctggtctcctcgctcccgccccagccccgtgcgccccaggagggcaccgccgagcgccgggtccccgcagggttcgggagactccgcggaccggaggagggataggacccccgagctttgggggcgggaagggagggtggaaggaggaggggagcggggttggggaaagttggagcttcggtatcttttctccgggccaggccgtcctcggggccctgcgctgcgtctccaagtgctgggaagactccgcggggaaaggtctgaggacgcggccggctggcacaggtgtggcggcttcagagggccggggagaacccatggcttcgaggctgtggactagaaatgtccctgattagaagctgagaacctttggccagggaggtggggcggcggggaggggtcgtcaagccggtccagagcgcgcccacctgcgccacaagggagaagaggtgccccccgcccccctccgcccaccgccgcc

SEQ ID NO: 1281 - DNA, 131 bp, Homo sapiens
  chr2:946435-946566
  hyper
tcgccgccctccccgcgggtgcgcgcccggcccctccctcgcccggggcgggtctgcgtgggcggtgctccgggtcggcgggcggagctccggttccccagccctgcgccccggtggagcccgagccggag

SEQ ID NO: 1282 - DNA, 400 bp, Homo sapiens
  chr2:1746632-1747032
  hyper
cgacccctgggagccgtggtctgtcccagcactttgtttcggaggtaggcgcactggccgcccacttcctgaattgttcactcaatttttttacaacttttgcagactctttgctggtgccaaaaagtcctctggctcagctaagaaacgtgaaaactatttttggcatgcagaaaagtcgctacaggactaaattagagtcggcgcctgaaacgcagcccgcgttcacagatcccgaaaatgttgaatccgactcgcttcagaacacaggaggcctgcagcgaactctggcggcatctcggtacctggagccgcggggcggagggatggggattcctgctgtggagaccgtgacgcgggacggcccgcaggacagggtgtcaaccccaacgcaacgcat

SEQ ID NO: 1283 - DNA, 380 bp, Homo sapiens
  chr2:1747627-1748007
  hyper
gcggaggaggggccgcgaaccagggggaagcgggaggccggcggagcatgagagggggcggcgggaggcgagcggggggagccccggaggctccaacaacttcccagtcctgcggggattccgagttccgaacaaaggcggctacgaaggccgcgcgcacagcgctctgttccgcccctcggcgtctcccgcagggcgaacaaaggcccagcgggtccccgcgcccaggtccccccacgtcccccttcggaggttcccttctgcgtcccaagtccccaggccccccgcgcgcccgatgccccctccaccctccgcgccccccacctccgatcacccctgcgctcccggatctccacgaagccccggaccccgcgcccccg

SEQ ID NO: 1284 - DNA, 411 bp, Homo sapiens
  chr2:1748396-1748807
  hyper
ggggcgagaacccggggccccagcgtccggcctgagcgccctcatcccggtggggcggcccgcatggccaaggcgagcgctcgggggcgcggaggagagcattggcacccctgattctgcgctcgagactcggggctcgggaccctggggcctacgcgaagcttctccacttctcttacccgtggtttctgcctgcgctcactacgggttttttagttggcgccttaatgtttgtaacacttttagagcgcttgctctgatccgggcacgattccaggcgcgcaggcgcgctcctctctttctccttctccctacccgcaaccacgtaggaaattatttaacgttccaaaaaagcccctcattccttttgaggaaactgaggcccaagccccaaagcgcacagcaagggag

SEQ ID NO: 1285 - DNA, 176 bp, Homo sapiens
  chr2:3465088-3465264
  hyper
ttccatcaggaagacgtgcagcccgcaccccggctttagcgcagccccagtgcccagtgcggggccgctgcctttgcgcttctgcgtctacgtcaggctggacgcacaaggagactcggcgtcctgttcatcctcggtagcaagcgaccgtgacgcagcctcgcactactgcaagc

SEQ ID NO: 1286 - DNA, 21 bp, Homo sapiens
  chr2:5831379-5831400
  hyper
caggacgaggctgccggagaa

SEQ ID NO: 1287 - DNA, 193 bp, Homo sapiens
  chr2:5831854-5832047
  hyper
ggaaaaggagagcagagcccacgtgccgggaaggttgctgtcttcaagcgccaccttccgtcggccagggccgccgcggggctaccgggcgggctcggggcggcgacccgggggagcggccgagccccgcgaggggctcgccggggagcagctgcgcccaccccggggcaggccgggcgcggctgaccgcgag

SEQ ID NO: 1288 - DNA, 145 bp, Homo sapiens
  chr2:5832283-5832428
  hyper
cgcatctgtgcacacacgcggattttttaaaaataacatatttctagacatgcctcctctccccccacccccatctttgcaaagcagcccggagggcggggtggaggggcggggcctccgagttaataaaggaagatgggcggag

SEQ ID NO: 1289 - DNA, 64 bp, Homo sapiens
  chr2:5832782-5832846
  hyper
tgggagggggagggggacctccgcacgagacccagcggcccgggttggagcgtccagccctgca

SEQ ID NO: 1290 - DNA, 21 bp, Homo sapiens
  chr2:5833282-5833303
  hyper
ggcggcggcggcgggagcgcg

SEQ ID NO: 1291 - DNA, 429 bp, Homo sapiens
  chr2:5833799-5834228
  hyper
agaacatcaccaagcagcacccgccgccgctcgcgcagcccgcgctgtcgcccgcgtcctcgcgctcggtgtccacctcctcgtccagcagcagcggcagcagcagcggcagcagcggcgaggacgccgacgacctgatgttcgacctgagcttgaatttctctcaaagcgcgcacagcgccagcgagcagcagctggggggcggcgcggcggccgggaacctgtccctgtcgctggtggataaggatttggattcgttcagcgagggcagcctgggctcccacttcgagttccccgactactgcacgccggagctgagcgagatgatcgcgggggactggctggaggcgaacttctccgacctggtgttcacatattgaaaggcgcccgctgctcgctctttctctcggagggtgcagagctgggttc

SEQ ID NO: 1292 - DNA, 527 bp, Homo sapiens
  chr2:5836047-5836574
  hyper
tcttctccccacccatcctggcgggcgggctgcgcggaggctcgggagctggccggggaggggcggatggaggggcctgggttgccagctcccttggtcggggtcctgctcgctggggcttgtgtgttctctgcggcgggccgcgtccccgctgagcctcgcggtgacagccgcctttggcagcgagcgctcggggcacttctatccccgcctctcaaagggtggggacagccgtttccagatttgaattttttctgttctttatttttaacgctgcatcttcgcgtgtgctcagaggtggttgttggcggagaacgccgccgcagtgtttgacctctagcggtgaagggggaaggggaagaggaaaggagagaagtggtcggtgtctgtttccttctgtcccccggggccgtggagctgtcggagggaaggaggacggtgcggggccgcagggggcgcggggcgcggcgggacccaggctacgagcgggagggaggcgggagtcgggggaagacgcggcaggccgg

SEQ ID NO: 1293 - DNA, 123 bp, Homo sapiens
  chr2:5836621-5836744
  hyper
cgcggtctccggggtgcctgggagggccgaaccactggtgagggcgtggggagcagggggtggcagagggcacccgggcggtagtccgggacgcgcaaggcagagccctgacgctccgggtcc

SEQ ID NO: 1294 - DNA, 10 bp, Homo sapiens
  chr2:5836827-5836837
  hyper
cgctggcttc

SEQ ID NO: 1295 - DNA, 139 bp, Homo sapiens
  chr2:5836852-5836991
  hyper
ggggagggaagcctcggggctgcggggtgagaggaagaaagcaaacccggggagcaggcggctgccgcacccgcgcaccccgggccctcaccacgccctccccgcgcgccggctcaggggctgccccggaatcagctcc

SEQ ID NO: 1296 - DNA, 115 bp, Homo sapiens
  chr2:5837352-5837467
  hyper
cggaggaggttttcagtggctgattgaaactcactgcaaaatcaccacgactctttcacctactgagatgattgaccgaggtttggccttccatttttactgagatttggcgaga

SEQ ID NO: 1297 - DNA, 16 bp, Homo sapiens
  chr2:6121679-6121695
  hyper
cggccccagcaagagc

SEQ ID NO: 1298 - DNA, 36 bp, Homo sapiens
  chr2:6121894-6121930
  hyper
tccctgcaataccccgggaccgtcggtaaagcaggc

SEQ ID NO: 1299 - DNA, 30 bp, Homo sapiens
  chr2:6913289-6913319
  hyper
aaaccggccccgggcggcaggagacgctgc

SEQ ID NO: 1300 - DNA, 569 bp, Homo sapiens
  chr2:7005629-7006198
  hyper
cagcagcgccgccaggcgggggtcgggggcgtctgcgtcgccgggggcgtcggcgcctagggcgaagtgagccagggtgcagtcgggaagctccaggacgaagcggcgcggcggagccatggccccagcgcagaccccgcgccgcccgagcagcggccccgacagtggcccgcgcaggagccggcgggcgaaggccatgggcgcctcagcgacgccgccctcggccccgcctcggaaacgaaacctggcgggagccaggcgccggcgggaaacgaaacccggagggagccaggcgccagcgggaaacgaaagcgaagcgttgcggggaaacgaaagccggaggcccaggcggggcaggagccctggggctggggcgcccttccggcctctcctcctcgccgcgagatgtgcgcgataaacggccggcgctcgggagcagacgcttggccccggggccccaggtgcgcggctccgcgggcctgcgcggtccccaggcgccggctcccggggctgacaccgaatgaggccccgcgccgtcggccccaaggtagctccgtgtgcgttctgcg

SEQ ID NO: 1301 - DNA, 257 bp, Homo sapiens
  chr2:7571219-7571476
  hyper
caaagtgaacttctcagcccacggtttcctcacccccggggcagcttgcatttcctctgccgcggcctctgtcgcctcccctcccgcgcgcctcggccttttacatttcaaatgctcgacagctgggccaacttctgcttccgcccaaagaagggctctttgccgctcacaatggccggccagtggcgcgggggctcttttctctccagctgtgagagaggctttttcaaaggccggggggaagctgccgtccagct

SEQ ID NO: 1302 - DNA, 86 bp, Homo sapiens
  chr2:7571576-7571662
  hyper
gggcaggtgaggccaggccggccgggcgtcaccgcaggtgtgcactccgcgcgcgcactcagctcgctttggtgtttctccaggcc

SEQ ID NO: 1303 - DNA, 471 bp, Homo sapiens
  chr2:8818828-8819299
  hyper
ccttttcttttcttctcggtcctctttccttccccaaatcactcgaaacttaagacgtgcagcgtctgcaggtgcgcgcgggccggcggccgggcctgggcgagcctgggactgccgggcctcgcaggcattgatcagctgggcgcgcgcgctgagtgacggcgcggttgccatggcagccgcctgagcggcgccgcgaggacaaggctgcagggcggcgtgaatgggcggcgtcacgcgcctggcgccagagagtctgctccggggctccggctccggccccgccgcggcctggcccgcgcgccgccgccgccgccaccgccgccgccaattcatcacctgtcagggatcactcgcggggtcacgggcggaatggacacagctgtgagaacaaaacccgggaaagaaaggcgaacgctccccattgcgccagatgtgcagggaggaccttgagacgcgccccccgccccc

SEQ ID NO: 1304 - DNA, 65 bp, Homo sapiens
  chr2:8821591-8821656
  hyper
cctcacgctctccctccgatgggttgcagtgaactgtggcttcccccctgcggtgctgaactcgc

SEQ ID NO: 1305 - DNA, 696 bp, Homo sapiens
  chr2:8821975-8822671
  hyper
caccccagctgggctcgcgccccgcccaccccgcggggattggctgcgaacgcggaagaaccaagcccacgccccgcgcccgcgcccaccaatggaagcgcccgctcgtcttgatagacgtgccaccttccgccaatggggacgaagggaagctccagcgtgtggccccggcgagtgcggataaaagccgccccgccgggctcgggcttcattctgagccgagcccggtgccaagcgcagctagctcagcaggcggcagcggcggcctgagcttcagggcagccagctccctcccggtctcgccttccctcgcggtcagcatgaaagccttcagtcccgtgaggtccgttaggaaaaacagcctgtcggaccacagcctgggcatctcccggagcaaaacccctgtggacgacccgatgagcctgctatacaacatgaacgactgctactccaagctcaaggagctggtgcccagcatcccccagaacaagaaggtgagcaagatggaaatcctgcagcacgtcatcgactacatcttggacctgcagatcgccctggactcgcatcccactattgtcagcctgcatcaccagagacccgggcagaaccaggcgtccaggacgccgctgaccaccctcaacacggatatcagcatcctgtccttgcaggtaagacctgctccggggtccccgcccc

SEQ ID NO: 1306 - DNA, 30 bp, Homo sapiens
  chr2:8823729-8823759
  hyper
gtggcttcctcccggcgccagtcgcccgcc

SEQ ID NO: 1307 - DNA, 44 bp, Homo sapiens
  chr2:8825799-8825843
  hyper
acgccggccgcacgctcgccccccagccacggggacccgcgcgt

SEQ ID NO: 1308 - DNA, 30 bp, Homo sapiens
  chr2:9143148-9143178
  hyper
ctagcacccatcgacgccgtctctaaggca

SEQ ID NO: 1309 - DNA, 30 bp, Homo sapiens
  chr2:9143732-9143762
  hyper
gtggtggccatggccgggcctcggcgctcc

SEQ ID NO: 1310 - DNA, 37 bp, Homo sapiens
  chr2:9144135-9144172
  hyper
tcagagagcgccggccgcgccacgcccctcccccgtg

SEQ ID NO: 1311 - DNA, 30 bp, Homo sapiens
  chr2:9283125-9283155
  hyper
tcaaactcagagttcgcagacggaggaact

SEQ ID NO: 1312 - DNA, 710 bp, Homo sapiens
  chr2:9346514-9347224
  hyper
tcctcatgggccggcgcggcccgccgttcaagtggggagcccagaggtgctccgcgccgtgggcggggggcggttggcgcgcacaaggccggactccggcggggcgcacctccacacgcaccctcgcgggcagcgggtcggagtcggggcctcgggccggctgggggcggggcatgggcgcggcgcgcggggcccggaacgccgagacaatgcggcgcgcggcggccaggaacggctcggcgggccggggcgcgcgccgccttccttcctgcgggatccgcttcccggcggcgcggcagcggcgagcgcgccgattggcggcccggtcctcccgccgccccgccccacgcccggccggccgccgcccccggcccggacccgcccctctccgcgggaggcgtcggggcccgcggctgggtggcgggtagttcccgccggctgtgcgcgcccgcctcggggctcgctctgagaggacgcggcggcagcggactcggagccctcggcgcgcaggcgggcggaccggccgagctgcgcggggctgcgcgccgcccctgctccgccgccaggccccgcgcggctcccgcgcccggcgctcccctttgtccgcgggccggagcggcggcggcagcggcggtgtccgagcggcggtcggagcctgctgcggcagttgaggcggcggcgcccctgcggctgtgcgccagcgccctcgc

SEQ ID NO: 1313 - DNA, 322 bp, Homo sapiens
  chr2:9347494-9347816
  hyper
agaagccctttgttcccgcctaggtggctcggaggagatgggtgatggccaccttgggcctctttaagacctcccctctctcggcctcgtggccctcgcggggttccgcggcctggtcttttccccgcagcgcggccaactttgtccagagtcggggtccgcggcgagcgggggatcccgctgcccgccgccgcccgccgccgcccggggtctttggtacccggtgcggaccttatcaacttgttcttgaagtggaccggcgggggcagctccgcgctccgagctccccgccgcagcccccgagcgccgcagggcccccacc

SEQ ID NO: 1314 - DNA, 30 bp, Homo sapiens
  chr2:9770569-9770599
  hyper
agtcttctccatggcgggcgcggggccggg

SEQ ID NO: 1315 - DNA, 40 bp, Homo sapiens
  chr2:10092377-10092417
  hyper
gagcctggtggggctcgcgccgcgtcgggacaggtggact

SEQ ID NO: 1316 - DNA, 186 bp, Homo sapiens
  chr2:10151689-10151875
  hyper
acgggcgggtcaggtggacagtattggcgtgcgtacgggcgggtcagatggacaggatcgcgtacgggcgggtcaggtggacagtattggcgtgcatacgggcaggtcagatggacaggatcgcgtacaggcgggtcaggtggacaggcatgcgtacaggcgggtcaggtggacaggcgtgcgtac

SEQ ID NO: 1317 - DNA, 121 bp, Homo sapiens
  chr2:10151929-10152050
  hyper
gtgtgggagagtcaggtggacaggattgagtacgggccggtcaggtggacaggattgcgtacgggcgggtcaggtgagcaggcgtgcgtactggcgggtcaggtggacaggattgcgtacg

SEQ ID NO: 1318 - DNA, 186 bp, Homo sapiens
  chr2:10152409-10152595
  hyper
tggacaggtgtgcgtatgagtgtgcgtatgggcgagtcaggtgggcagacgtgcatatgagtgtgcatatgggtgattcaggtggacacgcgtgggtatgggtggctcacgtggacaggcgtgcgtgtcagcgtgtcacgtggacaggcgtgtgtgtgggcgggtcaggtgggcaggcgtgtgtat

SEQ ID NO: 1319 - DNA, 29 bp, Homo sapiens
  chr2:10183213-10183242
  hyper
cgatggattcagccggtggggctgcagga

SEQ ID NO: 1320 - DNA, 199 bp, Homo sapiens
  chr2:10183603-10183802
  hyper
gcggtgtattttggttcgcctccgcgccccgccccgccagccgctccctccgcggccgccccgcccctcccgcgccgcgagggccgcgccggggcagagccgcgcgggcgggcgaggcgcgtgccggccgcaggagctccgggttgccgccgccgccgccgcccgcagcccacgtgcggccgctgctgcgcccgagctc

SEQ ID NO: 1321 - DNA, 355 bp, Homo sapiens
  chr2:10183814-10184169
  hyper
cgctttgttgctcccggccggcctgcacgatgcacacgccggacttcgcaggcccagacgacgcgcgcgcagtgagtggtggggctgccgcggcgggactactcgtctgagcgaggggcgaggcgggggaagtggtgcggcactcgcgcgcctgtaaatgcgggaggtggggcgtgcagggcttcgctgcggccgcgccggtaggggcctgggcgggctccggagccgggcggggcggcggccgcgacgggcgcgcccgggtcggcgggggcgaggagggggcgtgttccccgcgcagctttgtcttgcgcttcctgggcggccccgccccgctggccccgcggctatttccagc

SEQ ID NO: 1322 - DNA, 44 bp, Homo sapiens
  chr2:10220787-10220831
  hyper
ttcatttatggaaacgctccccagacgacgctcgccgggcccgt

SEQ ID NO: 1323 - DNA, 30 bp, Homo sapiens
  chr2:10443617-10443647
  hyper
tgtgagcagctgtgcgcagagcggggtggc

SEQ ID NO: 1324 - DNA, 661 bp, Homo sapiens
  chr2:10588855-10589516
  hyper
cacagctgtgcttccacctggcgttcagtacctcgtgcccgagagcggaaaagggaaatcgcgagcggaggaccgatgtgctggccacgtgggccccgccgggccgactccggaccctgctgccgcccattcctccggtgcaagggacctggaagtgatcccggtgccgctctgctcccaccagctagggagcagaggcgcgggagggaaggggcgtcccgggggtcgccagcacgctgcgggcagggctggcagccgcctccacgcccccgcgctggaagcctcgtctttgtaacatcgaggtatcctgtaactagatgggtcctggcctgcggaggtagtttcccctgtgaagccagggactcagccaggagcgtgaggggacccggatcctgagtctccaagccgcccactaccctctgctttaccggatggaactcatcagtaactaggtatctttaagggcggctccctggcgcgctctgagagttacggaagtcccaaaatgctttgaccgaaaacgtctaaacagtgaatacataaagcaaaaagccgcgtgggaaattcgagtccctaggagcgcccaggggacgcctctggaggtggactgccactcactccaggccacgctggaatgcccgcaccagggaggcactgcact

SEQ ID NO: 1325 - DNA, 30 bp, Homo sapiens
  chr2:11052087-11052117
  hyper
agccagcccaagttcgctctctgcacacct

SEQ ID NO: 1326 - DNA, 203 bp, Homo sapiens
  chr2:11621382-11621585
  hyper
tgagaaaagtcaaatgcgggtgtttgagctatttcatgatgagaaaaggaaaatgagggtgctgccaatcagagtatggcgagctgcaggggttcactcacgatgcacttttactgaggacctgtgtgctggcaggtgctgggggctataacctcactcccggcttcttttgtttaaccgcccagattcgtgaactgtgactt

SEQ ID NO: 1327 - DNA, 30 bp, Homo sapiens
  chr2:11623271-11623301
  hyper
gacctgggtgctgccgctgccgtgcgcttg

SEQ ID NO: 1328 - DNA, 931 bp, Homo sapiens
  chr2:12856407-12857338
  hyper
ggatcgggggcaagcggtgacaccaactaaaaggaagcaatggatttccttttaaatggagaggaggatgtcggagagataccatgaaacgaattctcgaaactccaggcagcaataccgatgaaagcgcattcttccaaaacagagctcctcattcagggccacatctgagcctgggggcccaatgctcagagcgtgcctggctttctggggaaaagcgccaggaacatgaacgagctacgaagagctggagcgggcgctgcgggagcagcgtgtggggaacggctcgggagtcgctgctggtaaccccggcccagccgcccgcagctgggctcgcagccggctcgcagccgacacccagggtgctgcgcccggggccccgggccgcggaaggatatttcactttgtttacctccccggccgggcgagggagctgcgaggccggtgctggcgcccccggcacggagctgcaatggcagcggcgcggggagccgcccgaggactggcagcggcggggctgattgatgggcgcccggcgcaatgaggggggcccgggcgggggcggggcggggccggctctgggctgagccagtcgcgggggcggcggggggggggcggaggctccgtggaaatgtgtcggtgacattgaatggggagaccgagcgcgagcgaggcgcgcgcgcgcacacgcgcactcacggccccgctcgctccgagatccccggccacgtaagtaactattaataccgcctcgccgggggatgcgggcgtgctgagcgcggggattggcctcgggcaccgtcggccgtcccctttaatttttaaatacacggtcccctcttttctctggggggggcaagcaagaaatcaaagaaggaggagacaagccgtcaattttctccaaaacaaaccccaccgggcaatttggtct

SEQ ID NO: 1329 - DNA, 37 bp, Homo sapiens
  chr2:12858219-12858256
  hyper
gaggacccccgggagccgggctcggagcagacgaggt

SEQ ID NO: 1330 - DNA, 30 bp, Homo sapiens
  chr2:12858468-12858498
  hyper
gagatatgggagatcgcggaacaaaaccca

SEQ ID NO: 1331 - DNA, 30 bp, Homo sapiens
  chr2:12897042-12897072
  hyper
aaaattgtatctttattattggacacagct

SEQ ID NO: 1332 - DNA, 30 bp, Homo sapiens
  chr2:14772553-14772583
  hyper
ctggggggcgcgggcgcaagcgggcatcgg

SEQ ID NO: 1333 - DNA, 1632 bp, Homo sapiens
  chr2:14773808-14775440
  hyper
gttttcttctgggagttggaccgagttcccggaaggggtcggaggctgtgtggtggcgtctgctctcgcctgacctgtggcggcttctccgcccctcgtacccctggggaggcacggaggactcggctggaaagggtgactccggtgagggcacgtaagctagccggcaggtcccaggggcactgcacgtcttggggagggacaccgaaaggggcagcccggactctgacggtgtctctgcctctctgtgcctccgcagatccccgctcctggccctcgcctcgccacctcattgatgggcaaccaactggaccgcatcacccacctcaactacagcgagttgcccacaggggacccgtcggggattgaaaaggacgaactgcgggtcggggttgcctacttcttctcggatgatgaggaagacctggacgaacgcgggcagcccgacaagtttggcgtgaaggcccccccgggttgcaccccctgcccggagagccccagccgccaccaccaccacctgctgcaccagctggtcctcaacgagactcagttttccgcctttcggggccaggaatgcatcttttccaaagtgagcggtggccctcagggcgccgacctaagcgtctacgcggtcaccgcgctgccagcgctctgcgaacccggcgacctgctggagctgctgtggctgcagcccgcgccggagccgcccgcgcccgccccgcactgggccgtctacgtgggcggcgggcagatcatccacctgcaccaaggcgagatccgccaggacagcctgtatgaggcgggcgcggccaacgtgggccgggtggtgaatagctggtaccgctaccgcccgctggtggccgagctggtggtgcagaacgcctgcggccacctgggcctcaagagcgaggagatctgctggacgaactcggagagcttcgccgcctggtgccgctttggcaagcgggagttcaaggcgggaggggaggtgccggcaggcacgcagcccccgcagcagcagtactatctcaaggtgcacctgggagagaacaaggtccacaccgccaggtttcacagcctggaagacctcatccgcgagaagcgccgtatcgacgccagcggccgcctgcgagtgctccaggagctcgccgacctcgtggacgacaaggagtagccgcctaggggctgccggcccctctgcctcccccgcacctcgctcccttcccttccccgcacccggacttcgcagtcagcggttctcaacctctgccccgccccgccacgcgcgtccgccgccggtggcccgggcccgggctgcacccccgcatccccaagccagcggcaggaagtctcaggaactgccccagggccgaaagggcgccgctgcgagcgcctggctgacagccacagcggtggtgacggtgctgggagaccccgcgtgcgctttccccttgagatgtaaaccgggaacggggaaggggctgaggggagaaaggacatggccttccccgcgagtccatggccagtgactgtggcccgactcgaaaacaaccctcttctcaaaagggaccatcaccgccccgagcgtgcgcacacagaccggtcggaggcgagaactggtctctacagggc

SEQ ID NO: 1334 - DNA, 93 bp, Homo sapiens
  chr2:16079904-16079997
  hyper
agacctgcggagtggccgcactccaggtccgcgccaaggccgggcagctccgctttctgctcagtctccgcgaggtgtcgccttcggccgaag

SEQ ID NO: 1335 - DNA, 38 bp, Homo sapiens
  chr2:16080353-16080391
  hyper
gggtgctgcattgcaccgctccgcgcgcagctggttct

SEQ ID NO: 1336 - DNA, 30 bp, Homo sapiens
  chr2:16081151-16081181
  hyper
tgtgtttgagctgtcggagagccggtgcgt

SEQ ID NO: 1337 - DNA, 824 bp, Homo sapiens
  chr2:16081809-16082633
  hyper
agtttccaaagttgcggagcctcgccaccaccccctgcatctgcatgccccctcccaccccctgtcgtagacagcttgtacacaaaaggagggcgggagggagggagcgagaggcacaacttcctccaccttcgggagcagtgggcagagtggggggcttggagggaagattggggaacctggttagagggggcgcccattgcctatcccctcggtctgccccgtttgcccaccctctccggtgtgtctgtcggttgcagtgttggaggtcggcgccggcccccgccttccgcgccccccacgggaaggaagcacccccggtattaaaacgaacggggcggaaagaagccctcagtcgccggccgggaggcgagccgatgccgagctgctccacgtccaccatgccgggcatgatctgcaagaacccagacctcgagtttgactcgctacagccctgcttctacccggacgaagatgacttctacttcggcggccccgactcgacccccccgggggaggacatctggaagaagtttgagctgctgcccacgcccccgctgtcgcccagccgtggcttcgcggagcacagctccgagcccccgagctgggtcacggagatgctgcttgagaacgagctgtggggcagcccggccgaggaggacgcgttcggcctggggggactgggtggcctcacccccaacccggtcatcctccaggactgcatgtggagcggcttctccgcccgcgagaagctggagcgcgccgtgagcgagaagctgcagcacggccgcgggccgccaaccgccggttccaccgcccagtcc

SEQ ID NO: 1338 - DNA, 158 bp, Homo sapiens
  chr2:16790283-16790441
  hyper
aaaaacacagagcattgtgggcgatgcaggcgaaggcgagtgcacacacacaagcggacattgtaaggctgtttgcacaaccccgccgtgctcctcgcggatttcctgccaaggagacatttagatctcacagaggcggctgcagacatttgctcatt

SEQ ID NO: 1339 - DNA, 30 bp, Homo sapiens
  chr2:17699747-17699777
  hyper
ggccgctctggtcacgcccctgacccgccc

SEQ ID NO: 1340 - DNA, 303 bp, Homo sapiens
  chr2:17720134-17720437
  hyper
tcccaggaaacaggagcagcccggcgcgcccgggagccccgcagcgcagtgcgcactgcggctccagagcgaagggctggcgcccgccagattctaaacgtgctcggctgccgcagcccgccggggccgcgcgccgtggtccgcgcgactccgcgctccgggtttccgcggtcaccagcactggcggaagagccctgccgagaggggacagccgcgggcggtgtcccgggagtcccgagagcgcgctccccctttgcgcaaccttcccgaggcgtcctgcccgggaagccagttcctgggttc

SEQ ID NO: 1341 - DNA, 330 bp, Homo sapiens
  chr2:17721348-17721678
  hyper
gggtgctgcaggacccggctcccagtactcctagcagaagaccctctgatgaaatggcccatgacaaaatgaccaccataaccgttccttcagtaagccaggtagacgtgctcacagcttgctgggaagtcttctttcggagatttctgcagttttctccttcaccttacagcctaacaaagggtgggccgggggtcggctaggacagaaagcagcgggaaaagcggctccacgtgttccatctctggcctcggccttcagcccccaggttcggtaaccactgggcgtggcgagtccgggtaacccgcagtccctcgcgcccgtccaggt

SEQ ID NO: 1342 - DNA, 364 bp, Homo sapiens
  chr2:17721750-17722114
  hyper
cgtggaatccacccgcggaaactccgagcccctccgactgagcatgcgccatcgccaggcggcttttggtcacaggctcccgagttctcctagctggggctgcggagctggggggagggaagagaggaaaggggagggggtgcctggagaggcggaggctcgcgcgcctgcgcatccagctccagggaccctaggttttctatgggattcccaatctgcagcagagatttacccgagcgtgttgcggcagcggctgggcttgcaaggcgcgatccaagagggatttaagcagcccagagctccagagaaaaagagagcgagagagaaccacacacagagacggcttaagcgtttacccgaatta

SEQ ID NO: 1343 - DNA, 30 bp, Homo sapiens
  chr2:18742028-18742058
  hyper
cgccctgggtcctgcgccctccgtggaagc

SEQ ID NO: 1344 - DNA, 97 bp, Homo sapiens
  chr2:19550051-19550148
  hyper
cagcgtggctctgagcgtggaggccagggctggtccgcgccggcagggccagcctccagtgcccagttgggttcccgggcctcgaagttctagcccg

SEQ ID NO: 1345 - DNA, 138 bp, Homo sapiens
  chr2:19550407-19550545
  hyper
cgctggagctggggggagccccgccttgccccaaggagaagagccccggcggcctggcttctaactgtgggaaaactagacaccccagggaaggttcagcttatggaaggcggactcgaatttttcctcctaagcgtc

SEQ ID NO: 1346 - DNA, 470 bp, Homo sapiens
  chr2:19558353-19558823
  hyper
tgccggggagaggccgagctccgactcactcatcccttagcaccgagccgcctacttattttaatccaccaccctccctcctccaccacccccacccccgccccttgcctcaggattcctcccctccctcccctgccccccaaccctgccctgcgcctgcgcaatgaaagacaaagtttttgctgacccgggcagcagactttggcagctgctctcgcttggacccggcctctcccaacctgcgtcccctcctcttcagtcccgcgcgacccctgctgcctttttaggtccagagcggcacgcctggcgcactggaggaaacggtccctagcagatgagagcgggctggcaccgcacgtttcgaggtcctatacttgggctcctaggacacagcccgtgctctttgggaggagggagggaggggcagtagctctgtgcaccgggatccccacaccgcggcttgggtttca

SEQ ID NO: 1347 - DNA, 127 bp, Homo sapiens
  chr2:19561597-19561724
  hyper
ccttttcctgggcacgcctgcggtggtgacggcccgctgctcatgtctccacgccaaaccccagcccctctcccgattcctgctccttggtaaagcgccccagcctgtcttcggagtgaaaattgag

SEQ ID NO: 1348 - DNA, 30 bp, Homo sapiens
  chr2:19563434-19563464
  hyper
gctttctgaagaagcgcgggaagaagagag

SEQ ID NO: 1349 - DNA, 30 bp, Homo sapiens
  chr2:20068687-20068717
  hyper
tcaagcgaccctctcgctccgcccaggtca

SEQ ID NO: 1350 - DNA, 69 bp, Homo sapiens
  chr2:20101401-20101470
  hyper
gcccaaacaaccccaacgtcgcctccacccggggtcgccgcggccccaggtctcgcgatagttacctcc

SEQ ID NO: 1351 - DNA, 30 bp, Homo sapiens
  chr2:20190154-20190184
  hyper
acacctgtgatgatcgctatggagccgcgc

SEQ ID NO: 1352 - DNA, 91 bp, Homo sapiens
  chr2:20212144-20212235
  hyper
cgtccctcccgccgcccgcctgtacctgcaccgcgggcgcggccaggctcgctggtcccggaagcgggcgcgccgtcgggagccgcaggag

SEQ ID NO: 1353 - DNA, 41 bp, Homo sapiens
  chr2:20424155-20424196
  hyper
gggtctgcagggggggcgttgtggccgcggtcactgcatcc

SEQ ID NO: 1354 - DNA, 236 bp, Homo sapiens
  chr2:20424623-20424859
  hyper
ctcatgctgcccggaccggcggcgggagagcggcaggctgcgcgggtcgcggctgcgggccggcttcgcgggttccgctgctcgatgctctcttgggcgcctgcccagcgcgccgctgtcccaggcgagggctgcagggtccgccggctggagtccgctctctactgccggattcctctccgctcggctcggattcggcccgcacctctcccgccgagctccgccttataataaac

SEQ ID NO: 1355 - DNA, 30 bp, Homo sapiens
  chr2:20425665-20425695
  hyper
ttcgagatcccctgcgaggccctgggcctc

SEQ ID NO: 1356 - DNA, 361 bp, Homo sapiens
  chr2:20646412-20646773
  hyper
ccctcccccacaggcccgaccacccgccgggagtttgccaggaagaggggcaattctgaatgggagtcgccaacgccccactgagtgaagcctgtctcggaaccgctcgcccagaccctggaggctccagacagccagctcccggaccccgcgcgcaaacgctgcggcgaaggaggggacccgggtaccgccagagccccgcagcggcagcagcagcgcggactccccggtcgctgcctctcccagcccggcggcctgggccgtcaatcaagctggccctgccccgccctcgggctgcagggggcggccaatcagagctaagctccgcagcgatgagctcagccggctggtttcccattgg

SEQ ID NO: 1357 - DNA, 270 bp, Homo sapiens
  chr2:20646843-20647113
  hyper
cgcagtctggttggagctgttgtcttgtatgctcagcgaggcccggagagacccgggagagagctaggccgagtccaccgcccgagtctgctgcccgagcccgcgttacgcacaaagccgccgatccccggcctggggtgagcagagcgaccaccgcccgggagcagcgcggcgagacgcacggtgcgccctatgcccccgcgcccccaccgcccccgccgcggcagccgaagcgcagcgagagaacgcgccaccgcggggcccgggtgc

SEQ ID NO: 1358 - DNA, 30 bp, Homo sapiens
  chr2:20647378-20647408
  hyper
gcaggtggagctggcgctgtgggacacggc

SEQ ID NO: 1359 - DNA, 1557 bp, Homo sapiens
  chr2:20865810-20867367
  hyper
ccggcggagcagagccgataacccccctctcctgcgcgttcccctgagacttggcctccgcaacctgtcccagccgcggagcaaactgctctgcggcccgcgcgagtgcgccccagggcttcgccgctgccgggcgtcccctccatccacctcgggacccgcgccatcaccgcggcggggtaagaagctcggaggcgccatcccggggctctgcgccgtccgctctcccggctcctggccgctcacgcacacagccggtagctggttttcgttagccgctgccctcgcccagaaggcgggtggaaggtcgccagttggacgcacagccaaactcttagcgcactcccgcgcgagatcccccatcacccggggctgccgtcctcatttcgagctctttctagagcttggctcccgctgaagcgcaacttccgcgcccaaaccttgcttttacgacgggcggtccgcgtccaaaggtctcttacaggcctgccctttcagctcctcgccctcccttcctcccctaccggccccctcccctgctctggccgcccgctgcaatcctttggggtctgtggctgagtggggaaccgccgacccgcgatccggaacgcgactttgaggccgccgggagcatcctgtggcctctctctgcgcggccacccggccgcggcgcgaagcggtctggagggcgagcccttccgcggccccaactctgccgccccgttcccggcattgggaaccagggcagggagggggcgggtgtttctctgcgggggagtggggaggaagctgggcgggtgcgcgcggtgccccgagcctggaaccacggagggcgcgttggtcttgggcggatggagggggtgtcgcactgccgcggggaggcgtgtcgggaggctggggccagtggcagtcgcttggcgagggtgggggcgtagcgctgcggtgggaggaggcggctccggccctggtctccactctaggccggggtggggggcgcatagcggccgccggagctttcagcagggggcgctgctccgggcgttgggcgggggtggggtgggccaggagggggggccgcgggctggccgcgcacacttcccccattattaaacactatgttcaaaaggcgccgggggacttcccggagccacggagcccgcgccgcccgcccgcccggcccacggagcccatggacctgagcgccgccgccgcgctgtgcctttggctgctgagcgcctgccgcccccgcgacgggctggaagcggccgccgtgctgcgagcggcgggggctgggccggtccggagcccagggggcggcggcggcggcggcggcggcgggcggactcttgcccaggctgcgggcgccgcggctgtcccggccgccgcggttccccgggcccgcgccgcgcgccgcgccgcgggctccggcttcaggaacggctcggtggtgccgcaccacttcatgatgtcgctttaccggagcctggccgggagggctccggccggggcagccgctgtctccgcctcgggccatggtcgcgcggacacgatcaccgg

SEQ ID NO: 1360 - DNA, 865 bp, Homo sapiens
  chr2:21022198-21023063
  hyper
ggccaggactatcaactcttgtgtttggtacacaggacacaaagcaggtgtccggtaactacttgcgagggaagatacgaattaaccaaggaataaagtgttccaatctgcattctgtcttgcgtggggaacaaaaccaaactaagacccaaggatgagggtttacggttaaggtcttcagcgtgaataaaaggcggcgtgagcactaaacgccgggggcaaagaacactcccggcccagagtttgacccctcctagcgagttcttcccggccagctgcccaactttttggcctctactcctccgcgggggcaccataagactccctacaggtgggctacacttaggggttcaaatgctgcattaccgcgctcgggtgagcgactgcccggcctgcaactcaagggactcccaggccaagtggctccgaactcgcgagctgtcggaacagtattatttttgctgctacgggccatctggcccagggcaacaggggctctgcgaggaaccatagagaagaaggggcgccagatcccgcgtgcctgcccacccgtccttcctttgggcagtcaccctgagctcggcaagctgtacctcacctgtccacctggaaggctgcccgctctccctgagggtcctgggaaggcggcacgagaccggaagtgcccccctcaggtgacgtcacagtaccgcgccggagctgatccgggaagccgatgtcagcctggcgcgcggcgcacagctggctgggagatttcttactggcttggagccggtggtccagatcagagagacctcttggagggtgtcggggttttcctttctttttcatttgaattttatccgccttttattttctgtcatcc

SEQ ID NO: 1361 - DNA, 167 bp, Homo sapiens
  chr2:23608585-23608752
  hyper
tcctgcgcccacccgcgaccccgggctctctgcgcgtcgggccggggccggagccgcgcgccggaggtaagagccgggccgggctggagcgcctcggatgcggcgccggagggagacccaggtcctggccgccgcgtggggccgggccgggccgggcgtgggagcgg

SEQ ID NO: 1362 - DNA, 1328 bp, Homo sapiens
  chr2:23608960-23610288
  hyper
gtgtgacccctggccggagcagcccccctgctgggcccggcggcgcgcgcccctctccaggccacgttcccctgagcggcccagggccccggccgggcaggagacctggaggcgacggagggctggcccccaggggcggccgcgcgcactgtcctttggggaggtgcgcgcctctgtgcagcgagaagccaggttggggttttctgcccctcgcgtcctctgatctcgcatttggggactgggtctctttactcaatcccaagtaactttcgaggtagatgagctcgaaaaccgtcgggagggaacccgcacagaccttattgtgacccaccccaccccgacacacacacgcacacttcccttgacaccttgtgggtgccagcgtgttgtggggggacgcggaaaggagagctcacggggacggcgaagcggccaggaggtggtgtcgttggggaggggttgttgatgtgtgggacagggtggacctggagatgtgtagtgtgggagtgtgaacgcgcgccccgatggcctcggggggccgggggagcccagggctcgcgtcccggtctccgtggcctggagcgggctgagagcgctagggttatctgcggtcgccgcgcgggtgcccgcgctgggcagcgtcggccccgggccccaagggagggacgtgctcgcctggggccggagcgcggggctgggagccggggtaggtcggaggtggctcttagggcaggtcgcctctgcgttgcctggggaaggcggggacgcgctgcctgcctgcggccagccgtctcggaggagggggtggcggccacgcgcgagtctcggatgcctgggtccacccgctgagaagccagttgtcgtccctgggctgtggaaccaagcggcagacgcggtccgttggcgggccctcgcgcgggcccccagagatgctgatgggtaaggagctgccgccgccgccgctgccatccccgccgctctgcaaacgttctcctccctccctcccgtgcttgcgccgcggcgcgccccgggcgaatcgtggacgcaggtatttatgtagcattaggcgagacctcggcgctggagggaccagaccgtggaggacgccgagctgctgctgcctgcgaaacttccacttcggcagctcagcggcatcccggcccgctgctgcaggttccagcctctctccagtccagcaacgctgggattcggactcctcttgcaatgacagatctgtcctggttacggctgtatttatactagtttcagtctctttaaagtcatctgtctagtcactacagagtttcttcctcgccgtgtggtcttat

SEQ ID NO: 1363 - DNA, 319 bp, Homo sapiens
  chr2:24299776-24300095
  hyper
gggcccaggtgagtagcgggcgaaggcggggcctgaggaggactgagctggggcgggacccaggtgagtagcggaagggatcggggcctgaggagggtggtggaggtgcggcggggcccagaagtgtagcaggaggtggttggggctgaggaaagtggtggaggtggggcggggctcagatgtgtagcgggaggtggtggggcctgaggagggcggcgagaggtggggtggggcccaggtgagtagcgggcagggctggggcctgctgtggtgcccactggttgcggggcgcgcgggcaggtgccggaggtggtgggcc

SEQ ID NO: 1364 - DNA, 34 bp, Homo sapiens
  chr2:24307618-24307652
  hyper
cccatgcaccaggcggcgccgagtggttctggct

SEQ ID NO: 1365 - DNA, 204 bp, Homo sapiens
  chr2:25142479-25142683
  hyper
cgatccggcccccttcccacgctcggggcgctgtcttcccccccggaagcctggccctgcccctgcgtttacctgtgcgggaactcggccaccgcgtgctccgggacggtccccgcgcgggctggggcgggagagctcggcgcgcccgagggctgctccccgcagagccgcgccgccccggcagcgcctcggggcccggccgga

SEQ ID NO: 1366 - DNA, 41 bp, Homo sapiens
  chr2:25265093-25265134
  hyper
gactgtgaatgaaaggcgggcgccgccgagggctggctggg

SEQ ID NO: 1367 - DNA, 714 bp, Homo sapiens
  chr2:25391012-25391726
  hyper
aactccgtctcaaaaaaaaaaaaaaagaccgggttgtcccaagacctcctagcaagctctcggagcctccggaccgccgcgagcccctgggggagaggaggccgccggctccctggagacagcgcctgcagcttcgcggccgtccgcccaggggccggacgtgggccctccagctcagctactggcggcttctcatgccgcagtcggcgcagaaagtttgtcgagaactcgggaccgcggagagccagaggcgcccaggtccgccttcggagccggagccggccgactgcatcgcgaggacggggacaggggatcccggggaaagagcacgggtcccccacgctgcgcccttacctgtctcgggaggctgctctctgagggcggggacgctcggcggcctctctcggtcgcggctcttcttcccctccttcgccgccgcttggtcccgcgctcctctgtccttatatacttgccgagctctcctggtgggcgcgggactttgaccttcccggcagcacaaggagcagctccccgggccaggggaaggggggccgcggggcgtgggaggggggcttccagacgggggacgagcgcggggagacgcgctggaaaggggctggaattagcactgtcctgccgaaggcgcacctggccgctcgccctcaggaagaacttaattatggatggcgttgggtctccgcttagaacgggcgg

SEQ ID NO: 1368 - DNA, 234 bp, Homo sapiens
  chr2:25439138-25439372
  hyper
ggagtgcccggcgcccgtcgaaaggcccctgcgccggttcaggacccgcacccagctacgctgcggagccccagctcgcagcaccctcccacccaccgctcctggctgcttttctcctgagtctgcggggcggggtcgtttttgttttttacaaaaatgtatgtaaaggtatttcgatgagtgaaggaacacgctataatgctcactcaatgcagcatcggtgataattgcgcc

SEQ ID NO: 1369 - DNA, 121 bp, Homo sapiens
  chr2:25440005-25440126
  hyper
aatagaaaaaaaaaagataattgcaccttccaaggaaaaggtaatactggaactgtccaggataaggaaatggattaaataaatcatggaatatttctgggtgaagtagtatgcagtcatt

SEQ ID NO: 1370 - DNA, 150 bp, Homo sapiens
  chr2:25457151-25457301
  hyper
acacacgcaaaatactccttcagcggagcgaagaggtggcggatgactggcacgctccatgaccggcccagcagtctctgcctcgccaagcggctcatgttggagacgtcagtatagtggactgggaaaccaaataccctgggggagaaa

SEQ ID NO: 1371 - DNA, 140 bp, Homo sapiens
  chr2:25458562-25458702
  hyper
acaacccgggtacctttccatttcagtgcaccataagatgtcctctttctcattcatgaagacaggaaaatgctggtctttgccctgctttatggagtttgacctcgtagtaatggtcctcactttgctgaactagatga

SEQ ID NO: 1372 - DNA, 96 bp, Homo sapiens
  chr2:25459790-25459886
  hyper
acgctggagctgaccttggctatcctgccatgctccagacactcctgcagctccagcttatcattcacagtggatgccaacggcctaggaggcaga

SEQ ID NO: 1373 - DNA, 109 bp, Homo sapiens
  chr2:25461983-25462092
  hyper
ggagctttcaccaacctgttcataccgggaaggttaccccagaagtagcgggccctgtgtgcagctgacacttctttggcatcaatcatcacagggttggactacaaaa

SEQ ID NO: 1374 - DNA, 449 bp, Homo sapiens
  chr2:25463163-25463612
  hyper
gctatacctcgagaaatcgcgagatgtccctcttgtcactaacgcccatggccaccacattctcaaagagccagaagaaggggcgatcatctccctccttgggccgcgcatcatgcaggaggcggtagaactcaaagaagagccggccagtgccctctgagaggtcggaagagaaagccatcagctggggctgtctgcataggacagtggtgtggctcgggcacggggagggcacgggaagacagggtcatcgggaatagctgtcccagggcagaaatatccaaggaggaagcctatgtgcggaagcaccagctgagaaggtggaggggacaggatggtacctaccgtagaggcccttgcgagcagggttgacgatggagaggtcattgcagggactgcccccaatcaccagatcgaatgggccccactcctggatctgggaggataaa

SEQ ID NO: 1375 - DNA, 173 bp, Homo sapiens
  chr2:25464416-25464589
  hyper
cagcatggacatacatgcttctgtgtgacgctgcggacgtccccgacgtacatgatcttcccctggtgccgcaccatgcccaccgtgatggagtcctcacacacctccgaggcaatgtagcggtccacctgaatgcccaagtccttcagcaccaggagccctgcaccagccag

SEQ ID NO: 1376 - DNA, 775 bp, Homo sapiens
  chr2:25466754-25467529
  hyper
tgcacccctcacctgtagcgattccatcaaagagagacagcacccggatgggcttcctcttctcagctgggacaggtgggtaaacctttggagggtcctaagcagtgagcacaacaggtcagatgcaggcccagcggtgtcccaagctcccacccagcgctggccctccagccaggctcctagacccacacaccctgcgcacagctcaggccccacaaccaaggctcagccaagggagctcgagaccgcgccccaggcccagcactcacaaattcctggtcgtggttattagcgaagaacatctggagccgggagggccagtcctctcgccgccgcagcagcccgtaggtacccttgtgcccgcacatgtagcagttccaggggtcttccttaatggctgcctgggcagcccccggccccaccaagaggtccacacactccacgcaaaagcacctggaaggagacccagtgagcagaggagactctcagccctggtccggggaggccaaggtgtgctacctggaatggaaagaccgggtctggagcatggctagggggtggagggtctgtggggaagggagaggaggggaggcggtgggcggcgggagcctggggcccagctaaggagaccactggaggccacaacagcctcacctgcagcagttgttgtttccgcacatgagcacctcacggcccccacagcagatggtgcagtaggactggtagccgtcgtcgtcgtactggtacgcacactccagaaagcagttctagacag

SEQ ID NO: 1377 - DNA, 99 bp, Homo sapiens
  chr2:25468110-25468209
  hyper
tgtgctcctaccttgcagttttggcacattcctccaacgaagagggggtgttccagggtaacattgaggctcccacaggagatgcagatgtctggaaag

SEQ ID NO: 1378 - DNA, 311 bp, Homo sapiens
  chr2:25468876-25469187
  hyper
caacaaacttaccctcaatgttccggcacttctgccgcacctcgtacaccagccgctctgcaaggggaggagagctggcgtcagaggaggccgcgcctgctcctcggatgcaggcctcctggtgccaccctctccagaagcaggccaactacctcttgtgcgctcatcaataatctccttgaccttgggcttctccgctgtgctcttccggggctttttggctggtggaggtggtgcgtaggcagctgcctcaggttccacccacatgtccgtgtacacttctttgtagggattcttctcttctggaggag

SEQ ID NO: 1379 - DNA, 174 bp, Homo sapiens
  chr2:25469473-25469647
  hyper
ggtgccctcatttaccttctggtggctccaggcccttagggccagaaggctggaagccccccagggcccattcaatcatgggcttgttctgcacctccacggccttggcagtgtcactctcatcgctgtcgtggcacaccgggaacagcttccccgcgcggctgctggccacct

SEQ ID NO: 1380 - DNA, 124 bp, Homo sapiens
  chr2:25469905-25470029
  hyper
gcagggacactcacctgcaggacctcgtagatggctttgcggtacatgggctgcttgttgtacgtggcctggtggaacgcactgcaaaacgagctcagcggcatcagcttctcaacacacacct

SEQ ID NO: 1381 - DNA, 163 bp, Homo sapiens
  chr2:25470448-25470611
  hyper
ccacaacttaccactgagaatttgccgtctccgaaccacatgacccagcgggtgccttcagctgctcggctccggcccgtcatccaccaagacacaatgcggcctggccaccaggagaagccccgcagtttcccccacaccagctccccaatgccaaagcccc

SEQ ID NO: 1382 - DNA, 193 bp, Homo sapiens
  chr2:25470891-25471084
  hyper
aagaagccgctcacctcgtactctggctcgtcatcgcctgctttggtggcattcttgtccccagcatcggaccccacgggctcaggcgtggtagccacagtgggggatgcggggtcagtgggctgctgcacagcaggagggctggcctcctccaccttctgagactccccgggcccctggttttcttccacag

SEQ ID NO: 1383 - DNA, 91 bp, Homo sapiens
  chr2:25497815-25497906
  hyper
tttccagcgtgccagccactcgtcccgcttgcgcttgctgatgtagtaggggtcccccgcctggaaggtgagcctcggcatgggccgctga

SEQ ID NO: 1384 - DNA, 238 bp, Homo sapiens
  chr2:25505303-25505541
  hyper
actcacccgcttctgcaggggctcctcggccctccttgggggtgcagcagccattttccactgctcttgaggcttcaggcagggtctcagctgcaccctctccctctgctggggccccgcccttctgccccccagcagggctcccctcctctggctggggctcactccgcttctccaagtccccattgggtaatagctctgaggcgcctgagtcctgggccatggatggggacttgga

SEQ ID NO: 1385 - DNA, 30 bp, Homo sapiens
  chr2:25522993-25523023
  hyper
gatgtgacactcaccggggggtgcttgcgc

SEQ ID NO: 1386 - DNA, 178 bp, Homo sapiens
  chr2:26407743-26407921
  hyper
gacagcgcctcctactgccgcgagcgcttcgaccccgacgagtactccacggccgtgcgcgaggcgccagcggagctcgccgaagactgcgccagcccgcgccgcgcgcgcctctgcctgcccgcgccgcgcgcccccgggctcgcccgcgcccccggcccgctagcgccggctcccg

SEQ ID NO: 1387 - DNA, 505 bp, Homo sapiens
  chr2:26521880-26522385
  hyper
cgatgaggagtcctggggtaggggaggtgtgtgaaagtgtgtgaaagagatggtctcgggagaggccaacgcggggagtgacgaggggaggcacagatcccttagtgcgggttgtgttccgaggccagtgtgggggaaaccagacctagaacgttgtatacggctgataggaccaggtccaccgctgcagcaggctgtgagaggggaaggcacgttcctggctaagcagcgtccaaaactcccgtaataggacccagtctggtggacccgagagtaaaagtgagagtgaaagtgcgccgcaagggaggaaatgggaggaaaagcgtcgaaaccaactcctttggagtgcatgataaaaaaatttttaaaaaggatttagaggtgattatgggatgaaactggatgctcaaaatttaaggacatactgtgaattagaatagccctcttttagtgttggacgactggccgaaggcactacagagaaattggccgtgtgttttaaggt

SEQ ID NO: 1388 - DNA, 31 bp, Homo sapiens
  chr2:26749880-26749911
  hyper
ttagccactgttccagcgtgttcaaatcctt

SEQ ID NO: 1389 - DNA, 30 bp, Homo sapiens
  chr2:26915877-26915907
  hyper
gcaggagctgcgggcgcgctacaacctcag

SEQ ID NO: 1390 - DNA, 30 bp, Homo sapiens
  chr2:26916134-26916164
  hyper
ggcgccgaaccctgcgctcgcagaaacccg

SEQ ID NO: 1391 - DNA, 31 bp, Homo sapiens
  chr2:27069031-27069062
  hyper
tttctcaaggtcaagtcggcagaaactgaag

SEQ ID NO: 1392 - DNA, 408 bp, Homo sapiens
  chr2:27071070-27071478
  hyper
agacggagacggaccgagccacgggcccccgcggccgcagcatctcggaggagtgggtgatggcaggggggtcggtgggcttacccctcccgggctaggacatcctcctctcccccttctgtttctgcgtgaggcgcacaaaagggcggggagccgggtgagcctggggcccggccgcaggggacgcggcgggaggtgtggtttggggttgggaggtggccatcggggctaagccggggcgctcttggggtcctctttgtacgcccgcgaagcgccgtgccgggccttgctcatagtaagcgtttaatgcgtgctcgcggggttgcaaagccctggggtgaggaggcggctcggccgaggggtttcgcgcctagcacgcagtgggccgctttcctagccgggcgcggt

SEQ ID NO: 1393 - DNA, 456 bp, Homo sapiens
  chr2:27072486-27072942
  hyper
cagcaggtgctgccagggaggcggatctcccttcggggagacccggagaacaatagccgaccctggtgtccatccgacgacaaaccagggccacccaggacgcgagggtgcagttttctggtgctgggaatactccctgcggaacctccgggcacgtgctggctttggggttttatgggggcctggccacgccgggaatcccgtgtgggaggcgctcccccggcctgggggcctgcagacagccacccccccactccggctcgggtgccttctggtgcagcgccgccgcccgccccgcgctgtccacccgctgccgagacgcggcgtggttagcggcgcggagctgccgggcggcgacgcaggtgccaaagactggaggtcgcctcggtgcagcgcgggttcccccgagcagcggctttgtctgccgaggcggccgtagtctaggggctgcagctg

SEQ ID NO: 1394 - DNA, 30 bp, Homo sapiens
  chr2:27274294-27274324
  hyper
gtcccagtttctgccgctttatctttcccg

SEQ ID NO: 1395 - DNA, 250 bp, Homo sapiens
  chr2:27308892-27309142
  hyper
ccgcccgacgtgtctacgtcggctgaagagacagcgggggcggcgggctcctggggtctcgcctgagacggggcacctagccctgggcgagcgccgcacccgggcccgcagcggcaccgcgcccagagcggcctctccccacgcccggggcgcgccggctcagggaggctcggggccgcccatgcagacttttggcctggcgcgatcccccaagaacccctccagggccggcctgcggaggagccgatcc

SEQ ID NO: 1396 - DNA, 111 bp, Homo sapiens
  chr2:27309206-27309317
  hyper
cgggcgccgcccaccgccatactaaacgatcgaggaataaagacacttggtttttctaaaaaaaactaaacgaaccgttctgctacggtacggggtcgggggctgccgggc

SEQ ID NO: 1397 - DNA, 31 bp, Homo sapiens
  chr2:27473447-27473478
  hyper
tgtgcccatgctcctccgcccagtcactgca

SEQ ID NO: 1398 - DNA, 30 bp, Homo sapiens
  chr2:27484927-27484957
  hyper
ggaggtcggacggccgctcagaggggcagg

SEQ ID NO: 1399 - DNA, 30 bp, Homo sapiens
  chr2:27806311-27806341
  hyper
agaatgggggaagacgaaggctctggtatt

SEQ ID NO: 1400 - DNA, 30 bp, Homo sapiens
  chr2:28113198-28113228
  hyper
ccagacgccgccatcgctcaaaggtgctgc

SEQ ID NO: 1401 - DNA, 394 bp, Homo sapiens
  chr2:29033303-29033697
  hyper
ttttctcagttcaagcggcctcttccttttgagtaaccagggtaaccacgctgtgcccgcgtgtgccgggcggggaggggaggccgcagccccagccccgggggcctggttgtctaatcgaagggaagtaaacggccccaacgcaagcctgactgcgagacgtgcccaagggaggtaggtcgaatgaagagggttgtgtgagttttgcgcgggcaggcgggataacggaggagggaggcccgcggccgaggctcgggcgggcggggggcagggaggggcggggttcgccggcgcgcactcccaggcaggccccgccccctcggccggctgtgcgcgctgattggcccctgccggcctcgcgctccctcgctccgggttggcgggagaccttaga

SEQ ID NO: 1402 - DNA, 54 bp, Homo sapiens
  chr2:29337997-29338051
  hyper
ctggggagcccaagacgggtaagactaggtccccggccccagcagctggtgggg

SEQ ID NO: 1403 - DNA, 589 bp, Homo sapiens
  chr2:29338158-29338747
  hyper
cgacaccccgcagacgctgtcagccggggtcgcggccccgcgtgcgcccgatcatctgactgctggggagtgcgggggcgcgggagccaggcgagccagcgcaggcgcgcgctgcctcctccgtccccaccgagtccccagcgcgtgcgcggggccgtggccgaggcctgcgcgccgcccggccgcctgcactgcgcgcgcgcccaccccgcgtgggaggcagcgggaggggcccggagaggtgtggagcggcgcggcgggaggctccgtgggcggccacgggagacagcgccggcgggagcgcgcctctcggcctttcctccgcgcccccgcgtccccagccggccgctccgagaggacccggaggaggcaggtgggccgggggcgcgcggggcccccccgggccgcgggctggccggcggcggggttggggccggggtgggcggccctgggggcccgcggggaggtcagtggccccgggagggtcgcgcagaggcgctgggggctgtggaagccccgcggccgcctcccgtgggcaccggtgtcgctggccgcggggaggccttctcggggcggagcggcccacccg

SEQ ID NO: 1404 - DNA, 297 bp, Homo sapiens
  chr2:29338809-29339106
  hyper
cggggtgtgcgggacccggcggcggagctgggctctgggccacgaccgccagccgcggctgccccgagagtccccgcacgcgcagtggctttccaacgcggcctcttcccatttctcacttgactccccttgcgcattaaattgtcgagaaacctttggccagtgggtcttcaaagctaaaccaaatggctgtccttgcagtccttggctacctgagatcccttaattctgaaccatccgcacctgggaggggaagttgaaaggagcgctggagctgagcccgcatccttaaggatc

SEQ ID NO: 1405 - DNA, 248 bp, Homo sapiens
  chr2:30142810-30143058
  hyper
gtgactaaaaacactaaatcccggcacactcaggcgggagctgctcaccagtcccgaagatctggaagagaaggcggggctgggaggcgcgaattgccgcggacagccttccctctctgcccacttccgacgccttcttctcgggcatcaggcggatcctcagtcgcccttcgccttggcgaatccaccaactgaacagctcgctgagattgaactggagcagccccacagccgcctccccggggggc

SEQ ID NO: 1406 - DNA, 185 bp, Homo sapiens
  chr2:30143137-30143322
  hyper
cgcccttcagcaccctggacagcgtccgggcctctgccggggctggtgaaccggcggtccaggagacccccggcgccggccccagcaacctgagcagcggggcgcagtccagagctagcgagccgcgggcctcgggcctgccagccttcagctccgaggaggatggtggcagcagtaggtcccgg

SEQ ID NO: 1407 - DNA, 768 bp, Homo sapiens
  chr2:30143382-30144150
  hyper
cgcgagtagctgagtggctcccggggctgcagcggcggccccgcagctggggagcccgcgcgctggccggtccccatcccggagcccacagctgccgtggaaagcagcagcggcaggagccacaggagcccgatggctcccatcccgccggaggaggccgtttacactgctctccgggcccagcctcacccttcgctctccccgagatgggaagaggctctgaacagtccttggtacccagcggctccttccacctgatctccagaggactgtgcgtgcgcgcaagtctcttgctttcccccaactgcacggaggcgagcaggagtctaaatgaaacagacctggaagctcaggggcgagtccagagacactcaagcacactgggctcactggctgggaccttgagcctcccgctctccgcgccgagtgccgcgcccccgtctgtagctcgctgcgctcggtacagaggaactactatggttgaagggaggtggcagttgggtaccgtcctctcctgccccccgcagtcggagctggggtctgtcccctctcggggcagcctccaatctctgcaacttttaaggctgagaacggcggctcccagctgctgcacgctgtcctggccgccttttgcgttccttttggctcctccaagctcttctgcccggtctgggcgggaaccgagggcggaggctgccgtcttgcgcaccctcaagctatctctccgctgcgggaaggcttcggactgtctgcctgctgaacttctgg

SEQ ID NO: 1408 - DNA, 464 bp, Homo sapiens
  chr2:30144174-30144638
  hyper
cgcaagtttgcagcgtccttgctctcaccggcgcctcggctcctcagagttcgcaggcactggagcggccccggcggcagcagctgagggcgttcagggcaggggcgcccgaaatcttgccgccccctcctcacccatcatcagcgcccgcggctttgggtggccgaccagagggcggccggaaagcacctcggtgccccgcgaccctccgaacagaggcggcgggaggtaccagctgctaccaccgctgccgcccccagagccgctggatcgcatctgcctgggcgcccgccacttgcagctggctgagccgcgcgagcgcgcgcagggagggggcggggcccggagggggcggggctcacaagccaactccgcgctgctgcccgacccacgcagtccggcctcgccccgccccacccgcaccctccaaccaatggcgtggctcgatcggctcctatgcaaat

SEQ ID NO: 1409 - DNA, 31 bp, Homo sapiens
  chr2:30369485-30369516
  hyper
gactgactacattggccgcctcgagagaagg

SEQ ID NO: 1410 - DNA, 18 bp, Homo sapiens
  chr2:30453635-30453653
  hyper
gcccccgctgcagaccgg

SEQ ID NO: 1411 - DNA, 91 bp, Homo sapiens
  chr2:30453784-30453875
  hyper
cggtcccccggctccgcgtctctgccaccttcccaccgcttcttctttaaccatgctcttgtttcccctcgctgatcgcaaggctgcgggc

SEQ ID NO: 1412 - DNA, 523 bp, Homo sapiens
  chr2:30454077-30454600
  hyper
ccgccgcgctggagttcggggtgtgcgtggagggggctgtgagcgggaagcggcgcggacgcggagtccgggccggtgcgagtgagcgcgtgtgcgcgtgggagagcggcgggagggggccgggctcgcagccgcagcgaaccacggccccgggagcagagccgagcgcgcccccgagccgccgcccgccggagctgcgagcgctgaagccattcatgattttggtgacgttattccaggagtgggcgagggagggcggggcctctcggggccaagccccgcccccgcccctataaatacggcttcccgggctctttgtggggctgagtgctcagtggagagcggggagttgtgtccaccttgccgacgtcgctagccgtggggctgtcctgggaaggcggacggcgagcgcccggtgtccgcactcggccgcctgccgtgcccgtctgcgcccgtgtcatcctcactcgggacgcagggaccgtttttaaatcacaggggcgtgtgtcagcctgccctagga

SEQ ID NO: 1413 - DNA, 319 bp, Homo sapiens
  chr2:31360270-31360589
  hyper
ttccaatgcagctgagagggtcgggaacagttagagaacaggggtggcagccgcccgggaggctgcaaggcgctcgcccgcaacgcacaggcgcgcgcggcgcacccggcctccggcctccccaggtcgggcctggcagctgcgggaaggaggtcagcgcagccgccacacttcgcccgggcgctggcccgacccgaccgccggcgactctctggcagcgcccggagaccgccagcccctgggccgcccgtccgcagagccccctccgccccgggaccctcgcgcgcagctcaagttgggagccccgctccgcaggcga

SEQ ID NO: 1414 - DNA, 125 bp, Homo sapiens
  chr2:31360630-31360755
  hyper
cgcgggtccggagatgcccccgagcgttttaaaatccagaaacatcacatggtagccacatccggcggctgttacctgctcgcagcacccagaccctcgccctggtttcccgggagcccgcaaac

SEQ ID NO: 1415 - DNA, 890 bp, Homo sapiens
  chr2:31360816-31361706
  hyper
cgcctaccttaggggtctgcacttcaggtcccgtcggcacctccaacttcctcttggttacccagaagaacagcagcaccgtgatccagagcaccccgaagactggcagaaccagccgacgagtcaggcgccgcatggtcccctttgccgcttcctctccgcggcgctacgtcccgggggcaccccccggcggtcagggttggcggggcaggagtcctggcgagcgcctcgctctggggagctctagacccaggatccggttggaggggcggcaggatcctgcaaggcgcccttcccgcttcgaagagaagcgagcctgggtggggggtgcagggcgacccgaaacgtggcagggaaggaccgagggcagccaagctggacgcccgctccagcgggagaagcgcggtggctgccgagatgttccccacgccgccaccgcggctgccgccgccgccgccgccgccttgcccgctgccgccgatagggaaactgactcgagcagcgagagggaggaatccgaggctgtgccaagcaccccgggaggagcacgagggcggagggagtgagcggggagggcgggcccgacagacaggccgactcggagcgagcccaggtgggagtgagcggggctctgagagggggcgctaccgccgcccgccgaccgaaacgctcggtgctgttgcggggccgccagcgccaagccctgggcgcagctcccagaccatcgtgggttggggcaaggcggggcggggcgggagcggtgcactcgggatgcccgccacccccagctgccagctgggacccaagggccggccctcgccaggcggcgctgtgcctgggaggactttcccgctcatcgcgggggctgcacgtggcgctgaagccggggt

SEQ ID NO: 1416 - DNA, 472 bp, Homo sapiens
  chr2:31456788-31457260
  hyper
cggagactgagacaccggcactctcccactggactgggtcagcatccctctccccgcgcggccgcaggtctagagctgagcgcctgcccacaaacatggcggcgccctgcgcggcttcccgtcgccgcaaccgtggggccggccctgccttgccagtactaggggacttcctctgcgcgccggcttcctgcccagctggcatttaaaccaccgcctggggctgcaggatgctgctgcggatgcagagctgtccgcgggctgggcagcgtcgccgtctcccctgagccgcctcggtccggcaggagcggagccgaagcatcccttgctgcacgcagggcagagcaggcgagggctgggggccgatcggggaccccggcttgggaccccggcatctggcagtttccttgcaggttcaactttaattgccaagatttcacccctcctcctcaagcccagattatttatcctccct

SEQ ID NO: 1417 - DNA, 82 bp, Homo sapiens
  chr2:31457325-31457407
  hyper
cggccctcctagccgcgtgcccgggccatggtgcggctgagccccgcgcttgggtgaggcggcggcgcggctcggagcccgg

SEQ ID NO: 1418 - DNA, 30 bp, Homo sapiens
  chr2:32236232-32236262
  hyper
cgaggacagtcccgcgggtatccatcatat

SEQ ID NO: 1419 - DNA, 30 bp, Homo sapiens
  chr2:32264803-32264833
  hyper
gcgcccaagccgttcgttcttaagagccct

SEQ ID NO: 1420 - DNA, 30 bp, Homo sapiens
  chr2:32289443-32289473
  hyper
ggagactgctttcccgtaggtcggagcctc

SEQ ID NO: 1421 - DNA, 92 bp, Homo sapiens
  chr2:33171659-33171751
  hyper
tatctgaattcaaccccgcagcaagtatcacagcaaacacggataagaaaatgccggggcttccaaacaatatcaaacgcatggggcttctg

SEQ ID NO: 1422 - DNA, 143 bp, Homo sapiens
  chr2:33172104-33172247
  hyper
cggaccctcaccttgcgcggcccgctcccctcgcccctccccgctccccgggctccgcgctccccacccccacgccctcctcctgctcccagccacaatcggccggggtctggggccgctcagctgcccgcagagcctcctcc

SEQ ID NO: 1423 - DNA, 30 bp, Homo sapiens
  chr2:37383979-37384009
  hyper
tgcagcccctcgtacgtggccccccggccc

SEQ ID NO: 1424 - DNA, 595 bp, Homo sapiens
  chr2:37898933-37899528
  hyper
cggggccaaccggtggccgggcgcgcgcgcgggggggggtcaccgttggaccctcggaggacaatgggcgcccattgttacctccccagcgccaccccccagtaggcgacttctctcggagaagatgccgctttcgactccctaagcacaaagaaaggtcgccggacgctcggtttaaagagggacccggaggtgctgccgcccgggtgcacggggacaataggactccgcccgcaccccggactcccgcactaaaactcgtgcgcccacctctcccgatcccaacaggccgacctagctgtgcgagtggcgggcggtgacccgcagggaagcgaggccacctgagtgcgccgccccggccaggccgcagctccccaggtccctctcagcccgggctccggtgggcgcggagggggagggtcgcgttctgtcagtttctagctcgctcccctcagagctgcagccaaaacccggagagtggaataagcgccctgaagatgccggagctcccggctgagcaactggacacgcgacgaacagcagacgctacaggttctcctacccagagggaggcgtttcttctccctcagggtct

SEQ ID NO: 1425 - DNA, 30 bp, Homo sapiens
  chr2:37899938-37899968
  hyper
atcctggcacaacgcggagaacctcccgga

SEQ ID NO: 1426 - DNA, 31 bp, Homo sapiens
  chr2:37980872-37980903
  hyper
tatcattcccccagatcgtgtgtagagtttc

SEQ ID NO: 1427 - DNA, 531 bp, Homo sapiens
  chr2:38302369-38302900
  hyper
cgggcccgggggcgcggaccggagctgccgcctccgttgcctcagcagccgctggcccacatgcacagtggccagcaccgacaggagtagcaggagcgtggtctgctggatggacagcgggtttagcggccaagggtcgttcgggctgaggctggtgcccatgctggggacagagaggagaaggcgtgacactcaggggtgcagagacaggagcgggcgccccacgcccctaccccagcctctggggactgagtgccgttgggtggagaggtcggagctgactctctggagaaatggccgaagacgccccttcccatccccaacccactctcccttggagaagagaaggggcgtgtttccacctcgctgtaacccagcgccaaacccttcccctccccgcaaggcgcgtaacggttcctgcaatctggggacaacgctgcgggcatcgaggcggtggcgcttgatttcctttaaagtacctaccacgccacccgctacctgtaataatccatctgaagaggtcgccgggca

SEQ ID NO: 1428 - DNA, 863 bp, Homo sapiens
  chr2:38302948-38303811
  hyper
cgcgggacagccggctccgagaaggaactgggacctttgcctagggcaagacgtcaacaggaacccgcagcccggcctggacacctgctgccctcactggaagctttaactcccactcgagtctcttggcgtcgtcagtgccaggagcgcttggattgggatggggacggagaagggtgcctcgctcgccgagccccgctgcccttggggacctggcaaagtcgaggtttcctcacagcgttgagattgagactgggggtcggtgagtggcgtcaattcccatgcccttgcggctctcacaactggagtcgcagaagcgctcgctcccactcccactccagagtcaaagcgcgccatcccgctcctccgggttttaaggactgggtagaaggagggcagcgcgacctggcagggcggggcctgcggggggcggggcgcgccgcacaccaggccgctttgacccggactcccgtccaggcgcaccggccggcctcggagctctaccagcaggctttcatgggagcggaggtgcccacgtttccattgtgcggtaaccgcgcttcatcacagccacctccaatcgaggccgcacggtgtccccagaaccacgctcggtacaacctgccccggccgctgcgctcgacttgggagcgcgccccgccccgagcgcacgacctcccttccctctccgcgacttgagcttgcttcccggaaagccagtgtagtggcagcggtttgcctcacagcgcccctggttggttgtttaaattttatcttaggttctcgcaaacaaattgccacctcagtggaggctctttggcatgctaaattttttccagttcttgcggcgagatcaggaatcc

SEQ ID NO: 1429 - DNA, 30 bp, Homo sapiens
  chr2:38342432-38342462
  hyper
tcatcctgcaaccacggttaaaaatcacta

SEQ ID NO: 1430 - DNA, 31 bp, Homo sapiens
  chr2:38690639-38690670
  hyper
gaaggagtggaggactcgcagctggaagagc

SEQ ID NO: 1431 - DNA, 30 bp, Homo sapiens
  chr2:38977942-38977972
  hyper
ctcaaacacaaccacgatcttacagctgcg

SEQ ID NO: 1432 - DNA, 939 bp, Homo sapiens
  chr2:39893063-39894002
  hyper
gtctggcggcggcgcgcgagcccaccggcggctgcggcggggcgggaagccatggagccgcgggcgctcgtcacggcgctcagcctcggcctcagcctgtgctccctggggctgctcgtcacggccatcttcaccgaccactggtacgagaccgacccccggcgccacaaggagagctgcgagcgcagccgcgcgggcgccgaccccccggaccagaagaaccgcctgatgccgctgtcgcacctgccgctgcgggactcgcccccgctggggcgccggctgctcccgggcggcccggggcgcgccgaccccgagtcctggcgctcgctcctggggctcggcgggctggacgccgagtgcggccggcccctcttcgccacctactcgggcctctggaggaagtgctacttcctgggcatcgaccgggacatcgacaccctcatcctgaaaggtgagcggcgggcgcaccccgcgtccccggcgcccgcgcgtggagcgcagcccgcggcttcccaggggcgcgccggtccccgcagccccctcccagccgcggccccgcgcctgggcattcttgcatccttcccgccgcctccagtctttatctcttccctttctttccccactgcctcccttcttctccctctccttgactctcttctttcgtccacatcctgcgcgtcctttcaagtccgtgccgcacctcccgcctctgtctccttctttcctgccttcgcctcccattccccggttctctctctctccccgtccttctctgcctttgtacacctgcctgacatgtgtgtcttttcttgacgctgctccccgtgagggggactaaccgtcaaagactcgacttttctcacccgggctccttccttcaagttgtgctccttttggaaataccgtttggaagaaaagtggtgccgacctccgaagaga

SEQ ID NO: 1433 - DNA, 454 bp, Homo sapiens
  chr2:40678392-40678846
  hyper
cagaatccccaaagcacaccacggcacagtgcccagagacgtggaccccgcagcccactccctgctaccccctacatttcttcctcgtctgtctctgccccgccacacctccctcctctccgcagtccgtggtgaatgagcacccaacgcccgctggaaaacagggggctcggaaatgtggccttggggaaagaccccagggattaccggaaggagggatgtccgcggagaagagtccagtgggtggggacgcctggatccccagcagctctgcattcggggtggacttagctcttcgcgccctgaatcctcagagcccagcgcggtgcagggtgcagcatctctccttagcagccctttcttcctccggcagcctgcactggcaggcaggcaggcaccctcacgcccagacgcaccagcccgagcaatttcactctgggaagcgcggacaccc

SEQ ID NO: 1434 - DNA, 699 bp, Homo sapiens
  chr2:40678905-40679604
  hyper
cacacacacacacacacacaaatttagaagccgctcgtttgccaaagcagagggaagtgtagccttatgagcagcaaatggaaaatagttcttggtctctgactaaatgccttctgcctgtccatcataagatcctacctggtttggggagtgtgaatggattcttcctccgttcctccacgctagtagaaaatacggcgcactccctccttttaaacagctcccgatcaggaagaggtcgctcccatcttctgtgggaagcacaaagcaggcggcggcggcgggctgactaccgtgcagcgccggcgcgagcgggagccgcggcagcgggcagcggtgcgcgcgggcgggaggcaggcgcggaggccgggaggctgggagggccggggcccgggcgcgcgcgcgctccccctccctcccgcgcacactcgcccgcccgccgcccgcagcctcgcactcgctcacacgcgcgctcggccccgcggctgccgggcgccccggggccccctgcgcgccccttgggctccccaggcgatcgcgtcggggcaaagccggcgcgtttctggagcaccgagcgggtggggagcccttccagcctcccagcctctgccggcgagcagctttttcgatttcctgccggctctcggccccgcagtgcgttgtggccgcgcgctagcgctgtctctcgcacccagccca

SEQ ID NO: 1435 - DNA, 30 bp, Homo sapiens
  chr2:40679688-40679718
  hyper
cgcctacccgtttctcacctctgactttgt

SEQ ID NO: 1436 - DNA, 31 bp, Homo sapiens
  chr2:42067664-42067695
  hyper
tgcgcatggcactgtgcgaaccttaaacata

SEQ ID NO: 1437 - DNA, 30 bp, Homo sapiens
  chr2:42111963-42111993
  hyper
gggtagaggccagggttgttgctcaacatc

SEQ ID NO: 1438 - DNA, 314 bp, Homo sapiens
  chr2:42274595-42274909
  hyper
acgcgccttccctgcgcccaaaccgccccgaggcccccagtcccaggagggagcgctgagatcactcggatctccgcaccccggacttagctgctcgtcccctccggagcccgctacccgccggcctcgcccctttatctttcccccactccgcccggccggctccgttatccacctcccaatcccgttatccggccgccccggccccgttatccgccctcgcgttgggcgcggagcccccgcgcgcctcctggccgccgccgccccctcccccgctcccagacggagctcgggggaccgcgggctgggcggga

SEQ ID NO: 1439 - DNA, 478 bp, Homo sapiens
  chr2:42275208-42275686
  hyper
ccgccggggccatgcgcgcgggctgggcagggggccggcggggcgcagagcggagccgcctcggagcctgagccgcccggggccggggccggggagccgcgcggggccggccggccggggggaggggagcgatgcggcgccggcgggcggcagtggccgcgggtttctgcgcctccttcctgctgggctccgtcctcaacgtgctcttcgctccgggctcggagcctccgaggccaggccagtcccctgagccttcgccggccccgggtccgggccgtcgcgggggccgcggggagctggcccggcagatccgggcgcgctacgaggaggtgcagcgctattcccgcgggggccccgggcccggggcgggccggccggagcggcggcgcctgatggacctggctccgggcgggcccggcctgccgcgcccccggcccccttgggcccggcccctgtccgacggcgccccaggctggcc

SEQ ID NO: 1440 - DNA, 174 bp, Homo sapiens
  chr2:42329270-42329444
  hyper
attttttttaaatgatgtcatcgcagtctgagagcagccagacacgtagtgatcagggaaagtcgaaagtgcagatgggttcgcaaacgtggactctctagttttgggtctgcagatggggccggccaccacgtgctctctgagttctctttccaagtacagatccctccggag

SEQ ID NO: 1441 - DNA, 288 bp, Homo sapiens
  chr2:42329493-42329781
  hyper
cgtgagaaccggagcccggggtgacttgcgggggaggggatcgcttccccgtcgcccacacctgcctaacccacgcccacggcggccgcaaaggcgacaccgcgtgaatctggaaagccccgagtttcaacaggcccaaccatcggcggctttgcaggcgcagcaccaagtgctgctctgcctgtgttcccccagacagcccctggttgtgatttgtcgtttccagtccagctagagtcccaaggccaagaactagacccttgcagcgagatccgcgcccccccccac

SEQ ID NO: 1442 - DNA, 281 bp, Homo sapiens
  chr2:42720165-42720446
  hyper
cgccgcatgcgctccagccagcgcctggagggagccgcctcggccccgccggggcgcgcctcgtcgcggcccagcacgcccggctcgtcggccgagtagaaggtgtaggtgtcggacatgcggtcgtcgaggcggcgctggcagcagtactcgaggtgcgcgccctccaggccccagtagatcatctcgttgtagaaggagagctcgcacatccgcggcgcgaagcgcagcttgccgtggccgcgcacgtagagcaggatgaagccgaaggcctccgagtg

SEQ ID NO: 1443 - DNA, 436 bp, Homo sapiens
  chr2:42720772-42721208
  hyper
cgctcctgccctccgctggcccgggggtccctgggctcgagtatctccggcgctgctagtagcgcgccctccgcccggcggtacctgcgggtggccggggagtcctcgccggcgccagcgctgagccccaccggctgggaacgcggctgtgtccgcgccgccgaccctcgcgcccgagggctgcgcacaccgaggccgcggtgccctctcccaagccgcggggccgaccccctgagggctgcgggcgccgaatggagccgccggggcggaatagctccccgtctccggcgctccctgcggccgcgaatccggcggccgccccgccgccgtccagaggcgagaggcaaagtgagcgggttcggaggcggcgaagagccggctcgcggcggcgggggcggggcctctgtgcagtcctcctcctcgcccgccggctccg

SEQ ID NO: 1444 - DNA, 31 bp, Homo sapiens
  chr2:42796455-42796486
  hyper
cccacgaatggggcttcgtgggagctgggaa

SEQ ID NO: 1445 - DNA, 786 bp, Homo sapiens
  chr2:43019538-43020324
  hyper
agatggaggagggggaggaggcgagggcagggggcggccatgggggtgctggactcacatgagcttgttgcagaccgggggctggaaggagccccggttctccttcacccaggccctcactcccaggcggcgctccatgactgtcccgggcgcctcctcgcagcgctgtcctcccgccgtcggaggcccgcagctccgcccagccgcctttttaaccagaatcccaagctcacgaggcggagcaaacccccgcgaccccgtggtgggggcttggggcccgcggactttgccccctggtggactttggtctgagcccgccgccctccgcgccactccaggccctggcgagcgcggcggcggcagcgctggggaacggcgtcccgcgccctctgcttctccgcggggcaggggctcggtccccgccaccgtctccggggcgccccacacactggcgcctgcggtggggcctgctcccggcggaggacaaagaatccagacccttcctggacgcttgtccccagacgttccttccctctacgccccgaggggaatcccagggaaggttcccagaaatactacagtgaggagatcgcgggttggaagtcccagcacctgagaacacggtgctggcgctgggctcaagatttggctttcccatctggaaaaggggaatgactgccccgccactcagggctgcggcgctcacccagcgggaagccgcacggcggtccccgcaggtcccgattcaaggtgagccccagacctgctgcgtgcggccggcagact

SEQ ID NO: 1446 - DNA, 54 bp, Homo sapiens
  chr2:43020503-43020557
  hyper
cgcacgcagctatgggaggaatttggcagatgtggacaccggcctcagtgtcct

SEQ ID NO: 1447 - DNA, 30 bp, Homo sapiens
  chr2:43054969-43054999
  hyper
gagacaggcagggccggccacaggaccagc

SEQ ID NO: 1448 - DNA, 30 bp, Homo sapiens
  chr2:43385829-43385859
  hyper
cctggcctctctcccgcagaggcacttcct

SEQ ID NO: 1449 - DNA, 288 bp, Homo sapiens
  chr2:43445792-43446080
  hyper
ccctgcagacagccagcggcaccaaggcctgtccttggcaggtgtgcccagcaacagaggtgagtctggggtccctgcaaggcaggggcccactgaccaccctcccacccagccctgcccggcctgctgccctgcaggaagcggatgccagcctggcggtcatttccgggttttgaaagcagtttttaaacttgaaagagccatgctaaaaaggtctgcttttcctccgtaggtgttggtaacacccacatacagacacacccacatgcacaccgcagcagacacatc

SEQ ID NO: 1450 - DNA, 82 bp, Homo sapiens
  chr2:43446675-43446757
  hyper
aaggacgcagaaacacgtactaatacacttcccatacaggcgcacccctcaggcctccacacacgtgcacggcatgcatgcg

SEQ ID NO: 1451 - DNA, 618 bp, Homo sapiens
  chr2:43446816-43447434
  hyper
gcaaaacccatcaggagaggttgggccctggaggtgctgtggcttcctgctgccccgctccctcccgcctcctccctgcagggctcctcctggggaggcctgtccagctgccaggccccgccccgccacagcccccgctgtcctcctccctccctcagccgtgccagcagcggcacagaactggaattgccctggacggccacagctctgcatatcccccaggagtgtggacaagaaaaaataaacacaattagagttcacgacaatgggcccctgatggaaggtaagcccggctagcctctaagggctgtgccggctcccacgaacttccaaggccgaggacggtgccgagacccaacttccggtctcaagaaaacttggtgagagtcacatccgccctcacttgtcaccacaagcaaaactgaaggagagcgggtgtttggggacggttcctttccgaggttcagtgctctctagcgggcttcctccctgcacatggccaccctggcgtttttctgagcgcccccaggcaggttttagcaccgagcattctagtgccgggccaggctggcggccaagagctaggcctgcttgtttttcctgcgtcgggcccaccag

SEQ ID NO: 1452 - DNA, 707 bp, Homo sapiens
  chr2:43451138-43451845
  hyper
ttttttttgttctattcgtatcacaactgccctgttgtgaatattttgttcaacagaaaaagttcgacttttttgctcaaaaagaatgaaacttcgtaataaaaataaaaaaaaaaagacaagaggaaaccgaaaaaggaggggtgggggcccctcccggcacagagttcgagtccaagtgctcggtcgggcttgcagtctgcctagggcccatgtcaccccccccactcccgtgcccccagcaagggcgagatggcgaggggtgtcctccaacatctctgaaccgccttcccttcctcctcactggcgccctcttgcctcagtcgtcggagatggagaggcggctgaagattggcaggcggcggccagggtcgaggctgggagactcagagccgctgaggctgccggagctcagggagccgcttaggtagctgtcgcggtccgacagcgagtccggggggctggggggcgcgtcgaacacgggcgagtcggacaggcggcgcggcagctggaagctgaagggcggcgagggaggtgcggcggccccggcggggagggtcgcgctgggcggcgccggcggctgcgcggggggcgccaggccctgctgctgctgctgctgctgactgcggtagtaggcggcggcggccacggcggcaaagttgtgggtctggatggcgagcggcgtgatgaggctgctgagctccgga

SEQ ID NO: 1453 - DNA, 968 bp, Homo sapiens
  chr2:43451891-43452859
  hyper
cgcacggggcccccggcgccagcaggtcctcggcgcccccggtgccgtacagcagagcggccgcagccgcggccgccgcggaggcgcagcatgtcggggcgcccgagggcgtggaggccgcggaggccgaggaacaggaggaggcggaggaggagcaggacgaggccgaagagcaggagggcggcggcggcgtgcgcgacgtggggctgtcgagcagcagcggcgactcgaggccgcccgggggctgatggtggcccgacgggaagcccgagaagctgaggctgtggtgcaacttgggccgcggctcccgcgggaagcccaggtgcaacgcatcgcgcgtgccaaaggcacgcaggtccccggaggcgccccccgacggcgcgggccgccgctcgtccgcgttgtggatgaagtggcagcgcggcccataggggcagaagccgatggtatgaaaggtgcggcacagctcggtcttgtacttcggatggcgagtcaggctgcgcagctcgtggaagccatgcgcgaactggcacttttcgccgtacttgcacgtgccgctctcctcgaagggccggcacagctcggtcttgtagcgcgtggagttgatctgggagccgccgccccccttctgctgctgctgcaggtgcaggaggtgctggctgcgatcgccgttctcgctaaacgagcggtcccggaatttgttctccttgttgagcagggctgtgccgccgccccccgacggctccttaagggtgccgtaggaggtcggaccgccggccgccgcgctgccgcagctgctgccgttagcggcgcccgggaacttgggcgagcagctgccggggctgggcgcggggtgggcgagtgcatgcaggttgctggccgagtgccgtcggaggaatcccggcgcgaagcccgagctgggggcggcggccacaggcgtccccaccgccttcttgtccagcatgttg

SEQ ID NO: 1454 - DNA, 207 bp, Homo sapiens
  chr2:43823089-43823296
  hyper
agaagagtcgcaggcgcctggtccagtcccggaagcaggtctccttctacggcgtctccgaggctcgcagcgcggtccacggtcgactaccgggtcagggcaaagggagggagagaggggtaacctggaggagtcatcgcgagaattgaccaaacgcagctcctccaatcaggagttcgaggaggtcgtgacgtcaccggggtggcc

SEQ ID NO: 1455 - DNA, 30 bp, Homo sapiens
  chr2:44001237-44001267
  hyper
ctccgagcctgtgacgtttgcggcagccag

SEQ ID NO: 1456 - DNA, 30 bp, Homo sapiens
  chr2:45150461-45150491
  hyper
gagaagacccaacagaaacacccttgagcc

SEQ ID NO: 1457 - DNA, 792 bp, Homo sapiens
  chr2:45155393-45156185
  hyper
gcggtttaagaccacgcgatttcccaaaaagaaaaactcaaaagatgccaggcgccgggctggagtcacttagagccagctctggctgctcctccgcctccccgacccccggccgccgctccgccctgcccctcgcgcctcgaccccttctcccgaaactccgtcctctccgccgaggggctgccttgcccccaacccaccccccgcgtggagaataaacacagttgacatcactcttataatctttatttaaaactgtttccaaggttacaaattgccgagcctcgtatgcaacaggttcctccaaagcggtatcattacagattaactgtaatgtgtaggattagaataaaagcataagggattaggtaaaagggcgacgctccagacataacgcccgagcgcatctcgactgagtcagcctagggagactgcgaaggcgcagggtgtcggggcgccacggggccgcaaagccggactcggttcctccgctcccggccctggccccggccccagagcggtcgggacagcggcgccggaaggccaacgcggccgaaggtttcggagccaggcttcccgggcgtcaggggctagggacgggtccccggagctggggaagatgaggggccgagaggccgtggaggcggaggacgcgggcaagccacggcccggctgggagcttcgggaagcgccgcgcccgggacgcggtctccgggcggggcgaagcgcagggaaggcggcgagggggtccccacacccgcacggggcaccgggtttgtccatgtgggtgac

SEQ ID NO: 1458 - DNA, 297 bp, Homo sapiens
  chr2:45157349-45157646
  hyper
cctttggaggtgagacggcctctctagcgcgttgacactgttgatggaagggattaaaggggtatcaggttattttaatttattgttgaagatgatgactgccccctccccgatccgcataccgtcctcactttcccaccccaaccctagacccgacaacaccgttcagccctttgccccgggcagcggaaatggttagcttcctctaggagtttctgctgaggaaggcgcaggcaaccctagtcggcttagagagagacaaccgcacgcgatcaccgagcacgatttctcccaaca

SEQ ID NO: 1459 - DNA, 448 bp, Homo sapiens
  chr2:45161092-45161540
  hyper
gcctcggggagcagcggcttttcaccctgctatagggaggtgcgtttggctgagctgtccccccaccaaataaagctaatgatgtagtaatttaggagggggagaggggctgggcaaaaggagagaggggagaggatggggaaacgcgcgccccaagagcaaaagcaaacagctgtggaggcgctgcccgcggctcaggcttcccaacaggttagctatactgggatccacccggcatttcgcaggaaggggtggggggaagacagagcgagagggggagagaggctcacaagaggacagagggagggagggaaagagagataggagccagagagcgcaccgcgcggcttaaaaggagagacttactaatgaatatttatccgccgctgctccgtgctcccggcttcccttacctttcggcaggtaagatcctccctgtgccccagcc

SEQ ID NO: 1460 - DNA, 1348 bp, Homo sapiens
  chr2:45161597-45162945
  hyper
cgttggtgggggtgggagggcggctctactctgcgttcactttgggtgcccaggcatgcgaccctgcacgactaggaaccgcgtgcgtgggctccatgtgtggaatgagtgtgagcatgtaagagtgtgtttgtgtgtgtgcgagagagagacagagagactatgcgcccgcaagcgcgcgcgcgcgcctgtttgtggcgcgctctggaaacattttccgacttttcactcggacgccctggatttctcgcctttgcctttctctgcttcccctccctcttctctcgccctcccctcccccacccaggtctaccccaccctaccccactcctaccccggctgctgaggcgctcttctgccggctattgtacggctggcgcgggctccccctggccacatcccgggcctctcacacaagaagaatagttctgtttccgccgtaaacccccacacaaaggctgcccggccaccgggtcccctgtcccccttcccggggacttcggcttttgaggtgctgctgcgcgttctttctccctccccctctcagggcgccagggcccagaccaaggagctaagagtgatcgggacttgggggtaccgggtggaactccttgggggccgcccgccaggcttcctgggctgcaactcggagcccagagacccccaggggaagggcgcctcttcccccaccaccaccccagccgtcgcctgcgggaggagcacggggaacccggcccagccaaagggggaagagggaggggaaaaggaagaaggtcggggaggggctgaccatataaccagaattctttaaacggacttacccggccacctgttgagaatccatgtggggtcggctggctccggagttgcgcaaggtggacacacaaaaccaaaagccggagttgggaaaagaaaattctttctctgaccatgccagacgcggccggtcaggctcgcagctccgcgctaggatcgggcggctgtacaaccaagatcgactttgccctgtcccccaacgcccccctcatcccacggctccacggctgggaggctccggactcagagctcgcggactcggcgctcagggtcagcaccagcagctcggcttaagccggggcaggctctctaagccctgctcagaagtcaagagcagcagtgctgcctctcctcgccgcctttcatgccgcggccgctccttattcttgtgtctcggcctctcccggccccctcggacaaaacccccagagcccggccactctcttcccgctaaatccccttcggggtcagtgctctaccagcaccgggccgcgcgcctctcctgccagccgtgtggctcttaaagagctgc

SEQ ID NO: 1461 - DNA, 30 bp, Homo sapiens
  chr2:45165178-45165208
  hyper
ctgccccaaccctccggatcctcgtctccc

SEQ ID NO: 1462 - DNA, 30 bp, Homo sapiens
  chr2:45165931-45165961
  hyper
cctgccctgctctccggactctcaacttac

SEQ ID NO: 1463 - DNA, 460 bp, Homo sapiens
  chr2:45176824-45177284
  hyper
cctctcttcttcctctgcctccgtggccctgtcagtcccgcctaagcctttgtgtggccgtcacctggagcaccggctgtgcctcagggactttcccgggccttccccttgtcctctctgtcccccagcgctggagctgagatgcccggcccgcgggacgctcgaccccctggtacgcgcgctgaggcccccacggcttcccaccgctccggccctttccggccccagctgagctgaagctccctggccccagtgtgcgggccccggtggccgtctggcccgagggagggcgggggcaggcgagagggagccatggaggaggggagcagtactagcccggctccaatttctccggtcagctgagcacaactttccattcgagtgtattcatgcagcggctgattgagctccactgtgccgggcggggctcggcgggagcgggcaggaacagccaggctga

SEQ ID NO: 1464 - DNA, 30 bp, Homo sapiens
  chr2:45180074-45180104
  hyper
tcttcctcgccgtgcgctcccgatagcggg

SEQ ID NO: 1465 - DNA, 30 bp, Homo sapiens
  chr2:45182674-45182704
  hyper
ggaaggctgcaggtcggatagctagattcc

SEQ ID NO: 1466 - DNA, 30 bp, Homo sapiens
  chr2:45231367-45231397
  hyper
tggttcagatgcgtcgtttaaagggggggg

SEQ ID NO: 1467 - DNA, 737 bp, Homo sapiens
  chr2:45235559-45236296
  hyper
gggctgccgctgggctgtggccgggcctgggggcccagtttaggcctctccgggggaccggcagaagccctgcgaacccctcccttgggccccggggagctggcgccgaagaaggtctacttactcgtacctttccttggcctcggccgcccggtcgcgctgccgccggttcttgaaccagttgctgacctgtgtggtggtgaggcccgtggcctccgccagctcacgcttctcgcggggtgaagggtaggggttgtgcgcgtaccactcgcgcagcacgctgcgactcttttccttgaagcagtagctggtctcctcgccgtcccagatggagcgcggcagcgggaatttgcggcgcacgcggtatttgcccacggcgcccaggggtcggccgcgcagcttctccgcctcgatgtagtgtgccttgagccacagctgctgcagcttggcgtggttgtgcggcgagaactggtggctctccaggatcttgtagagctcgcggaagttgccgcggtggaaggccaccacggccttggccttgagcacgctttcattcttgtgaaggtgctcgcaggcgggcagcgaccacaggaagcggcccagccgctcgatgttgccgccctgctgcagcacctcgcacacgcacgccacttgctcctgcgtgaagccgaaggtgggcagcatggacatggtgccggctgcgtccccgcccgcccgcgcgcgccctcaccgggccg

SEQ ID NO: 1468 - DNA, 101 bp, Homo sapiens
  chr2:45236615-45236716
  hyper
gaggcgcggcggcccgcgccctgattggtccggttatctgacccggggcctgccagcgccagacaatagtcggagtcaaattattcgccatggagacgctg

SEQ ID NO: 1469 - DNA, 30 bp, Homo sapiens
  chr2:45237416-45237446
  hyper
tctcctagccccgccggctgcctggcggcc

SEQ ID NO: 1470 - DNA, 226 bp, Homo sapiens
  chr2:45237674-45237900
  hyper
ccccggtgggtggtcggggaggagaacggaggcaagattcccagtcctcccgcttcgccgctggggatcggctcggctcctggccactccagcctgggaaccggctcgctgagctccgggatgaggtgctttaaaagggggtcctgttttttgcttctttgtcagggtgccaatggaaacatgtggtgctggtcctgtgggagaagggctcgcacaaaggtgggag

SEQ ID NO: 1471 - DNA, 62 bp, Homo sapiens
  chr2:45240364-45240426
  hyper
ggccctggcgccgcccgcctcgggcgctccatgctgctccgcacctcgggctctgggatgct

SEQ ID NO: 1472 - DNA, 140 bp, Homo sapiens
  chr2:45240490-45240630
  hyper
cgcgttccccagacagtcccggagttctctgggcctgggcgacgtgtttcgttgaaagcgggcaggtggtgccgggcggggctgcgctgaggctccggtgcctccccacctgcccctcgtacctgccggtctgtcgggtc

SEQ ID NO: 1473 - DNA, 405 bp, Homo sapiens
  chr2:45240763-45241168
  hyper
cgagcccgggcaaggttgagaggcgctgggctccgggcggtcgcactcttggaaccgcgcgaaccgcggcgtcgcccgcgccgcacgtggctggggcagtcacaggccccgagagctggagcaacggggtcaccgccacccctctgccctccaggccttcaccttgagacccacgcggcagcctggagggcccacaagagcaaacggtttagaggccgcgggctcacgagggatcttgttcaaacgaaaagaacgagcacaggggctcggggccagcctggaggccggcacagaggcgagtcggcccgggtggcgccgggaccaggcgggatttggggcgggtatccgggcccgggcgctggcagcctccctgcgacccccggccctgcgtccccgcccgcggtc

SEQ ID NO: 1474 - DNA, 402 bp, Homo sapiens
  chr2:45241232-45241634
  hyper
cgggcagggccacggggcgaggggacgggctcgcggctttgggttcagggagccgcggagctccaccgccgggttgttttgcaatggggctttggagaggttgcgcgtcccgggccccatggctccgccgggtctgcacgccagcgcccccacgcggcgggcccagagttcaggccggcggggctgcgcgctcggctccccgcaggcctgtagcccaggagggagaggagggagaggacgcggagagggcccgctggttcttccctcctcaccccagcactgacccgcctgtgcgctggcacggagggctcgaaaatcggggcgcgtccgcgaagagcgagacctcggagacagacacacaacccagaggtgcactaggttgccagacggtctgatcacagg

SEQ ID NO: 1475 - DNA, 1279 bp, Homo sapiens
  chr2:45395854-45397133
  hyper
ttgtattttgagaaccgctccctttcccgcacacgcattgctgcctcctctcgggcttggttaatgagtctgtgcgccaagccaggtcgctccgggcagttcgcgcttccgcgcctcggcactcggatgaccgtgtcctattcgtctctctcgtgaatgtcgctgaaaaaaaataaaagtttgttctaagcccgtggcatttccgcgcgcagatggaaaggcaagtgggagaggagggtgcaggtgcggggcgggcgcggcggccccttcaggcgccgggggctgggctgcccccggccgggagcagctccgctccgcgcacgtggctgtgggcgctgcggacgggggacggcaggcgggggacggcaggcggggagtggagggtgcagtgcccgcaggtgccgacggcttcctcccagagcccttcgcgccgcgccttgcctggctggtggcgcggggaaaccatggcagcattgcggctccggcgggcgggctctgcgcggggccccaccgagctttccgggagcctctcccgcagccgatgggcatctaggggcgcagaacgaagagtgggcgccgaaacgggtgtaggcgctggaggccgacggggaggcccggggcggtcaggcttctcggtagagagggccgtgcacctcgcggcctgcgggctaaggcggggagccgctcctgcggcggccgggcgcgcggactggagggagggaagcgccacggactggggaaccggggtgacggggagacgggggggctggtggggtgaggtcggcgggcagcagccaagtgttctgcagctccgaaccccgccaccctctgggcgaacggaatggcacccgcggagacgggcggggacgggcgaaagcgggtttgctccgacccgaagctgagcccgggttggagggcgagaccgtaggcgagaatggccgcgcgggctgggagacccgggccggtatggagtgagtggagccgcccgaggtagggtagttggggatggtagttgtgaagacagtcggagtctagctccgggcagacgaaacaccggggcgcgccagggtccgtttcctccttctctctgctttcccaccagccctgtagatacggagccagcagtcgggctagagcggaggctgagggtcgcggttccaagggcggtctctcgccccgggtcaggccccaccccgcggtggcggtcgcgtggcgctgtcctggagttgagctgtccccgcgccgcggcccgcacgcccaggaccgcacaccgccgccc

SEQ ID NO: 1476 - DNA, 46 bp, Homo sapiens
  chr2:46524184-46524230
  hyper
gagcccggctcccggccgcccctcggccctgcgcaggctgcctctc

SEQ ID NO: 1477 - DNA, 141 bp, Homo sapiens
  chr2:46524535-46524676
  hyper
cgggagctttacactcgcgagcggaccgccacacgggtccggtgcccgctgcgcttccgccccagcgctcctgaggcggccgtacaatcctcggcagtgtcctgagactgtatggtcagctcagcccggcctccgactcct

SEQ ID NO: 1478 - DNA, 1476 bp, Homo sapiens
  chr2:46525029-46526505
  hyper
tctcaaagggccacagcgacaatgacagctgacaaggagaagaaaaggtaagcgggcgtccgggccgatcagggggccggtccgaggccagggccgggctgcgcggggcaggcgcgaccgagagtggttgggagaagagtgctgagaggtcttcggagctcgaggctcggtttggagggctgtgagggggagagcatgtgcccggtttgggggcgcggatcagcagctttgcagtggagacttctgcggctcggaggagtcggggatttgcgcgcacggcgaggccaggaggccgagggagatggcctggaggtcggaggtgcttccgcggtgcctttgaaaatctcccagccgccccgcagcagattaccgtggccaccggcgcttggaaatgtttgtgggtgcatgtcctcgactttctctggtctctcattttggggcagcatccacgtctctatttttctctggattcgcggagtccttccaaatgcgctcctgtgcccgcgccgcggcccaagtgggcaaaggggggcgggaggcggagagcggctcagggacacgatcctaccgaggagccaggacccttcagagcgccccgctgccgggctccagaccccaccgaaggttggagaacccacttcctcgtgccgcaccttgactctggggagagtaggtagtgagtgacctggattgccctgcgggggcagatggttcggtgtgtaggaagcggacggcaacactggatgtccctggcaggtccgggtgtctgtctccgaagaggacagagaagggcagccacgatctgcccgcctgccctcgcgagcctctcggcactgggtgagaggcaactctggccatttcttgctgccctctcgccctctcccggccgctcccagtccagccgggcccggcgctacccgagcgagggttcgagccctctgcgcggccgcgcagaagcaggcagggcctcaacttctgcaaatgtgtgcggctcgccgcctgtcccctttctcctcctgtctccacccgtgcggccccagtggcctggagcttccagccccgcgcttggccgcggcttggcgaggctatgctgcgggaagctggaatccaacgcgcggccggctgaaccgcctgagccgcgggaaaccagcggcggagcggcggtatagaggtgcgaggatgaggaggaccgactcgctaagggagggaggtgactggccgggagggctcactgccgaggttgatttgctcttgttccaacttccactacgggactggagccagaaaccgtgtatcctccggtcgaaagcagcggttcccacctcggggcaccgataaggatttgataaacgggagcgaatcgcgcctgtcctggctcggcgcccgggcccttcactgcgggatcgctaggggaggggattgggccctgctcccctttcctggccgtagtcccccctttctcgtcaccgtcgcgcc

SEQ ID NO: 1479 - DNA, 30 bp, Homo sapiens
  chr2:46526744-46526774
  hyper
tgtattttacaactgcgatgcctatcggga

SEQ ID NO: 1480 - DNA, 30 bp, Homo sapiens
  chr2:46768929-46768959
  hyper
gtgtgttccggcatcgccaggcagaggggc

SEQ ID NO: 1481 - DNA, 82 bp, Homo sapiens
  chr2:47167905-47167987
  hyper
atgcctggcccgcatcgcaacagggcggggcggacagcggcaggccagctcccgggaggctcgccgtcggggttggggcctg

SEQ ID NO: 1482 - DNA, 276 bp, Homo sapiens
  chr2:47499557-47499833
  hyper
ggcctaggaaggcctccctgacggcgcccacacacgccccgcggcaccgcgaacacggctgacagggcagttgggcagcgaggtagtcgggaaagagcagggggagcccagcggctccgttgcgccctctgtcggccgccagcctccattgcacgcggcgccgcccacctgcgcactgggaccccggccctgggccgaccaggaaccccttgcgcccgcgccagctcgagccctgttgcacctgtcgtggtcaccgcaagcctctctgggagaagg

SEQ ID NO: 1483 - DNA, 329 bp, Homo sapiens
  chr2:47596114-47596443
  hyper
ttcttcaaggcttcagagcagcgctcctccggttaaaaggaagtctcagcacagaatcttcaaacctcctcggaggccaccaaagatccctaacgccgccatggagacgaagcacctggggcggggcggagcggggcgcgcgggcccacacctgtggagagggccgcgccccaactgcagcgccggggctgggggaggggagcctactcactcccccaactcccgggcggtgactcatcaacgagcaccagcggccagaggtgagcagtcccgggaaggggccgagaggcggggccgccaggtcgggcaggtgtgcgctccgccccgcc

SEQ ID NO: 1484 - DNA, 27 bp, Homo sapiens
  chr2:47596455-47596482
  hyper
cgctagtccttcggcgagcgagcacct

SEQ ID NO: 1485 - DNA, 343 bp, Homo sapiens
  chr2:47596505-47596848
  hyper
cgtcgctgtcctcccgacgcggacccgcgtgccccaggcctcgcgctgcccggccggctcctcgtgtcccactcccggcgcacgccctcccgcgagtcccgggcccctcccgcgcccctcttctcggcgcgcgcgcagcatggcgcccccgcaggtcctcgcgttcgggcttctgcttgccgcggcgacggcgacttttgccgcagctcaggaaggtgaggcgcggattggagcagagttgtggagctgggctgggctggggggcagcggcccccggccctcggcccccgaaacgggcataatagggaggggaccaagaggccgcgctttccagcgtggagac

SEQ ID NO: 1486 - DNA, 348 bp, Homo sapiens
  chr2:47748080-47748428
  hyper
tcatgatgcccagcgcgcccacgccgcccgagaagccgttctggcgcgtgttgacgcacacgctgcgcgggtagccgttggccgtctccgacagctgcttctgcagcagcgccagcgacaccttgttggaggccgtgaggtcgcgcatggagatgagctcgcccgagaggcggcggccctcggcgtcgctgtcgcgggccgcggggtcggcaccgagcgcggccaggcggcggcgcagccgggagcctggggtgatggcattgcgccgggccaggggcgcgccaggagccgggcagcagcgcgcgcagcagcggcagctcagcttgcgcagcatccagttgagcacct

SEQ ID NO: 1487 - DNA, 2182 bp, Homo sapiens
  chr2:47796744-47798926
  hyper
gggtggaaaacaggaaggaaccggtagcccttggcacgtattcttagaggagaaaacggaggctcacaaaggtcagatcacagagccggccagtgttggagcacaggcggcccggggtgagcgccagaggtgggctttcttccctcactgaaagccgggagggagagagagagagagaacgggggccggcggagaagagggcgagacgaaagtaagcaaagggacattagaagggaaggcagagccgagggacgcggaccgagcggccgagcagtggaaagggcggcaggtgaaaggcacagagaggaaagatgcgcgggggacgcgccgctcacctatggttgacaccacggtgcccacgaagtagaaggcgccggggaagtcccagcgcgggcgcagcgcgtcggcgcggacgccggcggccagcgcggcctcgtagtgccggaggaaggcgcgcagctctggctcggccacgccgtgcgcagcgctgaagttgcgcagcgtggcgccccagcgcgcccgcgcctccgcctcgccggggctctcgagcgccgagaagactgtggcacccgccaccaggtagaggccgatgagcgccgccagcagcacgaagcggccggtgtcctcgttgaggtgcgaacggcggcagcagcagcagcagcaggaggggcgcggcaggcggcggcggctacggcggggcgggggccgggggctgcgggaggacatggtccggagctcagccccggggccggggcggcgctcggggcccgggccacgacatccccccggcgggagcaggagcgtgaggatggtggccaggggtccggggccgccgcggagcccctcgccgccttcgcagagcccctcgtcgccttcccagagcccggacagaggggcgcctccgcctcctccccggcgctcaggccacacgcgagtcccgtggcccagcgggtgcccgggcaggggcgctcctctgcgcgccccgacgcctcgccggctcccgcggctccttacccgccgctctcgggcgcggggctccgcagctaggcccctgccgcccggtggccggcgtccgcggggccccgggcctcatactcctctccagacaggccgcgggctgcgggcggggtgggccgtggatcccgggcgcctaggaccgggacgcggcagcaaggcgtggagagagcccccgggggcgtcccatgaggcgttcgggatcggcgcctcctaggtgcgggctgtgcgggcagtcctgctcccgcccccggggctgagctggcggcgtcggcttcagagcctcggagccgagccgagtccggggaagcgctcctttctcagctccagccgaagagccgcccggcagggagaggcggagtcactggcgcccggggcggggtgttggggaggggtgagtagggacaggagggagggggtggagagttgggctgctgcgacgcctcccggtggctctggcggcaccaatgcggggcaccggagcaggtgtccgactgcggtgcgggctaccactccgccggggaacctcgtcttgctcctccctgcgcttcgcctctggaatctctcccttatctcatgccgcggtgaaactttgctcaagttggtggtgctctgaggtctccagggctggaggccgcgcgacgcgaatcgccgacactggattctcgggcgttagtccgaagtttaagttcccttcgttcactcctttgccctggatcgaaccgcagccccaggacgcagcgggttccactggaaacggggaatcggggagaggcggtcgctgggctccgggcgacctgggaacgagggcgtttgctccccctcccgaccgagcgggcggccggcgtcagcaccgcggacagcgcatcggtgccgcagccgcgggcgggcgccgctagggctgccaggggtccgaggcgcgggcaaggctgctcaccccgctgtgctgtgcaccccaaaccttccctgttttcctttctacctcccgtgtgcacccccctacccgccacccgaggcaggtgcggtcgctgaagcaggctgctgacagggcggggacgctgcggaatagagacgggggaggagtcaagcgcgggtagggggccaaggtgccacagggagaaagagcccaggcccggcggactgccgggctcctcgcgccaccccagct

SEQ ID NO: 1488 - DNA, 31 bp, Homo sapiens
  chr2:48009755-48009786
  hyper
aatcttgagaatacaacgtgaaggtgaactg

SEQ ID NO: 1489 - DNA, 36 bp, Homo sapiens
  chr2:48011382-48011418
  hyper
taggctgcacgtgcaccgagacgaagatagaatatt

SEQ ID NO: 1490 - DNA, 30 bp, Homo sapiens
  chr2:48132059-48132089
  hyper
cagggacgggggggcgggggaaacaagttc

SEQ ID NO: 1491 - DNA, 31 bp, Homo sapiens
  chr2:48339288-48339319
  hyper
ttgttcaactcttggccggactatcgcagcc

SEQ ID NO: 1492 - DNA, 30 bp, Homo sapiens
  chr2:48541249-48541279
  hyper
taccgttcctaaagcgctttcaaagcccag

SEQ ID NO: 1493 - DNA, 124 bp, Homo sapiens
  chr2:48982576-48982700
  hyper
gggagggaaggtggcatagagcgatggagggtcctgcatcaagggcgccgcgacgggagcgctgtgtactcacagtcgagtgagaccggccgtggggccggggcagcgcagggcgccgtcgggc

SEQ ID NO: 1494 - DNA, 152 bp, Homo sapiens
  chr2:48982753-48982905
  hyper
cggctgcagcagcagcagcagcttcagcagctgcagcgccgagaaccgctgcttcatggccggcgaactgggcttctgcggcttgccagtgtcttggacggcctctgagtgcggcccgcacccctctccccgccccttggctgcccttccac

SEQ ID NO: 1495 - DNA, 14 bp, Homo sapiens
  chr2:50573362-50573376
  hyper
tccctccccgcccc

SEQ ID NO: 1496 - DNA, 66 bp, Homo sapiens
  chr2:50573484-50573550
  hyper
cgccccatccggccactgagtgaccttctggcaactgacgcccccttcccgcggggcccagccgcg

SEQ ID NO: 1497 - DNA, 329 bp, Homo sapiens
  chr2:50574026-50574355
  hyper
cgccgccgccgcccccgggcgagcccagctcggcgccgcaccggagcatcctctggtacatggcggggcgcccgccgaggggcagccgccgcgggaggcaaagtttggggcgcggggagaggagagggcgcaggggagcgggcggcgcggagtgggctgaggggccggccgcctcaccgcgccagggcacccatcctctccctccttcggacagtcttctcggggtcctggagtccgccgtgcctagcaccccaaacaatccgaaacatagccgaggcgaatgcagctggagaggggcttgtccggaaaggcagccccgggaacagcaa

SEQ ID NO: 1498 - DNA, 283 bp, Homo sapiens
  chr2:50574401-50574684
  hyper
cgagagatactcccaaagagtttcgggcgagagtgcgtgccggcgggtggggggccgagaaattgtttaaagctcctcctggaaggtcctcacttctacatgacagacatccaccgcgaatccactaggtaaatccatttagctttgtgtgcggggactagggaggccacttcgccggcccaacctcctttcaagacagaagcagaccccatggaatccaggcgccccttccctccattcagccccggccggctcgcccgctagcgccagcctcccccgggca

SEQ ID NO: 1499 - DNA, 375 bp, Homo sapiens
  chr2:50574738-50575113
  hyper
cgcctcctgacacttacgcccggcgaggggttcagagggaagagtgcgcccttctgaaggaagtgggaatcgaacggcggaaaggcagctgagaagaagatgcagacgaaggagtaagggagagaaacagaaaaagaaaaagaaaaagaaaaaaagaaaagaaaaaccacacacgctggtgaagcaaggggctctatgcaaatctgcagtctccaaacagcaaatcactgaagctcggatgcaatgcagaggacgagcctatgtaacgagggaggctggtctagcttcccacgaaaatcgccctgctttgcctctcccttgcattctccacgcatcaaagggacacgtgtaaggcgaaacgggaacacctaaaaa

SEQ ID NO: 1500 - DNA, 31 bp, Homo sapiens
  chr2:50629761-50629792
  hyper
aaaaaaggcacaaaaacgaaaggaatgtgtg

SEQ ID NO: 1501 - DNA, 175 bp, Homo sapiens
  chr2:51259537-51259712
  hyper
ttttacctttgcatcgtccccttgcagggggagcctgatcctgggggcggggaccttccgcaagcgcttctaacttgtcaccaccctctcttccccatcggaaagaaagaaagagagagagagagagagagagagagagagagagagagagagaacgaacgaacacgaaccagag

SEQ ID NO: 1502 - DNA, 30 bp, Homo sapiens
  chr2:54013787-54013817
  hyper
ttctcacatctcatcgctacttcgaatttt

SEQ ID NO: 1503 - DNA, 42 bp, Homo sapiens
  chr2:54682462-54682504
  hyper
caaaaatttgaggaaacgtccagtttccgtttcagggaatgc

SEQ ID NO: 1504 - DNA, 20 bp, Homo sapiens
  chr2:54784816-54784836
  hyper
ttcccacaatgccttgcaaa

SEQ ID NO: 1505 - DNA, 1015 bp, Homo sapiens
  chr2:54784958-54785973
  hyper
cgaacttacacctcccctggctgtggcgctgcacagcgccctgagagtgactttgtctgacttcttcccggtggctcgccgggccgccgccgcgtggttggcgccagcgcactggggcagtcgcgcgcgcccaggtgcgggccgcgttacctcagcagacgctagagagtgaatgagccgcgcgggcccgggacccttggggctcttcactctccaggccgtcccgtgggcgcgctagccttttcaagtgatagtaatcggagacttttccgttacatgaggctcaacaaaagattgtaattccagcagctctgtttgggaaggcactaccgcggcgagtccagggcccggccgggggtcggcggctgccgggcggctggggcgaccgcggaccgtgcgggaccggtagggggtcgcgggccggctaggctcccccgcgcccctcctcgtggtatagcctgcatttctaatacaatgctgttatgctaatcaggtgacatcaccgcccagcacacggcgagtggctcctgataaaattacaaaccggcggccgccgcgggcagctgggaggaggtgtgcgcgctgcgcccgcgagctcccgggctcggcaaccgtggcatgcttaggattggccatatttaaaagttctgaagtagaacctgcgcctcctctctgcttctccctcctcctcagtaatttatttcgagcttccaggcaagggccacggaagaagggaaagcaagaaattagatgcctgtgtggtaactcctcgcggagctaaggtggactctcttgcagccaacttcccatcagatcaccctgctggacttgcagaccggaatggggctcgcctaaggagccgagcgctgcggaggctgctgcgtgttggatgggagtgggagggggctggagcgagatttccagggcgcagtcctccggggcgttacgccgggcataatggaattgcagaggacgtctagtatctccgggccgctgtcgccggcgtacacggggc

SEQ ID NO: 1506 - DNA, 460 bp, Homo sapiens
  chr2:54951618-54952078
  hyper
tcttggattgggtgacttatgcgaaaaatctgtttctttcttcctcgctctcgcttcctggatatagactgtcaatttcggatccaaagacggcgatggcagagctcacccgggttgcctgtcaaatcaaggctatcgcagaataaatcccgccgcctgccgcgaagccccggcgcaccgcaaacttcagtgagcgaactgggtgatcgctgttgggatatgcagattcctgatgtaaaaggcggggtggcccccccgagagcctctcccgggggccggagcccgcaggtgcagtgaggcgcgcgcgccggtgccggcgcccccagagccgccttgcccgggtagagggagcccggcgcccggcggggtctggcggccgcacaccggcggcggcggcttgtctgcggcggctgcagcggatgatggtggcggccggcccgctgggctgtgcctgtgtgtc

SEQ ID NO: 1507 - DNA, 30 bp, Homo sapiens
  chr2:54952331-54952361
  hyper
tggtttacaacacccgcgagcacagccaaa

SEQ ID NO: 1508 - DNA, 30 bp, Homo sapiens
  chr2:55496447-55496477
  hyper
agagttgctgtcgccgctgggggtgggact

SEQ ID NO: 1509 - DNA, 337 bp, Homo sapiens
  chr2:55509212-55509549
  hyper
gatcagggagggctgtgagatcgcaggcgccgccccgcagcgaggcgcctgttgagagctcccgcaggccttcgcaagccggagccctcagcggacgatgttcagggactagcgggcgaggcgctcagacagggcggacccgccttcaccaggcaccagcactacgctgccggcgtcggccgagatccctctgggcagttccgcctcaggcttcggtctgcgcagccgcgggaagccgtgccgtttttccgcccatcgccacgatagcggctccacggcgggcgcggagttgggagcggcgctcgagcagcggctcggtgccctggccatccacact

SEQ ID NO: 1510 - DNA, 30 bp, Homo sapiens
  chr2:55509764-55509794
  hyper
atgaggttactgcacggaaatctttactct

SEQ ID NO: 1511 - DNA, 233 bp, Homo sapiens
  chr2:55646607-55646840
  hyper
ggctaaatgaaatacgttaaacagagaccacgttaaggataccgaggcgccaccagactcgacctcggcgttccgacctctacacgttccacccaccgatgggcatggagccgctttcgacccgcggagcctccactgcccgcagcccctcagtaccaacaggcagggctcgccccttccccccgagcagacaccattcctccgccgccctcaagcctcgcctccagccccct

SEQ ID NO: 1512 - DNA, 145 bp, Homo sapiens
  chr2:56149728-56149873
  hyper
cctccccctcctgaaccttctcggtagccaacgaacgaggcagcaaagacgtaaaaactgctgtagaattgcatttcacgttactccatcctgctacgctgtttacatacaaaagacattcagcgtgcattttatactgcaccta

SEQ ID NO: 1513 - DNA, 295 bp, Homo sapiens
  chr2:56150240-56150535
  hyper
cacgcctttctctgcgcacagctttgtttaaaagtcccaggttgtgtggaggggcagcccaaagcgactgattctcttttgtcttatcagtctgggtccccgacacgctaccttcggtttcaggctgcctaggaccggaaccagggatcgcaccgcagcccaaggtaccagtttcgggcgggcggcctggcccggcagggagatgaggtcccctttcttaacagcaagctaacgcggcggtcccctggagctgctcagcgtcccagcttctaaccagctcctatggaatccaggt

SEQ ID NO: 1514 - DNA, 9 bp, Homo sapiens
  chr2:56150681-56150690
  hyper
cgaggctgc

SEQ ID NO: 1515 - DNA, 47 bp, Homo sapiens
  chr2:56150910-56150957
  hyper
tgggtctgatctggcgaagtccggcagcggccgcggcggcaggagga

SEQ ID NO: 1516 - DNA, 30 bp, Homo sapiens
  chr2:56151164-56151194
  hyper
cgccagagaggacacgttgacatgtgatgt

SEQ ID NO: 1517 - DNA, 30 bp, Homo sapiens
  chr2:56412909-56412939
  hyper
tagtggccgggaaccgccctgctggcgagc

SEQ ID NO: 1518 - DNA, 132 bp, Homo sapiens
  chr2:58273537-58273669
  hyper
aatagttagttgctcggcgagagctcggtaaggactagccatttggaagctcgtagtactcaggttgtggtacaggagatctaacactcctacacaaatgcatgtcgtgcttatttcgtaccaaactggtct

SEQ ID NO: 1519 - DNA, 30 bp, Homo sapiens
  chr2:58274509-58274539
  hyper
aggtacccagaagccgaagggacacccctg

SEQ ID NO: 1520 - DNA, 30 bp, Homo sapiens
  chr2:58655448-58655478
  hyper
gggactcgagacggcggcaggttcaattag

SEQ ID NO: 1521 - DNA, 102 bp, Homo sapiens
  chr2:58776939-58777041
  hyper
aaaaaaaaaaaaagaaattaacattagggataataaatagatcaatatactagggttaatggaagggacttcatggaaaagaaaggacgtaaatagggcctt

SEQ ID NO: 1522 - DNA, 30 bp, Homo sapiens
  chr2:60777404-60777434
  hyper
gggggtgtcggccgcgcgcccggtcgcttc

SEQ ID NO: 1523 - DNA, 176 bp, Homo sapiens
  chr2:60780328-60780504
  hyper
ttactattattgggttacttacgcgagaattcccgtttgcttaagtgctggggtttgccttgcttgcggcgagacatggtgggctgcggggcgggcggcggcggcggcggcggcggcggcgggcggacgacggctcggttcacatcgggagagccgggttagaaagaaggagactc

SEQ ID NO: 1524 - DNA, 786 bp, Homo sapiens
  chr2:60783807-60784593
  hyper
gcagcgacgattccccgacatatatttaatttcaccatcataatatgcccagggtgaaatgggaagtgccctccgctcccgcccctcccccagccagatttcacccagtccagaaaaccacggctgtgtgtcggcatttgatccctcctggtcgtcgacccccctccccggcccctggtgccctcccctagggcgacaacccctccctcagcactgctggatgctcgctaaagagcccgaaagtgggggaggggagggtttgtatgtgtgtttaaagaaagatgtgtcgttttaagagattttaaaatattacgtaagtattgattaatgatgcaggtggttttgtagagggggtgaaaggtcactttaaatgcgcacacttggatacacaataagtatatttacctttccagaagtggcttttagaaagtaataaattatgacaacgttaaaattattttctggccgttcagttaacttcgtttggggctgtagagctgttgctgctcccattgaaagggtaattacgttccgtgggctctttcccaaacctttggtgacgacactgcgtgtaaactccaggccagcagacgacccctccccttccctcctccccctttttatcttgcccgcggaggagacgccccaggacttcctgcagtatatattctgcctctgatctccgtacttaatagccaagtcctagtttatgctttataatgtgttgacaagttttctaacagactttctgaaataatgcacatatattcacgtcggttagaaacc

SEQ ID NO: 1525 - DNA, 30 bp, Homo sapiens
  chr2:60784832-60784862
  hyper
tacagtcccagccctcggaccgaggatcgc

SEQ ID NO: 1526 - DNA, 295 bp, Homo sapiens
  chr2:60796349-60796644
  hyper
gcccgtgggcagcggcggcagcagctcaaaagaaattgactgactggccgcttgggcgcatttcaatatatggaaatgaccagaggcttctgcaataaatcagcactcaacactttgtcatttttctagttctgcttcattttcctattttcctcttctcctcacagaagcctcatttcttgcattttgccttgccgcgtctcttcccacttccaacctacaccctctccaaatcttgccccatcctctccatcgctcccaaccaccgcgcgcccccacccccgacacacacaca

SEQ ID NO: 1527 - DNA, 143 bp, Homo sapiens
  chr2:60796703-60796846
  hyper
cccctgtaattggaaacatccggtctacgacgattttttccttttctttccctttcaaaaaattttccgacaaaatcaggcagtatttgctgccctgcctcggattatctgagacaagaggcgcccaggatgagctcatgtaa

SEQ ID NO: 1528 - DNA, 249 bp, Homo sapiens
  chr2:60797078-60797327
  hyper
cttgtgtagagcctccggtgccctccacctaaccctgccccaatgcctcgggtcttttttgaactaatgctgtgcgtctccgcaatctgcaattactttggatatttctcaggagctaaacgcagcctgaatttcgtggcgcgtgcaaaaaaaaaaaaaaaggcgaaattaacaaaaccccaccaccgcgctgttgtttttttctggagtttttttttttttttttttttagttcggttcagaagcaaa

SEQ ID NO: 1529 - DNA, 99 bp, Homo sapiens
  chr2:61109420-61109519
  hyper
acagttgtacaaaatgtgtcacggctttaaaaatcatccgtggtattttaacacgaattagaaaatccgtggtattttaagtgttaatgttgcttcgac

SEQ ID NO: 1530 - DNA, 78 bp, Homo sapiens
  chr2:61109818-61109896
  hyper
aaaaaaaaaatgtagtttttactgtgagataaagctcaaggttcctaatctgacgaatagagacgttgaatccccctt

SEQ ID NO: 1531 - DNA, 30 bp, Homo sapiens
  chr2:61110126-61110156
  hyper
acgggagagccggggcggggggataaatca

SEQ ID NO: 1532 - DNA, 457 bp, Homo sapiens
  chr2:61175642-61176099
  hyper
tgctccactgcgccccgtcgagtttgcgtgttttagggagaaccacatacctactgtcaggggtgggttgttttggtttttttttggtgaaggaaaagggttatacaaaaggatatgtctggaaaagttatgaatacatcttgtttagggtgacatttcaatataataattacaaatcgatgtgcataataaaccgggacctttcaatgtttgttagcccagcttgcaactaataataccgcatgtctttttacatttcagattttttagggacacaggcttgtttttctcacaattcgttagagattttcttttatgtcacaagataaaaattaagaaatagaggttaacgctgtaaaaggtcaactaattccaagttttaaaaattgggcgtaatcagaaattcagattcataagaactgaatcctcttcattttcttgtcggaacaactcttcc

SEQ ID NO: 1533 - DNA, 48 bp, Homo sapiens
  chr2:61991192-61991240
  hyper
atgttgggaggaggttcgaggtgggcggggtgacggttttctcttgga

SEQ ID NO: 1534 - DNA, 100 bp, Homo sapiens
  chr2:61991616-61991716
  hyper
cctcacccataagtaacgagtcgccgtggtcaaacaaggccctcctacgataccaatcgcgtggcgggtgtggtactgccgaacccgaggaatgagaaag

SEQ ID NO: 1535 - DNA, 30 bp, Homo sapiens
  chr2:62422969-62422999
  hyper
atttccaggggggtcgccttcctagaggcc

SEQ ID NO: 1536 - DNA, 30 bp, Homo sapiens
  chr2:62424204-62424234
  hyper
ccaggctgctagcccgagtcgtgggggtgg

SEQ ID NO: 1537 - DNA, 587 bp, Homo sapiens
  chr2:62732952-62733539
  hyper
acgcggagaccaggcccggccgggggcgggaggccgccagcgcctcagctccctgtccggcccggcccctcctccaaggcgctctcccgcactgcggagaactggctgaaggcgacatcgccattttaggtacgggcaaattctggacgctccaaaatccacgccaagccctcggcaggccacaccccctgcaccgggcctcggtcactcacccggaccctcattggactctggaccggtccgattggaatcactgaacacggcccggctgaagtttcccagccgctggcgcaccggatccggcagctccatgcctgggcctcagtatccctcaccccctcagacacgggctagtctgcgggcgctccgaggctccgtggttcccacggcaaccgggcggcgcgaggccggcgggacccgggagcgcgcggggctgcccggctgggctgggtctcgtccggagcccgcgcaacctggaagggaccggcgcgctcagagcgcgttccaggcccagggagccgcgcgcctcggccgtgtacaaaacggcagatcccttagttctgctttgagctcgaccatcctaaaaa

SEQ ID NO: 1538 - DNA, 274 bp, Homo sapiens
  chr2:62798172-62798446
  hyper
tagtgaaaaatcttgtccttgcgactggtaggtacagtcgctgtcaacccacagttctcccaaaaggcgaggtccttccttcggctcagcctgctccctctctcctcgcctccccatctctaggacgcgggaggtgggagccactgcgctcccggagacgccgcccgtgccgtgtcaggttgtccccgagtgcgcttgccgtgagtttctgccgcgtgactcacccgtgtccctcgctctcagccatcggaacagcagaagcgggtcggggaga

SEQ ID NO: 1539 - DNA, 182 bp, Homo sapiens
  chr2:63275326-63275508
  hyper
cgcctcaatcctctgcgctgctttcaagaaactttcatcccagtctctctccctctccactctcctccctctccccctctcctctttcttttcttaatcctggggttttatgggctgagcgttaagaaaattcgcctgcaatttgggattagataaatactctaattaggaaaaaaaaaatc

SEQ ID NO: 1540 - DNA, 409 bp, Homo sapiens
  chr2:63275877-63276286
  hyper
ggcgcctttcctcggaacctaaggaaggggtatatttcgttgctttctttaaacctcagcacgatcacagtggctccgagccgcgggcggctgaccgcgggcctcgcgggctactcctggtaggggcctgcgcgagcctaaggtgtgtccccgcctgggttagcgctgcgctctgcactgtttcttttcctcttaaagcttctttctcactcactctctccctccttctctctctcattttttccccatttctctcgttcttttattcagctttctctctttctctcccttttgtgaatgggccgcggtgtctttgttctgtagagaagcgcccgtgtcgctgacttttgtgaaccagagaaggatcttgtaaaacctccttttctccttcgtacgcccccactcccac

SEQ ID NO: 1541 - DNA, 30 bp, Homo sapiens
  chr2:63276587-63276617
  hyper
ttgatgagcggcggccgcggccccttttca

SEQ ID NO: 1542 - DNA, 30 bp, Homo sapiens
  chr2:63277312-63277342
  hyper
gtgctcttcccaggcgcgagagtccggagg

SEQ ID NO: 1543 - DNA, 388 bp, Homo sapiens
  chr2:63278463-63278851
  hyper
gccgcggggccaccccggactccgggagcgcgttggttacccttatctccccctcctcaaatggatcccggcttccccggtccccagcaggtggtcggggctgtgggagcggcctggctcccctcttggtgagccgaggaccccggggcgctgtcgcggcccgcagccccctcccccgcctcctccgaagtaaccaagctgaagtgctaagtttggagaaagtctttgaaaactcacgctgcagcttcgcaaagccgtcgcagctttgagtcccattttccttcggccctagagccctggctgcttcccttccggtccccttcctacaagctggactccctcagcccaggtcttgggtcccagaagacgggggcgggaacggggctgg

SEQ ID NO: 1544 - DNA, 614 bp, Homo sapiens
  chr2:63281019-63281633
  hyper
gtggcctctcaggctcggccgcccgagggagtttcttttattcccagttcggctttcttttgcgaaggccgagatctgggcctgccaggggcctgcccgagtcctctatcgcgggtccacgtggccaccaatgacccgcggcgcccccgcgtgtccccgcagccactccgcggaagcagcggcgggagcgcaccaccttcacgcgttcacagctggacgtgctcgaggcgctcttcgccaagactcgctaccctgacatcttcatgcgggaggaggtggcgctcaagatcaacctgccggagtctagagtccaggtgcgcactccccgggctccagggtctgggtaggggagctgaggctgctcggggaaggtctaggaaggctcttgagtagttcttgaggagaccatcctgtgggggtgggcttacagactgggcagccgctctcggactccccctagcgctgggccccagccaggaaagggggcaaaagttaaaggaaatggcttagagccctggattccgcctttagccctagggcgccttcggtgtcggtatcgaaagtactttttagaattgccggaggactagggaagctcccgaatgtaaagcgcc

SEQ ID NO: 1545 - DNA, 814 bp, Homo sapiens
  chr2:63284984-63285798
  hyper
cttctgattccagcccgaggtcctggtctcggggggctaaaagcgagggaaactccgtgttaataacccgcgtgttaatgacctgcgtgaagctggaggccaaaggatgaggcgggaggacttggcaagagaagtccccagaaactttcgcttagggagtgtctccccccacccccaccacgcccctccgcgtcagcctggcctcttcccccaggcgttttgaccccgcatcccccctcgccatccaggacagagacaggtgtcaggactcaattcccgaagcaattcctttctcttcagaggcaggagcctggcactgatttcttcaccctaattgcctgcaccagaaagaagagggggaggggaagagggtcgggaggcgggaaaggatagctctgtaatgctctcagagctgagccaaaaaggaaaagaaagcaaaacgacaaaaaactgatccgtgtcctgcatgttggcagcagacaaccttccttgctgctgagctgtcccgggtggcttcaccgcggctggggaatccgagccattccttccacgtgctaagatgtccctctaagccctcagctcctgccagaagtagccaaattacctttcttcgtactgtaaacttcctttaaaacatacaaactcataacctggaaaagtcgacaaggacgcctttcactttggcaggggaagaagacgactggcttgcatctgggggtcaggaaggacagttccatctccctctgagggaagacggggttgaggggtaatcctcccccagaaaatgcagagcctggaactgtccagactctgg

SEQ ID NO: 1546 - DNA, 226 bp, Homo sapiens
  chr2:63286358-63286584
  hyper
gcactggcctgggcacccgggctgcagggccttttgggccctcccctcagtgaccctgcctgtagcggccccagggccgctttggctcaggcagcagctgccaatgccgctcgaggcccgcggctccctgaggcgagctctgcggggcccagcagtcctcttggctgctaaatggaacgaaaccaggagacccggctttgcactcgtttggacaactgtgtggcct

SEQ ID NO: 1547 - DNA, 54 bp, Homo sapiens
  chr2:63286693-63286747
  hyper
cgggaggggcagatgcgacccctgggccggcccctcgggggcgtctagaagctt

SEQ ID NO: 1548 - DNA, 293 bp, Homo sapiens
  chr2:63287082-63287375
  hyper
ggcggcgggaacgcggaaggttccctccacccccaccccaacccccacccccacccccgggccggccacctgttgacaggcaggttctctgagaaccgacttcagctcgcccttctgtccaggaagtttgttcggtttgggtttgggtgttcgtgacacaatcggagcaattagaattgaagcaacttcaggagatttagcaacccgcgaaaatttagcaacgttcagacgtcaacagttttctttctttgagtggtcaacgaaaacttgacgttttctactcataccttgta

SEQ ID NO: 1549 - DNA, 30 bp, Homo sapiens
  chr2:63815903-63815933
  hyper
gactactttgcaatcggcgcagagcgcagt

SEQ ID NO: 1550 - DNA, 30 bp, Homo sapiens
  chr2:64067525-64067555
  hyper
aagagaaaagtaaacgcctatcacagcagc

SEQ ID NO: 1551 - DNA, 30 bp, Homo sapiens
  chr2:64247015-64247045
  hyper
aaaggtcacccctccgcaacaacccagttc

SEQ ID NO: 1552 - DNA, 325 bp, Homo sapiens
  chr2:64455370-64455695
  hyper
cttcaaaagcaagcccgtacaaagcccggctccttccttccttctaactccctatcaggaagctccttcgcccctcaaatcccttcaggggctttgaaatcctgggctcccgagcccaagctgggcatgaatattcatcgggggcgtggccccgccagcgcgcagggctccaagcagctgcgactagcggaaagcgcgcgccagctgcacgcagggaaacagttctcattttgtgtgctcggctgactgcacgtccagcctcgggccagctcgagacggccacattgtgagtctgtgggaggggttctaccgagacgaatggact

SEQ ID NO: 1553 - DNA, 15 bp, Homo sapiens
  chr2:64682188-64682203
  hyper
ggggcctgccctcct

SEQ ID NO: 1554 - DNA, 183 bp, Homo sapiens
  chr2:64836249-64836432
  hyper
ccggccgtccctcctcgcgcctctgccccgggggacgcacgaggaccagaaagccgagggggcgcagggcctgctctggccgccgggcccgggatgccaggatgcggggggccggggctgccggtgctcttgggggcagggggaagctccgctccctctacagaggacaaccgccccgccgcc

SEQ ID NO: 1555 - DNA, 162 bp, Homo sapiens
  chr2:64836470-64836632
  hyper
cggccgctcccccggagccacgcgagccggtcgtggcggctggacccgagcctgggagcctgcaggcggccgcgccgcgctgcgctgccgaaccgcccggagccgcaggtccgccgcccgcccgctcgggggcgccccagcttccggcctccggcggcttcc

SEQ ID NO: 1556 - DNA, 86 bp, Homo sapiens
  chr2:64836746-64836832
  hyper
cgcggcgccgcgcctgacggtcactctctctgacctcctgggcccagtcctggggccaagagccgcatccccggggaccttggtag

SEQ ID NO: 1557 - DNA, 341 bp, Homo sapiens
  chr2:64994401-64994742
  hyper
gttaaaaaaattccccgttttaattactgcaaatgttaacgtgactaggtaagaactatttttaatcacctataattacacggttagtgtacagctaaaagcacgaagtcagtatccaaaagccacaattaaaaaaaacaacaacactaagacaaactttgcttttgtttgaaatgtgcaatatttttcctttacatgctctctcttcccgaataaatgctacgtttagaattgctagggttccgcagatacagaaagccagctagaaacatcccttccctgaattcgatgggcttacgtcttacccagcttgagcaaattcttggcgaatatttcatgaa

SEQ ID NO: 1558 - DNA, 30 bp, Homo sapiens
  chr2:65215479-65215509
  hyper
ctcaggcctgggaacggaagaggttaaaat

SEQ ID NO: 1559 - DNA, 30 bp, Homo sapiens
  chr2:65216103-65216133
  hyper
gaggaacgccgctgcgttctaagttctccc

SEQ ID NO: 1560 - DNA, 1161 bp, Homo sapiens
  chr2:66652772-66653933
  hyper
agtggaagcagaaatcgctcttccgaattatttaggaaagccaacacgcaattatgcaaaagtgtagataaggttctccgaagcagaaagcagcagcgcgggacgcgggtttccccttctctggcgagtaccagtgctgggaggctgtttatctgtgtcctggtgctgggacaggacgcaatccaattccagctctcggtcggttctgccgctctgtccccggttctgcagcgcactctcttactccctctctcagtagtgtccccggctgtctcctttcctccgtctcccggtcctctcccagcgtcacccctcactacctatacccccgcgccctacccccacctggggcgctgggttccacgcctcctcaagaggtgtgagcgcccgcgctgggcgcccgtagcgcggccctcctgtgtccccacttccacccggcggccgctggaagccgggagaaggaacggcaccaatcccctcacgcttctcccaggacgtctgatcccattagcgcacctgaaatcacaaccttggccacaaatgcgcgcttgttgcgacccctccgagtgggccgccgtgccgcaggagccactctggggccggggtccccaacctctcccccctgcaagtcctaaaaggaatcgtagagcaattgatctcggaggagatgagcgcaccccggggctcattgctgcccctgaggaagagccgtccaggaacggaggcgagaagcttccagaattaggccaagaggcaggtggcggggtgatccggcgtccccgagtccagctggggagaaaggcgccctcggatgctcagccccaaagcagcagaagacagaagccggtgcgccatcgtcgctgcgccccagtccgcgggtcctcgcgctcctgctccggctcccgggctgccacccaccgctgcccaagcctgaccaactcccaactccctccggcacaggctgaggcgacccccaaagagaaaaataggatcgcagtcaaaactggcggggatggggcacactggtgggagaggggaccttttcaccttttgctcttcccaggggacacagtcccccaaacctacgtccctgcgccaaaccaggtgcgagcaaactccgcggaccccgcagctggaagtgcatcctgccgggacccccac

SEQ ID NO: 1561 - DNA, 246 bp, Homo sapiens
  chr2:66660023-66660269
  hyper
acagggtgccagtacggagttgggggcggggaagggtgcagtgcaggcggctgggaaggctcatctgctcggctttatggaaacgctccactgttgggggcaaccaaccccgcgttgactcctgcgaagtgctaaaggaagcgatagatgtcgcctaaggagactacggacgctcggtggaacctcattccagacctatgttctcatgctcgccctgtgtctcctgctcctcggaagcccactcta

SEQ ID NO: 1562 - DNA, 275 bp, Homo sapiens
  chr2:66660614-66660889
  hyper
tccccgcagccaatgcgcggcggcctgggcgggggcgcctcctgattggccgagcactcctccacggctgcctaccgagatttgggtgagctcattttccagtcgaccgcagggggagttttctgcgaggtttcagctggagggagggggaaaaatcctctcggagccgagcgagctgcgagccctgcttgtggatgtgaggtttccagccactggtagagctgctgcggctgagccatctcggcagatcagagcccagcggacagaaatataaa

SEQ ID NO: 1563 - DNA, 31 bp, Homo sapiens
  chr2:66661598-66661629
  hyper
tgggggagtccagacccgaagtgacaaaatg

SEQ ID NO: 1564 - DNA, 30 bp, Homo sapiens
  chr2:66662749-66662779
  hyper
tgctgtcttggaaacggagcgcttttatgc

SEQ ID NO: 1565 - DNA, 715 bp, Homo sapiens
  chr2:66802663-66803378
  hyper
agggaggcggaggcgcgggagtgggggaaacccccttattatccagtgtcggaactggctcccttaatctgatgcttaaatatttgatgtggaaaaattacccataaaattagttactaacaatttcaaattgaaatcacttatcgaattataaacgcattaaagctgtatggatggtattaggagttcctcgggaggcagcgggtgtctccttgaagtgagccaggcgggcgagtttcgccccggggaaaagagcccccagccgagcccgggggcaaggccgggagggcggcgctgcaacctgggcgcagggtccgggtcagggggatcgagcgggcggccgggtcctggtggaggctgcggctgcttcggctcgcgggggcggggagaaggggaggggaaggagccttggtgggaggctccgaccccggagcagaggcgcctaccagcaaacttcgtagtgaagtcgaaggattctgaaaaggaaaaacgcaagccctgccctccccctccctctcgcgtctcccacgcggcgtgcagacttcgcgctcgactttgcgatcggggttagttgctgtgtgcagtgtcccccaagtctgcgggaggagcggaagggtataggctccagtcctggggttgggcccggctccgtgccccgagaggaaatccagcgggcaactgcgcagagctccagccaggacgtgctacccctgag

SEQ ID NO: 1566 - DNA, 30 bp, Homo sapiens
  chr2:66803682-66803712
  hyper
agactttgccacatcgggggccccagactc

SEQ ID NO: 1567 - DNA, 30 bp, Homo sapiens
  chr2:66804130-66804160
  hyper
aggtggccacggtgcggagactacaggagc

SEQ ID NO: 1568 - DNA, 114 bp, Homo sapiens
  chr2:66808519-66808633
  hyper
gtgtaaagacaaaagggggagcgatgcaggtctgtttgttttctttccccgccgccccactgtcccttttctcgtctccccgcgcacctccccagacgccctgccggggtggct

SEQ ID NO: 1569 - DNA, 591 bp, Homo sapiens
  chr2:66808726-66809317
  hyper
cgccggccggacgtcggctaggctccttctccccgcgggctgggggccctggggctctgcaaggctctggctccgaacagattgcgcctcccgcctggctgccagtaggaactggggtgggagccgcgtaactaacagttgcgcgcaggaggcgagccccaggtgtgagcgcagaggctctctccccagcccgcgggtctgggaacctttcaggacgcctccctccccaactcctacccatgcgtctgctccctaggccgagcccccctcgtgaggttttaatgaccgcggacgcaggggagcccgcacttgagcgaggaccgacttctctggcgggtccacgctgctcgcgcttgcgtccgcgggtagcgcgctgtgcccgggtcagggggcgagctgcgagaagtaggaggggtcaagacccccagaaatccctccatgggcacacacacaatcaagaatagggttgagggtcttgagaggtagaactaccctaggcagggcttctccaactcggcctttggaccccgcgcgcgcccaagggcgtgcccaccgcggaagcacagatcatcttcccgggactgggtctcc

SEQ ID NO: 1570 - DNA, 147 bp, Homo sapiens
  chr2:67624293-67624440
  hyper
acctgactactacccgaacaacccccaccagtctggaggattttgagcctagacactcctccagagcaggctcctgtcccggctgcggaagtgcgcgcgccctcggcaccttaacagttccgcccctctcccggacccagccaatca

SEQ ID NO: 1571 - DNA, 192 bp, Homo sapiens
  chr2:68546324-68546516
  hyper
cctgctgccaccaggcgccccgcactcactcgacctgcagcgtgctgggtttaatcttcacctcaaccttgtaggaggagccggtgagcagcttgatggtgcggttctggccgaagcgctgcccgtccaccttgtaaaagaccgggccgtcattaggctggatgcgcagcgcgatggagaggcgcacgaggc

SEQ ID NO: 1572 - DNA, 804 bp, Homo sapiens
  chr2:68546552-68547356
  hyper
cggcggctccggggggcggaggacagcgccggctgcggccgagtggctggagcgcgaggggcggagaggaagcgcggggagggtgagggaggtggtggagctgaggctgccgctaggaacccgcgccgtcgccgccgtccgcccgggcttttgaggagcagctccttaggctgtggcccccctccccactcggcgaggaagcgggcccaagagacggctccaaggccgcgcgcttccccatcccccgctccagtgctgcgccctccacgcacccgaaggctcgctctggcccgcaggccgccgcgcagatccgcgcagctgggggcgagggagttaatcctgtttacgcaccacaatccccttcagctggggaagcggacatttaggctcctcctagaacagccccgggcaggaggaggagaggtttgggaggcactgggaaggcgctggagttaagcgaccactatgccaaggagcgagacccccggaatctggataccgcctcggccagctacgtgaggtggacactgctgctcgcggatccggcgccagccaggcgggaggaggctgagggggggtaaagggaggcgggaaggggggacaggaaaccgctagccggtgatttaaatttcaggaaatatgagtctttccaaagcttaggggaaatggccgaggaaaggcgcaattccacgtgatggagccacgctggatgaggaatggatgcaagaggaagaaaataaccatattcaaggagctacatcttcttgtgggtgtacatttccattatacgtatgctcgtcccaa

SEQ ID NO: 1573 - DNA, 30 bp, Homo sapiens
  chr2:68694333-68694363
  hyper
tctacctactaggccgcggtagcttctcct

SEQ ID NO: 1574 - DNA, 30 bp, Homo sapiens
  chr2:69220161-69220191
  hyper
gccttggccaggggctagaaagggagatga

SEQ ID NO: 1575 - DNA, 784 bp, Homo sapiens
  chr2:69240068-69240852
  hyper
acaaggaaatttatacgcgaagcctggaagcgcccccgcccccgacgcactcccgcgggtcccacgcgtgctttcgccgcctttgtccacaaggtggcagcctttgaactttcttccccgtaagaacgcgaaaggggggcagagaggaaggagagaaggcaaagcactgcccccaccaagaacaatttgaaacccccccccccccccatcatatttaaaatctgggacaaagaaccgtcgggacggaactccttccattgcaaaagctcggcgcggcctcgggagctgcccggcggccccggaccgaggcagccctcccctttaaaagaagcggaggacaggattgggatccttgaaacccgaaacccagaaacagcatcggagcggaaaccagaggggaaaccttgaactcctccagacaattgcttccggggagttgcgagggagcgagggggaataaaggacccgcgaggaagggcccgcggatggcgcgtccctgagggtcgtggcgagttcgcggagcgtgggaaggagcggaccctgctctccccgggctgcgggccatggccacggcggagcggagagccctcggcatcggcttccagtggctctctttggccactctggtgctcatctgcgccgggcaagggggacgcagggaggatgggggtccagcctgctacggcggatttgacctgtacttcattttggacaagtaagtgccgcgagttgtcccccccaccccaggctaagcgggcgaaaacgctttcgccccgggccgggc

SEQ ID NO: 1576 - DNA, 340 bp, Homo sapiens
  chr2:69533477-69533817
  hyper
ccttctggctggagatgcagccgtgccagcttcctgaattctctcctcaatgtcggctgcgtggggatttaaactcatttaaactggtgggcctgggaccggctgtatccatcaaaaaccaggaaggggagccggcgcggggcgtgcacagctgtaggagggctctctgtgtgcgaatccaggccctgagttcgcacgcccacctggggcggtggtccagccgccaggaacccgcttcccagccgctccccctcacgcaggaagccgggactctgggcgcagctctcccggaccacggccacgtcctggctccagctacggaggcagaaagaagccacag

SEQ ID NO: 1577 - DNA, 31 bp, Homo sapiens
  chr2:69614637-69614668
  hyper
acctggcagggaatgacggaaagagaaggat

SEQ ID NO: 1578 - DNA, 274 bp, Homo sapiens
  chr2:70313347-70313621
  hyper
gccgaccccaatttctcgttggcgacgaatgctaaccacgtgtcgccattttgtgttcaggaaacatggcggccgccccaagggtaaggaacaggggaggcggagtagcgccacgttagccgctttccctgagagattgtgaagcacgttgcgcacggggccctttctggtctggcttagcccaaggaggaaggggaaaaggcagaaatcacaactcataggccagcgtcttgagcgacacttcctcagcgggaagaaccggcaaaaaaggcct

SEQ ID NO: 1579 - DNA, 167 bp, Homo sapiens
  chr2:70351403-70351570
  hyper
tcccatctgggaaagcaggcacggatgcggggacatttccgcccgtcaccctggcaaagcgctcgcagggctggagggacagagttctcagatccaagtagagaaaaccgggaacggttccggctctggggactgacattcatcgcggcagtttctggtggcaaaac

SEQ ID NO: 1580 - DNA, 296 bp, Homo sapiens
  chr2:70369035-70369331
  hyper
gtgcccttccagaccggctctagtgactggcggggaagaaggggaaaaagaattagtgtatctggacacaacacccagcatgtgctaggcagaaactaagtgtgcgaagcggatcccgatgtacaaaggggaaaacagcggctgggaaagcctgagccacgggctccaggcggccagtcgcggtcctcccggcgcgtgccctcctcctccccgacctggccggagctgaccggggcgggtgtaggcccgggggcgggagggctactggatcccaggtggggcgggtgtaggcccgg

SEQ ID NO: 1581 - DNA, 31 bp, Homo sapiens
  chr2:70418190-70418221
  hyper
acgcgcggcaagtggccgcccacctgagctc

SEQ ID NO: 1582 - DNA, 30 bp, Homo sapiens
  chr2:70475906-70475936
  hyper
gacgcctcagactgcgcaggcgcaagtatt

SEQ ID NO: 1583 - DNA, 257 bp, Homo sapiens
  chr2:70485365-70485622
  hyper
tgccccgagggcgccgagctgcgtgctccgccagataaaatcggtaggcgagaagggggcggcgcgggaaggtgctggagcgcgccccgcgccgggcggccgctgcgcagtgcgcccagatcccacagccgcgacgcagtccagcggtgcaggccgagccagctgcgcaggtcgcgctttcccccattcacacttcagggcggctttcagctctggtcggaataggactgtgcattcccaggcgtggagaggtgccc

SEQ ID NO: 1584 - DNA, 30 bp, Homo sapiens
  chr2:71357243-71357273
  hyper
ccgcccccgaccgccgttcccacgctccct

SEQ ID NO: 1585 - DNA, 30 bp, Homo sapiens
  chr2:71357785-71357815
  hyper
gctgacagccatggcgccgcaggtctggcg

SEQ ID NO: 1586 - DNA, 1134 bp, Homo sapiens
  chr2:71453494-71454628
  hyper
aagagaagtggcgaacgtctcccaggcaaatgaggcatgaagaatgagggctggagtcaagggggagatggagcaagtataaaaaggcagaggacgcgcaggggccgcgaataggggaagggcacgacgcgcaatccctcccgctccagcccggggagaggggcgggggatgccgcgcgggtcaatttgcctagcattgttgcacctgggtagaaatgggactcaggccaagaattcggttcgagtgttaggaggacgctgaggggagtcaggaacttgggtgggagtcggggggaaacagagcacctgtgcgggggggaaagggacgaaaaccccctattgctcccgaggggcaggggctgaccccagcggacgccccttttcgccgatggccgcgacgtgggaccccgcgcgctttccctccctacaggagctcgggcaggcgcgtgccgcccttcacagccccgacggcggcagaaagggaggcgcagggcgcccccagagccgggagaacggcgtttccctcgagtcctttccccagcagcccgggcacccgagcccacctgggctaaccagaagcccctccttcagatcgtactctgccactcctccgagagcttaagccgttgccgtagaggtcgccgtcgccacaacagtctcggcctttagtaccaaaacgtgaagcacagcacccgagaagcgccactaccacttgccaggttatctcttactgcacactgcctcctcgccccgcccccgaacccaagccattggttgccgggcaccgccccattcgtctattgggccaaagaagatgccgttcggtcacctagaatggcatatgtggtttttattggtctaaatgtgaagcagtgcccgcccactccctcagaagtttcagcttctgattggttttaatgtctgtcttttctcttccttcattttttttttcctgtggtggaacacctccttgagggagatgccggctctgattggctgaaaggacgctacgctagcctgggataggcattgggccaaggatgcgcccggcccactcgtgggggaggagaccaaggcgccgcactctgggtttgtttacacaggctcttgctcccgcttcgtctattggctgag

SEQ ID NO: 1587 - DNA, 870 bp, Homo sapiens
  chr2:71503468-71504338
  hyper
gcaaaagcagcagcgcgtgccgaacaccttaggcctcacagaccttctatttgaggaatgtgctcccccaatcccagaccgctcctggtggggcgggcgcgagcgcaggaccgcggagcctgctgcgttgctcggctgcaggggaggagctgggccccgcccccggcttcccgcgctccgcgtccattggctggcctcgggggtgggcgggtcccgccgcacggagtcctgcgccttgaggctcaagcggcggcgtgcaaggcgtgtgaggcgcgtagagagccgcgcgcgccgtctgcgatgccccgggacggcgttcctgccgggaataccaccccggcggcagcccaggctgccgcgcagagcccggattccgcgactgccggggcaccgcaggttttggactcgctgaagcggtgagctctgcctttgccctatatgccgcgctctcgcccgtgctctggggcagttggcagtgggtgggcaggaaggggcgggccggcagggcgtcgcacgttggcgtccccgcgtcgcgggaatggggttcggattccccccgtgaatgtcattccccaggctaccggtctttagcgctaagttgcatgggctggtgtgccagtcggtcagcgaatagcggcagaacgcctggccgggccggcgttttccgggacactcgtttcggcctcgcagtggcagcgcctcctgcgagcctagaccggctcagtggacgcgccgcgctgtgcacgcgggtctggggagacggcggttcttgaatgatccctcacactgcagggtatctgggagcggtggattgagggggcacaacgtggcttctgtgtcggtgaaatcgcttggaccagctccagttct

SEQ ID NO: 1588 - DNA, 30 bp, Homo sapiens
  chr2:71504756-71504786
  hyper
gcccatccacttagcggaaggaaagtcagc

SEQ ID NO: 1589 - DNA, 30 bp, Homo sapiens
  chr2:71693872-71693902
  hyper
ggctgcctgggagccgggcgcttgctgggt

SEQ ID NO: 1590 - DNA, 882 bp, Homo sapiens
  chr2:72372189-72373071
  hyper
agttaccccaccccacgttaacccttctcctgccggggcagcacccggcgcaaaggggaggggcgccacctgtctagccgccccgcctgccagcccacgagcgtaccgactcgggctccagatctacccgctcctgcacccccgaggggacaactcagtccccctagcccgggttggtccccctcctcactttccttttttccacagaaaactacttccagctaaatgtgcacacacgccagtacagccgaaaagtgactctgcagaacccggagccctaatcacttttccacatgcgcctccggcccggcgcgcgacggggaacgagctgggagcgcccgcgcagccaggaggggggctgggccgcgggaacgctgtccccctcccaggctggaaggcggggataattccccctgccgtgcagcccttctagacggcgtctacccctttaagaaaaatctaggcggaggtggggtgcgacagaaggggtggtgaggcgagggtttccctccctccgtctgctatacccgtctccctcgctccgtctcactctccgtctttcctctccttcttttcctctgtttttcttttctttcaacacaaaagttgggttgtgaattttccgaggtcgccgccgcctcgcccccaccccccgcctctgatctgcctaactataattaaagtgcgttttttgtggcattaataaagagttatttgtccgccgtttccacggtcttcacaaagagtactttcataggggcggccgctcgggccgcgagtccaatttatacaaaaatgttgtatttttagccctgggctctgtttagatggcgctcggtggaaacggagagcccttggaggtccccccgtaaaatctgataa

SEQ ID NO: 1591 - DNA, 12 bp, Homo sapiens
  chr2:72374677-72374689
  hyper
cccctggccggc

SEQ ID NO: 1592 - DNA, 101 bp, Homo sapiens
  chr2:72374713-72374814
  hyper
cgcagctagcggaccccggagtgcagcggagcgagcgcgcccttacctgcagcagccagtggccggtctctccgatgagcgggaagcccatggatcccttg

SEQ ID NO: 1593 - DNA, 36 bp, Homo sapiens
  chr2:72375676-72375712
  hyper
ggcgggcgctgcggcccgagcgcgggtgcggagccg

SEQ ID NO: 1594 - DNA, 89 bp, Homo sapiens
  chr2:72376557-72376646
  hyper
cagcggaggtcctggccggactgccccctcgactggcaggcgcccaaagccctcgaaactgtgccttagggtcccgagcttccaacccc

SEQ ID NO: 1595 - DNA, 30 bp, Homo sapiens
  chr2:72376987-72377017
  hyper
aagacgggcacaaacgttcattgatacaaa

SEQ ID NO: 1596 - DNA, 710 bp, Homo sapiens
  chr2:73052643-73053353
  hyper
ccctctcgttccccagcgccggaccagcctcggagggagaacgaaggctgctcctgccccgagggaggcagcgggagggtcctgagtcactgggctgtagggcgccgggaagggaccccgcgtcggggctgcgaagggagacccgcctcgcccggtatgcagggtctctccgaagggaggggccggcgccggacctggggacagccggccggaggcccgacccagaggagcctgccccgtcccgcccgttcccgcccctctgtggtcccggcacccggggtacctgagcgtgggcccgatgcaggccgtgtcagtgctctcgatctctcgcaggatccgctcgtgctctgccgctgtctccaggctctccgcctccgccatcttaccccgctccatagactgggggcgccccgcagcgcgtcccctccgtcggctcggctcaccttttccctgccccacaatgccgctcccaccacaggctccacagccgccccagcctctggctacccgcaggccgacccctccctcaggctcgacacgcccccttgcgtcaccgcgtccgtcggcgttctgcgtaatgtccgctgggatttgtagttctctgggaaatgctaggttggattccattcattcatacatggaatccgcaaatactagttgaagcccactgtaagcaaaaacagttaacgacagtgcgtaaacagtgatga

SEQ ID NO: 1597 - DNA, 97 bp, Homo sapiens
  chr2:73114405-73114502
  hyper
aaccagcacccctgggcgctcgcggcccgaagcctgaggttcccgccccgccccggcagggcggccccgccgacacccgtagcggtcccgccccccg

SEQ ID NO: 1598 - DNA, 319 bp, Homo sapiens
  chr2:73141974-73142293
  hyper
gaggaagctgacagaaaggggcgctgggagaggaaaaggtgagggaggacgaaaacggaactcctatcacccagcgcattccagcaccccctccccctcccccgggaagtctgcgactgcatcctcacagggatggaatgggagtggaagctaggccaggctgggaccccggggctgtcccagcccaaccaagacggtgaccagactcaagttactgatcctccgctgtttcttcatctgtaaagtggagttaatgacagacagctggatgtcaacgttttttgttgtttgttttagagatgggatctccctgtatcgc

SEQ ID NO: 1599 - DNA, 39 bp, Homo sapiens
  chr2:73142352-73142391
  hyper
agagatcttcctgtctcagcctcccgagtagaaatgtca

SEQ ID NO: 1600 - DNA, 1549 bp, Homo sapiens
  chr2:73142997-73144546
  hyper
ataaagagcctgagacacaaacgagaggaaaagaccatcacagaaagctggaaatctccggagaggccagcgagaacccgcgctccccacggattccatcattccttccgaaggcgcctctgcggtgtctcagccgtgccaggccccggggttcccaggacgcggaggagtgctgggtgcggccgcctcgcctccccacccctggccgcccctccccacctcgcccaagggggccggaacggcgtcggcgcgcgggggcttttcggagcagtcgagtggaaaatagactttaacccgctttgtggcggccggggcgccctgagcgctctccaaaccacggctcccggcgctcaggcgggccgctgccaagacccggcctggagtccccgcagagttgcgcggcgcacggaccccgtggccttggggcgtcaggaggcccaacccagatctgcgcgcccaggcagcgctcaggccgctagaatggaccccggcagcggcgaggaagcggaactctctgcggctccctctccgcagtgcgccggcaaggtccaggtcccagcctccccaccgccgcccgcgccctcctaggcctcggagcggcgcctttctgcggcctcgaaggtggggtgggaaagtttggggagtcccggctctcacagcctgtcgtgagaactgcccccggggaattcgtccgccgtacggaaaaactggccggagcagagtcgtccgcggttccgcggtcgcgggtggaaggtgaaggtcgagggaggtcaggctgcttctgcgtgtcctgacggctggcgtgttctcttgagatgggctcgggctacttggccagcttcaatttaagccacagtgtctccgaggccctgacctggtccggcccgccgacacttgagcccccagagcctcagagaaggcgagggggtggatctcccagtgccgaggcccgccgtcctggtccaagccggtcgcggcaccgtgtctgggcactggagctgcttccagccccgcgaacagctggagggtggcagtgggaccgctccggcggcttctcccgcgcagtgccccgcctggccccttgtgaagggagtgagcgtcccctttccagagctgtcccccgtgacatccagaaaacgcgaaacctcaggaacaaggtcgcagcttcagaccgcggcccaggaggccgatggtgggtgagtgggagagtcccggagagcaggggggcagagagctggttttcgggaaaaccaatgtgttggaccccaaacatccaccctccgctcggatccaagttctctgagaactgaaacgacatcccgggacgaatgggagagttaggctgagctacacaccggggaggggagggttggagtttagccccaagcccttcggacgccttcttcggctcccgcgtgggttgagacggcggcacggccaccagactcagctaaagggcggagtcgcgaggagaagccagtggcgaggggaggaggaggcctggatctccccgcgaaggctccagtccggcttttgcctccgactgcgg

SEQ ID NO: 1601 - DNA, 655 bp, Homo sapiens
  chr2:73145046-73145701
  hyper
ccggctgcctcgcacagctcccgcggctgcgaccatgttccagcccgcggccaagcgcggctttaccatagagtccttggtggccaaggacggcggcaccggcgggggcactggcggcgggggcgcgggctcccatctcctggcggcggccgcctccgaggaaccgctccggcccacggcgctcaactaccctcaccccagcgcggccgaggcggccttcgtgagtggcttccctgccgcggccgccgcgggcgcgggccgctcgctctacggtgggcccgagctcgtgttccccgaggccatgaaccaccccgcgctgaccgtgcatccggcgcaccagctgggcgcctccccgctgcagcccccgcactccttcttcggcgcccagcaccgggaccctctccatttctacccctgggtcctgcggaaccgcttcttcggccaccgcttccagggtgagtgtccacgctgtgcccgccgaggcggccggccggcgcccgtgctgcggcgatgcgggggaggctcgggggcgcgcggggctgtttagaagttactgccgggaaggctgcaggtccgcggaggtagattcccaggcagggaagagctgtgcggcatccacccgcgccttcgccgcgtaggtctccctcccaggaaa

SEQ ID NO: 1602 - DNA, 519 bp, Homo sapiens
  chr2:73147008-73147527
  hyper
gagcaatctaccctggtcctccgtgggctcgatccgaagcctgggtctcgaaacctggcgcccaggggccgagttgtagttggggcggtgtgtgagcccgcgggccgccgcggccgaggggctggcgggttggaggcttgtggagggataggggctcggaggagagggcggggtcgttcctaagtcctgtggcctccagccgttcagcttgtccggagtcggcatcctgggccgcaccctcggcttcgaatccagcccctgacgccctccgcaccgcggttcctgcctccgggcgccgagggccgggggcgcctggagagaaatccagctccggctctgagcgtctccagtcaggcgaggcggataaatccttcgcaaaaccctcttggaaattgccgccgcttcctgagccatcagtcccagcgggtacgttatcgagtagcacaaacagttggatttttccctcaagaaccgagtctggacgcggagatggagccaagtgtggctgcattttcggac

SEQ ID NO: 1603 - DNA, 100 bp, Homo sapiens
  chr2:73147966-73148066
  hyper
cggtactgtttccccgagatcaggaactttccgggtctaggagcaacgcctggagggggctgtagagacccagccccccgggacccgcaactacaatggg

SEQ ID NO: 1604 - DNA, 106 bp, Homo sapiens
  chr2:73148174-73148280
  hyper
cgtccggccctgagcccctggccggcggcggcctctccagcgaagactgcggctcgaagactgcagctcggaccccgggtgcttcggatccctagctcccacctcc

SEQ ID NO: 1605 - DNA, 908 bp, Homo sapiens
  chr2:73150975-73151883
  hyper
ctcttggagggagatgctttgcgaccagttaactgaaagcaaatcgttggggctggcggccagggcagcgcccctgggaaagggcggagaaagagcgccatggacttttcttccccaccccttggcctcttccgctgccccaggcattgtgaatgtgggtccacgcctcgtccggcctgccccatctcttggcttaacagagggatctggagagctgttattccccgcgttcccccgcggagtggctctcgagtgcggggaggtgttgcggaggggagtggacttagggaaggggcggcaaaagggcaaagggagaaatggcgtgtgtgtgcgtgtcaaggaatggagagggcagggcgcttgggagcagggcgcgaggccaggctctgttgggccccggctcacggcgccccttctctctgtctgtacctgcgtgtgttgccgtcggcggcggggccgcagccagcgacgtgccccaggacgggctgcttctgcacggccccttcgcacgcaagcccaagcggatccgcacggccttctcgccctcgcagctgctgcggctggagcgcgccttcgagaagaaccactacgtggtgggcgccgagcggaagcagctggccggcagtctcagcctctccgagacgcaggtaatcacccccggtcgcggcctgccctgcgcccggagcccgggtggaggtgagggtgcgcgggtgcaggagaggccctgagcccgccccagcccagccctgctgggttccaaaaggcccccattccccgcggcgctgcggtcaagcccgtctttagagcctcttcctcgagactgcgtgcagcctgctgagcccgcaggacttttgtcaagcgctaaagacctagcaggaggcagagtaaatgcaaactgtatcccgagc

SEQ ID NO: 1606 - DNA, 34 bp, Homo sapiens
  chr2:73151946-73151980
  hyper
cgggcagcgcaggcagcaccgaggccactggagc

SEQ ID NO: 1607 - DNA, 13 bp, Homo sapiens
  chr2:73152264-73152277
  hyper
cgcgcagagcatc

SEQ ID NO: 1608 - DNA, 30 bp, Homo sapiens
  chr2:73340709-73340739
  hyper
ctcagactctgcggcggagagccgagtgat

SEQ ID NO: 1609 - DNA, 271 bp, Homo sapiens
  chr2:73429565-73429836
  hyper
ggtgctgtgcccaccttgcctcgcacagagcgggcgctcacaggctttgggggccccgcccggaccgcagtggggagaggccgccccatgccccgccccgccaaatttaagagccttcgccgagcgccaggaggttcccagacaaccggtcttgctcgctgccttttgcagaatcttctcacttctcccgagctcccttccttgcgtccgtccgggcaacggccgcgtcatgcctagccccaggccgcgaggcagcccgccacccgctccc

SEQ ID NO: 1610 - DNA, 64 bp, Homo sapiens
  chr2:73429858-73429922
  hyper
cgcgctctggccgctctccggcgcccaggtcccctactggcccgaacacgccccgcgctcccgg

SEQ ID NO: 1611 - DNA, 214 bp, Homo sapiens
  chr2:73429976-73430190
  hyper
cgcgccggcggcctcccagccgtcgggctccgcctgcgtccacccggccttctggaccgctgcttccctgtgcgccaccgggggtctgccctgggcttgcccgacatcgtggctgcccgcctacctgagcgtaggtttttaccctgtgccagggccgcgcgtggctcccgtctgcggcctgctgggcttcggcgtcacaggtactgcggtcccg

SEQ ID NO: 1612 - DNA, 171 bp, Homo sapiens
  chr2:73430201-73430372
  hyper
cgggggactgggcgggggctggagagcctaggtcgccactgccggcgccccagtgcaggagagggcactgagtgtgagaatcacacacggctggagtgggaaggggctctgccaccgtttaccttgcagttgaagccgaggaccgcgacagtcttgctgaaaaagaccccg

SEQ ID NO: 1613 - DNA, 225 bp, Homo sapiens
  chr2:73430442-73430667
  hyper
cggtgggcaggaggccagcgctggggctgcaaggggacccagccctgctcccggtctccgcgtcccttgactccctcgcacaccccggggtagcgcttagtgacagagacgcttcccaaagcggctctcgacccgaaccaatggccctgttttttttttttacggggtagggggaagtggacgctccgggcggtgctgttgagcgaggagctgttaggagctggt

SEQ ID NO: 1614 - DNA, 31 bp, Homo sapiens
  chr2:73511725-73511756
  hyper
gaggggtcttcggcgccgccctaggggtgta

SEQ ID NO: 1615 - DNA, 30 bp, Homo sapiens
  chr2:73512133-73512163
  hyper
tgctggaccccatccggagacccaattctg

SEQ ID NO: 1616 - DNA, 1499 bp, Homo sapiens
  chr2:73518215-73519714
  hyper
agtcccgcgcgagaccgccttggcgctgccccagcctgtctctgggggttatagaggaaggcgtggggcgtgtgccagttacaaaagactgtcttgaatcccagggtagtgcctattcactgggtggtctcagaagacttcccccaaagcgcggctgacaagggtgacagcgcctggaccgcgggaactgtccgcggagctggtgctgaatagggcgtgtgcggcgggcgcttcaaggaaactggaagcgggaccggaggccggccctcgggcgtgcgaggaggagttggaagaagagcggggaggggaacggcccggaactcgtgcgcgccgaacggcggcgccccaacccataaacccatctcttgctcagagagaagcgaaggagaggcccagcgagtaaaagccgaggcccttgagccgctcctcggcgcgcgccttctgcttgaggtgcaccttgctgtgccgtttcttctcatcgctgcgcgcgaagcggcggccgcacacgtcgcaagcaaaaggcttctcgccggtgtgggtgcgcacgtgcgtggtgaggtggtcgctgcggctgaagttgcggaggcagatgcggcactggaagggtttgtggcccgtgtggatgcgcaggtggcgattgagctcgtcggagcgcgcaaagctccgcacacaactctccaccgggcaagcgaaggccttggcgtgcggccgcgggcagaagcagcgcgtgctgcatttgccgccgcggcgccccttgcgtcgcgccttggcctgggggaaaggggtgggcggcggcggcggcacgggtggtgcagccacgccactgcttccagggatgtccgccaccagaggtttagggaagtccgccgcggcggcgctgcgaaggcccagcggggaaagctgaggctgcgtactggccagaaactctccgccgtcgccgctactccctccctccccactaggaggggtcaggagcccagggaggccctcagccccctcccctaagtcacccggggccagcgggaaagcgtcataggccccgctgggatagagtctgttggctgggacggccggcagttccgcagggcagctgatggacagcaagtcctcaatcttggtccctattacgggaaaacgagcctccggggcggcctggtagtctccctgtgacccacagttccctggggcccccacagaaagcagctcccagggcgcgtagggacccttgaaggcagagacagcgtccagcgctggcgaggcgggaggcgcccggaggccgggcttgacgtcgggcggggagagctgaggctcatacaggcactgcgagggggcacccgcgcaaggcgaggcctcccagaacgcctctgggaaaggggcagcgcccagatccggggagtaaaggtccggcggacccggcagcaaggcatcggaccccgcaggaaaaggggcatccagcggggatctggacgctgctgcctctggaccggggaagggtgcca

SEQ ID NO: 1617 - DNA, 815 bp, Homo sapiens
  chr2:73520236-73521051
  hyper
tcctggttctcaggtatggtgcgcccccgcgctgcgccgtcgtcgtctgagcacccctgctcgccctccttacctccagggtagccggtggccgcgggagcgtccctggcaggcagccggggcaattcagcgctgggttcggcgcaacagccttcagtggacttgacgaggagcgcgtcgggttcggaaaactcgctaaggtggagcatggcgcggcgccggctgtggggcgcccggggcctcgcccgctgggcttgggggcgcgcgggtggcggggaggctggcggtaggggttccccgcagcgcacagacctaggcgcccgggctcctggcttcgggcactcacctctgggaaaggagtcggggagccgcggcgccctcgctcgcccgcaccggcctcgggcggcggctcctcgcctctccaaagcgctgccgggctcccccagcccacagcccccccacttatatagctgcggcggcgctggctccgggcttccgactccccgggccactgccattttgggaggccccggccctgccgccgtgacgtaaatgcccaaacatggacacaggatgtgtgccggggactcccgaaaaggaaagctcgagctgtgacgttgttgttgtcgccgccgccgccaggctcgcgccgctgcgtgcgcgcgcgctccccaggcgtggagcgctggggccgcggatgcgccagtctggggcgctgcgcctcaccgggccgaccgtccggtagatgcgcttcccacctggaggcagaggccgaggggcagcaggggaggaccgtgttgggtttgaatctgccc

SEQ ID NO: 1618 - DNA, 161 bp, Homo sapiens
  chr2:74153737-74153898
  hyper
ttggattgtggaattacgtcttttaaaatgttatttgtccaatgaacaaaaaccactcgcaccgcaactccttttactatcaaattctgcaccgttgcaaaacttccttcactcaacgcttctttacaaacatcgcgatagcggagcggtctcttgggcgc

SEQ ID NO: 1619 - DNA, 46 bp, Homo sapiens
  chr2:74154120-74154166
  hyper
ctccagaggcctgcacgcggggcgcgggccccgaaggctctccatc

SEQ ID NO: 1620 - DNA, 30 bp, Homo sapiens
  chr2:74211830-74211860
  hyper
gtgcagagaagcggcggccgggccggagcc

SEQ ID NO: 1621 - DNA, 300 bp, Homo sapiens
  chr2:74405877-74406177
  hyper
gaccgtccttagctcacgggcagcggaagccgggccgccgccgctcggagccgggtttctggccgctgcgagcctttgcaaacctcggcgcccgccttgcccgcctaccccacctcgcagacccgaaatgcggaaccaacaaaatctcgcgagctaaggtttcgctgcgccgggagggacttgtcgcgccccctttcgctccgcctcgtcctagaactcggccaatcatcgctctccaagccaggacctccctcccccggaggcgtggcgaggatggcggtcctgcggaaggggcagtgg

SEQ ID NO: 1622 - DNA, 1012 bp, Homo sapiens
  chr2:74425451-74426463
  hyper
cggtgacactagcggcgtcaggcaggagtttgacttcctcagcctatcatggcacgttgccgaggcttcagcgccttacaggacctcgctccaggctcttctggctccaatcaaaagcagggctctttcggacttcgcttacgtttaataaagaaaaccggttggccccttcggctccacctggctcaacagacagccagtggcatgcggcagggaccaatgggtggcggagggaggcggggcctgccacgaggccgcagtataaccgcgtggcccgcgcgcgcgcttccctcccggcgcagtcaccggcgcggtctatggctgcgacttctctaatgtctgctttggctgcccggctgctgcagcccgcgcacagctgctcccttcgccttcgccctttccacctcgcggcagttcggtaagagggtcacagagctcggtcagcgcggaaagctgaggggaacggagggcgaggggcacgccgggcccccgagggacaccgagggaagtccttcccgaacatctccgccccggcggtggtggccgctgaggggtgtggcggggcgacgtggcaccgagcgccgccgcagctctcgactggggcgcttcctcggcgcggagggctggtacccgaagcccgcctttcggagggagccgctctcctgcgactcggggcgtcgccggggcccgtggccagtcggcgggcgggacgggggtggcgtgcggaacgcgaaggcatcagtttacgcggagccttccgacagcgccggccgcctctggctgggatgctgagagtcgtctgggggagaacaggcgagggttccaaaagagcagccctcggcgagttgtccttgcggggaccctagcggcggagggcgctgctgcagctgatgaaatcgcggagccgacttgctcggggtccccgcgccgccctcctccctccgccggtgggagtggcccgcgctgcctccgctctgccaggaacatgaacggactctgggcaccctagctt

SEQ ID NO: 1623 - DNA, 30 bp, Homo sapiens
  chr2:74685368-74685398
  hyper
gtattggctattgccgctgtcagtcagggc

SEQ ID NO: 1624 - DNA, 1003 bp, Homo sapiens
  chr2:74729734-74730737
  hyper
ttctctttcagaaagcgctactgcggagtgaaccggtccttatatcttagtttcgtgactttgggggcggcaggcctgtgagttgttttccgccctggacgctgttttgcaaagatctctgcgcgcccaccgccaccctcccgggcgtgcgggccgggaagcagccagcggtgggaaactccgacgccctcctcgacacttttctccccccaactccccaagactcacttctagggaagtcctttttcccatcaagccctgggaaagactggccaggctgagagagggacccgtcctcctctgtgccaaaggcgggagcaaatcctggtgctgtcgcctttggatgtgagtcctggaaatggcgggggtgaggaaggtgggcaggggcaaggtttggccctcaggcgagaaccgacgccttgtcccggaagcgcagcacggccgagtgcgtccgggggtgcagacggcgccctggggtggtcctgccgccacctctcctttgactcaggagcgccgcgccgcgtccgggcgcgttctcagtcgcgcgaagccagagaggaccctgggcgtgattctccctccctggcacagacggagacccgagtgaccccggggtccgggtgggcgtggggaatggacccatagacccgggacgagcggcgcggagcccgcagctggccagcttcagccaccttgggagacgcagtgcagctgccgctgctgacagacaagaccaaggctcggctgggccccaccccagatccggcctgagcgccttccgcgctgctcggcctcaaggcgtgagtcaccaagggcaagtcccgtgacttggtcctcagggtctccggcctcggcacattaatcttcagacccggctttttcgacgccgagctgccgcccagccccaatggcagggccttccagggagtcccagtcagactgctccccagctcccgcagctgctcggtccctgcaaagcccccgggagcgtttctactctccc

SEQ ID NO: 1625 - DNA, 156 bp, Homo sapiens
  chr2:74740410-74740566
  hyper
ggcccccccgggggccggggcgggccggggaaggtaatgtaattccggcccagctaacccgattaccgcggcctgcaccgggcagggcggcggcgggggcgggtctaaggctcaggggcccgcccgcgggggtcccatccccgggaaggacgcaga

SEQ ID NO: 1626 - DNA, 495 bp, Homo sapiens
  chr2:74740879-74741374
  hyper
ccagccccaagaacccgccggcctgatttggcccgggttgagccatggtccgttttacacggattttggaaaatcgaaattctaggaaacacaggacaccaattaccggtgcgcatgaacagggctggggggacctacaggagaggccagaaggcgcaccacgatcgccagcccaaagcggccgttccccgcccttagcccctgccgtccccttcccacacctgttctcttcctgggcctgcagctcaccgggcgccgttccccagccgcttcttacgcagccgggaaaccacaacgagatttggtcttcgagagcatttaggcggggaccacaacgaatccgggagttggccagaaggatccatcgagaggcgaagagtgggggctgggggaggaggcacctgcggaggaagccggtgaggcggaggcagcccaaaggcggaggccgcccaaaggcggaggccagcaaggatggaggcgcggtgagcatctccg

SEQ ID NO: 1627 - DNA, 124 bp, Homo sapiens
  chr2:74741720-74741844
  hyper
ccctgcgctgacgcccggcagcggctggcacgggcgcggctgctccgggtgcacagggatgctgctgtttcggggaccccggcgccctgccttggccagccccgcgggcccctgaggccactct

SEQ ID NO: 1628 - DNA, 278 bp, Homo sapiens
  chr2:74741872-74742150
  hyper
cgctgcctgaggcatcctccccaaccaccgaacctccggcggttctcctcggcccagaccgatggagccggggatgctgggtccacacaacctcccacaccacgagccaatcagcttcggcatcgatcagatcctgagcggccccgaaaccccagggggcggtctaggcctgggtcgcgggggccagggtcatggggagaatggggcgttctcgggtggataccacggagcctcgggctacggtcccgccggctcacttgccccgctgcccggcagct

SEQ ID NO: 1629 - DNA, 323 bp, Homo sapiens
  chr2:74742324-74742647
  hyper
ggctcacgggtgaggttgtctgacccctccagcgtcacgcccgactctgaccccgtctcctcatttcttagctttctgctccaactcaaggacccctttcacacctcccactagatcctcccaggggatcctcccccaactcaaatctctgggtcctgcctccgagaggtgatggggagggagctgccgtcggtgcccgcgccctcctctgtagtcccactgtccacgcgtggggaggggagggtgaagttacaggggacgtctccctcgcatcccaggggaagggcctttcttggctatagggctcggctgatgcttagggc

SEQ ID NO: 1630 - DNA, 451 bp, Homo sapiens
  chr2:74742693-74743144
  hyper
cggccttctcagtggcacctcgggccaccctgcaaatcctgccctggtctttcttcctcccggtagctgcgctctcgcccttctctgggacgcgccgcataggccacccctaccaaaaccggacccctccgaagcggaagaagccgcgcacgtccttctcccgctcacaggtgctggagttggagcggcgcttcctgcgccagaagtacctggcctctgcggagagggcggcgctggccaaggccttgcgcatgaccgacgcacaggtcaaaacgtggttccagaaccgacgcaccaagtggcggtgaggcgcggcgcgggcgagggcggactggggttcccgagcagggcctggtgagaagcgacgcggcgggcgccccgctgaccccgcgtctccctcccttaggcgccagacggcggaggagcgcgaggccgagcggcaccgcgcggg

SEQ ID NO: 1631 - DNA, 37 bp, Homo sapiens
  chr2:74776039-74776076
  hyper
ggccatcgcgcgccgccgtccccgggcccccggaccc

SEQ ID NO: 1632 - DNA, 31 bp, Homo sapiens
  chr2:74776507-74776538
  hyper
gcgttgaccctcttttcgctggggaagccca

SEQ ID NO: 1633 - DNA, 59 bp, Homo sapiens
  chr2:74780964-74781023
  hyper
ctactcattccctctgcggttagcgtgactccccctaccttggccgagcaggaccctaa

SEQ ID NO: 1634 - DNA, 222 bp, Homo sapiens
  chr2:74781865-74782087
  hyper
ggaaccgccgggggccatggacggagcagtgatggaagggccgctttttttgcagagtcagcgctttgggaccaaggtagtctggcgcatggatgccgaaccttatccgggctagtagtgggtgagagagcccagaaacagggagaggtgggcagcgggctggagagcggcgccgggagttggagagcctgtgactttcccgtgaagttgctttgcacactc

SEQ ID NO: 1635 - DNA, 247 bp, Homo sapiens
  chr2:74782218-74782465
  hyper
cgtcgggacccgggccgcctgcgcacgccactccctctcgagcactctctctctctccctagaggtggaggaagacctgggccgtgctctacccggccagtccccacggcgtagcgcggctcgagttctttgaccataaggggtcgagctctgggggtggccgagggagctcgcgccgcctggactgcaaagtgatccgtctggctgagtgtgtgagtgtggcccccgtcaccgtggagaccccccc

SEQ ID NO: 1636 - DNA, 113 bp, Homo sapiens
  chr2:75146989-75147102
  hyper
tgtttaatgaataaaacgatgaaaggacccgtcgcctcctaaatgcagatctcgagggagcctccaggtggcgctcgccgctcggagaagcagggagtcggtgcgccgcagct

SEQ ID NO: 1637 - DNA, 30 bp, Homo sapiens
  chr2:75787214-75787244
  hyper
gcgtggactgtctgcgcgcccctctccaaa

SEQ ID NO: 1638 - DNA, 551 bp, Homo sapiens
  chr2:75787734-75788285
  hyper
ggagaagccggagcccgctggggatgccgggcgcccccagagttcagggagcgctctcgggcacctcttacctttgctggggccccggcgcgcacttccggggactgcgcttggggcgcgcggggccgagcagggggacccggagctgatcactgaggggcggacacgacaaagcgctgcccgggtcttgggccggcaccagtacctcggaaaggaatcccggcggaggggccgccggggtcagggctggcctggggatgtggggtcccggcctgggtgctcacggacggcggcgccaagccccgcagaagctgcaggagcccgagtcagtgggaggaaaaggttgtctcatttccttcgatctcccccctcctccacccgcttggctccggacctgccctccctctcccccgcccccttctgcaagccagcggcccatgtgggcgcccgcaagacgcgaaacctgaacggctgcggcgtgcggcacctccctccgcgccaagttagttcacgctcccaactcctgcctgcctccccgcgctgccgactgt

SEQ ID NO: 1639 - DNA, 30 bp, Homo sapiens
  chr2:75836395-75836425
  hyper
ccgtgtggcggcgccgggcagcggcagaca

SEQ ID NO: 1640 - DNA, 153 bp, Homo sapiens
  chr2:79740170-79740323
  hyper
gcgggcagagcaggcggcaccgcacctcggccagaggcggctgcagcagctgctgcccttgtccctgccgccgcctctccagtcccttctgtgattaccactccagctgctgggaacgggcgagaaagaggaggaggcgagaaactcccaccg

SEQ ID NO: 1641 - DNA, 606 bp, Homo sapiens
  chr2:80531322-80531928
  hyper
gcaggctaattatatgcagggcgagagaagacccctctgtgtttccgaggcagccccggtccgcggccggcggatctggcaggcgcacaatgtctcactttgctgctcggctcggggctgcaagggcggccggcaaggcggggaggcgacttctaggacccgcaagtttcccaactacgtgccggagcccgagcttcgccttcctgccgccttcctttccctctgcagttcggactgtgacgttgtggggggaaaaaactccaaactcggggctcgcgactccccaggatctgacagtctggttaatgtccgtcattggaaacgaccactgaccggcgccaccttttactccgcggaaacagcctgccattcgcgccccgggcagctgcagagagcgggctcactcatgctttgcgggcggcgggcggcgggcggcgggcggtggggaggtgcggacggcggcgcggggagcggcgagcggcgcccgggctccttccctccaccaggcagtgtgcggcgcgagcttgcacaggcacctactgctcactgagtgtcgtaagctgctcacgattgtgcgtcttccccgagcacctcagacatgggcag

SEQ ID NO: 1642 - DNA, 30 bp, Homo sapiens
  chr2:85107432-85107462
  hyper
gcgaacatctaaagcgcccggctggacacg

SEQ ID NO: 1643 - DNA, 31 bp, Homo sapiens
  chr2:85198256-85198287
  hyper
agcgccgcgccgctgccgggagccggcaggc

SEQ ID NO: 1644 - DNA, 65 bp, Homo sapiens
  chr2:85359942-85360007
  hyper
ttgaaaacctgggccgggggtcgcgttggaaccccacaggaaaaaggcgcggaaagccgccgggc

SEQ ID NO: 1645 - DNA, 35 bp, Homo sapiens
  chr2:85360497-85360532
  hyper
ctcctccctccctccccgctcgcccctccccggcg

SEQ ID NO: 1646 - DNA, 30 bp, Homo sapiens
  chr2:85361470-85361500
  hyper
ctttaaaggacccccgtaccctgggtaccc

SEQ ID NO: 1647 - DNA, 96 bp, Homo sapiens
  chr2:85829303-85829399
  hyper
tgagcccacggcagaacgtgaacaccctctggcactgggggcctccgcggtcaacccaaatgccaccggcgtgctgagagacgcaggcggaccgta

SEQ ID NO: 1648 - DNA, 30 bp, Homo sapiens
  chr2:85839346-85839376
  hyper
tttgtttgttttttcgtaacatatcaatag

SEQ ID NO: 1649 - DNA, 89 bp, Homo sapiens
  chr2:85842677-85842766
  hyper
tgtcagcccccaagccgcggagactgtgggaaacgacctcacggtggtggtttcgaggcacaaatctggggccgaatgacagcttcttt

SEQ ID NO: 1650 - DNA, 30 bp, Homo sapiens
  chr2:86114868-86114898
  hyper
cagctgtatccttccgtggaaaaggattag

SEQ ID NO: 1651 - DNA, 30 bp, Homo sapiens
  chr2:86426654-86426684
  hyper
aggtcagtggagagcgacatactccatgca

SEQ ID NO: 1652 - DNA, 31 bp, Homo sapiens
  chr2:86428203-86428234
  hyper
gggtatgtgtgaaaatcgctgtggaattgcc

SEQ ID NO: 1653 - DNA, 30 bp, Homo sapiens
  chr2:86564038-86564068
  hyper
gcctttgccgctgtcgatgcagacacctaa

SEQ ID NO: 1654 - DNA, 43 bp, Homo sapiens
  chr2:86668218-86668261
  hyper
gaataggcctatggcggagggatcactcgcttattctctgtgt

SEQ ID NO: 1655 - DNA, 31 bp, Homo sapiens
  chr2:86850367-86850398
  hyper
gcactgacccaggtggcggggtcggccctcc

SEQ ID NO: 1656 - DNA, 45 bp, Homo sapiens
  chr2:87017673-87017718
  hyper
cggctggaagagccacgagcagcccgacgtcgggttggacagcag

SEQ ID NO: 1657 - DNA, 583 bp, Homo sapiens
  chr2:87017943-87018526
  hyper
gccatgacgcgctccccaggacgctgcttggctcgaagctcgggcgcgaggggaggcgcgcgggagccggtggggcgccgaggggggaaagttgcgcccttcggccggcccggagcctgatttcgcatttggaggatgtgatgtcacccgaagcccccgccgaggagagtcaccctccttttcgcggttgtcgccttccagcccggcgaggaggctggggcccgtgaatagggccgtcgaggcagcctggccaggcaactgggggcagctgaaaactgcgggtttggggatgaggaaaagggcttggaaatagtccttggaaatggttgtcttgtgagagtgacagagtgggtgaagggagaccaaagatttcaagaagtgagggcgagagtaggcagcaaaggaggggagtgtcccttcctttgccttcactaaaggcgtctcttgtactgtcaccttgggactttttattggcaaaatgggcactgagggctgaaaaggaagaggaactagcgacctgcccgcttctgaggaactcgctagagcagccccagttttcaccgaggaaggaccctctcccttc

SEQ ID NO: 1658 - DNA, 30 bp, Homo sapiens
  chr2:87088819-87088849
  hyper
gcgccccgccaccgcgggctcgacgctgca

SEQ ID NO: 1659 - DNA, 850 bp, Homo sapiens
  chr2:88315962-88316812
  hyper
actgcgtttaatatagcgttcatcaaacagaagaacataccagatattaaactgataagaacacacactacactcaatcattaaccaaacagcaaaaaagagataccagttacccggggcctcccacgtcctcccttctttcatccaccttaaggtcacggtgagaaacctcaccttcggtaaacatctcacctgctttctgatgtaaatattatattgaaaacataggccctttgagacattttgtccgctccttgactcttagtgacttcgagctttgtcgccccttttccttggtcgcgagggccgttcatttgcatgtcccacccgctctgcgcccgggaggcgtggccaccaaggggccgggccctgcacagcgccctggggaagctggtttgaaagctctggagcgaccccaatgccgggtaaaggacaagatttgcccagacggaagggaatttggggtgaagtggccgtaaaagtgtgggacgaaactgtttcgggcagagcggtgggaactcacctgaggaaagcatgggggaggagtcactaataagaatgagtggcagggacagggcggccttgtaacgccctcggtgttggaagggaagaccgtacagcgcgatggggaccagggcggcgggccgcagccagggtgtgggtgggcgacggtcaaggtgccttgaagcggattctgtcctcgggagctgcggttcttcctcctccgccctcaccggcgggcgaccttaggcagggcgtgaaatgcaacgggagccctggagggagggtgaagccgcgcgtgcaggaggaacctccttttggcgagttcaggccccgcagctgcggaggt

SEQ ID NO: 1660 - DNA, 105 bp, Homo sapiens
  chr2:88751314-88751419
  hyper
actcctggcagatcttccagccgcacaccgacccctgcgccggcccttgcgacccgcgtccgccctccccggctgggaagcacctgccagcggccctcacctggg

SEQ ID NO: 1661 - DNA, 255 bp, Homo sapiens
  chr2:88751460-88751715
  hyper
cgacaggttgtggcggatggagttctgccagccggccttgctgcgctggtagaaggggaagctatcggcgacgaactggtagatgtggctgagagtgagtttgcgctcgggcgcgctctgaatggccatggcgatgagcgccgaatacgagtagggcggccgcaccatcttcatcaggtcctcgcggctggccatggacagccagcccagctccccgggccccgcgggcgcggcgggcgaggcgggcgcggcggg

SEQ ID NO: 1662 - DNA, 96 bp, Homo sapiens
  chr2:88752538-88752634
  hyper
taacttggggtggccgctcgggccacctgcctagtcatccttttggcttttctacctctttcctcctaaccttttgtgatcgagtcgcggaattca

SEQ ID NO: 1663 - DNA, 170 bp, Homo sapiens
  chr2:89064805-89064975
  hyper
cgctgggcatgggcttcggcccgggttgcaggaggcgtgcaccctccggccggataggcggcgcactcagggaccaggaggccatcccaggtgagccccgccagccccagccggagcccgagctgcagctgccacctgcaagtggtgctctggctgcagcggtggcaacc

SEQ ID NO: 1664 - DNA, 294 bp, Homo sapiens
  chr2:89065128-89065422
  hyper
cgcgtcgggagccggtggaagaggagaagagcgcgcgggcgacagtcatacaggccttggggcagggcgcgcctcgcgctccagggagccacgccagcccgctgcgcctccgcagcaaccgccgcctgcacgtggcggggcgagagagctgctagggcggtttctccgcctcgggcctgttgggcggggccggctaaggtgcgcgtgctcgctggtcctaacggttctgttgggcgtttctgctgagaggcgggaggggctgagagtctgtgcgaaggtaggtggacagactgc

SEQ ID NO: 1665 - DNA, 1400 bp, Homo sapiens
  chr2:95691036-95692436
  hyper
attaacgcatccagcggaaaaatgaaggagacccaaattcaaagttaaagtaatggtgacccgagaggtgccttgatgagaaggtttggggtcccggttactgatggttatcattcttacgagatgctggtcacctacgaagggagaaaggcacgaggagcgcctgaccaaagtggttttgccctgcttcccgcaagaggtggcacccacggctggaacgcaggagtcagacccacagtccccagctctggacgcccgcagcggggcctcgaagaggttcagggcggtgcccgcggcgctcgggccgggtctcccggggcgtggggcggggggcggggttgggcggcggccggggctcctccctcttctgccccgggctcccctgctcttaacccgcgcgcgggggcgcccaggccactgggctccgcggagccagcgagaggtctgcgcggagtctgagcggcgctcgtcccgtcccaaggccgacgccagcacgccgtcatggcccccgcagcggcgacggggggcagcaccctgcccagtggcttctcggtcttcaccaccttgcccgacttgctcttcatctttgagtttgtgagtggctcctggccggggaagggacggggtgggctgagccgtgcgctctctcgggcgcccagcacagctgtcggacgggatccgctagctgcgcaggttctgggagcatcggggcagcaggcgcagggcggggactaagccagggaagtcccctcccacctccggtcctttgtgcccttctagaccaacagaatgaggggaacagtctacaggactatggaggaaaaactgggttcccaactggggtcagatgtaggcagcggggcagggggggacggctcttggttcgctggtcccaaagctgcgcgcggggcccacttgacgcgcgcagcgccaccgaagctcccgccgcgctttgcgcggttgggtagaagtgcgcagcttttacaagggagaaggtttcgttaaaaaagaaaaaaaaatcagcaagagaaacattagtattaccaaccgagatttggagatgagagggagctgaatccggtttattttcttctggccttttaaagtttctggcgagggaacgtatttgcgaccaattcgatctggaaatgaggccatcgtttgcttggccgcagtccttctgccccgtgtgcggggtgggggtggaggagatggggggtggggggtggggggtggcggcgagagcgatccgcgcgcctcgactgaccttgggcaggcccggggcctctgcacctgcggtcggtcccgccttgcacgcacggtctctgcctgaggctgcaggaaagcgcttcctactgagaactcctgataagcgctcacggtgtcgcgaagccgaagtg

SEQ ID NO: 1666 - DNA, 483 bp, Homo sapiens
  chr2:96990898-96991381
  hyper
gagagtgtgtggccacggcccctccactctcccagcaaacccacgggggcctcggtgcggacagagacccggtgtggggaggccgctgcccctgcacgctgggccacgggggtttgggcggggaggagcttgtactgggtgggcggggaggagcccggacggcgggagcggctgcggcgcgcgggcgccctcggagccgcgtgctgggggtcgtaggggcccaccgcgctcagccagacgttcagacgctcggacaagcatggtctataacccaggaaaggggagcagggccactcccgcgggcggccccagcgatgaaccggacgcccccaccctgccgggaaaaaagcagtggcggtcaggccgcgctgtctctttaagatcgtgttcctactaacactgacggtgagtaacctggccctgggtcccgggagacatcccgaggtaggatgggcccttggcctcctacggataggcgggtga

SEQ ID NO: 1667 - DNA, 211 bp, Homo sapiens
  chr2:97171201-97171412
  hyper
gtgatttctcctgactcgcagactgacctgctggagctggccggcctaagagaaggaaacaggaatgggggtctggcctgggtaggtcttacggtagccttctttctcacttctgaccaatctcaagctggctgtgcattgtaatggtccaagcatgttaataaatacctatgtccagccccgcccccaaagactccggttccactggcct

SEQ ID NO: 1668 - DNA, 30 bp, Homo sapiens
  chr2:97174030-97174060
  hyper
cagagggaggtgagcggcgccgaggctcac

SEQ ID NO: 1669 - DNA, 37 bp, Homo sapiens
  chr2:97175301-97175338
  hyper
actgccacccggtggccggcagcggaactgaccacag

SEQ ID NO: 1670 - DNA, 30 bp, Homo sapiens
  chr2:97193033-97193063
  hyper
gagggacacgacggtccggcagcagagcct

SEQ ID NO: 1671 - DNA, 375 bp, Homo sapiens
  chr2:97193251-97193626
  hyper
cggtttgagccagctcccctttttgagtcagatccggcggcagggccagaaaagcgctttctgaaaccccagcgcggtcctcggtgggggtggaatggggtggggtggggggcgcggccgcgccgctgggcgccctccccgccctcccccctccccacccccagtcctccctccgctgcccgccccccaagcccggtgtcgccccctccgccccctgccgcatccccggagccagtgcccacaggggccaggcagcccgcaggggtcgctcacggctggtgtaggggcttggtccaccacgctagtacttcgggcaccaaaatagaaaaagaataacgcttggaaagaatctgatgtttccgaaggagcatcgaa

SEQ ID NO: 1672 - DNA, 216 bp, Homo sapiens
  chr2:97203343-97203559
  hyper
gaagggacggggtggcggctggggagcgtcaggggaagagggcaagagcgtgggctacgagcttgcaggcgatgcccggcttcgcgctcggcgggagctgcgggccaacccgggcccgcgctccgtccctccgcggtgtctaggggtcgcccgggctggggtcgcgtcaccctccgcccagcgccggcgtggtggggcttgcgcggtgcaggaccc

SEQ ID NO: 1673 - DNA, 31 bp, Homo sapiens
  chr2:97304170-97304201
  hyper
acggatgaagctccggcgcctctgtccggaa

SEQ ID NO: 1674 - DNA, 31 bp, Homo sapiens
  chr2:97405566-97405597
  hyper
accacctcaccctgggcgcctcaccctggta

SEQ ID NO: 1675 - DNA, 136 bp, Homo sapiens
  chr2:97482885-97483021
  hyper
tggagctggcgcgcggcggcggcgacccctacagcgatctcagcaagggcgtgctgcgctgccggaccgtggaggacgtgctcacgcccctcgaagactgcttcatgctggacgccagcaccgtgctggacttcgg

SEQ ID NO: 1676 - DNA, 84 bp, Homo sapiens
  chr2:97535804-97535888
  hyper
cggctctttctccagcgcggccgcggctctccgcccccttccccttgacgtcaggctgggggggtcgagcggaggccgggggcg

SEQ ID NO: 1677 - DNA, 104 bp, Homo sapiens
  chr2:97779475-97779579
  hyper
tatggaagacggcaagcgggagaggtggcccaccctcatggagcgcttgtgctcggatggcttcgcatttccccaataccccattaaaccgtatcatctgaaga

SEQ ID NO: 1678 - DNA, 30 bp, Homo sapiens
  chr2:98261977-98262007
  hyper
ggccgggacctccgcgcctcccacacacag

SEQ ID NO: 1679 - DNA, 30 bp, Homo sapiens
  chr2:98280678-98280708
  hyper
tgatgtcatggctccgtcttaaaggggacg

SEQ ID NO: 1680 - DNA, 636 bp, Homo sapiens
  chr2:98703182-98703818
  hyper
gtttgtagcgtttcccgcagtctcctcgcctctcctcggcctctggcgccttcctcccctgtctgctcgcaccctatatttctaccccagctcatcagtgtatttgtttgttaattcattcattctttcattcatattctccgctgttgttaattttcccattgacagtaggcgcaaggggcaacgccactcgccctgtccctctagcgtggcctctgtttgggggtctggggtggaggtcgtcccggcccgggtggttccggacgccggctttccgcacctggctcggtgacggcctcggcgccccgccctcttggccacggtccgcagccatcgccccagtgagggcgcggtctgtgggcggggccggctccaggagccgcgctgtgattggccgtgtccaggcaaccgcggagacgccgtcgtcaacagaccgcgctcggaaccagaggcgcgggtcacagagacctagaacagctggaatccttcgcccccggcgcgcagccttcgcccgccggaatcgctgccttatccaccagcgggatgcttacctcgcccgccctctcgggtcaggcgggcccgggaggatgggagggtggctgctgagcgggagccgccacgtcttccacccgacat

SEQ ID NO: 1681 - DNA, 30 bp, Homo sapiens
  chr2:98963119-98963149
  hyper
cttccaggggcgggcgcggcgctgtccgca

SEQ ID NO: 1682 - DNA, 188 bp, Homo sapiens
  chr2:98963637-98963825
  hyper
aaaggtaggctgaggaggaggcgagaattaaaattcttttaggagtgcgcggttactttttttaatgataaaatcacacccgggatctcggacgcccggggcttagtgctcggtgatggaggagaaggggcggcgggctctctgatcctctgcaatcccctaaccggataaaggcgccgggctcccag

SEQ ID NO: 1683 - DNA, 456 bp, Homo sapiens
  chr2:98963868-98964324
  hyper
cgcccctgggggccttggcgcgcaggccctcgcagtcccgcaaccccgggccgggtgattcatttttctccctgtgtaatctccctactgagcggcgcagctgggactttaacttcggccctctgcagcgggggtctccggttggcgcggcgcgtgagggaggatgaatggcgctggaacctagaggacctggagccggcgccccggcctctttggcctgaaccaggtgcctctgacacgcagtccgccggctcaggcctcgccggaagctggcgggagcagtcccttgcagcgaagcccggcaccccgacggcagacgctccccatcacatcttccaaaggggcgaggctgggatcagcaggaatggcacccacccgggttcagactccatcccggagtggacagctcggtgcccctaacattatgcactgtccgccaccccctccccccaacac

SEQ ID NO: 1684 - DNA, 30 bp, Homo sapiens
  chr2:99061368-99061398
  hyper
cgctgctggtttgccgccgggtcgggctcc

SEQ ID NO: 1685 - DNA, 101 bp, Homo sapiens
  chr2:99346430-99346531
  hyper
gttttcgggtttacacgtgtgggttaaagaaatctatgtcaagataacctgttcatcaaactgttttttaaacattcagaaaaagaaacataaaccacaaa

SEQ ID NO: 1686 - DNA, 258 bp, Homo sapiens
  chr2:99346574-99346832
  hyper
cgactgtcattatcttttatcaaataatctgtccaacagcaaaagcacaacagcaaaatacgtggaaagcattcaaagcatacattgtgcctgcttctattttccaatgcggaatgtaggcaatgaaaccgctccagagaaacacactgttgcgaggaataaaggcgggtgtgcaagtggctcgactgccagctcagaaaagctcgcctccgagatgtcacctggcacacttggtggagtcaccgagacccagcctca

SEQ ID NO: 1687 - DNA, 146 bp, Homo sapiens
  chr2:99439368-99439514
  hyper
ggccctgggggccccttctcctcatccgggagcacgggcggcgtcggctccgcttccttcgggacactgcgttctggcccgtcgcgagcagagggcgcctctgaggtggcggcggggtcagtctcggggggagtcgtgtccccctc

SEQ ID NO: 1688 - DNA, 283 bp, Homo sapiens
  chr2:99553384-99553667
  hyper
ggctggtccatttagggagaccgcgcacggagggagctgccttgggtggtcgcccagcgaatctcctccggagcccgagccgcggctttggtctgcggatggcacagcccggcgaccccgtcccggcctcttccccggcggtgcacgcccagggccaggcaggcgagaggcgcgggagtcgcgtcccagcagggagcccaggctgcgacgagtcctcaggggacgccttcaacccaggctggaagagatgatactaacgtcagacggggagtctcgggtgtca

SEQ ID NO: 1689 - DNA, 30 bp, Homo sapiens
  chr2:100721829-100721859
  hyper
aaataaagcggcggcgcggaggaaacctct

SEQ ID NO: 1690 - DNA, 451 bp, Homo sapiens
  chr2:100937758-100938209
  hyper
cctaagcctagacaaagctctcgaaagcccaaagcctcgggcccaccggccagctccccaccccgctgctgggccggacaggtgtaggggaggcggacccgccccgcagccgactcacccagctccagggcctggtcgcacctgagcagcgcggcctccggctgctgctggcgctgcaggctccgcgcctggcctgccagcctgcgcagccggcactcggccgggaagcacttctccagcaggccgctcagcaccacgttcacgcgccgcacctgcggccgcgcgggccctggctccacgcagcgcttgcagactgtgagcccgcagggcagcgtcaccggcttatgcagcagccgccggcagcgcgggcagccgagcaggtcgcggggcgcgcggggctccggggccggccctccctcgccgggcgcctcgggctcgccgcccgggttct

SEQ ID NO: 1691 - DNA, 215 bp, Homo sapiens
  chr2:100938329-100938544
  hyper
cggggaggcggccggcgcgggccagcgcgtcccccagcctcaggcacaggccgcggtccggctgcgccagcccggctagcatggagcgaaagagctcggctgccatctcgtagtcgcccgcgcggaaggcctcgtcgccctcctctaagcgctgggcgatcggctccgcgcggtcgcagccaggacactggggcggcggcggcggcgggaccggc

SEQ ID NO: 1692 - DNA, 235 bp, Homo sapiens
  chr2:100938574-100938809
  hyper
cgcgggtccggagcgaaggcgcggagcagggaggatgcgctgctgctgggaactggccggcgggagcgcggtctcagccctcgccagcagccacgcgcgtctgggggcggcgcgctgcgagcggctgagaccgcgggcgggggcgggcgcctggcttgggcagcgtcctcagcgcggtgtgggcggcgagccccgcagggctgcaatcgttccggggtgggggccgggacaggca

SEQ ID NO: 1693 - DNA, 86 bp, Homo sapiens
  chr2:100938984-100939070
  hyper
cgcctccccgcagaggtgccggggccctgggagcaggtggccttggccgcgggctgctggcgcgccggcaccgcggcacctgctct

SEQ ID NO: 1694 - DNA, 41 bp, Homo sapiens
  chr2:101033591-101033632
  hyper
caatatcaataattccgcgggtcacagcatcccgcacaagg

SEQ ID NO: 1695 - DNA, 512 bp, Homo sapiens
  chr2:101033731-101034243
  hyper
cgccaggacaaaacccgcgggttccccggtttttccgtgcgccccgcggcggggagaggggcccaggcgctgaaacccacccgcctgcgcgtccccgagctcaccctactggagcggcgctcgtccgggtccttaggctcctcccctggccctgggggcgccgcgcgggtcgggcttcgccgggcctgtgggcgaagcgcgcggggtcctgggagctcgggaggcccgccccaccttgccccgaggcctccgcgccgcggcccgtcgggtcccgggatgtggcggcggcggcagcggaagtaaggaagacgcccggcgcgctagaccggctttgggggccagaacgccggcaccgcctcacgcggccccctcgcgcctatccggccgtgcgcgccgcctgcccgcgcgcgtccccgccgccgtccccggccgtgcgcgttccagcgggtcgcggggagtggggaggggcgcggccgcgggaccccaggcccggatcccgagtctccctttct

SEQ ID NO: 1696 - DNA, 30 bp, Homo sapiens
  chr2:101179215-101179245
  hyper
ccccacccctcctccgctgaagaccagccc

SEQ ID NO: 1697 - DNA, 30 bp, Homo sapiens
  chr2:101435152-101435182
  hyper
agggccagcgggggcgctttccttccaggg

SEQ ID NO: 1698 - DNA, 139 bp, Homo sapiens
  chr2:101435412-101435551
  hyper
tctccggttttcaccggctctgtcttggagccccgaagggcatcagacagcagccccggcacccggggattattcctgtacctctgcctccctccgcttggcgtttgcgggaaccttggtaaaatcctccctgtttctc

SEQ ID NO: 1699 - DNA, 796 bp, Homo sapiens
  chr2:101435590-101436386
  hyper
cgcctgtctcctcccacagaggaaaaaaaaaaaaaggtcacgtatgtttggaaaaatatgtaggtcagtggaacatttcctgcactggtgcaaaaggagaggagggcagcggaggaggggagggagaggcagagtggagctccaagtgcccgctcctggccgcagccccacaccccacgtgcccctgccggggaggggggcaattagccggttcctttccatccttgacccattttccggaccagctacgttcgccttaggacaggcactggttattcctccccagcagtcgctgctgtcctccgccgaccaccgctcgcccgcatcttccccgacccccgcctcccacctgcccccgggccgcacccccgccgctcattgagaaatcgcagtggtccccgcagagacgcgctttgtgccctgggtcgagacctgcgcgcaaccctgcccctggaggacagtgtggagggggtgacagtcgcgtgctcgtcccccttcatcccctgcgcgggacagcagggtggcggcccgcactgcgagggtctacactaggcgggggcggcagattccttgttccccccgagtgacaactttaatgggacctcggctggcagcctctagtccacttgcctctcctctgggccggctcacctggaagcacaacccccccctcccccagccccggcgcccaaccccgaccctgcgccccaggcccgaccccgccgcgcgtccctggcagcccagcagaggctgcggcggcctggggactcgcgggtgtctgcgccgcccagggaag

SEQ ID NO: 1700 - DNA, 336 bp, Homo sapiens
  chr2:101436605-101436941
  hyper
cggaagagtttgccgcgcgagcagccggcctctcgcaggagccgagggacccgcgcggctgcggcccaggagcggcggccgcggagcccggagacccgcagccgcggcggcggcggcggcggcggcagcagctagagcagcgcctcccgccgccgcccgggaggagctcgccgcgcccgctcgccgcctcgtctcccagcggcggcgggaggcgcgtctccccggcccagtccgcgcccggccccgcggggccgctccggcccgctccgaggtaaggggccgcgcctaggggcgcgggggacccagggtgggtagtacgtgcgcgcggggtcgcag

SEQ ID NO: 1701 - DNA, 705 bp, Homo sapiens
  chr2:101767138-101767843
  hyper
cgcgcgcccccagccacgacaccacctggagcctccggcgcctccagatggccgagtccgggctggctcggcgcaccccgctgtcacctggccccacacagcagcctcgctgctccagggcggccccgagccctccggccccgctccacccggcgtttctccttcgattcccaagtcgagtccggcctccagctcaccgggccaggcggcgaagacacctgcctcgcccggaaaacgcacgcgcccgggagccccctctaccaccacctcgacgggagcccgcgggagaaacgcagaaaaaaggaaaacaagcccgcggcagggccgtccgggccccgcgtctcccaagaaatcgcctctggcgacgcagcccgggactgggggccgcgggcccggcggggtgcgaggccccgggcccggccgccgcgcccgccccggcgagccccttaccggtgaggcggccgcccccctcgccgtgcccgcggcgccgctgcaggatgaagtagcagctgctcttctgggtcacccagagcttcagcgcgttcttcagcagcacctcctcgggcttgagccacatcgcggcggtccggccgcgcccgccggccccagctcacatctccccggccgccggtcgctgtgagccgagcccgctcgagaggcgacggcggcgcgcggggaccacagcccggccggtgcccagcgctc

SEQ ID NO: 1702 - DNA, 906 bp, Homo sapiens
  chr2:101924576-101925482
  hyper
cccggcctgctcacccgcgtgagacatgggcaaggtgatgttcccgtagcgctcctcattgtagaggacgacggccgaggcgttcctccgcgccgccaccagcaccttgtccttgaaggtgcagcccccacgagccaccagggcgacccagggcgcggcccctcggccgccgggctcgggcacgaagaagcgcgtgtcgggcgcgcagccctcgaggtctccgccgggcgcccacgggacgcccaccaggccatgcgcgccctccttgggcgagctgtcgccgaagcggccactctccgagacgctccacaccgtcaggttggtctgcgggtccacgtactcgatgtttaccacggccgagaaccactcgagagcccggccccgggccccgggcacgcacagggccagggcgagcaacgccagagccaacacgccgcgagccccgacgctggcttcgcgccgccgccacgccatggcagcaccgctgagctgactagggggagtcagggtcacgcgcgagtgcggtgcagtcgaagagcagagagaagcggacacccaccgccgccctggaagactgaggcggggtcggggccgctgcgcacgcgcacctggcggagtggacgaagggcgtgatcggccctggctccgcccccgtccgaccggccgcgttgtgcgcaggcgtaagctccgcggagcctcggaccgcgatccgtcccgggatctcaggcgcctgtgggccgaggcggggcgcgcagcctgtaccacagcttgcgccacggcggaccctgtggccaggggccaagtttgcgcaataggacgtctagcacccccaaagtgaagggaagtaactccagagaaacgggaagcttccctgaaagcaggtgtgggaccgcagttctgtaaaat

SEQ ID NO: 1703 - DNA, 758 bp, Homo sapiens
  chr2:102003345-102004103
  hyper
tcccatccagggcaccgggcacgtctggtggacccggatctcagtcccgagcggtcgcgagcacgtccctgtccccgtcccccggccgccgcctgaatgccaggccccctcgcgctccccgccgggcgctcaccttcttgtgggtggacacggtggccaggcagccccagacgctggcatgggccagggagcgggcggtggcggcgcgcagtctagggcccgggggcgcactggccgtctggccgccctcgcgccggtaggagaacatcccgggtggcgcggggggcggcctggcccgggcggcgcccgcccggggccgcaggtgcgcgtcctccttgtgggcagaggcggggaagctttgctgccagatgctgcccgaatcctctagcagcgcgggcatagcctcctcagtggaggcgctgtccagctcctcgtccacctcgttggtgacggcccaagacacggagctcacgatcacgtagcccgcggccggggacagcagggcgctgcagcacagcagccaggagaggcgggtccccggccgcgccggccgccggccgcggcgcacggacatcttgcaggcagcacgcccggccgccggggccgccagcagcgctagtgccggggagcccggcagcgccccactgcggcggaagcaaggagcccgagcccccttcccgcccctgcaggatccccgggcgcggtcccccgcgcgagtcccggcgaatccctgcagccgcgcgcgaagctcagaagtc

SEQ ID NO: 1704 - DNA, 30 bp, Homo sapiens
  chr2:102091114-102091144
  hyper
cgcggtgttgagtccgtgggtgtccttgac

SEQ ID NO: 1705 - DNA, 174 bp, Homo sapiens
  chr2:102313837-102314011
  hyper
gccgcaccctgggcgccgggcgtcgtgtcgggaccgctgcccgcgctgcccgccggcgcggccattgttcgagccccacccctgatgaatattcacgccgcgcgggcgcctcggcccgcgccctacccggcagggctcggggtgtgagtgcgtttccgccggtttttcctgcct

SEQ ID NO: 1706 - DNA, 160 bp, Homo sapiens
  chr2:102314986-102315146
  hyper
gacaagtctataaggtcggtgtgggcgccttctttgtttcccgtggcatgtggaaacttcttattgggggacgaggagagggtgataaacatgctgctgactggaggccacgccgcttggccaaagttgggagaggggtttctttcgccttgcagtccct

SEQ ID NO: 1707 - DNA, 189 bp, Homo sapiens
  chr2:102637362-102637551
  hyper
acagacatgcaaatctcgggtcccgtggagacctactgattgaaactggagtctgggggctgtcatctgtgtctcacaagcccccgggtgatgctggggaccctcaagtctaagaagcactgagatcctggaggcttctttctctccctggatgccccagctccatagggcagcgcgtgacttggagga

SEQ ID NO: 1708 - DNA, 64 bp, Homo sapiens
  chr2:102972743-102972807
  hyper
caggaggcggagatcgctgcttctcacctactttctgaacttggcctccgcagtcgcgacctgg

SEQ ID NO: 1709 - DNA, 1291 bp, Homo sapiens
  chr2:103235361-103236652
  hyper
gagagaacaggattccgattccgtgggggcgtgggaacactgagttccgcgcagggagtttccctgttcagagcaccttgtgcgcgagttgataactctcggaaaggaaacaaaatttggctttcctaaactttctgtacgtccagagaatcccatgccttgtcttggcctccgcagcgccaggctggggtgacagcactcctcctccaccggcccgggcttctcctccggaccgcgagcctgtggcgcctccccgcgcgcccagcgcaccggggtgtccccttggaggagcctgcgggggcgggggaggagggaagggcgcgactcgtgggtcgcgctggttccttcactggatggacgtccgacgctgcctccggggcggagacagctccggccaccatgcgcccgttgcggcgattccacccacagttcgctggctctgggggtggcgggtcttggcgcgcggtgcctgcgcgaagggagggcagccatcgcccccgcggtcactggggccccgcgttccccgcgggctcgggcaggtgcgcggtgtgccggccaggtccccttgtcctcctgccctgcggcttgggcgccgcgcccgccccgcccccgcccgcgggccgccctgggcagggcctgccgctgcggctggagagcagcgcaccggcatgggcaggcggccggcggcggagggcggctgagggctgctgagggtacgcgcagcggcctctcgtcgccctgcacgtgcctcgccaggcagtgcgcctgctcgcagcgaggacctagccctctggttgcagagacccggtgccgcagcagcggcgggtggctgtcgctgccctgccctgcacggggcagggcggagcgggctgagcagcccgggcgcgatgcgttgagcgctcggagggccaaccgccggtccccttggcggcaaccggcggcacccatggaaccactgggcaactggaggagcctgcgggcgccactgcctccgatgctgttgctgctgctcctgcaggtggcggggcccgtgggcgccctggcggagaccttgctgaacgcgccgagggccatgggcaccagttccagcccgcctagccctgcgagcgtggtggctcccggaacgacgctgttcgaggagagccggctgcctgtgtttacgctggattacccccacgtgcagatccccttcgagatcaccctttggatcctgctggcctccctggccaagattggtgagcgaactggacttgtggggaatgggagggggcgatctcggggggacacctgg

SEQ ID NO: 1710 - DNA, 177 bp, Homo sapiens
  chr2:105458974-105459151
  hyper
aaagagggagatgcccgtgtagagaaccgaggaggggggctggggtagaataatcagctctaaggttgcagatttagatctcaaggctgaaaaggataagcttccaccagagcatcctgtagcgcctcctgtcctgccctgccctgccctgcgcgcgcaccgcactcacacgtacac

SEQ ID NO: 1711 - DNA, 565 bp, Homo sapiens
  chr2:105459902-105460467
  hyper
cggcagggggagtttgcctcccggctggctagcttcgctagactcagtcattactaaggggttgggagggggagcttgtctcttctctcctggcagagccgcgggaggcgtcggaaagtttcctaccacttgagggacgaaggtggatggatcgagagccttgtttccctgctgggatggccgaatgtaccagaagtctcgctggcgagcagcgccctcggcttccccggcaatcatcccaaacgcacacccttcccctggccgaaggaaccccaggttgcctaggaaacggccccgcggacctggcgggccctagggtggagacccgggcggggttggggggtactcgcgaatctgctgcgggcgcagcgttggggtgtctggtccctgcccagccggtaggccgcgtccgccgtcccactcagtggggctttgcgcccccacccatgggagttgcccgttccgcagcagagttcgaaggggaaagtgggggccacgttcccagaggaacagagttccagacctctcagggcactgatggggactccgtcggacccacgggttc

SEQ ID NO: 1712 - DNA, 149 bp, Homo sapiens
  chr2:105460915-105461064
  hyper
ggctggggagagggtgatacacgttcacacaccgcttgctaaatgcagtggcgagaggagggagcagcgtctacatgaagcgaacttttcaagcgcagagccctgactcccaggcgcgggggctcaccgggaggggcccgggcgagaga

SEQ ID NO: 1713 - DNA, 250 bp, Homo sapiens
  chr2:105461163-105461413
  hyper
cggccggtgggcagccctcgacccggggcgcgtccacagcgcccacccgcggcccccaaacacctcgagagcagatcttaggggttaaccaggcaccgacctgaggcgccctgcagctgccaaaagctcgaccggaaacctagaacatgggacccaattcatcggttttcctcgtccatacatgcatccatccatccctgcatgcgtacatgcatgcaatacaaatcccgggacgccggcacggagagct

SEQ ID NO: 1714 - DNA, 112 bp, Homo sapiens
  chr2:105461555-105461667
  hyper
cgcccgccgttgctcctctgttcccggtccctgtagtgcagtccccacccccaccgtccccagctcggggagggcggggacgcggcggtgcgaggggtcctgccctgctccg

SEQ ID NO: 1715 - DNA, 204 bp, Homo sapiens
  chr2:105461699-105461903
  hyper
cgcgcaccgaatcagtgacaaaggcaagcgggcggcgccgagctccaagccggcgctcctacggcttggcgggaaggaggcccagaagatggggtgcgatttgcacccggattttcctgggctgcagcatctcgctcctgtgtacccaatgacctgttagggtgactcagcgtttatctcttcgcctccctgctgccccatctc

SEQ ID NO: 1716 - DNA, 30 bp, Homo sapiens
  chr2:105462231-105462261
  hyper
aatggccggagattcgggagaagtcgcttc

SEQ ID NO: 1717 - DNA, 30 bp, Homo sapiens
  chr2:105467129-105467159
  hyper
aggctgcagctccccgcctgctccccagac

SEQ ID NO: 1718 - DNA, 1163 bp, Homo sapiens
  chr2:105468693-105469856
  hyper
ctaaaacctacctacgatggtatctcacccggcaagcaggagctggacaagagcctacataaattctacgcgtctagtgttaatcttgagatcacgcgggggctgcctggctgcggctgggcaggagaactcctgctttcactgagttcacttaactgcgctcggcagaggcacgatacagcgggagagaagggcaggcccgttcacattttaatcggagcgcaccggcggccgctcctcggctgcgtcctgggctgccgctcgggctcgggactgccagatgcaggctctggctgggggcggcgggcgcaagcgggcgcacccgcagctaggggtgcggggtgcacgcacacgcacgctcattaagagccatgtatttattgaatgtccgagttgggttagttcattggaaatccccgaggagggctcaatttgcccttgttttcgttgccactttctcttttttcttggttcgctgaggttcctctgtgcagcgtttccgcttggccgcgtccccccaccccaccccaccccacccccgcttctctcgcctaccgggtgcactccccctcccatcccccttaactctttcagctgggttagagctgagaaagcatttgtcgccgccagccccatccaccacgcaaatccatctgagacagaaaggaaagaaaaaaaagcaccaccatgcctaagaatagagagcgagcaaacccccccaccgctaatcacacacacacacacacacacacacacacacacacacgaggaagcggtggagcagagaagggcgcggctagccgatcccggttctttcgcccggctcctgctgccacagggaattcctaaagccattggggtcgaatacacttacgatgaatctatgggggaaggtcggactgattgcttttcaaatacatcgcacggctccgctgaccggcaccctccaaactcacaagggcacgcacgctacttgcacgaatcccagaggagggaggagggaggaagggagggagagcgaaggagggagagagggggtggaggagccagggagcggcggcagcgagcggtccgtctcgcacgcgcgggcaccgcgctggtcctgggctgcaggtttcccagatgatggcatccgagaacttaaacaaagggggctgccgccg

SEQ ID NO: 1719 - DNA, 929 bp, Homo sapiens
  chr2:105469880-105470809
  hyper
cggtggcggatttccaaggagcgtggccacgaccagagctcttggcgatgcgagcccccgcttcccacccccgccgatcagagaagggggccggctggtgaagggaagaggaaactttgaaaccactggggacacatctgtctataggtattagcttgaatggtacatccgtgccgcgcgctttacaaatctctggcggggcgggggtaagggggtgagcaacccgacgcgtactaggtggggtgggcaggttgctatttttcatgtttcccccttcgttttccttctgattctcttcccccctctcgtccctccctcccttttatctcccctttcttccccccgcccagacctattgcgaacgcccagagccgccgagggaacgccaacgtctgggccggacactaagagttaagatgtggcggagggggcggcgggggaggggcggggaggggaaagtggtgagggggagggaggctggaggacgacagatttccagcttctacgacgctctgcctaaattaaaaagcaaccaatcggaacggccggaaggggggcctcgcgtcctgagccagtcattccgagcctgccaatcacccagcgggtagccaatcagcgggggccctggtgctcgacttccttgtatttgggaaagtgtggtggtgggtgcgcgctcgcggcggagggtaaacattcgacagtccccgctctgagagggagggacagagagcgaactgtcagatcggagcgagagcgggcgcccgagagagggagagagagagagggagggagaggaaaagtgagagagggaaagagagcgcgaacgagggcgcagagcgagctcctgctgcaactctgctccagcacggccagcgccagcgcccgccgtcggtgcactctacgagccgtgcagcgtgcccactggagtt

SEQ ID NO: 1720 - DNA, 217 bp, Homo sapiens
  chr2:105471236-105471453
  hyper
ccacgccttcaaggacgaaaaagttttactactctaagggaaaacgagtgaaatgtgttcctgaggaggagaggagaggagaggagagagcggacaagagaaggagcgggccggttgctggtcatccgtaatttggctaaggaagaaaggagcagcttctttctttgttatctcccgtgaaaccttcacttagcaggtggacggagccccgcgaccg

SEQ ID NO: 1721 - DNA, 441 bp, Homo sapiens
  chr2:105471984-105472425
  hyper
ctaacccctacctgccggggaacagcctgctcgcggccggctctattgtgcactcggacgcggcaggggctggcggcggcgggggtggcggcggcggcggcggcgggggcggcgcagggggcgggggcggcggcatgcagccgggcagcgccgccgtgacctcgggcgcctaccggggggacccgtcctctgtcaagatggtccagagcgacttcatgcagggggccatggccgccagcaacggcggccatatgctgagccacgcgcaccagtgggtcacagccctgccccacgccgccgccgccgccgccgctgccgccgccgccgccgtggaggcgagctcgccgtggtcgggcagcgccgtgggcatggctggcagcccccagcagccaccgcagccgccgccgccaccgccgcagggccccgacgtgaagggcggcg

SEQ ID NO: 1722 - DNA, 935 bp, Homo sapiens
  chr2:105472712-105473647
  hyper
ggtggagcccagagcttggtgcacccggggctggtgcgcggggacacgccagagctggccgagcaccaccaccaccaccaccaccacgcgcatcctcacccgccgcacccgcaccacgcgcagggacccccgcaccacggcggcggcggcggcggcgcggggcctggactcaacagccacgacccgcactcggacgaggacacgccgacgtcggacgacctggagcagttcgccaagcagttcaagcagcggcgcatcaagctgggcttcacgcaggccgacgtggggttggcgctgggcacactctacggcaacgtgttctcgcagaccaccatctgccgcttcgaggccctgcagctgagcttcaagaacatgtgcaagctcaagccgctgctgaacaagtggctggaggaggcggactcaagcaccggcagccccacaagcatcgacaagatcgcggcgcagggccgcaagcgcaagaagcggacctctatcgaggtgagcgtcaagggcgcgctggagagccacttcctcaagtgccccaagccctccgcgcaggagatcaccaacctggccgacagcctgcagctcgagaaggaggtggtgcgggtctggttctgcaatcggcgccaaaaggagaagcgcatgacgccgcccgggatccaacagcagacgcccgacgacgtctactcgcaggtgggcaccgtgagcgccgacacgccgccgcctcaccacgggctgcagacgagcgttcagtgaagccagggcgcagagcgaagagggccgccgccgccgccgcctccgcagccgccgtcagcaccgccgccgcccctgccgccgccgccgccgccgccgccgccgctgccgccgccgcgccgaccctgcacctgggccgctccgggctccagcccaggcccatccgccgccctcccctc

SEQ ID NO: 1723 - DNA, 30 bp, Homo sapiens
  chr2:105473954-105473984
  hyper
gacagcacctgcctcgtcttctcctctttg

SEQ ID NO: 1724 - DNA, 30 bp, Homo sapiens
  chr2:105478380-105478410
  hyper
agcagaagcctctgcgtttgcatcctgaac

SEQ ID NO: 1725 - DNA, 30 bp, Homo sapiens
  chr2:105478641-105478671
  hyper
cggccagaggcggccgcctggccttctggc

SEQ ID NO: 1726 - DNA, 151 bp, Homo sapiens
  chr2:105478918-105479069
  hyper
tccggtgaaaaccccggatcagaagaggcggagggggagggggacccgaggcagccgggcgtccaaagctcgcttctctccgggagggagggcagggctgggcgcggaggtggggcggtggcggtcgcggtggggcggccgggtccctgct

SEQ ID NO: 1727 - DNA, 178 bp, Homo sapiens
  chr2:105483629-105483807
  hyper
atactgcaggcggggcgaaccgtgtttatctgccccaggcacggaggggagattgtaaccaaaggaaaagaatctcgcagaaggggatctggaagagggcagttgatcctgggcagatcccctgcgccgggccctctccgctgggggcgagcccggagggaaccgaggggcccgggag

SEQ ID NO: 1728 - DNA, 119 bp, Homo sapiens
  chr2:105488311-105488430
  hyper
ctcaacaactgaaccgccagtggaatccagtatctgggcaagttcactttattccttcgcaggaagagggtcagcgacggccagcgaaagtttcccccgctctttgaagagggaggtga

SEQ ID NO: 1729 - DNA, 1193 bp, Homo sapiens
  chr2:105488787-105489980
  hyper
caaagaccagagcacacacttcgggctctgagctctggagcccgcttcttgcagaaaaccgggtatgggggaagggctgcaggggcgagaaatcctgcttccaactgcgatttcagctttcttatggaaatgaacgcgacggcccgttcgccccgagcctccctcccgttcccagcccctcttcagcttaccctttcctcccgctaacccccgccctcccggtccccgagttcccgcggcggccaggctggtggggacgcactcgctctgcgcccgggtctcggcgcgcgcggaaacccaggccgcgggctcccctccgccccgccggcccgcgtgcagcattaaatattcatagggatgctactttcttaaaggagaacctaccgcgcgggaaagttcacagccaaggagaggcacaaaagaaggtctccgcgctggttctcaagggcgaggagacgcatcccttcttgacagtgcgcctccagactggcattaaggagaggactagggaatgggatcacctatcgtcaagtcacttattttagaggggtttggagaagaggtgaacttggtggtggagagaaagcgcgctccctaatcacctgttaaacagttattttaaaattagctgtcgcatctgacgccctagggtccccaagggccttttcataagggagtctgtttaacttcactggctttgggagcgagaaagtttgccctttgtttctggaaacacgcccacgcagtacgcttaggtaaccttacactgaacaatttccttggagcggctaaaaccgcaacaaccaaacttgcacctgcgccattctcttaaaaacagggcagcggctgtgagcgctgggccggtaagtaagggcagagaaaggggctgtcgtgtgcgtcccagctctccgacccgcacgtccgggacccctttccgcccgcgcaccgcggtcacttgcagccggcgctggctgcttgagcccgcggccgggtcgcccggcttctctccgggagagtggccagggcctaggcgctcgctcaagagggagagcgaagggaaaagaagaaagttctccgccggccgcgcgcagctcctcccgtgagcgcgccccagccctgggccggcccgacccgacccgcgacggggccacgcgtagtgccaggcaactcctgtgccctgtggccagccccgc

SEQ ID NO: 1730 - DNA, 133 bp, Homo sapiens
  chr2:105490035-105490168
  hyper
cgggccaggagcactttcacaagtggttagaaagtcttgggcgccatctaacgggagcagcaaaaagttgacgctgggtggaggttaggcccgacaggagcccaggatgggcggaggagatcctctctcccac

SEQ ID NO: 1731 - DNA, 30 bp, Homo sapiens
  chr2:105654400-105654430
  hyper
gctgtcgcggatcgcgggacacgccccctg

SEQ ID NO: 1732 - DNA, 30 bp, Homo sapiens
  chr2:105760875-105760905
  hyper
ggctcgcggggcgccgcagcttggcgccca

SEQ ID NO: 1733 - DNA, 84 bp, Homo sapiens
  chr2:106362017-106362101
  hyper
gccagggcgcgtgtgccggggaagaatagccgcggatcgcagggccccggcgcagggacgggggaggccgcgatcggccgggag

SEQ ID NO: 1734 - DNA, 30 bp, Homo sapiens
  chr2:106685357-106685387
  hyper
gtcaagtgctcatctatgtttatttatgct

SEQ ID NO: 1735 - DNA, 146 bp, Homo sapiens
  chr2:107502339-107502485
  hyper
ggcacaactgtatccgcccgtccccaaagcgcaagccgtcctcccgttcgcttctccagaatttcctgcttttccccaaaccaccttcaacattccccacacacgggtctcgctcctaaacacggagtgtaactccgcgcacagca

SEQ ID NO: 1736 - DNA, 211 bp, Homo sapiens
  chr2:107502518-107502729
  hyper
cgccaacccttacccagtgccctcccttaccagccttcttcccacgccgcgcctcgaagcgcacgacaccgtggtgctcggtgctccccctggcagcgcggcactggagtccaaggcgtgcgtgtcacattttattccccggcagccgctcgggtgcgcgcgctacgcgctcccacactcacgctggcgcccgctagagctgggaccctgg

SEQ ID NO: 1737 - DNA, 42 bp, Homo sapiens
  chr2:107502865-107502907
  hyper
cggcctgcgggatcacctctccggggccagcgctgctccgcg

SEQ ID NO: 1738 - DNA, 815 bp, Homo sapiens
  chr2:107503421-107504236
  hyper
cgaaggttacctgcacagtacccgcctggcaccgcgcctggacacctccggggcactcgggtcccgggcggcggcaggaatgcaggaatgcgcacaggctgtgggcggccaggagggagtcccggcgcctgccccggcggaagtgagtctttgtgtaccctgtccaacacctccccccgccagcgcggaaggccgggctacctgcgcgcctggcagcgcctggcagccggctgggtggggcgcaggggagcgcagcatcctccccggctcgctagctccctttgttcatctcgctcaaccaggctccgcactgccgcctggccctcgctcccagagcttctctaaggatatgggatggacttgggagcgggccacctttcatttgggaagggtagctcgccaagtccggtgacggtgctccctggagacccccacctgcccgcccctccacactgccggtccccaaccccaagagggacggaaagttcttggggtagaagccggcgggacaagtggttgaagcagcctccggagccagtgggcggctgcgagctgggcagctggagcctgcgggcggggccgcggggaggtgcccatcgagtgtcggtctggtcgcgtgcggaatgtccacttgtcaccgcggcccttgcgttttctcgagacggcggcagctggtcctaggaccccaaaccgcgccgccctttgtttgctggtaaatactctcctgtgaacttcagcgtgtctctccgcgcgcactcctggcattgggtgccccaccccgctggttctctcgcggacccaaagagctgttcagg

SEQ ID NO: 1739 - DNA, 30 bp, Homo sapiens
  chr2:108160503-108160533
  hyper
cagagagatactgccactaaaaaattaaaa

SEQ ID NO: 1740 - DNA, 40 bp, Homo sapiens
  chr2:108603441-108603481
  hyper
ggccgggagagcatcgggctgctgcggagaggaacttgcc

SEQ ID NO: 1741 - DNA, 30 bp, Homo sapiens
  chr2:109583297-109583327
  hyper
gacaaacaactccactaacatgatgaagtg

SEQ ID NO: 1742 - DNA, 164 bp, Homo sapiens
  chr2:109647977-109648141
  hyper
ctctgcccgcctcgccgggctgcaccgagtccgcgggtctctagcgcacggcctggccccacgtgcggcgaggagggcgcagtgaagttctgctgtgtgcaccccctgcagctcggccgggaagcgcccgctggaggaacggagagcgccgcttcagcgtcggc

SEQ ID NO: 1743 - DNA, 30 bp, Homo sapiens
  chr2:109648481-109648511
  hyper
accccctacggttacgtaaacagaactctg

SEQ ID NO: 1744 - DNA, 1810 bp, Homo sapiens
  chr2:109744564-109746374
  hyper
ggactggaacccagcccttcccgacgggaacgcaaagcggccacgagggggcagcgcacggcagggaatcttcgccgccgaccccagcccaccgccaaacttccctgctgctctcggtcctcctgtacgtacttccgttgctctgacgctcccagaagccggggcgtcgggaaggagagcgcgaattcaccctcctctgcgcctccgtaggaaaaaattggagcgggggttcacgagactgcgccgcggcgggcgctagagcccctcgcacagcgtcgccaagggtgcggcgtggagccgggcgcctggcgccagggtgctggtcggcgggcagcggcgccagcctccgacccgcgactccggcgagccaaggctgcgccgggaggagtcggcgcgggccccggggtgcccccttcaactggagcgccttcccctcctgccttgcggcgcatccccacacctacaccggaacgaagctccggggctgtcacttctgcgcgcttctcggaaaggagtctgaactgggagcgctccggggggtcgtcggggaggatgcccgggcgtcggctgtgtccccaagctgctcgccggcgctggcgaggaaggcagtcgggataacgccgcccaaactttccttcgcagcagcgttggcaggaaacgtccctctctgaggctcacgaaaagccgaaaaagactcggacgcttggaggaggcagggccaagcctgcgcaggagaggttccccggagccctggagatgtcctaggggaccaggctaatcgccggcttgcgcccaagcgaagggaagtcctgcaggcacggcgcctccttccctgagccccgcagtgaccgtgacctccgcgcgcacccccgcgcacgtgctcgcggccgaggaagaggaacggtcctgctgaatcctctggaggacagcgactagcgagcaggccaggggcgcatggaggtgccgcgggggcggtgcggctcgccagctgcgcggaggagcgtgcacgccgcgccccggcctccccggggacctggccggccgctgcccgcacttcctgccgctggtctcccaggcgcgagccgccgcttgcagcacagaacccgttgagcttcgtgcccggcagcacccccggtcccccgcgcggggcggacttgcggcgggacaggtgtagcccgcagccgcaggcgctgcgctcaggactgggcgggctcggctggccggtccccgccacgcaggccggtccccgccacgcaggccggtcggtgagccacttcgcaccgccacagccctagcatcgggccaccagccggggtgaagaaagtcacggcggagcccggctccccagtcctgatgctggctgccggtggcgggctccacgccggccccgggacctaggcagccgcgcgagaccgctgcgggcgcctcccccatgctgctcggagcgtcctggctgtgcgcatccaaggcggccgccgctgctgcgcagagcgagggcgacgaggacaggccaggcgagcgacggcggcgtcgggcggcggccaccgccgcgggggcgggcgaggacatggacgagtcgtcgctgctggacctgctggagtgctccgtgtgtctggagcgcctggacaccacggccaaggtgctgccatgccaacacactttctgccgccgctgcctggagagcatcgtgtgctcgcgccacgagctgcgctgccccgagtgccgcatcctggtgggctgcggcgtggacgaactgcccgccaacatcttgctggtgcgactgctggacggcatccgtcagcggccccgc

SEQ ID NO: 1745 - DNA, 1405 bp, Homo sapiens
  chr2:110370720-110372125
  hyper
ccttggtactattaacgaaaatagttgtaaccacacttggaaaaccgctggcttactaacaagcgagataaatctacaaaagtaactggaaaggttcaaaacagtgaacaaacgcgttcttttagagtacaaaagagtcaaggcgggaaaaaaacggtttaaaatcccaatggaggaaaacttggacgaccacaccatcggataaaacgggagagcttttgaaaagccaggggagccgggctttctcccggcggcagggaggctcggaagtgctcacggctgcaaaagatgaccgctattcaatcagtccgcactgcgccttcaactccgttatagccgtaagagacccacaaacaccgctgtggatgtaacttttggcaaagaccgggaagtcgttcaagaactctcccaccgtcccgacgctggcgccgcgccccgcgaaccggggtccggccgcgcccaggctccgcagaggctcctctcccgccccaggcgcccggccgccgcggaagccggggagcactgggcgggcggggccggagggggcgcgggtcacaatcccgggccggaccagggggccggtgggtcgagggcgggaagtcccgcgggggccggggagcgcggggctggggccccggcgtcggcgggactcaccaggtgccgcgccacctcggaggaggccatggtcgcgggcaggggcacggtgaagcggctgtatcagcccggccccgagcggctggtcccggcgacggcggcgggaaggccggagggcagaagcaacgggcggggcgcgaggctaggctgcctccgcgacggggaagggacaggggcggggccgagctggaggcctccgggggcggggttggggcggacgccctgtggtgcgcgctgagcgttttgcctgcgccaagcgagcccctcacaggagctaccctcgacgcctgaggactgagcgtcagcgttggggcgggctgaaggagagctgggactccaggaagacggcgcgaggaatgcaggcgggaactgcggagcagtgattgcggccctcgcgaggccggaagtgggcgggccttgaggcgaggccgccctaggtaggtgtggccgagacagcggggagcggaagtgggcgtggcctggtggcgtgggcgcggggcgggggtgcggggggcgtgtccgcccgggcgcggcccagtgaggcggtggccgagtcctctggcctcagacgcgtaggctggcagcccgctgagcccgccagactccgccgccgtcgggagccggccgctgggagcccgtcgctatgggaccgcgctgagccgcccgctggcgggggagcagcgcggtcgaggatggaggggccggcagagtggggccccgaggcggcgctgggccccgaggcggtgctgcg

SEQ ID NO: 1746 - DNA, 30 bp, Homo sapiens
  chr2:110962327-110962357
  hyper
atggggtaagggggcgttacaacctgggaa

SEQ ID NO: 1747 - DNA, 814 bp, Homo sapiens
  chr2:111490023-111490837
  hyper
cgcgccggacctcccgcccgggaagccagggcagggcggggccggggagggaggggagaggaaggtgaggagggaggagacgggccgggaggggtggagagggagagggcgtgcgcctggggcctcacctgctgggagctggaggaggcgcggagcgaagccggccctgccagccacgcggagaagcagaggcaggtgagcgcgatgcagccggcgccgggtctggggctcggggactcctccctgcaccgctacctggacggcgacttctggagcctcaagaacgagctgcgcggactcctcggcggcgcccgctcttccggcaaaggtaccgcgctgcggccgtcgcccctgcccgcgcccccgaagccgccgagcgtgtcccctcggtccccggagcgtcgctgcggacaacgccctggcgagggcgaggtggggtgtgcgccgcgcctgagaggcgggtccctgcctcgccgcaggtgacgggctcccctccccaggtgtgtgggcgcagccggccgccgccgacctcttcggccccctgagaggtgccctctcctcccgagctccctcccccacgaagagtcgggtgcagggctgggccccgcggtgacaggcgcggtgtctacgaagaccgtgtggctggaagatcggccttgctggtttgttgaacctgtttcttgagtccccgccccgcgatgtcccacccttggtggggagaaggggacagaaaaccgcgatgggatgggcgcacagggatggagtggccctgtccagggcgtgtctgggcgtcggggtgggacaggcttacagg

SEQ ID NO: 1748 - DNA, 1109 bp, Homo sapiens
  chr2:111874607-111875716
  hyper
tgcctagcattggtccgccgtctcactgtactgaatttcaagaatcatggcctactgccagccaggtcaggaccgaaggcgctagtctggggagactggagcaggtctctagtggttcacctgttcggaggctcttcctgttcagttccctctgcgcgccagagggtggcaccccaggcactccagaggtggagaggaggggacgacaggggaggcaaagagagaggagcggagggaaggaccagggaggaaggaccaaggagggagctttaataaattctcagaccttggtctcgagttcccggctaatttgggggcaaagccgaccgaccccacgtccacgcccacccccttacgggaaaagccggggtttccactgggctaggtgtcagagttgggaatgtctaaaacaaaaaaggcttccgagggttattcatggccaacagtttccacaggagaatccaaagggaaactagtttccggggccgctgtgtgtgcgggtgcttggtgggctgaaagctgctgtcactagatggctgtaagtgtgccaacatctgacctgtcccattgtgttgtgttttgcagttgctggatttgtgcgactcggtgaaggatgatgcccggagggtgatctcgacctttaacattccacacacctacctccacgcaccaatcgccggaatctccaacccgcgggccgcgtgggctttctaccctgcaccgctgcagccgcggccacgggaagaggcgcgctcccggcggcccaagctgggagccaagctctaacgggtgtggcgggaagtgtggtggcccgccagcagctgccacgacgctcgctccaccgacgcccagagctgtggccgaggccgggggctggcacccgctgggccgccactctcggggattttggtggcaaagcggaggtcccgccgaggctggcgaggtgcgcggctggctgctaggaaagagatccagacggtcgcctggtgcgctggatccctgtgccctttccctgaaacccagcctggcctgactgcaacctctcccaacttcagtgccggatcccctagacaatcagggtgggctccccgctgcgagcgcgccccaca

SEQ ID NO: 1749 - DNA, 714 bp, Homo sapiens
  chr2:111877552-111878266
  hyper
ctggcctcagccagtcgagggagctcctacgaggttatctgcgagcccagcaaatcttgggggtcctagccaaatgcagtgcgcaacgttctctctcacttggaggccgccattcacctcgtttttttttttcctaaaaggatttttttttctgagtgcttttttcatttccctattttacctgctttgcacatgcctcccgccctcacccgggaggcggcgaagacgcccactgggaccgcgcctggccgttttctgggcgcgtcctgcccccacggcctctgtctcttagggcgactgggcgcggaagaaaagctggagagcccctgcggggtggcaggaggagggtgcctgagtcccgcgagaggcccgggcgaggaagatgcgcagcctgctgatccgcgtcccgcccggcgccagggaccctcagagggaggagagctcaaagacctcgccccgcgccttcgcgaggaccaacccagtccccgcgcctgccccagagcggcttagaaactcagggcacagtgagagcgcagggcgcctcccgaggcttcacaccgccggccgggccagcggaggctgtgaccggagcgccccctctgtgccgcgcacgccgcggccgccgccgggttggggtaggtgagcgggaggctagggtacacttcggggtgggggatgggcgcgcacatggccgccagcaggcagagttactcc

SEQ ID NO: 1750 - DNA, 31 bp, Homo sapiens
  chr2:112655268-112655299
  hyper
tacctttaagaaactacgtatataaattaag

SEQ ID NO: 1751 - DNA, 638 bp, Homo sapiens
  chr2:112656486-112657124
  hyper
gcaaacaccctccacccactgcggtgccagaggagggggcgtaggcgaacctaccgtccactgaccgcggcgcctcaagcgtcccgagggcacccagcctggcttgcgggtgcgcatcgtggtgaagccgggtcggggtcggcgttgcaggctcccctcttcaccgcagaggaggaaatcgagctcggccgggcgcgctgcaagtcctgaagttccgacgagtggaacgtaggtagcaggtctggtctgggatgcgacgagaactttccactagagttgcatggtggggccccgctctggccggagtcccgggggccacagatccggtctcccgagggaccggcgcggggcgaacgaacgggctgcgggagtcggagccgcagtccgggagccgcgatagactgaggccgagcgacgggccagggggggacggcagtcctggctgctcccaatgggcccttacgggcattattagtatccctttttaggggcacccagagagtgtgggaaaaggggagcgttcttttcactcctgttatggcagaacagaacttacagtgctcggcagcgtttacgtttatctggattcagcgaagtgttgttacaggcttttttttttttaatttgagaccgagtct

SEQ ID NO: 1752 - DNA, 22 bp, Homo sapiens
  chr2:112791985-112792007
  hyper
ttttgagatggagtctcgctct

SEQ ID NO: 1753 - DNA, 30 bp, Homo sapiens
  chr2:113469219-113469249
  hyper
tcttacatccagaaattattaaatctagct

SEQ ID NO: 1754 - DNA, 4 bp, Homo sapiens
  chr2:114034670-114034674
  hyper
cgcg

SEQ ID NO: 1755 - DNA, 30 bp, Homo sapiens
  chr2:114035830-114035860
  hyper
cgcgggtgggtcccgcgaatcccgtgctga

SEQ ID NO: 1756 - DNA, 162 bp, Homo sapiens
  chr2:115918730-115918892
  hyper
ctggattcggaaggcgcagctacaggacgcccgctgccccggatcggaaggcgcagcacctcaggccacaatctcagacacgccctcgggtcccgacaggtgttgcccgcctcccacggggctccgggaccccggtccccgggctgccccctgccttctggg

SEQ ID NO: 1757 - DNA, 87 bp, Homo sapiens
  chr2:115919337-115919424
  hyper
cgagggagggaccctacgacggggagcccgcccggtgccgctcttcttcccctccccgcccctccgctccccccaccccgtcccttc

SEQ ID NO: 1758 - DNA, 724 bp, Homo sapiens
  chr2:115919830-115920554
  hyper
cggggaagggggcagagaggtaaaggctgaaggtgccccggggaaccccggcgggcggcccaccgagggagggagaggcggccgggaccaaggaatggggcctcttggttccccattaacgcacgctgaagaaatctgctgcgctcctgacggccgctcaccgggttcgagccccgtcctcctatagccggggcgctcgctggccaaagcgacccgagcaggcgaatgacctttaggcggacggggttttccctctgctttcttgtttcttttgaggagacgggtgtgtgtttgtgaggtggggatgggggaagagtgtcccagacatccgtagtctgctgagcggaacggagcttggggagcggcgaggcattaacgattaagtggagccgggaaggcgctggctttggtgatgtgttgggtttggatgtgtcgcgtctgcacagatgaggtgccctgcgtgggctgagggttattcctgtctctttcccgtccgtctacacccgccaacccctttttgttttggtctttagaaatctgtagcataaccgtaccgtcgtggatccccatctcgtctctgtccctgatctggggtgattgggacttcggtgtcgctctttttccaaagttggagggtcgggagcgccgagacaccctggcgaggaggaggaggaggaggagggaggctgcgctgagccgggtgcaggtgcgctcacgtttgcat

SEQ ID NO: 1759 - DNA, 30 bp, Homo sapiens
  chr2:118771506-118771536
  hyper
agggaaggaggaggcgttcttacctccggg

SEQ ID NO: 1760 - DNA, 682 bp, Homo sapiens
  chr2:118981174-118981856
  hyper
ttgtgaagccaagggcgcttggcatgggaagagagccgctcgtgatttatttgggagagggatggggttttggaaaggaaattggggggtttacaaggaggacgggtgggttttactcaacaacttattcttgggcgttttcgtggactggagaggagtttcgatcccgtctcgggctcacctgggaagccccctcctggcgcccgctttgtttggcgttcctttaaagcccggtgttggcagagcgacccacaatgaaacaaattctcattttatgacgtctttccccccgtaggagtccgaacaatgtctgggggcttggcacgcatgaagataaaagaattttattttaaatgcgatacatgtcaggattagacagcgtttcctttcagctaaactacagagcgaatcttcatttcctgtttcactgcttcccccgaaagaaacttttctttttctttttctttttctttttttttcttttctttctctcccccagcagagagtccgagagaaaagtgctgggcacagagctccccacgaggtccccggaaagcagacttagctcctgatcgttgtcaatctttgggcaacccggggcctcgcaacggctcgggtttagtgtgatctggggaggctgcagcccagttccggctaccgtgggcgcctgagcagagccggg

SEQ ID NO: 1761 - DNA, 202 bp, Homo sapiens
  chr2:118981945-118982147
  hyper
cgccgggccgccgggtcaccggttttccgaaagggacccggcagagacaaagtgccttcgccgctgcgataggttggttttactttgcaataaacagcccctaatgggaccgggcgccgggcggagagctcggcccggggcgcggcctttgccgcctggctctgcgggccgccccgccgggcgccaggttttggggggtggc

SEQ ID NO: 1762 - DNA, 139 bp, Homo sapiens
  chr2:118982253-118982392
  hyper
cggaggagccgggcgagaaagcccgaaaagggaggcggttatttacgaccggcgggttggagtctggcaccagatggtgggggtctgtcaggcccggccgccccgcccagcgccccgcaaacagcgcccggttggcagc

SEQ ID NO: 1763 - DNA, 632 bp, Homo sapiens
  chr2:119067605-119068237
  hyper
actttactatcagcattaatccggcttagcccgcttaatgatgccacttgtggcactccgaaggcagcggagaagtctataaactacttccattaaaatgcaaatcgggcccgctgagaaaacaagtgacacaaaaagtgggcgccgcgcggccgccgcccgcgatggcgccgatggctgatgccgcgattacgccggcgggggcggcccgcgcgccacgaacgtgcccgacaagccgcgccgcttaatttctgaagagatttatattttttttgttgtcaggaaatgaacaaatacttatcaatgtaaaaactgctatctccgatctccccgccgggtttttcatactgatattctttgcaccccgtaacacaggaaatgaaaatcttctccgcctctcacgtcgccgctgcgccttcaaatcctctgcgagcagactggcctccccccaccggccccctcccgggctcccctccccggtaaacagaaaagaaaacttctgtgggcgaaggagggagaaattccaaggctctggctttccccagccgacttgggtttcggggcagcgcgggctcccttctttccagcgcaggaagaaggggtgagggaggaggggccggggtgctggcact

SEQ ID NO: 1764 - DNA, 546 bp, Homo sapiens
  chr2:119532058-119532604
  hyper
agccactcgactttgcggagggggctgaaagcctcagtagcggacccggccgggaaaggcggagccgacagctgtcgcggggcggggcttccagggccgggaggtggaaggcggagagcggcgagggctccggctccggacccagccgagcgcgcagcgtgaagcggagaacgccgggttagcgccaggctgaatcctcgctctgactcctattgcggtgggatgtggtctctgagtctccgtttaccgattttacggaatggaacttataatgaacactagccaacacaagcagaggtttgccttgagtgacttctctgaaagtggcaccttttaccattttttaggtaacagaaactgacctgagggtgactaagcccgagatgaaaagctgttaaagggacctgcatggaagcaaaccggtgtgcggcgccgagcatagggtgctgggggcgccttttttctgtgctggcgtcccccacccccggcttgctgtcctcgtgaaacctcgctcccgcactgcagctgggtcgggaagcccttcct

SEQ ID NO: 1765 - DNA, 30 bp, Homo sapiens
  chr2:119591129-119591159
  hyper
gacggccgaggatccgagacaaggagctcg

SEQ ID NO: 1766 - DNA, 171 bp, Homo sapiens
  chr2:119591903-119592074
  hyper
cccagggtccctcacttacatcgcagtccccaagtcaacactcgacttgtcactttgcaccacaatgcggtcagccctgtgaggacatgaagaatggatatgaaactcgaggccagataagcgtggaactaggttcagccgtcctccctggggtacctacctccctactcc

SEQ ID NO: 1767 - DNA, 174 bp, Homo sapiens
  chr2:119592575-119592749
  hyper
gcaggaaaagttcagttggcagcccttcgcgagcaggtcctccccagcccgcaccgagaaggcaggcgcccgggccctctgactccagtggctcagagccggctcaggactggcagggcgaggagccggcgggccgagccagcgagggtttgggctgcccgcggtgtgtgtgca

SEQ ID NO: 1768 - DNA, 1123 bp, Homo sapiens
  chr2:119599829-119600952
  hyper
cgcagtctgtggggtcgtatttctcaacaagtctccggaaaacgaaaggggggcagaacagacagaccgacagaagggacccgggaggtgggggagaagaggtgggcagacacgaaaggaaacacactctcgcacacaaagaaaagtcccagagaaaccagggccggcgatgcgggtcgggaggcaccggagaagcaatgacattcaaatgaaaaaggcaacgaaaacgaaactgggcgggggcagcgaggcggtgggggaggggataaaataattataataattataataattataacaataataataaaggagattaataaaaatgtccagcaaatagagatcgctacacgtatgtgttttccttacctgaaattaaatatatacaaggtcgtaagcggtttggctagatagagctttaaggagttcgcagtttcgtcccttatactgggaatagagaatggatcttatttttcgatagcacctgtccgagtctttctcccttttcaaaaatgctgcgtttcaacgtcattgtccattctgaggctctctttctgtctctctcgctcttttccctgcgctccctccctccttggagcagatgctttctcccccagcgaggggccgggagacgacggcggcggtgccgggagggggcgcgggcgcggccccggcctgtggcggctactcgctctcgtctttgtcctggaccgtggtggtggagtggttgtacagtccctgggccatgaggtgcagcgccaggccgttcttgatgcctgtggctttcttgatcttggcgcgcttgttctggaaccagatcttgatctgggactcgttgaggctgagttcctgggccagggtctgccgccgctgctccgtgatgtagcggtttgcctggaactccgccttgagtctctgcagctgctcggccgtgaacgcggtccgcggccgcttgtcctccttctcgttcttcttcttcttcagcttcctggtgcgcggacctgcagcggcggagagggccggggtggggtgggggtggggaccgagggcagaagggaggggggagagggcaaaggaagccgtgagaatagcattgccgagctgggccgcgagccccgcgctt

SEQ ID NO: 1769 - DNA, 73 bp, Homo sapiens
  chr2:119600995-119601068
  hyper
cgccagccaatccctggatcgaagtgcccctcaccagaccactggggtccccgggttccctttgggagggcaa

SEQ ID NO: 1770 - DNA, 258 bp, Homo sapiens
  chr2:119602828-119603086
  hyper
cgtggctacgttgttcccggccccctgccggaccgggtgtctggagtgctgatcttgggccaaagcttctgccgctctcccagacactgcgggccggggcgtcaggcaggccttggccttctctcccggagcccagctcaggtctcctcctcgggttcgccaagcgcgaggggcacacggaaaagtggtggaaggaaagccgagaaaaacaggcctacggatgccagaagtctgctggatgtgcgggtgaaaaaagga

SEQ ID NO: 1771 - DNA, 30 bp, Homo sapiens
  chr2:119605426-119605456
  hyper
gagtcagggccgcacgtgtgcggagccaat

SEQ ID NO: 1772 - DNA, 30 bp, Homo sapiens
  chr2:119606730-119606760
  hyper
gaagcctgcggtggccgagaaaggcgtcag

SEQ ID NO: 1773 - DNA, 42 bp, Homo sapiens
  chr2:119607442-119607484
  hyper
ctgcaggagacgcctcgagaagggctgcggaagataatttat

SEQ ID NO: 1774 - DNA, 30 bp, Homo sapiens
  chr2:119608636-119608666
  hyper
gaaggaggtcccaacgaggccttcagtgat

SEQ ID NO: 1775 - DNA, 144 bp, Homo sapiens
  chr2:119610230-119610374
  hyper
acctttctcctcttgactccccgcgggaaacggtggaaagatatcaatgatttctgtacattgcacccggtggccaggattcagaaagcgctcctggggccctggtttcctctctgagccccgccggctgtccacaggcccgcg

SEQ ID NO: 1776 - DNA, 22 bp, Homo sapiens
  chr2:119610540-119610562
  hyper
cgctgggactgtatcacacagc

SEQ ID NO: 1777 - DNA, 166 bp, Homo sapiens
  chr2:119611086-119611252
  hyper
ttcaaagctgggaacggaaaacgccagaaaagaagaaaaaacacaacatccaagtcctttgtgcaggaacgcccccgtgactccaaaaccgttctttttgcttgtcccagaattaactgtcttccttctcttccctttgactcctgtaggggtgcgggtggttgtc

SEQ ID NO: 1778 - DNA, 604 bp, Homo sapiens
  chr2:119611311-119611915
  hyper
cggcgcctaggttttctgcctctgccggccccggagcccgatccaggccgcgcctccctgttgcccaaggggcgtgcatctttgggaccctcttcccggggaggtgcaagaaaagctccgggttccagcagaggtcggcgctgcagggcccaggcgggaagatgtggaaggaaaaagtttagtacagaaggtggggcggtaagggaacggaaagtctcaagagcctgggagcgggggagaggggcgagaacccgtctgtctcccccaccccgcccacctccttcctcgtattgaatcggatgcggggggcgggagggggtcactgcaatgccaaggccttctcgggccatcttccctgttcccctgctccagcagaaagctgggaggggaacgagtgtgtagccccgcgcgtgcgtgtttgttcgtgactcagaggctctgggtgggtgcgtgagtgagtccaagtgtgtgcccgagtgtgcacgcaaaaattgcgttcgttttgtctctctaattctcgtgtggttgcgctttgctgtgtcggtgtgaaagtgtgtgtgcgtgtccacgtgaatagtctccatgtgtgcgtgtcagtgagtga

SEQ ID NO: 1779 - DNA, 30 bp, Homo sapiens
  chr2:119612307-119612337
  hyper
gagctcgccaaatcccgctgggaagccgcg

SEQ ID NO: 1780 - DNA, 30 bp, Homo sapiens
  chr2:119612772-119612802
  hyper
tccctcccctcccgcgccgatgactcccgc

SEQ ID NO: 1781 - DNA, 644 bp, Homo sapiens
  chr2:119614602-119615246
  hyper
cgggaagccccggaacggtcctcgccagacatagccggctgtcctggtccttagcttcaggctggcggcgcaaggccagagcggctgccttctaggcacctgggtggaggtctcgcatagcattccctgagaagcgaaactgcccttggggccgcagcgagcctgccacatcgaactggagaccctctgctttcgggatagatgggacgtttctgctctgtccttcttggagtcccggaatcgttctggggccgcgtgctgcctggaggcggtgaatttcagggtcttgagaagccgcgcacacacgggattctgggcgagcgtcccgtctcttaattcctattaagagacgggaaaatcgagggactggaggtcccatcattgtcgcgtgagcagcctcctgaacaccaagcgagacctgagggttccgctggggcctcgccctgacacccgggccctccgtgtggtcgagagtttgcgcccgctcccgctagggcagcgaggtcccacttgcggccggctggggcatggtggcaccggttgtctactccccacttgtgacaccgacagcttccaactcctcagacccaccccgtggaattctggactttgtgagggccgccggggtcctggccctggggtca

SEQ ID NO: 1782 - DNA, 30 bp, Homo sapiens
  chr2:119615731-119615761
  hyper
ggcagagagcggaagcggttctctttaggg

SEQ ID NO: 1783 - DNA, 569 bp, Homo sapiens
  chr2:119615982-119616551
  hyper
ataccaagcgggaaacgaagcaccgaatatttccccagctcgtaggaagccagatgggggccagttccctcaggagacgctccaagtcgccctgcgggctccaggtggggacaggagttataaccttccctgcccttccccctgcaacacacgcgaggtctcagcgctcccaggcgctccagtggggccgcgttccccgccagggtgggtcaggggaatactctgcctgcgccctctccgagggtccgcgcagagcgagcgcctctttaggtggggcctctggctccgacccctgctcccaacagggatcttcgtttgcatcacccagaggagctggccagagagccgcgccggaggccgcatctccccttgttggtattgttgtcggcttgctttcttctggcttcccagctcagtgaccccggaaagggtcgagcatccgactccggcatgctggttggctgcccccggaggcggaggtagggggccagaaatgctgacctgggcaggcccccagccctgagctcctggggtggacatctcagggtcccgggcctccaagctcatgg

SEQ ID NO: 1784 - DNA, 30 bp, Homo sapiens
  chr2:119617113-119617143
  hyper
ggtccaacgcaccccggtgaagggaattcc

SEQ ID NO: 1785 - DNA, 72 bp, Homo sapiens
  chr2:119916524-119916596
  hyper
cggctcccaggagccacaagtgggcgcagcgggcgcggtcccaagccggggcacatcggacacacccacccg

SEQ ID NO: 1786 - DNA, 30 bp, Homo sapiens
  chr2:120189852-120189882
  hyper
tgtgagaaatgaggcgcgtctggggtggag

SEQ ID NO: 1787 - DNA, 30 bp, Homo sapiens
  chr2:120190187-120190217
  hyper
gtgggtggcggtaccgctgcccagcgggcg

SEQ ID NO: 1788 - DNA, 384 bp, Homo sapiens
  chr2:120281516-120281900
  hyper
ttcgtctggcgcgcacgatgtttttctttgggaaagggtccctccggagaagagctgggagagattaatgttgggaggattgggagggaagagtccctattcctcatgggaagatctgctagtccctctccacctgcatcctgcccgaggccggagaaagggcgagactgtcgctccctcgggtccccagcctgcagaagggcgcagtactcaccgagtgcgcggcgcaggcgagcagcaccggcagtagtagctgctgcagcggcggcgacaggtggggacgcatggtgcccgcacgttccccgagggcgccccgacgtccgcctgcccgtgccctctgcccgctcgggagctcagcgccccgcgcagggtcccgggctccgg

SEQ ID NO: 1789 - DNA, 140 bp, Homo sapiens
  chr2:120281938-120282078
  hyper
cgacctgcggcgggccccgggactgctcctcctcggaccaggtggccgcgcgcgctaagccgcccgccccattgatcaggacgcggctttgccggcgcgcctcctccacccggcagggactggcgcggggtcggcgcgga

SEQ ID NO: 1790 - DNA, 661 bp, Homo sapiens
  chr2:120301686-120302347
  hyper
actacaagaaagtgggcgtcgtgagtgatgcctgtcaggtgaagccccgcccactggctcgggcggctccgccccgtccgtcttctctcccgcgctccgctcttgaagggttccagtgtgtggtgtttccaactttctcatgtcccctcgggaatccattcgtatcccatgccataagtcgcgctgtctattcttgaccaggcccggcaaactgctccgagctcccaggaatcacccgccgcctccggtcgtggcccgcagcagcccggctcccccgccctggggcgtttggtcgcgcccggccgccggccctgggagcgcgtccgcgtcgtcatggcgacgctccgagcgggcgccggcgctggcgccggccgaatccggcccgggaaccacctccagggtgagcggccagggacctggggcccgggtggcccagggtcggccgctggggcgccgcagcctagctgctgaggcgaccgagccccgggtggtgtccagccgcaagtcggccgcggcttgggtccgaggagagtcgggcccagagggtgacctgaggatggtggggggagcggtgcgcgggcctggggcgaccctgacccttagcaggagtggaatgaaaggtcgcggaggggaggaggcgcttggccggggcgagagggcc

SEQ ID NO: 1791 - DNA, 129 bp, Homo sapiens
  chr2:120770808-120770937
  hyper
gcgccgcagtacagtccgctgcgctcctagccgagtggacccttcctcgcccgcgcctgcggtagcggccttgtccccggggaggcgggcgggggccgcacccagaccctagggcggccggcccctctc

SEQ ID NO: 1792 - DNA, 199 bp, Homo sapiens
  chr2:120770966-120771165
  hyper
cggagggaggggcggcggcggccaatgaggcagggccgccgagtttcggtcgataccgcgcgacgggccggggcggagggcccggggcagccgggttaatgtttgccgagcggacgcgctccccgagccgcgggtacccctcgctggtccgctgggctgccgtccagcgggagagacaaaagtcgcaagggaaggggaa

SEQ ID NO: 1793 - DNA, 30 bp, Homo sapiens
  chr2:121009840-121009870
  hyper
ctggcccttgtaggcggcctgggtccagtc

SEQ ID NO: 1794 - DNA, 30 bp, Homo sapiens
  chr2:121010900-121010930
  hyper
cagtcctccggccgcggcttgggcagggtc

SEQ ID NO: 1795 - DNA, 147 bp, Homo sapiens
  chr2:121103929-121104076
  hyper
acgtcgtgcggcggcttccggcggccagaggagctcggccgagtggacggcgacttcctggaggcggtgaagcggcacatcttgagccgcctgcagatgcggggccggcccaacatcacgcacgccgtgcctaaggccgccatggtc

SEQ ID NO: 1796 - DNA, 633 bp, Homo sapiens
  chr2:121104109-121104742
  hyper
cgcgaggacggccgcgtggagatcccgcacctcgacggccacgccagcccgggcgccgacggccaggagcgcgtttccgaaatcatcagcttcgccgagacaggtgggtccggccctccggctgtctgccgcggtccccgctcgctcccgctctccctctccttgctagctccggctgccaccgccgccaccgcagcccgcgcgccctggggcagcctggactcccggcagagctccttcggccgtggccctgcgcgctccgcccgggttgcagtcctcttcccccaggccgcagacccttgcctgctgcctcaaccccccgccgccgatcgcctggccctccacccctgctctccggaatcgggccccagcgcctctgggcgcgcgtccccctcccggcagatgcgcgcggccctggctctgcgggcacttgcttggtgattgcttaatgtttttgtttcccacgatcggagtgtaggcttagcagtgtggatggagatgtgtgtgcttgttgatatacgtgggccggaggagagagagagtgtgtgtgtatctgtgtgtgtgtctgtgtgtgtgtgtgcctgcgtgagaggcccctggggccgcttccatcaccggcggcgtgggcttgcc

SEQ ID NO: 1797 - DNA, 190 bp, Homo sapiens
  chr2:121199616-121199806
  hyper
tgtcatttgccgggcgttccgctttctccactgtaccatgctaatttttcgagggacaattttttgacaatgagtcctccagcccgaacagaaaccctttatggggccggccccagggaggccgcggcgctgccaaggcaaacaaaggctcattgctgccgcggaacatgcctgcgcctttcagggccgg

SEQ ID NO: 1798 - DNA, 310 bp, Homo sapiens
  chr2:121200363-121200673
  hyper
tctttaatctgcacaccaggccggaaaggccatgcacgtcgtcgtcatcccatttcgtagatggggaaaattagctcggagaggtgacatcttgcccgaagtcccacggctggtcagtggcaagtggacagtggcaactgcgcctggaaaacgccgtccgtggcgcggtcgcggcgccaggggcatgcctgacagccaccttctctcccgtgaccgccgggctccgcatcagggcgagccactcggctcgggagagcaggaaactggggagggccgagcctccggccacgccttgtcagccccggagcct

SEQ ID NO: 1799 - DNA, 31 bp, Homo sapiens
  chr2:121427431-121427462
  hyper
gggagtggggtgagggcgggttcacccttct

SEQ ID NO: 1800 - DNA, 31 bp, Homo sapiens
  chr2:121438058-121438089
  hyper
ctgttcctcctgaacccgtgtgtgtgtgtgt

SEQ ID NO: 1801 - DNA, 562 bp, Homo sapiens
  chr2:121494686-121495248
  hyper
gatggggagaggcgcggagagagttgggcgccaatcctattaagggtttagagaggggagtcttttccccggacggggcgggggcggggagctgggagggagcgtgtgcttgcgtgtgtgagtgtgagcgcgcccgccgcgctggagagctgggagtccacccagctcggcgccttttcagcccggcggtaactgctgtcatttcctaggaaacccgacttttaccgcgcggggagctggggatggagcccgtgcgcctcaccctgggtgatcggtcgctgaggctctcggggacctcgagcccccccgagggtgcctctttccactaccttctcttttgtgtaattgttctgtggctcctagagttgatcccagctggaaaagtagacctgtccctactgtctggtcccgcgccctgggagtcttgtaggcgtccctctgtcccccagcccgggcatcccgctcggtgcgcgacctctggcacgggctttgcagctcggtggccgcagcggtgtcccgggccccctctccgccgctcttgccgggcgtgtgaaggtttaat

SEQ ID NO: 1802 - DNA, 630 bp, Homo sapiens
  chr2:122042330-122042960
  hyper
ggccggcaggtgcgcgccctgcaccctctctgccgcctgggaggagccctcgcagacatagggctctgcgcgctcgcctccccagcgggcccccaactccgcacgtcgggtcccgccggcgtccatctgtcagtccctaggcgggacgctgggcgggtctctcagtccccagagggcggacagcggggaggccagggcccagcaggggcgccccctctccgcccctggacgtccaacggcgcccggcccgccggcccggcccgagacccgcggggaccgcgcgcggcccttaccgcaggtagctgccggagttgtgctggttgtagtgctcgggctgcgtgtgccagaagagcatggctggaactcccagcgcgccgaccggggcgcggcagcaagcgcagacgcggggcgcgccgaggacccagcggcggcttcgcgctccgaacccgcggtgccggccggctcggcgcatttatcggcggcccaggggcgggacagcggtgagacccgccccccaggaagcgcggcccggagggcggctccccgcggcagccgcacctggctgactcccgcgcgtgcctttccggcgagcgagcgcgcctccggggcggccagaccagagggctctag

SEQ ID NO: 1803 - DNA, 157 bp, Homo sapiens
  chr2:124782571-124782728
  hyper
gcatccttcgacagcggcctttgaaaatctcctttaaatttcaatacctctactcgtttcccaaatggggggaagggaagagaaagccggggggtagagagaatttccttcccctttccctcccaggtagccaaagcgcaccgcagcggcttggctt

SEQ ID NO: 1804 - DNA, 72 bp, Homo sapiens
  chr2:127413655-127413727
  hyper
taaatgaagtctgcctatctccgggccagagcccctcccctcggcccgcgcgggaggagtgtgacccaggtg

SEQ ID NO: 1805 - DNA, 30 bp, Homo sapiens
  chr2:127464270-127464300
  hyper
aaaagtgaatcatcaagattatcacccaaa

SEQ ID NO: 1806 - DNA, 30 bp, Homo sapiens
  chr2:127644060-127644090
  hyper
cgccccctcgcgtgcgccagccagctcggc

SEQ ID NO: 1807 - DNA, 271 bp, Homo sapiens
  chr2:127783037-127783308
  hyper
ggaaggactcccccagcaggacgtttactgaatctggagggagtcgccctgcagatatcccgcggaagccggaggagacccaggtgcgccccaccggctagctgcgcctgcgggtgcccaaattggtgtccgggccatcctcaccgcagtgactcctccgcagcgccaacgcactccattttccttccaccctgccggtggggggcgtttgcttgttctcactctgcagccgcagccagtggcgccgctaccaaggtccccgcctcgccat

SEQ ID NO: 1808 - DNA, 217 bp, Homo sapiens
  chr2:127783371-127783588
  hyper
cggaaaggtttatcgtgggtggatgctgcccggggcttgagtggtttttagaggtcttgagtggctcactctccaatcagcgctttctagagacagcgtggtcagcgtacttgcttactttcaggattgcgagacgtctttaacccttgctgatcggctgacgctgcagcttcctgtggcttcctgctcatttcccgcaagatagcactgatagggt

SEQ ID NO: 1809 - DNA, 31 bp, Homo sapiens
  chr2:127810838-127810869
  hyper
tcaccagctccctgtgcgtgagcacgtgcct

SEQ ID NO: 1810 - DNA, 82 bp, Homo sapiens
  chr2:127864221-127864303
  hyper
gtggggagacagaggacgcaaacctaagagggcacccagagcgccggggaacgcagcctggggacctcgaagcccctcgaaa

SEQ ID NO: 1811 - DNA, 59 bp, Homo sapiens
  chr2:127865203-127865262
  hyper
ataccctaggcgcctccgggacatctccacatctttgcctacggcgcctagcccagtac

SEQ ID NO: 1812 - DNA, 30 bp, Homo sapiens
  chr2:127976385-127976415
  hyper
agtgcgtgctgggccgggcacccggggagg

SEQ ID NO: 1813 - DNA, 31 bp, Homo sapiens
  chr2:128165991-128166022
  hyper
acagggccctggaaacgcgggtctgccggga

SEQ ID NO: 1814 - DNA, 579 bp, Homo sapiens
  chr2:128173486-128174065
  hyper
cccaaagtcctgctccggcttcctgggtggacctgaccgcgttcgggtgcacgtggggcgactcacacctgacaagtaaagcgggtgaggccgcgcctgtgaagggcgcctggctcctccgcaggagcggtgcggcgcggcgcccccggctggaaccaggtgtaactgcagagaccctgggatcgcaggaacggctggcggcaggactgtccctacctcgagaaggtgacggggtttcctgcgctgccagccgatgaggcggccgtgacgcagcccgccgtgcagagtccccgtcggccgacaggcgtgcagagctctgcagaggacccttccgccctctgggcagcctgccaagccgtggcacccccaacccccagcactgggcacttgggagcattgcagccgccctggctcgtaccggtgccggtgctttgggcacctgggctggtttggacatgggtgccccgggcagagtccatttatgcaggtcagaatcagtgtgtggagcctgcatagacttgccctggagcggctgcctgtgctggggtggggaggagtagagggcgagaagttggtggg

SEQ ID NO: 1815 - DNA, 105 bp, Homo sapiens
  chr2:128421744-128421849
  hyper
ccagggcccatccgacgccggggcagagcccacggcgtcggagggccccggtcgggtttccgagggaaggcctgccctgccgccgcagctttccggccattgtcc

SEQ ID NO: 1816 - DNA, 201 bp, Homo sapiens
  chr2:128421890-128422091
  hyper
cggcgggctctgccggtgctggcgccgccggtacagccccgacgcggccagcgcacccagccgggccgccatggcgcggggcagccgccttgaggtcgcgggcgcgggccgcctggtgcaggggctatgggaccacctcggaggggaggcgcggccgcctggggccagacaccaagacgggacgggcgtgtgggcgcctcc

SEQ ID NO: 1817 - DNA, 106 bp, Homo sapiens
  chr2:128459398-128459504
  hyper
ggtgttgctgctgcgcgcgcgcaagttcgcgctgctctggtcactgggctcggcgctggcgttggcgggaagcgcgctgctgcggggcggcgcggcgtgcggacgc

SEQ ID NO: 1818 - DNA, 30 bp, Homo sapiens
  chr2:128848555-128848585
  hyper
agctgttggcccaacgaaccttcccaagac

SEQ ID NO: 1819 - DNA, 30 bp, Homo sapiens
  chr2:128848800-128848830
  hyper
gtgttgagtcgagccgcgggaaaggcgcgt

SEQ ID NO: 1820 - DNA, 31 bp, Homo sapiens
  chr2:129063668-129063699
  hyper
ctcatctgcaaaacagcgcccctgacagtga

SEQ ID NO: 1821 - DNA, 312 bp, Homo sapiens
  chr2:131720786-131721098
  hyper
cggccccttaatcaccacagggtgtgtcctgcccgggctgtcaggagggtcgcaggcgcccggtggtccacgctcaccgtgcgcctggctgagcgcagatgagggtcgtgtcccgtctgagcgcgctccccccgccggcgcgcacgcctgcccgccgggtctctgccctgggccgagcggggccacctgcttgcgtcctcgccctggatggcgtgggaggcgccgccaaccgtctgagctggaatccttgcggtgaaaaagtgggcgcccaccagccctcctcaccaccgcggctgcgacgagcctgggcgt

SEQ ID NO: 1822 - DNA, 147 bp, Homo sapiens
  chr2:131721437-131721584
  hyper
cggctgagagcctccttaacggagccccatgatgtcagccggcccgcacgcccctcgccctccgactgcgaccccggcccgggctcgcgcgccccgtcccccggcagccccgcggccgccgcaccgccgcccccggcccagccttcc

SEQ ID NO: 1823 - DNA, 45 bp, Homo sapiens
  chr2:131721866-131721911
  hyper
gggtctgtgctcttgggaccccccgcccccctcctgcctttcctt

SEQ ID NO: 1824 - DNA, 30 bp, Homo sapiens
  chr2:131722130-131722160
  hyper
atttggtgcccgatgcgctgtgttcctttc

SEQ ID NO: 1825 - DNA, 417 bp, Homo sapiens
  chr2:131792102-131792519
  hyper
ccctgcattcctgcgcgattttatgactgagcagaatccctaacctttcagagccacgtttactcatctgtgaagtgggggcctgcggccagtccttgtaaggaatcagagtccctggcccatccctccccaaagcgccggtgccaggcgttttggcctctgtatctctgaaacgaggaggtcccggggcatccccgagcgcccccgtggccatctgtgccactggccagcccagggccaggactgctgtgccggcgtggagattcccgaccctttccaaggaggtgccaagggcgcagcgcagcgcacgcccgagccgccgcggtccctctgagcctctccagcccgccgccgccgccgcccccgcccgcacagccggcttggttgccagggttgccagggcttggggcctgggag

SEQ ID NO: 1826 - DNA, 215 bp, Homo sapiens
  chr2:131792531-131792746
  hyper
cggcgccggcttcgcgggaggagccccaggcccgcgagcgcaggcgccccgcctctccccgggcgctgcgggccaccggctcggccctgtgcggcgggatctcggggccgcacggagcgggaggccgggcgccatggcgagggccccgcagccccggcgcggccccgcggcgcccgggaacgccctgcgcgccctgctgcgctgcaacctgcccc

SEQ ID NO: 1827 - DNA, 31 bp, Homo sapiens
  chr2:132431406-132431437
  hyper
cgcctgagttaggggacgcggcggcttttgg

SEQ ID NO: 1828 - DNA, 276 bp, Homo sapiens
  chr2:132767359-132767635
  hyper
taggcggagggggcaaaaagccgcggcggcgggggcaaaaaggagcgggggcaaaaaccccacaaaaacccgcggcgacggggggaaaaaaccgcggcggcaaaaagcctcagcggcaggagcaaaaagccgccgcagtggggataaaaagctgcggtggaaaaaacccgtggcggcaggggcaaaaagccgtggcttcgggggcaaaaagccacagcagcaaaaaccctcagcggcgggggcaaaaagctgtaaaaagccgcggcggcgggggca

SEQ ID NO: 1829 - DNA, 247 bp, Homo sapiens
  chr2:132767688-132767935
  hyper
gtggcgggggcaaaaagccgcggcgggaaaaaaccgcagcggcgggggcaaaaagctgccgcagcggtgacgaaaagccacaggggcgggggcaaaaagccgcaaaaagccccgacggcgggtcaaagagccgcaaaaagccccagcgtcgggggcaaaaagccgcggctgccggggcaaaaagcagcggaggcaaaaacccgcggcggtggctgcaaaaagcagcggcggcaaaaagccggggcgg

SEQ ID NO: 1830 - DNA, 279 bp, Homo sapiens
  chr2:132795725-132796004
  hyper
cagaaccgcggcggcggggacaaaaagccgcggcggcgggggcaaaaaggcacggtggctggggcaaaaagctgcaaaaagcacggctgcgggggcaaaaagcagcaaaaagccgcggcggcggggggaaaaagccgcgggggcaaaaagcagcgggagcgggggcaaaaaaccacagaaagccgaggcggcgaggggaaagagccgcggcggcagggggcaaaaagctgcaaaaagcagcggcggcaaaaagccgcggcggcgggggcaaaaaaaccg

SEQ ID NO: 1831 - DNA, 341 bp, Homo sapiens
  chr2:132796063-132796404
  hyper
ggcggcggggacaaaaagctagggcggcaaaaagccgcgctaacgggggtaaaaagccgcggcgacaaaaagccgctgagagggggcaaaaagcagcgggagcgggggcaaaacacaaaaagccacggcggcgggggcaaaaagctgcaaaaagccgcggcggcgggggcaaagagcctcggcggcaaaaaccagcggcggcggcgggcgcgaaaaggcgcaaaaagccgcggcggcgggggcgaaaagccgcaaaaagcagcggcggcggaggcaaaaagccgcggcggccggggcggaaagccgcaaaaagccgcggcggggcaggggcaaaataggag

SEQ ID NO: 1832 - DNA, 182 bp, Homo sapiens
  chr2:133173852-133174034
  hyper
ccagggcagcggtggacgtgggggcagtgcgggcgagaggaagtttgtctttctcccagctcgggagggtcgccagcttccccggggctgcacctccttgggacgcttgtcgggttggagcgccgcagctgcctctgcggctgccgcctgggtgacggagggtggggcgggggtgggtcgct

SEQ ID NO: 1833 - DNA, 145 bp, Homo sapiens
  chr2:133174237-133174382
  hyper
aggaagaggagtgctgcgaggcggagtgcgccctcggcgaagaggggcagaggcggagcgccaggtgctgcggtctcactcccagccagccaggagtttagaacgttcttcctccgccctctccccgcctcgccccagccacata

SEQ ID NO: 1834 - DNA, 943 bp, Homo sapiens
  chr2:133426505-133427448
  hyper
aattactattttggcaccattcgtgattacattcgcagacgtctttttagtttttatttatttaatttttaaagtcagcgtttctgtgccagggctctgaggatccctgagcgaccacctgggaacaacttgggtggaggtgccagacgccaagcgctgctgcgccgcaagtccccgagcccgggtcggcggcccttctccggggccgtccccgcggcgacccgaatggccacagagggtgggaaagggcgtttgtgagcgcgcgcaccctggatccccgaccccgcagccctttcttccaggccccggctttcaggacaaccgttcgactagggtcagtggtcggggttccagctctgcagagcttagtcgggagccagtaggcgaactggagagaggacgcgagacctttgcgcctctggacgcttcggcctggctgttctcggtgtacgcgctcctgtctagacccaactacccacgctcccgcagccccacatctatcgcactctgagcgcagcaacccagcttcagcgtggccgcaggctgcctcgcgcatcgctcacctgtcggcggcgccactcccacggggtgccggaggcgccagacaacttggcagggttcgggagatgtcgccccctctccctcgcccagaacccagcaccgctcggaccctccctcctctcaagcccagcttctcccgacggtgcagccggacaagctgcagcccggagtcccgcaaacccgccgctccccgctctcctcctgcagcgcgggacttggacactttcccagcctcgcgccccggggcaccagtcgcggccgccaactcccgctgggcagccccagcgcagggctggccccgaggtgggcgccttgggggcaaaagggctggcgggtagatggattgtgcgcacctggcctcggctgctggcctctgggtatt

SEQ ID NO: 1835 - DNA, 30 bp, Homo sapiens
  chr2:133427798-133427828
  hyper
acccacaaaagtctcgccttttctccccac

SEQ ID NO: 1836 - DNA, 30 bp, Homo sapiens
  chr2:134024444-134024474
  hyper
cccggcgggcggctcggcttgcgctctgat

SEQ ID NO: 1837 - DNA, 225 bp, Homo sapiens
  chr2:134325851-134326076
  hyper
ctccagctaaaaatttcctcccgcggttggttatcctctgtttatttttgaagcattcaaaggccacgctaacagaacagactcggttttcctgaacatccacagcggctgggaagtcctgccgtgaatgcggagcaagtttgcggagacttgctccctgggctgcggctccgtagttgcttcgagcttgtaaatacaagctccgtggacaaagtcccaaatgac

SEQ ID NO: 1838 - DNA, 1253 bp, Homo sapiens
  chr2:135475677-135476930
  hyper
ttcctctgccccatcatgagacgacggggcagggacccactgtgacccgcgtccgcgattagaatcggggactgcccgagaccagaggccgcccgagtcccggctcgctcccctccttgcgcccttcgccggggcgggcagccgggcggccgccgagggacatctcgcggctacacccgcagagggaagttctcccaggcagccggcggagccgcaggggactacggaaaggaggatgcaacgagcctgggtccctccgagctgagtagggcccggagtggcccagaagcgctcgactccgaacgcaaaaaatgcctcccgcaaacttttcccgtgggcgccggagggcctggagctggcggagaggagggcgcgagtccaggcggggtcggcctgaaggcagctggggtctgggcttcgagggaaggaaccgcagccgaggcggtgccggccgcagaaggtggggctgccgctctcggctagcggcgttctcgccgggaagtcggggctccgcgcccccgcgcgctccgagccccgcgcctcgcccagcgcggcccgcgagtggggagaggcgggccccgagcagccaccccggtcgccggccgggtcgggcagctcgcgctcacctcggtcctccagcccgtcgctgaactggccgctctcgctgatccgcacctgccgctcctcctccagctggggcggctcgcgcaccggggagctcagcggggccgggccgggggcggcagccggtggcgcgtggccccggggcggcggcgggacggtgggcccctgggagctgcggcgctggatgcccgcggccggctccatggcgcggggctgcggatcccggcggcggcgacgacaagcgcggcggggactcgagtcagaagtgcgaggcgccgcggctctggcgggggcaggagcggacggactggccgcgtggacagggagggagggcgggcgggcgccgcggagtggaggtgcacgggcgggggcggggacgagcggagagccgctcggctccgcggccggtggcggaggctggggccgcgttgttgccgccgcgctccgcccctgggggcaggtgcgggcggcagggacccgccccaaggcccgggcgcgggagccggcgcaccgaggcggacgagagggaggaaccagcgtgaggacccacaggcggccctggcagagcttggctagggcgtagcggggacccgccccacctgcgccgcgggatggtgcccagaggggac

SEQ ID NO: 1839 - DNA, 89 bp, Homo sapiens
  chr2:136288365-136288454
  hyper
ttttcattggctgaagcggcggcatgggtacctctcaggaactacaattccagccaagcaccgcgacaagtgaacggaggagaagttat

SEQ ID NO: 1840 - DNA, 2359 bp, Homo sapiens
  chr2:136873850-136876209
  hyper
gccactcccaggcggcgtggggggtggggtgggtgctgctaggaggggcagtgattaactttttgtaagaagtttttcgcccagggagggaagaggggagaagggaggatcacggggggagggcgggggcgttgcaaagactcattctcctaaagcgcaaaaacttaattttcccacgcctgcctaaatacaaaccattctgggcttcaagcaacttgtagtgggtaaagagaatgcggtcttaaaacgaaggcccttcggtgcttggggtatattgggcgggagtgtcagaaaatgaacaaacggcacctcctcccccaagcgggcgctcctccggtgtgtgggtctcttgccatcctcgtgtttatcacttggcgcgtttgggacgttagggagcggggcattttcctgggtggagaaggtaacggggtctgcacccgtggtcctcgccccaagtttcatttcctcactctcccgggtggcttcccattaccccgccactgatccagttaacccggccggaggtgggcagctggaagcctccaggcggtgggcacgcggggggccgggtcgtccagccccgggccgccgcggctgcccactacacccacgccaaccgcccgcaagcagcgctgcaggggctccgctgggcgacacgccaggctctgtcccacagggtgctggggagcgactgggcggctccgccgcgagcgtctttgaattgcgcgccgctgcaggaaaccaaaaactccctagcaagagggtttcaaaaggtttctggaaaccaccgacggttaaacatcacaactggactcggagagagccaaacggtttccccacttgcacctgccagtcttcgcggcggcgacctggcagcccaggtgcggtcttaaccgcccccgcccctcaccccgtacccgctcctatccccggagcgcaaatctcagggctggcagctgcgcggtgtcaaaggggaggtcaaaccactccgctgacctctgcacgaccccaaactctcgaactgcaggacccactcgcggccgtggggaagaggcgcgcttcggacggcgggaaggttttccccctcaaacccaaagcgcgcgggcggatcaactcctagctgctgccaccactcgatcccctcagaggatcggcgcggtgggtccacccgcctctcccgccctctgcctactgtgctgggagactggcacagctccgtcggccgcacagagtttaacaaacacgcacccagtgtcaagaacagtcaccaggcgcttaaccccgaagttaaagcgggcgcaatctcctcctgggaactcagcccaggcacgccgccctccgcctctaaattcagacaatgtaactcgctccaagacatccccgcttccccaaggaagagaccggtggtctgagtcccgaggcagcgcgcacgccttctctgcacttgtgcacagaatgttcttacgtttgcaaacagcgtgcaagccgccgcgcgcggcgggactcaagggggagacacatgcagccactggaacgctctttccagtcgtttctcctcgactcacagagaaaaagattccaatcctgctccccccccacccacccgcactatataggcatggtcaagaaaactcctttcggtgacccttttttggagtacgggtacctccaatgtcctggccgcttctgcccgctcggagaggggctgcgctctaagttcaaacgtttgtacatttatgacaaagcaggttgaaactggacttacactgatcccctccatggtaaccgctggttctccagatgcggtggctactggagcactcaggccctcggcgtcactttgctacctgctgccgcagccaacaaactgaagtttctggccgcggccggacttttataaaaacacgctccgagcgcggcgcatgcgccgctggggcggggagggagaaggcggggtgggggagaggggcagacgcgaggaaggagggcgcaggggcggggcggagaggtgcgcggcttgggaagcccaggggaccctgctgtttgcgggtggtcggtagtgagtccggagccggacaggacctcccagaggcatttcctaagtttgagggaagcgggatgcgcctgaagacaggtgggaagcgcgggctaggaacgcgtctctctgtggcgcgtccatccttgctaaagtggatggaattccagacctgggaatgctacagtagagacactgaggcccagggaaggggagtgacttgctggagtaacccaaccagtaggcggcaatgctggaagtagggccaagcttccaacgccattccccgcgctttcagcagacgcagcccattcaggaggtaaa

SEQ ID NO: 1841 - DNA, 598 bp, Homo sapiens
  chr2:136876428-136877026
  hyper
ataagagtaatttagcgaccagtactttttgtaacagatcactaggaacttgcacagaatcactcattcattctcacaacaccgtgtgggtattaccatcacagagatgcatttagtccgatatttatagaaggacgaactgcgtgccacgcactgttctaggcgttggggatccagcgtgaaccagacaaggcccgcattcggagaaaccagcaaataagcccggagagatgaaatgccagggatgggcagggattccaagccgggcttgaacccaggtcttcggtccccatactcggcgtcttccacgattttgagcagaggacaagctttggcacgaatcagaaattaggttgaagaactgggcggggcggagtgggggtgggggtcagacgtttaaagcgatctcagactggctgaggtttgcagtgggcgcgcagacagtgctttccccctcgcgccacttccctccggcgcggagactgggtggggcgggggagcgagtgtggggcggggccgagaaactgcgtccgcaggcggggtggccgctgcggagatagctgggaccgaggcgcgtgcgtcgcgacacggaccccag

SEQ ID NO: 1842 - DNA, 572 bp, Homo sapiens
  chr2:137522177-137522749
  hyper
cccaggagcctaaggcgctccttcccgcaactccggtccccgcgccccgggactgcaaatcctttaaacagaggccccagagctaggggttttcccaggctctggtgggcgtgggctgacagtcgctgggagccccgcaacaggggggatgtccaggcaggtatgcacccagctcccggcgtttcccggagtcaccacaatgtttccctttctctctcccccacgtatgctgctaggggtactccccagataggattttctttgtcttttctcctagtaacaccgaagccctctcgtgcccggggactgcagaggaacgccagaccatccggaccttgcgggatggctcggtgtgtgtgttttactgtgtgtcggagtgtcgcgcatgtgtgcgtgttggggcgcgttatcaacaggggcctagggcacccccactctttcttgctctcttcccccatcacttcatggacctccgaggcgcaaagcgctcgaccctctcctgggctcagtggcttgggtactccgggctgagctcagctggggagtccccttacccagcccgcaccggcacc

SEQ ID NO: 1843 - DNA, 544 bp, Homo sapiens
  chr2:137522848-137523392
  hyper
cgagggtcgtgcgggtgcgcggcagaggcggtaggaggcggaggagaggggggagaaagagggggcggtggggaacagctgccggggtaggcgaggcgcaaggtggctccccgcggccccgcgccccgcggctctcggacgcaccaggcagccaatggctgcgcagaggtgtacagcagatggcgtctgactgcgccgttccttcctcctcctcctcctcctccttctcttcctcctcctccttctcttcctcctcctcctccttcagtgctgaggagccagagtcgccgccgggttgccagacgctggaatgggtggtcttccgacacacaccaccatctttcttgcgctcgggaagctcggggctcagcggctcccagaggttacggcggcggctctggcgagacgggtgagtgcaagcacgcggagccccgagtcggggatgccgggccccctggccggccgactggggcgcggggtggcagcgccggggaagggggcgcgctgccggcgcagactttgctctttcctcgccggacagcca

SEQ ID NO: 1844 - DNA, 245 bp, Homo sapiens
  chr2:137523516-137523761
  hyper
cggggacgccccacgcggcgacctgagcaccgacctcatgcaacgggaccgaaccttgggacccgggcagcaggagctctgttcccttcacctccagcttggtttgagggatactgatgaaggaaaccgggggtttcccgtcctgcgcggagagcctcggcgcccaaaatcgaaaggccgggagttgttctgcaggctttgcaaacaggttgactgagggtttcctttcccgtagcgctgactgc

SEQ ID NO: 1845 - DNA, 31 bp, Homo sapiens
  chr2:138436702-138436733
  hyper
actcacagacaccaaccgatttaccctgtga

SEQ ID NO: 1846 - DNA, 292 bp, Homo sapiens
  chr2:139536994-139537286
  hyper
agaagagagtgacaacgcgaaccccaaaccacattttaatacgtttcttattcctcagcgcctccgagccacccagaccaggcgggcggtctccctgaaaagacagcttcgagatgcccgagagggggctcctgcgcggagctgggcatgaaagttatatcttgtgtccccagctggcagaaagccccatcccagtccctagcgccagacggaaaacgaagagaaatccaagctgtcccccaaatccgtattttgcctaagttttctcccagcaaggcgccactacctggct

SEQ ID NO: 1847 - DNA, 343 bp, Homo sapiens
  chr2:142887728-142888071
  hyper
aggggcctgaatcggcgctttcgccgctccacggacctcgaatgcagcaggtaaggaagttaacctgggagctaagttgagggcggacacgcttaacgcggagaacctggagctcgcaaaagctcgcagttgagggccatcgcggagggaagtctttcggaaatgcgaattctcattccaacatctgcagcgcttagaattcgcggacagaagcgcacagccaagtgcacacactcccggaggggacaaaatggggaccgggaaacggccaaagggaaaagctgtgggggtgccgaggactcaggcacttggttcagaaatcccgcaccgcacctctcacccc

SEQ ID NO: 1848 - DNA, 30 bp, Homo sapiens
  chr2:142888389-142888419
  hyper
ctggaatcgagcggcgtcatttacaaatgt

SEQ ID NO: 1849 - DNA, 30 bp, Homo sapiens
  chr2:142888942-142888972
  hyper
aaagcttctcccttcgttcctcggaagctt

SEQ ID NO: 1850 - DNA, 229 bp, Homo sapiens
  chr2:144694285-144694514
  hyper
ttttgaaaaggtagtaggcatcggtgtttctggttttgcttagtgcgtcttcatcgtattccctcgctgaggactgagcctggccgactcagggaaccgagttcaatgaaatcctcagacgcataaagcacagggtgccggcccaccgagctgcgctcccttcccgggggtgcccgagagagagcacgcgagcccggcgcagccaaacccgggcaggggtgggtcccca

SEQ ID NO: 1851 - DNA, 736 bp, Homo sapiens
  chr2:144694553-144695289
  hyper
cgtggcgggtgcgtgccggtgtgtgtgcgtgacagcgcgcgcgtggcagggagttcgcgcgccagggtgcgcgtgccagcgcgggtgtgcgagggagtgcgcgcgggtgggagcgccaggggctggcggggcccgcgccctgggacgagcccctcgtgctccggctctgcgctcccgcagcgcccacgcagccgagaggagtgggtgatgacttcgtgacctcaacgtcctcccccgtccctcgacatgttcccgcgcctgaaaggtgcagaaaactccccccaccgctctggacgagactgagctaggcgtcgagggcgggcgccgccgcagaccggagctcgggctcgctggccgctcaggcgcagcggtgtggagggaacggacgcgcggcaaggcgacccgctctgggcaacgcgggcgcagctgccccgacgcaaggcactagctggtcgggggctcgggcgagccggggccggcgtgccggggcgtgcgctctctcggcaggcgagcgccgggctccgcggaggtccctgcgcccactgcctgcttctccgcccggcgacccggagtccccaggctgcggtgcgccaggccagacctgaccgagggcggaagacccgagcggcagggaggcagaaagaaaagaggtagcaagccccagacaagggatccttaattacagataaaaggcaaacaaaaccgtacaccacattttccacgtgtcagctgacgg

SEQ ID NO: 1852 - DNA, 34 bp, Homo sapiens
  chr2:145090079-145090113
  hyper
gcccctcccccgcggccgccgcggatgccgccgc

SEQ ID NO: 1853 - DNA, 1183 bp, Homo sapiens
  chr2:145273327-145274510
  hyper
acacacgcacacacacgcgtacacacacacaaaacctagagagagagagagagagagagaaaagcatcatttgtctctaatcaaaattctctcgtctttgtgttttgctccttccagcacctcacactgcgcccccagccgccccctccccgcgccgcgcagctctggggcaggccgggggcgcgcacaattgtcttctctagaggaaagttgctccaagtgggcccgggcggtccccgcgaggcgcgggctggggctgcggaggccgggaggccgggtgggcgctgcgtcccagcgcctgcctcgggagcgtctacgcggccccgcgccgggtgatcgggctgagagcgaggggagcgagaagtttcctttccgagtctgggctggcgctcgttcgcttgtttgttttcgggggttggtttctttctttttaaactcagttatcctccgtcagctcccccacccccccccggcaccctcgctagtccccagccctctcccctcccccaggcgccttccgcgctcttgccaatcacttttctcttttattcccacgattttgtttggggtaatacctagggggtctctctctcactctcttcctctctctctgtttctctctgtccccccgcgtcccttctctggctgtctccaaaacggacctaccaaactctcacccccccctttaatatcccacctctgatctgcgtgtgcccctcgaacccccatctcctttctccttcctccttcctgactcagcctggataacgggctcctccagaccatgtagaaactgccgggaaaagtctcgctgcgccctgcgactccttcagtccccggcctgggggcagagcctgctggagaggagtcatccgtccccgagccatcatcgaccccaccggaccccgcgcggggccggccgactccctcccaccccggggtctgggcgcgatgggccgggccccgctgcccgcggaccgttacttggcgcaccgagaagcggccgggcgactccggcaagaaactttaagcctcgctgaggcgcagacccggttcccctctcctgccttcgcagtctctctgccacccccgcccccgccccgggatcctgcgcgatccagcgcctgggcccccgccctgccccaggcggacgctcccgaagcccggccggagacccggcggg

SEQ ID NO: 1854 - DNA, 1048 bp, Homo sapiens
  chr2:145274576-145275624
  hyper
cggggctgggggcgcggggccccggccggacccccgcgctcggacccccgggtgcctgacgctcactttgcccggcacttccccaacaccccccggtccagccgccgcgcgcgccgggctccggcgccggccgcggagggaggctcgccctagagccctgggcgccgccgccgccgccgcctcggttccttttccctttccccctccttctccctgggtctcgagccgcgtagtggcccggaaaagtttggttcgggctgcttcttaccgtttttcctcctgggattggcttgtttgcgcctcttgcaccgggggccatccgccatgatcggctgcttcattgataagagcggatcagatggcagttcgcatggactcggcgccctgcttcggcagcacgcaggctcgatctagcaaccaaacacagcgacaatgtgggcatcgcccgcgcccattgaaacgcgcgcgggccgcccaggggagccgggccagggccccggcgagcacccatccgcgccccccaacgccaaagcgaaacttcggcggccccctccccgccccccacccccagccttggccccgaggcgctttgtgtttgttactgtttggtgtgttgcacccgcgaggggatcagagagacaagaattacatcttcaaaatgagtcataactcctgaccgtatgagggaatgcacacggcggtacagtaagaccgcttgactcagggctaggcggaccctttccttcgaaaagtcctcagcccccggctcgggaacttggggtgaggcgaggttttcttttcgttctcatcttttctcatccccccaccccccaattcccagaggaaacaaacaaacaaacaacgcgaaacagcccctggatgaagcacactcgggcaaattgataatagtaattataggaagcccactcgcccagcgccccctcccctccccttttggagtttatcgaggcactgtctcttcctccccccaccctcgcccccaaattaagatttcccgttttacgccgcaatgataaatataattata

SEQ ID NO: 1855 - DNA, 30 bp, Homo sapiens
  chr2:145275852-145275882
  hyper
tttgtacctaaaaatcgagagaggcgctgc

SEQ ID NO: 1856 - DNA, 323 bp, Homo sapiens
  chr2:145277544-145277867
  hyper
gaagaaaaagcatgaagaagccgcgaagtgtgggggagaaaaaggtggaagcgaagaaacagctcccggagcaaactgtacaaaaacctcgccaagagtgtcgggaggcaggaccgttattcctgcagagcaggttagaactgatctctttcggccactccaggaaacacaaacctggggacggactgacgtgttacgcctcttctaatgacatttttttctttttcttttctgtaggagagagacgagagaccctgaaacacgcgccacctatctttgtggggagggataattgaagcgccctgagcgtgagcatcatgtga

SEQ ID NO: 1857 - DNA, 446 bp, Homo sapiens
  chr2:145281532-145281978
  hyper
tgtggaatctcgcacgtcacctggccccagcagggcggccagctgaggggttgattttattttatttttttgaagtaaaggctgaatctcggcttcagggcttttgccaacgtctccactgacaggaaccagcaaacttcaggacccaaatgagcatcttaatttattgatgctaaacaggtctggttgttgtccccaattttccgcgcgctctgccactcccccccccacacaccccgccccaacccccgccgccagcttcggtccctgcatttgatctccaggaagggccccgctgcacaggcggaggagcgcgtcgcgggggggggcggtgttcggccccctcccaccagaccgccctcccccagacctgtccccgcccgggatcctgcgacccccgcccgccgcccggtcagctgacctggctcgctcgcctgctccccgcc

SEQ ID NO: 1858 - DNA, 77 bp, Homo sapiens
  chr2:145282041-145282118
  hyper
gggaggtgatgccgggggctgattaccatgagaaaggctgtgcctggaaaagcctcctccacgcgactgtcaatctc

SEQ ID NO: 1859 - DNA, 30 bp, Homo sapiens
  chr2:148389097-148389127
  hyper
aatcatagccttacaaaaaaagaggaaatc

SEQ ID NO: 1860 - DNA, 598 bp, Homo sapiens
  chr2:148601815-148602413
  hyper
cggacgccgaggcctcgcggtatcgagcctccgtccgccccgcctcctcgccctccactccgccccgccctcgctctctcacccctcccccgctcccgcctcgcttccccgacaatctcctcgcgctcccggcccggcacgcgcgctgcgcccggccgccgctgccgccgccgccgccgccgccgctgccgccgagcgttcctccgctgcgcctggcttccagcttcgggccggaaccggaagtttggggggcggagcccggcggaggccaggagaccgaaaacgcggccgagcccggagcccggagctggagccagagcctggaccagaacttggccgccgcctgcaccgccgccgccgctgccgcccgccgccccttccccgcgccgcagccgcctcgccgccaccgccgcgagctcggccgccagtggtcctcggactttaggtgtctgggttgaaggtcggtccggacatcggacccagtcagttcccagactgtccgggcggcagcggacgccgctgccgccgccgcctcttcgtcgcctcagcctggcgttttgttccgagagacgggagaggcgagcggagctgacagtga

SEQ ID NO: 1861 - DNA, 216 bp, Homo sapiens
  chr2:148602727-148602943
  hyper
gctgctgcaaagttggcgtttgccgtctttcttatctcctgttcttcaggtaggtgcagggagcgcggcgcggtggggctgctcctgcggccgcggcggccgctgctgggggccgcggctggtgttgagtcggagagtccagtggagcctggggaggttgcccactccctgcgcccctcggctgccaccgccccccccccccgcccccaggtctga

SEQ ID NO: 1862 - DNA, 30 bp, Homo sapiens
  chr2:149588676-149588706
  hyper
cacctgctgatcatcagtggtatcaaacaa

SEQ ID NO: 1863 - DNA, 273 bp, Homo sapiens
  chr2:149632584-149632857
  hyper
cctccatccggttccggcttgggcagccagaccggacttgcaggctcttggaggtcgcatcctgtccttcccccggcaggtagagtgactacaagtcccgggatgcgcagcgctcggagtcgggcgggggccgggcggacctctacggtgacgtcaccgtcccggggcgggccaggggagggcggggcggaggggcgggtctcaaggcggcagagcgcgctggtgctgatgcaggatggctgagcgcgcaggagcccgggaggtctgagccgg

SEQ ID NO: 1864 - DNA, 1111 bp, Homo sapiens
  chr2:149632888-149633999
  hyper
cgcccgccgcgtggtcgcgggcaggtgggccggggggcgctgggcaggggcggggcagggccagggcaggccggtctgcagccggaggggccggagcggagaagctgcccaccttcccgggctcggagcggccggggctgctcagccggccgggctcgcgatgacctgctgagaagcgtcgtcggaggctgcaggaggcggcctagctgtgggcggtgcagctcgcggcctcctccctcgtcgttcccggccccggccccccacccatccccgtgccccctccctaccgccggccgagatggcggatccagccgaatgcagcatcaaagtgatgtgccggttccggcccctcaacgaagcggagatcctccgcggggacaaattcatccccaaatttaaaggcgatgagaccgtggtgatcggggtaagtggctggggcgtctgccttccctgctgctccgcgccgcagctgggcgccccgacgccccagacgcagcggaggtgtttaggccgccccctcggacattcccgcggggctggcctctcgggtggacctgaccagagacccctcgccccgcgcactatggttccctcccgggcgggtggagaggcggccgggagcggcgggccgggcgggggtggcgggggtggggatggggggcgaagacgggctcggcgccgccattgttcgccgggtgggggcccgggtgggcccattgttccccacgctcgcctcgccgcgtgggtagtgtgttcgggtgaccctcaagccgggtgcccaggccccctttaaagtgtgagctctgcaacccgcaaatgcttctgggcatcaatcaattcgatttaccaaacgccttgcctcttcttctcacgaccctagcaaaaaagaaagaaaaaggggtacaggaaaatttctagtcgcgtctcggagctcccgcggcagtgtagacgcggctccccgcggtgttacacctggctccgcgcgcggaaggcggagggttgggggagtactggtggcctcggtgtcccctggaggcctggtgtgtctcccgcttcctctcacgcctggctgccctggatgtggagtcccggcttgatccctcccctctgg

SEQ ID NO: 1865 - DNA, 71 bp, Homo sapiens
  chr2:149634354-149634425
  hyper
ctttgtatgcgagccgcgtggggagggaccgagttaatgggagcctcccggtccccgctgacacgttcctg

SEQ ID NO: 1866 - DNA, 689 bp, Homo sapiens
  chr2:149645383-149646072
  hyper
gccctccccacgctagtagtacgcttcggttactttgcacttctccgtagctgctttacatgtttgcgttttgaatgttgttgaggaaagatgcgaaaaagaatgtgtgctggaggctggaccctccccgcccctatcactaccccttacccccgcagcaagggctgcgaccccgcgggtccccgctgagcaccgcagcaattaagtacgtgcaagccatttgcggcagcgggtttgagatgcgttcgtagtgggtgacattgagaacccccagaggcgacacgggcgcctggtctctgagaggtggcatgctgcctgccgccctggtgcctggctgccccggaaggggcccccagtcgccggccccgggaaggtgctccaggctcgcggctcctcgggggtcgcctctgcaggcggcctgtttccaatttccaggcgaggagcgacgccgtgatgcaaatctgccacttaccttctgtcaccattctgtcgctaacgctaggaatgatgaaacctcctgttctggaaatgcatttccctttagcaccagcgccttctaatgaggtccctctgccccgcaggacaaaagcgcccattagggggccctgtggtgggaggcggccactccgcttggcgccgtgagggaaaccaaggaaaccgtctttgtcgctcacaggtgcctctttttg

SEQ ID NO: 1867 - DNA, 30 bp, Homo sapiens
  chr2:149894864-149894894
  hyper
atcattttcactcccgagggtctgcactcc

SEQ ID NO: 1868 - DNA, 208 bp, Homo sapiens
  chr2:150061810-150062018
  hyper
tcctctgtcacgctctcgctatagctgttgtccagatcgttatcttctcagaaagctgggcatttgccaagaacatcaacttctataatgtgaggcctcctctcgaccgtaagtagtggtggttgccatcctagttcatggctgtggggccagagtgttaatatgaagcccccttttccatttattgtaacttcgtctttcccagaac

SEQ ID NO: 1869 - DNA, 30 bp, Homo sapiens
  chr2:150153324-150153354
  hyper
cattacctcctgctttcaagatggctgctg

SEQ ID NO: 1870 - DNA, 30 bp, Homo sapiens
  chr2:150187474-150187504
  hyper
gtgtgttgggctggcgcgtggagggtggga

SEQ ID NO: 1871 - DNA, 1449 bp, Homo sapiens
  chr2:151342335-151343784
  hyper
ggtaggtgggtgggcgcatgggaaagcaataacccggccttgaacctcagacccatgaatataacccaccgcggcgccaataattcaagtagactggaaggtcaaaggcgaatagtgttgcccgcggccttggaggcaagccgagtgggggatgcaatagaggtcaggaggggctggtgtggtgaaggggaaacggacgtgatcactgggatggagtgggggaaaaagggaaaagctcggtacaggtgggcaccgaggcaccgcgggcggccggcagcgcgaagaggaggttcagctgctgcccggcccctgcgccaccagcgcattcctgggtgtaggcgtcacgggcgccgcggctgcctgcgctcagtttctttccctcaacagcggcaattgcacgtaaccgcgtcgcctctgggattttctcccgcctcccatcacccccgcggcgctccccgcctccccgccaaccagcaggttagatctaggaggggcgcccgccttgagccgggtggttccgccgaggcgcacgcagcgcccatgcaacaccccacagtatcgggccacctcggccgacccaaggcgacttgaccacgactccgcgggcggactgcgcctggccactagtggctccaaccgcggggtcaccctgcgggcacacagcgctctcctctccccactgctatctcctcgtccacgctgtcgtctgccgcccccacccagaagggatacaattttcgcccaacagggaccgtgggaatcccttgggaggggcgcagacggcttgtagcgcgcggtttcccgagacccgccgcgcatcccccagcgactggaaacccgccccaagcgccacgcggtcctcccactcttacccgaagtgtcccacaggctcaactctattctttgtgtgtcgatttcaaaactggccgtgtaattctcaaacactgtaggaacgtaattctggatagacaaaatgggcaaaagaggaaggaaagagggcaaagaggttacgtttaaacgcacgacacccattgaacacccttcccctccccgctccccagttaagaaagaaaaccttcacacatcagaccacacactaagcacatggaccctttccgaaacccctgtcctactccccactcaccccacccggctctcacagatctgctgacccgaatctcccaaccccaggttatgcacacaggaacgaacaagtttcaggagctaaccagcccatgtgcaggcgcgtcccaaccctaaaagcttccagcgcactttccctttccccgcagtctaatcaggggaaagtagtaaggaccgagaaagacttttttttttctttttttttttttttaagggaaaacggatgaaagcggggaggcccacctcgggactgggatcccactggccgaccccctcgtggaagccgcggccggccacactcacctc

SEQ ID NO: 1872 - DNA, 91 bp, Homo sapiens
  chr2:151344275-151344366
  hyper
ttatggagcctgggagcgagcgctgttggcgttgcatgccgaaaatgtaagcagtgcgccctctagggtgcccattcgggatctattttag

SEQ ID NO: 1873 - DNA, 533 bp, Homo sapiens
  chr2:152954551-152955084
  hyper
atttccagctcttaaattcaacgtccctgacttaagccaggtccccaccgaactgtccacacacatgcacaaactaacttcccggggcggtgcggagacgccgggacgcgaagacgtcaagagcccaggctagagggagagggactgagcccgagcaccggccgaggccgggaagagacgcgcgcgggcttgacccgcagctcccgcacgtgtgggccacggccggctccaggacccccgcgccgcgcgctcggcctcctccccatcctggtctcccgcctccttctcatacctgtctgaggatgaagctggtcgaagtggtgctgccatcggatcttttcaacctgctcctccgggttgtggtgcctcgggccacctggactcgacacacgggggccagagagaagccggtgaggaccgcagcgcagagcggggcgaccacccccggctggagtccgcctccggacccgctccctggggtcccctagagcccgcacccaagtctcctccgcgactcccaaatacagccccca

SEQ ID NO: 1874 - DNA, 30 bp, Homo sapiens
  chr2:152956019-152956049
  hyper
gcagagccaccttccgcgacttcactcatc

SEQ ID NO: 1875 - DNA, 326 bp, Homo sapiens
  chr2:153192149-153192475
  hyper
gaccgatttcagggcgcacaacgtgcctttgaagctgccgatgccagagccaggtgaactggaggagcgatttgccatcgtgctggtaagtgcgcggcggcggtcgggcgcggggacccggggccccgggccgggcggcgcagctgacccccgcccctccccttcaccccgtgccgggagcgagcctccattcccgagggggaggctcccgctttcccctttgtggccccccagcactcctcttcacccccctggcagtcccccgcgctcagtctctcggggtcccgggatggggatgggggctcagggccggctgcccaaccagc

SEQ ID NO: 1876 - DNA, 31 bp, Homo sapiens
  chr2:153573617-153573648
  hyper
acatatcccaccatctcgagttcttccttcg

SEQ ID NO: 1877 - DNA, 30 bp, Homo sapiens
  chr2:153574314-153574344
  hyper
ccccgcccgagttacgtacgccccacaaac

SEQ ID NO: 1878 - DNA, 155 bp, Homo sapiens
  chr2:154333781-154333936
  hyper
cagactcctcaccgccgccccgttcccccctgctggggagcgcagaatgaccaccaggaggccaggaacaaaacgcttaaatgttgcatttattaaggaaatgttaaataagaaaaaaacaaaaagtcaaaacggtgtcacggatgtcaagagca

SEQ ID NO: 1879 - DNA, 538 bp, Homo sapiens
  chr2:154334266-154334804
  hyper
ggagcaggagaagagtgggagcgcacccggacacggatttgtgagaccccatgagtctgctgcgtggcttttaacaggtcactcttccggtcacaaggcgatcagtgccgctgggtctctcccctgcccgccctctccacctgcccccagagcttggcccacctgcgggtggagaagggccttcgcaccgtcggtctccccgcattccaagtaagtagcagcttccaaagttctgcgccctaatcgccctcttcttgccactttctgctgagttcagagtctgggcgctctcctccgactgccaggcatgaggactttcagagggcgagggagaaaccggtcgcttctttccgaaaggccgaagtcgagagaaataattgactccgacaggtttgcttcgcccagtctctgatagtgaggggcacagccgggctagcaaagtgggcaggcgtgggagcggttgccgcgggggcagagggcgggtcagtagggccccacgaccaccgcctccacctccttagacggcctccggtccttc

SEQ ID NO: 1880 - DNA, 424 bp, Homo sapiens
  chr2:154335184-154335608
  hyper
gtgcgagggctcctcgctctgctttcgaaagtccctgggccgtgggagtttcccaggagcctctccgacgcgcgcagcagctaggctcttctaaagccgtccgctccagccctggtggtgctcgttcccggcgctcgctcgagggggggctgttggaacttggcggggctggaccagcccggccgtgggaggtgcgggccgcggcggctgcagcggcggggtggctgcgctgagcaaacagcggccccttccggccgcaccgccgcgctgcgcgctgctcttgggaggtggaggaagcaaaggggcgaacctggtcttgctttttattgcttgcttcttttgcaaactccaaaggccaggcagaggtcactgtactcttctagcttgatggatgattaaagagtttgtcgggggagggtgcggt

SEQ ID NO: 1881 - DNA, 41 bp, Homo sapiens
  chr2:154729174-154729215
  hyper
gtgacgttcctccgcgggggtggctcggcctccaagcccag

SEQ ID NO: 1882 - DNA, 495 bp, Homo sapiens
  chr2:154729515-154730010
  hyper
ctgtctttccttttgtctctccgttttgcaacatttgttctctttctgtgtctgcttctcgcagcttatctctgtctccctctgtcatctctctgccccgtcttcccgaacaccagccccgcgatcccgaagcgccttggttaggggagcaagccctggcgcatctaatgggtatctccaggtgcagagattttcctgcggggtcagtggggacgcggaggagacagcctgcccttgtccaggctgtcgtggacctgaaggaggggcgcaaggggttagagtggagggcaccgcagcaggctccccttgccgggtccgagggcgctgcgctgctgcgaacctgagcgcactgaggctgctactctggacagcgaaagctgcgcaagcccctcccgcatacccgattctttgactatggttagttgaatttccaggaggagagtctgcctccccaacctttatagccagctgcagaagaacggacagtgagcaggc

SEQ ID NO: 1883 - DNA, 80 bp, Homo sapiens
  chr2:155553935-155554015
  hyper
actgcaggctcaactgaggctcggaggtgcaattcaggctggtggagcagcgggggaaggcagggacaggcggggctagc

SEQ ID NO: 1884 - DNA, 1096 bp, Homo sapiens
  chr2:155554076-155555172
  hyper
cgcctcgcatcttccacccggggccaccgaggcgctgacaaggagtgggggaccgaagaaggaagaggcagaggaaaagctagagcggcgctactgtttaacctgaaagtctgaccggcagcccaaggctcgaaccccgtccagcagcaccgctgtcgcctggaaggagggcacagcgccaaggaacccacgagcccccgctcgagtcattctgtgctctgtgcgccaaggatctttctggcagggacagcgcggtgccctcagggaggtgcggagcttgggggacctgcattggcgcccatcgtggtacaccaggaaaagtgggaacgaggaaaacagccgtgagcgcagagtgcgaggccaggctgccgctaccgcccgctgcgccgcctcctgccctctcccgctgggtgagtgcccaggcttcgcgcactgccgtgtctcagctgagcgcgggggcggcctgcgggcccttgagggtccgccggagggccccggtggcgcccgcggaaactcggcggtcgggggacgccaggcggacaggtctctggagtccggaacccgggaatctgagcccggagggcgtgggtagggggcgttgcaccagtgcccggcagacatgcctttgggcgggattttggctaaaagataggagacaggtgcgccgggggtgcggggagcggtcccagggggcgggagattggggagcggcggggaggggggagggtctggtccaggcaggtaaaggcagcttcttaggcagccagcgagttggcaggtgggttgggactcgcttgtcaactcattaattttaagcagtcagtttgggggtactgcaggataatcaggagggccgtggggagtcaagaggtgacccgggatgccggtggtggggaaagaaaagaggagcctctggaagcttggaggcaaaattgcgcttgggttcctgttccttgcatccctcctggcttgagtgcgggagaacactttttaaagactcaccttggaaagaaggcctccgtcccaggggagaaggagaggcgtctgcagggggcagagaccgcagctacctgccgggtgcgccccccacccagga

SEQ ID NO: 1885 - DNA, 833 bp, Homo sapiens
  chr2:157176621-157177454
  hyper
ccccgcccttttgtgcgccctcaccactagaaaaagagttttccccagtgtcgcgtgggaggtcgccccagtccagctcagcgttccaagagaccagagactgaccggaaatcgttgggtgcagggagaagcaggagacgcgctccgcctcctgtgctcgtgccctagcgcaacagacgcgacctagaggcgacggcagcctgttgcagccttcgccctgagggtggggggcgggggggtgtagaacagctgaggaagacgcagggagcagctggggaggaaagggagggacaccgaggaaacaaagttcacccaagtgaatgcgtcctaattgctccaaggctctctccgcaaagtctacgactgcaagccgcaaagtcaaactacgtctccaaaacgcagtgggcagagcaggagggcttgtgtctccattttcgccgcagggcggatcgcggacacaagtcctctccagtaattccgaagcctcgaaataagactatgctgggaggaggggttggggggtgactaataagaaggcgtgggggtgggggtggggagtacgcggcaagaaccctgctttctggaattctcccgccactgtctgcagggcccagagcgcacttcgcggctagggaacaaaattgccgctctcttcgagcgcccccagcgtggggtggggccctgctttcccgcgtcaggaccgccccaccaggcgccctccgacggaagctggacttttcctaaggaaaggcaaagtcaaagtcggaggaaagatctttcttgcggccccagctgtcgctcctaatggtctcggggaacatactaaaggaaaa

SEQ ID NO: 1886 - DNA, 30 bp, Homo sapiens
  chr2:157177659-157177689
  hyper
cgaaacgtgattgctcgggttcgagttctg

SEQ ID NO: 1887 - DNA, 31 bp, Homo sapiens
  chr2:157188948-157188979
  hyper
aaagcataaaagaaggcgaactgcatgggct

SEQ ID NO: 1888 - DNA, 204 bp, Homo sapiens
  chr2:157189364-157189568
  hyper
acgtcacgagcagggccgattttaaggtgggaaccgctctgcgttcaccttggtagccagcttgggtggtttttggtgttttttttcttttctttttttttttccgaaagaggtgtgacctctcccaggtctgcgcagcccgcagcgtcgcgacacttcactttccccgaagcccctgcgcccgcgcagcggctcggccgctca

SEQ ID NO: 1889 - DNA, 159 bp, Homo sapiens
  chr2:157292365-157292524
  hyper
aggcagatggccagggcggcccgcatgggcgagggcacaggaaatcggacaccgccaccgtcttccccagcctggcctagctcaggctttccagtccgccagcccgctggcaaggcggggcggaggtctggagtccggcatcgccgaggcacaaagcag

SEQ ID NO: 1890 - DNA, 51 bp, Homo sapiens
  chr2:158485229-158485280
  hyper
ttgaagttcccgggccgcgggaggggagcgcggcaccgacacccttttgaa

SEQ ID NO: 1891 - DNA, 31 bp, Homo sapiens
  chr2:158485822-158485853
  hyper
tgcctctggggaagggcgccctctctgttca

SEQ ID NO: 1892 - DNA, 31 bp, Homo sapiens
  chr2:159313053-159313084
  hyper
ctgttcctacctttgacgccagggacaaacc

SEQ ID NO: 1893 - DNA, 565 bp, Homo sapiens
  chr2:159313328-159313893
  hyper
ccagccctctccttcccgccaatggggtggcgggagctggcccggggacggcggcgtgctgacgttcccgggagcccggggctggccgggcgggagggctggcagcggggcgggcggcggcggcggcctctgggcagtagagggggctccggggctgagtccgcgtcgacgccggccgcggaggcggcaccatgggcaaggggtagaggggcaagttggccaccgccgccgccgggggtggtgggagagccgctccgggggcgggggccggtgggggagggaggggcgggcagccgcgccgccgcggcacttttttaattttttcgggtgccgcagcggcgacccctcggcgccgatgtccctgatccctggagcgacgacggccgctgcctaagctggaaagtaagtgtgtgggctcgcgggagggcgcggagactcctgcccacgagaccctcggccctcgccccgaacacgcgccagggccaggacctgcgcgccgggggccgggggcctccctcccgctgccgcgtccccagcgcctcgcggccgccgcggctttcctgcc

SEQ ID NO: 1894 - DNA, 654 bp, Homo sapiens
  chr2:159314143-159314797
  hyper
cctcgacaccactgggcgcccgccctcctcagcactcggggccggctgtctgtccttctagccccagatcctgcaccttggtcccctccccgtcttcccacgcccctgctgcccgcgcggtcttgcgtttgtccccgaagtcctgtactccttgccggtcctgcccacccctctgcctagtgcgcccctctctaccggccgcggatcctcacgctccacccctcccggctccccagcgccgagcctcgccgctgccctcctgcgccgccgcttcctcctctccctgccaggagttgaagcggagctgcggcacctccctggcggatctggtatccccgcccgctgccgaggctgccggccctctcccctggaccgctacccggagagcgagcggcggggccgggatttggctgcgtgttggctgagtgcgacacaccgcgagcgcgggcagtggaggtgccgcggcggccgtggccgctcggggcgcagcggtagtcaggtgtgtgtgtacagcgggggacgcgcgctgccggctcctgggctggcgacagattgtgcaggaatgcgaggaatgcaccaggggcagagtccacacagcccgccgcggctgccctagcgccttccctccccagctctcgccgcgcagccagaggt

SEQ ID NO: 1895 - DNA, 30 bp, Homo sapiens
  chr2:159660261-159660291
  hyper
gggtatctggtagaatcagaaccatctctg

SEQ ID NO: 1896 - DNA, 592 bp, Homo sapiens
  chr2:159825049-159825641
  hyper
gagaggaaggtgccttcgggaacacgcgcaagggcggggattcgcgctgccaatgaggccccggtgtgggccgagcaaggcggggggacgggccggagcggaggctttgctgtggcagctgctggagcggcggccgcctcgggagccggaggagaggcagccgcggagcgccgagctggcctcgccccgaggcccggccctgggtgtggggaaccgcgctgaggagctggaaactttcccggcaggtaactcccgcagcccggactccgccgcgggcctgcgagcgccccgggcatggccagctgccagtgtgcggagaggtcgagagggacccggggtggagagggtgatgggagaagggaaaggcgtgtgggaaagtttctggagcgccccctcctccgccgggcacacccgggagctttccgggaataggcacagacatgttgggcgccccgggccttggtctctcggcggctttggggagtccgcaccttccttgcgcggttcccccgcgccggaccgagccggcctcccctggaaccggtgtggtgggaaccgggaacgcttggggcacgctcgagttctgggacca

SEQ ID NO: 1897 - DNA, 43 bp, Homo sapiens
  chr2:159826371-159826414
  hyper
cctccagtgttgggaccgttctcagtggcgttgttccctgctg

SEQ ID NO: 1898 - DNA, 507 bp, Homo sapiens
  chr2:160142448-160142955
  hyper
ttttccaaacaaactccggctcccagccctctgccgcactcagctccctttgcaagttccagggcattcagtgggaagtaccgaggccaccgtcagctgaacagtttgttttgaaaaagctctcaggcctacccaggacctgccttggggtagggggggcggtgtgggcgttccctcgggcctcggctgtcacgcgaacagtaaattcccgggcacaccaggtcagttggccagcgtaaacacatgaatcccatctcattcaaagcaaacccgaaaggtgtccagcgctcccaaaataaagtccgccacttacaccccccatgcacgaaagaccaggaatgtgcccccctctatgagcggccgggcctctgtggactgagcgaccccaggcaagagggaggcctgggaggcagggagctcacccgcaaggggcttccttccacccgacgccgacacgcccgccctagccccgggccaagggtgcacgaaccacgcctcgccgcactc

SEQ ID NO: 1899 - DNA, 30 bp, Homo sapiens
  chr2:160569033-160569063
  hyper
gggagaggggcgggcgccattgtgcttcgc

SEQ ID NO: 1900 - DNA, 31 bp, Homo sapiens
  chr2:160654434-160654465
  hyper
ggccacctcccctccccgagggcaggcgggt

SEQ ID NO: 1901 - DNA, 89 bp, Homo sapiens
  chr2:160760809-160760898
  hyper
aaaaaagcctccgtgcgcctactctacggtgcaccgcgtcccctctgcaccagaagggccctgtcctcccacatccaccgcgccctcct

SEQ ID NO: 1902 - DNA, 418 bp, Homo sapiens
  chr2:160760959-160761377
  hyper
cggctccagagcccccccgccccaacagcaaagcagccgtgacctgccccaggggcgcagccctgccccaggctggaaggcagcagagctgtggcgtcgaggcacccagcggactgcggggctggcgtgcccgcggttacctgcgcggccagagggctccgcgagatcgaagaaccagaagagcagcatgaggagccccgccgggcggcgaggggtcgcccagcctgtcctcatcctgagctggcgcaagccttccggccgggtcctcgggcgcacgcggctcccgccccgcctgctgagcgcggcctgccccgcccgcacctctgtctaggcctctgggggcgccccggccccgcccccgccgccctcggccaatcagacgtgcgtctcctcggccccggggcggagcgggccaggt

SEQ ID NO: 1903 - DNA, 412 bp, Homo sapiens
  chr2:160918885-160919297
  hyper
agcagcagcagcgacggcgacagcagcatcgctaaccactgggctctccgggagccccttgtcccgggagccccttatcccgggagcccagagccgcgtcccaagcacccggccccgccgcgcggaagcggatccgtagcctcctccgcgccccaccccctccgggggccttgccagcccagagccctggagacccactccgccaccgctgtctccacagtgaaccgacactcggggctctgggctgggatgcgggaaagtcgcggaggttttcctcgccccacccactgcggcttggggaaggaggaggaggaggggtgggccatctgcccatcccagaaattcctgcctttggggtggggacaggcggagtgaggctgctcgggtcacactctccgctcctctagcttgc

SEQ ID NO: 1904 - DNA, 403 bp, Homo sapiens
  chr2:161263951-161264354
  hyper
cggcatcccggccgccgcctcacctgcttgcgatagggcgtccggcagttgctgctgcccccggggttgccactgctgctggggaagatcatcgctgcgggcggcggcggcgggtgcgggcgcgggcgcgggcgcggggcagcctcgccgcgagggggagggcgcaaggaggtggccggccgggcccggggccgcggcagctctgggaactccctctcgccgcgcggcggcggccggcgggggctgcagctccgcgctgacttcccctccgccttcgacctccgcactcgcctaaaagtacggcgcggcagcgggcgagactcgagcagctcgggcagccgccgccctgcgtgccatggacgggagttcgcgcgcggagctggcggcgtcgccgactctcccg

SEQ ID NO: 1905 - DNA, 327 bp, Homo sapiens
  chr2:161264419-161264746
  hyper
cgcgccggccgggggcggggaggcggcagcgcaccgcctcgcgccgcgcccaggcccacccgcgcctccccgcccgcccgctgggcgcggcgcctgccgccccatcgcccgcccggcccccgcgctctccctcccgggatcggggccggagccggggccgggcggcccggggagcagccggcgcccccgctctggtgcaatggttgggtctggctccccgcatgccgcacattcctcggagtagccaacccccctcctctgttctttttccccctcggttctttcctaagcaccagcggcagctttgcaccccggctcgaagcccct

SEQ ID NO: 1906 - DNA, 154 bp, Homo sapiens
  chr2:161560559-161560713
  hyper
aagtcaggaaatgggaaactccgccttcgcaagagcttgagtcgtctccgtgacctctgtggcctcgttgaaaggctttctctgaattgaatgacaacacggaggctgagggtaagattgcaaatcagagaacgtgggtatgaatgggaagctt

SEQ ID NO: 1907 - DNA, 31 bp, Homo sapiens
  chr2:162101443-162101474
  hyper
gcgttgaggggccgctcgaggcaggcccttc

SEQ ID NO: 1908 - DNA, 113 bp, Homo sapiens
  chr2:162273852-162273965
  hyper
aaaaggaagagccctggccagcggctgggcgatgggagggacgcatcaacactggcatgcacggacaggtggagacgcaggtcgccaacctcgctctccacctgggcagtgat

SEQ ID NO: 1909 - DNA, 30 bp, Homo sapiens
  chr2:162274836-162274866
  hyper
agtggctcaagcgctcgtgttttctctctc

SEQ ID NO: 1910 - DNA, 86 bp, Homo sapiens
  chr2:162275140-162275226
  hyper
taggagaagggccctgaggatcgggcggtcggcttcccccttttttccggtgccccggcttatcttcgctcccagaggtgcgaaag

SEQ ID NO: 1911 - DNA, 127 bp, Homo sapiens
  chr2:162275310-162275437
  hyper
cggcccgggcgcgcagccgggcgcacacagccacgcgcacagcgaccgcgttaacacgccacccggcgctcccctttcttcccgccggacagatggtggttttacagtccttgcacaagtaccagcc

SEQ ID NO: 1912 - DNA, 337 bp, Homo sapiens
  chr2:162275472-162275809
  hyper
cggaggacactagccagcccggccgcgtgcagacgttcactttccctgagactcagttcatcgccgtcaccgcctaccagaacacggatgtaaggagacctaggggctgggggcgaggcgggcggcacagacatctctcccaccctctcacattctcccgccatgcaaggctagggtactagcagcgctaacatcagcaacagctggctccgctgtgcgttttaaggcttagggctcggggcctgcccacggcacctttcctaaataccaagccggtgggaaaaagctttctatttgttttcgtcgctggtcacccgggccacctttgaggtggcca

SEQ ID NO: 1913 - DNA, 183 bp, Homo sapiens
  chr2:162283419-162283602
  hyper
ccgccactagacggcgttccgtggagttttgtctgccacataaaaaagcgaggactgaatttcctttgtgtttctttcccctcctcacatctaagaactaagtaagaggacaaaagtacaagacacggtgcatgtgtggcgagtgaagtggagcagtgcattcgtgtcatcacccacccgacc

SEQ ID NO: 1914 - DNA, 149 bp, Homo sapiens
  chr2:162283782-162283931
  hyper
ggcgctgcccggcgctacccgccgccctcgggacagtcaccgtgagcaaaagagtcggtgtcatgtgcgtaaacgaagctcttaggagccgaggatagatttcacaggaacgtagtgccttgttctgaaagacgcgctttggttgatat

SEQ ID NO: 1915 - DNA, 78 bp, Homo sapiens
  chr2:162284385-162284463
  hyper
tgtcttcccgccactcgcaatccgcgccatcttaactaactttcaatgtccctcggggctgagcgtgccggcggcggg

SEQ ID NO: 1916 - DNA, 203 bp, Homo sapiens
  chr2:162930081-162930284
  hyper
caggatttgcaggtgggagtgcgttagaagagggagaccgcgggctgggggtgggggtggcgtctggagtgcgccagttggagttctctaaggcgggtgcccttgaacttgtgccttcagagcacattagcgttggtttctctacccctgcccgggttcgggcgtgcgttctgtgagtggctctccgggacattcaaagctcg

SEQ ID NO: 1917 - DNA, 639 bp, Homo sapiens
  chr2:162930338-162930977
  hyper
cgtcccttcacctgtcagagggtggccttggggcttccgcctaaggggagtccctggtccggtttcgccagcttttgggccatttggggagtttggcgaagaggtccccacagctcgccccggggacgtacgtggcgcggcactcaccttcatcgtcggcgtctcctcggaagtgagcgttcagagaaggagcgcaggcagaagtcaccgcgggcggcggagacgcgcgtcctgcaccgctgctccgggcggtggagtcactcgccgctggcaagtttcggccccgagttaaacattagtgagcgccgagcccgctgggtataaaggcgccgcgggcaggctgcagggcaggcggcgcgggagcaggcgcgcgtggcgcggggcactggcatcccggccggggggagcccgcgagggccccctgagggcggtgtagggcgctgggcggcagccggggcgcagagtgcggggcccggaggagccgtgggggaggggaaagggcgcgcggcctcggatgcgcagaccctgggccggcgactcggggaccctgctccctcttagctaaaaatgacgtcggcgttcagctcctccaacctcacgtggacaggcgagggaaccgagacccagagagggcagggg

SEQ ID NO: 1918 - DNA, 264 bp, Homo sapiens
  chr2:164593249-164593513
  hyper
accggcaccctccccggggcccccagcaccagccagaaaacgacttgatctgcttagaagaggcaacttcggggagaaaattcgcgttcgcccagttcccctcccccgcctccctgtgaataaataaaatcctaagtgtctaggtgtgcggtcccctctcgcgctccctggctcccctccctacctcccccaggcggctcgggctggagaaagcagcgcccggggggccctggtgtcggcggctggtgcgcaggcatagacgtt

SEQ ID NO: 1919 - DNA, 64 bp, Homo sapiens
  chr2:165477629-165477693
  hyper
tgtctgcagcacagccgcgggtcccgtccggaaggggcaggagcgctcgcgcgtgcagccaggg

SEQ ID NO: 1920 - DNA, 53 bp, Homo sapiens
  chr2:165697708-165697761
  hyper
ccctgcggggcgctgcgcgggctccagctcccaggcggcgcgtcactgctggg

SEQ ID NO: 1921 - DNA, 46 bp, Homo sapiens
  chr2:165697963-165698009
  hyper
ggaggaggcggtggcgctgcagcccccgccccgtggggtttactgg

SEQ ID NO: 1922 - DNA, 396 bp, Homo sapiens
  chr2:165698273-165698669
  hyper
ctactcttcccttccccggcccgcgctcttgccgctcggctctcaagccaggacttgaatggagaagcggcaacccctgcgaggctcagcccagcgcgggcagggccgactcagcacctcccctgtcccgcgggcggggtgcgggcgctggctgggcgctgggggcctcgctggagcccgctctctcactcaccctgccccatttccctgcccggagtccgggagctcgccgccgcctctgcagcacggccgcacataagtggggaccagctcggcggcattggagcgagggaagcagcgagccggagagaggaacggggcgggggtgggccgggagcaagttggaatttccttcccccagggcttcgggtctttggggtccggctggggaagctg

SEQ ID NO: 1923 - DNA, 247 bp, Homo sapiens
  chr2:165873392-165873639
  hyper
gagaaaggcttgtgctcatcacgccatctctcccttttcatagttctacgttgaggtcgtcctgagtttgtttttaaggtattttctgcgctgctacacactgtcatttcacgtgagggcagcagagaggcagcgtagaagcccctgaatagcaaatcagaagagcccgaagctcaaattttgggcgtagtgttttcagaacacctcttcaaaaattaaatcacacgttgtttgtatctccttaaac

SEQ ID NO: 1924 - DNA, 476 bp, Homo sapiens
  chr2:166649933-166650409
  hyper
aaacagagagagaggggtgtccgcgtcccggccacagagccctttccaaaccactcggaaaccatttaaatggctcggcggccgcggtttgcagcctagaactgtttggggtccccggctaggaaagttgcctggcaaagccatgtctttcgctgtcgcgggatgtcctctcgggcagagaggctggaggagacaggcaacctgctagccggagtggaagcgcgcccgcctcccgccgggccctccctctcagggtccccacgctgcgaccctcccaagggcaagtccggggccaccaggtctttggtctccgtccagctcctcaggggccgccccatagggactggcgggggcaccgtgggcgagagggtgtgaccgggctcccccccgaggcgccacctgccccttggcccagggcgcccctttcgggatctctccaggggcaaccgacacactgctctcgagaccgtctccaa

SEQ ID NO: 1925 - DNA, 663 bp, Homo sapiens
  chr2:166650454-166651117
  hyper
cggccgtcctcccgcctgctctaacgcagcccaggggtaccgcgtctccctccgcctgccgccggcttacctggcgggtgggcagggcagggtggcgggaagcggcggccgggcaggcgctggacgtgggctaggcgccaggtgcaggtggcggcggctgcgactccggttgctgtcgccacagttgcggctcagtagagctcctcctccgccgccgcctcctgccttcccgctgggcctcccgcgttgcctggagaggcagaaccgaggctcggcttccacttggagtctcccaggtgagctccagcctgcgacgtcggcaggggcgaggccccacttccgcgcctgcgcgccagcctcccgccccgccccagccctacctgagcgctccaggtgagaaccttggatcgcgcgcgcagggtgggggcgccgtccgggccaagcctggctgtcgcgcggcttctctctgagtggtcggcgaggctgctgctccgcgcaagttgtggctcccggcccatctacattggaggaatcctgcactgacctggtggcagtgatcaccttgtagccagaacacagtctgctgggtccttggggaaccagaagttctagatttcccccacacggttcctcccttcctcctcggttcgccaaaatgaaggg

SEQ ID NO: 1926 - DNA, 30 bp, Homo sapiens
  chr2:166810402-166810432
  hyper
taatggagcaggggcggcggggacccggag

SEQ ID NO: 1927 - DNA, 1336 bp, Homo sapiens
  chr2:168149385-168150721
  hyper
tcccggaaacaagcccgctgagcaaaggcggaggaaaaccttgggccttccgctctgattggtctccccccgccgagcggggcgaggcagcgattggctgccgggcgttgtcagtcgccgaggccagagccatcgccggggaagcgcagccgggctcgggtgcttcggctgccgccgcggctgctcggctagtgcagctgggcgagctcgcgcgggcgccgccgccgcctctgctgctgcccaccccgccgcgccgccggcgctgccggtcttgcaggcggccgccggggaggggcggccgagagagcggagcacgaggaggcgggggcggcagagaagtgatgctggcgccggggatcggggcagcggcagcggagcagcagcatcttcgggaccctggctgcagcgtccctgtggcccgcgcgccagcccagcggccggagaccacgcgccccgcgggtaaggttctgtccggcagcgcccgcgacgcccccgggacggctggcgtggtctttgggggttacgaggcgcgtggtggccggggcatcccgacgaaggtgttgggacccggactgcgtgtcccgacgctgggctgtgctactgcccgcgcccgtgcggctccagctggtgcgttctcccttccgcgctcacagactttgacagcgcggggatggcattgtgtgagtgtggatgtggatgcgtgtgtgcgcgcgcgcggcttggggcactttgcagcgagaacagtgggtcccctctgcgtggcccgacgtccttcaaggacccaagctgggctggagtgagtaggatgctgttggctcggcgggaggtagaacgcacggagcgcacgggaaagtccaccgtggctcgtaaagagccgagcaaattgaactttattgcggtgattaaaaggagctgtggacctggcgcgccaggggagaggcgcgttccacgaggctccccaaagtcccactttgccccggggacttcggaggggaagggaagagagggaaaagtaactgttggtccacattgctgaagaaaaggaggaaagagaagttgggggtgggggtgggggtggaggttactcttgggggagtggcgacttttaggtgtctgaagccccgcgtgggaggcttgctacacttttctggagcgcagacttgaggatggagagtcccactctgaggtactggtagcggctcctcctgcctggtggcggcgtagggcgcagcgggacagcttggtggaggcagagcggggctccgacgcccgacggcccggcgtccaggtggggccactgcctccccaggccgctttggcccgctgacctcccagg

SEQ ID NO: 1928 - DNA, 30 bp, Homo sapiens
  chr2:168150989-168151019
  hyper
tactgggccagatccgaatctccgtagttc

SEQ ID NO: 1929 - DNA, 334 bp, Homo sapiens
  chr2:169312536-169312870
  hyper
aggtcgtcgccctaagcgcaaagcgaaagagcggtgagagcaggggcgggcgacactccccggagcggtgcccctgcgcccagggcgcagcgactgcgccctgccctgcgggtgtgggcgagttggccgcgtgtgtgcctcgctgtttgacgcgaagacgagccaatcagggcgggcggcccgagctgccatgtgacgggcaaggcggcccctttccccagcgcggccagagggaggagagaaccggggctcgccgcgagccttcgagagcagcggccgcggaggaggcggcggcggcgggcgggagcagcggcggcggcggcacaggctcggg

SEQ ID NO: 1930 - DNA, 165 bp, Homo sapiens
  chr2:169313267-169313432
  hyper
gctgacccccctgccccgctggctttctgggagccagaaagggtctggcttgccacggatttcctcccgggcgccggggaggagccgcggagcgttagggtcgccccctgccctcctcctgggccctgctctcctcccggcaagggcaggcgaacaaaggtgagc

SEQ ID NO: 1931 - DNA, 31 bp, Homo sapiens
  chr2:169313768-169313799
  hyper
agaggatgtgacaggacgggtccacatcctg

SEQ ID NO: 1932 - DNA, 979 bp, Homo sapiens
  chr2:170218502-170219481
  hyper
agaacctcgttctcccgcaaagtgctttccaggagcatcggaccaacgcccgtgggaacaaagacagggtctccgtggggtgcgctgtcaccgaaactggcggggctgctttctcaagtttgctgccgctcagttcctggcgagcgaagaggggcgctcccgctccggcttcgcgaagcaacctgagcgccccaccgggagcagctcccgcgccgccgcccggccctagcccctgcccggacgctctcccctccggcctcccgcggacccgaccctgccacagccggggaagtgggggctccacgagaggctctggctgggctcttaccttggccactggccggcgctaggcaggcgacgagagccaggagcagcgtgcacgccactgctgccggcccgcgatccatctccgcgacggtccccggcctcgccgttccttccccgggaggtgggcgcgcgtagcacaccgcaccggcagcgcctctgctagcgaacgctcctttaggtctgcacctccgccagctcctagtggccaaaagcctgcccccacgcccgaggcatcccgttttctacccgcgccagtccccaccctccagacagtgcataaagccctttagacccgaccgccccggaacaagcatgcgggaatccagcgggcaggccccctgccgcccggcccgccccctgcactttgcagcgcggggaggagtgggcactcgaacacacgcgtgctcacacagggacactcacacaggcgtgtgcacactcacacacgcactcatacaggcgcatgcactcctaagtgtcacaccaactgacacagattcactcatacacgccagtcacacacgcgcgcacattccacagtcacacttcaacgccgacatacacagtcccctttacgcgtgcatacaagagcacactcctgtgcgcacactctcacaggcacactcacacgtgcacacgcgctgccctcgcc

SEQ ID NO: 1933 - DNA, 31 bp, Homo sapiens
  chr2:170430429-170430460
  hyper
ccagggtgggtcgcggcgaggtgggtgaaat

SEQ ID NO: 1934 - DNA, 30 bp, Homo sapiens
  chr2:171300632-171300662
  hyper
gcattagttcccttctagcagccctctgcc

SEQ ID NO: 1935 - DNA, 586 bp, Homo sapiens
  chr2:171568301-171568887
  hyper
acccctgacttaatcccagagcgcgcagagctggtccgtcccctgcgcaagtgtcactgcgggttcacctaccggcctcttcctctcgcaggtggcatgcagtcggcgctcgccgcccgcccgcaaagaaacggcaatgcaaacttcccagcctgggaaccccgctgcttggagagcagctccgctgtgccagccgccgccaggagactggtattcaacctccccgccccccgccacggttaaagtttgctccacattcgcagctcccaccccacccccatctccgccccgaggcaggaggaccacataggagttcctgggtccaccgtgcgcaaacacacccaccaacaaaagaaagcccattaaatcttccctcctgtgaactcgcgccccaacggatacctctttgaactgacccccgcccccgcagcccccgcgctgtctggggcgcgcctggccctcccgggcttactctctcccccacagctgcgcacttttgcagcgcgctcggtctttgatgtctctttacattatggcagagcagccacacgctcttcccgggcgcggggctttgtgtaatggaact

SEQ ID NO: 1936 - DNA, 20 bp, Homo sapiens
  chr2:171570041-171570061
  hyper
gggcgtgggagaaggtgggc

SEQ ID NO: 1937 - DNA, 8 bp, Homo sapiens
  chr2:171570181-171570189
  hyper
cgtccgtc

SEQ ID NO: 1938 - DNA, 2241 bp, Homo sapiens
  chr2:171570470-171572711
  hyper
gggagaggcgatccccgcgtccgcagtgccggggcaggacgcgccctgcgccctgggccaggaggaggcaggtggccctcctcggcaggaggtgagccgccagggagggatgggggtcacccaagcccctgcaagcgcgaccctgcccagagcaaagcacgccccgcgcctggtgaggaactttttctttccaaaggtggcaggaacaagtctgtactgacttttctcccgccttcgggatcctctctcgtatgatttgtggtttgtgggaccacaacaaccaggcttcctcgaccgcgccttttttccagtagctcctggtctgccaggcttgcgagagggcgcgctggcttggcggggctccgggcgagaaatcaccagcagcgctggggctttcggccccccacagcccagcccgggcctcctgggtggcctggggagaagggggcgggacagcacagcttcttcccctcgggtgggcatgacgggtcgccttgggtgtcctgccgagctcagctttgagggtatgcgcggcgcgggtgtttttcccaggtccactctgcaaaagttgtggcctgaggaaaacttccaggtcgccagcaggaacgtcacaggagagccccggtcgctcgtcaggcgggcggccctggagcgtgcgcgccacccaacgccgcgctgggcggccgcccggccccgccccaggtcacagccctgccctcggccccaccgcggcgggcgggggacacgcggcgggccgggcgctgtcggtcccacgccccaccggggatctcgcttgggtccgctgtgtgcgcgggcgggtgcgtgtgcggcgagggtgcagggtgtgcaagtaaatacaggggagagttacactctttgccgtctcaaagtccggcgcctggaagccgaaggcagatttttccagagataacaaagacactttgtcactttgggcgctgcgtcggtgcaaatctttaattgcaagtgtgtgtgtgtgtgtgtgtgtgtatgttggggggggcgggaagagtgtctcgagcaacccaagcgcgggtctccaggcggcaaggccccctttgatcaggaaaatccaattatttgtgtatatacatttcccacatagtgattacttcattaattgtcccgcctttatctcctcccttcccatcccccctaataatcagttcttttatccagaccaacaaacacaccataggagctttgtggattcaaaggatttgctttcgcttctgaaagagccgctattctttgatgattgggtagcggcaaacttcaaagccataaatcttccctctgactggctggcggcccagcaaagtccttatcaaattcttggaggtgatcctgaagcgctcagaccgcgcgcggggcgagcgagcggggcgcggcgaggggcaagggcggggagggccccggcgctcagagcaggcgccagggaggcaggctgggcggcccttcgtcctcgccttcgggtgtccatgcctcggcggcggcgtcccgctccgcagccaggggcctgcaagccgtagccatggccgcggtggccgtcctccggaacgactcgctgcaggcctttctccaggtcagggccgagcccggagggggcgggagaaaggtggaaagggccgtgtccggatctctcctggtactccgtgcaccttgaacctcaaagggaaccccgccgatgggtgcagctggagccaggcctaggggtgcccacgccaacttcacacctaatccggtgtggcctttgctggagggacgcgtggatccgggattgttcggaggtgcccggctggccgagaacaggaccggagctcaccctgctgggccctcctgctgatttcagcctggggcgggccagggaggagcgcgaaggcagtgaggacaagagagcttaaaagatgggagggagagcggccggccggcggggttgtgggtgtttcccgactcttactgaccacggagccgggaggggcccgtcggatgcctccccctcccacttcgcgcctgcttcctctaaggctggatggcgtctcagtgcaccaagtagtttagcaagaagcgctcgcgggccccacgttcaggtagcgcaggcaccaaaagtttccctcggccggtgggtgcgtgcgtggggtgcggtggcgggggagggacggccgggacggaggaggggcggcggtataatagcgggcgtgggggcggcgggctggcccggag

SEQ ID NO: 1939 - DNA, 49 bp, Homo sapiens
  chr2:171627263-171627312
  hyper
aatccgagggtgtgtgcgcccagtttccggcgccgcgggacacccacaa

SEQ ID NO: 1940 - DNA, 550 bp, Homo sapiens
  chr2:171627346-171627896
  hyper
cgccccgcccccccggacccgcctcccagccccgccccgggccctcctcgccgcgcccgctccgtcccgcgccctccaccgccctacggcctgggcccgcctccaccctgcctctccgtggttccccgggctgcccctgcccccgcccccgcccccgccacctcccccgccgtcgcccaattcccccagcccccaccctcggctgctgcccgagcttcctccacgcgccgtgcagtctccacggcgacgctgcgttcccgactcggagcccccagctccgcgcgagcagctagccgggctggctctcggtgtgtgcccttcggatggtctgctgaagagggccgccagctggtaagacactccgaggcaacgaccggtctccctctccctagcccggtgtgcagtctgacccagcccccacagcagaccacccccagaccgggcgcccgagtctgcggaccgctctaccgcacctggttctggctctgggccccgggccccgtggctgccaggggccgccgggaagggaggatgcgcgccactggggtgc

SEQ ID NO: 1941 - DNA, 62 bp, Homo sapiens
  chr2:171673178-171673240
  hyper
cttttttttttccttccgggcgcaaaaccgtgagctggatttataatcgccctataaagctc

SEQ ID NO: 1942 - DNA, 1002 bp, Homo sapiens
  chr2:171673659-171674661
  hyper
cggccacccaacctcccgaaatgagtgcttcctgcccgccctagtccctgctctccacgggtgcgctgcgcagggacccccccccccccgcctccctcgtcactcttcttatccctgccctccggattcacgccccggggaagcacggaggctgaggctctagttgaagtggggcaagagcgattttcccttgagcttccatgctgcgagcgcctgtccctccaaagggcgcctgggcagcagcagccgaaggcgctactaggaacggtaacctgttacttttccaggggccgtagtcgacccgctgcccgagttgctgtgcgactgcgcgcgcggggctaggagtgaggtcggagggagggtgtggaggcgatggccggtgggcccttctctgtggggtcctcgatctacccagattagcccgcaatctctctgtcccggggccttcgggcgccatcgcgccagcgccgagagtcgagcaggggcgccgcgcaagatctttgtccgccgcctcctgcgcgctgcgcgcaagttcgtttccccggtgacgttccccatgcttacttaccccaccctctctggatctgtaccgcgagaaatctggggtcctcagggggctaggtagaggagaaacgctgaaaccggaccgaaacctcgccctaggcttagcgatggctaaaaaccggctgggataagagggaggcaagcaacattccgactcgctgctttctggctgtctggagtgcaaggtgactgtggttcttctctggccaagtccgagggagaacgtaaagatatgggcctttttccccctctcaccttgtctcaccaaagtccctagtccccggagcagttagcctctttctttccagggaattagccagacacaacaacgggaaccagacaccgaaccagacatgcccgccccgtgcgccctccccccgctggcccacacgccggctgctgagtgcccaatggggcttgtagcggctcggctggaaa

SEQ ID NO: 1943 - DNA, 76 bp, Homo sapiens
  chr2:172289936-172290012
  hyper
agcatgcccaagtccacgtgggagatacagcggccccacccttaagggacttagagcatggcggtgggacacatgt

SEQ ID NO: 1944 - DNA, 30 bp, Homo sapiens
  chr2:172378954-172378984
  hyper
agaagtcgacgccccggtcccgccgcccgg

SEQ ID NO: 1945 - DNA, 30 bp, Homo sapiens
  chr2:172379694-172379724
  hyper
cgcggaaacactttcgcctcagccttttgc

SEQ ID NO: 1946 - DNA, 30 bp, Homo sapiens
  chr2:172544758-172544788
  hyper
tgatggaaagcccccgaacacggaggttct

SEQ ID NO: 1947 - DNA, 456 bp, Homo sapiens
  chr2:172750646-172751102
  hyper
ggctgcaggcagggcgctcggaatgtctcttatgcaataaaagcagcagcagagagttggagtcaccttgaccgccatgctgtgctcggaagccggggacgagcgagtgagcgagcagggccgagctgtcagggcgcgcgcgcgccgtcttcccggccgcgcccgccctccctctcgccggcgccgcgcgcgtccctatgcaaatgaactcggggcgcgccgcgtgcggaaaggggcccggcgtcccggccagaaaggcagctggtccagggccggccggccgggcggaggagggggacgcgcctcccacggggaaaacaagcgcgacccatgggatcccgacgcgccgcgtggttgccacagctaggtcgccgccaggaaagccccaggtttcctaaggcctcttagtgggtgtggctttgggcaccgaccagccaaagtcgttttccccgaggc

SEQ ID NO: 1948 - DNA, 271 bp, Homo sapiens
  chr2:172947642-172947913
  hyper
ttctgagctaagaaataattccggagtgtagccatctcttgctcacacacaacccgcttctaaattaagcaaggctctgaaacagtatcccgaggggctcatgccggacttttgttccaagaaggcaaccaggtcccctgtgctaccgcaaaagtctttgatccttttccagctgtggacacagagcacccaagagactgtcgcgatgtgcggccgtctctccccttcccccaccttgcaagtctctggaatacactgtccctaggcggcc

SEQ ID NO: 1949 - DNA, 138 bp, Homo sapiens
  chr2:172948183-172948321
  hyper
ggagttgcctggtggcggaatcattagctggctgttgctacaaagcctcaccgtgtggttcggtgattaagaaaaaaaaaatcttttaaacgttggcaaacccgttattggtttggcgtattgggttttttttgcttt

SEQ ID NO: 1950 - DNA, 14 bp, Homo sapiens
  chr2:172949268-172949282
  hyper
atgaccacctggcg

SEQ ID NO: 1951 - DNA, 1399 bp, Homo sapiens
  chr2:172949348-172950747
  hyper
cgagtgagcccggggctctccgcgcatggggagtggagaagggagggggaggaggaggaaggctgggagggaaagaggatgtgtgtgttgggggagggggcggtgcagccgcctttcctgggaggagaagcgcgggttcctggctctccacgcgcactgctttaatcagacccgtgcagcctcgagctggagtggccagctgggcctggagcaatgcgagcgggccccagggagcgacagcggcgttggcgcagcggccgagtgagtgagttcgcagggagggcccctaagccccgactccagggatgcggcagagcgtaccggggaggcgcggccggataggcgctgcgctaggcacaaggctcttaggagaacctctgtctgttggccgcctcgggcgcccccagtgcgcgactccgcgctccagaggcagaggtcagtctcctcctgagccgccctagctctgcgccgaactgagtggcagcgacgagaagcggtcccgggtgtccggtgttagggaccgctgaagggtggggacagtggtaggggggcggcggcgcggagccgctggttggttcctggggaggaaagcgcgcgagggaggcgggaggccgatgagccgcgggccgcaggggccccggcgcagacgccgcagcccattgtgcttcctgcccggcgcgctctgttgcagaggagccccggccgggaagtgtggatgcgtcttacccgaggccgggccgcctcgcccgctctagtccagcggagcccgagcgcctcggaccaatccccagtgattatgcaagacagcggaccaatcagctccgccagctcatgaatatttatgaccttcgctgagtcaaagctttgaaccgagtttggggagctcagcagcatcatgcttagacttttcaaagagacaaactccattttcttatgaatggaaagtgaaaacccctgttccgcttaaattgggttccttcctgtcctgagaaacatagagacccccaaaagggaagcagaggagagaaagtcccacacccagaccccgcgagaagagatgaccatgaccaccatgccagaaagtctcaacagccccgtgtcgggcaaggcggtgtttatggagtttgggccgcccaaccagcaaatgtctccttctcccatgtcccacgggcactactccatgcactgtttacactcggcgggccattcgcagcccgacggcgcctacagctcagcctcgtccttctcccgaccgctgggctacccctacgtcaactcggtcagcagccacgcatccagcccctacatcagttcggtgcagtcctacccgggcagcgccagcctcgcccagagccgcctggaggacccaggtacgtgcgcttgccagggagagggagag

SEQ ID NO: 1952 - DNA, 297 bp, Homo sapiens
  chr2:172951245-172951542
  hyper
tggctttcagagtttcttgaacgttctctccctggtgctgcctccgccacccttcggtagccactcgctctcggctgttcgcactaaaggcggcccctcgtattaacaacgggccctacttctgctgtccctccaggggcggactcggagaagagcacggtggtggaaggcggtgaagtgcgcttcaatggcaagggaaaaaagatccgtaaacccaggacgatttattccagtttgcagttgcaggctttgaaccggaggttccagcaaactcagtacctagctctgccggagagg

SEQ ID NO: 1953 - DNA, 202 bp, Homo sapiens
  chr2:172951779-172951981
  hyper
cgagctgcctgccgtccggccctctgtccctggacaatctgattagggcgcaggaaggatttccccagacgatttgtttgggaactcagaggtcacacgtgcctaaacaactggaacaatagactccgggcttaatccctcctttgcctttaaattgtgtgactaatcactcggggcctgggtccgcgcctcagcctccctc

SEQ ID NO: 1954 - DNA, 168 bp, Homo sapiens
  chr2:172955234-172955402
  hyper
atgggagcacctctagtgaagcgcttgctcagattagtttcctccagaggaacacgggcttcaagggactagaaccagattggttcccttctcgtggccctgcgtcccagcccagccccaacccccaccccagatctcgcagccgagccgaggcagtcccggagagct

SEQ ID NO: 1955 - DNA, 416 bp, Homo sapiens
  chr2:172955471-172955887
  hyper
cgggagctggccctccacctttggggggtcttttcaggcgcgcggtggggagcagagcccggaaggcagtgatctgtgttgtgacaagcacccatttttcaattggtgctggtgaaagatcagatgcgccaggctcttccgacgccctttgggaaggggaggaggaagtggtggggctgctgggggtggggggaggcggtgtgatggaagcagggaaagtagtcgggggtgggggaatgatgccggggacctccaagccccttccaggcctgagattgggacttctccgcagcacctagaagaaccagcgctgatgggagagatcagacctcagaaaccaggatgtgggcagtcagatgggcctcaaagctgaggaaagaatgaatttcccagctcccgcgcggggtagggggtct

SEQ ID NO: 1956 - DNA, 172 bp, Homo sapiens
  chr2:172957901-172958073
  hyper
ggaaaaaaataatcctgacatcgctgacaagaagttttgatggaagaattagctggtgcatacataatcactcccccaccctcctactcccggagcgggagccacggcggcgggcgcagcgcagccttccaaccctctgaaaaatgaaaccggtttccacccttaccttctt

SEQ ID NO: 1957 - DNA, 63 bp, Homo sapiens
  chr2:172958437-172958500
  hyper
ataaatgtttactcttcattacgctgatgacattgtgcactcgagatcttggtaatctttggg

SEQ ID NO: 1958 - DNA, 233 bp, Homo sapiens
  chr2:172961546-172961779
  hyper
tgagcactgctagtttcccagcgtagagagccgagatcgctgcttcccatttccatttttcattcgcgctttggggagctcagtagagcacggggggagcgtgtctgcgcggcggcgggctgatcacaggactccgcgtctccgggcgggccgggagactgtgagaaaggcttgccagcgcgtcgcccccggcggggctggagccggcccccgcctccaggagccaggctttg

SEQ ID NO: 1959 - DNA, 383 bp, Homo sapiens
  chr2:172963796-172964179
  hyper
ggtccctgacaggaggtcccccgcggcggctggggtgccgagcctggccatctaggcgggcgcgggggcggtggcgccggcgccggaggggcagggcaggcggaggctggagccgctccgcgctgagtgagtcaccccgccgccggccggagaatccctcgcggggactcgggagggggcggggcgtgaaacccccggtgcggccccacgcccagcgcgcctgtcctctccttgccgcacctcgcggtgtcgcagcctcggaaagatgtaaacgtagctctcggccggctggcttcccggcctgggcagcggcttgagctctgagcacgtgactgaccggaccctggcaccaagaaaaaagcgcacacatccaatgaaaacaa

SEQ ID NO: 1960 - DNA, 224 bp, Homo sapiens
  chr2:172964664-172964888
  hyper
atgaggagagagctgagggagcgctcctgggggagcgcggtgggggtaagataagggatgggggctccgagggctgggaactgcaggaaggaaagaagcggcggggccgcccgggtcaaggggccacgtgggggagggcgggcaggcgggaccgggaggtcaataactgcagcgtccgagctgagcccaggggagcgggcgaggagaaagaagcctcagagcgc

SEQ ID NO: 1961 - DNA, 3 bp, Homo sapiens
  chr2:172965295-172965298
  hyper
ggg

SEQ ID NO: 1962 - DNA, 115 bp, Homo sapiens
  chr2:172965647-172965762
  hyper
ggcggttctggaaccagattttgacctttgaggaaaaagacctgagcattagtggaggaacctagtcttggggcagtaggggttcgaagaggagaaaaaagaaggcagagaaaaa

SEQ ID NO: 1963 - DNA, 1171 bp, Homo sapiens
  chr2:172965958-172967129
  hyper
cgagaggtacgggatttctgtccacccggtccctttccttccctcccacggcggccccttgggggtttccagctttgggcctagaagcttacttagggccgctcgaggcgcaggcctggaaatccttaaaagtacttaaaatgaactttaaaaagcattgtcctaaacccgcctgcttcccagccatctcaggcccgcgctctcctcgcccctgcagggcgcgagccccacctgagtctgggtgaggcccagagaggccgccagctcggctcgctccggcaaggccaagtattgagtcttttggaaacgccgctgaagagccgccagctggaaactggagtagatggtgcggggtttccggactttctttggcttcccgttcactatccgaatttcaggctcaaggtcctccttctctgcaacgataaagaatcgtaagaacagcgcaacccaggggtcctggagttcccgccctcctagagggcccggcgggggggacttggcttgagcaaagaggtgggtgcactgaactgtggcgccacgggcaggcgcaacttcgcagcgtgcgatcggagccgccaccgaccccgggagctgtaccctccagggaagggggagacaagtgcacacccaagagaaagaagctggtggcaaggagatgcccttatgaggcaggcagagcacgcccacttggctcttgaggccaccaggtcctaccaaaggagagagggacgtaaccggcgacctgcggcagattggaggctggggagggtaaagggcacaagcgggcggtgagcaggcagcgtgaaaatccagagctttcgaaggccccccgccccaaacacgtttacccatccatcccattaactagaccgactcggcactcttgacttcagcgttatgcataccaggctcgttgttggctggggacgaactggttccatagggagcgtaggaggtgtaggcggcggtgtagcccaggtcatagctgctcttggcggagtaagggacgttgttgaggccgctggcttggtactggtaggaacccatgtgcgcgtagggcgagcccccgccgccgccgccgcccgccgggtgctgctggttggtgtagtagctgctgtcggtggcggtggacaccggaagggtgggcgactcctggggcttgtggagg

SEQ ID NO: 1964 - DNA, 30 bp, Homo sapiens
  chr2:172967804-172967834
  hyper
tgcaaacagactgccgccgaatgtgagcag

SEQ ID NO: 1965 - DNA, 313 bp, Homo sapiens
  chr2:173037368-173037681
  hyper
ccttaggaatgtgggccggggcggggcggcttgggagcgcgctgcagccaacgccgcgttcagccccgggcgcaactgcagccgtgccgggggcctccggggccccgaccgaccgacagctctttcagaccgcagcgaagtttgcacacacgacagcacgtcccggggctaggatcttgcccgcctgcggggctgacctgcaccacccttggggaagcgcgaactgccgccccgctgccgggagttaggcgcccgggcctgggtcgcccccacagacggctcggacggcacgaacgagcggaccccaaggata

SEQ ID NO: 1966 - DNA, 681 bp, Homo sapiens
  chr2:173099653-173100334
  hyper
gacattgaggggcagtgagggcggccgagttgtcggcggtgggcggcgccgggggagccgcgctcggggacagctggcggctcaacggcagcatcggcagcatcgagaaaggtgacgagttctgcaaataacagctgcggagcaatcgttatgtttggacaacgtgggaagggccattgttcacaaattgttctcttcaacaacacctgcatgcacagataataatccattgtcggtctccggcttcaaagacaaaaggcagccgcggagggaggagtcagcagagcctggagataacaggaccactttgcaaccggggagagtgcaaacgaggactccaagtcgcgtcccgggtctgccgcgacggtcgctcaccgcaggggtctccttcctcttctggcagcgagtgcgacctcttttatcctagcaggccaccaccttcgcggcaacaaacatcatttcctatgcagttgcaaagcatgctcccttgcaatcagcgatcaatactggcaaagtggctccaggataggaaaggtcgcacgtgtgttggtaaatggaaaggtttatgaggcgcaggtggtcgtgctccgcggagattgtggtattagcatgtcaaagacaaaacggaaccaaggtatacaggcacagagtctcttcctggggctccgggaaagcttggca

SEQ ID NO: 1967 - DNA, 360 bp, Homo sapiens
  chr2:173601030-173601390
  hyper
ctctccaaccccctgccctgccgcgactccaggctccgctcctgggtgggggtttattttctcttggcatcacgggacagaagaatcgatgcataccctttccggctattcagaccttgcggggtatgaagttttaaagaggggtgggggcaccggcaggtgcagagtaacattctttttttgttcttgaaagcaaagtgtgagggacccggtggagctgtcgaatcccttgctgaaattcacagctctctgcccccgcagtcgctcgctcaaggtctgtgttagagaaggtcatttgggaggctgctttcgtcttaatacctgcttctcgggaaaagatctttacgctaaaaataatta

SEQ ID NO: 1968 - DNA, 280 bp, Homo sapiens
  chr2:173940455-173940735
  hyper
gcaggccagggaggcccgagcgccttccccacgccccgctcgcccgcgcgtgtgaggggagggcggcccagccgtttcgcgccgggaggtaggtggtgctgttgccgtgactgtcttcctcattggcgccgtgcagagaggcggaatgttcaactcctaactgcagcggaaacgtgggagccgcgcgggccgctgtcgtcccaacccccgccgccctcgtcgcgcgcggggcctccgcgcccccggctgctgctcacgccccgcccgggagccaggtagg

SEQ ID NO: 1969 - DNA, 30 bp, Homo sapiens
  chr2:174219487-174219517
  hyper
gcgccatgtctggccgttaccacagcttgc

SEQ ID NO: 1970 - DNA, 183 bp, Homo sapiens
  chr2:174219872-174220055
  hyper
gataactgagggccatggggacgttcctgcgtggcgtgcgcacccgaagtgcgggcggcgtggagacttgagtcgtttgcaggatggctagcagcgctggaaagccctaggcacgtgcgtccgccaaaggccggacagcggccgggagcgctggccggtcccgattttgcctgccaggcagag

SEQ ID NO: 1971 - DNA, 50 bp, Homo sapiens
  chr2:174220331-174220381
  hyper
gcttggtgggtcaaagcgttcgccgaccatttgctcgtttcctacttcct

SEQ ID NO: 1972 - DNA, 218 bp, Homo sapiens
  chr2:174349950-174350168
  hyper
tggaaagagaaatatgcgttgtagagagttcccaacttgaaagagtcaattggtataaatacgggcttcatgacctcaaattcgcagggtttatttcaggcaaaattgtctcttttttatcaagcaagaaagtagaaaacagtacagtgtatctgtttagattctggcgtctgaggtctttgtggacttgaatgctgatagggcgataatgcatctaa

SEQ ID NO: 1973 - DNA, 1127 bp, Homo sapiens
  chr2:175190845-175191972
  hyper
ttgggccccactccagggtgtcgcgggggtcgggttctttccgccgccccccgaaagattctcagctaaccctttccccgccgagaccaagaggccctcactctgacaccactccgggagccaagctactgtaaggagctgataccacccctcgccggcgcgaaccgcccatctccccagacccgcccaccccctgctgcgaatccctgacgttctagcccggcgaaggtcctcttaaattaggaaacaatagctatttaagaagaagcgcaaataacccgcgctctgcgcgcccaatcgtgggattcttgggagttccccgcgggcaaggaagtctgctgctccccgcagctgcggaggagaggagggagcctgcgtgctggggcagggtgtcgcgaacttggggcaacccacctccagagccccgcccccgctttcccgcctgccggggacctgccgaacgcggaaccaccctccttcctgaggcaaatttgggaggggagaggtccagaagctgtagagtcggggcgccaagcgccagattctgccgctcggaagttgggggcagtccccagtcccgcctcaggcccccgcgctcacagggcgctccgccgagggcgcgggccaggcgcgcggtgtcacctccacgaagtcatttacttgccctgaaggagctggccctcgaccccttggaggatggagattcctcccattccctcctccgcctcccccaggtcggcgaagagacgtggaattgagctggaccgatgattccgcgagctctgtaattatgcacacactgaaatcttcaccgttgacttaagttacttggcgctgcgagggctggggccctgcatattgattaaatgcagcctctatttacctaaacaataaatgtagagattagcaacgttcacttgatcacaataatgggattgacaattaaggggcaatgcatcccagatgtagcggaacctatgggctgcgtgcagcaggcagagggcttctcagagaggggcgctgggcagttgcggcggcggaggtagtgcagagcaggaagcagcgcggaagcacagcgggaggcggagggggacgcccagcctcgtcaaggtcttcggccaccccgc

SEQ ID NO: 1974 - DNA, 391 bp, Homo sapiens
  chr2:175192084-175192475
  hyper
cgcttgctgatgcctggccgggaaggaggatggacgccgctggcatgtgccctggtaagtgtgtctgtttgtcatcagtgtacattctgcatgtggcagcagggcgagggggaggcgcacgtgtctaaagtgcacggagccttcctctacccctatgtatatacccttcagtcaatgttccaagaagcgggtcagggcggagggtatccatctggactctggaagggcgtgggtttgacatcggtaggtgtgacaggaaagtccagcctgtcagagttgggctctacagtggccgaaatcaagaaaggatggacgtgtcggcccagggctggcctgtttccggatatgtcacgggggtgcctcgttcctcgaggggagttttaggatgtat

SEQ ID NO: 1975 - DNA, 30 bp, Homo sapiens
  chr2:175192843-175192873
  hyper
ccgggaaataaacagcgcctgcccaggctc

SEQ ID NO: 1976 - DNA, 450 bp, Homo sapiens
  chr2:175193194-175193644
  hyper
aactggcaggaatttccttgtcgtgagaagatggacgagtgtgtctgcagccgaggagacaactacaaacagactttgggcagggaaggcgggcgggcgggggtgggggtgggggcgggggcctgctttgatcgctccagctctgttgtaattttgtcttcgccagatagattagctggaaccgccagccctagcttggagttccgttccacggagtaccctccctccccacccccagcgtcatctcgcgcctggagccgggtcgccgctccttccgaagtctcgctggaaacttcaagggctgatggttctgtgttcttgacgtaattaggaggccacgcagctctccaacactccgttaaacaaatatgtaagtcgtcctccccctctctggggacagactctagggaaggaggcagctgggcccgctccgggtggtgtccttggcta

SEQ ID NO: 1977 - DNA, 104 bp, Homo sapiens
  chr2:175193808-175193912
  hyper
cgggtggttctaagctatgacgaactagaggctgggcccggttcttctccagaacagcgtgtggatgtaaaggagatgaaatcgtcctcccccactgctttctt

SEQ ID NO: 1978 - DNA, 1120 bp, Homo sapiens
  chr2:175196961-175198081
  hyper
ggatgaaaaaaatctgtcagacgaaaaaaatctggacttcctccgaaagatttccttggggccccaccttagagttgaagtggcccgggtgtttgcctgcgttcgtttggaagatttccctaacttttattgtgatgcagacgcgtgtatctaaaggaatatgcgagtgcccacgtctagagtctgacagctggaactacggggaaaacggcgggagggggaggggaggggatccgaggggaggaggagaagaggaaggcgagcagggcgccggagcccgaggtgtctgcgagaactgttttaaatggttggcttgaaaatgtcactagtgctaagtggcttttcggattgtcttatttattactttgtcaggtttccttaaggagagggtgtgttgggggtgggggaggaggtggactggggaaacctctgcgtttctcctcctcggctgcacagggtgagtaggaaacgcctcgctgccacttaacaatccctctattagtaaatctacgcggagactctatgggaagccgagaaccagtgtcttcttccagggcagaagtcacctgttgggaacggcccccgggtccccctgctgggctttccggctcttctaggcggcctgatttctcctcagccctccacccagcgtccctcagggacttttcacacctccccacccccatttccactacagtctcccagggcacagcacttcattgacagccacacgagccttctcgttctcttctcctctgttccttctctttctcttctcctctgttccttctctttctctgtcataatttccttggtgctttcgccaccttaaacaaaaaagagaaaaaaataaaataaaaaaaacccattctgagccaaagtattttaagatgaatccaagaaagcgacccacatagccctccccacccacggagtgcgccaagacgcacccaggctccatcacagggccgagagcagcgccactctggtcgtacttttgggtcaagagatcttgcaaaagaggagagaaaacacgggaggcacagttccacatccttgtcacttgcaccggctccgcgacaactcgtcgtttgcacccgagggtttggggttggtagtt

SEQ ID NO: 1979 - DNA, 163 bp, Homo sapiens
  chr2:175198354-175198517
  hyper
tgcaaaatgtggaagcgcccacgtgtggcctggtcctccgccctcccgggtgaaagtcctggagagatttctcgggcgcgtccgtgaaagcagggcactaatggggagcctacctcttaaaacagcgcacttgccctacggacgagcctctaggccctggtgg

SEQ ID NO: 1980 - DNA, 261 bp, Homo sapiens
  chr2:175199293-175199554
  hyper
cctttcctacaagtggggagtcgagtaggactgtcagccctaacttgcaacatctcggggtggtttgtgtgtgggggggtgcttgtggctcggtttcattggtacttaaacctggcttggtgcgtgagtgtaaatttttaattgcactgtaatttcttcagtccccagcccgccctcgccccccccccgcaagtatcccccactactcccccccacccccgcggccctagctagctgacttgactggcacgcgccgggagc

SEQ ID NO: 1981 - DNA, 519 bp, Homo sapiens
  chr2:175199921-175200440
  hyper
ggagaaactgttgctgctagactgcagcttcagcttctattagcactttccacatttctgggactgatttttccccaagtttttggaacccagaaagatgcctttgcaagaaaaggccttcttaatcaagtcctttttcatttggtttcaaaaaaaagctagaggtttcttttcttcccctcgtgatttataccccatcccccgcattgctttggggattttgttgcaattatgcgacaatggtgtttccagaaaacagtcttaatcgttttgcagtccatctagtcacgctaataaacatttacatttccgcggctccccaattcgcccatgactttgaaatctgtctctggccgcttatcctcggattattgttttcataatcgctgtttttgtgtgtatgtaaactttaaaaccaaacgttttctattaaaaaagaaaagtcaagtcgtagccaccctgggagagctgcaagtttcgcccgtccctggcagctgtttcggccgcctccgccctcac

SEQ ID NO: 1982 - DNA, 143 bp, Homo sapiens
  chr2:175200709-175200852
  hyper
ggggagccaggaccccccgggagcagccgcaggggacgaggctgctcacgggtgcactttgtttcttcccccacttcctcttgccctcctccttcttgctccctcccccatcccacccactctaggaagagccgcgcttcgga

SEQ ID NO: 1983 - DNA, 266 bp, Homo sapiens
  chr2:175200916-175201182
  hyper
cgctgccagagtcgagcgccttcgccaaaggcggctttcacccctggaagcgctcctcgtccagctgcaacctcggctccagcctctcgggcttcgcggtggccaccgggggccgtggctcgggcggcctggcgggcggctcgggcgccgccaacagcgccttctgcctggcctccacgtcgcccacgtcgtccgccttcagcagcgactacggcggcctcttctccaactcggcggctgccgcggcggcagcggccggggtgtcc

SEQ ID NO: 1984 - DNA, 182 bp, Homo sapiens
  chr2:175201359-175201541
  hyper
gtgcacagcagcccgggctcgtggctggaagtgcagaaccccgctggggggctccagagctcgctgcactcgggcgccccccaggcctcgctgcactcgcagctgggcacctacaaccccgacttcagctcgctcacgcactccgccttcagctccacgggcctcggctcctccgccgccgc

SEQ ID NO: 1985 - DNA, 53 bp, Homo sapiens
  chr2:175201775-175201828
  hyper
ggccggggcgagcctgcggcgcaagggcctgcacagctgccacattccgggct

SEQ ID NO: 1986 - DNA, 119 bp, Homo sapiens
  chr2:175202126-175202245
  hyper
cgaatcccccgacctcatcctgcatgactccggcgtcagtgccgcccgggcggcggcagcggcggcggcggcagcggcggcggcggcggcggcggcctccgcgggaggcaaggaagcag

SEQ ID NO: 1987 - DNA, 32 bp, Homo sapiens
  chr2:175202568-175202600
  hyper
ggagacctacaaccacaagcacgcacactcgc

SEQ ID NO: 1988 - DNA, 26 bp, Homo sapiens
  chr2:175202633-175202659
  hyper
cgagcgaagagcaatacatagaaagg

SEQ ID NO: 1989 - DNA, 129 bp, Homo sapiens
  chr2:175204082-175204211
  hyper
tgctcctttccttttcaaagacggctgatctatgcaaatagtgaattggaaatgcctaggtccccgcgccgtcaaatggccctcgcaggttatttgaatatcagtggcgctgcttctgaaaaggttcaa

SEQ ID NO: 1990 - DNA, 124 bp, Homo sapiens
  chr2:175204822-175204946
  hyper
ccttctccttcttgagctccccgcggccaggctgccccgctcttcttactcgagtttttcttcactttggccattttctctccccgatcaagctgttcataaccgggagccccccactccctaa

SEQ ID NO: 1991 - DNA, 512 bp, Homo sapiens
  chr2:175206393-175206905
  hyper
cgccacctagagctccgaggcggaaaggccgtcgcctgcccggctcgcggctgtcagcgcgtggagaccggcttttgccgcgagcagcagcaaccaagaggatcctgcgaagaaacgcgacagtttgcgttccagcggggaacgagccctgctattgggggtggggagcactacatggcagtggcttttgggcaaaagggtcgtttctggaacgtgctaactgaaaatccaaacaaaacaaaataacgaccggttggccctggtcttagaattgtccatttaacatccttttcaaggcaacttcagggtcttccaacttaagagttgagagggctgaagcgttgtcggcggcgacgtggaccccaggatgtggggatccagctgtggacgcagacccctctgactctgcatccgtggctcccggcccgcgaggcccgcgtggactacccggggcccggctggaaccaggccgattcaaacaggccaccaaaccatcccacccccctaccccc

SEQ ID NO: 1992 - DNA, 274 bp, Homo sapiens
  chr2:175206960-175207234
  hyper
cgggccggagcagccttctgcattgccttcgtcctccggcggacaccccagcccgagtggggcgcggggggcggctgggcaggcaggagccgggccggtcgcgcagggcccccgagggcggcgagaagcccccaaattccccgctcgaggcctccccaaagggtgcgcacaccctcctggagcaaaccgaccccttttgtcctctccttttccctttgaaacccaaatctgaaatcgggtaacagttgggggcgttggccgattttctctcctc

SEQ ID NO: 1993 - DNA, 563 bp, Homo sapiens
  chr2:175208305-175208868
  hyper
ggcagggtgtctgccccagtccgcattctgcttgcagattgctgacgaaagttgatatcttcatgtttgtcccaggagcttcataaagcgccctcttcacctgtggagcccgagcgaccagaaaaattcgctcgctttcctaactgctgaaggcgagtccggcccgcgcgggggactgcgcccgaggcccggcaagcttaggcggggactagcagggccctcggcgggcgggcccccagcgaaaaggcctgagaattgcttctggggggtggcttgggccaacgggggcgagggagccgcgcagagggcaggccccgacccttccccgccgcaccttgtgggtcgggtgttgggcggcctcctggcgcgggaggcgcatctgctaggaagggtgtgcgctccccccttctcggcctccccatttcggtttggggtgttttcgcaaggttgccagacggtgcatccagaaggaaaccaccagagcacgcaggggggcgtcgcctcaggatgggaaggggcgacctcagccaggattcatcccatcaccctactccacccccatt

SEQ ID NO: 1994 - DNA, 216 bp, Homo sapiens
  chr2:175260413-175260629
  hyper
cctaaccggaactgcgtttccagcagcaagggggaacttccgagatcaaaggtgacagcttccggcaactgatgcctccactggccactcctccctccgtccacctgtcacttcgggtagctgggaggccaggtgaggggcgcgcacgggggaggggcgtgcatagttgagacagaaacccggaagacccaactgtggcgcggcactgcttgaccg

SEQ ID NO: 1995 - DNA, 30 bp, Homo sapiens
  chr2:175351020-175351050
  hyper
agagagttcctaaccgaataggctgctcgg

SEQ ID NO: 1996 - DNA, 30 bp, Homo sapiens
  chr2:175352180-175352210
  hyper
ttcccaagtacagacgcagagcagacttgt

SEQ ID NO: 1997 - DNA, 30 bp, Homo sapiens
  chr2:175546699-175546729
  hyper
acaaaggctcacagcgactgggtcagctgc

SEQ ID NO: 1998 - DNA, 999 bp, Homo sapiens
  chr2:175547061-175548060
  hyper
caggggatgcccgaacgtccccctctgtcctagctggggtgtaggtgcagccccagggcatcgccgcgaagcccctgctcgagacctacggagatagtgggtcccgagccccacggggcggccccgggtccgcggagtccagcggtgagctcagcccgaggcgcgggacccaggctgtccacggccccttcctccccgggccatcagcgggcagcagaacgcgcgggccgctggcctggaattgcgcccctcccgaggccgcgcgcccgcgcccaccgctcgcaggggacgcggcctcgacgtccccagccgccccacccgcgtcaccggtgccaggcggcacttccgtgccccgccgtcgagcccagcccctcccggcgtctcccccggcccccgggagcccggaacccgggtcgcgccagaggcgacgcgtcccttaccgcgcagcggctccggacgactccgcagccccgcgccgcgctgggcattttttctgggaaacttctcccggggtccgcagggctgagccgggcgggcaggaaaagcgctcagcgccgggaggctgcgaccatccgggaacttcgccgagatgtgggccctcccctccggcgccgccgcccccccgccgccccgccacatgtggacgcgccgcgaggccccgccggcccgcgccctgccctccgcgcgcccgcctgccccgccagcaatggggctctgcgcctgcagcttcggcccgcagaggatcgcggcggggcgggatggtcggggctggagtccgcagtttcctcagtcccgctcccctgcgcggcgaggggaccgaggcaagaggacaggagtttgcagaggggcgggaactggaaggggagtctagcccagggcctttccccccaactcttgaatcttctccaccttcttgcggctgctggcggggggatcgggtgggggtgttccctctgttcgagccggaaggaacgccttttcccacgctttcccgtctgc

SEQ ID NO: 1999 - DNA, 44 bp, Homo sapiens
  chr2:176937942-176937986
  hyper
ctagcccggaaagccgaagccccggagccgatgtctgggctgac

SEQ ID NO: 2000 - DNA, 289 bp, Homo sapiens
  chr2:176940203-176940492
  hyper
catatttctgagtttggagggcggggatgccagggtaagcttcctccgagcgactaaggagcagcaacaagctctggaatttcctctcggggtggtccgttccaccttaaataacttgggctttttggtcccaaacgcgccctgtagttcaggtttttttgtcctccctgcagcagctgtcaccctgcattactcgcagtcagctaaatgaaacattattctaaacatatgcatcgtaatcagttcggtcacacttacaagaacacgcgttaataaggcaatcaatcac

SEQ ID NO: 2001 - DNA, 114 bp, Homo sapiens
  chr2:176943397-176943511
  hyper
caagaacaatgttttatgtaccgagtctcttatccgtctctcctaatgacttcccttagcgggttgttagtacttgacagcaggtctccgtgcggggaacttttctccaattcc

SEQ ID NO: 2002 - DNA, 252 bp, Homo sapiens
  chr2:176944152-176944404
  hyper
ggccacatccctacccgccttgctcctgaacgtagtaaacaatctcacaaacaaccaccgctgcccacgctctccatccgtcctcccggccttatcagacctccgttctcccgcactcttcgggcagggtccctaataagctcaggctgaaagaacgtttgccacctcccccaccctcgttgaaagaaaaggaagaaaaacagcagcagcgagaaacctccggggcgactcctcccccgcccccaagcacca

SEQ ID NO: 2003 - DNA, 390 bp, Homo sapiens
  chr2:176944456-176944846
  hyper
cgccgttcagccaagcaacccggacctgagagtgcacagccaggactagcttagggggcgaggggttggtctttgggaaaccaagcgctcaggacagaggtggaaagtgggtcccgggagccagaaaagagagagaagggcagacggctgggtggcaaatacaaaaatagaaataatttagggggatgcccgccaggcttttgcgcctgctccttctcccccaattcggagcaggttcccttcggcctcccgcgccccggggcgccccctggcggcagcggcagcagcgggcaacgcgcggagggctcagggggcgcacaggggactcccgggcacactcagagaggcgggcgcggccccctggcggtggcgacgtagttatctggtgag

SEQ ID NO: 2004 - DNA, 131 bp, Homo sapiens
  chr2:176945137-176945268
  hyper
ggccgccgccgccgaggaggccgcagccgctgcggctgccgcggctgccgcggcagaggccgcgctgttgagccccgcggcggccgcgggagcctggtagagaccagggtggcggaagctacacagcagct

SEQ ID NO: 2005 - DNA, 235 bp, Homo sapiens
  chr2:176945581-176945816
  hyper
cgccgcagcctgggttagggagcgccccgtgttcccagctcctgtcccaggacctctgccccttccggacctctgaatggcttggtctacttctctccgaccaagcccaaccccgagtaccctgtggtctcccagctgggaaagtgtggacggcagtgtgtggaccgccgtgggcacaccgtcctcaacgaagagggtcctctcccccgcgtccggctgctgctgctcctcaggc

SEQ ID NO: 2006 - DNA, 147 bp, Homo sapiens
  chr2:176946720-176946867
  hyper
ggccggacaaccgttcggattcggtggccgggaaataaataagccaattcctttggtgactaccccccgcggatttccagacccttagctaaatctagccacccagaaaggggaaaggggaaaaagaaacaatcaacccagatgccc

SEQ ID NO: 2007 - DNA, 255 bp, Homo sapiens
  chr2:176949614-176949869
  hyper
tgaactcgaagtccccggttttttacttttataatcctgctgatagaaagccttctcgcctacgcattttcctgaggggaaacgaactaggctggacgatttgatagcagaattcgacagctaactttaaacacagtggagatttacagcgccatacgggcgctccgaatccacgctcacgttgccagattttcccctccctcctcaaatagaattatttgcggcaaaggcgctggatttcgaggtcaaaagagg

SEQ ID NO: 2008 - DNA, 367 bp, Homo sapiens
  chr2:176957047-176957414
  hyper
tgcaactcggggagccgaggagaggtggcaaaaacagcggttgccgagacaaggcgcaggccttggcgcccgcctcagtcgcagacagggcctgggatgggccgtcgcgcaatcaactcgtgggggtggctgcagcgcgtacgcctgggtcgggggggagggcgggaatgggaggtggaccctgcaaggggcaggagaggggtgggggccggagtgggtgggtccagccaggcctgggccgggagccaggctcccccgcgttcctacccccacgtggccgcgcgcagccaatggcacgcccccggcgggggccctcggggcgggaggcggccccccgaccggcccaggccccctcccaacctgaact

SEQ ID NO: 2009 - DNA, 52 bp, Homo sapiens
  chr2:176957576-176957628
  hyper
cgcggggccagggccagggccggggccgggccaggccgggccatgagccgcg

SEQ ID NO: 2010 - DNA, 433 bp, Homo sapiens
  chr2:176957914-176958347
  hyper
ggaggctcccccagccaaagagtgcccagcacccacgcctgcagcggccgctgcagcgcccccgagcgctccagcgctgggctacggctaccacttcggcaacggctactacagctgccgtatgtcgcacggcgtgggcttacagcagaatgcgctcaagtcatcgccgcacgcctcgctgggaggctttcccgtggagaagtacatggacgtgtcaggcctggcgagcagcagcgtaccggccaacgaggtgccagcgcgagccaaggaggtatccttctaccagggctatacgagcccttaccagcacgtgcccggctatatcgacatggtgtccactttcggctccggggagcctcggcacgaggcctacatctccatggaggggtaccagtcctggacgctggctaacgggtggaacagccaggtgtac

SEQ ID NO: 2011 - DNA, 136 bp, Homo sapiens
  chr2:176959223-176959359
  hyper
tcagccggacatgtgcgtctaccgaagagggaggaagaagagagtgccttacaccaaactgcagcttaaagaactggagaacgagtatgccattaacaaattcattaacaaggacaagcggcggcgtatctcggct

SEQ ID NO: 2012 - DNA, 106 bp, Homo sapiens
  chr2:176963492-176963598
  hyper
cctgtttgtcagacccgtgaactccctatccccggcacccctgggggcgctgaggcaaggaactctgctagccagctgcctccgaacgcccgctgttccccggcca

SEQ ID NO: 2013 - DNA, 83 bp, Homo sapiens
  chr2:176964066-176964149
  hyper
ggaccgcgccctctccggataagtcgagaggcgccggttaatggaaaatgcctccgctgcaacttaaagccggtagaagcaag

SEQ ID NO: 2014 - DNA, 154 bp, Homo sapiens
  chr2:176964179-176964333
  hyper
cgcaaagccaatcacgaccaagaagagtcccaggggacacttgggcagagtcaccctcttgcccgatgtccccagctgctgaagccgggcctggaaacccgcagacagttagtcttcgctcaacctgatttggctctgctggcagcctcgtcct

SEQ ID NO: 2015 - DNA, 378 bp, Homo sapiens
  chr2:176964389-176964767
  hyper
cggggggatgtaggcggtgctgaaatgaccggctttgaagaacctgcaggcaaagtttcgtccaatcgtctgagcctgtcctcttattcccggttgtaactaaatactgttgcgagcgcagccgaagccctttgttggagatgtgtgagcgcagtctctacagagcgggctatgtgggctcgcttctgaatctgcagtcgccagactctttctacttctccaacctgaggccgaatggcggccagttggccgcgcttccccctatctcctacccgcgcggcgcgctgccctgggccgccacgcccgcctcctgcgcccccgcgcagcctgcgggcgccactgccttcggcggcttctcgcagccctacctggctggct

SEQ ID NO: 2016 - DNA, 97 bp, Homo sapiens
  chr2:176965264-176965361
  hyper
cggccccggggagggcccgcaagaagcggaaaccctacacgaagcagcagattgcggagttggagaacgaattcctcgtcaacgaattcatcaacag

SEQ ID NO: 2017 - DNA, 178 bp, Homo sapiens
  chr2:176969435-176969613
  hyper
agctggggccaaagagccaagcgggctgggactggaatgaaagcgctctgggttgtggagtgggtcggggggcaagggtccgcgctaaggagccgaaaggggccggccgcccccttcccctatgcaccggcgcgccactgcagatggctcaccctcccccgccaaatcgctgctcccg

SEQ ID NO: 2018 - DNA, 239 bp, Homo sapiens
  chr2:176969676-176969915
  hyper
cggtcagcaggctccatactgggggcgccgggctgcctgcaccccaccccgtgccgccagtagagagaaggtgcgagaattttgcgaatccccagacacataaagacccgggttgaagtcctcgcagctgccctgggtcctgagctaccgcagggccagtgtgcagcgtccagggagccattttaggagagagatccaggggcgtcgaccacgagcccgaaagggagaggcttgggcct

SEQ ID NO: 2019 - DNA, 81 bp, Homo sapiens
  chr2:176971289-176971370
  hyper
ccgaggccagcactcgcacccttggggtcagaaccggaaagagccaagtcactccactctgaacgcgctgggcagaaaaat

SEQ ID NO: 2020 - DNA, 272 bp, Homo sapiens
  chr2:176972103-176972375
  hyper
cggccagagcgcagccagcatgtacctgccgggctgcgcctactatgtggccccgtctgacttcgctagcaagccttcgttcctttcccaaccgtcgtcctgccagatgactttcccctactcttccaacctggctccgcacgtccagcccgtgcgcgaagtggccttccgcgactacggcctggagcgcgccaagtggccgtaccgcggcggcggcggcggcggcagcgcggggggcggcagcagcgggggcggccccggcgggggcggcg

SEQ ID NO: 2021 - DNA, 54 bp, Homo sapiens
  chr2:176972750-176972804
  hyper
gtccctgcaccaaggcgacccctggctcggagcccaagggggcagcagaaggca

SEQ ID NO: 2022 - DNA, 104 bp, Homo sapiens
  chr2:176972814-176972918
  hyper
cggcgagggccccccgggagaggcgggggccgagaagagcagcagcgcaggtaggcaccgggtactgggcaagcggtgggcccgggggccgcgggggagggggg

SEQ ID NO: 2023 - DNA, 376 bp, Homo sapiens
  chr2:176975879-176976255
  hyper
aatggaaacaaagcctacaatcgaaaaatttcgttaagaaggggattcctttggtattctagacatcggttaaaatgtcagtgccctaatagtgtgatcgttccatgagcttaaaactgttttttttctttctgtttccatctattttttaaaactgcatctaaacgtagcaagcttgtgtgcccaccacccaaggcaagccgaacccgagataccattttccgtttgcaggggcctggagatccacacgagggcgcgctcacgttccagaagccgcgtttgaccaagaggccgcggtaccttgtctgtccaacactggattctaataggcgacctcaaccccttagaaacaggcggcagctaaggtgtttgctag

SEQ ID NO: 2024 - DNA, 120 bp, Homo sapiens
  chr2:176976695-176976815
  hyper
ggggactgggagaatcgttctgggagcccgcggccgtgcctggagtgcgcggctaccagtggcgaccgagtggcgccggcaggactgtgagttggtgtgcccaggccgggctgggctgat

SEQ ID NO: 2025 - DNA, 187 bp, Homo sapiens
  chr2:176980750-176980937
  hyper
ggttcctctgagagccgaagcctcgtgtagccctccggggcgcataggaacccggagccaggcaggaggaccgagcgggaggacaacgcagggaccaacccatccatggggatccgggcccggccagctgcttggcctcccggccctcgcggccctttttgcctccgccctcctagagacaccttgg

SEQ ID NO: 2026 - DNA, 108 bp, Homo sapiens
  chr2:176981376-176981484
  hyper
ggccggccggccaggctctggagcacgtgacccgagaggaggctgcggctcaaggccattttcaaatctcattggcttggttgtcatgtggtcggcagaggcatccac

SEQ ID NO: 2027 - DNA, 126 bp, Homo sapiens
  chr2:176982293-176982419
  hyper
aaggaaagcaaaggtcggtatgagcagagttgccaccccagcggggcgcgcagcccgggaacccggcagagagggagtgccggggtgcccagcgccgagccggagcccgacttggcaggtgctgct

SEQ ID NO: 2028 - DNA, 110 bp, Homo sapiens
  chr2:176982517-176982627
  hyper
cgcccgggcagaggaaaagcttgccggttttatttttcctgagctagacctgaacacaacaaaagagcgcaaaggagacctgcggctcataaacacgaccacagagcctc

SEQ ID NO: 2029 - DNA, 339 bp, Homo sapiens
  chr2:176983747-176984086
  hyper
gcccttacactaagcaccaaacgctggaattagaaaaagagttcttgttcaatatgtacctcacccgcgagcgccgcctagagatcagtaagagcgttaacctcaccgacaggcaggtcaagatttggtttcaaaaccgccgaatgaaactcaagaagatgagccgagagaaccggatccgagaactgaccgccaacctcacgttttcttaggtctgaggccggtctgaggccggtcagaggccaggattggagagggggcaccgcgttccagggcccagtgctggaggactgggaaagcggaaacaaaaccttcaccgctctttgtttgttgttttgt

SEQ ID NO: 2030 - DNA, 14 bp, Homo sapiens
  chr2:176986483-176986497
  hyper
cgaagcggccctgc

SEQ ID NO: 2031 - DNA, 503 bp, Homo sapiens
  chr2:176986711-176987214
  hyper
cgcgccccggctcgcccctcgggccgcggcgtgtgcccagcctcacgtcggggtgtgtgtggccgcgcgggcgtgtgtgagtgtggcagggggagggggccctccgatctgctccatccgtccgttttattagggacacattaatctataatcaaatacacctcataaaatttttattgaaaggcataatatcattacagaggtcttccacctgttttaaacaacacgacaagctgtgagcaagcgtgtgtgtggggatgtgtggggaggggtgggtgtgagtagggagagaggcgaggggagaacagctcccctcgggcgctaggggccgccccgagggcccgcctgcctcgggcgacaccggcctggcgcccccgcggccgctccgtgtgccctggactcgccgcccgcggctcggaagctggagagtcagcgacggggcccgactgcgggaccgagggctgcaagaagaagcgaacaaatagtccccagcgcctcctctg

SEQ ID NO: 2032 - DNA, 1040 bp, Homo sapiens
  chr2:176993339-176994379
  hyper
gacagctttggagagagctgctaaaatcgggaatattttgtcgattcacactcgactgggccacatgactcgggcaacttttcttcatctctgctcacaaactaggctgagccttctctttctctgctttgggaaaaattcgtaactttgaggcctgcgcgctctctcggcagtaatttcacaggcttggcggaggaagtaggatcgttagcataagatgggccgcctgcagctgcctggaaccggcgcgatctgaacgccggctgggaggctcctggggggaacttgcggtcgtctgccctccgcactcctccgggaaccgcagccggccctggttcgctgcgcgccggggctgagacccgggagccgcgtcctgcccgaggaaatgtcaccctccccagcgcgagccctttttcccgcctcagaacgtttctgtccgctcttctatttactctctcagcaagcctaatgccccctcctgcattcttcagcctccccctgcgcccagggctgacgtctatcaagggtgaaatgatggaaactatattcatgggcatgatttccattaaatatcaattaacctgagagcctcggccaggcttgcggtgcgtcaagggtaaatgtacatctcatttccacagggcccgctcggctggaaaagaaaggctttgatttgctttgataacgccaggatctggggccacactcgcggcttttaattaaaccacttcgatatgccccaactcaaatgcacggtccggtccgtcaacacctcttgtccacgttccctgggctgcacccgcgtgtccagagctgcaaaagccacgggcaacctctgcttttgcagccaggggctcggggaggcagtcatttgctccgcagcctcctgggagtggcctccttggctcccccaagtctaaggctccgccgcggcccctccctgccggctgcgatccgcattcccgcggccccggggcacacggagcccttggcagtgcgtctttatgggccccctttaaggccggcggaggcatctcggg

SEQ ID NO: 2033 - DNA, 124 bp, Homo sapiens
  chr2:176994497-176994621
  hyper
cgccggtgcgcaccgggtcggcagcctcggcggcgggggcgagattggcgggaggggggcgcggggggggcgcggtaagaggtggcggcgggcagagggtgttttttttcttttccctccagag

SEQ ID NO: 2034 - DNA, 199 bp, Homo sapiens
  chr2:176995070-176995269
  hyper
ggggccgccgccgctgacgccccaatgagttcgtacttcgtgaacccgctgtactccaagtacaaggcggcggctgcggcggcggcggcggcgggcgaggccatcaatcccacttactacgactgtcacttcgcgcccgaggtcggcggccgtcacgccgccgccgcagcagccctgcagctctatggcaacagcgccg

SEQ ID NO: 2035 - DNA, 412 bp, Homo sapiens
  chr2:176995331-176995743
  hyper
gggactgggtgcggcggtagggaaggccggggccaggagtacttccaccccggcgggggcagcccggccgctgcctaccaggccgccccccctcctcctccgcatcctccgcctccgccgccacctcccccctgcggcgggattgcctgtcacggggagcccgcgaagttttacggatacgataacttacagagacagccgatttttacgacccagcaagaggccgagctggtacaatatcctgactgtaaatcgtccagtggtaatattggcgaggacccagaccacttaaatcagagctcgtctccttctcaaatgtttccgtggatgagaccacaaggttgggatgcattttttttttaagaagggagagggggagaaatctgctttcatctcacgttctggctttaaa

SEQ ID NO: 2036 - DNA, 635 bp, Homo sapiens
  chr2:177001060-177001695
  hyper
gaggagaaggaagagaggaggcgggggagagagaaagcagaagaggaaaaaacatggcgcttgcgagctgtatgtgcaaaatccgcaaggaattgcagtaaattcctttttgtttgaagaaaatttacaacttggtaatagacctttttatgacctatttgcggtcgtcattggctgcggctggtcatgtgcaggcgccgctcgccttcacggcctttttcctgatttccccggcgaatttccccccgcattctgctttcccagagcctcaccccctctttttctaacctttgtctctgcagaggtgggctccagtcaccggctgcgggattgcggagtccgccgcggcctcggctcccgcccggcgcccggcctggccccaccgccgctcactcggtccgcatcgccgccacctccggagctggtggggagcccggcgagggagggcctggaaggggccctgggcgccgagtcccccgccggcgccgacaccgcctgccaggagcagccggcctgctcgaggtgactgcagccgcgcggttctggcgcggcttcttcaccaacatgagcgggtctctgcgtccgagagtgagcgcagccgggcagcgcctagtggattacagcagacgcccgga

SEQ ID NO: 2037 - DNA, 149 bp, Homo sapiens
  chr2:177001781-177001930
  hyper
cgacccccttgggcagctcagtccggctgctcccctacatttcccggggaagtggggggtcgctgtctaagccccttcccccaatcacttcgttcctagggcgtcccctggggcctggggtggagtccggctgggttcagaagtctaag

SEQ ID NO: 2038 - DNA, 683 bp, Homo sapiens
  chr2:177005050-177005733
  hyper
tggggggcagcagctcggcgaagagcagtcaaataaataaataaataaacaaataaatgaacggacatataagggcttttcccgcctgggttcgcttaaataatgggggacaagcgcctctgggccacgagcttgttgtttgtcctgggatggggggtaggggatgagaggtggcctcaggtccctcttgctccttccagccgccccaggggacactgtagaaccagcctctggtgcggggagacctccgcctgccggaggaagtcccagcctcaggtttccggggctggtggtctccctgctctgctgtctggcgcctcgtccaggaggaggcgctgtaggacaagcgtctcgccggctgcggcgggccggggagggcgggagcggagggatcggtacccgctcctcccttcccgcgcactctacctccgcgcgccaagtgtgtggggcctcgaacaagggtcgacggtgctgcgccccgtcccccaaggggttcctttccccagactggcagtggaagcagctccgaggcctgggagcctagggccgttccgggttggcgggccacctcgctttctccgcgctcccggagggggcgcgatttcctcgtgctgcgcttgtaggagcagcaacttgaatcctgtgtggggcaagctgggcccaatccgcggatcccaaccagc

SEQ ID NO: 2039 - DNA, 276 bp, Homo sapiens
  chr2:177042526-177042802
  hyper
tgatggctccattgttcacagcgctgccctacaaataccatatccgtccccacctcctctgcaagggtcgagcggaagagtaggtctggtgagctgagctctagggagctggtaccatcttccctcaatccccctcggttaccccttggggcagcaacgacgccatcccagccccttccagagaacacacaaaggaagccccacccgtccttagacctgaggacacgctcgggagcgggctgacgtggaccccgtttcagggcgccccgggcccct

SEQ ID NO: 2040 - DNA, 85 bp, Homo sapiens
  chr2:177042913-177042998
  hyper
cggccaggctgcgggcggggtgggctggcgctcctgatccacctggaacacttttgcaaagacagacggtgagttaatcacccta

SEQ ID NO: 2041 - DNA, 297 bp, Homo sapiens
  chr2:177043266-177043563
  hyper
ggcgcctgctggggagctgcgcagccaggacagcggtcggcagcacagggcctgggcgcagggcccgccgtcaccacctcacgtcggaagccagcactgctgcccgccagccctgccgcctgccctcggacttcccagggcgcccagggtcctcccaacgcgcctgcacccacacccgcccctgagccacagtgaccttgcattccccgccccctgccacacctcctgcgtgcccgagtgtcacccttaaataccgctctacacccagagagggacgaatacacctctgaagacagg

SEQ ID NO: 2042 - DNA, 498 bp, Homo sapiens
  chr2:177052936-177053434
  hyper
tttatctgtcctggaggtgggcgaagagcagtctccaccggccgcgcgtcacgctcccatttaaccttttccatgccgcgacgcccacactccgccctcgagggactagccccccccacgatccagagcagaagcggctcgccccgctgcatccacgggccctcacccaagcgtccagtcctgcctttctccccccacctcgcccaatacctgtccgagagcaggcgttctgccctctcgccccgcccttgcccaggcagcccccggtcgcgacggctctcctcggggctcgggggcgctgggcggcggccctgggctgctttggctaacttggctgcggggcaggcgcgaggagcggcgcgccgaccgggccgagcggagaggccgcccattggccggccagcgccacgtggccgcccccgccggtatattaggccactatttacctccggctcactcgccatgggttggagagggcagctcgggtagagagggctg

SEQ ID NO: 2043 - DNA, 84 bp, Homo sapiens
  chr2:177053618-177053702
  hyper
cgacgcccggcccgtggctctgcagcccgccttccctctgggcaacggcgacggcgccttcgtcagctgtctgcccctggccgc

SEQ ID NO: 2044 - DNA, 47 bp, Homo sapiens
  chr2:177053906-177053953
  hyper
cgacggcgggtctcacgtccactacgccacctcggccgtcttctcgg

SEQ ID NO: 2045 - DNA, 206 bp, Homo sapiens
  chr2:177053999-177054205
  hyper
cggcgaacccggcccttttccggcttgtctcaaagcgtcagccgacggccaccctggtgctttccagaccgcatccccggccccaggcacctaccccaagtccgtctctcccgcctccggcctccctgccgccttcagcacgttcgagtggatgaaagtgaagaggaatgcctctaagaaaggtaagtccgcgggccttggatggg

SEQ ID NO: 2046 - DNA, 986 bp, Homo sapiens
  chr2:177502149-177503135
  hyper
agacaaatacttttcagatctcgcacccctctttacaaacctgagcggggctttcggggtaaggggaggcaagactttggtgggagctgctcgtcttcagcaaagcgagggccggctgcaaaggcgcaggctggcagttcgggtcatttcctgccgattccccattcccctcggagcagcttggagaggaagtcggacttcttttccaggcggagcctccacgatgggcgtgggcgcctcgtgcgtgggccgggggcctcgtgcgtgggcggggatcggggcctgggaaaaacgggaacccggtacccgcccgcgccctcgcgcgtcggccaggaacctcggccccatgcgggcgggccagcgcggccaggagggccgggaagaggggtccccggggccccggatgcgctgaactccggggaggggatgggcaggagagagagcacactcctggagccgcgacgtccaaacccggacgcacttgaacccgcagcgaggcccgtggctcgcggccttcggagagcacccgcgccccgcgcagaccggacgccggccttgcccgatcctcggcatccttcggcggggcggccagtcccagggcgctcgctgagggccacaccctggccccagagtttagcaccgccgcgggcagggcgctccgctcccggaccccgaatctgaaagcggagaccaagggctgcctgcggcaaagctcgacatacacttgattttcttccgatttggagaaaatgtcacgggcgagagcaaaaaaaaaaaaaaaaaaaaaaaaaaaaaccctaactgtaaatattatttggaggtgggcgagggcgcggcgtgcgcgcggcggcgggtggcgggcggcgcgggcgcccttgcggggattcccggtctctcagcgcgccctagtggacgccctgcctttcgctggctccccgtgctcgttacaatctgcaatatattatttcttccgaagtattgacaat

SEQ ID NO: 2047 - DNA, 30 bp, Homo sapiens
  chr2:178257327-178257357
  hyper
gcgtgacaagggagcgccggcgcggtgggt

SEQ ID NO: 2048 - DNA, 88 bp, Homo sapiens
  chr2:178257947-178258035
  hyper
tctgtcaggaagggggcgggatgggatggtggattttggtcactatgtgagggtaacaggcttgaagaactctcgttggagaagggtt

SEQ ID NO: 2049 - DNA, 30 bp, Homo sapiens
  chr2:178417675-178417705
  hyper
agactactccgggccgttcagagactgaat

SEQ ID NO: 2050 - DNA, 31 bp, Homo sapiens
  chr2:178483624-178483655
  hyper
gacgactactccgggccgttcagagactgaa

SEQ ID NO: 2051 - DNA, 185 bp, Homo sapiens
  chr2:178937428-178937613
  hyper
tcctgttccggaaacccgagctatcgctgctcctgttctggctgccgccgctgctgctggaactgctgctgtaaccggatgagtggaccgctgtgacagggaggtagggcaggacacgcccctgagtgaggcacggagcctggagggaggagagaagaggagggagccgcggacgccagaccagc

SEQ ID NO: 2052 - DNA, 30 bp, Homo sapiens
  chr2:179278317-179278347
  hyper
gttcctaagccgcgcggtgctcccagcttc

SEQ ID NO: 2053 - DNA, 30 bp, Homo sapiens
  chr2:179278840-179278870
  hyper
gtaagtattgatatcgtcctatagcatttg

SEQ ID NO: 2054 - DNA, 31 bp, Homo sapiens
  chr2:179316144-179316175
  hyper
gtccttagcaggaggccgtttcttgccggga

SEQ ID NO: 2055 - DNA, 313 bp, Homo sapiens
  chr2:179343681-179343994
  hyper
agaggcatgctggaaaaggagcgtaaaaaataggctggcggtggctttctgggtgcttcggaggtgtccttgaagcgcattctcaggtcggaatcttgcattcagaggttccaggctgagtcgcacaacctgaaggccagcccgatgcaacgaaactgcggtaccgcaactcctctgcctggctgcaggcgtttccgagagccgacctccacaattcagcatcctccgctggcttgcatttcttttccccgccactcggggccgcccttgattcgagggcctctggtagtgcggggaatgttcttttgacttt

SEQ ID NO: 2056 - DNA, 86 bp, Homo sapiens
  chr2:180129610-180129696
  hyper
gcgagtgggactctggcgctccggacggaccctgccgtccccacccctagccgaggcccaggctccccaggcgggaggcagtcttg

SEQ ID NO: 2057 - DNA, 1023 bp, Homo sapiens
  chr2:180725276-180726299
  hyper
aacaagtgcaaacttcggggaccttctctctgctcctctgcccccatctcatctgggttctgctgcagaactctcccacgaccccaagcttcgaccgctaccctcctcacacacctcggtcccctaactacccatttcccggtcattgagagaaagacaaaccccaaacttccagcccaggtgacgaggcgctgcggctaaacatagcggggcactctcctcgtcctttcccctctccatccgtccttgggaattggagcctaccctggggaacagaggagtatgctcctgtggcttccacgacctaatcctaactccagggactcgcaggagttaggattaggtcgtggaagccacaggcgcctgggcgccctcctctacaagtgggaccttgagacaaagtgcaaactctaccgggaggggggctcctggccattccctcgggcggcgcgcccaggtgcaggctcgctctgcggaggagggcgggggccgggcaagcagagggcgcccagtccgggggcgccggtctgggctgggcgcccagagcttacctcggcgcgcgggccgcgggcgcgtggggcagtggctcctccagccgggaagctgttgctcacgctccggtggttgctgcggtcccgccagggctgcaccggggcttcgcgcagacgttctcccgcgatctgctgcagcccaggcggtggcggtggcggtagcagcggcggcggtggaggtggcgcgggcgacagctcggcccggcgcggcccctgaactgtccaactcttgcccgcgccgggcttaagcgcccggccgctgcccccgcgctgagcgcctgcgcaccgggcctcgcccaggtgaggggcgtgtgcccggagcccgctgggcgcgcccggcccggcccggccccgccgcacgcccgcccccctggcctggccgaggaccccggggtttggacgtgccaacgccactctcgcgcgccgaagctgtgacggtttactaagcagagacttgcgaggcacacagaga

SEQ ID NO: 2058 - DNA, 30 bp, Homo sapiens
  chr2:181179266-181179296
  hyper
aggaaataaagctagtaaatgggaggagcc

SEQ ID NO: 2059 - DNA, 14 bp, Homo sapiens
  chr2:181844776-181844790
  hyper
ccttcctccagctt

SEQ ID NO: 2060 - DNA, 23 bp, Homo sapiens
  chr2:181844867-181844890
  hyper
cggggcggcgggggactcccaac

SEQ ID NO: 2061 - DNA, 31 bp, Homo sapiens
  chr2:181846233-181846264
  hyper
gtgtttaaaggctttacgtgcactgaggagg

SEQ ID NO: 2062 - DNA, 441 bp, Homo sapiens
  chr2:182321396-182321837
  hyper
accagctggagcaatccgaatcggttaaagtgaatcaagtcacagtgcttccttaacccaacctctctgttggggtcagccacagcctaaaccgcctgccgttcagcctgagaggctgctgctagcctgctcacgcatgcagcccgggctgcagaggaagtgtggggaggaaggaagtgggtatagaagggtgctgagatgtgggtcttgaagagaatagccataacgtctttgtcactaaaatgttccccaggggccttcggcgagtctttttgtttggttttttgtttttaatctgtggctcttgataatttatctagtggttgcctacacctgaaaaacaagacacagtgtttaactatcaacgaaagaactggacggctccccgccgcagtcccactccccgagtttgtggctggcatttgggccacgccgggctgg

SEQ ID NO: 2063 - DNA, 153 bp, Homo sapiens
  chr2:182322038-182322191
  hyper
cgtaggcagagacggagcccggccctgcgcctccgcaccacgcccgggaccccacccagcggcccgtacccggagaagcagcgcgagcacccgaagctcccggctggcggcagaaaccgggagtggggccgggcgagtgcgcggcatcccagg

SEQ ID NO: 2064 - DNA, 650 bp, Homo sapiens
  chr2:182322399-182323049
  hyper
cgcgaacccggcccccgaagggccgccgtccgggagacggtgatgctgttgctgtgcctgggggtcccgaccggccgcccctacaacgtggacactgagagcgcgctgctttaccagggcccccacaacacgctgttcggctactcggtcgtgctgcacagccacggggcgaaccgatggtgagtagagttggactgatgcgccctcagcagctcagagcggcgtgagaatggcgccctagggattccctgcccgattcaaactttcctccctcccaaggaggcaggagggaaacgctgcgagagccagctcgctggaaatctgccagggaaactaacttatcttggggcggcagcgccccgggtgcgttatggtgcaaggtcttggagcttcgagtcgggggtggtgggcggaggaggaggtggggaagctgccctgctgcggactgcacatctgtggcgacagggagctcagtgggcagcacagctcacgtctgagcgcacgtgcacgtgtctcgctttaggctcctagtgggtgcgcccactgccaactggctcgccaacgcttcagtgatcaatcccggggcgatttacagatgcaggatcggaaagaatcccggccagacgtgcgaacagctccagctgggtgag

SEQ ID NO: 2065 - DNA, 637 bp, Homo sapiens
  chr2:182521310-182521947
  hyper
tcccagttgggaaggaggaggcggcgacttggggactcggtaacctgtccgggcagtgaggcgagcacggggaggggaggcgagaaaaggggagggtggagcaaaagctcgtgggtgtaggccttgggccggggagagggaggaagcgcggagggaggcgaagacgcttggggccgggcactcacccgccgggcgctcgggctgaatgggccgccaccgcagtgctcgctcgctcagcaccacgtcacaactgtccctcccgatctcgaagatgccccggagcagaatccgctcggccgccgcctccgtctgctgcggggacgttaacagcgccggaggcacagcggcagcctccgggggcgcctcttcctcccggccgccctccagggcactcacccggttcctgcgcctcctccagggcatggcggagtcgcaggctgggcccgagccaggggtccggggaggcctttggagaaggaggtggagggcgcggcagccccagctctagccgcgtccagcgctgccacagcaacggcgcgcagggcagggacccaggagggaggcggggccgcgcctgacccagtccagcaccctggcctgccagcctcgccgcttcgccactcaccacaaaaagacc

SEQ ID NO: 2066 - DNA, 93 bp, Homo sapiens
  chr2:182545547-182545640
  hyper
tgtatgccgcggagcgctccattccggcccctttgtggccagaagaaagtggcccatctgtcgccagttagagactccgcggacctgttttta

SEQ ID NO: 2067 - DNA, 30 bp, Homo sapiens
  chr2:182546489-182546519
  hyper
gctcccctcagtctcgggtctgtataagat

SEQ ID NO: 2068 - DNA, 30 bp, Homo sapiens
  chr2:182548293-182548323
  hyper
tacccagcggcacgcgaaccgcacgcgcgg

SEQ ID NO: 2069 - DNA, 31 bp, Homo sapiens
  chr2:182756672-182756703
  hyper
gcccgcttcagctccccggggccccctgccc

SEQ ID NO: 2070 - DNA, 114 bp, Homo sapiens
  chr2:182757522-182757636
  hyper
agcttcctcctctaagcgattagaaatggaagtgctgtgaccgctgattatttggtgaccgtgttgactttacagttaggacttgagctactcacgcatcgtgttagcatcaga

SEQ ID NO: 2071 - DNA, 295 bp, Homo sapiens
  chr2:182819004-182819299
  hyper
cacacacacacacacacaccccgcgcgcgcgcacacacacacaccccaccccaccaccccgacctccacatacattcccccgaccccctccagcagtgaagtctaagagcaccgcgaagtaatttaaattttcgagggaaagcacagcgccatctgtcggacatcatgccaattactcttgttaagttcctacctgacggttactttatactttgaactgctaggtactccttttggcctaaggacacagtgaaaaatgtaccgagaccttggagagccacgaaccaagaaactt

SEQ ID NO: 2072 - DNA, 148 bp, Homo sapiens
  chr2:183731466-183731614
  hyper
cgcccctgccgcccaggctgctctttcccaacgtctaagccttcggaagcagcaacatctatttattcctctccctctggcagaagcatcagacttcgcagatcagtcagataagagggacacgagaggaggcgaggaagacataaaa

SEQ ID NO: 2073 - DNA, 60 bp, Homo sapiens
  chr2:183902341-183902401
  hyper
tacccacctagaatttcgcccacccaccaccctccctttcctatgggccccatcatgggg

SEQ ID NO: 2074 - DNA, 567 bp, Homo sapiens
  chr2:183902442-183903009
  hyper
cgcccccaccccgtgcgaggcccagcgcccgatcccgccgccgggagccgggaaatggcttctctgccttcggccggccggcgaaccacagggagaggcgcccgggactccgcattaggccgcggcgcatccaggcgaccccgggccgggcctcgggcggcgacgccgagatttctacacccggcgcctcctgccgcccccaccccacggcctcccttgcccttcatccctcccgggcccgcccgcctccgccgcggcctccccggcccgtgcgcaccttcttgatgttgtagaggcgggtgagcatgccgacgccccggtcgttgaggatggtgagcttctccgccagcttctgctgactgggctgcagcactgagcgcgacatggtggtgctggtgccgccgccgccgccggccgcctcgcgcccagtcacgggcccgcggccttcgcagcagcctctctcgggcctcctcccctcccgcccgcgacctccgccttaggagagcgcgcccatggccctcgcgccccaatcccgcgccggcgacagagcgagccgcggcggactcc

SEQ ID NO: 2075 - DNA, 389 bp, Homo sapiens
  chr2:183903037-183903426
  hyper
cgccccggcagcctcctgccttccgcccgccgcccttccgcccccacccccggcgctctccgccccagcccccaacgagccgccttccccggctgctccactaggtgtggcggcggcggcggcggcggcggcgtctccggcggctgagaacgaggccgcttcccgcagccccggacgggccctcggtcacctgatcggcagcgccggcgcccccgcgaggccggacggggaactgcggccgacgggccctcggcatggcctcgccgccgccgctctggccctggccctggcccggaccgcccactacgcctgatgccgggatgggagtcccaagcggggactgagtggggtcgcgttgtgtgctctttccacttcgccccacaccccac

SEQ ID NO: 2076 - DNA, 30 bp, Homo sapiens
  chr2:183989052-183989082
  hyper
caacttaagcatagcgcaggtccggaagtt

SEQ ID NO: 2077 - DNA, 30 bp, Homo sapiens
  chr2:184857322-184857352
  hyper
cgtggctgggtatatacataatccttattt

SEQ ID NO: 2078 - DNA, 1103 bp, Homo sapiens
  chr2:185462721-185463824
  hyper
catattttctttcctcgcctttccctaagactgaacagggtaccagcctccataccaaacacacattaaataacaaaatcaaataagccaaacccagtggatagcaattatcttgagaaagaagccgctgctggcaccggcctggattcgctgcagtcggaagcgggtggctttcggtattgaattattaatttatttatccccctcgcccccacccccacgccgactgccaggcaagaaatcgcggcctcttcgcttcctctccgcccccaccttccaggagtctcccacttggcggtggccgtcgcgtccccggccctctgcggcagcggcgccgcgcggggcgctcccactcgcgctcgggctggcgcggccgcgggtcccggcggcggggtgggcgggggaggcagcgggtgacagatgtactcctctgacagctctcagtatcagcccagtggctccctgccattggctcagtgcaatggaccggcaacgccgctcactataataacactcatgcctgccagcagcagcaactccgagtgcaggcgccgagcgcgggggatgctgccgccgccgccgcttctgctgccgcgcgggcggctcccgcagccccgctccgcccggccaccgcgcgggcactgactcccgctcggttccgtttcgccggcccggccccctcctaggctggaatcctcccgcggggctcgtcgtcccgacgcgaatctgaggagaaacaggagcgagagactgaggggagagcgcggcgagcatgcggaggcgggggagcctcggcgctcaccacagaggggtgcagtgagccagtctccagaggacgtgccgggggtggctgcgtgccctcgtggcgggttcccagcccaccgtcgccggccccggcgcgctgcggctgtgggcgcggggtgcgtggaagcggcggctgcggcggaggaggcggcggctgccccatggagtgttactacattgtcatcagctccacgcatctcagcaacggacactttcgcaacatcaagggagttttccggggccctctcagcaagaacgggaacaaaactctggtaatcgcttctgttttcctctctctc

SEQ ID NO: 2079 - DNA, 285 bp, Homo sapiens
  chr2:187454989-187455274
  hyper
cgggcactgggcgcctcgctggggcggggggaggtggctaccgctcccggcttggcgtcccgcgcgcacttcggcgatggcttttccgccgcggcgacggctgcgcctcggtccccgcggcctcccgcttcttctctcgggactcctgctacctctgtgccgcgccttcaacctagacgtggacagtcctgccgagtactctggccccgagggaagttacttcggcttcgccgtggatttcttcgtgcccagcgcgtcttcgtaagtggccgcacttggaactgg

SEQ ID NO: 2080 - DNA, 30 bp, Homo sapiens
  chr2:187558583-187558613
  hyper
tagggccctccacccgggctgcagccccag

SEQ ID NO: 2081 - DNA, 30 bp, Homo sapiens
  chr2:187558968-187558998
  hyper
gcggctggtccccgcggccgccagagcgga

SEQ ID NO: 2082 - DNA, 119 bp, Homo sapiens
  chr2:188419047-188419166
  hyper
agatcaagaaactggcgattgaagagtaactgaaagaaacgcaatctgatcttactagcagtgaaagagcgaggtaagaatttgactattatccagcctaaagtcgctgctgtctgtta

SEQ ID NO: 2083 - DNA, 855 bp, Homo sapiens
  chr2:189156401-189157256
  hyper
ccctccacccacctccggttccgcgtgcacgcgcgagatagtccagtgggcccacagataacgaccatcagagattaaagaaggaaagtcagcgagcttgaacacaggcgtcccgtgtggaaatgtccaaggagaccgccagaagtgcgcaagccggagtcggctagagtttccttctcaccgagagggggagcccggcgttcccggccgggagcgacccggagtccccagccccgcgtcccagctgccgccagcgccagttttggattcggcggattaggaagaggagggaggggggagagagcgcgaagagggaggggaccgaagctggagggtcccgagtccagcgccgtgttggcgtagagaaactttccctctcggcctcggagacggcgccccggccgtgccggagtggagatcgccaggctcggaggaaccggcagctctccacgcccctgcccgaagcctgacccgactgcctctctcagtgaggtacggagatttatctaggctcttccctggctgcgaacccaggctccctccaggtagcgtggaatcgcttagaagctgatatcccgaggggcggtgggggtggacagctccggccaccagtgcccgggaaggagggcgcggggctgcgcgtagccgctggccagcaggttgtaaaaaattaggacagctaaatgctcagggagtcgtccagcactaaaggaggctaagacctgttgacgcctgctatggcagcgcttgagaaatgactgggggagtccagcgaggtcggggacgcagcggtctccgggctccagaaacctccttagccttttgtggtaactttggtccggcggcggggggccg

SEQ ID NO: 2084 - DNA, 86 bp, Homo sapiens
  chr2:189157495-189157581
  hyper
cccaaaggaaggggcggcgtccacatggttacccttctgctgcgcgggtcaagtagcttcttctggagggcgcaaggcgcggcggg

SEQ ID NO: 2085 - DNA, 30 bp, Homo sapiens
  chr2:190306143-190306173
  hyper
acagccttattacccggctcaacgaaggaa

SEQ ID NO: 2086 - DNA, 151 bp, Homo sapiens
  chr2:190445059-190445210
  hyper
attcctccagaactcgtgtagagttgcttgtctccaaagccccacctgggtttccaccatatgctttcggtcaacgacactcaccacagcatcctctctggcggttgtgatctcccgccctggtcatgacactaggcgaccccgctggctc

SEQ ID NO: 2087 - DNA, 789 bp, Homo sapiens
  chr2:190445444-190446233
  hyper
ggaggctcagcaggtcgtccgagcctagcggacgccctgagccagctctctccgccgccgccgccgccgccgtgggccgggcccagctcttataccgagtcgggggcggagctccctgcgacctccgactggggccgccccgtccccttcagggccgcccgggcgtccccgcggcgcgagacgagctcccgtcaaccttgcgcgccgggccgtccccgcgcccttgcccggaggagtcgcccaccccgggcgcaagcgtccaaccggccgcagacaccctgcgcggcttgcggggaccttcgcctcgacgcgttccactccccgggttttcctgctctccgggaagccgcgagggcaacctcggggggcggccgtggggctgggaaaaggaggaaggcgcgtggagccggcggggcggcgtagggagattctgcgcgaaactaagcgtcaggtgctggaagaaagcgctgcgcaccggctaccccgcagttcagggaaagggcggccgccggacggtcgcagtgcaaagctccagcgcgagcttggtgggtggggattccttttttaacgaaaataatttttaatacaggtatctaaataaatataattcatgccacagaggccgctttcctggccgtcccattccggcccgcctgcagcagagaatgcctttccttccccggactgcatagcagggcttccctcaaagaaccagaatcaaagggcaggaagggggcgcaaagatcagagtccatccctcttgagaggagcaaacggaggcttgcaaag

SEQ ID NO: 2088 - DNA, 194 bp, Homo sapiens
  chr2:191044999-191045193
  hyper
tagctgggaaggccgcggccaggctgcggggccccctgcaggcgggctcagtgccccggcccagcacctgttgtcccaaggcaggccccgcgggggagaggccttggagggcagcgccccctctcaccagggcggagctcaggagagttcgcagcccagggggccgagaccaggggcagggccagcgaaatgcc

SEQ ID NO: 2089 - DNA, 642 bp, Homo sapiens
  chr2:191045258-191045900
  hyper
cgggtctgttcccgctgcggcgccggcagctgcttggtagttgcggggggcgtgagggcggtggcccagaccaaccggctggcagcccagctccgctccgcccgcccctgcctcggaccctgcgcctgaggaagtatcgaggcaaccctctgccacccgaagttcgtgggtcgctcccagagggcgcgccctggagccgagcgcccttgggcggccatctggaggccaggtgcgggccgcgaacccgcgaggagcgcgcggcgggcgcggcggcgacggcaggaggaggggccgggagcccgggcgccgccgaaggacgccccgtcctccacatgctgccacttggctgagccgggcgccggcgagaaggcggcgccgctgccctggcagctggactgcactttgcccccgcccggcctcagctgccgcccgcccagacgccagcaagcccccctcccacgacagggctgctccgggagcttcggagacccgccccgggcctgagcgcaggctgcctccgggaccccacggctgtccggacgtgccatgggcgcgcagctgccgggcaacgtgttgtgtaagtgaacatctgggaggtgggtgactggtgaagggcgggtgtctgtcggtctttgcttgtca

SEQ ID NO: 2090 - DNA, 123 bp, Homo sapiens
  chr2:191208217-191208340
  hyper
agtgaattcgtgggcggcgacaaggaaacagcagccgtggccaagctgaccccagagcccttcccttcctggccctccctctgaatcatcgcgctccacttgtgacgtcgcggacgcccggct

SEQ ID NO: 2091 - DNA, 30 bp, Homo sapiens
  chr2:191272589-191272619
  hyper
tgccacttaaaaggcgctcaaggaataagg

SEQ ID NO: 2092 - DNA, 31 bp, Homo sapiens
  chr2:191400042-191400073
  hyper
agagtacagaggggctcgtaaaatgttcctt

SEQ ID NO: 2093 - DNA, 40 bp, Homo sapiens
  chr2:191513081-191513121
  hyper
ggttcttccagcgccgcgcacctgccgccccttcctccat

SEQ ID NO: 2094 - DNA, 207 bp, Homo sapiens
  chr2:191514823-191515030
  hyper
gaatgttgcaggatctcggggaaagggatagttgagatggaatatacatttgtcgattctgcagaccaagctttgcagcgagtgatcgggaggaatcgtagacttgcatgtacttacacctcgctccctgagattcgggaggcacggaaaattttgggatggctgttaatttaaaatttcatctgaaagagtcgatttggagtaact

SEQ ID NO: 2095 - DNA, 30 bp, Homo sapiens
  chr2:191728884-191728914
  hyper
cagggccaacagctgactctaatgacagtg

SEQ ID NO: 2096 - DNA, 84 bp, Homo sapiens
  chr2:191745040-191745124
  hyper
tgtccggggctgctctcggaggagtcgccagacgccctgacctgggggccagatgcgagctgggatcggctgagttccgacagc

SEQ ID NO: 2097 - DNA, 413 bp, Homo sapiens
  chr2:191745184-191745597
  hyper
cgcccatgagtctccccaacagctcgaattcccagagtggaggagcccactgcttcataaatgcgagaacccagagcccctagtacccaactaggctagcctcggagttggcacggcgtgcagaaagtggctactgagcagccgggcctggctcacccgcttcacacgtcagtttgactcctctccccgccccccaccaatcccccgccctactctccgcgcacccagagccgagagaaatttgactgccctaatcgccaatcaaaagagaggtcgaggatttgagccaatcgcagcgggcgaaaggggcgggccgtcggcgagcgctgaaggtctctagccctcccctgcgctttagcctcagtgcggagccttaggcggagcgaagagaaccggtcgcggcaatcctagcg

SEQ ID NO: 2098 - DNA, 437 bp, Homo sapiens
  chr2:191745656-191746093
  hyper
ctgcgggagtccgagccggaaccacacccaagtagctgccctttcctcttctgtcatctcaccgccccaccacagaccgcgttccccgaggaaaccggccgcccacgcccggagcatcctcccctgttgagcgggcgctgacggacccggcggcatgatgcggctgcgaggctcggggatgctgcgggacctgctcctgcggtcgcccgccggcgtgagcgcgactctgcggcgggcacagcccttggtcaccctgtgccggcgtccccgaggcgggggacggccggccgcgggcccggctgccgccgcgcgactccacccgtggtggggcgggggcggctggccggcggagcccctcgcgcggggcctgtccagctctccttcggagatcttgcaggagctgggcaaggggagcacgcatccgcagcccggggtgt

SEQ ID NO: 2099 - DNA, 81 bp, Homo sapiens
  chr2:191746518-191746599
  hyper
tcagctccctggcttgcggctgcagcgcctggccgcccgccccagccattcgtgggcgatgctgcacgaacatctccaccg

SEQ ID NO: 2100 - DNA, 182 bp, Homo sapiens
  chr2:192015365-192015547
  hyper
gaggggctcactttcagcctccgcgaggacacacctccgcagccgccgcagctcccctggcccccgcagggagattcgcccgggcaccgtggcgcgggcctgcggagcggtttccgcggagaacccgtgccagggcgcatctgtgggtcgtggagtcgggcgcttccttctataataagcct

SEQ ID NO: 2101 - DNA, 30 bp, Homo sapiens
  chr2:192109716-192109746
  hyper
ctcccactgtttgccggaatgtgaccccag

SEQ ID NO: 2102 - DNA, 175 bp, Homo sapiens
  chr2:192110380-192110555
  hyper
cctgcccttccctctgcgtccgtcgtcggcccccgaggcgcctgctccgcgcctttgtgcccgcggtccctggccccgtcgcaccctgcgggcgggggtcagcgggctctgccgctctcttgggagacgcggcgctgcggcgggaacggcgcacgctgtaggttgcggagggtgg

SEQ ID NO: 2103 - DNA, 343 bp, Homo sapiens
  chr2:193058974-193059317
  hyper
ggaggtgaggggctgaggaggcgcgctagggtaggctggtctgtgctggatacgcgtgttcttctgcggagttaaagggtcggggacgggggttctggacttaccagagcaattccagccggtgggcgtttggcagtcacttaaggaggtagggaaagcagcgagcttcaccgggcgggctacgatgagtagcatgacgggcagcagcagcagccagcaaaagccctcgcaaagtgtccagctgctgcactgccgcggggactcccacagcaccatgactagttcgtgcaactctgcagcagcaaacggcttccgaggaacacaggatcgcgggggccgggca

SEQ ID NO: 2104 - DNA, 204 bp, Homo sapiens
  chr2:193059344-193059548
  hyper
cggcagcagaggcggcggcggtggcagtggcacccggcggggaagcagcagccaaacccgcgcatgatctcgagagtttcagcaacatccagggactgggctcagccccggagcgagagggtcgtccgctgagaagctgcgccggagacgcgggaagctgctgccataaggagggagctctgggaagccggaggacaggaggag

SEQ ID NO: 2105 - DNA, 1231 bp, Homo sapiens
  chr2:193059661-193060892
  hyper
cgtttgggaagcagcaggtcctcagcccgcccggggtcacgtgggaagaggcagtcgggctctgattggtggagcaggatgcaggtcccgggagggaggggtcgacgaggaggtgcaaggatgcaaggaggaggcggccgcggaagccacagatgggctcgctcgccaggcgctggcccgagtggggctaggcggggatggctcaaatgagaagctcgggcttcagggtgggctacccgcacactcatataccattcgcctcactctccgctccaggacgccccctaccgaaggcggggtccggactagcgcccctcttccgcgcgtgaccccgggccgcgagtgcgggccgcggctgggtggcgtctctccgagctggagatggtgggggcggaggtgtcagaggagcagcagcagcagggcagagaggggcgagtcggcgcgggagagggcgtcctgctggcgaccggcgctccagcgtgcgggagcgcgccgcctaggctgtagggggatgcaggctgggaatgtcgcggcggagaggccagggacgtttctctagggatttacaggaaagagggtgagaggcgatggtgttagaaccgctcttgccgacctggaagcaacagcagcatctcccacaagagcgtgcaaccccaaggctgctcgccgaggcagctcagccatcccggcaggcgctctccttccttctctcttctcccctctctcctcccaggccccccgcagctccgacccagcccaagcgttcgcaggtttgaatccctctcctcatcacccgctcctctccagcccgtagcctattagtgtgtccacctgggaggtgcggtcagatgtgtttggaaggtcagattggtcgggacaagtggtctgagagaaagagaaaggctcctctgcatacgccgcgggtgggttgccgggagcatcggccgggcagcggcgtccgggaaggggagagcgggctccatttgttggcccaggcagtgaccctgcgttccttactcgggtctttgccggatggccggtgacctggggcgacgagagaaggtctaactcggcaggagtctctggctctgcgcgtttctttcattctctccagcgggaagggcaaacggcatagcgggacccgccttccgtctgctgcattcttcaggcagttagacacactctttagcctaatggaattttagtcgccagtaacgggaccaagagcttt

SEQ ID NO: 2106 - DNA, 321 bp, Homo sapiens
  chr2:197035641-197035962
  hyper
agaggctagggggaccgcgtggccttgctgtggaagggacccgcgcgggcccgccgcgaagggggccctgcctggcgcgacctggggagagccggggccggccgggtggagggcgcacggggacacacggacacgcacagacacagacacgcgccccgggctgaggagggtggtgggaggaccgccggccgccccccgcgcggagccccagggaacccggactccagccgcaaagcggagaggcgccagcagcaatcagccacctcaggggcggcggagtccaagcccctctcagccggaccgtaccgcctaaaccctcct

SEQ ID NO: 2107 - DNA, 1258 bp, Homo sapiens
  chr2:197457191-197458449
  hyper
gcagtctcgcgtcctcggaaacgtctacgtctaaatctgcagccccagtttgctccaggccccaagctccagcagaggatgttcacggcacattcccaaccaaaaaggaaatgaagcgtcctctccctcaactgatgctcaaatagaccccaaagtcccagtttccctggagaaccaaaccatccaacacatcctgggcagcggaaaccgaaatggcaaatgaatgaccgcgccggggcgcaagggaggaaaaacaaagccacctcccgccgtccgctacctgcggcgagggccgcgcgctcacctgggctttgcgcccgtcgccacaagctgcgggtggggacccggccgcggggcgggagggcgcccccaaagtcgcccggacccgcggccccggcgccctgcggccggtccgtgcgcgccgaggagaaagcaggcggccgggggcgccgccgcgcgttgcatgcagctcacggctgctgcggccgctgccacggagccgagagtctctgcgctgcagtccccgaccccgagaccgcgagaagcgcccggagagacgcggcgcaggggcagagcgcgctcggcgcgcccctcagcggctcttcccgccgccctccgcagcgggctgggtctcggctcgcctttgtgctggcatcttcctagctcccagcgacacccagagctctcgaggcggctccgcgccgccacccacccccgggttacgccacggcccccgcgcgacccgccgattgtgtcgagtcagcagcggcagcggggacgcgcgaagccatggctcccgcccgcgctcgggagggcgccgggggtcctgcgcctccgggaggtttgtggccgagcgcggcgcggccccgagcggccccgcagcgcccggctccccgccgctcgctctccaggcgccgacccgcctgcgtcgccaccctctcgccgctccctgccgccaccttcctcccgcccgggtgccgggcgtccgctccagccgcggtgccccggtccgcggagagcgaagagtccggcctcctcacctccagccgcgccggcgcccttcccgctagacgcttcggcggcatctgcccgcaccgccctgcgggacgctgggctgggagctggcggcacgtcggggaccggtggaagggaggcgggggcagaggacaggagggacagccagaccttggccagcgggacctccctgaggaaggtgcggaagaacggggcgggtgcggctgggcggaggacgagtccc

SEQ ID NO: 2108 - DNA, 63 bp, Homo sapiens
  chr2:198175714-198175777
  hyper
acctgcacgcggcgcccggccgggccggccccgggccctgggcggatcgcgggcctccctgac

SEQ ID NO: 2109 - DNA, 30 bp, Homo sapiens
  chr2:198257066-198257096
  hyper
ttatcatcgttgtagattcttgggtaatgt

SEQ ID NO: 2110 - DNA, 122 bp, Homo sapiens
  chr2:198257785-198257907
  hyper
tgtctcaaatacattgggccatacatagttcaacaagtgattcagcgaatcttcacaaccaaatccataaaccccaagtgacatgtgctgtaccactgcactagccgtctgtctgtgtacaa

SEQ ID NO: 2111 - DNA, 30 bp, Homo sapiens
  chr2:198260933-198260963
  hyper
gtactgtaaagggtgaacatgtttctgcaa

SEQ ID NO: 2112 - DNA, 107 bp, Homo sapiens
  chr2:198262739-198262846
  hyper
tgactgtggctctacgaatagcctttttgtgggcttttaagagctctaaaagctcaaagcaaatcctcatccactctcttgcagatacatattcagctcccctaatt

SEQ ID NO: 2113 - DNA, 149 bp, Homo sapiens
  chr2:198265014-198265163
  hyper
caagtcagctgcctgttgcctaactttagcagatttgttatttaaacgccacaaaactgtaccacagatctgaggcaagtatggtttgactcgtttgccaagagcattaaccactgtgccaaagccgttcaacattactgagtcctaaa

SEQ ID NO: 2114 - DNA, 179 bp, Homo sapiens
  chr2:198265428-198265607
  hyper
ttttcattacctctgtagtctgttcttggaaagcataaagaataccatcaatcagttgttcttcaagtttatgatcaatatctgctgctcccaaattacccataattttctcaattgtctccatcaccatttttctgtactgttcggcttcatctttcagatcatccacaatcctggat

SEQ ID NO: 2115 - DNA, 30 bp, Homo sapiens
  chr2:198266164-198266194
  hyper
agaagtgtttaaaaaagggaggaagaatct

SEQ ID NO: 2116 - DNA, 371 bp, Homo sapiens
  chr2:198266478-198266849
  hyper
tttttcatttcctcatcaggagactggaattctcgaataaggattaacatcacttctctagtatagtagttggcatattctgcatccataagaggaataagatacccaatagccttcaagaaagcagccaaaccctatttttaaataaaaaatatatgtactttagtaatttagatttatgtcgccttaactttaatgaagataaatcaaaaggtaattggtggatttacctttcctctgtgttggcggatacccttccataaaggctttaacacagaatcaaaagattcgataccataaggagttgctgcttcagccaaggcagcaatggccaaagcactgatggtccgaactttctgctgctcatccac

SEQ ID NO: 2117 - DNA, 433 bp, Homo sapiens
  chr2:198267317-198267750
  hyper
aagatggcacagcccataagaatagctatctgttgtacaatcttaataccagtgtgtctcgcttgccaggacttcttgcttttgcacacagcttttaagaagggcaataaagaaggaatgcccagggcagaggctacaacagcaaaagctctagctgttgtgttacggacatactcatccatgttatctatatcaggtctcatggtagagatcatagtagccagaccagcagcctaaaatgtaaacaaagaaaggacagtcatgagttggtaatattaatcttcaaccatttctttccataatcaattccataaacagatataaattttcttctctagaaattaaatgtaaatacctttgccaaattagaaatgatctctcggccttccactctagcatagtaatcttcatcaatcaatagcggttcaatgac

SEQ ID NO: 2118 - DNA, 71 bp, Homo sapiens
  chr2:198268365-198268436
  hyper
tttcacaagtaaatgacgctcttgatcctcaagtgtaggagacatcagcagaggaagaatctgattaaaca

SEQ ID NO: 2119 - DNA, 94 bp, Homo sapiens
  chr2:198269811-198269905
  hyper
tggtgttccattcttaatttttaaaagcaacttcattatttttctctctttttgctcttctggactaagtgttgattcatcaacatcaacctat

SEQ ID NO: 2120 - DNA, 30 bp, Homo sapiens
  chr2:198270121-198270151
  hyper
caaaggtgttggagtagctgtcagctttcg

SEQ ID NO: 2121 - DNA, 82 bp, Homo sapiens
  chr2:198272717-198272799
  hyper
ctaccttatatccttctgggaacatagcatctaattcctcatcagaaagtgggcgatttctctcatcaatttctctttccca

SEQ ID NO: 2122 - DNA, 148 bp, Homo sapiens
  chr2:198273116-198273264
  hyper
tggctggtgtgccaattggtgtctttccaggggtcagaactggagtgcttccacccatctgactagctggtgtttcatcccaccgtgattttcttttactggctccaggagtcggtgtttcaccaatagaatctccacctcgatctgt

SEQ ID NO: 2123 - DNA, 30 bp, Homo sapiens
  chr2:198274673-198274703
  hyper
ttccctttgcacgacctggtgtctcatccc

SEQ ID NO: 2124 - DNA, 30 bp, Homo sapiens
  chr2:198285175-198285205
  hyper
ctggggaaattatcatggtccgcctatgct

SEQ ID NO: 2125 - DNA, 501 bp, Homo sapiens
  chr2:200320868-200321369
  hyper
accgctcatacacgtgatagacgttcaggccagtggcagagcgctgcaccacagccacacaaacttcctcccacgctgcccgaggggcccgagccgggaagccggtcccaaccttacactgggcggcccccaggaagcccagcgcctcggttcggcgactctgcccagtcgcagctccccagaagtcagccctcggggtcgcggccggggttggcacccaggggcgcctagaagtggtccattcattgggacggggttggcataaaccgttcctgggtgctacagcctagcccgtcccggggtcagggttgcggaataagtgaacttcagaaaaagacgttccacccacatgggaagggagttgggggtgtgcgcaagtccataaccgaattaaccacccggtaaatgcgctgtgaatggccaggcaggagccaaaggccgggcgaaagaaccccttgaatacccgctttttacctatacggagcaagtcctgagataagc

SEQ ID NO: 2126 - DNA, 30 bp, Homo sapiens
  chr2:200322551-200322581
  hyper
aagacgcagggacccgggaccgcgcgcggg

SEQ ID NO: 2127 - DNA, 95 bp, Homo sapiens
  chr2:200327158-200327253
  hyper
ccagaataccccagtgggggacgcgccttggaggacggttcgcccagggtgggcttcagccctttcccagagtgctccgggcgtctggggactga

SEQ ID NO: 2128 - DNA, 28 bp, Homo sapiens
  chr2:200327423-200327451
  hyper
ggaggtagagactgtggaggtcctcctc

SEQ ID NO: 2129 - DNA, 340 bp, Homo sapiens
  chr2:200327575-200327915
  hyper
cgagggtctggggctagtggggccgaccgttcaggagccgggtgggcgggaagggaattgccaaggtcggcccaggagctgcctcaggcgaggacggggagctttctgcactgggcttcccggggtaggagatgggcgtcgggtgtgggcactgcctgccctgggggaagaaagcgaggagataggtttcagagctgggggagtcgttggtgggagatctggtgtcccttcggcggccgcgggccgggggaccggggaagacggagggtcctgcggcctggagcaccaccctaccacaccaggcaacgccccccggggcgcccttcattcttttgcagag

SEQ ID NO: 2130 - DNA, 54 bp, Homo sapiens
  chr2:200328630-200328684
  hyper
aagggggcccaaaccgcagttgcctcccgaacgctttgaggctatgggcccacg

SEQ ID NO: 2131 - DNA, 364 bp, Homo sapiens
  chr2:200329029-200329393
  hyper
ggagccacatccggacttgggaaccccgtgtcgggcttagaggacttcactgggcgggttggggtttattttcaataaattcagctgttcacatacacccccaccaccatttccacgcgcgcgcgcgcacacacacacacacacacacagagggacttgtcaactattgagacagcgacccagaaaggtgtaaattcacctggtgcccacccaattgcaaagctcccagacccacacaaaacactagcgagccctggaggtctgagacgccccgcgcccgactcacggcgcgaacaccagcgctccggccgggtcgcaggggccggtgcccagcgggccggggtctggcgagccaggcagcggg

SEQ ID NO: 2132 - DNA, 103 bp, Homo sapiens
  chr2:200329432-200329535
  hyper
cgcctactcccttattattggctgggacctgttcctttccaaagtgtgatgcccggtgtcctaccctaggccacgcggagctctctcccggcgtgtcgggccc

SEQ ID NO: 2133 - DNA, 30 bp, Homo sapiens
  chr2:200329857-200329887
  hyper
aaaaccggcaattgcgtgtgcgtttggggt

SEQ ID NO: 2134 - DNA, 231 bp, Homo sapiens
  chr2:200331852-200332083
  hyper
gagacctcaagtcaggtctcccggccagactcaggcctttctaatacaggcgtgaagggcgggacgcccagagccctcttgttggccggtggctaaggagccaggtggataacttctgcggattcggctttcaggctgctggagctctccccagcccgaggccttagcccagcgcaatcccttgtccagaccggccagtttccgcgtggcgaaaaagggggaggcaagtgt

SEQ ID NO: 2135 - DNA, 30 bp, Homo sapiens
  chr2:200333986-200334016
  hyper
gctctcgatttcgccgcagaattacctgct

SEQ ID NO: 2136 - DNA, 80 bp, Homo sapiens
  chr2:200604746-200604826
  hyper
gccgccagaagaacttcgagggtggaaaacaaccactgtttaaaggggaaattaatttcaattaccgcaccttttttcac

SEQ ID NO: 2137 - DNA, 567 bp, Homo sapiens
  chr2:200715513-200716080
  hyper
gccaggctgccgcaacgcgtgctggggccagaaccccgctgctgggattccctgcgcggtgccgactaggttcctgggtggagtgtcccaggaccacgtgggctgaaagggaacccgaagtgactcccggcctccccacaggtctcgcgggacgcagcagcggcgagggcgcggggttgtggcgcctgggagcgaggggcagccggcggctgcgctgccccggccgagctctcgaaccagcggccgcgcctgccgctctgcggtttgggaggggagcggacctgcgagcgccgaagggcggtggggcagggcgaccgcccagcccaagtcgccgccgcgcgtggcccgcgcgcagcctccgccgccgcgcgtggcccgcgcgcagcgtctgccgccggctccgcctcccggacgcccggagcgcgccccaccccagccgcacaccgaccgggctggctctgcctctccctccctgacccggcaccacgtgcctggcgtccttgaacgcttcagatttttatcagtgttgccttttcgtttgctcttccgtatcgccagaccctccac

SEQ ID NO: 2138 - DNA, 30 bp, Homo sapiens
  chr2:200820518-200820548
  hyper
aaaatggcgctggccgctcgtttgctaccc

SEQ ID NO: 2139 - DNA, 93 bp, Homo sapiens
  chr2:201171225-201171318
  hyper
agaacgtgcgtgtgagcggatacaaaacccgagagaggcgtgagcagcgctgtgtttgcgagcgggagcgaggggcgccggctggggtgtgtg

SEQ ID NO: 2140 - DNA, 688 bp, Homo sapiens
  chr2:201171650-201172338
  hyper
cccaggaccccctccacgccgggccggctggggatgcagggcgcgggcggacgcggaggggcctgcgcggccgggacggagactcggctgggccgagcattccgcagcccgggccgcccagcctccgccgcctcccggagcgctgggtgtggcccgcgctcggcgccgaggcgggctggtggcgcggaccggacgcgaaggtcgccgtccttcctttctccagccggcgcgggcaagcgggaggaggcgccggctgggacgcacagtggcgctccccgggcgagcgtgtggccgccgcgctccgacgtgtacccgcccgccccggatctgaatcgcccgcggccgccgtccctcgcctgccgtcctcccgcgcgggcgcccccgttccctcccaagccggaaagagacccaccgtcccccaggctgctctctggcccggagccgcaaagcccacgtcagccgcgaccaccccgccctcggatcccagccgggtgcgggggccgcggccccactgaaccccgcgcccctggcgcccagcgggagtgggatgcgttggcgtccgcgctgcgcgggtgggctggggtggccggagcagacgcggagcgccctggccgcgggacgaagcggtcgcgccgccgcatttgggcggggggaccccggagtccgcgggctgcggaccccagcggga

SEQ ID NO: 2141 - DNA, 31 bp, Homo sapiens
  chr2:201172568-201172599
  hyper
gagacctgacacttttcgtgaaagattcttt

SEQ ID NO: 2142 - DNA, 437 bp, Homo sapiens
  chr2:201450484-201450921
  hyper
gacttacaatgtttgctaagacgcaagagggtgtgacacagacgctaagcgccactggcgaggagatgaaggggtcgtcttcatcttcgccggatgatttccgcccacatagagggcgccagtgacgcccacacacgtgctggtgtcccgggaagagttcctggcaaagagctcaggaacgttggatcttaatcaaggctttctccgtcggggtggatgggttggactttaggctccagcaagccccgccccactcggcgggtcggtgccgccgggtcccaggtgcccgctacttcccagaacctccgcctcccgctccgggccctcgaaccagcgcggacaccacaatggaccgggcgtccgagctgctcttctacgtgaacggccgcaaggtgagcgcccgcgggcttcctctgcccccagacctgcggccaggg

SEQ ID NO: 2143 - DNA, 72 bp, Homo sapiens
  chr2:201451013-201451085
  hyper
cggctttgccttcgcattcccacccctgcctccggggcagctaaaggctgcgttttcagggactgtcctgga

SEQ ID NO: 2144 - DNA, 141 bp, Homo sapiens
  chr2:201727375-201727516
  hyper
ggtctcttcacagacacgtgaaacacacgtcattctccccgtttaaacgtgtaccagaaactagtctccaactcaaatgcaatcataaatgttcctcaccaacaccgcattactgattactgcaaacgtaatcagagttat

SEQ ID NO: 2145 - DNA, 30 bp, Homo sapiens
  chr2:201729485-201729515
  hyper
gggcgggcgtgtcgcgcgcgcgaccatcgt

SEQ ID NO: 2146 - DNA, 150 bp, Homo sapiens
  chr2:201828570-201828720
  hyper
tttcctttcttctttccgtttccggggaagggaaaaggaagtgttgtttggatctgaggaagtttgcacagtagctggctgagtggtagctgtttgtcttgtagcaatctttaaaaagtgttctttggggtcgggcgcagtgtctcacgc

SEQ ID NO: 2147 - DNA, 30 bp, Homo sapiens
  chr2:201982295-201982325
  hyper
acatcaacaaactgcgataatctacaacag

SEQ ID NO: 2148 - DNA, 30 bp, Homo sapiens
  chr2:201983404-201983434
  hyper
tggcggggattaggcgtgaagcggttcagc

SEQ ID NO: 2149 - DNA, 1043 bp, Homo sapiens
  chr2:202898960-202900003
  hyper
gaccggaccaggcgcggggggcgtgcgcgctgcggtgcgccgggggtccagagtcttgggcaaactttgaagggtgccggagccgcttgttgctcctcgcggcggagggagccgcaccgttacgtccccgcggggagagcgaggcggccctcctcggcgcccccaacccaggctgacgagttttgggcccccggcggccctgcgagtgcagggcggcggcgtctgcggcgccttcgcggcgcgggcacccaggcggcagcgccctttgctccacgccgcccacggcccggccccggcgccgtgaggactctcatgcgtcgggcgcggcggcgcctccccgcatccaagcctctcccaaccgcctcgtcgcactcctcaggctgagagcaccgctgcactcgcggccggcgatgcgggaccccggcgcggccgctccgctttcgtccctgggcctctgtgccctggtgctggcgctgctgggcgcactgtccgcgggcgccggggcgcagccgtaccacggagagaagggcatctccgtgccggaccacggcttctgccagcccatctccatcccgctgtgcacggacatcgcctacaaccagaccatcctgcccaacctgctgggccacacgaaccaagaggacgcgggcctcgaggtgcaccagttctacccgctggtgaaggtgcagtgttctcccgaactccgctttttcttatgctccatgtatgcgcccgtgtgcaccgtgctcgatcaggccatcccgccgtgtcgttctctgtgcgagcgcgcccgccagggctgcgaggcgctcatgaacaagttcggcttccagtggcccgagcggctgcgctgcgagaacttcccggtgcacggtgcgggcgagatctgcgtgggccagaacacgtcggacggctccgggggcccaggcggcggccccactgcctaccctaccgcgccctacctgccggacctgcccttcaccgcgctgcccccgggggcctcagatggcagggggcgtcccgccttccccttctcatgcccc

SEQ ID NO: 2150 - DNA, 30 bp, Homo sapiens
  chr2:203776302-203776332
  hyper
actgcacaggtaagcgaggaactgcagtct

SEQ ID NO: 2151 - DNA, 30 bp, Homo sapiens
  chr2:203879853-203879883
  hyper
gtgcaggctgggatcgcggtcgggagacgc

SEQ ID NO: 2152 - DNA, 82 bp, Homo sapiens
  chr2:204399881-204399963
  hyper
ctcgcgctcctccagccgctgcctccgcctcctccccaggcgcggcgctccctcgccagagacgcagcgactgccagcagct

SEQ ID NO: 2153 - DNA, 89 bp, Homo sapiens
  chr2:205409781-205409870
  hyper
gttcctaacaggccctcggggcactcctgcatctccgcacccggcagcctcgccccttgggtgtttttggtgggcgtgactagaagcac

SEQ ID NO: 2154 - DNA, 832 bp, Homo sapiens
  chr2:205410091-205410923
  hyper
gctccagttactggcccgcagggccggggcacgtcgtcgcccagcgtgcggcggggcccgggagcgccgcggcccctttaagagccgggcccaggccgtcgccgggaccgcaggagcccagagcgcgggcgccgcagaggagttgggagccggcgcaaaagtttcctcccaactctggccccgtgcgccgccgccgccgccgcccactccagcccccggcttggggccggccctgccaacgccgccagggccagggccagggccaggaccagcgacagggcagggccggcagtttcgctttggtgggcgcggagcagccgcctgggccgggcaggagtaggagcgggaggaggaggaggaggagccggtgccgcggagctgccgcgtcccgggccgccgggcacctgggaggtaacccctttccgcggccgcccctccccgattcccgccacctgccgcctggccaggtggaaggggcgctgccgcgagcctccgggcctcagggtgttccggggagcggcgccccgggtctctgggcccacccgccccgggcgtcctccgagagtgggggctgcgcccgcggggtcagacacctgttcggcccggcccggcgtggtcgccgggggccaggatgaaagtgaccgtgtgcttcggcaggacgggcatcgtggtgccctgcaaggagggccagctgcgcgtcggcgagctcacccagcaggcgctgcagcggtacctgaagacccgggagaaggtgagcgcggcgcggaggagtggggcgcggctgcagccaaggcacctgccaggtgcgacccggtggcgacactcaggggat

SEQ ID NO: 2155 - DNA, 31 bp, Homo sapiens
  chr2:206166172-206166203
  hyper
tttttctctgtacagacggtctgtctgataa

SEQ ID NO: 2156 - DNA, 146 bp, Homo sapiens
  chr2:206551190-206551336
  hyper
cacaagttaatggaggcaaggcgcgctctgattgaagggctgcccccgcccttcgactcgggctggctgtgccgggggtctttcccaccgggtcgcaggcgtccagcggctgggtggcgggcgccggtagccctagtgtttggagg

SEQ ID NO: 2157 - DNA, 189 bp, Homo sapiens
  chr2:206750389-206750578
  hyper
gacggggaaggcaaacgtctcctcctccctcccacaccctctgccggttttcccgctctgcctcctggcgcccttttccgcccagaaagcaggagcccgcctagtccttcatggcgggagaacagcgccctcgtgtggactgccgggttcttggtgctagaggcagtttgggtccgttgccttttcact

SEQ ID NO: 2158 - DNA, 30 bp, Homo sapiens
  chr2:206949993-206950023
  hyper
ctggccgtccggagcgcggaggagggggat

SEQ ID NO: 2159 - DNA, 30 bp, Homo sapiens
  chr2:207139333-207139363
  hyper
tcccgccgctcctgcgtcagaaggggtctg

SEQ ID NO: 2160 - DNA, 126 bp, Homo sapiens
  chr2:207307547-207307673
  hyper
cggcttcttgtgctttcctcaaagaccccaggcaccggcagggaggacacaggccggggcagagcgcccctgcgcgggggattcctgccactccgcgccagcctgcggcgcaaacgctcttctcag

SEQ ID NO: 2161 - DNA, 1517 bp, Homo sapiens
  chr2:207307712-207309229
  hyper
cgcgctatttttacctccccggctgcaatcctttatatttacatgcaggaagcaaatatataagggattaagaaggagatgcgtggccttagtttatccagagcaggaagaggttggaataggagagggtatgtgaagtctggggtggtggaaaaggcaggtggacttcggctggttgttttctcccgatcatccctgtctctggcctggaaacccccgtactctctttcttctggcttatccgtgactgccggctccccctccaccgcccccatcttttgaggtaccacccgtcacctccgatgctgcttgggctgctgcatcactctgctgctttacccccttccccgccccccaacaaagcatgcgcagtgcgttccgggccaggcaacagcagcagcacagcatccagcaacagcatcagcacccgaagccccgctcgggcgcgctctcggggggcggggcgcacgcccgctccgcgcgtccccgcgccgctcgctcccgcgcgtccccgcgccgctcgctcccgcgcgccgcctcagcatcctcaggcccggcggcagcccccgcagtcgctgaagcggccgcgcccgccgggggagggagtagccgctggggaggctccaagttggcggagcggcgaggacccctggactcctctgcgtcccgccccgggagtggctgcgaggctaggcgagccgggaaagggggcgccgcccagccccgagccccgcgccccgtgccccgagcccggagccccctgcccgccgcggcaccatgcgcgccgagccggcgtgaccggctccgcccgcggccgccccgcagctagcccggcgctctcgccggccacacggagcggcgcccgggagctatgagccatgaagccgcccggcagcagctcgcggcagccgcccctggcgggctgcagccttgccggcgcttcctgcggcccccaacgcggccccgccggctcggtgcctgccagcgccccggcccgcacgccgccctgccgcctgcttctcgtccttctcctgctgcctccgctcgccgcctcgtcccggccccgcgcctggggggctgctgcgcccagcggtgggtatggccccgtgccctttgcgttggctttcccgcggggccctgcagaggaaagcgaagggcgcgcgggtccgtgtgctccgggcttgtccccggctcggcctttccttccctccctgcctgtctttccacccttctcgttcccaaacccccattcatcccagttcacttttggaagtccatttctgttgcattcgcgaaaaacccattccaattcttgttggttccactgggaggtgtttagtggatcctgggtccctcagcgatctctgtgcaacttgcggaggggcaaccagtggatgggaaatacagcgagggagcaagttgctacttgcgtggtggaaccttaatgtgaatgcggggaggatgtagtgataatagtggtaatgggctgtttcctcaaatttcgtatccggcgcatt

SEQ ID NO: 2162 - DNA, 30 bp, Homo sapiens
  chr2:207507077-207507107
  hyper
gtagacttggagaggcgccgagcactccca

SEQ ID NO: 2163 - DNA, 30 bp, Homo sapiens
  chr2:208031980-208032010
  hyper
ccctgcacaattcacgttagggttggccaa

SEQ ID NO: 2164 - DNA, 31 bp, Homo sapiens
  chr2:208395299-208395330
  hyper
ctcgtccggcccccgccgcccgcctcgcccc

SEQ ID NO: 2165 - DNA, 227 bp, Homo sapiens
  chr2:208633316-208633543
  hyper
cgtcaggttgtagccgatgccgcggcacatgggcaccgtgatttcctggcacaccggggccttggacgcggcggccgcccggcccaccagctgcgctaggagcagcagcaacagcgagggcggcgcggatgggtcaggccgagccatcgccccctccctcccctcgcctccagcagcccgcgagggacgcacacaggcagaggaatccgggccggggcttctccctc

SEQ ID NO: 2166 - DNA, 102 bp, Homo sapiens
  chr2:208633755-208633857
  hyper
ctccctgttggagaggcgtcaacagttcggtccccgcgagctgtctccaaatctcttaagttaacccctttcctttcctccccgctccgcctcctgtaacca

SEQ ID NO: 2167 - DNA, 30 bp, Homo sapiens
  chr2:208675723-208675753
  hyper
ggtggtgagggagccggtgtgcaatgaggt

SEQ ID NO: 2168 - DNA, 30 bp, Homo sapiens
  chr2:209101844-209101874
  hyper
aagtttatccatgaactcaaatgtattcaa

SEQ ID NO: 2169 - DNA, 30 bp, Homo sapiens
  chr2:209103912-209103942
  hyper
gctttgctctgtgggctaaccctctggtcc

SEQ ID NO: 2170 - DNA, 30 bp, Homo sapiens
  chr2:209104621-209104651
  hyper
tacatgcggtagtgacgggttacagtcccg

SEQ ID NO: 2171 - DNA, 79 bp, Homo sapiens
  chr2:209108239-209108318
  hyper
cttagacagagccatttggaaggaactgtgtgcaaaatcttcaattgacttatcttgattatacatccccatggcaaca

SEQ ID NO: 2172 - DNA, 309 bp, Homo sapiens
  chr2:209113080-209113389
  hyper
aacatgacttacttgatccccataagcatgacgacctatgatgataggttttacccatccactcacaagccgggggatatttttgcagataatggcttctctgaagaccgtgccacccagaatatttcgtatggtgccatttggtgatttccacatttgtttcaacttgaactcctcaaccctcttctcatcaggagtgatagtggcacatttgacgccaacattatgcttctttatagcttctgcagcatccttggtgacttggtcgttggtggcatcacgattctctatgcctaaatcatagcttga

SEQ ID NO: 2173 - DNA, 139 bp, Homo sapiens
  chr2:209118760-209118899
  hyper
gacagcccagtttatccggtttaaagtacagtgctgagtgtactcggtgggacaaaggccaattttaggcccgcaggcactttccaaataaaggtcatgggagcacaatttatctctgcgtgtgcgagggcgtgccccc

SEQ ID NO: 2174 - DNA, 30 bp, Homo sapiens
  chr2:210051601-210051631
  hyper
catgtgaggaaaaaatttccattaagaatg

SEQ ID NO: 2175 - DNA, 20 bp, Homo sapiens
  chr2:210636669-210636689
  hyper
cggagagagccggctctgcc

SEQ ID NO: 2176 - DNA, 139 bp, Homo sapiens
  chr2:210636737-210636876
  hyper
cggcggctagcgaggagacagagctgggtcctgcagtaggactcccgggagccaccattatggtgaagaggaagagctccgagggccaggagcaggacggcggccgcggcatccccctgcccatccagaccttcctgtg

SEQ ID NO: 2177 - DNA, 176 bp, Homo sapiens
  chr2:210636933-210637109
  hyper
cgctcctggggccgcccgggtcgccgctgccgccgccgccgctgaggccgcgccacagcctgcagctccctctctggggctggaaaacaagccctctgcaccagcttaaaaacacgcattaaaatatgtatatatatgtatatatttcagtgaagtttgacgacaagcagattggc

SEQ ID NO: 2178 - DNA, 30 bp, Homo sapiens
  chr2:210867112-210867142
  hyper
gagtactgcgaggacgttaagatccaaaca

SEQ ID NO: 2179 - DNA, 97 bp, Homo sapiens
  chr2:211035493-211035590
  hyper
cgggtccaggaaaccacgtgttctgccttctgcgcacgcgccagccaaaacaaaagggaggtctgccaagccccaccccccacgtgaccggcgtcca

SEQ ID NO: 2180 - DNA, 820 bp, Homo sapiens
  chr2:211089524-211090344
  hyper
cgcgctcctgcagccgggcccagggggtgaccacctcctcccaaaacgcaggctcccgggtcccactgcaggccgctgaactagacgggttggattggggctccggaatgaacttctggagaaatctttcggctttccccgacgtgggctcggcggtctgttctcggggcggcacggctgacacccctttttcctccgcccagatgctggttgcacccagtccgcgggatccaggaaaggaggccagctctagcccggcgccggagttggggagcactcccagccgcgcgcgcaccgccctgcttcaagccagcgacaggagtgactcgctgccccaccccacagcctcccggcctgcagccgcggaagtcccggctggcactcaccgcgcggcgggcagctggcgcggcgcacggtggccgcccaggacgcgtagggaccctcggagaaggcgtgcggccatgtccgaaacacaggggcggcggggcgacggaggcgactctgcggctactcggcgactcggggcagggtccccgggagggaggacgatcagctgaggcgtccacctgtggtgtcctcccaaaaaagcgctcgcgcgcgcccttccggagccccaaccacgccacaggctggtcgcgagggaatacgcccgtcttggctgtcagcaataggattttacagcgaaactgctgcctttgcttgcagcattctttcttgtttatcgaagcagctctgagcctttttagcgtcctgaagcgctttgagtaacggatgaaagctatggagcccccaaatacgcgcaaatacctaaccataaaaa

SEQ ID NO: 2181 - DNA, 30 bp, Homo sapiens
  chr2:211341504-211341534
  hyper
ccaatcagagccttcgccgttcccgagacc

SEQ ID NO: 2182 - DNA, 30 bp, Homo sapiens
  chr2:212452337-212452367
  hyper
ctgtgagaataaatttctgtcattttaagg

SEQ ID NO: 2183 - DNA, 2795 bp, Homo sapiens
  chr2:213401180-213403975
  hyper
gaacaagtgaggctcgcctttgtgcccccagaatttcaagtacagagtcacacacggaacaacaatggcacgctaatcctcgcgctctaaatgggctcacttgtgggtctgacaattcgcccagggaaacgagaagagacgaagcgagggcgcgagctagtgtcgcctgagacgaggaagaggacagctgcagaactaatttggattacattccttgcagaaattctgaaaagggcttttcggcatagctcaactcggagccgcacagttaataccaaattgctgcggactcggagcggggtcccccagtggcagaggctgaaccagacagcccccagtaggtcgcctcgtagaaattcctctcggctaagcctgcatgtcggtcgccaatgcctttgaatgggtcaatgtgcataatcaacccattgagggaaaatatgaagggactcgaagtggggagggagataaaaagagatgtatctaagaggccgcttggaatgtcaagtccgtgttggtgtgattccggaggtggctggagcgcgggacctggtatgcgtgaagaatttcggagtaattgggagggtgcaaacggccagcacaaacgcctcacatgtgccattcgaaggtcattttgaaagactcgataattgtaacttgttatttactaggcaaaggaggcggcggcggcggcggcggcggagcgggaaaactacagctagccgttttcttggtgaggtcagaaggacaccctccgggggcctaaagcgctccctatcgccactcccgggggctttatcacctcaagctacttcccacgctccagtcaccatccctggatggtttcggaaatctctctggctctccaaaaggcaccccttggccacgtcaagacaccggtcctcctcagacctctcccgtcccactttcatccccaggaaactctagtgtcagaaactttgagctccattgcactgcaggtgctgtcattagtcctgcaagccgtggcgggccagccccgccgcgctgcctctcggggtcaattagccctttgcctgcccaggtacctggggctcgagctctccagcaagcagtggccgcgcacccatcgccgctgccgctttcgcctcgggtggatccagtgacccgcaggctcggcagcctggccgggcagtaaacagacaagtttgaaggactccggccaatagcaagttgaactacaggaagaactcttcccggagccaaacacggcaaccgacgggaaggccgggcttctggctcaagtgtgccaagcctttttttttttttttaagaggtcaggcaggcgagtaagcgcccctcaagtcaatggggagagggctccgggaagccggcggaagaggcccagaactccgggccccggaccgaggcgcgcccgcctgctgcactccggctgcccgggctgggcgcgagttgcgtctgacgccacaaggctcgggcgactgggggcgcagcggtcgccagcagcacacacaggtgcaaagcccgattttctgagcgccgctctccaccgcccttcgggctcggctcgggagaggcccagccagcaccgccccaggaccgcggccccggcggtgcgggttctgccctcggggacccgacagggacagaagagtctcctctgactggggatttgggtctcccatgtcccgaacaacaggcgccaccagaagggatcccgcttaggctcccaaacaaaacgctcgggaaagaaaagcagggggttaaggagagaaaagagggactcagagtgatttttcacgataaataaagcaaacgcacacatacagggtaagtttcaaatggaaagaggggtgaccgaaagcccagggaagaggccccggtcaagcggtccctccacgcctcccgggatgggtgaagagggcaggggagccactcgaggcagccccgccggcggctgcaggttcggcgaccggagtgccagaaggaacccacctgactgagaatcgctgggctggacggtccccgccgccacgagaaggctcacccagacccaaagtcctgtcgccggcttcattttttggaagtctcagatcccgtgctgacaattacatgtccaaatggcatatccccctttcgggcacgcggaggagatcccccagccgggcgcgcgtgggggtgcgaggggggcgggcgcggcgcgcgcggtgtggcgactcccagggcgggcgaccgagtccgcgcccgcgggtccagggccggggcccgaggagggggcgagtgtgagcgcgtgtgtgcgcgtgtgggagtgtgctcggtgtgtgcgcttggcgctctgggccggactgtgcagctatttccccgcgtgagccttcgcttgctcgctccctcctcactttctctctctctcactggttggtcaacaataaaaaaggaaggggggcgaaaggtttccaaaaaaagttgattgcaaagaggcggtaggtttccggcctctccccgcagccgggctatgttctgctccttcttcagtttccttgcacctccagtccaaatcgggaggggagcggggcggggggagcttctcgcttctccccggatcccgtccttctttttcctctcagctttcctcacacttgtccggcggctgcggtaattaaagctccgagcgtcatttccagcgctccgcggtctccagctgcagcccacagagaaattaataagactccagaaaaaaaaaaaaaaaaggtgcggggggcggtgggaataaaacaaccctccacgcaaccaggccggct

SEQ ID NO: 2184 - DNA, 30 bp, Homo sapiens
  chr2:216946186-216946216
  hyper
gtctccctggtggtcgtaatttcgcccaca

SEQ ID NO: 2185 - DNA, 42 bp, Homo sapiens
  chr2:217008384-217008426
  hyper
tactaacaatgaaccacgtgcgaaagatactataagctgctt

SEQ ID NO: 2186 - DNA, 30 bp, Homo sapiens
  chr2:217236025-217236055
  hyper
cggcaaatccgtggcgccctcccctcggtt

SEQ ID NO: 2187 - DNA, 199 bp, Homo sapiens
  chr2:217236615-217236814
  hyper
ttcctcctctccaccgcctctggctggctaggctcgctgttgctacctctcctcgcagatgcaacgaggtaaggcttgtttgcggtgccagctgaaggtggggaggggggagcgaagcagtgtggccgaggtgggaggcagccggcacttggctccagcttggtcctcgcgactccccaaaaccgtatataaatatatc

SEQ ID NO: 2188 - DNA, 30 bp, Homo sapiens
  chr2:217277337-217277367
  hyper
gggcgaatgtggctcgcgttctaggcctcc

SEQ ID NO: 2189 - DNA, 30 bp, Homo sapiens
  chr2:217497926-217497956
  hyper
aggccagaagagtgcggagggacggggccc

SEQ ID NO: 2190 - DNA, 30 bp, Homo sapiens
  chr2:217557145-217557175
  hyper
ctagcaattgcgcgcgcgtgcgctctgcgt

SEQ ID NO: 2191 - DNA, 581 bp, Homo sapiens
  chr2:217558851-217559432
  hyper
aggggatttggaccttgtgaccgaataagagctcagaatcagtattcggacagagtagggggagggggcgggcaacgtgtgggtaggaggaaggagaaagagcgaaagctgggatagactcggctagacagttcccccgggtagcaggatcctccagggctccaattccggggtgcaaggaccctccccgactactcccgagctgcaccccagctcgaagccacttgctgcgcaaagcgcgcgggcccagccggtctcgtgtcccccgcccgtgcgccgcgtaactgactggcacactgagcgcgctcaccgatcttgacttgctcgcggtagctcttttcgttgaggcaaaccccgcggccgtgcagcagggcgtgcagcggcttctcctcgtcctgccgggggaggcagcgcagcccctgggcgcagcgctcggtgtagacgccgcacgactgcccctcggccagggcgcaggtcatgcagcagccgcagcccggctccttgaccagctcgcagcccagggggctgggggggcacatggagagggctttctcgtcgcagggctcgcagtgcacgaagga

SEQ ID NO: 2192 - DNA, 31 bp, Homo sapiens
  chr2:218802244-218802275
  hyper
ttctgggagtctcagccggtgattagggccc

SEQ ID NO: 2193 - DNA, 30 bp, Homo sapiens
  chr2:219232860-219232890
  hyper
ctagaaataggaaccgttaccgtcgtacct

SEQ ID NO: 2194 - DNA, 30 bp, Homo sapiens
  chr2:219263452-219263482
  hyper
cgaggggtgtttgtcgggcttggcattatt

SEQ ID NO: 2195 - DNA, 615 bp, Homo sapiens
  chr2:219263827-219264442
  hyper
ctggagaaggtggcatttcctcgaggtcggtggaatttggctacgcgaaaggaacagcgcgtacgaaaacttcaggcgggaacgcgcggtggcccgtgcgcggcgggtagacgtgcggggccccgggtggggccgtggggagaggtcggcagggggctttcccagggcagagagttagaatttcacgtcctacagaccgggggcacctcgccctggggctgcggggggcggcgaccgtcccattcaagagcgtgattctgaggtttgcacagctgtttcgggccagcagagccttcgctggctcttgacgtccttgcgaggtgatctctgcgaccaccagacaggagagaagacccattttacagatgaggtagtgctatctccaagtcctcaacgaggaaaccgagaagcctctagtcccgggtcttcagaaaacgcagaggtggagccgcgccgcactcgggcactccccggcgtgggcgctcccggcgggcgggccttggccgagggcgctcggcggcctggaacggtgagccgggtgccgggcctgccacgcagccgcagagactcagccccgccggcgggcggcaggaagggaggcgacgccccctggag

SEQ ID NO: 2196 - DNA, 30 bp, Homo sapiens
  chr2:219576524-219576554
  hyper
cccattctggatctcggaaatattttaatc

SEQ ID NO: 2197 - DNA, 851 bp, Homo sapiens
  chr2:219646294-219647145
  hyper
gaaatatcctgccttggcagacgcggcagggaggtgcgtggagggagaattgaattaaaaaaaaaaacaacaaaacacgaatatttagatttctttgttcagcggcccccctccagggatcagatgactggcccccctcgctccgaactgactccgggatcaatccggaaggccattgggagaagccgagggcagcttagccacggccggttcccgttccctccaggacgcgagggtcgccttgggtggggaaccgcgaccgggcgaggacctatcccggtgtggggcttcccgatttcgaaagaatctcgctgcacccccgcccagagttcagaccaagcgaaaagttatttgagaggcctcgggggcgcggggtgaggagtcgtggcggaggccttggtcggggcgccgtggatatccccgagtcaccgcgtccctctcctgcagctcccgcgtcgctgggaggagcgagggagcgagcgggaaggggtctagctggcctttgctcggccctccccagcgcccggctttgaacccgccctgcactgctgtctgggcgggtccggggactcagcactcgacccaaaggtgcaggcgcgcgagcacaacccatggctgcgctgggctgcgcgaggctgaggtgggcgctgcgaggggccggccgtggcctctgcccccacggggccagagccaaggccgcgatccctgccgccctcccctcggacaaggccaccggagctcccggagccgggcctggtgtccggcggcggcaacggagcttagaggagattccacgtctaggacagctgcgcttcttctttcagctgttcgttcaaggctatgccctgcaa

SEQ ID NO: 2198 - DNA, 54 bp, Homo sapiens
  chr2:219723642-219723696
  hyper
tcccaccccttctacccgggccaggttgggggaggaactcgaggcagggactct

SEQ ID NO: 2199 - DNA, 79 bp, Homo sapiens
  chr2:219724230-219724309
  hyper
agcccttccttgcccccgactccaggcggccgcgagcggcggggggctccaagtccgagagaggcgaggcgagggggcg

SEQ ID NO: 2200 - DNA, 887 bp, Homo sapiens
  chr2:219735800-219736687
  hyper
cggcggctggccgggcggcaggccgagttgtgccaggctgagccggaagtggtggcagagctagctcggggcgcccggctcggggtgcgagagtgccagttccagttccgcttccgccgctggaattgctccagccacagcaaggcctttggacgcatcctgcaacagggtcagtgtggggagggggcggaagtggggctgctttctccctgctgtgggacccgaggagaggagaactggttcgctgaagttgcctgagccccacttccccctcacatgtgtctgggcaccctgcaaggaccctgcctcccaggcccctggggcagccctcccgccgcaggtttcaggtcccaggccccagctgaccgccccagcccgcgctgattgcacctgtctgcattcacagacattcgggagacggccttcgtgttcgccatcactgcggccggcgccagccacgccgtcacgcaggcctgttctatgggcgagctgctgcagtgcggctgccaggcgccccgcgggcgggcccctccccggccctccggcctgcccggcacccccggaccccctggccccgcgggctccccggaaggcagcgccgcctgggagtggggaggctgcggcgacgacgtggacttcggggacgagaagtcgaggctctttatggacgcgcggcacaagcggggacgcggagacatccgcgcgttggtgcaactgcacaacaacgaggcgggcaggctggtgcgtacgggcaggatggagtgagtgtgtgcggaaatgtgagtgtgcgcgcaggagtgtgcttgaggaagtgttggcaggagtgagggtgtgtaggtggaggggggcgttaatgtgtgggggagtgcgcacgggcggaaagatgg

SEQ ID NO: 2201 - DNA, 30 bp, Homo sapiens
  chr2:219745632-219745662
  hyper
cgccgatcatgcgccggcgcccctggctct

SEQ ID NO: 2202 - DNA, 749 bp, Homo sapiens
  chr2:219757350-219758099
  hyper
actgcctggttgtgggaccctcgctcccggcctcagcgtttgcctctgtataatgggagtgggtttcagaagcaggccaggctaagcgctgggaggggagtggggctgcgcgccgtgtcacccctcacggtgcctccctccgcaggcagtgatggagaacatgcggcggaagtgcaagtgccacggcacgtcaggcagctgccagctcaagacgtgctggcaggtgacgcccgagttccgcaccgtgggggcgctgctgcgcagccgcttccaccgcgccacgctcatccggccgcacaaccgcaacggcggccagctggagccgggcccagcgggggcaccctcgccggctccgggcgctcccgggccgcgccgacgggccagccccgccgacctggtctacttcgaaaagtctcccgacttctgcgagcgcgagccgcgcctggactcggcgggcaccgtgggccgcctgtgcaacaagagcagcgccggctcggatggctgcggcagcatgtgctgcggccgcggccacaacatcctgcgccagacgcgcagcgagcgctgccactgccgcttccactggtgctgtttcgtggtctgcgaagagtgccgcatcaccgagtgggtcagcgtctgcaagtgagcggcccggggtcccctgggccctgatcgaggtcccctcctggagcctggccctctgaggcttacggtcttggcaaggcagcatcgccttggctcttgggaagagg

SEQ ID NO: 2203 - DNA, 30 bp, Homo sapiens
  chr2:219761838-219761868
  hyper
tcggggctgggaggcgcccgcccccccacc

SEQ ID NO: 2204 - DNA, 30 bp, Homo sapiens
  chr2:219825285-219825315
  hyper
tggggacgagctggcgtcggccgccgagct

SEQ ID NO: 2205 - DNA, 486 bp, Homo sapiens
  chr2:219827638-219828124
  hyper
gcctggcttcaacagagtgcccgcggctccgaccctagtctggccgtggccgagaagatccggaaagaacccggggggacctgccaagacgaggcccgggttcgctgtccgtggtgctgaatggcgcgctcgggcggggtcggggcttgtaagggcaggaagagttgcagactcggcctcaactaggtcttccggataatttgggaatagggtgtcatctattctggcggcgagttatagaagtctggctccagaacccaaaaatgtcggtccccacttgccctcccgggacgacaggactcgattcccctggcctcagcccagcgcccttgtaacctgcctggagccggaaatccccagtccagatttgtgaattgagttcccggagggagggggagagctggcggaagggaaggcgggagcagccgcccattggctggaatttggcgcagtcagcgcggtgccgtcatctctcttggtttggga

SEQ ID NO: 2206 - DNA, 1079 bp, Homo sapiens
  chr2:219845791-219846870
  hyper
agagagaggaggcagcggagagctcaggagctttaatggggctgaaagggtcagaaacacaccgggagtttctcctgggagtgtggggacaggaggaagggggccgtgtgtcacggaggacggtggctttcaccaaacctgctcaggtcccaggaaggaggaccgtgagaggcctccacgtgctgaggtgggagcagttccttggggaagagcaaaagtgggaaaagatttggcactcgttaaagagtagtgatattgaatggggcttctaggagccaggcggaaatgcactggagtggtggggagacaagagaggtccacaaatcccctccgggacctggagacctagaagaaaaaaagtgaaagagggcgcacatcgccctcctcaggggactgcggggtgggacaggagcaaatctagtaccagacaaggattgagggagcttcggtcccgtccccctgctaagtgcggcaggtggagtaaactctggattagaggacggttgacggaggctcccgggccctccccgggatgccgatgggatcgggcgagactctaggcgtgcgggcgaggccgcaggcacccgaccgccccgtctagtggtaatggccccccaagtgcgaggctgcggccacggccccgaagggcccgggcgggggctgcaagctgggactggggtagagcgcggcggtggcggcggcagcggtggcggcggggcccgggcccggccagtaggagaagccggcgggcgcgaccccggccgaggcggccatgaggttgagtttggagaggccggggaagggcagcggggcgaggccggcgggcagcttgtagagcgcgccgtcctgggcggccgcggcggcggcagcagctgcggcggcggcatgagcgtgcgcgggcggcggctggcaggcctgcgccaggccctggaagtcgaagcggtaggcgtagcgcttgccatgcaccttgctcatgatgttcttgtcgtagtagtagcgcagggcgcggctcagcttgtcgtagttcatgttgggcttgctcttgcgctcgccccaccgccgcgccacctcgtccgggt

SEQ ID NO: 2207 - DNA, 468 bp, Homo sapiens
  chr2:219846894-219847362
  hyper
cgccctcccacgcgatgcagccggcgttcgcgcggtcagccagcagctccagcagaaactgccacagctggatctgtccgctgcctgtggggaggggggcggtcagccacaggcgggagcggggaggcgggaactggggaagagtgctggcgggaaactgacccaccccggcaggaaccggcactgggggaggaaaagtgcaagtcaaactgcagctgcgttcggcgggagaggccggccccggaggggctgatcagcagagtggtgtgtagccttaccgcgcttttgcacaatggaaatgcggcttccactgaagagcacgtagctttccagatgcacggttttgtggaacttgggggttggggggaaggggaagcattgcctccccccacgtgagcgcagcggcgcaccaaggcacttggctttccaaggcgagcaaggacagatatccgccgccactctccatct

SEQ ID NO: 2208 - DNA, 30 bp, Homo sapiens
  chr2:219847620-219847650
  hyper
cagtggccccctatacgtgacaggaggggc

SEQ ID NO: 2209 - DNA, 30 bp, Homo sapiens
  chr2:219850450-219850480
  hyper
cacttttaaatttccgcttccctccctctc

SEQ ID NO: 2210 - DNA, 76 bp, Homo sapiens
  chr2:219857661-219857737
  hyper
gctgaggctctgagcctaggccggtggaacccagcgcccctcaacccagcccagccgcggccaggcaatcactcac

SEQ ID NO: 2211 - DNA, 1056 bp, Homo sapiens
  chr2:219857780-219858836
  hyper
cgcgctcgcagacgttcgcacagtcgcttagcagccgacagcgacggccctggaagtcctcctcgtcccagagcgtgaggctggcgggcgccgggcccggcgcgggggcgctgctcatgccgctgcggacaggaagggtggcaccacgcgctcagcgtctcaagagccccgtttcgagccacacacagcctgcccaacctgggtagcggatgaagaacccgggggctggacccggcctagctctggacccggctgccaggggctcgcagtcttcccgcgctcccctcccttccccaccccagcagagggcattcaccgggtgggtgagcgcggcacgcgagggaaatggaccggctgcgaggctgcgcgcggccgggcgggccgagctttatacctgggccttgtccccctgtccgcaccctttccctcgggggtggggtcgctgagtcagcaggcaggctgcggtcggctctggtctccgctggggagccgaggcctctcccgcagccgccgctgtggccccagcccgcgggaaagacaacagaaagtgctgaggcgcgcaccccgcgcccgccgcagcccaggctgactccgcgctttctttctttccagcctgagccaggcagggcacgccaggcctcggggcagaacgcgccctccctgtcccggccctcggggacgaagggacctggcctcccctgggcctcgggctaagaccgcgctgctgactcgctgagcggaagttcttcccagagtctaatcgccagccttcctcggccctagtccaggcctctcttttgggcgatgctaaggcggaggtagagagggctctgcccaaaggattcgcttcatgtgctcagtcctctttttcctgggggatcggtccatcgcggcccttttcctcccaagcgtgcgttcccagatcctgcgccgcgcccccggggtgtcctcgggcccgggaaggagaggaggcggtggtcaggactcgccacgcggcggcgccgggcgctggaaacgaccgcccgagggccgcgcggtttactcagtgtttaggca

SEQ ID NO: 2212 - DNA, 643 bp, Homo sapiens
  chr2:219866437-219867080
  hyper
ggagggcccggggcctggcggtcgccctcggtgatctcctggtcctggtcttccgcgagctcagtgctgcacagcgccccgctagcctccgccctcacctgaacgcatctgcggctgacacgtcggcggccgcggcggccaccgcaggtgcgcacctggcccgcccctcctttcccagccaccctccgcccggctttcctggcccctccgcccggcccagcctagcttggcttcgtccccagcccacgccttggagcttgtcccggagcccgggctccgtgtgctcttatactgcctgttcagtccccgcccccagacacacacactcacacctgtccaggcgcccgtttgctcggggcaaatattgactcatggaggcggagcgctcccccctcccccgcccgggctctgagaccggagcttctccgaggccttggtggcgggggcggaggggagggtgctggggaccctgggcgcctctggaacaacaccagatgtcacttttccacccacctgcctctgggagggaggagccgagaagcagaggacagaagctcccgggcgggggttaggaggaaccgagaggtgggtatccatcctcgtctgaggactgattcacagtgggagtcgcttagcagggtct

SEQ ID NO: 2213 - DNA, 199 bp, Homo sapiens
  chr2:219906101-219906300
  hyper
tggccacgatttcccgaaggatagggtctcccgggacagataccttccctggccactcgcgccgctccctgagaccctgggaccttgggactaacgctcagaacttacatcgcctccatattgccgtctccatagatacaggacgcgcaggaaacggcgtcttcagatatcccagggcaacgacggcagcccgagtaag

SEQ ID NO: 2214 - DNA, 30 bp, Homo sapiens
  chr2:219923777-219923807
  hyper
gtccagagcccgggcgtgcgctgtcaatga

SEQ ID NO: 2215 - DNA, 30 bp, Homo sapiens
  chr2:219925050-219925080
  hyper
gcggcacgagtttgcgtggcggtcgccggc

SEQ ID NO: 2216 - DNA, 30 bp, Homo sapiens
  chr2:219925673-219925703
  hyper
ggccccgcgcagaccgcaccctacccatgt

SEQ ID NO: 2217 - DNA, 30 bp, Homo sapiens
  chr2:220043322-220043352
  hyper
ggtcacggcggccgcgctcaacggcctctt

SEQ ID NO: 2218 - DNA, 30 bp, Homo sapiens
  chr2:220094502-220094532
  hyper
tcaggtgcggacgccgccggttgtcctctt

SEQ ID NO: 2219 - DNA, 30 bp, Homo sapiens
  chr2:220118258-220118288
  hyper
ggggcgcgggcccgcgtgactctcatacag

SEQ ID NO: 2220 - DNA, 30 bp, Homo sapiens
  chr2:220118645-220118675
  hyper
ctgcagtgccgcaccgcccttataggcggg

SEQ ID NO: 2221 - DNA, 30 bp, Homo sapiens
  chr2:220173085-220173115
  hyper
gctggccttggaggcggttaccagagagga

SEQ ID NO: 2222 - DNA, 30 bp, Homo sapiens
  chr2:220174186-220174216
  hyper
gcaacgcggccaaccgcaggcgggtgctga

SEQ ID NO: 2223 - DNA, 239 bp, Homo sapiens
  chr2:220196348-220196587
  hyper
tgaggagaagggaaagagcttcgggaaggggagctgattctctgaggcagcgttcccaggactggtgggaaggagtggtgacccgctcgggctcggcgtggacccggagcgcgcctggcgctgtccgtggtgctgagaggtggggaggccagcgtggcggcggcgctgggcggaatgtgggcgagacatctccgcaaggcttggcggtccttccccacggccctcatcctctcattgcc

SEQ ID NO: 2224 - DNA, 6 bp, Homo sapiens
  chr2:220299628-220299634
  hyper
agggca

SEQ ID NO: 2225 - DNA, 30 bp, Homo sapiens
  chr2:220299885-220299915
  hyper
cgggtggtggtgagcgggacgccccagccc

SEQ ID NO: 2226 - DNA, 49 bp, Homo sapiens
  chr2:220348934-220348983
  hyper
gtccctccagctgtcaggccacgcccagggcccctcgcagggccctgcc

SEQ ID NO: 2227 - DNA, 750 bp, Homo sapiens
  chr2:220349054-220349804
  hyper
cgagaagcgcgtgccctcagccgggggtcccccggtgctagccgagaaagcccgagttcccacggtgccccccaggccaggcagcagtctcagtagcagcatcgaaaacttggagtcggaggccgtgttcgaggccaagttcaagcgcagccgcgagtcgcccctgtcgctggggctgcggctgctgagccgttcgcgctcggaggagcgcggccccttccgtggggccgaggaggaggatggcatataccggcccagcccggcggggaccccgctggagctggtgcgacggcctgagcgctcacgctcggtgcaggacctcagggctgtcggagagcctggcctcgtccgccgcctctcgctgtcactgtcccagcggctgcggcggacccctcccgcgcagcgccacccggcctgggaggcccgcggcggggacggagagagctcggagggcgggagctcggcgcggggctccccggtgctggcgatgcgcaggcggctgagcttcaccctggagcggctgtccagccgattgcagcgcagtggcagcagcgaggactcggggggcgcgtcgggccgcagcacgccgctgttcggacggcttcgcagggccacgtccgagggcgagagtctgcggcgccttggccttccgcacaaccagttggccgcccaggccggcgccaccacgccttccgccgagtccctgggctccgaggccagcgccacgtcgggctcctcaggtgaggaggg

SEQ ID NO: 2228 - DNA, 69 bp, Homo sapiens
  chr2:220361397-220361466
  hyper
cctcttccctaccaagccacacgtttaggggtctggccggtccagggggcaggtaggagatggtgcgct

SEQ ID NO: 2229 - DNA, 257 bp, Homo sapiens
  chr2:220361644-220361901
  hyper
ggacccattcatccgctggagtaaggacggcaaggagctacgtgacggtcccaagtaccgctacgtcttcgaggaccctgacgtggtggcactggtggtgcgcgacggcgagctggcagacctgggccagtacagcatcaacgtcaccaaccccttcggccagtgctccgactcggcgcgcatcctcgtggaaggtacgcgcgccccgggcgcagcgccagggcgcagaccagcaccactcagccagagcccgcagc

SEQ ID NO: 2230 - DNA, 112 bp, Homo sapiens
  chr2:220361983-220362095
  hyper
cgccgcgccagccaagtgcgtccttccctacctcgggatccagctccacccgggctgagcagtcagctgtggacttccatcacgcggctccgggtccccaaggtcacacagc

SEQ ID NO: 2231 - DNA, 30 bp, Homo sapiens
  chr2:220377870-220377900
  hyper
tctgcggcttggatcgatggagccacctcc

SEQ ID NO: 2232 - DNA, 294 bp, Homo sapiens
  chr2:220378981-220379275
  hyper
ggcctggctcctgacgcccgtgctgccggtgaaacgctgttgacatgtcctgaattattaagcgtggggagggctccggagcacatgctgagcggagcggctggggctgcgcggcgtggcggagcagcgctcgctccctcgctcactcgctcgctcgcagggacacacgcaggggctgacagctgtgctggtgctgataagggaagccacaaggagacgatcgaggagagagacaagcggcagcagaggcagcagcggcagaggcagcaccagggctgcggagctgctgggagt

SEQ ID NO: 2233 - DNA, 31 bp, Homo sapiens
  chr2:220408153-220408184
  hyper
tcctccacccaggtgacgctgagcaggctca

SEQ ID NO: 2234 - DNA, 31 bp, Homo sapiens
  chr2:220408748-220408779
  hyper
cgtcaggagcagaggccggagctgtccatca

SEQ ID NO: 2235 - DNA, 30 bp, Homo sapiens
  chr2:220416404-220416434
  hyper
ccgcagccagcacacgtggccccccgagcg

SEQ ID NO: 2236 - DNA, 912 bp, Homo sapiens
  chr2:220416856-220417768
  hyper
gactgggcgggccccgcctggaagcggacttcaccggcgtcctcggcgcgcagctcgctaagcaccagaatgtgtttcttccctgggggtgagggggtcgctagcgaggccggagccacctctgaggagcgttggggacgaaggtgggggcccagcaggcccctgggtcggttcggacgccgttagtgtatgctagggtgggcggaacagggatgcggagcgggaagcctagaggtccgggactaggggctgggggcgggggaaagaacagggacgaggctcacagggccgtggggcggggcccgtcggagccaggggcggggcttgtcccggtggggcgggatctgttcgagcctgggcggggcagcgaggggcccgaaagggtaaccaggcgggcagaccttcctgtcggatgcggacgcgggctccgggtctcagcgggcggcctccgagctcccagcgccccgtggtctcgacctccgacacggtgcactcgaacgtagcgccgtcgccttcgcgggcgctcaccgaccgcagctcggagagtaccgccacagtacgctctggggcggagcccggggcgtgagcggggcggggcagagggcagttaccggtcacgccccctccacgccccctttctagaagcacgcgcggtcatcagggtccggggaagacagctccgcaagtctcgcgcccaaagcagtgcccagcctccacatcaccccgtacccaccgcgcacggtcaggcggaccggtccggcgcgggccgtccccaccgcgcagctgtaggtcccggcgtccgaggggccgcagcgtcgcagctggagaaggcggcgcgtgccgagggcctggagccggagccgcgggctaggcgtaagcgcgttcccgtcctaggggcgggagttgcagagg

SEQ ID NO: 2237 - DNA, 546 bp, Homo sapiens
  chr2:220435323-220435869
  hyper
cgtggcacacgtagacgccggaatccggcagccgagccgccaggatgcgcagtgccaggctcgcgccggggccgtcctcggcgcggcccggctggagcgcgaagtggctgctgtcccacacttcgtccagggccatcccgtccttctcccagtacagtgtgggctcggggaggccccccgcccggcacgtcagcaccacctccgccccccgcagcacccactgggatcgaggccccgtgaggaagaccggggcgccctccccggaccccggcgatggcagcgggcgctcggcgggctgcagctcggggtcggaggccggcggctccagcacggtgacggcggccgccgcgtaggcctcgccggccgcgttgcgggcgcggcacacgtagacccccgcgtcggtgggcagtgcggcggtcagcagcaggccgtgctccgcgccgtccgccgggaagctcaggcgttccgaggccgccagctgctgcccgcccttctcccacaccactacaggcggcggctcccccaggaccacgcacttgagctcgg

SEQ ID NO: 2238 - DNA, 225 bp, Homo sapiens
  chr2:220436139-220436364
  hyper
cggcggcggcggcggcgattcccgggcccgaagcctggcgctcagggggcagtccttcctgtttgcctctccagcgagtggccccgcagcctcccctgcccgctgcctggcttcctgctcttaggagcctctcttcccagccccctcccacagcttgggcctcttccccctcctccctcccacctccagccgccaggtccccagccgcccgccaggcttgggcct

SEQ ID NO: 2239 - DNA, 43 bp, Homo sapiens
  chr2:220492469-220492512
  hyper
accgcggggcggggcacgccgggcagggcgggggacccgggct

SEQ ID NO: 2240 - DNA, 30 bp, Homo sapiens
  chr2:220969995-220970025
  hyper
agtgtgtgggctagcgaatgagtatgtttg

SEQ ID NO: 2241 - DNA, 241 bp, Homo sapiens
  chr2:222435634-222435875
  hyper
acggatggacggacggatagatagatggatgccggaaaggagaagaatgagagacggatgtgagactagatgcacgcaggccagagcaccagcatacgctggaacagagcacgagcatacactcgaacacacgcgcacacactcaggacatctgcgcacagacatacaatcctccgcgtccgcttccacgcaggcattcgcgcacctacatacacgcagttgcacgcgcgcgcacacacac

SEQ ID NO: 2242 - DNA, 2254 bp, Homo sapiens
  chr2:222435994-222438248
  hyper
gttcgcctctccctgggtttctcagaaactaaatgatcaccgcccccccgccccgccccacctcccgacacagacacacaggcacatacaatcctcccagcacgtccgaacggatgcacagaaaactgagcacccagacgggtcccgtcgaccccgcacgttagctctaaactgtgtgcaattctggggcgaaaagctaaaactcgactgcgttcaacttgccggcgggttccccaagtctgcggggcgaagagctcgggcccctcaggcccgcaatcgcaccctcggggcgctgggcttggcgaggagaaaggtgtctgactccgggtgctagaaatcaggtcactggcgcctgacgagcggcgccacgaccgctgcgctgcggagcaggccccgcagcccggtcccgagaagcgcagggctcgggaaactttgcagaaaccagagctcgaaaggctttcgctagaatccgggagcaccaagccttcactgtgctccaggctgcgttttcccctcgccccgggctggctcaggagaggacgtggttcttgtaattttttttttaaatcccggcgttgtctcccgtgcatcccctcagggcgcctcgagcgggcctctctggcggatgctgataaactttggcctttggttacaaacttggacagacccgccgcgtgcacgggtcaccgcctcggggcaggctgtccggcggttccccgctgccccttcgccgatcccctcgcctcagcccccttctcccgaatcgggacgcaccattcacactgggctccccccgcaccacctggccctgcgctcctgaggacccctcacccgcgatggcccctcgctgtccccgaccacagaaaggccgtcccgctcttaccttcattcgcggggtataccctggaacctgtgacagcgtcgcaaatcccgaagagacacgaaaatagggcgaaatagaaaatcccagccatggttcgccggtgccaacgctgctcctgccgcttctatcccagtggaataaatgcttaagttaggagagcagcgggctgaagacattgccaagggggcgggcccggccggtgacgtgagcccgccagtccggggcccgcggccaatggcggcgcagacagggcggccgagccccgccttcaccgagcagggcccgccccagggttccgccccctccgggctccacggggcgcgcggtctcccggggctctagggggcgagcacggccggtccccgcccccgcctgccggagggagccagcgggatcccccacgttacctcgaaggtcgagcccctggacggcggagggactttggaaaagctcggaattgaccgaggggagccagagaagaggttggaaaccttttctcccaccacgggcggtttaagatggaggaaaacgctcttttattgaaataaaagaagtctaagctgacctgcggttgcttctttaggagagtcgacgtgtctgcgtccagcgcgcccgggctgagctgcagactcgcgcctgccaccgccaccctctgccaccttgccctgttttgtctttatggcgcttccccctctgaaatactctttgcggggagttttgtggctctatcactcgcttcttccctggctccccagatgcctggagagcggggacctacttggtccccaacgtccagtccgcagcagggctccgtcactgtctccagagactgaacgaatgactttctagcagtaaggaagtccccgctggccccgtccccctgcacacgccgtggacctcgcccagggcccaggacgccccgagatggccttgggcagggaaccagttgtggatttcccgggggcagggttgggggcagtccctggaaccgggcctagcccgtctgggagcggtggggtagaagtgaaaggcttaagtgtgggtgcggggacttgcagccgcacagacaaggcagaccgggactgggaagctgcccggagcggctgctgcgactctccgctccgacctagccggggcagccctccctgccccgggagaagacggcgagcaggaggacccgcagagccccgcccggctgctccggccccgggggcactggcaccatcgggctgtggtcttttcccgatgcccgagccgtggacgcggccacctaagagcggtccggcgaaggcagcgcagccggtgtcccagggaccggtccccaacgccactcggtgcatttccccaggcgctggcaggggcactgattcc

SEQ ID NO: 2243 - DNA, 55 bp, Homo sapiens
  chr2:222438693-222438748
  hyper
cctgagtggctgctctcggaaaagcggatcctaaataaagcgggagggttatagg

SEQ ID NO: 2244 - DNA, 30 bp, Homo sapiens
  chr2:223155910-223155940
  hyper
ggtgcccacagccccggatgcctcggccag

SEQ ID NO: 2245 - DNA, 55 bp, Homo sapiens
  chr2:223158944-223158999
  hyper
tccttcctctccaagtcggcctcctcctcttcacctttcccgaatttacttctca

SEQ ID NO: 2246 - DNA, 30 bp, Homo sapiens
  chr2:223162860-223162890
  hyper
ttcacaagtgtgggcgcagccgggacaatt

SEQ ID NO: 2247 - DNA, 296 bp, Homo sapiens
  chr2:223162928-223163224
  hyper
cggagaagttgcttctgccgctcagaagccggttcacctccttctccaccgcggcatttccaaaacaacagggacaagtctccccggctcgccgcaggcctgaccgcccagctccgccaggatttgcagagagcagcgcgctccatttgcagaaaggaaatcgagtaggtcctcgcccccgactggtgcttcttggggtgtggggtgcccagggaatgggcttcctggaagcaccaaaggagcctgcggagcctggggatggggtgaggcagccggtcccaggccctgggatccag

SEQ ID NO: 2248 - DNA, 241 bp, Homo sapiens
  chr2:223163558-223163799
  hyper
tcccgagcccagggcggaaaagtttggtacgagtctgggcaaatgttccagcgactggggtccctgaaaagggggctcagagagccacggcgagccggggagcctggtgaggctggagcgcggcctgcctgagtctcctcctgtggtgacaccgagtgcggggatccgggctcgggagcatttattagttcttttacccaaagcttggtcaggagccctgagctgcgattggccgacgggt

SEQ ID NO: 2249 - DNA, 19 bp, Homo sapiens
  chr2:223165483-223165502
  hyper
taagccacttctcagcgat

SEQ ID NO: 2250 - DNA, 222 bp, Homo sapiens
  chr2:223166003-223166225
  hyper
gaatcaggaggcgactcattttctctcctttccggcctctttcttttctgccgagcgctctgagattcatatgtacccagatgatcagcccggcccttctcaccggccagtggccagaggtccctggacacccggagaggggtgggagggcacccttaggctctggacagctgggccacatccaaagacttaatgaatctaaatttcttgtggcctgtgtcc

SEQ ID NO: 2251 - DNA, 1287 bp, Homo sapiens
  chr2:223166293-223167580
  hyper
cgccgccaaacctaacccggctcagagccgtgactccgcagaacagggcgcaacaggtctcaggaatgccgggtgattccagccactctttctctgtctccgagtcttgggcctcccctttatttctttctgaagtctctccggagcccaagccaccccacacccaaaccccgcagctggatgggagtccaggccacttccctatccgcagccggtgggccaaggagtcctggtgccaaatttggccgcggtacaggcgctaattggtaaagggatgacccagcggtggggcttggaaggcgagggcccgcgccctgcatccttgaaccctggtttgggaggcagtgacttttacctgggctaacaaattacccagaaagcatcagtgggactctccacaacggtgttgtgaacgagtgtagggtccactcacgctctgtgcacgttcgaaatgaaacgggagccttgaagacgatatttggataatttgacaaaaaaaaaaaaaaggtgggcgggggagatagcttctattgtcccctctgcgcctctgcccccagtttcagagacactacaggtgaaaataacagcgggctggctgtccaggcctgagtggagcgtgcccttgttagcttgaaagttctccctcgcagcccgtttggatgcgtgcgtctacagcccagtcgcactttggtgaccggcctgggctgtgaagcaccctttagcgaacagcctccgcacttggggacactggcacaagggtttcatggcccgtggacttctcagggcctctgagggttgacttcatactcagccagacacaggtcttaagaggaaattatgatctatgcaaaataatgtccctgacctagtggggagcgggggtggtgtctgccacccagacctttttcctcccgtctgaagggccgagctctggcaggctgacacggtcgagcagagaagttcctggccacccgcccggccccaggcgtgattctcaggatgcagtaaaagttgggcaaacgccgagaaaccctcaatcccacagaaaggctgccgggggctcacggggaggacatcaaaacgccaggttcgtgatcatgagcttccggtccggatgtgatgatacaggattggtgaatgcccgggttaaacccgtggtccttcgcagccgctgcctcagtgacagtcattaggccccccgcagttatttgtcaaaagcattggcgccgctcttctccccatcgaaaaatcagtcgggatgagttcggattaagggactagatgagg

SEQ ID NO: 2252 - DNA, 483 bp, Homo sapiens
  chr2:223168348-223168831
  hyper
aggaactcctgcctccgggcgccggtacataaagagctggggctgtgtgtcctgctcttgggggaggagggtactgggaagggggaactaacaggtctttctttcgctcggatcaggactggactccttctgactccacgcggccccagctcctgaaccagcgcagtgagcctcagccgcttctcaaactgggtctcagaaaatttctcctcgagatggatttcagcggcaggaaagaggggccagtgacgcgaggagcaagaaaagagtaacatgggagatgaatgttcaaacccagatctcctcgctgagcctggaagctcgccaccgtgggatcacgggaaccagaggcaagaggctgcgaatgagtccaacacccgcgttcctcgagttttaaaagcacacctggggccagagactgcacagccaactaaacggagtaaacgcaacaggtggaggaggcagagttgtcaggggccaagc

SEQ ID NO: 2253 - DNA, 52 bp, Homo sapiens
  chr2:223168916-223168968
  hyper
cggagatatccaactccacccgggcgtctcctgagagcgcacagtccacaga

SEQ ID NO: 2254 - DNA, 1852 bp, Homo sapiens
  chr2:223169485-223171337
  hyper
gctggagggagcatgcggcagaagtgcagacccctcgctaacccgccaacctccaagagccctcttgcagaaagctgcccggctccccacggtggccctgcgcgcgcaccatcctcgcggtctcgcttcttcgccccggaaaactctatgaggggcaccccagcctcagccgggttaagacaagtagccccaagaggaaggagcctcagagagcctttcttcctgttcttcttcgtcttcttttttttctaaacgaaatctaatactatctggctgcaaaaatatattatcaccggctctcagcctaagagactaacatttggatatgtaggaaatgtaatctgcatggctaattgattctcagcgtatcagtttaaaggataaagatcgatatctacatgatggatattgtattaataggggcataaataaaggtcgaagagtcgttaccaaaacctttgaagccgcttttcggctctcgggccctccacgcggccagtgggtctctcccacctccccgcccccagctgctgctgggcagggagcatttgcttccccctccaacccgggaccagggtggaggagtctatggttaaagcgaaagtgtttcactgcggcaacgctggggaaaggaggttcttttttcctgggctgcagcaggtggacagtaaggcccgagaaaatgtaatattttaacaaaacgcaccactccccgaaacacacgtatacgacccacacagggacacaaacaaccacacatgtacacacacacacacacacacacactcacacacacacaatcacgcagggcggggagggttctcagcgttccctgagcgccctttggccttagagacagggaataaattcttctttccatccctcggccccctcccagagggcagcgacgaaagccctggccgagcacaaggatcggtgatctgggctcctggaggtaccctctagatggggtaaggacggggaaggatcaagaggttctgcgggaagtgtgcggggctggggggcgggggtgcccgccaatgtccgcagaaggcaaggaggcccactcgaggagggctggatggagacagacttgagtcgggccctgagccccagggagtgcggcccggtagatctcggggcgaggggaacaggatcgggtacacttgatccggaacaagaacgcctcggcctggcggttgcccgttagtcccggatcccagcggccgcttcaccactgagcccgagccgccgagggaattttccaaatgcaaatcaaacacccttggcgccccgcttcttcattaattaagaggaacgtttcgacaaaaccggcgtaatctttattaattacgcagcccttagcgcgccgttcgcatcaatcacgcccaaagcgaaagtgcagggggcgcctaatcccttcccagagcgcgtttggagaaggagccgcgtggccggcgtttccaccgtgacttccacctttctgggctcgcctggcactggctgctcagccggcgcgcagggaggcctttccggaaacaccggctggctgcgcgctagcaggaccgctctagatcccctgacaggccggaaaataacccccactcactatttgggcacgcgctcgtacgcagaaactcgcacagggactcgcgtggacactttatggcccatttcctccgtcccctcacccttaggctcagtggggaccacgcggttctcagtcctcctcttccctaggaccctctaaaaaggagcctggggcgaaatgacagagggaggcagaaaacctcctgttgccccaggacgccccgaaaaactgctctgggggatggggcggggaagaccttag

SEQ ID NO: 2255 - DNA, 30 bp, Homo sapiens
  chr2:223171536-223171566
  hyper
atttccgggtagccccgcagcagtcttgtc

SEQ ID NO: 2256 - DNA, 244 bp, Homo sapiens
  chr2:223171834-223172078
  hyper
ggactggcctgcccaccctcacgtcctcgggcgcccttggctcgagggcctttcggagcctccgcgggaagcagaaagtcgcacctcacactgagcctttccttcgagcgctctgccgggagctactgagccccagcacgcagccttgggcacccggtggcgggcgaaggaacctgccccattgtgctgctgggctgcactagcggagacgagagtgcgtgtgggagtggcccactagcaccac

SEQ ID NO: 2257 - DNA, 478 bp, Homo sapiens
  chr2:223176033-223176511
  hyper
ctcaaccctcctcctctaagtcggtcgggacaatggcaggcggaagatgaagatataaagtaagaattctaagcttctcgccttcctgttacagccgatctgctctgcatttggaatgcggcgtctttgcgggcgttctgagtcattcctactccgctgcaagccccgcagagaacctcgccttcttcccgaccgccaagtctgattgtacagacttcatagaaggtctggaataaggactgtgttgctgcagaggccgggtcttgggcccctgggcgtgaggacgcaggctcggcccctgggaagaaatgtactaacgcacctcaagactcctaaggtgtttccaagtcccccctccaactttcgtgtccaggtcacgctgccccgccctcggacaatgagagggtgtgtcaagatgctctttgcatctttggaagccgagggggaaataggagactttcgacggggagcaggtttt

SEQ ID NO: 2258 - DNA, 488 bp, Homo sapiens
  chr2:223176719-223177207
  hyper
cgtgggcatcttggaatattaaaaacgtcatccggttgtaaataacctactccccagcccttgaaatccgggacgtcacaggtgaggctgaataccaggttcgcacaaaggcaaaccaaactcagccgggatgccgagtgatggggttggcaagatagtgtggcctctggttccctccacgcgtgataagtgggatcatgacagcgtccttgtgccttcgatttgtccccaagccctcctctgcctttccgatctcaaactaacccgtaatggagctggcaagtgggacgaacgggacagcctaaagcgtcgttggcccggccaagaggggctcaacgcctgtcaccccgggcggccttgggtcctttgcagtcggagaggctgcaggggaggaggaagacccagccagctccagggtgcaggattctgcccttccacccgagagcctcccccggtgtcccagtggcagtggctgccccgggctgcgg

SEQ ID NO: 2259 - DNA, 367 bp, Homo sapiens
  chr2:223177244-223177611
  hyper
cgccctgccccttgggctcagctgcgagccaccgccggcgtgcgcacccacaaggagagaaatggaggtaatcccccgcttcccaccgactgccggaagctcggcctctgtgcaaaccgaagtatacctgcacccaagagcgtggaaataatttacacgctgaatggctactattaaaaaggatctttttaacagatctcctggcgagtattttaaaacaggactctgcgctagatcagctcgcccgtcggcagctgtcagcgaccagccgacaagctgagattcccctttcagctgtcactggcgatgacacccacatctatcactggcgatgttttgttaatttaacctcgagacttccctgatt

SEQ ID NO: 2260 - DNA, 11 bp, Homo sapiens
  chr2:223177813-223177824
  hyper
gaacgcaaagg

SEQ ID NO: 2261 - DNA, 491 bp, Homo sapiens
  chr2:223536120-223536611
  hyper
ggcggcaggagcccgcgctgcccggctcgggctggctgccagttgacccctctccccgtccctcgtgtcccacgcggcgcactctcgccaacgcccggcgcgccagccaatgcgcccgggccgctgtagctgctccggggccagggcgctgggccagctctggcgcccggcgcttgtgattggctgcccccagcctcagcccagcgcgccctcccacccagggcgcagttgggtccccgctcgctgcctagcctctgccttttcctctccgcccagccagtgcccagcgcggggcccggatccggccgggcacttcccacaggcgccgcagagcagcgtgggtgcaggctgcagtggctggcgccgtcctcgcccggccaggccatgaaggtagagtttgcaccgctcaacatccagctggcgcggcggctgcagacggtggccgtgctgcagtgggtcctgaaatacctgctgctcggtaaggaccccgc

SEQ ID NO: 2262 - DNA, 30 bp, Homo sapiens
  chr2:223725609-223725639
  hyper
ggccgccagcgccgcgctccccggcccgaa

SEQ ID NO: 2263 - DNA, 65 bp, Homo sapiens
  chr2:224702684-224702749
  hyper
ccggggacttttcgcgattctgccgcgcgagtgtgtcctgtattccttccgcaaacgtttatcaa

SEQ ID NO: 2264 - DNA, 50 bp, Homo sapiens
  chr2:224809133-224809183
  hyper
ccctggttggaggagcgcggtgggctgggaggggcgcgttggtgcgcact

SEQ ID NO: 2265 - DNA, 30 bp, Homo sapiens
  chr2:224904611-224904641
  hyper
tgaggtacccgcagcgtcctgggaacccag

SEQ ID NO: 2266 - DNA, 31 bp, Homo sapiens
  chr2:225381703-225381734
  hyper
tactgtcataactaatcgtgttttacttctc

SEQ ID NO: 2267 - DNA, 76 bp, Homo sapiens
  chr2:225906070-225906146
  hyper
ctgttgttcccactcgcttcccgtttccactagagttgatttgtctcttgccacctctccccggcagtgtggacct

SEQ ID NO: 2268 - DNA, 375 bp, Homo sapiens
  chr2:225906403-225906778
  hyper
gtgggtttttaccctgcggtgggagggctgttccaagtacatctatttctgcgatagttaacgtcggggggccccagctctaaccagggcgaggaccacggactgcatccctctctctcagcgcactggtctgtttactggagggtgagagggacgcgcagacctccggactcaggggttctgttctgtagatccccccaccccacccggggtctctggcactcgtatcacttagcaccagtgtgactggcggtgcattccggccccctcgcgccccattaaagcccctgcacatcctctcccacgctgcgcttctgctacccacgcagctgctcctctgagcgtcccgcgtgcacaaacgcgcccccggtcctt

SEQ ID NO: 2269 - DNA, 571 bp, Homo sapiens
  chr2:225906790-225907361
  hyper
cgctgcctcgctgaggtggcgccgggggagcccgcagaggcggcgggggagggagtgcggaggagaggacccgtgagctgcggggacctgggcccgccgagcttttggggaagctgggctccgttccccccgggcgcctggggcgcgcgggaaggcgcggaggacgcgccgcactcacccgctgctgctgccggctgctgactgccaccgcggcggcggacgcggcgctgtgccggagctcggccgcctgcccaggtctcaacaggctccgggtgaacctgcgggtccgctcaccggccatcgccggtcacgccaatcgcgccgcgggcccggggcgcgcctcccgccggtcttccccgcgccaaccttctctatccacccgccgttcaggaagcggaactcggagccttcccccccctcttcctcgctcaactcgcaagaggcgggtttttctctcttgcacccccactcttcccacccccttccctcctctgaagcttctcgaagactttccaaactctgcgctcccccgggcgcgcgcggccaactcggctggcggccgggccctgca

SEQ ID NO: 2270 - DNA, 114 bp, Homo sapiens
  chr2:225907439-225907553
  hyper
cggccggggctgtccacgccgcccgggggaactgcaggctgcgggggagggcggggggcggccgccgaggggctccgggcggggcctgtccaaggccgtcgcctgtccaaggcc

SEQ ID NO: 2271 - DNA, 31 bp, Homo sapiens
  chr2:227656659-227656690
  hyper
gaaggaatgcaggaagcggaggtgacccgga

SEQ ID NO: 2272 - DNA, 30 bp, Homo sapiens
  chr2:227663896-227663926
  hyper
gaagcagcgattcccgaggcaaattaaata

SEQ ID NO: 2273 - DNA, 30 bp, Homo sapiens
  chr2:228337227-228337257
  hyper
gactgcgaccagcgcggccccacctacgtt

SEQ ID NO: 2274 - DNA, 16 bp, Homo sapiens
  chr2:228582819-228582835
  hyper
cgtccagacctttcat

SEQ ID NO: 2275 - DNA, 80 bp, Homo sapiens
  chr2:228736215-228736295
  hyper
cacctccagaacactcgccccccgcgcgccggagccccgggtcgccaccaaccgcccgcggagccagacctcccagctct

SEQ ID NO: 2276 - DNA, 139 bp, Homo sapiens
  chr2:228736335-228736474
  hyper
cgcgtcccgctgctgtttagccgtttccaaggctacgaagcccatcggccggggataagagagcaagaaaatgaagctcaagagcctcctgctccggtattacccgccaggtacgcaccagcccggccccgtcatcccc

SEQ ID NO: 2277 - DNA, 30 bp, Homo sapiens
  chr2:229045943-229045973
  hyper
ctccaagctgtgtccgcggaaagtccggct

SEQ ID NO: 2278 - DNA, 30 bp, Homo sapiens
  chr2:230785682-230785712
  hyper
ttaatcgcctgactcgctctgaatgctaat

SEQ ID NO: 2279 - DNA, 31 bp, Homo sapiens
  chr2:230786011-230786042
  hyper
tcccttctctgaccctcgcttcccacaactg

SEQ ID NO: 2280 - DNA, 140 bp, Homo sapiens
  chr2:230932577-230932717
  hyper
ctgcgcgccctgggtgcgggatcgtgcccgcggggtccggcctcgcgccccacccttcgagcgcccgcccccacccgcgctcggtgctcccgctcccttggcaccccgagaccacatccccacttcgggcaccccgcatc

SEQ ID NO: 2281 - DNA, 31 bp, Homo sapiens
  chr2:230933366-230933397
  hyper
agatttgttgcaatgtcgcctatcatcctgg

SEQ ID NO: 2282 - DNA, 70 bp, Homo sapiens
  chr2:231191861-231191931
  hyper
gtgagtcagtctgtcggccgacttcctgctccgggtcagggcagccacactgcacgcaggctgggccgac

SEQ ID NO: 2283 - DNA, 237 bp, Homo sapiens
  chr2:231692870-231693107
  hyper
cgtgaggaccacaccgggaggcgccgtggggggcgggagacctcagccgcggggcggagaagggccaggcgcgcgctcctggaggtacggggcgcgcagccccgaggtgtgcccgggccgaggtgggcgtctcccgggcgcgcccgggcgtatggcggcgtcgctgggatgccagatcccagggagctcaccgaggccacgccgatggccacccgggtggagcctgggctgtgggct

SEQ ID NO: 2284 - DNA, 452 bp, Homo sapiens
  chr2:231902080-231902532
  hyper
ccctcttcctcccacccgggcccgcgatgcgggctgcgcccaggggcgcgtgcacacagaggccccgcccgggggcccgggggtccggctgggctcggccctcgggggcgtgtcctctgtgccggggcgccaccgccccgagaggcgggcagcgggtgcgcccgggccgcggcggccgcagagggcgggcggcggccagcatggagcgcgagctggaggcgctggcggcccggcttgcgcgccctgccgagccgcccttccaggcgttggtggaagcggcggggggccgcgggcaggtgctgctggtgggcgagctgtgggagcgcgaacagagccgcgcgctgctgcgggacttcgcacgggcggtgttcccgccggagccaggcgcggccaagccgggcggcgcggcggcagagggcgcggggcccggggcggcgcgcggggcgcagagg

SEQ ID NO: 2285 - DNA, 121 bp, Homo sapiens
  chr2:231902950-231903071
  hyper
cggtggctcgggcacgtcccccaagttggacccctttggccattcccttattgagcaccgaggtaaactgaggctcagagcagggaggtgcctagagccaggcctcgcagctagcggagag

SEQ ID NO: 2286 - DNA, 30 bp, Homo sapiens
  chr2:232260992-232261022
  hyper
gcaggtggagcgcccgcagcccagggcctc

SEQ ID NO: 2287 - DNA, 30 bp, Homo sapiens
  chr2:232478345-232478375
  hyper
ctatagaaaaaacccgtcgtgctgcctccc

SEQ ID NO: 2288 - DNA, 30 bp, Homo sapiens
  chr2:232479660-232479690
  hyper
acacggctgggggacgactacgtgctccct

SEQ ID NO: 2289 - DNA, 39 bp, Homo sapiens
  chr2:232539452-232539491
  hyper
gcctcgaccatttgtacggaacaccgtgttctgtctgct

SEQ ID NO: 2290 - DNA, 30 bp, Homo sapiens
  chr2:232646275-232646305
  hyper
gttgcactgtgcgacgcgacagagactaca

SEQ ID NO: 2291 - DNA, 365 bp, Homo sapiens
  chr2:232791671-232792036
  hyper
ttggaggactggggtgggaggcgcagggagagcggggttcgcctgggccgcaggggggagcgcaagtcttccacactggagagtgcaggggtgtcgccagcctgagtgtttgagcgcaaggcgggaacgaggggactgcgagcgcggaaccaagatattcatgctcatgcgtgtgctccgcggcatcgtatgctcgccagttactgctctaggttcacgttcagccggtttcggccacacagaacgtcccggggtctgactccgctggtgaactccctctgtgggaacaatgcgcacctgaccttgcctgcacccacgcgaggatccgctgctgggggaagcccgctccagtatcctgtgcactt

SEQ ID NO: 2292 - DNA, 30 bp, Homo sapiens
  chr2:232826185-232826215
  hyper
cgcctggcacaaggcgtctcagaggccgcc

SEQ ID NO: 2293 - DNA, 374 bp, Homo sapiens
  chr2:233283519-233283893
  hyper
ttccagagggctgggaaattgcggctcccgcggctcggctgaacacttcagttaacccagggaaattacttgcgccttcctcccgcgctctgccgccaagcgctcccctcccctgctttccctttctctcctcttgcgcaccctcctcccacgcgcagggacccctagtcagggccacgccccgggtctgcggccgctggctgggcgctcgggaatcgcactcaggcggatgacgtagcgcgaggagttcctgtaatctaggctgatctagagagagaagagcgcggcggcactgtacacgccctgcaccttgtacagcagctggttgaggtcccagctggttgaggtcccgcgacccccggacgctccgccgc

SEQ ID NO: 2294 - DNA, 67 bp, Homo sapiens
  chr2:233284996-233285063
  hyper
tggagtgaggaggtgcggtcaggggcgcgtctatgcggcactttcagctctccgagctggacacaga

SEQ ID NO: 2295 - DNA, 205 bp, Homo sapiens
  chr2:233350334-233350539
  hyper
tgccagagggctgggaaattgcggctcccgcggctcctctaaacaccgcaattaccccagggaaattacttgcgccctcctcccgcgctctgcctctgtgcgctcccctcccctcccctctcctgctcgtctcttccctcctctcctctcacgcacccgcctcccgcgcgcagggacccctgggcaaggccactgcgccccggat

SEQ ID NO: 2296 - DNA, 435 bp, Homo sapiens
  chr2:233350843-233351278
  hyper
cgccaggcccacccccgggccgcgccagcaggcgccgtaggcgctcctcgttttgctcgccgatggccgcgatggtgccataggtgagcttgtcgtcggggatggcgtggcgccgcagccaaccgccgcaggcgaacgagtagaagtcctggcatgggtcgatgctggcgtccaggttggcggccaggaagcgagcggcgcgcgcgaaggccttgcgctcagggcagccctcgggacaggcgccgccgccggccgcgaccgggcccaggtacttgagggccagcatagccgccagaatggcgcagaggccggcggcgaacaccagccccgacagcaggcacacctcgcgccggttccagcgcggcagcccggaccgggccccggtggcgctgcgcgcagcgcccaacgggaagcccgggggcagggaggccccgc

SEQ ID NO: 2297 - DNA, 27 bp, Homo sapiens
  chr2:233351415-233351442
  hyper
cgtggccgccggcctcctcgtgggcct

SEQ ID NO: 2298 - DNA, 178 bp, Homo sapiens
  chr2:233351467-233351645
  hyper
cgggaagggcggaagcaggctcaggaggcgccgcagccggatggggctcagggtcaccgcgaggagggacacaggcctgggtgcagaggccccagccgcgggcctcattcactgcggaaaccagggactatgagggttcggcggggccaccacccccgggtgcacagtggagtcttcc

SEQ ID NO: 2299 - DNA, 277 bp, Homo sapiens
  chr2:233352174-233352451
  hyper
tccccagaacccaaacttgggcgaagtttcacccccggcggggagcgagctggctggcgacccccgagccccggcgccgtgcggcgcagtccgcggagcccgagagccgagcccgggagccgcagccgcagccgcagccggagccgcagccgagaggacgcagacaaagccgggaggctccgcgcagtggcggcggcggcgacggaagtggccgcggtggtggcctcagcggcagggactcgggcgccacttacccggcaggtgcgcgcccgagccg

SEQ ID NO: 2300 - DNA, 7 bp, Homo sapiens
  chr2:233352506-233352513
  hyper
cgggcgt

SEQ ID NO: 2301 - DNA, 396 bp, Homo sapiens
  chr2:233367896-233368292
  hyper
gctcccgcccccgcccgcgggcactcagtctccgctaatggcaggcgacggggaatggcacatctgtcttgccgggaattagttcattgaatcaggcggcccgagctgcggcagcgaccttagccctggccccagggaggggtctgggcgggcggcgtgggggaggttcaggctggagggctgagtgcggggacgggaggaggggactcacctggactcgcgagggggactgagcgctctccaaatataggtcaatgtcccgctcagcctccctcccccagcaccgtgaggaccgaggcctggggcctggcgcccgcctggtggacctcgggggcaggctggggaccgggcccctgcgggacgcggcgcggcaggacgctccccgcgcctttcttt

SEQ ID NO: 2302 - DNA, 30 bp, Homo sapiens
  chr2:233414991-233415021
  hyper
ccatagtacagtggcgccgcgaccgacaaa

SEQ ID NO: 2303 - DNA, 38 bp, Homo sapiens
  chr2:233498141-233498179
  hyper
gcaggtcggggtctccgggacgcgcagacacccagaca

SEQ ID NO: 2304 - DNA, 181 bp, Homo sapiens
  chr2:233498345-233498526
  hyper
cgcgccgcccgccagctccctgcgtcccgtcccgcgtccccgcgttcccgcgtcctgcgatccgccgccatggccagtgaggagctggcgtgcaagctggagcgccggctgcggcgcgaggaggccgaggagagtggcccccagctggctcccctcggcgccccagccccggagcccaagc

SEQ ID NO: 2305 - DNA, 302 bp, Homo sapiens
  chr2:233498571-233498873
  hyper
cggagctgagcgcccagctgagccggcggctggacatcaacgagggcgctgcgcggccccggcgctgcagggtcttcaacccctacacggagttcccggagttcagccgccgcctcatcaaggacctggagagcatgttcaaactgtgagctcccgctgcgcgcccttcgcccccgggaccagggagggagcgggagggctttctggtccgaagtcccgggccctgtttgtgtggggaggggtcccggggtgcaggtagcatttggcccaacgcagccagatcttgcgtgctcgggtctatc

SEQ ID NO: 2306 - DNA, 320 bp, Homo sapiens
  chr2:233498895-233499215
  hyper
cgaagaggggggacaccaggagcaggagctctccgggacggagcccaaaagttctcggcggctgccgggcccgagttccaggtcccccaaccccgaccactggtcccgccccctccgcccgccagtccggagatttgctccgaaagcaacttctaggaaagggagccgtcgccgcgcctcacctgccagctttcactgtatccccccaagggaaaaattagcccctgttggccttttatcttttaaaacaaaaggggaaagttaatccttggctgcagcgcggggtctgatgaatgagcggaggccgagaacggggagtt

SEQ ID NO: 2307 - DNA, 1124 bp, Homo sapiens
  chr2:233740589-233741713
  hyper
gggtgacgtccctgtcggccccgtcacctggggccccagcacctctccttggctttgcagacgatgttccacaggagcccgtgcccacgctgtggaacgagccggccgagctgccgtcgggagaaggccccgtggagagcaccagccccggccgggagcccgtggacaccggtcccccagcccccaccgtcgcgccaggacccgaggacagcaccgcgcaggagcggctggaccagggcggcggtacgggcggggcgggggagggaggggagagggagaaattaggaggggcggggggcggggggcgcggggagaagggccggccaggcgggggctagcaggtgacatggtcctccgtcctccgcagggtcgctggggcccggcgctatcgcggccatcgtgatcgccgccctgctggccacctgcgtggtgctggcgctcgtggtcgtcgcgctgagaaagttttctgcctcctgaagcgaataaaggggccgcgcccggccgcggcgcgactcggctgcactcctcacgcgcctgtatgtccgcgcgtgcgtgtccgcgcatgcaggtgtgccagagcgtgagcgcgcgcaggcgagcgctcagggcgggggtgcgcgcggggccgagggtgggtgccgtgcacgcgcgcgggtccggaggcgcgcccgaattccccgcaggggcgccggggcgtgcgtgagcgcacagcatgtccgagcccgcctgcgtgtggcgtgcacctgagcgcgcgcagggccgcgcggctcggcgtccccgtgcaccacggctggagtgcctcaggagcgcgccgcatgtgcgtgcccggtgcgcgtgcgccggggccgccagggcatcggagcgggtgtgcggccagcggtcttagcccgtccgggggcaccgtcacggtcagggccacgccacgggcggccccttctcccggcgccgcctcctctgcctgggcgcgggccgaggccctcgccgcgctccccggggcctgcctcccatcccgctccgctggggttcagagcgttccgtgaggaggtaagcgctagggcaggagaggccgacagagaccccggggcccgccgctccttgaggccggggttggggagggcaggggc

SEQ ID NO: 2308 - DNA, 205 bp, Homo sapiens
  chr2:234475040-234475245
  hyper
gaaaactaaaaaaacacaactcgagagtctagcctcgagctcgttgtctgcattcctgaattcccaactcctacggccggccgaggccctccaagccaccacaggcccaggggcgcaaaaaggcagaggtccccgtggcccgaaaccactgccccgactccaggagagcgccgcgtcctcaggcaggcctgggcagcctctcgcc

SEQ ID NO: 2309 - DNA, 102 bp, Homo sapiens
  chr2:234475309-234475411
  hyper
cgggcgccagccgcacttactgcctaaagcccagacccccgccctggccaaaacgcgaagcgaacgaacccgccccaactgggcgccgccatgttggcgagg

SEQ ID NO: 2310 - DNA, 37 bp, Homo sapiens
  chr2:234475473-234475510
  hyper
cgccggcccctcgcacggggccttatgggaaatgtaa

SEQ ID NO: 2311 - DNA, 30 bp, Homo sapiens
  chr2:234652586-234652616
  hyper
aggcactggcacagcgagcggcaaggctgc

SEQ ID NO: 2312 - DNA, 58 bp, Homo sapiens
  chr2:234699502-234699560
  hyper
ttataacaggaggtgacgggtatgaagagagcagccaaatgggcgtttgagatctggc

SEQ ID NO: 2313 - DNA, 30 bp, Homo sapiens
  chr2:235404671-235404701
  hyper
tgagggacttcctgcgtttcaggatcatct

SEQ ID NO: 2314 - DNA, 1359 bp, Homo sapiens
  chr2:235859959-235861318
  hyper
gcctgttttacgcgccgggggcccagaggcgcccaggtcagacaaagtgtaaacgattccgaccagagcccttcaatctgcattccgcttcgcaggaaactctcctccttttatgattttcagccggactgccttccctgttgttagtttgtaactttcgctccggcccccgcagcctcgcgcctgccttccctccactgtcctcagccaaggtgtagtaaagcgtctccgaacgcggcgcgaccctcgcccacgcccgctcgcggggggaccgcaccgccccaggggtcctcgctaggggttcccggagaaggggtgggagatgggggtgcgggggggcacaggagcgcgggccagcacccagacctgctcggtaccggggacccagacccgaggatgccgggcggccaaggccccgctaccctggccggctccgggcggaggaagaagaggaggcgcccagactggatacccgcctggacccggagccgcggcaccacccccagcccgccccacgctcgccagcctcagacggccgcgccccgccccgcccctctcccgaagccccgccccggcgcgggaccaccccctccgcggcctcagctccggtcctggccccgccccccgcgcccccgcccccgcccccgcccccgcccccgcccaggcgcgggaccaccctccgcccgccgaggcgggggcccagcgcgcccggcactctcggcggtccgggcccctcgccactaccgccgccgccgccgccgtgagtcccgcggagccgcgcgcgcccccggctgggccgagccgctggccgacgagcggagcctcaggagccggcggggacgccatgcgagccaggtaggcaggcggcggcggggagcgcctcgggcggcagggccctgggggccggcgggggcgcggggtcgtgctcgggggctttgcactcccttgcgggcgcagatcgtgccgcgggcgccgatcgtgccaccgccgcctgagttcggggctgcgcgggtgcctgggcgtggggcggcttcggggaagcctcgcgcgcccctcgccgctcccccgggcgctcgggtctccctggtgctggtgggcagggacccggcccggggttccgggcgccgagccgcagccctccgcgtgcgctcgggccgccccccaaccccggctctggccacttcccggcgggcggccctgcggggtggcctccctgggcaaccggacgcgtcctcgggcgcaaatcggggggcgcgctcggctcacgggggccgtgggggccacgggagggcgtggaggggtcggggcgcccccctcgagcggcgctggggaggagggaaggacgcgcggtctccggtt

SEQ ID NO: 2315 - DNA, 31 bp, Homo sapiens
  chr2:235996528-235996559
  hyper
ctgcccctcctccccacgggtcctcccgcca

SEQ ID NO: 2316 - DNA, 1940 bp, Homo sapiens
  chr2:236402217-236404157
  hyper
cagaaagttaccaaacgcgggaaggggaggctcgccaaccaagcgaggccgtgggacactggcgagtcgcagaggctcctggagccagccgcttggaaacaaacaacaacgcggcgggcgaactcccgggcagcctcccccgtgccggggcgcgggggccgccgcgagaacccgggcaggagctggcaggcgcggggcctggccggcgggagggtcccgcaccccggcccagtgtgaacaccccgcgcacccccctggcccggcccgccgggggcgcggactacaagtcccaggaagcccagaggcaggcgcggggcggggcctggcgcaattccccgggatccggcgcgctgggaagcgccgaggaggacgcagcgccggcggccggagggcggcaagcgcgcgggcaggcggggcgcgggcgcgggcgcgggcgagggcgaaggcgggggcggggccgacgtgggccggagccctgcgtgccagggagggggccggccgggcaggcggcgggcggcgctcggagcgggctccgcggcttgcaaggcgcctgcgactcggtcccaggtcggcgggcggcgcacggcgggctcgcgcgggggccccggcgcgccgggcggcgcagtacgcagcgcgcggacccacgccacggccaggagcccagagcagcgcggccacactgcccaggggtcggccctcggccccggcgctcggagcgcggcggctgcctgggctttaatggctgctccgcggagcagcgcctagggctggaaggcggctgcggctcaggaagtcacccgagcaagcctccttcggggccggccgcacccgccgcggcgcgctccatgggggcgcgctccccccgggcggcccgctgacccgggacgccggggcccgctcgctcgccggccgcgcgtcccggccatgaactgagcccgcgggccagccccgcgcctgctccgcccgcgcctttcttctcgcgcctcctccgcccgccgccggcgggcccggctccccgggggctgcggcgccccgggctcggcggcccgcgggccccggggcgcggggcggcggcggcggggggcgcgcggctccgggcgcggcgcctgcaccatgaactaccagcagcagctggccaactcggctgccatccgggccgagatccagcgcttcgagtcggtccaccccaacatctactccatctacgagctgctggagcgcgtggaggagccggtgctgcagaaccagatccgggagcacgtcatcgccatcgaaggtgagggccgggccgccttggggcctcgggaaggcacggacgcccgcggcgcggcgggggtgtgcgctgtgtgcgtgcgggtgtccacacacgccggccggggcacgcggctgctccgccgagggagcactgcggcgctgcttgtcttgcaaggccgggcgagcgtcgcctgcgccccgccgcgccgcgagctccgccaggaagatagatcgtcagcgttaatttgatcgtggacaatagagtctctcctgcgggaaagtggctcggtgcctccgcgtcctgggctgccggagcgtcccggcccagcagacgcctgggggcagccggcggggtcggcgccacccgacccctgacaggttaccaggccaggcctgggcgtcttgctggacgttgaagacgtgttctgagaagtgctgccgctgggggcgaggcccgggccggcgtgtttgggcggtgcagggctgccctccttagtgtgtttgcttaattcaggggtgcagttgaacttagtggatgccgagagccagccctagccgcgggagcatcgtgtccaggtgcccctgtgcaaacgctggaaccggtagtgtgctttgtaccaaccaaaagtccggggttggattagaggaagaaccctaccaggagggcagggcgtcctccagcggaa

SEQ ID NO: 2317 - DNA, 599 bp, Homo sapiens
  chr2:236577969-236578568
  hyper
gcctcatttaaacgcgcagcaggtgagacatgcccctcgttttgttcttgcaggccaagccccagagtgggcgtggttttagggtgcaggctggtgctgggctgggcccctcggaggctccggtccgcgctgcgtcgatccatcccggcgcttgggcctgcacgccgccgcgctcgccgccgccgccgccgccgcgctcccgggactcggccagcccggctgggcgcgcggcccgcggtcccttgcacgtcggcccccgtcgcccgccccgccccggcgcgcgtttccattttaaaccgccgcccgccgcccgccacccgccacccttcggccgcagccggtgcagctgtccgcgcgtcccggagcccagggagtggcggaggctgcggaaccgccgagctgtgcagccggagcgggaggatgcgcacgggccccgcgtcgtagacaatgaagccgcgggcgccgccgcctgccctgggccctgcgcaccgcggccgcacctgccggcgagagcgctctagcgcctgaccggccgcctcgcttggccccgccggcccatggctcggcgccccgggcccggaccccggcactcgggcggc

SEQ ID NO: 2318 - DNA, 30 bp, Homo sapiens
  chr2:237072658-237072688
  hyper
ccattttccgccaccggaactgttgggaac

SEQ ID NO: 2319 - DNA, 823 bp, Homo sapiens
  chr2:237075812-237076635
  hyper
gcggcctcggccaaacgcatcgtcagatagatatgtggcccagggcagcagctggtcgccgggcgctaaacgccccccctcccgagaccccgcttgttgggtggctctgaatgtcccccggaggcccagcggcacagccgggcctcatcctccagctcctcccgcgggggtcgagcgggggcgcggcctcgcccccttggtctcccgcgggaacccggcgctggcccgcccccgcctcctcccgccccctcgtcccggctgcgcgcgccgccgactcaccgagcgaagcctgcaccgtctcggccgcggagaaggcgagcagcgagccctctttggccaggaagcctttgccgtcctccgcgtcagcctgcagcgcctccgccttgtcgaagttaccgccgccgggcagcggctgcggcgcgaacttgcgggccgctgccgcctcctggtgctggggcgacgcggagaagccgccggggagcgtggccatgagcgtagaggtgagcgccatgccctgcgccaggctggagcagaagcctgtgggcaggctggggatctggtggtgagggtgtgcgggcggcagcgctggctgcagcgcggcctggggcagcgcgggcggcggcggcggcggcggcggcagcactaccggccggtagggcatgaacatggggtagccggtgtagacgaaatggccggggctgggctgcggcgggctgccgatcagcgagtctatgctgaaggcggtgctactccccagcgggcgctgcatcatcatcagcgacggcgggaacgctgcgctcatagacgcgctcggtagaggcca

SEQ ID NO: 2320 - DNA, 176 bp, Homo sapiens
  chr2:237076656-237076832
  hyper
cgccgcgccgccgccgggaagcccgccggacgccgggagcaccgccgggagcgccgggcaggggccgagcgggacccggagagcagacgcctccgcccctcagtcctgggcccgctgcatgccgggcgggtgcagggggtgtgcggggtgaggccgtgcgccccggagtggagagg

SEQ ID NO: 2321 - DNA, 383 bp, Homo sapiens
  chr2:237080167-237080550
  hyper
ccagcccagcccagcccaatccggaggaggaagcaccgcgaatggcgcgcttcgctgccgccgccagagtcgaggtaacgggtggtcgtggagagggtacggtgtggccacccgtggtctcggaggacgcggggaatcctgcgggcctcgagggtctggcgctcccgccagtcgcccagtcctaggcgacaggctggtttctcgggcaaccgagttgtttttatttacagggattttgagaagcccgatcgtttggtcattgccgcagctcttgctcctggcaatagttgggaaataacttgggatgggttttatttatggaagggcaattgggattcacacccagctaaccctgaacagtccctcccgagcccaggacgcac

SEQ ID NO: 2322 - DNA, 280 bp, Homo sapiens
  chr2:237082343-237082623
  hyper
cgtccaacacacggagaaggaagaagcagaggccagagacgatggccggcgcttagctgtgagccccatgagcttccaatgctcgccaggagaccgtgtgtctaggagaggcaggccatggaccctatgagtcttccctggaggctggaaccccccgggactcctggacaccccaaaccaagtccccagccgctgcctccacgacggccccgacccccttcagggaagtagtattttaaagaggatgcggtctgcccggagggcacgcatttaacccttt

SEQ ID NO: 2323 - DNA, 30 bp, Homo sapiens
  chr2:237087220-237087250
  hyper
ctcagggatggcttcgcctcgccatttgca

SEQ ID NO: 2324 - DNA, 30 bp, Homo sapiens
  chr2:237088182-237088212
  hyper
cccacccctcccggcggctgcaagctcttc

SEQ ID NO: 2325 - DNA, 98 bp, Homo sapiens
  chr2:237436059-237436157
  hyper
tccttcccaatatgggcgccttttttctagagaagaaaattttagttccgtttcttcttccagagctgagacctttcactaaacgacacattactgcc

SEQ ID NO: 2326 - DNA, 30 bp, Homo sapiens
  chr2:237714754-237714784
  hyper
cctaaacaagaacaatggtctgtagattgg

SEQ ID NO: 2327 - DNA, 50 bp, Homo sapiens
  chr2:238384222-238384272
  hyper
ctctgtcgccccctcccggagcggaggagtcacggcgggaaacagcccga

SEQ ID NO: 2328 - DNA, 862 bp, Homo sapiens
  chr2:238395040-238395902
  hyper
tccctaatgtccattggaattcggaaggacaggcaggccgggcggactggagacggcggctcgccttgggaccctctgagcttgcgggccccgctgagcacccaaaggccggccctagagtccaggagaagagcgcagcggcgcggagctcccaggcgttccccgcagcgcgtcctcggtcctggaaccaccgcgccgcgcgtcctggcttccacatctgccccatttgcccgcggatcttgactttttcttggcgggcaaggcctcggtctcctccccgcagcagggctgcccgcggctgcgggaccctcctggtcctgatgcctggcagaatcgaaggggtgagggtacgctctctgcagcagaaagccctgggcttaaagtcctatttattatttggcgttgccacttactggtcggtggctttggtagggcgcgtttctgagcctcagtttccccatttgtaaagccgaagtacatagcgctttccctgcagagttagaaatttcgacgatgtgccgcgcgctctagagcgcgctcagcaagcgggtcccaccgtgcccaaggcaggaccgcggcgcgatgtcacctatgcaaagtcgccgcaactcacgggaatcgcagctgtgtgctcaactttcccctccccgccgccgtctttctccccaaactggcttgggggtcgagtatccggggctctcccccgcactggcgcttcccgcgcgggcgccccaggtgtccgttccgttccgccctctgcctggcagggcatccagaggtgtccgcgctcccggagctgggcggagcggggcgcagcccacgtggttcgggcgggaggcgccgggacgtggccagttgcccg

SEQ ID NO: 2329 - DNA, 724 bp, Homo sapiens
  chr2:238536092-238536816
  hyper
cgcgctgcggacctccggctctggcttcccccgggtccccgcggcccccgtccccccgcgtccccgcgtccccggcccagcgcccgctgacgccatgacgccgcggcggagggaggggccggggccggggccgggccggggcggcgcgagcggctggagcaacgggccccgcggcagctgcgggcgacgcggtcgatggacatgggcacccagggatcggggcgcaagcggctccccaaccgggagcggctcacggcggaggacgacgcgctcaaccagatcgcgcgggaggtgagcgctccgggagggcagccggggggcgccgggcgggcgcgggggccggacggctgtcagggtctctccggcgtccgtctgtcccgctgtgcgtctgtgccactgcgcgtccggctccaggcgggtgggccgggcaggcgcgcgccggggcgctgatccccaggcgctgcgccccggccccgatctccgaggcctgcggaccccgcacccgttctccagccccgggcccagcccgcgacgctgcgcgccctcccccaccccggccaccgtcggccgctgcgccctcgggagaggagccgggcgccgccagcgcgcgaggtggcccgggctggccgggtgggggcgagcgccccgctttgttgtgcggcatgggaggaggcgggggcttaggcccgacctggaggcagtggacggtcgccggaggccacat

SEQ ID NO: 2330 - DNA, 31 bp, Homo sapiens
  chr2:238791402-238791433
  hyper
ggccctggagagaacacgaaggcacaaatag

SEQ ID NO: 2331 - DNA, 40 bp, Homo sapiens
  chr2:238864944-238864984
  hyper
ctccgcgtcccccgcgggctgtcccggcaggcaggcagcc

SEQ ID NO: 2332 - DNA, 52 bp, Homo sapiens
  chr2:238876149-238876201
  hyper
ggctgcctgccttgtacggaggaagcggggcgtccagcgcctggccaaggtc

SEQ ID NO: 2333 - DNA, 1 bp, Homo sapiens
  chr2:238967038-238967039
  hyper
g

SEQ ID NO: 2334 - DNA, 30 bp, Homo sapiens
  chr2:238969813-238969843
  hyper
cggccggcgcctgtcgccgattgtcccgcg

SEQ ID NO: 2335 - DNA, 268 bp, Homo sapiens
  chr2:239148252-239148520
  hyper
acccgcccgcccgccccgcagccccacggcgcctgcccggccgccgcacctcggcgcccgccagcagcagccgcagctcctgcaggctctcgttgatccgcgcgcgccgcttcttctccaccaggggcttccgggcctgcggggagcggggcactgaatcccagccccgcacggcctcccgcccgcttgctcgcccatggccccggcccgcaccttgcggtcccctcgcgtctcccagccgtcctcatcctcacggcccacacggtcc

SEQ ID NO: 2336 - DNA, 31 bp, Homo sapiens
  chr2:239148798-239148829
  hyper
gctttgtccggcccagcggctctggcggtcg

SEQ ID NO: 2337 - DNA, 31 bp, Homo sapiens
  chr2:240294440-240294471
  hyper
caacaggaaacctttgcgtggttgctgtcca

SEQ ID NO: 2338 - DNA, 143 bp, Homo sapiens
  chr2:240402417-240402560
  hyper
ctgcccactccacacccgccaccttagttacttccagccctgggccctctcctccagagaactgggggtgcctctggcttttcttctctccggatcccactgtttgcttagttgctagagtgttctttaaatttatttattta

SEQ ID NO: 2339 - DNA, 37 bp, Homo sapiens
  chr2:241374578-241374615
  hyper
ggaggcgccgggagagcgttctcggggcgcgctgcca

SEQ ID NO: 2340 - DNA, 255 bp, Homo sapiens
  chr2:241375328-241375583
  hyper
ccccgccatggagctccgggcccgaggctggtggctgctatgtgcggccgcagcgctggtcgcctgcgcccgcggggacccggccagcaagagccggagctgcggcgaggtccgccagatctacggagccaagggcttcagcctgagcgacgtgccccaggcggagatctcgggtgagtgagggcgcggcgccgggaacccgggcctggccgggctttgggctccggaccctggtcttcccgacgcggctactcg

SEQ ID NO: 2341 - DNA, 30 bp, Homo sapiens
  chr2:241376010-241376040
  hyper
tgcccggggattctcgtagggtctccagca

SEQ ID NO: 2342 - DNA, 145 bp, Homo sapiens
  chr2:241393217-241393362
  hyper
gggcgcccgggacccccagggcggcgacgctgccgccggtgccgccgagcctttgttccgccgccggggccggtttcacgcctgtcgccctcgcaagcagccgcgggtgacaggagccttagccggcctggggcgcggaccctcc

SEQ ID NO: 2343 - DNA, 30 bp, Homo sapiens
  chr2:241499836-241499866
  hyper
catgggacgcagagcggtccaaggccccgg

SEQ ID NO: 2344 - DNA, 30 bp, Homo sapiens
  chr2:241760767-241760797
  hyper
cagctgcgtgcgagcgccttgcaggtggct

SEQ ID NO: 2345 - DNA, 30 bp, Homo sapiens
  chr2:241771840-241771870
  hyper
cctgctgtaggccccgcctgctataggccc

SEQ ID NO: 2346 - DNA, 31 bp, Homo sapiens
  chr2:241902830-241902861
  hyper
catggggtgagcaaagcgcatggggaccaag

SEQ ID NO: 2347 - DNA, 35 bp, Homo sapiens
  chr2:241938220-241938255
  hyper
cgccagcgccccgtcccgcccgcacacctccgcga

SEQ ID NO: 2348 - DNA, 30 bp, Homo sapiens
  chr2:242088872-242088902
  hyper
aaggagcccttccgcgcttttatcccaccg

SEQ ID NO: 2349 - DNA, 58 bp, Homo sapiens
  chr2:242157857-242157915
  hyper
gggtggggtgggggtgcggcggtggggagccgggaggggcgggcgccgccgggcaagg

SEQ ID NO: 2350 - DNA, 30 bp, Homo sapiens
  chr2:242212407-242212437
  hyper
tcgggtggggaaggcggtgccgaggagttg

SEQ ID NO: 2351 - DNA, 30 bp, Homo sapiens
  chr2:242269506-242269536
  hyper
ctttttacatatacacgagctagacatgga

SEQ ID NO: 2352 - DNA, 251 bp, Homo sapiens
  chr2:242448321-242448572
  hyper
gtctccgacgttacggcggccgcgcggccctctcccttgggctctgccctgcgcagccctggttcgagcgggccagtgaggcccggcgccctccccgcctcgccacgaggatccaccgcggccgcccaggcttctagccttgtcgtcacggcacggagataagcccgcgctggccacatcgcgaagcccctgttcgtactgagaccccgcccgggatcacgcgcacaggccagggcgcaccaggccttgga

SEQ ID NO: 2353 - DNA, 219 bp, Homo sapiens
  chr2:242498046-242498265
  hyper
gcgcatccagggaactcgctcggtcctccttaagcggggaagctcggaaagcgtctccccgactccgcccccagggttgcctttcccttagaaggccaagccccaagcccagcctctcgccagctgggagtcgcgcgctgcccacctcgctgcccaggcccccgacgccgcggcaggagccccccaagagcgcgggaagccccgtggacctggcgctcc

SEQ ID NO: 2354 - DNA, 105 bp, Homo sapiens
  chr2:242498764-242498869
  hyper
ggcgccggctacggcccttcccgagggccacgcccagcccggcgccccgcgcgccccgttccccgcgccgcctccctccacccggctgagcgcttgtgcccgcag

SEQ ID NO: 2355 - DNA, 42 bp, Homo sapiens
  chr2:242575607-242575649
  hyper
aaccctataaataacacgtgccattcccgtctttaaaactta

SEQ ID NO: 2356 - DNA, 30 bp, Homo sapiens
  chr2:242642357-242642387
  hyper
atcctcatggtcttcggcctggcacccgcc

SEQ ID NO: 2357 - DNA, 507 bp, Homo sapiens
  chr3:238208-238715
  hyper
accgagtgaaaccatcggggagggggtggggggcgtttcttttaaatgtcgcttttgcagataaacgagcagggatcctacctcttttgaccggagatgttgaaaagcacgaccaaagtttttggcttggtctcttgctttccacaacgagataaagtctgaagcctgtaactctccctgtcccgcgggagcgtgcaaagggagggaagataagcggcgtgggtgaggggtggcggcgcagaacccaggaagggagcagaggcgagagccagcctccggcaggagggcgtagaccccggtgccagccagaacggctccagccttcccgcggccagagagccagcggcgggaggggacgggcgggacctccgcggacagccccgggtgcggaccagcgggcagcggccggcgagaccctccctggatccgcccagagcttaccggaccctgcgcgcccccgtcccggctcccggccggctcgggggagaaggcgcccgaggggaggcg

SEQ ID NO: 2358 - DNA, 119 bp, Homo sapiens
  chr3:239006-239125
  hyper
gggcgcccgaatccgccgggtcccactcacgcccgccggccgccggtaggttggccctcccgcttccagcctccgccaccccatccctcgctgctctctgaggaggattccagaccccc

SEQ ID NO: 2359 - DNA, 710 bp, Homo sapiens
  chr3:239158-239868
  hyper
cgaggtctagctggtctgggggtcagtcccggcctctgtctcccaccgcgcccctcgctcccctggacaccgcctggtgtgtggggctcagacccccccagtccactgcccctgtgtggctcctcctctcaggagaggattctagatcccagcccggggggggttccgaaaatgccgccagcctggagcggggaatccatggaccgtggggttgtggggttggggagcacgaaaacccagagaggggctagagctccacctccccagaccgccgaggggcgagagggcgcgccgggggccgtggttgccatggctcctggtagcggagcccggggggctggagatgccggtcgcggatggtcccttcttcctctttgtgcctctctctttctctcgctttttttttttttttggagtgtgagtgtgcgtggggaggcagcacggagaaagtgattaatttggggagcagggattggagccgggaggctggggaaagccagcccctccgttcccactctccgggctcgctgcgagccacagtgtctcagccaggggcagggccggggaactcctgcgaaaaaccacgggccggaggagcagcagccgcgcgggcccaggtacccccgccccagacggccagcagggtggagcgcagggtgggcgtttgggctgctgggcgggaaggcgggcggggaaggggtgggaggccg

SEQ ID NO: 2360 - DNA, 39 bp, Homo sapiens
  chr3:240109-240148
  hyper
gggctcgctctaggcggaggctcccgggacgcccacgtg

SEQ ID NO: 2361 - DNA, 30 bp, Homo sapiens
  chr3:2139671-2139701
  hyper
gaatgaccgtggcaacgtcgttcaaagcac

SEQ ID NO: 2362 - DNA, 37 bp, Homo sapiens
  chr3:2139938-2139975
  hyper
tggcctaagttcaatgccacccgcccacccacattcc

SEQ ID NO: 2363 - DNA, 110 bp, Homo sapiens
  chr3:2140037-2140147
  hyper
cgatcccccgaattccgcgtctcccggaggccagaggtttgggtacccaggaaggtcgcgcctcctcgtgccccgatactcgggttgtaaagggaggagacatcgcctcg

SEQ ID NO: 2364 - DNA, 253 bp, Homo sapiens
  chr3:2140181-2140434
  hyper
cgtccccgcacgggaatccggctgataatctcctcttgcctgagaatcgggccaggcgccctttactaatttcgcgcgctggggacctggggctgccgcctctcggccgcgcggggcaggtgctgcgtccccagcgctcgcctcctccggccgcgcactgagcatgcgcgggctccgggcctccggcgcgtctccccgtccccgctcgtctcccgcccgttcccacccgcccgcgcctctccccttccccgag

SEQ ID NO: 2365 - DNA, 570 bp, Homo sapiens
  chr3:2140827-2141397
  hyper
ggggccgtccagctcagagcccggaagccctgcagggtcggggagcgggagctgaacgcctgagcgcggaggactcagggccccgacgacgccaccgtcaccccacagcgacccttcttctccttctcagccggaaaataagtttgttgcgctgcgaggcagccacaaaacaaggaaccgagagcccggaatgctgcgggaagccttcaagtcagctcctccgactggttcgggctactgccccctctccgtgcgccctggcctctggcgccgggttcccggcggggcttttcttctgacagcccagtcacagcccgcagcagagggacgcgaacctggggagtggagggacctgggactaaaggaacaggagcccgtagccgtggtggaaggagccgcgtggagacggaggctgatgtctgtggcgcccgctgggtgccgggctggctgctgagcgctgaggctgcggcggcgagcgacaggccaggtgcctgctcttagggaaggtacctggcttccccagtctctgccgcgggagcctgttgggtggcattcgtttccagcaacttc

SEQ ID NO: 2366 - DNA, 1856 bp, Homo sapiens
  chr3:3840368-3842224
  hyper
tccgaagacctattccgtccccaccctcctccccttcctcggagacacctccacttaacactgccttctcagtccctcgccgcctgtttaaacacaacttccacccctcacaaatcagaaagctgtaatttcaaagtttcagaaacgttttcggaaagcctcctccaatgggaagcgacttcgccgctgagttaagcgtccgaatcctccttcccgcggcagggacaccggcccgggccaggtctgcggaggacgcccccgggcgcgcacacacagcccgaggacgcgccctgtattttaagacgcagggtcggatttcaccccgaaacttggctcccacagccccaggccgaactgtgtctggttctcagcccccgagcccgagttctacgccgcaaagagatggggccccattgtgcctagctggcctcctagcacggacgtgtattttcttttggtctgtcttttgctaaaaaccggcagtgcgcttcgcctccctgcccagccgcagcctgccgtcccctagacaaaaagcggcgaccgcggcccggccacccgagccccgccgcgctgcgcctttgttgggcggtccacagatggtgcccagcacggggccgcgccgagggcgggggcgggaggccgcgaagagggtcgggcgggaggggaggagacggcggagcagccaatccgcgcgcggcccatcagctgaccgcctttgcttacaccaggtgcacgccggctgcggggagcacaaagcggggcgcaccgcgggcgccggcaacgagccggtgaacgaggcgaggcccgtgcgcccgcggctgcaagcgcccgcctggcggggagaggggccgacggcgtcagcccgggcggcggcatccctaggcgcctggggcgccttcctccggacctggccgctcgctgccccgccctctgcaccccacttctccgaccctccttcccagtcctgcctccccctgccctggcctctgagagccgactgagcccagccccgtgcagcagcggttgcctgtgtcgccgcctagtctccggtcttggtgctctcccgggggtgccccaaggagccagtgcgcgctgcgggctgggaaggaggcgccgctcagctagtcctcctcctcctcctcgtctttctcctcctcctgctgctgctgccgccgccgccgccgtgggtgccgggtccgcgcgcaccccaacacccccaccagctgggcctcggggtaagtccctggccggccgcgccgcggcaggaggtgtgggaggcagcgaggggaagtcgaggcaaacttggtggcgtgggagaccctacggggtctggggaacctcagggtaagatcgcgggcctgagggggacgagggggcgcggctcacggagctggggaaaatgacgaagtcgggaaacgagaatatagtgccccgtttccccccgtcccccttgccaaaaaaaaaaaaaaaaaggtgtgggagagcgatagttgggaaggcaggccagatagaaacaggcaaaaaaaggcagtgaccggagccgagcctgctggatttcaggggccgaccaggggagggaggtgcccggggacggggagggaggagggctgccgggatgtgaaccggggaaggcagctggggctggagagcagcgcggaaagggggcccagggagctggaaagagggccaagaggagggcaaggaaggtggcgggcgacggggagaggaaagaaaaagggtgtcttggcggtggccttggtaagagaaaggggcaaggggtataattgacaaggcactgaaagtattgaagtcagagccttgggaaggatctaccgaactctcggcggtccacgcgg

SEQ ID NO: 2367 - DNA, 366 bp, Homo sapiens
  chr3:4910323-4910689
  hyper
cgggcacttcccagcccagcccggggcgccggcttcgccgcgtgcgcgtgcgcatggtggggtttggctggctgcgggatgcggtcgaggccgccgaggccgcaaactccagtgggaaggcggcgtgccgcggccggcttcggtggaggagggggcgtttccccggaaaaggaaggaagtgggtgtcacgggcctcaatacggcccctttgacgtcttgagtgggaaatcacaagatactgctccagattttcccattttatggctaaatccaaatgactcggaccccctgccccatcacatcaggaacttcagcagttccttccaccaaagctcaactattgctgcaagcgctttggtaatcacg

SEQ ID NO: 2368 - DNA, 172 bp, Homo sapiens
  chr3:5019060-5019232
  hyper
ccagttctctaggtcgtcaagggcactgccagttaagactgatcccctaactgcacccgaggctactactcttcgcccagtctcggcagtgaccccatttttttttcaatccttcccacagccaggtcactcagcagtggggtgactgacccgaagcgcagtgggaagggct

SEQ ID NO: 2369 - DNA, 31 bp, Homo sapiens
  chr3:5020396-5020427
  hyper
cggtccctccccaaggcgggcaattcctgga

SEQ ID NO: 2370 - DNA, 30 bp, Homo sapiens
  chr3:5020934-5020964
  hyper
cggcagtggccagacgtgcctggagtcaca

SEQ ID NO: 2371 - DNA, 370 bp, Homo sapiens
  chr3:6903906-6904276
  hyper
tccgaaaacaggctcgtaaaagtgccaggctcctaggagagctggttaggagaatggaataggaaagatgagacgatgcctggaaaccgggcatttcccaactccccagcttcccacccccaagccagcctgccaacctgcactcccttgaaaaatttggagacagccttaaggaggcacttcttaaatcgagggctccgtcttaacctagatgtggatgttaagtccgcatctccctcgggctgatttcccgacctgtagccagcctccgcgagagcccagggcgcgaggtgctgggaccttcctcaggtggagagatgctgcccgcagacgtgacccccggttggtttgctccgggcaatattttgca

SEQ ID NO: 2372 - DNA, 83 bp, Homo sapiens
  chr3:6904532-6904615
  hyper
cggggccccgtggtcctcctgctccggtgccggagggagacggagaaaaaatgggaggaaggcggatccggggccgctgagcg

SEQ ID NO: 2373 - DNA, 30 bp, Homo sapiens
  chr3:8543196-8543226
  hyper
tggatcgcgggagccgcgccgcccgcccca

SEQ ID NO: 2374 - DNA, 31 bp, Homo sapiens
  chr3:8543387-8543418
  hyper
gagggggacagcctcgcgctgggattggctg

SEQ ID NO: 2375 - DNA, 115 bp, Homo sapiens
  chr3:8809599-8809714
  hyper
gaaacactgccaccaccaggtcggcgatgcttaggtgcttcatgaagaagaagaggcgcgagtgcttctggcgtgtggtgcgcagcgccagcagcacacacgcgttcccgctcag

SEQ ID NO: 2376 - DNA, 30 bp, Homo sapiens
  chr3:9746622-9746652
  hyper
cgcaaattcgtcctcgactatttctttgag

SEQ ID NO: 2377 - DNA, 65 bp, Homo sapiens
  chr3:9811684-9811749
  hyper
gtggaggtggagcctgcggcggagggacccgggattgggaggcgaggcaccgctccaaggctggg

SEQ ID NO: 2378 - DNA, 92 bp, Homo sapiens
  chr3:9812388-9812480
  hyper
gagcctgcaactaggacggcaggcaagaggccaaaggtcggtttgctcaaggccttccttgggaagaaatttggtgccgagtggaaagaggg

SEQ ID NO: 2379 - DNA, 30 bp, Homo sapiens
  chr3:9833989-9834019
  hyper
ccccgcccgggggtcgcccaaatgtcccgc

SEQ ID NO: 2380 - DNA, 31 bp, Homo sapiens
  chr3:9851550-9851581
  hyper
ccaaggcaatagcaaacggggcggggcttgg

SEQ ID NO: 2381 - DNA, 31 bp, Homo sapiens
  chr3:9851988-9852019
  hyper
tggtcccaggcacccacgcccagggcgcctc

SEQ ID NO: 2382 - DNA, 383 bp, Homo sapiens
  chr3:9904285-9904668
  hyper
ccaaaggatccatgggaagatcgggtggctcaggggagtgactccccggcttggtcggcgctttgaggccccggggacccagcggagagggctcgggtgaggcatctggaggcgctgaatggggccgggagccgcgggacccgcagagggcgcctgtccgtgtgggcgcagcagcgcctagagggaggcggccccggcagcccgcaggggtcaggctctgctggagcaggggcgtccctgtctccgcttcccagcgcaggctgggtggggccgatggccattaaagccccgccccccgcggctcaccgccgcctggccccgtccccgaggccagaaaagaggagacccgaggccgtcagaccgcctgtcaagggctgtcctgg

SEQ ID NO: 2383 - DNA, 731 bp, Homo sapiens
  chr3:9956953-9957684
  hyper
agtgctcctcctgcacgcggcggactcggaggcgcagcggcgcctggtgggagcgctggctgaactgctacgggcagcgctgggcggcgggcgcgacgtgatcgtggacctgtgggaggggaggcacgtggcgcgcgtgggcccgctgccgtggctctgggcggcgcggacgcgcgtagcgcgggagcagggcactgtgctgctgctgtggagcggcgccgaccttcgcccggtcagcggccccgacccccgcgccgcgcccctgctcgccctgctccacgctgccccgcgcccgctgctgctgctcgcttacttcagtcgcctctgcgccaagggcgacatccccccgccgctgcgcgccctgccgcgctaccgcctgctgcgcgacctgccgcgtctgctgcgggcgctggacgcgcggcctttcgcagaggccaccagctggggccgccttggggcgcggcagcgcaggcagagccgcctagagctgtgcagccggctcgaacgagaggccgcccgacttgcagacctaggttgagcagagctccaccgcagtcccgggtgtctgcggccgcaacgcaacggacactggctggaaccccggaatgagccttcgaccctgaaatccttggggtgcctcgaggacgactggccgaaaagccgcattccctgcctcacaggccggaagtcccagcccagtccccgcgcgcgtccctcttcctcctcatact

SEQ ID NO: 2384 - DNA, 30 bp, Homo sapiens
  chr3:9993716-9993746
  hyper
gctgtggggggtggcggatctctctgccgc

SEQ ID NO: 2385 - DNA, 138 bp, Homo sapiens
  chr3:10052428-10052566
  hyper
ttagggggagaggacccgagttagtgccccctccccaccctgagggtcagcccggggcagggctggtcactgcgccttgaggagcctctcccctatgcccttgatgggtggcccgcaggggacgcggccgcactcggt

SEQ ID NO: 2386 - DNA, 30 bp, Homo sapiens
  chr3:10052885-10052915
  hyper
ttaaaagccccgcccgccgccgctcgccgc

SEQ ID NO: 2387 - DNA, 710 bp, Homo sapiens
  chr3:10206380-10207090
  hyper
cagaaggcctcctgccgctgcggcagaattcccgtgtggccttctcccaccagggcctcagtttcccctcgcagttccgattctctggccggcgctggggtggagccggcggggccgtcgtgccgcccgtggccgctggggacgctggtgccctcccgccccgcccacttccccgccggtccgcccctggctagagaagccgcagcccgcagtgtccgacccagtcgtcccgcgccggagccggccccgtagcgtgccatggcctgctacatctaccagctgccctcctgggtgctggacgacctgtgccgcaacatggacgcgctcagcgagtgggactggatggagttcggtgagtgcggcccggggaggggaggggaccagggcgaccggagcccccagcgatcccgcctggagcggccgccaagctccctcgggcacccgggttcagcgggtcccgatccgagggcgtgcgagctgagcctcctggaccgggtccgccgcggacctcggcctgtcacctgaaggtgccgcgtggtctctgaggacgtctgtcgacgagcaggggccgccgccactgcgctctgagtccagagaacggtgggtacgggggccctcctgtcagcgctgctggctcggtgacgtccccaggtggcctctcatccagcccacaacagcctgcaaagtgcgagcctcgaccctgtagggac

SEQ ID NO: 2388 - DNA, 30 bp, Homo sapiens
  chr3:11034875-11034905
  hyper
ccccttccctcccgcggtgccccactggcc

SEQ ID NO: 2389 - DNA, 10 bp, Homo sapiens
  chr3:11035342-11035352
  hyper
cgtgtactcc

SEQ ID NO: 2390 - DNA, 40 bp, Homo sapiens
  chr3:12045647-12045687
  hyper
tcccacgccctccccgcatagtcacgctcaggttgctgga

SEQ ID NO: 2391 - DNA, 16 bp, Homo sapiens
  chr3:12045978-12045994
  hyper
cgccaccggaccccgt

SEQ ID NO: 2392 - DNA, 181 bp, Homo sapiens
  chr3:12329084-12329265
  hyper
gcatccccctaaacttcggatccctcctcggaaatgggaccctctctgggccgcctcccagcggtggtggcgaggagcaaacgacaccaggtagcctgccgcggggcagagagtggacgcgggaaagccggtggctcccgccgtgggccctactgtgcgcgggcggcggccgagcccgggc

SEQ ID NO: 2393 - DNA, 757 bp, Homo sapiens
  chr3:12329472-12330229
  hyper
cggcctcgaggacaccggagaggggcgccacgccgccgtggccgcaggtcagagtacgggtgcccgcggcgctcgggaaccggctgctggctgggcggggagtgctcagggagggggcgcggagggctggggccgagggtctgggggctagggccgaggaaacgggaactgacggggtcccagacggatgagagctggggagaagggggtctcggctgaggggtccggggctgaggcagggtcatggtccggcaggacccggactgacgggtcgcgggcgggcggctcacgggtgaccgggtgaaggggtcttgggctgagggcacccgggctgagggtcgcgtctaccggagcgcgcactaggggcggagggcgcgggcacagagagccgcggccggtgccgactcgagtggacgcgagccggtgcgtcccggcttccaggacagcccccctcgggagagcgccgggtgggcgcggagccggggacacggggacctccgcgtccccggcggaggtgcgcaagcgtcgggagccgctccgggggaactttggagcagggtgtctggacccggggaagcgaagatccgcgtgcgtccgtcctgaggccgcgcggcacccctgctgaggaggaggtcccgttcgctgtccagagcccaggggcgaccgccgcttggggaccgggggaccgttcagcgaggggcgcgcttgtagctggccaggccctgtgccctgacgcgttgtgctggccctacgcccg

SEQ ID NO: 2394 - DNA, 101 bp, Homo sapiens
  chr3:12330283-12330384
  hyper
cgcagccaggacccccagccgcaccccggggggctggaaaggcgaagtcgctgctttgtgggctcctgcaagtgccaggcgctgaccactcctcctgggag

SEQ ID NO: 2395 - DNA, 31 bp, Homo sapiens
  chr3:12524521-12524552
  hyper
gacccactgaatgctgcgacatgatctcact

SEQ ID NO: 2396 - DNA, 30 bp, Homo sapiens
  chr3:12851561-12851591
  hyper
ggtgtcccgctgggcgccttccacgccagc

SEQ ID NO: 2397 - DNA, 91 bp, Homo sapiens
  chr3:13008723-13008814
  hyper
ccacagtctggcggacgcaccccgccccgcaggcagctttctctcgcacgccgggcgcccggtcccgacggtcacccgcactcccgcacag

SEQ ID NO: 2398 - DNA, 31 bp, Homo sapiens
  chr3:13008871-13008902
  hyper
gcgccgcgccctcacccgctgtcaagctcta

SEQ ID NO: 2399 - DNA, 31 bp, Homo sapiens
  chr3:13138221-13138252
  hyper
cagaatagcactgtcacgcttgaaggaggca

SEQ ID NO: 2400 - DNA, 639 bp, Homo sapiens
  chr3:13323366-13324005
  hyper
ggcacagagcagcagaaaccccgccccagagacaccgaagcctcccagcccccttgtcctgccccagatgggcgcccgaaggtccacacggtgaggctgctccgggtttcgacaccgacactcatgggaggcaaacgggaacccggctggcgggctgcgagccggtagggacgctggggtccagggctgctggacagccccgccctgtacctctccccatccctcacttaatcctgggtccgaaatagccccgggtaatcccagggcgaggcagtcgggaattaaccccagccttgaagtaagagacagaggcgtccacagaagagggctctgcgcgtcccggactggacacagcgcagagtccattccagggacaccgcaacccgcaagcgacccaggcccgctccagggcgggatccgcgcggcccgcgacccctccctaccggtctcgggatctctgggtcggaagttctcgccctgctgctccgagacctaggtccgctccccggacagacctccgcccggctcgtccgagccccgggggtcgccaaccctgagtccgcgccgcagcgcagagccaggccggcgggagcgctgagcagctccctggagcccttttccagggaacccagtccccac

SEQ ID NO: 2401 - DNA, 113 bp, Homo sapiens
  chr3:13324234-13324347
  hyper
gggatggcgccgagcggctgcgggccggggccggggcccgggtcggggcggcgggcgcacgcggccaggtgtcgccggtgtcgctccagcaggccggcgttctcccggctcag

SEQ ID NO: 2402 - DNA, 254 bp, Homo sapiens
  chr3:13324419-13324673
  hyper
gatccgggtcagctcctgcaggtactcggccgcctggccggggggctcggcggcgctggccatggccccccgcccggaggccggccgcgcctcaggcgagcgggcggcggggcggcggcggcgcggccatggctgcgcggcggggacggcggctcggcgcggcgcggggctgccgcggccccgcctcggctcccgcctccgccggcgccgcccccggggcccccgcgcctcctgctccccgcgccgccgcgctc

SEQ ID NO: 2403 - DNA, 199 bp, Homo sapiens
  chr3:13324740-13324939
  hyper
gaggagttttgcaaagtgccggccgcggcgcgggaagagggcggggagggcgccgcctgctgggaccgcccctgggtcccgcgcccccgcaccaggcgtcgggggacagctccatccttctccggccgcctcgggcgccttaaatcggaagcgattccgtgaaatacatctcgaatccatcagcggacgattttaggaa

SEQ ID NO: 2404 - DNA, 30 bp, Homo sapiens
  chr3:13461129-13461159
  hyper
cgccagggcgagggcggtcacagacaaacc

SEQ ID NO: 2405 - DNA, 193 bp, Homo sapiens
  chr3:13590447-13590640
  hyper
cgcgccgggcggcctctaggagccgggtcagcgagtctgggctctgagcgagcggcgccggcccggccccctctccggcgggcggccgagaccccgccccggaggcggaggcggagtcaggggagggggccgggggccggctggtcccgcctctcgcgcctccgccccgccccgcgcgcacacagccaggggc

SEQ ID NO: 2406 - DNA, 30 bp, Homo sapiens
  chr3:13692027-13692057
  hyper
gcacagataagttgcgggccgcgggaaaca

SEQ ID NO: 2407 - DNA, 181 bp, Homo sapiens
  chr3:13920674-13920855
  hyper
tggtgccaaggctccgagcggcggtttatgtttttgccagcgaatgtccttcctcctgggtacctgttccctgtttgcacggaccggccccgccagccacctggggactgcccagtctctaggaacggctgtgccgcgcctcctgagagagttcgtctcgggctccggggactgagctccc

SEQ ID NO: 2408 - DNA, 359 bp, Homo sapiens
  chr3:13921212-13921571
  hyper
acgcgcggaaagggcgcaggcagcccttacccgatccggaggtagaccatgcccaggctgagaaagaggtggcccaggcagcgccgcgctttccggttcatagtcccgattggccgccggggccgcgggccgggctgtgctgatcccgcgggccggccccggcggggcaatcaacatagcccgcccgggaggcgcgagccgaggcgtccccggggccgtctgtcggtgcgcccgtccgcgcgctccgcgcctgagcctcgccaggagcacgggagccacggagcgggaggagggagggaggagcgagcgcggcgtggggcgacgccgggctgcgcgcgagcgaccggtgcaagtgtgcg

SEQ ID NO: 2409 - DNA, 491 bp, Homo sapiens
  chr3:13921788-13922279
  hyper
tggggagcacagcccggttggaggcggtaggagcccgctcgccccccacccgtcactaacttgcagattgcagggcgagtgggcgtccagaggctgccctcgggtggagtggaccagactcggccgagaggcctagtgccttggtctgctgccctgctccctccagcccggaacagggagctggggctgacagggcacaccccagttccccaaccccagcttcaggggagggcgccccctttcgcggagcgacgggctgactggctcagtgtatttcttccctactcccacctattcgagagtggcggcagggggtgcccaggttgggcagcctcctctgggatcctgctgttagccgacagactgagtcgggctgaggcccagttgccccgcgcggaacagcagtggggcgcctgagccgcgggagcgtgaggggcgcagctggccgctcagagcgcgctcgcggcgtcaccaggcggacgcggcgggtg

SEQ ID NO: 2410 - DNA, 100 bp, Homo sapiens
  chr3:14444315-14444415
  hyper
gcctgagcagatgctgcgggcggcgccgcagccaccccaggtaccggagggaccgggagctgggcgcgcagccggcgctgcccgccgtctgcagcccctc

SEQ ID NO: 2411 - DNA, 30 bp, Homo sapiens
  chr3:14852312-14852342
  hyper
cggacggactgaaacgccgacggcggcccg

SEQ ID NO: 2412 - DNA, 16 bp, Homo sapiens
  chr3:15901301-15901317
  hyper
cggcatccaaactcca

SEQ ID NO: 2413 - DNA, 30 bp, Homo sapiens
  chr3:16220028-16220058
  hyper
ggccccggctggtgcgtgcggcctgcgcag

SEQ ID NO: 2414 - DNA, 1156 bp, Homo sapiens
  chr3:16553682-16554838
  hyper
caaattaggaatcccggcagcagagaggccctacccacaggcccagaggtcgctcacattacacccggcttccttcctggcaaggccttaacttatcctgagatgacacacgatggcaggggttggaagatgcctagtctagttgagcgcccagctcctgaaacagctgtaccgactacaagggttccagcacatgagttgctggaaactggggtgaccactgacagagattgagccagactttttttttaaaaaagtacttcttgtttgtttgttttaagcccccgaagaaactcactgacaccacccagcgtccctagggatcacccataaccacacagggcagctgagggcaagcacagagtcacagacagacagcagggagcgtgcctggttctacaaccttggcctccacgcggttcttgctgccaaaggcagcgacaccggaggtgaagggcaccagccctggcctaggactggggtgcgcgtgcctgacaacggggcttcccgaaatacacaaccacctcctcctcgcccagacccatatccatcctggcgtcccttgagtctagagaagtgggttaagacaagggaagaaaatcccttacagaagaggagatccccgttttcagtgctggggactctcggcacccgcgtccctgtgcttctggtggttccggcgcttcctcggagcgcgcggcatgtctgctcctacacgtccagcacctctgtccccagagcaaacccacctcccagggcacacgcagaggggcagtcaggcaccgcctccaccctgccccacccaggccgcgcgcaccccggaaacctggactccgcgaccagctccctcctgttcttttccgaggaccccagcggcagtgtgtcctggacccacctgtagcctccaagctcccccacctctgcgtccttcctaggcgcttctgagcctgcagagcctacgacccccaacaggctgctccgaagtgcctctccctacatcgctccaggaatgactcccctacacccgttccccgcaaaaaaaagttggcccaagatccaggcgtcccaaggatcagcccaggtccccatccgacgcgggccagggggtgctgctctggcagctccggagccccggcaaagagcaacctgcagggag

SEQ ID NO: 2415 - DNA, 270 bp, Homo sapiens
  chr3:16555196-16555466
  hyper
cggctccagccccgacgcgcccccgccgccgccgccgcgcgtccgccggctacacttcctcttcctctgaactcatgtgcaaaatatgctacgctgcatcttcagggaaagcctcgcggcccctgacagcagccgctggagcggtgggcccgcccagctctccccgcgccccctcggagttccgcccggtcacctccacgcggccgagctgcaagcgaccctggcagcctcagaacccaggggtcaggggctcatcgatcctccctccca

SEQ ID NO: 2416 - DNA, 35 bp, Homo sapiens
  chr3:16860035-16860070
  hyper
aggtcatcaaaaacaaggaaaatctgggaaactgt

SEQ ID NO: 2417 - DNA, 30 bp, Homo sapiens
  chr3:16926144-16926174
  hyper
gcccctgaggtgggcgcgggttgccccggg

SEQ ID NO: 2418 - DNA, 30 bp, Homo sapiens
  chr3:16926988-16927018
  hyper
ttggggtggttgagcggggattggatgcaa

SEQ ID NO: 2419 - DNA, 31 bp, Homo sapiens
  chr3:17571374-17571405
  hyper
aagatgtctcagataacgggttaactatgca

SEQ ID NO: 2420 - DNA, 393 bp, Homo sapiens
  chr3:18485350-18485743
  hyper
ccaactccaaacccacattcacgccagcagcctctccaggaccggcctcgctacagccagcgagggctcgaaatgaggagtgccgcggctttcaaactccgggctccaacttgagcgccccggcgcccgagtagctcccgggatgcagaagttgccacaaacttcccaggcccctcttcgccgatgcttacaatcagccgcgcaggcagggagcggagggaggcggagatggaccgggaaaggatgctgagcagactcgcgatccggtgggggaacattaccactcccgcagcccactcctccaggcaccttactgcccgcccggctccagaacgcaccgagaggctccccttttccccatttgcttccttcggtcttttccactcccctttc

SEQ ID NO: 2421 - DNA, 523 bp, Homo sapiens
  chr3:19189694-19190217
  hyper
gtgggagttgcgctcgctctcctttcccggcgtcccgtggagaccgggaggctcagcgcctctcccagctctcagcgccgccctcccagaccccagagacgtcggtcagggcgcggcgccccgggccactgcgggctctttccgggcgggcgacgtggggggcgaggcaccgcgcggcggcgcctggcgggcactgttgcccgcggagggacggtgggggggtttcagcagctggcgggggtggagggggcgggagagggagcctgcgccgggctgagcctggaggtgcggggcgggctcggggagcgctcttggggctcctcctgccacagccggggcggctggaactctctccctttctccctccatccttccacttcccctgctcggccccgccgtcaggccgggtcccccttccctgccgtcatcaggttccccttctcccttcttggcactttcctttcgaaccatccttctggacaaactttgatggagaatttcacaccacgctggaaaaatgccg

SEQ ID NO: 2422 - DNA, 30 bp, Homo sapiens
  chr3:19988665-19988695
  hyper
tttgtgttttggttcgtgaaggagccggcg

SEQ ID NO: 2423 - DNA, 30 bp, Homo sapiens
  chr3:22335323-22335353
  hyper
ctagtgatctgttcctgcaatccctccagg

SEQ ID NO: 2424 - DNA, 542 bp, Homo sapiens
  chr3:22413368-22413910
  hyper
cctgccctcaaaacgcgtgtatctcaggtttttttaagtatttgttttaaaaagaagaagaagaagaaggaaatgaaaaggaagcaggaagctgtcccgctgtgtttctttatcccaacaacttcgccaggtttcccccgaggagggagcacgcctcgcacacacccaatgaaagacagacagcaggacgtccttaccgggtggcccagccctcgactctggacagaaccaggctgacctcgcccccccgcctcggcctcccctgccccttggttctcggcaatgagctgtgacctgagaccctccagctccgcgctcttcactctggccccgcaacctcacatctcttctccttggcaccgagaagaggctggggtgtgtggaccgatagtgcgggataccgaaaaggtggtccaaggtctgggcggtgcgaacgcccattccgcgccccccatgcgagccccagcccctcgcgcctggtatcccgcaggggcgcaaccctagctccttgcccggcgccccaacgaactccgccacctgaa

SEQ ID NO: 2425 - DNA, 118 bp, Homo sapiens
  chr3:22413959-22414077
  hyper
cggcgcccccaggagcttttctctccttcctcccaccgagctcttcattctcctgctggcggccgcccggcgccctggccctggcatccgggaggagcagccgccggggctggctgtc

SEQ ID NO: 2426 - DNA, 230 bp, Homo sapiens
  chr3:22414308-22414538
  hyper
cgaagggaggggcccgcggcctgagggtgccgggagagagcgagactgatgaccacgaaaaaagaaacctggagactagaggcgaggaactagctttaatggagtgagtgggtcgtgggtgttaagtggaaacacgaggaggcgaaatgcatctagaaactacagatatcggaaatgagcttgagtgagctgctttttgagtgaggctcgaaaagggggctgtcattttg

SEQ ID NO: 2427 - DNA, 31 bp, Homo sapiens
  chr3:23654182-23654213
  hyper
aataagacttctcaagcgcagtttagaataa

SEQ ID NO: 2428 - DNA, 30 bp, Homo sapiens
  chr3:23986074-23986104
  hyper
ctgagttcggacacacgcgtacacccgtct

SEQ ID NO: 2429 - DNA, 65 bp, Homo sapiens
  chr3:23986745-23986810
  hyper
cgcgggtcacatggtcgcggctgccctccccgtcagccgccctcgccgccgcggtgcgctggctg

SEQ ID NO: 2430 - DNA, 531 bp, Homo sapiens
  chr3:24536767-24537298
  hyper
ggaaatggcctcctggcgcacaccccgccgccgccgccagccatcgccaccgccccgggctgcccagccggtacagacgccccctgccaggctccgggccagcgctccgacgcgctcacagcgcccggcttgccgaccccgaccccgaccccgagtcctacgcactcgaggtccccgggccggccgcctccgcacctgcctccccaggtgtgggcgctccccctcctcctaatcccggccgtgccctcccagggttggtgacggtgctgtgggtttggtggccgcgcgtccacccacccgattgcctgcgcgcataggtgcgggtttgggcgtcattactctagttggagaagaggaaagaatggggaacgagtgacaccgggaccggagggcgagtcttccaggagcacgtctcggccttctttgcccggcccgaccggcccgacccgtgccgcagcgctcctccctccgctcctaaaccacttgtggcgcgtgtcgggaatacagggcgctctggctcttcttggggcc

SEQ ID NO: 2431 - DNA, 54 bp, Homo sapiens
  chr3:24563200-24563254
  hyper
ggtcgcggccgccggtcgccgggagcccggagccgggacgcgagggttgggggt

SEQ ID NO: 2432 - DNA, 30 bp, Homo sapiens
  chr3:24563670-24563700
  hyper
accagtggcgtgcccggcccggctggctag

SEQ ID NO: 2433 - DNA, 174 bp, Homo sapiens
  chr3:24871002-24871176
  hyper
tggcatccagggaccggctgcctagcagggattttgcgtgtaccgcggcggggccgggggctgggggttggggggtctgcagcgggagcccgcgaccgatcccaggacatctggactcgcggacaactttgcgcagcagtcctcttccaagttccctttattgctattgtctta

SEQ ID NO: 2434 - DNA, 1 bp, Homo sapiens
  chr3:24871245-24871246
  hyper
c

SEQ ID NO: 2435 - DNA, 30 bp, Homo sapiens
  chr3:24871688-24871718
  hyper
gtagagacgatgggcggaaaaacagagaag

SEQ ID NO: 2436 - DNA, 30 bp, Homo sapiens
  chr3:24871933-24871963
  hyper
acgtgcgcgcgcgccgtggctaaggatgct

SEQ ID NO: 2437 - DNA, 653 bp, Homo sapiens
  chr3:25469353-25470006
  hyper
gtgtgggctggggggcgaggcggtgggcgggaggcgagcgggcgcaggcggaacaccgttttccaagctaagccgccgcaaataaaaaggcgtaaagggagagaagttggtgctcaacgtgagccaggagcagcgtcccggctcctcccctgctcattttaaaagcacttcttgtattgtttttaaggtgagaaataggaaagaaaacgccggcttgtgcgctcgctgcctgcctctctggctgtctgcttttgcagggctgctgggagtttttaagctctgtgagaatcctgggagttggtgatgtcagactagttgggtcatttgaaggttagcagcccgggtagggttcaccgaaagttcactcgcatatattaggcaattcaatctttcattctgtgtgacagaagtagtaggaagtgagctgttcagaggcaggagggtctattctttgccaaaggggggaccagaattcccccatgcgagctgtttgaggactgggatgccgagaacgcgagcgatccgagcagggtttgtctgggcaccgtcggggtaggatccggaacgcattcggaaggctttttgcaagcatttacttggaaggagaacttgggatctttctgggaaccccccgccccggctggattggccga

SEQ ID NO: 2438 - DNA, 30 bp, Homo sapiens
  chr3:25824884-25824914
  hyper
tgagcgccagcgggcgccgccgccgcccct

SEQ ID NO: 2439 - DNA, 319 bp, Homo sapiens
  chr3:26664100-26664419
  hyper
tctccggcagccaacgctcagcccccgcctcctctctccattccggaccccgcaaccgcgaggcgagagagcagcgccggcgaggcactggctgggctctgactgtcacgttaattccctgctgctttttctagtccccagccgcctcgcccctcctccctcattcccagcctgggtttggaggcgatttccctctattgactgagccgactgcatctctgggcaagcggcgctttgcctctctcctgtctttgtctgctcttcctgcaaggctacggcgcctggagcagggtctgcagcggccgccgcagcaacgcga

SEQ ID NO: 2440 - DNA, 133 bp, Homo sapiens
  chr3:26664725-26664858
  hyper
aaggtaaggtgcagccgcctgttgcttttcgcagagcgcgggatcatccctctgcccgggtacctaggccgtccctccaaggaacaagtagaggagaactattacaccagttctaagccgtgcctgtctaagc

SEQ ID NO: 2441 - DNA, 788 bp, Homo sapiens
  chr3:26665112-26665900
  hyper
ctctggctcctgaggcgagggtttgggacccagcagtgctcgtcctgcctctaggagctgggtagggacagagaaggtgaaataagagaggtgggacatggaggatggctgcggccacccctgaagcttcgtccagcgcgatgggagtcagtccatccttgcacacgccacccccaactcggcaatgaaacctttggagtggcttgcggctgtgcgccgtgggaactgcaagtgcagatatgggtgggtgaagtaagtggctcagggagggaaaggctgctcgtgcggtggaggaggaagctgagggtcgggtagatctgcccacggttgagggaaatgaaaaggtactgctaatgtgggcgagcggccagccctgagaggccatctgacgaagaggaaaagggatttgagtccggagggcgctggcctgggtatgtaaatacagatgggggaggggctgggtacctgggggcgcgtggagacaaggaatggagccccggaatgccgggcccttgggtacttgggaaggcaggctgctgagtgcctgggatggggcgatcttcctccccagaagcaaacaaacctccccgcgagaatctgaatgcgttggcatcttgggtggtgactgaatggtcagatcgtggactagggatgcttctccaagctctaagaggaccatagtctgctctcttctctggcacccgcttgcttctacgctccttcacctctgcagccaggtcggtagacccacgcccaccttccctgccaggcactcaggagtcaaggat

SEQ ID NO: 2442 - DNA, 466 bp, Homo sapiens
  chr3:27410376-27410842
  hyper
atgaacctccagaggcgtcggagcagattggaagagacacattcaggctccatttaaccagaataattccgttatcaaaatggaagcgccaagaagcatcgttgatggcgctttcccaccatccatccgtccaacacaaacccacctgctttgaaaagactgcctcacgcagtgactcacttacccaccacagccgcattctctacctctgcctcttgtctagtgaagctggctcccgaggcttcggggccgctccacagggacctgaggacgtctccccggagaccctgactcaagctgctcgccggcacagccgagcaccggctcccgcctactcaccgcgcgggagggacggtccctccttcaggccaatctccttatcattgtccctgctgctgtcacctgctgctgcagaccgggggtcccgtccagtctcagcccgtcccgtcctccccccagcctattc

SEQ ID NO: 2443 - DNA, 204 bp, Homo sapiens
  chr3:27410882-27411086
  hyper
cgttggttttccaatcaaatcctcctccaggccaccaaccagcgctggccaggccaatgccgacaattcttcctccgccacctggggcgcctcagccaatcgggagcagccatgctgcgcagtgcagaacgccatagcgacggatgacgcctgccggggaatcgccgtagcaaccagagacgcgctagatccaccaccaagctt

SEQ ID NO: 2444 - DNA, 312 bp, Homo sapiens
  chr3:27754316-27754628
  hyper
acttcagactgtccaagatatcgcttagctcctgcgcccggaagaaaatccagcgcaggtcgggttccggcgcgcggaagccctgcgaaccccaaatgtgtgcgctgagccgaggcctctaagcggtaggagagaatctgacctccgacattcttttcaagacacgcgccggtggaccgggtcctgggattggcttactcccgggctggaccttggggttcgcatatttgaaagcgtaaacttgaggaatgacggcggggtgatgggtattttatagagtgggactcaatcgtgctcagcaacagatttctc

SEQ ID NO: 2445 - DNA, 30 bp, Homo sapiens
  chr3:27755955-27755985
  hyper
aatctgctatatcccggcagtgattagcac

SEQ ID NO: 2446 - DNA, 362 bp, Homo sapiens
  chr3:27756639-27757001
  hyper
gccaggggatgggctgtccttcgtcttcccgtggagcgtgggccaaataaacggaactaagcgcaaggtgaactgctccaaggtcactgtttgcagagcggcagtgcacggaacgactggaatcctcctttgtaagtgccacgcccgtccctagcctgcgcctcagaccgagtccgggcggagtttgactgcagctactgaggccggcagccggcggcggcgggtgcgcagcgtctgggttcagaagaaagccgcaggtgggcgcagaagctgagctgtgtgcagccccccgctccgccgcgccccagggaccctgaactggtgggcgctcaaagggccacgggggttcccagggagcctag

SEQ ID NO: 2447 - DNA, 30 bp, Homo sapiens
  chr3:27762337-27762367
  hyper
tatcagaactttctcgcgcaccgaacccga

SEQ ID NO: 2448 - DNA, 30 bp, Homo sapiens
  chr3:27762621-27762651
  hyper
ctaatttccatttccgcctcctccaggtct

SEQ ID NO: 2449 - DNA, 813 bp, Homo sapiens
  chr3:27763202-27764015
  hyper
cgccggggggcagcatggagccgtaggggtagcgcgccccgttaggagccgggtacacaggtccgtggggcgccccagccgccgcctggtacgggaagagtgagcagggcgcagccagctccgacccctgaggaccgggggactggaggtagtaccgctcggagctcaggctgtccatggagtagcgcgcagtggccgcagccgcggcggcggcggcggcggcggctgcagcggcggagggcagctcctcctccccgcagggggagcccttgcggccgtccgggggccccggcttggccactgccgcagcgctggcaaatgcgtccccggcgtcggtgtcactaagcatggccgcgggggcccctgcgctggcggctgcgggctccccgctcaccgcctcgcaggagagactgccggaaaacttcttggacgctttgtctaagtccaacttctgaggagagggggccgcgctggggaggtggccagcgctcccgccgctgccgcctcgcgcactctccagcgggtagaagtgcgcgccaggcaggttcactgagctcaccaagagctgctcccctaactgcatgctttgcaaagcgcagacggcagctggctgcttcctctcctccggtggccttattataaaggcaggatgggggagccagcgccctcttccgaggggaaggtaacttccccttcctcccgcgccggggctacccacctgccgactcgcgggccgctactgcgcgtactggcgcgccctgaatccagcgtcctttccggaaggaaagcgccgtgagttggaaagcaggaggt

SEQ ID NO: 2450 - DNA, 13 bp, Homo sapiens
  chr3:27764458-27764471
  hyper
tggggtctccata

SEQ ID NO: 2451 - DNA, 80 bp, Homo sapiens
  chr3:27764595-27764675
  hyper
cgtcccggaggctggggaaactggggcaagttggagacaggcccaaggaagtctctttcctcgtcggaagctgtaacttc

SEQ ID NO: 2452 - DNA, 144 bp, Homo sapiens
  chr3:27765217-27765361
  hyper
ttcaagagcggggccgtcatattttatcgtttcattattacggaagcggggggcacgtttcgttgcggataaggagaagcctgaatattcgctgttaataagcaattacagacgccgccagtaatcgctccgggagcgcatttt

SEQ ID NO: 2453 - DNA, 24 bp, Homo sapiens
  chr3:27765400-27765424
  hyper
cgatcacacgggaaactcttcgcc

SEQ ID NO: 2454 - DNA, 421 bp, Homo sapiens
  chr3:27771652-27772073
  hyper
ggacaccctaatcccgaaacactcctctctgggactgcgcacttgccagcacgacagccaactccgcctcagaggagtcttttagggctctgagcgagtggcgaatgctcccccggtgatgcactatcgctcccacccacgccctggtacgcgcagcccgggaaaaagaaaaaaaaaagtccacgtaggggctcaaacccaggcgtcaggcgctgcagtcagggaaggctcccttaggggctgggttcctggcgcttacgacgcagagaaggataagggcgatggtttcgcaatcccaccccctcctttgtcctcctccccacctcccagcctttggcggcttagatctccaaatgcagtctggatggcactcaggtattcgagcgccccagtttatcttatcaccgccccctacaaatac

SEQ ID NO: 2455 - DNA, 723 bp, Homo sapiens
  chr3:28616764-28617487
  hyper
ctttacgccaaactccggcgcgccgcgagactcgcgtcctcgctgtccccgaggggccccaccccttcccggttctaacctgcgacctggccagaggcaagggtaggtcgacttcctgcccggaatttgccgttggcttctccttctctactccagttctttagtgcagggctgtgcggcgcggagccgccagcggcagaacagaccccggagcggagctctgggatacacacacgcgcagcccggagggactgaccccggaggcgcgctcggccgggagagggaggggaccagggccagcgcggaggcgggggtcacctggggttgggggtgggcgcaccagccctccgcacgctcctctctttctagtcctcgccgccaccacctcgcacaggtcggagatccctcctttccttggctcctttgcgttggggagggggtaaggctgagggtcggcgcttggtcagcgggcggggaaggtagatttcacttgcacctgagagtccctattcttgccagcttcgccgggcaaagcccggcgaccaggttggttcttccagcaactttgttcagaaggttggtagggaggagaaacgccaaggggccccaagagacgctggaaagcggctaggagcgtgggccgggctggagagcaagtacccaagcggccctgaggctgggagcgcggctgggaggcgccgccgccgccgccgccgccgccgc

SEQ ID NO: 2456 - DNA, 141 bp, Homo sapiens
  chr3:28617728-28617869
  hyper
ccaagtctccactccgcttttgtcttgccctccagtgaatgggaagatggagatggatgttgagggagtttctccgcgcccggagcccatcccccgctcccagggggctggcggagcctgccaggcgccgccacagccgcc

SEQ ID NO: 2457 - DNA, 30 bp, Homo sapiens
  chr3:28618218-28618248
  hyper
gtgcagagaaaagtcgtctggtacatgcgg

SEQ ID NO: 2458 - DNA, 30 bp, Homo sapiens
  chr3:31575314-31575344
  hyper
gggtccagatgtgccggaaccccggctgct

SEQ ID NO: 2459 - DNA, 95 bp, Homo sapiens
  chr3:32148436-32148531
  hyper
ggaggcgctgggctcgcgtgcgtgcgggggacagcgcggagagagggcaccccgagcacgcgggcacctgtctgcgcccccgttactgagcgcac

SEQ ID NO: 2460 - DNA, 1029 bp, Homo sapiens
  chr3:32433046-32434075
  hyper
cacacatccgcagccgcacccacacaaaatcccaggaggctcagtaccagctgtggtccgggccttgcccacctcggagaggccacgacccaaggcatccggtttcctctcgctccagtctaacttccgcgcatctacgagggccgggactgccgctacctttctggaaggcgccggccggccagtcaccggagggatcccgccagaggcggctccgcgtctccagcagcggggcagggacccgggcgccccgccctcgccagcgcccgcccccgcccgcccccggcccgccctctgtatctggcccctgggcagctgcccggggaggcggccagcgagctggggccgcgcaatgtcgcacggagccgggctcgtccgcaccacgtgcagcagcggcagcgcgctcggacccggggccggcgcggcccagcccagcgcgagccccttggaggggctgctggacctcagctacccccgcacccacgcggccctgctgaaagtggcgcaaatggtaagtgagcgcggggcgcgaggccgaggttctacagggcgtcccgggaaagcaggggtccgggagcggacgcgccgggcgtctggacccggccggagcccagggagcatcgcgcagcgggcggggcaccgcgtcgctaaagttcgcggcaggcttcctccgggaaagttgctgccgcagcccccgcgctggagctcagtccccagagccgccccggcccttgctcccgcggacccaggtcgccagggtcgcaagtttctccggccacccccctgcgaagcctgacccgcctactgactgaaaccacgggcaaagttccttttcgtctttcttcctcttctctgggccgcgccgcttcgaacccgagccgggggtggaagagtcgcccaggcggcggcgctgagggagcgaaacccgacctcttccccgtccacggcctcctctttcctccgaacccagcgcggcagggcttccctgctctgtgtgcagtttcgctcgaaggaggaggtcagagggtc

SEQ ID NO: 2461 - DNA, 138 bp, Homo sapiens
  chr3:32442912-32443050
  hyper
ggaggggttcggggtcggtgtgagccccataggttttctggcactgcaggggccctagagaccccggccccgcaagcacgccaggaccctggaatcctaggggattccctgtgtgggccggtgtatttatttaaattc

SEQ ID NO: 2462 - DNA, 365 bp, Homo sapiens
  chr3:32443152-32443517
  hyper
cgcgccgggcccagcgtgcggccctggaagcctggctcggccgccgcccgcgcacgctggccttctttgttactactttggctcagtggtttcctgggctcgctgctcattccctggcagggctcgcggcgtccgcggcgactcctgggatcggcaggggcctggcttccagcccagcgccggcagcagcccgggggctgcggagcggaaagggggctgggacgcggtcactgctccagccacccggcgctcctgggcggaaatcgcgagcagagcccttctcagcctcctgcagaaaacgcgcctcacctgacttgtgtttaaatcagcaagggcagtgacgcggctcttccttttcctggggc

SEQ ID NO: 2463 - DNA, 35 bp, Homo sapiens
  chr3:32612741-32612776
  hyper
caagatagaaatgggtcgcccggctggtaaagagg

SEQ ID NO: 2464 - DNA, 30 bp, Homo sapiens
  chr3:32668904-32668934
  hyper
tacagaatcatcccctcttcagtcaccaat

SEQ ID NO: 2465 - DNA, 30 bp, Homo sapiens
  chr3:32726754-32726784
  hyper
ttgctgttgctagacgacgggaactagctc

SEQ ID NO: 2466 - DNA, 439 bp, Homo sapiens
  chr3:32858519-32858958
  hyper
ctgccaaggtttcagagaggacggacgtgaggaggaggaggggcgcagggcgcgcgcggagctcggatagcattgcacgacggcccgcgcggagcgggtacatctaatatcttcctgccgatgaataattcagggcggcccgcggggacctgcggccccgcgcgctaagccgaaggggaaggagcgtgcgtgaggcgcccaggccaggcgaggcgggggcacgagggctccgggccgcgtggggcgcgcgtgcgtgttaagcgcgggcagccgcggcccggctgggcaggcgcgcggaagactcgaggcgcgtgggacgcgcgtgcgtactgcacgcgtgcggccgcggctgggccaccacgagctgcagctgctgcggggcccaccgccctgcaggggaggccgtgcctggctgtgcgcaagccccaagcgcagcacg

SEQ ID NO: 2467 - DNA, 29 bp, Homo sapiens
  chr3:32859255-32859284
  hyper
cgctcgcccctcgcctgtcggggcttgtt

SEQ ID NO: 2468 - DNA, 776 bp, Homo sapiens
  chr3:32859417-32860193
  hyper
gggcagcgctgctctggtgccggctcccggattgcaggcctaatcgatgcatttttctgagtgagtcggtgactcccccacccacctcgtccgctctctcctcctcctcctcctcttcctctctggtctcctccctcctccgggctgggttgcaaatggcttcgttccccgagaccgatttccagatctgcttgctgtgcaaggagatgtgcggctcgccggcgccgctctcctccaactcgtccgcgtcgtcgtcctcctcgcagacgtccacgtcgtcggggggcggcggcgggggccctggggcggcggcgcgccgcctacacgtcctgccctgcctgcacgccttctgccgcccctgcctcgaggcgcaccggctgccggcggcgggcggcggcgcggcgggagagccgctcaagctgcgctgccccgtgtgcgaccagaaagtagtgctagccgaggcggcgggtatggacgcgctgccttcgtccgccttcctgcttagcaacctgctcgacgcggtggtggccactgccgacgagccgccgcccaagaacgggcgcgccggcgctccggcgggagcgggcggccacagcaaccaccggcaccacgctcaccacgcgcacccgcgcgcgtccgcctccgcgccgccactcccgcaggcgccgcagccgcccgcgccttcccgctcggcacccggcggccctgccgcttccccgtcggcgctgctgctccgccgtcctcacggctgcagctcgtgcgatgagggcaacgca

SEQ ID NO: 2469 - DNA, 36 bp, Homo sapiens
  chr3:33137819-33137855
  hyper
ccgcacctcacctattcgcctcgccagccctgcccc

SEQ ID NO: 2470 - DNA, 30 bp, Homo sapiens
  chr3:33155339-33155369
  hyper
tgcgtgaaccagtgcgcagcgcgcctttcc

SEQ ID NO: 2471 - DNA, 1076 bp, Homo sapiens
  chr3:33259727-33260803
  hyper
tctttcacgtcttcccggaccaagccaaaatatccgagggagttttctaaccatcggcggtgtcctcaggggcacattaatagacgttgagaaactgagggacggcggaaaatcaccccttagcagaggaggttctagggcaccttagaggtgatttcattcgagctttcttggagaccttaggaaagccagcggcgggactgcgggacctacgcgctcggcgctaagggagggtccaggcaccaggcgggcgtttgggcgcacgggcacgcggagacttggtgggccaggagagggatgctgggtcgcaggaccgcggctcgttcgttcctctcaggcttgcgcttgccgcttgccgggccggtcagagggagcagccccggcgagctacgccctccctgcccggaccccacgctccaccccccgccccgccgcctcccgcacactcaccatccgcccgcaccgaaaggcgcggcagaccgagcaggagcagcgccgccgcccagagcccggggaggcgtctgtgccaacgggcaggcgggctgggtccctcggcagtcatggtccgggagtgcgcgggccagcggactcgggtgagggctctggctgcgtttggggttgcccaggccactgcccagcgtgcgccactcggctctgcgctctgcgctcggctcacgaatcgcaggcttcgcgccgggcgcgccgagagggaggagcgcggagagccgggggaggctcgggacgcagagccggagcgcctgggccgccgaactcccgggggtcttctctgtggcgccgaggaggcggctgtaacccggctccgccttcgcgctgggcacctggaaacctcggtgccaaaaggggctgcgctgggccgcgcgctctgcgggtacagcggggcggagggcgagggcgcagggaggcggggagagtagctagccggccgcaaggagcccccgcccgtctgggggacccttggcgagagggtgacgcagtctgacaggcggagcccctccggcagggccgttagacaacgagtgtctaactctgtcctcggcctctacttttcaactggc

SEQ ID NO: 2472 - DNA, 30 bp, Homo sapiens
  chr3:33758841-33758871
  hyper
gtcagtcctcggctcgcgtacgaagaggcg

SEQ ID NO: 2473 - DNA, 30 bp, Homo sapiens
  chr3:35680875-35680905
  hyper
cagctgtggagccacgtgcaacacgcgcgt

SEQ ID NO: 2474 - DNA, 594 bp, Homo sapiens
  chr3:35681132-35681726
  hyper
gagggagaccagaacgcaaagagagcgagagcattaagtaggcagggagaggcacacagaaagatagacagcaacactcgcgtgctccctccctccacacgccctcctcttaccgagcgaagcggccaggggcacagagtgggagaggactgtgggcacagaagaccggaagagggacgctgcattgctggtgggacggagggattcggacggacggacagaccagcgcacagactggcagcctgcgagagtggcagctttgagagcagagcgcagcaaagcgagaatcccgcgccgagctgctagtcggacccacagacggtcggactgacagacgtgcagacggacagaagagcagacaggaggcgggggcgcgttcactcccggcggccagccggccagagaaggcggcggtggcaccttctgagcgcgtccggagcagagaccagcagcagcaggggcagcggggacacaagccgcgaccgagccgccgccgcagccctggctgccacagctgtgtgggatcccagccgacactgcagaaagctccttttactagcagttaaataaatcgaccaaaaacaaaacaaacaa

SEQ ID NO: 2475 - DNA, 30 bp, Homo sapiens
  chr3:36421688-36421718
  hyper
cccccacccagtgccggcgtgcgcccagcc

SEQ ID NO: 2476 - DNA, 905 bp, Homo sapiens
  chr3:36985788-36986693
  hyper
gggaagaggccagcgcgctccaagttccccgcaaattccgcccttcccgcctggcacggttcccttgcaccgctgtgctccgctcccaggtttctgcccgccaagaatgcttgccccgggggcgcgctcgctggtcaggaacctgtcggcagcccccgggaacccctgaggatgcggaggtgggcccgagagctgcggcttcgatgccggggtgggagctaggcaggccgcgcgccgccgcagtcctgtcgcagcgcgtgccctggtccctccggaccgaaaaggccgaagccgtcccccgcgaccgaccccgcgcaactggctcgggtctgcacctagatggctgtgggccccacagggatggccgggcgggcccgttcggccgctacctcagggtcgccagtccccgcgcgcggccgcctcccgccaggaagggtggcgggcccggaaggccagagatgccccagtgcttcccgcgccgctacgcacctagctgcccgcgggtcccacatggctgcggccggagggtccgcaccaggaccgccgccgcctggggaagcgcttccctgtgggcagggcgcggcgggcagtgcggaagcccgaaagctaccggagcccggggcaggggcggcgcgatgcagaggcggcgttcgggggcccccagctgcctgcggctcggctacccagccgcgatcagagggggcgggggacgcaggaaccccggcgtccgggcggtgtgcagccgcagacctattccaagtttccacgtagttgcgagagcccaaaaactgtcacgtgcacgtcgctgctgagtgggaggaggtgtttgtcatcgcgttcaaaaggggcgtttcggtgtctcccgtcatgcaagcaaatggtatggctctcggccgcctttgaat

SEQ ID NO: 2477 - DNA, 1401 bp, Homo sapiens
  chr3:37034012-37035413
  hyper
ccacaaaagcctggtcgtccaaggcaagagaataggctttaaagtccctggctcggttaaaaagctggttgcgtagattcctgtcaatgctcaggatcctctgccttgtgatatctggagataagtcaacgccttgcaggacgcttacatgctcgggcagtacctctctcagcaacacctccatgcactggtatacaaagtccccctcaccccagccgcgacccttcaaggccaagaggcggcagagcccgaggcctgcacgagcagctctctcttcaggagtgaaggaggccacgggcaagtcgccctgacgcagacgctccaccagggccgcgcgctcgccgtccgccacataccgctcgtagtattcgtgctcagcctcgtagtggcgcctgacgtcgcgttcgcgggtagctacgatgaggcggcgacagaccaggcacagggccccatcgccctccggaggctccaccaccaaataacgctgggtccactcgggccggaaaactagagcctcgtcgacttccatcttgcttcttttgggcgtcatccacattctgcgggaggccacaagagcagggccaacgttagaaaggccgcaaggggagaggaggagcctgagaagcgccaagcacctcctccgctctgcgccagatcacctcagcagaggcacacaagcccggttccggcatctctgctcctattggctggatatttcgtattccccgagctcctaaaaacgaaccaataggaagagcggacagcgatctctaacgcgcaagcgcatatccttctaggtagcgggcagtagccgcttcagggagggacgaagagacccagcaacccacagagttgagaaatttgactggcattcaagctgtccaatcaatagctgccgctgaagggtggggctggatggcgtaagctacagctgaaggaagaacgtgagcacgaggcactgaggtgattggctgaaggcacttccgttgagcatctagacgtttccttggctcttctggcgccaaaatgtcgttcgtggcaggggttattcggcggctggacgagacagtggtgaaccgcatcgcggcgggggaagttatccagcggccagctaatgctatcaaagagatgattgagaactggtacggagggagtcgagccgggctcacttaagggctacgacttaacgggccgcgtcactcaatggcgcggacacgcctctttgcccgggcagaggcatgtacagcgcatgcccacaacggcggaggccgccgggttccctgacgtgccagtcaggccttctccttttccgcagaccgtgtgtttctttaccgctctcccccgagaccttttaagggttgtttggagtgtaagtggaggaatatacgtagtgttgtctta

SEQ ID NO: 2478 - DNA, 942 bp, Homo sapiens
  chr3:37493187-37494129
  hyper
aacaacaacagccggcgtttactgagcactgctcctacagcttatctcacaactgggtgaaggagcagaggatgcgcagggctagaacctggagtctaaactcgtccttcacccgggttgctctggatcttactggttgtgagacagggagggaaagagagacaaaggcagggagacaggcccagcagggccggcagagcctgtagtgacggaggggagcagccttatctccgggaacccgagcgccccgtgcgcggcggggagggggcagttcggggcgccccggcgggtcccaggggctgactcccgcccgggaagtgcgcgcagggctcacggcccgcagggggcgctgccgcgccgtccagccgccgccgcccgggccgcccacctcgcgggcgcgcccctccgcagaccagcgccgcccggcccgggacccgctcgcgcagacttctcgggcggactgaggacgccgccgctcggggccgcccctgtgctcgccttcagcgcccgctcagcccgccgtccgcgccccggtggcgggcccgacgcccgcattccgcccgtgtccaggcgcagagctcccgccccggggagcttcctggccgtcggcgggccccgcggcccgcgcgctcggcgccctgctcgccgggcagaggggaaggcggcggccggctggggatgggcggcccggctgcgccgaggggcgccgggaggctccgcgcgctgctgctggcgctggtggtcgcggggatccccgcgggcgcctacaacctcgacccgcagcgccccgtgcacttccagggccccgctgactcgttcttcggctacgcagttctggagcatttccacgacaacacgcgctggtgagtgcccgcccgactccgcgaccctggcccgcgcggccaccgccccggcccccaggccagcgccgccgccgccttt

SEQ ID NO: 2479 - DNA, 1 bp, Homo sapiens
  chr3:37494424-37494425
  hyper
c

SEQ ID NO: 2480 - DNA, 30 bp, Homo sapiens
  chr3:37731246-37731276
  hyper
aagcctcattttaattttttgccctggagc

SEQ ID NO: 2481 - DNA, 31 bp, Homo sapiens
  chr3:37902232-37902263
  hyper
tctcccacgctctggccgtcgtcctaggcct

SEQ ID NO: 2482 - DNA, 419 bp, Homo sapiens
  chr3:37903633-37904052
  hyper
ccgcgcgcttggcttgcggggggccgggcctgcgggcggccgccgcgccgcgcacccatggacggcccggccatcatcacccaggtgaccaaccccaaggaggacgagggccggttgccgggcgcgggcgagaaaggtgaggaggggcgcaggcggccgcgggctgggggcgagcgcacaccccgcgccgctggagttcactgccgggcgccggcatgggcctgggggaggggtgcacagggcccggagggtgcgtgggtgtggggtgcgcccggaggagagcgaggctgccagagtgcgtgtgccgactgagccagtgtgagtgtgcaggggctggcggagagactgggagcgagtgtgtgtgcatctaaccgggaggttgtgagtttgtgtgcgcgcacgcccgcagagaagttgtg

SEQ ID NO: 2483 - DNA, 247 bp, Homo sapiens
  chr3:38035773-38036020
  hyper
cgcagggggcgtccagcgacctgcactactgggtcgggaagcaggcgggtgcggaagcgcagggcgctgcggaggccttccagcagcgcctacaggacgagctggggggccagaccgtgctgcaccgcgaggcgcagggccacgagtccgactgcttctgcagctacttccgcccgggaatcatgtgagtgcgggggcgaccggggcaggagggagccgtggaggcggtgccttggctggggcagtc

SEQ ID NO: 2484 - DNA, 401 bp, Homo sapiens
  chr3:38080607-38081008
  hyper
aaatgtttacaatgaccacagcgatgacgggatccgagagaaaggcaaggcggaaggggtgaggccggaagccgaagtgccgcagggagttagcggcgtctcggttgccatggagaccaggagctccaaaacgcggaggtctttagcgtcccggaccaacgagtgccaggggacaatgtgggcgccaacttcgccaccagccgggtccagcagccccagccagcccacctggaagtcctccttgtattcctccctcgcctactctgaggccttccactacagcttcgcagcccggccccgccgcctcacgcagcttgcgctggcgcagcgtcccgagcctcagctgcttcgtctgcgcccctcctcgctgcgcacccaagatatctcgcacttgctcaccg

SEQ ID NO: 2485 - DNA, 54 bp, Homo sapiens
  chr3:38081153-38081207
  hyper
cggacggtgccggggtctcagcgctcggcacgcgtcagcacctgccaggtgcca

SEQ ID NO: 2486 - DNA, 30 bp, Homo sapiens
  chr3:38180464-38180494
  hyper
ctgcttaccaagctgggccgcgacgacgtg

SEQ ID NO: 2487 - DNA, 30 bp, Homo sapiens
  chr3:38182009-38182039
  hyper
ctgcctggcacctgtgtctggtctattgct

SEQ ID NO: 2488 - DNA, 55 bp, Homo sapiens
  chr3:38182281-38182336
  hyper
tacctgcagagcaaggaatgtgacttccagaccaaatttgcactcagcctctctc

SEQ ID NO: 2489 - DNA, 159 bp, Homo sapiens
  chr3:38182625-38182784
  hyper
cccatcagaagcgactgatccccatcaagtacaaggcaatgaagaaagagttccccagcatcctgaggttcatcactgtctgcgactacaccaacccctgcaccaaatcttggttctggactcgccttgccaaggccttgtccctgccctgaagactgt

SEQ ID NO: 2490 - DNA, 30 bp, Homo sapiens
  chr3:38495144-38495174
  hyper
gtcaggagcccattcccgccacctccgtcc

SEQ ID NO: 2491 - DNA, 43 bp, Homo sapiens
  chr3:38495213-38495256
  hyper
cgtcctcccacagggcgcgggatgggggcggggcctccgtgtt

SEQ ID NO: 2492 - DNA, 52 bp, Homo sapiens
  chr3:38495696-38495748
  hyper
agaccgaaggaaggagcgggaaggagagcgcagccgccgcctggccctgcgc

SEQ ID NO: 2493 - DNA, 1210 bp, Homo sapiens
  chr3:38496020-38497230
  hyper
tgggcgcccggctcgccgaacttgggggcacgatcttgtctgtgcagtcatctgcgggattctggttcctagaggcgcccctgcgatgggggccgggacgcggagcctcagggtcggagttcgggctacgcgggcgcgtggaacccagggaaagagtgaggaaaacctgagcgtggggaaggcggccaagaggggtgggcagatctcattgggggtggcaggattgtaggtgcagcagcagcagcagcatgcggggagggttgcatgtccctcagagtcactaagtgtagcgaagcgaagggggcggcttcacgcagcccaaagtcccctgcatctcttgccaccagtctgcgtcgcgttaccggcccggcgggctgttggtgctggctcccacctgctccctctttccctgccgttggccccgggatgcggagtgtggtcgcttcgcgggaccgctttgtttgggcacttgggaggggagggggtgggtaagatggaaaacccaacaggtccctcttccttcgggcctccaggaggcacgtggcggggtgggtgaccagcgctcagctcgcccgcggctgcgggcgtgtggctggaggtgttcggccagcgcatgtgtgtttgggggtatgtgggcgcgggcgtaaacaagcggagttccgcctggaaagcttgtttctcctacggtccaagcaccgatttccctctctcagtggtgccggggtgcgcctaaccccggcgggcgcgccgggacgtcccctggccagtcctgggaaacgtggggagctgggcattgaagctctggcgagaaggtcggggcggctggtacccggccgccgggtcctgcgcgtctttgttcccagcccccattacacatgcagcgcgggtcccccgccgccctcggtggcagccgcctggagtctgggaaaccctcgaggggcggggccgggcgtgcaggggcggggccggagtccccacgctgctgcgggggtggggatttgggatctgcgtcccattcccaccctggttctaccttctcctgtgcgtcgtcgtgaggcttagtttacaccgaaagcgagtgagttctgtagggtagtagcgcgcgcgcgcgcagcctgagtccggaaaccgaagggcaaagaccagctggcacctgagtaccgtatggaagagggcgttgcagctctcctggagccgcttcttggaggcg

SEQ ID NO: 2494 - DNA, 53 bp, Homo sapiens
  chr3:38691468-38691521
  hyper
cgacccggcgacgcttcaccacagatggccacccacgcggacgcggacaggct

SEQ ID NO: 2495 - DNA, 30 bp, Homo sapiens
  chr3:39093353-39093383
  hyper
catcacatggctaccggccacacagcaact

SEQ ID NO: 2496 - DNA, 43 bp, Homo sapiens
  chr3:39148466-39148509
  hyper
agcccttacgaccctacgactggcaggacgcgcgccgacgggc

SEQ ID NO: 2497 - DNA, 30 bp, Homo sapiens
  chr3:39149227-39149257
  hyper
cttcaaccgcccgccgcgatagagtgccca

SEQ ID NO: 2498 - DNA, 837 bp, Homo sapiens
  chr3:39851140-39851977
  hyper
agccgctgctgccgacgccgctgcgctcccgcctcctgtcggttcccgggttcccgctgcggctgcggttctggcagccgagcccccgcggtgctgcagcccagctttagcgcgcagaccgacccgcgccccttcttcgccgccggcagcctctaatccacgcggcgcgttgcggcaggtgccctgggcgtactgaggcgcggtggcctgagcccggccgccatcgatgaccccggtcgcggacttgcttcaggctggccaccccccgtgagtaccgtccgcctccctcttctcccctctggcagctttgcgccactctcccctcaacgttgccgcaacttcgggggtgggtgtgtgaaggtgtggaggtgtctctcacgctcccccgcaccctgtgcgcgtccggagccaggaaccctaggcgcggccagtcagcctctgcggaggggcgaggggcgcgggtacttgaacttgctcagggatcatcgcggagccagaatcgcctctttctctcgctgctggggtgggagctcgcctctgcgtttccctcgcgttttccgatcccggatggccacgtagtgcttgggctgcggttcaccgcgtacctactgtgctgcgggcgcaccggcgggacgcctcaaaccatccgttaagcgccccgcaagcagcccagcgcgacggacctgactcaaactcttaattctgtaaaacgggggtaatcagggactctctcaaggtcacagctggtgctcagagttagaacacaggtggattgcgtctggccctcgcccgcgggctgcctggggaggggagagctgttggcggggcggtcacttc

SEQ ID NO: 2499 - DNA, 30 bp, Homo sapiens
  chr3:40350805-40350835
  hyper
ttacttacattacccggggcctcgagggtg

SEQ ID NO: 2500 - DNA, 31 bp, Homo sapiens
  chr3:40547838-40547869
  hyper
cagccatgttccagaccgcttggcgccaggt

SEQ ID NO: 2501 - DNA, 30 bp, Homo sapiens
  chr3:41240628-41240658
  hyper
gcgcggggcgggggcgtcgggcttgggaca

SEQ ID NO: 2502 - DNA, 42 bp, Homo sapiens
  chr3:41266109-41266151
  hyper
attctggtgccactaccacagctccttctctgagtggtaaag

SEQ ID NO: 2503 - DNA, 30 bp, Homo sapiens
  chr3:42056799-42056829
  hyper
ttgtctcagggctgcgagtttggcaacagt

SEQ ID NO: 2504 - DNA, 266 bp, Homo sapiens
  chr3:42304985-42305251
  hyper
accctcagctgcctacggggcgcctcctctgcccgctgcagcccggagcccgcgggatctgcgggaggcaccggctgcgtcagggcgccagccgccagtaccgccatcagcacgcacaggcacacgccgctgttcatggctgtagcgagcaaaggaggagggcgcgttaactgaaaggctgggcaacagagctcctgcggcgggccgggcacccagaagcgggcttaggacaaacacaggtgctccagacccgccaggccgccgca

SEQ ID NO: 2505 - DNA, 30 bp, Homo sapiens
  chr3:42543146-42543176
  hyper
agcggccgagcagccgccccttggaagctc

SEQ ID NO: 2506 - DNA, 46 bp, Homo sapiens
  chr3:42641735-42641781
  hyper
ctaacagtaggacacggacataaccactcccggccaaaaagaacac

SEQ ID NO: 2507 - DNA, 121 bp, Homo sapiens
  chr3:42696340-42696461
  hyper
gaatgcggcgctgtggcgctgctctcggtggggagggggttaaattcctgtggtgggggcgccggcgcgcgaggctgaggtcttgctaggcaccggcgaaggggggcgctcccctgcgccc

SEQ ID NO: 2508 - DNA, 685 bp, Homo sapiens
  chr3:42814331-42815016
  hyper
gaggcccagcaaacagcgcttgtcaggcggacctgagttcgagttctgactgtgccatctacgctatgactttggggcaggcgacccaccctctgcgcctcattaacccatgtactgcatggaaaataagcgtctgcctgggttagaagagggctgtgtgtgaagattcaaaggacgaaggggaagagtcctcgctgggcgcccagcacgcggtgagcgcccggccagtggcagcgcgctcgggctggggttgcgctcgggctcggttccgcgcccccggcagctgcgggctttcccagctccggcccgggcccttccgctctccccggcacttacagcggtctctctccacttctcccttctaggaccgcggcggctaggtcacctcctccggacgccgacacgcgctgccctggcaaccgtcaccagggaaacaagcgacgtcacttgcgcgttttcaacgctactctacgggggccgagggggcgccaagagttctgaaagtgacagaggcgctgatggcgcgctgggctggatccaagcgagcacgatctcgagtgcgctggagattttaaatcttctggagtatatttttaaaaaagttttgtggaccaaacgttctgcacagagatgcccattccgctctcctgttggggagttaaaaagcgaacgatctcaccatgaa

SEQ ID NO: 2509 - DNA, 34 bp, Homo sapiens
  chr3:42845261-42845295
  hyper
tttgtaatctctaacccgccgactcggcaggaga

SEQ ID NO: 2510 - DNA, 30 bp, Homo sapiens
  chr3:42846169-42846199
  hyper
gcgcctggggttcgcgcccgggcacttgag

SEQ ID NO: 2511 - DNA, 105 bp, Homo sapiens
  chr3:42922531-42922636
  hyper
gacagccagagggcccgcgggcgctcgggaaaggggcgggtgcacttccggcccccgaagcctcagcgagggagtctccgggaggcgcggcggggagtaggcagt

SEQ ID NO: 2512 - DNA, 30 bp, Homo sapiens
  chr3:42922845-42922875
  hyper
cctggcagttttcacggcataagcccggca

SEQ ID NO: 2513 - DNA, 30 bp, Homo sapiens
  chr3:42947550-42947580
  hyper
cctccctccccgagcgagaaaggaggacca

SEQ ID NO: 2514 - DNA, 30 bp, Homo sapiens
  chr3:43021333-43021363
  hyper
cgctcttagtggggcggaccgtaataaggg

SEQ ID NO: 2515 - DNA, 558 bp, Homo sapiens
  chr3:43147168-43147726
  hyper
aaactctcctggatcccgaaggcgtcctagaacctccccctcaccccggggcccagcaccgcgtcgtcccctccagggggccgagggttcgacacctccacttcaagtcccaggcgggtgtcggagtccgctccagccccaagcgcgcgcgcgtcttacctgaagcctggactccgcgggacgaagccacctccgccgacgcgtccaggaggccccacggcggcgccgctttcccaccccgccgccgcccccagcgccagcttctggcccaggaggcccagaaggcccaggcagccagcacaggtttggccgcgccgccgggttcgcagcgaccgccacctccaggctcgcaggtgtccgccgtgcgcctgcccggcgggcgagcccggcgcggagcctgtgcgcctgcgcagagccgcgagttcggttgccctggccccggccacaaccttggctcgcggaatcctgggaggtgtagttttgcgtacgaggacagcccgcgccgccaccagcctgcggaatgttgggagtgataatttgcgccgagaggctgagttt

SEQ ID NO: 2516 - DNA, 215 bp, Homo sapiens
  chr3:43663333-43663548
  hyper
tgtggctgcaaggggccgggctctgctgcggacagctggggggtccgaggtgccctccccgactcaccagccgccgcagcgctccacgtcttcggaggcgggtccgagagccggcgagaaccggaggccgggcgaaagagtgctcggtgcggggggcgggccaggccagtggggcgggcgccgccgagcgctgggcgtggcggacgcggcggggc

SEQ ID NO: 2517 - DNA, 201 bp, Homo sapiens
  chr3:43731958-43732159
  hyper
aggctcctgtgagtcgccctctccccctggccccccaacccgcggggaaaggctggcgggacgccacacagcacctcgattacgccatttcatttgccactgcaccatctatcggacactagctaggctcttccaggaccggacgcacctccgtccccaaggtgccacctgacagccaacaccgacggggtgatgcatgaa

SEQ ID NO: 2518 - DNA, 31 bp, Homo sapiens
  chr3:43811143-43811174
  hyper
gtatcctggtagggttcgttccctccccagc

SEQ ID NO: 2519 - DNA, 279 bp, Homo sapiens
  chr3:43935797-43936076
  hyper
cagcccagcatctcccgccagcctcgctgcccgctccgccccggcgcaggggccccaagcccacaggcaacgccagcgcgctcccaaccgctggagacagaaacaatgtgcgcgcgcacacggcccacgtgcacgcgcgcacgcccacgcggcatacaggcgcgcacgtgcacacgcgcgcctgcacagctctgcggctctgctccggccccacaggcccatcttaaagtgtttcgtgctctaacttaccaaacacgtggcagccggcagaacgaaaag

SEQ ID NO: 2520 - DNA, 2615 bp, Homo sapiens
  chr3:44036274-44038889
  hyper
gcgttggtgtgagaacgagcgagagaaagcgggagcaagagcgagagctatgcctcccttagtgtcagggagggtggccggctgatgaaggtgctgtgcagaaagccggggaagggcttaaagagggtgctggcgcctcgggaacgccctcccgctgcaccctacaggaggtcgtgggcggtggcttaacagccccagtgcagagcttgaaccccaccgtccagaaggaaaggtgagtgggggacccgggcgggaggtgaggcctgccggcagcggccctcaggcgtgctgggcagcacggctagcagaggcggcgcctggtcttggatgctgcagcggagacgccaaggagactgaatgcagggagcgaggcgtagcggccgcggagggtggggccgcccggaaatccaggcggcgccagccttgtagcatctgcaggccgggggcgcgcacacgaggggcacgtgggtgtggaggaaccggcgcggcggggcctccttcctgcagcgccgcggcggtcgagtgcccgtgctggaggaacggcgagtggggtgcctgccccgcgcaggcggtacccgccgccccagctccgcacacagcaggcacggccagggaccgggaccgtggcccagcgcctggaggcgctctccacgcgcatctttcccgatgccggggcgggaagccgagtggctttgtccggagatgccaggggatgtgggcaggggacgaagaggtttcccaactggccaaaccctggcttgaggaaagactgaggtggtcattgacccgtgggagcgccctggggcttcgagggaacggcagccgagcccgggagactggtgttgggtacccgcgggggccggcgggttccacgtgggtggaccccgagctgagggcagggtagggtcgcggatcgctgacctatgagctcccctactcccgcacaaggacacctgcacatggacccgggcttccacccgcttctggctgggttggcgccgggagcgcgcaggggagggacggcggcggagtgcggggtttggcgggtgaggtgggtgaggtgtggccgcgggggagggggcgaaggcactagaaggctgcggtcgcgctgtcgctgctgttcccaccgtcggcgcggggcgcggagggggcgaagaggtgcctgccagtcgcactgcggtctaggggtgaaaggaaaagggtccatgtaaaggagaaagggcaggcagagactcttgctggtgccagcaggcacggaaggatgtggccgcggggacttggagtttagagggcaacgctgggtgtcataatgccggagatgaccccgggtgcagaggcgattccagttgggtagagctacagagaacgtggcccgagaaggggagcttccttaaattagacatatcctgtgttgtcctaaacctagcatttaccctctcccaccccgctcccacaacctccagggtcctagcggagtcatttaagcgctcagtactaccagcttcattttaggtaaaaatcaagactaattctgcactttattaacctcctcgtacccaagtcaccacggggcagcttttcacagccctaaggcgtggtcacttcaagcccacagcgagttgctcgtgtcctcggcttctgctccgcaaatctcggacgatgccaccggaggacgctgaaggcaaaggctggtggggccaggcgccggcgagactgccgcgctagcacagcttccgcgggagccgagtgctgacgggcctcgcgaccccctcccgagggcaaacggctcggccctccagggacacttggtcagtgtcactctctccctaccgggtgtcgcgcattttctcaacagaacgtgaccccgtagacggatgaactcggaatcggcaaaacccgcctgcccttgtctagtctctctgccccaccacaccactgcccttcactgcggactgcgccgtgtgcgctccgggaccgcccctgcacctttgcccacagcttcccattaccaaggcagccggaggaagacctttccgagttacctgtctcacgtcagcagccacaccgaggcggtccccctcgcaccactccccaagtgcagagcccctgaaagtccgaggctcctgtgccacgcaccctcccccctgcggggcgaccccgcgtatgcgtgtgtgtgtcacgcgtttaatcgcacagagtaattcccagacgtgcaagacaaagcatttcaagcaaagatggtccagagttcaaattggaaagcacatctcgaggcgctgaatctgttctcgccgtctgcctcggtctctggggcgtcgcatccaggagaagggttttaactccctgccagatccgctcggaattagctcttctggcggtgcagcaacaagtggccccgccgcctcccttgtgcactcggagggactacatcctcctcctctcccagcccctagtccaaacgggagtaggtaatggcggggaaagggggaggtgacgagagcggggagaaggaagtacatattttttaattgtgaaattgtctgtctgcgtgctgtgctctgggattctcttgtctcaatcaacttcaattttaacgtggccgtaacgttaagatt

SEQ ID NO: 2521 - DNA, 923 bp, Homo sapiens
  chr3:44039102-44040025
  hyper
ctaatttaatagggccgttcctttttacataagatgctcccccaccccccaccaatttacaataggtaaactttgagcttcctcaaagtttcgctatctagcgtttatgcccgaagctttacgaataaactccctttccaggtaaacctgcccaacccttgtcctatgcccagcgaagcccaggtacgatgggtcaaggacccctggcttccacattgtctgagtcacgttccagttggaaaggccatcttgggcgagggacgtgttgcccgactggtctaaataaggaaagaaagtggagtaccaaagaatcaagggcctctgttcctccccatcccgccaccaccaccaccggtccccgggctctgctgagcgctgcggcggtcttggctgaaaactgcgtccccgcccaaatcgagcgcaaaactcccttggacagaagtttgaaagaatccagtgtagaaacagacttctccgtccaatttggttttaatcagtaatcatataagtatacccacataaccacctaagtggagagcagacgcccagattcacggtccccacgtgttgctggagttggcgcagacgcgtgtgcgggcatagcggcggacgtgacaccgcattttctccgaattcctgccatctagggtggtgccgccccaagagggggccgtggggaggtggggtaataggctgcgcaatccacttgctctgggggagcttagggttcagagcagagcgcaactccggggggctgtcgcacagccccattctcccacaccagaagagcaatgctccttatggatgattaatagccgggcttctcctgaccatgcggcgcgtccctgccggcaccacttagttgttttaatttgacctttattagcaacgtgctcccagaggctgcgagttggattcgcacc

SEQ ID NO: 2522 - DNA, 984 bp, Homo sapiens
  chr3:44040056-44041040
  hyper
cggcttcctgggaaggatcggggactgcagctcccgcgacgcctcctcctcctgcgcagggagcaggcctgagttcctccacgtaatgacctgggagacctcaggcatcccggggcctggtcggagggtcttcgggccctggagctgggcggtgtctgcagtgcaccgccgtgagtttctctcgggtacaatgtgctggtgtgcagagaggaggaaaggaaaaaaaaaaaacccaacaccactcttaagtggcactggcatctatgaagtggcagtggtctacactgagcgtgcccttgcctggaggtgtagggggcggttactgcagccgaggggagggtactgcggccaagggcagggcgagaggacagtcaaggccggctggccgcgtgggagcctttcctctccgggttcagcggccggaatcaccagcactgcggctaaaggggctggtaggctctcctgcaccccgcgtgctcctccgccttctctgtgtcccccggcttttccaggaggaagatggggtgcccatcgcgaatggggcgcgccgggccgcctggccgggcggtcacgtgtcccccctcccccgccactgcggcgggagttccaatcagagcgcgccagggggctcctcccgggcaggaaccacccggctcggcggcggagggtgggccgccgtcacctgaccgcccgcccccgccccccgcgagtaaggggcggtggtagcgtctgctcggttacaaatggcccctcccgcccggctcgcccgctcgctcgggctcggcgcggacccgcctgggcgtgctcctcccgccggctccaggcgtcccaccgccctgcccggcgccagcccgcggtcccagccactcctgagggcgcgccgggcacccagcgcgtaggctcgcccacggaggtcgacacggaagtctggaccgccgaggcgtgtggctcgtctaccggcaggtgagcgtgcaccgcgggcgt

SEQ ID NO: 2523 - DNA, 778 bp, Homo sapiens
  chr3:44063257-44064035
  hyper
tttcaaagcaaagccagactccggccctgcccggggtaggaagtctttgtctgcctgcgcgcccgagcgctcccggcttgggattgatttttggcccccgctgcagcaagttgggggctggtgaggagtgtagcggtgactgggggcggagtgcggactcgcatccgctgtaccaggagcccactgccacctcgggattttttttttaacttggaatttccatatgacaaaaaagaaagaggtttctcctcaatctaacggagccattaacatctattaataacgccgacagggtaagtaacggagccgcgctcctcggggtggtcaccgggctgcgtggtcctcggccggcctcctgcatccgctgcccctgtgcgctccgggccggatgcgcaagggcggcgcggggaccaagcctggctgccggccgcctactcctccccttccctaaggtaaggggtcgttttcacactcaccagagctcctgcgggctgagctcgccccctcccccgacttctttgcggggcattttctcttgctggtgtattacgtgtcatttctcacggggcattgccggccgcttttctgcaactgtcctttcggatttggtgatctggtccggcacagaggctctcctaggaggtggtgcccatgcatattcattctgtgtagtaaccgactggccgtcttgccattgcaggctgatttattgatttatgtaggaagtgtgttttattttagtaattagggaaccctgaattcacgggaaccgtctgca

SEQ ID NO: 2524 - DNA, 31 bp, Homo sapiens
  chr3:44379883-44379914
  hyper
ctagaggcagggcaccgcggaaggttgaatc

SEQ ID NO: 2525 - DNA, 30 bp, Homo sapiens
  chr3:44481337-44481367
  hyper
gcttcagtgaaaggacgaacaagtggctct

SEQ ID NO: 2526 - DNA, 42 bp, Homo sapiens
  chr3:44518641-44518683
  hyper
ttaaaaagcaagagcacgctctcatttcgtaatatatattta

SEQ ID NO: 2527 - DNA, 520 bp, Homo sapiens
  chr3:44596583-44597103
  hyper
agtaagccctgccagctctcccgggtgcggggacgcgcgcgcccaccttcgcaaacgagacttccgggatcccggagggggcggaagtcgaggcctctctcgcttccggctcggccattgtttttggtctaacgggcagtagagtgtccggcttcggtgccgagtgccaccgcgagtgggccgagacgcggagggaggcgcggccggagctcgggtcgccgacgctggccaggaccgcgcttcttcccggcggcaggcggcgcggtccccgtgactctcagaagccgcccgatgtagagccgcttctttgtctcatacccctgaccattcgtgcgtggcacggagccgggtatctgcgggtacagcgatgaacagggcagacgtggccaggtgagcggcgctgctgaagcctggtttaacacgaaaggtagatcgctgttttcccagctcttgcagtaggaaactgtatgaactgtcatatttgggtcagacccaggctcagaatcgcaaacgtggagcg

SEQ ID NO: 2528 - DNA, 534 bp, Homo sapiens
  chr3:44626178-44626712
  hyper
gccacccagatgctcggtctctttccgccctaaccaagccccctgcccagcttccaccacttccagggccctcctcacattggctgaagtcgccaagcccttccatccaatgatagggcaaagcccggaagggaggcagggccagagcgtcggccgaccgcgcggggcttctgaggggcggggggactccagcccgcgggcacagagatgtggaaacctcacgaagcctagaagggccggagggacaggctgggagttagctgggagttgctgacgcagttccttctgcgctttgttcaagatgtgggtctggcgctttcggtgaggggtgctctacagtctggcgtggggggtcgggccgggttctgggagcgtgtgggagacgcaagccaggaggccagggctcctctgcggctgcccgctgctgagatgggcgcggcagccaaggggtcgttgtgggcctcccctttctctcgttcagtgctgcccctttgtcttgggtccagtctctgactcctcgtagctgctcgcttg

SEQ ID NO: 2529 - DNA, 44 bp, Homo sapiens
  chr3:44666868-44666912
  hyper
cggtgctcctgtctaacggactctgctggcgctttgagaagagc

SEQ ID NO: 2530 - DNA, 259 bp, Homo sapiens
  chr3:44690122-44690381
  hyper
ggggcgacattggacacccatcgagaggaaagcacctccgaggttcctagagaggccggcttggcgacttggggagccggaagcccatcccgaggcacttcctgtccggtcattgttctcgtgccggtagaagctgaagtaccggtcagccagcctcctgctgcagagccagtgaactcaggtcgggcttctcagctgcgcacagtgagtggggtcggagggggtgggcacgaacgtcgagggagaaaaaggggctctc

SEQ ID NO: 2531 - DNA, 289 bp, Homo sapiens
  chr3:44726882-44727171
  hyper
ttgacgagcgactttccccttacatcaagtgcacagtaagcccaagcgccggggccgcggggattcccgccagtcactcccgccactaccgccacccggccccgccgccagcgcagcccgcagccccggcaagcctgcgcccgctcggccccggtctctttcgctcaccagaggctacggggcgcccggccccgcacacccaagaaacactgccaccgcgacgcgcctgcccccaggatcctctcgcgagcttcagtacccaaggaagatgggccgtcccggaagtgcg

SEQ ID NO: 2532 - DNA, 249 bp, Homo sapiens
  chr3:44803218-44803467
  hyper
tgcgggcgtcaacgtccgatccaagcgccaaattcaaatttgcggccatcttgagcgggcggaattcagtcgcgcgcggtgcagtcgggaggtggaggcaccggctgcattgttttcgggatcgaggggtgagggcgctatggcacccggctgcaaaagtaagtctgggcccccggcttcgttaccctatttttgcccccaaatacagctgtgaaaggatggcagcctcggaccgcccgcaaggttctt

SEQ ID NO: 2533 - DNA, 30 bp, Homo sapiens
  chr3:44931198-44931228
  hyper
atcctaaaaggctggatagaggcctggacg

SEQ ID NO: 2534 - DNA, 37 bp, Homo sapiens
  chr3:45187290-45187327
  hyper
cctgggtgctttcaagaatcccggcaaagaccctggg

SEQ ID NO: 2535 - DNA, 30 bp, Homo sapiens
  chr3:45636045-45636075
  hyper
gagcaggcccgggacggcgaagtgccacca

SEQ ID NO: 2536 - DNA, 30 bp, Homo sapiens
  chr3:45729879-45729909
  hyper
tacggtaaaaacaccggtgtcttaaggttt

SEQ ID NO: 2537 - DNA, 30 bp, Homo sapiens
  chr3:46774362-46774392
  hyper
ccttgtcatcccctctgcttttcggcacat

SEQ ID NO: 2538 - DNA, 30 bp, Homo sapiens
  chr3:47018362-47018392
  hyper
gggcgagccctccccgccttgccccgcccc

SEQ ID NO: 2539 - DNA, 30 bp, Homo sapiens
  chr3:47020852-47020882
  hyper
cctcgccacctccacgcggcccgccgcccc

SEQ ID NO: 2540 - DNA, 30 bp, Homo sapiens
  chr3:47205843-47205873
  hyper
cggacctggagaggcggcaccgcgacccct

SEQ ID NO: 2541 - DNA, 30 bp, Homo sapiens
  chr3:47324509-47324539
  hyper
gagttgcctagtcgcggctacggcgtcatg

SEQ ID NO: 2542 - DNA, 30 bp, Homo sapiens
  chr3:48130378-48130408
  hyper
ggggcgcagggaggcggccgcttcctcgtc

SEQ ID NO: 2543 - DNA, 30 bp, Homo sapiens
  chr3:48130791-48130821
  hyper
ggaggggcgcggggcggggcctaggtcgcg

SEQ ID NO: 2544 - DNA, 36 bp, Homo sapiens
  chr3:48470349-48470385
  hyper
cccaacccccagaccccgaggcgaggaccccatcac

SEQ ID NO: 2545 - DNA, 245 bp, Homo sapiens
  chr3:48693455-48693700
  hyper
gcgtcaggggaggggcggtgtctcatggggatgccaggacggggcagtcaggaatctgagtcagggcgggtaggtgggggcggcggggaggcgctcagacacggggcgggcacctacgagagggacagcgtaaggtggaatcgctgccgcaggccgcgaaacatgacgaacgaactgggcgggaaggagcgcgcagccacctcgcagcgcgggccctcgaaggcgccgcctgccgggcactggca

SEQ ID NO: 2546 - DNA, 227 bp, Homo sapiens
  chr3:48693851-48694078
  hyper
ggccccttcaaagaccgcgcgcccagaggccgggtgccaagacccccgaaaggtcgccctcttcggtggacacgccccttccgtctggccccgccccctccccagtctcatcgctgcctcggcggcggccccttccggccacgctctacggcttctggcctaagcgcgtccataccaggccgtggcctcagaagtgactcccagtactcactcgcattgtggtcccg

SEQ ID NO: 2547 - DNA, 121 bp, Homo sapiens
  chr3:48698889-48699010
  hyper
cggtccagagctgccgccgtacggataaggccgctctgcgggtcgatgctgaacagctccagcgagcggctgttcatgagtgccgccagcgagtagactaggcgcccggcctcgccggcgt

SEQ ID NO: 2548 - DNA, 440 bp, Homo sapiens
  chr3:48699376-48699816
  hyper
ggggggctgtcctttctgctccggatgtcgtggctctctcgccctgacccttgctccctgttgcccataattccccacagcagcgcgcggtgcccactcttttgcgggagcctgtcccagcgttccgctgggaggacaccggcttgggaccgtggtgccgaatcaaaaagtctgaagggaggggcgagctgttccccgagcccgggacccctgaggacagagcccctggtgacagactacctctttgcaaaggtcctgtccgcccgcaagaggagacctctgggcgccagtataacacagaccctggtccctgtcctgtctctcgttcgcggctgcccaatggctggacgccgtgttcaatccccagctcctcattcggctgctcagggggccctcgactattccgggcgctttgccttctccctcggagccccacgaag

SEQ ID NO: 2549 - DNA, 30 bp, Homo sapiens
  chr3:48700460-48700490
  hyper
tgctgaacagagcgcgaaggttcgccgtcg

SEQ ID NO: 2550 - DNA, 591 bp, Homo sapiens
  chr3:48701096-48701687
  hyper
actcagtcctccccccaccctcggtgcattccagctctccctgcgtaactcctggcacgcgccggtctcgccaggccaatgggtggacctggcgcaacagacgtcacgagaggagcggaggcgaggggtgaacgcggagcactccaatcggtcagtcattgtttctattggcacaatgggaggccccgcccctcacggcggactcatcgcatgggggagggggctccgcgggttgccggctaaccgtgagagagtccgggaggtacactatacggaccggcctccaaaggcggaatcgataacgagctgcagcgccgggtgcagaggacgcgggcatcccgaagcccaggaagaggtcagggccgggaccccagaacgctccacagggtgcggctcccgcgatggggtggatcctggttctaacaggcgaggaactcctggccaaggcctctggcccgccccgaacggtccctatgacatcaccatcaaccaatcagtcggcgcatcctttcgccccttgactgctccgcttccgggaggcggggcttctgcgggttccacctcccgagcgccccttgtggctaccaaggt

SEQ ID NO: 2551 - DNA, 30 bp, Homo sapiens
  chr3:48885299-48885329
  hyper
ctggttgtgacgcacgccaccgcgggcgtg

SEQ ID NO: 2552 - DNA, 30 bp, Homo sapiens
  chr3:49027048-49027078
  hyper
gatgccccctctgacggcctatgaaacctt

SEQ ID NO: 2553 - DNA, 30 bp, Homo sapiens
  chr3:49027986-49028016
  hyper
cagggccccgggcccgagcccaccttaggt

SEQ ID NO: 2554 - DNA, 30 bp, Homo sapiens
  chr3:49044450-49044480
  hyper
caccccgccagccgcgatacggcgcagttc

SEQ ID NO: 2555 - DNA, 30 bp, Homo sapiens
  chr3:49066684-49066714
  hyper
cttgtaggtgaggccgtctccgcagttgaa

SEQ ID NO: 2556 - DNA, 30 bp, Homo sapiens
  chr3:49158343-49158373
  hyper
aaggccgagggaggcggagcgccaagctgg

SEQ ID NO: 2557 - DNA, 188 bp, Homo sapiens
  chr3:49171170-49171358
  hyper
tggcctgccgggatcgcaggagcctggggttggaatgtgcgcggcggcgtggagggggagagaaggaggaaagtgggtgggggatatggggcgcgccccacccagggccctgggaacgggaagctgggggaaacatggggtcctccggtctttagggctgggtctggcctgccgcctccacagtcccg

SEQ ID NO: 2558 - DNA, 30 bp, Homo sapiens
  chr3:49208499-49208529
  hyper
tgttcctccacccccgctagcctcagtgta

SEQ ID NO: 2559 - DNA, 30 bp, Homo sapiens
  chr3:49449492-49449522
  hyper
cccgcgcacgcgcgcgcactcacagctcat

SEQ ID NO: 2560 - DNA, 30 bp, Homo sapiens
  chr3:49507463-49507493
  hyper
cgtgacttttagggcgggggagtggctagc

SEQ ID NO: 2561 - DNA, 30 bp, Homo sapiens
  chr3:49711368-49711398
  hyper
ggccccgcccttcgcgtgcttgggccatgc

SEQ ID NO: 2562 - DNA, 30 bp, Homo sapiens
  chr3:50126251-50126281
  hyper
gcgaccacatttcccggcagccctcgcaca

SEQ ID NO: 2563 - DNA, 30 bp, Homo sapiens
  chr3:50192037-50192067
  hyper
agtcaggggtcctgcgccgcggggcccacg

SEQ ID NO: 2564 - DNA, 39 bp, Homo sapiens
  chr3:50192965-50193004
  hyper
ccgggcgcccaggccccgccgctgcggaagaggtgagtg

SEQ ID NO: 2565 - DNA, 457 bp, Homo sapiens
  chr3:50243152-50243609
  hyper
tggggcaggctggagagggcccgaggggaggacccaagaggggcctggagcagtccctggagcgctgccccgacgggcgcctgacaggcagagcagcccggctggcacgatgggaatccgggtatatttatctcggctgctccggacaagggcttgagggcagatcgggccgggccgcctgaggggccgcggggtacatgctggtcccagagccggtgccatttgcagaggagccagcgggcacagcgggcgcagggcgcgagtggctccctgacctgaggccggggcgccgtgcgagctcctccccacctggcgctgggtagggtgtaagttagagcccgcgcagcgcacggcggagagaaggaaccaagacttggtttgcaagagcccgcccccgcccggttggccccttcgattggccacagcaaatgcgtgcgtttgtttacacccaggcagg

SEQ ID NO: 2566 - DNA, 104 bp, Homo sapiens
  chr3:50374390-50374494
  hyper
gaaaccaagggggccccggcacccagcatctaggcggtggaatcggggtcttacgcacggttccgcgggcaggtccccggccaggacccgcggggagccacgta

SEQ ID NO: 2567 - DNA, 61 bp, Homo sapiens
  chr3:50374934-50374995
  hyper
ggcggggacacgcacgcttcgcccccaggaatgacctcatcgctccggagctccactcaca

SEQ ID NO: 2568 - DNA, 116 bp, Homo sapiens
  chr3:50375444-50375560
  hyper
gcagagaggcctggcggtgaggcggaggagctccaggtcggggaaatgtcccggagattgaagggaagccccagggagagggccgctgctcgccaggctccgcaggcccgacctat

SEQ ID NO: 2569 - DNA, 101 bp, Homo sapiens
  chr3:50378066-50378167
  hyper
gcgggctggaagcggtggccacggccagggaccagctgccgtgtggggttgcacgcggtgccccgcgcgatgcgcagcgcgttggcacgctccagccgggt

SEQ ID NO: 2570 - DNA, 49 bp, Homo sapiens
  chr3:50387961-50388010
  hyper
agaacgtccctcttcccgcccagtcccgcgagcccgggtggcacctgat

SEQ ID NO: 2571 - DNA, 870 bp, Homo sapiens
  chr3:50402180-50403050
  hyper
caggacgcccagcgacggcgggaaggaggccccgcggccacagtctgaggtatcttcctgcggggagagacaaggagctggtcggcctgggcgggcgcaaggccgcgggatttcgggtccaccgccccctctcctcactgtcgcgttgtagtcgaagcagatgtgcgggcctctccggtatcgcggtctctgcactagctcacactgctccgggccgtccgctgggcatgggtggggagtcaaggaggcggacggcggcggcggcacggagggggcgcgcggggcagagggggagcgggcggcggggagggcgggggcaggatacagtgcgtctccttctgcagcagccggccagcctcgcactggctgcacagcggcttctcggccaccacaaagagaagattggtgttggtcagtctctgcgcgtggaacagcctgcgggcagcccggaaaggcggggcgttgagtttgccccgccctgacccacccccatcctgcggccccgcccccggccgctcggaggccccgccccttccatcctcccgagcgtctcgccccgctcacaggttccgcccttggcctctggtcccgccccactgccagcacctggagcagtttccgcagtcgatgatggcgttgtaggaggcgtttaccgagccgaagtagtactgggtctgtttcatgacgcagctgctctcgcgcgtctcggggctcccctcggcctccgcggggtctgcgagggcccagagcgcctcagctccgcccacagaccctggcaaggtctccggcctccctcagtcgtagaccccaccctccccatggagtcgtcttagctcagattggggacccggacttgaggaggcgcctcca

SEQ ID NO: 2572 - DNA, 31 bp, Homo sapiens
  chr3:50526893-50526924
  hyper
agatggggctatggggcgccagacaggcagg

SEQ ID NO: 2573 - DNA, 30 bp, Homo sapiens
  chr3:50654371-50654401
  hyper
accgaggaagtaaccgccccctcgggaagc

SEQ ID NO: 2574 - DNA, 41 bp, Homo sapiens
  chr3:52001296-52001337
  hyper
cccaaacttcgcggcccgccgtgccccgcccggcccgcgcc

SEQ ID NO: 2575 - DNA, 30 bp, Homo sapiens
  chr3:52273366-52273396
  hyper
cgtgtgtgtctgtgcgccctgatcacggtg

SEQ ID NO: 2576 - DNA, 45 bp, Homo sapiens
  chr3:52280109-52280154
  hyper
cgcttcgggtcctgcgcccgcctagaaagcgggaggagctgagtg

SEQ ID NO: 2577 - DNA, 30 bp, Homo sapiens
  chr3:53164592-53164622
  hyper
ggctctttctatttcggtaggttttgcgct

SEQ ID NO: 2578 - DNA, 227 bp, Homo sapiens
  chr3:53195773-53196000
  hyper
tgtgttctccccctgcgcgcctctccgagacccgatccttctgtccctcgccacccgatccgtccgtcccttgccctccgcgtgctccatcgccccacccccacccacacccctacccccgcccgccgccccctcgatcccgtcctcccggagccgcgcccccggcccacgctcgccgccccctgccagtccagccgcctctccgctctaccgcggggcccaggcca

SEQ ID NO: 2579 - DNA, 30 bp, Homo sapiens
  chr3:53381790-53381820
  hyper
ggctggagctccggcgcttcctttccctga

SEQ ID NO: 2580 - DNA, 327 bp, Homo sapiens
  chr3:53879706-53880033
  hyper
ggatctcattttaggcggcgctagagatcccgggccagggaaacttgagaaccgcagctccaaatcgccagtgctgacggcttccgctttgggagccccaggtgttgctgtccgaactcacttggtggaaacagacatttaccagaaagcctggggtcgggcagcgggcactcctaccgctctaaccccgcgtagctgaaagaattcgctccctcaaaggagtcagtgagcttcggcagtctgcgttccacccgtttcgcttcgcgcggcggggcgattgtgtaaagcgggcccgggtctcggcgtccagcccggccccaaacctcc

SEQ ID NO: 2581 - DNA, 30 bp, Homo sapiens
  chr3:53926032-53926062
  hyper
gccgagctgacaaccggatatgacgttaag

SEQ ID NO: 2582 - DNA, 274 bp, Homo sapiens
  chr3:54155218-54155492
  hyper
tatgaacccaggtgtctggtgcgccgggagccccggcgacgttaggagcgcactccttgctggggtcaccggagttgcgcttggccgggcaaggatgactcagcctcactccggtcggtctttaccgccagcctgcgcgagggctccacaaagttcccaatcacaccccatacctcgcacgggggagaggggttctgcaagctgggtcccggggtgggggcagcggcgagagaggcggggagaagcctggttcccagaacgcgcaggggcttct

SEQ ID NO: 2583 - DNA, 1104 bp, Homo sapiens
  chr3:54155524-54156628
  hyper
cgagaaggcgcctcctccggcgctcactgcctcctgcccagtgcggtgggcgccggagtggggagcaggcaatcccccaggctcggagaaatcttttatcccgaaatccagggtgtcccccggtcaggatcgactcggcgccgcgttggcttcctcgctcaaccctgacatcccggtccccaccagtcaccgcagccgggcggactccgaaggcagcggccgctggggagccccggggcctgggtcgggcgcgcagggggccgctgcgctgcggccggatgccgggagccccgcgctggtgcgcccaagccgtggtggcagcaccgccctccgtgctttcccctgtcgggcgccgcggccggaggagcagctgcgggcggtcacgcagcgctgccctagccagagccccgagctcccacccagtcccatccccagcccgatccgccccgcgtgcgatcccgcctgccgccgcgagcctgtgctcctttctgagatttctgcttcttccccagctccctccccgcaggagaatcgcgcggcgggggcggagggcgcgccccctttaggttccgcggcccccgaccccgcccggcccaggggcggagcgggcatgctacgccctctcctagcagccgcccgcaaagtgcggagcgccgcgccctgccctcggcttccctcccgcgcccccaacccccaccctggctagggtcgcccggcccggggccagccccagagtcgcgcccgcggtggcggactgcggagttgtaaagaactcagcggccgcagtagcccgggtggggcagggcgcgctccgccgcggccaaggacactggagtttccgagtccccgcccgcgcggcgcctcctgccccgccgccctcccgccgcggcccgccggactccccggggccgccgaggcggggccgggcggctgctgctgctagaggcgcgtctcgctgcctcctcccccgcccgcctccctccccacctctcctccctccctccccacctctcctccctccctctcctctccgccctccccgccccccccacccgctcctttttctgctccccaagtgagccgggcgcgcgagaggcaggcggg

SEQ ID NO: 2584 - DNA, 248 bp, Homo sapiens
  chr3:54156654-54156902
  hyper
cgcgcgctcgcccaccgcccgctccgcgcagctccccgcggccgctctcgtcgccgccgcagcgggcgcgtcggagggagcccagcatggccgggccgggctcgccgcgccgcgcgtcccggggggcctcggcgcttctcgctgccgcgcttctctacgccgcgctgggggacgtggtgcgctcggagcagcagataccgctctccgtgtaagtgccggctcctgcgccgcccggggaggggaccttg

SEQ ID NO: 2585 - DNA, 6 bp, Homo sapiens
  chr3:54156978-54156984
  hyper
cgccgc

SEQ ID NO: 2586 - DNA, 186 bp, Homo sapiens
  chr3:54157005-54157191
  hyper
cgcgtcgggcggcgaggccggggtgggatgctctggcccctgcccgcaggttgccgagtgagatctggagaggctcacctcaagtgacggcaccaactttggagcctggttaccgaatccaacttccatgggccgctgaatttcccccctctttgctctactgccgccccacttctttttttgggg

SEQ ID NO: 2587 - DNA, 30 bp, Homo sapiens
  chr3:55237864-55237894
  hyper
ttgctgtgtttttttaaaaaagcagaggga

SEQ ID NO: 2588 - DNA, 1341 bp, Homo sapiens
  chr3:55520463-55521804
  hyper
caatctggcctccgtcggtgcgggggggtgtcggggaaggtgtacgccgctctggagtagttggcccctagttcctctgcgggttctctcaaccaaggagtccctttccccatcccgagccccggccacacaccgtcccggtgcccgcgcagtgggcgcttggtaaatatttgttgaattgaatcattatcctgttactgaaatatacatagtaaattacactcgatgttctcagagcaaaaggaaagtcgtcagtgaaccgcactcagtttgtctactatcgctcttccccactttttctcaaaaatcaaaattgtttgcagaacgggtggtgcgaccagaagtgatctcctgggacactgaggcagtgcgcccggcgtggagggcgaaggggtaggggttcctgccagcgacgctggagttccagcttcttcaggcggttggggaaatggagggataggaagaggcgaagggaactcagttaacttccaacagggggtggggggaagtaaagaaaaaaagtggcagcgcactgaacacctaccttcatggcgagggggagggggcgcggggaggaagtcgccacccgagcgagcgcagccgaggaatccgagcggagcgaccgggttaagcctggggggacggtcaggagcagggctgcggagtcctccggcgcgcgtccggcgggcgcagtgaaccggagctgaagcgggcactggcgcccgggcctggactcccgagttggggcagagctgggatgcgcccaggaatggagggggcgcggacgcgcgcgagccggcagcaagggcagggcctggtcggggcgcaactagggagccgccggtccggcgagggcgcgcaggcaactgttccacggagaggcgctccgtttccaacgtccatcagcgacggcggtaattagggctttccaaccccaaatgtgggcgtgattgtgcaaaagaccttacgacaaataataataaaaagaaattcttcacaagagggtgaaaaaaatgtaccactactcaactgtggcccggggcgggggaaggggggcgatctgtgcgcccaggtgcccccagttcattcacaccacagattctgcaaactcttggcggctcacgcctcctgatctccagctcctcctctctgggtctgtagccgaaacgtctgcttccagacgctgatcctgcagccgcgagttagtgtggacgtctctgtacacacacagacacacaccccaacacacacacccccgctgcagctttggggccacagaacaatcaggcgcgcatggctttttctccgggagatgccgctgaaaacgcacaagtcgccatc

SEQ ID NO: 2589 - DNA, 254 bp, Homo sapiens
  chr3:55522596-55522850
  hyper
caggattttaaagccgtactacgggctggggtgccgggaggcggggtacactctccttgtctccccttctctaagttccccatcccccgcggcatctgctgaaagagagaggtccactccgcagccgctgcctgcctgccgcctggttgtctgcgctccttccagagccaccgaccggcgggaggctgaaccccaacttccccgcctggaccccttggctcgcccgcgtatcccagaccgctcccactggggct

SEQ ID NO: 2590 - DNA, 30 bp, Homo sapiens
  chr3:55523084-55523114
  hyper
aggtgaggagattgcgaagtttggcaaaac

SEQ ID NO: 2591 - DNA, 30 bp, Homo sapiens
  chr3:55749866-55749896
  hyper
tacttcaaatttccatgtctcaaaagctgt

SEQ ID NO: 2592 - DNA, 30 bp, Homo sapiens
  chr3:56501337-56501367
  hyper
aaccgacaattcaccgctcggggagtaaat

SEQ ID NO: 2593 - DNA, 685 bp, Homo sapiens
  chr3:56501705-56502390
  hyper
tcccctagccctccccgataaatcggcttcattttccctgacacgggttttttaaaaaaaaatatgctcccctctgaacccacccaggcggccagccaccccacccccgggcgggggctccacctttctccactttgttctgcttaggattgctcaagacccccgaccccgcgaacaccccacccctcgaggcaagaggggacgccaggcagaagagggggatctgagagaagaaaggcgatggcagtgagggtggctgccggagagggactgcgggaggtggcccgggcagccggggctagcgagcggcgcccgcgcgctggaggaaaccgtgcacttgttccaatccgggggtttatacatcagggcaaagcctcccttaggccgccccatccctccccccgcccaagaaagccccgtaggaggcggatggttcacccttaggctccccacgataacgcattgcagctccccacgagcgagggggacccggcacgaggaatgcccgggcacgggcgccccgagggagccgggcaccaggcggccccggccccggcgtcggcgtctcacctttccgatgctcgccccggggccgtcccacatggatttttacaacctctcgtcgccttggccccgggcggccaggaggagcaggagccggcgccggagccggagaccgagcgag

SEQ ID NO: 2594 - DNA, 597 bp, Homo sapiens
  chr3:57112783-57113380
  hyper
accagcagcgcccgacgcgacgctgacctgcgggtgccccgcggggctggagaagaaagttgagcgaaaggggcgcgtcccaggacaggtggcacctccctccccggaagtggctccgggaattttcgctcaaggggctacccggggaacagagtcagggtccccagcaggagcgacggctagtcgaggctggcggtggcactgcccacctgcgctgcgcccagtgcgcccccgtgcgctgggcataccccagaccagggagcgctcagggcccgccggggacgccgagacctagcagggtaactcggaggtgggagtgggggtccagctcggggaccagggcaaaggagggactagaccggaagacggtctcactccgggagacctagcgggggtgtcccgccaaaggggtgtctagccggggagggtctagcgcgggagcgggtttcccgactgcttcccgcactcacctcgacccccgcgctggttcggcctctccaggctggaaaactcaccgcggcggcggcggctgcggcggcggctcccctgggctgggcggggccgggggcggggaggccgggccggccacgtgggcgg

SEQ ID NO: 2595 - DNA, 560 bp, Homo sapiens
  chr3:57198369-57198929
  hyper
ggaatggcaatcacccgcgcccatcgcccagacagtgtcaaaggagcgctcggttccacgaagacggctcaatgcacacggcgaaagtctgggcacctctccagtctcgtctcaggcacctcacccagatgacacccacgcggccctttggcggaaaaatatccgcaactcgaagcagggaaggaggatatcagccgcgagaccttcacaagacgaagggctgaaccgggaggcgaagtttctcaggaggtcccggagtcagaggaggggtaggagtggggtgacggccccaggcgaggaggaacaaagctactagaagagcggggcgcatccctccccggtgctccaagtcccctctccggccgcccgggccttagcagggttgtggactgaaagtccgggagaatacccccttccctctccaaagcgcaacccggtccgggtggctcgggggatcccagcccgggacacgcagccctgggacgaaggaggtcccgggccaagaacaaagggtggggcgcccggcccagccccgccgcccctcacgcccgccctctgaa

SEQ ID NO: 2596 - DNA, 31 bp, Homo sapiens
  chr3:57261347-57261378
  hyper
ggggattaagactggacgcttcgagcggagt

SEQ ID NO: 2597 - DNA, 623 bp, Homo sapiens
  chr3:57994557-57995180
  hyper
tgagagcatcaagctcgtgtccatcggtgagttctctggccgggcccaggcgcccactgtggtgccgacccgcccccgcgcgtgcacccctgcggagggcgaggatttcccgcagcgcgcccccacctcggagataagggggagtcgtccccaggggtgggttatagggggcctagaccccctccccggtgtcttcccctgggatgggacctgttgtgatcgctccccgccatccgccccagcagtgcacctttggctggctaagggttgagggtttgggctggggtcacaggaggagaggtggagttgttgcatttctctacacctggggcgcccctatgggagctaggggactagaaaccctcgttcgctgtccccgggggcgggccctagggtcagatgctccgcggagtgctctccctgctgcgcccaggttggtgctctcagaggcagctgaatgggcgttggctcggaggccgggccgtgagacctgaggaggaaccgttctctgcgcctggggcctccctgcccaggtggagacagagacctggtaccttcccctgccgtcgctggaatgggtgtgggccccgaggttgcaagggtaggcgcgggtgtgtgtcctc

SEQ ID NO: 2598 - DNA, 30 bp, Homo sapiens
  chr3:58223131-58223161
  hyper
tgtgtgtggctctgcgggctcagaggccct

SEQ ID NO: 2599 - DNA, 30 bp, Homo sapiens
  chr3:58224036-58224066
  hyper
gaaggactgcagctcgcccacccagatagc

SEQ ID NO: 2600 - DNA, 30 bp, Homo sapiens
  chr3:58474980-58475010
  hyper
cacaggagcctggatacttggtggccacct

SEQ ID NO: 2601 - DNA, 30 bp, Homo sapiens
  chr3:61237191-61237221
  hyper
cggaggccaatacgcgcagagcatgcgcct

SEQ ID NO: 2602 - DNA, 49 bp, Homo sapiens
  chr3:61548801-61548850
  hyper
ggggagggggcgggggcggtttcggcggccggggcggtttcggcggccg

SEQ ID NO: 2603 - DNA, 91 bp, Homo sapiens
  chr3:61656125-61656216
  hyper
ttaaattatgtcacagcgcattgcagacttgtaatctgttttcaaaatggtattgtctgcgcccttattgatcagcgcgacatcttttact

SEQ ID NO: 2604 - DNA, 207 bp, Homo sapiens
  chr3:62254619-62254826
  hyper
tgtgttttaacattgtcgtttgaaattacattatcaacagaattgtggcatagattgcagttatactttacaacttttttctttctgcagcgaaaatgtgatcagtattggccaacagagaacagtgaggaatatggaaacattattgtcacgctgaagagcacaaaaatacatgcctgctacactgttcgtcgtttttcaatcaga

SEQ ID NO: 2605 - DNA, 31 bp, Homo sapiens
  chr3:62353488-62353519
  hyper
gtttgtggcatccaccgagatttcggagtta

SEQ ID NO: 2606 - DNA, 131 bp, Homo sapiens
  chr3:62353778-62353909
  hyper
ctgtgcaaacaaaatcgacaattctccttccccgcgcaatgggtctgcgaattgggcggcgggcggggacagaaccgttggctgaccaggacacaacctccatcctgccccagagcgtctttctccgagcc

SEQ ID NO: 2607 - DNA, 116 bp, Homo sapiens
  chr3:62354445-62354561
  hyper
cgcggatattaaaagtgtgtgtggggggaggcccggagcgacgcgccagtaatccgagctcttgattatccagattcggatcaaacggggcggcggcggccggccccctcctggga

SEQ ID NO: 2608 - DNA, 11 bp, Homo sapiens
  chr3:62356208-62356219
  hyper
gagactgagtc

SEQ ID NO: 2609 - DNA, 30 bp, Homo sapiens
  chr3:62356947-62356977
  hyper
tggatgcggatatgcgtgttgagcgtggag

SEQ ID NO: 2610 - DNA, 52 bp, Homo sapiens
  chr3:62357618-62357670
  hyper
tccaggctgccccaaggaagccgccgccgccgatcgcccctcccggcccccc

SEQ ID NO: 2611 - DNA, 381 bp, Homo sapiens
  chr3:62357735-62358116
  hyper
cggagcctcctggcagcttgctgtggcccttgacgcctccgcgctcggcagtcagggccgagttttccttcagtacctgctccagcggcgccggcaagcgctccttatggggatagggagccgggtgggggaacttgtccgcagccaggccggccagcttggcgttctccagcagaaagagcttggggtgagcagccagggcggcgggggcctgcgcattgaggaggccagacgggaagaggtggccgctgaggagctcagacggcgggtacgcggtcgagtccaggtagttgaagtagtagagcgagccgctggccggcagccccacagcctggttgatgacctgcggcttgatgaccctgcccgcgggcagcgcggacg

SEQ ID NO: 2612 - DNA, 295 bp, Homo sapiens
  chr3:62358336-62358631
  hyper
cggcgagcagaggttgagcagtttcttgccctggctgccgtccgcctctagcgctccaggccggggctcaaagggcgcacggggctccgacgtcttggccatgatgcgctcgatggaaaaggccagtgtcttggaagtggccggcgacgctccggcgcgcgggcaggccgggggcaccatggtctccagggaagccgagcttgccatggcgcgcggagctgagccgagccaggctgggccagggcgcagcctctctcctctaagtctgcattccggaaaaggcaggggggaaaac

SEQ ID NO: 2613 - DNA, 30 bp, Homo sapiens
  chr3:62359139-62359169
  hyper
ttcccccgcgcctgccggccgccgccacca

SEQ ID NO: 2614 - DNA, 497 bp, Homo sapiens
  chr3:62359441-62359938
  hyper
atcagtctagtagccgaagtatcccttagccctccgcagccgagctgggcatcgtgctaataaactgccatttacccacggaaccggcgccagccccgaacacgcgcaaatgataattacctcattaggatgtggcgcatggacgcgggcgccgcgtttggaggggggaacttgttaatggggaaatattaatttatgcaaaagcaatgagctcgccttggctggcgtcggaggtcgggagaaagctcccactgactaaggacgaccccgaagcgtcacggagagcaaggccgctcgccggcatctcgggggcctcggcgccgcgcaggtgcgcctccagctttatggccagctctgggtctgaggctgggggagactaaaccgagagctggaagactttcggagatcctaatagatcagaattgttgatttatgatcgggtttctgaggcaaagccgagttctgcttctggtttagggctgcgtgcggggaggatt

SEQ ID NO: 2615 - DNA, 30 bp, Homo sapiens
  chr3:62363627-62363657
  hyper
tctccccagggagccgagcagcttgggagg

SEQ ID NO: 2616 - DNA, 171 bp, Homo sapiens
  chr3:62365246-62365417
  hyper
gcattgaataagaacctgaagcgttgtgatcgctttgcaagcgaatctctcagctctgttttgtttgtttgttttgtttggctttgataagaacttctcgtgtgtaccggcaaacggaaaagttctctcttgcccgcatctctggagctctcagtcgaatcccatcttttc

SEQ ID NO: 2617 - DNA, 1605 bp, Homo sapiens
  chr3:62859763-62861368
  hyper
agcgctgctccaagacgctcttctccctccacctcggcgcccccacctgccgttgcccccgcccgccgaacgcacgcccaggagggcgggcccggagttgagcgcagccgcccgccgctggagagcgctgggagccctgcaagcgagcaaggcctctctgggcgccgcgggcagcaaatcactccccgagcctctcggtccacaaagcgggacctgcctgcctcgctcaccaacgctcccgggctgggggggctcgagcaagcggcgctgcgctccgcggccctcgccggtcccagtcagctccaggagcgctccaggctgggttgggctgggcctgggcgagcccggccgctgggagggggcctcgtagccctttccccagggcgcggtctccacctctcctgctcctcctcgccagctgcgccgccagctcccattgttcaccccgcccgcctggcgacgtccgggtgctgctccctgggcctcccaggcgcacctaccttctgctgccggcgagccatgtcggtgggctgcttggcattaaaggggtaggcgatgcagcgcatcacgaacacatacagctgcagcctcttcttcctctcctcctcctctttctgcagccgctccaactcttccttctccttctcgctcaccaccgacgggctggggctggagggccggccgccgccagcgcggctgctgggttgcagccccccggccccgccgccgctgctcgcgccgctgcccccgccgccgcctgcacccaccccggctccggcgccggcgccgccgccccccagcccggcgctgccggccgagccctcgctggtacggctgggagacaggcgcgcgccggacggggccgagccgagcacctccttgccgctctcctcctccacgatctcatccgattcttcttcgctggacgaagggtccagcatagtggcgcctggggagcggggtctctggagcccccggcttggagtgcaaaaggtggggggcgctggaggcagccggggatcagctctcccgggtgggcgcttctccccaggtcagggagcgagagcgctgctgctcagcctcggccgccgcgactgatcctctgcccggcggtcgcgagctgggctcagacccagaagcgcgaagggaggaggggaagggagaggtgcgtccgtggactcgaggtgggcaagggggagaatcaattgcgagccccgagcccgcagccggatgccatctgcggctgctgaaggaggcgcctccagaaaagatgccgagtgttgcaagctgtcgatgcagccaagagccgaagaggcatcttgccgattggggagggagcggcgcttacgtgtttattggcttaactctcccgtgtccgcggcgtaaagggctgctgcagagggctggaggggggagagcgcggagcgtcctcagagcctcagtacttctgaccccaataccttgccaccctcctcccctgccggcttcgtggataatttttttgttgatatctggctctcattgcctcaaccccttttcccctcccgcggacaaaaagttcttgggggagggagaaatccagaaaccagccgagcgggctgtttg

SEQ ID NO: 2618 - DNA, 144 bp, Homo sapiens
  chr3:63263852-63263996
  hyper
ctgtgggccctgcctcgcccacctcctcgccctcccctctggagcgcggctggccaatgacagccttcccctggctccatgggtttccccctcccctgttgtatctaccctgccccagctcttccctgcccacccctcgctgac

SEQ ID NO: 2619 - DNA, 234 bp, Homo sapiens
  chr3:63264062-63264296
  hyper
cgaggccccctgccctcgccgggctgctccagggtgtcgctcctctggctgctcccgaaggggcttctggccctgaggacggtggtgccaagcgaacttcatttttaaaaagaactggtggatgagaagagcgagcgagggcgagctatggaccctgtgagtcaggtgagacagaactgggcagggcggctggctgggagcagggggcgggggatgccgcggcttgggagaggc

SEQ ID NO: 2620 - DNA, 30 bp, Homo sapiens
  chr3:63264904-63264934
  hyper
gttcaactgctccgcgggagcttcagggag

SEQ ID NO: 2621 - DNA, 30 bp, Homo sapiens
  chr3:64232467-64232497
  hyper
aggttttactttcctttgctacatgtctgc

SEQ ID NO: 2622 - DNA, 153 bp, Homo sapiens
  chr3:64430652-64430805
  hyper
gacaccccaaaagacggccctaaagtccccgctagagctccaagtggctggacgctggagctttggtgctgggattccgatttgcccggagggagggggctttccagggatcccccagactgtgaccctgagggccacggttcgggtctcact

SEQ ID NO: 2623 - DNA, 1296 bp, Homo sapiens
  chr3:64671300-64672596
  hyper
gcacatgcgggggtcgacagagagtcggggaaccaacgtggattccctgctaaatgctatttggcagcgcaagaaggcggcctccccgccctgcctcagtccctagggaaacgtgcgccgcaggctccctctctccactccctggaacccgtgagtagtagaaaccccagaggaaccgaaatcacgtccggacagcctctccaggctgtctcccactatcccgtttctcccggccaccccgccagtagggtgcagagttggactgcgctgcacccccactctcggttccaccccaattcaaagcgtccggggtaggctccgccttctcccccgcccccagagccctcggcccacccttccgttcctgggacgggacctgctccctgtcaatccagttcagcctcagggttcctggcgcgtgaataaaggccctgagagaaagcggggactctagattacgcaccgccctccacaacacacactgaaggaactcccagtgccttgggcaggggatcctcagccccacatccccgatgcaaggcgcaccaataaggagtctggtccgccctgcgctcagcggctccgctcccgggtggccaagtttgctgcagggaaccgcaactccagtaactttctccgagtttggaaactgacttccaggccgcctcgcagcgttgggcaacgcgccgctgaaccgagtccaaactccagaaagctctgaaacatccagaagcccctgggggcgggtgtgtgcgctccacgccagtgtactcgcacgcacagagctagctacccaaaccatacgagtttctagctgatatttaacgccggagaggagcggagcctcgccacagtgagggtctctaggcttagaggacaattaagtcttctagaagcgggcgaggaggcggaaggggagaggaggtggcgcgcgcccacttaccattcctgagcagaggctgatgacggccgtgtgctcggagttggtattgacatagcctttgtagaaacagtgcttgagttccgcttcctcttcggaataaaacttggtctgattcaccccgggcgtcccgaggagggtgacagtgaacagtggagcgataaatccggcattggcggtgagattaaatagaaactgctggccgaaggcagagaggcggtaatgcgcctgggaggaggtagaggaggaagaggaggaggcgaaggcaggccaggggtcagtggcagagttaatgctccgtcgcgttcttttgaagtggacgttcgtgggaaagggttctccgagagcgttcactc

SEQ ID NO: 2624 - DNA, 30 bp, Homo sapiens
  chr3:64673486-64673516
  hyper
gagggtcccgtctgcgctcggctgagcaac

SEQ ID NO: 2625 - DNA, 31 bp, Homo sapiens
  chr3:64673805-64673836
  hyper
cgagacgaacggggaccgcctccttccagac

SEQ ID NO: 2626 - DNA, 30 bp, Homo sapiens
  chr3:66023465-66023495
  hyper
cccagccccctcttcgaaacgcaggtgggc

SEQ ID NO: 2627 - DNA, 31 bp, Homo sapiens
  chr3:66024207-66024238
  hyper
agctttgtttgcattccggtgcctctgggtc

SEQ ID NO: 2628 - DNA, 268 bp, Homo sapiens
  chr3:66024438-66024706
  hyper
cctgaagacgcggtggcggggcggcggggagcagggcgggaggtaagtgctcgcggcccctttaagcagatacaaaggctcggcttgttttgttacagttcattctattccgcgccgcggagcgcagcggccggcgacaggagacgcgcgcgcatgcgccccgcggccgccagccggccggcccacccctcccctcctccccgaagggagagattccaacgtgcttcccgatgggtcctaaaaccgacctgccgggagaaggcaactc

SEQ ID NO: 2629 - DNA, 87 bp, Homo sapiens
  chr3:66024976-66025063
  hyper
gctggccaggctgtcggtcacccagcccggctggttcgccgccccccttgccgcaggtcccactgaaacccccgagacccgccccgg

SEQ ID NO: 2630 - DNA, 1079 bp, Homo sapiens
  chr3:66550297-66551376
  hyper
ctcactcacccccagatggcccgcacgacgcgtgctggctaacccccaaatctctacgacccacgctcgctcgtctccagaccccacgaggcacgctcttcttctccaggctctctcgcacgcctactcccccggacctccacgcagaatctcccttccgccactccaacctgacagtcttccaacacgcacaagcacgcacaactccacacacacaacccagtccgcaccccctccctgagtacgaacccccgccgctccatccccaagtgacagagccccggggcgcagagagggcggaaagggcggcactcacaggctccgcgtccaggagggcaggtccccgggcaacgcagccagcccgcgcccaccgcagtccagcgagtccccagcgcaagtgcaggcggccgcgcagggcgcccgcgggccggccgcggcggtcaccggctccagccgaagcaaaagcagccagagaaggagaaggcaaggcgagcggcgcggggccccgagccctccccggaccggccgcgccatcttgtctggagcgcgctgcgaactccgggcgcggggactgtgaggacccgaacggccgcagacgcgggcgggcccgcggggcgctccgctcggctctagactccgcaccggggcatggcccccgccccaagttctctctgcggccgcggctccggcactcagcgtgcccccggtgcccgggccgctccggagcacccggcgggggccgcaaaccccgcgcccatccgggccggccggcccgcccgcgctagctgcgaactccgccgattcgggcaaggtgtacccagcctgcgctcttcgtccgcccggggcacgccgagtgccgctaccgacaccggccgagggcagtgctgccgctgcgcctggaagacaggcgttcagccccgcagcccgagctcggtgccggcaggcatcttcctctgggctcggagcgcaaagccgtagacctcgggctggacggcgcggccggccccgcgctgggaggccccagtgcgcctcgctgtccccacgccgcggccagagagcgcgcgcgcgcgcgcagcctc

SEQ ID NO: 2631 - DNA, 305 bp, Homo sapiens
  chr3:66551597-66551902
  hyper
gctgctcattggctgccggagtccaccgtggccagcctcgagggccattggagcgctcgctgtgatcccgcccctcccgcttcaccggctaccccgcccccacactcttttcccacccaaggtgtgaagggcgggagactgggaggagaaagggagggacggcccccgcctcttaaaggagacacgcaggttgttgttggagaacgggaacgcgggctggggaaaggaggcgtgaagatacgccctctgcgtcaagaaggggagagaaagttaagagggtaaaacgcccccgttttggggctgtc

SEQ ID NO: 2632 - DNA, 30 bp, Homo sapiens
  chr3:66879269-66879299
  hyper
gactttacagagatgatcatgtgaacaggt

SEQ ID NO: 2633 - DNA, 251 bp, Homo sapiens
  chr3:67048414-67048665
  hyper
ctcagaatgacagttctcctccgccagaagactacctctcccggcaggcactgcgcgctcgacggccacaggctggccagctccctgctctccacctccatccgaatcagccaataggaattcccggcttgggcctccgcccgacccggaccacgcgggagccggggcaatcaaactacatttcccgacacgcatgtgctcgcgtcgtggccaatcagcgccaggaattcggaggctaggggtggagccag

SEQ ID NO: 2634 - DNA, 477 bp, Homo sapiens
  chr3:68981337-68981814
  hyper
tccacccccaccccatcctctcgcccctccttatcccttccaacccttcttactcgactagagccggcatccaagtcggaccggcgcgtccggaactaggtactgatcgccgcaccggagcccgaggacgctcaccgtgccgcctccccgcgggagccccgggagcggcccatcacctctgcagcctcgccaggagaagaaaagttcccacgtctctaccaggagaagcccgaagctcctgcgggagaagcctgaagctgctgctggagaagcggcagctgaggcaggactcccgatgtttgcccgcagccgcgcgcgcagtcggtgcgccccgtccagggcggcgcgcagctagcagtgcggagccgagcccagctagcgcgctgaccaggaggggccgggcccgccgcggaacgcgctgattggccgggccgcccggctgctcctgtccctgcctggccccgcggtccacgtggg

SEQ ID NO: 2635 - DNA, 82 bp, Homo sapiens
  chr3:68981851-68981933
  hyper
cgcgcccccactgccggcctccaggcgcctctcccgagcgcctcgctgtggccaccactccgcaggtgctgagcaaaaggta

SEQ ID NO: 2636 - DNA, 159 bp, Homo sapiens
  chr3:69062097-69062256
  hyper
caacacgtgagaccccgaatgacacctcaacggctggcccctacttgtgccaaaaagtctctcggcgggtgccaggcagggctcaggaagtgctcggctgccccttgaacgtcagtcccggcagagcccagctgtccgcttgaacgtcagtcccggcca

SEQ ID NO: 2637 - DNA, 626 bp, Homo sapiens
  chr3:69434905-69435531
  hyper
acaggtggagcctgcttcccacgagtgcccggcatcctgctggggccctcgggtgccgcgcgctccagctcacctggtacacgtcctgcagcccgcaccacgtccgcagcacctggtggcaagcccgcagcctctccgtgtaccatctccgcagcgtggacacggtcaagttccatacgaagcggctgccgctgaacagcaggtcctccacgccacacatgaacaccgaagccatgcctcctccttcgctctgaacccgggcgtcccggctctcgtacgtgcagccccgaccccagcggcctgcccgcctgggctcccgacgccggcttctgctggcagccggggggtcaagcctgccaccaaactcgtctttcaccgtgcgtcctggccaggctccggcggcatgccctgggattgggtgcccgccagccaacggctgcgactggcacacagaagcccagtgtccacccccgcccgctcgcagcgccgagcaagctgtgctaagctccaccaagctggccctcgatgctcccggggcacgggaagccctggccggcgaggactccccctggcgcttccccagggcgcggggcagggacggaagcggagcaactctttgcaggcag

SEQ ID NO: 2638 - DNA, 186 bp, Homo sapiens
  chr3:69590940-69591126
  hyper
cccccccctcttttcgctgccttttagaagtatctctgggggccagatctgggcttcatcagcttttctcccgacctcccacgaacgcgcggcaaccgaagcacgcggtccccggcggcgcgtttgcaaaccccaccaacgccaacgcctcgaaaccgccaaacttcctgtctccataccaccaaa

SEQ ID NO: 2639 - DNA, 43 bp, Homo sapiens
  chr3:69591779-69591822
  hyper
cgccgcctctccgggggctggggcggccgctgccaatgaggct

SEQ ID NO: 2640 - DNA, 37 bp, Homo sapiens
  chr3:69592068-69592105
  hyper
cggaacttgattctgcctcaccggcttcaggcatccc

SEQ ID NO: 2641 - DNA, 31 bp, Homo sapiens
  chr3:69788413-69788444
  hyper
acaggagttgcactagcggtgtccaccacgt

SEQ ID NO: 2642 - DNA, 30 bp, Homo sapiens
  chr3:69789184-69789214
  hyper
gcgccgggccgggacgctgtcccggtggga

SEQ ID NO: 2643 - DNA, 449 bp, Homo sapiens
  chr3:71113095-71113544
  hyper
aggggtaaaaagtcccgtttccactgaccgtccttcatgcagttctgacagttgagttagctacattcagagccggttcagctgggagtaccccgtggcaattcctcagtctgctgcacgtccaaacccaaaccccgctcactacttaattaaccagccaagtaatgcaacagaggcttagaatccccaacctgccagagtgttccattcgctcgctcgcctgctccggtgtggggctctgtgcctctccctccccctttactgtgtgtgaactcgtcgaatttgaacagctaagctgaaaatagcctagacagatatagaaacaaactatcagaagcaaagaaacatccacatgggttacactgagatggaaggctccttgtatatttcacacgctctgaaagtgacagaaatcacaccccagatacgtcccccgaacggagtgatgg

SEQ ID NO: 2644 - DNA, 1019 bp, Homo sapiens
  chr3:71113815-71114834
  hyper
caacttggtaaacagcgaggatgaggatgattttttaaaagactcaacttcagaaccctcgggctctcctgccttccccagcgaggcccccaggaagcgggcgccgcggagccgggggaaggagagcgaaaccggcaaagatcaatcagaaggaccaacctgacactctccatgtagccgccaggcgcgcggagccgggctcggggcgcccgcgcgggccgggcgtggggtccggcggcctcggcgtgcaggcggactgcacgcgcgcaggggcgctccggctcgcgggctgacaagacgcgccgcgccgcgcccacccgccccgccctgctccaccaatcacaacccgcctctaaacaccccgcgccgcgccgcgccgcgccgcgccccacacaatgggctccgcggcccgcgccccgcgcccgcgcgccccggccccctccgcgcggcaggtgaaatcacgctcgggtgccaccctgcttttgtctggagagcaactccacttaatagctgttaacccggtgacccgcctccggctgacgtctgggtcggccgggctcggcgcgcaccgctccctctggccggggctctgcggggccggggctgccggcggggcggcgtgtttgtttcgtctttgagactgacaaagagttgtcctaacctttccgagaaacccgggaggccgaagaggggcacccggcgctcgcggcgccaagccgactgctccgagcaactgttcggcttcgggagggtacgcaggtctcctaggcagcgcagaaaagcgcttttcctcgaaaacctccctgggaggagaactttcgcttcacgtcgggggtttcacagagccttggcctccccacacccctttctttcccagagtcggtctcgccaaagtgtgccagtgcgcaccgaggaaaactaagccgacgcggggtggaaataaataacaaccaaacgtgcctcgtcgctgaaccaggcgacttcccctctagaacgacagctgccgaagaaagcatctg

SEQ ID NO: 2645 - DNA, 238 bp, Homo sapiens
  chr3:71631263-71631501
  hyper
atgggaggggggcatgcgactttgtttccgggagcggagctccccagagcccgtgtgtgtcactgccagtctcccgggaccaaggcggagctcacaacaggtggggaggggggctcgtcgagggccaaaaagaagaaggaatctaagtttccgagcgcgacgttgtctgaaaaggagggaggcgggaggcgggggcgagggaaggcggaggcagcaaatgaccgcgaccccgcggcaa

SEQ ID NO: 2646 - DNA, 110 bp, Homo sapiens
  chr3:71631789-71631899
  hyper
tggtgggagagagatccgggcgcggcgactcctcgcagcgcatccggctcccgcacccacccgtggatctggccacggctgttgcggactcgtctcgggaaagcggaggc

SEQ ID NO: 2647 - DNA, 1019 bp, Homo sapiens
  chr3:71802750-71803769
  hyper
tggcggcggcggccgcgctgcgcgctccggcggaggggagggggctccgcggcggcggcggcggcggcggcagcggcggcagcggcggcggcgggcccggcggggggcagagccaagaggcgcggcggcagcagcggaggagtaggaggagacggaggaggatgcggggggctgcggacggtggcgaggccctgtccgcagtgaagcccgcggcgcctagggcgcagggagtggccgcctcctcctgcgcgcaccattcctgagatggcggcggcggcacagcggcggctcggggagcccaggaggggccggccgggagcgggctgagccccgcaggacggggagctcgcccagggccggcggagcggcggagctcgggccgggcggcctgcgggagcggcgaggcaggggacggccccggggcggagcgcacggcctggtgaggccgcgatggcgaacgcgagcgagccgggtggcagcggcggcggcgaggcggccgccctgggcctcaagctggccacgctcagcctgctgctgtgcgtgagcctagcgggcaacgtgctgttcgcgctgctgatcgtgcgggagcgcagcctgcaccgcgccccgtactacctgctgctcgacctgtgcctggccgacgggctgcgcgcgctcgcctgcctcccggccgtcatgctggcggcgcggcgtgcggcggccgcggcgggggcgccgccgggcgcgctgggctgcaagctgctcgccttcctggccgcgctcttctgcttccacgccgccttcctgctgctgggcgtgggcgtcacccgctacctggccatcgcgcaccaccgcttctatgcagagcgcctggccggctggccgtgcgccgccatgctggtgtgcgccgcctgggcgctggcgctggccgcggccttcccgccagtgctggacggcggtggcgacgacgaggacgcgccgtgcgccctggagcagcggcccgacggcgcccccggcgcgctgggcttcctgctgctgct

SEQ ID NO: 2648 - DNA, 230 bp, Homo sapiens
  chr3:71834625-71834855
  hyper
tttccaaagctccacgtgctcagcgccgaaaacttgcaaatcatttgctgtacagatgtttaggggtcgcctactacgtgcggggcgctgtggacacatagggggcggggggtgggtgagggggacacagcagcccctgaatccattcgtttgttcagcaggtctatactgggcgcccgctgcgtgccaggtactgccaccggctctctcctcacggtggaataacttaa

SEQ ID NO: 2649 - DNA, 403 bp, Homo sapiens
  chr3:72149791-72150194
  hyper
cagctctgctcagcacgggtaagagaataataaatcggtcacttcactatccaattagcagctgttgctccccgctggaggaagaaaacaaacaggaagaccctgccctgttttgtttaggatcaaactcgcctctgtaccacctaccggagggactctggggtttgagttctggggacaagcgcgtgcccctgcctccgaatgagctccttttacgtgtgagtcctgggcacaaaaccacagccaccacaagccgcggatgcttccccagcgggccccgcgaagggaaactccgtgcaggggcaaagctgagttttgcaaccagtgagcgggagcccggggggcgtggccaggctgaggggatgcgttgtcctggtaacccgtaacttccagaaccatccat

SEQ ID NO: 2650 - DNA, 31 bp, Homo sapiens
  chr3:72496832-72496863
  hyper
cctgtcaggcccctgtcgcgggagggaacag

SEQ ID NO: 2651 - DNA, 559 bp, Homo sapiens
  chr3:72787764-72788323
  hyper
tcccaggaaatcctgcgggtgccttcccccaacgaaagccactgatgtcgcccctctcctcccagcagcttccagaccgcgaccttctgtagctctgctcagaacttcacctggaacagcttcttacaattcttaaacagcccctcagtcgactgtgattaagcatacactccagcctcagcaagcttggcgtctgcccctgccgctgggagaccctcctccaggcacctgccctgggccccgccccgcccggtccgcgcgcacgcgcagtggccccaccccgccccgccccgcgacgcccgaggacccgacggagctacacccgctagttcagccaggaggccctgcgcggctccggggagagctgggtggttatgccacctcattagacacattggtggacgatgccgcggattagcgggttggctctcagggcggggcgcaggctttctcactgatccgggagcgtgggagcaggggcaacgcggggccatccgggagctgcccgcctgcttcgcagttggctttccgggccctcgagcaacgtctgactttgccc

SEQ ID NO: 2652 - DNA, 31 bp, Homo sapiens
  chr3:72937967-72937998
  hyper
ttgtcaaaagccatcacggtgcaagaatgtt

SEQ ID NO: 2653 - DNA, 28 bp, Homo sapiens
  chr3:73045502-73045530
  hyper
tcgcctcggcctccctcccaaagtgttg

SEQ ID NO: 2654 - DNA, 497 bp, Homo sapiens
  chr3:73673951-73674448
  hyper
cgaagcggtccagctcgaagcccatggtggcggccaggccccggggtcgccgccgggcggccgggcgccccctccctccccacgaggcggcccagacaggccggctacgccgcccgcgcgctcgctggctctccccggactgagcctaattgatccagacttcctcggaaaatgcccgaggaacaggactcctccggccgtatttgcgcgagcgcgagcgcacatacatcgtgccttggatgcctcccgccagccccccgaaaaagggaggaggctggaaggcagaagcgcgtgggaggacactgaggctcgccagaagggacgggccagcccaggacgccagcctgaatcttctcgggaaactcctttctgttctcttacagtctacgctataggagacaaaacgccagccgagaaaagctcgctgagtttggagctgaggctactgctttctcccaagggttctcttcgagccccttcccgaacggatcaaaact

SEQ ID NO: 2655 - DNA, 30 bp, Homo sapiens
  chr3:74663492-74663522
  hyper
tcatccctgtggcccggccggcgccaggag

SEQ ID NO: 2656 - DNA, 31 bp, Homo sapiens
  chr3:74663813-74663844
  hyper
cgtgcctccgccactccggctccggctccgg

SEQ ID NO: 2657 - DNA, 30 bp, Homo sapiens
  chr3:75168992-75169022
  hyper
atattccttttttttaaaaattattattat

SEQ ID NO: 2658 - DNA, 73 bp, Homo sapiens
  chr3:75471466-75471539
  hyper
tttggagtctctgaaacgcttcctgtcttttgttcttcatgccccgtgcccctgttagcgtattactgttctc

SEQ ID NO: 2659 - DNA, 30 bp, Homo sapiens
  chr3:79067581-79067611
  hyper
caggtaaaagtgagcgggctccgcaatcat

SEQ ID NO: 2660 - DNA, 30 bp, Homo sapiens
  chr3:79817318-79817348
  hyper
tgtaatgcctgctgcgatgtttaaccgagg

SEQ ID NO: 2661 - DNA, 944 bp, Homo sapiens
  chr3:85007781-85008725
  hyper
aacatgctggggacacggctaaccccgccccctcgcggtggcgattggctgaacccttcctgagtgcaaagcgctgattaatgaaggcagttgtctcgcctgcaagttcgggcgagacatctctaaagaggtaagatccgccaggggtgctgaatgggggcttcagttcttcctgcccgaagggtccttgagaagcctgtttgtttttcccggcgcttgtctccacccatccccttctctcattggccagacctggtgggcgggggagtttccattggccggggggcggtgtctgtccctggccggggtgggggcggggcctccgccgctctgagcttgcccttgtgtctggtgcttcgtagagctgccgccgtcgccgctgccgctgccgccacagccgccgctgcagccggagcatccgggagccgccactgccgccgccgctgccgctgctaccgccactagcgctgcttccactgcttctacctcccctcccaggaccccgagacaccccgggcgcgagcggcagtgctgcttgcttgctcctcctctcccccagcccttcccctccgtgacctacccactccttgcagccctcgcccgcaccttctccaacaccccggcatccctgcaccacctgctcgggcagccccggcgggctctgggacttgctgtgcgcgccgagaggaaggcaagctccaaacccctgcctggaagacgggctgtcgcggctgcaccaccagcaggaggaggaggagaagaaactatttcgcgataccccattctgcgggtgctttgccgctgccgcttctgctgccgccgatccgagtccgcgggttcgaacaccgcagcggtggggacggtgggtccggcgggcgccgggaggaggacaccagcggagccctgcactctcgtgccccgctcaccagcatctacttgccccc

SEQ ID NO: 2662 - DNA, 204 bp, Homo sapiens
  chr3:85008802-85009006
  hyper
cgggctcctgctacaaggtaatccccgccccggcgcagggaacatcaacttctcgcccattccccatcttccccattccaccccatatttccactctcccctcccagtctccctgtccccagcgatttccaccccctccccctactctctggtgcggcagggggcagtggcagtttgcaccagcccctcgaatttctaacactg

SEQ ID NO: 2663 - DNA, 30 bp, Homo sapiens
  chr3:85617271-85617301
  hyper
tcccttaattccatcaaattgacagctcaa

SEQ ID NO: 2664 - DNA, 97 bp, Homo sapiens
  chr3:87039605-87039702
  hyper
cttcccggctctctcgggatggctttctgctcaaggacgctcccgcagatcccagagcatcctctgcgccacgcgtgccggcgggacgtcgccgagc

SEQ ID NO: 2665 - DNA, 738 bp, Homo sapiens
  chr3:87040016-87040754
  hyper
aaggcgggtcctcggcggcctcgggctccgcgcggggcgcggggtcgggagggactggcaatcagcgggggcccatgcgcgggcaccttcatcttcagcccctccggatgttccctgccgcgcttatatagcggctcagggacgcagccgcccgctgcgccgctggggcattaccgcgtccggctcccgcgagggctgcggcgcccacggcagcgccagtcacagccacagcccaggcccgggtcgggcagccgtggggagcccagctccggtttgcatatacacaatgcacgcccggggctcgtcctatcacgggtgctcccggctgtgcgaggacagggaggcgggggcagagggagggggaacgccggggagaagggggagcactttgcctccccaggctctgacgcggaactttgcaaagtttctccaactcgctttgcagcgggcgggtcaccctgcagggggaccccggggaaggctggctgcggattggagcgaagtttgcagccctctccgcctcccagcatgggatggtggtgggaggggaatggtatgcagaggctccgcgccctcaaggctcggcaggttcccaccctgtctctgtcacctggccgccagggcgagggcttccctactccaaggagattttacagggaacaccaactcagaggctgggaccaaacaaaagccgagtgtacaaaggggtaaaacagagcaggcgcagaatacacgggg

SEQ ID NO: 2666 - DNA, 30 bp, Homo sapiens
  chr3:87276404-87276434
  hyper
caggcgccacacaacgcgcaggcgccgcct

SEQ ID NO: 2667 - DNA, 30 bp, Homo sapiens
  chr3:87842004-87842034
  hyper
atcagcgctgagcccgggagtgcgggtcac

SEQ ID NO: 2668 - DNA, 30 bp, Homo sapiens
  chr3:87842383-87842413
  hyper
agagagacggggcacgggccagaatccagc

SEQ ID NO: 2669 - DNA, 30 bp, Homo sapiens
  chr3:93692749-93692779
  hyper
cggaggagaccgcccgctcccagcgcccag

SEQ ID NO: 2670 - DNA, 1579 bp, Homo sapiens
  chr3:96531887-96533466
  hyper
ctcaaaacattccgacgggttttgaagtggggttttcaacctccctcgactgtgatagccgaagtcccttcaagaaagaaaaatgatgttggaaatactagtaacaaataaagtatcacggaaatccccacccaagcgatacggtttccttgacgcgcccttaaccaaggcgttaagtttagcctgacagcatccctccctcctttcggttcctggcctgatgagccgcctccacctgcgagcggtgcaggcatttttgttgtcgactaaccccctctagcgccgaactggcggcatccgagccgcggctgccaggccgggagaaggctgggcttggccgggctctgcagcgctccgggctccgtccctgccctgggcgcccgcctccgccgcggggcgaggtggtggagaccgcggacgccgagggtcctcccagtcagcacgccgcgttgccccggccctggggcgggggccgcggagtcccaccaagtggcccgcgcctcggcttccgggagacccgagcgcggggagggagtgggtgccgcgagggggcggctcgcgcggggagagccgtcagcccacggcgcccctgcgctgctgtggatgtggccacgcgccactcggcccttggactgctaggagagcgcggcccgacgccaccacgccgtggacgctcggggacccctgaatcccagcgtcaaggctgcgacgatgctcgtgacctccaccgcgaagtcacctccgcaaggcgacgcaaggacctcggcgatcccgggcgccgtacacccgccactttccagcctcatgtaaccccccctctgctgcttcctcccggcgctttgcttttctacaactggaagccgcgaaggcggctactgcgctgagccgctcgctctgctggtcaagtttgggcgacccgcgcggaggagggtcgggctgactgccgccgctgagctgtccccggacgggagcgcctgtccacggcactcaccccctccagcggtggaaatgtggagaagtaagtgggaggcggtgtcgggaactgactcctcttaaaacggtcggcgccgctgctctgaaatgggcggctaagtgcttgtgggactaagggcggcctcagagatgcccggaaaatcgctgccacggccagagtgcggcgcagacgcggcagagttggaggtgtccgcggtgcaggctgctgcccacgccgctcaggccaggtgctgagggctcagcccgcgcctcggccgaaccactctcagccccgttgagccacctcgtccgcccggctttcatcgcaccggccagaggaaagttcccgcggcccccacgcctcttcacagctgcagcgcctcccctgcttttggctccgcaagtgcccacttgagtcgggagaggtcctcgggccgccccaactgcccgccccacctggcagtccgtccccgcccccgtcctcgcggtgaggcgctccccgccccctcgctcccctcccccaaaccacagcccgagctcgctcttgcgcgcgcgcgctctctccggcccaagtgaatagtcctcgcgcaagcgggacactgtggtg

SEQ ID NO: 2671 - DNA, 30 bp, Homo sapiens
  chr3:96533809-96533839
  hyper
acagcgtggccaggcgactgcagtcacgtc

SEQ ID NO: 2672 - DNA, 102 bp, Homo sapiens
  chr3:97690940-97691042
  hyper
tagcaggccacgtgtgcgactctctgtaaccaaggcttccgcgaccctacccctagatccgggccccacccaccctgccccagtctccggggaggtgggacg

SEQ ID NO: 2673 - DNA, 52 bp, Homo sapiens
  chr3:98311893-98311945
  hyper
atcttggtcttcatgtcgcccggcctccttcgcagctcgcccaggtcggtca

SEQ ID NO: 2674 - DNA, 30 bp, Homo sapiens
  chr3:98451383-98451413
  hyper
ttcggctgtgctcccgcctggtccccaacg

SEQ ID NO: 2675 - DNA, 1128 bp, Homo sapiens
  chr3:98619781-98620909
  hyper
acttgggggacagacgggcaagaccttgcctttgcaactcaaccccgtgagtacccagccaggtccggccacgcacgaaagcgcaccgcgcctccctgcagcgtctgcagatttgttcaggggccaagagacccgcagccccgacggaggttcccccgccgctcactcccctgggaccactcaccttgctgggctccagcgtcctcgagcagcaggagcaggacaagtaagagcaggaggaacagaggcatggagaaggaggaggagttggagcagggagggagggagcgggagagggggagcgcggcccaggcgggggcggcggccgcggcccggacttggggacactgcgggcagcgcctggctctcaccaccgcccggctcgccatcgcggcggccggcagtctgcctgcatagtgcgggtgcctcggcagccccgcgcgcctctggccgcggcacccgaccaggagacggcggcagcggcgggagaacaagaggcagccctcgcctcaccccgcgccgggacccttccgcccctcaccccgctttcacctactcctccttcgtcccttccctccgctccccgcgccgagaccccaggccggagcgcaggggaggggagggaaggaagcggagtcctcgagccgcggaggacggccgcggcggagctaaggaacgtgcctcccgcgccgcgctcctcaccagggtcgccgctcgccgcgctcacccgcggctccggctagctggcaggcaggcccgcagccagctccctcgcgctccctctcgcgcgcgccggccacgccccctaggcaccgcggccaatcctcggccagctctggtccgtctccttccgcgaaacccaatcagcatgctcgctcctcgctcgacccgctagttctccggcccattcctcgagctccaccgccccttacctccctcttccaatccccttcggcctttggaggcgtcccacccgcctcctccaatccaggtcccgccctccagcttcggatccccgcggcccccgcccggcccgggcgcctgttattgttgggccctcagcccaaactgatcccgcagaggcggcagccagctcgtcagtgacttccgggacgtcccccatcccgc

SEQ ID NO: 2676 - DNA, 30 bp, Homo sapiens
  chr3:99357066-99357096
  hyper
aacggaaaatactccgattcccctttcctc

SEQ ID NO: 2677 - DNA, 450 bp, Homo sapiens
  chr3:99594871-99595321
  hyper
cagcagtgccccttggtggagcgaagttgctctcccgggcttacctgaactgcctgcgccggggccgggcgggggccgggccggggccgctgtagtgccgcgctgcgagccgactgtgcgcgctccgagagtcgcccgaacaatgcgagcggggcgctgagcgcgcccggcctatgggcgttacgtcactgttctgccttataaggcgctccgcgtgtgcggcgctgtcggcgggggcgccggtgaccgcgggaccctcggccgcggcggcggcgcagccacacaccccagctcccgcggatgttccggccgtgtgaacggaccgtggttcccggctcccagcggagggaatgagtggtgggccggtgggccggggcgccggcgccctcctgtcgggctaacaaagtcattgggaggcagggtcgatccgcttgtaacttttttccctct

SEQ ID NO: 2678 - DNA, 449 bp, Homo sapiens
  chr3:100120033-100120482
  hyper
ccgggttaagggaaagcgtgggtgtgagtaggagtcttcggaaaccctttttctttcttttcgccccgctgctgttcgggagatggacttctggagtccccgtcgtagctggtgttgtcccctctaccttcaggaaagaagggcagatggccctcttgcctactgaagccgaggaggggcgcgtatacagcgggctaagggcgctcaagagatccgagtggaagaaaaagcagcggcacagcactggaatgggcgggagtggcagaagagttgtgaaggctattggctagcaagggtggtgggcggggcgtagaccgagctacccagtttactggtcgatttcggatccagttttccagttatagccacgttggcacctcttgaacctctgtggccgttagcacggttttctgcccgcgtgcccgagaaaccaacggattagaaggact

SEQ ID NO: 2679 - DNA, 30 bp, Homo sapiens
  chr3:100306083-100306113
  hyper
gaactaggaggcctcaggatccattgcagg

SEQ ID NO: 2680 - DNA, 693 bp, Homo sapiens
  chr3:101231553-101232246
  hyper
ggaaagtggggtcaggcgctgagaagccgaaatgaaattggaacattggtggaattacgaggaaggcgtggcagagagtgacaagccaaccgggaagatccatgggccgatgagacgcaaggagggtgttcgcgggaggagggaaaaaataaaaggggttttgaggtgaagagcgcccgaggcttcgatgacagctcggaccgggtcttcgactccaggggcgggggcgacccgggagccttccattgtgcgcgccccttcctctccccgcccccgccctcgcccccgcggcttcgggccgcaaccccagctgccgcctgcgcctcccgtttcccccgggtaggagacaatatgttcagcccttctctgaccctttctcaccggatgaagatggccgtcgcccgagctttctcttgtccatcttctcccgctgctgaaatttcagttgcaggcgctgtcacctcaggacccctccggcttggagagggagggggaggggaaaggaaaaaaaaaaaaaaaaaaaaaaaaaaaaaaaagcccgcaaagtgcgaagcgcgcttgcgcaagagccgtcgcctgcccttcgaccggaaatcagccgcccctcccaccttcgaccggaaatcacttcctgggacttttcactgtgggctgcctcttccagcgtttttttggtggcgtttatttcatgat

SEQ ID NO: 2681 - DNA, 30 bp, Homo sapiens
  chr3:101293005-101293035
  hyper
gggcggggtcgtgacgtccttggcgtggct

SEQ ID NO: 2682 - DNA, 30 bp, Homo sapiens
  chr3:101443520-101443550
  hyper
atggcggtggcgcgcgtggacgcggctttg

SEQ ID NO: 2683 - DNA, 30 bp, Homo sapiens
  chr3:101443836-101443866
  hyper
gaggcggtggatttcgggctgcgatgacct

SEQ ID NO: 2684 - DNA, 31 bp, Homo sapiens
  chr3:101475323-101475354
  hyper
cagacccccttcagtccgtgcctgtagctgg

SEQ ID NO: 2685 - DNA, 347 bp, Homo sapiens
  chr3:101497865-101498212
  hyper
ggccagacctcgatccgcggggcgacagctgcagtgtcgcgtcgcgagcaggagcttggcggcgtagagcgccagggtgccaacttcgcttccaggcctgtgggttccgcccggcgcgtgctgctgtcagtcaacgccctcggcccgcccccgccgaagctccaccaatcgtagccgggggtcggaggtgaggagacgtcgccgggtgaggaagcggggggctagcggcctggcgctgcggcgaccgaccggggcgtcaggatccctggcccccggagagcgaagggcgggcgggtcccggaggtgagtgctggatgtggtctgtgtgcggacgtcgggaggggccg

SEQ ID NO: 2686 - DNA, 104 bp, Homo sapiens
  chr3:101498503-101498607
  hyper
ctccacttgcggcaacgccacagctcggtacagttcggacctccacgccgcagcgaaagacttctgtcctccaggcaccttcactaacccggtgcggagcactt

SEQ ID NO: 2687 - DNA, 30 bp, Homo sapiens
  chr3:102392762-102392792
  hyper
attttctaggctgccggagctggatatcag

SEQ ID NO: 2688 - DNA, 30 bp, Homo sapiens
  chr3:105587999-105588029
  hyper
tcgcgctgccgccccgtccacgtcctccac

SEQ ID NO: 2689 - DNA, 31 bp, Homo sapiens
  chr3:107245009-107245040
  hyper
cacagttctccagtgtcggggggtggtagag

SEQ ID NO: 2690 - DNA, 92 bp, Homo sapiens
  chr3:107940928-107941020
  hyper
cccgggcgctcggggacgccggcacccacctggacggggccttcaggttgctcttccggaggaactcctcctcgtagcggagcagcttcagc

SEQ ID NO: 2691 - DNA, 30 bp, Homo sapiens
  chr3:107941419-107941449
  hyper
aggcgtggcgttcgcgccccactgccggct

SEQ ID NO: 2692 - DNA, 30 bp, Homo sapiens
  chr3:108976491-108976521
  hyper
taggtctgcctgtggtcccatcctcacctt

SEQ ID NO: 2693 - DNA, 30 bp, Homo sapiens
  chr3:110790592-110790622
  hyper
tcccaggagttcgacgcgggcgggtgccga

SEQ ID NO: 2694 - DNA, 124 bp, Homo sapiens
  chr3:111393431-111393555
  hyper
gagagcgctggccaatcggagcgcgctccgccagcggccaatcacgggccgcctagcccggcaaatctgcccggcagtgcggggaggggctgctgggagtcctggtgccgccggctgcacttct

SEQ ID NO: 2695 - DNA, 1051 bp, Homo sapiens
  chr3:111578039-111579090
  hyper
atcatcaccctaggacgtaaaccctcccgcccttctttcagctcttaaaaaaagcctgccacgaaagtccctactgcgttgctgcgaacgtagctttgagaagctggcgcccagtgatggggcaaacagccatgcccttccagcagccgtgaaagccccaacagcaaactgcctgggagcggggcaggtcaccaacttcgttgctcgaactccctgggtgcccgccgcggtggttacaaagggggtcaagagtgccggacccagccgcgcggagcccaccattgcggcccgagggggacccgacgggggcccgacggtgtggcgtggcgcaaggagcgcgcctgccttctctcgccgccgggaacgggctgcaccaatggccaggtgaggaggcggcggtggtcgcccgggaggagggggtggtgccgactccgtgtgccaggagtgcgtcccggggacgctgcctcccccgcggccgagttggttgccgccggttgcgctgcggagggttgggggcggagaggaggcagtggctgcccgggccgaggaggggcgcgctgactgctcaccgcgagtcaggaggggccggcgggctcacggagggagacagggtgggcgggggcaaaggctaggcgctagggcggcggcgccagcgtagagcggcggtttggaggaaagatgagacggtgagtgggctccggggacacagagtttctttgcttctttacaggctgtagggacaaaagcccgggctggggtcggcagtgcccaggctgcgcagctgggtgggtgggggtggcgaaccccgttgtgcatgactctcggggggctgggtagatctccggttgaggggatcccggggagggagtgtctggtagggaagatgcttccagagtgattgtagaaaacaggcagaatgtgggggaactgggggcaactttttccagcaactctggaatgcacatggagagagggatggggatccttgggatagctccctgagaaagagaaggtccgctgctggatggtgtagggcgcgggattcagagaa

SEQ ID NO: 2696 - DNA, 30 bp, Homo sapiens
  chr3:111697739-111697769
  hyper
cgaaagagccacgacgctctgcgcatgtgc

SEQ ID NO: 2697 - DNA, 268 bp, Homo sapiens
  chr3:112051872-112052140
  hyper
tccccccacacagacagcctccgctcctgtgagggcgtggggaaaacggagtgggagaagggggctagcgaggaggaagaggcgggaggtgcggcaggggcacaggtgacgctcctcccgcctgcctagcagagctccaggcgcacatccgcagtcagccacctcgcgcgcgcctccaggagcaaggatggagaggctggtgagcggggccggggcttgggaaggagggcgcagggcaggcgatgttgagccggtggccctggggcgg

SEQ ID NO: 2698 - DNA, 112 bp, Homo sapiens
  chr3:112052251-112052363
  hyper
cggattttgccttccaaagggtggtttacaggcagctgctggcgtccagattctccattccaattgcctgaaaaaaagatgcaccaggccggggctccgggggctcttgatc

SEQ ID NO: 2699 - DNA, 30 bp, Homo sapiens
  chr3:112710254-112710284
  hyper
cgcgggtgattttgcggttgtattttctag

SEQ ID NO: 2700 - DNA, 8 bp, Homo sapiens
  chr3:112930428-112930436
  hyper
tggaggga

SEQ ID NO: 2701 - DNA, 158 bp, Homo sapiens
  chr3:112930455-112930613
  hyper
cgtcccctgcgttgtcctcctgctgccgcccccgcggccgccgctttctgccgcggggaccctgagccccggcccgccggtgtcagccgccgcgcgcgcgcacagacacacacacagagacacacaaacacacacagaaaagacacacacgcgcacac

SEQ ID NO: 2702 - DNA, 750 bp, Homo sapiens
  chr3:112930655-112931405
  hyper
cgcacgcgccctccctctccggcccgcaacttctcggtcctcggctcctttgttgctccagccgcggccgctcgcccgtgttgtgtgtccccggtgtcaccgagcgtgttgtgtgtccgtgcggcgcggcgctgtgtggctccctcgcgcccaccacgctggcccccgggccccggctcgcccttcccaggcgccggctgcagcagaggtgagtcacgtcgctgaagtttgttttcttttcataaaaagttgtgtttactgttggttcggggagaggagggggcgggaggcggccgcaggccgaggcagcgccagcgagtggctgccgggggacgtgccggcggcgggagccgggtcccagcgctcggccgggcgcccggggctgggagctgcggccgaggctgggcgcgccgggcgccgggcgaagaagttggggcgaggcgggcagcgggggtcccgggggctgcagccgctacggggcccaggggcgccgcatctcgttccctgccgcagcggtctggccgggcgatggtggtttcgcctcagcggttcccagaagcttctcgggtggaagaaggatccagccagcctcccaaacttccaccgaaggttgacaccagcgccccggccccatgctccaggccgtggggggaacccgaggcgtggcggcaaatgcgtagagtcactcaacacgcactcggcctctttggagggtgagggtttctcatagttggcgtcttctaaaggaaa

SEQ ID NO: 2703 - DNA, 573 bp, Homo sapiens
  chr3:113251173-113251746
  hyper
gagagaacgtgatgacgtgagactctccatggagagtaggaggtaataaagaaataaaacaggtgtctgaggagaggttctattagagaggggagaatagagagtaattatcgttcagacaggcaagagttctctgcaggtagcagcctgggaaagcgaactcgcgcaccctcttgggggacgggctcttttgctttctatttcttctcctgcagccagggtgcacacgtatttgaaacagaccgaatttcctcctcgatgtggcgtcaggttgacttttcgagactagcgggtatttctttttaatgactccaatgcctttttattattgctgttattgaggttgagggagaagagatcggtctaaattctggctgggtaagtggggggattctcggcgatgagaaacgggggacttagaagccggaggaaaatcagcagccccacatctccacttctccagtccgccctactctccacccgtgacctccagtggagaccccaggcggcagcatcagtatttgatcggcccttcgtcagcacgctgccagccctggccggctgggttcgcca

SEQ ID NO: 2704 - DNA, 30 bp, Homo sapiens
  chr3:113775287-113775317
  hyper
gaccttccctgaggcgccaggagcattttc

SEQ ID NO: 2705 - DNA, 400 bp, Homo sapiens
  chr3:115231422-115231822
  hyper
aggagaaggtctccccgcagctcctctggaccgagccacacctctgcctgggaatcctgggctggggctgcagaagcccgctgcgcgcctcctggtttctatggagaccctgcttgatgtcaatggcggctccggagcgcagggaaacctaagcgtttgtatttaaatgagggaaagtgggggaaggggaagtaaaagaggaagggaacagaagagaggatggtagaggtgagcgggcgggtgttgaactctggggactagaaaaatccagctgcgttactcagtcatctcatgctcgcggagaaatcagaggaagcagcagcgggcagaggggtgtttatttcttgcgtgagaaatatccgacttctttctgacatccgggagtaagggacaggcaact

SEQ ID NO: 2706 - DNA, 323 bp, Homo sapiens
  chr3:115377667-115377990
  hyper
ccccaggtctctccgcgggaggagggcacccaggggcgatgcgccgggctctctccttcgcccttcttggcccgctcgccttcagctcccacccgcagcagcaaccgcagcctgcttccggggactgagcagccctgggtcagccaaggttaagcagcgggtggggaagaggagagaaagctgggtcaattggaagtaaccttcttgtaccgcccactttttccttgcttggaggcggcaaaaagcactttagcattcttcgggctgtttgcgcctctttctctaacagggccaggggagtggaagagcggccggcaggaagg

SEQ ID NO: 2707 - DNA, 30 bp, Homo sapiens
  chr3:115881799-115881829
  hyper
atgttcccccatccctggacctgttgctta

SEQ ID NO: 2708 - DNA, 271 bp, Homo sapiens
  chr3:116163736-116164007
  hyper
tgtccccctgcctcacggtgatgttgtccgtgcctcggttaaaatccacgctgcgaacaggcagtcctgtgggaagaaggcagagcaatctcagtaggaccagtggcaactgtttccgatccggctgaactctcctgaccatggtggccacgccgaggtgcgggtccgcggggtgctctggaggggtgcgcgctgctcgcgaggagaggcttcaccaacacggggctttcatccacagcgagcgcagagcgggctttgccagtttatggtc

SEQ ID NO: 2709 - DNA, 65 bp, Homo sapiens
  chr3:116164227-116164292
  hyper
gagctgagctccttcgctctgtaacccactttcccaggctggcgggcgggcgggcgagggagccg

SEQ ID NO: 2710 - DNA, 223 bp, Homo sapiens
  chr3:117715480-117715703
  hyper
taccaggtgccaagcggatacctagcctcctaaacttaatgccaattccctcctgaaagaggaggaatgcagtgatatcagcaccggggacacggggatagcgaacaccaccgcggctcttggagtttacagaggagcaaccccagctccgtcgccaccacctcgcgcaaaagcccccaccccaccaagacacacacacacacacacacacacacacacacac

SEQ ID NO: 2711 - DNA, 361 bp, Homo sapiens
  chr3:117715762-117716123
  hyper
acacacacacacacacacacacacacacacacaagccctggcttctttccccatcaacaccgatgttgcagcaagtctgtccgcacaatcccgcacgcctcaggacccagcctgggcgcagagctggcagggcagggagcgcaccgcaggacttgtaaataaaccctgttccatccagaaccggagcgcttcttactccaccgaccaccccggagcccggcggcagggaggagggggcgcaaggggtcagggaatcctccccctaccttgcaatgagaagagggacaggaaaaagcccagcacccagacgctgtgcagccagtaggtcctcatgtctccgctgcgctcgatgctccctcgc

SEQ ID NO: 2712 - DNA, 371 bp, Homo sapiens
  chr3:117716213-117716584
  hyper
cggcaacccggacagacaagcctcttgccgcacgacggccggatcccagaacagccttgctctcctcttcgggagcgcaagccaggggccgggatggacgctcgtagcccgtgcctggtgtaaacacaccgagcccccttgtccctcgagctctcccgctttcctgcttcctatcctcctctccctcactcccctgcagcttcaactaaatgcgatgtacttaaacaagcagcgccttataggaccgcgaaccgagccgaaagggccccgctactgccatctagtgctcacagaacggcatcgccgcggctcttcttcgctgtgtgtctgtgccaagtctatccaacgccgccaaagtcccctctgctctc

SEQ ID NO: 2713 - DNA, 34 bp, Homo sapiens
  chr3:119041463-119041497
  hyper
ggtgtggagggaccagcgtcgaagacaaaggaat

SEQ ID NO: 2714 - DNA, 30 bp, Homo sapiens
  chr3:119813912-119813942
  hyper
gggcgtctataaagcgctgtctcattggcc

SEQ ID NO: 2715 - DNA, 111 bp, Homo sapiens
  chr3:120004171-120004282
  hyper
tctcccgcgagggccgggagggctccgggaccttgcagactccacgcgcctcacggctcctccagctcctcggatctttctccttgcgtcgccgccgagtcccctggggcg

SEQ ID NO: 2716 - DNA, 31 bp, Homo sapiens
  chr3:120068919-120068950
  hyper
ttgggagatatggaggcggttgcatgatttg

SEQ ID NO: 2717 - DNA, 764 bp, Homo sapiens
  chr3:120169212-120169976
  hyper
gcgcctttttgaactcgctgctgctccagtcgccgcctcgtccccgtcggcccagcccgtcccctctcctcctccccgctctccctccatgttagccgcggcggggctcccgcttacggcccgaactacttttcctgctttaaagatttaagtttcgtaagcagcattactgccccagctccaccccagcacaccccaaggaccgaaactcccagcgccaccccgggagagcatccccaggacgcgcgcccacccgcccagcgcgcagacccaagaggccccggggaccgagttcggactcctcggcccctcgcctacctcggcgcggacccaggcgaccgccaccagcgcgagcgcgagcgcgagccagcgtttccacatctgcggaagagagaagagagcgagtctgaaggcgccgggccccgcgctgacctgggaaacttgctcgggtcccgcaggctcgctccggccgcccaagcacccccggccgcccgaagagtccggcctccgcgccgtgcgccctgcgctcaccgtggtctggtccaggtctcctgggggcgcggggcaggacggcggcagcgagctgtaagcggaggtgggagctccgccgatcgccagcctcggaggaaatgcgacctcccctcgccgccccttaagacctctccttccccgcctgcctgcccccccagctcctccccattctcctcccccttctgctgcagcggcccccgcggctcccgctccccctccttccgacccctgct

SEQ ID NO: 2718 - DNA, 120 bp, Homo sapiens
  chr3:120170066-120170186
  hyper
cggaggcagagggggtgtcccgtgggtccctgccacaaaggggtagggggaagggaaaccccaccccgggaggggctgctggctggcggcggcccgggcgggctgcggcggtggccaggt

SEQ ID NO: 2719 - DNA, 237 bp, Homo sapiens
  chr3:120626866-120627103
  hyper
agaacttaccctatcgaatctaggattggcgccgaagctactcccgccctttgacgtccccgggcaccccgcccccttcacctcccagctttgccggggaagaagcagggcggggcaagctaggggccggcccgggggcggggcctgcctcccacggcgggagggcggagcctgctctggagcctgactgctcggttaggacctcggagagcgccaggcgccgcgaccagagggccc

SEQ ID NO: 2720 - DNA, 204 bp, Homo sapiens
  chr3:120627311-120627515
  hyper
gagagagacagagacagagagcgagcgcaccagcgcgcgaatgcccgtgtgagggtgtttgtgtgtgttctggctgggagcgcgaatgcctcggcgtgaggtgtttgtgtgttcgcgcgcccgcgggcgggcgagagccccgcgcctcagcgctgggcctgggggagggacagcgggagcggcggctctgcgcgcccagcaggc

SEQ ID NO: 2721 - DNA, 188 bp, Homo sapiens
  chr3:120627845-120628033
  hyper
tagaaaaagtacccccctccccgcctttcatagtgacaaaaaaggaagcgttgaagctgatgggggaagagcccggaaggtggtggcagagtaaataccggctcccccaacgtcgtttttctgaaaataaaatactctgagccgaacgtttcgaagaaggaaagtccgcccttaagagagagacagag

SEQ ID NO: 2722 - DNA, 30 bp, Homo sapiens
  chr3:121634394-121634424
  hyper
ttgtagaataaaacatcaaatattcaagac

SEQ ID NO: 2723 - DNA, 37 bp, Homo sapiens
  chr3:121741106-121741143
  hyper
cctgcggcgctccccacggctccgcctcccgccccgc

SEQ ID NO: 2724 - DNA, 31 bp, Homo sapiens
  chr3:121741346-121741377
  hyper
tagggtgtgtttcctgcgttatatttccatt

SEQ ID NO: 2725 - DNA, 140 bp, Homo sapiens
  chr3:121902809-121902949
  hyper
cagggaagaggacagcgggaacaggatttgagagccgggaacccctggctcggcacgggagagggcaggagaggacctaagcgcggggctcgccgtctgctggggacccgagccggcctgtggccctcggggaaccgaag

SEQ ID NO: 2726 - DNA, 228 bp, Homo sapiens
  chr3:121902990-121903218
  hyper
cgggctaaggagacggtgaaggaaccgggactaactggggtaggggttagaaggcagcccgcgagtgggctacgaggggagctgggctcggcagttggggaccccgagggggcaagcgggcggggagcaggagaggggcggagctccggggccggggccggggccgcagcggccgcccagagggtctgcgggggctgctgtggccggacccgaaggcgggcgccggga

SEQ ID NO: 2727 - DNA, 211 bp, Homo sapiens
  chr3:121903323-121903534
  hyper
cggccgaggggccggagctgcctctgtgcgagggagccctggccgcggcgcaggtaggaccggggaacccaaggagggcgggaggaaagcgcccctggtgggggaggggccgtggcggggtctgggggccaagggctccgggccgaacgaggggcacacgccggagcagctccagcctgggagcattgggcgtgaacgtgggggaaagtag

SEQ ID NO: 2728 - DNA, 164 bp, Homo sapiens
  chr3:122514391-122514555
  hyper
cgcggagcgccagcccgcgctgtctctcctccgggagcaggcgcctgcccgcgctccaggcctgccagccgcctcccttggccccggcataggggttgtgtgaggtgatagagtgttgctagcattccatttctgacttaggaaccctccgtccccaaagcgac

SEQ ID NO: 2729 - DNA, 70 bp, Homo sapiens
  chr3:122785819-122785889
  hyper
agcgagcacttcttcccggccgcctctccccagctgctgcgcatgctttggcagacgtggcaccgggaac

SEQ ID NO: 2730 - DNA, 84 bp, Homo sapiens
  chr3:123167958-123168042
  hyper
gcattattttcttacgaggggtggggaggtgggatgggaggtggagaggacgggggagggggcgacgggcggagcaacagctcc

SEQ ID NO: 2731 - DNA, 30 bp, Homo sapiens
  chr3:123602780-123602810
  hyper
aaaggcacccccttcggatgattcctagaa

SEQ ID NO: 2732 - DNA, 210 bp, Homo sapiens
  chr3:123752378-123752588
  hyper
cccccagcccgccgcgcgcctccgcctgagggaggctcagcgtcctctgccccagccccgccgcccaacgcccgccctcgaagctccgcggccgccagctctgcggccgcagcagctgcgccccgcgccctccgcccaccgggcgccgagcagccctcggccccaggcttcttcggctcccggctgcccgcggacgccctcccacagtca

SEQ ID NO: 2733 - DNA, 30 bp, Homo sapiens
  chr3:123752821-123752851
  hyper
ggcagtgctggctgcgtctggggagggcgt

SEQ ID NO: 2734 - DNA, 30 bp, Homo sapiens
  chr3:123753234-123753264
  hyper
cccagctgggagggcggtgggcgcctcgga

SEQ ID NO: 2735 - DNA, 58 bp, Homo sapiens
  chr3:124605379-124605437
  hyper
catccccccagcagcccgcccgctcccggccggccacaaggaccgctttgtgcccgcc

SEQ ID NO: 2736 - DNA, 617 bp, Homo sapiens
  chr3:124773768-124774385
  hyper
tctgcgtgggacaggcggtggctaccacggagcaacagttcattgggaaaggaaaggggagggaggaggctcagggatggtcctgtatcagcctgtgccttgcaggggttcaaccatgcaaccccaaccgcgttcctttgcttttaagtcgaaccagtagagcgttttgtttcaaactacgtacatcctttgtcctttacaatatcccgtcctagaaccccttaaaaatcagttatttagatgagaaagtcgagccctgtacctggagaggccagttctgtatagcggaaaaaatgaaactggggaccggctggccagatatcggaggtgggagagatgctttgcagtctttttccctttcctttccattttttttaaagtggggtggaagagatacagggtaccccataggaaataagttttcttccaaagggttggaggagaacgggatagtcacacccctcagtccagccaactgcgaaagcgtccctccctacccgccgaccctcagggtcccgcacacgccgggcgaggagcccccaccctgggtcgcgccgcgcggaggggcctacggctggggatgcagcccggggcgcgcccacgcccccagcacagac

SEQ ID NO: 2737 - DNA, 31 bp, Homo sapiens
  chr3:125635404-125635435
  hyper
gtcttcagtccaggcccggcttccgcacggt

SEQ ID NO: 2738 - DNA, 31 bp, Homo sapiens
  chr3:125677241-125677272
  hyper
gcagcgagacagtgaccggcgcttggaggcc

SEQ ID NO: 2739 - DNA, 23 bp, Homo sapiens
  chr3:125690916-125690939
  hyper
caacatgcatcccgccggagctg

SEQ ID NO: 2740 - DNA, 65 bp, Homo sapiens
  chr3:125691029-125691094
  hyper
cgccttcatctcttggaggacgggcggggagagagggtcctgtaaaaccgcggaggttgtcatgg

SEQ ID NO: 2741 - DNA, 30 bp, Homo sapiens
  chr3:125898665-125898695
  hyper
ggggcctgagctctcgatagcggggcccca

SEQ ID NO: 2742 - DNA, 822 bp, Homo sapiens
  chr3:125899071-125899893
  hyper
cagtcctggcgctgcggtcatttagcctgatgacccctggccaggttcagcctcaattgctccaaagaactccggacccgtaccccgagcccggcgtcccagcggcgaagttgatgggccccgcaggagcccttgcggtgagaaccgagtcctggagcccctggagcccccggagcccccggagctgcagccggggcagcctcctttccgccgggagtccagcgctctcgagagcccagaaactcaccgcgcgcaggagttggtgcgggcgtcccgggcaggttagacttctgtgagccgcagccccgaaactgaggttggtgcagacccgtcctgggagccaggaggtgggacctgtccccgccagtccgcgagctctggttaaggccagagcccgtgaggggaggggcgcggggcgggcggagagtcagccgagtgggggcggcgctcaccggtggtgggactatggcgggagcgcagcgcaccctctccgggcgggtctataaatgccatgtaaaagccaaccccgcaggggcctgcgctctttcccgcttaggtcaagaagacttactgtggacccttggagaattcccagggctttgaaaagtcccaagcacccagcagggctggcagttctgagcgctggcaaggctaagtgggtcagaggagaccctcgccaagccggtgactcactcactcgctcaccctctctcactcttgatgggccaagtacctgccatgtgctacggacacagcagagcgaaaggagacgctgccctccgggaatttgcagccgcttgcagaggcggccccttagcagct

SEQ ID NO: 2743 - DNA, 256 bp, Homo sapiens
  chr3:125932038-125932294
  hyper
ccgcggcccttcgccgcagccagagtgctttgtccgagctcaaaaaagccgtctccatggaagcggcccttccgctcggagcccggcggcctggagggagacccggcggggatgcgaggattccgccccagccccagaggacgcggcggagagcctggaggaggcgctttgagagtcgaggtctcccgcccgcgcgcctccctggcgcagacctcttttaactttttggcgtggagtgcgcgtcctgacgtgcccc

SEQ ID NO: 2744 - DNA, 375 bp, Homo sapiens
  chr3:125986311-125986686
  hyper
gcattcctggccgcgcgcgcacaggctggaatccgtacattccattcataacattcccgcaagcgaggggaggagacgcaaagccggggagtgagtgattaaagaaaagaaagaagggcttcttgcagctccgggctgtgttttttcctgcgcgccctggcgcagtccccggctcggaaaggcaggagcacgtgagcggtttgcagagcagcccggcccagccgcgcgcccgtggccggaggctccatttaccctccgcggagggcgctgtgcggcggcacttaagcggcagcttcctctctcccaggcggcctttgtggctgtggccgggacagggaaaagctgcccaggccaagagggcgggggcgtcagggg

SEQ ID NO: 2745 - DNA, 30 bp, Homo sapiens
  chr3:126077031-126077061
  hyper
cgcatttgggttcccgcttagagacaggaa

SEQ ID NO: 2746 - DNA, 88 bp, Homo sapiens
  chr3:126113798-126113886
  hyper
gcgagccggggcagtcggggtcggtgggtgcgctcgcggtccggggagagggggcgcgcggggtccgtgagggcgcgtgggggcggcg

SEQ ID NO: 2747 - DNA, 182 bp, Homo sapiens
  chr3:126242958-126243140
  hyper
gaggagcgggcttgcggccccaccgtgtcccgcctcctcagtccccagcgactcgcaggggctggtggggctggggtccagctgccgtgctcccctgccctgcgccgcgccgcgcgtcttggtaggcgctgcgctgccggggccgggtcctgggccagtgcaactccgcccccagccgtatc

SEQ ID NO: 2748 - DNA, 469 bp, Homo sapiens
  chr3:126373467-126373936
  hyper
ggctgacctcaccgccgcagcccgggacccgcgggcgccccggcccggacccgccctgccccgggtggcgtccgcgtggcgggcccggtcgcgcgcggtggaaccggcgagggccgcgcctacccgagtactatggggacagtagctcttgctgaagatcaccacccggctgcgctcgatgaggcccacgaggtggcggcgcagctcctcgcgggcctcggacgagcggctgggcccgggggacgacaggcgggcacggcgccccggcggcgacaacacgcgcgcccctcggacatggcccgagcggcggttgggggcatcgcccgcctttcccggcccgggcgactgcggcggcgaccgctccagagtctcgctctcgctcctggcccggccgggcctgctcacaaaccgaaacgcaggcggctgcggcgccgggacggggcctgaggggcggcgaacgctgccctcg

SEQ ID NO: 2749 - DNA, 248 bp, Homo sapiens
  chr3:126701149-126701397
  hyper
ccatctgctctgttatcgatgctcctgttgccggcttccccttccttggcctggttgcgtccaccgggaggccctcccggatgcctcctgcctgggagtggcggttgtgagtacagtaactgagtgctgggtgtctgcccctcagccttgccatgcaggctgggggtattgcctggacagctctggcccgtcaccctggattctgcagccccacacctcacaccgtgtagatccgctgccccacgcta

SEQ ID NO: 2750 - DNA, 31 bp, Homo sapiens
  chr3:127175258-127175289
  hyper
aaaagccaggtagcctcggaagtgaaacagg

SEQ ID NO: 2751 - DNA, 460 bp, Homo sapiens
  chr3:127347870-127348330
  hyper
agggacggccgcccgcgcgtccgcttcgtctccgcgggggcgcgcccgcggcacgcggccgggcggggccgggcgtgagtgacggccatgcggaccaatggggcgggcgcgcgccgccgccgccgcccgcgcggcccctgacgcgggcccgggcgccgcgccgctgcggctgcaggcggcgacggctacaccatgggccggctgctgcgggccgcccggctgccgccgctgctttcgccgctgctgcttctgctggttgggggtgagtgcgctccgggcccgagcgcgggagggcgggcggcggcgtgggcgcggtgctggacagctccccgggccgccaacaaaggggccagagtgcggcgccgccgggagcgcgcgtgtcccggccgggccgcggcgccgccccgacacacgcgcacgaggagtgggtgcgtgggggccgcggcgggcgcctggcgtg

SEQ ID NO: 2752 - DNA, 30 bp, Homo sapiens
  chr3:127391206-127391236
  hyper
caccccagcctgaacggcggcggggccctc

SEQ ID NO: 2753 - DNA, 118 bp, Homo sapiens
  chr3:127451673-127451791
  hyper
atgtctatgaggccaccgagtgcactgacggacaccatgactgggtctcaggaggttcagtgacttttccagcccagggctgtctgagcagagctgggaggagcggtgggtggaagga

SEQ ID NO: 2754 - DNA, 30 bp, Homo sapiens
  chr3:127541157-127541187
  hyper
ccattatgtgctggcgtttgcattccacaa

SEQ ID NO: 2755 - DNA, 225 bp, Homo sapiens
  chr3:127634094-127634319
  hyper
cggggagaccctgtgcagcgacaccggggctgtagtcgccgtctggaaccagcgcgggaataggtgcgcaggcgcacagtggctggagggcagcggcggcgtggtctcgggccacttccaagcagagggcagcacctgtcccctcggaggcgctgccagcgccctccctcctcctccgcagggcgcgggacctctatttatatcgcccagccagcacaggcccat

SEQ ID NO: 2756 - DNA, 761 bp, Homo sapiens
  chr3:127794362-127795123
  hyper
ccttccccgcatgcacggggggacacacgccttcctccctgcctgccgggacttcaacctcgcttgctgggaagtcgcgcactttcgtcgcgacttcccaagtcgtgctgggtgtgacttggaatctcggatccctgggctaggcctggccacgcccccatggggggaggggcagcgcggcgggggcggagcctgggcccgaaacgccacgggcgcgactctgtgcgcgtccgcccacacgggggcgctgtgtcctcgcaagctcccgcggggtgcctcgcggccctggaacgctgtggttttcgaggggaaaagtgagagtggctggtcctgcctccgctgccgcttggccctgagatccccactgcccacgggataggccccagtccacccagccggggccccccccttcccctcgtctcgctctccttggcagttcggacttcgggtcagtcccacactcgcgcccggctgtccctgctgcgctcctgtcactggcattgggaagccctccggccccctctctgcacacctggcacacggctcctccctggcggcatgtgggtatttgggttgggcgagcctctccctcccgattcccgagttccgagtgggtcccggcggaccagcgctattctggaggggcagtgcctcagaggcaggtcgcttcgagtggggatttgtgcgctctggcgcggaggaggggggtgggaagccggctcttgccctcctcacccggtggggagcgagcagggccaacg

SEQ ID NO: 2757 - DNA, 1222 bp, Homo sapiens
  chr3:128207960-128209182
  hyper
cggtaattgggtaactggaggcggcttctccggccgggcggccccgccaccgcgacgccgagcccctgacgtcacccgattcgccaggaaatgaactttttaataatccgaggagggaggaaagccctcggtcccctcggctccgggggcgcccggctgggcccagctccgcgggcgcgcccccgtcaccccctcccaggccagttcagggcagcgccaaggggccgcgggctcaggctgaggcctcctcctgcctaggcgtctggcgtccgtttgtctgtccgaggcctcagcgcaggtaaagcgcggggctggggggcgcagagctccattgggctgggaaccagcgcgtctcgtgcccttgggggacccgcctgcccgagccgcctgctaagcctcccgctcccctccacgctggagcgcgcggagcccggtctgctcggaactccactctgcgggagcggaggccggcgccagcccgggaagccgcgcagggggcgggaggccgagcgcgaggcccttggcgccgggcctccgcggccaggccgggcaggtgagcagtctccgtgcctcccggttggcgttcccctcaacgcgtgcggtcccgccggggcccactgtctctccgtccgtctgtctctcaacttttcccatcctttagcttacgattcttcatcaactcgtaaaatgagatcgccgcggagctcgagcctatttggcgtctccggagactagcaagaccctctgaaagacaccgcgtccccagggataatcccccgtgtccggcaaagctgccccgctcgagcgcgaaccctgggacccagcgcgggaggcagaccagcagctggccgctgggctgtgaacgccaggaccgagcggaagcttcccgcccggccgcgatcggtgccgcggctctcagggaagtggctacgcgcgtccctcgggaaagcaggtaattcgcctttttctcccaccggcgcggtaaaaattaccctccccctccccgttccgtgtgtattcccagtttcagcgcagcgagctcggcgtctaacccctccgcggcagggtcccggccactgcggtagtggaggtggccagcctggctgagtcccctgcccaaacgtcagccctgtgctgccgcctgcctgacgcagagcggagcgagggaggggatttaattaccccgctcggcagctcagaaaatcgccgcacagaggggctt

SEQ ID NO: 2758 - DNA, 324 bp, Homo sapiens
  chr3:128216321-128216645
  hyper
agcgtgggtggactccgggctggggaagcgacagggaatggtgtgtgccggtgtgacagacgccagagcggcggggtggaacgtgctgtgtcacgggagactttcttgaccaaaacggaatgtgcgagtgtggaaggaagaggggccgtccgcggagtttggggacacccgggcgtccgagccccagagcctctgcagctgggacaaggaagcccgagcccgccgcctgaggtccccgcgccgttagtgacacgcgccgccgacaaaggctgtatttttccaggctcgcgccccgcccgcgcgcgcgcgatggtccccatggcg

SEQ ID NO: 2759 - DNA, 220 bp, Homo sapiens
  chr3:128216698-128216918
  hyper
cgggattagctcatctccaggcaggtcaaacccaaagtcacacaacctgcgacgcgggccccgcccccactccccggccgcccctcccctgccccggccccggccccggccccagcccggcgacccccggctgctgcccaagcgcaggcgcagagcgccacctggcggcggcggggtctcgggtggggtccgcggagccggtgcccgtgcagaagaggtg

SEQ ID NO: 2760 - DNA, 58 bp, Homo sapiens
  chr3:128273993-128274051
  hyper
tcccgggaggggcagcggggacggggaccctgaggcccaggggattgggctcaggggc

SEQ ID NO: 2761 - DNA, 346 bp, Homo sapiens
  chr3:128274308-128274654
  hyper
gctcctgtaacaggctggggcttggcccggcccgcggccgccccgccaggaagcgccccgtccgccccctcggggcgcgtccgcggcaggcacttttgaggacaggaaggggagaggtgacctgagcatccacgcagctgtggcattcggggacgggccgaggactgggtttcttgccatcctcagcgctgggggtgactccaagcccccgggtgggggtggggagtggccgggcatggcgcccggctccacaatgcatcgccttacccggccggaattcctgcaggacgctttgttctcagatggcagcgctgctagagccatcggacctgtgaggggggggcgc

SEQ ID NO: 2762 - DNA, 30 bp, Homo sapiens
  chr3:128417344-128417374
  hyper
ggcggggagaaatgcggaggggaaccctag

SEQ ID NO: 2763 - DNA, 79 bp, Homo sapiens
  chr3:128720063-128720142
  hyper
ggagcgaactctccgcgccaggcgggcggggcggagggaggagggagttgagagtggacggccgggagtgggaggaaaa

SEQ ID NO: 2764 - DNA, 183 bp, Homo sapiens
  chr3:128720163-128720346
  hyper
cgtgagtgaggagaggagagcgtgggagtcacgcggagaagccagacccagacgccgaccgggcactggtggcgctgccggggtcccgggggttcctggaccccctaccccaggcccctccaaagcaactggggtaaaccagacgcactgtgaggccagcgcagctgctggacacggtccccg

SEQ ID NO: 2765 - DNA, 115 bp, Homo sapiens
  chr3:128720418-128720533
  hyper
cggggcgaagggaccggaggagggaccggaggagcgaggcgcgcggcgcagcgatggagccggtcagcacgggcgcggaggccggcatggagggcgcgggaggtgacccgtaccg

SEQ ID NO: 2766 - DNA, 699 bp, Homo sapiens
  chr3:128720566-128721265
  hyper
cgccctggcgcaccactacgggctggaccgcggcgtggagaacgagatcgtggtgctggccaccggcctggaccagtacctgcaggaggtcttccaccacctggactgccgcggcgccggccgtctgccccgcgccgacttccgagcgctctgcgctgtgctggggctgcgcgcggagggggccaccacggccgggcaggcagcaggtgacgggaactccagagatgtgacccccggggatgcggccgctgagttggccacggacggggactcagataccgatgaagaggcgcgcctggcgctgcgcgccgagccgccggagctcaccttccgccagttccacgcgcgcctctgtggctacttcggcacccgtgcggggccccggctgccccgcggcgctctcagcgagcacatcgagacgcagatccgcctgcgccgtccgcgccgccgccgccgcccgccctgcgcgcctggccccgacagcggtcctgactgtgagcgcgttgcgcggctggaggaggagaatagcagcttgcgcgagttggtggaggacctgcgcgccgcgctgcagagcagtgatgcgcgctgcctagcactgcaggtgcgcgccggccacgaagggagggtggtaacgcccgggagagggctcgaactaaaagctggctggctgcggagcccgacaggacagagtcagaggaa

SEQ ID NO: 2767 - DNA, 30 bp, Homo sapiens
  chr3:128840242-128840272
  hyper
gcccacgcttgcgtcgcccaccagcaccag

SEQ ID NO: 2768 - DNA, 1123 bp, Homo sapiens
  chr3:129324210-129325333
  hyper
ctgcaccacgctgtcgagcaccgccaccacgtcgggcgccggttccacgaagcaggcggtgcgcgcagctcggatggcggctcgcacgtcggcgaagcggaaggcgcagagtgcggccggagcagcgcgggccgcgggggacccctggggccgctcgaagacagcaaagagccgctcccgggctgggaagaccgacaccaggcggctgtagaggtcgccgcggcccgcgccgcccgcgcactgcaagcccaactggatgtaggactcggtgagcttcttggcgtcgccgccggcgccgtggggcaggcagatgcgcgccagcaggctccgcgcctggctctccttgtcgcccgcgcgcgcctcgctgttgagcgccaggtacgcgtaggactgtgcacccggcggcgggtcggacgggtgcaggaaggcgctcacgaagcccagcttgtgctgctccttggcgccctgcttgatcttgaggatgttgtcgtcggaggggttgaggtcgaaggtgaagagcttggccaggtcgccgcgcgtgtccagggagcggatggcgatctcgggcgtgttctcgaagcggtggtcctccaggctgcggttgcgcgggaagaaggagctgccgtaaccggtgtacgtggcgcccacgagcaggcggctgccccccgcgcccgcggcgggaggcagaactagccccacggtggacgcgttcgggtggttggccgccacgttcagcatgctggggaacaccgtgacgggctcggcgggcggcgcggcgggcgggaagcgcacggccacggccgagatgttgccccggcgccgcagctggcagaagccctggtagatggacccgcacacgactaccaggccctggccggggtccagctgcaggatcttgttgtagttgtccgtgaggcgccgcgggtgctcgcacgaggcctgcggcagctgcggagcgtgacacagcgggctgtcgggcaccgggcccacggccgcctcggcctccaggctcaggttggcgcccgacagctgatagaggcggttgacggccgccaggtacacggtccccgccgcgccgtccagggcgaagttgttggtgggcgtgggcgaggggaaccgacgc

SEQ ID NO: 2769 - DNA, 651 bp, Homo sapiens
  chr3:129345978-129346629
  hyper
agccccccgggccctcgctgctccacccagaagttgcggtgactgcggccccagcaccccgttccctggccgggcatcacttgcgcagcatgctgcccccagaggacagggctacagttagtcgcccacacctcattcacccccttgggcccttgagcgtcttagaagccgcagatgccaaggaggggacgctgcctcgcggatggtcacttgggagcaaagctggggactaaaggaaccagggacagagattcctgctctcgccaaattggccgctctgggccaggcactgaggacacaccgcgaagccggatagccaggtcctgtcctcagggccctgtccggaagaggactgggcagcctcgagtccgcggcaatgaatgaatgttcaattgcacagatggggaggcgaaggagggagggagggagggagggcagtcgcttgggcggtcattggaggctctgggaggctatgcgccggcaagaagcagcggggtggaggcagccctgcgggagtcggcgagggccgcgtggatgtgctcggtggttttgaggccagtggctggaggggcgtgagagtgggagaccagacttgaggggagtggctggagttgagactcaaatccaagaaggaaacggtggggcttggac

SEQ ID NO: 2770 - DNA, 48 bp, Homo sapiens
  chr3:129693151-129693199
  hyper
cggccgtgtccctttcgtgtgtgtctgccctgtgtttctccgtcgtct

SEQ ID NO: 2771 - DNA, 194 bp, Homo sapiens
  chr3:129693304-129693498
  hyper
cgtgttctcgtcaacagatctccagaggtggtgcagaaacgaccccgcgccggcgccccatcctgcggccagtgcctccgcgccccggctccggtccccaccgtccccgccccagatttccggaggagcaggcgggcggggtcccgcggggccggctgccgtcagcgccccttcccggcggccgcgacccctcc

SEQ ID NO: 2772 - DNA, 392 bp, Homo sapiens
  chr3:129693954-129694346
  hyper
ggacagagctgggtattcagggcgtcggcctgagaacctgggagttcgaatcccaatctcaacgctagaaatagaattttagcgttgaagttaggattttagcgttagaatcagattcctggcttagtcatgaaagcttagcattagaaatagaatcttagctttgcaaatagactttgagctttagaacctgaatcttagcgatagaaatgggatcttcgcgttggaatgaggacgtcggccacggagcttggagttagaacgtggcgatggggacctttgggggagtcttggcggggacgcaaccgttagcgtcgcggctgtgcctggcgctgcaatctcaatggttgcactcccggcgaggcagtcccagcgttggcttccccagttcc

SEQ ID NO: 2773 - DNA, 30 bp, Homo sapiens
  chr3:130132286-130132316
  hyper
ctcattacttatgtctagcagagaatgaaa

SEQ ID NO: 2774 - DNA, 228 bp, Homo sapiens
  chr3:130235835-130236063
  hyper
aagaggggagaagccggtggagcagtaacagccttcataatgtctccagtcccgcttccgtcacctccctaaggctgcgcccccctcctgggggacgtgcgctgggcccggggccgccggggcggggaagggtcgggcccggggcggggagaagcgtttatatgtcggcgaggggcgtgggagctgccacccgcttgcctgcgggacaccggagtcaagaggctgccc

SEQ ID NO: 2775 - DNA, 101 bp, Homo sapiens
  chr3:130236173-130236274
  hyper
cgtccagaggaaatccgccccgggctttcgaagtgcagggctgggggctgcatggaagtttccccaaggtaagtccaggagccaacgctgggacagcaaga

SEQ ID NO: 2776 - DNA, 94 bp, Homo sapiens
  chr3:131753128-131753222
  hyper
gtcccctcccctccgcggtctttctccccaactccattcgccccaccccacctgggcgagttgggtggatgtcagaaggcgagaggtaggggat

SEQ ID NO: 2777 - DNA, 711 bp, Homo sapiens
  chr3:131753436-131754147
  hyper
agagagaattcagcccgggacgaggtctgtcccgcccccaggatgcaaaatccggctttgaagtggaggtggttggtgtggtagttttgtactgatgtaaggggcgtcgcacctccttcccctctcgtcctccgaggtcagtttagcaacagcggctgggaaaggtgctgagagcagagttcggtctctccggaaaccctgactccattctcggtgatgggggtgggggaagagggtgaaaatgttggagatgtcaggtcggctctcagttaactcggagagtaaagaggagggtactgagaaaagagggagggagtggagtggagcgagggaggaaggaaaggagggtggcagaaagagaaggggacgagcgggtggcggggagatggcagcttctcacagagagatttccaccttctgacgaatcccatgcacccagcaacccggcaagagactggttccgaaacctccgcgcgagcgccccctgggggttgctgacggagacgagcattgccccgggaacccgagctcaggccccgcccaggccttggcggcggcgctctccgtggtcctgccgcgcccgcagtctgggctttctgctcagctttgtcgctcaactgagctcctggggacacttgatttagatctccaagtgcttggtctccatctccactctagggtggagcggtcgtatcgcggcgcgggtgtggg

SEQ ID NO: 2778 - DNA, 538 bp, Homo sapiens
  chr3:132756941-132757479
  hyper
aactgagtgccacttagcccccgaaaacagagaccctttgtgcccgcctcgcacccgctctgctaggtagcaaccgaacccccagagacatcggagcgggcgctgccgagggcaatttggtgattggctggtctcaccacgtgaccggcgctgagccttccgtgcgaccggattggctgtcgcggacgctgacggacaaggccggggcgggccagagcctggtcggaggggcgcgcgcgggggcccgaggggcgaaggcgcgagtgcgcgagagcgcgtgcgcgagcggtggggctttctcctgagccgtcggagggagccggagcgcttctcccgaggtaagcggcgctccggggcgtccccccagtccttcccatgctgggtcccggcaagcgggttaggctgggctgggcggggctcggggaggtgtggggtcagcttgccccgggagcccagcttcagggaggatgcagccccggttgccttggtttcccttttcctatcctctcaggcaccttcccatcctccccactgcgtg

SEQ ID NO: 2779 - DNA, 373 bp, Homo sapiens
  chr3:132757536-132757909
  hyper
cgcctggagggttgctggcatgaaccccctccccaggtggagggtgcgggtgatggggcgcgggcgtcaggagcgctggacctgggctggggccgaggaggaggtggctttaatgcagggggacctgtcacatggggaaacgaagaagaagaaatgtagtgtcactttggccagcccgagggactcgaactaatcctgcggccgcgagcggagccgaattcctagcgcagctgtgcgaagagccctcctgcctaggtgccggcggcctcgccggggacggagcctccgtgctgcccgggaggttgctctgccggctggacctggcggttttcaccccagagttgcagcgaaattgaacgctttgagcctgctg

SEQ ID NO: 2780 - DNA, 50 bp, Homo sapiens
  chr3:133276457-133276507
  hyper
aagaatgtgcatttggcgttccgagctaagaaatccgggagtggccaacc

SEQ ID NO: 2781 - DNA, 30 bp, Homo sapiens
  chr3:133969906-133969936
  hyper
cctttcccgacggacgggccaggctggagc

SEQ ID NO: 2782 - DNA, 148 bp, Homo sapiens
  chr3:134032288-134032436
  hyper
cgagctggccgcggcgcaaggaatgcggcctttggctggtcccgggccggcattccggccggcgcaggaatgtgagcagggtgttcactgcgcgctctgagcgcacaagtttgttctcctctccttggagaacgccggcccgctctgt

SEQ ID NO: 2783 - DNA, 1049 bp, Homo sapiens
  chr3:134092502-134093551
  hyper
cgccccaccacgagcccgggcggacctggagcaccggtggccgctggtacgcctggggcgagccggtgagggtagcccgaggcccggagaggtctttaagcatcgcgggtccgcctccctccctctcgagccctctttgttttccaaatactctaacgctgacgtcaccgggctggacagcaggctgcattctttctaagtgagggccaattcgtggctccagagaggattttccaaggaagacaaagaggaattcttggactagttgggggcaaaggcacctgtaacccccacctaaccaaatcagcccgcaggaccctgcaacttgagctccaagcggcgcctccatccctgtcccccgccacccccacccccgccgacctgcaacccgaaacactgtggctgttgtctccggagtcggccctctcccctctcccccagccccaagagacccgcgcgtttctagagccccgcaaagcccagcgcgctgcgctccctgggcagagcggcccttgccaggcactgcggctgcctcgaaagggcgcactgcgccccgaggacgctcgatcctcgaggctccgactcccggaaaaggccgggttgcgccgagactccagctttggctggggcacgtttctgtggcctcgcgcgctctcccgagcgccgagcggccttccttaccgctgcggcccgagggtgcccagcgcagtcagacaccacaacctccggctcggcccagctcagctcggcggcgaagatgtgttctcggccgtggcgccgacgctctggctgttcgcgccccagcgcgcagccccagggtcggcccgcgccggaggcggctgctatgccaggaatgtgagagtttcaggttccccctcgggatcaaagcgaaccacaaataacctctcagcgcaccgccctcctccgccctccgccttctcccgctccctcctcccggcccccgccttcctccggggaggcggcgctgctggccgagcgccggcccggcccccgagctccgttcctccgcgcccagcgccctccaggcc

SEQ ID NO: 2784 - DNA, 128 bp, Homo sapiens
  chr3:134093626-134093754
  hyper
cgcctccactcccagtcgccgacccgctctcacccttcatccctaaacccatcgacgggacgacagcaagggctgtaccacgcgtgtcctggggttgctgcgggaggggactccggctgtgtgtgtgt

SEQ ID NO: 2785 - DNA, 313 bp, Homo sapiens
  chr3:134125433-134125746
  hyper
ttgcttaaggtcacctccaaacgggactggaataaaccctccttgtttgcctctcgccaggcctaagccccgggtccccttgggtgtcgtccaggacgccaggcgcggctgcttacaatggctctcagacgacagatggcgggcaggaagggagggggcgccgggcaggtgcgcgggggagacgcgccgcggcagcgccggacgccaggctgcagggtgaatagatttgcagcccgccggctgcaggcggcggccgccgagccctgcaaacaataagtgaattctccgaagcgactgaaaccccccgggctgg

SEQ ID NO: 2786 - DNA, 121 bp, Homo sapiens
  chr3:134369813-134369934
  hyper
ctttccgacctgggcgccgcggccgcacgctaggctgcttgcgctgcaaatggccccgtgcgcgcagctgccccacacgggagagggcgagggcgcggaagagggcgctcccccgccgctg

SEQ ID NO: 2787 - DNA, 611 bp, Homo sapiens
  chr3:134515223-134515834
  hyper
gagtgggctggggtgagtggtcggtcctacctaaagtctcccagcctctccaccaccccggagaggatactcggcggccgggagtcgtcgggcagcgtcactctctgccagctcagacttggcggtgcctccggcttggtggctgggaaagcgcgctccaaagacaccgtgcccggcgcagcggggagcctgggcgctcggtagcgctcgcgaatccctgtgggaaatcccggcccagctccccgcctcccgccccttcccccgcctctgttcttcgcagcctagcagcggccgcggcagcctcctgggaacacagctccgcgggagagcggagttggagttgtcgggagaaaaccaactctaggggtgatgcgctgccgcagtccggctagcagccccactttccggtgtcctgctccggatggaactcctctgggggactccaagccggggaggagcagctcttggcgaccgcgcagcgttcccatctgggagctcgctccgcttgttactcgttcctcgcgaaactgtgaccggttgcccagtggaaactcccccaaacacgatggtttggtgccccccgccattccggaaagctctgcccttctgga

SEQ ID NO: 2788 - DNA, 30 bp, Homo sapiens
  chr3:134592951-134592981
  hyper
aagcaaacagacagaactttggatattctt

SEQ ID NO: 2789 - DNA, 30 bp, Homo sapiens
  chr3:135684317-135684347
  hyper
atcgcatccccgcggcgccgccatacagga

SEQ ID NO: 2790 - DNA, 577 bp, Homo sapiens
  chr3:135684609-135685186
  hyper
cgagagtccgcgccgcggggaggcttggaggcaagcgctgcccgcgagctgagccgccggaggaggagccgcgggcaacgaggtaggcaaaggaacactggccgcacggcctggagccttcagctccctcgtcccggcccgagggggtggcgaggctcggggcggcgcgcggaggccggggcgggcggggccgggacctgggggcggggaccggcctggccagaggggccacacggagctgattgggctgtggaagtcggaattccagtcggtgcggtgcggtgcggtgcgttgcctcggcgcggccggccggtcccgggacacggcaccagggaggtgtggaaattgcctgccccaggggcgcccgcggaggagggtaggcgggggcggcctgggccctcccacttttcagggctcctgggccagttcgcccgcacagccctcgggaacttgttaacaggaaagcctggcagagaaacaaatgccagcgttttggaagaactgagagtcacgtcgttaggcgctgaggctttcttttccttccccgccccctgcccaacctcggcccgacttggcc

SEQ ID NO: 2791 - DNA, 30 bp, Homo sapiens
  chr3:135685413-135685443
  hyper
gttgatgttgcatccgaactctgttgtgct

SEQ ID NO: 2792 - DNA, 30 bp, Homo sapiens
  chr3:136471147-136471177
  hyper
gggagcgggggccgcgccttcaacggagct

SEQ ID NO: 2793 - DNA, 30 bp, Homo sapiens
  chr3:136471619-136471649
  hyper
ccgggttccttcaccgaggctcctccctag

SEQ ID NO: 2794 - DNA, 88 bp, Homo sapiens
  chr3:136537679-136537767
  hyper
acagaaactgcctccgtgcccacttgcagcggactacgtagccctggcagacaggcaattgcttcaaacaagcgccctccaagggcgt

SEQ ID NO: 2795 - DNA, 30 bp, Homo sapiens
  chr3:136538786-136538816
  hyper
cacagtgctctgggcgctgtagaatttcta

SEQ ID NO: 2796 - DNA, 30 bp, Homo sapiens
  chr3:136580754-136580784
  hyper
agtctctcctgcggcgctgaggaggcaggc

SEQ ID NO: 2797 - DNA, 250 bp, Homo sapiens
  chr3:136751320-136751570
  hyper
acaaaaatttgtttcccactccgtcctcttcccggatacttggagacagcagcgtcagtggcattgtttggcgtctctgaacgcggctttggcagagccctccggagccagctgtagttcccggagacgccactaggtgacaatgtaggtcttggttggtcaactgcaggctacggttgatttggttgggtcccagcggagccttagcgtcctctccggcaaaataacaaatgtccgtcgtgcagggcac

SEQ ID NO: 2798 - DNA, 152 bp, Homo sapiens
  chr3:137479991-137480143
  hyper
aaggcgcatcctggacgctctgcgccctggagggagacgaaaggcccggagagaagcagattaggtcggtgcccttagaggcctcttccttcacttccgggaaacagcggcggttccctgacaaaatccctgttgctcgggggttcggacgc

SEQ ID NO: 2799 - DNA, 288 bp, Homo sapiens
  chr3:137480490-137480778
  hyper
ccaggccagaccccaggatcacgggaactcctgctcccgccacagctctaaagagtgttgaataaaccggtggtcaccggtactgcgtaaggggtgtgcgtggctttgcagttcgcctaggagacaagctgatgcacggcctggaaggtgcagccctcatccctgcgttccctccccgcgcggagttcctgtctcaaggccaagacgcgcagcgctgatgctggccccttcctaggtcagtgcagctggaccaggcaatcggggtctccgaaacgtcggggggtcagc

SEQ ID NO: 2800 - DNA, 28 bp, Homo sapiens
  chr3:137481935-137481963
  hyper
cgcgtttctggccggtcctcccaagaga

SEQ ID NO: 2801 - DNA, 30 bp, Homo sapiens
  chr3:137482524-137482554
  hyper
gggtcccagcgctacgcccgggcgccgcat

SEQ ID NO: 2802 - DNA, 30 bp, Homo sapiens
  chr3:137483048-137483078
  hyper
ccaggttggggagtcgccgccccgcgctta

SEQ ID NO: 2803 - DNA, 30 bp, Homo sapiens
  chr3:137483977-137484007
  hyper
ctcctgagcgcgcccgagaaagcccgggcc

SEQ ID NO: 2804 - DNA, 197 bp, Homo sapiens
  chr3:137487066-137487263
  hyper
aggggcaaaggcctcggacggtggctgaagctggaaaaccgaaaccagggttccgggttgcgcttggtcttaggctcagatggggaattaggaaactagggtgcgctgtagaagagaggcgctcagggggctgcggcctcactcagaggtggctgagacctctttccagcctgcaaagagccgggggcccagttcgg

SEQ ID NO: 2805 - DNA, 32 bp, Homo sapiens
  chr3:137487755-137487787
  hyper
agactcctggcatccggagaacctgaactccg

SEQ ID NO: 2806 - DNA, 22 bp, Homo sapiens
  chr3:137487850-137487872
  hyper
cgcgtccggtagccagggagcc

SEQ ID NO: 2807 - DNA, 234 bp, Homo sapiens
  chr3:137488295-137488529
  hyper
ctttgattcccttccagtttccgagtttttctatttaaatattaatttccttaggcccgatgactttaaagacggaaaagaccagctactttgagtaaattacgctgaggtgtgagtgactgacatctgagaccccctgaacgtttgcattttggaactggagcgagctaacctgtaggaatctccggtgaaccaaagcgggatgatgtttccgtctgagtagggccaaggtac

SEQ ID NO: 2808 - DNA, 262 bp, Homo sapiens
  chr3:137489087-137489349
  hyper
aaaaccagagattcgcggtcggccccacggaatcccggctctgtgtgcgcccaggttccggggcttgggcgttgccggttctcacactaggaaggagcctgaagtcagaaaagatggggcctcgttactcactttctagcccagcccctggccctgggtcccgcagagccgtcatcgcaggctcctgcccagcctctggggtcgggtgagcaaggtgttctcttcggaagcgggaagggctgcgggtcggggacgtcccttg

SEQ ID NO: 2809 - DNA, 119 bp, Homo sapiens
  chr3:137489579-137489698
  hyper
aaagcaattcatacacgatcagcgctttcggtgcgaggatggaaagaaacttcagaaaaactctcgccagacaacccggcagcacttggccccggaacagagaggagagaaagacctga

SEQ ID NO: 2810 - DNA, 1172 bp, Homo sapiens
  chr3:137489875-137491047
  hyper
cggctgtcgaggcaaacgcagagcacccgcccagtcctccaagggccgagagccgggagtcccgaacgccgcttaagcagctccttgcttcccgcagcccgtccacatccctgcgggatttctggacgccccgcccggggacctagggaggagggagagaggagggagggagtgggcagcctgggcgcacgccaccggtccccgtacgcccggcaccccccgtggcgcggcgagtcaatgggatttgcacactcgaggtgtaacagcattactgcattaattaccatttccatttcacgtccagattgtttacttatctgcgggaaacatatgtcgggagaagttcacattccggattctgctccgctgcccaaggtgcaattccggggaggcggcgaggggggaggggagggcttcagattttttattacaccctctagccttatctgccgctgtaaattatgaggatcctccattgagcggcatatggagattatatacttttttgaatatcgtttcccaaagcctgcagattttcactttgaaatgaaacaatcctccgctggttcccccggggacaggcgtctcctgcgttcccccgcgcggcctgggggacccttctcgcagagcaggcgcgcaccccaatgccgtggccggcgcccagtggagacttctttcacagggtctagaataatcttccgcggaacacccatccatatgcagtgtttgagaactaaggcagctcccttgctctgttttcctgcgcctagcccccggacttttgtgccgtttgcagctctttttcatttcgaatacccgcatagacgcgagcccacttctgccctcttcctacgctgggcggctccaaacccgccgcgagggctgaggtgttcacacctgcccacggcagcctgcctcgccctcaagcgcctcaaagcttcctaagcgcttacattggtcttgggacagccgactttggcttctttgtttgtttgagggaccgcggaagtggcggggaatgtgcccccgcttgagaccgcttattgtgagccctcaacggaaatcctgcacggaaggcaaccgcctccccgctcgcggtaagcaggatccacccgagtagcggggaccgaatcccatctttcttatctctcgaagactcctttcaggctgag

SEQ ID NO: 2811 - DNA, 30 bp, Homo sapiens
  chr3:138067038-138067068
  hyper
ctcagaagttggcccggccggagcggagat

SEQ ID NO: 2812 - DNA, 345 bp, Homo sapiens
  chr3:138067293-138067638
  hyper
ggggtgcacgcgggggcgacagggtcgaggcacccggcccgggctccccactggcgcgcccgcagcggcgctctatttttagcaggcgctgtggcaatataaggaatgcgcggcgcgctaggcgctcggggcgcacgctggcggcgcggtcgctttaaggaggcgccggggcggggacggaccggagtggccggctggcggggagccgtcagtccggcggccgcggggcccggcgggcgcgacgctgcctcctcaccggcgcaggctaggagggggcggcctgagtgccgtagccgagccggggctggagcgcgcggtgagtggtcgggcggccttggaggggag

SEQ ID NO: 2813 - DNA, 615 bp, Homo sapiens
  chr3:138153321-138153936
  hyper
ggaggccgagctcaccggctggttgctctttagagcgggcaggagccaggcgggcggcccgcccctctagggcggagacttccggagctgcggactcactggagccgagaactggggcggcgcggcgcggcgcggtgcatttccaggcgctgctctccgtcgcagagaaccctgagctcggcgcgccgagagtcccagcagggcaagggggcgcggcgtcctggtcctcgagcttgggagacagatgcgcatgggcgtgggggcatgcggacctaagctcgggtgaagctctcgggaagggcaagactgcggcgacgagatgcgagcagaggagccctgcgcccccggggcccccagcgccctgggagcccagcgcacgccgggccccgagctgcgcctgtccagccagctgctgcccgagctctgtaccttcgtggtgcgcgtgctgttctacctggggcctgtctacctagctggctacctggggctcagcataacctggttgctgctcggcgccctgctgtggatgtggtggcgcaggaaccgccgcgggaagcttgggcgcctggccgccgccttcgaattccttgacaatgaacgcgagttcatcagccg

SEQ ID NO: 2814 - DNA, 21 bp, Homo sapiens
  chr3:138657473-138657494
  hyper
cgctggaggagtctccgcggc

SEQ ID NO: 2815 - DNA, 391 bp, Homo sapiens
  chr3:138657617-138658008
  hyper
cgattccatttctggggatcgggtccggtggggagccactgtccctaacgcctccagagactttaagtaggacaatataatgctggtaggagcaaggtgcaaggaatttagcggcagaagcctttcgggggggtggggaaaggcagatccgtgcctcgtctgagcctgggggtggggacagcccctggccttgtagcccctgttccggggatcagctgggcccacctaacccccctacatggggttgaaaggggccaatgggacggccccgccgcccctccctcgggattccacagggccctgacccggcctttatctctgcacggtcagcagtcgcgggggcttcaggaaggaggacaaaggcccggtgtcaccgcgggcgggggctcgg

SEQ ID NO: 2816 - DNA, 160 bp, Homo sapiens
  chr3:138658703-138658863
  hyper
cgcccacaggctgaccctgcaacctctggcccggtggctaccttctgcttttctgaaaaagaaaaggaaaaaaaaaaaaaaaaagaaaaaatcaaccagtcgagggaggcgcgtgaggactggaggcgccagccggacagcctatgagtaggtccctggg

SEQ ID NO: 2817 - DNA, 58 bp, Homo sapiens
  chr3:138663669-138663727
  hyper
tactctcttaaaaagttccaccgatctttcaaacaaaacattagccagccgccggggc

SEQ ID NO: 2818 - DNA, 241 bp, Homo sapiens
  chr3:138664141-138664382
  hyper
ggaaagagacgagcccagtagaaagcgcgcagagaggcagcttcaggccaggggagtgcaaggtcacagaggtcagggaggtgagcacaggaggacataaactgaggggacaaagaggagcgacaggagcttaggaaagcgaaaaagcacagagggaccctgggcgctggctccagaggcgggcccagagggtgtgaggtcaggctggcggcggcgtcgtcggctgcgaccggggccggcg

SEQ ID NO: 2819 - DNA, 67 bp, Homo sapiens
  chr3:138664701-138664768
  hyper
ggcggaggcgggggtgcggccggcgggcctcccaggccattgtacgagttcactacgccggggggca

SEQ ID NO: 2820 - DNA, 533 bp, Homo sapiens
  chr3:138664802-138665335
  hyper
cgaggcggccgggcccgccagccccttgaccacagcggccgcgccagggctaccggggcccgcggctgcagccgcagctgctgcagccgctgcggctgccgccatctggcaggaggcatagggcatgggtgagggaggctgcggtagcggccacgagttgttgaggaagccagactgcaggtacttggggggcgccaggtagccgtagccgtcggccccggcgcccgccacgccgcacccgcctgcggcgcctccggccccgaagagccccttgccgggctggaagtgcgcgggcggcggccggaagggcctcttcatgcggcggcggcgccggtagttgcccttctcgaacatgtcttcgcaggccgggtccagcgtccagtagttgcccttgcgctcgccgccgccctcgcgcggcaccttgatgaagcactcgttgaggctgaggttgtggcggatgctattttgccagcccttcttattcttctcgtagaacgggaacttcgcgatgatgtactggtagatgccggaca

SEQ ID NO: 2821 - DNA, 131 bp, Homo sapiens
  chr3:138665396-138665527
  hyper
cgggggcttctgcgccgggtccggcttctccggggctgtcccgccgccacccccaccgcccttgcctgggctcggcggcggcccttctggctccttgactgtgcgaccggtctctggggccagcagggccc

SEQ ID NO: 2822 - DNA, 888 bp, Homo sapiens
  chr3:138665539-138666427
  hyper
cgggctcggggtagctggccatcatgacaaagccggcgcgccgcggccgggccgcctctgctctccgctccaggcgctggcgcggcaaagagttggggcgcacgagtccgcttacggccaagtctcaaacttctggagactgcggatgccgcccgcgcttgcttgctggaggcctgtcgctgctctcccctctccttccccttcccctagggagcggccggcgggagtggagctcagcctctggccatggggagtccgcccaacagagaggggctccggcctcgccgcccctccccgctcaggccagtccccgccttggtgggttttcttttctgcgctcttcccctccccccgccccccggtttcccgaagcacgacccgcgtctctggcggagctgcctcctggagtccctagtgcgccaggagcctcgctctgttctgattcgtatgggctccaccgagttccgcttgcgtcaggcgccttcgcccctatagcggggcggccagccgcgcacgggcgagttcatctccaagtcactttttgtaaacgccccgcacagcctggaccggcctgcccccgcccagcgagcctcaggggcccagccgacagccaggctcacgcgcccttgaaatctgccggtactcgctctgcgggctgggctgggagatgacgaggaccccggtggggtctgcccgcacccggccaaagcccaggaagctcgggccccagcgaggaaaggcgctccaagcctcctcgcggctttcaggtgaaagaaaacgactcctttgctctgccgtttgctgccgtcttgaggctgaacttctagctcggggctggggaggggcgagacggcgagggggctggacggggtagggtggggagagctg

SEQ ID NO: 2823 - DNA, 225 bp, Homo sapiens
  chr3:138668883-138669108
  hyper
tgccccagttttccagggtcccgcagctgcaattcagcagccaccggcgcctcctgaccgtggtcccaccgtagcgccgcctgcggatacggttccagtgaaccgccgattgagcgcagtctcagctcccgcgcctcctcgcagcctggccccgcgcctcggaggtcccgacagccggcgcgagcaatctacacggctctgatacagacgcttttctccccaggg

SEQ ID NO: 2824 - DNA, 203 bp, Homo sapiens
  chr3:138669140-138669343
  hyper
cgcgcctcgggcttccggcggcccagctctactagggaagcgtcgcggctgctctgaggcaggcagcgcttcgctagaaccactcagctcgtcccgcgccgccgccggctgcctgaaccaggttccgctgtcccctttcctagcgggaccccgaaacacccggcggcttcccgctcctgagcgggagagaatagagcttgctg

SEQ ID NO: 2825 - DNA, 15 bp, Homo sapiens
  chr3:138679565-138679580
  hyper
cgggcacagacgcgc

SEQ ID NO: 2826 - DNA, 151 bp, Homo sapiens
  chr3:139258159-139258310
  hyper
cgaggacgccctttctggcgtccgggggcaccggaccgcggctcgccgggatggaggcaggcaggcagcgtctcgggagggctctagggagcggcccggagctgctcggcggggcgcccagggcgcagcgggcagcgcttaccgagggcgc

SEQ ID NO: 2827 - DNA, 122 bp, Homo sapiens
  chr3:139258715-139258837
  hyper
ttggccgaactcttcggctgctggggatttccttcaaacgccattaacttctcacactcagcagccactcgggagttgggaaacaatctcctggggtttgtgctggcgtgattaaggaaaga

SEQ ID NO: 2828 - DNA, 1491 bp, Homo sapiens
  chr3:139653601-139655092
  hyper
caagacccttagcgacgcccgtcagtcctctccgcccagatatcagttcaaagggcatggcaggtcagggtccctcgcgccaccccagatgaccctcaggcctcgggtggccactttctgggggagccctccatcccttgcggcagcttttccgagagtcggagtggaggcgcggggctggagggctctccggagccgcccaccagggtcctctgggggcccggtcccgactgggcagggggacctggacagggccccggagcgtggagacggctgaggaaagttgggggtcggggccttggggcggggagcgcggaacccggcgccgatgcccgcgttcatgaatatgcacgagccacctccctccctccgtgacgtcacgggccgtcccggggtgagcgcctgagccgctccgggtccgcgccagtgagcgcggctgctgccggcgagctagcggcgcagcggcgggaacccgaggccgagcgccgcggcggcagcgctagaagcgcacccatcgggcacggcgaggcggcccacggtgcggcaggcaccgggaggcgagagccggcgcggacagtaggcggcggctgcagctcgttggcggctgctgcgaggatgctgcctgggcggctgtgctgggtgccgctcctgctggcgctgggcgtggggagcggcagcggcggtggcggggacagccggcagcgccgcctcctcgcggctaaaggtgggtgctggggaagtttgctcttctcccaggagggaggcagggcaggcttgagggtgaaagcggcaaggacctaggctcaagctggatttgcccaccctcccttgccgcagcttctttggcctctgtgcgccctggattcccgaagtcagttccctgcgcagcggaccagagaggtccacccgcggacgtcaactcaacccctgggcggggtccgggggctgagcagaaggcgaggtctggggagtacggacaactttgagggctgtctgtgccggggtgggagcgcagtgggtgagtttcgagctctggcccagggacggctagagcagggcgctggcgcgccgtggggacaagcaggtgtctgctcctgcctgggggaaggatcagcggcggtgctttcaaggagggagccgagctgtgacttgtctcccagctcggggatggagtggaaacttgtaggctccagggaaggccccgctgacactcctcaagctcccccagggcgtctctgactccccggggaacgtgtaccctccgggtaggcggcggggtccggaagaagcgcgggatgtgaggctccccgctgcctttcctactccgctctgactaccgaggaccgaggagcctaacctggcaccactcccctgcccaccctgttcctttgaagagcttgacctccccgcgcctcccgcccggaaggaagctagatccaagcgaacgcctggctctgtcaggcgagcctggaagccggcgaaccccggact

SEQ ID NO: 2829 - DNA, 1394 bp, Homo sapiens
  chr3:140660222-140661616
  hyper
cctatataggagtatccgtgcacaaacctttttatgcattgtgcgagggttactctgagatagacaccaagggaactgctgggtcataaatccaattttttcaaagtaaatccgcttgcgaacccggaaccaagtcgatttttcccgccccgccagttccctgttcaggagagtgcagccgtgattggcgcgttcactcaggccaggggcgccccaggtctcaggtgctaggagcgcggtgacctaccaccctccgggcacgcgttctggccacgcctcgcggcccctttcattgaaagagcccgtagggatcacgtgaaagaacactgcagagtgcgtgacgtcacgacgctcacaccaatgggagcctctgtttatgtcgggagccatcaaatagtcatcttccccctaccatcccccgcccactctccgtcgcgctgcgctgcgtcgctttcagcctctggtgaagggcggcgcgcttaggcaggcggtggcgcggctggagtgccgcggggagggctgtgccggttgctttctgcagccgcatctcggccagctctcctcgccgtccccggggcgctgtgcgtctccagtccgggaccgaagccgcctgccgtagcgggcggccagatccgcgtcccgcctcagcggccggaggacatgcgggagagagaatgagccagagggacacgctggtgcatctgtttgccggagggtaaggtcctggcggggcgtgcgcactggggctgagggtgctggggccgaagacgcaggcgaggggggcgaggggggccgaggggggtgggggggtgggggggcgggagtgaggcctgggcggggagctgccacgggcctgcgggtgaggggagcgacccagcccgtgggtggtgaggggggctccggttcggggaagcaagggggtgaggcccgggcccgagggcgagagagtgaggcccgggcaaagagggttgaggcatgaaacccgggccgggagtgaggttttgggcccgcggggccggggtgaggcggaggccgaatccatgcgtctgaggagacgcgggcaagagctggggtcggcgcttgattacccggacgccgctggacctggccgcacgccgcaatctagcaggcgtcggggatccagggccgctttgaggagcctggcttcggatttcgcgtaggttgcatggcccaaggggacggggcggaaagtgcggaggctgaggacaaaatgggcgccggagactcctttagccctcgctccttgcagcgctcgcttgggcctctgcacgtcactcacgccccacctcggacctcgggccgctcatttccgggctcggctttgcaaggtgggtggtaagggggctacgggatcgagcggggaaggctttggt

SEQ ID NO: 2830 - DNA, 794 bp, Homo sapiens
  chr3:140769507-140770301
  hyper
ctttcaatttccccaaggaagcgcagataccagaagcaccctcgaggcttctgttttggccacgccctttaccccatcgctcagttcaggctcccaatgaggcggcccaccatcagcgctggtagagcaaagagaccgacttcctgcgcctcgggtgggcggggaacgctccttgagcaggtgcggtatgaaattggactttaagagatgagttggagcctgatctcaaaaataaagtgtggacgtgtgtgtctgaggaagggggataataaaccacccttttttcctcctggctgctatttcccacgtgcgttgagtaaaggcaccaaagctgcctagtgactgggtgtctcctccccgtcaggggcacccaccctggcgctccaggagcgcttgaatgaatccgggaggacccgcgcgcaggaatgaatgcgagagctagggagtgagcgggcgagtgggcgggtgagtgaatggcgaccgcgccgccgccttggcacaggggcgcgggcgcgggctccacttccctctcccgccagctggtggcctcgagaaggtggcggcgccggcagcggcccgagctgggacggccggggcgcgggatggtgggggaaggggcgttcccggcgaccgcgccttccgcggctattggattagtggccttcagggatgagctcagccagatcggctttcagctgcagcctccgggccggccgggaaggcggggagcgggcggcggcggcggaggagggggaggcggcggcggctgcagcatccagagctggccgtggcgg

SEQ ID NO: 2831 - DNA, 182 bp, Homo sapiens
  chr3:140770407-140770589
  hyper
cgctggggaagacgcccggcgcgccgggggccagcggccgaggcgcggcccgtgcgccctgagcgcgggactcgtcgccctccgggtcaggcgccaagcttccaagcggctagagcgcgggccttggagcgcccccaggatcgcttcagtaaggcgcttccccactccaggcccgacccccg

SEQ ID NO: 2832 - DNA, 469 bp, Homo sapiens
  chr3:140770643-140771112
  hyper
cgcagagggggcgctgctgccgggcatcagccgtgaggacgcgcccctggccgtgcggagagagccggcatttgcgggtcactcgggcgcccctgagtgggcggcggcggcagcagacccctctccagggagtccaggacctgccagcgctggggattcttcccgaacaggcgcttgccctctcttttatggtaagtactctccagctcctggtgaggggcgcgcgggggccgggagccgagatccggctgcacggactttgtgcgggccagcactcgacacagctggcgctcctgacgtcccagtccctgagaattcctctctgcaggttgtggcagttcgagatggttgatttgcgcgcagccctggggcgtttggggcccggcctttggtatcatgggttctaagccctttgcttctctgcgtagcggacaacgcacaaaaaactgccatccgattcacccgcttt

SEQ ID NO: 2833 - DNA, 160 bp, Homo sapiens
  chr3:140771641-140771801
  hyper
cagagacttgagcgcggcaaatgtgtccgccctggtcgctctgtacgcgccaggggctccaagccagaaggggacgccgagcccccgacctctgactggcgggagaaccgggggagtggctgctcccgccggcccatggccaagcgcagacggctgccgg

SEQ ID NO: 2834 - DNA, 31 bp, Homo sapiens
  chr3:141121566-141121597
  hyper
aggttgcgccgcatcccgtggcccaactgcg

SEQ ID NO: 2835 - DNA, 30 bp, Homo sapiens
  chr3:141457349-141457379
  hyper
aggtgatgggtaagcgctgcacgcgagtcc

SEQ ID NO: 2836 - DNA, 540 bp, Homo sapiens
  chr3:141516180-141516720
  hyper
agcatgcggggcgggcggagcctcgagctaagtcccctggggtcccagggccgcattcctccgaggtctgcaaaggccactgcttaaaggcgcagaggagcagctgggaacgagaacaaagcggccaggcccccctcggaggaaggaaggagagagccccaggaaacagctgatagcgctaagctcagcttgtttttttcctctgctcaacagttctcctgccacggcaaacaaaacatgtacattctgattccctcttctgtttggattgtgctgtcgactggatctggtttgtgatgagctgggggaagaggcatccgcgggcgatttctggctcggcgtgccagtgtgcttttgctgggccgcgccgggatcgcggagcttcctctccggctcctttctccccgtctgcgtcgctaatccagcctggcccggccaccccaagggaagacacggccgtttcttttgatagtggaattggaggttgccaagttttcagatttaatgggaggtggagggttgctcgtgtccttgaccttg

SEQ ID NO: 2837 - DNA, 30 bp, Homo sapiens
  chr3:142297280-142297310
  hyper
ccgcaggtttgtggcgactgccccatgtgc

SEQ ID NO: 2838 - DNA, 159 bp, Homo sapiens
  chr3:142681835-142681994
  hyper
ggaagggcacgtcgccgccgctcaggaagaacagacggcagaacttgctcaggaacagcagcagcgggatgaagtgcgtccagaagttgagcgtctcgttggtaggcttcagcaccgaggctaggcactcctgggccgtgcacggcagacgccggtagc

SEQ ID NO: 2839 - DNA, 975 bp, Homo sapiens
  chr3:142682049-142683024
  hyper
cggcttggcagacgctggggggtcccgggaggcggcagagtgggagttccgggcggcccccgaagctgccggggccggggccggagggccttttgtgcccgcgccccggggctgcaggcgccgcggcatggtgcccggggctcggctagggcgcgcgcaggcgacctctggcgccggctcccgggcgctgggcagcccccgccggccgccgtcggagcctttgtgcccacgccgggggcgtcgctgcaggtttaggagaagacccgtgcctccgagcagccgctcctaaaaattaaataaatcaataagagaatcaattaataggcagcgctgcgaccgccaggagcgcggagcgcgcgaggctcagcggcttcctcgccaagcccctgctaccggcgcgcggccgcccgcgctgcggcagcggcggcggcgcggctgactgcggcggcagcgcggcagcggtgactgggcatcgcgcggtgcgggtgcctccgccgccgccgcccccggagcgggaggtggggatgtgcgagccgaggcgcggagggagggacgggcgcaccgaggaagggcgggggcctcccaggctagggtttcgcggccgcttcgggggatagagttgtcccctgtctcgagttccgtaccatccccctcctcgggccgccgcagcccgggccgccccgttaatgattgatgcgggggccgcaggctggtcggcgacgcggcggcgcgcgcgccgagtactagagtcggccctggggttcgaaacccgacagccacgcgggcgttctggaggacactggggagccgcgttcgcggggggcggggagctgcggctgcggggggaggggagggcgccggagccgggcagggcggagagatgcgccagcggtaatctccggaggtcgccggggaggggggcactccggaagtcggggggctttaagcccgcgtccggatcggggccgtgtcatt

SEQ ID NO: 2840 - DNA, 522 bp, Homo sapiens
  chr3:142837796-142838318
  hyper
ctcatctacaaaaccaagaagcgggacaagtatttttctgcaaattagaacggggcgttcccctcccccatcaccccaattccagaggacgtcaatcacagtggacgcagcaccgcgagcggaaatgcggagagcatcggggctccgcatgtggggcacaatgaaacaagagcagccccggccagaggtccagtaaagcggaaagacggtcccgcccgcacacccctccggaaaactgaagcgtctcctctgacccccaaggtcagaaagatttattacttccttcgagagggcgcagccacagacccactagagagggcgggcagggtgtcggaagccagagaacggcgctccgcgtcctcccaccgctccagggcgcagaggtgtcctcagtgcccggagaggttggcagtgtcggccccgagggaagcgtggagcggacggccgacaggggatttctgcccaaacttcatcaccaactctttctgagagcaaaaacatggggccgagtccggcagctgc

SEQ ID NO: 2841 - DNA, 167 bp, Homo sapiens
  chr3:142838479-142838646
  hyper
cgacggtgggagccggctcggcgttgggggcgggggcggggccggcgaagggggagggctgcgcggcggaggggaggagccgcggcgacagacggcggcgcgcaccaaccgggcgccggctggcaggagccgcgcagaggctggtccgagcgcgttgcgggcgcccg

SEQ ID NO: 2842 - DNA, 196 bp, Homo sapiens
  chr3:142838876-142839072
  hyper
cgctgtccgcccgggcatcctcccggtgatggaagcagccgccgccgccgctgcggggtcgcgctgtgccccatccaccgctgccagagaggtgggaaaattcgccgcacggaggccgaaagcgagaggggctgcgccgctatgccgggagctgagtcccatataagccgcccccagccatcgcccccagccggct

SEQ ID NO: 2843 - DNA, 321 bp, Homo sapiens
  chr3:142839204-142839525
  hyper
cgcagggcgcccgctgcccggaaactgcccagggataagtcggccgactccccagacccctcgaaggtgcggggacccccagcggaagcgagagggagcgaaatcgaggaacgagtgacagccggacagtccgccgggcggtgatccggggccgctcccgggcgcgccctcggctccaggtgagcggaggaaccgggcagaaccgagggtgggcgttacttaggaggaggaggctgggagggagattggggcgcatccgctcactccgcttcccctcgcaggtcctacccggagccgctgccatgggagagccagccttgg

SEQ ID NO: 2844 - DNA, 126 bp, Homo sapiens
  chr3:142839562-142839688
  hyper
cggcccgagtcccggcgccagcagccagcccgctgcgtccccttcccgggctgcagggctgcctccgccgcgccgccggcccggattgtgcctgtgatgagccgcagcccgcagcgagctctgccc

SEQ ID NO: 2845 - DNA, 118 bp, Homo sapiens
  chr3:142839783-142839901
  hyper
cgcgtcccctctcggaatgaaggtgttccgtaggaaggcgctggtgttgtgcgcgggctatgcactgctgctggtgctcactatgctcaacctcctggactacaagtggcacaaggag

SEQ ID NO: 2846 - DNA, 183 bp, Homo sapiens
  chr3:142839944-142840127
  hyper
cgggggcagccggaggcagctgggggcgcccagggccgcctccggccgggccgccccgtgctcatgcccgtttggacctccgcactccttaccgccctcccgctgccgccgtcggggcggctcctgcagccgcggcagggatggcgggggttgcggcccctccaggcaatggcactcggggca

SEQ ID NO: 2847 - DNA, 138 bp, Homo sapiens
  chr3:145878416-145878554
  hyper
tctgcagggaaattcgggcacgctgagttcaccgagaactccaaggagtcaacgagggcgggtgcccctacacttccccagggaccagcgccgcccgaccgcaattctggggaagaccccggcggtcctggagaggag

SEQ ID NO: 2848 - DNA, 248 bp, Homo sapiens
  chr3:145878854-145879102
  hyper
cgggtccgccctgagccgccgattgcgggcgggagccggcgggcaaggcgcgcggccggcagccggagcggcgcgtaacgcagctgagtgaggtcgtcggtggaggcacggagcagcaggcgcccggggcgctgcggaggccttataggctccccgaggggaggcgacggggcgggccgcgccctggctattggccgccggctgacccgccgccgctgcgcgcccggtgcggtcgcctcagctcgccc

SEQ ID NO: 2849 - DNA, 30 bp, Homo sapiens
  chr3:145879262-145879292
  hyper
gtctggcgggagggcggtgttcccgtctgg

SEQ ID NO: 2850 - DNA, 674 bp, Homo sapiens
  chr3:145968331-145969005
  hyper
tagcgtttttacctgcgagtggcctggcctgagtccgtgagagccgcgccgtagaaacgccagagacccatgagaaacccaatcaagcgagacctgtcacgcagagcgaaacgaaagggccgcccccgtgaagtgcagccaggacccccatccctgggcaggaaactgctcgctcccaaaccctctgcgtctgcagtgcagacgcgcgcccgacaccacggaacttctgcaaccacctgaggatgcgacgcgagcgcagtgtccgggaactgctagcgcaggacgccgcgcaacctccgcgcctgcccgcaggcaccgcggcctcgggcctcccctgacgacgccctcggccccgcagcccgggcgcccgcgccaccctgtcctgctctgcgcccgcctgtccagccccactcaccgcctgccccgcagaatgctgggcaccggggacgccagacgccgggtctagttgtactggcagaggaaagggaaaggaaaggaggcagggaagggagacggagaggatttttcaagttataaacaaagtaagcgcgcggaagggagggctaggcgcgggttctgggggcgggtccggcacgcctggaccctccttccccgcgcgcggcttccccgtctcggaccccgccccgcgctgggagagccgccagcccggggga

SEQ ID NO: 2851 - DNA, 87 bp, Homo sapiens
  chr3:147074058-147074145
  hyper
gtcttaaatccgttcgggaagatcatctcgcactgaggccatttgacctggtgataccaggttgttagtaacgcttgatgtttgggg

SEQ ID NO: 2852 - DNA, 30 bp, Homo sapiens
  chr3:147077112-147077142
  hyper
tggcggcctgggggcggccatgcgtgtagc

SEQ ID NO: 2853 - DNA, 30 bp, Homo sapiens
  chr3:147105884-147105914
  hyper
aaacgtgggcaagtcgggttctagaaagga

SEQ ID NO: 2854 - DNA, 16 bp, Homo sapiens
  chr3:147106207-147106223
  hyper
cgccctctgatcaccg

SEQ ID NO: 2855 - DNA, 30 bp, Homo sapiens
  chr3:147108982-147109012
  hyper
tggcgaagcgccgctcgcagccctcgaact

SEQ ID NO: 2856 - DNA, 279 bp, Homo sapiens
  chr3:147109225-147109504
  hyper
cgcctccatccctcccgccttcctcctctgggctcatggggagggtatggaggaggagcgacagtgactccatcttagtcgagtttccatcctcgaaaatcctgatccactcgggttgtttcctccaaattttctccacttggaaccagaagcacctctgctcggaaatacattaacggaggagctcacaatatagttaacggggaagctcacatctgctcgatttaaagttgctgtttcagactaacttctctgccgctaccccgcccagccgttcat

SEQ ID NO: 2857 - DNA, 60 bp, Homo sapiens
  chr3:147110054-147110114
  hyper
cctggctccgcagcccggagggccaccaggcggctggcataggccggggaggggctggga

SEQ ID NO: 2858 - DNA, 454 bp, Homo sapiens
  chr3:147110228-147110682
  hyper
cgtgtaggagaggaaaggaccccgagaacccggaagcctagattcctgccggagctgcaagtgctgcggaaatgggggaagaaggtttctgggcgctttaaacaaatggctgcctcccagcgctctgagttaagggaccggctacctagcgtctagctgaggaggaagacgcgcagctggagaactgttgcctttgtagttgcttctcccgccgcatccaggaaaaacaggcgctttggggctggttagaacaaacaaagccccaattcccgagccctgttgaggctcggacagagaggtttgcgcacaacctgcgcttctgcgcaatcagcggctcctgagcccgggtctccggcaccacctggtcgctggattcccaccctacaggagcacagctagtacactgaacagtctggaaggtgttggcacctgccatttcgcgggacactggcac

SEQ ID NO: 2859 - DNA, 30 bp, Homo sapiens
  chr3:147112526-147112556
  hyper
tttggtctggtctccgcatgtgccagtgtc

SEQ ID NO: 2860 - DNA, 31 bp, Homo sapiens
  chr3:147131373-147131404
  hyper
agagactgatcacacacgtatacacaacatt

SEQ ID NO: 2861 - DNA, 30 bp, Homo sapiens
  chr3:147137132-147137162
  hyper
ctcccaaaatagtgcggcggggtagctgca

SEQ ID NO: 2862 - DNA, 163 bp, Homo sapiens
  chr3:147141097-147141260
  hyper
agttcccagctactctctggtgaaagcgggagggcgaagcgaaattgtgttctagctctgagctccgcagccctccaatggctgacttccttcagctgctgtcctggggtgccgatcgctgcggcagacgcaattttccgcacctgcgtgttgttttttgccg

SEQ ID NO: 2863 - DNA, 30 bp, Homo sapiens
  chr3:148415501-148415531
  hyper
tagttgacacgggacgactgtggcatcatc

SEQ ID NO: 2864 - DNA, 177 bp, Homo sapiens
  chr3:148710030-148710207
  hyper
ttggcttcacttgttgcgaggcgtccgggccactccacgagttagccccagcactgggaagctccgagttagctggtccttccgtgtcattgaggctaatagccagggttattacagcagttgaactgccacaaagattgcaggtgtaacccagagttcagccgtctttaggaagat

SEQ ID NO: 2865 - DNA, 1143 bp, Homo sapiens
  chr3:149375193-149376336
  hyper
gagggaaaaggaaacgaggagacagataattgcccgcctggagatcccagacactcagcggtaagaccagcaggatgggggaggggtccctcctggcctcgagaattatgcaactttcttgaagcaaagaagttgcctggaggaggagaagatagggcgaggggtggagggaataactgcactcggggcttgctgaaccgcaggatggcaaaggaaaggtcgcacgattccaggacaggcagccccccgaaagaagttcagcccgagccaactccaccacgtctcgactccggaagcccgaggagcctggagccctggagtggtgccggatgagcgcgcgagctccagcgggcactacctgggcgggcagcgaagctgagcctgagcgcgcggcggccgccgtcccgcccgaacttgccgtcgggcctgggtcgctcgggtgagtcccgagattgcggagctggagccgaggcttggctgacaaatcccgacccgactctgtgcctggcagtctaagggcttcggctctcacatcccccgagctggcctaaggcgctagtgctgggcgaaaaggaggcgcaggagaagcagacagcgcggccgcagcagctcccggactgtcccataaacaaagtttggagcaaactcccacccccaggaaagaggcgggcccgaaagttgagctgttgaattatgtatgacctcctagtccctagccggccagcccccgctcgcccctcctcttcctcctcctcctcctcccacctcggctccagaaaaccctgggcgtgatgggtactttactgggtaagaggagacgggtgccccccacccactcctcccggccgcgcggacctctcccgctcagacctgcatctgcattcctttgagtttaccacggacttggggcgggatcaaagggaaagtggcctgagcctgtttcatcaaggggttgtggaccgaaaccaaggccgggggtggcggagggcacgcggatgaggggctcaggcctaggaagggccggtcctggacaccgcgccctcccctgcagccaggcgccgaggcctgcagcacccggagcgccgcactgacccgcgattctgcccgaaggccggcccgggtgcgccccggcgcggggagaca

SEQ ID NO: 2866 - DNA, 30 bp, Homo sapiens
  chr3:149689310-149689340
  hyper
ctggtgacgggatgcggagcgtttcctcct

SEQ ID NO: 2867 - DNA, 30 bp, Homo sapiens
  chr3:149689653-149689683
  hyper
aacaaaacaaatagcgacctgtgttacact

SEQ ID NO: 2868 - DNA, 30 bp, Homo sapiens
  chr3:150126520-150126550
  hyper
ccaccgcccgcccgcggaccttcagccagc

SEQ ID NO: 2869 - DNA, 53 bp, Homo sapiens
  chr3:150321029-150321082
  hyper
tactgctcccctcccccgaccttggctgatcgcgcctgcgcagtggggagcag

SEQ ID NO: 2870 - DNA, 30 bp, Homo sapiens
  chr3:150480265-150480295
  hyper
ttcctgatgctgggcgtcagggcgcccctg

SEQ ID NO: 2871 - DNA, 53 bp, Homo sapiens
  chr3:150481641-150481694
  hyper
ggctcgtatagcaggccgaggagggagctcatgggcagcgttggctaagagtt

SEQ ID NO: 2872 - DNA, 1870 bp, Homo sapiens
  chr3:150803025-150804895
  hyper
cggggtccctcaggacaggccgagcccgcctccgcggctccggtctcgcagagctcgcgccaggtggcccagcatcttggtgcccgcgccccgaagcgaggagcgagggcgggttggatgaccaaggtctgccctggaggatcaccccccccgccccttccacgctcccggcgcaggtgaggttttcggcccaggccacggggaccgcgacctctggggaggtcgaggcggagggtgcagcggggggcttggagcagggctccagagggcgctccctccctcgcccaggttcaccccagggccagcctcggcgccggggcccgcgggctgcgcgctctgcggctgcgaaaacccggagaggcggattggagcgcgctcaccgcgctctcagccaactcctccgcggtccggccgccgagctgggcatgctcagtgcggacgccgcgccgccgtccgccaactcggaagctcgcgctcccgggccgtgggggcgagaacgccggcggcgagccggcgtcgctcgccgcccccagacagtggcaaacttcgcggcgttcccggagctcgtccgggcgaggcagataccgcacaaataaaatcaaatccaagtcccccatcccaacccgaatgatggaggctgcggcggccggagtgaccccgccgccgccagccccagcccgctagccgcggaccaacaggtaaagtgttgggggttgggggcggaagggaagaggagctggggccgtggggaggcggcgggctggaggagcccgagacgcctgcgggctggctgcccccgtcggcgctcacagccatcgctcctcacccccttccccagcccctggagggactgtaaagggttaagtcggccccacgccaccgtgagcacggccccctccagccgccgcgaccgccagcagcgcgcctcggcgcctgcccggagccgccgaggggaccgtagctgcggatgcgccactggaacctggcgggcgtctaggaggcaccggccgcttcccaccggccgcatccctgcgtctcgcgccccctccagacctgcctctgcctgcactggcccggtccgtgtccaggtggcggggtctgcggggcgcgtggcggcgggggaagggtccctgccggggaagagaggcgggggcggtccgctccacagcttcttcccgggaggggagggccaccctcgccttgggcgagcacttcagccaccagcctaggcgccaagaaaagtttttttttttttttttccagtgccccacccccacccccatcctgcgcccagctggggtgggtttgggtccattggtgaaaaaagtcacacgttcccatcagctgctcctccccctggagacaaggtaggggggagcagaggaggcaggcgccgcggaggaccctggccgacctctagtccctccgccgccgccaccggagcggtgcgtcccggggctcgagcgcagccgagtacccgccgaaggctgtccccatcagtgcgtgtctgctgccgggcagcggcagcatccaacctgctttattcctcctgcctgcagcgccacagcgagcgagcgagcgaggagggggagagagggagtctgtctgcaaagtgctgctccctggtgctcagaggcggctgctccagctccaactctcattcatttcgccggttaacatgagagatcatggccgccttcgggcttctcagctatgagcagagaccgctgaagcgcccccggctcgggccgcccgacgtctacccacaggaccccaagcagaaggaggtaagggcgccggcggcctccccggcaaccggggccgcgctctgcagcactgacccggggccaagttggcccagcgggcatcg

SEQ ID NO: 2873 - DNA, 252 bp, Homo sapiens
  chr3:150804936-150805188
  hyper
cgggggccaggctgggggtgctgggcgaccccccggcggcggagaccgagcggctgtcagtccccgcgctccactggggcgctcgctttccatgtgccggtcgctttcccgttgccgggccttgcacggcgccgccgggcgcttctcgggcttcttccctgccgaaaccttgctcgctctcacccgtttctgcctgctttatttttcttcttgccgcttcggtaaatcgtcgtaaactttttgaaaaatgtt

SEQ ID NO: 2874 - DNA, 1355 bp, Homo sapiens
  chr3:152552394-152553749
  hyper
ccagaaatccggtcccggcaaagctagacgctctgcaatgacaggcgttcccagctagggactcctggctgcttggagcttgaaaacacctggcgtggttctcgagggccctagaggctcctgctacggactggtcggctctggggttgtaggcagaaggctctaagcggtcggaagggtttcctgtgtgtcagcaacttcactttgccgagatagctggcggaagagggaaggagcgctcgcgggccaatcgcctgccagcagccaccttggagcgcacccctctccctcgccgccgactccggtagcagcgtgccggcagaggctgaacacactcggcctcggcggagacctgctccccagaagacgcctcctgcttcccactgcgccctggaggacgcgggctggctgctgggcgagctcggcggaggcacgcccctcgcctccccgcggagtgcggactcgccccggtgcccaaactccgcccaccctctagggagctccgctctcccgcctaaccccggcactccggacagagctgggcctggggaaggggttcctgaactacgcggacgccgaacgggacgcgctgcagaagcgcacgagtctgcggccacgcgcgctccgatggctgccaggagctgagctcagggtgggcggaggaagcggttagacgccccgaaactgagctgcacgtttctaaggtagggaggaggaagatgcccccaattaagttgatctttgagccaaggaggctggggagcagcctccccaagctagagccctgcagagcgagtttcccttgacctcgctgcgcctctggcgcgctctgcagcgcggacccgcggcccctcgggaaagcgcagtcggaaagttatccgcggcggttccctgcgcgccctgttgtgtaagctcggcgttgccagcggacggagaagttgctggcttgcccgatagcccagttcggtggcggcccggggcggatttcatggcccgcggcgaacgcggggccagagctggcgtgggcgagcccctgcgcgccccctcccgcggggatccagttcgcctgctcccttccgctcgctggcttttccgatgcttgctgcgcccctggccgccgctgccctctcgccgcctcctacccctcggagccgccgcctaagtcgaggaggagagaatgaccgaggtgctgtggccggctgtccccaacgggacggacgctgccttcctggccggtccgggttcgtcctgggggaacagcacggtcgcctccactgccgccgtctcctcgtcgttcaaatgcgccttgaccaagacgggcttccagttttactacctgccggctgtctacatct

SEQ ID NO: 2875 - DNA, 30 bp, Homo sapiens
  chr3:152878836-152878866
  hyper
tcgtgactggaaaccgaggagtcagaccct

SEQ ID NO: 2876 - DNA, 1 bp, Homo sapiens
  chr3:152879855-152879856
  hyper
c

SEQ ID NO: 2877 - DNA, 1179 bp, Homo sapiens
  chr3:153838773-153839952
  hyper
agggcatgactctgcgttagaactctgcgctactgcccacgcatctcacaaagtctactacgccgcgcgttctcggtttcaacgcacctccaggattcagggcttcctaagctgcaattcagcagggctcccttgcttgttctcactctgtgcccccggcaacgaccccgcgcgcctacactcccgtgccgcctcagctactagtccgcaacttctagccccaaaacgctggagctcagaacccagctcaggtgcgctcgtcggtttcccagggagactggggctgattgtaggcacgcgggggcgggaagacagcttcttgcttctggctgcgatggaggcggatctgggcggggccgaaacgggggcggggccaagtgtgggggcgtagtcaggcgtgggggcgggccggcgccggcgccgcggtcggcggcagcgctctcctaagctctcgcggctgcgcttcggtcccggacccgggccacccacggggtagtgggtgctcctcggccccggacattgcaagccccagaaggtaaatttgcgtgggagccgcgcacctggagcgcgagggtacccatgatgagggcgggaggctggatggcgacagaagggagcgtcccgcggcgagtttcccaagaaagctgaactcgtcccaagtttcttgtgcctcggcttgcactcagtgaatgggtggcgggctcatttgctgcgggtggtcttttggcgcgggagggacgcggaggtgattggattaatccgcctgggcggcagcccagatttctgccgggaaccgcgcaccgcagtggtgcagtttttgcccgagaaagggcgggtaagtgcggtgcagtcgtgtcctgcgcagcagcagggggaccgccggtctgggagcacgcgagtcggccaggcgtccccggttgtccagaggcacagtttcctaacttctttcctctttaggcaagactaactcggtgttgctcctcccggcgctgacttcgaggcccggctatggacggcgagagcgaggtggatttttctagcaacagcataacccctttgtggcggaggcggtcgattcctcagccccaccaggttctgggccggagcaagccgaggccccagtcctaccagagccccaacgggttactaattacggatttcccggtggaggacggaggg

SEQ ID NO: 2878 - DNA, 174 bp, Homo sapiens
  chr3:153840317-153840491
  hyper
cgctaataacgactctcctgggtcaggttcgcagtccggccggaaggcaaaggaccccgaacgggggctctttcctgggccccagaaaagttcttcggaacaaaaactccccctccaaaggctgccctcccaggagaacgagctcctcgagaatccttccgtggttttgagtac

SEQ ID NO: 2879 - DNA, 30 bp, Homo sapiens
  chr3:154042064-154042094
  hyper
tcgaccaccccctccgccgccgccgcctcc

SEQ ID NO: 2880 - DNA, 88 bp, Homo sapiens
  chr3:154145795-154145883
  hyper
gcgtccgtgaaacccgcatctgattctccgaatggcctttgtcgcctccctggaccctcacctccgcccatgcgcgctcgtcacagtg

SEQ ID NO: 2881 - DNA, 12 bp, Homo sapiens
  chr3:154146382-154146394
  hyper
tggcacacacac

SEQ ID NO: 2882 - DNA, 497 bp, Homo sapiens
  chr3:154146488-154146985
  hyper
cgctcacggtgaagctcctggtgccatagagagtcccccggttctcacgcctgcaggcttcagccccagcggcagcgggcgcacccggtccgaacacggtgtcggagctcggagagcatcccccagagcgccgcagactcgggcctggagcatcctctggggacagggaaaccactctccccgcagtaggaggggtcccaggaattgaagctccacgggaaatttcctggtagttggagtggagtctcggcggctcctccgaacacagcaatcggtgagtgagtgggactgagaggcccacgaggagtccgaaggccaaagcgtacacgatagagaggaatagtacgtaggagctggagcagtccaccaggcagccccagggcgtgcgcacgaaggcgccccagccgcacagcgggagcgccgagagcagcagactggctgcccacacggtcagcaccacgccgagcacctggcccgatcttctggaggctgtctgg

SEQ ID NO: 2883 - DNA, 503 bp, Homo sapiens
  chr3:154797274-154797777
  hyper
cattttcattgccaccgcccgccccccgtctccccggccccctcacatgaagtgactggatttgggagacctagcggaaaccttcaggtcacccagggaactgctcctctctctggtcctgcagcggcgaggcggggtagggggtggggggggtgggccgtgagagcgccgagacgcgcggggcgcggagatgtgcaagtggcgaagcttgaccgagagcaggctggagcagccgcccaactcctggcgcgggatctgctgaggggtcacggtgagtctctgtgggtgcgggtcggagggatgcccaggtgcctcgtcgccccacggcccgggcggaggcgggtccggaacctcccccaagtccggcctcagcctggagcccgcgcgccttgggcggatgcacggactgagaggcgcttggctgggctctcagcccgccactgccacccggccccgtgcgctcattggtcgggatgtgtcggctcagcagcctccaacttctc

SEQ ID NO: 2884 - DNA, 298 bp, Homo sapiens
  chr3:154797835-154798133
  hyper
cgagcgcccagggcgctgggagcccgtgggacgggcacggggagggcagagccagccgaggggagcggctgccgggaggtgcgctgagcagggtccgcagctaaggtccagcgcgatccgagcgcccaggaccctgcggccgtggaggaggcgtgccctgggaaggagccgctactgggacctgaagagtgaggggagggagaggggcccagagggtgacctggaggagggctctggaagtcacgtcaggttggctcttcaggttcatttccatagttccctgcggcctctgccttgg

SEQ ID NO: 2885 - DNA, 30 bp, Homo sapiens
  chr3:155523726-155523756
  hyper
ctggccccctggcccgcccccggccctctg

SEQ ID NO: 2886 - DNA, 30 bp, Homo sapiens
  chr3:155589558-155589588
  hyper
agttgccgccttgacgtacccggcggggag

SEQ ID NO: 2887 - DNA, 42 bp, Homo sapiens
  chr3:155722291-155722333
  hyper
gagccgcagactggagctgttcctattcggccatcttgccag

SEQ ID NO: 2888 - DNA, 222 bp, Homo sapiens
  chr3:156009077-156009299
  hyper
cacgtcctcccggagcggaggcgggagggagctgacagccggagtggatggagaccaccagtccgaggggacccgcttgcgattagctgcttcttgggatgctccgcgcgccagttgagcatcctgcctgtggtccaggggatgctggcggcgcatcttgcggtaagcctgcgctgatttgagccatcgcccagaagcgagcccgcattcagacaccgcgga

SEQ ID NO: 2889 - DNA, 265 bp, Homo sapiens
  chr3:156009318-156009583
  hyper
cgtgcagtcaccatgaatgctcagctctaggcttctgtaaaaacctcccccactgcatggatttggctgtttaatcagccgagattacagcccgggaagatttgcaaacctgattctccctccagctgctgtgacaacttcggggccgtctgtttacttctctgggtccccggggactctttcctgcatcgcagccccttgtgccactttgtgggcttggctcgaaagtcagccgccaggactcctctgacggcatccccaggaa

SEQ ID NO: 2890 - DNA, 191 bp, Homo sapiens
  chr3:156534392-156534583
  hyper
cgctggcgaccccttcccgggtctcctagccctggccgggctgcccccgcgcccgcccccgccctcgaaatccaggcagtgcgggaggccgccttgctgctctctccgcccgcacagggccgcccgacggagcgggcagggagcaggcgccaaggaggccgagaggggcccaggggcgaggtcgactctca

SEQ ID NO: 2891 - DNA, 168 bp, Homo sapiens
  chr3:156799360-156799528
  hyper
gaattcaggtacatctcgattgctcgtggtaataaaggagacattaggcgtggataacaagaccgcaaatggtgagtaaagcaagacaccaggtatcatttctttcctgtttattaacattcactccaggctgtatactttggttaccatggtcgcgtggtgtctgat

SEQ ID NO: 2892 - DNA, 30 bp, Homo sapiens
  chr3:156877181-156877211
  hyper
cgctgtgcttacctcgaaactgtgtttgac

SEQ ID NO: 2893 - DNA, 99 bp, Homo sapiens
  chr3:157155317-157155416
  hyper
cggtcaggagcactcggaatgggacaagctcttcatcatgctggagaactcgcagatgagagagcgcatgctgctgcaagccacggacgacgtcctgcg

SEQ ID NO: 2894 - DNA, 633 bp, Homo sapiens
  chr3:157217105-157217738
  hyper
ccacaaaaacagaaatgatggcgcaaaacgtggcacatttcagggagtcacagctgtcccgcgcaaactcgactttacctgcgtgctactcctcaaaggcgcccttgcagttactcagctgcatggtttgagactgggcgggagattcaggcaggctccgagggcacagcgagtggaatccgctcagctcagtgaacctgaagttgttcattgcggagccggtgccgggtggaagaattcaaggaatgcagcctgatgccaccggcagccccagagaccggtcaggtgacaggctgcacctcacccagcggagttacctcccagtgcaacgctctgtttcctgaggtgaaacacaaagcctgctccagtaaaggagagttgtttttaacagagaaaacagaactccctgtgttcgtgaaaatctatactttcccagggaagaatggggggcgggggcgagccacgcaggaaacaattttcaacagaactcaagcaggtgaacggaatggctgtagggagccacctctcagagctccaggggaggagaagagaactgcagcttcattaacacttccctctccctgagatctcacaaacgttttggaaacactgagtgttcgtccagtaagagtc

SEQ ID NO: 2895 - DNA, 268 bp, Homo sapiens
  chr3:157260965-157261233
  hyper
acagtggagccaggacgtccgggagctgacaatctaaacgcgacctgggaaggggcggtagcgggagtggctgcttcctgggaggtggtgctcgcaaacctggcagctgactgggtggggcgtgccttccctggcagtcgcggaggggaaggctgagggacccggtccccgccccgcgtgctcaggctgaacagcttttcttccctgatctctcggaggcgccggctgctggccaacgcagggcagcctcctgcgtgcgtgctgtggg

SEQ ID NO: 2896 - DNA, 67 bp, Homo sapiens
  chr3:157812190-157812257
  hyper
actggtcccacaggccgtgcccgagtggagcactgcgaatggggccaagaaattttggcctttctcg

SEQ ID NO: 2897 - DNA, 296 bp, Homo sapiens
  chr3:157812436-157812732
  hyper
cgcaccgcctcctttgacctcgggcttcccccgcgctccgctgcttggggcagactggccccgagagggagccaccatctcccctgctccagggtctccagggtccgaacccgtgttgggatctgggttaggattagggtttggagcttggagcctgcctgttaggacccccggccccggcgccgactggagctcgctggaggccacaggaccacggcggatggcctggctgcttcagggcgtaccatgcccgcaggcagatgtttattattaaaaactaccgacgttcatcaacc

SEQ ID NO: 2898 - DNA, 30 bp, Homo sapiens
  chr3:157812983-157813013
  hyper
ctttgcggaaggtcccgtcatcacaagagc

SEQ ID NO: 2899 - DNA, 1110 bp, Homo sapiens
  chr3:157815395-157816505
  hyper
ctcccgtttgtctttcgatttttttgtttgctcattttttcattgttaacaagatttttttttctatgcaagagtccatcgttgcagctttgcggtgagccaaactccgcggttccagcactcccctgtccagtctctctccagactcccccaaacccgctcctacaaaacccaattctaggccctcgagtaggaaaacgggcaggagccacggagcctgcgtgcctcgtgagatccctggtcctgcgtggagtctggctttccgagtccaagatgcgataggggacgagggatggtcagtgaggcgggaagagggccggctcccgaggtctcaaaggggtaacggagaagcagcggggcgcggagggcgtgcaggctgagtgccgcgggacaggcgcgacattggtgctggcgttggcgtcacagacccagggctgcggcgtgctttttggctttcagtctgagatcggcgatgctggagttcttgctggtggtcttggcggctgctgcggccgccactaccgaggcggcggaagccgaatccgcggccagcgtggcgagcggcagtccgaagggcggtgctgggaacatcatgtagggcgcgtgcgcggccaggtgcggatgcaggtggtggtgcgcgtgcgccacagcgctgtccagctgcagctgcgcctgaacctgaaaggacaagggcgtcacgttgcaatgactatcctagggtgacaacagaatagaaacagagcattaacggcgtccagcttggccagagagagagttgggttgtgtttgggcacggggagagggcatttggctgtgcatcttgttccgacagtgaccttctcagcctgttgctgaatctggggttccacatggatactccagtgtcccctgggtctccgaaactcgcttagggtaggcttatttccccggaccccgggaacccccttctgcaggaatgtggccgtctcccctgggaactgggctgaaatggtatattggaaagactgcgggtgaggacccttaccctcttctcttgatgctgccatgcatctcttaccccactaccaaaacaacggagtatcaacaagcaaactacgcaactttttaatg

SEQ ID NO: 2900 - DNA, 38 bp, Homo sapiens
  chr3:157820830-157820868
  hyper
gcttctcaacccacccggaggaagaatatcccggagaa

SEQ ID NO: 2901 - DNA, 397 bp, Homo sapiens
  chr3:157821536-157821933
  hyper
gcagactcgaccctaaacgcttaacccacagagatcaacaggttcaagcggaatattcgcgatcctcggtttctattggttgctcaaagccttttcatgcaaccagcagctcggatgtttaataaaatatgaatttttctgctctgggtttgcacacatccgttgccactttcctgtccttctcctccctttaaaaacaggagctcttctagtgtgagcatatacagccaccatatatatatccccctggaacctttatcctctgcgcccgaatcagagactccgggttttaagaagtcaaagctgagtttagatagtcgaggctgtttgcagttcttcccagcgcaggatccaggccagcatgggtgttaaaaatcatttccggaagagccggtct

SEQ ID NO: 2902 - DNA, 30 bp, Homo sapiens
  chr3:157823074-157823104
  hyper
gctagctttagtcccgccgtctggttcagc

SEQ ID NO: 2903 - DNA, 30 bp, Homo sapiens
  chr3:157823464-157823494
  hyper
taccctccgtcagtcgcgggctgcccggct

SEQ ID NO: 2904 - DNA, 30 bp, Homo sapiens
  chr3:157823799-157823829
  hyper
gtaagttcttccatcgccgccgcacgtcag

SEQ ID NO: 2905 - DNA, 13 bp, Homo sapiens
  chr3:157824133-157824146
  hyper
cttccctgccgga

SEQ ID NO: 2906 - DNA, 86 bp, Homo sapiens
  chr3:157824211-157824297
  hyper
cgctgcgcttgaagtcccactatttatacttcctaacggcggcctcttgttttgagtaaattacctcccctcgcaactcggagtga

SEQ ID NO: 2907 - DNA, 306 bp, Homo sapiens
  chr3:157824602-157824908
  hyper
tttgcgttggtgtcacgacttagttaaacactggggagctggatagaccccgcggggtggggccaagaggaaactgacaagtgcgcagctcttagagtcagtcaggtatcccgacactgcatccttccctacagccttgcttcgagtcagggtgcctcgcaatgctcagcttcgcattgcttttcctcgtccctgccctgcatcaaccgcccagcagtttacaggccccgcatcccattcccgcatcctgaccccgcatcccaattctgcatccccgcctctccctcacaatcccacccctgccgg

SEQ ID NO: 2908 - DNA, 510 bp, Homo sapiens
  chr3:157825059-157825569
  hyper
cgctctattattcgtgtcctggagcccagctgactcctctatggacagaccccgctaaaagggaccagtcgatttaacaagtttccccagcagctgttagctgacagatctcattttaaagtgtttccttagcgcccggtcaaggacagctcgacttcgttcgtttcctctctgaggtctcagaactcccacccttctcccttactctctgcactcggacccctctatggtgaattacaggacttcttctttagcatcttgggaaacatccgagtttatttactaatttgaaaaacaagagattatccctcttcgagtctgaaaaaaaaatcgacgttaagtttgtaccccctctaatttcatttattacggagagctaaaaaagagacgctcgccaggagtaaaggtctctctgcctaccccccccaccaccccgcttacgatttaaaattctatttctgggctattttcatcggaacggtttgttacgttagaggaacatctatattc

SEQ ID NO: 2909 - DNA, 289 bp, Homo sapiens
  chr3:158288886-158289175
  hyper
cgcctcgtcctggtgacgtcacagagcaatgtccaatgggaaagcagctcggtgtcacgcacctcctatcccggcgggcaccgcctgcgccgcggcgagtgaggcgtcgtccgtactggaggctagctcttgtcgcggccgcggcgagttaacatcgtttttccaatctgtccgcggctgccgccacccaagacagagccagaatgttcaggatgctgaacagcagttttgaggatgaccccttcttctcgtgagttacgggagccaggagtccggggtcgcgcgggaa

SEQ ID NO: 2910 - DNA, 738 bp, Homo sapiens
  chr3:159480880-159481618
  hyper
ggaggggaagggaaacgtgagctaaagcaacaggttccacccacagcctgaacttggaaggggatgcggcggcggcaaggcggctggagctgcgcggtggagggagaggaagcggcgaggaggaaggtggaagggaaatgatggtgcatgaccaccgagcacacgtcactcgggctcccacatgggcttgtgtatgtgcgtgtgtgaggggagggaggtccttcacagggtcactcgggcacttccgcgtggaataggaggcgccaggctcgtgctttgggatgccgggtggcttcggcggggtaacgagtcacgcagagacggcttgaggcaagccaagaaaatacgggtgtcggcgtgaaaatacaccactcttcccagcgcgccgcccttgctaactggctggacctgcgcccctaacgcccagtgcccccttcttttgggcctatcttggcccctccaaccccatcccagcctgcctcctgctccagcctgccgccgcgaaaaccgggactgcggactgcgccgcgcccggcagcctctgggcatgctcggtggcgggaccggctccaccgccaggagggcgcgtcctccctcccctagggcggtgacggcgcctgcagcgacttgccgccgcgccccggccaggcacaccttttggggaggcgggggaccaccctgcccggcgtgggccgagagcgccccccaccccgagccttccggcgggtgggaggaggg

SEQ ID NO: 2911 - DNA, 30 bp, Homo sapiens
  chr3:159481903-159481933
  hyper
aggggcgcgcctggcgcaaaatggttaata

SEQ ID NO: 2912 - DNA, 282 bp, Homo sapiens
  chr3:159756687-159756969
  hyper
tgcgcttacctgctccgcacgacctctgcggcttgggggctctcagctctgtcgctgcggggctccaggctggtgcttgtgctgagaatgactgcgggaggggctcgcgtgcccagcactgcaccgcgaggcgaccaaccgctgacatgtggggcgattgggtggacaggaagactcggcgagcttttgtagccgcgggtagggacagcctgggctccctgaaccaagcgcgcgtgggcggcgaccccgtccctgtgcaccgacccgccagcgcgcagcctg

SEQ ID NO: 2913 - DNA, 82 bp, Homo sapiens
  chr3:159943970-159944052
  hyper
gcgtgtagtgtcgccggtcttcctgcagctgcccagctacgaggaggtcaagtatctgcccacctacgaggagtccatgcgg

SEQ ID NO: 2914 - DNA, 30 bp, Homo sapiens
  chr3:160118175-160118205
  hyper
cccggacacgaactcgtttctccacgtcgg

SEQ ID NO: 2915 - DNA, 30 bp, Homo sapiens
  chr3:160167182-160167212
  hyper
aacgcgcctccacctcggcacccgcccgtc

SEQ ID NO: 2916 - DNA, 467 bp, Homo sapiens
  chr3:160167468-160167935
  hyper
caccttctccgcatccgtaaaggtccttagactcaccgcggggaggaagcggaccaggcaactccacagcacggaaacacagcgccacgagctccaggcggatgctgagagccgccccgagtccccgccctcctctgccccgaagggcttcaggtgcccagaccgggcggggcctcgcggagcctcgcagcgcaggcgcagtctgcaggcaacattcaactgcaaggcatcggccaatgggaactattgctgggctcgttcgaaagtaaacggtggacggcgcggcccgaggcaggtggcgggagtcagtttaaggctggcgcccagctttccgcgcctgcgtgctaggcgcaggccgcctctcggaagcttggcctcgcaggagcggctctctatcctgtggggagcttcggccagtgggcctcgtgagctggggtcccgcctggggaatccgcatggcaccggtg

SEQ ID NO: 2917 - DNA, 30 bp, Homo sapiens
  chr3:160283640-160283670
  hyper
ggaacgcagcagggcgagttgttttgctcc

SEQ ID NO: 2918 - DNA, 1478 bp, Homo sapiens
  chr3:160472595-160474073
  hyper
gccccggggcccccatcggaagcttcgtgccttcccgtggaaaggtcgcgagcagggaaggccttcgtggccactgagtcccctactccaggggcggcggccgctctccgaaagagcggcccttctcgtccctcccgaggttatcgtcagagtgcacttccttggggaaacagaggtcattctgtcgagtcccccctttctgctgttctcgggagggagaaggctgctggacccaggctcgctccccgcctctcgggagatccgggaaggcctctattgctgaacgccgagacagcggccagcggcccgatcgtctccctaccgctttgcaagccgggagaagtgcgtcccttctcgcttgccttatggctggcgaagcggggaccgcactatagtgcagccgccgaaggggggaacgctcacgtatggctctcggcttcccagtgagcagcaatagttcctggaaaaccaacgctaagactaccggggtcagtattagcttgtcttaggagccggcacagggggaaggaacaacgattcgcaagagctaggcagcggacctccctcttttctcccccttggctgtcctggaccgcatggggctgcgagcccgcaccggcggccgcggaacttgctcagcctctgacagctgggtgggaacacctcggggtgtcgagtcccgactcaaggggcgggacggggcggggcgagcgcgcggggggcggagcgcgcgcgagccgggacgcgaggagggagcgcgcgagtgaagccgagctgagccgagccgatccgagccgggaggtgcctgggagaggcaggcagagcccagccggccgcctgcggctcagtaccgaccgtgccgcgtcgccgggctctgcgtacccctgtctctgcccaggctcccgcaaaacttttattctctggggcccccggggtgtgtgaaggaattggaaccttccgccatctccgcgctccccttcggcggcgaccgaggggacctgcgtccctcgtccgccgggctctggagccctgcgcctcacctgctgatcgctctccggagtctcgagggggcacccccggagggaccgcgcgggcgccggcgcccctgaactctcccgctcaccgcggcagacccgcccagcgcaactttaacttgattcttcttgcccaaccggggcaccagcggctgctgctgcggcggctgctgctaccgccgccgccgcggtctcacaaaggggctcagggaagggaggcggcgcgggcggcagggacgggcctccgggccgccgaggcggggagacaaaagggaagctgcctctgctcgcgctgcctgctcggagccgcttgctcggctgcctctggctgggctccgcgatcctctcccccaccctcgggcactgctccgcctccctcccggcgggctgtccccgcagtgctcccggacccggcgagccttcggggcgcgcgtcgctggtggt

SEQ ID NO: 2919 - DNA, 31 bp, Homo sapiens
  chr3:160822406-160822437
  hyper
cctgtagccctagccccgtgggatttccttc

SEQ ID NO: 2920 - DNA, 518 bp, Homo sapiens
  chr3:160822689-160823207
  hyper
caaggcaaggtggacaaccagcggatgcggcgcggccgcggcctgggcctgggccctccgcgtcgcccactgccccactgggccccttctcccgcgctcaccggaggcgggcagctgctcgtcaccgagacccgagacccacggtgcggcggctcaacctgggccacgctccgctctagaggagtgggcggtgcctcccggcctagctgccggggtctaggcgtttccgaggacggcgcgttccgggaaaggcgggtccggtggctataccctccacccagtggcaggactcaaccgcctcggagaccctgcagggccgcccttctcactcacctcctgtgctcggcgcgcacccagctcggaagcgggaaggtggccggcgttctctccctgcgcacacacgcagcctccccgcatccgcacgcacggccgggcgcgcgcagaccacgcgccagggccgcggccggaagcccctggctgcacgcgcgggcccaggcggcccccagccctgtgagctc

SEQ ID NO: 2921 - DNA, 30 bp, Homo sapiens
  chr3:161089232-161089262
  hyper
ggtgtatctccctgcggcttaggtgagcgc

SEQ ID NO: 2922 - DNA, 180 bp, Homo sapiens
  chr3:161090004-161090184
  hyper
gcgcagcaggactgcgtctgaaactcggcatcaggctgctaagtgagcccagggctcgggctggggcagcgggcggccaagcaagcatcccaccccatttatttgtcaaaaaccgaagaaagcaaagccttttagcactggcagctaattttggtgcctctgaacgtgtgaaacgcccct

SEQ ID NO: 2923 - DNA, 30 bp, Homo sapiens
  chr3:161090633-161090663
  hyper
ggggagtccgggagcgaaagcctcttttga

SEQ ID NO: 2924 - DNA, 837 bp, Homo sapiens
  chr3:164913806-164914643
  hyper
ctcaaaggttgtcactcacagcgcaatccctgcccgaggcctccttccatccgagaagatggaattagcccttgcttttccagggtgtctttgctctttgccctttaggtgggtgggagtgggggttggtggcgtgtagatgagagaagaaaagggtggggagaggcggaaaggaggcaggaagggggcgactagatctcagatcccagcattggtcagacggcgaaggtggggggaaagaaggagagggggagagaagatacaaatacacagtatggctgtgcacaccaaattccacttggatttgggagatctcaggcaaagcacgaaggtgaagcgataccgttggcagagagtgagtcctctgaccgctcaccattcaagcaccctcacttctcgagcgggagaaggtgcgggggaggggggtgggagggggaggggactgctgaacgtttcaggccaaggagacgctcgcggcggcggcggcggcggcatcttttaagactgacctgctttaaaagtgccactttaatggcctaggaaataactaaaatcggattacacgttacttaccaacgtctcctcctaaactggagcgccaggtcgtgtataaggagtcaatataggaaacgcagggctggaacctgaatgcaaatccatcagccgcccccaaatcgcgcaccaagggagcggcgctcgggagcccccagatcagcccatcgccggagctccgccagcgcgtcccccccgcacccccggcccctcctccgcgccaactgtgtaaatcagccgccgcagtcctctcgccgcgcatcgcaggcaaaatcccggcttagg

SEQ ID NO: 2925 - DNA, 119 bp, Homo sapiens
  chr3:164924699-164924818
  hyper
cgttcgcgcctcccagcgaccggccagttgccagctgctggagagaatgagcttggagccgcagggcttaatcccgcgcggctcagagatgggtttctggactcgcgaagcagctgcaa

SEQ ID NO: 2926 - DNA, 423 bp, Homo sapiens
  chr3:167097865-167098288
  hyper
ctcagcaaacacttgctgggccggtgcctccagctccacccgagctgagtctgcttcccagccgcgctgcccgctctgctccccgcaccaactagcccgggcttgctgcccgctaggcggactcagagaccatcctcccctctcatccacccgcagacagacaacccacctggagaccccagcctctcgcgtcaccaccgccggatggccgcggatagctgccgggagtttccgtcttggtctccttggttaccgcgttacctcggtacccatagcaaccagaaagctgggttctgccactgtccgccggcagagggcgaaaaggagcctgcgaaatgagagagaatggtgatcacaggaaggaaaagggcggaaaaactcaacaggctctggaagctttccgccagagaggatcttggagat

SEQ ID NO: 2927 - DNA, 783 bp, Homo sapiens
  chr3:168864009-168864792
  hyper
ccacaatctagccaaagggtccgaatgtgactttctcgcgaagcagcacacgatgttggacagcaaagctgttacttggcaaggtggaactcggccgagagcggctccaaagtcgcgtggccagtgccaggaattcagattttggcaaccgcaccttgtgcgtccccgaaaccgacggacagagacacacggagggaggggaaggaggagaagagcgcaaggaaaagaggccgacaagccggcagagaaacccaccgaaggccggacgacccaccccggagacgtgtccagaccgcaccgtttcgcaggaggaacaaggaaatcgcccggcttagcaacgtagataagcagcagggctccgcgagactgcgggcgaggaggaaagaaggctgggggcggggggcgcccgtagaaacggtgccccggcaggaaactgtccgaagtgacaaactttcacatcgcccagactttttttccttttaaagtgaggagttctcttacctttagatttctatggcctcaactcagcaataataggcattcacagaagaatcaaaataaacaaaataaaataatcagcagcccccaacgctcctgcacgaaaatcctttcaaacgatcccgagcaacatttagagatgtttaaaaataataataataattttttaaaagcctcgcgtctcgatttccaaatgggtctctgacaactttgtccgtctctaggatctgctctccaggaccacgcgtttcggatttattgtccgccaacagtgtatttttaata

SEQ ID NO: 2928 - DNA, 267 bp, Homo sapiens
  chr3:168960220-168960487
  hyper
tttcttggcaactccactctccgctgataacgctcctgcctgctattctccaaggagccggctgctggaagactgctccgaacctcatccccttggtgctcctgatgcgggcgatcctccgactgctcggcgccaaccacaacatgctacccaccgtgagagagcaggacgcgggctgctctagtcaggacttatcgtctatcatactgattgacgaaaccaagagtgagcagaaaaaataaacacgaacagaggctgcagtgtatg

SEQ ID NO: 2929 - DNA, 898 bp, Homo sapiens
  chr3:169375889-169376787
  hyper
atctaattttagaaagaagaccgtggctagtggagtggggaagtcgggagggaactaatgatttatcctgcgccgtccaggagaaaagaaaagcagaccccacagaccgttttagaaaatgcctagacagcggcttccagcggaagaagggttaaccgtcactccaaaaaaatgtacctggcatcatcagagtgtaacttttccctcccaccccatctcttccccaaactcactctcccttgccctatgaggctaggaaggagcctgtcccaacagggagagtgaatgagtgagtgtgtgcctgccctccgcgcaagagtgctccttgtcttcctgaagccaagacgtgtgtgggtgtgcacacgcatgtgtgggtgtgagtttacactgtcaatgtaaacccagctccgagggaagcagcgcgccaggcacgcagcccctctgagactagagagggaaagaagagttctggccaaaccttggagccctgagctgagcagcctgaggagcgaggtgtagggggccccctgagtgagaaactgcctcccacctcactggggcttccccagtcccacccccacgtccatcttgggccacttcctcagcaccagacggttttgagatgaagcgtgggagggctcagctcttgggaacagggctctgggtgccttgggaacagggaaaaagccggtgaccaggagatgacaagtcaaggttctccatctcaccgcccgcttccagcggaggcaacgcgcaggggggtgccgggagagagggggccgagccgggcgtgccgggggcaactccgctctcttgtccttctagcccggggaggagggcgtccccccttcctgccccaggtcacaactgcagcctcggataacctggccccaactta

SEQ ID NO: 2930 - DNA, 620 bp, Homo sapiens
  chr3:169379260-169379880
  hyper
agcagcgagtgtaaagaacaacacccaaaagagaaacagatggactgatgacccaaagagccctatatttaggttgatttctcagacccaggggaaaggaaatgtatcggggagtgtacgagtgcttgggtgaggactgcacaaagcactggaaaggcgcctgggatgacagcatctcgcggggctacaccgccgactccaatgcccgcgaagccgagcctgctgaggtgccgccgacttcccgggctgctgcagggacgcagtgagcaaggaggcgtggatacgatacctaccgtatttggttctaatgtgcgagggtcgcgcggggggagactgggatttcactggggagaagcatcccacccatctccgatctctcatttctgcgttccgtaaacaacacaattagagagttttgttttcggcgagtgcgagtgtgggagagagaaccgcggcctgtccactcccgaggcagctccagccccgcctattgacacctcaaggaagagcgctcccagccgctccggggctcagtgtccctgagtccccttcaactcgaagtagaagcatttggacaaacgcagtcctgtcgtctacagtcctggcggagcatcacaccg

SEQ ID NO: 2931 - DNA, 682 bp, Homo sapiens
  chr3:169386024-169386706
  hyper
aggagggtggagacacgcgcgcactcacacacacacactcacaaaagtttgaacaaacctgataagcctcgagatagaacacgtaggctttaatgttaaagctacctgatttgtctgacattgtcagagaaatacacacacatacacatataagcacacatccaggcagcagcggctgcatgaaggtgttaactttgaatgatccgccacgctttgccctaaaagggaagcttgcagagaaatgcgcgctttgaacgccggcgaggcgacagctcagggctagctcggcttccacgtccagccagggaaagggagccacgggccgcaaagggcgcggggcggctgggggcacccctctccacagcgtctcgacgccggggcctgagacacggaacagcctcctcttcctgcgaaatcctcgcgctgccggggcggcatggcacagcgaggcgcgctcgggaccagccggctcagcgagtacgcgcagctggtgttcggcggccgggcgatttctgcccagttaccttctctacctcgtaaaacttgccgttttgtaaattgcgttttcggtcccagatttcttagcaaatcattcggttttacaatcctactccctccccctagttcaacatcctcccatccaacttctgatgtgtatataaggtacggggagcagggagcg

SEQ ID NO: 2932 - DNA, 31 bp, Homo sapiens
  chr3:169386988-169387019
  hyper
gcggtcccccaccagccgctctggccgccct

SEQ ID NO: 2933 - DNA, 862 bp, Homo sapiens
  chr3:169482210-169483072
  hyper
ggctccaggcaaccccggctcactgcccattcattttggccgactttggaggtgccttcacgtctcctgccaatttgcagcacactggcccagtcagtcaggtttgggggttcacaagcccccattgccggcgaggggtgacggatgcgcacgatcggcgttccccccaccaacaggaaagcgaactgcatgtgtgagccgagtcctgggtgcacgtcccacagctcagggaatcgcgccgcgcgcggggactcgctccgttcctcttcctgcggcctgaaaggcctgaacctcgccctcgcccccgagagacccgcggctgacagagcccaactcttcgcggtggcagtgggtgcctccggagaagccccgggccgaccgcggcctccaggcggggttcgggggctgggcaggcgacccgccgcaggtccccgggaggggcgaacgggccagcagctgacattttttgtttgctctagaatgaacggtggaaggcggcaggccgaggcttttccgcccgctgaaagtcagcgagaaaaacagcgcgcggggagcaaaagcacggcgcctacgcccttctcagttagggttagacaaaaaatggccaccacccctcccaggcccaccctccgcaacccggtgcgctgccgggcgagtcggcttataaagggagcggccgccgaccgcacggattggccaagctgactctcgcggctctcgtgagagtcactctctcgggcgggctggttggggggaacgggaaattaaagttccatttccggccatgaggaaggacgttgcccttccgcacgtccgggaaaggctttgcgtctttacttccgaccttctttaaaggtgaaac

SEQ ID NO: 2934 - DNA, 30 bp, Homo sapiens
  chr3:169530022-169530052
  hyper
ccctcgtttctgggcgccccaaacctctgg

SEQ ID NO: 2935 - DNA, 48 bp, Homo sapiens
  chr3:169645351-169645399
  hyper
ggattacaggcgtgagccaccgcgcccggctttatctttctttttctt

SEQ ID NO: 2936 - DNA, 30 bp, Homo sapiens
  chr3:170073886-170073916
  hyper
gacctgggagctcggcggtggaggcctaag

SEQ ID NO: 2937 - DNA, 255 bp, Homo sapiens
  chr3:170074115-170074370
  hyper
aaaagggacaaagctcgagtctcctgaattttgtgcactgctactcggtggactatttcagttcctgatcttgtggtggggtggagaaaaggggatttcttggtgtttcgaaatgtgacggagcagctctgcagagttcaatatgctaatcggctaccctgggaaccaggaagaccaccctacacgcctcagagggtcacagccggaaagctcttgagtcctatcttccctacctcgtctcgtccctctccaaaa

SEQ ID NO: 2938 - DNA, 30 bp, Homo sapiens
  chr3:170075479-170075509
  hyper
gtggggttcggagccgcgccggcacagccg

SEQ ID NO: 2939 - DNA, 166 bp, Homo sapiens
  chr3:170302489-170302655
  hyper
gaactttcagcaccgcggacagcgccattccctgcactcagtcggaggaggagagctaccttgcccccagcgctctcctagaccctatacctagggggaggcagggtgacatcctgcggcccttgggcaattcgggccagtgacgttcaccgacactcaggcgggg

SEQ ID NO: 2940 - DNA, 10 bp, Homo sapiens
  chr3:170303132-170303142
  hyper
ggtgctgggc

SEQ ID NO: 2941 - DNA, 115 bp, Homo sapiens
  chr3:170303379-170303494
  hyper
cggcgccggagccgcgctggcccccgccccgcccggcagctcccgcgagtcagagcccggtgcccccagaccgcgggcagtcggggcctcattccgggccagagcaggaaagagc

SEQ ID NO: 2942 - DNA, 83 bp, Homo sapiens
  chr3:170303554-170303637
  hyper
cgccatattcctggtcccccgctcccggtgactccggctccctgggtcattccgggagaggcggccatcccagttgcaggggt

SEQ ID NO: 2943 - DNA, 429 bp, Homo sapiens
  chr3:170625857-170626286
  hyper
acacccgccctgggcgctcctccgtgctggaaacagcaggttgcggcccccatcgccccaccgcagaagccggcgaccttcccccgccgcccagccctcggccgccgccccgaaccctactgcgggggacccagcccaggccgcaggtccccgcgaaggatgcggggtaacagaacctggccagcagcacccggccctctgctagctggcgcgcaccccgccctccacccttcaacgtcgccgccgcggccgcacaggcgccccctgttctgccggcatccagggctcagctcggcccggcccggccccactagggcctgagccccggcgggtcccgcgctcgcctctgttcccccatccattctccttctttctctcggtcagcgctcagttctgggcgccttccccggccctgcctcactctggccc

SEQ ID NO: 2944 - DNA, 150 bp, Homo sapiens
  chr3:170626965-170627115
  hyper
acccagctcggcaccgcaggtcctgaggaccccccattcaccccttggtgagatttttggcagcgactgccgccggatgcccctgtagagtcagcactgctccctggggtgggaactcccgaagcgtccgccagctaacaagccagcagt

SEQ ID NO: 2945 - DNA, 186 bp, Homo sapiens
  chr3:170746126-170746312
  hyper
ttgaacctgccttttcagaaacggaatttgccttgagtgcgcgggcggccagtgagcctttaacttcttgtgctcagccccggcctgccggcgcggagcacggcggcaggaaaccattctcttctcccattgggagcgcgacccgccattcactagcgggccttcggggcaccctgatcagtttcc

SEQ ID NO: 2946 - DNA, 956 bp, Homo sapiens
  chr3:171527554-171528510
  hyper
ccaaacaccttcaatcgtattgtgaggaagaagaccttttacacactccctgctgctggcccccggccccctcgccccacctccgagtggtcacatcacacggcgggagccgcggtcagcagctgtgatcacacccccaggaccgtgctctgcgggctgggctcgaagccttgggacgcggcacttcctggttggtacgggatgccggtcccatcgcccccaccagcccagtcatgccaccgcgcacccgaaccaagggcgcccggatgacctggggacaccacacacactgcacccgaagccctgtggcggcgaggcggtgcatcctgcagaggacgcctgggcttcagcctgagcctgcgcggctctgcgctccaggcagccgcccgcgcggcaaaagtgcgtgccagagttgtcagctttcaccctgcaggaattccacccgaaggcgtgcgagggaggcccttggggatcgctagggagtccgccgccgactcactcgctgaaatcccgtccaagttgggcggggagcggccagctgcccaggttgggcggaggagggacggagggcgagggcagtggaaacccggctcccacgggcgcccggtgatccgggtctcggcgcggctcctacctgcagggcgaaggggccgctagcacctgcgcgttggcggcggactctcagggctcgggtgcctctggcacagctggagctcagcgggagggagggagagagggcgggccggagggggctctgcgctgcgcggccggcaggaactctccgcccggattcgccccggattcgcaggggtggagcgaggcggtgccaggtcccggggcgtcgcggtgccggctggaggccccagcggggcaggtctcgcgactgggcctctgatcgcccgcgttccttgttctcttttcccaaagtttcataactcgaccgcatcaccctaggg

SEQ ID NO: 2947 - DNA, 177 bp, Homo sapiens
  chr3:171757154-171757331
  hyper
ggcgatctgcagaacgcgcagccctcgccattcaggagttgttagttccctaagcctcaggtttctttagtctggctgaaccaaaaggagtttctgcttagctaggcagggccgggggacaacagcttctgcgagtctgcgattgtggcggccggtatattcggcggtttacggtaa

SEQ ID NO: 2948 - DNA, 31 bp, Homo sapiens
  chr3:171758578-171758609
  hyper
cctcgggctgtgcccgcgaactttcccagag

SEQ ID NO: 2949 - DNA, 341 bp, Homo sapiens
  chr3:172165443-172165784
  hyper
tgagcgaggcacccacgacagcatcgccgcgcctcctccgccacagcttcctgccgatgagactgtagaggaccgtgagacagaagacaggaaggaagaagaagatgctggacacccacaccatgaccgtgagcagtccagagcgcaccgcaaactcggtggggcggcactcgttggtgtcccaagggtcggtgccgttctcgtgctccaccccgactagcacgaagatgggcccggcgctgcagaaggccacggcccagatgacgaagatgaccagcttcacccgccccttggtgaccaccaccttggcccggagtgggaagcagatggcgaagtagcgc

SEQ ID NO: 2950 - DNA, 478 bp, Homo sapiens
  chr3:172165866-172166344
  hyper
cgccgaagttccagggccggtactgccagaggcgaacgaggtccaggggcatgcagaggaagatgagcagatcggagaaggccatgctggacaggtagaggttggtggtggtgcgcagctcgcggaagcgcgacaccaccagcatggtgagcaggttgccagcgatgcccaccacgaagagtgccacgcaggtggctgtgacgcccgccagcagcggcgcggggaagagctgcagcagctcgtcgcccagcgagtcgttgccgggggaagcatcccagtccaggtcggccagtgtgaggttgaaccccggctcttcgctgggcgtcgcgttccacatgctgccggctcagctgaacaggctctgggacgtgactgcgctgggaggctggaccgagctggctcccgaggaggtccgcttaggcgcgggagggtgcgagggaggagcgggtgcagacgcgtagggaggatgcttggagaa

SEQ ID NO: 2951 - DNA, 142 bp, Homo sapiens
  chr3:172167331-172167473
  hyper
tcttcaacctcctgagcattacgtctttttctttgaattgcaatgatttgtgcggaccactgggggtgatatcaagtgtcagggaccaccggaggcactcaataaatagaagacgcgttgctgttgagaagtagaagctgtg

SEQ ID NO: 2952 - DNA, 291 bp, Homo sapiens
  chr3:172167595-172167886
  hyper
cgaattcacaaatccgaccggcccctcccggcccaccgacctcgggaccgccccaggaacatattcagcactgtggccagcgccacatccatcctaccgcaaagcgccgctggaggaatggcttccctgtcactcccaccgtttttaacttgcgcttctaacgcctcagtcctaccccacggaggagcagggcagactcccacgaagcacaggccggcgttagtcactgccttgaccatacacatcggcgctcacccgatgagataccacgtactgtgtatgagagagtat

SEQ ID NO: 2953 - DNA, 288 bp, Homo sapiens
  chr3:172240997-172241285
  hyper
atttgctaagcgcctcgaagactgagtgcactgcactgcactgacctgcttcagctcgttggtaaagtacacgtaagttacagccacacagagagactgcaggagcactgtgaagatcacgatcagcacgcaggtctgtcccaggctgggtcccccctggacctccatcatagccatgatcctgtcagagtctgactgctgtaagtcagccaggcagccggtcactgaagcccttccttctctattcttttatagtcagtgaggaaatgaaagcgaatgagttgtttt

SEQ ID NO: 2954 - DNA, 30 bp, Homo sapiens
  chr3:173113561-173113591
  hyper
caccgccggacccgcgcccccgaagcccac

SEQ ID NO: 2955 - DNA, 30 bp, Homo sapiens
  chr3:173115759-173115789
  hyper
aagccttagagcggcgccccagtcactgca

SEQ ID NO: 2956 - DNA, 30 bp, Homo sapiens
  chr3:173302127-173302157
  hyper
ttttcatcctgcaccgatttggagtagaaa

SEQ ID NO: 2957 - DNA, 146 bp, Homo sapiens
  chr3:173302522-173302668
  hyper
gaaaaaaggatcaatcgacacgttttagaagtgtccgtgggtgaataaaaaaggaggggggggtgcaaaactggggttgcggatgcttaaagcaaaaaaagagaaaaggaagcgtcttgaatcctggaacaagaattaccgggtgc

SEQ ID NO: 2958 - DNA, 476 bp, Homo sapiens
  chr3:173302734-173303210
  hyper
cgaagtgttgtagagaccgtctccttgaatcattgcaaagggaccggggaaagatgagggggctccctctgtggatttatcttgctgagggtaagtttgtggctcttttattgggagggggctgccagggttttgtgccactgcgcggaaggtgatgcggacgcggtgcctgtgaaatggagagagaaaggggaatataaaaccacctcgcgcatccccggggggatcgctagggagctacctagatcgagctaaaaaaccttgtttttgtggcgtcggtgggggagccaagcagctctccaagctctcaactttgcattgaaaatctctcagttgggagacgcttcccagatccagtgctttctcctagcaatactttaaggagaggaggcagcggtgccttggaaaacctgcatgtagagcggaaaagcccaagtagaaatcgctggtgcttcggccgccgtttctgcggctgt

SEQ ID NO: 2959 - DNA, 31 bp, Homo sapiens
  chr3:174158580-174158611
  hyper
ttgaacactgctgcccgcggctcttcttccc

SEQ ID NO: 2960 - DNA, 369 bp, Homo sapiens
  chr3:174158852-174159221
  hyper
tgccaaaacaagctccgcgctctgaggcggcgcggcctcggccgagcggtccgtgtctccttgctcctccgtcctacccaagctggcgcgactgagctgtgggccgcacccctgcgcggggcccggggcgccgacccggcgtgaagtacgggggccgaggggcgcccggccggcggcgggttctgagcgactccgcggggtggcgcgcggggcacctggctctggcagtccgcgaggcgcgctggccaaaggagctcccaacccgctccaaggcccccgcccacctcccgaagccgcttgtcttaggagaggagcgtagcagctccgagtccccgcttctgacacgttcacacacgtatgcagtgcacg

SEQ ID NO: 2961 - DNA, 30 bp, Homo sapiens
  chr3:175414760-175414790
  hyper
catgacctaatgactactcaaaagccctac

SEQ ID NO: 2962 - DNA, 31 bp, Homo sapiens
  chr3:176915777-176915808
  hyper
ccgcgtgtccggggggcggcccggcggcgtt

SEQ ID NO: 2963 - DNA, 31 bp, Homo sapiens
  chr3:177077212-177077243
  hyper
gcttccttccagatcccggcctttaactgca

SEQ ID NO: 2964 - DNA, 43 bp, Homo sapiens
  chr3:178789081-178789124
  hyper
tgtgcatgcatacacacgaacccacacacgcacctcaacccgg

SEQ ID NO: 2965 - DNA, 131 bp, Homo sapiens
  chr3:178866989-178867120
  hyper
ttagctgagacaaacgcttagatctttcattcatagacctgagacactgactcatgtgacttgtctctttactaagtgtattatgtgatgcctgttccatggctcttaagtggctcggaaaggtagggtag

SEQ ID NO: 2966 - DNA, 30 bp, Homo sapiens
  chr3:178916861-178916891
  hyper
tgatgaaacaagacgactttgtgaccttcg

SEQ ID NO: 2967 - DNA, 30 bp, Homo sapiens
  chr3:178921538-178921568
  hyper
gcaacctacgtgaatgtaaatattcgagac

SEQ ID NO: 2968 - DNA, 39 bp, Homo sapiens
  chr3:178936067-178936106
  hyper
gagatcctctctctgaaatcactgagcaggagaaagatt

SEQ ID NO: 2969 - DNA, 30 bp, Homo sapiens
  chr3:178952070-178952100
  hyper
aatgaatgatgcacatcatggtggctggac

SEQ ID NO: 2970 - DNA, 30 bp, Homo sapiens
  chr3:179041479-179041509
  hyper
tgggtcctcgctggcgctgcggccctgccc

SEQ ID NO: 2971 - DNA, 41 bp, Homo sapiens
  chr3:179064153-179064194
  hyper
gatggattagctggcacgacccagaccgataaactggctca

SEQ ID NO: 2972 - DNA, 1125 bp, Homo sapiens
  chr3:179168662-179169787
  hyper
aattttggactcagcgtagaacttttatgagtcttccaagcactctccacccaacagccctgctgggcagtcccgaatacccgttattttgggggcacgcacgggctcgtgctctgagttcctggaaggaggcctcggggagtgacgagaaaccaggggggtctgcaggacttggaccgccgaccgttcctcgctccccggggcgagcggtctggaccgcccgggaagtgcctgcgccggcggtcgtggggccagttcccgcgtggcagctgggcgcgacacaggcgcgccctcctcgtccctcccgggcagcgtcggccgcccgagcccggggagacccgccccgccccgcgccgtcacccgggccccgttccgcaggggtggctcgcggcgccccacgtccctgcgagaagcccgggatcgcttcgcggggcgcaccgacgagccgccgctcgcgagctcgccgcctacctggagggagctcaggcccgcgtcgaccgcgcgctgccggtgtccgctgggcgctcagcagcccctggagcgcggagccggcgtggagagcgcagctcacagccgagaccagagccgccggccacacccagtcccgcacctcccagcagccaactccgcggcgcgccggagccggggcggggacgtggctggaggcgcgaggcgcgaggcacgaggcgcgcgggcccggcggggacgtgccggggacgcgcagaccctcggagcgcgcgcagcccgggcggggggcgaagggagcgggcgccgcgcgcagcttctgcttcctattttctctctcgtttcctgccagaaggagaagaaaaacattcattcccgggcagtttcgttttcttgttggtgtggcgccggggcacgctgctaagtagcgcccgtctaagtggcgtggccagtttcctttccggcgctgacaggcgccagtttgcttgttagcaggatcgaagggcagagctagaagaccccaaaggccccatttaggtttcccattctggaattctaaatgtcagaaagtaaactgaagcccagagttgcacaaccttgcgttgcagtccccgctcttccatcactagttgtaggaccgtgtaccgtctcgggcctaag

SEQ ID NO: 2973 - DNA, 521 bp, Homo sapiens
  chr3:179754238-179754759
  hyper
cggtcatgttgcatcacttcacttgttgagctgtgcgaaggcagcacttgaccacagaaacttggtgaaccgccttgctcttaaattagcccccaagaattctctccagccctatagaaatgtcttacctgcatgtgtccctggtacattctgcttcggtttcttcagggctccctgaggccaccggatgcttttcccccgtgcttacttgcccaccaaaagaggggaaaaggtgggtgcacagcgggttctcagagggtgctcctgagccccctggagctccgggtactcggccggccggcggccactcggcagcgctgcgggctgccgggaactgttctccgctcggggtgctgaaagcggacgcgggagagcgcgcagagaaggcgaggagccgggtcggccaggctctcctgcaggcgcgggtcctgctcgcggggcgtctctagaactcactccttcttcgccgaactctttctcgcttcctgccaggttgcctcatgtctctctctctctgagct

SEQ ID NO: 2974 - DNA, 69 bp, Homo sapiens
  chr3:179754803-179754872
  hyper
cgccgccgcagctgccgagcggggcgcgcgccgttctcccagccgcgtgcctgccgagaggccgcggga

SEQ ID NO: 2975 - DNA, 241 bp, Homo sapiens
  chr3:179755086-179755327
  hyper
ggccggaagaaaggcgggaagacatgcatcgtctctccgggggccatccaccgcggctgagcctgttatcctacagacattataggctgagtgcaggggttgccgaagagtttacttcggttctgattcagctctcgaaagttacgtccgtatcacccgttaaataaagactccccgctcccctcatccccagttcatcgccgagcattctatttaaaacggcaaaccctagtccctgagg

SEQ ID NO: 2976 - DNA, 882 bp, Homo sapiens
  chr3:180397083-180397965
  hyper
cttccagtagcttgttctcctcgttcgccaccgggatggcgaacccatcctcccagtgcagctcagccaggaattcgctactcatgactgcaaacggatagagaagatacagagcaaagatccgccttcttgtacagcgggtgagcagcacccgcgtcaagcccaggcacctgcacagtgccgcggcaattgccgggggagccctagcaaccttcccgcgtccttagttaccaaacaggaaacgctccagcccgaaggcgaaacttccggttgagaactccctgcctgcaggccgaagaatctttttcttaccttgagcactgagggatgagcagcaacttgcccctcccgacgttcccgggggttgccaggcggcagcgtaactttccacgaaaaggcggctctcggatcgctcccggagcgtgtgaaaactgtggcccccggagctggctggaggaccacggggcagctggctggaagtaaaccacacgatcctccgattgcctgggggaagacgggagccaacagggattataaactaagtttcttttcaaggtgtgtttgctgtgttgtgtagatttcagctactacagtaggtgaaagtagaccgaagtgaactggtgtttggaaacaactctctctctggcatcactgggatgttctgatcgtcgcctgtttcagtcggccagccttcctcaccgcactcaccggccccatcgcggatgtcccagtcgatcacagacgcggaccgcgcggaggccgcacacttgtggcgcggtgtggtggtccctccggcaccactcccatacttgcatttttctttgcatttttgtttgctaacatttaaagtgtggaatttcgcataaacgtctgtatttcctc

SEQ ID NO: 2977 - DNA, 55 bp, Homo sapiens
  chr3:181413013-181413068
  hyper
tcgccgtttcgcccacggggtgcggggaacgaacccaactggacacactgtgcac

SEQ ID NO: 2978 - DNA, 812 bp, Homo sapiens
  chr3:181413421-181414233
  hyper
gacccacccagccgggcccgatccctcaagacactttcagcctcagcccccgtttctcctcgggtttccacagacccaggaaaggacagaggcggcgagcaggctgacaagtttattctagaggctttgaaaaatgaggtttccaggtctcttcgcacgcgcgcgcgcgcgttctcgggctaaaggttcgaagctagagtttgaatttaagccacgtcctgggacaggtcgcgttcagcgtgggcgtcggccccgccgcggccccaggcctcttcgaagtgcgcgtcaagtggggtgtcgggtcgttttgttttttctctaagtgaataattcaatcgtgttaggccagattacatgctcataatacccaggtgtatttaaaagcacccgcgtttctaaacctcccgcagaaagtgggaagcaatcgccccctcggacctggcgccgctgcgcctgctggagcctcgcttccccacagtcgggcggccagtggagggcgaggagcgcgcgcgtcacgagaggcggccccggcctcccagagcccgcaccgggaggccgagggctcgggactcgagccttctgagtccgatttctttccacgtgcagagggtagaaagtggccagtcagggcgtgattgattgcttaaggaaagagaagctacagctttcacggtagttgataactaaagcatgacatgatgccatctgtgtgaaactcgtgatgtgtgtggtcattggctccctggaacatccagaccctgatcgtgcgtatcgtgtttccttataagcagcactcgcgatttaaaaacagg

SEQ ID NO: 2979 - DNA, 106 bp, Homo sapiens
  chr3:181419690-181419796
  hyper
ctgcagtgttggctcagaaaccgtgtaatttctcatccgataggagtttctttatgagaacatcaaaggataaaaagctctgcattttcgtagttggttaaaattg

SEQ ID NO: 2980 - DNA, 645 bp, Homo sapiens
  chr3:181419915-181420560
  hyper
aatttagcctttaatctctttttatccacgaagactaaagctctgtactcgaccccgcgagcggctctcgccttccggggctggaacccgactcagatgtgaagcggcactgagccgctgcgcaggttcgtgcccagcgccccctgttggacacagtaggagctgcgcagcgccagtcccagaaatcgctggaatcctgctctggggttagagaaaactcttttattgccctccaaaaaagaaacgggatgcgaaaacaaatttttatatccttgaaaaataatataatattaactcaataaaaaactaaagaggcgatactacaattttaattcaataaaaaataaagactgtcctcctcacatcccagccatcccccacccggtttggttttgtaactcttttgaaaggttctgcgatggtaaaacaggtaaagaaaagtgacgaaaaacaaagcatttttctgtagccgtggagaatcaagcaaagtatacttcctccgttttgtccacatttcaaaaaattaaacggaagatgctgctgcttgctgttttgacgttgtcagcagcgtcttgaatgccctcagaggtcctgcaagtatcgtaactgagccttcgagtaaacgaaataacttgcttttatgtg

SEQ ID NO: 2981 - DNA, 995 bp, Homo sapiens
  chr3:181421243-181422238
  hyper
cttcccacctcccaaaattagcgaattcgagataacatttcaaggggaattgctatttagtgcgatgagagatgacttctccatctggttccagaattagatctcggcttaggttttttagtaagtaggttcagatgcaatggaaggagagaagaatcaagccttttgataaaatctctaccccgaattctatggaaaagacaggcaagcgggattccagccacagcacccccaccttttgctctaccaaaaggcttgtccccattacagaaataatatagtcggtgctagttttgtgaacccgcgccaaccgataaggtaagaaacggtgcgctgacagccgaggtccgaaggctgctcagtggttcccgcagcccgtggggtagggaggccaaagccagcaaaatgttggaggcgacgccagaaagagagtatatgcctgctattcggaagtgatgtcgaacgtgcaatagcagagtcctggagatttccaccccgttccgcacccagggatcccagcctgtggggtagcaggttgttgggtgaaggcaggagggagaagccgcacctggctgagggcgggtgggcgtgccgggagcgagtgcccaactttctagggcccatggagaaagcataacccctagttgaggaaagagagctaaacaagtgggtggcccaggcctgggaatgccacccagctctcccgacgcagtgttatttctgtggtcccagggggccccagcacctgcccgaatcccactccccaaggccgccagcaggaaggcagcccctccatctttgagggctgaggagggggcagcgagtgacttgattccttagtagcagggaaaaccgcagcggctggcaacgggccgcgtttctccgcggcggcaaagcgccctttaggggcggggcgggcatttttggtctcctgtcccagcgtccaggcctgagcccgcgcgggttggctgggcgccctgctttgtaagtaacca

SEQ ID NO: 2982 - DNA, 455 bp, Homo sapiens
  chr3:181422661-181423116
  hyper
taatccagggcccagcggctacgtgggttgctgcggggtgttgaaaccacaagtacaacttgacaccattgagcccacggtgcttgtcaataatctgtgaattaggtgcagagattgtcactgtagatcataacagtttctgaaggactcattacagcctatcgtgtcaatgatcttcaaattaaggaggggaggtggggcgagacgaaaaaggagtggggagagccagcaaaaagggaagaagggtgggagggaagataaaagtcagagccccagctccgaaggagcctttaaagattatcaggccagcgatctgagaattccattgggatgggtttggaaacccaactccatctgagccaggactggaagaggggcgctgggggcaagcagaagtgggcccctgggaaggccgacttctcaggcatttcttttgaggccggaatagcttttgg

SEQ ID NO: 2983 - DNA, 427 bp, Homo sapiens
  chr3:181428195-181428622
  hyper
gagagtggaaggaaacttagacgaggctttgtttgactccgtgtagcgacaacaagagaaacaaaactacctatttgtaacggacgtgctgccattgccctccgcattgagcgcctacctattgaaatctttacgtcgggacaatgggagagcggctaaaattaccctcttgggtcctgggcgggcaagattcctgagcccctacccccgcccccatctcatcctcctctaacccgggccttgctgggctcccccttccccagtcccggccgccttctcccagtgtgcgctgcctgcacctgtgcctggagagcatcgaccccgcctcccaggccttgagcccctttgcggcgcagccccagccttgcgcggcctgggctttgcggccaccacaatggaaatctacggggaaaatgccagggctggt

SEQ ID NO: 2984 - DNA, 187 bp, Homo sapiens
  chr3:181429532-181429719
  hyper
ctcctccccctcctcgcctgccccctcctcccccggcctcccccgcgcggccggcggcgcgggaggccccgccccctttcatgcaaaacccggcagcgaggctgggctcgagtggaggagccgccgcgcgctgattggtcgctagaaacccatttattccctgacagcccccgtcacatggatggtt

SEQ ID NO: 2985 - DNA, 220 bp, Homo sapiens
  chr3:181430146-181430366
  hyper
gcatgtacaacatgatggagacggagctgaagccgccgggcccgcagcaaacttcggggggcggcggcggcaactccaccgcggcggcggccggcggcaaccagaaaaacagcccggaccgcgtcaagcggcccatgaatgccttcatggtgtggtcccgcgggcagcggcgcaagatggcccaggagaaccccaagatgcacaactcggagatcagcaa

SEQ ID NO: 2986 - DNA, 581 bp, Homo sapiens
  chr3:181430443-181431024
  hyper
cgctgcacatgaaggagcacccggattataaataccggccccggcggaaaaccaagacgctcatgaagaaggataagtacacgctgcccggcgggctgctggcccccggcggcaatagcatggcgagcggggtcggggtgggcgccggcctgggcgcgggcgtgaaccagcgcatggacagttacgcgcacatgaacggctggagcaacggcagctacagcatgatgcaggaccagctgggctacccgcagcacccgggcctcaatgcgcacggcgcagcgcagatgcagcccatgcaccgctacgacgtgagcgccctgcagtacaactccatgaccagctcgcagacctacatgaacggctcgcccacctacagcatgtcctactcgcagcagggcacccctggcatggctcttggctccatgggttcggtggtcaagtccgaggccagctccagcccccctgtggttacctcttcctcccactccagggcgccctgccaggccggggacctccgggacatgatcagcatgtatctccccggcgccgaggtgccggaacccgccgcccccagcagactt

SEQ ID NO: 2987 - DNA, 30 bp, Homo sapiens
  chr3:181433492-181433522
  hyper
cacttttaagagcacgggtttgcttcccac

SEQ ID NO: 2988 - DNA, 502 bp, Homo sapiens
  chr3:181437060-181437562
  hyper
ttgaaagctggaggtgtccttcgttttattaccctagtctgcctgcgtgtacagaatgaagggtgcactgttttatatagagttcggcgctttgaactatcatttgcctagctctcccagcttccgcgcgggccacggctccgggctgtgagcgcgccggcctcccgccggctgccctggggagcgcgcagtgcccagtgctgagagccgacgcgcgggcaaattgaggccgagctgacgagctccggcgggtggacctgacgtcaccgcggcccgggtcacctcacccatggggctccccaagaaggtgctgtgtggggctcgagttctctctgcccgggctctgctcaaacggtcgcattccctctccctcaggcaccgacccgcgtcagacaagtctagaaagtctcccgaggcgttggggccctcaccactccagagtcctctgcctcctgcgccccagcccaagccctctccatgttgacctcgtgacacgggagac

SEQ ID NO: 2989 - DNA, 519 bp, Homo sapiens
  chr3:181441358-181441877
  hyper
gaatgcggggtctggcggtgctgggcgcagggcgagaagatttgatgtgcagggtaagtaaaggacaagttatttaaaacctcaacacaggaaaagatggtaagagtgctgtgtagccctttgcttgcttgtgactacgagtcgctaggtggcccgcgtttagagtatgcctacggcgcctactaacgtctagacctaggagaggcgtctcccgcccctcgacccacagccagccgccacttgatagctaacgcgtcttccggccggtacacacccacaattaatctttcttattaaagcctccattctgtacccatggggcgactcaaacctatttagatttccgtggttggctgcacaaatttaagtgggcaacgagttataaacctaataacagaggacgagagagggtgatttgagtagagaagacgcaagattcactagggtcgtgaagatgctgcgggccttgcccaccacggcatctacctcggggtgcacgccaggctctgagaaaggtag

SEQ ID NO: 2990 - DNA, 345 bp, Homo sapiens
  chr3:181442080-181442425
  hyper
gagaataattaacactggagccgttaatcaccactttgctgctctctccctcctttcgggtctgcggcgtctgcctttttcgctcccgctgccggcgcgggtgtactggtgaaagtgaagacgtcgcggtagctgtcacccagttcggctgtacttttttaaacgctcgcatattgtttgattactaattcgagttaatatgatctttatggcaacataacagtggataattggcctttttttctgaacaacaatgtaaatcacaatcgctttattatttaataacgtcaaacgcttcgttggattggccccgaccgagaagaccttttctttctagacagtgtt

SEQ ID NO: 2991 - DNA, 528 bp, Homo sapiens
  chr3:181443021-181443549
  hyper
tgggtccccgctgctcgaatgaaagattaattacatttgccccaaaagccccaattctaacggtctctatcgcggcttttgccgtcactgaaggaccgctgtctctggggtcttcagacatcggagtcctttgcaaatgaagagcccccaccatttggaattcgggtcaaggagaaagactctgagcctgcagcagtttttgtttttgcgtgtgcccgcctctccattttattcaacttcttctgcctgtcgggaagcagaacaatcgctccccacccacccccctccgccccgtttctaagataaacaggaggtgcaaaatgctttgcctgcacacgcgccctcgtggcccagtcttcctgcaacccccagcgcaccggccatgcatctgtctcccaaccagacgtgggagaagacatccccccttcactcttcccacctgcatttaaaaaccatcacattgactgctctagagtcaggttcacatttttggccctccatgccaccttccagtttcttcccggtcca

SEQ ID NO: 2992 - DNA, 88 bp, Homo sapiens
  chr3:181444050-181444138
  hyper
cataattatgcactgcagattctccagcctcctcgccctcaatcttggtaacctggtctttggttaataatatcgcaactcgggactt

SEQ ID NO: 2993 - DNA, 178 bp, Homo sapiens
  chr3:181444346-181444524
  hyper
agatcagcagaaggcctcagacggtcaccatattggtggaagcgtttgtctgatgttttaaaacgtataccaaacggggcgtcagggccacgtgctgtgccttcgaaacgccgccgcgggccctgcctttcagagctgcggcagccggggctggcgtggagggggcgctgaaacaccg

SEQ ID NO: 2994 - DNA, 336 bp, Homo sapiens
  chr3:181444612-181444948
  hyper
cgtagtcagcttctgctttatttgtttgtttgtaatctcatatttagcaagccgggacggtggcagcaagggagaaaggacgggatggaggagggggcttcgcggtaaccacaccccttcctaatgagttaatttccatatttgcgcctcccgcatctagcgccctctttttttttttttttttttttttttttttgcctgacgccactgtgctgttgcgtcttgcgcagcgcagacacctccactctggattgaaacgaaaaagctcgcggtaagagcagaaaattggtctattgatacattcgctccgagtgttgatcttggcatcaccgatag

SEQ ID NO: 2995 - DNA, 736 bp, Homo sapiens
  chr3:181444988-181445724
  hyper
cgcggattgccgagggcttgcaggcactcaggcagacgcagacagaaacccacatcgaccccccccctttccccgcctccagctgtccgaccctcaagtctctttctttttcttttttacccaactccggattattttccccctcaaggtgagggcagtgagagcagcgagggcacagtccgcacaaaaagggggaaaataatcgcaaaccaaggaaccaaaagtgaaagtttcaaactagataccaaccctgatggaggttgggtgctgacccgactgtgggtacttaagagaaggaaggagggaaactgaggtggtgagattatgtccacagtatgggtcggttaaaagttgtagtaaagaagttttgggagggccctcactagaaactcaaggcgggtttcagctgatttaacctggtttcctacacatttttgcggtgattctgctctggaaattggcgaaagagacagacctttgcaattgctcacccctccctgcccccaaccaccctgcttactttcgcgaagcgcattaggatgtgggctctggcttgagctccaaaatagcttgcttgtcaattgcgagctgcagcaatatcaaagtgaactgtcccaagtaactcttgtctagaagctgggaagaagcttaagcagctcgctttaatgatgatttgtagctcggcgaggggcacggacagcaaacaccccgcaggtgtgtgccgtaacaccatcat

SEQ ID NO: 2996 - DNA, 196 bp, Homo sapiens
  chr3:181445799-181445995
  hyper
cggccagtctcagtttttctctgaataatccctgagggtaagtcctccgggcttttaaagagctctagtattttttttttaaagaataaaaagaaaaacgttcgattttagtttagacctcgtcaacttttagtcgctaacaggcatcactcaagccagtcaatacttaatgaccgttagttacccttgctgtctt

SEQ ID NO: 2997 - DNA, 212 bp, Homo sapiens
  chr3:182510947-182511159
  hyper
gtagagaccgaggaatcggccccaagctgcagactccggagatggccagacccacagacacgacttaatcccactcccagaacggggaggagggtggcagtggacagaaacagcgttcgagaacccggcacctttccacgctcgcttcttcccggacccacaacacagaaaccccccaactcggaacggcggcggggcgcgccaggcccccc

SEQ ID NO: 2998 - DNA, 171 bp, Homo sapiens
  chr3:182511622-182511793
  hyper
tctcggcccggggtggcggggaaaggccggcggcgcggagccgggaggccagggcgtgggcgcccggctaggccgcagcggagacgggcgcggggcccagagccggagaagccccgtgcggctcccgggctcgtctcgcctccaagcccgggccgccgaggctggcgccga

SEQ ID NO: 2999 - DNA, 30 bp, Homo sapiens
  chr3:182697831-182697861
  hyper
ccccggcttcggggcggggggaggctactc

SEQ ID NO: 3000 - DNA, 30 bp, Homo sapiens
  chr3:182698706-182698736
  hyper
tgagcagctgggggcggctgaaacggatgg

SEQ ID NO: 3001 - DNA, 182 bp, Homo sapiens
  chr3:182896606-182896788
  hyper
agggatgctgggaggcggaccgggagctcccagtctgcggcccccgccgggttggagcggctccggctcctccaaggctcgggctaagcggctctcaaccgattcccaccccgccctggagaaatgcgggcgtgtctgcaggcatttttgattgtcacgatttgggggcggggtggaggatg

SEQ ID NO: 3002 - DNA, 260 bp, Homo sapiens
  chr3:182896847-182897107
  hyper
cgtgggagcacagagaagcccacgcagcaaagaattgcccggctccgaatatcgaagtgcgcggtcgagaaggcgtgggctgcgggctctgctcgcctctgcaggcgccttagagcagctccgaggtcccccgtgcggagctaggcgcgcacccaggacacccctcgggctcctcggaggaggccctggttgtcccctttctgccgccgccgaggctccggctgctttctgcgtagctgggcagggcccgggcccccaca

SEQ ID NO: 3003 - DNA, 244 bp, Homo sapiens
  chr3:182897157-182897401
  hyper
cgcagggaggtcagctctcctgggcggaggtcctcgggcgcagcgccctcgcctggaaaccagccgtcgcccccgcaggagccagccggcccgtggacgccccagcgcgctcctcctcggtgctgcgggtcgccctgcaattccgagaagaaagtcagagacgccgtggcccaaagaggcgcttagtctttcctcgctcacactcacgtttcctcctcatcgcgttcttctttttctccctggc

SEQ ID NO: 3004 - DNA, 1499 bp, Homo sapiens
  chr3:182970911-182972410
  hyper
tcaccttcacctacgcgccgggagggtggcggctggcgggcggggccgggctcgggccgtgacgccgagagtgcggggcgcgcggctgggagcctcgcgcccccgcccgggcccgcccccatcccgcccgcatacagcccgcatcccgccggggaagcgagcccagtccagcgctgcccgtccagtcctcgcccaagatttaaagcccgcaagttttgttcttgagaccagcgactttagctccgatgcgggaaggaaagccgacctccgatttggacatttaaagagctgggcttgaacttcgtgagtttcgctctaaactgcccttgaaatgaagctggacttggaggtaaagtcactgggaagctggcctggggcggggtttccccctcttctcgtattttagaaacggacagcggcagtgcagccctagtttgctgtaagtttccttactttgttactgaggcccccagagctccacgcataagtggtgtgaccagaaaccttttaacaagacccgcctgagcctgcgttagagctcccgctcggaaagtaaaagaccatcctaatccgcggcgctgcggaaccggtgtcccgtgtgggaggaaccgcggcgttccctgggcgtagggcccgcgaggccagcacagtccgcctcttggcggagcgccctgggccggtggttccgcgcggagttagtctgtggtcagttacgtggtgaaaacacggctgtgccgcggccgcatctttccgcggccgaggcctctctgggtgggagtgttggcttcctttccggatcgctaaatggggaaagttctggccgctcggcgggatacgtctccaggccacggatggttcgttctccgtgccgcggccccgagctgggctccctgggtctccagcgcgggctcccggcattgggggctgcgggccggcccctccgccccgcccccgccccgccgcgcctcctcggccgagcggctcgcggtctccggcgcgggaggctccgagtctgcccactccgggccgagcgaggtctctggaggagaagagtggcgaggaggtgagggcacgccggccctcgcccggcgggtggcgccaggacttcaggtgggaacgcgcgcttgggccgggggcgcgtggctggcgtggacaccggatcggggcccgccgccctggcccggaccgcgcacggcccagcgccgggaagtcgggaagccggggaggcctctcccaccgcgggccccggcagcccgccctctgaaagcgcggcggagaaggaggctcgtcccctccccggaacgcctttgttccctccggcctgcccgcgcgggtggccagcggctgggacccaggccgggccgccgcccaggtgcggcaggtaggctcgggggccgggcagctccggttggggcggcttcccggggcctgcgggtccccgtccctgaggagctccggctcctcggtggcgggacaggcccgtgcgcgggagccgcgag

SEQ ID NO: 3005 - DNA, 51 bp, Homo sapiens
  chr3:183145834-183145885
  hyper
tttaaaggcatctccgcccaaggatgctctgccctcgccctcttcctggct

SEQ ID NO: 3006 - DNA, 739 bp, Homo sapiens
  chr3:183165108-183165847
  hyper
tagggtgggcccttgcggttcttgggcggaaacggcgatagggacacccagggcctaaggaggctggggacagagcagatcctcccagcccccaacatcaccccggagtagatgcagacccccagggtcccggaggccgagaccacaccccgcgggcacgagcccgattggcagattgtagccgagtggtttcaacggtgacgccccccacccgaatgcctcgctgggattggctcatttcttggttcagacctggacggtggccagaggaggacaagaggcttttacaccgaacggaggtgatgtggacgacaacggagacgcagccgcacttcaccaagcggccggtccgaggggacatggcggcaacctctgcagcgtcagtgctgctggcgggtgcaagaaactggtggcgacactgcctgagcccgctgctgttgccaaggtgacgaggcataaagccgcggtggatcggtgcgtgggggcgcggggtgggtggtgaagggagaacgaagctcgagcggaaagacaggaccgcgaccgcttgtcaggggattcggcttccagtcccccttccagagggcgtccttctgcagccaggcctctgtcttcccccgcccccacacggtacgagctacagaatgcttttctgttttctctttttctatagtaaggaagcgctttcctttctcccccgtttattcatttgcttacttctggttcccgtgtccttttaaca

SEQ ID NO: 3007 - DNA, 744 bp, Homo sapiens
  chr3:183542792-183543536
  hyper
ggccgccggcagctccgaggtcgcgtgggatccgggctccaggcgcctccgctctgccgcccaccccatccctctggctccgggcctccgcgtcctcccaccacagggtggggactcgttgcggtccctacccagcccatacctgtacgacgtggtcactgctgcagccgcgtccgcgtcgccgatgggcagcacgtagaccccgcgggcgccgggcgcaggtggcgcggaggactgcgcggaggatttgcccctgcggccgcccgcccccggtccgcgccccggcggcggatccttgggcccggcgggcgtggtccacaagccgaagtcccgctggtactgagtgagcggcacgtcccggccggaatcccgggcgcccgcgggaggctggcccctgcgcgaggcggcgccgcccgtgcccggctcctcgctgtcgaggtccgagtagccgtgcagagtgagcggcaccgccacgtcggagcggtccagctggttccagcgccgcgccaggcagcacaggcggctgatacagggccacgccatgccagccccggcgcccgccgccccgctcccggcgcgcggcgctcccggccgcgcctcctgcgcccagcgtccccgcccccgcggcccgccccgcgccgccgcagcaccgccccccggcacgagggtgggcgtcccgggagggggcgcactcggcggcagccccacttggccggggccggctgcgcacggctggagctggag

SEQ ID NO: 3008 - DNA, 31 bp, Homo sapiens
  chr3:183602889-183602920
  hyper
gaggatggggccagagcgaagagggacaact

SEQ ID NO: 3009 - DNA, 41 bp, Homo sapiens
  chr3:183676017-183676058
  hyper
ccatgtgtatattgcatgacgctgaggtctgggttactaat

SEQ ID NO: 3010 - DNA, 31 bp, Homo sapiens
  chr3:183851914-183851945
  hyper
ggtccccctaggcgggcgccggagcacgacg

SEQ ID NO: 3011 - DNA, 30 bp, Homo sapiens
  chr3:183903765-183903795
  hyper
agcggaaaaggtgtcgcgcacgcgcagaga

SEQ ID NO: 3012 - DNA, 30 bp, Homo sapiens
  chr3:184053511-184053541
  hyper
gaagggaggttttgcgaccccgtgtagtgt

SEQ ID NO: 3013 - DNA, 71 bp, Homo sapiens
  chr3:184098371-184098442
  hyper
gcgggggcagaagggcgcggtgcctgggacccgggacccgcgggcagcccccggggcggcacacggcgcga

SEQ ID NO: 3014 - DNA, 30 bp, Homo sapiens
  chr3:184243396-184243426
  hyper
agcgcgcggcgccccgcgctccattcgcgc

SEQ ID NO: 3015 - DNA, 30 bp, Homo sapiens
  chr3:184278876-184278906
  hyper
ccggacactggccgtcgccctcacgtacgc

SEQ ID NO: 3016 - DNA, 944 bp, Homo sapiens
  chr3:184279131-184280075
  hyper
tgtcacaggatacatcgcggtgggggtccccccaagtagcactaagctacagccacatgagggcgtcgcagggcagacgcgggccacatgggggcgcccccggtccgtcttagctggttggcacctcctcggactcagtttaggttactaatcgccaatgggcgccaggaggcggggttctccctctgatggacagcatcgctccgcccaatctaattcatcttttccttagccccgcccactccggcccctgagaccccgagggtgggcctggcggagacaccgccaactgaactccagctgagtgctctcgaggccgaaccagcgggcctggcggtctgtgagtgggtggccagccgctaggggcggggcctcagcgttgacgggcaggcaggccgtcccacccctctcgcccagagcggccgcgccagcgctggggacagcagaagtgagtacgtgagcggcgcagcaagatcccagctcggaccccggacggcgcgcgcccccgaagccccggatcccagtcgggcccgcagctgaccgccagattactgtgcatcccgaatcacgaccacctgcaccctcctgccccggcccgccccccaagtcctcaggcacccagctccccggcgccccggatcctcctggaccggtccgtccagattcccgcgggaccgacctgtccgcatccccaggaccgccgggctcggtgcaccgcctcggtcccggagccgcccgcctggattgcattccctcctctcctggatctcctgggacccgacgcgagcctgccccggagcccgccgagcgcaccctctctcgggtgcctgcagccccgccggcgcggcccggcccggcgcggcccggctcggctcctagagctgccacggccatggccagagcccgcccgccgccgccgccgtcgccgccgccggggcttctgc

SEQ ID NO: 3017 - DNA, 148 bp, Homo sapiens
  chr3:184319873-184320021
  hyper
cggcgggcccctcctggccattttggccggggaatctgtgtaaagtgtttaaaaagaaaaactctccggaggaggacgtaaccttttcttaacatctggggctcaattagctaatgacagcaaagccttctccggtgtcgctgacccc

SEQ ID NO: 3018 - DNA, 111 bp, Homo sapiens
  chr3:184321762-184321873
  hyper
gcaaggtaggtggcttggaaacgttcagtagtcggacctgggccacggagggcacagcggccactctttctgagaggcagaggtcggtgggctccaccctcccactccgag

SEQ ID NO: 3019 - DNA, 60 bp, Homo sapiens
  chr3:184322209-184322269
  hyper
cgccccttgccaaggtcaatcaaaccctcccacgctccggaggcgcgcgctgcgtgctct

SEQ ID NO: 3020 - DNA, 1157 bp, Homo sapiens
  chr3:184870195-184871352
  hyper
cacgggatttcatctcgtcgtcaaggcagcgccaaccccagccgtccggcgcaaggaaagctccggcgggcccggagcccacggcggccccagcctccggcagagcagccccggcagagcccggagccccgcggccgcagagttccggcagcgaccccggacggcccggcgggcgtcccccggaccgcggcggaaggcgggaagacgcggctcgacttacagtgacaccatcctaggtgacagcaccagtgcagcttgaagcacttgccatggctgtgcgtggcacagatagacagcccgtcgcacggctggaagtcgggtctgcgggcggcgcaactccgcgccagggcctgagcctcatctagtttctcgctcttccaaccccgctccgacgccggcgaggccgccgcactcatttcctctccctccgcgcggagccgacaccgggagcccgggagaagcgacgtctgggtgggcaggaagccgagccggctgcggacgcgggagggcgcggcacgggccgggagtcacgccagcacgcggcggcggcgggagcgcggcggtcccaggctcgaggaggagccgccccgggcgctgcgaccgggtccgggctggcagcctccctccctccggcgcggcgcgcgccgcgccccacgcgcacacgcacgcgcacaggcgcgcgccggtcggccccgcgcgacgttcctcagcgagcccggccttctcacacacacgccgctggggagcttggccgtcggcgtccccgccggtcacagcgaggtcctcctcacatactcactccttcctcggagaaagaccccgacggagggccgtggtgaacacacactcctcggccgctttgtactcacatgcacgccagcctacatatgcacttccccccgagtgacactggccaccgagaactgacacacgcgtccacacgctccacggagggctgcgcacacctggcccacgcccacccgaacctcctagtggcccgggccgggtgcatcgcgtagcgaggatctcacacacacagcctgtccccacaggcgtctcacatctccctcgtacacacctccccgtgtctgggcatggagcccctgggaggcgcgcacacgctcgtgcacacgcgcgcactccccccacccagggcg

SEQ ID NO: 3021 - DNA, 30 bp, Homo sapiens
  chr3:185233301-185233331
  hyper
gctttttttttttttaaaagaatctctctg

SEQ ID NO: 3022 - DNA, 49 bp, Homo sapiens
  chr3:185541309-185541358
  hyper
aagctgcagggctggcgcggccccgctgctctcccggcccccacctctc

SEQ ID NO: 3023 - DNA, 151 bp, Homo sapiens
  chr3:185542385-185542536
  hyper
ggggaggggagcgggccgtcccaggagcgggccggcggcgagagttgagggtctggtgcgtggaagtgagcgtgcgggcgcgggagccgccgccgggcgccgcccgccggactcggcctccctcccggcgccgtcccggcctgagcggggc

SEQ ID NO: 3024 - DNA, 642 bp, Homo sapiens
  chr3:185543382-185544024
  hyper
gcgtgggagggagaggggctgcgagtgagcgcggagaggggtgtgcgcaaggtggaccggatgtgagtgcgctgctgccagggcaagcgggaaggtgtgtcccggaggtgagaggcgagggcaggctgggagacaacaactttcgcagcgacttggccggggctggcgccctgcgcgttcccgggccgtgcgctcgctctgagacccgctccccgccacgctctctgaggtgaccgagcggcgcgtgtggtcgaaggatcgcgcgcgggagtcgggacgcctaggaccggggttggccgggccctcgcggaccgtgctcgcggggaagtggttcccggtcccgggcctcagtttcccgaccggggagggaaggcggaaggccagcgcggagtcacgtcctctccgcccagaccccgcgtgtccggaaccccgcggcaggcggcagcctgacgttggcagctgctctctattctgggaagtgccgagggcttcccgggcggcggcggcgaaagccaggtggcgggtggggaaacgaacgccgaggggccagggactgcggcgaggccggagcgctggggtcagcggccgggggacggatggtcgccgcccggctgcgcggccggttcagctccaaagccaggg

SEQ ID NO: 3025 - DNA, 625 bp, Homo sapiens
  chr3:185825548-185826173
  hyper
tttatgaatgggagagcgagccgcggccgccacatcaggtagaggctgtaactggatctctagcgctgggccccattcacaaaacaagacacacttccacccaattctcagccttccccattcatgaaaactccttcagctgcgcccccgcccccatttccaacgcacgcccagcctccgacgcaggcccctcaccccagcgttttaggaagaaagctcaatgcttcattcacaaaaagggaagaaaaaaaaaaaagccgcagggagcagcgagccaacgaaagaaacccgcttcattcataaagtcacccacattcataaaaacgaggtgcggcgcccggcgctaccaaccgcttccaatccccccacccccaacatctctccctggcaccccctcgtcgaccaggagttcggttcccccccgagttttctccaccctctgaaaatgcggccggaaccctaatccgctgcgaggctgcagcatctttcggtgctgtcccctccacacccgtgttatccccaccatccccaggccgctgttccggtgcgccccgattttctcgagtcgccgcacagccggacgccctcagcctgctgggtgggagcagggcgactggatgtccac

SEQ ID NO: 3026 - DNA, 473 bp, Homo sapiens
  chr3:185826424-185826897
  hyper
cgatcccccatccactcgggagcccccgcactcgcgctccggggcgcctcccccacgacgtgtggaaagccgctctccccgcgctccggaaccgttagccgcacccgcccgacgcctcccaggaaccaaaccggaccgggccgcggggggagggggcggtcaacccggggggggtcaccccagctactgcaccccgactttgaagattctgaatcagcccgtgaactctagccggctgggcctgtcggaccagtggccggacgccccttccgatctcccccctgcccccgcaaagccccctcacctgaggcggcctctctcctccccttgcagcggccccggcggcgcaggcgcgctcacgcacgcgcgcagcgggcctgggcgcctgggcgaaaggctgggccgaaccgctccgaagacggtgaaccgctccgcgcaccagcggctggactctgcgccgcagctgccaacca

SEQ ID NO: 3027 - DNA, 300 bp, Homo sapiens
  chr3:185827120-185827420
  hyper
tacataatttatgcaccgggggccattggccaatcagcacaggcttgtttatataatgaatgtaaggacgtttttcattcataaaaaacgcgacctgagggggaagcttagctgagtcagtgaagcacttaaaggggccgaggccaggaggagccgccgttacttcccttctcgccgctctcccgacttttcaccgaggcacgactcttcccccttacccactcacccccacttctccatccagcaaagccccgaccagaattgggtctcttggcgccagacgttcgcagctgcagcacc

SEQ ID NO: 3028 - DNA, 1039 bp, Homo sapiens
  chr3:186078731-186079770
  hyper
gaggcagcggcgcagcgcgggagagcgcgcccacgggttcacagcgctcccgggcaccactgcggcgcagccacagatcgcttcgcgctgcagcagacgctcccgccgcggggggcgactgggggaggggtctcgaccgccaccctgagttccgcagctcatccctcccatctgggaggtggttctagctctagtcccaagctttccactgcagtgatggtggggatgggggcagcacgtcaaatcacctgtagggctttttagaactccacagccccctcccctaattctattccactagttcaaacgaagaaaatctcagactaggcaaggggaggtggaccggtggagtctgcgaaagcaccacaggtgactccgggtacgcactcctcaggacacaagcacacacacggacacatcttgtgactctgagactacacagatcaacctcagattcgacccttccctcctttattctctgaggtgtccgtgttcgcttcagcttccctttaagtcgccctgcgcaggggctttgtggagtgcccccaaagtcctagaaccccgcgggacggtcggaggctttggcggccagacattaggaaaagcatctcctgcttctcggactgcctggagcgcgaactggatatcaaggagccaaggttaagtccagaagaagaaggaaatccgaccagttgctttagcaaactgcctggagcaaggccgcctcccacccgcacagctttgaggcttgagggggcctctcagtcgcagagagagccgagccccaccctgtgcgttccccaagcctgcacccctcgagcggggcatcccttcctgcagggctttgtggcaggtggaactgtcggggtgggcgccgtggctttggctgcagccccttccctggccgcgggaccggctcccgctttgccctcctttaccaagttgctgcaccgggtgctccctgagccggggaccccctccgccgcgccggccgccgtcttacctcaccaggcaacacttggttgcgcggtggcccggg

SEQ ID NO: 3029 - DNA, 484 bp, Homo sapiens
  chr3:186079818-186080302
  hyper
cgagagacagaagggggaccgaagctggcctctgggcgtcttcccgcctgcgcagccctctcgggggagggggatgcagccccagtgggtgccgcggagaccaggctgccaggctgtggttggtagcgccggggtcttcaccctgtgctcggagttcagcagctccaaagctgtctatctccgtggcccgctactacggcactgcggctctgtgccctgcccctcgcagcctggcaagtccagctgccactctcactgcggagccctgcccccgggcgcagagcccgcccccgccacacacaccggcgcgcgcgcgtacacacacggcacacacagacacgcgcttccacacatgcacacgcgtgcgcacacacgaatgtggatccgctcgatgggaacctgaccccctttggtgcaactagggcgcgggcatcattaggacgctttttactgacagggcttcggtttgggaggaggagttaca

SEQ ID NO: 3030 - DNA, 48 bp, Homo sapiens
  chr3:186544978-186545026
  hyper
tctctgactttcttctcggaattgcagggcgaccggcagcaccaagaa

SEQ ID NO: 3031 - DNA, 597 bp, Homo sapiens
  chr3:186857082-186857679
  hyper
ggcccagctccctcaggtctgcgtgtcaccgacccgaacccgctccgtcgtcctgacgcccccggcctagctgcagccaccttgtcgcaggggccttggtgtctctgagactccgagacgcctcgcccccacctggcgttcggaggcggttgcctcgctgggcgcagcaattcaaccgccgcgcgccggatgctaagaccgcgatttccccggatgctagggcggtgatttcccccgtgacaggccccgccccggccccgcccaggcccgggcggtcccgccccactgagctgtggctcggggagccgtgggtccgactcctgcgtgtgatgtgtcaccaagttgactttggggtcccccattcttccttagttctctattttacctcagcgcgttgtctagctgctgcctggccacggtacttagcacacagcgtgacttaatactggataaacgaggaaaggattcgtacgccctggcggggccagaggctcacagcttgggttcccgcgagcacacgagccaggaaccgccaatgcctccagggggcgctctccctcccatcgagccaccgccgggccattggagaccaggagg

SEQ ID NO: 3032 - DNA, 30 bp, Homo sapiens
  chr3:187387556-187387586
  hyper
tttggaagtgaggtacgctaagaggtagca

SEQ ID NO: 3033 - DNA, 27 bp, Homo sapiens
  chr3:187387893-187387920
  hyper
cttagggagggctggagaatccgggag

SEQ ID NO: 3034 - DNA, 240 bp, Homo sapiens
  chr3:187388006-187388246
  hyper
cgccggtgacacagcccagggccaggacgatggacagcgcagccagcgcgcactggaggcggcaggacagcatctcggcgccgcgaaagccgagctggagagtggctggtcaaactctaggcgcggatcagcaggcagcagcgatggctccgaacctcgctcctaaagcggcttgtgtgctctcaaccgtctccctctgttttaaactctctctctgacgtcaggctaggaggcgccccc

SEQ ID NO: 3035 - DNA, 2730 bp, Homo sapiens
  chr3:187455430-187458160
  hyper
ccccgcaaggcgcgacggaggctttgtggtatgaccgtggcggcccttaatttagttacattcaaataaaacttttggtgcacctcggtagctaacattgtgtgtatgcctttttttttttttttttttttttcctgttacgccgtcaatgcagcaggcaatgaggggaatgacacagccctctcattcccggaacgtagtcaatctcggctctgcggatttcacagaacacactttgcctattgccggctccaacaagaagtaactttccaggaagctgccggccccggcagccgccaggatcgctgcctgcgctgcgctggccgccggggattcacccagggaggcggggccgctggggaaggctcgcggggaatacagcacactttcccctaaatccctcgtccgcgccgagtgcagggctctcagagttcacctagtcccacctctcacccacaacagtttataaatggggaaggtcagacaagttagtagcagagctgggtctagaacccaggagttcgaatacaatccgaggctcatatcgagactttaagttgtccgattccgaagtttatttgcttttttccctctttttgccttccattctccctcacccccgttcttttaggggaatgtttgagcgagacttcaaggtcaaaagatggagtccctaggggctgagggtctccatcataggcgccccaggcaaggttggagaaaaactaaacagaaagccccttccgcctacgttggcaagaacgggaacccagctccacttggtttccgcccaaagtctttagaacaggagctgccaagccgtaaggatttccgaatccgatttccccgaaaccgtagagacacagcttggactcggcaaaggccggggccccgacccctgcgcgcgcactggcactctccaaagttgcctcgccttcctgtggccctcccgggaattataacccccgggtgccatgtcctaattggtctcggtagcaggctccggggtgcgctttcgggggctaggggacagcgaaagactcagccacaaaggccgcagtctggtcctaaaactagccagtggcgtcacactgcgccgctcatcccttctgcggcaagcggaagggtcagagtcggtctgcaaagaacgagcctttggcctcaaaatcctacattgaggctttctcaccccttcgcccggtgggataaaggtgaaagagacggttgggatttaataaggggtagggatgagaatctgggaagttaaaatgaagtaagtgcatttattggaaattaggagtcccgtggttccgggagctcaaaccgaatggtgtttttaccgctgcctaacgctagagagagccctccatcaaggtttgaaaccgtcaacccctttctcgcccctcccctccttcccattgacctagtttggccagagcctcccgatttggagaatgccttccgcccttcccccctcctctccagccagagaggctacagaggctgttggattattggtaatctaataactccaataacccgctgaaaaatccaaagggaaatctgaaagtgtaaagcactgtttagggacaaggacaaggaattttaataaggctgcaactgccgtagtgaaccccgcatcaggggccctgccgtggggctcccggtctcagcagtgtttcagccaactagctgcacggctgcagacaccaccgtggtccggcggcagggggtgaggtcaaatcgcggagctgtttttattcttgggggaaaacactcttcgccctcttggctggggaacgggagggtgcaggagacgacagtaaataaaagcgaatttgataacgcgatggcctcgacagccgctttggataaccgaggtgttcggggacattgtgtcctgactttcatttctatcacgtttcctgccaacagtgctcttgcaagcctgcaagcttctaggaaatgcaataaaacagagggatgtgttttatcatcaagatctgaagaggagttgcagaagggacgttccccatacgctcagcgcgagacagccttccagaagggcccgaagacaatgccagcaaatcgcgtcccggagcagagatccctcggccgtcctggctggactgggctcagcctttgcaaaaaggctggcgggggaggggagaagcatgatctcctcaagcaaacaatgcctttaaaaatccgatctggaaagaagtcagccaaggtccttattcacgttaatgaagatggaaggcactaactgtccttggaaagcgatgagtcaaacttgaccgcgcttcaaactcgttcccagattcgtttccagtccgaacagaggcgcgtttctccgacgcggcctccgacggctcccgcagtgggaggggccgaactcgatccccgccgacccgggcgggggcgacggcgctgtctccccctgcagagcgcgcctgctgccgctaggggccgccagcatgcggacgcgcgtttgccatcttaagtcacgagctcggagaaagaaaactttacggaggaactgttgtggcacaaattctggcctatccacatgacccccaccccctcacacacacacacccggtttctcgccaggctactatgcagaggatgttaggaaggggaagagagcgatttcagaatcgaggctcgccctgcaagtctttggtccaggccttaacccccctcttaacacgcaaacccccgagc

SEQ ID NO: 3036 - DNA, 242 bp, Homo sapiens
  chr3:187458573-187458815
  hyper
atggtgtgttcgaagcgggttatttgtggtttttcttagtgcaaatagatgctcatcgctgagtgatgggcaagcagcgaggcctttctgattttcatccctcttgccaaaactttggaggttgtatgccatccccattggagggtgccctccttctgtcagtcctagcatctggtcagggtaccgccgcccgggaggtggaacggcgagcccaccgcccatggccgcgaactcgatctcag

SEQ ID NO: 3037 - DNA, 121 bp, Homo sapiens
  chr3:187459388-187459509
  hyper
aaccagccagttctgccaccacgctgcaccctcgctgtgctcgcggcggcagcggcggtcccacttgttgcgcagtgctggaaaccggcacgcgccattcgatgttgattcacagagggct

SEQ ID NO: 3038 - DNA, 133 bp, Homo sapiens
  chr3:187462604-187462737
  hyper
gaaagcagtttgcaagcgagaaaagagggaaaaaacacagccgcacgaatccagagagatcacaagccgtacgcaagcagcagcagaaagagcgagagcgcgagcgcgcgtcctctccgcggtctggggccag

SEQ ID NO: 3039 - DNA, 30 bp, Homo sapiens
  chr3:189838066-189838096
  hyper
tgtagggcactctgcgctggaagtcgctgc

SEQ ID NO: 3040 - DNA, 28 bp, Homo sapiens
  chr3:189900046-189900074
  hyper
gcgcccagccggtcgtttatctcttgaa

SEQ ID NO: 3041 - DNA, 30 bp, Homo sapiens
  chr3:190231339-190231369
  hyper
catctacatcctgccgcgctctgtgccggc

SEQ ID NO: 3042 - DNA, 374 bp, Homo sapiens
  chr3:190580539-190580913
  hyper
agagctcccggcgagcgccgctctgtgatttggtgagaggctgtcaaaccggtgacgtgagccaggagtcacccagcagaagacaaagtcactcgcgctctgggcggccaccgcgccgggaccagggacctgccgatctggccaccggccgtggggcagaggcaggacctccggccctctcgctccgggtgcgcggcgctgcttcacacccggccccagtgtggactcgccgcgggcggggagacgggcggggagacgggcggggagacgggcggcgaccccgcagccgggaccgaggcgagggccgggctccctcccgctccacgcgcagcgcggggcagggccgagccgggccgggcgagaagatggtccag

SEQ ID NO: 3043 - DNA, 14 bp, Homo sapiens
  chr3:192125814-192125828
  hyper
tggtctccgcctca

SEQ ID NO: 3044 - DNA, 595 bp, Homo sapiens
  chr3:192126115-192126710
  hyper
cggggaggcagtgctaaaatttgaggaggctgcagtatcgaaaacccggcgctcacaaggttagtcaaagtctgggcagtggcgacaaaatgtgtgaaaatccagatgtaaacttccccaacctctggcggccggggggcggggcggggcggtcccaggccctcttgcgaagtagacgtttgcaccccaaacttgcaccccaaggcgatcggcgtccaaggggcagtggggagtttagtcacactgcgttcggggtaccaagtggaaggggaagaacgatgcccaaaataacaagacgtgcctctgttggagaggcgcaagcgttgtaaggtgtccaaagtatacctacacatacatacatagaaaacccgtttacaaagcagagtctggacccaggcgggtagcgcgcccccggtagaaaatactaaaaagtgaataaaacgttcctttagaaaacaagccaccaaccgcacgagagaaggagaggaaggcagcaatttaactccctgcggcccgcggttctgaagattaggaggtccgtcccagcagggtgaggtctacagaatgcatcgcgccggctgcggctttccagggg

SEQ ID NO: 3045 - DNA, 586 bp, Homo sapiens
  chr3:192126786-192127372
  hyper
cgggggcagctgtttccagctgcggtgagagcaactcccggccagcagcactgcaaagagagcgggaggcgagggaggggggagggcgcgagggagggagggagatcctcgagggccaagcacccctcggggagaaaccagcgagaggcgatctgcggggtcccaagagtgggcgctctttctctttccgcttgctttccggcacgagacgggcacagttggtgattatttagggaatcctaaatctggaatgactcagtagtttaaataagccccctcaaaaggcagcgatgccgaaggtgtcctctccagctcggcgcccacacgcctttaactggagctccccgccatggtccacccggggccgccgcaccgagctggtctccgcacaggctcagagggagcgagggaagggagggaaggaaggggcgccctggcgggctcgggatcaggtcatcgccgcgctgctgcccgtgccccctaggctcgcgcgccccggcagtcagcagctcacaggcagcagatcagatggggattacccgccggacgcaaggccgatcactcagtcccgcgccgcccatcccgg

SEQ ID NO: 3046 - DNA, 174 bp, Homo sapiens
  chr3:192127556-192127730
  hyper
cgagggcgcaacccgggcgcttggggccggaggcggaatcaggggccggggccaggaggcaggtgcaggcggctgccaactcgcccaacttgctgcgcgggtggccgctcagagccgcgggcttgcggggcgccccccgccgccgcgccgccgcctccccaggcccgggagggg

SEQ ID NO: 3047 - DNA, 243 bp, Homo sapiens
  chr3:192127936-192128179
  hyper
cgcccaggtggggccgagctgggggccgggcccctggagcgctgggaagcacagcgcgctctagtcaggttccctttcctggagccctccgcttccagactcccttctttcctccctccctcccgccacccctctccctcctctctgtgtcttctgtctctccccttttctcctctctacgcaatcctacgtgattgaggtttggatgagaaattctcagaggcagagcgagggaactgcagc

SEQ ID NO: 3048 - DNA, 391 bp, Homo sapiens
  chr3:192231877-192232268
  hyper
tttcccagggcacccggttgaagcccaaggctaactgggaccctcctacttcagcaccaaggacagaaatcgctaaatctccaggggaaacgtacccctaaccaccgccagatgtctacttttcagacaaagcaagaaaaagaaaatatacctgccttgccagccatctgtttaaaagtcccctctcctgtggaacgcacgagcaacttttcggagacactgaacaactccaagtcgcgcgccgccctcgcaaatcgcagagagggccgcgagaaggtgcgaacgcaggtcacggccagcgccgcttggagagagacccgcaggtttcagcccaggcgcgcccggcgaaagccaacgcgctctccctacaaagcgtcgatgacttcaggga

SEQ ID NO: 3049 - DNA, 286 bp, Homo sapiens
  chr3:192232532-192232818
  hyper
tcaagaatcttcatggagaagcgcgtgtgtggggttggtcaactccccgcccacctgcgctagtagtccaaccaacaggcggcctgtcttcggaagccgggtcccgagtccatcgcgcgcgcccaggtggaggggagtttgcacatggagccggagggagcccgggcgccggcagggggcgggccgggacgcggaagtgccggtccgccgggggcagccctccgagagcccgaggcgctgccacccctcggtgggctcgagcacggccccttgagaccttccggag

SEQ ID NO: 3050 - DNA, 102 bp, Homo sapiens
  chr3:192232849-192232951
  hyper
cgtcactgcgggtcggtgcttccttacaggtgccttctggaccggggtccttggcacctcccctgctcctgccctcggtgccggaccctgtgccctgggagc

SEQ ID NO: 3051 - DNA, 255 bp, Homo sapiens
  chr3:192233094-192233349
  hyper
gcagggagggctggaccccggaggctgcagagcgtcagaagcgactctagggaactagggggtggggtagggaggcggggacgtggaataaagaaagctcctgggtgccggctatgagaagtcaggtgtgcgtaggcgtggacagagtgccgatgtgggagtctggacacctggattttctggtcggggctctgtgtccttgggtaagtcacttaccaccctgggcgtctccccgtcaatctgggtggggaagag

SEQ ID NO: 3052 - DNA, 21 bp, Homo sapiens
  chr3:192445365-192445386
  hyper
cagatttgcatgggcgctggc

SEQ ID NO: 3053 - DNA, 155 bp, Homo sapiens
  chr3:192635621-192635776
  hyper
atcttcatgcaaaacgcgccgagtagcagctccgcggcagcgcggcacccacccccgccccccaccccgcccccctgggcctcctcccctcgcaggctcccaggctttggccccggctcgtgggcgggttggcgggcgggcgtctgggcgggcag

SEQ ID NO: 3054 - DNA, 60 bp, Homo sapiens
  chr3:192636007-192636067
  hyper
gaaatcaacaagctgccggctccggtgttacggagccagcaccagcgtctccatttaaag

SEQ ID NO: 3055 - DNA, 31 bp, Homo sapiens
  chr3:192959658-192959689
  hyper
gactattaatatgactcgtgctggaaaaagt

SEQ ID NO: 3056 - DNA, 207 bp, Homo sapiens
  chr3:193721400-193721607
  hyper
ctcaggagtttccttccggctgcctggcctcccctccttgccccggggggttaggagtgctctgttctgacttaggcgtttccctagggtggagctcctgggcctgggttgggcctgggcgtgtggctccgtgatcgtaagtcccctctggctcttgcacaacagaccgaggctggagcagggcagggaggccgcagtggggcctgg

SEQ ID NO: 3057 - DNA, 391 bp, Homo sapiens
  chr3:193776031-193776422
  hyper
gttaggttcccgccccggccccagccccagccccagcatcagctccggttcctctgcagacgttcagccccttcggaaatgtaaaacccgggaagcgaaagctgcggcgacctcccagagcctctcaggcacgcggcatctctccccaccggcagcgccttgaaataccaaaggcctagccaaagatggaaccgttttgttgggagctcgggtttcccccgccgcgaggctgagccggtggcgcagctgctcaaaggtcacgcccgagacacgtccgcacaagcccgggtggcggggcgggcagcggggagagaagaggggagtggggagggggacgggggcaggggggaggggcgccaccttctccagggccctgcggggtgggctccca

SEQ ID NO: 3058 - DNA, 70 bp, Homo sapiens
  chr3:193852643-193852713
  hyper
acacacaccccccacacgcagcgcgcgccaatgagcccgggccaggcgcagggggcggggttttcccagg

SEQ ID NO: 3059 - DNA, 31 bp, Homo sapiens
  chr3:193853961-193853992
  hyper
taacagcggaatcccccgtctacctctctcc

SEQ ID NO: 3060 - DNA, 185 bp, Homo sapiens
  chr3:193854186-193854371
  hyper
ggagaaaaattcctcgtccccggtggctgctaccccagccagtgtcaacacgacaccggataaaccaaagacagcatctgagcacagaaaggtaagggcggtacctgtatctctttgcagcccctcaaaattaagtaggggttggggggcttctttctgtcttgaaaccccgggatggcagattc

SEQ ID NO: 3061 - DNA, 31 bp, Homo sapiens
  chr3:193854613-193854644
  hyper
cccaggcgggagggcccggccttattcgctg

SEQ ID NO: 3062 - DNA, 312 bp, Homo sapiens
  chr3:193858569-193858881
  hyper
ctcaggcctggcctaattatacggcctcgggcacaccagcagcccctctcgccggcccccagcagtgctgatcgctcggggagataaggcacgactccaaactgcgtccggatgcgggccgcgggccccggctgccgcgcgcattagcctctcaatggagcccttccggggccccggccccccgccgtctccagcagcatccggagcgggaaaggcgccgaactggaagggggtgggggtgctcttcggtcaacacgagagccctctccaagcgcagaagcgcgactccggaggctcgcccctcctcgcgcc

SEQ ID NO: 3063 - DNA, 282 bp, Homo sapiens
  chr3:193858949-193859231
  hyper
cgtcccgggaaacctgtcattaaagtcaattaacttttcccacacccgttggccggtaacaacccgctcctagcttcctccccggctcctaagtgcaaccagatgggcggacgggctgcccccgccgcgcgcccgccggggcggcccgggggttccagggaggccgcccggggccctccgcccgggcgggagccggccagggcggccacgccgggccagccctggcggccctgcggccaaggtggttcgcttagcaggcccggctgctttctggcaggaaat

SEQ ID NO: 3064 - DNA, 87 bp, Homo sapiens
  chr3:194208170-194208257
  hyper
tttcattcctttagccaccctcgcccccgccaaaacaaacagacaaaaaactgtcattctcatatgaccacggactctgcgccccgg

SEQ ID NO: 3065 - DNA, 63 bp, Homo sapiens
  chr3:194208467-194208530
  hyper
cgcgcccggccacctgcagcctctggctgcggccatctttccgcctggggccacctggcctgc

SEQ ID NO: 3066 - DNA, 116 bp, Homo sapiens
  chr3:194278584-194278700
  hyper
ccacacctaaacatcccgggcgcttccagcaaatctcagtacatggtgagatgcaggagggaaatcacgcagctgagacctatggtactccaggaggttttcggtgacattagccc

SEQ ID NO: 3067 - DNA, 310 bp, Homo sapiens
  chr3:194353931-194354241
  hyper
gcgcctcccccatggcgcggctgggcgcgcggcgcggggccggggacctgggcgcagcctccctcgccgcgggcaagccccgagcgccgccgccccgcgtgcccttctctgggttccgttccgccgcggcgcctccggccgagcgcaccgaccgcgggcagagaagggcgcgctcccgggcgcgggcggcggcggcgaaggcgccggggaaaagtttccgggaccgcgcgctccccacccctcgcgctattgtcgggggtcggcagggcggaggccgccccccagcggcgggagccgggagctgcgcgcg

SEQ ID NO: 3068 - DNA, 581 bp, Homo sapiens
  chr3:194407407-194407988
  hyper
cccaactccctaccacagggccgctcccagtagttttattcttcgatcttgcccgggccgagcctggcaggggccggtggctcagcgggcctcgcacccggcgctccgccgccgccgccgcccagctgcgccggggcgccctccggagatgctgccgtggaagaagcacaagttcgagctgctggccgaggcgccgccgcggcaggcgtccaagcccaagggctacgctgtgagcctgcactactcggcgctcagctcgctggcgcgggcgtgccccgaaggcgcgcttagccgggtgggcagcatgttccgctccaagcgcaagaagctgcacatcactagcgaggacccaacttacaccgtgctctacctgggcaatgccaccaccatccaggcgcgcggcgacggctgcaccgaccttgctgtgggcaagatctggagcaagagcgaggcgggccgtcagggcaccaagatgaagctgacggtgagtgcgcagggtatccgcatggtgcacgccgaggagcgcgcgctgcgccgcccgggccacctctacctgctgcaccgcgtcacctactgcgtgg

SEQ ID NO: 3069 - DNA, 772 bp, Homo sapiens
  chr3:194407996-194408768
  hyper
cggctgcccaaggtcttcgcctgggtgtaccggcacgagctgaagcacaaggccgtgatgctgcgctgccacgccgtgctggtgtccaagcccgaaaaggcgcaggccatggccctgctgctctaccagacgtcggccaacgcgctggcggaatttaaacgcctcaagcggcgggacgacgcgcgtcaccagcagcaggagctggtgggcgcacacaccatcccgctagtgccgctgcgcaagctgctcctacacggaccctgctgctataaaccgccggtggagcgcagccgcagcgcgcccaagcttggctccatcaccgaggacctgctcggcgaacagctggagcaggagctgcaggaggaagaggaagaggagcaacccgagggctgcccggaggaggaggagaaccgtgcggcagagggagatccagcagaggaggaggccgaggcgcagcgtgcgctagtggtcgccatgcactttgagtgcggggacttgttggatactctggagaatggccgtggggaggcgctaggaggcggcgggggctccctgggcccgggggccgggccgccgcctctgctgctgggcagcgcctccgacatgaaggctgagctgtcgcaacttattagcgacctgggcgagctcagcttcggcaacgacgtgcgcaccctgcaggccgacttgcgggtgacgcgcctgctgtcaggcgacagcacgggcagcgagagctccatcgagggcgggggccctgacgccacctccgccaccg

SEQ ID NO: 3070 - DNA, 153 bp, Homo sapiens
  chr3:194408838-194408991
  hyper
cgtcgccggcgctccaccgtggctacccatccgtggtcccgacaacctccctgtcccttgcccgcccccaggaagggggaaatggggcatttggggcccagacctacacttggagcccaggtccagcgttcccccgaccgctttcccctacct

SEQ ID NO: 3071 - DNA, 80 bp, Homo sapiens
  chr3:194980431-194980511
  hyper
gcaccagggcggcccccggagccggcctctggcggcctcgggtcttttgccaaattccccaccggcgccaggataccgag

SEQ ID NO: 3072 - DNA, 1835 bp, Homo sapiens
  chr3:195599578-195601413
  hyper
tggtttgcaaataaggaggcacgctggaagctgctgcagcaggcaacatgacctgtccacggttaccagaaagatcccagcagacctgggacccaacgccagctttcaggtctgtggggccagcgccccgcccacacctcctcctcacccctcagttccctggcaaggccggggccccagtcctcttctggccacttgatttcactcctcggctgggttccaggagttctgagaggtgcgggggtgccgggggacacctagggccttgcactaggctgggggccaggcctccagctacaacctgcctcccgaatgcagacgcgggagagtctaggagcactcgggcaactcagtccctccctccaccgcttcacctgcttccggagctttccaccacctcccggaaggcctgcgggagcctccccgtctcctcaggaggggctctacctgtgtccaaaagggaactcagctctcccacagtgaccagacagtagggctgccagtccccctctgacctcagacacgaaacctctgctgatgtggcctaagccggggcctgggcaggggcaggggcaggggcaggggcaggcaggccaggaagcacagggctcccgcaagacactcctgactcccgaaggctctcacaggttgtgaggctcccgcgtctgctgctggacttgtcatacgtgatgccgtgagcagagtctgggcaggcgggggcggtgagagccccgtgggcagtgtctgggcaggcgggggcggtgagagccccgtgggcagtgtctgggcaggcgggggcggtgacagccccgtgggcagagtctgggcacgcgggggcggtgacagcccagagctgctagggtggacacgtgtggcaccacactgcacgccctccccaccaacccccacttctcctgtcccagggccaaagcgtgaagaagggctcctctgaaacccagccaggccggggagagaggacggaggaggtggcgacgcctgggcacccagacccacagccttgtaaggtgacgaggcctggctggagcggggtgactccggaacagcccatcccagagaccaaagtcaaacccgagagcaccacggtcggcggggaggcggggggcgcggggcgcggggagacggggctgtgctccccctgcccagcctcctcatacacagggccactggcctggccccaccacacacagccaccctgtgattcccaccctgcctgcagggagggaaggaaggagagaggacagtaccccgagacgagacgagtcccatctgaaaaatagcagggccactcgaaggagcagagccccggctccccagcacgcacacagcctcccacggcggcccgtagaggaggaaccccggcaccggctgggctgcggctctcccgctacacccacgggctccccggtggctgccgcgggccagacgccggactctgctctccacacctcttcagaggcgctcagtaactgggtgagaatgccgctgaggccgagaccttgctcagagcagcgtgactcgtgcccaaggcaggtcactccgtctggcctctcccttccgccaacactgcccagctccaggcacagaagcctcctttgggacccacttctgagagggaaaggagacatcaagcccacctcccttagtgcaggtatggccgaggcaagagcccccatggctgctgggagtcctgacaccactcgagaaaacatgcttgctcctgggggaaggagagtaagagtgcggaggacgtgtgcaagaagctcccctcgggatggcgcccacgcacactccgaggcacaagaaactccccctcg

SEQ ID NO: 3073 - DNA, 538 bp, Homo sapiens
  chr3:195622171-195622709
  hyper
gagccccaaatcccagcggctgcggtcagggagagaagcagcgcccgcagcccccgccccgcagcggcaccggcagcgtcactgccctgcgtcctggggggccgggcctcgagcatcctccagaagtgcagggccgctactgcgtctcagcccccatagcctcatccgccatcggccggcggccgggtggtcgcgcccctcctcctgccggcctgcggccattccctcctgcagcccgtcccagctccgttcctcctctccggggcgcggctcccaccctctcccagtgagccagctgtgccagccccgggctgacccccaccgagagccggggctctgccttcgccggccgcggaaccgggctccactcagccctcagcccgcctccagggccccagagccaccaactggggccttggggattcacgagtcccccgtattcacggtaaggggccatccgagaagcccacagcagaggggcctccgtccgactccatctgagaccccctcctccgaggcatcccggggctgcagccca

SEQ ID NO: 3074 - DNA, 34 bp, Homo sapiens
  chr3:195636197-195636231
  hyper
cgccctcctcctgcaccgccgggcccaccccgcc

SEQ ID NO: 3075 - DNA, 185 bp, Homo sapiens
  chr3:195809081-195809266
  hyper
ggggcggggatgcgcgcgcagcgggcggggccctatgcggagggcgctgcgggcgaggcgaaggccaagggaaaaggcgccaaggcagcaggtgccccgaggagccgcgcgatgggcgcactggcctctgcctcggcgccttcctccaccctggtagcctggcagcctccgcctgaccttgacca

SEQ ID NO: 3076 - DNA, 19 bp, Homo sapiens
  chr3:196045320-196045339
  hyper
tgcagaagtaattgcggcg

SEQ ID NO: 3077 - DNA, 31 bp, Homo sapiens
  chr3:196467926-196467957
  hyper
cattatctcacttctgcgttacaggcgatgt

SEQ ID NO: 3078 - DNA, 31 bp, Homo sapiens
  chr3:196476222-196476253
  hyper
acgtttccaccagcagcgcacagcagttcag

SEQ ID NO: 3079 - DNA, 30 bp, Homo sapiens
  chr3:196594752-196594782
  hyper
acgcgataggccagcgccggcgtcgcggca

SEQ ID NO: 3080 - DNA, 546 bp, Homo sapiens
  chr3:197025751-197026297
  hyper
cctaactgattaattccgagtatggtatacttaagggtgggcagagaaggtttgttcattcattcgctcattcattcattcattcatttccctcaagcctgcgtccccgcccggtcagcatcgcaggtgttacccaaactctgacggtccctttaagaactcacccggagtcgcgccctccgaagctgagccgccctcggccagcgctgcaggtttgtttcgtgcgcacctccgggcggaattaccggccggctgggaccccgctcccggtctgagccacccaggttatagaaggggaatctcgggaagctttccaagtcactgcccacgtcttcgaacttcctcggggtgacgaggacctccctattaggaggtccagagagaatttgcccaaagttaccccgagtgagtgacagaactggaaacccggagatcctgtctttcaaaaccggaaggctcttcccagtaaacctgacggcctctgactgaggccgtatccattggctaccaaagggaaggccgaggaacctcgtattgtaaccttaa

SEQ ID NO: 3081 - DNA, 97 bp, Homo sapiens
  chr3:197222651-197222748
  hyper
actttcctaggctggccgggctcggctggggcatggagagtgtcagttgcatgatttttcttcacttacagggccccccgtccctttcctttttttt

SEQ ID NO: 3082 - DNA, 30 bp, Homo sapiens
  chr3:197476865-197476895
  hyper
ggtgggagccacggcgacttcttcgccgcc

SEQ ID NO: 3083 - DNA, 30 bp, Homo sapiens
  chr3:197807340-197807370
  hyper
ccgcccggcccgggcgtctcccgaagctga

SEQ ID NO: 3084 - DNA, 1348 bp, Homo sapiens
  chr4:330715-332063
  hyper
gggtgagcttggggagggagacacactctcagcccacctcgccccgcccgacagcgctccgagtcctgagtcccctcacccccattctacagacacgaaggtgaagccaaagacgggacgctcacttcctgagaatttgctgcctgctgcgtggacaccaccgacctattgtttacagcggtcagggacccgccccccagacccccaggaccgcgcttccgggggaggagggtgtcctcagcaacggtgacccgcaccaaagccctcctcaccggggtcaccgccacagccggtgcgaggcccgcagggcgctggggatgcgcgaccgactcccgtgaacctgctcctcgcgcgtcagggagagctgtgcacccaactaggctctgtgaggacggactgaggtcggcctgcaggctgcggccccgaaggcaggatttgtggagagatgattcgcgagccttggaggaaggatgggctgtgcgtgcgtgggtgcgtgcgtgtgtgtgtgtgtgtgtctgtgacttttgtatgtttatgtgagactgcgtacgtgcgcgcgtctgtgtgtgcgcgcgcgcgtatatgtctgtgtgtgtgcgtgcgtgtataatttctaaatggacgtcaccttacacatcacaaggttaaaaaatgacccctgggctgtgccaggccaagcacgaagagaaagccccgcctgaaactgcctggaggccccccggctgtcactctcgccacattccgtggagtatgtggttgcaacttctgtcactcaaggtctgatggcggggagattggagccgtatccaatcagcgcactggagtgaaaactgcccaatcaggcacgcagccagagaggaggcggtggcttccgggatgtggcgcgggtctttgcgtctggctactaccagaccgcgggttaggggcttcatctctctgcgttctcagttgtgggaggccttggtgattcggccacagctcagcctccgtcgctctgtgacctgcgggtattggatgattggtagctaagactcccgaatacttcagaagtggggaaatggtgagtgtgcggggcagggcgtcccaaggctgaggaggtctcatcggagctggcgggaaatggcggcgggaccgagtctgcgaacggagtccccgctgccgccgctcagccctggggcctcagtaccctccggtgagggacctgggctcctgtcggtccccgcacagcggctctggcccagcctgcagccctccttgtgcagctctgcgcccgcagccccgcaccttccccaggctgtggggtgaggagtagcttatctggaagccgcccgcgcggcgtgcgcgatgc

SEQ ID NO: 3085 - DNA, 30 bp, Homo sapiens
  chr4:570346-570376
  hyper
ccagctggctctcccggaccccctgggccc

SEQ ID NO: 3086 - DNA, 30 bp, Homo sapiens
  chr4:657827-657857
  hyper
tccctgcagacgggcgcttggggcggggtc

SEQ ID NO: 3087 - DNA, 39 bp, Homo sapiens
  chr4:667539-667578
  hyper
gagctgattccactatcggggtcacgctcggtggaggac

SEQ ID NO: 3088 - DNA, 69 bp, Homo sapiens
  chr4:819436-819505
  hyper
gaagcgaggaggaggccgggcgcgggccgggaccgcgggggccgcttcagcaccgcggcagtggacagc

SEQ ID NO: 3089 - DNA, 31 bp, Homo sapiens
  chr4:824547-824578
  hyper
gccaggctcagaacgccgaatgccccttccc

SEQ ID NO: 3090 - DNA, 118 bp, Homo sapiens
  chr4:995875-995993
  hyper
cggacccgctggtgggctggtccctgccacagccgtggagggcggacgtgacctacgcggccatggtggtgaaggtgggccggcccaacgccctgcgcgccccccggccaccttcctc

SEQ ID NO: 3091 - DNA, 74 bp, Homo sapiens
  chr4:996100-996174
  hyper
cgccttcccctacgcgctcctgagcaacgacaatgccttcctgagctaccacccgcaccccttcgcgcagcgca

SEQ ID NO: 3092 - DNA, 31 bp, Homo sapiens
  chr4:1004428-1004459
  hyper
cgggatgtgggcaggccgtgaggtttgtgtt

SEQ ID NO: 3093 - DNA, 30 bp, Homo sapiens
  chr4:1004688-1004718
  hyper
gttcttgtcattcccgtcactagcaggtga

SEQ ID NO: 3094 - DNA, 30 bp, Homo sapiens
  chr4:1037600-1037630
  hyper
tgcagggaggcgtgcgagtcatcgaggtga

SEQ ID NO: 3095 - DNA, 30 bp, Homo sapiens
  chr4:1049638-1049668
  hyper
ctctctgggagccacgtgcacgggggcgtc

SEQ ID NO: 3096 - DNA, 141 bp, Homo sapiens
  chr4:1243420-1243561
  hyper
ccgagccctgatttaccgtccgagagccggcggcacatgggaccccgagaggagaagcgcgcctgccccagtgcgtccccaggcgggggagccccgactcctggagggaccgcgtcctgcccggcccgggaagttcagggc

SEQ ID NO: 3097 - DNA, 31 bp, Homo sapiens
  chr4:1310814-1310845
  hyper
cacctgcaggcccacccggtcccacactcca

SEQ ID NO: 3098 - DNA, 1382 bp, Homo sapiens
  chr4:1331725-1333107
  hyper
cccagagggcagtgagtgtttcgcgattgctgctggtacctggctgtgccggggtatgaatgagactcaggccccctcccttgtcccctctttgtggaactctgggcgagagggctggcgtgcttgcccactgcctgttcctaggtgccagcagaacgtccctgctgggtggctcttgtcctgcctggagaggttgcgtggccggggagagggcggcgggcgacggagccactctgtgcctgtggtcctggtgctggaggccggggtgagaaggcgcaggcttcttgtctccaccgaggcctcagtggggctgtttagctgtcgagtgcagcacttcctgtgcctcgaaagacagccccgtgtagtcagcatggcgcccacatagccagaagggcacgcagcccagggcagagtggccacagggggctgggctcaccccggctgccctgagtggcccccaacccttccttgacccgatgctcagacagtgctacaaggaggacggcagctccaagagccctgactgccctgtgtgcagccgctccctgaacaagctggcgcagcccctgcccatggcccactgtgccaactcccgcctggtctgcaagatttctggcgacgtgatgaacgagaacaatccgcccatgatgctgcccaacggctacgtctacggctacaatgtgaggggggcagggcaggggggccaggctggcacgcatcgccatcgggacagggctgtgtgggacgggcagggcaggggggccaggctggcacgcatcgccatcgggacagggctgtgtgggacgggcagggcggggggccaggctggcacgcgtcgccatcgggacagggctgtgtggggcgggcagggcagcggggccaggctggcacacgtcgccattgggacagggctgtcctctcgccccaccctgccttagcttcgttcgaaatggatgaaggggtgggaaggacaggcgaggtggccccgggatttctttggcaggtgtgccttcgggaaggaactttgcctgagaggatgagtcattccctggtggttcattgtggggattttccatggaaatccgtgtgtacgttgtagtcgcttgccttaatgcattcccggttttatttttcagtctctgctttctatccgtcaagatgataaagtcgtgtgcccgagaaccaaagaagtcttccacttctcacaagccgagaaggtgtacatcatgtaggccccacgtcgtgaagcgcacgcctcggggacgggctgcagtgggcggggaggccacgccttcctcctgtcccacgctccagcctgccgcggcgtttctgtttcttgcgaccaaagatccgtgagcaacgataaatactcttaggaagag

SEQ ID NO: 3099 - DNA, 30 bp, Homo sapiens
  chr4:1396578-1396608
  hyper
cacctgcccggccccgacgcgcatggtcat

SEQ ID NO: 3100 - DNA, 30 bp, Homo sapiens
  chr4:1397842-1397872
  hyper
gagagggtccccctcgccccgcgctgcccg

SEQ ID NO: 3101 - DNA, 30 bp, Homo sapiens
  chr4:1401839-1401869
  hyper
ctggttgggcggggcggggggggggcgcag

SEQ ID NO: 3102 - DNA, 9 bp, Homo sapiens
  chr4:1794946-1794955
  hyper
gggagcggg

SEQ ID NO: 3103 - DNA, 84 bp, Homo sapiens
  chr4:1794972-1795056
  hyper
cgcggaccgtcccccactggctgcggcgcgcggggcagcccaggctcagtgcgcggtggcggcggcgtcgcgggcagctggcgc

SEQ ID NO: 3104 - DNA, 591 bp, Homo sapiens
  chr4:1795975-1796566
  hyper
aagtgcgaggccaccacggggagccaggctgggggttggcgtccgcagccccgatcccctgcgactccctagccctggcctgtcgggagggcgcggggggccccatttccacgattcccgctgttgttattcgggttctgcgcagacggaaagttcccattgttggcgtccccctcccccgggccccagtttgtggccagcttcggccaaggcgagagaccggacttctaagggtgggtgtgcgcgtcagcgaagcccggcccctgcccgcccgaagaggcagcagcctccagcgtccccgctgccgaccctgcccctgcctgggggccgagggcgcttccccgtgggtgcgcgccgagctccaggcaagcgaggggcgcgtgtcccagcgtcgcgggccctagactgggctggcggtccaggtcccgcgggacgtcgagggtctgaagggaggtcccaaggggcgaggggaggggaaggggcgcccggccggacctgcacacgcgccgcggttcctcgtgggccgggccgagagctccggtgccgccgccgcgtacacccgcagccggctccggacgggcgaggggggcg

SEQ ID NO: 3105 - DNA, 103 bp, Homo sapiens
  chr4:1796866-1796969
  hyper
ccggcgcttgaatgtgcgtgtcattcagcggcgtgacaggggccgtcgggaggtcagcgcgcgcttttagcgtctgctcgggcggccccgcttccaggggtgc

SEQ ID NO: 3106 - DNA, 30 bp, Homo sapiens
  chr4:1811808-1811838
  hyper
gcgcgggccgggagcgccccctagcgctgg

SEQ ID NO: 3107 - DNA, 39 bp, Homo sapiens
  chr4:2043631-2043670
  hyper
aggttcctctaaacccgcggccagcgcagtctcgggttt

SEQ ID NO: 3108 - DNA, 278 bp, Homo sapiens
  chr4:2043956-2044234
  hyper
gggcttggacaagggtcgtggggcccgcgggaggggacgggggctcaccggcccggggcgggcggggcgggcgccgctgacccctcgctggcttcagggcggccccgctccctctgctggccatggcccccccgcccgcgtgccggtccccgatgtcaccgccgccgccgccgctgctgctgctgctgctgagtctggcgctgctgggcgcccgggcccgcgccgagcccgccgggagtgccgtccccgcgcagagtaggtgccgggggccgggttcc

SEQ ID NO: 3109 - DNA, 57 bp, Homo sapiens
  chr4:2060097-2060154
  hyper
ggccccaactccaccgcacaacgcagactgcgggtccccaggcctggacccctggcc

SEQ ID NO: 3110 - DNA, 155 bp, Homo sapiens
  chr4:2060173-2060328
  hyper
cggggaagctctgctccggcagccctcggggtggtgctgggaggtcgcgcagaactgaagggggctaggttcgagaagcgccgaggatggggtctgcgaccgcctccccgcacctgagcttctccgccccagcctgcggcgtctgcaggtcctac

SEQ ID NO: 3111 - DNA, 104 bp, Homo sapiens
  chr4:2061492-2061596
  hyper
ggccgagcaggaggcggcgcgccgcatcttctacgacggcatcatggagcgcatccctaacacggccttccgcggcctgcggcagcacccgcgcgcgcagctgc

SEQ ID NO: 3112 - DNA, 178 bp, Homo sapiens
  chr4:2061908-2062086
  hyper
gccagggcaggtagcgcccgccgcggctgggccccggcgagtgcctaaatataatctgcgggcgggggaggccgcctcccgctcggtgctaatttatgaggggaagacagccggcgccgcggggggtgcgcgcgcctggcacagccggggcggtcgcagagggcggccccttcagcgt

SEQ ID NO: 3113 - DNA, 30 bp, Homo sapiens
  chr4:2062493-2062523
  hyper
ggaagctcagagacccgccgaggctcattc

SEQ ID NO: 3114 - DNA, 49 bp, Homo sapiens
  chr4:2418949-2418998
  hyper
ccaagatctcagggcccgggcctccccgctgcgccggccccagggtgcc

SEQ ID NO: 3115 - DNA, 137 bp, Homo sapiens
  chr4:2419198-2419335
  hyper
cggcgctaggagaggcgcgggcgccggctggagagccgcacctcccgccccgccgaggctgctggccacgggcgcgctcgccccaagggccgggcggaggacctgtcccggattccagaggacgtgggtggggaagg

SEQ ID NO: 3116 - DNA, 104 bp, Homo sapiens
  chr4:2419628-2419732
  hyper
agtagggggtctgctccgggcccgcgggctggggaccacgaagtgtaggagggcaccgtccaggaccgggatgaggagggagaggggcccgttgtggccctgga

SEQ ID NO: 3117 - DNA, 31 bp, Homo sapiens
  chr4:2760070-2760101
  hyper
agccaccacgccaggccgccatgtgtatttt

SEQ ID NO: 3118 - DNA, 31 bp, Homo sapiens
  chr4:2965932-2965963
  hyper
catccccggagaaccccgatttccctggaga

SEQ ID NO: 3119 - DNA, 155 bp, Homo sapiens
  chr4:3445266-3445421
  hyper
gctctgggattaaccccggtgggtgccacttagggccagagcctctcccaggtgggacctgcgtctcatggtggctgcgcggccatcgctggggccaaggcgccgcctggtggtgaggccgggccctgcagccacacaggcgtgccccaggcagg

SEQ ID NO: 3120 - DNA, 31 bp, Homo sapiens
  chr4:3573649-3573680
  hyper
agtagggaaataaaaacgcacagcaccatct

SEQ ID NO: 3121 - DNA, 30 bp, Homo sapiens
  chr4:4250036-4250066
  hyper
cgctgtttagttagcgagcagctagggtgg

SEQ ID NO: 3122 - DNA, 30 bp, Homo sapiens
  chr4:4389100-4389130
  hyper
gcccttgcgcccggcgcttgggtcctgcga

SEQ ID NO: 3123 - DNA, 126 bp, Homo sapiens
  chr4:4854675-4854801
  hyper
tgcctgggccgacccggcgctttactgcttctcacgaaggtgcgccggctgctccagaaatcgcagactgcctccaggaagaacttgctggagtcacagcagcttctcagcgacttgacagcagtg

SEQ ID NO: 3124 - DNA, 198 bp, Homo sapiens
  chr4:4856358-4856556
  hyper
atacaagtcagttatcttcctcgcattccctcccaccccctgccggaactgagatggggcccacggcgggctgcgcagggcagagctggaggggagaagggccagccttcctccgccggggtgggcagagccagaatggaagacgtttggtcgaccctggagcctcggggtctgcctgacatctccgggcttaaataa

SEQ ID NO: 3125 - DNA, 768 bp, Homo sapiens
  chr4:4856593-4857361
  hyper
cgttacgcctgattggtctaattgctttgaaatgggatatattatctataattatagagctctaggagagccggccggcctctcctttcatcttcccaagtgcaccctcacgtcgcgatcacattaatttgggccatttgaaagcgaggggggaggctggggctctcttctcctgctgatcctggtcctgctcacccccttccaaatttaaagacacaaggaagcccgggcctgggacggtagggagagcagacagtgggggaagggggggggggtgggggcagaagccgggagtggggcttgtcaatttcgccttggcgccgggtgaaatccactccacgcggactgtaccaccgcacaagttgcacccactttgaggaggatttagcaagaaggaggaaacattttcacaaagagtttgtattttgacttcgctgttaaaaggaggtaccaaaactcctgaaaagcgcaagttctgcctaggtctccggaaagcagaacgctgtttttctccaggtctgtgtcgtggatcttcaaccagtagctgaagactccctggagttctcagggctcggagtttttctctggaacgctgtgaagtcctcccgaagttagtgactcccagtttgctgaacctgactcccagcccctcacttctaggcgacagaggccaaaagagtggagatggctgggtcgggaggcccccttcgcagattgggagaccccgtgacagtgctttctgtctgcccgtcaacccccaccccctcc

SEQ ID NO: 3126 - DNA, 152 bp, Homo sapiens
  chr4:4857407-4857559
  hyper
cgattggtgaattcccaccaaaataaatcgttccgggtaatcggttttcatagcacattcattctattaaagaggactgtttggggctcgctaattgccgggggatcccactgagctgcacatttttaaaaaatgcacgcgggattcctggg

SEQ ID NO: 3127 - DNA, 28 bp, Homo sapiens
  chr4:4857620-4857648
  hyper
cgacaacaaatgccgaagtgagaagtca

SEQ ID NO: 3128 - DNA, 62 bp, Homo sapiens
  chr4:4858044-4858106
  hyper
catgaattactgcccggctttctcggctgcagcggcagcgcagagaaatgccgggggtacaa

SEQ ID NO: 3129 - DNA, 30 bp, Homo sapiens
  chr4:4858467-4858497
  hyper
cggttaacctgccgcgcggggcgacagcag

SEQ ID NO: 3130 - DNA, 467 bp, Homo sapiens
  chr4:4862743-4863210
  hyper
gtggactccaggtgcccaaggcggttcgctccaaggcctcacggccccctggctgctctactcagagaacacgctcggagatatttcaggagcacgggaaattcccaagttttcctcgtttcctccgattattttgctcggcataatagcagccagatttcaatggcgtgatgctgaggaatgatttttatctggggattaaacgtctttgaaaggccagtccctccctaagcctaatggccggagaaggtggccccgctctgggttgtcgccgctgaagggagtgacgtttctctcggcgcccgcccctcgggcggcccggcggaaagctagttgggggccaagcgcttcccggactcccggtggcctccagcagggaagaagcggggtgttaacacgagatttcgtttgactcacatcctggtggtctgaaagtccaaaggatcgttgtgttttctttgttttgt

SEQ ID NO: 3131 - DNA, 30 bp, Homo sapiens
  chr4:4867824-4867854
  hyper
tttttgtttctgtccgtctagcccattctt

SEQ ID NO: 3132 - DNA, 13 bp, Homo sapiens
  chr4:4868779-4868792
  hyper
ggggctgaagacc

SEQ ID NO: 3133 - DNA, 171 bp, Homo sapiens
  chr4:4868828-4868999
  hyper
cggatcgctgaacccggggctgaaggaccagattgagcaggaggcccagtgaggacagttactggtgaggcaggggccccgagtgcgaatcctaccgctgcgccctccttagtgacccaaggccgggaggtgagcccagccgggtccaggcctgcgccccgcctagagccc

SEQ ID NO: 3134 - DNA, 126 bp, Homo sapiens
  chr4:4869131-4869257
  hyper
cgcatcgccccacagtggaacagtcccccggccccgacgccggactccctgggaagcccccgacccccaagtgccaccaccaagtgcccactctccagagcactcccaggcccccactccagactt

SEQ ID NO: 3135 - DNA, 21 bp, Homo sapiens
  chr4:4869481-4869502
  hyper
cgcacacgaccaacacacgtc

SEQ ID NO: 3136 - DNA, 30 bp, Homo sapiens
  chr4:4870467-4870497
  hyper
gggcgggtgtcgagtcgccgacctggagtc

SEQ ID NO: 3137 - DNA, 815 bp, Homo sapiens
  chr4:4870848-4871663
  hyper
gggctagcgcaccagcggggtgcaataaagatcggcctttgtgtgtgtgtggtgggggggaggagtggggggtaggtagttaaaagcgaattcaaaagcccgccctcaatttggggcctgattaggggcagatggaaggaagggtccccgaccctacgtggcagcctttgttgcacattttacaggcgaggagacagtggtgggatccaagcccgctgctgtgggacctcaggagttgctttctccttcaccagctgggtgcagattttgatgatgcacagggcgcggcctgacagtgcgtgtgtgcgcccaccgggcgctgctgccagagtttgcggggttcagggagcgggaggagggtctgagagaccccaaagcctcccctttgcgagaccactccttgcttcccccgcctggcgctttccataaccctctgcggcgccctgcctctttgttgccccttagatgagctgccccaagggcgggctggactctagtgctttgagtcgctgtttctctgacgatgctgcttttaaaaagaaaaccccgttccctctctgatgactctcgtggcacccgggtggcagcaggggcttctccaccggagaaacagccacatcgactaaaagggaatgtgtgaggcaggctgagaccttgggtggggccccccacctctcgagttttccaagactcaggttccatctctgttaaatggacacaatcctgacccctggcaggtcctgaaagagtagaagggaaggggttctccacgggctgtaccatcacttgcgtccccagttcggtgatggtggtga

SEQ ID NO: 3138 - DNA, 30 bp, Homo sapiens
  chr4:4872392-4872422
  hyper
taggtgtctaagacccggcctgtatttccc

SEQ ID NO: 3139 - DNA, 913 bp, Homo sapiens
  chr4:4872771-4873684
  hyper
gcttccttaaattaattcattcggcggggttgaacaagaccagcacactaagaaataacgaattcgggtagagctgaatgcttctaaggggaaaagtaacaagacgggggcaggaagcacagtcggagcctatttttggcggagcggtcaaggcaggcctctcggcggaggcgacttaagggttgagacttgaagggtgaggtggagccgtagtttgaagaaggaatctcccattgagaggggtcggcaaatgcaaaagccccaaggagagctgaggccggcgcggctggaaccggccttaggcgagtttggagtaggcttagcgttttgtgatgctctggcggccacttggaggagaaagatgggggcgaggtagaaggggccgcgtgcccttgtaggagagggaagtgtcaatggccgggaccaggggtggctgcctgagacgtgcctcgtctttggtgattcccctacccccaaatcagagagggttccggaagaaacttcgcagccttgcagagtgaagcatcgccgggacccaaggatgtttctcttccctacggagctcacccggattccttggcgcccagctgcggccccggagtccccgaactcggctgtgccagcccggggcggggccagctgaacctcagttgtggggcggagtccgttgcggacaccctcaccccccgggcaaccgcagctcccaactccgctggctttcccctccctctgacaccctgcgcggctcctgcgacccaggtgcgtgccagctgtaggagcctgctccgcctgccctcctggaacgcagtcatcctccaggccctgcccgcgcccatttcgcggcccaggaaactgaggtgtggaagcctgtgaagggagggactgctacctatcgattcgtaccggatccaga

SEQ ID NO: 3140 - DNA, 121 bp, Homo sapiens
  chr4:5052435-5052556
  hyper
cgtcctgggaacccgcgctcgccccacacgtcttggggcgcatctgccgcaccccttacttaggcacccgcaactgtggcgcgtatctcccgatccaggctcccgccgcaggagcccaggg

SEQ ID NO: 3141 - DNA, 876 bp, Homo sapiens
  chr4:5052845-5053721
  hyper
gcaaatacaggctagcggggagtcctgggactcccttcgcagccggggccgactaaccacagacctaagagcccctctacctctagacctccgtctactgcgctctaaaatatgaacgatgctttcttactgctgggttgtcggaggcggatgtgggatggtgctaacaaagcgcgtagccgaggcctggccatagtgggtgctgacaaaccgcttactgcctgcagggaccgagctcccggccgagggaggagggccgagcagggattcagattcttccgggccgatccctttctcagctccttccgccctgccgccgcccactgcgtgctgccttcgtccgtcccctcctcccccgctccttcccctccttcccctgctcccgcgccgcctcgcgtctcccgcccgctgtagccggcgaggagcgccgcacgttggccccggcgcgaggagctcccgggttcccgggcgggcactggagtaaggagctgcgagcgcagcccgaggcggggcacggcggaaggcgcggcgagagcggggtccctgcgagcgcagtcggaagggcgtccaggagaagggggacgccgtccccgcccctgcacggtgctcggccccctcgggctccgcgcgcggctacaacccggactgggcgcgcccccggcatcccgcatctctgcgcgcgtcccacatcccgcatccggcatcccagcggccgggcatgtagcagcggcagcaacggcggaatatgggcgggaaccactcccacaagccccccgtgtttgacgagaatgaggaaggtaagagagcgagaggtgcgaattcccgcttcgcggggcatccccttcctccaccaccctcggccgagccctgcggggc

SEQ ID NO: 3142 - DNA, 185 bp, Homo sapiens
  chr4:5709799-5709984
  hyper
gcagctgccacaccccgaggaaggtctccagtttccctcgaagctttctggccgtgagcgggatacacctaagggccgcgaagcaccctattcagatcctgccctcccttcctcattctttgcgaaatactaagggtcctccctgccaccgccggtgtagacaaagtcaaaccactacagtcaga

SEQ ID NO: 3143 - DNA, 1 bp, Homo sapiens
  chr4:5710450-5710451
  hyper
g

SEQ ID NO: 3144 - DNA, 406 bp, Homo sapiens
  chr4:5712825-5713231
  hyper
ccggggctgggaggcgcgtctgtctctgggcatgctcagtgcaggggcagggctggggcgggggtggctgaaagttttgagcggtgatccaggctcctccctccggctcggcgaagcagggaaggggagagaagcaggagtcgggagactgcacaggccagaaagtctgcggagcgggccgcgcccctggcccgcccgggctccaagtcccgcgtcgccgccctggcggggacggtgcagcaggcggcgggatgcggcggggcggcagcctgagcgccccggatggcccgcggcggggcggcctgcaagagcgacgcgcggctgctgctggggcgggacgcgctgcggccggcgcccgccctgctggcccccgccgtgctgctgggcgccgcgctcggcctcggcc

SEQ ID NO: 3145 - DNA, 36 bp, Homo sapiens
  chr4:5713393-5713429
  hyper
cgcacgcaaccgcttaggcgtcgggttccccttctg

SEQ ID NO: 3146 - DNA, 401 bp, Homo sapiens
  chr4:5889212-5889613
  hyper
ctcagctccccaccccgagacaaagcgtaaagacggggattcctttgtttccggccacacccagggacgcagcccggctgttctgcctccaccaccgtccccaccctctcgcggcccagcgtcgggaacattaacccttcccgggccgcagccgccagcgtcgccccattaggttatttttagctgcggggaggggtggaccgagcttccatcatggcgctgtccctaggtccggacttccactccatcagtaaaggcggggagtggggagcgctggatgatctttttccctcctccagcgggggaggtaccgggctgtggggtgcatgggccggacggtgcgggggccgagccaaggaggctcagctcaccctcccacccccgcgcgaggcctgcgggga

SEQ ID NO: 3147 - DNA, 794 bp, Homo sapiens
  chr4:5889852-5890646
  hyper
ggggggcgcccctgccggcgccccgtggatctggaccctgccgggcgcccactcccagcccacaaaggccagcgcggggcggcgggggcgggggccgcttaccgtgatgtgcgggatgctcttcttgccctggtacgacatggccccctctggcgccctcggcccggccgctgacctgcggggctgtctgactggaaccggcgctctcggccccgctcccagcgggcgcgctgacaaaggcccgggagggatagagacacggacggaggctcggcgcccgtggatgcccacgcgcggctgccccggctgctcggcccgcccgccgccgctccggctgccagcaccgcccggatcggcgaggagggcgggagaaggaggagggagaggcgagggcgggaggagggggctgcagacagctcctcccggcggcgcggagcgaagccggattcgcccctctcggctcgaaccaggaagcgcttcccttccgatctcccaccccgccccccgccccccacccgcccagccccgccgacccccgccctgcgcacacgcccttggcgggccctggcctcgctctcgcgatccagagagtatggttttcagggctcctttaaaagaaaaagacggcgcggtcagggcccgcgggcggcgccacaggtgtgtggccgcgcgtctggaggcctccccggaacatctgcgggggtgtggggggagggagtgtgggacgggggccaaggatcggcccaagctgctgggaacgttcttgtccctccaggatcgcgcccaaggaccgc

SEQ ID NO: 3148 - DNA, 30 bp, Homo sapiens
  chr4:5891818-5891848
  hyper
tccctgtcaatgaccggaaattgcagatgg

SEQ ID NO: 3149 - DNA, 24 bp, Homo sapiens
  chr4:5892057-5892081
  hyper
caaagcgccgcagccgctcagcct

SEQ ID NO: 3150 - DNA, 420 bp, Homo sapiens
  chr4:6200872-6201292
  hyper
aggccaaggacagtgtgcctgcgagtgtgcgcagatggggcgggcggcggaggagggctggcggttagatacagtatcgctggagctcagagagccgggcagaggctggcggagagccgaggctggcccagccttcaggagaccggcgagctggggtgtgtgggagcgggatgcttctaaggcgaaaagaagcgccagcctcgtaagcggcctctatctgggctgcccaggccggatgctcaggagcccacagcaggggggatggagcgaaggaccgaggggctgggaggcgaggccgcagcgcactgacgcaggccagcgaggccgctggccccgacgcagggcgcccggcaaggtgtctggcaccacgagagtcaatccttgcgcgccatctccggaggccagtgcgcccagggcgcg

SEQ ID NO: 3151 - DNA, 1224 bp, Homo sapiens
  chr4:6201349-6202573
  hyper
cggcgcccacgtgggcggagcagcgcgagggtgtgcgtggcaggggccgcggcggcgtgtgccgtgcgtggggtggggtgcgggctgggcggcctcgccttcgggccccgcgccgccggggcgcggcccccagctccatcttctttgccacctgggcggagatctgggggactgtgacctaccctgcggaagacacggaggggacgggccggccacaccccccgcgccactccggcaggcaccgggtgggtccccctcccgctccttggcttgagggcggaatccggagaagagtggaaataggggtggcgtgaaggagagctgggggctgggggcgggaccgggagggggtgttgggggaagcgacgcagcggctgggagattttgcaagggggtctgaagaggagtgggggatgggtatggaagggtgggggaccactgaggtgggatgcgagagtggaagggggacccagagggggcgcgatggccggaggagggggagatggacgatggggcggggcggcaccggtcgccgcgtcccttgccgccaggtccgcccctcggtcgccgggtccacgggttccctctggccagcgctcgcctcccgccccccggcgcacctgtacccacctgctcggcgctcaggcccgagccgggcagcagcagcggacgtagcgagcgcagccccgcgccgcatcctccggccgccccctccccgctgcgagcttacgccgctgtcgccgccgccaccgccttaaaaaggacaaaacggaacagaaaatgaatgcatgcacaaaaaaaatcgtaaaaagcaattgaggaggatggcagtcgcgcgcgcggctcggcggggcgggagtcgagaggccgcggcactggtggccgcgatccgggcaggcggccggcgcgtgccgcacgcgggtggctgcagctccctcggtcgcccgcgcccggctcaggcacggcaccgcccctccccccggggagcccctccgattggtctgtcttcctgccagtcaggcaggagggcgcggcgcccgccccgccccgcccccgcccccgccccgggcagatgccgggagctctcctgccgccgtgggagggggagctgagctgccggagcgtgcgcactgggccagcgggcggccggggcagggctggggtcccggcgctgagcgcccccagccgcgccgggcagcctggcgcctcgctgagtcggagcaa

SEQ ID NO: 3152 - DNA, 39 bp, Homo sapiens
  chr4:6223660-6223699
  hyper
cgggggcggggctgcccggagcctcggccccgcccaccc

SEQ ID NO: 3153 - DNA, 441 bp, Homo sapiens
  chr4:6271572-6272013
  hyper
cctcgtgcagaaggccgcgctagccggctcttcagcagcgagtgcagattgctcccccgcggccgcagatctcccgtttgcgccgcgttcagctgctcccgaacaacttttctgccggcccagaggccccagggcgtcgcagcgccgcgtgcggcccactcacgggccggtgagtacttcggcgctggggcagtggcgcggtggctgtgggcagcgcgcaggaggcgggcaagagccctgaggcactgtcctcttcgggcctcagtttccccttccgagctgatgggtggctggccccaaagtcccgacaaggtccccgaagttggagggccgggggtcccgcccgctctgcaacgcgcaaggcgacccctgttccgggcccgaacgggtcacccggggggcgcgccccggtcccccgcgcgctgtcgcctggagccccgc

SEQ ID NO: 3154 - DNA, 30 bp, Homo sapiens
  chr4:6473866-6473896
  hyper
tcagacaacacgtacgttaccttcagtcac

SEQ ID NO: 3155 - DNA, 31 bp, Homo sapiens
  chr4:6890788-6890819
  hyper
ctggcccaggagcacccggcagaggtgtgag

SEQ ID NO: 3156 - DNA, 31 bp, Homo sapiens
  chr4:6897665-6897696
  hyper
tggaaactggaattcccgagttttcaaggcg

SEQ ID NO: 3157 - DNA, 31 bp, Homo sapiens
  chr4:6989299-6989330
  hyper
tgtgtctgtgtttccacgtattttcttctgg

SEQ ID NO: 3158 - DNA, 30 bp, Homo sapiens
  chr4:7069896-7069926
  hyper
ataattgtgggtcacggaagagcatctttc

SEQ ID NO: 3159 - DNA, 30 bp, Homo sapiens
  chr4:7194826-7194856
  hyper
gtgcactggacgggcgagaacagcagcgta

SEQ ID NO: 3160 - DNA, 680 bp, Homo sapiens
  chr4:7940411-7941091
  hyper
ttccactctccaggcgctgagagctacaaagttcaatctggctttccagattttttttttcttcccattactaacggaagaaatcaagaagctccgggcagtagggccctgctccctccaatcagagcccagcccggggccagagcaggaagcgcggcggtgggacgcgcggtgacagccccgcgccccccggggcccgccggccaggggagaggacggtgcggccgctgcgcgacagctccgggcccgcgcctctcgcttccacccgccgggcaggtgagaggataaatcacggggcggggcagtgcgcccccaccaaccgcgccccccgcgcacggacccccattacactcgcgtcccaggcggggtcgacccagacgagccacggggcggcgcagagccccactcgcagggcggccgggacccacgcgcgtgggtccacgcaacaacctataggtgacaaaacactcaggaagccgtcatgcggggccaagaaagagcccccatccagagtcacggaccccctcgtccgagggtccgcgcagtcccctcggtaagtcggacgaagcagtctcgctacgggggagggcggcggagcctcccactcttggtgacccggaccccgccccacgagtgggtcttcgcagggccccctctgacgcacacggggaccagccacg

SEQ ID NO: 3161 - DNA, 650 bp, Homo sapiens
  chr4:7941129-7941779
  hyper
cgcagtcccctccgggcagacgcggggagctggggagcagtggggaccggcccccacccgcaggacgaccgggacccccgcgcgggcccacgcggcgtcgcagcaggcgcggagcccccggtaccacccgaggccgagacaaagcccaggcgcacggaccccggaccctgcggagccccgctcggagcttccacgcccggggcagagacccccgccgggtccggagaccctgccgccagtcgcgccgtctcacctcaggccgccacctcgcagcgctcgctcctcgccgcggcgcctgggccgactggagcgcagctgaacagccgacagagccgcagccgccttaacaatggagccccggggcggggccgccgccgccgcctcagcccgtgtaccccgctcgagatccggctcggctcgcggagctgcagccggcgtggggctgcggccgggacagacaccacgcaggcgcacacggccccgcccgccgcccgccgtcccgcccccagcggagccgggcgcccagggcccgccccccggccaatgggaagcgagctgcgcggagtgggcggggcctgagggaacaaagggaggttgggcggggcggtgctgggactgggcttgcggggtcccgcgggaggacccgcctc

SEQ ID NO: 3162 - DNA, 64 bp, Homo sapiens
  chr4:8159784-8159848
  hyper
tcccggagggtgggtgcggcgggaaaggcaggggtgcgacgcgcaggggcgaggggctggagac

SEQ ID NO: 3163 - DNA, 281 bp, Homo sapiens
  chr4:8160073-8160354
  hyper
gcgcggaccctgaccgctttctgcagcctggaacaacccggacccccgtgagaagcaaagaaggggcgccttccagacatcctggcgcagccacgccggccggcgcgctgggaaaggatccccggcccgcgccactgagctacgcgctccgggcgcagggcagagggctgcgctctggcccctcggggctgcaaaatcctggagcaaaagttgggtggagccgctgggtgattttccccggcgttgcaggtgcagcctccgaatgccacccagcccttgcg

SEQ ID NO: 3164 - DNA, 272 bp, Homo sapiens
  chr4:8201024-8201296
  hyper
ggagacagccccgtggggccagccagcgctgggccaggagcggccacctggttcctgcgtgctacggccctgtgggcctgggagctgcctctgaggaacacgccgcaggtatggggggctccggggcaggcggggcgtggactggccgagcaggctgctgtctgccagtcttgccatggttggatctttacactttcttgaggacttttctgacctgtttgggatgggggtggagcgaaactgcgagctgggggcctcggggaggtcgtcgg

SEQ ID NO: 3165 - DNA, 218 bp, Homo sapiens
  chr4:8271304-8271522
  hyper
tttctcgaccaggccgaccagagtcccaaggcctgccgggtgggtccaggcccggaaggccaggcggggccctgtcggggcctgggcggggctggcggaggggccgggccgccccttccagcgagggcgggctgggcggtcgcctttaaaggcgcgggacccgccgcccgcggaccgtcaggctggagggagctggtccctgcgctccctgcgccctg

SEQ ID NO: 3166 - DNA, 30 bp, Homo sapiens
  chr4:8313111-8313141
  hyper
ggagagttcggaggtcggccatctgcaaaa

SEQ ID NO: 3167 - DNA, 30 bp, Homo sapiens
  chr4:8313537-8313567
  hyper
atgcatggcacagcacgtgtgagtgtgcaa

SEQ ID NO: 3168 - DNA, 30 bp, Homo sapiens
  chr4:8582095-8582125
  hyper
attcccgcccctaccgcccctataagccac

SEQ ID NO: 3169 - DNA, 31 bp, Homo sapiens
  chr4:8594321-8594352
  hyper
ggcggggcactccgcccggggcaggcagggg

SEQ ID NO: 3170 - DNA, 31 bp, Homo sapiens
  chr4:8594372-8594403
  hyper
cctcctcctcccccagcggcatcctctctct

SEQ ID NO: 3171 - DNA, 132 bp, Homo sapiens
  chr4:8609442-8609574
  hyper
tgttcctttgagctccgccccgcgcctggcggggtccccagtgcttcccaccgcagaggggtgcgtttccgggaggcgccggcagagggcagtgctgcagcgcgcatgctgcccgcccgtcctgcttcccgg

SEQ ID NO: 3172 - DNA, 31 bp, Homo sapiens
  chr4:8862780-8862811
  hyper
gagacggtgaagaggcggggccgagtcgcgt

SEQ ID NO: 3173 - DNA, 94 bp, Homo sapiens
  chr4:8863143-8863237
  hyper
gaccccgactcgggccggtcagaagtagggagaatcacgctcgggaaaggggggtagggaacgacgggggagcctcggtgaccagggcagatgc

SEQ ID NO: 3174 - DNA, 203 bp, Homo sapiens
  chr4:8863323-8863526
  hyper
cgtaggcggagccccgggggcacggccgaggctgcgcttcaggagtgtccgccaggcgccttcccgggcggttggcgaaacccgaggaggcccacagctctggcctggggcgccgtcgttccaggggcctctgcgcctctctctggcgtctgtctggaccctcagagccccgggatcaaggcgcccatcctcttgatggcggg

SEQ ID NO: 3175 - DNA, 39 bp, Homo sapiens
  chr4:8863856-8863895
  hyper
ggaggccgggaaagctgcgtggaaaagaggaagggttaa

SEQ ID NO: 3176 - DNA, 30 bp, Homo sapiens
  chr4:8893445-8893475
  hyper
tgcacgtttgaaccccgcaaagccactgtg

SEQ ID NO: 3177 - DNA, 41 bp, Homo sapiens
  chr4:8893684-8893725
  hyper
tcctcctccccagctcggcgtttgcagccccgctgggccgc

SEQ ID NO: 3178 - DNA, 313 bp, Homo sapiens
  chr4:8893815-8894128
  hyper
cgaagctgcgagttgtctcgggccctcccggagctgcgggcggctcctcgagaaactcagagagcccaggcgcaccacgggccagccaggacatccccaggcggccctgttagccccattttatggaggaagactgaggctttgggttgcatgggacccgcggttaccccgcaaacacagacgcttacgaagacgctatcgcgagccgaacagtctggaggaactacactcacagtagctcctccactgggtctccgcgtcctcgctggcctaactccgcaaacacgccctccccggacgcaggctgggtttg

SEQ ID NO: 3179 - DNA, 627 bp, Homo sapiens
  chr4:8894330-8894957
  hyper
ccgggttcccgagagcggcggggggtccaaaggcgcgggcaccgatggcgggcggggccctcctgggtcctctgcccgccgccacccctcggcccaccccgcccgcagcatctgcgcgttttaagccggataagacgcttccttccctgtttgtctgggtttctttctcggttgctcaaggctctgatgtgacctctccaagaaaggacaccaatggccgcgcccccgccccacgacgctgcggacagcaagccgactccccccacccggccgcctgccccctccccgcgtcggtgcgcgccttggctccgggaaacgcctgcctccggtcggtctagcgcggcgtgtgcgagtgcagcccccgcggggacgtgggcaccaacagcaggcgagtgactaccgcggcgcagttcccgaggacccagcgcctctcccgaggccaccctcccgggcaggaattactgtctgccggcccgaagccgccaccccacccgccgccctgtttcaaagttggggagagtccatgccgcgacggagcgagcagacttggacatggtcgagtgcctggtgcgcacgattggtcttaagagtttagggaaaaaagcacgcggggaaaccacgcggggc

SEQ ID NO: 3180 - DNA, 544 bp, Homo sapiens
  chr4:8895231-8895775
  hyper
cgcccgcgctaccttcctgccctgtggcctacctgggtcccccttacacctctgctcggtgcagccctgagcctcggtttcccagacggcgcagctgaggctctcgaggtgacgagaggctgtgggggtgaggtcgcagccctgctccctcctcagttccgccacccaccccttcggtagtaacgccgttctcaaaatgggcccagggccccttccggccaaacacagcctggactcctgggcagagaccgagcgcggcagaggtggcccgaaggccgggttgcgggggatcccggcctctgcccaactgccccggaatctggcaggcagacacgctgcgccactggggacaatgcgaccccaatgagctggcgctcccctctggcgaaggaccaggtggcgaggtcgcccctgtcgtgtggcccaatgcgttaccagcaagaacaaagtcccatcttaactgctcttcgcgcggcttttgaccttgggtcggggctgcgtctcagcgctcaacagccccgcttctccccacggttttaaatta

SEQ ID NO: 3181 - DNA, 133 bp, Homo sapiens
  chr4:8895964-8896097
  hyper
cgcagccaggtttctccgctgccgtcctcttccagggccaaggggccgtggcagacccggagcctcccggaggcgcttctgccggggcggattatctcccctctcccaccaggccccggcggggggcaccaac

SEQ ID NO: 3182 - DNA, 87 bp, Homo sapiens
  chr4:8896117-8896204
  hyper
cgctggaactccccctcctggccccctcctccgcttctgtttgtttaaccttccggcagggcggtgaccctgcgccctgccaggcgc

SEQ ID NO: 3183 - DNA, 31 bp, Homo sapiens
  chr4:8966280-8966311
  hyper
cccactgggggcggggcgaggtgtccgtagg

SEQ ID NO: 3184 - DNA, 75 bp, Homo sapiens
  chr4:9534313-9534388
  hyper
gggaggctcagtggccggccccgggttgaagttggtaactgagcggcaactccggcgggcgcggagttacagctc

SEQ ID NO: 3185 - DNA, 210 bp, Homo sapiens
  chr4:9684932-9685142
  hyper
tatccctcaagtggcccggaacactgtgattactgcacaccaatcccacgcccataaacctggtttatgacgttttgtaacagggtatcttgacagtagcatgaggacatttaacgagacaagaacattccccactgaccagccagatggtttgagggaacaggatgctgtgctcagtttaatattctgctgaaccgaccattagccaga

SEQ ID NO: 3186 - DNA, 44 bp, Homo sapiens
  chr4:10089889-10089933
  hyper
taggccgggaaacacgctcatactcactgcgtaaatcccaccgt

SEQ ID NO: 3187 - DNA, 210 bp, Homo sapiens
  chr4:10090159-10090369
  hyper
cagatgtggggagggcgatgtctaagttctgcatgtcaggactagcattaggcagcctgcggctctgagcagtcacgggagcaggcagacaagccattccccaccccaaaacccatcccagttcttacctggccgtcagcactggctgtggcaaatctgttcccatcaggagagaatcgcacacagttgacaaagcggctgtggtcctgc

SEQ ID NO: 3188 - DNA, 816 bp, Homo sapiens
  chr4:10458388-10459204
  hyper
gtcaacgctcagctccgaggcccgcaggaggctttaaaaatggcctcctgacgacacttcctgctcggcgcggacggtaggagccctcggaggaggcatccttcataacgctgggggcggggagcgcaggccgggccagcggcgccacacgaacggccccgcgggacgctgccacccccgcctcggtcgccccggcgcgtcggccgagtccgcggggtcgcggcgcacaaaggcgagctgggggcgccgggccggaccccgaccctaggccaggcccgcgtacctgctcaacgcgcgccaagccgcggcccgggcccccaccccagccggtgccccacgcccaccagccggagcccgcgttcggcctacccggtgccacttgccacgacgccagccctcagcgcgggcacgcggggccgcggccgctcgacccgccccggcctggccccgtcaggcccccgccccgcgcgcccccacgacccggccgcagctggcgcttcggtcacgtacacgcggatccgggggccctcgccctcccgctcagctacttacccggcaggccggattcgggtgccaggtcccggcgaaggggcgtctacaccgccggccgcagaccgccggcgccgcgcccgctgtaggtccctacccggggggcggagcccgcgccagccccgcgcgtgcgcaatgtgaagcggcggcgcggctccagcgaggccggcgcctgaggtctctaaggctgcgcccgcccccgccgggcttctaagctgtccagagcggggagcctcagacccagccgagccccacttctgggcttag

SEQ ID NO: 3189 - DNA, 107 bp, Homo sapiens
  chr4:10462940-10463047
  hyper
actcagctcggccgccgcggctgccgcggaagcgcgcagtgaggctagtggggccacgagcggcgcgctgagcatgcgcgcccgatagagcctcgagatgcgccggg

SEQ ID NO: 3190 - DNA, 345 bp, Homo sapiens
  chr4:10463072-10463417
  hyper
cggcctgcagtgtcgctgcgagcccggctggcccagctcggcgtgtagagctctaccccgcgcggcgggcggtgcagccccgcgctcacctgggcgtcttcgctcccgctcgccccgcgcttccgaaaatcgggaatgtaatgttttgtttttacattccaatttgctccctccccaggctggcgtggaatccgagggttcctgatgactgcagctcctcgcccctcccgctgtgttcccgccgcctctgggctgaaagcgccatcaggacccgtggcgcgtgggctttgttaagtcattaactgcttgggacatagcaggagcatggtgcgcggcacagaacag

SEQ ID NO: 3191 - DNA, 31 bp, Homo sapiens
  chr4:10577054-10577085
  hyper
ggtcttccctgactaccggtgtcaagcaaaa

SEQ ID NO: 3192 - DNA, 317 bp, Homo sapiens
  chr4:11429393-11429710
  hyper
agagcccagcacaccccatcccgcgccggcacccggctttggctccagcttcttcttcccatcatccgcctacgttctgggtctgtcctccgcttcctgggacaggctggggctagaaggaggagcagcgcgccgtccgccccctggctggtagagcgcacctggagaggtcaagctccgcgaataagacccttcctgggagctggggtctaggcgttccaaccgcgggttcgcaccccgccatccctcacctccatccgctgccactacccaagggcccggaaatagaaaaccacgaagggggaaaaaaatcagta

SEQ ID NO: 3193 - DNA, 903 bp, Homo sapiens
  chr4:11430373-11431276
  hyper
ctgggccatgggcagcactgccgagcacccgcggcgggtagagcaagtttctggatggcccggggcaggcgggcggggagaaggcgcaggcacccactgagacccggctgtcgtggcggcgactcctggctgccagggcgcagaggaccttgcaggcgggcgttttggtgctcaatcccgaggagggggaggagcgggaggaggagcgggagcaaaaggaggggacggaggaggccgggcccggagggagagcgcgttgggcagaggaggatcgcgagcgcccactgctgcccggcccgctcgggtgccgcccagagtccggcccgctaggtgcctggtgctccgctctgcgctcagctgctccgcacagccccgcctggcacgcagctccagcggctggtcgggtagtagtcggtcccgcccacccggtgcggtggcccctggggtttcagtccaaggggagggaccagcgctccaagaaggtgaggctgctgggatgggtgactccgccgtcactgcaaacacgggacgtcccgtctactcccttacgcctgcttggtctgagcccgagtctacctcttctctaagtcgccagctcggcacttgtacccgggacctgtgctcctcccacgtgagtctgcaccatgcgtattcccttcctggcaggtgacccaccttaggcgctggcgctccttccgccccccgggaagcaggaggtgccatcctctccaattcgctctgcagccggactgggaccggagcggcggcctgggccagaatccgcgtgaggagccggcttcaaagagcgccctgtcgccattgaacactccttttcctttggtttagcgtcggagagcggacgccaatttgccaggagagcgcggaaaattcagcttttttttt

SEQ ID NO: 3194 - DNA, 30 bp, Homo sapiens
  chr4:13524026-13524056
  hyper
actggggagaagcacgttccaggtgtgggt

SEQ ID NO: 3195 - DNA, 30 bp, Homo sapiens
  chr4:13530079-13530109
  hyper
gaggccctggtagacggggttacgtctcta

SEQ ID NO: 3196 - DNA, 30 bp, Homo sapiens
  chr4:13537744-13537774
  hyper
gaactcgtcacgcacgttcacgcaagcttg

SEQ ID NO: 3197 - DNA, 220 bp, Homo sapiens
  chr4:13546277-13546497
  hyper
agacgctctcctttcgcagctcagctggattatctcatcgcttctcgcccttaggggcgggctggggtctgccccctcgggggacgtgaaggaggattggcgggggcccctccgtggcagcagtcccctcccgagcgccgccggggcgcacagcccgagtcactttttctttgcgcgtctgtcccttcctcgcctgcaggatttcgctcctggcccgtcc

SEQ ID NO: 3198 - DNA, 851 bp, Homo sapiens
  chr4:13548791-13549642
  hyper
gttgtatgcccagagatatcccggcgtaactacggagtccaggcccagagtggcggtgtgtggcgaaggcgcagcaggcctgcgcctgtcggaggacggcagatctggacgcgaccgcgcgggcgtgcctgggtcccgcttcctgcccatcgagggcgacttccttcgggctcagctgtgagctccaggaactctgcaacctcccgacgggcgccacgctccggcttgggccggcccgggagttggcggagctgcgcggcccggccgggcggccggtgaggctttcgagaggcaccgggctcgctcagcgtccgcgcctctctaccccgccgcgccccctccgcgcccacgggcccattttttcctagtcttctgcctctcttccttcttcctccctcccctcctcctccacacctttgtcttcttcctcctccctcctcctgcttctcctccgcagtttggatcctacgggccccctacgtgccgcgcccttcggtccccggaaccgcccgggctgggggtgctgctgcgcggtgagacttccgcgggcggcgggcggagagcgggatttgactgcgaaagccaagggggcggggaaggggaagccccggccctcgggggcgcgcagtaaactgctgcacacgtgcccgcgctcccgaggggggcgcccagtgggctcgggatttcctggctgcgccaccgcgcgcctcgcccccgacgcccgccacctgtgccctgggccgccttccctgacgccagcggccggaggtcgcgcgcgccgggtgctgcccagcaacgaaaggccatgcggggttcgtccctcagatgccggtgaccttgattgaagtcac

SEQ ID NO: 3199 - DNA, 30 bp, Homo sapiens
  chr4:13550574-13550604
  hyper
gcgcggttctgagacgtagccaagcgacct

SEQ ID NO: 3200 - DNA, 34 bp, Homo sapiens
  chr4:13655882-13655916
  hyper
cttcctcagtagagggcgccggaggacaccgcag

SEQ ID NO: 3201 - DNA, 30 bp, Homo sapiens
  chr4:13669550-13669580
  hyper
ctctctggttcatagtgctttcttgctgtg

SEQ ID NO: 3202 - DNA, 164 bp, Homo sapiens
  chr4:16084654-16084818
  hyper
aggggtgcatgctttctcccacggacgcggggagatggcctcgctttgtacccccatatccctactcccgctgtggtcggctgcacagtgttggcccatttccgcactcagccagggaagctcagcgcctcacgtccccggggccatccctagagtttccttta

SEQ ID NO: 3203 - DNA, 135 bp, Homo sapiens
  chr4:16085166-16085301
  hyper
cgcagagcgaacccgtccactcctcactgtacacccccagtacagtggaaggagtgcgctcagccccgcgcctggtcagcagatgcctctctcgctccgggatgaggacccagctactcaccgtgcacccggctc

SEQ ID NO: 3204 - DNA, 250 bp, Homo sapiens
  chr4:16085351-16085601
  hyper
cgccagaccctggctcgtgaattatttatgacccggcttctgggaccaccgcgacggctttcggagagcccgcctcccactgccggccgcggaggggctcaggcggcgctgcggccggaccctcggacgtggcgggaggcaggagaaaggcccgggtgcccggggggacccgttgcggcttcctctgtcccggacggggacctaggtatggggccgccgtaatggaaaggattccttaaacatactcacc

SEQ ID NO: 3205 - DNA, 139 bp, Homo sapiens
  chr4:16228990-16229129
  hyper
cgagcgtggtgtcgagaccaccaccagctggggcggtgggagcgaaggtgccccaggctcggggaaggtggaaaccttttccccgctccccaagtgattgttgcgcgctccggtgaggggacagtggtacctcgatttc

SEQ ID NO: 3206 - DNA, 9 bp, Homo sapiens
  chr4:17578853-17578862
  hyper
cacacgaat

SEQ ID NO: 3207 - DNA, 30 bp, Homo sapiens
  chr4:17812558-17812588
  hyper
gggaattatttgaacgttcgagcggtaaat

SEQ ID NO: 3208 - DNA, 30 bp, Homo sapiens
  chr4:18024246-18024276
  hyper
ttcggtattcaaggcgaagagatctcggaa

SEQ ID NO: 3209 - DNA, 493 bp, Homo sapiens
  chr4:20253563-20254056
  hyper
ggagcttggcggcggcggtggtggtggctgccgcagactgtggttaaaaaaaagaaggcggcggcggcggcggcggcggaggcggaggcagctgcgaggcatgggagcgccgaagcgcccaggcgcaggccgaagctgccgcgctttctgggcacggcgggagtgctgagcagaaaggggagcgccgggggcccgcagccggctccggaggcgcgggccgggtttttgtttggctacgctgagcgccagtcagccccagcgaacaactccagttacgacaacaacccaccttccttccagacaagcgagacttgggctgctgcgtccgtcctattgtttagacacttgccaggggctccggagtcggcagagccaccgagtccccgctctgagtcgtcgccctccctctccccgacctcgctccctggagcgggaggccaggaaagcagcgggagaggggaaggggctagaaggagaaggactacccgggact

SEQ ID NO: 3210 - DNA, 295 bp, Homo sapiens
  chr4:20254239-20254534
  hyper
cggctcttgtttcttctacctttgccatcaggtgtctgccgcggagctgcggcttatctgggagacgagcggggttgacacgcgcgcacacactactgccattcagctgccgcctggctctgcctggagtagtggatcccacccgcccacctgccaccgagccattctccagtacgccccagcaggacgctgacacctccaaccttggcctttgcctttccactccttccggtctgcctggtttttaagtccgcccccagtcagtccccactcagtcttcgcagcagctctcatc

SEQ ID NO: 3211 - DNA, 30 bp, Homo sapiens
  chr4:20255046-20255076
  hyper
ctccccacaacaaccggcccctgcatctta

SEQ ID NO: 3212 - DNA, 46 bp, Homo sapiens
  chr4:20255321-20255367
  hyper
ggcactctgggttgctagccccgccgggcactgggcctcagacact

SEQ ID NO: 3213 - DNA, 296 bp, Homo sapiens
  chr4:20255524-20255820
  hyper
ggcgcagtgctcttgctcgggcagcacagtggactgtcacgggctggcgctgcgcagcgtgcccaggaatatcccccgcaacaccgagagactgtgagtatgcgctcttcgtcttcccctctccccatccgggccgcgcacccctgcctccactggaggaacctgtcagctcagggtcctgtgcctggggcagccctcgctagctctcccccatgcacatcctggggttgagctctccgggagggcactggccagggaagggcctctgtccaaggaggggcgggtccgctggcagc

SEQ ID NO: 3214 - DNA, 139 bp, Homo sapiens
  chr4:20256146-20256285
  hyper
ctgggggtgcttctcacaggtcgcggggagaagggtgccccaggacggcgacacctcgcatagtagcctcgcgcagccccccgccccccacttctccggggaggggaagacggcgtcaggcccctagggacttgtctca

SEQ ID NO: 3215 - DNA, 194 bp, Homo sapiens
  chr4:20256382-20256576
  hyper
cgacccggcggtgcccggctgccccctccggcccttcctgctgaacccctgcgtccccatccacctttctggcagtttctgcgccccttcacgtggcagcagttcccctgccttcccctcttcgcgctccgttgctcgcagacgtccccgcctccctgtctttgcgagtctctaatgaagaagtaaatgcagac

SEQ ID NO: 3216 - DNA, 96 bp, Homo sapiens
  chr4:20256841-20256937
  hyper
gctctgacccgcacgtctccacccgcgcagcccattgcacttcaagtcgcccttcttatccaacccatttctctcgcccttagttttaaggcccaa

SEQ ID NO: 3217 - DNA, 31 bp, Homo sapiens
  chr4:22516749-22516780
  hyper
gaagcagaaggactggcgcttgcaatcaagc

SEQ ID NO: 3218 - DNA, 118 bp, Homo sapiens
  chr4:22517213-22517331
  hyper
cacaccaccttgccctcggcggcgcccgccgccctgccagcccctcggggccgcccatcgtgcttgcagccggcgggcagcgccgcggcgccgccgccgccgccgcctcccagcagcg

SEQ ID NO: 3219 - DNA, 30 bp, Homo sapiens
  chr4:23890875-23890905
  hyper
gccaccgacgcgaacggaaaaccttgcact

SEQ ID NO: 3220 - DNA, 30 bp, Homo sapiens
  chr4:24585266-24585296
  hyper
actataaactcagtcgccccaaaacaccag

SEQ ID NO: 3221 - DNA, 31 bp, Homo sapiens
  chr4:24914463-24914494
  hyper
ctctcagtccggtcgccgttcatggcctcct

SEQ ID NO: 3222 - DNA, 111 bp, Homo sapiens
  chr4:25032045-25032156
  hyper
agaggcaactccctcgcggcggcggacgcagggtggggcgggacgggatgggggctggaggggtcccactcacagggagctgatgtcgcccggcacgatcctgggcaccca

SEQ ID NO: 3223 - DNA, 30 bp, Homo sapiens
  chr4:25162005-25162035
  hyper
cagtggcgaataagcgggagcactagctcc

SEQ ID NO: 3224 - DNA, 30 bp, Homo sapiens
  chr4:25235354-25235384
  hyper
tgtcagggagaagccgcttttggttgcagg

SEQ ID NO: 3225 - DNA, 30 bp, Homo sapiens
  chr4:25378959-25378989
  hyper
cttgcaggtacaggcgcggtcggggctcct

SEQ ID NO: 3226 - DNA, 65 bp, Homo sapiens
  chr4:25656815-25656880
  hyper
ggatgtgaaacgagcgcagtggtttgccaaacccgcagcaggcttaggacggagtggtgagaaca

SEQ ID NO: 3227 - DNA, 67 bp, Homo sapiens
  chr4:25657388-25657455
  hyper
gaatgtgcgaggggcgtgatgacagcggccagcctctttgcgcaacaccttcgccatatatacccgg

SEQ ID NO: 3228 - DNA, 101 bp, Homo sapiens
  chr4:25864189-25864290
  hyper
ctagcagcggcgtccccgccccgcgtggcgggtgtccccggccgcccccacccgcgtccccggggccccgcgcggaggggaagacccgggcagggtccggc

SEQ ID NO: 3229 - DNA, 252 bp, Homo sapiens
  chr4:25915658-25915910
  hyper
gcacagcacggaatcccggggaaggcggagggcggggtccgaggccccgcctgtgaccccacccctttcctggccccgcccccagccttgaggccccgcctctgactccacccctgtctctttctccgctccgcccctcctcctcgtccctccctcaaggcccggaagcgaaagcctctccacctcttccgagcggggtcacggcccggccgtcggtaacctggtttccgagagtgccgggcggtcggcggg

SEQ ID NO: 3230 - DNA, 30 bp, Homo sapiens
  chr4:27086385-27086415
  hyper
tagggggctggaaacgggcttacatcactg

SEQ ID NO: 3231 - DNA, 30 bp, Homo sapiens
  chr4:30721759-30721789
  hyper
cgtcgcctgtgctccgagcctggtttgctc

SEQ ID NO: 3232 - DNA, 152 bp, Homo sapiens
  chr4:30722137-30722289
  hyper
gctgcggtttcaggcggctgcttcgtgactaatgaccttgcgcagagttgttaagaaaaaagagaaacccgcgctctccggggtgagaagggactgactctgggcgtctctgaagatggctcgggcttctctttggcgcgccggggggaccc

SEQ ID NO: 3233 - DNA, 30 bp, Homo sapiens
  chr4:30722766-30722796
  hyper
ggcaggcgagcgggcgattagcacccattg

SEQ ID NO: 3234 - DNA, 799 bp, Homo sapiens
  chr4:36245408-36246207
  hyper
ttaacaagcagggtgcggggcagcacagacacccgggcaaattcatgatctctaccgagtaaataacttggtgcctgaaactcactacagcttcttcttatttaaaggtaggggagaggaatggagggagtgtccagctgtctatccggatcctcaccctcccgggtcaaatcccagaagtggagttcttggatcacttaccggcttctggtttcctttcagacgcccacacgcgggagcgaaatccaaggggcggacaccagagccgagcactttgcgctgaggaaatttacccggtgaagtgtcgaaaagccccagcccctccagacagggtcctcccacccccgcgtgggccatcccggcccagccttcccgaggccccgggtactcgccttgcgctcgggtcgcggagttcgaaaagcgaggtgaggcggcgctgggaagctcagcgccggcgtctctcccagccttgggcgctcggtcctcgcccctctgccggaggcgccaggcctcctctttcccggtccccgccggctgtccgcagtcgcctctgctgcctggcggcggccgcgcgggcggcgctgttagtggggccggcgtgtcgcggccgccgcacctggaggcggggagcgcgggccgcggacccgcgctcagctccggaaacgccgagcccggcgcccgcgccttgctcaggtgctcccgcgcctcgcctcggccgccgcttcctctccgcccgcgggggcggggagcaggcgccccgcgcgggggaagccggagctcaacggcgggggcggcccag

SEQ ID NO: 3235 - DNA, 140 bp, Homo sapiens
  chr4:36246257-36246397
  hyper
cgacttggccgcgcctggcaccctcgccacctggcgcacctcggcccggaggcgtcagaccccgctggggaagctgcgggggcgcgccctggagcccagagcgacaggggcattacccaccttcccgggacggagatgcc

SEQ ID NO: 3236 - DNA, 524 bp, Homo sapiens
  chr4:37245836-37246360
  hyper
cgccaggagagatagggatgaagcgatcgtccctccaggacgccagagacaatctggagacttgatgctttaaactctccgggtctggcttggggttgtgtgcgtcgaactttgaggctggattccctgcacttgggcagagacgcacagacgcccgagcgtgtggattcccgaaaattctcagggcttgtgtgacctttaggagagttggagggggcgtagtagaaatctcaggctaattgatttcttgtcctccaccacggaggcagacaggagccctcggctgtccacagaggagtccaggaggctcctgcgcacccccgaggcccccgcgcccaagccccggccgtcctctaagccgcaagttatttctgcgcccgagagaggcgggctcggataaagtcgggacgccttctggtacataaagtttcatctgctctcctcgctcgcacggtccctgccgcctggcggccccctcctcccacggcgggcgcgggcggggagatggccgccggcgcttcccg

SEQ ID NO: 3237 - DNA, 210 bp, Homo sapiens
  chr4:37246489-37246699
  hyper
cgagggtccgtatggcttctcctcgccggcgggtgctgtgcgccacggagctcgccaaaggcgcttcgggctcggagcggctctgagccgcgccgcctgctgagatcgaccgcctgctgagccgttccgtggagctgcgggcaggaacccgaggagcaggaggtggcggcggcggcagtggctgttcctcccagagggcgatgtggccgg

SEQ ID NO: 3238 - DNA, 28 bp, Homo sapiens
  chr4:37247015-37247043
  hyper
gctggccggttttgcctgcacacttcta

SEQ ID NO: 3239 - DNA, 235 bp, Homo sapiens
  chr4:37455265-37455500
  hyper
tggagtaagcaccccggagtttcccgtgatggcaggcggttggcgcggtcgtttgtgctcagaggccaacaagcgcgtggattttctgcttcagtgcgcccgggactgccaccccggccccggggatgtcggacatcgtactccagggtttcgagccctagccccgccgcatcctcggggcgtgcaggtaaagggttacgcgtgtcgggaaggctcacccgcagcccgggccacg

SEQ ID NO: 3240 - DNA, 30 bp, Homo sapiens
  chr4:37455741-37455771
  hyper
acttctctccgagtcgcctacttttaagtt

SEQ ID NO: 3241 - DNA, 30 bp, Homo sapiens
  chr4:37526315-37526345
  hyper
ttaggtgataatttcttatgtgatagtttc

SEQ ID NO: 3242 - DNA, 87 bp, Homo sapiens
  chr4:37688563-37688650
  hyper
ggtcgctgggactaggcgggcgtgggaagagaaagagggagcgcgccccgagaagcactggacagtcagaagcggccagcactggag

SEQ ID NO: 3243 - DNA, 211 bp, Homo sapiens
  chr4:37978651-37978862
  hyper
cttttgtggaacctcggagagggaggaattcttagatttctgaaagttgtgcgaaacggaccccagaggcctggaaaggcgcgtccccagcctccagggtttcctgcgcagccctgggcatctcggaagggggcgaccccagcatgtcccaacttcccgccagcagcggagcgcgggggtgggcggggtcggctgcgcgccctcccctcct

SEQ ID NO: 3244 - DNA, 31 bp, Homo sapiens
  chr4:38098758-38098789
  hyper
ttgtgcagtgggaaaacgttgtatatgcact

SEQ ID NO: 3245 - DNA, 31 bp, Homo sapiens
  chr4:38664663-38664694
  hyper
tgccgccccgctcgctcgcagcaccctgaag

SEQ ID NO: 3246 - DNA, 30 bp, Homo sapiens
  chr4:38666036-38666066
  hyper
gggcctttatttctcgtcggcggcgccctg

SEQ ID NO: 3247 - DNA, 30 bp, Homo sapiens
  chr4:38666648-38666678
  hyper
cgcggccgctcgcccgccacagcaaacttg

SEQ ID NO: 3248 - DNA, 615 bp, Homo sapiens
  chr4:38868923-38869538
  hyper
gccaaagctaatacatcggagttttaacccacagctccaaactggccttctggaaagtgggttttcgttgtttgtttggggtttgtttgttttaaatctatcacactcccaccgacagggcaagggagtgctgcttaacgcagaatcaggagatcaaactttagctgaatttgagcgacctcttcccagtgacacggcggggggttttccaagcccttttaaggaaaggaaagggatctggcgaaccccgagacccacccgccctgggctggagaggcggcgcgctctggctttccgcgctggcacaggggtgggacaagccaagtttccaggagactcgcccagcgcgggcccggccctcgcagcgtgggggtggccgggcgtccccgcggcgctcctcgtggggcggggcgcaggcggggcggggccccctctccagccgcccgccctccggccgcgtccccgccggccctgcagacgtggcggggcgggacccgctgggcactcccgcgcgtactcggccgcctgagcggtaagagccccgggcactcggtccccatccccttccccggggggcgggcgagcgcgggggcggctgcccgggggtggtgggaa

SEQ ID NO: 3249 - DNA, 227 bp, Homo sapiens
  chr4:39047176-39047403
  hyper
taataccctcgcccccggagtgtggagaataagacggggacttcattttcccgagacccggcgtgcctggtgaaacttttgcatttaggcatttatttcagtgcatgctctgggatcagaagctggcggtaaaagtttgctatgtcagagagtaaagcgttactgtcgttttttatcgcttcatttcattttcaaaaatattcttcagtagtcgacaagttcacaga

SEQ ID NO: 3250 - DNA, 87 bp, Homo sapiens
  chr4:39183809-39183896
  hyper
gacatcttagtcatcgcggtccaaaatttacgcacgcgcctttgagggctcacagagcccgtctctcccggacgaatctcatccaat

SEQ ID NO: 3251 - DNA, 30 bp, Homo sapiens
  chr4:39529279-39529309
  hyper
tagctgggcaaatccgctttggccagctca

SEQ ID NO: 3252 - DNA, 115 bp, Homo sapiens
  chr4:39529829-39529944
  hyper
actccctggtccctggcgagagaggcgggacccccacgccctcctggcgctctttgcagagatgttcctcaggcccaatccgggatttgggatgtctgtgcgtgctgtggagcag

SEQ ID NO: 3253 - DNA, 31 bp, Homo sapiens
  chr4:41168397-41168428
  hyper
tctatgggcaaaataacgagacctcatctct

SEQ ID NO: 3254 - DNA, 139 bp, Homo sapiens
  chr4:41216264-41216403
  hyper
agtggccgcggagccccggggccgggagcagaggagaagccgccgggggaacccgcagccgctcgccgcacgctgctgccgctacccgggtgtttccccagcactctcgtgctgccccggaatccggggcaaaggcaag

SEQ ID NO: 3255 - DNA, 316 bp, Homo sapiens
  chr4:41218382-41218698
  hyper
caggtcggtctcttcccgacggagaggaaaacccgcggtggagtccgcggcggcgggggggggggggggggggggggcggggcggcgcgcgcaggcgcagaggccgccaggttgggccgaggaggcgccctgctccacacctgatgcaatcagccttccggaaacgggtcccgctgccgcgctcacccaggaaacacttccgcgccctcctctggccgctgagctcccggggacgggttcccaaactcccccggcccgacttcgccacgggcggtgttctgcgccccgtcggggatacgccggagaagtcgggaag

SEQ ID NO: 3256 - DNA, 13 bp, Homo sapiens
  chr4:41258775-41258788
  hyper
aaggtttgggggc

SEQ ID NO: 3257 - DNA, 788 bp, Homo sapiens
  chr4:41259085-41259873
  hyper
cgctgatcggttcggttttgcctttttctttgcatttgcctttcagatgctgaacaaagtgagtggcgtctcgcgccgtctctggccccctcccccgcgagcgccgaggcgggggcgcccaccggttccggctgctggcagggaccaagccgcccgctgcgagcaccggagacggccgggctggggcgtgggctgggcgcctttcctgggcccctgcatttagcgggtgactctacgaaaccggtcacggggagacggagggggctgcgccccgtggcgagcgagcgccaggcggagctcccgagggcgtggcgcgggcagcacagactcggctgcacgggcttcgcgggcgccacgtgtgggccgcgctttgtgctgtgtcattgcgccggcccgggtgggggtggcagggcgggactggggctcctcccaggctcgggtgcgggcgcggagggcgcgcgcctcctggccccgccccctggcaggtgcccgcgacccgcgtgtccccgtgcgcctggccgccttgtctcctctccgcaggtgctgtcccggctgggggtcgccggccagtggcgcttcgtggacgtgctggggctggaagaggagtctctgggctcggtgccagcgcctgcctgcgcgctgctgctgctgtttcccctcacggcccaggtagggcgtggggcccaggatgcgccggccgccggcagtgcacgccgctccccagcttgagtcctcgggggctccccgccccgccccctcccctgtaggtgatgcggggcgcgcctaca

SEQ ID NO: 3258 - DNA, 171 bp, Homo sapiens
  chr4:41362780-41362951
  hyper
cggggagcgcgctcctgcggcggcgacggcggcggccgtcctcatcccggcgcttgagaggacgcggggctgcgcaaatggcttgtcccgctctcggtctggaagctcttcagcccctgcagcccgagccgccccccgagcccgccttctccgaggcgcagaagtggattg

SEQ ID NO: 3259 - DNA, 30 bp, Homo sapiens
  chr4:41752233-41752263
  hyper
taggggcatttaggcgttcagtgtttgcca

SEQ ID NO: 3260 - DNA, 365 bp, Homo sapiens
  chr4:41753030-41753395
  hyper
acgcaactctgccgccgaggcctgcactcaggagatgtggatgtagggagcacaggccggggtgtccaccgccagcccgctcctctgctgtagggtttaagcgcgtttccctgcagaagagagtgaccaggggtggtcaggaggtgatgaatttcggctccaaggcctatttttgacagtaaccaggttcacaccccgcttggcactagagccttactgcacctggggtgtgtctccgcgtggtgcagagcgcgcgctctactccggaagctacggccgggtgccgcgccaccgctgtgcgccctgggcctgatccctacgccctagtcgagtgcagggcagggcaatttcgccgtgggtcctag

SEQ ID NO: 3261 - DNA, 200 bp, Homo sapiens
  chr4:41753716-41753916
  hyper
agggtgcccggggggcggtcaaggggcaggcccggggctctgtccctcccggtcctggggtcccttcccgtcccgcggttccggaacgcctcgccagccctctctgggcgccccctgctgccgggcgccccctgctgccggccgccccgggtcggggtgccgtgagccttctcgcctttgtaccaggagacctttcagcg

SEQ ID NO: 3262 - DNA, 15 bp, Homo sapiens
  chr4:41754030-41754045
  hyper
cgtccctctgcccgt

SEQ ID NO: 3263 - DNA, 30 bp, Homo sapiens
  chr4:41883864-41883894
  hyper
ggcgccaggagtaacggctgctccccggag

SEQ ID NO: 3264 - DNA, 178 bp, Homo sapiens
  chr4:41991960-41992138
  hyper
gaagtctgcatacctccgtttaccctaacttgtcatgaacataaaacctcttatattgcaggcaaaaatctgaggttcacagattagtagggcaagtagctgattccgaagtgtgtacttgcctttatgatactggatacacactggtgttaacaaggagaacgatgtacgtggcaga

SEQ ID NO: 3265 - DNA, 450 bp, Homo sapiens
  chr4:42152961-42153411
  hyper
cgactcccggggcaggaaggaggggcgggatggttccccgcgcccgaaatccacggcgtggcggacgcggaggagccccgagtctcacaaccaaggggtgggaaggaaaagggacagagcgagacagagcgcccccgagaaacacaggcgcacaaaaaaagacagaaggaaaaacggaactgagagccagccagcatggactgcgacagcgtgagagtgcatcaaagaggtggcgaagaaagcactagaaggcaaaggagaagtggagagaagaagaaacaaatggaggaagaaggagaaagggaaaaagcagacggaaaaagtgaagtagtacgagggcgtcccagcggggcggcccgagaagctccagcttcttcccgagcggccgccgctatcccccgggggggcgtctggccccactccggaccacgcccgagcgatcctggtcgc

SEQ ID NO: 3266 - DNA, 41 bp, Homo sapiens
  chr4:42153591-42153632
  hyper
cggccccccgcttctccttcctgggtcccctcccgctgccc

SEQ ID NO: 3267 - DNA, 1082 bp, Homo sapiens
  chr4:42153881-42154963
  hyper
ggcccggccgggcccgggggggtaggagctctgcgcctggaactgctgcggcggcggctcgctgctgctgatggagacggcggcgtgcggcgcgaagggcggcgggggcggcgggggcgcccgcacgtgcggcagctccaccagggtgggtcgctcgtagcgcttggccagcgccggtctcttgctggggaacgtcttgaggacgctgtaggggctgcgctgcttgtagattttggggacgctgggcccctcctctgccggctgcatctcttcctccatccggcgcctcggggccggtccctcggagcacgtcccctccccgccgggcgccgggctccgagggtgcctccgccgcctgcccgccgggtctgccctggtgcgcgcgtgtgggagggtgtgtgtctgtgccgtggccgccgccgccgccgcctgtcgctgaggctggcatcgccgagcccccgcgcggggggctgccgcccgagctcctgattgacaggctgcctcgccaatgcctggagggagaaaggaggtaaagagcaagtgtttagggtaatatctgctaatgataatgggggcggggcggggcctggcgccgcagccgcccgcggggtctgcctggcggctccgcgcctccgacggggagcgggggaagggggaaagcgaggacctggaggacgcccgggaactggtgaagaaggtggggatccgggatctggctacggcgagactttagagacccagatgtggactcgaggcttctgcggctgcgggcggggtccggcttccgaaacgagctcgtggcgccccctgcatgaccccaaactctcggggttgcacagaggaggggctagtcgttggggcggggtcgtcagagtacgtgtgtattacagcaagttcttctaccaatcgggaattgctctccgatccttctgaaaagaacctcttgaagatcttggcccgggtggtcgcgcggtgtttacggggctttggggtcctgctttccccgagcatcgcggcctctgagctcatgcggaacataaaagctcgcaaggcgtagaactttttcacgttttcatttgttt

SEQ ID NO: 3268 - DNA, 2234 bp, Homo sapiens
  chr4:42398823-42401057
  hyper
cgtgaacggagaagtcgtgctctttgaggttttgcgagctggccttggctggcagaggtgaccggcaatccttcagccggcggaaaaagtgcgagtgtgtgtgtgtgtgtgcttgtgaaaatgtgccgttcctcccagaaaaagtggaaacgtaggtggaaagctcagcacatgttggcgacacctaaaaaccatgttctcggtcctgaacctttagaagcggtatcccaggaacgagtctgagtctgtgcaacagggcacagatgattcgacaaacttcaatgactgcaccgcattcatgcattatatccattgaaaagtaaatccagcgtctccactcgcgcgcccacgtgcgtggataaacgcgggaattcggcagccctcaacgtcactctgcagagatttccgggctgtgagagagttggggtgtgcggcgggggaggggagggtctgatatcttcaggttgagagtcaagtcctgggggagcggcatgggcgggggtggccggggggaggcggaggatggagcgcgaaccagaaagcgcagaggaccctcggcccgcgccgcacccgctgtgattagctccagaggcgcgatccgggagggcggactctttcttaaccctcattgtctcctcctccctcttcctttttaaaagacgccttgcgggcagagctgtcagcaaccccgcggccgtttgtacttggccgcggcggagctgactcctgctcctgtgacagataggggctggggctgagcggccgcctgtctggggtactcgcacgtggggaacaaattcttttcctccggctcctctcgggacccggcgatcgccacaggttgggactctgtgcggcgctggagttggcagccccgggcgctatggctcccttgaggagtggggagggaggtggccggggggttggcgcgcccctcgcgcggggagcgctatgagccgggcgaagggcggcagcgacagccccagcaactgcctctgccggcgcctcccgcaggccctcgccaactcgccccgcgcaccatgctgactcccggcctgcggaactcgtagtgcagcccctgtcgcctccccggcccctgctatcccacgcaggactggcttcggccgccggggccagcagcttgcgacgtgtccctggggaggcggaatcgctgtgcgccctgagcccgggctcagcccttcgctttccagctgcgtcctgctcccggccgcccagggagcccagtggcgatgagggcactgctggcgctttgccttctccttggctggctgcgctggggcccggcgggcgcccagcagtccggagagtactgccacggctgggtggacgtgcagggcaactaccacgagggcttccagtgcccagaggacttcgacacgctggacgctaccatctgctgcggctcctgcgcgctccgctactgttgcgccgcggccgacgccaggctggagcagggcggctgcaccaacgaccgccgcgaactggagcacccaggcatcactgcgcgtaagtgcggggccctcggggacatatccccgcccgcctaacggcggcggctgcatgtgtgcgcgggaggatgcacagacccaggcaggtctatgcgccttcctgggtctgtgcgccagggggacgcggccgggtgggggaatcaagggatgagtgggtggtcgcgtttcagatcatggtcctctattcatttgcagtcccgcttcccgccacttgcggtctctgcgggtcggcccgcagggaaagtttgccagggacagtgaggagcgcggggcttgtgcctggtagccggggggaagacagctggagctcccgggagaagggtagtgcgggtaaagccagggtagacttgggttttggtggaggggccgagggtgtcccattgctcgcccttgtcacttcgggagcttcgggaagtgccgaatgcagggaatcgcgactcttgtcgcgcgctcatttgcagcccttcagggctaagaaaccccagtcactttttttttctgtcttaatgatagcgtttctaagccacggccccgttctgcagacttcctttcaattctctgcatcgaattaccctctccggcccaccccctattgtcacgcctttcagaaatgcccaggtcttcgaggtggagatttagaaacaagggtcgaaggggcttccccgccccctattctcacttcggaaaacacgggtcaaatttccg

SEQ ID NO: 3269 - DNA, 30 bp, Homo sapiens
  chr4:42657888-42657918
  hyper
agagtgggaatcagcgatgatggcaagata

SEQ ID NO: 3270 - DNA, 36 bp, Homo sapiens
  chr4:42659637-42659673
  hyper
ctctgcacgcccagcccgactcgtggcctgagccgc

SEQ ID NO: 3271 - DNA, 30 bp, Homo sapiens
  chr4:43770052-43770082
  hyper
aaggcttgggaataatctttgactttatac

SEQ ID NO: 3272 - DNA, 25 bp, Homo sapiens
  chr4:44449544-44449569
  hyper
aggggtgctgggaaacgccggggct

SEQ ID NO: 3273 - DNA, 90 bp, Homo sapiens
  chr4:44449652-44449742
  hyper
cgaggagttacacgccaccatgtggaagccggcctcggacaggcgatcaaaggcctgctccaagtaggtgaacttgaggtagaagcggga

SEQ ID NO: 3274 - DNA, 205 bp, Homo sapiens
  chr4:44449971-44450176
  hyper
gggcccgagggcacggcggccgccgccccgcgcagcagcagcgcgtcgctgctaccctgcgagacgttgtcctccaggtcgctctggcagccctcgtcgttgagagagttctgcttggtgaccttgggcgacagcagcttgaccaagtcggtgagctggaaatactcggcctcgcgcagcagccgctccttctcggggaagtgct

SEQ ID NO: 3275 - DNA, 226 bp, Homo sapiens
  chr4:44450741-44450967
  hyper
gagagaggagctccgccggtgcggcggcggcaatggagaggcaagaaggagctgctgctcctttggggcgagggcggggaagtgtgagagagacttgcgagaggctctagggctgctgctcggctctccgtggggagggcgggaggaggggccgaagcaaagaaaactcgccgccccggcagcttgcaagcgtgccgcgaggccggagcgccgacggtggcgctaa

SEQ ID NO: 3276 - DNA, 30 bp, Homo sapiens
  chr4:44833239-44833269
  hyper
aagagaatcttttttaatttactctatttg

SEQ ID NO: 3277 - DNA, 162 bp, Homo sapiens
  chr4:46391377-46391539
  hyper
gctgcgaaacgacgcgtttgacagctgctctggagccgaggatcacaataagagaaggcgcgtgaggctccggcagcaaacaccagccaggcaggcagcggtaatcacagtgagcaaagttgaagactataaaagagccaggctaacgtgctgccgagcagg

SEQ ID NO: 3278 - DNA, 30 bp, Homo sapiens
  chr4:46392642-46392672
  hyper
catcaacgcatccacgcaggaccaagttca

SEQ ID NO: 3279 - DNA, 908 bp, Homo sapiens
  chr4:46995371-46996279
  hyper
ggaagcgcaggagggcgaaactgaccccggcggacagagcgatcgcgggtaccttcttggcagaaaccatctttgcaacatgccatacttcaagcctgttcacgtttccaggctcttcagatgccctgagcagggtgcgaggagagggcagagaggctcccgcggcgtgcgcacactcgcgctcacactcgcccgcgctcagccagcccgagccgcggtgggcgtgtgtgtgcacggggccaggggaggcggaacctgccttcctcgccccctcctttctcgctcagcgctcaatgtgtatgtagagctatgtataccgctccacaccctttcgtgcccgcgcgctgaaggttctggggttcgtatccgcgcgcttgcgctgcaagactcggcaagtttgttccgactgtaactccggggatgaggaacggggtctctcgcccctcctccggcttcgcagcccccgaccccaagtgggctccccgcccacagcagtgttcgtcctcctacctcctggccccctcccttccgctgggatttggatctaaccaatgaagctcctctgtcatcaggttgtgcgaggacctgtttgtacccagagtcaaggttggaggtggagaaagggcgggtgacggggactgctgggcgtcgggtggtagcggtggtgaggagaggggatcaagtccgggctcaaaccacctttgagaccctcccattcaggtgttatggggggcggtagggagagcaatgaaagcagaaagattcttcctggtaacaggggttgcagctcacccggcggactctcgccaaactattgggaagtggactcgagccgcactctagtcccagtatttgctaagctattgctttaaagacaccccatttctttacccgcctccaccagacac

SEQ ID NO: 3280 - DNA, 767 bp, Homo sapiens
  chr4:47034216-47034983
  hyper
gaggcgaccttctcccgggccgacacaccctctgcatagtcactgcatcacgcgtgtgcccacacctgttttcccaggcagtcccctgaaaggggtggtggggggagcagggagggagcccgttaagaatggagtaagggctgggaagcccccagaccctccccagcctgctgtcactgagagaatctgttcctaatgtggcccacctccccggcagggccccccgtcgacgttgggatgcggatcgatgtcgccagcatagacatggtctccgaagtgaatatggtgagtggcctcccgaggggcccggcggttcggcttacgcagatgggaaatggacaggtccctttgccctctgcgtttcattggcggtcacctcgcccctggcccctgaggtcccactccgcacccgctccccgctccggcacacacacccggtcgcccctggtttgtaatttcgacacacacgggctactgcggtgttccaggggaaacgtgctcggcactattttgggaaggacgagtgactgttgcgccgtggatctgctggggcggagtctgagcgttactttagctgggtttccctgcgtgtttggatgaggagggcaccatctgctggcagccgggcggcctgcactagggtccccggaccggtggtcggcagccatcacctccccaggcgcggtgctggcaatccccatggccctcgcagtccgcgagcccggatgcaccaaggccctgccaccgagagcacagtctgggtttca

SEQ ID NO: 3281 - DNA, 30 bp, Homo sapiens
  chr4:47465872-47465902
  hyper
taaaggcacatttacgtatctttcaacgca

SEQ ID NO: 3282 - DNA, 30 bp, Homo sapiens
  chr4:47569090-47569120
  hyper
caaaagaaggcatcatggtgttcagcttca

SEQ ID NO: 3283 - DNA, 212 bp, Homo sapiens
  chr4:47839410-47839622
  hyper
tgcacagtccctccagccacccggcgcccgagacgccggcgcagacaggaagctgtagatccccgaggggctggctccgacagctccacctgcagcctcccctgccgccagtgtgcagccaagtccactagatgcttggagggcaccgtgcggaggagggactctgcaggaaaggtggcatcacccccggcatggagaccggggtctccgga

SEQ ID NO: 3284 - DNA, 30 bp, Homo sapiens
  chr4:48226149-48226179
  hyper
caggtggagttgggaaccctggcacaacga

SEQ ID NO: 3285 - DNA, 237 bp, Homo sapiens
  chr4:48272044-48272281
  hyper
tcaaggcaagtgaccggaatgggtcggaagcgcgtcccggtgagtttcagggagcgtcccttaggtttccgggggcggcgttgaacctccctagccccagtcttcccatcccaggagacccgcccctagtggctcgaacgcccctagccaggagagccccgagtagtgccacttgtggaagactacgtgcctgtcggaattaggaaccgcacctccccttccgctaagcggtgggag

SEQ ID NO: 3286 - DNA, 10 bp, Homo sapiens
  chr4:48485278-48485288
  hyper
aggaggggac

SEQ ID NO: 3287 - DNA, 180 bp, Homo sapiens
  chr4:48908454-48908634
  hyper
agcctactggagtccgctgccatccctggccagaagcagccagcgccaccccaagctccccagcccctcgcccgtgccggggccgccggggtccgagttaggggagagtggggggcggccaccgctgcaccgcgcggccttcgaaggactgccctgcggcgccgcgttcccccgaggcca

SEQ ID NO: 3288 - DNA, 67 bp, Homo sapiens
  chr4:52710974-52711041
  hyper
ggttgggttgggtgcacgtgggtaactgtggaaacgggtcccggcatgcagcgcgcccttggagcct

SEQ ID NO: 3289 - DNA, 629 bp, Homo sapiens
  chr4:53617229-53617858
  hyper
gtctgccctagggaggcaaagcgcaaacttgttaccgcgccgggacctgccccgggattctcccagcggctccgcaggacgcagcgcctgtgcctcgcgcggccctgggacgggcacggccgtccgccccctgggccgccgagggctgctttacccctccgttctggccgcgggcagcagaggagctcggggcgggcaaagctcgaggggacacggggcgagcccagaccctgcctgggagccctccccgccggagaccaaagggcagaaacgcactcacagtgcaactccgagggataaactggccgacgatcgccgccaggccagaagaccaagaagaaggctcgcggcgggaactgaagtgagcggggacacacgagggctgggaagatcctgggttggggcggagcggggctgggaagatcctgggttggggcggggcggggcaccgcagagcggacagccggattcaggcaccaggaacccaccggtcccactggccaggtgctccgagctgggtgattttctcccgctcaagactaggaacatacctgcgctttcggcgcagggaagactctgggcgagggcggggctgggaggagggccgcggggcaggcagccaatcccag

SEQ ID NO: 3290 - DNA, 910 bp, Homo sapiens
  chr4:53728016-53728926
  hyper
atgtacccaagccagtgcaatcgctccaaatcagggcgggcggcactaagccggggagcaaacaccgctcccggcccgcccagagcagacgccctaggttggggctgcagcgagtgcgcgcgtgggctgtggagccggcggaggcagcggtccggaatggctctgtggaggctgcgctctcttcctggccccgcagccacagcagctgccccatgctcgcgcggcaggacctaccaggcgcccaccctgggctgcgccgcctcggaccacccgctgctcccctccgcccgctgcctcttctccccgcgcctcacggggctccgcactgactccaggcgcctccgggggcgtcgcgcgcgcggagcggcgccgggggcggggcctcgtgtagggcgccccgggattggctgtggggagagggggcggggccggccgcggagaaaacagccggcgcgccgcgcgagtgcagtctgggtctggagcctgagccctgcggaacctcggcgctcggccccaccccgcccgtacctgcacttatttattgttgttatttcttaccgcggagccccgcagtcgggtcctcccgcccgctcccgcgcagcgctagcattctccagtccctcagtcccttcccgcgcggtgcgccgcagccgaggcgatgcgcctcattcagaacatgtgcaccatcgccgagtaccccgcgccgggcaacgccgcggcctccgactgctgtgtgggcgccgccggccgccgcctggtcaagatcgccgtggtgggcgccagcggcgtgggcaagaccggtgagtcgtcgcgcttagccctgggtctggtcttggacgacccctgacgggagttgaggctgaacaaggcgtggggagcggtgggagctgcagcccgaccgctctccgtc

SEQ ID NO: 3291 - DNA, 30 bp, Homo sapiens
  chr4:54967659-54967689
  hyper
gggtccctgaaatgcgtcctggttagcaca

SEQ ID NO: 3292 - DNA, 112 bp, Homo sapiens
  chr4:55093226-55093338
  hyper
gagggcctcctgtccggaggttgctcctgaccactgggtttattttgcttttgcagaggaggcagatgttgacctctcttctttgcacagtctctccgcaaaattttccccc

SEQ ID NO: 3293 - DNA, 155 bp, Homo sapiens
  chr4:55093677-55093832
  hyper
gaccctggcttgaccggactaacagtgtcgccgaagcaaagcagcccctctgggtaggctgtctgtctcgcctcctaccctctggggcaactagcctaaaaacccggttctcaacttaacagcatgtggcccagcacccgcttttgccttttatt

SEQ ID NO: 3294 - DNA, 30 bp, Homo sapiens
  chr4:55094322-55094352
  hyper
gatgaaggtgaacgcgctcccctcccccgc

SEQ ID NO: 3295 - DNA, 32 bp, Homo sapiens
  chr4:55095429-55095461
  hyper
aatcaattacaaaacgcggtttttgagcccat

SEQ ID NO: 3296 - DNA, 67 bp, Homo sapiens
  chr4:55524174-55524241
  hyper
taccgcgatgagaggcgctcgcggcgcctgggattttctctgcgttctgctcctactgcttcgcgtc

SEQ ID NO: 3297 - DNA, 230 bp, Homo sapiens
  chr4:55561713-55561943
  hyper
ctccaccatccatccatccaggaaaatcagacttaatagtccgcgtgggcgacgagattaggctgttatgcactgatccgggctttgtcaaatggacttttgagatcctggatgaaacgaatgagaataagcagaatgaatggatcacggaaaaggcagaagccaccaacaccggcaaatacacgtgcaccaacaaacacggcttaagcaattccatttatgtgtttgtt

SEQ ID NO: 3298 - DNA, 92 bp, Homo sapiens
  chr4:55564468-55564560
  hyper
tgttgaccgctccttgtatgggaaagaagacaacgacacgctggtccgctgtcctctcacagacccagaagtgaccaattattccctcaagg

SEQ ID NO: 3299 - DNA, 30 bp, Homo sapiens
  chr4:55565886-55565916
  hyper
tgtgtctagttctgtgtactcaacgtggaa

SEQ ID NO: 3300 - DNA, 76 bp, Homo sapiens
  chr4:55569949-55570025
  hyper
gcaacgttgactatcagttcagcgagagttaatgattctggagtgttcatgtgttatgccaataatacttttggat

SEQ ID NO: 3301 - DNA, 30 bp, Homo sapiens
  chr4:55573295-55573325
  hyper
aacactacagtatttgtaaacgatggagaa

SEQ ID NO: 3302 - DNA, 30 bp, Homo sapiens
  chr4:55589780-55589810
  hyper
cgtgaatggcatgctccaatgtgtggcagc

SEQ ID NO: 3303 - DNA, 46 bp, Homo sapiens
  chr4:55592093-55592139
  hyper
tggttcagagttctatagattctagtgcattcaagcacaatggcac

SEQ ID NO: 3304 - DNA, 303 bp, Homo sapiens
  chr4:55593415-55593718
  hyper
ttgctgattggtttcgtaatcgtagctggcatgatgtgcattattgtgatgattctgacctacaaatatttacaggtaaccatttatttgttctctctccagagtgctctaatgactgagacaataattattaaaaggtgatctatttttccctttctccccacagaaacccatgtatgaagtacagtggaaggttgttgaggagataaatggaaacaattatgtttacatagacccaacacaacttccttatgatcacaaatgggagtttcccagaaacaggctgagttttggtcagtatga

SEQ ID NO: 3305 - DNA, 30 bp, Homo sapiens
  chr4:55594000-55594030
  hyper
gtgctggagctttcgggaaggttgttgagg

SEQ ID NO: 3306 - DNA, 63 bp, Homo sapiens
  chr4:55595496-55595559
  hyper
ttagggcccaccctggtcattacagaatattgttgctatggtgatcttttgaattttttgaga

SEQ ID NO: 3307 - DNA, 35 bp, Homo sapiens
  chr4:55598030-55598065
  hyper
tcacaggctcatacatagaaagagatgtgactccc

SEQ ID NO: 3308 - DNA, 43 bp, Homo sapiens
  chr4:55599305-55599348
  hyper
ttggtctagccagagacatcaagaatgattctaattatgtggt

SEQ ID NO: 3309 - DNA, 97 bp, Homo sapiens
  chr4:55602682-55602779
  hyper
ggatggcacctgaaagcattttcaactgtgtatacacgtttgaaagtgacgtctggtcctatgggatttttctttgggagctgttctctttaggtaa

SEQ ID NO: 3310 - DNA, 30 bp, Homo sapiens
  chr4:55604624-55604654
  hyper
aaccgacagaagcccgtggtagaccattct

SEQ ID NO: 3311 - DNA, 30 bp, Homo sapiens
  chr4:55991403-55991433
  hyper
ggcccgggtctccacgcagagccacagggc

SEQ ID NO: 3312 - DNA, 287 bp, Homo sapiens
  chr4:55991802-55992089
  hyper
cggggccatgcggggcggggccggagcggaggaggggctctcccgtgcggccagccccgcccctcacccgggtacccggcggcgatctccagctccccaagcccatttacatctccccatttccccacacaactggactgcgctgggccccaagtcgcccaggagagaacatcccagagcaacaactttgtttctggtgtaaataaaaagtactcggtaacgggcgctgagcaactccaagatttaatcgcttgccggtccccgaaatttggggagcatcaccagga

SEQ ID NO: 3313 - DNA, 18 bp, Homo sapiens
  chr4:55992152-55992170
  hyper
cgcgcgtctgaagtggcc

SEQ ID NO: 3314 - DNA, 35 bp, Homo sapiens
  chr4:56412389-56412424
  hyper
gaatcggccgcagctccgggcgccctcaagccgcc

SEQ ID NO: 3315 - DNA, 112 bp, Homo sapiens
  chr4:56659754-56659866
  hyper
ctggctgctgcaggccggcacctgggtagatgttaccttttcccgcacagggtcagtccacagacgtgcaccagcaccccggcgaccggtcacagccttcccctcgccccgg

SEQ ID NO: 3316 - DNA, 65 bp, Homo sapiens
  chr4:56659934-56659999
  hyper
cgcactccccgggtatgctgcgggccctctccatccggggaggcggggtccggggaggacacatc

SEQ ID NO: 3317 - DNA, 30 bp, Homo sapiens
  chr4:57334148-57334178
  hyper
ccctccgcgggaagcgagggaaggttttaa

SEQ ID NO: 3318 - DNA, 403 bp, Homo sapiens
  chr4:57396763-57397166
  hyper
tatcgcgcagagagcaaactgcgcctgggcaaccagtcgggagggtgagtcccgcgcgcgacagaagcttctggcgcgaatggagaaccaagagtttctaagttcatctgcgccgtccgaggtgaccgatgggcaggtctcaacagaaatatccacttgctccgaagtcttccagaagcccattgtgctcaggattctcgacactcacagagagcttgaggagtccgaggatcccgagaaacacgagaatcccgaggaacccgaggaggtcagggagcaagaccagagagacgagtccgaggaatgtgatgagcctcatgagtcctatgagccccacgctccctatgcgccccacaagccccgggactcctatgcaccttacgaactccatgggccccatgca

SEQ ID NO: 3319 - DNA, 40 bp, Homo sapiens
  chr4:57521355-57521395
  hyper
aaaacctctaaaccttagagccggggaattttttaaaaaa

SEQ ID NO: 3320 - DNA, 158 bp, Homo sapiens
  chr4:57521505-57521663
  hyper
cgccctccctcccggcctcagcctcctggttcgccaaaccggaggactgaatttatggctagctggtctctggggcgccttccagctctgacattcccgcctagaatagatcttcccgaaggtttcgcagacagaccagaggggaccgagccgggaag

SEQ ID NO: 3321 - DNA, 682 bp, Homo sapiens
  chr4:57521700-57522382
  hyper
cgcagagggagaaagcgtgtatcccgggctgccggggagagtggaaaagaaaggactggtgaccgaggggtttctgcgcagctcccggggaaccacggctggatgggggtggcggggagaccgggcgcccatgggagcggggaagcggggaggcggcggcgggagccatgcagggtctgggcccctgggatgcgggcagaagcgatgggagatcatggggagggcagcccggcgggaggcgcggacgaacaggaccgcccagccgcgagaaggctcagcccaggcaggggtcggggcgcgctgggcgcgtgtggggacgcacctgggtctcctcctcggaaaggcctgcctcggccgcgatgaggcacagcgtggtggaatccgggtgcttgtcgaccttgttgaagttgtactccaggatttccacctggtcctctgtggggccgctcgcggtctccgccgacatggtccctgcgcgctgcggggcagggagaagcggcggcggtgagcgaggcgtggagcgggcgggacgcagcgaaggaaggcggtcgcggcgccgccgggcagccccagccccaggccgccccctccagcggtgccacggccgcgcaagtccccggtggctgcacgctgagcgggggcttacggctgccccccacccgggcctccctccctggactga

SEQ ID NO: 3322 - DNA, 304 bp, Homo sapiens
  chr4:57522419-57522723
  hyper
cgcctcccgcgccccccgggaccccttgcaggaactgtatccctgcctgcgacgggggcgagatagatgattccgcgggccctcaccgacctccggctctaaggaaggagtgaaggaagcgcgggggtgattttgagaaatccccttaaaaacttcctcccgaaagggggacctcccctggggacagacttgacagatcgcgagggtgggttcgcccgagtccgcgactagccggcctccggcctccccggtaggcggccttctgtctccgcagtgggttggcgctttggggccctctccaggc

SEQ ID NO: 3323 - DNA, 434 bp, Homo sapiens
  chr4:57687589-57688023
  hyper
ccacccccacaacccccagttcgcgttcctccacctggcaggtcctctggggaaccgccagtaacgggcgcgcgggtaccgtcgccgaggccgcccggagcagggcagggtccgccgccggtctgactcccaaacccgcttttctccggaggtccccgctcgccaggaccgctccgagcgctacctgcgaaggtaactgccaggagcagcagcgccaagcgcagcaccgacagcgccatcctcctcccgcgccggctgtcttgcccctgcggtctgttacctgcgccactcgcagggagcgctcgtgcgacggggcgcggggagggcgggggaaggggcggggcgagaatgggaggaaaagcagcggtaggtggcgagggaagaggggcggcgggaagaggagcggcgggaagaggagccgtgaagggtcgggg

SEQ ID NO: 3324 - DNA, 146 bp, Homo sapiens
  chr4:57775638-57775784
  hyper
gagcaattagaaaagtcgatgttgggccaaattacccaatagcttgggctgttcagccccgggacagccttcgccctctgttttctgtgatggcatttgcttccaacttttgttggtacgtagaactaaaccggtttgtgtttata

SEQ ID NO: 3325 - DNA, 30 bp, Homo sapiens
  chr4:57843995-57844025
  hyper
actttcaggcttaacgcctcactgctagca

SEQ ID NO: 3326 - DNA, 30 bp, Homo sapiens
  chr4:57944966-57944996
  hyper
atttcagaaatgcacatggatggtaactag

SEQ ID NO: 3327 - DNA, 1016 bp, Homo sapiens
  chr4:57975913-57976929
  hyper
ggctcctgggatgcccgcgggggaatcgcagtgagcagcgcggggcgaggccgccgcggacgccccgtcggatgtgcccttcgctgggccgagcggcgcagggttggagagggaagcgctcgtgcccaccttgctcgcaggtgcccttgctgacctgggtgatggccttctccccgcggctctcggccctctggctggcggcgcgcagctggcagccgctcgggtaggtggtgccgtcgctgccgcacaccgggtagcggctcttgcacacgcacacgccgcttacacccggaccgccggctgctgccccggctttacccttccgcctcttgcggctcttcacgcactccatgcccggcgcgcagtaccccctgccggcgccgccacccccgcacggctcgccctcgccgcgggcgcacatagggcagcagccgcacgcgtcgcgggtctcgcccagcaggcagcccagcgggggcaggggcgggcaggaggccggctcgcaggggccgcaggtgtccgaagaggaggaagaggagaggggcaggagcaggagcagcagcccagcggcgccgaggagcagggcgcgcagcgacggccgctccatggcggggtgcggtggcagcggcaagggcgcgagtgagccgtgtcgggccggccggcgccttaaacccgccgccccgcccggcctgtccgcgggaaccacaccccggggcggtgagagcacgggggccccgcccgtgccgccctcccggccccgcggggcctgcgcgcgcgctcctgctggcgtcggggggtgagcgggcacccggcgtgaccggcccatgggcgctcggtctcacgcccgcttcgcagagctcaccccgccagctcctgctcggtccccagtcccctgccccgagccctcagggatcgcaccgcagtgcgagcggctcttccaccctctggtttctccccgtttccggtcaatatatttaaacttcttaacaaccacggcttcgagacgatccagggtttca

SEQ ID NO: 3328 - DNA, 233 bp, Homo sapiens
  chr4:57977131-57977364
  hyper
ctgcacctccctccccgctttgtctcccagtggcattcaacaagactctgtgctttttttgtgctgagccgttttcagtgagtactggaatccgtgtgagagctgtgcccttgttttgagttcttgctgaactgctcgccctccagcaagcctctcgggagaacagagcgcagctgagaggagcaggggtcccagctccttcctcgttggagctgccacggaggcacctaaag

SEQ ID NO: 3329 - DNA, 30 bp, Homo sapiens
  chr4:62065794-62065824
  hyper
agcgagcgccgaggcgggcctcgaagccac

SEQ ID NO: 3330 - DNA, 358 bp, Homo sapiens
  chr4:62066196-62066554
  hyper
atgctgcagctggtcggggtgggcgccgccgccgccgccgccgccgctgctgctggtttttctcggactgctcgttgcctccgctccggcagctgctgccgccgccaccgccgcctgtgactcgccccctcccctttctttcttctctttttgccttggtcctcttcctacgggtgtgcgcgcgcgcgggttgcacggtttgctttggcaggagctcgctcgtgtgtgcgcgtgtgtgagtgtgcgtgtctggagagcgccagtgcctcgctcgctcttggggagtcgaagaagagaaagaaccgaagagacagcggcggcggcgcagagcccggggccgcgcgatgaagctcccaca

SEQ ID NO: 3331 - DNA, 30 bp, Homo sapiens
  chr4:62066772-62066802
  hyper
gacgaagaggaggacggtttggcggagaag

SEQ ID NO: 3332 - DNA, 234 bp, Homo sapiens
  chr4:62067174-62067408
  hyper
tgtgaagcgaggaacgtaaaggaaggcgaacatttggctctctttttccttcccctttctccgtggctgtgtagcggaagaaagggaagagagactttttgttgttgtttccttgactggggtctccaccctcctgctgctttctctgcgcttcgattctcgttatttgccgcgtgtggttgggggtgtctgcacaggggccggccggtcttttgccccgggctcaatggctgg

SEQ ID NO: 3333 - DNA, 30 bp, Homo sapiens
  chr4:62068170-62068200
  hyper
aaagctgccactttcgtgggtggcccgggc

SEQ ID NO: 3334 - DNA, 30 bp, Homo sapiens
  chr4:66535130-66535160
  hyper
ccagtggaaggggacgacaaataccaattt

SEQ ID NO: 3335 - DNA, 16 bp, Homo sapiens
  chr4:66535574-66535590
  hyper
cgccttctggcacgcg

SEQ ID NO: 3336 - DNA, 617 bp, Homo sapiens
  chr4:66536013-66536630
  hyper
actggcagaaggaaatagctgcgggctgagtgctgaagaggggagggactgacggctgccggccggtaggagcgcggagctgcgctgcggcggcccaggagctgctgcggttcccgctgctcggggagcaggcggtgtgtgcgcggctgcgaagtcgaggttgaaactgcaccgccaaggcgcgctcctgctgtgtctggagctccggcgtctcctctgcctcccagctcagcgcctcccaccctccttccctcctcctcttcccagctcccccgccctctgctgctcgcagcctcgccagtgagaatctactgtaagtgtgagttgcttcgacgaagtcacacacccacggagggaagtaatctggaggctgccttggtgagtgttgcctagcggtctccgggaaaggcgcgtcttcctcccgggataattagggcaaggaatcctgacgacgctggcgaggactggggttcccgggaggcggaagggagatcagccccagctcagccggcggcccttagagacgcgggtccctccgtttggcatcttgcctgctgtccctcacaggctgtggcatcaacaaccttgtcgtcacatcgccgcgcattcgcaggctc

SEQ ID NO: 3337 - DNA, 30 bp, Homo sapiens
  chr4:71467461-71467491
  hyper
cttcaggcataatacgtgatataaatatat

SEQ ID NO: 3338 - DNA, 30 bp, Homo sapiens
  chr4:71553539-71553569
  hyper
gtcagaccctgcagcggggctctgccttcc

SEQ ID NO: 3339 - DNA, 730 bp, Homo sapiens
  chr4:71767777-71768507
  hyper
ctggagcccagctgagcggctccgagagctctgccatgactcctaaccgggtggacaggggggccgggcagccgcggcgcacacgctgggcgtcgtccctagcagcagaggagaccagaaggtgagagtccccatgccgcagccggagggccggggtgggcttgcaccgctatcgcgagagctcgtgaggtgggggcggcggggagctggggaggggctcgcggagagcctgccccgcctccctttccttcccctcccctggagtgattcaagacgagcgctacccacttccgccccctccccctgccattggaactagctgagccgaactagttgcggccaccgagcagccggctctcggcacctcctcctccgcctccctgtctcctgttccattcgcctttcctcttctttcctggcccacgccgctccgaggcctcgcgaccgccgagcctgcagcctgccccgcggccaacatgagcttcttgttgtgagtagccaggccccgcacgcgccggctttgttcgggtggacctgggcccccgcccgccgcccgccgcccgtcgcccgccctcgtcccgaccctcctggcccagcgctcccggggcccggcgtcaccaccaagcggggccccgggactgcgcggagcgctcggactacctaaccgccgcctccccatagggcttcgagtactcgtgggctcctgcagccctgaggaggttcttccccc

SEQ ID NO: 3340 - DNA, 30 bp, Homo sapiens
  chr4:71859615-71859645
  hyper
aagaaaatctccatcgaagggaacatcggt

SEQ ID NO: 3341 - DNA, 30 bp, Homo sapiens
  chr4:73433656-73433686
  hyper
tcttctgagagcatcgggcttcaccttgag

SEQ ID NO: 3342 - DNA, 572 bp, Homo sapiens
  chr4:73434678-73435250
  hyper
ttccacttcaccttctcaccccgtcctcccaacacagagtgtgcaggagcgagaaggtgctgtaagcgggcacaggctaagcctgggagagggggaagggacgaggggctttccaactatctctgcccaaagcagctttttcgaggcttttcgagcaccattggtccctaaggttagcgcggagaatgcttgggttccccggagcacagcagggggaagtattagcgagagagacgagcgagcgggagcgggagaaagaggcagggagagggcgactccgccgcacacgcagaggtgggggcgggaggagcgaaggggaggaggagaaggcaggcggaggaggtgggaggagtgggccgctcgccggctcctgttgctcgcagcgcggcagtctgctggctgctggcgacccgcggggcgctaataaggcgtccggagctccccggactgcccctcccgccgtggcgcccacgtcatgcggggcccgaacccgcgccccccgcaccgtgtcaggattggagaccgctcgggggctggtgtggcccgggctcgacctcccaccctggagcctc

SEQ ID NO: 3343 - DNA, 30 bp, Homo sapiens
  chr4:74702433-74702463
  hyper
agctcaggaacccgcgaaccctctcttgac

SEQ ID NO: 3344 - DNA, 53 bp, Homo sapiens
  chr4:74702696-74702749
  hyper
tgtgctgacagagctgcgttgcacttgtttacgcgttacgctgagagtaaacc

SEQ ID NO: 3345 - DNA, 30 bp, Homo sapiens
  chr4:74730215-74730245
  hyper
cagcaacagagaaactttgggctagtgagt

SEQ ID NO: 3346 - DNA, 155 bp, Homo sapiens
  chr4:74810002-74810157
  hyper
cagtagccggggagcgcgggggacagcggggggcgcggcgcagttcaccgggctcagaaggcaggtcgggcggcggtgcgaggagcgggagagctggcagggaggtgcctgcagcccaggctctgtggctccccaagatcggtgaacccttttta

SEQ ID NO: 3347 - DNA, 68 bp, Homo sapiens
  chr4:74904344-74904412
  hyper
gtcgggaagctgtgcgagaagcgggagagctggcggggaggtgcctgcgacccgggctgtgtggctcc

SEQ ID NO: 3348 - DNA, 30 bp, Homo sapiens
  chr4:74965120-74965150
  hyper
ttctctttctgccccgaatccctggagcgg

SEQ ID NO: 3349 - DNA, 862 bp, Homo sapiens
  chr4:75858216-75859078
  hyper
tggcccagtcatcgccgcggggcccgggtgggaggggtttggcagcggcaggcgcggcggcggcggcggaggcggaggcggccccgggctcgggcggctgggatggagcagaagagcgcggagcaccggagggcacgcagctgacggagctgcgctgcgttcgcctcgtttgcctcgcgccctccactggagctgttcgcgcctcccggctcccaccgcagcccacccggcagaggagtcgctaccagcgcccagtgcgctctgtcagtccgcaaactccttgccgcccgccccgggctgggcaccaaataccaggctaccatggtctacaagactctcttcgctctttgcatcttaactgcaggtaattggcgccatcctcccggaagggcaggtcgcggggtgggccccagtagctagcgcgtggtcggggctgaagctaggagatccggcagtgagtcgccgcgcgcctccgggtgagtgcgcaggtgtgtgcgcacttagatttggggtgacgtgcacctttggcggtcccgaaccgtactgagggaggggacgatggggtccttcctgccgcagcccgcgcccgcacaaactccagctttgtagaacaggtggctgtcttagctgcgtgttcgaacccagagtgggcaacacggactgcgcctcaaggcttctctttcttcaccagggtttcggagcgcactctgccaaagtacgggaccagacttcttgttgccgttgggccctggaagggatgaaaaagccggggaagtgggggtgggaggttcgcatctgggaaggcttcagcagcggctgcgcgcctggcggggctggtttgctttctcgagtcttggcggtc

SEQ ID NO: 3350 - DNA, 636 bp, Homo sapiens
  chr4:75859289-75859925
  hyper
cgtaggagccactctcgggtttcgggaccacagacggcgacgacctctggcagcggggatggggaagaggggagccagatgactgagctcggcttggcggggaccggggagagattcagaaagacgctttgaatctagagttcaggtacctattttttccagaaaacgtctcccgaaaagggacaactggctgtggatatggtgctgctgggaaaagtagcccgactgcgcggccactggcattttcagtttaaatgtgacccaaagtcacatagcgcaaaccgattctactcgtgctttagtctgtatatcctccctctgagttcgtcgggttcctacagttgtggacacgagtcgtcgcaatcccttgaaaagaagctagcggttttcaggcagctcacagtgggtaatgcagttataaggaaaagtttcccaacttgaaactatagcgtattttctctacttagtgaacgtccgtctgagaaaacctctttctcgctggtatctcggcacggtttggagacgcgtccgcggacagttcccgaatactcgcaggcggctttggctgcccagcctcgggctgagatgagagagcctaggtccggcaggtgcaataggcagcggagctcccggctg

SEQ ID NO: 3351 - DNA, 675 bp, Homo sapiens
  chr4:76555363-76556038
  hyper
ctgcggacgcagtcacgagtccagggcgaagcaggcagggaggcaggtgggcctcggtccgccgcaagctcacacttaggaggaccacgggccgcatgctgtcgtcgtcaaggcaacgacctcactctgtccccaaccataggcacaaagtcttgggagacagatacggcccaggtcagaatgcgttcacggcaggcaccaacacctgtgaaggccaagggctagagagcaattagctgggtgagaggcaccacctcccagctcgtaaggcgcccagtacctggagcctgggaacctgcaccgctccaactacccctgggcgaaggcgttggccgcggagctgcaagggggggcggtttctcacccgccccgagagcgccaggcctcccttcttctgattggccgagccgagtcgtcacgagccatgattggctcagggccaaccaccccgccccttcacctagggctcggcccaggttctgctccctgacacgcagaggccctgcgtccccacacgccttggttctcgtcaggaggcgcctttctgccttccccagcgggaggaggcgattgtgatgcccacgcgaagggtaaaggtggcggttatgtaggactgcgaagactatgcaaaatgcgatacggtttccctcatagcatcgccgctggggcaggggc

SEQ ID NO: 3352 - DNA, 30 bp, Homo sapiens
  chr4:76861088-76861118
  hyper
ccgctagtctgtgtcgggggcccccgcaag

SEQ ID NO: 3353 - DNA, 30 bp, Homo sapiens
  chr4:77135180-77135210
  hyper
ctggccgctcccagcgccctgcaccgcagg

SEQ ID NO: 3354 - DNA, 181 bp, Homo sapiens
  chr4:77172533-77172714
  hyper
cttgctatctctttatcgctcctcctgccttcttcctttctttccttcagtaaacgttttttgaaacgatgatgagcaaaaaacgcctgatccagtctatggcgcgtttcggtgggaagatgaacacgccttcccagcagagtaaaacgtgattacaccaaggaccggtaccctctccctt

SEQ ID NO: 3355 - DNA, 53 bp, Homo sapiens
  chr4:77173102-77173155
  hyper
tacgtacaacataatacgctgagataaccaacgcttggcgctgctctttgcaa

SEQ ID NO: 3356 - DNA, 786 bp, Homo sapiens
  chr4:77227425-77228211
  hyper
agttccaggaagctctcggcctctagctgaccgcgttgctgctgagcttccctggggagaaggcgccgaggtgcccggtgcgggccgaggcagggctgggcctcgcgggcagcaggcggaagaaggaagggcggtggggcaggtcccggctgcgcggggcagttgtgcgcacttgggttcttcacgcgggacacacgtggaacgccgacccctgcgcccctggccgctggcaactggcaaggccgggaacagaaagtgtagggacagaagagcgctggagtcttccccgggagggagcccggggctgcagcccaggggcggggagcggggcggggctgggaaagttgagtactggtcgctcagggccgggctccgccggagtgcccggcgcagaaaccgtaaaaggctggagcgggcggggtaggtgtggctctgtgtgcgtgacctgagccccggtcccagtccctgtagtctcctgcggccgcggcctctcagccatgggcgccgtctggtccgccctgctggttggagggggtctggccggagcacttttcgtttggctgctgcggggcggccctggcgacaccgggaaggacggggatgcggagcaggagaaagacgcccctcttgggggagctgcgattccgggaggccatcagagtggcagcagcggactgagccctggaccttccgggcaggagctggtcaccaaaccaggtattcttccccccgtgactccagggcacatctgccagagctttgaggttcatcgaggaagggagcaaa

SEQ ID NO: 3357 - DNA, 89 bp, Homo sapiens
  chr4:77610389-77610478
  hyper
tccaccccagaatccgttttcaaaccttagggagccttctttgccattgaaatgcaaatccggtcctgagctcccgggccaatccggga

SEQ ID NO: 3358 - DNA, 30 bp, Homo sapiens
  chr4:77611005-77611035
  hyper
atgggggcaggtggcgtgctccgagggtct

SEQ ID NO: 3359 - DNA, 905 bp, Homo sapiens
  chr4:77818254-77819159
  hyper
ccggctcagctagcgcgccttcttcccgctccctggaagccccgcggtcatcctgggcaggcagagcccgtgccggcttctcctccgcggtggccgagtgcgggagtgcgccgagctctcccggcagtacagccaggttgttctggaggcattcccagcagcagcggccctgcgtcttcgccgccgcgcagctcgctctcgcctgggcccctgccgctgcagctgcgggcaccggcggcctctgtccgggactgcccttcgatccgccgcccttcccgggcgccctacgggagtcgctgcccgggagtccattgcaagctgcgtcggcggctctggctgctgcacctgctggctcctcctccggctccttctcgcgccgccgccgcctgggctgctgctggggcggctccccccggcgcgcgcctcgcggggagcagggcgcagctccccctgcactgggggcggccgcgggcggctcgcggggtcgctgcagcccctcctcccccaaaaggtccctgtatctcctcttgagcaccacgtacttggtgccgtcggggtcctggcgcactgcggcgaccgagttgacgaagcccttgaagagctcgcggcggtgctggtgctggctgggggacgcgtcggggtctcggagaaagctcttgaagtggctcagcaaggcagcgttggtcacgcggcccccagcctggcacagaaagtccagtagtgcctcctggctcagctctcgggccatcgctgccttgtcctccgccccagaggtgtctgagtctcgccctcccggggctctccccagccagaggaaaccctggccgggcgagtgtcacctgcgcccggggcggcactagccgcccccatcagccgcggaggccagcgctgcccgcagcccgtga

SEQ ID NO: 3360 - DNA, 431 bp, Homo sapiens
  chr4:77819271-77819702
  hyper
cgcaacgagtcctcacagcgaaagttcccgggatagggccgagtcggtttcacctgcgccctggcggcacctcctccctgcctctgggggaagggtcaggcccgcctcctcgtgtccctccgccccctgaggtctcccccaccccctgccacccatcccagaagagtcaggccggagagccagccggtaggtgaggttggcggcgaaccgagccggcagcgaactgctctgcggccggggaagtggaaggcaggtaggcgaccggccgttcctctaagtctccgccacgcaggaaacaaaagcgatagaaggtccgttcctgtcctccggtgctttgatgagttcaggctgaagccgatgggggaggaggagaagctgcaagttaacaggcaatctgagttatctttctttattaacgctgtagaggagta

SEQ ID NO: 3361 - DNA, 30 bp, Homo sapiens
  chr4:78783067-78783097
  hyper
ggtgatgtagggtacggtacacacgaagca

SEQ ID NO: 3362 - DNA, 29 bp, Homo sapiens
  chr4:78979218-78979247
  hyper
tattgcctcatcattccgaaggtgagaga

SEQ ID NO: 3363 - DNA, 363 bp, Homo sapiens
  chr4:78979945-78980308
  hyper
ccgtgagactagttgtcgccatgatatcaaatgcaatccgggctcagccaaataaatgagtcaataagtaaatcaagagtttggggtcatgggatgccgggcctggggacgcgaggcgctgtgagctccctcctgctccgaggagccagggaagtcgccccgccagtgcttagggagggggaagggagccggcgggctgggaggaagacggcttaatccacagcgcctggctctcggcttcccctcccggctccattcattattcatccagctgcgggaagaagagttcacctgcccagccgcaaaccagagccgcggctgggcggcggcggcgggcgcagggcgggccgccttctccgccct

SEQ ID NO: 3364 - DNA, 30 bp, Homo sapiens
  chr4:81105152-81105182
  hyper
gccgccgaggggcccgcagtagctgcgctc

SEQ ID NO: 3365 - DNA, 30 bp, Homo sapiens
  chr4:81123354-81123384
  hyper
tccgctgccgccggcggcagcagcgcgaag

SEQ ID NO: 3366 - DNA, 46 bp, Homo sapiens
  chr4:81123857-81123903
  hyper
ggacgctggcggcggcggcggctcctccacgcccgcggccgcgtca

SEQ ID NO: 3367 - DNA, 610 bp, Homo sapiens
  chr4:81124121-81124731
  hyper
gcagccagcacgctctttctcgcagctgtccccgctggtgctgggccagaagctgggcgcgctcgagccatgccaccccgccgacggcgtgggccccaccagactctatcccgccgccgcggaccctctagcggtgaagctccagggggccgcggacctgaacggaggttgcgggtccctgccgagcggcggcggcggcctgcctaagcagagccccttcctgtacgccaccgccttctggcccaagagctccgctgccgctgcagccgcggctgcggcggcggccgcggggcccttgcagctgcagctgccctcggcgctcacgctgctgccgccctccttcacctcgctgtgtctgcccgcgcagaactggtgcgccaagtgcaatgcctccttccgcatgacctccgacctggtgtaccatatgaggtcgcaccacaaaaaggagtatgcgatggagcccttggtgaagcggcggcgagaggagaaactcaagtgccccatctgcaatgagtccttcagggagcgccaccacctctccaggcacatgacctcgcataattgactcggaaaggaccccagctttccacgcgcgcgcaagcacagttaa

SEQ ID NO: 3368 - DNA, 144 bp, Homo sapiens
  chr4:81186996-81187140
  hyper
ctcacgaatacagacggagagcttcccagaaggaaaaacaaattcgtcataatgttcagcgcagccgagagtttccaacaagaaagcagctccagtcgtggcatgatgactcagggtggcgttttaaacgctgaataaacccat

SEQ ID NO: 3369 - DNA, 30 bp, Homo sapiens
  chr4:81187891-81187921
  hyper
cagagccagaggcacgcagccgcacagggg

SEQ ID NO: 3370 - DNA, 30 bp, Homo sapiens
  chr4:81188390-81188420
  hyper
ggacagcaggtattcgccgggacacaggct

SEQ ID NO: 3371 - DNA, 30 bp, Homo sapiens
  chr4:81256777-81256807
  hyper
aaactgcaacaaaccgccggggggtgggat

SEQ ID NO: 3372 - DNA, 57 bp, Homo sapiens
  chr4:81951430-81951487
  hyper
ggggcccgcagtgtccgtcagaagaggctcgggaaagtaagcgagaatggtgttcac

SEQ ID NO: 3373 - DNA, 43 bp, Homo sapiens
  chr4:81951826-81951869
  hyper
ctctacagatcagctagagagcgaaagaactaagtctctctct

SEQ ID NO: 3374 - DNA, 383 bp, Homo sapiens
  chr4:81951928-81952311
  hyper
acactaaaaaactcggaccagccgcgccgcagctgctccaatccctggaaaaggcaatcgagcgccctccggaccgctgcgcacagccccggctccgacctggcgcccaaaacagagctagtcctagtccctcgcgcggccagtttggccgggtgttcccaaaaataaagcgaggagggaaggtacagacagatcttgaaaacacccgggccacacacgccgcgacctacagctctttctcagcgttggagtggagacggcgcccgcagcgccctgcgcgggtgaggtccgcgcagctgctggggaagagcccacctgtcaggctgcgctgggtcagcgcagcaagtggggctggccgctatctcgctgcacccggccgcgtc

SEQ ID NO: 3375 - DNA, 568 bp, Homo sapiens
  chr4:81952363-81952931
  hyper
cgccgccggctccttgcgccttcggagtgtcccgcagcgacgccgggagccgacgcgccgcgcgggtacctagccatggctggggcgagcaggctgctctttctgtggctgggctgcttctgcgtgagcctggcgcagggagagagaccgaagccacctttcccggagctccgcaaagctgtgccaggtgaccgcacggcaggtggtggcccggactccgagctgcagccgcaagacaaggtctctgaacacatgctgcggctctatgacaggtacagcacggtccaggcggcccggacaccgggctccctggagggaggctcgcagccctggcgccctcggctcctgcgcgaaggcaacacggttcgcagctttcgggcggcagcagcaggtgagtgcgcgaggtgagactcccttcccgcggtcccgccccagctttctcccgggaccccccacagcttccttgtctgccccttgcttggtggcgctgcctagggacctttctccgccctcctcagctgccctctggattcctccgtccagtcacaccccgcgtgtcgccagctgc

SEQ ID NO: 3376 - DNA, 20 bp, Homo sapiens
  chr4:82135867-82135887
  hyper
ttccctgcctccaggagctc

SEQ ID NO: 3377 - DNA, 285 bp, Homo sapiens
  chr4:82135919-82136204
  hyper
cgtacacacgtccacactcgaacagcacaagcaagagaccggctgggtgtggaatagaggcgcacatcgcgcaacgcattcacagcatgcacacgcgcgcaccccgaccccgtccctccccgcgcgccctcacaccccggcgcccaagacccccggcccacgaacctcaccagacagccgggtaactttccaggtgcgcagcttgtcacctcggcgcggccgcccctgcgtctcagcgtcctctcccacgccgccctccccagccgcctgcggcgccggagccca

SEQ ID NO: 3378 - DNA, 296 bp, Homo sapiens
  chr4:82136243-82136539
  hyper
cgcagcgtgggcccggggctgccggctcagtcgctccggctacgtgtgagccgggggcgcgggttagcgcgatgcgggcaggagctgcggcggcgtcggtgctgccgcctggctccgcggcgggggccggtgcagaggagacacgcagggagggagggaagagaggagggaaggaggagggagggggtcagccggggctactgcctggatagttgggcgccggcttccctaaaggtggggtcacccgcgcccgcacgcacactagcccgaacctttactcccgacacagccgcagt

SEQ ID NO: 3379 - DNA, 147 bp, Homo sapiens
  chr4:82136808-82136955
  hyper
ccaatgcctttctacgaagacatgtgaccccgaagcagctcgtcgacgcgcccctcccggactctggggccataacttacatctagtttgccagttcacgtgatgctgggggcaggggttgaatcgagtttcgagggacagagatta

SEQ ID NO: 3380 - DNA, 31 bp, Homo sapiens
  chr4:83719233-83719264
  hyper
gggggcggggggggggcggaagttgaaatac

SEQ ID NO: 3381 - DNA, 30 bp, Homo sapiens
  chr4:83720225-83720255
  hyper
agggcggctcacagcgcttctgctcttgtg

SEQ ID NO: 3382 - DNA, 30 bp, Homo sapiens
  chr4:83821902-83821932
  hyper
gtgattcatgctgtcgcgggaaccccgaag

SEQ ID NO: 3383 - DNA, 30 bp, Homo sapiens
  chr4:84030839-84030869
  hyper
cgggcttcaggaggcggggagtgggtgggt

SEQ ID NO: 3384 - DNA, 30 bp, Homo sapiens
  chr4:84206001-84206031
  hyper
tctgccaggctgggcggcggtgtgggcaga

SEQ ID NO: 3385 - DNA, 416 bp, Homo sapiens
  chr4:85402822-85403238
  hyper
gcgcctccgcgcccccgcgccgcgcccttccacctgcacccgttaggcgcgctgcgggacaacagcgcagatgcaaacagctttctcgcaaggaaaaagggaattgaggagaaagtttcctctctgagccgagggaagcggaaaaagatcaaaggtcgggggcgggtagagtgggggtggggggaaccgcgggacgccctagctgtgtgcgtttcgggaggcctcgcagtgccattctgcaagagtacctgctatctcgaaaatcttttgccaccgccgaccgcagcgggagggggcaaggggctctctctgactcagctccggatttgtgcatccccgcagtgcggcacccgcagtcttgacttccccagtctctgactgaacagatgtttttgtccctcgcggagatttgtaac

SEQ ID NO: 3386 - DNA, 251 bp, Homo sapiens
  chr4:85404224-85404475
  hyper
cgacctgcagggggcgtgcccggcatgggaagctcaggctacgtctccgaagcttgcgctgaaaacaccagaggtagggaaaacggggagagcgtactgtgctgggctctaccctggacaccccagtttcattctctgcgaagccacgcgctggcagggctctcgggacggcgatacccagggatgatggtacccctggtctcggcgggacctcccgggaacttgtcctgggggagggagcccaactggcc

SEQ ID NO: 3387 - DNA, 376 bp, Homo sapiens
  chr4:85419264-85419640
  hyper
cgcggcagggtacagcggggtcttcatctcggccatgctgtgcagggcggccaggggagggctgctgagcaggaatgcgctctgccgggtgccctccattgcccccaccgctaacatcccacggccacgccggagaccgtagccttgcagcgagggcgctggctggtgccccccgcggggctcagaggagccggaagcgccgagggcgcgagcggagaggcactcggcgcgcccggaggcgagctgccaactgaaccaaaaatgccgctgccgggagttgctcgcctagctgcgcagcagagatgtccaaaccctccacgcgggaggcggcagctcgccgagaaaagcaggcgtcccggcgggctaggcagtcctt

SEQ ID NO: 3388 - DNA, 551 bp, Homo sapiens
  chr4:85419661-85420212
  hyper
cgatccctggctattctctcttcctcacttttcctagctgttcaaagtgcgctacttctcatcttctgcccccgggaaataagcaaaacaaaacccaggctggctccggagagtttgtagcaaagttagttgccgaatctccactttgaagttggagggtgggggtggcttgctttctttggggaggttcaaaggacgccttgtgcagcccgtggcgctcctctgatcttactgggatgctctgctctttcggtcgcgcggctgattcgcattcgacgctcactgtgcccggggagaaagcgcatccagcccgcgggagatctagcctctgtgcgggcttcctccgcccacgctgccccgggctgctgcgccagaaagggcagtgccacggatccccgcggctcccaggtcctcacctccacccgccttgccctctggcccacggggcactggagttgcaatattgaaaagaaaaagggggaggaaaaacacagaaaaacaaaagactaagtgtgaaaagtctgacggctgggtttcggcgccgctcgtca

SEQ ID NO: 3389 - DNA, 279 bp, Homo sapiens
  chr4:85503985-85504264
  hyper
cgtcacctcacggggaggcggggctgtgggaaccgcagtgcagcgcagaggggcggggcctgcggcgcgagacctggtgcgggaggcccgggcagggagaagtgtgcggggccgggacaagccggctccgagtccggctccggggggcggggcgggaggggcctgcgcggcggcgggagcccagagccgcgctaaagcgggtcaagcgtcctccttttctccccgccccttctcctcctcctacctgggcctctgcgtggagacgcgcacctggcaacc

SEQ ID NO: 3390 - DNA, 150 bp, Homo sapiens
  chr4:85886792-85886942
  hyper
tggctccttccataatcgaagggcttccagcgtagggcgtagggggagaggcccgaagccctggagacagcgcccgagggatggaggccgcgctcggctgcgctcaggtccgggtggctccgggagctgagaccccgcaggatgcagcgg

SEQ ID NO: 3391 - DNA, 420 bp, Homo sapiens
  chr4:85887160-85887580
  hyper
cggcggcggcggctcccggccaaggcggaccctggggaggacagcagctgggccgcggcctgtccctagggggagcgggcgcagggccgcgagtgggcagcgcctccgccccgcacgaacaaagcggccaggcgcgccgggccgaggcagcaccgcctctccgggagcgcggggggcggggaggatggcgggggtactcacctgagggccggcggagggcgcgggcgggacaggcccaggagacgggaccgcggcgggccggggctccgcgccgagggcgcacgggctacggggaaggggcgaccggcgcgacgtccgcggcggggcccgggagccccgcgccgcgggccgggggccggggcccgagctcgattctgcggccgcgaggtatgggaaccggtccgccgggccaggcagcgg

SEQ ID NO: 3392 - DNA, 325 bp, Homo sapiens
  chr4:85888137-85888462
  hyper
acccctgcccctctccgcggcgctcaccctcctcagtcccagtttctgaaaggactcagctgagaaaggacaactgggttccgctttccttaaccctacaccctttagctggatgctgtcagaggcgatggagaaacgcaaaggtgcgttaattttactctagccagagtataaaagaactgcccacgccagctattgtactacgcagcttcgaaactcctgcacgctctcctgtgtggctcccgtccgtgatgggactgtagttgaggagctcggtctcaaatggtgccttccgtcagtgaccttgagtcggttgcctaagatt

SEQ ID NO: 3393 - DNA, 56 bp, Homo sapiens
  chr4:86851384-86851440
  hyper
ttggaatgggcactcgactgttctgacgttgtgattctctcgggagtttgaagaca

SEQ ID NO: 3394 - DNA, 342 bp, Homo sapiens
  chr4:87281265-87281607
  hyper
aaggagcacacatgacgtcaaagcccagagaggtctagggagggggatgagggggaaacagaaagaggaagcgtctatgtgcagctacagctactgtgttttccggtgaaatgaggaccaggcaaatgtaaaggaataaggttcgtcggcagccaacatcagcaactacgacatcaaggcagccagcctgcacaacctgaagaaaagatccattcgatgcagttctggccctttgcacagcagcacggaggagcaaataccagcagagcaaaacaccactggaaatgcaacctctgcttttcaactatctcttgtagtatctctaaacgtcaaacaagtaag

SEQ ID NO: 3395 - DNA, 853 bp, Homo sapiens
  chr4:87515169-87516022
  hyper
caccacactgcaggcgctaggaactctgccgctcggtcaccaacctgagcctctggctagtccgaagaacgcgaaaagccaggcccaaggcactggttgtcatggcaaccggggcgctggtctccctggcgacctcgtccctagggaggaggtggagctggatgccaggcgggccaatgaggtcgaggggagctcggggtgggagatctgcggtcctcccagtgccggggaatggttgagtgacaggaccgggggggcggagccggcgcggctgcccgaggtggagccccagtggtgcgagtagctccagcggccacgctgaggcgagggtgacacaccatgctcacggcccctggagaccgtcgtgctggcgagccgtgctccgtagctccccggtccgcctcggcagcggtcagagtcgcctacaggagttgagccgcccgcgccagaaggttttggcgaagctcttggagaggcgtcgagcacagtagggcggcgggggtgcgttgagcgctcgggggtcaggcagtcggccgggatcgccgctggggagcgtttccgaggcgaggaggaggaggaggagatgctgctcctcttctccccctccccaggctccttctacagctccttcagcccacgcccgcagccgcttgtgggagaagtggtggtggctctcggcgcccgcggcggctgccggcggcccgccccgacgccgcgtccctgcagccctcgcccggcgctccagtagcaggacccggtctcgggaccagccggtaaggacgagagccgccctgggctctgcgctgcatgtgcagaagtgcaaaacaaagtacattgcgctcgttctcttcct

SEQ ID NO: 3396 - DNA, 822 bp, Homo sapiens
  chr4:87813017-87813839
  hyper
gctccaacaccgctgcgccaaaatgtgtctgatcgtggcagtgctgagcgaccaaaggctctgcctgcacaggaaccacccgccccggcccgggcactttgagcagagcaatccttcccaggttttccctcattcaaaacactcagcaccactcccgcgtccccgcccttgcacgccgattcggggcgagtcccctacccttccccggacggacgcgcagggcccgggaggaactggttcccgggacgggtgggggcctcggccgcccacagagcccgcggagaagggaacggcctcagcctcggctccttcccacacctgggccccaccctgcctccgactcgccaggaatgcgctgtgtgcgcggggcttccagggtggcgggtccccgcgagccggcgccggcggcctggttacccgggctccaggggctcggagggtcgcggccggggtactgaggtaagagcgcgctgcgctaagcgcacatggccgcgcacacgcctcggggccgcgccgcaggcacacgcctccttcccgctcgccgcgggcgccgagtctggggctcctcgcgtcacacgggagcctcaacaaagggctttgtggggccctccccacccgccagggaggggacgccgggcccgggagacgcgccccgcggggtccgctctctggtaaccgggccggggcaggccgcgctctcggaatccagccaaccagccagagagggctgtaagccagacctttcctgggaaggacgctttccaatgtagggggctgcatccaagcgatctggacttcgtttgcgggcgccatttaaagaaa

SEQ ID NO: 3397 - DNA, 260 bp, Homo sapiens
  chr4:87856810-87857070
  hyper
cttctctcctgcaccccgggacccttccctgtgcctgtcgtggagagagatgagggcttcccgccgcgtctcgctgagagcaggagggaggcgtgtgtcggtggtccgtagcctccggggaggagttggagccaccttctgagacttaacttcagggacagagggagaggcgtctttagtatgggactggttaatttctcttgataatgcttttttccctcgggtgtcccatcctctgtggccgtcgcaaccccaccctc

SEQ ID NO: 3398 - DNA, 30 bp, Homo sapiens
  chr4:87857403-87857433
  hyper
cttggtgcacgttgcggggtgtgactcacc

SEQ ID NO: 3399 - DNA, 30 bp, Homo sapiens
  chr4:88141302-88141332
  hyper
cccgccaatgggggcgacaaaagccgtgga

SEQ ID NO: 3400 - DNA, 137 bp, Homo sapiens
  chr4:88886999-88887136
  hyper
tggggccaggccaagtcgcccatgggcaggggagcagctgtcaggcagagagggtccccaaggcagaactgggtccagggcagtgtgacgcttgcacacagagcgtggtggccgagccaaggcgctgacctggggtg

SEQ ID NO: 3401 - DNA, 30 bp, Homo sapiens
  chr4:89079572-89079602
  hyper
aggatctcaggatgcgtgcgctcggaggca

SEQ ID NO: 3402 - DNA, 781 bp, Homo sapiens
  chr4:89377923-89378704
  hyper
acaacgcttaacaaactttggcttccgttatccctccctctggaaatgcgtgtgtcagggtgcctcctagtggaactgcagcgtttcctcgaaagccattccgtccaggagttaaggtggccgctgcccgcccgggacactttctcagtccagcccatcggcctttaccccagccaacgacctgttgcctttggccgcctgccaagtcactctcattacagtttccttttccttttcgattccgccccctaaaaacaacaacaaacattatgtttcgttttccactggagctgcaggccccgcccccaaacagcacgtggggggcgtggcgtcccggcaggggctcagtagctgaggctgcggttccccgacgccacgcagctgcgcgcagctggttcccgctctgcagcgcaacgcctgaggcagtgggcgcgctcagtcccgggaccaggcgttctctcctctcgcctctgggcctgggaccccgcaaagcggcgatggagcggaggtcgcggaggaagtcgcggcgcaacgggcgctcgaccgcgggcaaggccgccgcgacccagcccgcgaagtctccgggcgcacagctctggctctttcccagcgccgcgggcctccaccgcgcgctgctccggagggtggaggtgacgcgccaactctgctgctcgccggggcgcctcgcggtcttggaacgcggcggggcgggcgtccaggttcaccagctgctcgccgggagcggcggcgcccggacgccgagtgagtggggctggtgtgt

SEQ ID NO: 3403 - DNA, 30 bp, Homo sapiens
  chr4:89513527-89513557
  hyper
ggccgccattggcgcgggcccatcccagaa

SEQ ID NO: 3404 - DNA, 30 bp, Homo sapiens
  chr4:89744925-89744955
  hyper
cggtggttactagtcgctggtgacatcacc

SEQ ID NO: 3405 - DNA, 30 bp, Homo sapiens
  chr4:90228670-90228700
  hyper
gaccgaatcccttccgcatccctacagagc

SEQ ID NO: 3406 - DNA, 871 bp, Homo sapiens
  chr4:90757987-90758858
  hyper
ggaaagaagaaggaaaaggagcgcacaggaagggcggaggcggcacccgggggggactgtccccagaggaggccgctgtgagccggcgacgcgaggctgggggagtgggaggcaaacccgctaacctgtcgtcgaatggccactcccagttctccgctcacgagggtggaaaggcagaaggcttgaaggcaaggcgtgagggagcgcccaggacgctctcggaggggccgggccggggtctgcgctgcagcccgcacgcacctcacttccgcgtcgcggcgctcggtcgctcgccccctctcttgggccccttctggtcgtcgccgtcctcctcctcctagtcctcctccttctccttctcctcggctctccgcccccaccgctgatttgtcagcgcttctgcccgcccctctcccggcgctcgctgctttccctgcagcgtgctcctcgtccctatctcggatggggatggggcagggggcgcggggtgagccatcaactccagccgcctgcctggccgcgcaaggcgggaaagtgggggcgcttttgcgcctcacgttaagtttagggtcacgagcactcttgtggagatcgggagcggttgggctagggatgatgcctcttcctctttccccttcccctcccttcttgtccccgcctttcctctgggtcctcccggggaccaccccctacccctcgtcagagtcgccctgggagagccgagggcctgagggtcgaccaccaagggcagagcctatcccttggggagctgctggaggagacaggcagcgccgggaggtggctcacaccgcaccgccgagagcgctttgccctcgcatcgctgaaatttaatcacggtcacaggttacaa

SEQ ID NO: 3407 - DNA, 30 bp, Homo sapiens
  chr4:90823115-90823145
  hyper
agaattctgcatcacggcatccgttagcct

SEQ ID NO: 3408 - DNA, 327 bp, Homo sapiens
  chr4:91048332-91048659
  hyper
ggggaaaaggccaggtcagcacggtgggatactgcttcccctaaaatgaaaactcagcagcgggccagcagtgggtgtgcgcgcgtcgatgccagaggatgcgtgcgtggaatccggcggacgcagtgggccgggcaccgccctccaagccgccccgcccagcccaccacactcctccttgtataaaggccgcgcttgggcccgccctcctcacagccccggagcgcggcctgccggggaggtggatctcgcgctccccacacagtcacactccgcgcactcacacacttggaagcgcctccccacgtccctcccctgccctcctct

SEQ ID NO: 3409 - DNA, 51 bp, Homo sapiens
  chr4:91048894-91048945
  hyper
ggggaccaggaaggacacccccgtgccccgaagacataaatccctgagtgc

SEQ ID NO: 3410 - DNA, 37 bp, Homo sapiens
  chr4:91049201-91049238
  hyper
ggcccgcgactcccagtgcgccgcgtggccatttcct

SEQ ID NO: 3411 - DNA, 164 bp, Homo sapiens
  chr4:92905821-92905985
  hyper
agatgaacaggtcagacggggaaggagggaagcagtccaactagctgaaaagatcatggtctattaaactttaccacagatctcagtggaacaaggcaactggcggtcactctggcagcactattaggataattttatatatatatatatatacgtgtatatat

SEQ ID NO: 3412 - DNA, 30 bp, Homo sapiens
  chr4:93224880-93224910
  hyper
tttccccctctctccgcctgacagcaccgc

SEQ ID NO: 3413 - DNA, 246 bp, Homo sapiens
  chr4:93226457-93226703
  hyper
ttcttggctttatgatccttgcgtgtagtctttgagacggtggcaggaggggctggcggcagtgtcgccaaggactgattgtcgcgtgcctcgcctcctcggacacgctcccggggcctggcgcggcggcgaaactgaccccggggcgcttgggaaacgcggggaagcgaatgcgcgcaggctgctcccgaggtctgcttagcagatatccgccttgcctcgcctcgcctcgcctcgcagtcaact

SEQ ID NO: 3414 - DNA, 299 bp, Homo sapiens
  chr4:93226728-93227027
  hyper
cgaaggcgccgggactactgcgggccgcgactctgagaaggactgccgagcgggctccgagatgctggtggccccacctattggcaaccagacgggccgggactggccgcggcgagcaggggcgggcggggggctgcgcgtcattatcatgcacagcgctcgcagcttcaggctccaactctactcacttgctaatccgtgagagctgagcgggagacaggctcttgcagccttttctgcgttaatgcgacgatttctttttcggaaattcgcttaccgagccagcaaggtttctttgc

SEQ ID NO: 3415 - DNA, 31 bp, Homo sapiens
  chr4:94749724-94749755
  hyper
acacaagaacttttctcggggtgtaaaaact

SEQ ID NO: 3416 - DNA, 364 bp, Homo sapiens
  chr4:94750682-94751046
  hyper
gatggcccaaatctacatcaacgccttgtccgagctgctacaaacgcccagcggaggggaacagccaccgccgcctccagcctcctgcaaaagcgaccaccaccaccttcgcaccgcggcctcctatgaagggggcgcgggcaacgcgaccgcagctggggctcagcaggcttccggagggagccagcggccgaccccgcccgggagttgccggactcgcttctcagccccagcttctgcgggagggtactcggtgcagctggacgctctgcacttctcgactttcgaggacagcgccctgacagcgatgatggcgcaaaagaatttgtctccttctctccccgggagcatcttgcagccagtg

SEQ ID NO: 3417 - DNA, 97 bp, Homo sapiens
  chr4:94753497-94753594
  hyper
agtttgccgtgctcacgataaacatcaggaatcttcgggctgctgaataaatcaagcgattgcttctaacacatttccatttcgctctcaataagca

SEQ ID NO: 3418 - DNA, 30 bp, Homo sapiens
  chr4:95293542-95293572
  hyper
tcccatttatcaatgacagttgtcatcctt

SEQ ID NO: 3419 - DNA, 30 bp, Homo sapiens
  chr4:95678924-95678954
  hyper
aagtgtaatccctccgctaagtacttggct

SEQ ID NO: 3420 - DNA, 1889 bp, Homo sapiens
  chr4:96469271-96471160
  hyper
cctccagccgggtacgcggattcgggtgagctgtgtatttccacagcacctgaagcagcaggcgagggggacgggtgcttttgagtccttgacagtaatggacacatttccttagctgagcgcccttcggggtctagtgtgctcagagactcagtgaagatcctgctaccccagtcttggcacagcgcggggagcctctgcgcatcatgcgcttcggggtgcatctacggtatgtcacacagccacccgcaccgagagtctttccaaacctccgtgtgtgcaatatgcaacaacgtgcgcgtgcggagctgaaagggcacaagacactccaggctcccacacgtatggagacggatcggctgcgtgtccacaccccgttcgtccctggtccattcgtgcccatctcagaagatagattaaacataataataataataattattattattataatcaaagcttcttgactagttgggaaagtggaatttagagtggtttccagttgaaagcaacgaggcaaattgaggaagtcaagagaactggggaggaggagaggaaggagggaaggaagaagctaagggaggtggccgcggagcttggcggacccccttaccttgggcggcggagccagtgccgctggcgctgagcagggccagggcaggtagcacgagcatttgcagcaagtatcccagtcccagtccgcagcgggccgctgtcgcccgcagacctttcctcatcgtagacagaggtgtgccggggggaggggagggggacagagagacgcgcaaacagctgaaagccccactgggcagaagctgaatccgtgcaccgcgaagcagtccgaagaaataacgacaaccaagcgccacactccactttctccaaaggcaggggccaaaagggggaggagaggagacgccgaggaggagtttgaaggtccctctttcccaatgccttctaactgacgtctcccgcgagcgactgctctgcccccacttgggaagtccagggaggcgcaaggcggccacctccgccgctccccccagcagcaggagcagccgcagctccgccgcacgccgaagtctggactgctctccgggtcccctcgcctgtgaggaacacacacagacaccgggggtgggggtgggggtgggggttgaagtggggggagttggaggaggagggaacggagggaggaagcttgggcaccgtcaggcgctctggtctccaatctcagtgttctcacgccggcggagagatgtcccggctgtcgctgctgggtggccaaggaggttcacatcctagagtagggcgcacgggtgcgcgaaggcgctcgccaaggaggcgtagagggcgcagcacaactcctctggggggtaaccgggggcgggagcacgcccgcccgccttatgtaagcaaggattgcagggagatcagcgcccaggagaccagctgtgggtttgcccgctgaagccgaggcgagacagaccaggggacgaagcggctgcggagagtggcagcgcgcctgcctcccgcggtgcgccagacctggacgccgggagtgcagcgggcgcgccccgggccactaggctgtgtccagtggagctcagcctgccgcctgccaccttcttcgccgcgccggcaaagcctcagccgaattccctaggactggactcggtctacgacttcgggtctcgcggttgacgaagccggtgcgggctcgaactgaagtccttcttggttggggaagaaggcatgaagcttttgcactgccccagccggctgctgtcctggggttgtcagcgccagtcagactgctttatgttctgagcgcgtatgacccctttgcagtggaacagaaactaaaagctcgacggaaactcattctg

SEQ ID NO: 3421 - DNA, 30 bp, Homo sapiens
  chr4:99850525-99850555
  hyper
cgcggttctcaacgcggcggacactcgctt

SEQ ID NO: 3422 - DNA, 233 bp, Homo sapiens
  chr4:100729522-100729755
  hyper
tcatagagaggaaggaaaaagcgatggatctaatcttgacttcaggtaaaacagctcccccgcgcccaccaacgcggtattactgccacctagtgatagcatatcctcatcacagaggtcctgcctgtggaagtggaggggaagaggtgtagtaagcacagccagtagggcgaatccacaaattaaatacacccgggggttgggggtggcgaggggagcgctagagtaaggct

SEQ ID NO: 3423 - DNA, 231 bp, Homo sapiens
  chr4:100867971-100868202
  hyper
gaccaacctcctgggccggggcgtccgagctgactcggtggtccgcgcacggcgccagcaggctcgaagcggacctgcccgggaggcggacgatagcagccgggctgcccatcgcggggaggggttccgcccgggacccgattgccggcattggtagcgccgtgccctgtgacctccaggcgaggccctcgcagctcaggccaggaggacagggtccgggaaggggacact

SEQ ID NO: 3424 - DNA, 392 bp, Homo sapiens
  chr4:101111125-101111517
  hyper
gccagttgcaaccatggtcaacggctctgtttccttcgcgaggcgcaacggcctttcctgagcgctggaaaaaatgaggcgagaagagacggatttgcaaaagcaggcgagtcgtgcagaggctcctaaaatgcccggcgtcccgggagcgaactagcggaggaactcctttgccaaaggggtggaaccggcctctgcaactcaatttgacaaagccctgggagcggagccgcaacctgaaactaactcaacagttcgcaaaacttggaagcgacctgccccgcggagcgccccccggccccgctgcccccaccaaggccgcagcttcgctcacctgccaggagttcgcgggggcctgcgcgctcgctgccgggtaaacacaggcaggtggc

SEQ ID NO: 3425 - DNA, 361 bp, Homo sapiens
  chr4:101111826-101112187
  hyper
ttccagggtagatctcgggccactgggaccgcaattccgggtgcacgactcgtcaaagcctgaacctgattgttcagtgcgacccctccccgagcgtccgcgctttcacactcaggctgctcccggcagcgggaagctttaagcgatctgtgcatttccttgtcctggggctttgctgtgtcatcctgaacacttggcttaaatctgttgcaacgtccactgagcatcatttatgcacttatttctggcctctaacccagtcaactctactctgcctcccagggtttctgtatcctcctctgctgcaagcggtcagatctagttttcctttcccgcatcgaaggctcgccagcattttaag

SEQ ID NO: 3426 - DNA, 30 bp, Homo sapiens
  chr4:102268230-102268260
  hyper
ctgagcacgcctcccggttcttcttttatt

SEQ ID NO: 3427 - DNA, 30 bp, Homo sapiens
  chr4:102268607-102268637
  hyper
ctgcctccccgcgccgctcctccactcacc

SEQ ID NO: 3428 - DNA, 30 bp, Homo sapiens
  chr4:102269410-102269440
  hyper
tgcgatgcggtgtacggttgtttttgcttt

SEQ ID NO: 3429 - DNA, 41 bp, Homo sapiens
  chr4:102711836-102711877
  hyper
cagagcggagccctggccttgcgggcatgagccccggggct

SEQ ID NO: 3430 - DNA, 58 bp, Homo sapiens
  chr4:102712137-102712195
  hyper
cgccgaggccgggctacggggctctgcggagaccacgggccatcgttagacaactgca

SEQ ID NO: 3431 - DNA, 170 bp, Homo sapiens
  chr4:103681574-103681744
  hyper
acgcttcagtagagaacgactgcagtaagtaaactgctagtagcaacactgttcccctatctaaacttcccctttccagagttactgatgtcccaacatgggtcggtcgctcagtctccgtcaagcccgtaccccatagcttgggcatttccccccgcagatcacaagat

SEQ ID NO: 3432 - DNA, 30 bp, Homo sapiens
  chr4:104020934-104020964
  hyper
cttactttaagcagcgagctgatggcgttc

SEQ ID NO: 3433 - DNA, 30 bp, Homo sapiens
  chr4:104251138-104251168
  hyper
ttgtgaagtacctcaactgtgataagaacc

SEQ ID NO: 3434 - DNA, 350 bp, Homo sapiens
  chr4:106067030-106067380
  hyper
taaacagaaggtgggccggggcggggagaaacagaactcggtcaatttcccagtttgtcgggtctttaaaaatacaggcccctaaagcactaagggcatgccctcggtgaaacaggggagcgcttctgctgaatgagattaaagcgacagaaaagggaaaggagagcgcgggcaacgggatctaaagggagatagagacgcgggcctctgagggtaaggtgggcgcaagcggaggtgtggtgcggggagaggtgccagtgggtggaggcgggggccagagcgagggcacgtgcgggtacactccggaggaggtgggtgcgcgcgggggcgtgtgcgcgggacctcgaagt

SEQ ID NO: 3435 - DNA, 296 bp, Homo sapiens
  chr4:106067840-106068136
  hyper
cggcagtggcagcggcgagagcttgggcggccgccgccgcctcctcgcgagcgccgcgcgcccgggtcccgctcgcatgcaagtcacgtccgccccctcggcgcggccgccccgagacgccggccccgctgagtgatgagaacagacgtcaaactgccttatgaatattgatgcggaggctaggctgctttcgtagagaagcagaaggaagcaagatggctgccctttaggatttgttagaaaggagacccgactgcaactgctggattgctgcaaggctgagggacgagaacgag

SEQ ID NO: 3436 - DNA, 278 bp, Homo sapiens
  chr4:106068587-106068865
  hyper
ctgatagggtgtttttcgacccttttatcagctgtagggtctgggtctgggtttgtgtctgcctcctcctaccttcttatccccctttagggggctgtacgaagtgaatgtcacagggagtggaattggagtacactgagtgggttttttttttccttaagtccgcgcgttttgttagcggcgctgagtgaaagaggaaagaatagtttctctggttccccaaacaagaccagaactcacttttctcaaggtacataagtcagcgctgggctgagcct

SEQ ID NO: 3437 - DNA, 147 bp, Homo sapiens
  chr4:106111515-106111662
  hyper
ggctggcaaacattcagcagcacaccctctcaagattgtttacttgcctttgctcctgttgagttacaacgcttggaagcaggagatgggctcagcagcagccaataggacatgatccaggaagagcagtaagggactgagctgctg

SEQ ID NO: 3438 - DNA, 4462 bp, Homo sapiens
  chr4:106155052-106159514
  hyper
gaattcaactagagggcagccttgtggatggccccgaagcaagcctgatggaacaggatagaaccaaccatgttgagggcaacagactaagtccattcctgataccatcacctcccatttgccagacagaacctctggctacaaagctccagaatggaagcccactgcctgagagagctcatccagaagtaaatggagacaccaagtggcactctttcaaaagttattatggaataccctgtatgaagggaagccagaatagtcgtgtgagtcctgactttacacaagaaagtagagggtattccaagtgtttgcaaaatggaggaataaaacgcacagttagtgaaccttctctctctgggctccttcagatcaagaaattgaaacaagaccaaaaggctaatggagaaagacgtaacttcggggtaagccaagaaagaaatccaggtgaaagcagtcaaccaaatgtctccgatttgagtgataagaaagaatctgtgagttctgtagcccaagaaaatgcagttaaagatttcaccagtttttcaacacataactgcagtgggcctgaaaatccagagcttcagattctgaatgagcaggaggggaaaagtgctaattaccatgacaagaacattgtattacttaaaaacaaggcagtgctaatgcctaatggtgctacagtttctgcctcttccgtggaacacacacatggtgaactcctggaaaaaacactgtctcaatattatccagattgtgtttccattgcggtgcagaaaaccacatctcacataaatgccattaacagtcaggctactaatgagttgtcctgtgagatcactcacccatcgcatacctcagggcagatcaattccgcacagacctctaactctgagctgcctccaaagccagctgcagtggtgagtgaggcctgtgatgctgatgatgctgataatgccagtaaactagctgcaatgctaaatacctgttcctttcagaaaccagaacaactacaacaacaaaaatcagtttttgagatatgcccatctcctgcagaaaataacatccagggaaccacaaagctagcgtctggtgaagaattctgttcaggttccagcagcaatttgcaagctcctggtggcagctctgaacggtatttaaaacaaaatgaaatgaatggtgcttacttcaagcaaagctcagtgttcactaaggattccttttctgccactaccacaccaccaccaccatcacaattgcttctttctccccctcctcctcttccacaggttcctcagcttccttcagaaggaaaaagcactctgaatggtggagttttagaagaacaccaccactaccccaaccaaagtaacacaacacttttaagggaagtgaaaatagagggtaaacctgaggcaccaccttcccagagtcctaatccatctacacatgtatgcagcccttctccgatgctttctgaaaggcctcagaataattgtgtgaacaggaatgacatacagactgcagggacaatgactgttccattgtgttctgagaaaacaagaccaatgtcagaacacctcaagcataacccaccaatttttggtagcagtggagagctacaggacaactgccagcagttgatgagaaacaaagagcaagagattctgaagggtcgagacaaggagcaaacacgagatcttgtgcccccaacacagcactatctgaaaccaggatggattgaattgaaggcccctcgttttcaccaagcggaatcccatctaaaacgtaatgaggcatcactgccatcaattcttcagtatcaacccaatctctccaatcaaatgacctccaaacaatacactggaaattccaacatgcctggggggctcccaaggcaagcttacacccagaaaacaacacagctggagcacaagtcacaaatgtaccaagttgaaatgaatcaagggcagtcccaaggtacagtggaccaacatctccagttccaaaaaccctcacaccaggtgcacttctccaaaacagaccatttaccaaaagctcatgtgcagtcactgtgtggcactagatttcattttcaacaaagagcagattcccaaactgaaaaacttatgtccccagtgttgaaacagcacttgaatcaacaggcttcagagactgagccattttcaaactcacaccttttgcaacataagcctcataaacaggcagcacaaacacaaccatcccagagttcacatctccctcaaaaccagcaacagcagcaaaaattacaaataaagaataaagaggaaatactccagacttttcctcacccccaaagcaacaatgatcagcaaagagaaggatcattctttggccagactaaagtggaagaatgttttcatggtgaaaatcagtattcaaaatcaagcgagttcgagactcataatgtccaaatgggactggaggaagtacagaatataaatcgtagaaattccccttatagtcagaccatgaaatcaagtgcatgcaaaatacaggtttcttgttcaaacaatacacacctagtttcagagaataaagaacagactacacatcctgaactttttgcaggaaacaagacccaaaacttgcatcacatgcaatattttccaaataatgtgatcccaaagcaagatcttcttcacaggtgctttcaagaacaggagcagaagtcacaacaagcttcagttctacagggatataaaaatagaaaccaagatatgtctggtcaacaagctgcgcaacttgctcagcaaaggtacttgatacataaccatgcaaatgtttttcctgtgcctgaccagggaggaagtcacactcagacccctccccagaaggacactcaaaagcatgctgctctaaggtggcatctcttacagaagcaagaacagcagcaaacacagcaaccccaaactgagtcttgccatagtcagatgcacaggccaattaaggtggaacctggatgcaagccacatgcctgtatgcacacagcaccaccagaaaacaaaacatggaaaaaggtaactaagcaagagaatccacctgcaagctgtgataatgtgcagcaaaagagcatcattgagaccatggagcagcatctgaagcagtttcacgccaagtcgttatttgaccataaggctcttactctcaaatcacagaagcaagtaaaagttgaaatgtcagggccagtcacagttttgactagacaaaccactgctgcagaacttgatagccacaccccagctttagagcagcaaacaacttcttcagaaaagacaccaaccaaaagaacagctgcttctgttctcaataattttatagagtcaccttccaaattactagatactcctataaaaaatttattggatacacctgtcaagactcaatatgatttcccatcttgcagatgtgtaggtaagtgccagaaatgtactgagacacatggcgtttatccagaattagcaaatttatcttcagatatgggattttccttctttttttaaatcttgagtctggcagcaatttgtaaaggctcataaaaatctgaagcttacattttttgtcaagttaccgatgcttgtgtcttgtgaaagagaacttcacttacatgcagtttttccaaaagaattaaataatcgtgcatgtttatttttccctctcttcagatcctgtaaaatttgaatgtatctgttttagatcaattcgcctatttagctctttgtatattatctcctggagagacagctaggcagcaaaaaaacaatctattaaaatgagaaaataacgaccataggcagtctaatgtacgaactttaaatattttttaattcaaggtaaaatatattagtttcacaagatttctggctaatagggaaattattatcttcagtcttcatgagttgggggaaatgataatgctgacactcttagtgctcctaaagtttccttttctccatttatacatttggaatgttgtgatttatattcattttgattcccttttctctaaaatttcatctttttgattaaaaaatatgatacaggcatacctcagagatattgtgggtttggctccataccacaataaaatgaatattacaataaagcaagttgtaaggactttttggtttctcactgtatgtaaaagttatttatatactatactgtaacatactaagtgtgcaatagcattgtgtctaaaaaatatatactttaaaaataatttattgttaaaaaaatgccaacaattatctgggcctttagtgagtgctaatctttttgctggtggagggtcgtgcttcagtattgatcgctgtggactgatcatggtggtagttgctgaaggttgctgggatggctgtgtgtgtggcaatttcttaaaataagacaacagtgaagtgctgtatcaattgatttttcc

SEQ ID NO: 3439 - DNA, 241 bp, Homo sapiens
  chr4:106159633-106159874
  hyper
tttttgtaattttctgaatcctttgttgtcatttcagcagtttacagcatcttcattggaagtatattccatctcaaacattctttgttcatccataagaagcaacttcttatcaagttttttcatgacattgcagtaactcagccccatcttcaggctctacttctaattctggttctcttgctacatctccctcatctgcagtgacctctccacggaagtcttgaactcctcaaagtaa

SEQ ID NO: 3440 - DNA, 181 bp, Homo sapiens
  chr4:106160113-106160294
  hyper
atgttgtattaacaggcacgaaaacagcattaatcttgtgcatctccatcggagctcttgggtgactaggtgccttgagcagtaatattttgaaaggaggttttggttttgttttttgttttttttttttgttttttagcagtaagtctcaacactgggcttaaaatattcagtaaactat

SEQ ID NO: 3441 - DNA, 121 bp, Homo sapiens
  chr4:106161133-106161254
  hyper
acggctggttgatagagcaggcagaatgcacacaacatttatcagattatgtttgcaccatttaccagattatgggtacggtttgtggcaccccccaaaaattagaatagtaacatcaaag

SEQ ID NO: 3442 - DNA, 2722 bp, Homo sapiens
  chr4:106161373-106164095
  hyper
atagacatacttaacacgtgggattgccacaaaccttcagtttgtaaaagtcacagtaactgtgactcacaaaagaacaaagcacaataaaacgaggtatgcctgtatttttaaaaaaagctttttgttaaaattcaggatatgtaataggtctgtaggaatagtgaaatatttttgctgatggatgtagatatatacgtggatagagatgaagatcttaattatagctatgcagcatagatttagtcaaagacatttgaaaagacaaatgttaaattagtgtggctaatgacctacccgtgccatgttttccctcttgcaatgagataccccacactgtgtagaaggatggagggaggactcctactgtccctctttgcgtgtggttattaagttgcctcactgggctaaaacaccacacatctcatagataatatttggtaagttgtaatcgtcttcactcttctcttatcacccacccctatcttcccacttttccatctttgttggtttgcaacagccccttctttttgcctgactctccaggattttctctcatcataaattgttctaaagtacatactaatatgggtctggattgactattcttatttgcaaaacagcaattaaatgttatagggaagtaggaagaaaaaggggtatccttgacaataaaccaagcaatattctgggggtgggatagagcaggaaattttatttttaatcttttaaaatccaagtaataggtaggcttccagttagctttaaatgttttttttttccagctcaaaaaattggattgtagttgatactacatataatacattctaattccctcactgtattctttgtttagtttcatttatttggtttaaaataattttttatcccatatctgaaatgtaatatatttttatccaacaaccagcatgtacatatacttaattatgtggcacattttctaatagatcagtccatcaatctactcattttaaagaaaaaaaaattttaaagtcacttttagagcccttaatgtgtagttgggggttaagctttgtggatgtagcctttatatttagtataattgaggtctaaaataataatcttctattatctcaacagagcaaattattgaaaaagatgaaggtcctttttatacccatctaggagcaggtcctaatgtggcagctattagagaaatcatggaagaaaggtaattaacgcaaaggcacagggcagattaacgtttatccttttgtatatgtcagaatttttccagccttcacacacaaagcagtaaacaattgtaaattgagtaattattagtaggcttagctattctagggttgccaacactacacactgtgctattcaccagagagtcacaatatttgacaggactaatagtctgctagctggcacaggctgcccactttgcgatggatgccagaaaacccaggcatgaacaggaatcggccagccaggctgccagccacaaggtactggcacaggctccaacgagaggtcccactctggctttcccacctgataataaagtgtcaaagcagaaagactggtaaagtgtggtataagaaaagaaccactgaattaaattcacctagtgttgcaaatgagtacttatctctaagttttcttttaccataaaaagagagcaagtgtgatatgttgaatagaaagagaaacatactatttacagctgcctttttttttttttttcgctatcaatcacaggtatacaagtacttgcctttactcctgcatgtagaagactcttatgagcgagataatgcagagaaggcctttcatataaatttatacagctctgagctgttcttcttctagggtgccttttcattaagaggtaggcagtattattattaaagtacttaggatacattggggcagctaggacatattcagtatcattcttgctccatttccaaattattcatttctaaattagcatgtagaagttcactaaataatcatctagtggcctggcagaaatagtgaatttccctaagtgccttttttttgttgtttttttgttttgttttttaaacaagcagtaggtggtgctttggtcataagggaagatatagtctatttctaggactattccatattttccatgtggctggatactaactatttgccagcctccttttctaaattgtgagacattcttggaggaacagttctaactaaaatctattatgactccccaagttttaaaatagctaaatttagtaagggaaaaaatagtttatgttttagaagactgaacttagcaaactaacctgaattttgtgctttgtgaaattttatatcgaaatgagctttcccattttcacccacatgtaatttacaaaatagttcattacaattatctgtacattttgatattgaggaaaaacaaggcttaaaaaccattatccagtttgcttggcgtagacctgtttaaaaaataataaaccgttcatttctcaggatgtggtcatagaataaagttatgctcaaatgttcaaatattttgattgcctcttgaattcatttgctaattgtatgtgtgtgtgtttctgtgggtttctttaaggtttggacagaagggtaaagctattaggattgaaagagtcatctatactggtaaagaaggcaaaagttctcagggatgtcctattgctaagtgggtaagtgtgac

SEQ ID NO: 3443 - DNA, 231 bp, Homo sapiens
  chr4:106164711-106164942
  hyper
tggtgatccacgcaggtggttcgcagaagcagcagtgaagagaagctactgtgtttggtgcgggagcgagctggccacacctgtgaggctgcagtgattgtgattctcatcctggtgtgggaaggaatcccgctgtctctggctgacaaactctactcggagcttaccgagacgctgaggaaatacggcacgctcaccaatcgccggtgtgccttgaatgaagagtaagtg

SEQ ID NO: 3444 - DNA, 178 bp, Homo sapiens
  chr4:106180761-106180939
  hyper
ttttgatttttcaggagaacttgcgcctgtcaggggctggatccagaaacctgtggtgcctccttctcttttggttgttcatggagcatgtactacaatggatgtaagtttgccagaagcaagatcccaaggaagtttaagctgcttggggatgacccaaaagaggtttgtttacttc

SEQ ID NO: 3445 - DNA, 108 bp, Homo sapiens
  chr4:106182910-106183018
  hyper
tacaggaagagaaactggagtctcatttgcaaaacctgtccactcttatggcaccaacatataagaaacttgcacctgatgcatataataatcaggtaagtttaaata

SEQ ID NO: 3446 - DNA, 162 bp, Homo sapiens
  chr4:106190751-106190913
  hyper
acttttatttttcagattgaatatgaacacagagcaccagagtgccgtctgggtctgaaggaaggccgtccattctcaggggtcactgcatgtttggacttctgtgctcatgcccacagagacttgcacaacatgcagaatggcagcacattggtaagttgg

SEQ ID NO: 3447 - DNA, 377 bp, Homo sapiens
  chr4:106193707-106194084
  hyper
acttccctaccaggtatgcactctcactagagaagacaatcgagaatttggaggaaaacctgaggatgagcagcttcacgttctgcctttatacaaagtctctgacgtggatgagtttgggagtgtggaagctcaggaggagaaaaaacggagtggtgccattcaggtactgagttcttttcggcgaaaagtcaggatgttagcagagccagtcaagacttgccgacaaaggaaactagaagccaagaaagctgcagctgaaaagctttcctccctggagaacagctcaaataaaaatgaaaaggaaaagtcagccccatcacgtacaaaacaaactgaaaacgcaagccaggctaaacagttggcaggtaaattta

SEQ ID NO: 3448 - DNA, 3102 bp, Homo sapiens
  chr4:106196197-106199299
  hyper
tccacagaacttttgcgactttcaggaccagtcatgcagcagtcccagcagccccagcctctacagaagcagccaccacagccccagcagcagcagagaccccagcagcagcagccacatcaccctcagacagagtctgtcaactcttattctgcttctggatccaccaatccatacatgagacggcccaatccagttagtccttatccaaactcttcacacacttcagatatctatggaagcaccagccctatgaacttctattccacctcatctcaagctgcaggttcatatttgaattcttctaatcccatgaacccttaccctgggcttttgaatcagaatacccaatatccatcatatcaatgcaatggaaacctatcagtggacaactgctccccatatctgggttcctattctccccagtctcagccgatggatctgtataggtatccaagccaagaccctctgtctaagctcagtctaccacccatccatacactttaccagccaaggtttggaaatagccagagttttacatctaaatacttaggttatggaaaccaaaatatgcagggagatggtttcagcagttgtaccattagaccaaatgtacatcatgtagggaaattgcctccttatcccactcatgagatggatggccacttcatgggagccacctctagattaccacccaatctgagcaatccaaacatggactataaaaatggtgaacatcattcaccttctcacataatccataactacagtgcagctccgggcatgttcaacagctctcttcatgccctgcatctccaaaacaaggagaatgacatgctttcccacacagctaatgggttatcaaagatgcttccagctcttaaccatgatagaactgcttgtgtccaaggaggcttacacaaattaagtgatgctaatggtcaggaaaagcagccattggcactagtccagggtgtggcttctggtgcagaggacaacgatgaggtctggtcagacagcgagcagagctttctggatcctgacattgggggagtggccgtggctccaactcatgggtcaattctcattgagtgtgcaaagcgtgagctgcatgccacaacccctttaaagaatcccaataggaatcaccccaccaggatctccctcgtcttttaccagcataagagcatgaatgagccaaaacatggcttggctctttgggaagccaaaatggctgaaaaagcccgtgagaaagaggaagagtgtgaaaagtatggcccagactatgtgcctcagaaatcccatggcaaaaaagtgaaacgggagcctgctgagccacatgaaacttcagagcccacttacctgcgtttcatcaagtctcttgccgaaaggaccatgtccgtgaccacagactccacagtaactacatctccatatgccttcactcgggtcacagggccttacaacagatatatatgatatcacccccttttgttggttacctcacttgaaaagaccacaaccaacctgtcagtagtatagttctcatgacgtgggcagtggggaaaggtcacagtattcatgacaaatgtggtgggaaaaacctcagctcaccagcaacaaaagaggttatcttaccatagcacttaattttcactggctcccaagtggtcacagatggcatctaggaaaagaccaaagcattctatgcaaaaagaaggtggggaagaaagtgttccgcaatttacatttttaaacactggttctattattggacgagatgatatgtaaatgtgatcccccccccccgcttacaactctacacatctgtgaccacttttaataatatcaagtttgcatagtcatggaacacaaatcaaacaagtactgtagtattacagtgacaggaatcttaaaataccatctggtgctgaatatatgatgtactgaaatactggaattatggctttttgaaatgcagtttttactgtaatcttaacttttatttatcaaaatagctacaggaaacatgaatagcaggaaaacactgaatttgtttggatgttctaagaaatggtgctaagaaaatggtgtctttaatagctaaaaatttaatgcctttatatcatcaagatgctatcagtgtactccagtgcccttgaataataggggtaccttttcattcaagtttttatcataattacctattcttacacaagcttagtttttaaaatgtggacattttaaaggcctctggattttgctcatccagtgaagtccttgtaggacaataaacgtatatatgtacatatatacacaaacatgtatatgtgcacacacatgtatatgtataaatattttaaatggtgttttagaagcactttgtctacctaagctttgacaacttgaacaatgctaaggtactgagatgtttaaaaaacaagtttactttcattttagaatgcaaagttgatttttttaaggaaacaaagaaagcttttaaaatatttttgcttttagccatgcatctgctgatgagcaattgtgtccatttttaacacagccagttaaatccaccatggggcttactggattcaagggaatacgttagtccacaaaacatgttttctggtgctcatctcacatgctatactgtaaaacagttttatacaaaattgtatgacaagttcattgctcaaaaatgtacagttttaagaattttctattaactgcaggtaataattagctgcatgctgcagactcaacaaagctagttcactgaagcctatgctattttatggatcataggctcttcagagaactgaatggcagtctgcctttgtgttgataattatgtacattgtgacgttgtcatttcttagcttaagtgtcctctttaacaagaggattgagcagactgatgcctgcataagatgaataaacagggttagttccatgtgaatctgtcagttaaaaagaaacaaaaacaggcagctggtttgctgtggtggttttaaatcattaatttgtataaagaagtgaaagagttgtatagtaaattaaattgtaaacaaaacttttttaatgcaatgctttagtatt

SEQ ID NO: 3449 - DNA, 1602 bp, Homo sapiens
  chr4:106199358-106200960
  hyper
atgagtttgaagcagaattcacatcatgatggtgctactcagcctgctacaaatatatcataatgtgagctaagaattcattaaatgtttgagtgatgttcctacttgtcatatacctcaacactagtttggcaataggatattgaactgagagtgaaagcattgtgtaccatcatttttttccaagtccttttttttattgttaaaaaaaaaagcataccttttttcaatacttgatttcttagcaagtataacttgaacttcaacctttttgttctaaaaattcagggatatttcagctcatgctctccctatgccaacatgtcacctgtgtttatgtaaaattgttgtaggttaataaatatattctttgtcagggatttaacccttttattttgaatcccttctattttacttgtacatgtgctgatgtaactaaaactaattttgtaaatctgttggctctttttattgtaaagaaaagcattttaaaagtttgaggaatcttttgactgtttcaagcaggaaaaaaaaattacatgaaaatagaatgcactgagttgataaagggaaaaattgtaaggcaggagtttggcaagtggctgttggccagagacttacttgtaactctctaaatgaagtttttttgatcctgtaatcactgaaggtacatactccatgtggacttcccttaaacaggcaaacacctacaggtatggtgtgcaacagattgtacaattacattttggcctaaatacatttttgcttactagtatttaaaataaattcttaatcagaggaggcctttgggttttattggtcaaatctttgtaagctggcttttgtctttttaaaaaatttcttgaatttgtggttgtgtccaatttgcaaacatttccaaaaatgtttgctttgcttacaaaccacatgattttaatgttttttgtataccataatatctagccccaaacatttgattactacatgtgcattggtgattttgatcatccattcttaatatttgatttctgtgtcacctactgtcatttgttaaactgctggccaacaagaacaggaagtatagtttggggggttggggagagtttacataaggaagagaagaaattgagtggcatattgtaaatatcagatctataattgtaaatataaaacctgcctcagttagaatgaatggaaagcagatctacaatttgctaatataggaatatcaggttgactatatagccatacttgaaaatgcttctgagtggtgtcaactttacttgaatgaatttttcatcttgattgacgcacagtgatgtacagttcacttctgaagctagtggttaacttgtgtaggaaacttttgcagtttgacactaagataacttctgtgtgcatttttctatgcttttttaaaaactagtttcatttcattttcatgagatgtttggtttataagatctgaggatggttataaatactgtaagtattgtaatgttatgaatgcaggttatttgaaagctgtttattattatatcattcctgataatgctatgtgagtgtttttaataaaatttatatttatttaatgcactctaa

SEQ ID NO: 3450 - DNA, 30 bp, Homo sapiens
  chr4:106629968-106629998
  hyper
ttatgaatgacggccggcgcgagtattttc

SEQ ID NO: 3451 - DNA, 15 bp, Homo sapiens
  chr4:106816366-106816381
  hyper
ctcccaggctggggc

SEQ ID NO: 3452 - DNA, 30 bp, Homo sapiens
  chr4:106817000-106817030
  hyper
gggccaccgcacagcgtggcgcgaggagag

SEQ ID NO: 3453 - DNA, 480 bp, Homo sapiens
  chr4:107955311-107955791
  hyper
catcccagaatggctcggccctctcaaccaaccttcagccggctggctgcgctgtggacaggggcggcggaggacaccgagagcgcgcaaaacagcagcatcagtcggttccaaggaaactcggatctctggggcgtgggccgctgccaggggttgacacttgtgttgtgcgaggtgcgtgtgccattggtaaaatggctttctcagttttggcttcccacaaaaggagcggaagggggagctgtcatgattcccagtgcccacagagccccctctcctggccacagcgcgccagccacaactggtaccgagtgtgcgcgctcgtctctgtgcgtgtctatttgtataacagtttgcaagtggctttcaatctatctgtctgtatgacagagacagaggcgcctgcggaaagttccctctctcaaaaacgccttcagtgtcctgctgtatcgctggcgcctacgacgctgtcattgtcat

SEQ ID NO: 3454 - DNA, 866 bp, Homo sapiens
  chr4:107956737-107957603
  hyper
aacgcggccatctcccggcgagggggtccccaggaagacgcaaagcccggaggggtgggaatgcaaagggagggaggaccccaacacggggcccctcacttgggtcgcgggggcttgcagattgtgttccctcaacccttcctggttcggggacccaggaccctatgaactcagtctcacgcctcaggacagaaattagcggaacccaagcgagacccgcttctccaccaggacaggaagttctgcaataactggaagcaatcaaatgcgaggcgctttctcgccaaggaggcgtgacccaaggtgcaagaaaacccagccctgtggatcgcaccgcttccgttccttcttgccccgcacctccttggtcccgccgggatctcggcggtttaactctcctcttaattgatcaggaggcccgcatcagctccttctccttcaactcagttgcttttctctcctctcttttcctatcctttatgtgtcaaactttgcaggacacagtgctccttttcaaagttagcaggcgctttagtaggggatcaggagacgtccccggaccgaatcctcgagatctgaagagaatcgaggtcccccacacgcgcactcacagttgccccgaagcgttgtcccctgactcacaagagacagcgaatcgctgccagcgcagcgatgcctagggagcggacttgcgctacgctcgccgcgggctcccgctttctctctctctgctctctccccagtcctctttgctttttatagcttcccacagtgaggactttttttttttttttacctccgcccccaattcaagagtgacaaagagtgaaaatttttctctcactccccaccgcttccgcccccct

SEQ ID NO: 3455 - DNA, 102 bp, Homo sapiens
  chr4:108745894-108745996
  hyper
tgcgccaggagagccacggcagcaggaacgggcactgctgccaccgggccgacgggtgagtcactgtttggaaatggagtgggcgggcgagggtgtgagaga

SEQ ID NO: 3456 - DNA, 371 bp, Homo sapiens
  chr4:108746295-108746666
  hyper
gacgcccggggctggtcgcggcggctgcggcagcgggctccatcccctggcaaatccccttcccgggagcaagtgccttcagctgggagtgtctggagccctggccaccagcgggtaaggagcgcgcggaggggccaggaggaggatgggctggggagcggagagtcctccgaagcgcgggaggggaaaggtggattgcgaagcggggacgtggctctaatccggcccccaccctccccgcccagggcatgcttcctcgattttgtggtctggaggagagatgtgtgccttagtctccttcctctgagcagtcatctcattcatttgcaacccatttcgggtaccccggtcctggcgttggaagggcacag

SEQ ID NO: 3457 - DNA, 30 bp, Homo sapiens
  chr4:108911506-108911536
  hyper
ttttggaagcgggccgtgcaagagaagaaa

SEQ ID NO: 3458 - DNA, 30 bp, Homo sapiens
  chr4:109092613-109092643
  hyper
ttccccctcccttacggattcagtgtagtt

SEQ ID NO: 3459 - DNA, 30 bp, Homo sapiens
  chr4:109092903-109092933
  hyper
gatttaattccgaccgtgaaaacaattgct

SEQ ID NO: 3460 - DNA, 30 bp, Homo sapiens
  chr4:109093143-109093173
  hyper
agcccagccccgctcgggagcgggcaggag

SEQ ID NO: 3461 - DNA, 668 bp, Homo sapiens
  chr4:109093622-109094290
  hyper
ggttcttccccttcttcttgccgcctcctaaagacaaacaaactcaaccccccaccctccggggtatcagggaactcgtgggaccgtgaaaaagtcgttcccaaatccggccgcctgcggacgtcggacttccgcggggccggcgcccgttggcgtctgtagctcggcgcagccacgcggggctccagcgagcggggtccgccacccctcgcgccctcctgcggctttcccagcgctgggccagtgcaggccgagccctgcgtccctgcctcgctgggtgggggtccggggcgcggctgtccacagggccgcctcctcctgcggcccgcggggaaggggcgcatcccaccccgctctgcaggccgcccttctgccagctgggaggcgagggcacacgtcctaaggctgcccaagggggagaggaatcgcgccggtaggagagcgcacgggaaccaggaacgcaaggcgggcacaggggagccgaaggagccagacagggcccggccacgcgccctcctcgctcggctgcgctccgtgacgggaacccaggctcccacgcacggggaatgcctagaacggagctagaatggaggtgggagctggagtcattttgcgggccacaggactgctcatttcgtgggcaggacgtgacattcttgtccctcctt

SEQ ID NO: 3462 - DNA, 30 bp, Homo sapiens
  chr4:109541580-109541610
  hyper
tggttgccgtacaacgtggtggttccctgc

SEQ ID NO: 3463 - DNA, 79 bp, Homo sapiens
  chr4:109571438-109571517
  hyper
tttcaaatcccctgcgtcagcgagtgggcggggctcacctagattccttggcctccgcttctccggcttggccacgtta

SEQ ID NO: 3464 - DNA, 30 bp, Homo sapiens
  chr4:109684235-109684265
  hyper
aagtctggctctggcgttgccctttgccaa

SEQ ID NO: 3465 - DNA, 304 bp, Homo sapiens
  chr4:110223123-110223427
  hyper
cggatctgggctcccggccccctcctttccctgcgtgcttcttcagcagcatcgtggcggggtcggccgtctcggcttcgcttcccaccctctacacctcaaataatcctaaaaggaaagaaaaaggtcgattcctccaaagttcagtccctgtggctgcacaactagttggtggagtcaagcccacgagcggatacggacccctgccttgctcagcgtccagacccgcaggcgtgcaccatccccgctttcttctctcctcccagctggaagtgaaaagcaccctccgtccggggactgggtg

SEQ ID NO: 3466 - DNA, 150 bp, Homo sapiens
  chr4:110223578-110223728
  hyper
cggaggaccggacctgttgcgcctctgtgagtttgccttatttctacctactcggtgtctttcggcacgccgacctgtttcccacctgcattcagttcaaggcaaaaaggctgtgagagcacgctacagcgcagcgcgaaaggggcgact

SEQ ID NO: 3467 - DNA, 359 bp, Homo sapiens
  chr4:110223944-110224303
  hyper
cggcctgccgctcccgctgctgcgcgccccccttccgaaggcaaagcaggagcccgccttattatcataatgtattcaccttggcccagcccgcgggccggcccggggaacccccaagggaggcgggaagcttgggtgggagcggggcaggaggtctgttattagcataatgtatgcaaatagctggagcggccaccgtgattggagaggagcctggcgacccctccccctgcgcggagtaacttcagcatctccgagggccacctctctggcctgggccggggccgaagcggggtcggctgcgcaagaggcggcaactttggcttatactgactcagcccagcgccccctttttatcc

SEQ ID NO: 3468 - DNA, 143 bp, Homo sapiens
  chr4:110343713-110343856
  hyper
gagcacatctacacatcgtccaccagatggcggtggaagcccaccgacattgtagactacgtaggaagagcgtccagatggaaaagcgggttggggctttctggtctggtttttttgttttgggtttttgtttgtttgttttt

SEQ ID NO: 3469 - DNA, 30 bp, Homo sapiens
  chr4:110355510-110355540
  hyper
acctagcctggacgcgggcgagttgccccg

SEQ ID NO: 3470 - DNA, 529 bp, Homo sapiens
  chr4:110481808-110482337
  hyper
aggtgaagccagagcgctgcggctgggggtgcctcacccgggccgagatagggtgcggggaccaccagacttcggcctgggagcagcagaataacctgggaggcagtttctgggctgcagctctcggtcaggagcaagtttccaaagccgctgcgccgcggggccggttccctcttggtgatcagtgcccgagcccctaaggagcccggaaacgatgaacggggcagtgaccgtcccgggtgtggacggtcgcaggagagtgaaatttccatcctgaaatctgcgagcacctccctttcccagaaggaagaaaaactcgcgttttgttcagacacccgagagacgggtgaatcatgagtgtgctggtgagtaacagttggcctgacaccgttgtattgtggtctgtggagaaccgtggcttggaggagtagagagtggatgtgcaccaaaaaagactagaagaaggggaaagcgctgagtttaaggaggattgcgatggagcctgacaggagcccgggagtgcaaactc

SEQ ID NO: 3471 - DNA, 134 bp, Homo sapiens
  chr4:110651656-110651790
  hyper
cccctcgcagagagcgctgcgagaggtccagctgagtttccggcttgaagacgtggttccattggcaatgtgggcagagtccggctgtcagctcgcagagcagggcttttcctccttgcgtcctctcccggtcc

SEQ ID NO: 3472 - DNA, 30 bp, Homo sapiens
  chr4:110686397-110686427
  hyper
catcttaactcagcatctcaaaaacataca

SEQ ID NO: 3473 - DNA, 31 bp, Homo sapiens
  chr4:111117164-111117195
  hyper
gtcattttcagtcccacgagggctgagacct

SEQ ID NO: 3474 - DNA, 30 bp, Homo sapiens
  chr4:111119282-111119312
  hyper
cagctggctgcccgcgattcatcgctccat

SEQ ID NO: 3475 - DNA, 30 bp, Homo sapiens
  chr4:111532395-111532425
  hyper
atttttatacgtaacgttttaccccagtct

SEQ ID NO: 3476 - DNA, 261 bp, Homo sapiens
  chr4:111532719-111532980
  hyper
ggcccggagcagcggcgcgtgcgggggcgtgccgagcgcaggctctagggcccctgcttcgccccagctggaccccgcgggcggtcggtgcagctcgagcgtgtgggctgcgatgccctgcctgagacttcgggctagggatgcgggcgggaagtgggggtgcggcggcagctgcagattagattccttttttttttggccggagggacgtgcaaacttctagtgcccgggccaagagggcgaccccggaggtgcgtaggt

SEQ ID NO: 3477 - DNA, 14 bp, Homo sapiens
  chr4:111536491-111536505
  hyper
tcggttgagtggaa

SEQ ID NO: 3478 - DNA, 413 bp, Homo sapiens
  chr4:111536561-111536974
  hyper
cgaggggactgactgcaccggctctgggagctaggtttctctcgctggatgggaaaaggaggtgcggaaaggggcaggcggcctgcgggctagcggggatgagagttgtggggagaacggaggagagagtaaaattattccttttggaagtccaagggaagggagctgaggtgagagaaatggcctctcttaggtcccaagtctccgcccccagcctgcaccactcaagtcggggaagtgacaactcttcctaaacctcgacttccattttttgtttcctgcagattgattgatgtcctcgcgttgttctagttcagcaaccaaactaggccgaggtacacctcttttacccagagctcccaaatcactcaccaacctgcaggagacctaaatcctccgggcaggtctcgtta

SEQ ID NO: 3479 - DNA, 519 bp, Homo sapiens
  chr4:111537066-111537585
  hyper
cggagaggccgggaccgctgggccctgcggctccagaagccaaagtccgcccgtggggaccgttttcctctccactgctctcaagtgaacaacatggtgggaggtgaccctcgtccaaagggcttttatctgccccccactgctgcgtgatccctccgcaagtcggaggcagagctttaaaaagaaagaaagtgtgcgttgagcactgatcttaaatcggggacattatctgcgatctctttaagtggcagcagcagtttcttgcagaacaaagactcagtgttcgagctccaaaagcttctaggtaaagtttcattcagatgaaagcaactaaggcgaaaaaacaatgatattgtcggctccagaaaatcggcggttactttttgctctaagttccccagcgtggtgtttgttctcgcccactttggttgtgcggggggttgacaagcataacaaaagatctcagcacatccctccccccacctccacaacgaccctcctagcgccatgaggatgaat

SEQ ID NO: 3480 - DNA, 51 bp, Homo sapiens
  chr4:111542041-111542092
  hyper
gattgcccatgcagcccagctcgtgagatcgcgggatggcggggcagtgag

SEQ ID NO: 3481 - DNA, 321 bp, Homo sapiens
  chr4:111542473-111542794
  hyper
gggtcctcggcgcccacgtcctcattcttcccctgctggcttttatctttctctgaaaacgaaacacacacactttcccgtcagcatgcccacctgcaacgcggacgccaactggaccggcggcagaagccgtggaagagctgggctgcctggcgccggaggagggtgcgcgcggcggctccgggccgcgaggagcgctgcgcctgtggggtgtgcaggcgcaagtgtgggtgtccgcgccccatttcctcccctcccccagcgccgcacgttttatttacatgtttatctcactgcagcggcacattcacttttatagcc

SEQ ID NO: 3482 - DNA, 198 bp, Homo sapiens
  chr4:111543147-111543345
  hyper
aacagaagggaggccagggtacgaatagagagggcggcagaattgctcgcgcccttagcgccccaggagccgggccggtcgagggagaactaaagggatgcggggtagtcaaaattccggctcccggaagttctgcggggagccaggcgaacgaccactcccaccacgcctccccccggaggggctgacttccttggg

SEQ ID NO: 3483 - DNA, 292 bp, Homo sapiens
  chr4:111543403-111543695
  hyper
cgccttacctgcggcctccgggctggaggtgtcggagatggtgtgcacctccagcctgtgcttggaggagtccagcgaccggggctgaccgggagccagaaccgaagccatggctaacggctggggatggtgacaggaagatgaggagacggccgacagcttggtccccgctgctcggtgctccaagtgaagcgggcctttcatgcagttcatggacgagggagcgcgacgctctactagtccttggctactgccccgccgagcccccgtagccgccgctgcccgctccggg

SEQ ID NO: 3484 - DNA, 460 bp, Homo sapiens
  chr4:111543720-111544180
  hyper
cgctgcggggagagccaggggacgcaacccccgccgagttctcaagccaagctgcccccgtctcctccggaaggctcaagcgaaaaagtccggagacggaaagtcagcgggcaaacgaagacatgggatgtgggcagaagggcaccactcagagcgtctttagggagcaggcttccaagctccaaagcgaaacaagagtgggcaaagacccccttcttctctccctccctcccccaagaacccctccaataaggaaagctaacgccgaccgcgctctgcccgccccccccccacgcggcagccctgacagagaagtgtcaagagtgacagggacaggtaggtgatattagatcccctgcggcggcagcagccgctgcagccacgacgcggccctctgagcgcaccctccgcaacgcgcacacgcacacccctcgggcggtcgaacaggagccgggccttg

SEQ ID NO: 3485 - DNA, 292 bp, Homo sapiens
  chr4:111544298-111544590
  hyper
cgccgcggccctccccagccctctccgcctccgcctcctcccagacccttctccgggtgcgactgacgtggctccgcaccaatcaggacgccccgagccgcggtggagggactgtcctgcctgcacctatcagcagtgcggggccgggctactgcctcgccgtgcgcactgggtctacacaggcaagctcccgggaattcagctcctgcccagcccaaggcgatccggcttttagtacgaacccaaaggtgaagagatgaggctaggagtcgaaggcttgggagaagagagt

SEQ ID NO: 3486 - DNA, 167 bp, Homo sapiens
  chr4:111550002-111550169
  hyper
cagcagcgaggaacgcgacctgtgaagaccacttttgcgggcagggatccgcagggactgactactttcggacaactggtacaatttcccctgggggtgaaaaaccacaacgcggcggggcacctttcaagtgagctgcagatttgattggcgcggggggtggggga

SEQ ID NO: 3487 - DNA, 30 bp, Homo sapiens
  chr4:111550544-111550574
  hyper
tgagaggcgcgggggcggggcggcggagag

SEQ ID NO: 3488 - DNA, 1174 bp, Homo sapiens
  chr4:111553137-111554311
  hyper
gagtgggccctggtggtgctgcgcgcagcgggatataacgagcgacagaggtcgctgttggaccacttttccacgccagcctagacgccgaggtttgctggagcgtgcgcaggggatcagaccacagggagcgagcgagagggagagagaggtgttgggtctcaggagtgcagtataatttggggaaaggaattaacgtccctgggacggctgcttcccgtcccacccagaggcggagtgtctaagttcaagcagcaggcgcgtcaggtctggcggcctcgccttcttgcgcttcgcccgaggcccagagtcccggaggcgggtgcccagcgcgcggcctgcgcttccctcccggccttaccattggcgccaggatgctgccgcgggaagaacttgctgctggctgcctcttttcggctctcaggagagtccgtgaactcgacctttttgatttcggagtctttggagaagagacattcaacggccgccggctgcacgcctgggccacgcgcgcgcccgccccacgtgcggagagaggcgtcccggaccgcggccgaaaggagccggggacgggaggagggggaggggcgaggcaggccggaggagaaagagggacaaagagcaaagacccagttagaggaaagagctgacggcatccccgtcccccggaccctctggcaacccggggcaggatggcgtactctttctgcgcctccccggttgccggcggttccagccgggaggagtaggctggggggcttcggtacacagcgcgccgctgcttcctagtccaccgccccgccacagggagaggccactggcgatttggttctgatttccttcctgcccaggctggcccctcggggaagcgcccctcgctggggcctcgccgcagggccagtgccctcttgccgccctcacgtggcgcggcctcccgtccgatgacccgggcaggagaagggggttcttacctaattgcacacacgccgacaccagtttgcggcagttggtctccattccccgttatctgcaaaacagaagagaaggaaggctgtaagaagcggcggccgtcgagtgagcagggctcagatgagactacgttacactagctgttaggcgcctactgtgtgctaggcttcaggcgtgtttttccgacctgacagcctctggctgt

SEQ ID NO: 3489 - DNA, 30 bp, Homo sapiens
  chr4:111554652-111554682
  hyper
tctgtaattctgaaacgaacgggctcttgg

SEQ ID NO: 3490 - DNA, 13 bp, Homo sapiens
  chr4:111554951-111554964
  hyper
ccccctttctctc

SEQ ID NO: 3491 - DNA, 253 bp, Homo sapiens
  chr4:111555193-111555446
  hyper
cgacgaccggagggcccacttcgcgcgggtgcggggatcggggtgggagcaagcgttgtcgggttggcggaggcacagaggcggggcagggagctgcgggcctgcctctggcctgagtaccgtttccctgcgtctcggcctctcctgaagggagctgggccctggggagcctctggccaaggtcgctgcctacaggaggggctgcccggcgctgtggcgtggggatccagggtggggacggccaggcggttcc

SEQ ID NO: 3492 - DNA, 815 bp, Homo sapiens
  chr4:111557622-111558437
  hyper
tgagaatgctaatccttggcccgaggatttgttcctgcagtgttggcaccgagatttaagggaagatacctcgttttaaatgccagccacggtctggcttccctctcgacttcagcaccctgtagattgttagtgtctgtggcgggggacgaaaggaacagggctttgcaaggtctgtttgccgactgcgttaccttgggcgaaacttagccccaaaagccacaaatcacctacggtgaagattctccgaagtggaacaaatttccagactcgcattatctcacatccctgcgggatagatggcctccacttaccggctaccgggagagagctgctgtctccgcgtcccactgcttcccggggcgatttccagcgagccgagcctccggctgcacggcaagcgcccgaaagccgggcctgagaggactgcagggctcctgagggtgccaagttccgaaggagtccacgggtgcactggggcctccgaaatctagccgccactggcagtttctttctgctcctctccagctttctcgctcggtctcgcactctctctcctctccctccctctcatccctctctcttccctctgctcctactccgtgtggggagtgacgtgacgtcagcagagattccaccaaactccactgcacagtggcgcgcgggcggccggccgagcccggctgcgcggctggcgatccaggagcgagcacagcgcccgggcgagcgccggggggagcgagcaggggcgacgagaaacgaggcaggggagggaagcagatgccagcgggccgaagagtcgggagccggagccg

SEQ ID NO: 3493 - DNA, 62 bp, Homo sapiens
  chr4:111562498-111562560
  hyper
tcaggccctttgctcggaccgggaccttacagttctaacccaggagcgttaaactctggaag

SEQ ID NO: 3494 - DNA, 605 bp, Homo sapiens
  chr4:113430613-113431218
  hyper
ttccatctccaatttggatcccgggaggccgagcatctctcacgcggttgacacctctccaggctggagcgcgaagccggcgcctgcccgggtaatcagggaggcctggcctttcacgcggtgttctcagtcagtaatccaagttggcatttcccccttcgcgctctgagcagctggagaagcagagaatgctagcgaaagcagacagaaccacccctgtctcccctcccccgaccctggcaccgagagggggaaaaaagtcgtttgttgtaacgcacacaccatcaggattcttccccattccatcctcccgactcacgccaccttgcagggaaataataggtccggccacactggctttcgcgttctgctttccggatgactgaatttctttgctcgcctctcctgtcggggaccatctgaaactgcctccaagctgcgttcccagggaaccccccaacccccactcattccactcggggactaaagagcgactcacttcaacgtcctccataagatgaaccccatcccggctggaaaaatcaaactggggaaggaaaaacgcgttgggggcaaggagaaccgctcctgcagacctggcccct

SEQ ID NO: 3495 - DNA, 69 bp, Homo sapiens
  chr4:113431455-113431524
  hyper
gaaggcagcagcttaacgctgctatttctgacaatctgccccacacactgtcagcgaagtgaaagatct

SEQ ID NO: 3496 - DNA, 16 bp, Homo sapiens
  chr4:113432226-113432242
  hyper
cgcccagggccttcgc

SEQ ID NO: 3497 - DNA, 1396 bp, Homo sapiens
  chr4:113435423-113436819
  hyper
cctgtgagattcacacgaactgcaccaagtccttcggcgttaaagagaaaggggaggagcgtcagtccgctctgcaaactctttagatatgccaccatcatctcttcccagggtctttttcgtctcaagaagcgcccccaaaacgccacccttggctttgacaataagctccatcacaccttcagtaaatcagagcccgtctgaatgaaggatacccaaagccaagaaatgcaagaaacaaccgaggaatcagaaaggctacacctgccctgtgaagtgagatggtttccagggcgtggaaaggaggggcaggggaagggaggagggctcgactggggacaggaaagggaacccactaaggcctggcgtgggtagcagaaatggcagctctagatacaatccctggctatggggaggtgaggtgcatagcggtgcttgtcgggaggtgggggctgccaatagtccatgtctgacccggccgggctggcgggcgataaagtgcagctgtagggggaggtggaattggaggacacggaggaggacggcgcggggctgttggtgcaactccacgtggaggcgggcgaggggctgtctccgctgctgctcagggcggcgctggctcctcccgggctcagcaacactgcctcggagaagagcgcccccggcaggcccccgccgccgcccccgcagtgatccgccaggcgcagggtctcggtgagtgcccagatgtagttgtgggcgaagcgcagggtctcgatcttggtgagcttggcgtcctcggggaacgtggggagcacctcgcgcagcgcgtccagtgccgcgttgaggttgtgcatgcggtttcgctcgcggttgttggccttcagtctacgggtcttcttgatgcgctgcaccgtctcggccgtcttggcgcctcgggagacggcccgcgcccgggaagggcgccgtttgcaatcgtgtaccagacccagcagccgtgcgggccggcagccctccgcacccgcagccacgccgccccgcgccccctgcccggcctcagccccgcgctgccgacgcgccccgcctgacgcgcccggctcctcctcctcttcttcgtcggcgctggatgacagcggggtcagggccgccaaggcgggggaggccgatccgagcagcactaacacgtcctcttcctccttcaactccaaggtctcggatttgacgaacatcctaccgaagagagaaaggggaaaaaggcagtgaggtgtaaggaaagaaacagaggcgcgatcttcgtgtcacaggggcgtgctccggcgcgcacccgagaagaccagctccgaatggcgcggagcaggaaggcgaaggaagaaacccaggcagtgctaaccaaggtcaggagcgccgctagcgctcg

SEQ ID NO: 3498 - DNA, 406 bp, Homo sapiens
  chr4:113437616-113438022
  hyper
ctaaagctcctgttggagctccgggctgcggccggagctggcgaagccgcagcggccgcagaggctcaagctgcggctgttgtcgccgccgctgtccattgtgattggtggctcgcgctcggctggagcgtgccgctaatttattaatgaatggaggtcgcgaggcgcagctggccaatcagggcgccctggactccgggaggcctgcgagccacgcgcaccggagcccgctccctttcagcagctcattaggggcccgagcgctgggggcggatggggggacccgtgctaccgcccccgccttcgtcctcgctgccgccgaggctccccccgcccggcgcgcgcgcaggcaccgcacccggcgctgccggccctcctaactcccgggtgatgggaactaggaatt

SEQ ID NO: 3499 - DNA, 146 bp, Homo sapiens
  chr4:113438440-113438586
  hyper
ggacagcaaggaggcttcctgcgtgggtggcagcgaaccgagcgggaggagcggcagagctgctgctcctgcaagcaaatgcgctgcgctgacatttctgtgacctctgctccgcgctggggggcgttgtagggacaaggggccca

SEQ ID NO: 3500 - DNA, 30 bp, Homo sapiens
  chr4:113441593-113441623
  hyper
ttgcaggtgactgtcgggggcgcgaaagag

SEQ ID NO: 3501 - DNA, 228 bp, Homo sapiens
  chr4:113441957-113442185
  hyper
tgcaacgctaggattcgttattgatagtggtgagcgctgggaatgagtgtgaattcggagtttctgacggtcccctatccgggagccaaggaagccaaggagaaaacaatgtaaattcgccccgatccccagttactgcatcccacatggtattctcggtctcccccacgttttccccttgaatcctgtccggggaggattcggcttgaacctagccctggagaggtc

SEQ ID NO: 3502 - DNA, 189 bp, Homo sapiens
  chr4:113442246-113442435
  hyper
cgtccgaggaatcggcatccaccacagcagacagaaggcagggaagatcatcccccaggccccaagccccactctagagaccctggccccaagcccgcacgacgtgctctggtgcctccaagccaaacattccgggattcggcttgacacacaaggtcagtcagcttgctagcgcggaatcggccccgc

SEQ ID NO: 3503 - DNA, 169 bp, Homo sapiens
  chr4:113444217-113444386
  hyper
cctagcgaggcgcagcgttagcaccaggcgcgaaccagacagctgtggcctgcctggtagaaacgaccctgcgataacgcagttgctagtacagctctcggcggaggagccagggccgggtctccaggccgggagggggcggccgcggtgcgcccgggcagcgctccct

SEQ ID NO: 3504 - DNA, 191 bp, Homo sapiens
  chr4:113445001-113445192
  hyper
aacacaaaacaagatcttttgcgagagcggtgtccgagggagccggagcgctgacaggtgtgcaggaggcgccccctacagcctgctgcccctctcggggttacactcccttcctgccgcacctgagcgttttcaggacgcgctctggtcctggagggccgggcccgcccgagggcagccgattcacggcg

SEQ ID NO: 3505 - DNA, 524 bp, Homo sapiens
  chr4:114900654-114901178
  hyper
acctccgcagaaactccgggcagcaattccttttccccgctgctagggagcctgaaggccaaagccgggtccctagccccgcggccggtccgcgcggagcccgcttggtctttgcgtagttggcgcacccggcgcaggcgctgcaaactgcgtgcgttttctcagctaacttatttagctttggcactccgagttcttttgcctcctccctcttttctctccagtgaatcacagaacggtactttcttcctgagctcccccgggaagagggggtgggggaaaaggactgtttagaggctcgatctttcctttttcttttccgggaggtggatggccaaggcagaggaggctttgccagagagagagctgcgtgctgctccagcccagcgggattccgggggatccgcctgggctaccgcgtcccaagagtgtcgcctcctgcccatcaccccgctagagggaaaggacggcggcgcgaatggggaagggtaaagcgggcacttcttttcgtggggctgttggtg

SEQ ID NO: 3506 - DNA, 30 bp, Homo sapiens
  chr4:115519970-115520000
  hyper
ctccttagccaacacgctaactccgaagcc

SEQ ID NO: 3507 - DNA, 30 bp, Homo sapiens
  chr4:115520916-115520946
  hyper
gactggaggagcggcgagggagcctggtat

SEQ ID NO: 3508 - DNA, 30 bp, Homo sapiens
  chr4:118954450-118954480
  hyper
aggaagggaccgcgcgggtgcgccccaccc

SEQ ID NO: 3509 - DNA, 305 bp, Homo sapiens
  chr4:119200549-119200854
  hyper
gagctgaacacattacgatggatgatggaaacataaggtacatttcttttttgatatttctgagttaatctgaaacgccttagcggcaggacgttggaaagctaaagttggcccgttttgctggcttttgtagtttgagttaacaaccaactgaattagctgataagatctcaaaacagtgaggtaagtacacagctcggagttttataatgctttttttctcttgcagactatcaagaaatccaagtggtaatgggcgaagtttattcagcatccggcaatggacttatcgtagttggggaaac

SEQ ID NO: 3510 - DNA, 497 bp, Homo sapiens
  chr4:119273345-119273842
  hyper
tttccgcggccgccccgaggccactaaccgtgtctgcagtcgcagtagccccagtccaccttgccacgggcgtctccgtagaaacaccagggtctgcccgcgccgtcggggctccgacaaaagttgtggcgctgtcctcgcagctgagcccagctcgctgggggcgaccgctccaggaagggtggcacctccgcccaccgcagacacggggcgccgaagtccgtcacgctgacccatggctcgccggcggggcagccccaggggtgcggccggggcgtgtgcccggcctggagggcgtgcgggcgctgggcagggagcgcccgcggggggcgcgggaagcgcgggagaggcggcggcggacgcgtcctcgggggccgctgctgggtgggaaggtaataggggtagtgcggacccgcagggggcgaatggcggtggctgtggtggagggaatcattgaggacagaatcaaagccgaccacttcggggagcgcccctaa

SEQ ID NO: 3511 - DNA, 187 bp, Homo sapiens
  chr4:119274066-119274253
  hyper
tcccctggcggcggccgcgggtggggaaatctggagctcagccgagccccggccggcggagaggaccggaaaagagaaggcgcggacgcagcggggagcggttgggcctgagccccaggtagcggcgcaggcacgagcccgggaactctgccccctgggggcgggcgccggccgcgcaagctgctcc

SEQ ID NO: 3512 - DNA, 30 bp, Homo sapiens
  chr4:119757720-119757750
  hyper
ctggcacgtgtacacgcacatttgatgacg

SEQ ID NO: 3513 - DNA, 37 bp, Homo sapiens
  chr4:120221340-120221377
  hyper
ttctcccccacccacccgactgcgccactcaccagct

SEQ ID NO: 3514 - DNA, 51 bp, Homo sapiens
  chr4:120221610-120221661
  hyper
ttctgcctccctccctcgctaaagcctcgccgctcccggagaccatctcga

SEQ ID NO: 3515 - DNA, 334 bp, Homo sapiens
  chr4:120549977-120550311
  hyper
ggccagcctcctgccccgccccgccccgcgcggttctacgggcgcccaggtgtggtgggcggggccaggcgcagctgctgcgccccccccacccggggtccggcagtgttccgctctcgcaggctcttcagtcccctggttcccaggaggcggcggcggcggcggcagcggcagcgcccggcgagctctccggaagccaagtggcggcggctggaaggaggccgcgcggccgctggggtgcgctgtgtgccaagccgacttctggggagcgcgctaggtgactgggtgtgttctcagagtgccccagggagggaaggtcgcgatgtgggaagtt

SEQ ID NO: 3516 - DNA, 31 bp, Homo sapiens
  chr4:120970718-120970749
  hyper
atgtacatgcgaatatcgtcatcatccttca

SEQ ID NO: 3517 - DNA, 30 bp, Homo sapiens
  chr4:120987394-120987424
  hyper
gcagctggcctgttcgaaaacaagggttcc

SEQ ID NO: 3518 - DNA, 1050 bp, Homo sapiens
  chr4:121843150-121844200
  hyper
gcctgcgtggagcggcgctctgggctgctcctcccatccccgcatggaaagttaggcgtttctagccacattaattcatcctaaaggaaaagaggcgacagcggagcagcgtgcgcgcgggggaaaacacccgcccacgcgtgccttcgccaacgcaaagacgcagctcacacccgtaaccgaggaagagggaggctcccgccgcgctcacttcctgcgggagagaggaaagacatcttgcggcagggaggccggtggcagttccgcccctggaccggccggcagcggagcgcaccccgccgccacctacgtggcgctgcctgctcgggtggcgcagcgagtaaaggccacccccgccgtgccccgcggtccccggccttcccacggacgcctggcccggcccgggcgaggggcgaccggggtgaagcccgccgcgccccgggccctgcggcagggcgactccgggaggcacagggcgcgcgaggtgcaggggcgcgcaggccgccgccgggtcacccacctttcgcactctgcgggccgtgtagagccccatgccgtcctgaacccgggaggacttcagggagaacctgtccggcacgtacatgcccagcattttcccgggcgcggcggccgccgcctctctcaacaccggcgcttagcgcccggcaggcggcacatcgaaatttggggtgccagggtagaggggagaaaccggcagggaaggaggaaatggagttttcctcccagaatccccacctccctgccgattccaggatcccccgcggctcagcccctcctcgtcccgggtcgggctcggcccggatccgttcctgccattcctgctgcgggggcgcggggggcgcgggcctgggcgctgcgggcgccgggacgccgctcgctgattggcccgaagttggcggctctgacccgcgcccgggcgcgaagcccggagcagggctgaccccagggcctcaaacccggaggcccgcgagctgcgcgggccgtcagcacccctagccccggcgcggcggcgtgcgttcccgcctttgt

SEQ ID NO: 3519 - DNA, 30 bp, Homo sapiens
  chr4:121993034-121993064
  hyper
tcgagcccccatctcggatgacccttcggg

SEQ ID NO: 3520 - DNA, 150 bp, Homo sapiens
  chr4:121993567-121993717
  hyper
acaggcgcctggctggagcgccgcgcggggtgctgggagagccgggcgcacggggcggcagcggccgtggcgggtgcgctgctcagttagctccactctctcgcggctggaagtggggagtgtgtgttcgctcccgagtgtcactgctga

SEQ ID NO: 3521 - DNA, 211 bp, Homo sapiens
  chr4:121993961-121994172
  hyper
cacacacaccaccctgctcagcgacccagcgctccccaaacaggaccctcgcgggcggcatcgcgagggacacgctgctgtcctaaccttagcgccactcggggagaatgaaggaggcccaccgagcccccgacaaagctgcaaaacccaggagacgcgcacgcgggaccatcacactgtcaagcagaccggggtgcacaatagagggaaa

SEQ ID NO: 3522 - DNA, 282 bp, Homo sapiens
  chr4:122301430-122301712
  hyper
gaaggagcgaaggagcggggcgcgactcttaccccccagccagttgtcggaaatgttctggagcatggtgacgggaatgcagaagaaggtgatgagcaggtcactgagcgccaaggagcagataaagatgttggtgacggtgcgcatggccttgctgcgggtcaccacgtagaacaccagagcattgccaaagagcgccagggcgaagatgagcacgccggtgagcacgagggccagcttggcgcgtcccggcagctctggggtgtagacgagcggtcgcag

SEQ ID NO: 3523 - DNA, 232 bp, Homo sapiens
  chr4:122301962-122302194
  hyper
cgggaaaggagagcagctcagggatcaaacccacgataaagaggcgggaagccaaagcactgggagactcgatctcagtgaccaaaaaatgttcgcggttcaaataaagttcttcccttgctcttccctaaggcgaggcgccgccacggtctggggtgctggagcgccacgcgagggtcctggcgcctctggctccccgccttctggccatgcgatgcggacgccggacccg

SEQ ID NO: 3524 - DNA, 254 bp, Homo sapiens
  chr4:122686254-122686508
  hyper
ctccatgctggaggcgccggcgctcgctggccctgcgcgctcggcgcgggctgcagctggagggcgagcgcgccgcccgcacacccacctcccgcactcccgcccctcgcgagggcgtcccgctatgggcgccgactccggggtccgtgctttgcctcccccggctccgaggaaacgcgccaaggagctgaggaaatccggcgcagactctcccagctggcaccaaagccttccgcttcgccgagatcctctca

SEQ ID NO: 3525 - DNA, 30 bp, Homo sapiens
  chr4:122745091-122745121
  hyper
aatgaaagcgctcgcggccttgacgtcatt

SEQ ID NO: 3526 - DNA, 1437 bp, Homo sapiens
  chr4:122871369-122872806
  hyper
gattgtgttcctgtgttctaccggcaggtccagcctgaccaggcgcagactctgcgcgcgcggagcagcgcgcgatcctggggatgcaggggtcatcccggaggtctcggcctcgggcggtgggcctctcgccggcagcagggggcgctgcagaacctcggtccccatcctggagaaccacctccccggctcagccggtctgcgccgcccgccaccatccgaccccaagttctctacctagttctgagcgttcttcctaaaaaagacagtaaaccctgcggcactcccagtgttacgtgacagaaaaaatacagagcatctcaccctgtgaaaccgatcaccctctttttatcttctctgcgtctcgcactgattaaaagctgtctccaagattggaaattaagaaaagttgctctttctcatgcattagcgcgccgaccgctccttcgtttagaaagagagagagggaaagaaagaaagagaaaaagagagcccgcgcgccggggcgcgagccgctgaccctgcaccgcctgggaaccgcagtcaaagttatcactaaagcggttccccggctgcccgatgcccactctctccctcaggggaccctatagggcttcggttccagttttaccccaaatgtgactgaaccacagagagacgaggcgcctgggcaaaccttcaacccacaccctgtatcgcactgtcccctccctactccccacttctctgcccccgcccccgacgtcccagagcgtcggaggggacccaagtccacgctgggacgcccgggaggagttcagggttcaagtgcgcgcctgggtctgtgcacatcttccccttcctcggcctccctgggtaagctcgggaccccggggtccgtcttccaaggggtgcccagccctggcagcagtcgtgcgagctcctcggctctaatacagggagtggctgctcgccaggatgcttgtctgaagtcagtgtgcccgcctgcgggctgttccgtgtgcttgagcctggacagagcccctgccacgcactcggcagcccctgtgtccctccaccgcgcgggaccgagggggcgagcctccggccgaggtctgtcccctccaaatcactccaaatcgaactgcctggccgtaccatgtgggtctcggaggtcccgggctcgacgtggagccgcccggcgcgcgccttcccgccccccgcccggcaccgccctccgaggcgcgggccgcggccgggcccggtactcacaggtccggcccgtgggagaagggcggcgggcagtagccgtgcggctcccgctgcgagggcgccgagcgcggctccagccccccgttgacgcccctccagccccggcggcggcgctgcggctccgcgccctcgtcctcgccctcgtcttcctcctcctccggcgccgggaaggtcacccttgcttgt

SEQ ID NO: 3527 - DNA, 30 bp, Homo sapiens
  chr4:122873166-122873196
  hyper
ccgtctcctgtctccgacagcatcacttgc

SEQ ID NO: 3528 - DNA, 30 bp, Homo sapiens
  chr4:123653963-123653993
  hyper
gtcccagccagaatcgcgtctggccggtgg

SEQ ID NO: 3529 - DNA, 970 bp, Homo sapiens
  chr4:123748070-123749040
  hyper
gcggagacacccatccgtgaaccccaggtcccgggccgccggctcgccgcgcaccaggggccggcggacagaagagcggccgagcggctcgaggctgggggaccgcgggcgcggccgcgcgctgccgggcgggaggctggggggccggggccggggccgtgccccggagcgggtcggaggccggggccggggccgggggacggcggctccccgcgcggctccagcggctcggggatcccggccgggccccgcagggaccatggcagccgggagcatcaccacgctgcccgccttgcccgaggatggcggcagcggcgccttcccgcccggccacttcaaggaccccaagcggctgtactgcaaaaacgggggcttcttcctgcgcatccaccccgacggccgagttgacggggtccgggagaagagcgaccctcacagtgagtgccgacccgctctctccgcctcatttccatttcgtgggttctcgcccgctctctcccctccagcctgcaccctcctcccggatcttcactgcgaccctagcgctccgtgtggtttctggccgcgcggccctcggcggtttcgggttcaccactcaccccctcctttccgggctgcggcgtaggcccgggtgtcccctgggctttggggtgtgccaatttgccctgtaaaccagtacccccggcccggagccgcggcgcgccggggcctcgcggactggctgtcttcccgcggacaacctgtcgcgtcggggatgcccgcggccccgccatgcagctctggccgcttctatctgctgcgtgctgtcccggggacaaagacaggaaggaccgcagcagaacgaaacggtctttactggaaaaacacctttctagagtcctgcccttaaattccgactcgggacgacccgaggcatatggcacactactctcacccactctgttttatatttttccgaattgacgaaagc

SEQ ID NO: 3530 - DNA, 1555 bp, Homo sapiens
  chr4:124317730-124319285
  hyper
cagaatttttagaggcactcccgaagttttaagaggatgtttattacacgagtctgtagggcaacatttccaagttggtacacataaacgaaagaggaaacgatagttaaggaaatcctgttccaggttttcgggcagcccgagtgattgacacatgatatcaccggaggcgtgtcctggagtggaggtggaggtggaggcaaggagctgaaattctgcgtagccggagtgagaccgctctgcaaaccactgcgtgctttgcagagtgattatcagcacagttccctgccctggataaggaacagctacagtcgctgttaaatgtgcctgaaaagcaatttgcaatctttgcattaggtaagtaccgtttccttccgtagacattttaggaaagataaggtgagaaatgttgacttttgcaaggaactgaacatttatttatttgaacttgctttccagctaaggttactggttgcatttcaaaacaccggtagcattcccactgctaaaactaatgctcttaaagtaaatgctaccgctaaaagaaaaagcagggtccctttcacctttccttaaccgaacagtagacgtttaaagtctgaaacgatcgaatttgtgaaacacagagccgttaatgcctttatgcgaagaggggctagcactcggtgtgtggaccaaatgcgtgtttgtttaggcattgttggcgaccgaatcccgagtgaagcattggtttaaaacctgaatttcccgtctctgtgtattgattcctaacgcgcagaggcgttgcttgaacgttgtttgaactcctaggcattccagggggcaaaagcacctcggcaaaaacgtgcaggactgcatgttactttggttcgcggctgacacgccgactgtgcgccggcctgtcaatcaccgggagcagcaacagggagcacatggcaacgggctgcgggcgagctggccagcggcccgcccggggtcccagcccttcgaagaaagggacattcacgagcttctatctctaattctctgtcgcaggcatttcggccgtggaaccccaggctcggaggactgggtgtgagcgctgcccgggagaggctgacctgccgggaccggagtgcccggggacgctgtgcccccacttgcccaacgtgcggaatcggctaagcgcgtcggcctgcgcggggcacaagggacgacgcccgcctttctctctccgagaaggatccccaaacctcactctcttcactcctccccgctaaaaaaaaaaaaaaaaagaaaagggtaaaaaaatccccctccccctcccggccgcggcagcctctgcctggcaggcgcgtgctccgaggtttcgccggggtactgcgcggctccgtgacccacccgccgacggcggttcgggccccgacccgggcgctgcggagtctcgaacgcccgtgacgtggatttttcgctcgtcaggaagccgccatcccttccttcgttccttgcgaggagcgactagaacccgagttctctgagcacaccgtgccgtcagctggcccgtcacgcactcgac

SEQ ID NO: 3531 - DNA, 30 bp, Homo sapiens
  chr4:124320663-124320693
  hyper
ctatttattcagtgcggattgcagagggcg

SEQ ID NO: 3532 - DNA, 30 bp, Homo sapiens
  chr4:124778304-124778334
  hyper
tttaaatgccccagcgggacatccagaggc

SEQ ID NO: 3533 - DNA, 31 bp, Homo sapiens
  chr4:125633303-125633334
  hyper
gagcgcctctgcaccccgccccgcaccgaga

SEQ ID NO: 3534 - DNA, 75 bp, Homo sapiens
  chr4:125633811-125633886
  hyper
tcccagcagaatcggtcgtgctcgccccagcccccaccggccaaccgccgccgccgccgccgtcagggcagtaac

SEQ ID NO: 3535 - DNA, 50 bp, Homo sapiens
  chr4:125633890-125633940
  hyper
tcaggcagcccccggccggccggctccgccccgcccgcccagcccagacc

SEQ ID NO: 3536 - DNA, 30 bp, Homo sapiens
  chr4:126237582-126237612
  hyper
acagggctactggccgcccgtggctcccgt

SEQ ID NO: 3537 - DNA, 30 bp, Homo sapiens
  chr4:126237971-126238001
  hyper
ccggacccctctatcgtggtcactttcaag

SEQ ID NO: 3538 - DNA, 30 bp, Homo sapiens
  chr4:128554036-128554066
  hyper
tctccctggcaacgcgacctgccaccaatt

SEQ ID NO: 3539 - DNA, 138 bp, Homo sapiens
  chr4:128703234-128703372
  hyper
ccgatcctccccgccccgccttcccgcttctcccgcccccggatagctcagcagcctccattttccagatctttctcgaacccgcagcttcttgggcagccgttgcccgagtgctgacggaagcggccgaagtccggg

SEQ ID NO: 3540 - DNA, 30 bp, Homo sapiens
  chr4:128887130-128887160
  hyper
ggcgcctgcgcctacgggggcctcagcctt

SEQ ID NO: 3541 - DNA, 30 bp, Homo sapiens
  chr4:129731320-129731350
  hyper
gggagggaggcagccgctgagcgcagcgtt

SEQ ID NO: 3542 - DNA, 30 bp, Homo sapiens
  chr4:129733013-129733043
  hyper
gaactgtctgggggcgggagcgggagcggg

SEQ ID NO: 3543 - DNA, 30 bp, Homo sapiens
  chr4:130014785-130014815
  hyper
cttacgccatcgcgcgtcctagagtcctag

SEQ ID NO: 3544 - DNA, 273 bp, Homo sapiens
  chr4:134067732-134068005
  hyper
cccttggctggagctatctagcgggaggcggaggaccaggctctgttctgttcggccgggaagaagaccctaccgtcactccgccggtccctggctggcgccacaaagactagaagtcggagaggcgagacctctagggggcctgggctcagcgacgctggtgcggacacagacccctatgacccaagaaatcttgtagagcccccaaaaggcgagctctccaaagcaaaattctctggcctgccctatgctgatttcgccgctaggagacgc

SEQ ID NO: 3545 - DNA, 30 bp, Homo sapiens
  chr4:134068286-134068316
  hyper
acgcgcgcactcgcgcgcacacacacaagt

SEQ ID NO: 3546 - DNA, 107 bp, Homo sapiens
  chr4:134069578-134069685
  hyper
gcggtgctgtgtgccggatgccccagagcccggcgttaggatggcgggcttgtaggaagcggctcaaatcaactcctcagtcactgatgaacgcgctcacggctcga

SEQ ID NO: 3547 - DNA, 438 bp, Homo sapiens
  chr4:134070024-134070462
  hyper
ttatttccatgatgcgtattagggaaaataccttaaaggaaaaagaatgttagcatcattggaaatcccgctcctaggagaggatatcgcagctgttgctattatgttttcgcatttgctgatgcaaacaggggaacctctctattccctccccattacctgcggctggggactgggaactttccgcggcattgtccccagccagcgcctcgggacctgcggggctgttctcgctctcacactcacactcaccccggccgctcgggcgagagttctgtcccgccccgcccggctgccgcgtgacgtgtctgtttggcggccagtttggccaatcatcggcagctcggtgggtggtgctcctgggcgattggttggcagaatgagggcgctgcgcaaaaacggagaagccgagcgctcggagctcagaaactgccagcc

SEQ ID NO: 3548 - DNA, 533 bp, Homo sapiens
  chr4:134072077-134072610
  hyper
gaactctcccccaggcactctcgtgatccagctcaacgccaccgacccggacgagggccagaacggtgaggtcgtgtactccttcagcagccacatttcgccccgggcgcgggagcttttcggactctcgccgcgcactggcagactggaggtaagcggcgagttggactatgaagagagcccagtgtaccaagtgtacgtgcaagccaaggacctgggccccaacgccgtgcctgcgcactgcaaggtgctagtgcgagtactggatgctaatgacaacgcgccagagatcagcttcagcaccgtgaaggaagcggtgagtgagggcgcggcgcccggcactgtggtggcccttttcagcgtgactgaccgcgactcagaggagaatgggcaggtgcagtgcgagctactgggagacgtgcctttccgcctcaagtcttcctttaagaattactacaccatcgttaccgaagcccccctggaccgagaggcgggggactcctacaccctgactgtagtggctcgggaccggg

SEQ ID NO: 3549 - DNA, 404 bp, Homo sapiens
  chr4:134072676-134073080
  hyper
cgcgtttcagccagccggtctacgacgtgtatgtgactgaaaacaacgtgcctggcgcctacatctacgcggtgagcgccaccgaccgggatgagggcgccaacgcccagcttgcctactctatcctcgagtgccagatccagggcatgagcgtcttcacctacgtttctatcaactctgagaacggctacttgtacgccctgcgctccttcgactatgagcagctgaaggacttcagttttcaggtggaagcccgggacgctggcagcccccaggcgctggctggtaacgccactgtcaacatcctcatagtggatcaaaatgacaacgcccctgccatcgtggcgcctctaccagggcgcaacgggactccagcgcgtgaggtgctgccccgctcggcggag

SEQ ID NO: 3550 - DNA, 165 bp, Homo sapiens
  chr4:134073127-134073292
  hyper
cgagaacgcccggctcacttacagcatcgtgcgtggcaacgaaatgaacctctttcgcatggactggcgcaccggggagctgcgcacagcacgccgagtcccggccaagcgcgacccccagcggccttatgagctggtgatcgaggtgcgcgaccatgggcagcc

SEQ ID NO: 3551 - DNA, 30 bp, Homo sapiens
  chr4:136732789-136732819
  hyper
aggctgaatgaagagactttggacctcagt

SEQ ID NO: 3552 - DNA, 30 bp, Homo sapiens
  chr4:139814386-139814416
  hyper
ggtcagaaataaactatggaaactggcact

SEQ ID NO: 3553 - DNA, 103 bp, Homo sapiens
  chr4:140097253-140097356
  hyper
cgcccctagaccatcccgtcgcgcggtccctgaggaccagcttcgcgaggatccagaaggcggtcactggacgtgcctgttacgagcccgtttttgttttgct

SEQ ID NO: 3554 - DNA, 95 bp, Homo sapiens
  chr4:140200643-140200738
  hyper
gagccaggcgctcgcggggttcaggctgctgagaccctgccaagggttaggtttatttaccccacgaacattcgcccagcgtccactgagcgggc

SEQ ID NO: 3555 - DNA, 14 bp, Homo sapiens
  chr4:140201142-140201156
  hyper
caactgggtgccgg

SEQ ID NO: 3556 - DNA, 235 bp, Homo sapiens
  chr4:140201192-140201427
  hyper
cgcccgtcctcctctccgggctagacctccttactcaccgtcctttccgagcggcgcggggttggggggcgccctcagcggcagcgccagagtcttggagaccgccctgcggagatacatcgcgcccgctgtccgccgcgcagcagcctcggtacccaggcgcaggctgcccttccacagagaggctgagagcctggcagcgccccgcccggaggaggcacgtcgaccttcatcc

SEQ ID NO: 3557 - DNA, 30 bp, Homo sapiens
  chr4:140222631-140222661
  hyper
gggaaaaccctccgcgtccgccattttggc

SEQ ID NO: 3558 - DNA, 30 bp, Homo sapiens
  chr4:140478720-140478750
  hyper
caaaatacttccagcgcccaggagactact

SEQ ID NO: 3559 - DNA, 171 bp, Homo sapiens
  chr4:141071487-141071658
  hyper
ggcttgcttccacctgcgagtgtatcacaaaccaggcgcgcgcacccgagccctccctccaccagggcggaaaccagagaacacaacccaaacaccgaaagtttctggtcgcaaactctactcatcttgccgtgtccagagacccggcactgggaacggcactggcttttg

SEQ ID NO: 3560 - DNA, 386 bp, Homo sapiens
  chr4:141071934-141072320
  hyper
ggttggagaaagggaccggagctacagtcgagatgcgggaccggccccgcctccggctacaatcagaaaaactacagtgtgtcagtggttttcggtttcctgtttgtaaagcgagaacctcccccgactcgaactgtcgttcttcctcaaaaccaaccgagacggccccttcttcgcgctcggggcaggctcagccgcagggggagcggagaggagggacgcgggggcatggggggcgcggcggggcggggacagccgcgatgaagcgggcagggccacggggcgcagcacccctcccagcccagcggccccggggtctgagctgggccgcgaggcggacaaagcgcctcccgctccctcccccacggccacgttccaaaagggag

SEQ ID NO: 3561 - DNA, 175 bp, Homo sapiens
  chr4:141072547-141072722
  hyper
tggggagcgagcactgcggcgtcgcctcccctcccccaagccgactctttgtcaccgagcgccggcccgagcccccggcgaaagcccacggcagcactggcaccaccccggcgccggggactcacagaccgggaacgtgtgcgatttctaaaccgcacgacgggagggccgcccc

SEQ ID NO: 3562 - DNA, 42 bp, Homo sapiens
  chr4:141073274-141073316
  hyper
cagccgctccacctgccgggctagccccgagtcgcgagcaaa

SEQ ID NO: 3563 - DNA, 36 bp, Homo sapiens
  chr4:141073590-141073626
  hyper
gacgggtctggggaggcgaggcggcgcggctagagg

SEQ ID NO: 3564 - DNA, 384 bp, Homo sapiens
  chr4:141073988-141074372
  hyper
aagcccgctgcccgtgcgccctcaccatgatcagcgtgtggttcctctgctccgccgaggcagcctccgcatcttgctggggtttgctcgggtgctgctgtttgccggtgccggcgcccgatttcttggccctctgctccagggtccgctggtagaggctcacggtgtcccggcgctccagctccagctgctccacctgagcctgctggtacctgttctcgcagttgacgtggtgccgacggcagccctcgatgcgctggcggagccgctccaccacggtgctgtgcttgggaacggccgccgaaccgccgccggggcccccggagccgccgcatccaccggctgccgggtgattgctactcggagcagcgggagtactattgg

SEQ ID NO: 3565 - DNA, 512 bp, Homo sapiens
  chr4:141074879-141075391
  hyper
ttttctccctacataccgaaaaacacaccccatgtacacacacaagcatatgcctccagtgcggacacgcgcgacacacactcactccacaccgcatcggaaaacggcaagcttgcttattgcattttccttccacaaaaaagttttggtgtttatgccgccccgtgttctcaaagtactttggctgctcagttgcatttcacaggaacctagatatcgaatcctcgggctgggggaagtaaacacatggacagtccgaggcgactgcaaaagtagatcggtgaagtcctttgcaaaacgccgcgcagagagcagcacctaacgctcggctgggctgccgctgccgccgctgctcctgccaccatcacaatgatcaactgctcgccgccgccgccgccgccgcctcctcctcctcctctcgctcctccacctcctcctcctcctccatgccagcggagtgatatcaggacgcgcgagctcagtaaacacggcagcggcggcggctggaggcc

SEQ ID NO: 3566 - DNA, 30 bp, Homo sapiens
  chr4:141075709-141075739
  hyper
aggaaagtatcaagcgatcccaagttgttg

SEQ ID NO: 3567 - DNA, 577 bp, Homo sapiens
  chr4:141293943-141294520
  hyper
ggatgtctaccttgtactcaacgaatattaaagcaggatgccgctttgtgtcaagtactagattacgatgaacggtgtcacgaagaacactccactcttgataccgtatatgtgaccttgagcaagaaatgtgttcacgctcaggcttcagttcctttctgtgggttgctgtgaggctccacaggggtaaggtaagcacaagtgctatgcctcagtaccactagggtattttctcaattctaaaatattaaatggccacgcactacagatttaataatagtttcggaggaggggcgtgaggagaggaacattccactagctcaactataagctttccgatttcggaaataagaaaaatatgaaaaagtctgcttttagaattaaggaacgacggtgtcgcgttgactttctctgcttggttcgcaaacgctcttttctcgaacttgaatgacttctctgtcgctcataccaacctctttcctgaatgacttctctgtcgctcataccagcctctttcctgattttccacactgggattctcactccaattctcaggtttcctgatagacctgatgag

SEQ ID NO: 3568 - DNA, 796 bp, Homo sapiens
  chr4:141294545-141295341
  hyper
cgcttctttactgtcattggctgtcgctgttccaggtcccgcccacagcgacctcaatcctgattggatgtcagtgtccttttgttatggcaaaggtggatcccggtgctttgagattggacgactggggtgaggcgggcagctaatgcgcaggcgtgtattctcgagtcaggattggcgggcgagcggctgggacgggatgggattcttctcacggcgcacgttctgtgggcggagtgggcggagctgccggggtcagttggtccaagtgtcccggcctgaggtgtcggccggatccctccttctcccggcgcctcaagcggaaggtgagggccgtcccgggcagcggagggcctggccccaggcgactagagctgcatcctcagtacctccgagggcctggagggcggggcgggctggacgcggccctgcgcaccgggggcccgggaggagcggtctcgggcctgggcatttggtgggcggcggaggcctggctcccggcagaacccttgcgcgacctctttttctcctgttttcgttgtcaggcccaggcgttctttgggagagggacctctcgcggtccctgacgcagacatcgtgtagctttctccccgcagctcctgggtcgggagccgctttgcagctctcggctctggaattggactgcgggaggggcgtttgggtggaatgggacctggcacgcctggaccttcccgtggctgctctgcgagagcctgagagatgggaggggaggctgaggtggggagggagcctagagagccgtaaaataaggatt

SEQ ID NO: 3569 - DNA, 30 bp, Homo sapiens
  chr4:141348473-141348503
  hyper
tccacccacggggccgccagagcccagtca

SEQ ID NO: 3570 - DNA, 265 bp, Homo sapiens
  chr4:141488864-141489129
  hyper
gttacactttttggaacagagcggagcccaaggcttttctgcccctcccaggaacgctcacggcttactttctttccctgcggtgaggaactcctggaccgtgtcgtagaggccgatcctgagagaggcggagctgatttgccgctgaagccccgcaggcagcccgctgtagagtttcatccgcccttctgtttttaccacagcggtgattgttcccaggacacctttatacctaataacactggacgtcgggcattcaccttgg

SEQ ID NO: 3571 - DNA, 30 bp, Homo sapiens
  chr4:141489784-141489814
  hyper
cgggaaggtgatcacgtccgccaagcacgc

SEQ ID NO: 3572 - DNA, 30 bp, Homo sapiens
  chr4:141490339-141490369
  hyper
agggcgcaccgcggcggtcagcacccgcgc

SEQ ID NO: 3573 - DNA, 31 bp, Homo sapiens
  chr4:141678190-141678221
  hyper
cccagggcaagtcatgcgctaaacttgtcac

SEQ ID NO: 3574 - DNA, 1539 bp, Homo sapiens
  chr4:142053306-142054845
  hyper
ctttgtaaaccccccaagtgacgcggagcaaaacttaatcggtccagggaacccagacacgtcttccgcgccgcacggacttcccagaaggagcctggaggcaggcgctggatccctctaggcacctccgtccccgccggctcccctcccccgcgcccgctgggccactcacccgcgtggggcatggtgatggtctcgttggtgttggagcccacgttgaagatgaccacggctgaggcgttctgcaggaacgcgttccggatcttatccctgtacgtgcagttgcccttggggatgagggctatccagttcttgccgcgggtcggggcggcgaacttggtgttggggtcgcaggccaggcggtcgtgggccgagctggccatgaccacctccccgcgggcgtcctgcttgggcgagtgctctccgtagcgcccgcactccgtcttctccgtgtgcagctccgcgccgccgccgcccgccgccccggccccggggtccggcgcgggctcggcgtaggtgatgttcacgaaggcggtgtaccattcctccttctcggccacggtaaagtccaggcagagcagatgcacgaaacaaaaggaaagcagccatgttgagagagccagactgcagcacgcttggatgagagacattgccatctttatccgccggggccccctccccgcccccgcgccctccctccgtcccgtccctcctccccagccccggccaaccccgggccgctgcctctcctcctgctgctgctcactcccgggccggaggggccgcggccgggacgcgcagccgccgcggggaccggattccgggcgagcggatggcgctggccccttcccctctcagctgtagcgcggtggttgcattttgcttcttgggcgcccggggggcgcgggaacagagggcccgcggggcttgcggaggagtcctgctgccgagcgtcctgctccttcgcccggcttcgccttctctcataagggtggccgggggcccacgaacttgcagggtggcggccctgcgccctccagccccggcggggacgggcacgattgctcgtagtctggggtgctgcggtgcggggtgctgcccagggtgtcccggccgccgccactgagcgctggggcgcgcgaatccagctgcagccgctgctgccctgcgccggttccctcaggctgcgggcgctgcgctcctgatctcgccggtggctgcgcctgggcacgcacttgccgcgggcggggcgggcttggggacagtgggagcgagcaggcagagcggagtaagcggtccgtgtgtgtgtgtctgtatgtttgtgtgtgtgtgtgtgtgtgtgtataatgtgtgcgtgcaaggaggagcttagtgtgatgtcaaagcccctgggattctcttgccatgttcccttggtctctctttatgggcagcagcgacccctgtcgggtctcaaattcaacctcaatcggcgacttaatctaggtggaggtaaagaggaagcgacccctcgacctttgagtacgggaataacttcct

SEQ ID NO: 3575 - DNA, 30 bp, Homo sapiens
  chr4:142141999-142142029
  hyper
cgaacagaggtgggcggctcccgtcctatg

SEQ ID NO: 3576 - DNA, 201 bp, Homo sapiens
  chr4:142557305-142557506
  hyper
cggggaccaagaggccggtctagagtagccgcccagcatccagatccgacatccttttccctttcctcaggaagacttggatgcgcgccagcccagcccgggtctccaggttcagctgcggaagcttcccacatggtgcccgtcgcttgggatgcggctatccttgtgccttctctgcaggtgtcccggcaggtagaggag

SEQ ID NO: 3577 - DNA, 41 bp, Homo sapiens
  chr4:142558015-142558056
  hyper
ggtctatcctactggccgagctgccccgccttctcatgggg

SEQ ID NO: 3578 - DNA, 524 bp, Homo sapiens
  chr4:143766860-143767384
  hyper
cttaaggacttcttcccaggccggcggcggcggcggcggcggcggcggcagcttgcgatcatcaggattggaagtgagagcgagtgcccgggccaacctcagcgtctctcagggacagcgcaggtgggcgcagccttggaaggtcagcgaggccagagctcagagttccacgggggcccggagagtgtgcgtgtgtgagtgagaatgcgaaaacgcgcgcgcgccgggcagaggggcgctcggcgagagggtaggcgcggtgacaggggtaccccagcagccgaggagagacagcccaccccaccctttaagctaaagagctggaggggtgatggaggctgcaagacggagaaacttgatgcaaaacagacaggctcccccctccaagacgtgccgccacgctctcagacacgctccctcgcctcccggattacccaccatcaaccaccccaccctgcaaaattcccccaccgagccctaggatcccaggcgggtaattacctctcccggaggcggagtggggg

SEQ ID NO: 3579 - DNA, 142 bp, Homo sapiens
  chr4:143767433-143767575
  hyper
cgagcgtgtgagcgtgtgcgcgcccaggaggagctgtaacctgctatttatagaccgaagcctcagtacccggggctgagaacccggaggaaactagcaggcggcggcgacggcgcagggcgccggccgcggcttcgcgagg

SEQ ID NO: 3580 - DNA, 506 bp, Homo sapiens
  chr4:143768118-143768624
  hyper
gcgcagtccctagaccgagggtttttggaaggggcttgggatccctgctgtcactgcctgcgtctaggcatccattcacgcctgctggaccccagtctgcagccgcgctgggacccctgtctcttgcccctcctcccccttgccccgggcagaggtcgggctgaggagaccagcttagagcagccctcggccacccaccgccagttcccacgtcgcggcgggtgactgaggccgagatgctcccaactagcgtatgacatgcctttgatatcccgggtgcgtggggacaaatccgccctgaatgtgttggggtatcaggaaaacggggtatgtaagcaagcagtctggacggagactaaaactcccccacttcctagcccctaacaagcccacaggggaaagcacgcaccctggttattccgggctgtgtagggtgtggggcaaatgactctccccatctgcgctttacaggtgccacctggcggctctctcggaaaggttttgat

SEQ ID NO: 3581 - DNA, 437 bp, Homo sapiens
  chr4:144257017-144257454
  hyper
aagtaaagaaaaccctcgaaactcctgatctcgagcacagcacaagctccgagctggcaccgggctgagtcaagatggcaagccccggactgaacattcgaatgtccctcagtcttccccgcgcccaagccccggtgcctctgccctagccgaggcctctgcggtcttcccgggcgaggagccgattgggggccgccggacggcggaggaccctgctcctgcttcccgaactacagatcccagggtgcctctcggactcgcgctccctccctcccttgctccctcccttcgtccgtctcctcccccggcccttgttgttttggctggaagcactccggcggagtttcagagaaagtctgggcagaaaccggagccgggcctgaacgtgggaaggggaggaggagagggaggaagaaggagcccggcggccgggagag

SEQ ID NO: 3582 - DNA, 154 bp, Homo sapiens
  chr4:144257972-144258126
  hyper
tcttgtccctagggggcggagcgcaaaggacagaagctccggcaccgagtcggggcagagtcccgctgagtccgagcgctgctgaggcagctggcgagacggcacgtctggaggcgaggcgggcgcactgaaaggaggccggcgcgcccgcggc

SEQ ID NO: 3583 - DNA, 301 bp, Homo sapiens
  chr4:144258374-144258675
  hyper
ctccgcaagtcccccccggagaaaaagttgaagcgttatgtaagtagagctgcgggcaccactccgcgggcctcggcgtccacacccctccccagtcggctcgccggcggctgcagctggccgcgcgcggggctggttcttaaacgaatgccggtctctttccccttggcccctacccctggcgggctcgggacagggtgccttgcactccctcacgcccaggcatccacttggccggacaactttcttcctccaggttccagacagcctgctttgcgggcctgttcgccccataaaagga

SEQ ID NO: 3584 - DNA, 319 bp, Homo sapiens
  chr4:144621120-144621439
  hyper
cctggggagaggggcccccaccgcgtccaccaagcgcccgtacttgggcagggggccgtcctcgtgaggaagtggggtaagccggcacctgcgggtggccgtggctccagacttcagggaggcgaagtccagcactctcctgtctatggcgcggctccagcttcgcagcttctccactaccaaaggcctgttacgcgtcaccagctccagctgggagaagaccaagtccaccgccagcgtgaagggcagcaccagagtgtgagtcggggcgtcgtagcgcagctgcagcagcacccgggcgcgtccggggctgtgggag

SEQ ID NO: 3585 - DNA, 382 bp, Homo sapiens
  chr4:144621514-144621896
  hyper
cgcggcagggcgtccagtaccgtgacttcgcaccggtcccccggctgcactccaatcaccagatcccggagcgggtcgagccaaagggaacgacccaggggcacccggagtccagggttggcaatcagcacgctggggccgtcggggcgagtgccgtcaagcgcaccccgggcgggcaggtaaagcgccgggtcgggctcggtcccaagtgaggatgcccgtccctgcagcgcggggcgactcaagagcaggcaggcgagcgccacaaggagctgccggggcgtcccagtcgggtgccgagaagcccccgccatggccacggatggctcctggcgttgggattcccggggtggggtgccctgtgcaaagagggatctgctga

SEQ ID NO: 3586 - DNA, 347 bp, Homo sapiens
  chr4:144621981-144622328
  hyper
cggctgctgcaggtaacggcagcgggggaaggggctctgcccacttcctgctcagccccggtcgcaagtctctctctgctggcttctggggaccccagatacgcgcccagcgcggcgagacttagcgagggtgcagcgctgtcccctccgctcctgggcgcttcacccagcctaccttacacaccttctcgccgggagccgtggccgccgcactgctgcccgcgctgccagactccgaccagctgtctggatactctcttccccaggtgccacaaagggattgtccctcagggttgggagagagacggtgactgtactcgggtcagtcctgcgtctgtgagattgag

SEQ ID NO: 3587 - DNA, 31 bp, Homo sapiens
  chr4:146102129-146102160
  hyper
atggaggtggctttaacggcttaagcagaaa

SEQ ID NO: 3588 - DNA, 281 bp, Homo sapiens
  chr4:146402905-146403186
  hyper
tgagcgtgtgagcgggcgggcgggcaggcgagtgcgccgggtattggcagctgaggagtggaggctgggcagctccgactccctgacgccagcgcgaccagatcaatccaggctccaggagaaagcaggcgggcgggcggagaaaggagaggccgagcggctcaacccgggccgaggctcggggagcggagagtggcgcagcgcccggccgtccggacccgggccgcgagaccccgctcgcccggccactcgtgctcccacacggacgggcgcgccgccaa

SEQ ID NO: 3589 - DNA, 283 bp, Homo sapiens
  chr4:146403604-146403887
  hyper
gggccgaggcccgttcgcgtggcccgcggacccattgtgtcccccgcgccggcggggcgacccctgcgggagctggaggacgaccgctggcgctgctctccaaggcgcctggtggagcgggtctcgcgggcgggggaccccggcgccccgggcccctccacatcccgcacgggttttcttctcggccccagcaagcctctttggggtcgaggtcaaggaaagttcgcaccgagatcccctctaatttattcaaaggtttggcggcggcgcgtaattttttccc

SEQ ID NO: 3590 - DNA, 30 bp, Homo sapiens
  chr4:146857550-146857580
  hyper
ctcagaacctctagcgggcaggcgaagaaa

SEQ ID NO: 3591 - DNA, 44 bp, Homo sapiens
  chr4:147443080-147443124
  hyper
gtctcactgagcgccgccatcactaccacgcgcctcagaataca

SEQ ID NO: 3592 - DNA, 30 bp, Homo sapiens
  chr4:147558074-147558104
  hyper
ccatgtccaggtttcgctgagctcacaccc

SEQ ID NO: 3593 - DNA, 38 bp, Homo sapiens
  chr4:147558343-147558381
  hyper
tcccctactctccaccgccgcttccgggagctgaccac

SEQ ID NO: 3594 - DNA, 95 bp, Homo sapiens
  chr4:147558476-147558571
  hyper
cgccttccccaggcgcccagtgcctgcacctgctcccggtcaacccccgtccggattgggccacccgcgggttcctgcgtcggggtcccggggcc

SEQ ID NO: 3595 - DNA, 99 bp, Homo sapiens
  chr4:147559564-147559663
  hyper
tcttacctacccaacgctggcttgggccgcaactttatttgggagtttctttttccggtgagacagagacccggcagaagaagcgggaggggctggagg

SEQ ID NO: 3596 - DNA, 34 bp, Homo sapiens
  chr4:147560267-147560301
  hyper
gaccagcgccccggcgggcgggaagatgatgatg

SEQ ID NO: 3597 - DNA, 30 bp, Homo sapiens
  chr4:147560755-147560785
  hyper
ggatgttgcctgtgcgcgtgttgtgttgtg

SEQ ID NO: 3598 - DNA, 30 bp, Homo sapiens
  chr4:147561654-147561684
  hyper
cacaataatatgatcgcgctcaaacccatc

SEQ ID NO: 3599 - DNA, 30 bp, Homo sapiens
  chr4:147561885-147561915
  hyper
aaaaacgtggtgcgcgtctggttctgcaac

SEQ ID NO: 3600 - DNA, 30 bp, Homo sapiens
  chr4:147568700-147568730
  hyper
aggtcacttctttgcggagaggccttctca

SEQ ID NO: 3601 - DNA, 30 bp, Homo sapiens
  chr4:147576532-147576562
  hyper
agccagacagcagacgccccggcgatgcct

SEQ ID NO: 3602 - DNA, 30 bp, Homo sapiens
  chr4:147867143-147867173
  hyper
tactgacggccgggcggggcccccagatag

SEQ ID NO: 3603 - DNA, 30 bp, Homo sapiens
  chr4:148402884-148402914
  hyper
gtggcttgctccagcgccttcttgtgaagt

SEQ ID NO: 3604 - DNA, 34 bp, Homo sapiens
  chr4:148538934-148538968
  hyper
gcagcagaagacacagcgccggtccaggaggcgg

SEQ ID NO: 3605 - DNA, 254 bp, Homo sapiens
  chr4:149362787-149363041
  hyper
tccaactgatgccataggaagcgtagcctgtctcaagagtttcgcgaatgctagcgaacgggaaatgcacgaatttccagagccccttttatacaggatctattaggatctatatctccttcaactgcccttatgcgctacacctccggctgagatttgggagcgtccgcaattgataaaggaaagaaatattattcaaacgtcctttaaaaattgtacagggaaaatgatccgaaattcatctttgggtaaag

SEQ ID NO: 3606 - DNA, 30 bp, Homo sapiens
  chr4:149363700-149363730
  hyper
tcaggttgctatcccgcccccctgaaccct

SEQ ID NO: 3607 - DNA, 127 bp, Homo sapiens
  chr4:149364526-149364653
  hyper
aaagcaagcttaccatcgaggatattcacgttataatgggtggagggggtgggtcacataagtgggagaaacagacaggaggggggaaggaaccaaactgttttctaaggatcggttgtctgcatga

SEQ ID NO: 3608 - DNA, 253 bp, Homo sapiens
  chr4:149365596-149365849
  hyper
ctgccttgcccggggccgcccctgcgctctccggaccccctctcgccgctgtcagcgcaaagtgactgtcgctgcactcaccttttctaggacatggtggggaggctggggcgggggaaggggaacggctagactcccgccgccgctgctgccgccgccaccagcaagtccaatattggctgatcggcggtgaggatggagaggatgataatcccggcagtggcagtcgccctgctgacggtgggtagagcaa

SEQ ID NO: 3609 - DNA, 57 bp, Homo sapiens
  chr4:149366181-149366238
  hyper
gggaggaggcggcaccgcgtccggccacccgcgggtgggaaacgggcaggggcgccg

SEQ ID NO: 3610 - DNA, 904 bp, Homo sapiens
  chr4:150999236-151000140
  hyper
tagtttttggcctgcgcggttacgtttcccaggcggaggagcgcgcgtcgcggctgcgcccattaacgcgcggcgccgggcaggagccgtcaggcgggcggggctgcccgggacccgcaggagctgctcctcccgcgccggcgctcggccccctcctccgccccctcctccgccccctcctccccttctccgcggtttggcatccccggggccgggaagcctcctccagcgctgacagcctgtcggcggcggagggaggccagagcgcggatgcttgccagtgggccgggcctgaccgctgcgtgggaggcgggctgcattatttcccgctagggccgcgctccagggaaggaaggggccagacacggccctctcagccccgaacggcgcgcgctgcccggcgggcgggatccgggcgcggccgaggcggcggcgctgcaccccgggcctgggcccgcgcgactcccccgggggcctctcccacgctccgcgccccgccccacccttccttccttcctcccctcggcgctcccgggagcgctcggcagacgcccgagctttgtgggcgcccgcgggcccagcgcgagcctcgggcggcccaactttgcctctcccggtcggctcccgagcgggacttgtgaggcgtggccgggtggaggaggcgcttgcgggggcgtggggctccccggcaggcgggaggcacggagcaagtcgcactggacaatgacctgggcagctcggcgctgcggacacttttagctgagggcgcgggcgggtcggctcctccgcggctcctcggccccacctgcgcggagagggcgggatgccagagccaggtgtcccggcgcgttaagggccctcgcagtcagacgtccctgcaccggcgctcgcacccttagtcggc

SEQ ID NO: 3611 - DNA, 410 bp, Homo sapiens
  chr4:151000246-151000656
  hyper
cgcggagaggggcccccagctcctccgggggcagcagcagctcgggccccaaggggaacgggctcatccccagtccggcgcacagtgcccactgcagcttctaccgcacgcggaccctgcaggccctcagctcggagaagaaggccaagaaggcgcgcttctaccggaacggggaccgctacttcaagggcctggtgtttgccatctccagcgaccgcttccggtccttcgatgcgctcctcatagagctcacccgctccctgtcggacaacgtgaacctgccccagggtgtccgcactatctacaccatcgacggcagccggaaggtcaccagcctggacgagctgctggaaggtaggaggggagggcgccgcacggcaggtgcggcggagcgccggcaggtgcagtgg

SEQ ID NO: 3612 - DNA, 343 bp, Homo sapiens
  chr4:152246219-152246562
  hyper
gaaagtgaggatggcgatggaaatgccaccctccccgagtctggcctctgagagttaaagaagccggtcccatcccggcgcgtgaaggagctgccgctgtgtggggcaggacccgagcggccccagagcgcgcagctctgggtccccgccgccccgtcccccgcgcctctcacctgcggccgagtggcccgagagcgcacggccccgggcgcggcgctggccaccaagttcgcggcgctcgcgtagctcttcctcctcgtcctcccgccgccggccctcagccatgggcgaggcgcggggcgcagccgcgggatggccagcgagctgcggccccggcgcccca

SEQ ID NO: 3613 - DNA, 91 bp, Homo sapiens
  chr4:152246862-152246953
  hyper
ctcagggaggggttatcggcccctaaggccgccccacagccacacacgctggaaacaccagctcgacccaaacaaacgtgtgcaaaataaa

SEQ ID NO: 3614 - DNA, 520 bp, Homo sapiens
  chr4:152330027-152330547
  hyper
cgcgagtgctacactgcgcccagctcaagtttctgtggaaactttccctcagaggctcctcctccttcaccttggaaaccggcgcgggccgtgcggcgcggcactgcctaagtccccggcgcacctggcggcggcgtgtcccagcggcagaggcggggccggcggcggcgggggcggggccggggcgcgctccccgaggcctccaggcaggttgggccccacccccgcccctgccccgccccggcccccgcccccgcccccgccccccccgcgctcactagggagaggctggggggaggcagtgacccacgcgcctcagcccgcggctgacgcaccttcgaaaagttgcgctccgaccttctcacgacctacattcttcccgggcactcctgagtttgagccgggcctggaggacctgggccaagactttcgagcggcggccgcccgaggtgcgaggagccagcccggctttcctcactgggtcccgcgcaggcgtccccgggaccgcagagcaaacttt

SEQ ID NO: 3615 - DNA, 30 bp, Homo sapiens
  chr4:153249370-153249400
  hyper
aagatgcatacaacgcacagtggaagtatg

SEQ ID NO: 3616 - DNA, 108 bp, Homo sapiens
  chr4:153601015-153601123
  hyper
gcttaccccggccgacgggaacgagcgcgatcaccagggcgaagactagggctgcgcggggagcctgcatgtccgctcgcctcggcagaggcgcgctcaggatgctgc

SEQ ID NO: 3617 - DNA, 30 bp, Homo sapiens
  chr4:153601372-153601402
  hyper
tgctcagatgtcgttcggtatctgggactg

SEQ ID NO: 3618 - DNA, 30 bp, Homo sapiens
  chr4:153857098-153857128
  hyper
agaagccagcttggcgcctcctctcgcccg

SEQ ID NO: 3619 - DNA, 31 bp, Homo sapiens
  chr4:154048774-154048805
  hyper
gtgaggggtgagaatacgaggcattatttgg

SEQ ID NO: 3620 - DNA, 185 bp, Homo sapiens
  chr4:154073355-154073540
  hyper
agttgtcaagggaaccgcgtgtctggagggagaacaggctctccggagtttcccgggaaaccaccccccgcagaggcaggtgcggctggctgggcctcgcggggaagggctctctgggcggagtcggggcactcggggcctggggcgtggtcgccgggctgccgtgcgctcgggatcagtctttt

SEQ ID NO: 3621 - DNA, 726 bp, Homo sapiens
  chr4:154143757-154144483
  hyper
tttgcctctgcctcgcggttgatggaaaacagatgtcttactgctctgggcctgagcacagaatggaaatgaccgaccagagagccatttggagccgaggacacccggtgaaagccattcagagtccagccaggaggccgactttcctcctctggtctgtttttactacttgagccgctcgctcagaaaacggccttagataaagcagtttcaccttcagatcgcctgaggctgcagaagggcggctgcgggggaggaaggaggaggcggagaggagcgggtgcgaagtcctgggtcgcctgcccgctgcctgatgtcgtgagctagggcacctcggccctggctgggcgcgcagcgaggcccaggcccgaggggtgaggcccaggccactccggagcgcgcgctgttcccgcgaagcgagtcgccgtctcgtagtaagtcgtggctcgggctgtgccctgggaaccctcccgcccgggcaaggtccggtggccggagcgtgcgggaagcctgcccagagtccatttccggacgggcgctgcggggctggcagccggcctggagcgggtgcagtgggtcggcgcggcgcagagctgtcagcaacagggccgctgagcagcagaacctggacgccgcgcggctcccaggccctgcccgcggagctctcccgggagtcgcggacctctgccgtcctcagtcacccgcgtcatgcaggatagctttcaa

SEQ ID NO: 3622 - DNA, 30 bp, Homo sapiens
  chr4:154607110-154607140
  hyper
aagggctgcatctggtgagggtcatctggc

SEQ ID NO: 3623 - DNA, 30 bp, Homo sapiens
  chr4:154681051-154681081
  hyper
gccggggagggtcccgcagagtccgcagaa

SEQ ID NO: 3624 - DNA, 35 bp, Homo sapiens
  chr4:154709575-154709610
  hyper
cgggccaggggaagccgaaggcggacatgaccggg

SEQ ID NO: 3625 - DNA, 686 bp, Homo sapiens
  chr4:154709758-154710444
  hyper
cggcctgctccagcacctccttcatggtctcgtggcccagcaggttgggcagccgcatgttctggtattcgatgccgtggcacagctgcaggttggcagggatgggcttgcaattgctgcgcttgtaggagaagtcgggctggccaaagaggaagagcccgcgcgccgagcccaggcagcagtgcgaggcgaggaagagcagcagcagcgagccagggccctgcagcatcgtgggcgcgcgaccccgagggggcagagggagcggagccggggaagggcgaggcggccggagttcgagcttgtcccgggcccgctctcttcgctgggtgcgactcggggccccgaaaagctggcagccggcggctggggcgcggagaagcgggacaccgggaggacagcgcgggcgaggcgctgcaagcccgcgcgcagctccggggggctccgacccgggggagcagaatgagccgttgctggggcacagccagagttttcttggccttttttatgcaaatctggagggtggggggagcaagggaggagccaatgaagggtaatccgaggagggctggtcactactttctgggtctggttttgcgttgagaatgcccctcacgcgcttgctggaagggaattctggctgcgccccctcccctagatgccgccgctcgcccgccctaggatttctt

SEQ ID NO: 3626 - DNA, 30 bp, Homo sapiens
  chr4:154712407-154712437
  hyper
atcgctgctcctcccggaacccacgccact

SEQ ID NO: 3627 - DNA, 30 bp, Homo sapiens
  chr4:154713554-154713584
  hyper
ctccaaccgcgttgccgcctggctttcagc

SEQ ID NO: 3628 - DNA, 30 bp, Homo sapiens
  chr4:154713895-154713925
  hyper
ggggggacctgtgcccgcggccgtgcacct

SEQ ID NO: 3629 - DNA, 30 bp, Homo sapiens
  chr4:154714151-154714181
  hyper
aggccgaggccaacgcggagctcagcgccc

SEQ ID NO: 3630 - DNA, 427 bp, Homo sapiens
  chr4:155254166-155254593
  hyper
ctgcctgaggatgcacgccttggtcctcggccctgagagtcagcgtgagctcccgctgctcgcccgcgcccaggctgccgttgaggaacagcacccccagggctctgtcgatggcaaagacgcctggctgcgggctggcgatggagtaccggatgagtccgttccgcccactgtctctgtcttccgcacgtgcgaggtacaaggctgtgccagggggcgtggtctgggatattctaatctcatccgaggtcctgaggaacgctgggtggttgtcattgacatccatgactgttatgttgacctcggtgctgctgcaggctggggcgctgccgagctgcgcctgcaccgtgagcacaaccacgggctgcgtctcgtgatccaggggcttccgggtgcgaatagtgcccagccgcgggtgaatggagaa

SEQ ID NO: 3631 - DNA, 30 bp, Homo sapiens
  chr4:155338151-155338181
  hyper
gcagggatcacggacgccaagcggcactat

SEQ ID NO: 3632 - DNA, 543 bp, Homo sapiens
  chr4:155411850-155412393
  hyper
cgggcctgcggggtccttgggcaggtcggacggttgcaccagggtgtagccctgagtgctgaacagtccggcgtccggatcgtgggcaactggcaggcggaaggcggtccctggcgggctgagctcggagacgtcgagttgcagggagtcgaggggaaagcggggcgagtggtcattcacgtcgttgacgcgaatctccacctgcaccacagcgcccagcagcgtggcggcgacgaagctgtagtggtcccgccgctcgcggtccaggcgccgcgcagtgcggatgatgccggtgtccgggtgcacgtggaagtcgtccagcagcggggagtcatcggagtcctccgacagaaagaagccgctcccctcctgctgctgcgcggccggcagcccggcgcggatgtcacctaccagcgtgtccgggggaagcccctcatctacggaaagggtgaggttgaacaactgggcagaggagcccgaggccgcccacagccacacgtgcaccaagagccagagcagggagcgctgcgtcctggcgccgct

SEQ ID NO: 3633 - DNA, 30 bp, Homo sapiens
  chr4:155413454-155413484
  hyper
gcgagagggactcccgtccgcagcggaagg

SEQ ID NO: 3634 - DNA, 30 bp, Homo sapiens
  chr4:155548258-155548288
  hyper
ggagggcggcgccgcgccttctggggagac

SEQ ID NO: 3635 - DNA, 337 bp, Homo sapiens
  chr4:155663514-155663851
  hyper
ggcaagcagggagacggggacagatcgctgacggcagattgagggtggcagcaaaggcccggcctccaaggataatggggagccgttttccctcacgcctggtctctatggcccccttcgtcttccaggtaaaatgaatgttccttcatccatcatccgcagagtaccctcaggcgtgcgtagaatctgctgatgaaacctattagcgccgactgggcagctttgtggagccacccgaggctctccattgtggcctttgtctgcagaatttaagcatttacataatgcattagcacggaactcagcacccggtggggacatcgcgtgccaagcctgg

SEQ ID NO: 3636 - DNA, 13 bp, Homo sapiens
  chr4:155664135-155664148
  hyper
gggcgttgggacc

SEQ ID NO: 3637 - DNA, 68 bp, Homo sapiens
  chr4:155664189-155664257
  hyper
cggccacaggtgcctaggagcgcagagaggcctcgggttcaaatcaccggcgcgcagggactggactc

SEQ ID NO: 3638 - DNA, 116 bp, Homo sapiens
  chr4:155664919-155665035
  hyper
cttaaaagccagtagtgcaaccgggatcccgcggcgataaagaatcactgtgcagaaccctggagctgggagtcggcccgcccccctcccaaagaaaccgggatcccgcgtcctcc

SEQ ID NO: 3639 - DNA, 348 bp, Homo sapiens
  chr4:155665292-155665640
  hyper
ggtcgccaggcctcgctgtcctcctttgccttcctctctcctcagcggccgtactttgcgccgtacctcacctggcctgcaggtgagcagcagcgcagcacccctgcccggcgagcttaacttgcccagcccggcccctgccggagtggcaccggcacctctccaagacgccctcttccctgcaggatgaagaaccccatgctggaggtggtgtctttactactggagaagctgctcctcatctccaacttcacgctctttagttcgggcgccgcgggcgaagacaaagggaggaacagtttttatgaaaccagctctttccaccgaggcgacgtgctggaggtgccc

SEQ ID NO: 3640 - DNA, 111 bp, Homo sapiens
  chr4:156129559-156129670
  hyper
aggtctgtcttcgccgggccagctctcgcggaactggggggtagagagcaaagggagagattcgtggaagggaagggaggtaggggtggcgcaaacgcccagagtatcaaa

SEQ ID NO: 3641 - DNA, 259 bp, Homo sapiens
  chr4:156297474-156297733
  hyper
tatctatatatttgcatacagcgctattcaaagaaaaagatcgtaatgctaacccgcaaacagccagcgagatgtattgcaagccaatttttcctctcacaaaagtgttaaagagagccagacaaaacgacgaagctttcgcgatgagccgcattaaaatcgcggtttcccgtactcggagcagaggcctggcagggccgcccatagcgttgtgcgccccgggttccgttccctaccaggccaggtgacgtccgggtgc

SEQ ID NO: 3642 - DNA, 193 bp, Homo sapiens
  chr4:156297941-156298134
  hyper
cgcccgcagagccggtcctggaccgagcgaggaggaggggctaataacagaggcggagggcggttgctaggaaacagcgtcttcgggaggaagtgacttccccaccgccgggtctctcgggtacccaacaccgctcttcggcccaacgtgtcgctggggcaaccacccagacgaaggaagtgacatcaccttc

SEQ ID NO: 3643 - DNA, 995 bp, Homo sapiens
  chr4:156588311-156589306
  hyper
tttccgaggcacgccgcgtcccgcctagcctgttgaacaggtagacatgagcgacccaagcgtaagtgccgctgccgcgagtgcccagggtgcactcgcgcggggaccgacaggtgccactgcagggtcccctctcccgctcactgcctgccacccctgacgcctgctctctttctccattcgcagtgcggatttgcgaggcgcgccctggagctgctagagatccggaagcacagccccgaggtgtgcgaagccaccaagtaagtggtcgctgcatccccacgcgggtcggggttcttcagacaggcggtccctcttccgggacccccgcttgggctgggtctccttcctctcctgagaaaccttcggtacgctcccagttgcccagccctgggaagccagcatcgggttcccacgctggggaggagcgagaggaaaggagaggacgcccgaggggccggcccagggcccgggggacccgcggcgcccgagggaggagcacagacgggggtgggcgccgagcagcgccgcgccggctgctgagctcgcggggccgggccgtgagaacgcgcggggcgcgccggggccgctggtctcccacggccagggcgcctgggccccagagcccatcagccgcgtgcagcgctgcggcctccggcgcgccggcaggcaagcgagcgggcgcagctgggggatgcctggaccccggaggcagcagggctggaggcggtggcgggcttcagggcaacttcacccggccggctgcggcgtgggtaagaggcgcgtcctcctccacagcaaaagctgcgatcgctgggctgcccagagaaggcagccggctaactgcccagcggctccacgaggtgtgcgcgtgtgtgcgagagagacaaatgatttactgcttagcagtcccatttctgttttcgttaggactgcggctcttggagaaagcgtgagcagggggccaccgcggtctccgcgcctgtctgcaccct

SEQ ID NO: 3644 - DNA, 862 bp, Homo sapiens
  chr4:156680200-156681062
  hyper
cggttgcgctgtagccgctgccgcctctgcctgggtcccttcggccgtacctctgcgtgggggctgcctccccggctcccggtgcagacaccatggtaagtgctctcagccgggtgcggcccgaacctcacccctcctcggccggcctggcagcgagggaactggccgcgcagccggagcttggctcgggggccctgggcgctcactgccggccacgggagcagcctcactccttgcccgcgcccagtcaggggaggtgggaacgccgcgagtcgtggcgggggcgatcggtgcctttgcttcccaggcgggtttgccgctccacaccgcagcttcctgagctcgggaaggggaggtgcggcggaggcgtggggtcttcccggctctggccggccccaccagtgtgggaggctgagcgccagcggaagggaaggctccgggttcgcgtccccgcgctgcccccgatgcccagcctctcccggagcggtgacaggtgaggagggtgggaagatagcgtgggggtggggcggatggtgacggggagaatccaccagggattggggggttgcgcccccacgatccgactcctttagtgcatagtacccctaagggagaggagtcaggggcggggtgaaaggttaagccagcgccatgggagcagaggcagcagcctcgcccccaagccgcttctcaggtacagcgggtccctgacgctcaagtctctccctgtccccgcagtacggatttgtgaatcacgccctggagttgctggtgatccgcaattacggccccgaggtgtgggaagacatcaagtaagtggccggctaccctggctgtggcccaggtcggcgcccagtgtggg

SEQ ID NO: 3645 - DNA, 30 bp, Homo sapiens
  chr4:157892072-157892102
  hyper
gagctcactcacggcgggcactttggaagc

SEQ ID NO: 3646 - DNA, 299 bp, Homo sapiens
  chr4:157892474-157892773
  hyper
actggaagccaagtcggcggcgagcagtttctgatcaataacaaagctgccaatagatgcggctctccgggcgcccctctcccccgccccaccccccacccccgaagggggagggggaagaaacaaggcgagggcgccgcggcgggtcccacgggccggggcgccggagcggggccggggggctccgggccgacggcggcccgggcgcaggcggagagaggccgcggggctcccgctcctcagcccggagcgcagttggccccgggttcggagcgccgcagcacggattccggcacctg

SEQ ID NO: 3647 - DNA, 29 bp, Homo sapiens
  chr4:157997158-157997187
  hyper
gaaggggacgatgccgtgacgttgctctg

SEQ ID NO: 3648 - DNA, 254 bp, Homo sapiens
  chr4:157997511-157997765
  hyper
aggacgggaatagacgcctttgcggaaacagcgggtcaagcccggggcggcggagcgcgaggagcactgcggcgtgcccgggaggacgcgcgctgccctgcgcgggagaggggcgcggggcgcctggcagcggcagccgggtccccgctgcggtggcgcccgcggagacgctccgggtggagagatgcagagggccggggtaattaggaaacgcaaggttggccaggagggctccttgcgttgttttgtttatg

SEQ ID NO: 3649 - DNA, 30 bp, Homo sapiens
  chr4:158142876-158142906
  hyper
tcagttttccacttcggagttcagactgac

SEQ ID NO: 3650 - DNA, 30 bp, Homo sapiens
  chr4:159094019-159094049
  hyper
cttaccatcttggccgtttcatttgtcttc

SEQ ID NO: 3651 - DNA, 463 bp, Homo sapiens
  chr4:159690052-159690515
  hyper
ccgccgggccaatggccgccgccggggccgccgcgctcctcccgcgccgccgccgccgccgtggggctgcgggctcctcccgcaggagataactgtcagcgcgcgaggcggtggcgggccggctcagtcatatgaccggcagccggcggctccggcgccgagcagagttactcagtcgcagcggccccgcgctcccgcaaggctgggcggccgcgccgccgcgatggccccgccaccgcggccgccgcccccggctgcgcgctgagccgccggccccccgagcgccacggccggagctgcggcggcggcatcatggccccgaccctgctccagaagctcttcaacaaaaggggcagcagcggcagctccgcggcggcgtctgcccagggcagggctcctaaggaaggacccgcctttaggtgagggggcgccggggggcaattctggcgcgggacccgagttg

SEQ ID NO: 3652 - DNA, 416 bp, Homo sapiens
  chr4:163085302-163085718
  hyper
gtcagctgcggcaatcggggcaacaaaattcaggcttaacgtcagcgtgggcatctttggacttcaggatgtattctcaaccagtccagtagaaactaaacgctttgacggtgctggagcctttgccttcgcggggactgccgtttctgcgcactctaagatcgctgcgggcacagctctggaaggaagacggggcggagagagggggcagtggagcacggagaggaccgagtgggaggcgggtggggaggagacggagaaatagaatgaatctattcaaccattcttgaaaacatctccaatccttttcatcttcctgcccaaactttgctgcctctccctgccatttggttatttgaacggatccgtatttggtgttcctactcccttccctcggttcacggagcctctggagg

SEQ ID NO: 3653 - DNA, 30 bp, Homo sapiens
  chr4:163811945-163811975
  hyper
gcttcaaatgtaaagatgttcctttgctct

SEQ ID NO: 3654 - DNA, 738 bp, Homo sapiens
  chr4:164252933-164253671
  hyper
agagttccctgattagaactccgatgattaaaagcttcgggtgtctatcggggcgcagcgccacactcgaagcgcccggtactgcggagcgcggctcgattgcagccgagaagcgcggaacccgcaagtgggggtgggcttgcgcgctggggtccgcgccgagggctactcccacctccgccagctcccagcccgacacctgccgcgggacccgtgcgacgctgggcgacgcgccaagcccacccttctccggctcatcccagccagttactccgcgaaaactccggtgcggccagagccagcgcctccagccagctcaagacacgtaaggaaaatgagcgggtgtgggataggcgaactcgggcgccttcccagtgcctcggccttttaaagagaaccggggtaaaggaaaacttggatccccatccagaaattccccgggagcaggtggtgggaaagcccgaactccgcgtagggtaccctctcctttcacccgcgtcgtccccatacccttcggcaggagcccgcgaacggtccggtgatttggagcaacctgcgacctgcctgcactggagaccccaccttggtcccccagagccagtttcggacactcgcatcgtttttcttcccctctcatccttcaccttgtcaatgagagatttcgcagaagtctctggaaaggcataaactcgcaacttaccctctttggaatttgtctttttcgctcctgcttattaa

SEQ ID NO: 3655 - DNA, 15 bp, Homo sapiens
  chr4:164264837-164264852
  hyper
gccagggtgaaggga

SEQ ID NO: 3656 - DNA, 664 bp, Homo sapiens
  chr4:164265192-164265856
  hyper
gggtaggcctgcaccgaggggccgtggcgggtccccgcgcgggctgcgagtctgcgcaggtccctgggagcccgcacccgtctctggtgccagggcgttgtcgggggtcccaagagagcggggtggggaaggtgaagggagcgcggctggaaaaatggggattagggtggcggaacaggcacttgtcaggagtgaagagacagcggagagggtactgggctgaattctttcgtgccgagcaggtccctccggttcccaactcacccgggtggagcaggcgcgggccgaacccgggaggagagtgtcggggatccgcgaaggagcctcctggggatggggcgggggatggacaaagcgctgcccccggctggacgcgctctggctgcagcccggctggcatccggagctgggaacagcagcccgcggggtgcccgggtcagggctcaaccctagcgggtctctggcgaggccgggggcgcagcccgcggggcgccactcaggccgtccagctgccgcgcggtccagcgctgacccgagcccgggaggcagctgcgctctaaggtttgcgctcctgtttgcgaggtgtcttcatataacaaatgcgagcaataacaaacatccatagaactcgaattccagaaacgggaattcttttttccaagtt

SEQ ID NO: 3657 - DNA, 569 bp, Homo sapiens
  chr4:165304307-165304876
  hyper
ccctcagcacctggataactgcgacactcacccgtgagcgcaggaccctcctggcgtcttaagtcccagctctcagtcccgctggccgcaggaacacaatgacatctctcgcccaggagggcggttgcagggaaccgaaatcggacacaacagttgcagtgaacccgactcagggttgagcgcatcagcgctaaacccaagacaaaggctgccctgtgtcttccgtactcagcgctctcctttggtaatcggtccccgtccccttcaagcccacactaggagcgcgtgagcctgtgaagtggctgtcatcgactccgcgctttccgaggggtgcggctccgtgactagtaccacgccggtgtaaacagcgcgccgcgcactggggatccgccagaaacggcgcgcgcgcagagcgggcgctgggggccaatagtagcaactaccccaggctgcgggctggagccgcctcctctcaccagagaggcgcctactgggcgagcccgccgcccgcaggttgggtggcagcacccgccgcgaaccccagccacgctccccagtggacccaccag

SEQ ID NO: 3658 - DNA, 681 bp, Homo sapiens
  chr4:166300001-166300682
  hyper
tcatttcacctgcgtcgtcccggacgccatttggctgttgacgtggttccgagccagcaaataacgccagcagccctcccagatccacgccggcccgtctctccgccggccccctcctcgcagtggtttctcctgcagctcccctgggctccgcggccagtagtgcagcccgtggagccgcggctttgcccgtctcctctgggtggccccagtgcgcgggctgacactcattcagccggggaaggtgaggcgagtagaggctggtgcggaacttgccgcccccagcagcgccggcgggctaagcccagggccgggcagacaaaagaggccgcccgcgtaggaaggcacggccggcggcggcggagcgcagcgatggccgggcgagggggcagcgcgctgctggctctgtgcggggcactggctgcctgcgggtggctcctgggcgccgaagcccaggagcccggggcgcccgcggcgggcatgaggcggcgccggcggctgcagcaagaggacggcatctccttcgagtaccaccgctaccccgagctgcgcgaggcgctcgtgtccgtgtggctgcagtgcaccgccatcagcaggatttacacggtggggcgcagcttcgagggccgggagctcctggtcatcgagctgtccgacaaccctggcgtccatgagcctggt

SEQ ID NO: 3659 - DNA, 32 bp, Homo sapiens
  chr4:166414896-166414928
  hyper
ataataaatccgcagggattcaaggttaaaca

SEQ ID NO: 3660 - DNA, 30 bp, Homo sapiens
  chr4:166513760-166513790
  hyper
tcagtgttagccaactgtaggaacaggtgc

SEQ ID NO: 3661 - DNA, 106 bp, Homo sapiens
  chr4:166794880-166794986
  hyper
cctctctactgtcccggcggcatccacatgtttccggacacctgagcaccccggtcccgccgaggagcctccgggtggggagaagagcaccggtgcccctagcccc

SEQ ID NO: 3662 - DNA, 366 bp, Homo sapiens
  chr4:166795245-166795611
  hyper
ggacggtggcgcgccgggggccgctgcgctgggtttcccatgggtggcggtgggagctcacctgtttccttccctcccgcgtcagcccctccgccgcccctccttctctccccctccttttccttcccttccccacccgcaagtggcagccgctgcggccccagttgactagagttctgtgccagtgggatccactgccaagctcccatctcccagtttgggaataaggtcctagagtttctgatccctctcccctcccccagcaaaacgaaacaagtcgtaaatatagcttgctgctgtaggttttaaattccaacactcagcgggctttatgcatatggaagggacaccgtcttctttcccctc

SEQ ID NO: 3663 - DNA, 128 bp, Homo sapiens
  chr4:168155109-168155237
  hyper
cggggatgtgggtgcgcggaacttacgtctcggaatttgttccactgtccgacttccttgtcatactgagagattgtggtgagccattgtttatcatccagaaaattaccgccgtccgaccgcccccc

SEQ ID NO: 3664 - DNA, 30 bp, Homo sapiens
  chr4:169552595-169552625
  hyper
ccgcccctgggcaacgcaaaagccgtccta

SEQ ID NO: 3665 - DNA, 116 bp, Homo sapiens
  chr4:169552931-169553047
  hyper
tctgcaaacgagatcgcattcagagcccagaagttgcaagctgggaataagcgagatctgaaagacccccaagaggagcttgtttgggagtgggggcagacggcgttttgcgccca

SEQ ID NO: 3666 - DNA, 450 bp, Homo sapiens
  chr4:169753055-169753505
  hyper
aggttacgagtgggtgcggggaagcctccctaacctgggggccgcgtcccagagctgcgagccacgcctcctctctcccgcccgccgcgccgccggactcttattttgaagggcggcgggtgaaggctcggagcctcctgagtcacccggcgggcgaggtataaagcccgatacctgccccgcgcccggtccgcggagcccgctgcagctcccgctcgctccggacgcggaatcgggcagcagcgggaggcggcccggagagccgaggtaggcgcggggaatcggccctgaggctggtggaagaaatgtgtgaattaaagggagtgcagcgtgcagggtgggccgcgagtcgggagtgcagggctcgggacagggtgggggcggggaggacaagagactcgtcagcgcactttccacccggccggttccttcccgagccctctccctccc

SEQ ID NO: 3667 - DNA, 136 bp, Homo sapiens
  chr4:169753535-169753671
  hyper
cggagctccagataggaatgtctgcatcatcttggcagggcccagacgggagaagatgctctgctgccacggacgatccctcccgctctcctaactcttctctgaacacctcgcacccccacggccccccgcccct

SEQ ID NO: 3668 - DNA, 63 bp, Homo sapiens
  chr4:170192284-170192347
  hyper
ttccccgggagcgggcgcggcacctctcggagccacccgccgccgcgccggcctcccgcgctg

SEQ ID NO: 3669 - DNA, 41 bp, Homo sapiens
  chr4:170192664-170192705
  hyper
gggaggggctgggtccgcggaggcggcgggagcagccctgg

SEQ ID NO: 3670 - DNA, 219 bp, Homo sapiens
  chr4:170946915-170947134
  hyper
ggcgccctcccgacgcggaacccgcattcacgttctccggagccctggccagcgcacgctcctccctgtccgggtaaactgaggcacagcgatgagagagatccagagcccagcgaaagcccccacggctgttcggcgtccccttcccccacgacacctaggaggctcgccggcagctggcagtggattccgcgctcctcgccctcggaaggttacggt

SEQ ID NO: 3671 - DNA, 864 bp, Homo sapiens
  chr4:170947173-170948037
  hyper
cgccccgcacggatctcgaagcatcctgcgaccccctggagcccgctgcccggaccctgcggcgtctcgcagcgcagcctccgccgcagtctcagccagcccaaacacccgaaagttcggcggccccggcgccgactcggccgccgacccggtgcggggctggctcccacccgtgcccctccgccccggcccgccgggggcccccgctaacctgacaccgccgcgccactcaggtggccgccgtgcacccctcgccatggccagcccgacagcggccgctgcgccgcactctgcgccggacgcccggtagcgcctactgcgggcgagccgcctccgccggcgcctcacagcgttgcgagctgcgccgccggctgccgggagcgcggagcttcccacctacaggagcctgggccggccggggccgagcatgcccagtgcggctcgccgggcggcgcggaggcgcgggtgtagccgccgggttttcgcggcagccgcgggcgggggcagcggggcgggcggtgcggcgcgagccagtcggtgctgcggagcggccccgcggaggagccaccggaggctgtagttgccggggagtcccgcattcagtccgctcagcctctgggccgggcctcggcggcccccagagccccacacccgcaggcccagggcctccgcggcagcgcgggactctcactccgctctctctcccgcccggggcttccaccgcaacttctgtgggcgtcgcatcgcacgcgtgttcaaggacacccaggaaaaggcttcttagggtcccatcctggggcgctaaatgggaaccagtcaacccacccccaagcctaccctgtctccttgcaatcaaatgcaatc

SEQ ID NO: 3672 - DNA, 489 bp, Homo sapiens
  chr4:170948089-170948578
  hyper
cgctgtaagtcttaaacgtctcttaaagcaaagtccacagatggaagagtctggaaaaaaacccagcgggccgttccctggtgactttctgagtggtggggttccaggaatttttttttcattttctttaaaaatattatttgtaatttccacgttttttctaatgaaccataagttgattttttaattaaaaagtagagtactctaaaattattaagtacctacagaagtttcgctacacgatcctgcaatgttagtggcttcttctcctccttatctccctttttttttttttttttttaattttaaaagagaacagagactctcaatttctggggcgggaccaggctccttcccccggctttttagtgcccgccctcttggccacaccccactccggcctttttactcccgtaccgccctcttcccggtgggttgctgcgaaaacccggaaaggtggactttccacattgacgctcccggcggctc

SEQ ID NO: 3673 - DNA, 30 bp, Homo sapiens
  chr4:171011084-171011114
  hyper
aagtccacgccgcacgcgctcctgcggccg

SEQ ID NO: 3674 - DNA, 100 bp, Homo sapiens
  chr4:171011412-171011512
  hyper
gaaccatctggcggcgacttgggtccactgcagggggctcccgagctgcgcccagccgggagcggccccaccctcgttcccgcgcgctccgctggcctcc

SEQ ID NO: 3675 - DNA, 30 bp, Homo sapiens
  chr4:172734016-172734046
  hyper
gccttgggtctccacggtgtcctccagaag

SEQ ID NO: 3676 - DNA, 111 bp, Homo sapiens
  chr4:172734251-172734362
  hyper
attcctgggacaaccgcctgcagccggcgacttttccccaggaatctctggcctggcgccctttgggtgagatgacggggtgctggcatccctgtcggtcccagattaccc

SEQ ID NO: 3677 - DNA, 88 bp, Homo sapiens
  chr4:172734703-172734791
  hyper
ctccatcccctttacgagaagaggagatcaaaaaatattgccctttaggtgctcgtgatggtcctgtgggttcgttcagttgccagaa

SEQ ID NO: 3678 - DNA, 1315 bp, Homo sapiens
  chr4:174089921-174091236
  hyper
aggagggaggggagagcggtggcggcggctgcgccgggctgtgagtctctcgccgccggaggaagatgaggctgaagattgggttcatcttacgcagtttgctggtggtgggaagcttcctggggctagtggtcctctggtcttccctgaccccgcggccggacgacccaagcccgctgagcaggatgagggtgagtgacccgcccggccccctccggcggcagcgaccggcaacttgttttgtttgcccgcgtgtggagggagcaggggcggcggggtcgcggcacggcgtgggcaccgcagctccgcaggtggtgctggcgcagcgcgggccgagggggtgccgagccccgcgcactccgacctccctggccgccgccggcccgccccctcgccgccccttcctccgctcttccccgccccgggctccgtcgccgacacccgcgctgccgcggcagcggctcgggcggccgctctccgcgccgggactgcgggcggagcgggcggagagccgggtccggggggctgcggccgcccggcgtcccgctctggggggccgggaccgcagcgctcacggcccggggacgcggggttggtccaggctgcggcctgtggcgcgtgcaggcctgaaggaggcgagatgccgatgccgccaccgctggtccggtggaccaggccccttggtccagcctcccctcccgcagccgcccgtctgggggtgttcgcagccccgggctcccccggcccgcccgccggggagtgggagggcgatggcgccccgcctccggctcttacggagagcgcgcctccccctcaactccggcggcggggagccggggtgcgatgcgcggccgaggcctcgcccggaccgccggtccccctcgcgtccctgggcgagggaggggcggttggccggagatggcggaggggcgtccccgccccgcctgcccgccgcccccagccctcagcgcctggggaagcccctgctgtggcagtgctcgggcgctatccgggggaagaggagcagttcctcttccttggctgcggcagggctgcttgggccggaaaactaacttgtgtcggcgcccggccgccccgcgccggctgccggctagctcaggccgacgccgaggggagcggcggcgcggagctcgcggcggctccgctgggacgcatttgtctgccgcccagggcgcgagtgttagcgctgacattccttggatttggagggtttagtcaggcgcctcggaacattagttacccggagccgcgccgcgcggggaagggaccgcgggcactgcggcttccctgaccc

SEQ ID NO: 3679 - DNA, 30 bp, Homo sapiens
  chr4:174291092-174291122
  hyper
cacaggcgcgcacgcgcttttcaggactca

SEQ ID NO: 3680 - DNA, 30 bp, Homo sapiens
  chr4:174427131-174427161
  hyper
ctcctaggtttccccgtgcttctaagcctg

SEQ ID NO: 3681 - DNA, 161 bp, Homo sapiens
  chr4:174430392-174430553
  hyper
cgcgtgcgggagcttcggaagctaaatctcactcgcggggaggatgggacgcgtggggactgaaggcggcatctgcctgaataaagccctcgcgcgctctgagcctcccactctgtcctggaggcctgaacctcgcgagtagagcctggcgcttttcctcc

SEQ ID NO: 3682 - DNA, 280 bp, Homo sapiens
  chr4:174430793-174431073
  hyper
ggaacccgctcctgggccgcgcggctgcagccgggagcgcggactcggggtgtcgggcggtgtccgcgcccctccccaccccagggcccttctcgggggagatatccaggagctgaaagagattcctcaggaggaagtggaaacctctgaaaggagaggaaaccgactcttttgcaagaaaactgagcgccggctggaaggcaaggaagccgaggcggccggggagattcacccacatgcctgttgactcgggcccagtacctgcgtctccttccttctc

SEQ ID NO: 3683 - DNA, 820 bp, Homo sapiens
  chr4:174439797-174440617
  hyper
gctgcatctgggacccgccttcaccgtttcccaatcccagcggttagcccctgcgccccctttttggtctccactttgccgttcgaaaatgcctaggttggtggatcgaccctccgcggagcaaagacggatggctggcaggagcaggttcaggagctgggccaaggtattctctgcttccgcctttgtgtccgcccccccgccccctgctccccgcttcccgccagcatctctccttttctgctcaggagtgtttggcccggcggtccaccccggcttcccgagatacgctagagttgcccccacgtcctgtccgccgcgcccctacccaccgggttgccttcggggcccttcggtgctgtgtagtcggcgtggcgctgtgagctaggcgaacaggaacccccaggcccgccacgtctacgctattagcagccaggtagccctgcgggtcgaagatgctcagaggaggagtaaatgcagagaaaaaatagaggaaggaataaaaaaaaaaacaaaacaaaaacacgtaacatacacgcactcaaaaccaactttgggattggactttttcagtttcacacgaagagacttggagtatctggagaaggtttttgaagacgtttaggagggagggtgagttttctgctgagaaactcaatctgccatacagtagcggccccatctgggatctgtcactgctgacagcaccagagggcacagccgtgatcttctgcacagcctgcactccccgaaataccctccttaatcaaaggatgtctgcgcgcctgagctcagctgaccgcgccgggagcaccagggc

SEQ ID NO: 3684 - DNA, 41 bp, Homo sapiens
  chr4:174440652-174440693
  hyper
cacacagccacggcccctcgcgtcttcgcggcacgttaatt

SEQ ID NO: 3685 - DNA, 30 bp, Homo sapiens
  chr4:174443552-174443582
  hyper
gatgtccctaatagcggagataaagacgga

SEQ ID NO: 3686 - DNA, 204 bp, Homo sapiens
  chr4:174443850-174444054
  hyper
gctgattggagctgcgcagttgctgtgcgggaagcacgcgttgcgcagcggctgggtggtaaggcggcgcgatgagaactgtccggcccccggaaacgtgggattggtttcctctcccggagttctcccctcccccttctttctaaacatttaaaaaacacgtagtccgtctcccccaacccccattcccggtagacttaatcc

SEQ ID NO: 3687 - DNA, 30 bp, Homo sapiens
  chr4:174451126-174451156
  hyper
gtcctcgctcctctcgcgctctctcggagg

SEQ ID NO: 3688 - DNA, 65 bp, Homo sapiens
  chr4:174451379-174451444
  hyper
tacatctttagggccgctcgggttaatatatgtcgtcagaggctcctcacgccaatcccggggcg

SEQ ID NO: 3689 - DNA, 30 bp, Homo sapiens
  chr4:174452011-174452041
  hyper
tttggggtggctcacgttattgcggcaaac

SEQ ID NO: 3690 - DNA, 252 bp, Homo sapiens
  chr4:174459122-174459374
  hyper
atgggaaaatcaaagcgccagccagagcgggtcgcactgttagttcctgtattttctcctcctgcctctggtttcttccgttccgttctagctgcctgaagacccagcccgacagcgatgcctgtcagcccgcgtcgcccaccagggcagctgctctcccaactcgcatggggggcaccaccccgcctcggtgccctagagctgagcgcagccgcggctccacggggatcgccagggcctcagccctcgcgg

SEQ ID NO: 3691 - DNA, 612 bp, Homo sapiens
  chr4:174459527-174460139
  hyper
cggttccccacacccaggaggccggttctccgccgctcaggctgggagaggtcaccgctccgggcagggtggacccccagctccgtctcggaggacctttcgccggaggcgagcaggaaggggttaaccatgagcctcccaccctcacctcccagaccctggtgccgggctaaggcctccgcttccctcctgaggtctcattaggaaaccctcaccgctattttcaacatttcctcaatcaagtgcctttaaatagagctgcacaaacagattggcggcaaaagcgtagatcttgtcacgattgagaccaatccagtatttcagccttgtttgctttgcaattacgggttggcttgtggctacggtgccaccggggcaaatctgcagccgctcgctttctcctctgcgctccgggcgggtggaggaagcgacccgcggagtcactgcagggaggagagggggacgcgcgcggggggaggcggcggagggcggaggagactcgcttgcaccccagggccgcgggcacgcagagctgtgttgaaggacatacttttcaggttcctgacagtcactgagctatacgcaataataaagtgcgtgattcgcgtgtgg

SEQ ID NO: 3692 - DNA, 283 bp, Homo sapiens
  chr4:175132834-175133117
  hyper
tcaatagcgctcacacggtgtctaccggatctggcacggtcaagacacaggaacagccgtactttcctgcgggtaagaggcttttcttttgtgcatcacgtgcagaagaagccactccgaagtgcaaacacctttctaaagttttcagtgcttcctaaaatgcagacatcgacgccttgctgagttatccgatcctttgatgatcaaataaaattaaggccagctccctgctgtttgatctgtggctcagtttctctaagggctgccgcgggttccgcaaaga

SEQ ID NO: 3693 - DNA, 30 bp, Homo sapiens
  chr4:175139066-175139096
  hyper
aagcgcttcccttgcggtttaccgctctcc

SEQ ID NO: 3694 - DNA, 203 bp, Homo sapiens
  chr4:175139428-175139631
  hyper
ctttacaattcacgacgttactaccaactttgccattgagtggttcctctccctgcccgaattcctggccatcttcgttccagagagcgatgcaatcatggccttgaaaccgaacggggcgtaacgtgccattcctctccagctcccgagccccactcccacccttgccgttgaaactgtgaaaaagccgccaaagtttgggc

SEQ ID NO: 3695 - DNA, 30 bp, Homo sapiens
  chr4:175139862-175139892
  hyper
ggtcctaaggccacgcggctggctttcttc

SEQ ID NO: 3696 - DNA, 30 bp, Homo sapiens
  chr4:175205407-175205437
  hyper
tttaaatcaaatggcgggaggggagccttg

SEQ ID NO: 3697 - DNA, 187 bp, Homo sapiens
  chr4:175749937-175750124
  hyper
tccgaaagtgtctcacgtgggccatgatacggagagatattcacgatcctgaaaatagtcttatccaaggcatggggaaccagaaagacagaatgaaaatgtacaatctaaccccgcatggtgttggtgtagactgatgcttgggaagcttcagcaccttagacagctccccgcagtatgcggaccc

SEQ ID NO: 3698 - DNA, 470 bp, Homo sapiens
  chr4:175750347-175750817
  hyper
tccacctgctccaagcgccgcccgccggaatccagctctccaccttgggttaaaacccgagacccggagcgcggcaaagggaagcgggggtggggccggacaacccggtcctgtcgaccaatcacgaccgcacagcgggacggagtgacaggccacttacgacggtaggcggggcttagcgcttcaccctttaacaaaacccaaacaaaccaaacggcgactggagcgaggtgggcggaaaaagccacctgggaaagtcagcggttttgtggattaggtagtgtaaccccgcaggagggaccctttagtattcccttccgggaaaaggcacactttaggtcttctcggatgtgacactgtctgttacactctacaccgaaatacaagagtcagcagtaaacccagaccctggcggagggctggggaagagaagacaatgtggtgcgtgaacgcccgtggaacggaagaac

SEQ ID NO: 3699 - DNA, 80 bp, Homo sapiens
  chr4:176922587-176922667
  hyper
ctcttcgaggtgactcgtgggaccctgcgtcctagtgctgggtgtgaatcggctatttcacacccagttcttcctcccct

SEQ ID NO: 3700 - DNA, 65 bp, Homo sapiens
  chr4:176922729-176922794
  hyper
cggaccctgcctggaaacttgagcgaagctgaactgcgccgaactccaccgtccagtgacccgag

SEQ ID NO: 3701 - DNA, 672 bp, Homo sapiens
  chr4:176923024-176923696
  hyper
aagagaacatgaaaacgtgggaactcgggaggacagagatctccctgtaatcgcctcgctattcggatcctgggtctcttagtctttctttatttcccaaataccgcccccagcacggtagaccggacccccaggcttgggtcctggggccggcgcagaggatcagcgcccaagcgcagccccccaccctcccgacccactgtaaacagtcgggcaccctccctcgcctccaggtgccaccccatcgccatcgcctctctcccagaaaaaaaagtccggagacaagagggcggggggcgggggacgccaggcgcggggggaacagagctgggaaggacgcagtctgaggccgaggaacattcattttctttctataatgcccattcccgaggccgagcctttgggcgaggtgtacgcgcccgcccgcgcactcacccatggcccgaggtcctgcttctctgcagtccccagaggagagcgagtgaccagacgctgcgcggggccaagttctccaagccgcgctgaggctcctcgcgccctggcaagtgacagcctcgcccctcccagcggagacaactcgcagggcgcctggcgactctgcgggcgcacagacccctccctctttccacctgcctcctctgcgagaagcccgttttcctccccttcactgtg

SEQ ID NO: 3702 - DNA, 324 bp, Homo sapiens
  chr4:176986855-176987179
  hyper
cgccttcaacacactttctctgttgccaggtaaccacttctccctcagcctagtctccaagggtcacgagccacttccgcctccccctctcgggcgctccaatcagcgacctgtgtagctgtcacgtgggcctctggggcagaccctggagatcgggctcgcggcgccttccatcgtggctccgcgctggggcttgcggagcacgcttcccgcccctcggagcccgcgggcccggccgccccgcccccgggcgccctgagcgagcaggcggggagggcggggagggtccgcgcgttggtggtgctcgcctcgcagctgcgcccg

SEQ ID NO: 3703 - DNA, 150 bp, Homo sapiens
  chr4:176987206-176987356
  hyper
cgctgcagccgcctcctcctccaggtaagaagccggtggggccgcagagataccaaggcaagctcaggattgatgtgggtgatgctggaactgtcgcggcgtcatgcgagaggggctctgacctccctgtgatcgcggaccagggtaatg

SEQ ID NO: 3704 - DNA, 57 bp, Homo sapiens
  chr4:177240795-177240852
  hyper
agtaatcaagaagtcgcagtcccagacctctgaccaaagaaccgaaaaaggacagcg

SEQ ID NO: 3705 - DNA, 286 bp, Homo sapiens
  chr4:177713158-177713444
  hyper
gaagatttttctccaaagcagcgtgcactgagctcagtaactttggatcccacgtacacaagcttaaagcacacacactttcccccgcgcaggttctcgggtccgccgcagaccctaacgcaaactctcgggttctccgcaaaccctaacgcagacctaccgtggcctcgcccgcgtcgggctccgcgtccgagaggtcgagtccggactcgaaggcggcggcggcggcgggcgcctcgcgaggacccgggagcagcgcagcggcgagcagagaacacgccacaga

SEQ ID NO: 3706 - DNA, 30 bp, Homo sapiens
  chr4:177713798-177713828
  hyper
ttggagaggcggggcgggggacaccagaac

SEQ ID NO: 3707 - DNA, 30 bp, Homo sapiens
  chr4:178230843-178230873
  hyper
tcctccacgccccccgccccacgcgcgttt

SEQ ID NO: 3708 - DNA, 30 bp, Homo sapiens
  chr4:180978694-180978724
  hyper
tatgcatactgtgacggatcagggcaagga

SEQ ID NO: 3709 - DNA, 766 bp, Homo sapiens
  chr4:180979965-180980731
  hyper
aggaggaggaggaggggaagccggagagggaggcgcggggaggagggatggagccgggaggaggaaataaataaataaaacaatcacctccgcgccaataagagcgagggagagagcaagacgcgaccagagagccaccggggcccgctcgcgcgcctctgagaggctgtccgcgcgcgcgcgtgtgtgcgtgagtgtggatttgccgggactggagctggaaagttcaaactaaacgtgttgctctcgccgagtgccgaggccgcggcggaggctgcccaacttccccgggccaagtgagtggcgttgcccagcgcctttggcgaggcggcggccgctcggccctgcgcccggccgcggcggcggcggctccgctcgccccgggagggagcccgcggccagggctggactctcgccccgccacctccaccgactctctcctcagcctccgcgcctggcaccgcagcaaggtacgtggcgcttcctggcgcggcttcttccctagcacaccccgcgcggatttttggctgcctagattcttccccttcccggagtggtcatcatttgtcaaactttacctccacctcgcacatgcgggcggccgctgcagccgccctccctggcggcatgggctccgctcgctgatgggaaccgagaggagggtgggggggaggatctgctggcagcggtggttctcatctggattaagatcgtatttcggaataactcgcaggtcttaccttccgggggtgtccttcattatgat

SEQ ID NO: 3710 - DNA, 30 bp, Homo sapiens
  chr4:183064348-183064378
  hyper
gaggactcccgggtccgcccctggccaggt

SEQ ID NO: 3711 - DNA, 392 bp, Homo sapiens
  chr4:183064610-183065002
  hyper
tacacccttctgcctcggaatccgtcttcccggcagtgtcttgcactgccacctcctcgggtgactcagctgacctgaaatgcccaccctacggaagatcaagaaaagtagttttctaagaaggttagaggtttgattacacagagaagtgtttccacttaagtccaaagcaattacccgccccctcccccagggccgcctccccgccacccgcagcagaaaaggacagacccccacgcacgtacccccattttgttggtgcgtgtgaatttcaaatggcgcagtaagttcattagtgttttcaatcggcggcgggcagacccctcatcagagccgaaagccggcaagagccattcatcagcgtgaagtgttattcacggatgacccctaaa

SEQ ID NO: 3712 - DNA, 30 bp, Homo sapiens
  chr4:183369739-183369769
  hyper
gaacagctctgaggcgggatcaaaagccgc

SEQ ID NO: 3713 - DNA, 31 bp, Homo sapiens
  chr4:183796433-183796464
  hyper
cgctgtctcaggaggacggctgaagggcaga

SEQ ID NO: 3714 - DNA, 2050 bp, Homo sapiens
  chr4:184019266-184021316
  hyper
tccaggccccgccagcgctgcacccggcattgtcccgcctggggcaggcgtccggtccctcggcagtgcgggccagcacgtacgtagtagctgctgaataaataaatgcctatgcaacagggaacgtcccggcccaccccggccgggccagggcctaggaagggcgggcgtccggcgccgccgtgggtccctccggcgtggccgcccacacctcctggccacggcggggctgcggtggggggacatcctggggcgggcggctggacggaagggactagagtcggggcgcgtccacggccaaccgccccgaaccaagcaggggaggccagggaccaggagcttccggggccccgcggctggagcgcccggacgcgaaggggcggcgggtgacggggcgcggtgcgggcggctacagggccggacgggagttcctccgctttccgccgcgcggctcgcggtctcagccgaggtcatcgagggccaggagccctggcggaggccccgccgtcccggacccaccgacgcactcccagggcttggcgctttcccaccaccccggaccgcccttggggtgccggaggggctcggggcgcggcgtggggagcctttgtgccctctccgcttgttgaggttttttctccggaggagagctccccgcccgccacccctttcctctcgaaagttttgtggtttccctagaagacgaaagaggttgagaaggttgcggagacttttgcaatcttccccgtccagaaactctaaaacctctcggcgtttggcccaggggagctatctggggtcaaggggagggagctggccgcacattccttcgcccgccttcctcccacctggagccgcggccccgcggggcagtgcgtccgagctggtgcggcgacgccggcagcggcggggttaagctcaggaatgcggcgcgaggaatgcgcatgcagatgaggcgggcgggcgcatgctaatcgcatgcaaatgaggggcccgccgctgccgcggcagcgccgcagcttcccggatccgagcccagacggcggcggctccggcagcctgggcgccgcgaccctcggcggccagagggggacggggcggaggaggaggaagaggcggaggcagcggcggcgagggggaggagggttcgctcgccggctccgacgcagacatggtggactgatccgcagcggggccgcgaacagcgtttcctgaggcacctcccgcgcgtggttccgccgcgccccgcgccctgcgcccctcagcccctcgccggcgcccgcgtcgcgggttggcagcctagcccggcagccgcgttcccgccgcgtcccgcgcccggtacctatggaggcgccgctcgccggcgaggccgccgaccatgcctaggagggccgggagcggtcagctgccgctgccccggggctgggaggaggccagggactacgacggcaaggtcttctacattgaccacaacaccaggaggaccagctggatcgacccccgggacaggtgggcgccggccgcgggggcgcgggcccgttcggacacggcggctgttgtcccggagacccggccgcgcggggggctggggcggcgccggcccgcggtgccccgaggggtcccgggagggatgtggggctggctgctccggcggggccgaggagccgcccgtacccgggctcctccgcccaccggcttcccgacgcccctccggggacccggccccgaggcaaggctggagtcgctgccccgggccgacgccgcgcgccaggctaacggacccgaggggccacctgagccctgttaggaacttccctaggcttcgaggtgcccacgtggaggctgcaggacaccttcggcctctgggcggcgggggtgggctagggcctcactgccagttggggaacgagccctccgggccacctgtggcatccctcaggccgtccttggcgcgggagcctgggctgcgagctcttggcgggggcgcccagactggccggaggtcccgagctgggaaggggctcccgccccccgccgggccctgctagtg

SEQ ID NO: 3715 - DNA, 1744 bp, Homo sapiens
  chr4:184718200-184719944
  hyper
cattaaccagtcagcgaatccacttgttccagcgagaggtgggaggtgggggcaggggtggagcgtggggaggagcgacactcgccgctccggaatccgtgccttccaagtgtcgccgttgcgtcccccgcaacccccgctttctgatctccctcgaggcccaacacccaaaggctcacccctaggccatccgcgctccccgaccacctccctcataggactccttgggattcctcaggccgcgtccagccgagggggttcccgggcgcggtgcgcactgcccgccccctcactgcctcctcccgcgtctccgcccccgcggggccgctgggcgcccggggaggcgagggtgccgaggccggaaaatgagcgctgcccgaagggtggcccggagctgcaggtaacgcggtccagagctcaggccggagcgggccccgcacaccgtcccttccccgcagcgacccgcgggctgcgcccagggactgcgccgggcgcccgggctgcagggacgcgggcgcgggggaggcgcggccagccctgccctgggggacggtcgcgctccccgctggtcttgcagccacgtcccggcggctgttcctgggagcggcgggaggcggcctcggtgagccaggtcggcgcggcagatgcctgggaagatggagaagtttctgcagatcgcgcctcactccctggccatcgtcctgggcccggcagaggcgccggcgggggaaaggccaggggcagcccggcccgcgcccccggcccagccccgccagctcgcccggcaccacatcggctacgagatcttcgccgacttcaaagccgagaacatgcagcacttctggaacaagaaggtcacggccgcggtggccgagaccttcttcctgggctggatcgacgagcaggtcctgctgatccagggcaaggaggaacatctggaggcgctgcgcgaaggctggacgcgccgggccctgcggccgccctcgggcttccacatccgctgcctgggtgagtgcgaccgccgcgcgcccgtcccgtcccttcccaccggatcgcgtccgtgccgtgcggtcgcgggtgccccgccctgccccagcccgccgcgggcaccgccgaggctcccctgggtgcccgcgtccctgccgggggaggagccgggggccctctgcgagcgtgggattggggaacttcctggcaccgaaaggagggagccgtcccattcccggtgcgccgcccccgcctgcccgcgggagcctccccggtggcgggcggtgcctgaggccggccaggtgggcgccgcggctcggcgggcggctcggagggcgcggcgctcggggcgcgtgagtgtccccctcccggcactgctccgcggctggagtgcgcgggccgggcggaggtgggcggggaggattccggggctcgggtcgcgcggggctcccagctggagcggcggctcaggtgcgcccgggacgcccttccctgggcggcgactgcgggggacgcgccgggaagctagggttgaggctgagtgttgcgcgcacgcatttctcaacgaggcaaggctgcagagttcgtcttaaatgtctcacctgcagcacatctctcaagtcgttttgtgtgtctgagggaaggaagagacacaaagaggccggaggaaaaaaaatctgatcctcaacaaaagagagcaaaacgtaaagaggggcagagtcgcccagaggtgaaggtcgccgccgcgtttccagtg

SEQ ID NO: 3716 - DNA, 1265 bp, Homo sapiens
  chr4:184826346-184827611
  hyper
cgggtcccaggcccgcgtcccgggcccagcgcccaggcccgggcggcgcattggcccctcctcccctcgcgcgccgcgcgcattgttgtcctttagcgattggttgttggaccagaaacagctgtgcagagccgtgccatctaaagagctgtggacctgaatgcagcgtagcgggctggcggtgacttacaccgggactccagagggagagaggaagcgctgcaggccacttgcattgcgtcttccaggctgcgtggacccggcgccccggcgtgtgcggttgtgggggagctcgccgtggcctcccctccctctggctttagcttcctttggggttggcgcaggtgggccaggcagcgcaccgcagatctccccgttcccacgaaggctggctcgctgtctctctccgagcgggagggaccatcctaaaaatatgtaaatatccaagcgctggctccaggctggggcagctgccaaggtccccgcgccgccgccgggtgttttacatgaaaatgagaagcctgatgggaaccgcgttctaacttaaggcagcctggtgattagcatgagactgggcggctgtcctgcttcctgcccttcaatagccgttccgcgcgctcgcgccggagcagcgctgccgccgcgcgggggtcgatcgcaggctcggcgtccttggcagccatggctccggcgccgcctcggccagtaagtaggagcatgcatgtgtagggggcacatgcgtgtcggcgcacccacccagccatccacccgcgcgcacgcacagcgcccggagcctcggcaaggggaagattgacgaggcgctgcagtcgcggggacgacgcgggctcttcctggattccgcaggagcccgcccgccgcagctgctgtctgcagagcctgctcggatcctgtgcacacgcgccccccgctcgagcctctgtgatgaagactgtctcccggggactgcagcggaggcagagccagccagcgccggggactgcgggccgtgcggctgataggcccgcggggacacgactcggacactgtcatccccacgcctcgcgctgagctgcccggcgcggagggtctgccgccgcccctccggcctcccgcacgcccgatcccgggtcagccccggaggcctcggctgcctcatttgtttgggtcttttgtgccgtggctcccagttggccaagcactcctgcgctgaatcgggccattgtctgcgctcccattgccttcacgctgcaagtctcggcgccccc

SEQ ID NO: 3717 - DNA, 225 bp, Homo sapiens
  chr4:185089642-185089867
  hyper
gctggaagctttgcacgggggtgaaagttacaggcagacactgcccgcggggctccggacagcaaggagcgagccctctgagcctggccacgctggcccgccactgccctctgctggcggctgcggtcttcaccaccgcccgcagccgtccccgtagtccgccgagaggcgccaggctgggccagccttgaattctgggtttgcttctcccggtttgaaggccac

SEQ ID NO: 3718 - DNA, 31 bp, Homo sapiens
  chr4:185311056-185311087
  hyper
ggtgtacagcaagcagcggcctcagggctgg

SEQ ID NO: 3719 - DNA, 30 bp, Homo sapiens
  chr4:185396093-185396123
  hyper
gtaggggaggagagcgggcacccgagtctc

SEQ ID NO: 3720 - DNA, 31 bp, Homo sapiens
  chr4:185396653-185396684
  hyper
aggcctcagttttcaacgctgtaaatggaaa

SEQ ID NO: 3721 - DNA, 43 bp, Homo sapiens
  chr4:185747693-185747736
  hyper
tctgcagagcctgacgtgggcagcgcccgcagctcgcgccggt

SEQ ID NO: 3722 - DNA, 576 bp, Homo sapiens
  chr4:185937253-185937829
  hyper
gggagaaaggaaatacgtccttccctatcctgaagcggagggcgttccaggtttcgcaggtagtgctgcagccgcgcaaggaccgggcgaggctgcgcccctgagcccaagtctccactcaccggccttcccttgccccctcacctgcacgcgggtacttttagccctgggcaagccttgagccaagcgccgagaccaaacccgggaaattaaacagtgtgcatggaatgaaatgtggtccgtggaaggtgcctgcagctggcggttaacaccggcagtaagaggatcaacgcccgggccgctggcttaaaaatgggagtgggagtgcgaagtgtgcgcgctcctttttacccattcacgttagttaatttggatgataagggttcgcgtttaatctctttgtgtgcgagtgaatatcctgaaatcgacaacccctgagagggcactcgcggctggcagagcaacctgggagggtgcggatcgtgtccaatctggcgtgaagcagaaaggaaacatcgtgaggagactagaggcaggaccgagagggacaccctaggggtgcgaggtgcagaccga

SEQ ID NO: 3723 - DNA, 30 bp, Homo sapiens
  chr4:185939443-185939473
  hyper
tcccttgaacccggcggaacagcctattaa

SEQ ID NO: 3724 - DNA, 69 bp, Homo sapiens
  chr4:186130482-186130551
  hyper
gctcaggaattaccagcgccgctgacacctgcagcaaaattttccatgaacagacggcatcctgtagag

SEQ ID NO: 3725 - DNA, 30 bp, Homo sapiens
  chr4:186434978-186435008
  hyper
tctctactgagagacgagaaggaagagctt

SEQ ID NO: 3726 - DNA, 210 bp, Homo sapiens
  chr4:186706013-186706223
  hyper
gccatgaaaaatgagccgacatgcctaacgccccgggagctgcatcatttgaatatttttgactctaaatatagtgaagtagttggctcttttttctaaaactacaatttactgatcagtgatatcaagagaaataagaacacagcagtgatcaacaggaaacacaaaacaggaacgcattgtttattctgttctcggtggacactgcca

SEQ ID NO: 3727 - DNA, 31 bp, Homo sapiens
  chr4:187066081-187066112
  hyper
ggcgcgggcgcgggcgcgggcgcgggcgcgg

SEQ ID NO: 3728 - DNA, 102 bp, Homo sapiens
  chr4:187645590-187645692
  hyper
gaccccaggccctccccgccgcgggcgcctggcctcccccgctgacaccccggacgcccaggcctgtgggacaaaaggcagtcgcggcgtcccgcgggcttc

SEQ ID NO: 3729 - DNA, 30 bp, Homo sapiens
  chr4:187646040-187646070
  hyper
ggcggggaggggaacggcagggcagtcaag

SEQ ID NO: 3730 - DNA, 80 bp, Homo sapiens
  chr4:187646381-187646461
  hyper
tctccaagcccaaccggcttgtgccgcttgccgaattgtaaatctcagcaaaacccaaacacaccggaactccagccgtt

SEQ ID NO: 3731 - DNA, 452 bp, Homo sapiens
  chr4:187647182-187647634
  hyper
ccctgcaaatctcgcggccccgatgcgccctccctaggcaccattgctataataagttacattcaaaataatgcacaaacagcatcgcctctcaagttctttttaacagtgctctatatgtattttatgaactcccaaagctatgcatacgaatctttcatcgccgatccgcacaaagccagagggatgcgcagctcctggagccgagaacccgtagggcgcacacgcttccccgcactcgcttagagccacacaccccacgtaatttcattaacgtttaaacttaaatgccaaaaggcatgcacgatttgaacaaagaactcaccagtctagccgagtcctcggccctgggctctaaagtcctcggcagctccgtgatcccctcgcggtgtagatatgtgttaagagccgggtttgaagtaccaactttgcctccccgggatcttcagcat

SEQ ID NO: 3732 - DNA, 241 bp, Homo sapiens
  chr4:187647885-187648126
  hyper
gggggaggggaggtgacgtcagcgccccgcctcgccccccgccccgggcgcggacgggattctccggctgggcgcgccaccccgacagtggcagcagcggccgtggaggctgcgggggtcccggcctctgcggtctctctggccggccgcagctgtggcgcgggtgaaacgcccgccctcctccttcggctgcgtctcccgggcgccggcgagcgcgggcgttcctcgcactcagcgcctg

SEQ ID NO: 3733 - DNA, 31 bp, Homo sapiens
  chr4:187855389-187855420
  hyper
ctgcagctggaatgttcgtttcatgctccgt

SEQ ID NO: 3734 - DNA, 30 bp, Homo sapiens
  chr4:190123534-190123564
  hyper
ttgcacactcgcaacgtggccccaggggag

SEQ ID NO: 3735 - DNA, 34 bp, Homo sapiens
  chr5:92556-92590
  hyper
taggggcgggtgggggcgccggggtaggggcggg

SEQ ID NO: 3736 - DNA, 30 bp, Homo sapiens
  chr5:321305-321335
  hyper
gcctggcgcgcgtccgcttcctgggaagct

SEQ ID NO: 3737 - DNA, 30 bp, Homo sapiens
  chr5:368433-368463
  hyper
ccctggctgtggccgcgtggggttagtggc

SEQ ID NO: 3738 - DNA, 152 bp, Homo sapiens
  chr5:373177-373329
  hyper
agtgaactctgcagccgtgggcggacggctggtaatggccctgagactctccaaggtggctgaggttctgcgcggttggcagagtgctggcaggacacaggggttgcccaggctacagatccgggttcaggcccagccgtggggactgttca

SEQ ID NO: 3739 - DNA, 258 bp, Homo sapiens
  chr5:374606-374864
  hyper
gggatgcccccacctcggtggactgttcatgcttcctcggaatagtcctgctttgtggcagaagaaatggggcagtttttgttacatttagtgcagtgaacaaacatccagtttttaccagctatgggagttgagggagaaatgagggctcagagaccagggagggaggggaacagagaggccgagtcccaaggccacccggtgccaccgtctccgggcttctggctgcctcacctcctcactcgggccctcgccccc

SEQ ID NO: 3740 - DNA, 1275 bp, Homo sapiens
  chr5:472579-473854
  hyper
tctcacccagccagggcaccccgggcgacctccgcgccaggtgcgacagctcaggccggagacctcgtctgtggggacgggccgtgtccggggccgccaccctgagaccgggcgcgggcaggacggaacctgggggggaaacggggcaggtactggctttaggagtctaaatccccaaacgctgagcagacggaagacgttcctgccactttacctgcagttcaaagacctggcgagggcctggaaacggcgctcggcccaggccgcttgcgggcgctgggcctgcagccgctgcaggtcgggccctgagtcctggcgctcgggaggtccctgagtcggtccccgagtcagtccccgggcgcggggctcggttgggggggcccggaaccttgggctggtttcacgcaaatccgtttggggcgagcctcggtttcccggcagcggtgggaaagggcgcgagcggccagccatggcgcgcggacccttcccgccggcggcgtcacagcggcgtctcctcctgctccagcgcgtgcggcggtgcgtggcacgagggcggcagcgacgccagcttcagcagcgcggggcggcggcgcgcgcgaggccgctggaacgagcgccggctgtgcacgcggcgcgccgccgccgaacgcgcgtgcgcactcggcagccctcggcgctccggccccgcccccggcgcaggccccgcccccggctcgccctcgggcggctctgcgggcgcaggcgcggcactctcggagttctgcgcaggcgctggcgtgggcgaggcggggctcggggctcgcggtcgctgtagccgcgcggggatctggggtttctctgggacagcggcggcggcggtgggcggaccgtggcgcggggacgagcggccggttagcggcgtgtcggagccggtgtcacctgcgggagaggaaggcgtgagcggcgcgcggagcccgggcgctggggcgggaggggcgtccccgggggcctcagctgtccccgagcccggcggctctcgcctcccctcccgcggcgcaccccaggctcggcgtccgctggggcctcctcccaggacccgggttcgcggggcagaggcggaagcagcaacagcgaagccccagcccggccccgccacgtccccccgccgggggtcccgggacagcggcctcctcggcgcaggaaggtcccgccccaggccctgcagcgcgggaggtcaaggtccccaaggggacctgcttcctccatctcaaaccgccctggcgtcccccgggtgcc

SEQ ID NO: 3741 - DNA, 30 bp, Homo sapiens
  chr5:524254-524284
  hyper
ccagagcgcgatgacgtagggatcctgcac

SEQ ID NO: 3742 - DNA, 361 bp, Homo sapiens
  chr5:676622-676983
  hyper
atgaaagaggtgatgagtttgcggcaatgtaggaatgaaatacatcggccacaggaggacgcaggtgcaaaccaccgaaataaagccattgccacacaggcggacaggacggggctcagggagaaccgctgcttttctcgggtgcgatcatggtggggtgtcgggacatgaggtgaaatgtgctggggcgtgtgagggtgcctcagtgtgcttcccagcattcatccaggagaaaacagacaatgcgtgacacggcaacagacgtgtgcacacatgacacagaaacgcacgtgcacatgcagaaacacatgcacacatgcgcacacgtgcacacacgacacagaaacgcgcacacacgacg

SEQ ID NO: 3743 - DNA, 30 bp, Homo sapiens
  chr5:677184-677214
  hyper
cacacgtgcacacgacgcagaaaaagcaaa

SEQ ID NO: 3744 - DNA, 36 bp, Homo sapiens
  chr5:693797-693833
  hyper
cggaccccgatctctccgccccgcaggacgcgcgtt

SEQ ID NO: 3745 - DNA, 31 bp, Homo sapiens
  chr5:923798-923829
  hyper
gcagcagcctcagctccgagtcctagtgtct

SEQ ID NO: 3746 - DNA, 47 bp, Homo sapiens
  chr5:1004891-1004938
  hyper
cgagcgccaaggcctcgcggggagaatagccacggggggagacgggg

SEQ ID NO: 3747 - DNA, 196 bp, Homo sapiens
  chr5:1061605-1061801
  hyper
atccctgagtctcacccgccgcacccgccgcacctgccgcatccgccatgcgggacccctgcgtctcacccaccgcacccgccgtgcgggatccctgtgtctcacccgccgcacccggctcatgggagttgggagcagctgtgcctgttaagcaccagtatttaaaacagcacaccagatcaggtgcggtggctca

SEQ ID NO: 3748 - DNA, 354 bp, Homo sapiens
  chr5:1064041-1064395
  hyper
cgtccacctgggccacggtgaagatacgcatccggcacttcctccacacctgcagacagggagggcatggctgtggggcctcagaggagcccgtcccggcccgcagcacgtggggtggccgtgctccggctggcgtgtccccgtcgcacgccccaccttgtgctggcgcagcaggaagggcagcagcatgagcatgccgccgtcgtgcacgatccaccacacgtcgatgtggcccccgccgaagcgctcctggttttgcggaaacgagtcgacgttcttggccaccagcagagcctggtgcgcggcggtggtgtcgcggacggtgtctgcggagagaggcggccgtccgcaggt

SEQ ID NO: 3749 - DNA, 1629 bp, Homo sapiens
  chr5:1064611-1066240
  hyper
gcctggacactttcagatggccgctcccagggccagggccttcgacagcctcagagcacacaccctcgggtcggtggcctcaaggcccatcgggacctgacagcgcacaggcctggggacgttgaggggacagcgaggagacagaggggacggcgaggagacagtgaagggatagcgaggagacggtgaagggacagtgaggggacggtgaggggacagcgaggagacggtgaagggacagcgaggggacggcgaggagacggtgaagggacagcaaggggacggtgaggggacagcgaggagacggcgaggggacagtgagggaacggcgaggggacggcgaagcgacggcgaggagacggcgaggggacagcgaggggacggcgaggagatggtgaggggaccgcgaggggacggcgaggagatggtgaggggacagtgaggggacggcgaagagatggtgaggggacggttaggggacagcgaggggatggcaaagggatgcagaggagactgaggggacacgggacagtgaggggacagcgaggggaggcagagggggacagtgaggggacagcaaggggacactgaggagacacacaggggacagtgaggggacggcgaggggatgcagaggggacaccaaggggacagtggggacgaaaaggggacagtgagaggacagcgaggggacactgaggagacacacaggggacagcgaggggacactgagaggacacagaggggacggtgaggggatgccgaagggccgccagccatgcctacccacaaagttcttccaggagaaggggttgtcctcctgcttccaggatgcgggccaggccatgagcaccgtgttgtgcttcaggccgcccaggccggccgactggatcaggtgggacatgccatcccgcaggctggacgagaccaccagctggcagaagcccttggtcttctctgtgctcattagggaccgtatgttctgcgggagacaggacaggttggtgctacagcaggaatggggtgcacagacccacgcccaccacccacggtggccagggcacccgcaccacctcccctgtggacccagcaggagggaaggcccgaaggctcaacggtgtgctgcggtgctcccggccgctgtgtgtgtatgtgtgtatgtgcgtgctcacacactggggagagagacacagagcaggtgtgactgatgccacgtgcaggggatgtggagggctgctctggggacacaacgccaggcagttctctgaggcgatccacaacatcccagacccacccccagttcactcggacgctctgggccaggttcatccacctggtgcatcagaaacacccgaaaatgggccaaattagcagctcttcaaagggaggccgtggggtccaggatgcagcaccctaacagcaacggcggggggcgggggtgggggactgccgtgtggtctcctcccggggttggagggggtcactgctgtgtgcagtctcttcccaggggtgtctgatgaggctgcaccacggaacggcttgactccatggggtttgcacgtgcgtggccgaggacctgccacgcactaaagccatgcatgtgtggacgcaggcctcccaccctctgac

SEQ ID NO: 3750 - DNA, 383 bp, Homo sapiens
  chr5:1111380-1111763
  hyper
gaaacctccagattcccggaacgggggacgggaacacggaggacgcggcctgagcaaggccccggtggctgccccctccccagccagggcgcagtccttcctgttccgcctctggggggtgggcggctcctccagggtcaggcgggggcaggacgggccggcccgggctagtgttaccggacggccgcggcgcaggggaagggagagcgcgggggacgcaggacgccccggctcccgaaccgcccgggtctccaccgccacccctgtcccactagggaccacccaggggcccgggctccctccggaggcgcgctccagcccctccccgtttccatggctaccagcagcggcgtccacacctctgcccccggtcccacccgagc

SEQ ID NO: 3751 - DNA, 185 bp, Homo sapiens
  chr5:1112190-1112375
  hyper
cggggtccgaccgagccgccccgccccgcccgggccacgtgacttcacctgcttgccccgcggccccacgaaaagttggcccgcggcgacttcctgcagggaccccaacccaggctgcgtctgtctgaccgccgcgacccgggacgcggggctttcgctgcctgcgctcccgaccatcgcagagc

SEQ ID NO: 3752 - DNA, 36 bp, Homo sapiens
  chr5:1140551-1140587
  hyper
acaggtgcagctccagcgaggcggtgctccctgctg

SEQ ID NO: 3753 - DNA, 31 bp, Homo sapiens
  chr5:1174065-1174096
  hyper
gccgcccctggggtaccgtgggcactggggc

SEQ ID NO: 3754 - DNA, 229 bp, Homo sapiens
  chr5:1295213-1295442
  hyper
tgggagggcccggagggggctgggccggggacccgggaggggtcgggacggggcggggtccgcgcggaggaggcggagctggaaggtgaaggggcaggacgggtgcccgggtccccagtccctccgccacgtgggaagcgcggtcctgggcgtctgtgcccgcgaatccactgggagcccggcctggccccgacagcgcagctgctccgggcggacccgggggtctggg

SEQ ID NO: 3755 - DNA, 58 bp, Homo sapiens
  chr5:1295604-1295662
  hyper
cgctggcctgatccggagacccagggctgcctccaggtccggacgcggggcgtcgggc

SEQ ID NO: 3756 - DNA, 46 bp, Homo sapiens
  chr5:1345797-1345843
  hyper
gaggccctcgggcagccggtggatgggccggcgacctccccgactc

SEQ ID NO: 3757 - DNA, 30 bp, Homo sapiens
  chr5:1667943-1667973
  hyper
gagatcgcagggggcgtagggccaagccag

SEQ ID NO: 3758 - DNA, 30 bp, Homo sapiens
  chr5:1801329-1801359
  hyper
aggggcatttttagcgagatacctgggatg

SEQ ID NO: 3759 - DNA, 30 bp, Homo sapiens
  chr5:1851813-1851843
  hyper
gttggaggttttcacggtgaacacagaaag

SEQ ID NO: 3760 - DNA, 1635 bp, Homo sapiens
  chr5:1874671-1876306
  hyper
gcgtgcccagggaaacgcaggtggcatacatcgcatgcataatctcaggagacggccactttaaatcttaattggttgccttttaaatatcatttaagggctggcttccctgcctctctctctagttaagaaggtgtcgtgtcaaactctattaccttgctggacgtctctcccttaagttaaaaaaaaaaaaaaaaaaagaaaagaaaaaagaaaaaaaaaatggaatcatcagccgcggtttgagaggtcgataaagcttttagatttggagacgttttccgggagcccatttcctgcggctaagagttgttaatggagcttaaggaattatcttaggccgggcggccgggagagccgtatatctcccgcgcctgttcccttgtcgagcctgaatatgctgctgtcagactcgcttaatgaaaagtaacgcaccgctgattacagttttatttgggctctatgtaaagagcgccgttaatttgcatcccctccttggtgtgtttgaattcgccacgcctgaataaccgagcgcgccggccctgccggcctcccggcgccttcccagcccttctctgacaatctccctgggagcccagtcgcccgccccgacccttccccgtcacgcccccgccccactgacatcgacctccctggcgcgtccactcagacacctaaaattcaccccctccgtgtcacctctttgcaaacgccccctccccaccccgctccgacttcggaattgtcctgcctgacacctccccaccccacaagatcagccagagggtgtttgggggcgcctaaggcaaaccggctggactgtgccccaagggaagggtgtgggggaagcgcccagcgaggggatgccatttcctgcgcgtccccttagaatgtggctgaatccgcctccccacccgacgtctttatttaacacaatctcgcagcttattcaaataagccagctttgtcagccagttccaccaagatccgggggctccagcgagatggaattcctatggccagggccacggggaggggctggggtcccgagggcagcaagcttggctggcggcaggagccctgggtcctccccaggagagggacccagagcccagaccaagtccaacccgccaacctgcgccacccatgcgcgcactgggggctgcagagccccgccaggctgcccgcggccgggagcgtaaggccggggtccacgcctcgattttcagtgtccgcagcccctaccccgcctatctgcgacgcaaggcgaaaccttgtttttgcggaaaatgcctggctttgtctagggctggggtgggggcgtctgggcagccaccctcggccacattaaaattcctggcgccccagcctcgggcctcaacgctgtcccccgagacgccactttcgctattactgtcaagtacccttgactctttatttttgcccttttatctattacaactaattcgagttcttttgcccttttcagtctaagacgtgggctttctgcaaagcctccccctgccagcgagctctcggagcgcggagcctttagaaattgaggggtttactgtcaaaatgaaaatttcacttcaaattaccttggctgatgctcgctcgccaggccgggggctc

SEQ ID NO: 3761 - DNA, 283 bp, Homo sapiens
  chr5:1876637-1876920
  hyper
cgcaagacagtcctgcgtctccggctatcctgtcccaggcaagggcctgtggtcgcctcctcgccgcccccgggccgctcccgtagtccttgggacacctgggcctttgatgagcccagcagggcttcgggcggagggctcggggtggggggtggggggcgagaggagaggcctcaagtccgccaggcgcctgcgggggatgcggaaccgcctccgccgcggggatggggaggggagcccggatttctgagcgtagccacggcttggccgggccccccgagcc

SEQ ID NO: 3762 - DNA, 13 bp, Homo sapiens
  chr5:1877089-1877102
  hyper
ggaaataggagag

SEQ ID NO: 3763 - DNA, 38 bp, Homo sapiens
  chr5:1877194-1877232
  hyper
cgatgggctcccacgcccccccccgggacacggctctg

SEQ ID NO: 3764 - DNA, 290 bp, Homo sapiens
  chr5:1877738-1878028
  hyper
ggggacagcagaccacgcttcagaacggaaccgccttctccatgtaaacttttgacgtaaactttatgcttcagggtatctggcctcttctgctccgagagcctctccttccgcgtcccaaatttgggaatggcccggtcaggctcaggcccaggcggtggaggccccggcgtggcagcgccgggcttgtccatgttcccaggagtccaagttcagaagccccctctccggtgggttggcggcttcgcggtggccgcgctagtcttcctctggaaactcagtgaaaagag

SEQ ID NO: 3765 - DNA, 353 bp, Homo sapiens
  chr5:1878223-1878576
  hyper
cgagcgtcccagaggcccggggtccaggagggcgcccttggcggtggcccaggcctggttcaaagtgctgtgcctgaggatggggtcgtggaagaccccgtccacccagtttctgagactggttaccggggagtcctggtgcctgtccagggcgccagagtggggaagggccacagacggggacgtggcgggcgcggaggacacagccgcaggggccgcgggaccttggcgcttgagcatgcacgacggaaactcagtctggctcagggaggtggcggcggcggcggcggcggtggctgtgtgggccagggaccagatgcgcggcttagcctccaggcctgccgacgcccccg

SEQ ID NO: 3766 - DNA, 179 bp, Homo sapiens
  chr5:1882742-1882921
  hyper
caaactgcgggtaggacatggcgggcgcggcccggggcggacgggcggggcctgcagggttctgcgcgctggggccggcgtggcgcggccactgctccggagctgcaggcttctaggcgctgggagggcgaagcaggagagccggttagtccatccccgcgctccgcaaacttttctaa

SEQ ID NO: 3767 - DNA, 485 bp, Homo sapiens
  chr5:1883131-1883616
  hyper
cgcgcagcccggcctggccgcagactcgccggtcactcgccggcggctcaggccgggaggggccaggacagtcccggccgcgcggtggacggaggggccattcctccgggcgttagcaaataaattccatccgagtcaatatcgcccagcgaacggtgtttctctttagtcacccgagaacgagaggcacttttaattagaaattaattaatgagcagctgctccttcccgccccactgtaatcattcgtctcaattacaaatgagacctatgaaaggacacgctgaagatgtaatcaacagttaaaattagcccggcgctgcgcaggcggccggcccggcctcgcgctggcgcgctctgctccgagtggcaggaaggggctcgcaggcgccccgcacgcgtctcgtcactattgtttaatcgagaatcagcaacgcctcccgccggtttccaccctacgccggaatggactttcagaacccact

SEQ ID NO: 3768 - DNA, 373 bp, Homo sapiens
  chr5:1883879-1884252
  hyper
cgccggccgtgctccgccggcttccccctgcccctcgcggctaagccggggactgccgggcggccctgcgcgctcggaagagcaggttcctcaacccaggccccggcccctcccgctaagctcgtccctcccggcgccccgcagggctggctgcgagggagggggcgttgggtgcctggcggaggcgccctcccctgtccattttgcccagctttctgtctggggcgcacggagcaatcggaagaggggaccgagcgcccaccccaggactccctcggccagtaccctccctgggaccttgcccaagttcaaagcggaggccagtgagcaggcggcaagggggcggcaagggggcgcccgggccatcccgaac

SEQ ID NO: 3769 - DNA, 12 bp, Homo sapiens
  chr5:1886997-1887009
  hyper
cgcgccgtgtgg

SEQ ID NO: 3770 - DNA, 35 bp, Homo sapiens
  chr5:1887546-1887581
  hyper
gggaggtcacacagccctaacaggacagtgggaag

SEQ ID NO: 3771 - DNA, 108 bp, Homo sapiens
  chr5:1887655-1887763
  hyper
cgtttgggctgccccacccagggacgcttgggccgggcgcgaagagcccggaaatagccacccttgtcgtcggcccggtttccctccgaggtcttagtatttcccccc

SEQ ID NO: 3772 - DNA, 30 bp, Homo sapiens
  chr5:1930949-1930979
  hyper
ggcttcacccgccaacgctgcctccctcct

SEQ ID NO: 3773 - DNA, 42 bp, Homo sapiens
  chr5:1931244-1931286
  hyper
ggagggcgtccccgccgcccccgtgcctctccgcaggggctg

SEQ ID NO: 3774 - DNA, 132 bp, Homo sapiens
  chr5:1931444-1931576
  hyper
cggtggttctgtggctgtgagggccgtttctgtccgtccacaccgccttccctctgcaggtgaggaatggggtctgcttcgtttggaatgtgcctttgccgggtcctgcctgacctccaccttccagccggg

SEQ ID NO: 3775 - DNA, 318 bp, Homo sapiens
  chr5:1931617-1931935
  hyper
cgcgcatcccgccgcccctcaccacgaagcgcagacacaggaggttgcagggtcagtgctgcggagaatcccagacggccccacagccgccgccacccgcggggcactcgcccgggctctgccgaggatgtgggggctttggtctccgcagagctgggactcccgaaggccttaccagaaactcaggagcagccccagccctgcagagcccgcgagggtggagacgggagacccgctgtggggcctgaggctgagatgccggcctgcggtgaagccggcgggacgttccaacccgctcagacccgcccactccgcagg

SEQ ID NO: 3776 - DNA, 327 bp, Homo sapiens
  chr5:2038535-2038862
  hyper
ccccgcagcctgttccgcggtgctggcgtctccctctccctggcgaggctgccccgaacccctctgcaccctccctccaggtaccgcccctgggaggtccggtggggaccacggcccgcgacggccgccgcacagccacctcccggcgcgtgcagtgcgggcccggagccaacaggtggcacaaacgcatttgacttgggcatcgatcgccgcgcccgcccggggccgcacctccgccgccagcgtccctccagcccggccccgatgccgcgcaggcgcagtgctcttctctccgcgggccgggccgggtcagggtcaggatctgac

SEQ ID NO: 3777 - DNA, 251 bp, Homo sapiens
  chr5:2739551-2739802
  hyper
cggtggaaaagcgctgggcaggccggcctggggctttcgagctctgccgccgagcgcagcagaaatacggtgtgcaggcaggacccgaaacaggagagaccggggggaccggggaggagaggaaggctggctgtggcaggaacccgggcgctcggcacctcccctggtcccgggggccctgaacccccgccgccgtcgccgccggaccccgcgatcgtcctgaacccgggccgggcgctttcggtttcccg

SEQ ID NO: 3778 - DNA, 293 bp, Homo sapiens
  chr5:2739860-2740153
  hyper
cgggcctgaggctgagggccagggagcgaggcgagcacccggggccagccacggaggagtcccgaccaccacgggagcagggggactgggaggcaagaggtcgggggaggccggggtcagggcgggaggaacccgatgggtcccgctgcggcttcaggcgcggggtatagggtaggaccaggaaggggactgaagcccgggaccagagctgggggtgccaggagcggggcctccagtgggagctcgggggtcctcgcgggttcttctgggtcggttggtggctacccatcccc

SEQ ID NO: 3779 - DNA, 214 bp, Homo sapiens
  chr5:2743445-2743659
  hyper
ggaacaaatgttgacatttgacgggcgcgggaggcagcgcccgcgccggccgccgggcaagcgccccggtgctctcggcagcccccggcccccggggcccacctgagattaaagcgcgaattccgataaatcagctctaaggaaaccctgggccgcggagagcagaagggctgtcgcggatccaccacgcgggcgccgggccgcggagccggga

SEQ ID NO: 3780 - DNA, 72 bp, Homo sapiens
  chr5:2743698-2743770
  hyper
cgccccaaagcccatctgctcctggtcgccccgttttgccgacgtctccccggcctcagtcaacaacagcaa

SEQ ID NO: 3781 - DNA, 30 bp, Homo sapiens
  chr5:2751857-2751887
  hyper
ctcatctgcatattcgggggcccgcccctc

SEQ ID NO: 3782 - DNA, 179 bp, Homo sapiens
  chr5:2752262-2752441
  hyper
gcggtcaggccaggccgggtccaattaggggactcacagcctgccccgctgtgcaccccgaggaggcccggcccctgtgtccaatccggaagtcgcagggaagtggggaggtcaggatggtggcgcccgcggctcgggtcttcctccgggcagtgcgcgcggctctcacttccacggtc

SEQ ID NO: 3783 - DNA, 452 bp, Homo sapiens
  chr5:2752508-2752960
  hyper
cggtccactccgcccagcatggacctggatccggggcgccttggttgcgaattgccaggagggccctgaggtgagctttctgcccccaaatccgcagcgcaacccccggggccctgaacgttacgactttccactgttgggaatgacgccagggcttcagctaagaagacgccgtcccctaaagagttttattttattttgtttttctaagttgactcctctttcagatttgtgttgtcaaaacactggggggatgattgttacctgacaaaccgcctctggcaggacctgaagcctcccagtcacgtcgagaacgggcaggagctcaggttggcgccgccggtgcagtgggcattacaggtagctcaggtgacgcgcggctggagtaggggggcggttgccttgcggggctcagaagcgaggcggttggcgagggttcctaggaccccagc

SEQ ID NO: 3784 - DNA, 30 bp, Homo sapiens
  chr5:2753731-2753761
  hyper
tttcaaccttgttgcgactccacatgggac

SEQ ID NO: 3785 - DNA, 336 bp, Homo sapiens
  chr5:2754001-2754337
  hyper
aatgaaaaaaaaatcgggtgtaatttttatcaccagggagcactggcctggagtatttccatttctaaagagcggttcccgctgtggtttcattagcatttggggctcatcctccctccccctcccttgacccacccccctccccccgccggacctctgccaggggcagaagagaaaacagccagttattatacaaacatcctcagtttggagctggagtgtctgctctggatacagtcgattctgacatcaattaaatatataaccagacacgtgcagtggcggggagggtcccctcacccagggtgcatctccagaaacgccgcctgcccttcc

SEQ ID NO: 3786 - DNA, 454 bp, Homo sapiens
  chr5:2755136-2755590
  hyper
caacagccaaagaatttagaacgagtctacgtggacacgcaagtttcagcgagcggggatttcctgcgaggccgagcgcgaggaacagccggccccggaggctcgggctcggggtctccccggggacgcggccgactgagaaggccggggcgctcgccgggcgcggcgccgtcctccgtgtcgcggggacggaaggaggcgacgcaggccaggagtcgtgcgcgcgggcggcgagggggcgctgtggcccgtgtctgccggcccgagtcccggcaacggtgggcgcgacccacctcctcccccggcggcttaattcggggaagaagaaaaaacggcatcgaggcatttcaataaaacctaagcgactcctgatcctttctcattgtggttccttatgagctttcggtgtctggcggggaaacagttaccgttcgggggtgtggcaaactttttt

SEQ ID NO: 3787 - DNA, 336 bp, Homo sapiens
  chr5:2756097-2756433
  hyper
ccccgagtagccacgcgggcgccacttcagggacgcggggcggcggctactgtgggccgggagggcccccgcacgggctgctctgagcgcctggacccgggaccctgcgcgcgctcttttctttttctttcgtttctttctttcttatttataatttacattctagggacctcgtattcagctaaccagctcttgcttacttaactgccctgttttcagctccggatttctgggaggtctccccatggctaacttgtccctcccggcatcctttagcgctctgcaaaatttgccttcctcccacagatgccccgcctccgacgtgcttcctgaagt

SEQ ID NO: 3788 - DNA, 318 bp, Homo sapiens
  chr5:2756673-2756991
  hyper
cggctctcacccggcataccgtggaaacggcgcgtcccgccagctgcggctccagcctgggagggagcgcagcgcggggagcctgcagcgtctggagagtgaggaaaagggacattccttggaaatggacagagccgagttccttaaagggatcgcagttgaaagagaccctcttcaaaatcagcaacgacctggcagccttagttcctcaacaggagatggttcgaagatgaaatgtttgaaactccgccgccgtttcacctttgcacacacgcgcacggcaggcccagatccgcacagagacgcagacacgcgcgc

SEQ ID NO: 3789 - DNA, 304 bp, Homo sapiens
  chr5:2757194-2757498
  hyper
cctcggtgctggcctcggcgggggtgcggggtgcgggtcgcggggtgtgcggtcacccaggaggctgcgaagagtgcaggggtcagctccatcccgacgaaagcagataggactcctcgctcgcaagaaacactggagaaaagaaaataattcctcgagtgtttttacaattattttaatccaaccagcgaggctctaaagagcgtttgtcttgaggccgtgttgaataccctttgccaactgtaaattcggcgtgtgtgcccgaaactgctagccctgaccaggggctcggcagcacatggcc

SEQ ID NO: 3790 - DNA, 16 bp, Homo sapiens
  chr5:3197991-3198007
  hyper
cgcccggcacgagctc

SEQ ID NO: 3791 - DNA, 30 bp, Homo sapiens
  chr5:3590575-3590605
  hyper
gattctgaggccagcgctggcccaaagacc

SEQ ID NO: 3792 - DNA, 446 bp, Homo sapiens
  chr5:3591105-3591551
  hyper
gggaggtttataaaatatttacgtgtgtgcacacgcatgtaattcacttccttcgacactggggacggcgtcgtagcggcactccaggccaggccactgcggtccattcctctgccctgcgtttgtgggaaatacgggcccagtgccgcagctttagggcctgggtcgcccttggtccgcccgccgcgttcccgggtggtgtccccacgctgctgaggacctggttccgcgatgcttgccgcggggggcactccccgcagcctgcgaccgtcctgcgtccttcgcttctgggcgtttccttctggggtttccttggagcggctcgagtcgactcctcccgcctgcccaactcagctccgctcgccactgggtccctgcagccctgcaccctcggggcgctcattgtagactattcttggtccccaggggccaccggtccctgcctg

SEQ ID NO: 3793 - DNA, 35 bp, Homo sapiens
  chr5:3591613-3591648
  hyper
cggccggacccaccgggggtctcaacagctgagga

SEQ ID NO: 3794 - DNA, 193 bp, Homo sapiens
  chr5:3591851-3592044
  hyper
gtgaaggcaggaggccagggccgcgccacccgttgcatcccgcggcaggtctgtgtcgcctggttctcggcgccaaaggctggtcccacagacggcttccgggagtgatgcgtccccacgagcatcctcctcttccttagcgacccccggactgcagagcttcaagaccagcgaactgtttcccaagaaataa

SEQ ID NO: 3795 - DNA, 30 bp, Homo sapiens
  chr5:3594163-3594193
  hyper
tccccaccaaccctcggcgtccccacaaac

SEQ ID NO: 3796 - DNA, 143 bp, Homo sapiens
  chr5:3595225-3595368
  hyper
ccctccgagaacccgcggcgccgactgcgcctgcttcccccgagctggcgacttctccgcgggatttgccctcgctcaaagtttgcacaattgaaagagcccgcagagctcggccgctccccgcttccccaagggcggcgagg

SEQ ID NO: 3797 - DNA, 241 bp, Homo sapiens
  chr5:3595849-3596090
  hyper
ggcgagggcgggcgggaggcagggagggggcgggaggggagccaggggcggggcctgcgctcaaggggatgccaatcaaagcatcaacttcaaattgtgtctgaaagccccgccgccgagcggagggcggccgccgcagtcggcgcgcgattgcggatccgggcgcagccgggagccgggcgcctgcgagcaccgggcagaggagccgcgaccggcctccatctcccggcccgcccgagcg

SEQ ID NO: 3798 - DNA, 30 bp, Homo sapiens
  chr5:3596689-3596719
  hyper
cggctgggccatctcggcctgggaaagcgg

SEQ ID NO: 3799 - DNA, 170 bp, Homo sapiens
  chr5:5139753-5139923
  hyper
cggggcaaatggcgcgggggaagagtttcctcctcagcctccccgtctccgatcgctccgcaaactccagagcgaggcacgcgcctttaaaggcaggtccgcggctctcccacgtcctggcgcccggttttccgcacccagtgtccccacagctgtgcccgggcacagag

SEQ ID NO: 3800 - DNA, 64 bp, Homo sapiens
  chr5:5139935-5139999
  hyper
cgcactccgcgggctgcaggtgtcccggcctctggcggcgccggtgcggcccggaggtgggagc

SEQ ID NO: 3801 - DNA, 424 bp, Homo sapiens
  chr5:5140031-5140455
  hyper
cgagtccccagccccaaggcagggcaggagcgcgcaccggccggaggtccatgctgagcatcgcccgcgccggtgcccggcagcctctccaactgtgtggtccccgcgcgggcagagaggcacggactgcaggccgtgggcagctccatcttcccgcgtcctcctcctctggcgctgcccgctgtctcccgccttccctctgctccccgctcgcctccgcctcagcgccccgctgacctcgcctcctcccctctgctctttgtccctgcactctcccctcctcggtcctctgacccccccgccctcacctcctcccctcctctctcccctgcccgccccgcgctctcccaccgctcccgccgcccccgccgccgcggctgccactccgccccccgcgccgcacggagcttcagtaataaccccg

SEQ ID NO: 3802 - DNA, 132 bp, Homo sapiens
  chr5:5140527-5140659
  hyper
cgctgccggccggggaccctccggtggcccctagcccctcggagcgctcctggatgaagccccgcgcgcgcggatggcggggcttggcggcgctgtggatgctgttggcgcaggtggccgagcaggtgagtc

SEQ ID NO: 3803 - DNA, 49 bp, Homo sapiens
  chr5:5140708-5140757
  hyper
gagtcccccgcggctcctctcccgcggaccccgccgtctcaccgcgatg

SEQ ID NO: 3804 - DNA, 142 bp, Homo sapiens
  chr5:5140849-5140991
  hyper
cggagcggccgggctggatggaaaagggcggtaagtccgtgaggtgggggcttctaatccttgccatttagcagctcgtaatctccgtgccgctggtttattaggtgctgtgaatgttcacgactctgtggaaccctacttt

SEQ ID NO: 3805 - DNA, 30 bp, Homo sapiens
  chr5:6378582-6378612
  hyper
aacttctccgccatcgcctcggcccgtccc

SEQ ID NO: 3806 - DNA, 881 bp, Homo sapiens
  chr5:6448768-6449649
  hyper
cgccagcccgggacccggcaagggaaagggcaagcgcgcggcggagctggccccgcgcgacaaggcgccggcggctgcggcggcggcggcggcggctgcggcgggggccgggggcccccgcgagagggcagcgggcgccagggcggggccgggcccggcggtggcggcggcggcgggcggcagcctggtccccgcggcgcgccagcaacactgcacgcaggtgcgcagccggcggctcatgaaggagctgcaggacatcgcgcgccttagcgaccgcttcatctccgtggagctggtggacgagagcctgttcgactggaacgtgaagctgcaccaggtggacaaggactcggtgctgtggcaggacatgaaggagaccaacaccgagttcatcctgctcaacctcaccttccccgacaacttccccttctcgccgcccttcatgcgggtgctcagcccgcgcctggagaacggctacgtgctggacggcggcgccatctgcatggagctgctcacgccgcgcggctggtccagcgcctacaccgtggaggccgtcatgcgccagttcgcagccagcctggtcaagggccaggtaaggcgagcgcgccggggctgggggcgcggggccgagatcgggtctgcagcgccgccgggcgcccgggccccgtggtgagggccagcgccggcccctccggccatctcgctccctgctctgactacaccagcgccccacggggatgctccgagcgcctccacctcttttccctgagcgttttcttcctgcccctgctttccgtcccgtctctcccgtccccgtctggtctcagtctctgcccgtctctctggtatcggtctctgccgtctctctggtctctctagct

SEQ ID NO: 3807 - DNA, 407 bp, Homo sapiens
  chr5:6687056-6687463
  hyper
aaaaactttctgaggtttgagcgaggtgttttaacaccatggacagcgcccctggttcttcgacccggatgcgcttcctaataaaacggcattccaggttctagaaagcatttcggtaaaacaggctcagaaacaccagattcaagagaataaccattatatgtgaatacatttaaaaatagatcacacactctaacaactgaaatgtacagaaaagatgaaagtgcatccgttaacgtttaaatgcccatttctactgatggcattcatctgcacgctcgcacagcggagcagctaacctttaggacagcgcccggggcagagccagctcggagccagcgctgcacagctgtgaggggccggctttaggctcacaccgcctgtatctgaaacgctgggacgggtat

SEQ ID NO: 3808 - DNA, 25 bp, Homo sapiens
  chr5:6765598-6765623
  hyper
cccaaagtgccgtgtgccaccatac

SEQ ID NO: 3809 - DNA, 14 bp, Homo sapiens
  chr5:7395064-7395078
  hyper
ccacaacgctcctg

SEQ ID NO: 3810 - DNA, 233 bp, Homo sapiens
  chr5:7395160-7395393
  hyper
cgcccagccgctctccccggcgcccctttgccgccatccccgctcagcagaggggctcggcgaggaccacgaccagccacggggcagctctgtaaacctgtgatatgacaggcttatacggcacctccaaagtgtgactgaagctgagcgtgcagggcgcaacggacgctgcccccgcgaggccgtggcgggggctcccagtgcagtcactgccgcttcacttccacatggtg

SEQ ID NO: 3811 - DNA, 190 bp, Homo sapiens
  chr5:7395433-7395623
  hyper
cgccctcgcagggagccccggccctctcaagagggtggagaggatgggggagccctcaaccctgctacgctgaggggaagaagggctggacggcaaaccggtgcccaccgcggggaggcgggaagggtgggaaatcctctccagctccccaaaagagtgaaaaggagggagaccccgctgtcctctgacc

SEQ ID NO: 3812 - DNA, 1042 bp, Homo sapiens
  chr5:7395860-7396902
  hyper
ctgtgttctcacttcgtagcggggagggccgtccctcccaccccacccacgctgcactcgggatagggcagaggaggtggacgacctggtggctgagtgtgggaggccggcgggcgaggacgaccccgggccggggcgcagcgggagcccctcagttcgccactccccccaccgtacagcccccgccgtccccagcctgcagccgggccgtcgggtgggggccgacaccgcccctgcacggaggccggctgcgcgcggggcggggagcggcgggcggagggccccgtggaacccgccccctcccgcgcggtggcggtggcggcggcggcgccgggagctgcccccgaggccgccgcccggcccccgcccgcgcgtcagcgcgcccagcccggggcgccgagctccgcccgcgccggaggcccctgcgcgcagctccgggtgccggcagccgggccggccgaggcggcgcgggggtgggacgcgggcggccgcggcgagcggcgctgcccgggccgggcgcgcacggcgggcgccctgtgagcggccccgatgtggcaggaggcgatgcggcgccgccgctacctgcgggaccgctccgaggaggcggcgggcggcggagacgggctgccgcggtcccgggactggctctacgagtcctactactgcatgagccagcagcacccgctcatcgtcttcctgctgctcatcgtcatgggctcctgcctcgccctgctcgccgtcttcttcgcgctcgggctggtgagtggcctccccgcgggtccagcgccgcgccttccccggccctgagaggagcccggccagccgagccgcgtcccgctccgggctgcccctcggcccgcggcagcccctcggcccgcggcagcccctcggcccgcggctccctgcttctcctgctggcccgcggcccggtggactctggcaagggctgcgggcgggagaaaagtttcctgggaaggctcttcccaaaataaagttcccgaggtgttcaccaggtggacgggcagggcgtgtgctttttgca

SEQ ID NO: 3813 - DNA, 1101 bp, Homo sapiens
  chr5:9544671-9545772
  hyper
ctgtttgttgcctgggactcccgcccactcgcccaggacccagcaactgcctgtggcgcctcgtcctccgagcgctcgctcgcagcgccccctgccgggaatcccgaggacgccgcaggcgcaggaaagttaaatcccaactccggccgcggcatcctggtacaaagcaagcaaagggcgaggaggtgaacgcgcttcccgccaaagccaggggaacagggatgtgaccgctccaagccaggcaccggccgccgcggggagcgagccgggggaatcactcctccacgaccgttcccacgcacatcttgggagaaaccattccctctggagcccgatctgcccgaaaccctggggtctgaaaccctgagccgcggtgtgcaaaatccgtggagcagcggagggatgcctggtgaaaggggctcgcctagctgcagcgcacctggctggtggttccccaggcctctgcatcccccgccttagtgtctttcattaaccaaggcgcttggcggagttgagcccaagtcccattgcctcccggttcccctgtaaggaaagcaggaaaacctgcccaagccggtggggctgcgaggtggccgctcccgaaccgccaagtcccgacctccgtgtcccctgcccccggctcgcggcagtgcgagcctggaggcgcgccgggggcgggcacagaccagtgtgcgcacctttccgggtgttgggcaggggtcccgtctcgcccaccgcgacactccggctccttacctctccatgctcagacctcggcacaggcgggtacacaaacttccagcccgtgcactagctcaactgtgggcgcccccggactgacggtcgtcctaatcctgtacgcgcaacccccgcccaggtgcctgctgatggatcccacccgagatcggcaccacccaccagccgaccgctgcagtccccgggtcccggccagcggcgcggcgcggcgcggcgcggtcaggggctcctgccaaggccacgcaggaatcgggcgggggtcgctcaccaggtgcgaggagcgctggtgccagtcatccagcgcctgggggccagagcggctccgaggatcctcttcagcacctg

SEQ ID NO: 3814 - DNA, 30 bp, Homo sapiens
  chr5:10249746-10249776
  hyper
agtctctggggaaacgcgcccgccgacaag

SEQ ID NO: 3815 - DNA, 30 bp, Homo sapiens
  chr5:10250984-10251014
  hyper
ttttctttgtcactcgtaaaggtgtggtca

SEQ ID NO: 3816 - DNA, 548 bp, Homo sapiens
  chr5:10333519-10334067
  hyper
ccccaaggtcgctgccgaccttagaccgcgggggtgtggggcgccggggaaggagacagaaggacaggcgccgcccagggccgcggggacacttggggctgcgtcctgggtgggcgcgatgctcccccagaacgactggagatggagagtgtcggggagggaaacgggacccacgaattcagggcgctgagtcggcggaatgcgccctgactccccctggccgagagccggctcagaatgaaagagcgcggagtgggaggtctgggaaatggcagtatttgtattagggagagaaggaaacaggagtgggagccgcacggcttggggaacgcgggagatcgcggattgcggggatagcgcagcgcggctgcccggggctgctgggaggggccggacgaggccagggcgagcggggtaactgcggccggccggacggcggcggtaaccggctgcaccgaggtggttccaccaccgcgctgggcgcttgcggttcgtctgctccaacgaaagccgcgtcccacgctccctgccgccgcgtggttttgcct

SEQ ID NO: 3817 - DNA, 503 bp, Homo sapiens
  chr5:10354849-10355352
  hyper
attttgctttttttgatgttccggttatcgtgcaaatgcttttctactttaggtatatttatgggggtatgagcgtctttcaaccttatgggttgcgattttggcgattttaaacgaaaatgaattatcaaacgccgtcatggagtgcaataatgagtgaaaaaagtttgatattatctatgtaatgagttgataacgacttatttttttttaaagaagtcttgcctttaataaatacctcaactataacatgtggcacttgatgtacattcgcgttccatcttcgtaaaaagcctgtggaataggtaggtattatcttttatagatgtggaaatgtaggcttcgttattttaatagcttgtcgaagctttacacaggtagtaagaggcagatttgaacctaggcattctgattgcaagtaatttccctttcattatgccacagtgtgtttattatatacactgagtgtagctaatcgccactggagacgcctttggaaaaaa

SEQ ID NO: 3818 - DNA, 30 bp, Homo sapiens
  chr5:10563841-10563871
  hyper
cggctccgctcccgcgcccggctcctctgc

SEQ ID NO: 3819 - DNA, 179 bp, Homo sapiens
  chr5:10564479-10564658
  hyper
ctggggacgcagaagcgagaagcggggacctcggcgcgcgccccgcgtcccgctcttcctgcccgcgccccggcccccggcccgcgccccggccgccggcatggtgctgctggccgggaccgggccggagggcggcggggcgcgctgcatgaccccaccaccgccgtccccaccccggg

SEQ ID NO: 3820 - DNA, 427 bp, Homo sapiens
  chr5:10564800-10565227
  hyper
cgtcccggagggcgtcccggaaagcgtcccggagacggcgaccctcctgcgcgccgcctgcgccaacaacgtggggctgctgcggacgctggtgcggcgcggggtgagcgtcgaggaggcgcaggagactgaccgcaacggcagggtaagcgggcgtccccgcaggatttgagccccctcactgcccccactcccctcctccccaccacatccccgcgcctcccagctcctggctccggaccggtccctcggtcactcagccgccgcccagagcgccttttccccgctgtttgggagcgcggtgccctgggtggcttccccgtctcaggctgggggacgcggtgcggggagggagcagtcgaggtgtcagcgcggcagaaacgccagtccggcgtcctcaccgcatccccttctcgtttaccggtcc

SEQ ID NO: 3821 - DNA, 489 bp, Homo sapiens
  chr5:10565262-10565751
  hyper
cgtgctgcaatccaggatgggcttcttgcggcccggtcccctcctgactattacctttccccaggtccctggcaggggaccattcctcctcccctgcaggagacagcccctcctgcccagcgccccatttggcccctgggcccctcgcgccgcccttgtcctaacacgctggggcgcagatcggctcctccagccgcaatgatttggaagcaacagtttcttccctcgccgggacagcttggtcccctaccccacctccgctgagctttgtggcccgcgccgcgaccagccaacgtgatctctgactggtctgtccgcaggtcaccttcgcgagccaatgccagccggggctccccagagtcagggcatagggagagccccagagccgcgggcatccacccgggtagggcaggaggcgtggaggcaggcacaggctatcctttcgttatgaccagattcagagaaaacgagatgtttagaaaagaaaag

SEQ ID NO: 3822 - DNA, 171 bp, Homo sapiens
  chr5:10988183-10988354
  hyper
ccaccaagttccaggagggggcgcgcgaggggcgctcacctgtcatggcatctttcctggaagtgtgttcgcctttagctccgtggtaggtggcgttgctgccggtgcactcgtagtctgttttcctttctttgaggctgatcatttcccgaggtgaagctggggcacttg

SEQ ID NO: 3823 - DNA, 670 bp, Homo sapiens
  chr5:11384964-11385634
  hyper
cggatcggggacaggccggccgaggacacgacgatgttgatgggcgagctggtgctgtaggacttggccaggcggctgggcgactgcttgggcgaggagccgcgcggcgcggcgtaggtggcgccctcgggggccgagccgccgcgctgcagcttggtgggcgaaccgccctggggcgcggccagcggggagcccccgcgcggcggcgcgggcagcgtggagctggagtagtagagcgcggcggcggcggcggcgggcggcgcgtcgggcaggtggaaggcgctgcccaggctgggcgcgaacggctcccgcggcggcggcggcggcggcggcgcgggctcgggccccgccaggtggccggcgcggctggtcgtgccctgtgcccgggagaggagagaacacgcgcacttagcgagggagaagcacacggcccacccggcccagcccggccccgagagcagaggcacaccggggatgccgcgggcgcccggcggctctgcgatcccagctgcgctcggggcagtacgcgaacctgcgccccgaactctcctggggcggatttcttgtcctgacactggcacaggccagctgactactggagggaagtcacgtttgacaaatgagacctgtgtttgcttacatgtagatgttatttcggaaatagcagaag

SEQ ID NO: 3824 - DNA, 444 bp, Homo sapiens
  chr5:11903280-11903724
  hyper
aacctggctttcaggcggcgctttctggagcctggctgtctattgtcagcacgcagaagcccccgaaacctgtgaagccggctgcaaaggcttgctgggaagccgctaaatatagaccaagggggctcagggtctggcaagccgcgggagcctgaagacacggccatggacgcatatgactaagtctttccattttgttctagccaaacatcgtaatgacattgaacataagggcaaaagactggagggaagtcctccccacccccaccccgtctcctcccgtatattagggacgtcatgaatgcaccgagtatgttctcagggtggcggggagcagcattgtcggtgttgccctaaatacgcttcctcccggggagatgggtggcagggagggggagcacgcagggcagccacttggtaaccgctccaagaaaggcactaacc

SEQ ID NO: 3825 - DNA, 352 bp, Homo sapiens
  chr5:11903821-11904173
  hyper
cgcctgccggccgggagcccaggaccacccccaccagcggcaagaggaggaggacggcgccgggaggaggctgcgcccggccccggccgcccagccccgcaactcacccaaaggcgcggcgcccggcggcttcctcgcaaacatgcaccctccgccggcgacagctcctcagtccgggaagaggcgtgcgcggcgccgcccggcttcagggcaaggtcctgaccttgcccaactgcagcatcttccgcttttgttgtctgagcgcggccgcgggacaagggatgctggcgggcggcaggggcgagcgccgcgggcgagaggcggctcccgacgcgagtgcgcagcgcccggc

SEQ ID NO: 3826 - DNA, 184 bp, Homo sapiens
  chr5:11904195-11904379
  hyper
cgagcgcagcgccccctgcccggctccgcgggctccacgggctcctgcgggctcctcggggctccgggcgccgccgccagccggccgggctgagagagcagccgccgcgcccgcagctccgctcagccggctgtcgccgcgggcgcgagcctggggccgccgcggcgcccggcgccgagcgctc

SEQ ID NO: 3827 - DNA, 377 bp, Homo sapiens
  chr5:11904455-11904832
  hyper
cggcgcgcggcagcctcagcctccacctaaacctcggcggccggcccgggcgcccggctagtgagggagcgtccgccccgccgccgaaaccggccccgggtgcggagcatgcccagtgccgccgcgagagcggcgcttcgccgcgcgcgttccacttctcctggttttcgcggcagcagcggcagccgcgggagagaggggaggaggccgcgggttgggagagggccgagcatccttgggaacgcacgccctggacctgagatgggtggatgctccggagctaggcgaaagctggaagggacccgggaagggatggaaccccaggttactccgcttccctaattcacgtgcaaggcgctgacagttgactctggtgg

SEQ ID NO: 3828 - DNA, 30 bp, Homo sapiens
  chr5:14108619-14108649
  hyper
aaacacacacgcacacgcgcacacacccct

SEQ ID NO: 3829 - DNA, 44 bp, Homo sapiens
  chr5:14108849-14108893
  hyper
attttaaagaagccacgtgtttacgaaaacgtcttctaggttaa

SEQ ID NO: 3830 - DNA, 137 bp, Homo sapiens
  chr5:14142659-14142796
  hyper
tagccggggcataggcgttttgaactagaatattcgtccagcgctggtttgacacggatcttccgcaaaggaacatttcttttggcctccccagaccccgtcatcttccccattcattctggcggagtaaggactga

SEQ ID NO: 3831 - DNA, 132 bp, Homo sapiens
  chr5:14143001-14143133
  hyper
ccactagggaggcacccgccccggcccgcgtcaccccgccttgcgggctagacgacgaaacgcctcggcgctcaggggaccgcgcaccggtgcaggagccagcgccccggttgggggcgcaatgccgggcct

SEQ ID NO: 3832 - DNA, 648 bp, Homo sapiens
  chr5:14143456-14144104
  hyper
atcaagatggaggctcgcggcagccgccggcgcccgtgatcccggaggtctcgccggccacgggcccccgccctcgcgactgcgcgtccgggaggcgcgtgctgctgcccgcgctccggccggcgcccgggaggccgtggctccgcgcctccgcccctcggccagctcgcggctaccgggcggagtcctcgtctatgtgggcgcgctccttgggccgagccgccgccgccgccccccgccgccccggggctctgcgtccgcgcgccgggcgcgggcagctgggtgctcggcgccgccaggcccggcgcggagcgggcggcacgcggcgctaggggcgcggggcccgaggcgggcgcggccgcgggcgccgccgcagccatgagcggcagcagcggcggagccgccgcccccgccgcgtcctccggccccgccgcggcggccagcgcggctggctcgggctgcgggggcggtgccggcgagggggcagaggaggcggccaaggacctggccgacatcgcggccttcttccgatccggtgagtgcaactgcggccggcccgcccagcggcgctgccccaagcgctcggccgacccgccgcggagctgccgagctccggccaccgcgcgctggtgcccgcccgtccgtccg

SEQ ID NO: 3833 - DNA, 124 bp, Homo sapiens
  chr5:14144285-14144409
  hyper
cggcagccgcggcttcgcgggttggggcgccggctctttgtctctttcgctggaggaccgaggaggcggcggcggagatggcgtgggcggaggctcttaccccggaggccgagcggactgagcc

SEQ ID NO: 3834 - DNA, 30 bp, Homo sapiens
  chr5:14144754-14144784
  hyper
gtgccaggtggccccgagtccaccccggcg

SEQ ID NO: 3835 - DNA, 46 bp, Homo sapiens
  chr5:14144999-14145045
  hyper
caggaggaggaggaggcggcggcggcggcggcggcctcggggccgg

SEQ ID NO: 3836 - DNA, 30 bp, Homo sapiens
  chr5:14581756-14581786
  hyper
agttctggggcccgcgaccccgacagcgcg

SEQ ID NO: 3837 - DNA, 30 bp, Homo sapiens
  chr5:14872919-14872949
  hyper
aacgccagcatccccgcaccccaggactgt

SEQ ID NO: 3838 - DNA, 30 bp, Homo sapiens
  chr5:15499880-15499910
  hyper
caggagaatgccaacgcatacacctgaaag

SEQ ID NO: 3839 - DNA, 118 bp, Homo sapiens
  chr5:15500570-15500688
  hyper
ggccccgcctggagccaccgggggtgccaggaggggacgcagcaccccctcccactggagtgcggggacctctccaggccggaggtcggccccggagcttgggggggatgtgcagcta

SEQ ID NO: 3840 - DNA, 208 bp, Homo sapiens
  chr5:15500735-15500943
  hyper
cgccgcagctatggagtgtcccgggagacggcgggcatgacggctacaggatgggcgcgaacaatggcaaacagtacggcagtgagggtgagtgggccgcccgtcctcagactcccggatcgcgtccctcctcccctttccctcgccctcccgactgggaagggaggttctcgcccgcggccgtgacgcaccccatttggcaccctgt

SEQ ID NO: 3841 - DNA, 162 bp, Homo sapiens
  chr5:16178990-16179152
  hyper
gggaaggcatattggagccagcgctcacagggcagaaccagacgagcctcactggaggcaaactgggaggtaggcgtgcgctgtccgtggtgctgaaagcttgaccggcgcgagctggagccgccaccggctgcctcggggtctcgccgggccttacctgct

SEQ ID NO: 3842 - DNA, 140 bp, Homo sapiens
  chr5:16179266-16179406
  hyper
cgggctggtctccggcgccccgccgctcgcgctcgccgcccgcgccggcctcagactccccggggccgcctttcgctgctgccgcctccgggaggcgcctcggaccttccccggagtcgccggccgccgccacttcctgg

SEQ ID NO: 3843 - DNA, 245 bp, Homo sapiens
  chr5:16179554-16179799
  hyper
cggggaccggggccggctctcccggcggcggcgtcggcggcggcggcgggggaggttgcgggggaggctcggcgtccccgctctccgccccgcgacaccgactgccgccgtggccgccctcaaagctcatggttgtgccgccgccgccctcctgccggcccggctggcgggccgggctctggctgcagggaaagagagcgcggagggggcgggagggagaggggaaaaggagggagggggcccgg

SEQ ID NO: 3844 - DNA, 138 bp, Homo sapiens
  chr5:16180182-16180320
  hyper
cgtgagctgggaagtagggggcaggggagaggccgcgggtccagaaaccgttactggatgggccggtgggatgtggcgcgggccgggtggggcgcgacagtctgagccgagacccgcgtgggcttaagggtgcgcgag

SEQ ID NO: 3845 - DNA, 420 bp, Homo sapiens
  chr5:16180371-16180791
  hyper
cgcgggacccgggactgtaaccgccacttccaggccctcgctccccgcgcttggagccctcaagggcactctcagggatcctcgagagccttaaaacagaagtctctggaacctgtgtcctctccctgtctgtcccgccctcgaatccctgtgtcctcctcacccgctccctcctgcagtgagcatcccgggttgttggtaaagatcttggtgcctgggaggtcggagcttcgtctcctgaaatggtttatactagtgaaccctggcgccacgttctgtggcttataatcactttcgtcgttgccgcatgaggaagcaaatgacaccgccccttaccctggaaaagtggctgcagccttccccggatcttagttttactcaccccgaagtcaatttctcggtaactccaccctgcaaaac

SEQ ID NO: 3846 - DNA, 30 bp, Homo sapiens
  chr5:16616444-16616474
  hyper
ttagaaagcaggggcgaagttttcaagcac

SEQ ID NO: 3847 - DNA, 135 bp, Homo sapiens
  chr5:16934504-16934639
  hyper
taggggcagggcctccgttttcttacagatgcaagcaattaaacaccggaactcactgtagcccgagggtcctttaccactggacaacgtgcaactcttgcagaaagttctggtgcctttcgacaagcatgaaaa

SEQ ID NO: 3848 - DNA, 1390 bp, Homo sapiens
  chr5:16935552-16936942
  hyper
acccgggcagtcgagcgggcggatcgccccgcccgcgccccggcgcgcgccgcctcacctggcgcgggtgtcccagggcgccccgagagccagccacccacgcaaacggaaacgcaccttcgctacctcccggagcaaaatgcgagcgcgggacaggacgaaacaaaacctgcccgggcttactcatcagagactccgcggggggatggggggtgatttcaggagactcccagaaagttgcgccttccagggcttaggaaaaagtacccagggcgcgcggcgtggtgggcagacgcctctctccctgggctccggaggccaggtcggactgggagcgcacttacctcggtgaagaagttatccattgttccagcgcagtcccggactcgccgagtgccgctccgactcgcggaagtcagcgccgccgcgggtccggggaaaccatgcgtgtcacggcgccactcccgaggacgcgcgcccgcggggctcccctgctgccatcgcccggtcccttcttgtccttctcaccttttgttcgcccaaacccaagtccctaactcgcccgtcccgacggcagcctttgtctcttcttcctccaagttcctcactactgggcgcagcgctcgcaagcggagaacagctggtggcacattcttcccccaggcgggggaaggcggcggggtgctggcgagcgcggccccctccctctgcgctccggccgggggccctcggggcgggcaggaggacagcgggccgcaaagtgagcaggagccgcgatccccgcgcgagcgcttggaggtgagcagtcccgcgccgcggctcagccagctctcgcccgcgggactacagcccagcgacctcgccccgccctcccgcagccggccccgccctcccgcagccggccccgccctcccgctcgcggccccgcccccaggagcttggccctccgccaaccacaccgtctggccccgcccgggcggagcgccccgcccccttcccgaccaggccccgcccactctaagcccgaagcagccgcaggctcgttagcggacccgggagggggccgcgtgtttccccaggtcttcccacgtaggcgtggggaggggatttaactcttccctctgcagagagagactaaacaatcacttagaggggaggagaagggactgggggcttctgtgcctttcatgtttagcagacccgggaaccggctcaacacggatctcattaatgcagcccggtagactagcaatctcgggaaggaagcgcggtcagcggagctgccggggctgcggggccagatcaaagcggaagacggaggctaatcagaatttctggaagctgcattcccgtgttgactttctgtcctgcagtcgggtttgcttaagac

SEQ ID NO: 3849 - DNA, 30 bp, Homo sapiens
  chr5:17216353-17216383
  hyper
ggctgggacgcaggcgagcatgaaagcgat

SEQ ID NO: 3850 - DNA, 30 bp, Homo sapiens
  chr5:17216907-17216937
  hyper
tgcaggtgcggagccgcccaaggtgcgcaa

SEQ ID NO: 3851 - DNA, 31 bp, Homo sapiens
  chr5:17217632-17217663
  hyper
gaggagggaggctgggcgggcggacgcgcgg

SEQ ID NO: 3852 - DNA, 30 bp, Homo sapiens
  chr5:17218074-17218104
  hyper
ctctgtgagggctccgtcgcacttcgggga

SEQ ID NO: 3853 - DNA, 77 bp, Homo sapiens
  chr5:17987027-17987104
  hyper
gaggtgtgggatcttgcggggggttgggggcggtgggaaatgaatgaaactgttttcaggcattagattctcataag

SEQ ID NO: 3854 - DNA, 17 bp, Homo sapiens
  chr5:17987223-17987240
  hyper
ctcgcctgccactcacc

SEQ ID NO: 3855 - DNA, 189 bp, Homo sapiens
  chr5:24644973-24645162
  hyper
agctcttcctcacacggagagaaaggttctgctgatagagctgcagcactcgccatgggaaggttagagactgtggaagtgctggcttctgcgagcacacagcgatttgcaagtgaatgcgaggggagggcgcatccgagaggagggctttgcttgaaaggcgtcccctcccccgcagggcagaaagac

SEQ ID NO: 3856 - DNA, 30 bp, Homo sapiens
  chr5:28974970-28975000
  hyper
acctggagtatgacgttcgagggcaggagc

SEQ ID NO: 3857 - DNA, 122 bp, Homo sapiens
  chr5:29296853-29296975
  hyper
agcccatgcccatccggaactctagctggcccgcaagtgcgtgggcagccccggttcccgcctgtgcctctccctacacacctggcaagctgagggagccggctcccgcctcaaccagcaca

SEQ ID NO: 3858 - DNA, 30 bp, Homo sapiens
  chr5:30298760-30298790
  hyper
tatactgaaatatagaataaatttttagaa

SEQ ID NO: 3859 - DNA, 297 bp, Homo sapiens
  chr5:31193993-31194290
  hyper
gtgggttcgggctccgttggctatgcatacatctccctttttttttttttaattctgtagcgttgatagaagccaatcagagagagagccctctccgcccggtgggtgccgcgccggagttgggagggatgctctcagcctgcgagcccgggtcggggcgggcgcgcgggtccggctgcgcgggcggcgctgctgccgctgctcaggaccgacgccgcttcccggggagcctgggcaccgctcctccgcctcctggtaagaccgatccgccgtggggctgggtgggggcaccgggaa

SEQ ID NO: 3860 - DNA, 345 bp, Homo sapiens
  chr5:31194311-31194656
  hyper
cgctgcctttctctacgccggcagaggctgccaggggagctctggcatttgcaaagttggctggtcaattaccaaagggcgctggtgcgtgcaggtcccgccgagccgtttggggcttgatttatctccacctgcccgcatcataagggtctgcgtggtgactgcttgggctgagttacatttcttagcttttggggtaaagcagaaaatcaggtagtctgaaaactctggaatgctcccagtaaggaaaacttaaactaaagagacgatttggctggtagaaggagctaaagaaaactgttagcttgcacgttccgggcaacgcctgccggctcatctaggaca

SEQ ID NO: 3861 - DNA, 1237 bp, Homo sapiens
  chr5:31854441-31855678
  hyper
aaggtgggaggggtaggggagcgggagaaggtataaaggaaatgcttcagtcgtgcagtcaccggcgattgtaattcagcggtgttaactttggttactccagccgaaaggctctgaccggggatttctggaaagttccctgacatcctgccccatacgatggttgtgattttagctgggggctccacccctgtaagaactcaggctgccgcggattatgaaacggagtggtcatgaagtgaattgatgtgggaaggtggagcttcttgcaatggctcggagggagaacttttggtgcaaacgagggtctagggtagggcgctttttcctctaacctgctccaggtttgccccaggaagctcctgagccctcggtgtaaacaaaggtgtctggatgagaagccccaaactccctgaaatcctccccagggcggtttccttttcccggcgaggggagtgaccggggaggggatcttggaatgccgtggggttttgacaagtgagcaggggagtggcgagccgagtttaggattgcattacaggcttttcctaacctcctccaccgcggcgcggagggaggaggggggggtcctcccacagacctggagccggcggagagcagccttcgggaagtcctgcaggagccgcgttccaggagggcagctggcagccgccccaggcccccgggccgcctgcaggtgattaggctaatgagctgccccgggggcgcggagaccggcctggcgagcggattacccggcgcccagctgctgccggcggagactcccaggagctccggagaggaaccctccgaaggtgacttcagaactggaggtaggaaatcggcttctcaggcgaaagcctcaggttttctgatctgatccaggtcgggtgcagactggggctgaatccacaaatgtggagatttagccacagcctcggaggcgcggagcggccacctaagcgtctgcccttctcgtctcccggatcactggggtgtgttgtttttaaagtgggggatttgcgtgttgagagacggtttgtgttcctcgggaggagtaagtgacttggagctggtttgtcaatggctggacggaaggaggcgccccggctgtgtgtgacgggcagggaaggggtgcccagaggggacaggtaatagggggttccggagccacggcggtttcagaaccttggggcctgtgccgttgaagccccggtaggggcggggggcatggcag

SEQ ID NO: 3862 - DNA, 374 bp, Homo sapiens
  chr5:32709849-32710223
  hyper
ggaggcgagcgctgacgccagaagttgccatatccccagaaaccccagtttgccttttcaccgtcgcaagtgagaaccagagcgcgttaaaggcctcggagtaaaaaacgcagcgtctgggactgcggcacccgggttgagtcgggtgcaagtttctgccgaaagagggcgtcggtctgagactaaaagaaatttgtggacacggacgcctagtcaaatgaaagaccattttaacacattttcaatgtatttaaatgtgcgggacttaattgtcagaattctcccgcccagtgtagcccgttcacattgcaaatgacttggctgcagtaggcacagaaggtccagttccattttgacccgccccgccgcgcggc

SEQ ID NO: 3863 - DNA, 30 bp, Homo sapiens
  chr5:32710441-32710471
  hyper
ggacctaccgggaacgttttgggaaagaca

SEQ ID NO: 3864 - DNA, 228 bp, Homo sapiens
  chr5:32710749-32710977
  hyper
cgggcacaccaggtccgcgatggagccatctgcactgggaccttggtccttgttccctgaccttgcgccgagggaccaggaaggtcaggtgctcgccccgcgtcggtgcttcaggagggaatgtggccagaacgagaaaggtgagagcaagcggcacctaaggatttttgcaccgaaaccacaatttctagaaccatccctttcccccagtcctggtttttttttttt

SEQ ID NO: 3865 - DNA, 1065 bp, Homo sapiens
  chr5:32711036-32712101
  hyper
cgcgcgcatttctctactttaaagcacgtttccttttttgaagccaggagctggagagcgtggaaagggagaggcggtgatcgcacaggcacgcggcgtggtgggggctcttgccggtgcagacgtgggcgatttcagctttaaggaaaaggcagagggcctgcggggagtggtggttagggacaggggcgcgatgggtagtgaaggggtgcagggaggagccctgatgtaagaatgttaatgagagactcccccagcccagcccccacatctccccacccccacccaccccacccgctggaaacacaagcccggcctcggcgcgccatgtgtggtaacacgctcagccgctgccacgctatttaaacgcgggctatggatccaggaaccggcgcgaatcaatgagatcaaatgcgagggagatgcaccgtcaattacaaacacttggacaagtctaactttttttttcttctacaaaaacgctttcaaaagcaaccttagcaacgcccaaataagaagccacctctaagcaaaatagtatatgtataaacggagggcgaatatatacaagtatatatatatgtatattacagacgcacaggtttacacccggtgaactttttctttttctttttcttttttttttaagaaaaactagtgacattgcagagaaggacgcttcctctctatcttttggcgcattagtgaagggggtattctattttgttaaagcgcccaagggggcgcagggaccttggagagaagagtggggaggaaagaggaagggtgggtggggggcagagggcgagtcggcggcggcgagggcaagctctttcttgcggcacgatgccgtctctgctggtgctcactttctccccgtgcgtactactcggctgggcgttgctggccggcggcaccggtggcggtggcgttggcggcggcggcggtggcgcgggcataggcggcggacgccaggagagagaggcgctgccgccacagaagatcgaggtgctggtgttactgccccaggatgactcgtacttgttttcactcacccgggtgcgg

SEQ ID NO: 3866 - DNA, 762 bp, Homo sapiens
  chr5:32712289-32713051
  hyper
cgagtatgcagcagcgccagtggcccggcttgcatcgcactgggacctgcccatgctgtcggctggggcgctggccgctggcttccagcacaaggactctgagtactcgcacctcacgcgcgtggcgcccgcctacgccaagatgggcgagatgatgctcgccctgttccgccaccaccactggagccgcgctgcactggtctacagcgacgacaagctggagcggaactgctacttcaccctcgagggggtccacgaggtcttccaggaggagggtttgcacacgtccatctacagtttcgacgagaccaaagacttggatctggaagacatcgtgcgcaatatccaggccagtgagagaggtgagcaggggcgcgtcccgggccccgggccctaacccaaccgctctccgcggctctccctgcacactcgtccactctgcagaccccactccccactgcggcgctgaggtcgggtgcgcgcgggcactcgttcaggtatgcgccgtgtggctgcgacaacctttgacgaccgcccatcgcggtgtacgtagagggtcccagggaggtgaaggggttggaggagagggcgtctgtagctcctgcgtgcccaggtccaacaggtgctgtcaaacacttcgatgttttttcttcccagtttccactttgccagcgccgggctggtgattagggggcgcactcccagtgcctggctccatccagggtctgaagcatccgaggcggaaagaacttgttccccagt

SEQ ID NO: 3867 - DNA, 236 bp, Homo sapiens
  chr5:33892208-33892444
  hyper
ggaatgggccagagcgggagggcgcagcccaccccggtccccacccctccgcctcccgcatgccccgcggcctcgcagcccgcccgctcggtgcatcttcctcccggactcccacccccgcgctcctccggccccgccccgaacgccaggcccagctggccgagccggccaaataggggagacccgggagagccgccctgggaggcactggaggaagctgcgagtgagaggccccc

SEQ ID NO: 3868 - DNA, 527 bp, Homo sapiens
  chr5:33936184-33936711
  hyper
ctgggttcagcacctcggaaagcgcccctcgcggcgccccgggattacgcatgctccttggggcccgccgccttggccgtgcaagtgccaccgtaactggtgagagccgctggcaacccacccggagttgacaaccgcggagagacgcagacacccactgacctccaggaagctgagcgtggtggatggaactctacgatctctttctctccaaggacggaaacctcatccaagcagtcccagaggaaacggataaaggtatttgaaagggagcgagcggccccaaatcgcacaattgagcggctgggggagttatgcgccagtgccccagtgaccgcgggacacggagaggggaagtctgcgttgtacataaggacctagggactccgagcttggcctgagaacccttggacgccgagtgcttgccttacgggctgcactcctcaactctgctccaaagcagccgctgagctcaactcctgcgtccagggcgttcgctgcgcgccaggacgcgcttagtacccagt

SEQ ID NO: 3869 - DNA, 30 bp, Homo sapiens
  chr5:34008089-34008119
  hyper
gacagctccacgaccgagatgccctgcagt

SEQ ID NO: 3870 - DNA, 80 bp, Homo sapiens
  chr5:34486430-34486510
  hyper
ctcagaataaaaagctcgagaatccgtgcccagtaggtggcgctgctcttccttctgttgggattcgattcagacccgct

SEQ ID NO: 3871 - DNA, 1630 bp, Homo sapiens
  chr5:34655805-34657435
  hyper
cagaacaacactgaacggtggtagtcttgccttgccacccaatgagtgctagaaaacagtcacttcaaccaattggttcagtccggagaacgtgagcacattctactttactttctgttcaatgattttggaaaacaaccttttagattctggtcagaaggggcttggatccgtgactttgaaacactcgccactaccacaaacgactttggaagttaatcagaaataaacagtatctgggatctcatccgtcctaaacccaggggtcagagcgtggggggcttccactaacttcaggttaagaggatgaaacagatccgcggagaagggtcccacgatccctggagactaaaagcaagccacgaacagccgggacgcgcgggccggggagatgcgccgggggctggagggcggagagcaccccccgcaggtcccggccagagcccggggccgggtcacctgactcgcggaatttggggccgcgaggggtggaatgggaggggaatggttagcgcctcccttcccgctcccactggatccaggtcggcgggggccggcgcccggcggccacgtggtggtgctgccgctgcccccgccccgccggcctagcccgggagctcggcgcccactgacccccgcagcgggggaggaggagggactgcggcgcaggaagccgagcaggaagcgagcccggcggccgcgttttcctggggaagcggcgggcggggtggagcagccagctgggtccggggagcgccgccgccgcctcgatggggtgagtgcgcggcacggagttgggaggctcccggcgcggggtcccgggctcgtgtccccgcctttgtgtctggagctcgggcgcgggaggcgctggggacggcgcccgggcggagcggctgagcgggctgcagccggggtcccgccacctctccctggtccaccgccggcagcccactgtctgcggagagcagatctggggacaagaggaaggagaggaaggtggagatgagggtagagcgggaagacccggccaagttaggagaagggttcttcccgggtcctccgcgactcgcaggccggctggggcggggcgcggggcaggggccgcggcggagggagcgcgggtgggaatgaatgagcagacccggagatgcaccctggagtctgcgccgggtcccacctgtttcgccccgcgcggcgcctcgctgcccccgcgtcggtgctgctgagcccaatccgcctcccggctgaacttggaggaggtggggagggaggtgcgagcgggagactccgggtggctcccaggacgcggggtccgctattgttcctcctctgactccagggagcccctcggccggcccaagggcgggggcgagacccctctgggcctgcccctgccccctaccttgttttccccgccgcagctcggggagaacggatgctggagttggggcagactcggggccgccgggacttcgggagtaaggaggacgtggagccaccagaaaggcgcccgccatctcccgcgacccctgcctggtggggggtggggggtggggtgtcgtcctcaaccaccttcgctgccttcttgggcaggttggtgtcggtttagtttctgcggtttgcagggttg

SEQ ID NO: 3872 - DNA, 87 bp, Homo sapiens
  chr5:35229836-35229923
  hyper
taaactttccccgccggatgcccgcgaggctgctgcggcggcggctgctgctgatgggagagtctcgagtccggctttcatcacatc

SEQ ID NO: 3873 - DNA, 30 bp, Homo sapiens
  chr5:35230328-35230358
  hyper
cgcgccgtcggaggcggcctcagctcgcca

SEQ ID NO: 3874 - DNA, 43 bp, Homo sapiens
  chr5:36606741-36606784
  hyper
gcttacgcgcgctgcggattgttgctccgttgtacctgctggg

SEQ ID NO: 3875 - DNA, 57 bp, Homo sapiens
  chr5:36607375-36607432
  hyper
acgctggctgcttgcgttggcagcgacacacatccatggtacggctggttttcactc

SEQ ID NO: 3876 - DNA, 492 bp, Homo sapiens
  chr5:36690186-36690678
  hyper
gtgtgagttctgttagctgaacgggcctggaggaagcgtggcgggaaggctggatccccgccgcaggggctgcggggctgtggctgcctgcgggctgggcagggccgggcgcacgccctccttccgggtggccgcgggccccgaccccaggctgccgtcagtcgagcggcctccgcagcggccgcgcttccccttctcccacccgggtggtcccagaactggagcaacaatggccggctctgtgtggccgcgtcctggggccaaagcagtcgggacgtgtcacgccgagggagggctccgaatgaatacgctgacaataagaaggaagggagagcgagggaggtgatgggcagcgtcctagagggaaagcgggagatgagaaatctacgagatccgcgaggcggcgtccggggagcgagcctcatagtggccaccagggggaatgcggagctcaccttgggccgcttccgcggggagctctaaagggagctg

SEQ ID NO: 3877 - DNA, 227 bp, Homo sapiens
  chr5:36693293-36693520
  hyper
cctcctccctgccctgccaagcggggacggagagccagccggccctggcccggtgggaacccagttgatggtgcgcttattagctgtcctgagcgcggggacaaactttctgtacctgggccgctgctgccaccctgcggccaagacctttctctaggccccgatgacccagagcagcccggaccagacaacgtgcaaagaggagcgcttacagcaaactcctccct

SEQ ID NO: 3878 - DNA, 107 bp, Homo sapiens
  chr5:36745526-36745633
  hyper
ggagcgggtggagacgtcccacctcacctggctgcgctccgactcaggctcagccggcaggttctggggcaatgggggaagggagaggggccgggcccttgtgggtc

SEQ ID NO: 3879 - DNA, 101 bp, Homo sapiens
  chr5:37371141-37371242
  hyper
tccaagaagttagcttagatccgccgcctagggcgcgcgcgccaaacgagcgccttggcgcctcgacatgacgcacttccgcttcatccggtggggaactg

SEQ ID NO: 3880 - DNA, 1254 bp, Homo sapiens
  chr5:37836726-37837980
  hyper
tggcagctaggacctggggaacgcgagcttcccccctcaagccccccgccggtgccagctcccgggtgcgtgcgaaatggctggcggtccgaccggaggagcatggaggcgcggggttaatgcgccattccaaatcgcggtgcccgccagcaggaagccacagaggcactagatttcccttccgtcttaagagggttttcccttttttcctgcttggccgacggagggctttttaaattggacgtggagatcctcaattagaagtgtggcgaagctggcaaaagactacacagtggaaaactccccgcgtcgccagaggaggctcccggctgcggttcccgccctcggccgagcgccgccagcgcccggatcgagctcccctcttcccccgggacagggagggcgcattcttccctctgagcgccgccgggaccggctccagtccgaggggctctttcgttctcggtatttgctgggcgggggaaaaggggggaggttgggggactcggcacacacagcgtctactaggacgtttttcttagagtccgtgtgggctccacccctcggcttctcagtttgtctctctatcgctttcccaaaacacatctacatctgcccgacgcgcttctcctcaaccatgggcctttgcccgcggtgcaaactgctttacgcgccgccacgtgcgagaaccaagctctgctcctcaagtgacgggggctctgctctgccaggtgaccgcgcaccatttctcgtgcctggcaagctggtccccttctgggtccgggaccaccacgtcccggcagggcaaaagcagcaggccgtgggcgccggcacctgtgggtccccaggcctggggaggcaaggacgcccaggaaagccacagaagtgctcgcagaagcagccgctcgccgcgaggcacttctgagttcccggcagcagggggcaccagaaaccgtctgagccgtgtcgcgcccacgcggcccggaggctgtgttatcattttagttataaaaccggagaaccaccactccctctacgagcctcccgaaatcccattagcccgggaacctgtggaggtccttactggcatctctgcttttcaggctcccacccctccattctcgctggttttcctctccccacttcacctgagcgggtttcttggcaacctgctttcagaccatccctcaccccttccacgcgtcaccgtgacagattcgcaggaggcagcgctcccgccgtcagtgcccccgc

SEQ ID NO: 3881 - DNA, 168 bp, Homo sapiens
  chr5:37838325-37838493
  hyper
cacccgaattgctagcgggaaagggctagggacacggcggacttcccagagatcggacacttgttacttgttgaaaaggcgccaccttccctgacaaagcgaaggcgcagcgaaacagtacgagtttggtcgaggccggctttgacggctttgcgggactgggtgcgt

SEQ ID NO: 3882 - DNA, 30 bp, Homo sapiens
  chr5:37839337-37839367
  hyper
cattccgggtccaggcgcatctggggctcc

SEQ ID NO: 3883 - DNA, 73 bp, Homo sapiens
  chr5:37839662-37839735
  hyper
gtcccagccaggagacccatccgggctgatggctggagcgcggagccccgcccaacaggtcaggggcaagagt

SEQ ID NO: 3884 - DNA, 412 bp, Homo sapiens
  chr5:37839807-37840219
  hyper
cgccaacagggcgagggctgccggcaactctcccgccgggcccccgcacccccagaagccgaggtccgagcagccgccgctgctttgggtggggggctgacagggctgcgcgcgtcgcgctcttggctggggctgcgcgggcccggggcgctgcgggcggctcagcggcagctgccgcgctctgcgcctcctctgggcgcactgcctgggagcacgagactggtttgtctgatgctgctgccggagctgaggtcttgcctggagatccgaacgagacaccacgtcaaccggcgcggggagtcccgtgaagacatgagggcgccaggagcgcaggctggtcttctagagcccgggctgggggtccggggtccggggtgggggaggggaggcgcggggccccgggagggagggg

SEQ ID NO: 3885 - DNA, 95 bp, Homo sapiens
  chr5:37840267-37840362
  hyper
cgaggaggccctggagttcccgaggcggggggccggggtgcgagtgggcgacgcgaggcgcccctccctgggctgcagggagagcgctgagagcg

SEQ ID NO: 3886 - DNA, 280 bp, Homo sapiens
  chr5:37840529-37840809
  hyper
ggtgcagggcagcgccgggctttcctcgcgcctgtcgaaggccggccttcccgctcgggtgtctcgccctctcgcttctccgcagggcaggaggcagtggcgagaaaaggagctgccggccggagttctagcaccgagaaggagaggtgcggagcggccgggtgagggaagccgagtatttgccaggggacgctgcgagtggggatgaatttatagggctctcactccgtgacgtgccctccagtggcttttctgattcgctttctgacctaaacacaca

SEQ ID NO: 3887 - DNA, 213 bp, Homo sapiens
  chr5:38257400-38257613
  hyper
tcagtcaacattgtttcctcccgcgctcccaaacataggctaactgtgaagagccaggacgcccaccgagtcctggcagcgttgcaaggtggggagggggcgggcgcggtcctgtcgctagtgactgcagatttcctctgcggggcacttcctacggcctttgatctttccccaggaactgccgagggccgcgtttgcctctaagtttattcc

SEQ ID NO: 3888 - DNA, 51 bp, Homo sapiens
  chr5:38257992-38258043
  hyper
ttgccttcctctgccgggaagggcccccactcccccgctccaggccctaat

SEQ ID NO: 3889 - DNA, 30 bp, Homo sapiens
  chr5:38258320-38258350
  hyper
cagggtgaggaccgcggagggtcctggacc

SEQ ID NO: 3890 - DNA, 30 bp, Homo sapiens
  chr5:38258869-38258899
  hyper
gaggcgtcttgctccggctcctgctcctgg

SEQ ID NO: 3891 - DNA, 59 bp, Homo sapiens
  chr5:38259199-38259258
  hyper
tccccgtgtttgaccgcagagagctgacagttgggacagcgatcgtgctgtctcaatta

SEQ ID NO: 3892 - DNA, 30 bp, Homo sapiens
  chr5:38353672-38353702
  hyper
ggtgaggtactgcacagaatctctttaatg

SEQ ID NO: 3893 - DNA, 267 bp, Homo sapiens
  chr5:38556093-38556360
  hyper
gaagcagaggggcacgaaatcacctggcaggtcacctctccgaaggaaaaacatttcaagctccctcccatcccccaggtaacctctggcctcagaactcactgccctgcgtggggcagaagttctgggcgctggagtccgcgtcccccaggacacgagggtgacccaagggcgcgcggagagcggcgggacccggagcggcgctctccggggtcactcccctaggacgctccgcagagctgggagcgctgccccaccccgcccggg

SEQ ID NO: 3894 - DNA, 262 bp, Homo sapiens
  chr5:38556411-38556673
  hyper
cgcccacccgcccccaggactcacggtacgctcccgcgccgctatcttgccatcccctgccgccggctctgtagcctcggccgccgccccggggctgcccagatcccacagccgcccgggggcaggagccgccaaggagggggccgggcacaatgcgccgccgcctccgcagccgccgtctcgcctcccctgtgtcggcgcgaggctgcttgaggcggccacgggcgaagggcggcccgctgcgctccgcgaaccccgcggg

SEQ ID NO: 3895 - DNA, 750 bp, Homo sapiens
  chr5:38556773-38557523
  hyper
cgccgctcggctgggggcgcagcgggcccggccccgcccctgacccgcccctgcccccggccccggccccgccccaacccgcgcgcccccgccgatccccggccgcgcgcccgcgcgcgcgggtgctccaaggagtcggaggaacgcggccgcgcgacgggccccggacgccgagggtggtgcttcctccgagcctccggtggtgaggccgctctcagaaggtcatggaagcgcaggggagagcgaggcggccgagcccaggcaaatcctcgagaaaggccgagtgcgcgacggctctgcggggaggaccgcgcctccccgaatgcggccgctgctgccgctgcaaacagtgccttgaggagaggaaagcggggaaccgtgttttcgccgcctctgtaaccactgcacacaagaaaaccagcttctgggagagggggatgattgttgggactttgcgaattacctaaacagcccagggccgaggcgccgccgctcgcgtcctggtcctcctgccgggtgtggggctcccctgcccgagatggccagcgggcgcgccgagagtatcctggagccatctagtcttgcctcggaggcggggtgggcttatttgtgcggagaagaaacggatctcttaatggggtgagatttttcctccgtacattgttcccatttccgcagtttcacttggcctcggttttctagcagagtaatcaccaaatgaaattagctggagagcgtttgatggcgcag

SEQ ID NO: 3896 - DNA, 504 bp, Homo sapiens
  chr5:38845660-38846164
  hyper
ttgcctgaagattttcggacggggatctcacgggtttggcctctgggttgggatgacaagtgcccctgtgggatacacagccccaggcctcatcggtcactcggcttacctctggttccgccggctggcccgtgcgtccttggccggggcaggagcagcgctgcgcgcggggcacggagcctcggccgccgagttttcggtttccaagtttccttcccaggcctctcccacttcctcttctcaccagtgcccgcccgcccgcaaagtccgggttgtgaggctgcgcctcccccaggatcgcggccgcctccccccgggactgaagggagggaattcctgtgggtcccaggagtgccaagagtgcgcagcaagacgggaaattgcaaaagacctcacccctctgccctcccccgcggttttccagtaactcccgcccctccgcgcttgccccgcagctgattcatagccccggcccgggccgcctctgcacgtccgccccggagc

SEQ ID NO: 3897 - DNA, 30 bp, Homo sapiens
  chr5:39424509-39424539
  hyper
aggagttaattaggcggtcagcagccacct

SEQ ID NO: 3898 - DNA, 30 bp, Homo sapiens
  chr5:39425176-39425206
  hyper
tcgcgctgcagcggcgcagaggaccccgct

SEQ ID NO: 3899 - DNA, 68 bp, Homo sapiens
  chr5:39425494-39425562
  hyper
ctgacaagggacaacggttcctgcgcagatctgcagtttctaaagttgatcgcgcgattggatttgct

SEQ ID NO: 3900 - DNA, 30 bp, Homo sapiens
  chr5:39851507-39851537
  hyper
gcatgagtctggctgttggatccaggttgg

SEQ ID NO: 3901 - DNA, 679 bp, Homo sapiens
  chr5:40680548-40681227
  hyper
tcgtgaggctgccaccgctgctgccgctacaggtgagatggcgttgggctgacgttggggtcaacgggtagagaacgcagggatgcggccctcgccgaagagagccaagaagggaagagcgcgctctccaaattgcttttgtaacttgttttcagtgagcattttattgattcagaatctatcgagaatagcactagcgagctacttttcccttgagatgggtcttattcatcttggcaatggagtgagttggattgtggggaggaagaggaatgggaaaatcagtttataaatattaatgtcagcaagagtgtgctgttggcaggacgtatcgcgagcctggagattttggtggccgcagttggtaagtggctacaatccagaaagtaggatcgagttgctccccttgtcttatcagtgtatcgtttctcgggcgcgggtctaacaccttacaagtggtaatttccgctcacggcagctttgtctctcttctaccatccccagacccagccttgcactccaaggctgcgcaccgccagccactatcatgtccactcccggggtcaattcgtccgcctccttgagccccgaccggctgaacagcccagtgaccatcccggcggtgatgttcatcttcggggtggtgggcaacctggtggccatcgtggtgctgtgcaag

SEQ ID NO: 3902 - DNA, 578 bp, Homo sapiens
  chr5:40681261-40681839
  hyper
cgctggtatgtgggctggctgtcaccgacctgttgggcactttgttggtgagcccggtgaccatcgccacgtacatgaagggccaatggcccgggggccagccgctgtgcgagtacagcaccttcattctgctcttcttcagcctgtccggcctcagcatcatctgcgccatgagtgtcgagcgctacctggccatcaaccatgcctatttctacagccactacgtggacaagcgattggcgggcctcacgctctttgcagtctatgcgtccaacgtgctcttttgcgcgctgcccaacatgggtctcggtagctcgcggctgcagtacccagacacctggtgcttcatcgactggaccaccaacgtgacggcgcacgccgcctactcctacatgtacgcgggcttcagctccttcctcattctcgccaccgtcctctgcaacgtgcttgtgtgcggcgcgctgctccgcatgcaccgccagttcatgcgccgcacctcgctgggcaccgagcagcaccacgcggccgcggccgcctcggttgcctcccggggccaccccgctgcctccccagccttg

SEQ ID NO: 3903 - DNA, 31 bp, Homo sapiens
  chr5:40797553-40797584
  hyper
tactcattaactgctccgaaggaaaccagtg

SEQ ID NO: 3904 - DNA, 30 bp, Homo sapiens
  chr5:40798439-40798469
  hyper
tccccctggcggggcgggcgggggctgcca

SEQ ID NO: 3905 - DNA, 503 bp, Homo sapiens
  chr5:41510363-41510866
  hyper
caaggctacccggcacgcgctcgcctggcctgagacccaccctggaagacgagtttccctcccgcgggcatcgtggcaagttaccacttagtggcagataaagcagggcggggcaggtggagcgggcgccgagcgcctagcccgcagcccctgcgcgcctacctggaatggctaaattggtgagggggatgctgtgcatgctctccggcagagttgccatccagtcggctaatttcagctcgtttttcccctgagacgaggccatcgtgccagtcggcgtgcagcgcgctggtcccagcactcctcgggcaggctggcaggctgctgccgctaatccaatgtttgctctagccccgctagagtttacactcctctctgcgccacacccacaggatggcgcagacacatgctaattttaataattattcaaaacaccccgtgctcccttagtgcctccgccagactccgctggagcttttgttcctgacgtccgtgctcagctc

SEQ ID NO: 3906 - DNA, 507 bp, Homo sapiens
  chr5:41870188-41870695
  hyper
gcaaaggcggtcatccgaggggccggcgaggccaggaacgcgtcgccgcgtgtccgtgaccagggcaccgcgccacggatgccagatcccaggctggagagagcgggtaggggcagagaagaaaacgcgggcaccactcagggtttggtccacgttcttcctgcccatggccttcctcttcccccgcactttaccttgtaccaggttgccccagatccgcgggcagaggcgcagagccgaagcccggaggagaggagtttgagagccgccatcttcgggcggtgaggcaggaggaggctgcgggttggagcgcgcgtttgagcgtcggtgcgcgactgcgaaggaaacccgggcgggctggaggctcgacagcgcgtcgatgacgtcctcccggcctttcgagccgcacgccaccggcgcgctgctggctgctgcttttaaaagaagtgaggctgggcggggccccggcggggagaagaggctctgtgcagccggggcggatcgcgg

SEQ ID NO: 3907 - DNA, 30 bp, Homo sapiens
  chr5:41904441-41904471
  hyper
gaccggggcgcacccgccgattgtggccat

SEQ ID NO: 3908 - DNA, 12 bp, Homo sapiens
  chr5:42423517-42423529
  hyper
ctctaggaggag

SEQ ID NO: 3909 - DNA, 494 bp, Homo sapiens
  chr5:42423573-42424067
  hyper
cgccgggaagacttcatcccagcaactcggaatgcttggcccgggcggcactcggcctctccgcagcagttctcgaactggcctccttgaacgtccgcttcgccttcgcttctgcaacctggatctgggggactgcgggccaggcgcggcgtgacccctggtgaacggtggccgccttttcccacccctgccctcccatcctcccttcccgtttcaccccgccccctctctcctccccaagcctgacagcccgcgagctgccaagcagggcgcagccatgggaagaggaggagggctagggagcggcggcggcggcggcagcggcagcagcagctgctacagtggcggtggcggcggcggctgctgctgagcccgggcggcggcggggaccccgggctggggccacgcgggccggaggccccggcaccattggccccagcgcagacgcgaacccgcgctctctgatcagaggcgaagctcggaggtactggagt

SEQ ID NO: 3910 - DNA, 772 bp, Homo sapiens
  chr5:42424336-42425108
  hyper
ggcggcagggagttgcgggcgacagacgaaccatcacactctggcgtctgctctggcccgcgagtagtgtacgtggaggggtttactccggagacagttttgttaaagtcataaaagttttgctagtgtgtttctgtttgccatcatctgcctggctgcggcaggaactgccgaggctgctgctgttgcgcggggaagaatccccggcagcgcgactggagagactggggaggtcgagctgtgcgcgtggacacagcgcgcagagcgcgcggtcttttgcgcgtttgtgcgggccgcagccgcacgttggcaccgatggaactggggtcagtagagtgacagccaccagtccgcatgaactggggtaagtggaaattgtggcgagccgacctcccccagcttttgacacactagtggttgtaaaatcaaccaggcttaaagttttgacagaactgccagaggctgcgggtcaatggggtggccgcgtgtctagggagagggcgctggcggcgcagagggtgcggggcagggcacttgcgagtgcgtggggaagtctatttggggcgagtgctttatatatagcccgaggggatgcctgctgagaccgagctgcgggggctctcggtctggcgcggactgtgtgtcctgaatgagtgtacgtgtgcgctgtgtgtgcgcgcgcgagtgtgcgcctggggaggcgtgtcggcgcctgagccagtagggtgtgcagggtggaagaggccacagaggtgccgcctgtctgtttgtg

SEQ ID NO: 3911 - DNA, 31 bp, Homo sapiens
  chr5:42949384-42949415
  hyper
cagcgagaaaagaaaacgaaatgaaactgac

SEQ ID NO: 3912 - DNA, 279 bp, Homo sapiens
  chr5:42951032-42951311
  hyper
aatcacattgtgactattccacgacttgaacaaggggtagaaatcgcaggcaccgcgaaatagaaacttcctaggaccaagaagccaacgacgcccgaaaccgtggggtcctgtcacagaaaccccagcagcgcagccaccggactgggttctggaggccgagccgcagtccgtgcggcggcgctgggaagagaaggcgccccggcagctcccctgccaccggccccgaggagcggctggctcccccagcccagcgccgccgccgcccggtaactccag

SEQ ID NO: 3913 - DNA, 692 bp, Homo sapiens
  chr5:42951419-42952111
  hyper
cgaccgagagacctcggctggcgaaatggtggtgccgggagcctgcgagtgacgccagccggcggggttgtcaaggacaacattcgttttgacgcagccaatggcgccgtcaccaagaaaccatcgactctgagaaaaaagagaggttcggccaccgagaaactccgtacgacaagtgctgtggcagaaaaaccgcctactccgcgccacaggcaaaacagccaatggaaaccccaggtgctgcgaccgtgacaccggcactagagggtctcggatggagaaagcggcgcacggagaccaggaaactatgtgtagcacaactagcagaaaaccgtctggtcggccatccgggagaaagcgcggatcagaaacaagcgacttcgatgcagggaaccgcgcagccactgaagaaagtgacccacgtggcagtggtgccagcgaaacactgcagtttggacggcagctgtggggatgccacagagaaacatgcactgccactgaagtacatccagctccgcggagctagtgttcatatgatcaagaaaccgccagttgggctctgctagaaacttttagtcctcccttaacggctatcctacccacaacagacaatgcctttacccagcacctagcggtgctgagacccgcctgggccagcacagagcgcagagcagtacgggtacggagaaacg

SEQ ID NO: 3914 - DNA, 315 bp, Homo sapiens
  chr5:42991926-42992241
  hyper
gccactgacttgaggagggagcgtgggagtaatgtcagtagcagttttttatttcgttttcgtttttattttctagtcactaggccaccaaagaaagttccacccaacggccagtcgatccgtcgcagcgactctcttttccctgaacggagggtttatggctgacacctccacttgtttctcagagccggggctgactgccggctgcatctttgaatggcgaccaaaaaagacatgcatttgtctggcaaagtcgctggcgttcgcctggtgcccgcgcttgccgggtcctagagcagccagattttcacacca

SEQ ID NO: 3915 - DNA, 222 bp, Homo sapiens
  chr5:42992375-42992597
  hyper
cgtcccattctccatccgaggccttctagtcccggtgtcactgtcgcagcacctggcgttcgttagctctttcaccagcggcgcggagcgggcggttttgctgtcacggcacatgtggcacggagtttctcggtggccgaaaccctcttttttctcagagtccagtttcttggtgacagcgctgttggttgcgccataaggaatgttgtccttgacaacccg

SEQ ID NO: 3916 - DNA, 251 bp, Homo sapiens
  chr5:42992782-42993033
  hyper
cgctgggctaggggagcccgccgctcctccaagccggtgacaggggagctgcccgggcgccgtctcttcccagcgccgccgcagaacccgcagaacagctcgacctccagaaccctgtgctgtggcggcggggctggcgtgtctgtcgcaggaccccgcagattcgtctgtcgttggcttgttggtcctaacaagtttcgatttcagggtgcctgcgtttctttttcttttctcttcttttccttttgttt

SEQ ID NO: 3917 - DNA, 241 bp, Homo sapiens
  chr5:42993332-42993573
  hyper
tctatcccctggttcaagtcggggaatagccaaaatgtgatttctcaacccaagcaagtacccacttaggacaaacaccagcctagccctggcggcgatttctaggtcgtaggaagtcgatgtttcgccacagaaaggctgagtgaccctgtgactcatttcccagcaactccgggtttcctgtagcctaatcataacaaacgcagagttagccctgcctcaagtttcttttttctttttc

SEQ ID NO: 3918 - DNA, 355 bp, Homo sapiens
  chr5:42993812-42994167
  hyper
ctcccgacctcagatgatccacccgccttggcctcccaaagcctcaagtttctaagtcgtggcaagttccggcttcctactagtacggcttgctttagctgcgcaggagatgttcaactcctgtagaaatctgtgtaccagcgaatgcgattcatttaggtttagcgatgaccagtttagcagtgcctgggagctcttacaccaaggctagctgcgcaacatcaagtcccgccttagctatgttggtgttttttaaactcccatggaagtcaggaaatgccggcaaaagcgatttctggtttacgaagctcggtttgacgatagcaatttccgccgaacgcgactttttcctctt

SEQ ID NO: 3919 - DNA, 372 bp, Homo sapiens
  chr5:42994610-42994982
  hyper
gctggggagccaagctcggtctccgcttcggtggtttcaggtcccgggttctgtctggcggctctgcttctaatgcggagctggcggttttgcagcaacgcttttgccagtagcgcccactgagcggtttttcagttgctgcaccgttcttagcgcccaacggaacgtttcccgtacgcggagtccataagttgtctgtgtcgtcactttctcggttctggcaccgctagtatctcctaggaacttcctaaacccgttttacggtgcagaacggtaattgcaccgagcctctgtgccaactagtacttccgtaataccgttagccggctcttttcctgtcacaacacattaaaacgtgttaaaacacattaa

SEQ ID NO: 3920 - DNA, 476 bp, Homo sapiens
  chr5:42995072-42995548
  hyper
cgggatggaagcacccctcctaagaatccgcagtttctttctagcagcaccgttatggcgcctaaacggatatttgtttggcaataccagcgctatccgctaggtgccggcgcttgctgagtctcagcgccgccagattcttgctagcgaggtccagagcagtgcagagacctagcggacagttttccggtggcagcaatgctcatttcccggacacagatggtttttggcccctgaagaactctttaatccctgcgttttgtagcgctcgttctctgtaaggtttgcttagtatccgtttcatttcgacttcttttctcgctgtttttctgtcggaattacgatttgttttgtttctatgtgctctctagaattttaccggttttcatttgtctactaattttcgtgcattcgttactattgagtttcataatatctgggtgccctctgcccacgagctccggagagcataaata

SEQ ID NO: 3921 - DNA, 30 bp, Homo sapiens
  chr5:43007525-43007555
  hyper
caacccatgaagagccgctatggtaccact

SEQ ID NO: 3922 - DNA, 672 bp, Homo sapiens
  chr5:43007812-43008484
  hyper
cttgcctaagcatgcctgctgcggattaagagcgcgcatgcgcactgggggaatgggatggagccacccgggattctcgccttatacaaacagggaacccagcctccttagctttcatataaaagcctttgtattcagccgttaaggagcaaccggcaacctgctttcaggacccttgttttttatgagagctttcgtttacgcttaataaattctactccactcactcttcgatatccgcgtgcccacttcctcctgatcgtgagacaaggacccggatatagctgagcttagaagcaaaaatcctgcatcaatagcaaatgcggacactgaacgactagcggagtacccagcggcaaactttagtttttggtgcagttaaggtattgccactaagaaatcgtcgtctctgagaaatatcgaggcttggaaggttgtacagtgcttccaccgagaaagcacctacccaatgaaacgcctgtggcagaaaaaccgagcccaagcccttccagcgaaagtgctgaaagagcgcctcctcggccaatcactgggctgagaccgtgagacagccagcccggggaaagtggcggcgctaggagaggggaagcgttaccacaaagcacttctgagtcttgtgaacaagaaacgttctgggttgttttgtttttgaga

SEQ ID NO: 3923 - DNA, 220 bp, Homo sapiens
  chr5:43008723-43008943
  hyper
ctaggattacaggcgtgagccacagcgccccgccgaaacgttctgttgtgttcagcgcttccagcggtgcagcagccgagaaaacactgagtctccgctattggcgaaagtgctgatgcgaaactgctggctcgacataggcacagagccgcggaagagaaccctagagaccaggcaccagctctgctccccgactcacgggagaaagctagttagtagg

SEQ ID NO: 3924 - DNA, 734 bp, Homo sapiens
  chr5:43017442-43018176
  hyper
gtaggggagggacttgatgtgcggggcaagcctgatgcccgggtcaggcgactgtgcctttcattctccacggagatcttgaacctagagtttccaagttccgaagagatgcggttgtcgacagctctcctagaatctctgatggctctgaacggggacaaaggtctagggcagagggatggtgtggaaggacccagccacggccattggaagagcagtttcctgcaatgtaatgctgtttgcgaccagcataagctttagctctctcccaggacgagccacatccgccccattcacggtccttattccagctcctttccctctgcgaatcacactgggtgggtcgctgggggcctcggtaattacggattatggcacagccaagaaaaatacaggttttcttaagcctgaagccactgacttgaggggggagagtaggagtaatgccagcagcagttttgtatttggtttttgtttttatattctagtctctaggccacaagacaatgttgcacccagtgccagtcgatccgtcacggcgccgcaaactttccctgaacggagggtttgtggctgacatctctagtttctcagagcctgggagtgatcactggctgcaccgctgatggcgcccaaaagaacgcgcatttgtctttggcaacagcgctgggtttcgcctcgtgcccgcgcctgaagggtcctagcgccgccagattctcacactcgcgggtcca

SEQ ID NO: 3925 - DNA, 372 bp, Homo sapiens
  chr5:43018326-43018698
  hyper
cgtcctccagtgccggggtcatggtcgcagcacccggcgttcccgttggctcttttgccgctgcgcggagccggcggtttttctgtcacagcacttgtacggagtttctcggcggccgaacgtctctttttttctcagagacgacggtttcttggtgacagtaccgttggttgcgccgtaacgaatgttctccttgacagccccaccagctggcgtcactcgcaggctccagacgccgccatttcgccaagccgaggtctcttggttgcggcactgcttctggctcggtgcctgtattttctcggtgcctacagcgcccaggtcgccgatctgagggcttcggagtaccggccgggcgcggtggctcacgcc

SEQ ID NO: 3926 - DNA, 390 bp, Homo sapiens
  chr5:43018997-43019387
  hyper
tgggtacccgcgaatgcgattttttttaggtttaccgatgatcagtttagcagtgcctgggagctcttataccaagtttgttttcgcaatattgagtcccaccttagctaagcttgtgtgtattttaaactcccatggaagtcaggaaatgtccgcaaacgcgatttctggttaccaagctccgtttggcaatagcaagtcctgccgaacgcgactttttcctcttgtggaccaagtctgaatagaccagctactgcgatttttaagtcgtagtaaaaaaggtttaaccgtgactgcttttttttgttggtgttgtttgtttttgtttttgttttcgtaggaaatgtagacttaggtgtaacatgtaccggtttagatctgacagagata

SEQ ID NO: 3927 - DNA, 896 bp, Homo sapiens
  chr5:43019697-43020593
  hyper
ttgtgtctggtggctctccttcgtatgcggagctgatggttttgcatcagcgcttttgccagtagagccgactagcgttttctcagttacggcaccgttcttagcgcccagtgtgacgtttcccattcgccaggtccttatgttctctgtgctgtcactttcttggttctcgcaccgctagtatctgctaaagaacttcctaaaccatgttttactgtgcagaacggtgattgcacggagccgctgtacgcactagtaatttcatagcaccgttagctggcgctttttctgtcacaacacattaaaacgggttaaaatactgcaagcggattaaacacattaagaggattaaaacattaaaatgtctcaacacatttttctgacacaacacatttaaacggagtgggttcattcctccgaagaggatgtttaggcgtggaagcaccgctgtttcccaagagcacggtttctctctggcagcaccacttatggcaccaaaacaggtattttttggcaacaccagcactattcgctaggtgccggcgcttgctgagtcccagcgccgccagtttctctttcggtcgttaagtagctcagagccctagcggacagttttcaggtggcagtaatgctcatttcctggaacagatggttcgtggcccttgaagcgctgcgatctgtaaagctagttctctgcaaggtttgcttagtgtctgttttatttcggtttcttttcttgctatgtttatctgtcggaattacagtttgttttggttctatgtaatctctaaaatgttatcgtttttcttttgactactaatttttgtgcattcattactattgagtttcataatacctggcttgcctccgcccacggcctccggaaagcataaatg

SEQ ID NO: 3928 - DNA, 485 bp, Homo sapiens
  chr5:43040738-43041223
  hyper
ttgtaccagaaaaatgtgttgcggcatttaatgtgttttaatccgttcaatgtgtttgataggtttaatatgttttaacccgttttaatgggttgtgacagaaaaagcgccggctaatggtaccacacaattactagtgcgaacagcggctcggtgcaatcaccgttctgcacggcaaaacggggttcaggaagttcctaggagatactagcggttgtaggagcgaaaaagtgacagcactgagaacctaaggaccccgcgaacgggaaatgtcacgttgggtgcagcaactgagaaaacgcccagtgggcgccactggcaaacgtgctgatacaaaaccgccagctctgcataggaagcggagcctccagacagaacccggaacctgataccagcgaggctaagaccgagctcggctccccggctcctgagagaatgaaagtcaagaagcacgaatctgagacgctcaaaattagaagaaaaaa

SEQ ID NO: 3929 - DNA, 1411 bp, Homo sapiens
  chr5:43042086-43043497
  hyper
gagggtggaaatcccaggcaccgcgaaatcgaaacttgctaggactaagaagccaacgacgcgcgaaaccgtggggtcctgcgacagagacgccggcggcgccgccacaggactgcgttctggaggccgagccggaacccgtgcggcggcgctgggaagagactgtgcccctgcagctcccctgtcaccggctccaaggagcgtcgggctccccccgcccagccctgcagcacccatccggcaacgccagactcggcgcaacgggggcagctgcgactttaaatctctcagatccgcggcctgagggctgccgccaccgagaaatggaggcacagagctgtgaacaagagaccacggctcgccgaaatggcggtgccaggagcctgaaagggaatgcagccggcggggttgtcaaggacaacatttgttttggcgcaaccagcggtgccgtcaccaagaaaccgtcgactctgagaaaaaaagagaagttcggctaccgagaaactccgtgcagcaagtgctgtgacagcaaaaccgccggcttcgcgccgctggcgaaagagccaacggaaacgccgggtgctgcgaccgcgaagccggcactagagggcctcggatggagaaagccccgcaccgagacgaggaaactgtgcacagcacgactagcagttgacacaaacagaaaagtgtctcgtctgctctctgggagaaagcgtggatcaaaaccagcaactcagtggagagaaccccgcagccactgaagaagttgcccacgtggcggtggggccagagaaacaccgcgatttcgacgacagccgtagggataccacagagaaacatgcgcggccacagaagtacatccagctccgcgcaatcagtggttctgcgatccagaaaccgccagctgggctagactagaaacttctaaaaaactgtcgtcccatagcagctttcctaaccacgacagacagtcgcctttagagagcacctaacggtgctgagaccggcctgggccagcaaaagcgcagagcggtgccagtgccaagaaacgcccgacttggtgaaaccaaccttgtgaccaccgattccactggcttcgcaggacgcaacgggcgaaggcgcggcggagaaaccgcaggctcccttcaccgattatgctgcgggctggggatggtggggggcacccgcgaaattgtgaaaccagcggcgctgggacccagcgatcagctgcccgtagcaaatgtctgtgcagttgcaaaagataatttttggccgtgagaaggttgccgccagagagcgtccgataacgctgacaaaggcgtggcgttgccagtgagaaacagccggcgctgggaaaggaacggtgcagcgaccgaccaactgcgcgctcggtgccaccaaagtgctactg

SEQ ID NO: 3930 - DNA, 48 bp, Homo sapiens
  chr5:43191960-43192008
  hyper
aacccttgctgaagcgctggaaccgctcggcacgaggcgtacgtcggt

SEQ ID NO: 3931 - DNA, 592 bp, Homo sapiens
  chr5:43192583-43193175
  hyper
cctgggtggctgaggaggaggcgcctctcctccccgcgacccaaggaagaaaggaagccctgccacggggtgtctgcgaagtggggtcagaagaaggttaggcgctttctggggcgtacccccacacctgcccaggccgatccgcaagcgagaggagggggcattagagccagggcgagagcgtgctcgcgcgtgtgtgcccgtgtcatgtgtggtgcccgtgtcatgtgcggcgcccatgtctatgtgcgcgcgtgtgtgcacccatgtctctgtatggtgtggacactcgtgtctgcgtgcgcgtccacacgtgagccgaggagcgcagcttagcgcctagcgttgcgcacagcgggtgcgctggaccagagccctaaggcaccagaccaaatctggagcgtttgttacaagggcagaagaccggcgtgatctccccacgcgcgccggccggtgctgctggtggagagaactgacatctaacgcatgtggcccaggagaacaaaaccttccattgcaccccacgccgcgactctccccagcgaaaggtgcttcttttggaagaccgcacgaagtaaggaagagcctcttt

SEQ ID NO: 3932 - DNA, 307 bp, Homo sapiens
  chr5:43396922-43397229
  hyper
cgcgctactggtatctgtagtcgtggctgccgtggaccaggagagactgaagtggaaaacagcgggcggtagccgaagcagagagcaaggaagagcgcgggaagtgcagagcgacagcaacaagaaaggggtggcgcgggacgtcgtttacctgggcgacgtccagccgcccttcccgcctctgcgcgtacgcaacctgcttggcgccactgacctggtgaggaggcttctttaaggccgtggacggttcctacccgcgcgcggagaggaccgacgtgaagaagctgccaaagtataacaagtacta

SEQ ID NO: 3933 - DNA, 125 bp, Homo sapiens
  chr5:43397305-43397430
  hyper
gcacgcctggacccgggggagccggctggggcgcccaggaccaggcctagcctaccgcgggctgcccttcacagagctgcaggagaaaacgttgtattgtgcacgcattccctaacccttactag

SEQ ID NO: 3934 - DNA, 30 bp, Homo sapiens
  chr5:43556676-43556706
  hyper
tccgtacctgggagcgccccgggccgggaa

SEQ ID NO: 3935 - DNA, 247 bp, Homo sapiens
  chr5:43557518-43557765
  hyper
cacggggggagggggcgtggaccctgcgccagggttcgctggcgcacaggtgtgttcaatgactcggctccggccgagacccgcggactgctgaggagtggtccctgggagactgtcacctgctccgttagcatcgggggaagggagtagaaacggaatcaaaatatgtgtcccctctttaattcaccctaggtgtttaccacagtaggtcacacctacgtttaacaagcttcgttctcttcccgtt

SEQ ID NO: 3936 - DNA, 30 bp, Homo sapiens
  chr5:44388245-44388275
  hyper
gatgtgaagggagcgcgcttaggggagggg

SEQ ID NO: 3937 - DNA, 30 bp, Homo sapiens
  chr5:44388566-44388596
  hyper
aggtgattgtagctccgcacatgccttccc

SEQ ID NO: 3938 - DNA, 163 bp, Homo sapiens
  chr5:44388889-44389052
  hyper
ttagctccctctgggcgcggatctggccagaagtgaatgcaccaacatccataactcctcggaaaagccggctgactcccctcgctcctttctcggatccgctgcctacgcctctggagcctcccggtaaatggtggacgtgggtggccgcagcagcaggagc

SEQ ID NO: 3939 - DNA, 154 bp, Homo sapiens
  chr5:44389267-44389421
  hyper
ggagccccagcctgcgagccacttctacaagtatatccctttggagttgtcagaagtggaggcagctgcccagtcgccgttgttttcttccctctcttcctttctgtttttagtggtgcctgccgatttgaaggctgccgaaagtcactttttg

SEQ ID NO: 3940 - DNA, 30 bp, Homo sapiens
  chr5:44389833-44389863
  hyper
agcgcgggccacggcgctgacggtatcttc

SEQ ID NO: 3941 - DNA, 30 bp, Homo sapiens
  chr5:45695452-45695482
  hyper
cccttgtacaacttcgcctcctcccaggag

SEQ ID NO: 3942 - DNA, 30 bp, Homo sapiens
  chr5:45696577-45696607
  hyper
ctacttctgcccagcgtgacattgaactca

SEQ ID NO: 3943 - DNA, 379 bp, Homo sapiens
  chr5:49736598-49736977
  hyper
tgttacctacgcgcccgactcgcggggcgctgttcgttcaagactcgccccaaagagcgcaggaacgcgagccgcagcagtttcagggttcagcttaggtgacacaaacgtagctaatgggaggccgccgccgactctcccacccgcccttaccagcatccccgcgcctctccccgccacccttgcccggcgcgccggcgatgccctctgcccgcggggacccgagcctcgcgcgccctccgccctccctaccctggaccctgtacccatcacacctggggcactgccgtccgccgagcttgggcgcgcggcagcgagaaggcactggaggaggagcagccggggcgtacgcgccctggcctccagcaggccggggagg

SEQ ID NO: 3944 - DNA, 222 bp, Homo sapiens
  chr5:49737098-49737320
  hyper
cgcgggtaggacgctgaagaaaaggcggaatgggaggggcccggccgccttgccccactcccccgagacgctcttaccgcgcccggccctccatcagttatgcagccctcagccggctgctggcgttcccggatgtgcggtggcggtgctacttcccggctgcagcctctccggcctccgccctctcggctctagcaggtcgggagagagcttgggcaggtg

SEQ ID NO: 3945 - DNA, 264 bp, Homo sapiens
  chr5:50263432-50263696
  hyper
tcccccactcttcctcgtctcccgcccccgccccccatctttctccagctagcctcgccccaattaacgccctacagccagtcagccttacacctgctggaaaaatcttggtggcagtggtgggaggtggtggttttggtttttagcagagcgcgggagcaccctgtcacaccctcctgagaccgccctaggaccgtcctctggaatatcttggagccaggagccagggaggctttcctcagtcccagtcgttgcctgtcgccg

SEQ ID NO: 3946 - DNA, 243 bp, Homo sapiens
  chr5:50265428-50265671
  hyper
ggtcgagggggtgccggggagcggaagggggaggggaaggtctcatccctgggacgctgacacccccctccccgcggcactccagctccgaagagcgagcttcggttccgcccgccctccagaccatttgcttattctcactattgttttaatttattgtgcagcctgttgcgccgcgggcccggctgagccatttggggccctctagatgccctgcagggcgcctgtctccggacgaccacc

SEQ ID NO: 3947 - DNA, 30 bp, Homo sapiens
  chr5:50673738-50673768
  hyper
gctgagaagagaaggcgttgttgacctttc

SEQ ID NO: 3948 - DNA, 30 bp, Homo sapiens
  chr5:50674627-50674657
  hyper
cctgagatctcgggcggacccgtccgtgtt

SEQ ID NO: 3949 - DNA, 30 bp, Homo sapiens
  chr5:50678910-50678940
  hyper
ggcgagggcgcaggcggcgcggccgggaag

SEQ ID NO: 3950 - DNA, 146 bp, Homo sapiens
  chr5:50679249-50679395
  hyper
gagataaggaagagaggtgcccgagccgcgccgagtctgccgccgccgcagcgcctccgctccgccaactccgccggcttaaattggactcctagatccgcgagggcgcggcgcagccgagcagcggctctttcagcattggcaac

SEQ ID NO: 3951 - DNA, 30 bp, Homo sapiens
  chr5:50694089-50694119
  hyper
aggagggggaggggcggcagggaaggctgc

SEQ ID NO: 3952 - DNA, 271 bp, Homo sapiens
  chr5:50694969-50695240
  hyper
ctaatccaaacaaggcgcttgacttgtgaggtcgcgagtctagacagagctggtggctcggcggctccttatctttccctggaatcagccgaagaggcgctccccggcccactccgctcggctcgcccgggtccggagccaccgctcgacgcagacggcacaacaaacagcacctgaggctttatagctcgctttattgtttaatggagaatgcggcataacattcatttgtcttcttggttccgcgacctggccgctttgcagccacaga

SEQ ID NO: 3953 - DNA, 31 bp, Homo sapiens
  chr5:52083829-52083860
  hyper
gtttgcttctacagcccgtggactttagcct

SEQ ID NO: 3954 - DNA, 90 bp, Homo sapiens
  chr5:52285155-52285245
  hyper
ttttccctgctctcaccgggcgggggagagaagccctctggacagcttctagagtgtgcaggttctcgtatccctcggccaagggtatcc

SEQ ID NO: 3955 - DNA, 31 bp, Homo sapiens
  chr5:52285752-52285783
  hyper
ggctcagacaggtgccgcgcctgccagagac

SEQ ID NO: 3956 - DNA, 345 bp, Homo sapiens
  chr5:52776320-52776665
  hyper
agctccccacccccaaggagccgcgcacaccctcgctcgcggccgccctcccacagccccacacactgggagaccgcccaccgcaaaccgcggagacccccgtctagatttaaagcgcggctgcgcccggcttctgacgtccattgaatcgcgcgggcggccggcggcgagcgcggggctgcgccgggatcgctgcgccctccgccgctggcctctgcgacgcgcgccgctcgcccgagccacccgccgccgcgccggctccccgcgccgctgcgctcctcgccccgcgcctgcccccaggatggtccgcgcgaggcaccagccgggtgggctttgcctcctgct

SEQ ID NO: 3957 - DNA, 554 bp, Homo sapiens
  chr5:52778336-52778890
  hyper
ggttatgaaatgggacgaataaaagtaaacagtctagtaaaagtcaatgcaagctgcacgtgttgtgtctgggtcactggtaactgacattgatatggctggggcgccctgtcttctccctctctccctccctccctctcgcccacctcccatctctgtgatcagggcttccccctccactgccttctttttccacccctccacccctttcgatttatttcctacttttctcccgcgtctctctcacttcccctcctccacgctcaccccctccccatccccgccgggtctccttcgctagccacctcgctctccctgccctgccaccgctcactgctcactcacccacctccccacccttgtctcttcacagctgggaactgctggctccgtcaagcgaagaacggccgctgccaggtcctgtacaagaccgaactgagcaaggaggagtgctgcagcaccggccggctgagcacctcgtggaccgaggaggacgtgaatgacaacacactcttcaagtggatgattttcaacgggggcgcccccaactgcat

SEQ ID NO: 3958 - DNA, 110 bp, Homo sapiens
  chr5:53813488-53813598
  hyper
cctggcaaggggctctcggccgtggattagcgcagctggagacgtgggaggccgcgggccccgcccccgaccggcggcggctgcggcggcccagcgcggcagtcggcgct

SEQ ID NO: 3959 - DNA, 108 bp, Homo sapiens
  chr5:54469035-54469143
  hyper
ccggcggggcggcagtcggcgcgggaatccccctcgccggcttcttattggccggcgccgcggtgtcgtcagagcccgggtgggattccccggcgcgcgccgcggccc

SEQ ID NO: 3960 - DNA, 552 bp, Homo sapiens
  chr5:54472200-54472752
  hyper
tcactgtattcaactaatttccgagcagtgcaaaccggagagctccccattcccagcgccaacggcaggtttgcgcgcccctccggcccgcggttactccccgccctgctccaggctggtgcctcgccctcagcccgctcgcgcctggctacgcccgcgcccgcgcccgctcccgcccctagcttctgcgcgccgccctgcagcccctgcgcgcgcctactgggccaaagggacggttgggagtttgctccaactgtccctggggcacgccttccccgcccagcaggggttggggaacgcgagctgggagtgtgagggaaagcgccacgccagtgggggctgatacagctccagcctgtgcggggcaggcgttagactgcagaaggggagagcttaggataaccgcactcaggtggcgcaaggaagtcagccacgaagaaaaagaaagggaaggaaaaacatcgtcccagactgataaactctctgctccccggtgtaacgtcgctcagtatagcgagagcatggatggacgaatgaagccctcttgatgca

SEQ ID NO: 3961 - DNA, 352 bp, Homo sapiens
  chr5:54516328-54516680
  hyper
ctcactgtggctcaggttcaacgcgctccggctgcagtctgtgcgcagcccccggaaggcgccatgcaggttcccgggcctggtgtcagtattcgcgggctctggcagcagtcggggccgcttgggatcgcggctctgaagggcttcatcgcagcgctcggaaatctccctcaggatggcgtccacttccgcgcaatcctgccccgcagcgctgaccaactcctccaggctccttttggccttcgccttgagcaggaagggctcggccgccgccccacaatcccgggactgtgtgatcatcagcttctacgaaagacagggaagagcgccgccctggggcctgccggaccct

SEQ ID NO: 3962 - DNA, 138 bp, Homo sapiens
  chr5:54516831-54516969
  hyper
cgccccacttacatccagcaccgaggccaggtgccgggttcggctggcgagttccttcagctgcacgttccgctccttgagcgaggcgatctcctcctgtttctgggtcaatgtcacgtgcagctgcaggaggagacc

SEQ ID NO: 3963 - DNA, 53 bp, Homo sapiens
  chr5:54518579-54518632
  hyper
gtagatccagcggttcgacttctccacgggggagagaaatgtcctaaatatgg

SEQ ID NO: 3964 - DNA, 155 bp, Homo sapiens
  chr5:54519133-54519288
  hyper
ggaacccagcaggcttgcactgccacggtggggagcgggacgcacggagcacgacactgactgggggaagggggcagcagttcgcggctcctgcagagcagctgcgtggcgggaatgggtccttccaccggcggtgcggcggccctgcgccggct

SEQ ID NO: 3965 - DNA, 185 bp, Homo sapiens
  chr5:54519382-54519567
  hyper
cgactcaccagcgaccggccaccgagccgccgctgtaggagctgagagcacgtcttgaacaccggatctttccacccaagacccgacagcgtgcaggggcctcgagcagtaatttgaggccgcgtttcccgccaaggtttggccccagctaaccgccccacccatgcaaccgagcgggaagaaag

SEQ ID NO: 3966 - DNA, 313 bp, Homo sapiens
  chr5:54527322-54527635
  hyper
cgcctccgggtggtctcccagtcgcaagtccacgggccgcgagacccgcagcatgcggtccgccagcgccaggcagcagatcgccaggagggaaggggagtagctggtgaaggcatagtcggccagactcagctctgccaccccccgcgccagggcttgcgcttccagagcttcggaggcctcagcctgccccgcctccacgcgagcgtgcgtgaaatgctccaggaagaagctaatggtgggcgcacccagggtgaagtgcagcttgtgcagcacgatgcactcgaggttgcagagctgctgccgggagaag

SEQ ID NO: 3967 - DNA, 22 bp, Homo sapiens
  chr5:54527844-54527866
  hyper
cgcagttgatctaactactgtc

SEQ ID NO: 3968 - DNA, 239 bp, Homo sapiens
  chr5:54528097-54528336
  hyper
tgcgcgctggaaagacgggcggccagggagtggcgggggagtttggctgcgtccccagatgccgcgtgtacctgtttgataccccaggtacctgtttgcaagcgatgagcaaggaggtgaccccaagcagctggaagcagtctgcagccaccggcgtggtggtgaggaagcggtccagagtgttcaccgtcaggcacagcgactcgaaggagaggccgaattggcggtgcaccgggatc

SEQ ID NO: 3969 - DNA, 30 bp, Homo sapiens
  chr5:54528550-54528580
  hyper
gggattgggacctggcgctgtgcagagagc

SEQ ID NO: 3970 - DNA, 196 bp, Homo sapiens
  chr5:54529890-54530086
  hyper
gatcctgagttccaaacgaaagtcgggctagaattctgtcgacacgggaaaagttttcttcagtgacccaaacaagcaatagtgttaattcggttgcgtttgtcggttttgtttcggtgggtaccggagtagccagtgcccttccttccgccagcctcggggagcagagcctcagaagggccgtttgtgctgcgga

SEQ ID NO: 3971 - DNA, 293 bp, Homo sapiens
  chr5:56110247-56110540
  hyper
ggactcacaacgcagcgatgggcagccaggccctgcaggagtggggacagagggaacccggccggtggcccgaccctgcagggaagaaggacgtgcggcgagaagcatcggattcggggagggccgggacctggccgagggtgacattaccgagcacttcctggcacagcgctggtcccctccccaaacgcgctatatgtggttctgtacgggactgcctttcccaaagacagccaaggaaaaactaaagatcgacggggacacccgcctcccttcctcgccccaacggtttc

SEQ ID NO: 3972 - DNA, 292 bp, Homo sapiens
  chr5:56246764-56247056
  hyper
agaagcaaaacccagagcagtcggctggcaccatcagtcccccatccctggcatctccggagtcctccaaatcccacccggctctccgaagccccaaacaactcgaaacgtaacacccttttctggaacgaactcgcgttctgagcacctagttcgcccctggggcccgggagccccaactccgaagccgatctcttcccctgcagcgtaggccagctcgaatcggacactcgcccccaaaccaaagcgcgagccccccatcctctctctcgagtccagagatgcagctcct

SEQ ID NO: 3973 - DNA, 82 bp, Homo sapiens
  chr5:57755374-57755456
  hyper
gtgaggagcccacctcgcgctgggatcggacccccgaaaaacccggaagcggcgggcgagggaccccgcgggcttgcccggc

SEQ ID NO: 3974 - DNA, 51 bp, Homo sapiens
  chr5:57755844-57755895
  hyper
agccggccgtggtcctcgcacccttgcctctggtgccgactagcacccaac

SEQ ID NO: 3975 - DNA, 31 bp, Homo sapiens
  chr5:57756573-57756604
  hyper
gggccgatcggccaaccgtgccaggatccca

SEQ ID NO: 3976 - DNA, 1244 bp, Homo sapiens
  chr5:57878173-57879417
  hyper
aacctcctttgtagcgagggcacttgagaatttctgaacctcgagttgtaatggagctgtatggaaaggtaagcaggcgaaaggagttccttggggtgcttagccagaaatctcgctttcacgcacttcggtgtgcgggttgtgtgtgtgactatgtacgcgcgcgcgacttctcagtgcaattatgcggataaaccactttccttatgtgtgtaccgttaatcgtctttctcccctacgtttggtgaatgagattgtaaaactgccccactctgcctaaggaaacgtagaaactttcccgattcggatggggaggggtagggcggagagtcccagagaccagctctggcttcgtttgcattggaaattagcacaaggtagtgttgtttcctaatcagaaaatcaccatctacttccgaaggcgatagttagcaaagaaaaatctccagctgagataagctggggtcacattcgcctgcccctggcgaggaaaagagcaggggagactgggagaggtaacccaggagcgtttggaaaggagtagggaggctccgcggccgagcccgactggcggatcgagcctgtttaatggtttgcttgcttgccgggagttgtagttcaccgctcgcccgtttgccgggaacacccggagggcgagactacagctcccaggagtgcacggggctcctcggcagtacgcgtgtgcggcgccaggagaggacagctccagtgctgatgttggagccggttagcgaaccccaagagtgcagagtgtggagcgtggagcgccgggactgtgcacgcttgaccggaagcccagaccagtgcggtcctagccagagagaaaggacatttgccaacaatgagacacgaagcgcccatgcaggtgggtccataaagaaagagtggcctcgggaggaattgaaagagatgcttttccccttgctccgcgcacaagcagttcaacgtaaggaaaggtctaggcggtcacccgcggagatgcggctctgtgacatgaccctgggaacagagttgggtttctttacgctctgtgtggctgtgattggggctgtcttgatgagggatcgggctattcgcaatctttctaggctctgtaaagaggataagagtgtctgtctaaaatgaaaacccaagcaaacaaaagtcagaggagcatgcaatctcgtgttggcattgatctcctctcttggcatccggggtttgagatcgcggtgaaaactcac

SEQ ID NO: 3977 - DNA, 1027 bp, Homo sapiens
  chr5:58334874-58335901
  hyper
cctgccataccccgccatgctcggatgcccggtgccggcacatgagggctgctccttcatattgcccagcccggcagtgcaacgggggcggaggctgtgctcgcggggcggccggcctcggggaggcacggtctctccagcttggcgtctcgggtcggcctccagggagggcgtgcaaagagcggcgagccaactttcacacagcgacgcgagcggaaaaaccactatgcgacttttcaactgtgcggcgggcccgagtcccagtccaggagcccggctctagcggatggcgagggggtggcgagcgcgcttgggtgcccgccccgcagaggagcgtctggtccacagccggatctcctcggtccccaacccggagccgcggccccacgcccgccccgcctgccgagccttctgcacggcacttgaagtgaatgaatcagccgcggccgggtgcgcggccaccacgtttcctgttttctttctcaactcctcgggcggcaggcgcagcgcggctccaacgccgcagctttccgggaacactccccctcacgcccctctcggccctcggcgctgcctggctcctcctcaacccccttacgaaaagattccgaattgcaaaagcctgtccctgtccgtgccacccgccgcgtccttcccctcgagctctgccccgggggccccgccacctcgcagtgccatccccccggcgcagccgggcgccactcgctttgaagtgcagacgaggaggcgcgggcgcgagcgtgtgtgtctgtggggctgctgtgggactgtctgtgctaggagagcggcggaaaacccggcgtggagcgcctgcagtccgccgtccggggtcgcgcccgccgcggggctcaggagggaccggcacgcaggcgcgcacggccgcgcacctgtctcgctagaaccccgcgcgccccgccgagccactgccctccaggttgcccagaccgctggagcctctgcgactccacgaccggctgcttcctgcgaagtttcacaaacaaggtta

SEQ ID NO: 3978 - DNA, 144 bp, Homo sapiens
  chr5:59188067-59188211
  hyper
ctcatttccttggagaagcagcggtcaacttctactaaaactcccggttgataggcggcttccctgccctgtcttccggagcacttacgttaaggggaaatcactataatcaaatctctacgtcttgcctgctgctaaaacaag

SEQ ID NO: 3979 - DNA, 59 bp, Homo sapiens
  chr5:59188275-59188334
  hyper
cgcacacaccgacacagtgtaactcccacagcgtcctcgctccttctccctccctcacc

SEQ ID NO: 3980 - DNA, 860 bp, Homo sapiens
  chr5:59189297-59190157
  hyper
aggaggcggaactggggctgccggagcgggtactggtggtgctgctcgtgcctccagagatgcttgggggctttgagcgtggccccgccggcgctgtcgctgccctctccgctgcccgcccgggccggcgcgctgctgccctctgcctccatcctggctcgcggctccgcgacctgctgcccagcccgggttcaccgcgctggcccgagcgccttcctgatgctgctgctgctgctgccgccgccgccgcttctgcagcccagcagaggctggtgcttagcttctcacttgaaggcgccagagcctcagggctaccgagagggggccctgccagcgggaggggtcacagaacgcggcagggctccttccaccgaggctatggcagagacacgctcccgggctccccaagtcaccaagactagggtgcgcggtgcccggtttcgccagaggttggtccttcttcctccctttcttcttcccttcctttgggcgccggcggcgagagcagggattgtcagcaactcgggctgcagaagcagcagcaacggcggcggcggcagtggtagccgcctccagggcaccggaaccctgatcccggagctgctgaaaagttggacagctccaggctggcacgcccgagctgtgactttcaccaaaaccactccagccagtcaggagtcagacctgtcctcttgatccttcccctcgccgtgcccgcgcctccctcctccacactgctccccactgccccggagccttcctcttcacctccgcttgcctcagtgctcttagagaaatggagtttggcgattcctggctggttctcagagcttgttgacgatgagccccatgctggtgct

SEQ ID NO: 3981 - DNA, 31 bp, Homo sapiens
  chr5:59506983-59507014
  hyper
aacgaaaccgtcattccggaaacacagctcc

SEQ ID NO: 3982 - DNA, 30 bp, Homo sapiens
  chr5:59995339-59995369
  hyper
ctcttcatctggatcggtgctgacagaaac

SEQ ID NO: 3983 - DNA, 30 bp, Homo sapiens
  chr5:59996225-59996255
  hyper
ttcccagatttctgcgtccgcgcaacacaa

SEQ ID NO: 3984 - DNA, 31 bp, Homo sapiens
  chr5:60626140-60626171
  hyper
ccagaaaaatactggacggatatacaaaaac

SEQ ID NO: 3985 - DNA, 30 bp, Homo sapiens
  chr5:63257539-63257569
  hyper
catccatgcctgcgcgcccggcgcgggaag

SEQ ID NO: 3986 - DNA, 90 bp, Homo sapiens
  chr5:63257798-63257888
  hyper
gctccaggatctcccggcggcggagaggtggctggaacgtctgtctgtcgctgtccattttactttgccgctcccgaactggctgccgga

SEQ ID NO: 3987 - DNA, 294 bp, Homo sapiens
  chr5:63461427-63461721
  hyper
caagggagaaaaactttcccacggttccgtctggcccgcggcgcttgtctgcctgcgcggggtcaaagcccggcgccgcccacgcgcggctcgggtgggaacccgcagacgtggggcgagcagggccgctggctgtggcgggcgagcgccggggcgccacgtccgaggccgcggggtcggggctgcaggcacagctcgagcgctttccgcggggtttggctcctgtcgcttcccgtctcgccgaaccggcatcgccgccgccggagccgcagcgagtcctcagagcctggctgc

SEQ ID NO: 3988 - DNA, 433 bp, Homo sapiens
  chr5:63801871-63802304
  hyper
aaacagacaagcccttagagacgagggatcaaggcagccgattagagccaattgcttgctttggggacggccagtccttccaggcctggcgacagtggagggaggggaaagacgaaccgagtgccgctgcgggaagacactgaagcaagagcgacacccctttccgccccccaccttgcagcgcaggctttgaaagctgctcccccacctgaatggaaactcggaaccgccgggcggcgcgttccttctcgcccagccttgcaatccatgccgagaggaaggcagtgcgagcccgcgccagcgcccagctcccgggacagggtcggcaatgctgctgagcagaacttgatcgcgctccttcctcgctgctagtggaagcgatgctgcacggcacagctagcgcttccccggctctccttcaagctgaaggtta

SEQ ID NO: 3989 - DNA, 313 bp, Homo sapiens
  chr5:63802339-63802652
  hyper
cgcgcctcaggtccgggctccggctgcttggcggcggcgcccagggcaacaaccgggccgcccgcgccggggcgcactgcaccagcggcttcggcttggtggatgtgtatgcatgagttctgcaccgaatgggcgcaaaaagcgccccagccggtccacccgctcctcgatcttccagatcagcaagcccccgctgcagagcggagattgggagcgcaggggcagcggctccgagagcgcccacaaaacccaacgagccctggacgactgcaagatggtgggtgaaaactgcgcctcttttttttttttttta

SEQ ID NO: 3990 - DNA, 412 bp, Homo sapiens
  chr5:63986115-63986527
  hyper
gctctttctggcatcgagtggggacagctaaggtctccaggctgctgatgaagtgagggaaagtggaggagagtcggcgccgagatgggcggataaaaggagcgaccgctcagcagcgagagggagaggcgagagtaaggcgcccagacaccatgtggacaaggggaggagagaaatcagaggtggcgcgcgaaggctgagcgcccaggcagccagagcccagatcggaagagccgagtccgggcagaggggtccgcgggctctggaggtgctggacgggtgcgatccgagagcagaccggggccctcgcgagcctctcccggcccctgcccgcgatgagcgaggccagccgactgtgctccggctactacagcctcaaccagagcttcgtggagcccttccagtgcccccg

SEQ ID NO: 3991 - DNA, 464 bp, Homo sapiens
  chr5:63986569-63987033
  hyper
cgacctcaagtactgctgcagcgagccgggcagctacttcccctacaagcacagctacatgtggagcctcaggtgggctgagagcccgcgcgtgcggcggctggccgagcccggggctagggaggcgacaagcggagccacgccagggccagggaggttcccccgcgtccccgctatccgccctaggttaggtccctacggaaggacgcggagcctctgagggcgggtgagggcagggagagaaatctcgccccggctcggagctcccccgggagccaggacaggaggcgaggcgcacgctggaggagcgcgggctttgcgcccagggcgcacttggggcccgcctggctggccccgctgagttccccgcccgcctcccgggagccgactgctctcccctcgccgggaccagtcccaggctgatagccctactggtggagcgcgaggacaggaagataacccaa

SEQ ID NO: 3992 - DNA, 30 bp, Homo sapiens
  chr5:64331502-64331532
  hyper
cagcccggtcgcggcgtctgaggttgcaat

SEQ ID NO: 3993 - DNA, 30 bp, Homo sapiens
  chr5:64398968-64398998
  hyper
gccattgctgcggccgctgtttgttattaa

SEQ ID NO: 3994 - DNA, 30 bp, Homo sapiens
  chr5:64777663-64777693
  hyper
ctagatctcactaccggcccccagccaact

SEQ ID NO: 3995 - DNA, 30 bp, Homo sapiens
  chr5:64858833-64858863
  hyper
atctagttggccggcgataagggtttcacc

SEQ ID NO: 3996 - DNA, 30 bp, Homo sapiens
  chr5:65017281-65017311
  hyper
aagctggaagctcccggtcatgttcattca

SEQ ID NO: 3997 - DNA, 30 bp, Homo sapiens
  chr5:65893150-65893180
  hyper
atctggacatctggcgtgtccccacaactc

SEQ ID NO: 3998 - DNA, 190 bp, Homo sapiens
  chr5:66124998-66125188
  hyper
tgatgcactgatctggcatgccgtcaagtgtctgggaagtctgtcgaggggtagcaactcctttcaattctgggaacgcaggactcagttttgtgtcgggatcaacctccgctcggcggcatctgtctgatcgccttgcagttgtgtgcagctgctgggaattttccccgtcagtgaaatgaaagttttt

SEQ ID NO: 3999 - DNA, 1068 bp, Homo sapiens
  chr5:66299575-66300643
  hyper
ccctttcaaggtctaacgtacttgaaggggcaatacttgtagcatttgccacataaatgccaggtagtgtctttccacatcggggctcaccattacctagatctgtagttgccggccatgaagccaaacaggtgtgcaccgtggtcattgatggaacagatgtaaactcataaatttagtttactgaggttttcggtgagtgtggcttcccgtccgcgtgcttttcctatacaaccagcggcgtcctggcggaggagtcactgtggacttccccggagcgttgtcactgccatccctcccgcggtgaatcacaggtcggcctcaggtgcgcgcagcacacacccggagcagccgcgggtttatttatttatttccgggacggatccattccgggctccggggagggggagcggcggcccaggctgcggggctgtcccggcaccggctggggtcgcgccgcggccgcctgctccctttcccgtgagcccccgctcctcaggcgcggccggggctggtggggggtgggggatgcaggaaagctgggggcgcggccaccaagctgtccagggacaaggccctgccgcctcctcccagccggaccctggaagggtccacaaaggtgtcaggttcaagtcctccaataggcccattttttaaaagtgcttttaagtttccgcttttttcaggaggggagggcaagagcagctttttctattcaaattcttttccttgtatgtagataccaaaaggaaactcggcactgggcatgttcggatgtgaatggttttgctgataagcaacagcctccggaaccaaagcctcaaaatagtcgtctcccccgcccctcgcagaagcggcgagtggtatctgccaaacagatgacaaagtacctccgactgaatcccacagacagcgctttgagcagaacgcacggctcaactcatgtaattactgtttatagctggccgagcctgactaggagagggcagacccgagaggaaatcagtttcccggacctttgagaggaggctgtgtgttaattaaaggctaggacgggacgggtacttc

SEQ ID NO: 4000 - DNA, 105 bp, Homo sapiens
  chr5:67584207-67584312
  hyper
gggagacgtgcgagcgcctgggctcctttcctccccgatacagtagcgaaatccagttggcttctcaatgaggagccggcagtgagcggcggtggcccggacgca

SEQ ID NO: 4001 - DNA, 102 bp, Homo sapiens
  chr5:68179310-68179412
  hyper
ctaacagatttagtgccggattacaagtgagagctctgcagaggtaggagtacccaaagaacccaccaaagtgccccccaagacaatcggcttcaaatgcct

SEQ ID NO: 4002 - DNA, 30 bp, Homo sapiens
  chr5:71015508-71015538
  hyper
gcggctcagagacccgcggtcagtacctgg

SEQ ID NO: 4003 - DNA, 789 bp, Homo sapiens
  chr5:71403030-71403819
  hyper
aacggctggaagagcggaggcagccaccgcgtgaggatgtgccgggtggtcctttcctcctcctcttcctcctcctcccggctccctgcctagtctccatataaaagcggcgccgcctccccgccctctctcactccccgctcctctccgccgcgcactctccgcggcgctgggagagggcggagggggaggcggcgcgcggcgccagaggaggggggacgcagggggcggagcggagacagtaccttcggagataatcctttctcctgccgcagtggagaggagcggccggagcgagacacttcgccgaggcacagcagccggcaggatggcgaccgtggtggtggaagccaccgagccggagccgtccggcagcatcgccaacccggcggcgtccacctcgcctagcctgtcgcaccgcttccttgacagcaagttctacttgctggtggtcgtcggcgagatcgtgaccgaggagcacctgcggcgtgccatcggcaacatcgagctcggtaagtggccccgcgcccccagagacgcgcgctgggagacgcgcaaacacgaccccacccagggcgcgacggtcactgcgctcctcccgcgcgccccgcacccatgcctctcctcgtcacctctcatacttggtccagaccctttctgggctaattaagaataatccgaattattagatatgagacccagagggagagtctccaataaccttgagggatctgtcaccacgctgagtccgcagcctgtgctgagttggccaccgcctctcccgctaag

SEQ ID NO: 4004 - DNA, 30 bp, Homo sapiens
  chr5:71404178-71404208
  hyper
gcccgcctcgctaccgcccttggggccttg

SEQ ID NO: 4005 - DNA, 30 bp, Homo sapiens
  chr5:71404727-71404757
  hyper
gcagccccagcccgcgctctattctcctgg

SEQ ID NO: 4006 - DNA, 31 bp, Homo sapiens
  chr5:72113362-72113393
  hyper
agtctgttatcttaatcgctaatcaggatgg

SEQ ID NO: 4007 - DNA, 56 bp, Homo sapiens
  chr5:72415866-72415922
  hyper
cacagggctgctgggtgtagtcgccccggacctcgcggtggccaaggccaaggcgg

SEQ ID NO: 4008 - DNA, 306 bp, Homo sapiens
  chr5:72416022-72416328
  hyper
cgcgcccctatagaactgggcctcaggcctcgagggggagcgggcctcggcgggcggggcgcacagttccgccagccggcgggggcatctcaactcgccggccccgccaggtgtgcgggccaggcagccgtggaaggtgcccatttctcccagattcctcgcgcgcacggccacgagcgcggaggctgccaaacccgccagccctgggttccgaagccgcccctggctctccattccctcgcgggcgcgccccgggcccccagtggcggccagctcccaccggtcgctcctgcactgccctgccct

SEQ ID NO: 4009 - DNA, 30 bp, Homo sapiens
  chr5:72529647-72529677
  hyper
aaagcttcctccctcggtcaccgatccagg

SEQ ID NO: 4010 - DNA, 30 bp, Homo sapiens
  chr5:72530171-72530201
  hyper
ctgcccaaggcgagcggcccagcctccggg

SEQ ID NO: 4011 - DNA, 72 bp, Homo sapiens
  chr5:72594764-72594836
  hyper
ggaaaaaaagagaaaaggcaccgggcacggaggtttaatgtgaagcatgtgagcggggctcagtttacaggt

SEQ ID NO: 4012 - DNA, 149 bp, Homo sapiens
  chr5:72594867-72595016
  hyper
cggcctcgaggatttcggggggtttgcgccgccgaggaaaccctacccggacgaggcgagcagcctggtggccctggcggccgcgagctcccggctgccaccgctaggcgcccccgcccggcccgccggcgctccgagggcaaacccgg

SEQ ID NO: 4013 - DNA, 314 bp, Homo sapiens
  chr5:72595046-72595360
  hyper
cgcccaaggaaagggcttcccagtcaccctgcggcgacgcttctccctcccgggaatgacaccttcgctcgctttcacacagccaagccgttggagaggcagaaacagtgggtcccgagcccgcaggagaagttcccatcccgcccctctagccctcgggcgttggcagtggagtaacaaagacgctgccgcgccgttgaccccgaagaagctctgatgaaaaggagggcgggccgcgggataggagtttctacaattagttttttctgcctttacgttcccaagaagaagccgaggaagtagaaaggagagag

SEQ ID NO: 4014 - DNA, 65 bp, Homo sapiens
  chr5:72595656-72595721
  hyper
gccgccggacaatggcgcagacctcacacgggggcaccgcgccttcccccagccgtgctcggctc

SEQ ID NO: 4015 - DNA, 41 bp, Homo sapiens
  chr5:72595773-72595814
  hyper
cgaaccaatgggcagaccggggagagcgggacgcgcaggag

SEQ ID NO: 4016 - DNA, 149 bp, Homo sapiens
  chr5:72715198-72715347
  hyper
ctcagaaatgtgccctaccttcggccaaagaagagaacctcttttccaataaatatttggccgggtagtggggagggggcgccaagagtaacaaagggagccagcggcctggtttgtttggattgccgggccggcgcgggagcggccgg

SEQ ID NO: 4017 - DNA, 105 bp, Homo sapiens
  chr5:72715590-72715695
  hyper
cggcccgggggagggcgaggcccggctgcctgcgctcgcgttcccaggccctcggaaccgcgcgccctcgaggccgagcgagccccgccgcgccgagcctcccgg

SEQ ID NO: 4018 - DNA, 105 bp, Homo sapiens
  chr5:72715730-72715835
  hyper
cgcagtactgctctcccgccccccggagccgagcctcttcgcgttcgcaccgtgaaaggaggggagcgaggggttagccatctcgaacatttttaactaatcaaa

SEQ ID NO: 4019 - DNA, 40 bp, Homo sapiens
  chr5:72732869-72732909
  hyper
cggctgttgggtgatgtgcccgaggtttctctgcccttct

SEQ ID NO: 4020 - DNA, 659 bp, Homo sapiens
  chr5:72733012-72733671
  hyper
gctcgccacagccggcgggaggcggggaagggagcagcccgggtggcttggagaacactgaacctttaattgggctataaatcagacaggggagtgcggtggagtttatgcaggtgtaaaaacagaggggaaagcccgggccgagcagccaaagcgcccgggcaggtcagaacctccagcaaactaacatcttgataagtccgctgacaacaaaataaacagtggagaaggctggagggcggggggcgccgtggcccgcggctggttcgcagcagctcggcggccttctgcgaggggaaggcgggccgctctcggctttgtgcttggggctttaggaggggggcggttggaggagagagagaagccgaattatctccctttccgcgtctcattcccgtggatggagggccccgggagcgtttgacgatggcagtttggggcgtgcgcgctgcctcgtcggcccctacgacgtcaggcgccggagctgccggggccccgggcgagcgggcagcggcccccgcgtccctcccggacacagcgccaccgagaggccgagcctcccgctcctgttgccatttcaagggctgacgcctggaaaacaccgccaggcccctggccgaaggaggtaactaaccgagtcgaaacggcgatcagaaatt

SEQ ID NO: 4021 - DNA, 2381 bp, Homo sapiens
  chr5:72742463-72744844
  hyper
agttgtttttcatctgccaaacgtcaagggagcctctagtgcctggacagggcggactcccttccccggcaccctcttcctccctaccccaggtcgggggttggggggctgtagcataggtcggctttgcataaatagagggacccgcagagccaaaaggcgcgcccgggctgttgacagttttgtccgagaattcgcagcggcgaaaatgggcgcgcgaggtcgagaggggccgcgcctggaggagcgaacaaaacaccgaaccaccaagacgagaaaaggagccgggattcctaccttcttcctcgagcgcgctaacatagcgttattaacaattggaaatcctagcagtaaagttctcgacactggacagggcagtcccttggtgcagagtccccaaggcggcggacgaggagactgaggaggcggcggcggccgcggcggccacgagggatcgggtgagcgcggccgccgggcccacggccgcctgcgccgcgcagcctcctccgctggatccgggagctggcggcgccgccaccggcgagggcgagggcgaggcctgagcggcggcggcggcctgcgcggcggcggcggcagcggcggccgggcccaagctgcccccgatgatgctctcgatggagaagggcgagcgcgccagcgctgaggcgcccgggccgcccgccttggccgcggaggccggcagggggccgggtagggcggcgccgagcgggtgcggccggtagccgaaggcggtccgggccagctcggcggccgcgccgtgcggtggcgggggcggcgggggcgagtgcgggtggaaggcggcggcggcggcggcgcgctgcggcggcgaagagggccgagggcggcgcgtaaggcggcagctgcaggccgtagccgcagccgtaggggccgtagccgtaggcatgcgggggcggcgggggcgcgggcgggaagagcgcggcggcggctgccgggtcgcccgcgccccctgcggctcccgcgccgcgcagcagcagagactcggcggccgcggcgttgggtgggagcagcggctgccgcttgaagcgcttcctccggcgcaggaagctgccgttgtcgaacatgtcggcggactccgggtccagcgtccagtagttgcccttgcccgggttgccgggctcgcgggggatcttgacgaagcagtcgttgagcgagaggttgtggcggatgctgttctgccaggcggggaacttctcccggtagtaggggaagcggccgctgatgaactcacagatctcgctcagcgtcagccgcttcttggggctctgcaggatggccatagtgatgagcgcgatatacgagtagggcggcttcaccagcgggttcttggcgccgctacccgcgctcccgccgccgcccgcgccgccgccgccgccgcccccaccggctcctgcccccgccgccggggccgggcccgggggcgccggggagcccccagcaggcggggccagcaggatgtcatcgtcgtcctcctcctcctccagatcctccagctcgtcctccccggcgtacgagcgccgccgccgccgccgctgcgcggggacagccagccggggcccgccaccgccgccctcgtcgtcgtcctcctcttcctcgtcttcttcgtcctcgccctcccccaccacgtcgatgtctgtttcctcggcgaggccagaggcatcggacatctcagtgctcagggtcatagctgtggcgcggcggcggcggggcggcgcatgggggcgccgggctccgggctccctctgcgccccagcccgggtcccgggcggcaggcccggccggggggcgccacgctgggggcgctgcgactgcggctgccggagctgcgccggggctgccgggtggcggcggagtctcgcgcgccgactttataactcctgcgccgccgcggtagccgcgcggatgctgcgctccctgggctccgctcgcgcccggcccgggcggaggacttgaccttctcctctcggagcagcttttgccccgtcagctgaggagggggtggcggggcccgggcgggcgaatcagaacgccaggcgcccaggaacgtgcgggacgggtgagagtctaagaacagagctcggcgaggccagggctgagtccaggagagggcggaccttcctcggcttatagcagaagggggcctgtcacatggtgtgcacgtcagagcgctgccgagggaaggaaagcaagcctaggaaatcagcccttctcgggagagaaaattcacccgtaggagggaggcagcagctgagaagagtggggaggagaggggacctcactatttcttgccaaagaggctgatgcccgaattacgcggctgtctgcaccgagggccgctgcac

SEQ ID NO: 4022 - DNA, 498 bp, Homo sapiens
  chr5:72746975-72747473
  hyper
gcaacctttagctccgcagtcgcgaaattccccgagcgcggaaactcaagcgattcacgtcttgcgcgacccccttgtctcccccatcgtcccctaccccgggcctccttctctacagcgctcccagctttcggccccagctggtaactctcccccggctccccgcccccaagctggtacaagggaccaaaacctttcccagaggcgagccggggaagcgacgcgaagacccccgtccggcgcaacccgctcgcgtggacgcggaaagtggcgggcggcgggtcccggtggtgcctgcgtagggcagagttgccccctggcggcggtgcgacgacctgcgggccctcgcgcccgggccggcaactccctgggagctcggcccgcgcggggaactcgcccagcagcctgtgtttctcgagtgtgggcagccggctcccgggcgtccctcccaccggctgcgggggcccgggactgggcggtagtggaggcaggtccttg

SEQ ID NO: 4023 - DNA, 219 bp, Homo sapiens
  chr5:72747764-72747983
  hyper
tgttttcaaccccagcggttcccctggcgcctcgaccctcctttgaagagtcattctagaaggctgtattgcgatagtgtttgtacctgtcactgtgagccctgaaaagagacagaagaaaacgcgagtgcctggcctgagggtgctccgtcccgtgggtagccaggtaggtagttattctgcccgatgatgaggtcctcctgacgcccccgcgaaagg

SEQ ID NO: 4024 - DNA, 1069 bp, Homo sapiens
  chr5:72921497-72922566
  hyper
cctattgtaatagacccgggccgtattatgtcacgggtgtggtggcttttggctgggaacagcctgagcctccctcgggcctggcacaactcctttcgcgagcgggcagcccagcgcctccctcgggaggcgccaaggcgtgggggcgcccggggcgcaactggcactcctgtggcccgccaggtccgcgccagcctccgcgcctccgatctccggaggccaacggccgcagccccgcagcgggagggggctggcggagacagcgcggtaggggcagcttcaggtttcctcctggagccggtgtcgggcgcggccggcgggcgggcctcgccatgtgatgcggccgccgcgagccgggccgggaggtgggcaggcggggatccagtggcagcggggaggcgcggggggagcggggggagcgggggcggcacccgctgctggcgcagccagccgggcccgggcgcgcggccgcggctccaccccctaaaccttggcttcagcccggccgccgccaggcgttggcatcgccggggagagccttccggactccgggcggcggctggctgggggcgcgttccgaggcgccctcaggcagggcgcgggggcagagcctcgcctgggttctggaggctgcggggccatcgctccaggtaaatgctctttgggactccatcgtctgcgtttccctgcagctctgggcggaaaagtttgtccacctgagttcgcatccgcagggccactttctccagggtccccagggatgcgagggtcagcagaggtgaccggggaaccgctgcaggcgctgcggcgcgagggctgggcgccgcctcccgctccctcgggagcggcaacaagtggagagggcggcgcagcctcgtgcggcggcggcagctgcggagcgcggggtcgctcgggcgcactgagagccgggggctgggcgggtgaaagccccgccagtgtccttcgggagacagggaaataaacagcactcctgcggtggagaagggagaacgtcgagagttggtgtccgcccttcccatccatgcttcagctccgggactgagggtgc

SEQ ID NO: 4025 - DNA, 194 bp, Homo sapiens
  chr5:73843884-73844078
  hyper
ttgaggaagggacatccgctcccgcccgccagcttcatgaaggggagatcagcccaggctaacagtgggtggtggtggatcccaagcaccaagaatacagaatgcccttgctgaagaatcaagcaatgagttggagcttatgggaagcaggtgtctaagcaagaaggcaccggtgcagccgctggtgcccagag

SEQ ID NO: 4026 - DNA, 246 bp, Homo sapiens
  chr5:73935741-73935987
  hyper
tgggccaaccatcccgcgcgctcggccctggaggctgcggggagcgacgcagcgcgacattcacccccaggaaagcgctgctttccgcagaggagagaggctgactgtatccttagctcggctcctcgcttccccagcggctcgccccagacattgcaccgcggaggggaggccggtcgacctctccggcgatgcccggcttctgcctgctgtgggagggcagcggcgggcaccgtgatctccgca

SEQ ID NO: 4027 - DNA, 423 bp, Homo sapiens
  chr5:73936032-73936455
  hyper
cggagcacgctcacccctcgcgaacacacccctgcagccgaagcagcccctgaagcccgcagcgcctgcaacaggtccggggcagtgggggaaacttacagcagtggcgactggccgcaacgcacaactgagttctagcgacggtcacgggcaaggaggcgacgaaccggtcgtctcagcccagggaagcggtggcgaatgccccggagaaaggagggccagccggggagaggactgcgccccgaacgatggctcgcggaccggctaccgatggcgttcgcctccgtctgtcgtccccacgccgcggacccggtgtccaggacccgcagagcgtctccggagcgcgtcacggtagggcagagcaagcctgccactgcaggcgccgcggaaggaggcgggctgtgcgctcgggggagggagcta

SEQ ID NO: 4028 - DNA, 42 bp, Homo sapiens
  chr5:73937017-73937059
  hyper
ggacaggccctgggcacgcatagacagcgccttgggtaggac

SEQ ID NO: 4029 - DNA, 132 bp, Homo sapiens
  chr5:74161941-74162073
  hyper
tctcggcctcacccagcggtccgcgccggggagagggagcgcactcacctcagacgcgccccgggagccgctggaagagcccgggaaaggaggcggagccgcgcgaatgaatggagccggcggctgctcgct

SEQ ID NO: 4030 - DNA, 204 bp, Homo sapiens
  chr5:74162515-74162719
  hyper
tagatgcggttaagccgcgggggctgcaacgctgattttgcgtattcctttaatgccgaccttcgcaggattctgttcgcatagcccggtggagttctccagccccgcgtaggccctcctgaaatttacccagagtgggcgcggccatcccggcctcgggacaggggtgcagagggcacgggcgaggaccgccggcctccgccc

SEQ ID NO: 4031 - DNA, 538 bp, Homo sapiens
  chr5:74348356-74348894
  hyper
cgcaggcagacgatcccggcccgctctgcggcacaaaaaacttgaccttaaaaagcccagaaactggtctctgggaagggcgcggcctgggaggcgcggcccgcagcttccgcccccaaagaacaactcggaggccccctccagccccggttgccctggcgcagaagccgcggtagcagtcctttcaggcgccccgcgtccctgtcccgaagcccaggggcgggggctcgggcagcatcgcttgtcccctctggtccagggctgcggagaagcggcaagcggctccgaaaggcaagcgtcacgaagccgggctcagtagctcccccgggccccctgcgcctcgcagcggcgcgggccaggctgggcggcgctgggctctgaagggccaggacggcgggatgcccctgctcccggcaagggcgcgcccacgagccgcttcttggcacttggggagagtcccgggaaagcccggcgccggcgcgctcgcgactccagcctggcggctccactccgcccgcgagcccaggaagccggctcc

SEQ ID NO: 4032 - DNA, 1050 bp, Homo sapiens
  chr5:74348906-74349956
  hyper
cgttatccaggacacgctccgcgcccgccgcccgctgccctttccccccgctggcctcggggaacttccccgcgtctggccgcaggcggcggctgccgcggggagccccgaagttgcggcgtctgctaggcgcgcgccgggtcgcccacccggcccgtgacgctgtgtccgtccgccgcgcgctctggtggccccggggctcctgcaggcgcggagagaggccggggttcagcccggttccccgcgcggctccgagagggcgcccccgcctgccgcctggagatggacgcggcgccgaagttttccccggcgggaaaacgaaagtcgtgaggagcagagggtcggggcgtcccggcggagacgaggctgagaccgggttaacatctccagccccgggcgaccctcgctcccccgcgtggccaagtcgacttacgagagggagcgggccagccccgaacgcggggtccgtgcggctgcggaggccgccccggcgggggccgagggttgcgctctgggttcccaggctctccgcggcggctcgctctcgccgcgctcctccgtcgccctgctggggagccgctctcgcccggcccggggtgggagagcgctgagcggcccccgtgacgtgcggagaaagtaggagcgcctccgcgctcccgcagagggagctccctgccctgcgctcccagtccccgggccgcgcttcggacaaagttctcaggcgcgcgcggtgatctcggctctccgccgctgcccggagcgtcatccacgttcggttccctcccacattagacaagaaatctgaggtcaggagagctaagtaacttgcccaaagtcgctcacaaggcagtgacgaagcaaactcacatccgcggctccttttttctccttgaacgccgggctctgcggaggctcaggccctgcaggaatcgcccaaccagacagaaggcagctcgctctcatgggtgagacgaggagtgtcccacgcagccgcgagaaatattatcagcagcgtgggaaggtggagctttttgccgaataactagagtg

SEQ ID NO: 4033 - DNA, 841 bp, Homo sapiens
  chr5:75378775-75379616
  hyper
agtcagaactccctcgcgtctcacgctggacctgacccggggcgccgccaagtgcgcaacgcacagtcacagttggtgactaattaaggactgccgcccctctccttcacctgctacaaactcagagccctgacttctccagaagtacctaccacttggaggtggctctccttccccgccccctgccccagtcccacaccgcagcagcgcctcagcaccgcgacttgccggagcaccgcgagtggcgcgcgggtcccgcctcccccgcgcgccgtgactccctgcgcaccgctggtactctcgccacgccgccgcccggcactgcagcaccagggggaggaggcaggcggaggagaggaggaggaccgcagcgtgcaagccgggagccactttcccgcccctcctctcgccgctgacacgctcagaggagtcaccactccgcgcgctgcaggcgagagtggcagacggaggcagcccggggaagcgagccggagcggcgcccgcactgaggcggctgcagtgctgacaccactcagggcaagggtgtccgacggctggagcggtgagtgggggaggtgaagcgggcatccgcggggagactttcccccgctgctggatttctcttcccgactggtggccgggcgctgcagcctggggaagtttttgcagcctttcggaagcgcaactttgccccgcctgcccccggggaagcggctgcaggtgcccgctgctttgtaggcgcctttgttggagagggaccaggaaagtaggggtaaaatagatgcagtgaccccagggttcgctagggtaggtctggggactgggtcgcactttatctggg

SEQ ID NO: 4034 - DNA, 423 bp, Homo sapiens
  chr5:75379952-75380375
  hyper
gggctggagagcaggggagcccgcggggctgaggctctttgtcagcgcctgcacttcctacgttacaacgccttcattcagcaaaaaccttttgggcgcctgctgtgcgccaggccaggcgaagcagacccgaggctgtgaagctcagaggggagagggaccaatcgcagtaaataagctaccgaggtaatcttagatggcgatgagggcagcaaaagccatcagccgaccctctgaccctttctcttagtgggcttttccccttccgcctgggttctagaactgggaagacttttctccagagcgtcgcggggagcgccccgggctgggcccacggggactgcggaatacggggatgaacttggcttggggcagccagcaccccacggcagatgaacaatcgggagcagatctgtgggcgtg

SEQ ID NO: 4035 - DNA, 31 bp, Homo sapiens
  chr5:75566956-75566987
  hyper
agaaataaaaattaaacgattccattttgtg

SEQ ID NO: 4036 - DNA, 1768 bp, Homo sapiens
  chr5:75698445-75700213
  hyper
ggtttctgtggcttgcgaccccagctgggcttgagagaaggctctgcacactggggcgggggcgggcacaaggtgatcggagggagggggatgactcgcagttgtgttttgagtggttgccttgggttatcttgttcctccagcacacacacactcagtttcttgtcataaggggaaccctgttattttgtagacaaaaagtgacagaagcaactttcgaagcaaaaaaaaaaaaaaaacaaaaaaaaacaaaaccaaaaagacgaagaagaagaacaaaagtcaacgtgaaatctccccagaggaaaaggaaccgcgctgtttgtccctcagtaactgagcaacaccccggacacgaagggctccctgtgacttctgcggtttttcttgcacttctccgcgttggttcacttccaccctcgaaactctccagaagcgagaaataaggcggggtggccgccacccccaggccaccagctgtgcgggggccccagctgcagggggtcccggcccagcgtccctctcggccccttccctctcccccgggggagaaggggcgggtccacgcggcctgggcgctgcgcccgacacgcggtaggggtcgctgcgtctcggcgcgcgctcccaccgcggtgaataacggggcctggctggaggagaaaggaaacctgctgcgggaggcggcggcgaccggccagggagcgagggaggagagttcacttttacttcagtgtcagcgcgcggcggccgtggctggctctggcgagagagcaccgagggagtgggtcgcagatcttcgggcggctaggggaaatcggcgagaggcgggatccgagcgcgccggcggggcgcagagcccgcgagcctggccagcgagggtagccgcggggggcgcgccccgggcgggcccccggagacgcgcaggatgccacacgaagagctgccgtcgctgcagagaccccgctatggctgtaagtgcgccgggcgcgcggggttcctgctggccttggggagctccctccccgaggacggcgttggagaagccgagggagccggttgcgcggcgcagaggaaattggaaggcagcaactgcgcggctggcaaagttgggagctggagttgcaaagggcagtgaatcgcgtccccccgctcctcccgccccccaattcctaatatccagctggcaacccagaccctccactccgcatacccaaacggggtgcgcgggcagtgcggggattgcgctctgggacagaccaggttgggattttaggggtatcaggtgaggagtccgcggagctccgggtcgccgccggcttgggccagggggtggcgtaaggcaccggattcttccaacccagaaggggaggaaagtttgtttgctgtggctacaggtgggcaccgcaagtagggcgccggcgcactctgctagtgcaaagccggcttgactggaagggcgggagtctcctcctgtcccgcgccctcgaacttcacctgacccgctagagccattggcctcacaggtgtaagtccctcccctctgaaaccccccaacccctttcccccccgctcccctcgcgcgggaggattgctgtgtggagaggacgcggcactaggctccggggaatccggcgggagcccgcgtgacttgaacgagatggtgtcgattacccagccaggggctgccctcggaaataggttgctttggccgatcgtgagtggatggagccagattaacaccaaccacgtggcttcatgtgcagagttc

SEQ ID NO: 4037 - DNA, 30 bp, Homo sapiens
  chr5:76011112-76011142
  hyper
ctcctgggcgcccgcggccctagaacgccg

SEQ ID NO: 4038 - DNA, 363 bp, Homo sapiens
  chr5:76011981-76012344
  hyper
cgcttggaccctgatcttacccgtgggcaccctgcgctctgcctgccgcgaagaccggctccccgacccgcagaagtcaggagagagggtgaagcggagcagcccgaggcggggcagcctcccggagcagcgccgcgcagagcccgggacaatggggccgcggcggctgctgctggtggccgcctgcttcagtctgtgcggcccgctgttgtctgcccgcacccgggcccgcaggccaggtgagagatgcacgggaatggggtgcgcgggcggagggacgccgaggggagactgcgggggtcactgttgcgccttctcctcacccctgcctcagtttcctccgaaagccaaactggcatttgg

SEQ ID NO: 4039 - DNA, 614 bp, Homo sapiens
  chr5:76114443-76115057
  hyper
cgcatccctcctcctgcagggtccaccgcaccgggaagccctgtctgtatcagttaccaaccacaattgcagtgagtacgaatcgtggctttcccacagtcaggaaaggcaagggagaccgacgacccgcttctctaggagtaagtaaagattaaaggtagttcgcggtatagcctaggcagggattaacccgtggtcccagcgctcctgctatttgcattccaaagcagacacctcatgcgctcaaccccgcccgcaggcggctcccgcagtctaagggacctggcgcgagtccgggaagcggagggcgcagctgcgcagggaagggggccgggggcgggaccagggcgcgcgttccggtcccggggcgtggcctcccgcaggtgagtacgctgctccttcggtttccctgaaacctaacccgccctggggaggcgcgcagcagaggctccgattcggggcaggtgagaggctgactttctctcggtgcgtccagtggagctctgagtttcgaatcggcggcggcggattccccgcgcgcccggcgtcggggcttccaggaggatgcggagccccagcgcggcgtggctgctgggggccgccatcctgctagc

SEQ ID NO: 4040 - DNA, 30 bp, Homo sapiens
  chr5:76115294-76115324
  hyper
gaagtcagcggagccgggcagaggcagaga

SEQ ID NO: 4041 - DNA, 30 bp, Homo sapiens
  chr5:76249487-76249517
  hyper
ggctggggagcagccgtaccgccgcgctct

SEQ ID NO: 4042 - DNA, 145 bp, Homo sapiens
  chr5:76249761-76249906
  hyper
ccgggaatggggcgcgcggagagcggccgcccgaggacggcgctgcggcggctgcagcccgggacttattgccccatgccctcctcccccagggtgcctggacatgctgagcctccagggccagttcaccttcaccgccgaccgg

SEQ ID NO: 4043 - DNA, 30 bp, Homo sapiens
  chr5:76326225-76326255
  hyper
ggcgccgttgtttccggctcaactggggag

SEQ ID NO: 4044 - DNA, 30 bp, Homo sapiens
  chr5:76382524-76382554
  hyper
cctccgaaagtgggcgacatcaagcaagtc

SEQ ID NO: 4045 - DNA, 149 bp, Homo sapiens
  chr5:76383032-76383181
  hyper
ggaaaacctccgcgcgtgccccttaaagacacagcgctgcattcacacgtctgcggggaaaggggggccgtcacgtgtggccttcgcccgaaagcggtaggggagtcgctctgaaaccgccaaggatcgcgagcgacagatttgtgttg

SEQ ID NO: 4046 - DNA, 30 bp, Homo sapiens
  chr5:76507085-76507115
  hyper
gaaggtaaatgccccgcgctggcacacgcc

SEQ ID NO: 4047 - DNA, 95 bp, Homo sapiens
  chr5:76923928-76924023
  hyper
tacttgggaggtcccgggtatctgaagcggatcccgggtctggggacatgaaggggcgccgtggccttagggaaggccccaaagaggcctaggcc

SEQ ID NO: 4048 - DNA, 213 bp, Homo sapiens
  chr5:76924086-76924299
  hyper
cggcgccggagagcagaactccaggctctgaaggccgagggtgcgaattgtggtcccctcccacccacggcctccccatcacgcgcacgcagcccgcgaggggcgccctccgcgccactgccccagggacaccgttcatctgaggaactctcgcgccctgcgtttcgtgccgacagcgacgctcggagtcccacctgggaaacctgggttggc

SEQ ID NO: 4049 - DNA, 870 bp, Homo sapiens
  chr5:76926065-76926935
  hyper
gagcgggccggggcgcggctgcattaagtgaagctcatagagactgtgtgctctagcgccttgcggcggagggaggcgatgctggtgccccgccacacgtcgctgctgtccggggagctgcagagctggggcgaaccggagacgttgctggggccggggagggaggcgggcaccatgccggggaaggcgggctggtagaggtgcgactgcagccccgcgccgttggaacccgccaggctgttggacaggcccatggagttgggcggcggaccggccgccaggctgcactgggacagcgactgcgccatggcctgctgcctgcccagcgccggcggcagaggcagctgtgacacgccaggcatggcggccgccgcccagcgggtgtcgttggcgtggaaagagcacaggctgtcgcccatggcggcggcagcggcggcggcagccgacgggaactgaggcaggcctggcgtgggcagcagtgtgccgggcgcacggaacacgttggtcgtctttttgcgcttcttccacttggcgcgtcggttctggaaccagacctggagcgggcggggcgggagacagacagggagctattagccggcccggcggctggggagttggggcttgagccccagaaacccgcctcggatacagccgctctgccctgggaggaacaagtgccgtaggcccgacaagcccccatacccagccggagactgtggctccccaccaactcctggcaactggcgccccctgcacccaccaagcgcggagtcctgcgctcctaagagctcgtgccccgaagagtttacgcactgtgcaaacacaccaaatgtgtgcagtcttcaccacgcccctgcacattctgtgcac

SEQ ID NO: 4050 - DNA, 30 bp, Homo sapiens
  chr5:76932940-76932970
  hyper
gggtcagagttgggcgccaggtcccccgga

SEQ ID NO: 4051 - DNA, 33 bp, Homo sapiens
  chr5:76934678-76934711
  hyper
cctgaaggaggcggcggcggcagccctggcagc

SEQ ID NO: 4052 - DNA, 30 bp, Homo sapiens
  chr5:77140528-77140558
  hyper
ctgagccattttcccgcgaggcccccagcg

SEQ ID NO: 4053 - DNA, 14 bp, Homo sapiens
  chr5:77147635-77147649
  hyper
tcacccggaagtgt

SEQ ID NO: 4054 - DNA, 228 bp, Homo sapiens
  chr5:77147911-77148139
  hyper
cgggaggaggaaattccctgcaaaatagcaatggttccgagaaaaggatcacaacaaaatattgaataaattcccttttaatttatttgatcattccacattacggggctatgaattgctcaaatttgataacaagtactcaattcaactcattatgtaagttaaattagacttcgataaaatttcagtggcgcgcagtggttcctcgaatgaaatgtaatttgtgca

SEQ ID NO: 4055 - DNA, 264 bp, Homo sapiens
  chr5:77148419-77148683
  hyper
gcagcgcgccaacttcgctgctccaggaggggggtggggagggagaggaggaggaggaggatgaggagagaggggaggtggaaggctgtggtaacggtgggcggaggcgggaccatggcgcatgctccgcgacgtcccgggccgcgggcggaatcccccggctaacctccttgggggtgagactgggtgggatgggggtcggtgggggaagttgcatggggtgttatacccgcccggttacaggccgctgccctgtagcataac

SEQ ID NO: 4056 - DNA, 560 bp, Homo sapiens
  chr5:77268309-77268869
  hyper
tgatttttattaggttaaagacgagttcacagatggtaaatcgcgtggagagaaatgagctggagagttacaccgagtcaacgcgggacacggctcccggcccgggccgggccaggggtgggaggcggttccctaccgcaggcggcgggactcccatgcgccgagggacccaagtctccactccacccacacgcccacccggcgtcggggcgctgcggcctcgcctcacgagcccagagcaggccgcagcctgggctggggatccggcacctgggcagggtgagcttggccggacatcctcctccaggactacccgcaccccacagtcgcgtcaaaagcgccccatccccctgtctctcgccgcgcaggtttcccaccgacgcccgctcggaaggcgagagcccccacgtggcccggcgcggcgcggcccccggggaccgcgagcaacaaaagcccggcccgcagcccctgctcctcgccttccttttcaattctcccctgatctcaggtggaattaggaggattaaagcagcaagtaaatgaggcgagtgtgcaaaatg

SEQ ID NO: 4057 - DNA, 38 bp, Homo sapiens
  chr5:77269197-77269235
  hyper
atcctggagggagcgcgagggcccggctcctctgggag

SEQ ID NO: 4058 - DNA, 31 bp, Homo sapiens
  chr5:77944026-77944057
  hyper
gaggagacgctgttcccggcacaactttttt

SEQ ID NO: 4059 - DNA, 30 bp, Homo sapiens
  chr5:78281778-78281808
  hyper
gatttggagtgttgcgtggtcattgaataa

SEQ ID NO: 4060 - DNA, 123 bp, Homo sapiens
  chr5:78408151-78408274
  hyper
tagagatactgctcctagccccgcaggcgcgatatcccgtccccacggagcccctccgcatctgtgtccgaggccgccgcgagcgccctctgcacccggcgcgcccagaacagggaggagtgc

SEQ ID NO: 4061 - DNA, 91 bp, Homo sapiens
  chr5:78408297-78408388
  hyper
cgcctggatctgcaccgcgggtgtcggggccgcctccccgccgggttctcgctgcacccaaggcccaggcgctggttgggtgattgcagat

SEQ ID NO: 4062 - DNA, 210 bp, Homo sapiens
  chr5:78531491-78531701
  hyper
cctaacaggctgggggcgagccccacatagttcagcacaccgttccccgcggcaacacgctacttctgaacgcaggagcgactctccgtccgggctccctccaggagaatggaggcaaatgtacattcgagggtctcaatacctggaattcgaaacgtctcagttcctccgccttagttcctcttttcccgggttcggaggccacctgtg

SEQ ID NO: 4063 - DNA, 31 bp, Homo sapiens
  chr5:78807882-78807913
  hyper
cagttggctctgggtccgaaggaaggtgtag

SEQ ID NO: 4064 - DNA, 31 bp, Homo sapiens
  chr5:78810400-78810431
  hyper
cttctctccgcacacacgtcacccgcagctc

SEQ ID NO: 4065 - DNA, 35 bp, Homo sapiens
  chr5:79551163-79551198
  hyper
ccttcgcccagacctgcgcccggtagtttggaagt

SEQ ID NO: 4066 - DNA, 95 bp, Homo sapiens
  chr5:79551987-79552082
  hyper
cggagcaggctcgacccgggctcgcacttccgctggcgtcaggcgggtgggctgctgcgatcacttcccggttggggcgccgagctccggagtcg

SEQ ID NO: 4067 - DNA, 295 bp, Homo sapiens
  chr5:79783887-79784182
  hyper
ccggttagcaggggcgccagcctgggcgcctgcgcggacggcgggcgtcgtcaccatggcagcatccgctggaggcccaggtaagcgccgagcgcgcggcctctgcctggaggtggggcgctttgagaggctccgccggccgtaccctccctttgcgggctcccgcggtcttccttgctagggacctgggagcgcgccgcgcagaaccgggcggctgggcttggagcccgctctgcactcggggcgcgcccgcgatcgcctggcaaggaccttggtttgccgggtgggctctaag

SEQ ID NO: 4068 - DNA, 180 bp, Homo sapiens
  chr5:79865522-79865702
  hyper
cgcatcctcctcgacaccccgcggccgggcagccctcgccggttcccgccgctcggcgaggctgagaaggaggcggaacccgcatccccgcggagtccaagccccagcggccgcaaaactggaaccgagaaccagtgggaaaggcaggaggcgcgagggtgagctcgcgtggagcgcgcc

SEQ ID NO: 4069 - DNA, 89 bp, Homo sapiens
  chr5:79865744-79865833
  hyper
cggcggccctcggctggccctgggtctctcatcctgctcggggcactgcaatgtcagggtgagcgggaggtgcgggcttcaggggcttg

SEQ ID NO: 4070 - DNA, 193 bp, Homo sapiens
  chr5:79866099-79866292
  hyper
gcagatctcggtagatgccgcccagtccccgccctgcttgcggaaagaggcgggcgactgccgcgaagcgctggagctgggacccggagcgcacacctcgccagacgcccgggcagcgaggcgcttccgctgggggtgacgcgtcggctccaggctctgcgcaggtgagggcggcaaggctcctctggaccca

SEQ ID NO: 4071 - DNA, 166 bp, Homo sapiens
  chr5:80255908-80256074
  hyper
cgttgtgcgcgagtgtgcgagcgcgtgtgagcgggtgtgtggtgcggccgggcgcctccacctccctgatccgccccatcccggcgggcgcccgagcagaggcagcggcccgggccggggcgggcgagggagggacgcgagccggggcaagcgggctgcgccaccg

SEQ ID NO: 4072 - DNA, 57 bp, Homo sapiens
  chr5:80256312-80256369
  hyper
gggggctcggccgggagggtggtggttagggcggagagcgtgcctcggccccagccc

SEQ ID NO: 4073 - DNA, 379 bp, Homo sapiens
  chr5:80256428-80256807
  hyper
cgtggggaaagggggcgcccttcgccggccgggacctgagcggtcgcgccctcgagggagccagctgggccatggccgcgaggcaggggtgagaccggcggccacccgtgagccctccgcacccgcaccatgcagaagagcgtgcgctacaacgaggggcacgccctgtacctggcctttctggcgcgcaaggagggcaccaagcgcggcttcctgagtaagaagacggccgaggcgagccgctggcacgagaagtggttcgccctctaccagaatgtgctcttctacttcgagggcgagcagagctgccgcccggcgggcatgtacctcctggagggctgcagctgcgaacgaacgcccgcgccacccagggccggcg

SEQ ID NO: 4074 - DNA, 139 bp, Homo sapiens
  chr5:80256887-80257026
  hyper
cgcactcccttgccgtcctaatccggggatcaggggtcgggggtcgtgaaagagtgcggggactatgctccgaaatccccccgcgtcaccagtggcgggacatctccacgctccttccgatcttcatccagggattctc

SEQ ID NO: 4075 - DNA, 30 bp, Homo sapiens
  chr5:82372852-82372882
  hyper
ccacacataatctacgtagccaacgtgtta

SEQ ID NO: 4076 - DNA, 367 bp, Homo sapiens
  chr5:82767265-82767632
  hyper
ccctgaatggggagcgctgctgtccccaagccgattggtacttcttgtcaggaagaaacgccaagaggtgggagtgcctggggagggaggcaggcggtccctaccgcaggcgcggggagctgcctttccgcccctccgcctgctttccaagcctggactcttaggagtggctgaagctgcggagcgcttttggagcctgtgaatgaaccctcctcctctccctcctccttcttctcgctgagtctcctcctcggctctgacggtacagtgatataatgatgatgggtgtcacaacccgcatttgaacttgcaggcgagctgccccgagcctttctggggaagaactccaggcgtgcggacgcaacag

SEQ ID NO: 4077 - DNA, 30 bp, Homo sapiens
  chr5:82767953-82767983
  hyper
aaagagctgtaaggcgaagttaagaaaatg

SEQ ID NO: 4078 - DNA, 1170 bp, Homo sapiens
  chr5:82768372-82769542
  hyper
cagctcctgacagtgcgacccggcgcccaagcagcctgggaccttgcgcggacctgaccccttcagaccgcaggcagtctgggaggaggtccggccgggggaggtgcaggatccccgccgtgtctctttgacgacttggggactgtcacggttctctcccggcgcccctgggttcttttgtcctgcacgcggtgcgaaggggccagcagggaaggagcagaggatggggggtggggttgttggagccccgcggaggtctgggaggcccctgggcgggaaaagcctgttctgaatcggcagggatgtgcaacaatttttctcaccctgaagagtgaaatagggtctgtcgctcccatctcaacaagcaaaccggcacccagagcgcactgcagacaaaggtggctcggggacccgaatcaggggcctctgggtcagtcctctcgcccagactacaggagtcctccgtttccttacatattccccaccctctcctagttctccgctctagttgagcaactttactggcaggtctagcggcagcggcgcgcgcgtgtgccgggagccccgggggacgtcctcggctggagcgccccaccgtcctgcagaggcgtgggcgctgtagggcgacatccctggtgcgtgcagacctagggcatccgggttgttctggcccgcggtctgtgtcactgggcgtggagcggtctgggtgttaggcagaggagagcggggtagaaaaatagtgtcatagcctaaactatttgctctccaatccaactgcgtctcggcaagtcctgcatgtccctgggagatgctgcgggaagggggagaaatctacacggcgcctggagagttgtcctgccgcgcgcacacccgcggcagagtctctctgggtcgcgttcctcatctttgtgtctccctctgtctccatcttctctgcctcccttcccctctcccagcctctgttctctctctctagcttctgcgtcccctcccccacagctgacaaatgaatggctagtgtgaaatccctgcctttcccgtgctccaaggcagcagggagggaggagcgagggaggcggtgcgctccttcggatctgcccccagttcagctcacaagacttgcagaacctagatgtctaggaattgggagttttgcggcgggtgtgggcg

SEQ ID NO: 4079 - DNA, 705 bp, Homo sapiens
  chr5:83679563-83680268
  hyper
gagactcctctccacctcacccgcggccaaaacgcccagcgccgggtctgggtttgcgaacggctcagcccaggccctgcgccagagcaccgcacccgggggcggacggccctgcagctccccagcctcttcccgcatcaactagctgacgcccgggcgcactggcttcccccgctcccgcccgcacgaaagccctgcccgacgtctgcagtcagcatcgcccgcactgcctagggagggtttgcgccgagacccagtggccgagtgagccacagagtcgctggtcctggggacgctgtcttctaccgctccccaccgtcctcctctttcctgtatctcaccccggtaccccgcacccttctccccgctcggccccgcgcactctgctcagactttacaagcactttctcggggcacccaggactcgacgcctcctccgcgccgccagcggcgctcgccacccttggcacgccggagggaccgcctccggccccctgcgcggcgtttctcaggggactcccagcccatccctcacccagctgtccgggtcccgacgccttacctttgccgaactgggggacaccgaggctgagcccgaccaagagccagacggctaccgagcgcttcatgatcccgtctcccggacgtgaccccggctggtcaggggtcgtcgcggagggcagtgtagccgaggtggcagcgcag

SEQ ID NO: 4080 - DNA, 39 bp, Homo sapiens
  chr5:83680693-83680732
  hyper
cgtgtgagtctgagcctggcaggcgcgctccccactccc

SEQ ID NO: 4081 - DNA, 30 bp, Homo sapiens
  chr5:85913691-85913721
  hyper
cccacaatccagggcgatttccgctttgtc

SEQ ID NO: 4082 - DNA, 41 bp, Homo sapiens
  chr5:87437222-87437263
  hyper
ttccccggcagctgctcgggcgggggcgaaggagggaaggg

SEQ ID NO: 4083 - DNA, 255 bp, Homo sapiens
  chr5:87437270-87437525
  hyper
ggggaggaaatgaggctggggcggggtggccagagcagccgcagaggctgacgcgggtttggagaacggaagagatgatttgcatggcgcctggtgattggctgatggccgggggctgggtctgagaggcggcccctgaatggtttaacggaggaaattacaagattcattcgactaaagaaagccggggcgggcctggtcggcgcaatatgcagcctgtccgcaagggggcgcgatggcctatctttgttctgg

SEQ ID NO: 4084 - DNA, 30 bp, Homo sapiens
  chr5:87437944-87437974
  hyper
tcacaggctgtgcacgctcttccacacacc

SEQ ID NO: 4085 - DNA, 30 bp, Homo sapiens
  chr5:87956219-87956249
  hyper
cccacccagcttccccgcagggagaccctt

SEQ ID NO: 4086 - DNA, 185 bp, Homo sapiens
  chr5:87956477-87956662
  hyper
cctgcctctaaccgacgtccaggcgtgactaaacctcgacgccacccccattcacaagctcaactcagggattcccaagcaaccgcagaccggaggtggcgcagaggcagtgaccgaggtcgctgattaggggccgagaggctggcaaataataattttaaaaaaaaaaaaaaccggaatagcct

SEQ ID NO: 4087 - DNA, 615 bp, Homo sapiens
  chr5:87956679-87957294
  hyper
cgtgccaggcaaaggacagtctgacgacccgcccctgccgagccccgcagcgcggcgccggtgtccagcagcctccaaggcgccgagcgcgggcacgggaacttgagctagcgcaaacttgggcggcctcccagcctgctacccgggccgcagcgcgcccccggcctcccagtcgcgcgccaacccgggagcgcgcgcgccggcgcaccagctccatcagctagaggagcccgtctcccgggaaacaccaatcagacgcccgctttcaggcgagggccgcgagccgcagcagctgcaggaggactcgggcagttggcggtcaccgggaggcgtcgtcctgccccgcggcgggccagccgccttcgctgctgccactgcctagcctaaccgcatctgcagccagtcacagagtcggctgtctcctctttgcaccgcccacgccaagtaccttgcaaggcggctgctaagcctggctaattttagatctccagaatgcgctatgcccgcgctcaactaaaaccaagtcaaaccatcaagcacagtgatgtgctgctttttgaacaaatatggctcaaaactccgtatttccctgaataaagtcgattatctgcactt

SEQ ID NO: 4088 - DNA, 570 bp, Homo sapiens
  chr5:87962609-87963179
  hyper
tttctggtttttactgtctctcggctgtagtctttcattctcacacgctccccggcgatcttgaaggagtttttactttcggttatctagctttatgaagaccaatacactcatacagctagataaccaaagataacaactcgcttcccacacaggcctctgtcttcctcttgccagactccaggtcctgatcctttctggcagtaccgaagagtggtcgtccaggatacttgccgcgcttaagattcctccttttatgtaaatatgacctggtttctgtttgtgtgtgtgcgcggctaaaacatccaaacgagatctgttgccttcagagtttattccgaacttttctttttcctttcagcaagtaatctccggcagcgttagccaacaattcatctattaatatcagaaaataaaaccagctattaaggtgcagcaagctgttacgagtgagcagcagcatccgtcccttcacaggcctctatttgcattgtaaattgcttctttctcacgcaagactctttagcctctctctatagagatgtataaagccaacggcaatttccagcg

SEQ ID NO: 4089 - DNA, 30 bp, Homo sapiens
  chr5:87968103-87968133
  hyper
ttggataccagaagcgtcttaagctgaacc

SEQ ID NO: 4090 - DNA, 1018 bp, Homo sapiens
  chr5:87969947-87970965
  hyper
gtgtgtgtgtgtgcgcgcgcgcgcgcgcgtctgccttccacggaaagagagacggagagatgtgggagggtgggggtggaagtatgcagacagagaagggtgggggcttcgaggggaaggtgggcttcctgcaacacaagcggagaggctgtcaggggtgtgggcacgggggtgcggggaggcggtgcaggaatccgtcccgccgagtgccgtcggcccctgtgggcctgtttgcgcgcctggggctggccgcattctgggcgcgggtgtctgcgtgccggggtggtagttccgagcctgcgcgcgtgcgaccgggtacgggagggggaagagtgccgtaaaaattcagacgagtggcccgtatgtaaatgcagcccgcggggagcagggaggcggtaatgacagccgctggcgctcagccccgccggcggcccctagctttcccgccaagtgcagccggaggacagacagccatgcgtgtccttggcgggagagcccccacccgccgcgcgcgcccgacccccgcgcacacgcacacactcccctcgcaggcgtggggcccaatggccacgaacatgtcaggaaaacaaagctggggctgcgaggtggaacgatgaaacggcacacttggcggccgagggcagagcggagaagtcgccaccacagccaccggcgcccctttcttgcctgctcgtagatctgccctccggcccagaagaggccgaggaccatttcttagctgccccagaggagggggcgagcagaggagggggcggatgtgcacagggaggtgccagcggtccggtgcgcgggcacgcacacgccggcgcgcagggctgccgcgggcggaaggaggggaatgacaaggcctcggccgcgtctcggagaggcactacctccgcgctgaggccgctgagtttcaagtgcaaaacaccaggccaaatccggcaaggcggcggctacagaatggctcacacttcaagcctccttcctcaaacaatccgatgggaaggacctg

SEQ ID NO: 4091 - DNA, 950 bp, Homo sapiens
  chr5:87971187-87972137
  hyper
tcacattaaaacgcgcgctcatgatcctgccgttaatgaagccgaggcgcataatgagtgcacaggtaaataggtaccgaaaccagaagacttcaccagtcggctgggcgatttacctctccctacagggagcacttgtagttatcgtgttttaggagtgatttgctgttgtctgtggtctctcgctcctcttcttgtggagagaagccaaaaaatatatatgttccgtggtcagagtcttctttctgataagctacccgagcattggtctaaaacatctgttttatctgttgattttggtttgttgttttggggagtgttgcttttctgagggaagcaaaagaacgtgtgtgtggtggggctggaagctcagggcaagagtctgcgtgtgcggccggaaggctggcgagtctgagagccgcgcggtgcagaaagaaggcggcggcttgtcctcccccggggccggcactggtcccttggcaccccggcctgggctcggctactgccgccgccgcccgcgctctcgggctccgccggctgccgctccgtgttttcccccatcccggcttcacgttcaaggtttagctgcgaggtcacgtccattgacgtcagctccctgtctccctctacgtccggctacatttacatacatcaaggaaattagggcattaaaaaaatatgcaaatcctgcgcgaagaggagcgggtgcattcctggcgcgatcgccttttattgaagcttttaattaaaggggccagttggcgagcccctgaaacaaccgccaaaaccccccaaaagagaaaaataaacgctgtagccttcgagaacggttgtttcggctcctgttctgtgggcggctgaggaccgccggctgcccggctcggagaagaacaggttagaggaggcagctccagcccatgcataatcagggctccgcggcgcctccattc

SEQ ID NO: 4092 - DNA, 125 bp, Homo sapiens
  chr5:87974354-87974479
  hyper
ccaaccccccgccccgcattaccatatggaggccgagtccctgcgaatcacagcagcagcgggaggtatttgaataagccccgcaaccccgcgcagaccccaactcctccgagagcagcatgccc

SEQ ID NO: 4093 - DNA, 541 bp, Homo sapiens
  chr5:87976047-87976588
  hyper
tgaatctcccctcttcggattttaccaggaggccctcagtgccccaccgccgcccatggcacgtgaagagaaaggagggagagttgggagccacgagagaagccggctcggagccgcttccgtcggggcccatgtttcgccccaacagacccgtctctcctttctctccccgaaggtacttccttaggccggcagtgtcgctacggtggtagccaggtgagcacgggcacagtcccggggcgggggcgggtagagcggccctctctcgggagctccggtgggtctgcgaacctgccgggagcggaaggctgagtggcgctgggggcccgcgcggggctcctggctcccgccggcaggggaacagcgacacctactggccgcatgggtaccgcgcccgggccgtcagggctgccctgggacggggtgccgggctccgtggacttgggaggccgcgggaaacttcaccgaaggctctgcggactgctctaggactcgtccgccctggagaagacaaagccacgctttctggagacccctggga

SEQ ID NO: 4094 - DNA, 30 bp, Homo sapiens
  chr5:87976881-87976911
  hyper
ttggcgccgggcacacgaaccggccgagcc

SEQ ID NO: 4095 - DNA, 168 bp, Homo sapiens
  chr5:87979489-87979657
  hyper
ttctaggtcgtcaccgctctgcaccaaacaaatgagtcctgtttcaccactagggtgccgaggtggatggtggatgctggcccccgcccctggcagcgctcagcccttagaaaccagagccagctgacaacacgcgaaacacacaggcacagcgaaaacgccgagccg

SEQ ID NO: 4096 - DNA, 124 bp, Homo sapiens
  chr5:87980867-87980991
  hyper
ctgggatgggacggcgaggaataaattgctccccacccagctgcggtgcgacgcccccagcgtcccaggggagccggtgcgtcagctcacggctggccaaggcggggccgtacaaaagctagcg

SEQ ID NO: 4097 - DNA, 338 bp, Homo sapiens
  chr5:88180071-88180409
  hyper
gacttttcccccttttggacacgcgttagccacttctctcttccaccggtcggtgcgctcctccgttactcacgcgtaaaaaccacggtccaggatgtctgcagcactcgattccagcgtgcttttcctgcacgcccagaagtcgcggttttcaccctgagaggttggagcgctagaaagcgagccgaaaggtttctctaatgttagtaatgtacgaaataataaaataattaccagtatttgagatctcgacttcatcgcggggccatgaactttctaatcagtttggaaatatttaccgaggaagcagcttcctcggagttccccccctcccccca

SEQ ID NO: 4098 - DNA, 31 bp, Homo sapiens
  chr5:88184852-88184883
  hyper
ttaaaaaatctttacccggggttgtggtgga

SEQ ID NO: 4099 - DNA, 30 bp, Homo sapiens
  chr5:88185372-88185402
  hyper
gctggacctgggtgcgacgagtgggcggcc

SEQ ID NO: 4100 - DNA, 30 bp, Homo sapiens
  chr5:88185753-88185783
  hyper
tgacgcaggctgcccgaagcgctccaacca

SEQ ID NO: 4101 - DNA, 30 bp, Homo sapiens
  chr5:89770670-89770700
  hyper
ggtagggctcactccgcggtcctggtgccg

SEQ ID NO: 4102 - DNA, 101 bp, Homo sapiens
  chr5:89854278-89854379
  hyper
gaaagcactgaccgcgcacttacattgggacgcccaggcagaggcaagactcgcgcgctcctaagccgaggcaggtcagcctaggcgcctggctgctggaa

SEQ ID NO: 4103 - DNA, 30 bp, Homo sapiens
  chr5:89854806-89854836
  hyper
ttgctgcaggtgggcggcgagggcggcgcg

SEQ ID NO: 4104 - DNA, 30 bp, Homo sapiens
  chr5:90676234-90676264
  hyper
ggatattggggtggcgaaggggaggcgggg

SEQ ID NO: 4105 - DNA, 50 bp, Homo sapiens
  chr5:90678445-90678495
  hyper
atgcctgcatgcattacggcttaacacacgatgaacgtcaaggagaatcc

SEQ ID NO: 4106 - DNA, 30 bp, Homo sapiens
  chr5:92915566-92915596
  hyper
tcgggagagcggctcgatgtcccttttaat

SEQ ID NO: 4107 - DNA, 31 bp, Homo sapiens
  chr5:92917347-92917378
  hyper
ttcaggattcaggaatcggggtctcggtctc

SEQ ID NO: 4108 - DNA, 63 bp, Homo sapiens
  chr5:92918895-92918958
  hyper
tatatacagacattcgcgcagatccccctttcggaaacattgctctgcgagtcctcccgttta

SEQ ID NO: 4109 - DNA, 84 bp, Homo sapiens
  chr5:92939752-92939836
  hyper
ttgccaagtgcttggggcctccgcccaaggtgtttgggggctgcgtggtgagccgaggcaaagccagggtaccccgatcgtctt

SEQ ID NO: 4110 - DNA, 59 bp, Homo sapiens
  chr5:92940177-92940236
  hyper
ggggtgggccggggccggctgcgaggctgaggggggccggctggtgggtggatggggag

SEQ ID NO: 4111 - DNA, 44 bp, Homo sapiens
  chr5:92946750-92946794
  hyper
ctagtttagtttccggcatggccgagtttctctagtagcatgga

SEQ ID NO: 4112 - DNA, 135 bp, Homo sapiens
  chr5:92957178-92957313
  hyper
gggtcgtccgaggcgcggctggccgcccgaggcctccgcctctccgggccaatggaagcgctgggcgggaagggccactccctctccctccgggaaaccacccactcccgagactcggcgcgcgcggggattggt

SEQ ID NO: 4113 - DNA, 31 bp, Homo sapiens
  chr5:94619402-94619433
  hyper
gcgagatgttttctttcgactgtttcatcta

SEQ ID NO: 4114 - DNA, 693 bp, Homo sapiens
  chr5:94620376-94621069
  hyper
tggcggtggcggcggcggcggcggcgggcgcagcagcagaaaccgggagtgcccagcgacttcaggccagctcgggggaaagaagcggccgccgccgccgaggctctctggcctcgggactccggcgctgcctcttcctcccgcacctgctggggtgggctggagccgtaaccgaatcccggccgcggcgcctgcaaagtttttccctcgaagctccgcggctccagtccactggcgtcccccaggccgcgccctggctccctcttctctctgaccgagctcgggaagctgcacgcaccggggcgtgcgcgtccagctgcgccagggaccgcacccggcgccctctgggcagcacctgtcagcggcgggggcggctgcctccaaattgggcgcgcacgcggctcacacaacaaggcgcgtctggctggagactccggggaccagcagtccccctggggcgccccgggaccatcctccagctcctaggtgggagggccggtaggagccgggtggagctaggtagggcccgaagccagcttgctccctaggatccggccacagttgcccaggcagctcgctgtgcgctggccgctggccgcgctggcgatcgtctgggtcggatgaagcgagctggagtggaaactatgtgccctcgatgggtctcgtgggggcgccgatcgtccacactgagcg

SEQ ID NO: 4115 - DNA, 1607 bp, Homo sapiens
  chr5:94955657-94957264
  hyper
ggtagcgtcgggggccgctgcagagattggaagagtacccgccgggaatgggagggaagacgcggggaaggtggagaataggaatcatgtgtgttcctcgagtgtacaacccacatttgagtgacaaatcacgaggacaatcgacaaaaacaactaagcgcaaagccgcccgaatccatctccctctctgtgcgtgtgccttttcaactaactttgggaactcgtatagacccagcgtcgctccccgcgccgcctcgcctccactttggtttcccgcgtcctgcccgccctcttcggtgcctcctcttcctccgggacaaggatggaggatctctttagcccctcaattctgccgccggcgcccaacatttccgtgcccatcttgctgggctggggtctcaacctgaccttggggcaaggagcccctgcctctgggccgcccagccgccgcgtccgcctggtgttcctgggggtcatcctggtggtggcggtggcaggcaacaccacagtgctgtgccgcctgtgcggcggcggcgggccctgggcgggccccaagcgtcgcaagatggacttcctgctggtgcagctggccctggcggacctgtacgcgtgcgggggcacggcgctgtcacagctggcctgggaactgctgggcgagccccgcgcggccacgggggacctggcgtgccgcttcctgcagctgctgcaggcatccgggcggggcgcctcggcccacctcgtggtgctcatcgccctcgagcgccggcgcgcggtgcgtcttccgcacggccggccgctgcccgcgcgtgccctcgccgccctgggctggctgctggcactgctgctggcgctgcccccggccttcgtggtgcgcggggactccccctcgccgctgccgccgccgccgccgccaacgtccctgcagccaggcgcgcccccggccgcccgcgcctggccgggggagcgtcgctgccacgggatcttcgcgcccctgccgcgctggcacctgcaggtctacgcgttctacgaggccgtcgcgggcttcgtcgcgcctgttacggtcctgggcgtcgcttgcggccacctactctccgtctggtggcggcaccggccgcaggcccccgcggctgcagcgccctggtcggcgagcccaggtcgagcccctgcgcccagcgcgctgccccgcgccaaggtgcagagcctgaagatgagcctgctgctggcgctgctgttcgtgggctgcgagctgccctactttgccgcccggctggcggccgcgtggtcgtccgggcccgcgggagactgggagggagagggcctgtcggcggcgctgcgcgtggtggcgatggccaacagcgctctcaatcccttcgtctacctcttcttccaggcgggcgactgccggctccggcgacagctgcggaagcggctgggctctctgtgctgcgcgccgcagggaggcgcggaggacgaggaggggccccggggccaccaggcgctctaccgccaacgctggccccaccctcattatcaccatgctcggcgggaaccgctggacgagggcggcttgcgcccaccccctccgcgccccagacccctgccttgct

SEQ ID NO: 4116 - DNA, 30 bp, Homo sapiens
  chr5:95194673-95194703
  hyper
gaagtgggtctgcgcgcaccccgctgcagc

SEQ ID NO: 4117 - DNA, 96 bp, Homo sapiens
  chr5:98107031-98107127
  hyper
gttctagctccctccccgatttttctttgtacaatataaagtcgtttgtaacttgcagctcacgggcttgaggagtggctgcggtataagcgacta

SEQ ID NO: 4118 - DNA, 196 bp, Homo sapiens
  chr5:98108683-98108879
  hyper
agctgccagcgaattccggcggcagttcgcgggtaccttcccagcccatcctatctgctccggaccgcgggtgacattcagatttccaacaccgccccgagcttgctttaccagacaccctcaaacgactcggaacgcggttccgcagatgtgattggctgaaaggggacctgccgcgcggcgctctgtaaaagcg

SEQ ID NO: 4119 - DNA, 271 bp, Homo sapiens
  chr5:98109212-98109483
  hyper
gattggcaggctgagtcgggctgacgtgcggtcacaaccaatggggaggaagggagggacacggcgggggattatggcgtcgtggattggcgggcacagggcggggcgggacggcagtgcgggactgagattgatcgaccgcgggggctgccgcgcagagatatccgggccgccggtgggtggtcgctagggctgggccagcctcttggaggtccacgcccgccgagcccacgctggctggggccggggtgccggcgcgctcgggactcgt

SEQ ID NO: 4120 - DNA, 31 bp, Homo sapiens
  chr5:98109926-98109957
  hyper
cgaggggagccagccccggggcctagggctt

SEQ ID NO: 4121 - DNA, 1259 bp, Homo sapiens
  chr5:100236034-100237293
  hyper
accgggatctggagccgaacctccattccagtttactcaaaactcaaaactggcctctccacgtggcttgggtagaaagacagtcaatgagatgatttgatggttttatgagtcaactcctccaccagaagcgctgtttgggagttgaaacgaaataatgagctcgggtcacaagcttttccacgaacctttcatcctggagaaaaaggaaagtgctcagggagcctagctgccctcgcattgttcctggcagctccaactccttgcacagtcttggtctctcaggagaccaaggcagtcaggacgctacagggcacgggtgtaagcgcgacgttcgcggccagccctctgccttgccccactgtaattgcgggttttgattaagaaggaggagccagttgccgactgagctttgaaagtgactttgggtggggggtgggggtggggtgggggtggaaggaggggagggaccaaaagagcctgagtcctgcaataaaggtttccccctatcttctcactcattctttccccctcgccgccggcgctctggcagcaggggataaccccggtgcgcgcctctcttcctgtttggtttactcaagcgcctgccccaacgccttctcagtcaagctgggaggaaactgcttcagcttgaaaaggatgcgggcaaaagcccagcccgactagctcaaccgccgcgccagtgcccgcctcctcttccttaacgcctagggctgcgcccaccagccggcaacgtccaggaaagggccacaggagaaatgacacccgtgcaatgcggagtgtcccggctccgcttccccgcagggactcgaggtgcgctccttttcctggccacggtttagggaggctcggagatggacacctcggcagtatctggcgaccctcttctcactcgctccgcccactcctgctctccagggtcccagccaagggcccgaaccctcggagtcctagtgagccttggccgctttgtctgggatcaggcttatcctcctagcccacggcccgggagggaacaaagagcctcgaccctcaagctctagcctctgcctctcatcggagccccatgcgcccattcatcacctttctaaagacccctttgtctgcctggcaagcacaggtctgcaagggatgcccacgcccctgcccaaagtcctgcttttctaacaactgagctagattggattttcaagccacccagtcttgtgtaaacgacctcataccggtcttttttaccc

SEQ ID NO: 4122 - DNA, 30 bp, Homo sapiens
  chr5:100237687-100237717
  hyper
aacagggaggatttccgaaacaggactttg

SEQ ID NO: 4123 - DNA, 937 bp, Homo sapiens
  chr5:100238182-100239119
  hyper
ttgaaaacaggcaaccgtttggtgaataaagacatttctcttgagttctgcccacagattaaaaggacaaggacacacgttctttgttgacacttctgcagtgacttctcctttggcgagagagcacccagggccaacacaactgtcaccacaaccacacagagcaagttgaactcatactgggaacagcttagagaagcacgcacatctcaacaacagcctttgttatttaattcatgacactaaccacgcgcaagctcaaacaaacacacatgctatcctaaccatcactctaccctctatattcacatttcatttatggcttgactttttgtcatatcctgaaatgaagctttgcatttacccgatgagttgcgtctcctggtgctcctcagttcttgctatttcttttgtcttataaaagatcaggagcagacttattgtgcagatcgtccacctcttcctaatggagcgcatcttgggtgcccgagaaagtcctggttgccccagctcccgcaccttctcttgatataaaggctccgttttggggagatagtcgcgggggtgaaatctgtaaaatgcgaggagagcttggagccgggatcccgggatcagatcactggggtcttctgtggccgagctccctctggtcctcgaacgctgcccagcgacctctcgccctgtttgcgccagctctgccagggtcgctccgcgccgcctccctggggctcaggtttcttttcagatgagacaccttgtgcattggaggtggcggcagcttctgcagctgggttcgggggcgtcactggcccttccctcttgctaggagataaacgctgcgcaaagccaatcaccaggctgagggggcggaggctgcttggagagtaacgtccccggctctgcctgctctgtgccgggagaggaagctcacagtgct

SEQ ID NO: 4124 - DNA, 1010 bp, Homo sapiens
  chr5:100239134-100240144
  hyper
cgcgcacatacacatatacatacatacacacatacatacatatgcacacacacgtacacgcagaatcacacacactctcctgggacatcaaagcatcagctctctggacctgggagctccaagatagtctatccgcatctaggtgagagggcacctcgcctggggacagattacaaaagcgtcccgccagaggaatgcttcaggtagagctaggggtggattgcaagaagagtaccttctttcaatcgcttttgctaaacacacaccctcacacgcaaaaacacgccctccaaggtggagtgaaacggggtgcgggggtggggacggcggtggaaggaagaagacttttattactcaatctggaaagtgcaaatacacacatgaacctgttagccgatgggcccactctgcatgggtggtggacgacgaccctggctcaggattctgcaggaaacaagtgatgatagaggtgtcattaggaactttatggatatttatgcgcctccctttcattgccatttggaaactcctcacgcagaagtcaaggaaactccaatcccacttaaacttcattgcggagaaacagagttctgaaaaaaaagcagctaccatggacctctcttttaaacgcaagtacacccacacacattcggataccaaggaaggaaggaaagaaagaaaggaaagaaaagggaggggaggaaggaagagcaaagtcctctctaaaagtctcaattatatatatagcctctgattgtcacctctcctccgtcccaccatttttcgtacttgtattgggtggcagggacacttttcaagagttctgtgttcgattgttcactctgagtacctctccaccatcctccagtcgttgccctcattgggagagatgcttgctactctgctagtaccacgccttggttccggtctttactgttggctggtaggtcgggaggcacctctagcatgagacagtgtctggaagccaggatttccctcatctatatgcg

SEQ ID NO: 4125 - DNA, 153 bp, Homo sapiens
  chr5:100240232-100240385
  hyper
cgctcagaaatgatgaggcccaattccaatcttccctcccgccggaagtaagaaggggaattctgagttgcttgtcgcctgacagcttaaaatagcaacgaaaacagccagcatctttgcttaaaaacccaaggttcccgccagtgtttacca

SEQ ID NO: 4126 - DNA, 1095 bp, Homo sapiens
  chr5:101631421-101632516
  hyper
tttggaaggctggctgggggccggtaggttgaccttggtgagagcgcaagcaagttccaaacccggggccaccttgcagggcgcgtccaccgtcccacggaccccgcgcacctgccctctcccccggctggctcgccgtgcccacctcgctctccactggcccgagcctcaagcgggcgctggactttaccttgcgtgacggccaagaggcagtagtgaagcagaaagcctccaggtgtgttgcagcgctggagacattgaggatggaagttcctccagccgtaagacccctcctcaaactcggacagcgacagtgaccggagcttctcttcggagacattgggaggggctgaaggcagagatggctctggtgacttctggggctcctggggcttctgaagctcctgtggctgagaattctctctttgggggtcagaggacaaggcagagacttcgatttgggagggcgacgcagacaagcggcgcaggatgtctgggctggaggggacaaaagccaagttctcaatacctttggcgctcttcatgtctggatgggttctcccgactccggtgcttcagagcagcagagccaggtccctctctggctcctcccacaggcaggtgacagcgcccccgtgcgggaagcttcccgcctcctggccctccagcctccagcgcactctccgccaccgcctgaaccttcctactccagctcgcagctgtctggagcgcagagcgctgagcgggggcgttagcgccccagcctgtggctttggcgctcagctgtgcctcacccgtcgcctcaaggaccaaccggaaggcgcggcgtgggcgtgccacccggcggcggccgagtagagggggcgagagttctcaccccacagccttcgaccggagtccgcctccgcccaagcccctgcggttctgacctgagccttcagcccgcagcgcgcctcccttgagcccaagcactgggaacacacagagactgtgggagtctctggccataagctccccttgggtgctgacatgaaacctgtaaacagttgcatcaggagattgttcaggaaactatcttgcgttttcttcctttgc

SEQ ID NO: 4127 - DNA, 50 bp, Homo sapiens
  chr5:102090423-102090473
  hyper
gggtccttccttctctcgggaaacgttcttctggcgcgaagctgggcgga

SEQ ID NO: 4128 - DNA, 30 bp, Homo sapiens
  chr5:102201406-102201436
  hyper
tccccaggcttgggcgcaaccttgtgaaac

SEQ ID NO: 4129 - DNA, 2259 bp, Homo sapiens
  chr5:107005046-107007305
  hyper
cggtactattaataaatagcacctaggagggcaccgagaccggcacacagctggaagctagcctctgtcccagagaaagcagtgcggtatgggcctagcggggccgacttctgtgcacaggccgggaagcaataaaggttcggaactgctccagacccggaggaccccgccgggcactctggataacctccccactccacttccagggtccgaaaacacgggacgtctgcgactggccggtgtccagcacgcgcactaggaccgcccccggcgcccacctctagtctcccgcatacccggcgggcttcgggacgcctacaaatcggttccaggtaatcgcgcgcgttcctccggcagcacatcgccaggccgcgggcgaagggctcccacctcctggctcggccaactctggcagcttgttctgcacacatgacgtaacccggcattagatcaaactttctggcaccttgaacccactggggtgggtggagggatggagaagatgggagaatcctctccactgccaggcgcgccgggcccagactgactcaggggccgaatgatttcctcgcagttgaagaggaaaataaaaacctaaagcttccgcttcccagcccccctcacttcccccagcccgtgcgctctctctgcgcgcaccgggaaaagagaagggaaaattaaaattaaaaaaaaaaaaaaaaaaaaaaaaactttgggggatgtttggcgggttctctccgcagtccctgcggacccacgctccaggaaggagctcccggctgcgcacactgggggctccccgcgccgggaaccggatgccagccagatgccggggctgggaagcagagaagtccctactccccggctcccgcccttttccgagtctcccggcgccccgcagaagcagttggtctaggcagccccggggactcccaggggtacctggcctttccgcggcggcttaacaaagaggggcgcgacgcgagcgcttcccgccgacgcctcaagccatcagcgcccgggcgacgcaggctccgagggtgcgcgccgccagcggttggtgcgcgccgatccccgccgccgctccttccgcagggccccgaggcccgggtagccctggctctccgcctgttatcggcttacctggggttgctgctgttccagtagacagcgtagcggtcggcgacggccttggagcccgggtcctggctgaacacacacatccagagcaccagaaacaccagcgtcaacatctccacgtgcaacatcacgcctggccagcggcggagcccccgacgcgccactccggggagagagcggggatccggagggagggaggcaggcaaagggacagagagagagcgggcgccaaataaatatgaataaataaaaatgaaagtgggcgagaaaggaaagaggcgcccaccaagctggggaggggtaggagagcgagaagaaaagaaggcggtgggatggggggtgataaagacaaactcgcacccccactggagggttcaggaggaaaaaggaatcacaagatggagagaagcgtgcgtgtgtgtggtggcggcggcgagggcgggggaagaggtgccaagctgtgtctcgggcggcggcggcaggccggtcaccccgggagagggaggtgcgcgccgggccgggcggctgcagcgcgggtcggggcaggcggcggcgcgcgctgcacagtcaccgggagttgcgcgccgcagccgcggggagacatacaccggcccgccgggcccggctcagcgtcggcgcagcaggctacgcacggctccgccaccgcccggggccctcgcactgcgccacgcttcgctccaagttactttggcggccggtgggaaactgcaggagaagggcgacgtgctgatagagggcttcgcgcttgtggtcccgggagtctgagaacccctttcctcagcctcctctgtgccttagcggggcgacccccagaaatctcagaggagtcgtaagtgctgcggtaccgggcggtgcgccgagaagggtggggatccggagccgcaacccagccttgtcggtgtcctggaactggttaagcggcagctgcgccggctttcgaagcggtcttgcctcgaaaacctcaaagaaaagtttggctcttcgcgtcttccggcaggtcccccagcagagtcggaacgcggcggtagcggaagagggcaccccgggggctggccgagcctcggggatttctcgcgcgtgctttccttggctgggtgt

SEQ ID NO: 4130 - DNA, 37 bp, Homo sapiens
  chr5:107008028-107008065
  hyper
cacgcgtgaacgtggacgtgggcggggggatggggct

SEQ ID NO: 4131 - DNA, 31 bp, Homo sapiens
  chr5:107008368-107008399
  hyper
ctccacgagaaagaggcgttttcctaatctc

SEQ ID NO: 4132 - DNA, 30 bp, Homo sapiens
  chr5:107141292-107141322
  hyper
tttcagggattagtaagaggacaccttggg

SEQ ID NO: 4133 - DNA, 207 bp, Homo sapiens
  chr5:107359032-107359239
  hyper
tgattttggacataaacgtcatatatactgagacacaaaattgagtggttgaaataggtagataaagtagctgttgtttcaagaattgaaaatggaagtggtttgtattatcccattactacaaattggtggaaatggaacaccacctcatgttcccggctagtgtctaaagtctcgtaatccacctatgtcgcgtttccctggcag

SEQ ID NO: 4134 - DNA, 31 bp, Homo sapiens
  chr5:108313516-108313547
  hyper
tcagacacttgtgaagcgactcctgtttctc

SEQ ID NO: 4135 - DNA, 30 bp, Homo sapiens
  chr5:109024882-109024912
  hyper
tgctggcgcctgaacgcccccgaaggcctc

SEQ ID NO: 4136 - DNA, 58 bp, Homo sapiens
  chr5:110074797-110074855
  hyper
cgcgtcatcctgcccccgctgcgatgcatccgcggcgcccggacggatttgatggctt

SEQ ID NO: 4137 - DNA, 31 bp, Homo sapiens
  chr5:110075104-110075135
  hyper
tgagaagcatggggaccgacacagggatgag

SEQ ID NO: 4138 - DNA, 570 bp, Homo sapiens
  chr5:110559548-110560118
  hyper
tggtgttaggtgggagggactcgccacggagacgcgctcaaggagggatgagttgcgccaccaccacctaggtccctctctcgctatccggcggggccgcccggacccaggtgctgccagggtacgcctggcgcccgccatcccagagcagcgtcccgctgcgcacggtctccctccagctccggtccccgcgggagggcgcgtgggatgatgcgcgggtccttgtgccttccccaagctccagcatccggagccgccctagccggcaccgcggcagccacagcctgggagagagaaaggaaagagggagggcggcgggaaaggctcggcgcgggaggagggcgggtgaggagggaaggagcgagggggagggagcctctctcctcagcggtgcagctagtctccctccagcgggcggcgactccgggttccccctcgcgccctctcgcagaggctcgcccccttccccgcccaccgtccctgcgagcgcgggcggcggcggtgggcgtgtgcgcgcgtgaaggacgccgcctctctctcgctcctgcgttcgcaggcggcggctggcgg

SEQ ID NO: 4139 - DNA, 381 bp, Homo sapiens
  chr5:110560138-110560519
  hyper
cggcggcggcggcggcggcggcttccggagtcccgctgcgaagatgctcaaagtcacggtgccctcctgctccgcctcgtcctgctcttcggtcaccgccagtgcggccccggggaccgcgagcctcgtcccggattactggatcgacggctccaacagggatgcgctgagcgatttcttcgaggtggagtcggagctgggacggtaaggcgcgggctccggctggggaagcccgcggcgtgcactgggggttgtccctctcgcagcgacggctcggagggtgcgggagcctgccttcgtgcccttcgatttctccctacctagttagtgtcttgagagagagctaaccttcattcaggtgcggctcgagtccttcccacc

SEQ ID NO: 4140 - DNA, 766 bp, Homo sapiens
  chr5:110847624-110848390
  hyper
tttggcatcacctccgcgaagcctggtgggacgcggctgcccctgcgctgtctgtgcacctcctaagaaccaggaagcgcggtgacctccaaagaacaggactgtcccaaatcaagcgggattaccaccgcccctctcccatttaacagctgaggacactgaggtctaatggattccaagtacttaaataggtgagcggcgcgcaggggcgagttgcaagccctgggatccttccagctcgccgcttcccctcccaggggctcaggtttctctttcatctgtgaggtcctctcccgcccggacgccggggcccgccatccccaacgtccaccgcgagctccccagatccatggtctggagcaggtccagaagacgcacctggcaggacgccccgggcgccacagtcgccctccacacgggccaccccaatcctgccgcggctccgtggctctccttacctttacctgaggtgaagcaaggacgtggaagcagctacggcgcgctaccaagcacctcacaccgctctcaacagtactgctcagcctcccggcccgccgatgcgcaggcgacagcagccaacttgtaagtcaccgctggtcgcagccaactggaaggcacccagcgcctcagggcaaggcgggccgagcccccagccccgccccctggcccgatcccgggggctccggggagggggggctgagaggaggtggccggaacaacgtgcgcttgttcggattggctggcgcgggagcgtgtggagggctga

SEQ ID NO: 4141 - DNA, 30 bp, Homo sapiens
  chr5:110848602-110848632
  hyper
ggtccaaattcatcccgcttgtggatatcc

SEQ ID NO: 4142 - DNA, 30 bp, Homo sapiens
  chr5:111093898-111093928
  hyper
gtcctgtggctgcgcgtgcacacacacacg

SEQ ID NO: 4143 - DNA, 30 bp, Homo sapiens
  chr5:111496618-111496648
  hyper
cgcctggctgtggccgcgtggtctctcacg

SEQ ID NO: 4144 - DNA, 30 bp, Homo sapiens
  chr5:111497158-111497188
  hyper
taaagcctacctcacgcagtgtcagccttt

SEQ ID NO: 4145 - DNA, 30 bp, Homo sapiens
  chr5:112175624-112175654
  hyper
cagctcaaaccaagcgagaagtacctaaaa

SEQ ID NO: 4146 - DNA, 30 bp, Homo sapiens
  chr5:112258111-112258141
  hyper
tgcaactccgcggacgctgcgaggtggcct

SEQ ID NO: 4147 - DNA, 1326 bp, Homo sapiens
  chr5:112629427-112630753
  hyper
tcaggagtccagatccgggcaggaaataaagttctaaagcggctttgaagtgctttctccccagacccctccccagcgcgggtcattcatctcagcctagggaagagaccaccttgcctgaacgtagccaaacgcatcgcacgtgggagccaagtgggagatgaaataatccaatgcgtccccctcaccaccaccacccccaccaaattagttaccgtcggcttaaactcatcgggaatgtccgtgtattttaccgatcagggaaataaaagggtgtatataaattagtggaagcgggtgggaaggaacaagggatgcagactgtcgtgagtaaaacgcctcgcggcttggtgagaggttgtttcttttttaagccactcatttcagactgaaatatcaagccagttcaggtcatttcctgagtagcactacaagttaaaacaagatccagaaaatctactaatcttcaattgcgctgcctccagactgggagcacagggggatagggtgtagggctgtggggaggtcgaggggagggggatttgtggaaaagcaaacgcccgagaaaccctagctcccgacctcagctgtttcttacctcactcagctcggccgaggagtcgtttccatatttcatggcaactccggaattcatgatgcacttttcagagctgggctctcagtcccccaggtctcggagcttaagagttggacttcacaggctcaatatccactgcttggtcccttctgccacattttagtctagacagccattttcacccaggacagttgcgaagcgcaaacggaggatgcaggcactcttaaaaagagcagccgtggctcgcgtttcacggacgagccattgctgcaggaggctcggtggcgcggcgcgctcgcagctgcggcagcggcggagcccgcgcggggaccctcccgcgcgcacccagcgccccgttccggggcagtgccaccctgggcgccgcctcgccactcctacggtgcctcgccgccccccattaccaggatggagggcacttcccagcacgagccgacaccctagagggcaccggcgagctcccgaaaaaactagggcggtggggcgaggaagatccgcgcctcggattccagagaaggaaagaaagctagagggagccggagcggagctgcacttcacgccgaagtttccccttcgaatcgtctggagttgtaagtggtttctgattgaacacagctgtctagctgctggccacggggtgcgcggaggaggcggggctagagggagaaaagggtgggggcgagtagcctggaggccgagcagaggagacc

SEQ ID NO: 4148 - DNA, 30 bp, Homo sapiens
  chr5:112823741-112823771
  hyper
gcacccccgcaaggcgaacagagcagtccc

SEQ ID NO: 4149 - DNA, 44 bp, Homo sapiens
  chr5:113391265-113391309
  hyper
gcagccggggagggcgtgatggagaccacgctggaaatgggaat

SEQ ID NO: 4150 - DNA, 30 bp, Homo sapiens
  chr5:113391553-113391583
  hyper
tccctccccagtgccgcatgctgcttaagg

SEQ ID NO: 4151 - DNA, 20 bp, Homo sapiens
  chr5:113562586-113562606
  hyper
gactccgtctcaaaaaaaaa

SEQ ID NO: 4152 - DNA, 1768 bp, Homo sapiens
  chr5:113696495-113698263
  hyper
cttaatttccctgccaggctgcgactaccggggtgaatcagcccgcgccaggcccctttcccacccgccgctgcagttaggacttggcaaagatgctcgatatttgcgtatttgtgaccggtctttgctttgtgtctgcgctgcaggtgaggaggaggaagagaagcagaagagcagctggaggccggcggtggctgagcagcccccacacctttgagcgagccgcctgcctctccaccggcaaggaagccctgggacctccggattcgggctgccggagggcctgagcgccagagcccaggacccggcggccgggggcgccatcccctcatgttctggagaaggcgcaaatgtgagctggcggtagcggggaaagccctccgcccccgccaggggggacccgggaagcccggccggctctgtcggcagactgcggggatcccctcctccggccccgcccccacccacccccggccggggtgccgaggcggttaaccctacccgcgccgcagcgcacttgggctagagcgccgcgcacccaatccagattccagagcctgccggctgggaaagatccggtctcggggtcggctatgatcccgcagcggccaaggcagggctcaggccccgggattctccccacacgctgctgcactggcgcagccggtcgccaaactttttctccccaaagccagtgcccccgcagttacttggcgggcagccggcagcccactctcggcgggatgatctgggagaagcgggcgtgggacgagggggctgctgttttgcagccctgcgaggcgtgcagtcggagaagtggtcggggttccacaccgtccctgagcctgcccccggccaaggtggcccgacgtgctgcagtggctggcgcaggtgatccgggcagcgcgtccggcactagtcaagggggcagcggcacgggagggaggggcgcctttctcttttctcctccccctgcagcccagctgcactgcgtgggggctctccatctccacgcaatcagcaggcggaatccctgccctggagcgccctggctctggactgcacccccctagggtttgtcctgcagattcccctccccatctttctctgccacacacgcttccctaagccgcgcgcgccgcaaactcagtctcggtccccgcaggtgatgtcatgcccattgttttggtgcgcccaaccaatcggactcgccgcctggattctaccggagccggcatgggcccttcctcgcaccagcagcaggagtccccgctcccgaccataacgcattgcgcagggtgcaccaccgcttggtctccctgcagctttaacagccctgacatggaaaccccattgcagttccagcgcggcttcttcccagagcagccgccgccgccgccgcgctcctcacacctgcattgccagcagcagcaacagagccaggacaagccgtgcccgcccttcgcgcccctcccgcaccctcaccaccacccgcacctcgcgcaccagcagccggccagcggcggcagcagcccatgcctccggtgcaacagctgcgcctcctccggtgccccggcggcgggggcgggagataacctgtccctgctgctccgcacctcctcgcccggcggcgccttccggacccgcacctcctcgccgctgtcgggctcgtcctgctgctgctgctgctgctcgtcgcgccggggcagccagctcaatgtgagcgagctgacgccgtccagccatgccagtgcgctccggcagcagt

SEQ ID NO: 4153 - DNA, 253 bp, Homo sapiens
  chr5:113698330-113698583
  hyper
cgccgccagccccacgggcagcctcggcagtctgggctccgggcccccgctctcgcaccaccaccaccacccgcacccggcgcaccaccagcaccaccagccccaggcgcgccgcgagagcaaccccttcaccgaaatagccatgagcagctgcaggtacaacgggggcgtcatgcggccgctcagcaacttgagcgcgtcccgccggaacctgcacgagatggactcagaggcgcagcccctgcagcccccc

SEQ ID NO: 4154 - DNA, 174 bp, Homo sapiens
  chr5:113698669-113698843
  hyper
cgtggtgtctaagcccgagcacaacaactccaacaacctggcgctctatggaaccggcggcggaggcagcactggaggaggcggcggcggtggcgggagcgggcacggcagcagcagtggcaccaagtccagcaaaaagaaaaaccagaacatcggctacaagctgggccaccg

SEQ ID NO: 4155 - DNA, 427 bp, Homo sapiens
  chr5:113698951-113699378
  hyper
cgacaaggtacaggcttgaaccccagcccacgctaccggagtcgggcactgggtggttgggatgggcactggcggggaccctttgcgtgcggatccctagcctctccgggacgatcaagggagcccgccaggacagcgggcgcgtctaggacgcgcatccgtagtcagctaaacaactcggagatgaaccctttccgcgtgcagccaaagttctcgaggcagttaagagtgctcagcgcattcgggcaccttaagtaagtggttctggaagtcggtggggaaaccatctgtaattcatcccctcgtgaattatgtttagaagggccctttcaacccgctctcttgaactcagaagtaagttcctctggttttgctagcctggaacagcggcgctcgcttcggtcctctatggcgtggacccagcagc

SEQ ID NO: 4156 - DNA, 30 bp, Homo sapiens
  chr5:113699591-113699621
  hyper
ctgtgttgcaggcgtcgctgtattccttag

SEQ ID NO: 4157 - DNA, 545 bp, Homo sapiens
  chr5:114515034-114515579
  hyper
gtggggctgaaatcccgctcctccagcatcttcccctccctaccaaaagaaggctgctttaaatattcccggcctggagcagcagcagctaaggacctggaaagaggcccgaaaaggccagggcagggcgaacgaacgtgctgtccctatttaccggccacacgctctgactgcgggctgaccctgatcgcacacttcgagcctgttcactcgctgggcggaccctccctccacgctccgcgcccaggcaggcgaggtcacccactcgaagtcaccacgtttgagtagccctggttggtggggcagcgcccccttggccaacgccccgccctcctctccatcttccgacgctgggctctcgcccttcggcgtccgagagcccctattgctgcccagctggccccaaaagcgtccgaaagtcccctcttggcttatttcagagatgccacgcaataaagaaaaggcggctactttgcattccgcagctgctgggacgcccgggctgcgagcgcggctcctggattccagcctcccgcccttcccag

SEQ ID NO: 4158 - DNA, 117 bp, Homo sapiens
  chr5:114515610-114515727
  hyper
cgggccaggtagtgccggagtcgggggcccaggccgcggcgccccgcgcctcatcacttaccttgcctttagctatcaattccatgatgtagccaaattcactcatctccccagact

SEQ ID NO: 4159 - DNA, 570 bp, Homo sapiens
  chr5:114515769-114516339
  hyper
cgggtgtatcgaatttgtcctttcttttctctttttctgtttttagtctgagttttgccgagctccccgcccataagctgttaaccaggaaaagaggggaagcgccggggaaagcaagaagcgggcttgggtgaaatgaaggccatcgagggctcccgggcagcctcgcccggcttgctaggatccgggtgcagcggtcggggctgcgcgatctaacggaacaaacgagggcggcggcggcggcagcagaggccgtgaaaccctcaccaggcggagccgggcgcgcggaggccccgcctcctcgggggtcgcggcagcggttcggaccgcagcggagacaaacaaacgcgcacacaaagcgggtccgcactcggctcagcgcggccccagctagacattccccggcctttatcgcatgccggcaggttggccgtccccggctctcggcgcgaagatctggaaaaaagccccatctcactgtctggaggtgcgagggcagacagaaacgaatacagaggaggcgcaacaaaggggctggctgccagcgccggaaaataaataaataaatac

SEQ ID NO: 4160 - DNA, 241 bp, Homo sapiens
  chr5:114632074-114632315
  hyper
gcagcccctcgcctgccgccagagcagctctcggttctcccggatttacctgttgaggcgctggcgtcgctcccacgccggtcccggtggccgcgcccgcccctgccacagccccggctaccgcggtggccgcagccgctaccacaaccgtcgtcagtgcggccatgtttacccgccgagctactcgggccgcggcggccaccggtgcctggggattcgtggcaggcgcaccctggcctct

SEQ ID NO: 4161 - DNA, 31 bp, Homo sapiens
  chr5:114879309-114879340
  hyper
aacggatacacaaccacgaagagtatgttcc

SEQ ID NO: 4162 - DNA, 90 bp, Homo sapiens
  chr5:115151267-115151357
  hyper
gaacagcagaaattccgtagtggcagctgacggccacaagacgctattttacatgagtaaaaatgcttgctataaggtgcccggttgcag

SEQ ID NO: 4163 - DNA, 735 bp, Homo sapiens
  chr5:115151649-115152384
  hyper
cgcagacgcgcggtggcctcccttcccggcgcctgtccgccgttcccggccggaggtcagcaaggccagtaggatccaccttccgcctgcgctgtggccgcggagccccaagcgagtcgtgccagccccgcggctggccagcgagggggcgagcggcggacgcagcgcggcccgagcttcccgagccagtcactttgggctgcgtcccccacgtccattcctcctcagacggggcgagtgggcgccgcctggcattgaagctgcagcgcgctcacctgtactggtcgaacttggcgtacattgcccactcggtggggtcgctctcgtaggcttccatgatggcctgcacctcctctacattgacctcatcgccggcaaagagctggtgcaggatgcggatcagatcagccagggtccgtggcttcagcacttcggtctgttccatctcgtggggagctggctgcgcgcgcgtctcactgctgggctgcggtggaggagctgagcgagccaaggagctgggggcgagggagcctaacagcccgctagaccgctaagcagacacacacgcacaaacccagcattagagtgccgaaacgtaaggatgtcgtcgcagagacagcaagagacccacccccaggcccctggcagcgcagtggatccgggatcgctggagacgcggtgcacacacaaatcaggttcagatctgtggggttcatcctcccgggccccttttaa

SEQ ID NO: 4164 - DNA, 117 bp, Homo sapiens
  chr5:115152616-115152733
  hyper
ggcctaacgcctctccccgctccacctccgccgctgtggttcgcgacgctgggacgtagacaaaaagggtcggaggagatggctgcggggactgacgctgagtaaaggaggaaaaga

SEQ ID NO: 4165 - DNA, 30 bp, Homo sapiens
  chr5:115421137-115421167
  hyper
cggtattccgtttccgatttcagttccggt

SEQ ID NO: 4166 - DNA, 30 bp, Homo sapiens
  chr5:115908468-115908498
  hyper
catcccgagctgtccgcatgattccctcca

SEQ ID NO: 4167 - DNA, 186 bp, Homo sapiens
  chr5:115911051-115911237
  hyper
tccagaagcgatggacgctctacgtagttagatgaattggatagaagccggtgcggttaaaaatacacttggaagataagaacacagctattaattacgcacatacacacgttaataaagcatgtgaagtaagcaaataaactacagtgcagagaatggcgtttttaacgacggcgatctatttta

SEQ ID NO: 4168 - DNA, 263 bp, Homo sapiens
  chr5:115911446-115911709
  hyper
agttacaggcttgtgccaactcgtcgggccacaccacgttcccctccccctgccgctgcgccccgaaatcaactgcgcgccgcggctcttgctccccaagggggcttcgcagatggtacggatcctagtcgcaacctttaaacaaagtaacatcgggcggcccagcagttctcggagagatatttactagtcatggagttggctgagaaaagcaagtgcggagatcggggtctcagtcccacttaggccgagtttctttatat

SEQ ID NO: 4169 - DNA, 124 bp, Homo sapiens
  chr5:115911988-115912112
  hyper
gggtagtggggggcgcggccctaggtgcgcgcgcagcccccgcggcttcaagagccagcctcgggagggggttggggagtgtggggcggtgggtaggattgcgctttcccgcgggttgggtggg

SEQ ID NO: 4170 - DNA, 30 bp, Homo sapiens
  chr5:118407243-118407273
  hyper
ttgcaggactagggcgccgacatgaacctg

SEQ ID NO: 4171 - DNA, 56 bp, Homo sapiens
  chr5:118604952-118605008
  hyper
cacgtcctcctgtaaccgcacatactggcgaaagcactgcccgggttatcagggtg

SEQ ID NO: 4172 - DNA, 1748 bp, Homo sapiens
  chr5:119799800-119801548
  hyper
ggtggcatctgggagatatctcgaagggcaacgtcgaggggactgcaagcgtcaaccctggcgcggcagcacggcgcccctctccgcgggcggggagcgagcgcgtgtgcgcgagagcgccgggcggcggcgggaggaggcgcaggcgcgctgctcgcccgtctgcagccccgagccgagcgccgcgtctcgggagttgatggcagcaccactgtgcggccgcccggccgagcgcggagcgcagccactcgccgctgcccagggagcgcccaagatgtggggggaccggggcggcagcggccgtagcagcgccagggacgggggcacgcagcagcctccgctcgcccgcctgtcctgacctgcctcgcttgcccccaaagaatgtcagccaagtccaaggggaacccctcctcgtcctgtccagccgagggaccgccggcagcctccaaaaccaaggtgaaggaacagatcaagatcatcgtggaggatttggaattagtcctgggcgacctgaaggacgtggccaaggaacttaaggaggtgagaggcgcaggggtggggagggagttcggcacccttcgacccctccggggtcccctttccgattttcagcagggacagccagatttccaaactcctgggaaactacagaaaaggcgcctgcagacggactttctttgctcctggagtcctgagaggagttgttgttgcactttttaatttttttttttaatcaggaagaaatcaactagtgttttaatcgatggacctgggctggtgggagggatgaacgcacgcgtgtctctgaatctgtgtgtgtgacgacgggggagagggttagctgggggtgtgtcggcagaggaagtcgtgagcagcccggctggagcgtgcaagatgctcctctcctgccctattgcttccccagagtcctttggcaagtccgctgcctatctgtcagcctccccaagtcagggctgaagaggggccgggttctgggccctgggccagatcagggagggcagcctggaggaagcttggctcagactaccctccctgtctctcgagcctcgctgtagggaaggcgacccgggctgctggcagccttggggctaaggagggggtctgggactttctcactttctcagtttctgaagcatcccctgctctcctccgaacgtcgttaccagtaactctgggccttcccgccaccctacctctgcttccttccttccaccctgtcgccacttggcattgaacccgagaagcaggacgcgcaggagagtgtatgtgtggccggggtcttgccattggcgtcctggctctctgcagctgggactgcttcggttcttccccgcttttcctatcccacttcggttcagccctactcccgcccgcccctagccccaggtgatccagatggaaagaagcagagaaggtgtcagggctgaggctgcgtaactcaggcggcggctccgggcgggggcgggggccgggctgggaggggtggggtctcccgagccaggctggctgccggcggcgtcgcggagctggtagcagagtcccagcgcgccgctcactactgaatggggtcctggtgcggttctcggtgagggagtccgcagctccgctgcgtgagagctaagactagaacttcgaaggtggcggtggctgcagcgggaaaaggggtggggcgtagtctaggtccaaaattgtaatcctgtttctgaagccaacggggaggagactga

SEQ ID NO: 4173 - DNA, 1487 bp, Homo sapiens
  chr5:121412699-121414186
  hyper
aacgtcagcaggcgacgggcgcagcagtgaaacaacccggcgccccccgctccaactccctacccctctaggtcccttactcctcacccttcgcccaccgggactgcagagtggagcggaggacagcaagagaactggggacgcccgggactgcaaagcaatgtgaaaaggaagcaggaggggccagacgcgcggtttgcactggattccagggctgccactgcaggcgcgtgggggagggatcggatctgcgaggaccggggcccgccgcgcccaggcagccacgtcgagaagccacatagctggggaccaggtgcacgggtgcttccagcggacttgggggtacttaccgtactggaagtagccagtgccgtatccgggccggtacctgcccccaggtctgggcctttcataagtatcgtagtagttgtaataagggttgtcgtcagagtacttgtaggggttgtaagggtcgtcgcccaccatgccgtccacgcggctgggcggccgcaggttactgagcgcaggaacttctcccggcgctgtctggttctccgcgcgcgaggcgccagcttcgcgggctctagatgtcgagtagccagcttggaaccagtgacgggcggtgggcctggggcggccagcggtgactccagatgagccggccgtccgcgttcgcgccgcggcggtgcggttgtcgcggatcagcaggatcggagtgcggggctgctgggcggaggcgttggctgcaccagggacggcggcgcccgggtcccggcggcgctgaggctggtactgtgagcccaggctcagcaagctgaacacctgcccgttgttctcccattggatctgctggcgccaggcgcccggagccgccggcggctcgcgcgggggctgctgttggccggcggcgggaggggcgcagtgcactagcgcgcagagctgcaaaggcccgagcaggagcacggtccaggcgaagcgcatcactccttttgccagattgaccccgctcgaggaggacgtggctcacagaaaataaaaacggggctcaaatcacgtgagggaaggagaaatcttcaaccaaggaggcgagcggagcacgggtatctcagtctccaccaagcaatgccaagggtgggattcagacccttccccagtcaaggcggctgctcggacgtggcacccttccctttcccctttctcagtcctggaaggcaacggggagcggcgcggcagtcccggagagcgggcagtgtctggagtgaaggaaggaggagagattttaaactttctggcacgtttgcaaagttacacaagccgttctggcccggccgcccctcagctatttgttcacgtaatgcgattggaaacgtgcaaggcggacagctcctcgcctctgcccctccctctctcccgtccctgccctcctccccccagacacgttgcacagggagcgttaaggggaaagaacaaaacggaacacacatcct

SEQ ID NO: 4174 - DNA, 359 bp, Homo sapiens
  chr5:121647808-121648167
  hyper
ccggggagcggcgcccgcggccgggccgcattgtgacgtagcggggccgcggcagcgcctccaccgcccgcctacttcggctgaggctgttctgctcctgccgctgcggtccgtcggtcggtcagtcagtcccttcgcgctcctgagccgccggcgcgccgggcgccccgggtgagtccaggtcccaagcggacgccgcggggaggcgggaggcgggcagccagcggctcagcctttccaagtttgcaccaggcgaccccggcgggtgtcgccccgtgctccccaagccccgggacccctttgtgccgcgagtctcggctgctccgggcagcagaggcgcctctgcagaaagggtttga

SEQ ID NO: 4175 - DNA, 135 bp, Homo sapiens
  chr5:122371730-122371865
  hyper
gccagcgtggagaccacgcagcgggcgggcggctgcaagccctgggctccgagcgcctctcctgtgcgggtcccgcccccctccccgcattcctctcgttctgctcccgagcccaggccacgctgaaggaagtac

SEQ ID NO: 4176 - DNA, 30 bp, Homo sapiens
  chr5:122372078-122372108
  hyper
ctccagtccccctgcgcccgggaagcctcc

SEQ ID NO: 4177 - DNA, 31 bp, Homo sapiens
  chr5:122372774-122372805
  hyper
ccggtgtgattgctgccgccttgggagcagc

SEQ ID NO: 4178 - DNA, 30 bp, Homo sapiens
  chr5:122424393-122424423
  hyper
ggttgcgtggcgggcgagtggactctggca

SEQ ID NO: 4179 - DNA, 638 bp, Homo sapiens
  chr5:122425002-122425640
  hyper
tcgggcgcccaggtccgtccgcactctcgcgccctccgcgggcctcccaattttctcgcttgcaggtcgggaggtttccgggcggcacaatctctaggactctcctcccgcgctgctcaggggcatgtagcgcacgcagggcgcacactctcgcgcacccgcacgctcaccgagacacccgcacgcacccaccggcagcaccgagttttcaggtaaggtgaggctggtctgggacttaagagtctagggcttggtagataggaaggttggtggtcctaggttgggggcgggcggcgagactgttctgcctcctggcgcctgaggccaacgcggctcgggcgctgcgccacgccggctcgggtcggctccgggcgctggctgagggcgggggctgcgtcctgcagccgagttctacggggcagcgccctcctgtcgggccccagcattgctggatgggagctggacgctgcgatcggggaggcagagcagggtgcacacagctccctctgtgcggcgccgcagcttcggagtaaactttgcgcccaagcggagttgggaagagggagccgcggaaccgggcggccgccggctgaaccaccggctcgggcactttctccagggtcccagtggccctcttc

SEQ ID NO: 4180 - DNA, 254 bp, Homo sapiens
  chr5:122425701-122425955
  hyper
cgccggacatgctgaagcccggagaccccggcggttcggccttcctcaaagtggacccagcctacctgcagcactggcagcaactcttccctcacggaggcgcaggcccgctcaagggcagcggcgccgcgggtctcctgagcgcgccgcagcctcttcagccgccgccgccgcccccgcccccggagcgcgctgagcctccgccggacagcctgcgcccgcggcccgcctctctctcctccgcctcgtccacg

SEQ ID NO: 4181 - DNA, 656 bp, Homo sapiens
  chr5:122426004-122426660
  hyper
cggccgctgccgccgcgctggctggtctctcggccctgccggtgtcgcagctgccggtgttcgcgcctctagccgccgctgccgtcgccgccgagccgctgccccccaaggaactgtgcctcggcgccacctccggccccgggcccgtcaagtgcggtggtggtggcggcggcggcggggagggtcgcggcgccccgcgcttccgctgcagcgcagaggagctggactattacctgtatggccagcagcgcatggagatcatcccgctcaaccagcacaccagcgaccccaacaaccgtacgtagccgcagcccgcgcgctctctcccggggcgccggcgccggcgccggcgggcgcgggtgcctgtcagggaggcgggtcggataggagtgacacggggccgggtgggtggggagcacctggtcctggccgctggcccgcgcctccccgatctctgtgacaaaagttttctggcgttggagaaggaaagagaacggatgggacggccggtggcactttggggttccctctccctccctctcctcacctgcttcacagtcccaagtgtttggggccggagtctaccgtggacccggcctaacagacctctgccctcccgccggacagtgcccggggccaggcgggtactggcagcg

SEQ ID NO: 4182 - DNA, 557 bp, Homo sapiens
  chr5:122434605-122435162
  hyper
cgcccttggagtcctggggctgcggctcctgctctaccgggctgcaggcttgctctgccccgtcccgtggcgtttgggaggcagtcgaggaagcctccgagtctctgggtcgaaggaagtgcgaatggcacccgcgatagactggccgtctcccccaccccgccccgtctggtgattttaaatcgtctcctgtgtaattgtaaaaagaggaaagctgaatacccagacgaccagtatagaatctcttcgagacagcagattgggcaagagacgggctttttttcgcaatacaaggataaacacatcctgaaactccagatagaaacctcaggaatgggcgagagggtcagaaggaacgagagacagtagggaagagagagagagagacagagacagagggagagatgcagagagactgaaacgggaggaagaagcctggaactgtcggttccgtggagagcggacatgctatctgcgcccagatccgaaggctttttggggagcctagagtcctggcccggtaccaggcagatctgggtgcggcgaattccaaggga

SEQ ID NO: 4183 - DNA, 101 bp, Homo sapiens
  chr5:122435201-122435302
  hyper
cggtgcccccaaggcatcaccttcctcgaaggtggcttacccaggcgggcggtgatgctgttgtctcgggagtttactcaaagatgggccgctcggggcgg

SEQ ID NO: 4184 - DNA, 927 bp, Homo sapiens
  chr5:124082613-124083540
  hyper
tataacagcattcgctcggggcggggggcggggggcttggggcggtggggtggggaaaataacggcgtttaaaatgggctcagtcttcgaaacctaaaggatgtgatgttttcctgtcttatgttgttttaagaaaaaggaactgagttcctagtatagctcccgaggggagtggaatcctctgtcgctcaggtcagccagtcatgtggtaattcgataattagagtcaaaataaggtttttgttttctttttttttttttttaaggcgacccttttcgggagtttttccctcttatactcgcagcaaacggtgtgtctcccttttatttattttttctctcctctcccttcgcccagcccctcctgtgtttagtcagatggccccggagcttggcttagtatttttaattagctggcgtttggaagctaaaagcagtaatgaattgttgatggattggaagtggagagtcgctttgctggaaatgtcggggctgggagagggggatgggcgagttagtaacaaccaaccatctaaaaggagcgattttgttacagtgcaagcctttcacatcacgtgaggatcaagggctcaattggttgtcgtgagaacaaaaatggtgacaagcgtatcaagaaaatactgatctggtctttaaaaaaaaaaaagctgaaagtctctcccctccccctgcacacactcccccaacctcctccccccgcccccccgcagtgggcgaagctacaagttatgaatgtgaaacatttctcggagatctaggatctccgaagttcggaaggagcgaaatgtaatgagcacaagagcaaagcagatgttttaaagaaacactttataaacctttcctcaacttatctccaatttgtcggctttcccaaggggccagggacggggacgcctgggggaggga

SEQ ID NO: 4185 - DNA, 61 bp, Homo sapiens
  chr5:124083786-124083847
  hyper
ttaatattaaattatcgggcactgggatctgacaggagacagaaatcggcttgttctgccc

SEQ ID NO: 4186 - DNA, 134 bp, Homo sapiens
  chr5:124084168-124084302
  hyper
cctgcatgaagtccccgctaagtgctatatagagacacaccacgcaaccgtacttacggtctgtattggatcgagttgaccttttccttctaactgcattgaatgtgtttggttgcagccgctttattttggaa

SEQ ID NO: 4187 - DNA, 417 bp, Homo sapiens
  chr5:124084645-124085062
  hyper
gttgagatatacacacgtataaaacacacactgagagcgggtgggggtgctgtggggggtggttgtggagacaaagcgttttattttccaaccagattggggttgaggaacctcccgcagtaagaaggcaaaaaaatggtgcgcccctttcaattactacatcattcacataaaacacttatttattaaaacaaatctcaaacaggctgcgaggagaggatgtcggtaaatacaagtttgattgtgttatcttgggggaaataatgtatgtgatcgctcggtggcagagagaagccaaacgagccgctagcgcgtagcgaagagaaaagggaggctggctgtgtggaactgactgcgagcattttgccggcttcccttccttgttccaaggacttcgcagcccaactcccaagactg

SEQ ID NO: 4188 - DNA, 595 bp, Homo sapiens
  chr5:125930586-125931181
  hyper
ctcccatgctactaccgcatccagcgccagcggggagtcggtaggtcagtgcccgcccggcctcctcgagcgagccccggcggctgcagagatttcttgagcgcccgcgtacctctccccggcctccccagcttccattatacacgccctcgttttcctcgcggagccccagctctttcagccacgcatactggggctgattgatgaggagagtggacatgaaggcggcaggcctgctccaaggtccagagagcttgctggtctttgcagcgtgcacacacagcgcgcgaggaaggcgccacatactgagcccgggactcgggatgagcccaaggccctgagagctgctgaaatagagccccgccccccgcccgggagaacccattgggcagacccgacccctcccactgggcacgaccccgccaccgccccgtctgcccctggtcttccggaggagcctgcggctgaatcctgcctggaacaatgggagtgctacagggaggagtgggctgctgccatctggtgaaagactccgggagccacagttccagctgggaattcttttcagcaaaatattggcgctgaagtacagtag

SEQ ID NO: 4189 - DNA, 20 bp, Homo sapiens
  chr5:126338839-126338859
  hyper
gaggtggaagcttggtaagt

SEQ ID NO: 4190 - DNA, 19 bp, Homo sapiens
  chr5:126339398-126339417
  hyper
gccagaggagtatacaacc

SEQ ID NO: 4191 - DNA, 30 bp, Homo sapiens
  chr5:126626542-126626572
  hyper
tgggcgactgggaacgcgttgagacgttcc

SEQ ID NO: 4192 - DNA, 30 bp, Homo sapiens
  chr5:127420204-127420234
  hyper
tccggcggcggcggcggcagtgggcaccac

SEQ ID NO: 4193 - DNA, 301 bp, Homo sapiens
  chr5:127537015-127537316
  hyper
gcgaagaaaaaagcacgtgacttgaaaatgtttttctctttttaaagccacatctttctgcttcattttgatttcagtgtaactcgccgagtgaggactcttggcccacgctgggagcccgcagccggcatccgccaccgccgggcaggtgtgcgctgggcgggcgcgcggactcgcctttgcccggcccgcggctcccccgtgtggcctgagtaggtagtgatgcgaataacatgctttgagaagtcagaaggctggcgtctcttcctccggagctcacggaggagtctctctggtttcc

SEQ ID NO: 4194 - DNA, 174 bp, Homo sapiens
  chr5:127873552-127873726
  hyper
gagcggtacacgttgcataaccggcctaaagccccgagcgactccaggaccgtcagcgggcgggggaggaaattacaaaagccctggcgtaaaatttcaaaaaatgtgaacctcaaaagaaaaaagggcctgcacgcagagctcggcggattcccgtgcgctccgaagacggat

SEQ ID NO: 4195 - DNA, 29 bp, Homo sapiens
  chr5:127874448-127874477
  hyper
acaaagcgagtagacggcgggggatgggg

SEQ ID NO: 4196 - DNA, 30 bp, Homo sapiens
  chr5:127874810-127874840
  hyper
gcggcgtcagtctgcgggaccaaattaggg

SEQ ID NO: 4197 - DNA, 13 bp, Homo sapiens
  chr5:128300681-128300694
  hyper
taccttatcagcc

SEQ ID NO: 4198 - DNA, 30 bp, Homo sapiens
  chr5:128301068-128301098
  hyper
ctttccagcgggcgcgtgggtcaccaagga

SEQ ID NO: 4199 - DNA, 1816 bp, Homo sapiens
  chr5:128795615-128797431
  hyper
cgcgggtgcaggcggcgagcctcggctcggacaccacagctctcctgcccgcgccgggcagtcctctgcctgtccagaggcagcactcccggctctcggctggctgtgggtctgtcttgtggggctccagcactagcctgctcggcctcggaaactcctgcagcgtccagaacacagaaaatagactcatctcctaattcgccagggagctcgagggctgcggggccgcggggctgcctcccccgctcctcccccaacccgaccccaccccacccccgccagggcttcggcggcctcccggagtcacacagcctacccccccaccccaacaccccctcccccggcagacaaagggcctgggcaaattcgccgcccggcctcctagcgctccggggaggccgctgcgccccggagtggatcgcgctggaggcgtgcgccgggcgagaagccgcggccgcgggagcgcagtatggggaagaaccgcgagatgcgcctgactcacatctgctgctgctgcctcctttaccagctggggttcctgtcgaatgggatcgtttcaggtaagttcttccgtgactttctcgcttcctttccagccatcccagcggagaccgcgaacgtacgggtcggcagggctggtgcaaccggtgcgtggagagcagggctcagtgggtagcaataaaaatgagcttgaggtgcaggttaaggggtcaagttcggaaatgaagcacacttctgccggcctcgttttaaccgtatgtggaatagtttccttctaattagagcaataatatttgcaaaggtacgtttacagcacctggaggaaaattagaacgtacctaagttgatagcaacgctctgctctagcatacacttcagaaatcgtttactcgtgctggagtctttgcatcggttttcttttcaacaatgaagtgcggtcaccaaactttgattccccctcccccgcccctaatataatcgtacttttactctgaaaatgctggggtctgtaatctgatcgcaaggcttctggggttgcagagtttcagggtctagacgggtggtctccattgcattcaacgcgagcgccctgtatctatggactgtgagcttggaaatgtttgtgctactggaaccgcggcactttaagccccgcacttctgtctgccccgcccgcagagctgcagttcgcccccgaccgcgaggagtgggaagtcgtgtttcctgcgctctggcgccgggagccggtggacccggctggcggcagcgggggcagcgcggacccgggctgggtgcgcggcgttgggggcggcggaagcgcccgggcgcaggctgccggcagctcacgcgaggtgcgctctgtggctccggtgcctttggaggagcccgtggagggccgatcagagtcccggctccggcccccgccgccgtcggagggtgaggaggacgaggagctcgagtcgcaggagctgccgcggggatccagcggggctgccgccttgtccccgggcgccccggcctcgtggcagccgccgcctcccccgcagccgcccccgtccccgcccccggcccagcatgccgagccggatggcgacgaagtgttgctgcggatcccggccttctctcgggacctgtacctgctgctccggagagacggccgcttcctggcgccgcgcttcgcagtggaacagcggccaaatcccggccccggccccacgggggcagcatccgccccgcaacctcccgcgccaccagacgcaggctgcttctacaccggagctgtgctgcggcaccctggctcgctggcttctttcag

SEQ ID NO: 4200 - DNA, 30 bp, Homo sapiens
  chr5:129196622-129196652
  hyper
cctcttagaggtaaatctaaagcaccagga

SEQ ID NO: 4201 - DNA, 660 bp, Homo sapiens
  chr5:129240274-129240934
  hyper
gagaagtttcactcccgacccttgctcggagccccggcccagagctgagcgggagcccggcaggcagctgcagcccgcggcagtcgaggcgtccgcggcgcttcgacctccagccggtgtcggcgcctaggcggccggctgcggccgcggctgggggcgcaaaggcggaggaggggcgggtgtgagccggggaaaccgcgtgccgcgccgcgacagcccagcgagcgtccgcgcccgggacagccgcgatggctgtgcgctctcgccgcccgtggatgagcgtggcattagggctggtgctgggcttcaccgccgcgtcctggctcatcgcccccagggtggcggagctgagcgagaggaagagacgtggctccagcctctgctcctactacggtcgctctgctgctggcccccgcgccggcgctcagcagccgctcccccagccccagtcccgaccacggcaggagcagtcgccgccccccgcgcgccaggatctccaggggccaccgctgcccgaggcagcacccgggatcaccagttttcgaagcagcccctggcagcagccacctccgctgcagcagcggcggcgaggacgcgagcctgagggcgcgacggggcttcccggtgctccagcggccgagggggagcccgaggaggagg

SEQ ID NO: 4202 - DNA, 635 bp, Homo sapiens
  chr5:129240962-129241597
  hyper
cggccggccggggagtagccacaacggcagcggggacgggggcgctgccgccccgagcgcccgaccccgggacttcctgtacgtgggggtgatgaccgcgcagaagtacctgggcagccgcgcgctggccgcgcagcggacctgggcgcgtttcatcccgggccgcgtggagttcttttccagccagcagccccccaacgccggccagcccccgccacccctgcctgtcatcgcgctaccgggtgtggacgactcctatcctccccagaaaaagtccttcatgatgatcaagtacatgcacgaccactacctggacaagtatgagtggttcatgcgcgccgacgacgatgtctacatcaaaggtgacctccctgcgccggctttccagcctgccagtctccccgactcctttctctgtaaccggtcctagcccctgcccagcccctccgctgcttctctgccagcacgtgcttcgggctcccacaggccctggcccgccctccccaccccttgcatccgcccacaattcgtagcccgttcctcgtcttctgcaatctggaccctcctcacacctgcctggctttattcgccttcctcacttgctgttttcggtgccgcctcgcgcttgtccctta

SEQ ID NO: 4203 - DNA, 56 bp, Homo sapiens
  chr5:130970374-130970430
  hyper
cccaactcagaaaatacgacttagtaatggtgctttcttaacgacactcagaagcc

SEQ ID NO: 4204 - DNA, 30 bp, Homo sapiens
  chr5:130970642-130970672
  hyper
aaccagcctcacctcgggagtccgctcggg

SEQ ID NO: 4205 - DNA, 161 bp, Homo sapiens
  chr5:131133234-131133395
  hyper
cccaggaccccaggaccgcccttagaaggctgcgccggcccgcgagaggtctgggatctggacagcgcgggggctggctcacagggactggtgaaggaaactgccgggacccctgccacagccatggctccccgcaaagacgacctcgagcaggcactgcg

SEQ ID NO: 4206 - DNA, 350 bp, Homo sapiens
  chr5:131563040-131563390
  hyper
ttgggagggtgcagaacgggcttagccaatatgaagaggcccctcagggccaggcggacgccgcgcccccgctcccaacagccggcagcccggggtcaggccgccacttcccgggagcctgacagggaagagcggccaagttcccagccccgcccgacagccgagggaactgcacgaagggcgccgctgacctcaccaccctgagctcgggaaggcttgcgggcggcggcacaagaacccagacgggtgcagaaacagggcggagggtgcagggtggcggcccggactgcgctgctggcggctagcggcgcgacccccggccccggatccggccccggcccctaactctc

SEQ ID NO: 4207 - DNA, 108 bp, Homo sapiens
  chr5:131563715-131563823
  hyper
ccggcctcgcgggagccggagccggagccggagccggagctggccgcccgcgcccttcatgccgcccgcagcccaccgcacgtactccgcgcccgcctggctttggcg

SEQ ID NO: 4208 - DNA, 30 bp, Homo sapiens
  chr5:131593272-131593302
  hyper
aggcgcacagggagcgggggcgggggctgg

SEQ ID NO: 4209 - DNA, 30 bp, Homo sapiens
  chr5:131746047-131746077
  hyper
ccagtttctcttatcggatgaagggacccc

SEQ ID NO: 4210 - DNA, 30 bp, Homo sapiens
  chr5:131825629-131825659
  hyper
ctgaatccattctacgccttcctgacagcc

SEQ ID NO: 4211 - DNA, 239 bp, Homo sapiens
  chr5:131831521-131831760
  hyper
ccgctgatggccgctgcggagcttcatttcttataaacaccgccgttgggaggaaagagaactcagccccctgtcagtcccatggggccccgaggccgggggaggctcctgggccaggcccagcggccgcgacctggagcggggcttgatgggatcagcactctcctcccccgcgccaatgggtgctgcagaacggcccacgcccactgccgttcgcccggggcgcccctggcaggctt

SEQ ID NO: 4212 - DNA, 183 bp, Homo sapiens
  chr5:132072697-132072880
  hyper
ctccgctgcctccctgcgcttgctccgaggcgcaaaggcctcaccaggtgtgcagcatccaaagagccccaccgtggccacccccagacgccccgctcagcaggaagggctgcgagccagagcgcatcctccagcacagcgcctttttgataagcggcgcaggccccacgggatgcagcagcg

SEQ ID NO: 4213 - DNA, 31 bp, Homo sapiens
  chr5:132386957-132386988
  hyper
ctttcaggccaggcagcgtgtcacttgcctg

SEQ ID NO: 4214 - DNA, 245 bp, Homo sapiens
  chr5:132387333-132387578
  hyper
caagacaccccactaccggaagtttctttgatgttaagaaaaacggcggaagtaggccgcagcgcttcctcagtatagtgcctcgagctggctcgcctactttctacggtaaagggaggtgctccacatctctatgcagctgtgcagcgccgcaggttccatgcgcaggctcggttggctaaatgcgctttccagccatctttcagccacccagtcctttcccaggttctcgagccaggacgtga

SEQ ID NO: 4215 - DNA, 795 bp, Homo sapiens
  chr5:132947177-132947972
  hyper
tgaaactcagaactcgtctttgttttgcgggcgcaaagagggcggagatcatccacagtgcaagctctcttaggaccaagcccccagcccgaacgctgaacgcccccaacacactgctccctagacacgttcaagcgggtaccccgggccgctcactctggaccgcggccggctacgcacaagcagcgccgcaggctgcctggagtcgggtcgtgccctgattccttcctccccagcctcacatgcggcggaccccggggaagccagggccaggcgaagcgcagcgggccctttgggctgcagcgaggagacgcaagtttccccgcaaagccgcggggaggaggtgctgagaatgcctgcccggcgccccaacccggagccaagggcaccgggcccgggccgaggggccgcgctcgcctggctccgccggggccgctcggggtcctgaacccaagaacggcgcctgcaggatttcggagccgggcgcgagctgcgggctcggcccgagcgcttctgcgtggcgccccgcgtgccaaccgggtcactccggtccccaccgtagaccccggccacgagcctcggcgtcccagcctctcctcgagtcctggccttggccggggtagccctgccgagccctggcccagcggtcccttccccgcgggcaaacttggctttcccggcgcgggcagtaaggacaagcaagcgcccgcgccgggccctgcagcaagatgcggggccgcgggcgccaggaccccagtggggtgcagcgggaccggctggtggcggcgccagcga

SEQ ID NO: 4216 - DNA, 30 bp, Homo sapiens
  chr5:133784545-133784575
  hyper
atcaagtcttccttgacattctctgccccc

SEQ ID NO: 4217 - DNA, 903 bp, Homo sapiens
  chr5:133862722-133863625
  hyper
ggtaccaggaagatgccggcttgtggcggaccccgtttgggacgcacacacctgactctcaaatgagtgacattgcagcccccgcccccacctagcgctgctgcagtccctttgccggatccccggccccgccccgcccccggcagtggcatcttcccggcctcacctccttcctccctctccctcccttcttcccacccactcgcctgcgcctgcggagcggcgcccgcccgcctcctccccgcctgggtgcagacttgtggctccccatggtttcttcccgcccatccctgggtcctgagacatcctctcctctcggccaagggacgagaggggtcaacttggcgattcgcagctgttctgccagaggatggggttgcctgcgagacagccaggaaggcttcactctagcttccagaggcccagccctgtcccctactacacacagctaccaccccacccgcccctggggctcggctgcccttcccggtgtctcttaaacccctcccccgacctgggtgttaagcccacccacctcccggcgccgcccccggtcgaacagcctcttgcccttccttcgcctgggccggagccccccgcagcctcctccggctcctcctcccggctccggcggtcggaatcacgccggcgcgcctccagcctgcggtcccgcggactgcctccaggggcgggctggaggcgcgcgcaactcccctcccaatcccctcagccactgccgctggcctgggcacttttttaccagcttggctgctggcctcttgctggaggctgggggaggtgaagggtcactgggtgtctttgccgtatgccgaaggcacactgcggccggcgattctggtctctgcagatttccaaacctcgccgctgcgtctagcacccctg

SEQ ID NO: 4218 - DNA, 30 bp, Homo sapiens
  chr5:134075264-134075294
  hyper
ttgagcaattagcgcgccctagtgttatct

SEQ ID NO: 4219 - DNA, 190 bp, Homo sapiens
  chr5:134365032-134365222
  hyper
gggtcagggccgctgcgggccgggagggaccccacccccttccccaccgcctggagccttccgtcggcccgctgccctccgaacgtcgtttctctccttcgaccgatatttccgctcctgcattccctccacaatggttcctttcctgtccccagaaaatactaatttctttttccgatctttatcctct

SEQ ID NO: 4220 - DNA, 753 bp, Homo sapiens
  chr5:134366512-134367265
  hyper
caggcacctttcaggcttctccgaggcagccagacaggacctgcctttccctttcgttttcgggataaggccaacagctcccgaggtccccagcggcagggaatccactgcccagtctctggcccagggtatcctgctaacatctgagtgggtcctgggccccatagggcatgggggagtcccctgggggcacaggtctttgggctggggttgccttagtccgaggatcaggtaggatgagggtcaaaggggttgaaggtccgaggcgcctggaggcctggcagacgctagtgggccagggcctaaggtggggatctccggtggagggagggagcaggtctgaatggtgggagagtgaagttctgcttgtgggtctaagctttggagggctgcagcagaggcggcccgggagccctctgcgcgggtgcccttaggcgcgcaccccttgctcacccgcacgcgcggctcggtgaggttggtccacacggcgatctcctccctcatgctcatgtcggggtagcggttcctctggaacgtggcctctagctcttgcaactgctggcttgtgaagtgcgtacgttgccgccgctgcttcttcttcttggctgggtcgtctgcgccgccgcagcccgtgcctcccgcaccactgtcctcgggccccttgggttccccgccgcgctccttctctgcagtaggcaggacggggagcgggtcacctgggcttacgccccgttgcaccccgtcccggctcca

SEQ ID NO: 4221 - DNA, 133 bp, Homo sapiens
  chr5:134367284-134367417
  hyper
cgctggcggtcttccctccctccctccctctagggttcctgggaactgtccccactggaaagcgcccgccgggtgctggtcgtcagtaggcacctctagtctggtgtgccgcggagaagagcccaagaatcgg

SEQ ID NO: 4222 - DNA, 30 bp, Homo sapiens
  chr5:134369002-134369032
  hyper
tgtctctctgagtgcgttctctcgcccgtc

SEQ ID NO: 4223 - DNA, 30 bp, Homo sapiens
  chr5:134370267-134370297
  hyper
caaatgacttgtttcgcctagaatcaactc

SEQ ID NO: 4224 - DNA, 104 bp, Homo sapiens
  chr5:134374401-134374505
  hyper
gccctgcctttgccgcgggagaataggctccaatttacgaagctggtcaatttcagaaatccgagacccggttcttgagaagcgactgcgtgctccgggaccct

SEQ ID NO: 4225 - DNA, 701 bp, Homo sapiens
  chr5:134374791-134375492
  hyper
cgaagccacggctgaagtcccgggccacgcagaggggccagcaattccatgggtggtggggccctccatccctggacgcagcggggagcagcgggcggccctctctcctgcccacttctcctgggggtgggggagccctgtgtcacccgacgctgcgaggggctgccacgggcttctcaggttgtgcccttcgcggggccgtggcccgtgcccccgaggctgctaccctcttgaggtgcccggagccaaagcagagggttgatcccgccggttgggtgaggtagcacccggtgacggcggctatgactgtgccctgggcgcaggaacgagctcctcgcgctgcctcgaaggctcctgaccttccgcgccttgcgctgtcccgcgccgccgggtggacccacacacgccaggagcaaactgcgcaggactcggccgccacctccctgcgcccctccaccgcggagaccctgcgcccctagcccagcgtctcttaccccacctgggcagcgctgcgtctgcggctcgtgggctccgggctcgcccgccgcggactctggctcaggtttcggctccggctggggccccggatccagctctggctctggcactgcacggttcttcggcccctgctggttcgctacatcccagcgcgcgaggccggggcttcctcggctcggcccgctcctcccgccgccgccgcc

SEQ ID NO: 4226 - DNA, 213 bp, Homo sapiens
  chr5:134463604-134463817
  hyper
tttctgaatggcttttcgggccagcctgtgaggagtcctgcctgccctgactgttgactcatcctgggtggaattatgtacagaaattagtcaacagaggccattcccgggaccacaggcagctggctgcaggcattgcgcaggcgccgtgcctgctgggagtgtcttttcggacacagagcatgggcttcgtgggtgcgcttccagggctgg

SEQ ID NO: 4227 - DNA, 142 bp, Homo sapiens
  chr5:134527235-134527377
  hyper
gccggtggtgctgacgctacggggagaagccacgcttcagtggcttgcctggaattcatgacttgtgcgctccacgtcctgggctggccgacctgctgagggtatctctgagagcaggagccaggccgtcccgggctctcct

SEQ ID NO: 4228 - DNA, 117 bp, Homo sapiens
  chr5:134824739-134824856
  hyper
aacccgtccgagcgcgctccgagcgtggctccaggcagcgcagggggaggggagaggacggctgggcaagggaagggagggaggagggccctgggctttgtcgctttcagggaactc

SEQ ID NO: 4229 - DNA, 30 bp, Homo sapiens
  chr5:134825451-134825481
  hyper
ccgagcccgtggagcgctgcacaaaatcgt

SEQ ID NO: 4230 - DNA, 14 bp, Homo sapiens
  chr5:134825776-134825790
  hyper
gcggttcgtgccat

SEQ ID NO: 4231 - DNA, 65 bp, Homo sapiens
  chr5:134827196-134827261
  hyper
tattatgagtttgttacaaaccgagcttctttcttctccaaccccacccccacccgcagctctgg

SEQ ID NO: 4232 - DNA, 41 bp, Homo sapiens
  chr5:134870491-134870532
  hyper
agagacatccgccgcgagggtgcggcgacctaacaagcggc

SEQ ID NO: 4233 - DNA, 109 bp, Homo sapiens
  chr5:134871551-134871660
  hyper
tggcctggcctcctcgcctcgcctgcaggggccacgcgcccggccggtctcctgagtgatgtcgccggcgatcagatcagctcgtgtgagcaccgagtgtggcacacga

SEQ ID NO: 4234 - DNA, 30 bp, Homo sapiens
  chr5:134871933-134871963
  hyper
aacagaggcggggtcggcgggcgattagcg

SEQ ID NO: 4235 - DNA, 761 bp, Homo sapiens
  chr5:134879224-134879985
  hyper
aagggacggaccgagcgggcagcctctaaacaatgtatttatcactttgcatctctttgggacgccggccgcgcccccacccttgccgccgccgtcgccgccgccacttcggttttgctctggctggggagacccggcgtttctggatttcttttatgcagccacaaataaaggctcctaggctggaagaaggggatttccccccaagtcttgagcaaacgaccctagcgccgtggctcttcctacggcgggggcctcggagaacccggcggggcgcgcggggggacgcgtgggcactgccgcgtgggcgccctgaccccgcgcccgcgtggagcgagagccgggactctgggccagcaagttccagttccccgatggggccggctcgcccggagccgcgtgaggggattagggccgcacgagaggcgaccgcgccgcggcctccagccacgtgagcacagacacggcttcaaacgtccccaacgcactaatccttgttatccggcaggataaccgcggccgcgccagcacccggcctgcctcctccgtctggctgcgggcggggagtgcgcctggctcccgagcccctgacacggatttggggcctgcaatgacgatctaccccacaccatccacattcctgggaccctcggggcaaggtcctacagtccttggtgaccaccacgcctgcaaaaagcggtgggaaagttgttacgcttagaaaactaccaacacgcgcatgcctgtaatcccagttactc

SEQ ID NO: 4236 - DNA, 30 bp, Homo sapiens
  chr5:135170266-135170296
  hyper
tgagccgcgcggagcgcacccttatccacc

SEQ ID NO: 4237 - DNA, 30 bp, Homo sapiens
  chr5:135335661-135335691
  hyper
acagtatcacagttattctggctgccacct

SEQ ID NO: 4238 - DNA, 30 bp, Homo sapiens
  chr5:135364436-135364466
  hyper
gaggaagactgtggcgagggagagagggag

SEQ ID NO: 4239 - DNA, 135 bp, Homo sapiens
  chr5:135468431-135468566
  hyper
caagacacccctccctcggtcccgcagcggtcactccgcctctggcgcgcatgcgccgaccccagcgggcgtcctcccgggctccctctccctccctccctcatccgggtcctgggcgagcgggcgccgtgcgcg

SEQ ID NO: 4240 - DNA, 958 bp, Homo sapiens
  chr5:135528040-135528998
  hyper
gcagcaggtaggtgggcaggtcgggctttgtggccgcgccgtccctcataccgcgcgcagtggccagctccagcggcaaagcgccttctgccttgaccgtggctcctggggccagcgcgctgcctaccgccgcctcggggccgcccgtggcgttgaatatgtcgccgtacatggcccgcgggtcccgccgaccccagccggaccgcttcacttggcctggagcatactggcgcgacccggcgcctccatggcgcgcccctcccgccctgccgcgcccaactgaccgagagtcggtgccttggggccggcggggactgcaaagaccccgggacgcgtccgctcactcgcctccgcgctcagctgctttccccgccggctggcggaccccagttctcggagctggacagttctgtgcccgcgcccctcgggctcactgtttctctccgtcgccaccaggacagaggtcccagtcactgactcgcctttcggctttacaacagcccgctcagctcggaccctcagctccagtgagctccaggtgctgggcgcctctgggctgcggcggcggggagaggcactcagcaagtgcagccgcagcccggggtctctgctgagcgcccggtggcagagcgcacggagggcgggtggccagggagtcctccgcgtcctccggcgccgccgccaccgcagcgtctcggaacagtcctgcaggctctggtccctgtcgagacgcccagtgttcagcgagcttgtccccactccctccggctgctgcgctcctgttttgagcaggagactgagctttctggcggctctgagcgcgctcgtgtcccgggcgggggttcgggggaggggcgggactggcggcggctgcccgggggagcggctgcgaaccaatgagggcaagagaggacgcggctgcgactgcccccagcccggcctcacatcactcagggac

SEQ ID NO: 4241 - DNA, 73 bp, Homo sapiens
  chr5:136833977-136834050
  hyper
cacacacacacaccccaaccccgcttcaggggtcccctccgagaggctccgcgccccccagggccgggtggcg

SEQ ID NO: 4242 - DNA, 374 bp, Homo sapiens
  chr5:136834289-136834663
  hyper
cggccgcgagccccgggcacccaggcgtcccagcgccccagcccggaggcggggaccccgcggcgggcacgggcagcgctcgcgcacctggggcgcctgtcgcgcctctagacccagggacccctctcacgaatgggggactcatctacgaacgaggaggctgcgtcacgaatccgaggctgccgtccaactacaggggacccgtctcgtctattctccgagtgccccacagatgccgccctcctatcaggggcttggtacccctccccagaagcggggagcccgggtccgcacgccgcactcccacagacggtgcggtgcacacggctttggggcaggagaggggagaacagggctccagcagcacccgagct

SEQ ID NO: 4243 - DNA, 174 bp, Homo sapiens
  chr5:136834706-136834880
  hyper
cgacagctaagggaaaggtctcccttgagcgccctgaggtctcgggggtaagaaaggcgcgcggaggtaaccccaggccctgaccctgccagccccctaggcggccgcggggaggtcccaactactccaagttggggcgcggggttcctctgggcacgtaccttgggggccggc

SEQ ID NO: 4244 - DNA, 254 bp, Homo sapiens
  chr5:136834912-136835166
  hyper
cgcggcacggtcgccgggaaggctgatcgccggctcgcgcccctgcgctcctgccacacgccgccgccgagcgtctggccgctttgtgagcccgcagcgatgtgctctgctcgctcgctggctcgggcgcggcgtccgcgggcggaggaggccgagcgcgcgagccaaggctctggcgccccctggtggccgcgcgctgcctgcccgacagcccggccgccccagcccggaacgtggtcattcacatctttttt

SEQ ID NO: 4245 - DNA, 30 bp, Homo sapiens
  chr5:137474815-137474845
  hyper
ggggctcgagggggcggtagagcgggtggt

SEQ ID NO: 4246 - DNA, 30 bp, Homo sapiens
  chr5:137667606-137667636
  hyper
cctatcgttgggctcgcagatcacctgggg

SEQ ID NO: 4247 - DNA, 30 bp, Homo sapiens
  chr5:137911537-137911567
  hyper
ggtgcccgagtgcacgccagcgttccctgg

SEQ ID NO: 4248 - DNA, 80 bp, Homo sapiens
  chr5:138088595-138088675
  hyper
cagaagactgtgactccgggacacctgtgacactcttgaggggagcgtgcccagtacccctggtcgcgtctctgggattc

SEQ ID NO: 4249 - DNA, 31 bp, Homo sapiens
  chr5:138089858-138089889
  hyper
tttcttgtcggttggacgcacttagctttca

SEQ ID NO: 4250 - DNA, 31 bp, Homo sapiens
  chr5:138299453-138299484
  hyper
gcagcacccaggctcccggttttccgtgggg

SEQ ID NO: 4251 - DNA, 193 bp, Homo sapiens
  chr5:138609207-138609400
  hyper
ttactgcagctcggcgaagaatcccactgcagggcactagggaggccggtcctgcagaggtcagcagtaggagtgactggcttaatctattcgaaaacctcctggaaagatcccgaagaccgtggaccaaggtgacctgcgtgggtgagcgatccattagccgaatgacagcgctgccgcagaaagccagaaa

SEQ ID NO: 4252 - DNA, 887 bp, Homo sapiens
  chr5:139016855-139017742
  hyper
ctccgtgtggtgagcgtgcctcctttgtggtgtgggtggcctatggtggtgcttcctttcacaaattgtgtgtccgtgtgacacccccccccccctcagccgctgtgcccctttgcgggtcagtgtgttgtttgacctcggccgcgggtgcccccacccctgccggccccgccgcccctcccccgcaccgtccgcccgcgccgcgcggcgatcgatcgccattgattgtccctgacgagctgctccactttccagccaatgtcaggaggggggatctccgccgccctggcggtgtcatttccacacactccctgggctgccgccagcgcgggcgcctcgaagagccggcctggatcgcccggagctcgggctggaccgcccacaccgcgcgaggaagcccccgatggcgtggcccgaccccagtctgccggcctgcccgccctaggcctctgcacccaagcccccttcccagcgctggtggatgttgtcaccacaggagtttaagctgggccgggtatggggagggacgctgtgtcgggtgcgccctgcgcttgccctggtgggggcgcggggctgtttccggcgggcggaggcgccagcaggccaactttgccgcggcccaaacagatgctaatgattttccgggaggcgccggttatctctggccccagccggccggtgtgctgggactgggctcccggcacagacaccacctcgccccccaccctcaccctcctgagccccacctaataaccacttgtccccgagtggacgggttgggggggcgtcggggggagtccgcaggctgccccgggtgtcctggaactgttgctgtgtgggattatttgcgcctcctccacccaggatgctaccgtctttctgagcac

SEQ ID NO: 4253 - DNA, 65 bp, Homo sapiens
  chr5:139039950-139040015
  hyper
tttcctggccaggatccggccagggcagattggaggagcctggtattgcccggcctgggcaagga

SEQ ID NO: 4254 - DNA, 30 bp, Homo sapiens
  chr5:139047724-139047754
  hyper
cctgccactccctccgcctcccagacctct

SEQ ID NO: 4255 - DNA, 288 bp, Homo sapiens
  chr5:139089042-139089330
  hyper
ctgacagctgccgagccgagccgggccggatggaaaacccgggctgtgcagggcccggcggggcgctgaggggaggggttgtggggggctgcctctgcggcaaagtagacaaaggcggcccctccctccctgtgcgcgctgctgggggtcgccagaggtagcggccttcgccctcaccctgcagggtgttccagccggggtcacatggcctaaggctacagaggaggggggcgcccttaatccctacgtgcccgcccaccccgctcccacgccggggccctgtctggg

SEQ ID NO: 4256 - DNA, 62 bp, Homo sapiens
  chr5:139091110-139091172
  hyper
tcctttccacttactgcggcaagtactgcgaggaagcttaaccctctcgctacttggagggt

SEQ ID NO: 4257 - DNA, 37 bp, Homo sapiens
  chr5:139175355-139175392
  hyper
ctcctcctccagctcacggctccgctccctccctcct

SEQ ID NO: 4258 - DNA, 323 bp, Homo sapiens
  chr5:139175996-139176319
  hyper
ccggcagccaccttcacgaggctgcagctttgaggatttatttctgtttccagtttcccaactttgacagccctgcttggcggccaggcctccccggctctgcagctagagcgggggctcgcacgggggcgtggcagtcagggctgaggaggcacataatggccgaggcggcagcgggagggaggggtcccaggagcgggctgctggggctgggtgcagagggagtccagactggggacaaccctgcccagcgggccccctcggaggaggaggtattcagctgttcctagaggatgcagggactccccggaatgatcactggg

SEQ ID NO: 4259 - DNA, 96 bp, Homo sapiens
  chr5:139227527-139227623
  hyper
cccgcgggggcggcccgcggctgtgtctgctgctggcccgcgtgctgtggctgtccagtgagtagtaagtcctgctgtcggccgccgggcacagtg

SEQ ID NO: 4260 - DNA, 296 bp, Homo sapiens
  chr5:139227704-139228000
  hyper
cgtcgtccgcgtcgtcgtccgacgccgaggctgagccgccgcccgagccgctgctcagcgacagcgagtccctcgccgcccgtgcgcgctgcgccgccagcccgttgaggcgcgagcggcgccagcgccggggccccgccgacgtcctgcgggacgcaccgcgcgcgcgcggccgcggcggcggcgggggcgcgcactcctgcgtggtctcgtactcgtcgtcctcggggatgcggaaggggctggcaggcaggctgcccaggctgccgccgagcgcgcaggtcccgcgccgcggt

SEQ ID NO: 4261 - DNA, 14 bp, Homo sapiens
  chr5:139228242-139228256
  hyper
gggcgagaggcgcg

SEQ ID NO: 4262 - DNA, 222 bp, Homo sapiens
  chr5:139284309-139284531
  hyper
cctgagcatgattggggagggcggagtagagatcccccagcgagggccaggctaaggacagcatgggggtggggagacagcgaggaaagggcccaggaagggaccaaaatgaagcccgctagccagcccagcggggtagcgagcacccttggctcttgcggtgggtctccacaacctcgaggcacccccggccgtacaggcgggttgcctgtgcctctcatg

SEQ ID NO: 4263 - DNA, 535 bp, Homo sapiens
  chr5:139488008-139488543
  hyper
tcaaaagagaacaaaataacacgccccttaagaaaagaggcgatcctacctccgcaggcgctggagaccaccagtgatgcgtttgcttagcaatccctgagccccatttcccctggccgccttcgccctggggcctgggactgtgcgctagacgtggctgacactccctgcacggcaaccctggaaggagggagaggaaggagagttctataacccaggcttcactgccaacccctcctctgttcggttccccccaccccactaccaccaaatgcatacacccgcccaggatgcgttgtaaaaacaaaacaaaaccaggaaaaaaaaaaaaaaaacctttggtgctgacatcgcagatgaagccgggcccaaagatgggtggcccgaacaaggcatttttactgccccacagcgctgggtcagctccacagctcctctgcctttgtccgagggcaaaaggaacggatgtgaagctgaggggtcttctctgtgagcggcggtgggccccggaggcgggctgtgatgtttgtagggg

SEQ ID NO: 4264 - DNA, 30 bp, Homo sapiens
  chr5:139493543-139493573
  hyper
cgcgtacagtagggcgccctgctactgtac

SEQ ID NO: 4265 - DNA, 31 bp, Homo sapiens
  chr5:139537078-139537109
  hyper
tcaactgactggagaacgacaatggccccat

SEQ ID NO: 4266 - DNA, 30 bp, Homo sapiens
  chr5:139554500-139554530
  hyper
caatctgagggggacgcctgtgggagtcct

SEQ ID NO: 4267 - DNA, 30 bp, Homo sapiens
  chr5:139554994-139555024
  hyper
ctcaggcaggggttcgcgcagcccctgggg

SEQ ID NO: 4268 - DNA, 31 bp, Homo sapiens
  chr5:139726093-139726124
  hyper
tcttgctcactcagcccgcccgcgcggccgc

SEQ ID NO: 4269 - DNA, 374 bp, Homo sapiens
  chr5:139927088-139927462
  hyper
tgtggggcctgggactttggacgcatttccagctttctctgaaccgggctggcttcctagcagatagggcgggaccgtcgggttgagtgacggccggtggcccgccctgggcgtgacgttgttctagtgttgttgccagcagctgcacgtggtcggctgagtccgcctcagactcagagctgcgctcctcgacctcaacgccaggcggttactttgctgctcctcccgctcgctatgtcaacgtccactagctgcccgattcccgggggccgggaccagctgcccgactgctacagcaccacgccggggggcacgctatacgccactacccccggaggtcagcgggccgggcaggggtccgcaggctgcggaca

SEQ ID NO: 4270 - DNA, 176 bp, Homo sapiens
  chr5:140011845-140012021
  hyper
gcacacgcctgtgggcgtctccattcctgtgttgcgcagcgctagattctggatggccgggaacttgtggggacagagagccgccatcagtccgcgttcgcccagtccaggattgtcagacaggtctaggctggtaagggccgggaaggcgcgaacctgttcgcaggaaaaggcag

SEQ ID NO: 4271 - DNA, 167 bp, Homo sapiens
  chr5:140012125-140012292
  hyper
cgcaagctggaaagtgcaagtcctgtggcttccagaggcagcggaggcatggtgccggttatctttaggtcctcgagcgtcagttccttgaggcgggagtacgctagcacacgcagggcgcctaccagtagctgagcaggaacctgtgcggctcccactgtgagccg

SEQ ID NO: 4272 - DNA, 180 bp, Homo sapiens
  chr5:140012364-140012544
  hyper
cggctctaggttgagaccgccggcatggatctccacctctactgcagacacacactggaaggcttcggaccagtcgggctgaggttcggagaagttgcagacgcagcggaaatcttcatcgtccagctcacaaggttctggcgtggtcgcagagacgtgcaccagcggcagcagcagcag

SEQ ID NO: 4273 - DNA, 30 bp, Homo sapiens
  chr5:140027469-140027499
  hyper
tgacagcgaaagaacgataacaaaatgccg

SEQ ID NO: 4274 - DNA, 459 bp, Homo sapiens
  chr5:140305712-140306171
  hyper
cgcagcaggatccagcgcggaaagctctgcagcaggatccagcgcggaaagccccccgcagcacttctttcggggggctcctgtttccttaagcctagaaggtgtggtcgctcacgttcaccgtcccgcctctcgccgcctccgctcggcagctccacgctgagtcccgccctctccgccggagaggtgcgccggggtcagagcgccgggacccgacgcgcggctcccaaagggcggcaggaagagcccagctgggctcagccacagttatcagcaatctgcgggcagaggatgtggaggttaagatctgggcagcctcagggcgttgtcctagaaaacaccgtttaaggagagaagtgttagtgtctcggggcgtctcccaggctccgccctgcgcccgcagccagcgtggtggtcgagaccccagcccgctgctactggagacagcacctctcgcgc

SEQ ID NO: 4275 - DNA, 113 bp, Homo sapiens
  chr5:140306444-140306557
  hyper
cgtgttggtggaacgtggacgcctagagggaggatggtgggctgtggggtggcagttttatgtttgtgggtttcctgcggcgctgcagcgggacagctcgagtactcagtgcc

SEQ ID NO: 4276 - DNA, 5 bp, Homo sapiens
  chr5:140307010-140307015
  hyper
cggca

SEQ ID NO: 4277 - DNA, 187 bp, Homo sapiens
  chr5:140346091-140346278
  hyper
cagcagcaggaagccgagccgggttgagcgactcggaggcgagcggaggagctggaatatggggagtcagcgaggacggtggggccaggagcccttgggagggcctacggagggagcggccccaggcgctttctagagcgtgagcggtgggggagcaggcgcagggtggcacgagcggaggcggggc

SEQ ID NO: 4278 - DNA, 30 bp, Homo sapiens
  chr5:140734937-140734967
  hyper
ggagctggcggagcgcggagtccgcatcgt

SEQ ID NO: 4279 - DNA, 113 bp, Homo sapiens
  chr5:140800851-140800964
  hyper
ttcctggggacgctgcgggggttccgggccaggcagatccgatattcggtgccagaagagaccgaaaagggctccttcgtgggcaatatctccaaggacctggggctggagcc

SEQ ID NO: 4280 - DNA, 1011 bp, Homo sapiens
  chr5:140855447-140856458
  hyper
tgggactctgtgtgccgctgtcggccaatgaagacgctggagatcgggcccctgcccgtcccctttctgcgccccgggatgaggcagagactgaacagccggcgagcaaatcaacggcatccagaaagccatgtcggactcggcgcccagcgcccaagcgctaacccgctgaaagtttctcagcgaaatctcagggacgatctggaccccgctgagaggaactgcttttgagtgagatggtcccagaggcctggaggagcggactggtaagcaccgggagggtagtgggagttttgcttctgcttggtgccttgaacaaggcttccacggtcattcactatgagatcccggaggaaagagagaagggtttcgctgtgggcaacgtggtcgcgaaccttggtttggatctcggtagcctctcagcccgcaggttccgggtggtgtctggagctagccgaagattctttgaggtgaaccgggagaccggagagatgtttgtgaacgaccgtctggatcgagaggagctgtgtgggacactgccctcttgcactgtaactctggagttggtagtggagaacccgctggagctgttcagcgtggaagtggtgatccaggacatcaacgacaacaatcctgctttccctacccaggaaatgaaattggagattagcgaggccgtggctccggggacgcgctttccgctcgagagcgcgcacgatcccgatgtgggaagcaactctttacaaacctatgagctgagccgaaatgaatactttgcgcttcgcgtgcagacgcgggaggacagcaccaagtacgcggagctggtgttggagcgcgccctggaccgagaacgggagcctagtctccagttagtgctgacggcgttggacggagggaccccagctctctccgccagcctgcctattcacatcaaggtgctggacgcgaatgacaatgcgcctgtcttcaaccagtccttgtaccgggcgcgcgtcctggaggatgcaccct

SEQ ID NO: 4281 - DNA, 94 bp, Homo sapiens
  chr5:140856546-140856640
  hyper
cgccggcgtgcggcaactattcgccttagaccttgtaaccgggatgctgacaatcaagggtcggctggacttcgaggacaccaaactccatgag

SEQ ID NO: 4282 - DNA, 103 bp, Homo sapiens
  chr5:140904507-140904610
  hyper
cctcatttgcttgacccgggtactggaaactgggcaaggtccattacgccacctgttgaccgtgtgcagccctcatcccacatgtcagcgggactccaccttc

SEQ ID NO: 4283 - DNA, 30 bp, Homo sapiens
  chr5:141030832-141030862
  hyper
tctcctaccacaagtcggatgcccccttag

SEQ ID NO: 4284 - DNA, 130 bp, Homo sapiens
  chr5:141031061-141031191
  hyper
cgcagggcgcggaagcgagagggggccaccgagaaactaaacctgttactgctgcgaatacgccggcagggtccgggtggcggggcgggcggggcggacgcagcgtccgctgggcggtgggaagaacccc

SEQ ID NO: 4285 - DNA, 853 bp, Homo sapiens
  chr5:141255433-141256286
  hyper
acacccacctactcccgcgccccccaccccctacaaacacagctagacctccggcttgtcataaaaactttctgggcggccccttccctggcagctcccgagggttgacccagagcaggtgctagaagcctcgcggcgtcttcctgcacgaagcgacccaagcagccccagtccgcaccgccttggtcagcgggcgctcccagcacacacccagcgcgcggagcgactcctcccagaggacgccgagtgtgtgtgtgtgttgcggagattagggggtggcgggggggacggcggcagtttcttgggctctggcggccccacccccaccccggcagcgcccagcctccaggaacccaaggcaaggctagggcgcggcgtggtgagaacgcgcttcggctagtggggggagcccttgcgccccccgcacccaggccaccgcggggaatccctcctccccggcatctccggcctcggcctagggtcccccgcaagccggagccggcgcgagcggcgcagcgggcgccaggagggggcggggagggagccggcgccggaatcacaaagccgcgaacccggctaggcggggacattctcataaaaccgaccctctcgtggcgagcagagggggttttttgccctacgctcaatcctccaaggcctcagtgccgcccccagtctttcctggcagaagaaatagtagccgaccactgttggggaaactgaggccagaattctgacttacagagggtagctggggggaaggggtgcgagaccacctcgcctacaaattctgctcctatgcctgccgcgatctccgttctggctccagggcctgcccgcgcacacactggcc

SEQ ID NO: 4286 - DNA, 54 bp, Homo sapiens
  chr5:141256551-141256605
  hyper
gtgggggttggggaggcgccgactgggaagccggcaggccggcccagccttccc

SEQ ID NO: 4287 - DNA, 451 bp, Homo sapiens
  chr5:141257407-141257858
  hyper
tgcttgctccgtcctccgggagacccccaccaaactgggggccgcgcgcttccccaaacccatcctccacgccgcgcgctcctggagtctccttatccccgtctctccgagcgcgcccaggtttgggacgcggggactagggttctgctcagcaccccctcccctccctcggcttctcgccgcggacctgggaggacggaatccctcagccgcatcccctgctatgggctcccagcagcccccacctcagccccctcgcgccgagctcgtgttgggcccccgcggcctcgctccgccgagcgcccctccctcagctcccgccggccatgaccgcttcgggccccaagccgctgctgcctccaccgccgccggatccttacccgcctccgggcagcgccggccgcccgccccgctgtccatgagccgccgccggccccggcctgggctgcgg

SEQ ID NO: 4288 - DNA, 30 bp, Homo sapiens
  chr5:141262786-141262816
  hyper
agcccccggggacccggtggccgccgctga

SEQ ID NO: 4289 - DNA, 226 bp, Homo sapiens
  chr5:141704447-141704673
  hyper
gtgtaaatcctgaagccggggcaggttagccgccgctgtactcgcagacgccggtcggaggaaccggcaaggctccctgcgctccacagcgccagctccgcgctgtcagctcagctcgctacctccgcggcgatgttgcaaccactgcctgggaaaatggcttttttatgaatgggagggaagggagcgccagtgcgcacgcgtgccgttcgcgattctatgaatg

SEQ ID NO: 4290 - DNA, 30 bp, Homo sapiens
  chr5:141705341-141705371
  hyper
agtaccccccggggcgattctggcaactca

SEQ ID NO: 4291 - DNA, 317 bp, Homo sapiens
  chr5:141736298-141736615
  hyper
ggaaccctcgggaggacgcccctccgccccctgcccaccccctcggcgggacatggccccgggccgggacgtccttcagattggtgcgccgccgccgcggccgtctcctcccgtcgggcggggtggggggtggtgagggacgcgatccaggtcgtggcctggcggcggctccggccacagcccccgcattccggccgcgcgcccccggaggtgacgccttgaggaagctgtatttttttgggggggagccgcagggaaccgttgggagaggggccctgtgtgtgtccctttaagagccggagcgctgcctccgcctc

SEQ ID NO: 4292 - DNA, 147 bp, Homo sapiens
  chr5:141931424-141931571
  hyper
cgccggcgccccgggtgggctcccggagcgcgcgggcctgtgacccggaggtcagagatgcctccgtcctgtttgatgtcttgccctgggggccttccctcgcccaccccctttcccctcccctccggagctgatttggctcctgaa

SEQ ID NO: 4293 - DNA, 31 bp, Homo sapiens
  chr5:142092798-142092829
  hyper
ctgatggcagaggaggcgacagcgcagctga

SEQ ID NO: 4294 - DNA, 387 bp, Homo sapiens
  chr5:142781701-142782088
  hyper
tatctccccacctctctgccccgtttatctgaggcgataacgatctctaaacacgaggtatcgaatggagcccaatgaatttccatgccgcttttttgacagctgccttcaaacccgaaaccaaaacaatatttcctaaaacgaaaacgctccctcaagcgacattatcccccagtttaagttgcaaataacccagccacattaattggccctaatgaaccatgccagagggtcttaagtggtattacaaggttgcaattatcaagtctgcaaccccaaacgtcaaactagcacttgtaaaaatcgcagcacaaaaccattacggttacagggggtctttttctaaaaggggccacttagaaacctcaggcgcgaattaacaacaaa

SEQ ID NO: 4295 - DNA, 30 bp, Homo sapiens
  chr5:142784307-142784337
  hyper
atagtaagttgctggcgaaatatagccccc

SEQ ID NO: 4296 - DNA, 696 bp, Homo sapiens
  chr5:142784576-142785272
  hyper
agggaactcgtggtccgtcctgagaaaggagagggccgtggggcgaggggtgcccgtgcgggaagcccccgccccagctcccttccccagctcgccgcgtcgggaaggcttggacgatgccgggaccgagcctcctaccttgtgcggcacagattatgatttttgtgactctgggaaaggttgtgctgtgtgggtttagggtttggggaggtaacttttgcgcccccacaggtgacatcgcttgccagctcctgacacgggcgggggctgccgcagctccacctaatcctgctcgggcgctcggccacagccactctctcacctcccgccgcgctcagactgacggcggctccccctgctctgacatcttgaagacgattggggaagcgcgtcccggaagccgcccgccgccatcttggtagggtacagtgtcgccagcccgtccccgcggccaccatcttggcaaaggttcgcgatcgcgggtagcctaagccgtccttccttggttctcaagggtaaacggttccctgtgcattgtctgatgtgaaaggaaagaagtaggctttcagcaagcctcttgtccggagacgatctacgggggccgcctccagaggattctggagccgccatcttggcaaaggaagagatactcgccacctcggaaaagaagagggaaccaaccgtatgccaacgtag

SEQ ID NO: 4297 - DNA, 30 bp, Homo sapiens
  chr5:143584942-143584972
  hyper
gaaacaacagcatccgaactgcactgggaa

SEQ ID NO: 4298 - DNA, 44 bp, Homo sapiens
  chr5:145208532-145208576
  hyper
tgggactacaggtgtgtgccaccatgccccggctaattttgggg

SEQ ID NO: 4299 - DNA, 462 bp, Homo sapiens
  chr5:145214534-145214996
  hyper
aacgtgatgccaagcacggccccttttcccgctccctgtaaagggagtcttcgaggaaatccctctcgacccacacatccctgaagcaaagcccgcagctggaaagagacactggcggtgccagcttccgcgtggatgaaggagaggagagaggggcaagcagcggaggcagcgcgggatacggaaggtggaagcggggcggtacctttcggagaaagctggcgaccacctgctcgaaggggtacttgtacacctggtgcacatccaccgagacccccatccccgcgcgccgcgggccccgcgcaccggccacgcctccgcgagctcagagctgcccagggctccgcagaggcccggaggcgcccacactcggacagccacatgggcgtggcctttttcctccgcttttcaaactttcgaaactttattggccactcggagaaacgcgcagtcggccacgcc

SEQ ID NO: 4300 - DNA, 30 bp, Homo sapiens
  chr5:145583495-145583525
  hyper
ggaggtcccggcgacgccttccctgtagta

SEQ ID NO: 4301 - DNA, 30 bp, Homo sapiens
  chr5:145718476-145718506
  hyper
agcacgcctgcgcgcgcccgggcccttcct

SEQ ID NO: 4302 - DNA, 30 bp, Homo sapiens
  chr5:145722186-145722216
  hyper
gggtttgccctccgcgcagtgcgacacccc

SEQ ID NO: 4303 - DNA, 30 bp, Homo sapiens
  chr5:145724503-145724533
  hyper
aaggctccagacttcgcgctgctcctcctc

SEQ ID NO: 4304 - DNA, 360 bp, Homo sapiens
  chr5:146256761-146257121
  hyper
tttcccttcctgcccgcacagcactagtgcttatgtcagaacaagctgggagagagggagagacgacaatttcacctcttggcaaagctcagcttgctgaacccttttgctttctgctggctgttgattcagcagaaactactgctgcagaattcataatggtgatttttaaaggccccaccgatcgcgttgctcaccccacgtgtcagcctcattcgctgcccgccagagcactatttccccagccacctttttatttttgctaatgcacttccaaaaggaaagaggttcgcccgtctgcaaagggctttttggggttttgattgtctaagcaggtaacctggccggccggggagatga

SEQ ID NO: 4305 - DNA, 334 bp, Homo sapiens
  chr5:146258144-146258478
  hyper
caggcttgcctggccggaatgagggtgctggtcccacgggagggcggctccggcaggcgggggtagggaagctggcggggagctgggcagggcgctgcagccggcgccagcgcactcaccctcacacccacacgcgcgcactcgcagctgctgctgctgctgctgctgctgctgctgcaggaggctggaggcggctggtgcattaaaggcgaggctcctcccaaccgcgtcagcagccccacgactctttcccagcagcagtggtggccgaggcagaggctgcggctgctctttgctgcagtggggcgcatgcagccgcgaatcggcacctggg

SEQ ID NO: 4306 - DNA, 136 bp, Homo sapiens
  chr5:146614283-146614419
  hyper
cgtcctggtggctccggacccggcccaagcgcggcgggacctccatccgtagccctctcccccaacgtcgccctcccggggtccttgtctagtctcagcaggcggcaaacggaccccaggcgtctggcgctcaccc

SEQ ID NO: 4307 - DNA, 30 bp, Homo sapiens
  chr5:146833156-146833186
  hyper
ggtggtggctgcagcggctggctccctccc

SEQ ID NO: 4308 - DNA, 307 bp, Homo sapiens
  chr5:146888875-146889182
  hyper
ctgggctaggaagtcgcgctacgctcagtggaggatgaccctttcctcctccttgtcccccagccccgtgcaaagtgagctggagaaagttgtgcccgggccatggcggccagggctggagaaaggaacgaaggcaaggagggaagtgacccggggcccccttaccttgtccttggggccgaggttctgcaacacctctttgccggtggcgctccggatctctaccccggcgggggcgggggaggcgggcgcgggctccctgctctcttcccggccttggcccctgcgcggggtgtccccctcgatc

SEQ ID NO: 4309 - DNA, 529 bp, Homo sapiens
  chr5:146889331-146889860
  hyper
cgggacctggtccgtggtgcccggcctggccaggtacacgggcagatcgtcttcgtgggagctgtcccagcccctccggcccgaggccatggttcaagcacgaaagcggcccgcgggtttttcttccccagaggcggaaagggcagccgccggcagcgtgcgccgagccacagtgactgtggcgggaggaggcgcctgagccttcgcgccagaggcggcagtgctgctccgattcctgcttgtccctagcgagccagcgagccacacagccagctagcgcgcggagcaggggcccagagtagcgccgcgcttggctcactcgctggacctctcgcccggccgcacctcctcacgcacccccaaccctaacgtggcctcccgggctgacgcagcgtcggtgcccatcacaatcacaaaccaaacttggcgcgcgcgcacacgcacacacaggcgcacactgcccgctcgcgcaacagccttgcctcacacactttcgcgcaatttagacgtcttagaaatgttcacactc

SEQ ID NO: 4310 - DNA, 30 bp, Homo sapiens
  chr5:147534273-147534303
  hyper
tggtctggaagcaccatgacccccatcccc

SEQ ID NO: 4311 - DNA, 30 bp, Homo sapiens
  chr5:148033693-148033723
  hyper
gcttctgctgccgccgctgccgctgcgctc

SEQ ID NO: 4312 - DNA, 450 bp, Homo sapiens
  chr5:148520918-148521368
  hyper
caggacacaaggcctcgtccatctcacaaggcctcgtccatctcccatcacaccctagggcccaggcagaagcccggcggggcggggcctcggacacgcgccggtgcgtccagcaggtggcagcagcgagcggccgcgccccctgcgctgccaacccgcgagcccgcatcatggatgtcgagctcccctatttcgcattgctagccctggaattcgagaccccagacgaggaccaggattcatgaaatcagtcgcaggggccggggcaggggcctctggctcccgacactggccgagaggtgggttccggggcgggtcgctgctccttgaagccgggcggggacgcgctgcccccgccctgcctccctgtggtccacaccccctttgggctccggagccgctgggcaggaatagtccggggtgcgcgcgagcaggcgctgccaaccccac

SEQ ID NO: 4313 - DNA, 1056 bp, Homo sapiens
  chr5:148651040-148652096
  hyper
tccctaggataaaaacgcgctccaacagtctccgcattccggcatggagccggctgaggggtgcggtggtaagaccccatcgctagcggagtgcaagcaaagccgcacacctcctgggtccgggctggggcaggccgcgcgggcgcgggaacgaacgcgtgcggacggggaaaagggtcctccaagcccaagtgggagcgccgcggagggcgagcgagcggcagggcgcggcggggcgtgtgcggcaccacgggacagcgggctgcggcccagggggcgaggcgtgctcgggtctattccgggagcggctctgaggggcgggcgcgggcgcgggcggggcgggggctgccggcgagcatcctgtctgggggaggggaccgcagagagcgccggccgctgggctggcctgagagcgcagcgcgccggccgctaccagccgcgccggagcccctgcgccctgcggcccgctccccggggaccgggccggcgccatggaccgaggccagggtaagaggggccgcgacgcccgcacttgttgcggcgccgggcgggaaagggagactggacgatctgaagccggagaggaggagggagagaggcgggcggtggggcgggggctgaggaacgctcggaggggactgggagacgcggcgcttatgcaaaggtgccttcggctgccgggacaacccggtgcgtgtcaacgcccgtgtcctggggccaactcgcctctcgtgtgtgaaatcagagttttcataggctaacgatttgtaacttcataaaagatccccctctagtttccggaggacagcgagctcctcccacctcattccactctaaaggggaaaacaaggtgtacaggttcaactcccgaaacacccgctgtgggcagcccctagggagaagctctaggggaccgaagtttgcagctgcctagggcattgcgagaaggaggagcgccgtgagcaggcgcgcgtgtgcatgcatgtgtgcgccagggagggaggaggcgggggtggttctatcccgcaccagctgtgtcctcggcccagcccttct

SEQ ID NO: 4314 - DNA, 107 bp, Homo sapiens
  chr5:148724796-148724903
  hyper
tcaagtaagctccatgcgggcacagctatgatctgctttctttgctgccgaccctgcgcccagcacggagactgtagttactactaggacctcgcctacccgcggaa

SEQ ID NO: 4315 - DNA, 149 bp, Homo sapiens
  chr5:149379995-149380144
  hyper
gcctagatccctcacgctcagcacagccccgcccctgttacctgaacgccccacagcagtgcccgggggctgagcggccggggcgtcccaccgccggcagccacagcttcctcctccgcccgggacctctggccggaagcagtccgttc

SEQ ID NO: 4316 - DNA, 30 bp, Homo sapiens
  chr5:149569586-149569616
  hyper
tgcgtgcgggggcgcgcgcatccccccgcc

SEQ ID NO: 4317 - DNA, 699 bp, Homo sapiens
  chr5:149681875-149682574
  hyper
cccaggacaggtagccgaagctgagcaggctgaccagggagaagccagtgagggtgtgcatcgccaagccggcccgcgcgtcccggcgcgccgggctcctggggcctcaccacctcgcgcgcccagggcgcaccaccggcccgccggctcggatgctgcgagggagttcagcgccccccggggacggtccagtgtctggtccgggactggctgccggacggctgggccggatctgctcggccgcagcggggcgctctggggaggtcaggcccgcgccgagctgcctcccgctgcctaagcgcaggccctgcgccgcctttgctccctcttccccagctcagcccggccagcctgagacgcggcgtggcagcttccaaaaagtgctctctaccatcctctgactcccctcttccttcttgccctggatttctcccgcctcctaatttctctctcctctgctttcccggcctctcgccccacccggagtccttaaaacagcccagctccctgcagggaggtgggcaggaccccagaggggaaggggagggaggcacaagttgggcgggtcgaggggacacggcgggagagaattcgaaaaagttgtaacatctgccgggccgggccgagccccaggtggaggggcgggacgcagagcagcggctccacctcccgggcgggaagccccggccctctcggcct

SEQ ID NO: 4318 - DNA, 30 bp, Homo sapiens
  chr5:149829575-149829605
  hyper
gctagacagacttccgccatcctgactccc

SEQ ID NO: 4319 - DNA, 30 bp, Homo sapiens
  chr5:150051551-150051581
  hyper
ccagaaggctagtccgcccccttccccaac

SEQ ID NO: 4320 - DNA, 30 bp, Homo sapiens
  chr5:150336249-150336279
  hyper
aggctccgcacttcttggggaatgggagtt

SEQ ID NO: 4321 - DNA, 671 bp, Homo sapiens
  chr5:150399979-150400650
  hyper
cagatttgcttatgtcactgtcgccccgggacggggaggtggggagctgagggcaagtcgcgcccgcccctgaaatcccagccgcctagcgattggctgcaagggtctcggcttggccgcggattggtcacacccgagggcttgaaaggtggctgggagcgccggacacctcagacggacggtggccagggatcaggcagcggctcaggcgaccctgagtgtgcccccaccccgccatggcccggctgctgcaggcgtcctgcctgctttccctgctcctggccggcttcgtctcgcagagccggggacaagagaagtcgaaggtgagtgagcctccgggccgggggccgggagaaaaaacctagcccctcggtgtccagcgctcagtgcaatgcaccccttttcccaggctccccgccagatgggcaatccccaggtgcgagagacctcctgaaccccttttgccgccccctccgccgccgggaccccgcccccgaccgtcgtcgtctcgtagttccatctgttggagagccgagacctggtgcttcaggcgggcagaatgactaagggaggaaggtctctctccccgagctcgcactttctccccactgccacctcgagggtcgccttgctacatctatgtcacctccgtgcctgagctgctccccttc

SEQ ID NO: 4322 - DNA, 30 bp, Homo sapiens
  chr5:150460085-150460115
  hyper
acgaaaactcctgacgccgcgtaggcaact

SEQ ID NO: 4323 - DNA, 30 bp, Homo sapiens
  chr5:150536836-150536866
  hyper
cacacccttctctgcgggtcctttgactgg

SEQ ID NO: 4324 - DNA, 404 bp, Homo sapiens
  chr5:150603147-150603551
  hyper
cacttgtccatggccacacagcgaacagccccagaccgaaagcagagggcacctgccacagacacacgacatctccccacccgaggcagcgggaatcagctgcctttccctggcccgggtgccgtgtttgtaaactcggctgcttggtgcggctcgggccggggtaaagggcgcctcccagcagagcctccctcgtctctgagctggcctctccaggttctccgtccggtatcccgggccgaccagagagagcccggggcgccgagtcctctgcggcggagcgattccgcactcccctctcctctgaaagcaaacttctccgccggcgccctttacctttttcgggggtttgcagctgctcagcctgctgtgtctgcagcccatcctcctccgggggctcccgg

SEQ ID NO: 4325 - DNA, 184 bp, Homo sapiens
  chr5:150603589-150603773
  hyper
cgatccgggccccgctgcccgctccgcgcccgccggctggggctgccggcgagaccctgaaactgaacctggaagcgctgtcttgagcctgagctggggcggccgcccgccgtaaatacccgaagagcggggcctcagtgtagcccgcagggccagcggcgccgccaccagaggcaggtgacca

SEQ ID NO: 4326 - DNA, 30 bp, Homo sapiens
  chr5:150620960-150620990
  hyper
tcccatcttgggtccacagactgaggctga

SEQ ID NO: 4327 - DNA, 261 bp, Homo sapiens
  chr5:151066246-151066507
  hyper
aaagcaacaggcagacaggaccgagggccatgctcttaaggggagccgtgatggagccgggaggagaggcgcatcctcagcagagcttccctcccttgcacacgagctgacggcgtgaacgggggtgtcggggttggtgcaactatagaagggaaaggctgggcgggggtcacacatacctcagtggcaggcaggcaggcggcaggcagagcgcgctctccgggcagtctgaaggaccgcgggaatgtggaggggtttaga

SEQ ID NO: 4328 - DNA, 30 bp, Homo sapiens
  chr5:151138146-151138176
  hyper
ggcggtgtcagcagcgcctctctggattcg

SEQ ID NO: 4329 - DNA, 392 bp, Homo sapiens
  chr5:151150297-151150689
  hyper
ctcagcaaaactccgcgggagaccctggtcacatgcctggaacgagaacaaaccggggcgtgtctgtgccggacggctgggaaccaaagctatttccatagaaatagggccggccagccttgagttgtagccccgccagtgcctgaaacgccaggaggaggggacgagttgccttttaaaggcgtagcgacgagaataagcccccacccgcggcaattcgaggctgaacaatagtggtgcagctcgggacgtggtgcgagggcccacactccactggagcacgcgcggaccaccgtgcctcagctgccacaaagggagcctcgccacacgcccgcggccgcctcgcagcgcccgccaagaagcgcctggcggaagggcgcactctcaggcct

SEQ ID NO: 4330 - DNA, 84 bp, Homo sapiens
  chr5:152871129-152871213
  hyper
gctgtctgccatgctgcgctggtggtctccactcccccgatcctggaacttcctcgcctgccttttctccgttccttccttgcc

SEQ ID NO: 4331 - DNA, 30 bp, Homo sapiens
  chr5:153826510-153826540
  hyper
aaaggccgctccagcgctgacatgctctga

SEQ ID NO: 4332 - DNA, 216 bp, Homo sapiens
  chr5:153852520-153852736
  hyper
cctctcaatgggcgccggctccgtctcggctcccgggttcagggactgcacgtttctgagaccgagtttagggctccaaggctctcttcccaaagagggtttggggccagcaggattgggttttctgaagaggcctggttatgccagacttggctttggcggccgctggcgggtctccctcagcaccccctcttctttccccggctataagaaagc

SEQ ID NO: 4333 - DNA, 30 bp, Homo sapiens
  chr5:153853091-153853121
  hyper
ggacaggctcattaccgccaagtgttgccc

SEQ ID NO: 4334 - DNA, 30 bp, Homo sapiens
  chr5:153854304-153854334
  hyper
gtttttgttcttccccgttcccataagtta

SEQ ID NO: 4335 - DNA, 470 bp, Homo sapiens
  chr5:153854940-153855410
  hyper
tagagaagacggcgtcggggcggatcatatggagggacaagagagaaagagccagatagggaaatggagatagggctgaggttctaaattcgctccaaaagggtggaagagtgcgtctttgagcccttgggttcgacagtccctccttcttgcatgttgccgccaagggccgccctcggttgggctgggggtggatatatatatatttctctttctcttaatgtattaaaaaaaatcaaaggacattgcacgtgcgatccaagtgtgtggttgcagccgacgacctgccggcgctcagcagaagctccgcgggatgcgtagcaccagtcgccggagcccagagcctggcgttcgccgctgccttcctctcctcccggggcttcaggagtggctggcctggccaggtcctcggcgcgggcctcggctcactggtttaactccagcgcccagacttgctgcggccagccggt

SEQ ID NO: 4336 - DNA, 16 bp, Homo sapiens
  chr5:153857284-153857300
  hyper
cgccggccaagacggc

SEQ ID NO: 4337 - DNA, 30 bp, Homo sapiens
  chr5:153857774-153857804
  hyper
gtttaacccttctgcggactcccctgcgga

SEQ ID NO: 4338 - DNA, 142 bp, Homo sapiens
  chr5:153862037-153862179
  hyper
taggacagctgtacccgggcaatgcgaaggtccctcaagcctggacgttctgcagtggtggggtctcgctcttgccctagcccctctcctaccctcacccctatccgcgccccccggactggcaggcctctggaagcccagg

SEQ ID NO: 4339 - DNA, 337 bp, Homo sapiens
  chr5:153862218-153862555
  hyper
cgtgaccttgacgccacgggcaatccccgcaccggaccccttatctaaatagggcagtaaatcaaggacctgtcagggcccgggtaattacaggaactccataaaaaggacccggccggccgcctgtttatattagcgcggtgtaaaatattctcgctgtcttggggaatcgcgtcgcgcagtaacgcgccataaatcagcccgcggaccatttaccccgcagcttgagcgcgcaaatcccttaaacatttctctgccatgtctgaagaggacctaggactttccaatctggcccagcctgctcccagggatgggggacagtcggggcagggaagag

SEQ ID NO: 4340 - DNA, 30 bp, Homo sapiens
  chr5:154317540-154317570
  hyper
tgtccctggactctcgcctgcgcccgggcc

SEQ ID NO: 4341 - DNA, 20 bp, Homo sapiens
  chr5:155108063-155108083
  hyper
cacagcctggagaaacagcc

SEQ ID NO: 4342 - DNA, 107 bp, Homo sapiens
  chr5:155108160-155108267
  hyper
cggcggccggcggaggctttccgcagccgcttggccggcgccggcccctattccgttggcaagtcccttgtctatcccggagggcgcacccggacgctcgagccgga

SEQ ID NO: 4343 - DNA, 490 bp, Homo sapiens
  chr5:155108355-155108845
  hyper
cgatgcgcccccacccgggcggcgcgccctctgccaactcgccacccatgggatcgactgccctcagctgcccggcttggagtgcgtagccttcgccgcgtggcccaggagaggagcgagacaccaaggcgtttcgcggactccgcgcgcaccagtcggcttggtggccctgcgggatagcgtttatacccaggggtgagtaggccgctaatggaggccccctttacccccagctagcggcttgcatggacggcaaagagacgggagaaagttgggtctccttgcgcttaatctggcattggcagaggaatgcaacactgtttcctccaactcgattgccgcgggggtttccccagttccctccatctctaagccaaggagggagtccccttccgcttcctaaggagaaaaggggctccctagagcagatcgctgacttcctcaccaacgtgccatttggggcttttcagccgcccgcgcgttaagctag

SEQ ID NO: 4344 - DNA, 332 bp, Homo sapiens
  chr5:155109188-155109520
  hyper
cgggcatcctgtggctaggcgcgggggaggggaacggctccctccccgagccccgggctgcctctgctgcttctaggggtgcatctgaacatggataaggaaatgcgctccctgctctcaggccctatttggggtgagtgtgtgaggcatccaaatgcctcctgtcggaaaacagcggcctcattgtgtgcccgattgaggtttcaacttgcaggcaactgagaggccattcagctgggcagcacggagttggctggtcctcggacttgagccatggccttccccacgatccctggcggcagtatcccagctcctccggctgggcggcgagc

SEQ ID NO: 4345 - DNA, 30 bp, Homo sapiens
  chr5:156693942-156693972
  hyper
cgtctacttttcaggtcagccctacccctc

SEQ ID NO: 4346 - DNA, 248 bp, Homo sapiens
  chr5:156887212-156887460
  hyper
accccggcggcttctcgcgcgcgagccacgcgggggacaagtcgcggccacctgctccggagctggggagcccgggcgccgtccgcccgcgcgtcggttcgtgtgccccgggccccatggagctgcgggtcagcaacaccagctgcgagaacggtgcgtacggcagggctggggaccaggcgggctccgcgcttcgcgccctcccctccttgccaccgctctccctcgcatcctctcctcccaggggg

SEQ ID NO: 4347 - DNA, 956 bp, Homo sapiens
  chr5:157001781-157002737
  hyper
tagtcctgagaaacacggacatcacccggcatcttagctggaaacatcgagtcagaccccttcgcttcacagaaggggaaactgaggaccaaagaaggcggccgtcgggttggcgtggaaagagagccctggtttccagtgccaccgcggacctcaacccgtggcgtggccttgggcaagtcctttcccttttgtgggcctcggtttccccatctgtgaaatgggtgcgtttgacttggccttcagtagggctcctgccagctcggggatccgaagtgtgtggctgcagatacccagcgagccatcccctagccaaggctaccacagtctgccgcgggcattttatgtcctaccccaccagtgtggcaggcaccgagcctggtcccaggaagccgctcccaggccacacgggcagggcgctcgggatgctcggcgttggcgagtgcagcgggcggtagagagaaagacagagagagaggcggagcggacacgagggaccgtgagaaaacggaggaggataagccccgagaacggcggaaagagaagccaaaagcagaaaaacagaggaaggagaaggcgagaagggaaggctagccagtgagcggaccggctgttttctggctgcgccgggtttccccgacctctgccacctcccagggcgcagaacgtgggaacaaagcccgggctcccaggctggggacggcgggggcgcaggccccgcggagttgcgggaggcgcaggggtcgcggtcccagcgctccggacccgcaaggctactcccaggtctccgggccacccagcctccatccccccgcgcctggccacttacttgtccatccaggctcccgcgccgcccgcggccggaggggctgcagggcaaacgccagcaagcagagccgggcggcgcctgcgccccctggcatggtggcggcggcccttagcgctcggcgctcaca

SEQ ID NO: 4348 - DNA, 30 bp, Homo sapiens
  chr5:157003035-157003065
  hyper
agagggtcggggactcgggcttctaggagt

SEQ ID NO: 4349 - DNA, 30 bp, Homo sapiens
  chr5:157098604-157098634
  hyper
tccaacagggaagccgcaatgacacagccg

SEQ ID NO: 4350 - DNA, 65 bp, Homo sapiens
  chr5:157285887-157285952
  hyper
tcccccctcccccacgtgggcctcggccacaactgccccccgatactcacgctttgtccaccagc

SEQ ID NO: 4351 - DNA, 126 bp, Homo sapiens
  chr5:158478518-158478644
  hyper
cgacaaactggagccggggcctttccgcttaggaggaactcgctacgtgtcgctaacaacaacacaaacaccgccggcccggctcggtgctccgctgcccacagtgcgctcggcaccagggctgga

SEQ ID NO: 4352 - DNA, 58 bp, Homo sapiens
  chr5:158526599-158526657
  hyper
ttttttttctcagacgatgaactcgcacttagaagatcaaggcgggctggaaagcaaa

SEQ ID NO: 4353 - DNA, 650 bp, Homo sapiens
  chr5:158527353-158528003
  hyper
actaaccccaaagggaggaggcggggcccgcgcatcgaggccccgccccttcatttgcataacgtcatctttccgcccaccgcagccaatcgcggcccgggagccggctcgctggcggcgccaggccacgctctctcattaacatcccgctcccggtggcgcaggggagccggccaaagttcctcgcaaagtggcgagcgaaggagcgctgagcactgacgtctgggctggggaggagcgggtccgagcgaggacggagaggggacagagggaaagggaggcgggtgtcttcctcaggaatttgagctggggatctgcatcctggccattgcagtcctttagcatcctcgccgcgccctgagcgcgctggaggctcgcaggctgcgccctcccagggctgatgccgcgtcctgctccgccgttctgggacgtcggggacaaaagtggaggagacgggagagcccgggcagaaaaagcaggacgcgcgtcccaggtgcccacctcttcgctttgaggcgggggcggtgggatggaatatgggtgcgcgaggtcggggctggtaactctcggaggggcacggcctccacgctgggagggatgaatggacgctgggccccggcaaatgaggcgctgtgggtccccaggaagtg

SEQ ID NO: 4354 - DNA, 31 bp, Homo sapiens
  chr5:158634800-158634831
  hyper
tcatcatctcccaaaccgcaaagacagggag

SEQ ID NO: 4355 - DNA, 966 bp, Homo sapiens
  chr5:158635046-158636012
  hyper
tctttactgcagactgcgacgcaaggccatccactaatctttgatgcctgctcactgcacaggccccttcctctctccccgcacctcctcccacaacgcctgcagatctcagatgcgtttgaactacagtaaccccaacccagctcgcggcaagcaggcagcgcagcagcagtagcagcagcaaccgggccgccgccgccgcggggctaagagattacgttcagcaaaaactcttccaggaaagaggctcgagagctcccctcctatctcgccaagggtgctgactctgtcgcgccacgccacgtaccaaaaggctcgcgaagaaaaacgcgggcgaagttcagcatccccgaacagaaagggaactcattccagaaagggggttcacgggtctgagggtccttgggtggggaaagcagtattggagggagaagacagaagggatggcaagacagaggaaaccacggggacaaaaaggaagggatgaggagccctcttactataaaagggactgacggacgggatgcagagcaatgggcccccctcgaaaaatggactggcaggcccttccgcacccccaaacaacctcgcaccacctgaaagcggggagcttgagtttggggctgcgtagatcaaagcagggtaagacgaagggaaagagggaggggagcttggaagcaaagtgaacaaagaggcaaaagaggcaaagttggaaatggaaacgagaaagggagctggaaaggggccgctctggaagggtcttgaaaaaggcctagaaatgggatgctggggaggcaaagggggacagccccgaggaagggcatctcaggaatgtaagggagcgctccaggccctgggaagaggaagggatgggagggcggggaggcagccgaggcccgggagctggaacagagggggctttgcgcggggcccaggaggggagagcagggtcggagggaggcgacc

SEQ ID NO: 4356 - DNA, 30 bp, Homo sapiens
  chr5:159343466-159343496
  hyper
ccgcctgatgtcaccgccgtgcagtcagcc

SEQ ID NO: 4357 - DNA, 35 bp, Homo sapiens
  chr5:159546856-159546891
  hyper
ccacttctttcaaaggcggccgaggggaggagtaa

SEQ ID NO: 4358 - DNA, 327 bp, Homo sapiens
  chr5:159739151-159739478
  hyper
tctgctcgccggacacggggcgatatggagctgtgcaacaacttgcagaatttttatcttcccttttgcaaaagttgcagagaaagttgtcaactccgctagctcgctcgaggctggggctctggcggcggccacaggctcgccgtccccaactcctcccccgccgcccagcctttgtcctgctcccacatcctgccctcgagccggggcgaaactcacgcatcctctctgggcgtggggggctgcgagcgccgggcccctcccagtgccgagccagccgtgccctctggtgcctgccggcggttggaccctcgtccgaggcgctcc

SEQ ID NO: 4359 - DNA, 227 bp, Homo sapiens
  chr5:159739696-159739923
  hyper
gctccgcttcctgcccgccctcctccctcgcttcggcggaaagcttctctctcaccttcgctgaggctagtggtagccttctgggcacccctccggcttgcgcagggagcaaagggaccgcggcgccacctgcgcgcaccacgcgtgaaacgtgcggacaggacgcccccagaaagttctgccttccgcgcgcactgctctagccatccttacgtcggttccacctg

SEQ ID NO: 4360 - DNA, 174 bp, Homo sapiens
  chr5:159826415-159826589
  hyper
ttctttctagccactgcgtatgcaagatcatgataggcgcaggtgtctggggaggcagagcatttaaccattacattttacagttaaaatcaatagccaggagaatgggggcaggaacttggtggctgggcagacgctccaggggcaaacgcctgggatcgtggctttgtcact

SEQ ID NO: 4361 - DNA, 215 bp, Homo sapiens
  chr5:160975718-160975933
  hyper
aggattggacttcagagccagcgttcctaaccactgaactagacagcctacactccgaagtctcctgagtcagcgaccttgcccgctgccagcgctttgctgtggcgggtcaagctcctggcgcccgaggagcccgcggcggctgcgggtggagttgagcgcggaccgcacgagctagacccggccggtgtctgcggagaggaggggtcgccggc

SEQ ID NO: 4362 - DNA, 83 bp, Homo sapiens
  chr5:160975955-160976038
  hyper
cggaagtagctccacaggcttgcgaccccggcagccctgggggctcctcagggtcctgttccgtgctgcactcttgacccact

SEQ ID NO: 4363 - DNA, 30 bp, Homo sapiens
  chr5:161275850-161275880
  hyper
ttaagacgctgggacggaaaacctgtctca

SEQ ID NO: 4364 - DNA, 30 bp, Homo sapiens
  chr5:162887365-162887395
  hyper
tccggagggaagtgcgcttgcgcaaatgct

SEQ ID NO: 4365 - DNA, 211 bp, Homo sapiens
  chr5:162930172-162930383
  hyper
ttttcgagactactacggggaatcagctaccagcttactgccatgtggagaactgcacgagattccgggattggaatcaaaatgctaatttaaaaggtcaagtgaagctgctcctcacgttttggcgtgcctgcgctctctgcaggcagaagcgaacaaagacccagcaagagaaggcagaggctaagacccatcccgtatctgctctcct

SEQ ID NO: 4366 - DNA, 780 bp, Homo sapiens
  chr5:162931121-162931901
  hyper
tagaaaggtaagattacatcacgtgttgcgactagaaactttaaaccgaattcccagttaagagaaaaagtagtaagatgatcttggctgctcccccggccctcttcccgccctcttctttgttgtcccctgattatgcttgtttagcgctggggcagtcctcaaggattccctaaataaagccaaactaatgaacagtaatagcctgtgtttaaaaaaaaaaaaaatcggaacataagaaacctcaggctgtcttcgattactgttctagagaaactttatgtttacacgaataaggaaatgagtttttgttgggggttgaggaggaaggaaagtcatggtgttctgacgtggaaaacttctttaaaaggctgcttagtctttagtttgaaaataaaccaaaaaggtttaggagtcggggaaaggccctaggaaaatccagacagtggtcacgtttgtggacgacgtttagagcttgctatcctgggcacacaagaacccttggactgttcggtgcaaagttggcaaatcctacacggcctgtgccagggtttactttctgcatcaatttcacaggcgtccagcctggctgaggattttttgcggtttttaactggaagggaaataagtcggcatcagcacttagggctgcttaacttttaaaaggtggtagaacgcccagccttacacgctgctgcttaaattctcggtgctcaccaaggctgggctcgtgtggcccaatcctgcaatccccgaggcggtgtttcttaaagagtgggc

SEQ ID NO: 4367 - DNA, 30 bp, Homo sapiens
  chr5:166406115-166406145
  hyper
ggtcctgggtggctcgcaggctcaggtcgt

SEQ ID NO: 4368 - DNA, 30 bp, Homo sapiens
  chr5:166406436-166406466
  hyper
attttgctccaaagcgagctgggaccgaag

SEQ ID NO: 4369 - DNA, 30 bp, Homo sapiens
  chr5:167000730-167000760
  hyper
cagctcagtttgatcgagcgttccttttct

SEQ ID NO: 4370 - DNA, 30 bp, Homo sapiens
  chr5:167001108-167001138
  hyper
tccgcagcagaagccgatttttcagtcggc

SEQ ID NO: 4371 - DNA, 224 bp, Homo sapiens
  chr5:167718507-167718731
  hyper
cccctggcaggggcagcgtaagggtggccggcggctgggactgtcccacgagggggcgcgtctcgggccctaggacccgccctcgaggcgctgcgcgcggggaggggacccgggaacccaggcgcccggcgctccgcctcccgtttccggggcagcgcggttacctgcaccgcccgagccgcacctggcggaggcagaagtcacaaacccggcgagctcagagc

SEQ ID NO: 4372 - DNA, 378 bp, Homo sapiens
  chr5:167718951-167719329
  hyper
gcgggcggcgccgggtcggggctgcagggccgcatggacagcggcgccaccccggccggcccctactagggccccccatctgcgggcgccaccccccggatcatggtgcctcggcggccgcccgggctaagagcggccggctggagccgctgagcccccgctgcggccgggagctgcatgggggagcgccggcagcgcttgggaagatgccccggccggagctgcccctgccggagggctgggaggaggcgcgcgacttcgacggcaaggtctactacatagaccacacgaaccgcaccaccagctggatcgacccgcgggacaggtaggaccctggaaccctcctccgtgcccccacacccccgcctgggcccccac

SEQ ID NO: 4373 - DNA, 302 bp, Homo sapiens
  chr5:168727408-168727710
  hyper
agagactgcatccagggaggccgaggggaaaggacggatctggcgcctggggccccctcggtgggacccaggtgggtggcccgcgtggggtggggcaggggtactcacaggcgctcagcgttgcgggggatgccccgaggaaccgcgcggaggcccagcccgtggcagtccacgctggcagcggagcaggtacacttggtggggcaggcgacggctggaggcccactcaggacgctcgccagcgccaaggccagcgccaggcgggcgcgcacggcggcgccgacccctgcccacccgggggc

SEQ ID NO: 4374 - DNA, 224 bp, Homo sapiens
  chr5:168728061-168728285
  hyper
gctgggctggggagcgcggcggctgcggctggggcacggggcggccgggtgagctggccggcgctcgctctctccattcagtgagcacggcagacaccggagacgcggggcccacccctccggcccccccccgaccaagaaacgccaactccgcctcccattggctgcgccgcgcgtcatgtcgactaagttgggaactttgctggagcgaccgagagcctgga

SEQ ID NO: 4375 - DNA, 796 bp, Homo sapiens
  chr5:169064009-169064805
  hyper
actctctgcacttgcggtggtggtctggcgagccccaggtggggactggcctctgctccctcgcctggggaggagacaaagtgggagtggtccccaagttttgcgtgaagtggggtggggtggcgtgtcttagcctacggggcaccagccttctagtgtgcccctgcccaacgggagggaggagggagcggggagccccggcgagggaggagagggcgggccctgagaggagtttgaaaagaggaaggaagtggggccctgcggcgcccagccaccccctgacggcttccccacgggaggacgcgaggccccggcccagccatggccccctggcgcaaagctgacaaggagcggcacggcgtgggtaggtgcgggccccagggcgcggcagggagcgggacaggtggcgggagagccgcgagcaggaggatgctgcggggccggcggcgcggggtgggcagggcgcgctgcctgcaggtcagagggcgcagcctgcggcggggcctcggggcgggaaagccgaggctcggggagaggacggcgggaccccaccccgcaggctaagcacagccctcgccctctcgcctgctgagggaaccttagacatttccgagatagggtcaagacctgcgcttgacaactcagttcttcgcgccaaactcggcgtccccaggagtgccccagctcgccgcgtgggagacttggccttgtagagggagctccactctcccctggctcagccttggcctgcccaccatgcatacttccaccccctccaaagcgacacccatttgcc

SEQ ID NO: 4376 - DNA, 63 bp, Homo sapiens
  chr5:169930890-169930953
  hyper
ggcagatgagggtgcgcaggggtgagggcgcagggctgggcgtcccccgcccccaccgtgcag

SEQ ID NO: 4377 - DNA, 25 bp, Homo sapiens
  chr5:169931353-169931378
  hyper
cgcggggagcggctagccctgagtc

SEQ ID NO: 4378 - DNA, 435 bp, Homo sapiens
  chr5:170108014-170108449
  hyper
ggttttctggctttgaatgaccgcctagcgcttgccggtgcgccagggtgctgtgaggatgtgggcagagggcgagtccgaagggctccagacactgggaatagtggtggtcgtgtgctcctccctgaaacttttgcactacctcggactgattgacttgtcagacggtaagcgaaccctggagcttccccgttttctgtgaatgtgtttttgtggcttcggttgctgtgacagtcgtttcgaaaatgcacggaaatgagggcggagacccgagagatttgaaaaagccgggctgaaacagcgtggtattggtccccgcctccccagtcgcgccccagtgctgcgctgtccgtcgtgctgaaatgtggtgcgcctggggagtgcgggagccaggaagttagggtctcctgctccggccctatgagcatgtgagtc

SEQ ID NO: 4379 - DNA, 30 bp, Homo sapiens
  chr5:170288990-170289020
  hyper
gcgctgggtgccgaccggccggctggccgg

SEQ ID NO: 4380 - DNA, 59 bp, Homo sapiens
  chr5:170289638-170289697
  hyper
gcctcttcggaggaggaaacccgggccgggcgcgggcgcgggcgcggacgcgaggatcg

SEQ ID NO: 4381 - DNA, 53 bp, Homo sapiens
  chr5:170736110-170736163
  hyper
aattaggcctttattgaaagccgggagccaatgagaggagagaggcttgttga

SEQ ID NO: 4382 - DNA, 115 bp, Homo sapiens
  chr5:170736715-170736830
  hyper
cggtctccagccttggcggtctcaatttcccctggatggagagcagccgccgcttcgtgaaagaccgcttcacaggtgagcagagctggcgaccaggctccaggcctccgccctc

SEQ ID NO: 4383 - DNA, 582 bp, Homo sapiens
  chr5:170737281-170737863
  hyper
cgcttccatcgccagaagtacctggcctctgccgagagggcggcgctcgccaagtccctcaaaatgacggacgcgcaggtcaagacctggttccaaaaccggaggaccaagtggcggtgagagaggcctgacccggcccaccttacacctgcccttcacctgtcccgccccgagccgcagcctcgcactagccctattttaaggctatccactacccccgcccccctctgcctcccccaaacacacccccaccccgccttcgcagattgtacctcttcctttcacccttctcgctggcctgtgcttctctctccatcgtggtctcccacgccttggtttctcctccatccccatccccatctttcgtgagcccctccaactctctccccgtgttttgtacggtctcctgcgttcacttgatttcctctcacccacccccgccccaaacacacaggcacacacacacacacacacacgcgcacacacacgggcctctcgcactctccttctcctccttcttccagcccgccctctcggattttcaacaatcctcgtggacgccggtttcctctccccccatct

SEQ ID NO: 4384 - DNA, 145 bp, Homo sapiens
  chr5:170737935-170738080
  hyper
cgtctggaaaggggttcaagacaggccctgggcgaactggatgagactgacccagcccccgggcgtcgtgcgggtggtgcagagccagcctgctcacccgcggaccccagcgaccccggttcccgcagggccaagtcagttacac

SEQ ID NO: 4385 - DNA, 493 bp, Homo sapiens
  chr5:170739491-170739984
  hyper
gggtgggaggcagggtggcctcgaacttcttagagctcaagtcggaactcggagccccacttcaccccgcaactcgctttccgccctctttttcccgcggagcctcagagaggacctggctctggccagtctgcgcgcgctgtgggcaggctttgcgcgcagagccgctgcaaatcctcggtctccaaacgcctggggagcaaatgcagcgcacaaccctaggggccctctccttgtcgggtttgcgtgggaccccaggtggagcgtgacgtcatgtgacgtcaccgcagcccccgcggtgtcactgggctggagtgggcggggcgcccggaactcagaactctaagcgctggtgtggtagcgtcgtggccggggtccacccagctccaccgtggctcaagagctggaagtttcagaattgcgaggtttggagcggctgaccccttccagtcacatctaacacacaaagcccgtgaacacttcctctagttct

SEQ ID NO: 4386 - DNA, 6 bp, Homo sapiens
  chr5:170742593-170742599
  hyper
aggagg

SEQ ID NO: 4387 - DNA, 41 bp, Homo sapiens
  chr5:170743438-170743479
  hyper
cgcgaccaccacgagcgcagcggtgacacccagaggtccca

SEQ ID NO: 4388 - DNA, 172 bp, Homo sapiens
  chr5:170743646-170743818
  hyper
cgcggccgggccaggcgctctggaatagcgatggggggacacggcctccaactttctgcagagaccatcgggcagctccgggcctaagcagcgacctcaccgaaggttcctgggaacctttgccaaaatcccagcctctgcctcggtccagctaaaccgtgtgtaaacaagt

SEQ ID NO: 4389 - DNA, 30 bp, Homo sapiens
  chr5:170744031-170744061
  hyper
aattgccttggtgatcggtgccttccctcg

SEQ ID NO: 4390 - DNA, 30 bp, Homo sapiens
  chr5:170819918-170819948
  hyper
aaaaagtaaaacttgctgctgatgaagatg

SEQ ID NO: 4391 - DNA, 30 bp, Homo sapiens
  chr5:170834697-170834727
  hyper
taatagggtggttctcttcccaaagtggaa

SEQ ID NO: 4392 - DNA, 30 bp, Homo sapiens
  chr5:170837529-170837559
  hyper
ggctattcaagatctctggcagtggaggaa

SEQ ID NO: 4393 - DNA, 30 bp, Homo sapiens
  chr5:170837858-170837888
  hyper
tgaaataaaactcagtattttaataaagta

SEQ ID NO: 4394 - DNA, 420 bp, Homo sapiens
  chr5:170846061-170846481
  hyper
gagggtggctgggaaactccacgatcgcagggcgggtaaaagcgacccccattcagtggagccgccccggggctgggtttgacccgcccctctcggctctccactagagcgctggtgagtgagtgcgagtagcgaatgtgggcaggtgaggacgttccgtacctaactgcgttcttggggagcatcgcctgcccaatttgggcaacgtttgcgcggaggagcggtcactgcgctcgggcgcagagctccgacggcttccagcgctcaccagcttcagtctcgcgggtcctgcccctttggagctgccggtcccgtctccgagagtctgagcgcctcccctccaaccccgagccgccaggagaaggaggaggaggcagcgagaggccgcggcaggcaggcgagcaggcagggccgcctttg

SEQ ID NO: 4395 - DNA, 308 bp, Homo sapiens
  chr5:170847119-170847427
  hyper
ggcggcggaggcgcccggtcccggccgcgcggagcggacatgtgcaggctgggctaggagccgccgcctccctcccgcccagcgatgtattcagcgccctccgcctgcacttgcctgtaagcgcccgcgcgcggggctgcccaccttgcctggctgtctgtccgtatgcctgtgccctgtacctctgtctgcccgcccgtcggttcacctgactcttcgactgcgtgtctgtctgtccgtgcgcccccttcctcaggtcccactgaccgcttctccatctgtttcccgcaggtgtttacacttcctgc

SEQ ID NO: 4396 - DNA, 30 bp, Homo sapiens
  chr5:171022582-171022612
  hyper
attccacccacacacatgaaatgtttccag

SEQ ID NO: 4397 - DNA, 31 bp, Homo sapiens
  chr5:171533959-171533990
  hyper
actgtcttccttaggacgctcttccacagaa

SEQ ID NO: 4398 - DNA, 31 bp, Homo sapiens
  chr5:172043001-172043032
  hyper
aagaaattatccaaaacgaaacacaaagata

SEQ ID NO: 4399 - DNA, 31 bp, Homo sapiens
  chr5:172068482-172068513
  hyper
tctcctccgggggacccgctgggtgactctg

SEQ ID NO: 4400 - DNA, 31 bp, Homo sapiens
  chr5:172070427-172070458
  hyper
ttcaaaatccagttgtcgttacctcctccag

SEQ ID NO: 4401 - DNA, 75 bp, Homo sapiens
  chr5:172197240-172197315
  hyper
tgagccccatgggggtcgactgtttgctgcacagctccgggcaggaagccgaaaacgcttcgtatcctcctggga

SEQ ID NO: 4402 - DNA, 154 bp, Homo sapiens
  chr5:172234353-172234507
  hyper
ccctgacctcaccaccgacccgccctgcccctcccattagctgcgtcaccactgcctgcccccacgtttagcccagcccccagcccagatctcagccttgggtgaaaagtgtcagcccgcacactttctgttttacctccggccgctcttttaa

SEQ ID NO: 4403 - DNA, 31 bp, Homo sapiens
  chr5:172359606-172359637
  hyper
caggcggctgcaccgacgcactttcttctga

SEQ ID NO: 4404 - DNA, 447 bp, Homo sapiens
  chr5:172385501-172385948
  hyper
caccttgcatagaataaaccccgtcggttcttaacccgaagagagtcgagacccagagcccttttccttccctgccgccacggtgcccacggagggggcgtggttgatctccctcacagctccgtcgggaccagagacccggggaccttttacacccagggtccgcgcaaagtgtcggcctagccagtggttgggtggcgcccgggcctccaggcagtcttccaggggtcggcgaacgaaacgcggagctcgggagcgacccggcggggccaggcacgggcagaagggccaagagggccacaggtgggcgcggagcggccggagtgggcggggactggatgagaggggcggggtctaggagagaggggcggggcggcggccacaaacccgcaggcacgccgccggccgccgtttagtcccagagatagaaaaaagtagaggtaggag

SEQ ID NO: 4405 - DNA, 30 bp, Homo sapiens
  chr5:172410474-172410504
  hyper
cagtgccaggcacacgggaattcagaatag

SEQ ID NO: 4406 - DNA, 30 bp, Homo sapiens
  chr5:172483122-172483152
  hyper
ccgggtatcgcagacggcccacgcccacac

SEQ ID NO: 4407 - DNA, 30 bp, Homo sapiens
  chr5:172571551-172571581
  hyper
gcggctccccaagacgtccacgtccggatc

SEQ ID NO: 4408 - DNA, 703 bp, Homo sapiens
  chr5:172656006-172656709
  hyper
acacaccgtggcgtcgacttaaggtgaaatctaaacaaaatgaaaggacgggagctattctgatttggccgaacctgtgcctgcgggctgggaatgacccaaggaaacgaagggacggcggagccagtgcggcgggggccgggtgggaggcggtggcctcgtgctggggacccccagccccggctcgcctttgccgggaaccaccaagctaatttttttccctttcttttttaaataaacctaccttccttcccccattttttccttttaatatcgctgtttatctccattttttttaactgcggcgtgttcttgttcgattttaaaaaatactaaaaataaaatgagtcccctaggtgcctccctggcgccctaggcatggagagctcatgcctgcgccaccctcatctccgctggctttgccacctcggaggcgccccacacttctcctttgttttgcttttctctgagccggttgagttttcttaccctgaatgcgtcgtttatacaattagcaactgaacacagaacaaatatcaccgatataattggggtgggggtcgccatgtaaacacggggtgttgttactttaggatacttctgaccctgtcccggcctgagtcctcgctccctgactcagcatccacgcaggaaagcctcgccccagccaggcaagggcagtccctgccggctccttgagttc

SEQ ID NO: 4409 - DNA, 400 bp, Homo sapiens
  chr5:172664204-172664604
  hyper
ccaacccaaattctccttggacggagctgcatgtcagcggccttgcggcccttcctcgcctggacttttggccacgttaccgttatggctgtaaattaacctagcttgggggcccgccttgcctttgaagattgttttcgagcgcgggcgggggggggtgtcgttggagaggatgcctatcgccgaggcggtgacgtctggcaaacgagccacatccgattcaattaaatgtctcgctgaaaagagctcggaacgagggtcctgggagcgctgttaagtgaatctgctggccaggcggctcgcgatgacagtttgaaagattagtgtgagcggacgcctgaaatattaccgtttaatgggggacatcgaggctacatccgggatccctgtttttagtaag

SEQ ID NO: 4410 - DNA, 569 bp, Homo sapiens
  chr5:172665425-172665994
  hyper
aagataagctggaactatcaccgggaatgtcattaatgcgctggggagacgtccattggagacaggcggcgttatccgcggctttatcttcaacaacgcctcgctctcggcccgcgcgggggaaacagatgggagtttctgtctgggacgctcgccccatgtttatattttgggaagaatcgcaactcgtgggagtccccggctggccccctgataaatgaacattagcactttttcggactactgtatcaacaaaggggctgcggcgctgcaataattggcgagaaagcaaacagagggccgagagcgcgactctgctcttcgtccggctgatggatgagcagctccggctgcgcgccggactcccggcctcggcctccgcctccgcctccgcctccgcctccgcgctgggcccctccgccgcccggcttccttcctggccgggagttgggggcggggggcgactctgagggccgccgacctcgcccttggctccggaagagtccaggcggcctccgcggcaccggatttttcctgcctcgggactcgcctcattcaggtggctcagc

SEQ ID NO: 4411 - DNA, 94 bp, Homo sapiens
  chr5:172672375-172672469
  hyper
gttttacgcgcatacggtgaaaaaaaactttccaagggcacagaagaccatactgtgggtgcccctcgccgcccccagcgtccctgccgcactc

SEQ ID NO: 4412 - DNA, 223 bp, Homo sapiens
  chr5:172672669-172672892
  hyper
tccgcgtttcctgtcgggagaggagtatcagcgcgcgcaccaaatctgctctggtatgtcaccttatctctcgtccccgctgttgtccccaaacgccgcctgtcaaaggagacgccacccgcattaggacctagactggggcccttccgctcggggtcaggcgcagcgccctcggcttgggccccgccgcccctttaggggtccgggagggtggagagaaggg

SEQ ID NO: 4413 - DNA, 14 bp, Homo sapiens
  chr5:172672960-172672974
  hyper
cgctgaaaccggcc

SEQ ID NO: 4414 - DNA, 31 bp, Homo sapiens
  chr5:172721108-172721139
  hyper
catggccgccaggtggcgatgtggaatagga

SEQ ID NO: 4415 - DNA, 560 bp, Homo sapiens
  chr5:172754402-172754962
  hyper
cgcacggttcgggtcgtgtcaccatttcttggcttgctgacctggccaggagctggggatggcggcagcaccgcggaggtacgctttgcgctgccctcacgctcccttccgaaagcagtgcccccagggggaaagttcgcaatgccatttgtctcgccggcaaagttctgggatgtcgggcatcttttgaggagggggaagacgcggcacccttactgaggccggcaggccaggaagagaagttctccgggcgcagggcgcagcccagctccggggaccctctgggcctcccgcgtgccggccgggatgaagcgcgctttgcaccggacccgggattcgggggcgggggctggcgctggcagcgtcagacgctgcttcatttcccctcgaccctggggaggacagcaacaagtcctgccccagccatttcatcaccctgctagcacgtgcagattccgggccctcggagcccggcgcggacctcgccttgcctcgcgcttccctttgcacgtcccgtgccatcccaagagtttgcgtggccctgggtgggcgcctggctc

SEQ ID NO: 4416 - DNA, 392 bp, Homo sapiens
  chr5:172754985-172755377
  hyper
cgcgtgggtgcacggtgtcctctcccagtagctcccggctgcgggggcacatgcacttacctgtattctgcagggacaggcggcctttctgctgggagctcctgtcttggggaccctcgggtgggttggtggcgtcggtcccccgcgccgggtcaaaggtggccaacaccaaagccagggtcatgaactggcccagccgctcggcacacatggttcttggtattaacctcccgtcgggagacctggatcctttgtgctcccctcttcctcctcctcctcttcctccttcgccgcttcccctcctcctcccactcttcctttttgctcgccttttccctcctcctcgcggccgcggctcggatagaggttacccagcgccctcccgtagctct

SEQ ID NO: 4417 - DNA, 142 bp, Homo sapiens
  chr5:172755420-172755562
  hyper
cggcaatggcagggatggtgcctcaaatatccctggaagctctggtgtcacttgaatgaaggagtcgagcaggtgttgtcccggcggctggaccaatccgagaccccggcccttttgacaacacggccgggaggcggggcct

SEQ ID NO: 4418 - DNA, 283 bp, Homo sapiens
  chr5:172755594-172755877
  hyper
cgctgggagcgccggacaaagttgccgacctggcggcggccacgcgtttgcgtgcgtgtgtatgagtgtgtgtgagcgcggccggagatgcgtgcgcgtgtgcgggtgctccagggcaatggtcgaaaggactgtacaatataagagcgaatccaagctccagttgctgttaaagggggacggtgtgctctgggacagtgtccctggggcccctggctcgcgtcacacccacatcgggttgggaaagtttcctctttccgccgtttggaattcagtgagattc

SEQ ID NO: 4419 - DNA, 38 bp, Homo sapiens
  chr5:172756535-172756573
  hyper
ctgctgtgtgtgtacgtgtgcacgctcacgtctccccc

SEQ ID NO: 4420 - DNA, 183 bp, Homo sapiens
  chr5:172756854-172757037
  hyper
ggcgacgcggccctgggtctccgcggcggggcgcactgcccgcctggttggggccgccatgtgacacggctgggggagggggcgaggagacacgcgggcaggtcatcttttggccggcgcttgacttccaaagctttcctttcccgtgtcccggctgcacgcgggagtggggaaggcggaggc

SEQ ID NO: 4421 - DNA, 30 bp, Homo sapiens
  chr5:173043699-173043729
  hyper
tttgcattgtggggcgggaagttttctgtg

SEQ ID NO: 4422 - DNA, 30 bp, Homo sapiens
  chr5:173345560-173345590
  hyper
acatcgtcataggatcggactgaagccttt

SEQ ID NO: 4423 - DNA, 377 bp, Homo sapiens
  chr5:174115355-174115732
  hyper
ggaagggatgccctaccctcccgaaagaaataaaaatgtgatcactctcggcaccgtagtctctgatgagaacatttaatcaattagcattgccgttgccaaaacttgcttcccaccgagcccaaaagccgccggcggcacatcccagcggcctccctcctcccgggctgggattcgcctctgcaagaaacgtcatgttttctctcccagacatcgttccgggagccccagatgtaaaatcagaggtctcttatctggcattattgatctctgtgctaataaaatgtcagtccccaagggaaaacttaaaaaaagaatcgtgctgtcatctctgttcctgcggggacaggcacccatttgtcggctcacttcattgc

SEQ ID NO: 4424 - DNA, 30 bp, Homo sapiens
  chr5:174119641-174119671
  hyper
agaagaaaggcgagacgggcctcagaagaa

SEQ ID NO: 4425 - DNA, 424 bp, Homo sapiens
  chr5:174119926-174120350
  hyper
gagagaagaagaaaactgtttcgggtttcgaaacagaaagggcctccttcccctttatcgataattttgaaagggtcgctgtaagacactgactaatgacacgtgacctttggattctccacgaggcagcaggcgcgggccccgagcccagcggggacccctctgccagttaggggtcactctctccattcaacgctttattagccccctcaagtctcagggcgaagtcctgctgctttgagacgtttacagctttgattgaggaaagctattcagggctggggcgaggatctgtttgttttcaggaggaagcctctgtgagcctgccccctcccccctgtgtttccagagttgctggagagataaaagccatacctccttttgaccttcattggacagtaggagccccgactcagcgtggaat

SEQ ID NO: 4426 - DNA, 30 bp, Homo sapiens
  chr5:174150697-174150727
  hyper
cccccattaccctccgaggcaaacactggc

SEQ ID NO: 4427 - DNA, 84 bp, Homo sapiens
  chr5:174151437-174151521
  hyper
aaggagggggggcagccccttcgggaagagccaatcaggggcgagcgtctctggcgtcagcgccaggcccggcgcggattggcg

SEQ ID NO: 4428 - DNA, 846 bp, Homo sapiens
  chr5:174151577-174152423
  hyper
cgtctccgcagcaaaaaagtttgagtcgccgctgccgggttgccagcggagtcgcgcgtcgggagctacgtagggcagagaagtcatggcttctccgtccaaaggcaatgacttgttttcgcccgacgaggagggcccagcagtggtggccggaccaggcccggggcctgggggcgccgagggggccgcggaggagcgccgcgtcaaggtctccagcctgcccttcagcgtggaggcgctcatgtccgacaagaagccgcccaaggaggcgtccccgctgccggccgaaagcgcctcggccggggccaccctgcggccactgctgctgtcggggcacggcgctcgggaagcgcacagccccgggccgctggtgaagcccttcgagaccgcctcggtcaagtcggaaaattcagaagatggagcggcgtggatgcaggaacccggccgatattcgccgccgccaagtgagtgcgcgccggggcaggagtaggaggtagcgcggggtactggagggagcggggggcgggtgttccagggctgagggtaccgagacccttctgcgtgcgctacactcccgggaaagcaagcccagggcctctggactcctgggtgcccggggcgttcggcgcgcccagtgcgccgtccgcatccaagacaccctctgggtaataaccgcgctgtgtgtgtctgagactccctcgacatacagattgttttttcaagagcgaaccccagctgggtttacggggtcgctcggtggtccgtttctacagccctcggccctgcgctctggccacttggcttgtttttgtttcactgttccccggagtctctgcctggggagtg

SEQ ID NO: 4429 - DNA, 158 bp, Homo sapiens
  chr5:174159299-174159457
  hyper
ggagaaaagggctgcatcttgcgtggctggcgggttagactggaatccgtctggggaactgcgcaccatccccatcgctccagacgccgaaacaaaacctgaggctcggagaggggaaaaagagttgttcaggctcgaacatacgcatcccagcctca

SEQ ID NO: 4430 - DNA, 434 bp, Homo sapiens
  chr5:174162488-174162922
  hyper
ccagcaagggagtgacccttgcgcaggaagggggcgcgtcacccggtttccccatagaaccgtgggcgtcgcaggcgagaagggaagcgtccaggcgctcggccccttccgccccgcccgctgccggccgcccgtttgatgtcgcgggcccggcaggaatgcggccgggttatcaatcacccagctggatcccgaaggtctctgcctaatcacatttaattgctcgtggaggcccactctcgccccgggccggccgccgcgctcaattactccccaaatacctgccatcaataaatacgcactgacaccggcccggcccgctccaccggcacggaagatcgcagccgaccaggcgccctcctccctgccccttgtcccccatcattaaacttacacctcgacgcccaaagaagcaagccgagcagataataaca

SEQ ID NO: 4431 - DNA, 30 bp, Homo sapiens
  chr5:174178572-174178602
  hyper
tccttgaaaagagccgtgagggagacttaa

SEQ ID NO: 4432 - DNA, 30 bp, Homo sapiens
  chr5:174871384-174871414
  hyper
ccccgcgcagcacgcgcagggcccgcgagg

SEQ ID NO: 4433 - DNA, 30 bp, Homo sapiens
  chr5:174871621-174871651
  hyper
gagatgcccgtgggcgcctgtactcaccgc

SEQ ID NO: 4434 - DNA, 30 bp, Homo sapiens
  chr5:174905603-174905633
  hyper
ggacctgcgagcagcgcgggcggcagcccg

SEQ ID NO: 4435 - DNA, 30 bp, Homo sapiens
  chr5:174961182-174961212
  hyper
ccgagccaggagagcggcgcagcgctgaga

SEQ ID NO: 4436 - DNA, 63 bp, Homo sapiens
  chr5:175084695-175084758
  hyper
atctgcacaggtggcggttgcccggtcaagggcgggctcacaatctgcggggcggggagaggg

SEQ ID NO: 4437 - DNA, 350 bp, Homo sapiens
  chr5:175084964-175085314
  hyper
agagggaaggaagggaaggagcgttgagagcaaggaggagcgagttgggggcggagacgaggaagtgggtgcgaggcgcggggcgcaggccgtgcgcgcgccgcccgctgcatccctgcccggagcgcagccggcgcgggcgcgggaccgaggcgaaccgggtgcggagccaatacccgcggcagcagcaccaggtaacgcggccgccgcctccccgcggggcctcggctcggggtggggtcccaggcgggcttggggacccggcgtgggctggcggagccgcccgaggggctgctcgggatccccggcggccgtcgtggccccgaacccgggttcgagcctcggcccca

SEQ ID NO: 4438 - DNA, 68 bp, Homo sapiens
  chr5:175085524-175085592
  hyper
cgaaacagtccccgttttgtctccgggtctgggtggtggcattttctcgcggcgatgtgtctgtcgga

SEQ ID NO: 4439 - DNA, 30 bp, Homo sapiens
  chr5:175200386-175200416
  hyper
ggatttatttccggcgttgtttatgcgcag

SEQ ID NO: 4440 - DNA, 159 bp, Homo sapiens
  chr5:175223588-175223747
  hyper
tgggctctgtgccctgcagctcggcaggcattcgaggcggacagaaacggggcttggcgccccccgcgtgcacgtgtgctagcccaggcaggagggagcgcctcggcggaggagtcaaggaagagggggagggagaaacgcgccagaacctcggcccgg

SEQ ID NO: 4441 - DNA, 114 bp, Homo sapiens
  chr5:175223835-175223949
  hyper
cgggagcggttggcggagagaccccggccacaggccccgcgctcgagagcttcctagaggcggcttcctccggcctctccccctccctggagctctcagccgccggcggctctt

SEQ ID NO: 4442 - DNA, 461 bp, Homo sapiens
  chr5:175224441-175224902
  hyper
gggctgggcctaggctgaggtcccggcggggaggaaggagtgcgccgccccgtcttccctccagacccccaccccatcccagctcagaatcgcggacttccaagagccctgcacagaagcccgcggctggcagctgcaatcactgactccggctgtccccggaacatccctagaaagtgtgaggctgagtttccgtagggggagggggctgagaagccgcggggaagcctcacgaacgggacagctccaggctccctctctccctcactccccgggttccgcccccacctccagagaaatcccagacggcagagaaggcaggggggagggggcgacccagacagcaggttgcgaactcggcttagacctgggaggttgcaattagcaagaaaaaaggttgagggcgtctgtgaagccgggaggttcccaaacagggaagccagttccgcggcaggaaagca

SEQ ID NO: 4443 - DNA, 787 bp, Homo sapiens
  chr5:175298494-175299281
  hyper
atttcccatctggaaggggagcggtagaacgtcagggcccggctgaggggcgtgattggagggcgccttcggcagccgcccgcggcagaagccgcggctccagctcgcctggcggaattgcacgcggcggcgggagctggaatagcagaaggaaccacctcgtggagtcgggccggagccctgcagtggctcagacggttgcagggaccgccaggtcggtgctggccgagggccgggagggcggagctgggctgtgggcaacagggtcccggctctcgcctcgaggccttggggcagctcgggaagctggggagcacggctttcggggggacagctccccaaggctgcctgggcaccggatggggactgagaggcggtaaaggggacactcccgggtgcgctctccgtggtgctgaaaggacagctccttgcgaggggccgcgagcaggcagctagctgcgaactaagaggaagcgtgggccctagccggagactccgggcagagcccgaacggccggggtcccggagccaggaccgccccggctgcggcggagactcaagtctgaacccagagaacaactttgagctcgcgggagtgggggacgtcgatctaagctacttctggctgtgcttaacccgaagcccgccggagcacgcttcgccccggaggagggagtcgcccccaggggtacagtgcgcactcccggagtgagtcagagggcggcggcaggggggcggacagaccgcaggtggaggggaggagaacgtagacattgacaggggatgg

SEQ ID NO: 4444 - DNA, 30 bp, Homo sapiens
  chr5:175299783-175299813
  hyper
gttgaattgagttgcggtgaatatagccca

SEQ ID NO: 4445 - DNA, 31 bp, Homo sapiens
  chr5:175305777-175305808
  hyper
ggtccagcgcccctccgcgtgtcctcagccg

SEQ ID NO: 4446 - DNA, 30 bp, Homo sapiens
  chr5:175792463-175792493
  hyper
tctgggtgggtgggcgcggccgcagcagtc

SEQ ID NO: 4447 - DNA, 67 bp, Homo sapiens
  chr5:175792997-175793064
  hyper
cgggtgttccagcgggggccggagtttggagggcgcggctcgggagcatcccggggcccagccgggt

SEQ ID NO: 4448 - DNA, 30 bp, Homo sapiens
  chr5:175875173-175875203
  hyper
agagcgacttgtaccgacagtccctcggca

SEQ ID NO: 4449 - DNA, 30 bp, Homo sapiens
  chr5:175961090-175961120
  hyper
cccgcatgggagaccggggcccgaccagca

SEQ ID NO: 4450 - DNA, 30 bp, Homo sapiens
  chr5:175964497-175964527
  hyper
tttaacctcctcctcgcccccaccttcgca

SEQ ID NO: 4451 - DNA, 247 bp, Homo sapiens
  chr5:175969791-175970038
  hyper
agcggtctgttccccggacctgcagccgctccagggcagggcttaggccgctctggctccccggcggccggcacagggggcgtcggggaaatgtttaggacggacatggcgaggccaaagaactgcagcgcgtctccggctcgcggtgccggacgcctgggtcccagccgcagctgggactcgccgggggtggcggtcgggacgtgcgcggggcgcagggcacgcgggggctcggagttccccgggg

SEQ ID NO: 4452 - DNA, 31 bp, Homo sapiens
  chr5:176008080-176008111
  hyper
ggaacggggctgggcacgtaggtccacagtg

SEQ ID NO: 4453 - DNA, 199 bp, Homo sapiens
  chr5:176024005-176024204
  hyper
gctccagatgcttctggatggccatgcccagcacctccacctccatggcggcgccgtatacctcccacgtcatgcccttctcgtcccagctcacgtctcgcacgggctcagccggctccgggggcgctacagcggccgccagcgctgagccgggccgcacccgcacttcggggaaggcgggcggcgcggcggcttgagg

SEQ ID NO: 4454 - DNA, 31 bp, Homo sapiens
  chr5:176036591-176036622
  hyper
gggaagatgaatcaacgcgggaggacgccct

SEQ ID NO: 4455 - DNA, 94 bp, Homo sapiens
  chr5:176038450-176038544
  hyper
aatccgtgggactggcgtctccaggcagcacgccaggcaaggagaaaacctcagcgtgtcggaccggtttcagaaccacggacagcaccacacc

SEQ ID NO: 4456 - DNA, 395 bp, Homo sapiens
  chr5:176056802-176057197
  hyper
atcccaccccactccccagtgcgaagcctcagggccgcggagagtcctagcgtccttgaaacctggggacgcgggaggggccactgcctcggttatccgggccctgcaaactgcagccccgtcgaaccggagtgctgggttcggcgcgaatatccaggacccgcctgtacacgcacggcacagtcacacggtcatgcacacaaacatacaccacggacaagctcacgtgcacacacaggacacgcagacgctccaacgcgcacgaataccccgacccacatgggcgcggacacacgtccccacagccgcccgggcagctgcaaacaccggagcatactcacatactccggggtgcacactgacgcgcatcccccgggtctccctccattttccat

SEQ ID NO: 4457 - DNA, 156 bp, Homo sapiens
  chr5:176057430-176057586
  hyper
gcagtgcccgggtctcgggtgcgtagccagccaccgctcgttcctcgcgccctgcgagctcgcgcgctccggctccggctccggctccggcgctgcggcagctctgagctcagcgcccccgctggcggccgcgccgccccttcggcctgactgaca

SEQ ID NO: 4458 - DNA, 45 bp, Homo sapiens
  chr5:176074861-176074906
  hyper
ggtagctacagaggcccggattgctgggggcgggtcctagcgaca

SEQ ID NO: 4459 - DNA, 299 bp, Homo sapiens
  chr5:176107185-176107484
  hyper
ttcgctgtcccctgtcggggttcgagtcgcagcctccagcctcaacccgcacctcccgccctgcagctcaactctcgcctccgctgcaatttattactggaggccgcagaaccagcggcgtggagtgcgcctcccgggagccgccgctgtcggagaaaggcacccacccgcctgggccggctcccgggcgcggggcggtgtctcagggaggcgtctcagccgagctgcagggcgaggggagcgagccgggtcccgggggaaggcatccggtcagggcctcgcccacccggatggctcct

SEQ ID NO: 4460 - DNA, 16 bp, Homo sapiens
  chr5:176170703-176170719
  hyper
cgacaacggcaaatta

SEQ ID NO: 4461 - DNA, 434 bp, Homo sapiens
  chr5:176236563-176236997
  hyper
agccctctgtttattttaacccgattagggaatgggggtggggcacaggagactccagcagcggtcactgctggaggctccaggagacgacgtgacttgaccaaggtcacagagctggaaggtgaagtcgcctggaccctacccccggtctccctagctgccaaagcccagctcgttcctttacacccacgtcgcgggcgccgtgcgctctcggggctcaaacaccgcgcgcccagtcgggtgtgctgcgcctgaaggttgttttccttcggcgaacggcgccgaggggttagggaaaccttgggtcatggtgtgaggcgcgcccctggaatccaccagcctgcgaggctgggactgcgggtgtccccgagtctggcctgccagctctggtggccagggcacctctgcgcgcgggccagggccccggggctctc

SEQ ID NO: 4462 - DNA, 75 bp, Homo sapiens
  chr5:176264795-176264870
  hyper
gcgctccacagatagcggtcctggacgtggcacgctttcagcaccgtggacagccccaggcgctccacagaggct

SEQ ID NO: 4463 - DNA, 30 bp, Homo sapiens
  chr5:176449526-176449556
  hyper
tgctgcggaatcagcgacaggtttccgaat

SEQ ID NO: 4464 - DNA, 30 bp, Homo sapiens
  chr5:176738657-176738687
  hyper
ttactgtcctagggcggtgcatccttcaag

SEQ ID NO: 4465 - DNA, 30 bp, Homo sapiens
  chr5:176738922-176738952
  hyper
caaacacaggggcccgccccgcccccggga

SEQ ID NO: 4466 - DNA, 134 bp, Homo sapiens
  chr5:176739418-176739552
  hyper
ccgccgctgatccacacgttcgggcgggaaaagaagcaggtttcaaatttgaaaacccaagcgatggggcggggttgagaggggagctgggcctcaatgcgcaggcgccggcggaggggcggcggacccggctc

SEQ ID NO: 4467 - DNA, 30 bp, Homo sapiens
  chr5:176785281-176785311
  hyper
cagtgaggccagagcgggcacaggcttctg

SEQ ID NO: 4468 - DNA, 30 bp, Homo sapiens
  chr5:176883196-176883226
  hyper
actgcggggaggggcggggggagggaggga

SEQ ID NO: 4469 - DNA, 30 bp, Homo sapiens
  chr5:177019029-177019059
  hyper
tattctagggcacccgctctctctcaggta

SEQ ID NO: 4470 - DNA, 293 bp, Homo sapiens
  chr5:177411507-177411800
  hyper
cgcggagatgggccagagtccggccatccagaagtgcctggagcgcacagcaaggccctgccctcggctccgtgaaggtgagggggtaaagtcggcccggagtccccgggggtgcaggaggggccccgcgggttccagcagaccctcgacggaacgttccaggcaggcgagatctcgcacagaatctgcccttttaaaggctcggctttgtcctcgttaaacttgcgtctggcaacgcgaccgctgcggctcccgagcaagattagagggtttccgctcgcaggggcgcgccc

SEQ ID NO: 4471 - DNA, 67 bp, Homo sapiens
  chr5:177540464-177540531
  hyper
ccccgccccccacatccgggggccggggccgggctgtgggcttgccgcgcgccggtgagtcaggccg

SEQ ID NO: 4472 - DNA, 115 bp, Homo sapiens
  chr5:177540915-177541030
  hyper
cgggggtggcaaggtgcggcgtgcgcccaggtgtcccctgctcccggtcaccgaggcaccggatcggggaccgaccccgatgctccgctggaggggcaggcggcaggctaccttg

SEQ ID NO: 4473 - DNA, 31 bp, Homo sapiens
  chr5:177804050-177804081
  hyper
gacaaatgcgatgccccgcagcctgtttcat

SEQ ID NO: 4474 - DNA, 302 bp, Homo sapiens
  chr5:178016681-178016983
  hyper
cgggaccctgaggccggagcggagaccgcaaaaccccttggggccggcaccccctgcctccgccttggcgcagacgtgcccatctctgggacggccccgagcgcacgcagccggcgggcgaccctcctcccagagacctgcacgctgcccccggctcccagcgtaccgccaccctcaacccgacacacccaagtccgccccagccacgcgccaagacgctcacctcccgcagcaggcgctccaggtgcggctcggcccaggcgtccagggcgcctggcggccccgcgcgccgcagcagctcc

SEQ ID NO: 4475 - DNA, 451 bp, Homo sapiens
  chr5:178017519-178017970
  hyper
cggcgccgggctgatcccacgcgcagcgcgcacctctgccctcacctagcccgggcgccggcacccgcccccgcacgcacctctgaggcttccccagcccaagcccgcactgtggaccccagaggtcggaggggagcccggcgacaccgcgccccttctgcagcccacccctggctggagcacccaccactcgtgccttagcacattcctctaaacttgtgaattacctttctgacacttgtaaaagttcaaaacttcaaatcctgcaaaaaactgagtgggtctgtcctcggtggtggattagcgccgcttcgtggcggaaagcgacctctgcgcactcacatttagagaggcagggtcgagattgcgccaaacagaaatacgccccttagaatcttctcacgagttcttagctgccggacttcggtgcgggaaacaaaaatggtaagac

SEQ ID NO: 4476 - DNA, 31 bp, Homo sapiens
  chr5:178287117-178287148
  hyper
atcctggggaggtgagcggcatggctggctg

SEQ ID NO: 4477 - DNA, 179 bp, Homo sapiens
  chr5:178287401-178287580
  hyper
cggggcgccgggaccccgagcgcagggcagaggcagccgggcccggtttctgagtcagtccccaggacggccactcctcctgcctcgggacacccagcgctttcctcttcaaagccgttttccgtggagtcgggagacgattcgttggcgggagagagaggaaccggctgggaaaggct

SEQ ID NO: 4478 - DNA, 30 bp, Homo sapiens
  chr5:178382964-178382994
  hyper
tctgcctccagggactaaactggggcatct

SEQ ID NO: 4479 - DNA, 215 bp, Homo sapiens
  chr5:178423618-178423833
  hyper
cctgagcctgacattgcgaaggactgcataaactgggtttgggaggtggatgggcccttccctgttcaggacgagcctgacagctcccagcacacagcagcctcctgcttggcatgaccaaggcagccactgcccctgtctggaggacagaccatcaggaagcgggggcagcagctgggggactggcagggggtcctcgccgtgtaggagggagg

SEQ ID NO: 4480 - DNA, 8 bp, Homo sapiens
  chr5:178487295-178487303
  hyper
cccggagt

SEQ ID NO: 4481 - DNA, 266 bp, Homo sapiens
  chr5:178594123-178594389
  hyper
cgacacctcgcttccacttcattttcctaccttccggatgacgaactgcgtctcagacaactgaaaggactcgcctgagtcccacagccggaaagaggtcggggtgctgccccccgcgcggggcgggcagaggaagggccgggcccgagcggccaccaggtggcgctgctgccgcgagaacagcggcccgggccggggacgcacccggcgcccagactccgcggccgcacccgggctcccggggccccagcggccccaagacagcc

SEQ ID NO: 4482 - DNA, 201 bp, Homo sapiens
  chr5:178770703-178770904
  hyper
aacccttttccaaaacccaggcgagagcagcggagagaaaggagctagagaagtgcgtactcaccagcccatcgcagttgctgagcgccacagaggaggcttcggctaggccggccacgtctccgacgtagagacagctcccgagcaggggctccacgcgggtggtgcccttctcgccctgccactccatagtggccccgg

SEQ ID NO: 4483 - DNA, 432 bp, Homo sapiens
  chr5:178771198-178771630
  hyper
cggagccccagtgcctcagagacccgccggcaagccacgcccccccagaccccgccccactgcgaagggaaggggcattccgccaggcgaccccagaagccagcctgcacctccccggctttcctgcaaccgggaaggggcgttaacagggccaccactccggggctccgccactccccagccgttccctcctccggagaccttgcctgccaagagctctgccccctgccccgttcagggttggggctcggtgggaacctccccgtgcccgaagggacgaccccgtcagagagtcccccgacccttgcacctaccgtccttggcaggacgtggagctgctcggaagccattccgggttggcccccttacccgtgtgccacgacccctcggcgggcccctgccgcccgagtgccctcaccgccagcctccgga

SEQ ID NO: 4484 - DNA, 136 bp, Homo sapiens
  chr5:178771723-178771859
  hyper
cgaggactgggaggggtggaacagggtccctccgatctccggggattccctgcggggcgccccaaccaatccttagggcccaaggctacgcgctcggcagccggctcctccggagcgtccccggacgcgagccccg

SEQ ID NO: 4485 - DNA, 438 bp, Homo sapiens
  chr5:178771967-178772405
  hyper
cgccagtgctccgaggctcccccggcccaaggcgctcgggggcggtgcggggcgccccctgcgcgaccaacccggccccgaagttggccaacttggccccgggcggggcgcgcggagtttgcccaagtcaggctggacgacgcctggggagggggcggcggggcacgcgggacagggccaggccggcgggggtcccggggagtaggggccgggccgcacctacctggggggtcggcggcggcggcgagcctggcgttcgcgggcggcggcggcggcggcaggagcggcggcggcagcagcagcagcagcagcagcagcgcggggcagagcaggcggcgagcggctcccgccggcggatccatggcagccggactgcagccggggccccgcactcgcagccggcgcgaaagttccccgcgagccgcccagcccacatct

SEQ ID NO: 4486 - DNA, 122 bp, Homo sapiens
  chr5:178772607-178772729
  hyper
gcatcttggcgcggccgccgccgccgcccgcttccctcttcgcgccgccgtcgccgcggtgccgggctcgcagcgaagcagagacaccccgaggcggcggcagagaagcgccgcgggccggg

SEQ ID NO: 4487 - DNA, 25 bp, Homo sapiens
  chr5:178772778-178772803
  hyper
cggcgccggccgaacgtccccacct

SEQ ID NO: 4488 - DNA, 79 bp, Homo sapiens
  chr5:178946790-178946869
  hyper
tgcacgccctagtccacgggtagatccatcagcaacagtggaagcctcaccgactcaaggtgttcgtgtacaaattcag

SEQ ID NO: 4489 - DNA, 30 bp, Homo sapiens
  chr5:179160697-179160727
  hyper
tccagacttgattccgggatgttgagatct

SEQ ID NO: 4490 - DNA, 55 bp, Homo sapiens
  chr5:179234472-179234527
  hyper
gtgaccagcccagaaccgtaccggcttcccggggcaggggcggcccgagagcgcc

SEQ ID NO: 4491 - DNA, 605 bp, Homo sapiens
  chr5:179245984-179246589
  hyper
ctgctcaggggactcacggtgaccccggagccactccccagcccagcctccaggtaagaggtcactgagatgggtggcagcaggggccggggatccccctattacgacagcggtcatgggacgctgactcactgccggccagaccacctgacctccgcggcgggaggagagggccctgccagggggttcccgccgcgccttgtttacctccgggaggcctcggcctcgcgtgggggcagggcggccgctggggccgcaaggcgtgcggggaagggccagagccgggtgtccaccccagcttcccaaagactccctcttctgtgcttccttctcccctccccgccccccccccagtctcttcacatgcccctagcccccgcggaaacttcccgcgatcccaaacgggccaaatggcgagaaagcaaaggagctccttcttgggggtgagtggggcgccttgagcgcttcctcaaagctatgttcccagagccacaggccttccttgtgtccctcaccctgctcagaccgggccatagccgggggctggggcaggaaagccggccctcggcgggggccacgtggctctcaggcgcctgggctgctga

SEQ ID NO: 4492 - DNA, 31 bp, Homo sapiens
  chr5:179279346-179279377
  hyper
agtaaacagctggtcacgtggataaagaggt

SEQ ID NO: 4493 - DNA, 30 bp, Homo sapiens
  chr5:179285176-179285206
  hyper
ttctctatctggcacgctgaaagttaggga

SEQ ID NO: 4494 - DNA, 30 bp, Homo sapiens
  chr5:179334756-179334786
  hyper
gggttggcccgctccgtcacccacagcgca

SEQ ID NO: 4495 - DNA, 1109 bp, Homo sapiens
  chr5:179498098-179499207
  hyper
aaatacaggctgagacgtcctccccatgaagtagttttgcgctcttgcaccacctcctttgtctacgctgtccctgcaaactcctagctcaatgccctccagcaaacgagctgcctgaacgcaaagatgaccgttccaagtcttttttaaaagaagggaaaaacccagtcacgctcctggagcctggttcccacgggagcaggccgggctgtccacgacggaagcctcgaccctggctggggctgtcggccgggcagcgcgggagagccagggccagagccggggccgggaaccctagtcccgccgcctacgcgggatgcagcgaccaccgcccgccgcccccgggccggcactcacctccgtggaggggcagcggcgccagcacctggccgcggacctcggccttgggggagtcaagcccgtagcgcccgcggtcgatgcgaaacgtgagcggggcgccgcggccgggctcctgcaccgtcacgttgatgagcgccgtgtagtactcctggctcgcgttgtctgcccgtgccggccacaggctgcaggtcagcagggcgagcgcggcgagccgggcagggcccgcccgccccgcgcagctcatcgtccctccggcagccgccgctgctcgcggaccgggctccggggccggcgcctagaggcggggcgggcgcggcccgggcggcggcgggagcgcgcgcgcgcggcctgcgcggggccgagcccgagcgcggccctcctggacgccgcggccccgccgctcgccgccctcacgtccactgcccgcctgtggggacgcgcccatgggccctcggcgagggcggcgtctcaggtcgcacgcgggcgtctcttcggggtcccaggagggttgtagaagcgtgccccctccatccccccgggtcggtcccaccgaatgggaggcgcctcgcaaggacgcggcgggggaggggaagggcggcacgggaggaagcgccccgaggagggtcagcggaacacaaagtccctctcgcgcggctgccgcctgaggcgcgtgtccgccgccgccccgcccccccgctggtctagcggcaacgcgcaggcctaaggcgcagtcccgccccgagcgcatg

SEQ ID NO: 4496 - DNA, 133 bp, Homo sapiens
  chr5:179779649-179779782
  hyper
cgttcctttggggtcgcgaggaggacgcgcaggccctgcctgaggcactgacgcagcgggggcgaccgggcgggctgcggggacggcggggcggggtcgcctctcctctcctcggtgggcgcggcgggctgag

SEQ ID NO: 4497 - DNA, 172 bp, Homo sapiens
  chr5:179779840-179780012
  hyper
cgactgggagacgtggaggagagcgacctcggtcggcatggggtggggacccctctgttacggggtccaggccggaccggaccaggtccctcccctccgtggggaccgggcctcggtccccctcactgtgtccgagaccaggagtcgggttgggcatcccccacccacacct

SEQ ID NO: 4498 - DNA, 665 bp, Homo sapiens
  chr5:179780035-179780700
  hyper
cgggtgaggggcagccaggcccggccgacgacagcccctcggtaggggcccggggcagatcggcgcccccagccaggtcctcggcgcctgcttgcgggcggaggcgcggagaggctgcggcgccgggacccgcggacggcgtggaggaggcggctcgggcgggcgcggcactcaccgcacatcgtggctgcttctcgggctccttcgcggctcgagggggtctgcccgttcggacgctggggctcctccgtgggctcctccgtgggctccgtgggctccgtgggctccgcgggctccagctcccgtccgctcggcctccagcccttataacccggagccctccgagagggcggggaagggggcggggaaggggcggggcttcccccgcccgcctgctcccattggcccccggttgtcgtgacaacgacgggacccggcccccaggagccagggaggggggccgaggggcggctcccaggcgcgggtcgggcgtgtaaggctggggcgccgggcgccagatcccggagcggggcttagggcaaccaacggcccgagttcagaccccgactcaaccagagtaggcgtggaagccgggcagggcccgatcgcgctgtgcctccgctttcccgtctgtgaaacggggctacccagggaagctccctccc

SEQ ID NO: 4499 - DNA, 498 bp, Homo sapiens
  chr5:179780801-179781299
  hyper
cgctcccatctgagtgacaggcttgtttcagagctccgcagacctctaagcctggccctcaccctgcgtggagagaacgcccgggcttggcggagagacgagaaaaccgaggctcccggaggcagacaaggactctgccaaaaccggacgccgcggcggtggcagaattcgaccctgggatttgccgcggagcccgagcttgaaggcgagggttccgcaggttgtgaacgaagctggaggcgccccaggaagccccgaccccacccgcgccgagctgccccctccccagatctgcctcgcgctgcaggcccgcgagggacccgggggttcctacgcctggggtcggaatccgaccccccagtgaggcaccaaggcccgcgtttctccgccctggttcccggccgtccctcccgttccccctgcactctgggcccctcgtctcccgaggaaggtcacgagaaccggcccaacgtttgcgcactttgaagtttttttttt

SEQ ID NO: 4500 - DNA, 370 bp, Homo sapiens
  chr5:180017761-180018131
  hyper
cccggcctccgccgccgactccagcgcagcgacaggctgggccacaggcttggccgagcccactaagaaagcagcagctgcaagcgaacagggaggggtcaccgcctgcgcgccggggtccccagaaggcaggtccaggacgcgcccccgcgggaggcgcccaggaaccgtcgcgccctgcccggctccccgaccgcccctccctcctgcgccgaggcctgccaggtgcgagcccccgggacacaggcgggtctggggaggcggccccgccaggagacgctgcagggtcaccggagtggcctgagggtggcggaaggaccggtgaactctgtgcagggtccgggacaggcccccaagggaggggacactc

SEQ ID NO: 4501 - DNA, 266 bp, Homo sapiens
  chr5:180018484-180018750
  hyper
ggggaacctgcggctgcccgggcaaggccacgaggcttcttatacccggtcctcgcccctccagcgccggcctcgcccgcgctcctgagaaagccctgcccgctccgctcacggccgtgccctggccaacttcctgctgcggccggcgggccctgggaagcccgtgcccccttccctgcccgggcctcgaggacttcctcttggcaggcgctggggccctctgagagcaggcaggcccggcctttgtctccgcgaggcccaccccg

SEQ ID NO: 4502 - DNA, 215 bp, Homo sapiens
  chr5:180076053-180076268
  hyper
cgcacccaagtccggggcccggccgggatggatctccggcgcgcgtgggtcgggacggcgcggcgcggggaccccgcggggaagcgagtaagggcgcgaaggatccgggctcagcgcgcagcccggcagggcccggctccgaggacgcggagccaccgacggagacgcggattcaggggccgggagagctacccctgcgccgaggcgcggcccgg

SEQ ID NO: 4503 - DNA, 30 bp, Homo sapiens
  chr5:180230100-180230130
  hyper
ccagcctggagccgcgcctgaagtgggccc

SEQ ID NO: 4504 - DNA, 574 bp, Homo sapiens
  chr5:180479641-180480215
  hyper
tgtcggcgctgcccccggccacgtcctgcctgcgggcgggtcctccctggggagccgggagggacgtgggagctgcgaggccgcgcgcacgtggttcggttctcacttcttccaaaagcgtggtaagaaccgagggagaagccggatgtttgcaaacaagcgaggagacgacttgcggaccagacggcgcgggtgcgagcaggagctccccggacatccgccgccagccaagcccctgggaccctcccgcctgcggacgcggggcgagggcgggaagacgcggggcgagggcggcgctgcggccgcagaagcctcgagccgggctggggcgcggttccctcccgcacgccccgcggcgcgcccccgccccctccgccgcgcgcgcccccgccccctccgccgcgcgcgctcccgctccacgcccgtttcccaggcggctgcggtggcgcccggagaaggtcccgcgggaggtttcccggcacgcggcgggcaggccggtctcgcctctcggtgctcagcggcgcctggaccgacacggcccccgcgggtgttttccagacgtgttcgtacccgg

SEQ ID NO: 4505 - DNA, 639 bp, Homo sapiens
  chr5:180480491-180481130
  hyper
aagagacaaggtgagcggggacagggcgttctgcacgcacctgcccaagtgccaaaacccgccgtcatctaaaggctgtgggtcccgttacgagggtttattccagcgcgaggtgtcagggcggccaccggggaacggggatcggtgaccccggtggggaagggggaagatcgttcatatggacaaaagcggaggtgcggaacggctgcattttccacggaggctagtgcacagatgtcagggttgaccggctgctgtcgttacgccctcggagcttcacatcacactgtacagagggagcggtgaccagggtctctgctgccagcgccacctcgtccaggttttcatagcgcacagggagtcgggcggatgcgcaacatctccgcacagggtcaggaagcggcggtcaggcaccgagaaaacagcccagttacgtgaggcagtgtccggggcttaacgtttccgccgagctaatagatttgggaggctccgaccctgattttcacactagcaggagggagggcgctgggtcaccctcctatgcagaagggcagccaagggtgcgcacttccccatcccctgcctggagcctcacttccagcccagcctgggcccgcagaccaccgcgggtgggagtgc

SEQ ID NO: 4506 - DNA, 30 bp, Homo sapiens
  chr5:180527480-180527510
  hyper
cgagctgttgctgtcgccctgggagcaggg

SEQ ID NO: 4507 - DNA, 93 bp, Homo sapiens
  chr5:180594970-180595063
  hyper
gcctgggaagcacagtgcgaccctccccttacccctgcccgggcagtccccctactccccacctctactgccccctgccggtgtctcaaaaaa

SEQ ID NO: 4508 - DNA, 363 bp, Homo sapiens
  chr5:180632775-180633138
  hyper
acacacacacacaaacctcagcgctctcttgtcccccagctgtctccacagccccgcagcagagctgcctgtgttatccgcttccacaccctctctcctcgctcactctggaggccacttggatcaagctttcgcccgcaccctcctcagaaaccgcccttgccaatgtcaccgggaacttcagcaattctcacccaaaggcgaagacctcgcctcacctcatctgcccccggatgctccctccttcccgacttcccttctcagggccttccaggacccagtgtccccgatcttcttgctgttcctgaaccccgtggcctctgcgctggctgttccccttgcgtggacctcttttctcccacc

SEQ ID NO: 4509 - DNA, 339 bp, Homo sapiens
  chr5:180673931-180674270
  hyper
ggctgtgccctgtcctcgcccagctcccggcataggcatgcgctctgggccggggccggggccccccgcctccccgggaggaatcgctgggttgactctgggtcagcaaagggagcccggccctttctagcggggggacgtcctgcagccgctggaggaggctgagtcacgcttttcccaccagaagtctacctgtgcctgcgcccgccggacctgccggcctcttccttctcatccagggggcctcttctccagcctcacggaggtgggaagcttgctggaggcccctacctgccttttggggaagaccccgaggctggcccacgccctgctggcagg

SEQ ID NO: 4510 - DNA, 802 bp, Homo sapiens
  chr6:391097-391899
  hyper
gtaagcatgtcagacacgcagagacagtatttgaatcaagcttaatagctcaagggagctgggccatttcctattttctttttagtgagtgcgatgttctctaaacaccgcggagaggcagggttcccggtgatggccttgccgagggtgctcccgcaacctccacctccagttctctttggaccattcctccgtcttccgttacacgctctgcaaagcgaagtccccttcgcaccagattcccgctactacacgccccccatttcccgccctggccacatcgctgcagtttagtgattgactggcctcctgaggtcctggcgcaaaggcgagattcgcatttcgcacctcgcccttcgcgggaaacggccccagtgacagtccccgaagcggcgcgcgcccggctggaggtgcgctctccgggcgcggcgcgcggagggtcgccaagggcgcgggaaccccaccccggccgcggcagcccccagccttcacgccggccctgaggctcgcccgcccggccggccccggctctcggcttgcaaagtccctctccccagtccaacccccggcccccacaggcctcggcgccccgccccgccccaggccccgccccagagagttctataaagttcctctttcccacctcgcactctcagtttcaccgctcgatcttgggacccaccgctgccctcagctccgagtccagggcgaggtaagggctggagtcgggcaggaggaggggtgtgaggctgataccagagaggacccggagcgcgaaccagaggttcgacctccagggcag

SEQ ID NO: 4511 - DNA, 24 bp, Homo sapiens
  chr6:392409-392433
  hyper
gctctcccgggcctgctccggggt

SEQ ID NO: 4512 - DNA, 371 bp, Homo sapiens
  chr6:392587-392958
  hyper
cggagggtggaggaacccggggctgcgcccctggaacgcccggccgcaggcgaggtcctccgcgcgtggaggccgccaggggagtggaaactgacagagtcgcggggaaggggcgagaagcgggttgggagtgagcgaaggcaagcgagagctgcgagtgagtgcggaaggagggccaggaggggtggcggctgggtggggagagagggtgcaagacgagcggcgcgtgtcgggagcctttgggctgcgggtgcgttacaggagagcaggcgggtaggagccttcgcgggggccgagctcggaaggcggacggctgtgcccgcccaggggatgcgcccgggccggccgcgaaggtgccttcttccgggggc

SEQ ID NO: 4513 - DNA, 348 bp, Homo sapiens
  chr6:393124-393472
  hyper
gggcgcgggcgcggacggcacgcggggcatgaacctggagggcggcggccgaggcggagagttcggcatgagcgcggtgagctgcggcaacgggaagctccgccagtggctgatcgaccagatcgacagcggcaagtaccccgggctggtgtgggagaacgaggagaagagcatcttccgcatcccctggaagcacgcgggcaagcaggactacaaccgcgaggaggacgccgcgctcttcaaggtctccggcctcgggagccggcgggggcgcgccggggagggcccagagacagagcccggggtccccggcgccgcctccgaggcgagcccaggggaccgcgcggg

SEQ ID NO: 4514 - DNA, 76 bp, Homo sapiens
  chr6:393764-393840
  hyper
cgcgcctgtgccggcggctgttttcgtctctcaccgcgtctctgtttctcttttcgctgcttttctctctgagtct

SEQ ID NO: 4515 - DNA, 504 bp, Homo sapiens
  chr6:710813-711317
  hyper
tgcaggaaatggcaggagatccgtccgaggcaccccaggccgggtcgtgggtagagagcagggacgagggctgggaggggacgcaggcacagggtgagggtggcccgtctccagggagaactgcgcgctcacaggcggggccggcttcccgcatcagcccggccgggctgcaggttctgagcgagggggcggccgtgcctcactctgggcgggacgcggcctggtgcagggacgctcacttccagtggcatttcccgtcttacacgatgagcttcatccacgttctccataaccccctccccgccacgggaagcgtcagccacctggaacagccctattctgctcggttgtaaaaagcgtcaggcgcttttgatttgaaaagcgttaggcctgggaatcgctgttgctccctcggtgggcacgccctgctgacacgccctagcccaccggggaagccactggccacgagggagcgaggcgcacgggtgtcttccctccccagag

SEQ ID NO: 4516 - DNA, 478 bp, Homo sapiens
  chr6:1311047-1311525
  hyper
aggtgagctcccacctactagcggctccgtcgctttttgtgcaacaaaggcaggaaaaaggaggaaactcggcgtggcagggcagcgggctggaagtgcaccttcccggggccgaggcgcccgctccctggactaatgacgccgcgtggggatcacgccccgggcgccctggggtgaggaacggtcccccctttcgagattgtccgacactggtgccagtgaggtcacagcaaaagtcccaaaggaatattggaaagaaatggccgtgaaccggtttgttcttgcccccgcccccgggaacacgccctctccgtcgttcctgttgactgtcagatcccgggaaccaagcggcggagctcggcggcatctgaggcttccgcagggacacaagtgcaggcacagcccagcaccctgcgccagacacagccgccccaggggaagaggaggacgctgctgtcctcccgcaggagtcaccagc

SEQ ID NO: 4517 - DNA, 564 bp, Homo sapiens
  chr6:1311754-1312318
  hyper
gcacctctgcagtgacgacaggggtttgctttcgtaagcagcatcgttttcactactacagaagcacatacgccgcgtgcagcttaggcccgagcaaagtccctgctcccctagacccagtcccttcaggtgtccccctaggggaactgtggcgtgtccccccaaccaggcgcactcgcctaaactgcgtccccgaactccagggcgcagggagccctcgcgggctgcccggggctggggcccacacctgaacggaggagccggctggcggagcggccccgcgcgcgcacacacgcacactcacagacacgcgcaaacccacagcggcgcgcgcgctccccattggcgggaggaggaaggcggggccggccgacccaaaacaaacaacctgcgccagcgactttgccgccgcgctgcagtgtggcctccgcctggtgcgcgcccgttggggagctggggaactggggagccgccaccacctcggccacctcgttcccccaccccttgccgtccgcgctcaggccccgcccccgcggagccgccgcagggttatattgggccggc

SEQ ID NO: 4518 - DNA, 13 bp, Homo sapiens
  chr6:1312342-1312355
  hyper
cgcggcaggccag

SEQ ID NO: 4519 - DNA, 1309 bp, Homo sapiens
  chr6:1312594-1313903
  hyper
ggcaggaaagccttctaagcccggcgtgctcgggcacccgagggtggaaccgcggcccctgcacacactcaccccaaagtctcaacgtcgaaccgaaggcgacacccacccaactcctccctctccgccccatagtccacccaacacttgcagcccctccagagaaaaagcccagcggaagaggactccggaaaagtgactatctcggaagaccagggtagagctcccgggagaaaaaggcgaagatccccggccccggatcgccatccccttccctggcaccagcttctctaggctgcgcgaaggaagagggtacgacgccggggagggactgggtgcgcgggcatgaagttggaggtgttcgtccctcgcgcggcccacggggacaagcagggcagtgacctggagggcgcgggcggcagcgacgcgccgtccccgctgtcggcggcgggagacgactccctgggctcagatggggactgcgcggccaacagcccggccgcgggcggcggcgccagagatacgcagggcgacggcgaacagagtgcgggaggcgggccgggcgcggaggaggcgatcccggcagcagctgctgcagcggtggtggcggagggcgcggaggccggggcggcggggccaggcgcgggcggcgcggggagcggcgagggtgcacgcagcaagccatatacgcggcggcccaagcccccctactcgtacatcgcgctcatcgccatggccatccgcgactcggcgggcgggcgcttgacgctggcggagatcaacgagtacctcatgggcaagttcccctttttccgcggcagctacacgggctggcgcaactccgtgcgccacaacctttcgctcaacgactgcttcgtcaaggtgctgcgcgacccctcgcggccctggggcaaggacaactactggatgctcaaccccaacagcgagtacaccttcgccgacggggtcttccgccgccgccgcaagcgcctcagccaccgcgcgccggtccccgcgcccgggctgcggcccgaggaggccccgggcctccccgccgccccgccgcccgcgcccgccgccccggcctcgccccgcatgcgctcgcccgcccgccaggaggagcgcgccagccccgcgggcaagttctccagctccttcgccatcgacagcatcctgcgcaagcccttccgcagccgccgcctcagggacacggcccccgggacgacgcttcagtggggcgccgcgccctgcccgccgctgcccgcgttccccgcgctcctccccgcggcgccctgcagggccctgctgc

SEQ ID NO: 4520 - DNA, 100 bp, Homo sapiens
  chr6:1314000-1314100
  hyper
ggcggcggcccccgccaagccactccgaggcccggcggccggcggcgcgcacctgtactgccccctgcggctgcccgcagccctgcaggcggcctcagtc

SEQ ID NO: 4521 - DNA, 21 bp, Homo sapiens
  chr6:1314219-1314240
  hyper
ggactttgcactttgaatcca

SEQ ID NO: 4522 - DNA, 31 bp, Homo sapiens
  chr6:1317074-1317105
  hyper
gcgcgggaggagggttcggggctcactgtgc

SEQ ID NO: 4523 - DNA, 138 bp, Homo sapiens
  chr6:1378223-1378361
  hyper
gcttcaccctcctgcgggaaaatgcaaagtccatcaccaatagtcggtctaccgcagagaagtctgcaaatcccaggggcctggaactctaaaaaggccattcaagcctcaggtggactccacgtttctccatttccc

SEQ ID NO: 4524 - DNA, 30 bp, Homo sapiens
  chr6:1379679-1379709
  hyper
ccctggtgtcctggcgtactcggggggaag

SEQ ID NO: 4525 - DNA, 30 bp, Homo sapiens
  chr6:1379998-1380028
  hyper
cctcgaatgcagaccggctgtctgtggctg

SEQ ID NO: 4526 - DNA, 332 bp, Homo sapiens
  chr6:1383376-1383708
  hyper
aaagggtcacctggctcaagccgaccccaggtctgacgggcggagagcctcgagggccacgccccaggccagtggtgtcctctgaggccgcaaagccgactggcttctggaggagcagcagcctcggcctcagcctcggctgggaaaagacgcagtcggggccctccgtgctccaaacttgaactactctgggtccccacgaggaggaggctgccctggggtcagaaactccgacggaaatgaaggggagggggcgtaggttccctggcacagctcggcctggagaggcagcctgggggcccaaactcatctagggcgcgcccggagcttcc

SEQ ID NO: 4527 - DNA, 320 bp, Homo sapiens
  chr6:1383859-1384179
  hyper
ggggcccggggcctttggccaggctgcggggaggggtggggttggggggctccccaaagcagcttctcggaggcggcgtcggggcgccctgaggtccctagtcggcctctgggcgccgagcacgttttatttatccccacagaggatgctggaggacaaaagaaatatttggacgtcagagctgatttatatttttggaagagctacgtttccttttctgaagagaagcgagcgcgccccatatcctgagctcggcggggaggacgagaggggagttttgatgcgccaggaagttcatctatcgcccaggcgctcaggac

SEQ ID NO: 4528 - DNA, 30 bp, Homo sapiens
  chr6:1389131-1389161
  hyper
caaagttccgaaaacgtccacgatcgccag

SEQ ID NO: 4529 - DNA, 30 bp, Homo sapiens
  chr6:1389951-1389981
  hyper
ctcggggagggatgcgccgggcgttgcctc

SEQ ID NO: 4530 - DNA, 331 bp, Homo sapiens
  chr6:1390427-1390758
  hyper
cgccgggagcgggggcgccaagaaggcgagctcggggctgcggcggcccgagaagccgccctactcgtacatcgcgctcatcgtcatggccatccagagctcgcccagcaagcgcctgacgctcagcgagatctaccagttcctgcaggcgcgcttccccttcttccgcggcgcctaccagggctggaagaactcggtgcgccacaatctctcgctcaacgagtgcttcatcaagctgcctaagggcctcgggcggcccggcaagggccactactggaccatcgacccggccagcgagttcatgttcgaggagggctcgttccgccgccgg

SEQ ID NO: 4531 - DNA, 512 bp, Homo sapiens
  chr6:1390955-1391467
  hyper
cgcccccagccacgcgcaccctcaccaccaccaccaccaccacgtcccgcacatgtcgcccaacccgggttccacctacatggccagctgcccggtgcccgcgggacccgggggcgtcggtgcggccgggggcggcggcggcggcgactacgggccggacagcagcagcagcccggtaccctcgtccccggccatggcgagcgccatcgaatgccactcgccctacacgagccctgcggcgcactggagctcgcctggcgcctcgccttacctcaagcagccgcctgccctgacgcccagcagcaaccccgccgcctcggcaggcctgcactccagcatgtcctcctactcgctggagcagagctacttgcaccagaacgctcgcgaggacctctcaggtaacgcagcacgctccagcccagccagctgggcgcaccgcttctaggcctccagggctggcggccactgccactcccacaaacagggaccccgaagctaggaggtctgagggc

SEQ ID NO: 4532 - DNA, 202 bp, Homo sapiens
  chr6:1439137-1439339
  hyper
caaacttcccactggccgggccccttatccccgtgtgccaggctccctgcctcccacctgcatgcctcagagcagccacctgctccccccacccagcctttaccctgcatgtacccagccctctggtgtgcagcgtctgcctgatcccctaacccctccacctttacctttcccgccacatgtaccccgtcctcttattcca

SEQ ID NO: 4533 - DNA, 493 bp, Homo sapiens
  chr6:1610744-1611237
  hyper
agcagagctactaccgcgcggcggccgcggcggccgggggcggctacaccgccatgccggcccccatgagcgtgtactcgcaccctgcgcacgccgagcagtacccgggcggcatggcccgcgcctacgggccctacacgccgcagccgcagcccaaggacatggtgaagccgccctatagctacatcgcgctcatcaccatggccatccagaacgccccggacaagaagatcaccctgaacggcatctaccagttcatcatggaccgcttccccttctaccgggacaacaagcagggctggcagaacagcatccgccacaacctctcgctcaacgagtgcttcgtcaaggtgccgcgcgacgacaagaagccgggcaagggcagctactggacgctggacccggactcctacaacatgttcgagaacggcagcttcctgcggcggcggcggcgcttcaagaagaaggacgcggtgaaggacaaggaggagaa

SEQ ID NO: 4534 - DNA, 30 bp, Homo sapiens
  chr6:1611697-1611727
  hyper
tcgcgcgcggggatcgcacccccgctggcg

SEQ ID NO: 4535 - DNA, 16 bp, Homo sapiens
  chr6:1612300-1612316
  hyper
cgcacgtccggagctt

SEQ ID NO: 4536 - DNA, 80 bp, Homo sapiens
  chr6:1614119-1614199
  hyper
tttcagtcaaaaactgctctacgtggcctgtgattcgctcggtcccctcccccagggtcgtaacctaatcgccgggaaga

SEQ ID NO: 4537 - DNA, 119 bp, Homo sapiens
  chr6:1614286-1614405
  hyper
cggcgctaggtcccggggctgcctccagcttcctcgggttacagcctctttcggggcgggggaaggggagggggtgacggtagagactccaccgccagtctccaggagtttggtgtgat

SEQ ID NO: 4538 - DNA, 965 bp, Homo sapiens
  chr6:1624812-1625777
  hyper
cgtgggggtgggggcagcaggtcccgagccccgggaactcccaccgttccgctccctctgggcgcacaaggctccgggtttccctgctttcggtccctgctgtgcgcgttcagttgcggctctcggcgccgtaaatcactaggtcgcggttaagaatgtgctgtgcggacccgtgaggaccgtgaccgcgatccacccccagctacctccacacctcttctccccaaggcgtcccttgggctcttaatgctttttttttttttttttttttttttttataacatgaagttgtcagggacgctcctatgagaactgtttggaattgctgcacttctctggctaggagggaagtgagtaaatcaccaggcgcccctcccagctgcccgtgtccctgcgccgctcagctcctgccgcagggctggccgcgccaagcgcgcgtcctacccaaagccaccagccccgcggggaagggactcgggctgtggggcgcgaggccccaggactcggggacccctctacctcggcggcagcgtgcgaccctctttctaacgcggccgtggatgtttcttcccgggccgcagccaagcgcggttcttcctgggcggtggctttgggcttttcgtacccacagtcaagtcagttcacgtcgcctcccgcacacacgcgttcataaaacgaaactggagtttcacgaagcaattcttaggcttagcgtccaggaacgctgtagacggtctattctattctacccctattctactcggttcgattctgttcctaagaaaatgccgatctcgacccacttgtacttccacgagcggagctgcagccagcagctctgcaggaccccgcactgcccgccaccgtcccctctggcagtgccttcctcctcccgctttccccaactgctccactcgaggaaacaagggcatttcatctccatcgacttaagaggcttccctgga

SEQ ID NO: 4539 - DNA, 886 bp, Homo sapiens
  chr6:2841488-2842374
  hyper
cccactagcccatctcgatctccactctcagagccctgatttcccccgaggacaggcaaagaagaaccgtgctggctgctcggcatgtaagcacaaagctgatttctccttgttgtgaaatcgtctctagaatcgcacggggttcctcctctctctccctgcagctgcagataggagccgcggcctggccctgggctgcctggaaaccgtcacaaacagctctgggaggaagggaattcagggagaagggacaacattctgatctcaggtttcagtcttgccttccgcctgcatctgtcgtcctccctccctccctccctcgcgggctggcccggcctgtacccaggcgggggcgggggatcagaggtcgtctgtctccgtcggggcgcccggaagggatgggggcgcgaagctggcggggagggcgagcgcagggagctgcgggtctgaggggcctgagcctggggggtggggggtgccgggctggaagctgagcgagggagcctggcctctccccgcgcccgcccccgcgccaccgctccgaggcccggccttacccgacaggccgccgaggcacgctccgggctccgagctgggtgcgaggtcaggaaggaggcaccgagggccgctgctcttatagcaggcggaagcgtcacccgggccagcagccgcgggcggggcggcggcccttcccggtgactgcgtaggagtccgagctcccgaggtcgcctaagtgcaagcagaagtgagcgtggcttccgggcagcgccctcctcaggggcgcggcttctttctcagttcaaagcctttccccgaatctctggcaaggacctgaaaagctttttcttactaaggtgtgaatgactgagacgacatattgtgacac

SEQ ID NO: 4540 - DNA, 644 bp, Homo sapiens
  chr6:2903031-2903675
  hyper
gtgagccactgcgcccggccgagactggtgactgtaaaggacagtgaagaagcaggacagacgtcatcctgcggatcccagagcagagaagagcagtgagaacacagggccggcaggtggggaggaggctgcaggggagggcttcggccagggaagggcagcgaggagacatccgggagggaggcgtccgcggtggctgtgggccgccaaggcggagaccggctgccgctcccaggcaccccccagagaccgttgctgaccccaccgagaaggcaccgcctccccggggctcttggctgagcgacctctcctgtcctccggtcccatcactcggtggcagccggtggacctgaagctcgccactcccgtcccctaccccagccgtgcgcggggacgccctcacctgccacctagtccagcgctgccgccgtctccgtgccgcgctccgagcctggacgccgacccccgaggcgcaggacccggccctgctgctgcgctcgccgcggactcccgctagggcctctgcaggcaccgcttttataccgcagggtcgggcgcctcccacgctttctgcgtttaggcggagcctggcgggaccagcgggggcgccgcgcgtggtggccgaggtcagagctgggagcagg

SEQ ID NO: 4541 - DNA, 30 bp, Homo sapiens
  chr6:2988708-2988738
  hyper
ggagggatgcatggcggggaagctgagtca

SEQ ID NO: 4542 - DNA, 58 bp, Homo sapiens
  chr6:3162904-3162962
  hyper
tcctctcccctaatcccgaggctggcgctgcagagtgagcgagcgcaggatcgctaag

SEQ ID NO: 4543 - DNA, 162 bp, Homo sapiens
  chr6:3228561-3228723
  hyper
cgcggcctccgcccccgccccagcgtgggcctgctttctcctttgtctgtcttgggctggtagctcctctcactgcgccgcagcatctaggggtgaagcgacctcggagcccctcagccctgcccgaccctctccgggagtgcataacgcccctgctggtac

SEQ ID NO: 4544 - DNA, 240 bp, Homo sapiens
  chr6:3228978-3229218
  hyper
gttccaagggtggcccaagcccgagtaacaaactttcttatcttccatcgcggcgacctggaggtccgaggcttcgtgctgcggttgaagggtggggaatacgactaaaaactgcagcccagcgcgcgcgagacgacccaagacccacgcgcactcgcacgagcgcgtgcacagacttggagcacagaccctcccttcagatccgcagtctctaggtactgaggcaggaactggtctctt

SEQ ID NO: 4545 - DNA, 889 bp, Homo sapiens
  chr6:3229277-3230166
  hyper
gagagagagactaatcctgcgtgcgtttgagggcgggaggggaaagggtgtcagaaacgttcactgcacaacctgttccctgcaattcgatgactgaagcgcgccgccccacacttcggaagggccgttggcgaggtgacgtgacctctttcatcccctggcgagaaaggccgaatgacccgggcgcacgcggcggagctcagcctgcagctgttgagcgagaccctcccagaactatcagcaagctgtcatcgcctccctttcccgctgtggggtggagggtggggggttcaagtcgattccaatgtacaaagagaagtagcgagaacaaaagcccaggcgcccccaaacatccagggcgcccagactggagctcgccggccggtattccagacccggccggcgtgcccgggtgagggtggggtctaccgagaggcagagagcagcggagggtctgtccacatgccctgctctcccggtaccaaggtctcggggcctgacctccgagtttctaatccagatcctgcagatgccgaaacgtcgagggctagcaattcccaaggtcatacagcaagttgaggacagggctcggactggaatctcgtcttttgggcacaccagacctcagggaaagtgaccgcatctcggccaaaagggctgtggcaggtgtcagcctcgaggtggcggctctggtgggaccaagctgcgccggaaggaacagagctagggcggcacccgcgcggcgagtgtagacacactcggagcggtcaccccctcgctgcgagctcccaggagcaaccctgatgctcagcgctggggggtggggttgggggccgctcagctccatgctgagtaacttgagctggccgcctgcctccttcatctaacc

SEQ ID NO: 4546 - DNA, 609 bp, Homo sapiens
  chr6:3231723-3232332
  hyper
accaaaagctggaaccagcagcgaaaaccccgagcccacgaacgcagcgcagtgcgggaacacttgccctttgttcctcagtaaggccgggtgttttcgcatccccggaggttgtgaatttgagttataatggcctcggtcgggactgagagagccgagcttccacgagagagctttgcctgctttgtcctacaaatcggcggagggagtagcatcctggcttttctagggcgccatttccctgctacaggcaatctcccctcccccacgctgtcaatgatttgtgggattcttaggcaggcggggcaggccgagcccagggaatgcacgctgagtcctagacacagagccaggccgggtggaaaacaaaaagagaagaagtgattatgaaataataagacggaccgtgtgccccttgcaaggtgcggcctgcgaaatcaacagacttataaataaggtctggtggaagcgcaggagcgcacgcgggaggctatggcgggggaacctctgtgagttccgcggcggaggctagaacatcgctgtggctgcgggaccctcacccggcgctgaaaaccctccacatcagctcctgctcggaaatgtctccgc

SEQ ID NO: 4547 - DNA, 882 bp, Homo sapiens
  chr6:3456047-3456929
  hyper
cactttggggacttcggttctcccgctggctcgggcttggacctcggtctgcagggagagggttggagggactgggcggctgcggcccttaccttgctgaccacgttctggacgaggccggcgcggatgccgtagtcccatgcgcggcagtcacagttggaggcgttgtcccccttgtccggaggggatggcaggggtggtgtgtcgcctccgtccgcgccgctgctgttgctccggttgcccgcagcctcccagggggcagtggcgaagggggtggtggggaggctggtccagttgcccatgtccccgccccggcctgtggtggtgacccctgccagctcggtgcctttgccggccccgcggcaccagaagttgggctggtccaggaggaacgagtccgagaactggctgaagccgatgaacagcgccgggatccaggtgagcagcacgagggtcttctgatagcccccgcccaggcccccgaggaagggcagcaccgacccgtcatagtccagcaacaagaggctcggggccgcagccgcggagcagcagctcgggtgcgggccgcctccaggatgcagtgggggcagcggctggatctccgcgccgccgccggggcccgcgcgtcccccgaggggcgccgaggccgccgcgtccccgggcggcagggagccgttctcctcggccggggccggctgccgcccaggcccgccgcccgccgcctcgcgccgccggtctatggccatggcccgggcccgcggctcccgcagaggcgcatagagcgcggcggaggctccgcgggcgccccgggcacagcgcgccgggccaggcgcctgcagccgctgccgccgaggagggcccgcggctcgagagagagcgctc

SEQ ID NO: 4548 - DNA, 655 bp, Homo sapiens
  chr6:3457581-3458236
  hyper
ggagacgcgcgtagcaggggtcgccggccggcgacgggtcccggcaaagtcggcgtgcgctgagaacgtgtgggccgggtcttctctgaggctgggctcccgcagccgcgcgggccccccacccactccgcgcgcgccaggtctccgtgacctctgtctcttcagaggtgcccggcggtcccgctgcccgcgccccgctcccagtcccaagcccgagggtcttcagccttcgggaacaaccctctgcgctttttccaggagcgaataaggttgatttttgtgtccgtggagcagggtcaaggaggcgcctttgccaatttcaggtcgccagtcccccgcagtgtctggccacctgcgacccgccgcacccactcccaaatcgccatttcttcccccactcctaagtgcatgcgatgtaagcacgatgctgggatatatctccaacacaagttataatacacacagtataaacgtgatggcattccccaccccctccctaagatcttgtattcacgtttggaacgccgtgtgcacaggcgcacacatctatactctcacacaagaagacaaacctctccctcctctcctgctccagcgccaaccttgcccagccagcgctgtataaataacaccagccctgcggcaaacggctaca

SEQ ID NO: 4549 - DNA, 31 bp, Homo sapiens
  chr6:3906687-3906718
  hyper
gaaagctgtcttctgtcgggggaccctgtgc

SEQ ID NO: 4550 - DNA, 30 bp, Homo sapiens
  chr6:4415168-4415198
  hyper
atgggtgagtgtagaagctaagagcctgga

SEQ ID NO: 4551 - DNA, 687 bp, Homo sapiens
  chr6:4775126-4775813
  hyper
tcaaacggtggggaccgcaggtagaagcaccgcttaaggggaacggcgattcgactcgcagtgacttaagggttggcgtggtgcttgttcctgggcgtggggaggacaggaaaccgcggggtctgtgagacgccccgtggttgttgaaacgctgttggggggcacaaacgaatagggctttaggaagaaaactggtgggaggagccttgtggctccaaggtaggttaggaactggagcgagatggagcacggaggagtgaggcggcccgaaggatgcccggggagacatggaggaactggcgagggcttcccgatgcagggcctgggggagagggtgaactaatgcctctgcagtgccccgtggggaagttccgcatactcggccagagtgatcggagttggcggctgtctgggggagttgggtcaggaagccccttctttcgccaccgatggggcacgtccagggcccggcaggtgtgccctggcagtagatcttccctgggaagtggagcgcgggccagccctcgctgttctgagcgagggcctgtcgtgtagtccacaccgttccgcgaaaggaaccaccattgacagcctcgttcgattagaacccggacctccctggaatccagactcggtcccttcccagctgcgcttcggaggaggcggacgctccgagaggaacccaga

SEQ ID NO: 4552 - DNA, 61 bp, Homo sapiens
  chr6:4776209-4776270
  hyper
cgggtccgtcgctgcccgtcctggtgtgcacaaccgcgctgcgcctcgaacctcgaggtcc

SEQ ID NO: 4553 - DNA, 507 bp, Homo sapiens
  chr6:4948975-4949482
  hyper
aaccctgctctaactcaagagcgaagagcctgcatttcactcggcgtgaattctacactttctgagcagagtatctgacgaagcctctctacagaaagtgaataaacgttgttcagatgacttcgacaactcttgttgaaagtgactatgcagatgatgtaaatgatgtcgttcctttcatgagcctttggtgtacttgagctttcagcagcctgaggcaagactggacaagtgtggttttccccactttgcatgtgcagagctctgccaggaggataagctaaaggaatcacattatcaagataaaaagaatatgcaaatagtgcaggctgtgtggcctctcctttcttacagcaggccctccgctgtaggcgagggctacgtaaatcagccaaggagtctcttccagtttagccttcctggtgcccagtagacattcatggagtgcatggaggatggcacggtctgacgcccacaggctcccacgtggaaatcttgcacctctca

SEQ ID NO: 4554 - DNA, 31 bp, Homo sapiens
  chr6:4949502-4949533
  hyper
gctggagaatgcccagcgagtacctgagggc

SEQ ID NO: 4555 - DNA, 1080 bp, Homo sapiens
  chr6:5085248-5086328
  hyper
tctctgaaggttgagcgcgagctctgcacccccacttcgaggcactcaagaagcggaacagacgcgagccccgccgggggtgcgggtgagggctgcagggagcccgcgaacgacagaaagtcgccccccgcattccaccggagcactcgggaacacggcttccaggtgtcccagcggccgcgcctccccgcccccggccctcccccgtcgcgggcaggttcaaccgggaggcggcgtggccccggagccggccccaggcccgcatcctcctcccacttcgccctgggcagccgcagctaaaagccggaggctccaaagtggaactacgttgtcttgtcgagcctggggcgactcgcctcggggagggcgagcctgaactgcagccctgcgctccttccacggcccgaggagttagttaagtctccagaggggcccggttcggcccgagcaagtccaggggcgaacggcgtcatggagcccataggggcgcggctaagtttggaggcgccgggaccagcgcccttccgagaggccccgccggccgaggagctgcccgccccggtggtcccctgtgtgcagggtggcggcgacggcggtggcgcttcggagaccccgagtcctgacgctcagctaggggataggcccctgtccccgaaggaagaggccgccccccaggagcaggaggagctgctggaatgccgccgccgctgccgcgcgcgctccttttccttgcccgccgaccccatcttgcaggcggccaagttcctgcagcagcagcagcaacaggcggtggcactgggcggcgagggggcggaggacgcacagctcggcccgggcggctgctgcgccaagtgcaagaagcgggtgcagttcgcggacacgctggggctaagcctggccagcgtgaagcacttcagcgaggcggaggagccgcaggtgccgcccgccgtgctctcgcgcctgcgaagcttccctatgcgtgccgaggacctggagcagctcggggggctgctggccgcggcggcagtggccgcgcccctttcagcgccgccttcccggctccggccgctcttccagctc

SEQ ID NO: 4556 - DNA, 30 bp, Homo sapiens
  chr6:5851315-5851345
  hyper
caaaacattaacagcgggggacattcctct

SEQ ID NO: 4557 - DNA, 30 bp, Homo sapiens
  chr6:5851629-5851659
  hyper
cgcatcggtgaggccgcccattggctggcg

SEQ ID NO: 4558 - DNA, 114 bp, Homo sapiens
  chr6:5996463-5996577
  hyper
gcccttcctctagggcggccccgtctgggaagcagttggaacagcagtaggagccaggggttcctagagaagaaccctgttaggagagcagaccagcccgcgctcccagtcccc

SEQ ID NO: 4559 - DNA, 442 bp, Homo sapiens
  chr6:5996946-5997388
  hyper
gttagaatcatcctatttatacgcagaccgaaaataaccattgaaacgaaaccaacaaaatgcaactattttccaaaaccccgagcgtttgctggtgggtgaccaccccgcgcaggtagcgcggatctgctttggttttgactgagaacccgggttttgactgagacctccgtcgggaggaggggactgggtgggagttagcgggcgaaacgattccccggagtggccccgagcggcgcgtgcgtgaacgcgcggccgtaatatatgctgccattaagaatccgtgcagcttccagcgctccgggcgcagggacgcatgtgttgctggaattcaatccgtggggggaatgcagattgggctgcgactcactgggtttgatttatgaactgttacactagcaattgtttacacattgcatttcagagcccgggcccaccctcc

SEQ ID NO: 4560 - DNA, 211 bp, Homo sapiens
  chr6:5997769-5997980
  hyper
ctgccagggaacacagcctctcggcccctctgctggagcccttaatggcggttccttcgcaagctgcctctggccaccgcacaggaagaggcgaatcgtggttaggccgagcctgcgaggatcgtggttagggctccggcccgcctgaggcgggggcagacggccggccactggcattgtctgcctgtgcgagcaagcccagttcctctaa

SEQ ID NO: 4561 - DNA, 30 bp, Homo sapiens
  chr6:5999244-5999274
  hyper
agacaccaggagcaccgggaacgccgggag

SEQ ID NO: 4562 - DNA, 126 bp, Homo sapiens
  chr6:5999609-5999735
  hyper
cgggacctccgcctaccccagaagcggctgtctaaagcgggggtgggggggcgccccctcctgtctggttttcccttccagttgccgggagaggactaggcagccgggagccgggccgtgcacccg

SEQ ID NO: 4563 - DNA, 14 bp, Homo sapiens
  chr6:6003514-6003528
  hyper
gagaaggccagagg

SEQ ID NO: 4564 - DNA, 130 bp, Homo sapiens
  chr6:6004349-6004479
  hyper
ggaacgggaagcactggggaagggaccgaggttaacttcgacctccgctggggcagatacgtaaaccttctcaaacctccgagttcaccttacagcgaacattaaatacccttgcgactacaatactaac

SEQ ID NO: 4565 - DNA, 14 bp, Homo sapiens
  chr6:6004729-6004743
  hyper
ggggctcgccgggg

SEQ ID NO: 4566 - DNA, 1336 bp, Homo sapiens
  chr6:6006948-6008284
  hyper
gtgaaatatatctgccgttcaacttaagtcccatcctacgtttagtcaaaccatttgcgaccgcagacctttaaatagttagtttagagaacgcgggggaaagccaaaaaataggcattgccaacaagttccgggagcgacagagactttatgcactgggaaggcagagggaggagagaaagagagggagcgaggaagagacagaaagagagagagagagagaaagagagagagagagagaggctgaggggggggggagagctgggaatggttcactccattagaagggggcggaggaagtacagcctcacgcccacgagcaggcctgacgtgggggatgacacggaatgattttttttttaatatagacaccttggtagagaatcgccatttatagtcatcagaagctggaattaatcagatatctccaattaatgtgcgatctgaacgaaattttgcctcccgggggtgagcactttcctattctagcggtcacccctgcctcttcctcgttccgggggccccccagccccgccgcctccctgcgcagaacaggggctccccctcccttccccgccaggagctggggagtcctggcgcgcccactcgattgtttcaacctgctccccctcctccatcagcaccacagagaatccagcccgctctctacgatgcaggggggtttaaaggagcgggagagggaaaaacagctaagctagctcgattaattcgaaagcgctcctcggccgcccgccccctgcgcttgcctaccctctttttctccaacccagcagctgagctctgggcgcagcctggagcgcgtgagcacgcagcccggccccccgcacgagcacacacacacacacacacacacacacacacaaacgcgcgcgcgcacgcccgccagccgcgccgagcgcccccatgcccgcccgcacacaaggcacgcgagcgcgcgcacacgcccaggccccgggggtttggtttgcacacgtggggccccagaaataaacaccgaatgtcctctgaattttacccacctgcgatgccccagcgggccaaaggccgcttcaagggacacagcgacacctgttttagggggcgagtagggcaccggggaaggagcctctgataagacagttttcggatactagtgatttaccaaccaactctcagcgctttaggaaatttccaaggcaagcgctggtgtgcggacttctttctaatcttgatgcgcctcttgggcttatttgttgggctacacacacacgtacccacacgcacacacgtacatcacgtacgcacacgcacacccggacccacacacacctgcact

SEQ ID NO: 4567 - DNA, 30 bp, Homo sapiens
  chr6:6008842-6008872
  hyper
ggtgtctgcaatgtgcggcccctaactcac

SEQ ID NO: 4568 - DNA, 149 bp, Homo sapiens
  chr6:6009170-6009319
  hyper
ggggcctcaggggggttgccacgcggcccggcccacggctccgcccctcgctcggggttccgcgtggggccggcccagctttcccggaccaggccaccagctgcgggcccccaacctcgctcagactcgtgcagagcccaggcttggga

SEQ ID NO: 4569 - DNA, 31 bp, Homo sapiens
  chr6:6320597-6320628
  hyper
ttcgggagagctgcctcgagagcctgagaga

SEQ ID NO: 4570 - DNA, 30 bp, Homo sapiens
  chr6:7389873-7389903
  hyper
agaaacggccagcacgggcctcgccgtgcc

SEQ ID NO: 4571 - DNA, 232 bp, Homo sapiens
  chr6:7541474-7541706
  hyper
ccagtaagtctccaatcgagaggcccctccattccagctatttccgcccggggaccgaggaaatcctcaaaagccgggccacgcattcccagcccgagaggccccagcgcagagcgcagcagcccccgcgagcgcaggtcctccccgcggtggcttcgcccagggcgcttgggtctcggggaccccgcccccgccccgcccggtgttactcaggcctcggtggcgcagggcg

SEQ ID NO: 4572 - DNA, 731 bp, Homo sapiens
  chr6:7541958-7542689
  hyper
gcccgtcgccgtctccgcgctcgcagcggcctcgggagggcccaggtagcgagcagcgacctcgcgagccttccgcactcccgcccggttccccggccgtccgcctatccttggccccctccgctttctccgcgccggcccgcctcgcttatgcctcggcgctgagccgctctcccgattgcccgccgacatgagctgcaacggaggctcccacccgcggatcaacactctgggccgcatgatccgcgccgagtctggcccggacctgcgctacgaggtgaccagcggcggcgggggcaccagcaggatgtactattctcggcgcggcgtgatcaccgaccagaactcggacggctactggtgggtacctgcccggagagcgcgggctgcggggctcgcgggacagggagggaccgtcctcctctggacgactgggagactcgggtcccgaaggtggaaaggtttttttgccccaggtcccgaaagaacttcccggccgcgctgggagcaggaccgggtgtcctgacgcgtgcggggacaggttggcccctgtcctgcgaacagggactcggtcgtacctttctcccctcccgcgagcccgggcgggtggtcagagggggcgtcgggcccgcgcggggctgtcccctgcctgctggacacggctgcagccgcctttgtcccagcccgcgaatgggaggtcaggcgaggtggggctgcgaccacaaaaccca

SEQ ID NO: 4573 - DNA, 292 bp, Homo sapiens
  chr6:7542946-7543238
  hyper
ccgccggggcggctgccgggcccgggtctcgaagttcggccgggacgtgcctgttaccttcggtcgtccgcgccgcagcccccgcgggcgagcgcacctggggccctgcctctgagccttttgtttcctcctttttaaaaacaccggatgaaagaccccagtgtgccttggatcgcagagcgccggccgcatgtctgctttgatccagaatgtgtgggcaggggagtgggggggtgggagaggacgacgctgggggcccgccctggcctaggcgccccgggaagaccccccg

SEQ ID NO: 4574 - DNA, 1723 bp, Homo sapiens
  chr6:7726045-7727768
  hyper
gtaaaagagaaagcttcagatcggggtattggtcagatcattcttactagcgatgacctcttcgcctttggcacctcgcggctcttcgcatgcctccaagaattcccgggtcttgaaacctacgcgcggcggaggcgacgcctctcgggagagggagggtgaaagaaggggcggggctatttaaatagcccgcgagcttcgcgtccccattggctgccagcctgtcggttaccgcggggcggggagtcccggggctggagtgaggtacctgagccgggcgcgcagcagaaagcccacgttggccgctgcggggagcgcggcgtggagaggcgggagaccgaattccggcgccgccgccgcggccgctgctcggtgcactagcccccttccttcccatcctttctgcgagcgggtttgctgggcagccgggcgaccgccgaacggaaagcaagatcctcgccgcctccgcttgaggaggcgtgcggcgcgcggagattttgagtgggagcgacggtgcccgagagctcaggggcgcggagttcgtgagcgagaaggaagttaaacctcgcggaatagactggcatttcgggacgccttgtcgccgcagcctgggccctgcaacggggtaaacttcatggtggccctgcgatctggggaggggcgtgcgccacggtgatgccgggcatctcccgcagctcgtgagcggccccgctccccgctgccccgggtcccactcagtcgccagggagagcgcggggcagcgcacgtgtgcggccagcgaggcccagagtgaccgcgccgcgactcgcaggagccagggcgcaggctgcagtgcagcccggactcagacgcacctggcctggaccgcgcgcctctagagacctgcgcgaggctgtgaggctccccttcctcccctccaagcggttctcctggtgatcgccccttcgccacctctctagcctgggcaactgggggcgccccggacgaccatgagagataaggactgagggccaggaaggggaagcgagcccgccgagaggtggcggggactgctcacgccaagggccacagcggccgcgctccggcctcgctccgccgctccacgcctcgcgggatccgcgggggcagcccggccgggcggggatgccggggctggggcggagggcgcagtggctgtgctggtggtgggggctgctgtgcagctgctgcgggcccccgccgctgcggccgcccttgcccgctgccgcggccgccgccgccggggggcagctgctgggggacggcgggagccccggccgcacggagcagccgccgccgtcgccgcagtcctcctcgggcttcctgtaccggcggctcaagacgcaggagaagcgggagatgcagaaggagatcttgtcggtgctggggctcccgcaccggccccggcccctgcacggcctccaacagccgcagcccccggcgctccggcagcaggaggagcagcagcagcagcagcagctgcctcgcggagagccccctcccgggcgactgaagtccgcgcccctcttcatgctggatctgtacaacgccctgtccgccgacaacgacgaggacggggcgtcggagggggagaggcagcagtcctggccccacgaagcagccagctcgtcccagcgtcggcagccgcccccgggcgccgcgcacccgctcaaccgcaagagccttctggcccccggatctggca

SEQ ID NO: 4575 - DNA, 95 bp, Homo sapiens
  chr6:7728086-7728181
  hyper
cggccgggccgcggggctccgggagcgctgtccccagcgggcgtgtatttgcggactccctgagcacgttccgcgctttttttcacttctgccca

SEQ ID NO: 4576 - DNA, 30 bp, Homo sapiens
  chr6:7728424-7728454
  hyper
aaggaccgcggaaggcgctcggatcccggc

SEQ ID NO: 4577 - DNA, 220 bp, Homo sapiens
  chr6:7728787-7729007
  hyper
tgcagagaagactcttttcttcggagtcagtgcctccggtttgcactgcttttcattcataagctgacttagtttagcgcagacataggatggagggacgcgctgtcagcggacagatcatgggtgcactggctacgcccgggatggttgcagctgcgcggcggggtggggcttcacgggcctccttcccatgtgagacggtggttgtgcccaggccctg

SEQ ID NO: 4578 - DNA, 30 bp, Homo sapiens
  chr6:8825196-8825226
  hyper
aaaaaaatgaaccatagccctgagaatcca

SEQ ID NO: 4579 - DNA, 31 bp, Homo sapiens
  chr6:10125877-10125908
  hyper
ctctcctttcctgctccgtctctcttccctg

SEQ ID NO: 4580 - DNA, 39 bp, Homo sapiens
  chr6:10381553-10381592
  hyper
gagggcgctgggccccgcgcgctttcctggctgtccccg

SEQ ID NO: 4581 - DNA, 274 bp, Homo sapiens
  chr6:10381694-10381968
  hyper
cgccggctaagggcagcctgcggcaggtccccgagcctgagcactcctcctatctggggcctgagaggacgctctgggctttttcccaggcccagggtgcgcggcctgctagcgcctttcgaggcacagtcccaagataggctcttgtccttcgacgcccccttggcacaagcgcactggcgccctccgctcaacccaccttgcctttggggcgggcttcaaccctgggaagacaggcctgggggaagcgagaggagaggcccgaatagaggtt

SEQ ID NO: 4582 - DNA, 9 bp, Homo sapiens
  chr6:10382321-10382330
  hyper
cgaggggcc

SEQ ID NO: 4583 - DNA, 278 bp, Homo sapiens
  chr6:10382716-10382994
  hyper
acatcttattaagggagacttcgaaggcctgttagcaggtgactgcggcaggggcaggggcgcatcagctgtccggcttggaccggcgtgggcgtgggctgggggcttttccgatttgctgagtcagccgcgggcgccgcgggctttggtgtttccagcccaagcgactgtgcttcgctgactggtgtgtcaacttggtagtgtaattattgttttgttttctaatatgtaattactctttgtcgttgctattatgaatccaccgagcttgactcttg

SEQ ID NO: 4584 - DNA, 542 bp, Homo sapiens
  chr6:10383638-10384180
  hyper
tgaaagtgccagaacaaaggccgactcccccggcgcctccctcggggactgagcaccctgggccctgctgacgaagcaaaccccagactcagctcagctacccacgctcccagccacgtcgcgggtggatattcccgcctgggctgggcaccgcggaatcagcaccgcctgctgcgcaggccccgcccagaggctgcaccacccaggccctgcccgccgccctctgcagcctaggcggggtgtgtggcgtcgcggtcagccttaccgagggacacgccgccccgggccgggacggggtggggctgtgggggatcctgggccgaggaaagcgatccattttctctaaccgtttgctccagagctgtcaggttagcgtggcctcctcggccgcccagagaagaatgtgttaaaattctttgcacgggagcctttcccagcccaaatataccacactgtggcgttcctcgtgccgaccgtgggtctctaacctagccaccttctcccgttgaaatatgcacatcgctattcaataatttagacaa

SEQ ID NO: 4585 - DNA, 30 bp, Homo sapiens
  chr6:10384431-10384461
  hyper
aggagactgcccctgcgggtcccgattaca

SEQ ID NO: 4586 - DNA, 30 bp, Homo sapiens
  chr6:10384944-10384974
  hyper
gaagggggaaggagggggagccgtggcggg

SEQ ID NO: 4587 - DNA, 200 bp, Homo sapiens
  chr6:10385279-10385479
  hyper
gtgaaaatttgcgattcagggcaaatgattctccgacagacgctgggctccacatcccacccctcccagcccgcgccccctccggtcctcgcgctccccggccgccacgtcccgggcagttcaggaaagcttgctaggtttccacgccggaaagcccaaggagaaggagccagcaggcctctgagcgtgtgagcgcgtgt

SEQ ID NO: 4588 - DNA, 30 bp, Homo sapiens
  chr6:10385888-10385918
  hyper
cctgccggcccccacgttgatttcccgaga

SEQ ID NO: 4589 - DNA, 1142 bp, Homo sapiens
  chr6:10390073-10391215
  hyper
ttgttcgtttgcgctcgcgctcgctctcgctctctctctgcatccccctcaccccctttctcggagactgaactaagtgaaaagttgtttcaataatcgcagctctctgctccgccagggccgagggaggcgggcggaacacggagggtgttttgttaaatgctcccgtcgttcgcaggggctgggacttgataaaaggagacagttttctgaaaagatttgattgaaatggcgtgtgccagggctgatgggagccagcgagggacaaagcgccgagaatccatggacactcgagcaattatgcctccacgctgaaggtggattagcgcgctggaaagaagcatatgtttggcccggggcgacacttccccccggctgagcttagagaatgggagcgcggagagcggctggacccggaatatcaactatctgcgaagcccccccttctagcccaactccgccagcctccccgcccccgccggggaaaagtcggagtgcatttttacaaagatgagaggagaagagagggctaggggaggagcgggcagggaggggagtaggtgcctagaggtgcaaatggccctgggatcccccaggagcggccctccaggctctcctctctggcgatcccgagggcgcgtccgtccttgggtgtggaaacccagagggggtcaaataaatgctcccctatggaatttcccactgctaaggtagttcggtccaggatgcccgctcaacgcgtattggaaggtcagccgaattgttgcaatgaaacaaggttttaatgactaaagatgcaagtgcctaaaaggttgcgttgggcaggaggcgcttggagggcagcgcgggttcccagccattccttgggtccaggtcgaggaaggcctcgggagacgagtcccacagtgagatatttgatgaaatgggtcggggctggaaagctcggacaggccgcatgggagagaaagggtgcgggtgcggcagtcggatccccacgcagctctatctgcttagacacccgggcgagggatgctttgggagtttggagccagaaagtttcccagaccctgcctccagtcattaattaaagcgcccttcccgtggaaaaaaaaaaggcccttaaaactctgacctggagcctc

SEQ ID NO: 4590 - DNA, 317 bp, Homo sapiens
  chr6:10391324-10391641
  hyper
cgcgagtgccggtggccgctgcccaggccgtccacatttccctccctggctgtccttcgagcccctaccagtccttcctctccctgccgcccaagcccaggcaagactcgaaccgcccgtcccacacaatctctaccatccccccacccccacgcccaacgccagacagtccaaatcaagtagcgaatagctcctaatacaaaggggtgcatggcaggatattttcggggaattcaaatagggcagcgccctgccagcgggtggggtcctgggtggggcaggtgggacccagtgagggggtgcgcaccgcgctgcct

SEQ ID NO: 4591 - DNA, 30 bp, Homo sapiens
  chr6:10393763-10393793
  hyper
tcttgcctcagaaccgctgccatctctgca

SEQ ID NO: 4592 - DNA, 30 bp, Homo sapiens
  chr6:10404348-10404378
  hyper
gcttgcaaggtgtgcgcgaagagggaaaag

SEQ ID NO: 4593 - DNA, 199 bp, Homo sapiens
  chr6:10409933-10410132
  hyper
ccattgttctggggtagaactcgcaactactttgtgtggttcctcaaaacgtccctcactctccgcctccgaataaaatgtttttataaggaaatactagggagaacccgggcccaccgactgtatgttccaggtatcctttctggggtaggtaagtagggggctgtgttccctcccgcgctggttgcgcggcctctta

SEQ ID NO: 4594 - DNA, 983 bp, Homo sapiens
  chr6:10410242-10411225
  hyper
cgaggatccaggcccgacagctggtgaggcagcccccggtgcgtgtgcaggagcccagactcctggctctgcctctggccgggccagcctgggtgctgcggctgcggctgggcgtgcagggggttcaggctgtaggggtcgttgacgtgggagtaaggatcttgcgactgggggtagataggctggtagggtggggggaagtatgggggctggaagtcggcattgggggtgtgggacagcggcggggcgctcgtgtagggagattgacctacagtgcccagctggggcaaccgtgccgtcccgttgctggtgccgtcgtgacggtcctagaagagagcgagaggaaaggtaaagaacaaggaatcaggcgtcgagctacaactatccacacaaaatccacttgacaagtctgcgtgggaaatcgcccgttcccgttggctggccgccgggaaaaaatcagctctaagttcttttcaggaaataccctcaagtgaaacagaccgaacaacgcagagaaactgtatatggagggggcacaagagactatttaggggtttctttcaaagagaggaaaagatagaaaagggtctcctggaacacagcccattaaactgcagcgtgaaatctctcttaagcaaaattaaaattcctcctaaatactaaacagcagaagcggccttttcttttcccccgatttgaacctgtctgccactgcgttattgtttattctcttccatttatttggagagaaaaaaatcataaacgttcaaagactgttaccgtttcatgactacttaaatagaaacatatttcgcagaggggctgtaacaaaaacacacgtttaaattaccagcttaaagaaggttttaactgcaggatcggggtctgtctttttcgcttcctctgttaggagcctttttctcgacagagtcgatttatggtttggatagggaaagggggacgtcaagtcaaggtttaaaata

SEQ ID NO: 4595 - DNA, 30 bp, Homo sapiens
  chr6:10411545-10411575
  hyper
cgccttgggaagccgcggcgaggtaggtct

SEQ ID NO: 4596 - DNA, 683 bp, Homo sapiens
  chr6:10411811-10412494
  hyper
aaaactgtgaactaacatctgcgaagagtctggggtaacgagtcagggtggaaaaaaacaagcaagcctggagcgcccggctgccccgccgcccgagcgcgccccacacaaaaggcgccgagagccccgcgccacccaggactccagtcacggcgccgacgctccccggagcgcgggagcccggctcggatccatccgaacttgaaccaccgattcgcgcggcgccttcagctggtcgaacccacggtctctatcctgccgcgactggttatgattcaaagttctttaaaaatgaaaaaccccaaaaaaggaaaaaggaaaaagtatgtgtgagtgtgtgggtgcgtgcgtgttccttaatccgtgtctccccctcttttcttagcggcggcttcgcttgagcttctaataaccgcgctgggcagcgttcctggagcctcctaatagcagatattcatgactattaatattacacgaatacttaataagggaagaatgcctggaaatcgagcgtgaagcggagaggcaactcgcgccggagccggctctcaatgcagtccattgacgggagtctcagtgtagcaaatcggagtggggagagggagcgcgagagacaaaaagcgagcgagagagggagcgggcgagcgcgcggggggccgcggcgcggcgtctggcgaatcaca

SEQ ID NO: 4597 - DNA, 71 bp, Homo sapiens
  chr6:10413259-10413330
  hyper
ctggctgggccactcccgcctgacgcccccccagatgacacgactagctctcccggcgtgctgcctttgcc

SEQ ID NO: 4598 - DNA, 30 bp, Homo sapiens
  chr6:10414482-10414512
  hyper
cccgtggggtgcgtcgatcctgtagctcag

SEQ ID NO: 4599 - DNA, 243 bp, Homo sapiens
  chr6:10415062-10415305
  hyper
aagtttgtcccacccgcgtttcgcagctggttgcaaggagaggaggaggagagggagggtcaagctcggagcctgtgaccgcacggatgatcgagccggcgtcgcgcttacctcgcagtcctcgtacttgatattatccgtcaatttccaaagcattttcatggatcggcgtgaacggatatgcccctctcggtctcgcacccaagtggagctactctctgggtgagcgcaaagtgctggctg

SEQ ID NO: 4600 - DNA, 30 bp, Homo sapiens
  chr6:10416513-10416543
  hyper
gcagagcccggctgccgcggaacctggagg

SEQ ID NO: 4601 - DNA, 336 bp, Homo sapiens
  chr6:10417193-10417529
  hyper
cttggcgccgccctccgtccagaaaatggtcgactttccagggctagaccctgcagggctgtcccagcctgtcgccagtgcagtggtttgaagtcaggatctgggctgccaggagcaccgacaccctcccagcagcggccatagcctgagcaggccaaaccctaggcctgagagcatgggtttttacactccgtagacgtcgccgcggtgtgcttaagggaactccaagtttcgctttcttgccctctgcgggcttggaaaggccgccctccatcctctgccaccccatttcaacccccgtttccacctccccgctgccccgcgcccaacagatct

SEQ ID NO: 4602 - DNA, 183 bp, Homo sapiens
  chr6:10417835-10418018
  hyper
cgtcgcggggaagagggagtatttgtgtgagagacagagtcacaaagagaaagagacagtgaggggccagaacgactctcttttctccgattgtcaatgcccagtgggagccgggagcccaacaggcccagcccatcagattcggcccctccgggccccaaatccgctcgccccacccgagat

SEQ ID NO: 4603 - DNA, 219 bp, Homo sapiens
  chr6:10419220-10419439
  hyper
gggcgaggccgcaggcgcagcaggctgaaaaccttcaccgccgcgcaccacaaccccaggccttctccctccccccttccgaattagtcatcctcccaagtttctacttgaggtgggaggggggtgggggaaacggccacagcacaaaccacaagtgacccaccaggccacctgtggagcgtgcgccggacttccccggcgccgggccccgcgggctgc

SEQ ID NO: 4604 - DNA, 525 bp, Homo sapiens
  chr6:10419476-10420001
  hyper
cgtttttcctgtcttcgctgtctcctgggagctctcctgggcgctgccaggcgcgcctcacctacgactcccctgccctgggccacggcgcttcctctcctcctccccgctccggccccctcccctactccacccctgcccacctcaaccccagccaaggcaaaccccccgtacctgccagtcccccattttggcaagtatggacatcgcggctctgcgctcctggcgactggtccccgccgggcatgggctggagggctcggtcgggccagctccctggaatcgcttaggcaaatcctccttttttacctgctcaccaacatctcacctggtcataaagagctgggttgctacctgccgacgcatgcgcgctggcccaggaattcactccgccagctgcagtcccagcgccgcacagagctgacctgggaagtgatggatttatagccgcggcaatcttgccatcagctccagcttttcccaacagccccaacccgctttcccggtcagtccctggcccgggaa

SEQ ID NO: 4605 - DNA, 265 bp, Homo sapiens
  chr6:10420118-10420383
  hyper
cgaactgggggagtctccactcccgggtgggggtcgggggttggggaagggctagactgctagaagcgtccagaccccatgatccccgcgcacctggacacagtggggacaggtcgccgtccccgcctccccacccgcccacgaggtgcagggcacggctggccttagcggatctgactctgccaaccccggggccacttcagcgttagattccacatgaaactgttgctcaataggtgaagacgttcatgattctgtgtcactt

SEQ ID NO: 4606 - DNA, 73 bp, Homo sapiens
  chr6:10420681-10420754
  hyper
tgaagtgatttcaccgctgcttctaattagaggggagctttaaaagaagccacgggatttggggctcccggag

SEQ ID NO: 4607 - DNA, 99 bp, Homo sapiens
  chr6:10420876-10420975
  hyper
cgcctgggccaggcccagttaccctcccgggctgctgtcgccgggacttggagacgaacaaagaaccagttttaaatcgtcttctctgacatgtcaggc

SEQ ID NO: 4608 - DNA, 101 bp, Homo sapiens
  chr6:10421350-10421451
  hyper
tcttccctggctttttccagacggtggaaatagggcggtgactaacttttcagagtggaagacacgcacgaagggcgcacctgcagctctccgggattcag

SEQ ID NO: 4609 - DNA, 1102 bp, Homo sapiens
  chr6:10421548-10422650
  hyper
cgggcccagccggacgggccgggccgagcctaggaggggctggcagacgtgtcccagggccagggtggggcgtagggagcgccgtctccaccctcagtacttttggggtgggggacctgagcgtgcggagagcgggaggcagagctgagagcggggttaagcgcgaagctaaggcgccgcatagggttgggtgggaatggacagggtgagctggaagcgaagcaccccagccaggccttaggagagaggaccgtcggcatctgtgcacatcctagcgggcggatgatgtgggagagaggcggagggaggtgaaatgcgggagctagaatttagctttgcagtgaggtcacttggggtctgcattcagctccgatatatacatgtaggggctgtgtgatcctggggaagttaccgaccttgtctgaactcctgtttcctggtttgtaaagtggctaattggtgggaattcaataggagaatgtgcgcaaaacgcttagcacagcgcctggccaacaatgcgctctcaagaaaggctgctgagccttgtccaggacggtctacaccgccccacgtccaagatgagttcacagcgcccaagacctgttcaatttaagatgatgtaaactgcattgcccttcttagacacgcagcagccaggagctggtcatctgcacctcccgcgatttcctcctcagaaccccagtcctgccagatttgcgtccttccctggctcctcaaacacctgctgcaccgctcagagcctttccccaccccgacctcctccgcagctccgcaccagcgagactgcgccccgtggcacctcgggggtgccacgattggcgggggatgggggatgcctcccagcttcatccgctctccgggttccagacaaccattccggagagccagctgctctcagtgcgggcaggcccaaggccactaactgcacttggcgacccacctccgttcccaagaggcctcggaaagtgcggcctcgggtctcttttgaaacagagacccgcggcaccccgcttctccccctgggataggagagggagagccgcgggagttccgcagccactcctggcgctgccaccacgaa

SEQ ID NO: 4610 - DNA, 278 bp, Homo sapiens
  chr6:10423450-10423728
  hyper
actgtggctttccagaatgcacgctttcaactgacagcagtgggtacaggcccgaggtgtgcagcaagctgggaagcccagaggccgagaagctaaagatgccctggagactggaggagcgcatcaccggtcagtgcgccccctccaggagcggcctcccggccctctcggccttaggcgacaggtgcagcagctgtctctactgcccgctgtgccagggcggctgccgagcactggtgcggaaccactatcggaacgagtttgcacttctgtttaca

SEQ ID NO: 4611 - DNA, 30 bp, Homo sapiens
  chr6:10423932-10423962
  hyper
gcgtggtgtcccaaccggcctggaaagacc

SEQ ID NO: 4612 - DNA, 30 bp, Homo sapiens
  chr6:10424305-10424335
  hyper
ggacgttaaagaagcgtcaagcagttctca

SEQ ID NO: 4613 - DNA, 974 bp, Homo sapiens
  chr6:10425990-10426964
  hyper
tccccatcccaaactcgctagattaagttcgctgaccaggcgcgcacccaatggcagcaccctctccaacattttccccaccagagaggcaagtgtcctacatttgtacgtaaaggtccctgagtggctaggtggagaggctcggatgtcttttcctggagcgggcctcggggagctgcagcagccccagcctcaggcaccacagccaagcgagcgcgccttgggctcgctgctctgcacgcagctggaggtctgggccgctgaccctctggccacgtagtcaacccgaggatgtgtgccccggggctcggccttgcctcgggtgagaaggctagtcaccattcagggtgcaggtgtcatggcctggaaatggcaatatctgagcaaacaggtgggcgtcgcttcccggcggtgcggtggccgctggctcgcagcgcgctccagctttcggcgccgccgccgcccctttgctctgcggactcagccagttcccgggtggcccagctgggtggctccgaggcctgcccccttgggctgcggcgggaggcggggactgcagtgccgagtgtagggcgccccagccgggctggcggttcacgctgcgctcgggcctctgccgggagggcgccctggcgccaaacccgggcgggcaggggggtggagagccgattgagtttattcccattcagaatttagaggctggtggagacagagagtctcctaaatggatgcaagtctcctgaaagtctgggccggaagcctcgaaactttctgccacgcaaagccccagctagtctccagggctcggtcctggttccctttgtgcaggcccggaagtgtccgcccggttttcccactgcctggaggggcccagggtcgcggatagactcggacaaggctccgtttactttcagtttgtcttagttgactaatggcgggactggttgtaatgcgtgctctgagattttctccag

SEQ ID NO: 4614 - DNA, 30 bp, Homo sapiens
  chr6:10694888-10694918
  hyper
cgcagaggatgtcccgcccgctcccttcag

SEQ ID NO: 4615 - DNA, 31 bp, Homo sapiens
  chr6:10723050-10723081
  hyper
ccgagctcacgtggtccggcttgtgcaagtc

SEQ ID NO: 4616 - DNA, 32 bp, Homo sapiens
  chr6:10882223-10882255
  hyper
gccttgtccttggccgcggtgctgaacgttct

SEQ ID NO: 4617 - DNA, 212 bp, Homo sapiens
  chr6:10887170-10887382
  hyper
taaacttcagggggcggattcgtcaattacagttgcggaagaagactcgactcgaagagcggtccgccaccagggctctttcggcagcgcccccagcgggcggggctcttgggcggggaagcaggagagggccgaccgagcgcaacaaagctgagcggcgcgtcgcttcaggaacgaagaagcctcgttatgcaagcggtgagtgacccccg

SEQ ID NO: 4618 - DNA, 1231 bp, Homo sapiens
  chr6:11043616-11044847
  hyper
cagttcatcggacacgggtgaacacacacacacacacacacacacacacagcttactgtcaggcagttcatcggacacgggtgaacacacacacacacacacacagcttactgccgaggagaaagaagcgttactaatccagagtggaggactggcctgggaaatcgggcagagagaggagttgtcggaaagaacacaccagaagcccctccgagcccagacactgatagaaacccagccgcttcccaagccaatctgcaaacccaggaggcacccacgagtgcacagacacacccccggggtgcaggcgcggtgaagggaggagaggggcaagagcttgaccgttagggcccgaaccccagaactcccgaggcagggtgtgtgccgcgcgcgggaaacgccgttctccgctccaggcgtcggcgggcggtggcgagagcaggttcgggggtccggagggtcggagggtgggctgcgcgcgggaatggccgccgcgaaggaggggcggcttcctcgggcatcccgggcgcccggccccgtgcatgcaacaggggactgggcgcgagcgggcgcctcgaggtgccggggcgggaccggggagaggggaccgagacaaagttcccgagacccgcgggcctcgggccgacccgcgcgcccccggcccaaacgctcagctcccgctccccaggcccgcgcggacccggcccctccgagggtagcgggttccagcggcgaacccgcagcgcccgcgccggcgcccgctcggccctttcccgcccggtgcgtgggtccaggagagaaagaaagcgcggcggtgtcggtggcggcgcgcggccccactcaccatgatccgcagcggctgtggcgcggcgacccgggcgggcggcgatgcgctgtccagggtagccgggtccctctgcccggcgctatctcggcgcccgcgccggttacccccacccacacccacgcccggcgcgcgcacacccgcccgcgcctccccgccccctcgggctcgcgccgccgccgcgcggcgctccgagcctcggggccgtttcgtccccgccccctctcccacaggggcctcgccggccgccgcgccaggagggcgcgcgggggaggggcgcagggcaagtgaggcggcgccccccgcccctgcggcctcgcgcgccccctcctgggcgaccgacctcgccctcgcgtccgcggcgtcccctgccggccgggcggcgat

SEQ ID NO: 4619 - DNA, 31 bp, Homo sapiens
  chr6:11382658-11382689
  hyper
gtcatactttctgattcgctgaggacacttt

SEQ ID NO: 4620 - DNA, 30 bp, Homo sapiens
  chr6:11392177-11392207
  hyper
caaataacacacagtcgttattgaaaccag

SEQ ID NO: 4621 - DNA, 117 bp, Homo sapiens
  chr6:11537479-11537596
  hyper
acagtatccacctcaccgagttcagcagccccaccttgggtcagggctgcccctgcagcgcgggcccccgaaatgcccgcaccgcccacgccgcccgcaccgcgcgcacccagccgg

SEQ ID NO: 4622 - DNA, 31 bp, Homo sapiens
  chr6:11537919-11537950
  hyper
agaggcgcgcgcgtgcgcgtgcacgagtggc

SEQ ID NO: 4623 - DNA, 147 bp, Homo sapiens
  chr6:13574017-13574164
  hyper
ggtgctggtggcaagccggaatccaagaaaaggaaagactccgattttaagggaacggggacatgcggagccacgtgagtcactgggtcccagagccacggaaggctctcagctcagcagtcagagtgcactcgtcattgcgttcga

SEQ ID NO: 4624 - DNA, 30 bp, Homo sapiens
  chr6:13615555-13615585
  hyper
ggtcagaggtcagacggtctagcgctgcgt

SEQ ID NO: 4625 - DNA, 30 bp, Homo sapiens
  chr6:13924919-13924949
  hyper
ccctgggctcgctccgctttagccttcccc

SEQ ID NO: 4626 - DNA, 30 bp, Homo sapiens
  chr6:13925494-13925524
  hyper
gcggagcgcccgcgcgggctgcacctgctc

SEQ ID NO: 4627 - DNA, 108 bp, Homo sapiens
  chr6:14117385-14117493
  hyper
tataatttaaacaggacggtactgactgataacctcccggggaaggcagggagccaagtactacagacttgtatgtttccatggaaatctaacgcgcctttgattatc

SEQ ID NO: 4628 - DNA, 129 bp, Homo sapiens
  chr6:14211102-14211231
  hyper
cgcctgcttcctacccgcgccgccgcccactgccccgtacaggggtcgcagccgtggagcgtgggaatgggacagtcccattttacagctctcgttcatcccgcctgcggcaggcggctcctgacaggg

SEQ ID NO: 4629 - DNA, 30 bp, Homo sapiens
  chr6:15810289-15810319
  hyper
tgtcactggaacctacgtgcaggtgccagg

SEQ ID NO: 4630 - DNA, 30 bp, Homo sapiens
  chr6:16130087-16130117
  hyper
gggcccttgtctcacgctgcttctcaggct

SEQ ID NO: 4631 - DNA, 30 bp, Homo sapiens
  chr6:16761870-16761900
  hyper
gagcagttggctgccgccgccgcagctcaa

SEQ ID NO: 4632 - DNA, 153 bp, Homo sapiens
  chr6:16763512-16763665
  hyper
aaggtgaaggttagtacgtaagagcataaccgggtaaaatgtcccctcacccctatcctcacccccgcccccaacaccctgcttggcaaagacgacttcagaaaggagcagaagcttgttggctttatatagaaaagacgtatgctttgtgct

SEQ ID NO: 4633 - DNA, 141 bp, Homo sapiens
  chr6:17101955-17102096
  hyper
cctcgcatgccacacgatcaccttcactacagacagtgtctaaaaacaaggatgtggtccaggcaccaggggtaggggcgtgtcacacacaccgtgtcttacaaagaggaaaaataagaggttcccgcaagatgcttgcga

SEQ ID NO: 4634 - DNA, 1220 bp, Homo sapiens
  chr6:17281128-17282348
  hyper
cgccccaggtgctgccgcggccaatcgcaggcgtccggcccgcccccctccccagccgggcgtcgacccccggcccgcgggggaagggagcagagaggtggagagctgtcctcggcactcgtcttccagatcccacggcgggagggacagaccagagccgaagctgcgcggagttcctcgcccctggccccgccgccgcgccccccgcccgcttcggcgctcggacgctcttcccgcggaccctccccacaccccacccaaggcacctgattcctaaggaagaaaaatctacctctaaagcacccgcttcttcgcttgagaactaccctctcttttcatttttggcctccccgccgggtgagtggaaaccgcttgcacattctatagaacccgattctaatccagacgatccggagaatttgtacggtgaccggcagggggggcgggaggagagagcgaagtcaagtctccagggccgctggcgacttcggaagccgcgcgcccggcgctctcggccgcccccggccgctcgcccccgccgcgccgccgccctcgcccccgggctcgcccttggcccccggcggccgcgaaagggtgcgggagacgcggagccggaggaggaggcgcagccgctgcccgagccgcagccgcagccggagcccgagccgcggggcgggtgcgaagatgcacacgacccagaaggacacgacgtacaccaagatcttcgtcggggggctgccctaccacaccaccgacgccagcctgcgcaagtacttcgaggtcttcggcgagatcgaggaggcggtggtcatcaccgaccggcagacgggcaagtcccggggctatggatttgtaagttgcacggactgggggtgacggggagggacggagtggcggctgaccccggggatcgggagcttggagtgaggggctcggcgtgacccgtgaggagccccgcgggtagagcggcgctgccccttcgctccggggtgaactgaaactttgctaggggagagggtcggcgccagcctcgcggggttcggagaagacccagcgctgtgcgaggtcgggggccgggcagggcagagcaggggtgaaaggagagacctgtaatgacggcgggatttggggtgcggagggttgcgagggaggggccgcaaccctgaacaattgcattcccgggctggatgccggttgttaagcgcgctgttgctttgtaa

SEQ ID NO: 4635 - DNA, 608 bp, Homo sapiens
  chr6:17393824-17394432
  hyper
cgactctcccctggagcagcgtgactgacaccggctcctattcagctgggaggagggagaggggaggagaaggggagggccgcgggaggagggtacgagtggccgaccacggatttgcattgccgaggacgggaccccagggcagcgaagcaggtaatcctgcagcggtcggggcccggcgaggcggggaggggtcggggtgcaggtgcggggggcgcctggcggcgggcgctggcaagttgagcccgatgggtggggtagggaagcggccgggacgctgcggctgtggcagcagcgcgaggggaataaaggcggcgcgggcgcgggggccggggcgcggcgacccgggcgcggggcgcgggcgcgggcggactcccatctgggtcagcggagcggcgcgccctgcccccgcctccccagctccggcgtcctggccgctcggaaggcggggtgcgggcaggagctgcccggggttggcgggcggccgcggcctccccaccccagcgccgccgcccgcccggccgctctaactttggggggtctcgtccaccgggctgtgagtcttccaggggggtgggggtgggagtcattgcgccggctctgaccag

SEQ ID NO: 4636 - DNA, 112 bp, Homo sapiens
  chr6:17987164-17987276
  hyper
gcgacaaacttgaagccgtcctcctaacaataggaaagagcactcccattttcctggctcaaacttgcgggaccccgcgaggctggatcctcccagccgccctctcggaacc

SEQ ID NO: 4637 - DNA, 31 bp, Homo sapiens
  chr6:17987686-17987717
  hyper
tccgacatgttggctgcgctcgcccggccgc

SEQ ID NO: 4638 - DNA, 30 bp, Homo sapiens
  chr6:18155901-18155931
  hyper
ttccccctgtgcagcgcccctcgccgtggt

SEQ ID NO: 4639 - DNA, 1475 bp, Homo sapiens
  chr6:18263765-18265240
  hyper
atccaagacctacaaacttcccgtcaaatgatgaaatgttaacgaacgtttagagcggacgagaagtcggctgcactccaatacatctctaccacgctaacaaatactttaaaaaccggaatacacaaagtcaattctacgccatcgctcaaaacaaaagcagataaattgtgcacacattctcgctgaaaatcactccgacttcacgcctctaaacaccaaaagagcaagaaaactgtttcctgggtgaaaaatacaaaaaaacttcggtctgaaaaattcatcagttgggatgcgactccccccacctttttcctcctcctcctcctcctcgtcgtcctcgtcctcttcctcctcgctctcctctctgggaccgggcatttcgggttctttctcggacgcgggctgggtgggggttccctccccctccgcagcaggggccgaggcggacatgctgtgaacctgcatgcgggaagaaagccggacgtctcggtcctcctactcccgcaggcaggaccgggcggccaccctgaatgatgctacccttcccgcgggacacctgccctgaaagttgcctcctcccatagccgggaccgcagcgctcagtccccaggggcggcttccctcccgctccgccgccgccgtccagggattcccgaggcgggaaaccgcgcccgctgccccgcgtgcgcgcgcgcccgcccggcctgcgctgttcccggcccggcccgagctgccggccctccacgtcccctcccccgccccaggccgccgtccaaatggccgcgtccctcccccgtcggccgcggcaggggcgaccgggcctccggcgtcccgaagcagcccttaccgcggatttcggccgccgcgggcctggcacgcgagggcacgaggaggttctgggaggcggcggcggccgacgccgaggagaaggcgcgcgggccgctgtctggcgtgacgctcgcgccgcgcgctcggctccccagaatcaacaagattttcaaaatggcggttcgggaaggagagcgggaatgcggcgaccaatcagggccgcgagctgggagttggcgggcgcggggcgggggaggcggggcggccgggtgcctccgcgggaagctcgggcgggcgggaccgcgaggggtcgcctcggccgcgggcggagggatgcgcgcgcggggctctccccggctgcgcctggagtgtggtcggcgctcgggccccggagtgcgggcgggctgtgtcccgcggggcgggcgggagcgggaggcgaggcggcctggcagcgcggaacggaaggacgctagggggcctgcgtgtttattgtttccacggtcgcttcctggaaaagatgatgagcagtcccgggccgcggaggggcgcggcgggcgcggtaaagaagtttagagatctccgaagtcgctatcgacagtgttactctgaggcggaggagaattaatcagcggtctcatcaatgc

SEQ ID NO: 4640 - DNA, 583 bp, Homo sapiens
  chr6:18277377-18277960
  hyper
aggttttctgaagttgcccagcgcctagaatttcaaggaccgcattcgctgcctccttcctaaagagggtgcgtttgtggggaaggtgagtgcgcgcgcgcggagggagggccggccgcggagaggggccaaaactcttcggaatcagcagccagagaggctctgagggcgcccgcggggcggaggggagcggggcagagggccgccggggcgagggccgaggaggggtccgagacgcgccaaggggctggtagctaggcgacctgaatgtcttccatacctgaacccgcagcctgaagaagctgatagcggaccccgagcgcgcgcgcgccttggcgggagccctgcgcctcccggggtctccctgctccttacttggacctcgggcgcaaggtaaggaggggcacggggtgcagcgttcgccctcgagctgcctggagcctctgcgaggggccagttcggcctccccgaggctgtcaccgcctccccttctgctccttccctttctccgtccccaggtcccctccgcgcagagctgaagccgcggcgggcggcccacgggggatcagaccctcgggcatcc

SEQ ID NO: 4641 - DNA, 77 bp, Homo sapiens
  chr6:18277979-18278056
  hyper
cgccggacccccacctcttctccaagctccactcccgacttttcttccccgcccccgggaagctctggaaacccgca

SEQ ID NO: 4642 - DNA, 30 bp, Homo sapiens
  chr6:19691639-19691669
  hyper
aaattagcctacaccgtgatataaattggt

SEQ ID NO: 4643 - DNA, 30 bp, Homo sapiens
  chr6:19692202-19692232
  hyper
ccacgagccccattcgcggtggaaaggggc

SEQ ID NO: 4644 - DNA, 30 bp, Homo sapiens
  chr6:19804769-19804799
  hyper
agacagcctgcaagcgcgcttcagaaagga

SEQ ID NO: 4645 - DNA, 38 bp, Homo sapiens
  chr6:19805001-19805039
  hyper
tgtcagggcgaccgcccggccggcgccagcggagcggg

SEQ ID NO: 4646 - DNA, 306 bp, Homo sapiens
  chr6:19836898-19837204
  hyper
tagcattttttaaaaagaaaacggaaaggctacacattccattccatcattatggtttcggcaaatgtgaaaaggcgaataatgaaacggaggagggaaatatagaacagaatgaacgtgccttcttgaacagcgcgtctttcttaaggcactggaatcccacggatggagtgatgggtggcggagggtccctgggcgccgtgctattaggagtggcagggtatccgcgagcagggcccaggcgctccctcagcagcctagtcgggataaggggggcggtggagagtgaattccggccgcacattc

SEQ ID NO: 4647 - DNA, 96 bp, Homo sapiens
  chr6:19837269-19837365
  hyper
cgactcccactcagctctcttttctcagaaccccgacccacagcgttgacggaatggagtgcccttcccattggcccgagcgtcattccccgaggt

SEQ ID NO: 4648 - DNA, 1311 bp, Homo sapiens
  chr6:19838010-19839321
  hyper
cctcgggccgcaaggcgccgtcgggctgcggcggcggggagctggcgctgcgctgcctggccgagcacggccacagcctgggtggctccgcagccgcggcggcggcggcggcggcagcgcgctgtaaggcggccgaggcggcggccgacgagccggcgctgtgcctgcagtgcgatatgaacgactgctatagccgcctgcggaggctggtgcccaccatcccgcccaacaagaaagtcagcaaagtggagatcctgcagcacgttatcgactacatcctggacctgcagctggcgctggagacgcacccggccctgctgaggcagccaccaccgcccgcgccgccacaccacccggccgggacctgtccagccgcgccgccgcggaccccgctcactgcgctcaacaccgacccggtgagaggccgggcgccggccgtgggcggacgccgcgggggatgggaggttggtggcgtggtggcgggacgcgggcgctcaccgtcctccgggcaggggcgggccaggaatgacagccccctccccctgctcctccgggctcccccgggccgccagcagccggccgggctcggcgagcgcgggtccgggagaacgcgcagggcgggactcggggctgtgggcgccctgggctgtcaagtcccgcctgagcccggaggggcccccccggctacaggctggggtgggggcgtcggcgcgccagcctgatttccgaggacaatccaggaccgtgtcgagcgcgttgtttgcgcctgctaacctttcccttggtgttcggttgctgttccaggccggcgcggtgaacaagcagggcgacagcattctgtgccgctgagccgcgctgtccaggtgagcgcgcatttcccgtctcgggtggccggtcaccagagacgcccgtccccgagggcttccggggccaggcaccgcggtgttctttgcccccagcgtttctgagagcaaactcccaaggaagtaaatcccctctctccctgccacctaagtagcaagtaaacccgtacttagccttagaactcgaggttcagtctcggtggagacgggtcagcccttgtccccgccgtccccgtgttttttctggtggtcagcgggctcttctgccttccctagttcccgagggagggcaccctcgtgggcatgggagctgccccggtgtcctcccgtgcagtctgtcacccacaaagggggacgcgggcagggcgccggagtgggtcccctctccgggcttcccgagggccgcagctgcctgctcggcgcctggcccggccgcgggcgggtgttg

SEQ ID NO: 4649 - DNA, 634 bp, Homo sapiens
  chr6:20212359-20212993
  hyper
cagttacctggtccagcgggatgcccaggagctcgctgagcgggtgcaggtaggtggagcccgtggtgcggtaggaaaggctggacggctgcggctctgctgccatcctgcatcttcgggaggtggctgcccctgtcccagcccgcaacaccccctgctcggcgtcctcccgcccgggtgctcttgggtggttgccccgagaggcgcacggccgcctggttcgcgggggagcgaacgggaggccggggaatgcgaaccggcgcaaactctcgaggcgcaaactctcgaggcgcaaacttggctttggcgctggcgctgcagccacgggcgccgtaggagggccgggcccaaggcgccccgcttcccgctcccttcctctccgcgcccattggcccggccgctcgggacggccccgagaggagggaaggagggaggaaaagtggggactccgagcccggcccccaagcgccgcccggcccgcccagcctggcctgcaccgaggccgaccgggagagggaaagcgacgccagcgggcgccgccgcctggccctgcagctggaggcgggacgcgcctttcctcctcccgggctgaccgtcctagccccccgccagacaaaacgacctcacccagcgg

SEQ ID NO: 4650 - DNA, 59 bp, Homo sapiens
  chr6:20401173-20401232
  hyper
gaagcgtgtactttttcggattactgcttggcggattagaaacccgtagatcagttcta

SEQ ID NO: 4651 - DNA, 31 bp, Homo sapiens
  chr6:21332629-21332660
  hyper
agaattgaaagtactgcgtattaaacagctt

SEQ ID NO: 4652 - DNA, 31 bp, Homo sapiens
  chr6:21588775-21588806
  hyper
acccccccaacctatccgcgaccggttgcaa

SEQ ID NO: 4653 - DNA, 1132 bp, Homo sapiens
  chr6:21594474-21595606
  hyper
gacagcaaactgcagcgcggtgagagagcgagagagagggagagagagactctccagcctgggaactataactcctctgcgagaggcggagaactccttccccaaatcttttggggacttttctctctttacccacctccgcccctgcgaggagttgaggggccagttcggccgccgcgcgcgtcttcccgttcggcgtgtgcttggcccggggaaccgggagggcccggcgatcgcgcggcggccgccgcgagggtgtgagcgcgcgtgggcgcccgccgagccgaggccatggtgcagcaaaccaacaatgccgagaacacggaagcgctgctggccggcgagagctcggactcgggcgccggcctcgagctgggaatcgcctcctcccccacgcccggctccaccgcctccacgggcggcaaggccgacgacccgagctggtgcaagaccccgagtgggcacatcaagcgacccatgaacgccttcatggtgtggtcgcagatcgagcggcgcaagatcatggagcagtcgcccgacatgcacaacgccgagatctccaagcggctgggcaaacgctggaagctgctcaaagacagcgacaagatccctttcattcgagaggcggagcggctgcgcctcaagcacatggctgactaccccgactacaagtaccggcccaggaagaaggtgaagtccggcaacgccaactccagctcctcggccgccgcctcctccaagccgggggagaagggagacaaggtcggtggcagtggcgggggcggccatgggggcggcggcggcggcgggagcagcaacgcggggggaggaggcggcggtgcgagtggcggcggcgccaactccaaaccggcgcagaaaaagagctgcggctccaaagtggcgggcggcgcgggcggtggggttagcaaaccgcacgccaagctcatcctggcaggcggcggcggcggcgggaaagcagcggctgccgccgccgcctccttcgccgccgaacaggcgggggccgccgccctgctgcccctgggcgccgccgccgaccaccactcgctgtacaaggcgcggactcccagcgcctcggcctccgcctcctcggcagcctcggcctccgcagcgc

SEQ ID NO: 4654 - DNA, 603 bp, Homo sapiens
  chr6:21664625-21665228
  hyper
ggaacgggacgcgcaggaacccggcccgacgggcgcggctcacacccgtgctcttcctgcgctctcggcctcactttgcggccagagccgcggccctgcgcgtggccggcggccgcttctttatctccgaccccactgcccagtactgtacgcgtccagactaaagaaacatcattcgcttaaggggctgggaaaagcgcgtgctccgctcgccctggcaccgcgggtcgcccagctcgcagactgggacgggcggtgcaagaggtggtgctccctgtccaggaggggacgcggaagagggcatctctggtcccgggatgcgattgtcccggtttctccttctggcccactcgccgcgcgcacgaactctaggggaagttggttgtaaagtttccgagagcggcgtgggctggtgcgagtgaagcgcggggcgggggaggcgaggacagaagctctcctcgcggcgtctttgttctgctctggaggagagaccttggcaaggagtcgccgggcgggtgcagggacctaccgccaccacattccggacccagcgggagccctcctcttaatgcccctccccccgcaagccaacccaggacatag

SEQ ID NO: 4655 - DNA, 1453 bp, Homo sapiens
  chr6:21665486-21666939
  hyper
gatctagaaggaaaacgagtgctgctctgagtcactcagcgagctaatgctatggcccgaagttgggatcagggtcgaggggtgggggaccatgtggatggggtcccaattctggaggttgagaatgactggaagggacctggggaagggtcgggagctgttcctggtccgagacacctgatttgtcccggacaaggcagtgggggaggggaaggaaagaggggatgctcggctgggacgtgtcgcggcagggggtggaggatgaggaggcggcctgggaccccgagtcagatctttggggtgagcacgaggacgtggtgtagggaagaggacgagtgagcagcgcctggctgtagggtcagagggcgcctggtcatcctgagagccttgccttcgcagtttgagattaggggaagttcggggcctgagaaggtgggcgcgatgctggagctgggaattcttcctcggagcccctggaccgagttgcgctgcgcctgcagcaacaggtagccccgagggatgggcggaggccccggccgaacccggagctggcctttgtcctgccaattagagggctctccagagggacagcgtgggtgggggtaggtggggaagggcgggagaggagtttcctaacacttggagcccctttgagttgttctgtgtattgggtggaggagggtgaatccgagaggagggaggagggtgaatccgagaggaggaaggaggatgaagagcctagcctgcgccccacctctgattgtgtaagcgcctttatctagggttgaccccctaccctttgcattttgtctcttgggatgacgaaaaatggacagaaactcgacgcccaagtgaatgtttcacattgattggcagggaaagtgcaaacaaagaggtgcatctccgggaaacaatgattttggagatcccctgcccaccaccccagacttgtgcgcggtgcggagggggccagggctggcatctcccggggaaagtttcgagcctggcagtgggaggagaccgtctgggcagagttgtgatgaactggggaccgagcagccccagctcgcctcggaggttcccgagccgggcgggagatgcggggagagggagggggcggggagggaggggagggagagaggaagaaggggtgagagggagaaacctgccgccgctcgccgcctctttgtctgctccgggacttggaacaaaagggggaactctgatgaactctctttcctcccctctcccccggacgccggggtatctccctctcgcaactttgccgccccgactttctctgctgtcaggccgggaaaaagtgtccgaacgcctcgtggactgcagcgggggaaatgtcccttaaaagtgcgacgaagtggggaagaaggtgagtggggactgttgtcttgtttacctctctcccctcaactcgccccgctccccgcccttc

SEQ ID NO: 4656 - DNA, 31 bp, Homo sapiens
  chr6:21783024-21783055
  hyper
gctagcttcacaaaatcgtttcaaaggttaa

SEQ ID NO: 4657 - DNA, 183 bp, Homo sapiens
  chr6:22146871-22147054
  hyper
tgcatctccgtgggcacgcaagcttcccctggttacctgagctgctcctgccgtctcccgcctgggcttcgccgtggtgcacccgatcccggaatcgtgcgtctgcgccctgcgaaagaaggacctgctggcggagctccggccggggtctcctgcctcgcagctgggcgaggggacttggag

SEQ ID NO: 4658 - DNA, 290 bp, Homo sapiens
  chr6:24360081-24360371
  hyper
cctggcggcgaagctcgggtgcgcatcacgtgaagacagcaggcagcgcgcaagcggggccctggttggggaggcgggcccaggaggtgccctccgccgtagtacctaccgacactcgcgtgctggagaggggaggggagctcgggcgccggccgcgcgggggcggggcggtgcggctcgggtggcacagtggtgaactctgcggcggctgcgcgccgctcacgctgttcctccagctgctgttacctctgcgggcctctctcacccaaggggaacggagttgttatttc

SEQ ID NO: 4659 - DNA, 150 bp, Homo sapiens
  chr6:24494722-24494872
  hyper
caggagctacaactgaagaagcgtgatcacggccttggcatttagggcaggcaccagcgcatctatggaccgcgcacaaattccggggatgccgaatttgggggatgctaaggggagagagtgggtctctagcagcgattgggggctcag

SEQ ID NO: 4660 - DNA, 559 bp, Homo sapiens
  chr6:24911196-24911755
  hyper
aggaagtcgggtggacgcgagctgtccccagcgccggctgccctgccgcgtccgctcgcagcagctgcggcgcgcggggtgaagttgcggggctggcgggcgcgagggtggcggagcgcggagctagagcggcggagcgggcggaggggcgggagccgtgaggagggggaggcgcggcgcgggggccggcggcgtcacttgtgctgggaggggagggcgggtggagacagctgcttgacagctacttcagcccaactccaggaggctgcgcttcggtgcctgcttccagctgatcgccggcacgccaggctcctttgcaagagctggcgcggcagctttggagtgacccgtggaatcgcgccggggagcgagcccggtggatccagcgcgctggagggagagggcagaggaaaggagccgaggcaaggaaaggccctttcagctaaccttttgggatctttcatacaagctgggctgtgcattgaaaaaaatgaggcggtggtgtatggggtgggggcggtgtgagggtgaggttggctgcccacggcaagggttgtgc

SEQ ID NO: 4661 - DNA, 506 bp, Homo sapiens
  chr6:26027157-26027663
  hyper
tgacgaaaagattaaccgccgaagccgtacagagtgcgtccttgacgcttgagcgcgtaaaccacatccatggcagtgacagtcttgcgcttggcgtgctccgtgtaggtcacggcgtcccggatcacgttctccagaaacaccttgagaacgccacgagtctcctcataaatcaaaccggaaattcgcttaaccccaccacgcctagcaaggcgccgaatggccggtttggtgatgccttggatgttatcccgcagcacttttcggtgacgcttggcacctcccttacccaaacctttaccgcctttgccgcgaccagacatgtctaaccagctgacaacaaaaaccaggtacgcgaaaagaaagcaagccacgagcatttatacacgaacatcggaccttattgagaactgaaagcgggagcgaggataaggaggcgttgctgcctcactttttgctccgcccctcgaggggcagtgacctaaggactgcgagggagaacacaa

SEQ ID NO: 4662 - DNA, 864 bp, Homo sapiens
  chr6:26031859-26032723
  hyper
gaaaaagtgactttacatttacgctctttctccgcgaatgcggcgagcgagctggatgtctttgggcataatagtcactcgcttagcatggatggcgcaaaggtttgtgtcctcaaagagccctaccaagtaggcctcacaagcctcctgcagcgccatcaccgcagagctctggaagcgaagatcggtcttgaagtcttgggcgatttctcgcaccaggcgctggaacggcagcttccgaatcagcaactcggtcgacttttggtagcggcggatctcgcgcagagccacagtgcccgggcggtaacggtgaggctttttcacgccgccggtagccggcgcgctcttgcgagcagccttggtagccagctgcttgcgtggcgctttaccgccggtggatttccgagctgtctgtttagtacgagccatggcaaaaccacagaaaagcttgcctgcagagacgtctgtggaggaaaggaaagagctactcttcttttatagagtcagaccaccaactattggacccaagaaaattcaaaaatccccgcgcccttcttggattggtccatctctgtgcctggttgcagattaagagaggctcctgcccattaccgtagctactctgacgtcattttgttaaccccttagctgctatatccactgtggacaagtcttgtactggaaaagtttcctgaagtcttaaaatttacaaccacacaaagcaacgcggaaacctccaattgtttctagttaaaatataaaaaagaaatcagagaatattggagacgattagggaaatttgcatatgcgctttatttaaaattgtatttttctgggtgtcgcataagaagtgtgggcaattag

SEQ ID NO: 4663 - DNA, 36 bp, Homo sapiens
  chr6:26032842-26032878
  hyper
cactgcagcttgggcgagagggagactccaccccaa

SEQ ID NO: 4664 - DNA, 442 bp, Homo sapiens
  chr6:26033433-26033875
  hyper
agttttcttaggcagcagcaccgcctgaatattaggcaaaacgccaccctgcgcgatggtcacacgccccaagagtttattaagctcctcgtcattgcggatggccaattgcaggtggcgcgggatgatgcgggtcttcttgttgtcgcgggccgcattgcccgccagctccaggatctcggcggtcaggtactcaagcaccgccgcgagatacaccggcgcgccagccccgacgcgctcggagtagttgcctttgcggagcaggcggtgcactcggcccacaggaaactgcaaacctgcacgagaagaccgagtcttagccttggcgcgagctttaccgccttgtttgccgcgaccagacataactacttctgataagggaaaatcgccacaagaaaatgtaatgaaactacattagaacgcaaggcagagaagtatttat

SEQ ID NO: 4665 - DNA, 609 bp, Homo sapiens
  chr6:26087636-26088245
  hyper
tttaacggggacgtgcggccagagctggggaaatgggcccgcgagccaggccggcgcttctcctcctgatgcttttgcagaccgcggtcctgcaggggcgcttgctgcgtgagtccgagggctgcgggcgaactaggggcgcggcgggggtggaaaaatcgaaactagctttttctttgcgcttgggagtttgctaactttggaggacctgctcaaccctatccgcaagcccctctccctactttctgcgtccagaccccgtgagggagtgcctaccactgaactgcagataggggtccctcgccccaggacctgccccctcccccggctgtcccggctctgcggagtgacttttggaaccgcccactcccttcccccaactagaatgcttttaaataaatctcgtagttcctcacttgagctgagctaagcctggggctccttgaacctggaactcgggtttatttccaatgtcagctgtgcagttttttccccagtcatctccaaacaggaagttcttccctgagtgcttgccgagaaggctgagcaaacccacagcaggatccgcacggggtttccacctcagaacgaatgcgttgggcggtgggg

SEQ ID NO: 4666 - DNA, 75 bp, Homo sapiens
  chr6:26125922-26125997
  hyper
tttcctggattctgtgaatctcgccgaggttttcttccggatctcggtttctgcatttttttgtttgtttgcttg

SEQ ID NO: 4667 - DNA, 224 bp, Homo sapiens
  chr6:26126236-26126460
  hyper
gattacaggcgtgagccaccgcgcccggccggtttctgctttgatcggaattaagtgggcagaaaagtctaggcgggctaagtcttgcctatgcatctgcgcccagctgctcagactggccaaacagacccagtcgtttagtctaacgcttctggaactccactgaagcgttttgcattgtttcgtttggagccttcaaatccgagtgtgtggcaggagataat

SEQ ID NO: 4668 - DNA, 30 bp, Homo sapiens
  chr6:26156472-26156502
  hyper
ggctgccagcgaggcgggctggacagcgca

SEQ ID NO: 4669 - DNA, 211 bp, Homo sapiens
  chr6:26171958-26172169
  hyper
tactaaatagccacacaaagccggaaaaaagcaaagaatttcaaaccgaagatgagaggtcctgaaaaataacagcggtcatcctactcccggtgcggctatgcggccatgaaaaggagtcttggggccggtcgtgcccctccacgcaggctccctcatagggtcatcccatcaaccctcgccaaaaacgccggccccctcatagggccgt

SEQ ID NO: 4670 - DNA, 139 bp, Homo sapiens
  chr6:26172268-26172407
  hyper
cgtcggcccggcgcgcgcgtccgggaggttgcccgtaggccgctaactggtggttcccagtccccgccgactcggcctctttcttctgcggccaccagatcgcgggatatcggagacttcgaacaatccgctggagtcc

SEQ ID NO: 4671 - DNA, 30 bp, Homo sapiens
  chr6:26172916-26172946
  hyper
agtagctgtaaatacgcctcccaactccaa

SEQ ID NO: 4672 - DNA, 753 bp, Homo sapiens
  chr6:26188698-26189451
  hyper
gaggcacaagaatcgtttgaacccgggaggcggagactgcagattgccgagatcgcgccattgattactccagcatgggcgacacagcaagagtgaaaataaactttaatacactatcctcaccggccagtaagatatgaagccaaggcgtaataagaccatttaacttgaaaaccggagctactaaacacgtgaaactacacttttagcagtgactactactctttctcctgagtggataggtggccctgaaaagggccgttggttttgcggtagtgtactgtagaggtaagctcagccgccgaagccataaagagtgcgtccctggcgcttgagcgcgtacaccacgtccatggctgtgactgtcttgcgtttggcgtgttccgtgtaggtgacagcatcgcggattacattttccaggaaaactttcagcactccgcgagtttcctcataaatgaggccagaaatacgcttgacgccgccgcggcgagccaggcggcggatagcgggcttggtgattccttggatattgtcacgcaataccttacggtgacgcttggcgccacccttacctagaccctttccgcccttaccgcggccagacatcttgaaaccacagctgttaaatctgtaacgcaatacgtctggcagagccacgcagcacttttataatagcatgacggacctgtttgaaaacctcatgagaaggggcgggaaccacagtcagttcccgcccttctgtgcaattctccc

SEQ ID NO: 4673 - DNA, 40 bp, Homo sapiens
  chr6:26197325-26197365
  hyper
ctcgcgcagagccaccgtgccgggccggtaacggtggggc

SEQ ID NO: 4674 - DNA, 30 bp, Homo sapiens
  chr6:26197814-26197844
  hyper
actggctttgatcaacgttttaaaaagacg

SEQ ID NO: 4675 - DNA, 134 bp, Homo sapiens
  chr6:26198478-26198612
  hyper
gcaatcctaacgagccgctgcattgatcgatttaaattacatgtgacataaagtctctttgcattttaattagtttgcttttttgggtttttgtttgttttgagacagtctcgctctgtcgccgaaactggagt

SEQ ID NO: 4676 - DNA, 80 bp, Homo sapiens
  chr6:26198851-26198931
  hyper
gccccgccaatttgcttatgtatttttatggcatctttaaaatggacggttagtttcacgattcagtgttaagaacaccc

SEQ ID NO: 4677 - DNA, 766 bp, Homo sapiens
  chr6:26199131-26199897
  hyper
cctggatgttgggcagaacaccgccctgagcaattgtgactttacccagcaacttgtttagctcctcgtcgttgcggatggccagctgcaggtgtcgggggatgatgcgggtcttcttgttgtcgcgggcggcgttgcccgccagctccaggatctcggcggtcaggtactccaacaccgccgccagatacactggcgcgccggccccgactcgctcggagtagttgcccttgcggagcaagcggtgtacgcggcccacagggaactggagtccggcccgcgaagagcgggtcttagccttagctcgggcctttccgccttgcttgccgcgtccggacattttgaattcttaaaaacgatgttaagcaatgaagacaaaaatgtaaaagtgaattttgttagcaagtgagaaactattatacttggaggtcgaattgtaaataacgctatttgattggctagaacaaccaaccaattgcaaagaaacgctagaatcacctaatttgcataccacagggcacacagagacaattcatccaatcaatgtgtaagcttttaaatgccagtttacgataggagctctacaaatattaccagctgcagagtgaggacacttgcatttctctttaggttgtggacgaagtgtttatttatcatgcctgaacctgctaagtccgctcctgctccaaaaaagggctccaaaaaggcggtgaccaaggcgcagaagaaggatggtaagaagcgcaagcgtagccgcaaggagagc

SEQ ID NO: 4678 - DNA, 24 bp, Homo sapiens
  chr6:26200171-26200195
  hyper
aacgtcttcatacccaatcccaaa

SEQ ID NO: 4679 - DNA, 1288 bp, Homo sapiens
  chr6:26204500-26205788
  hyper
agattactgcagttccggtcttgtgagccaaagctcctgttcaatcgtcctagagcatcccaagcagcaaatgattttaaacatgttaatgtatttaatctcatttagttgttaaaatatgcctaaatttcctctttgggaacgcaagacttgcagagatgactccatggagagcggactctgccggcgggaactggagtcgttggtgacgtcatcccagtctgatctgtgaagggtagggccagcaggcagcaccaaagttcccgtatgcgcgttttcagtcttcatttaggtccgaattcccggcatataagaatactaccgtcgcttgtttttcagatttttgcggctattttcgttggtgtgttggtcatgtctggtcgcggcaaaggcggaaagggactgggtaaaggaggcgctaagcgtcaccgtaaggtcctgcgagataacatccagggcattaccaagcctgccatccggcgccttgctcgtcgcgggggtgtcaagcgcatttctggtctcatctacgaggagactcgcggggttctgaaggtgtttctggaaaacgtgattcgtgatgctgtgacttacacggagcacgccaaacgcaagacagtgacagcgatggatgtggtctacgcgctgaagagacagggacgcactctttacggcttcggcggctaatgctaccgcttaaacgactcagcatctcgacttcccaaatcaaaggcccttttcagggccgcccacagttttccgcaaaagagctcatgacttgttagacgattggttggtctctttataagttaattgttcctgtcaacaggtacgtatatttttcagccgttttttttttttcgttccaaattacatttggggtttcggcatacgattttttaggctacgatccttttatgtttattgtagtagggccttagattgcactgaaaaggctagggtaatagtgtctgtttaccttaccacttttattttgagtacctaaaaatgcatggttttcgacataagtgggaaaaccgcaagacactgcgtaaccgctcaaaatggcggagagcgaagaacaaagccggtgcctggcaatgggccggacccgcgaattagcgcaaccaatcatcttcctggaaaggagtgtgggccttaaattctagcggcctgttttctattacttaacctaacgaccgagtttaggtgtgtagaagttcctggggtagataagctcacgcaaggagaggttgcaagcattcatttcggaattctattaagccaaccc

SEQ ID NO: 4680 - DNA, 62 bp, Homo sapiens
  chr6:26205991-26206053
  hyper
catccatcatgattgcgtccttatccctccctgatttcctgttttctcgcccttctcgctac

SEQ ID NO: 4681 - DNA, 30 bp, Homo sapiens
  chr6:26206496-26206526
  hyper
ggcttgattcttaatcgttttacttggctt

SEQ ID NO: 4682 - DNA, 301 bp, Homo sapiens
  chr6:26216370-26216671
  hyper
attacaaaatcggaaaaattattccctagaaaacggtgaaattcaatattaaagctctttatgtgagacttgagtggctctgaaaagagcctttgagttttaaagcacctaagcacacatttacttggagcttgtatacttggtgacagccttggtaccttcggacactgcgtgcttggccagctctccgggaagcagcagacgcacggcggtctggatctccctggaggtaatggtcgagcgcttgttgtagtgggccagacgggaagcctcgcctgcgatgcgttcgaagatgtcgtta

SEQ ID NO: 4683 - DNA, 70 bp, Homo sapiens
  chr6:26216790-26216860
  hyper
gccatccttcttctgcgccttggtcacagccttcttggaacccttcttcggagcaggagctgacttagct

SEQ ID NO: 4684 - DNA, 395 bp, Homo sapiens
  chr6:26217190-26217585
  hyper
taggaagccactatgtctggacgtggaaagcaaggcggcaaagctcgggcaaaagctaaaacgcgttcttccagggccggtcttcagtttccagttggccgtgtgcaccgcctcctccgcaaaggcaactactccgaacgagtcggggccggcgctccagtgtacctggcagcggtgctggaatatctgacggccgagatcttagagctagctggcaacgcggctcgcgacaataagaagacccgcatcatcccgcgccacctgcagctagccatccgcaacgacgaggagctaaataagcttctaggtcgcgtgaccatcgcgcagggcggtgtcctgcccaacatccaggccgtattgctgcctaagaagacggagagccaccataaggccaa

SEQ ID NO: 4685 - DNA, 30 bp, Homo sapiens
  chr6:26217875-26217905
  hyper
ccaaggtttcactgcgttattttgtgtata

SEQ ID NO: 4686 - DNA, 1547 bp, Homo sapiens
  chr6:26233893-26235440
  hyper
acaaatacagtacctgagggccgatatcccaaagctaaggcttatcaaaggcctgcgaaaagacagacaccgggcaccaccagcagttggccattctcaacgaccagctgcacaagatcgtgggccggaagcaccttgggcatgccacgtactgctcacaaccaggacgggatgtgctcaggaagtcacctcaacgctaaagtaaactaaagcatttacaccacatccctgtgtcagaaataaaattttttcagggccacttttaagcgccgcgctttaacagaaatcggccggccaatcacacaccaccgcgggaatttgaagaaaaagtaggacctggtggctcaagtagccttagctatccggtgactgtggctgagactgagacggaaggatccttgcgcccaggctgctgggagctgttaataactgacccccaaccagcacgactaggatagaccgtggccgcacaacaccgcagcacccgcacccctctccaccccactcccccctccaaaaagcttcagctcttttgactgagacctgtgggtggctctgaaaagagccgtttaaaattttcaaaggggaacgtcccgccagtttcactttttcttcggagctgccttctttgcctttgtaaccttcggcttccccgacttaggcttggccgccttgggcttaggggctttggccttagctggactcttggcagctttttttggctgaggtgttttcacctttttcgcactcttggccactttcttggtcccagcagcggttgctggcttctttaccttcttaggagtctttttgatgcttttcttcggggtagcggcgccagccaccttcttgggcttcttggctgccccagcaggcttcctaggcttggctgcgccagcctttttggccttgggtttgccttccccggaagccgctttcttgttgagtttgaaggagccagaagcaccggtacctttggtctgcaccagagtacctttgctcaccaagctcttgaggccaagcttgatacggctgttgtttttttctacatcgtagccagcagccgcaagcgctttcttaagcgcggccagagaaacgccgctgcgctccttagaagctgccactgccttggtgataagctcagatactgggggtccggatgctttgcgtttcccagcagttgcgcctgccttcttcgcctttttcttcacaggtgttttttctgcgggtgcaggaatggtaggagcaagtggagcagtctccgacatgtttttgtcttcccagaaaagacaataagtaatctcaaactgtcagaacagcatgtcctctacgagggaggctgagggtttatatagagagacgctgagtgatgattggttccttgctccatgcgcggcgctgctggaaaaggactcctcgtatctaccgcgctgctgtgtttgttgccccttaaaaaagagtaaaaatataagaaatctgggcatgaaataattagagacttgggggaaactgatccgagagagttcgggcttcattcctgcctttgt

SEQ ID NO: 4687 - DNA, 450 bp, Homo sapiens
  chr6:26240633-26241083
  hyper
gttgttgtttgtcttcgatcatgtctggtagaggcaaaggtggtaaaggtttaggaaagggaggcgccaagcgccatcgcaaagtgctgcgtgacaacatacagggcatcacgaagcccgccatccgtcgcttggcccgacgcggcggcgtgaaacgcatttcgggcctcatttatgaggagacccgcggtgttcttaaggtgttcctggagaatgtgatacgggacgccgtaacctacacggagcacgccaagcgtaagacagtcactgcaatggatgttgtctacgcgctcaagcgccagggacgcactctgtacggctttggtggctgagcctcaccccggctttttatttaacagctcacccataaaaggcccttttcagggccacctccttcgtcacacgaagggctgtaactgatgacgacttgggtttcgttttgtaaatttg

SEQ ID NO: 4688 - DNA, 212 bp, Homo sapiens
  chr6:26249926-26250138
  hyper
tgttgttttgagacagggtttcgctgtcacccatggaggagtggagtggcgcgatctcggcttacttcaacggctgcctcccaggtccaagcgattctccttcctcagcccccgatatagctgggactgcaggagggcgccaccacacccgtatttttgttttttggttttgtacttttagtgaagacgggttttcactatgttaggcagac

SEQ ID NO: 4689 - DNA, 992 bp, Homo sapiens
  chr6:26250197-26251189
  hyper
tgggattacaaggcgtgagccgccactatcggccattttgaagacaatggccaagacacaaaagcctagtttagaagagccaccggccctgcccccatcccctaaccctccaccctccttgttttaggagacattactccctagtgctacggcgctttcaactgaaattgttggtggctctgaaaagagcctttggtttaagttggcgcacaccctcagtacaacttatgccctctctccgcgaatgcggcgagcgagctggatgtccttgggcatgatagtcactcgcttggcgtggatagcacacaggttggtgtcctcaaagagccccaccaggtaagcctcgcaggcctcctgcagcgccatcacagccgagctctggaagcgcaggtcggtcttgaagtcctgcgcgatctcacgtaccagacgctggaatggtagcttgcgaatcagtagctcagtcgatttctgatagcggcggatttcacggagggcgacagtaccaggcctgtagcggtggggcttcttcacgccaccggtggctggcgcgcttttgcgagccgccttagtggccagctgcttgcgcggggctttgccgccagtggacttacgagctgtttgcttcgtgcgtgccataggaatgggtttcaagcaatggtcacaactgaacaaacagttgttcttactcctatttataaaggcaaagtccttctgattggtccgaatcttccagtttcgcgccctgaattatgtagtgtgataggacttgtgatcagctactaggtctcattttagaaaatcttaacctatctaaatgcttttttcccctagttccttacattttattatgttttatgtgcctacctgtattacgtaccttcattgattttattttaatcagtttgtttgggattatgtttgacagacggaaatgaacgttctgcagttccggagcgattcaaaaataccgcgtttgagagtgattggtccag

SEQ ID NO: 4690 - DNA, 301 bp, Homo sapiens
  chr6:26251653-26251954
  hyper
ctacgttttttcccccgggaggtgtagaaaaggatttagggtaggtttcgcataaatatccaatcaaaaagtagacttgaatttaacttttttattggctgatttggtccaatcagggattgagaatgattaagcacctatttgcataaaagacctacaaaaacggccagctgtgctgttgagccttcactttggggtgtattcttactcctttatcttgttgcaatgcctgatccagctaagtccgctcccgccccgaagaagggctccaagaaggcggtgaccaaggcgcagaagaagg

SEQ ID NO: 4691 - DNA, 25 bp, Homo sapiens
  chr6:26252073-26252098
  hyper
tttgtcaacgatatcttcgagcgca

SEQ ID NO: 4692 - DNA, 54 bp, Homo sapiens
  chr6:26252140-26252194
  hyper
cgaccatcacctccagggagatccagacagccgtgcgcctgctgctgcctgggg

SEQ ID NO: 4693 - DNA, 33 bp, Homo sapiens
  chr6:26252253-26252286
  hyper
aaataaatggacgcatgttcaaacccaaaggct

SEQ ID NO: 4694 - DNA, 709 bp, Homo sapiens
  chr6:26271299-26272008
  hyper
agagccccaccaagtaggcctcgcaggcctcctgcagggccatcaccgcggaactctgaaagcgcagatctgtcttgaagtcctgagcgatttctcgcaccaggcgttggaaaggcaacttgcggatcagcagctcagtcgacttctgatagcggcgaatctcgcgcagagccacggtgccgggacggtagcgatgaggtttcttcacgccgccggtggccggcgcgcttttccgagccgccttagtggccagctgcttgcgcggcgctttgccaccggtggacttgcgtgcagtctgcttggtgcgggccatctcagactacctgaaagaaaaactcagccacttggcagagtggaaactgcccttatatatactcagaaacattctaattggccttgttgattttcaaaagacccgcgcaacaaaaccattggctgaagagtccaacgatgtgattggtgaattactggaaaatctgattggatgaatcacttcatttttgaatcctctcttctcggttagtctgcgatccaagaacgttaacttcttaaagttctaattctgcgcttctcaagctgtagtccgtaaacgactactttaagacttggaagacgctaattctcattcagtagatgtgttgtggggccagattcggaggaccacgttttgagaagtttatcttgtgccgttttcttgagtcacctggac

SEQ ID NO: 4695 - DNA, 377 bp, Homo sapiens
  chr6:26272425-26272802
  hyper
tgtatagacagggcaacagcacggcctgaatattgggcaggacaccgccctgcgcgatagtaactttgcccaacagcttgttgagcttctcgtcgtggatggcgagctgcaggcgtcggggggtgacgcgggtcttcttgtctcgggccgcgttgcccgccaactccaggatcttggcggtcaggtactccagcaccgcctccaggtacaccggcgcaccggcccggacccgcttggcgtagttgcccttgcggaggaggcggtgcactcggcccacagaaaactggagaccagccctggaagagtgcgttttagccttggcgcgagctttgctgccctgcattccacatccagacgcagtgaagtatttaaatact

SEQ ID NO: 4696 - DNA, 199 bp, Homo sapiens
  chr6:26273074-26273273
  hyper
ctaaaagaaccaatgagaaaccgaaactcagccagcctcatttgcatatacacgaggtaaataatgagggcgtttgggctcaccagcattttcctgtggtcatttgacggtatcacttcggctgcgaacatgcctgaaccagctaagtcagctcccgccccgaagaagggctccaagaaggcggtgaccaaggcacaga

SEQ ID NO: 4697 - DNA, 239 bp, Homo sapiens
  chr6:26273514-26273753
  hyper
cggggagctggccaaacacgcggtgtcggagggcaccaaggcggtcaccaagtacaccagctccaagtaaactagttacctgggtaaaagcgctaacgacccaaaggctcttctaagagccacccatgttgtcatttaaagatctgtaattttccagacttggcattggcaaggtaaaatggctaagcaacacatgggatagtaagggtttactgaaacatccaagttcggccgggcgc

SEQ ID NO: 4698 - DNA, 256 bp, Homo sapiens
  chr6:26322407-26322663
  hyper
ccagtagtgggagcactcttgcgagaggcttttgtagccagttgcttcccgggtgctttgccaccggtcgatttgccggtcgatttgcgggcagtcggctttctacgagccgtggtatagagacctccttacttaccccgcttctcctttggctggagctcggcgagcgagaggcggcgctgggctggcgttggagagcgacggcaggacggctgcggctacgaacacaattgcagtattttttttttttgacaga

SEQ ID NO: 4699 - DNA, 79 bp, Homo sapiens
  chr6:26322842-26322921
  hyper
caggcgtgagccaccgcgcccggccattagatttttttttaccattagattaaacttcgtctttccccaaccaggctgt

SEQ ID NO: 4700 - DNA, 189 bp, Homo sapiens
  chr6:26327800-26327989
  hyper
aaggtttttggtatctgtagtcgtggccgagtggttaaggcgatggactagaaatccattggggtctccccgcgcaggttcgaatcctgccgactacggcagtgggtttttgcatcttcaagcaggtttcatccgaccgatcgatatttcacgtgtaaaaaggctttcgatcttttacaagttaacatc

SEQ ID NO: 4701 - DNA, 176 bp, Homo sapiens
  chr6:26328288-26328464
  hyper
atatattcatgtataggaggacgcggtaatcccaaaacgtttttttctataggtataacgcctgtcttcgttcgtcagagggccagtggcgcaatggataacgcgtctgactacggatcagaagattccaggttcgactcctggctggctcgttcgactttagtggaaactttgag

SEQ ID NO: 4702 - DNA, 285 bp, Homo sapiens
  chr6:26331612-26331897
  hyper
tgtaatatgtaatgtactccccgccatacagttatctgagccagcgagctaaaaactgttgaccccgacgtgatttgaacacgcaaccttctgatctggagtcagacgcgctaccgttgcgccacgaggtctccgggacacctacgttttatttacctgtcaatctgattcatgaaaataatttcggtactggtgaagaccaggcagctattaacagatacaaaatagtgcctagctgcttccctctcggtaaaattgctgtccgcccaatcactgattttctct

SEQ ID NO: 4703 - DNA, 419 bp, Homo sapiens
  chr6:26332128-26332547
  hyper
gatcaaggtgagttttaaattcgtttccaaagttcactgcaggtcacaaccagtgtttccgttaacgaattcacgcgggggctggcaggttgtttgtgctgcatcttttctgagagataacggcgcctccctgtagcctccgttctcagctgatgagagagttgatttcacaccccgataattcttcaaaatcagatcgctggacctgaaactgaccctaaaaagaacaagaaatcctgtcatcaggagtaagtgggttattctggcactgtgctttgtttggctggttaaagaacctgccttgggtaaccagagatcggagttttctaaagtcagcggggtttgtctggggaccccgaatttacatacagacgatctccgcaaatagtgcaggggccgctttgaactcttaggaaaag

SEQ ID NO: 4704 - DNA, 119 bp, Homo sapiens
  chr6:26383467-26383586
  hyper
catgggtgagttgtatcggaaaatcgtcatgtgaggatcagaggggaaaagaaaacagaggttagttctagaaggtaggaaagggagaggaggcgctacagctccggggtgggggcggt

SEQ ID NO: 4705 - DNA, 46 bp, Homo sapiens
  chr6:26458294-26458340
  hyper
ttggagagaagagggacgactggagaatcgtcgagaaccagcggag

SEQ ID NO: 4706 - DNA, 34 bp, Homo sapiens
  chr6:26501806-26501840
  hyper
tttttcggcagctccctttgacgtgattggaccc

SEQ ID NO: 4707 - DNA, 291 bp, Homo sapiens
  chr6:26501949-26502240
  hyper
cgccggccgtgctggtgcatagggacgggcgcgagcaggaagccgagcagatgcccgagtaccgcgggcgggcgacgctggtccaggacggcatcgccaaggggcgcgtggccttgaggatccgtggcgtcagagtctctgacgacggggagtacacgtgctttttcagggaggatggaagctacgaagaagccctggtgcatctgaaggtggctggtgagtagacgggttttgactttctccgacgactcccctgctgtatacactttcgtatggatcagttactttgga

SEQ ID NO: 4708 - DNA, 30 bp, Homo sapiens
  chr6:26521732-26521762
  hyper
tcacctcctttttccgtttctcctctgtct

SEQ ID NO: 4709 - DNA, 270 bp, Homo sapiens
  chr6:26550788-26551058
  hyper
ctggatacccgagggcgcggccccagcgccgcgacgccccgcccctctggctgctccgctctgggatgcacttccgacgccctctaggcttgggagttccgcgcctctcggtgtcgcctggggggcgtgctccggttggcgcactgattcccagttgggtaggggaggcttgactgagctcccacccggaatttcaccttagacctttaaagaccttgctccggcctcccgcgccagcgctaacacctagtcctctttagtggagttccg

SEQ ID NO: 4710 - DNA, 53 bp, Homo sapiens
  chr6:26551083-26551136
  hyper
cggtggtctcctcccagatggcgaatttccgcggcttcttcatcttttagctc

SEQ ID NO: 4711 - DNA, 238 bp, Homo sapiens
  chr6:26577244-26577482
  hyper
aaaacccagaaacttccaggacgcacattattttggggattctagagaacgcagaactacgtgtctaaaaaggacagcgttccgtgtccttcgatagctcagttggtagagcggaggactgtaggctcattaagcaaggtatccttaggtcgctggttcgaatccggctcggaggacggtagttttgacctaccaagctaataattccagacaatacggtctttacaaaaaataagga

SEQ ID NO: 4712 - DNA, 30 bp, Homo sapiens
  chr6:26577809-26577839
  hyper
acccgagctgacgttcgaccagcaaaccac

SEQ ID NO: 4713 - DNA, 31 bp, Homo sapiens
  chr6:26987993-26988024
  hyper
gcgtccgggggagaagcggccccaggactaa

SEQ ID NO: 4714 - DNA, 374 bp, Homo sapiens
  chr6:27059532-27059906
  hyper
taggggtatgattctcgcttcgggtgtgagaggtcccgggttcaaatcccggacgagcccacttcattttcgcccaataaggtttaaggatatttaaagtatttccccaaatagtcatacccaaaaatatgtactttcaccacatcaacagtagaattgtctaagcaggcgagtactgaatccggacttcttctaagggcagacaccggaatgttgatgcggctgcagctgcgctctcccacctctgtctgtctcttctcaaaccccgaaaggaagaccgtgggcagctcgtgcgcgcgtgcgtgtgcgtgtttaaccgagtgctggaggggaaacgtgagttgcagtcaaccggttatcttcctcttatagga

SEQ ID NO: 4715 - DNA, 619 bp, Homo sapiens
  chr6:27064586-27065205
  hyper
gtttagcctgtgattgatttgcgtgggcttctgaagagaaaccgactccggtgtgaacggttttgggaacctcggtctcctgctggctcccaggtgcgctatccgacgcagcgagacgcggtgagcctacagaagggctgaccaggctcacctgacgccccaggtcgacagcaaaccccgtgcgccccgttggcccggtcacgcccgcagcctgctcaggcgcctcctgcctcgggaccaggaagcggaagaaagggagagaccggcccggcaattacgtttctatcatgtcttgaacatttgtgtgagtcccacgaaagctaagcccgtttattccccctcgaagcgtttccactcagttcttgatcattcatgtgaaaacgagccatctccacgtctcccaaacgtcttcaaaccgtttcctaagtcttgtaaggccgcctgtgggttcctattacaaactctgaaataaaatactcgggaaacgtgggttatcaagacgaggtggccgagtggttaaggcgatggactgctaatccattgtgctctgcacgcgtgggttcgaatcccaccctcgtcgggggaggtcttttaatacgaagaggaggaaacaacaccc

SEQ ID NO: 4716 - DNA, 168 bp, Homo sapiens
  chr6:27094881-27095049
  hyper
atcgaaatcataaaacgaaacaaagttttggctacattagcctatccgttattgccataagatggcgacagcccttctcaactcataaaactaaacaaagttttagctacattatcccatccattatcgccacaagatggcgatagcgcttctcaactcgcctgcggg

SEQ ID NO: 4717 - DNA, 35 bp, Homo sapiens
  chr6:27095107-27095142
  hyper
cgcagcgcttcctgacgttccgttagttcagtctc

SEQ ID NO: 4718 - DNA, 153 bp, Homo sapiens
  chr6:27099718-27099871
  hyper
cgcacccaagccgaccgtggacttcctggatacaacaaccaatcaggatgcagaggaagggcgggcgttgcccgggcaaattcaaactgacaaccgctgcaacttggcactgttccaaatcactaaccgacgggggaccgacgagtattttaa

SEQ ID NO: 4719 - DNA, 44 bp, Homo sapiens
  chr6:27100141-27100185
  hyper
tcactgtttacttagcgctggtgtacttggtgacggccttagta

SEQ ID NO: 4720 - DNA, 947 bp, Homo sapiens
  chr6:27100304-27101251
  hyper
tgcgatgcgctcgaaaatgtcgttcacaaacgaattcatgatgcccatggccttggacgaaatgccggtgtcagggtggacctgcttcagaaccttgtacacatagatggaatagctctccttgcggctgcgcttgcgcttcttgccgtctttcttctgcgccttagtcaccgccttcttggagccctttttcggggcgggagcagacttcgctggctctggcatagcactgtgtagctataaagcgccaacgaaaaggaaaaacagcgtgagcagggtatgacaaggcgcttttatatagaatcgcttatgcaaataaggtgaagagttgaagtcttgtgtctgattggtagttattcagggtaacgtcagaggtcaggtctgcccaatcaggattcgcaaatccagaagacgcactactattggttgaaattaaactgcagccctaaccaacaacacgtcttctttttcgcgcccaatagtgtttataaaaagcgccgcctttcccgttcactttgtggttgctcgtagtgagttgcgctcgctatgtctggacgtggcaagcagggaggcaaagcccgcgctaaggccaagactcgctcttctagggccggtctccagttccccgtgggccgagtgcaccgcctgctccgcaaaggcaactatgccgagcgggtcggggccggcgcgccggtgtatctggcagcggtgctggagtacctgaccgccgagatcctggaactggcgggcaacgcggcccgcgacaacaagaagacccgcatcatcccgcgtcatctccaactggccatccgcaacgacgaggagctcaacaagctgctgggcaaagtcaccatcgcacagggcggtgtcctgcccaacattcaggccgtgctactgcccaaaaagactgagagccaccacaaggcgaagggcaagtaactatctgt

SEQ ID NO: 4721 - DNA, 243 bp, Homo sapiens
  chr6:27125328-27125571
  hyper
aggtgcgagcgccgccggacatttcctgacggctcaggtgggcaggctgagtgcgcgagcgcctcactggcttctcataggtacctgggtcaggacgaagccacatagttcctcgtgatgagaaactcacttctggcacctgtcgagatgccagattccatgccaagcccccgaagattctgactagtttggcaaaaaatgggatctggcaggtccacttcaaagcagcgccctcttcctttt

SEQ ID NO: 4722 - DNA, 166 bp, Homo sapiens
  chr6:27125874-27126040
  hyper
gagccccacaagcagcggcctctggtggcgtgccgtgatcgtatagtggttagtactctgcgttgtggccgcagcaacctcggttcgaatccgagtcacggcagtaccttgatgtcgcctcaatttctcaacgtactgagcagtaccttgacgtcgcctcaatttt

SEQ ID NO: 4723 - DNA, 374 bp, Homo sapiens
  chr6:27173632-27174006
  hyper
cgtggcccggttcctttctcttacactcttccaaggaccccttttagacctagaggaaaccccgcagaagtgacagggagagggggaaagctcttttacagtggcgaaaccacgtggctgcgagagcttctcagggagagctcctgttttcaaagtctggcaaatttatcagtttgatttttcttaaacatttatatttttatggagtagaaaatctaccaaacgagtaaagaatgtttccgcctggtttcaaaccggggacctttcgcgtgtgaggcgaacgtgataaccactccactacggaaacaactgtgggaaagggttacccacatcccccccgcccccatccccaccccgccgcttaactaagaggg

SEQ ID NO: 4724 - DNA, 30 bp, Homo sapiens
  chr6:27205310-27205340
  hyper
gactgcggcaaaatcggagagagaaggtga

SEQ ID NO: 4725 - DNA, 1177 bp, Homo sapiens
  chr6:27218650-27219827
  hyper
aataggaataccctcccaccacgcccctaccttcctcccgcgcccaaagaattttgcacaagctgtcctcacaagagcccgagattacacagcgagtaagtgacacagaggcagaaagatatgcgattccaacccctcagcccgcaggctgacggcgtctcctcccttagttcccccatctcattttcgcgtcggtcgcctcctccgccccggtgcgggccgtgctggatttctccgagtataatgacgtaaggatggcgggcagcaggtgcgggacggggaggggtcccagcgggcggagtcccttgacacttccggataccttcctctgcggtccgcccacaggtggtatcccgaagcctaatgagcaccgcgatcggcgggtccctggaggtaggaggtggggcctagtccgagggggactgggagggaaaagaggcctcggatgccagggaagaggaggccagagaagggcgaaacctgcaacgtggcggggtctaaggaaggtcggagctcgggggaatacgcaggttttggaagaaggcgggagctgacgaagaggaggggcaccaggaaaagaggcgctccccagagagggcggggtttgggcagggacaatcctatccggaggtgaggctcaaggtggggcggggccacaatggaggacggggcctgcagggaagacccgagaaggagggctgcgaggcaggggattgggggcgggggcctgggggcgggggcctgggccaagagctaggtctgcaccctctgagtcccgctaggggaaagtggggaacccaaggaggacgcaggtcctgggtagggaaagccgaggcccagcctaagtcttggcggacatcgcctcttgcttcccacagtgccgggcggcggtgtccgtcgccttcgctgaagtggagcggcggctgcgctcgggtggggcggctcaagcagcattgcggacggagctgagcgcttgcgggcccctgggccgcgctgaaaaccaggcggagctgttgggggcgctgcaggcactggtgggaggtgtagtgcagtatgatgggcagacgggagcgccgctaagcgtgcgacagctctgcggacttctcctcgggggcgggggcaaccgcagccactccacgccctactgcgggcttcgtcgggcggtgcaggtgagcac

SEQ ID NO: 4726 - DNA, 30 bp, Homo sapiens
  chr6:27228315-27228345
  hyper
ttggcgtttactcccgggcctttcccggat

SEQ ID NO: 4727 - DNA, 747 bp, Homo sapiens
  chr6:27280039-27280786
  hyper
gcagtgttcggttgacggttgggattcacgcgctaggaaagcgcgagtctcagggtgcttagcactctccaggcccggcacccgcgggaacgggggacacgcgggacttcggcagtcccagtaacttgctttgctgttctgagacctcagcggggcggtcagacctctgctgtctccgcagcgagttgcagtacttggcgcggggagaggaactcgagaggaagctcactgcgcctcgcccctggcgtcggcagcggctgtctgggaccctgtggtccggattcaccaagtggcgcagagctggaatcgagtgggtgcacagtttccaggctccgactattactggcctcgaaggtacaggctcaggcggctcagggccccggcgcagatctgtcggcccgcgggatccccggagtctgagtggggagcactatccgcaccccgtagagtgagtgcgggcggctttcgcaggtgctcaggactggagatctggaccggtggctgtgccgcccggatggcatttgtggcactagcagtcgggaaagcagctgattgaggatttccgcgtttctctttttttgcagatcgtgacgccgccagtaggtgtcagtcatttgccgcacagccacctttgagatccacctgtgtctcccagcggccgaatccaggtttccttcctattcgcacttggagaactcatgcagattgccgtcaggagtggcctcagagatccggagtgggcgaatg

SEQ ID NO: 4728 - DNA, 30 bp, Homo sapiens
  chr6:27343166-27343196
  hyper
tgactagggtataacgtgaataatttgtat

SEQ ID NO: 4729 - DNA, 46 bp, Homo sapiens
  chr6:27440465-27440511
  hyper
gtgactcacacccctgcgagctcggataacacgaagacacacctgt

SEQ ID NO: 4730 - DNA, 75 bp, Homo sapiens
  chr6:27447498-27447573
  hyper
ccggggttcgattccccgacggggaggaggcttaaacttttttttagaaaagcacacttccggtaaacacagtct

SEQ ID NO: 4731 - DNA, 265 bp, Homo sapiens
  chr6:27463097-27463362
  hyper
acttaatgtcacaacgaagggacacagaggagacttttccacataatttttcgctccctccacctaagacacaaatcagcggaagcgattccgtgcctggaatcccctacgaacaccgtcgttcaccgaggagctttgggctcctggaagtccgaacaccccggatcagaggagagttggccatgactccccgtcggtaccggctgggtttggtgccagctatggcgagtacagaagcctggccggtcccggggcaggcaggcgc

SEQ ID NO: 4732 - DNA, 12 bp, Homo sapiens
  chr6:27512871-27512883
  hyper
ttgggaatggtc

SEQ ID NO: 4733 - DNA, 544 bp, Homo sapiens
  chr6:27512994-27513538
  hyper
cgcccgctccagtccggttttagccgttccttcggaagagtaagtcagttgaatgtcatcgaagaagctcctgatttagattttaactgtacgtaaacgcagatgaccccccactctcgtgccttcatttaattcccgttgcttctcccatgggtattcagaggcttgaggttgcttggactctcaattcaatactccctttctgcgggttcgtgagaattaggtgtgaacgtggtgtccgcggatttcagcagctagcgggcaagctccagcgcccagaaactttgagtcgcttgtctaggagtcctgtgttgaattgcaacactatgcactatgttctggttattgatgtgctctgaatgagctctttcgttcgtgagcagaggccctgacgagactgaagaccaactatttccgagcgctccactcaaccattataagttcaccccagccgtcagcgatggcgtaggtaggtagtcgtggccgagtggttaaggcgatggacttgaaatccattggggtttccccgcgcaggttcgaatcc

SEQ ID NO: 4734 - DNA, 330 bp, Homo sapiens
  chr6:27598638-27598968
  hyper
tgggagagttttggggaatcccgaaagacagcccagagatgctggactgcgaatgcaggcgcgctgcaggcgaggctgggagggccgccaggagcgctgcgggtatcgggagacacgcagagggaggggcaggcggcgggctccgcttcttcgcgtcctggctctgaaagcaaccacaggccagcggggcggtgctaggtgaagctacgaagaagccaaatagctcgcgtcttctacaaaaaccgtgttcttgctagaacgttggcaaggagaagccggagtctctcctttttctcctcggcttttctcgggctttctgaaaagagcacc

SEQ ID NO: 4735 - DNA, 272 bp, Homo sapiens
  chr6:27636349-27636621
  hyper
gcgcattcgtgtggccggttagctcagtcggctagagcgtggtgctaataacgccaaggtcgcgggttcgatccccgtacgggccactggatgccatagtggggcccttcacttacctgaagggaggccttttaatttaagcctgtcgaatcacaggtgctccgaatcgaatcccaggtgctctgaatccgaaattaagacgccctcttattcgtcaagcgagaaggctatttacgttcgtttccctttattgtgaaaaatgaaaagaacag

SEQ ID NO: 4736 - DNA, 377 bp, Homo sapiens
  chr6:27640043-27640420
  hyper
ggggattgcagaagtgagccaccgcgcccggccttcaaatgtacatatttcttgatgtacatttccacaagtgtgcgcgcgctgtaaaagccacagcgatagcactcacaactttctatcctagtgaactaatgaaagctaactgatgaaagtagcaaattggaaatctaaccagaaaatggcgacgctgtgagcaggatttgaacctgcgcggggaacccccattggatttcgagtccaacaccttaaccactcggccatcacagctccgaggacactttttgtttcagaggaagtcgtgttaggctctttgactctctcgctttttaatgttcccacggcaggttaatgcttccgtgtttgtatttgtcactttt

SEQ ID NO: 4737 - DNA, 20 bp, Homo sapiens
  chr6:27648892-27648912
  hyper
cccggtttcgaaccgcggac

SEQ ID NO: 4738 - DNA, 257 bp, Homo sapiens
  chr6:27655322-27655579
  hyper
ctcaagagaggctgtccccaccgtccttttgtctcagcgaaccgcagtccgcgcccgagcgccactagctgtcctgggacgggaactgcagcggcaagtgtgtgactttcttgagcccggagccacaggcctgggaagcgccgctgagacttcagggtcgtagtgacagaggaaccacccgaggctaggcggggagagggtgcagtttccggatcccgaaggcttcgagaagagccgacctgtctggaagggtctcc

SEQ ID NO: 4739 - DNA, 352 bp, Homo sapiens
  chr6:27661789-27662141
  hyper
tttccagagcggacccggaaatgacgccaggggatgcaaacccttctgcccctttttgctacccctgaagcttactgttagtggtcgagtttttctggaagtgggcttccgcgatcgcggggaccaacgccctgagctcttgtgcccaaaggggatcgccaggttttttgatgcggatcgaaagggactggccccggagcctacaacctgacgcaggtgggacttggggaaatgtcgagaaacctaggtctgggacttgagttggcttccagggcacacattcttgttcagaagaaacacattgcaaaaatcgggaggtgacgggcagatgaagtgtcggcgcttcgcctcg

SEQ ID NO: 4740 - DNA, 450 bp, Homo sapiens
  chr6:27774908-27775358
  hyper
accacctggagcctggcctggcggtgtcaaacgcattctggtctcatctttttagaaacccgtggatgctcaaggaatttccggataacgtgatcccggatgcgcttgactgacttacacggaacgagcaaagcgcaaagcagtccctgctaaggacttagtttatgccctcaagcgcaaaggtcggaccctctatggtgttggtagctatatgcacgtacctcatgtacatttcaccttaaatggctttcaaagagctagattaatttagtggatagatcaaaatgatttatgacccctcgccccccagtgataggaagagcgaaccagctcttctttagataatagtgagtggctctgaaaagagcctttgggttggacaagagcttgagaatttacttggagctggtgtacttggtgacggccttggtgccctccgacaccgcgtgc

SEQ ID NO: 4741 - DNA, 447 bp, Homo sapiens
  chr6:27775597-27776044
  hyper
cttcttgccatccttcttctgggccttggtcaccgccttcttggagcccttcttcggggcgggagcagacttggccagctcgggcataatgaaacaatagtggcaaaaccaaaacaagaagtcggtctcctctttttatataatagtttatgcggccgaggtagtgggaaggtctctgctgattggtaattatccgtggatgacgacagatgccagttttgcccaatcaaaataggtatcctgcataatcgagtcctattggtctaaataaaaataaaacgtaagccaatcgcacagcttccttttcgcgcccagtagaggctataaaatgtacgtttttctagtttcacttcagtctttcttgaccgtatagataataggccttttgccatgtctgggcgtggcaagcagggaggcaaagctcgcgccaaggccaagacccgctct

SEQ ID NO: 4742 - DNA, 329 bp, Homo sapiens
  chr6:27777834-27778163
  hyper
aatctagctctgaaggcatggcgcgtacgaagcagactgctcgcaagtccaccggcggcaaggctccgcgcaagcagctggccaccaaggcggctcggaagagcgctccggccaccggcggtgtcaagaagccccatcgctatcggcctggtacagtggctctccgcgagattcgccgctaccagaagtccaccgagctgctgatcagaaagctgccttttcagcgtctggtgcgtgagatcgcgcaggacttcaagaccgacttgcgcttccagagctccgcggtgatggcgctgcaagaggcatgcgaggcctacctggtggggctc

SEQ ID NO: 4743 - DNA, 113 bp, Homo sapiens
  chr6:27782110-27782223
  hyper
atgcgcttttcaactcggtctttacttagtcttgtggtggctctcagttttctttggcagcagcacggcctggatgttgggcaggacgccaccctgtgcgatggtgactttgc

SEQ ID NO: 4744 - DNA, 297 bp, Homo sapiens
  chr6:27782430-27782727
  hyper
ggcctacgggaaactgaagcccggcccgagaagagcgggtcttggccttggcgcgagctttgcctccctgcttaccacgcccagacatggcaaaaggtctattacctttacggtcaagaaagactgaaatgaaattggaaaaacgtacattttatagcctctactgggcgcgaaaaggaagctgtgcgattggcttacgttttatttttatttagaccaataggactcgagtatgcaggatacctattttgattgggcaaaactggcatctgacgtcatccacggataatcaccaat

SEQ ID NO: 4745 - DNA, 31 bp, Homo sapiens
  chr6:27792345-27792376
  hyper
agttttttgaacacagcggcacacgtgtggc

SEQ ID NO: 4746 - DNA, 58 bp, Homo sapiens
  chr6:27798705-27798763
  hyper
cgggaggctacagtgagccatgatgacactgcactacagtctgcgcgacggcccatgt

SEQ ID NO: 4747 - DNA, 30 bp, Homo sapiens
  chr6:27798986-27799016
  hyper
gggacgctcaaccaccgaaaccgtagaggg

SEQ ID NO: 4748 - DNA, 30 bp, Homo sapiens
  chr6:27799498-27799528
  hyper
ttctgaattttgtaacgtgcatagtatttt

SEQ ID NO: 4749 - DNA, 268 bp, Homo sapiens
  chr6:27804767-27805035
  hyper
aggctctagcggtccttccgcctcggcttcccaaagcggttctgtttaccggatggtgccaaacagttccaggctcttggtgcccggtagaaattggacgacacacacacagatagcaaagcaaagcagcaaaagtttagtaaacagagtattacactctcgggggtgggagagagcggactgacctctgcgaggtgagatcagcgtcagcttgctgtagtttgagtcattttatgtgtgtgcgtgcgtgtgtgtatgttttctgttc

SEQ ID NO: 4750 - DNA, 153 bp, Homo sapiens
  chr6:27805753-27805906
  hyper
cagttttcttaggcagcagcacggcctggatattgggcaggacaccaccctgggcgatggtcactttaccaagcagcttgttgagctcctcgtcgttgcggatggccagctgcaagtggcgcgggatgatgcgggtcttcttgttgtcgcggg

SEQ ID NO: 4751 - DNA, 339 bp, Homo sapiens
  chr6:27805936-27806275
  hyper
cggttaggtactccaacaccgccgccaggtacaccggcgctccggcaccgacccgctcagcgtagttgcccttgcggagcagtcggtgcactcggcccactgggaactgaagacccgcccttgaagaacgggtcttagccttggcgcgagctttgccgccctgcttgccacgtcccgacatgacgtaaaaaattcaatcagtaacgttcctgagactgacgtaacgctaaagctccgctacttatagtcaacagaggcacgaaaactaagctgtgctattggctaacattacagtttcgctttaaccaatgggattgcggttttgaaaaacacttattt

SEQ ID NO: 4752 - DNA, 16 bp, Homo sapiens
  chr6:27806495-27806511
  hyper
gacaaaggcccagaag

SEQ ID NO: 4753 - DNA, 241 bp, Homo sapiens
  chr6:27806810-27807051
  hyper
ttccaagtgagcccgcccaccgcggaacgttcggtcagtctcggcccacaccccaaaggctcttttcagagccactcagtcttcccaaagagaactggcactcactgttcttacagcaggtatttcttacttgctacaaagacgatttccaagattcctttagccttgttagaaactaattttggctcaagcctctaatcccggttcgggaaaccgaagcgggtggctcacctgaggttag

SEQ ID NO: 4754 - DNA, 117 bp, Homo sapiens
  chr6:27834150-27834267
  hyper
ttgctactatattgtcttgtgcgttgatagcatattatattaatgccgaacacattagtgacgccgaagtagctggtgcctaaatggcttaaacgcggaaaaaccacatacagatga

SEQ ID NO: 4755 - DNA, 104 bp, Homo sapiens
  chr6:27835377-27835481
  hyper
cgggccccgggcttatataagccggcgctgccctgtgattggtggagcgtccaatccaccgccctctggccgccgccgctcgcggttggactcccaaattgtgt

SEQ ID NO: 4756 - DNA, 1593 bp, Homo sapiens
  chr6:27839780-27841373
  hyper
atagccccaccaggtaggcctcgcaagcctcctgcagcgccatcaccgccgagctctggaagcgcagatcggtcttaaagtcctgtgcgatctcccgtaccaagcgctgaaaaggtagcttccggattagcagctcggtcgacttctggtagcggcggatctcgcgcagggccacggtgccggggcggtagcggtggggcttcttgacgccaccggtggccggagcgctcttgcgagccgccttggtggccagctgcttgcgcggcgctttgccgccggtggacttgcgagctgtttgctttgttcgtgccatggctaagtagacgtacctactcaacacaaatgagagaaaaaaactgatcatcccggtatttatagctgccctcgcgttctgattggacagtagactgtgccatgccacgtctcacacacggaattggctcccagtttaatctgctagtgaaagggagacattccgcctctgttttgggtcaagaaacgtaaaatggttttgctagctaaagaaaaacaaaaacggaaacaaaaaaaaatcccccaaaagtctaggatttttcatgcatcaaaatcctgtttaaatataagcttgataaatctaaacttgccttgcactattttaattacgaggtgtcattactgatttgacaaaaagttaaagaacgtaaaggaaaagtgaaactagagtaaatttgtaaatggaggcattgaaggggatatgaaattcgagcgttgtggtatgccagtatttctcaaatttaaacgtacttaatgttttagaagttggccgactttttctgtaaagggcgatattaaaacattttgggcgttgcggaccacagtgtcatagttacacagccctcgcattggtagcggtaaagtaatcgatacaagataaatgagaccggctgtttcattatgacttttgcaaaaaccagagaggcgttatagatttggccgtgtatcagagaagccggcacttttaaccactaagtaatgctgaaaggggcaccgaacctcaaacttcagcgactgcttatgtggaatcgctaatttgccaaaactgccatacgtttaagtgttcttaagaaattaactatctttagtctacagctctttcacagacttcatgggtggccctgagaagggcctttgaggaaccgtgtaagtaagtaaaacactcagccgccaaagccatacagggtgcggccctggcgcttgagcgcgtaaaccacgtccatggctgtgactgtcttgcgtttggcgtgctccgtgtaggtaactgcatcgcggattacattctccaaaaacactttaagaactccgcgtgtctcctcgtatataaggcctgagatgcgcttaacgcctccacgccgtgccaggcgtcggatggcgggcttggtgatgccctgaatgttgtcgcgcagaactttgcggtggcgcttagcgcctcctttgcccagacccttcccgcctttgccgcgcccagacatgtcttgtactaaacaaaatgcaacacggcaagcctcgcagcagtactttatatagtaataaatcggacctgattgggaactctcc

SEQ ID NO: 4757 - DNA, 424 bp, Homo sapiens
  chr6:27858364-27858788
  hyper
tgaaatggcagtttgcggatgagcagctcagtcgacttctgataacggcggatctcacgcaaggccacggtgcctggcctgtagcggtggggcttcttcacaccgccagtcgctggagcgcttttgcgcgctgccttggtggccagctgcttccgcggtgccttgccgccggtagacttgcgagctgtctgcttcgtccgggccatagttgagaaagctatgctctgaaagcaagcagctgaatgagcagtggcttctaccagaatttataacgatgatctgatcctgattggtcagaactgttgtaggaaaaacctggttggttgttaatactatcttcatttggttcctgccacttttttttttttttttttttttttacctgacggcttctaattctgtcgcctaggctggagtgtggtgg

SEQ ID NO: 4758 - DNA, 30 bp, Homo sapiens
  chr6:28109959-28109989
  hyper
agagtacgtccccacgaattgcccttgaac

SEQ ID NO: 4759 - DNA, 392 bp, Homo sapiens
  chr6:28175217-28175609
  hyper
acaaatgggaggactcgggcagctttcctgggatatcacaccatatagactgagaatttcagaaacgcaaagtgcgcgtcccagcagggcgagaatggcgttaactatgtcaccaccgcccaaattccctataatttaccacttatcgttcctggctttattctccgtgcgtgcagggacatgtaattctctaggagacggtggtccggacttggttcccgactccctcgtggctgcaaacaggggcagctgatttgggtggatgcagaggttgtggccaggggaagggccgcggggcagcgcgtagaactgattgtaaacccaacttcccgcctcggagcgagccgcggctcggagtagcgtcattcgaaagccaccggagatatcgagag

SEQ ID NO: 4760 - DNA, 99 bp, Homo sapiens
  chr6:28175820-28175919
  hyper
ataatttaagattctcgcttctgaaatacagcgtgatggttaagagcatgggccgtggaaacagacccggggaaagcctcagctcggccactctttgcc

SEQ ID NO: 4761 - DNA, 30 bp, Homo sapiens
  chr6:28176155-28176185
  hyper
taggtttcgtggcgtcgccaagttgtacct

SEQ ID NO: 4762 - DNA, 41 bp, Homo sapiens
  chr6:28219717-28219758
  hyper
tgggcgtccagggctgcgttttttctcggttctctagccat

SEQ ID NO: 4763 - DNA, 30 bp, Homo sapiens
  chr6:28220095-28220125
  hyper
taggaagcttctctcggtggttgtctccga

SEQ ID NO: 4764 - DNA, 504 bp, Homo sapiens
  chr6:28249084-28249588
  hyper
cctaccagccagtgatgaccccgaagacagacatttaccactgtgttggttttcaatcgaaatgatgtacataaatttggggcgtgcttgcaccgtccgaatgggcctggggtccggcggcggagagtgacctgggcggggcaggaggtggcagcgggggtcctcccggctcaccagagagacgagcggccgtgctcctagagaggcagggaacccgccagactccgccactccgctgcgggcgcggcgcagggagaagcttttgtacccgcccagctgctggaggcgccggcagcgcccgccagacccgccagcccagcggcccgggctctggggaaaccggcgctcccgacaggggagcaccgggcctctgagctccctcgggagcctttcacgaggtcagctacgtctttgttgtgcgcgttcctgaacttttggtccattaaccaacaattagacacgccggtattcagtgcctggcgcggtgctagatgctgggtgtaa

SEQ ID NO: 4765 - DNA, 1177 bp, Homo sapiens
  chr6:28303253-28304430
  hyper
gtaggttccggcaggcgctctactttcctttattaggactataagcccagcttctgtgaatcatcacctcagcccctgattggtccggggccaaactttcacttcggcttctgataggtcctgggccaagctaagcagcagctatgaatcatcatttcagctcctgattggtcccggaccaagctgagtcaagcgttcgccaggacagcccgcagactaagcgcattccctctcctttccagtccataaaaaccccagaacgggccccataatgggtactcccggtcgggaccccttctctgctggcagagagctttttcctttcgcttattaaactttcgctctaacctcacctttgtgtctgcgctcctttatcgtcttggaggcaggacaaagaactccgggcgttatctcagacaaagaaaggctgtttaatcttcaggataaggggcgggacctccacctactccacgggggcttcaggccagtgaatgtgtaggggcgggggtcacgcctgcgcagacgttccctccccgcctactccaaggcacagacctgaaatcttctgggaacctggcgggtcgcgacaaggggccaagactcaccttcggggcaccggcaagctacggaacaggtggcggggctgcagcaccccaatgaccgatcaaccgcaaaggccggaaatgcgtcagccgttctgagcccactggctgaagccaggcaactctttcctttctaggaattccagaggtggctgctgcttggtgactcccttattgcaaaccccggggccaaaaatcccagtcccactgggtgcgaggcggagaaatccggcgaggcatttctatggggagcggcccccagcatttaggagttagatggtcatcgagacccaaaacattagagccggaaggtgttaggaagatataaacgtagagagcgagtaacaggaggcaattccacggccaaacaggtttatttacaggaaaagcctgcgaagagttccagttaggaatctggctgagatcctgatcgcttacaagctgaggcttttataataaagtttctgttggggaggggttggggaagtgctggctagttggaactgtttggacactttccaactggggacagatgtggttagggccgttaggctctgttgcggttagagctgtta

SEQ ID NO: 4766 - DNA, 234 bp, Homo sapiens
  chr6:28367112-28367346
  hyper
gggtccctaggacgccggcgagcgtctgtgacccaccactgtccagaaatgtcggtaagcgctgaacccaaggatacacagcccgaagcaaacgcggaaggtatgggccttacagcctggaattgctgcagagactgggagccaaaccctcatcctaatgtcccaacgcactttggggagggagagcttcccgcggatccgcctgggtttgggaggaccggggtccactctgca

SEQ ID NO: 4767 - DNA, 325 bp, Homo sapiens
  chr6:28367490-28367815
  hyper
cgaacccttttgggacccggaacccatcaaaagtgacccacaaaggccggaagcggccacggggggtctaagaaccagcccgcgcggggcgcacttccgcggccgctctaggaagggagcgaaaggggctttcaactcggtagtgtttccgcgcgtctacgtgagaggaaggttgatggctttcaggcccgctggtaaatggaacgggtttatcttctcctcttctttacccagccattgtccacacttcccccgacccgatgggtggtcgaggcttgtagaactgatcttaagacagggaaatcccttgcgtctccattcactt

SEQ ID NO: 4768 - DNA, 117 bp, Homo sapiens
  chr6:28410970-28411087
  hyper
gggggaaaggggtaggggcaacgacgctgacttttggttaacaaagcccttccaggctgcggagcaacctcctctgcccttcacctgcccggcccatctctggccaagaagaccctg

SEQ ID NO: 4769 - DNA, 288 bp, Homo sapiens
  chr6:28411151-28411439
  hyper
cggtagcccgactccgaagctcaccgaggcatccgtgagaggagatgccacctagcgcagatcacatctgctctgaatccttgacaaccgcagcccaaagaatgataaactacaaaggccggaaatgcgtcaccgcggcccgctctccgcgaaacagcggttccggctgtgttccttctaggaaggccggaggtttccacacctctgtggtcgtcactctgaatcccgtctgtagtcttaagtgagatactaggtgacacattgtcttccacgcggcaatataataac

SEQ ID NO: 4770 - DNA, 30 bp, Homo sapiens
  chr6:28414765-28414795
  hyper
atccgggatggaggcgcgtcgctttctgtg

SEQ ID NO: 4771 - DNA, 672 bp, Homo sapiens
  chr6:28457661-28458333
  hyper
ccgcaggctttgaaccgatttcggctccgcgtccaggagcaggccctacgtagggccgggggaattcaggtgcgtctgcggggcccagggcacccagggcaggcggggactgagacgactgagggttgagggacaaggaggttgggactggggaggggagacccgggacccgcccagaacgctttcgtggggttggagagggcaggacacagcctctctgggcccggtagtatgcgaagacacgcataacgcaaaaggattcccgtcctggactttgggaattaaggccctgaacacattgagcaaaaagtagatctgtctgtacagacgtttctttccacgtctttcatagtaaggactttattaaaaagcaggcactcgaatcctaggtgggtagatgggaggctggggctggggatggggacgtcctctgttttctggttgtgcacattaaaaataactctctgctgcctactcctaaacgcagccggcaaaaatgagacgtcaactaagcgccgtttcagtcccagagccaggtcgtccatgggggttttcaagcgttttctcgatgactgatttttctagaagcgaatggattttattctcccaggtgtaaaggctacctcctgcttcacacccgggtaacataaaagacagcgctgggaccgaaac

SEQ ID NO: 4772 - DNA, 30 bp, Homo sapiens
  chr6:32612963-32612993
  hyper
gcaaatgtaccactcagatgggagatgttg

SEQ ID NO: 4773 - DNA, 30 bp, Homo sapiens
  chr6:33589676-33589706
  hyper
ggaggagcctccctcggcggcgcagcctct

SEQ ID NO: 4774 - DNA, 31 bp, Homo sapiens
  chr6:34100344-34100375
  hyper
tctgtctatccacctgcgtatctttttatct

SEQ ID NO: 4775 - DNA, 1811 bp, Homo sapiens
  chr6:34111789-34113600
  hyper
ggtgtccggaaaggccgcgttctcccgcgccaggggccggcaatggtgcggagaggggagaaagaagcaaggcgcctcctccgacagggactgaaagtctgagggcgggatgtcactcaaggcctaggggcagggggcgctcgtacgttcgggcctcaggactccctgccgccgccgatgctgctgccccatctcagcacaaacagcctcagaccgccctggtgcgggggcgcctctcgcagtcgaggcctccacctcccggccccgcccccgcgcggggaggagacgcctcccacctgcgagcgccggggaagaccgaccccggagcggggacccccagcacacacgcgcgtacacacatgcacacacagagaccactgccggtccgctcgcccggcggccgcgtagacgcgcaggttcatcacggtcccggggagggacggtcccgagtgtccggagagagcctgaccctgaagtcctggggctgcagggagaccccagaccctagagacccccacaacctgccgaggccacgggcaagcggttgccgggctccggccgctggcgaaggcggcgctggggcgggcacgggagctggacgcggtgcctgggaaaggagccgaggcgcgcgaggctgggtgccctcccgccgggagactgccgggaagaggtgcaaataatgccccgcgcccccgcctgtcccgcctctccgcagaccgggatgcgctaatgccgccgcccccacctgaaagctggcacgaccctccatccggtggaagcccctgtatacagagacagtactttccaccgggcccgcaaaaaagcctctgccccattccctccctcaggggcacccggaaagcctgccttagccccgaggggagaccctctagttcagatcccgcgccctccggcccctagggctccgggggcgccagctctcctcggagcactccaagcgcgggagctcgccggaggccacctccccgagccccgatgtccccgccgcagccctcgccccaggaggccggagggcacggtcccctctgtcggtccccctcgggccacaactcaccgcgcgccagcaaggtttaagccgcggcgaggggtcggctgcgtgccggcctgccccgggggcgcaggcagtcgacggccggaggcacggttctcgcggtgcccagagcccgggccgcggcgggcagcgctgacgctgcggacccagcgcgccgcggagccgcccggagtccgggacgcagcagggatgagctggcggccgcccggccggagccgccgccaagcgcgcggcgttcggctgctgctccggcaagcgagcaagcgagagggagatcggcggcaacccctgctcctgctgcggcggagcccggcgtccgagccggaaggagcgggagaggcggcaagaggagctgggtctggccgagagctccgggctgggaagggagcggagcgggagcgaccagcgagcgcagccggccgaggtacgggcgcctggcggcgccgcaacagcggcaacagcagcaggaaaaaaaatgagagcgagctagagagcgcgctggagagcgagcgagagagggagcgagagacgagagagcgaggaaggcgctgagaggggaggctgcgggagagggcgggagagccgggaagcgcaagggggcgagggggccgcagccgcttgccccggcgcccacagccgctgctgcacccgaggaggcacgagaccaatccggcaagtttgcgctgaaagtgcgggccaagctcacggcgcttctgccggccttttaaagagagagcac

SEQ ID NO: 4776 - DNA, 30 bp, Homo sapiens
  chr6:34192305-34192335
  hyper
ctgagggtcttccacgtcaccttgtggagc

SEQ ID NO: 4777 - DNA, 30 bp, Homo sapiens
  chr6:34217083-34217113
  hyper
ccctggcccgcccgcgtctggagctccgat

SEQ ID NO: 4778 - DNA, 132 bp, Homo sapiens
  chr6:34359604-34359736
  hyper
tctctgccacaaaggccggcccgcgcctcgtgcacgccggcctccgcacacatgtgcctggctgacaactgcggagcggcccttccaggatcaaagccgttggcctggaccgaaagccgcactcttcccagc

SEQ ID NO: 4779 - DNA, 88 bp, Homo sapiens
  chr6:34405048-34405136
  hyper
cgctggccagccgctccgagtgcgaggcccgcagaacctgtgcccacccgcccacccagaattcgcgctggcccgcgagccccgagcg

SEQ ID NO: 4780 - DNA, 30 bp, Homo sapiens
  chr6:34433774-34433804
  hyper
cgccgccctgcccgcgctaccattggctcg

SEQ ID NO: 4781 - DNA, 30 bp, Homo sapiens
  chr6:34856912-34856942
  hyper
cgagaggcgtgtctcggcacagcaaagtcc

SEQ ID NO: 4782 - DNA, 161 bp, Homo sapiens
  chr6:35464207-35464368
  hyper
ccgggcccgaggcctgcgtggagctgaggccgggcgggctccgggagcgcgcgggccgggagtccaaagggcggcggggcccgggactgggcgccccggatatgagctccagggtggcaggcaggccctccacactgtgcggcccccggatccccgccccg

SEQ ID NO: 4783 - DNA, 31 bp, Homo sapiens
  chr6:35465519-35465550
  hyper
ggcgcggggaggggacgcgggagcgcccggg

SEQ ID NO: 4784 - DNA, 30 bp, Homo sapiens
  chr6:35465830-35465860
  hyper
ggggggcacagcggcgcaggcgagctccga

SEQ ID NO: 4785 - DNA, 30 bp, Homo sapiens
  chr6:35696285-35696315
  hyper
cctttgggacgcctcggaaggtcttggcat

SEQ ID NO: 4786 - DNA, 30 bp, Homo sapiens
  chr6:35887695-35887725
  hyper
caaaaaagccgatacgccttacaggctcag

SEQ ID NO: 4787 - DNA, 30 bp, Homo sapiens
  chr6:35995283-35995313
  hyper
ccaggtatttgccccgccggccacggtgag

SEQ ID NO: 4788 - DNA, 813 bp, Homo sapiens
  chr6:36354972-36355785
  hyper
tgaggacctggctggcgcacgaacttccaaagacctcacatctggttggtgtaggggcgaccagtggtaagggggctgcggaaagggcccgcaggggctgtgcgtgatgccttcagagctgtgtatgacaccgagagagtcaggggcggtgacccgcgtctggaggtggaaggggaagtgagtgagggatggatgtgaggtttaggaatgtgttggaaagagagattcccgccaggtaaaaggtctgataaaataggtttggaaatctaggtggtgaggaaaggatgcgggagcaggtggctctgcgtgcgcgctgcgtgttcagccgccaggctcttacctgcattacaggtggaggtgaggaagccaccggctttctgtcttgagcgctcccctggctgtggctgctggggccctaggcccgcgccccgcagtcctcctccgccaaacccctaacctggctccgagaactggaaggtcgcgtgggaggaaatctctttcgagaagcgccaaggcgtgtgcgcccgggtcctccgcaggcgggcaggcgcgcgaggcgctccggtaatcgctatccttccgggaaacgaaaacgaaagagcgggatgcggttccacttgcgccgctgcgggctaggagcagggcagggcagggcaggggccggccccgtgggagcgcagcaccggggcgctgcccgctcgctagcctgggaggcgtgggtcctgcacacagcctccagccggcggacagtccctctggcgacctggccttggctcccactggggcagagccgggattctgcaggatctgagg

SEQ ID NO: 4789 - DNA, 30 bp, Homo sapiens
  chr6:36410485-36410515
  hyper
gggtaagcattagccgtcctggcgctgcac

SEQ ID NO: 4790 - DNA, 30 bp, Homo sapiens
  chr6:36515365-36515395
  hyper
gtgtgagtgtgaggcggtctcgaagtaggc

SEQ ID NO: 4791 - DNA, 30 bp, Homo sapiens
  chr6:36561543-36561573
  hyper
ccaggtcacctgaccggtctcctttgctgt

SEQ ID NO: 4792 - DNA, 30 bp, Homo sapiens
  chr6:36646238-36646268
  hyper
gtccagcgcaccaacgcaggcgagggactg

SEQ ID NO: 4793 - DNA, 30 bp, Homo sapiens
  chr6:36808192-36808222
  hyper
gccctactcgggggcgggtctcagttcaga

SEQ ID NO: 4794 - DNA, 30 bp, Homo sapiens
  chr6:37139527-37139557
  hyper
aggttgtgggcaaccggcggtagcccagat

SEQ ID NO: 4795 - DNA, 31 bp, Homo sapiens
  chr6:37446156-37446187
  hyper
catgcacgtaccttctcggggaaatcaggtt

SEQ ID NO: 4796 - DNA, 309 bp, Homo sapiens
  chr6:37665398-37665707
  hyper
cggcgcgggcgccgctcgccgcctccgctcgccgcgctcctctcccgccgtctggccgcggccgtagccctcccgggctccgagctctcgggagagcggggctacgccgcgccccaagttggtcgtccccgcccccgcccggcggccttggcctgcgggggcccagagcgggcggggccgggccgggctccggggcgcggcggccgctcggctccgggccgcgggagcgctccgctcgctcagcaacttgggctttgctgtgctgctttttcgcccctccgagcttttcattccgcgctcctcccgcct

SEQ ID NO: 4797 - DNA, 30 bp, Homo sapiens
  chr6:37673320-37673350
  hyper
cgtggacttggaggcgttcagcacacccgc

SEQ ID NO: 4798 - DNA, 30 bp, Homo sapiens
  chr6:39082990-39083020
  hyper
gcactggtgtgacccgcgtctcctccgttt

SEQ ID NO: 4799 - DNA, 47 bp, Homo sapiens
  chr6:39271081-39271128
  hyper
tgaggctgagctggggcgcagccactccgccacggcacagaatgtcc

SEQ ID NO: 4800 - DNA, 30 bp, Homo sapiens
  chr6:39281870-39281900
  hyper
agtccagcgccgggcggtccagacacgtga

SEQ ID NO: 4801 - DNA, 413 bp, Homo sapiens
  chr6:39901999-39902412
  hyper
cgggaagctgtggacgcaggcggggtgggctcacctccgaggcagctcgcgcggactccccggggcagggctgggtcaccggagcccctgagctgcagctccgggcgctggacctcagaagccgccgcagcatccgggacagtggccgcgccgccatgaagcctgatacgagcggaaccgcagcccgcttcgggagcacactggccgggcactcgcccccggggtcatcccagcaagggcggggaggggcagggggagggcgggacccgcgcagccaataggcgaggacgcagtcccgcgtggccttgtgggagctgtagtacgctccctgtgcccactttcctgggccggggtagcgctctagggcagaagggtaaactcaggtaaggaacggggttcttttccttccagtt

SEQ ID NO: 4802 - DNA, 407 bp, Homo sapiens
  chr6:40554479-40554886
  hyper
aagaaaggaaaggaaatctctcgcgataaggatgggcgaaaagagaagggggtgtccgcatgagcacctaggatgcggggagtcttcaagagaaaaagaaagggatgcaaagttcccggttccctcgggtgcgttcagccccgcgccgagctcccgcggacacccgggatcgcaaagacgcagcgccggcgaccactcacctgggcgaggcagcatctacccccggctgggtggcaccgaggccggctccgcggggcgcccgggctccccggctcggccacgcatccttccccgcccgagacagactcgagctaaaccctccggcggctccggcgaatgcaggcagatggtggcctcggacgtccacgcggggaaagccctgagccgcttattcagttatatccatg

SEQ ID NO: 4803 - DNA, 31 bp, Homo sapiens
  chr6:40763876-40763907
  hyper
ttcacaactgccttatcggatgggtattatt

SEQ ID NO: 4804 - DNA, 30 bp, Homo sapiens
  chr6:41040644-41040674
  hyper
ctcagaggcgcctgcgcggaggcggttgga

SEQ ID NO: 4805 - DNA, 84 bp, Homo sapiens
  chr6:41337044-41337128
  hyper
agccagggagtggaaacgccggaggtcctcaggctggggatcccggagtcctcgctcagattccgattccggagaaggccaatt

SEQ ID NO: 4806 - DNA, 489 bp, Homo sapiens
  chr6:41339069-41339558
  hyper
gggacagcctcctctatgcactgcttcctcttccccagccctgctccctgcatccttccctctggtcctagtgtcctggtgtcttgaagatgctgggtagttagaccgacatccctctccctctctcaccctgggctctgggacgctggccctgcttccccagagagcgatcgccccggacttgtgcctgtgttccggcctagggcagccggaacctcccgatatccccagaggagtctcaggacagcgcacagggaagtactggcttggagctgcgtgttccttgggcggccggcggagggcgaagagcaggaagagcccgggggacgacggtagcagagtgttggggaggccacagacgcggactgcgtggagaaagcacgcacccgggccgcagtagccgggcagggggacggcggaaagcagccctctctggaacattttattctgatccccgcaggactcccccgcgagccccggcttgagcag

SEQ ID NO: 4807 - DNA, 199 bp, Homo sapiens
  chr6:41339601-41339800
  hyper
cgtgggcacttacacgttcccggggaggctgggggcaggagcttcactgttcacacaaagagcgcttagaggaggaacatttaagtttgggggcaaagaaagaaaaaagagttaaaggtttaggagatgggggaggaggatggggcttaaggacgcggtgttgccgcggctcagccatcggggcgggaagctcggggag

SEQ ID NO: 4808 - DNA, 30 bp, Homo sapiens
  chr6:41340278-41340308
  hyper
ctctgtgggccccacgcttgctggctaccc

SEQ ID NO: 4809 - DNA, 30 bp, Homo sapiens
  chr6:41472017-41472047
  hyper
aagaggccccagggcgcataggaaaggagg

SEQ ID NO: 4810 - DNA, 160 bp, Homo sapiens
  chr6:41606196-41606356
  hyper
agagaaggaagaaggaaggggcgaacggcgtgagctggcgccgaaatgggagaaagcagcgagtgagaggggaaggggcgccaggcgagcacccgggagccagcgggacctgggcaggggcgcccggagcaggcgcgcatggcgggccccgcgcggggat

SEQ ID NO: 4811 - DNA, 49 bp, Homo sapiens
  chr6:41606527-41606576
  hyper
cgccctatggagcccccagcgcagccccgggcccaggtaggaccgggag

SEQ ID NO: 4812 - DNA, 30 bp, Homo sapiens
  chr6:41747776-41747806
  hyper
tgagcatgcgcagacgccagagggcgctcc

SEQ ID NO: 4813 - DNA, 30 bp, Homo sapiens
  chr6:41755384-41755414
  hyper
cggcgacgccgatacggttcctccaccgag

SEQ ID NO: 4814 - DNA, 30 bp, Homo sapiens
  chr6:41863682-41863712
  hyper
tattggctcccaggcgggtgagcacgtgtc

SEQ ID NO: 4815 - DNA, 30 bp, Homo sapiens
  chr6:41888907-41888937
  hyper
cccaaggaatggggcgtgtctcggcacccc

SEQ ID NO: 4816 - DNA, 30 bp, Homo sapiens
  chr6:42016698-42016728
  hyper
ccgctgcctcccggcgttggcaactcctcc

SEQ ID NO: 4817 - DNA, 30 bp, Homo sapiens
  chr6:42419076-42419106
  hyper
ctgtaaacaaatatcgctccgccaggaaac

SEQ ID NO: 4818 - DNA, 30 bp, Homo sapiens
  chr6:42419451-42419481
  hyper
actcccagatatagcgcccgccagccccct

SEQ ID NO: 4819 - DNA, 30 bp, Homo sapiens
  chr6:42531622-42531652
  hyper
tcccacaatgcattcgaggggcaccgtgtt

SEQ ID NO: 4820 - DNA, 30 bp, Homo sapiens
  chr6:42897235-42897265
  hyper
aggggaaactgctccgcgcgcgccgcggga

SEQ ID NO: 4821 - DNA, 55 bp, Homo sapiens
  chr6:42928455-42928510
  hyper
ttatgctttaagtgcggagcgggtggctgcggagccaggcgcggcgcaggatggt

SEQ ID NO: 4822 - DNA, 30 bp, Homo sapiens
  chr6:42947237-42947267
  hyper
acagtcagcatgctcgggatgactgggccc

SEQ ID NO: 4823 - DNA, 41 bp, Homo sapiens
  chr6:43138367-43138408
  hyper
gatgaatgaagatcctcgagccagcccggtgggaaagtttc

SEQ ID NO: 4824 - DNA, 30 bp, Homo sapiens
  chr6:43211198-43211228
  hyper
tgatgctggcggcgcggtgcattgtgggca

SEQ ID NO: 4825 - DNA, 211 bp, Homo sapiens
  chr6:43237315-43237526
  hyper
ggagacggagctgtcgagtctgtgcctgacacctcttttccctccactttcttggtctctttcagttggaggaggacagactctcggggcactccctcccgcggtacagccccctgcgacgactggcgtcctccgtgttctcctcctccacgctggagacggagcattaccctcaccccggcggcggcggctcctcgggctcctccggttc

SEQ ID NO: 4826 - DNA, 30 bp, Homo sapiens
  chr6:43242896-43242926
  hyper
gaggactgcgcagccggacccccgcaggtc

SEQ ID NO: 4827 - DNA, 30 bp, Homo sapiens
  chr6:43243446-43243476
  hyper
cacgccccaatccgcgtcccctgccccacc

SEQ ID NO: 4828 - DNA, 48 bp, Homo sapiens
  chr6:43423047-43423095
  hyper
gtcccctttctatctccgccgcgctgggttcggcggcggcgcggggcc

SEQ ID NO: 4829 - DNA, 30 bp, Homo sapiens
  chr6:43423742-43423772
  hyper
cctctgctcctcctcgccctccgcttcttc

SEQ ID NO: 4830 - DNA, 39 bp, Homo sapiens
  chr6:43478198-43478237
  hyper
ggcaaggagctgggagcgataggccgctcttcccttggg

SEQ ID NO: 4831 - DNA, 99 bp, Homo sapiens
  chr6:43596712-43596811
  hyper
cctcggggggcaaatacggggggttgttggctttgccccctctgttccttccgttcttcttctttccctttggccccccgcagccgctgctgctgccgg

SEQ ID NO: 4832 - DNA, 67 bp, Homo sapiens
  chr6:44094339-44094406
  hyper
tttataaattcagtcccgtccgtctcttacggtggcaaagttcatttatcgtcggctgtggaaagca

SEQ ID NO: 4833 - DNA, 174 bp, Homo sapiens
  chr6:44095870-44096044
  hyper
ttttttctgctgctcccgggggcgagtacacccgaagccggtccggggtaagggctcgggctcgggcaagggcagggttcgcaggtgctggcacgaggccggccgctgcccccggctctggggactgactggtcggcgggctggagaggcggccggccccgggagcgtgtcctc

SEQ ID NO: 4834 - DNA, 58 bp, Homo sapiens
  chr6:44187016-44187074
  hyper
cacccccagccctgcggggctttctgcctgccacacgccgtccctgctcactacccca

SEQ ID NO: 4835 - DNA, 16 bp, Homo sapiens
  chr6:44187131-44187147
  hyper
cgacccagggggaggg

SEQ ID NO: 4836 - DNA, 30 bp, Homo sapiens
  chr6:44214200-44214230
  hyper
tgccgcagtgccgccgccgcgccttccgcc

SEQ ID NO: 4837 - DNA, 542 bp, Homo sapiens
  chr6:44265093-44265635
  hyper
cttcttcccagtccctcccctcgcctcactcggatccccagccccgggccagacggtttgcagacagtgactgtggtggggaggaggcgcggggcgtcctcgcgtggagggcgtggggtctcccgtgggtacggaccggcgcttccccgccacggaaaacgcaacccaggcaatggccgcccgtgggcttcgggccggtgtgggcagaggacgctagaggggctcccgggcccagccggccagagggggccccgataagggagaccggggctgggtgtccccactcccggaggtcgcctcacccgctccgggagccccggcgctcgcctcacgcagagtcccgcgcgccggcgcaggtctttgtcgttggggacgccccgcgttgctaggagcgggccgggccgggaggacgagcgcgccgctgcttcctccgctgccgctgccgctgcgcgccaggcacgcggcttactcgcgcgcagggtggccaggcccggcctcgggacggttccgtggaagcggccgctttgcgggtagtgggactg

SEQ ID NO: 4838 - DNA, 805 bp, Homo sapiens
  chr6:45387304-45388109
  hyper
ctctctctctcttttttgaggcgaaagcctggcttcccttcccggatcggccgcctgtgggactcgagagacctgtgcacgcaggggacgcggcggtgcccggggttagagctctcccctgtgaccgaaaagataattaaaaatcgcacgcgcaggagccagctcagctcctggctgcgcttccagttggtccggtctggctaaatgggttctcgcaccctggcggcgcccgggctgggaggccagtaggccgggcgcgaagagtaggttggggaccaggtgtcatagccggtggcgcagaatcgcttctcggagtcaccgagggtggcagtggcaggcggcggctgtggggcgggaggggcgcggcttggggctagtgtctgtggagggatttggggaagaggcaggaacgtggagagaaacgtgggaaagggaaagaccgacgagggaggcgtggagcagtgcatggaggaagggcaggtaaaaataaagccccaattaggaaggacagagtagtatcccctgaactccatccttacccctcgagagcgcacacctggctaccccgcacccccacctctgctcccgcggtctggcagaccctcagtcccccgcgcatctcttcagcggggcgatcccgagtcacgcaaccacagccccccaagctcatcttgtactcgaaagggctccagagtccgcgactggcaccaggcccccatcttccgtgcccctcatgctctcagagcccttccaggccccttctagggcgcagacccgggcgtgggctcagcgagtgggagcaaag

SEQ ID NO: 4839 - DNA, 422 bp, Homo sapiens
  chr6:45388353-45388775
  hyper
ttggcaactgatgatttttttcgcaaacacgttttcaagctttggaaggctttaaagagtttggtaataagcaagaaacgtagtagtacacaacgccgagggtaaaacggccctgtgcccccttcttggggtgtaatagcctcaagcggatttcccggcttctgcgggcgcagcacattgttttatttgttttgaaggctcagagtttgaggctggtcgtagacacccacgtgctctgactctcatcagcgtaatgatcgacttagccagagtcgtgtctatataaaccacaaaaacctaatcattagaaatcccagcctccaaaaaccacattttaggtaaaaagtgccgctttttttccgcgctccttcatcctctcgaccacaactttttgggggatccaaagtcgctttttaaaccca

SEQ ID NO: 4840 - DNA, 361 bp, Homo sapiens
  chr6:45391029-45391390
  hyper
aaagtacccactcttgcactgcgagcggacttgctccaccccgcccctttcccgggggcgaggatccccggcattgtcccctggggctcccgcgtccttccgggacatcccggcctggccgcattgcgggctgcccgcgcagcctctctttggggctccgcgcgctctcacccgcttccctcacagccaaacgcctctcctcaggtctcggcgtccccttccccgacccgcagagttcagcggtcctggtccctcccgggctcccgtgccgggattcgtggggtgccggtgccgggcattagtgcccggggctgggcgtggggtgctgactgaggcgcgcgggctgcgctaccagtgcccg

SEQ ID NO: 4841 - DNA, 963 bp, Homo sapiens
  chr6:45982720-45983683
  hyper
ttttattttaggatctctgagcgaaagagagaaagagaattttaagaaatgtcattttcgctttgccaaagatcattgtgtcaataacgtttctctcccattcctccccctcctcccgttttaaaggaaaggttcacgggtccagccaggtttctgccgcatcccgacacctggagacgtctttcaggaccagcctgaatcgcgtccgggctgggctctggactcggactcgcagcggtgacagcggaggcggggacgggggtggacaaactgcggatcaactctccgagaagacggccacctgccggaacctgccttcctccattccgcccaggagcctcgcagcggggcgctggcctgcggaaaggccacgggggagcacagggctccgcgccgccctcctgggagggtccggagtccagcgcaccccgagccctggtgggtgagcccggcgggaggcgcggcaggtgcggcgggagactggaccccgacctaccttcacaaagagctcgatctcggggtccctgtcgtccccgttagctgtcgccgagtctgtcatgccgttggcgcccggggctaccgtcccgggccggggaggcgccacctctgcagcacctgggccagcactctgcgctcctgccgctgcccagcggggctcctcttcagggcggtgtttaatttttcacaaaaccatctattctccagcccgagcagcggggtctgagagatcagtgtcccagatgctcacatgaaaaggagcgaagccgggaggaggcggggggccacggggaaagccgggttaagggaatgacaacaggtcgtgggagcaacaagtgccgggctgcccggaggtgtcacaggatccgcgactgtcagcgatcccgccgccgccaacgcgcccaaaatagccggcggctgcagggcggggtcagccgggcggggacgcggcggggacaccccggc

SEQ ID NO: 4842 - DNA, 357 bp, Homo sapiens
  chr6:46097264-46097621
  hyper
gcttatccagtaagacggacagacgtctatggtagatccacgtttcatttatcccaactcactggaactggctgaagcttctccagacttgtgccggaccttggtgcagccaaagttgctttctccgcggccacctaagctgccaggtgcacattaactaagtggcagaaggccatcggcttggcaattgcctgaggcctttccgggactcgctggtttttaggttccatgaagggcatccagatctaggatgatacgaaaagtgcgtggtgggagagtggaatcaacctctactcttaggtccgatacaacccctccaagcacctgtctaaccaatcggaaagaaagttacattca

SEQ ID NO: 4843 - DNA, 403 bp, Homo sapiens
  chr6:46097694-46098097
  hyper
cgccttagacgctcgcctggcagctgcgcacactcggagcgccccgagcggcgcagatagggacgttggggctgtgccccgcggcgcggcgcctgccactgcgcaggcgcctcaggaagagctcggcatcgcccctcttcctccaggtcccccttccccgcaacttcccacgagtgccaggtgccgcgagcgccgagttccgcgcattggaaagaagcgaccgcggcggctggtgagtacgcgcctcgcgcgctcggcgttctggggggcaatgtcaccccctctccagtcccctaggggctttgaaaatagagatggtgagaccagaccctatgacccactctcccccactacacgcacatcccctggggcgcggcggggacgtccacgaagggactcaaag

SEQ ID NO: 4844 - DNA, 595 bp, Homo sapiens
  chr6:46138266-46138861
  hyper
ggggcaccgattaaacggaagagggaaagtgcagaaggagtaggtttgtgtagctcgggtagacgtcaagggcgggggtgtccatcttctccaccaggattccatcctagccacccagaatggtcgcggcgtaggttatgttcccaattcccagtcatcccgcccaccgaggcctgggcttcttagatgtgcagtggcaaggaggggacgttgctttagggacccagaggagcagtgtgggttcccgggagggaagccacccacgcccctggactcaccctcgcagcgatccgttcagtccgtattagtttggagcaacgggagggagggtctggaggagactccctcgggcgcgccgcgggtaacggcgggagggtgactggaggaacgcccccggaacgcgcaggagctcacctgcgctcaactctggagcggagcacctgaccgcgccgcttccccgccccgcctcctggcttctattggctgctgcagagatagtcacttctgcctgggttgcccccgaaagccaggctcccaggagtagctgcacggcctgtcaatcagcgggggcaggggcgggcgctgcctgggtttg

SEQ ID NO: 4845 - DNA, 735 bp, Homo sapiens
  chr6:46702701-46703436
  hyper
actggtgtctaataccgtcatcctctccctctccccgcaaggatcctagcgctgtttccgagggctgcagggactgtgagcccaggaccggccagcagagcgggtgcgactcagcgagcccaccccggccggtcgccgctccggggtcccgacctccagcgcggcgaccgtgcccttcctcccactcccgcctcgcccccggggcccctcctcactcaggcgcggcgcggagctgctcgcgggaactggggtccctgggcgcgttccaccgcgcaccaacgcgacccaagcgctccaaacccgactgcttctcgccgacagcactgcgagcctccgaccagccgctgtccccctggctgcgggccgagcagctctggcaggcggcgggcgggtgggctgcgcgcgggctgtgtcctgggtccgcctagcgcggccttgtggccccgaccctctcctcccctggtgatgctggaggaggtaccggggaggagcgtgtgtggccccggcctctcactagcagcggcggctcccgacgctagcctgctcgagcgcacccagcaccctccccaagaccatggcccgcacctggacccgcggttaacttagcccgccgcggagagagccaggcaatgcctgggtggtgtcgtgctcaccagctcctttccgcagacctgatgccgatcagatttactccctgctgaattcaccccccagtcaggccggttttccttgttt

SEQ ID NO: 4846 - DNA, 61 bp, Homo sapiens
  chr6:46816791-46816852
  hyper
actgactgcctcccgccggcttcctgaggccggaccgcagcggggacgcctcctctcaggc

SEQ ID NO: 4847 - DNA, 540 bp, Homo sapiens
  chr6:47276364-47276904
  hyper
cctagccacaggtaaacgagggatcggaaagactgtagaaaattcatcttccttcacacacatctccttccccctccccccattccagtgccggcgcgctggctggctggaagccggcgctttggaggcgccggagagtgggtctaagggtgatatttcggcatacagaacctgagaccccacccgagccaagagggaagagagagggtaaagggattgaggagggggcggcttgcgccctgctcgggaatgcaccgcgcgacagcacccggaggtctccggtgtccggcgcgcaccggtaccactgtcttccactgcggtagcatcccgacatgacattgcagctgcaacaaagcgccggcctcggccggccgtgggagccccacaccgcggcgaggccccacaccacgcagaggggcagtggccgatgggtggggggctgtggctgcgggcgtggggagcgcgaggtaggccgagtagggggaaaagccctcaaatgcgcagaagctgggcggctacctctagcgtctcctccagcaa

SEQ ID NO: 4848 - DNA, 30 bp, Homo sapiens
  chr6:47413210-47413240
  hyper
tttcataagaatgacaagagaggcaccagc

SEQ ID NO: 4849 - DNA, 30 bp, Homo sapiens
  chr6:47655314-47655344
  hyper
ctgggagatcacctcaacctgcctgactgg

SEQ ID NO: 4850 - DNA, 789 bp, Homo sapiens
  chr6:49518487-49519276
  hyper
cggtcaaagaaggaacgaatgaatgacccttttgccaggatggagacccgggggcctcagggagctgcgaatcccatggactcctcccgcagcctgggggacctcgggccttttccgcgggaggtagggcgcggggctccgctagctccgggcgcccggaatcccgcgacggcaggggcgagccgaagccagggcggcggccacgaggacagaacggcagatcgggccctcggacctcgggccggggaggaattggaccgtgagtcctgggtcagagagaaagtgctctttctcctgcacccagagaggtggttagggactcgaggggaccctgcacgggaagaggtggccggtgcagaggaccttcctcatgcgggtggagaggaccacggcgaggagcccaactacccttctgtctttcaacgacaaaagcgaatttctggcaggcgtgtagccccgccgcgggacgcagcagacccacccaaatacgtgcttgtgcgggtggaggattatcaggtaacacaagaagtgttgcagacctcctgggccaagggtcgcatgaccacgaggactgaggagcacttcgtgaccgcgctcacttttcgcagcagtagagagggacagcctggggaacgctggggccctgctgaatcccgggctctccaggcacgaacaggggcatcccgcgtccacgccgcggggaggagggtttcaccgtctccagggacttggctcgaggaaattaaactctaatgagtagctcgagaaatgttccgggatggtggatga

SEQ ID NO: 4851 - DNA, 407 bp, Homo sapiens
  chr6:50674398-50674805
  hyper
cggaattcaccaagccgcagctgcctgccgctgaatgcgaagagggcgcaggagactggcaggtacagctggtggtcccttcggcctgatttccctgctgagtgccacagcgtccgagatccacgactggccaggtggagccaccgactctgaagagaaccagaggcggaccagccaggggagagggcaaccctgggagcactgcacccttgtcggtcccctggaaagctagcggtaagatccgggaggctgaatttgaggccgcggtagtccaggcgacttcccctggaaggtgtgacgatgacttgtactgcaaaagaagcctagaccaggcctccgtctgggtgttttcttttaggcgtttggagagggatggagatggtgggtgggggcgagggggaggggta

SEQ ID NO: 4852 - DNA, 544 bp, Homo sapiens
  chr6:50787332-50787876
  hyper
ggaaatttctgcccacgttcaatgcgtacgggtctctagcactgaggctagctcaactcttcggggcaggagaagttgcgcccagccaggaggacgccagccgcctccggggcccggaccgcgctcgccaaagcccttttccggctcgggcgagggctgacgcggccagacggctccgctactcgcgggcgaggcggactaggcggacgaggcggccgaggcgggcgaggtgggagaggcgggcgaggtgggagaggcggccgaggcgggcgaggcgcggggcgcgcggcgggccaggctggggaccgggaagcccgcggagcctcgcttttaagcggaatggtctgggacagccccaggtggttgccaggggaagggaggaagggaaggttctgctgagacgtcgaggttggaaataaaaacttcggaaaggcgaagcggatttagaaaaggagggaagtcgaggcgggcgaagcgggccatggagattgctaagaggaaaagttggagagaaaaggaaggaagagaagcagactcccgggtg

SEQ ID NO: 4853 - DNA, 97 bp, Homo sapiens
  chr6:50787949-50788046
  hyper
cgacccctccggatcgggacagctcctgaaagcccggcgcagagccgcctcgaagatcctaagagtgggcgactcacaggcgcggccggcaagctcc

SEQ ID NO: 4854 - DNA, 107 bp, Homo sapiens
  chr6:50788271-50788378
  hyper
tttgtggttgtgtatcgactgtaacgaagagccgcgcctacgcgcctggtggggattgtttcggttcggcctccttttctttccttaacaggcgggataatggtaaa

SEQ ID NO: 4855 - DNA, 313 bp, Homo sapiens
  chr6:50791181-50791494
  hyper
aggaccctactcgagcgccccgccgctgtcccacaccccgtcgtcggacttccagccgccctacttcccacccccctaccagccgctcccctaccaccagagccaggacccctactcccacgtcaacgacccctactccctgaacccactgcaccagccccagcaacatccctgggggcaacggcagcggcaagaagtgggttcggaagccggctctctcctgccccagcctcgggccgccttgccccagctctcgggccttgacccccggagggactaccactcggtccgccggccggacgtgctgctgcat

SEQ ID NO: 4856 - DNA, 15 bp, Homo sapiens
  chr6:50791550-50791565
  hyper
cggccatcccggaat

SEQ ID NO: 4857 - DNA, 166 bp, Homo sapiens
  chr6:50794581-50794747
  hyper
actaaagaagtctagtaattacgagtctgagttgtttttctgcgcttccgcatgcagtcctaattaaatctttacgatcctccctgtgacgattaagcgccagcatgctgcgtgaatatcctgtacaaaaacccagcaggcggccgtaattagatagaaaatcaga

SEQ ID NO: 4858 - DNA, 257 bp, Homo sapiens
  chr6:50803770-50804027
  hyper
tagttccagttcctcccaaatcggtgacttctctaatgatgaataaagacggcttcctgggaggcatgtctgtcaacaccggcgaggtgttttgctccgtcccaggccgtttgtctctgctcagttcaacttcgaagtacaaagtaactgtgggagaagttcagagacggctgtcgccccctgaatgcctcaatgcatctctcctcggcggagtcctcagaaggtaaccccaccacgaaaaacaaaaacaaaaacaa

SEQ ID NO: 4859 - DNA, 201 bp, Homo sapiens
  chr6:50805674-50805875
  hyper
cttgcaatttcagagccaaatcgaaaaatggggggagatctttgcgagaaaggctagaaaaaatcggtttgaatttacccgcgggcaggcgcaaagcagcaaatgtcacgttactcacctccctggtggaaggtaagcaagacgtgtggccatttcacgaagtggctgagcttaactgtcggctggaggctgacattttac

SEQ ID NO: 4860 - DNA, 189 bp, Homo sapiens
  chr6:50808577-50808766
  hyper
atttactcctgtctttggcttcggtgtcatattgttggtgttttatggccggctcaggcctgcagtgggcggcgctgcgtgcgcccgcacgtttctcttgcaggcgcggcccaaacagccgcgctcatttatttagtgttggaggacgcggtttgtcccgttgacagcgtaatttaaagaaatatatgg

SEQ ID NO: 4861 - DNA, 46 bp, Homo sapiens
  chr6:50810667-50810713
  hyper
aaacagagcggaatcgcccacattagcctcgctcttcggtgacccg

SEQ ID NO: 4862 - DNA, 142 bp, Homo sapiens
  chr6:50811709-50811851
  hyper
cccgcccagccctgcgatcttaactcaccgggcccggctccccggccgcttgcataattagggagggcgagggcggggcgggaggcctgtggagaccaggcggaggctgcaatttttggtgccggccggcagagcaggttct

SEQ ID NO: 4863 - DNA, 490 bp, Homo sapiens
  chr6:50813325-50813815
  hyper
gagagctcggccgatcgcattagatgtgttctgattgcacaaggccaggagagaccacactgaaaacgatcgtctcctttccttgcagggcaacgcgccccacgcgtgtgacgtgcgagagacgcgatggacgcgccttgctcttactgtgcaggtcctgagagcgtgtgggccacaggcgcccagtcgtgttgaggacatagaatcagccgctggaggggctgccgactgcgcgggcccttcccgctctcggtctcaccctaagggctaaggcgaccgagaaagccccattctccagtaggtaatggggcggcgcccggtgggctgcaggtggggagggctcccagcgccgccagcggccacccggggcgccggctcctggagggagagtggcctagaaatatccaaggaatccgaagcttcccctcctccacctctgccagtacggaaacaccccaccgtcacaatcctaaagcggggagatgggatg

SEQ ID NO: 4864 - DNA, 179 bp, Homo sapiens
  chr6:50818778-50818957
  hyper
tggccaatggacttaacaaagcgtgacttgcccaggctgcacggagggcaactctggcagtcatctgtaactcgaccagttaacgtcccgaacgtgcctgttcgcggagatattagcaaacgtttcaaggatgtggctgtcagatgtcattagccaacgcttgctcacccaaccatttg

SEQ ID NO: 4865 - DNA, 40 bp, Homo sapiens
  chr6:52226739-52226779
  hyper
gctaccagggactgcgagggtctgcgtcctgggtggaagg

SEQ ID NO: 4866 - DNA, 1040 bp, Homo sapiens
  chr6:52227004-52228044
  hyper
ccgggctgggctacgcgcacgggctcggccgccgcccctgccggtgagtcccgccgcgggaggcgcggaacgggtcgagttgggtattgggaccgcgaggtcggggagccccggggcccgagctcgggaggcggggacgtcaggatcgcggcgttggggagtcctcgcaccccgagctcagaggggaggtccagagtcgcagcgttgggaacctgaggccaggggccggagtttagggccccgatgttgagtctccgaatccaagcccggaaggggggacgacgggttaggatgctggggagccctggagctctgaacggctgtagtggggtggccaggactgcgatgctggggagtcatggagcctgagcctggagagctggcgggggtgtggggaccgcgatgttgggaaggctgagcccggagggcgggagattcaggaccaagacgtgggggagtccgacagggcagaacgaggggcgtcctgtccgcatttgtggggcgccctccgcagggcggaggggaacggaacctgggaggggagtgcggaggagaggaagcccggggcggtagggagagcccgaggaagggcagcccgaggtaggggaaccccggaaagagtagggtgggtctaggcatgtgctttcgccggggaaagatggagggggcttctctgagagggtgggcgcgaggagcggagttgtgatgggaaccgccggcagctggctaatgggcggatgctggggcttggctggatgggaacgccgcggtggggtgtcggaggtggctggtggggctggaacgctgggaacgtctgtctaggctatgagaacgcagcgccctcggtggaacagggtcgtagataactcgagagggaatctagtctagggagcaagaccgggcatccccagacggaggcgggtggggacctcgcactcagcgcgcttggggaatattcggagcctgggtttgggggctgctgcaccttgccgacccggtgcggggacctggaggtagccgggcacagcagcttcctgtgc

SEQ ID NO: 4867 - DNA, 30 bp, Homo sapiens
  chr6:52284758-52284788
  hyper
ggcgcagtgaggtccgccaggactaggtgg

SEQ ID NO: 4868 - DNA, 30 bp, Homo sapiens
  chr6:52442134-52442164
  hyper
ggccgcggaggaggcgggcgcccaggcctg

SEQ ID NO: 4869 - DNA, 108 bp, Homo sapiens
  chr6:52535660-52535768
  hyper
cctgctccgtcaggcgggaggcagcaaaccccagccctggctccaggacagggccgaaggcaggatagacggagcaacgggtccggctgccgccgggatgttgcagca

SEQ ID NO: 4870 - DNA, 30 bp, Homo sapiens
  chr6:52926578-52926608
  hyper
agcaggaacccggccgttttccagcctccg

SEQ ID NO: 4871 - DNA, 1865 bp, Homo sapiens
  chr6:53212357-53214222
  hyper
caacatcagctcttccgtacaattctatgaagcacttcctgccacgggtcccgctatttaaaacaaattaggctgctcgctccccacaaatcccatctagcacctctcggttcctcagtctagctaataaaccatgcactggattcttccgaaagagaccccccgcccccgaccccgccacctccgccactttgcataactggccaaatgcattctccaaatttgcaatcaaggagcttaattcacaattgtggatggggcggggggaaccgccaagtgcaagaacacggaacggttgcaagacgcagttcagcaagaacaactcttgctctaggcattgctccgtcgacccgaggtggtggggtgggagagtcttaccggcgtggaaacagtaaaaaggcacttttccttacaactcgcaagacaacacacactctagctcccccggcgcagagcacaaccgcccccccgccgcgcgcctccctcgcagccaaccgctcccgcctctccagggatcaggctcccagaaagggccgccccggtcgcccccgagtccccgccctctcgctttcccaccagcctcatccctccctgagtaccaagggctgccgttgtctggtttcaataaaaactgaagcggtcccgagctagcaggcttccctccgaggggcggacggaaggtccgcagggttaacggaagcggagagaacaggacaaaaaggaaaggccggagagtccccccagcggcgcccggtgcccgcagaccctcgcacaggctcttcgaactcacccgggtttcgccgactccaaagaaagcgcgctccctccgagagcgctcccccggctctcccgccgcgcgctccggcccgcagggcgggaggacccaggcggacagatccatccctccgcgtctggtgtgggcacggtgtcgtgccccgcggcgcctgtcagcgcgcacaggtgggaccgcagcacagagaacgctcccgagcgccctgcctcagcctcggcgtggggcgagccgcccgcgcccgcacccgcacccctttccccgcgcccgaggagccgggctgtaccccggagccggcggagctggaggccgcgggcggagcgcgggttgccccggcagctctttctcggcaccaggtccgagacctaacggcagttctctctgaccgcttcccggccgcgcgctcgcgcgggtgtcatggccgagcggcggcccccgacgaagtttcccggagctgacggctttaccttttagcccaaggggcggcagcagctttgagcagcagcaaggcggcggcggcggagggagcgcgggtggcagccggcgcagaggcggatgtagaaggagacaccggtggctaggacccgcgcgatgggaagaggaaggcgccggctatctacaatcagaacgtgggctgaccgtgacgtcacaatggcgcggccagccaatcgggacccgaaggatgaatcaagcgctatgatgtcatgcggcccgggagccaatcgcgggacaatagaactttcgtgatcgtaaattccagaatccgatgcggtggagagcctaggccggggttggcccctcggttccacgtgtctctgggaaatttttttcccctttcttcctaataagcctgcgtggaacgcagagcctgcgcaatagccccggtgaagttgtcgatgccctgaactctggtttttttactgccaggcgtggcaggagtctgtggccgcatttgggtggcagaagcccaccctcgttacggtctcctctatgagttatgtcatgctgaaggggatccacttcatcgttaaagctgaaagggttaaatgcccacggagaccgccggagtgaaggt

SEQ ID NO: 4872 - DNA, 420 bp, Homo sapiens
  chr6:53409099-53409519
  hyper
agtcaggaggatggccctggacgcggactaggcgaaagcagggacgatgctcccggggccgggaggcgctcgaggacccccgggcgcagtggagaacgcggaccgcgatagggccgggggcgtagggcaagacaaaggcagcgcgggcggccagacacgggtgcccggcggggacggggaccgcgggcgctcacctcatcgccccacttgagaacgtccttgtgccggtccttgacggcgtggtagatgtgcaggaactggaggatcccgtgccgccgcacgtggtcggcatggcgcttggtttcctcccagctcagcggcgagccctgggacagcagccccatggccgccccctcctcctcctcctcctcctccgggctgacggcggtcgcccgctccgggcgcgagacggacactcag

SEQ ID NO: 4873 - DNA, 406 bp, Homo sapiens
  chr6:53409552-53409958
  hyper
cgggggcgctctcgggccgcagtcggcggagggagggtcctgcccgctccggctccccggcggcggcccctggcgcccaggtgacagaccctgggtccgacgcaccgcgcggaggcgaaggcagaagaccgagagcaggcgggacggctctcggcccggcggcctcgccctccccgctgctcctcctcccgctccgatgcggcggcggcggaccccacggccgcgctgccgcggcggctcccgcttctctttgccggtctggtgcactggcttcttcctacttgtgaccaaaacctgcgccgccgcggagcatgcccagtctttgcgtccgctagctcgccgctcctgggcgcgatcctgcgctccaggttttatagactacgggcgaaggcggggagaggaggcg

SEQ ID NO: 4874 - DNA, 292 bp, Homo sapiens
  chr6:53659860-53660152
  hyper
acggggcaggggctcccgctccaggttccttgaagcacttccgaccgcgaagcccggcgcgagaagcgagctaacccaagagccaacaacgagcgcggagagggcagcggactgagcggagccgccggccagagcgggctcggagcccgggtctccgccgctcgggacccggctaggcggcggcgggggcggcgatgttccactgcatccccctgtggcggtgcaaccgtcatgtggagagcatcgacaagcgccactgctcgctggtctacgtccccgaggagatctaccg

SEQ ID NO: 4875 - DNA, 30 bp, Homo sapiens
  chr6:54835453-54835483
  hyper
tcaggccttttgaggatggacctgcttgag

SEQ ID NO: 4876 - DNA, 263 bp, Homo sapiens
  chr6:56112256-56112519
  hyper
caggcagtggcaagcccaacccgagcaagacctgcgctgaaacggattggctgccctccgcccggagtccgttctccctgcagcggccagtgcagagctcagaggctcagaaactcgctctcagccccctggaggcggagcccgggagataaggttcgcgctccccacccgccccctttccttggccgaagaccagagggtggattttggatctggatcttgaagggcgaactgctagtgtcgccctggtggaaacactcagt

SEQ ID NO: 4877 - DNA, 20 bp, Homo sapiens
  chr6:56716279-56716299
  hyper
attccagggtaaggtgtctc

SEQ ID NO: 4878 - DNA, 238 bp, Homo sapiens
  chr6:56716389-56716627
  hyper
cgttcccggaactctacagagaatgacacagaaaaagcattaacagcaaaatactcacatatgctcaatgatttaaacatctcccccaccaaccaccgccgccctccctgcccccaaactgggtctggcatatcctgcaccatcctcggagctgagggaatatgcagaaaccaaaaaaataaaacccggagctcaccatcttttcttggccaagtctccaatcgtaaaaacaatacac

SEQ ID NO: 4879 - DNA, 30 bp, Homo sapiens
  chr6:56716869-56716899
  hyper
tcccaactcctttccgcttcaagtcacctc

SEQ ID NO: 4880 - DNA, 1330 bp, Homo sapiens
  chr6:56818656-56819986
  hyper
ttgttcttcacctaccgagtgactcatgacttacctgggagaccagggttgggaaagcacatcgcagactcctggaattcggtgggacatcctgggggagggaggaggagtcctggggccatcggtctctacgtgatttctccgcgagaagtttgcatgaaagttctgggggagttggggagccccgaagtttccatgccttactttcttacccctacgctccagcgaaggatgcgtgaaggcgaggctggcgcagccccggactacgctcaaattacccttaaggctttagcaaactgactaaaaatttgagttctttcctcccctccctgccctcggcatcgccgtggttattcaaacctgggagactggagggcggaggtgacggcaaaaagggcaaggggcgttaaagaaacgcactcagcctggggagtgggcaatgatggggctaggggcagccgaggagaagggagcgagccgcgcttcactctccaaatcggcttaattgttcctggtagcccgcagaaacccgtcgcggcgtgtcttacctcggcttcttgaacgacccgagaagaccgatttcatcggatgcctccctttctggagcttgcggtgccagcagcagaagaagacgatggtggcgatggtgcccagcagaagcaacaagaggaagagggcacattggatgctgtagggtctcagcaagacgaggaaagccgcggcgatcatggtgcgggcgaggcgagggcgactcgacggcggggctggagggcggcggcacaggcacccgcgctgggcgcacgccgggacggcgggcacgggtgagcgcggctcagcgcgtcatgcctggcgctcgcggccccgcgcccagcccaatggctgcgcaccccgcgccagccgcgctacgcgagtgatccagggctgcggggagcgcttgccatgactcagcagacagcgacgaggctgcgactcggcggctgggatcctctcccctccctccccaggcgcccccgcccccgtccgtgcgcagcccccgggcgcagccccgccggggacgcggcgagtggggaggagcagcgccgccgccgcggccgcccgggccccgcgcatcgtcctgcggccgccgccgacctcagcatcccagaagccgggcgcacgtgggtcggggcggggacgcggcgctcaggctgcagccgcggcagcctgcggggggcgggaatggggcgccgcggcgggggctcggctgatgacatcacggccaggctgcggcagcgcgggcgcgcggacatggctgcggcggtttcggcggcgtccgcgggctgcacccggg

SEQ ID NO: 4881 - DNA, 142 bp, Homo sapiens
  chr6:56820756-56820898
  hyper
gcacggaaggtatagcgagagcgctgcagtgtgcctttctgcggacggccacggccacctggccaggaagcggctgctgcagcagtcattctgcggcatcttgcggccttggcgggcggtgctgtgccgcgttctgctgccc

SEQ ID NO: 4882 - DNA, 30 bp, Homo sapiens
  chr6:56911387-56911417
  hyper
cccctcttttgaagcggttttcgtctcttt

SEQ ID NO: 4883 - DNA, 398 bp, Homo sapiens
  chr6:57036933-57037331
  hyper
tgggtgctgggagaaactaaacgaagccgtcactgagcaatacacccacagcccgtcgaccgataggaaccttcgcgtggggggagttggttacttttaggttgcatgaagaggcggggcctcgcggggcggagctgggggtggtctgtgggtccgcgcgggcttcgggtagttcctgggtccggggagcagacgatccgctagccacattaggcgctcggtctctgcgtccgcccctcccgtgcctcagagacttgcgctccccaggcccgagcccctgtcggcccatcctcgagcccgtgtggctcgcgaacctctaactccagccgctgcagccccctcccaggcccggcgtccccgagccccgcgggcgccgcgcctgcccttctttggctacg

SEQ ID NO: 4884 - DNA, 30 bp, Homo sapiens
  chr6:57086278-57086308
  hyper
gggtaaagagtggtcgcactgcagggagga

SEQ ID NO: 4885 - DNA, 30 bp, Homo sapiens
  chr6:57087023-57087053
  hyper
ctcagcagcagctccgccgggggtggtggg

SEQ ID NO: 4886 - DNA, 30 bp, Homo sapiens
  chr6:57943180-57943210
  hyper
cactgaaataaaaagtcttcttccctggca

SEQ ID NO: 4887 - DNA, 30 bp, Homo sapiens
  chr6:58287415-58287445
  hyper
gggcagtcactcaccgaaccccgaaccccg

SEQ ID NO: 4888 - DNA, 366 bp, Homo sapiens
  chr6:62995508-62995874
  hyper
ctaacaggtcacatcgccactgccattagatctccgtagctttggtcttctccaaattaagacgtggagaaggagcactgctgtccgccccaagaacggggtctgtccgcccgagctctaaggcgagcatcttcagggggacagtttctgcgaaggcggggagaggagtccctccccaacttcactcccctaatcaagccgcgggtgagataggcagccggcggtttgtgcccatctgtgggggcaagtcctaccttctgccaaaaggcgcgacgcatgcacaaaagatggatccaggctatctttctctgccatcagctcaggcaaatatttctcctcttccatagcgcggacttcggattgtcc

SEQ ID NO: 4889 - DNA, 453 bp, Homo sapiens
  chr6:62996077-62996530
  hyper
cgcagagccccggctcacaccagcggccttaactggagaggcgggaacaggacgcggcccacctccgccaaccactcattggtggtggtgccaggagaggcggggcgctggcagaaggccgcgggctctcattgggcggtagcgcaagtcgggtggcctgactggcaggaggcagctgcagaggggaagggagctcggaagatgcaaacgctttcttcttgcgcccaagccttccctggctattaggcatgcccagttttgtggagttctctgtgtcttcagctaaggcgcagaggagagagagcgcgggaaaagcgcaggttaaagagagaggtctgagtacaagtggacaggggagatggagatgagaagtgagccacccgagagggtggaaaagcgccagggaaagtctcaggaaggtagatgggacttcacctgcgtccctaaggcaca

SEQ ID NO: 4890 - DNA, 31 bp, Homo sapiens
  chr6:64283109-64283140
  hyper
gtggcccggggtggggcgagggctgcgcgtg

SEQ ID NO: 4891 - DNA, 831 bp, Homo sapiens
  chr6:69344503-69345334
  hyper
agccagagacactcagcagctcggtagctgggatgtgccccctccgctgcggactggatcaattctgaatcccggtactgaaatgacagctctctggctgcgacaggtctgcgctgaaagaaagagaaagacgatcaagtccagcattcacttcccacccttcagagtcgccttcccatcctccgcacccccctgcctcgcctcccagtgagtttctcttacagttggtcgccgccagccccagcggtgggaactgaggatgcaaaaacctcccagacgcagaaaataccgctttcgggacgtgcttgggtttgagtagccgtgacgtgcaggcgaaccgcggccctggctggagctccgtggagcccccctcccgccagcctctcccccgccctcccgccgggactccctcctctcccaccccgcggctcccttcgccttctctctcacacacccgcccgcgcccccggcaggcagaactccaggaagtcgcagcggccgcgccgcgcgagccgagcctctggcgggcggcggggcgcaccgcagctgtgcataagaagggcgcgcggcacccgggacgcgcgcgcacacgagcacgcgggaggccgccgcgcggacgcgctcccgggacacgcgcaccccccgcgcgcgcgcccaagggagagcgagcactgcgcgccggcgcgcacacccgagacagagctttactatctcgctccctctcgcgcctccctcctcgctgggcattcaaacagctttccgacatcaccagccaaggatttttttccccgctctccttagtcgccgtccgtccatcagtacctgcagggg

SEQ ID NO: 4892 - DNA, 30 bp, Homo sapiens
  chr6:69345821-69345851
  hyper
cactgttgctgggacgcgtgcctgtgctgg

SEQ ID NO: 4893 - DNA, 30 bp, Homo sapiens
  chr6:69346099-69346129
  hyper
tcagaaggaataagcggagagacctagaaa

SEQ ID NO: 4894 - DNA, 30 bp, Homo sapiens
  chr6:69454973-69455003
  hyper
cacttttggatacactaccagaataattga

SEQ ID NO: 4895 - DNA, 213 bp, Homo sapiens
  chr6:69942811-69943024
  hyper
ccctgagtatttgaaacaatccgatgagcataggaagtggctgccaacgctctggcggctgctcgtgctgccgccgctgccgctgctgttcctcgcatagggctggacagagctagtcccggtttcagcacctccggcgctggacagctctctgcacgccgcaccgccgcctgcttgctttttcccactctcgctttgcattactggagatgc

SEQ ID NO: 4896 - DNA, 164 bp, Homo sapiens
  chr6:70576435-70576599
  hyper
tcccccttccccactcgcagggagctcactcctcggcggtgccgcagccctgtccggactccactgcgcctctgaggggctcaaatacgaattcaaggtaagctgcgcggctttgcgaccggctctgcacttgccctctcacacatgcccgggctatgtcatct

SEQ ID NO: 4897 - DNA, 711 bp, Homo sapiens
  chr6:70576805-70577516
  hyper
gatgcaggcttcatgcgttacacctaagttctaggtggtttttctggctatgtgtgtctgtgaagcggaactatggagcactgctgatgcgggtagggacagacatcaaatacattacaaaaaaaatggggggttaaaggagtaaaacaaactcactatcaattcatgccgttagagcgctttttttttttttttttgacggtgttagccctggaagcgaggcagccagttaagcggcgtaagctaagagacgcggggttccggtgcggtgccctccggcccggggttacctactccacatgtgggtgtttttcccaagtgcggcttctggggggcggcgcgggcgcgggcggggattcccggactccagccccaccacgttccggagcgtccggccctgttccttaattaccctgcagcatgcgcagcgcggtcggccacagcgccgccgccgtccccgcagtcctccctgcagccaccgccgccgccgccggaacgtcccagtcgcggcgcgaggaagacgcggccccagcctctgccgcctccgctgtcagagtcccgaggccaccgccgagagcgcgccggcgccgcagccacagcggccgagaaccaggaggcggcgccgggcggcccagctagggcgctgcagggtcgcgaggaagtttgttggcccggaaccaagcacgccgtcgggcacgctagctccccgag

SEQ ID NO: 4898 - DNA, 29 bp, Homo sapiens
  chr6:70992019-70992048
  hyper
caaacctcagctgggcttatgcgcccccg

SEQ ID NO: 4899 - DNA, 901 bp, Homo sapiens
  chr6:70992136-70993037
  hyper
cgtcccggagccgccagcaccgctagctggactcggggttagtgcagctacggcgggctggaggagcgggagagggagcgtgcctggattcccgccttttccagcaaggcctgctgttgacagtgaccaggaggtggggcgggggagggggtgaggtgcgggaagtaagaagcaataacaggctaagaattaaacctcggtctccagtcacctattaccttcagcgccagagcctgcagtagggaggacccagattggggaggagccccccttcctagaccaaggggtcatctacggctctggacttcgataggactcgcggcaggtgctcgaggctggaggaagcgcgggtctgagagccctggggatgctccgcgcctttctcacagctccctcgaccgctgcgccccgacctgtcctcgtgtgcgcttgaaaaatgcaaacactccctgcccccaacttacctcgtcggtggtctggctgggctggagaagaaaagatggggagaaagtgagaaaagcacccctcaaactcgatcgcaacttacttgagccgcgcacaagcagagccccaacagcagcagccccagggccccgcggtcccgcgcagtccaggccatgcccgccgcccgccgctaatcccttggcccggctctgcagcctggttcccctctaggcttccagacccgccactagcataggtggcacttcgtccctgcagaaaaagcacccccgggagtagcggttgccaaagcgtccaggcccgggaggcgcgcgttccccctgtttatgaatggccccggagagggtcctgggattggaggagagctagggggcaggggaggacggatagaatgacaacagtcgcccttaaccccttccctgccgccgcacaggcgagg

SEQ ID NO: 4900 - DNA, 87 bp, Homo sapiens
  chr6:71123137-71123224
  hyper
ccggggacctgttgatcgcaggtatagccggctggcccgggctccctcgggactggggcgactgcgcatgctcgctggccgcgctgg

SEQ ID NO: 4901 - DNA, 61 bp, Homo sapiens
  chr6:71123642-71123703
  hyper
tcccggtgcccgcggccgcccctgcccctgcgcgcgtccctcgacccgttcttcctgaacc

SEQ ID NO: 4902 - DNA, 154 bp, Homo sapiens
  chr6:71123746-71123900
  hyper
cgctctgtccctcctttacccgctttcgtggttctgctttttcatcccgcgcctcccacgtgtctttttgcccgggtggtccctccttgggaagcagcgtatctctgtgcttccatcccttgcctggctcttccctgtccggagctccttaccc

SEQ ID NO: 4903 - DNA, 872 bp, Homo sapiens
  chr6:71665582-71666454
  hyper
cgaagaagagcacgccgggctgcgcgcgctggtgctggtgcctctggcgcagccaggcgaggcccgcgttgcgctgctcagtggcgcgcggcagcccgggccgcttgtagcgccgcggcgtgggcacgtgcaggtgagtgctgggcagcccggcccgcgccaggaagcggctcaccagctcgctgcgcgccgccgcgtcctccaccaggatccagtgcagctgcgccacctggcggaacgtgttggccaggcgggtcagctccgctttctgcaccgggcggctgtaggtgggcgtgatggcatagatggtgggcagctgcggctccggctgtggctgcggccgagactggttgcgcttttgggtcccgtgagccgggccgcccctgcggagcgggagtcgggcgcccccgcggcccaccgcgtagggagagaagtaggggcgcggggtgagcgggggcactggcctgcgcgtgtccacgtcgagcatgatgatgacaattaggatccagggcaggaggataaagaagcgggtgaaaagcgcggacttcatggtgcacgctccctggcctctcggacaccccagagaggggcgagccgagggaccccagtgcgcagcttggacagcggcggcgccagcacttagggagtggtgatgggtgcgctgtccatggggccgagggcgctgcagagacctggagccgcggggctcactacctgggcgtggaggagcggcaggttcgcgcaagctagagcgacaaggggtgcaggcgggcgggcaggggctgcccccgactccaggtgagctggcgggaagcgggactcggtccagccgcgcgccgccggtcccggagttgtgccgagtgcgggaaagg

SEQ ID NO: 4904 - DNA, 256 bp, Homo sapiens
  chr6:72129593-72129849
  hyper
gagttcccacggatacggttcccaagtcagtggcatgtcagtgcccttcaagctaccgcaattttatttgttctccccgccagctccataaagtattaaaggctctctccacgacttcttcccaagcccaggtgccctaaaccacttgagcccacggcgcctaaagccgactcacccgcagcccgaggtgcgggagccctcggacggactccggcccgccccgcagtccccaccggccgcgctgcggccccggctg

SEQ ID NO: 4905 - DNA, 118 bp, Homo sapiens
  chr6:72129926-72130044
  hyper
cgcaaacttttcccggttcgcaagttgccgggatctgcggccgcggaccgacttccttcgccggccaccggagggagggggcgcccctaccccgggagggggctgggcgagccgggag

SEQ ID NO: 4906 - DNA, 308 bp, Homo sapiens
  chr6:72130190-72130498
  hyper
cgccgccgccgcccaccgcgttctttgtgtgtctctcgccgccctccagccgcttcgccgctcgcctgacagctgatgggctcaccgcgccgggtcccgcgtcctctcggccgcagccggcggagcccggcccggcaggaggaggaggggagaagaggagcgttgacagatgctgtcttggagcgggcaccgccgggggaaaagtctggactgcctcggcgagaagcggccggtaggcaaccggccccagcctcgcattcgcctcaaagaccccaattggctaggagcccttccctccgcagcggctc

SEQ ID NO: 4907 - DNA, 63 bp, Homo sapiens
  chr6:72130646-72130709
  hyper
cggaaagcccagccagtccccgggagtgtagccaatagaaggcgactccggcaacacacccgc

SEQ ID NO: 4908 - DNA, 30 bp, Homo sapiens
  chr6:72596161-72596191
  hyper
gtctgcgagagcagcggcatcaccctggat

SEQ ID NO: 4909 - DNA, 256 bp, Homo sapiens
  chr6:72596457-72596713
  hyper
gggaggcggccgggcggccccgagcttcgctagggcgaccaaaacaaaggcagcatccggggctgggtggatgcaaacaaccatgaaagactgggttctcgctctccccggctctgctgctgctgctgctgccgccgccgccgctgctcctcctcctgccgccgccgctagggctccgctgtgagggggaagcaggggcgcagctgctgggcgtgcatccgaaaggtgagagccagagagcgagcagagggggcgg

SEQ ID NO: 4910 - DNA, 349 bp, Homo sapiens
  chr6:73329778-73330127
  hyper
gcagaaaggccaagattttgacgtttaaagcgggcacacgagtcattttaagtctctagatctttcaccctgaaagtccctgcacagaaactccatagggagtctaaatatagcaacagcaccccctcccgccccctccgccttcagtcagggtcccgcgcagctctaggattggagagcttactccagggcgctctctgcatctgcctcgaatagcaccgcacggagcaacctctctcgcacctccacagtgcgtgggtgtgaagtgtattaggggaaagctagagagtgactctgggtgatggtgctcggctcacagtcacatggcgtcgccgccagctgcacagag

SEQ ID NO: 4911 - DNA, 1016 bp, Homo sapiens
  chr6:73330834-73331850
  hyper
cagacactgggtcctcgccgccgctgctgaacttctcaatcatatgactttctcggacttaaatggaaatttcttgacggagggaactgggtttgttctcccaggcttcgcgctgcagtcaggcagagccccggggcagctcgctcaccgcggaggagccactttggagttttacgccctttccacaccccacccatggactggaaaggatgttcagttactcgcgagcttgtctgatactgggatggaaagtcacagtccgcaggctggagtgaggcgcgggaagatgcctggtccttgcctcgcggacttggcagccgcgtcctgcgggtctgtccactgaactgctgaggactcgcccgtgtgcggggacccgagtgccacttcccggagcgttaccttgcgctccagcctccaggctagataatacctggaaggcagggcagggctgttcccgctctcaccccttgcggaaggatggcaggatccggcgcagcgacgtagcagcgggagggcacagcgacctgcatctccagtttctcctcaggacacaaggctgacttcaccttccggacagctgcaaagcccctgccagaaccaaaccgaactcgcgcctcggagaggggcttctggggccgtttcgctgcagggcgtggggagtggagagagggaaggggaagcctggggctgggtgtgcgcgcgtgggagcgcgcctcggagcgccccgcactcccccactctatccccgggggcagtttgggaaggagggagtggtagtcgcgggaatgagggagcaagagaaaccctctcaaagtgacgccccaaacaggtccggatttagaattcgaagctaaaggctgttagaaattgggactcctcggcctcctctgcagcccctcctttcccgccccgaagcccgggcggtttgctggctgcctgcttccccgcccccggctcagaggtctctggctggcgggcgccccgtcggccgccggcttcctccttgaaacccgccg

SEQ ID NO: 4912 - DNA, 1236 bp, Homo sapiens
  chr6:73331875-73333111
  hyper
cgcaggcgctggcggccccctcgcggtgcccgtggtgatgccatgccccgccaccacgcgggaggagaggagggcggcgccgccgggctctgggtgaagagcggcgcagcggcggcggcggcgggcggggggcgcttgggcagcggcatgaaggatgtggagtccggccggggcagggtgctgctgaactcggcagccgccaggggcgacggcctgctactgctgggcacccgcgcggccacgctcggtggcggcggcggtggcctgagggagagccgccggggcaagcagggggcccggatgagcctgctggggaagccgctctcttacacgagtagccagagctgccggcgcaacgtcaagtaccggcgggtgcagaactacctgtacaacgtgctggagagaccccgcggctgggcgttcatctaccacgctttcgtgtgagtacccgcgccccctgctatgcccgctgcaggggaccactgtccctggccccctggggcgtgctccgcgctcgcgcccttgggcccccgcgcgcgtgcacacgtggtggcttttatttcttcgcacgtgttcgtggtcttccttctggagcctctcccctcccccagccccacttctctcatctctacagcttgaaccttttccccgaggacacccaatgaactgcccggtagcttcaggctcccggggcgagagccaggcagacgcgggacttaggctgcgcggataattgggagcaattaggtcccaagatacgtaaacttcaaccgaacggggcgcccgggagctagggaatgcaaagggaggacaggcgcccgtgtgaggcttgagagtatactggagaggttaggaggtgatggcggggtaggacggggagaagtgagggggcatcgagggctaggtcctcagtcctaggggcggagtaggggaagctgctacttggagagagctgctaggttttaagcgcgcccggaaacacgcctcgccaccacccagccaccaccaacggaaaatctgtcagtgcatgtagcccttcctgccacggagaaggtggccaaggtctagaggaggccagcaggccaggcgaagcaacgctcccgcgctgcagggggcggggaggcagcggggaacctggggcgcaggaacgcgggcggaggtgcgatagcagaagcgcaaatgggtcgcctctgacagagatcgggcagtgggttaagtccccgtttgtggcgcgga

SEQ ID NO: 4913 - DNA, 150 bp, Homo sapiens
  chr6:73972993-73973143
  hyper
taggagacagcctgcggagcccactgccggcgcgcagagagcccagcagctcttgagtccaggaagcaagggtgggaggagggacgagccagtggcaatgacccagacccggacgacccccattgctgagccagcggagctgcttggtga

SEQ ID NO: 4914 - DNA, 797 bp, Homo sapiens
  chr6:74019413-74020210
  hyper
cagcctctggaaggccgacagcatttcgcgtttctggcctgggaaagtaagggtgcgctaaggcacgagtagtacagctcctcccgccaccgcagagcccgccggcgggaagagaccagacaccgacggagaagcgaagttcaggacgcgaaggaaagggccacttcgggtcggggtcaacccagactggaccaatgcacagtctaggtggattaacgcgccaccgcgagaagtgggcacgggaccacatgcggctggcaagacgtcccagggctcaagctccaggctcggtcaccaaacaacggtgataacatccacaacgccacgtaaaccatctttgggccttgatcgttttccaataaccgactgaactgagggcgtgaccaaacgacaagaaccggaggagaggacccggagaacggagcagcatcccgccgcccgcctccaggaaagcccgaggcactgtagcaggagggtctgggctccgcgccttaattacaccgccctggacccgcctcttccgccgctcgctcctctgaccggcacccgaaggtgctgtcccgcccacggactcgctcacactccgtttcttcgatcctttagacgactttttaccgttcagggatgctctccgttaccgcctctgccatttggttgccctccctgcggtccaagggcctggaacactccccagggctgccaggccagcgctttccaggggctccagcctacagcgccgccacctggggctggagccagaaacgcaggggccgggggctcaccggctgccaagtaga

SEQ ID NO: 4915 - DNA, 164 bp, Homo sapiens
  chr6:74161334-74161498
  hyper
cacaacccctttcaccatccccgccgccgtggagatatcatcgcggctgagcttcaacttctccaaaaccgcccggagcttcgaggccccaggcgccgcatccctccgtacgagaatgggggccgagaccggcaggccggggctgggcacgtcccagggcccgg

SEQ ID NO: 4916 - DNA, 113 bp, Homo sapiens
  chr6:74161684-74161797
  hyper
cgggcggcctctcctgggtgtccggggcgctctttttctgccgggatcccgacttcctggcggggccgaactttcccgccttaggcagggcggcctcgggggcagccggagac

SEQ ID NO: 4917 - DNA, 145 bp, Homo sapiens
  chr6:74161830-74161975
  hyper
cgtgcggaagccttgggggcagtggctccggcctcggaagctctctgcatggcctttccgtgccaaggctgcatggctggcgctttctgttccccgaaagaagaatccgtttcaggaaaaggccgcaagaggaagagccagcagc

SEQ ID NO: 4918 - DNA, 13 bp, Homo sapiens
  chr6:75914691-75914704
  hyper
cactgaagggctc

SEQ ID NO: 4919 - DNA, 80 bp, Homo sapiens
  chr6:75914738-75914818
  hyper
cgctgaacgagtccggcgacccacgctttctgatccccacaagtctaggatctgagtgggaaaccgccgcggagatctca

SEQ ID NO: 4920 - DNA, 148 bp, Homo sapiens
  chr6:75915235-75915383
  hyper
aacgggatgctttgcgtgcacaaaaccttgctcagctcttaagaaaagcaacattcccctctccctcaaaaaccccaaagaatcaccaaatcccagtatacaaggcaacgctctagcccacctacactattacaagtccaaactgtcc

SEQ ID NO: 4921 - DNA, 591 bp, Homo sapiens
  chr6:75915426-75916017
  hyper
cgccgtttcccgagttgtctctgggaatgatgggggtaggggaaaggggacagaaaccaggctgacctgaggcggcggcaacagggagaggtagcggcggcgacagcggcttcccggcgtcggagaagctggtgctcggtgtggcccccacacgccccggcgataggcgctgcactccaggagcacctggcggccgccgaggcgtgggcagctgcggggaagtccaggaggaggaggagaatcccaggaggagaggcgggcgcggcaggaagactggagatggcctgagcctgcagctgccggcgcgcggacgcgtctggggcggttcgccttagccaagtggaaagagactccgcgccgcgggctacttaatagagggctgttcccagctctcagtttactcggttacgaaacgcctgagaaggtggacggctgccacggggtgatgtatgctcctccggcggtgaaggaggtctacttttgggaacgtgtgcatacttcgagcattccttcggcgtgaggtggcgatcgccgtagtagcagtgccccgctggggggcggggagaagggagggagcgtagagggggacag

SEQ ID NO: 4922 - DNA, 207 bp, Homo sapiens
  chr6:75916809-75917016
  hyper
gccagattgtacaaggcgcacgggaggaagcttcgagcgctcacaccaagaaatcagaaaaatgctactggagagattctgattataacgtctgacctcagtataggccctgcaccgttttggcctcttgaagcccaaaggttactcctgtaacgctgggggagcgttgaacaacaaaggaccggggtggggcgcaagggaacagag

SEQ ID NO: 4923 - DNA, 30 bp, Homo sapiens
  chr6:75994247-75994277
  hyper
tgctgtttgaaggccgtgttatccggtctc

SEQ ID NO: 4924 - DNA, 30 bp, Homo sapiens
  chr6:75994739-75994769
  hyper
tgacacttcgcgtgcggtgtaggcgcatct

SEQ ID NO: 4925 - DNA, 87 bp, Homo sapiens
  chr6:76458863-76458950
  hyper
gcggccccggcgcccccgccccttcgggcgctccgtagccgtgacgtgcacgccgcagtgccggggactcggcggggcgccggccgg

SEQ ID NO: 4926 - DNA, 30 bp, Homo sapiens
  chr6:78172322-78172352
  hyper
cgaggacgtggacccgggggagtcggttat

SEQ ID NO: 4927 - DNA, 30 bp, Homo sapiens
  chr6:78172935-78172965
  hyper
gccaaggtgatgagcgccaatagcataacc

SEQ ID NO: 4928 - DNA, 238 bp, Homo sapiens
  chr6:78173185-78173423
  hyper
aggaccgtggcgatcgcaggtttgtccccagttgatagttccgtgagttcctcaattattcctccgcccaggttcacagctgaaactagaggtcatgggtgcggcagccaaggcaggcgggcgcctcccctgcacttccagagcgcctagctaagccgccgcgtctgtggttgttcctctccacaccgggtcttagacctgggttgctaagagctggcccaccgagccctgctccgct

SEQ ID NO: 4929 - DNA, 20 bp, Homo sapiens
  chr6:78173705-78173725
  hyper
gagcagcgctgcgccgcgcc

SEQ ID NO: 4930 - DNA, 88 bp, Homo sapiens
  chr6:78173992-78174080
  hyper
aagcgtgcgagctacggagcagatgggctctttatatagagtccaggtccggtccgccagagcagtgcaactcgtgcggcgcggcggg

SEQ ID NO: 4931 - DNA, 695 bp, Homo sapiens
  chr6:78175832-78176527
  hyper
agagggaagcaaagccggcgagtttaaaccgctaggtgggggcattggccaggacggatcaaaagtgtgtgcgattgcgggtgtgtcctgtgggagtgcggggtgccaggaaacaattttcccgttatcctaggagaactggaaacgattagagacaagtgttaaagggatgggaagcgggggaaggccgacaggaatgtaaccagctccatgcgacctttcctcttttaatttctgctcgggagcatgggacggagaaaaaacaaagcaaaatttgttccccacacggtttttggctttagcggtttggggacctgtggctttctccagccatgcctccactgcttcgcagagtcccagactcccagaggaatccgccccttgtaggcagtttgattttaccctctttggtaaagagctgcttaaacacacaccgccatcatattgaccggatgttggcagagttcagtgaagaaccccatttccttaacctgacttccgcatttcaagtattcctttctcactttaaaacacataaaacataggtgtttgcacagaggcgcatgtgtgtgaaacacccaagagagaaagagaccctgtaaagtcgcctgtgcctgggtcaccccttcggagtaggggtcgctgggtaaggtccaagtgccagctctgcagtccccagcggcgctagaaggaac

SEQ ID NO: 4932 - DNA, 3 bp, Homo sapiens
  chr6:79620338-79620341
  hyper
agg

SEQ ID NO: 4933 - DNA, 126 bp, Homo sapiens
  chr6:79620474-79620600
  hyper
ggctgggactgccccagacacgcacaccctcccgacctccgccctgtcgcagttccagggcgctccgcgctgtcatgattgctgggtgcgcgctccgtgctgggacagccgcgcaccaacagcgga

SEQ ID NO: 4934 - DNA, 131 bp, Homo sapiens
  chr6:80247011-80247142
  hyper
gctgccgggcgggtgccgaggttgccgagatgcgggaggtttgaacacaaggatgggacagaggcgaggatcggggctcctgggtggcagcggcggtaacctgggctccagggtaacggaggcggaggcct

SEQ ID NO: 4935 - DNA, 30 bp, Homo sapiens
  chr6:80340668-80340698
  hyper
gcccgcagcacgatcgtgtctgttggcatt

SEQ ID NO: 4936 - DNA, 43 bp, Homo sapiens
  chr6:80340980-80341023
  hyper
cttccccttcagcctgcggccgggcggcgctgggcttttatct

SEQ ID NO: 4937 - DNA, 503 bp, Homo sapiens
  chr6:80341054-80341557
  hyper
cgatcttccccgacggcagcgctttacccagaggctgccggcggctcgtagctgggttcagctctgcgtccacgccagcccggagcccggggggcaaggggtctgtcccgggcgcagcgagaggatggtcatccgcgtgttcatcgcctcttcctcgggcttcgtggcggtgagcgcggtgggggcgggcagtaggttggggtcgcggggcgcgggtcctgcgggaggcgcgcggcgctcgtcactgcgcgtccttgcgctcagccggtccgcccgcgggagcccgcgcccggcaggtgatccatcacactccgacaacaatgaagagggcggggaggaaaggtgggtgggggaccccggcctcacccaaatgcccaccctgcgtggcctgaaaggcagacaacgcggcctgaaaatggagtccgagggaagcccccagctcctgttgtgtggcatggaaatttggggaacgggttgttcaagagcttcggggatcccccttc

SEQ ID NO: 4938 - DNA, 990 bp, Homo sapiens
  chr6:80656579-80657569
  hyper
gtggggcggctcctgcgaggagctcctggctgcacaggctccatctgatatgtcagctcccgcatccgagagctgatgagagatggagggagctcagaagaaaaccctgcgagtgtcgggggaggggaggccttaacattcggatcagattaaccagtgctcaaccgcagtgcccgcgccggcccctccgctgatccgcagcatccgaaagccgcagggcgcgggggcctgtggggccgggcccgggagctgcgagaccaggggccggtgaccccccgcgggggaccgagcgaggatggggaagtcagcggctttacctgcgatggaccaggtccagcggtagaactctaccgtgtcgttgagtgccgtggacactacgtttaggacactacccggctccgagtccaggagccccatcgcggcgatgagcgggcgctggcggcaggagaaagcggagacccagagagagggctgaccccggaggcggtggcggccgacggggcgagcggcggccgggaacccctctaacggcggcggcccggctgcgtcttctcctgctcctcaaggcgccgcggcggcggggatgcggcagaaggcagggccaagcggaaggcgtcgtcaaggttcccgggagaaagacgaggaggtggaggaggcccagccgccagcacagtgcgctgcaccagtctgcagcctcgcgcagccgcccctccaatctcctcagccggcgtcacgtggccgcgcgcgggggcggggggccggccgcccctcctccctccctccctccctagtattgggactcgctggcgtagggatgctgcgctcaagggtgcgacgccaactgggctcgcgcaggcgcgcgccgtcgagcgggagcgggacacctgggctcctccttggcccctccccgcacaagtcgcctcattagccttccccgcccctgtcccgggcatcggcccctgcggaggagttcaccgcctccccacgggt

SEQ ID NO: 4939 - DNA, 30 bp, Homo sapiens
  chr6:81814308-81814338
  hyper
tcttggttactccagacagaataatgacat

SEQ ID NO: 4940 - DNA, 672 bp, Homo sapiens
  chr6:82461998-82462670
  hyper
gatagttccctgaccccgggcctcctcggagactccctcccccggcccttacagtccccagccgcgcaccgcgccccgcagagcagccccgcaccaaaagtatctctgatgcatctggaaagcgcaagcgagagtcccgtctgtgtcacctggaggcggccgccccttctaggagcgcagcgagcgagagcgaaaccgagaggcggcaacacttccaggagctgcgagcgcgctcagacagcaaatagcgacttcgtctttcccagacccctgccgcctgcgctcaccactccctccccgcgacccctcctgcgccgctgccaccccagctgcggtggtcccgaactggcggctcttgctgccacacacgctcgtgtctctggagctttagcagttgtgcggggaaaatgtcttcagtactttttttataccgggcttctctgcgcttccggggcccagagcggcacgttcgccacaccctcctcatctgcatagggcgccgccccctctgccctcccccgcccgcagggcacgcagctgactagcccagcagttagtgcgggacgactgccggtgagcgtgaggtcctgggctgtatgtgcggatactgtgtgcgcccgtagatgcgtgtatttatacatacatttaatttatgtacgccccctcccacaa

SEQ ID NO: 4941 - DNA, 248 bp, Homo sapiens
  chr6:82462926-82463174
  hyper
gcacgcaaatcagtcacggcgcgtgagtgggaagggcttgttgataactgggtttcgattctcgaaacctcgggaagcgcgccggggagctctgggcgagcccgagaaggcgcgggggcggcaccacgggcctcgggcgtgcgcggctcctgcgcacgagtggctccaaggggccagtacttcgcgggggtcagggcgcgtcacggagcagacgcgggcgagcagccaatggccgaggactgggcggg

SEQ ID NO: 4942 - DNA, 62 bp, Homo sapiens
  chr6:82463517-82463579
  hyper
cctccatcaactaacccggagcagctttcccagcgcctagacgctgccgggggctgaggtgg

SEQ ID NO: 4943 - DNA, 31 bp, Homo sapiens
  chr6:82463780-82463811
  hyper
cctcccggtgccctgccgagctgcgtcccaa

SEQ ID NO: 4944 - DNA, 30 bp, Homo sapiens
  chr6:82968453-82968483
  hyper
cctaggccatgtgggttagcctattgttcc

SEQ ID NO: 4945 - DNA, 30 bp, Homo sapiens
  chr6:83073222-83073252
  hyper
acgagattcaccagcggttttgctccagtc

SEQ ID NO: 4946 - DNA, 1095 bp, Homo sapiens
  chr6:83073804-83074899
  hyper
aggggctggcggggcgcgggctggggggcgacagttgtagctccacttcctgctaatgcgagaaggtacaaaaagagatcaaaaagtcctgtaacctgaaacttccctcgcatcctaaccgggacctggtggagaggtctgggcgggggcggagacacccggaggccgaccttccgccgaggcggtgcaggaaggaacgggagagggagaagtttggtagggaaggaattggggattaagcggtaagttagacgcgggagacgagtctcctcgggaaaggcggagggcgggaggccggtcgggtttatttagtgtgggccagggaagaaggaagactttgcggtctgggtgtcggatgcgcgtccccctccggagtaaaagtgaccggaggggttggggaggcgaggccggggcgggcttttggaaggaggtctctgggacagactggagacgactagactcgaaaaggccggtttttgcactccggaagccgcggcagccaccgctgttcacgcctctctcctgcttgtcccaggtccctcagaggatccagcgaggggcgccaacaagaggcgaagaggtggcaccagggcggcggcaggaagaggagcgggagcaggagcgcggagcggagcgtcccgacccgccgtgcgtactttctggagggaaggggcgggggaatcggcccctgagggaagcgcccggtggcgagggggttagccaagttccggctgcggcgccactccctcggttccacgagaggaaagttttttttttccagacgcttccgccggctcgcgccctccgggcccagcctcccgagccttcggagcgggcgccgtcccagcccagctccggggaaacgcgagccgcgatgcctggggggtgctcccggggccccgccgccggggacgggcgtctgcggctggcgcgactagcgctggtactcctgggctgggtctcctcgtcttctcccacctcctcggcatcctccttctcctcctcggcgccgttcctggcttccgccgtgtccgcccagcccccgctgccggaccagtgccccgcgctgtgcgagtgctccgaggcagcgcgcac

SEQ ID NO: 4947 - DNA, 216 bp, Homo sapiens
  chr6:83775564-83775780
  hyper
gatcgcagggctggcgccgcctaccagctcacagcgccacctgccggccggagagtgcaccaccgagaaggcgcgtgaccccggaggccggggcggggcgcgcattttcaaaaccaggctttggcccagagtgctgagaaaggtgggcggcgagaggctagctatcgccccactctgcttcttatgagcgtgacttggcgcgttagcatccctgga

SEQ ID NO: 4948 - DNA, 145 bp, Homo sapiens
  chr6:84417918-84418063
  hyper
tccccattctcccccggcccccacatagggccagactcaccccctggggacccccctgtcaatcagcactttccccgcaacctgacccgcgggtgctggactagccacaacgtgcgttggggttattccctgggcgccgcaccca

SEQ ID NO: 4949 - DNA, 528 bp, Homo sapiens
  chr6:84418260-84418788
  hyper
cgccgccggctccaaagcctcgccgaggcccatcgcccgggccccttccccccggttccaaatccctgccgcaggggccgcccgggagctctgcggaggcgccggagtcttggggcgcctcacccttcctggctttggagaggagccgggctgacagcgaagcccagtcccccgcccgccctggagcgctccgcggagctgtcactcggccgctgcccttctccgcaccctgggattatcctctgcggatccccgcgagaccctggcgcggggagggggccgagtacggccgcgggtactcaccccgcccctgagcggcgccgcccgccgcaggatgagcggagcccgggccgccgagggaagccgcgccggtggatgtgtgcgaccgcgcgtagccccggtgcccccgggcgcaaagtctccagccctggccgggccccgctcctcagctccgcggtcccggcgcccaccgcccctggcccctggccccagaagccagtacccgcccgccgccgcctcttctgccag

SEQ ID NO: 4950 - DNA, 273 bp, Homo sapiens
  chr6:84419071-84419344
  hyper
gggccgcccctccgctgctggcgccgcacccggcacgcactgggctcgcgcaccacgcacacctgcccgccgactgcggggggagccctgggcgttgggggcgttggccaagacgggcgagtgggcttctcgggttctactctgtgaaggccaaggcaagggcgtcgtcgcgcgctgcctggcggagcccagccccttccccacactgtcgctgacacgcccgcctgtcaaaggctccgaggcccagatgagcagggcgattttaaatgtcag

SEQ ID NO: 4951 - DNA, 528 bp, Homo sapiens
  chr6:84562756-84563284
  hyper
tttttgcagaaatccacaaaacgtgtagactcgcttaattccatctcctcctggcctcttcacacggaaattggctgctcgggcgaatgttgtttttctccgcagccatgtgtcgaagggcgattaacattcgctcgacaaaaccctgtcccgggccatttgggagttgcacgcgttcacacccggggctcagcccggtgcgccttcacgcgcagcctttttgtttatgcggctagcagggagaggggcggagaggcagcgaacctctcaatgtgcagcaggccgcgagggctatataaagctcgggtctcggacctactggaactggtcaagattgcccgcgagctggcagcggccttccgcccagctctgcggcgtcatggagaacgcgggaggcgcagagggtacagagagtggagctgcggcgtgcgcggccaccgacggccctacgcggcgcgcgggcgcggactccgggtaggcttccccgcgctgctctgcgcctcccagcttcccccgtctctccctcct

SEQ ID NO: 4952 - DNA, 362 bp, Homo sapiens
  chr6:84563416-84563778
  hyper
cgcaggcttctggagaccctgggtggacgccggaggcaagaaagaagaggagacgccgaaccacgccgcggaggcggtgagtgagccacgcgtctcaggccgcgcctcccacgggtgcagaagatcgaccagggctctcgggacgcagggcctgagagagacatgcgagacaccgggtcctgcctctcgcttaacatcccgcctgccggtggccataaaggtgccgacgcggcggatgtgtcctctggagcgatgggccacaggcacccagccgggagcgaggctgctgagagccctggggttacattcccagcgggcacgaggaacactgggtcgtgcacgtttccactttctagaaggag

SEQ ID NO: 4953 - DNA, 31 bp, Homo sapiens
  chr6:84564098-84564129
  hyper
cttgatgaatatattacgaagagggaaaggg

SEQ ID NO: 4954 - DNA, 30 bp, Homo sapiens
  chr6:84569287-84569317
  hyper
actagctgagcatgcgtacttcctccctgc

SEQ ID NO: 4955 - DNA, 31 bp, Homo sapiens
  chr6:84743240-84743271
  hyper
gacccactgcagagcccgggatggcaaagaa

SEQ ID NO: 4956 - DNA, 30 bp, Homo sapiens
  chr6:85472292-85472322
  hyper
ctatctcatgaaagcgcttccagagctcgg

SEQ ID NO: 4957 - DNA, 425 bp, Homo sapiens
  chr6:85472934-85473359
  hyper
ataagcgtctgcggcgcctcgctttgggccttcttttgggccgggccggaggcatcttctagaaggctcttcagaccccgctttcgccaaactcccggcgccctgcgcttccagcccagcagagaaaagtgtgaaaagcaagcccgcggtcgccgtcggccttggcagagaaatcaagaggagaagggaagggaaccgctcaactacccttcgggaaaccaagtttccaaatatgccgccctcttcctggtttgcacaaacggtttagggcattcgttccggtttcagggtggggtatgccgtcgctcccctcctccccgccctgtgcttttaaaagttaggaaacaaaaaagagcacccattggctggaaccccaagggaggcagatgcaggaagcacagagctgcaccgctaggcgcagcaaa

SEQ ID NO: 4958 - DNA, 30 bp, Homo sapiens
  chr6:85473758-85473788
  hyper
cgccgcctcttcggcgcccagttttcgccg

SEQ ID NO: 4959 - DNA, 587 bp, Homo sapiens
  chr6:85474013-85474600
  hyper
gcccccttccccaccgcgggcaaaaaacagatttggcgtttccgctttctcgcttgtgttgggatccaggaaccggcgacgcgccggccaagtctcctttcctgggtctctctcgcgcgctctctcactgatgcactcctttgctcccaccccttccacctcctcctgctgctccgaggtctgcctcaactgatgcgccagagaggactaacatgggtaaaaaacactctgtggacacaaattagggattgtaattgaaatttgttgccttgatctgtcagcacttccaggcaggagagcggtgggaagaacttgctcattagtgtcaataaagcggcgggggcggagcccgggtccctgtccatcacccagacggccggccaatcaggaggcgccgactccgcgcagcccgcgcccacttccttacaaggtagcgaaaaaccaggagtgaaaagcgccgctgtctggcttggatgtgccagccacacggacgctgaactctgtctctctgacgtccgtagctgagtccagccccgtagtctccagctttcctcaccaggacctggaaaggcggaagttcccggctt

SEQ ID NO: 4960 - DNA, 199 bp, Homo sapiens
  chr6:85475697-85475896
  hyper
tgtatatatatatatatatatatgacaaaggaattttttcctctccctcgtccctcgtttaattcaatctccgcaaccgttggctgcccttttatctctgacttctctgtaaactttcagtagagtagcatttgggggtagatccgccactgagactgatccttttattgtagaagagaacgcgcggttcctggaggcc

SEQ ID NO: 4961 - DNA, 256 bp, Homo sapiens
  chr6:85476131-85476387
  hyper
cggggtaccctaggccggtattacatcattaaaaagaagcgcaaatcccatttctgaagcttagccgaaggcaggcgccggcagggagagctaagaggccgcctagagagtttgggccgggagtgggagtgggacaaggcgggagctaacttagctggagtagacgccagaagaagttccgttcagctgaggtgccccgccccaatcccaggctctcggggaccccaagaagggagctacccggtgcttctccgag

SEQ ID NO: 4962 - DNA, 554 bp, Homo sapiens
  chr6:85476713-85477267
  hyper
ccggggactggtgtccgcattgccgaaaggctggaaagcagagcctcgtctacatccacgatgtttctagaacgtggcccttagaaataattcaagtgtgagtagggcgccgaggacaggacaaggcgtttgccccctagtcctgctactggctaaggagaatcatagcagtagagccgcaccactgctgccgccgcctccaacttgcgttaagttcggctcaggctactggattgggcaggaccagctaacccaggtcccgaggggcagtgtgtcacagactgcagcccactccaacctcggctcctggagaaggggcgtcgaatctctcttgggcatgggagggaaagacattccgagttggctgggcggagtggcagccttgagagtgacgagtgacagcaaagcctcgtcctagcaaggccttttaccaacagcgcggcatgccctttcgaggagagcgccaggccctcgcactttgcaagtcaagagagcaaagaaagcggggacagggcgcgtaatcgcaatgtccggtcgcgcgtgtgcacgtgtct

SEQ ID NO: 4963 - DNA, 30 bp, Homo sapiens
  chr6:85483319-85483349
  hyper
gggagcgcggaacgcgggtttctgttgata

SEQ ID NO: 4964 - DNA, 68 bp, Homo sapiens
  chr6:85484557-85484625
  hyper
gggctgcgggcgggtgagcgccgccgggcaccgggcgggggcacgtggcgccctctggggaccgtccg

SEQ ID NO: 4965 - DNA, 989 bp, Homo sapiens
  chr6:86159426-86160415
  hyper
gtgcctcgaatgaggcgagactcagagaggacccaggcgcggggcggacccctccaattccttcctcgcgcccccgaaagagcggcgcaccagcagccgaactgccggcgcccaggctccctggtccggccgggatgcggccggtacccgctccccgccgggaacaacctctccactcttcctgcagggagctggtgccagccgacagccgcgccagggccgctccgggtaccagggtcggatcgggtgacgtcgcgaacttgcgcctggccgccaagccggcctccaggctgaagaaggacccgccccggccttgacccgggccccgcccctccagccggggcaccgagccccggccctagctgctcgcccctactcgccggcactcgcccggctcgcccgctttcgcacccagttcacgcgccacagctatgtgtccccgagccgcgcgggcgcccgcgacgctactcctcgccctgggcgcggtgctgtggcctgcggctggcgcctgggagcttacgattttgcacaccaacgacgtgcacagccggctggagcagaccagcgaggactccagcaagtgcgtcaacgccagccgctgcatgggtggcgtggctcggctcttcaccaaggttcagcagatccgccgcgccgaacccaacgtgctgctgctggacgccggcgaccagtaccagggcactatctggttcaccgtgtacaagggcgccgaggtggcgcacttcatgaacgccctgcgctacgatgccatggtaagacccgagcccgcgcccgggatagtagtcccggactgagagaggagccgggctggaaaagcagcggatggcagagtgtggcaagcctaggtccagggcgcggagagatgtggggataaagtgagactccggccagtgtgccagctggatgcatagaagtcccttggacgattcgtcttaaacggacgttattgcgcccccactatgagatgggag

SEQ ID NO: 4966 - DNA, 575 bp, Homo sapiens
  chr6:86302970-86303545
  hyper
gtgtacagtctcaatttgagccgacacacggatttcacttttgaaaagcaacgaagatgaagaactcgttttgagaaatggatgagaaaaaggtagctcaggagacgaagcctcgggaaaggaggcaatcaaccccaccccaccggcctgtgcttccggcctcgacgctccgccgtgctccccgaggccgctcctctgcggagctcgctctccccactggtccccagtcccgcagctacgcggcctccgcacggttaagcagcacgggccgggcgtctgcaccttcggagaaaagccgccgcccaggctccgcgctgcggcgttacctgttaagaagcagggaggcggcgctgagacagagcagcaggaagcagaacagcgggtactggcggcagatctcgcgtcccacgtccagtcgcagccgctgcttcagcttctgccccatcgtccgcacccagggcaccatctccgtaacggcgaggccgagactgcgctactggctgaggcagaggtcaaggcgaccccccatccacacctcgcgtccccgccccaccgacttggcggcgcacacagac

SEQ ID NO: 4967 - DNA, 355 bp, Homo sapiens
  chr6:86303804-86304159
  hyper
acccagtaactgcctgtattgcggaggagagggaagaaggttgtagggagcccggaagaaactacagcacccccgtagccgccgggcgctgcctgaggggcaaccggagctcgtggagcccgctgggaactgtagtcttcgtgacacgaacccgcagagggatggagcgggtggtagcgcttccccgaccccgcaacgctccgcgcctcaccgtacactcggctccgggtgggagcaggtccgagctttgcgtgacgcctaagggagagggggataggaggacgcctttgagtcggtattttaaaaggggtgtgttgggggctgggggggtggcgagtaaaacagccctagaata

SEQ ID NO: 4968 - DNA, 401 bp, Homo sapiens
  chr6:87646907-87647308
  hyper
cacacctccaaccccgctggcccggtttataacatggacagccctgccctctagtgtctgcaaccgggagccctaaggcgccatcagctccagaatttctcttttataacctaagcaagacctggagtacctcggagctgcgacctccagttcacaataccacctgcctcacacccgggctcatcttttcatcccacacccaccacccccctctccgttcacggtgtcccgggaggctgcgacctgcgtagatgatttagcagactgcccctgcccatgctcctgctcctgctcctcctcctcctcttccccgctctctccctctcgcctcctcttccagtccaggcgcccagactcggcgaagcgcagcgcctgccaccagcggtgcctcgggctgcccg

SEQ ID NO: 4969 - DNA, 117 bp, Homo sapiens
  chr6:87647316-87647433
  hyper
cgctcccaggttctgtctcgccgcaccccggcgggcactggcgcgggcaaggacgctggcggggagaacgccctgggctcaacgtactccagaatcgaatgttgagagaagcagtgc

SEQ ID NO: 4970 - DNA, 769 bp, Homo sapiens
  chr6:87861485-87862254
  hyper
agtaggttgatggagcctcttcgaaatcaggcagcagtgcccgcgccacggcctctgcaggacagactccagcatccccggggtgggtttccggaggccccgctccccgccgcgccctggaaaggctccagaatctctcggcctggaggcccctggcggcctctgctcccaagcggggagtcgcagccaggctacagcgggcttgatcctcagtgctgggtggaaaaaccgcggcggcaaacgccgggcctgcaactgctgggtgtcggcgttgctggttcgcgggcggcggcggcggcggctccgcgacaacagaggacgcgagcaaccggcgcagcgcccagcagggccttggcggggtggaggggcgcaggctgggttagcggagcagagcggaccgatctggtgccctccgtggcccgaggcctgcggaccttctccgttctccggcccagggcgagagcggggcaagagacagcgccccgatagtggcgcacgctctccgccatccccgggcctcgcgctttcacctcgcgtgctggggcgagggcggggctgcggggtgtactgggtcgggggtaggaaggacctgccaggccttagccctgagctatccgtcatccgctaacgccgcgctccctgcatccctggcttggcccccaggctctgcgccgcttgtctgtagcagacacaactcagctcccttactgtcctcaggcccggctatttcaagaattccagaaaaagagtgcaccggcgtgtgcgggcc

SEQ ID NO: 4971 - DNA, 41 bp, Homo sapiens
  chr6:88032034-88032075
  hyper
atacaaacatacacaccgaactggaacgtaatttgaagttg

SEQ ID NO: 4972 - DNA, 44 bp, Homo sapiens
  chr6:88663570-88663614
  hyper
tgcctgaatctgcagccgcaggtttcctgcgttttcagccaagg

SEQ ID NO: 4973 - DNA, 41 bp, Homo sapiens
  chr6:88875526-88875567
  hyper
gcatcccctggtcctcgggacagaagctcccttggcacctc

SEQ ID NO: 4974 - DNA, 616 bp, Homo sapiens
  chr6:88875621-88876237
  hyper
cggagagctctgcagggagccgaggcccccgcccgggccaagggaaggcgctggcgccgcgggagacaagaagaggcggaggcggaaaagaagtggagaaggaaggggtggcagagggagtagcgtgcgggaggcggcgccggcgccgggctgctggcgaggcggggtggggtggagtggggtgtgcctccggcgggcggtcagcaagtcagtccgtccgagcgccggcgtcccggtctccagcgcccgcccgcgacagcgaccgggactggcgccccgctgctccgaccgccggcgagcctcgccccttcccaggctcttcactgggtcctcccgcgagccccgcctggcccggcgtggggccgcccgtctccgccagcccgggcgcccgtcgcctcgtcccgctcgcgcagtccctgccgctccctccgctcgcgctgtctctggctccctctcgctccagtcccatttatgaagcgcggtcccatcacgtgttaatgagcctttgtcctgccctggcagcggcggcggcacagaccccgccgagggaactgcgcggggagggacctgagcgcagcgcccgtagccccaaactttgcttggggcgggggacccg

SEQ ID NO: 4975 - DNA, 192 bp, Homo sapiens
  chr6:88876284-88876476
  hyper
cgtcacctacttctcctcttcctcctcctcctccgccgccgcgctcccggaggcccccgctgccatgacctcgctgtgctcccggataccctcacaccctgaccaggccaagaaggggctggtgcatgcgccgcccacgacctcggggccattaatcacacgctcccgggcagcgcgcatcgccaacacctt

SEQ ID NO: 4976 - DNA, 791 bp, Homo sapiens
  chr6:88876630-88877421
  hyper
ggggccgggctgagctttgggaccgcgctgcgcagcccccgagccgttcgctacctggctgcggtcgcgcggccacctgtcctccgccctcggggcgccgcccagcttcgcgccaggcgccttctccagcgcccgccgccctttcccggcgagaccactcgggcgcgccccgcccgccggtccccgatgcaaacagttgggctccgtaggcggctggctccgcgcctcccggcccggcgcgccccctccccggccacccggggccccgctcctcgcaccttttcgctggaggaggacgccccactccagggccggactgggggctctgggactcgggggcggcagcggcgggcgcctggggagccgcggtgtgctcagcagccgcggcaggaattaggggacatgctcgttaattgtttccactatcagccgccgtctgcctcctgtgtgcacggatcaaaccttaattggtctttacatttatcatggtgaattgcgaacctccaaacaagcctgggccgccgcttctgccgaggaggcgctcccctcccctccgcccccggggccctgcagggtgtgcggcggcggtcgtggttatttagacatctttatctctcgtgagttggatcgggagaggatcgcacggtttccacctgacggagccacgtcacgtcggccacaagggccccgtgctgggcgctgggttcggttcccggccgtcctcttgtggccgccttggcgttcattttatgacaccttgccggtgttcccagacatcatcccgcaccgct

SEQ ID NO: 4977 - DNA, 30 bp, Homo sapiens
  chr6:89827897-89827927
  hyper
ggggtcctggagtgcgacgggatttgggga

SEQ ID NO: 4978 - DNA, 30 bp, Homo sapiens
  chr6:89855490-89855520
  hyper
tattaactaataaccgttctcattctgctg

SEQ ID NO: 4979 - DNA, 30 bp, Homo sapiens
  chr6:90120690-90120720
  hyper
aaggaacttttgctcgcttctgagggaaac

SEQ ID NO: 4980 - DNA, 796 bp, Homo sapiens
  chr6:90120944-90121740
  hyper
tgacaacggtgtttgcgtggatcccgggaaatctgcggcctctcggagactcccacaacagcttggcgagcatccccccgccgccccgcgggtctccccagccactacctgggtgggcccctcccgcggcgacgcggggcgagactgacacccgcagctgccgacgaccctgccagtcacgccgccgccggctgcctttttttagccacgacatctgaccctggcttcaacagcaccgttctgggagagaggtcccagggcgcgcccgcggtcccctcccctccccaaccgccagacgctgcggagagcttggggtgaggggcgcgggaggcaccggctctgaaaggggcagaagcgcgcgctcctccagcccagacgcttactccctccttccccttttccaccgatcctggttgcccctccgccaccagcaccgcgctccctcatttggcagctcgaggtcgggcttttggcgtccctccccaccccaaaccctcaactggacccgctcccctggaccccctccaagtcggtggctcgcgcacggccgggctgggggcgggaaggcgccaaggggaggaaaggggcgcgagccgaggacgcgggggccgggcgctcacctccctcctctgtgccgctgtccggatcggcgtcggaggagtcgggcccgtctccgtagtccgctagccccaccagctcatcctcctcctcctcctcctccgcgtcgtcctcgtcctgcggctgcggcttccccagcacctggctcatcgtgcccaccggccggccggcccgggga

SEQ ID NO: 4981 - DNA, 32 bp, Homo sapiens
  chr6:90122137-90122169
  hyper
ggagaccggggaggcgcggggcccctgcaccc

SEQ ID NO: 4982 - DNA, 30 bp, Homo sapiens
  chr6:90122443-90122473
  hyper
ccaccccagagcagcgtgcccaggacaccc

SEQ ID NO: 4983 - DNA, 1085 bp, Homo sapiens
  chr6:90142634-90143719
  hyper
ctggcaacccccacgcggaaaacctcaccctactataggcccccttcctcccactcttcagaaggcggtggccccacccaggagagggctgcagatcggggccagccccagggcctccgcggtgccacctctctctcgcgagggtccctgccgtgccccggctcgccgctgggaggcgctgcggcaccggcgtaggagccgccggcaggggtggggcggggccggcgggacggggcagagggccctgcggcggcggacgcggcgggctcggccacaggtaacccgcaggagccgagagcgctgcctggcgcgcgggcggctggaggcacggcgctgggcggcgccgaggccctggggccgccggagccagcgggagccagtccccgtcttcgcccctcgccccccaccgtgtcgccggccttggtccctgcggcgcggacgtccggcgcgggagagaaaggtaccaggcgacctcgccggctccctgggacccccgcttacaccggggtgggcgcctcaggtcggggaggacgctgtcgggggaagggggcgctgctccctcggcaccccaggatcgccgactgcccgcggaggagacccggacaccgcgcctcgccccctggcctgcggcctccgaaaacgcccggcgcgagggggtccccccggggcgcctccctcttcgcctggcatcagttgcctccctggaatatggaacttcgggcgagggaggtggagaactttcttctggggctcgtccctcgttctcctgctcgcttgcagtttgaaggaagggcggtgggggcgggggtccgagtaccccgcggtctgcggcgcgtaggagggtaggtccctggcctgcggccgcctccgaatgaccccgtccctccccgccctggacgacagcactagggtgcagtcgcaggagaggggccgatacccctcaggagccccatcggcgaagcctcagcaagtggcatctcccggggtccagagagtcggcgtgctgtctggtttgggtccagacatcagctcacccaagcttatcttgggcttttaagtgtgttgcttccggtagatctcgggga

SEQ ID NO: 4984 - DNA, 418 bp, Homo sapiens
  chr6:91004760-91005178
  hyper
ctgcagcactagacagcgaaggtgaaaaccaggaacgccgcgtctcgccgcccgcgggcccgccgggagactgcgggtccgtctcgcgggtggggcgccccggtccctctcgtttcctggaggccacaggtcacggcgacggcggtgaccgggagagcaggctgcgaggcgcgcctcatcgggccacagacaaaccaccccggcagcggccgcgccggaacttccctcaagttaccaaactcgcctacgcgcgggagagtgctggggatgccccatgcgcccgcgaccccagaagccaggagtgtgccaccccttcacacactcactcccggccctgcacgcttcccctcacggtccgagttcctgcaaatgcttggccagaccgaggtcgccgagatgctcgctccagtctctcccc

SEQ ID NO: 4985 - DNA, 422 bp, Homo sapiens
  chr6:91005208-91005630
  hyper
cgcccgccgccgtctccagcggcgccgggctcccgaacacccgccgggtgagcgaagcacagcggggccacggagcgcctcgacgcggggacggggagggcagtgtccccttcataaaccagtctcctgggtgaagcttctggggcttggagactggagtgtagggtgtgtgtgtgtgtgtgtgtgtgtgtgtgttgcaccttgacttcatggaggatctgtgggagaggaggtgcaaggtttccctctcagaagcctggcgcccttaggtcttagctacgcgggacgctttccgacaacccgatctttcgctaggagagattcgatccaggtctgcgccgcgaggcccccagctcgcctcttcctgcgaccctaaacttgggctttgattccccgccggtcgcggtggtccgggccacccg

SEQ ID NO: 4986 - DNA, 775 bp, Homo sapiens
  chr6:91005660-91006435
  hyper
cgcggccaaggtcctcgcggagcagcccgggatgcgcacgccgagggttaaggaggaggccgcccggcctggagctgggatcgcaggctgggggccgggacacccgggcctcgccgggccgggggcagggccgcgggtctgacagctgctgcggctcgcgcggacgcgcgcctcctgcagcccgccctccccatgcctgacttattactctctgctcctcctccctctgctgttccaaaacacccttcgacgccagcaaaatacaatgcgcctcggccgccgtaaacagccgggagggagagcacacattcggcgcggcgcggccgccggctcggctcccacccccttcccgttcctagaaaatgccataaaagcgggcagggcgcggggagggcggctgcgcgcccggcggccggggctcccttcccgcgccgtttccccacgcctccccgcccgccccgcgcgcccgctccccccgcaaacttgccccgccaccccgcccagcggcggggcccggggcccggggcccgggactcacctcgccggagaactttgcgtccttttccgcctcctcttccccgcgtcttcccggctcgcagccccctcccggcagccggcgaggtgggcagttcgtgggtcaccgaaagctcgcggaggggacgcgcatcacatggcagctcgttcccagccccccgagtgcgccgggaagggggaggggaaggggcgaggggaggccggggggaaagcgagagcggggcggcggcgggagtgggca

SEQ ID NO: 4987 - DNA, 41 bp, Homo sapiens
  chr6:91321110-91321151
  hyper
tcctctccagccacaccggcgcgccccgagggttgcaggcg

SEQ ID NO: 4988 - DNA, 246 bp, Homo sapiens
  chr6:94126366-94126612
  hyper
cgtatcccttcccgctcggagcagagtgccgacctccctttgcgcccgcggaggcgcagtccctcggctcacccggacgctgggggccaggcctaggactccagggctccgcgccccggagtcctgtgggccaacaggtgatgggagaggggctagactgggggcgcgccctgacagacccaggcaacgaccgcgcgggcaaaggctggcgtcccggggctggggcggggccgtcggaggggcggg

SEQ ID NO: 4989 - DNA, 423 bp, Homo sapiens
  chr6:94126642-94127065
  hyper
cgccaagcatccattacgcctctgccagacctgggcactccagggagccggtggcgccctcgctcgagaaggagtcgggaagaggagagtggctttcgggaagaggagagtggctttcgggaagcatctcctctgaggaagaggcggcggcggcggcggcatttacggagagaaaaagtaagcagctgcactttgccttcaagcgtcagactctgacacgcgctccctgtagcgatgataactgaccaacccgagagaacgtgcacaaggaaagtgagggaagggggtttcttatcttcctctagccacccccaaatgccccaggaggcccggcacctgcttcaagcggttcccagcgctagcccttgggtactgcgggccgcctcggggcttgtgaactcctagaacgccagctcttggtcg

SEQ ID NO: 4990 - DNA, 357 bp, Homo sapiens
  chr6:94127085-94127442
  hyper
cgccgcctagaagccgggcgcactcgccgcccgccagccacagatcaccaccctccctcccatcacccccgcgccttttatacatcacacttctgcatctaaagaattcaggctcttagaatcagaatcctcttcacgtagcttgcacccagaagagcaaagagaactagacattctggctgcaggaacctctccccctagtgatgcagttatttatagcccaaactccagcccgagtctgcgtgtgttcgcgcgcggggtttcgccgcggcggtgcaaacttttcctctggtccgctattccagaggaatcacagtatgccagggctgaaggtttctgatcgctaacgtcagggga

SEQ ID NO: 4991 - DNA, 1780 bp, Homo sapiens
  chr6:94127968-94129748
  hyper
ccaactacaggcaccgaaaggtattttaccttctgtcaaaggttcaaagaaggaaaacataaccatatacaggcgtatctgtaacagcttgccaaataaaacctgccttctcctaccagaaccaaccctcagggttcaggtctttggcaaggattgggcactcggattcctcaattgctgcactatggggcaaataattggggactttgagtcgcccaggcggcatccttacaaattgcacagctccagcccgccccctgcctccacggcccgaccaagcccgctgggctgccgctgcccccatgaccgctgggcccgacgcgcagcgcgcgctgaatggagacatccccggccctcgggtcgcgcgccgcacgccgcgcttcacctccgcggcgttattgttccgtgctggcggccgagcgccaaccgcaggaccgcgccgccgcctccgacgcagtgagcacttcattagtaacccgagctttccgagctcatcgaagtctcggtccctctgggaaggctccgggctcccgccactcgccggcgggctggcggagacggtaggggctgcatttcccagtctccaacccaactctggccgcagctcccacagaaggcgaataaggagacaaggaagaccgagctagagagagatgtgacccgcctgaggtactaagaaataagctcgccggcagttcctccaaccccaccccacccccgttgctgctcacgccctccagactgcccgcgccagaaatcccgcacccgtcggatggacggctccgggcacagggctgtaggcggctcggaacagccctggttcgcgctcgctggtccgccaggagcggcctcagcggtgagggggcggggagccggcgggggagggtcgcccggcgccggaggcgcggccggcagcgccgcggacgagctggcttgtgcaggtagacatctaaataaataagtcagaacaaactttgctttcccatcaccttaccttccttcgcagcctgcgcctcccctgtgtgtgcaaagcggagcagccagatgtagcataaaataatccatgaagggtaccgagtttgaaaaaccatggtgcatgagcaggttttattttaggtttcagttatcttgagtcgtggatttttaaatgctgtttgttccgaagtagcttttgttttattgtgctccttgcatcgattccccttctcggtccccgatcggctgctccacgtttagctttttttaatttcccccccactcctgttcgctcgcaccgtgtttgctgcctgcaagtctccgactgcagaccggccgcttgctccacactccaataatatcaattagggggggagggggcggggctccgagctgagagcctccgccactcgggctgagtggcaggcacagccggcctgccaggaggcgattcccagggccaaggggcgggtcccggcgaaatggccgccccggccacgggggcggggtccgaggcaggagccaatcggtgccgagcggagtcaggttgctggtccaggattccctccaggttctgagctcgcgctggatgttcagaggagaacgaggatggtagccgaggtgtgtgctgctttggacgctctgcttttagcaaccgcagctttcgcgtagcagaataaatccgagaataacgctcccaacttacactcttttctatagctgtactccgcgcgatcttttagaaaccagaggcgaagcaagccttctctcagctaccaagcacggagcccggacagtgaaatga

SEQ ID NO: 4992 - DNA, 30 bp, Homo sapiens
  chr6:94130100-94130130
  hyper
cgtatcgtttttttacgcgtttatcatttt

SEQ ID NO: 4993 - DNA, 30 bp, Homo sapiens
  chr6:94807929-94807959
  hyper
acctaaaaccttctatgtgtgctctgaagg

SEQ ID NO: 4994 - DNA, 984 bp, Homo sapiens
  chr6:96463166-96464150
  hyper
ttagctggtcaaccccggcggtaaacaaccaaggccacccctgcccaggcaacagctccaaggggcaggcgatggttgccggcattgagctccctgctggcgccttctggcgggacagccagtgccaaagagcgcccagggaaacaaacaccaatgggggactatacagatgtcatggatgcacatgtaggatcataatctgcccagaaagaggagagaaggagggcgacaggctgcggatcctggtccaggagccgccgcaatggagcgggcggcagtgtgcgcgcacaggtgccacaggccggtggcggggagagctgtagaggctgcctcccggactcagcactcgcaccagcgcgctgaagccgcggctgctgccaagcttgggtaacccccagcctgagccacgagaggaagagcccaaggaaagggcgcgaagggggaaggagggtagggtagaaggagggcgggggagagacccatcgcctcatcttacatttcccctcccaagctcatttagtgggaacctctgctgggctcctgcgcgcctccctccccaccccctcaactctgggcgaccatctccccctcttcccttgctcaccccccacccttcctgctcttccgtccctccctaccgcgtgcctcctcccctccccctcgcctccctcccctccagcggcagtagctgtagcagcttcagcgaagccggagatgggcagagagcgcgcgcggcgcagcagctccagattcactgctctcccctgcagctccccgcgcccccgccgctgtcgctgcctcggtgtcccccagccccagtcgcgctcttaggacagcgccgccaccgccgcctggccctgcctgcctcctgcgccgcgcagccctcgcgagcgccccggatggcgctttacccctaggaccggtgagtaggcgggagagtgcagggggtcgggcgtcaaagcttggcgcggagagaacatcttt

SEQ ID NO: 4995 - DNA, 30 bp, Homo sapiens
  chr6:96969408-96969438
  hyper
caactattactctacggaaatattaggggt

SEQ ID NO: 4996 - DNA, 114 bp, Homo sapiens
  chr6:97284790-97284904
  hyper
ccagcaggaaaggagccggcatggggtgcccctctgcagccgaccgttttcctagaaggcctaaccgctcagacgggcaggggaggggggcgggcggcccgggagaaaccgagt

SEQ ID NO: 4997 - DNA, 30 bp, Homo sapiens
  chr6:97731281-97731311
  hyper
aactgctgctgaggcggaggagaggactta

SEQ ID NO: 4998 - DNA, 30 bp, Homo sapiens
  chr6:98405135-98405165
  hyper
cagaagcaacaggggttttttgtccaatat

SEQ ID NO: 4999 - DNA, 30 bp, Homo sapiens
  chr6:99273142-99273172
  hyper
tcagagcagctgtccgaaaggtccccgcat

SEQ ID NO: 5000 - DNA, 251 bp, Homo sapiens
  chr6:99273657-99273908
  hyper
aacctgtagtaaacctcttcacgaaggaaaggagggctgttgtcttggcttttggttgtgtgtccctcatggcccccaagaaaacaatttttctgttccaaacactctttggatcaagtttcgtccttgcatttctagtttaggcgtttctactagaaacgaatgtgtggtgcgttttggttgggcattacttgcaggtgtcttgccgcttaagtttcctggactgagacgttgactggtgacctaggctt

SEQ ID NO: 5001 - DNA, 172 bp, Homo sapiens
  chr6:99275802-99275974
  hyper
cctgcttctcgccctcgtcttcctcccccggatcccagccaggacctgcctaggcgctcttcgaccacggaacatccctccccgccacccccacctccatcctttccatagcagtctctccccgggtcagtccagggcgctgggaagccttagctctcgctttctaccccca

SEQ ID NO: 5002 - DNA, 622 bp, Homo sapiens
  chr6:99276258-99276880
  hyper
ggttaattaagttcccttccacgaactgagctccgtgcctattcattattctctccctctgacctagggcgttaatatgatcaggcctatgactcggccgtgttctgttttcctattttgcatttaatgctgggacccggctgccctagattaccatcgaaaactctcagaaaagacaagaggagccaggaggtctccctgctccaatctgcctaaggcttcctcttcctgcctcctcttccggccaacgtctgcccctatgttcccaggacccaaattctggaaacctgtctttaaaaatacaatcatctctaactttatgatgtccaaaagctgtctagaatgacagattcgaaactctgagacctagcagaagattttggcccacagttattacgactgtggttaactgctctccagaaaagcatctctcccgcccgtgcaccacctgctcccctccccgcccacccccccatccccccccaaccgccgtcctcccggacactaacgacacaattgttaagtgcacttgtacacttcagaaggatttgcattcgtgctgtgtgcaggcagaataagagaactgaagtccaacttcaaccaaatacgcctgtttatccca

SEQ ID NO: 5003 - DNA, 163 bp, Homo sapiens
  chr6:99277174-99277337
  hyper
taaggctagggggagaaaatgcgagcgtgcctgtgtgtgcgtgtgcgcgcacacacacgcgcgcgcacacacacacacagacacctttaggctccattgttaagaggtcatttaactgttagtcctttgaaagtgaaattgcgggaagcaaactggaagccac

SEQ ID NO: 5004 - DNA, 1002 bp, Homo sapiens
  chr6:99278969-99279971
  hyper
ttgactgagtagaggttcctccggacctgggagaagctggggtggcgccagcatctccttacaggtgcctccatcctgtccttgcggaaggggcttaggacaccccgcagtccgcgccccgaggtggcgaggcccgcacgaatcgcctgctcagccattgtcctagcgagtgatctcgaggagctgtgctggatggagtgagggagatatcaagacaccttgtcagttcaaagcattttagcgttgtttgaaatcctctccacgtcaacgtaagcagcctgtgtatttgaacagctgctttgaacagtgaaagggaataaactgattcaaaacctggaggtgtctgcccgagacaccttcaacgtgcttttatgcgggcggagaatggcaggcagacgcgcggactctgccctgacagggtcagcccaaagaatgggccccagagcccggggcgggggaggaaccggtggagaggccccagtctggacctaaaaccagcgagagctcaggtttcgggagccccgaagaggtgccgcgctgggaggcagacaaggaagcccagggtgctcggaacccggcgttcgcgccaaccgggcccctggcgcctggaggggaggcggcggtagctcgtggggaggtgttgctcagagccgcggtgcgagcccagcctggcccgcccggtgattggccgcgcttgggggtgggggtggggtgcagagactgaggccccgggtaggctatttctttgtgtactcccggggatttattgggtatattaaaccctgttgggaacgtttcggctccttggccgccagcgaaatgagacggggatggaagttggagttgagacctgggaagtcaacgtgggaaggatctcagcattaatcgccggtgatgtcctatcgcagacaggaagttttgatgtacacgtgcagcctattcttgtcccctcacactagcgccctatgccgggaggagggcgggggtgtggggtggggtgtg

SEQ ID NO: 5005 - DNA, 126 bp, Homo sapiens
  chr6:99281067-99281193
  hyper
cgcgcccaagttctagctaccgggcttgcaggctcggaaactcgcaggcggcacctgctctgggcggctaaagaactgatggcgcgacgcgcccgcgctccgtagagcggcgctgcgggtgcatgg

SEQ ID NO: 5006 - DNA, 310 bp, Homo sapiens
  chr6:99282808-99283118
  hyper
cgccgagccgcccggcggcatgcagcagggcgcggggggctaccgcgaagcgcagagcctggtgcagggcgactacggcgctctgcagagcaacggacacccgctcagccacgctcaccagtggatcaccgcgctgtcccacggcggcggcggcgggggcggtggcggcggcggggggggcgggggcggcggcgggggcggcggcgacggctccccgtggtccaccagccccctgggccagccggacatcaagccctcggtggtggtgcagcagggcggccgcggagacgagctgcacgggccaggcgcc

SEQ ID NO: 5007 - DNA, 405 bp, Homo sapiens
  chr6:99283177-99283582
  hyper
gcagcagcagcagcaacagcggccgccgcatctggtgcaccacgccgctaaccaccacccgggacccggggcatggcggagcgcggcggctgcagcgcacctcccaccctccatgggagcgtccaacggcggcttgctctactcgcagcccagcttcacggtgaacggcatgctgggcgccggcgggcagccggccggtctgcaccaccacggcctgcgggacgcgcacgacgagccacaccatgccgaccaccacccgcacccgcactcgcacccacaccagcagccgccgcccccgccgcccccgcagggtccgcctggccacccaggcgcgcaccacgacccgcactcggacgaggacacgccgacctcggacgacctggagcagttcgccaagcagttcaa

SEQ ID NO: 5008 - DNA, 214 bp, Homo sapiens
  chr6:99290258-99290472
  hyper
tggtgcagcacctggacaaggcgggcgagtgtgctgccggccaacatctgctccttgcccagtcgcaaaagaggtaccttggccttgccgcgcaccccccacctcggggaccctggccgctgtcgcgaaggcccagacagcctagctcggccgcgcggggaggagagagacagggaaaggagcggggcactccctgcactcccagccccggcct

SEQ ID NO: 5009 - DNA, 82 bp, Homo sapiens
  chr6:99290709-99290791
  hyper
cgtcgccccgggaaagtgggctctagacgcaggagttggcaagccctctctgggggcacgcgtggctggggcagaggtgcag

SEQ ID NO: 5010 - DNA, 83 bp, Homo sapiens
  chr6:99291258-99291341
  hyper
agttccctagagaagggagcccgggagaccctctgggcaccccggcatctcaagccagagctgagggcccggaaagtgagggg

SEQ ID NO: 5011 - DNA, 110 bp, Homo sapiens
  chr6:99291586-99291696
  hyper
cgcagaggcgggaagctggccggagaggagtgggaaggcgaccaagggcagcagcaggggctcctgcggggcgcaggtctgtgctggcgccgggcctggcctctgcaggc

SEQ ID NO: 5012 - DNA, 97 bp, Homo sapiens
  chr6:99291729-99291826
  hyper
cgcccgcggccactcacccggccccgcggccagcccgggcggggtcgcacgcaaacaaggatgcttctatttactcgcctctgcctgtagatttcta

SEQ ID NO: 5013 - DNA, 962 bp, Homo sapiens
  chr6:99292122-99293084
  hyper
ttatttgcccctggaatataacgctgacccaaatgcagtgaactgcacggcccttgtggggccccaactttgatgtgggcctcggcttggaagaggcgtctgttatttattatttccctcccaccagcgtagcctggtctcccagcgccgtgcccgccgcccccgccccatcctgcgccccagatgcgcgccccgcttggaccagtccgagcagaggggggttccgaaatctgctcggacgcagcatcgctggccgcctgccccgctagttccccgagtgcgattactttttaaaggctcctttaagcatatttccgtgaatctgtttcttgtgctttaatgttactattaattgataagatcagctcatcaaacatactatttcgatagggaattgtaattaaaaccttaatcctgtttgagactttcttctctctctaaattcctttttcttatgaaaggggtgcaaagttcactacaaaaagtactataacagggagattaattcgttatctaaataacaatctttgctattgatccaacgtactttccgccaccttttgtgttggtccgggaggcccttaaaaaagagaatatacaaagcagaagatctggaccaagccccaccgactccgatagacttgggagagcgaggggatccgcggtccgccccccttaaccacagtctgaggaagcttcagaagtgggtcctggccgtcccaggcgatgccactggggaagcgcagcgctagagccgcgggcctgggagccgggctcctccacagtcctctcccctcgcaaagggagatctgatctgctcagtctctaggtaaatattcgaccgattctgcttttacttttaatatttaaacttggattatcccgtctccaaatgcgcgttcctaacctttgccagtggctgggatgtaataaatcctggcggggccggggcgctcagcctc

SEQ ID NO: 5014 - DNA, 224 bp, Homo sapiens
  chr6:99293408-99293632
  hyper
gtgttgggtggcgggtcggggaaggtaccctttccaaacctatctcccctcctcgctagcccttttaaaaaggtggtggccccagtttgagaataagccccagcgtctctgaagccacgaggaccgtttgtgctcccaagtcaactcagtattccgagattttcttcttttctaagagcttcaccccctccccacaccctccttctttccgtctaacaaagtct

SEQ ID NO: 5015 - DNA, 116 bp, Homo sapiens
  chr6:99295747-99295863
  hyper
gcgacatcctggagtcgccgggagtggcgctgcggtgaaagccggtgcctagagtgggcttaggggtcccattccactcggaaagtcctctcacctccccaagggccattctgccg

SEQ ID NO: 5016 - DNA, 216 bp, Homo sapiens
  chr6:99296061-99296277
  hyper
cgcttccgccctcccggcctccctcttgccgcatgagcagcgcagggcctcctgggctgtgctggggtcaagagttatgaacacttcgtgtcctcaggagctcacgggggtgacgagaggcggtctgggtctgaagccgctacacagaggggagcagtggggcctcggggagcagcggggcctcggcttggcggctccccccgccaccccgccacc

SEQ ID NO: 5017 - DNA, 30 bp, Homo sapiens
  chr6:99395953-99395983
  hyper
gaagcaaagccgggcgtttctcccatggga

SEQ ID NO: 5018 - DNA, 30 bp, Homo sapiens
  chr6:99872771-99872801
  hyper
gggggttcccactgcgcacgcgcagtgttt

SEQ ID NO: 5019 - DNA, 67 bp, Homo sapiens
  chr6:99962858-99962925
  hyper
cggagctcctaatacacgacgcttccagaaaagtcattagacaggcttcctccggtcaccaacacac

SEQ ID NO: 5020 - DNA, 30 bp, Homo sapiens
  chr6:100016718-100016748
  hyper
ttggaaggctctcgcgagagcgtcttgaga

SEQ ID NO: 5021 - DNA, 30 bp, Homo sapiens
  chr6:100038978-100039008
  hyper
aactcggcctgagacgtgggggggagacac

SEQ ID NO: 5022 - DNA, 242 bp, Homo sapiens
  chr6:100051771-100052013
  hyper
cgtagcctgcctctcggagggccggcggctgctggtgagcattccagcctcgttagggcaacctgttaccggagagggagccttgcccgaacggttctactgtgggcagggagcaggaccgcccctaaaccgcctttccccgcacctcggtgtaggagagatttcgctttaacggagactctggacgcccatttcaagtcgataaaaaaaaaaaaaaagccgagtggaatgttttgattgag

SEQ ID NO: 5023 - DNA, 136 bp, Homo sapiens
  chr6:100061560-100061696
  hyper
gggtcaccaccatcaccaccacgcgcaccaccaccaccatcccaagtgcctgctcgctggggacccgccgccgccgccgccgcctggcctgccctgctctggggccctgcgcggcttccctctgctctccgtcccc

SEQ ID NO: 5024 - DNA, 725 bp, Homo sapiens
  chr6:100061988-100062713
  hyper
cggagtccatctcctacttcagcgggcctgcagcggccgccctaagccccgccgagctggggtcgctggccagcatcgaccgagagatcgccatgcacaatcagcagctgtccgagatggctgccgggaagggtcgcggacgcctggactcggggacgttgccaccggccgtcgcggcggcgggaggcaccgggggcggcggcagcggaggcagcggcgcaggtaagcccaagaccggccacctgtgcctctactgtggcaagctgtactcgcgcaagtatgggctcaagatccacatgcggacgcacacgggctacaagccactcaagtgcaaagtctgtctgcggcccttcggcgaccccagcaatctcaacaagcacatccggctgcacgccgagggcaatacgccctaccgctgcgagttctgcggcaaggtacttgtgcgccgccgggacctggagcgacatgtcaagtcccgccaccctggccagagtctgctcgccaaagcgggcgacggcccgggtgccgagcccggctatcccccggagcctggggatcccaagagcgacgacagtgacgtggacgtctgcttcacagacgaccagagcgaccccgaggttgggggcggcggggagcgcgacttgtaacgagtcttcccgggaaggggcggggtgaggacagagaggagtcgagggtttattctcgcagtagaggaactcctggtg

SEQ ID NO: 5025 - DNA, 30 bp, Homo sapiens
  chr6:100067154-100067184
  hyper
atcgcgaggtcaagcgtgacccttggccac

SEQ ID NO: 5026 - DNA, 30 bp, Homo sapiens
  chr6:100441566-100441596
  hyper
agtgtgaaaccagccggccacccacccgcc

SEQ ID NO: 5027 - DNA, 30 bp, Homo sapiens
  chr6:100676874-100676904
  hyper
tccgtcagatcttccgtttccctcctgcgc

SEQ ID NO: 5028 - DNA, 87 bp, Homo sapiens
  chr6:100729631-100729718
  hyper
agagcccccaaatcagacaggcgggcccctgcgtcagggtgggcggagccacggggcccagctatcgagctgggaagagaaagctgt

SEQ ID NO: 5029 - DNA, 176 bp, Homo sapiens
  chr6:100903894-100904070
  hyper
acaggagcctctctcgccctctcctgccccacccccgccaccttttaaggaagcttttgccttcccggaggtttgccttctctttctgttccccgtagaaatcttacgattgtgtctgggttaatgttttataagggactggctactctcgtctacctgccgggctttcccgatct

SEQ ID NO: 5030 - DNA, 30 bp, Homo sapiens
  chr6:100933169-100933199
  hyper
aagttgcagcaaacttgtcagtagaatgtg

SEQ ID NO: 5031 - DNA, 30 bp, Homo sapiens
  chr6:101329393-101329423
  hyper
gggcgggagcgggacgctccactttaccct

SEQ ID NO: 5032 - DNA, 71 bp, Homo sapiens
  chr6:101840314-101840385
  hyper
tcttgagcccagtgcgcctggcctgttcccgcttagcctcacttaaatctcctcgcgaatctgagctggcc

SEQ ID NO: 5033 - DNA, 30 bp, Homo sapiens
  chr6:101841503-101841533
  hyper
cccccgccaggaggcgtgtctgtctctgcc

SEQ ID NO: 5034 - DNA, 30 bp, Homo sapiens
  chr6:101849923-101849953
  hyper
cttccccttgctcccgctaggactgtgatt

SEQ ID NO: 5035 - DNA, 105 bp, Homo sapiens
  chr6:105389509-105389614
  hyper
gggcaggcgtcggggatcgtttttgctttggtatcggtgatgtaaattcatgaattaaaattaaggattttgaaaagaacggggaagaacgcacttggatttagg

SEQ ID NO: 5036 - DNA, 102 bp, Homo sapiens
  chr6:105401586-105401688
  hyper
tctcaggtctcggccgcctggggagcgacctgcctggagaggcgggttgcgatggcagcgctgggctacagaccccgccttatttgcggggaggagaggacg

SEQ ID NO: 5037 - DNA, 128 bp, Homo sapiens
  chr6:105584191-105584319
  hyper
ggacctcgggtccccagccatcggcgctctcccggggccctctgacctcgctccttaaaggaggagggtccgtggcaacggtcctcctcggccaggcgctctcgggacgcgggggtgaggagtgagcg

SEQ ID NO: 5038 - DNA, 1152 bp, Homo sapiens
  chr6:105584366-105585518
  hyper
cgcgcccggctgcacgcaggctctgcgcggctcgaggcggccctacagggggcgaggaggaaccccggagactcggcggagagagcagagacggagctcaccaaggggcttgccgccgcagagcgcgggagccggcactcggtggggccgagggcccggggacgctggggctgcctgacctgagcggcggccgctgaccgttgagggtctctgtggccgcagcgcccagacccggggagaagggcggcctccaagggccgggagcccctcgagggcgcggccagcgaggagggacagagggcggcgcccccggctgcccgggcgcgtagaacaagcagctgccgccagggccgacaaagttgctccccgaggggctgagatccaactttcgcttcccgatttagccaggggagcgcgaggccgcacacaacccggcgcggggggaaagccggctgcagctgcgcctcccatccttacccggctggtccctggcggggagcctgggcagcgccgaccaaagttcggagcggcagcttcggggcgcgggacgcggggcacacgggctcagctgctcgacgggagcccgacgcgcgctcctcggcgggtcggcgggtccggaagctccgctgcccgggccgggtccccaagcccgcagccgctttgactaaaataggcatcgcgacggcggcggcaggcggcggcagccagggctggggccgcaccgcgcacgcgcatgcgcccgccgccccgcgccccccggcgggcggagcccggcgccgcggccaggatttcccacctcgctcccgcgactccgctgcgggtctgcacacccgaggactcggtttgaaacgcccgcttatttattttcttgtcgcctcgctacaagattctatccttgtttgggcatgagtggggggcggcagtctcgtgggaccggcggcattcgtcgttcctccttacggggataattcgagaagtgcggtccgggtagggagagaaatcaggagagaaaatgagaaagagaatcctcgtttcccctcaaagttggacgacccactcgtatatctcctttttgggagattcgcccataactcagcacaaacagggaatagcccggaaagcgcgcgagttcccgtccgattgtggcggggg

SEQ ID NO: 5039 - DNA, 728 bp, Homo sapiens
  chr6:105627362-105628090
  hyper
aaaagatctgggaggaatattcgcccagaagcctctagggcatacgactcgcgttcttcaggggtcggcgcggataggaaccgcagcaaaggatcccctagacctccgagctgtgagcggcgacacagccgggaccccagaccccggaccccagggcgcggagttgaccggagccgggaagggagcggcgcgggcagcgcggggcagcgagacgcaagcgctcgcaggggtcggcggcccagcagaagccgcgcccgctaagttgcccgaagcggccgcgaggtgcgagggtgcggacagcaccggaaggcggcggacgcagcgcccccgggctcaccttcttacctttccttcccagccctgcccggagcttcagcccggcgcccgcagaagtttcccggcggagcgcgcttgacccgggtggcccgcgcggaagccctcagcgtccccctcgtgagtgcctcgccgcccaccctgcggcgccgggcgcagcgtgaccgcagcgggctccggagcggcgcggcggcgcgggcgggtgccgggcacgggcgcgcgccccggggcgcagccgggtgggcgggcgcggcggctgcgtctgggccggggcaggcggttcggccaccggggtgcggggctgcggagaatcctagcggccgctacggaccgaagtttccaaagatgcggttccccgagtgtacaccgctcccggttgtaacatacacctagta

SEQ ID NO: 5040 - DNA, 373 bp, Homo sapiens
  chr6:106429102-106429475
  hyper
attcccagacggatgcgggcggtccccgggcagggaccccgaatccggggtcgcagggtggtagagccggaagattggattccatctccgcaaggattgagaaaaacggactcaccgactgaactattccatctccaagttgtttttattttccactttaagcataagaacgatgagaaccaggagccaggcggccccgcgtagcggtgggagcgcaggtacccgagagtaccctctgggggccggcccggcgcgctcgctcctcctcgcctttccgggaaccgtgcgcaggagctcacacggcacgcctgcggccaggggcaatcgggttctcggttcccggagtcccagttcccggtttccagtttcctta

SEQ ID NO: 5041 - DNA, 1181 bp, Homo sapiens
  chr6:106441946-106443127
  hyper
tggacagtcactcaaaagctgcgcccaaagttttaaaaagcgcggggacggtggagagggaggcgaagagcccgcgctgctgggctgggctcgggtgccgcgctggggacgccgcatctactgagcggtcgccgaagacgccgggaggcgaggggcgaggtaagacgccgcctaaagaggcccgggctctcccccggggtcgttgttggaaaagcaaattccacggtgaactctaccaagctcagcgcgtacacagctagcggctctggattggactgcattcgcctaaattgcgtaattaaaaaaaaaaaatacaccactgccaccctacagcgacgcttccgctggaagacgagcggggacgcgtgacagcgcggggatagcttttctattacgtttcttgttctccgagctcgagcccccttttaaaaagtcgctcaccaaaaacggggtgggggatggaggtggggacgagaagtttccgaatgctgagttcatttggacgaggtgaggagaactagggtcctaacagcaggtccagaggactctcgagataggtttagagcccgtccttttgtctggagtgtcgcgggactccagaagtgggttgtgcaagacaaacttccagataaatctttgcccggatcctcctgcggtcaaagcatcagtcctgcccgtaacttcctaacgacatcttcttggagcagattccgcggcggggatggctgggtgtgcaaaccgaaaacagtttgtcagccctccagtcccgccgcgtcgggaatgcgagcccggccacgcggtccgaccgggtccggggacggcgcgcttgtcgcgggagcctcccggcttgcggagggcttgagttttttggcggagacagaggaaagcctctggtcgagaggattagagcgcgcgttttctccgccgagcacgctgcccgacgccgtcgcagccgcgcacttcccggttttgaaagccagagagatgagtcaagcgcaaaagctccggagtgacaatgcgagcttttggccagcctcatcctcctccccattcccttgccttcttttaggtcttcggttcgtgacaagtgcataggttaggcttgcacggaagagggtcggggcaggtgccagctcagggcacctacccggcgttgtcacgttccctttgggatcaatgat

SEQ ID NO: 5042 - DNA, 445 bp, Homo sapiens
  chr6:106534039-106534484
  hyper
gtcaatgttgaaatacacatgcgaagagaggaagctctcggcggctgtgctagcaatctgggggaaagccctgggctcggccaggtggtgttggccacgttggccacgcccccacttcgcgcagccgagtggctaaggaaatcttaagcagggaggggaagccagacggttaacacagacaaagtgctgccgtgacactcggccctccagtgttgcggagaggcaagagcagcgaccgcggcacctgtccgcccggagctgggacgcgggcgcccgggcggccggacgaagcgaggagggaccgccgaggtgcgcgtctgtgcggctcagcctggcgggggacgcggggagaatgtggactgggtagagatgaacgagacttttctcagatgttggatatttgcttggaaaaacgtgtgggtacgaccttggtaaggaacttgaa

SEQ ID NO: 5043 - DNA, 170 bp, Homo sapiens
  chr6:106809040-106809210
  hyper
acttggaggaggggaaagccccggggtctgtttcagtccgcaggagggtacccgggtccggaggggagcgatcgtagccgctggggttgacgaggttcctcgcggcttttggttcagaccaagcaccggcgagaggaacttgtgcccacgcatgtggcctttagtatgac

SEQ ID NO: 5044 - DNA, 638 bp, Homo sapiens
  chr6:106958124-106958762
  hyper
ccaggctgggctcgccgcccctgctcccccgctttcccaggctcgcctcctcctcttcctgcccacctctatgccccgcacctacccagtccccactctggcaaaccccggagcgccaccgcgcccattggcgggtttgcttttattggtttgttctgcgctccctcccgccttctggcgcgggcactggatgctagccgttttgctccaggagatataagaagcccaggttttcccccttcctgggagcgctgcggatcattcgcaggcggcccggcaccctcgcataggtgggccggcccctggggctccagccgtgcgaccccggaaccacacgtgtggcgaggaacgggtcccggggcggagtaggcagagtcccaagcgcatccttcagccacacctcctcggctctagggggcggtgagcaaaggcggtcacccctgcaacctcgcccgctacccccacgcactcctccgtgttcacatggtaggaactcccacaggcaaaagcctttccgatgcgctctgcagccgcgggatcactcgggtgtttgaacgctcgcgcgctcctcccattggagctccggctaaggcggggcccaggtgcttgcttcctccgagcttgcttaaggttttcat

SEQ ID NO: 5045 - DNA, 1660 bp, Homo sapiens
  chr6:106959519-106961179
  hyper
gcaaacggacacaagcgaggagggctccccgcgggagaatccccgagaggcagagggcgagctccccgagagcggtggccccgcagccccccctgacgccgagctgtcacctcgctggagcagcagtgcagcggctgtggctgtgcagcagtgccatgaaaatgattcaccccaattagaacctctggaggcagagggagagcctttcccagatgccaccaccactgccaagcagctgcattcctcgccgggaaattcctccaggcaagagaacgcagagacgcccgcccgcagtccgggggaggacgcttcaccaggtgctggccacgaacaggaggctttcctgggtgtgaggggtgcgccagggtcgcccacccaggagcggcccgcgggaggactaggcgaggcccctaacggagcccccagtgtgtgtgccgaagaaggctccctggggccccgcaacgcccgcagccagccccccaagggcgcgtctgatttgccaggtgagcctccggccgagggcgcagcgcacacggccagctccgcgcaggcagactgcacagcccgccccaagggtcacgcccaccctgctaaggtgctaactttggacatctacttgagtaagactgagggggcacaagtggacgagccggtcgtgattactcccagagcggaagattgcggtgactgggacgacatggagaagaggtccagcggccgtaggtcggggaggcggagggggtcgcagaaatccaccgactcccccggcgcggacgccgagctccctgagagcgctgccagggacgacgcggtgttcgacgacgaggtggcgccaaacgcggccagcgataacgcctcggcggaaaagaaagtgaaatctccgcgggcagccctcgacgggggcgttgcctccgctgcgagcccagagtccaagcccagccccggtaccaaagggcagctccgaggggagtcggaccggagcaaacagccacccccggcttcgtcccccacgaagaggaagggcaggagccgtgccctcgaggccgtgcccgccccgcccgccagcggcccccgggctcccgccaaggagtccccacccaagagggtgcccgatcccagcccagtcaccaagggcactgcggccgagagcggggaggaggcggcgcgggccatcccccgcgagctcccggtcaagagcagctcgctgctgccggagatcaagcccgagcacaagaggggcccgctccccaaccacttcaacggccgggcagagggaggtcgaagcagagagctgggcagagcggccggagcgcctggagcttctgacgccgacggcttgaagcccaggaaccatttcggcgtgggcaggtcgacagtgaccactaaagtgaccctgtaagtagccgcgcaagtcccggccgagttgctgtccgcacacgtgctgggggtccgctctgagaggctcggggtatctgcattgtggaagaaacgtctggtcactgaactttcccctccatgctgaacttaagatagtgaagggccagtttacacagtcaagatttaagatgacacctgtggcagcctcctcagttaattccctttttaacacaagatttaagtttaacgaatgtaaaaataggatatccgttgaagctcaacg

SEQ ID NO: 5046 - DNA, 30 bp, Homo sapiens
  chr6:107780252-107780282
  hyper
gttgctgagctcgtcgctcagcaggcagcg

SEQ ID NO: 5047 - DNA, 318 bp, Homo sapiens
  chr6:107810191-107810509
  hyper
gggacagactcaatcagacctcggccccaggcgtggcaggagagggccaaagaggggacttgtgagcgcagagggagcgagcaccgctccatggagggcaggcgctagctgggaagtcgggaggagaaagtgcaaccaggcggggaggggaggatcccaccggggcgtggcgagggcgttcggggtccgggtgagcgggaccctacgcgggaccgtgcgctcccagaagctcccactcagcccaaccttttgggcgaaacccaggacacccagataagggtgcaggcggggtcacgcgtaaagctgttactttgaagc

SEQ ID NO: 5048 - DNA, 630 bp, Homo sapiens
  chr6:108436181-108436811
  hyper
ctctcgcctttgcgtcggcgggttgctggttgccggtacccgctcagcagctaggagccttggggaaccctagctcttagcttccccgtctggcgaggccagagggccaagttgctcactgggctgtgctgagggataaggggagaaaagaacggaaatcgcagctacgagggctagagggacggcgcggctgcttgaggacgggtcgcctagcggtgggcgagtagggctgtgcgtaaaaggatctagacagacagtcgtgcgcccgcagggttgcaggacaggggcaggccgagttgtggcgcgtgtgtgtttgtgtgtgctcgcctccgggttgcgcgctttcagggctttggatgccggggattttgaggacccattcaaagctccgagggggcggaggctcaagcaagccagggaaaaggtcccctaagcctcagagcctgggctgcgccccagacaaagtgcctaatgcagagtaggctcttaataggtttgcattggatctaaacgaaagctagtgaaattcgtacatgattctaatgagagatgacggccaggtgttctcagcagcccctggccctcacggggcgacctgaaagttcccactctacccgagacgaaactcag

SEQ ID NO: 5049 - DNA, 584 bp, Homo sapiens
  chr6:108440060-108440644
  hyper
tctaccaacccaccacgacctcatattcttgtgcgggtgtctgactcgaatgacaagcgagctgattttttcagtacatagctgggaaatgtagtgagtgataatagagatttctctttcattttttacgcttgacttggttattgttgcttttcttttcccgtgattccttctgaggattagctctgacttccccactattggcggtcaaagtggccccgactcgggatgacaattgacggggatcaagggattgcccattctgtgcctgtaagaaccgattcgtgccagagaaactcatcaagtggaggcggagaataaagaccgttcgggggtaaatgtattcattgagaagggttctcccaaattgcttctaagtttttttaatgaaaagtaacgattgcggcaatcagcggctttttggcggattacaaatctggagggagctgcggcgctgcattgaaaagtgcccccgccttcgcaccgggcagccggttcacaggagcagcgcgaggggcgggggtccgatagcgggacaaaggcggggagggggcgagcggaggagggcggctcggggcgcccgg

SEQ ID NO: 5050 - DNA, 115 bp, Homo sapiens
  chr6:108440744-108440859
  hyper
cgagggaggtctaccgcagcaccaccagcactggggagattccgggcatctggagcgaggaaggtgtgctataggggttgagtccatcaccgtggaagtccggggaatgggaggt

SEQ ID NO: 5051 - DNA, 396 bp, Homo sapiens
  chr6:108484807-108485203
  hyper
catggtagccccaagtttctacgccttaaatccgaggtcccccgtggcctgcagcagctttgcctgagtagaaggcagcccgcactaaggctccaggcttatttgggacctggtgggcgacggggcctcagcccctcccgcctaccctggagcttgttgccgccgttaccactgaaccagtcatgccagaaagtcatcacgatgatttcagaactgtattgtgatttatgcaaagcgcgccgataattacagccgggcgcacagaacacaggatgcatatgctgcgggtgtgtgcgcgcagtgttgtgcctttcgccagggctgaatggggtgtgtgtgtattccgtaggcatcttcttgacaccatgcttgatcggggactggtgacaggaaaaa

SEQ ID NO: 5052 - DNA, 16 bp, Homo sapiens
  chr6:108487077-108487093
  hyper
cgcctgcattttcttt

SEQ ID NO: 5053 - DNA, 148 bp, Homo sapiens
  chr6:108487373-108487521
  hyper
gccgcctcttccctcggaagatttcccagcaatctagttttcccactctgcgcttgggttccggcagcgcggagcccgtctgcctctgagactgcggtagtgttttccttctttccttgggagaccagcggtcggcagagattgccca

SEQ ID NO: 5054 - DNA, 394 bp, Homo sapiens
  chr6:108487931-108488325
  hyper
gcagcgcccaccaaccgctccgccccgggacagccagcatgagcaagccagccggatcaacaagtgggtacctctcgggccgccgtggggcctaggcgcgcagcctggggcgagcgagcggggaggctgggggaggtcctgcctggagcgctgcgaatctgagcccctgagagggattccagcgggcgtgtgcgttcggcccagacctgtagaccgtgagttggagcatttcgtggagaggggagagccgtttcgttgcctctggattgcttgatcccccctgtctggtgcggtgagaaggttacgacccgcgcagcccaccagtcggatgagttgtctccatttagccgccaggtgctggatgggggggccatgggggcgggaactgggccgc

SEQ ID NO: 5055 - DNA, 147 bp, Homo sapiens
  chr6:108489661-108489808
  hyper
cgcccccgctgtggactaggaggcaggccaaccctccggactttgggggaaaaaccacagcgggctccttgcggaaactttggccgttctaacttgccaagagcctgagtgaggccttggaagcctccagccccggctcaggtcggg

SEQ ID NO: 5056 - DNA, 179 bp, Homo sapiens
  chr6:108490066-108490245
  hyper
cgagaccctggccagtcacccctgcagcccagactaacttctttcaacagcctctgatggtaattacagtaatcgaagctgccatatatctttaggcaattatgacacacaaaaagccccgaggggaccccctggcgagggaagttaagaacggttttccagcttcaggaaactccggc

SEQ ID NO: 5057 - DNA, 218 bp, Homo sapiens
  chr6:108490296-108490514
  hyper
cggggtcaaccagcttgtctcgtgaccccaagtcaccttaacgtggctgggtggcggagtctgaggcacaggcccgctatgccccggaattttcgcgtccctccctcctgggccccgccccagcccggttgcctgtttctaatctgccccgggagccgcggctcagaggtctgctcagaggcaggactcgcactggtggtggcctagagggcaacagt

SEQ ID NO: 5058 - DNA, 15 bp, Homo sapiens
  chr6:108490537-108490552
  hyper
cgaggaggggccccc

SEQ ID NO: 5059 - DNA, 120 bp, Homo sapiens
  chr6:108490880-108491000
  hyper
cgcagtgacaggcccgaaggagtggaggacaagacccgctgtgcccttgcctggccctctccagcccctccctcccacagcacaatctcccctcccgccctgtgggaggggggcgccgag

SEQ ID NO: 5060 - DNA, 16 bp, Homo sapiens
  chr6:108491107-108491123
  hyper
cgcggggttgtaatta

SEQ ID NO: 5061 - DNA, 190 bp, Homo sapiens
  chr6:108496966-108497156
  hyper
gagagagagccccttcctctgcggcgcaggaagccggagggagcgtccaacctgttgaacttgtgtattgacaagttgtcaagctcggcaggccgaagattgccctgaattaatttgtttgtttaaactgttggtggtaattgtcacatctcccctgcctttctccagcatactcggagacgggttctcc

SEQ ID NO: 5062 - DNA, 92 bp, Homo sapiens
  chr6:108582546-108582638
  hyper
ttcctgtctctctgcgccagcctcggcctgcggcggggtagagcgccggaaacggctttagcggctttgggaattgcgggcgaaagttaaac

SEQ ID NO: 5063 - DNA, 30 bp, Homo sapiens
  chr6:108881003-108881033
  hyper
ttgtgctgctgccgcggccgccctgctcgt

SEQ ID NO: 5064 - DNA, 174 bp, Homo sapiens
  chr6:108882163-108882337
  hyper
tcctgttcctgggaggcgggcgcggcaggactgggaggtggcggcagcgggcgaggactcgccgaggacggggctccggcccgggataaccaactctccttctctcttctttggtgcttccccaggcggcggcggcggcgcccgggagccggagccttcgcggcgtccacgtcc

SEQ ID NO: 5065 - DNA, 30 bp, Homo sapiens
  chr6:109704006-109704036
  hyper
ccaggctgtaattccgcgggcccacgtgac

SEQ ID NO: 5066 - DNA, 54 bp, Homo sapiens
  chr6:109776897-109776951
  hyper
agccggctccgctggacgacttaccggcggctccgaagccgggaggggccgctt

SEQ ID NO: 5067 - DNA, 430 bp, Homo sapiens
  chr6:109777176-109777606
  hyper
gggacagtcttgggcccgcccatgcctgcagggtggcgcccgagggcgtggcgctgcggacaccccgttccgctctggggcctctgggtgggtctggcctgttgggggctgaggagctcgagggtcagggcgcccagtgctggaccgcgcaccctcggcctgggctccttgccggtgcttgcgcgtgcaaggctagctctttccccgccgcaaggcgaggaccacccgcccccgccgcggtcccaggtccgctggcagcctcccagcgccgggccgagagggcgctcaggctcctcaagaggtttggaaaagccggcgggtccgagggtggcgccggaacgtctgcgctctcctccggtctcccacctggagatccacggcccgggcgccccaggatggatccaagcgcagagtgcgcctcctgtgacag

SEQ ID NO: 5068 - DNA, 30 bp, Homo sapiens
  chr6:109805059-109805089
  hyper
gaaatcccccttaccgtcatcatcattgtc

SEQ ID NO: 5069 - DNA, 30 bp, Homo sapiens
  chr6:110012080-110012110
  hyper
cttgggccacacagcgtaggtacaacatgg

SEQ ID NO: 5070 - DNA, 46 bp, Homo sapiens
  chr6:110500691-110500737
  hyper
ggtcgccggtccccctcggctcgcgggactccgcctagagccccca

SEQ ID NO: 5071 - DNA, 719 bp, Homo sapiens
  chr6:110678980-110679699
  hyper
gggcactgaaagatgcgacccgtggagccgcctaagagagcacagggggaagagaagaagcggaagcctccggaggtcccatcgaggcggcctgcgggacctgagcgccgggctccgtagcgcggtcgggagggggcttctggtcccaggcccaagaccgaccgctttgcaactgaccttccggcgggggcgcccgcgcggggcacagcagccaggctccggcgtcccgctcccgccgccccccggcggcgcccggcgaccgctgcgcacgtaggtcacctgcctcctgctggcgccgcgcggctggcccggcgcgggcggcaggtgcggcccaggtggccgccaggccgggcccggcggggcgctgcgggtgggggacccgggcccggcgcgccgcagctctgcgcagagccgcaggccgaacaacagcacagccccgagtagacaccggcgcaggacgccgcagcccctcccgggcggcctctcccgggccatggcgctacactcggggtcccgcgggccgcgcctggccggcagcagggatgtagccccacaggccggagcggccaactgtgggaactcccccgcgggccggggtgcgggctcggacccgcctccctccctcccgaccgaggaagccccggcgtaaccttatcctgccctgccgagcgcgccccgccgctggaacggtggtgggccgaacgcggtcacagggggcc

SEQ ID NO: 5072 - DNA, 30 bp, Homo sapiens
  chr6:111303113-111303143
  hyper
ccggggcaaaaatccgtaaccaagacaaca

SEQ ID NO: 5073 - DNA, 555 bp, Homo sapiens
  chr6:111409007-111409562
  hyper
agccgctcggccccgcgcccacgggggccgctccgccgcccggcccgggaccctcggacagccccgaggcggctgtcgagaaggtggaggtggagctggcggggccggcgaccgcggagccccatgagccccccgaaccccccgagggcggctggggctggctggtgatgctggcggccatgtggtgcaacgggtcggtgttcggcatccagaacgcttgcggggtgctcttcgtgtccatgctggaaaccttcggctccaaagacgatgacaagatggtctttaagacaggtgaggcgcggcgcccgccgaggccagcctgggcgacccgcgtggggcccccgagcgcatcccgcgtgtgggctgtgtctgcctccgagtgtgcatgtcggtgggtccctgtgccagagggtgcgagcaggggggtctttcgagttgcagacagagcctgccgcttctggggcctcggggtgcccgtctttatatggaatccagctgcagagctgtgtgtttgcaagcaggtcgcagaacttacttgccgagatcgtcctcctt

SEQ ID NO: 5074 - DNA, 30 bp, Homo sapiens
  chr6:111804029-111804059
  hyper
tccagcccctgcagcgggctggccatgtag

SEQ ID NO: 5075 - DNA, 30 bp, Homo sapiens
  chr6:111804789-111804819
  hyper
gctcacacttgcctcgccgaccgccatttc

SEQ ID NO: 5076 - DNA, 286 bp, Homo sapiens
  chr6:114176777-114177063
  hyper
actgctaatacaagggatttgcgtccatcctggcggctggggtcgtgggccaggccagcgggctctcttaagggtaataacacgtttgctggcaagatgcatttctacggaaacgtctttacatcagctctggggaatatgaccatggtcgaataatgcatctgaaggaactggacagtgagaagacgaagcttcacgtaacaatgttcagcttggtgatttttaaagcaacgcttgaacaaagagttactggcttgaaccaaccgtctttttcactcagagtgtg

SEQ ID NO: 5077 - DNA, 31 bp, Homo sapiens
  chr6:114180217-114180248
  hyper
ggtggcccggcgactccgcccctcctcgcct

SEQ ID NO: 5078 - DNA, 53 bp, Homo sapiens
  chr6:114194489-114194542
  hyper
gtcagacttctcactcggcagctggcttcccccaggtccgaagttcaagagac

SEQ ID NO: 5079 - DNA, 200 bp, Homo sapiens
  chr6:114662112-114662312
  hyper
cccacccacccactttcgcccccacccaacccgaccctgcatgctatttatcagaccaagtttacataaatcagagaagagttacagtgctattaaatgtatccacgaagtaatatgacataaagcactttgcaaatattaaatctctccccagtgttttctaagaagaaactggtattcgtattcggagacagagagga

SEQ ID NO: 5080 - DNA, 30 bp, Homo sapiens
  chr6:114663549-114663579
  hyper
gcgtgtgagtaagacgcgagcgggccccac

SEQ ID NO: 5081 - DNA, 30 bp, Homo sapiens
  chr6:117086916-117086946
  hyper
acccgggatcagggcgtcaagccccgaggg

SEQ ID NO: 5082 - DNA, 30 bp, Homo sapiens
  chr6:117198083-117198113
  hyper
tgaaaacggtcctccggccagcgcaggttg

SEQ ID NO: 5083 - DNA, 30 bp, Homo sapiens
  chr6:117198689-117198719
  hyper
gaaggggacggggacgtattctaagaaggg

SEQ ID NO: 5084 - DNA, 30 bp, Homo sapiens
  chr6:117586523-117586553
  hyper
ccggcacccttggccgcatgcttgtcagag

SEQ ID NO: 5085 - DNA, 396 bp, Homo sapiens
  chr6:117591200-117591596
  hyper
tctggagcaagaaggctgaaacgcgagagggggtagtgagatcactaggcggccgaccaagagtgggaagaggtatcgttagcttggggagaggttaaggctaggaaagggaggccgtgctgcgctgagtcgcgggaagctccttgagcttcaaggacttgagtcggggagggagtctctccgctcttgctactctacccgccacttggtttccgcactgaggactcggctgcgaaatgggaggaagcaggcctccttttcgtgggttcccagaagcccccattttgcagttcccccacctcgctttcacaggttgcagcccccttagaaaaacgccgctgcagaggcgggggctgcccatcagccccggccatggctagccagccctgtgcccgc

SEQ ID NO: 5086 - DNA, 276 bp, Homo sapiens
  chr6:117591683-117591959
  hyper
cgcctccccggccggcctacagactgctccttcccgatgagccagcgcagcttccccgcctccttctggaatagcgcgtaccaggcgccagtgcccccgccgctgggcagccctctggccaccgcgcactcggagctgcccttcgccgccgccgacccctactcgcccgccgcgctgcatggccacctgcaccagggcgccacggagccctggcaccacgcgcacccgcaccacgcgcacccgcatcacccctacgccctgggcggcgccctcggc

SEQ ID NO: 5087 - DNA, 140 bp, Homo sapiens
  chr6:117803623-117803763
  hyper
aggagcgcagcagggcgcgccagatacgtggaggggagcgcgggcggcgcctcgctcgcctccggcttcgccgtcggtcactgcctgggaacgcgacttcctcctctaggggccgacgtgcggggcggggcggggccggg

SEQ ID NO: 5088 - DNA, 235 bp, Homo sapiens
  chr6:117804008-117804243
  hyper
tgctgctcgcggtctccgccccgctccggctgcaggcggaggagctgggtgagtggagcgcgtccggctggcggcgggacccgaggcgccaggggcgggctgagggctgcggggcgggccgggccgggccgagggctacggggcgggccgggcctggggggacggagcgcgggaggaagtcgggctcgccgcctgccatccgcggagtccggctctacccgcggggctgggggtg

SEQ ID NO: 5089 - DNA, 31 bp, Homo sapiens
  chr6:117804653-117804684
  hyper
cgccgcaagttggaatcgtgtggcttcctgt

SEQ ID NO: 5090 - DNA, 998 bp, Homo sapiens
  chr6:118228323-118229321
  hyper
cgcccgcgccccgctctgccgccgccgccgccgccgccgccgccgccgccggcgcccccgcccggctctccgggttcaccctcggtctctcactccgtgagacacagacggtagctttccgaccgagcggggcacaggctgaggcggcgccagcacaactgccgccgcgcgccccgaggagacccgggcacgaggaaacaaggagaaatcaggactccttccccggaaccgaccggcagctccgcgcccccgcgcgacacccttcgcagccacttcgcggggcgggccaggacttggggacgcggctcgggaagagccggggcgggcggcggcggcggcggcacgggcgcgagggtgcgcgcactgggactggagaggagtgagtggcgggctgggcggcggcggccgtagccgcgggtgcctccccgcctcaccgcttcgcaggcagcaccgcctcccgggccgcggccgcccggccgggtcctctgcgcgttcccgggcccggaaccggcacacgatgcacccggctgcgttctgatcgccgccgcgcctcagcctctgccgcgatgatcccccctgagcagccgcagcagcagctgcagccgccgtcgccagccccgccgaaccatgtggtgaccaccatcgagaacctgccggccgagggcagcggcggcggcgggagcctgtccgcctcctcccgggctggcgtgcgccagaggatccgcaaagtgctgaacaggtgagcggcggcgccgggcgagggcgcggggggcgggggctgcgggcgcccggctccgggtcccctccgtccctggggcggcccacgggtcctttgggacggggttgcggccggaggagactgaggagatcgggcgacgacgcgctccgcgggcgcagagaggccgcggcagctttgtcccggcgcagggagccctggagtggtggagctgcagctggtccgaggcgggagttcggggagaggcggggtttttcgtacc

SEQ ID NO: 5091 - DNA, 121 bp, Homo sapiens
  chr6:118229626-118229747
  hyper
ctggctgggagcagcgaagagagggctagaggcctggaacagacccagcaaagtgcaaaacattgcgggcagggtgtgagccggcggcgcccagttattccgaagcgcccatgccggaggg

SEQ ID NO: 5092 - DNA, 189 bp, Homo sapiens
  chr6:118241394-118241583
  hyper
cggggcttgggtggtggctggaaaagggagaaccaggaggcgggggaggggcgctcggactacagaggaccggacgggggcgagtgttccgcggggtgtgtggagtaagagctgggacggacctttgtagctttgcgaaattaaccgtttttcctccacaactgccagctcggcgaatggccttcaagc

SEQ ID NO: 5093 - DNA, 30 bp, Homo sapiens
  chr6:118971609-118971639
  hyper
gaccccttcagatacggaatgcagcaaacc

SEQ ID NO: 5094 - DNA, 49 bp, Homo sapiens
  chr6:119671065-119671114
  hyper
gggagtttacgggaagcgcagcctcggcggggcccggccggcggcgggg

SEQ ID NO: 5095 - DNA, 37 bp, Homo sapiens
  chr6:119671586-119671623
  hyper
tgcttaggacttttttcgtatgcgccctttcttcccc

SEQ ID NO: 5096 - DNA, 30 bp, Homo sapiens
  chr6:121506912-121506942
  hyper
gtttctgaccaagaaactagtttaacaata

SEQ ID NO: 5097 - DNA, 30 bp, Homo sapiens
  chr6:121758965-121758995
  hyper
gacccagttagtaacgacaagaaagatact

SEQ ID NO: 5098 - DNA, 30 bp, Homo sapiens
  chr6:122931205-122931235
  hyper
ggaattgaaattcccgcagtcacgtcacag

SEQ ID NO: 5099 - DNA, 30 bp, Homo sapiens
  chr6:122932475-122932505
  hyper
ggggaacgcagccaacggaactcgggtcct

SEQ ID NO: 5100 - DNA, 68 bp, Homo sapiens
  chr6:123110666-123110734
  hyper
acagcaggagaaagtgcgtgggggcagctgcccccggcagaggctcgggctagcggggcccctgacgc

SEQ ID NO: 5101 - DNA, 30 bp, Homo sapiens
  chr6:123317169-123317199
  hyper
ggcccggcgacgcccgctcagcagcctgct

SEQ ID NO: 5102 - DNA, 336 bp, Homo sapiens
  chr6:123317554-123317890
  hyper
cttctccatccaggcgttcgcgtcctcctccccaccttctctcccgaaggcgaaaatggcagggccaggcgagaacctgggacagcggtggccctagccctgcgatcctcacccctcctgctaggagaggctgcgggctgcccgcggacgatgtggccgcggctgctcccgagcgcatcttcggcccgggtccccgccgccacccctcttctctgctccttccatcccgcccagaggagttgatgccgctgtcgccgccgccgccgctgctgaagccgcggctgatggatgccagggagtgccgcattgcttagcgaccccgcctctgggtttgct

SEQ ID NO: 5103 - DNA, 30 bp, Homo sapiens
  chr6:123366433-123366463
  hyper
ttagtgtttaaggccacattggaagaccta

SEQ ID NO: 5104 - DNA, 1119 bp, Homo sapiens
  chr6:124124162-124125281
  hyper
ttccccaagcagggtcggctccgtagctctccgcgctccgacccttcagatcctcgggagcccaggggagccaggtgctgggcggtgcgtccggtgccgccgcgccccttctcgccacctctggcctctccgccactcgggctttccggccgctctggatgcctcggttgcacccctgttccatgaccccagcttccttccctaaccctcctcttggtcccttctcccccgagcgcgcgcgcacacacacactcggttcgctcccgcggagtggctctgggagcacgaccgacttcagctcagcaaaccgcggtcatgccgcccagactcctcgccccgaggccccggtccccgccgccgccgctttcgcgccgctcctttccgcctagacaccgccgcctgcggccgcctgggcggcagcccctgcggtcctcaaagttggccccctgggagggggcggcagggagcaggatgaaggatttgttgtaggaggaggattcacacatctgggcgaagggaggggcagcgccgctgctgggacgcggcgcggacccgcatcattgcgcgcagcagccgctgcagcagccgccggggaccgcggagccgggacgcccccgctcggcccgcgccccgctccccgccccacccccgcccgccgggcccagcaacgcagggtgcctaggagccgcgggctgcgcagggaggcgggcagcggccctcgcgcgcttctgccgcccccggagccggcgcgcggcgagcgcagggcgagcgcgcgtcgggcggcggccgcgctggggggcgtgaggcgagcggcgcggagagcggcaggggcgaaacttcgcgggccagatgcccgagggcgcggcggcgctgccaggctgccgctgctgcccctgcgggccccgagcgcgcctccgcaggcggcactgcccgcggcgcggcgtgtgcaccgagcgagtgaaggtatgtgtggcgggcgcggctggagctgccgccgccgccgccgccgcgccagcaggtcctaatgcctgtcacttcccaggacgctggcagcagcagcagcccggagcccccgagccctcggcaggtttgcgtgtccttccccgcgatctgattgga

SEQ ID NO: 5105 - DNA, 774 bp, Homo sapiens
  chr6:125283600-125284374
  hyper
cgagccgagccactgcccccgctgcccgcgggcgccgggtgggggtcccggcggctggatgggcagcggcggcgcgggccgcgggcggcgatgggcgaggagcagagcacggtgagcggcggcggcgggccccaggagtcgcagaccctggccagtggcactgcgggccaccctgagcccccgaggcctcagggggacagcgcccgggcgcccccgctgcgcgccgcctccgcggagccgagcggcggtggctgcggaagcgactggggctgcgcggacaccagcgccccagagcccgcgaggagcctggggcccccgggctggagtaagagccgagcaccggcgcagcctgcgggactggcactcaccgggcctctcaatccccagaccttgccactgcagttggagctggaggaggaagaggaggaagctggggatcgaaaagagggaggggatgaacagcaggaggcgccccccggcgaagagctggagcccaggacccgcgtgggggccgccgacggactggtcctggacgtgctgggtcagcggcgcccgtccctcgccaagagacaagtcttctgctccgtgtactgcgtggagagcgacctgcccgaggcccccgcctcggagcagctctcgccgcccgcgtcgccacctggggctccgccagtgttgaaccctcccagcacccgctcttccttccccagcccccgactgtccctcccaacggattccctctcccccgacggcggcagcatcgagctggagttctac

SEQ ID NO: 5106 - DNA, 148 bp, Homo sapiens
  chr6:126067873-126068021
  hyper
gcctttctttcctaacggcatctcctttctaataaagtccctcgtatcttttggtgtaattaactcatggtacaaatccttcaaaaagaaaggaaagaactgcggtttgctctacgcgcggacatcttttcttcctaagccttccctt

SEQ ID NO: 5107 - DNA, 308 bp, Homo sapiens
  chr6:126068068-126068376
  hyper
cgttccctcattctttctcttttctttctctccacataacgcctcccctacacctccccacctccaatccactaccgtatttaagtcggcgggggcgctttaaagggtttcctgtgtctgtttctgtctctctgacccgaaacgcactttcggttatagacagacaaggcgctcaaccaagggacaggcaaatggaataaacagctgaggagaataaacgacctaatggggaaatctcgtgctgcctaattgctattgtgttttgcagataaataagcatattattttgatagcgttcaaaaccctga

SEQ ID NO: 5108 - DNA, 1124 bp, Homo sapiens
  chr6:127439838-127440962
  hyper
acgccagaagcagctcggggtctctccgccgccccttggccatggccgctgtgccgacggcgcccgctcccctgcgctccaggggcccccgccgctgcagccgcagccgccgcagcttctgagcccaaggggccgccgctgcagccgccgccgccgccgctcgcccgcccggatcccgcctgcggcagttgccgcacaacatgctacctgcggccgccccggcggctcctggaaccccggttcgcggcgatgccagccaccccagcgaagccgccgcagttcagtgcttggataatttgaaagtacaatagttggtttccctgtccacccgccccacttcgcttgccatcacagcacgcctatcggatgtgagaggagaagtcccgctgctcgggcactgtctatatacgcctaacacctacatatattttaaaaacattaaatataattaacaatcaaaagaaagaggagaaaggaagggaagcattactgggttactatgcacttgcgactgatttcttggctttttatcattttgaactttatggaatacatcggcagccaaaacgcctcccggggaaggcgccagcgaagaagtaagtgcagggttttttacgcgtttgctccctcccgccgcgttcacctgtcgggtcgctttgcctgtccggagccggctcccaactgcagcggtcctcccgccctgcgcctcgcagaggagatgcaggttcgggctttgggggtatggacggcgtctttcacccttgcctctcggcgcccctgccttccgcagcatcctagccggtgcgaggggcgggcggacgcggcgctaaggtggctcccgccccatggtaacttcaggttcgcgggaaagttcggtcctgggttagactcgcacccgggatttgtgctttccttttgaggatcggacaggggcacccagccgaaggcacttgggactcccagacgcaggatgcctctgaccgctgagtaaatgacaagggaggcgcggccgcggtacccgctcacctagcgcaaccgcctcgcgcggggagacctcggctgggcccttaggctggactccggtagccgaacgcccgctacccggccaggaagccagggagcga

SEQ ID NO: 5109 - DNA, 689 bp, Homo sapiens
  chr6:127441030-127441719
  hyper
cgtgtctgcgcgtttgcagagctgccggacgtcccccgcccgagggttgaagacagcaaaaccccagctgtggggagccggaggtgcggagtttccaggttctctcttgtcacatgtgagcgtctgtaccatctctggccctttcaagtgtgtcccctgggacacacacgtacagagagtggggtctccctaaagattcgcctcctcgctgcccttaatgctgttatttggagggttggattgtgatggcttcttaagacggtgtcctagctggaattaagcggacaccaccacggcagcctcaacctgggttggtctgtctgaaaggtagaatcttcccaagatgaagggacagatgcgaaggtgtcacctctcctcgctccagggtagcctggcgccctcgctgctctagtgtctgtgttcccatggggagtcctttcgcagatctcagagcaggggcgaccctggctctatggttgggggcgctggtggagagagggaggaggaaacttctcctggagctcgcgaggggcaggaagcgatgctgctgctctgggctctcgcacctccgcggcgtgcagcccaggcccagcggccccacctggtttcccaaggggatccctctcccagcgtcccgcccgggaagcctttcggggcagacgtcggggcagcgcggaggacacaacacc

SEQ ID NO: 5110 - DNA, 724 bp, Homo sapiens
  chr6:127664171-127664895
  hyper
atgctttttaaagtgtaatctcgcgacctcgcggcgcgctctgggaagaccgattcatctcttcccctcgccctctttccccggccggcgcacagccggcccgtggcgctcggcaccgcgtctccacgtccagcgcggggcaggcctgcgcggcgcttgcaagggacaagccgcggagccggggaggctcgccgtctgggacacgtttggagaagcgagcggtacagtccattccacggcgacattttaggattctcccactgacaacactaaactgaagcgctaagaccaacccttacgaccacttaccgtcgcaggccacggtggtgacttccttttccgctcccctacacacgcttttccgttttgcgtgcctttgtttccgctccccccgggaccatcgtgcgcccctgtcctccgttcttgtaggtcctctcctcttctccgcgtcttctcttttactatcccacgctctcctttcctttctccgggaactttatcccgttcccctgccggttcccgtgaccccggaaatcccgctcctgccgcgaggcgccctccgcttcgcgctccctcgtgtcacgagggagccagggtgggcggtctcctattgtacttggcttttgaattttcgcttttgcagcacaaaggtagggctgggaaaggaggctgccgaaccgtgcttgttttcgctcagataaacgtgagaaaaagtggaggtgag

SEQ ID NO: 5111 - DNA, 1040 bp, Homo sapiens
  chr6:127836709-127837749
  hyper
ttcctgctcttggagctgctgcgggtgcggctgcgacgaagggggcgctgccgcctgcatgcccccgccgctcgcgctgccctctgcgctctgctgggggccctccgccgccgccgccattggggaggcggaggcgacggccagggtctcgcaaacggcaggggggccagacaccggggagctgcggctactgctgccgccgccgttcttagcgtgcatctgagccgcggccgccgccgctgccgcccgctccttcttgagatggaactggatgagctcagactgcagacatccttctttccagtagctccctccaccaccgctgccgccccccgcaacgccgcttccggagtttctgctgccggttcctggggttttgcccgcagaagaggaggatggagaaggggaggccccctccccgccgctgccgcccctctgctgagcgcgtacgcctttccctcgccagcccctgggcggcggcggctgcggagcgcccccctccctttccccggagccgccgccggctcctcctccttccccgccccctcctcccccttctccgagcggagggggttccccgagtttcgagggcacggactctagctcccgaggcggctcctcgggcggtccgggcctcctgccgcccaaagcggccagggtcgcggcgggggccgcttcagcaccagccacaggctggacagctcccggagcggcccctttgggcgccaggggcgtcgccttctcggccccacctccgcctcctcggatgctggcgggcggccccgtgcggctcccggtcttgttaccctgctgttgctgctgctgcagctgctgctgccgaacagaattgagtttagtgccggcccccactggggaccgggtggccgcgattgtctgtcgcagcgaactgtccctcggtctagcgggtgactgagctcgctgctgctttctgctgctgccctccgggtgcagacgagcctcagtggctgcagcggcgggagaagctgctgctgtggcaggggcagcgcccccgattggtg

SEQ ID NO: 5112 - DNA, 406 bp, Homo sapiens
  chr6:127840313-127840719
  hyper
atcccaaaaccgctcgaacacggatgcactggtttcctgcaaagctttgtcctgggttcggtcattctccatcaattatttacttgagcttcttttccaaggaggcggactagaacagccttccgggcgtgactaacatctcctgatgcagctggctggcggctgctgggagttctctttgttcactcactttaattctcagtcgagctctacacgcggtgctccctccccacccccagcccgggcggagtcatcagatgtcgtttccacgaatagataatggttgccatgatgggacccaccgtcccacagacaaagggttcttgcgaagccacgactaatttagtgcaaaccgaaataaatatcggcccacagagatcctttacagaacggtttgccttcagta

SEQ ID NO: 5113 - DNA, 1153 bp, Homo sapiens
  chr6:128840107-128841260
  hyper
agggcctccacaacaacgtgagaaactgtcaggtacaaagtaagttatttgcgtcctgcggcttcagccaggagcgtggctgtcgcttttcccgtcttctccatcaccctctggccaccactgcgtctccatctgcaccgcgaaccccagcagcagatgcgctcgccagccaagcgaagctgggtaggttggccagaaaagttgtcaggactggcgggaggtagacaagtgctcgggagcccgctccccagcgtccacctggtgaaacttcagagcccccagaggagagaacgaaagaagcaaccaacctacacgaaggataacaaaactggaggggaacagagggcgggaccgggagagccagggttcacggacttctctgagcggcttgaccgagaacccccagggctacagcgagacgctccacttgtctccttttgggttctccggcagaaggcagacatttacagtccgcttccagccccaggccggatccggggagcgcggggccagagccccaggccggatccggggagcgcggggccagcctggcggtggttttgcccgaggagcgggctcccacgcgcgagtcaggcttcctccaccaggcgcccagacctcgatgcccatgaacgctcagagtgggtccttagaaccgcatttcaacacatcttacagggctccgccaacacacacacagaacatgctccaagcagtgcccgagcgcacagggcaagcccgggagcaacccagagctgggggaggagaaaaggggactccgggagggacggggaagtagttagacaatagtcaggggaggttattcccgggacaaaaagcacctggcaaagcgcgccgaggtcagtcccttcgaatctccacatttctgacaatggcttcccagggaatttgtttaaacacccaagtggcagacagcaacaaacccgcaccacaagcaacagagtgccgtcacgggagtcgtaactactttttctttctctcttccccactagcccggcgcaggccacgcgagacgccgaagccagcaggtccccacactctccggctagaccgtgccagcctgagccccgagcaagcttcggagaggaacaatgggtgccccgcgtcccacctggcacgaactctggggaca

SEQ ID NO: 5114 - DNA, 64 bp, Homo sapiens
  chr6:128841544-128841608
  hyper
gccggggggatcgccgcgaaatccacgacggaggagcgggccgggcctcgcggggtgaggacgg

SEQ ID NO: 5115 - DNA, 30 bp, Homo sapiens
  chr6:128841957-128841987
  hyper
gaaaggggagccggcgcagctcgctgccct

SEQ ID NO: 5116 - DNA, 30 bp, Homo sapiens
  chr6:129204525-129204555
  hyper
gttgcatcctttgccgggaccgagattcct

SEQ ID NO: 5117 - DNA, 30 bp, Homo sapiens
  chr6:130088503-130088533
  hyper
ggaccgggctgaagcgtggccacgaggagg

SEQ ID NO: 5118 - DNA, 31 bp, Homo sapiens
  chr6:130342613-130342644
  hyper
gagatttgagattgatcgctccctgaattgg

SEQ ID NO: 5119 - DNA, 821 bp, Homo sapiens
  chr6:130686371-130687192
  hyper
ggaggagtaacctgaacctctcgttggctttgatgtttggagtcgaacatccgcactgctcatcgaagacccccgtgcttcagttccctctgtcttccatttcccccgcccatggttctcgcccccccaagccgttctccggaaccccttgccgggccggcgggaagcgtggaccgagcgggccttggccgcgtcttttccggccaggtttggtttagctcgcgcagcgcccgcgcagcccgccagggggaccccggcccgccgggcggcatctgaggagaaagcgtccgaggggcgtggagccagggtcctgcggtgcctgctccgggaatactgcgagtcggctggagctccccagccgctccggagaactgggggagccgggtccctggctcggtaaccggtggtcccgcggtagctagaggcgggccccacgggtgggtgtgtccgtttccgcacgccagccttccagcccgggaagagcgcctgcaagcgggtactttgttcccaaagatgggttttgtctgcgggtgatttgggctctcgaagtgcaactttgtggccgggacgcggatcggccggcctgggctcctgcagagcagatcctgtctgcgtcctccaggaggagtgggtggcaggactggggtttcccacaggttttggggcggcggcgagattggcacggtccggggtcgcaggcgcgcagccacgcccctggaagtccgccccggcccccgcccccaacccgcctcttcggggctttatggcgtgaggtttggggctgggatccatctggagccgagcagaaaacttttcccctc

SEQ ID NO: 5120 - DNA, 513 bp, Homo sapiens
  chr6:130687224-130687737
  hyper
cggtggcggcgccgcctgagcggcgactccctctcccctgcccggcttgctgcgcccggtgccctccgagggcaggcgcgcctggactctgcgcccggatggcggcggccctctgtgagcaccggcagcggcgcatcccctgccccgaggcctccggtgcccccccggcgcgggcataggggcgcccccaccctccgtccgcttgcaccccttgccacccgccccctcgcctgactcatccgcccgcggtggccgcccgagccctgggatggggagggagaccgcggctgcccgcggcggccgagattcccgctgacgcccccgaccctgccgccttcttcgtccgcctccagaggcgcccgacgtcccgacagctcctggagtgagaccaggactgagaacagggagaggcgacccgacccccagggcccggtgctcaggacaggtgaggggaaggaaagggtgctgacgggagtggggaggtgggtgggcggccaccgcagccgaaaccgg

SEQ ID NO: 5121 - DNA, 86 bp, Homo sapiens
  chr6:131383361-131383447
  hyper
tcaggggaggtgagcgatctagagaagcataactgatgtcccaccacagacctcaggctgctgggggcagcgtctgcgcctgggga

SEQ ID NO: 5122 - DNA, 30 bp, Homo sapiens
  chr6:131456350-131456380
  hyper
cctagtcccaatctcgcccttgaaagcgtg

SEQ ID NO: 5123 - DNA, 210 bp, Homo sapiens
  chr6:132271776-132271986
  hyper
tctgggctgcagggggcgggctggcagcagctggagaaagaaactcagtccgagcggtttctttttccagcgggcgggtgggcgtgagggaggaggcggccggacacctagcggtgggggctgcgggtcttaccggtgcacacgccgatcttgcggttggccggggagccgaagtgacagaataggcccttgtgcgggtcgcatgggtcg

SEQ ID NO: 5124 - DNA, 30 bp, Homo sapiens
  chr6:132272530-132272560
  hyper
ccgaggcttttatacgctccgggcggccgc

SEQ ID NO: 5125 - DNA, 31 bp, Homo sapiens
  chr6:133134687-133134718
  hyper
ccaggacctggccctgcgtcaggcacattgt

SEQ ID NO: 5126 - DNA, 30 bp, Homo sapiens
  chr6:133135672-133135702
  hyper
aaacccttaaataccggcatgcgtgcggat

SEQ ID NO: 5127 - DNA, 301 bp, Homo sapiens
  chr6:133561966-133562267
  hyper
tcccttggggtaagtggaaaggagtccggcagggggcccgcagtggcctgcacaggggaactgggtagcgagagagttccaggcaattccgggggctgccccacagaagcaggtggggatcgacagtggctctccggcccagggaggagagcgcggtcgcgggtccctcccctcagcctggaggctgcagccgctcgagtcggcccgggtgggggcggggtgggggcggcgcggagggcacggagattacggcggcgccacccgggacatccagggccccgaggccctgggcggtccccac

SEQ ID NO: 5128 - DNA, 88 bp, Homo sapiens
  chr6:133562348-133562436
  hyper
cgcgtccctggcggcctcccccgaggcccccggcggcctcacgagcccgcagtagccggtggcgacgtcgcccccgccccacctccct

SEQ ID NO: 5129 - DNA, 420 bp, Homo sapiens
  chr6:133562674-133563094
  hyper
ggagccggcttctccctccgccccgcttctcccccgcttgtgtacgctatttgttgtggggtggccgaaggggatgtcctgttttcaccagaggcacagcgcgaaggggaaacttcgacactggaaggaacgagaataaatacttaattacggacgcactgaaccgcggctgggacagacacttcgggaacccgaggcggaccgggcgacgaggtgagtgaccccttcttccaacccccgccccagggctcccgggggagcctgagttgagagaacccccaaactttccgggaaagtgcgcgaggctccgccggggacgccgagcgctgggtactgaggacgcgcagctggacggtgcgtgggcgcctgcgtccccggggggcgcttggaggccgggtgccccacgcctgagggcccggg

SEQ ID NO: 5130 - DNA, 622 bp, Homo sapiens
  chr6:133563157-133563779
  hyper
cgagcctgcctgtcccttccggggtcggcgcggagcctgcgcgtaacggagttcatccagcagtccagcgcgcggcttctacctgcaccccgcctccacctggcagaggcgcgagcatcggggtctcccccacatctttcttatgacgtgtattactttctgatgaccccctagatggtccaggcgcgaggatgctgacccagagtccttcggagggtcacaggcgcctgggctttcccggtgccgggtgcgtgtgtactttaaaggctcgcgttctaatctccaggcactgatcgggcttttcaactgcggcgatcccactttaatagtttttatgtggcgtggactgaatgtctcctgcagtttgccagggtcggtgaaattagaggcgccttgtcagagcagtcgcgttcattggctcgagtagcgggtgccatggaaggcttataacttctccaaaggaagggacctggctgggtagagcaggtttttctctccttccaagcctgctgggtctggggaggcagtggaacttgaaatggctcggatttttagcgtggtgaagcgaggtttggaagtagacgtgtgtgtgcttgttttattctgcgccgcacagcaaccc

SEQ ID NO: 5131 - DNA, 30 bp, Homo sapiens
  chr6:134175885-134175915
  hyper
caggggatgggctgcgaccgctcccagtga

SEQ ID NO: 5132 - DNA, 30 bp, Homo sapiens
  chr6:134210652-134210682
  hyper
gagagctccaactgcgagaatgggtctccc

SEQ ID NO: 5133 - DNA, 224 bp, Homo sapiens
  chr6:134211111-134211335
  hyper
cgcgggcctagagcctccagggaccggaggcgggcggtctagacacggccctcgctctctgccctaccagcccccggagcgggagtgatttatgcgagggtttgacgtggcagcccaattaaaagtttgcaagtgtgttgagctggcacagaggagggatcccccgctcccgctccatcgccatcctccctggggtgcagtggctgctgcggaactgagaacac

SEQ ID NO: 5134 - DNA, 11 bp, Homo sapiens
  chr6:134213976-134213987
  hyper
cgccacgactt

SEQ ID NO: 5135 - DNA, 223 bp, Homo sapiens
  chr6:134214076-134214299
  hyper
cgaggagcctgcgacccgggtccctcactgccccagcgcagcccgcggcggccgatgcgccagatgccaccggggctgtttaatgttcggggttatgaccgcagtgtttacaagacgtcttcggttatttatactgttattcctcgcagagagccttgaaacttccgcttcatttgctctttcttttcgattttttacccttttttctcggcttagtttggta

SEQ ID NO: 5136 - DNA, 732 bp, Homo sapiens
  chr6:134216761-134217493
  hyper
aagccagacttctgttggctccgttgcgacctctaagggagagagaaatctgggctccctggaatcacgtcccctgcaagagagtcccttggtccattctcgggccagaaaaaaatctccccatcactccagtgcgagtggttggccttgctctggtccggcactgtgtgcgtcgggaagtcggcctggagttggggttgcagggacgccacggctggtggcgagcgcagcaggagtgcctggagagctcgcggccagcggggagctgagcgcaaaggcggaggagggaagcagcctctgaggcttccccgcctgggagaagagtttttggaagtaggcgagacggggaaggagttctgagcctcagtccgcacagcctcctttccgtccctttccgggtgcaatctccgggccagcgggtgcgtgtcccgctgcagatccgctggctcagggatgaggcgcagggcaggttctgggttacgtccccacaccgcggggaacccaggtgcgagcggggcgcagctggcctgccaacatcctttcttagctttgcatccttcgctccaaatgctggctctgcccttggaaactcgctggttgccagcagcattcttcagagtccgccgggcttccttcaggcgtttggaggaacacgcctttgatctttgggtctgggcaggctgcgcgggcccaccctccttccagttcaccgaaagattaaccacctccaag

SEQ ID NO: 5137 - DNA, 284 bp, Homo sapiens
  chr6:134499575-134499859
  hyper
gctgtgtgtgacgcgcgcctgttaacactgcacaggcattaggttgccctgtagctgctattcaaactcttgatctgttcttccttcctgtcgccagcctctttctttggtccagatagtcctcctactgggaggaatccggcccctttcctcatactccctggtggcgaagtggtccgagtagcctcccgaactgtttgtaaatgcaacctagagggcgatcgagttctctgggagaacttgctccatatacgcgtatacgcggcttcccccacttgtctcct

SEQ ID NO: 5138 - DNA, 352 bp, Homo sapiens
  chr6:134638825-134639177
  hyper
gctccgaaacatatgcatcaccgctgcaggaccctgggggccggacggtgggatacggccaatctccggggagatgctgtggctcttaccgagcgggagaagggtacgcctccccgcccccagctacctggctgctcttccgcggccggcgcggggagcgagtcgctcttctccaggtgatgcgctcctggaggcggcttgagagaggagagttgtttttgattgtgcaagttccagtgggagctgtagttaagcagctgagagaaggagtaagaaagagcagaagccagagggagggagggagaacagcgccagaaaggcagagggagcgagaaggcgaggctggaagaag

SEQ ID NO: 5139 - DNA, 45 bp, Homo sapiens
  chr6:135503607-135503652
  hyper
cggcagcacccaaggccgctgccgcgcaaccgggacgcgatcccc

SEQ ID NO: 5140 - DNA, 96 bp, Homo sapiens
  chr6:135503993-135504089
  hyper
ggttgggctctggggacgagagggcgacttgggggagctccgggctccctatgcctactccggagcctggccgcgcaggacggtgtgctgcccctc

SEQ ID NO: 5141 - DNA, 503 bp, Homo sapiens
  chr6:136870741-136871244
  hyper
cctgaccaccaaatcccgggctgcagagccaacaatcctcctttgggctcctgcacagactaaaaacaaaaaactctgagaactccgacaagtcaacgaaagtctgatcccgtcaagcccgcactcgcaaacccccaccgtgctgcactgggccccggccctcccgagctcggtcccctcggacgacggtcgtcgccactgcgggcaccagattggggggcgggccgctcaccccgcggtcctgccccacaccgaccccgctgaggagcccccggcacccggggcgaccagggaaggcgggaggaggtgcccagaaactgctcgtcctgccagtcgcacctggccgacgactctctggccactggtttggtctgggggatacgatttcccattcaactgaattagacccgaggccgcggcggggagggcagcggccggggtctctccgtttcctcccccggctcgcctccacctgttgcgggaaagtcgcggtggagcgcccg

SEQ ID NO: 5142 - DNA, 435 bp, Homo sapiens
  chr6:136871730-136872165
  hyper
cggcgtggcagccgctccgaccgccgctgccgagtctcggctggaagagcggcgggcggaaccagtacctcagtccggagcttccggtcgccgcggccgaccagctgagggctcccggagatatggagcggggtcagcgaggcctggtggcgcctcctggagtctgggacgagcggcggtccgaggagcagcccaggtggggcgagggtacggagacgctatttccctccgaactctgaagtagccaggtcagtgtcggctccgcgagggctggagttcacggtgacagccggcagagcatctgatgccacgtggagaggcgaagtacatgggtcggattccacgctgggagccggcctggatctgcgctttaggaagccactgcgggcgaccctatcttgtcgccaggacttcgcatctgatgagcctcagggc

SEQ ID NO: 5143 - DNA, 409 bp, Homo sapiens
  chr6:137112601-137113010
  hyper
ggctccagcgctgggcggtgggtggatccataggtctatcgcacaagtacacacagactcttgcacaagcacacacgctctctccggagcggcgagcgacaggagcagtcacgcagcggcgctcgctgcccccaaagtggggcaagaagtaaatgcttcccgcccagaaaaatgaaatgccccgaagaccgccagattaaacgcgggtcccgaccgcgcgggatgggaaaggggtcacacacgcacctgcattgtaaaagcggtccagcacggtggtttctccaaagtcgagtttcccaaaatgcagggtttccagggtggcgcccactgtctcgcacgcctcccgcaagctctgcagggcctcgctctcggccaccaccagttgcccttggctcgcttcgttgatcac

SEQ ID NO: 5144 - DNA, 1113 bp, Homo sapiens
  chr6:137242294-137243407
  hyper
cagggaggtggtgactctccccgccctccgcctgccggttgtcctgcttccgaaagcaacccacgacggtcccgcagggtgagggttccctgggatcagttccctgggatccggagaacgccacgcggagtctccctgcagggtgaggggccccgggttcccgccccctccccctctactctcccattctgcgagcgcagccagcctcccctcccacgcttcgggaagcgtcgcccccgagctcctcggttcctggtggtggctactcgtgttagtgacttcgtttctgcgcgtttgcttattttcatctttgcctcagttcgaatgtgtccccgccaccaggccccgctgctgggcgagaccactgaaccccctgaaagcttccccggagccgcgcgcataatcccgggaccctctctggaaggcgtgcggagagcggtgcgcgtggcctggcaccggaaggagccagcttccgggctccgaggcaccccctggacagcgccccgggccgcgggttcctcctccgatgcccgggcgtcgtcgccgggatcgggagcttcgggggcccgccggcaccgacggttttcgcttccctggcgggcagctggacgaggtcccgccgctgcaccgggagggacagtgggtggaaaaagccgctgcagcgccggggcgagggggctgggggcgccgtcacttgttgcgaccaataaacggcgctcgatcctgatgcgctgtttctaaaatctttagctgtgtcccgatccctccaacccaagcccctcggccaggaggaaggggcaagcgagagccgctggctctgtggggggagaggggcgccgcgccccaagagcccccgtcccgccctgcggcagccgccccggggcgcccagccgcccgcttccctccgcagagcgtcttccctgacggtgaaaccgcgcgggacacaacccaccgcggctcatcacccacttacaaatagctgtcgctaggattcccgccactcctctcagaccggcccccccgccacctctgccacttttcggagtcccccgccctcgtcactgcctccccggagctgcggggcagtcggacgcagagctgcctaaccgcaag

SEQ ID NO: 5145 - DNA, 30 bp, Homo sapiens
  chr6:137244317-137244347
  hyper
agaggtgggagggccgcctgagcctgggag

SEQ ID NO: 5146 - DNA, 30 bp, Homo sapiens
  chr6:137311147-137311177
  hyper
ctgctgtgcgttgccgccctccgccccgct

SEQ ID NO: 5147 - DNA, 30 bp, Homo sapiens
  chr6:137421484-137421514
  hyper
atcaccagggaaaaatgacactgcccagaa

SEQ ID NO: 5148 - DNA, 365 bp, Homo sapiens
  chr6:137809000-137809365
  hyper
cgaggaaaagaggggtcttactcaagtcagggccggacagaactccaaaacttacgaggacagctatccaacactgcctcacagacccttaggcgctgccccctctttgcccctgtcctcctgcggtgcgagaaacccgaccactctgcttctacccgaaccccaggacgcaacagtaaaatcaaggcccgtcgttgaactcccaggtctgcgcatccctccctcctggctccctggggtcttggccccagcaggtccagtacccatccccagagggacccactaccctgggcgtcccagggtgccaggcacgatggcctgcaatgggggctgcaatttaaccgaggcgagttaaattccttttg

SEQ ID NO: 5149 - DNA, 471 bp, Homo sapiens
  chr6:137809445-137809916
  hyper
cggctctcttccaggggctgtgatccgggtcggccagggagagcgaggccccggggtcctctgtgaggtccccagcgaagagacgcagctggggaaggcgccgcccccgggccccctgcgccaccctaaccgggcctctccttagcaaagttgacaaattcttgagagtgtcagcccagggctgcgcgtgagggcgctgggaccggggaggaaagagcacctgccgcgctcagcccgactttgaatttgtttgttgttaccgtttttgtttttcctcccagtttccataaacgcttagtatttcgaggcactttgcaggtgttggcgcaggtgatgatgggcctcgttggactctgcctcccacgcatccttttgttttctgcgcgccagcctgtctgactgtgtcctgcggggaccccgagacagtccggggtcagggcgtagagactcatgcttgccacttgacccatc

SEQ ID NO: 5150 - DNA, 214 bp, Homo sapiens
  chr6:137810032-137810246
  hyper
cggggatcgctcacaggggctccggggccaccgcgagcgcggactgcggctgctggcgggctccttcgtcgtccaacgcaccccatcctctcccgccccgcagtgtcccagggaaggcttcactgaaaacagacgctcgacggaaaactgactctgcaggcccgagctttcggagtttgatttctgtgggccccttaaacgggcactgggtaca

SEQ ID NO: 5151 - DNA, 30 bp, Homo sapiens
  chr6:137816605-137816635
  hyper
gggccgccgtacggcgtcggacagggaaat

SEQ ID NO: 5152 - DNA, 30 bp, Homo sapiens
  chr6:137819173-137819203
  hyper
ggggaccgcgcactcgggaagctgtgctgt

SEQ ID NO: 5153 - DNA, 162 bp, Homo sapiens
  chr6:138132642-138132804
  hyper
atttccttttcttaaaaagtacgttcagtctactctggactttcccatctgtcgtcaggtgacttcctgctctgttagctgaccgtgagtcacgtcgttgctgcacagcacgttcagtgaggctgcctctgcgtgtgaggcgaccaggagaggaaaggacag

SEQ ID NO: 5154 - DNA, 41 bp, Homo sapiens
  chr6:138428546-138428587
  hyper
agcagagagtggcctgcgagcgcgggcgccgccacaaaagc

SEQ ID NO: 5155 - DNA, 30 bp, Homo sapiens
  chr6:138428980-138429010
  hyper
tgcactcctttggacgcgtgcacccaaacc

SEQ ID NO: 5156 - DNA, 444 bp, Homo sapiens
  chr6:138482424-138482868
  hyper
ggctttggattcaggacgtgtttggagtctaactcttgttggtctgggaagtaacccagcctctctgggcctggtttccttgggcatatcaagctctaccccagccccaccgcagcccaccgcccgccgcgtgttgaaagcttgactggagtttccctgcaggcaggggcacagtgtgtgcaacgctgcatcgcccgagcctggcacagggagtggcccaaaaaagctgttagtgactgaacgcaagaattttccggttagcagacgacgggatgcagcgggcgcggcgcctgcaccacgctgggggtcccggtgtccgggctgggccgctccgactccgcccgcggccaccgtcggctcagggggtgcgaagaccgcggcgaggcccctccccgcctgcctcccgccgcccgccgcggaccaggcgctccctcccggcggctg

SEQ ID NO: 5157 - DNA, 187 bp, Homo sapiens
  chr6:138482902-138483089
  hyper
cgctaagcgcggcgcccgcggggcctgcctcggcggtcaggtcagcggcctccagcctcactctccggccccagcccgcagccgccgccgagcggagcgcacctgacccaggcgggcggggcggggcggcgggcggggcgcggggctgacgtggcccgcggcatggagcgggcgtgattcatcagca

SEQ ID NO: 5158 - DNA, 314 bp, Homo sapiens
  chr6:138483409-138483723
  hyper
gccgttctggcgattgcgagagtcgcctcgggaaattgatgtgggatttgagagtcttggctcgggcgtggacatcagccgcctcccctccggtctctttcactctccgaaaccttcctcgggaaccgctgtcctccctgcctggcggcccccttctcctggtcccggcgctggggacgatgcttccccatcgccgagttaggcaggacccggagccggtgcgaatcctggggcctgacagcgaagcgcctctggggaaaagggaagttaaaccaacaaccccgatgtcgaatccttggcgagtggaaccagga

SEQ ID NO: 5159 - DNA, 267 bp, Homo sapiens
  chr6:138724515-138724782
  hyper
gcattgccaatggtcccggctgcctcttctgttcacaggggcctactccccttcacccttgggggatgtcaccattgcttttcacgtggccaccctcctgtccgttggctttcgcgtggggagtgcctgctgcctctgcggcggtcacgtcgccccggagagcctcggagctctggctgcccacgatgggagtcctctggggggcgccggagccgtgccgggtccccgccgcaggggacagtaacgcggagtcggcctggccggcgg

SEQ ID NO: 5160 - DNA, 30 bp, Homo sapiens
  chr6:138846140-138846170
  hyper
taagtggcaaatgggcggctacgaaccatg

SEQ ID NO: 5161 - DNA, 278 bp, Homo sapiens
  chr6:139013400-139013678
  hyper
agaccctccaggagtccgaaagtcacagagcgctctgcgcccctgccacctgcccagcctcccgctggggtccggcagtccccactggagaccccgacatcgcggggctccgcggcccccgcgccgacccagggccgccagggggcgggcgggagcagctctccgggtgcctcccccgccggttcccctcccccggcccgccggccactcacggattttcactcggcggtggtccaggcgcgcagcggcggcttgcagggcgtcgaggcggcggtgca

SEQ ID NO: 5162 - DNA, 31 bp, Homo sapiens
  chr6:139350568-139350599
  hyper
ggcgcttcggggcgcccgggccacgggggag

SEQ ID NO: 5163 - DNA, 244 bp, Homo sapiens
  chr6:139694963-139695207
  hyper
ggtggtgatgggggctcgggaactgccccatgcccatgcggtgggcagggtgatggtgcagcccattggtgccgtcggggaagcgcccgtggttcatggccatcatatggtctgccatttccagtcctggaagtgaaaagggcagataatgagacccgcgccacacgtgtcgcccaccacagcgcaccccacttttgctcgcctctgccccccaggattcccgggcgcacgtcggctgcgaacc

SEQ ID NO: 5164 - DNA, 30 bp, Homo sapiens
  chr6:141490782-141490812
  hyper
atcttacagttgttaagagtgaagcgtgtg

SEQ ID NO: 5165 - DNA, 30 bp, Homo sapiens
  chr6:142623418-142623448
  hyper
ggaggatgatcttgcggccaaaggggacct

SEQ ID NO: 5166 - DNA, 823 bp, Homo sapiens
  chr6:143247635-143248458
  hyper
gggctttgtgaaaagaaagagcgtatattctatccgggcaatgacaaacggactcaggcctcctgaggtcagcgctcctgggcaccatcaggccccacttcgggagcccccggtgctccgggcccacctgactgggcgtcctctgagtcagggaggtgccagtgctgtggtccccgcgagcccaactgtcccctgacccccgggcttttccgcaccgtggagtcccccgacacgctggggccagtgaacccgggccggggcgcgcgttctccctcccggaccagctcccggcgctgggcccgcggccgagaaactaggtctgggccggccctgcggcggccgccgggcgcggcgagccccactttctcccggcaggaaggggggaggccgagagcatttcctgttgtgcagctgagccctgcggagacgtcattgcattcatgctccctcgggtgtcagcggacggggggccaaagttcaagccgcgtccagggcaggcagcgcgcggcggcgcggcggcgcggggcgggcggccagggctcccctctcccgctggcgctcccggcgcctccgtccccggccggcccagcgctgctaccggaggccagccctggggctccgcggggaagagctgctcttcctcccggaggaaaccgagctcgcaagcccagcgctcccagccgcagactgcaggctgccctcctccaccgcctggatttcccacggggaggaaaaggcgtgcgtttccaggtgtttggaggacgcactggccgggcgcactttcctcagcgtaattttgaacgcagtttccctaaagatgact

SEQ ID NO: 5167 - DNA, 31 bp, Homo sapiens
  chr6:143266116-143266147
  hyper
aaatgcccagagccagcgccttcgctgcgct

SEQ ID NO: 5168 - DNA, 30 bp, Homo sapiens
  chr6:143266539-143266569
  hyper
gagttcggcggcggcgattccaatataaag

SEQ ID NO: 5169 - DNA, 30 bp, Homo sapiens
  chr6:143771772-143771802
  hyper
ttgggtgccgccttcgcctccatacccagc

SEQ ID NO: 5170 - DNA, 86 bp, Homo sapiens
  chr6:143999273-143999359
  hyper
gctggacctggccctgcgaccccagtcatgggccagacctcggtgtccacgctgtccccgcagcccggcagcggtgagtccggggc

SEQ ID NO: 5171 - DNA, 30 bp, Homo sapiens
  chr6:144164377-144164407
  hyper
tggcttctcgcgatcgtggagacgcagcga

SEQ ID NO: 5172 - DNA, 188 bp, Homo sapiens
  chr6:144384641-144384829
  hyper
cgggttaggcagcgacgcacaaaacataaaccctgtcatatcattatttattccgtgaatacatcggagttctgttctttcggtggccacacagatgctcaatgccacgacccttgaataactgccatagttgtcacttcacttggctttttcaataaaatgaacaggtcccgcgctcctagacccat

SEQ ID NO: 5173 - DNA, 47 bp, Homo sapiens
  chr6:144537938-144537985
  hyper
ctcacttccccagctgcggggcgggaggcggccgggagggggagggc

SEQ ID NO: 5174 - DNA, 151 bp, Homo sapiens
  chr6:144606892-144607043
  hyper
gagcccttggccagctcggggtgcggcggtggcgaccggcaggcgaggaggcccgcgggcagcaggtaagcccatgcattattgaagcctcgggctggtaatgtgactacagcccccgagggaatggggcgggggccgggaggaggatggc

SEQ ID NO: 5175 - DNA, 48 bp, Homo sapiens
  chr6:144607276-144607324
  hyper
ccctaatcttcctccccgccggggtgacagagtcgccctccgtgcatc

SEQ ID NO: 5176 - DNA, 780 bp, Homo sapiens
  chr6:146136027-146136807
  hyper
tctgaccccgcagcgtcgtggctagagtagggtctggagagagctcccactgtggcgagtcctgtcgttggattcccgcggcgccccgtaaggctccgccccggcggtgctaccaaaccctgttcgattttagaatcgtacattcccagagggaatcctagacccctcattttacagttgaggaaacaggcccaagtagcatgacttgttcgcgccgctagtcgaaggagcagcagccccgatcccttgactctggggcactgctttccctttagctcatttttggaggaaatgggtgcgcccttgctcgacctttggtgattgccgccacaggccttcccgccggctaactcagcgtgcccaagtcccgtgacttagtgccaggacggtgctgtgacccgttatcccctgtcgggttttacctccccccgggagagctcagccctggatcccggcgggcggcggagcctctctggagcccggacgggacagcccaccagggtctgcttctgtgaggggccgaggcgtcattccgcgaaggtaattagctggggaggggacttgaagccgcttttgcagtgtaccttacatatgactggggagtaaagaaatcccacagggctgtatcaaagaatggatggatgtccacgcccccgctaccaccaccaagccttggtctacggccgagggacagtgattccgagctctgggtgttgggagccgctcacccgcccccacccctctgtcggggactcctgcccaccccgtcgcaagagaatt

SEQ ID NO: 5177 - DNA, 30 bp, Homo sapiens
  chr6:146285529-146285559
  hyper
ccccctttctcctgcgctggcttcatgagt

SEQ ID NO: 5178 - DNA, 395 bp, Homo sapiens
  chr6:146864539-146864934
  hyper
gcccccagtgaacctccggggcccataaaggctccaggccggctccccggaggcccaccagcgggcgtctgggcctccctccgcgccgcgaccgccaggaggcgccgcccgggagaggaagtccagctgggcccggccgggcttcggaggcgccgcccgggagaggaagtccagttgggcccggccgggcttcagaggcgcagggcgggagccgcctcgcgcagggtcctccccaagccggcgccaggccctgccctcgtccggccctgccctcgtctggccccgcccgggccgcgagcactggcgggttctgggtcctgtgaccggtcaggcggcgtcagcgggcgcggcggagggctggccggcctcgggggagtttccgcggccgccggggg

SEQ ID NO: 5179 - DNA, 30 bp, Homo sapiens
  chr6:147828795-147828825
  hyper
acgcgatccccgggcgggagcgagaggata

SEQ ID NO: 5180 - DNA, 30 bp, Homo sapiens
  chr6:147830157-147830187
  hyper
gtgtgcaagcagatcggggacccggacctg

SEQ ID NO: 5181 - DNA, 904 bp, Homo sapiens
  chr6:148663411-148664315
  hyper
gtaattccttgggtcgcttgacttcacgaggggcgaggtatgcattgtagcgacacggactacttgtgaagcctttgggcgggagtcgcttaaagattaactttctcgggtttccgttaccaaaagcgtttccgtgaatagcgtgattggaaacttgtgcgggccggagaccgcggcgcggctgctctttcaacaggcgatttgttctcctgtccgaggctcatttccatgcaaagagcctgacatcagagcaccttttgttgctaaacgctttctttagcctcgagggagagagtcatgtggagctggaagagctcattttgaagagaggggtcccggggagctccctccaagatctagaggctccgcggccacccctgccgggtcctgccaagacttgctagaaggaacgagtcgcgtgccttagttagttggttcccgtcacaggaagaaacgcctttgcagtgggtttaattgcttctgggccgagcgaattccccgccgtacaactcagtggtgcggactttgcctcctgctaccctgttgctgcgccgagcggggtgggaaagtttctggagttgtcagtcgcgcagcccgtggccacctagacccgaggtgcgggcgcctgcgaagggcccccgcggggtggccggggccgccggggcatgcagcgcgggggcgcggctcggtgacgccgcgggcggggacccggcatccgggcaggctgcgcgcgggtgcggggcgagggcgccgcggggactgggacgcacggcccgcgcgcgggacacggccatggaggacgcgggagcagctggcccggggccggagcctgagcccgagcccgagccggagcccgagcccgcgccggagccggaaccggagcccaagccgggtgctggcacat

SEQ ID NO: 5182 - DNA, 786 bp, Homo sapiens
  chr6:149068748-149069534
  hyper
ctccctcctctatcagctcagcgggggaccccctcgcttcctgctcgacctgcggcagtacttgggtaaggaagctgggcaggcgctagggcggcgccgacagcgcaaagttgtgcggcggggagagggtcgcggcggggacttctcgcgctgccaccgcgcgccgccgccgccccgggtctctccaggtgctaagcccgtgagcatctgtgccgcggtcgggagcgccttcttcctcccgcgcgtccgactgtcctcaccgaggcgggggcgccgctgggttgcgctgccggcaggtaccccggggcgaggcaccgctcaccttccccccgccccacctccgccacccggatccggactggggcggagtggatgggtgtgtggggtgtgccggagtgtgtgtatcttcaggcctggcggcgcggggagtggcgaagggaagggaaggtcctcttcgttgcattgttagtgaccgcagttcagtcccgtcccgcgccccggggagtgtgggtgggtttagccctttgccaccgtccgctctgagaattctgtcccgcagatcccccgcctgcccgccggccctagtggctccgcgctgtccccgggctggcttgtcccttggctgccgctgcccaccccgccgcccgcagctagcctggcgcggggaacgggttgcatccaggggtttggggatgcccgagggcgctggtcagcctggccagcagtgtcgcccccagtaacccgaggatcctcggcgctgtgtgcgtctcaagctcaagtcaaaac

SEQ ID NO: 5183 - DNA, 30 bp, Homo sapiens
  chr6:149888030-149888060
  hyper
aatgtttgtgtgctcgggaagtgtggaagt

SEQ ID NO: 5184 - DNA, 127 bp, Homo sapiens
  chr6:150039629-150039756
  hyper
ttttattcttgcttagcgttctttccccgaacaagccggtgagcttccagcatctgtattttctgaatccggcagataagaaatgcttgagccaggaccgattgattagcagcggtttagagatctt

SEQ ID NO: 5185 - DNA, 197 bp, Homo sapiens
  chr6:150071939-150072136
  hyper
ttaaatcgaaatatagcgtccccgttttgttgggagactacaagggccgcagtctataataaactcactggtcagaatttatagcattattcgctactatgcagtaatcatatcttgtcacatggtatttttaattgtcctgtgttacttagcttttcatgtgtttgtcttatttctcaactcgatttgtaatttcc

SEQ ID NO: 5186 - DNA, 120 bp, Homo sapiens
  chr6:150185521-150185641
  hyper
agccccgcccccccgcgcggccccgcccccgcgcgtctcgcgccggctcctccagggctgggagagcaggccccggggagggcagcctcagaacaactttgctcccgcgccgctgcccag

SEQ ID NO: 5187 - DNA, 71 bp, Homo sapiens
  chr6:150284721-150284792
  hyper
ggggcggggacttcgcgactgcaggcggagggagggcgggtgtcgctggcgcaggcggtgacagggagaca

SEQ ID NO: 5188 - DNA, 30 bp, Homo sapiens
  chr6:150285139-150285169
  hyper
gaagggaaccatcagcgcctcctgtccacg

SEQ ID NO: 5189 - DNA, 341 bp, Homo sapiens
  chr6:150285544-150285885
  hyper
cggtggctcctttccgccgggtccgcttcctgcggctgctgcttgcccctcaggccaggaggtttctggaaggaccggtgctgtctccccgaacatcgtggtctccccgaacatcgcggcctctccgaacatcgccctctctccgagcaacgcgatctccccgaacatcgcggtctccccgaaaatcgcgatctccccgaacattgccatctcaccgaacatcgcgatctcgccgaacatgcccggctgaaggcactcagttcccctccgcggctcctttccgccgggtctgattcctgcggctgctgcttgccccgcaggccaggaggcttctggtagca

SEQ ID NO: 5190 - DNA, 376 bp, Homo sapiens
  chr6:150286099-150286475
  hyper
cgaacatgcccggctgaaggcactcagttcccctccgcggctcctttcctccgggtccgcttcctgcggctgctgcttgccccataggccaggaggcttctgggtggaccagcgcgatctccccgaatatcgcggtctacccgaacatcgcggcctccccgaacatcgcggtctccccgaacatcgcgatcccccagaacatcgcggcctccccgaacatcgcggtctccccgaacatcgcgatcccccagaacatcgcggtctacccgaacatcgcggcctccccgaacatcgcggtctccccgaacatcgcgatcccccagaacatcgcggtctccccgaacatcgctgtctccccgaacgtgcctggctgaag

SEQ ID NO: 5191 - DNA, 30 bp, Homo sapiens
  chr6:150326581-150326611
  hyper
cgcggggcaggacacggtgccttccatgac

SEQ ID NO: 5192 - DNA, 302 bp, Homo sapiens
  chr6:150920452-150920754
  hyper
ctctctggctgtcaccggttattctttacctccgtttccacttttactttctctaggcaaaggtcgtttggtgctttaaccgaggtgattagggtaatgacgcctgaagaacaccgggcttccccctcttttcacttgattaccggcaaagcttctatgtaaaactagaatgttcactaaaaccatgattttgggtattattttaaaggactcacataggaaattattacgtccaaaggaaagctaaacctgaagagctaggaaaatgaaaaaaagtgatgtgtctgcgaaaacagtagcag

SEQ ID NO: 5193 - DNA, 83 bp, Homo sapiens
  chr6:150920981-150921064
  hyper
gcagtggggccgagcccgaggaagaggaagtcggagcccgagcctgagcccgagcccgagcccgacggcggctgcagggcgct

SEQ ID NO: 5194 - DNA, 767 bp, Homo sapiens
  chr6:150921276-150922043
  hyper
ccgccggccccctgcgcgcccctccgcagtggggacggagggccttggggggcgccgagcggtggggacagagggcgccgggggcaccgcgcggtggggacggagggcgctggggggcgccgcgtctcgggggtcggagtcgggtcggggatgctgcccgccgccgccccgcttggggttccgcgcccccaagttcccggtgctcccgcccctcgccccagcggctgcaacatcagcgcgcagaggagtttctgcgagcacccgggagttgtagccaccgcttccccacccccgactcagcaggacagccccagaacgggaccccacagccagtcagctgggtcagctccccagcagcgaagccgggagcccgaggacccggggacgcgcggtgggggcggcggccgagctgctgcggcgctcagggcttgggggcgcccccgttctgcagatgcgcttttcagggggtggggagtcaagagcctgtggctcttccgtcacggggtaaacggtaacacctgggcggccgcgactctgcgagcgttctggcctcggcgggcggcggggaaccgcagtgatgcccgagctcgccccttttgtgtcctcgcggtgagccccgttccgaagccggaagcttgggaacgctctaactgggagaacggcgctcggctggtcaattcattccgctcctcggaaacaatgagctggatccttgacttgaatgtgctggcggagcggggtttgtaagccggcgtttcatccagctc

SEQ ID NO: 5195 - DNA, 54 bp, Homo sapiens
  chr6:151561286-151561340
  hyper
ccccgcagctctagtcgccctgttagaaacgggaggcgcccgagggccgggtgg

SEQ ID NO: 5196 - DNA, 623 bp, Homo sapiens
  chr6:151561368-151561991
  hyper
cgcagcgcctctggtcccggcagcctgggggcagatgctgctgcagggcgtgtctggggctgtgctcatgtgatgaagcgagggaaaaaccggggggaggggggcggaggctaagaggtggcctttttttttttttccttttcttttaaggagtttgccgcgagcgcgtctccttcattcgcaggctgggcgcgttcgcagtcggctggcggcgaaggaaggcgctctcgggacctcgcgggcgcgcgtcttttggctcttgcccctgtccctgcggcttggggaaggcgtaacccggcggctaggcgcgggagaagtgcggaggagccatgggcgccgggagctccaccgagcagcgcagcccggagcagccgcccgaggggagctccacgccggctgagcccgagcccagcggcggcggcccctcggccgaggcggcgccagacaccaccgcggaccccgccatcgctgcctcggaccccgccaccaaggtacgggcgtgccgggccacctgcgccgggaggcgcgggtctttgggggtgggggtgggggtgggggggtccctccgatttccgccgagagaacttcccagcccatccagccgcatctgcaaactcaggagt

SEQ ID NO: 5197 - DNA, 592 bp, Homo sapiens
  chr6:151562056-151562648
  hyper
cgcggcggggggcttgcatctttgtcgcgggtctccaggggaggcgactgcgccatgcgcaataataaaacccgcgccctgcccacggcggctgagcctttctgcgcactcttccggtgggagccatgcagcccgaggcggaggagctgcgcggagggggatccgtggagaatggaccccgggccgggcctccggagctccgagatgcggaaagtcagctgtgaggccaggactcgtggtggagcccgccggggagcccagccaccctcgggttccccgtcgcgtaccgccctggatgccagcggtgcctggagcgagcgggtttggtacccagtcctcctgcggcagcggcccgagcaggcaccgccttcccgaggcagagaaagcctggggtgtagctcgctcagagccaggaaaaacctgggcaggcgctgcgtttccagaaggaatgacaggtttcgcaaaccagccagcgccctcgcgttcgctcagcgctttgcctgcagactcagttggccaaacacacgctagagtggctagaagttctcaaaggatggggtcagtgtaacgagcattccgggtactcttccct

SEQ ID NO: 5198 - DNA, 30 bp, Homo sapiens
  chr6:151772931-151772961
  hyper
atttctacagttaccgcggtgcactggctc

SEQ ID NO: 5199 - DNA, 864 bp, Homo sapiens
  chr6:151815055-151815919
  hyper
tcgccacggaggccacgctcgggggttcggggtccaccccggcctcctgcggccgggccaccctactcgcgcgcagccgcgcgccgccgcgtccccgcggtgtttacccgttgcccgaggagacacccgcgccacccgccggctcccggcgccgccgcttcctcagggccggttccgggtccgagcgcgcccccgggctcgggtcgtcatgagcctggactgcaccagccatatcgcgctgggtgccgcttcgccagcgcccgaggtacggtcccagccgccggccgcgcgcgggggtggccctggggatagacgacccaggaggggccgaggcgcccctgatttgcacccttttcctcccggaggcgtgggcagaatcagagcagctctgtgcccgcgagggctgtggcctgggactgccagggcgctgatttcaggaggggatgggcaggaccggagtttgcggagcgcgtctgaattttaggttgtgccactctgcttctctgaccatttaaaccggtgacattcgaaagactgtggccgggcagttcctccccgccacccctgggagcaaagaattccttcatttaactttccctgcttagctactgaagtgtgcttcggagcaatttctggaaaatctgatgtggcaggaggagggccagcccggagtagagtcaccggccctttcgttgcgaagtaatccagaaacgttggtaattcagttgttcctgaatgcatctactcatttactcccaggagttacttaggtactggggactttcaggtattagatgtaccaatgcgcgcgcgcacacacacacgaacatgcgcgcatacacagacgctcgtgcacacacgcga

SEQ ID NO: 5200 - DNA, 755 bp, Homo sapiens
  chr6:152622775-152623530
  hyper
gtaattcagctgtctcgagcacatagtttcattttaactgtcattgtttacagtgtcaaagattggcccggcccaacggtagtcaaagagacttaaggaatctgttcctccctctgaatctgcaagatcgaaggctggtccctgaaatcagccacggagagggaacatggagccactcgccaggctccagtcaaagagcaaagccgcggggacccactggatccttaccatgaccacagaggggtgggccgaaggcgtggggaggagctccccatccaggtcctctgtcccttccgccagcccctcgacctcggtcaccgtcagcagcatggtggcgtgcttggctttcatcgtcagcatcttgcacttggaattcaaagaagcgatctgctcctggtagcccttaattttctgcgccagctcctgaggaaacatttcccccaccggggtgtcagagcagcatcaaaaggaaacagaagtagtagcgttcatcttcctgcagggcgagccaatgagcgcgcagagccgcgcgggcccgggaggcaggatgtgtaggcggcgagtcctcctgcatctcgctaccgagccagaccgcaggctgcgcggcgcggcgcaggcacagccaaagtgcccgagcccgcgtccccgcgtcggtacaaaaggagaaatgaggggatgaggccgaatgagtggtttctaatcgcgagaggccccatatggaatcatgaacttccgcaacattaggaactgacaac

SEQ ID NO: 5201 - DNA, 30 bp, Homo sapiens
  chr6:152720395-152720425
  hyper
tcatagcataaaaaatttcagcagttgttt

SEQ ID NO: 5202 - DNA, 194 bp, Homo sapiens
  chr6:152957586-152957780
  hyper
cttatctatgagtatcgcacacgtacacacatcactgccaccaccccctcccatcaagcacgcagagccccagcgtgcaggcacaaacttgctgacaatttgtctgcaatgtgttcgtcttgcacctctctctcctctccctgtctctgtctctccctgtctcccagtctctgtctttccttttaccttctctc

SEQ ID NO: 5203 - DNA, 537 bp, Homo sapiens
  chr6:152957815-152958352
  hyper
cgagcgaacgcttcctcccggctctctgcgcccaggctcggcgggaccccggggatgcgcggctgtccgcccgccctgtcgccgggatcgggcgcggtctgcaggactgcgggagcccagccgccctggtgacagaggacaacaatctcagcccgctgcggccggcggccgcggcccggcgcccgcgctcaccctggctggctcgcccacactcactcccgcgccgggctgctcagccgcgctccccgccctccgcgaccggttcctcctcccggctgctcgctggggggtgaggcctcccccttcgccctcccccacgcatctactgctcctgtcgggaaggaaggtcgcccaggccggttcagcctctgggcagggtccctgcaccgccctggcccgccacaccccctccccggctccgtgccccgcgccccgcgcccggctccgggatgcgccggtgcctggaagagctgggggcggggacccggaggctcgcaggcttccctacctcctggagatgcacggccttgggcgttt

SEQ ID NO: 5204 - DNA, 30 bp, Homo sapiens
  chr6:153304957-153304987
  hyper
cttccttgcaagcgcgtttatttgtatttt

SEQ ID NO: 5205 - DNA, 138 bp, Homo sapiens
  chr6:153323991-153324129
  hyper
gcgtgagaacgctgcgaacttcccggaggccaaaagttgagggggctgagcggagcgtgattggggaggggcgggcctgggagaccttgggcgcctcctctgaaagcctcttggtaggtatccggttgatgggtgacg

SEQ ID NO: 5206 - DNA, 560 bp, Homo sapiens
  chr6:153450984-153451544
  hyper
gggtcaatcgtccccgggcgacaggggttctcccacgtgaaccgacgtcccgggctccgggcgaggcgcagggctcagggcgcagggcgggtcccgtacgcagggcgggcgcgcgggcatctttgtggccaggcgaccccggctcgctctcccggagcccagggactcccgaggctggcgcgggctgcccgcgacaaggtgccagcagcctcgggctcgcgaggagcagctcccacccgcggcttccgagtccagctctgtccctccgccatcccctagtcctccggcatttattcagggagacagggaggcagagagaagaggagaaagcggccgtgtctgcacccagcctctgccgcagcactcgatgagggacagcagggaggctggcggggaggcagagattaaactatgattccatcgatcacggaaagaccaccatcacctacagcaaaggaggctccgatgcgcccacccgggcagcgactcgcggttggtgggcgttcctcgtcctcgccccctcggtggctgtggaatccaccccgcgccgcacacgccag

SEQ ID NO: 5207 - DNA, 370 bp, Homo sapiens
  chr6:153451759-153452129
  hyper
acagcacccaaggtgatcagtcgattggacactgttgatggcacattctcctcgttcccaaccaaccgcacaaaacccgcaacacctcgcgtccccgcggggtctcccgcgcccctggcccggccctcccggccgcccccagcaggcgccccgctctccgcgggaactctgggacctggccgagcgttccccggcgggcaggacactcgcccggttccctgcagcagctgagggcggcgagcggaccgcgtccaggcagcgacgcgggattcaacttcccggacccgcggcgcggcccccgctcccgctcagggcgccgcggccacagctgagaccccagcgccgcgcagccgcccccgccggggcatgg

SEQ ID NO: 5208 - DNA, 611 bp, Homo sapiens
  chr6:153452143-153452754
  hyper
cgccccctccttccttcacctcccccctaccttgaaaaaaatccatccattggtgcaaagcagacattttgatgtcatttacttagcaccgcttgttttggaggcagcgtcttacccggtcgcctggaggtgtgggcagcgcgccgatgggtccgggggagcggggctgggcggctcggtcctctagcggagccggtttgctgccatccgcccaacttcagcacccagcgggcgaggagagagggagagcggcgaggatgcagaggagggggagggggaggagggagcggtgggcggggagggagcgagagccgctcggcagcgcgcatgcgcctcgcgggccggcgcagcccctcgcccggcgcggccggaggggcagcttcccagcccctgcgcgcggccgcgagagtcccggccccgccccctccccgggcggcccccggccccgcccgacctcgcgcgctcgcctgggcgcggcgcccaccgtgcggaggggctcggccgggactctcggcttcggtgacgcccgtccggagcttcgcgggaggcccggagtcccgagagcttccctgggtgacagcggctctccgcccgggcccctgcaactccac

SEQ ID NO: 5209 - DNA, 70 bp, Homo sapiens
  chr6:153452788-153452858
  hyper
cgcgggagccttgcacccaggagccggcctgccaggcacagcagcctgcctgctccgggtcccggaggaa

SEQ ID NO: 5210 - DNA, 169 bp, Homo sapiens
  chr6:154360329-154360498
  hyper
cctactccttggatcgctttgcgcaaaatccaccccttttccctcctccctcccttccagcctccgaatcccgcatggcccacgctcccctcctgcagcggtgcggggcaggtgatgagcctctgtgaactactaaggtgggagggggctatacgcagaggagaatgtc

SEQ ID NO: 5211 - DNA, 1264 bp, Homo sapiens
  chr6:154830734-154831998
  hyper
tccgacagccctgtcacgcctgcggacggctctgggcaggcggcatggacgaggtcccgcgggagtcacccacacaaaggcaccttgtgcctctgcactcgggcccccgggtcgccgggcaccgcaccggggccaggcagggagagcgccccccggcccgagtgccgagtcccgagatcggcatccccagccctcaaccgccacagaaaggccacccctactccctggtttaaagatagggctcccctcggcttgccacaatccgcaccctggaaaggaagagctcggagcaggtacgagagataggagcgcacaggccactcggcagaagtttgcattgtcaccgggctgtgccctcaccgcttctcgccgggaggaagggccaagtaccctcttccccagctcctcgtccgccccatccccgaggctggaggactccggacccccccaaggcccgcgcacctctagtccagtccaccacttgtttggggctccacttggtcacgggttccatggtaaaccgcttcgcctctcgctgggctggagagtcgcagataaagtgctgctgcctgcgctccggtgccccttcccgggagggcgcgcccgcggctgctcccctgcgcccgagcgactccgtcaagactgcatggccgcggtcagccagtcgtcccagcgcggctccgccaggggagcccggccctctccctccagctgccacagtccagctgcagctcctccttcccccgccgccgccgggatcccgggcacagctgctgctcccgagcgacggcagctgcaggcacgccgggctgcgaccccagacccctggcctcggctcggcacgggagcctcccggcccgcgaccacttcctcggatctctcgaggcgcgatcggctctccctcggccggtcttctcgcctgctggctctccggggtccccgctccgcgtgcgctggcgtcccggagccttcccggcgcaggtcccacctcctgcgccgccctcccgtgccgccctggcagggccgagcgcagagcgtgcgcgctcgggttgcaaagtttcagctccggttgctgcaaaccgaataaaagagagggcggggccgagggtctagggaaactcgtgggagggggcgggtccgcccgaagcggcggactcgggttactttccctctctaagccggtccggctcacacccgcagcgtcccgggccccgctttccttttcaaggggcgggttgtagatcgcgcgcgcaccctggagagc

SEQ ID NO: 5212 - DNA, 30 bp, Homo sapiens
  chr6:155316477-155316507
  hyper
ccgcaggcgcacagcgcgcgtccaagtgga

SEQ ID NO: 5213 - DNA, 30 bp, Homo sapiens
  chr6:157343361-157343391
  hyper
tggctgttacccgacgcaccgaggctgggc

SEQ ID NO: 5214 - DNA, 31 bp, Homo sapiens
  chr6:157446395-157446426
  hyper
gaaaaccaataagcctcgggcctggctggag

SEQ ID NO: 5215 - DNA, 532 bp, Homo sapiens
  chr6:157556764-157557296
  hyper
aaaagcattcctcagcgcttggaacttgcgagctgatggcttttggtggagcccaggaggggcgctgtggggcacagacgtgtgcggggccggcagctgcggagagagcagcgcaccccagccttcaattccccgccgaagatgggactctgcccagagccgaggcccctggctgctgccccgctcccttgcggccgcagtgacactcagagccagattcctcagacaatcttcactcctccgtggtggctgccttgggaggcgttgcggggtgaaggaagtcgcagctggtcccaagcagtggggagggcaggacagggagtaagacaccgccttcctggggtgcacacggaggaggggcgctgcccaggagcggaggggaggggagcggagcgcggagaggagaccggtgccagacttcacccgcctagctctcggaacccccgggggccgcgctcggctccgcctgggggctaccggttctgggccaggagaagaagtggcatccgcggggcagggcgggcggtgacgg

SEQ ID NO: 5216 - DNA, 59 bp, Homo sapiens
  chr6:157802883-157802942
  hyper
ttaacctgggtgtcctcggcaaagttgtcgccgagccgggagcccgtgtaggggccgcg

SEQ ID NO: 5217 - DNA, 36 bp, Homo sapiens
  chr6:158244129-158244165
  hyper
caggaggcgaggaggccgggccgcggccgagggccc

SEQ ID NO: 5218 - DNA, 427 bp, Homo sapiens
  chr6:158402207-158402634
  hyper
ggtcacgtggtaagtgggggtcgtggtctggggatcacggctccaggtctcttcgcgacaacgcaccgttgacccccaacacctctccctggcggggtcggtgaccgcaacagcctccgggatagaacgctagtgaaaggtaacctttctccagcccgctccacgcgctccgcacccgctaagcgcctccgcgaattaactcaggcctccgcgccgaagtaggcgcagttatgaccccgcttccccgcagggagaccgaggcacgcagggtcgaaaggactcgtccagggtcgcaggagccgaccacacagggaggcgcagcgcccccggcgggaacagtcagcgggtccagcctggcggactcccgggccgggctgcccatataaggctgcgggcggccggcatcgcagccaggctcccggggtcg

SEQ ID NO: 5219 - DNA, 30 bp, Homo sapiens
  chr6:158402901-158402931
  hyper
tggcaagttgcgggcgcgcggggagctgtc

SEQ ID NO: 5220 - DNA, 30 bp, Homo sapiens
  chr6:158589287-158589317
  hyper
tgaccccgccccctcggcccgctctgggcc

SEQ ID NO: 5221 - DNA, 242 bp, Homo sapiens
  chr6:158957206-158957448
  hyper
aagaagccagaagtcgcccgcgggagctgtccgcggtgctgaacgcggtagccggcttcagcctttgacctccccagcaggaaagggccttcggtccgcccccaagcaccattttccttcgtgctcccacctccagtgtcttcccttcccagcgctgccaatggcgagggcggcactgagatttttgtcctgggcggcagacgaccttgtgttgcacttcctcccccgccttctgcctctcc

SEQ ID NO: 5222 - DNA, 263 bp, Homo sapiens
  chr6:158957687-158957950
  hyper
gtgctgggagaagagagggggcgcaggcggcgacacaaagggtggagcggcgggaccgggacccgggaggctgcgcggcatggacgccgagtaccctgcctttgagcccccgctctgcagcgagctcaagcacctgtgccggcggctgcgggaagcgtaccgcgagctcaaggaggacctcacgcccttcaaggatgaccgctactacaggtgggcgcggcgcgggcagcggcggggcggccggaggcttccgggccgcagtc

SEQ ID NO: 5223 - DNA, 215 bp, Homo sapiens
  chr6:159589859-159590074
  hyper
ggagaggcgaggtccgctgagtccttggcctgggcaacaaggcacactgaaaactgggttccttttcgacccgcatcgtgcgcgccctagaaatgacagccagacggagcagggtctaaggacgctgaaaacccctgacgtgggcgcgccgggtgcgggtagggacgtggaaggactgggctagccacaggaactacagcgctgcggaccgggtg

SEQ ID NO: 5224 - DNA, 255 bp, Homo sapiens
  chr6:159590506-159590761
  hyper
agcgcgcagaacagacggacggcggcggggacccgacggcggcgcctcggcactccccagactccggccagcgcccccctgccagccgcaagcacccagccccggcccaccccgggctctcgatggcccccgaggccggggcgaccctgcgcgcgccgcgccggctgtcctgggcggcgctgctgctcttggccgcgctgctccccgtcgcctcctcggcggcggcctcaggtacgcgccgcgcccgggcccccg

SEQ ID NO: 5225 - DNA, 368 bp, Homo sapiens
  chr6:159590971-159591339
  hyper
cgggaggctccagccgtctaagtgtcccgggagattcaggcacagcggggaaaaaaggaaaagaaaggcgactttcagcgtgcggactggggtaatgcctttctttgcccagaatttctcgggagcgtaggtggtcatcctactttctccgcgttcacctctcgcgaggcaggatgacgggcgcactcgggagaccggagggaggcagagcagggctgttctagaaggtcgtgggggaaaggctgcgagctgccgcagggcgtcgggtgcctctgcgctccagaggagaagcgctccagtgccagctcggctccaggcggcaggaggcccgcgcgcccggggggaacgttcaagctgggagaaaatgt

SEQ ID NO: 5226 - DNA, 252 bp, Homo sapiens
  chr6:159654812-159655064
  hyper
atgtgcgggcccccgcgcacgccgcgcgcgccaaggaggcagctgcgtcccttcccaagcaccagcaggtggagtctcccacaggcgcaggggcaggtggcgaccacaggtcccagcgcggacatgcggcctcccccgccaggcccagccgacccggcggcccccagtcccgcgcccgggtacccagcagggcagcgccggggaagtcggagcctccttccaagcggcccctgtcctccaagtcccagcagt

SEQ ID NO: 5227 - DNA, 162 bp, Homo sapiens
  chr6:159655082-159655244
  hyper
acgaggaggaggacgcgggattttttaaaggcgggaaagaagaccttctgtcttcctctgtgccaaagtggccctcttcctccactcccaggggcggcaaagacgccgatgggagcctcgccaaggaagagagggagcctgccatcgcgcttgcccctcgcg

SEQ ID NO: 5228 - DNA, 45 bp, Homo sapiens
  chr6:160389821-160389866
  hyper
tgggaagcacccgccacgatccagcagggcgcggtgggaggggaa

SEQ ID NO: 5229 - DNA, 402 bp, Homo sapiens
  chr6:160769392-160769794
  hyper
ggctgggtccgcgggtcactccgaggcgcgggctgcgggcggcgggcggcgggcgcaccatgccctccttcgacgaggcgctgcagcgggtgggcgagttcgggcgcttccagaggcgcgtgtttttgctgctgtgcctgacgggcgtcaccttcgccttcctcttcgtcggcgtggtcttcctgggcacgcagcccgaccactactggtgccgcgggccaagtgccgcggcgctggccgagcgctgcggctggagcccggaggaggagtggaaccgcacggcgcccgcctcccgcggcccagagccccccgagcgccgcggccgctgccagcgctacctcctggaggcggccaacgacagcgcctccgccactagcgctctcagctgcgcggacccactcg

SEQ ID NO: 5230 - DNA, 540 bp, Homo sapiens
  chr6:160769827-160770367
  hyper
cgtgccgcggcggctggcgctacgcccaggcccactccaccatcgtcagcgaggtaagggcgccccggccctttggaagccggcgggagaggacgatgctggctcccaggcggacaagccgcgtgtgagacgctggccgccaggggaggtcggtggagacggggaccggtcggctacctctggggacagacaggattcagcgcacccttggaagtgccgcgtcgtaaatgctgggaaaagcctttcgttatctgcctgagcccgtgagttaatgcacagatactttggtttcgggtgtgaacaaaaactttcttcgaagccgagttgtaaacgcctggcgcacgcctgctcaggagtcaaagacccagcaccgcgttccttatctttgaggtgtgcgggcgccgtcattggaaattatggttaggtgcgcgatagggaacttcagtctctggggtgagcgacgttggcagttccggattcgcttatggtctccagggtcaaaggaaagggcgaaccaacgtttgaaggcagcagcagctt

SEQ ID NO: 5231 - DNA, 30 bp, Homo sapiens
  chr6:161188514-161188544
  hyper
ggacctgaaaccagcgacaggttttggcag

SEQ ID NO: 5232 - DNA, 30 bp, Homo sapiens
  chr6:161413418-161413448
  hyper
gctgcctcccctgccgctagcttcggaaga

SEQ ID NO: 5233 - DNA, 68 bp, Homo sapiens
  chr6:163834314-163834382
  hyper
ctgcttttcagactacgcgcacagcctctttatttcctactgcggcttcattccctcacggaacactg

SEQ ID NO: 5234 - DNA, 127 bp, Homo sapiens
  chr6:163834405-163834532
  hyper
cgagcacgactgacgctccccttattatttgctaagccgctgcgctcgggtctggctacgatttgctttcagaataacgggaaggtgcaacaagatcgcttccctagaggcgcgtcgcccgcgtggc

SEQ ID NO: 5235 - DNA, 191 bp, Homo sapiens
  chr6:163834710-163834901
  hyper
cgacaaagcgggagccgggcgcgccggccgagggcgcccggcgcagagtcccgcagaggcggacgccgcggcacgcgcctcgaaaagcctcaaactcttatcctcggctctcccgccccacctccgccccgcagccaagacccgcgccgtggcgggcccgacggccaaggaaagcccaccagccctccgca

SEQ ID NO: 5236 - DNA, 293 bp, Homo sapiens
  chr6:163834987-163835280
  hyper
cggggccctcccctcccccaccgcgcgctcgcggggcccgacgggggcggagcgaccctcggaaggggcgtggcgaccgggctcgacgcgcgcacgcgctctggagccccacggctacgtgtcgggccacgtgatgcccaccccgaaagtcccccgtgaagcaacaggacgttaaaaaaaaatttctcttctgcggggtggataagaggttctgaaaaaactatagtaacgggaggcgaggcggaggcagcgctggcgcgtcccgctggaattcctctcgcctgccgcgccag

SEQ ID NO: 5237 - DNA, 30 bp, Homo sapiens
  chr6:163835876-163835906
  hyper
cggctcctcctcgtccggcgccagcagccc

SEQ ID NO: 5238 - DNA, 1672 bp, Homo sapiens
  chr6:163836108-163837780
  hyper
cgcggagcgggacgccgggtcccgagcggcccgcggccggggctcgcccccgcccctccctcctctccggcggcggcggcggcggcggcgggcggagtgagctgcggagcctggaatatggtcggggaaatggaaacgaaggagaagccgaagcccaccccagattacctgatgcagctgatgaacgacaagaagctcatgagcagcctgcccaacttctgcgggatcttcaaccacctcgagcggctgctggacgaaggtgagcgtctccagggccccggccccggcccgacccccgccggggcggcccctttccccgcttgggatggtggggagggcgggaaggtcacggccgggcgggaccgagcgccggggggactgggaggccaggagggcgcacaaaggaggtgccgggccgggcttgcggcgggcgggcgggccggggtggacccgccggtgccggacgccccctgcccggccgggaccccgcgccgctggcgtccaagttggcgcgttgcggagggctgcggggtgagccctgcggcccctctagcttcggcggtcacatttccgagaggtcggcgggggctgcgcggactcggtggtcctcgccgagccctcccgagagcaggcccacgccgcgccgccggcctggaggacgcgtgtgcccggcgcgggccccgctcctccgctcggcctcccgagcctgctctgcgcggacccccaccgccccgcgttcgggagctctcccctcccgtgaggactaaagcggggtttcgtggttggggagttggtgcagctgttcaatactaagtggaagtcagtgtggggctcgttagtttaaagaaattccgtaggagaccgaaattatgctggcgtagccgacaaggaggactaagtgacggcgaaaagcacttttttcccttttgtttggggaagcgagaactgttagggagttgaacttcacttttcgggggtggggggggggggggtggagtgcgaaataacgcgatgacagatcggagcgcagcctgagttagaagaacttgggcggagggtttgctcccggggacgcagccgcctgagtttgtaggacagggtttcgagacgtttggaaagggcgaaataaaattgagccaaagtttccaaaaagctgtatggagcgctgtggggagtgaagaatgacaagaagattaatgttgaccaactttggaatttccttaagaagttctcatagcagtacctgaagtattaatttctagtagctgtgggtttctgtggacgcctagagaaaaaaaagaccacaaaaaaagtctgtttcgaaaatcgactggccaggagtttgtttgtttttttttcctgcttagaggcaccaccggaggactgtgtaaaggaaactgaaaactacaggttgaagagatgaacaatggagtttagatttttcgcaagaatttcgagattttaaaaatagagtcggggaacaggagtttgaagcttggggagttggaatgtcactagagaacaaaaggccggaaatgtttccatgataaaaaatggttaaagaaaaatcccaggagttctgttgtcttgaaagtcatagaaacaacttaaaagtagaaaatggttaggtgttacggctttctcgtcgttttgcttccgtatgttaaacata

SEQ ID NO: 5239 - DNA, 30 bp, Homo sapiens
  chr6:165722843-165722873
  hyper
acctctgtgctttgcgcgctggtttcagat

SEQ ID NO: 5240 - DNA, 30 bp, Homo sapiens
  chr6:166074176-166074206
  hyper
gccgcagttgggagcgggaaaccgaaacag

SEQ ID NO: 5241 - DNA, 182 bp, Homo sapiens
  chr6:166074855-166075037
  hyper
catgctctggatgccggtcactgcgcggggtgggaggccgggcgcccactccgagtcctggagaacggcggtgccatcacagttggaagcgcggggttctgaggccctggcctccctcaccccggctacagggacccggtgggctggacccccaagtggaaggaagcgcatctgctccagcc

SEQ ID NO: 5242 - DNA, 30 bp, Homo sapiens
  chr6:166076859-166076889
  hyper
ggggccggggcgggcggacagagcaaccgc

SEQ ID NO: 5243 - DNA, 260 bp, Homo sapiens
  chr6:166077372-166077632
  hyper
tgccactgaagggaaatgagccgcccaatgggcgctcagaactaggagccgccagaagtttggggaagttggagcgcaagagcgcacacagatgcacaggtgtccgcgttcgggcaggcacgcgcggcggggccaccatggcgcgctgggtccgaggaggggcggtggctgtgctgttccacggtggcacgggctgtccggactgcctggacgaggtcaccttccccggagtggagcacacgcgccaaagctcagctttc

SEQ ID NO: 5244 - DNA, 22 bp, Homo sapiens
  chr6:166077668-166077690
  hyper
cgctacagtgcagcaactgggt

SEQ ID NO: 5245 - DNA, 30 bp, Homo sapiens
  chr6:166078130-166078160
  hyper
tgccggcagcctcccggcttgacgcttctc

SEQ ID NO: 5246 - DNA, 355 bp, Homo sapiens
  chr6:166267536-166267891
  hyper
gctgcgctggacccagacagacgcgcggggtcctagggaagagcccaggcagggggaagcccgtgggcggtgagaccctcccgtgccacgggcgcagcgcagcgctggctggggccgacggggcgcaccggcggacggtgatgaacccggagacccggcagccaggctgggctgcagcagcctttgcctggacgtcagggtggagcccgggaatcgcccctgcgccgggtgacggaggagaaaggggcccgcaggaggcaggagggagcgcctggcacagggacccagggactcgagcaggtggtccctggggaacggggagtgaggccggaaggagagaaagccaagaccaggt

SEQ ID NO: 5247 - DNA, 28 bp, Homo sapiens
  chr6:166268182-166268210
  hyper
cgagcccgcagaagccccagaggcctgg

SEQ ID NO: 5248 - DNA, 584 bp, Homo sapiens
  chr6:166402066-166402650
  hyper
tggagtcctagggccgccgcgccgggagtcgcaatgaatggatggatgcccgcgcgctgggaccaccaggtccgcagagatgtcgccggcgctaggggcgctcctcccgcgtggggacaggcgccctcgcctaggcgcagtgtggggggaccccaaaagacccttaagaggccaaaggcctgctctccccgttctccccaacacacaccaggggtcttttctgccccggagaagttgggacgcaaaacgtagggaactgcgctcagtctccgcaccacgaagagtcgagatggggaccgagaccagcacggacggtagcaacagagaggggagcgcccaagtggcgcaacgttgtggctgaagccaagcctgtcgcctccccctgagtaccgctggcggcccaggaccgtgcgctctcccttcctgagcacccagggatgcactgcgcagggaaggagggcacggcgggagggtgcttgcaggggactgctgcgcggattccccatccgcacccggctcgcggggaatccgtgggcttgcactcgccagaaagagctgctgcaggagcagccggatggtgaggc

SEQ ID NO: 5249 - DNA, 151 bp, Homo sapiens
  chr6:166402752-166402903
  hyper
cggcacagatgtcgctgaagtgaacctaaggaagtttgctaccccaagacccgggcttcgcgccaggtgacaacagacgtctgggagtgtggtgacacctgcgcagagtccctggtggttcaacctgtccgagaaggttgcaagaagatgc

SEQ ID NO: 5250 - DNA, 30 bp, Homo sapiens
  chr6:166419626-166419656
  hyper
cccccgcccgcccgcggctgctgccgtcag

SEQ ID NO: 5251 - DNA, 30 bp, Homo sapiens
  chr6:166422167-166422197
  hyper
gcccgggaagcctgcggggcgccggagggg

SEQ ID NO: 5252 - DNA, 2204 bp, Homo sapiens
  chr6:166580148-166582352
  hyper
ggccccgaagttgggcgagtcggggtggatgtagacgcagctgggcgcctgcggctccggcttgccccccggcacccattccccgttcacgtacttccagcggtggttgtccgccgccacgaagtccagcaggaaggagtacatggcgttggggtccaggccagacacgttcaccttcagcaccggaaacatcctcctggaaaacacggggcgggcgcaggaggaccccgacactgaccaggtaggccggaggcagaagctgggcacagaggcctcagttatttcggggcacagaggagccccctggggaacgtccgagggtgactcccaagctcccccttccccgagccctgccaggtccaggtggcctcctcaccatctccacggcctcgggagggaggggaggagaggacctggcgaagggtttcagtgcaggaggccacatcccgcggggacaggcggggaccagggcgcgcctcgcgggtcccgggatgcctccgaggtcgggacaccgaagtgcgcgttcctcctccccaagcttccgcggagaaagccccagaagaggggcttgtagaaatgcactcgagggagttaaccagagcgggaacaaacacaaagccctcctccaggagaaaaagggttcgacctccgggaacttgccaggtcccccaggctgcccaggcgctggagagcgcggcgcgcgcgggctccggacgcgcacccacctgccgttcttggtcacgatcatctcattggtgagctccttgaagcgcagccacagctcgctctcctccaggcccacgcgcagttcgcgctctgtggggtcgcccttctcgctgcccgcctgcagctcattctccacggcgctcagcaggtggtccactcggtactgcaggctctttcccgcgctctcggtgccaggggagctcatcctcccgtccggctcccctccccgccgtccccgaagcccagactcgctacctgagatccaccttccctgctcttggccgccgcccttccgagaaaaggggccccttggaccgagacctgcgacggctcccgggtcccgggtcccggcacagacccgggaggagggcgcggaccaagacttggggggaggggacgggggcagaggggtggggagaagttattccacttgaactccccaaggctctactagtgtaggtctctggggaccgaaattcagtgccctccccataaatagagccgcggcggcagcgctggggtgctcggcggattgggccgcgcacgctttgaagtgccgggcagcctcccattggccgagagcggccatatcagacccagccgggcgggtctgggaggccgggggccaacaatgggctcccgcacgcctgtttcatgtaaatccggggccccagccctgcgagccccggcccagcccctacacccccgcccttctccaaatgtttgcacctccatcaaagcggcggggcaagccccggaggaaggtaagctggacgccccggcctgccccagcccgccccagcccgccccagcccgcacttccgcgaggggctgcccggcagcctgcgatgctccctgattcccgcgcggggtcctcctcgctttcccagcgcgcccggatcccgcagccgcgccaggctggaacgttcgcgcggcctcacctgtccccgctccaggcgcgcctccctcccctcccagggacgagcgcatttggccgggctttgggatgcgccgcgctcgtctcgccgcagtagtagtgctgttctcgcgcctccgatgcctcaactctccagtctggcagtttccggtgcacctgtccccacacgtccctcgcccacggagccccaggcggcgttacgcacacccaggatcgtggatcagcctgccccggcgtcgggtgtccccgcggctctcaccatctggaaaaggaaggtccgcgcgcagagagggaaatggacggaaataagcaaaagcaaaacaaccccttctgagaagtgtcctcctcgctctcttataaaaacaggacttgttgccgaggtcagcgcgcgcatcgagtgtgccaggcgtgtgcgtggtttctgctgtgtcattgctttcacggaaggtgggagaaggtcggggctggcggggtggtccggactagtgggactcggggcgctttccccgcccggcccagcgccaagcggtgtcggcagcgg

SEQ ID NO: 5253 - DNA, 30 bp, Homo sapiens
  chr6:166797402-166797432
  hyper
ctctggtggccgggcgcggtgactgacgcc

SEQ ID NO: 5254 - DNA, 31 bp, Homo sapiens
  chr6:166822698-166822729
  hyper
tctgagttggagtggtcgtgatgctgcttca

SEQ ID NO: 5255 - DNA, 30 bp, Homo sapiens
  chr6:167040720-167040750
  hyper
ctccgcctcccctgcgagtaccagcgccgg

SEQ ID NO: 5256 - DNA, 304 bp, Homo sapiens
  chr6:167275710-167276014
  hyper
aacagaggctcggaccggcacagggggacggccagacgggatgtcggaagccaagggacgcagaggccggcgggtggcggcgatggagaggacagatccggctcccagaggaggtcgtgagcgcggggcctgcgccggccggaggagggacccggggggctgcaatatggctgctcgggcgccgtcccctccctgccaagccagggctctggggagctgctgccgcttcccgctcgggctggggcgaggaaaggaggggacggcgctgcggcttcggaatctgtactgcgactttggcagagta

SEQ ID NO: 5257 - DNA, 30 bp, Homo sapiens
  chr6:167412514-167412544
  hyper
gtccgctctccacacgcgagggcgcctcct

SEQ ID NO: 5258 - DNA, 30 bp, Homo sapiens
  chr6:167412966-167412996
  hyper
acgctggagaacagcggggtcctgaaccgc

SEQ ID NO: 5259 - DNA, 45 bp, Homo sapiens
  chr6:168227062-168227107
  hyper
tggacccagcaccgcccgtccccgcccgtccggaccgaacgcagc

SEQ ID NO: 5260 - DNA, 70 bp, Homo sapiens
  chr6:168227398-168227468
  hyper
cggaaccctagcaccgcgcggggcccgccctccgacacctccctccctggcggccgcggcagcagcacct

SEQ ID NO: 5261 - DNA, 34 bp, Homo sapiens
  chr6:168227909-168227943
  hyper
cgaccgaggtgagcaccgccgggcgcggggcctg

SEQ ID NO: 5262 - DNA, 85 bp, Homo sapiens
  chr6:168228221-168228306
  hyper
ccccgcgagcgcggcgcggccccggcctcatccccggcggcgcggggggcgcggcggcgcgcggggccggcgccctccacctgca

SEQ ID NO: 5263 - DNA, 34 bp, Homo sapiens
  chr6:168228538-168228572
  hyper
tctgcccggagggaggcgccggccccaggctggc

SEQ ID NO: 5264 - DNA, 30 bp, Homo sapiens
  chr6:168720664-168720694
  hyper
aagtggaacaaaggcggagaaaggcttgtt

SEQ ID NO: 5265 - DNA, 71 bp, Homo sapiens
  chr6:168841851-168841922
  hyper
gcggacgcaaagaacgcggaggacctctgggtgcctgcaggggagctgctccagccgggccgccgggagcg

SEQ ID NO: 5266 - DNA, 225 bp, Homo sapiens
  chr6:169613105-169613330
  hyper
ttttgtttgcagaatcggccttttgaaggttccgggttaccctgcagtgaagctgtcattcaagcacagtcagggcccaggagagggcgcagggagggcgcaggcgcgcagggagggctgggcatgcgctcggcggggcctccggctctcggggacgcgcgcgggcggggctcgccggggctgaaccggctgagcttcccagggacgccccgacccaagccctgc

SEQ ID NO: 5267 - DNA, 30 bp, Homo sapiens
  chr6:169653597-169653627
  hyper
gaaaagctgaggagcggccacgtgccttgc

SEQ ID NO: 5268 - DNA, 61 bp, Homo sapiens
  chr6:169653913-169653974
  hyper
agtgcaggatgctccggtggacgtggccgagcggctcccgggcagcgcggctttatatgcc

SEQ ID NO: 5269 - DNA, 479 bp, Homo sapiens
  chr6:170124927-170125406
  hyper
ggtggcgctccgagagagcagcggagccacctgcccaggccacgcttccccgagcatccgcagctgcacccgggggctgtcggcgcccgccccggagcgtgcgggaggcacagcgggaagaagtcgctgagattcggccctcgtggctttgcgtgcccgcgtggttgatgcctccgccgagaacgcggtcggccgggagccggggaggagcgtggacgccggcctggcaggtacccccgcgagaacgtgggagccggtgtatttcagctgcatttattactgatctcgggctgcaccagggcacttgtaggaccgcactaaaaacagcggaaagtgaggagccaagcctgggtccggggcggcccgccgtacagctggcctcacggattccactgcctgcgcctgcagatgacttgttctggagagtagagaatgttctcggatttaaagtacaatccggtttcctttccattcattat

SEQ ID NO: 5270 - DNA, 30 bp, Homo sapiens
  chr6:170190097-170190127
  hyper
ctgaactgtgactccgccccgtggccgcat

SEQ ID NO: 5271 - DNA, 51 bp, Homo sapiens
  chr6:170599825-170599876
  hyper
cgggctccgatctccggtgtcacagcaaagatccgcgtctttccgatgaat

SEQ ID NO: 5272 - DNA, 30 bp, Homo sapiens
  chr6:170862230-170862260
  hyper
cgtagggcgaaaatcgcagctgcaaagggc

SEQ ID NO: 5273 - DNA, 30 bp, Homo sapiens
  chr6:170863272-170863302
  hyper
agatggctgtggcacggcggccccgccccg

SEQ ID NO: 5274 - DNA, 172 bp, Homo sapiens
  chr7:193423-193595
  hyper
cgccgccggcgacgcgggctggcccaacaagcacacgctccgcatcctgcaggacttcagctccgacccctcctccaacctctcgtcccactcgctggagaaactgccgcccgcggccgagccggccgagcgcgccttgcgggggcgggatcccggcgccctaagaccccac

SEQ ID NO: 5275 - DNA, 755 bp, Homo sapiens
  chr7:556556-557311
  hyper
gattacagagggggccgggccctgacccgggggccgcctccgcccgcccgcccgtcggaccgggagccgcgcctgcccttggggcctcgctccgcgggctgcccgcccggcgcacgggccagggctctgcgcccagggtctgggccggatcctgccgctcccccggcccgagggcaggcgcggggcccgcacacctggcggaggccgcggctgaactttgtgtgacacacgcggcgttttccttaaaggcgaaaacaatcccggggcgagcgagcagccctcggccgccgctgggagagaaagtggagactggaagagaaactcctgactcatccgcccgggcgcttatggctggggattggattctgacctttcggtgcgctcctgcgcggcgccccgcccggccccagctcggggcgcacaggccgcccgcccgcgccctccccgcgcgcggagggaaggggcgcgatttacctacggagtctatctccaggagtcgctggaggtcccggatgctgtggatctgactgcgggccagcctctcgatcacctcgcgggggatctcggcttcctgcaagcagaggccacacggtcagcgcccgcggccccgaccccgccggcacgcgcccccggccgccaggagcgccgccgccccgggcccgaggagaccccgcgagcgccggccgcagtccccgccccagcccccgcggagccctcgccccggccctggaaccagaagccgggggtggggctgg

SEQ ID NO: 5276 - DNA, 34 bp, Homo sapiens
  chr7:557625-557659
  hyper
tcacaaacacacgcacgcgcgcgcagacacacac

SEQ ID NO: 5277 - DNA, 293 bp, Homo sapiens
  chr7:557697-557990
  hyper
cgggctccggcccagccgcggccctagcgccgactaagacgcccaaatccagccggcggccgggagaagaagcctccagggaaagcgagggttaaacttccacctcgcgcagctctccgtgccctgcggagaccaccctcacctctggcctcccccactcccctccccgatttttaaggagagtcgggggtcgctggggagcctgaagcactaagttcccacgacgggggctgtggaaagtcattcatcacagcaaagctcccggggatggggatggggatggggatgggggg

SEQ ID NO: 5278 - DNA, 31 bp, Homo sapiens
  chr7:559434-559465
  hyper
cgcaggcccggctcgccggagttgggcgggc

SEQ ID NO: 5279 - DNA, 8 bp, Homo sapiens
  chr7:560773-560781
  hyper
tcaaaggc

SEQ ID NO: 5280 - DNA, 7 bp, Homo sapiens
  chr7:560796-560803
  hyper
cttcggg

SEQ ID NO: 5281 - DNA, 30 bp, Homo sapiens
  chr7:852699-852729
  hyper
aaccatttcctctgcggatgcttcccgccc

SEQ ID NO: 5282 - DNA, 70 bp, Homo sapiens
  chr7:853023-853093
  hyper
tcgggtttctgactcgtctcccaggagccggtttctgtttaccgctgaaaggcacgcctgctgccaaatt

SEQ ID NO: 5283 - DNA, 30 bp, Homo sapiens
  chr7:1001896-1001926
  hyper
aggatcaatgtgggcgaggggccgtgaccg

SEQ ID NO: 5284 - DNA, 615 bp, Homo sapiens
  chr7:1007447-1008062
  hyper
ctccacttcacagtaagctcacgccatatagccgcactgcgttggcgagctcatggcacgtggccacaccgcgtcagcgccgactccacggtggctgcgtcacggctcacgtgcactgtgaggacactggggttgctatagacagtgctggggcaaccctgtgcctacacaaaatattctaataagaaacaagactttccatcaactagcggtgatatgttaatacgtctgcagcactcagaggcctgacagagagcagacacgggacagtgacagctgcagccgaatcaggtggtagaacccatgggtgcagggacacagggttgggcgggcccagccgcaataggtactcagttctgtgaggaggggagggacatgtttaaccacgaaagggccaccactgcaggacagaaacagagggcctttgctgcagagaactggagatgggctgagaagcctcagccacccacaggcagagggacgagggcagcctgtttcccagagcctgaggtcggccagattggtggccccacctgccagggcttggagacagccactgccagggtcgccagagaggacgtgacctggacctccccaccccgtctcctgccacca

SEQ ID NO: 5285 - DNA, 71 bp, Homo sapiens
  chr7:1069636-1069707
  hyper
ctctgccactggtgtccgcaccccgctttcagagaaggaagtgtgtgctcagtcaccggtttcatgggagg

SEQ ID NO: 5286 - DNA, 279 bp, Homo sapiens
  chr7:1126575-1126854
  hyper
ctccgcctggagagccggggctggcggtgcctgaggaccccttcggcctggacagcccacgcgggcttggggggcctcgctctgccctcatggggcggccatcggttcccgaagcggcgagtgaaaattcaaatggccagtagggggcgcactcggaagtggccgccccgcatgaggcagttcagcggccccgagagtccggggagggaggtttattctccgcctgcacgagactgtgaaatccgcaaccatgagcaggagaggcggccctggtgggga

SEQ ID NO: 5287 - DNA, 31 bp, Homo sapiens
  chr7:1147466-1147497
  hyper
ctggagacccgcaccccgggaggaagcagag

SEQ ID NO: 5288 - DNA, 30 bp, Homo sapiens
  chr7:1269948-1269978
  hyper
agcgaccgctccagcggcagcaactgacaa

SEQ ID NO: 5289 - DNA, 231 bp, Homo sapiens
  chr7:1272310-1272541
  hyper
ccccgcccccagcccgtcttgttgtgacagttcctgatactgtttattgaggtgcatgtcaggtataattagcaatcgatatggaaaacgtttccctgcacccagcacgcctctgacgtcagagccgattagcgcttcttattggtcccaaattccccgggccgcggctaattatcgggagcttgatgttgataagtaaagcgccggagtgcgggcgaagcatgtgtgggg

SEQ ID NO: 5290 - DNA, 30 bp, Homo sapiens
  chr7:1277139-1277169
  hyper
gcatctgcggctcccggtccccgcccgccc

SEQ ID NO: 5291 - DNA, 30 bp, Homo sapiens
  chr7:1280221-1280251
  hyper
gtttgctagtcaatcggttagatgcagact

SEQ ID NO: 5292 - DNA, 890 bp, Homo sapiens
  chr7:1280643-1281533
  hyper
tcagcccctgccccgcgggccgaggatggggagggggcgcgcaaggagtgaaaacggcgagtttgggatgagagccagggccaggaggggagcctcgccctcgctactccttccctttcttctaaagccagggagctccccgcccagcattgcccgttccttcctccccgccagggcccagagaaatccgggctccagcaccgggcctcagtttcccggaagcggacttgggccccgatcccgggccctctccgcccttcccaggtctcaggcgtcgctgcgtggaggaggcgcgcgtggctcccggcgccgatgtcccggcccggaaccctgcccgccgctgcgactccggggcgggggtgggtcagcctcgggggcggccggggtgggcgtggaggtggacgcggggccgcatattgggcgcttggttctgtttatctcacttagcggtggagggactggagggaaggggcggcccgaagggaggccttggtggggcccagcggctccctggcgcaccccggacacggtggccacgaggagccggggctgtggccgagggctgcccgcaccccgagacccttcctcgtgggcccctctgcccggggcgccgcccagagggggcccggacggaaccccccgcgcggggaaccaccgggccgggcagagctggcgtgagtatggagggggcgcgtggggacagaaaccccgagctgggaggagcggggcgcggggctggccagtctgcggctctctgggccccgctgggcgtcctcccttcctcccggccgctctctccttgcctttccggggtctccccgcgcccggcgcccctcgcccagccgtgactccctttcctctcggccgcccgactccgcgcgcccctctcg

SEQ ID NO: 5293 - DNA, 120 bp, Homo sapiens
  chr7:1281902-1282022
  hyper
cagcgcgggcaaggccggacctgcggtggagccggcacctgccgctccgcccgggattagggagctcccggcttgtggggggtgcgggcggccggtggtccagctcgcccgccccggccg

SEQ ID NO: 5294 - DNA, 30 bp, Homo sapiens
  chr7:1283900-1283930
  hyper
agtgtgagaacttccggagcccgcagcgcc

SEQ ID NO: 5295 - DNA, 211 bp, Homo sapiens
  chr7:1408559-1408770
  hyper
gagtcgggcgccagatgggatcgaacccagcaaggtgagaaatccgggcggggtggcagatggggaggccttccccggggaactccaggagaggggaggacagcgagggccccgggcgcggcctctcgtgtgcccccagccgcggggcgcaggcccgcagccccccaggggcgccgcagctgtcactccgcggtgagtggcgccatccgga

SEQ ID NO: 5296 - DNA, 12 bp, Homo sapiens
  chr7:1408874-1408886
  hyper
cgcggaccccgg

SEQ ID NO: 5297 - DNA, 577 bp, Homo sapiens
  chr7:1498631-1499208
  hyper
agctgcattcggtgtccgggcacactgaggccactgaggacagcctcggggggctgcacggtgggctgtgcctgcccagtcccacgcctcggctccccatcccccagccgcccgggcctcagtttccccgcccgtgtcagcgcgcagccgaacagcagaagaatcaaagggcgccaggcaggacttacatgaggtcgggccggtggcggtgcaggatggcgcagaaagccaggccgtcgcggaacgacgtggtcatgttgcagatattcacgtcgcggtagccctcgcactgctgccggcaccactgttgcagcgccctgatggccgccatgtgggcggcgcgcccgccgcgcggcggaaccgccctccgacaccttcccgcggctgtgccgcgaccgcccggccggcgggacagacgctgggaccgctacggaaccgccagacccacggcgcccagccccagctgagccggactgagggcgacgagtgccgggtccctaagagaagccgagcccggccccgcccccgccggccccgcctccttgtaggccccgcccccagccgccaagtcctgcct

SEQ ID NO: 5298 - DNA, 439 bp, Homo sapiens
  chr7:1571110-1571549
  hyper
cctgggactggtgtcgctctcagccgcccacctgccagggttgctggaaggaaggccgtggggaggcgggaggggggcaggtgacagtggccccaaggctcgtccctttgctcacgtgtggggcaggggctccggcctcttcccgctcccactgcgtgagttcttctgtgcctctgtcaagttcaggaaactgtgtatgtgcccgtgactgtgtgtgtctgcgtctgcacagcctctagatcctggggggtgggaccaggcgccaccgagaaacccagaaagccaggaccccgcctggccttggcccttgacctgggtccgcctgggacacagcagtggccctgcactgcattctcgcgctcacaccgtgtgtgtccgtgttcgcggggcctcccgtgtccctctcctggtgtcctgcgtccctgagcatgctgttttc

SEQ ID NO: 5299 - DNA, 30 bp, Homo sapiens
  chr7:1572312-1572342
  hyper
cgctgtctacaaggcgtgtgctttcaccca

SEQ ID NO: 5300 - DNA, 19 bp, Homo sapiens
  chr7:1703852-1703871
  hyper
cccccaggccgggctcggc

SEQ ID NO: 5301 - DNA, 260 bp, Homo sapiens
  chr7:1704118-1704378
  hyper
cggagtttctgggctgcggagaggccgttggacccacgtccggacaggagccccgcgcgcccatccccggcccggccatcctcggggcgcgctgtctgcggcctcccgcgccacccccacccctgtcccgggacctcctccgggaaagacacccggggagcagccccctcccctccagtagtcccctcccctcccctctccctgccctcttgacggtgtggggctccccggccggaggggcgcggcgctggcagcggggt

SEQ ID NO: 5302 - DNA, 30 bp, Homo sapiens
  chr7:1705014-1705044
  hyper
cctgtgagcacagccgtgtccccacccagg

SEQ ID NO: 5303 - DNA, 356 bp, Homo sapiens
  chr7:1706093-1706449
  hyper
aggttcggaggcgggcgcacccgaagttagcggccgccgagcctgggccggacaaacttccctccccgacgccgcggctggaagggccaggactccggacccctagggctagggaggcgccgcggggaccccgaaactttccggagcgcgctgagagcaaaaagccggctgggcagaaagagggggagggggctgggcgcgccttcgagtgcgctggggtagccgcggcgccccaagttgaaccacagacgaacccctcttcatctgaaacctggtctcggagtcggaggtggggagggagtgggctgtgggtgcctcgacttcgcaaagccggcgtgggggggcgcagcgccccg

SEQ ID NO: 5304 - DNA, 612 bp, Homo sapiens
  chr7:1708949-1709561
  hyper
ggaaccagaggcgggcgggggacaggaagcggggagggggcgccggcggggacgcgcgggctgcgcggggactggagagggtccccaggcgccggccgttctgcgaacgcgggcttgtccaggcaccgccggggcctgcccggcccgagcgtggagtcccgaggctcctgccgggggtccaggctgcccctggggctctgccttcgacgcgctgtgtagggccagattctgggcctctcttgactcagtttcccttcctgtaacatgcggacgggggcttccgcacaggcaggttgtcagggtgaaactgagccgaagagtgctccagaaccccctgaagtcctcacagaggttggggtgaatgaaggaaggaagcggggccagggctgggcagaggaggcccggcctgcgccctgcgttctccgcccctaggtccctgccctcccggataaggggcggaccgacgggaggacctgagaacgccttggctttgcttgaggtggtgggagtcgcgggtagcttgttcagccaacagctgtcgcccccactccccccacccacccacccaccccctccaccttttagatgtgggcggggagggccggggacgga

SEQ ID NO: 5305 - DNA, 47 bp, Homo sapiens
  chr7:1709617-1709664
  hyper
cgtcgccgggagagggaaggagcgggttgccgcggggagccgaggag

SEQ ID NO: 5306 - DNA, 30 bp, Homo sapiens
  chr7:1782562-1782592
  hyper
cccagctggctgcccgccaggccacggctc

SEQ ID NO: 5307 - DNA, 109 bp, Homo sapiens
  chr7:2195817-2195926
  hyper
cgtgtggcgaggggagcgggcgcacggtttcacggcgcgtgtggcgaggggagcgggcgcatggtttcacggcgcgtgtggcgaggggagcgggcgcatggtttcacgg

SEQ ID NO: 5308 - DNA, 31 bp, Homo sapiens
  chr7:2250419-2250450
  hyper
gcaggagactaggggtcgacccccacagcga

SEQ ID NO: 5309 - DNA, 30 bp, Homo sapiens
  chr7:2281348-2281378
  hyper
cactgactgctgaccgtgagtcgctgtctt

SEQ ID NO: 5310 - DNA, 78 bp, Homo sapiens
  chr7:2524319-2524397
  hyper
acagccgctgcctgcacgtagacatgaagcacctggaacatccgaattcagacgtgagcatcaaaaacaccctggggc

SEQ ID NO: 5311 - DNA, 30 bp, Homo sapiens
  chr7:2559951-2559981
  hyper
gcgggcgagcggggcggggacccaccatct

SEQ ID NO: 5312 - DNA, 155 bp, Homo sapiens
  chr7:3018194-3018349
  hyper
aaaggaaagagaaatgaagaacggcaactcggagggaggagacggtgggggtggcgcgggcaccgggtgcaggctgagaaagcgagagggcggtccggccagggggtgggggtgctgcaaccagctctggtcacgccccttctcctgagagctcc

SEQ ID NO: 5313 - DNA, 226 bp, Homo sapiens
  chr7:3083330-3083556
  hyper
cgcggggcgcctcctccacgcaggcctccggcttcctccaggcgaccaggccctccgtccccccgggcccggagccgtcctccgaggggcgccgcccgcccaggggctgcagggccgggagggggctgcgggcggcgcgggcaggagtccgaaggccagaggaggcaggagagaaaaaaggagagaaagtatgtcataggctgggaggggcgggggagggaaatgc

SEQ ID NO: 5314 - DNA, 122 bp, Homo sapiens
  chr7:3341286-3341408
  hyper
gggccccgggcggccgcggggatccccgcccggccgcgcccgcccctcgctggcgccgcgccccggcccggagccctcgcgaccccgggcggcgcccgagacctccggcggggacacggcgg

SEQ ID NO: 5315 - DNA, 468 bp, Homo sapiens
  chr7:3341569-3342037
  hyper
cgaacttgagcagcgagagtgtgtccggggtccccccgcttcccggcccgggtcgggatgcgccttgctgggggctctagggagcccaggggctcctccacgccagactcggaggagagggaaacggagccccgtagagcctgcaccccgtctgctactttgcgttttattttttttataccgcagtagcacaaacaaaaatttttaagttgaggacccatttctcagctccttaaaaggatgcccgagtccccttcccattgcatggatgaaaaaggggctggtctgtacctgagtcttcgcaccgcagggtctggtttccggtgagtgacatccagaagacttggaaatatcaagtgccagtcgctgtgaaaagccttttccagcccctccccagggcctcgtcctctccccagcccccgcctgctcctgactcccccaagtcccaaagcccgaccccaagtgggt

SEQ ID NO: 5316 - DNA, 51 bp, Homo sapiens
  chr7:4770078-4770129
  hyper
gttcctggaggagggacgcaggcccagtggagagggcgtggtttgcaggca

SEQ ID NO: 5317 - DNA, 31 bp, Homo sapiens
  chr7:4814425-4814456
  hyper
atcgctaccctaggcccgtccctccccaccc

SEQ ID NO: 5318 - DNA, 30 bp, Homo sapiens
  chr7:4815145-4815175
  hyper
cgccccgccccagtcgctccacgccaaagc

SEQ ID NO: 5319 - DNA, 156 bp, Homo sapiens
  chr7:4922550-4922706
  hyper
atggtccgcagccccgccagggccctgccaaccccaccaacaggctcctcctgcgaggccccaggagctcggctcagcatctgttatcttggatgcagtatttgtcgaggggctggaaatggtacataaatagccgggaaacaatgctttgagctg

SEQ ID NO: 5320 - DNA, 134 bp, Homo sapiens
  chr7:4922839-4922973
  hyper
ggacgaagctccccctccagggcacagccgggaaaactgagggccgagagtcccctggagttgggggtccggggcccacgcggacagccaggctcaggagctctcgggggtcggcagcgcggacccccggatcc

SEQ ID NO: 5321 - DNA, 181 bp, Homo sapiens
  chr7:4923327-4923508
  hyper
ggcggcgcaacgggcggggcggggcctcaaggggacggggccacaaagggtggggcgggggagaacaggtgggctggagctgggcctcggcgcccaataggcagaaagaaagcctcgaggaggcggggtctccaggagaggggcggggccaacctgctagaaaaggcgggctgtgctctgg

SEQ ID NO: 5322 - DNA, 30 bp, Homo sapiens
  chr7:5085237-5085267
  hyper
agtaaagacaaatgcgaagttcaatcaggg

SEQ ID NO: 5323 - DNA, 31 bp, Homo sapiens
  chr7:5329219-5329250
  hyper
gagaagggactttaatcgcaaaacgccttca

SEQ ID NO: 5324 - DNA, 1467 bp, Homo sapiens
  chr7:5459413-5460880
  hyper
tcccgccgagcccccgggactccagttcctgaaaagttccaggagaaaaatcaaagagagagcaaaatcggcgagctccgccgagcgggcggggcaaggccgaggtggcagctcctgagagaccccaaggaagaggggagcatcgagggctactctggaaattgcaaaaatccgaaactgcaattcgaacaggaggtggatttttttttttttttaagtcgagacttgggacgccaagcacaaaagccagggacagcccgggaaggagggaccaggtgtcctggggcggccgccgggcaggtctggaggtccccgagtctccttcccacccctctggctgcagcggccgcggactgactggagggagagtctcccgccccggcgcagcgcccgcccgggtaccgtccccaccgcgcctgggcagcccgtctcgggaaatggtggaggccgcgggaccttctcggccacctcctccagcagctcgatgtgagacccagggttttcccctccgccgcctgggccctgcccgacccgctctcttctttccccctaggttcgggaccgcgatggtccggtttcggtgtccctgccgcacctccgcaccctctttcgcgctggaaaacaaggggtccccgagggccggggtcgccgccctcctaccggggtgcaggttcccagggccgccgttctcccggggaagaaaggggcatcccgcccgccccgaggccagggtcccaaggctggggtcaccgtactcccgcatcccccggcgtactcccgcatcccccggcgctcggtaactgccagggacccggctcggcgcgagtggtggagctgggaacagaacccaggagggcccacgagcgccaaaagtagcgtttgccaagaaaaagattcgagctcggggagcgggtgtctcgcggggtgcgggggccggtttgttcttttctcgcccagattttgaaaactccagcccaggctcgtgccgccggggccccggggattggaatcgcccccggtggctcgggctaccacaccggctttcggctcacgagggccaagcacgctacggaaaaggtagccgagccgcgcgacactctccaccgccttggctccgggaccaggagtttcccagccctgggagccgagtctgcccgcacccccgtggccgaccgaaggagagtcgccgagccccggccgcgagtgcacaggaggacccggccgagtggatctccctgggaagacaggaggggacgggcacggcgcggggcacttacccgggtgcggatggagattcaggccggccatgtacttcccgggcggcagcgggccgggcaagcccgaggcgggcaagcgtccggcagtggccgcgcccacgcggtggctgtccatggccaggccggacagcagcggcggcgggggaccgtgcacggaccgctggggcccgaagtctcggccatccatcct

SEQ ID NO: 5325 - DNA, 222 bp, Homo sapiens
  chr7:5462089-5462311
  hyper
gatttgtcctttgccgattctcgtgaggatgggagggggtcttggagcccacccttccctcgatctctgtctgcagcagctcacattcctgattccgggaggcctgggctctcttaagagaagccgatcacgccaaagccaccggctcccgggtgcccgcccggcgccctgcactccgcgcccagccccccgagcaggagaccccctcggctgcaaaacccc

SEQ ID NO: 5326 - DNA, 30 bp, Homo sapiens
  chr7:5462587-5462617
  hyper
cagtttggggaagtcggggtgaagccccct

SEQ ID NO: 5327 - DNA, 30 bp, Homo sapiens
  chr7:5463612-5463642
  hyper
cgccgccaatcacgcgcatgtaaacacctt

SEQ ID NO: 5328 - DNA, 188 bp, Homo sapiens
  chr7:5464743-5464931
  hyper
ttgtacttttattttgcgctttcagcaaaatcctttctgggttgagtagccgtgagctgcccgcggccgacctacctgaccgggggcgcagggagtgcggaccacgccagcaggactgtcctgggggcccccgcaccctctctctgcagccccccgagcccggctaggcattacgtaccctggaaagg

SEQ ID NO: 5329 - DNA, 483 bp, Homo sapiens
  chr7:5465309-5465792
  hyper
ttggaagctgtagctccgctggggaggagggaggagtgagaaggaaagaaaggaacaaaaatagccggagccgaggggaacaagccacggtgtccgcgtttggagctgggcgtgcgggtctcagtggcggcctcggcattcggggcggcgggaggcgcccggtgcatccccgggacggccaggagcaaagacggagaggagaggggggttagagaaaggaggtattgtgtctgtgtgccttaggggaggaggggactgcaggaatcgaataaacgcagtcgagctgcgcggggctgctggaagcccaggcgggggaagggggccgtgtgtgggggcgcagagcgcccttgagccttacgcagaggtcttgtgtgttcctagttaagccctcccacgcccgaggccccatcgcttcctctccaccctctttacccaccaatattccaagcccagatcctaattccccaccgcattaccccgccc

SEQ ID NO: 5330 - DNA, 248 bp, Homo sapiens
  chr7:5466027-5466275
  hyper
ctggatttgccaatggcgtttgcatttttcaagtgtgcgcctcggcggtgtgacgaacccagccggtatttcattagggccgcggttcggggcagaggaggtcccctccccgcctgggctttgtgcgcccagcccccttgcaccggcccttccatacctgcccccggcacccactccatatttgcgcggccctgcagccaccggagtccggccggggagcagggcctggggacgcggtggtggtggtg

SEQ ID NO: 5331 - DNA, 1436 bp, Homo sapiens
  chr7:5466585-5468021
  hyper
agggtccagggaaacgccctccccagtatggcgggccacattgaaatgtaaaaaccaggcctgggcgctgtggccatagggcacaggccataggccaccaggtccagccgccatcttccgcgccccacccccattccatcccctccccctccccaccccctcatacttttgtttacccagcgggataggtggccaaaaactgtggacgcaattgagtgaaagtgcgtgtgtgtgtgtgtgtgtgtgtgtgtgcgcgcgcgcgcgcgcgtgtctgtgtgtgtgtgtgtttgactgggtagaaaatcggctgggggctgggggggtcttccttgtagccctaagccgcagctgcgggagaagctgccctggctagccgaggcccggcccagcgtgcttctccgcggccagcctgggccaccggagccgaggccttccctgtgttcctaggccgctggctccggcctccgctccctggacgcctcccgactgacaaaattctccgtctttgttttaaaaccaaaggacaggccaaccttgagcccggccgtcacccctgtcgcgcttttgttggcgcaggctcggccccctacaccgggctggtgcagctcccgcgatcagacggtctctctcaattcggcgttgaacccggttcttcccaaattctggtattgctggccgcttggacacgttctccccttatccctcccccagcggggaaagaaaaagccaggatcctttccttggcgcggccacccgagccactccacccgtcgcgccaaccgcctttccaggtggggaccaaagcccccactctccgctggcatctcattgaagggcacccccccgagggattgccagcttctgctgccagctgagaggccgtgtggctgggcgtcttaagcgccggtttccgcaggtcccgtgtctggcgggcgcggctaaaacccggagaggctgtgcccgggaaagccacgttcgccgtcccctcgctgcgacaggcccagccgcgatacagcgccaagtctaggtcgggccaacccagccaggagctgcccggacctgcctgaaagaccagggacgcggcgccagcgccccacaccccaccgagaccagggcgcaaggcgggcagaattcggactgatgcgccaggcccagccccgatggattccagctcctctcggccccgcctccggccctggcctcttcctccagccggggtcgggtcctccactccactgtttggctgggaaaggaccgagacgcgctcagtgcacagggggccggctgcggccataaatctccgggcgggccctccttcccgctgctcacgccggggtgctccgggccggtctcgtgtcccgggccacgccgcgcaccctgctcaccccatcacggcctggggacccggagactgcgcagggaaccacgccaggagc

SEQ ID NO: 5332 - DNA, 257 bp, Homo sapiens
  chr7:5594637-5594894
  hyper
gtctcagcttggggtgcgggggccgactctgcccgggctgggtggatagttgttatcgggagctcccaggcccgcgcggctcacgtgggccgcagctcgcggcgcctcccgcgtcccagggccgcgaggcgctccgggagataagccaggccccgtgcgagtccagcgcggacccggccggcccccagcccgcccctcaccggcccccaccccgcccctcggccggcccggcccacttggcccgagttcctctccat

SEQ ID NO: 5333 - DNA, 920 bp, Homo sapiens
  chr7:5632265-5633185
  hyper
gtgcggcgaggacaccggtggggtgagagcaccggcggggcagcagcgggggccgcagcgccgggtccctcggcccggggcccctcccgcgcggagccaggggcgggacaggggggcgtggcctggtggcgctgacgtcacctcgcctataaaatgtccggggcgccgctagctgggctttgtggagcgctgcggagggtgcgtgcgggccgcggcagccgaacaaaggagcaggggcgccgccgcagggacccgccacccacctcccggggccgcgcagcggcctctcgtctactgccaccatgaccgccaacggcacagccgaggcggtgcagatccagttcggcctcatcaactgcggcaacaagtacctgacggccgaggcgttcgggttcaaggtgaacgcgtccgccagcagcctgaagaagaagcagatctggacgctggagcagccccctgacgaggcgggcagcgcggccgtgtgcctgcgcagccacctgggccgctacctggcggcggacaaggacggcaacgtgacctgcgagcgcgaggtgcccggtcccgactgccgtttcctcatcgtggcgcacgacgacggtcgctggtcgctgcagtccgaggcgcaccggcgctacttcggcggcaccgaggaccgcctgtcctgcttcgcgcagacggtgtcccccgccgagaagtggagcgtgcacatcgccatgcaccctcaggtcaacatctacagcgtcacccgtaagcgctacgcgcacctgagcgcgcggccggccgacgagatcgccgtggaccgcgacgtgccctggggcgtcgactcgctcatcaccctcgccttccaggaccagcgctacagcgtgcagaccgccgaccaccgcttcctgcgccacgacgggcgcctggtggcgcgcccc

SEQ ID NO: 5334 - DNA, 30 bp, Homo sapiens
  chr7:5633474-5633504
  hyper
gccctttctcgctcgcggcgccgctgcggt

SEQ ID NO: 5335 - DNA, 30 bp, Homo sapiens
  chr7:5634149-5634179
  hyper
cagatgcggcggggcgggggaggggatcgg

SEQ ID NO: 5336 - DNA, 30 bp, Homo sapiens
  chr7:6523871-6523901
  hyper
ccccttaaagggggcgcgccccagcgcagg

SEQ ID NO: 5337 - DNA, 30 bp, Homo sapiens
  chr7:6543099-6543129
  hyper
ggcggggttgtggtcgcggcacctgcagga

SEQ ID NO: 5338 - DNA, 207 bp, Homo sapiens
  chr7:6654928-6655135
  hyper
agacacccaggcagtgacagtcgccaaccccgtggcgcgaggacacgcgcagcagggatgcggcacagcgcgcgctgcgctcggcaccggccagcccgggacgccccaggggccgccgcatcgtgtcccccgggccgggtgagtggccgggccgggaatggttaagcccaccgagctgcggctgcctagagcggcggcggcgacggc

SEQ ID NO: 5339 - DNA, 30 bp, Homo sapiens
  chr7:7044631-7044661
  hyper
aacttggccatcatgacagcacccagccca

SEQ ID NO: 5340 - DNA, 78 bp, Homo sapiens
  chr7:7464015-7464093
  hyper
ttgcttggccatttgacggcactggttttgtcataaggcagcaccgtaggtacctaagaagtgcgttgacctgtgata

SEQ ID NO: 5341 - DNA, 405 bp, Homo sapiens
  chr7:7605663-7606068
  hyper
tggcgatatagccagactccgtctcaaaaaaaacaaaacaaaacaaaaaactgatcataccacttgcctgattaaaaactttcgatgactctaacattgcctttaggtaaatgccatccaaactcactaaactggtttccaacccgtttctgaaagcaccttaatctctccccacttcctctgctcattcatccatacctactgcctcctcactgctatgtcctctctcctgacccggcacttgctctttcccagtcctagaaggctcttctcttccagttcccactgcccttttccctttcctggctaatcccatactcatccttcttgtctcaacctagtggtccttaaggaagctttgctgacccccgacaccgagcgggcgtccctcctgtgtagcactgt

SEQ ID NO: 5342 - DNA, 562 bp, Homo sapiens
  chr7:8009321-8009883
  hyper
ccgcagccccggccgagcaggcgccgcgggccaagggccgcccgagacggtccccagagagccaccggaggagcagctcacctgagagacggagccccggctcgcccgtgtgcagaggtagcgagcccaaccctcccgtcctcccgggctgcgtctccccgacggtgccctccgtggaaacttcagcctcttcgggcttctctttgctagtgcattatcgaaggtgtgaaagtggctttgggaatctcacccccctgcggtcgctgtggggcttggaggagcgaactgaaaagcgacttttatttgaccctcatgccgcccctcagagtctctcttccatcactcgcctgcttcgagaggtttttcagtttaagagctggctagctcattcgtgtgtttgccgtttgtagccggggaaggagaagctgggcgaaacacttaacacgcacacaaactcttcagcagcggataaggtggcggttgtaatctctaccgtctctttgtgcttttctgcaaagttcctaacgtgcctgtaactaccgggatagtattttatttttta

SEQ ID NO: 5343 - DNA, 391 bp, Homo sapiens
  chr7:8473064-8473455
  hyper
aaagacagagacagccagagtcggagcacagaggccgagtctgggagacgctggttgagtgggaggtgtcagtagcgagggaggtggtgacggctcgaagcatcccccgtcctcctcctcccccttcacgctcagcccagccggcggcgaggagtccagaggccaaggtcgcccagtcctctcggctgtctcgagctgaatggctggcagtctgcggctcccccgcctccggcccggcagccacaggtcggaggcgcccggcgtcggcgctcgaggccggcaggggcgccctgcaccctcccgcgcccttccccgccctacgcgactcccggctgctcttcccgccactcccctgggctttgcgatcttccctacgccccccgggaagggg

SEQ ID NO: 5344 - DNA, 526 bp, Homo sapiens
  chr7:8473479-8474005
  hyper
cgggagccacttgtccctgtgggcccagcccgcgagagcctgagagccggatctgtttacacagggtactaattagtctttgaggaatcattcacccacgtgccaaagtaattgtccgtgtcaggaaggtaggcgtgccaagccgcggctctgcggagaaaccacgaccaccgcggccgccggaaacccaaagcgctccagagcgtccccgggtggccgggcagcaccagggacagcgcccgggactccactggggaccggctcctgggcttcccagcgtcgcgggtagaggtacagctgctccgtgtgccgcaggctccagattctcgccaccccacccctccctcagaaactcggactgctctcgtctgccgtgtggttctcttttcttccgaaaggccagtgtcttatctctccacttcaagtccagaggacttgctcagtctcctccccttaagtcatttccaccatcctcaggcagctgtgggaagccgagagtcctggactgttcgtccgggtgccagcg

SEQ ID NO: 5345 - DNA, 30 bp, Homo sapiens
  chr7:8474529-8474559
  hyper
tctctagaagttagcgaccggctgtaccct

SEQ ID NO: 5346 - DNA, 472 bp, Homo sapiens
  chr7:8476377-8476849
  hyper
tctaggggtgaggtgcgctaaagcagcccgaactctctgatgggctacacctctgattggaggtgatactggcgctcctcaatcccaagagccttagatagaacccataagcctgaaagaattgccatccctacaattgacagcgtttctcggccgttgccctggtgcatgtggctgcaaagctgcgagttgtgtgaattctgtgtatgtgagtgacacgtatatatatgtgtgtgtgaatgtgtatttaaccgatttcagcttcaatccaagaaccctcaatgttgcctgtctttgcccctttatcgcctgaccgtagcagccgcggacgccagagggcgctgcgcatcagcgtcctcgcccacaggacaccttggggtaaacaggtgaaagccagggcagccaatccaaaagaacagcctttctgactctgtcaccgaagtctgtgcctttacccgctggaacgcaggcg

SEQ ID NO: 5347 - DNA, 30 bp, Homo sapiens
  chr7:8477049-8477079
  hyper
gattcccttgaccatcgtaacccgcttgcc

SEQ ID NO: 5348 - DNA, 30 bp, Homo sapiens
  chr7:8477582-8477612
  hyper
gtacttttgtgtgtcggggactagaaacca

SEQ ID NO: 5349 - DNA, 30 bp, Homo sapiens
  chr7:8480285-8480315
  hyper
cgtcgacaatattttcgaaagggcatttga

SEQ ID NO: 5350 - DNA, 480 bp, Homo sapiens
  chr7:8480571-8481051
  hyper
taacactcttcttgcgctcctgtaaagcaagtgatggaagctctgaaagtttgcctgctctcaagtgggaagttaggaagtgtgcgttctttctgatttttttaaaaataaaaagtgtctagctttgattcgattcaggaaagctcctcttgggcaaccattgtccgttaggggcttcagatctcattttaagaccttaacagtcctcgccgttctaattaaggaaaggcaggcgagcctgccagccgagagcggttgggtcagcggcttcatggtgcagccgagtctcaaagcgggtctgcactctcgcctccctctgcattctcttagccactatttgcctggtcccgtcgcgtgtgtgcaggaagtttcagtcttgatttatccactagtcaagttcccgaccagctctttttctggatgtcagcactaaccccctcccggagcttggtaaacacagcgcgcgcatttttctgcctc

SEQ ID NO: 5351 - DNA, 30 bp, Homo sapiens
  chr7:8481380-8481410
  hyper
ccaagagcgcgtttgcgcattttccaagtt

SEQ ID NO: 5352 - DNA, 38 bp, Homo sapiens
  chr7:8482084-8482122
  hyper
gcagggggaggccgcgcgtcctcgccacaccggaagga

SEQ ID NO: 5353 - DNA, 627 bp, Homo sapiens
  chr7:8483359-8483986
  hyper
gcctcattattttccgtggttaggctcgccagcgtggggcctgatgcagcgtgaaatctatcatcattagacccgggatggagcggcgggggggagtttctctttacttaccaaaccgcaacaacaaacaaacaacgacgaacaaccgccccctacaaacactcattctcacacaacgttgccctacctccctcgccgcttgccctggccgctgttgcacactcccctgggggctgtctgcacgccctagagcagacactgcggtcacttaaagtgcgcccagttcctccaccgcagcggtcacaccgttgatttgatccagaaataagacggatagtaccgagcgttggcgctaggggttgtctatgtcaaaggcgaaggttggctgggaagttctgtccgtttctcttgccttagcataggagtcaatccttttcttgtcacccgattctgcaaattctcgctgtattaaaggagcagagatctggcatgtagtgctccattaacccgtagcataagttagctcggacataaggcaagccctcgagaagggaacgaatcagaaggtgaaaagagcggtcggaaggtgaggaagagaaggtttaggcgcaacgcctcggaggtatt

SEQ ID NO: 5354 - DNA, 30 bp, Homo sapiens
  chr7:9580107-9580137
  hyper
agcaaagtgttcaagttgcagcctggctac

SEQ ID NO: 5355 - DNA, 494 bp, Homo sapiens
  chr7:11871435-11871929
  hyper
ctgccggcgcccgggcgtagcagcagcagcaggagcagcggcagcggcagcggcagcggcagcagctgcaggacgccccggcgcggccccgcagcgccccggctcccggacgcccagcgcctggcttgcagccccatgccgcctgcagccactccagggtccagagccgtagcacgctcggcagggaatttttctccgctcttggaacgtcttttcaaagagtacagaaagcaaagctctttcctgctattgttcgcttcagatgagaaggagggagagcgcgtctaacaccagggaacaatagcgtccgcggtggtggccgtggccgctgccgccgccgccgccgcctctggcggggatgctgctgccgctgccattcctcgcagaatggcaggtcccggcggctccggaggcaactgtcctcagggggccccagctgactgagcaggtctgctaggtctgggaggcagcgcagcccccgccagctggagggg

SEQ ID NO: 5356 - DNA, 30 bp, Homo sapiens
  chr7:12250706-12250736
  hyper
tgaagtctgggggacgcgaaggtaatgaaa

SEQ ID NO: 5357 - DNA, 205 bp, Homo sapiens
  chr7:12443514-12443719
  hyper
ggatagagccttcgcgtaatccgtctgcgactcctcccttcccattttggctgctggctgacctgaaagccacgcccaacctgtccccatagcccagcgtgtaccggcagtggctccgccgccttggatgtcaccgtgcagtcgcacagccaggagtcaagctacagggatgtagctctccgcccgctgcgtcttgctgttctaa

SEQ ID NO: 5358 - DNA, 397 bp, Homo sapiens
  chr7:12610144-12610541
  hyper
tgaatctcaagacttctgggacgccgattccgctcctggcctggggcaaggcgtgggagcttggaagccagcgctgcgctccccgtgggaagcgatcgtctcctctgtcaactcgcgcctgggcacttagcccctcccgtttcagggcgccgcctccccggatggcaaacactataaagtggcggcgaataaggttcctcctgctgctctcggtttagtccaagatcagcgatatcacgcgtcccccggagcatcgcgtgcaggagccatggcgcgggagctataccacgaagagttcgcccgggcgggcaagcaggcggggctgcaggtctggaggattgagaagctggagctggtgcccgtgccccagagcgctcacggcgacttctacgtcggg

SEQ ID NO: 5359 - DNA, 1100 bp, Homo sapiens
  chr7:12726347-12727447
  hyper
ggccggaagtcccatccgacctcgcgggcagccagcgctaggccgattcgaactcgaccttgttttggcgttgctaggagacgcggctcctgcgcgccccctacaggccggcgcccgggcggcgcgcgggcagggggcggggactgtcgcgtggagctgccgggcgagcaccgttagggcagcctggcgcgcggcgcccgccaggcgcccagtcctctgccatcgcccacgcctccctggtgccagggaacaggtatcagcgcgcctccccagcggctgggagagacgctgaatgaagaagagggaaggacggttagtcaggtgagccgcggcggggtgggcggccggggcggccacgccctgccgagggagaagagccggtcgtgtgcggagggacagggtgaagggatcccacttcggggaggatgggcttatcccggcgggcgcgccaggtgggatctctagcgcctcaggggcccgcgcggcaacagccggcaccctcgggcccgcggacaaagggttaacgcgttggcagtgactgcgggccccggatgtgagagccttggcttgacgccctggctgcgctgcaggtgcgccgggccgaacggagccggcagcctggcggcgacctgaccgcccgaggctccccttcacctgcagcggctgctcggctccctctgggaacgccgccttttctaacttaagggcaacaggtggtgccggtggaccgagagagagctcagctccgccgcgctgggagcggcagttaccctcaccaattagggagcgggggcgggagttgcatggcttccctgatgcgggtgaccaatgggatttgggatcatgagtggaccgggaggagtgggcgtggtcggagtctgagtccaaggtttctcgtgcggcaactgccagagctgcttggagagctaagctggaagggtgcttatccctgcgtagaaacgcctgccaatgctttctcatttggacccagactccagatcgggaggtgagaacgttgttattttgcaaggggtaggaggtaatagtgatcttgggtatgctgttaagcatgtggaattagattccgaagataggactat

SEQ ID NO: 5360 - DNA, 30 bp, Homo sapiens
  chr7:14028675-14028705
  hyper
atgctgctgctcttcgcaaatctcagctca

SEQ ID NO: 5361 - DNA, 371 bp, Homo sapiens
  chr7:14029345-14029716
  hyper
ccaaactgatggatcgctgcctcccattggctccgcgtctctttcacaagatcagatttcgggctgtcaatcaggcggcttgctgccccttcccgcgggtctccctcgcccctctgccctagggggtgctcggccggtaggcgctgggtcctcagcctggaagcgccacggagagactcgatttcctctgtaacccgctgcttattgttaaggcgcctggggatactgaaaccgtgtgtttcgagtcgccagttcccattattggggtgttaggtccactattgggctggtttccttaaagtactgttgtgcggttctggtatacccttagagccgcgatccacaaagcccgtaccgccttattcagctgc

SEQ ID NO: 5362 - DNA, 180 bp, Homo sapiens
  chr7:14030951-14031131
  hyper
ccttctctgcagcccgagcctgacgggtatccagggtaaccgcgagggggcggagcttcgggttaggtcccggcgaggttcttcccgcagccaataacgagccgtaaatccccagcccattgttgtttattgctgacccctcagcgctccgctaggagattggccgctttagggaagggg

SEQ ID NO: 5363 - DNA, 697 bp, Homo sapiens
  chr7:15725484-15726181
  hyper
ctcgagggtgcctggcgcgcccttacctgagctgtcgcttttcctcttgccgccgcttcgcttctccgcctccgcaggtgacagtgcctggcggccgtagtcccccggcgcgcacgcggccccagtcggggtgctggagcccaagctggaagagttggagcacaggacgggcgggctgctccccaactctgggggccctccagagtcgggctggaggcagaggctgtgccgagccgcactcggtggggaagacatctgcgggaggtgccagttggtttgcagagcctggtgctgctgctgctgatggtggtgatggtggtggtggtggtggtggtggtggtgccccctgtgatgctggctggcaaacatgccctcttcgttggggtatcccgcgattatgcaagatgaggaagaagtagagagctcggggtaagacatatggtcagatcttccatggagggcgagagaggattgggagaacgggtgcaagccttgcgccgtggcgtgagggctgcgcaggcagccaaagagcgggtgttccatagcatgcaagtttcgggttccaggcagaagacttcacggcggttccaaaggccaccaccctctgtcactttttcactggaaaccgtgtgattttttttttaacctcccaaagcaatagcggtgcacttctgcagagctcggataatcccggtcc

SEQ ID NO: 5364 - DNA, 30 bp, Homo sapiens
  chr7:15726411-15726441
  hyper
gctcagcctgcgccacgcgctcccagttcc

SEQ ID NO: 5365 - DNA, 249 bp, Homo sapiens
  chr7:15726745-15726994
  hyper
aaaagaccagagctagtttggcgcaccctcgaagtttttcaaactttgcatcttcccgtgccccgggcgccgcagcgcgcctaggttttcgcagctggtttctgtcggtgggttgttaataggctgggacgccagatctgaggttgcggggatgagcaccatggcctggaaaaggcggttctcagtgcagaaagaagacggacctggttgggtgggtgggaggaaggcgtgagtctgaaagggttgcag

SEQ ID NO: 5366 - DNA, 30 bp, Homo sapiens
  chr7:16685665-16685695
  hyper
aggccccaggttgtcgccgtacccccacca

SEQ ID NO: 5367 - DNA, 30 bp, Homo sapiens
  chr7:16793124-16793154
  hyper
gcgtggatctcctccgagccccgccctccc

SEQ ID NO: 5368 - DNA, 123 bp, Homo sapiens
  chr7:17338150-17338273
  hyper
atggaatccagatgggcgggggcaagcaggacggggcggggctacgcgggatctgggcggggcggggccggtgaggggtcgggggtgctcctgctattcagccggtgcgcgcggcggcgggag

SEQ ID NO: 5369 - DNA, 92 bp, Homo sapiens
  chr7:17338646-17338738
  hyper
tcgcccaccctcactgcgccaggcccaggcagctcacctgtactggcgcgggctgcggaagcctgcgtgagccgaggcgttgaggcgcggcg

SEQ ID NO: 5370 - DNA, 31 bp, Homo sapiens
  chr7:17339051-17339082
  hyper
ggattaggtccattcccggcactgcccgtgg

SEQ ID NO: 5371 - DNA, 88 bp, Homo sapiens
  chr7:17339555-17339643
  hyper
agcaggtgggagtggatgcaacggacaggatacggtggaggatttgtattcttcagacatctttttcggaagcttgcttatcactttt

SEQ ID NO: 5372 - DNA, 195 bp, Homo sapiens
  chr7:18125866-18126061
  hyper
gacgttccaggtaccgccccacaatgctacctcctctttaaaagaagtcgttcagctggggcgggctggcgctgcgtggcgcgcacctgagcggccggggctccccgagccacggggggcgcgagagggcgaggcagcggcctggcttctccccagcaccgttctctgtcacggccgccgcctgaccatcacccc

SEQ ID NO: 5373 - DNA, 375 bp, Homo sapiens
  chr7:18126082-18126457
  hyper
cgcttcagaaatcccaagtcgtcttaggttccctggtccttcccctgggggggaaaaaaaacgctggtgcagcccagagcccttttccgctccaccccgggatgtcctcgctgccctcccgcctcccgcgcgtccttcccagcgcgtcggccgcgcgcccaggtgttcccgcgtccgtaatcccctccggcccgcgcctcccggcccgccctgcgggtctccagcgcctgggcccgcgctctcgccgcgggtccttcctcctatccccacccagccccgcccagcctccgcggcgctggggctcccggccgagcctctcctcccacctccgtcccctacttccctccccaagaagtgctatttttagcaaattct

SEQ ID NO: 5374 - DNA, 229 bp, Homo sapiens
  chr7:18126465-18126694
  hyper
cgccgcccgctcagctcgcagctcgcagccgcccgctgccgccctcccgagccccccccgcgcggcggcggcggcggcggcggcggcggcgcgtcccgcacatcgcgcagcgcgcaccgagccggccgcgccgcgcccgccgctctcgccgctttcgccgcggtctcctcctctagcgcccgccgcggccggtaaatctcggctggaggagcagcggcggcccccgagt

SEQ ID NO: 5375 - DNA, 153 bp, Homo sapiens
  chr7:19146031-19146184
  hyper
cggcgcacatttcagcttttcagcttcacggtggagctcgcagtaattgagtcgcgagggttatttttcctggcctcacctcgcggtcctgagcctgcagggagctttcggaaagacatcgccccctccccctgagtccccggcagcttctga

SEQ ID NO: 5376 - DNA, 33 bp, Homo sapiens
  chr7:19146237-19146270
  hyper
cggctagaggttgaggccggaggctgacaccac

SEQ ID NO: 5377 - DNA, 44 bp, Homo sapiens
  chr7:19146484-19146528
  hyper
gggaaaggttatcagcggctccagatggacgcccgtaggcaggg

SEQ ID NO: 5378 - DNA, 638 bp, Homo sapiens
  chr7:19146902-19147540
  hyper
cttcttggagacaggctacagcgcttctaaacccaatacgcttttctggagtcctcggaacagctggccggggcttttagcacacgggacgggaccttcgcctttgcctgtttttttttcgaccaggagaagcaggtgcgagagtctggggcttaggaggtggaaggcggggaaagagaatccactaggtcctcgtgtagagaacaacagtcgctccttagatattactccaggacggaaacctgattgcaaaccgctgttccttcgaaacttgcaaaacccggaacagaaaactcccgcccagccaattttagctctcgctgaactctcccgcctgcgttacgtttgcacagcaactctttgtaaatgtccgagtcctctcggaggaaagatcgttagggcgacgagaacattaagaggggacctggagggcagatatcctcgatcccaagagagcaactttgtcgcctcagaaaacacgccaacttccctcctgctctttccttggtcaactcagaatcaaccgattgtattgaaatctcctgaaatcccgaacagggattggcccagtcggcttctgaaaccgaggccggggaatggcaggaatggggggcagagaggatcggaaagaagagtcc

SEQ ID NO: 5379 - DNA, 104 bp, Homo sapiens
  chr7:19155957-19156061
  hyper
aggagaacaaaaattgaaagccgaaagaaagggtggcgctgacaaaacggtccttacccgtgaccctgggtgtctctgtctcccctcctgtcacgcacactcac

SEQ ID NO: 5380 - DNA, 7 bp, Homo sapiens
  chr7:19156125-19156132
  hyper
cggcctt

SEQ ID NO: 5381 - DNA, 442 bp, Homo sapiens
  chr7:19156303-19156745
  hyper
ggccctgctgagggggtggggggctccgcctgctagtgggacgcggacatggaccaggccccctccatcctccagaccgagaaggcgtagctgagccgctcgtgagccacatagctgcagcttgccatcttggagtccagctcgtcgctctggaggacctggtagaggaagtcgatgtacctggccgccagcttgagggtctgaatcttgctcagcttgtccgagggcagcgtggggatgatcttccgcagcgcggcgaacgcctcgttcagcgactgggtgcgctggcgctcccgcacgttggccatgacccgctgcgtctgcagctcctcgtaagactgcggactcccgccgccgctgctgctgccgccgccgccgcccgcgccgccgccgccgccacagcccgcagacttcttgccgcgcttgccctgggccgggctgc

SEQ ID NO: 5382 - DNA, 511 bp, Homo sapiens
  chr7:19157055-19157566
  hyper
cggaggagagagcaggaggacggacgggagggacctccgcggggagggcgcgcgggggaggcggggagggaggcgggagggggaggggacggtgtggatggccccgaggtccaaaaagaaagcgcccaacggctggacgcacaccccgccaggcctcctggaaacggtgccggtgctgcagagcccgcgaggtgtctgggagttgggcgagagctgcagacttggaggctcttatacctccgtgcaggcggaaagtttgggggcagcagtgtcattggcctgacgtgaggaggagggacttttcgaagttttataggaaagtttccgctttccagtccccctcccccgtcccacctcccttcctcggggtctaacaattcgtcctcccaaaccattcaaaaacgacctggcccgggcggccggcccctccacccgcctcctagccgccctcccccttccctccccgtcgccttcctccggcgggcgcggggcgatttccttccccgccgga

SEQ ID NO: 5383 - DNA, 411 bp, Homo sapiens
  chr7:19157633-19158044
  hyper
cggtggcagccccatccggagtggctgtgacagcagcaatggcaacagcttctacacagtgggtgatgtctcatctcgcccaagagccctctaggtccgtggggccgatttgggattgctggggctgggggggtggtgtggcgcggggtgggggggcatgccaagaaaagtgtcaaccgcggagcccacccaatggtcaggtagacgaaccccttggagttccaaaggccaaaccgcggcggcccagcccggaggtcctgggcgtttctgaagacgtggccgcgccgcgggggctgaggatttgcgtcccggcctgctctctcgcccttctgggccctcctttcccctctacaacgacccagtctgacgctccccaacatccaaaggactacgcctcggaaggtgctcgaa

SEQ ID NO: 5384 - DNA, 6 bp, Homo sapiens
  chr7:19184564-19184570
  hyper
cgatcc

SEQ ID NO: 5385 - DNA, 273 bp, Homo sapiens
  chr7:20370483-20370756
  hyper
ccggcctcgcctctctcgcatcctagccgtgtgcaccccagagcgcgccagcaactcgggctctggactgcgggacgcctgagccgcgcactgaggcgaaaaggacaagggcacgcagcccccgccccgcgaagccgggctccggcacctcgcggaacctcccctcctgcgctcgcagccgcaggccccactccccgccagggagggagcggcgatgcctcgctctgtgcctgcgggtgtcggcgggtgcttctagggcgctcccagagccgc

SEQ ID NO: 5386 - DNA, 236 bp, Homo sapiens
  chr7:20816218-20816454
  hyper
aggcacaatagggtgagagaacgcggcattccagcgcttcccagctttccggaccccggagagagggggtgggggtgtgggctcacatcgccggctggcttgagggaggagagtggtggcggctccggaggtggacgtgtcaattatatcctggagctccgggaagccagattgcttctaccggcggctgcaggggcttgcaagcgaagataggcggccctccttccttccccact

SEQ ID NO: 5387 - DNA, 30 bp, Homo sapiens
  chr7:20817515-20817545
  hyper
tgggacagattccccgggctccgaggccct

SEQ ID NO: 5388 - DNA, 126 bp, Homo sapiens
  chr7:20817830-20817956
  hyper
cggccgcggtgcctttgtgtgcggtgggcgcggcgatgggctgctccggcccgcagcccgaggggagcggcgggcccgggccggggccagggctcgcggggagaccccagaccaccacctcactct

SEQ ID NO: 5389 - DNA, 259 bp, Homo sapiens
  chr7:20817982-20818241
  hyper
cggatcgccagttcggaaccctccccgggagggccccggggtctttctcaatgtactgggcacttcgaggagctgggaagaggaaagcggagggtagcgtttagaaagggagggaaatcctcccaggctcaaaacctctcgcagaattcattcgaaaagagaacgaagggaactttgggcaggccggacctcggctcagcgccctgcgagagaagcagaggtcgctgccagcgtttcctcccgcgcagcaagaaattgg

SEQ ID NO: 5390 - DNA, 104 bp, Homo sapiens
  chr7:20824039-20824143
  hyper
ccgagccgccgccgccgccgccgccactgtgcgtcttcacgtgcttgctgaggtggtcgctgcgcatgaagcgcttgttgcaaactggacaggcgaagcgcttc

SEQ ID NO: 5391 - DNA, 344 bp, Homo sapiens
  chr7:20824475-20824819
  hyper
cgcgccggccagcggcgacggggccgagtccgggtaggagccgggtagcactggcttgaagccgtccatgaggtgctgcccggcggggctgagcaggtgcgaggaggcgccgctgctgaaggccgagtgactcaggcccgagtaatccgagttgtagcctccgagcggcgagtgcagcgaggtttggagccccccggcggcagggtgcagcgagccgggcagcgcagccgcgctgttcgggttctgcacgtcgatccagccggcccccacgtcccaccagctggaggcgccggccgagcccacctcgcccgcagcacccaggcccgggtgcgagggcttaaacc

SEQ ID NO: 5392 - DNA, 604 bp, Homo sapiens
  chr7:20824835-20825439
  hyper
cgccatgcccacccgcgggtagatgccctgcagcccgtccacagaggtgtgcaccttggagatgaacaccggctggtgggagccgtcctgcgagtgcgcggaggagccgccgccgccgcccccgccgccgccgccgctgcccccggaaactccgggggcctggaaaacagagtagtcgttggcgaagggcgagctggaggcggcggctgcggcggcggcggcggcggctgcggcgctgctggaggtgagggagaaggcgctggagccaggcgagccgccgcagctgaacgagtcggacaccagggccgcggcagccgcggctgctgccgcggccgccgcagccgccgaggacgagccgccgttcctggaggccccggacacgccgaagcttgagagactggaacccactacgttgcagctggcggaagaagaggacgaggagcgtttccaggggtggaagcctttgccgaaggaagaagagctgtccgagagggaggagggagacgggctggggctgcctatcttattacaggtagcggcaagcatggccagaggagtcgatcccaacctcggttcttcctgcgaggaggagaggagaaggagt

SEQ ID NO: 5393 - DNA, 30 bp, Homo sapiens
  chr7:20826113-20826143
  hyper
taaaatgggctggacgcaggtctcccgggc

SEQ ID NO: 5394 - DNA, 171 bp, Homo sapiens
  chr7:20826493-20826664
  hyper
gtgcaatacaatgatcagttccgcccattccaccacaattgtagctccctctccggctttgaagtgccgcggaggcgcggccagccaatctgcggcctcgccgggccgcgcggcgcgcgcgccgtgaggtcatcggcgccgccgcctgccgccgtggtggaagggggagtg

SEQ ID NO: 5395 - DNA, 30 bp, Homo sapiens
  chr7:20830687-20830717
  hyper
cagtgctggcactgcgtccctggcctgcgc

SEQ ID NO: 5396 - DNA, 30 bp, Homo sapiens
  chr7:20833168-20833198
  hyper
atgagtgggggagccgatttcatctcggat

SEQ ID NO: 5397 - DNA, 159 bp, Homo sapiens
  chr7:20833486-20833645
  hyper
aggcatgcatggcaatgagtccgagcaggagccctctggctgcggttcagcactttttccgtttacgtatgcggggtgaaagtcggcttccaggcgttcgatctccagccttccagctcacagtaattaacacatagcgacttcaatgggaaaacctgt

SEQ ID NO: 5398 - DNA, 30 bp, Homo sapiens
  chr7:20834347-20834377
  hyper
ctttctctagtaaacgaggtgggtcatacg

SEQ ID NO: 5399 - DNA, 18 bp, Homo sapiens
  chr7:20837608-20837626
  hyper
ggcacccggcgcaggtcg

SEQ ID NO: 5400 - DNA, 61 bp, Homo sapiens
  chr7:20837650-20837711
  hyper
cgcctgctcgccggcccgcaaggcccgggctgcggcggccgcgggcgcgggaggcggaggc

SEQ ID NO: 5401 - DNA, 71 bp, Homo sapiens
  chr7:20838213-20838284
  hyper
ctgctgggcagcctgcgcggcctggggcgaaggccagcgggcggcggggtgggaagcgccagcgcaggggc

SEQ ID NO: 5402 - DNA, 140 bp, Homo sapiens
  chr7:21582500-21582640
  hyper
acgcggcttctcggccgtgttcgggacctagagcccgagggcctctcccctcggccttggccttggcgtatactgggcggtggcgcggtgcgctcactccgcccccagcgggctggggcggggacaccgtcccccgggaa

SEQ ID NO: 5403 - DNA, 486 bp, Homo sapiens
  chr7:21582791-21583277
  hyper
cgctcacttcggggggcccagagtctcgggtgaggagccagccggcctcgcgttccctcggacggttgcccaatggcagcccaggtggcagcccgggaggcgcgagacttcagagaagccccgacccttcgcctaacctcgggggccggcctggaggcagtgggcgctgtggagctcgaggaggaggaggagaacgaggaggaggcggcggccaggagagcgcggagtttcgcccaagacgcgcgggtgcgcttcctcggcggccgcctggcgatgatgctggggttcacggaggagaaatggagccagtatttggaaagcgaggacaaccggcaggttcttggggagtttctggaaagcaccagcccggcttgccttgtgtttagcttcgccgcctcggggcgccttgcggcttcccaggaggtaagaggcgacgggcaaggggacctgcccatccaacaaaactacccaggggagacagcccag

SEQ ID NO: 5404 - DNA, 160 bp, Homo sapiens
  chr7:21583303-21583463
  hyper
cgctcactcgggcactttaacaaacttggcttgaagtccccatcctgaggcccgcaggactcctccccacgtgcacccactctgcagttcagcagctgcaggttagtttcctaagtcagcagtttgtatctgaccgagaatcccgcgttgagcctgttcg

SEQ ID NO: 5405 - DNA, 30 bp, Homo sapiens
  chr7:21985262-21985292
  hyper
caaccggctgggcgcgccagatccccagtg

SEQ ID NO: 5406 - DNA, 30 bp, Homo sapiens
  chr7:22396131-22396161
  hyper
tgcagcttcccctccgagaagaggcaaaca

SEQ ID NO: 5407 - DNA, 31 bp, Homo sapiens
  chr7:22396516-22396547
  hyper
tcagccgcggccgcagcgacgccggcggctg

SEQ ID NO: 5408 - DNA, 30 bp, Homo sapiens
  chr7:22589815-22589845
  hyper
tgtgcgatgggcagcggtgcttggcacctg

SEQ ID NO: 5409 - DNA, 1258 bp, Homo sapiens
  chr7:22893442-22894700
  hyper
gccagtcttctgctacgtaattagacgagtcttgaaagaagcacccaggggcgtggctgaagactttaagaaacaccaggcaagggaggggagtgggtaccagagacacctaacattatttgagtggcaggagcttcctctgaccttcaacgaggtaaagagacatcacagccagcgagagtttggggcagactccccagactcggaggccggggcaaagtgggagccggggccaagtgggagccggggccgtgtggggtgggggggggggcccaaggcggggaaggcccgggccgccgacagggggcgcgcgagggcctccgggccccgcgggcggggcgggtgctggacccggaggggccttccggcaactttttggttggtgccgccccgcccaggccccttttaaacttgatctccgcagtgccctcccttttcggccgcggcgcgtgactgggtaagtgggctcggaccttctggacgcaggagccgaccacgtggctccggggctaccccgtgcgcttcctaggcgcgcctctcgctgcccccacgccgaggcctcggctcggcgccgcggggaagcctccgttagggcccctcgggggtgggggcgtcctcgtggcgcttgggcccttcgtcccgggttaggacggcccgtgtccttgtgcgcttgaaggggccgccccctttcctcgaggatcccacccccactcagcagaagccgccaggcgcccgtcacctcccgtgcctgagtccctgccgtccacgcattcggcctacaggcagcttttagtcctttttcaattaaatgattgcattttgaggatcaaattccaaccgcaggcggaggcgccgagccccggacggtctctgggttcttggtgcactcggggctcctgcctgcccaggggctgtgaccgcgcggacggaagcctatttgggaagcgagtgagatctgatgtctgaagcgctttaagtttctaagcggggcagtataatagcggggttagcaaacacacggaggtcatttcactcgcgcagccatcccccaccgccaccagtgccgttcatttgctactggcccgcagtcagataatttaaaggcttggagggacgagtcttgctggagccgacgcctacagtaagttgagcggagtgctgtgagccctaataagggagcctgctttcctcccgaagattcgcttttttgggagtggccagagcgttattacagcacagggcccgcttccaacgttta

SEQ ID NO: 5410 - DNA, 30 bp, Homo sapiens
  chr7:23053922-23053952
  hyper
caatgggcgtgatccgggcgtccgagggaa

SEQ ID NO: 5411 - DNA, 34 bp, Homo sapiens
  chr7:23287316-23287350
  hyper
cagagccgcagaggcctgagacgtgggccgcgcc

SEQ ID NO: 5412 - DNA, 180 bp, Homo sapiens
  chr7:23287532-23287712
  hyper
ggcactgtgatggtcccgcttcccacacgaggccacgggccacagagtgggcaaggaactcgccccaagccacacagcgggtaagttgaggaggcagccttccatcccgacctctgtccttcctgcccgggtttggggttggacaggctcgggctccccgccagcctaggggctgggtct

SEQ ID NO: 5413 - DNA, 2092 bp, Homo sapiens
  chr7:23507682-23509774
  hyper
gaaaggagggacccccgcgtgtccgcagctgctttcgcctctcctgctcctggaggggtgggggaatcatccgctgcttcccaagccctgcaaaccccccaaactgcttgttgggacccatttcccgtaggagcaatttgacccgctcggaccgaggacattcagctgtgagctttcgagagattttgtaaccaataaccataatcccgcggcagaggccacagaaaagctttcaattcctgcccagcatcatcaacacacacacccccgccataaacttaaaagcaaggattaaagaccggaacaccacgccacacggcagggggtaagcaccagaggacaagaagttctcagctgagtctctccacccaataacggagtgagaacagaatcggggcaaacagaagcagcagctcacctttgcctttttgggaccgagtgctcaacttctatgggtttcccgtgcagttctattttacctgcggacacacaagaagtgagacggtcggccgagttcagcggctctccctgcccgaagacccgcacagcccaagcggcgacacaaatggcctcctgaggccctcgaagggcccccgaggcccggacgcggctccaggcggagggagaagccgaccccctcgagcggcgtgggcatttaactcgcagatggttggggagcagggtccgctggcgggcccactacttgggtatcagtccagtctccaagcctcccccacccacccctgggggccaccaacaccacgaggcccgcaagagggacgcggcccaccctctcaccgccctggacacgctccacagggcagactcggggcagggggctcccctggctttcttcaggagggggcgccctggccctgccctctgcttcagcccagacccgccgggaacactcagcggtgggcttgaggaagacagggagtggcgagaaagggtcggggacggcaggggagaccacgaacgggagaactggcagaggcgcagctcggcacaggctgaaccaggcgcgaaggacggcgaggcgcccgcaccacgtctgaattgattaaaagggaagccgaaaggcacggggctcccatggggaccccaacgcagccttccccctgggcgtcctgctccgcccggcaccgtccctcgccctggcggagccatacccggaggccgcagccccgcgccagggcccggagagcggcgggcggccggtgcgtggcggcgactcccttccaggcgaccagccgcccccgcccacctgcccctatcgctcgtcggaccaggggaggtggaacggggaaaccgggcacacactctctcctcccacagggtggggaggaagcgcggggccgcctgtgcgaggcaccagcctcgcggtctcactcggcagcacggtcgaggccactttccgttctccacggccgggggtttcggggcgcagcacagacagcgccgtaaataacgaccgaggaaagcaggaaggaacgaggcacaggcgggcattctagctcggcccccgaggcccagcgtgccggggcctggagcacgcgcctgggcccgggcggggcgccgggggagcgcgcctcccccagccccgcgccccccttagccagcgccggggctttcttgacagcgcgttcgccctcacccagcaaaccccggccggggaagcagagccgcgggccggagtgggagccggagctgaggagagccccggcccccacgcgcgtgggtgtgggcgctcaggcctcacccccgctcccccagcgcgccgggcctggggcccgcggagccacccggtgggcctgggcgggcggtgcagggctggggcgagagcccgggtggggccaggcccgggcccacctgaaagcgcctcgatggccttgagggcccagctctcgtccgggcagtccacgaacgcgtagccagtcttcaccaggaagggtcccgacaccgggatcttggcgtccttgaagatactttctaggtccgagggggcggcgttctcgctgaggtttccgatatacagtttgttcattgtgaagagtggttgtttaaaaaaaaataacgagaaaaaacgaaa

SEQ ID NO: 5414 - DNA, 63 bp, Homo sapiens
  chr7:23510074-23510137
  hyper
ttggcttcggccagcggactgtgaaaatatcacactacgtgaggcaggcgccgcctccccata

SEQ ID NO: 5415 - DNA, 30 bp, Homo sapiens
  chr7:23510423-23510453
  hyper
ggcaccaagcggggcgctgacggtcacaac

SEQ ID NO: 5416 - DNA, 30 bp, Homo sapiens
  chr7:23510939-23510969
  hyper
ggctctcggcttcgcgtttgccattggttg

SEQ ID NO: 5417 - DNA, 1061 bp, Homo sapiens
  chr7:23513301-23514362
  hyper
cacacaatgcccggcgtgtcgcctgggcctcctcggaggtgctttaacaggctcttgcgcttttgaacggccctcctggactctgatctgtttaaactagaggcgttaataagtgataacctggatctgccctccttggaagctgcctgcctatattttattgtttaaaataaataaaaatggtgccccgggagagaagatggggttgtttcctttttcctctggctctgccccgagaaagagggcgggatcctcacggctcacagtggggagggtctttcgtcggccgccggctcgcctcggagggcctggaccactggaccgcccttccccggggccctgccgcgggaccgcgggcttctggctcctcctggggctgcgtccgtatgcgcggagcgtgtggccgggccgtcgccgcgccaccccacctgagtccgccggccagcgcggggacgcaccgggcagcgtgtgtttggcgaccctcccgcacctctggtctcagttgcgtgtgtgcacgaggggttccatagggcccagggatgcttggtacccacgggggagaatccctcgccgaaccctgcgggtctgcggggcgggccgcgagactggcgcgcaaaagcggctccaaggcggggctcccgcgctccccggggccggcttgccgagtccaagttgagcaaccggcgtcgagagagacaccgcccctgctgcgggcgggggcctctcctcgcttccgattggctgacggggggaacctatcgccgtcggccgcctccgccagagcggtttgctggttttcattcattggccccggagccgcccctggatttccatcttttgtggcgcgaaaataaccctttgctccctcgttggttttgttgaggttgaggggtgggactgtgttcccctctgctcgctctcgtttttcctgccctttaacagctcgcccccagccccaacccccaaggaagaaagagggaggtaacgctgaggaagggtggaaagcagttctgcgtccgtgggtggagcccgccccttggctgaccgcatggtgcccgcac

SEQ ID NO: 5418 - DNA, 206 bp, Homo sapiens
  chr7:23570741-23570947
  hyper
ttcccctcacagctctcgtcttaagaacgcttaagggtcggtgcggtcgttgactaaccacttcattaggctcgtcccaccttcaacctcaaggctttcgcctttttagacgcaacgccgccggttccaacagagacgcggccgctcactgaaatagagagccaaggagacacaggccccagctagtcccacgccagcttctcccc

SEQ ID NO: 5419 - DNA, 51 bp, Homo sapiens
  chr7:23719646-23719697
  hyper
gttctggtgcctggcgccggcagccagtaggggcgcgcgtcctgcgcagtt

SEQ ID NO: 5420 - DNA, 26 bp, Homo sapiens
  chr7:24323302-24323328
  hyper
ctcactccaacagcgcgcagttgtgc

SEQ ID NO: 5421 - DNA, 30 bp, Homo sapiens
  chr7:24323556-24323586
  hyper
agcgcgctcggagtgcgctgcctcgctcac

SEQ ID NO: 5422 - DNA, 217 bp, Homo sapiens
  chr7:24323801-24324018
  hyper
tctctgcaccccatccgctggctctcacccctcggagacgctcgcccgacagcatagtacttgccgcccagccacgcccgcgcgccagccaccgtgagtgctacgacccgtctgtctaggggtgggagcgaacggggcgcccgcgaacttgctagagacgcagcctcccgctctgtggagccctggggccctgggatgatcgcgctccactccccag

SEQ ID NO: 5423 - DNA, 30 bp, Homo sapiens
  chr7:24796479-24796509
  hyper
agctctctagataccggagcaaagtggagg

SEQ ID NO: 5424 - DNA, 30 bp, Homo sapiens
  chr7:24797471-24797501
  hyper
acaccgcggcctcacggttcaaccaggaaa

SEQ ID NO: 5425 - DNA, 1201 bp, Homo sapiens
  chr7:25019059-25020260
  hyper
gttgtctcagtctctccggcgcgccccatcccgcggatgtggtaaagcttcgcgctcgccccaatttaccaggcttcctgagcctctagccccggcgtagcgcctccccgctgcccaggacagctccgcgcgccgcgtcctcccgcacctgcgccgcggcccctgcgctcggctcctcctggcggtcaatcctctgagccgtccctcgagggaaggtgtcctggggtgggtgagacccgggtcctccttccccgggagctgcagccggcacccaagctcccaggcttgggtctgccccagggccggagcctccccgggcgactcggacagaccccggtccggcagagaaccgcggcgccccgcaaacagcagcccttccgagcccgcgccgccgccaggccccccgacacccaggccccatttaggcgggcgccccgccactcacctgagcgctgtgcagccggagacgctccctagttccccggggccgggctccggggttagcgcacagaaccgggagaaggcaaccccggcttctccggtacccccgcaacgtgcagctgacagctcccgcaccggccgcaggagtcgggggcggggatggccacttgcagacagactgcggggccggagccgcgctgcgcaccggccgcgaagcgctcaagtcccctctcccgggccggctggcgggcgccaccagcacgcggccagttctgagtactttgcccagaacttctcggcgcgcgccgcccggcgattagcccgaggagccgcgcaagggcgggagcgcaggggaggggcctgagaggcccaggggcggggccccgagggggcgggagggcggcagagtgatgcacaatctcaccaatcagaagtcgcctttcgggaaggaggtggggcgatgtcctcggaagaagccagcggattccatgacgcggcgggggaactagggaccccggattccggatgggttgggagggcggagggaggcgagtcctgcggcgaggcactgggtggggctcccggtggcccagctcggtgcctgcgcgcggtaggcgttcggtaaatgttcctctagtggcttttccgggccagggaaggaggaaaaagtgagggcagcgcgggaggggcaggtttacggagaaggctccaggggacccttgcggtcgcacaggctaggagaactcgacctcccgagaaa

SEQ ID NO: 5426 - DNA, 30 bp, Homo sapiens
  chr7:25021052-25021082
  hyper
ctcagcgcctgggacggagtaagggctcca

SEQ ID NO: 5427 - DNA, 30 bp, Homo sapiens
  chr7:25043520-25043550
  hyper
ttctccagcatcaagatgtgacaacacatg

SEQ ID NO: 5428 - DNA, 507 bp, Homo sapiens
  chr7:25219593-25220100
  hyper
gacatgagcctgggggcgctgcgggaccgcgcctcccctcccctccccgcagctggcggccttcgcgggccgaggaattttgaggtcgtccgcacctacggcccggtggagctggcaggcaggggcgggggcgggagaaggacggcgggcaggccggggtggggtggggctgggggcgcttgtgacggtggccgtgaccgcggcattaggtgatgcgtccttgaggggctgggggcttccgggcggcgagcggggcgcagtaggaggctcttagagacctcggaggaaaccagcccagcgctacgggactggcaagaatgcgaagaggaaccgagagtgaacggagtgcgaggcgccgggtcggaggcgagaggggctcttccgccttgcgacccctggccccgcctcccggtcccttgccccgcccctctcggctcaccgccctgcctccagtcggaccccgccttgccccacccgcgccccgcccccaggcgccctctagcggcg

SEQ ID NO: 5429 - DNA, 532 bp, Homo sapiens
  chr7:25891898-25892430
  hyper
tgttccaggccccagtgaacccgttacagggtgggactgggtggagcagccttcaggccgccccggcccctcgtgggaatgcgccgcgccccccggactctggagcggcccgaccctgcttcccaggccccgggcaggcgggcgggcgagacacaaagcaggccccgcgggcggtgctccgggtttcgcgagggcggcggtgcgcttgattgatggattcacggcgtttaacccccgccgcctcgccggaggcggccgatccagctgcggccgagggcctagggtggccatgggcccggcccccgcgtcctccgcgcccccgccccggctcgggagggctgccccccgggagtggagaaaggctgatttacagccggccggccgcactcttgcaaaatcactgcggccggggaaacccactcccaggactcagcccggaagaggccctgaaggggagcggagactgggcgctggggtgggggcgggggcgccgagcctcaacttcccgcgtctgctggaagcttgctctgag

SEQ ID NO: 5430 - DNA, 11 bp, Homo sapiens
  chr7:25892608-25892619
  hyper
gggatcgccaa

SEQ ID NO: 5431 - DNA, 380 bp, Homo sapiens
  chr7:25894657-25895037
  hyper
attgagttgaacattatgtagcgtttatatagaccttgcagacgtctgtgcaatatccaccactgaacacgtgaggtcgtactcaagtctctctggcccctggtaatgtgactcccttcctttatttgcatgaatcgcctggattgggtgtcaggtttttaaaacgtcaaggtttacgcctattgttgtcaaccaatcagcatcctactttgacgtgattggcttctactgtaggtgtcaatcatccaaaatttgcatactactcctcaggccgccgggagcctgtcagtcggctgtggcagctggaagagaaggaatcggacggagaagaatgaaaaatcactttgctttcgcaaagcgaaagaaaagtattcttttcc

SEQ ID NO: 5432 - DNA, 262 bp, Homo sapiens
  chr7:25896367-25896629
  hyper
cttctagttctacttccttcccggttagccagctgctggagagccccctcagtaaattccttccagatcgacctcagtgtgggtgagagcgcagtctgtgaccaccagcgcttctgactcagcggaaaacgccggcaaacaggactacacctcaccgcggcggcaaaagcggcctcagctccagcactcacagccaccactttcaccgtcgccccgccaccaccaccttcgctgcctcaaccctgagagagacacacacaca

SEQ ID NO: 5433 - DNA, 257 bp, Homo sapiens
  chr7:25896688-25896945
  hyper
ctctccctgctgtcaatcatacatgcgcgccatagcgcgcatgcgcactggtggactccagcccccaccgatcctacgccctgtctctgcgtctgggaccagacgcaccaataagagagcggattcgggggcgggccacaaggaagtagccaatgagagcgcggttggaagccagggctagagaggagtaaatccttctgtcgtccccgttctgccgcccccgcgatgatttatgcgtcctttttattatttgtaac

SEQ ID NO: 5434 - DNA, 582 bp, Homo sapiens
  chr7:25901910-25902492
  hyper
agggctcatctttcactgggtcgctcacacagaggtggggcgagagggaggaggcgcattagccctgcgctctcatttgcttaaacggccttcttacgtcatcgtaagcctaagccaatccgtgaagtgcactttgacaagctacccgcccctaatttgtcctttcaccgccagcctaagccaatagtgtggctgcatgtaaatgagaaaccgcgagcatctccccccgcccccggctccgcccaatttcccacctcttcccggagcgcacagacgccagctgagtgggaggggcctagctgcgggcggagcacggaggaggaagggcacgaggaagaggcggagcgggccgaggcgcgcggagctgggtttgctgagtgcttccttcctcggccccacctcccgccgggcaggatgccgtttgatcattggctggtttaataaagagggcgtgtttattttgcataaatagtgggcgggcacccagggctgctttgtaactcgagaacccggtgtcccgcctgtctcccggggggtatgggcgggtctcccgccagcctcgccagactgagccaagggcct

SEQ ID NO: 5435 - DNA, 30 bp, Homo sapiens
  chr7:25989998-25990028
  hyper
tggaaagctgggggcgggggcgctgcacga

SEQ ID NO: 5436 - DNA, 20 bp, Homo sapiens
  chr7:26192626-26192646
  hyper
aggagaaggcacccgcggaa

SEQ ID NO: 5437 - DNA, 192 bp, Homo sapiens
  chr7:26192666-26192858
  hyper
cgctggcggatgtgcgagcgaggtaggtgcagagcgggaagcgagcgaagtgcggcgtctacgccgccgggagcccccgaggcttgtgtcggatctgagcaggggccactctcgctgtgtcctggcacccttagcccctggtctttgcaggttcgcagatgctgctgctctgattccgaatgaagggctact

SEQ ID NO: 5438 - DNA, 30 bp, Homo sapiens
  chr7:26241111-26241141
  hyper
ccggtcactgtcctcgccccgcctccccct

SEQ ID NO: 5439 - DNA, 755 bp, Homo sapiens
  chr7:26415725-26416480
  hyper
ctttgccccccaccccactggcggtggcgctcccgcggctgcaccctcggccgcctgttggttgcggcgcctccgcggcccgcgcgcatcccccgcgctgcgtcccgcacacgcgcgctcccgccgcgtcccgcccgggccgctccgctggcggcggcgactgggctgcaggtagcgagccagccggcctcggtccggtaacccatggcaaccgccctggtaacccatggcaactgcgcggcggaaagaaaaaaaagaaccgtggtggggcggggggcggcgggcggtgaatgggaacaacgaccgcaaagagacagcgatttaccgcgcgggcctgcggctcccggccgcacctgctgcagacggcccgcgaggccccttcccgcgctacggtgacgattctggctgctggggaaaagagcaataagcagaaagccctcgtgcagaggggatccgggcggtgcacttggtgtgggaggctgccttaaacgccgatgaccctcccggcctccgcgtgtcccggcttccagggccccgccaggctggagagcgcgcgtggagagggccttgccgcctgggggttggttgaggggcggccgcgccggggccggggctggactccaggctttgttctgcagacgctcgcgcccggccggaggaggggctacaccgtgctgccccggccccatggggcccggcccccgagggtccccgcgagcggacgcggtggggccgggcaaactctacgtgcccta

SEQ ID NO: 5440 - DNA, 30 bp, Homo sapiens
  chr7:26437666-26437696
  hyper
gagctatcagaaggcgggaggtgacttctt

SEQ ID NO: 5441 - DNA, 609 bp, Homo sapiens
  chr7:27135161-27135770
  hyper
ggtacccaccacttacgtctgcttcctgatttaacgcgtaggggctgtaaggcgcactgaagttctgtgagccatagcttggaccacaacttgagtgggagtaggacacccccaggttcccggaagtctggtaggtagccggctgggggtggcgatggtggtggtggtggtggtggtggggcgaaccgatctgcacccccctgcccactaggaagcggtcgtcgccgccgcaactgttggcgctgaccgcgcacgactggaaagttgtaatcctatggtccgaggggtaggctcgggctgagcaggtccccgagtcgccactgctaagtatggggtattccaggaaggagttcattcttgcattgtccatctgtcactgagtgacctggtcctgcgaagcccggcgtgactgtgccaactttctcacttcctccatggggccggagaagaaaaatgatatgaatgtacagtgcgcaagagggggggcgggagggcggaggacgctggaggaggggcacgtgacggtgtcagccaatggctgagcctcctgcaaaagtttgccggcttccgcagtgatggatcaccgttttagtggcatttaaatccccg

SEQ ID NO: 5442 - DNA, 949 bp, Homo sapiens
  chr7:27135979-27136928
  hyper
cgttcaatgaaagatgaactggcgagaggtgagaagggaagagggctcccggctctctcggggcgggaatcagtgggccagagctcgccgggtggccgcaagtacgccggcccagcccgcagcgcgcccagccggaaggcggggaatccggctgacaccgcgccccgggttcccaggccacctcctctgttctgaggctgggctgggagaccgtggggctgtgaggagcgcatagaaccgtggtggagggcgaggctgggccaccggctcttcaagctcggaatggagggggaagagcgcagagggctggctgggaggaactcgggtgggcgtgaaggagacgagggcaagaaaagaaacttcccttcttccaggagggtcttcgaaaccctctccccacagcccctctcgtcattagcatggcaatgaggagtttctgtaattcgacttggaggggcggatgagccctggaaactcagagctcgccggaaaaggccgggggcggccgggctcttcttccccaccttccctctctcgtcgctctccgcccctttctctttcccactcagttttgcaccgggagccctccgggatgcggagctactcgaccgccggatttttaggggtaggaggcgggggagagagatgacgctggcggacgtggccagcgcgggggccgggcggtgcgctgcaggccatctgccggcgccctgagacccaggagcctccgcgctcccgcgtgggcctcacagggccggtccacagctccaacatagtagctgaactcccttcgttgcgttcctctttttctggaggggaatgttagaagagagagagagcttccttttataaccttcctcattctgctgcacgtctagagtgggtgtgggggctggcaggtgggaggggcggtggacaaatggctgatggtggacgggacactttaccc

SEQ ID NO: 5443 - DNA, 945 bp, Homo sapiens
  chr7:27190274-27191219
  hyper
cgtgcgcccccagaacgccttgggacgcgcagtttggacagaagcagccatgacgtgccaggcggcctgtgcaaccagtctccatggtgctggagtgggggtgggggaggacccgagtctataacggcgtccagctccggtcaggggtagccgaggcggggagatttcccggccatataggctctgggtgatcgccccccaggtccccttgcgtccccctctaccctgcttgctgggaaatctctgaggggccagtacagcagtcgcgccaggctgcaagaggcgggctgcagctggcgccggtcccggcgacggccacggcgtggcagcagcgagcgccagcacggtcgcaataaataatcggcccgcggcagccgcagtcaggaaggcggcggacctaggatgcaaatgcgccgctttatccgccccgagcgcacgcagagcacgggctaacgtcctaaacatccacagccccttcctatttatcgaatccataccaagatattgtctcaagttggggaaacaacaacccaaacaaaaaacaaacaaaaagaacctcggactcttttcttgtcgctgtccgaggagttctcggggcaaatctggtctgatgtgcacttaggccgagctacagttcgagccaccgcgctacgcaaagccaccgccagcagcacgctctgcgcttcctcccgggcagctccaccatcctctccccgctcgcggaaggtggggagtgcggtcgccagtccgttgcgccaaggtggattggggggtccccctatcgcccagactcggtttgcgtccttccttcaaccttagctgcgggaccctgccacgcgcgctaacagcattatgtcctctgcaccgaaacttcccaccaagtaacacccaattaatcccatcctctcctccaacacagaattccacccacgcacctattccccc

SEQ ID NO: 5444 - DNA, 86 bp, Homo sapiens
  chr7:27191549-27191635
  hyper
ccttttgggcttcacggggtcgctagggaaggggagagagacgacccaagggatgctgccctgtgccttggcgctgtgccacggag

SEQ ID NO: 5445 - DNA, 94 bp, Homo sapiens
  chr7:27195507-27195601
  hyper
aaatggagttaaataaatttacgaggatcgaacccattaattgggccataaaaagttttatgagcctcatttacatacaatgctatgggctcca

SEQ ID NO: 5446 - DNA, 26 bp, Homo sapiens
  chr7:27195866-27195892
  hyper
cgcctttggcgaggtcactgcagagc

SEQ ID NO: 5447 - DNA, 364 bp, Homo sapiens
  chr7:27196152-27196516
  hyper
cgaagaactcataattttgacctgtgatttgttgtccggcagctttcagtgtcggttttacgaggtagagtgatatatgataacattacacccccagatttacaccaaaccccattttcttttggacggagctcgccgcagcacgtgaccgcccacatgaccgcctccgccaatctcagcagtcctcacaggtggtctcgctccgcagggcccgcagccgcctagaatggaagggcaagaggctcaaatatgcggccaaagaatccgcccgcgcccggcgggcctggcgcgtcccgcggaaaaagacctggaggctccgcgggagcgcccagctggcggccaacctccgcactggggtctgcgg

SEQ ID NO: 5448 - DNA, 48 bp, Homo sapiens
  chr7:27196529-27196577
  hyper
cggccccacgcagcaccccccaccccgcccccccgccgactcctgcta

SEQ ID NO: 5449 - DNA, 9 bp, Homo sapiens
  chr7:27203994-27204003
  hyper
ccttgtggc

SEQ ID NO: 5450 - DNA, 679 bp, Homo sapiens
  chr7:27204090-27204769
  hyper
cgtcccagctccggctgccctggctgccgccgctcacggacaatctagttgtacaaaaggctctctgggctgcactgctttcgaagaacggcccaaagtatctcggtcctgggcctgggcagccaaggagaggggcggccagtcttggctcgtcccgaagtgcccgccccgccccctctcgctgcagcagccgcctcctctcccgtagccctgcgggccgctcttcactgctctccagacttggggccctatctgaggcgtcccaaacaccaacttctggctcctggccccaactcgagaggcttccagcgaggacgaaggcaggctcgagagaaacctggcgggccagcagatccgggaggccggcgtggaggcggcggcggatttgaagggaggagacacttactgggatcgatggggggcttgtctccgccgctctcattctcagcattgttttcagagaaggcgccttcgctgggttgtttttctctatcaactggaggagaaccacaagcatagtcagtcagggacaaagtgtgagtgtcaagcgtgggacagtcaccccttctggccgacagcggttcaggtttaatgccataaggccggctggagggcaagcccgcgaaggagagcgcaccgggcgtgggctccagccaggagcgcatgtacctgccgtccg

SEQ ID NO: 5451 - DNA, 524 bp, Homo sapiens
  chr7:27205265-27205789
  hyper
cgctattaatggtccgatgttttgcagtcataatttttatagcaaaagccatatgtttttatgtaaagggatcgtgccgctctacgatggggtttgttttaattgtggccaacgacgattaaaagatcaaatctagccttgtctctgtactctcccgtctccccccccatacacacacttcttaagcggactattttatatcacaattaatcacgccatcaagaaggcgcgggtcccgcgtgcgagtgcggccagcggagcccctcacataaaattagacaataattgaagccataaaaaagcagccaaatcgcattgtcgctctactgtatttaaatctatatttatgatatttcataaggagttattgtttcagaagccacacaggctggcgggaagtcggaaacgaccaacagattcgtttgcctcgccgtggctcccagctgtaaaaatttacgaggacttggaaaggttagactgttgtgtttggttggcgagctccctgtaaataatccctgcggtcc

SEQ ID NO: 5452 - DNA, 28 bp, Homo sapiens
  chr7:27206082-27206110
  hyper
ggtccccggccctcgaccccacgcacac

SEQ ID NO: 5453 - DNA, 505 bp, Homo sapiens
  chr7:27212478-27212983
  hyper
tttgaaaaaagcatgggggatcgtaaactcgaacttcgccggttaatgggcttatttattggcgctggcggctgcttattttggatgccttacaaacatccgcgctatctgcgggcgagctactttccctccctccccctccccccgcgtgggccgcgccgcgcaggctgggcagggaccagggctctgggtcctcccggccacaggaaagagcgcacaggagggggcctgctcgctggtgtcctcgtccctagtcagggggagctgaggccagcgccgaggacgtcttgctgtggggcgctaagccggacatgaattttactgcgtccccacgcccaaatattaaaaagcaagttcacaaggtcagcctgcctgcagcttgggccaaggccggccggctgctgcgcgggctcctagttttctgatccttctcctccttgtgtctgcctgtctgcccgcctgactgcagccctctgcagccctgcttacccagggaatccttctc

SEQ ID NO: 5454 - DNA, 1073 bp, Homo sapiens
  chr7:27213188-27214261
  hyper
gggggctgcgcggggaacgggccagccccgagttgctgcgcgccgccgccgccgctgccatagcccttggcggtgccgtaggcctgagaaaggcggaagtagccaggcactggcaccccgctggaggtgcccagggcgcagccgtcgggcggcgggccccgcgggaagggagccagttcggcggcggtggccgagactttggggcatttgtccgccgagtcgtagaggcagtaggagctctcttctttgatgttctgcgcgaaagagcacgaggtggcctgcggcgctggctggggtggttgcggcgggggcggcggctgctgctggggcggcggcggcggcccgtcaggcggctccatccggcaagaccggggcgcgtctagccacaggtctatgggcgagggcccgtagccgtgcgccccgggacctagacccccgccaccgccaccgctgcccggcgacgctgcctcattgcgcttgccgcccagcgtggggaagagcccgcagctctgcagcccgtagggcaggtcggcggcgggcggcaggtagaccccgccgtgggcgtagtaaccgccaccgccgccgccccccgcgccaccaccaccgccgcctgcctcgcctctgcccgagctgatgagcgagtcgaccaaaaaagagttcgcggcggggctctccgagcatgacattgttgtgggataatttggcgaagggagcagatagccctttctggctgacatttcttgtgcaaaacatgctgaatacgattagcaatccccccgcaccgcggcgggcgcccgcagccaatcccgagccagagtttccgcgcgaccactcccagtttggtttcgtaggcgcggggccgctctccgagggcgccctcagagcccgcgattgatataaatatgtaatctgtattgatgggccaggagacgcaccccgacaccttggcccgaaggccgggagctgtgggggctgccccaacgtggctggtggggggcctggccattgggctcgccccgcccctacccggacgtgagccccataccggggtcccttagaagggcccttgggcc

SEQ ID NO: 5455 - DNA, 30 bp, Homo sapiens
  chr7:27219689-27219719
  hyper
agccgggtttatagcggcgcattccaaata

SEQ ID NO: 5456 - DNA, 8 bp, Homo sapiens
  chr7:27223184-27223192
  hyper
ccagcctt

SEQ ID NO: 5457 - DNA, 1347 bp, Homo sapiens
  chr7:27223547-27224894
  hyper
taatatattgctagagctaagcgggctactttatctgttaaacgcgctcctagcgccgtcgttaaacagcgacgcctttgaatcccggccgggactggagtcccggcgcaacacatggcttttataaaaatctccggattacctcgctatcaaaagctcccgaagcccttgcagggggaatttacaggcgcccacctccggctccccagcctggagctggccccgagcggggtcgagctgctgggcttgggagctgagaagggaaaaaagggaaaaggggagttgtttttttttgcaggcatgccttggccggtgggtatttcacggccaatttcagcactcgccacgtgatcccgccttttataacaaagttttgttgggggaaacctaaaggcccttcataaaccttatatgcttataaaacagcatataaaaatttaacagcggtgctgcgctagatttccaactcccctttcataaagcgcagggcgctgcctttatacgtactggagccgccggccttgtcctcagtgtggccggaagacgactcggggctgctgctgctctcggggcgccgccgccgctctttctcctctgctgccgccgccgtctcccggcagccgccgccgccgccgctgtccgaacttgaagttgccggcgcgcccgttgcagccgccgccgccgccgcggaggtcgccgtggccgccgggggccccttctcggcgctcttgtccccggggtagtcggaggaggcgaggttttccggggtgccgtaggctgtctcgaaaaactggtcgaaagcctgtggcaggacgccgttcctgcccacggtgctatagaaattggacgagactgcgggggtggggtggtggtagacgttggccgagctcttggccagcacgtcgccaggcacgccggccgcgctgggcgcctgcaggcagtctctgtgcacgagctcctccgcggagtagcagtgggccagattgccgcgggggtgccatttagtggcgggctcaatggcgtactctctgaaggtcacttcgcgcacgggttggacctggggcaggttggaggagtaggagtatgtcattgggcgcgaagacggggtctggggcagaaaagaagggaggctggagaaatctggacccgagacgtagtaagtacaacttggcaaatacatgttagaggagcagggaccacgctcatcaaaatccattattgggctaccttgggctctccgcagtagccgagcttaacatgattctccactgcagctgcctctttgaagcggatccgtgaagtagaaatttggagacgtaagctgacgtggaaatctatccccatcct

SEQ ID NO: 5458 - DNA, 129 bp, Homo sapiens
  chr7:27227499-27227628
  hyper
ttcagcttgtgcctgagcagacggggttgtggtggcccgccagcgggggatgccaggccacctcccccagcggcacgcagcccctctcttaattagatcggttttcccctggtgtccgggagagcggtc

SEQ ID NO: 5459 - DNA, 154 bp, Homo sapiens
  chr7:27227757-27227911
  hyper
cgaattccggagaaaaggctggggctgagaaaggcgctccgggagcggctggcagggcaattcggcaggctgcaccgaagccgagtgcccggagggacttgccgcccggaagggggtgtgtgggggcgctgccgtgaagatggatgagggaaaa

SEQ ID NO: 5460 - DNA, 792 bp, Homo sapiens
  chr7:27232195-27232987
  hyper
ggtaccactctgggtgccaaccgggacctgccggtgccacggtcccgtgcgccgggtcccggcctcgggctgcgggcggcttcggggcctacagcccagcggcgcggagcgtggcagaggcgcggggcgcagcgcagcccgaggctgcctcccgcccgggcggacggcgcggccgctggggtgcacagcgtagccccgcgtgcccggctcgctctccgttccctcggatagctcccaccgctcggctccgggctcagaaagcggaagtatttggtagagaaaaacacggtttcttttcagctcgtctcaaaatcccttttagagaaaatgctcctgtcaagttttatttcccgttgcaaaccaccttccacgctgccaagaattaagaccgggagagattaaatacccgattattctcctggggagggcggggcggggccgggaagtgggcacccacaccaaacattccttgaagtaggcttgtcctgatccagccgcgcccggggagccccacgaaggcccgcgcggcctgcggtgacgtcagcctgcagttgcggggccactcacccgcacagacacggcccttgctgttccgcgccgggacctccgccagccgtcctgccgcagccccgactggcccgcgtgccgtcagagggaggcccgctttacaccggcctgagcctccattttgagtagggggttcttgtagaagcgtggagggtttggggccgcgcctctgtccccgaggggcgcgacatcaggtagctctccgagttcacaccccagtacctg

SEQ ID NO: 5461 - DNA, 498 bp, Homo sapiens
  chr7:27237871-27238369
  hyper
tggaaccagattgtgacctgccgctcagagagattcgtcgtggctgatatccgcctccgtttgtccttagtaatgaatttattcgtggcgtattcccgttcaagttcttttaattgcaccttggtataaggcacgcgcttctttctccccctcctataggagctggcatccgagggatgggagaccacgtctagaagacaagggagaaggcaagttacacagggatcggaccccagccagggcataggcgacagctcgatctgagccacccgccttgcagcgcccggctgctctttgccacccgctgtacaatcctgtcttctgctaaagcctagagggtcagtggggaaggtagttagttctgaactgaaatgaaatcacccagggctccagtgacttccccaacccggccatcctgcaggagcagcgcgtaggcagcctcgagtgatagcctggtccaacggcccacaccttagcgccaggctcaaggtacaacac

SEQ ID NO: 5462 - DNA, 589 bp, Homo sapiens
  chr7:27238583-27239172
  hyper
gagccagggaccagctcaactcgaggcagtgcaggcagacccagccagccatgctcgggctcccaggggtgcagagccgctagggcagaccaggaagagaacagaaacgcacccgggatcgcccgggtgcgagcggagaagaagctggagcagagccggaagaccagggctgggaataggtcgtcatttaccgggcagagtggacttccagaggtggggaggctgcgcctgctctttggggcagtacatttggccgttccagccgttgggcagcgcccagggctggtagctttccatgggaagacccaagggttcgtggcgcgactcgccggggcccccgaggcccggcaccactggcatatccaggtagccaggcatgggctgatggtggtggtaaggcccggctgcgtagccctggtggtagaaggcgaactccttagcgcgggagctgaactcctcggcagctgggccggcggtatccatgtacttgtccgcgaaggcggcggcggcggcggccgaggcgggctgcgcgcacgacttgatggcgttggggtgcgggcccatgcgggcgcacgggtagtagccgctg

SEQ ID NO: 5463 - DNA, 1163 bp, Homo sapiens
  chr7:27239225-27240388
  hyper
cgagcaggggctgcattgcttggcggcctctgcgcccgccgggcccgccgggccgggacctcccgaggacgacgcggcggcggcggcggcggctgcagcggcagccgcggcagcagcggcggcagccgacgggggcgcctccccgggggcgctgctgtaggcggacgcggctcctggcgccaagggcgccgggtgcgccatcaggttgcggcactggttggccgcggccgccgccgcagccgcggccgccgccgccaccgagaagttgccccctgccgccgcagccgccgggtgggggaagcccccgcccccggccccggcagccgccgccgctgcagccgctgctgcagccgccgccgccccttccatgttcttgttgagctcgtcggccaccaggccgccgccgttgtcgtagagaaacatgacggtgggctcgatccagcgggggtggaggagcacggaggctgtcatagcccgagccgcatggagaagaccccagtggcgctgttttaaaaagcccccaagaagtgaagagcgcgcggcgcggggccggggcccgagcgaggggggcggatcgcgccccgcggggtcgcgccaggcggccgcccattggcccggcccccccgctccgcccacggcgtatgcaaagcgggcggctccgactccagctctgcacggtgcacccgtcgtccccgccgcggcccgcgccgtccccagcgccagccgcgcggccgcgcaccattcacccgggggagaggcggaggaacgtgcgggtggggcagggaaggaaggcggccccatctccgccccccttcccttcctttatcccagtggggcccagacccgcgcaaccaggcggggaggggaggtgggcgcgcgattgggttgcgatctggagcagtggggacaggtcaggtaattctgccggcggtcagggatgggagagtggggaggacgggaccagcctagctcagaatgggtgtttcttggagcctctgggactgttttctttccaggaaccggcgcgtatttctgcagtgagaccacaggacggacatcggcgccttcggcttcgatggagttgcgattttgctctttccagggaaacagtggcagggtgtttgctgcttatcggttcctgcggatatgcctgggtcccagga

SEQ ID NO: 5464 - DNA, 30 bp, Homo sapiens
  chr7:27241188-27241218
  hyper
ttttccaccccaggcggactggtgagaagc

SEQ ID NO: 5465 - DNA, 68 bp, Homo sapiens
  chr7:27244542-27244610
  hyper
cctcagagctggcgcaaactccgtcctccaaaactcggctctgggaggcctaagtgactccgaagccg

SEQ ID NO: 5466 - DNA, 520 bp, Homo sapiens
  chr7:27244797-27245317
  hyper
cgcgggggacaccggcttgctggactgcaggggcccgtgccacccaggaagtgacctgcgggtcactcagccggggcgctgggcgagcgcgggacggcccggagaattccgtgcggctgcgacgggaaaaggacgaggggtctctgtacccgacgctgccactggcccaaaggaattttacccgcgagcgcccaccccaccctagcttgatgcttacgcccgcaacaaaacaggaaaccaggactgggcagtgcattctttaagtcaacaaatacactgaagacttcgagcgtttgaaggaaggagggggtttgcacgtaagcctggccccgccgggctcggctttctcgctgagaaagcggcgcaggcagccaggcggcctgggcccgcgggggtccatctcgccctagactcctaagaactcccacggccctgttcccagctgcgaattcttaatgcacaacgcgacggagggaaggaaattcaccagcgcagcgacgaggaaggggaactcaggacc

SEQ ID NO: 5467 - DNA, 336 bp, Homo sapiens
  chr7:27250160-27250496
  hyper
atcggaactcaagggcgctgtctctgctcctcgggccgagactcggtttcccctgccgctttttgaagtctagcattcctctgtgaaagctggcttttccctttttttcctatactccccttcccgccctgcgctctaaatcctggctctggaaatccaccagaatcaaatgctggctccctgcgggcccgcgtcggagcggctcacgccattggaatctttttatgacctttgatgtgtttaaataacatggcaagtctgagcacacacctcggattaaactttaatcggctgcagtcaaggtcgcccaggtggtaaaagcgtttcctccgacgt

SEQ ID NO: 5468 - DNA, 661 bp, Homo sapiens
  chr7:27264930-27265591
  hyper
aggggaagggcaggtcggggagaggatccccaggggctgggtgtctgcagggctccccgtaactcagaggggccggcggccgccgcccgaagcctgagcttttctcagcagatggagaattcatttttaacccccaggaaggaatgggctgagacatcagaccaccgctcctagagggtcaaatttcctccccataaatccaaaacattctctttagggagttccctccgtggcgcgcaaacccgggaagccgcgcgccctggggtttcttggcgggccgtgcgcgcagcctgaaccgccaaagtcgcgtcatcccgcatttgcctgcacccaggagtttgcaacccgcagagcccgcagaggccaccgccaagagtgcgcgccttggcgccccgtcggcctctacttcctcggatctgagccagcgccgctaatccgcaggctgcagcagaacctgtcgccagcttggagagtccctcgcgctgccctggcttcccggtccgcgggcgactcgcgctgctcccgggtttgtcgggaccccaggagggcgctcaagcctgtcggcccctacttgtgtgtagagaataggcccgggtacaccacctcagaaatgcagaggaagccggggacactgaagcccgggtggttgcagtgaggctga

SEQ ID NO: 5469 - DNA, 30 bp, Homo sapiens
  chr7:27275326-27275356
  hyper
cccaacctgtggcgcgtgcttcagtcctga

SEQ ID NO: 5470 - DNA, 30 bp, Homo sapiens
  chr7:27275610-27275640
  hyper
acagcggccgcatccgcccaacccacttgg

SEQ ID NO: 5471 - DNA, 35 bp, Homo sapiens
  chr7:27278958-27278993
  hyper
gacaagccagctcctggcccccggctcaggactcc

SEQ ID NO: 5472 - DNA, 131 bp, Homo sapiens
  chr7:27279237-27279368
  hyper
gtcgcctccccggggttcccacccacccccctccggcccgggccaggccagcccagccccggcggaagccaagctgggagcttttgaagtccggagaatttcaatccgagaggagccggctggaccggagc

SEQ ID NO: 5473 - DNA, 578 bp, Homo sapiens
  chr7:27279453-27280031
  hyper
cgccgggcctggagcggcctccacctcagctgctatcaccccctctccgctgtcatgggattgcccaggcttaatggggttgtgcagggcttcacttgctctcggaatttaccttccttctcgagccgtgccgcgaataaccttcacgacacagtgataacgatgttattaaatactccccccacattcaccgcccaaaaaaccaaaacagtgttcttatccagtcctctctttttttgtcttctttcctttaaaaacccaaccgctcttaatgtgaggttgatgaaaggatgcttttggaagaagtgacatttggttaaaacgttttccccctaatgcgccggtggaaaggggcgggggtgggtgtggttccctaggctcctaagactggccagtcagctttgaaagagcggggcagaagtcgggagagggctggggaaggctttgggctgaggggatgtgtccctgaagcttcagatctggagcccaagggaggcaacctccctctgaaaagccggtcctcagctccatccagccctctccgcgggatgtaagccctgctccgtagggcccgaccc

SEQ ID NO: 5474 - DNA, 1083 bp, Homo sapiens
  chr7:27282211-27283294
  hyper
tttcacactctcctccccaatcgagcgaggcccacacctggcgcatcactgccgagccattagctgcgggtttcctttcatcttcgctgtggcagacgtttctatttatccacttgcgctcgccgagtggcgtcaccagcggtactgtaatgacgattgcagcaggaggatgacagcttagaaagaagagggcaatggggcttcctcccagaggcggtgcggcacagaggagcgctcgcttcacaaggtgaccctagctcccaccgccaccgccgcggtcgcggtccagaccgcgctccagcagctccgcgccctcccaggcacccggcctttctttctccctcttgcaaccaagatccgtccggccgctggagacccagggagccggggttaggaactcacttggggctttcccctcccccaccggagagccccgggatggagagccgaaaggacatggttgtgtttctggatgggggtcagcttggcactctggttggcaagagagtctcaaatttgtccgaagccgtgggcagcccgctgccggagccgcccgagaaaatggtgccccgtggttgcctgagccctcgggccgtccctccggccacccgggagcgcggcgggggaggcccggaggaggagccggtagatggactcgcaggcagcgcggcggggccgggcgccgagccccaggtagctggggcggccatgctcggcccaggacccccggccccctcagtcgacagcctctccggacaggggcaacccagtagctcggacaccgagtcggatttctatgaagaaatcgaggtgagctgcaccccggactgcgccaccgggaacgccgagtaccagcacagcaaaggtagccaccgtgcccctccgctccccgggcctcccactgcgcccacccttcacttcggcgcaggccaggaggaagacactcccttcccctagggcaggatggctggggggacccacctgagcaactctctctgctatctgcgttctggcgggggtctcctactgtgttctggcattggcgggactgagggtgacagcagtgccttgagtgcggggtgc

SEQ ID NO: 5475 - DNA, 132 bp, Homo sapiens
  chr7:27285386-27285518
  hyper
ggtgtctgctttggctgttcctgccctgcgaacactgtccccggagcgggaccagactactggcctctgagcatcgggccaagtccagctactgaacctgctccgctcctctccccaggtgtggttccagaa

SEQ ID NO: 5476 - DNA, 204 bp, Homo sapiens
  chr7:27285620-27285824
  hyper
cggcctgccctaccccttcccatcgcacctgcccctgccctactactcgccggtgggcctgggcgccgcatccgccgcctccgccgccgcctcgcccttcagcggctcgctgcgcccgctcgacacgttccgcgtgctgtcgcagccctacccgcggcccgaactgctgtgcgccttccgccacccgccgctctaccccgggcc

SEQ ID NO: 5477 - DNA, 30 bp, Homo sapiens
  chr7:27289537-27289567
  hyper
tcaaaccctgcacccgcactctccagacag

SEQ ID NO: 5478 - DNA, 34 bp, Homo sapiens
  chr7:27289812-27289846
  hyper
ccagccaccatatgtccgccggagaataagcgtg

SEQ ID NO: 5479 - DNA, 178 bp, Homo sapiens
  chr7:27290940-27291118
  hyper
cttgtgaaagtcatatccttgcgtcttcatcgagattatttatagcgcagtgagcgctgctgaaaggtatacgctgttaacagggacaattacttaaagggaagcgtttgtaaaatggaaaacaaatgccggggttggtaacaaatgggatcaaaagcagccattccaatctggctcc

SEQ ID NO: 5480 - DNA, 396 bp, Homo sapiens
  chr7:27291314-27291710
  hyper
gggctgggcaagccgaggaacagcgagcccccggacgctgactgcaggacgtcccagtttgtgcccgggtctccgtccctccccgtacggggctcgtacccccgggcctgggtctgacccacagggcgctgaggcctttgtagctgaagtcggaaggcctcgttgcgagcgcggcacaggttgctggtagcttctggactctggaggcttggccttccttctaagccgatggcggggaaagaacctcgtttccacagcttccccgacccccgccgcttgccatttggggacgggaagcgcgcccgggtcgcttcacgtccctctgggccggagccctttccatggctggctcctctgggggcccttgggcctgtgagcagcgtctacttccctcag

SEQ ID NO: 5481 - DNA, 297 bp, Homo sapiens
  chr7:28448993-28449290
  hyper
cgtggtcccttcacccgggctccgctcttgccttctccacacttgtttggtaagttcctaaaaatacggctcggccacttctggggcttttgcatttagccacttttgttgcacttgccgcaggagccatctcgggagtgtacttgtttgcaggggttggttctcggcagcagccgcgaggttacttggtccagtgggcaggtcacagggcaaggagtagggaagatgcgatgcatttttttctggagggtgatctgtgtttgtaaacattttggcggaccagagggaagtccggcc

SEQ ID NO: 5482 - DNA, 123 bp, Homo sapiens
  chr7:28449658-28449781
  hyper
cgaggacgccgggtcacctagggggcgggtgggcgcgcgcgcagggggctcgctctccccggtgcggagctgcagctgccacctctcccgccgggctgccggctgcagcgggtgggcgcgcgc

SEQ ID NO: 5483 - DNA, 239 bp, Homo sapiens
  chr7:28449857-28450096
  hyper
cgtccgctccagtccactcctccggccgcctcctgcctccgctgctttcttgctggcatcgttacctcttcccggccgctgccccaaatgacagctccggctcgagctttggcggcgcccaggcaattcccaagacctggcggcggagtctccccctgcggcagattctcggcagaatcacttgaacttttcacgaagttcttagaggggcaagatgcgaaggaaggaaccaaggagat

SEQ ID NO: 5484 - DNA, 30 bp, Homo sapiens
  chr7:28725661-28725691
  hyper
gcacattacatcatcgcttggcctggaatc

SEQ ID NO: 5485 - DNA, 1729 bp, Homo sapiens
  chr7:28995413-28997142
  hyper
gagcgcaggggccgtcgggtggagtacatgtgccgaacgtggaccggggccccgcccttccgcctagcccgcagtttcctacgcagccagcgagacgcccaggccgccaaggccaggagcaccagcagcgcgttgaccgtcagcagggccaaggtcagcagctggtagtcgacgccgccccggctcccggcctccggtagggtgaccagccccgcgcagtggtcccggggagccacagggcagacacggcccccaagcacgccctccacgcacaccaggtagggggtgtccccgcgcagctcgcgcagcgtggccgagtcgctgctctcaggcaggtagacgaagcggtggaacttgggctgctggccaaagcggtcaaagagcaggcggaagcgcgcgccgcccagcggccggggactgcggtgctcgcgcacggcccagcgcaccgaggcgctgtctgcgcccaccgcctccaccgtcaggttgcacagaatgaacttgttgaagtcgcatgggtcggacaccagcggcggcagcccggccccaccgtcggactgggcggcacgctcctggtgctccgtgcccagacgatgcttcgtcgcgcgctgccaggggtcgccggcgggcgatggcgcagagccaggagaggccgttggggtgggctccgcgagggcgggatctgcccgagtcggacggccccgctggggcttcttgtgcaggtctagggactgtggagccgggcccgcggcggcagcgacggaggggctgggctgctggaggcccgggccccgccgactcagccttagggcgctgcggttgcctaccagctccctggcggccccatcccaggccaccccagctagaaatcgcccctgctgctggagctgcggctgcggcggcagctcctccgcgagacctgcaggtggcgtcatctcctcccctgcggccgtgggtaggggctgccgcctgcggtcagcggtcagggaagctgagggcgagggatccgcgcaggatccattttgcagctgctggtcatccaggtaatccaggtatttgcctcgcagggccggggggtggcgacactgcacgaagacagtgaggagccggccctgcgagtgccagtcgcccatccagcgcttcaggcctcgcagccggcagtcgcaggtccagccgttgccgtctagatccagccgataaagggctgggctggcggcgaagatgtccccggatagggcgctgagcgcgttgttgcgcaggctgagctcgcgcagccggcccaggtggccgaaggtggccgggtgcagggcggacagctcattgccgctcaggtccagcgcctccaggctgtgcagaggctccagcagcgcagttggcagctggctcagccgattaccctccaggcgcagctcgcgcagggcctccaagccccaaaaggcctcaggcgcgaggtgcgtgagctggttgcccctgagcgagagcaggccgagacgtggcaggtgctggaagatgcgcggcccgaggtgctgcaggttgttggccgagaggatgagggaggagagggagcgcagcggtgcgaaggtggccgcgtggcgcagggagggctgtagctcgttggcagagaggttgaggaagcgcagcttgcctagctgggcgaaggcgttcttgcccagaaagcggatccggttggactccagatgtaggtagagcaggttgcccaagggagcgaaga

SEQ ID NO: 5486 - DNA, 479 bp, Homo sapiens
  chr7:28997166-28997645
  hyper
cgttcccgtccagccgcagcttgactagactctccaggccctcgaaggagccgcggcttaggcggctgatctcgttcccgttggcgtagaggatgcgcagcttgcgcagcggggccagcgtgcccggggcgagcgcctgcaagaggttgttccccaggtacagctcttccagccgcgagagcttctcgaaggtcttggggtgcagagagcggatctggttgtactgcaggtccagccgtctgagctgccccagacggtggaagtcgaaggccgtgatgttggttatgaagttgccgccgaggctgtaggtgagcacgtcgtgggggctcggccagcgagctggtcttgggcactacgcggagccccctgttggtgcacaggagatgctggggatgctggcagtcgcagcgctccgggcacacgggctcggcagcggcgggagcgcgaggcagccgcacaccacgagcaggaggcgcaag

SEQ ID NO: 5487 - DNA, 587 bp, Homo sapiens
  chr7:28997676-28998263
  hyper
cgtgcagcggccggatcgtcctcttggcccgccggctctgtgtctcctctgcattccccttagcctggccagagtcgctaaatggcctctttcggacttcgcagcgccgtccagcccctcctccgtcctttgtccggaggccggcccgggtctctgcaggcgggcttcgcccggccaagtcaggcggcgcggggcgctctgcagaccccgggtactacttgttgcatttctgtataaaactgtttctccgggtgcgcgtcggcgggcgggaggagggagcaagacccggcgctttttgtttgcagctgagtccggagagctggattccctggcgcggattctcccagccgagtggattccccagctgcaggcgggagccgttccaagagcttcgcggggcgcggcttggcagcagagccccggctgctcggcccccgcagacggcaccttctcgctcgcggtcccggacggggagggcggctccagtgcaatagctcggggagcacgcgggctgcgtccggaagggacccaagtctgcgagcggagagcaaacggggcggaaattcgttcttcccacactctgcccg

SEQ ID NO: 5488 - DNA, 609 bp, Homo sapiens
  chr7:29185639-29186248
  hyper
cacatccccaaaacacgcgttgagggagtaagggaaagtgtcctgcacccgccaccctcccgcgctaagagcggcagaggaccccacagcttcgtacttccccggaggagctcctggagtaggagacggcttctagcctggaagaaccccgggtgcgacagttgtgccaggaaacttcaagagtattccctcggctgggcgcacgcagtacatccccaatgctccaatttgaactttgactcggccacgaccaccccactccagtctcactctacggtgctttctcccctgttggtgctgagggcttttgagactacctgccccgcgctccctaagtccgagggaccgaggcgaggacctgtcccgctgagctggcacgacccacgcagggcaggcggcacttacgcggcgcagtcggtgctcctccctgagccgcggcgcgcaaggaccccagccggttgtccttgcagcgcttcccaaatcaggcagaagtgaggcagccccacccagtcacgaggaccctgcagaactcgagcctttaagcgctcctctaggctcacatgacccagacccacagggcaaaaagtgcgtcgtcgtgtcccaacctcc

SEQ ID NO: 5489 - DNA, 987 bp, Homo sapiens
  chr7:29234079-29235066
  hyper
gtcgctctgtctgtccgtctcccgccgcctctgcccggtctactcgaagtgcggcgggagaggcgggagcccaggagagggtgcgggagctggcggggcggctcggagctgccaggacgccctggtcccagccgcgcacaggggagcgtggacggcagaggggctcggcgggagccgagatccgcccgtcccggctgcccctcggcctccctctgctcccacctaccccctgacacccatagaaaagcgtgcaaaggcgcggagcgggacggaaaccacaaataaatagcggcggcggcagcgcgtcatctggtggagcaggaagtgcaggcagagtccggaggctggtgctttctgcgcgtccccaggactttgccatgggctgggggccgcggaggctgcgagcggccgggcgagggcagcggcggcggcgtccgcaccggggctgagcgagcagcgacgcgaggggcgcgcggagatggcagcgtccagcaactccagcctgtccggctcgtcggtgtcctccggtgagtttcagcccgtcgggcgctgctgccgcgccgggtctcgccccactgccctcgccccgcagcctgggatggacagagcctacctgtggccatcccgcccgctctctcggaatgggggcaggcgtccggggtgatacttgtttggttcgccagcacctcggtgcccagagcacctccgcgcctgacatctgacagcgcagaggtgggagagcggtggtgcccttagtgtgcggacgcgggtgttccggggcttggagtgcagcgagcgaaaagcgaaaggagcgggcaggctcgcactttctggcgcagctggagcgggggctggcggggcggagaaggttggggtgaagcagagcgccccgacctgtttgccgtgccgcgcccgctaccctggacacccaaatccggagcagaggggagcaaaccctcgctcctcgcagacttgattttctttgtt

SEQ ID NO: 5490 - DNA, 30 bp, Homo sapiens
  chr7:29602702-29602732
  hyper
caggagtgcaatccccggttcacttcctgc

SEQ ID NO: 5491 - DNA, 1124 bp, Homo sapiens
  chr7:29603025-29604149
  hyper
taaatgacaatccacagaaagcgcctgcaacggcgcctggctggcaaacagcggacttgttaattacagcctttcaactaagggcgcctgaaactcgcaaacattttgctcgggtgtggattcgctcccgttagttacaaacttgggatcccgggacccggaaagcaagggggaaaaataaatcgcgatggggccaagggacagctgctgcggcaacttttacccagcggagcccacctacagcctcagcctccgggtctcaggtctccgccgtttcttctcaaggagtcggtcgggggagcggcactgcacagcttttctccaatcagacacctcaaggctggcgcctgatccaatctcctcccctggagggtgggaacgcgaagttcctacctgcacctgtggcagcggtgaccgcctcctgggttattttcttttctcccccagctgccccagggttctggtttcccgaatcacttggcaaataaccagcaggtgggcagatgtcttttttgcgttcctacggacgcgtaggcaagttcgatgcgccggagtgaacagccagggtcccatctctcagccggctcccgggcggtgctagcagggaagagggacgcgccggcgaatgaaacactactagcccggaaagccgccctggaccttccacccgggcagcgagtctggcggcccctcgccgccgccccctccgaccagaacagactgcgctgcgagccccgggcttccgccgcagcgcgcagcaattggaggtgccagaggagaccagcagcagcacttgatttagctgggctgcgggaattccgacctgtacactttccagaagcctgatctctccaagtccgcgcccagggactcgagccccggcttccaggttgacccgagcgcgcccccttcgtgctctcggccgcgttcaccgcgcgaggcctccgggtcctgttaagcccgagcaggtgagcgactgggggtggttcggcgtccgccgagacagagcctggccccgggggtcaccctggggtgctgcctggtacctcccaggtacccgcctcccggagccctaagagaggctgaaaaccacggacgctccaggactccgttttctgtacttt

SEQ ID NO: 5492 - DNA, 419 bp, Homo sapiens
  chr7:29604360-29604779
  hyper
aattgtgcctgagggcgtgggtgccttttgtaccgaaagaacttttggccgttttttcttgtattgttttcaagtcgctgcccgagtgtgtcctcagggcatcctggggaggagccggtgttgcggtttcggggcgcagccgaggccgccccgccgcctcccgtaggcgatcagacttcctctccctggcggttccgggaggagaacctcctacaacaaacaccgccgaagtttccctctccagcgcgatcgccaatcccaggagcgcccggcgcgtgggctgggaaggagccgagcggaaacctggaagtgagccgcggcgcaggcgaatcctgccgttgctggtggcagcgcccaagagaccccgcacagaaagtgggctgggagtctcgcttgctgtacccgcacctaagtgctca

SEQ ID NO: 5493 - DNA, 370 bp, Homo sapiens
  chr7:29724331-29724701
  hyper
cggcccacgtgcagccgcgggaggaccgagcgcgggcgcgtggagaggggtccgtacctccaaacatgcgcggtgagaggtgagctggtaaggagccgatcaccaggagcggcccgccggggctccagcccaccggccggtgccggccgccgccgccatcctcagggctgctgtgcaccgagtcctgcgagtcctacgggccgctgctgctgttcgggatgctgaaagaggactgcgccgcgaaggcccccgacgccacgcccccccgaggaaacagctgcggggccgccgcggcgccgccgggctggtgagcgctgggcacctgggccgggaacctccccgcggcggcggcctccggcccccggctctg

SEQ ID NO: 5494 - DNA, 55 bp, Homo sapiens
  chr7:29725076-29725131
  hyper
ctccagcaggaaggggcgactcaggtggcggtgcgactgccgctggtttcggttc

SEQ ID NO: 5495 - DNA, 740 bp, Homo sapiens
  chr7:29846007-29846747
  hyper
gtcccagagcgaccccgcccgccggggccgtgtccctgccgcggggcggcggcggctcccaggcaggagcctgcgagcaggtgggggcggcggccccgcctccgcgtcccggcagcaccagagccggtggccggggagcgagccgggcgcaccgagcgcagctcggcggtagcggcgccgcttggagcacgggcgctgcgggacggagcccggagccggaggcggcggcggcggagacgtcggccggagctcgagtccagtccagcccccggctccgccacctgcaggtagcggcttcccgcgcgggtgcgggtcggtgcccgagggtggaaggaacgggcggtgtggcggccgccgccctggtcggtcccggagcagagtggcccggcccgggacagagatcctgagggcgtgggagggccggggaacccccgccgggctgcagccccgggcccaggaggttgtcgacgtgccgcgcggcgctcacgccccccacccgcaccctgccacgccgccccggccgggccgggccgggccgggcggaaacaaaccgcggggtggggagcgaggtcaccacggggttgcttggtgacttctccggactggactccccggtgagcagcccctggcaccgaggccgcctcggcctggtccttcgcgacgctctctcttctccgcttcgcccccggaacaaaaggctggggtctcgctggggagggggctgtcgcgggaagggctgg

SEQ ID NO: 5496 - DNA, 864 bp, Homo sapiens
  chr7:30028510-30029374
  hyper
atttctctcggccctcgcgagtgaggtcgccaaatactcgacgcctcaagagcgagccgaggaggcagaggccgaccaagccggcctctcggcagccccgcccggcgccccgcggagaacgcccgggtgcggctcgagggaagttgtgtcaagtcccacgcgcggcccgcggagaacccaggggcggcccgcgcgcgtcggcctagcggggagggctgctccgggacacggtgcggcggccgcgggcgagttggacgcgctggcagagccgggccgaaggcggcgggcgtctccgggcagccatgttcgcggcgcccgcccgcgcagcaggtacggcacctcggggaaggtgcccggctcgccccagaccccagggtggcgaggccaggggcccacaggcacatcccagtgggcagcaggttggctgccaggaaaaggaaacccaggaagagcagcgcggggaacccggctgcggtgcgggagcccggggccggcatccctccactgcacccccgcagtccccgagccgagtcaccccggcttcaggccgaggccacctctcctctgaccgcccccaggctcccagcccgcccgggccagcaccgggaatcggcctggggtaacgctacccgcgggttcggagggacagcgggaggagatgaaacgcaggaggtggcgatggcgggtggggtgaaaccgccgggaaagcagcgctgcaaacgccctgcgctcccagacgcggctcacctggggcggcgggctccgggctccgctctccgctctgcggtgctgaggctgcggccgccgagggtgcgggtgctgccgggtccggattactgcggcgacctcgggggctgcagctgc

SEQ ID NO: 5497 - DNA, 30 bp, Homo sapiens
  chr7:30066339-30066369
  hyper
tcttataacgcggccgcctgggaatagcag

SEQ ID NO: 5498 - DNA, 247 bp, Homo sapiens
  chr7:30067777-30068024
  hyper
agaccctcaaacggcgggcaccatttacagtcagaactgcgctccacacttgtctcaggggcctccctcctcccgtcgcctagtccgcagtccgcgtctcgggactcaatttccctgcgggccgttcccgcaaactccgccccgccgccgctgccgcgaaatcccggagtggattttgggaaggggcgcgcgagcggcgccctgggcatgcgcgagcgcgtcccgggcccggcgagtcgagggttca

SEQ ID NO: 5499 - DNA, 169 bp, Homo sapiens
  chr7:30517955-30518124
  hyper
ttctaagctgctggcacgattgagaacccctgcgttcgaccacagtgggataaacgattccgctgactgtgaagttcatccctctcaactttcgctacatgcttcaaactcgcgggtttctccgcttggttccacccagagctcctccagagccgcgctgcgttccgcc

SEQ ID NO: 5500 - DNA, 480 bp, Homo sapiens
  chr7:30721462-30721942
  hyper
ctttactccctaaaccgccttctcaggaggccggtgtagagcaggcagcgagggccgggggcactcacgggtcgtgttgtacttgacgccgttgaagtactcggggcacggcctctccacgagggctccggcagcgctgcggggccagcacgttccgatctggtccaaggtcgtgttgcagtaggagtagggacctggcggcgggagagagcgcagtagggctcagaggggcccgcagggacgcggggctctcggagcgcggggtcaggggcgcacccagcgcgcgagagaaggagcccgcgcagcctccgaccgctcgcctcccgcctaccctcggggtccaggggtggcccccagccgtccaagagcagctcttcagccagcgccaggctgcagttggcctccagcaggctgtggagcagtgccgcgtccatcgcgtcccgcagccgcgtgcggagagggagtgggagtgcgcgcccg

SEQ ID NO: 5501 - DNA, 317 bp, Homo sapiens
  chr7:30722018-30722335
  hyper
cgatctcccgggcagcctttgggcgccacctccggtcgcccagagctgtcaagtggggaccttcccggagaggagccgccgagtgcacggagctgcgggtacagccgctccgccgcggccaatggctgcgccggggggcggggccgggcggctcctctcggaggggctcagtctccagcccccgggccctccaccctgcccaaagtacggcttctcagttcgcagctctcttccactcgcggcgtccagaggagggcggtgggctggagagcgtgggcctggggtgacggaatgctctgtgcggggatcgcaggccc

SEQ ID NO: 5502 - DNA, 463 bp, Homo sapiens
  chr7:31091703-31092166
  hyper
gggctccacctcagcgcccccgacccccgccgctgggatttcccgccgcagctcctgctccagtctgtgctgcgggtggggtcgggttgagcagcccggcgccccccaccgcgccccccaccgcaccgccctcgatctaaccccgcccccgggcgctcattggcctgcagcaccccctccccagcctgtgaagtgagcagggggaggcggtggtcggtcgcctccctccagcgcccagcctggcttcgcggcggaggcggcgcctctcccgcaggacggagccaagctggactgccgcgccgcgcggggcgggcaaagggggcgctgcgctcggccccgggcagggagtgacggcggcggcggcggctccgggcgagcgtggtccccgcgtgcgcacacgcacacgccgccgcgcagggacacacggaccccggccgccagccggccacacaggcgcggagac

SEQ ID NO: 5503 - DNA, 457 bp, Homo sapiens
  chr7:31092241-31092698
  hyper
cgtcctttgcggagtctgccccggccccacggacaggccccgcagtgagcaggtaagggtcgccccgccgcggctgcccctccacgcctcggccgtcttctccccctccagaaccttcgcccagccgggacctcggatcccctcctctggcttggcggtctccgccagccgcgacctccaccgacggagagcgggcgagggccggcgccaggcaagcctcccagatctgaaatgaagccccctcccgccgctgcgcccttcctgcgcgtcaggctgacaccccccaacccaagtgtctggcgctgcgctcggggcggccgatcgccgcagactgccggggtgggggtcgacctagctatctcacgcccctcctgatgcggagaagggagaccaggggggcaggcaagccatgcggccggagggacccggagggacatgcctccctacccttaggtgg

SEQ ID NO: 5504 - DNA, 77 bp, Homo sapiens
  chr7:31092713-31092790
  hyper
cggatcgggaaggcagggctggagggtcccccggggctaggtaccgcaatccgcacggggtttgaggggtgggcaag

SEQ ID NO: 5505 - DNA, 30 bp, Homo sapiens
  chr7:31232816-31232846
  hyper
cctgggtgagaacccggggctgcgcgagca

SEQ ID NO: 5506 - DNA, 622 bp, Homo sapiens
  chr7:31375701-31376323
  hyper
ggtagaggggacagacggctgtctagtttgggcaaatttccctctacctggggcgtgggggcgcagttcctcctctctttcgggccttttcccccgccctctggggtttgaatgaacaggtgctaacacaccagcttagaagggcgcgttcagcacccgcgccagcagctgctcggcacctttgcccctcggtggcggctgccttgcgcaccaaaggcccaggggcgtaaaactggaggcgtagagggagagggagacgctgtcctttgcagaatggggcgcgggcctcgcagcctcggctcaggaagtcccgccagccgtgggaggagcagggcagggtcagctctcggctgcacttgggcaagagatagctggagctatcgccgcctgcgccgcgtccctgcttgtggcacaaggggcgggtgaaggggcaaccccctttctccctctccgagcgagtgcggggcagagcctccaggcccgcgcgcggcggtgcgctcgccgctctccatgccacccagcccctttcttgggcaggccaggtcagtgtgggcgccgcggcccgggttcgcagggcgcagtcccccggcccccagggcgcccactgcgggcgggacacggg

SEQ ID NO: 5507 - DNA, 137 bp, Homo sapiens
  chr7:31528305-31528442
  hyper
ttgtttctaactgagatgtaccgaaccgtgaaaggatgtgggctggacatactaactccaaggagcccgggtatcattgtagtccatgtcaatggcgccccctggtgttcgggggcgcagcagccctgtgcgagtcc

SEQ ID NO: 5508 - DNA, 30 bp, Homo sapiens
  chr7:31568350-31568380
  hyper
aggcctcctcccctctttcccctcctcttt

SEQ ID NO: 5509 - DNA, 44 bp, Homo sapiens
  chr7:32110621-32110665
  hyper
caagtgagaaaagtcgtctgtcagcgcccgggctggtgtctggg

SEQ ID NO: 5510 - DNA, 30 bp, Homo sapiens
  chr7:32110973-32111003
  hyper
ttgaaatattgaagcgactgatggggacga

SEQ ID NO: 5511 - DNA, 126 bp, Homo sapiens
  chr7:32338091-32338217
  hyper
cggcttctgtcccgacccagtcgccgctcccgggggctcccgcccggagagcaccctccggccccagcccgacccctgagctccccctgcccgcttagaaaggaactctgaccgccaccggagagg

SEQ ID NO: 5512 - DNA, 502 bp, Homo sapiens
  chr7:32338283-32338785
  hyper
cgatgctgaaagtggcgctccggcattttttgaagccctccttcctgttgccggcgtccgtcatggctcggccggccgggcaggggcctcgcagcgagaccagcggcgtctgcggtcccccccacggcggagtgagcagcccggggctcggcggcgaatcctcccccggccgcgccgcgctgtcactctcagccccgccgcgcgctggcagctgagcgcctggagacaacagcggggacccaatgtcaacagctaaagcgctaggagctcggcggaggcaggagccgtcgcgactgccccatctccaagccgagttccagaggcggcgagaggagtgtcaggaagggaggacgcgcgcccgagcgcgtggacggggctgaccggtgggcgcggagatccctgcctggccacgctactctctgtcagccgcggatcccgcgcgccacaggaaagtctgttttctacttcaccttctccttccgtctctggtggctggggggat

SEQ ID NO: 5513 - DNA, 261 bp, Homo sapiens
  chr7:32467322-32467583
  hyper
cacgaggacgagaaacgggaaatcctgcgggagatagcgctttctcttttcccccagaaagtctccaggcagcagctctgtgagatccttaagcaaggtaaggaaactcacccgctgcgctgcggcttcgtggccagcagggctgggacatactcgcctcacgcttcagcaccggggacagctcctgcctcgccaacttcggcagctcttctcgatgtctcgccgcgggctgtgcctcacaggctacgggaggggagagtg

SEQ ID NO: 5514 - DNA, 30 bp, Homo sapiens
  chr7:32529846-32529876
  hyper
gccagggcctgcctcggaacagcccctcgg

SEQ ID NO: 5515 - DNA, 87 bp, Homo sapiens
  chr7:32767519-32767606
  hyper
cctgtgaaattaatctcgcagggggagcgaagccacggttgcgggggagcgaagccacggttgccgggaagcgcgggccacccctcc

SEQ ID NO: 5516 - DNA, 31 bp, Homo sapiens
  chr7:32768357-32768388
  hyper
gcgcctcgggcggcgccgcggtggccccggc

SEQ ID NO: 5517 - DNA, 619 bp, Homo sapiens
  chr7:32982309-32982928
  hyper
tgaggactagaagtcccgtcgcaggcactaggttcctcacaggcccgcacccctgcctgggtcctgggggcttggaggacccagcccagcgcccaacacggcgccgggcgcccctgttcccagaaaacgggcggcgcgcggactgcggcccagacggctgctcgagactcacaaggactccaggcgcttgagctgctgcagctgctgggcgtcgtgccgccgccgcttctgctcccgggcccgctgcagttcctgatccagcggctcccgcggccaccacgcgcccccagccctcgcatcctcgcgccccggccaggacgacatcgcggcacctgcggcgcggctctggctgcggccaagagggcacttcctccgtgcggcgccccttcccgccgccgccccgcgactcgcccgggaggggccccgaagtcccggcctcggccgccagatgcccgcctgcccgcggccggccccaagtcagtgcgcagagccccagagcccagccgccggtgggcggggagcgcccgctggcggcggctggagccgaggcggggcggggccctggttgggagcctggggaagcttccaggagcttcagggttcccgccaggccacactc

SEQ ID NO: 5518 - DNA, 822 bp, Homo sapiens
  chr7:32996722-32997544
  hyper
attggatccacggccacgtaggagcccctcacggcaccaaacccggtgtctccagggacgggcggagaccagcgggtgggcttgggcagtacgcgcttttctcttccgactttgggccaaagccttgtccggagatcacagtgtctcgctcggggacacgccctctctaggcccagacttggtccccactggagttcccagcccccctccccgctgcggcacgcacattcccaatgccgggcggggcagggcgcagcaggcccgccctcggcgcgcggccaggctgggctcctcccctggagctgcggccgggagggcgggcggccggggagacggggtggcggctgcagcccgggtagggccaggagacccggtccacgtttgcaaacgcagccgaacgcccaggccgacccgtgccgcccgagcgccgcgctgcgtccgcgccactcttctcgccgccccgatggcgttccggggctggaggcccccgccgccaccgctgctcctgctgctgctctgggtgaccgggcaggcagcgcccgtggcgggcctgggctccgacgcggagctgcagatcgagcggcgcttcgtgcccgacgagtgcccgcgcaccgtgcgcagcggcgacttcgtgcgctaccactacgtggggacgttccccgacggccagaagttcgactccaggtaccgcgcccttggcgcccggcgcggcctcagcggatgcgcgtccctctctccggacaggcctttccctcctgccggacctcccctagctccgccccgtgcagccgcgctcctcccttcttccgctgcccagatcct

SEQ ID NO: 5519 - DNA, 361 bp, Homo sapiens
  chr7:33944587-33944948
  hyper
ctggggaactggaagctgggccgagagagttcccgctgcagctatcgcgcagtccctcctgcgcccgggcgcccccagcgggttccgggaggcgcccggtgagcccacgtctgttgcggcggagcgagcgcgctccgggagggccgagagccggcggggctggcaggaggtgaggagtgcgggagtggaggacgctgcggcagcgacagcgacagcccccgaaacagtagcggcagcccgggcggcggctgagcggcagtgcgcagtcggcagcgccgcagctcctctcagtctatctccggctgccgcaacaccccttcctcctggccccctctccggcgctgaggggctgactgctaag

SEQ ID NO: 5520 - DNA, 13 bp, Homo sapiens
  chr7:35226509-35226522
  hyper
gtgcccgttgcca

SEQ ID NO: 5521 - DNA, 21 bp, Homo sapiens
  chr7:35293065-35293086
  hyper
tccccagtcctcggcggacag

SEQ ID NO: 5522 - DNA, 112 bp, Homo sapiens
  chr7:35293182-35293294
  hyper
cgttggcccgagaggagagttggggcttgggggacgccgtgaactccatggtccccagcacgcggtcctggccagggacggggtcgtccgaactgccgtccagattccccaa

SEQ ID NO: 5523 - DNA, 749 bp, Homo sapiens
  chr7:36192381-36193130
  hyper
taagccccctaagtcccgcctctgcgctcccggggcctacccccgcgctcatggccccgcccccgcttttcctaccccatcgcgccctggccccgctcccacactctatgaccccgcctctcgcactccaggcccgccccacgcgctccagggttctgctctccacccatttgtgccaggccacgcccccacacccatggctcctcctctcgcacgccagggcctcccctcgcgctctctggttcgttctccaccctcttgagccttgatgccgccccctcttccatggccccgcctctcccactccaggcccgcccttgcgctctcgggttcctctctccacccactggtgccaggcctcgccccgcgccagggcccctcccccacgtgccctcgggagtcccggggaggagttgccgcgcggaggaggcgtggccgcggtgcctgcggaggcgcgagcggcgcggcgcggcgcggccgggactttggctttgacaccgactgcgagcgggagccgtgcggctggtgctgggtctggactggctctggcggatccccgcccgagttgggcgcaggactttttgccggggtaaacgcaactgcggcggcgccgccgcaagccccggtgcagcctcggcggcgggtttcgccgccgctgccgccgcctccgagcagccctgcggcttctattcactctgggagagcgatgctaagtttctcccatagaaagagccgggacacgcagaccg

SEQ ID NO: 5524 - DNA, 39 bp, Homo sapiens
  chr7:36217588-36217627
  hyper
ctgggattacaggcatgagccaccgcgcctggcaccttc

SEQ ID NO: 5525 - DNA, 30 bp, Homo sapiens
  chr7:36429891-36429921
  hyper
ctaaaaggctgttgcgagaggtctttcagc

SEQ ID NO: 5526 - DNA, 30 bp, Homo sapiens
  chr7:37078723-37078753
  hyper
ctgctccaatttttaaaaaaaaaagattta

SEQ ID NO: 5527 - DNA, 81 bp, Homo sapiens
  chr7:37487183-37487264
  hyper
gagttcctggctgtgcggtcacacacacacacaccgactcacacacacacccacaacaccccccccacacacacacactca

SEQ ID NO: 5528 - DNA, 130 bp, Homo sapiens
  chr7:37487323-37487453
  hyper
cacacacacacacacacacacacacacacgccgcctcgcgcgcgctcgcggcacagcaccgacttcccaaccccaaacacacgcgcgcacccccgggacagctgagttctgtatttcctcttcctcaaag

SEQ ID NO: 5529 - DNA, 210 bp, Homo sapiens
  chr7:37487755-37487965
  hyper
gggggattccctcccatccccgagtgcaggagaagacgccgagtctgagccgcagccgcttctctagctctataggaatcttgactccaagatcccagccccacatcccccgtccccagtaaccccgcgccagcgtcgcaaccctcccgcgccccccctcccgcagaccctggtcgaaatgtctcggcgggctcccgggccccgggccct

SEQ ID NO: 5530 - DNA, 1099 bp, Homo sapiens
  chr7:37487984-37489083
  hyper
cgcacctccagcgccccctccctccgctcccactcccactcccgccatccccggagctcagacttccccaactgcagagcgccccgacgcgcccgcagccctcaccctgccgagcgcggcggccacccccgcccgagccgcggcgcccccagggaggaaacaaaagtgtctccgcggcgcccggagtcccccggagcaggacgcctcctcccggccccagtcccggccccctcccctgccgcgccgaggtcagcgagtcggggcgcggcgccagcccaggaaactttacgaacctgcttggggtcgcaggacagcagcggcaagggttcccggcgatcagagctccggcgacccgccaccattgaaggggaactggaggctctgtcgcccagcgtggggccgcggcggcgtgggtggctctgcctctatcctgtgcccatcctcgcccgctcccgctcgccccagcacacgcacttacactctgggtcggccggctgctgcaccgccggctgccgctgctctcacttcctcttccttcctcctgctggccagagacacattttgcatctgcaaggcatccggagatcagccgcgaactctcctcccgagcggacgctgcggagttgcagccgccgcccccggcacctgcgccaggacactcgtggtctgcgcgttcgccttgcgcccgcaccctgcctggtccctgcccactgcactttgcctagggggatgcccacgactttttgaagtccccctacttaaaagacagaaatgtcaaacaccatgcatgcctcagatctgctataaataatatgtgtgcagagcatgacttcgatgagctcacacacggcgtttggaggcactaattaactccgtcaccctcatagcgccatctccgggaggccaaaagcgagtagcatcttttcacatccttttttaatttttggcaaccggttccggatattaaggggaaacttcggtgggctgtttgaacgctactttaagacgtgtttgttttgacgctgtgcctctacccttggacagagtggcaaaaaaaaaaaaaaaaagtttcctccctctccgtcgacatctatgtatt

SEQ ID NO: 5531 - DNA, 1087 bp, Homo sapiens
  chr7:37955576-37956663
  hyper
ccacctcctacaagcctcagacgcccctggcagccttaggtgtggccgcccagttctcgattggcagccacagccccgggcgcctcctcgcctccctccatccttcctacggcctcaccctccgggaggtccgtgacgatggcttcaggcgagatgcacacgccacggtcatagacaggcagctcgtcgcaggccaggctttcgggccagctgtggttgtacatcttcatgaggggctcgcagtcgtcgcgcgcgcgttggcacaccgacttgcacggcttgatagggtcgtgcaggaactccagggtgcaaatgggcgcgtacatggcacagaggaagaagcgcagcacggcgctgcagttcacgtccaccagctcctcgtactgctcgatggccaggatggcgttctcctgcgtgctgtggtgcaggtggttgggcatccgcgtgatgttccagggcatgtgccggcacatagggatgcgcaccgcctcgcagggcgcgccgcgcacgcccagcgccaggtgcagccacaggcacagcgccactaggatggagaggaacatggcactgccctctcgcgctgcgaccccggcagacagaaagcgcccttctcttcctgccaccctcatctttcgctgtcccttcgccgaggaagaaatcctctggggcgcaggagagtttcttcccccaaactccagtcggcagcaaagcggggccgcggggtccggccgcggagctccgccgtctggcacacagggcacgagcagcgccagctctcagccttcggggcgcgaacccgcccgggcagctccagtcccggactccgcagctcggagcgcagccagccacggccattgcgggaccctatttatcccgacacctcccctgacgtgggctcggaacgctcccttggcagctgcagccgcggcgcgggctccccctcggccgccccacccccaggcccgtcggtgcagaagcggtgacatcaccccctctgggccgcagcccagggctggaagcctgctttccccctaaagtccctcctttttagtctggccagtcttttttcttcggaccaagaaaaaga

SEQ ID NO: 5532 - DNA, 371 bp, Homo sapiens
  chr7:37960165-37960536
  hyper
cccctcttaaaacacgatgcctcccaggatgctagtggcaccactgccactgcatttcctgttggcagcagtgagcagtgaaaaccgaagcggcagaaggcagtggcagcaggcagtggcagcaggcagtggcccaggcagaaatagctcccgcgcgattcactggagccttccccgggccctggtcccggctaccgggactcgcgcgtccggatctcaaaagcggcagaggccaccgaagggacaggaagcactttggtccagaccacactcccggcacagtgcggaaagagccggcgggagccactctgatcccggacgcctcagcgcccccttgggcttgggcttgccctcgggccggggaaggctga

SEQ ID NO: 5533 - DNA, 585 bp, Homo sapiens
  chr7:37960562-37961147
  hyper
cgcaccgtcccgggcgccctgggtgcctggctgctgggcggcctctgggcctggaccctgtgcggcctgtgcagcctgggggcggtgggagccccgcgcccgtgccaggcgccgcagcagtgggaggggcgccaggttatgtaccagcaaagtagcgggcgcaacagccgcgccctgctctcctacgacgggctcaaccagcgcgtgcgggtgctggacgagaggaaggcgctgatcccctgcaagaggtacaggtcatcggcccgcggggcgggagtagggagccgcgcgggcatggggagggcgaggtcgcagaggcctgcgccctgtaactctttccggccccttgcagctcctcccttctcccagagagatctttcgcgaggagggtctcttggggatagcatggtccgggactgggaggggcgctgcgcccaccgagggcggcctgctggcgggggactcagtaacacccagcgaggcggtggcaggtaaagaagggacccatccagggcgggatcaagctgcagagtgccccatgcccaggttcgcccctgttctcacgctgctgagtcaggctctggg

SEQ ID NO: 5534 - DNA, 290 bp, Homo sapiens
  chr7:38217769-38218059
  hyper
tggaggcactcaggaaccagtcgggtctttggtccctcgagcgagatgcgagctgtgtgcgtcgacgtcagcgtgctgacgtcacgggccggaggtcccggggctgctgggtgcgggcggtgggctgcgcgttgtccgctggactgggtcccggtcacgccccgccaagccccgcccctcaggccggggcgcgaccgcggatccgcagttcccgggccagcctggggcggccggccaggaaccacccgttaaggtaggctgggtttctcgttcccctatttgacaggttg

SEQ ID NO: 5535 - DNA, 312 bp, Homo sapiens
  chr7:38670351-38670663
  hyper
ttggtggcttctctgttaaatcgttcgtgtctgctgcacttaagtagccacaaaatcccccgcaagaaggaaggctgctgcaatctcccgccccgatctgcgggccgcgtccccgcgagctgcctgcgggcgcgctgggagccggcccggggagatgcgagcgcagggagatgcgctctgctccgggcgcagcgggcaagctgccgcacctcctacttctgttgcctggcttggggccaggagagcggcaacccggggccggctccggagctggacatatccggcgtctccggggccagggtctgcgggtcc

SEQ ID NO: 5536 - DNA, 215 bp, Homo sapiens
  chr7:38670956-38671171
  hyper
cgggtccggggagctgcgaagagcagagcgcgcagcggggctggcggcggcgcggaggagcgggaggaggagcgggaggaggaggagagggccgagcaagggaggagcgggagaagcggcggggagccgcggagcgcggaggggtgagggcggggcgcggcggcgggaccagcttaaagcgacagagcgggggcgggatgcgtcgggactggctg

SEQ ID NO: 5537 - DNA, 799 bp, Homo sapiens
  chr7:39453505-39454304
  hyper
cctaaatgtgcgcttcgggaaaataacgagcccctcaagatgccccacaaacgacggtcccctggtccgaggagccgggcagcgccgcgcagccgtctcgcgtgggacccacccgcgggcggagccaggcggcagggctgccccaccgagcttcaccccagcaacccctttaactttcttaaccctgtattccccaaccgaacacttcccagagttcacgctggcagagcccacttcaaaaaatgctgcaggaagccattcacactcattcctatccacgtttttaaaaatgcgaaatagtgatttaaatcagaacagaacctcttccaatgggggtttcctttgcaaccggggcttcgcggtgatttctgtgctgttttgagggcacacacctacataacacgtttgcagagataagggatctcaaactgttcccaaaagtcccagggactcgtaatatgcaaaccgagggcaaatgaacgtgggaggatccgaggcgctcgctgaaggggctctcctgcagtgcccaggcagagggagagtggagggggcggctgtggagtgaagggcggaagtgccctcgccgtcctgaggcctgggaccctcttgatggtaaatggcgctgttgagccccgatgcgcagggactccgcgggcggcggacttgacaggaagctttgctgcggggcggcccagctgcggacgcgcgggacgtcagggccccagcagaagcgccgggctgtgcgtccttaagactgcgggtgcggccccgcccaaggtcgccccgccctccatccttc

SEQ ID NO: 5538 - DNA, 30 bp, Homo sapiens
  chr7:39605775-39605805
  hyper
tcgtgccggccacgcgaggaaatctgcctc

SEQ ID NO: 5539 - DNA, 30 bp, Homo sapiens
  chr7:39872836-39872866
  hyper
ggaggcgcagagggcggcgcaggcggagcc

SEQ ID NO: 5540 - DNA, 83 bp, Homo sapiens
  chr7:42267628-42267711
  hyper
ttcaccacttttgcccgcgcctgcgtcccctgcccgaggtcccaggccgcggcggcggcgcggtgggttcattagcgggcgcg

SEQ ID NO: 5541 - DNA, 140 bp, Homo sapiens
  chr7:42267821-42267961
  hyper
cgccagcaaacagaacatgctggattgctcagagacggctctgggtgtctgggggcagaaggggtgctcccaggcccggctttgatccgcatttctgaagctggctttgggagacaatgcatctccgccagccaggccgc

SEQ ID NO: 5542 - DNA, 2021 bp, Homo sapiens
  chr7:42275801-42277822
  hyper
ctgccttctcccgcccgttttcccgctgctactcaagaaagtaactgtcccctgctgctctgtgtaaacgcggcaccttaaatgattattgcatggaccacggttactttgtgtgtctgtgcgcgctgcccctggaaaggaaaagaaataagagaatcccaaatcatatacagatggtacaactttcacttttcctctatgacgacgaaggcgcgcctctctccatccgctcacaccacacccccgccctccgaagcatagcccgggctggagaagccccagcggcggcggcccccgcggcggaggtccccgcgcgcacccaccatgcctcccgcctccttccgcccatcccgagcgccgtgcgcgcccgaagcccgagccgtagagcgccaccgcgcaaaggaaggagccaggcgcgtgcggggctcgcggagttcttctgaaccctttggatgggggcggaggcgaggggcgccgccaccactgcggcaaacttcgtcccccctccgggaggtgaaattctccaatccgtctccggccggtccgcgggtcggactcttcggaaaggaccttccaggaggagggagcgaatgcaagccttgctcggacgcctcaccggcggctctctaaatctgggcgccttttgacagccattttcactccatcccgtccccacgctggggaccacctctggccccggaggcgcgggcgcggccgcaggagcgggctgcggggtccgcgaaacaaagaacttcgagcgggacgtacctgcggcggcagcggctgtcaagtccccgaacttcccatagacccgcggacggggcgcaggctggcggctccccgctccgcgcggccgcgggcggctacggctaccgcgagcggccgggctgggcgcggggtgcgcccgccgcgggcatggtgcggcgcgggcggccgcggggcgcgcggggaaggcgggagagcggcgcgggtgagtgggagcggcgggtgtgcgcgagtgcgagtgtgcgagcgcgccggtggcgctgcccctgcccgctccctcccgctcgtgcagctccggcatcagtttcggggatcgtgtaatccgatcccttctgactcacaagccctgagtgacagttctgatttggttcaaccgcgggagggaggggaaagagaaagaaagaaacccccagccgtacgcctctcctggcatccaatcgactttctggaaaaaggtcccatcccggcctggtgccccgtgctgggtggagaagccccccgccccgacctggcaccgcctgcactactcacggggtggaaaagttgtccctcggctccgcgctcccctcccgcgcgctccctccttcccttctctcctcctcttcctcctcctccccgcgctcctcctcccccaagttttaacagatgttgccggactctcctcgctccctcgcactctctcttcctccgccccggcccccgcccagtcccttttctttcagccactctcgggctcggaggggacgcgctgagcagcaggacgcctgccgccgcagggggcgaagttgggaaaacttggagtgctgctcgccttacttttgctttctcgctccttccaggccgcgccgggagcccccgcttctcccgcccgccgggtccccaagcccggagtgggtcccagctgcgaggcgggcggcggcggctgggaggcggcgcgtcgcgggccggggtcgggggctgggggggagcccgggcgccgcgagccacgcgcgcgctccctccccgccctccgccgccgccgccgccgccgccgccgcctcctcctcctcctcctccttctcctcctcctcctcctcctccgcccctccccggtcttcacacagacacattcatgcctgctcctcctcttccccctacttgaccccgcgccctcccggcgcgccgaagccccacccacccggcgaggggaagggggcccgggcgtgatgtcacccgcgccctctctcttctctctccacaccgccaggacacccccc

SEQ ID NO: 5543 - DNA, 259 bp, Homo sapiens
  chr7:42928220-42928479
  hyper
gggactgtggggaccctctgtcgccggcctccattggaggatgcgttgtccctggagctgggtgcgctgttgcgtgacctggggcctgggtggtgggcgggcctgtccatggcaaagggcacggctgcgcgctacttcccgagaacccgccagcaggctcttgggaagcagcgatttctccttagtcacagtcagagagggtgatgcgacacactgggcttcactgtgctcgtgaagcggagccagggtgaaaggatca

SEQ ID NO: 5544 - DNA, 30 bp, Homo sapiens
  chr7:42952074-42952104
  hyper
gattgcatggcttccgaggggctgccatat

SEQ ID NO: 5545 - DNA, 30 bp, Homo sapiens
  chr7:43016820-43016850
  hyper
taagaactaggctcatgtccctcagggact

SEQ ID NO: 5546 - DNA, 171 bp, Homo sapiens
  chr7:43152036-43152207
  hyper
gaaggatggggccggcggtaacaagaatcgatatatatttaccgcgggggcgggggtgggggtgcgcggaggctgcagggcggggcagcgctaatgagagcaagcccggcttgtggttggttctggagtctggtacccacagaggagcaggcagggagggaggggatgcaa

SEQ ID NO: 5547 - DNA, 786 bp, Homo sapiens
  chr7:43152413-43153199
  hyper
cgccagggtcccctccccagccagtcccaggcgcccggtgcactatgcggggcacgtgcgccccccagctctaatctgcgcgctgacaggagcatgatctgtgcccaggccagggctgccaaggtaagcgggcgtagcgcggggacactgtctgccgccccttcccccccgcccttctctgggcggcttccccgccgcacgcgaggccccggcagcgccctcccttctcggggccgagatccaccctcctccccaccctctcgcttctcccgcgaggttcaattgtcagcctgggtcgcgccgccgcccggtccgggccggcatccccgggtggcgaccccggcttgggtactgcaggcgcacccggccctcctgcggggtacggagagaaacaaagaagcccccaagcgggttcgcagcgcctcccccgcccctcagcgccctcccagtggcgaggaggtgtcaggggagggggcggagagacctacgtaatcccccttcccagcccacacccaccccttgtgaaccaaagctctggatttgcgcttcgccttgggctcgcttttgaacaattgtgtcccatgcaatgcccgtggttagcccagagagcgcccagagcctccgcacgggctcgccggtgctcgctcgaggggcgcgtggccaggtccggcccttgctcccatggacgggtgcaggaggggaggaggcgctgtgtgggtgctcccccagcgcctccctgttaccggccggctgcgccgctcagccgggcctgccacctgagtttta

SEQ ID NO: 5548 - DNA, 381 bp, Homo sapiens
  chr7:43153229-43153610
  hyper
cgacttgcagacaggcagggagggagctgccggggcggggagggggggggaatgcgtccggtccatttttggctggaggtgcgcttcctgctacccccacgttcccgggcggtgacaatgcagcaaaatccgagggctcaaacaatgtggcccctccatccccggctccagggcattctgattgctctgccgctttgacgtcccggccacttggctgattttcagagccatgatgcgcggtgtctctgtcttgcacacagaggctgggcaccataacttcttccctgccgaatttcagcgcgtagggggagctggcagggacacaggctgcagagatgcccggcttcctgtggttccgggcacagcgcgcctcagtctgca

SEQ ID NO: 5549 - DNA, 30 bp, Homo sapiens
  chr7:43622364-43622394
  hyper
acgctcaacaggtgcgcaactctgctaacg

SEQ ID NO: 5550 - DNA, 30 bp, Homo sapiens
  chr7:43896240-43896270
  hyper
gatcagagtcaggggcatggtgagggtcag

SEQ ID NO: 5551 - DNA, 30 bp, Homo sapiens
  chr7:44122204-44122234
  hyper
ctacttgggccagtcggagcgctggggagg

SEQ ID NO: 5552 - DNA, 507 bp, Homo sapiens
  chr7:44924271-44924778
  hyper
tgatggaggtgccctccgggagctctccatacaggccgccccctgggcccccggcgccgcctcccgggccgcctgccagctcgtcgtcctcgcctccgtagtcgtctatgagcttcgccagcgcgtcgcggaactcgatgaggccctgcgcaggcagcgcgatggtctggccgctctgcaagccgcccggcccggggcccgcgccgaagccgccaccgccgcggttgaccgtttggcggatgcgcaggaagcggccgcgctggttctccttgaggtccaggtagtacttgcggttctcacgcaccaagaattcgctcttgagcgcgcgccgcggcccgccgccctcctcggcgccagccgccagctgctcggggctgctagggcccagctgcgcgtagtgttctatgaagtcgcccagcgagtcgcggaactcggcggccaccgccatggacagcgtgaggcggctcttggaaccgcccgcgcccacctcggcgatcttgaggaagc

SEQ ID NO: 5553 - DNA, 30 bp, Homo sapiens
  chr7:45128760-45128790
  hyper
ggggtgggcgcctgcgcccggtcccaccct

SEQ ID NO: 5554 - DNA, 30 bp, Homo sapiens
  chr7:45129095-45129125
  hyper
cagtcgtcggtctccgtggcaaccgcctcc

SEQ ID NO: 5555 - DNA, 267 bp, Homo sapiens
  chr7:45613546-45613813
  hyper
tggacgtcgattctccgtctcgtaggggcgagggccctgggttcgcagtcagacgcgggcccctctcaaatctagtggcctggttttattgagtgggggaaggcacatattttccaagattaactgccccgcaacagggaatttcgcaggatttcagtattttcgactccccaggtgacgccaagagggtgggttccactgtgcacggtggggaaactgaggctcggaggggacaaggaaggtactcgaggtcacgcggctcctccg

SEQ ID NO: 5556 - DNA, 712 bp, Homo sapiens
  chr7:45613857-45614569
  hyper
cgcccaggttcgcggctcccggggctcggctgtcgcagcgcggtcgccgccgaggaccacggtcggggcgcgggcgggctccagtgcgcaggcgcggcgggcgggaggggacgcgctccgggcgcgcgcgcggggcagccggcgccccaactccgcccgccccgcgccccgcgccccggcgcctcgccgcccgccgcccgcccgccccggcgccgccgcccgcgccccggcgccccgggccggcgaggggcgcgcccgcggccgcggccgctgcatggcgctgagatggcgggggcgccgcgcggcggaggcggcggcggaggcggcgcgggcgagcccgggggcgccgagcgggcggccgggacaagccgccggcgcgggctccgggcgtgcgacgaggagttcgcttgcccagagctggaggcgctgttccgcggctacacgctgcggctggagcaggcggccacgctgaaggcgctggccgttctcagcctgctggcgggcgcgctggcgctggccgagctgctgggcgcgccggggcccgcgcccggcctggccaagggctcacacccggtgcactgcgtcctcttcctggcgctgctcgtggtaaccaacgtccggtccctgcaggtgccccagctgcagcaggtcggccagctggcgctgctcttcagcctcaccttcgcgctgctctgctgtcctttcgcgctgg

SEQ ID NO: 5557 - DNA, 424 bp, Homo sapiens
  chr7:45614580-45615004
  hyper
cggggttccgccggggccgctggggggccagcgaccgccgaacaaggggtttggcagctccttttggtcaccttcgtgtcctatgccttgctgcccgtgcgcagcctgctggccataggctttgggctcgtggtggctgcgtcgcacttgctggtcacagccaccttggtccccgccaagcgcccacgtctctggaggacggtaagtgcagccgcgcacccctcatctggtctcggacacacttgctgggacgatgctgggaatgcccggagtcgggcgcgctttttcctatgcggcgggtggggacactgaggctccgagtgggggtgtgttcaaggtcactcctacgagttggggacgcagtcggggctggcaccctccggccagggctctcttcagagttacaatccacgaagcgcccctg

SEQ ID NO: 5558 - DNA, 102 bp, Homo sapiens
  chr7:45615102-45615204
  hyper
cggtcttttgccgcacccatccccacagagggactgaaagtgggcgaggagagcagacccccagggcaagctccaaggccggctctgcgcgcagcgctgggc

SEQ ID NO: 5559 - DNA, 576 bp, Homo sapiens
  chr7:45927981-45928557
  hyper
ttttgaacactcagctcctagcgtgcggcgctgccaatcattaacctcctggtgcaagtggcgcggcctgtgccctttataaggtgcgcgctgtgtccagcgagcatcggccaccgccatcccatccagcgagcatctgccgccgcgccgccgccaccctcccagagagcactggccaccgctccaccatcacttgcccagagtttgggccaccgcccgccgccaccagcccagagagcatcggcccctgtctgctgctcgcgcctggagatgtcagaggtccccgttgctcgcgtctggctggtactgctcctgctgactgtccaggtcggcgtgacagccggcgctccgtggcagtgcgcgccctgctccgccgagaagctcgcgctctgcccgccggtgtccgcctcgtgctcggaggtcacccggtccgccggctgcggctgttgcccgatgtgcgccctgcctctgggcgccgcgtgcggcgtggcgactgcacgctgcgcccggggactcagttgccgcgcgctgccgggggagcagcaacctctgcacgccctcacccgcggccaaggc

SEQ ID NO: 5560 - DNA, 1251 bp, Homo sapiens
  chr7:45960164-45961415
  hyper
ggtccctccggcgaccgccttcacctttcccggagcgccttcagtttccccacatattatctccagtgagaagaaaagcggagtctcccgcagcggcacccagcaacccccaggcccttcggcgccagtgcgccgggtgctgcacgcagcgcacctggcgcgggcggctcacctggagctggcggcgctggcagcaggtaggcgcgcaggcggctgacggcactagcgttgacgcagagcccgcggccgtccagcagcgcctgcagcggtcgcgcctcgtcgggcgacggctggcagcgaaggccggagccacagcgctcggtgtagatgccgcacggctggccctcgctcagtgcgcacgtcaggcagcagccgcagcccggctcgcgcaccagctccgcgcacacggcgggcggaggcgcgcactgggccagtgcacgcgcgtcgcacggctcgcagcgcaccacgggacccaagcccgccgagctcgcgccagcccgcgccaccggcggcccgcggagcagcaccagcagagtcagcgcagcggcccagagcgtgggtcgcgcccgctgcatgacgcctgcaaccggggcacgctgcttggcaggctgggcgcgcagggatggggcgacagtacacggcgcgaagctgtggaatccaggcaggaagcggctgatcctcagcgcccagccgcagtgctcgcatctgggcggcccgggcgcgccggccgctatatagaagccggggtggcccaggacacgccccggaacggcgcgcccaggagtgggggttgggaggggggcgggtcggcgcaggcacggctgcgggggcccgtgcttcgccctgagcagccggggccgagctcgggggcgtgcagctcgagactcgcccgggcacctgctcctcgtgcgcacgcccggagcccgggtcaccttgtcgtctacaagaaccaaggtgtgcccggccaccccggcactccaggccacctcagcacccccggtcaccccagtcactcctggccaactcagcacccccgatctccttgaccccgccgcccttaccccttccgctctcggggtgaggtctccctgcggcgagccggtgtcggggaaactggcatacagcgctccgcattcgtgtgtacctcgtggagctttctaaaatttaattccgttggcaggcgaagtcttgggacatttctgacttacatttgggtctcagggagccaaggcactgcggggtttaatttac

SEQ ID NO: 5561 - DNA, 96 bp, Homo sapiens
  chr7:47294095-47294191
  hyper
cggagtagcggcgctccggaccggcggaacacggcgtcctcggctcagcttcggaagcgcccccgccccgcccggcgagcccgggaatggcgcgcg

SEQ ID NO: 5562 - DNA, 30 bp, Homo sapiens
  chr7:47621010-47621040
  hyper
gaaagggaaagagacgcactggagagcttg

SEQ ID NO: 5563 - DNA, 31 bp, Homo sapiens
  chr7:47621315-47621346
  hyper
gtcctgggactcctgccgagcccccgccccc

SEQ ID NO: 5564 - DNA, 222 bp, Homo sapiens
  chr7:47621698-47621920
  hyper
gggctccgagtagcgcgcgggcgggcccgtcctcctggctggctgccggcgcccgcggcagggccccctcgaggcggcgcgggcaatcgccacggccggcccccgcgcccgcgccccgagcctggcgggtcacctggcctcatcaccctaacaatgcagcgcgcctccaggcgcccttcaccggggtcccccgccctgccgaggtgcgccctgggacctccc

SEQ ID NO: 5565 - DNA, 916 bp, Homo sapiens
  chr7:48075043-48075959
  hyper
attggctgacagtgctccagccgcgcccgccggttggccgttcagccgttgccctggcgacgccgatgttgtggttccgcggcgcgctgggagtttgggtttggttggctgcagccagccagccgtgtaaaaactccaacgccgggcgccgcgggcagcacccacggagacccgcggggagctggtgagcctgagcgggctggaggacaatgggggcgcccactgtggtcccgggccttgtccactgtgcggagctcgcagtgcgggcagtgcgcgccggggctggagggaggggaccaccttgtcgccgggttgggatgagcacagggcgggatctccaagcctgcccaagtcccgcggccccttggttacctgttgcttatcctctctgtacttgctgtgtccctggcgtggacgtgcctgtactggatacccggcgtgacgtgccccctctgtgtgccccgcacgcacgtgtctctgctgaataccccgcgtgaatgtgcccctgctgtgtacccggagtgcgtacgtccctgctgtgtaccctgtgtggacgtgccctgctgtctacccggcgtgcgtgtgttcctgctgtataccggcgtgatgtgctcccttctgtttacctggcgtggacatgccccctgctgtataccctgcatggaagtgccagcgctaggcgatcgtaaggcgcctgcaggcgtgtcagggcgaggcgtacagaccgacccagagcgggcgcgcggattttgcttttgcagctgcagctcctggcaactggtcaagcaggcagcgtccagcgcacccgcgaacaccaggtccggcagcatctgtcttttcccgcagcgtgcagcgcctgaccatgaggaacacaagcaaggaacttcagggcgccacgcaccgctacgctccctgc

SEQ ID NO: 5566 - DNA, 263 bp, Homo sapiens
  chr7:48127994-48128257
  hyper
cccgggcctctaggtcgtcttctttcccaggctctgtgctctcaccagagtgcgcgttcgggaagcagggagaggaccaggaaagacgcctgagacggagagtgggcaccggccgggggcaggcaggtccggcccctgggggtcagagtgcagcgccggtttgaggcagttcggccacttagctgcgactcgaagtgaatgagtcacttcccctcctcgggcgagctcctggctttgccccagcaagcgggaactcccaggat

SEQ ID NO: 5567 - DNA, 196 bp, Homo sapiens
  chr7:49812821-49813017
  hyper
ctgctaaactaacacggccttcgaatcccaatctgaacacagtagctgaaacaagctgtccacaaagaggaaagccagagggggccaattaggaaggaagaaattaaagaaaagagaaaagccaagatgaaaggtccagcgcaaagtgaatgactcgactggagaatggcagccctggcagggtctgcggccggct

SEQ ID NO: 5568 - DNA, 283 bp, Homo sapiens
  chr7:49813809-49814092
  hyper
ggaggaaccccctcccccgcccaagtttgtgaatatgggcgcttcgcccagtgttgaggtcggcagggaccgggcagggggtcagcagggccgggcacgtccggagccctcagggaggagggctgagggggaggggacagacgcaccggagtgcgcagagtgggggcgttcggggagtgaggcggagagaggctggattgccggtgtcctgcggcgtctcgggctctcccagcccctttgggcggcagaaactttggaatccagaaaggctggccgggatcca

SEQ ID NO: 5569 - DNA, 629 bp, Homo sapiens
  chr7:49814121-49814750
  hyper
cgccctggggccccagcctcccgcactgcacaccttggtgctgcccgggcgcttctgctccgcagccaggacactacaagactgagcgctgcggccggcgacctggctcccaaggctcggaggggcgggccggcagaggagctgaagccccgggaatccccgacccggccctctggcaaggggccgagggcatcctttcatgcagcggggcttagagagcggggagggggcgtctgctcccgagacgggagtcttttaagaagttgttagaaatgaatcgtggagtcctaggagaagctttgtttaacctccccgcattttcccagcacaaccccctaaagcaaatgaggaagagtttccctcttatcttcctgtacattcgtccgtctctaactccactgctgaattctccatttaataaccttcgggaaatgtggccaggacctagggagggacaccctgggtgcctgaattacgtggttcaaggcagagctttgcaggggggcgcgggcctggctcgctgcgttccctgggctccgcaagccgcccttggccatctccaacactaatcacgactacatcagaaacacgccggccggtgtcgttcttggatttcgcttccaatgtat

SEQ ID NO: 5570 - DNA, 133 bp, Homo sapiens
  chr7:49815116-49815249
  hyper
cgagcatcccgctggagaagctggcccaggcaccagagcagccgggccaggagaagcgtgagcacgcctctcgggacggcccggggcgggtgaacgagctcgggcgcccggcgagggacgagggcggcagcgg

SEQ ID NO: 5571 - DNA, 116 bp, Homo sapiens
  chr7:49815656-49815772
  hyper
cgcagtgcaaggagaggaagaactactgcgagttccggggcaagacctatcagactttggaggagttcgtggtaagatgcgaacgcccgccgggcgactttgcaccttccaggaag

SEQ ID NO: 5572 - DNA, 150 bp, Homo sapiens
  chr7:50343339-50343489
  hyper
gagtccctccagtctcgccagcggggcgagcgtgagggtgccccgaccgaccagcggccccgggtgcagggtggcgggcccggcggcgcgcgtccccctccccctcctggcggcccgcacgtgtcgcccgcgccgcgcccccacgggtta

SEQ ID NO: 5573 - DNA, 765 bp, Homo sapiens
  chr7:50343974-50344739
  hyper
ggctgcggggcaggtcgagcagggaccgccagcgtgcgtcaccccaaagtttgcggggtggcagggcgcgcgctctggccacccgccgctctgggcggcagctggtggcaacgcaagggcgcggcgggggcggccggcgcggagggggccaggtacggggcccgcgggcggcgctgtgcgcgcggggcagccggtcggccgggagcgcgaaagcctggtctgagccggctgggggcggggagtgtggcggagaaatggggaacaatgcgagtgagcaacttcaggaagtcattgtgaaagaaagctgggaagagctccgcggccaagttagcaggacactctaacaagtgactgcgcggcccgcgcccggggcggtgactgcggcaagccccctgggtccccgcgcggcgcatcccagcctgggcgggacgctcggccgcggcgaggcgggcaagcctggcagggcagagggagccccggctccgaggttgctcttcgcacccgaggatcagtcttggccccaaagcgcgacgcacaaatccacgtgagtgttttcaaattgaatttcaataggaaaacttggggtaactggtgaatttaaaaaaaaaaaaacacagtaaagaaaagcggtaaggttggtagaccctggtgtcgctcaggtccgcctctcttttctgaggacagtgagagagttcacttctgtcaagcgtctgttgctctgcactgtgccagcaggtgcaggaccaggccgacatgggacacttc

SEQ ID NO: 5574 - DNA, 934 bp, Homo sapiens
  chr7:50860168-50861102
  hyper
cagtcgtcaggcaggcgtttggagaggcaatcagcaaaggcgaagagttgcatcagaaatttccttctgcaaacggtaccgctcttatcacatttccacggctggcgggcggctaatccgcgagccctcaacttggtgttaggccccagcggcggctaacgggtcaccaacagaaccaaaaaaaaggtcctccgtacgaggctgggccggctcgggatttgggagtgtctggcaccactgtcccggacgcccggacgcccgggcgcgcgcgccgcggccccgccgcgcagtcggagcacccggggctgcagggacgcctgggcgcccaccctcccaggcggcggcccccaggagcgcggccttgaccgcagcccccgccacagcccgcgagccgccggcgtctgacaagatggttcaagaatgcaccgcttggactccacacctccccccaggggtcgggaacgcagcgcggagagccccgcggggcgcccggctgcctccgcctccgccgcgcgcccgcagccccagtcccgcctccgagcaccgcccgctgcgggcccggggcgccggagcccccggcccggaggcgacgcccttccgcccgccgcgcctccgcggggcccggcgtccccggccgcggccgcccagcgctcagacaatgacggcgcggggacccgcctggccgtcccgggccccgcggggacgccaaccacaaagtaacttgccgccgcgctccccgcccaactccgtacctgccgcgcgcggctccccgccgcctccgcgtggctgcgggcgacactcggcgtggccggcggcgggcgcgggtccccgcggggcgaggccggcgctcaagactgtcccgggcgccccgcgccgccggcgctgccgccacccaggggctgcgcggaaactttgggctccaccgggtctccga

SEQ ID NO: 5575 - DNA, 514 bp, Homo sapiens
  chr7:50861127-50861641
  hyper
cgcttccctctctgcctcctcccgacctccccaccccctcgatgggctttaaactcgcccggccccgcccgccctccccgcctctgccgccgccgccgcctccgcctccgcctcctcccccggctacttttcctgctcctcctcccgccgccgccgcccggaccgctcggcggccgccagcgcgggaggagccggggcctgggcgcagggcgtggcgcgggggcgcgggccgcgggccggacggccggggggccagaagctcccggaggttcctgccccgggctgctgagcgggttcccccctcctgctgtcctcgggactcgggcgcgggaccacgaccgccgcggctcaggaggcttcgccagtgaaaggacaaattggacctgtcccgaaagacaatttataagcgaactgtttgaaacgcacaaagtattaactgcgcagtccagatcctttatcctgggcgcagcaggacgggacggaagagctggggctgccccgtactctgtcgtgg

SEQ ID NO: 5576 - DNA, 734 bp, Homo sapiens
  chr7:51383370-51384104
  hyper
gactgcgcgctaccccgcggcccagcctgcaccgctggccgggatgagcacggcgcacctggctcggggtctgaataatgagcagggctgctcgtcctgtttgagggaaattactctttctgagagtcaaatcctgaatgtgacgtgtaatccctgcacgcaaggtgtggggatagcaaacagaaaccgggagaggtttgggcaaaagcggaatcgcgaagacagggatgggccgccagactcgcgggtccgctacggatgtctgcgcctcaggcctggccccactaggacgccccttccactgccaggggagaccctggaataaaggcagggagggagagctgctgccatgaaaccctccgggcaatccgaacaccttccgagaacgcggggcccgggcggctgcgaagccggggagccctcccctccacgctgccgggagagccgatcctggggctgccgccgaggccgggagagggaagacttgatgggaaccggccaggggcaagcccgcagggaagaggccggagtcaaaggccgggcgtcccctcgctccccgctccacccctacggcaaacacttggggggcctgaggaaagctcggagctgagtgggggctgtgctggcggggacccccataaggacgcctgcatacaaaccaccccgcgcgaaaagtgcgctccggccccggcccgacacggttacctgggcaacgacccgggtgcccaaagtac

SEQ ID NO: 5577 - DNA, 250 bp, Homo sapiens
  chr7:51384702-51384952
  hyper
cacctgggccctgcaccgacacccgcgggtgcggcagagggcttctccccgtgctcctccacccctggggggagcgcgaccctctctgggcggagtgggggatcccggggccggcgcctcctggcggagttgggggaggggaaccacctggagcctggaggccgtgcgagggcgaggtgggcggaccagcccgggaggactgacgttggagggtgagaagtgagtgtccggcaccgctctctgaccttta

SEQ ID NO: 5578 - DNA, 149 bp, Homo sapiens
  chr7:51693437-51693586
  hyper
tctccatggacagaaccgggaaactgtgtcaaagggtgggatgagctgctgacagtctgcagtgcacgctccacagggtggactcactggtgaccctcttggcactcggtcttctcatttggccccgagaggcacgtttcttcttcttg

SEQ ID NO: 5579 - DNA, 30 bp, Homo sapiens
  chr7:51793410-51793440
  hyper
cttagttagggtcaatccctgcttctgatt

SEQ ID NO: 5580 - DNA, 330 bp, Homo sapiens
  chr7:54609621-54609951
  hyper
agcagttaataactgggtaagcggcatttccctaaatggctgttttcctcggcccacccgtctctcccccatcccattgctccccggtcctcagcaatgccccaactccctcccggaaccttttgctccgagccccccgccagcgccgcaatcccgtcactgtattgtcctcctcggcaccgagcgatctgatccgccgagccagaaagacacccgatgggggagagaagcaaagtggaaaaaaaccgacgtccctgctctccagaagggagaccccagcggcgccgacgagccctgcgccctccgcggccgcccggcgcgagctcccgg

SEQ ID NO: 5581 - DNA, 412 bp, Homo sapiens
  chr7:54609991-54610403
  hyper
cgcagccattagagggaaaagttgcggcgccgcgagcccggcgaagtcctcagcccgccccgcttgcccactccccacttcccgagccggctccgtgtttagggagggcagtgatcacgcaagccggagcggcgggctgacgttggacgagctgccaggtagctgaaagcaggcagccaggcagccgagacacttcccagcgattccagcctgggctccgcaggaagcctcgctgaatcccagccagctggttctaaccttccagaatcgcaatcccttctccccacagccagccctcgccaagcaagcagcaggatgtttgcagtgtcgcgcccagggctctgagactgagcctgccatccactcgcacgcctttctttcagggcttttcggctgttggctacactgatgt

SEQ ID NO: 5582 - DNA, 30 bp, Homo sapiens
  chr7:54612694-54612724
  hyper
tcttcctgttaaaccgggaagcgcctcctc

SEQ ID NO: 5583 - DNA, 206 bp, Homo sapiens
  chr7:54614605-54614811
  hyper
ggcgcgggactgagcgttcgctccttgcccgcaggtggagctcttgcccgacagagacccggacagcgacgggaccaagatcagcgtgagtgcggggcgcgccaagggccgcgggcccaggctcgggacgcacagcccttccctgtccccgagaaggcggcttgccagcgctgcaggacagccggacagccgggtgccccttgctt

SEQ ID NO: 5584 - DNA, 1392 bp, Homo sapiens
  chr7:55086554-55087946
  hyper
accgcctccggcggccgctggccttgggtccccgctgctggttctcctccctcctcctcgcattctcctcctcctctgctcctcccgatccctcctccgccgcctggtccctcctcctcccgccctgcctccccgcgcctcggcccgcgcgagctagacgtccgggcagcccccggcgcagcgcggccgcagcagcctccgccccccgcacggtgtgagcgcccgacgcggccgaggcggccggagtcccgagctagccccggcggccgccgccgcccagaccggacgacaggccacctcgtcggcgtccgcccgagtccccgcctcgccgccaacgccacaaccaccgcgcacggccccctgactccgtccagtattgatcgggagagccggagcgagctcttcggggagcagcgatgcgaccctccgggacggccggggcagcgctcctggcgctgctggctgcgctctgcccggcgagtcgggctctggaggaaaagaaaggtaagggcgtgtctcgccggctcccgcgccgcccccggatcgcgccccggaccccgcagcccgcccaaccgcgcaccggcgcaccggctcggcgcccgcgcccccgcccgtcctttcctgtttccttgagatcagctgcgccgccgaccgggaccgcgggaggaacgggacgtttcgttcttcggccgggagagtctggggcgggcggaggaggagacgcgtgggacaccgggctgcaggccaggcggggaacggccgccgggacctccggcgccccgaaccgctcccaactttcttccctcactttccccgcccagctgcgcaggatcggcgtcagtgggcgaaagccgggtgctggtgggcgcctggggccggggtcccgcacgtgcgccccgcgctgtcttcccagggcgcgacggggtcctggcgcgcacccgaggggcgggcgctgcccacccgccgagactgcactgtttagggaagctgaggaaggaacccaaaaatacagcctcccctcggaccccgcgggacaggcggctttctgagaggacctccccgcctccgccctccgcgcaggtctcaaactgaagccggcgcccgccagcctggccccggcccctctccaggtccccgcgatcctcgttccccagtgtggagtcgcagcctcgacctgggagctgggagaactcgtctaccaccacctgcggctcccggggaggggtggtgctggcggcggttagtttcctcgttggcaaaaggcaggtggggtccgacccgccccttgggcgcagaccccggccgctcgcctcgcccggtgcgccctcgtcttgcctatccaagagtgccccccacctcccggggaccccagctccctcctgggcgcccgcg

SEQ ID NO: 5585 - DNA, 8 bp, Homo sapiens
  chr7:55087982-55087990
  hyper
cggagacg

SEQ ID NO: 5586 - DNA, 30 bp, Homo sapiens
  chr7:55322292-55322322
  hyper
gccctccactcccacggcctcgggtacagc

SEQ ID NO: 5587 - DNA, 116 bp, Homo sapiens
  chr7:55593335-55593451
  hyper
tccaaggttcatcttacgtggtactcgatcatctaggcagaagcaatgctaccaaacctctcgagaacaaaggttctaaatatgtaatccttacatgtgtacggtatttagttttc

SEQ ID NO: 5588 - DNA, 30 bp, Homo sapiens
  chr7:55639103-55639133
  hyper
cttcattaatttaacgcaaatttccttcag

SEQ ID NO: 5589 - DNA, 30 bp, Homo sapiens
  chr7:55640699-55640729
  hyper
tacttgaacttgaccgcaaccggccccgcc

SEQ ID NO: 5590 - DNA, 30 bp, Homo sapiens
  chr7:57351679-57351709
  hyper
gaaaactggcaaaagaaaccctgtttcaca

SEQ ID NO: 5591 - DNA, 31 bp, Homo sapiens
  chr7:57714733-57714764
  hyper
ggcacagaaacacacacgcacacgggcacgc

SEQ ID NO: 5592 - DNA, 31 bp, Homo sapiens
  chr7:63040542-63040573
  hyper
gcagctggcctcacatcgataatctaggagg

SEQ ID NO: 5593 - DNA, 72 bp, Homo sapiens
  chr7:63767202-63767274
  hyper
cagagagccgggagccgttaagagactacaacgtccccgcacgcccggcgaggtgcgcagcgccctgcctct

SEQ ID NO: 5594 - DNA, 438 bp, Homo sapiens
  chr7:63767573-63768011
  hyper
gattacaggcgaaaaccaccgcgccctgccgccctgccgccctgccgccctgcctctctttctaaagctatgcccaaaccccgagcccggagcatgccgggattgtagtcctgcagtcctgcaacctagggactgcgagaggttaagagactacatctctcagcatgtctagctaggcgcgcaccgccgtgtccccagggcttcgcaccgcccccagacttgcgcatgctgggattgtaatactgtcgccttgccaccaacgggctacgagcggttaagagactacagctcccaggatgtacggtgatggcacccgtttggactccgcccctctgcgcgtctagagctgttctcccgtgcggaggggatcctggctgttcccaaatctcgcctgcctgcgaggagccagcgtggcccgggcagctgatctcaacctgt

SEQ ID NO: 5595 - DNA, 20 bp, Homo sapiens
  chr7:64348947-64348967
  hyper
cagtagcacttagcacctgc

SEQ ID NO: 5596 - DNA, 726 bp, Homo sapiens
  chr7:64349041-64349767
  hyper
cgcgtcttcggcaaagtcttcggggtgagaggtccggctcctggaggacagcgggatgggagagtcccgttcacacccagccccgcagagccggatagaaacgctgccactgccgactccatgctgccgggaagtgcactgtggaggccactttctggaaagaagaaaccgtctgaacacaaagttgctcaagccatgttcatctatctgccagggaaacggaggccctgagtgccagagtccaagtcaccctgcaagagaaaactctggtggagcccagggtgtccagcccctgtccacccagccgccgtggtcaaggttaataagggcaaggggccaagcagaaccgcctacaaggaaccgagtgtccacaaagcaggaagcgaagaacgtttctcctacctagagcgcagccgttttgcggaaggcacagtccgggctccgggagccaagcagggatccgggcctcgttgcggaggggacgcccgggctgagctgagctcacttgctggcggcggcagcccctgcagtcatggggtcaccggcttgtggagaggggctggcgctgttccttggccccgctccccgcccgcaaagggccgggaggtcgggctcccggcagtgtccaggctctcgcccgccggtgcctgagccgtacccaccgcgtcccctccgccccaacagctggtgctgagggtccggcccggggtcatctggcagggccgt

SEQ ID NO: 5597 - DNA, 30 bp, Homo sapiens
  chr7:64691764-64691794
  hyper
aaaatgaaactttttaaagcaattgtccct

SEQ ID NO: 5598 - DNA, 30 bp, Homo sapiens
  chr7:64712881-64712911
  hyper
cgagaggtgggaggcgccctggccttgatt

SEQ ID NO: 5599 - DNA, 590 bp, Homo sapiens
  chr7:64734196-64734786
  hyper
tgtcagagtaggaaccgtcctatcaggcacgcagttggggaggagggcgtggcttccagcgtttggcgcggcctttgtctctggctcaggccggagcctgagatccatctctactgtcccgcgtgttgcccctcgggagcactaggtgactttgtcacatcctctgttgccctgagatctggaggtactgggaaatgcatagctaagatgccaggacatcctggaaaccaggaaatggtgagtacgcggggttgggcatcccaagaggggagagtgggctggttgaaaccagcggaaccggcctccccacggtcagctcccgggtccacagacctgagtccccgttggcgcagctgggccctcagtacccccggagagtggggtggggggcggtgcaagacggcagctgagccagcggactttgacccctcaccgtcctcttcccgcgccgcgacctgcctgaaactctctgggcagcgctgcacccgcagccccgactctctcccagattgttcagggatgacagagggtcattagagcagaatcccgactcggtgggtgcgtgggaggagctgcggccagtggggtcc

SEQ ID NO: 5600 - DNA, 148 bp, Homo sapiens
  chr7:64974033-64974181
  hyper
ggagtctgccgctcccgccctcagagccgcggcggcgggagcagaaagccgcggcggcaaaaagcggcggcgggggcaaaaagccgcggcggcagggggcaaaatgccgcgggagcaaaaagccgcggcggcgggggcagaaagtcgc

SEQ ID NO: 5601 - DNA, 709 bp, Homo sapiens
  chr7:64974273-64974982
  hyper
gggctaaaagccgcaaaaagccgcggaggggggagcgaaaagcagtgggagctggggcaaaaaaccacaaaaagccgaggcagcggcggcagaaaacctcggcagcgggggcaaaaagctgcagcggcaaaaagcggcgacgggggcaaaaagccgcggtggcaaaaatgcgcggcggcgggggaaaaagccgcggcggagtggggcgaaaagcagtgggagctggggcaaaaaaaccacaaaaagccgcggcagcggcggcagaaaacctcggcagcgggggcaaaaagccacggtggcgggggtaaaaagcagcggtggcaagaagccgcgacggtgggggcaagaagccgcggcggcccaggcaaaaggccgcaaaagccgcggcgacgggggcgaaaagccgcggcggcggaggcaaaaagccgcgacggcagggggcaaaaagctgcaaaagcctcggtgcgggtgaaaaaagtcgcggcgagaaaaagccgctgaggcgggggcaaaaagccgcggcggcaggggcgaaaaccagcaaaaagccgccgcggtgggggcaaaaagcagtgggagctggggtaaaaaaccacaaaaaaccgcggcagcggcggcagcaagccacggcggcgggggcaaaaagccgcggcggcaaaaacccggggtggcaaaaagccgcggcgccgggggacgaaaagcttcaaag

SEQ ID NO: 5602 - DNA, 88 bp, Homo sapiens
  chr7:65037618-65037706
  hyper
aaaagccgcagcgggcgaaaagccgcggcagcggggggccaaaagccggacgggcagaaagccgtggcagcggcgggcaaaaagccgc

SEQ ID NO: 5603 - DNA, 554 bp, Homo sapiens
  chr7:65509053-65509607
  hyper
gggggcacattgaaaggcagccggacacggaggtgctcggccccgcaccccagacacaggttgtggaggttcggaggggcttgagtcccgttcgtccctgtccctatcccggggccctcccggacagggccagccagccccctgccctcacttccgtacgagggtcgcccagtccccacggctctcggctctcagaggtccaactgttaggctcctcgcgtaccaaaagggacgcgtccagactagagtctggacttccatgaggtccagactcgtcgcctctggctgccagcagacaaggaacttcacactctacagctctccccaccgtcgccaacagcgccaaagtgccagctccgcacgccaaggtgcaagccaggagcgccgcgcttcatgccgggagcttggcggactcggaacctcgcgccgcaggttctcctttctcgggggtgggggtgttggggggggtgggggcgtgttcctgtatccttcgcccaggccgacttcagactgctgagcgtttgcggacaggattatctcgtgttttctattgt

SEQ ID NO: 5604 - DNA, 39 bp, Homo sapiens
  chr7:65541036-65541075
  hyper
cgaagcttccggacgacgaggaaccgcccaacatggcct

SEQ ID NO: 5605 - DNA, 30 bp, Homo sapiens
  chr7:65579918-65579948
  hyper
ctggcagctaggggcgacgaggcgggacgt

SEQ ID NO: 5606 - DNA, 138 bp, Homo sapiens
  chr7:66094048-66094186
  hyper
gggatggtggtagtcacggggcgggagccagacagccgtcgtcaggacggtgccatgtccagctctgacgccgaagacgactttctggagccggccacgccgacggccacgcaggcggggcacgcgctgcccctgctg

SEQ ID NO: 5607 - DNA, 30 bp, Homo sapiens
  chr7:66206243-66206273
  hyper
ccgcggcaggggcgcggggacttgatccca

SEQ ID NO: 5608 - DNA, 31 bp, Homo sapiens
  chr7:68161974-68162005
  hyper
gggctggagtagcccccgtacacccggagtt

SEQ ID NO: 5609 - DNA, 2540 bp, Homo sapiens
  chr7:69062231-69064771
  hyper
gtcgcttttgttgatcgattctcggctgcagtcagctctttaatacaactttttatgagcatcagccacattgcggcgggaggaggggctgtggtggaaaaagcagggaaaccgccccccactcccaaaaagtaaaggaagcccgcggggcagggactgcggtttgccggtctaacgggtcctcgagctggggcggcggtcccggccccttcggccccgcccctcgcccgcggccgcctccgaggttcaagttcggcccccggctgttaggcctcgcgctcccggatctgaagccgcccgtgcgtccctaggtcccccgctggaagacgaggcgggaatcccaggggtcatccgggcgcggggtcgctcgtccacgcactgtggtgccacgtggaggaaaagtttccaactctgccagttggtgctcccactgcgcccaggcggagcaaaggcccgcgctttggcacccgctccccgttctgtctcctccagtcgcgccccctcccagggacgccccccttgtaccccttctctgaattcccttctctcctcgcagcgcaggtagccaagggaaaacacccttgggggctggtggggcttcccgagaaggcggcctcgggccggccaggggtagaggatccagggacaagtgtcccgaggaggatgtggggggcgcgcgcgcgaagtggcctgggagcaggggcccacacgcgtccccgctgcgacaggcgggatcctccggcggcttccacgccctggcgcgccaactctgcccggccgcggccgaccccacgcgggcgccccctccacgcccccgcccccgcccccctcacagctccccaccgcccccagtgcgcaggcccggccgccccagcgcgcatgccctgggctcgcgagcgcggccagcccccagccttttgctttctacacactctacaactggggagggggcgggggaggagggagcccagccgtccacgtgatcccgccggccggggccgcgggggcgggagcgcgcgccgagagaggcgcggggagggcgggtgcgcgggagcgcgcgcactcgagcgagcgagcgaaagcacgaacgagcgagcgagcgagcgagcgagcgggcgggcgcggggttgggctgaggcgggcggcggcggcggcggcggcggtgggctggccgcggagggggaggagcgggagctgcgcgaggcaggcgggcgggcggaggatggggcagtgcccgggctcccgctgcagccgcccggggacacgccgtgcaccctccggctcggggctttctcggcggcggcggcggcagcagcagcagcgttagcggcggcggcgagagcagcgttcccggctgcgcttctccctcaggcggggcggcgagagaagcggcggcggcggcggcggcacaccggtgtctctcccgctggagatttctttctgctttcctcatcgactgactgactcaccccctcccttttttgaggaagggtgacctcttctctgggactggaaaaaatatttttgtgaggaggggggcgggtggcagcgacagggtttgcttcttctcttctttcatctccctctcctcccccctcgaagaccgaaaagcaaaccccacaactgctccagcagcatcctccttcccttcctccgcctcccttctcctccgccgctcgcagtttcgccctctcttccgctaatgattgcattattatgctcccctctctggggggtctcgcccctcttgggtcgctccggagccccggcctcccctggctgcatttcttaaaaatttgggagcctgggagtgagttttctccgaggcgtgtgtgagaggcggcgggggtgttttcctgcgcgaggggcgggtgaagttcattgcccccacttttcccgcgacctttttcggacccgattttggatcgagttgaggggggcgcgggcgttttcggggggcggggggcgcggcggagaatggccgcggggagggctccccggagcctcccagtctcttgatcaaagcattccgctattctgatttattgcttgcttggtgagttatttttttttcctctaaaggagacctgtgtgttcagccattactttgctcggcgctgctcccaggcatctccgaccctcggtgctgtggggagccccacacttgggctcctcgcctctcgccctcgctccccgtccctcctcccctctctccgccccttcccccttttctttctcctctctttcttcccctctctcccttctttcggccgccgtctcccccgcgccctcctcggggcggagggaagccgtgaagggggagggagggctcggtgtcaatttttttttgtgtggctgcggccgtagcctgtggcgggcaagcggggagaccccggcgcagcagaaccatggatggcccgacgcggggccatggactccgcaaaaagcggcggtcgcggtcgcagcgagaccgggagaggcgctcccggggcgggctgggggccggcgcggccggcggcggcggggctggccggacccgg

SEQ ID NO: 5610 - DNA, 348 bp, Homo sapiens
  chr7:69064833-69065181
  hyper
cgccccgtcccggcccagacccccgcggaggaagcggagagagtccacctcggcagaagaggacatcattgatggatttgccatgaccagctttgtcacttttgaagcgctggaggtaagggggaccccccttcccccgggttccctttatgcacgaccccactcggctgcgcccggctctcctgcctccctcgccgcgctccgggctgtctgtctgtctgtctgtctgtctgtctgtctaggctgaggtcttattgttggtggggggagctgggggcgcgggcagacaggcagcaggagggagtcgcaaagccgtgcctggtctcgtttcctcgctcgcctttcccc

SEQ ID NO: 5611 - DNA, 30 bp, Homo sapiens
  chr7:70061049-70061079
  hyper
tcaagtttccccaccgtgggtgtctttgct

SEQ ID NO: 5612 - DNA, 30 bp, Homo sapiens
  chr7:70294249-70294279
  hyper
tgattgcagggaagcgcctttgcagaggaa

SEQ ID NO: 5613 - DNA, 30 bp, Homo sapiens
  chr7:70597672-70597702
  hyper
gcttggatccctgccggccgtctggtgtgt

SEQ ID NO: 5614 - DNA, 30 bp, Homo sapiens
  chr7:70734445-70734475
  hyper
atgtctattaaaaaataagcctttgcttcc

SEQ ID NO: 5615 - DNA, 241 bp, Homo sapiens
  chr7:71217102-71217343
  hyper
cgcagcagctcagtgatgggccgagactcgtcccgtgtggcggagatgctggcatcccccctgtggctccaagcgctgagcttggcggcggggacctggcggccccggctcggctcgggacaggcaggtgtggggagccggcgggttggagggcgttttgacgctagagggcgctcggtgcccggcgagggaggcggcccaggccggcgggggagcgcgcgcctctgcacttgcacccagc

SEQ ID NO: 5616 - DNA, 69 bp, Homo sapiens
  chr7:71800933-71801002
  hyper
cgctagtccggagaaactaggaacccgagtaaacccagactgtccggggaagacggatcccacccccac

SEQ ID NO: 5617 - DNA, 140 bp, Homo sapiens
  chr7:71802206-71802346
  hyper
cgacagcaccacactcctcgctctgccggcgcccgcgttcaggagccgggcttctgggctcgccttggccgcctgcgccccagctcctccgagggtcggggagcccccaccccccaacctccgcctctccaatggctccc

SEQ ID NO: 5618 - DNA, 133 bp, Homo sapiens
  chr7:71802389-71802522
  hyper
cgcactcacactcgcgcgcacacacacacacacacacgcatgcacatgcacggcacacacaggcagacacgcggggggcgagcaggcgcttggcagacggtgctccttccttcccttcccaaagaggctgccc

SEQ ID NO: 5619 - DNA, 25 bp, Homo sapiens
  chr7:71802577-71802602
  hyper
cgccgccttcactacttcatcccag

SEQ ID NO: 5620 - DNA, 31 bp, Homo sapiens
  chr7:75924332-75924363
  hyper
agatgaggggagggaccgtccaatgaaggac

SEQ ID NO: 5621 - DNA, 32 bp, Homo sapiens
  chr7:75931591-75931623
  hyper
cattctatctcacacgcgtgtggttccaatcc

SEQ ID NO: 5622 - DNA, 30 bp, Homo sapiens
  chr7:75931873-75931903
  hyper
tgcatggggaggggcggccctcaaacgggt

SEQ ID NO: 5623 - DNA, 163 bp, Homo sapiens
  chr7:75932432-75932595
  hyper
gcagggcgggcagggccgggggcgtgcggttgaaacgggggtcccgggggcctggggagttaaacgttggcccagcaccgggaaaaacaggactcctgattcccttgctcaggaattgggagtgcgggtcgcttctaagggcgctttctgctctgtaatccca

SEQ ID NO: 5624 - DNA, 60 bp, Homo sapiens
  chr7:75932654-75932714
  hyper
ggcaacatagcgagacgcgcccccccgccccgaccccgcgccattacaaaaaaaaagcaa

SEQ ID NO: 5625 - DNA, 30 bp, Homo sapiens
  chr7:75933279-75933309
  hyper
ctttcctctctgcacgtccaggctgccccc

SEQ ID NO: 5626 - DNA, 30 bp, Homo sapiens
  chr7:75947513-75947543
  hyper
ggccgcccccggggcggggctacatacaca

SEQ ID NO: 5627 - DNA, 30 bp, Homo sapiens
  chr7:77428715-77428745
  hyper
gagatgtcagctagcggccggaggagcggg

SEQ ID NO: 5628 - DNA, 37 bp, Homo sapiens
  chr7:77649268-77649305
  hyper
ggagaactccagggggcgggttcgtctgtggacggga

SEQ ID NO: 5629 - DNA, 155 bp, Homo sapiens
  chr7:79081651-79081806
  hyper
ggggttagtcagtacgcacgtgacgcgcgatgcccacatgacacgaccgtgagcgggggagggggacacggagtgaagaaggggaaaagttacagaagacccgtcaaagcgcccaaagcaatttgtcccttcttttcttcgccagcggtggctca

SEQ ID NO: 5630 - DNA, 132 bp, Homo sapiens
  chr7:79082276-79082408
  hyper
ccctgcgccccgagcggtcccaccgcccggcaaaacactgagcaagccgctgctctcaccttgcttgacacacttgagccggagggggtccttgcagtgtttgatcacggccagcacgtccctgatggtgag

SEQ ID NO: 5631 - DNA, 30 bp, Homo sapiens
  chr7:79083620-79083650
  hyper
tgggagccttgtagcgtgggggagttcact

SEQ ID NO: 5632 - DNA, 869 bp, Homo sapiens
  chr7:79764160-79765029
  hyper
ttggcgaggctgcggcgcggccaccggcgggagtgcagcggccactgtacccagagattcaaaaccccaaacccgggacttgggggcgctgagccgggccgggaagcagagcctggtcgtgaggaacagccgcccgttgctgtctgcccctttgcggacagcgtctccctcgactccgcttaggaagtggtgggggcggcgtggcccccgtcgggaggcgttcgaacgcccgctaggagagagaaaggattcccctgtgcttggagcccgcactcgggcgcggagggagcggcggcaggctctcgctttcggcaccatgggctgcacgctgagcgccgaggacaaggcggcggtggagcggagtaagatgatcgaccgcaacctccgtgaggacggcgagaaggcggcgcgcgaggtcaagctgctgctgctcggtaagggcggccgggtcggggcccgggggtcggcgggggaccgggtgcggcgctgcgcggccctcggcgtttggaaacccggagggaagggggaggaagcgcccgaggaggcttctgagcgggagctgggtccggcggtgcggaggcaaggcgggtccccctctcccggtgtctggtctctctccgccccggcgggcgaggactccccgcggcggggcgggcgcgtcacttcactcggatgctttcgtgcgacccagcaaagagcccaggcgcgagtccgaggcggcgggtcgcgtggaaaccctttgctttgaagtttagctcagccttgtaaagatgaaggggcattcgcggctagaaaatgaaaacacccccccccccgcgccaccaaccccctcccggaaaacccttcttcgtgtgcggtgtaggttgtgt

SEQ ID NO: 5633 - DNA, 508 bp, Homo sapiens
  chr7:82072053-82072561
  hyper
aatgggttggggaggttggatcgcgtggtcccagtacctgcgagccccctgcgtggacagcacgctcggccgcggggagccagcacgcgtctaatcggaaggctgtcaagtgcatccagtaacgtgggataaaacgagtttgggcactacagcaattaaagagcatctccgaggccaagtgcgggggaagtccacgctacctcggcaagcctgaaattacctgtttgtaaattacccaaccaaaacataactttttattgaactgggttgaatcagagcgggtgagctggctggaaacttttttccccagtacggctgcactctgaagtctagagaatcccgttagagacgggctgagacgccgcgagtcgtcggcgggcgcttcccgggacagtcggcccccagtgcccggccccgtggaggcgcccgagacgccggttcgggacgcattccagcggcgagcggcgcgcaccgcctgcccggcgtctccgcatccgagcctggctcc

SEQ ID NO: 5634 - DNA, 410 bp, Homo sapiens
  chr7:82072646-82073056
  hyper
cggccggcgctccctgcccggcccgccgacttacgtgacggccgaagggaacggctcctccgacgaggggccgatgagcaaagattggaaaagtgtcagagtcaaggccagcaggcagccagcagccatcttcgcgatcgaagatcaatgccccctccctgcccaagcgggggaaggagcggcgctggaaaccgcgggcggaggaagagcagcacacgccgccgggaccgcgggcgtctggagggctggctgcgcccggggcccgaggcgcggagccgcgcgggggacggcaagggcgggagcggacgccgaggaaggggcggtggcgggcggacccactagcgtgcgtcggctgctccgcgccgcggccgccttgcctccgccgccatcaagggcgactttggaaacag

SEQ ID NO: 5635 - DNA, 150 bp, Homo sapiens
  chr7:82073438-82073588
  hyper
gggctcccgggggacggccagccgcccagcgggcatccacaggctgcagaggctccaacccaggacttggctcgcgtcttcgggggttatttttgcacatgcaggcagcgttcccccccagccctactcccaggcgcagaatccagtgcc

SEQ ID NO: 5636 - DNA, 30 bp, Homo sapiens
  chr7:82791660-82791690
  hyper
ctgtgcatggaaggcgactccgcagcggcc

SEQ ID NO: 5637 - DNA, 422 bp, Homo sapiens
  chr7:83277833-83278255
  hyper
tgataatgtgccccgcggatgccatgctgccgtgttcaccgtccaagccctcgctcctcactttaaggagggtctgagttttacttaggacttccctccaggggcagcgtgcgagaggctttgtcagaaatcgaacgcgttgtcatcagaaagcacagttccgaagtgccatttgtcaggctgtatttggctatgtaaaacctttctttcctcgggacagttgtttataagccgggagcaagaggacattccaaagagtgagtcttcagagccatgtcctgtctagagcgctcttcagcaactacgccggtagattcaggaagaagctgtatttttcagtcacttgggcaaagctgttcattcagaaaaaaaaaaaaaaaagagagaaaaaaacaaaaccgagcacacgcactcccttctcc

SEQ ID NO: 5638 - DNA, 57 bp, Homo sapiens
  chr7:84814641-84814698
  hyper
ccctcgtctctgcgcgcccccaccccgccatcccccgctagcgcacacatgcaggag

SEQ ID NO: 5639 - DNA, 30 bp, Homo sapiens
  chr7:84815528-84815558
  hyper
tccccggatgttcccgactaaagcgtctcc

SEQ ID NO: 5640 - DNA, 30 bp, Homo sapiens
  chr7:84815925-84815955
  hyper
cccgcttagcaccgcggtctccagcacacc

SEQ ID NO: 5641 - DNA, 170 bp, Homo sapiens
  chr7:84816299-84816469
  hyper
tccaaacaggagggcggcttttaagtttgtggtgtgaccgcagcagctgtcctgggagagactcagtctttctaaaaagaggatgctgaaaacgccggggattacctttccccttccgatctcctcccccagccctcgccccctccttccactgcgcacgccagaactcc

SEQ ID NO: 5642 - DNA, 141 bp, Homo sapiens
  chr7:86273043-86273184
  hyper
aatttgggagaatgcgaaaaagcagcagcccagcattcccggatgggcgtggcttttctccaggggctgtccaattgaattccttcagagggagaagattgataagggttgctaggaaacaggagcgtctgcctcccgcct

SEQ ID NO: 5643 - DNA, 30 bp, Homo sapiens
  chr7:86273414-86273444
  hyper
tttaaagttggagccgccaccctccctacc

SEQ ID NO: 5644 - DNA, 30 bp, Homo sapiens
  chr7:86273703-86273733
  hyper
ccaattagatgcgacggcttcagcctggtc

SEQ ID NO: 5645 - DNA, 148 bp, Homo sapiens
  chr7:86848938-86849086
  hyper
gtcggggaagcgctggcgccagggatgggtgggggctcacacgcggggaacgcgactgctccgccccggccccgcgcacctcctcatcttgagcagctgccgcaggaagtgaaaggaaacaaacactgcgtggcagactctcagcggg

SEQ ID NO: 5646 - DNA, 103 bp, Homo sapiens
  chr7:86849533-86849636
  hyper
ccagggccggcgtgctcgccgcagctcccgccgctgctctccccgcgctctctgccggaactgcagcaggagtacggtctaggcacagcgagagggagaatcc

SEQ ID NO: 5647 - DNA, 30 bp, Homo sapiens
  chr7:87104709-87104739
  hyper
gcccagttcaaagtcgccctccgcgctcgt

SEQ ID NO: 5648 - DNA, 981 bp, Homo sapiens
  chr7:87229459-87230440
  hyper
ttcttctttgctcctccattgcggtccccttcaagatccattccgacctgaagagaaaccgcagctcattagccaaatgcatgagcctcaggcgcgctggaggtgagactaacctctagtcccccgtcgaagccagagagcagtaagagggagcgcccgccgttgatgccccagctgctctggccgcgatgggcactgcaggggctttcctgtgcgcggggtctccagcatctccacgaaggcagagttgggggtctggcagcgcgttctggactttgcccgccgccagtgcgattctccctcccggttccagtcgccgcggacgatgcttcctcccacccaccgcccgcgggctcagagagcaggtccccgcaccgcgcgggctgtgcgcgctccgggcaacatggtccagtgccactacggtttgggcgctgctccaggagctcctgagtctagatctaaccccacttggtccccatggacttgccagaggacttcacactatccacgcctcaagaagcccttctcccgtgaagaccaagttcaggaaatctgaaagcctgacacttgggaactgtcccatagtagctcccagctttgcgtgcccctacctcgcgctccttggaacggccaccaagacgtgaaattttggaagaagatactccgactttagtggaaagacctaaaggaaacgaacagcggcctctgcttctttgagcttggaagagccgctactcgaatgagctcaggcttcctgtggcaaagagagcgaagcggctgtgctcagcccacgccccggcgctgttcctgcccagccaatcagcctcaccacagatgactgctcccggcccggattgactgaatgctgattcctcgagaaactgcgaaacaggttgaatttccaggaggaatgttctggcttccgttgcacctctctagaaagggcaagtagagaaacgcgcatcagctgaatcattgggg

SEQ ID NO: 5649 - DNA, 987 bp, Homo sapiens
  chr7:87256906-87257893
  hyper
gggaccctcctgcaggtaaaacggtgggtagtgagaagctctaggaagggggcgcttccgaacacgcgcgtcgaggagggcgttccaggactctgagggagcagcccagctggaccgaggccgcgtcgttcctgggcttactattcccagacccggactcccgattccggagtcacggcccaggacgcgaaaagactctacactggcaccacgctcctccttaggcgggccgtcagtcccgggtgcgggctgcgctggaggctgaggtgggagcgacatggtgtggaggggcaagaaatgtcggcactagacgcgccaagaaggagattctacgagcaattcccccctcgggccattgtgttgctgtttattagcccctgggagggcgtcaggacaaaaggaaccctcctcccttcttagtacttaggcccaaggtcgggtgtgggagccggcgcgctgctttctaggcaggcactgaagctacggcagccacgcaaataggtatcagccgttaaagcttggctacaggcaaggggggggcaataggcccctggcgctgtggggccccgcatcccacaatccccgcggctagcctgtgtggctactggcggcagctagcgggctgcgaaagcgagcccagcgtccttgacagcagcccacgcgtcggggcggggcttgagcccgctgctttaaaaggtccgcgcggccggccccgcccctctggtgccgcgattggatccggcgggggtagcgttgatttgataggcgcagagagggtggggctgcgcacgcgaggccgggggccttgccgctgcctcccgggctggggcacgagtggctgcggagtgtgggtggttgggcgtgaggggccgacgggctcgcgcgcgcgccgtctgctgaggtccctcgggaaggaggagagcgcctgacgccgacccgcaggcgcagcccggcagtcggcggcgcgccgagggcggaggtggtgcg

SEQ ID NO: 5650 - DNA, 497 bp, Homo sapiens
  chr7:87257922-87258419
  hyper
gtgtgtgtgtgtgtgtgtggagctcgggtgccaagggcgagccgtcagtccccgggtgcgagtccctgctgtcttccacacccttcctccctccaggctcctttcctacatccttcccgcgcccccacggttgcggaccgagcgagaacccccttaagcaggtgtggggggcgtgcggggtggcacgagacaaaaggggcacgggggtaagcccgccatggcctcccggagcctggggggcctgagcgggatccgcggcggtggcggcggaggcggcaagaaaagcctgagcgcccgcaatgctgcggtggagaggaggaacctgatcaccgtgtgcaggtacggcagcgcagggcgaggggaaccagcctcccgccggggctgagagctctgggcttccgcgcgggtccttgggggtcccgggcatgatgggctgccgcccagtgcccccgcctatgttgcgccagccaaatctgtgagcgcgcagctccttggac

SEQ ID NO: 5651 - DNA, 372 bp, Homo sapiens
  chr7:87849419-87849791
  hyper
gggggccgccccagagcgcaccacgcgggcgtgggggacgcgctccgcagtcgtctccagctcttgcctgtgcgcgcggccgtggctcccctgcctgcgcgcttcttcgtatctttgccattacggcgctaatgcagtgcacgactgaaggtccagtggcggcctacgacctgcgaggcaattcacaccagggactttcctccctccaaaactaatggcacattccaacaccaatacaccaccccaggaattctttttttttttttttccttcggacttggctattatctggcacatttcttattttaaacaactttattggacaggacggagctattataagcggagcgcaccatcgcgaggcaggggctg

SEQ ID NO: 5652 - DNA, 333 bp, Homo sapiens
  chr7:87936056-87936389
  hyper
tgagctgaagcagataagggacgggagccttgtggcgaaaagtgacccacctgagggagaggcgcttccaaggaggaagcgtccagcgccaacggtgcgcgccgcgggccgggcgggtagagggaagtttcgccgcgcctgcagctcagcgctgtggcttgtggctctcgctgctataagaagccagagaagggcgggacggtctgctggatttcgcaagagaagcggaaaagaacttgtttcctggaagagttcaagctgagaatcccagcagctggaaggaccggaacttctatactgcggtgctgctgatggtgccgctgacccccggga

SEQ ID NO: 5653 - DNA, 174 bp, Homo sapiens
  chr7:88387816-88387990
  hyper
caggcacagacaaggcgaggtgaggcagagatggattgcagaaccgcattaagcaaccgcggggtggaggagagtgcagggtgtctccaaaccctgggagggctatcttctcctttcagagcacatttctgcccaggtctttttattctcagtgcagctcgctccctggtggct

SEQ ID NO: 5654 - DNA, 15 bp, Homo sapiens
  chr7:88388246-88388261
  hyper
cgcatctaatctgtc

SEQ ID NO: 5655 - DNA, 122 bp, Homo sapiens
  chr7:88388539-88388661
  hyper
cccgagagccccccgcggctgcagcggcagctgtcacctcctggcctcgccccacagcacacctgagcctcctgggcagccccgagcccacagctcccagcagaggcgctaactgccctcct

SEQ ID NO: 5656 - DNA, 173 bp, Homo sapiens
  chr7:89840716-89840889
  hyper
agcaatttctagagcggaaaggtgaccccacattacaaaaagaaatggagtagaaaaataggcttgactattctaaagctgcttcagaaagaatctccggaagaccacggaggaaccccgcaggggagccaggcggatactcagccgctcgcggtagaagggcgcgcaaagct

SEQ ID NO: 5657 - DNA, 105 bp, Homo sapiens
  chr7:89841066-89841171
  hyper
cgggccctcggcgccacgagctgtccgggcacgcagcccctagcggcgcgtcgctgccaagccggcctccgcgcgcctccctccttccttctcccctggctgttc

SEQ ID NO: 5658 - DNA, 199 bp, Homo sapiens
  chr7:89841213-89841412
  hyper
cgccgcggcagccaccctgcaaccgccagtcggaggtgcagtccgtaggccctggcccccgggtgggcccttggggagtcggcgccgctcccggggagctgcaaggctcgcccctgcccggcgtggagggcgcggggggcgcggaggtgagcgggtcggggaggagcgcgaaagaaggtagcggcggcggagttgaggg

SEQ ID NO: 5659 - DNA, 495 bp, Homo sapiens
  chr7:89874498-89874993
  hyper
ggcttgtgttaacaaccggcccgggatcagaggtctgggtcaactggggggcggcagcggcgctaagcggactgtatggcggtggcctaggcccctggcggaattttgggacctttcgcgactctagcgactctcaggctgccttcccttctcggtggcggggcctctttgggcccagcggctgcgggcgcactgtaggacaggaagatccccccactctccaccccgccgccaccggccatgtggacagaggaagccggggcgaccgccgaggcccaggaatccggcatcaggaacaagtctagcagttccagtcaaatcccggtggttggggtggtgacggaggacgatgaggcgcaggtatgagcaggtgtctgtgctttcagaggtggagggggtgggagtgaagtctcgagacggggtccagacctgggggtggcaagggtggaactggggacaggagtgaagatgggggaagccgcgggatggagattc

SEQ ID NO: 5660 - DNA, 481 bp, Homo sapiens
  chr7:90226143-90226624
  hyper
gttgtaggcggggatcgagggcacagtgctagggacccgggggagggcaaggacgtaaaggaaagagacccctcttcctcaggatctgggggttcatttgtagattctctcaagcctacaatatgggttctcccctcctccgccactagtgctcgccctttcgcgcgcgtgggggacgggcgaggggacccctcggcccccaccgcgcaaggggctgcgcggctgcttgggccacttgttattttttgcgcacaggcttggatattgggcgtttagtcagtaatttagctttggaaattggtgaaacgttagactgtgccctggtattgtttaacgtatccaacctaaagggaagtgggacagttaccttgggacctattgttcggtacttcgggtcctggaaagcgagatttgggtgttcagtctcgaggtctctgaatcttcccgctgctggagagaaatgcgcgctgtggagttgtct

SEQ ID NO: 5661 - DNA, 195 bp, Homo sapiens
  chr7:90893323-90893518
  hyper
tgctgttggtaaccagcgttaagagcaggatttttaaacatgataatggataaaataaaagaaaagcgaagtcccgcggtcctctgactcctattcattatctccagcagcatatgggaccattctcctacgtatcctcgcctttttcttctgaaaaagcaaaagcaaccaagcctgtcccgcttcagagcaatc

SEQ ID NO: 5662 - DNA, 30 bp, Homo sapiens
  chr7:90895012-90895042
  hyper
agttctcctgcccgcgcgccctcaaggtgc

SEQ ID NO: 5663 - DNA, 30 bp, Homo sapiens
  chr7:92157245-92157275
  hyper
ccggacggcagcagcgcaggttaactggaa

SEQ ID NO: 5664 - DNA, 30 bp, Homo sapiens
  chr7:92158278-92158308
  hyper
tatgtgagtgctagcgccatatgaccagcc

SEQ ID NO: 5665 - DNA, 144 bp, Homo sapiens
  chr7:92219763-92219907
  hyper
tctgtggaggacaggccggctccagagatcgctgcagttggcggagcgcctgcaggagtccggtcgttcattaggcacccaagagcaggcgacgctgcgcttctgcaccggagccccaccaaggcagctcgcttcagtttggcc

SEQ ID NO: 5666 - DNA, 1002 bp, Homo sapiens
  chr7:92462331-92463333
  hyper
ctgaggattcccggctcggccctccccgcgcgcgcgaggccccagatggcgagggcgcagctccctggctcacctgaccacgttggggtgctcgaaggtctccaggtgcctcagcaccgccacctcgcggatggtggagagcggcatgccctcctcgccggtctgcacccgcacgcgcttcaacgccacgaaacggcctccgttcttcaagtcgcgggccttgaacaccttcccataggcgccctccccgatctccgccacgcattcgtactgctggtcagcgcggcacaggccgtccttctccatgccgcctggacgccgcccgccgcggcgccgctggggcgggcggggggtgcgctcaactagctggcggccgccgctcgcctactccggggctccccggagatcggtctagctttacttgctccccgccggctcaggcgctcgggcgctggggctttcgccgctgcagaagctggatggagagacctccccgcggggctggcgtaaccctggtgccgccgccgcgaaactccgcctgcagagtcgccgccgccgccgccgccggaggagcgagccgatccctcctcttccctcctcgaagcgaagtcctcaacacagacacgattacatagcctctgcccaagcgcgtctcagtccagaatcattgcacctaaaggaggagacgggaggataagaagaaagtgcaatcagacagcccagaagccttcctcggggttcctccagactcccctcctcctcctttacgaagcctccatcgctaccctccgcgcgctcctgccctctcccaagccgcttaatccttcctggttcctccgagaaaagcgaagttacttttctttccctgcagggctgaagccgtcttcgcgcggagaggttgcaggggcccctcggggatgagcgagcggcgcgggacgcagtggaacgggagggggcgtgccgagcagcccagagtgtgccgggagcgcgggggaggggagg

SEQ ID NO: 5667 - DNA, 86 bp, Homo sapiens
  chr7:92463862-92463948
  hyper
gtgttcgccacaatttcgcttgtcgtctccttaaagaataacttcaggaaggggatagcataatcgcgcctcgtccttaagtttta

SEQ ID NO: 5668 - DNA, 253 bp, Homo sapiens
  chr7:92466275-92466528
  hyper
ggagagttaaatgaaaatttccggctttcgctgaaactgtagtagggggatcctgcgactaaaataagcggcattagtgggagagagtgggacgtgtcgtcgggagtcggcggagtttccaaacccagggtcgcccagagttggggttttgacagggtgaagcggggggcatcctcactgtgtgacgtggacggatgggaaaaacacaaaacaaccaacaataattatgagcggccaatgggggtggtaaata

SEQ ID NO: 5669 - DNA, 30 bp, Homo sapiens
  chr7:92861591-92861621
  hyper
ttcatcgttgctaccgccggcgtccagaag

SEQ ID NO: 5670 - DNA, 32 bp, Homo sapiens
  chr7:93204335-93204367
  hyper
ggagactaaagcgccgcgtaaacacaggaagc

SEQ ID NO: 5671 - DNA, 420 bp, Homo sapiens
  chr7:93519345-93519765
  hyper
gctaaaacttcctgtagaaagcgagacgtgggaaactggcgaagctgctaccagccgccggcgcaaggagcgcgagagtcctgggtgcgcgcagggcacttactttctatcctccagcaagcatcgtcgcaagcctcccaggtgtagaaattgttggcgttgccctcgcagcccccgtacaggaactggcggcagctctgcgtgtacctgtcgtagtagtaacggagaagtagggcccggcagggtccgtagtctaggggcaggagacagatctccgcgttatttcctgaagaaggggcagaaggagagcaaaagagagggaaagtggtcaggcgtagctcctaggaggaaagaacatcccggggagttctgtccccttccgagcggaggggcctctgcagagaaagtgcaaacttggga

SEQ ID NO: 5672 - DNA, 483 bp, Homo sapiens
  chr7:93519854-93520337
  hyper
cgccctctccgccggttggggagagaagctcctggagcggccagatacctgttggctcctgagcagcatcgcccagtgcagcctccgtcaggaaaagcagcagaatcgacagccccagggggcgagcggggtccatggtgcagggggtcgggcggcccgctgggcaaggcgtccgagaaagcgcctggcgggaggaggtgcgcggctttctgctccaggcggcccgggtgcccgctttatgcggggcgagcgtccggccgacccccgccggggcggagcctgaggggtggctgattcatgcacggggactgtcaccccgccgcccccgcgctgcaaactgtgtaagagggagaggaattccccgccaagttgaaaagttgaacctgcctcccaaactttctcctgtagtccagacggggacgccctgagggagcgtttgtgtcagtaatgggaaatctgcaagctagacggaaatgacctgct

SEQ ID NO: 5673 - DNA, 30 bp, Homo sapiens
  chr7:93550999-93551029
  hyper
ggagcgggggtgcgcggagaacacaaagta

SEQ ID NO: 5674 - DNA, 30 bp, Homo sapiens
  chr7:93633785-93633815
  hyper
gcgtgatgtgaacccggttccaggagcgga

SEQ ID NO: 5675 - DNA, 30 bp, Homo sapiens
  chr7:94023973-94024003
  hyper
ctcaaaagtgtccacgtcctcaaaaagaat

SEQ ID NO: 5676 - DNA, 549 bp, Homo sapiens
  chr7:94284364-94284913
  hyper
catagtacaaatgcacgcaaatatttgtggccgaatctcggcaacccgctggaaaggattaaacgtgcggttgccgtgactaaacgcattcattcaccctacaagatttaggaaaatgtaacgttgcaagggaagcaaggtctctgtgtaaacctcgtaatcgccaccaaaagtcggtagctgggagccttcaaagcccgccaaacacactggaagcatccacagctgttttaaattggttttggtttctggaaatagcgcactcggtacggcagcatctctggcctccagccggggttaaccctgacctgaacgccctgtttagctcccagcatttcatgattccgcttccctgctccgtaaaaccgaagaaaaccgagatttccgtcaccgagaaatgcacttagcaagagggggaaattcggtgttttaaatgtcacatttttgtgttctctaccactatcaagaaaaggaaaaaagatgtgtttgtgtagcggggacgcagcttgacacccatttcctttggctcgcatcgcggtcgcagagccc

SEQ ID NO: 5677 - DNA, 937 bp, Homo sapiens
  chr7:94536971-94537908
  hyper
gctccctctctctgcggccctagagttaatcccatcagccgaggtgaggcacctgttaccccggccttcctcacccccgcggcctctcctccattacaccgcggccgccgaaacggcccggcgtggcgaccgcacgtgggccaaaccccttccccggccggcacccctggccccaggccggcccgagcgtgcgggcgcgtcgctgctcgggccgccgcccgcccgcaatggcgttggggagcgcagcgcgcctcccggggccgcccgccgcgggcagggagcgcctgggggccgacgcgcgagtggaagcggccgccgcagccgccctacgcgctgcgccgtgaggagcgggttgcggtgtacccagcgggccggcgccgagccgagccgccgcgtccaccgtggggcggggggcgcctgcgaggagggggtgggagccgcggcggcccgaccctccccgcccgcggcgctcccgctcgggtaagggggaggctgagcgcggggcgaggagttggggagggtggagaggaggaaaaaatcggcttgtacaaaggctgagttgcaggctgggggtgggggtgggttgtggtggaggagcaataggttgaagatcggaggcattatcagtgggatctattgtttcctggcacattgggaggaaaaacaaagggatttattttcattaccctgtaattttttttcttttctatttttttaaatgtggccagggagctcgtctctctccgtgtcacagtgggatccgcctggcagccgccgggagctgcagccaatgtgttaggacttcaggtgcttcttggcacaaagctagactgcgacctcctaccatagcgcttggcgtcacctgctctcccggtcctgccccagggccgagggattgcgtcccgaaccgggcttgggaatcggctgcctctcaagt

SEQ ID NO: 5678 - DNA, 386 bp, Homo sapiens
  chr7:95064192-95064578
  hyper
agtgccagaagcctctcgcccaggagcgccagcgcgatccccagcaagcccacagccaccagccgccccatggcgcgggagccgggcgcgctgcctcgctccggcctggccagcagctccgtgggcggtgccatcttcccggctcgatggtgccggccgcgctccgccccgtcctccgcctaggccgagtccctgcgtcggggccgcggaggctccgccctgggcctggccctggtctttgtcctcacaaacctatttccccagataccttcgggacggcccggacacgccttacattaggctcatgatgtgaaactttgaattccttcacttcctttttcaaacaacccacccgaaaccctctagcagcccgcatacctttctcg

SEQ ID NO: 5679 - DNA, 768 bp, Homo sapiens
  chr7:95704889-95705657
  hyper
agcagctgttgcagctacagacgaggaccacgaggtggcaggggttgccttcaatgaaagggttcggggcggtcgggaccgccggggcttcagaacatccccgcgggtctgagccgggccgaccacggttgggtttaggctccgagcatctcgcaaagcgttgccgggcgagaattccgaactaatggaaagtccggtccacctgtctggaatgtctcatacaactctgttgtctgaaaccgcctccccacccccggtcccagccaccagccccttgagaggccccctctccccccggtatttatttatgccactggacagttctagtcacattaaagctccggttcaccttctcgaggactttcatctcgggaagttttatgacactttgtgaatgtgcaaagtttttaattaggctctctagacagcccgaggcagcagcagcgccacaaagtcttcacggtctctctgctttacagcacaacaagccgctctactcctttgaagacaatgcagactatgtgtacgatgtcatgtggtcccccgtgcatcctgcgctttttgcctgcgtggacgggatggggcgcttggacctctggaacctcaacaatgacaccgaggtgagcggcggctcaggcgcccgggccggagggctgggaggggggcgcagtcggccactcgcagtctctccctctttctccaaaacggccttttttggacagaccttccaactgcagcagggctgccggcccccattcttgactaccc

SEQ ID NO: 5680 - DNA, 145 bp, Homo sapiens
  chr7:96621953-96622098
  hyper
ggggcccttccctgtgtagtacgcttattcccgaggtgggggctgagaatcgaagagcagcgccccccacactgggattgggggtggtcgaggggctacagatgcccgcattgggcttcttagcggcctaggctgatgcctggag

SEQ ID NO: 5681 - DNA, 334 bp, Homo sapiens
  chr7:96634601-96634935
  hyper
agatattggcaactggggctccgggatttggggcacgagctgcggcgggaagcatcggcggccggccgggcagaggcgcctccctccccaacggccccgggcgccacacagcgcggcccccggctgcagctccggctgggattggaactgcggaaggtaggcgaagaactctgcaagtcgcgcacacgccagtagaagccgtgcgcctgtgacgtcagggggcgactgaccaatggggaggcactgccctttggagacaaaccattcgactcgtggcgtctgcatcaagtctgaaagcagacgcgcaactttcgcagaatccaccttaaaatct

SEQ ID NO: 5682 - DNA, 167 bp, Homo sapiens
  chr7:96635284-96635451
  hyper
ttttgatgatgaccatgactacgatggctgacggcttggaaggccaggactcgtccaaatccgccttcatggagttcgggcagcagcagcagcagcagcagcaacagcagcagcagcagcagcagcaacagcaacagccgccgccgccgccgccgccgccgccgcag

SEQ ID NO: 5683 - DNA, 103 bp, Homo sapiens
  chr7:96635486-96635589
  hyper
cgcgcactaccctctgcactgcctgcactcggcggcggcggcggcagcggccggctcgcaccaccaccaccaccaccagcaccaccaccacggctcgccctac

SEQ ID NO: 5684 - DNA, 352 bp, Homo sapiens
  chr7:96635619-96635971
  hyper
cgctcgctcgccgcctacccctacatgagccactcgcagcacagcccttacctccagtcctaccacaacagcagcgcagccgcccagacgcgaggggacgacacaggtgagaggccgctggggcagctcgcttctcccgcctcccgactgccccctaccccgcccgcccgctcacttcctcgacgcccgggcctccgccggccccctcccccaggcggccccgcgcgcccttggccgggccccgtgcgcgcccgctcgcctggcgcctgcctgccggcctctcccagccgggccccttcccgccgccgcggaccctcagcttccgacgcgcagttcgggctgagtcccgggc

SEQ ID NO: 5685 - DNA, 340 bp, Homo sapiens
  chr7:96636033-96636373
  hyper
cgcccttttccttgctccttccctccaggctgtaacccacgtttgacccggctggggacatttctgggccggaactggggagcgtgttttgcttcccagcccacgctgggcaggcagtggcctactttgcgtggggcgccccgtgctcctcagtgactcggagggaagctggcctggctttcgctctggttaaactagtaacagtcaggctctttccagtgggctttaaagtgtccctcaccttcatccctgaccgggccccctatctagcttttcgctacagtgttggctgctcctttgttcgtggaggggaagcaaagaacctcgggctgatggttct

SEQ ID NO: 5686 - DNA, 126 bp, Homo sapiens
  chr7:96647006-96647132
  hyper
aggcaagtggaaaccggaaggggcaggcagaggggtcacccagtgcgatgtcaagagtggggccggctggtccgggaatatgctggggagtggagcacgtttatattcgacgtaggaaaaacaatg

SEQ ID NO: 5687 - DNA, 30 bp, Homo sapiens
  chr7:96648028-96648058
  hyper
accctttggcttcccgcccccccccccgcc

SEQ ID NO: 5688 - DNA, 537 bp, Homo sapiens
  chr7:96653282-96653819
  hyper
cctttccagcctagccggcttcctggccgggcaagctgggaattcagcgactgaagggccttggaaggtgccggaggggagagacgctagttcgaacctccacagggctctcctactaaaaatccctaaaatgctggcccgagaaactctctttgttggagggtctgagtcctactcccttctgccgcgtgcgcccccactgccgtgaaccgctgtgacccccaatctaccaccccatctcgcgcccccagcgtcctagtcgccctgtatctgcccagccttccccctgtccatgtacctggctggttggtggcgcttgggacgcggttgtaggcgccgccgtactggtggtaggagctagcgtagctatagtcggcataagctttggctgggtagctcccggcggagccgttcacgccgtgatactgatactggtaggggttgagagctttgccataggaagccgaggtaggagagcagtagccgtgcggggctccccccgtagggctgtagtagtcagaatcggtagctgaagac

SEQ ID NO: 5689 - DNA, 285 bp, Homo sapiens
  chr7:96653862-96654147
  hyper
cggacgtctggaacggagcttggaagtcgccggatcggatgctggggacccttctgtcaaacactcctgtcatcgctcacgggcggcggcagcggctgtccttgctgttgtggcggcggcagctgccctagttggctgtggggctgctctggtctaagcagacatggctgtgggagcgagggaggaggaggaagaggaggaggagagaaggaggaggcggcggccgcggcgaggaggagactgggagtcgtgaagtctctgtctccggccggctgactgctggct

SEQ ID NO: 5690 - DNA, 330 bp, Homo sapiens
  chr7:97361092-97361422
  hyper
aggtgtcatgaaacccagtttcgaaggagaggggagggggcgtcagatctgcagacggaagcaggccgctccggattggatggcgagacctcgattttcctaaaattgcgtcatttagaacccaattgggtccagatgttatgggcatcgacgagttaccgtctcggaaactctcaatcacgcaagcgaaaggagaggaggcggctaattaaatattgagcagaaagtcgcgtggggagaatgtcacgtgggtctggaggctcaaggaggctgggataaataccgcaaggcactgagcaggcgaaagagcgcgctcggacctccttcccg

SEQ ID NO: 5691 - DNA, 135 bp, Homo sapiens
  chr7:97361520-97361655
  hyper
cggtgctggccgcggctgcccgggtcaccccgccccgcatctgtccgaggtggccgcgctgggggcgccgctgcggcgagggacagtggggagactggcttcccaaacgccaacgcccctctttgtcttccacct

SEQ ID NO: 5692 - DNA, 1103 bp, Homo sapiens
  chr7:97361998-97363101
  hyper
tgatgatctgaattactggtccgactggtacgacagcgaccagatcaaggtgaggccccttcccaggacggcccgcacccttcttcctgggctcgggagctgtcaccttcccacgcaacagcaccctagttaacgtggcacgcaccgccaccacggaaagaggcagcggttgcgtgcgagaggatggaaaggggcactatttcccgggttccccacgggattttgtgcccacgattcaagtttcttcccgagggctgcaccgtccggcccaggaactccctgcagtagggatgccctcccggatgagcccgagatcctcacaaggcgggaaatctcgtaagatttcatcccccaggacctgggatttcgggggctccggtccagctgcactgccctagcgtctgggcacgggcagaggagggcgcctgggtcgcgggcagcagcgggcacacgcgcgagctgcagggggattggagggccggaggctggagggaagttaatttcctgccttcacgtttgttttgcggacctgaggatgtagcttgaagtctccctttagaaactcgtaggctacaggcgctggggagcgcgcctcggaaaaacggtgaaagtcgtctgtaaagcgttgtcacccttccccaccggagccccagccccagatcccacacacctgtgtgcatttagggcggtgaggactctacaaagccggcaccgagacaagacaaagtcaggtggcggcgcagcagatgagggaaggtccccgggctgggaggaaagagcggaaagcgctcgaagcttgaagacgccgagccagctgctaactcgccctggcaggcttgcggggggcgggacgcgagttcggcggggaggggcgcagagaggcagcgcctcgggagggaccccgctcagcccgagcgtggggaaggccgcctccccacgcctcggggccggagtacagcggggggaagggctcgggttgctgggtgcctcgctctggttgccttacacgccctttgtccgtgcttttgtctcccaggaggaactgccggagccctttgagcatcttctgcagagaatcgcccggagacccaagcctcagcagt

SEQ ID NO: 5693 - DNA, 30 bp, Homo sapiens
  chr7:97501893-97501923
  hyper
tttccagcgccttgcgtctcagtgcgcctg

SEQ ID NO: 5694 - DNA, 191 bp, Homo sapiens
  chr7:98030419-98030610
  hyper
gcggccccacctgaggcgggcggggcagacgggggcggggccgcagggccggaggggcgtggcgtacccacctgaggcggcctggtgagcggggcccggccggggtgggcggggaggaggcggggccaggcagctggaatgggcgtggccagagggaagcgggccccccgagtgggcggggtcaccccacc

SEQ ID NO: 5695 - DNA, 123 bp, Homo sapiens
  chr7:98245955-98246078
  hyper
cgttttccgagttggcgcggggggtggaggcggggccatggagcgcgtcccggggaccgttgcatccggaggcggccgtcgtgcggctccttcccgcctcgagagtgaggtggccgggccttg

SEQ ID NO: 5696 - DNA, 203 bp, Homo sapiens
  chr7:98246304-98246507
  hyper
cgaggggcgcctgggcacggccagccgaggctctcgagagccccagtgtcgttttccacctcaggcctcctttcctgaggcagagcccgggacctcgcgctctcgcctcaggctccggcccacgctcccgcccggccgccaggcgcgcaacggaaagcgcccccgccccgccccgctccgcccactgcgtgacgcgcacccgg

SEQ ID NO: 5697 - DNA, 614 bp, Homo sapiens
  chr7:98246533-98247147
  hyper
cgccccacacgccggccccctccgcccctcagcttaagaaagggcgcgcggacccggcaggccagagtgccgagcagcgcggtgggtgcggctgtgagacggcaggagacttctgccccgcggtgcacgcgaccctcgagacgacagcgcggctactgccagcagcgaaggcgcctcccgcggagcgccccgacggcgcccgctcgcccatgccgagctgagcgcggcagcggcggcgggatgctggcgctgctggccgccagcgtggcgctcgccgtggccgctggggcccaggacagcccggcgcccggtagccgcttcgtgtgcacggcactgcccccagaggcggtgcacgccggctgcccgctgcccgcgatgcccatgcagggcggcgcgcagagtcccgaggaggagctgagggccgcggtgctgcagctgcgcgagaccgtcgtgcagcagaaggagacgctgggcgcgcagcgcgaggccatccgcgagctcacgggcaagctagcgcgctgcgaggggctggcgggcggcaaggcgcgcggcgcgggggccacgggcaaggacactatgggcgacctgccgcgggaccccggccacgtcgtgga

SEQ ID NO: 5698 - DNA, 30 bp, Homo sapiens
  chr7:98247743-98247773
  hyper
gcgaccccagagcgcgcattagaggggcaa

SEQ ID NO: 5699 - DNA, 29 bp, Homo sapiens
  chr7:98971520-98971549
  hyper
ccaccgcgaccggccgaggtaaggttttc

SEQ ID NO: 5700 - DNA, 30 bp, Homo sapiens
  chr7:98971837-98971867
  hyper
gccctggccacgcccggaccgcctgctccc

SEQ ID NO: 5701 - DNA, 95 bp, Homo sapiens
  chr7:98972089-98972184
  hyper
cggctcaggctgcgcgcctggctcccagcctcagtttccccattggtaaagcattgacggtggttgcggacggcttctgcggacagagccttggg

SEQ ID NO: 5702 - DNA, 31 bp, Homo sapiens
  chr7:98990958-98990989
  hyper
gctgagcagctagcctcgctctgcatttccg

SEQ ID NO: 5703 - DNA, 31 bp, Homo sapiens
  chr7:99028318-99028349
  hyper
cctggggttagcagagcgggcacagcctatc

SEQ ID NO: 5704 - DNA, 31 bp, Homo sapiens
  chr7:99070937-99070968
  hyper
tcacgtgattgtgaagcggcattttggattt

SEQ ID NO: 5705 - DNA, 30 bp, Homo sapiens
  chr7:99149791-99149821
  hyper
cctctctaggatcgcgggaggactttgcat

SEQ ID NO: 5706 - DNA, 137 bp, Homo sapiens
  chr7:99155676-99155813
  hyper
actgtcagtttcctccgtctctctcggttctattccaatctgctcatctcccctcccgtccccgctttccccaaggacctactgagatttcgatcccacaacttagtgggtcccatctcacccaggccccgcaatcc

SEQ ID NO: 5707 - DNA, 1038 bp, Homo sapiens
  chr7:99155931-99156969
  hyper
cgggccgcctccttgcagggagtctcaaggatgggctggcgtcagggaggggcccagggggcgctttcccaacactggtcgcagtcattgttggtataacggctagagacgcccagtgagttagcatggagggcagtgggaccggaaaaagacgtggaaaagctgcgaaaacgagccttcgaatcatggacgcgcgggcccagctcctcctccgagttcctcatccggggccgtcactcacatccggggccctcactcacatccgggaccctcatccggggctctcacccacatccgggaccctcatgcctgggcggaggagggggggccctcattcgggaccctgcactccgtcgccggaagtgccaccgagaagcgccggcctcggggctgtctacagcggcccgggagaggctgtggtggccccgagcgcgagtgtgtaggtgacaggacagcggccaggcccgcccctcccctcggtgagtacccggaagccgttttggggtcgcagcggggtggcagcttgttttgccttcacgggagtagaaggaggcggcgtccggccgcggccgacggtagttcgcttccccgagagtgcgcggaggcccgggtgcgaggagggcctgtttctcttcagccctggttcattcacctcgcggaccgagggccccgccgtcaggagccggcgaccgtgccctggtgcgagctggtctgtatgtcctcactggtccttttgggactttgccttggcctaaaagggaagtgggaggagggcagcgccgggcaaggccttctgaggaccgagctgggagccgggcaggggcccagggcgagggtggtgggagggggacggcaccctcatgcgtccttgggcctgaaggacgccgctcaaacctgttcgaaccgcagctcttacctgcgttgctctcaggattccgggaaaaggccggtctagctggtctgagttagcgaagggcctgaccccaaaagtggagttttattcgccaagcccgtgtagtaaatcggagtgggctgacg

SEQ ID NO: 5708 - DNA, 150 bp, Homo sapiens
  chr7:99595185-99595335
  hyper
tttgactcattttgaggcccccgtcgtagggtacacgccctgggaatcgggggtcttccagtatagggaaccaccgagatgcgggccctccgaagtcctagagagggcgcctcggccgccggcacccgccacacttccggcctttgtggg

SEQ ID NO: 5709 - DNA, 63 bp, Homo sapiens
  chr7:99595462-99595525
  hyper
cgccagtctccggctgttgcgccctgggcgccgcctctctccggcccccctttgtttcctgag

SEQ ID NO: 5710 - DNA, 49 bp, Homo sapiens
  chr7:99679864-99679913
  hyper
agttgacatgaggaaaaaacccgtgtacaggtgatgagagcagagaaga

SEQ ID NO: 5711 - DNA, 200 bp, Homo sapiens
  chr7:99680212-99680412
  hyper
aaaaaaaggaagctacaggtggaagcgaggcggggatagtcaaggaagtgaccgtgtcctggagacgcggcaaccgtggtgaccgcagtcaacacagtaagccccagcattcgcattgtaattgagctcattcaagctgagcgctctccagtagggactttcccctgtagggagcatgcgcattttgatttcacctgtcc

SEQ ID NO: 5712 - DNA, 31 bp, Homo sapiens
  chr7:99775637-99775668
  hyper
ttccctgaaccctgctcggccagaagtcact

SEQ ID NO: 5713 - DNA, 31 bp, Homo sapiens
  chr7:99869133-99869164
  hyper
ttccttcatccattcacggatccgtcactgc

SEQ ID NO: 5714 - DNA, 30 bp, Homo sapiens
  chr7:100027486-100027516
  hyper
acttggcggggaggcgcttgggcgcgagac

SEQ ID NO: 5715 - DNA, 31 bp, Homo sapiens
  chr7:100064074-100064105
  hyper
agccctaaatggcaggcgcgacccctgagtc

SEQ ID NO: 5716 - DNA, 59 bp, Homo sapiens
  chr7:100091121-100091180
  hyper
ccagagggagccagcagaggccgttggggggcaagcaaggacttgcttctgaggggaga

SEQ ID NO: 5717 - DNA, 404 bp, Homo sapiens
  chr7:100167115-100167519
  hyper
acaggaaggacacctacaggccgagcggggcgtggcaggagccagcagggtgcatggaggccccgttccaaagccctctaatcgccagcgccaccaccgctgccacaagtccgatcactggcctcacaccgaggctttctcggttgccccgacgacgtgtccggaccgcagtcagctgatcggtagagacgcccccacgctctctgcccctataaaggctcagtcttggggtcgaggccgcctctcttggacttccctactcaaactccagttcctgggcgacgtgaggattagtctcgtggggtgggggttccggagcggtcggcggagggagggaggtagtggggagcccaggccaggggcaacagtcaccgggacactcgctgtgcgcagagtccttgccc

SEQ ID NO: 5718 - DNA, 30 bp, Homo sapiens
  chr7:100168128-100168158
  hyper
ctcccccaggtcgccgaaagttcaaacatt

SEQ ID NO: 5719 - DNA, 30 bp, Homo sapiens
  chr7:100183957-100183987
  hyper
tcgccaacggccgacgctccaggccgtccc

SEQ ID NO: 5720 - DNA, 30 bp, Homo sapiens
  chr7:100202664-100202694
  hyper
ccgagggtctccaccgccccccacccccgc

SEQ ID NO: 5721 - DNA, 265 bp, Homo sapiens
  chr7:100224186-100224451
  hyper
atcactttgatcgctcgggtcctccagcctgaccgatctatgagcactgcgtgtccaggactgggaagagagcatccagaggaccgggactgtgtaggcggggagagagaggagcgcgcagacggggccaggtccaggaggtggagccccaggggaggggcgggacactgggggcggggcgaggagggcggggcctcacccgcattatgcgcacgttgtacatgcgtgtcagtcgctcgtctctctcctccgagctgtagatctc

SEQ ID NO: 5722 - DNA, 30 bp, Homo sapiens
  chr7:100303267-100303297
  hyper
cctcagttccccctcggtcctcgggccaca

SEQ ID NO: 5723 - DNA, 408 bp, Homo sapiens
  chr7:100424501-100424909
  hyper
aggggtagtcagaggccggcccctccactccgaggcccagatgttgggggggaggtcccaggagtgacggggtgcgcccccccccgcaaggaaactcaccttccaaagctgcggccaacgaagcccagcagagcagcacccggagctccatggcgccgcctcactcgggtaggatccgaactgagtttggggggccctcgcccccccaggtctgactctccctgggcgggtggacgccgatactccgcgcgggactcctcgtcggggccctcagcgcgggcccatgcgagcgtgcggggcaccgggcggcggcgccaagtgtggccccgcgtctgtgccgcgcgcgcgggcggcgggcccggagcgtgctggcagtggccgcgccgggcgggcgcgcagcaagacgtg

SEQ ID NO: 5724 - DNA, 340 bp, Homo sapiens
  chr7:100425192-100425532
  hyper
gggcagctctcccaacgcgggggctccgcgagtgagccccgggcgcgctgattggagctcacgctactgaataattcatgagggaagcggagaggggcaccgagtggagcaggtcgggaagttgagagaaagtttggagaagggggaggggcggcgggtgaggaaccccgggaccgcccagatgtgcgccgtggcggtgcgcgctgtccaggaccgagcatgtcggggctggggcccagggacccccgggacaggcccgaacccggctggcaccagggagcagagaaaacacacacccagcagcaacacggagggccgcccaggcgtgcacgtaaatgtt

SEQ ID NO: 5725 - DNA, 30 bp, Homo sapiens
  chr7:100609019-100609049
  hyper
tccaagcccatccccgttgccctacagtgg

SEQ ID NO: 5726 - DNA, 30 bp, Homo sapiens
  chr7:100728512-100728542
  hyper
ctactcagagaacccgccctcaggtagttc

SEQ ID NO: 5727 - DNA, 252 bp, Homo sapiens
  chr7:100770177-100770429
  hyper
aatgctcttacacacgtacacacacagagcagcacacacacacacacacacatgcctcagcaagtcccagagagggaggtgtcgagggggacccgctggctgttcagacggactcccagagccagtgagtgggtggggctggaacatgagttcatctatttcctgcccacatctggtataaaaggaggcagtggcccacagaggagcacagctgtgtttggctgcagggccaagagcgctgtcaagaagacc

SEQ ID NO: 5728 - DNA, 403 bp, Homo sapiens
  chr7:100806065-100806468
  hyper
gcccccggtcacccgcgggtgagctctgggagttcgggctcaggacccgggaggggggtctggcaggtcccgacgcagcccggggacaggggcagggccaaggggcagggccggggcgcatgcaaacaccgagggggagcgggcaacacggaggggggcgccggcgcgcgcgcgcggcgggggcgcgcgggggcgggaccgggaagggcagtcacgggcgccggagcagcacgtgctcgatgtaattctccagctcctcctgctcctgcagccggcgctcctccgcctccgcctcctcctgcgcgcgccgcgcctgggcctcccggccgggatagtggcgcgaaggcggcaaggcgtggtggtagtggcggcggcgcaaggccgagggcggctgcagtgtccg

SEQ ID NO: 5729 - DNA, 173 bp, Homo sapiens
  chr7:100806762-100806935
  hyper
gctgtcgatcgtctgcggatccatctcctcgtcgtcctcctcctccccgccctcctctgtcccctcggcctccttccgccggtggcccggcgtctcctcctgggagcgcttgtcctcggcgccggcttccccgtcctcctcctccgcgaacaggagcgcgttctgccgcgccc

SEQ ID NO: 5730 - DNA, 999 bp, Homo sapiens
  chr7:100807161-100808160
  hyper
ttcctgcgccgcggcctgccgcgtggcctccgcctgccgccgcccggcctccacctgcgccagcccttgctggagaaggcgctcgcccgcctcggagccgcccaggagtgcgctctccggccggcgcgccttggggaacggggcggccacgccttggtacgccttggacaggggtgccaatgcctcgcctaggtgtgttttgggggaggacactccttccccgaacttgtgggtttcgggaaggggcccgctgtcgggcatacgcgcctggaattgagagggggccgggggcggcaggggcgcgcgctccgggacacgcgcctggaactctccccaggaagcgcgccatacgcgctctggccccgggctctccagattcactcgggtcagcgtgtgcgtgcgggtttccgtctctgctgccgccgtctcctgctggcgcttggcgctacttggactgaaatctcgcagttcctggagcagggacgctagcgcctcgagctcctcggagggatcgctcgcctcgggcccattctccggagtctgagggcgaggcggagccgcgggctccgggctctccggcgccgggaggctgtgggtctggctgcgcacggtctcggtcagcagagcttcagctgcttcttcctccggcccctgctgggagccgcttggtgccgggggtgaggcgggacggtcgagtgcctgcagcagcaccgcggccagcgcccggggatccacgccctggaaaagctctccctcgtcctgcggctcggaattccgagcgcctcggacctctggggcgctgccatcctttggcccgggcactgcgtccccggctaccggctctttatgctcagagctgagaggaggaggctgcgcctcagggcgaccagggggtgctgcccctaacccgttgatcagcagaaggcagaagagggcggaagccgacaatctgagggctttcatgaccaagaggctgccggagactgaaaaatagaaggg

SEQ ID NO: 5731 - DNA, 31 bp, Homo sapiens
  chr7:100816641-100816672
  hyper
gtgccaccttgacccccgggtgctgtctctt

SEQ ID NO: 5732 - DNA, 93 bp, Homo sapiens
  chr7:100845107-100845200
  hyper
cggggacaccatagcgcgcctggtgctcctcgaagagctgcgtgagtcgccccacgtagcgcgcttgcagcgtgtccacctgggccggactgg

SEQ ID NO: 5733 - DNA, 98 bp, Homo sapiens
  chr7:100845248-100845346
  hyper
cgggaggcgatctgggctgggatccccggttctcctcctcttttcctccttggggataggcgggaacagagttcagggctggcgcggtggccaaaggc

SEQ ID NO: 5734 - DNA, 30 bp, Homo sapiens
  chr7:100860804-100860834
  hyper
ctcgggccggcgggcgggagacagggactc

SEQ ID NO: 5735 - DNA, 30 bp, Homo sapiens
  chr7:100964951-100964981
  hyper
ctcgcaaggccccacgaagaggatcttggc

SEQ ID NO: 5736 - DNA, 30 bp, Homo sapiens
  chr7:101006293-101006323
  hyper
cccgcgggctgctgcgcacgatgaagctgg

SEQ ID NO: 5737 - DNA, 72 bp, Homo sapiens
  chr7:101007055-101007127
  hyper
gggctggggctctgcccggggcgttcggccgctcacgtggctctgccgctcacctgcgcggctgcggctttg

SEQ ID NO: 5738 - DNA, 30 bp, Homo sapiens
  chr7:101386936-101386966
  hyper
ggcacagacggcaacgcagccgccgccgcc

SEQ ID NO: 5739 - DNA, 199 bp, Homo sapiens
  chr7:101447356-101447555
  hyper
atttgttccagggagcgcgagggaggcagtttttaagagactcagtaacaggaaatttggtctattgtttgaaacaagaggtgcaaacaagtgcccgctttgaagtgctgaataacaaactctgccgggagtggaaaggcaagaggctacaagattcttgagttggtgtcaaatgcgcaagacacggggcagaggggaa

SEQ ID NO: 5740 - DNA, 30 bp, Homo sapiens
  chr7:101457432-101457462
  hyper
acaggaatgtccctcggtggcaatgccgct

SEQ ID NO: 5741 - DNA, 80 bp, Homo sapiens
  chr7:101457689-101457769
  hyper
gccctgctgtgcgcggcgtcaccgcatctagggtggaggctcgcaacgtgccccccgacgccagcgcgctcccacccacc

SEQ ID NO: 5742 - DNA, 468 bp, Homo sapiens
  chr7:101458245-101458713
  hyper
tgtaaacttgggaccacgctttccgttttcagtgagtgcacccacactttccaactttctgcgcccaaagttgcaacaaaccaaggtgtctgaaccacaggaagtttcttgggctgttccgctgaagcggcgcggggggacacagaactgggctcccagacttttcctgtcgtggcctaaactggaacggcttgggcgaatgggggctgccgggacccccagcgctaccgccgttggggtgcgttcgggtgcgacgctggcaccgccgctgtccgggtgtggggcatccacgcgcgcggccccctgagagggtcagggctgtttccccctcaactccactcctccaaacatgccacgctgttcctggtcgtgtcggtgtcccggtcctcgctgggcgcagagggatcagagtgttgccgtccaccgtcggggcgcctcccacgcacgctgctgcggggggcctgggcc

SEQ ID NO: 5743 - DNA, 191 bp, Homo sapiens
  chr7:101459182-101459373
  hyper
cctcggtggcggcggcggcggccggctccaggccgggttttggcgccgcccgcctgctgcctcctggcggctcctgaactccagccccctctctatcagccgctcactccgtctcaatatgtctcaagatggcggccaatgtgggatcgatgtttcaatattggaagcgctttgatttacagcagctgcag

SEQ ID NO: 5744 - DNA, 90 bp, Homo sapiens
  chr7:101460880-101460970
  hyper
cccgcggcgccgggacagccccgggactctgccaggtggatgttgtgcgtagccggagccaggttgaaggtgagcggcgtgtgggccaga

SEQ ID NO: 5745 - DNA, 30 bp, Homo sapiens
  chr7:101499999-101500029
  hyper
cgcagaaaccctcccgactttcacgaggag

SEQ ID NO: 5746 - DNA, 112 bp, Homo sapiens
  chr7:101559393-101559505
  hyper
gagagaactcgatgccaccgcaacggtattggcgaaccggcaggatgaaagtgagcagtccagaaagcggcttatcgaacagagccgggagttcaagaagaacactccagag

SEQ ID NO: 5747 - DNA, 49 bp, Homo sapiens
  chr7:101671376-101671425
  hyper
ggatttgcgcaagcaggtagcgccgctgctgaagagtttccaaggagag

SEQ ID NO: 5748 - DNA, 80 bp, Homo sapiens
  chr7:101713617-101713697
  hyper
gattgatgcactgagtaaaagaagcaaggaagctgaagcagctttcttgaatgtctacaaaagattgattgacgtcccag

SEQ ID NO: 5749 - DNA, 139 bp, Homo sapiens
  chr7:101740642-101740781
  hyper
gatcccgtaccagctttggatctcggacagcaactccagctcaaagtgcagcgcctgcacgatattgaaacagagaaccagaaacttagggaaactctggaagaatacaacaaggaatttgctgaagtgaaaaatcaag

SEQ ID NO: 5750 - DNA, 125 bp, Homo sapiens
  chr7:101747614-101747739
  hyper
gaggttacgataaaagcacttaaagagaaaatccgagaatatgaacagacactgaagaaccaagccgaaaccatagctcttgagaaggaacagaagttacagaatgactttgcagaaaaggagag

SEQ ID NO: 5751 - DNA, 78 bp, Homo sapiens
  chr7:101754976-101755054
  hyper
gaaagctgcaggagacacagatgtccaccacctcaaagctggaggaagctgagcataaggttcagagcctacaaacag

SEQ ID NO: 5752 - DNA, 68 bp, Homo sapiens
  chr7:101758485-101758553
  hyper
gccctggaaaaaactcgaacagaattatttgacctgaaaaccaaatacgatgaagaaactactgcaaa

SEQ ID NO: 5753 - DNA, 50 bp, Homo sapiens
  chr7:101801838-101801888
  hyper
gggccgacgagattgaaatgatcatgacggaccttgaaagggcaaaccag

SEQ ID NO: 5754 - DNA, 106 bp, Homo sapiens
  chr7:101813724-101813830
  hyper
gagggcagaggtggctcagagagaggcggagaccttaagggaacagctctcatcggccaatcactccctccagctggcctcacagatccagaaggcaccagacgtg

SEQ ID NO: 5755 - DNA, 190 bp, Homo sapiens
  chr7:101821747-101821937
  hyper
ggagcaggccatagaggtgctgacccgctccagcctagaagttgagttggccgccaaggagcgggagatcgcacagctggtggaggacgtgcagagactccaggccagcctcaccaagctgcgggagaattcggccagccagatctcacagcttgagcagcagctgagcgccaaaaacagcacactcaaa

SEQ ID NO: 5756 - DNA, 60 bp, Homo sapiens
  chr7:101833091-101833151
  hyper
gcaactggaagaaaaactcaaaggccaggctgactatgaagaggtgaagaaagagctgaa

SEQ ID NO: 5757 - DNA, 50 bp, Homo sapiens
  chr7:101837120-101837170
  hyper
gcattctgaagtccatggagtttgcaccgtccgagggcgctgggacacag

SEQ ID NO: 5758 - DNA, 98 bp, Homo sapiens
  chr7:101838785-101838883
  hyper
ggatgcggccaagcccctggaggtgctgttgctggagaagaaccgctcgctgcagtccgagaacgccgcgctgcgcatctccaacagcgacctgagcg

SEQ ID NO: 5759 - DNA, 673 bp, Homo sapiens
  chr7:101839912-101840585
  hyper
gggtcagccaggaggaaagggaaagaccagcctgaaagtcggcgcccgggatctttgccggccccccctccttctcagttgccccgcaacccgggggagcaggcttccaatactaatggtacacaccagttctcaccagcggggttaagtcaagactttttcagctcatccctggcaagccccagcctacccctggcttctacaggaaaatttgcactaaactctcttctccagcggcagctaatgcagtccttctactccaaggctatgcaggaagccggaagcacaagcatgattttttcaacaggtccatacagcacaaactccatatcttcccaaagtccattacaacaaagcccagatgtcaatggcatggccccatcccccagccagtcagaaagtgctgggagcgtctccgagggcgaggagatggacactgcagaaatcgcccggcaggtcaaagagcagctgattaagcacaatatcggacaacgtattttcggacattatgtgttgggactgtctcaagggtccgtgagcgagattctggcccggcccaagccatggaataaactgactgttcgtggcaaggagccatttcacaagatgaaacagttcctctccgatgagcagaacatcctggccctccgtagcatccaaggcagacaaagag

SEQ ID NO: 5760 - DNA, 67 bp, Homo sapiens
  chr7:101842080-101842147
  hyper
gagaatccaggccagagcctgaacagactatttcaggaagtaccgaaacgaagaaatgggtctgaag

SEQ ID NO: 5761 - DNA, 103 bp, Homo sapiens
  chr7:101843349-101843452
  hyper
ggtaacatcaccacccggatccgagcctcggagactggctctgatgaagccatcaagtccatcctagagcaagccaagagggagctccaagtgcagaaaactg

SEQ ID NO: 5762 - DNA, 846 bp, Homo sapiens
  chr7:101844638-101845484
  hyper
gcagagccggcccagccttcctccgcatccggcagcgggaactctgatgacgccatccgctccatcctgcagcaagcccgccgggagatggaggcccagcaggctgccctcgaccctgccttaaagcaggcaccactgtcccagagtgacatcaccatcctcacccccaagcttctgtccacctcgcccatgcccaccgtgtccagctacccacctctcgccatctccctgaagaagccctccgcagctcctgaggccggtgcctctgctctgccgaaccccccggccctcaaaaaggaggcccaggacgcccccgggctggacccccagggagcagccgattgtgcacaaggggtcctgagacaggtgaaaaatgaggtgggccgcagcggtgcctggaaggaccactggtggagcgcggtgcagccggagagaagaaatgccgcctcctccgaggaggccaaggccgaagaaacgggcggcgggaaagagaagggcagcggtggcagcggaggtggcagccagcctcgggccgagcgcagtcagctccagggaccctcgtcgtcagagtactggaaggagtggcccagcgctgagtccccatactcccagagctcagagctgagtctgaccggggccagccgcagcgagacaccacagaacagccccctgccatcctccccgatcgtgcccatgtccaagcccaccaagccctcggtccccccgctgacccccgagcagtacgaggtctacatgtaccaggaggtggacaccatcgagctcacccggcaggttaaggaaaagctggccaagaacggcatctgccagagaatcttcggggagaag

SEQ ID NO: 5763 - DNA, 167 bp, Homo sapiens
  chr7:101847669-101847836
  hyper
ggtgctgggcctgtcccagggcagcgtcagcgacatgctgtcccgaccgaagccatggagcaagctgacgcagaaaggccgagaacccttcatccggatgcagctctggctgaacggcgagctaggccagggtgttctacccgtccagggccagcagcaagggccag

SEQ ID NO: 5764 - DNA, 58 bp, Homo sapiens
  chr7:101848392-101848450
  hyper
gtcctccactccgtgacatcgctccaggacccgctgcagcagggctgtgtgagctcag

SEQ ID NO: 5765 - DNA, 304 bp, Homo sapiens
  chr7:101870645-101870949
  hyper
gaaagcactccaaagacctccgccagctgcagccctgcccctgagtccccgatgagttccagtgagtcggtgaagagcctgaccgagctggtccagcagccctgtccccccatcgaggcgagcaaggacagcaagccaccagagcccagtgacccgccagcatccgactcccagcccacaaccccgctgcctctctccggacactcggccctcagcatccaagaattagtagccatgtccccggagctggacacctacggcataaccaagcgggtgaaggaggtgctgacggacaacaacctcg

SEQ ID NO: 5766 - DNA, 190 bp, Homo sapiens
  chr7:101877330-101877520
  hyper
ggccagcgcttatttggggagaccatcttagggctcacccaaggctctgtctctgacctccttgcccgccccaaaccctggcataagctcagtctgaaaggacgagagcccttcgtccggatgcagctgtggctgaacgaccccaacaatgtggagaagctgatggacatgaaacggatggagaagaaag

SEQ ID NO: 5767 - DNA, 266 bp, Homo sapiens
  chr7:101882598-101882864
  hyper
gcctacatgaagcggcggcacagctcagtcagtgacagccagccctgcgaaccgccctctgtcggcaccgagtacagccagggcgccagcccccagccccagcaccagctgaagaaaccccgggtggtgctggctccggaggagaaggaggcgctgaaacgagcgtatcagcaaaagccatacccgtcaccaaaaaccatcgaagacctcgccacccagctcaacctgaaaaccagcaccgtcatcaactggttccacaactacag

SEQ ID NO: 5768 - DNA, 9823 bp, Homo sapiens
  chr7:101891690-101901513
  hyper
ggtctcggatccgcagagaactgttcattgaggaaattcaggccgggagtcagggccaggcgggcgccagcgactcaccctcggcccgcagcggccgggcggcgcccagctcggagggcgacagctgcgacggcgtggaggccactgagggcccaggcagcgccgacaccgaggagcccaagtctcagggagaggccgagcgggaggaggtgccgcggccggcggagcagacggagccgccgccctcggggaccccgggcccggacgacgcccgcgacgacgaccacgagggaggccccgtggaaggcccggggcccctgcccagccccgcctccgcgaccgccaccgccgcgcccgcggcccccgaggacgccgctacctcagccgccgccgcgccgggggagggccccgcggccccgagctccgcgccgccgcccagcaacagcagcagcagcagcgccccccgcaggcccagctcgctgcagagccttttcggcctccccgaggccgcgggcgcccgggactcgcgcgacaaccccctgcgcaagaagaaggccgcgaacttgaacagcatcatccaccgcctggagaaggccgccagccgggaggaacctatcgaatgggagttctgaggggccgcggccctggggcgggcagccaggctgggccgcaagggcctggacggggtcggacggggcaggcgctgcggacaccgtggcctgggcttggcccgcggcctgcaccgaccccgggccggacctgagcccgcagcccagaccccctccacggtccgcggcctgcaccgacccgaggcccagatccaaggccgcggcccagacccactctgcggcccgggccgaccctgcggcctccaccaaccccgcggcccagacccagcccgcggcctggacccctggaccgctttgcgcacttaccgccctgcgggccacagggcaaaatcgccataggccaaggtgcatatagaaaacaaaggagcattaagcccaatctatgtcgtgttttcaaggaagaaaacggaaatgtgtggtcgagcttttttgtaccctgaagtgttttttttattgccctaagtgatttccacaggttctggaataactcttacagctttgccttgtgtcctcctgttccgtgtgggctttaaaagaaaaaaaatcaaacccacatattaaaagggggctttttatctgccatctaatggcttcagagcgataatacactattatcttcttaaaccaggaaaaaataaaagggggggtgggatttttcagaaaaattaaaaaagaaagtttttgtagctgttcagttgccactaagagattgcacagtcaaaacgactctaaacacactagtttggattcctaaatattttcaagaaaagaatcttctcgtttgaaactttgaattaaaataaaacacatttactccacatattttttaacaaaaagaaaacgtcacatcaggaaactctgattttgtggtagctgacatagtgttttcttgtacgtgaatagaatcctgacatgtagtgcacattgatgtatagctttaactgaccctgggttttgcagaccagggtttgtttaatacactccattctaggccaaatcaggacaaaaaaaagaaaaaaaaagaaaaaaaaaaaagaaaagatccgaatctaggtattttataatctgctttttaacctctaaccgcagagcacgctgatcagacctcatatcttggaggtttaggagacaagttagaactgtagcatgtacctgttaattttgtttaatttatggtgtctcaatctgtctgtgcgtctgcacgtgtgcaagcattgaaagaaaggagagagtagtccgggcgagcacagcaggcagttccagggccagacgggcccatccccaagtagatagcagtctacggatctctctctggcacagaaggcacctcacctcacaccactctcctggatacctgatgaactgagccctcccaggggaagacactccccaggcctgggcagggcttacacgcgcactctctctcttctttccctttttcttcccaccgcaagcactgatgaccctgttgaactcgtgggaaacttcctttctctgcaggagagagaacgtggcattctgggctccccactcccatccctgtagaaatggcccaaactcacaccaaaacgtggatgctcttcaacttccaaacctaccatttgcccttctttcatttcgcctcttagttctttttatgcacagttttagggcagtctaagtacaaactgaaagtctaacttgtctctgattcctcccttgtctatgtgtatatgcgtgagaatagaggcgggtgagagtgtgcgtgcgtgtgcgtgtgtgcaattttatacgtctgtgtattttcttaagtacctgtgcacacgtagagtgcattactgccacctttttcaataagctgttttatcagttacggcttctacaagtttgctaatttagacttctttattgccatatctttaaactaacaatagatgatttcggtatatatatatatttttttttgcttatttataggtgctgtattttattatctgattgttaggaagggatgaaaggggcaaatattctttagagggatagactgccggcagtattgggtataatttacaagatgtagttgtcatactgtatattactgattgaaaactttttgaccgtattgtgtatcattgaaacctttgtcttaggtcaacatctttggatgacattttaatggtgcattcattatttcttaagtttaattaatattacttttttttttatttggggggtgggagggagttataattttaaaggtatgctctggctgttccacctccgtgtgcttgttaattaacttgtaggactttgactgtaagatgtgaaaccacgtttcttgcatgatgttttagagattatttcatttacagtcttttaacctgcagctgcagcacttagttcacgttttcacaaatttcaagagtcactacactaaagacaatgccttttcatgaataagaagttttcagaaggctctagggggctgggaggcaggctgttcgtttgtcttttgttgggggtatcatttctgaacttgaaatccagttcagggagaagagaattcaaaattagaggagcttaaggggacacgggtcaacatctagctcgattcaggtgcattgagaagagtgagttcacatcggtgacccttaggacagtgagtggcagagccctgacgactgtggtgtcctctccacaaaaccctcaagggacttttgtcatcatgtgtgatgaatctttaaatatcgtctaattttcataagaatgaaaagaagttaacaggaaatagtaggctagggtttagttttaaaggcatgactgttatttacaaaggtgttaaatctgaggaaattgacaaatacagatttgtccattctagtggccaaacagtaacagtctaaaatgcagtcattttgaccctcccaagcaatttagtcatatgtgttgttttctcttttctgtttttacttcttagatttttaactaggttactgttggttcccattctgtcttttttgccagacttacatctggtgccagatacaatcagttggttaaattttgcttgcagttctgtgtattttttttcctctattatttatttttttaaaaaaaatagagatcctaaccttagatctttgatgtgaagctagcactgtctgtaatacttctaagagctgccactaaaataatacagcaatccgtggccaggggagcaccccctcctggttgggcccctcagttggagtctaagggttaatctctcatcttgctaagcagtattcaagtgccttgaacagtgtcccctcggcatggctccccttcagcaggctggcattccaagcagtggcccccgcaggcagccgacccccttcctcttcacgctctatgagtttaaaaagctgatttgtacctctcccctgggggaaacggttccatataaaacactaacacttaattacaagctccattatgccattttaaatggcttctttttgttaattggaggcattgttcataacttaaggcttttgccattaacttagctggctaagcagaggctcggggtaaaatcagtgtttgcatttagcctcttgacccggagttccggcccaagctcccttgtgatagccgagatggcaggtgtgtgagttctgtcctagacctgtgcccaactcacttccaccccagaggagtcttctgtcctcctccccaacccccgagctccctggtaacctcctcttgaacttctgtatcagtgaagacatctgtggtttctgctcaccagacctctctttagaaagggttatcagagccatggagcttagctcaattggattcttctagacgatcttaggaggcatcttggcatgaggcagcttctaagcgtctcctgggacaggattggggtgacagcccagggatgcatgcatgggagaactctctgagaaatgccaggatcgtggctcacagggacccaccatcaaaacctgctactttgtgcaagtaattgaggcaaaagataccagtcgacagcctccctggggtagatcccttgtacctccaaagtacaaatacctccctgctcagtttccttcctgtcgccatctttgttttcttcccattgaaaaaccatcctgtctgatgtggacgttcaggtctgctggttggcggtccgggcccagagtgcagcagagctctgggttaaatattcctttctggccaccgcccaagcccaggtggccagctctcataccccatctccctccttggccagggccagcatcaggcgtgcagctcatgaccagtttacacaggctgcaaagagatcgctgtgggcctcggctgactactttaagattatgccacagccaggccctaaaaagagaggggaacaggagtccccaggtgagctctctgacgggcaggtgccttcccgactaaggttggactggatgactttgttcctcctgcatgcatgtcctttgatgcaagggtgatcaatgaactctgttgacattctatgcaatgtttttcattcctctgattttagcaaagcaaatcttactgaaaaatagcagagccaggggaacagacgcatgtccttctgggagtcacacaaaagcagagagattttgaactgaggggcgacagcctttgccttaaatgcagtatgacaggcgcttcttggcagaccagtaaaaacaaaagcccatagaccttactcatcccaaggccgacaagccagctgtacagggcgagatgtagcaacacggggcatgagcggtgggcgtgctgggctatttgctgtggtactttaggctggaggtttggctcctgtgctgccggtggggggccctgtccctccccagatgtcctccctcttcttcacactcctcattgtcccttctacctcactaacctgtcttctccatctgatgtcacccagaaccacaccccacagaactgtgaggcacgtgggctggagagagcagaaaagctgccagcgcagcagacacgaacatccctctgcctggtgggccggctttgtgtgtctctccttttgtgagcgcaacacggacaaacagctgtgctctgcaaggcacacggatgtttcccttccacctgttcccaaagctccagcagctgtttcttttgcaggcagggcgtggtctcggggctccgagggtcttgtctttggtccgccttcctttctgtccagtcctgctcagctgttaagatccatcatggccattatccttgtcccggactgccccaaagttcccagctggctttggggaacactgtagctcttgggtgtctcttgtctctggcatggttttagcgtcactgcgaacactcctttgcaaacatcaaacatctcaaagacggaaaaggatagatggcttcctccagcctacacgccccgtccacagtggcatcaccctcttatcccaaaagaatatgccagttcccatccagcaccgaagaaaatcagctcctggggctggtggttggaggtgggtctgtccactgtgggggccaaagtgttcccctgctggagacagtttgcaagtaagaacctaaggatggggacagcatcctgtgcttgggcattgaccagccaaagctcacatttagaaagccctcagtgcttctgtggtttcacctgggcatcgacgacattagggaagcctttgtgaccacaagggcagggcttgtgccctgagtggcgaggtggtgacctgaggccagtgtgatgtggttggatctcagcgtgtactgaatgccagtctggccggcacactcgaacgctaagagaatggtccaatttgatgatcttatttctatttcgatcaggttttgactttttgtagatgaaaactaccagggaaaaggggaagcaggtacccaataaagtttagaaagatccagtctgtgaaacccttagagatgggctgaaagttaagtccaccaacccttgggcttaatcaggacggaagaggagggggtgtggggggcagagcgtaaaacaagccccagccctactcccggccccccagcccagtcttcccaatcccagaggccccggcggcctgtgctcctcaccaccctggtcaggggaatagaaggaaatgcaatttccgcctgtctgcccgacttccaaaaactgcctcctcctgcccaggcctctcccaccaccaccttccctccaaagataaccgtgtccatgccatccgtggcatcatctcgagttttcatttttggatgaagtgacatttagctttaacaagacatttccaaagcgcctagtctcctccaaaatgctaactttaaaagttgggcattgtaggcgaaaaatcccaaaaaaaaaaaaagacaaaaaaaaaaggctggcgagagaaagacatttggctatgcataaatgtgcacttcccccatgcccccgttcttaaactcttaagatgcctttgagttgcttttcatgaatccttttagtttacccgataatgttaagaaagcattagtctacgttactgtaatttctgtagtgtttacgctttaatttctaccacaaaatatgctatatgctatgtatcaagctttctgtaatcagaaagaaaaggtgccttatatcccaatgtcacggctacatccctatggaaattaatcagaagcacagtgtgtacggaagcattgggacttctgctggtgaaacaagagaccattcagcaagacacattgaagtggcacggagctgcttttgttttataattcttttttccccccttttccttcttcttttttattattttattattttttttgtactttgctttaaacggaaagcacttaaatagatgactatgtgtaaaagctctgtgcaattgaaatcatttttcttcattttaaaaaaataacgtattgcacaccaaatgaactcaaagtaagctttagaccaggacgattcaggttatgaatgagtttgttcactgtagttccgtttgttcatgaaccgaagggaaaacaggcctccccgactccctccagtctcccagcctgcctcttggtgaccactgtgctgggcgtgcagggcccgcgggctctggccggagccgctggcctgacgaggcaggatagggagtatccgtgattcagaagctgagacccttccccagtgtctgaggccacagccatcccttccagcacttaatcttgtcttgttgaaatggactgactgctactgacctgccggcgtgcgtgagggtgattataaaaggatgtttccttgagaaaaaaaaaattatttctatcctcttctatttattattaggttaatcatttaagtacttatcaggagtgtattgttattttgtgttttgttgtcataaatgctttttgctgtcactctagtggttactatcctctgccttcctctcctcccctactcccccagagaaccaaggcgtctgggggattgactggggggcagagggggtttccccagcaaaatcaaacacctgtctccagagtagccactcaaaaactggtggtctctatgtgtctaactttttaaatgagagtgtttatgaacaaaaaaatttaccaacgtgtgagggagttgctgagttgaagaatgctcgcttgaggagcttcagaggaatcttagcaaagccaagttcagttccccaaagcctcctagagcctctggtaagacttctgggttcatgaagtttcggcgagccgtggtcagagagggcgcggtggcctggccaagactttacctccaagcgagagagtgatttcttgcaaggcccgcatgggttgatacgttttggttggttttttgttgttgtttttcttgcgtacaaagttggtcaaaaccatctttcaaagcaacagtgttttgtagtaccaggctgtggcttgagggctcacctaggagatcataggcagagggcccctttcccctataggtggttcaacgtggaggaaggttgggtgtggagattgcttgctgtggccccaagctcagccagcaggacacccagttgttgccaatcaggtgtgaaggtgaggcgccctgccttgatcccatgggcccagcagaaggaaacttaccccaggccaaggcaagggccctgctcaccccaaggtaggctgggaagagcatctctttccatatcatcacctccccttctccaagattgccgggggccctgattttgttctctctttgaaagaaaccctccaccgaaacaatggtccccatctccccagaagcctttttttttttcatttttctctaattagtctatgcatttctctctctcaaaccatcttctgcctcttcccttgagaaaacgggcatctcacgtacccccatctgagacctcttggaaaaaaaaaatcccgtgtattctggagatgtgagaattcacccaaaattcttaaaacattggagaatagcttgttataaaataaaagtgggggtaaaaagaaggtggttttccccacatccctttgcattgaataagagacctagttctttgcgtttgtgcaataactctttgctgcttgccttgagagcgggtagcaccacgctcctgtccagactactaacagcacaagacgcactcacagggtggcggaatcttccggaaaactctctataagctcagctccccccaccccacccccactctagcgttttgtcacgtcttacattttagcagtattttatattttctgtaacgcaccaagtcttagatctttctagagcttgtttgttcatcctcacaatcacagatttttttctccaatcctcacagagacccaattgaccaaaaaagaaaaaaggaaaaaaaaaaagtcgtcttttttttttttttttgtacaaatcgctttgagatgcctctggtgtgttgctgtgtgacatctctctggtaacattttatttcttgctatttgtttttctacattaagagtcaaagttgacctggctggcgtgggggtgggggaggcacccgtcggccccttggtgttgtccctctgtctttggttagccatacgatgtttgttctcagcactgtacaacggtccctatataatacggagaagcaatatcactgtatgagactcacaccatgtattattattcactagcaccctaggtgtgataattgaagtaaatatcttttatacaaacacaa

SEQ ID NO: 5769 - DNA, 129 bp, Homo sapiens
  chr7:101916635-101916764
  hyper
ggacgctgtgcagagctgcaagtccgtatcactgaggctgtggccacagccactgagcagagagagctgatcgcccgcctggagcaggacctgagcatcattcagtccatccagcggcccgatgccgag

SEQ ID NO: 5770 - DNA, 68 bp, Homo sapiens
  chr7:101917513-101917581
  hyper
gggtgccgctgagcaccgcctggagaagatcccagagcccatcaaagaggccactgccctattctacg

SEQ ID NO: 5771 - DNA, 114 bp, Homo sapiens
  chr7:101918516-101918630
  hyper
ggacctgcagcaccagccagcggtgccctcccagagggccaggtggattcactgctttccatcatctccagccagagggagcgcttccgtgcccggaaccaggagcttgaggcc

SEQ ID NO: 5772 - DNA, 118 bp, Homo sapiens
  chr7:101921218-101921336
  hyper
ggagaaccgcctggcccagcacaccctccaggccctgcagagtgagctggacagcctgcgcgccgacaacatcaagctctttgagaagatcaagttcctgcagagctaccctggccgg

SEQ ID NO: 5773 - DNA, 85 bp, Homo sapiens
  chr7:101923327-101923412
  hyper
gggcagcggcagtgatgacacggagctgcggtactcgtcccagtacgaggagcgcctggaccccttctcctccttcagcaagcgg

SEQ ID NO: 5774 - DNA, 58 bp, Homo sapiens
  chr7:101924094-101924152
  hyper
ggagcggcagaggaagtacctgagcttgagtccctgggacaaggccaccctcagcatg

SEQ ID NO: 5775 - DNA, 82 bp, Homo sapiens
  chr7:101925130-101925212
  hyper
ggggcgtctggttctctccaacaagatggcgcgcaccatcggcttcttctacacactgttcctgcactgcctggtcttcctg

SEQ ID NO: 5776 - DNA, 66 bp, Homo sapiens
  chr7:101926002-101926068
  hyper
ggtgctctacaagctggcatggagcgagagcatggagagggactgtgccaccttctgcgccaagaa

SEQ ID NO: 5777 - DNA, 939 bp, Homo sapiens
  chr7:101926311-101927250
  hyper
ggttcgctgaccacctgcacaagttccacgagaatgacaacggggctgcggctggtgacttgtggcagtgataccccggggcctcccccgtgacagtgacggctgcgcctccaccccgactgctcagtgcatctaatcacttagactcccctgaagaatcccccatggaaactgcccttatccgctgtccagcagctgccagaggccccaggtcacctcgggtccccttgaaagaatgtctcggtcacatcaggcccgctaggtccagagagcgagcccccaatgcccggccaggctaagccgcagagaccctctcagcccccacctcaggttagggctctgcccgcagcctgacctctagccctggtggcagaggtccctcagctgcgaggctaattgggtgaccaccgattccagctgcggttaatccagcttgggcctgtctgcactgcgatcctcttgggctctcctaggatccccccatgccccgtaagaggtggaagacgcttccttccaggacagcaggctttgagtccagcacccccagcctgcctttgccaccagccccaccctgcagagtatatgaggcttgacagagtctgccccctcccccactgcaccccaagagagagagccccagccagcggaacagtttctattaccccctccctgcccccagacccatgtgatttctgctttcttctttagcaagatattctggtttctagataaggaagagtctctaatgagcccccgagccccagtctcttcagactcatggattggtctgaggggtctgaacgtctcctagccaatcagaactggctgtggaccaccctagcacggccacctctcagggccactggcaggccttcctgagttagatttgtagttgcatatttagctttgcacatttgaaataaaccacggttgcagcca

SEQ ID NO: 5778 - DNA, 30 bp, Homo sapiens
  chr7:102389377-102389407
  hyper
agaactacctatcccgtcggccttagcgaa

SEQ ID NO: 5779 - DNA, 30 bp, Homo sapiens
  chr7:102921427-102921457
  hyper
gatcgctgaggtatcggacagtcagtgccc

SEQ ID NO: 5780 - DNA, 30 bp, Homo sapiens
  chr7:103086352-103086382
  hyper
ggaccagcagagtgcgggcaggtcagccct

SEQ ID NO: 5781 - DNA, 93 bp, Homo sapiens
  chr7:103629540-103629633
  hyper
ccggcggcggcgagcgcggaggtgctgcggtacctaccatggtattcttgtcccggaacgtagtaggtggggttgcccgcaatatgcagggaa

SEQ ID NO: 5782 - DNA, 704 bp, Homo sapiens
  chr7:103630363-103631067
  hyper
cgctgagcccgcgactcttctgcgagggacgtcaaagccccgcagagggcacctcccgtccagctgtctgaaggggaaggccagcccctttggccgtcagtgtgccctgtttttcctgggaggatgcgtgagggaaggagaggggcggcagggacggccgctggcgccggtttctttgtctgagccggctgcgtcccgcgcccctcggggctcgcagtctgccagtccgggcggcccgcactcgttctgggaatccgcccgaggccgcgaaccgctaggggccctcgcgctcccttcccacccaggccccctgtccctcccgccgcggccgcccggcccctcgcggcagcgacagagcctcatctgtagaggattttaaaatgagattaagcgaaagtggaattggcagactcgagtggtgcctggaaatggtgatttgtgctgctcggttgtggggaattgtaaggcaggaagggctggcggagctaagatccgacaggctctcttcgccggactgttctgttattcattgcttctgggctcttcaggcagagatgggtgttgtaattttttaaatcagtgtttatttcctttaaatgtcggttatgaccaatggccctgaaatcgggggagggaaaaacgttcaggggagatgctggcagcggtgattgaagcgggtggtaatgagcggctgcacatgaact

SEQ ID NO: 5783 - DNA, 462 bp, Homo sapiens
  chr7:103969059-103969521
  hyper
ccctccttccgggagcgaggatgcagactctgaaactggtgctgctgggctgaggcggaggcaggggagttgcagcgcgcgaggctccgtgagtgtgtctcctgcgcgctgagaggcggggggaggcggaggaccaggaggaggaggaggaggaggaggagggggagaatgcccggagccgccgccgctgccgccgccgccgccgccgcgatgctcccggctcaggaggctgccaagctgtaccacaccaactatgtgcggaactcgcgggccatcggcgtgctgtgggccatcttcaccatctgctttgccatcgtcaacgtggtgtgcttcatccagccctactggataggcgacggcgtggacaccccgcaagccggctatttcgggctcttccactactgcatcggcaacggcttctcccgggagctgacctgcaggggcagcttcacggacttctcc

SEQ ID NO: 5784 - DNA, 116 bp, Homo sapiens
  chr7:103969562-103969678
  hyper
cggcctctccatgatgctcatcattgcctgcatcatttgctttaccctcttcttcttctgcaacacggccactgtgtacaagatatgtgcctggatgcagctcacctccggtgagt

SEQ ID NO: 5785 - DNA, 391 bp, Homo sapiens
  chr7:103969693-103970084
  hyper
cggaggcggaggaccccggggcgcccgagccggggaggggccagagtgggagggacgggggctgtgcgcgccgctgcgagccaagccgcctaatccgctcaggcgtcgaggtgtggggggcgggagcccagcgaggccggaacccccggggttccccagccccggcgctggcgcctcgtcccggggctttcgtgagcctcccaagtgtgggggacgcccactcagagggacgccccggaggcagggcggttgtggggccgagtccgctcagaactaaggatggtgggtggagaagtggccgcttagagagatggggccggggttccgtgctgagggactaaggagggactgacagggcgaagtgaaaagcggatttggagaggtcatagtg

SEQ ID NO: 5786 - DNA, 158 bp, Homo sapiens
  chr7:105162871-105163029
  hyper
caccagcggcagagagcgatttcaccaagcatctaagagttctttagatctttaggaagtctaaggcagcgattgcctcctttggtgttatattctaagtgtttccttcacatagttgtggccctttcacgttgcaccgaccacgcagttgacaataa

SEQ ID NO: 5787 - DNA, 138 bp, Homo sapiens
  chr7:105331661-105331799
  hyper
cccaatcactgcatccaccctcgaggagcgccccagaggaaatggcatcattactttcattttactccgtttgtgaacgactaaaggaaaacaacacgtcctaggactctcgggaacgttattaagtgacccctaaga

SEQ ID NO: 5788 - DNA, 190 bp, Homo sapiens
  chr7:105516544-105516734
  hyper
aaagtagccttttaaacggacaacaccgtggggctgcgagcccaccccgcgggctgccacggggagccgggcacagacagacagacagccctggcagccgggcctctccctgtgcattgatgatctgtctctgtgtgtatttatttagagagagagggagaagcatggaggacaccgggggccactctct

SEQ ID NO: 5789 - DNA, 30 bp, Homo sapiens
  chr7:105753119-105753149
  hyper
cacgcccgctcctgcgcagcttgggggcgc

SEQ ID NO: 5790 - DNA, 345 bp, Homo sapiens
  chr7:106508305-106508650
  hyper
tcagaagaaggggcagtggtacgagatctacgacaagtaccaggtggtgcagactctggactgcctgcgctactggaaggccacgcaccggagcccgggccagatccacctggtgcagcggcacccgccctccgaggagtcccaagccttccagcggcagctcacggcgctgattggctatgacgtcactgacgtcagcaacgtgcacgacgatgagctggagttcacgcgccgtggcttggtgaccccgcgcatggcggaggtggccagccgcgaccccaagctctacgccatgcacccgtgggtgacgtccaagcccctcccggagtacctgtggaagaagat

SEQ ID NO: 5791 - DNA, 827 bp, Homo sapiens
  chr7:106684837-106685664
  hyper
gcctgggaagcggggcgagtggccagcccgctcctggacgcgcggacaggtggacacgaaggcggcctcgctgggcctccctccgcctctcccggcccgggcgcgcagccctgcggtggtctgacaggcgggtgcgcggcgccagccagcggaggttgccatggtttccgggggtcacgtgggcgcgctctcctgcgccccctcccgcgcaccgcggcggggcgggggcggggcgcccgggcgggggagaggcgcggccgcggctggagcgggaggagcaggagatgctgccagccctcccggggccgcgctcgctcagccgccgccaccacacggagcagacgcgcgccgggagccgcgggccgggccagccgggccgccggggcccagtgcgccgcgctcgcagccggtagcgcgccagcgccgtaggcgctcgctcggcagccgcggggccctaggccgtgccggggagggggcgagggcggcgcccaggcgcctgccgccccggaggcaggatgagcatcgagatcccggcgggactgacggagctgctgcagggcttcacggtggaggtgctgaggcaccagcccgcggacctgctggagttcgcgctgcagcacttcacccgcctgcagcaggagaacgagcgcaaaggcaccgcgcgcttcggccatgagggcaggacctggggggacctgggcgccgctgccgggggcggcacccccagcaagggggtcaacttcgccgaggagcccatgcagtccgactccgaggacggggaggaggaggaggcggcgcccgcggacgcaggggcgttcaatggtgag

SEQ ID NO: 5792 - DNA, 30 bp, Homo sapiens
  chr7:106686026-106686056
  hyper
actggcccgcttggcgtcttctttcagccc

SEQ ID NO: 5793 - DNA, 30 bp, Homo sapiens
  chr7:106808941-106808971
  hyper
tgttagcagaggcccggaggaaaagaagag

SEQ ID NO: 5794 - DNA, 1516 bp, Homo sapiens
  chr7:107301015-107302531
  hyper
ccttgagattagtaacgggatgagtgaggatccgggtggcccctgcgtggcagccagtaagagtctcagccttcccggttcgggaaaggggaagaatgcaggaggggtaggatttctttcctgataggatcggttgggaaagaccgcagcctgtgtgtgtctttcccttcgaccaaggtgtctgttgctccgtaaataaaacgtcccactgccttctgagagcgctataaaggcagcggaagggtagtccgcggggcattccgggcggggcgcgagcagagacaggtgagttcgccctgaagatgcccacaccgcccggcccgggctccactcccggggaggcctcgagggttgcggatgggactcttaagtggtcacggatcaggtgggcagggggcagtacagctttctttctgagacgccgagagcgaacaggctgctcggaaaacaggacgaggggagagacttgctcaataagctgaaagttctgcccccgagagggctgcgacagctgctggaatgtgcctgcagcgtccgcctcttggggacccgcggagcgcgccctgacggttccacgcctggcccgggggtctgcacctctcctccagtgcgcacctggagctgcgtcccgggtcaggtgcggggagggagggaatctcagtgtccccttccagccttgcaagcgcctttggcccctgccccagcccctcggtttgggggagatttcagaacgcggacagcgccctggctgcgggccataggggactgggtggaactcgggaagcccccagagcaggggcttactcgcttcaagtttggggaaccccgggcagcgggtgcaggccacgagacccgaaggttctcaggtgcccccctgcaggctggccgtgcgcgccgtggggcgcttgtcgcgagcgccgagggctgcaggacgcggaccagactcgcggtgcaggggggcctggctgcagctaacaggtgatcccgttctttctgttcctcgctcttcccctccgatcgtcctcgcttaccgcgtgtcctccctcctcgctgtcctctggctcgcaggtcatggcagcgccaggcggcaggtcggagccgccgcagctccccgagtacagctgcagctacatggtgtcgcggccggtctacagcgagctcgctttccagcaacagcacgagcggcgcctgcaggagcgcaagacgctgcgggagagcctggccaagtgctgcaggtagcggccgcgcgggcctgcgtagagagaagcggagcggggcgtccacgccttggggagggaagggcgtccccagcgggcgagagtggggtgcgggcggcggagcccctgggcgccagctgcttctcccagaggcccgactttcggtctccggtcctccacgccgcccttctggtgggagggtggctccatcagtctcgggcccgaaatgaacttacctgggaaactcgcctttggggagagtgggttctaggagccccgtctctctttttcctctctga

SEQ ID NO: 5795 - DNA, 246 bp, Homo sapiens
  chr7:107531674-107531920
  hyper
aaaggaaaatacagcggaaaaatgcagagctggagtcgtgtgtactgctccttggccaaggtgagggccgagtaggtgaggtcgtgttgagccagaggcacggaaggtcccgctcagtgggtccggtacgcggcttaaccgtgttgggctggcggaggcgggcgcctgggccgcaccacccctggccccgcctctgcactggctcagcccggccctgggctccgaggtggccgctcatcctgcagc

SEQ ID NO: 5796 - DNA, 125 bp, Homo sapiens
  chr7:107642429-107642554
  hyper
cccgggaaacccaccgacgctcgcgcccaccctgatcagccccggggagcagctcccccaacaaagggtggatgtgtagaccctccacttcgacgtgtccggagcccggcgcagggaggctgacc

SEQ ID NO: 5797 - DNA, 254 bp, Homo sapiens
  chr7:107643453-107643707
  hyper
tcaaagagagaagaggcgcccttccatttcctgtcgctcccacggaagcggggggtgggctggaaagtggggaaaatcgtgcagccactttgttctcctcacccggcgacgcgagctctcgccctgctccgggagcccccgagcccaaagaagggaattagaaagtttagccttgggaggaacagagggaggcgcctctgctcatgcgcatacggagagccggggctgaaggggcgggcggccgcaactctgcg

SEQ ID NO: 5798 - DNA, 30 bp, Homo sapiens
  chr7:107643925-107643955
  hyper
ggcgggacctaccgcggactcgcgcattta

SEQ ID NO: 5799 - DNA, 349 bp, Homo sapiens
  chr7:108095228-108095577
  hyper
tcctcctgcaaaagcctggggcgaggaagagcccagtctcttagacccgcacttctgagcgttaaccatctgggactcggaaaggaaaagaaagctttcttctcaggacagttctgcgccggtggtagccaagggctggagcccctgatgcgaagaaaagggaaggagagaggcggggtgcgaaagaaacgccaccgctcggcgccctccctcggtgcccgcggcgcaggggccacccgccagcgtacgggggacgaagatgtggccgcgggcgcgggcgggaggggaggcgatccggggaaggaagcggcctgttcgccagccccggggcccggggagccctccagca

SEQ ID NO: 5800 - DNA, 613 bp, Homo sapiens
  chr7:108095780-108096393
  hyper
cgctgcgagatggatgctccagggcgggtaatcactcctggctcaacacagcatcccgggcggagcggatgccagatcccaccgctaagagcctgggctgggaaagcaatctttccaggcagcccccagcccggtgcgccggccccgacaagtcccagccctcggaggcagggcggggcgcagggactcccgggacccgcacctgtaaggccgacaaagcccccgcaagcgccccacccctctgtcctccgtgtctctctcgttccgcctcgattccccgagccctctccaggcagcgactggagaagcgaagtcggcctcgcccccgaactccgtggtcagcacaggtgtacgcacttccgaacaaagcccacgcccagacgtgtccgcaggggcccgaacaggcacacgcccgtgcgctcccggcccggcccccgcgctcctcgccccgccggcactgtggcgtgacgccccgcgcctccgtgtccaagcccgggaagccgccgtgccgggcccgcaggctctccatgcccaactgcccacgagcaagagctctgggcagggcttcccggaaagcgtggggtgcgggcgcggagcagaagttggccacagg

SEQ ID NO: 5801 - DNA, 30 bp, Homo sapiens
  chr7:108097135-108097165
  hyper
acctccgtcagcctgcgagcgcgtgtggcg

SEQ ID NO: 5802 - DNA, 276 bp, Homo sapiens
  chr7:108097417-108097693
  hyper
tttccaaacactccccgccgccccccaccaccgcagaaaaaagagcttttagcataaggcggatgctatctatccgcggtagaaactgggtcttctggtcccaaggaatagggttagttcggatttgcttatttacaaatgggggagtattatggagattttttttttttttttttggcaatgtaaatcgagaattaagattttccaactgtatagtatttgagtaaacacactgcttgctgcatagttcaggctccgaagcgcacgtctccactc

SEQ ID NO: 5803 - DNA, 30 bp, Homo sapiens
  chr7:112149590-112149620
  hyper
ccagctgaagcctttaacggacataggata

SEQ ID NO: 5804 - DNA, 75 bp, Homo sapiens
  chr7:112430090-112430165
  hyper
ggcaggtatcctaccccggccctgggaggccgactgggcggagcttggggtccggaccacgcggagccctggcag

SEQ ID NO: 5805 - DNA, 41 bp, Homo sapiens
  chr7:112726523-112726564
  hyper
caggcagggctcggcggcgcctgcgcgctggagcctccttg

SEQ ID NO: 5806 - DNA, 30 bp, Homo sapiens
  chr7:112726787-112726817
  hyper
aacttttccctccccgcatttgtagtgggg

SEQ ID NO: 5807 - DNA, 593 bp, Homo sapiens
  chr7:113722690-113723283
  hyper
taacatttctaatttgtcattcgcgtgcgtcgctttccttcatcttggctatacttcctctcatctgcggtgttttatttcgcgcaagatgcgctgacagaggccatttcaaacgaatttatctttcactaggaccgtactagagcagtgtctcgaattttgttgatttgtggtttcgtcgtaaaataaacttgaaatcaaataaactttcgtgaggaagctttgatgtccacttggtgaaactcctcattcacccagttgagccgttgaactttcttctggaacctctttaaatgacttttgccgatccacgtgctgcaaagaagacctgaaccgtgcctatgaccctgcgcggcgactacagggacagaatttggctttccttctctttccaatatgcagcgtttcgtttaaaggctgcctcgatccagtgggctgaccagtgacttgtgcaaaagaaaactattcgatcgctgtttgccctttcagcgttttcctcggctgcggaaacccggttttcctattattatacttcaactttttttggagtcagctagcacagagcgctaaaccccggccagttccagcagcag

SEQ ID NO: 5808 - DNA, 252 bp, Homo sapiens
  chr7:113723338-113723590
  hyper
cgagttcaaggaattgcaaataaatatattttatgaccacccatcaacaaactacgtgccaccgtggcggcccctggtagccgggccgtgtctgcagtgtggccaggggcgggggctgaaaaggaggcggccggagaggcgaagcgagctgcgagccccgggcctgaactttcacctctcgaacccgggcccagcccattggctgcagccgaggggtccaccgagggcagcggctcctgacaggacctgttt

SEQ ID NO: 5809 - DNA, 1554 bp, Homo sapiens
  chr7:113724740-113726294
  hyper
attcaaaggcacaagttagtgcggttcgcccgtctccccaaccaccaccacccctccctcttctgccaccggaggggttcaagttggccgttctttccccagggaggagggccgggaagcagccgggggccaggctctgttcaccacggcctattggccgcagctatttggaggaaagtttcagcgcctctcggaacgccacgctttgcgactgacttgcgagcaaagcagcgggctcagtctgcggcgcgcggaaaaggcggccggcgaagagtcgcccggcccgcgggcaggggagggaccggagggagacggcggggagggagcgctggcccccctctgggctggggctccggaggaagcccctcgccaagattccggtcgtgcgtcccctccggggcccgctctctcctccctcggcctttcccctgtcaccgccctgggtcccaagcaggccgcccagccgggtcacacccggtggatagaagccgggacccagggctggcggctgggcccgtgcatcccccacgcgggcgcctcggctttgaagtgcgcgcggagcaggctctgaccgtttcttctttcctttctttccggttacttttgctcccctcagtcactgataggacccttcccgaaaacctcagactctctaagtcccagcttggcggccccttccttccaagccgcgccccggtgacctgggctgcgcgaccacgaggaagcccgagaactccttggcccaagtgagacaggaaccagggcaacaatgaagagaaagacactcggcctctctccaccccaggccgcagaggcgcacaccgtgaaaagaaaggccaatcagcgctttaacgcacgctcgggtctccctttccgactaccatgtacttttaactccctgccaccgagggctttggatcccttcgaggctttctgcacttcaagtggaatcccctgtttcatttgccagcagctccgtctgctgagaggacgtactttggggactgccaagaagcagcagacacaactcggctttgccaatacagcatacggttttgttctcgcctccctccccacccccttccctgactcgccgtctggggcgagctggagaaggcggagcaggaggtggggagaagggtgggggtgggggaaggtctggcgtagcacaaacaagttctccagcgggttgtttacatagcaggtggacctgacgtcagccaggaggctccgctgcaaatccgaacaatattcttccccgcgtttccccctccttaaagaagttagggaacggggggagataggtggacgggggagaaaggcatcctaaccagctggttccaaacctatcaacaacaacaacgacaataacaacgcaaagtaaaacaaaacaaacaagtggtccggcggtacttcagaatcctctgcggcgtcctgtcccccaccccgcccctccgaggagaggcagccccgcgagcagtgtgtgtacagttcgcattgccaacaacacgcgcgcgcggccgggtgcgcgcgcctgccagcgcacattcacac

SEQ ID NO: 5810 - DNA, 541 bp, Homo sapiens
  chr7:113726353-113726894
  hyper
gcggctgcgcgagacagcgcgagcctccgagaaagcgcgagacacgccggcgcgtgcagctccgcggccgccgcttcgccctagctctagccccgcgccacccgcagcccgcccgcgaacgcccgccccggttatttatgcggcggccgcgtccgctggctgcggcttcctcggccccccccctccccgggcgcgccccccactcgcggcagcagctgcccggactcgcgcgtgggtgtgttgtttgggggcttctgcctcgccgccgcgggtgccacctcccgggacgctgcccacggcgtccccggtcgcggtaagtttcttggccctcactctggcgcgctacacctccgcaccccaccctgtcccagccacctccacgctgggccgagctgcgactttactctgctccgcgctcctcccgcggtggcgacaaagtttcgccccaaaggcagcgccctgcttgccggggcgagtgtgacatgtgtcaaatttgggctcggcgttggggtcgcattccggacccagcatcaccacttgt

SEQ ID NO: 5811 - DNA, 289 bp, Homo sapiens
  chr7:113727321-113727610
  hyper
gaaactcctgggccctactgacgcttcgggataaccgtgcacagggatgactgctgccttgatcgcgttcctttccctgtccacgcgttagcacgaccggcttcccccggtgtctggcctggttttacttttattccgctttagagaggtcgcctggctgtttgtgggtgggtttggggtgaaatcgcacctcgcggcacttggtgaggggacgtgggaggagcgcagacacctttcggtgatagggagggcttctcacttggctgttacctggaagtccacagtggcc

SEQ ID NO: 5812 - DNA, 3 bp, Homo sapiens
  chr7:113727622-113727625
  hyper
cgg

SEQ ID NO: 5813 - DNA, 62 bp, Homo sapiens
  chr7:113727753-113727815
  hyper
gcctctgcccacccgcgaggccgcaacgcgccctgacacccgacctcagtgtggaccctcac

SEQ ID NO: 5814 - DNA, 41 bp, Homo sapiens
  chr7:114562235-114562276
  hyper
agacagcgcagggcgcgagggatcgcgcggccgagcccggg

SEQ ID NO: 5815 - DNA, 1055 bp, Homo sapiens
  chr7:114562326-114563381
  hyper
cgatccggatgtgatgaaaaagagcaacagagggagaagtgtttcaggattgtaggagtggaagaggggaaagagaggcagagagggggaaggccccctcgcaggggagccggctggagtgagctggctggaaagagggggcggagtgcgcggagtcagagccgccaccgctgccgcagttgccgccactgcggcgtctgggctgagccggagggaggcgggaggacgcgcaggggcggccgccgccgtcgtcaggccaccggggcgaaaatgcggccgctgccggaggctcgctaactttccggggcggaagaggaggaggaggaggaggaaggggcttggagcgactacggggggatgcggaggtaggtagtggtctccgggcggggaagaggaggggtttgatccccatccccggggttctcccaaacccgatctctctttccagcccctccccgctgggtccacctcggacccctgggaccccgccgctgtcaacttgcgctgtaacagttttcttcgcaagtttcaaatcaaaacttccccggggtggagtttgagggagggaagtggagggggagggaacgtcccgcaggggtggtgtgctcttctctaaaaacatttttttttttaattttgtatatttttccgccagaagcagtcagttccctgcacccagcacctcacagcccttcctccgtgcgccctgccgggcggcgagctaggcggcagcggcgcggcgcgggctcggcggagcggcccatgtccggcgcgggcgaagccctcgctcccgggcccgtggggccgcagcgcgtggccgaggcgggcggcggccagctgggctccacagcccagggtgagtgcgcgcttgcaagtggcaagcttctttgtcattgttgcatttttcagtttgctcacaagtgcacagataggggtggggggagtgctgtgaggaggggctcccactcgtagttgagaacttttgcacagttcgcgttactcaggcaagttcttcaggatccttgccctagatcaacaaccgggtaagagggcgg

SEQ ID NO: 5816 - DNA, 30 bp, Homo sapiens
  chr7:115117409-115117439
  hyper
ctgggggcccagctcggtcggtgggtttat

SEQ ID NO: 5817 - DNA, 42 bp, Homo sapiens
  chr7:115850423-115850465
  hyper
cttgcccagcagggcgccgcctcggacgccgccccgcctctc

SEQ ID NO: 5818 - DNA, 30 bp, Homo sapiens
  chr7:115851035-115851065
  hyper
tctctccagtctcacggaatcccagtggtt

SEQ ID NO: 5819 - DNA, 30 bp, Homo sapiens
  chr7:116140113-116140143
  hyper
tccccggtcccacccgtcaccaggccgccc

SEQ ID NO: 5820 - DNA, 101 bp, Homo sapiens
  chr7:116164618-116164719
  hyper
gaggtgggaagggacggcttaggacagggcaggattgtggattgtttctgccgccttggttgcccatactgggcatctctgcaggcgcgtcggctccctcc

SEQ ID NO: 5821 - DNA, 30 bp, Homo sapiens
  chr7:116166719-116166749
  hyper
cacctcaacgatgacgtggtcaaggtaagc

SEQ ID NO: 5822 - DNA, 188 bp, Homo sapiens
  chr7:116592939-116593127
  hyper
cttcaggcctactagccggcgacaggagcgcacctcctcccttctcctagctgtcccgggtttattcattccctgagcctgaatcctgataagggagcagagtagggtttaagacctcggaccccagaatacaccactgcaattgaattttggttccaccttaaggtaaactacgcagctgctgtgag

SEQ ID NO: 5823 - DNA, 293 bp, Homo sapiens
  chr7:116962853-116963146
  hyper
cgagactgctgcggccgcgggggaacgcagccaggaagggtctatgtggccaatgcggtccccattccgatctccaaaatcccccgcgcccgtgcgcgtggacttaccaccatgaagagttgacctcgggggtgagccaggtcaagagcagagggagccagagccagattccaccgagaggggcgttcatattaacccccttgcgtctgcatcaggtcagactccgtgtgcgggcgccatgcgtgcccagagcagaagcgctcagctccgggagcgcctcgtcacggccgccg

SEQ ID NO: 5824 - DNA, 187 bp, Homo sapiens
  chr7:116963330-116963517
  hyper
cgtccgctctgctcccctccgggcgcagccgagggagggggtgctgcgcctggcgggggtggggagaaacgcggggttttagacacgggtgcatgaaatgatggcaagagatgtctggggatgaggtgaggcggggaagggggaacatcgctgcatggttacgagcacacgcgaatacaggaacctt

SEQ ID NO: 5825 - DNA, 30 bp, Homo sapiens
  chr7:116964457-116964487
  hyper
ggtgagaggctggacgaggcgaagctcaga

SEQ ID NO: 5826 - DNA, 19 bp, Homo sapiens
  chr7:116964798-116964817
  hyper
cgccggccatggggagggt

SEQ ID NO: 5827 - DNA, 792 bp, Homo sapiens
  chr7:117119486-117120278
  hyper
tttcaaaatgcaccttgcaaacgtaacaggaacccgactaggatcatcgggaaaaggaggaggaggaggaaggcaggctccggggaagctggtggcagcgggtcctgggtctggcggaccctgacgcgaaggagggtctaggaagctctccggggagccggttctcccgccggtggcttcttctgtcctccagcgttgccaactggacctaaagagaggccgcgactgtcgcccacctgcgggatgggcctggtgctgggcggtaaggacacggacctggaaggagcgcgcgcgagggagggaggctgggagtcagaatcgggaaagggaggtgcggggcggcgagggagcgaaggaggagaggaggaaggagcgggaggggtgctggcgggggtgcgtagtgggtggagaaagccgctagagcaaatttggggccggaccaggcagcactcggcttttaacctgggcagtgaaggcgggggaaagagcaaaaggaaggggtggtgtgcggagtaggggtgggtggggggaattggaagcaaatgacatcacagcaggtcagagaaaaagggttgagcggcaggcacccagagtagtaggtctttggcattaggagcttgagcccagacggccctagcagggaccccagcgcccgagagaccatgcagaggtcgcctctggaaaaggccagcgttgtctccaaactttttttcaggtgagaaggtggccaaccgagcttcggaaagacacgtgcccacgaaagaggagggcgtgtgtatgggttgggtttgg

SEQ ID NO: 5828 - DNA, 30 bp, Homo sapiens
  chr7:117512788-117512818
  hyper
gctaggacctaaagcgctggcctcagcggc

SEQ ID NO: 5829 - DNA, 986 bp, Homo sapiens
  chr7:119912398-119913384
  hyper
acttctcgccatccacgccatctagtggcttgtatgtgttacgtttggttttaaggatgattcctaatgactcgggggcggggtacgcgaaaaacaaaaaggttggtagcgacaattttcctgtgtctctctacctcagtaacccctcatacgaacacctttaactcttttaactattttaaatatgcgcagtgatgcgcagagaggatgaaggggacgcaaactttcagagacgcacgccccttgacgatgacatttagaaaagggctccacatccctgttattcgtaaaggacgggaaaaggagttgtgtcaagacctcgatcgaggagagtctctgattttttggcaagttggacagatggcatatcaatccctgcaacgttaacaatctggttttgaaaataaataaaaacagaaagaggaaatgcacttaaaaattccgcgtcggagctttgcgggtcttgccttccagtcgcccccagaagacaaccaattcctgcgcattccgctccgctcaccctccttcccagcttctctcgctctctttccccccattttcccacgctcgccttgaaccgggactcgagaggcagaagcaaggcacgggtcccctttctcctctcctccaccaaaccaccgcagcccagcacgtgaagcttccctttgttcatccgaggctcgcttttctccccagcagatccacctggatgctctccctcggtgacattttgcgccggggttggtgggtggctggggtggagcgagaggagcccgagggggcgggggcggagaaaggtcaagccgagggaaaggcaggagacgcctttcctaacctgcgtggcggggcgtgcgcgcggttatttatttattttctccttatttattgatcgcactagcagagcagcgcggggagcccggggagatgcaggaccacccactggcggggaagcagctagcagccctcccgcgcccccgcgctgccga

SEQ ID NO: 5830 - DNA, 427 bp, Homo sapiens
  chr7:119913416-119913843
  hyper
cgtgccggccccggccccggccccaccgcgccaacgccgcccgcccggccgccccgcagccccgccgccccgcagccccgcaccgcgctggccaggctcccgcgacagtggccccgcagtaagttggcaggagcgagtcccctccgttctcgcctcccccgcaccttttgaacttgttgctgctgctctgctcgcctgcgcctggcttttggaaggtgaaaaggaggagggaggcacggagggatgggggaagggaaagaagagctcgcttgagctttatttatgctctctcggcgcatcggattcggctgctcgcgagctgctttctctcctcttccctttccgggtgcacggcgaggagaaagtctctatgcaactaagccccggcgcgcacttggccaggtatgtaccgcgggagcggcgcgtt

SEQ ID NO: 5831 - DNA, 447 bp, Homo sapiens
  chr7:120496862-120497309
  hyper
ctcccaagggcaaaacggcagcgatctgcagggggcgggggagagagaacacgggacatctcaccatcacgcttcccacagcctgcccgtccctcctccacccgccctcagcagggtccagagggtcccgaggcccagtgcattcgagacatcgcctcatcaaaaatcatttgttaaaatcataatggtaactaaactcccaaaagttccaaaccggcttcagataacacctgctgggaaaagaaaagagcaactatccggatgaatgaagtcgcacagtaaactcgcgttctcaggggacacgcggcggagccctgtgcattctgatgagacgctcttgaaaacctccctcactccacgcccctcctcgaggacagctgtgctcggcactgtcctgaaggtgagaaaccacactgccccctaccccggacacgtcagaggcgccac

SEQ ID NO: 5832 - DNA, 69 bp, Homo sapiens
  chr7:120497886-120497955
  hyper
cccggtgccccacgcccgcctggggatagtcggggacgcacggcgggggctcatcggggcagggaactt

SEQ ID NO: 5833 - DNA, 54 bp, Homo sapiens
  chr7:120498179-120498233
  hyper
ctgcacaaactctcagcgcatgctcgagccgctggctgccggggttgggtccta

SEQ ID NO: 5834 - DNA, 448 bp, Homo sapiens
  chr7:120628642-120629090
  hyper
ggaagcccacggtttcggacacagggctgacagcgctgctccagcagcccccagggccagaggaacccggccttagctccgccccgctctgcccggccccgggtggctgcgatgccgaggtcctctgctcccgccgggcgtgcagcgggcgcgcgcgcgtgtgtttatgtgtctgtgtgcgtgtgtgtgtgtgtctctctctgtgtgtgtgtgagatgaattggagtcatacgactgggtgtttccttccgagtggttttcatcagcaatccattaggaaatcatggaaactttttttttcctggctaaaaggatgaaaactgagtaagtacatagaactttgaacttgagacggaatgaaacaaattcaagcaaaaaccctgacagtaaccatgtccattcaaattgcgtatgccctttttatgttaaaagccgtgaatacttacag

SEQ ID NO: 5835 - DNA, 679 bp, Homo sapiens
  chr7:120970023-120970702
  hyper
gccagacctggggagcaggtgcgagcctggagggaggtgactccccagttccagagcggagctctaggggctggagctcttcctctttcctgcggtgccccgccagagttggaaaaaaaactctaattctcctaccccgccgaccccctcggaccccgtagcgcccccctacgtgggtgaccagctggagaaacatgatgtcggcagcggggaatgcggctgccgcatctgctttgatttaaccaactccgctgcgcaccaaaccccggacaagtggctaattgcagcgaagccccacctttattggctcctaggagcaccgagttgacagaataatggtgacttttaaagcgactgtccgcgaccacccaacgtgcggctaacctgagcaggaccacttgtgcgcttctcgtttctttggcttttctatctttccctcctcggcgcactcccgcggcgcgggaagctgcaggaaaacaaagttccacttccacgtgcgtagtgacttggtaaggataaaggtacagggagccaggattgttcctggaatatcaacagatccaaagaatgttaggactggggcgctgaaggatgcgctgtcgtttttcatgttcatttccgttccccctccgcctttgacccttgtccacgcagtccctgcgcgcacccccgccgagcc

SEQ ID NO: 5836 - DNA, 48 bp, Homo sapiens
  chr7:120970733-120970781
  hyper
cgcccttccgaaggagccctggtccccgtagagagaaaaaaaaaaaaa

SEQ ID NO: 5837 - DNA, 30 bp, Homo sapiens
  chr7:121512766-121512796
  hyper
ccaggcgcccccaccgcattctgattggac

SEQ ID NO: 5838 - DNA, 290 bp, Homo sapiens
  chr7:121513043-121513333
  hyper
atccggacccagagcggcagccgcgcccctccgccccccgcgcgaccccgggtccgaggcacgctcccagcggagcggtcctgcgcccccgccccctccaggagccgcggcgcgcacagccgggctggagcgcgcacccggcactgaggcttcgctgctctcggagcgctcagaccgcggccgccgcagccggcgaaagaggcaaagtcccgcacgccggaggacatgcgcctcggctagcggccccgggccccaccaccgtgcggctttctccagattattcctctctc

SEQ ID NO: 5839 - DNA, 503 bp, Homo sapiens
  chr7:121513392-121513895
  hyper
cacacacacacaaacacacatacgcacgcacgatctcacttcgatctatacactggaggattaaaacaaacaaacaaaaaaaacatttccttcgctccccctccctctccactctgagaagcagaggagccgcacggcgaggggccgcagaccgtctggaaatgcgaatcctaaagcgtttcctcgcttgcattcagctcctctgtgtttgccgcctgggtgagtgagaagagctcggtggggtttcagctccgggatcggtgggatgagggtgggagcatttcagcgtgtccgcgacttgccgccgccgccgccatctagccaggaggaaaaagggacagccaactgggctcccacggagcgggcggccgcgcggtgcaggcagctgcgtgggatttgcgcgccccctccccgccccgcgccctcgccccttccatcggcccgcgggcattcgtgccccgggccccaggagacggagctactggagacggagggctactcgg

SEQ ID NO: 5840 - DNA, 199 bp, Homo sapiens
  chr7:121863465-121863664
  hyper
aactgaaagacagttccgactaacttaaaaaaataactcggaagttcaagggatgaccatacaggtacagctgaattcaggggctccagtgatggcatcagcctacgtctctcctaccatctctcacctctgccaccttctgtgttcgcttccttctcaaacatttattttttatgagacgatccgagggatgagcagc

SEQ ID NO: 5841 - DNA, 179 bp, Homo sapiens
  chr7:121940065-121940244
  hyper
ggtcacctacccgtccgcgatcaccccacaggggctgttagtaatctccctgcttcctaggccgttgagaagcactcaggtcacccactctcggtgaccagagcggtcagtctttccccgccatgaaatgtgagttcgggtggcagccgccgcgcccctgcagtgtcccctgcacatct

SEQ ID NO: 5842 - DNA, 157 bp, Homo sapiens
  chr7:121940433-121940590
  hyper
cggtgtggaccgatggtggattctccgcgacaacagccctggagggagagagtgggccgggggaggggccacggggcccctgaggcctgcggggctggccgcactggccccgggcctggcggggtggtggagtccgaagcggcgaggcgaggacccc

SEQ ID NO: 5843 - DNA, 136 bp, Homo sapiens
  chr7:121940797-121940933
  hyper
agaaacaccagagcccgagctcacagcggagccgctgattaacacttgaagcatttcaaggacctggcacccgccacagtttggttttcatccatgtttcctccttgaatggaagtatattcgtctataaacatac

SEQ ID NO: 5844 - DNA, 366 bp, Homo sapiens
  chr7:121941875-121942241
  hyper
ttagcaggtgcatgcaagaggcgaaaggccaggggatgcagaggcttctggtcggccctgaagtgtggggcccaacatgccctggggtctgcagacgaactcggaccaggagctctagtctgccgctgcctcagcgtgggggcacggctgaggctgggaggacccttagcctcgatcactggtggccctggtggagcccgggctgcaggggccccggggttggcagcggcggctgcagaggaggcagcgtcatcggcggctgctgcggtagcgggggcggcggttcagtgcctggttcgccagctggcgtgcgggccagccccaggctgctgtcgtgcagcttgcggacatgcttcttgaggtcaa

SEQ ID NO: 5845 - DNA, 142 bp, Homo sapiens
  chr7:121943846-121943988
  hyper
tccagaagggtatttctccaccgccgggaccaccagtttattcctttcggctaaatacgtttttggctgcgggtgcaaaggggaactgaggaagtaggaggccaccgggtggatgttcacgccggctgccgggtggcatggg

SEQ ID NO: 5846 - DNA, 288 bp, Homo sapiens
  chr7:121944176-121944464
  hyper
cgccgccggggcctccagactggccttccgcggctcggagcccgtcactcctgccttggggctcgtgtcgtaggccacaggcacgaaggggatcatgcaggggatcgacgagttgagatgcagagagtgcttgggttcccccttgggtaaggctccctgcaggaagtgggggactggcagggccttgggctctggggtgcgcgccatgattcgttcaatggagaaagccaagggtttggacgtgctcatcatgttgccccgagctggagcagtcgctaacattttggt

SEQ ID NO: 5847 - DNA, 30 bp, Homo sapiens
  chr7:121945133-121945163
  hyper
gctaaataaggaaacggagtctaattcagg

SEQ ID NO: 5848 - DNA, 430 bp, Homo sapiens
  chr7:121945880-121946310
  hyper
gcacttgtgcctcccaaagagcgcgcgtagagaccatttcccctgcaacgccccccagccgaacacccgccgggtgtggcacctcggccgaaactcctggggcggcgcggtggagcgtgtggaggtttccgggaagacgcctacggctgcggctccgactgtgcgggctcccgccgcccaggcaagagcgtccaggagcgcgctggaagctgcggcgcgcaccttccccggcgcagtctcttgccagccggcgatcacgcagagctgaaccccgcagctaggcgcgcaggaagggctgcacagagtttgaagacacggcagctgtaagctggcgtgaggaggccaaaggagcgcgcagagctgcaagcaaagggcggtggggcctggaccctgaagtgagtggccgaccgcagcagctcaaggtgccatc

SEQ ID NO: 5849 - DNA, 79 bp, Homo sapiens
  chr7:121946903-121946982
  hyper
cagagaagggcagagcgcccggggggagaaagcaaagaggcgctacactccaaggcggccctttggaaccgtccttggc

SEQ ID NO: 5850 - DNA, 342 bp, Homo sapiens
  chr7:121947097-121947439
  hyper
cgcttcgtagttgtccttggaccgggcgcagacactcagtattggtcagcgctggaaattttctttccttttgctgttggggccgcagaaccagtctcctcctttcccctgctcagacaaagggcacgggaagggctttgctggggcaaaggggggtggggggttctctgtcccacgacagatgggtcgcggttaagactttaattgctgacttttgggccggatcagattccttttcctacctgccacttcccagcagcgaaaaatccccctcctgctgcactcctccgccaccgggctaggttgaaaggaaaaagccaagaagcgcgaagcagcccggct

SEQ ID NO: 5851 - DNA, 88 bp, Homo sapiens
  chr7:121950176-121950264
  hyper
gtagaggtaaataaaaatcctcgagctagaaagctctaagaaccgcttataaattcagttacctcctgaactccggccgatggccact

SEQ ID NO: 5852 - DNA, 124 bp, Homo sapiens
  chr7:121950428-121950552
  hyper
cgcagagccatttgaatagaagaagcccgaagtgaaacagaaaagctgaaaactccccggctgggctctccacttctcggttcttgctcacgagttccaaacagttaaagtgacgttggcaagg

SEQ ID NO: 5853 - DNA, 76 bp, Homo sapiens
  chr7:121950994-121951070
  hyper
cgactcagggtgtaattgaagggtcatttaatctagacgcaaggtgaaagaaaacaggcccgggggtgtggcatac

SEQ ID NO: 5854 - DNA, 153 bp, Homo sapiens
  chr7:121951857-121952010
  hyper
ggaaaaggctcctggaaacaacgcgaagctttaagcgccccgcgcgggtgttgacgctggcagctcgcaaacagcgtcccgcggccacggtgacccgaggggccggccggctgacgtcacgaacgcggccagctgcggggacccgggctgcaa

SEQ ID NO: 5855 - DNA, 61 bp, Homo sapiens
  chr7:121952043-121952104
  hyper
cgagggtgggaagggaagttgaggtctggggtaaaaagccggaaaaagaaaggaacaaggc

SEQ ID NO: 5856 - DNA, 48 bp, Homo sapiens
  chr7:121957028-121957076
  hyper
tttgggaataagaaataaaagcgaccaagctcttgccctaatttcccc

SEQ ID NO: 5857 - DNA, 22 bp, Homo sapiens
  chr7:121957253-121957275
  hyper
cggctgagtgacctctttccct

SEQ ID NO: 5858 - DNA, 115 bp, Homo sapiens
  chr7:122525942-122526057
  hyper
aaaatacggtgtcctgcgtttcgcagaaggacgggaggcgtcccagagctctcccgggagaaaaacccagggagaagtggtggtaggaggcgcccggtcccgcaactcaccttct

SEQ ID NO: 5859 - DNA, 800 bp, Homo sapiens
  chr7:122526353-122527153
  hyper
tcgtccgactcctcttcgctggaagacgggtccagcatggtgctcggggatccccgccgctcggcccgcggtccccaagcgcctcacccccggcggctgcgcccgcgggtctgagggagccgcggggctggctgcagcggccgcagaacgaaaggaaaactggccagggctttccggacacgtcgagttagattcaggagtgtttcctaccaccagggcgaaaggggcgggcaggagccgggaggaggattgggaggggggagagggggagccgccgggactgaataggcggagttagcgttgggggtgagcttgggcgcctcaggaattgctccgccagccccgggcgcgccgacccagcggttccccagagcccgccggcagaggcggagccgcccgagcgcccggacgcaggtggggaacctgtggcgcctacaacaagcaacacgtggaattgaatgttgaagagccgcgcggggccgcggagtgcgcgtgcgcgcgccgccgctgctgcccgggcccgcctggagccctagcacacagtttgcaaaggcggggagcggccgagcgcgatggcccgtgtaagcgtccaccggggctgctccgactaccctcaccctaccacctgtgatcttttctccagcaggtggaggtggaatggggagcggggagggactgttccctagcaagaggttagggggagcggccgagacatctccccaacccgaatcggctgcctaggattgaaccccagcgcggaaaagcgggactggagcccttcaccacgaagtatctttgcg

SEQ ID NO: 5860 - DNA, 57 bp, Homo sapiens
  chr7:122527457-122527514
  hyper
ttttgcggagcccgcggtgactaaggcacatgacactcagtcgctggtggttctggc

SEQ ID NO: 5861 - DNA, 30 bp, Homo sapiens
  chr7:122844521-122844551
  hyper
tggctgagccttatctcattttaatcttgg

SEQ ID NO: 5862 - DNA, 30 bp, Homo sapiens
  chr7:123173180-123173210
  hyper
gagaaaattcaaaacgagtctactcaacct

SEQ ID NO: 5863 - DNA, 53 bp, Homo sapiens
  chr7:123174597-123174650
  hyper
acgcagcttccatactcgccgcgttctcagctgttggtcgtatcctagcaacg

SEQ ID NO: 5864 - DNA, 1588 bp, Homo sapiens
  chr7:123672010-123673598
  hyper
gatgaggcccataaaattgagcgggtagtgagaatagtcccaggaacaagccccgcacgtgcggagtcccagaccccaggacagctcccacacgtagatgaagatcacgtagatgggcacccgcttccaagtgccccaaccgcggctgtagtggaggtggaagtagagcttttccaccacgaaactgcagctgccgtacataaagaaggaccagagcgacgtgtggccgctggttgtcccgtccccctgccccagtacgttgaagaagaaggtgaagaagatctcatccagaaagccgtgcattccgaagaaaagaaagcggggtaggtcgggcagcccctggctgggggctcccccggcgcccctggggccacggggtcgtcgccgccgggctccggccgcagtagggacccgggcgccgggagggacggggagcgcgcccctccgctgctgctgctgctgctgctgctgctgttgctgctgccgccgcctctgtcgcccgtaccgcaagcgcaggaagcgcttcaggaacacttggcagtggtagagcgccagcacgtactgcagcgccaggtccagcgcccctggcgccaccgcgacccccgccccgccgcccaggctgagtagtagcgcctggcccgctagggtctgcagccccacgtgggccgaggggtagaggaggaaattgaagacgaaggcgttgggacagcgccgctgctgcaggtacaccttctccagggcgaaatgggtgagcgagtgcagcaggcagcggtagggcgaggagaagcctagcatccgcaggtccgggctgcgggcgaagcgccgggccgaggacaccagcacgtccagggtgatcccgtgcatcccgtagaagtagaggcgcatccaggcgggcagcgtggcgctctcagccggcgcttcagcagtggacagcggctccgggcagccggctgccgcctcgcttcctggcccgccaggggcccccggacgccgcgccgcgccgcccctccgtgcggggccctcgctgtccacgtcgctccccgccatgggctcggaggctgtccgaacgcccgaggctgcaccgccgccgctgccgggtgcgcggagctgcagggccgagcggccgagccccgcgccgcctcctggccgctgccggcccccggggggcgcgcagggagctccgtcccggccgcggtcccgcggcagcgggggctgatgcactcaggggactcgcgggccgcccggctagcggaatccccccgccgtggccccgctgcgccctcccttccagtcccgggcgaggtgccgcccgcccgcgcccgctctagctctcaccctgcgcggcctaacgggcaccgcggcccagccaggggaggcggcgccggggctgtgaggggaaatgcagaagcttgtggaagccccatcccctccgctgcttagccccgcgcctccgctgcaggctctgggaacgtaacgcgagcagcggcggccctgcccccgccctgccaatgcccctctccgcctgcctcgacctctcccgccttctcaggccgcccccacgcgcccgcccgccgcaccgagtcccaca

SEQ ID NO: 5865 - DNA, 452 bp, Homo sapiens
  chr7:124404703-124405155
  hyper
gggtccggctgccgacgcctccgcccctctgcctgcagccgggtcacggcccggggccgccggcaggtcccaggagggtcccgcaagaaacgctgccccctgctcctccctgggtgctcgggctcgcagaacgtctcttgcagaatttcccggtccccaggcgtccctgccgcggcgctggatcactgtaggtgcacagctctcccccagacaagtttcgtttctggacgcaggggcgaccccgagggcagaagaggcagacaccttgagcagtagcagaagcagtagccgcgacatgcgggcgagaagcgcgcccggggctcgcatggcttggtgagggcacacccggcagccgcagctcctgcttagttaggatcgacacctgctgccgaagttgctgctgagagttaggcacatgtcacatactcacccccgcccgggtagcggggaac

SEQ ID NO: 5866 - DNA, 725 bp, Homo sapiens
  chr7:124405509-124406234
  hyper
aacaagtccccctcccccagacgactcgcagtcacaaccccgctcccagctcgctggaaacacgttgcaaacagtccgaagcagcgctgatgcgccggcgaaactcttgccccacctaaccccagcgacttgcgagcctactgctgccgaggagaagcgggattccaaccccgcggccactgccaaagttgcttctcctccagctcaaagttgacgacggggcgaagcaggctgctggacggcgtgccgccgcagagaaggaaatcgtggggagaagggggagaagagggcgccgctcgtcggtggacagtgccgctagccgcgggagctagtcactgccacagcgggctcagcccggacgggaagggtggtgcctggaaccgccgcgggccaggcagtgcgcggccgggaaggggaggtggcccggcctcgcccccgcgctccagccgctgcgcgcgcccgcgaagctcgactctcggctcgttgcctcctcccactccttcgcctcctcctcggagagatactggtttgtggggagacgggatcccctggtggttcaccactcactaaacccacacacgtttcattcaagccatttgtagcggcttccactcggaggagctgggagggaacaagggcggaggcgcggagcctgcgcggctcgaggctagggatgggcgggacaggttaattccccagctgtcgaaaccagcctgacaggtccc

SEQ ID NO: 5867 - DNA, 2015 bp, Homo sapiens
  chr7:126891287-126893302
  hyper
ttccccagggaaccgcgggggtgcggttttgcgcaactgggtgactcgcgtgtccctccgcatttcatttgcaccaagggagcgcgtgtcagacgaagggaatttttttttcttttttggtgattctgttattttttcaccaactgtacgaagctcaagggatatccgagctttctggctgggcggatgggcttcgcgcttggcatggctgagcggtccatctctacctctccgtttctatctctaccataacagcgaccactcagcccgccaggagcccctgtttcccagcgcaggttcctttttcttctcagttccttgggctgttgaagccgggttctgggtagatagagactggggccgtggggagagcgccaggctgcttttgcctttcccgcgccccggggcattccggcgcgctggggatgcagcctccgcccccgccgcacctggccgcccgagcgcccgcgcccacgccccgcgcggggccgcccgaaactggggccgcgccagccgcgggagctaccgaggagctgttggggtgcgtttgcctttgctttttaaacaagatccccgagaccttttctccatccccccaacccccagcaggacacggaactccggcgtttctcgaaagccacaaaagaggggcacggaaatcccaagctcgccgtgctaactcggagaacgcaaactcgaggcagagcgtgcgccgtgcggggatgtgggtgtcgaggaccccgaagcgcccggcttcccccgcgacccccatcctccctagatcctggttagacatccatccagcccacgctcagagggcgggggttaccccgactcatcccggaagccgctaacttcagaaatccctcctgttaggttcgcgaaacgaaggtacctcgtcatctcggcggggcaagtccggattccaccagggcaggtccgggaggtcacccagggcagacgatccgaggcagagcgctttaaaatcctgccgccgcacgcccagtcagagcgccgagcgcgcctgcccccttcccgtcacccttcagtctcccattcgccgactaaacttttgggggatcacatctccaagccttgggagttccgggtaaagtctccctcttttctgaacctctttactgtaatgtaatcatgggcagacaagaggggtggctgccttgttctttgcaacgtaaaatcaacagacacccaatcaagctccaatgcccggccagcccctcgccccctggtgcccactctccttctccccccattcccgtcacctccgcccgctatttctctcacagactacggacatgcagggccatctacttgtgctcaggaaaaacaaatcactagagtgatatgagaaggaatggtgcacctggctgtccgctgaaaggttttagagaagaaaacggaaaggggaataaaacggggggattctccttttccaacaagcagggcgttttggggaagtttgggggccaggggctttttgtcccgtggttcggcacttgctttcctcggagccgctttctgctgccgggcggcgagtcttaccctgctccccgcagagggcgcggtgaggaagcccgccgggggcccgcagctccatgtcagcgccgccgccgccgccgccgccgccgcgtgaggcgagcacagcggccgcacttgtggctgatctctgggctgagggggctgagctggcctagcaggcgccaagtctcttccatgtgaataacaaatactcccaccggcggccgcgattggtctgcgcccggcgcctcccgatcctccgcccgcggccattcacccggcgcggcgcggggagccgcggccaggatcgcgcccgggatcgccaatcgcttcgcgccaaccagtcacctcgggaagcgggaggaggaacccccgaggggcgggagcctctggatttcggtgtcacccagcggccctggcgcgggcagggagggggaccctcggcccgcggatccccctccgctcttcagcctgaa

SEQ ID NO: 5868 - DNA, 30 bp, Homo sapiens
  chr7:127032060-127032090
  hyper
tggggtctccctggcggagaccccgtcccc

SEQ ID NO: 5869 - DNA, 30 bp, Homo sapiens
  chr7:127225735-127225765
  hyper
ggccggtgggtgggcgcggcctgttgagaa

SEQ ID NO: 5870 - DNA, 30 bp, Homo sapiens
  chr7:127291565-127291595
  hyper
aaacattaatggaacgcctcacaagtgcta

SEQ ID NO: 5871 - DNA, 437 bp, Homo sapiens
  chr7:127744130-127744567
  hyper
tggaacccggggtctggctctcggcaacgcgccctcggcccgcagcctcctgccccctgtgccccgcttcggcccccagcgcagctgcagaggggcccccctcgacgcatacactcaagagcccgaccgcgcggctgaaatcgcggagctcggagccgcggctggctgagcgatcgcggttcctgggctgcgtgcgcgccccttggagctgaaaggagcgccaggatcgggggcgctgcaccgggctgggcccctcaacgctcgcagaccgggccgggctgcagctggagatggcagcaatcccgggaggtctccgggcctcttcagggtgcgtccaggaggcgggttccgtgcgacgcggcgcagcccacccccacgagaccgcttaacttcgcgggggcagcctcgggcgctcggagacgcggaggcccagactg

SEQ ID NO: 5872 - DNA, 942 bp, Homo sapiens
  chr7:127806867-127807809
  hyper
taaaggaactctgcccgcctggccggcggagagccgcagagagaggacgctcacaaaagtcggtcgctacccggcccaaacgattgtggagccggcgagagcaactggtcccccagtcctcctccctggaggaggtgcgggggcgcggcaggcgggcttggcccaccccagccgaggagcttgtgggggacggcgggcggccggctggacccctgcagggcttcccccactttcgggagcccgagcggccgagggagaaagggcaggggctctccgccgtccgtctgggagagcagctcctcccagtcgggcccgcaggtgtgggtggggaggggccgtgtccgcctccgtgctaggtagagggtgggaggagggaccttgtctgtccccctcagctgggtaggaaaccccgactcggacctgtccttgagcgcgggggatctgggcaccccctcccccagcaggttcccgagagtccgcccgagggtagacagacctaggcgtggtgtgcacgcgcgcgtgtgtctgtgggtgtgcgtgcgagcgaggcaagagggtcttggcgtcccccgcaccctctctgccgggttctatattttgcctttctttgttctcaaaatagtaggcgagcgcggccggcgctgccctggcgaggggtgggggctccgcgctcgctcgcgcgagccgagttagctgcagggttacaaacagtatctccctgctcccccggcctgaattaatgtgttactatttcgggcgagccagtgtttccaggggaaacctaatgacgcaatgacgtcaatgcaggtcagcagcagactctccgggagggcgggcgggctcccggctttcgggctcggcgcagtctgcgggcgggagggcgccggcgaggtggcgagggcggctggcgcgggggcgcgggagccccggctaagcccgggg

SEQ ID NO: 5873 - DNA, 27 bp, Homo sapiens
  chr7:127841245-127841272
  hyper
actgagccacccaaggtcacccgggca

SEQ ID NO: 5874 - DNA, 158 bp, Homo sapiens
  chr7:127841338-127841496
  hyper
cggccgcctgacctcctcttggagttcccggctcagggcagggggtcgcgtccctgcggtctctggaggccacgccccacccgggcccaccggggtgggcgtggctacgtggctccctggcgctgaggcgcctccttcccaggtgggcggggctcctg

SEQ ID NO: 5875 - DNA, 254 bp, Homo sapiens
  chr7:127841625-127841879
  hyper
cgcctccttcctccgccggcttctctgtctgcctcccactgtccctattctgcccttcacagatcgttgtcattatcaagtcctacactttgagagcagaaaacgaccccgtacgtggtgggtctccgacatctgtttattacgttggaccgcatgctgcatatgatccagccacctcgctctactcctgtggctgcccttcgtcctcgtcgccgggacccctctccctgcctcccagacgacctgtgccttac

SEQ ID NO: 5876 - DNA, 30 bp, Homo sapiens
  chr7:128049961-128049991
  hyper
gccgcagctcagggcgggcgggagcctgga

SEQ ID NO: 5877 - DNA, 548 bp, Homo sapiens
  chr7:128470508-128471056
  hyper
cggccgagcgcctaggaggcccgccgagcctcgccgagccccgccagccccggcgcgagagaagttggagaggagagcagcgcagcgcagcgagtcccgtggtcgcgccccaacagcgcccgacagcccccgatagcccaaaccgcggccctagccccggccgcacccccagcccgcgccagcatgatgaacaacagcggctactcagacgccggcctcggcctgggcgatgagacagacgagatgccgtccacggagaaggacctggcggaggacgcgccgtggaagaagatccagcagaacacattcacgcgctggtgcaatgagcacctcaagtgcgtgggcaagcgcctgaccgacctgcagcgcgacctcagcgacgggctccggctcatcgcgctgctcgaggtgctcagccagaagcgcatgtaccgcaagttccatccgcgccccaacttccgccaaatgaagctggagaacgtgtccgtggccctcgagttcctcgagcgcgagcacatcaagctcgtgtccataggtcagtgccgggg

SEQ ID NO: 5878 - DNA, 56 bp, Homo sapiens
  chr7:128579007-128579063
  hyper
ggagaggtccagaggccgactctggaggtgggggtggctccgcgggctggcccagg

SEQ ID NO: 5879 - DNA, 30 bp, Homo sapiens
  chr7:128784427-128784457
  hyper
caacacacggtgtgcgtacttgttgatttt

SEQ ID NO: 5880 - DNA, 30 bp, Homo sapiens
  chr7:129142636-129142666
  hyper
cacgcctgcctgctcggctgagaatcgcca

SEQ ID NO: 5881 - DNA, 309 bp, Homo sapiens
  chr7:129418306-129418615
  hyper
tcccgctaactcccccgcaggagcatgaaggggcggccttgagcggtaaagaaacgagcagtggtggaggctgccgctccgagcccaggtccgaaccgagagccgcgcggggaatgtgggggtcgaggctgagagctgggcttggggcaggttcctttgcgttcgctcaggccacgatgaggccactaggacagatttctccgaaggctcggcctcggatcagagatccgccgactcggtgcccatcggtcgggctcactgggtgacaggtagagggtgatgcgcacccgtagagctgagtgacccggc

SEQ ID NO: 5882 - DNA, 290 bp, Homo sapiens
  chr7:129418755-129419045
  hyper
cgctcagagccggcctcagtgcccctgcccccggcgggtattactgtacacggtgtccgggagcccgggttggaagagcaaacgaatggctcagcctggaggacaccgtggaatcgggcgacccctgaccccgggtgacaccctcactgcccatagtcctgggatgcgctgaccggtgaggcgccagaggcaagccgtccagccgccgatcttggggaagggctgggaacctgggtgccactagcgctattaacaggaatggggcagttgagggcggggaacggtgtctc

SEQ ID NO: 5883 - DNA, 526 bp, Homo sapiens
  chr7:129421182-129421708
  hyper
ctaacccttgcacttgaagaccgttaacaccttgtcttgggctcgagcaaaagaagggggtgaggcagtggaagcggggcccgggaaatctatagtttccccacccccagctcctgccgagccgggaggggccaagggtgacggcaaggatacgaacccttcaatatgcccgactcccgggcagggcctgctgaagccgtagatgtcgcagccagatggatcgggaagcaagattcccaccccaggtggataactggacgagtctcagggcctcggggcccctctccccatgcagccagggatgggcacggtgagcgagaacccggacagcggagataatgagcacgtcacagagcccaacgggccaaaagggggtgatagctccacattaacccctccccgtcctactagcattcccccgcccatctaggtcgcctcgagcctccctggctgtctctgcacccgcgccctacctggtcctcagacccatgcgatgctgggcaacccgggccgggtgtgcccagga

SEQ ID NO: 5884 - DNA, 518 bp, Homo sapiens
  chr7:129422115-129422633
  hyper
ggagctggactcggacggtgagggggcggcccccggggacctgataccctggatcccttacggctcagggctcaggcgggggaagaggtggctcaggacgacctggggtcctcactttgctggcctgtccagcgcatcctaagcccgcgtgtatcctaccccctccttctgcagatccaatgtccgtctggcaattgccccattccctctcgctggagagatcccttccgcctcgccacaggcgtcccacgctgcccggagtcgtgcgccccgggacgggtagttttgggttcctcgacgcttggccaggtttaggaaagacccgctgtcttccttgctgcccccacctaggagactcggcgccttgcgctccgtcctttttaatggtgtcgcggcttgtccctctggcttgctccctcctagtccctaccccacacggctcccttcgccagctccatgacaatcccactcgtgctgaagaccttgggcaaagaagtaaccatcggtcttcccctccc

SEQ ID NO: 5885 - DNA, 19 bp, Homo sapiens
  chr7:129422949-129422968
  hyper
cacgtgggtacttggcgac

SEQ ID NO: 5886 - DNA, 379 bp, Homo sapiens
  chr7:129423125-129423504
  hyper
cgatcttggcccagcccttagccctcggtcctttgctctagcatctagattctcgtgggtcaacaaagtcactggaaacccaacgaacttcccgacatttttcgaaaaccgtatgcgtgtgcttctgtgcgtttttcctctgatcgaggtagggccctgtagggttctgtttggacgggaggctggagtggttccttcccggctgcggggtcggaggatgcagagattcgaaagaaggagaaacacagagactgtcaaatgaaaggagattctgtcttcggaatcgacccagctctttaaaagaatgaggaaaacatggggtctttatatatcctggaaagtcgcctaggcgttcagtgaaaaacgcaaaaggcacgtg

SEQ ID NO: 5887 - DNA, 1198 bp, Homo sapiens
  chr7:129424748-129425946
  hyper
gccagagagaaactgcgcgcaggccctggcgaggagcccctccggcccatgcggaactctgcacaggctgggtccctccagggttagaaacccagcttccccacccctacccagcagggacccgcgctgcatcccctaacgccccccaaccctctgcacccagacccaagagccggccttcgacgcaccacatgcgtggagcccgggtcccagccctgaggaccaggtttcagggctcagaagactccagcgaggttccctcgcagattgtgtctgcggtcgttgggggaggggccccgcagccttcagcagattatccaaaggtcagtgacccagatatggttttggccacgggccatgtttcacttcctgtgccccaagcagaatttagctgaataattcggaccccaaaccaaacaaaacgctcttatttccgtttggggattcttcggagttgggatttttctgtctcaaattagaataatctgcattattaaccacttaacagttatttgttggttggctgcctgacctttctgagcctcagtttcttcgtctgtaaattgggagcttacccaggtcggaggactgttggaattggaaatattcgaataaggaagtgtttttgcaagtgctttgtaagcagcaaagcgcttcttcaggggtcaatttttttttagctctgcagtcaccacccaaattcggaagatcgttgtgcctttcttggatgagaatgcccggctccagcccggggatgggacggtcttttccttgctaggagtccgctgtggagggggcgatgcgctctgtccaggacctaggagtccctttctccctccaccctcggctcacagcgggcagctcccccgacgcgtaccgcctctttgcccccagcctgaggtgcgctcttccccaggacgcctcctctgtcctctgcacgccgccggccctgctggggttgctttctgccgcggcgtcttcgcgaatatcccctcttgctgtctgcctgggcgtccctccgggttaccgcacaccgcctccgaccctcccagggcgcgggaggaggggcagggcatccgcgttcgtgtctgggccctggcggggagtcgcgtggtccaacccctcgtttttaagaggagggatctgaagcccagctaggcttctaattccagacagagccctacggagcccagttctc

SEQ ID NO: 5888 - DNA, 82 bp, Homo sapiens
  chr7:129913243-129913325
  hyper
tgaattaatgctcacgtcctgagagatgagctcctggggaaccggggcaaatgcgccaataggagccgaggaagggggaggt

SEQ ID NO: 5889 - DNA, 47 bp, Homo sapiens
  chr7:131240499-131240546
  hyper
aaaacctctgcaaacgggtaagtacatcgcccgcgtgggccgtggct

SEQ ID NO: 5890 - DNA, 529 bp, Homo sapiens
  chr7:131242579-131243108
  hyper
ggagtgggtgttggagaattccgtaaactgagtttatccggtgaaagaacaaagaagttcctttcccctcccccgctcccctccttttttccacccccaaagctgcctgggagacgcagaccccaggcccgcctgaagaggaggcacatcggcggagccgggaagcggagggggcgaggggtgattaaccttggaacccgggtacggcgtaaatttggctcacgtgactccggggttgctaatctggagtctatctgccagatggggctgggtggaggggttttctccaggatctagccgcgtcccgggcacaggggactccgtgagcccctcaagtcggctgcaagcaggcgatgcctgcagggcactgcgtccctggagccgcgaaggaagcgctggagccctggctggggttccgtggcagccggcctcaagcttgggaagggctgacggggttgttttcatcaggaagtttctgcaggatcgttctggccccgttttccacaccgcatatgggaaagacagaggg

SEQ ID NO: 5891 - DNA, 31 bp, Homo sapiens
  chr7:131630395-131630426
  hyper
acccgcgcgggaaccccggagcagtagattt

SEQ ID NO: 5892 - DNA, 933 bp, Homo sapiens
  chr7:132260274-132261207
  hyper
atgtgacaggtgttcgccagccggaggcaccggggaaggcagccccatgtgcccagggagggtagggaggtgagaggggacccaagtcctgtgtctccaagtcctgtctgcttgctgctaagcaggcactgaggctgtgaataaggtcttaccttttaaggaggatctgacccccgtaccttccctagacaagcaacatacgcggcgatgctttaagccgctttctgcctgaaatctcggcgcattcccggggaagcagtgccacgcttcagaaaggcgtttgtgctgcctcttactggggaaacgcagtgtctgtttcatatgcgccgccctacagaactgcagccccaaccgcctatctggcctcctccccgggcgctgggccaccactctctccaaatatgcgtccgaatatctgtgggtctgtctcccgttgaaatcccagggtgtccaaaggccacggggccgcgatgacactgggtaggtctccggaaacctctcaggacttctcccattttaaagcccagctagggacgaaaggggctgggagctgaaaaattgctccctcaacctccccgggtgggaggcagagccgggaatacacagaatcccaccccgaaagtcccgggaaagagaagtctgagtccaggagcgtgagaggagaacacacccgggaaatccctgctccggccgctgcacctccgcgggcgtccaggtgggacgtgggcaggtgcgcgagcgccgtgtgtgccggtgtggatctgtgtgtgtgcctgcgtgtgtgcgtgtgcgtgtgccgcgggctggctccgggacactgaggactcccgggtcggcccaggtctgtccgaccttgctgccctcgccgcccgcccggccccactccccggcgggccggctccttacctggacgcgccgcgtttccctccttca

SEQ ID NO: 5893 - DNA, 248 bp, Homo sapiens
  chr7:132261256-132261504
  hyper
cgccctcctctgaacgtgtgcgtgtgcgcgcgtgtggctgcctcctccagccccagccccgaacgcaaatactccaccgaggcacagggaagccgggagcagccgaggaacgcggagggcgccgaatcagagcctgcggggcttgacagcttctcttgcggcgtccaaggtgggcgtaatgtccaacaaaaaggtcggaaaatggggatcgattccgaacacccctttcctccacccagccccggagc

SEQ ID NO: 5894 - DNA, 246 bp, Homo sapiens
  chr7:132261534-132261780
  hyper
cggtggcgacgccgggctgccccccttcgtccccacccccgcgggctgaatgtccttgatgccaagcgggcacagcggcgtcactccgcgccgcccatgctcgcccggtcgggccgctgcccgggcgcggcgagtgcgcgggggacccgccggggagcgctctcggcgcctctgcgcgcctctctgggtagcggcggccgccccccggcagcccgcggccggccgcgccgcggcagcccccaccct

SEQ ID NO: 5895 - DNA, 30 bp, Homo sapiens
  chr7:132262043-132262073
  hyper
ctgccgccgcggctcgctgctgctgtgcat

SEQ ID NO: 5896 - DNA, 30 bp, Homo sapiens
  chr7:132340264-132340294
  hyper
ctctctctccctctcggagggcccctccct

SEQ ID NO: 5897 - DNA, 97 bp, Homo sapiens
  chr7:134001928-134002025
  hyper
agcgctgaaagtaactcggccgccagggtcacaacaaacttgctggcagcggcggcactagaactacagagctgtgactgctcgttggaggtgttct

SEQ ID NO: 5898 - DNA, 562 bp, Homo sapiens
  chr7:134143024-134143586
  hyper
cagggaaaatgctaaccttggcgcctcctgaattatcaactagctacggggtgcccagatttttctcccgagttccagacccagggcaccccgaggcggcgcctggccgaggagctccgcactgcgccttgttaacagctgggtccgggcaaactcgcgccacctaattctctgccctctaccggcttgagatgcttattcctcagggagggcaagaatcgaaacgattgagaccaactatttacaagtgaggcaaccgggctacaggtgcctcgagggaaaggaggctgggtctgcgctcccacaccttgccgacggctccacgtccctgtctgcgcccgaggtccaccggtctgtgaagcccactttccccgcctccctctcgcgttgtgccgcttggggcgcccgctaggacccaaaatgcggactggtgggccgcccatcaagggttgcccgcggtagggcgggggctcccgtgagctgctcccaaaccccactcgcaggatgctgccctgacgcccagggccaacccggggagccaaggcccccggtctctgcaagg

SEQ ID NO: 5899 - DNA, 439 bp, Homo sapiens
  chr7:134143700-134144139
  hyper
cggagagtgtgaggcgagccccgggcccgcgcccccacgagcacctaccttccaggtacccaaccccaggatgggcatcttggcgccgttgttgagcaggagacggcttgccatggctgctgcgctccccagacccccgcccagtacggtgcggccttggccgcggcgcgtacctttaaatagcccgtgaggtcggcagaaagggcgcctgcggttggcgcgccgctgcgcgaaggagccttctgattggttgcgctgggggtgccgcggcggccttccccaagggtcggcggggatgcttcttccgcctggtcctagtggcagcggattctttccgcccccaacgctcgcccgcgccccgcgtggcagaaaggagttcctcagctgctgtatctggtgggaaagcgaatgctttagcgaaaataacaggcatcccata

SEQ ID NO: 5900 - DNA, 30 bp, Homo sapiens
  chr7:134331509-134331539
  hyper
gatgagtgacagttcgactttccaataggc

SEQ ID NO: 5901 - DNA, 86 bp, Homo sapiens
  chr7:134832829-134832915
  hyper
ctgtttactaggcacgactgcgaaggcaagggggcaccagctcaggactgcatctgcctgccatttcccttccactcctcctttct

SEQ ID NO: 5902 - DNA, 30 bp, Homo sapiens
  chr7:134855649-134855679
  hyper
catccggttggctgcgcgctgggaacgcca

SEQ ID NO: 5903 - DNA, 232 bp, Homo sapiens
  chr7:136553667-136553899
  hyper
aatccagcccagctcgccgaggcatccaggtctccattctattttggtctccaggctcttcgtgaaagccaggtttgaaagtcttgtttgcttctcctttagtggtttggcgtggagggcgggggcagcgtcaatttaactccagtctaaaccacgaacaggtcacagactagccaagtggctgagacgagtgtggggtgcgtgactctgcctgcgcgcgcgccagccccgc

SEQ ID NO: 5904 - DNA, 30 bp, Homo sapiens
  chr7:136554337-136554367
  hyper
ggcttggagggttgcgagcagtgatggcgg

SEQ ID NO: 5905 - DNA, 568 bp, Homo sapiens
  chr7:136555273-136555841
  hyper
gcccattgccgtcctcgaggctgccctgagatacagaattgtcccaggctgagtccaccgacccgccagtccctggcgatgatgccaaggctcttgcatgtacggaaataccagcagggaggttcgccaggggcagagaggctggaggagaacagagaattggaggtaaacgcgtaaagccagcagaactgtcggtggacatttcacccaggccgccctcccgcgtctttaagtcagttcaccgccacagcacgtctgtgactgcggccacccagggctccaagtctgccagcccaggcgccgcgagccaagaagagcgcggcgcctcccactcctcaagctccggaatcccccacatcgactttctatttccctgtcttcttttcttttttgtttgttttgcttttcctgctcttttcttagcgctgggtggcagtgggtatgcggcagccgtgtgatttgcccatcccctagtacacgcagccagcgacacaagcacacagcgaccagtccccacgctgtgccacacaccctccagcggtccggcgcgcagcccctgctccacagc

SEQ ID NO: 5906 - DNA, 89 bp, Homo sapiens
  chr7:136556012-136556101
  hyper
cgggccgggctgtgcggagccctgagggctcctgcggctgcagcgctgcaggccgcccgcgtctcgccccgccccgccgctgggcgtcc

SEQ ID NO: 5907 - DNA, 30 bp, Homo sapiens
  chr7:137028150-137028180
  hyper
gccctccgagaaatcgtacgttcctctcac

SEQ ID NO: 5908 - DNA, 30 bp, Homo sapiens
  chr7:137028427-137028457
  hyper
ctttgactcaattacgccctgacagggagg

SEQ ID NO: 5909 - DNA, 165 bp, Homo sapiens
  chr7:137531046-137531211
  hyper
tggggagaagacagacatccccgggaggagagggggaaagggggaaggagaggcgtggaaacagagaggtgcccaactccgcggaagcgccccttgctgggtagaagagtgggtctcccgccgcggcgcacctgtctcggctgccggctccccgcacctacctgt

SEQ ID NO: 5910 - DNA, 626 bp, Homo sapiens
  chr7:137531262-137531888
  hyper
cgtccttctccttctggccggcggccgcgggctcgtccagggcagcggcccccgccgccgcggctgaccctgcgccccgcgggtccgcgccgccctcggcgcccaggcagcagctcccggcgccgcttccgctgctgctgctgccgcccgtcgcccctttctcctctcccgccgaggagctggggttcatggcgcccgctccggcggccgcggagggagcgcaggcggcgccgctgcaggggccgggcgggctggcggcggcggcggcggcggctgcaggagcgcgggcaggtccgcgcgccgctggcaggggcagcaaatggcagccccttcccgcagcatccatccgcggctgcaccgcaccggggcattgtgggaaactccgctcactcccccgccccggccaatcagaggccgccgctccccgcctcccgcgccctcccgcgccggcccgcaccctccagccccgccggcctcttcctaaatcccgagcgaaagcccaagctgaacatgaactctgcccggaggcgacgggctgcggcggagggggagagagaggaggacaggctgcgaccccgggctggggacgccagggcagggacagcgagcatcaggaaggagagcgt

SEQ ID NO: 5911 - DNA, 63 bp, Homo sapiens
  chr7:137531908-137531971
  hyper
cgccctgggtcctgcaccgtgaggctggggggaccaggaccggcgggcgcccaccttggtcct

SEQ ID NO: 5912 - DNA, 30 bp, Homo sapiens
  chr7:137687140-137687170
  hyper
agccaatgaaatagcgacaagaatacattt

SEQ ID NO: 5913 - DNA, 30 bp, Homo sapiens
  chr7:138665268-138665298
  hyper
tccctggaaagatccgtggccagggcgctt

SEQ ID NO: 5914 - DNA, 142 bp, Homo sapiens
  chr7:138720771-138720913
  hyper
gcgcgggccctgtgcgcgcggcgcagcgagccggggcgggcaggctcctcccagtcacgtccacgatttccagcgaacagcccggggatgggcctgggcctggcgaggggtgggcctgcgggaggccgggcgaggggcggcc

SEQ ID NO: 5915 - DNA, 30 bp, Homo sapiens
  chr7:139043994-139044024
  hyper
cattcagactaagccgcccgcgaccttgta

SEQ ID NO: 5916 - DNA, 271 bp, Homo sapiens
  chr7:139167555-139167826
  hyper
gctgggcgggtgtgggggtttcggctacgtccacccgacctggcggcgtcggctgccggcgcaggtgagcactcacccgtaagcgttacggcccggggcagcttctcgtcgccgtccaaccccgcgcggggcaacagcgccgcatcctccttctccagccccagctccttgcagcggcagcacgtgggggagcccggggagccggcgcttccttccgcggggctggcccggccctctgcgtcgcagccgctctccgtccgggctgcagcca

SEQ ID NO: 5917 - DNA, 499 bp, Homo sapiens
  chr7:139168114-139168613
  hyper
cggggcagaccccgtagcccaggctgagcggcggcacgcgcggggacccggggcgaggcgaaggcggctttttcttgctcgagggctccaggcctgcgcccgccgccttctccacggccccggccggacttgggctgctttcgggaccttcaggttgtcgcaccttcgcgggcacctgcggctgctccagcgtggggaccaggcttcccacgggctccattgggagctctgccccggcttggcctccgggcgcagcctcccaagactcctccatcccgcgcgccccgccacccggagacgctgaggagcgcacctgggcccagtgcagaggagcttcgctctcctccgtccggattggtccagccgcgtcgccgaagttgtcaggccacgcccctccccgaaggaccccgctgtgattggctgtggctgaggttctgctgccccgacccccttcgggacacagccccggcctccaccaggcactgggagggagctgaga

SEQ ID NO: 5918 - DNA, 350 bp, Homo sapiens
  chr7:139168658-139169008
  hyper
cgggagaaaagcagaacaccagcggaggcttgtggcagggaacccggagccccgcctgacccttccctcttctttgtctctgacctcacccattttcccctccagccctatgccggggtgttggttttgagagttacagtttgggcggggaaggattggccaagcctgtctggatcctgggacctcagagaaatcagaatccaaaggaattggggcgacctgtggaaaagtagcccagttggttgtcctgacaatccagcagggtttcgaaaggactctccatcatacttgggaggactcccccactgagtaacgctaagagaaaagaaacagggcgtggataagcaatt

SEQ ID NO: 5919 - DNA, 30 bp, Homo sapiens
  chr7:139762241-139762271
  hyper
gtaggacccccaagcgggctggaagtgcgt

SEQ ID NO: 5920 - DNA, 30 bp, Homo sapiens
  chr7:139876505-139876535
  hyper
ggcggtggcggctgcggggctggagggggt

SEQ ID NO: 5921 - DNA, 96 bp, Homo sapiens
  chr7:139930044-139930140
  hyper
gacctccagctccctggcctccgggcgcgggccctgggctgatctggcggtggacgtgcagggcagcgggcccgcgcccaccagctgtggcaagtt

SEQ ID NO: 5922 - DNA, 172 bp, Homo sapiens
  chr7:140098302-140098474
  hyper
ctcacccctggcggtgcgaccagggtttccggacgcccacgtgaccctcccgtcgcggggcacgctgggagttgtagtcccgccacgcggcctcacctgccggcgcggaggagggcgaggagggcggaggctgggagcccacagaactctgctgctgcggacctggccagta

SEQ ID NO: 5923 - DNA, 237 bp, Homo sapiens
  chr7:140103656-140103893
  hyper
agcaggggcagtgtcgtatgggccagcactggtttaattcactggctgttccttcctgtgagggctttccgctaggccggcgaaggctggtgagaaagccggctctgcgccctgccctgtgctggccgccctcacctggcgctttgtaccctgaggcagctccggactcagggcaggtgggagggattgcactttcctttcactttctcaggacgccaaacccgacacctggggcca

SEQ ID NO: 5924 - DNA, 30 bp, Homo sapiens
  chr7:140396871-140396901
  hyper
atggtagtaggggccgcctgccctcgggag

SEQ ID NO: 5925 - DNA, 30 bp, Homo sapiens
  chr7:140453121-140453151
  hyper
tccatcgagatttcactgtagctagaccaa

SEQ ID NO: 5926 - DNA, 30 bp, Homo sapiens
  chr7:140714397-140714427
  hyper
caaagctacagtgccgaaggccgtgtgatg

SEQ ID NO: 5927 - DNA, 338 bp, Homo sapiens
  chr7:140772337-140772675
  hyper
aaaaataagagatgaggctcacgttgcacggatgacatcactagcttttggctgcgcgctcggtgttctcgtctgtgggttttagccaaggctgcagctacccgcgccggacgagagagcgcggcagcagcttcctccggcgcccgcacccgggcaatgcgatttccccagtcccctgggcgcagcctgggctctcgcgcctcccgggcaccagccgagcctgcgaggcctcggagccgccgcggctagaggaggaggcgacgaggggaagccgagtgacccagcctccctcccccaccctctccccattcatctcggcgaccaccgcgcgccgggag

SEQ ID NO: 5928 - DNA, 1710 bp, Homo sapiens
  chr7:140772716-140774426
  hyper
cgctgtcgagtgagccggcatctcggcgcccgggtgggctgcgaagaaaatggtgcaatctgagagcgactgagcccagctgggcagagcagacggggtgccagagtgccaagggctcaggtgcctggagaaaggggcggattgtttggaggggccgggaccggggttttcttcggtgcctgcggcattttctttgcacctgggcggcaggctcccggggctcccgggtgccagatgaagtgaggcggaggcgtcgcgggagagccgggtccggaggcggtcgggtggacactccaggcagaagacggcgctgggaagagctgcgtgacgctcgggggctggcggctgggccggcagcgcgccgtggcggcgtgacctgtccatggtgttgaaggcgcggtgggccgagcccctagcgccgcgcgcagtgagcgctgcctggtgcaccctccgccgcgcagcccgcccctcgcgtccgccagcagccgcccagtctccgcagatcccaggccgggtctcgtccggtaacgccgcccgggtgaacacgctgtcggcccgaggggccgcctgaatggcgatgccagaggcagggcaccggggagctcgcggggaaaggtcggccgagagcgtgcgtccgcggggagtgcgcctctgagcgcagcacgcgggtcagaaggagcaaccgacctgctggtgaccagagaacggagattttaagaggacccgacccaaagaggaagaacatttctgggtgcgcgccccaggtctttgcttgcagacggggagggggagaggctctgagccagagacccaggagggactccgagaagccggccccagcacctggaggtttctttcgcccgccggccgcatccggggcgttctacttcacccggtggtccagtggcgcctcctgacagcaccccccgtccccctcagagagacaggcgagttctgtcccgtcaccatcctgcacaaagaagccccaccgcagccgaggacacttggcatttagtttccggcccgagggcagcggcgcccgaagccgggctgggagccgaggcggctgcttcggggcagtcgcttcctgcggggcggggagggggcgggaggcggccgcgctgggttcgccgccgccggaggctgcacctgcctcagaggatgcccaggagcccgcgggagcctctccggatcagaactttttaggccgcccgcccccatccccgcagtccccgggccgtgctccggtaggcgggggccgagggggcgccgcggcgcgagtccctctcctgccccctcccccagctcggccgcccgccgctttgttccgggtgcggcgagggaaggcgaggctgcggcggatcatgcccatggtgtagccgccaagcggaggcatggctgccggaaggttactgctctacactggcctctcgctagcgctctgcgccctcggcatgctggccgtggccatctgctcggaccactggtacgagacggacgccaggaagcacagggacaggtgcaaggccttcaacacccgccgggtcgaccccggcttcatttacaacaataacaacaacttgccgctccgggcgagccgctcgcgcctggaccgctgggagggcaaactcctccgggcccggaatcgccggcagctgttcgccatgagccccgcggacgagtgcagccggcagtacaactccaccaaca

SEQ ID NO: 5929 - DNA, 646 bp, Homo sapiens
  chr7:141211324-141211970
  hyper
ttctctccagtggtgcgacctgttctgctcatgatctgtctgctactagccagccggctggaaaatgtggccaagaaaaccgcagagaccaatgttcggaggagaaaaccagaaagaggggcctgcctggcccctttgatcctttatggccgattccgtggacattgctgctcctcacgccggcagccctctcttgagtacctcaattgcagtctccagaccctccaccccgccaggcattcctgggtcggtgtcccagtcggtcacagtcatcggatcctcctgcagagcagtagaaagtccgggaggggcccgtgcccatggctccaggaaaggagcggccaggtacctgccaggggagaccaggcacttccaggtgcgaccaggtacctcccaggtgcggccaggcgccgcctcatctctcggtgggcgagtgtatttattccaaacccagactgagaggtgacagcttcaagtctgctcgggaaggaaacacctcgcaggccaagcacaaaggggcttactcgtttcttttctgcagcggcagctttccccctccctcctgtttctccgctttccctcctttccctccaccattcctcgcccactcctgcccttcccgggtgggacacgtgagctgctttgc

SEQ ID NO: 5930 - DNA, 775 bp, Homo sapiens
  chr7:142985428-142986203
  hyper
ggcgcaggcgcaggcgcagtgtgcgtccgcgtctgaggggagggatgtgggggaagcgacggcccccggtttgtttgggctgtgggcggtgcgcagcggagagcccgggaaaagcgggaaatggcggcgccgagcgcggggtcttggtccaccttccagcacaaggagctgatggccgctgacaggggacgcaggtaagtagggaacggtcttagggctccttaggggagcccagggaaggggagcgtggcccccaggcgtgcggccctgcagccccctcccctcggagccccggaaagcagccgtgtccgcgcttcctgccaagggtgggacgcccgcccgagccgctccgagcctgactccgcgcaagggcccgcgggcggacctcttggccttgtctctcgtgggaaaagactgccccagcctccctttgttcaacccacgagggttctaaaggggaggtctttgcagtcctgcccgctcttgggttctcttgaagattcttcatcctttcctctggctcccttatgagggaaactataaaaagaccatactctgtctccttaaaaatcgacgagaccttctgcagacctcggtgctctgcctgatgtgcatttgatttgtatcgattgtatcatgatctgcatggctttgcatagaatgaccagattttcaaagaagtcaatacagggtttggaaattgagtacttttggcagaacaagggggttcctgtggctccgagtgtccatgcctctgccccggtcattccatttc

SEQ ID NO: 5931 - DNA, 30 bp, Homo sapiens
  chr7:142986414-142986444
  hyper
agtagaggaaggagcgggtgtgcagagggg

SEQ ID NO: 5932 - DNA, 167 bp, Homo sapiens
  chr7:143042706-143042873
  hyper
aagagatggcgcggaagttgtcggagctgccttacgacgggaaggcgcggctggctggggaggggctccccggcgcgcctccaggccggcccgagtccttcgcctttgtggatgaggatgaggacgaagacctctctggcaagagcgaggtgaccgcgccgggaagg

SEQ ID NO: 5933 - DNA, 30 bp, Homo sapiens
  chr7:143060022-143060052
  hyper
cgcccccctcctcccgcccgtgccaagccc

SEQ ID NO: 5934 - DNA, 107 bp, Homo sapiens
  chr7:143105719-143105826
  hyper
ggcccctaggaatgccggcttctgcaggggggtgctggccgggccccgggaaggggcggggcgcgggggttgggggcgcgggggcgggggtcggtaccttccttggc

SEQ ID NO: 5935 - DNA, 469 bp, Homo sapiens
  chr7:143105844-143106313
  hyper
cggggcgcagagcagcagcaccagccctagccccaggggccagcgccgctccatagctccgggccgggacctgggacagtggcccggatggcagcgccaggttgcaagggactaggagagccgggcgggccgggcgggggcggggggcggggccagcgccgggggcggagtcccggcctcacctggttcacctccttaaagggacagtagggcaggaaagaaacttgctagactggtaatcaaattcaagaaccggaggcgtcttgacccgaatgagactgcgggcgccgcctagtaggtgggattaagaattgacgaaccttttcccaattctaatcctaaactcaacccaatcttgatccagcttttaacctaattctacctctgacttgaattacactcctatattcctctttctgtctttgtgcaggccccagagctgggtaatagggccggggaaggcaagggg

SEQ ID NO: 5936 - DNA, 580 bp, Homo sapiens
  chr7:145812810-145813390
  hyper
ggtgttaggaccactcggaagacctgcctgtcggacgcctgactgtggttcccggggggccggagctccaggagcctgtaccatctttatctgaaggggaggagagaaggaaaggagaaggcatccgagcgagggtgttctccttcctgcagccgggtagggggcagccaggtttggagcagggttctaggattacacggcaaatccccaacttcagcaccgcggacagcatcacctcccgcccagggagaggcgcgcgcctccttgctccgcccccgccccagctgatggaccccggccggtcggctcagtctcccttttgctttcaaacgaggccagggcagggcagaagggttttgacagccagaggggtacggtaaggaggaggaagaggaggaggaggcggaggaggaggaggagccgaggagggaaccgagaagggaagagaagggagggcttccctccgcctcgctcgccgcccgggctcacaggagctggcggcggcggcggcggcggcggcgtctcctgctctccgcggctgttgctgctgctcgcgctccgccgcccgggagatgcttcc

SEQ ID NO: 5937 - DNA, 317 bp, Homo sapiens
  chr7:145813403-145813720
  hyper
cgctgaggccgtgcgtgcgccccggctgcgctgcgcgctccccacatacacaagctctccatgtgagctgacaggcgagtggaaacccctcgagtcacgctgcccggcggcggagggagcgctcgcccgcagtggcaacagctgcaccaccgtccccgtcgctctgccttcctcttctgcagcctctgctcttctgattacctccctcccccgtcctttggtgatttttttttttcaagaaggagagggcggggtaggtgtccgttccctcccctcttccccctcctttgccttcttggtttgaatttcctcccccg

SEQ ID NO: 5938 - DNA, 292 bp, Homo sapiens
  chr7:145813945-145814237
  hyper
cgccgccggccgggaggcgaaggatgcaggcggctccgcgcgccggctgcggggcagcgctcctgctgtggattgtcagcagctgcctctgcagagcctggacggctccctccacgtcccgtaagtagccgtctcctcgctctgctctggagcagtttcagtgcggcattgatgtttggcaccagggtatcaactccgaagtgcatcgcagtgctggcaccctgatgtgtttgtgtctccgctgtcacacacttgcagccactgcagtagacaaactcgaaacccagcgttt

SEQ ID NO: 5939 - DNA, 30 bp, Homo sapiens
  chr7:145815251-145815281
  hyper
ctactatataatatccggttatgagccagt

SEQ ID NO: 5940 - DNA, 30 bp, Homo sapiens
  chr7:145864150-145864180
  hyper
atagtgacaactgggcgcatagcagttgct

SEQ ID NO: 5941 - DNA, 44 bp, Homo sapiens
  chr7:145982009-145982053
  hyper
ttcttgtggtttcatcgcttgctgctgagcggtgttaataacta

SEQ ID NO: 5942 - DNA, 30 bp, Homo sapiens
  chr7:145984491-145984521
  hyper
gataagccttctgaacgtaacaggttgcct

SEQ ID NO: 5943 - DNA, 30 bp, Homo sapiens
  chr7:146072421-146072451
  hyper
atctgcagagacatgcggagaccagagcag

SEQ ID NO: 5944 - DNA, 30 bp, Homo sapiens
  chr7:146415862-146415892
  hyper
aaacagaaaaagtaacggtatctttctcca

SEQ ID NO: 5945 - DNA, 30 bp, Homo sapiens
  chr7:147729233-147729263
  hyper
gggaaatccgcctggaagagatgttctgga

SEQ ID NO: 5946 - DNA, 609 bp, Homo sapiens
  chr7:148036473-148037082
  hyper
ctctcccagtacagtcagatccgccgccgcagcctagcgctccaccccgggttttgcgtcctcccctcacctgcctttcagtggtgcggggtttgatcccgagagcggtggactcaaagctgcccgccgggactcgggctgccggccgacaaaggacggtcctcgggggttctgaagtctgacccggccagtgggaaagccacctgcatcacaaagcgaggggcacacctgaaccggggctggcgggaagaggcaagtattgcgcgcgggctggctcccacatggagctgcctcccggtgcaagtgttgcaagggtgcgctgctccagcccggggagcgcgggaggcggcggagagagcgtccgggtgatgagcggggcactgtaactggattttaacacctctgcaagcagcgcttttggtcaaaaaatttccgattcttgatcttctctctgcaaggtcgggggttctttggggagtaaatcacagcgtttgggtttgcattcgaagcactaccaagtctactccacagggtcactgcacggggagcaagtaaaggaaaacgaggagaatctgagagtgctccttcgtgcagtgtgtgtgtgtgtgt

SEQ ID NO: 5947 - DNA, 30 bp, Homo sapiens
  chr7:148506156-148506186
  hyper
accaacctgtaatcaaaaaacagctcttcg

SEQ ID NO: 5948 - DNA, 80 bp, Homo sapiens
  chr7:148506411-148506491
  hyper
gcagtttggatttaccgaatgatttgcaaaacgaattttgttacccttgcgggttgcatccaccacaaaatctaaaaaga

SEQ ID NO: 5949 - DNA, 90 bp, Homo sapiens
  chr7:148507423-148507513
  hyper
ccattgttcaagttgaacagaaagctgcacatgtatttatcatacactttccctcttctgtcagcttcatcttgagaaataatctaaaaa

SEQ ID NO: 5950 - DNA, 101 bp, Homo sapiens
  chr7:148508711-148508812
  hyper
cttacctctccacagtattctgagatgaattcatttttctgcacaggatctttgataaaaatcccccagcctgccacgtcagatggtgccagcaatagatg

SEQ ID NO: 5951 - DNA, 185 bp, Homo sapiens
  chr7:148511049-148511234
  hyper
cctttttggagccccgctgaatactgcagttcttgcaggacacatttttactgtcccaatggtcagcggctccacaagtaagacagaggtcagggtcacactctcggacagccaggtagcacgggcactgcttggtgttgcactgtgctttgcagcggcatcccggaaagcggttttgaccttca

SEQ ID NO: 5952 - DNA, 108 bp, Homo sapiens
  chr7:148512013-148512121
  hyper
ctacattgacaaaacttttcacaaaaattttgtgctatcacacaagggcacgaactgtcacaaggctgccgtggatgatcacagggttgatagttgtaaacatggtta

SEQ ID NO: 5953 - DNA, 35 bp, Homo sapiens
  chr7:148513817-148513852
  hyper
tcagcgggagctggagctatgatgctagattcttt

SEQ ID NO: 5954 - DNA, 122 bp, Homo sapiens
  chr7:148514300-148514422
  hyper
tcggatatcttacctgtctacatgttttggtcccaattaacctagcaatggcacagaaattgtcatagtaagtgccaatgaggactctaaacattgaggcttcagcaccactccactccaca

SEQ ID NO: 5955 - DNA, 77 bp, Homo sapiens
  chr7:148515085-148515162
  hyper
tggtgggggtgctgggcctgctactgttattgggaagccgtcctcttctgcggcctcctggacgttttggtggggtc

SEQ ID NO: 5956 - DNA, 201 bp, Homo sapiens
  chr7:148523535-148523736
  hyper
gaaaacgtacaataattgcacttacgatgtaggaagcagtcatatttaaaacatcgcctacagaaaagcgtatgaaaggagtgtaagctttgctctctctgaacagatttagcatttggtccatctatgttgggggtacattcaggaggaagtgcgcctgggagctgctgttcggtgagttctttatatctgacattaacc

SEQ ID NO: 5957 - DNA, 30 bp, Homo sapiens
  chr7:148525927-148525957
  hyper
cattcaccaactccacaaaaatttcatcat

SEQ ID NO: 5958 - DNA, 120 bp, Homo sapiens
  chr7:148526815-148526935
  hyper
tcacctctatccccgtgtactttcccatcataattttttattagttcttcaatgaaagtaccatcctgatctaaaacttcatctcccatataaggaatgttatgtaaaacagtttcatct

SEQ ID NO: 5959 - DNA, 30 bp, Homo sapiens
  chr7:148543654-148543684
  hyper
ttccaaaattttctgacgattggaactaaa

SEQ ID NO: 5960 - DNA, 30 bp, Homo sapiens
  chr7:148544315-148544345
  hyper
tcgcatgtactctgattttacacgcttccg

SEQ ID NO: 5961 - DNA, 30 bp, Homo sapiens
  chr7:148788313-148788343
  hyper
gggtggggggcgcgcgctgcccgcggtggc

SEQ ID NO: 5962 - DNA, 30 bp, Homo sapiens
  chr7:148845054-148845084
  hyper
acaccaggctgggccgcaggtctgaggggc

SEQ ID NO: 5963 - DNA, 30 bp, Homo sapiens
  chr7:148857608-148857638
  hyper
gttttctccattcccattaggactagccaa

SEQ ID NO: 5964 - DNA, 30 bp, Homo sapiens
  chr7:148892477-148892507
  hyper
ccccggtaggtccccgcaggcgggcaggag

SEQ ID NO: 5965 - DNA, 31 bp, Homo sapiens
  chr7:148936685-148936716
  hyper
gcacagtgaggaagagcggctggagccggtc

SEQ ID NO: 5966 - DNA, 359 bp, Homo sapiens
  chr7:148982134-148982493
  hyper
ggcggtggcagctggcgacacctgcgggctgttgggcaccagcccggggcgggcgctcgcacctgtcgggcgtgcacaaaggcccggcgcacgctgtgggggcggggcctcccgggttggccaatgaaaagctggcactgggtcggaggcgccagccaagtggggggcggagcttccaccaccggccaatggggatctggcttcgggatgtgggcggggtccacccggtcgcaacccgttgagtctctgcacagctgccgcgctgacgcgttttccgcgtgtcccgagccccggcggccccgcgagctcggtccgtgcggggaaagcagggctgacgccgtctgcggagaggactgcgc

SEQ ID NO: 5967 - DNA, 14 bp, Homo sapiens
  chr7:149112234-149112248
  hyper
cacccggatttgaa

SEQ ID NO: 5968 - DNA, 37 bp, Homo sapiens
  chr7:149112420-149112457
  hyper
cgcttttaccgtcacactccaacgcactttcttcccc

SEQ ID NO: 5969 - DNA, 30 bp, Homo sapiens
  chr7:149120634-149120664
  hyper
cctctgaggaccttgcgccagactctggag

SEQ ID NO: 5970 - DNA, 245 bp, Homo sapiens
  chr7:149411482-149411727
  hyper
ggcgcgggcgaaagacgtgaggatgtacgggggcctggcagctgctctgtcccacccacgcccggccggaccctcgacccctttcactccaggtcgggtttccccgaccgcggcctctgggaaagatgggtccctcttcatccccaccatcagcccctggcacatgggacgcgctgagtggtggctgcgggaatgaatgagtgataagcggcgcgtacccgcgggcttgcacgcccacagccgcc

SEQ ID NO: 5971 - DNA, 530 bp, Homo sapiens
  chr7:149411834-149412364
  hyper
cgcttccgagccggcgccgcggcgccttctgggaagtgtagtccgcgtctgcgccggccggccgggccgccgaagccgggggctccgggcggaaacggcaccacccaccaagggatgcgaggcgctcggggcgggctcaacgaggccgggggcgggcccgggcgcgcccacccccgcccctccccctcggcccaggcccccggccccgccttctcctgcgcggacctgggccgccgccgacgagggtcgcgtgcgcccgcgccagggcccgcgccggaaaccgaggagtggcggggaggctgagcccggggatggcgcgccaggtaaggcaggcggacgcgcggacccctcggcgcagtgcggccccgaaggcggtagggcgagaaagagctgggacccccccgcaacttcgggatcggctgggtgaggctgggcaggcctgatgctcaggggttcgtgccgggaagttcaggtcctcggacaacctctctccagctctccgccgccggtacccacggcccagtctccac

SEQ ID NO: 5972 - DNA, 30 bp, Homo sapiens
  chr7:149570352-149570382
  hyper
gcctctgcctggttcgctgcagatggatgt

SEQ ID NO: 5973 - DNA, 203 bp, Homo sapiens
  chr7:149570765-149570968
  hyper
ggacgccccgaaagaccgctggggtgggaccccaagctccaggggtctttggaaataagaatgcggcgtgacgttggctgtgcgggcgcggggctgacgcggaccctataacccatcgccgaaaccgggcggccgcgcccctattcctcggcatttctctctgtccgcggccctgctcagccaatcagcgagtgggctcctag

SEQ ID NO: 5974 - DNA, 31 bp, Homo sapiens
  chr7:149571412-149571443
  hyper
ctgggtctctgacagccgggaacaggcagga

SEQ ID NO: 5975 - DNA, 243 bp, Homo sapiens
  chr7:150497118-150497361
  hyper
ccagccagggtccaggcgtgcaggcggcagaaggtggacgggacgcgccagccccaggcctctcctcccgctctccagccgtttttctggggagaaacacctgcacccagctgtccctccctcctacgtgagtcctcctggaaaccaggttggaggaagaaagacgtcctgtggacaggacggggtgggggcatggccctggggactcctcgtgacagagggtcctgcggcaagagggtctcc

SEQ ID NO: 5976 - DNA, 121 bp, Homo sapiens
  chr7:150497654-150497775
  hyper
gctggaggcgagaacgaccccacgggctttcccagggccgtccgcccgcggaccctcccagctccccagagcccagtgaccctcgcgcagcaggagaaccccagacggaccccaggccctg

SEQ ID NO: 5977 - DNA, 30 bp, Homo sapiens
  chr7:150595720-150595750
  hyper
aatgctgtctgccacgcgaccaccaggtgg

SEQ ID NO: 5978 - DNA, 875 bp, Homo sapiens
  chr7:150671456-150672331
  hyper
cctgccatcccagctcggtctaactctagtccaacttgctctacgtgcccacacctgcccagggaaaaaaaggaccagaggagccagacccacagcctagcaactcctttgccctcctgaaaaccatctcagcagagtgaggcgcaggccccggaaccgcgcctcccacaggcacaccgcagggcccccgcccgcgtcacacccccacagaaccctgcccgggctcggggcgttctccagccgcccccacacccccacacccccacgcaccctgcccctcgccgtggtcccgcccctcttgaccccgcccctggtcgtggccccgccccggcccgctcctaccatctttccggtagaaggcgatttccactttgcgctcctcggcgcccagcagtgcctgcgcgatctgcgcggcagcgcggcgctgcgtgcgcggcccgtgcaggaagtcgcaggtgcagggtcgctgcatcacctcggcccgcgagtagccgcacagctcgcagaagccgtcgttgcagtagatgacggcgcagttctccacccgagcgttggcgatgatgaacttacggcctaggggggcggggaggagagtgcgcgtgagcggggaccccagcctccgggactcccagcccttccccacattctccactcacacagccgcccggggactccccgccacaggaagcatggctgggactggggtcccagcagggggcgaacgcagctgtgcgtgtgccccgatacaggtgcctggccggccgggccgcgcggcgcgccccctcctccgcctggcccgcgggcgggctgcgtggcttcccccgggcaggccgccagcagcccgccgcctcctccatgcccgaggctgaggccag

SEQ ID NO: 5979 - DNA, 646 bp, Homo sapiens
  chr7:150715666-150716312
  hyper
aaccaacacacaccaccaccccgggcatctgccgtcgcacctggcgacggtggcggtgaccccgagcgcggtcatggcggtgagcacgtgctccacggctagcacgtcctcgtcgtagacggtgagcacaagcagcgcggcgaagagtgcacccgcgaagaaaacgagctggcgggccagcagcgtgcgcaggggcgcggggggcgcagcggtgcgcaggaaggcggcggcggggcggtaggcgcgggccaggcgcgcgcgcagctcgtgcggcagctcgttgaagtggcgcagctgcaagcgcgccaggcgggaccagccgcgcgcccccagcgcgccaggctcgcgccgcagcagctccacgtggctatagaagacgtgcagaacctgccaggccagcaccagcgggctcagcgccaggttcagggcggccagcagcagcactgtgcgcccccagcgcgctgctagggcgccccgctggtcgctgcgcttgtaggcgtgcggcagctcccagcccccgcggaagagcgagaagggaccgcggaagagcagcaggtcgacattgagcgccaggccgcggctgaggaaagccgcactgcctccccagggcagcgggcagcgggccggcagcaggcctttgttggcc

SEQ ID NO: 5980 - DNA, 30 bp, Homo sapiens
  chr7:150725068-150725098
  hyper
cccagcagttctgacgcacctaggagagcg

SEQ ID NO: 5981 - DNA, 30 bp, Homo sapiens
  chr7:150755882-150755912
  hyper
tatagattcccttacgctgcctctctaatt

SEQ ID NO: 5982 - DNA, 30 bp, Homo sapiens
  chr7:150778122-150778152
  hyper
gaggactccccgcccgccagcccgcacaca

SEQ ID NO: 5983 - DNA, 88 bp, Homo sapiens
  chr7:150784081-150784169
  hyper
ccatctacgacctgatcgagcgcatcgaggatttggcgctgcagaaccagatccgggagcacgtcatctccatcgagggtgagcggag

SEQ ID NO: 5984 - DNA, 44 bp, Homo sapiens
  chr7:150784694-150784738
  hyper
ctgaggctcagcgaccgcgtgggaggcgccggcaggtccatccg

SEQ ID NO: 5985 - DNA, 30 bp, Homo sapiens
  chr7:150784985-150785015
  hyper
gtgctggaggcacccgcaggcaccccggtg

SEQ ID NO: 5986 - DNA, 16 bp, Homo sapiens
  chr7:150864380-150864396
  hyper
gttggtaaggcggccg

SEQ ID NO: 5987 - DNA, 34 bp, Homo sapiens
  chr7:150869803-150869837
  hyper
cgcacaactgcgggcacggcgaaggaggtgcggg

SEQ ID NO: 5988 - DNA, 355 bp, Homo sapiens
  chr7:151038573-151038928
  hyper
gctggcaaactgagcccgggcgggaagtcctggaagactgagcctggggtggcgttggacaccaactcccaggtcctcgccccacacggccacatcctcgcccagccccgcctccgcttagctccgccccgtcgcggctccgccccgcggtaaccacgcccacacaaccgtatccccgcccacagctggcttcgccttggccccgcccacaaccctctttccaagcggcggcggcggcggcggcgcgaaggcgacagcggcggcgggggcggggctggcctcacccggaatgaaaacaaacggcggccgctgccgcatccgggcactctgctggtcgcggcgggagtggcgtggc

SEQ ID NO: 5989 - DNA, 235 bp, Homo sapiens
  chr7:151106753-151106988
  hyper
tacgactgcggcccgcggccatcgcggggaacggggagcccgactcctgcggaggcacgcggcgaggggagggtgaaggaccctagctccccgctgcctccagcctctgggcccgcgaacccagggcgctgcggggggcggcccactcgggacctccgccctgggtagagtcctgggcgcgcgggcagagagaacccccttcccagcaccgctcggaggatccacaccccaccgg

SEQ ID NO: 5990 - DNA, 238 bp, Homo sapiens
  chr7:151107395-151107633
  hyper
cgcgcgccgggaactcatttggggcgcagctccaccgacccctcggctactcgcctccaccaggcaagccaggtcctcccatgctctgagccctaaggactctgcccgaggggctctcggggacttgggggcggtcccccaatggagggtgcgacagggaaagccccgagtccgccctccctgggaaatcacgcgcacacccaggattctactttggtctggccggagtggggatgag

SEQ ID NO: 5991 - DNA, 252 bp, Homo sapiens
  chr7:151136925-151137177
  hyper
acagggggcgaaggcggagccccactcggtttccttggggttgagggacgcactcaccttccccgagcgctgcgccatggtgcgccccgccccttccgcgggtccccgtttacaccgggcagcgccctgctggctcagcgccgccccggacaaaagatttgctgggccggccccggagcgttagtgctgtcgggcgtgctaagcccgaggggccaccaggcggttgggacccgccgcggccaccctgtgcca

SEQ ID NO: 5992 - DNA, 116 bp, Homo sapiens
  chr7:151573023-151573139
  hyper
cggcagaggagacccccgctccaggcccagaaacgcccggagagaaactggagcggagggggtgcattggaagacgcagctacacagctccccccaacccccgccccgctgctttc

SEQ ID NO: 5993 - DNA, 693 bp, Homo sapiens
  chr7:151722450-151723143
  hyper
aacacagatgcgtgtcgccgcgcaatgggcacagcgcatacagcgcagagctcccgggctcaagcgctgctcccgcctcagcctccggagtagccggggccacaggcagggcatttgtcattaatggggtcttttgagaccgcgggtgacagacaacaggagccaggccacgcgcggcgcctctgcgcgaacgctagggaggactcagcgcgcggcggccggtgacgtcagggcagcgagaggtttcgtcaccgcggcgcgggggcggggccgcctgtcacgcggcgccggcggacgcgcggcgctgggcggaggcagcggctcggggactgggcgagggccctgggcctgaggaggcgcggccgccactgcgcccagcgcctgcgcgacgcctggctgctgggccccggggcagttcagcccgcgccgctcctgcgggtcggactggggctgtggcgggagagaagatgccgcagcccgagtcccagaaggcggcgatcctgggctgcgggcaaggcggtgagtaccctctaggcggcggcctcccggcgtccctcagcacctcgagagctgcggcggcggcggcgcgcggggcctgggcaggctgggggcggcggcggggcagcgcctggctccccgcgggtcctgggctcccgcacgccccctgggcgaggctcgtgtctccgggagacg

SEQ ID NO: 5994 - DNA, 68 bp, Homo sapiens
  chr7:151723167-151723235
  hyper
cgtctcctgaggcttgttcgcgggcgtgggggcgaggaccagggcgctggcctcgttttcgcgtattt

SEQ ID NO: 5995 - DNA, 33 bp, Homo sapiens
  chr7:152133405-152133438
  hyper
gtggcggcgctgggcgccgggccgcggctcgct

SEQ ID NO: 5996 - DNA, 31 bp, Homo sapiens
  chr7:152160442-152160473
  hyper
acctggagaagggattcgctgctgcttattt

SEQ ID NO: 5997 - DNA, 30 bp, Homo sapiens
  chr7:153583852-153583882
  hyper
ccctagccttcccccgcttcccctccgctc

SEQ ID NO: 5998 - DNA, 33 bp, Homo sapiens
  chr7:153749741-153749774
  hyper
ggaggagcggccgccggcgctgggcttgccttg

SEQ ID NO: 5999 - DNA, 410 bp, Homo sapiens
  chr7:154861684-154862094
  hyper
tccagtccacccctagagggacgtgtgggggtggctaggggaacgttttgaggaaagttcattggtcaacttgttcaacgtggcaaactcatttcaggcaagagaggcagcaccgtggacagcgccaaccctcctgctcccgggcggggcgaggtggcagcaccgcggacagcaccacatgtggtggcgcacactgggagccgccaggcgcggggagcgcagcagcaccgcggacagccccaaagccgcgcgctctgagccaggaggcggggagagatggccttatcagctgatggcttacgtagggctagatctccacttggataaggcaggtctcggtgggcgcgccagcattcgctctccggagctgcagcctccgaaggggtggcgggggcaacagggacagaagg

SEQ ID NO: 6000 - DNA, 1230 bp, Homo sapiens
  chr7:155164456-155165686
  hyper
aaggcgagcggaccgcgctgcacgggtccaggctgggtgcccctctcccctggggtaaagaggcagcacaggttgggacagctagatgggggcaatccaggcgtcctgcccacggtttcctgggagccaacaaaggcgccgagacctcacccgtgtgaggcaaccgccccgtggtcccacagagcttctggaagtctgcgtcccggccttcccgatgcaaggcgccctctccacctgcctcggccgtgagcaggttcaggagggcgagaaaggttaggccgagcggaaccgcgcggccagcgttacgcagggtgccctggacacccctaggcgcccacctggacttgttcccacctcctctcgccccttgccttcttaacccgcattacccgtgtaggcctggggtggaatcggactacttgttcgggatttgctcgagaacattctagggagaaggcacgcccggctttgggcttggccgagagtttagggcaggagcgccggcggggagctccccgggtgctggagaatgcgtgtccggaaagaagtagggcgcgcttcgtggatgcaaccagggccgtctcgcgcactttcttcctaccctgggacagcgcctgaactggagctgggcgcacacactttacggagccagctcgggttcttacgccctggctcacccccgcccgccgccccaggatgcaggtgctgcggcgctccctggtagcctcccgcgctccctgggggcgcgctttcctccatttcagggaagtccccggacaggtgcccacgttttacgctgtccggtagaagcccgcgggctcaggccgacttgcgcggccgcttctccccagggagagaagctggagcttcccccacgcggccctaaggcggggccggctgggccggagtgggcgcggccagggtgtcccagcgcgccccctgccgaccgcgcgctgcggggggcaactccacctcccctggggaggcctcgtccccgctgcagggagactaaagcgtgggtccgcgaccagccggtttaggaacgaaaactctggaactaaaaacaaaaaataaaactggtgagtgcgcagcgtggtcagtgtttccctctgggtaatgcttggccaagggggaagatcgagtactcccgcccacatccgcctcccccaggagggaggattccctctctgctcacccaccctgacccacgcctcccgccaggtccactgc

SEQ ID NO: 6001 - DNA, 370 bp, Homo sapiens
  chr7:155165911-155166281
  hyper
acacggggcaccacacgagaatcaccccctccccagaattttgcaaagcacgtttgctgagttttctcgcctttccttccgacaagctcgaactggaaccagcgctctcccctctagacctgcctccgcgccccacccttcttcccccacacagtccctccgcagggagaattcaggtgctaaaaatgctcgggcctcgcagcttcctccctcctcctcggttcctcgaatgacccaagctgcctctttccgggcccttggaagacggtgcgaattccgcggcggcccgctctcgccagcgccacagccctgactcccacccggaggcctgagttcaaccgctttcgcttccttgcgggccgttcaaccc

SEQ ID NO: 6002 - DNA, 30 bp, Homo sapiens
  chr7:155166486-155166516
  hyper
aacaaaagcaggcggcggacttgcagtccc

SEQ ID NO: 6003 - DNA, 7 bp, Homo sapiens
  chr7:155167082-155167089
  hyper
cggctac

SEQ ID NO: 6004 - DNA, 464 bp, Homo sapiens
  chr7:155167174-155167638
  hyper
cgctggcgaggcgtttcttgtccccggcgcccgctcggtgccgtctcagtgagtttgattgaaacgcggctgcgggaaggggtcgacagaggcaagctgcgagcaaggcgggggtgggggcgaggaaggggacccggagagctcccggagggcttggccggccaccgccgcgcggcgctgctcggggactgctactttgcaaggcggcggctgcccctgcggggttcgggttgcagggtcaagtgtcacgtcctccgcaatctccaatattcctgtaatgtatttaaatggacgaattcattacgcggggccgtgtgaatggggcgaggccgcgagcgcggcgcgatcagtagcgcccactaacagttcgttctgcacggcggagcgcgagaccgcggacccacggaagccccctcaatggtgtttgcgtcctcgccgccaccggcttggtagggtcctttagg

SEQ ID NO: 6005 - DNA, 337 bp, Homo sapiens
  chr7:155168225-155168562
  hyper
agccagccttagcggcggtgacagcttcctcacggtggtcctgcagctggagctccagagaaagaagggaggaagcacttccggaagtctctgccaagagattttaaattgtgttgcctgcggattttgtggttgaaagaattacctggtgacttgccaaatctctgagtttgttgaaaggagatgacctgcccttagaaacccctccattcctgcctacctccgagaccagaggctgtgcctctctttctcttttctttcctagtccccacaggagggaggaggaaggttacagcgtttgtggaatcaggctgccaggcgacgtttcgtggttgta

SEQ ID NO: 6006 - DNA, 644 bp, Homo sapiens
  chr7:155170270-155170914
  hyper
gatttcccctgaacaggctggcggtgggaagcaggcattggagtcccacggctcactggactgcagcagcgagcccttcacggttgcaaaggaaggaaattcctagcggggcaactcttcagcgtccgccccacagacctagcacgatgtccttttctgtctcaagatacatctggctgggcttccctaaaaccgggcttagttggactccttggacctggggatgaattcttgccaactatctccaaatatttcccctacaccatgccagtgcaattcatgtctccaaaccccctctcctccacaaaaacgaaacaaaacaaaaccccaggtccaggagctcaggcccaggccggatccaagacgcggcagccaggcagccccgccgcgagcctgtgcgggcttgagccggcttggcccccggaagccccagccccgcgctcggcagcgtgcgcccagcgcccagaagaagcagctccaggcggccgcgctccccgtcccgccgcggtgcggtcggatgcccagctcgcgtccagacccgcgggatgcagacccggatcagtcaggcttgagggctgctccgcatagaccaacgtccggggaaggcacacagtggccgagggcccgcgcgcttgggctacggc

SEQ ID NO: 6007 - DNA, 805 bp, Homo sapiens
  chr7:155174107-155174912
  hyper
tttgaaatgtcatgaacttggcgctttcagaccaaaccgccgggctcaggcccgagacaatgggattgtcagagggccagcgcggagctttttctgcgtgttcacggagcgttaagcctttatcccacagaacggctctgtctgaccgggtcagacaaaagccaacttgcatcttccgctccgaggggatctgggcagagcccgggtacagccctgcgcggccccagggagaggggggagagggcgcgtgtccccagccctgccaagtggcgtggggagcgcgaggccctcctcggtcagagccaccaactctggtctccgtggacatcccccttcccccgcccgctcccgaggctctagggcggcctcctggccgctgccttctcgcacccagggtcttcggcctgggctccacacctcaggcccctcaagtaatcggcctcttggtggccgggcactgcctttccggctgctctctgcacccgtctgcccctccggcctcccctggcggctacaggcgtccggggccctcgctccccagctccaggcgtcccgggagccaggcgcgcagcggggcgagttctcgtgtccgtgtgagcgcgggcgtgtgtatgcgtgcgcgtgcacgagcgtgagtgtgcgtgagcgtgagtttgagtgtgcatgcgggtgtgaatgtgtacatgtacacgaatgtgagtgtgagtgtgcatgagcgtgagcgtgcgtgtgcgtgcgagtgtgcacgagcgtgactgtgagtgtgcgtgcgtggaagcgcggcggggagcctggctgaaggcct

SEQ ID NO: 6008 - DNA, 826 bp, Homo sapiens
  chr7:155241442-155242268
  hyper
cccgccctgttcaagcgcggaggggcggaggcctggttgggttgtagcgtggtgcggagcaggacgccgcctcgtgccatggtcactggagacgcacgcccatcttccctcccgggcccgtcgatcctgccatcttccgctcccggccgctcgtgggtgttcgtcatttagaccttccccgtgcttcatgggacgcaagccctcccccagagttcggttttgcaaaagaggtctggagccctcgctacagatcccctccctgggccacggaggatgagaagggtcaccgagccgagccgtaatcctgcgtaacccctgacctctctccttccctgcccccacggcaccccatcgtcccctccccgtctccgaggtcctccagaaaacagcgcagaattgtgcagatgtttaggagatgtgaagatgctggagatgcttaggaggcgacggttacgcgaggagaattgcttccaggtgcgcttctggaacgcacggagatcccccggcggggaaggggccggggctcgcgtcacttagtgtctgctcaccgatttccctctgaagagggggcccagggcctctgctgagggagcggggaggcggtgcgggcccctcccgggcacacatgggtgtccgctccttcctccccctcccctcccctcgcacggagagcggagagcggagagcggagagcgacagggaggcagccgaagacttgaattttgaaaggggagctggcggcgaatggtgaatgagacagctacttaggaagcgagtccagccagcccgggaggcggtggagacccacgcccggaagtaaccggat

SEQ ID NO: 6009 - DNA, 834 bp, Homo sapiens
  chr7:155242699-155243533
  hyper
cgagccacgtcccgggacccggagagcccggggcgttgggcgctgcggaggaggcccggcttctgtcgctcccttcacctcccagcccgcgagggacttgggggaagggggagcaagctttcgctccggaagaaacgttcggaaccaaggagtctgactcctggatccgggtgcctgttggatccaggctcccactcccgggccctccggtcgaaccaagggtcccgacagggcccgaggcacccgcattcctaggagacaggagctcggccagggcgcatcaccgggtcctgctccgagccagaggatgtagtgtagacacccacccccacaccgcccctccacagagctcctctccccttggggcgtcgctgggcacagggcaggtcgctaggaatccccagtaaaaccacgctcgctcagaggttcgcggcttcctcagagggcgctggggaaagagaggggacctgatttcttcgaccctcggaggaaaagtgctcggggcctcctagggacacagccctggaagctcacctcatcttagcttaggccgcggcgaggtggggaggagagttaggagagggggagaggggctctgcgccctgcagaggcctttaattctggaggaaaaagactgggacacacccaagcgagccaaggcccgagccccacgcacctccacccacccggggcggcgcacagccagctcctgccgggcgtgagcactcgatcaagggagcaagtggaatgaaaatccagctgggggggtccccatcgacacaactgtcccgcagtcgagcttctggattcctgggagatgtggagagcctgggg

SEQ ID NO: 6010 - DNA, 681 bp, Homo sapiens
  chr7:155243755-155244436
  hyper
cggttttgttttccaggggtagtttctgcagaaaggagattctcctccgggccgaagggctaccagcctgcagtcagttcagccccggaccctgggagatgctcaccactctgcggatcttgatccgaaatcctttctggccgcccactgcggagagtgtcctcgtagagaggttttcaatcgaaggagcctgggctccacattttgtcttcaagcctgagctttcagggctgctttgcacgaggtgcagatgaacttgtgtctgcaaacaagacagaaaaccctaagtgccgcccgaccttcctcttttggggaacccgcactttgtcctgggagcgtgcccagcgccttagtaccaaactttctggccggggctggcagagctcagagtcccgcttccccctaggcgcggccccctaacatctgtaacccaaatgttgcgccgcggccaaaattagccctggcagtgcgaacagagaactaaaagcaggcagtgaatgagaacagctcgcatttctccttcctggtagacggggaggtgtaaatcccgaggaattctagggcattcgctccaaacgtgggaaatcttcgcgcgtatcccgtttcttcctcccagcctgtgttaatgctccaaatggtgtcgagttgctcaactttgccgtcatcacagaggctgttgtg

SEQ ID NO: 6011 - DNA, 31 bp, Homo sapiens
  chr7:155244946-155244977
  hyper
gtcaattaaagatgctcgtgctaaagaaacg

SEQ ID NO: 6012 - DNA, 142 bp, Homo sapiens
  chr7:155246458-155246600
  hyper
cagagcttctgtccgcgccaacccacccaccaggctctgcccgcgccacgcgcgcccctggcaggcctggggcggggaaaggcgaagcgctgggcacgcgagggcctgtgcaccccagttcctacgacgctcctggcccttt

SEQ ID NO: 6013 - DNA, 575 bp, Homo sapiens
  chr7:155246904-155247479
  hyper
ccccaattccccgcccggcgcctggggcttggctgcggggctcggctcccagccgagggcgcagggctggccaggcctgctttggctgaggtggagatctcgctctcagggattgttgggcgtctctgccccgcgagtaacgagaccgccgcgagcgaacggctttcattgagtccatttttccaagtgtcaccacgtcaagctagagaagcgaggcgagtggaggggacgcagaggggccggaaaagtcacccttctctggcctcgttttcagataaaaacgggagcctggctcggcatccgggcgcccggtgtctccggggcgcttcactgaggttttgtttgcaaaactagcgtccgtgtcctgaagcgcacggcgtctggaagctgctttcctgctcgccctctccgaggcccctctttgtgcagcgagcctgagaaatatggaggaccgtcctccgcaagcgggtggtcgcgggcgctctccgattcctgggtgaagctagagggaaaacggggttcccgggtcagtgccccactttccatcccgggagaaactaatgtccggagagggc

SEQ ID NO: 6014 - DNA, 383 bp, Homo sapiens
  chr7:155247650-155248033
  hyper
cggccgaggccggtcctcatgcgcgcttctcgaagcttcctgaaacaccttgcggagttccgtgtgtatagaactcagcaccgcccagcccctgggcagctcaactttctgcagccccatcccagcttccccggccctttgaacggtgacccctcttaccgctttcccagagttgtttcgtgtttgggtccactctggggggcccggtaccctctagttatctctctcttcatttatttctctttctcctattcctccctccacctctcaccttcctcctttccaggagagcgacccacgaattcctcttcctccagccaaccccagggcccagcccgcagaccctgcgagggcaggtctctgcccaccggcccgccaggcgc

SEQ ID NO: 6015 - DNA, 726 bp, Homo sapiens
  chr7:155249577-155250303
  hyper
cccgctctttcggatcgctaagcatgtttcatgagggtcgctgtccccgggtggaatgcggccgtatgcacgcgcctccctgcacacgcacacacacgcacacttacaataagtgtctgcaggaggagtgtcctgcgcgccagctctgcgtttaagacaggaagctgccgggttaccgagtcaaatgggagtgacactattcctctccatcagcaaggaaagcggaccacaaaagtccctttgtatctcggcagctcatttaatattatttatgcattttgtgcaaggaattgtgggatttcgccccacggtaaacaatatggaaatcttaaaaatagcgatcttcctgtgcgtgtccacctacgcgccccggggtgacctggcggggctgtcgccgggtgactcacacccctgaaccgcgaagcgacagggaaagcgcgggcgagcgcaggagacgcggtcgggggtctctccgggttcctgggctcccgcacccggagcgggggacgcggccgctttaaggggaggaggggcggcgggctgctcctgtcacccagcggcggccggagcgtcacgtgggcgcgcggcgccgcggccattggcccgaggcacgtgtccaggagaccggcctgcgacgtcactcgagggggctctgttaaaaataagaacaaaaatccagagtgaaagtgtctcaggttgcgccgagtggcctggaaatttccgagc

SEQ ID NO: 6016 - DNA, 55 bp, Homo sapiens
  chr7:155250323-155250378
  hyper
cgagggcggcggacggccggggagcgcgggcggcccagcccggcccggccgggcc

SEQ ID NO: 6017 - DNA, 233 bp, Homo sapiens
  chr7:155251025-155251258
  hyper
tggaagggcgtccccggagaaccagtgtgggatttactgtgaacagcatggaggagaatgaccccaagcctggcgaagcagcggcggcggtggagggacagcggcagccggaatccagccccggcggcggctcgggcggcggcggcggtagcagcccgggcgaagcggacaccgggcgccggcgggctctgatgctgcccgcggtcctgcaggcgcccggcaaccaccagcac

SEQ ID NO: 6018 - DNA, 203 bp, Homo sapiens
  chr7:155251346-155251549
  hyper
cgggaggaggaaggggcggcggagccggcggcgaaggcggcgcgagcggtgcggagggaggcggcggcgcgggcggctcggagcagctcttgggctcgggctcccgagagccccggcagaacccgccatgtgcgcccggcgcgggcgggccgctcccagccgccggcagcgactctccgggtgacggggaaggcggctccaag

SEQ ID NO: 6019 - DNA, 193 bp, Homo sapiens
  chr7:155251661-155251854
  hyper
cggacagctcgcaagccggcgccaacctgggcgcgcagcccatgctctggccggcgtgggtctactgtacgcgctactcggaccggccttcttcaggtgagcccgcggggaccacgcgtcccggctcgccgcggggaggcccgcggagctggggggcggtgctggcgcgggaacttaccgggaggaaaacatc

SEQ ID NO: 6020 - DNA, 112 bp, Homo sapiens
  chr7:155251890-155252002
  hyper
cgacattgtgtgaagctgacgccggcccgggcagcggccaggagtccagcggcaggactgattcgctagggggtacagacttcttaggaccgcagaagggaccttctttctt

SEQ ID NO: 6021 - DNA, 387 bp, Homo sapiens
  chr7:155252686-155253073
  hyper
ggactgtttgaccccgagctggcagcggatccccgctgcccccaaaccctcaactattttgcgggggtcatttgcccagatcacagcaggagtgagccaacccttgggccgccatcccgcagaactatgcgtgcatatttctgatgaaattcagatttctcagctagatctgaaatttgctccattgttctcgtcttcctcctttgttaatatttaattaacatacaggctcacaatgccgggcgaggagactcggccgggctttgtgcggcgcgggagttcgctgagccagcccccaacggcccgggagctgggcagcaccgcccggcccggcctggcccggcccagctcagcccagcccaagtcgcctatcttcatgggctttaa

SEQ ID NO: 6022 - DNA, 145 bp, Homo sapiens
  chr7:155257753-155257898
  hyper
aggaggaagtgttcaaaactacggtgctattccagtgactacatttttttaaattttgcgaagttcaacaggtctccctccggctgggtgctcactggccctgccacccgtgctggaccgaggcgctttcccctggggacaggaa

SEQ ID NO: 6023 - DNA, 30 bp, Homo sapiens
  chr7:155258414-155258444
  hyper
gatggcgcgagaccacgcattccccgcgaa

SEQ ID NO: 6024 - DNA, 140 bp, Homo sapiens
  chr7:155258937-155259077
  hyper
gggctctgcgtgccgcggatctggacccggactgcagacaccgccccacgactgggcccccggccagactgttaccccacaggaggagggttccctaagtgtgcagaagaggaaagctcatttataaagtccttgctcct

SEQ ID NO: 6025 - DNA, 503 bp, Homo sapiens
  chr7:155259119-155259622
  hyper
cgccgggcccaggctgagcttactccacactgctccatagccgggcagagactccgcgagggtctgggagtcctggcctcggaggacccgccgccctgcaggcctgcccaagcaggcgcccccgcgagagtgcgggacagagagggcctggcggggctccttggcgctgagagccctccttctccgctgcacccagctctgccaacggggctggatgagtgggggctggagtcagaatcccagggtctacacccgccgacagcagcaatgccgacccgccctgcctttctcctaaggagcggagggaaggagccatgtgaatgaccccagcctgaccaccaagagggcgccagcatttctgttttcctagagtgaaaaggtcaaatcgatgggggctcctacaccgctggacacaggtgcgcccgggcgtccagtgcgcgcaacacacgcccagacactctatatgcaaatatgcctgccgccgcggagccggccgggaggca

SEQ ID NO: 6026 - DNA, 124 bp, Homo sapiens
  chr7:155259833-155259957
  hyper
cggggattcgccgggtgaggcagaaatcagcctccggggagatgggtccccccttcccgacgcgcccctgcacacactgctgccccggcgccgggcctccgggcggggacccctcttccgggca

SEQ ID NO: 6027 - DNA, 852 bp, Homo sapiens
  chr7:155260038-155260890
  hyper
cgccggcgggacggagagtggggtcccccggaccctgggtcgggcaggcctggcgctggcagctctgttgcacagatttgtgagcgatgctggtggccgcattgccgcgcggcgcgaaccccaagtagaccattcatgtttttattaataatctcaaacacttcattatatttatgctgcctgcccagagaaaataaaaggccattcttgaaatcgcctgaaatgtaataatattcattaaagcgcctcctaattatgtgatttaatcaagcgtggtgcgcccgcgctctcggctctcgctggaaaggctggcgatgacggttattattactgctgttgttagtggcctcgtgatagcagccggccagctcttcagtccaggcccagtttcctcagagagactcggggagccccactttgagggatggggttccccggaacgactccgaagtcccggagaccaggcgcggcccaggccctctgcccttctccagccccagccccagccccagccccagccccgggcaaactcttccaggccgagggcaggactttctccagacccttggggccctctgtgtcccctggggacgcccgacccggctttctaggagggggaactccgggtcctgagcccgggccccgccccgttggctgttccgccccctccagggctgagccccgcgcaatgcccgaagcagaaacaaagagtcgccgagatctgcctcctgggccgccttttcaccccctcagcctggaaggcgtcccagagaggccccacccccagcctccacggagacccaggagggaagaagagccgggacccggtagccctgaggggctgccgggcct

SEQ ID NO: 6028 - DNA, 347 bp, Homo sapiens
  chr7:155261070-155261417
  hyper
cgcggtccgggcgcgcgctgcctgcgcggaaggagccgcctccctcctttcagcgaacgcattcggggttcccccctcccgccaagtcctttgtctggaaggggactggcaggctctgtcgtcgccgtgtgcccccctcctttccccagcctctaccccctccaactaactttcctttcttcccttctcttttcttccctctctggatgggtaatcacaggctccgctgccaagcgcgctgcgaggagccgctgcccgttcccgtcggtgcccctccccgcggcagcctggccgagtccgcccagcctgcctaggacgtccctgacccgcgcgctcagtttcattca

SEQ ID NO: 6029 - DNA, 30 bp, Homo sapiens
  chr7:155262475-155262505
  hyper
caatgaggcatccacgctgctgcttaggag

SEQ ID NO: 6030 - DNA, 630 bp, Homo sapiens
  chr7:155264016-155264646
  hyper
tgcatactgcctcagagtaggcgattccaccagtgactcatcactcgcagagagaaaaacatcttttatatgtagagacgggaacgcgccctgtggattcagagccccaaggaaacaaaaacagcacgtcagaggaagaatgtcatacaaacccgctggagtcacaaggcaaaacagcccccatacctaaacgcccggcgtgacaatggcctttgtgcctggcgccgtcggggggagctgggcgcctagcgggtggggcaggcggaagttggacacatttccacgcaggtgaggccatccatggggtgatgcgggtgttggggctcgctgctttcgctccatgaagatttgcagccccccccagccaacccaccccatcccttccccccacaagggtatttcatccacactgttttttaaatgcttcctagtcaaacttgaatatgcaatgagacgcgggagctttgtggcggaaatataattaaactggggaaagatgtaaaagctgaagaatgggatgacatcaggctgatttcacactcggcagtcggatcgctgggcccaagccgcgctcttgccacgcaaggcagatcaaagtgccctgccaccgctaaaaaggcaaaaggggac

SEQ ID NO: 6031 - DNA, 492 bp, Homo sapiens
  chr7:155302403-155302895
  hyper
gaaggggctcacggacgggcgccccatctcccaggcgggctcctcggctgctttctttgggaacagctggtgcacgtccccgcgcgcccctctccctccggaattcggcgaggattcagctggaccctttggccaccacctccgccccgggcgcgggtcaaagagcacccctcgcccttggtaacggagacaaaacgttcggggccgtctagacaggtcaaggtgcaggatgcggcgtccccgcggctccttccggaagggggcgtggagccgccaagggcgccggaccgcgccgcagcccgggcctttgcgggctttttccctctccaccctctgctgatcaaagtaggaagtttgcatgacaaccgcagtgaaaggggctgaatcacaaatgaactcgatttctgcagtgttgatctatccagcctccattgtcccctttcaggcgcagtatgaacccttccggtgccagcggccgcgctacattcacag

SEQ ID NO: 6032 - DNA, 208 bp, Homo sapiens
  chr7:155302963-155303171
  hyper
cggcggcgtccccttgaaagcgcgggcggagggtgcgcttgtgttcttgagacccaggttccattacaaaccacccagcatcgccaccggcgccccccgtttcaataaggaagccactttgtcaaaacattctaaaagaaacttgggaagaggacgcgtcagagaaataccgccgccgattaactatcagctgcgcctcccctgtgca

SEQ ID NO: 6033 - DNA, 314 bp, Homo sapiens
  chr7:155326129-155326443
  hyper
gtgaggcctgcacagccacctcgccgcgggtgcagggcgcgcctcagaatgacagcgaggtgcacgctccggcccgcgcagagcggggccagctccgccacccagcgcgcgggaagccccgcagcaccagcagggcccgtcgcttcgctccgtcccggtccggcgtgaaacccccgaggggaaaagcgggtatcaaatgtgaattccactcgtccacagcgccgggcgttatgaaaatctgagcacctttgaccggagaagcaatagctatgggattaaggcgaatttcttacggagaggagaaagatgtgcag

SEQ ID NO: 6034 - DNA, 30 bp, Homo sapiens
  chr7:155326698-155326728
  hyper
gaggactggaagcccggggggaaaggtccc

SEQ ID NO: 6035 - DNA, 165 bp, Homo sapiens
  chr7:155580761-155580926
  hyper
acaccatctgtgtccacgcagagggtcgggccgtgggagccgcgagtgtctggcccacacttctgttcttaacctcgcaatgtattcaggtttccccaggcggagcgctcagcatatcgacagctaaaaatccaaccaaggccgggcgcggtggttcacgcctgt

SEQ ID NO: 6036 - DNA, 86 bp, Homo sapiens
  chr7:155600849-155600935
  hyper
ccagcagttaaaaaaaaaagtcggaagggcagagtttgagtgaggtcatcttgaggattgaacgcgttttacatgaaaatcaatca

SEQ ID NO: 6037 - DNA, 171 bp, Homo sapiens
  chr7:155602345-155602516
  hyper
ccttttgtgttgggaacgggaatagccactgcccaaggaaaaaagtatttgttttcgtttcgttcgtctgagggaagttgacagaaggtcagaagttcaaatgctgcctgtgcgcgcggcggcgagagtggccgggcgcggggccgctgggccctgcgtcccccggcaggg

SEQ ID NO: 6038 - DNA, 30 bp, Homo sapiens
  chr7:155602755-155602785
  hyper
gcagcagagcccggcggctccagcccagcc

SEQ ID NO: 6039 - DNA, 242 bp, Homo sapiens
  chr7:156409138-156409380
  hyper
cccaggagggaaccagcaaagcggcgttggcgccccggtctttcctgcgttggcgctggccgcggggcccagcacccgggacgttggcggcggcagaagggaaggccccggccgccctgctccgctccgctacagctgcaggcctctgcggtgacgggtgggggcaaaaaccctgcagaaaagtcaccgtcacacgcagagtccaaaactcccctttccccgctggaaccactttctccaag

SEQ ID NO: 6040 - DNA, 819 bp, Homo sapiens
  chr7:156433064-156433883
  hyper
agccgccgggggctgcggactacagcgaagccggcgcggggctcggccctcactacacgaggcctgggcgcctgcacgcccccgtgcttcagcccgcggctcccgaacacccccgccaggcgatccccaaaaacgcccgctgcgcgagcctcgacgggaacgcacctgcgtctagacgctgacgccgtgcgcggggcgggggccggcgagcatgcgcagtgtggtgtggacagggcgtggttggcaagcatgcgcaatgtgggccgggcggggctggcgagcatgcgcagtatggggcggggcggggcagggctggtgagcaagcccgcggggagcgagcgcggaggcgggcgttgctacggcaacggtgggcggccagggagttgcctgagggaaaaggggcagacgtccctgggttccggtgttcgcggaggagtcgaggcacggagaggcttcgggggagggacggaaagaagggtggcccgccaggcgggcggggtccatggattcggggtgagggccgtccgcggcctcgctttcgcctcctccgagccgggccggcgatggccgcagctgtgaggcgaggtcgggtcccgtagcggcgcgcagcctccttgggggactcggggtcctggttagtttccacagctccttctatctgaggggtacgaatttacggctgcctaaagccttagaacagtgatcccacgtcggtaattttagaacccggtaggaccggctgccatcaggggccccaggtgcagggtggtgtcagctttgagaggaattggagcctcgtcaccgcgcgcttcctgcatg

SEQ ID NO: 6041 - DNA, 41 bp, Homo sapiens
  chr7:156792491-156792532
  hyper
cgccccggcccgcgggcgataaggccgcgcctttgttcctg

SEQ ID NO: 6042 - DNA, 38 bp, Homo sapiens
  chr7:156792792-156792830
  hyper
gcggagcgggggaggcgcgaacccggggacccccgcgc

SEQ ID NO: 6043 - DNA, 399 bp, Homo sapiens
  chr7:156794955-156795354
  hyper
gtatcaaagaaggaaagtcaccggatgagggaagggacaggtccacctcctctcccttcgagctgtttctttactccctgacaccagggattaaccggggtctcctggctgcctctcacctggcagccggagctccaggaggggctggaaaggagccccctgggcctccgtctggggggcgtgtgtgaactgttttctcccgtcacaaaaaaggcttcctccacatgcgtttgcacgcccggcagaattcgcccacagcaaggcccccctttctaagaagggaggagaacccacattggagcaaagaaaacggtggccaagaggtgggggcctcggtagggcaaggaggcaaggctgggttccaggggacagggtcagctttgggtggggcccagagcc

SEQ ID NO: 6044 - DNA, 234 bp, Homo sapiens
  chr7:156795401-156795635
  hyper
cgcttctgttgaaggcagtgagatccgcaggcctccgggacagctagaggacagcagacatgtcccgtgggggaagcctgggcctgtctgaaaacaccgcctcagctccctccggggtccccctgcgtagacctggcttcaggtccggagaaccggattcttgagggctgcaaagactttctcccccatgcgcggggtcagctggcggctcaggtgcgattggaggcctgggcc

SEQ ID NO: 6045 - DNA, 126 bp, Homo sapiens
  chr7:156795899-156796025
  hyper
cggcctgctggaggcgcaggggccggcgcaggtccggggcctggctctgctggaggacgggggaggggcggccctattaacagcgtcttcctttgatgtcgctcttccccgcgtcccagaggaagc

SEQ ID NO: 6046 - DNA, 308 bp, Homo sapiens
  chr7:156796431-156796739
  hyper
cgcccagcagctgcttctgcccggactcccagcagccgcgccccggccttggatgaggttgattttatggaaggggcccggggtgataatgagttgccagagaggatattaatctccccgcgccctgaggcagaggagtggctgcgctcgccccgcggtaatcacccaaatgaaacgccaggcccttctgaactcattttatccgctgggaggaggggaggggaggagggaggagaagggcacacgcaggtgctgctgagaaagtgacaaacagaaggaaggaggaaggcccgggagaagggatagga

SEQ ID NO: 6047 - DNA, 1429 bp, Homo sapiens
  chr7:156797005-156798434
  hyper
cggacttgtttgcacagagccaagaagaccgatcctggccagccaaggaaggttctgctaacagagagggccggggtcgaggagagagagaagcaccgcgcaattcggtgcgttccgggaaatgtgcctcagtagcgcctgaggtcacagggaccccacatgctactaacgcctagtcgttttaagcttattttctgaaacgtccaaatagcgtatttccacttctggagtgccaacgaagcaacagctagcaaggaaataggaaaataaatagagtccacagctccgcttccgagggacacgtgtcccgggacaggtgtgcaccaggcagccgggcatgcgctgacacctggccacaggtatttttgccaacacttcacattgcgactccccagtagcaggcgcggaggtggtcctgacacccacttgagactccgattttcaccctcagctgccaaccgccgagtagacaccctccccatcatttctacaagcaaattgtaatgccgcgggcataatcccccaaaactcgtgcacgctgatccagtacaaaaccaatttattttacattccatcgtgggcgatgggagaagctaaataataatttagcatgcatacgtagacgtttctttttatatataaatacaatatacaaaaataaagacagtacagttttgagatttccagcagtttgaacgctcgtgacataatccccccgaccccagagacgtaagcataaacccttttttctttttccaaatactctgcagaatggcggctccagaggcggtttcaagtttcataagtcaggtaacactgtgggtttccgccttctcggacgcggggaaaggggagacaggaggcttccccttgcgcggggtgggtcggttcttctcacacgcactcgcgcctcccccaacaccaaccaaaattaattttaaaagaaccagagttcaagtttcagccccctgggtctccctctcgctgtttcttgaagagcaggtgaggcgcccttgcttaaaagggaagcgcccaggaccggagccgcggccgaatccctccagccccggcctgggcgaggggtccatggggcggcggtcgagcctgctctcggggccgggccgggtgggtgcgggcgccggggcctccgggagaagccgccggccggggcgctccgtgcgcgccgcacctgctgggccgcggggctcctactggggcgcgggctggtggctgggccgcgggggcggcgagtcgtcctccgaggagcagtcggaggaggcggcgtggacgctggcgccgttgctgtaggggaaatggtcctcgtcgtcctcgtcctcgtcctcctcggggtcactgtccctcaagtcccgcaggcggcgtccgctgcccttgtctccgggcgctggcggccccagcagctcctcggctc

SEQ ID NO: 6048 - DNA, 620 bp, Homo sapiens
  chr7:156798526-156799146
  hyper
cgtttccatttcatccgccggttctggaaccaaatcttcacctgcgggcacaagcgggcgtgagaaaccggccaccgccaccccagggcttcctgtccccggagtcccccggccgcgtgcgcctgggccccattgggtcggccctggaatggcctcagggtgagacgacttagaagcagaatggggagggggctcgtagcttcctcctccccgcaaccccccactcagcagcaaaccccagagctgggctggagctccgtgggagctaggactatgtccccaacgacccaggccggggacttttctacccgcgccctccgtctgcggaggaagggtcagggcagctggctacgtcgcggtaaatctcaggatgttccctcctctctttctggaacaaaatttctcgaatgcggcctggggatcaccttcttcagaatgaaaggaggggtggttaagtgctgattcttgggccccacccgaagctactgaatcggcgctctgggcaccttagatgaacccgtgcgcccgccgtctgaaccgtcgaggcgcagcgctagatgcctcagaccgcccgtgggtcacaagtgcaaaggtaacagtgtcccctgggaggccgggat

SEQ ID NO: 6049 - DNA, 102 bp, Homo sapiens
  chr7:156799290-156799392
  hyper
cgcggccggcggcacttccccaggaggttcgactgcgcctgggctggggaccaaagggcagtgaggcccacagccggctccggtcctcgccccagcccctcc

SEQ ID NO: 6050 - DNA, 436 bp, Homo sapiens
  chr7:156801397-156801833
  hyper
gggtctctttgtttgggtgttcggcggctgaaagcgttgagccatatacatctgctcggcccgactcataagtagctgaccccgatggggcgagcggggagagccagagccccagagagccagagccccggagccccagcccggagagtccgcgtgtgccaggaaagcctgaggggcccaggcctctggcgaggtgtcccgcccggatggagaggaagctgcccgaagcccagcggctctggggtggggagaacaggggctccctcggccccaccttggaggggcattcgttaccttgttgggcgcccaggattccagggcaggcacctactgttgagagtccccccatagctggttcaagccaggccacctgcctcggccatcgcaccccggatccaacgcccttccagaggagggcagcgccctggtaagagcc

SEQ ID NO: 6051 - DNA, 214 bp, Homo sapiens
  chr7:156802133-156802347
  hyper
gagaaggcaaggcctgcgcatggccattttaataattcgctgcccgtctcatgcctgggggtccgggcgagtcctcgcaggccccgggcagagccgaggcggcttcgcagctcttcccccgctcgctgggagccaagcgcagagaggggcaggcggtgccggtggaggatgcgcgaggccctcccgccacgcgcatccacgggggccgcagggt

SEQ ID NO: 6052 - DNA, 459 bp, Homo sapiens
  chr7:156802914-156803373
  hyper
cacctccggtgccagatgcggcggcggcgagcgacgtgaccaaggccagcggcgcgctctgcgcagaggcggctcgtggggggtccaccgccagcagggcgtcgatgcggaaatttttggatttttccatcggctcgtttggggctggcgctcagggcccggtggcgggcgacgcggccgtgtgcgggctcgcggagtcagtgcgtgcggtgcaagcccgggggctcggtattgttatggtggttatttgccaataatcaaagtcgccgccggaaactcagccgagggtgaccatggtcccggcgcctcctccgtgcgggccccgccccgggccgcgctcgcacaaactcccacgcgagtgcttccccgcgtccgggcccgggagcccggttctttgcgctgcagccctcaggcgaccgcgcggaggccgctgccgccgtggtggggacccgcgcccct

SEQ ID NO: 6053 - DNA, 141 bp, Homo sapiens
  chr7:156808932-156809073
  hyper
gagggttacactgacagataccggcagctctgcaacccgggaacaacgcagacaacatacaactcgacagagtcacagaaggtggcgtccatcgcgcctggatggtgactactgccctgcgggctgctgggtgggtgaaac

SEQ ID NO: 6054 - DNA, 203 bp, Homo sapiens
  chr7:156810597-156810800
  hyper
cgcgaacccggtgactctgggccccttacattaaaataattacccggcggaacaggtggcccactcccggcgcctgggtgcatctgggcccccggagccgcagcccgggaggaggggagcggcacgcccaggggagggaaggtcaggcccgctgagccgggagccgggagggtagagaggggctttcctagggacagacggtc

SEQ ID NO: 6055 - DNA, 159 bp, Homo sapiens
  chr7:156811302-156811461
  hyper
cgacattctgtaaatgagataatgatccataaacccggatgatagatgtggcgtgcctgcgatgtcttctctaaatgagctgctcgcatcgactgctaataatggtgagtttatggaagcgatttcagcgcaaactgcgagagggtcttcttactctaa

SEQ ID NO: 6056 - DNA, 900 bp, Homo sapiens
  chr7:156812925-156813825
  hyper
gctgggtctgagcctcgggctgagaagagtaaattctgcagaaagggccgcgtccgatcggcgcaaacgttcggttcgtagcaggagcttctccaggcggccaccgaacccaggtccaggactcggcactcctggagccctcctccccacgcagaccgcgggggctgatttaatagaatgtcgatagaatcattcgatgccttttagcttgtgatctttataaatgtccctctattaaattagaaaatgattctcttctcgtttaattgtattctttcgtttcttatttccaattaattagtcctatcgacgttgcaatattttaagtgacttgagtccgtttccagttagaatatatgggtcagcacatgcaattttatacccgacaggactatataatgtgggttttaactactcgttcctcatctgtcttaaacatctggccaggatgcgccacccggcctcctcgcagatccttcctggggcaggtgggcaccacgcgggaccctcccgggggctcccgcaggcgcctcttgctgcccggggccaagggtcgggcagcccatagcgtccggcctgggcctttacttggaattctttctgttgaagacttggtcccagcccagtggttctgggataagaagaccccgcagaggggcccagcgccgcgttcctacgagacacctgagctgcactgtgtttccacgggctaggagagcggtgactccccagcctccccgtaggcctcgctcgcaccgcagagggatggctggcccgtgccgctccgcggttcccctccccgggcggatccgcgcagggagagcccggcgggcctgggcttgggcctgggcctggttcgggggtgcaggccaagaggggcgccaggccgggctcccctac

SEQ ID NO: 6057 - DNA, 223 bp, Homo sapiens
  chr7:156813986-156814209
  hyper
cggcgcggacacccgggctgcgctcagcccccacccccacaggcttcccagccgtctgcccgagttcggcttcaacgggagcggggctccacttttccttaattgacgaagtcacggattcctcccgggcggatttatggggctgcgcgttgtgccggcgcccgctgcttcgcatctgcgcgcccgcccggtgccgggccccgccctccgcctcagccccaag

SEQ ID NO: 6058 - DNA, 215 bp, Homo sapiens
  chr7:157130644-157130859
  hyper
acagcgcaagtagaacgatcgtgccaccaccgaaggggtgccgcctgcgagctcggaggcttcagcctgtttgggaagagtaggctgagcggcgctctttgtagttttcaacgtttttattgagttgcgaattttagtaaggatttgtcgctacaatttaagccaaattattgatttagtagaaaagttagagtgaagaccgaagaaaggaaaca

SEQ ID NO: 6059 - DNA, 116 bp, Homo sapiens
  chr7:157156193-157156309
  hyper
atggctgttttaaaagcgggactagacatcctgggtttgaggaacctgggagagaggaggttgcgggactcaggtcactgtgcatgtggcgtgcttgcccccgttgtgtgtgatca

SEQ ID NO: 6060 - DNA, 267 bp, Homo sapiens
  chr7:157361385-157361652
  hyper
actgcaggctcggcacgcagaggcaggtaacaaacgaccagcctcagaagcagatgtgcttgctgcaaaccaccttcctacggcccagcagaggcacaacaagcagcgaattttttccagggcctcccgtgaacacggcaccctacgttgccatagcgacgccatcccagctctgagccgcaacaaagcggcagtgtctgtgtctcacctttggccatcttgttgagaaccatgtcgatcaggacgtaggtgccgctccggcctgca

SEQ ID NO: 6061 - DNA, 25 bp, Homo sapiens
  chr7:157361751-157361776
  hyper
cgggggccggcgagaggaaaggatg

SEQ ID NO: 6062 - DNA, 58 bp, Homo sapiens
  chr7:157476915-157476973
  hyper
tgagttaatggaaacgcgggttaaatgagaaaagacgcccggattttcctgcctggat

SEQ ID NO: 6063 - DNA, 244 bp, Homo sapiens
  chr7:157476994-157477238
  hyper
cgaggttctccagcggcgggaggcggtggagccgccgcggagagggagggaggctttggagagggagggaaggaaagggggagggagagggaaaggggggagagggagaggaggcgcggggtgggggaggggagtgagcagggagccgggagagggaggaggggcgggaaccaggggagcggcccgaaccccgtttggtccggaccccgcagccaccgctgggtctcgccgccgggtcgccctt

SEQ ID NO: 6064 - DNA, 43 bp, Homo sapiens
  chr7:157477445-157477488
  hyper
aaggcgccggccacgcgccacctcccccgggccggggtctcct

SEQ ID NO: 6065 - DNA, 109 bp, Homo sapiens
  chr7:157477710-157477819
  hyper
ggagccatacctgggcgggagggcttttcccgggggcccggcctgcgcccctcgccgcccctcgcccctcgcctctcgcctcccgcgggtcccgcctggccttggccga

SEQ ID NO: 6066 - DNA, 16 bp, Homo sapiens
  chr7:157481533-157481549
  hyper
cgtccctcccccctcg

SEQ ID NO: 6067 - DNA, 314 bp, Homo sapiens
  chr7:157481759-157482073
  hyper
ggcgctcgcagcccccgggcggcgcagccgccaccgccgccgtcttctctggagcgcagaggggtgtgcttgggagggggcgggagggcactttcctctgtgtcggtgaaaggaagagcttccagctccctcctccgcacaaaccttcacttcctctcttgttcgatcgcgtcctaaaatctgggatcggcgacgcaaggacagcctggtttggcgaagacccctcggacaccctgcgctccggactccaggcgggtggctccacggtgccggccgggacgcgcagctcggggggcgggaccacgtccgggacc

SEQ ID NO: 6068 - DNA, 36 bp, Homo sapiens
  chr7:157482200-157482236
  hyper
cgggagactctctccggccctaaaaggcaattgtgc

SEQ ID NO: 6069 - DNA, 949 bp, Homo sapiens
  chr7:157482941-157483890
  hyper
ccacttggggatgatcccaggcgcagctctcccctgccggcccaagcctttgacaggagtcctgcggcgaggcagagaccccctgaactgagctctccgacgccctagttgcccgttagagcccccatgcgcgccctccagccttcgaaagctctcttcctcgccccaccacctacgcgcctggtgatgctctcgtgggcccttcctgctccctccgcccccatcccagcctctctcgcctcttccagggcccacccaaccgcactacgagcgcccgcgccccgcccggcacccctggttacctgcagctgggccggcgcccagcgcccgcgcgggaggaggtgggggcgtgcgccgggccgagcggcctcggggcgcagcagctgcgggtagcggcagcgccatcatcacagccagctgcttccctgcgctggagccacagactagcggggtcatccgcttctgaccacaaacttctagggcggccggaggagacaaaggtgccgcgcgtcgctgctccagcagcagcggctgcgcggcggcacgggctcggagcccgcaggcgccggagctctgcgcggccgctcggcccagctccgcgtgctccgccccggcccggcccccgggctaggcacgctgggccggggcgcggcgcgggcgggctcagggcgggctccggacggtcccggtagggccgccggccgcgcgcgtagcaccaaccagcgcggccgccgcgccccgccttatatccggcccggcgcgcacccggccggcggcggcgcggctcgcggcccagccaccggttgctatagcgatgtccccccccccccccacatgttgctgacagcaattggctaaggggccgcggctctccaaacaccctctcccgcccgagactatgaatggacatcagctttgtcagtcattggtacaacgccgaagccagggc

SEQ ID NO: 6070 - DNA, 30 bp, Homo sapiens
  chr7:157484632-157484662
  hyper
gcgcggcgcccccgcggagctggcgagagc

SEQ ID NO: 6071 - DNA, 30 bp, Homo sapiens
  chr7:157732029-157732059
  hyper
tggtggctgtcctgcaggacagcacacatg

SEQ ID NO: 6072 - DNA, 154 bp, Homo sapiens
  chr7:158936493-158936647
  hyper
aaagcagcattaaccgtgataaaacccgttactttccaaggacccgctccgcaaagcgcccaccctcgagggaggaaagccgagctgcgcctccgcgcaaggccagggagtgtggctcgagccccgctgcagaccgggcgtcgccggttaatca

SEQ ID NO: 6073 - DNA, 154 bp, Homo sapiens
  chr7:158936936-158937090
  hyper
caaaaggaaactttatttaaccgacgccacgtccccccgacactaaaactaaccagtaagtacagggagggaccgagaggcatctgcggccaacgccaaccccgatctccccgtgaaacgcgcagcccgcgcaggcgcccgcagctcccagctc

SEQ ID NO: 6074 - DNA, 99 bp, Homo sapiens
  chr7:158937202-158937301
  hyper
cgagtcccgcaacccggcgggaccggagctcagcgcttcacgctctccgggaggaagctccggaccccgggcgaccccgctccctctcccggaccccgc

SEQ ID NO: 6075 - DNA, 91 bp, Homo sapiens
  chr7:158937954-158938045
  hyper
cggggtgctcagtgcgcgcccggctccgagtagagagaactgggggagagcggccggcgcggggccgggagaggaggaccgggccaggtgt

SEQ ID NO: 6076 - DNA, 46 bp, Homo sapiens
  chr8:494134-494180
  hyper
agcccacttaacattgagctacggtcgtccaaagctgcttagtgtc

SEQ ID NO: 6077 - DNA, 111 bp, Homo sapiens
  chr8:495721-495832
  hyper
ccagccctggtgggcggtggggccgctggggcctggggcgccgcgggctcggcccggactgacggcggtggggggcggggatggggccgtggtgccgggccgcgcagaacc

SEQ ID NO: 6078 - DNA, 128 bp, Homo sapiens
  chr8:687513-687641
  hyper
gggctgcccgcgcgctccccaagccgggcccttccccagatgcagccgcgcgccggccgccccccagtgcgccggtgcctccctgggcgccgagtgcgcaggcgccggccgtgaagaccgaccgtgcg

SEQ ID NO: 6079 - DNA, 138 bp, Homo sapiens
  chr8:687837-687975
  hyper
gggggctgccgggagccgggcgcggggctccgagagccgtcgaggcggggagggcgcggtgtgtcggacccgcggggacgccccgagggcgtcagggttgggggcgggggcgagcgggggtcgtgccgcccgccgggg

SEQ ID NO: 6080 - DNA, 30 bp, Homo sapiens
  chr8:1772378-1772408
  hyper
cccggaggtggctgcgcccccgaccccctg

SEQ ID NO: 6081 - DNA, 30 bp, Homo sapiens
  chr8:4849812-4849842
  hyper
ggcacacacgtgtgcggattattaagcagc

SEQ ID NO: 6082 - DNA, 30 bp, Homo sapiens
  chr8:4850536-4850566
  hyper
gcacgtctctcccccgctctccaggcagat

SEQ ID NO: 6083 - DNA, 207 bp, Homo sapiens
  chr8:4851284-4851491
  hyper
ctcgccggctgaggacgttggagagggaaggaggagaggaggaatggggtgtatgggtgcgaggaggccgggccggcggagacctttgcctattggtaccaaaacccccgtagagagcccgaactttccaggccggcttcacccgggacgctttcccaggcgcgtcgggtccggggagaaagtcctgggaactgcccctcagccacc

SEQ ID NO: 6084 - DNA, 241 bp, Homo sapiens
  chr8:4851508-4851749
  hyper
cgtctcggaggaggcaacaccgccccggcggagcacagttccagcccaactcgtattgggttcctttctccttgacaccctgtactgccgagaaaaagagatctctcctgtgagcccaagagagggggaaggaatggcggggtggggcgggggcccaggagggctggggagagcgcgatggaagctccctcccgtgcatcgcgttccccgagcttcggcgatggagcagcgccgggcagag

SEQ ID NO: 6085 - DNA, 861 bp, Homo sapiens
  chr8:4851780-4852641
  hyper
cgcacactcgcgtccgcacacggggcctccgagggctctaccgcctccccggccaggagcaagtccgtcttacccttcgctgcagtgaggagcctcgcgcacagcaccagcagcccgagaagcaggagcagcgactggaatctcctccacgcagtcatgtctgcagatactccacacgcacgcgacaccgatggctcctccgaggaaggcagggctatgagcggagccaaataatcacccgagggcaaggcgagccggagagagagcccggtcccaagacccgccgcgcatccgacgcctcctgaaggtctgggcgcccggctcgcttccctctcatagcatcgggtcccgagccactgcagggctgagctgctccgagcgcggagacccgggctggcggggccggggccggggacgagcgccggccgagccgggcaggaaggcaccaaggcggcgaggctgcgggagggggagaagcggggagaggagcgcgcgcagccaggagagacctggagaggaggcagctggagagagagccagcgagtgggagatgcggggaggggggcgcgggggggaggagagatccagtctagagagaaaaggcggagagcgcagaagaagggctgctagtggcacaaggagccgctgccgtggaggctggactcaaccatccttacccacagagaggggaccgaggctgggcacggcgcagtcccagacagacagagcccagcctcggggcctcgggctgcccgcaccgtgctgcgcttcattcggcctcagcgcagcagcgcgcaggctggagaaaggagacttgttgggcgctcgggtgggggaagctcacgccgcacaccggggagg

SEQ ID NO: 6086 - DNA, 44 bp, Homo sapiens
  chr8:5997931-5997975
  hyper
gatgctaatatagaaacgtggaaacgcaacggctttggaatcag

SEQ ID NO: 6087 - DNA, 31 bp, Homo sapiens
  chr8:6638106-6638137
  hyper
tatctggcaggtggttcggagacaggtggtg

SEQ ID NO: 6088 - DNA, 150 bp, Homo sapiens
  chr8:6673900-6674050
  hyper
ttccttaaaataattgctttgcggccaccaggtggcagccggagacgggagctcgcaggctgacaaaggagcctggccccgtggctgcagctggtcaaaatggcagatggtccagaaggctctttgtacgcccatctgggtcagcttatt

SEQ ID NO: 6089 - DNA, 1538 bp, Homo sapiens
  chr8:6691843-6693381
  hyper
ctagaccgcggggtccgggctcaggcagcccttagcgcccaggctgggtccggctgtcaccaccccgagcgtcctgcggcagcctcccttgcacgaaaagccttcggtgctgcagggctggggaatgctgacacccagtccgtgcccagctggagggcaagggaggacacctggggtgggtgccgacccccgcaggtcctgtctcagcccttccagtccggggcgcggagccagggcgcttgcgcgtcctccgtgtgcgtcctgctcggcgcgcctcggaagcagcgggacctgcggggacgcccgcgaactcagggaaaagtcccaaggcggcgttcccagggtaccccctcttccaccccagggactctgcccgggaaaaagcttccgcagggagcccggcggaagtgggcggagacgctcctcccggcactgaaggagttacgcgttcaaaccagaagggcgcgaaaaatggggccatcttgctccgccgcggctggcgggctctgggttccccctgcgacggaggtggcctcgaagggccgcgtcccgccccgtcctaaaccccgaagcggagtcgccgtcctacagggccgcgtggatgcggagccctgtccccctccccccgccaccccttctgcgagcggcctccaagtcgcagggtccccctggacggccgggggtcgggggagagcccgggcgcccccagacttgcgctcagcacatcttggcatcgcagcactttgcaaagcttgtgatggaaggaagggcggatacatctcccctgcttctgcgaggggatcttgcatgcgtggggcggggggatcgtgcatgggcgggaggaagtcaagcaccagtcgggaggggggggaaccgagcatgggtggaggaaaatcatgcatccttggggggatggtgcatgcgtgggcatctactaaggacgggaggacgtgctctgcaggtgggatggccaccaccgtgcgtcaccggcgcgcagtgctgggcgcaggctggggcagtgcccgcccgggcataggcagcctgtgcggctcccggcgccggggtggggttaggggctgcaggggtgagcacagcctcgggctgccgcactcacgcgcgctctgctcggccgcctgcagcagggccgagagccccaggagcctcgcgtgcatcttccgtgccgaccccgcagcctgcgcccgccccttcccctgcacgcggccccgcgtcggggaggtttccggcccggggcccgactgcgggtggcatttctggctaagccgttaggcgcgaattgtatgtctggtttattcgtagtggccagcaggggagggagggaggatgcttggggtttctggcttccagggtgggtggggacgaggtggtggagtccagctcaggtccgggctcctgataagggcagaagcgggttctgcgctgcccccaaccctgtaaccgccaggaaagcgcttggtgagcgtcgggactgcgcaggttcctcgggaggtggctaaactggccaccgcctctggggccgc

SEQ ID NO: 6090 - DNA, 80 bp, Homo sapiens
  chr8:8750283-8750363
  hyper
gcgcaggaccaggacgcgcaggctgcccagcgccgaccccagcccctcgggtacctcctccaggccgttgttccccaggt

SEQ ID NO: 6091 - DNA, 31 bp, Homo sapiens
  chr8:8820809-8820840
  hyper
ttggaaaggaaccaggcgggctgaggaactg

SEQ ID NO: 6092 - DNA, 30 bp, Homo sapiens
  chr8:9007918-9007948
  hyper
ggattccaaagagacgcaggagcaggccag

SEQ ID NO: 6093 - DNA, 332 bp, Homo sapiens
  chr8:9760854-9761186
  hyper
cgctccttccttggcgggccctcgccgacccacggtgctcagccagccccattcttggcattcaccgcgtgccttaattgtatggacatttaaatcaaggtccgctgtgaacacggagagagaggcctttctcctgaggaaggaaaggaggaaggaaggaaggaaaggtgaaagaaaggaagaggggtgggtagaagatggaataagaaaaccaggaaaaagaaataaaaagcggcgcgtgtgcgtgcgcactgacagcggggagagggatgggggtggggaacgccggaggaagggaccacagcatcctccccgccgcagctcccccaatc

SEQ ID NO: 6094 - DNA, 243 bp, Homo sapiens
  chr8:9763518-9763761
  hyper
gattattcaggtaaaggaagccgcatctgctgacggttccgaaaacaagaggattaggagcccgtccacagatccaggcccgcagacccccaccccctctgcaccagcacacgtcattctcactgcccccgggtacctccctctccttcgtgctcggggagagctgtgccaaggaaaatgcggatttggggaaagtgagaagtgggagagctcggaagagcgggaaagccaaggccggaggtg

SEQ ID NO: 6095 - DNA, 262 bp, Homo sapiens
  chr8:9763787-9764049
  hyper
cgcttccgtttatccgtttctatcccgggaaaagggggcgcctgcccgagcccacgcgcgccgccgcatctgcagcggtcggcgccccacgctccctgaacgccccccaggcggcaccagtgccgggcagagtcccctcggcggccgcgggcgtcaaatcgacacctgactccacagctcccttccctctcctcttcttccacctccccgggggtccaggcaccgccgtgcgtccactcccggtctccacggcttaggcaga

SEQ ID NO: 6096 - DNA, 30 bp, Homo sapiens
  chr8:9912494-9912524
  hyper
gccttgctcgcgggcgcccgcggcgctgtg

SEQ ID NO: 6097 - DNA, 30 bp, Homo sapiens
  chr8:10587290-10587320
  hyper
atgctggcttttcccgcttcggtattccta

SEQ ID NO: 6098 - DNA, 895 bp, Homo sapiens
  chr8:10873135-10874030
  hyper
aagcggggctggctgcgttcgggacccagcgccccccaggccctccaaagactggttgagctcagaaccagaaggagcgagggagcagagaaagccgggggcgggctcggggtaagacaggaagggagtgagattaaggtgagaagtgggaggggaaggagggaaaccgagaggaattgagggtgggctcggcgtatctagagcagtccgcggaggacgctgaggctcgccggggaagtgctgtgcccgaggcgccccaaaggtgggcggcggtgccagctcagacccacgcctctgtccaagtcccgactcctgcggactcggctgcaggcgggctccatgagggcgggcagcagggctcagacgatccggctcggtttggtcagcagacccccggtaacgccccgcaccgtcggcgatccctgcccccttccactgcgcccccacaagccccgagctcgccagtccttccccgcggcgctccgctctgtggccccctcgcatcccaccgtgggggtgcagctcccctggcacagcccgacggtgggagagggcggccagctggactaaaagccccgtccccgggcgggaccttcctccccgcaccctgacgcggaggttggccgggggcctctgcgtccctctgccccgcgccctggatggggagggtctgggctccgcgccgcgaggcagcgcgacggctgcgggcgacttggcgtgcggtgctgaggaccctgggggagtgtgcgccgcggggacgccggggactcggggtcctagtgccaccggacgcagcgggagtagcgcaggtctgggggcggggtctctcgaggcgcagacaacaagctagatcctgagccctctgcttcaaagcgggtagcgccttcgcccacgc

SEQ ID NO: 6099 - DNA, 31 bp, Homo sapiens
  chr8:10898619-10898650
  hyper
agagatgccactgagacgttagggacagctc

SEQ ID NO: 6100 - DNA, 192 bp, Homo sapiens
  chr8:10950048-10950240
  hyper
gggacagggggtatcccgggtgataaaggttagaaagagaaactgctgatctcacgttcgtagggagctggccatggtcctgccctgcaaacaagagccgggagactgcaagaaaggctgagtaaagcccaaagagaaactcttccccctggatgatgatcaagaacctcattctgccggcttctggaggaa

SEQ ID NO: 6101 - DNA, 30 bp, Homo sapiens
  chr8:11058675-11058705
  hyper
tggcagatgtgcatcgagctgctctcgccg

SEQ ID NO: 6102 - DNA, 895 bp, Homo sapiens
  chr8:11204526-11205421
  hyper
ttcttaagctactgcgcgcaccggcgtcccgctgggggcgcgcgagccccacccccagagatgctgactcagcaagtcgggaggggttgggggtgggacctgccaatctgcatttccaaccggcgcccaggtgacgctgactctgctggtctaccgtcttgggggtcacctaatttttcagcgatgcctcccagctggggaggccaagaagtgcctcgctcaaggtcttccaacacccgacctccagaccctcaatcctgggccagctacaccgcaaacctttccagctgtctctcctgcgccctgcgtttcttccccacgtcacttgccagggagccgctaaacagcaagaccgcgcgctctgcggctccagagtgcggatttcggtcgcgtgcggctctgaccgcgtcgccccatccctggcggggccacgcacggacgccatggctggcgccgcggagccgggcgatgcgcgcggactctcccggggccctgactgtccctgagtcctccctgcggggggcgtgcgcggcccgccccccgcggcgccacgcggcccctcctcggccggggattggtgcgccgggcggggcggggcggggcgggataaaggcgcggggtctggctgcgcggggtctgcgggcagctccaactctgggttcgtagtttgcgctgggtgcgcaggaaggtcagtgtgggggtcgcccgacatttcccccccgcggaggtgggagccgagccacatcttggagtggggactggccgcggagcgggttgcccagggccggccgaggtcggggcgagccctgcgcggcgctggagactctgcattcccgggcgcgcgcagggtccccggccgtggtcgcagagtcaggaggggcggctccggagcccg

SEQ ID NO: 6103 - DNA, 240 bp, Homo sapiens
  chr8:11205445-11205685
  hyper
cggggttggcagggcgcgacactcgctcccctccacttttgaaagggcttcccacgccgagaagaggggcgggcatggccggcccggcgaaaccggtttgtacagactttgggaagccatcgcctgcggagggtgggaccccacagcttgtccacctgcccaggctgagacctcgtgtcctagtcctggatgccccacgggtttctcgtcccgggcagcggcgcacgggaggagaagact

SEQ ID NO: 6104 - DNA, 30 bp, Homo sapiens
  chr8:11324802-11324832
  hyper
tcccgccaggggcgcggcatcggccacctc

SEQ ID NO: 6105 - DNA, 393 bp, Homo sapiens
  chr8:11536630-11537023
  hyper
tccaattgtctaaacactacacgaagtggagattcgaggcaattatccgaataattgcgggggggggcactttcgcctgaattatctagataaaagagcgacacaggagaatgtcagtggccctgaaggccctgcctcggatctccacggtcgcgcgaattcgggcaatttttctgaaggttctcagactcggggatgggggaggaaggggacgtttctagaagaaacttaaagggggctcgcgccgcacgactgtaggtggagggcgtgcgccgcgggacgccccagccgggtctgataaagccccgaagccgatctaaggtcaataaaccaggcggcgtcaggcttgggccgagggccgggaggagaggagagtggagccctctcaggctg

SEQ ID NO: 6106 - DNA, 180 bp, Homo sapiens
  chr8:11537156-11537336
  hyper
cgcggccttaaaagtatcccggcgagccctgagtgggccgggtgctgggcgaacagtcctagccctgcactgaggttggaaaagcgaacggaaagtgacatttttacaggggcgaggttgggatcgggagggagatggagacccccgaataatggaaacgcagaagcctcagagacacca

SEQ ID NO: 6107 - DNA, 426 bp, Homo sapiens
  chr8:11540303-11540729
  hyper
acctcttggccgtggcgatgtggggagggagtgtggtccaatagtccttctcacttctcagaggttgacacagaatctaacagttaccctcttagaactactccggagaattcggtaggtagtagctagtttccacaccggggacctgctttgttaaatgctatgggtgtggggacaagatactgggttcagagaaagttctgggaagagtcttgaggtggaaacagcctcggtgcgcgggggtttctcgacagctctctggtgtctcttaccccctaggttttcccagccttctcgccggattgccttggaaagctcttggtgtggtggccactggggtttgctccagcagagataatggaggggctcgctatctaatctggacagcagcaggaacaatccattagacctcagcatttatccgga

SEQ ID NO: 6108 - DNA, 287 bp, Homo sapiens
  chr8:11554879-11555166
  hyper
ctatctagctattccaagctccgtgcctcccctttcttgagactgttgttacaagaaaccgatgatttctaacaataggaacctcccagctggggaagcggtgttcggaggggagcagcgctctcggtgggcacctgctgcagttggggagggagaggtggtcgtggaggccactttcccctccaccgccagggaagcctggtctgtctgaaggggtcctcgcctgcgccgaggatggccggacggccgggcctccggccccagcacagcccccctttcagaggacc

SEQ ID NO: 6109 - DNA, 210 bp, Homo sapiens
  chr8:11555473-11555683
  hyper
cgcgggtgtccctaccataaccactgtcctccccgggagctgggcaagaggagccctggactctgggttgacctcgtcccggtcgggttctctctcctcccacccaggcccggccgctttctggcgtccgtcctctcccaggaggtcctggcctctctctgcgtcgccaagtctcttgactcccagctcgccttaacttcccagggtctg

SEQ ID NO: 6110 - DNA, 248 bp, Homo sapiens
  chr8:11560548-11560796
  hyper
tcctactacggaagcgggtggcgttcccagcctgctttcggagcagcacgggtttcgtgcagggtgttatcccgaccccttcccccatccctctaatctggcttgagaagcccgtgctggagagaaaaacgcggccttaaaaaaaaaaaaaagtttaaccgaaagcgtgagagccacccgccggctgttatctggggctgaaggctgcggtaatcgatgggttatttttacgcggtaatagggccctg

SEQ ID NO: 6111 - DNA, 927 bp, Homo sapiens
  chr8:11561268-11562195
  hyper
aactagcatccagccgggcaccccgggtgacccagtgccccacacaagatcgagagttgagcccaagaggtcaccttcttctctactggccccgcccctcgcccgccgctgcgggatgaggaccacaggaagggggggcggggagggagaaagggaactcattaataaagctgaccctgggcaccacagcgaacccaatcgacctccggctgggttgcgggtgattccccgctccctggcggtagcacttgggcattttccgcggagaccccagagcctggactttgcctgctgggggagctttccgcacagtcccgcagcctgcgcccagcggaggtgtagccggggccgcgcacccccgccccgcccttgcacgtgactcccacaggccagtcagcgccctagggccgagttgctgggccggggacccgagccgcgagctggggacttggaggcggccggcgcaggggccgcgagaggcttcgtcgccgctgcagctccgggggctcccaggggagcgtgcgcggaacctccaggcccagcaggtagggcttttttcttccctttctttgctccttcccgcggtcccccaaactcggagcttctccgcctttgcttgtctggaggtagagaggtagctagtgggaggaaaagagacgtgcgctactcacttcaccgaaattgcccaacccctgctctgcttttgactttgccttagcaacttctttaagtcaaagtaagacttgggggcaaaacagagaaatattggaagcgcctttggattctttccgtgtgaacttgaacgctttcaatccctgtccccgtgtgcacattctccaacccttgtttgcatatcgcaggccggggcctgggtggtgatggtggccgcgtgaagttaccgggactgacgggcccgggacaggctgc

SEQ ID NO: 6112 - DNA, 168 bp, Homo sapiens
  chr8:11562235-11562403
  hyper
cgcccaccagcgactccggggacgcagggtggcagtgccaggcagctccgctgggcctcaggggcccccgggagccgctctgaggtgcggagaggctgctgagtggcggaactattcatgccctttctggccggcctcctcgccctcggggctggggtccagggactg

SEQ ID NO: 6113 - DNA, 30 bp, Homo sapiens
  chr8:11562670-11562700
  hyper
tccctggggcagcgcggcccgcaccgtgga

SEQ ID NO: 6114 - DNA, 96 bp, Homo sapiens
  chr8:11665927-11666023
  hyper
gtattcgagtagagggcgagcccgtcccgcccctcgtcgggcgcttcccagatctgcttgagtctatggaggaaaaactccgcggggtccgcgatt

SEQ ID NO: 6115 - DNA, 162 bp, Homo sapiens
  chr8:11726003-11726165
  hyper
ctgcctgccgagttggcgggggtggggtggtggagagggcgccgtcgcttatttcattcattcagaagccgctgcagaggctgggggtggcgaggctgtggaccccacagaacagcctttagaagggccactttgttgttcagagaacgtacccacaaaaca

SEQ ID NO: 6116 - DNA, 554 bp, Homo sapiens
  chr8:12990255-12990809
  hyper
tcaaactccctccccaaactgcgagtcctgctatccccacaccacctccaagaaaatccggagactctgcagaaagcgtttaaagagcacagaacaggcaccgacttgacaaggcggggtgacactttctcgcggcgggtcccctccgcagcccgctcccgcggccagcccgacggcaagacgcaagtctagcttacgtgttaggatcatggtgtccggcttctttctgcacatcaagcacggcaggcggcggcggaagcgctgtggggaagtcgaggcaggcggaggcggctcggcttccgcgtcgggacccacggcggcacccgagacgcgcgccctcgcggtcctcaacgcatccttgctcgccgctccctgcccctcgtcacggccccagaaagaaagcggggttttctaaagatcgaaacgagggagcgctcagggagttgggcgagaagtccgtgagccggcgctcctgatgcggagaggtgcggccatgtcctggctgggagcgaagcgccctcgctcgggcagtcggagcgaactgtctcccgcgc

SEQ ID NO: 6117 - DNA, 30 bp, Homo sapiens
  chr8:12991128-12991158
  hyper
aagcgccgaaaagtcgccaactattggccc

SEQ ID NO: 6118 - DNA, 30 bp, Homo sapiens
  chr8:13133828-13133858
  hyper
gtccctgatgtgatcgctaaaggacctccg

SEQ ID NO: 6119 - DNA, 30 bp, Homo sapiens
  chr8:13624575-13624605
  hyper
taaaagaccacaacaattgtgccacagagg

SEQ ID NO: 6120 - DNA, 200 bp, Homo sapiens
  chr8:15094366-15094566
  hyper
cggccggagcctccgcagatgccgcccctaccagcccggctcccgcctccccgccccctgcccgagtccccggacctgctcccgcgcctggggctagggcaggctagccgtccccggcagcgggggtacctctccagcccctgcactgcaactgcgggaggaaacactgcccgcgggcggtgggagggaaaaggggtctc

SEQ ID NO: 6121 - DNA, 438 bp, Homo sapiens
  chr8:15094645-15095083
  hyper
cgtgccgggctggggcacaggcgggatcggagccgggaagaggaggcaaagtggcggcgcagctcggacaactttgctgggaaagcaggcgacagcgggcagagctggtgccgctgccccccccggggagacgagccggcaagaggcgcagggtctgcaccccaaatgctgccgtcacggaccaggaggaggacggggtggccgctggcgggaggagcaggcggggagggcgcccagcccgggagtgcagcctggctcgggagaaccaccctccgtgtcctcggccccagcaggggcgcctgcgcccgggtgcgcgtccccccaacgccccctcgtcgtcccgcgggaccaccaactactccgcgccgctggaggagccgcgggaaggagaggggagagcagggagcgccgagaagcggccgcgaagcccgcccggac

SEQ ID NO: 6122 - DNA, 252 bp, Homo sapiens
  chr8:15095136-15095388
  hyper
cgcaactaaacgaagtggagaggaaccgggcgagtggcacccaaaaacaatctagtcttttagtttccagcttaaactcagctttatcctcctccaagccccggcagctcctctcagtctcattctccgtggtcacgccgcctccaccgggttaaaaataaggaaaataaataaataataatgataattcactttattttacttcctcaaagatttagtgacaggtgatctctaccgcggtgcaacacagct

SEQ ID NO: 6123 - DNA, 85 bp, Homo sapiens
  chr8:15398263-15398348
  hyper
gacttgaaaaacgacggcaaagcgtgttcttgactgcttctgagcacctcacacctttcagacccagggcgcctttattcccagc

SEQ ID NO: 6124 - DNA, 197 bp, Homo sapiens
  chr8:16884182-16884379
  hyper
agctgcccttcagtcgtcaaagtgtttgccttaatttgcaatcgttatgacttgagccaaatgcttatacctcatttgtgtcgtatatgtgaagatacaattgcaaatcgttcacgaccttgagtcaagaccttgagtttcctgaggtcaggagaccgttagggaatgtgagtgtcccagacgggcgctgagcccag

SEQ ID NO: 6125 - DNA, 30 bp, Homo sapiens
  chr8:16885255-16885285
  hyper
gcaagcgctgtggccgcgggtgaggaactt

SEQ ID NO: 6126 - DNA, 129 bp, Homo sapiens
  chr8:17013472-17013601
  hyper
gcttcccccgaaagcccgagtagtaaagggaggctccttgcggcccccgcgggctcccagggacccgcaagttgaagcgcgagggttccacgcgggctgcggggacgcgggcctcggtgctgcagactt

SEQ ID NO: 6127 - DNA, 30 bp, Homo sapiens
  chr8:17434526-17434556
  hyper
gggaagaagtgctgcgcaccgcggctccgc

SEQ ID NO: 6128 - DNA, 580 bp, Homo sapiens
  chr8:17658206-17658786
  hyper
attccacccgctttctcggccccgcttgcttctgctgagaaggggccctgcgagaaggctgggaccgccgggcccgggtgggcggcgtaaggagtccacagtcaagcccctcggtcactttcaaggtgacagcgacgagatccgcatccgtcccttccgcaggctctgcgctggcccacgtgagacccgcctccgctccgccggcgctgccgccccctttagccctcagcttcggcccccaggcccctggaacgccccctcccctccccgaggaccggtcccgtcaccctgggcggcgcgctcgcctgtcccctccccaccccggccgccgggcagcgggaacagattccagcgcgcacttacccgcagctccttcaagcgctccgggagcaaagacgcagaggcggggagggctggcgccctttgcaccactggcggggtcgccgagaacccgccccggaggtctcgggggcggcgtctgcacctgggggcgcgcggcgcggcaccaccccacgcctgcggcggctaccaggcgggacccggagccccggcctccccgcctccccgcctccggggccgc

SEQ ID NO: 6129 - DNA, 403 bp, Homo sapiens
  chr8:17659016-17659419
  hyper
tctcgggtcccaatcccgacgctccgcgcgctcccggactaagtgcggacgcgccccacgccccccggcgccagcccgggacagcgctgcacctgttgccacgtgcgacgcggcgctcagcggctgccactgccgccggcgcacctggctgcaccgcgcgtcccgggaccacgctcgtccccgcaggagcccggggctccgccgcacccagcgctagggcccaggccgggccgcggtaggtgggggatctgactcctgcttgcctctggccacctgcaggccgaggggcctcgcaccgcggggcgtatagaaggtgggaaggttgcagaattatcagggcggaagcttgcaaggaaggagtcgtgattgtctcttagaagggctgattcgcagtctgtattat

SEQ ID NO: 6130 - DNA, 31 bp, Homo sapiens
  chr8:18870815-18870846
  hyper
ctgaggttttcaaagccgaggtatgaactaa

SEQ ID NO: 6131 - DNA, 142 bp, Homo sapiens
  chr8:19171306-19171448
  hyper
ccaccctgcccaggggcgcccagcactggtaggtgctgggggtggggcgaggctttggggagagtgtgcgtggggtgggagtagggggaagggaatttcctcggaggttgcatgggtgcatgggaggcgcaggggccagagc

SEQ ID NO: 6132 - DNA, 31 bp, Homo sapiens
  chr8:19266668-19266699
  hyper
ttcagctgccctggcacggtccactcacagg

SEQ ID NO: 6133 - DNA, 786 bp, Homo sapiens
  chr8:19796822-19797608
  hyper
cctgccatcccctttaaagggcgacttgctcagcgccaaaccgcggctccagccctctccagcctccggctcagccggctcatcagtcggtccgcgccttgcagctcctccagagggacgcgccccgagatggagagcaaagccctgctcgtgctgactctggccgtgtggctccagagtctgaccgcctcccgcggaggggtggccgccgccgaccgtaagttttgcgcgcaaactcccctccacctgcagacccggcgggtggccactgccacccgaactgaggatgagaagaaggaagttggaaggggcggtggatgcgcccagggactctcccagcctgggctctagccccgaaacggtccccggagtgggatccaggaggggccgggagggaatctcctcccgatcgtgaagcggcggcgcccagttcccgctttttctctctgccgggttcccgcgctatcccttccactctggctgggaccgcgttcccgggctcgcaggctccgccggggaggttccggggtgtgggggccgggacggcggaggcggggagtaagggcccggctggcggtgacctgcagtcacctctctgccggaggggccctggaatgaaaggcgcgcgggccaaggtgacctcgccttggttggcactgcggctcagcccccgcccggggactcgcgggccgactgtggccccttctggggaagccggggcgcggggaggcgttccgggcatctcagccgcacggggtacgctcgccctcggcggggcccctcgct

SEQ ID NO: 6134 - DNA, 412 bp, Homo sapiens
  chr8:19797677-19798089
  hyper
cgtcccacccgctctggggagccccggactctctccagcttccaggctcgcatgcccctcttttcttagtgccctgagaacccagcgaggggctgaccctcccgaaaccgtggcgcagccaccagcaatctgtggtcgccgactcggggggttgccaggtctgcgtttggccaccctttctgtcctgggggctgaggtcagctccgggcgcccggccccgccgcgcggctgcgagcacgtggggttgacgggcgccgcgtggaggcagcgagcacaacggtggtcaccgccgccagggaaccgcccgctcgctggggtccaggcgttcggggccaaatgagaatgtctcagacctgtccgcaatggaggcagcctgcttaattcgaacctcgattcagtaaacatgcaacag

SEQ ID NO: 6135 - DNA, 30 bp, Homo sapiens
  chr8:20293185-20293215
  hyper
ctgtgctgcccccacgcagggctcagcctg

SEQ ID NO: 6136 - DNA, 30 bp, Homo sapiens
  chr8:21777048-21777078
  hyper
gctgacgttgcccgcgcctttacgccgtcc

SEQ ID NO: 6137 - DNA, 31 bp, Homo sapiens
  chr8:21867535-21867566
  hyper
tgtacagtaaggggagcggtggaattaattt

SEQ ID NO: 6138 - DNA, 61 bp, Homo sapiens
  chr8:21906371-21906432
  hyper
cgagcctgcccgtccccggccgggcgtggccacggcaggtgcaggcgcggcccgcagcgct

SEQ ID NO: 6139 - DNA, 31 bp, Homo sapiens
  chr8:21966148-21966179
  hyper
gtcttggattgatttgcgtctgtacctgcca

SEQ ID NO: 6140 - DNA, 30 bp, Homo sapiens
  chr8:21987846-21987876
  hyper
gggcacggggaacacgctccgtacgggcac

SEQ ID NO: 6141 - DNA, 64 bp, Homo sapiens
  chr8:21988227-21988291
  hyper
ccgagactccgtgctgcgccgcggggagggccgggccggggctagggagcgggtgcccccggag

SEQ ID NO: 6142 - DNA, 82 bp, Homo sapiens
  chr8:21988552-21988634
  hyper
ctcctccagcaccctgcgggaaacaggagcccgtgattcggcggccgcgcctgggcctgccccctcccgggccccgggggct

SEQ ID NO: 6143 - DNA, 30 bp, Homo sapiens
  chr8:22224958-22224988
  hyper
cggcggaggagccccgcaccccaggctggg

SEQ ID NO: 6144 - DNA, 36 bp, Homo sapiens
  chr8:22419404-22419440
  hyper
gacctgcccacaggcccggcccggcaacatcttcca

SEQ ID NO: 6145 - DNA, 30 bp, Homo sapiens
  chr8:22437178-22437208
  hyper
tctcgcagcacttgcgtccccagggcagcc

SEQ ID NO: 6146 - DNA, 30 bp, Homo sapiens
  chr8:22549553-22549583
  hyper
ggccccagcctcctcgggcatgaaggagct

SEQ ID NO: 6147 - DNA, 30 bp, Homo sapiens
  chr8:22552223-22552253
  hyper
ggagcatgggggtgcgaccccaaatcacat

SEQ ID NO: 6148 - DNA, 115 bp, Homo sapiens
  chr8:22562486-22562601
  hyper
tagaccccaaacgaaagaaaaagtatgccgcaatggaaactcgaactaatcttcccctcttgccccacttccctcccgcggtcacacttccggcggccaccacagggtattttgg

SEQ ID NO: 6149 - DNA, 30 bp, Homo sapiens
  chr8:22723193-22723223
  hyper
cagccacctcccgccgcccggatcccagag

SEQ ID NO: 6150 - DNA, 31 bp, Homo sapiens
  chr8:22857229-22857260
  hyper
tcgccgcgggcccgggcgcgtagcggcggcg

SEQ ID NO: 6151 - DNA, 30 bp, Homo sapiens
  chr8:22925641-22925671
  hyper
aacaatggcattggcgatgagcggccccgc

SEQ ID NO: 6152 - DNA, 198 bp, Homo sapiens
  chr8:23020932-23021130
  hyper
cgaacgaacgaacgaacgaacgaaagaggcaaccgctctgtggcttcctgaggttcactccggggtttccatcttgactccctccctccgctgattctggaacttcctctggggcagctcagtgcggtcctcgccgcacgggacagccagggggagcgcgcgctctgctccctcgcggcccggtcgctcctgcccagc

SEQ ID NO: 6153 - DNA, 512 bp, Homo sapiens
  chr8:23021192-23021704
  hyper
cgcaggcgacccgggccaagcatccccaccgtgtccccctctctccctgcccactcccggcgccaggtgcgctcttccccagccagggaccgcggcggagactcaccggcagcagaaccgcgacgatgaagacgacgaacttaaggatcttggggtccaggagccatggtctggttcccgacgctgtcctggctcctggatagcgccctgctcgagcgctcgaggcggtcgggacgctttgtccccaaagtcccatgagaagggaggagggtggatcgaaagcgccaaaaatcaatcagaaatcgtccccgtagtttgtgcgcgtgcaaaggttctcgcagctacactgccagaatagaacgtgctcctccgcttttataccccggaaaaaaggcgtggtcagttgtactcccttcccgcagtcacttccaggcactcaggctgggtctcccccagcacctccaggagggcccaggttgtgtgggtgggtgcatggacggacaggaactggc

SEQ ID NO: 6154 - DNA, 102 bp, Homo sapiens
  chr8:23082554-23082656
  hyper
ctagctggtggtggcgccatcctgccaggtcaatccaagaagcagcgtgcttggctatgacaagacagaacttcgcattcggagttcagggcacccctgacc

SEQ ID NO: 6155 - DNA, 112 bp, Homo sapiens
  chr8:23082729-23082841
  hyper
cgctctcagcttctgttcctcaaccacggccgccgcgtggatgccgctgcattcggagtcgttttgccacttggtcccagcgccaggcttctcggtcgggagttgacctcag

SEQ ID NO: 6156 - DNA, 130 bp, Homo sapiens
  chr8:23386070-23386200
  hyper
tgtttgcaaacccacccgccacggggacggattttccccgagacactgtcacccatgcctccagctctgggcataccccactgcggcccctccccaatgacctcccctgcccctcgcggaccagcccatc

SEQ ID NO: 6157 - DNA, 45 bp, Homo sapiens
  chr8:23539859-23539904
  hyper
cggtggagggcggtggcgctgcagtcgcgccggcttctgagcccc

SEQ ID NO: 6158 - DNA, 3 bp, Homo sapiens
  chr8:23559598-23559601
  hyper
gcc

SEQ ID NO: 6159 - DNA, 1003 bp, Homo sapiens
  chr8:23559665-23560668
  hyper
cgcgccttagtactgctcccacaccccaaactgccagccagccttggtgttcttcagtccctgtgttgcttggtgggtgaccggtggaggggtcttcttttgggggaagaacgtcccaggcggggcctttaactgggtgactgtggtgcagatcgcagtttcagagatccctccggaaagaagcgccgttgggtagcagcttccttccagcgccgcgtcccctccttgtcacgacctgcgggcggaggggaagggaacgagcatctggccctggttggcagagtcaagccgaggagcctcaccaggccctgacaccctgcagcgtggctgccagatggccctgcggggtggcattctggccaccgtgtccgaagcccgcgctggccagtggtgtgtgtggcgcaggacccgagggcgcgcccgcgtagcaggtgccgtagcctgcgccgtagggtgctccgctgtagcctccgtagcaagagtagggcgacactgctgcactgtaggggctggggaaggcaggtgcgccgggcccggggcccaggcagggcttgccatcgcgcaccaggacgggcacagctactcggcgcggcgttagagggtggccagccagttccagcgacttgtcctggcgctgtctcttgcatttgtagcgtcggttctggaaccagatcttgacctgcgtggacgtgagctgcagcgcgctggccaggtgctcgcgctcgggcgctgacaggtaccgctgctgcttgaagcgccgctccagggccagcacctgcgcctgcgaaaagagcacgcgcggcttccgtcgttgccgcgccttgggctgctccgagcggccaccccgcacgctgtcgccgctgttgccaacgccgcgctctggcaccctggtcccgccgccgaggggcgaggccgcgttcaggccgggctctaaaagcacaggaagggacacatcagcgcccagcctaaggctcacctgagcggttcctacttagttttcaag

SEQ ID NO: 6160 - DNA, 179 bp, Homo sapiens
  chr8:23563844-23564023
  hyper
ccccatccgttccgcgtccatctccaagactgcctcacagggacccccaggaggctccgaaccatccagctttctgtcaccgccgccgccaccagcgttgtgaacctctgaccctcgcggctctgcgtccattctcaggtactgaaagttttccgggctcttccgcacccgcggatgtg

SEQ ID NO: 6161 - DNA, 476 bp, Homo sapiens
  chr8:23564192-23564668
  hyper
cgcagacagacccaagctctgggacagacgcccagcgtcccagacagcgccttcctctgggccatgctggtaggcccgggtccagggccgggtgacgagaccgtagccccccattggttctcgcagaaaccacgtgctagctctgcaccttcctcccccagcgctttcttcccgcgcccgtcgaatcctctccagtccccagtcgccttcctgggaggtttggttcgtattgacggttctcaaagcaaagaaaacgtggagagacagtgctgcgcgcggcttggatctccgtcaatacggtactagcgggagcttccgaggtcaacctagggtccacggggaccctcctagtggacatgcggggattggaggtggagtccttgctgtgcaacccgatccggtccatccagcctggtcttagctcaactctgcattcttatggcggaggaaagctaagatagagacagctgggaccc

SEQ ID NO: 6162 - DNA, 215 bp, Homo sapiens
  chr8:23564702-23564917
  hyper
cgcagaggccggaccgcagagtagaagtgagtcttgacccaccagggcctatattgagatggaaacctctctctttgaacagaatccaggtctgcggagtcccgacccgccacttcctaggagcagcttctcagccccaggaccgaggaatgggtgtgggggctacatgtggggagccctcgacctcttaaagggctccgcgaatggtgggggag

SEQ ID NO: 6163 - DNA, 49 bp, Homo sapiens
  chr8:23567533-23567582
  hyper
agccgcccgcccgccgagagtggaaccggtacctcgaatctcgctcatt

SEQ ID NO: 6164 - DNA, 16 bp, Homo sapiens
  chr8:23567657-23567673
  hyper
cgctggcgcccaggaa

SEQ ID NO: 6165 - DNA, 208 bp, Homo sapiens
  chr8:23572014-23572222
  hyper
gctgcctccgcgcgcgttccactccttcagcgtggaaaagaaaaccctcagcggccagagaggcggcggggccttcccggatcgctgattcggggagccgcaggcggggacgctgctgggcgacgcttatctgcgccgcgctcgccagctccgtttcaattaacattccagtgccgccgcccgccgcgggagcggagtccccaccagc

SEQ ID NO: 6166 - DNA, 51 bp, Homo sapiens
  chr8:23583965-23584016
  hyper
gctgagtacctcttattgcagcggggatactaaggccgggacaacaaaagt

SEQ ID NO: 6167 - DNA, 307 bp, Homo sapiens
  chr8:23584093-23584400
  hyper
cgcccggctgcatcctccacccggccggtttctagaaataggagataccgagaagttagggtggcccaggtctggccttagatctgcagaggggcgagtgcagattgcgcgatggcgaggctcctgcgacaaggcgaacaccaaggacgcgagctatctggaaccacaaataaaacaaattcagggacggcgttgacaccgcggccacctcctaggcgcttcttggaagggcgcggctgtggtgcccgctctgcccgtggtcccgcttacttttggactctgtcccccatggggctggggtccgggt

SEQ ID NO: 6168 - DNA, 30 bp, Homo sapiens
  chr8:24770327-24770357
  hyper
ctcgccgacctgggcgctgtccttggtgct

SEQ ID NO: 6169 - DNA, 25 bp, Homo sapiens
  chr8:24771099-24771124
  hyper
gcggcctgggcccacgtggagcggg

SEQ ID NO: 6170 - DNA, 30 bp, Homo sapiens
  chr8:24772498-24772528
  hyper
tagagcacgcgcgccgcagacctagggtat

SEQ ID NO: 6171 - DNA, 30 bp, Homo sapiens
  chr8:24773045-24773075
  hyper
tagcaagtggtttgcgaaggaagttgctgt

SEQ ID NO: 6172 - DNA, 597 bp, Homo sapiens
  chr8:24812866-24813463
  hyper
aagccctatccctaagagctgcgtgcagccgcaccacccctggtctccactttctgggcgcaccaactcccccccttgctcgagtcccccgcccccctgtgtttctggccgtgccgcacctgcatagcgctgatgtcggcgttctgcttgtcctccagctcctgcagctgcttctccagcgcttcattcatgccccggcatgcttcgatttccagggtcttggccttgagcagacgacggctctcggacacctcgtccttggcggcgcgcacggcgtcggtgttcttggcggcgctctcggtcagcacggtgaagcggctcttgaaccattcctcagcgttctgcatgttcttggcggccagcttctcgtactgcgcgcggatgtccttgagcgcggcggaaaggtcgggcttggtcacgtccatctccacggagatctgcgcgtactggatctgcgcctgcagttcggcgatctcctcttcgtgcactttcttcagaaaagagatttcgtccatcaagctgtcgatgcgcttctcgagctcggcgcgagcgagcgccgcctcgtcggcgcctttgcgcgcttccatcagccggccc

SEQ ID NO: 6173 - DNA, 275 bp, Homo sapiens
  chr8:24813618-24813893
  hyper
cgcccggaagcgggatggctcggagtgcttctggcgcagcaccagcagctcggcttccaggaccttgttctgctgctccagctcgtgcacgcgctcgatgaagctggcgaagcggtcattgaggtcctggagctgcgccttctcctgcgtgcggatggacttgaggtcgttgctgatggcggctacctggctcaggtcgaggttctccagactgggcatcaacgatccagagctggaggagtagctgcggcgcacggacagcgaggaagacaccg

SEQ ID NO: 6174 - DNA, 280 bp, Homo sapiens
  chr8:24814010-24814290
  hyper
cgtagctgaaggaactcatggtggcggccggtggctccccggcccgcggcggcggtgggagcccggagagagaggacaggggagagagggaagggggaggatggatggctgtgtgcggctcggcgccgttctgccacccctatttatacgccgggaggctcctgacgcagcctgcgatcgatcacggcacgccggccagtgggggcagcgcgctgctgcagccaaggcgaggattctgcgcaaaagggaaggcggggtcgagctacggcccgaggagctg

SEQ ID NO: 6175 - DNA, 257 bp, Homo sapiens
  chr8:24857552-24857809
  hyper
ttggtagaacgcagcgcagcaatagccgccaagtcccctcctgggtacagtacagctccacagcgcccctgctggtggcttgggaagggcgcgcaagcagagaaagcaagtgtcagagccgggactggcctcccagggcatcgcctacagcttgtgctctgagagtcggggtcatcatagctgcgctcttcgatggacactaaatgcgggacatctgttttacactcaccctccctccccgcgtggcaggagaccta

SEQ ID NO: 6176 - DNA, 30 bp, Homo sapiens
  chr8:24858104-24858134
  hyper
tggtgtggatgacccgggaagccgcaccca

SEQ ID NO: 6177 - DNA, 811 bp, Homo sapiens
  chr8:24858629-24859440
  hyper
cgggcccggggctcccgagctcctggtgccagccgtgttgctctggcttttgtattttaactccgtgggcttctgtccccatccccatgtaaggccagtgcccccttccgcgttttgccgaaagtatcttcaatgcccgtttaaaaaactatgtctgcgatttctccatctctgctctttcccagttcctctcttttctcttcttcaggccccctcctgtccttcctcatcctttcactgagcgggttcaggccctagttactaccgcaggcaccagccacacccggggagatgtgtgctgttttgtgcaagacgctgcggtcacccagtccggaattctgctggtctacaccgagtgccgcaacaccaccaccacctccgcacacatacgccctccttgaacctcttccccatgaatgctttggcttttaaggaactttgtggcgtttctgctctttcggaggcagctgcccgaggcagcttcccaaggcagaacagggactgactgctgaggttccgcggggtcggggaggtggagaagccagttcccaagtggctcgtcgcgggtgttagagtccctcgttactaaggacgccgccgcccgcgcgccaggcttggggaccagggtgactctgccctttctgggcggaatacgggtgaaggctgtctttggggatccacaggtgatctgtgccgttctcattgtattctcaactctcatcccttccaggttagcccgatccctttaatgcaaggatcggtgccgggaggaaagagagcgtgggccactctggaacggaggctggtgttt

SEQ ID NO: 6178 - DNA, 1344 bp, Homo sapiens
  chr8:25041593-25042937
  hyper
cttgcaccagctctccggtgataaaagttctgctttccaggctctaagcggtggccccgggagattcagtctgccctgagtccggcttctcccgctcgcggcgcgggttcaagctccagggggtgaaggcagaagtcaactgctcattcattcaacaaatatttattgcgcgcccgcttagtgccaggcaccggaggtgccccgagcaagaagccgctctcgctgatccgtttccgctccccaagtgtccggcgcgcgccgtgggagcgcagcccgcatccctcgcccaccggccgcccggcctgggcgtgcccggctcctccagcgcagccctctgtcgggagccggacccccgggacccagcctccggggtatcagccgggtggggagggcgggagaaaggcaaagtgccgccagcgtcaaagtcccgccggcccaggaagccgctccagggaagcgcgcgaggcggagccgcagtcggcccccgcccggcagagcgcagagagcggcgcgggcgggagaggccgggcgcccgcggctcggaggcggccccggcgggcggagggtgcggccggcgggagggactggggcggcgccaggaggggcgcgcactgctgcgctgcagcccggcccagcaggtgaccgcgggcggcgcgggcacgggcacgggcgcgggcggcgcggcgaggaggcggcccgcggagtccagcgaagtttggcggaacatggcggaagcgtctggggcacgcaggagcgcggggcggcggcggccggagcccgaggagctgtagcagccttagtcgccgccgccgcggggcgaggtcgccgccatggcccgctggatcccgaccaagaggcagaagtacggggttggtgagtgcgcgccccaccttgtcccggcccgacccacgcggccaagttcgcggacagcggccctgccaggtttgcgcagagcccggcggaggaccctggccgggggctcggcccggctgcgcagctctgggagccggggacggtaggagtcctctccagggagcgccgatggggaagtcgcccagggtttggggactccgagtgcttccaagtgcagctgagcttcgggaccgtaatcccgctcttgcatcccaatctccggcacttcacaccagggaaatgtcaacgcgaggggggcgcgcctgctgctcttttggggccgcagctctgtggctcgccccggtgcgcccagcgtgggtttcacctgggagtaggtgaccagcccgggtcggcacatggactggtgctcattgtcccagtgctttctgccccccgctttcgtaggttcttctcagacgccccttaagtgag

SEQ ID NO: 6179 - DNA, 571 bp, Homo sapiens
  chr8:25900891-25901462
  hyper
cttcaacaaactttttgatcccgggaaggaaggaaagcgagggaggcgtctttaaggagcccagctaaggaaatgcgcggcacagttggctctgcggtgctgccttatttcccttagctcgcaggcgggccagtcccgaagcgctgcggaaagccgcggccgccgcgctgtgcggtctgccggagggaaatccgcgctccccgggccacaggagggagggaaccgccgccggcccaagtcccggagcgataaaacttctgctttctccgctccaagggtagaggccggttcgctctacccgggacacctggccagtttgggaaagggatcatttctccgtgtgatgttggcacttaaatgtgggtggccaggagggcagcaggggaagcgagggtagtggaagaagttcatcggctctttgggggtagaagggctgcctctctcgcagacaaggacctggaggccacaaatcccaactcagtagtggtgatgagagagtgggaccgtaatgtcttcgtagggtggcaccccggacatggtatttactatcccagcacgcagacgcctaaac

SEQ ID NO: 6180 - DNA, 158 bp, Homo sapiens
  chr8:25901684-25901842
  hyper
cccagagctcccggccgcctcgtcttcccgggcagccgctccggcttttcccgctcccctcgccgccgccaccctctggccgccggcctcccaggctccaggaatcgcccagcaagatgcgggaggtaggcgctcgcaggcggcgtggcgaagccaag

SEQ ID NO: 6181 - DNA, 539 bp, Homo sapiens
  chr8:25903395-25903934
  hyper
ggtgatatcagatgttgtgtgcggcttgcacgttgctgagagtggagaacatatgaaagaaggcgggggatggggtggggcggacaagcgaggggcaagtgctgctcaaatacagtgctggggaaaacggtccaggacctaaggaaaacacccgcgggcgggcgggcgcgagcggcagtcgcacccgtgtggaggagaggttgctgacagatcgaggcgggctgagtgcgcgagcggccggggagtattcccgcgggtcctccggttccctccccacctctccgttcccgaagcccccggtagtgggcggggagggacgggggagtcgtggaaacttcgcccaccgcgcgcggtcgccgcggtgctggccgcgggctggtggccggcaggcggtggcagcagcctcaccgaacagctgaaaccctagacggttttttaactgcgcggggctgctcgcggtgcctattaaacatcctcctggctgggtgtcattttcttgcttctccttttgtattctgatctgcgcatagatctgctgc

SEQ ID NO: 6182 - DNA, 30 bp, Homo sapiens
  chr8:25904201-25904231
  hyper
gctagaggacacagcgccttgcaactggtt

SEQ ID NO: 6183 - DNA, 30 bp, Homo sapiens
  chr8:25907203-25907233
  hyper
ttgctggggtaaatcggctggccgattaca

SEQ ID NO: 6184 - DNA, 83 bp, Homo sapiens
  chr8:25910857-25910940
  hyper
catgttgagtttcaatctcaccgttactgcctcctagtggcggatacggcggcaatagtggcgcacattcaaggcaggaagca

SEQ ID NO: 6185 - DNA, 67 bp, Homo sapiens
  chr8:26150335-26150402
  hyper
acctcagtacttgcacgtgaaatagaaacattccgagatgagaccagttttccgtgctgtattcatt

SEQ ID NO: 6186 - DNA, 30 bp, Homo sapiens
  chr8:26150768-26150798
  hyper
ccgaagttttctcttcgttctatgtttcat

SEQ ID NO: 6187 - DNA, 71 bp, Homo sapiens
  chr8:26370057-26370128
  hyper
gggactggatccctggttacacggccctacgcggtggccctgcggtaaacggcctctcagcccaaacccac

SEQ ID NO: 6188 - DNA, 221 bp, Homo sapiens
  chr8:26370518-26370739
  hyper
acgctgcgactgtggcgcagtgcgcaacaggggcgggggaaccaggcggggctctggggcgcaggggaaagctggagatttgggaagggggtttcagtttgttttttctctctttttttttttttttttttttttttggtggaggaagcagaataaaccaaatcgcgacacgttcctgcgcccttcttggcgcagtggcgcagacacggtccatggcgcct

SEQ ID NO: 6189 - DNA, 30 bp, Homo sapiens
  chr8:26371338-26371368
  hyper
cggagagcggtcagcgggccctccgctccg

SEQ ID NO: 6190 - DNA, 749 bp, Homo sapiens
  chr8:26371675-26372424
  hyper
ggtgggtcgccggctcgccagccctccttcctttctgtgcaccttgcggtgggcggcgaacggcagccgcggcagcagctagggggcttgtgcacacagcgagggagacttagggactggcagacggacggacggacggcgaggaccctacccgagcccccgagccatggccgagagaaagcaatccgggaaggcggcagaggacgaagaggtccctgctttttttaaaaacctgggctccggcagccccaagccccggcagaaattctgtggcatgttctgcccggtggaagggtcctcggagaacaagaccatcgacttcgactcgctgtcggtgggccggggctcggggcaggtggtggctcagcagcgggacgtcgcccacttgggcccggacccgcagccgccgtactcgcggcagggccggcgcgccggcggagagccatctgttgaatcgggccggaaggtggagatccggagggcctcgggcaaagaagccctgcagaacatcaacgaccaggtcggtgtgggggttgggggtggagacggaggacggggcgcggggatcgcccctccctcgcccctgagcccggcgcgcccgccttcatgccccgccctggacctcgcctcccgcatctgcacgcgcaccccgccctacccgccccttctccgcgcagggtgcggcgaggctcgggctgggcggtgggcggccgtgcgcccacaaaggctgcccgcgtctccttgagctt

SEQ ID NO: 6191 - DNA, 30 bp, Homo sapiens
  chr8:26435414-26435444
  hyper
gctggcggcgcatgcgccacggtggccgac

SEQ ID NO: 6192 - DNA, 30 bp, Homo sapiens
  chr8:26436703-26436733
  hyper
gccggagggctcggcgcagtgctggggcct

SEQ ID NO: 6193 - DNA, 682 bp, Homo sapiens
  chr8:26723431-26724113
  hyper
ccccaaaaccccaggctccagcgctcgaagtctggatttcgagcgcaggtaccacgaaattaaaatcctcgaagccccggaggggcgactgcggctggcgagtgtgtcgcacggatcctagccggggaattctggaggatgtactcggtttccgttagaacaggttgcctcgcagtcacctggagggggcggcctgggagagggaacagctgcgacccagggacctcagggccaggaccacgagcacgctcactctcacgccggtggaattcgcactcgggtgtgcagagcgcaccggtctgtccaccagccaagctggcttgagagccaggtcccgagcgaagccgggagggacccgaagacagaaagcgacccaggtctgtccacgacgcctttccaagcctcactgttggccacccgaggggctccagctgccagccgtagcgggactggcgggggacggggtggggaggacgtccctctgcagagggagctttgcaagtgacagtcactgcggattttgcaggcgtaaacattaagccggcatgccagcgggcaggggccgccttcgattttctgggctgggggccaccatctgcgtaagaaacctgggtttccacaactgcgaacctaccgcagggactcggcaggacagcgcggcgtgaggaagtgcccaccttgc

SEQ ID NO: 6194 - DNA, 122 bp, Homo sapiens
  chr8:26724729-26724851
  hyper
aatattcagctccccgacaccagaaaagaatagcaaggaactttgcagctctcgctgacgtaactcaggcagtagcccagctagtaccgtaatctcctgctgctaccgtattactctacggc

SEQ ID NO: 6195 - DNA, 31 bp, Homo sapiens
  chr8:27099006-27099037
  hyper
gcaatgtgatttcctacgacactggctgctt

SEQ ID NO: 6196 - DNA, 78 bp, Homo sapiens
  chr8:27168527-27168605
  hyper
gagggtgtggttggtgcgcaggtcggcgggtgacgcgcggtctttgcacactgggcaggtgggcgacacctgcacctc

SEQ ID NO: 6197 - DNA, 31 bp, Homo sapiens
  chr8:27348741-27348772
  hyper
ccgtcttcgaccttgacggggtgctggcgct

SEQ ID NO: 6198 - DNA, 53 bp, Homo sapiens
  chr8:27491096-27491149
  hyper
gatcaaggagctctcccggtgagcccccccattgcggccgcagcgcgggcagg

SEQ ID NO: 6199 - DNA, 30 bp, Homo sapiens
  chr8:27491661-27491691
  hyper
actacagctccagccgcctgcagcggggcc

SEQ ID NO: 6200 - DNA, 31 bp, Homo sapiens
  chr8:27694968-27694999
  hyper
tcctctgcatctcacacgctcagcagggttc

SEQ ID NO: 6201 - DNA, 65 bp, Homo sapiens
  chr8:28242820-28242885
  hyper
agttccaaagtgaaggcgctgagccctgcactcccaggcagggaagaaaacgctgccttggaaat

SEQ ID NO: 6202 - DNA, 30 bp, Homo sapiens
  chr8:28244371-28244401
  hyper
ggtgtaaagtgaggcgttatttactgttgc

SEQ ID NO: 6203 - DNA, 56 bp, Homo sapiens
  chr8:28258794-28258850
  hyper
cccaagcagcgttgcccggacgcgccgctcggggcccagagcgctgcgtgcacgca

SEQ ID NO: 6204 - DNA, 127 bp, Homo sapiens
  chr8:28560084-28560211
  hyper
cgcaccaccccacccccgcccttccccgcaacctggatttttcttccctttttaaaaactctaaaagcttcatcaagtcctcttggttcgactcctttggtggaggaggaagcgcagaacaccacaa

SEQ ID NO: 6205 - DNA, 334 bp, Homo sapiens
  chr8:28748908-28749242
  hyper
gtgtttcttaatattttattccggaaccgtgttttggttacactattggggctactttgaaaggcgtcctccacccaccttcaccccgaaacagtaggtagaggtatcttgtcttcgtgtgaattagatgaataattgctgaagattcggggggcctggggtgggggtcgggagtgctggattgtgtacgcgtctgtgtgtgtctactaaggagacggaatgtctgttatgtatctggagatagggcgacttattttcgtagcaggaggaactgttggaaattatttgcgggagagggggtgcgccgaaaggcgctgcttgtatttttcttcta

SEQ ID NO: 6206 - DNA, 30 bp, Homo sapiens
  chr8:29120171-29120201
  hyper
gccgagggcgccctcgggaacctccggggg

SEQ ID NO: 6207 - DNA, 30 bp, Homo sapiens
  chr8:29120766-29120796
  hyper
ggaatgctcgggcgcgagtcgtttgctaca

SEQ ID NO: 6208 - DNA, 31 bp, Homo sapiens
  chr8:29172530-29172561
  hyper
gaaaactcattcttggcgttccctgcaagct

SEQ ID NO: 6209 - DNA, 619 bp, Homo sapiens
  chr8:29206163-29206782
  hyper
tttttggaggggagaggtttccgccccctttccagctcccttcctcccgggtggacaggtcggaagaggagcggaaaggaaaggaagggagggaggcggcgaaggcgcctgcgggggggaggagcggctctttgatgggtgtgggggggtctgaactgcctaccgggctcggaagcgcagaccctacccgcgcggaagaatgcgcggaatgcggcggcgggaggcggaggcgcagcgcggcggggggcgcccggaccccacgcgccctgcccgctccctagcccgagggccgcggacccaccctgccctgcaggtgtggcgggcgccaggtccctccagggactcggacagcacgcgatttttccaggatttccgactaccaaatgtgacaagacagtctcgccgccgagagtttcgccagggctcgctaaaatccggcacgcgccgccatcagatagtcgaaaatccgggctgaacaaaaggtgatcattctccgctgcccggatttgcaggcgctagaggaccggttccgcccggcgtcccccagatacccagtccttcagcctcccgctcccagagcctggatctagcccgggacggggattggccaccttccaag

SEQ ID NO: 6210 - DNA, 1264 bp, Homo sapiens
  chr8:29206997-29208261
  hyper
cctatcttgtccccacgcgccccgtggtacttggaaactgttcccgggactcaagatggaccgcgcagaggagtcgcttcatcctcgaggctaggaccgttaatgtcaataaacggggcctcgctaggacggtgcggaattgcaggtgaccggagaaacccgtccgcactttccctgaggacttgaacctcgcacttgcacagaaaccttgcaaacccctacacaccaacacacacaaaggggcgcgcggggatccccgcaaccacgaatcacgccggggactccttcccgtgccaataaggcgcaggccgccaagaccccctccatctccccgactccagctagcgcccggagccctcgtttacctttgagcaggcagatgtcggtgcgctcggcgttgcggcgcagcgcctgcaccaccagcgacacggtgctgtcctcgcggaggctctcggcgcgcgggctgcgctcgtcgtagacgatgaccgccgagtagaggccggagcgcaagcgggcgcgtacctcctcctcggcgggcaggatctgctccaggctcacggagcccttagcccgccgccgcacgatggtgttacagcgcacgttgaccgaacctaggatgtagcccgcgctgtgcgccaggaacggtctgcagtccagcagcaggcacttgccgccgctcggcagccccagggtgccgtggctgccgctgccgcccgcgccgccgccattctcgtcccggttcatcagccttttgagcacactgcagtccatctcccgcagctcctccatcgtcaccatggtcgccgggaaccgaggcggctgggcgcgcgaggaagagaagagaacccgggccgcctaggctgcagaaaggggcgggcgagagctaagaagggacgcctgcagaagtggccgcaaacttggtcctcaagggctcccgcgggagagcctcttcttccctgtccccttcctcccgcagcctcgcggtcacatagcagtcggagcggcctcgggcgcccagccgggcggcgcgcagagcggagggggaggcgccggtggaggagagtgtgtttacgagagaggaccgcggactcttttcggcgacggcctcccgtgtatttttgccggtcgcgcggctcctgtcgccactggcgccagcgctgccctgcctacgctcctccggcgctcagcgcactgccccagccagagttttctcctcggcttagaggtttattaatgctcctccgcgctcccgggggagggggcg

SEQ ID NO: 6211 - DNA, 30 bp, Homo sapiens
  chr8:29387335-29387365
  hyper
aacaacaaaccacgcggcgttctctggtgg

SEQ ID NO: 6212 - DNA, 30 bp, Homo sapiens
  chr8:29387618-29387648
  hyper
aacccttgaggatacggctcaatggtgtac

SEQ ID NO: 6213 - DNA, 31 bp, Homo sapiens
  chr8:29939478-29939509
  hyper
tttaaattcttctctacggtgaaagccaatg

SEQ ID NO: 6214 - DNA, 30 bp, Homo sapiens
  chr8:30241451-30241481
  hyper
gaaggctccgggcgcgtcgcaggacccgcg

SEQ ID NO: 6215 - DNA, 297 bp, Homo sapiens
  chr8:30241764-30242061
  hyper
ccgacctccctgccctcggcctcccgggccctcgccctccgaccagccgctgagtcgggggctggggtcgccgcttccgcccgcggcccgctgcccctccccggcgcgcgccatccggccgccggcccctcctcccgcggggggctccgtcccgcgccccgtccctccgggctgcagccggcagcccacgtccagggagggcggagggaggaggagaggcgcggagaggagggaggggagaggggagggaggaaggcgagagaaagggagctgcttccatcccggacttcccagagc

SEQ ID NO: 6216 - DNA, 1375 bp, Homo sapiens
  chr8:30242285-30243660
  hyper
ttcctcccctggctcccgccctccctctccaggtcgccctcccggggcccgattgtctcggtgccccgctcccggcccgcgccctgccccgtctctcccttgcacttcctgagtcgcccgccgccgccgtcgcagactcgccgcgggagccccagcccaacccgagcccgacagccactgccccggctccagctccagccccacagcccgcggcgcccgcccgagggagccccggcgcccggggaaggctccagtgggctagcgcgccctcgcccagccccgcgccccagccctgcccggcccggcgaggaaggaccgggaagatgaacaacggcggcaaagccgagaaggagaacaccccgagcgaggccaaccttcaggaggaggaggtactgggcggctcggtgtggtggcgggggcgacgcgggacccagtgcgggcggccggcggggcgcgggcccggggcgcggcggtggaagaaggttcaggcatggcccgtgccccggacgcagccccacagtgtggcccggggagggtggatctcgggagcgtgtgtttttgtgtccacgcgcgtctgcgggccccaaattgcgtaactccaaggacttttcggagacttttgtaagtataatgctcagctttgtttgcccgggatttataagtggaaccgagagctgactcctgggtgacctcagataatcgggactcggagggtcaggacttagggccggggctggaaattgtgtatggattcagggtcggggggggagcagtttaaggaagaaactcgggggaaagttctcgttaaaagatacctctattccctgccccctccctttccgtgttaaaagttcttggtgaaatatctttctagccgaggttttttggattaatagataactcatcagccacattcttctctgctgagtcaaagaccccgagcctgggcggtgaacgcttgtgattttaggggccgtgcagctgaggggagcagagtaagagggttaaaaacgcagcaattcaccaaatgctcatcgagggtattttcataggactttgacttctgagcatgcattttaggtggtgcgtccgtaatcatgatgaaagttttgtgactgcggagcgttccttcggtggaaacaaaattgagtagatgtggtcagaaggggagtcggactcaggaacaaacgtttcagaattcagtaggatatttgtggtatcctaccaaatgactctttttgcaggtacgttatctggagtccaagaaattatttctggcgtacttcttaacatcccacacagttgagttcttaaacattctagaggaacttgagagtgtgtgtagatgcaggaaagtgcacgtctaaatatgacc

SEQ ID NO: 6217 - DNA, 64 bp, Homo sapiens
  chr8:30891027-30891091
  hyper
gggaatgaggaccgggcggcgggaatgttctcacttctccggattccaccgggatgcaggactc

SEQ ID NO: 6218 - DNA, 1131 bp, Homo sapiens
  chr8:31496427-31497558
  hyper
gaatttcagtaaaagaaaaggcgggggtcatgaagaccgaaggatcaaaggagcatggagtagaggaggcgtcacatctgaagtgcacactgtgtgtgcgcgctgcaaggagagagagcgttataaagttgttgttttaatcgctgcttgtcgcctgcgaacatgttgctcccttttaagtgtcaagcaacgggttcacccaaaacttttctgcaccgaggacccgcacgcccggggtcccacctgcccctctctgcctgcctcccaccggcgcctgggcatcctgcgccggctacaggtccttgctcactgaagcgtcacctctcactccccagtaagcctccgcagcccactcggactgcagcctgtttgccgcccgtcctcccattgcagcactcggggcgacagagagggaggaggcgcgcggggacggggacgcccaggaggacccactcgcgggtcccgctccgctccggcagcagcatggggaaaggacgcgcgggccgagttggcaccacaggtaaacaggctggcgaggcgcaggacgctgtcgccgccgcggccacccagcgatttccaggcacgcaactccgcctccagggctctctccctcgcgctctctcccagccgcttgctcgcagccccagcagccgccgcagcatcacttcacacaaaggactgtcacccgcggagcagctcctccacctccacgtcctcctccggtgacagcagccccgacagcagggctcgggcgcggcggcggcgcggggggtggggggacctgtcactccctgtaactgaggcggcggcagcggtttttttgccttttctattttgccttttttttttttgcccttatacctcttcgcctttctgtggttccatccacttcttccccctcctcctcccataaacaactctcctacccctgcacccccaataaataaataaaaggaggagggcaaggggggaggaggaggagtggtgctgcgaggggaaggaaaagggaggcagcgcgagagagccgggcagagtccgaaccgacagccagaagcccgcacgcacctcgcaccatgagatggcgacgcgccccgcgccgctccgggcgtcccggcccccgggcccagcgcc

SEQ ID NO: 6219 - DNA, 135 bp, Homo sapiens
  chr8:31497576-31497711
  hyper
cgtcgccgccgctgccgctgctgccactactgctgctgctggggaccgcggccctggcgccgggggcggcggccggcaacgaggcggctcccgcgggggcctcggtgtgctactcgtccccgcccagcgtgggat

SEQ ID NO: 6220 - DNA, 30 bp, Homo sapiens
  chr8:32405412-32405442
  hyper
acttttctctgcgccgtccttttccgcgtg

SEQ ID NO: 6221 - DNA, 89 bp, Homo sapiens
  chr8:32405777-32405866
  hyper
gaggtgggtggctgcggggcaattgaaaaagagccggcgaggagttccccgaaacttgttggaactccgggctcgcgcggaggccagga

SEQ ID NO: 6222 - DNA, 30 bp, Homo sapiens
  chr8:32406135-32406165
  hyper
ctcgctctccccctcgagggacaaactttt

SEQ ID NO: 6223 - DNA, 345 bp, Homo sapiens
  chr8:32406598-32406943
  hyper
tcccgggagcgcttcgctccctggcacggcccctccccagcgccttagcggctgagcccagcccgggagtgggacctgggctataggagtcgaggctgcgtgcgcgcgtgccccgcgccataagcgctttgcacgggggccgtgtgccctctagcgggaaacgctggaatgggccgcctggagggagagccggtcccctcggtgtgcctggcagcgcagaagtgggtggtcgagcaagaggccgcgtgggaagttagcttcggcgttttggggcacagggcaagcgatgtagagtgcgcgccggttcatcttgattcagtcctgtgctacggagactcaagagca

SEQ ID NO: 6224 - DNA, 30 bp, Homo sapiens
  chr8:33370084-33370114
  hyper
ttagagtcttcctgcgatggggcttccaga

SEQ ID NO: 6225 - DNA, 510 bp, Homo sapiens
  chr8:33371776-33372286
  hyper
ttagctggtttctggagctagcgttttaaagcctgtagccacaagcgtttgaaaattcaaattctagcgtcaaggtagaagcccccagctggcgtctggggcagccctgagggaggtgggtcgtcgggttggcggatccggcttgggcccgccccgccagtgtcggcgccgggtgcgcagggacagcagagcgctgtcttgggcatgggtcgcaggcggcgcccggaacgggccaggggagctggaggctgcagactcgggctcggcgggtgtaggaaccagtggtgtttgcttgggttttgagaaggcgcgagaagggtcgcgcctgtgcgaccgccctgtgttgggtcccccacgccgcgtcggcattgcttgttccctcttcctgcgctttcctggagggtagaattgcgtccgattggccttcagttcccgaggagctgcttccatttaggaccttgtgactctcatagcttccacggtttcgcaggagcccgaggaggcaaactt

SEQ ID NO: 6226 - DNA, 810 bp, Homo sapiens
  chr8:37553374-37554184
  hyper
gaggaggcgcagctcccgctgcaccgcgatcgacgctgcggagcgagcccacccgccccgggagctcgcctccccggtgctcccccgccctccccgcccccccagcggcgctgcctcctccaaatgagcgattcgcccgctggatctaacccaaggacacccgaaagcagcggcagcggcagcggcggcggcgggaagaggccggcggtgccggcagcggtgtccctcttgccaccggcggaccccctgcgccaggcgaaccggctcccgatcagggtcctgaagatgctgagcgctcacaccggtcacctcctgcacccggagtacctgcagccgctgtcctccactcccgtcagccccattgaggtcagtccccggccgctgcccccgggcgccggccccattcctcccaccgcgaccgggaccctgacccagctcccagcgccccggggctcggtgcgacacccaagtctggtcacgctggcgggctgagtgaggaggggaagaaaaccgagggatcagagcccaccagggcttccccaggcttccccgtggaagggtctccttccacgctcgcccttcggagctccgtgttttctctcggattggatttgctcctggagtcccctctgggtcctttacttttcctctgatccccagtttccagccaggagttggtctctgctgggtcttccccgccccccacgccgggctgttttctttgaagccctggctgcccgggtcccacttcgcctctgtcccatccggtgagggcgcacggcgccctggcgctcccgatcccggatcttt

SEQ ID NO: 6227 - DNA, 86 bp, Homo sapiens
  chr8:37595292-37595378
  hyper
gccttgtgttcacacgacaccaggctggatatgagtcactcgcagggagctcagcttggtgaggtcctctcgctgttgtggccttt

SEQ ID NO: 6228 - DNA, 30 bp, Homo sapiens
  chr8:37655254-37655284
  hyper
ctgcgggggacaggcgcaccccagagaaag

SEQ ID NO: 6229 - DNA, 502 bp, Homo sapiens
  chr8:37655488-37655990
  hyper
gctggaggagtctccggatttacctggctggccttgtcccttcaattggggtcatcccatccttgccccctggcctgccagcgccgcttccagccggtctccttagggcaaggggaggctgggctcagaaaagtcggcccttggaataccggcgctcctgggctgcaggagaccctggcgtccccatccctctagaggcccctctcccacggcgccgtttgtgcagtgagctctgtgctgggtcccgcgtccttgcctctcctttgcctctcctggaagtaactcgagctttggctgtttctccattgacttcgcgcaaagattgcgaagaaagaaacgcggctggggaagcggggttccctcaccgcagcccacccgggcctccttccgcgacttccctcttagtcagggcctcagtacgcctttgctttgctggcagcgagcgctgcagcgccgcagcccgaccccaagcctcctacaagggggtcgcaagtcccagcag

SEQ ID NO: 6230 - DNA, 71 bp, Homo sapiens
  chr8:37656049-37656120
  hyper
cgcagctccacgcacgccgtggatttgagggtcgggcccccgcggccgccgcttcctttcctgtcccaaat

SEQ ID NO: 6231 - DNA, 269 bp, Homo sapiens
  chr8:37756751-37757020
  hyper
cctcctcgcgccacacgggcgcgcccaggctgcgctccgacacggaggtggcgtacttctccttgcccacctggatcaccgcgtacgcgtcgctcgtgcccccggggcccttggcccgcaggccccgcgcctgcagcaccgtcacctgcacgtgggttggggaccacacggcccccaggccccggccagccgagaccattagggacatggtgacgataacactccagaagcgaggagaagatcgccgcgactggcggcctccacggccc

SEQ ID NO: 6232 - DNA, 127 bp, Homo sapiens
  chr8:37757226-37757353
  hyper
gcaggggatcacgtgcgcaggggcgggcgcatcgagaatctaatctgagaggtggtaggtgacggatggggtccccagctgccaaaggtcgcacggcgggaaggagctggccgaagcactgacttgg

SEQ ID NO: 6233 - DNA, 173 bp, Homo sapiens
  chr8:37822756-37822929
  hyper
ccggtccctctgccccggttacctacccgtcgagccgttggcaaagcctgggctgcgctgggctgctccgggccgcaggaacgcccgaggggaagagggccgggcgggcggcggcgcagggctccggaggcaggcgacggccgcagcggcacagaagacggcggaaggcgctg

SEQ ID NO: 6234 - DNA, 356 bp, Homo sapiens
  chr8:37823134-37823490
  hyper
gaggcaggaggcgcgcgggccgccggccgcaggcgggcaccccttcgggcggagcgcacgtccccaccggggccggggccagagagcgcgacggcgccggcggagactcctcgggcggaaagcggcccagctccccgcgcagcaagcgcagctggcgcgtagccaccacgaaaacccgcgcgtagacgaagagcatcacgagaagaggaaggtagaaggagacggaggaggacagcagcacgtagggcatgttggaggcgaaggcacagcagcgcgggttggagtggcagcgctgcgcctcggcgtcggcccctacgcgccaccactggctcatgatgggcgcaaacgacaccgcg

SEQ ID NO: 6235 - DNA, 105 bp, Homo sapiens
  chr8:37887620-37887725
  hyper
gaaacagggagtgccgaagggtacaccaggcctgatgtcctaatgcagaaaccgggccttcctgcagtgggccgggtcagctcggatctccgcgcggtcctgagt

SEQ ID NO: 6236 - DNA, 50 bp, Homo sapiens
  chr8:37888915-37888965
  hyper
ggaagctgagctggcacgggtgggggggccagcctcgggctgccctcagg

SEQ ID NO: 6237 - DNA, 386 bp, Homo sapiens
  chr8:38008245-38008631
  hyper
tcatcgcctccttcccgcagcgctcacccttcatgttgcgcatgtgtctgtaggagctcccagcgcacagcttgaatgtcgctagcagcattgtttcctggcaaatgtggcagtggtggggtcgctgccgctgctgctgccgccgctgctgctgcctcttctctcaagggtggttcttcgtccttcctgagcccctcaagcttcgcctctgagtcccgcagctgcagcctggacctggtgttctgcgtcttaaatgtcccccgctgaaggctgtgcatcatcatcaggagataaaaacgccatcactcactgtgcaaaggaaggggtcaaggatagagcgattgcctcacactgctgctttggccgtttgtggggagcttggggcg

SEQ ID NO: 6238 - DNA, 44 bp, Homo sapiens
  chr8:38089776-38089820
  hyper
cttctggtgcctgcggcgctgatcgttgccgagtggaaggagtg

SEQ ID NO: 6239 - DNA, 30 bp, Homo sapiens
  chr8:38240879-38240909
  hyper
cacagagacgtgaacgtaaaaaggaaacag

SEQ ID NO: 6240 - DNA, 608 bp, Homo sapiens
  chr8:38323126-38323734
  hyper
ggccatcggcaaagacggccggcaatagcagaggctgctgaacctcggtcaccgagaggaaggtggatgacccgggcgtgggggtgattacccagaccaaggcgcgtcccacggggccctgctacttcgcttttaaacaagcctcagggaggaaaccgggagcccgggccaagggaggaaaatggccactttctgctaaacagtctcaaggctagatagtattccaaaaaaagcgctggtccggaggtgcaaagggtagggcacatctgcggaggaaacagtcaccttaattaccacgtctagagaaagtgcgatttcattacagcctccaaaactaccgcccaaagaaggaaaccagagaagtgttttcaatttgaaagaggctggaaagaagcgggtaagacaccgactctccccaccctcccggcaactttggaccacaaggcgctttcctgcctcaaagactattaccaaacacaactcgaaaatccaaccccgctttcaaacctgtagccgttatttaaacggtaaaacaccccactttagtttccgggggatgcggcccaaatcagtccttaaaaacacacagagagcgcctctggcagcag

SEQ ID NO: 6241 - DNA, 97 bp, Homo sapiens
  chr8:38323755-38323852
  hyper
cgcaccgggcttgctccgggaggggcgcgtgacgccaccgcggggcagccgagaggggaccgcgggctccgggcagggcaggcgctcccgcagctcc

SEQ ID NO: 6242 - DNA, 30 bp, Homo sapiens
  chr8:38324507-38324537
  hyper
ccgcaaacatgggtcgtagcctcacttttc

SEQ ID NO: 6243 - DNA, 850 bp, Homo sapiens
  chr8:38325442-38326292
  hyper
gggggccgctcgggacgccaagcccgccccagatccgggggcgccgcggctcttacctcgctcggcgtggaggttccgcctcgggagagtccgccgtggcttgtgcgagcgggcgtgtgcccgcgtccccggctccggcccgccgcccccgggctctgttcgggtcctggcggggtcgcaagagctccgcggccggcgctcgactcccggcggcgctcggtgctcggcgcctccagcccgggcgggaacaatggagccggagctggtgccccggaggcggggcggggggagggctcccgtccgccacccggggtctccagaccttgtgcccccctcctccagaacgcagcggcggcgcctcactttccttgcagaccgggctccatcgccctgcggaggccccggcgccgcggcgtgcccgactgcagcacgggtaccgtgcgccctgcggggcgccccgagctcggaccggagaaaagtccttgggttccgcggcttttcaagcagcggcgcgctcgcggccggggaaggcgaggtcgccgcaatgcgctacgaggggtctcggtcccgtccggacgtggccgcccagctcccggcacacccgggttcctccgcgcgctgcggctgcaccggcgtcccggctcccgctagctgccgcccgccgccgaggacgccgcgcctgtggccgcaagagcgctccgagcgctatgcgccggcggggcgcgagggctcgctctctcactcccacccgcgctggtccctcctccgcctccgccccctgcagctgcctgctgggccttgtagttccccagccgcggccccaaaggacggggagcgggccgagctgtcc

SEQ ID NO: 6244 - DNA, 31 bp, Homo sapiens
  chr8:40047837-40047868
  hyper
caccttcaacattctgcgggcaatgatgttc

SEQ ID NO: 6245 - DNA, 139 bp, Homo sapiens
  chr8:41165779-41165918
  hyper
aagctcccctgttatttaaagcgcaaggctttgtttcaggtatgggaaaggcgaagttggatcccaggaagagcggctccggggaccacagcgagtccctgcgaggccaaggcgcagagctgccgctcccgggccagcc

SEQ ID NO: 6246 - DNA, 151 bp, Homo sapiens
  chr8:41166000-41166151
  hyper
cgagcaacctcgggccctcagtccccagcaccgggacccagcggcgggcgggcgtagggtggcgcgggttctcctgcagctccggccgggggatggagggggcggctcgcgcacgtgggaggaggcagccttaccttggggcttggaggct

SEQ ID NO: 6247 - DNA, 413 bp, Homo sapiens
  chr8:41166266-41166679
  hyper
cgcgcacggcctcgcagagccagcgacacgggtagatgggccggtccaggcagacgggcgcgaagagcgagcagaggaagacctgggtgccggcgtggcagttcttgttgagcaggggcacccagctgctggcctgctgcttcacctccgccatggtctcgtgctccagcaggttgggcagcaccatcttcttgtagcccacgttgtggcacagccgcaggtccgcggggatgtccacgcactgaggtggcttggtgtagaagcgcccgctctggtacgggccgatgtccgactggaagctcacgtagtcgtactcgctggccgagcccacggccagaagcgccgcgcccagcgccagcagcacgcccagggctgccccgcggcggcccccctcgctgcgcccgatgcccatg

SEQ ID NO: 6248 - DNA, 243 bp, Homo sapiens
  chr8:41166745-41166988
  hyper
cgcaaacttccagggacctccggggacaaaaggcgcagtccccagcgttgcccggctccgcggccgcaagctgctgcccggtccccccggccagtggcggccctcggcctgcggtcggaggcggcgcgggcggggaggcggcgctgcgggctgggtgcgccccggctcccggaggtgcggcgagcaggaaggcgcggggcggcgggcgcgcggcactgactccggaggctgcagggctggagt

SEQ ID NO: 6249 - DNA, 128 bp, Homo sapiens
  chr8:41167025-41167153
  hyper
cgcgcagccaatcagctcccggcggggcgagccgcactcgttaccacgtccgtcaccggcgcgggagccaatcgcctccctcgcgagcgggttcggtttactagaaccagacgcggctcaacacccct

SEQ ID NO: 6250 - DNA, 132 bp, Homo sapiens
  chr8:41168153-41168285
  hyper
aagggtccccactagggcagacgccaagaggacggtatcagcacaacagctcggcccccaggaacagaagtctctctgccaccttctacctcgaattcctgagaattcttcgtaggtttcaaacattcccct

SEQ ID NO: 6251 - DNA, 224 bp, Homo sapiens
  chr8:41686228-41686452
  hyper
acaggaactgctcctcgcgcccgctccagagtcctttacatctttggggagagggcatacggggagctacatttcattttcctgaagattttccacgcgaaagtgctggggagagagttgggcctgggaggctgcgccttcttcccgcgaatcccgaaaactgcgcggcaaaggcgggttccgcagaagtcgcgcgtgacccggggcgccgccctcctcggggc

SEQ ID NO: 6252 - DNA, 16 bp, Homo sapiens
  chr8:41733637-41733653
  hyper
cctagagctcggagcg

SEQ ID NO: 6253 - DNA, 133 bp, Homo sapiens
  chr8:41753619-41753752
  hyper
cgggaggattctgcgcgccctcagcctcccggccacccgctctgcccttccagcctgccgccctgtccccttcccggccgcgcagaagcctccgtccctcctctacgcccaccgagccttccccgctcgggtg

SEQ ID NO: 6254 - DNA, 1438 bp, Homo sapiens
  chr8:41753770-41755208
  hyper
cgggcgccgcgccccaccgcgtcccgggccgcccgacccctgcccccagcagccacttgcaggtgccgcggtcgctgggctttcaccgccgccccctcctaccttcttctttcggtcacgggagcggtttctccgcttcctgttggattcctccttctccttctgctcctggagggcctgcgcctcgatgtctttgattttcttcagctgtttggccgcttgagccatggcgggtcacggcgctcccgtccccgcctcctggacccctagcgctcagcgatccccgaggcgacaccccctaagaaggggaagggggtctctgctccacagaggggacagcgttcgtggcgccccgagggccggctgctgcggggtcgcgggaaggcgaaggcagttccggacgcggagggcgaggggcggctgcccgcggcccgggatggcgctgccgccgcggccggagctcgcttgccggcgcccgggacgggctctgggcagggcccgccgcctccctccctccgcctccctccctctcctgcggcggcggcggcggcgaagcgggggggcgggggcggggaggcggctcgtactgcggcggcggcgggcggtgagcggccgcggaaggggcggattcgggcgctcagcgcgggaaggcccgggggcccggccggcgcggcgaggctgggcgcactgggcgtccgcacggggtcatggcgagcgccgagcttccgcctttgcagagccccgcgccgtcgggcggcgggaacaaagcggccgctctaccccggaccccgctgcgggccgcagggccaagccgggggaagaggggaggctgcggcgggcggcgcgccccgcgcccgggcgacccggcggaccagcgcgcctggcggcggcgagcgcggcgacatcgcgggagcggaggctcggcctagagggcgggcggcagagggcaaggaccgggcttggggagcccccgggcggtggccgctgagggcccggacgcgctactcccgagcccggggtgcggttcctccccgggcgccctcggcgtggggcgcgcgcctccggggctccctggggaagagccggttccccgcgccgcacgctgggagcttgatttgcccctttcagaccatgtgggcctttcatttgcatatttccgaattatagatgaaaacgtatccaggatcaagtgaattgttttcctttgagtcctcttgggacagaaaaggaagtaggtccccgctccagccccgcccgtcccccatccccggcgctcccgcgcacgcctccctggggacgccgcctgcgcccgtgccccgcggggaagagctgcacttgggtccgcagcgccagcccagcctgcggcaggcggagggggcctagggctcagccaaccaccccgtcacgccgcacaggagccagccggggtccccggctc

SEQ ID NO: 6255 - DNA, 35 bp, Homo sapiens
  chr8:42040328-42040363
  hyper
gaggcaggaggcacccgactcggtgaggctgtgcg

SEQ ID NO: 6256 - DNA, 34 bp, Homo sapiens
  chr8:42807055-42807089
  hyper
cgtggcgacagcgagactccgtctcaaaaaaaaa

SEQ ID NO: 6257 - DNA, 202 bp, Homo sapiens
  chr8:48604759-48604961
  hyper
ccctttttaaagtgtacgaatcattggtttttattttactcacaaagttgtgcaaccagcaccctaattctggcacattttcatcacctcagaaagaaaccttgtaccttcagcaggagctccgcactttctctcccccagcagccactcctctgctttccgtctctgtggatttgcccgttctggacgtttcctgtcagtg

SEQ ID NO: 6258 - DNA, 165 bp, Homo sapiens
  chr8:48649824-48649989
  hyper
ggtctgaggtatgggtcgttgctgagtctctcccgccccggccgcgcgttaccggcagtctgctgtcccggcggccggcaggaagggcgggctgggcagctgcttgaagaactgccggaggccggccaggtcccgcgtgagctgctccacgcgctggtgcagctt

SEQ ID NO: 6259 - DNA, 294 bp, Homo sapiens
  chr8:48650416-48650710
  hyper
ttgctgttgaagaggtcggcgaagagctcgtcgtggcacagctccagggtgggcacggcggccatggagtcgatgtaggcgctgaagtcgatggcgctctcgtcgtcgtacatggcgggggcggcggcgcctggctcgcctagggcccctggctcggccccgcggcccggcttgcccgcccggcccggttcgtagaagggcgcaggctccgcaggccagggcgcgccgcgcgccgggccgtccaggctgaagagcgcggcgctcatggcggcgtcgggccgggctctgcgtcca

SEQ ID NO: 6260 - DNA, 213 bp, Homo sapiens
  chr8:48650955-48651168
  hyper
gctgctgctccctccccggcccgggccggcctgcgctgcgctgctgggaatgacactccctctgccagcactccagggccttctcttcttcctgtttgtgggcttggaacctcctcgctcctcggggttgggagtgaaatcaaaaccaggacttggccgcagcgcgcgcgtcccaggccggctcctgtcgccggagggcggggggtggagacc

SEQ ID NO: 6261 - DNA, 54 bp, Homo sapiens
  chr8:48651370-48651424
  hyper
ctctcctcggaggtcccgggtccggccggccctgggggtcgaggcccagagacg

SEQ ID NO: 6262 - DNA, 30 bp, Homo sapiens
  chr8:48872807-48872837
  hyper
gcctggccagtaagcgcgcctctttggccc

SEQ ID NO: 6263 - DNA, 20 bp, Homo sapiens
  chr8:48920488-48920508
  hyper
atttatttttttgaggcgga

SEQ ID NO: 6264 - DNA, 30 bp, Homo sapiens
  chr8:49292935-49292965
  hyper
accccccggggctgcggggccttgcgggga

SEQ ID NO: 6265 - DNA, 435 bp, Homo sapiens
  chr8:49309321-49309756
  hyper
ctgagtcccggggcacgtccccggcacaccatcccctctcttgggtgagagtctccgggtgactccccgcagctccccctgctctcacctccaccggcctccccccgccgtggttcccgcggtgcgccctccccaagtcccttcctcccactgccctgggtcccagagcacatccgccggcggcccccacatccctctgcctggagtcccggtccccgcgcacccccgcccccgccctgccttcacctgccgcaggccgcccgccagccccgctgaccgccgcccccgcgcttcgctggcgccagcctctcgatgggtcttgcactttgattatttgtgttagcagttaatttagcaccgtggccacgtgtgccaaagctgcctccacttcctccgggctcccaacaaacggcacttttatgagatcctttcaaa

SEQ ID NO: 6266 - DNA, 178 bp, Homo sapiens
  chr8:49309797-49309975
  hyper
cggtgcagactccatttctctgccctccgccctccaccggggcgccccctctgcacaggccttatggcagctgcgatctttcctgccgttgcaggaaaggagctatttctggcaactctgtccctccacccagggcactcagcctgatctaatggagatttaccgagcaggtccctgc

SEQ ID NO: 6267 - DNA, 407 bp, Homo sapiens
  chr8:49468662-49469069
  hyper
aatgtattaggaacatttccccggtcggtcattagcgcgcgctctccccgcgcccagggtgcccccgtgcccagggtgcccccgcccggcgcctccgcggtcccctcccgcgcgcacctttccgagtgccagtggggcggccccgagaccgcaattgctctggcccggattgacgagcctccgatgcccatttactgcgcgcggcagccactctggagccgcggcacatctggatggagtcagctgcctagcgccaggggccagcacggcccagccagcggagcgcggcggtgagcgctagggaggccggcgcccgggccgcctccgcggccgaccccctgtccccacccgagcaggatttcctgatgtaaacacagcggctctgcgagaacagagctgctctcctg

SEQ ID NO: 6268 - DNA, 30 bp, Homo sapiens
  chr8:50822550-50822580
  hyper
tccactggctgtgccgcctcctcgcccgtc

SEQ ID NO: 6269 - DNA, 30 bp, Homo sapiens
  chr8:50822786-50822816
  hyper
caggagcaggcgtccggccccttcccacag

SEQ ID NO: 6270 - DNA, 522 bp, Homo sapiens
  chr8:50823109-50823631
  hyper
ctggcgtctgcacccgttgccgagtgtgggtggctgagccctgggtgacagcactcgggaccacgcacccatacccttctttatgctcgttgtcagccagttgccaagagcgggagtgaagagcctgcaaggcccgggagagcgcggattccggagtagggaggcgagggggcagcgtgggagaccagagggaaaatgggctgaaaagccaacaaaaaaaacaacgtaaattgggctttgctctggctttacaaaggcagagattgtcgagccctctgactgtctttgtgccttctttatcccgtcctttgtgaaataagccgttttctgcccccactgcaggagcctaggctgtgggcgactcgctagcactgccctgggcctccaagctgcctgctcgctgagctcagcgctgacactcacaggagctgcgttcgccggatcctctgagaggctctgcaacgatcccgatccaattcagcagcgttttaaaaggtagccgagtgcagatgctttttcctg

SEQ ID NO: 6271 - DNA, 179 bp, Homo sapiens
  chr8:50824128-50824307
  hyper
aaaaaagaaaaaaaaaagaaccggaggggagaaggctagggcggaagacaaggaagctgctgcttggattcgctggtggaggaaagtgcgacctggacctgcgcttaggggctcccgtccccttacttcagcaccagaggggatggacagcgtctccggactgagctgcagccacaggg

SEQ ID NO: 6272 - DNA, 92 bp, Homo sapiens
  chr8:50824352-50824444
  hyper
cgccacgggcagctgggctacttgctcctcgcagctaaaaggcggtgcctcctattaccccctcgcctcccggcccccttccttaatggatg

SEQ ID NO: 6273 - DNA, 23 bp, Homo sapiens
  chr8:51149016-51149039
  hyper
ttttttttttttgagacgcagtc

SEQ ID NO: 6274 - DNA, 30 bp, Homo sapiens
  chr8:53477530-53477560
  hyper
caggcttcccaaagcgagtgcctcgcccag

SEQ ID NO: 6275 - DNA, 697 bp, Homo sapiens
  chr8:53478046-53478743
  hyper
gggaggcggtgcctggggccacggggtcgtcccccaggatgagggcgtgtcccagcgcgcgggaccctcggaagtccgcgctgggccgggcgggcaccagcctcggactcagcgggtctcagggctccctgcgcaacgcctgcctcggatccggaccccgggctcgctctctggtcgccgtccccgggaggacccagtagggtaactgccgcgtcgccccggcggttctccctgggctctgtctcccgccgcctccaccccccgagcctcggggtccgtcacggcttcccctggctggcggggtcagtagaacccgcggcgcctaggtccggacggaaaaaagcagggccggggtgcggcctggatgagcggagatctccgcgccttgggctcaaaggtgcggggtgcgctctgctgccgagcccctgctcgctcaggaacactggccacgccgtcacgccagccgcccctgccccaggtctggaggcccgacctgctctcctaggcgcagcaccgcgttctcttccgcgtgggggagcggcgggcggaagaggtctggggctgggcaccggggacacgcgcccagctcccctggcctccctggggggagtggccggtttcagtgcttccccaggtgaaatcgccaaggttgaccagtgcgcccaaaaaagcagccggctggatttttcttcaaatt

SEQ ID NO: 6276 - DNA, 30 bp, Homo sapiens
  chr8:53626223-53626253
  hyper
cacaagtcaagatgcgtcttgggaggttcg

SEQ ID NO: 6277 - DNA, 861 bp, Homo sapiens
  chr8:53853598-53854459
  hyper
cgctgcgactgtgcccgcaggttgaccttgccaagccctccaggtgatgcgcggccatgccgggtgaggagaactgaggctgagatcgccacactgagggctccctaaagccgaggtggaggaagaggagggtagaggaggagggcggtattgctgggaaccgccccctccctgccctgctccctgctgccccacccgagccctggcagtctggaacctggctggagtcggaactctccgcgccttcgaagggaggcccgaggacgctgccggcgcccccaggcgtcggctccgcgcggcccctgctgtagctggcgcacagccccggcgggtccccttgtcctccgcgcgctctgggaagacggtcaggcgcgcgcgtttggcgcccacccctgtgagacccgcttggcctggcgccgcgggcggggaccgctgccgaggccgccagcgcctcttcaactggggaaaacacaacaactcgggatgccccatcggagtgtgtatacacctgtgtgtgtgtgtgtgtggtgtgcgcgcgtttgcggaggcatgaaatgcggggaaagaggctggcgcttggcagtgactgcctagaatatgatacgaatagtgatccttctttctgtctgcccctactccttttctttgccttttccctttcctatccgtgatctcccctgaaaatgtcagactcccggagcaaggaacccggagtagcccgggcgcgcggttccggcgccccctggaggagccagcggccgagtgcttagcgtcggaggatcgcggggctttgtggtggagcactccggctgagcgcgcttcacagcgctgtggcacactggtcatcgttgcttatagagg

SEQ ID NO: 6278 - DNA, 67 bp, Homo sapiens
  chr8:54163282-54163349
  hyper
cctgaccctcactccctgccccgcccagcccccagcgctgcgctgtccccgcgctcaccggatgatc

SEQ ID NO: 6279 - DNA, 432 bp, Homo sapiens
  chr8:54163694-54164126
  hyper
cgccctggccagcggcgctggggacccggagcctgcggactcccacccgggccgcaagtcgccgggggcaggacagggagaacggacttctcgctgcctttccggccagcaggcgcgccgctgggtgccagagaggggcgaagagcgctcgctccttctcccccagcccctgaggtgcctccctcaccaattctaggcaccggcccctggtggaactgtccccagactgcctgagtccccagggtcaagcccccttcccacctcccagcacggagctctacctagaactgcacctcgaaagcccaaagcttacctatggttcccagagacaggcgaaggcgaggttttttacgggacgccctggtaggtgctgaaccgcgcgctcacgagtcccgctcagctcttggcatcacctgctctcggaccccggcc

SEQ ID NO: 6280 - DNA, 93 bp, Homo sapiens
  chr8:54754897-54754990
  hyper
tggcggtctggctggacgacaagaacctacaataatgaaattctatgtaattctcactcctaaacttccagatacaaacgactgattttaaca

SEQ ID NO: 6281 - DNA, 712 bp, Homo sapiens
  chr8:54789093-54789805
  hyper
gctctctgaagtgcagcccttcgggcagctgaaggtctttctgcagataacttttctcagatcgaattttttggctacattgatactcttcggctctgtccttgccagaagttcggaaggattccagcgccccacaccttgcttgattcaccctcatcccctcccctaactggagaagccgctgggtcccgcgccaggctcgcggtggcttcagagtagcaggggagcaggcggctgatccggaggccagtgtggggccggcaagcggtgactgtctccagaggagcaaaggagccgagtcttgtttttcttggatcaggtttgggacttttattctgtctgaccatttccaccacttgcctcacaagagtctctgtctcgaagcacaggaccgaagcaaaatgcctaatgaagcgtgcctgaggaaggggcaggggcttgcaagtgacttgggaagaaggactggggcgaagggagaaaggaggttacgagttcgcacgttctcacaaaaccatttgaaaacatgagctggagacgccaaattctgggacccacgaaaggctttggagctcgctcgggctcctcgaagttgggcgtgcgtcgcagaacagtgctgggcgctctctttcagcattttcggcttttttcaagcccttgcgtagggtcgggaaggccgtgggtgggctcagtcaggctttaggtcgccaggaac

SEQ ID NO: 6282 - DNA, 694 bp, Homo sapiens
  chr8:54790022-54790716
  hyper
ggaggggcgcgtcccctgtcctcctcccgagcgagacgaacgctcagcagctcgttccctgggcgccaagaccgatttccaagtcgcccactttccccctcgagggagctgttggcgcttctccagaagcctcctcggctcccagctccagcccctaaaataaaagcaccttgccagagagcgggggaggggagcagctgaacgaggagaatgaaaatactgggagaacgaccccattctccaggaaaaggtaatgaggggaagtgaaacagtgtgaacttactcggaaatgcaaaccgagttcaactcacccaggagcaaacaaacgacagcaagacaaatcagccaccgcactcgcggcttcccagaaagggcctcatgaatgagaatgggttgctaggtttccttccctctctcctgacaatcgcttcccacaagacttccaccgccgaaagaatacaggccgggcctggtgactgcggagtgagggaaccgcgccaggcccacgaggccgctcgcgaccgctcccgccttcaggaccctggagagcggccgccgcgcccctgggacccacgcccaacccagaacacccgcgctcgcctcccgcgcctcaccaccccagcactttattcgctgcttcccgcctccaccttcattttttttggcaaccaccgctcttgtttttcacagacag

SEQ ID NO: 6283 - DNA, 486 bp, Homo sapiens
  chr8:54792184-54792670
  hyper
cgccccacacccagcctccccaggacaccagcctctcccgattcttcctaaccccaactgacccgctccgctggggctagcagtagggagggtggcaaggtcgggaaggccgggacgtggctgggcaagtcctaggacgggacattggcggctcccgggacaccgcccctccccgcgggaagacactccaagctactttttcctgggccatttcctttccatggtccaagaaaacgggagggagccctcgctcttccccgaggctgcctttcaaactctcagcgtgtcgctctcctccgcctactccgagcctcccccaaacgcgcctccgcctgctcccagcgctcgctctcccactcccctgccctctcggcaggcaagggaggaaatgacgtgatgttatttttgtgtcaggtcagtttccagcttcagcttagccctccgggctccagggaactaaccccgcggccccaccgggtcccactc

SEQ ID NO: 6284 - DNA, 2079 bp, Homo sapiens
  chr8:54792701-54794780
  hyper
cggtgctgcgagtccggagagctgggcggctgggttccccctcccgctgccccctggtctactcctttccccggactccggagtccctggagaaggggacgcggagggcgactgccgagggtctcagcgggatctggagtcaggggttagttcccccccttatcccccgctcggttgctgggtggggcctccgcgctctggctagctgggagggggcgagggccgctttccagggcgggaagaccggaggcctaggctgcgccggggtggggcggggacagagctcagagaggcgccccgggccggggagaaggtagggggctgccctccagagacgcgcagtccacagacgcgaagctctggggaccaagcgccccctccatgcctgccgcccacccccgctccttcctcccgctcccttcattcacgaggtccgagcacgcagtccagcacactctagtctcgctcggccccgcgcgccgaggggaggcgatgacacagagggcttcgcggacgccctctacgcgcgcctggcttcgcatccacactcttgggacttgctaatgcggggctggagcagtggggctgcggccggggtggaggtcgcgccccgcgtggggcctcgggggtacccctagcacccgcggcggtggagtgcgccgccgctggagggaggcgagacgtgggattgcccggccgggtaaaaggagtgagggggcggggaggaggcagagcaaggggaggaagaggccgggagaagagggctagagcaaagaccgagagccggagaaaggcgaaaggcgcggtgagcaatcgccgacgtagagagggcagccctccgcgctgcaatattgagaaggcacccgcgggacgcatgcgcacggcggacggaggcgagccggccggggcttcctccccggccggcagggtggacggtgggctcgtgagtatcccagttcctcgaactctctttcttcgtctcgggctcgccctgaggcttcgtgctggaaagtggccgaggctgggaggggcgcgccgctcgtccggacctcagggtgtcgccgttgctgcggggcgggagccggtgcgagtcgggggttccttcccgcagtgcgagtttgggggagtggggctgcgagtgcgtccgcgtgcgaagaggggcatcgcgccaccaggatcaatatgtcccgggcctgccagggcgtccgcgattccacctctgcggcttcgcgtcggtgtcttggtggggaacgcgggagtctagtctttagaccctagaaatcgcattgaccacccgaagcgtatttcggaaagaccaggcgggtggaagcgtcggctttctcacgggatagggagaggacaaggaaggggttgggcgcccggggctggtggtttgagcgccgctgggaagggtaaggagacagagcctcctggaatcgtagcgcctccttttaggagaagtgcaaccagggcaggggcaccgaggggcagggtgaggaagtggacgccccacgcgtggaccctagaagaccgactaggtatgggcgttcactcggagcctctgttcacgctcttgaaaaccgaatgaacagagaagtgccctccacccttcgcctgcgccagggcagttaacgtgcaggcgccgccgggattttcctggaacaaacccgggcacttgatcttccgcaccctcggagctgccctgggaagtcgaaacaagtctgggcgcccggactgcggagactggaaagcagggggcggagggcgggagactgggggcgggaagtggaggtgcaggctgcagctggggaccgcggtgggcgttggaggggagggtctgtgtgcgcggctgtcctccagcgctgggggagcggacgggccaggggcctctagggaagcggcgctccgggaccggggtggctttcccgtctctgtgtgcgcggcgatccccacacccagctcgggcggaggagccctgagagaagcggctagctgagagtggggtgggcgttttggggaaaggtttgcgtgcgctgcggccctaccgctgctagagaagtggaagagagagagtgggcg

SEQ ID NO: 6285 - DNA, 123 bp, Homo sapiens
  chr8:54794826-54794949
  hyper
cgcttgtgggggagtgagtggggaaggggctttgggagaggcggcgcgcgggcactgaggtgcatcgtgagcttcccggacttgacagcatcaaaggaaaatcctggcgagcagccagggcca

SEQ ID NO: 6286 - DNA, 165 bp, Homo sapiens
  chr8:54795139-54795304
  hyper
cgtaacttggcaaaagctcgcgccactgccctccggcctgggcgacagagcaagactccgtctcaaaaaaaaaaaaaaaaaatggcaaaagcctatcgctctttgtcgaactccccacgttccccagtcacctggctggggttcgttggtgtcaaaaccccagcc

SEQ ID NO: 6287 - DNA, 237 bp, Homo sapiens
  chr8:55366130-55366367
  hyper
ggagatctaagaaacactccacggatgagtttctgaagagggaagtggaccgggaacagcgcatttcctgcttcgcctgtgcaaatcccaggcggggccaagcgggaacggggacacggtctaagagtcgcccgctgccagggaggggttggggggcagcctcgaggggacaccgcggaaccagggagggatgcgcatggagggagtgggagaaggcgtccaagtaaaatgcatgct

SEQ ID NO: 6288 - DNA, 691 bp, Homo sapiens
  chr8:55366951-55367642
  hyper
cgcccccacagacttgctctccagcgccaacccggatctgcctaggtgcccacgggtccttcccgatcgacttgagtgtccttcctccagcccctgctttcccagcatcgaaaacacaaaagcctgccggaaatcacccagcctttgcctggtcactcaggggcccacggataagcgtggctctgattcctccaggtcagccccacggttcgccacctacccgagttaatttctgcgcccgctgaccaaaggccccaactggcaacgggcacagcttcttggtgcgctagtcgcttccttgcccagcctttagagcctcgggtccggcccaaggacccggggacgtgagcgcaattagtagccaggagccctgcgaccctggaccgtgcagtgctaacgcacccgaacggctatgcgagcggtgtactcggctcttacttgtgaaagttgtttcccccaaccccctgcgtaaatctcttgtgttgagaaaagcaaggcttgcaggaagccactccggatgtttgctgctttacatgtggcatctgtggctggctctgataacgtcccggggcaccacgtattaaagtgaagagactgaaatagaaggctccacacaccgcgcgcgggtcagcgacgtcgccgccctccacactgccccccgaaatataagacaagcgaatgatcagaagaa

SEQ ID NO: 6289 - DNA, 149 bp, Homo sapiens
  chr8:55370283-55370432
  hyper
gccagagcccagctccggctagttttcccgggggcaggtgtagccttgggcgcggggccgggggaggggcaaggggcgggcgtggggttggactgggacgtgggactcggaccacggcctgggcgtgggcctaacgacgcgggaccggc

SEQ ID NO: 6290 - DNA, 146 bp, Homo sapiens
  chr8:55370567-55370713
  hyper
cggcttcgggccgggagacccgcgcagccctcggggcatctcagtgcctcactccccaccccctcccccgggtcgggggaggcggcgcgtccggcggagggttgaggggagcggggcaggcctggagcgccatgagcagcccggat

SEQ ID NO: 6291 - DNA, 197 bp, Homo sapiens
  chr8:55370835-55371032
  hyper
cgaggcgccggcgaacagcggagcaccggccggggccgcgggccgagccaagggcgagtcccgtatccggcggccgatgaacgctttcatggtgtgggctaaggacgagcgcaagcggctggcgcagcagaatccagacctgcacaacgccgagttgagcaagatgctgggtgagtccgagtcgcagacccaggcgg

SEQ ID NO: 6292 - DNA, 203 bp, Homo sapiens
  chr8:55371172-55371375
  hyper
cgaccctccaaagcagctttccgccttgctctccggctcccggattccccaggtggccgggggcgcgggtccaacggctctgggaaggcgacttcccggcacctccgggcggcgcgagagcacccttggccctgaactgggccggttgtgtccatccctcgaccccttccctagttaggtgtccttttctgtttttcgaacga

SEQ ID NO: 6293 - DNA, 285 bp, Homo sapiens
  chr8:55371439-55371724
  hyper
cgggtgttccccaagggctcggactcaggagtcccagatctccctctttaacttcaccccggttgcgcaattcaaagtctgaggggggaggtgcgtccaggtggggccaggtggggcctggagcgggagcgcagccgataagccctgcgcccctctcccccttccttccactgtgcaggcaagtcgtggaaggcgctgacgctggcggagaagcggcccttcgtggaggaggcagagcggctgcgcgtgcagcacatgcaggaccaccccaactacaagtaccgg

SEQ ID NO: 6294 - DNA, 74 bp, Homo sapiens
  chr8:55371993-55372067
  hyper
cggcgtggaccccgacccggctttcttcgccgccccgatgcccggggactgcccggcggccggcacctacagct

SEQ ID NO: 6295 - DNA, 168 bp, Homo sapiens
  chr8:55372416-55372584
  hyper
cgtgtgcaagcctgagatgggcctcccctaccaggggcatgactccggtgtgaatctccccgacagccacggggccatttcctcggtggtgtccgacgccagctccgcggtatattactgcaactatcctgacgtgtgacaggtccctgatccgccccagcctgcagg

SEQ ID NO: 6296 - DNA, 68 bp, Homo sapiens
  chr8:55379162-55379230
  hyper
cggaccgcgacgtcgcgcgcccgcttcgaggagttttgagctcttagcttggtgccggggcccgcccg

SEQ ID NO: 6297 - DNA, 161 bp, Homo sapiens
  chr8:55379295-55379456
  hyper
cgcggtgcaccggctcaggggcctgcctgccgcgccaaggcttcggaagttctcagcgggaccgctgggacaggctttcctctgagggaagaggaggggatttgtgcctctgcacgttctttcctgtggaggggaaaatcaaaccctgtagccgtccgctg

SEQ ID NO: 6298 - DNA, 107 bp, Homo sapiens
  chr8:55380036-55380143
  hyper
cgccgggggaggcggagcgcggggaacccgggcgccgggaaccccggacgtgggagggctgggcttctgcgcggggagacgccgggcttggcgaacatcctcaagaa

SEQ ID NO: 6299 - DNA, 257 bp, Homo sapiens
  chr8:56013635-56013892
  hyper
agtaaggagtaagggaggtggcgcctgctccgggctccgccactccccgcccgcgggccgggggtggggtggcactcggtttcccgcggctgccggccgcgccccgcgccgccgccaggggtgctgcgcttcccacctgccgcaggacgcctcgagggccggtgcggtgcccactgggctgccgctcctcccggctcagagctttccagccgccgagaacgtgcgagggaccccggcgtcgggcaggggcctgggcc

SEQ ID NO: 6300 - DNA, 173 bp, Homo sapiens
  chr8:56014011-56014184
  hyper
cggacccgcccgccctcagctgccggcgcggcaccaggctccgcgctccgagccccgtacgcctttctctcccctgcactctctggcaaggccgggcacgcccactgccgctgctggcctccgagcccgggcgcccgagttacacccattctccccaccatcgtcggccagag

SEQ ID NO: 6301 - DNA, 367 bp, Homo sapiens
  chr8:56014376-56014743
  hyper
cgttccgaaatcccgggagtgggggccttcgactgtcaccctcaggcccccttggccgctcctcccggcccttgggacccgccagggcagtcccccaacccccgcccgccgctcctctcggtcccggcccctcctccgggtccctcctcctccctcgcccctcccgagccagggtgggagcgacggcagctggaagagaagggatgaggtcatcctctccctcggagtcagctggtggaggagaggaagcgggaggagggagcgcgcgcgaggggaggagaggaatgtgcaggtccgaggagcgccgcggcggccgctgctgctcctgctgctggcggcggcggcggctcgggcggcagcagcgaag

SEQ ID NO: 6302 - DNA, 18 bp, Homo sapiens
  chr8:56015034-56015052
  hyper
ggtgtggaggcatcatgg

SEQ ID NO: 6303 - DNA, 476 bp, Homo sapiens
  chr8:56015185-56015661
  hyper
cgaggaggcggccgggggcggctgctgcccggacggcggcggctgctcgcgctgctgctgctgctgcgccgggagtggcggctccgcgggctcgggcggctccggcggcgtcgccggcccgggcggcggcggggcgggctcggctgcgctgtgcctgcgcctgggcagggagcagcggcgctactcactgtgggactgcctctggatcctggccgccgtggccgtgtacttcgcggacgtgggcacagacgtctggctcgccgtggactactacctgcgcggccagcgctggtggttcgggctcacgctcttcttcgtggtgctcggctctctgtcggtgcaagtgttcagcttccgctggtttgtgcacgatttcagcaccgaggacagcgccacggccgctgctgcctccagctgcccgcagcctggagccgattgcaagacggtggtcggcggtgggtctgcagccggggaag

SEQ ID NO: 6304 - DNA, 57 bp, Homo sapiens
  chr8:56015749-56015806
  hyper
cggggctacccgggccagtggcaagcacaggtctgcgtcctgctccttctgcatctg

SEQ ID NO: 6305 - DNA, 30 bp, Homo sapiens
  chr8:56686331-56686361
  hyper
gtaggtattgcaaacgtggttgtaattgat

SEQ ID NO: 6306 - DNA, 978 bp, Homo sapiens
  chr8:56792219-56793197
  hyper
gctgcagactgagtcgccaggtttctgtgccttcaaagccctgcgcgacggccacaccaaacacccaaaccttgggcagggaccaaacggtcacttccccgccctccgggctcaatatgcaaatccgagcaccaggaagtagctgggacctctcggccgagcccagagacagccagttcctctcccgccgcgccgggccgcgctgccgctcgctccccggccgtggcgcctccgggccagacgcgctgcagcctccagcccgcggcaagcggggcggccgcgccacccccggccccgcgccagcagcccctcgccgcgcgtccagcgttcccggccagcagcctccccatacgcaggtcctgctgggccgccccgtcgcgccccccactctgaactcaagtcaccgtggagctccgccgccccgaaactttcaccgcgagcgggtgagtcctctgcgcgagcccaggggtgggcgcgggcacgcgggcagtgggtgcaggggccgcggctgtgccaccagccggagtcccgggcgcagggtagactcggggccgggggcatcggcgcggcccgcggcggcttcctggccgcaccgcctctgggctccggcggcgaaggctcttagatgtcttcagccgacgggtgaccgggcccgggggagccagggcgcggggactgaggctccgcaggtgtccgccgcggagccgcgcaggggagcggtgggaggtgcgggcgcgggggcgggctcaccgcgtgtccttcccggtgagggcccgagggccggctgctgtccctgctccggccgcttctcgcacacagtggggaagccgctgcccttgcggagcgggcgcgcggcggggatactggagaggactcctcggattgtgcaatctgatctcccctctggaccctgggtctcctggcagtgggagatggggctcggccggcgccctctcgaggcccgcggacagttgccct

SEQ ID NO: 6307 - DNA, 30 bp, Homo sapiens
  chr8:57026286-57026316
  hyper
ggccacaggaacaccgcggtaagtcgcctt

SEQ ID NO: 6308 - DNA, 215 bp, Homo sapiens
  chr8:57069522-57069737
  hyper
aaagatgaaaacaccaataaacgaaaagtagaaaaacctatgtggacgcatcaacagatgctgaaaaggcatttcctagaagtcggcagccaaacttggtaattcttgcgtgtgataaaggcagccgtctgttctgctcagaaggggtttcctaacaggaggggccgaatgcaggcgtcacatccacgccgccccaggtcgtacacctaggccgt

SEQ ID NO: 6309 - DNA, 314 bp, Homo sapiens
  chr8:57069850-57070164
  hyper
cgcgggagaaggctggtgggtacaggttgcctccgggccggagcgcccatgcagggcgagctgcgctccgcacaaaattgcggtgggggcgccagaccgccttgctccgcccctgagcggggcgccccggcccaaccccctgagggaggagggtccaggtgccgcagactcttagcccctggcccggcgtccgcccggcaggttctggcactcctcgttggtaagccccgttatttcgtgcgcagtgtttacagaatataaagttcttcaggaaacgatgttataggagaaacgcctggattttccccaaacta

SEQ ID NO: 6310 - DNA, 117 bp, Homo sapiens
  chr8:57232586-57232703
  hyper
gcacccaggaccgacgacctcggcaacttacccaggacactctccctagctgtccgcggagaagccggcctcgtctgccccaggcacccgagtccctggctcggagctcagtcaggt

SEQ ID NO: 6311 - DNA, 185 bp, Homo sapiens
  chr8:57358906-57359091
  hyper
gaaatgtgaagggaaagagggcgggcagacgtccccaaacccgctcagcaaagacaagcttcgggcaaattcactcacgttgacgctgttcggatggagcaggccaattggaaaagccgggttcagacacgactctagagggaagagaagaaggcaagtgtgaggagggcgggcgtcggggagaa

SEQ ID NO: 6312 - DNA, 176 bp, Homo sapiens
  chr8:57359259-57359435
  hyper
cgccccaatcgccggcgggctgcagctgacgcaggccctacgccagccccgcgccgacgccttcgcgggaggggtcggtcccccagcacccgcgcgccgctccccccgccgagctcgggtgggggccacagggggcgctcggtggctccccacacggccaggtgacaaacccaagg

SEQ ID NO: 6313 - DNA, 14 bp, Homo sapiens
  chr8:57360611-57360625
  hyper
ccgcggggctccgg

SEQ ID NO: 6314 - DNA, 33 bp, Homo sapiens
  chr8:57360769-57360802
  hyper
cgagcaccgcctgcctcccggccggggcatcac

SEQ ID NO: 6315 - DNA, 81 bp, Homo sapiens
  chr8:57906851-57906932
  hyper
aggacggggaactgggcggtgaggggaagaattgtacttggctcttcattctgttgacatctttgtcgtgccctaaatgct

SEQ ID NO: 6316 - DNA, 89 bp, Homo sapiens
  chr8:58907025-58907114
  hyper
ctggctcagggacacgcgctctcggccacagcaactggctccaagttccctccctcactctccggcgaagcctgcctgagccctcccac

SEQ ID NO: 6317 - DNA, 283 bp, Homo sapiens
  chr8:58907135-58907418
  hyper
cggccgccgccagccgggcccttcgcggccgcgcgtcctgggcccgttccgccagccccgtctgctctctacccgcggccccgcggcggcgaccgtgaacactcggcggcccctacagcccgctctcggcccttcgtccctcgcgggccccgactctccctccttgcagtcccccggagcctggctcccggctcgggccgcaccgccagggactggggtgagcggcccaggtaagactgggccgtgggggccgggagagagactgctgggcgggggttgggat

SEQ ID NO: 6318 - DNA, 587 bp, Homo sapiens
  chr8:58907483-58908070
  hyper
cgcggagctaagccggctctgcgcctgcagcttccccgcccggcccgggtctccgttgagcccggcctcactggcccaggcggaccccgtccggctttctgggctgccgggggaggcgcagcgccgctgcctgccccgcgccccctctgcgctcggcttggctgcacgtcccgggctcggctaggaggctgggcacggggccggggctggagccggggttggagccagggcggggggaagctggccgcgctgcggagcggaggtgggctccgaaagcgcgccgccggttgctgctggaggagtgggactacgaaggatggggactccgctcggccaccgctcctgaatggtctctaatctcggtgttaaatactttatgagagtatcaataccacctaatcctttgctgagaattactgctagaaatgtagattctgaggttccgaaagtttgtttttggttaccccctccagctcctcccgtggcctcaattgtctctattttctttgaaagcatacagatttgaaatagaattaaattctccttggctcactcgtgtctccatcacccagcggagctcataactt

SEQ ID NO: 6319 - DNA, 1508 bp, Homo sapiens
  chr8:60030268-60031776
  hyper
tcccgtggaatgcaccgagggtcgccatggatgtgcctgcaggggctgtgagtatcaggcagatttatcaccaagcgagagttgggcgtctaaaaggcccgcccagcgttttagagaactcaattctctctgccaacgttcatccaacgggactgcttagacacgtccaactagccctaggcgtgggcagtcgtgcccctgcgaccactctgggggaccggtccctgcgtgtcctccctctctgggatgagagagttcgagaagccgggagagtaaccccctccctcgtaccccctgactgtcctataggtggacccagccgaactccgcagcagcccaggccagcgccccacctccgggtcaccggcatgatccgcctctccccgggcccccgcggccctggcacccgaggtcagcgggccgtgggtacagctcagccgcggaccctgctccgcgagtgcgggagctttggacttgaacgcgacgtgctcgcccggctcccaacaaacttgcaatttccgcgcgcaccccttaaacaggaactgttccccaaaccttgacccagctaccccgctgtgctctggcccgcggacctgtgtccgaacccgggctcggctgccggaaccggtttgagaaaacaaaagagttgtggggcagttttccctgtggggggcaggggcgcctcccaggtccctgcaccccgactcccggctgctcccctggcaactaatccggagaagggaagtggtgccacgagcccccactgcccggggagggagggagagagaagggggaactgggaaataaactgaattctcttactctgcctccgttcctggaccccagacacacccccaaagtattccacggttttctcttattatttttttaaacgccccccggcaaacctaggcagggatccttagccgcgaacagcaggaaggaaagaatccgagcaaatcgtgtcactttccgcacaatcgcggtgtttggcaagcccccggagctactccacaatatttactacccaagcgcacgcaggctgcagcgggctgcgagccgagcgcgcccgggaccggcctccgccaagccggccccgccgcggcccggccaccgccgctcccctcccaggatcaagcagcaagaacacggtggaaacaaaagcagagcgttcaccttgttgcaatagtaggggtccaggcagggagaaggtcccagacagggagcgtcgggcgcagcggcgggctgggctggaggtggataaaatcttacgtccatttcactctcacatcaagcaactccttttctttttccttttttaaaaaaaagtgttcagcaaaacaagcttagacggaacagagtgaggtgtctgggctcaggagtaaaagaaacaccttccttccctcacatccgtttgtggtttgtttaagaagaagaggaaaaaaaaaaaaaagaggggggaaaagcgctcaactctcccccaagccgcggcgcgcacccgtcggcgc

SEQ ID NO: 6320 - DNA, 241 bp, Homo sapiens
  chr8:60032072-60032313
  hyper
cgggccgggcggggtagggagcgcggccggacgcgggctcgtcaaggcccaatggctgctgttcggaaccagaggccggggaccggagaaaggaggagcggagaaggagaaggaggagagcacggcctggctgggacagaagcggtgggaccctgggaggcctccgctgtgcccgtgccgcgctcctcgggaccagcgcgtcgcacacaaaggggctgccgagccagagccaccagcggcc

SEQ ID NO: 6321 - DNA, 30 bp, Homo sapiens
  chr8:60699763-60699793
  hyper
tcttttcgtctaggctggtgacaagaaata

SEQ ID NO: 6322 - DNA, 966 bp, Homo sapiens
  chr8:61193291-61194257
  hyper
aagacataaaaggtacagccacggcttggaggctagcccgccctccggaccgcagcaggtgcgaacgccagccctgcggaaggctcccgggtgagagcgcaggcggcggaagagcgcaggcggcgagcacgcctccctggagcgcctcccgcccgaaacgcaccaggggagtgggaaagtggcagagacccccgtgggaaagagggggcgtgggggtgctcggagcgcgcagcggcagcaggactcgagtcccgcgctcggcgagacactgacgccgccgcgggaccccggacaccccgactcgcggccacttaccttcctcgtagccccactccacaccctcctcttcttcctcctcatcctcttccttctcggggaaggcgacggtatcttcgatgaagctcaggtccgccatgggaaggccgcggggcccctcggcgctctcggcagcagtgcctgcgccttcgctgggcgcggggctggagccggagcggagcgcgcgtgggggagtgtgagcacgcgtgagcggcagtgtgagtgcgagagcgcctccgggtgtgaaccgcagtgtgagtgcaagcaggcgtgcgttcggaccgagtgttccagagacccgcgtgggaagcgcgtccggaggccccagcagagcgagggagcggctgtggcctggggagcgagcgcctggcgaattttatacccgaccggggcgtgtctggtacgcgaggatccgcccccttctctctctggccgttggggccaggggagccgacagttagaatgcgcctcggggcgactagtcccaagtcacggaaacctcggcgcatccccgcccgcccttcccccggggtcgcccccgccgcctcctggcgcttcctcgctgcggcgactcctgcttggccgcccgagccttccttccagaagcccgcaagtctcccaaggtcactcgggacccctgtgtgcctggcc

SEQ ID NO: 6323 - DNA, 613 bp, Homo sapiens
  chr8:61822312-61822925
  hyper
acagcacatctgctccggaggaaagacaaagggcaaggtggggccacggtagcccgcgcggggctcttggcgggctgggggcggcgtgcgccgagctgggcgcgagtggaggggccggcggctttgtgcgcccccgccagtgcccgcccgcagccccgccgcagcgtttaaccttgacttctccctcctcgcttctggcacgggaggaaagcctgtccagatgggcgtcctgagtgtgacgacgtcccctcccgcccccgcgctctcgcgcagatgtcgcacgctgccctgggtcccgccacaccgcccaccaaggccgcgggccctgcgcgcccggggcaggcgggcacatcccgcaccctctccgcccgcccgcccccggcgcccttcgcattcccttcttcggccctggcccctcggaccggagcgcccaggccagctcagggtgttcccgtgggggtctccggaaacaatggtgagcctgtgctctgctggctggggggcgtcgtccccgcagctggcgcgtccctccaggctgagcgcccagcgccccccgcggccctaagttgggccacctggcggggcgctgcggccgggccgggcggggacatct

SEQ ID NO: 6324 - DNA, 256 bp, Homo sapiens
  chr8:62200448-62200704
  hyper
ggagggttgtggtacggaggcatttaggacccaggggaaagctaggctccgtatagaaggacagagaatcgggcgcacacgcctcctaccaaaatcacagccccttgtggagcccgagctctcattcacagctttctagagaaatctgagcccgaacctgccagaataggggatctcacccacccagttcagcagcgaggacacctgcagaaatacattcccaaagcaaggctgggcggccgtgtgaaggtatttg

SEQ ID NO: 6325 - DNA, 31 bp, Homo sapiens
  chr8:62626392-62626423
  hyper
ttgagttgctctgaaacgctgctggttaggc

SEQ ID NO: 6326 - DNA, 31 bp, Homo sapiens
  chr8:62626692-62626723
  hyper
taaaggaggagcgtcgcgggggatggaggcg

SEQ ID NO: 6327 - DNA, 145 bp, Homo sapiens
  chr8:62627198-62627343
  hyper
cttcccggcctcgccccgcccccggaaggctgagtgacggcgcctgggacccaatcgcaagggcccttacgaggcggcggtaccctgccgcgctccccgcccctgctcacttagggctgttcgggcgctacgcagctgcctgtga

SEQ ID NO: 6328 - DNA, 630 bp, Homo sapiens
  chr8:63160462-63161092
  hyper
tatttatacctattccggaaaccttctccatttctagaaaaagctacgcatcttcttcttcctcgacttctcttttctccctcccggtgaggatttcaaagggtatgtgagaaaagaaccttaagccaggtctccccgcggcgtcctggctagtcccggcgccctgggcgggtgcatcgctccgccgcagcgccccttgccacccaactctgtccaactttccctttcagactccagcaggggcgccctccaggcaaccggctgtggcgggcagaagcaagctcggatgggagacccccgagctgcgtgcccagcgccggctcaacagacttgcccgcgcagcgcccgcgggccccctcgcatccgggcaggttccggagctgggccttgcgctccccggcgcccgcccaccctgggtgtctcgcgtcccggcccttcctccccggaacccaagctaacccaactcccatcctcgccacctctggggcagctcaactaagccgtgtcccctcccttgcaaacgcgtccgaccaccctcccaacccccagcacaaccctcagcaagaaagcccagctgggtctacccagttacaccggtcaacgagggtctccatcgccgccggccgccct

SEQ ID NO: 6329 - DNA, 30 bp, Homo sapiens
  chr8:63951061-63951091
  hyper
aatggtgcccagcccgggttcctccttgca

SEQ ID NO: 6330 - DNA, 30 bp, Homo sapiens
  chr8:63998149-63998179
  hyper
ctttctagctttgtcgtttccatgacccag

SEQ ID NO: 6331 - DNA, 39 bp, Homo sapiens
  chr8:63998843-63998882
  hyper
actgatgttcaaacaccgaggaaacgatgtcaaagttag

SEQ ID NO: 6332 - DNA, 129 bp, Homo sapiens
  chr8:65281673-65281802
  hyper
aaagctgttcgttttcggggaaacttctgtgagtttcgcgcttgttcgaccaacaccagtgttaggaggaggcgagaccggtggaaaaaggagagccccagagatttcccgtgtgtgtgtgtgtgtgtg

SEQ ID NO: 6333 - DNA, 179 bp, Homo sapiens
  chr8:65281825-65282004
  hyper
gtgtgtaatgcatttagaggacgggagctgcctctagggagaaaggggaggggggaggggagaagaaaaaggaaagagcgcgtttcctcgccggggttaccggggtggcgcgggcttcgcggccgaggggctgccggcccggcccgcagctcctcgcggccggctgggaagtggcgggt

SEQ ID NO: 6334 - DNA, 108 bp, Homo sapiens
  chr8:65282332-65282440
  hyper
cggtgggggcagcggggcgaggcgaggtcgcagggagacgaccaggcctgcttgggcctgggccgctccagccgcctcgcctcttcagggacctcgccccgggaccac

SEQ ID NO: 6335 - DNA, 30 bp, Homo sapiens
  chr8:65289212-65289242
  hyper
aaggcacattcgtccggaatggcattcgtg

SEQ ID NO: 6336 - DNA, 30 bp, Homo sapiens
  chr8:65289736-65289766
  hyper
tttcaaggacacagcgagctgctcaggact

SEQ ID NO: 6337 - DNA, 34 bp, Homo sapiens
  chr8:65290094-65290128
  hyper
attctttctctcatcgatcgtttcgattctcttg

SEQ ID NO: 6338 - DNA, 30 bp, Homo sapiens
  chr8:65489024-65489054
  hyper
ggtggggtccagaaacgatattccgggttg

SEQ ID NO: 6339 - DNA, 711 bp, Homo sapiens
  chr8:65489646-65490357
  hyper
cggcctcgataagccaaccagcccagaaccaggggcgctgggctgggtgttcctcggggacggcgcccactgcccgcttggtccctggagtgtcccgagctgcctcccatacccctgctgcggacagagtgggggcagtcctctgcctctgtttcccaactgctttggtaactcagtgactctctgtgaaactgcagagtcagaggacttcccttccgtagttttcattctaagcggtcatctgtgagtcagaagatttcgccgtggcctgatttcccaccctttctgcccgcgcaagccgaaagcgctcatgttggcttttcctttgccacttttccaacttgccagttccatcaggagcccggatccttgcccagcttcttggcggagccaagttcgagcgcacagatttcccgagctccagcggccagggggcactgtgtgagcggctgacgtcacccctccgcccggccgaaaccaggcggcgggatcccacacagttgaggagagggagccgaggccgtgacttagggctggcgacgattaaaccaagtaacgagacaccgggcagatgtgttttcattgccctgtaagataaatgcagtgttaagtgcctgacaacttcccagaagcaatcagcaaaagtttacgagtgcataaacctcaaagaccattccctatcggttgttataaggccggtatttagagctt

SEQ ID NO: 6340 - DNA, 1239 bp, Homo sapiens
  chr8:65492339-65493578
  hyper
gacaccaccttctctcggaaagtcccatccccaaatccagaccagtcatcctacgaacaggggtggagtataattctcgcccggaagggtaatttagcacaagctgagacagcagtggcgagggaagggcagtggggggtggggtgcggtgggtgggggcgtctgctttccacaggactcccaggcttcgccgccgatctacaatttgctgaaggagcaaagaacatcctcggctctaagtagggcttttagtgtgctcattgatgagtgaaagtcgccacacatgtcaagctaaaggcagttgttgggttactaacaggacccagcgccttgcaaacatatgcgctaagctgtgtatacagatggcaggcagaataatggagcaggcgccttttataaagctctagctgctgcctgtcttcagacctgggaaatgaaactattcagacttgcggccagatagcgcctgcgattgtttgttaccgttttaatcctattaattaaaacgttaacctgattgggtagaaagcgctgtcccaacaggcgagtcttcttcataataacctactcagagataatgatgtaaaagactcccccgtctgtggcggcggctgtttgatgggtccggaaatctcttgaaggtgaatccaagcaagataaacggtgcggagaggaggcgcggggctgggctcagagcggcggcggcggcggctccactccctccgcgcccaccctcccaccatgcggggccgcggcccatggtgagccccagcagccagcaccatcggctggagacgaagaagaagaagaagaggaggcggcgagcgcgggggaaggcgaaaaagaaaaagaaagaaggggagagggctcccggcagcaccaggaccgacgcgcgcaccagctccggagcccagctcgcgcgcgtctgtggggccgcctgactccggggccgaggcggcggcggcggcagcgggcgcggcggcccgggctgcgcgccggcgcgggaccatggagcgcgggatgcacctcggtgcagcggccgccggcgaggacgacctcttcctgcacaagagcctgagcgcctccacctccaagcgcttggaagcggctttccgctccacgcccccgggcatggacctgtccctggcgccgccgcctcgggaacgcccggcgtcctcctcctcgtcgcccctgggctgcttcgagccggctgaccccgagggggcagggctgctgttg

SEQ ID NO: 6341 - DNA, 148 bp, Homo sapiens
  chr8:65493806-65493954
  hyper
ggtcgctgcgagctcgtgctgcgggccggagtagccgacccgcgggcctccccgggagcgggaggtggtggcgcgaaggcagccgagggctgctccaatgcccacctccacggcggcgccagcgtccccccggggggcctgggcggcg

SEQ ID NO: 6342 - DNA, 523 bp, Homo sapiens
  chr8:65494076-65494599
  hyper
cggcttaacatcaatgcccgagagcgccggcggatgcacgacctgaacgacgcgctggacgagctgcgcgcggtgatcccctacgcgcacagcccctcggtgcgaaagctctccaagatcgccacgctgctgctcgccaagaactacatcctcatgcaggcgcaggccctggaggagatgcggcgcctagtcgcctacctcaaccagggccaggccatctcggctgcctccctgcccagctcggcggctgcagcggcagcagctgctgccctgcacccggcgctcggcgcctacgagcaggcagccggctacccgttcagcgccggactgcccccggctgcctcctgcccggagaagtgcgccctgtttaacagcgtctcctccagcctctgcaaacagtgcacggagaagccttaaacacacccccgaaaaacacaagaccgacccaaaatctagaggaaagcgaaaagctgctccccaccccctttattttggtcctctcgtagttgtgaaacacttgcag

SEQ ID NO: 6343 - DNA, 1481 bp, Homo sapiens
  chr8:67024947-67026428
  hyper
cccgggcttcagtggcgtcttcctaacccggcttgcctgccgggggcgttccgagaccctcggggccttcccttcaccccgcgggagttggaccggtggcgctggtaaggcctcccgggctcaaagtgcaacggacactgcagaaatccaaactgctggcattcgcggtttggggacgccagaggaggtaatgatttctggtttgttaacctcaagtgacaataatgccgagccaggcaggagctggacctacaatcttctgatgcgtggtcagacacgttatcccttgcgccactggcctaccacgctactccttcagtcgccgttggattactgtgtgttgagaacacactcggcaaccactttaaaggacaacgcaggctggtaaaggaaaagtacgacaagggggggcggtggaatcgcagggtcttggcatcgcggaccccagacacctgggttgagggcctttcccgggtcagtcaggctagcgagccggagcgttctgtctttctgcgcacgcgtagagcacacaggccggctctggggctctgcgctcctcggattacgcatgctcagtgcaatcttcggttgcctggactagcgctccggtttttctgtgctgaacctcaggggacgccgacacacgtacacgtcccttcgatagctcagctggtagagcggaggactgtagctacttcctcagcaggagacatccttaggtcgctggttcgattccggctcgaaggagacaagtgcggtttttttctccagctcccgatgacttatggcactttccttgggtgccttcagtgacacattgcattccaacgagcagtttgaaagtctagcgctttctccccattttgggcctcccagcctgcacggtaattctttttagccattcgccctgcgggaacgtgtccgggcaggttcccagcgcagctgtgggtctgcgcttggccgagcgactgccgggtcacgacttctgcgtcttcttaacccgtctttggcattgcccgggccccgagtcacacaggaggcagcgccggctccagggggccaggcggggaccttctcctcagagccccgggcagcttctgcgacccgagggctcgcaacggctgccgtgaggaggtggggggtccgcgggaagaggtatctggcgctcccggaacctgggaatcagaaagagagaacacaatactaaaaacacgaagcctaaaaatgacacaatgttatggagacaaggcggcacccgggaagctgtgcccgctcccttcgatagctcagctggtagagcggaggactgtaggcgcgcgcccgtggccatccttaggtcgctggttcgattccggctcgaaggagagacacccccccccccattattttgttgctttgaaccaaaaaagtctgtcttcagcgctcaatgttctgacccttctctaaaggaacagataataagccgtgcccagccgtggggg

SEQ ID NO: 6344 - DNA, 454 bp, Homo sapiens
  chr8:67026487-67026941
  hyper
catcctccagttttccttcctgtcccgtacggtttttctttcgattctcagcccaaactagagctgaaaagtcagacgaagtcaggtgaagagtagggcgagctccagcttaccactctaaaacttcccagacaatgagtggtgggcgctagcagtttatccttctagctttaaatttttagacccatttaattggggggaaattcacgaaactggttatttttgcttcaaaaatggcgacagattgccgtcacatgtattatcactcagaatcctttatgatttgtgataagatgtctgcatttccagggactcatctgaggctaagctgcccatagttcggggagacccacagggaaaacaaaacaagaaacagagaacttggaaacggacgctgattactttgaacgtttgctcaaccgaggaagcaggaactgttcggccccatctcaag

SEQ ID NO: 6345 - DNA, 192 bp, Homo sapiens
  chr8:67344509-67344701
  hyper
agcagttaccttctacggcaatttcaagggtggatggtgcgagcgccgctggggcagctggcgttctggttcttactccgtgggaaaatggccctgagcccgactggcttgaggcttagacaggtgaccccgcgaagcgggtgggcaggcgcggccgaggggcgggaggcgggcagcctccgtgattggccg

SEQ ID NO: 6346 - DNA, 95 bp, Homo sapiens
  chr8:67344809-67344904
  hyper
cgtgagtgcggggccggcgggcgggcaggggaccgcagggtgcccacgcagccccctgggtgtgacccgctcagatcctgcgcagtcttctccgc

SEQ ID NO: 6347 - DNA, 288 bp, Homo sapiens
  chr8:67417574-67417862
  hyper
aggagtgggctaaccgcgtttcccccgcccggcaggtggtgatcgagtcggacctgtacacgcaccagcccctggagctgctgccccaccgcggagaccgcagggaccctggcgaccgccgcaggtttgggcggctccagaccgcgcggccgcccacagcccacccggccaaagcctctgccagacccggtacgtgagtcccggccccagctccccgcacctccctgggcgcagagacccactcagagccaccacaagcccaggtcagggcagcgttggcggtggctg

SEQ ID NO: 6348 - DNA, 52 bp, Homo sapiens
  chr8:67524785-67524837
  hyper
ggtcagaaatctggacgcgcattacggggagagtcaccgagaaacctgggca

SEQ ID NO: 6349 - DNA, 30 bp, Homo sapiens
  chr8:67625265-67625295
  hyper
tcgagattcctaaacgcccaaggggcgtcg

SEQ ID NO: 6350 - DNA, 44 bp, Homo sapiens
  chr8:67837265-67837309
  hyper
cctaagagcctgaaaccgccaaggccgcacgcacaactttgctg

SEQ ID NO: 6351 - DNA, 4 bp, Homo sapiens
  chr8:67873417-67873421
  hyper
gaac

SEQ ID NO: 6352 - DNA, 252 bp, Homo sapiens
  chr8:67873798-67874050
  hyper
cgtgccgcagggtctgcacccggctgcgctcccgcgccgcattcgccgccgccggccgcccgctcccggaacgcgagccgcccccagggcccgccggccccggcccggtccgcccgggacgcgagtcgcggatggcggcggccaggggcgcgggctcggcgctggcgctgagggggctgcccgctgggcggccgcggtccatggcagcttcccgcgccgcgcgcgctgcaaaggaccgaaggtgcggtgagg

SEQ ID NO: 6353 - DNA, 508 bp, Homo sapiens
  chr8:67874164-67874672
  hyper
cgcgatttgcttccggacgtctggggagagttgcggaactccggagttcttgggcttcctagaaggataagaagaggcgcagtgccggctttgcttttcaggggcaaattaagcaaaaggtctactctacccgggaagaaagatctcggaagcacagctcaggatcagcactcgttcgcgcttgggtgactttatccaacccggcacgcacgagaggtggcgcggctccttctcgccgacgccgcggaaaaccacggctcaccagccgccctcggcctttcacgccaggggggatttctgcccgaggagcgggggacccttagcctcacctcggggtacggcacccgccaccgttccgagcccgagagctgcgcagtacgcgtctgacgggcccctcacctttcctggagcggctgagtggagctccgctccgtcgtgagggcgggcgaggggcgtggagcagggcctgtgtggccagggccgcgctggtcactccatcctcgtccgg

SEQ ID NO: 6354 - DNA, 852 bp, Homo sapiens
  chr8:67874755-67875607
  hyper
cgaccggctaaggcaggtcgggcggaggacctggcccaccggagaggctacgccgggggctgaggcggcttagagggtcattaatcaaaccctccggcggggcgggctcgggggcggggcgtcctcctggccccgcccctcggctcactgcctcacgctgctttccccgaggcgcctcgctgagggcggcgtgtggagagtttggggtgtctgccgccggctgcggtggggccgggctggaggccgcgggtgaggcctgtggttaacctcgcgctgccgaggtcttacctcctcgagtccagtctgattccaggccgcttccaggccggtgcccagctgaggcgggaacgctgcagtttggttgagcgtgacttttaggctctgtgaggaaaagtcgagcgcgccacatcgaggcgctagccgtttattctaccacaaggtaaaagattcatgctgtcctagttaccctaaagctgggagatacactgcacttcctaccagaccccgaatgctctcagtgtctgtaattctttaagaagttcctagagcagacagcccttggatcgtgggcacttctccccggggacggggaccctgctgaccgcctccgctgcccccgcgggggccaccgctctttaattatttgggcgaaacattcttttctggttttgcacttgtggactcacgggaagcgtgacttgcagcgaggcaggacccgatcccaggcttctttagaaagcggacgctgcgccccaaggcctgttcagagccgccccaggaagccgtgggtccccgaccgccccaaaccgcagcggtttctgcaggtcctggacccgtcgccttcgtaggtga

SEQ ID NO: 6355 - DNA, 473 bp, Homo sapiens
  chr8:68863997-68864470
  hyper
tttcaggatttgtacgaaacacattaaagttaaacaatagcggaggcttaggagtaaccctcgagctgcgccttggagtgtgtgtccctgggattgggaacctcctgtgagttccatatcaagtgctgctgtgtgtgtgtgtgtgtgtgtgtgtgcgtgtgtgtgtgtgtgtgcgcgcgcgcgcgtgtgtgtgattagccagtacgcagtacttccccagggttgtgtttcctttttcctgagatttggcgaagggtaaagggtcggagtcacatggatacaaagcttttgattaatgtccaagtcactgctgtggctgccgaagccgcttcccctccagccccggccgtgtgaggccagagcagcggggccgggcgcgcagggcctggccggagcccccactcccaggagtttcctctgcagagccccgcgccccccgcgccgggatttcagcccgatcccctcctctccct

SEQ ID NO: 6356 - DNA, 361 bp, Homo sapiens
  chr8:68864545-68864906
  hyper
cgccgccgggggccgggcagcagcgggcgcgcgggtcagcgctcagcacggcgggcagcgccgcgctgcgcaccgccgccgaccatgagcgaggacagccgcggagacagccgcgccgagagcgccaaggacctggagaagcagcttcgcctgcgcgtgtgcgtgctcagcgagctccagaagaccgagcgggactatgtgggcacgctggagttcctggtgtcggtgagtgtccccggcagacgcagggggacgtccgggcggcgcggggcgcgggtcccggagtggctgcgggaaggacgcgcggcattgtctgtgcggggacccgggacgggtcggggcatcacaggcgcgggaatcc

SEQ ID NO: 6357 - DNA, 60 bp, Homo sapiens
  chr8:68864942-68865002
  hyper
cgcggggatttgttggtgccccgagactcactgagttgcgggggccttggagacctccag

SEQ ID NO: 6358 - DNA, 263 bp, Homo sapiens
  chr8:69242803-69243066
  hyper
aaggggcggtggggacgatcccctttcgaactgcatttgtagctgccaaggagtagccaacaagcaccagatttatgtgcactttgaaagaagcaccttcaccattggctttttaagcggcgctgtcgctagggagcggctggtagggcgagcagcctcggggagcagcccgggctgtttgttccgtcaccggggaaaggaggtacacacagtcgcgcgcgcacggacacacacacacacgcacgcacgcacacacaccggtg

SEQ ID NO: 6359 - DNA, 618 bp, Homo sapiens
  chr8:69243284-69243902
  hyper
cggcgctgcgcccaggcttccggctctcagcgccccacgcgcgcgtggctccccgggctgccacccacgcccgcggccggggccgagccagccacgcagggcagccgaggctccggagctcctgtcccggccccagtccgggtaaaaggagggttgtccccagcggaggcgcacagccgcgcgttctccctgcactctcttcgcggtcccatctgttccccatggcgtctcatccgcaaacccggatccaggcttacctggagaagaacaagatcggtcccctgtttgaggtaaggcgctgtggaggagggcagtcccgttgtctttaggggaaggggtgcagtaatgaaaacagaacactcccaatcccacccctcccagggaaggagggctagagaaccaacgcgcgggagagggcgccctgggattcactggcattcgctctgtcccggccaggtgtcctggaacgcggccgggcgggcacttagccagttacctgaacgcggacaggtgagctcgggagggcccagcctcagcctggcaggggaagttttggccctctgactgtcctgcacctctcagctacatgttcaggacccgggcaggctgaggcaggcg

SEQ ID NO: 6360 - DNA, 954 bp, Homo sapiens
  chr8:69243963-69244917
  hyper
cgctatcttgagtgttcgtgttggattttcttttttcttttcttttctttccttctttttttttttttttttttttttttttttaatgagggcggtaatagaacccgaaaaggtggaggaggtgcttagcagttaatacaattaactggaagacagctgaactggtgaggagtaggcttcagtcggtgcgggcgtgatgaatgaaattggcaaactgagagactgccatttggtcactggacgaaaggagagtcctttgcactgcagaccccacatgtgttagcaggagaaagggacggagaaaggttctgaaaagcacacacgtatttgtggaagaagactatagctctgagctggttttgtttttttttctctctctcgccattaaagaatttaagacaaaaatacagtagaaggaagagcgcgaggacacgagaaaatgagaacaagagattgaagcctggcaccagcaaagcgtcccgcgggttgccagggtgctgagcaggggtggggcgtgcggaccgtagtcagaagtggaggcccttgcggagggactcccttggtcccatccagttcagggggcactgaccggcggcgagagttcgcgggagggtcgaggtgctcccgccttgcccccgccttgcccccgccttgcccccgccccccacgtctcccagaagcagttgtagctgttcttaacagcttggtttggggtgagggcttggtatggggaggaggttacgtgtcagtgtctgagagaggcagaatcgcggcaagtggaaggggctgcactggagatcgcggaaaacctagcaaagactgaagagaagcaagtgagaactgtggagaacaaaaaaataatgcgagttaatgaccctgcaaaaaaagggcgcggaggacaaaggtgtggtccaataggtcttttgggaggacgggtttcacataacaagattt

SEQ ID NO: 6361 - DNA, 55 bp, Homo sapiens
  chr8:70745719-70745774
  hyper
ggcagtgtcttttaatcgagtgaactaactgcagcctttccgtactcctactcca

SEQ ID NO: 6362 - DNA, 30 bp, Homo sapiens
  chr8:70747237-70747267
  hyper
ttccccccacccctcgcctgtcacccaagc

SEQ ID NO: 6363 - DNA, 30 bp, Homo sapiens
  chr8:70945442-70945472
  hyper
cgcgcccacgcacgcgtggatggggccagg

SEQ ID NO: 6364 - DNA, 30 bp, Homo sapiens
  chr8:70947203-70947233
  hyper
ctgatgtagagctccgattaggcccgaaag

SEQ ID NO: 6365 - DNA, 89 bp, Homo sapiens
  chr8:70982262-70982351
  hyper
cgctcccacaattaagacaaaacgaaaaaacagcaatagaagcaaacacaaaaaagccccaaacggaaatctgccgggatcctgcccta

SEQ ID NO: 6366 - DNA, 30 bp, Homo sapiens
  chr8:70982852-70982882
  hyper
tccgccacattccccgggttcctcggaaac

SEQ ID NO: 6367 - DNA, 190 bp, Homo sapiens
  chr8:70983585-70983775
  hyper
cgtcgtcttctccccgcccaccgcagccattggccgactctcgactcgccctctgtcccctggggtcgctcacttaactcatcagttttccaaaccctccctgggaccctagtggcgagcactcgccgctggccttctagggcaggcagtattgccgctccaggcgtgcggagtcggggagaaaaaaacc

SEQ ID NO: 6368 - DNA, 246 bp, Homo sapiens
  chr8:70984046-70984292
  hyper
tgggcccggcacccccgacgcttccgaggtttcgggtggtcgttttgctctctcgggggcttttattccttaagtggctttaaacgaccgaggatgggcctcccgcgccgccgcagctgtcacttccttcgggaaaggctagcgaccttggacgcgcaggctctgaaaaccaaggtccagacccataccgagcgcccaaagaccgcatttgaattctcctcgccggccattgagggagagaaagga

SEQ ID NO: 6369 - DNA, 318 bp, Homo sapiens
  chr8:70984343-70984661
  hyper
cgcagtcttgccgggtgagccgggacaggttcctcgcctgccccccggccgctgcttcctcttagctgaatggggagcgacccgccccgggcgcggccttcggggctgaagactgaggtgcagcctcacccccggcctggcagcggcttggaagagagagggaaaggaggaacatctacccggctaagagacgccgccagagtccctaaagctggcgggggacggaggccggggtcccggatcttcagagcgcccgcagccgggcttctgggctcctcggtgcggggaacctgaccctgtagccttcgccagggcgcg

SEQ ID NO: 6370 - DNA, 121 bp, Homo sapiens
  chr8:70984744-70984865
  hyper
cgccctgccgcctgcttgccccctttgctgcaccgggtggccctggtccccgcgcccgcccgcccccgacgccttcgcgtggttccgcgctgcccgcggccagccccgtttcgcttcgcaa

SEQ ID NO: 6371 - DNA, 30 bp, Homo sapiens
  chr8:71315998-71316028
  hyper
tgtagccgaggctgcggccgccatgttccc

SEQ ID NO: 6372 - DNA, 30 bp, Homo sapiens
  chr8:71520835-71520865
  hyper
cagcagcctgaggccgcggccgggtgccct

SEQ ID NO: 6373 - DNA, 30 bp, Homo sapiens
  chr8:72468805-72468835
  hyper
ctcctcagtggccgcggcccgtcaacactg

SEQ ID NO: 6374 - DNA, 463 bp, Homo sapiens
  chr8:72470330-72470793
  hyper
ccatttccttactatcaaaaacggccgcgggcagaaaattacgataagtaaagcatagtctcttctcgcctttatggacatccccgcattttttggcggtcttagcctcggccaagtgcaagccgtccgtttcaaggcaggggtggagcctttaaagggtcgcttgggccagcgttagcattcctccccctgccgcccgccgggaacatccaatctaagtggtaaaaatgctagtgtgcagtggagctcagcttgaagacaagaccccccacctccagccgtaagacccaaaccaattcttgcccttagcggaggcctcctagaatttctggggccgccactgctctgggggaatcgtgggacacagtccggggaaagaacaaagctaggcgccaggaagggccgaccagcccggacgggtcagccgggtcctagccgtctcgggttctttccaagaaatcag

SEQ ID NO: 6375 - DNA, 494 bp, Homo sapiens
  chr8:72754490-72754984
  hyper
cgcgaaaggccggggctgtgtggaaccgtcccgcacgtgtgcgatgaatctggctccgctgagaacggatccgtgggctgtctggcgcgggctggggcagcagccgagagttagtctacagagctagggcccgagggtggacctgcgtccgcgtctcgtcacgaaaggaagctctttttggagaggcaaaacgtggtcgcccagatccggcgcagctgtagccgtgggcgctgtgcagtgacagccacacccgccacctgtcacgatcacagttccagggaaaggggaagggtcaaggagaatccagcggaaacttcttcccatctcacgagctctcccttctctccgtggcccccaaacactcgcatttaacgaataatcccatcaagtgagttccagtccgatttaagcggtggttccacatagtctgttggctgcggaaacttctttggtgtcagagtccggtcttcccgagaccacgaatggccatgtct

SEQ ID NO: 6376 - DNA, 30 bp, Homo sapiens
  chr8:72755232-72755262
  hyper
actttgaggttctgtcgtttagttcccttc

SEQ ID NO: 6377 - DNA, 82 bp, Homo sapiens
  chr8:72755732-72755814
  hyper
gagaaactaaactggccttctcgttcccagtcccagaacctccacccctttcgaattcttcccaacgggctgaccctgcccg

SEQ ID NO: 6378 - DNA, 364 bp, Homo sapiens
  chr8:72756655-72757019
  hyper
cggtaagctgcgccttttgaaaaggctatctgtactccttggaacaaaccaccccgggcaaagaagagggggttgtaaagggggccaagaggtggggcaggggcgtggaaggggtggggaccgcttttctgcatgccgaagagcggttggtggaggcgggggaaggggacgtctctgcagagccgagatttgggctctgaagcccgacggcccttcaacatgtctgcgcaggataagtgagctttcggggagtgaaggggcacatcttgttcctaccgacggtgcttctacccccaggtaatcttagcagtggcaaagattaccagacacttagaaacgacgggattccgacctctgcttgcct

SEQ ID NO: 6379 - DNA, 303 bp, Homo sapiens
  chr8:72917125-72917428
  hyper
gaaagatttttgcttggttttcggttttctttttcttattttgagcagcagaccagcgtgactccacagtttcaaagagcaagcgtctatatttgtgtgacccggggccgagctggggaaggggaagcagagcagcgctgacgcagtcaggtccctggtgcaggtgccagctccccacagcgcgccgaactccccagtatgagcgaacctcaagtcactgccctcgcgcttgtcgagcgaactctcaaggcttgcaggtcgtctccaggagtcagagaggtccggactccggggattcctgct

SEQ ID NO: 6380 - DNA, 290 bp, Homo sapiens
  chr8:72917515-72917805
  hyper
cgagggggccccggcaggtggcgagcagcaccgaagcgcgggccaggacgctcgtttctcggcgccctctcctgggtcagtggcgcatccacctccccagccaccagtgaccagcgggggcgtgcgcagcttcagaggtgcagtttggaactgccctccccctttcagtgtaggactggcgacactcctttcttcctgcaggtagcaatctccagggacctccctcaaccctgtggagggcagttttttcagtggctcaaagaaaacacgtctttcgtgtccctggtcag

SEQ ID NO: 6381 - DNA, 584 bp, Homo sapiens
  chr8:72987459-72988043
  hyper
gcccccaaggaaacctccagccgacccccgcccgcacgtcggaacccctccagacccgcgagcccccagagtaccttaagcgattccttgaaatcctccgtgtcgtccggcacatcctcatagacaacgccctggggctccttcttttctccagggcgccacatcttcctcaggctgcgcttcattgaccccaccccggacgccacctggtgcagctgctcaccacgcgcgcgggcacctggggcgagagagcgctgtcagcctgccaggcgctggggtccgcgcgagcccgagctctcccgcgctgcagctcacaggcagcgaaaaagtcgctctgcggaagccctggagaacttctggaaggagttctcaggcccgcgctacttttgtagtgcaggaagcaggcggggcgcggagaggaggtagaaacgcggagctccttcgcaaagagggcggcggcgccgcgtctgccttggactcgccccttcagggacaaagtgactcgcccgtcccgctgtcctgcagctgcagcagcgcactgacggagtcaagcgtgtcaggtcggggtggattgcagagaattt

SEQ ID NO: 6382 - DNA, 63 bp, Homo sapiens
  chr8:73163597-73163660
  hyper
ttctccaaaccaagggctgcccgcaaggaaacctcgagccgaaccgcggccggacttcagaac

SEQ ID NO: 6383 - DNA, 281 bp, Homo sapiens
  chr8:73163859-73164140
  hyper
cgagagagcgctgtcagccggccaggcgctggggtccgcgcgagcccgagctctccctcgctgcagctcacaggcagcgaaaatctcgctccgcgagagccctggagaacttctggaaggagttctcaggcccgcgctacttacagtgcaggaagcaagcggggcgtgaagaggaggtagaaacacagacctccctagcaaagagggaggcggcgcagcgtctgccgaggactcgccccttcaggaacaaagtgactcccccgtcccgctgtcctgcagct

SEQ ID NO: 6384 - DNA, 94 bp, Homo sapiens
  chr8:73449621-73449715
  hyper
ccgccgccgccgctgcgcctcgggcagccccagcgagcggcaactcccgggctggcgcggctcgctttctggctccttccgcgcggcgagctca

SEQ ID NO: 6385 - DNA, 176 bp, Homo sapiens
  chr8:73450026-73450202
  hyper
cggggagaggctccccggagggagcggggaatcccacagccctttgtggtgcccgagcccgtgccgcctgctgagcggggtctgtgggagctaggtaagtggcgggggcattgctgctccccgaagggggtcttcctttaagaatgaatcatcgcggcagcctagccagacttgag

SEQ ID NO: 6386 - DNA, 109 bp, Homo sapiens
  chr8:74005551-74005660
  hyper
atcgacggtccgggcgccacccactccccgctgccagctcgcgccccagctccagcccggggacctccggggcgcgggagcggaaaagcaggtgctggcggggcggggg

SEQ ID NO: 6387 - DNA, 30 bp, Homo sapiens
  chr8:74791370-74791400
  hyper
cttcgtgtgtaccgcgaaatgctgatgacg

SEQ ID NO: 6388 - DNA, 1182 bp, Homo sapiens
  chr8:75232541-75233723
  hyper
tcccataactaggacgtttccaaatgcacccccaaataaggtacaattccccaacatcctagttacggggttctggcttctatctttaggctactggaggaccagaagcgaaatacgactccacgtgaaaccaatcccgggagcggtcagcacggaccgccaacctcacccgctcagggtgttcgctctaactccacgggagtggcgatttcaaacccggccgggagagggagggatcaggaacgtaatgtgacgggctcaagtgacagcgtcctctctccagcccaaccctcccgggcggcgctccctcccggtggcagcgcagcgctggcgccggccaggtacattcacgcctagctcccctgagtgtggatacacggcccgctccaagaacggggtcagatccagccctcgcgccccagtccggtcccagcgccctctctgggaaaggcgggcgcgggcgcgggggtgggaggcgcccccaggtgttttggcgggtttccggacacgtgcgcccggcgtcctccccgcttccccgcagccggggcagagcccaccgcaccagctcgcggagcagccgagccgcccgttacgccgctcacctccgtccccgtaggtctccacgccgtacccgtcttgcagcccgttactccaggtaccctcgtagcgagcgggggtgcacaggctctgccggaccccgtagcgccccttgaaaccatgtgaccactccccccggtacatccacttgcccttcgtctccacccccagcccgtgccgcttgccctgcgcccagtagccctggtaggtgttgccgctgggccaggtgtagcctccgaccacctcgaagccgtgcgaccaggagcccgagtactcgccctggcccttgggccccgtgcagatgccatgcccgtgcgccttgccctcctcccagccgccgcagtaggtgccgccatcgtcgaagtcgaaccttccgcccgtcattcggggggcagccccggcgcgctccccgcaggggcacggacgcgggcagtgctgggcacggcagggtgtagctcgggggtgggggcccggcgggcgagctcacgacagcgccctgggcagctcgcgctgccgctcggctccagtccgacgccgcccccgtcctccctcctcttttgccgccgccaccgccgccttcctcct

SEQ ID NO: 6389 - DNA, 30 bp, Homo sapiens
  chr8:75262744-75262774
  hyper
gaaggcaaggccgacgcggaggttaagctc

SEQ ID NO: 6390 - DNA, 907 bp, Homo sapiens
  chr8:75896558-75897465
  hyper
cccacaaaggccgagcgccctggcttcgctgcgttccggagaagcagggcgggctgcttctcccggatctggcgggcctctggccacggctggttggaggtgggggtgggcgaggaggggcgctcaagtcacgtgcccgcgctggggccgcaataaatgctcgcgaacgcgagagagcgacggaagcgctaggcgcctggttctgcgcgtactggctgtacggagcaggagcaagaggtcgccgccagcctccgccgccgagcctcgttcgtgtccccgcccctcgctcctgcagctactgctcagaaacgctggggcgcccaccctggcagactaacgaagcagctcccttcccaccccaactgcaggtctaattttggacgctttgcctgccatttcttccaggttgagggagccgcagaggcggaggctcgcgtattcctgcagtcagcacccacgtcgcccccggacgctcggtgctcaggcccttcgcgagcggggctctccgtctgcggtcccttgtgaaggctctgggcggctgcagaggccggccgtccggtttggctcacctctcccaggaaacttcacactggagaggtaagggcgattctaaaatgcatcgctgagtcgtcaagctgccaccctttcctatctccctttgccttcttaaactgtacttaaaaaaaaaaaaaagccaactgtacagagtggttgggcgcgatgggtgggtgggctacccggaaagcagcgacgatagaaattagcgggagctctagttcttgtaagtgactttgttggtttcacctactttctctgtcgcgcgctttccatttgagttcagagaaagaacagtgtgtgccttcacacttgagaggaaaagctctcaagttgccggggagctgctggc

SEQ ID NO: 6391 - DNA, 137 bp, Homo sapiens
  chr8:76316760-76316897
  hyper
ccactgggtgagttggaggagcgagtagctcagctatagattaaatttaacctgagccccggtggccgcgtcccgcccgcggtcctttctatacgagtagctttgaaggtgtcaccgagctgtgcccaaatctagaa

SEQ ID NO: 6392 - DNA, 30 bp, Homo sapiens
  chr8:76319200-76319230
  hyper
taggtggtcaggagcgtcatggtagaatat

SEQ ID NO: 6393 - DNA, 251 bp, Homo sapiens
  chr8:76319436-76319687
  hyper
gccagggttgacatcgcccaagacgaggcgtgacccggggcgggggaggggacttcgcccgcgtcgcgtgaaggatgccctggccttgggctgcaggcgcggacccccgggggctccccagggtgtaggaggcggagactgatccgctctagccccgagcggtccagcgcggggcgactcgcccgcatagtggagattccggcatgaggcggcggcagtcaccgcctggctgccccgcggaggcccgggag

SEQ ID NO: 6394 - DNA, 216 bp, Homo sapiens
  chr8:76319949-76320165
  hyper
tctttgctagagatcgggaaaaagaaacaaacaaacaaacaaacaacaacaaaatccttaagcttcctctcccaagtccccccatccccacccccacttcccacctcctcgctttcagcaaacttcccagcctgggaaaagtgcggcgcgggacagcgcgacggggtgggtgggggacctgctgccgggagatgcggcggcggccgcgcggctgac

SEQ ID NO: 6395 - DNA, 30 bp, Homo sapiens
  chr8:76386311-76386341
  hyper
aaattaaagaaggccagaaggtctttaaaa

SEQ ID NO: 6396 - DNA, 263 bp, Homo sapiens
  chr8:77585200-77585463
  hyper
actggaggtctgggattaaagcgggaagaggcagcggccacagcgaatttcagcggcagctgcagcagctagaaacaagaagcaagagtacgaggtctttaggctgcgtccccctcccgcagtcagggctgccagtgagggaaagagaagaaagggtggacggttgaaatggtgatcactcgaagtcagaagatacaagtgagggctttgagacccgctcaggaataactcatgagcaatcagcacgcgctgagaggaaacgt

SEQ ID NO: 6397 - DNA, 135 bp, Homo sapiens
  chr8:77585668-77585803
  hyper
gaaagtgcaattagacggcaaccgagtataagaaaatagttgccttggacggaggctggcggggcggggggagcgggggcggggaagtcagagagtgcatgtgcaatgcacaaccccagacggaaattgtaaact

SEQ ID NO: 6398 - DNA, 30 bp, Homo sapiens
  chr8:77586249-77586279
  hyper
ctgctgaggcggggcgtgggaagacaacca

SEQ ID NO: 6399 - DNA, 30 bp, Homo sapiens
  chr8:77589893-77589923
  hyper
gaaataaaatacgccgaagaaaaagtctag

SEQ ID NO: 6400 - DNA, 461 bp, Homo sapiens
  chr8:77590153-77590614
  hyper
aaaaagtggcccaacgttccgtgagggcggcggcgggttcgcgcagagtttagggacagtggaatgggggtggggcagggagtgggagtcagggtcaaaggcgtccgcggagacccgagaggagcagctgggtttcctggcgctgggagcccagaagtagggcgcaagcggccgcggcacagcggagcagccaggtccagccgctcggatcgcgctcgcgccccatagcggcccgcgggctgggctcgggctcgcccgcctccccgctcccctgccagcggcgccgcgctccgcgccccggggcccaccccacgcagtcccgccgccgcttcagcccaacagccctcctcacgctggcgcgctccgaggccaagccctggaggaaactcttgactctgcgctagaacctctctgccccttccctcagcccattaacccccgaccctcacctccagcctctc

SEQ ID NO: 6401 - DNA, 159 bp, Homo sapiens
  chr8:77593218-77593377
  hyper
cgcgcgcaggggcgcgtagggtgcgagacccggaggtccccatcccctgtcctctccgcggtcgccgcatccggggctccagccgcagcgctgggagctttggaagccgtgaggctccggagctgctctgagtccgggctgcgcgtcatttgcagtctg

SEQ ID NO: 6402 - DNA, 30 bp, Homo sapiens
  chr8:77593608-77593638
  hyper
ccaaacagcgagaccgcggtcggcacatgc

SEQ ID NO: 6403 - DNA, 30 bp, Homo sapiens
  chr8:77594241-77594271
  hyper
tttccctgtcttttcgggttttgccttccc

SEQ ID NO: 6404 - DNA, 103 bp, Homo sapiens
  chr8:77594571-77594674
  hyper
gggctggcggaggcccgggggttcgtgagctctggggaggggattccaagaggctggggtgaacgctggggctggggctgcaggtagacacccgcccaccgga

SEQ ID NO: 6405 - DNA, 305 bp, Homo sapiens
  chr8:77594757-77595062
  hyper
cgggatcgcccggcctctgggccagggacccgcgaggcggcggctgcttgctccgaacggaacgccgccgggtgtgcgttagaccagcggatagacgcccgcggcttggggtcaagaatcttttcctttttagcaaagggcaaggggtgtgtgcgtgtgcgtgtgcgtgtgtgtgtgtgtattgagtggctgtgttcggctgtgagaaccgattcattcttcggcccccctaaaagggttccatgcctacaaatgaacttcacctccttcgtttctccaagcatcaagtgcgccttctggctggg

SEQ ID NO: 6406 - DNA, 122 bp, Homo sapiens
  chr8:77595279-77595401
  hyper
ttgttacctgtgatccgggcggggggctcctttcggccgctcgggctggggtccggcccagagaggaggcttctgcgggcgcctttggccgcgacttctcacttccgcgcggttctggtgag

SEQ ID NO: 6407 - DNA, 30 bp, Homo sapiens
  chr8:77912333-77912363
  hyper
gcaggcttccggagcgacgcaggagccgga

SEQ ID NO: 6408 - DNA, 638 bp, Homo sapiens
  chr8:79428309-79428947
  hyper
tgacgggggagcgctcggaggaaggacgctatgcagagaaagcccccctggctcttctctctcaatccataatccagcgatgctgcagctgtaaaagcattaatagaaaatcaatccacaacctcgcggggcagcgatcgtcgagcgccgtttccaggctgccttccctggggtcgggagcggccccgctccccccgtggctggcgcggaatgtggtgatccgtcccggggcggggatgacttcatgcagccggagctccgcggcgggagcggaggctgctgctggcaggtggggcgcgggccggcgcgagctgaccgagcactcggcgggcgcggcgggactgcggcccgtggcggcgtgcgcggggacctgcgctgactaggtccggggaaggtaagcagcccggcaccggtgcgccctggccgcactgcgtggagctttccgcttggttaataatggggtttgcagcacggagggaagaaggggagaaccccgctgcattctgcaatgagaaaaggagcaacaactaggatggaaatgttgggcggccaagtgcagaggttggaggagcagtgttactgggcaaacaaagaaggcgttcttgcctctatactcttttgaacgtgatctaccattt

SEQ ID NO: 6409 - DNA, 30 bp, Homo sapiens
  chr8:80525017-80525047
  hyper
ccctccccgcggagccggggagacctcagg

SEQ ID NO: 6410 - DNA, 220 bp, Homo sapiens
  chr8:80525513-80525733
  hyper
cccagagccgcctaccgctggccgggtgggggcgcacgtggcgactgggtgtgtggagcgcagccagccctgcagagccccgcgccgcgccctgcgctcccctccccggagttgggcgctcgcccccgcggtgcagccggggagaccggtttctgcgcagtgtcctgagctacccccgctttccacaattcgcagttcactcgcacgtccagaaaggttc

SEQ ID NO: 6411 - DNA, 180 bp, Homo sapiens
  chr8:80695877-80696057
  hyper
agggtgatcccaggttagaggcgcccaggctagaagggcccggctcttggccctcgctgtcctgcccgctgtcgccgctctttggcgcccccgcaacagctccctctcagcaggacgcggaaaggtcagggtccctctctctcgtatataccacaaagaaagcgcgttccccgcggcgcc

SEQ ID NO: 6412 - DNA, 33 bp, Homo sapiens
  chr8:80696101-80696134
  hyper
cggtgggcccgcgggctcctgatctgtccaggc

SEQ ID NO: 6413 - DNA, 472 bp, Homo sapiens
  chr8:80803548-80804020
  hyper
gacagaaaaccgagccctatttgttattagtatttttttttttatactctcaaatgccaccggcacattcttttaaaaaaaaatgaaaggaaagaaagaaagaaaaagaaaataagagaggaaaaggtcctgagaaatgacggacgcttgaacctcgggcccgggaagaccagcgccctttggcggctaggcctcgggggcgtgcggagggcgggcccccgcgcggccgccgctttcccaggccgccaggggtgaggaggtgacgctgcgggcttggtggcggctggtttttcacacaggaatcctcctcgccaccgctccctcgaaggccgccccccgctccacccccagcactgggcgcccgcgcctcccaactcagcccgccgccgagcagacggcgcgccgcggtaattgggcacaggggcctttttcagagtcgctcagtcgataaatgaaacgtcagctcccctgt

SEQ ID NO: 6414 - DNA, 30 bp, Homo sapiens
  chr8:81083416-81083446
  hyper
ctctcccccacacacgcacactcacactca

SEQ ID NO: 6415 - DNA, 873 bp, Homo sapiens
  chr8:81397817-81398690
  hyper
acagcaataagacactcggggcggtgcattttctgtgaaatgactactgtccggggcccgaggtgctgcctcgcacaatgcatcaaaggaggttgtgtccgtggtcgtaacctcttcgcgtgaaaggcaccgcctggtccagtctttgtgaaggaacaaaataagttcacttccttgggcaccgccacccaccctcagcaaatgacaaggctggagcgcagctcccaccgcacagttatttgcaaagtcccaggtgaactcgtggcgagagaaggaaaatgcgcgtcccgggcgcgggtaggtgcgtgtgggcagcggggaggcggccagaccctgacactcgccagctgtttgtcctccgcgtagcccggccccggccgcacacgcccgccccctccctgagacccccagcccgccgcccggccttttgtccccaacccctcggccgacttccttccccgcggccgcacccccgcccccaggccggaggcgcagcccagcccctttcccggtcccctggcgcccccaccccaccccagcccagccccaagcccagcccccctcccccagcccggcccccaccctttccccctccagcggttactgctaccccggtgcattgtgggcgcacggtccgttgttcatttgccattcgacctccgccagggcctggtcggacggaaacgctccgccggctttattgtcgcttcgttatgtggcggagccgagcagtttagcgtgcctctcaccctcagcgcctgcgaagccggcggcggcgtcgggactcctcggcgcgcggaggaaggatatctgtgtggaggatcggtgtgtgcgcgcgcggctttaaagagggggcagcggagggtctccccg

SEQ ID NO: 6416 - DNA, 52 bp, Homo sapiens
  chr8:81398908-81398960
  hyper
ggcgaggccgagccccgcgagaccggaacgccgggggcgggggcgagacaga

SEQ ID NO: 6417 - DNA, 217 bp, Homo sapiens
  chr8:81478206-81478423
  hyper
aggagaggtgctatgcgaggatggccccaagttaaacagtgacagcctctgccctcccagaccccaggcgcgcgggggcgggcgcggaacaccggttccaccgccaccttcaggcctcccggtgtggcgcggttcgggacgtcacacaaataccagggcacccatgtttctgccctgggaaactctcacgtcagccggccccccaattctgctaaag

SEQ ID NO: 6418 - DNA, 55 bp, Homo sapiens
  chr8:81490386-81490441
  hyper
ttccgagggctcctctcgccaagggagagagccctagacccgttcccggggcgct

SEQ ID NO: 6419 - DNA, 100 bp, Homo sapiens
  chr8:81785240-81785340
  hyper
ggttctctcacaagcgcctgtgatggaaactcatcgacaattgttcttggttggaagaaggggctgagagattgacaagaaacaccgctttctggtttca

SEQ ID NO: 6420 - DNA, 404 bp, Homo sapiens
  chr8:81785543-81785947
  hyper
tgaggaaagcgggagccgccgcctgggagagacgcaggggcccaaggcgcaggcaaatcaacagttcctcgcgctgccccgcgcggccgcccgcgccgcctgacacacccctcctggccgggtctctccccggcgccgctgaccgtcctcggccaggcgccttgccccggggcccgggcccgtccccctccccgggctggcgggtcccacgcgcgccaccgcgcccaacacgcaccttcaacgcgccccgggccgggcccctggggactgcgtggccgggtccgaggggcacgaaacgctcctcgccgtcctcgtcgtcttcgtcgccgtccaccacctcgacgaccacctcctcgtcctcctcttcctcgtcgtcatcctcctcctccgcgccccctcggggc

SEQ ID NO: 6421 - DNA, 40 bp, Homo sapiens
  chr8:81786601-81786641
  hyper
ccatgcggccggcggccgagcccgcgcgcgcctctcccgg

SEQ ID NO: 6422 - DNA, 1058 bp, Homo sapiens
  chr8:82192689-82193747
  hyper
cgaggcccgcctcccattggccgcatagcgccgcccagcgcgggccgccgttataaagcagccgccggcgccgggtgcctcacagcacgctgccacgccgacgcagacccctctctgcacgccagcccgcccgcacccaccatggccacagttcagcagctggaaggaagatggcgcctggtggacagcaaaggctttgatgaatacatgaaggagctaggtgaggcacccggcctggcagcgcctgcaacgtggcgtgttgtgcggtcgtctgtccctaggtccccgtcagcgtgccagattctggggcaggagatgctcggcggcctacccccatcccctcccatcttccccaccacgcggccgttgggtgcagcgcgcgcagcaccacgcgggcaggcggcgaggagcagggagcgtgcgcgcctcttgcccgcccgcgggccgcaagattccggaggtggtccaccccgtggtccacctacctctgcttctttcccttcgcccaaacggcagcccttccgcattgcttcctgtcctttagcgcgcgcacccgtcacctcacgctgcacttctttcgaccccctccaggcgaccctgtatttcccttttttccccctttactcatccttccccttcctgccaccattctgtctctcccatttaccccatcgtggcagcacccactcccctttccctccctgtcgcatcttttgttccctgtggcgcgcaggtcaccctccgttttcttcatggggacgcggtgctggcgcgcagtttcccgcagaaatcctgtggaggggtctgagtggcgctacagcttcagcttgcattcctctgtcagccccgtctcccccaggtcctctgctcgcccttaccagttgagccgaaccctttggattggtaccccatggaacaccagggcccccgagaagcgtggcgctggcggtgccgacctgctgctggcactgccgggccggggcgccgcagtgggcgggtggcctgtgggaggagcgcaatgaggcctgggggtggccgtgtgttgccatcctggcctc

SEQ ID NO: 6423 - DNA, 34 bp, Homo sapiens
  chr8:82633553-82633587
  hyper
ggcggggcaatgagcgcgcgcggcgcctgacggg

SEQ ID NO: 6424 - DNA, 457 bp, Homo sapiens
  chr8:85094383-85094840
  hyper
atagaagcccaatgcacccagcgattggctgatggcatctttgttcaggcgatcgatgagcgccctaacccacacgctgggtggagaaatccctctgccaccctcaccttcagaatccactgctcagccacctggctcccgcggggtgcgccaccgcctcactgctggtacacgtctccccctctcgaccgccaagtgcttgctccctccaggcgagcactcacacaatggactcacttgtttcccatgcccctctcctttgacttccagcctcagcgaacaacttgagcaagagtcaaacaggagtctctgccatggagcatagacccttggagctttccagaccagctcagaagcacgggcgcacacacagacaaaacaatgccttgtccacgaatgaataaaggacacccatgcccccacccaccgctccgcaacccgcagaaagaaacccggg

SEQ ID NO: 6425 - DNA, 52 bp, Homo sapiens
  chr8:85094922-85094974
  hyper
cgttcagatggcaataaagattgacagtggctttgcccgtgacaacgccccc

SEQ ID NO: 6426 - DNA, 476 bp, Homo sapiens
  chr8:85095301-85095777
  hyper
ccacagcacacactcccaatgcgaggcggcggcggcagcaacagaggcagcagcagcaatcgcggcagcagcggcagaggcggcggcagctgcgcgcctcgggcccaaccccgctcggctccccctctcgccggcgccctgcctgtcttgcgtgtgcgtgtgcgtgtgctcagcctcagcgtgaggggcacctgctcgtctgggctcacagcgaaggcagcctcgccgcgagctgccgctgccgctgctgccgccactggtgttgccgctctcaggcgccaggctccccgtcgccgccgccgccgcctcgccagccagagttgggctccgtgggcttcccccctcgcagcctcggtccttccccgctgcctgcaagtcagcctggctccgagtcacgtgtcagtgcctgaggcagagactgcgagaaaaaaacgcgcttcattccttcttccaccgccatactgtattttatacta

SEQ ID NO: 6427 - DNA, 131 bp, Homo sapiens
  chr8:85096577-85096708
  hyper
tggaaaaaaaaaaatgaagtgcggtttggtttccttgtcaacggaggatgaagtgaacagctgagcagctcgcagagagcaggtacttggtccccttggaggcgtttcccgggtgtgcagtggcaacactg

SEQ ID NO: 6428 - DNA, 30 bp, Homo sapiens
  chr8:86019335-86019365
  hyper
gcccacagttgggacgaggattccagtttt

SEQ ID NO: 6429 - DNA, 30 bp, Homo sapiens
  chr8:86089466-86089496
  hyper
cccggcgtgacaagcggcccagactcccgt

SEQ ID NO: 6430 - DNA, 57 bp, Homo sapiens
  chr8:86132758-86132815
  hyper
aggtgcagtgaaaaagcgaagccccacccatagagcgaggttcggaagtccagtctc

SEQ ID NO: 6431 - DNA, 30 bp, Homo sapiens
  chr8:86157558-86157588
  hyper
gtggtgattaccatcgtcattattgttttg

SEQ ID NO: 6432 - DNA, 30 bp, Homo sapiens
  chr8:87354736-87354766
  hyper
catccgagcgccctcgctgcgcatgctcgg

SEQ ID NO: 6433 - DNA, 90 bp, Homo sapiens
  chr8:87527031-87527121
  hyper
gggctcagctccgggccgcaaggccccgcctgggcctggcgctcgcgcacctggggctggggataggctgggatccgccctccttccctg

SEQ ID NO: 6434 - DNA, 30 bp, Homo sapiens
  chr8:89339065-89339095
  hyper
attgtgtctttgagcgcgcagcatcgtgct

SEQ ID NO: 6435 - DNA, 667 bp, Homo sapiens
  chr8:89339314-89339981
  hyper
aatactgctccgttccgcagactgtagcacataaaatccaaagcaaggtttgcaagaaaaacacccccgaatgatgcacgaaatccaaccgtcttccagtgctgaatgtgagtaagatcatagtgaactgtgcttcaatggatggacgagctccccttcgttttctccctctctccctctccctccctccctcgtttcctttcaaaaaaaagtcctccgggtgggtaaggagcctgcaggttcacccacagccgggcaaggggaggagacaggggccccgcgctcggcagcccccgagaggcagcggcgaagacagggtcagcagtagttcctgttcaccatcctccggggtcagtcaccgggaacgtggcgcctaagttcaccggcggttccggctcaaagagcctagtcgcagccgcagcagcagcagccgccgccgccgccgccgcctccagcccgtgcgtcctcctcctgcactgcctactcctcctcctcctccgccgccgccgccgcccccagctcctgcgggaagggcctccgccgctcctcactctctcgcctctgcttctccttccctcctctcctcgctcccctccagaatgttcatccgtaatctacataactcctccttcccggggtctgcctggctctcggggcccttggcgcg

SEQ ID NO: 6436 - DNA, 12 bp, Homo sapiens
  chr8:89340040-89340052
  hyper
acacacacacgc

SEQ ID NO: 6437 - DNA, 155 bp, Homo sapiens
  chr8:89340081-89340236
  hyper
cgcgcgcttcttaaaggagacggctcataaaggattccccactacggtagggcgcaccggaggtatccagcccgcgacaagggccctggtttgagcacagctcttcgacagtatctcccatcccgcatccccgaggcaggcacccaggaacttgg

SEQ ID NO: 6438 - DNA, 492 bp, Homo sapiens
  chr8:89340273-89340765
  hyper
cgcatctaaaaacgagtgcgcccctctccagccatgagctgggtggggctcaggctgcggaccctagtggggcctggggagcggcccaaccctggtcctggagagcggtcggcattcctgaggaagcggccctggaagaataggggcgctgggaatcagaggagcgcctggtcactgagcgcccctgggtggctcgggtcggtggccggggctgaccaagtttgggaagactgagatagcaaatcccgaacgtccaaaactttgttggggtcccgagcctgtggcctggtgtcttcctgaatcccctctaccatagctacattccgccttccaggcttgaggagtaggcacagggttttggtggcggactagacaaatacagaagcgggatgaaaacgctcactttccaagtgaacggtggacacacgcgcacagtgggacccgggagagatggtcctgggtgttaacaaaacatccgatgagagggatggg

SEQ ID NO: 6439 - DNA, 30 bp, Homo sapiens
  chr8:89928884-89928914
  hyper
tttttttttttttttaaattacagaacata

SEQ ID NO: 6440 - DNA, 30 bp, Homo sapiens
  chr8:90914086-90914116
  hyper
ggtgtggtctggggcgggcctgatgagcac

SEQ ID NO: 6441 - DNA, 522 bp, Homo sapiens
  chr8:91996986-91997508
  hyper
tgaaagcctcccaccgcctggcaccaggtgctggggcagagccaaggggagctgtgtacttagctccttttttggcgatggctttggtctcggccacttgcccctccgtcgggctcccctggccccctacactttctttcccctcatccgacgctctcgctcccatcccactcccattcagggtccacagggtactgaaggggccctgagagatttcccgacccacctcagagcttctcttcctcgcctcaactttcccggggtcgggcctgggagacggcgcccacccgcctcctccacaccacggggcccgacttccgtcccccagtgtcgctcatcctccctagccacttaccgactcaaaatccacggggatttcggggcagcagcgtcgccgcgctcagcccacacgcggaggccgagcgccctgctgcccgtcggggaacggctcctgccgctggtccgctggctgaccgcggtggcggcggcggggggcgaggggcggggggcgaggggcggggg

SEQ ID NO: 6442 - DNA, 486 bp, Homo sapiens
  chr8:91997527-91998013
  hyper
cgaggggcacgaggcgggcccagggcgggcgcggggcgtggcctcgggcgctgagcctcgagagcagccgcacccctgccggggtagaaccgttaaaagggtggcgcgcgctttcccgggcgagctgggcgcgtggggttggagcggcgccacccagagccggtcgtctagggtaggaggccgcgagtgaggcgctgacaggctagccctcgacggggcgcgcccgcgtgaacggccttgggggccccagaccgtggccctgcttgtgcgaagactgggaggcgccaggcgggccgcctgctgggggcttggcggcgggttccaggcagcgtctgtgagggaggccgcctctgtgagggaggccgccgtcgtgctgacgactgagtccaccctactcctgtcccccgtcagagctgctggcaggcgctgctttccccttggtgcatttagtgggtgtcgggattcgggttggcagggaggaagatg

SEQ ID NO: 6443 - DNA, 106 bp, Homo sapiens
  chr8:93114135-93114241
  hyper
ggcgggccctggagcgcgtctccactggcccgggggcttcaccagaggggtttctggaaaacgaaaggaattatccggacgtggctccaagtctggaccccttcgg

SEQ ID NO: 6444 - DNA, 146 bp, Homo sapiens
  chr8:93114306-93114452
  hyper
cgacgggaacacccaggagggccggggcggctgagtccagagcgcgcagaggtcgggcggggacgactctccccatcggcccctgactgcgaagcccgggaccagcctcgggcgggagccgccgtccgcccgctcacccaggagct

SEQ ID NO: 6445 - DNA, 743 bp, Homo sapiens
  chr8:93114733-93115476
  hyper
atcggttgttttgtcgggggagaaacccactcgtcatcttcctgctcgcataccgtgactatggagagggaagaaaaattatttttaaaagacactgtggggaatataatagtaaaaactgcatcctcggctgacccgcgaagttcagtgtcatcgcagaccggagtcacccgcgatgttcctctttgccctggtgcgtagtcctaccctaattgagcgacaagtacagcctggagcctcgcggtcgaataatccaaacgaagatgacggtcatcggaacagtaattaataacagtcaggggcccgaccccgccgcccgcccgccggccaagccctaccgcggacacttacactgcacagggccggagagtcccaccatccgccacaggctccgagctgcaaataaaacttcccgtcgtctcggccggcccgcggggcgacggggcgaggacgcggcgcggcttccctcgcgaggccagagtgtccgcggccactcgcccacgcgcgctcgccacgagaccgcggagtcgcgccgcggagcgactacggccgcccggcgctgcgcagagagagctgccgtgcaaaaagcccggggtcggggacgccagccaaacgcaacctccacgcagagcccaagacttgcggagctctgctcccctcctcccgcctccctccctccctccgcttttctgttgttgctgctgtggcagacaaatgtgatgtggggcgcagggaattgccac

SEQ ID NO: 6446 - DNA, 30 bp, Homo sapiens
  chr8:93115883-93115913
  hyper
taatgatgccttcccgggccgccagctctc

SEQ ID NO: 6447 - DNA, 125 bp, Homo sapiens
  chr8:93978357-93978482
  hyper
tgaggcggaaaagaggcgaggctctgcccccaggggcgggaccaggcctcagcctgctctcggattggtcggcctttctcccgtctgtacgccggtccaggacgcaaaggcgctggccctgaggc

SEQ ID NO: 6448 - DNA, 30 bp, Homo sapiens
  chr8:94712352-94712382
  hyper
attcagcagtgaagcggacgcgtctggtac

SEQ ID NO: 6449 - DNA, 30 bp, Homo sapiens
  chr8:94712616-94712646
  hyper
tgcaggggtgggcgcgccatcacccctctc

SEQ ID NO: 6450 - DNA, 327 bp, Homo sapiens
  chr8:94713054-94713381
  hyper
ggctgcagccaccgccggcggcgaagaggagcccggggcccggccggctgccacccacccacgccaccgggtctcgggtccccacactgccgcgggcagtgcggaagcctaggaggcagccgggcgcccaggccgcgctgcgcggagcagccggagcagccacctccccagttaaggccaggcccacccggcctgggccttttcctgtgcctacacagtccggatagtgaggtcaggaccccatggagagcagtccgcgccgggagacgctgggtcgttgatgggtttacgccttcaaagctgcagaatgcccggggaatgtttgca

SEQ ID NO: 6451 - DNA, 210 bp, Homo sapiens
  chr8:94929136-94929346
  hyper
gggcggggcagggtggcggccccgcacggtaggggagcagagtgggcaggccgggggtgagggctcgcgctccgggagctgcacggggctgcgtggaaagagcgccgagcggtggcgtcgttgtcgccccctcctcgtcgggaagaatcgtttggtctcctgccgtgcccggttcgtattccctactccctgccacgagccgccccgtcc

SEQ ID NO: 6452 - DNA, 10 bp, Homo sapiens
  chr8:94929748-94929758
  hyper
gccgggcagg

SEQ ID NO: 6453 - DNA, 4 bp, Homo sapiens
  chr8:94929775-94929779
  hyper
cggg

SEQ ID NO: 6454 - DNA, 357 bp, Homo sapiens
  chr8:95246577-95246934
  hyper
gcagagaatttcccctcccagcgcgggggagcccatccctgaggactcgggcaggtcagatgagaattggtagaaagtgaagcgccttttcctcgcgctgagggcaaagccagtgtgcagccgcctgtgggtgaggagcttttatgacaatgaatcccgtgttttatgggagggcagtgtggagacagcgcgggccgagtccctgggttccggggcaagactgtgggcgtctcccgcggtgactcagagatgctgccctgcctcacaccatctcgcaccatctctgtggaggccgtgaccttcattcactgccgtctgtcactggggggtgacctcgcagttgtcagagccccctct

SEQ ID NO: 6455 - DNA, 711 bp, Homo sapiens
  chr8:95651324-95652035
  hyper
cgcgcaccgagagccccacggggaggtggttagggggaaccggctcctccaggcggcctcgcccactgcaatgcaatctgggtggtttttccaggtccctccctgcctcgttccgcgcccagtccctgcccccgcgacgcccgagggcctggacgggtagctcggagttaccggggctggggaggagcgaggctactgcagtaagccagccggaacccatttatgactccgcactctgaagttcaggacagggaagcacccacctctggaactcaagcagtggacgagggaggtcccgagcgccgtcgcagcgctgcgagtgtgggaccctggccttcgcccgctctcaggggacgagagctgccacctgtatcacgggaggccccgcctccgcctgcaccttctcctaccaggaaacgagacggcgcgggcctcgggctcctctcccccctcccgggagctgaacccccactgggaaagccaggtctccagcttcccttgacacgcgtcttgaaaggttaccggatttgtacccggagtgggttctgcagggataggtgcatggttgcccgtttcacatcatgaatatgaacggggctggacacctagagccgaattattaatacttcagacagaattctgttcccaagaacaaatcgctttgagatataaaacccgagaaaacttcacctctggcgcttttctctctaa

SEQ ID NO: 6456 - DNA, 820 bp, Homo sapiens
  chr8:95652419-95653239
  hyper
gcctgagtttccttgcggggtcccccagctgctttgcgcgcgataactgcgtcctggggagtgactaggtggttgggcgtccagcccctggcgtccggctctgccgcgcgcggggttcctctccggaaggtgggcagcgcggcgggtttgggacgagcgtgcacccgggctccggcccggagaagggggggctcgcaggatttctcctgctgtttgcactgaaagttgtgttggctcaggagctgcttttccggggatctgcagttgcccccgccacctcctggctgcggttggcaggtccctccctcagcagttcgtcctccgcctgcgccgcgccctgggcagctccgcgccccgggcctcacctctggcctcctttcgcctccctgcacctggccttttcgcttgaccgttcagaaccttcggcttcgttccctgcagccggtattctccgagcccccctgcacctctcagttacctccagtgggaacccctccccccagcgactccgagccctttacctctctgagccctttccccgtctggcctcgtctaccctctgggtgtcaaccgcctcttccctgcccctcacgtctccccctcctcctcccctgccctcgcctctccattcatccagccattgtctcccgccccttcctccccctcccgaagcggcctcctcccccaccgctgccacgtcgtggtttgaaggagccaatgggccggcgccgccaggtgtctcttacctgcaccacgtgggggagggggaaggggcgggcaggtaaagccacatcccaaaacagaaaagctttcagccatt

SEQ ID NO: 6457 - DNA, 50 bp, Homo sapiens
  chr8:95653290-95653340
  hyper
cgggcaactgaatacaaaaagggcaggcctcctgcgccctccttcccacc

SEQ ID NO: 6458 - DNA, 55 bp, Homo sapiens
  chr8:95653859-95653914
  hyper
ccatttcagtcctccgcaacttagctcaggtggagaggccggcgctaccgagccg

SEQ ID NO: 6459 - DNA, 334 bp, Homo sapiens
  chr8:95654164-95654498
  hyper
tgcttctctaccttcggaggtgggacagttgcacgaagtgctagttagaccggatcagttggaactgacggaggactgcaaagaagaaactaaaatagacgtcgaaagcctgtcctcggcgtcgcagctggaccaagccctccgacaggtgacaaccccgggtcacgccacccaccccagcctgggcccaaccccaccgcaccctacgccctctcagggcggcccacgcgtgttcccggagcagggtggcgagacgcctgcccggccgcgtgggtgggagcccagcctgagggccggggcgcaccgtttgggcgggggtcgctgcttctcttca

SEQ ID NO: 6460 - DNA, 138 bp, Homo sapiens
  chr8:96146147-96146285
  hyper
ccctggaaggccccggcggggaacgggcagagtccgcgccctgcgtccgcgaccaggaggatcggaccttcgccttcgctgtcgccgccgccgccgcccgcggccgtcggggtaggtgaagcccgggtgggtggtccg

SEQ ID NO: 6461 - DNA, 131 bp, Homo sapiens
  chr8:96146670-96146801
  hyper
ggggcgtctcagggtcgcgacaaatttctggccgaaaagtttgcagggtctgcgtgtcggggaccttatgacctgaactacatatttgtatgtcacttgggagacgaaaatggccccgcagaacttgctct

SEQ ID NO: 6462 - DNA, 231 bp, Homo sapiens
  chr8:97157666-97157897
  hyper
cgcgcccaccagctcttctttgtctgagagcatggacacatcaaacaaatacttctgtctccggagaggagtgtgcgagagatcgtctgcgagataaaaaataattacagtcagtttcacttaagggggagatcagcccggtgctcttcggccgccccgggaggaaaagggcggggagtgggggcaggtcggccgggcagtccagcttgcccggcccagggcctgaccacc

SEQ ID NO: 6463 - DNA, 52 bp, Homo sapiens
  chr8:97158021-97158073
  hyper
ggcctaccgggttttccccccaaaaggcttcgtaaccactaatgtgcccttt

SEQ ID NO: 6464 - DNA, 95 bp, Homo sapiens
  chr8:97166425-97166520
  hyper
ccctggcctctttcacgcccactctcgggtccctaaaccatgccccgcccccaggcgccggggccactagcgccgccgcgcgcgcttccctagga

SEQ ID NO: 6465 - DNA, 638 bp, Homo sapiens
  chr8:97166804-97167442
  hyper
cacacctcgagggctcggctcgattcagtcccctggtccaaagagtgtcgtttgacccgggttattcaatacccgaggggttatcgaactaatggctttccttttacttaaaagcccccagggattactgttgatttgctctaagacctttggtgcacgcagtagtcctagcaggaaacaaaagttctcgttctgccctgtttctatcataccatcttcctccccacagtctccacctcattcccttcttccttctccgccaccgccccagaaagacgtcaccactttcgaggaggtgtgtaagaacctcaaggactccagctaagaaaaacatgtggtgttagggcctccgatgcagtgccctgcgttccccgcgggtccaggtgacacgcatcctctccggtcggaaagaggagctttcaagtcctgattcaattggggggtggggagggtggagaagagggattcgccaggcctgtcgtgatctgtggtctgagtgacttttttcttttaatgcgcagaaaccacaaggatgtttgagcacgtttttagatcccctcccccatcggcaactccaccgcgcgaactcccagaggcccgagagcctcccgcgttgaggaaaacgctatgtccgtctc

SEQ ID NO: 6466 - DNA, 292 bp, Homo sapiens
  chr8:97167785-97168077
  hyper
cacaaaccccgtgcccgcgctcatgcaggcgcaccctcatacgcacacacttgaacgcttagcaagtcttttccaaggctgttccctctttccggggaaataaagcctagattggaaccttctgcccagcttcctcatttggccgtctggtctgcattagtgtttttataagggactcaaacaaatcgaatacaaggtcaccaaataattaacagttgtgaattccctccgtccccattaaaatacttccctgcttatatttcattttcggtttgccaacgacaacagggta

SEQ ID NO: 6467 - DNA, 15 bp, Homo sapiens
  chr8:97168213-97168228
  hyper
cgcagccgggctatt

SEQ ID NO: 6468 - DNA, 2 bp, Homo sapiens
  chr8:97170377-97170379
  hyper
cg

SEQ ID NO: 6469 - DNA, 30 bp, Homo sapiens
  chr8:97171154-97171184
  hyper
ctcgagcaaggaacgcgactatgagtgaga

SEQ ID NO: 6470 - DNA, 340 bp, Homo sapiens
  chr8:97171618-97171958
  hyper
gtggcaagaaggggccgcaagggtttccgcagacacccacacatgcaggcgttcccacagagggtaccagggatttcccagacccccaccagccctcaggaatagcgtagagagaggaacgtcgcctggctgagaaaggtggatgggcatacccatgtacctttgtgtattaagtacccacaacctccgaacttagccgtccctgtcccggcccgcccaactgctgccgccgcatctgcagaaaccactcgtgttgaggcctcggagcagccgggagcaccacgctggagcaaaaaagccggagggcgcagggctccagcccggctgaccatcccaccca

SEQ ID NO: 6471 - DNA, 182 bp, Homo sapiens
  chr8:97172018-97172200
  hyper
cgcggactagttcctcagactgtgggactccctagtgccggctttgcccagggctttccaaggctgtctcatgccctagatctgccccagcagctcaggccttggactgcgaacccagtatcccgagacaccgattccatcagtccccatcccgacccctctccagccgggttcatccgcct

SEQ ID NO: 6472 - DNA, 306 bp, Homo sapiens
  chr8:97172433-97172739
  hyper
aaatgtagcctccagcgggaacagctccctggctgccgagctccagcgggaggggagtcgagcgttttctttgccacttacctagtcccctgtctacaaagctggtgatcgtattagccgacttggaagactggaaaaagctggcattgatgcccagcttctcagcgatggagtaagtcctgtagattgacagcatgtactcgtggggcaccacgcgcggacccctgcctggcggctcctgcgcccggggctgctgagcccggggttcgtcctgaggccgcggctgtggttcctggccctcccggc

SEQ ID NO: 6473 - DNA, 720 bp, Homo sapiens
  chr8:97172821-97173541
  hyper
cgacgaggaggatgagatggaagcctgctggaaaccgggcaaatcccacagaaaactgatgaggaagacggccgagagcaggaccctgggagtatccatggcgggcaagtggctgcgtctccccaggaggcggtggcggcggcgcaggacgcgcggggcacggagcggctggacagcggccggggcccggctcctcgggcggactcggagtgcgaggagccgggtcccagccacacaaaccccggccccgccacgccccctcccgcccctcgccgggaggggaggaatggggagggagggcagaggaggggtggggagggtgggaggagagccgggtggtgcgggccggaggtgtgggggagaggggccgcggtgcgccggtgtggcaggaagacgcagcgcccccgcgggacgcgcgcggggttgccgggcggtgcgcgcggcgcgggccgcaagcgctgaccgggggaaggcgggcgctgccggcccgtggccggggagcaaaggctggcccgccgcgccagggtccccctcgaactcccggaggtgtggtccctccgcagcgcggccccggctctcggtcctcgccagccgcctccactttcctgggagcgagcggccccggaggagggaagcggcggcggcgcccccaagagacagcttggagcaggcgcctctgctgcaggctgcgtgctgcctcggggcggtggtaccctccct

SEQ ID NO: 6474 - DNA, 30 bp, Homo sapiens
  chr8:97247827-97247857
  hyper
gcgttacgtcacatcgcgaacagagaaagg

SEQ ID NO: 6475 - DNA, 184 bp, Homo sapiens
  chr8:97505578-97505762
  hyper
agaaaagctacatacgtctctcgtttcttcactaattgttctctagaaaagggaaagtgaagaagggaaagagaaaagacaacggggaagaaaagagcatagaggagagaggaaaagtggggagagaaaggaagaaaaggactgagaaaacgcaggagccctggcttgccggtgagcagagccg

SEQ ID NO: 6476 - DNA, 247 bp, Homo sapiens
  chr8:97505801-97506048
  hyper
cggagctgccaatcggcgtgtaatcctgtaggaatttctcccgggtttatctgggagtcacactgccgcctcctctccccagtcgcccaggggagcccggagaagcaggctcaggagggagggagccagaggaaaagaagaggaggagaaggaggaggacccggggagggaggcgcggcgcgggaggaggaggggcgcagccgcggagccagtggccccgcttggacgcgctgctctccagataccc

SEQ ID NO: 6477 - DNA, 230 bp, Homo sapiens
  chr8:97506177-97506407
  hyper
cgcggaggagcaaaaccacagcagagcaagaagagcttcagagagcagccttcccggagcaccaactccgtgtcgggagtgcagaaaccaacaagtgagagggcgccgcgttcccggggcgcagctgcgggcggcgggagcaggcgcaggaggaggaagcgagcgcccccgagccccgagcccgagtccccgagcctgagccgcaatcgctgcggtactctgctccggat

SEQ ID NO: 6478 - DNA, 1382 bp, Homo sapiens
  chr8:97506447-97507829
  hyper
cgttttgccctggttgcaagcagcggctgggagcagccggtccctggggaatatgcggcgcgcgtggatcctgctcaccttgggcttggtggcctgcgtgtcggcggagtcggtgagtgggccaggcggaggatgcgcgcgccgtttagggtgtttgaagctacgagaggagcccgcagggaataggggagcgccacctggggaacccccagtccccaagtatacaccggagatccgctgggacaaatgcgctcgtccggtcaccctttccccctcttcccttcctcagaaaagcgctgctcgctggcgttaccccgcggtccgcgggaatgggggcaccgagaattgcggtttggtctagccgcagaggcccctgaagtcactcccaacttcttcgccctcggcgggtcttgctgcgtggtctgggaaggacggaggggaaagggtggcaggaggggggagcctgggtcgggcccgcgagggaacggctccactccgcgcgctcctcgagaccagggatgacctggaaacttcggggtcccttcctccgcacaccatcccccccgcgccagctttcctgtttgactgcatgcaagttctggggagatgggggccagatttaagagacccgcgagtgtccagagagaaaagtttgcaaaagttcttttgtttgatgctccctgcggctagggcgaggtaaccgacactacgtggaatcgcagtaggcgatccctcaaggggatactgggggaggcacggaacgcgtccgaaaatgctgggacgccggccactggattcccagtcctgcggcgaccccctcctcgttgaggggtggaggttgcaccgcggggcgtcagggacgggaggacattttcataggagttacacgggagtgccgcaagcagggcgaggcggggtacgtgtgacacggcgctcggcttcgggtcgcctggccgctgggggacagaggcttccctcccgccacgctcgccctctctggccctggcggggcgcttctggggccgggaggagtctcgtctccggcggagcgcctgccggcacccagcttccctcccccgccctggcggtgggaacttgatttctccttttggtcgcgcttcgggggctggagcttgtttccccacgtcgcccaatgagcgccctctaaagggaactgcctccttggcctcctctcgtccgcagctgcctccacctgggcgccaggagctctgtcgggccaggtggaagcttgagcaccccagatttcgtctgcagcctcagtgccctctggggtctcagggagtgcggctgtttctggcccttctggttccccacgtcctctccctttgccatttaataacgtgtcaatttctaattaattg

SEQ ID NO: 6479 - DNA, 56 bp, Homo sapiens
  chr8:98289954-98290010
  hyper
gtgaagggtccgggtcgcgcggggcgtcgtccggagcagggcggactcgggctttg

SEQ ID NO: 6480 - DNA, 196 bp, Homo sapiens
  chr8:98290080-98290276
  hyper
cggaggcagcttcaaagacacgctgtgaccctgcggctcctgacgccagctctcggtcgggaccgagcgggtctctccacggcaaccgccgacgtcacgaacgtacaactgtaccgtcgcgagaggacgtgatgcgcccggtgattggcgccgccgctgcggctgcgcaggagacgacccccgcgggcgctcccac

SEQ ID NO: 6481 - DNA, 225 bp, Homo sapiens
  chr8:98787763-98787988
  hyper
aaaaagaagtagaagggaagaaaatcgcaaggaactagactaaaagaatctcgacccttgaatggagttacacgaacggccagatgaaagaaggaaggcccggacctccactcagggccgactaggggactggcggagggtgcacgctgatggatttactcaccgggtgcttggagctccagcagctggctggagcccgcgatgacgtcacggactcgggtcaca

SEQ ID NO: 6482 - DNA, 574 bp, Homo sapiens
  chr8:98788320-98788894
  hyper
cggcgtctggtatctggtgagcgcggcgcgcccggcccgggaccctgcgttgcttccgcgcccctagctgggcttctggcccggcctcgcggtggggtgaggcgtgcgctcatccgcctaaagttgtattattagaaacttaattctccgggtgccgcgtccgcacttcccccggctgggccagcgccgactgggggaggccaggagtttggggcgatgggggaggccaggggcgcggggcggagggccgcactcgacccttggcgcccaggtggtgtgggtcgccgatctccagcctccgcgcagccccgcggcctcgcgtagggcgcaccggggcagacaaactgagcttatctgccgagcacgtgtttcctttcttcttaaagcccgtgggctttgtgtttcgacggctgcggacggagcggtcgcggaggtgacggcgcatattttgcagctctgtggttagggttgcggatttgtcaatgctcgttctccctggccgcgtctccgctagggtggcctgcgctttcacgccgtcgcacgttcggatcccgagttgaagtggttgggagtt

SEQ ID NO: 6483 - DNA, 252 bp, Homo sapiens
  chr8:98881114-98881366
  hyper
caggcagggcgcgccgccagagtgcccagctcccggggctgcccacagggtggggccgccctcgccgccgctccctctccgcgccttccccatccccaaagaggacacccctccttccgcccggcccgctccccacccccgccgcggcaccgcctccccagccgcccgcccttgcccagcgcctcccaggcagccagcgagcgaagggagcgctctgggatgggacttggagcaagcggcggcggcggagac

SEQ ID NO: 6484 - DNA, 30 bp, Homo sapiens
  chr8:99058278-99058308
  hyper
tttaagcttcgcggcgttgtgttgctgttc

SEQ ID NO: 6485 - DNA, 542 bp, Homo sapiens
  chr8:99076759-99077301
  hyper
cgcgcttgcgctctacgcccaagggagccgggctgcagagctggagaaacttccgcggctacgggtgcagttgccttcggttcccggttccgggccgacacccgcgcagggctgagacaggtgtctgcgctccccgcaatgggctgctccagcagcgccctcaacaaggccggcgacagcagcaggttccccagcggtgagcagggtaccggcgccgcccgcgcccgggctggggactcgggtgggctaactccccaggaggtccaaagggtgtgtcccgtggccaccccgcctggcaggagccgggccttgtcccggaggatgcgagcagaacccgggacaaagcgcgatttccttccaaatctggagcggcgctgctgtgaccgcgggtgcggcggccctggtgcgctccgcggcgctcgctgcgagacgcgcggggcccgaggccgggcgctggattcaccctgtccgctgatgggatctcggggagttggtgttgaggccctaaggcggttagcctcggcattgccttaaacacagga

SEQ ID NO: 6486 - DNA, 846 bp, Homo sapiens
  chr8:99438952-99439798
  hyper
gcggggaaaggtcaccgtaggcagccccctgcctgcgccctgggggtggtgataataacagctgtcaccgggggatggtcggggggaagggagaggtgtcggccccgcgccgagccgggggcgcaaggtggtcgcggtgacgcgccggggaagcgcagagaagcagcggcggcggcggctgcgccttccgagcccgggcggcggccgaggcacgcggagctgtccgttcagcaccaccgcgccgcgccccgcgcagggcgggcgccccgtcacacccgctctgctcccgccccggctcacggggcgaatgcggcgcgggttcctgcctctctgggtgggtgaggggcgcgcggatccggagagggggctccgggagcggcgggaccacgcagccacctgtgagccttcggcagctgcgggcggcggcggcgtacccggcccgagacgggaggagacgctcggcggcccccgcccgccggcccgccgggcgcacacactcgcacccgcgcacgcaccgccagcaggcagcggccaccgccgcgatgctcgcccgcgggttggggaagtttcccgccggcctcggccgcgggcacccgtgctcccaggtaagcgcttccagaacgcgcagggcgagcccgggcagccccgctgggtgaggcgcagcgcacgcggccccggggcatagcgccaggccggcagggagacctgggccggggacgcgggggctgcaggcgtgggatctggacccaggggaggccgggccgcccccctcattcccgcggcccgggtttccagactccagcgcatcccccccaccccaccaaagctacgcgccccccgtgtcgg

SEQ ID NO: 6487 - DNA, 271 bp, Homo sapiens
  chr8:99951872-99952143
  hyper
ggaaatcaagatttccgtttgaattttcccaaagtttaagcgttggcaagtgcgttgaaaaacacacacaatatgaaagcctaataaaaatataggtttgcagaccgtgccctagtcttttccgaggatgttcttttctgtcatccatcgtctacccacgttgagcacgacagccgggccagtcccgccctgggcggttggggccttcccagaggggcccggtgcggagagcccccctctccccggatgtgtctggggcctgtccttcact

SEQ ID NO: 6488 - DNA, 105 bp, Homo sapiens
  chr8:99952198-99952303
  hyper
cgaaaagcaccatgaattcgaagcagccttggacgcgggatcatgggcgttagcctggctctctccgacgaggcaaactgcaggagatccccttccctggagtca

SEQ ID NO: 6489 - DNA, 161 bp, Homo sapiens
  chr8:99952532-99952693
  hyper
gccggctctgggctccgccgctgcggcagccgagggcctcagctgggaaatccaaacccgggctggacctgggctcaaggaggtttctgtccccaggctagaccaccacggccacggccacgcaacttgccctgagaccccgtgctcggccttcccactga

SEQ ID NO: 6490 - DNA, 721 bp, Homo sapiens
  chr8:99953841-99954562
  hyper
agtctgtgtctgacacctgctcgctgcttagctggcagagcctcctgggtgggccggggggcaggggcctgcgctgcgcgccccctcctcctccacctcctcctccgcgtttcctgtccctggccttcatcccggcctcccggggcgtaaacttgcagcggttggggttcaggcagccgctgctcgcgcgcccctcgtcagttagccatttccctgagagcgtccttggtgtcgcaagtccagagccgcgaggacagcagatgaccgggtcagcggaaatttcagagccagccagcagctcaggtccccggggccgcggcaggaatggaacggctccgcggagacagcctcgggggcacagccgggccactgcagactccgggacttccctctccgcacacccgaaacccacaactcgcccgtgggccgcgtggcctttctgcgccgagggctgctgggggcgggcggcgagcctggcgggtgacctgctcttgggtgggccccgcaatgcctgcgccctagacgccggccgggacgaggggctggctgggtctgagcctggagaaacacaagggtcagcccccagtgggcgcagaggtggcccaggagggcccgcggacggtgctgcgctgcgctcagcctccgggccgctccccgcgttcggcgcgcacctgcccatcgaggcggcagggccagcaggcggcctaggcgcggccgggcc

SEQ ID NO: 6491 - DNA, 249 bp, Homo sapiens
  chr8:99954686-99954935
  hyper
aagtaaacacatttatggaaaaaccccggggttaggaggtttgcggaaagagggagcagctcgtggggttggaaattctgcctacccctcgggaaaaccaaacggttctgcacccaacgtacacatacttaagggcgggaaaggtgtgaagcccgctgctggggagttgcctcccctttgatgaaaaggaagtgcgaagcgtaggaacgctcttcaggtcaccaccccgtgagtgggaggcttggggag

SEQ ID NO: 6492 - DNA, 30 bp, Homo sapiens
  chr8:99955188-99955218
  hyper
aaacactcgaatctccgtttcaagctcact

SEQ ID NO: 6493 - DNA, 30 bp, Homo sapiens
  chr8:99955538-99955568
  hyper
tacgtcctcaaagtgcgggcttgccgtgga

SEQ ID NO: 6494 - DNA, 1086 bp, Homo sapiens
  chr8:99956680-99957766
  hyper
ggacgcgggcggggacggagctcggcgtgcttgctgctggagggtgatggccctgcaaggctgtgggctccgacctcaccgggagtcgacagcgagaggttcgccgaagagcgaggttctgggcgagcgctgaacgccggccccaagcaccccgggtctttacacagtccgcgtccacagactctgacgaagacgtggatctgctctcgctttagctgctcgcggtcctccagatcatgtccgcgactcctgcgactccgcgcggaaaaaaaagtttgccaggcgtggactcaatgacctttccaagctgtgcgcctcgctgcctggaccgggtctgagcgcggctgcccaggttgacctttctgcgggaggtgagtgttcgctctgggaaggggctgtagctgccctttggaaggaagggtttgggggtgtaagaggcgttcagattctcggtctggtgtgccccaaattcagatgtgaaaatagatcatggggatgcaatcccagggcactgtatttctcacttccttgggtccctggcacgcgactcccagctaacacccaaccacacacatttctacatactgtttcttaattttgttttgggatatttaatctaagcggtcagcaagacttcttataaaagctggtctacgtacactgagatcaaaccccacaatcccatggtgtttctgctcctgccctagcaagcctgggtcgacttgtcccggggcagccgcggcagcgcagcgtggacgggcccggacacccggtgcctgcccagccagcgacgctgaaggcacatttcaagagggaaatagttcagtcctcggtaatttgtcaacctcgtgctggctttaaaattctcctcccaccttctagtcctgactgagggggcccaaaagcaaactccccgggggcttaaacgctcggattcctgagaaacggcaagtgagaaaggagttgcagttgtacgaagaaggagcgaggaaaaggtgtttgtggagggagccccggatctgtcttcctacctgttagccgagaacaaaagggggctggcgtttcccgaagcgaaagggcgcagac

SEQ ID NO: 6495 - DNA, 179 bp, Homo sapiens
  chr8:99960318-99960497
  hyper
gataggaggagggggcgattctaggccgaatccagcccctgaggtgtcacttttctttcctgcggcccgtcaccgctgatagatggggctgagggcagaggaaggaaaaagaaaacctccgaggtcagtgcggggcgaggtgagcccctcccagggccctctggcccaggaggatgaag

SEQ ID NO: 6496 - DNA, 215 bp, Homo sapiens
  chr8:99960921-99961136
  hyper
gcagtcccctcacggctttcggggggtcttggagtcgggtggggagggagacttaggtgtggtaacctgcgcaggtgccaaagggcagaaggagcagccttggattatagtcacggtctctccctctcttccctgccatttttagggctttctctacgtgctgttgtctcactgggtttttgtcggagccccacgccctccggcctctgattcct

SEQ ID NO: 6497 - DNA, 203 bp, Homo sapiens
  chr8:99963487-99963690
  hyper
gctggaaatcacaaagcccaccgaggtggctgcgggtctgcctccgaagttatcagtgtaatcgggcctctgtgtatgcctgcacgtgtattttcatgattggaagattaggagcacggatttgttcctgcaagtctcctcttttgttgtcatgagagtgttatgttaacgcttgtgataacgataagacagaaactattgaa

SEQ ID NO: 6498 - DNA, 30 bp, Homo sapiens
  chr8:99963933-99963963
  hyper
gcccaggatctgtcccgtgccgccgctgct

SEQ ID NO: 6499 - DNA, 45 bp, Homo sapiens
  chr8:99985998-99986043
  hyper
ccccgagggccttaggcccagcggacgcccggccggagcctgatg

SEQ ID NO: 6500 - DNA, 301 bp, Homo sapiens
  chr8:99986225-99986526
  hyper
gggagttgcttctccagtcggtgaacgctccgttgagccacgtctatgcgcttgctcatggataagcgcactgggggactatactgcagtgtgaccgccagtgtccccagggaggctgcggaaaagtagaggcaatgagacccgagcagaaatagggacttctcgcggcagtccgcacggaagcagctggggagcatccagctcgaccctccccacaggcccagggtcgggacaccgagggaaggcgcggcgcgcgcggcaaggccaggggcgcggggctgggctcggccggcacaagtgc

SEQ ID NO: 6501 - DNA, 230 bp, Homo sapiens
  chr8:99986791-99987021
  hyper
cgagcaacccaggggccctgcgggaggaggagagggtcccgggagtccgcccttccctgcgccttcgggaccggcaggaggcgctgcgcgggcgaattaaaagaaaaggaaaagctcgtagtggaggtgttaccgcatcctgcctttggacgctactcttagttgagtgacccgattcggaccttaggggcgttagggtctcctccaccgcctccctcccctgttaaaag

SEQ ID NO: 6502 - DNA, 339 bp, Homo sapiens
  chr8:101118151-101118490
  hyper
cgtccccgctgcccgcgcctggagcccgcgcgggccgtcagggccctagcgcgcgggtccagcgcgggtcagggcctgagcgacgcggcgacggcgcgcgggctccggagctacgctggctagcgtggccggcgccgcgccggggttgctatggagcttagacaatacggccgcccagggaggccgaggccggccactcaggtgcctttcggggttcccaagctgcgacgggaacacccccgccgccccctaccctcccttcctcctcctctgggcagggaccagcgcggcgaacgaaggctgggggcggacgcgcgtgtggacccccagcgcggtcac

SEQ ID NO: 6503 - DNA, 35 bp, Homo sapiens
  chr8:101170569-101170604
  hyper
gagttcccgggtccaccggcgcggtcagccctggt

SEQ ID NO: 6504 - DNA, 499 bp, Homo sapiens
  chr8:101661575-101662074
  hyper
gctgcaaacacacagacaccccgtccctggtgagccgagggataagtgagcattgccaccggccccctccctgcccaccctgaccccagccctgggcgcaccacgtagcggccccccagcgcgtcggaccgctgctgggacaccgggatacagaaatgcatcttcatggctgagcggtgtcttgggagtagcgctgggaacccgacctgcggcggcgggcggtgcgcggctctgaactcggcagcggtggacgcagcgcggcctgccacgcgactcagagcgaaccccggcgcccgctctcgccggccggggacatctacaggtggggccggggccgggccgcgccgcctcccagtccccgccccatccagccccgccgctctggtcccgggataggtggcgcctggggctggggcgcatccacggccacccccaccccggacatcggccactgttggcattttctccaagaaggcccgtgaggggcttgaaaacagtt

SEQ ID NO: 6505 - DNA, 48 bp, Homo sapiens
  chr8:101822041-101822089
  hyper
gtaatactacgacagcgaggggcccgggaagcccgcggaaacgcagga

SEQ ID NO: 6506 - DNA, 361 bp, Homo sapiens
  chr8:101920198-101920559
  hyper
aggggagaggagacccggagtgagaagctcttatccgcaggcaggtcatcctgacatctctctgcgagtctagctgagtctgggacttctacgggttttgaagggaggaagtgtgtgctgattggtccatgggtggccatcggcggggctggaaaaaacaccaaaagttctcactcccgcggtggactccactgggaaccgacaggccccaggcctcaggtcgtccctgtcttcaaagtggggcttcaccgggaccgcccctttccacccgggaacctatctgcctcctgctgccattgacaggtttgtccaccgcaatgccctggctatccgtgccatgggggacctgcaggcccctttc

SEQ ID NO: 6507 - DNA, 44 bp, Homo sapiens
  chr8:101920618-101920662
  hyper
gctggcatggcagggctgccccgagtgtacgcacacccggccgg

SEQ ID NO: 6508 - DNA, 86 bp, Homo sapiens
  chr8:101962306-101962392
  hyper
aaatgagagaacaggtcgccacattttaaacaaataattaaccactttggatgcaaggtactggctcaatacgtaaactatttaac

SEQ ID NO: 6509 - DNA, 30 bp, Homo sapiens
  chr8:101965644-101965674
  hyper
accggtagggcctccgcccagttgacttca

SEQ ID NO: 6510 - DNA, 31 bp, Homo sapiens
  chr8:102217068-102217099
  hyper
cattctccataaccatcggaaaggaagaggc

SEQ ID NO: 6511 - DNA, 31 bp, Homo sapiens
  chr8:102219053-102219084
  hyper
ctgacaagagcaatggcgattataaccatga

SEQ ID NO: 6512 - DNA, 618 bp, Homo sapiens
  chr8:102504306-102504924
  hyper
attagctcttccgctcgacccacaatccctagtgtttgcaggtgttgcattcccccaacccctttcttctcttcaaccagtagcctccaccttcccatccctgctttggagaaggaggaaaacgcagcttgagatctactcgaagaactgaccctcagctctcacaggctgccgccgagctgcaagcatgccgccgctccactcgggtaaacttcggagtgagttacctgcactcggagaagggccttacctgagcgcgcctctgccaatggcagctcacctgagggagctccccagccaatcatcgcgcagctcgtccctcgggcttgtaccctttagtgaaagaattcagctccttgcgagaaagttacctgtggccgcccaagtccgccactttctgctctgtgtctgcccattgccacgatccaggaggactccgcgccgcccggccgcctccgagctcgggccccatgtgaggggcccccccttatcccacctttccggctaggtgagggcgcgagcgggcgagcgagcgagagtggtgaggggggacggaaaagcagaattacctgtagctcttgttctgccatctcgggcgctctcacacaccttcacctg

SEQ ID NO: 6513 - DNA, 419 bp, Homo sapiens
  chr8:102505566-102505985
  hyper
ggccccgatgggaggcgaggcgctgggaggccggggggcgcgggggcggccggcgccgtcccccactccctcgacatcccgccttcctcccccctcccccgcctccctcccccgggtccgcccccgcattgtttggccaccttcctcaggtgcccggggggaaaggacggttcgcgaactgggggaactcatgtgaggcctcgagttagggcctcggcggggcgcgaaggggcgcctgccactgagcgattcacccgcgcccccgacggcgtctgcacgcccctcgagctcgcggccctccacgcagttggccgccacctcggacgcggcaggcgggactgcgtggggcgcgccgagccttctcggggtgctctcgccgtcaaggccgagggctcggggcggcgggaacgctgggctcg

SEQ ID NO: 6514 - DNA, 52 bp, Homo sapiens
  chr8:102506365-102506417
  hyper
ggagagggccggtgccccaaggccgcgggccgctgggcctgtcatggagaag

SEQ ID NO: 6515 - DNA, 30 bp, Homo sapiens
  chr8:102636867-102636897
  hyper
acacagtaggacagttcacagtaggacagt

SEQ ID NO: 6516 - DNA, 30 bp, Homo sapiens
  chr8:103668038-103668068
  hyper
aaaggtgtgtgaggcgccggccaatgggct

SEQ ID NO: 6517 - DNA, 30 bp, Homo sapiens
  chr8:103822600-103822630
  hyper
ctggcaacctactgcgcaccagaggggaac

SEQ ID NO: 6518 - DNA, 30 bp, Homo sapiens
  chr8:103876454-103876484
  hyper
tggccgggcagccgcgcgagcggggcggaa

SEQ ID NO: 6519 - DNA, 348 bp, Homo sapiens
  chr8:104153062-104153410
  hyper
gggctgagccgccgccagagccgacagccgagcagccgctgggcgctcccgcggcgcaggaggatgggctgcggcgggagccgggcggatgccatcgagccccgctactacgagagctggacccgggagacagaatccacctggctcacctacaccgactcggacgcgccgcccagcgccgccgccccggacagcggccccgaagcgggcggcctgcactcgggtaagtggccgggcccctgcagaccctcgcccgcccgctaccccgggcgccttggcccgggcactgagagaggagccggttccctgaggaattgatggcgcggcgggggtggctgggaggaagca

SEQ ID NO: 6520 - DNA, 2913 bp, Homo sapiens
  chr8:104511020-104513933
  hyper
ccagctctgttcacccggccccgccccgccccctccgggagggctctccgggcggcgcccagccccgagcagagcaaaggacggcggcggccacctccgttctccggccgctggtttctcgtctttcctcgtcctttcattgaacccatctccgtgcttcgaaaatctgactctaacccgatctcttcgcgtctccgcctcttctttctagagtgagcgccaaaaagggcctgacagacagaagcctttggccccagcaccggcccagcccgtctctagacgattcttgctcctttcaccctcacagcctccagtggtcgcttcatcttcgcaccctcccggccaaccctaactctcctcgtctctcctcgcgctgtctcgcgtcctcccctcaggatccttccgcacattctcagcgtccagcgcggtttcccacaacttcctcacgccccgctcccctcgccctgtccccgccctcgacaccacctgcgttccccactcgctccaacctccctcccccgctatccccacttgtgggcctccagctctctgcccctttcctggcccccatccctgacaccccagggacccttcctccctcctcacgttctccctccttccaggatcccgccccgacacttcggggccctcccgctacgcgcactctttctcctcaggtcctgacacctgggcgccccctccctgtcacccaccttcagctccagccctgactctcgggcgccttgccacccttacgctccccgccccgccccggtccctcgggcgcccccactcgccgcctctacctccctacctgctacacctggcacccctgcccccacccctgctcatactcttcccccgcccccgacacctcgggcgccccctcacacgctcctattctccacacttccgtccccgaaaactcgggcgccctctcccttcacgctcagtctctcctccctccccgcccggccccggacccagcctggagatcgcgctcgggaggggcggctgccgcccgcggggcgcccgcggtgcccgggcctgggcagcgaggaggtgacgccgcccccgcgggatgagcccgggaggcggaggggcggaggaggtgctggcggcggcactgagcggcggcggcgcagggcgcgcgggccttccgcgccgactccatcgacccaaggggcggcggcggtggcggcggctgagcgaccctgggccgggcgcgtgatgaggaggggccggcgccagaccccgctgcacgtcggagctcgcctggatccgggcgttggcagccgaagggccctggccccgggactctccgccgctagcccccgtcatatcttctccgctttcgcttctccactctagccgggggtggggtgggtggggttggggtctccgcgggggtttccggccccgcggcccgctcccgggtgtgcctggaggagttctccctctgtggcgcgcgggagccctgtgatgcgtcagccggcgggacggatgagttgcttctccgggaaaccgtcctcgcttcctcacgaccctctcggctcccgcctgggtgcccctcgggccggcagtactccgcctccgggcgctcgaagcgagttccccgggggcttgttcgcaggcaccccttcccctccgaggcggcgcgcgcgctcccggccctgaccgcggccggacacactcgcgccccggtccgcctgtcgccctcccgcctgctccctccagtcaccccacccttagctgtccccgccaccttactccaccaccctcccccgcctctccgcgcactccgcgtcccggcctccagttcccctttcccttgaaccgctcacttcacagcccttcgcccccgggaagaagaaacatttcccgaagcgcactcctcagccctccttccccacgcgctcgccctcccctccccctgcttttcttgggggaggggggctgtcgccttggattgaaggccattgatttgtatgtatttgtcccagcgctggaggctgccccagccgccgcgccggtgccgccgctgccagtggagttgcctccccgcttccctagggtggttcggctccaccaaacatgtcggctcctgtcgggccccggggccgcctggctcccatcccggcggcctctcagccgcctctgcagcccgagatgcctgacctcagccacctcacggaggaggagaggaaaatcatcctggccgtcatggataggcagaagaaagaagaggagaaggagcagtccgtgctcaagtaaggacctggctccatattcccgcctctctccctgccctccgccccctcgcccactgccctgcggccgcctgcgcgccccagttcgccgccctccctcccgctggcggcgcccaggccacgagggctgcggccagcgccggccgcccgggctgttttaggggtgtctgagagcaggggtgtgtgtcggggagggagggcgccaaggccggctgaggtgagggtggcgagccttaggcggtgtgattttccttggcgcctttccggatttcctcgctggtcatcttggctccggggccccagcgggactggggctgaacccaggctctgtgcgtaccctctcctttcccgccgcgctgaggcagtgactggggcacagaatccaatatggccgtgcacaggtgctccctggacggacccgggcgaaggcgcgctggcaggggatgcggacgccaccctggtcccacgcctccgcggggcggctctaccagcaacgcgggacagagcagggctgcccacagtggctgcgagcagcgggcggcggcgcgggctaggggcctaagctctgtcgcggtcgggtgggtgtgcgtccgccgccatcttccagcccctccccctcggcgagtgctaacaccctgcactc

SEQ ID NO: 6521 - DNA, 138 bp, Homo sapiens
  chr8:105235363-105235501
  hyper
accactccctggccttaaccacgcggagggaagaggaaacagcaggagctactcggagcagctgcccgggacctgaggcgcgcgccccggagccaccagcccaccgaggtgcagccgcgccgccacctccccctccgg

SEQ ID NO: 6522 - DNA, 160 bp, Homo sapiens
  chr8:105235643-105235803
  hyper
cgccaccgcctccatctcctcctctggacccctctccaataaattggaggtcccggcggccaggaaagccacgtctcctccgggctgggtcagggaggcaggggccagagcctcagggtcccgtggcaccaacctggcttctggcccactggtcccggaa

SEQ ID NO: 6523 - DNA, 329 bp, Homo sapiens
  chr8:105235863-105236192
  hyper
cgggtcctcgtccaagatgggccggcagggcttggggggtgccagcgctgcggggcgctccatgcagcgctcccagagccggagtagcctgtctgcctccttcgaggcactggccggctactttccctgcatgaactccctggaggaggaagaaggaggtgagacaccccttcccccgtagttggtgtctctatctgtttagaaagtcggtggctggagggttggccggggcagagagaactccacgtagcagtgtcccagcccctctgctctccgggactgtgccgggggcgacagccctagagcacgtcagctgagcagagaagttg

SEQ ID NO: 6524 - DNA, 1342 bp, Homo sapiens
  chr8:105600709-105602051
  hyper
attgtgccaggctacgggtcctggagcaactggccgcgggggccctcgaacccaggtcgggaagtccgcccgccaccccctcgctccgccggggccctcccggccgggccccccagcccctctccaccacccgagggtctggaggtggacgagtggagaaaagcatctccgtgtggggacacccgttccgccacatccaccccctcaccggtctttgtcccgccggtagccagggtctccgcgggagtctccaggggaacccccgtcctggaggcctcggggcccgggtcgcctcagctttgttcggtcagcggggcgcggggacgcggacacttaccgtacaccccagcgaggaaaagcaagagcaacgcagacctccaccgcggagactcttttgtgctccagcgacaggccataaccacagcagatggagagagagaggaggagacggaggaggagggaggagaagctggaggtagacgacgccgacgccgccgccgccgccgccgccgccgccgagccaccggctgctccctgcgctctccgcggctgcgggagggggaagggaggggccgccgccgcccgcgcgcgctccctcctccctcctccctccggctcgcctgctcccaccccgggcggtgcgagagccccacgcggggcggccctcctgggggcaagggcaaggagctcgcgcgccagcgcgagacgagagggtggcggacgccggactccggcctcgcgccgctcgggctagccggcgccgccactcgccagactgagcgcgcgcccatccgtgcgatcggcaatcccctggcccgcctgcctcggttccctccccgcgctccgctggactttccaagtttcgggccgatttccacgcgacgggagcccaaggagcaaggcagcgccaatcgatgacagagcgtgcgaacgccggctgctggatgcccaggggctggagcgcggggtgtgtggaggagcacggtcgctgtccgagggctgggctctggcccagcgggtggggggagggggggtgggataccagctgggaggctgaaggtggttccgtgttgggggaggcgtggatggtctgaagctgacaacttgggagttccttcctctatccggtacccccaagtctccacttgctgtcggcgcggagcttcgagtgggggtgggctcaagttagtgcggccaacctggcagctggtcggtcaaggggcagtgtggactcccacgctcaaggtgcccggaatgagtcgggcaaggcttgtgcagagcccctccagtctggcgtggaagcgccaagaggtcatttgacatctcacgctgggtcgggtgc

SEQ ID NO: 6525 - DNA, 58 bp, Homo sapiens
  chr8:106331015-106331073
  hyper
gaggagcccagcgcccggagcacctggagtccggccggcggcgggccgagcctggcca

SEQ ID NO: 6526 - DNA, 173 bp, Homo sapiens
  chr8:106331083-106331256
  hyper
cggcggcggcggcggcgggagccgagggagcggcagccgcgaccgcgggcaccgcgggagccccagcggcagcagccgccgccgagatgtcccggcgaaagcaaagcaaaccccggcagatcaaacgtaagtttgcgcgcggggccgggagttggtgggattattgcccagga

SEQ ID NO: 6527 - DNA, 530 bp, Homo sapiens
  chr8:106331443-106331973
  hyper
cgctcagccctcgcgctcccgggctgcttttttaattccgacccgcgcacgctgcgagtccccggcgctgtcgtccagccggaggggcagtcccgctcctttagacgcttattattgttgttgtcattgctttgtgcgattgacgtgggactactcttgggaaccacttttagtaaccagggtagaaacttctcagaaaagctgggcggtcgagacctcggggcgagggaggtaacttccccacgcggtggaaaatcagagcgtcagggtcccgatcctgggcggtgccagagccacaccaaacccgaagcgaaacaaaaagtaggtgtaaaagttcgcgcctctgcggcgggcggccgtgcgtctctgccctgcgggcgcgggctggtggctggcaggtcgtgtcctgggacttcgggcgggtccggctcacgccgccaggacgctcagccgagcggggattcgggtggtgtctggccctggtggcgcgcggagtcctccctgggaggggccgccagtcacttcccagc

SEQ ID NO: 6528 - DNA, 112 bp, Homo sapiens
  chr8:106332003-106332115
  hyper
cgcaggggagtgcatggccctgagcccccgggtgcccgggggtcccgatggtgcttagaggacacggcgggtcaagagacaccttccgaaacaggcacgctcgcagagatca

SEQ ID NO: 6529 - DNA, 30 bp, Homo sapiens
  chr8:106490682-106490712
  hyper
gactggacccatacttaaaatgccagagcc

SEQ ID NO: 6530 - DNA, 2038 bp, Homo sapiens
  chr8:107282031-107284069
  hyper
cgacaggcgggaccccgaaatcggggcagctctggcttagtccaggctattcgagtgggcgcctgaactggaggcgccgtctccaccgggatggggatcctagtgcaggcagacgcctggcaggactcggcgagctggggtccccaccgcggtagccagagcagaaacccgaaccccagccagaggggccgcgcgcggggaggggtgcgcgctaagccagcgtggcttccgcaggagctatttttagcggtgcgtgcctccccccgcccccggcgtggtagcctccggctcgcggcgccccacggctcctctcagtctcccccgccgctgccggctcttggtagcttccacgcgggcaggtccggaaactgagcatgtctgcaagcgctcagcggcgccggcagcagcggggctagagctgggctgcgtcaggctgagcccattcacctcgcggccacaggagctcagcgccggcgccgcgccgcccagccccgccgagaggggcgcactcgccgccgcggggcccgccgccgctcaccgcagccccctcctggcgacccgcaagtaagtttgtgaggctgctgggcgttagggcgagggcttggcgcccgggggagtccaggagggatagcgagaggcgcggctggcgcccgggagagccggctggcctctgccccctgtgcctggcgcctctccgagccacttagccaatttgaaagcgggtggccattgggatgctcgagcggggacgacgggcagagcaggagggcagaactagctccagcgggggcccagagggcggacttgggaagaaggaaagaccgcgcggcgagggaggagaccgggcggcgagggaggagaccgggcggggaggctgggtttggggcgcgggagcccggccagggacagccgcagaaggaaagtgggggtgtcgccgggggatagagtgggagcagcgtgagagcagtgttgggggcgcagagtggagggcaagcgtgtcttgaacagaacggcaggaggatgggtggaaagtggggcgcgtggaaagcggatttggacgagagcaaaggacgccggtggaagggacagtgggctccggaggggcgagtggattcggataatttggggaatcagtaaaaggctagggggcacatcatgatggagtcagcctggaatctgtctcccgctagagtacccgaggccacatgttgggaactggctggggaaaggatggatgtagaaagtggcctggagggccgactggaaaatcgctgagggatttgggtgaagagggggggagctgtgcagtatcgggcggaggaactgggctgctggtagggcctgaaaggttcaggagagggttggaggcttccccgtgccgccccttgaatagtgatttagtactgttatctgaggttcactttcacccctggctcctcctccgtctactacccggcttggacgcacctcggctcgctgtaggcgagctttaggagatttaaatagacattaggcagtggggaaggtagtcgtttacggggggagctgctcgggcttccgttcagtggttcccggcacgctcagggtgcagtgtagggtctgaatgtgtgtattgcgggggtagggggagtggtgtcagttctaggccacaggaattcgtggtctggccccagaggtgcggtgtttttggccgggaagtcaggcagaagtctgcagcgtgcaactcgcagcggggcgtgtgtgtgcgtgtgtgcgcgcgcgtgtgcatgtttccggcccggggtcgcgtgtgtggctgcagcctgtctccgtgacaagaagatccagggatctacgggcggcacggggaagggattaaggggaacatacttccctacgtcttttctgcctccttttcccagggtagcattctttgcttatccaatgatgcctctttctaacctctccctctccacttacatcccaaacctgatgcgggtcttctctgattcggcactctaaggaggactcagccgccggctgcgaccaccgtggactc

SEQ ID NO: 6531 - DNA, 1732 bp, Homo sapiens
  chr8:107669365-107671097
  hyper
ccctgaaaggtagatccgcaaactaaatccctcaataacgttgcctaaacaggactgggatcatagaatgtccaacactaacatgagttcataatggcacaacgaacttaaaatgttactattcatgttttaattatgattgcagtcttacgttgaaggtatctccgccgtccttaaacataaaaaaaaaaaaaggaaatacaagctgcaaaagttttatgtaatgcactccaccctcttttttccccaagccaacacacacccttcaaactttttgacagttattttcagacccctcctaggctcccgaactccatgcaactccagcagtctcccctgggccatttttagcctctgctctgacctggcgggaggctgggtgtccaccctttcccctgcagtcctgaaagtccggtccgagcgcggacggggcggggaggggctgggcgggccaggccagctccattggcgccaggcgggtgggggaatgcgctgagaggacccgtccagcttgcttaaaagccatcagttttctgaccccgcatcggttccaggaagaatacacctatgtgacaagctaagttctgcctcattttgcatttagaagccacaagaaaaacttttcgaaaacttttgtccgtcttttgctcccccgacgcgtggtttcctgatggtccgtccccgggcagagagagggacgccccctcctcctccccgcctcttgtgaggcgcgcggagccgcctcccctgggtcaggtctgatgggccggtgggcgcgctagtggtggccgccaccgccgaaaccgtcgacctcctgggccccagttccgcgtccagccccgcggcagcatggactacctgacgacgttcaccgagaagagtgggcgccttctgcggggcacggccaaccgcctgttggggttcgggggcggcggcgaagcccggcaggtgcgcttcgaagattacctgagggagccagcccagggggacctcgggtgcgggtccccgccccaccggcccccggcgccgtccagcccggagggacctggtgagcccacctttctttcgcctcccgcgcggccgacctgggctgagggctgtggggaggcggcggtcgtggcgccgggcgggggtcgctgcccggctctggcaggtgtgcctgggccggggcgggcaacgtggccggggtggcggccgccgggggcgaggaaggaaggactcgttcggctctggggagggaagactttcagctgcgtgccagctcttcctgctctgctcttcctgctttcctcacctagacttgattttctttccccgccaagtatttcaaggggacgatccattctctctttccctcccactgggaggtgaagactgaaccagttatgacgtccgtgttttcagtcttggattcttgaagagcgctgtgcctgctttggttttggtttgggtcagtctttccttaatatttctcagttgttaggattcacttcctaaccgaaaaataaaaagccagatacttctttgtaaaataaaacacttcattaacattggaagctagttgacattttgcgtcgtgtactttttgaacggctgcacgttgtcttgtggtggcagaacctagaaactttctcagttcctgtttattttgtgttgtgttggccgatttttttcaccacagtggctttgtaccattctttaaaacagtcatttgtagcgacatgatattgat

SEQ ID NO: 6532 - DNA, 234 bp, Homo sapiens
  chr8:108509537-108509771
  hyper
aagtttctgggaagagaaatccggttccacgtgtggagcatctctctgcagagcgtttgtgttgtactggtctgtcgtactctcacgacagttgccatcgtgttctggaagaatgaaagtgtaggcacattgcccatgttgaatccggttatatcttctcccactgttttctggacttcggcgctgattgctgcaccctatgtgagtcagaatggcagcgaggaaagcaaagga

SEQ ID NO: 6533 - DNA, 339 bp, Homo sapiens
  chr8:109093848-109094187
  hyper
ttggattagttgcatctccagcggactccgagacagaaatacgcactaaatctgcaggaaagcgagttccccgaaacctttctggaggcttccacccgccttctccgctacgcacaagtgatggagagggagggagcagttaaaaagccgcaagtgaatttcattgagaacagaagcctccaccggtgtggctgcttttgcaaagcaaatggagagagcgaagtggggcctgttttaaaaacaaacctctggaggcgaggactccccagaaaaccagcgcgggaattgctgcttaattcagaaagttcccatctcgtcgcagtttccagaaaaaagaga

SEQ ID NO: 6534 - DNA, 658 bp, Homo sapiens
  chr8:109094778-109095436
  hyper
tactgcgtctccatcggttgccttggcagtggctgtaatccatgcagttcagaatgatgagggcaaaggagaaaaggcgaaactgcatctgggcggtcgggcgggggagagacgcctctcaaagtctaggaactggagggttcgcccaaagagccggcgccggccgcgctgctggggaggactcagagggagactcgccactcacccccgggccgcaccggtcagttcagcgcgatcagcatctctccgccacgaacctgagagacaagaagcgaaaacagggtgtgtgggggatggagagagccccggggaggcagctgcgccttcgcacgtcccaatttaaagaagagagggaaggaggaagcgaacccactgcctagcacgagccgcggagcggcttaatccagagcgggcagctgcggacgagttggagaggaaggtgattataatcagtgaattagcaacctctgccgagccctaagctccgacccagcggcataatgcgttgtgccggcgctccggggaaaggaaagaactctaaaggcactgagagcgcagggctaaaagaacgctcttaggccatttggagtccacggcggtgtacccaagcgccgcagctgcggctgccttggtgtgggttgcctaccgtgcgcacgtc

SEQ ID NO: 6535 - DNA, 468 bp, Homo sapiens
  chr8:109095505-109095973
  hyper
cgtgggctggggaaaagtttgccgagaccggctgggagcgcctggcagctctggaattccagcggccgccgcggggttggcgacgccaggcaggagcgcggagcggcgggtgcagccactgggatgctccgtccccgcccgcgagcgcggtccccaggcaaggggtgcgcccgctcacactctctgcctccctaaccaattgtgtcgcttcctgcgctttctccacggtcacttcacagctaagatttctttctttccgagctgtagaaggcagaacgctctcgggaggacgaagtgatccgaagggatgtggcaagcgcactttccgatggagatgcagaccggctgaggcttgggatgcttctataagtaggtggtgctgtggtccaaggcatctaagtctaggctgcctcggagttcctgggtcctaaagccagaaacgtcccggtttccctgaggtcctaaaga

SEQ ID NO: 6536 - DNA, 402 bp, Homo sapiens
  chr8:109799337-109799739
  hyper
taaagcgaggggacacgcactttccctcgtccatctgtcatcaattaaaagcattaatatttgctttaaactgacacaggcaaggctgatctcggggaggcgacctctggatgcgccctgtgcgagcaaagccgggagagcgagccccaagcacctggcagcggtgcccccagcaggcgccgaggaatccggctatccatttctggtgaactctgcgcccactgaggcattcgaggtacggatgtgtccgcctagtactcggagacgaaggagagagagcggggatatgcgctccagctctgctaggctccagggctctcacccttgcattcaaagcctccaccccatcccactccccgccactcaccttctgcttcggccacccggtgcggctccagcacc

SEQ ID NO: 6537 - DNA, 78 bp, Homo sapiens
  chr8:109799888-109799966
  hyper
cgggagttgtaggccaggggcggtccctgcatccctcctgtctctgtctcctcccacgccttctgggttttacccttc

SEQ ID NO: 6538 - DNA, 30 bp, Homo sapiens
  chr8:110346425-110346455
  hyper
ctcctggtacttaacgcgcgcgcgacggca

SEQ ID NO: 6539 - DNA, 30 bp, Homo sapiens
  chr8:110704065-110704095
  hyper
tgagggagccccggcggaggccaggagggc

SEQ ID NO: 6540 - DNA, 171 bp, Homo sapiens
  chr8:110986092-110986263
  hyper
tgccttcctctctttctctgccgcgcccgcctccccgcccagccgccgcgtgcctccggggtacctgtccctgcagcaggaatcgatgctgagctcatcgatgccccagtactggatctcctgcaggaaggagagcgcgcacagctgctccatgacatgcaggcggccggt

SEQ ID NO: 6541 - DNA, 706 bp, Homo sapiens
  chr8:110986328-110987034
  hyper
cggggttggcatcgtcgcaaagctccagagggctgggcacggcggccagggccccggggcggcggtaggaagccaccaccacggccagcttgccaaggcgcgtgtgcgggaagcaggacagcgcctgctgcgagagcacgaagcggctgccgcccacgttgaccgtgaagcagtccccgagcgccaagggctccccttcaccctcgctgcagaagacactagagtccagggaggtcagggagccgctgtccagcggcgagtccagcagcgctctgccgctggaaggcatctctaacccagtcgccgcggcctgagggcgccacaaagttggggacacgccggaagctttggtcccgcgagggcggtggcacggcccctggtggcggccgggattccccgggctcccgaaggggttacctctccttggcgcaccctctccacccgctgtgcgccttcctcctcctgccgctagggagccgggagtgcgcggaagcagcgcacaagtggcagaaagaggagacagggagcagaggaagggtcgcgctaagagagaggatcaggtgaggtccaagcccgacacagtccctgtgcacactgccggtcgccctggcccttcccaaacgttgtcaccccgcctcccaacttcgcaattgcgattcccagcccaggaggtgtacagattgaatgactcgctacttggtgggtg

SEQ ID NO: 6542 - DNA, 30 bp, Homo sapiens
  chr8:110987602-110987632
  hyper
tgttctgagcacagcggagctctcatttta

SEQ ID NO: 6543 - DNA, 30 bp, Homo sapiens
  chr8:114444485-114444515
  hyper
caagccctgtcagtccggtaaattgggtta

SEQ ID NO: 6544 - DNA, 131 bp, Homo sapiens
  chr8:114444843-114444974
  hyper
tctgggggacggggacgttgcagaggagccacaatccccactcgttgtttccccaatgtgctttccgaactccccgagtgcgtcttagataagttatttgagtgaggacagcgctgcggtccgcctggaga

SEQ ID NO: 6545 - DNA, 436 bp, Homo sapiens
  chr8:114446925-114447361
  hyper
tcaatatctccaaagctaaaccgattatatcagtccaaagtaaattaacgcgcctttcctttctatcggcgcatctcattcggaaaatacggtaggtgcgggcagccggggctctaattgcaggcggcgcggatcagcgttagtcaggctgtaatgctcgccccgcttcggagacttccctccccctcatctgcccccgaatgtgttttggctcaacaggtatcacatgaaaactcgcacttaaaccctggtcatcttctcacaggagccacccttacatttttctgccagggctgctgctggctattcgcgcctcccccacgcgaagcgcgcgtctagcaggcagccccagggccatccattaaccaccaactcccagtggcaggcgaactaagcataaatgtgtggctcctcacccgtcgagccagcgacaaag

SEQ ID NO: 6546 - DNA, 30 bp, Homo sapiens
  chr8:114448996-114449026
  hyper
gcggccacatttagcgcatcttcgcttgcc

SEQ ID NO: 6547 - DNA, 30 bp, Homo sapiens
  chr8:114449228-114449258
  hyper
gggcacaaagtctccgctactctggattct

SEQ ID NO: 6548 - DNA, 514 bp, Homo sapiens
  chr8:114449744-114450258
  hyper
atttacatactcaaataactacgtgtaaacccttcaccgggtttttatgattcgggaaacggatttcatccgtggcctgggcgggggtggggtggggagggaagtcaatgtcgtttcctcaaatagttctccctttcatcctcccaacccccttttcagtttgtgtgtgccgcagttaaactactttatctgtggtagttatctagaacaaacccatttgtcttaattctgaatcggtaccaaatatgtaaataggaggtttctttcaaaacgaaaaatgtatgtatctatacatctggatctgcttcccccatgcaccacgcaagggttaagattgcacaagggaagagttcttgcgccatctactggccgtctccgagccgcccgttcttccttcgcatgtataagggaccctgtttttgccatcccttggtgtcaggggagctgtgtccccgggaccagtatgtcgtgctccttgatttttttcgaccacggtcctggcccaaatctttca

SEQ ID NO: 6549 - DNA, 31 bp, Homo sapiens
  chr8:115172751-115172782
  hyper
actttcaggattatgacgtctgacatggaag

SEQ ID NO: 6550 - DNA, 275 bp, Homo sapiens
  chr8:116660296-116660571
  hyper
agaggaaatcagagcgtcaaatcaaggaggggtggcagcaaagaggaagcaaaagagaagacaagaggaaagagagtttatggagagaggaagccaatttgggaagtggggagaagggcaggctggccaggggatgcgacgcgacagggcagagggagtgggaagaagcgggcaggaggcggcctccacgcagctggcagggcaggcagcgctggagagggaggaggagagggaggctgcaggcaccgcgcagcagccgaggatgagagaggtaa

SEQ ID NO: 6551 - DNA, 152 bp, Homo sapiens
  chr8:116660615-116660767
  hyper
cgataacacgcccacagcccgggcgccgagcacgcgtggtggcggccgcaggcccggggctcctgcgagagcgaacgccagcgacacacacgcagctcctgttgtgtcgccgctgccgcctaggcagggccgcagacagcagcctccttccc

SEQ ID NO: 6552 - DNA, 30 bp, Homo sapiens
  chr8:116681233-116681263
  hyper
caaaggagccttcgcggaggaaagcgccac

SEQ ID NO: 6553 - DNA, 30 bp, Homo sapiens
  chr8:116681729-116681759
  hyper
aggatgtgtgtgtgcgtgtgcgccccctcc

SEQ ID NO: 6554 - DNA, 1759 bp, Homo sapiens
  chr8:117858171-117859930
  hyper
gtacagcttataacacaacttttattagaaaagttatacataacatagcatcaactattttcaagaacaatattaaacccgataagcaacaaaaaccagactaacaaaatgtgtaacaagaaactaatgacctttctaaaatcaaacattcaattatctacaatgtctttttacaaacggggaaaactccttggtttacaggcacatcatattgaatgtaaagctgcaatagcaattttatacaattaccactctgaagaaactgaatcattaaaacagtaattacgagttcacaaatttaaaacatttcacataattttaaattattgggtatacactgaagtctgagtttcaaaagtgatttttttttcccacaaaagtttcaacacttaagctagaactttcagtgttaactttgccctaaaaagttaagacattctgataatcataacagtcacatgatttctgatgctatctggtctgttaataataaagtctttatttggatgtatttttcttcaattaaattacaggaaactggatataggatttcgttgcaacgctattaaagttccaaaccaggagtgtgcagcactggaaaaggagatcagtactaaaacttacaataaatatcagagaagccgttagtttttacagcatcgtctgcttaaaagctaagttgaccaggtgcataatttcccatcagtctgtccttgtagtaggcagggcaatttctgttttcatgatcggaatactcaaatatatccaaacatctttttaaaactttgatttatagctcctagaaagttatgttttttaatagtcactctactctaatcaggcctagctttgctcattttggagcctcactaaaataacagatttcagtatagccaagttcatcagaaagactcaaatggaatgatttacaaaatagaacactttaaaccaggtcagtcctatctttttgtagctgaaggctatcagtcataacacaatttcgcgtacacctctgctcattatggaattacacttaaaacgaatctcaagagggtgaccattgttgtttcagataccatccctaaggagagtggttaacaggaagattgccagtgttactgatggaaagaagtgtttgtttgtttttttttcttgtcaaagacttacaccatagttttaaattaaactgtcaggcattttctcagacaggttttccttttcaatgcagtaatgaagaactaagataaaaatcatgacttttgactgccactcaacattattacatgcaccaatattgcacacatctgttctgaactgttaaaatcatcttctgagtccttggggtgctgttttctccatcagaacacaaacacaacccatctaatcagtttccctcaaagatgaaattgacaaatttaatgtactggaaaaaaatgaagaaggaaaaaggcaaagactttgtacagacaaaaatctaagttttctcaaagggttctgtgtcccctacacatgggggcaatttgtaagcactagtgaatcaaacactagctataatgcttctagctccttatataatatggaaccttggtccaggtgttgcgatgatgtcactgtacggttcttcctgtgtcagctcaatagcttgctgctttttaagaaccaagaagctgtagaactttgcggcagcttgttttctgttcgtatttcgacataactcaagcaaactgatagattcagctccagttttagcaagagcacg

SEQ ID NO: 6555 - DNA, 85 bp, Homo sapiens
  chr8:117861183-117861268
  hyper
cctgaagaccatgaagcatctgctgagtccttttgttccatcttctttcttcctgatcttgatcgccccctgatgcatcttcatc

SEQ ID NO: 6556 - DNA, 162 bp, Homo sapiens
  chr8:117862855-117863017
  hyper
cctcttcctcttcatcatcttctttttccttctctttctccttctctttttctggcagaagttctaactctggtattagctgacagatatttggaggttcttctgggggaagctctacaggtggtatttccatctgctctacctgctgaggcttaaagcaat

SEQ ID NO: 6557 - DNA, 150 bp, Homo sapiens
  chr8:117864185-117864335
  hyper
caggcatcacaggctctgggtcaatttgtccagcttttcgcttaactccctgaggtggtggtggaggcatagctgactcatctatgtttgttctgctggcctccatcactgactcctggaggcggcttggctcttcaataatgggctcat

SEQ ID NO: 6558 - DNA, 175 bp, Homo sapiens
  chr8:117864772-117864947
  hyper
tccaacagaacaaaccgataacatcacgctgctgatgctgctgttgctggtcctctctaggaacctctggattttcaaattctttgaggaattcatccaaattatctgcctctcctcctttcctcctttttctaaggtcttctggtacaagcggtgtaagacagcgtgtaaagag

SEQ ID NO: 6559 - DNA, 225 bp, Homo sapiens
  chr8:117866482-117866707
  hyper
ccttcagtagtctgttattccacaaaggctgagcaggtaaagaaaacagtttttctactcctcctgtctctttccacatcatcaatttcttggtgggcggtgccagatccaaagtagtaacaatatctgaataatcactaagttgggctctaattgtcttgctatccaactctttgacactgtcaacaattagcttcctcttcctcttggcttttgtttctttaa

SEQ ID NO: 6560 - DNA, 124 bp, Homo sapiens
  chr8:117868403-117868527
  hyper
ccagttatatcaataggctccaatgcaaatgcttcttcctcatttggaacaagtgttgtttgatcagtcatggttggcattggttcaacgggatccactgaatcaggactatcaggcccaccca

SEQ ID NO: 6561 - DNA, 134 bp, Homo sapiens
  chr8:117868876-117869010
  hyper
atgcttacttgatacattatcatcctcatccatatcgtcatgtgcaggctgctctggcaacatcacccctgcctcagagagggcagggggatcatcaaagataccgccatcattattactaataagtttgtcat

SEQ ID NO: 6562 - DNA, 222 bp, Homo sapiens
  chr8:117869490-117869712
  hyper
atcattcccacatacctaatattccaccatcatttccttctccaaaattatcatccttatattgatcttcatattctaaatggttaattttctcattcagattgctggtgctctgttcagactctaataggaggttagaagtagtagtgcttactaacatgtcgtcatcctcaaaagcactgccttctctcattatctcacgatcatccattccaaaatcac

SEQ ID NO: 6563 - DNA, 108 bp, Homo sapiens
  chr8:117870589-117870697
  hyper
ccaaaatcattttcttgtaaaatactgatgttcccaacttcttctctcatggttatctcttccactctactctgattcaagctgaactgctgggccacatcgatgtca

SEQ ID NO: 6564 - DNA, 113 bp, Homo sapiens
  chr8:117874066-117874179
  hyper
agaagacacatactctaagtcaggcagtggctgatcaaagtcatgaaattcttcaggtaaagtaatggcattataagctgcttcccgattttcctcaggcaggtcaaccacac

SEQ ID NO: 6565 - DNA, 131 bp, Homo sapiens
  chr8:117875367-117875498
  hyper
cctggccgaaaagccatctttatcttaatgaatgcttcattacagtctgcaagaaggtatttggctttcctgtgatagattcgaactactcccagtaagagatgtcctgatgtccgtaatgccattttcac

SEQ ID NO: 6566 - DNA, 177 bp, Homo sapiens
  chr8:117878823-117879000
  hyper
cctttggtgagatgatactctccacgctgctctctaaattacactcgaacacatgggctttggttagcttcttatcccaatgggccgctagccaaattttggccagaggccctcttttactgagaacaaaatgtgcgtagaacattgttctggctggctatgaaaacagaagaaaac

SEQ ID NO: 6567 - DNA, 114 bp, Homo sapiens
  chr8:117886848-117886962
  hyper
ccttgctctccgctgggagttgggcgggctgggtggcccggggaggggaaaagggtcgggggagggggtggggaaaggggggagcccttgcgaggtgtagcttccgagcagctc

SEQ ID NO: 6568 - DNA, 39 bp, Homo sapiens
  chr8:117887066-117887105
  hyper
cggcaggatgtttacggtcaaaatggtacctgtgcgcct

SEQ ID NO: 6569 - DNA, 522 bp, Homo sapiens
  chr8:117950457-117950979
  hyper
agagcagtgaccaggcgtctccgcgatgggccccggggacttccgccgctgcagagagagaatttcccaggggctccagggactcccaggtagagcggagctttggttcccacctcgtcccgcgtgcgacttcttcggggacggcaggagcacggacatccaggaggaggccctcgccgccagcccgctgctggaggacctcagacgacggctgacgcgcgccttccagtgggcggtgcagcgcgcgatctcgaggcgcgtgcaggaggcggcggcggcggcggcggcgcgggaggagcagagctggacgggcgttgaggccaccctggccaggctgcgggcggagctggtgagagagcgggctaggcggacggctcccagggctccctctcccgggtcctctcctccagctgcagagccgctggccgcgtagcccacccgacgccttggggggcccctcaggtctggacacggcgttgacgcccccgcctccccagcatcgttgggaaggaaaagggccct

SEQ ID NO: 6570 - DNA, 208 bp, Homo sapiens
  chr8:119123497-119123705
  hyper
tgggttgcacaatgcacgggagagagcggggctgaatatctcgcacccagggcgggcgagcagcggactgtaattttcttgcatgcaacaagacggaggaaaagaaagagagaggggagaaaaaaaaagctcccgatacccaatcaatggcaagacgaagtgattgccttgcctctcggattcctctcggcagcgtggaaaatgagcc

SEQ ID NO: 6571 - DNA, 30 bp, Homo sapiens
  chr8:119634587-119634617
  hyper
gtgatgagctcctgcgagctcgtccgtggg

SEQ ID NO: 6572 - DNA, 253 bp, Homo sapiens
  chr8:120220352-120220605
  hyper
tagaaggtaaaaatagcgatcaggggtatgggggtgcgcatggagacgcccgcggagcgctggcgctggccagcggagcaggaggtgaggtcggcggagctgggaggaccgcgcctggcggctgcaatagccgcacctgtgcacgtgatcgcgagcggctcgggcgccagggcggagcggcgctcacctgggcccacgtgacggggcggggctcgaggagccccacggccacgcctcctcccgcgcggcgcgc

SEQ ID NO: 6573 - DNA, 239 bp, Homo sapiens
  chr8:120220895-120221134
  hyper
ggcatccttgtcccccgggctgtcttcctctgcgtccgcccccggcctccttcccttcgacgtggctttgtcctgcgctccctcccggggtcctctcggtgccccgcgccgccgcccgggccctccctcctagcacctgttacgcgggcacctgctcccccgcgggcgacggaaattgcctggggagggcgagtaggcggcccggcagggccgaacattggggacgtggaggaaagaaa

SEQ ID NO: 6574 - DNA, 30 bp, Homo sapiens
  chr8:120651383-120651413
  hyper
aaatgcatttcatccgataaaaatgaaaac

SEQ ID NO: 6575 - DNA, 1097 bp, Homo sapiens
  chr8:121136826-121137923
  hyper
gcatcgctgctttggcgttttagagcccttggacttgttcacaagaggaagagggagaagaggaggctcgaagggggcctttatagtggatacctgtttcactcggagctcagggtctttgacgcgggaaggcaaagtctgtcttttggaaatggggaagtgggcacacagcacctgagaacaggagggctcgagacctcccaaagagagcagggggcctggtttgggagcttgcagtagcttctgccccagtggaagggaaagagcctggctcgctctcggcgcgccacatccggctgccgcgcgcacctggggggaccgccaggttcggggtaggcgagcgcgtgagcggcacggggctggcttctccacatctccggtagggcggggatgggggagaggaggaggagagaaagtgggggcgttatgggcttaggcctgcctcccacctccccacctcccgcctccgcggccaccctccgctctataattggctgccggcgggccttcctttcctcttatctgatcctgggctcccagctggagaggcggaggcagctccagggggctggaagtggaagcgcagcggcagaaggagagggagagagaaagagagagaggctaattaaaaaaggatactccgagggaagagagcaagggcggtgcgccgccaaggaccaactagcggcggagcttcgatcttgcctaggcgcggagagctcccaacctgggctggaaccttgcccagcacaggtcagttcgtctttctctgctcttctttggctcggcttcgaagtccattcatgagcaaggaaaagtggaggcagcgagccacctgcagacgcaatgcagttccatggactttcttttcacgcgcgcgcccagaatggactggggacctttgggacgggatgggacgggtacacctggatgccttttcgcggggttcacggtgtagggagattagaggcattgggtgatgagagcgcagggatagtggaaataccatgtgctgctccgggaagcttttcccagtgtttgagtgacgtgagcgtgtggcgggaagaagctgcgtttggctgcgggacagtggcggc

SEQ ID NO: 6576 - DNA, 30 bp, Homo sapiens
  chr8:121706824-121706854
  hyper
ctctttctctctctctatatatatagatgt

SEQ ID NO: 6577 - DNA, 31 bp, Homo sapiens
  chr8:121823345-121823376
  hyper
atgctgccaccccctgcgccacccttccccc

SEQ ID NO: 6578 - DNA, 31 bp, Homo sapiens
  chr8:121824597-121824628
  hyper
cttctctccagcccaccgcagccccctttct

SEQ ID NO: 6579 - DNA, 35 bp, Homo sapiens
  chr8:122651555-122651590
  hyper
gtgggttggagcagcgtcgcgtttctgggcaattg

SEQ ID NO: 6580 - DNA, 30 bp, Homo sapiens
  chr8:122652373-122652403
  hyper
ggtgccaccgcctgcgtcagggacccctgg

SEQ ID NO: 6581 - DNA, 30 bp, Homo sapiens
  chr8:124085345-124085375
  hyper
cttttgctgtgtaccgggactctcctgctt

SEQ ID NO: 6582 - DNA, 30 bp, Homo sapiens
  chr8:124173216-124173246
  hyper
gccctgctggagtccggaacgagggtggtc

SEQ ID NO: 6583 - DNA, 30 bp, Homo sapiens
  chr8:124408728-124408758
  hyper
cagaatccctccgccgtctgtcccgcccac

SEQ ID NO: 6584 - DNA, 76 bp, Homo sapiens
  chr8:126010221-126010297
  hyper
tgtctgattcctctttcggactccggggactgacatatcataagcgctcaataaatgctagcggaatgaatggaaa

SEQ ID NO: 6585 - DNA, 98 bp, Homo sapiens
  chr8:126011071-126011169
  hyper
ggctgtacagtgtctccgtccgcggaaaaagaagcctctgaacccgcgccggcccgcagcccccgtgccttccggccgctgctcgccgtcgccagagg

SEQ ID NO: 6586 - DNA, 45 bp, Homo sapiens
  chr8:127569471-127569516
  hyper
ctggcccctgaggcggcggctgcggctccacgtcctcatcgtcat

SEQ ID NO: 6587 - DNA, 31 bp, Homo sapiens
  chr8:127570026-127570057
  hyper
ggaaagagaaactttacgccaatcccccccc

SEQ ID NO: 6588 - DNA, 737 bp, Homo sapiens
  chr8:127570150-127570887
  hyper
aggatctcagagcgcgacctggacaggtgagtcaccctacctggctcacctgcagcgctacctcctcccggctcgcccgcccttcccccgcgcccgccctcaggctcgggttacctgcacaaactcacccgcggagaggtgaaggccgtggggcctggggaagggctccctgccgcgccccgagacttctagggcgagtttgaaggtgtaggctcggcagtccctcctctcccggcgcgggcggcagcgaggctgggcagagggcagcgcagcgggcagactaggggcatgtctttcccccgcggctgcgtagcgccccgatacttgaaggcggggggcaatccctgttcacaccgcgcttcctcccgccagctggggctgctgcccctcctcagccagctctcgggggaggtggggcgcgaggaggagaggacggcagcctcgcagcctggcggcaacagctcccgcttgggccgggcgagcaacaagcaccggagctggagggacgggattgtagatccggctccgggctcccgggcgggagcgcagcccgtggcatttaaagagacaggcgctcactccccgagctcgggtctttttcacattgcgccgagcggccgggagccccgcccccgccccgcccactcgggcctcgggactccgcccggccacgcccccgcgccggagcgggtttaaatccccctgtaaataatccacccgccgcctggggctggtgc

SEQ ID NO: 6589 - DNA, 30 bp, Homo sapiens
  chr8:130647087-130647117
  hyper
tattactaattgcccattggtctcagagtg

SEQ ID NO: 6590 - DNA, 31 bp, Homo sapiens
  chr8:131081757-131081788
  hyper
caggcatgagccactgcgcttaccaaaacaa

SEQ ID NO: 6591 - DNA, 30 bp, Homo sapiens
  chr8:131455261-131455291
  hyper
taggggccgggggccgcggggaactttcct

SEQ ID NO: 6592 - DNA, 309 bp, Homo sapiens
  chr8:132051990-132052299
  hyper
agagagtgagtttggtcagcacgtccagcacgttcatcaccacttccgatttgcgcctttggcccaagaaatagcgctggtagaggcgttccaaatcccgagatttgaaggagttgcgcagggtggggaaaatgacccctcggtagctatagcccccattaagaaagaaatccgagttgctaggggcacagtcaaggtgcaggaagcccaggtcgcccccgcctccgctgccgctggcactgccgctcccgctgcgttccgggaagactttggtgccgcaggtgctgtgcgctcgctctcccgggccca

SEQ ID NO: 6593 - DNA, 117 bp, Homo sapiens
  chr8:132052398-132052515
  hyper
cgctgccgctgcctccccggtgcccgtgaatgaagcgctgctccgtgatgtgtcgcaccgccgtctgccacagcagccgctgcggccgggaggcgctcctgccgtcgccggccgggg

SEQ ID NO: 6594 - DNA, 1994 bp, Homo sapiens
  chr8:132052589-132054583
  hyper
cgcagggaaggaggcccagaaccttggggaggcagccggaggaggggttcctaaagactcaaaggcggcctggtaggagcttggcaaggatcctttttatcctaggctgccccgttgcaggagccctgcgctagggctccctgtaggtcgggtcatactgtgcccaggggcaaagggcacctggaagatcgcggcggacctcggcgtccttgcgtgctgctctcccgccagccggcgcagcttgggtacgcagcggcagtggctatttgtcctcaggagccgcagcgctgtgagccacgcagccccttcctgggctcaggctccttggttgattctaggctcagcgttttggcgcagcctttgctctccaagagacgcctaagcgcctgggcgccgtgcttctgctgcgcgtcgggcgggtcctggctgctgcactgggctttggacgcccactgctccgcggctgcagggggcctggccggcggtgaccggcggcagcgatgggtgcgaagttagcagatgtggctggaatcatcgcccttcggagaactccattgcgccgggatggggagcaggggcggagctgggggcgggggcaaagaaggaggaggagggggtcacggtgaggtggcggggcgccccgcgacagggttggagaggtggtagcctcggcgctaacaattcaccaaatagttaatttggaggaaggggtatgctgaggctccctcctaggctctttcctagttcgggagcaaggactgacagcgcagcgctggctctggccagaagcatccctcccggagggggtgtggggactctcgctccagggtcccagcctgagctataagacgaggtcaacgctttcagctgtgctttcgaagggtcgcagcacacagttctcatcccctttatttcgttctttggagtccatttggctcggagctaggaggatcaggagaggcgggggaaggaaaaagtggtgagggctccaaagccaagagctccgagaacgaagagaagccgccggtgcggatatctgaggctgagaaccgaagcttggcggatgaggcgaaggtttggaggagaagggaggcccgaggccgcgtggaagtcgacagagacgcctctggatctagggaagcgccgccgcgtgccaccctggagctctgaaacgcaccgcgggcgccaggcgactgggagaaatttggagacctgtcagagtggtcagacacccgcggtgacttaaacccgcccccgcgccaagccacgcccccggaaccgggccgggggtggcggagggacctgccatccagatctggccaggacgccccaggtcttgtaggcagaggcacgcgcgggccggcgtgggagaggaccactgagggctagggccggcgggcgcccccggccttccctgggcgcactgcgatccagcgttccagctggccgcgccagccggttcctccgctgttcttttttaggcattggctcttgtcctctgcaggtgcggagccaggactcgtaggccgctttgcgcacggactcggagagcccagcgcgacggaatacagggtttccttttcgcccttcctacccgtgcgtcttttggcaaagccaactttcgggctaaacgcaaaatcccccaagaggccgcaatcatagaggcagtcagtttcctacaggagcctctttactacctcgatccgaagggggtggagggtacgggacatcaaaatggggacgtcccctgcctgcctcgcacactaagtttctccgcttacaatagggtcgaggaggcggacgtggagaaaggcatgtccaggggccccgcctcgccctagcccaggtttcccgcccgcccagactcagccgagcgctagcggacaaagcctgcggcggagcttgcggcggaccaagtcgctgagcggtgggagcttagtgccggtgctaatgacagatgagccgcgtcccggggtgcagggtctgcagggcaa

SEQ ID NO: 6595 - DNA, 212 bp, Homo sapiens
  chr8:132054593-132054805
  hyper
cgcagtcccgcagccggatgcaggtggaggagcggtggtggtcaccacctcctccaccaagactgcggctgcagccagtggagcccgggcccagagcacagtcagctgatggccaatgacgtcaggccctgggcgcgttcgcggctccccgtggcgtcccatgaaagcccaaatgaccgccttgccttgccgccccctcagtccctcctgag

SEQ ID NO: 6596 - DNA, 122 bp, Homo sapiens
  chr8:132917186-132917308
  hyper
tctggagcttgggccccggagtctgcatgtctaataagcgtccctggggttaccaaggcaccccaaagtttaaaagtcactcggtgttggaggatttttagacagacgcgatactacaagta

SEQ ID NO: 6597 - DNA, 10 bp, Homo sapiens
  chr8:133492100-133492110
  hyper
aaatgtgcac

SEQ ID NO: 6598 - DNA, 503 bp, Homo sapiens
  chr8:133492127-133492630
  hyper
cgcccaaatcagcaggggaaccacgcttcgttttttaagcccctagtgtggaacacccggagagcggcaacacacacacacacacacacacacacacacacacacacacacacccagggaaacgcgtgctgaggacgggctggtctccccttcagcgggaaagcatccatgggtcttaaagccccagagacttctcagctccagccccgaccccaagtccccaagcgcgccgccgccgagggcgccccgagcggccgggtactcacaccaacgcgtggtaaagcagcgcccagccccgcggtctctccagggcgtcgtagatcaaagtttggatgcgccggtacttggcgttgtttctcttgactgggcggctcagcggggtcttggccaggagcccgatgccctgcggggtcctccgctgcccctcgtcgcggccgccgccctccagcagcagggtcccgtctttgtcggctccggccccgagcgccaaggtgacttgctcc

SEQ ID NO: 6599 - DNA, 426 bp, Homo sapiens
  chr8:133492712-133493138
  hyper
cgcctccgccgcccccgtcgccgccgccgccagccgcccccgccgccctgcgcgccttgagccccatctgcctcgcccccgccggccgcttcgccttctccgctgctgctctgggaagaaggggcgctcggggtgcgtgaacgaggcggcggcggcggctgcaagcccgggaactccaatgccatgatccgcgcgcccctccccacccccccccaaaagcaggcaaaggcgggccccctggggggcaggggaggccaggcagggggtcagggggtcacatcccgcgcgggtcagccgcaggaccccgagggtcgcgggccgggggctgcggagaagctgggagggcgcgcgaggctggcgcggaggcgctagggcgcgcggcggcgggagcctggaaccggcgctccggggcggcggcggcggcgg

SEQ ID NO: 6600 - DNA, 37 bp, Homo sapiens
  chr8:133687474-133687511
  hyper
cttcctccccttcccacggccccgcccattttacaga

SEQ ID NO: 6601 - DNA, 30 bp, Homo sapiens
  chr8:134232949-134232979
  hyper
gagtgcgccccccgcgtctctggtgccccc

SEQ ID NO: 6602 - DNA, 396 bp, Homo sapiens
  chr8:134308719-134309115
  hyper
tccccccacacacacgcttacactcacacatgcacaccgccctgtgtgtgctacgggactgaagcgccaccagcctctcggatccacacccgttcccgacccagtctgcaagccagacacacccacgcccccctctccagcctccttgccagcgccactcacctctaccaacccctcatctacacactcgcgcgcaatctctccgttcccagacacagacacacacacacacacacacacacacacacacacacactcacctagtcccttctgcacccacgtccagcgcgcacccctgccagcggcgccagctgggattcggagacgacgccaggaaacgctatcctggtattttttcggaccgtctcatcgcccccttcccgacctccagaaccc

SEQ ID NO: 6603 - DNA, 30 bp, Homo sapiens
  chr8:134465705-134465735
  hyper
ctggcctggaaaagcgggcggcggggccga

SEQ ID NO: 6604 - DNA, 31 bp, Homo sapiens
  chr8:134581318-134581349
  hyper
ccatcacttctagcaacgcttcctgtttttc

SEQ ID NO: 6605 - DNA, 30 bp, Homo sapiens
  chr8:135697752-135697782
  hyper
acagcaattcatttcggggagcaacagctg

SEQ ID NO: 6606 - DNA, 31 bp, Homo sapiens
  chr8:135703767-135703798
  hyper
tgcaaggtgaggaggacgggtaagcaagcac

SEQ ID NO: 6607 - DNA, 30 bp, Homo sapiens
  chr8:135843827-135843857
  hyper
aaggcgcctcgtcccgagggcagagtttct

SEQ ID NO: 6608 - DNA, 30 bp, Homo sapiens
  chr8:136469758-136469788
  hyper
gctggcgggactggcggggatcgccgtgga

SEQ ID NO: 6609 - DNA, 30 bp, Homo sapiens
  chr8:139301362-139301392
  hyper
tggccacaggtccagtttctctgtagatgg

SEQ ID NO: 6610 - DNA, 530 bp, Homo sapiens
  chr8:140714564-140715094
  hyper
taagtgtaaggctcagagccccgcgcagcccagcccgcgccggggcggtgggtgggtgggtgtctgctatgggattattcttagcgctccactctcttcgcaaaagtggcgcctccgccctcccggctcaggcacactcgctcggggctcgcacgcccggcccagacaccagcgcggtggagagcaccgggtggggtccccgaagggtgaggctcggaggcgccgcggagggggggctccctagagaggagggggcgctgcgggaaggcccccaagggaggctgcgtttaaccctcgacgccctgcacccagcccggcgcggcgcgctcagccgcctccccggactcctcccggggcgcgggagcccagcggcgcgcccagcccttacctatggtggtgatgaccgtgatcgcaaagtagaaggagccggcgaatttccactggacgccggcgcggtgcggttccgactgcaggatcaccagctccagctgccggtagtcctcgctgctgatgttgtacttccccttgat

SEQ ID NO: 6611 - DNA, 368 bp, Homo sapiens
  chr8:140715219-140715587
  hyper
cgttctgcctcttcatggccgccagcaaggagccggcgcggggggcatgtcccgcaggctcacagccgcgcgcgtcccactgcagcgcccggcggccgccgccgcctcctcctccgccgccgccgccgccgcctccaagttgtaagcggcggcggcagcagcagcagcagcagcggggaggcggggggcggggaggctggggggggccccctccgctggggccgccacagccaccgccaccgcgaggcggctggcggggcaggggcggcgcgggcccgggctcagccgagaaggcggacaggcacaggaggctgctcgagcgccggggccaggcgtccgggaaccccgacaccctgcgccagacccgg

SEQ ID NO: 6612 - DNA, 322 bp, Homo sapiens
  chr8:140715699-140716021
  hyper
cgggaaccggagccagaaagcggccggagggcggccgcggggcccggtacccctgtgggtccagctcgcgggtggcggtgcccagcaaggagcctgcaggtccgcgcgcccagcggaacctgcttccccttttacccctcctcgccccctctcggtggtggggaggaaaagtttgcgaagtggcggtgtctctggagtcccctgcaagcggggagggggccgagcaggtgcagcgggaggggcagcccgctccccaaaggtccgcgcgcccagcgcccacccgggcgcgcgggtgcgcagcggggtccccgccgggcgtcgg

SEQ ID NO: 6613 - DNA, 349 bp, Homo sapiens
  chr8:140716339-140716688
  hyper
cgaatgtgtgtgtgcgcgtgtgtatgtgcgtgtgtgtgtgtgtgtgtgtgtgcgcttggcagccccgctccggcgggagggcctcggggagcgggggccgggctacgccgaggccgggcctccctccctccctccctcccgcagcctccagggcgcgccacctcccgcctggtccccagccagctggcgaggctgctgtggcagctcccgctgcagacccagcgcggcgcagggcgcacgcggagggagcccgggaggggcggcctgagccgccagggagggggcgggggcggagccgccggcgggttttggcgggggatgggaggataaacgcggcttcttgggtcct

SEQ ID NO: 6614 - DNA, 94 bp, Homo sapiens
  chr8:140717082-140717176
  hyper
tggagtcaggacagcggggaaagacatcgcaatcccccgacccagtaacctctctgttgctttactgaaggaaaaaaaaaaaatacacacacac

SEQ ID NO: 6615 - DNA, 152 bp, Homo sapiens
  chr8:140717235-140717387
  hyper
taatcactctttgatatatataatcactctttggttccccacagctgggcgcaaggtgcgccgtggatgcagccctgagccacgcgatagccccctcgagaccacctggggtaggaacacgaggctcgggctggggcgcacctattccctgc

SEQ ID NO: 6616 - DNA, 82 bp, Homo sapiens
  chr8:141644413-141644495
  hyper
ccccacaatttggggccggtctgcagcaacgagggcagcatcgggaatgcgagcctcctcgcccggccgggtaaacataagc

SEQ ID NO: 6617 - DNA, 11 bp, Homo sapiens
  chr8:141646330-141646341
  hyper
cggccccagaa

SEQ ID NO: 6618 - DNA, 31 bp, Homo sapiens
  chr8:142010383-142010414
  hyper
agggctccagggctcccgccaagaagcccac

SEQ ID NO: 6619 - DNA, 80 bp, Homo sapiens
  chr8:142010731-142010811
  hyper
cccctcggcctctccgcgcgcccggccttttcgaaagccgccccccccttcctcctcacgtctcccggactccccacgtc

SEQ ID NO: 6620 - DNA, 972 bp, Homo sapiens
  chr8:142011161-142012133
  hyper
ctgcacagaaggagcccgcccagcccccgacccgcgccccgcgcccggcgccccgcactcactcggaccgcggctcggcgccgtgaagcgaaggcagacgacgacggggcggcgctgggcgacagcagccgcgcttcctcccacgcctcacgccgcgggctcacagtggtccgggaccggcggcggcggcggcggcgcgggctcgcgccctcgaggccgtgctgcgtcggcgcgggcccgcgcgcgtgcgcggcagccggctgaggcgcgcgtcctctctcggcagcgcacgcccgacccggtctcagtccggagttcccgcctctcggggggactgggcatgcgcgccgcccccgcgcatgcccagcgcgccgctaggctctgctcgcgtaatttgtcctgtagtgaccgcgccggggtttcggggtggcccgaggctgcgcgcgggcgtggcggccggacgaggaaagccctggtctcgggggtggccggggtcgccccgccgagcggacatcctggggtcccacctgcctcgctctccgccagcgggattagacggacttcgggaaagtcctccccatctccttccctgcccccaaatcccgaaggggtcccctctggagaacctccctcctgagcggccctgcggccccgcccccagagttggacgcccgctgtcgggcacccgctgcgggccccgggccttgcagtgcactctccaggcaccacaccgaccctaacgagcggttcctgggccctttttgcagacaaggaaactgaggctcagagattcttttcatggcattatagctaagttgggctgggccattatttgattttggaagatgaaaaatcatgaaagggacttagaagtccactggaggtagacaggttacctaaatgaacgccagcagggaacgagccctgcaatccctcccgagggctacagacctgagacgggctccaggaaaa

SEQ ID NO: 6621 - DNA, 794 bp, Homo sapiens
  chr8:142138199-142138993
  hyper
tcctggaggcggcagcgggcggcgcgtccggcctttgtccccccacgctctccagggtaggtccagggactgccagatcaggggaccctttgcgtcctggagccttgggggctggatgacgtcgccgggcacctgaggaccccgcccattcctccctcggttccccagggagcgggcggccggcggggctgggcggggccgaaggaaggggccgcttgctccgacgccgcgcacgcgccagggcccgcaggcgggttaggaaatgacgaccgcgcgcgggtctccagcagcacccgccctaggaccggccccgcccccaagtcccggtccctagggccgggcacgccactccaggccccgcccagaacctccccgcccagtcaagccccgcccccaaactctgtctccccgcggtatcctctggggctctccaggccccgcctcggctcgggccccgcccctccaggccccgcctccagccccgccccgcagacggcgctcgcagcgcccccggcccccaggcggcgcggctggtccccaggggtctgcgggcgactgcgcggctgaggcgcccgagtgcggtactggcggcgggcggcgggcagccatggcggaggccgcgtcgccgcacttgtcgctgccctcggggctgctggagctctgcgcgctgctgggcgccccccgggacagtctccgaagtctcgagcaggtgaggggcggggaaactgaggcggacgtgggccacgagtcggcagccgggacagcagtcggagagcgggcgcccgggtgccctg

SEQ ID NO: 6622 - DNA, 215 bp, Homo sapiens
  chr8:142139639-142139854
  hyper
tcttaattctgtaacgctggctttccctggaatccatctgtgtctctggtttcctcctggtccgcctgtctgtgacaccgtgactgggtcatgttacctagagatcccggcgtcactggccagccgtctgcacaggtccgttcatctctttgcagacaacagcatagaaaggcagagaggcttctgagtatttaaatgacgctgggctatccagg

SEQ ID NO: 6623 - DNA, 31 bp, Homo sapiens
  chr8:142202197-142202228
  hyper
actgcccatatatttacgttttctggtgagc

SEQ ID NO: 6624 - DNA, 746 bp, Homo sapiens
  chr8:142317851-142318597
  hyper
ctgatgggtgcgaaagcgggccgggtccaaatgaaggcgcgcgccccggggtgggggccggggtggggggaatgagggaggctgcagggctggggaccagggcaggtgcaatccggaaagaggaggcgggaaggaattggggggccctgaggagccagcgcaagccgggtgggggcacgtcccctcccccggagaaggtgcggggctggggctgcggcgcggacccgacctggaggccgaggctgtgcgggaggtgggggtggggaggctgcaggtgcccggcgcccaggtgcgaggtgcagggggcggcggggcaggcggctgcgggcggcaggccactcacctgtctcctccggccggggccgcgggggcggcggggcggccgggccgggccgggcaggggctacgggggcgcggagccccgggcgcaccggggtcgggaggcggctgcgggtccgggcgggggctgctccctcggccggccggccgggcggtcagtcagcgacgcgggcgcggagagagcgctgcgaggctgcggccggcgcgcggagacaacgccgctttatcgggtcggaaacagccgctccgcgccgcttccgctgacgcagcgccggcccctgcgcctcatgactatgcagcacccgccgccgcgggacggggattcggggggcggggtctgcgccgcgcgcgctcattggcctccgctgccgcccaccccgcccccgaacggccgccccgcccccgcc

SEQ ID NO: 6625 - DNA, 36 bp, Homo sapiens
  chr8:142425764-142425800
  hyper
ggtgaagggtagggggcgtggcggggagaggggatg

SEQ ID NO: 6626 - DNA, 37 bp, Homo sapiens
  chr8:143340515-143340552
  hyper
gcacgttgtctgaggacggggccgaggggcagaaggg

SEQ ID NO: 6627 - DNA, 31 bp, Homo sapiens
  chr8:143429143-143429174
  hyper
ggacacgccatcacctcgccacactgcatcc

SEQ ID NO: 6628 - DNA, 55 bp, Homo sapiens
  chr8:143531681-143531736
  hyper
aggtccccgcgagcccgcattgggcaggctgaggagggggcgaccctggacgcag

SEQ ID NO: 6629 - DNA, 526 bp, Homo sapiens
  chr8:143531983-143532509
  hyper
tgtaagggcccgagacgtcctccccccacgcacagagctcggggcaggcaggagaaaaccccagactccttctcgaagccctcgctcgtagaagccctcgcctgtagacctggcattggcagtggagactccctggaggtactctcccccacttcgggcggagggctatttttgcgccccccacccccacgcgaacgcctggctcttccctccttgtctacctttccactgggtcggacaggccgcgcggataagccgctctcaactttgggccggccctatgccgtctccgctccaagcgccgagcactcccgggcgccgagcactcccgggtccgcgtcgccggtgagcagaggccgccggccctccaccgtcgccgcgctagcttggagccgcgcggagctgcctcgaggaacgagcacggcccccgccccctcctggggaggctgggagctctggacccggccaggagccctctccctaggtccccgcggccccctgggcgaggtagagagctcctccggcc

SEQ ID NO: 6630 - DNA, 1099 bp, Homo sapiens
  chr8:143532541-143533640
  hyper
cgaagcgatgcgaccgggagggcttgacggaggctgcggctccgagcccgcgtccctcctcctggccgcggcggctcctgcttggccactccccggcagcctgaagagaacgcctaatctggcaccccagccccaggccgctgggcaccttacccctttccacttttattttgggcttctaagtttcttggagcgcaggcgcctaggctgggacccgaagagccctaagccagccctctttcagcacccgtccccgccgcgacctccccgttcttcctccgggtctggggcgcagattcctgggctgcaactccggagtagttgaaaggcaggaaggcgtgtgggcgggtagggggcctgcactcccgccccagaggagccgcttgtcgtttgtgttggggagggagctgggaggtctgctctcccgctccatcctgggaacccacggagaccctcggtactctccccacagacacaaacacacgccccctcggagcgagagccgccgcgggggaacagcagaggccgcgcgggcggaggcgggggaaaggggagctgggtcccttttctatctgggagggaggtggtatacggtgtgtggggtctggggaggcgactgtcacgtctcctagaaccctcatgccttccactcgtctgcgaccccggctgccgaggaggcaacgagggaggtcgagccgctccctcccgtgggcggcagcgaaactctgcgcccgcacgccggggtgccgccgagtccggctttgagtacccagcaaggtcaagcaggcgaaggagggggcgggggttcctgggcgcgcccccgtccgcgcacagtcggggccttggaagggggtgtgcgcagcccgccgagtcagtcccgctcgcctgccgcccgcgcccggtccccggaggcggacgttgcgcgcgttcggggatcccggagcgcccggcgccccacgccctcccttcggctcgctagctgctccttggcgctgctttcagacttgttgcgcctcgatctggggggcagaaggctggcccgggagacccggcggctgagggccgagccgcgaagcccagggatgcgccagagaggcgc

SEQ ID NO: 6631 - DNA, 948 bp, Homo sapiens
  chr8:143533708-143534656
  hyper
cgggcgcttgttcctgccggggtcccgcgcaggggcggatagagggcgattcgtcgcctcggcctcaggcagcactcatccggatcccgggctagggagggggcgcagccaagttgtggagccctcggaggcccttccctctcccgcaggctccggcccctctcggacctcggtggccgcgtccgtgaaatggggacgcgggctctgctctcggatcccttccagcccccgaccctccgcacttgtcccgagatccaacgtgcccggtccgcagcgtgctgggtctgcggcgtcagggtggcccgagtcccgagaccatctgcgcttgcggacacagccgcggggcctggcatgaagggccccagggagggcctagcaagcgcccggggtccgagcagcctcctgcggcgtcctccgcccccggtcggcccgaccccgcctccgggagtgggtcgtggggcgcggagcccgtcctccggggacgccgcggggctccaggcccaggcggccggcgcggggccgcagtggcggaaggcggagggccggcgcgctgccgctgactgccgggagagggcgcccgcaccgcgcccgcgcggccctgcccgccccttccgtctcctccgcgcctggcccgcggctccggccccatcttgggcagccccggccgccacctccctcccgcccgcccgcccgcccgctcgctcgctcgctcgccgtccgctcccgccgccgggtcccgtgacgcgcctcgcgtctcggccggagcccccctcgccggcccggcccggtccccgtgtgcggtgcgctggcgtgagcgcgcgtttgcgtgctggtgtccatgtgtggcgcgcatgcacgtgcgtgcccgtccgggaggctgggggcacgtgtgtgcaggcatgcagacttgcacatgtgtgtgcgtgacgggggcgggtctcgcgccgg

SEQ ID NO: 6632 - DNA, 152 bp, Homo sapiens
  chr8:143556734-143556886
  hyper
acccgggccggcctcggcgggcttagcacccccatgacttacccgtccaggccacgagcccctgccctgccctgatccccgccctctggtttccccccaggcggctggaagctgtggtccctgtggggcgaatgcacgcgggactgcggggg

SEQ ID NO: 6633 - DNA, 30 bp, Homo sapiens
  chr8:143592360-143592390
  hyper
acgccctccggacgcgctgcctctgtgacc

SEQ ID NO: 6634 - DNA, 30 bp, Homo sapiens
  chr8:143695807-143695837
  hyper
ctgcggagggaggacgccgcgcccgagctc

SEQ ID NO: 6635 - DNA, 36 bp, Homo sapiens
  chr8:144099879-144099915
  hyper
gtcccgcccctgcccccgccccggggccgcgcggct

SEQ ID NO: 6636 - DNA, 30 bp, Homo sapiens
  chr8:144242014-144242044
  hyper
atttctcggaagaacgtttactgcgaaagg

SEQ ID NO: 6637 - DNA, 30 bp, Homo sapiens
  chr8:144373341-144373371
  hyper
gagccggatcccggcgcgccaacggctcga

SEQ ID NO: 6638 - DNA, 30 bp, Homo sapiens
  chr8:144417248-144417278
  hyper
cccttcacgctgggcggggacccagatcca

SEQ ID NO: 6639 - DNA, 838 bp, Homo sapiens
  chr8:144508721-144509559
  hyper
aagcagggggacagacgaaagagagaaagagaaaggggagagaaaacagaaaacaggaaagtgaactgactccagcagcagcagctgctaaggtcccacagctcgggcccggccatgctgcggagaaagctggatccggtggcagccccggcacgtgccgcagtggggttcctctgagtcccaaacccagcaagcctccagcagcgcccgcaggccccgtgcaccaggaagcccagttctggcccctgagtgcagggctcccagacgcctggggtgggggtagggagcagggagggtgacacagctccctgcccgccgctcccaccccaaaaaggccgcctctgatccaggctgccagaagtcgctgggtcctgtactttctcggccagggaaaggctctgtgcaaagggctcctgggggcggcgatggtgaaaactaaggtgtcccatgtcctctgctctttacaacttcggactatgaaaaacgagccagcagattcccgtccaagaatgtgcccaaggctccccgcccctccttggggagagatggcctgtgtaagcgaaggcccgggccgggcggctgagccacccgtggctgcctggaacccgcctgtccctgccggcgtagtcttttcaactccatcttccgccccacatttctgtaattcccaccagcattctcctccacagagatgccttcacggccagctcccctgctgggattctgcttgaactcccgcagagacccaaaagcaaagggggaggcggcagggactgacggaggactcgccttcctctcttcctccaggtctctccgcttgaaacgataaaacaaactc

SEQ ID NO: 6640 - DNA, 130 bp, Homo sapiens
  chr8:144511269-144511399
  hyper
tcaagtttccttagaaatcaccgttctccgctcaacctcaggacggcgacccgggccgacgcgcgcgaacggggaccgggagcgaaggggcctccagccccgcgcccgcagacttggcaccggggccagc

SEQ ID NO: 6641 - DNA, 714 bp, Homo sapiens
  chr8:144511448-144512162
  hyper
cgaggccccgagaggcctgcgcgaacttgtccccggcgacggcggcgcgggctcggggtccggcgcctacaggaagaagtcggccgtgcccttggccccgccgggaccggcctgcggcggcgaaggctcccgcgggaaaccggccccgcccgcgctcccggggccgccccggcccgccagcttctcgtatttctccttgtacaggtcccgctctttggccaggcgccccacctccagcttcagctgctccacctggctctggagttggcacttctcgctctccagaatgtgccgctgctgcacccgcttgaagcggcaggactgcgcgtagccgcggttcttgagcgtgcgccgcttctgcttgagccggatgacctcctccttgctgaagccgcggagctgccggttcagctcgcgcaccgacatggacaccagctggtcgtcggagaagcgctcctccaggcgcacgtggtggcccgcgccaccgccgtgtcccgcgccgccatggtggtggtggtggtggtggtggtggtgggcggcgtggtgatggtgggcggcgtggtgcgcgccgtggtggtggccggcgcccatgtcgtccgctccgccgccgcccgcgaagcccgggccgcggaaagcctcgtaggctgcggcggccgccgggtggtgcgcgccgtggtgcgcgccgtggtggccgctgccgatgagcgcctccac

SEQ ID NO: 6642 - DNA, 30 bp, Homo sapiens
  chr8:144513145-144513175
  hyper
ggcagagggcgcgccgcctcaggggacaac

SEQ ID NO: 6643 - DNA, 30 bp, Homo sapiens
  chr8:144594984-144595014
  hyper
ttcccacgattaatcgcctaattagagctg

SEQ ID NO: 6644 - DNA, 31 bp, Homo sapiens
  chr8:144614550-144614581
  hyper
aagtccacagggcagtcgtccccagctggac

SEQ ID NO: 6645 - DNA, 118 bp, Homo sapiens
  chr8:144636010-144636128
  hyper
ctgcccgcagacggcgcctgcttggcctcagaccaagtcccacaggggctgccgtgcctgccgcctccaccccattcccccaacaaggcagcgaggccttcccggaaaataagcctgg

SEQ ID NO: 6646 - DNA, 92 bp, Homo sapiens
  chr8:144640320-144640412
  hyper
tcagagttttaagaaaaaccacaaagtgctatgaagtttgaggctaccaggatggggcgccaagccaaggttcctccggacgcgcgaggctg

SEQ ID NO: 6647 - DNA, 30 bp, Homo sapiens
  chr8:144640740-144640770
  hyper
gccgcacacgggggcggaagctccaggctt

SEQ ID NO: 6648 - DNA, 121 bp, Homo sapiens
  chr8:144641058-144641179
  hyper
agaaggccctggaggacgcagctggggtggggcgacactctggctgggttttgcagtgggtccctggtgacactctggctgggttttgcagtgggtccctgcaccacgctcaggaggtgac

SEQ ID NO: 6649 - DNA, 31 bp, Homo sapiens
  chr8:144681190-144681221
  hyper
acagcgaggatgcccccgtgcggtgcaggcc

SEQ ID NO: 6650 - DNA, 54 bp, Homo sapiens
  chr8:144691795-144691849
  hyper
gccctccaataggactcgcctccccgtccccaccctcgccgattggttactggg

SEQ ID NO: 6651 - DNA, 30 bp, Homo sapiens
  chr8:145150007-145150037
  hyper
ggcagctgcggcttcgcttcgcggggtagt

SEQ ID NO: 6652 - DNA, 62 bp, Homo sapiens
  chr8:145687373-145687435
  hyper
agaagggagaggtaagcggaagacaagcgattcagatcgggaagtaccgtggatcagaaaac

SEQ ID NO: 6653 - DNA, 40 bp, Homo sapiens
  chr8:145692566-145692606
  hyper
attcttgtctccttcgcagtctggcgaggtcccctcactg

SEQ ID NO: 6654 - DNA, 124 bp, Homo sapiens
  chr8:145697858-145697982
  hyper
ttgcaccaggtagggctgcaccgctctccgagaccccgccccgtgcttccacttgggggcggggaccctgcacctgaccagcccttcgccccgccttccagatgctgaaactggggaggagcaa

SEQ ID NO: 6655 - DNA, 85 bp, Homo sapiens
  chr8:145698667-145698752
  hyper
gggaccccctgcacccctacgccgtcccctggcagtcctccatgccccagtcccgacaacggctcgggctcggctctcgcgcccg

SEQ ID NO: 6656 - DNA, 30 bp, Homo sapiens
  chr8:145733644-145733674
  hyper
cggacaccgaagggcgtcacgggcagtggc

SEQ ID NO: 6657 - DNA, 46 bp, Homo sapiens
  chr8:145734031-145734077
  hyper
cacccgcgcaggacctcggtgggagcgcgcacgtggcggggcgggg

SEQ ID NO: 6658 - DNA, 34 bp, Homo sapiens
  chr8:145806237-145806271
  hyper
gtcctccttcactgtcccaaacgccgcgggccgc

SEQ ID NO: 6659 - DNA, 31 bp, Homo sapiens
  chr8:145909821-145909852
  hyper
gttgtaccaggaggcacgagaagcctcacca

SEQ ID NO: 6660 - DNA, 49 bp, Homo sapiens
  chr8:145910266-145910315
  hyper
ccatgtccgctccctgcgccccggggacaaagcccgaggctgcaccgca

SEQ ID NO: 6661 - DNA, 132 bp, Homo sapiens
  chr8:145911309-145911441
  hyper
cagggggcactgcctcgcgaggccgcatcacgcatgcgctggcgcgcggcatgccgggagccggagtcccgcggagggcgcgcgcggcatgctgggagccgcctggccccgccccgtcgccgcgccagaggc

SEQ ID NO: 6662 - DNA, 37 bp, Homo sapiens
  chr8:146078070-146078107
  hyper
gcgcggcttggaaggccgggttcgcaccctgactccg

SEQ ID NO: 6663 - DNA, 83 bp, Homo sapiens
  chr9:113549-113632
  hyper
ggagctgcccaactccgccgcctcgggaaggcggcttcgggcccgcagggagccccggggagggttcccggttccgccggcag

SEQ ID NO: 6664 - DNA, 243 bp, Homo sapiens
  chr9:113897-114140
  hyper
cgtcctggcaccgggggcggcggcgcagaggccgggaggaagaaatccgggccctggcccaggtcgggcttccacccctgcgacccgcgagaggcccaggcgggaaaggcggcgagtggcgtcagcggttccgaaagcaaacctggcccggtgctactgcccgagggtcgccgggcgcgtttcctaattcccccgagtctggaaaacggagacttccgtagcgtcttcttcagtgcgtgctgc

SEQ ID NO: 6665 - DNA, 23 bp, Homo sapiens
  chr9:174124-174147
  hyper
caacacagcgagactccatctca

SEQ ID NO: 6666 - DNA, 30 bp, Homo sapiens
  chr9:215353-215383
  hyper
ggcgcctgggtaaccgtgttgggcgcgcca

SEQ ID NO: 6667 - DNA, 30 bp, Homo sapiens
  chr9:470094-470124
  hyper
gggcctagagagagcgagcactgccggggg

SEQ ID NO: 6668 - DNA, 686 bp, Homo sapiens
  chr9:504078-504764
  hyper
gagctctgcacgctccggtccccctcacccggggagggagaggaggtacagaggcgctgggggaggacgtcgagcaggccagcctcgttgccagaacccccgccccagccggagatgggagcaccgcaccgtctcacgggggctggatttcttctccccttgcgggtgtgtgtgcgaggatggacgtggtaaatacgggttggcagaaggagcgaaccgcggtggaggaagttcttctgcttagttctcgccgcggcgaggcccgcgggccaggcgcggcgacgaaggtgcacgaaggtgccccgcgggcctggtggagttgcagcggcgcgcaggcgcactgagggccgcccgcggccggctccgcggtacaaagagcgcccccgcggggagccgggcgtcctctgggcggagggagcagccggggcttcgccggcccgcgccgttcttctcacgcgccgctccggggcgcagccacagctgtcgcccaccgcgggtgagaggcttgctggtccgccccggcttccccgccccggcggcggccgtgcggttcgggctttaattctggcgcttgccagccggggccgactccgccccctgcgccccgcccttccccgagctccgggtccgcggcggagcgagcgagcggccggcaggttgggaggagcggccgaaggtgagtgacg

SEQ ID NO: 6669 - DNA, 81 bp, Homo sapiens
  chr9:504994-505075
  hyper
gccgtcggagtttggcgcgctctgcagcggcggcgctcggccggtctggaggagggagaggcgcgccgggcacggagcagc

SEQ ID NO: 6670 - DNA, 80 bp, Homo sapiens
  chr9:841325-841405
  hyper
taagcatgcaagcacggctctggtcttgacctggggagcccagcttcctcggtgcaccgtgctttggcaaccgggtcttg

SEQ ID NO: 6671 - DNA, 582 bp, Homo sapiens
  chr9:841449-842031
  hyper
cgctctgtatctctcggtgcgcttgcagggaccctgcagcaaagccctggatgcttgcagccggtgcaagtttgcaagcagctggagagcggtggctggagtcggggggcggtgggcgtggccacgctccctcccaggcagtcccgggaatgttctgaaaagtatccgaaagttctgagtcgcgcgcgcgccaaaagaaaaggcacaaccccccaccactccgggcgtggcgtgcccagacctcgccactccagctgcgcctccggctgcagcgcacacgtctcctgcgcctcctcctccggagcgtcgctgtccgtcgggttcatccctcgcagcagtctccaggcgagagagggggccagagtgctcgcacttctcctaggggcaccatgcccaacgacgaggcattcagcaagccctctacaccgtcggaagcccctcacgcccccggggtaccgccgcagggcagagccgggggctttggcaaagcgtctggggcgctagtgggggcggccagcggctcgagcgccgggggcagcagcagaggaggcggctccggctccggggcgtcggacctgggtg

SEQ ID NO: 6672 - DNA, 30 bp, Homo sapiens
  chr9:842207-842237
  hyper
cgggagcccgggttcagccttagttttttt

SEQ ID NO: 6673 - DNA, 137 bp, Homo sapiens
  chr9:842610-842747
  hyper
cggtacttgccgacagcggcggcgcttggggtcctgggctcccggccacgctacatcgccggtctgggagcgccggagacgcgtctgatcccgcccgccgggcagagttgcgggcttcgctcggctcggggttcccc

SEQ ID NO: 6674 - DNA, 244 bp, Homo sapiens
  chr9:842779-843023
  hyper
cgggggttccctctgctcccgggtccctgagatccctgatcccgctctcagggcagggaattccggggttcgcccctctgggcttccccgcgatcccagagcccgcgttccaacagaattgggagggtttattgcgctagaggagtcttcaggatcttcgctcccgccctccgaggtgaggctagaggggagggttcgactccaagggaatcccagggatctctagccccgctcttctagcaga

SEQ ID NO: 6675 - DNA, 6 bp, Homo sapiens
  chr9:969608-969614
  hyper
gccgga

SEQ ID NO: 6676 - DNA, 132 bp, Homo sapiens
  chr9:969667-969799
  hyper
cgcgcccaccttgccggcgtgttcgcgggcccctgcccactgccccccctctttctttaggtctggcttttgaggatcccggagtcttgcagctcccgccattccgcagataacctccgcacacttaattgt

SEQ ID NO: 6677 - DNA, 14 bp, Homo sapiens
  chr9:970090-970104
  hyper
cccttctaaaccca

SEQ ID NO: 6678 - DNA, 15 bp, Homo sapiens
  chr9:970185-970200
  hyper
cggggcccgggacct

SEQ ID NO: 6679 - DNA, 30 bp, Homo sapiens
  chr9:970495-970525
  hyper
gcccccttccgcgggcgggatccatggtgt

SEQ ID NO: 6680 - DNA, 30 bp, Homo sapiens
  chr9:972607-972637
  hyper
gtggacagggtctgcgacgctcccttccag

SEQ ID NO: 6681 - DNA, 486 bp, Homo sapiens
  chr9:976203-976689
  hyper
ggagctgagcttctgcggccaaatgtcgggataaaagcggccttgggctcggaaaaacgcggccagatctggactggagggaggagaagagagagaagcggagcggccacctcactcgcttacaggcacccccaccctcactcccgctggtcctccccttctccgccccgcgagcaccgccgcgttctggagcgccgcagtctccagccgcgggctggggtagcggagagggcttggaggagggggccgcgagcgcccccgcgagagtggcctggctgcaggtggcaaggaaggtgaagtgcaggcacccgaggggcgcaaaggaggaggaaggcgtggggcggggagtgcaaggagacagggaccccaggggcgggggtggcggtgggaaggaggaggggttgggggagggcggcggaggtgttgggtccggccggctcacgagggagctgcagaagagctggctcagaccttaatcagagctgt

SEQ ID NO: 6682 - DNA, 614 bp, Homo sapiens
  chr9:976911-977525
  hyper
cgcccctgagcgggcctcgcagccccgccgtccagcgctccctggccctctcccgcagccaggctgccaactcattcgggagcccggggcatgaacggctacggctccccctacctgtacatgggcggcccggtgtcgcagccgccacgggcgcccctgcagcgcacgcccaagtgcgcgcgctgccgcaaccatggcgtcctgtcctggctcaagggccacaagcgttactgccgcttcaaggactgcacctgcgagaagtgcatcctcatcatcgagcggcagcgggtcatggctgcgcaggtggcgctgcgccggcagcaggccaacgagagcttggagagcctcatccccgactcgctgcgcgctctgccagggcccccgccgccgggggacgccgtcgccgccccgcagccgccgccagcctctcagccgtcgcagccgcagccgccgcgccctgctgccgagttggccgcggccgccgcgctgcgttggactgccgagccgcagcccggggctctgcaggcgcagctcgccaagccaggtaagagcgtctgaggtgcgggagtttggccgggcgcgggggcaacttcggagtgccagctgcagctcca

SEQ ID NO: 6683 - DNA, 5 bp, Homo sapiens
  chr9:1042615-1042620
  hyper
cggaa

SEQ ID NO: 6684 - DNA, 181 bp, Homo sapiens
  chr9:1050390-1050571
  hyper
gccgggtgagccagcgatctgagccaggcgggggcggcccgacctttcccgcccagcctgggtcagaggaagccgaaagcggcctcagcaaggtgaggcgcccgaggctgcagaagaccgagcagaactttgcagagttcgggatgtgctgggctaggtcgctgaggacttgactggcttc

SEQ ID NO: 6685 - DNA, 35 bp, Homo sapiens
  chr9:1051603-1051638
  hyper
cccgagcgccatggccgacccgcaggctggctccg

SEQ ID NO: 6686 - DNA, 350 bp, Homo sapiens
  chr9:1051904-1052254
  hyper
ggcaccggtccccgagagcgctgcactcccgcgggcggcggcgcggagccgcgcaagctgagccgcacgcccaagtgcgcgcgctgccgcaaccacggcgtggtgtcctgcctgaagggccacaagcgcttctgtcgctggcgcgactgccagtgcgccaactgcctgctggtggtggagcggcagcgcgtcatggccgcccaggtggcgctccggaggcagcaggccaccgaggtgcgtacccgcccggcccgggcgtctcaggccacagtggaggtgggggagttggaggggagcggggcggccgtccacaccccccgcgcccagggccttgcggtgcctggcactcc

SEQ ID NO: 6687 - DNA, 30 bp, Homo sapiens
  chr9:1710358-1710388
  hyper
gcgttatgctctctgtcctgacaaagttta

SEQ ID NO: 6688 - DNA, 30 bp, Homo sapiens
  chr9:1749159-1749189
  hyper
tgagaaagagatggtactttatgaactctg

SEQ ID NO: 6689 - DNA, 870 bp, Homo sapiens
  chr9:2622479-2623349
  hyper
ggtgccccgacgcctcgcctgaactagtcttctgcccctcactccgcctcccccagagccgctgcttcgcctcgtttctcgccctcttgacgggcgccgaggtgcgtgggcttctgagcattgaacaatggttctgcctcctctgccaggcgcagtgttgggaaggaggcagagggccaagacgtgtgcggcagcctcgggcgcaccctcgaaccccggggagtgcgggagcggacggggggagaaggtgagcgcctccggggacgcggagcgccaggggccggccgggcttcagagtcttccggcggccgcgagctggcgcacgttcggtgggcggcggccgggaggctccgcggagccgagggcacccggactgcgactcccccggcgcggggccgcctctccggcgtgcggggtaggggagcggcggggctttacgcaggactctgctctgggcgcttctcctctcccttttccccgcctcgggcggcgtttggaaaccgctcgggtctcccgtgtagctgaacgcggagggggagtggaggggagacttaatcaggttagtttgctgaccctccttcccggtgacgtttcctcgagaggaattgagtcctaggctagtgactgtaattagccttcattctacacaatagctcaaaggagcagcgcgagagcgagcgtgtggccctgtcttgttgggaagggcggcggtgactactgtcgggtccccagactctgccgcgggggcctgggggccccgcctggtcgtcagccacgttcccacttggggcctcgtaactttcctggacaggcgacaggaagcctttctgagaggactcagtcggaatcctagcgcgtccccgaagtgat

SEQ ID NO: 6690 - DNA, 817 bp, Homo sapiens
  chr9:3181032-3181849
  hyper
cgcgcgcgccgggcaacatagcgcaccgcgggtacacgcacgccgaccggacacacgcagtctcgtacacgcccaacgagcgcacacacccgcactccatgcacgcgcgatgggcgcacacactcgcatccctacacgtgcacacacccgcgctccaattaccgcgctagcgcgcaaaagagccgcaacttccgagtgggactcggcatgcgggggcagtgcccggtacttcaccatcagtcaccttcgcgtccgcctcctcccctgctggttgcacctccagccgcagagatttccggctggggcaccagaactgtccaggccgaaagagctgctcctccgtcacaaagcgcagttgcacactgtactgcaggcgcgcggggacccgggccggagccggggtcgcagccatggtccaagcgcctctgctcctgagccctagcagtgcctcccccgcgctgctctgggcaccgagaaactgctggggcaagggggagggatttggaagcgcgcaccaccttccccagctcccgttgcaagttcagtcttcgacctccgagacgcccggtgacttctgctggcacctgctgccctcggcatcacctccctcatccccctggagggcacgctggaaagctgcaactccccaccctccgcacaggagcgccccgtagacgcgcagatgggcccagccacccagcggggcggcagccctgagcacacaagtttggagagcgcgcgaggcacctgaaagtggttggggtttggaagcaaaagggtgacacctgctgttcgctgggaccgctctgcgggtgtg

SEQ ID NO: 6691 - DNA, 130 bp, Homo sapiens
  chr9:4297416-4297546
  hyper
tttaatagtctctcctcgagattcccggccccatactaaagggacctggtccactggggggagctgcagaacttccctcttctcacaaactccagggccctggggccccaactctcgggagatgctgaag

SEQ ID NO: 6692 - DNA, 1132 bp, Homo sapiens
  chr9:4299034-4300166
  hyper
ccgtgcgtcctgtaacgtgccctgattgtgtacccctctgcccgctctacttgaaatgaaaacacaaaaactgttccgaattagcgcaactttaaagccccgttatctgtcttctacactgggcgctcttaggccactgacagaaacatggtttgaaccctaattgttgctatcagtctcagtcagcgcaggtctctcagtgacctgtgacgccgggagttgaggtgcgcgtatccttaaacccgcgcgaacgccaccggctcagcgtagaaaactatttgtaatccctagtttgcgtctctgagctttaactcccccacactctcaagcgcccggtttctcctcgtctctcgcctgcgagcaaagttcctatggcatccacttaccaggtaaccgggatttccacaacaaagcccggcgtgcgggtcccttcccccggccggccagcgcgagtgacagcgggcggccggcgctggcgaggagtaacttggggctccagcccttcagagcgctccgcgggctgtgcctccttcggaaatgaaaacccccatccaaacggggggacggagcgcggaaacccggcccaagtgccgtgtgtgcgcgcgcgtctgcgagggcagcggcggcagggggaggaggaggcagaggcggggtggctggaccctcggcatcagctcattctcccctgctacacacatacacacacaaataatgtttctaaaaagttcagttgcgactttgtgcctcgcctgtcctgttcatcctcgtcctgggccggggaatgcttctgggggccgaccccgggatgctggctaattgctgccggcgggttccgtcgccggtgtgaccctggacggcgcggacggcgtacagggggtcccgggaggggcagtggccgcggcactcgccgccggtgcccgtgcgcgccgcgctctgggctgcccgggcggcgcagtgtggacgcggctgcagggagaggggaagggggaagagggagggaggaaggcagccgggcgaggagtgtggatgtgtgtgcggccgcgagggccggcctgtagccagctgcttcctgagtgtgagcgccggagggggagggggaagagtgggggcgggctcgcgggtcactaggctg

SEQ ID NO: 6693 - DNA, 30 bp, Homo sapiens
  chr9:4679311-4679341
  hyper
gtctgagtacctcccggcggccaggacccg

SEQ ID NO: 6694 - DNA, 100 bp, Homo sapiens
  chr9:5022027-5022127
  hyper
catccacctcttctatatatcagaatggtgatatttctggaaatgccaattctatgaagcaaatagatccagttcttcaggtgtatctttaccattccct

SEQ ID NO: 6695 - DNA, 249 bp, Homo sapiens
  chr9:5054639-5054888
  hyper
acagatttcgcagatttattcagcaattcagccaatgcaaagccactgccagaaacttgaaacttaagtatcttataaatctggaaactctgcagtctgccttctacacagagaaatttgaagtaaaagaacctggaagtggtccttcaggtgaggagatttttgcaaccattataataactggaaacggtggaattcagtggtcaagagggaaacataaagaaagtgagacactgacagaacaggtaa

SEQ ID NO: 6696 - DNA, 30 bp, Homo sapiens
  chr9:5064973-5065003
  hyper
tctgtaaagaagtagcacctccagccgtgc

SEQ ID NO: 6697 - DNA, 129 bp, Homo sapiens
  chr9:5069923-5070052
  hyper
gataaatcaaaccttctagtcttcagaacgaatggtgtttctgatgtaccaacctcaccaacattacagaggcctactcatatgaaccaaatggtgtttcacaaaatcagaaatgaagatttgatattt

SEQ ID NO: 6698 - DNA, 30 bp, Homo sapiens
  chr9:5072525-5072555
  hyper
tttttaaaggcgtacgaagagaagtaggag

SEQ ID NO: 6699 - DNA, 63 bp, Homo sapiens
  chr9:5073736-5073799
  hyper
cacaagcatttggttttaaattatggagtatgtgtctgtggagacgagagtaagtaaaactac

SEQ ID NO: 6700 - DNA, 30 bp, Homo sapiens
  chr9:5078415-5078445
  hyper
cattagtattacagttttgccaaaggacag

SEQ ID NO: 6701 - DNA, 153 bp, Homo sapiens
  chr9:5080227-5080380
  hyper
gttcttcaggagagaataccatgggtaccacctgaatgcattgaaaatcctaaaaatttaaatttggcaacagacaaatggagttttggtaccactttgtgggaaatctgcagtggaggagataaacctctaagtgctctggattctcaaaga

SEQ ID NO: 6702 - DNA, 100 bp, Homo sapiens
  chr9:5081711-5081811
  hyper
tttatttctccagattatgaactattaacagaaaatgacatgttaccaaatatgaggataggtgccctggggttttctggtgcctttgaagaccgggatc

SEQ ID NO: 6703 - DNA, 30 bp, Homo sapiens
  chr9:5090773-5090803
  hyper
cagggatctggcaacgagaaatatattggt

SEQ ID NO: 6704 - DNA, 30 bp, Homo sapiens
  chr9:5123003-5123033
  hyper
gtatgctccagaatcactgacagagagcaa

SEQ ID NO: 6705 - DNA, 223 bp, Homo sapiens
  chr9:6412597-6412820
  hyper
ggcgacgggaaaccctcggaagtgggtttccgcgcgaaagtagcattgcggccaggcgggaaacgtgttcgcgaagcaggagggcccccggggcctttcccgggcgacccgacccgccaggccgcgtggcgggagctttcctgttgagcgcggtggagcgcacacatttccttcagttctttctcggaagtttaggccgcacccacccgcgccccctttccag

SEQ ID NO: 6706 - DNA, 39 bp, Homo sapiens
  chr9:6414291-6414330
  hyper
cggtttaaccgggggccgggtttacgaatgccctatata

SEQ ID NO: 6707 - DNA, 30 bp, Homo sapiens
  chr9:6587038-6587068
  hyper
acagaataacacaaaaaagttgttgttcta

SEQ ID NO: 6708 - DNA, 30 bp, Homo sapiens
  chr9:6644588-6644618
  hyper
caagggagccctcccggccacttacaaaca

SEQ ID NO: 6709 - DNA, 574 bp, Homo sapiens
  chr9:6645577-6646151
  hyper
ggtggcggctgcgcccggcctggagcccctttcgctggacagtcggccggacagatggatggacgctcgcgggcaatgaatgggcgctgcgctcaaccaagacactcgcgcaaagttgtggctccacccaaggcacctgctccgcacactttaagcggcgccctggaggcgggaggtgggttggggccaggaagcccttggccaatgaaagtagacagagggggagggggcggaacagttcccgcccccgccccctcttcctaccctcttcccagcccttccgtggagtcccgcttcccctggaccggaggctgccatctccagtcctacccactccgacgctggctggtgccgggggccgggacgctccgtacgccgcccgccagggtgtggagccgcactggggcaagatcaggtgggacagcccaaagactccgggccaagttcctgggggactcggcggagatggaagatgattctcgaagctctccatttccttaattttgaggtatctttctctgtcacatttcatctcagggaaattaatatgggcagatggcggttcttttatctt

SEQ ID NO: 6710 - DNA, 30 bp, Homo sapiens
  chr9:7076080-7076110
  hyper
gtgatcctccacactactgtatatatttgg

SEQ ID NO: 6711 - DNA, 352 bp, Homo sapiens
  chr9:8856994-8857346
  hyper
gactcttcattataaaagatgcgttcccttccctacggaatgaatgtgtgtgttaagtacaccagattcccgcagctgaactacgagctttgattctgccacgggaaggtctcccaaacaatccccctcctctatggcagctgcgtagactttgattcctgctatttctccttctccccactagttcagaggaaagaaagaaaaagaaatcgccccctcaccgtagtcagccctccttaaaacagtaatccctgcctttaaaaaaggcggtggcaggatccctgggtaagggtggattgccccaccgctccaccatttgcccccaatactacgcccaccctaggaggagaga

SEQ ID NO: 6712 - DNA, 79 bp, Homo sapiens
  chr9:8857406-8857485
  hyper
cgggtctgaggtttcaggcgagaagtgaacccagcaggagaggacctctgcccgaggaggtccagaggagcaaactgtg

SEQ ID NO: 6713 - DNA, 241 bp, Homo sapiens
  chr9:8857685-8857926
  hyper
cgccaacactttcctccagcgccttcgcgccccgccacggccgcgccgccgcctccgggcggccaatttaatcccgcggagcagcggccgccgccgccgaagcccccctggtcgccgccgccgcccagccctcgtgcggccagcccagtccagagcgaggaagtggaagagagtcagcgagtgagtccaaaaacccgaaatccagcatccaaggcagcgcgtccccccgccctccctccac

SEQ ID NO: 6714 - DNA, 30 bp, Homo sapiens
  chr9:8858244-8858274
  hyper
cacaaatagcaactcggctgcccccctcgg

SEQ ID NO: 6715 - DNA, 30 bp, Homo sapiens
  chr9:10612685-10612715
  hyper
acctgcactctccccgccgaggctggctgg

SEQ ID NO: 6716 - DNA, 34 bp, Homo sapiens
  chr9:10613313-10613347
  hyper
agggtaaagcggttcgcgcgggaacaggaggata

SEQ ID NO: 6717 - DNA, 74 bp, Homo sapiens
  chr9:12776574-12776648
  hyper
gttccaaggccactgtcgagcagattctccacagctggttctgaaaacaatggcctactcgtccttgatgtact

SEQ ID NO: 6718 - DNA, 241 bp, Homo sapiens
  chr9:13034171-13034412
  hyper
ggagagcaaacattccagatgcgttactaattgagatgtcagaaatccttcaacttttcgatgaaaaaacaaccgtagggtaatatgcttctcaaggtttctcaggcccgatgaacgattttggtttatttttccattcctcaaatgcagtggcggggaaaaacgcgtttcttccgctgaagttacagagatgagcacatgatggcgctcgcgctgcaccgtaaacccagaagcagctgag

SEQ ID NO: 6719 - DNA, 472 bp, Homo sapiens
  chr9:13279298-13279770
  hyper
agcgccgagcccagggcgcccgcgcaccttccccgccggcgcgcgcgcagggcgcgggggcgcgcctcggcctctgggccggggctcaagcgccgcttacccggctcgcggcgcccgcccagggccgcgacgcgagggggcggaggactggggagcaggggtcgccggggcctctggatgcctcgcctcgcccacgctcactgtcttctcttctgaagtaacgacccggcgaggagcttcggatcaaaacgcacagacactcacgcgtgactgagaaacttaatcccgcggtggcccgacgccagcctagcgctccgccgcgccccctcccccagcgcgcgccgcacttgcgccgaccggggctgccgcggaggcggtggcggggcccaggctgctggggctgccgtgacgcctgcgaccggcggggcggcgggcgcgccttggccaatcaggggacgcggccgagcaggcc

SEQ ID NO: 6720 - DNA, 30 bp, Homo sapiens
  chr9:13951234-13951264
  hyper
cactcgccaaggtcgcgcctttgcgctcca

SEQ ID NO: 6721 - DNA, 1303 bp, Homo sapiens
  chr9:14313028-14314331
  hyper
tgctacagtcccctcgcccaagttcactggctgtttttaaaagcttagtcccccgtaaagtcctccaaagcccgagtccacctcaacgcgcgagctgctgagaggggctacgggcaccccgggcggggatgccgcaccacaacgggcacttgaggggccgcacggggcctcgcacttacaggtcccggccctgcccaccccccggcggccttgcccggcccagcgcccgcgctccgtgcccagggcgcggggctgggcgctcgcagtggccgtggcgaggggccgctcccggctcccacgccgccccgcgacgcccgctgcaactccgggccacttctccaagggacggggatgtgcggaggttaactcaagccgctaattgtccgcaacaaaacaaaacaaaggcatttcgggccagagagaaagctcgagaaagcgaccgagacatgtacctgagtgagacagatgggagaatacatcatgacttcgccttaaaacgcactttccgggagatgcccaagaaaatcttcgagaagcaagaatttcatctattcattttacagtcatctgagccccgcgatgcgatcaatcaggacggggctctgcgctggatcaccgcaacttcacaacaaacccagtcctccttaaatagccaaagattcaagttcactcggcgtgctagatttccaggggtgaaatccaatctacacttttaaccctcttgcagtccgagcgcgctggccgtgcttgccgaggccgccgccgccgccggtgttggctgcttttcgcctgggtttggggatttgttttctattttgcagttgttgttgttgttggggtgtagggggtgcgcgaaggttcggtgtgggttggattggggtggtggttggtggtaaaatgctttttcaaaaaaggcggggaggggggcgcgggagggcgcaggagggcgagcgggcgggcgggagggagagcggggagaatgtgtcaccgcgctgggaaagttcaaggttacagccccaagcactgcggcaggatcccggagtggtgatcgcaggcgaaactttgccgcgagccgaccatgtgtgtgcgcgaggggcagcgtgagcgagtgcgcgcgggtggcggggcgcgcgcgggagagggccggggtgggggcggggtgggatgggggagaagggagaggccggggtgagggagggggcgcgagcgctgatctctggggcggaagaggctcgcggcgcgtggtccccggcagcagcagccgccgccgcccgcgccgggtcttcggcgcccggccgcccgc

SEQ ID NO: 6722 - DNA, 369 bp, Homo sapiens
  chr9:14315263-14315632
  hyper
gcggcgcgcggcgcttcgccgcggtttgccgccctccccgggggtgccccgtgcacgtggcctcgctctgagcgggaggaccgggccgagccgccgccgccgcctcttgctccctccacctcctccccgcgcccggcttcgctctcctcctcctcctcctgcagccccgctggctggctcccaatccccaccccccggggcccggggcgccggcggaaagcgtctccctacccgcccgggtgcaggcggggcggggccgcggcgcgcccggggctgcggggcgggccggcgggcgcgcgcgcgccgctgcagccctccagaggctgcgggccctgagccgctcggcgcccgcgccggctccccaccgcg

SEQ ID NO: 6723 - DNA, 846 bp, Homo sapiens
  chr9:14322292-14323138
  hyper
atggtgtgtgtgtgtgcgcccgcgtgtgcgtgtgtgcatgtatgtgtgtgtgtggtgggttttattgttgttttagcggggctgctccaggagtggggctgcgccggtcagatgcagccggcacggccccggggtcgcgcgatcgccccttccccgccctcggattggcctggcccgcggcggggctgccccggaaccgccacccagcagcgcacccttccgcgcccggcccgcgctcctcctgcagtcgcctccctggctttctctttctccggctcgcggcccgccccgccccaccctaccacggccggcctgggcgcgcgggaagcgcggctcttcgcttccgcctggcggcgggaaggaaaccgaaaggaggagccgggggcgggcgcgccgcgatgcatattcatcagggcgcccgggacccgggaggcgggagcgggcccgagtgggtgtggcggcctgcgccgcgcggcgcccctctcgagcgtgggtgggtgcgtgggtagcggtggggctctggtctttgtgcggccgcatggggccggagagcggcgagggcgtgaccgtctcgggggctgctgcccaggctccgcgcgcctttgtgcttcccgaccgtgtgtctgcggcgcgccgcgggcaaggggcccctcgccggccttctggagcaggaacccggccgaaaacgccgcggaaagactctaaaacaacaataatgataaagaataaggaattgctgttacttcctcacttcccgccacgttgctggcttcaacttcgccaggccacgtttgtttccgtgtaggaggactcccgaaatgttcctggctgcgcagcgttatcatt

SEQ ID NO: 6724 - DNA, 322 bp, Homo sapiens
  chr9:14348471-14348793
  hyper
tatttaaagtgactcccagaacgcagctttcgttcctagactctttaggtgtcagtgcttcggctccagtttagcacggcacaggcggcccagcctttgatatttaagccaggccagcgcccgggtgaaactacctgttgggggattctgccgcctggaacccttcttcttctgcgcaatactggcagcagtgggatggctctgggggtgccacgcgaagagagagggcggaagagccgggagcagcggacagtcagctgcatgtggcagtgcctagcgagctgctcccgcgcctctgctcgctctttgaaaactggaaaca

SEQ ID NO: 6725 - DNA, 31 bp, Homo sapiens
  chr9:15306090-15306121
  hyper
accgcctcctccagatcgtccactattgcat

SEQ ID NO: 6726 - DNA, 226 bp, Homo sapiens
  chr9:15306719-15306945
  hyper
cttcgtaaagcccaggcgtcgctgggccggcccggaacagctcagagctgcgggtcctatggtcccgcgccctcacgcccatccaagtgctggcaggacgtgggtcctccatccccacgactcgcggggccggcgctccgaacctcggcactgcgtccgctccgcgcgccgcagggaccctcctagctccagcggggacagacctaccaaggccgggcgcccccac

SEQ ID NO: 6727 - DNA, 100 bp, Homo sapiens
  chr9:15306998-15307098
  hyper
cgtcctagccgggctcactcttctctcccggactcctgtccagggcttcaggggccgggcccgcaatccccatcggatcgtacctcgtccgcttccagct

SEQ ID NO: 6728 - DNA, 31 bp, Homo sapiens
  chr9:15423708-15423739
  hyper
tactggctgccttcatcggccttttcattat

SEQ ID NO: 6729 - DNA, 20 bp, Homo sapiens
  chr9:16154650-16154670
  hyper
tgcagcaaagaaaaagctga

SEQ ID NO: 6730 - DNA, 102 bp, Homo sapiens
  chr9:16154745-16154847
  hyper
cggcccggggacggcagggggcggctgtgcggctccgacgccacgctggtgctgcagcagcaagcgccgcgagccagccacgagacaggagagcccattaat

SEQ ID NO: 6731 - DNA, 30 bp, Homo sapiens
  chr9:16871091-16871121
  hyper
tgcaaaataaaagtcggtcgttgtgttgtt

SEQ ID NO: 6732 - DNA, 84 bp, Homo sapiens
  chr9:17578710-17578794
  hyper
ttttcaggctgcggcgcagagacgccaggctcaaagggcaggagggccgtctgcaggcagcgccgccgcggctacctggaagcc

SEQ ID NO: 6733 - DNA, 30 bp, Homo sapiens
  chr9:17906546-17906576
  hyper
gggtggggggagcgcgaaccatctcgagcc

SEQ ID NO: 6734 - DNA, 30 bp, Homo sapiens
  chr9:19380410-19380440
  hyper
tggtaaggcaaacccgcgtgtaattctgag

SEQ ID NO: 6735 - DNA, 30 bp, Homo sapiens
  chr9:19788242-19788272
  hyper
gctgcgaacgtcaacgcttagcaggaacga

SEQ ID NO: 6736 - DNA, 30 bp, Homo sapiens
  chr9:19788549-19788579
  hyper
tgcatttggtgaggcgcttggcccgcatcc

SEQ ID NO: 6737 - DNA, 933 bp, Homo sapiens
  chr9:20620433-20621366
  hyper
acggtcctttctctgcggtgactttcaccaagccgaagtggcgcgcgcgcgggcaggcgggagccgggacctggcccgcgcggcgccgcgcacccggatcccgaggctacgccggcgagcgcggcgcggggggcggggagcgggacagcgggaccgcccgggccaagcgattgtttcaaagacattttttatcaagacccttttgtattcgagccctacctctttttggcctaggaaagctttcgtgcaagtggaagacgactttctccacaaagtgctgtatgttactgtgctccggaccgcgtacgaacaccatccagtcgtgggtgaagccctccacggtgggttttttcctcacctgggcgcggtgccccagctccagcttcacctgcacggcacactgcgggcagggggaggagagacagccgtgaataacaggaaggcgaggtttcggcagtgaacgttgcgcctgacatttttttcctccttcttgaaacgcacataaaaggaaacggcggtgccctctgcatccacgtttcacgcgcgtgggcgcgcacactccacacccccaaatatacccgcccgcccggcccggcttggccccaggcgccccgggccccgcatctacatcggacaggattgtaacggaatgttatccccagtcgggaagggggtcggggaaaagagggagaacacactcagccacgacaagcacgacaacaaatgcatcggaaacaaatcagaaggcgatgccggggcggtttcccggcgtgggaggggaggtggctgggacccagggggaccgaagggctcctggcgagccccctccccgaaagtaccgcggcgacaggcacacgccgaggaagtctttgtgtacgtgtgtgtgcgtgcgtgtggagcgctgtgccaggcgaaatggaaactacaggcagc

SEQ ID NO: 6738 - DNA, 632 bp, Homo sapiens
  chr9:20621626-20622258
  hyper
tcagaaaggcagggcggcgggcggacagccgccgagcctcggctcgcgctcagcacctcccggcgctggggcaaagttgcgtgcggccccgccgctgtcagccccgcacacttcggctcacacacgcgcgccgcggagaacgcaccatcgtagcggccgcggcgctttgcggaggtgcggccgccgaggctgctcgccgcgtccccggactgtgcccgcagctcccggcggcggcggctgaaatatggctgagttattattcgcctccttccaccgtgtgtgtgtgtgtgtgtgagtgcgcgcgtgtgagcgagagggagtgtgtgagtgcgcttcttgtgactgcaaagaggcgaggagggagggaggcgcggggggtggaggggcgagtgtgagcgtgtgtgagtgtgtgtgtgtctgtgtgtctgtgtgcgcgccgggggggggtgggggaggaggggagcggaggctgagggagaggcggcagctccctgcaagccgtaccaacctttctctaattggaaccgcggagcgctggcgctgtctgggctgcggcggcgcagggcgaggaaggaaagtgggggagggcttttattattatttttgcgcgtacttaccgagctagccatgcc

SEQ ID NO: 6739 - DNA, 220 bp, Homo sapiens
  chr9:21031578-21031798
  hyper
aagggccccatgggccgccgccgccagggcttccagcgcggtccaggaaggagtaccggggaggaggcaggggcggccccgcggctgggcgcggaagggcggggcctctccacactcagcagtttacaaaaagaaaaagcccgaggtcgtgcgttggggaagagatgaaaacgaagttctcgaagtttctgcagcactgctagagcgcgtcagggcgcaa

SEQ ID NO: 6740 - DNA, 30 bp, Homo sapiens
  chr9:21335536-21335566
  hyper
ctgtgtggggtgggcgccagcccggcctct

SEQ ID NO: 6741 - DNA, 477 bp, Homo sapiens
  chr9:21395907-21396384
  hyper
gtggacagcactttgtaagctcgcttcctgattgttcatgattttcccctttctccgaattcgggtctttctccgcagaaatggccctgaatctctaacactgactacggcacgatctgattttgagccgtcagtcccctcaatacactggcacattggtaaaacggtctcgctaaaatgttccatgagaaaaatgtctcgggggaggcggcggtagagctctccctctgtagtcagagccgtgaaaggcggcgtttactcgctgctcacgaggcctgcggaccctaatccccaagcgcccgggcctccactctgcggaccccaagcgcgggtctccttgaggaaggggcgaccgcgggttagggtcgctggtgggtccgttaccgctggtccggcgccctctgtcggctgtttgtaacagcaaaggcagctttgtgcgctgttagcagtggtcgcgtgctcagtgtcactgctgtg

SEQ ID NO: 6742 - DNA, 896 bp, Homo sapiens
  chr9:21559194-21560090
  hyper
tttagggacagagagcgaacctgtgacttcgggccaggatgacgacctgagatttggacaagaggaggcggcggttccgcgaagagccaagggcggccggcgctccgggatgcgccggaccccgcggcgcatcctcgtttgggcgccaacgggcgccggcggtcctcggacccgggtgtcgactgccgtgtgcccactgccgtgtgcccaggccccgaagcctcctcaactccttgaggggcgcctccctagccagctcagcgcgcagcgggaccaaggctctcccagcttacctgcgggtccgagtaggaggacagaagcgccgcccggcctcgcccaagcgcacacgaaggggccgcttcccgccccccgcaccccagaccaggcggctcacggaacaccgcctcccagctctggcccgggaccaggcggtcccccagccggcttcggcgccgcggccggggacgcgcgtcttccttctccaggcgccggacgtggaacctgcgagcccctggcggcgccccaagttatgcacaggtcgcagctgctcaccaagctcctcctgggaggccgccctggtccccgagaggggcgcgcgggagtggacgttcccgcaccttcgccccatccacacctgccgccgccgccggggccgccagcgccgtggctccgccccggctccgcccctcgccgcccccggctcccgctccagccgccgccgcgaccgccgcggaaaggagggggagggaagaggcgcctggacggggctgcgggagcggccgtgctgagcctcctcccttgggcccggacgggacccaggtttctccactgcaacgcagctcccgagtgacggaattttgtgggggaagcggcggccactacgctcgcttttggca

SEQ ID NO: 6743 - DNA, 534 bp, Homo sapiens
  chr9:21964890-21965424
  hyper
aaaaaaaaaaaaaaaagttgttttctgctatttcctgaactttattacgtaaatgagacacgtgagatctggaaggaggtggaggtgaagaccctcccacctggcctgcatccagagtacttggggtgtggcactggcgtgggccccaggaaggatcccagccagttttggtgctggaggcccggccaaaggaagggctgctctcccgtcccgcgggctccgaggtcgccgcacccgggcgcgcctgggcctcgtcacccgcgctcgtgacgcgtgcttacaaaggaaacttttacaggtttcggtgggcagggccttttattgcccttctgctccacagcccccgtgcttaatcggttggttgggaggtttctttcgtccgtggttttggaaagtccccgcctccaaaccgcagtcccgcagtcagttctgcagcctcagggcctcgaacagccatgcttagaatccgtccttctttcctgctccatctacccttcccctctggcttcttttttttcactggagaaagcccac

SEQ ID NO: 6744 - DNA, 253 bp, Homo sapiens
  chr9:21965569-21965822
  hyper
cgcgtgggctttaacagcagatctccataaaagggtcccggagatagcctctgcctggcccgaggcccagtgcctcaaagcggacgcctttgcgctcccggaggtgctcacaccacagcggagcctgctggcgagtggagcgtaggactgcgaaccagcaatctcccgagaagcggcgagggggaggggaatgtctgtgaatcggttatccctcccacccccagcagaagtcggggaaatgggggtggaaggg

SEQ ID NO: 6745 - DNA, 30 bp, Homo sapiens
  chr9:21968218-21968248
  hyper
ctggttctttcaatcggggatgtctgcaga

SEQ ID NO: 6746 - DNA, 30 bp, Homo sapiens
  chr9:21971105-21971135
  hyper
gtcgtgcacgggtcgggtgagagtggcggg

SEQ ID NO: 6747 - DNA, 13 bp, Homo sapiens
  chr9:21974181-21974194
  hyper
cgcccggccgctt

SEQ ID NO: 6748 - DNA, 618 bp, Homo sapiens
  chr9:21974498-21975116
  hyper
aagcccccagggcgtcgccaggaggaggtctgtgattacaaaccccttctgaaaactccccaggaagcctcccctttttccggagaatcgaagcgctacctgattccaattcccctgcaaacttcgtcctccagagtcgcccgccatcccctgctcccgctgcagaccctctacccacctggatcggcctccgaccgtaactattcggtgcgttgggcagcgcccccgcctccagcagcgcccgcacctcctctacccgaccccgggccgcggccgtggccagccagtcagccgaaggctccatgctgctccccgccgccggctccatgctgctccccgccgcccgctgcctgctctccccctctccgcagccgccgagcgcacgcggtccgccccaccctctggtgaccagccagcccctcctctttcttcctccggtgctggcggaagagccccctccgaccctgtccctcaaatcctctggagggaccgcggtatctttccaggcaaggggacgccgtgagcgagtgctcggaggaggtgctattaactccgagcacttagcgaatgtggcacccctgaagtcgccccaggttgggtctcccccgggggcaccag

SEQ ID NO: 6749 - DNA, 418 bp, Homo sapiens
  chr9:21975190-21975608
  hyper
cgccctccggcctccctgctcccagccgcgctcccccgcctgccagcaaaggcgtgtttgagtgcgttcactctgttaaaaagaaatccgcccccgccccgtttccttcctccgcgatacaaccttcctaactgccaaattgaatcggggtgtttggtgtcatagggaaagtatggcttcttcttttaatcataagaaaaagcaaaactattctttcctagttgtgagagccccaccgagaatcgaaatcacctgtacgactagaaagtgtccccctaccccctcaacccttgattttcaggagcgcggggttcactaagtcagaaaccctagttcaaaggattccttttggagagtcggactgctctctccttcccctccccttcccctcctgcgtgtaaaacggctgtctggggca

SEQ ID NO: 6750 - DNA, 30 bp, Homo sapiens
  chr9:21994420-21994450
  hyper
cagactgggacccacgcaccgccccctgcc

SEQ ID NO: 6751 - DNA, 30 bp, Homo sapiens
  chr9:22008955-22008985
  hyper
gcagcccccagacgcgcagcggcccggata

SEQ ID NO: 6752 - DNA, 901 bp, Homo sapiens
  chr9:22446808-22447709
  hyper
ggcacaaaggcattaacttagcgcccggggtctctgccaggctcacgggacagctgcacctctcagcgtctccagctccaggacgcggtcgtcccaactccttccgagtggaaagagtgtaaaacttttgtccgtgcgcgggtggagctcagtaggaccacggcgcgtcctgccccggcttccccagcctcccagcagggttagctgcggtcagcgcactttccacttgggactcccggccagaaatttctcgggaatggagcggtcacagtgtggcagcagagaccgaggcgttagcggccgacctcacttggcccctgggctagtggtggctgcccctccgcccccgtccccggcgttgccggtaccatcggggatgcaggttcccccagcgttcctgcggccgcccagcctctttctgcgagcagcggccgcggccgccgccgccgctgccgccacctcgggaagcggaggctgcccgccggctcccgggctggagagcggggtaggcgcggtgggctgcggctacccgcggacgcccaagtgcgcccgctgtcgtaaccatggtgtggtgtcagcgctcaagggccacaagcgcttctgccgctggcgggactgcgcgtgtgccaagtgcaccctgatcgccgagcgccagcgcgtcatggccgcccaggtggcgctgcgcaggcagcaggcgcaggaggagagcgaagcccgggggctacagaggctcctgtgctcggggctctcctggccccccggtggtcgggcatccgggggcggcggcagagccgagaatccacagtccacgggcggccctgcggcgggggctgcgctgggactgggtgccttgagacaggccagtggttccgcgacccccgctttcgaagttttccagcaa

SEQ ID NO: 6753 - DNA, 436 bp, Homo sapiens
  chr9:27528667-27529103
  hyper
acaataggggaaacgcggagaaacaaaaggccattcgccacgatctcagtcggctgcgtagagagatctctgtggggagggttaggggagagggtcaggaaagagcgcgaggggggggatcccgagagatttagagtctctggtacttgccaggcaccaggggtcggcgctttaccctcccagcaggggtctgaaggtgggaaggggcaatcaaagaaaacttgaagggttttcaccttcttccccagttcagggaaagggaggggctgggattccagatgtttgacagttgttggccccaaagttaagcgcgatttgtacggcctttacacgctccccacctccgtgaggcatcgtcagccccgggggcgacctggctgacggtgcggacttcccctacgctgccccaagccgagactcctccctcaggatcagg

SEQ ID NO: 6754 - DNA, 764 bp, Homo sapiens
  chr9:27529157-27529921
  hyper
cgccacccacagcccaacacgcaccctgcaggcgtccgcggctggggatgggctcggagtcttgcaccccgaaagaaggacgatcttattgatttatatcttttcaaatcaaggacaaatcaagatcccggggtggaaagtgggcgacccttgttcctgccgggaagtgcacacgaggagccggccagaaacccaggcgccggcaggggtctgaagaggactccagccccggaagcccgtggccggcgggcagaagaccggtccgccgcctcccgcaccttcttgcacccgcgcccaggtgcgccccaaacctcgccgcccgcccgggcgagatcgggagcgagcagccaccgggctgcgccgcctcccctagcttggagcgggttcttactcaccgtggggttttacctccagcccagggcccggtcggctcccttcgccgggtcagctgcagccagcgcgaaagaaaatggtgagctcggggcaggtggggcgtcgcttgccaatccacgcaagggactctgccgccggtgcgcgaggtcccggcgagccaaccggcggacgggcgagcgcctggctccagctgcagccgccgtcgctccggagcagccccctcatgcacccagcgcgccgcgcagccggccggggctcgactgtctcgcggggacgccgagcggggacccctggcggccgcctgcggtatggcagcaccgtggagagaaaagtcgtctttgggatcatcttccctccggaaagagatggga

SEQ ID NO: 6755 - DNA, 30 bp, Homo sapiens
  chr9:29213127-29213157
  hyper
caccttcccggcacccggaagcctcccagc

SEQ ID NO: 6756 - DNA, 104 bp, Homo sapiens
  chr9:29213408-29213512
  hyper
tgggctgctgcagcgcgaaggtgtctacgctggggaaactttcaggggaggcagcgccggtgcggggctgggcgggcggcgggcggcggcgccaggtgaggagg

SEQ ID NO: 6757 - DNA, 40 bp, Homo sapiens
  chr9:29780379-29780419
  hyper
ggccatcgctattgtacggaggctgcgaaggccccatgat

SEQ ID NO: 6758 - DNA, 45 bp, Homo sapiens
  chr9:31254845-31254890
  hyper
gcaaaccatcgacattcgagaaattccagtcgtctttttcccagc

SEQ ID NO: 6759 - DNA, 125 bp, Homo sapiens
  chr9:32782810-32782935
  hyper
tagaagtgaaatcccggctccaaggtcaccctctcccgagcctggagctggaaagccacggggactccggggactcccccaaggcccggactagcctggcacccacccctcaccactaacccact

SEQ ID NO: 6760 - DNA, 137 bp, Homo sapiens
  chr9:32783083-32783220
  hyper
cgaggggttgagagaagggcggtcggggagcccctgggcctgccgtcagtcacccggatttgtaactggagaagggtgcgggtcccggagggacatctccagctggcacctaactcctcggatcccggactgggagc

SEQ ID NO: 6761 - DNA, 160 bp, Homo sapiens
  chr9:32783259-32783419
  hyper
cgaccctggtttccgactccggccactggcagcctcgcgccccagacccttcccgggcacggaagcgggtcaggtcgccctgctcagcctccggaacggcggcggcacaaaccccggccgctcccagcagccccgacgagaccccgggcagcgcctgccg

SEQ ID NO: 6762 - DNA, 39 bp, Homo sapiens
  chr9:32783590-32783629
  hyper
cgccgggctccgcttgcacagcaccgggaccgacgggca

SEQ ID NO: 6763 - DNA, 52 bp, Homo sapiens
  chr9:34377387-34377439
  hyper
ctcagctttccatacggaaaagtggtggcggaattccgcgagtatctcagct

SEQ ID NO: 6764 - DNA, 30 bp, Homo sapiens
  chr9:34379875-34379905
  hyper
ccccactgcagcaccgattcgggaaccccc

SEQ ID NO: 6765 - DNA, 42 bp, Homo sapiens
  chr9:34646960-34647002
  hyper
gcctctagctcctgagcgggacagggccgagagggcgctccc

SEQ ID NO: 6766 - DNA, 31 bp, Homo sapiens
  chr9:34647276-34647307
  hyper
tctgcaggctgggccacggggagtagttccc

SEQ ID NO: 6767 - DNA, 31 bp, Homo sapiens
  chr9:34996682-34996713
  hyper
gcacatagtcatcaagcgtggctggaaggaa

SEQ ID NO: 6768 - DNA, 34 bp, Homo sapiens
  chr9:35072283-35072317
  hyper
tggtcccggtgcgcgccgccgcagcaagcgaacg

SEQ ID NO: 6769 - DNA, 30 bp, Homo sapiens
  chr9:35111712-35111742
  hyper
cgcgacctcaagtgcgaggcacgccccctc

SEQ ID NO: 6770 - DNA, 30 bp, Homo sapiens
  chr9:35116510-35116540
  hyper
ggttggggctatctcgctgctttcgcaccg

SEQ ID NO: 6771 - DNA, 591 bp, Homo sapiens
  chr9:35161831-35162422
  hyper
agcttccttcaggatcgcaagaaagaaaggaggaaggggaccccgcctcctacgtgctcgcgggggggggcggggtcggtggactgggcgtgagttaattggctggggggcggggcaccacgggttggctccgcccaggcgctcgcgcggatcccgggtggaatgacgggagggagtcccggcagctcctacctcccagcgatggcgtcgctgtgccgcgcccagtccccagcctgccggccggtactcaccgctacccggagttcgctcagacggtgagatttggggcgggtccgaggcagcggcgggacgctacctgcgaccgggaccatgaggagctgccagacccgtggggccggtaacgagagcagtcgcggcacctgctgagaggaaagagggagcggtccggcgcggctggggcgcggcagaggcttgcccgatcctcggccatgtcactgctctgcgtgcgcggtgagtgcgcggactgaggcggggaggcggggtgtcggcgtagaggtccccgcacccttccagtggacgtccggtgaccgtctcacccaaactttacatcccgtccgtgctttgggggtc

SEQ ID NO: 6772 - DNA, 36 bp, Homo sapiens
  chr9:35489784-35489820
  hyper
cagcacccgggagccgcgcgtcgccaggcaccaccc

SEQ ID NO: 6773 - DNA, 30 bp, Homo sapiens
  chr9:35604300-35604330
  hyper
tcctacgtggagggcggaaccctcacactg

SEQ ID NO: 6774 - DNA, 30 bp, Homo sapiens
  chr9:35658761-35658791
  hyper
gcgggaccgccgggcgtggggatcccctga

SEQ ID NO: 6775 - DNA, 31 bp, Homo sapiens
  chr9:35700411-35700442
  hyper
tgagactatgagacagcgtagaactctgtgt

SEQ ID NO: 6776 - DNA, 30 bp, Homo sapiens
  chr9:35731623-35731653
  hyper
aacaagataatgaccgtaatctaaacctta

SEQ ID NO: 6777 - DNA, 912 bp, Homo sapiens
  chr9:35756560-35757472
  hyper
tggagcaggtggattcgaaggcctgtctagcacgagggcccaaaggtcttgtcagtggccagtagctctgccgcctttcccagagagggggtccaggggacatcctggaaggctgggccctgggccaccttctgctcttgcaagctagagccagcccaatagggggcggatgtgagtggggagctggggcgcatgaaggtgggggtgatgccgaaggggaagggatcgccagtggggattggtgcgtgtgcggaaacggggacagaagtgaaggttcatcgcctataacgaagatgaggtaggcatataggggcttctggaaagctagaggctgggctgagccaggagtcctctcccagaagttggggggcggtgcagaggtgtgggtcgagcccgcatgcgtgcctgctggggagggggtgagtggtgaggaccaggcccgctgggtcctgggggcgcggtggctggcgcgcaggtcccggagggggcggctggcgcgcactacacgcttgggaacaaggaaaacatccgccggaggcccggccgggcggcgctccagcctcggggcaggtgcgcggagaggaagtgagagcattccggcccccccaccccaaccccggccgctggccctctggtgagtcacagccgacccccgccgccggagggagaggggagctgcgggccagagccccggagggtctggaggagccaggagggtttctgggagcagagggtcacttagtgggcttctgtcgtggtgtcgctacgggcgcgaaacggacactgaacacagtctgactgtatggaggcaggtggggagggatcccctgggagaacttggcgggccgagagcagaccccagggcaaggaggggcccccgagggggaaaccgggagtcgggcaggtggcgta

SEQ ID NO: 6778 - DNA, 77 bp, Homo sapiens
  chr9:35814745-35814822
  hyper
cctcaccacacagccccggagcttgtgcctcggaggggcagaggccacaggcaggagctctgcgcggctctgcgcgc

SEQ ID NO: 6779 - DNA, 857 bp, Homo sapiens
  chr9:36036783-36037640
  hyper
caaagagccctggtacggggcacgttcccgcccccgggaggttttggaaacactgtgaggcagggggcggggcttgagcgggccgcagccagtcaccaaagggccgggcgctgggggcggggcctcgcgcgagcggcggcggtagcggcggcagcggctgcggccaagctgggtccgagcatcccgcggctctggagccgcccggcccggacatggcgaccgtccgggcctctctgcgaggtgcgctgctccttctgctggccgtggcgggggtcgcggaggtggcagggggcctggctccgggcagtgcgggtgagtaacctccagagcaacggttcgaagctgtcgggagcggccgccacagcgctccaagatggcgcggggcagggggcgggggtgcgcgcgacccccagaccctgcccacgtccggcgaccccgggaccccaggtctcagcgctccagaggctggtgccgaggcggggcgagtgaggaactctctccgccccaagatcttctgggcggtgactcgggtttgaggccttggtctgtcacccaccgacacgggccccctcttcggcactgaccccttcgcttgcctctgctgcttgtcagaaaagggtgcgatgcccccgcccaggatcgtcgcgaggtttagatgggatttcggatacgcagccgccctaccgcggccctagttagttattgttacttgttacttgacccgcacttggttcataacgaccttggtggcggtgagcactgacggtccccacagcccgcgtggtgggtcctggactcgggcaggagacattaaaaatcagtaaaccctgtcccccgggggctggcaggcttgagga

SEQ ID NO: 6780 - DNA, 232 bp, Homo sapiens
  chr9:36136545-36136777
  hyper
ggagccctcggcagtcgcggagctgcttcccaggggtgagctctccgggaggcccacggggtggccccgggcgcctccgccctcagctgtcgctccttataaggcgggggccgggcggcgccggaggaggggccgcggcatcagcccggtcctgggctctggggcggcgctgggccgggcgagcgcagtgcagcgcagccgcggggagcgaggagcgcgcggagccggccat

SEQ ID NO: 6781 - DNA, 30 bp, Homo sapiens
  chr9:36137117-36137147
  hyper
aacagctctcgctgcgaagcagtttgcccc

SEQ ID NO: 6782 - DNA, 31 bp, Homo sapiens
  chr9:36257375-36257406
  hyper
ggtttggcttcaactgcggcgctcctacagt

SEQ ID NO: 6783 - DNA, 722 bp, Homo sapiens
  chr9:36257923-36258645
  hyper
agcccagccttttcacgccaggacagctcgcctgccaggcagttctccaccctctctcgccccgccccgctcctaacgggacagtcagcatcccccctgattggacagcactgttccaggggacaagtcaacctgggcctccctctacatcccctcccctgctcatcagggcccaccccgagccacacggcggagccctgaattgggccaaagaggtgccctatggtgaggcctgcaggacattgggcgagagccgggtccagtgtgggcctcggggcgcggtggggtggaaagcggccggggaggggaggcctggggcaggaggccgggggaggcggccctgggggtgggcaggatgctctcccggagtcccacgccgccgcgcggctctcaccagacgccgtcagaggctccctcccacgccgccaccgcgctcctcgggcgagggacgaaccaagcgccacgaagcaggcagagcgcgagcctgcccctcggtttccgcgctcgggcgcgcgggtagacgactcgtcgctcgaccttgtccccactcctcgctcgcccagccacgcccacccggagtgccgaatccgcgatcgcgccctgacgccacccgagagagctcgcgtgattggctgctcccgtccccgtcccccaccttcccggcggtattttgaggcgcaggcagggtgctgaccagcggaccatcttccatggcctctgcc

SEQ ID NO: 6784 - DNA, 209 bp, Homo sapiens
  chr9:36258697-36258906
  hyper
cgtcctcctccactggcgacacacgcactgaagcccgagtcttcccgctgggtagttgttttggtcttgcacccaaggagggatttcttgcgcctcttgttccctcagttatttcataaaccaggaccgcaactatactgtcgtgtagcgcggccaccccacagcggtccctgacgttaacccttgccgtgactgctagaagacactgg

SEQ ID NO: 6785 - DNA, 61 bp, Homo sapiens
  chr9:36739811-36739872
  hyper
ggagcaggatttattagcagacaggatggggaagttgattagcctccgcggctgaacggac

SEQ ID NO: 6786 - DNA, 90 bp, Homo sapiens
  chr9:36748472-36748562
  hyper
ggacggcagcagctccggcccatacaaagcagcaccatggacagtggcagaccagcctgagaatgcctgccaccacgccagacacaaccg

SEQ ID NO: 6787 - DNA, 100 bp, Homo sapiens
  chr9:37002818-37002918
  hyper
cggcggaccggctgtcaccgcacgtgaggctgggggcggctgggagggagcgagcgcagggtgggcagggggcgctgaggaccctcgctctgcggaggcg

SEQ ID NO: 6788 - DNA, 944 bp, Homo sapiens
  chr9:37025407-37026351
  hyper
ggctgttgggatgggggggagcggggtgggaggaccaggcatggggacggctcctagcccgggagcaactccctgacctgaagcccgcagagaccccgagcggcacccgagccgaggctgccgaagcctgtcaccttcctccagcctggctctgcagcaaacagaaaggaaacgcgattcgttccacttggaatttccttgaaatctccgaatctaatccggcgttaactcaccgtgagaggagcgctcatctcacaggaggctgtggtaatgggtgaattggcaggatccctgcgggccaggcagccaggccggccttgccctcgccctaaatgacccttcccgtctcctacacacgctgcgtctttcagaggcgggggtgcctgcgtggtaactaattggcttcctctttctttctttctttttcgtttcttatcctctttttttaaaggggagaagccatgagaaaaggcgtcctgcagagaaggacccaatggggtctttaagggtctctgtatgaactggccggctcctaagcagaagctgaactcagaaaccgctacttccttgatttttcaaagccccctcctcaactccaggacgcctttggagccctagccccggtgtcctcgcttagctctcaacctcttcctccacacatacagacacgggtcagggccccactatccctccaagcgccagtctggatcagccccatggctgaaaaaggcgccatcggagtaggggtgtggggcgctgtctgagactctgactggcctctccctacaacttactgccctccaactggcctggcccggagccctctacgggtccaagccagggttctccgaaagagctgaaatgtcgccgccggagccttgaaaggctgcagctcgctgcccaagctacgcgttgccggaggcgggattcccaggtgcctcagc

SEQ ID NO: 6789 - DNA, 838 bp, Homo sapiens
  chr9:37026433-37027271
  hyper
cgagatccttccggccttagtacctgacccacggtccggcacccccaacccggtcccggcgggagagtgagagaagcgagctcgccgcctacttactatgcatggatgcaaacgggtcgtgcttacagtgtatttccatcggggcgctccagactgcaggccggcccacgccgccgcctcccggcgccaaggggctgcccagggcggatagggagcctcgccaccaggccaggcactgtgcgagctgggctcagaaaacactgctggagcttcggggtctctctcagagcctccctgctggagaccgcccggagctgcgcggagaggcgggaaatggtgctagcgcacccgggctaggagcgggtgcccaactccggctggcttccctccctggctggctcaagcagcagctccgggcccagcccggggtagctgcggccaaggcgcccgcggcttcgggggcatagcgtaggggcccgcctccgggacagccagcagcccccggccccaggaaggagcagctttgaggaggccgccggaacaatcggcccttgacttcactcagggggcggagagacccgggggctgccaggctggttccgcggcctcgatgcttctgaggtccctcctcgacccctcggtctccgccagatcctttctttctctgcttctccgagtctctggggctcggacttgccccctccgcctctctccaactggctctccgacgtctcggacgaagttgcaaagaacttcctctccggcagcgcggggtcctggcgggtttggagatgcttccgcccctgacgctggggccgcgactccggagtccccggga

SEQ ID NO: 6790 - DNA, 772 bp, Homo sapiens
  chr9:37027324-37028096
  hyper
cgctgctcgcccatcgctgggaccaggaacggggacaccagcgacggactcttcctcgccggggtgtctacctcgtgccaaccaactcttcgagccccgccgccctccctcgtgggtctgattccactgtctttccgctgcctcttccgggacggccgccgtgcctgccccaggcgtggagtgaggaacagaggagagagcagagggtcccagccaccaaggccgccggggctgccggggctgagatggagccgcagtcggctctgactgcctgcgttgccgccgccgccgccgtcgctagccctccgcctgctcggcgcgcacagtgcgccaccgcgccgccccggagccgctttcaggacccgctgcgtgtggacagcgccgcccggggctcagctccctccgggcgggggcggggcgggggctaacctgccaatcacgctccaccaagccaatcagagtggcgtcagccggccctggcccgaaacaccgccccattggctaagcagcccacaggctccgcctgattagcggacacctgggcaatgggagagaatggggggcggggcccaggcggcggcgccacgttcattgacaaacgcgctggactaaggcctagtggatcgcggctgtggggaggggaaaggggcccacgcagtgcctggagagtcccgctgcgggtcccacgcgggctggacctccccacagcgatgctgggatcctgggacgctctcaaggcttgagagcagtcgattgaagggtgagaatgggg

SEQ ID NO: 6791 - DNA, 174 bp, Homo sapiens
  chr9:37029443-37029617
  hyper
ggctgcagtgcgcgccggggtggagtggcggcgttatctcttctttgtctggaaccccgcctgtccggatcttcccctttcacccccggccttggagcaggaagatcgcaacagcagagagggactgggatggaatagacttcctgcactggcttcacccgatggcgcccagtg

SEQ ID NO: 6792 - DNA, 909 bp, Homo sapiens
  chr9:37029931-37030840
  hyper
gcgcctctccagagccgctctcgggatggtgggggaggggcgatgctgccaaatcgaagaactcggctggaatatgcccgcacacgcaggttttccttcggatacccgtgaggcttgcatagaatccccggggcacggcccgagcaggagtagcgccgattctccctttcacacagtaggtgttcggcttcgggacagtgttctgctgcgtggcacacacaggacccgtcttacctgtgcacccagagcagccccttcccgcaactctcggcgttcttgggggaaggagtttccctctggataggggtgattcatcaccgcccgagcgggcggcctctgggaagttccaaccccaaaaggcgcgaccggacctcataccgtgaccacctagcccagccttacaggtcaccaaacgacagcccagagaggttacgtgactagctcgaggctgcacagcaagtccatggtggagccgggctactgcgcctcagtcctgtctctgaacgcccacgagccgcagcctgggtccaggagagcgagactagcagctctcaccgcggctctcaacgcagtcgggcctcactctgatctacagtgatgcgctttctttctcccagtaacagggctttgggccgggccctgtgctaggcgctgggggcaggagaccgcgaaaggaaactatccaggaagaaactcaatttatgtgaaccgaattgcctttgaaagttttagtactgaaagacagcccattgagaataatgtgtgagaagccagagacctcgtttcactggggacacaccccctcccggcttccctttccacgcctcccagcgcactgcattaccgtggcttcaggatgtgggggctgctacagtgttctagtagcctgacatcgactctctcaaccca

SEQ ID NO: 6793 - DNA, 709 bp, Homo sapiens
  chr9:37034114-37034823
  hyper
tttttttttggtgccaggggccgctcacaggtcggaataattcaagccttccgctcccccgccgagctggggtagctgatcactgagctgaaactaaacgttttaggtggaaaaaaagcgtccgaaggcaccgtgaaatgattaaggaactaaagagcttctcgccatgtgagatcatgtcctgttctcgccaacatcacaagatgtccccagacacgccgcgcccccagcgcgccgccccacactgccggcccggagcgaggaaagggtaggcgctgcgcggccgggcctgctcagcgcgccagacgtggcggacccggcccggccggagtagagcgggaagccgggagagcagcagtgctgctgccgcgccgccccagacttttataggggttggggggagggaaggaaggcttcagcctgcgccgggcgctagccagcgcacctacgggaaggggcagaccgaagcggagcccgggagcccgggtcttccagccgcaccttctattaagacatgcgcttgggggtcgcggccctctgcgctgtgcgcggggcctgtgacatctccatgtgcaaaccccgctgcttagacgagcgcaggccgggtttttgtttttgaagaaattaactgctcggccaagcaggtgcttttgaaaggggttgcaaaggctggcagtgttgccaggcaccgaggcgacgttccggttta

SEQ ID NO: 6794 - DNA, 434 bp, Homo sapiens
  chr9:37035489-37035923
  hyper
gttttttggagggggtggtcacgaggctgggtcgcaacctagggggaagagcctagagctcgaggaaaggggggcccccggcggcaactggacatcacatatccactgagcagatttcgccacaatcggaaatgtggctgtggattcccgggcggcccccccaccaagtggtctgcgcagttccccagcgccgcctcctccctgcagcctgcgggcccgtgtccctaccccgagatttgatttttggccatctccgagtgctcgactctttccctccgcagcccagccccagcccaggcttcccgccctcccgcctcgcccgcgccgggaggcagcgcctgggaggagcggcctgtccgcgcctggagatcaaaagccctcccggaattgacatttcaccccgggctgggggcggggggtgttggtgttttgtt

SEQ ID NO: 6795 - DNA, 736 bp, Homo sapiens
  chr9:37036401-37037137
  hyper
gattagggaggggacatcagccgctactccgttcctgcccgcacccatgaagggcagaggattaggccaagcatcacgaatcgtaggttcgccgtgctccgccgcttcgcgctctggacgctcgagaccagcgggaaacaaatgtggttcccgagggggcgcccgctggtcgtcaaaacctcgcgggcccggaggcgccgctgctgggtcagaatcgcagagcccccctcgcggggtaccgaggcccagccgccgtccccttgcccaccctctcccctgtgagtcggtctccccttgcgcctggccagcatgcttcggaccgtccggactcccgcagcgttggcccaaggggcggctcccctcggcggagcaggtgacgaaccacttcggaggacacggaattgacactgcggccctagagatacgggacaaggggccagaacgcggggagtctaggctcagatcggagtcgggatcccgggaaaatcccccatctcccttgcccgcagccctagaatcccagaaacccaactccgcgcagctttcggtttggagagcccgccctggtttgcaagcacagatacatgtgcccacacccgaacacacgcagacaccgccagagagcgagacagcgagcgggcgcctccgtagcagcggcctgcggggcggaaccggagctggcgccgcctcaaggggaaaccgaactgtagtgaccggaaatgtccccaggacagaa

SEQ ID NO: 6796 - DNA, 505 bp, Homo sapiens
  chr9:37037753-37038258
  hyper
cggccccggagctagcgcagagcgtgggtgggagtcgacatccaggcaggaggcaaagaagaggccccgccctaaagccgagggcccagttcttcgaaagcctgtggccggagctggactcacaggattcggggtccgtacagcgcgcacgtggtaccgcatcttcggcaggcggcgcccctaatgcccagccccgccctgcttcgtttgccgggcctgaactgtgtcagcattgagggtggacgccgagtcgcggcgagttggtcccttgcggtataaacttggggcttccctaggggcggtgccgggatggatgggggcgcctctccacctgcaactcccccagcgcagagcgcaaaaagtgcacatcgcgggccagccgtcgcctcggggtttcaggcggcgcccggggcaaaaaggagctgaggattggtttgggtcaaaacacccatttcagttggcagtggggtcctctgcgcctacagggcttcgagctccgggtgcg

SEQ ID NO: 6797 - DNA, 30 bp, Homo sapiens
  chr9:37651060-37651090
  hyper
cttgtccgcgcgggcggcacctcctctgca

SEQ ID NO: 6798 - DNA, 1235 bp, Homo sapiens
  chr9:38067638-38068873
  hyper
gccagaaggactgactgggtccgtcttcctggggcaaggctgggccgggcgctctcgctcagaggggacgttctggaagcagcggcgaaagaggtggggtcaggaggccgccggtcccaggaaaagggcgcgggaggaggcagaagcgggaagcagcacgccagccccgacccagggtcctaggccgaagctgaagtagagactcaacaccagagcggcgggtgcctcggtttccccgtgcgcaccgtggctctggaacctcgggaagaggccaaggggcaccttaccttgtccttcttgccggccccgctctcctccgcggctgaggcggcgcacttgttgagcagtttcttgcctccgcaggccgtcgggctccaggtgcggccgcccgcgcaggcgccccccagggggtccccggccccaccgcccgcggcgctctccactttgatgaggcggtgcttgggggagatgtagcgcacctcggccggcgtggcgggccgccgctcgctgctgctgcggtagagatgcggagagccggaggacgaggacgaggacgcggcggcccccgcgcccgaggaggcgcagcaacagcccgcggcgcccgacgcggacgaggccgagaaggcgcgctggaccccgcctggctccccgctgccgccgcagtagtccaggcggcacatggcgcgcagtttgcgcagcgacgagccaggcccgttgtaggggtcctcgaagtctcgctccttctgcgcgcggtaggcgcggatgaggtcgctggtgctgccgctgtcgtcgggcagcgagcccgaagaggctgagaagcaggaggcggtggccggaccgcaggacgccgaggcggcggaggaggcctgcggcacggcctgggggggctgcgaaggccgctcgcctcggcgccgctgctcgcggtagtctggccgcggcggctgcggggggctcttggtcttgctgttgcccaagctgaagtacttgtttagccacttggccatggcgagaggccgcctagggccgcggcgcgggagcccggtccgccgccgcggccattcggggggcagcgctgcggcgcaggtccctcggcgccccggccccggcggggggcgtccggggcgcccgctcccgacgccaagttcaagttcttgccgccgccgcctcctgccggcagctctctggctccggcggctgcaacacctccctccgcctagcgccgcccaagctaggaa

SEQ ID NO: 6799 - DNA, 30 bp, Homo sapiens
  chr9:38069944-38069974
  hyper
acctctgaggaagtcgaggctttagccctg

SEQ ID NO: 6800 - DNA, 356 bp, Homo sapiens
  chr9:38620038-38620394
  hyper
gcggccccctcccaccgcgggctgagtccccgagctacctgtcttttctgtcgcgggcgtccaagtcccggaacctgcgcgtcaggcagcgctccacctccgcggcgtcgcccttgatggcagccctgtggatcttccgcagttcccagtcccgaatgtcgtaacccggacccgcatactcttggtccatggagctcaggagcgcctggcccaggcgtctcccgaagctgaagagcttcctcatggtggcgacttctcagacgcccaccacccgctcctgagccgcggcggctcctcgtggcctttccacccccactccgccccaaatccgcgatctcccccgcaacccgcgatcc

SEQ ID NO: 6801 - DNA, 479 bp, Homo sapiens
  chr9:38620605-38621084
  hyper
tgccagttaggcgcgcgcctacaactcagcgccagccgggactccggaagccgctcccaagccctcgtggccggcagggggcacctgcagcacgggcgcacgcgtcgctggcttgcgggttctcctgggctcccgcgggacgtcccggaatcccaggagtgcatcccttcccgcctgagggcctgcctggccctgactcccgacccgctcctcctccgaagagagatcggggccgctgacaggggccctccgcagccaccggggatgggactggggggtcggttcctgtcccggtgcagccgccgccgggtagaccgcctggcttggccgcagccagggcgacatgtagccccggttctgccaggctgggagcgccagccatcttgggagttgccaggcagctgtcgccagcaggtagagggcgcctgcagcttgggcgcccaggtggtggagcacggcctaggcggcctctggatcgc

SEQ ID NO: 6802 - DNA, 15 bp, Homo sapiens
  chr9:38621394-38621409
  hyper
cgcgcccagcctgag

SEQ ID NO: 6803 - DNA, 30 bp, Homo sapiens
  chr9:68433449-68433479
  hyper
aaatgtcatcattaccttgatcatttcttc

SEQ ID NO: 6804 - DNA, 30 bp, Homo sapiens
  chr9:69197684-69197714
  hyper
agtgtggggggcgggcgggggtaaggggcc

SEQ ID NO: 6805 - DNA, 23 bp, Homo sapiens
  chr9:70152212-70152235
  hyper
caaaaagccgtggcagcgagggg

SEQ ID NO: 6806 - DNA, 36 bp, Homo sapiens
  chr9:71320185-71320221
  hyper
caccaagcgggaacccgcgcccgagcccggcgggcg

SEQ ID NO: 6807 - DNA, 645 bp, Homo sapiens
  chr9:71788615-71789260
  hyper
aactttgaggttttcccagttcgactcttcgtaggagaactgaagctgcctgtgtgaggccctgcgaacctcgccaaaaagtcttcctacaggatgcccccgcgacctcaccggggaaacaccgcggacagtcgggccagcagcgcccggagctcactccaggtctccaaacttgcagcacttcccagagcgcgcgcgctcggagcgggacctgcttgctccagtgcacgccgcggagcgaaccatcgggctggcgggggtggaggggtgcaggcgtgggggctgcgggccgctcgggccttgggcttctcctgccgccgccgccgcctcccgcccccggccaggagtcgcgcgtgacgcggttcgccgcaggagcctcgaaggcgcggcgccggcgagcccttccccggcaggcgcgtgggtggtagcggccaatttgacagtttcccgggccgggcggccagcgcggaggcgccacgctcgggtcgggggcgggctgacgccgccgccgccgcgggaggagggacaaaggggtgggtccccgcgggtcggcaccccggcggttgggctgcgggtcagagcactgtccggtggtgcccaggaggagtaggagcaggagcagaagcagaagcggggtccggagct

SEQ ID NO: 6808 - DNA, 312 bp, Homo sapiens
  chr9:71789452-71789764
  hyper
cgccgtaggaagctgggattctcccatccggacgtgggacgcaggggaggggtaggtttcaccgtccgggctgatgactcgtggcctccggggctcctggaacctttactctgaagtcacttgggctggagattaaggcgcgagtaggggacactgtcttgaacccggtgtcctggatttctgctggcttggaggcatctcgtgtctgttgtgtcgcttgcatgtctttgtgttttccttctctatttcaaaccacactcggtattgatgcaaagttacaggcttgtgtacgtgagagaaactgaaaactca

SEQ ID NO: 6809 - DNA, 67 bp, Homo sapiens
  chr9:71939792-71939859
  hyper
gactctcggtggccggcgctgacgtgtcctggccgtgaggtgcctcccacctcgagggacttactta

SEQ ID NO: 6810 - DNA, 100 bp, Homo sapiens
  chr9:71940263-71940363
  hyper
cgtggctgggctttcgggtgggccgcaggccgggggcccgggcgccgctgccgccgccgctcaggagccgccgctgcccccgctgcggccgcgctggccc

SEQ ID NO: 6811 - DNA, 31 bp, Homo sapiens
  chr9:72374873-72374904
  hyper
gttcgggcgcgcctccgcgtgagccgggccg

SEQ ID NO: 6812 - DNA, 1378 bp, Homo sapiens
  chr9:73027516-73028894
  hyper
ctccccgcgaagccacgcaccgcactcgctctgcccgccagtttaaggctctccgtggctcccggaggccggggacaattaaggagagagtgagctttccgccaatgcacatttaaattatttaaagagttaaaccgcatcttatccaacatgtttgcaccctttcggccgagtgcagtgtcccgaacgcccaggaacgctgcctggccaaaggttaactaaccccagagctccgggggagagggcgacgccgctaacctgtatgcactctgtaatgggctttgagatgggaggattttccatagactttcccacagccactgtaggggcacttgtgcctcttttcggaggcgtgtttccccttcgcagccactccaggatggaggagggagagcgggctgggcgcgctgccaggatcctgtctctcctccgggctgtgggaaggactcgacccagattcggtggtcacgtcgctgtcggatcccatatcctcatctggactttccagactgtcgctgcacacggagggggtctggatgggtcggtacttgttcaggtccaacaagctcttggcgatggtgaccagtgtgcagtaatccttccaggtgtcccccgggtcaccgtgctccttggtcacctcgcgctcaggtagtcgcagccgctcggcgtccggagcgaccccatgctccggcaccgcagcgcggttcgaaatggaaaccagacactgggcagccacgaagtccatgtaggcggccgcggacatggtgcgggcgacggcagcccaggcggcgcggacaaacttggcggtggctgcggaggttcggctcgccctgccctggcctcggacgacgagcgcggcgcggcgcggcacggcgcggcggccaagggggcgggggcgcggggcgcttccgactcgcaggagcgccgaggcgacctcagcccctcatctttacgtaaccggcagcgcctccgcacgcagcatccacggccccgggctccgccgcgccgccgcctctagccgccgcccctgccccgcgccggccgcgatcccccgacgggcgcgccggcccctctgagccggctcccttggaaagatgccacacgtggcggtcgcaagtttattcgactgaaaacgcccccgaggcgctgggagaggaaactgcaagagaggtgcacgccctcggccgcctcgccgtcgagccaaagccccaggacattcacccgatcaccccgacgcgggtggcgagggtcccgccgagcgccaggtctaagagacactttttcccgagtccactgacggcttctgaacccctgctccggccggtccgcaccgttccggcattctcttgctcagtaacaatttcgcagaatcccatca

SEQ ID NO: 6813 - DNA, 266 bp, Homo sapiens
  chr9:74061492-74061758
  hyper
caccatggaaagggctcaagtcgcgtgcgaagggagaaaagaaagcaaagactggggctctcccccggccactcaccggcgtctgctgcgacgggagtcccgagcgtttggtggacccctgcttggaacttaaccttttccacgactcggcaaacctgccccggctggcgctccggctgcgtctgcggctctccgcgttgtcctcgcggtcggagcagccccgctccatttccgccgcatccctccacttcttccccatgagaagt

SEQ ID NO: 6814 - DNA, 330 bp, Homo sapiens
  chr9:74061787-74062117
  hyper
cgccgagcgctctcgctggctcctcgccgcgggtctccctccagcctgcgcgcggctctcggttggcgctgcctttgcctccgccggctcctgccagagccccgcgctccgttaccgccgccgccaccaggctgcgcttgcgcccgcgattggctcaactgtgggctggggctgcgagcgccacctgcgcccgagccagctttcttttgcgtccccaaattgctctccacccggcagccgccgccttctctggagagtgcagggcccacgcctgaggctgttgatgcgccgcagggtagcgctcccagcggtcacctcaccctgcccagg

SEQ ID NO: 6815 - DNA, 651 bp, Homo sapiens
  chr9:74764291-74764942
  hyper
ggtagggagccagcccctgggcgcggcctgcagggtaccggcaaccgcccgggtaagcgggggcaggacaaggccggagcctgtgtccgcccggcagccgcccgcagctgcagagagtcccgctgcgtctccgccgcgtgcgccctcctcgaccagcagacccgcgctgcgctccgccgctgacatgtgtgccgctcagatgccgcccctggcgcacatcttccgagggacgttcgtccactccacctggacctgccccatggaggtgctgcgggatcacctcctcggcgtgagcgacagcggcaaagtaagcaggcgcggggtcgagcgcactccgacgggcgggaggataggtgcaaggaacctggcgcggtgcttcgcgtagcccggggttcgctcggtgcgcagtgagcgccgcggctccggagttgaacttgagtctttggctcttgggcaacgcagagagaaccctggcgctaggttcgtgggctggctggggagttcccagaagtcgggagcagtggcgtgctaacgccacaactggctcgacagcagtccgggctgcggtagagccgggagcaaggatgtcaccccccgctcccccgccccccgttccaatcctaagataccggcaataatcttcaatcttgc

SEQ ID NO: 6816 - DNA, 50 bp, Homo sapiens
  chr9:74979546-74979596
  hyper
ttcactcccgcccccggcccggcaacaaggagcccggctcccacccgcag

SEQ ID NO: 6817 - DNA, 317 bp, Homo sapiens
  chr9:77111757-77112074
  hyper
aacacccaaaccacctgcccacggaaacccccgccggagaccgaagtttacccaaatagcgctcggcaaagcgctgccataaattcaaaactaactctgccgggcccgcgggggttgcgagacagggaccgaacgtgaaacccggggagccccgcgtctcttgcctccgaaggttttccgtgatcagtgtccccttctctgctggagtcggaagtgcctgtcacctgcggatctgcccgactctcccggtcggcccttcttctctgcccagttcggacagtctcgaattccccgtcgcagccccggccacctcggac

SEQ ID NO: 6818 - DNA, 81 bp, Homo sapiens
  chr9:77112311-77112392
  hyper
tcacattgtggatccgctaacaggcacagatgtcatgtgaaaacgcacatgctctgccatccacaccgcctttctttcttt

SEQ ID NO: 6819 - DNA, 640 bp, Homo sapiens
  chr9:77112700-77113340
  hyper
ctgttaacatagcggcggcggcggcaaacgtcaccctgcagccacggcgtccgcctaaagggatggttttctcggcagagcagctcttcgccgaccaccttcttcactcgtgctgagcgggatttttgggctctccggggttcgggctgggagcagcttcatgactacgcggagcgggagagcggccacaccatgcgaggtaagcgagtctgcgggcaccgaggctccccgagtccggccaactccagccagacggggagatgggggaggggagggcacccagcagaaagggaaagaggttgcccaggcgcagttccccgaattcgctctcgcaggtggggctgcaaatggcctgggcgtagaaagttgcgggaaggtgttgatgtctttcgggagttctggagggacgcgggagggcgcttttttggagaggggagacaggctagttggttcttaccagtccttgagttgcactgaatcttttttgcttgtcgctctcgggtgcggaagcggacgcgggatggagaaagccgaaagagggatgcctctggacaggagcagtttggaagcgcccggcgcgcagtggtcgccggccgggtttgggcgcgcggggcgcaccggccgggggcagggtggacac

SEQ ID NO: 6820 - DNA, 150 bp, Homo sapiens
  chr9:77113558-77113708
  hyper
cggcccagggagtagtgcgaccccggaaaagttgtaatgagaaagttctggaggcttggaaaggccacactgctcacagtcggagagtcatgggctccggctcttttgtcagataaagggccggtagtggaaggaggtgctggtgcaccc

SEQ ID NO: 6821 - DNA, 481 bp, Homo sapiens
  chr9:77113805-77114286
  hyper
cgttacgcttgctccggctggactctgggcctctcgaagggctggagggtgggtttcggggagtcacttggtctcctctcctgccttgccggagacctcaggtttccttcgcgctgtgctcggcctttcttcactcttttactgaagagccaggcgggtgtccgcttgacatggggatctgtgcaagctctgggcacccacccccactcccagtccctcttcctggccacacagcggttaatcgggggctcttctctatccttcgcacgtacccctgggtcttgacaacagaaagttagtaacggccagctccagaccttcttgcatcccagacccggagagaggtggtctaggcagggagcacttgggagagttgggatgcaatcactggtctcctccttccactgaaagtgatcctctcccacccagtccccctacgcccctagaggagcaccccaggaggcagcgggtctcactccca

SEQ ID NO: 6822 - DNA, 473 bp, Homo sapiens
  chr9:77502037-77502510
  hyper
tgcgccatatgccagcggtggagaggagccagcggggactcctgaggttgcaagtccgggcggcgccgcgttggggaaggaagcggactgcggcggggcgggtgtttaccgtaaccggcgctgtcatcgctccgggactcctgcacggggaacactgggcgcacggggacgcgcaggggcgcggagggacggccgtctgggcacttctccagccgcctcggaaagccgcgacccccggctagtcagcgtccgggtctgagatctgtgcccgtggcagctcaaaacgcgccttctctcctccggattctcagctcaagccacctccgaactcctctccctccggcccggagcggaatcagagctgcctcctctcccggggtgtttcccaccgccccgagctgaacccccgacccccgctaggtttccgctctgacaccacctccgctatggccgcatcccagctcttgaaacgg

SEQ ID NO: 6823 - DNA, 30 bp, Homo sapiens
  chr9:77566826-77566856
  hyper
ccttttacggagcgcggcgctgacgccgca

SEQ ID NO: 6824 - DNA, 31 bp, Homo sapiens
  chr9:78505087-78505118
  hyper
gtgtggtagcttctcccgggagcagaaagtg

SEQ ID NO: 6825 - DNA, 343 bp, Homo sapiens
  chr9:78505465-78505808
  hyper
agcgcctggctgcggccgctttcaagagggcggaggagggagaggaggagggcgatgtgggaaaggaggggtgttaaggggggcgggggaagtcatttatgcagagcaggagctgctgccattgccactcagaatcctcgcgcgctgctcggagccggagggagcgctgggagcgagcaagcgagcgtttggagcccgggccagcagagggggcgcccggtcgctgcctgtaccgctcccgctggtcatctccgccgcgctcgggggccccgggaggagcgagaccgagtcggagagtccgggagccaagccgggcgaaacccaactgcggaggacgcccgcc

SEQ ID NO: 6826 - DNA, 211 bp, Homo sapiens
  chr9:78507337-78507548
  hyper
tctttggggttggccggaggggcgggccctggctgggctcaggcgagaatccgctggaatgggaggtgaggatgatggatggcgcctttccagcaggcgcgctttggggactgcccggggtgcacgcaccctgcgtgctctgccagggggaagggagagggaggtgctggctggtgccggcggagtgggagagtacggacagtttctgagg

SEQ ID NO: 6827 - DNA, 552 bp, Homo sapiens
  chr9:79520866-79521418
  hyper
aaaattcttccatgtcgtggctaggggtttggaacccgggtactcggaggggcgcagtggaaaatctcggcccaaggaagacgagcggggtcccgggaaagtggcccgccggggcgcagcgaccgactgctccctcctgccgctctgaggcggctgcggcggaggctgtgcttgcgccctcgaccgtctcgcccagggctccccgccccacccctcgcccggccgccggctctgggcacccgactctgccctaataaggaaagtgggtgtgccgcccaggagccccggggcgcgccgggcacgctctctggcacgcgcctcgggcgccgtggcgcgtgggcggaggtgcaggggtatggcgaggggctcctccgccaatcgcagggccgtgctgcggcctcctgacgtggcgcgccgaaagctgctgcaaccatggacagcgcccagaagtgcgagccaagtgcaaggggctgctgcagagggaggctctgccgcaggcaccgccgcggtcagcgggggaaggtgggaagagggagacgggtcccaggagag

SEQ ID NO: 6828 - DNA, 554 bp, Homo sapiens
  chr9:79626870-79627424
  hyper
gcctggcatttctagaagtgccgctaccccaggaaactcacatctctccacctccatcgctgtgcggagaaaacccgcaccgaaggcggcttcctctctaaggcggcgaccaggggagacagcgccccctgctgactaaaatcacgcaggcctcgttgccaaagtgcagcgggcgcagcgggcgcagcggtctcccggcttccctcccggcgcccgcagcctgcctaaagcctttctggaaactcgtgttttcagcctcagcctggcagactgcggagggcgggccaggaagagtcaaggagccgggggtctcagactttgctcaccccttggaaatcaccttctcgacccgctagcctaggccgagacacagtctgtattctgaaagccgccagtcccaccaggggaggagaaacccaaaacagaaggagcagggccccacggctgggctcgtgacgaagcatttaatgacctttttaaggaaacgagggaggaggtgaggaggccaacagccgcttaggagagcccgaaacgagcaggctggaggagttagg

SEQ ID NO: 6829 - DNA, 136 bp, Homo sapiens
  chr9:79628804-79628940
  hyper
ctacctaaacagacacggcccgtaggaaagcttctggatgttggccaagaggtgtgaggcgcgggtggactgtaaaggggaaattgctctgctagggtgacacaaacgcttcccatctccacgctgattgcgcgcc

SEQ ID NO: 6830 - DNA, 184 bp, Homo sapiens
  chr9:79629207-79629391
  hyper
cggctcagacaacccagccagtctcgcccgcgagcggaggtgctagaaactttgggggacgaaagctgggctgtctttcttggccggtggcactgcgagagaaagccgtgtgcaccccgcggctgaccactccaacgccagatacatccacccgctcatgtaccgccgtcgggcttcattttgt

SEQ ID NO: 6831 - DNA, 720 bp, Homo sapiens
  chr9:79629770-79630490
  hyper
ttcccttctgccctccaccctcgggcattccgaaaagtcaaatcgagcttatgcactcaaatccaagtagggcggagccaaacctgtgtcctgggcgcctgccgggcaaggcgcggggactggacgggtcggaaacggggcagggatgcacttcgcagagatgtcaggtcgggttggtgacgctggaggcgacggattcctaaaacgttataaggggttgacgggtggcgctgctgccctgcagcgtccccagctgcgcagctcctgagctccccgctccgagcgcccagacccccagcgccactccaccgtcgagatcacagcttcaaacctcaactccttggagccttcgaaggcgcagttctgactactgagtatttcctggaaagaaaaagaagcccaaagcggtgaaatgatgcctccagggtcatccaggcctggactcgagctggaagccacgtttccgagtcctggggctggctttctcctaccctcttcaaatccactttaggagtttcgtctgggaaaagtatgcgccgagaagtcagccgaaggtcaggcaagtgccaggctagcgtgaccaggaaggctcctgggaggaccccaaacgtaactaacccaggcaaccttccgcacgtcagctaagtcagtgcgtaaagggagaacccatggaaattgagatgtgcgcctaaacctttgccttttttctagcgctgtacg

SEQ ID NO: 6832 - DNA, 1641 bp, Homo sapiens
  chr9:79630723-79632364
  hyper
ttcctagcatagcgtcgccaacaattgcctaaggggtaaaccaaatacgcctgagataattacactaagcccggggcaatgatttgcctgccagcgtcctgagcgccagccaatatttggatagtgcagtagttgtttaaaaacaacaaaaaaaaattactcgcggaaacttgaaaccgactggttggtgccagggtggttacacgatctgtttttcttgagagggggtctgcaggcagctggagcgcgcgcgttccggcccccgccggtgccactgagcgcctgcaaaacttgtcggaattaacctccggggaagtaggggaagaggagagcgcgcccccctccccaccgcggccccagctctgcaccccggcccagtgccgcgcttggaatcccccaggatcctccgcggcggccgcagcccgccactctccaaaacagacacgcgacccgagctccctgtctgcgctctaggcagcaattgcggcctgggccgccgcgtccggctgtggcctaggtggtgggaagtactttctaccctcgccaagcacaacctgaatgcggaagcgtgaggctcggggcgcttcgctcagcctccgagactgttttgtcccaggttgcgtggaacctggctcgccgaggccgaagacactggccaagcccctggcgtcccctggcgctgaacctgaggttgtggcggcgggtctgcgggctgtagcgagctcacccagtgagggcctggctcattttttgtgctcagggttcgcgttatgcgcccaagatttgtcccgggagtccctgaagggcccctcccctcgatcggttcccaggagccgcaagtgcccaacgggcacggtcccagagctgctccccaaaaggagactctgctgttccagcaacccgcggaagggatgctatccgaggtatcaacaaaagatccctttgctcgagctgcgtgtggggtcgaagtccggagagcccttaagtgtgcggcacgcagagctcctcagcagcggcctgacagcggtgcaggagaccccagcttcctgggctgggacagggctgttgtctcacggtcttgttccaaggaaaaggagccacctggctccagcaggctcttgtcaaactgtgagcgtccttggaattctgtggcttcccgaggccaagaggctgtccgctgctcggctctctcaagtgtctcagcggacaaaaatcgcgcagaaactcctatggcaggaggaaagcttccgacatacagtgaaagagaaaacatcttactttgaaaagggcttaggaccaagaagctgctcttttccccgggccttcttgcaagcttcagtcgtaacatctattctcagacgtcttctggcctaggacaaactggccacatagagctagccagaaatctagctcctgactaaagatggaaattacgggcctgacccgctcacggcactcctgcgacctggctaagccaccccacggacagacgtgctcccaccgtccagctcaccaaaagccagaagctgaaaacacccgatctggtgtcaccaaggttgctagttagggggcagccccccaagcagctgggccgatggctttcttccaggttaggcgtgggaaaaccgagggagccatagt

SEQ ID NO: 6833 - DNA, 747 bp, Homo sapiens
  chr9:79633305-79634052
  hyper
agtgtcctgttccccctccaccgtgcttggtggcccgggtggggcgcagctgcgggaaatgcacccggagctgtgccccctcccggcgaacagcctgcgccacccgccgcaccgggaggtggctgggggctgccgagcgagtggtgaacgcgatgggtggagagcgcccgaaacgaggtggaaaagggggcgggggcgaggcacggcgccttcttgccccttcttcagctacagacgcggcggcggcggctgagtccctcagcctcggtcatgtgatagtctcgaagcgctagctgcgggggtctcggcgtctcggggaccattacaaaacgcagccaggagagcgcgtcgctgccactgccgtcgcctctcctcctcaagacaagcccgggagaaaggcggcagctgcggcgcggacggctgagcctccccggccagcactcacccagcattcgcagacgccctctccagcccgccgctcgctcccagagtcctgcgccccacactcctcagcagaacctgcgggcgctgccgcttcagaaaccaccaaagttttttctcctcagcgacagcctagggctgcgcgtctcttctaaccccggcgacgctgcgagcctcggagaaaagagaggcgccctagaagccaatcttctctctccttaccctgatttttcactccaggaaaaggagaactccagcgcggtctggctaagtgcctggccaggggcctgcgtccagggcactgga

SEQ ID NO: 6834 - DNA, 68 bp, Homo sapiens
  chr9:79635380-79635448
  hyper
gccattgagaacattattggccgggactacaagggcgtgctgcaggctggagggctgcccttggcgtc

SEQ ID NO: 6835 - DNA, 305 bp, Homo sapiens
  chr9:79635745-79636050
  hyper
ggcgccatccaccgtgtgctccgcggccgcggcctcgcccgttgcctctctgctggagcccacagcccctacctcggccgaaagcaagggcggctccttgcactcggtgctagtgcactcctaggggacccggcgggcgtggggagaccagcggggtgagagacgccgggcccggaaccgcccaaaccacccgacggggagagggcgccctggtcaggccgggcagagctggcgagtctcagcctttgctggaacggaaggtatttaaatagacgaacaaccccgaaaagtggattctccagtgg

SEQ ID NO: 6836 - DNA, 200 bp, Homo sapiens
  chr9:79636290-79636490
  hyper
agagtgacgctgaaacggatctcagccaccacgtttctctctgctggtcgcatcctcggcggtcgcctctcgtgaacattcaagacaaaactgccgtccactaaggaaatttcgttttatttaagaaggaaaagaggaagcgtttgataccgttattttcctagtcagctaaatgggcaaggaaacggtgtcatgaataa

SEQ ID NO: 6837 - DNA, 385 bp, Homo sapiens
  chr9:79636847-79637232
  hyper
aatgcaggaaaaactcggcacatcactcgacaatattgctcttaacgcttgcagaaacgttccatggctgttcccttccagtctcctcggacggaagcaaggggaccacccagtcacctttgcacgctgcggctgtttttgtattccgtgtgctgtttgagcgcttatgtctttcaggcgaattaattcttcagtttcaattcgtgaatgggaaagaaacttgccttgtcgctcttgcccttcccccctcttgagccccagggaatagcactttactcgcgacacaattttgggaatggaggggggcagagtggggagaaatccgctttgccctttggctctaagtcacctccgcctcttgtccgcgccgcgttcgggttgtgac

SEQ ID NO: 6838 - DNA, 220 bp, Homo sapiens
  chr9:79637668-79637888
  hyper
tgtccgtttcctaattgaacttaagtccaccaccatggtagagactgaattagcaaaaacccgcaacagtgcgtttttcctgtcaccactatccgtcacctctctcccattttgaggtcctcgactaccatctaaggccaggaactcggtgtcagcggggtgggtgcccgacggcgcccccttaagtctgcggtcctggacggaggcagccgggttggcg

SEQ ID NO: 6839 - DNA, 53 bp, Homo sapiens
  chr9:79638136-79638189
  hyper
gctggggcctgggaagccgcgtcccggcctccgccctccaccctttagcacag

SEQ ID NO: 6840 - DNA, 30 bp, Homo sapiens
  chr9:80263369-80263399
  hyper
acgagcagggggcgcggagctgggggtggg

SEQ ID NO: 6841 - DNA, 1870 bp, Homo sapiens
  chr9:80645774-80647644
  hyper
ccgacccctgtgctgcgtgtgtgtgtcgctgtgtgtgtgtgtgtgtgtgtgtgtgtgtgtgtctgtgtgtaacgcgcccgcgcgcccgcgcgggtgaaggcagtggccgggggcgcgcccgggagggtaggggcgaaccgcgggcgccggggggcgggggcgccgaaggcagctgccccgcagggccaaggatggtgggctgggggcgcagaggcccggcggggccccggacggtactcaccgagcagcagcagcttgagctcccggcgggcgtcccgcttgtccctgcggagctgccgctcgatctcgtcgttgatccgccgggcttccttggcctcctcgctcaggcagcacgccatgatggactccagagtcattcttccaaagtgcctccgctgcagccccgccggcaccccctgctcacagcgcgcacacacaccctcccgccctcgctcccccgaggcagcggtggccgccgagcccccgccgcccgggcgcgcgtccgggacgagctccgggaaccgccgcgggggcggcggccagggccggggccaccaggtgggccgggggcgcggtgggagcggatagtctgggccgacgggagaagagaggcgggcgcgggaggcgggcgctggctcggggggcgcgtgagagaaggccgccgcgcccggcctcgctcagacgcccgcgcctccttccccgggaacaggcggcccgcctcgccccccgagccgccgccgccgccgccgcctgcgaggctcccctacgccgtgcgcctggcggcgagagctcattcaccggggtgtccccgcagcgagcggccgccgacggctccccgcgcccggcgcgcccgctcctcgccgccgcctgacacggctcccgggcgccctcggccctgtccgcgcccaccgcccggctcgcgcgcagacccggttcccgtcccgcccggcaaccgcgcgctcctccgcctccgcctccgcccccgcccccgccagacgcccaccccctgccccgattgccaggcgcggagcggctgctcagtgcgagccctccccctcgccacacacacacattttcttctttctctgaactggagcacagatccgggagggaggaggcggcggcgaaaggaggaggaggaagaggcggaggggatgggcgcgggaggagggagccgggaggcggtgccgcccggcccctcctggaaggctttcctgggctcgcggccgccgcggcgcgcctcccagtgcggctctcgcctcgcccgcgcggctcccgggctgggccggcccccgcgggctctgcggacgcctactgctcccgcaccctcggcagagtccgcgggcgcagcagtcacggccgcccccggccgaagtcggggccagacccggccgccgacgcgcagcccgagccggcggccgccgttgcgtgccagggccgcagccgacctgcggctgccgtccggccgggcgtggtgagacaggaatatggcggcctctgcctgcctcagcccaccggcccgggagcgcggccgcggcccctgctgaagtcgcgggaggcggccccgcggagccccgcacgcgctccctgcggcgccggcgctggcgtccgccgctcccgggctgtgcctgtctgctccacggggtcgctcctcagccgtttctgtgtttcccgttcctatttctaaaacgccattcggttagaaactctcacgtcacctctgacaccggtgcagtcttagaaaataagctcctctatactgtgtggggctactggggaagggaagggaaggaattggcaccggtgcccagaggtgtagggggagattcacaggcgaagctgttcgcaaagtaacgtgagatagaaatct

SEQ ID NO: 6842 - DNA, 1061 bp, Homo sapiens
  chr9:80911703-80912764
  hyper
ctggggttggaggactggaaccggccagattgcgggctcaaggggcgaaggcaggttggcaggggcagcctcttcccgccgcccacaatcctcgggcgggcgcgcagccgagccggctcggctggctggcgcaatctcgcgcgctccttgcattgatcaaaaatgggggttgaaacagtaaacgcgaggaggagcaactgcttcgactcggctcagaagcgcgaccaatggggatgtgagctccttcgcgcgaaccaattagcgcagggcctgcgacagcacgggccaatggggcgccgactcggcgcaggaacaaggcgggggttcggggccggctgcagactctcaccgcagcggccaggaacgccagccgttcacgcgttcggtcctccttggctgactcaccgccctggccgccgcaccatggacgcccccaggcaggtggtcaactttgggcctggtcccgccaagctgccgcactcagtaagtccccgcgagcgggcgccgggagtgaggttcaggcgggagcacgcacgcgggtgggtttgcatccctgcgtgtggcagtcggattcccgctccctgccttgagtcccctaggcgctttgcatcagcgtgcacagcgggatcagcagctccggcaagcgggcttcgggaagaatgcagttggtgaggaagctcggcgaggcgtgcccgtgcagctgcccctggccctgactgctggtgcgaggcagtgcacgactcagctggccggggcctgctgtcccgccggtgccacgcacctgcagacgcccgggctgtgccatctcctgggccggtccgggggctggggcggggcgaaaaagaaaaagctctgatctctgccttcgcctcgcgcagctgtgcggcgagcccgggcagtgtggagcggatgcatgaatggacatagtgtgaatgagtgatgaacgggaatgaaccgatgacaggttttgcatatgcagtggatcacgttagctgaaagggattgcaaacttaaaggtccgcgtgtgcgtgcccccctacgccttacaccagtgtttgctt

SEQ ID NO: 6843 - DNA, 178 bp, Homo sapiens
  chr9:82185550-82185728
  hyper
gagcgggaaaaagaggcgcagtcttggtactgatctgggggagggaacgtcccagggcgcgcaggggcgttttctacccgtgccccgtcggcctgctctgttcagtaccgaccgtgttcggggttcacgtggcccagtcggcaaagtttctttggaggtccagcgtctctgattcccg

SEQ ID NO: 6844 - DNA, 30 bp, Homo sapiens
  chr9:82839233-82839263
  hyper
taaacttctcatagcttaatgggtaggttt

SEQ ID NO: 6845 - DNA, 632 bp, Homo sapiens
  chr9:84302533-84303165
  hyper
ggcttctaaagaggctcggaagctcttcccagtctccagggcggattgcgctaagtgcgcccgggtcaccaggccaaagggaagggggctccccggcggccagggaagaccaggccagattgtcggtgtcgccgccccttcccccacggcggcgataatgaccccggggaccagaggagaaaaacaactcctttacgctccccattcccagagtcgccggggccacctccagacgcaccggaaccggggccgcattgacatgtaaataggcgagaggagaaacaaaggggggggcgccctgcccccactcggggaaggtagaggggatatggctgcaggagagaaaccccagccttccccagcgcccctgtccgctcggtatagacgtcaagtaggaaggagcccaaagggagggagaaaattaagagtttcggcccactccccaccccaggaagagagggccccagacctccccagccttacaccgctgagggcgagaaggtccgccgggcctcagaagccaccagtctccctaccgcccgggagaagcgcctccccaacgatcctggccccccaccaccacccagccgcgcctcaccgggtgccggctctgcgggaacatcgctctggcg

SEQ ID NO: 6846 - DNA, 213 bp, Homo sapiens
  chr9:84303267-84303480
  hyper
cgcgctggccacgcacgcgcgctccgccgggcgcaccggccactcggcgcccgcagctgctccggctcccgctcccgtcggtgcgggctccggccctcagggccacattagtgggcgccccaggcccagctgcttcaagaacctgcgcggagacgtcgggcgctcggggactgtgcgcgggggcagcgctccaacccccggcctcagctgccc

SEQ ID NO: 6847 - DNA, 161 bp, Homo sapiens
  chr9:84303778-84303939
  hyper
agcggaggctcctggccggggagcgacggatgacgaggcggggaaagtgcggagggcgcgccgggaggcggctcggcacgccccgtgcgaccagcactcggtgttctccgcggttgcacaaaccctccgggcccgacggggctactccaccgagagcagtc

SEQ ID NO: 6848 - DNA, 31 bp, Homo sapiens
  chr9:85834937-85834968
  hyper
cagaacaaagaatccacgcttgtaaagcaat

SEQ ID NO: 6849 - DNA, 51 bp, Homo sapiens
  chr9:86152890-86152941
  hyper
cccccaatcccctccgggagtgggttccttgttctcgcatgcccaccgcaa

SEQ ID NO: 6850 - DNA, 91 bp, Homo sapiens
  chr9:86238305-86238396
  hyper
cagcctgctcgcggggcgcccatcctgggaccgcatccgagctccgggttcccgctctaagacggggaggctgcggcgaccgcaggctcag

SEQ ID NO: 6851 - DNA, 31 bp, Homo sapiens
  chr9:86238614-86238645
  hyper
attttggaaagtgaatcgttttccccttcct

SEQ ID NO: 6852 - DNA, 25 bp, Homo sapiens
  chr9:86536018-86536043
  hyper
cggaaggggcgctctgcctctagtc

SEQ ID NO: 6853 - DNA, 526 bp, Homo sapiens
  chr9:86755526-86756052
  hyper
cacctggctccccaggcaaagcggccccgccaggacgggcacggcttcgcgtcctcgctcaagtccccgatgatggccgcgtcccggcaggcacggtgcgaattgactggggtttgggggaaacgaaagccccgaaggggccttctctgccaaatgtcttcttccgtcggctcgatggcagcccccaagcctttcattttcaatgtatgaaaacactggggtggatttagcttttcctttgggaaacaaacaaacaaaaaagaacacaaagagcgtgtgtgcgggtcttctttcaaaatagtggggcatttgaaacccgcgctgcagctgcgggcgctgcttcaatcgcaagcgttttgttttctgaaagcgctttaaaagatgctgaagaggaagagagcgagcgccctgcgcattttcggaaacggaagattttgaaaacctgtatttatccgcccttcgcaaaaaatcagcttctctagggcgagcctttccaaccttttccgtcagggcacacagaaaatga

SEQ ID NO: 6854 - DNA, 30 bp, Homo sapiens
  chr9:86886583-86886613
  hyper
ggttcgaggacgcctcgtctgttgctatgg

SEQ ID NO: 6855 - DNA, 1014 bp, Homo sapiens
  chr9:87282938-87283952
  hyper
tgggtgctgtccaagaattcccgcggttacactcagcgcccaggatctgtacaaaaaagccccaatagatgttttacgttcccttcgtaatatttaacgcttggcctagatccgagcattcactctaacgttcggtttcttgatccttcccatccccaaactctgcgggtagatcagtgactattactatattttgaacgagactccaacccattgctctctcgagagagaaggattgcccgcctttttcccccgggcaggagctcggcgaggccaggagagccgcgcaccggccgggcagggacgcgcaggcgtcgggcgccgctggttgcgcatctggcgccagagcgcgcccccagcgctgtgcccgccgcgacccgggccatgggctggtgctccggagcgtgccgggcgctctctccccgcgcgggggcaccagagccctcggaagtgtcaggcactgcggtgtattttccccgttctcttttaaatgactgcggaaaaacagattccgagccgcaaaagggaagacggattctcagacaaggcttgcaaatgccccgcagccatcatttaactgcacccgcagaatagttacggtttgtcacccgaccctcccggatcgcctaatttgtccctagtgagaccccgaggctctgcccgcgcctggcttcttcgtagctggatgcatatcgtgctccgggcagcgcgggcgcagggcacgcgttcgcgcacaccctagcacacatgaacacgcgcaaggtacggcaggggagcaagggcttgggatgccctacgtgggggtgggcatcgcggggagtgaatccacgatctgggaatggctacatcccgtcaggttaaaggatgagagaaaatgacgcggcgccacacatcggacaggccagggtggccaccgagcatttagaatacgcatcaggcgcgctcccttcccctcacatgtctctatttcccgggcgtgtgatggcagaaaacggcaggaaaaagacccactta

SEQ ID NO: 6856 - DNA, 590 bp, Homo sapiens
  chr9:87284605-87285195
  hyper
ggagtttctgcccctgctctgcgtcagccctcacgtcacttcgccagcagtagcagaggcggcggcggcggctcccggaattgggttggagcaggagcctcgctggctgcttcgctcgcgctctacgcgctcagtccccggcggtagcaggagcctggacccaggcgccgccggcgggcgtgaggcgccggagcccgggtgagcagcgcagatagtgccctcggtcgcctcggccctcactgtctccccctggggcggcctcggctactccccaggtgggacgtgccgcgccacctgcccgcgccaccggcacccagcggccgtggcggattctgcagcatcattcgggggccccgtcgcggagccaaagccgccggcagtctccgcattcccctttaaagggtccttcgcccggcctgtaccatggaatcctgtcttggggaccctttccctacctcccctcccttggcctcaggctcgaagagagagtgggcacactggtggctccagcggcgtcagtgccatcgcggggcaagttgattcctgggccggagctgggcactcatccatccacagtctccgggctgggg

SEQ ID NO: 6857 - DNA, 260 bp, Homo sapiens
  chr9:87285272-87285532
  hyper
cgtgtctgtttgtcctcagcctcgaggtgcataccggacccccattcgcatctaacaaggaatctgcgccccagagagtcccgggagcgccgccggtcggtgcccggcgcgccgggccatgcagcgacggccgccgcggagctccgagcagcggtagcgcccccctgtaaagcggttcgctatgccggggccactgtgaaccctgccgcctgccggaacactcttcgctccggaccagctcagcctctgataagctggac

SEQ ID NO: 6858 - DNA, 170 bp, Homo sapiens
  chr9:87285554-87285724
  hyper
cgaggagttaagagagccgcaagcgcagggaaggcctccccgcacgggtgggggaaagcggccggtgcagcgcggggacaggcactcgggctggcactggctgctagggatgtcgtcctggataaggtggcatggacccgccatggcgcggctctggggcttctgctggc

SEQ ID NO: 6859 - DNA, 198 bp, Homo sapiens
  chr9:88137527-88137725
  hyper
gggagtgcctgccggcgttctcgtctgtccctacttcatccttcctctctcactgtcttacagcaaaggactacagcaaaggcgcgttcagcgcctgcgcggccaggcccggggtgctgggttgcggcttcccgcgggtaaaccctgtcggtacccgatccccgtccgcggaaggccaggagaacgcggttccccttc

SEQ ID NO: 6860 - DNA, 112 bp, Homo sapiens
  chr9:88137874-88137986
  hyper
cgcgcgatcgccctgtgcgcgcaggagtgacaggcgccccagctcgcgctctccagcccgccagggcccggctttggcagacccgaggctcctcacccgccctgagggacgg

SEQ ID NO: 6861 - DNA, 145 bp, Homo sapiens
  chr9:89560563-89560708
  hyper
ctgtcccaagccacaggtgcccggcgcggggtcgaggcgagcacgggagtgggacgcgggctctcccgcagccaacggcggggggcgcgagggctaaaagagcggcccaagcagcagcagcaagatggaggcgagtggggtccag

SEQ ID NO: 6862 - DNA, 1047 bp, Homo sapiens
  chr9:89560739-89561786
  hyper
cgctgctcctgcgcccaggcccatagggcaggtccccgcggccgcccgatgcagcagcgccgctgcccgggcgcggtgggtgcgggacgccgtcgtcgtcgtccagcggctgctcaccacccgcgcccccggtgcgctgctcgtcatcgtagtcctcatcgtagtagtcgtccaggcccccgtccgagccgctgctgccggggccgttgcccagctcggcgccgaagcacaggcgggccatgttctccttgaccgactcgcagatgggccgctcgaggccgtcgcacacgcagtcgttgagcagcgccgccttgggcatagccagcatgtcctcaatgacggtgcggcattcgtccgtgcagcgcagcccgttgaagactttgccgcagtaggtcaggtagcggctcagcgccaggttgcagcggctgtcgcggtcgcagcgccgccgggcctcggtgcagcccatgaccccgcccgcgccggggccgcccgcgccgccgccgctcgtccggggcaggcacggctcaatggcgcgcttggtggacttgcagttctcgtcctgcgcgcagtcacagtcctccagggcgggcccgcggcgcgtgtggttgagctgaatgagggccgagatgcagtgactcgggcagcgccagcgcgacgagaaagaggcggccgaggccgggaaagcggcggcggcggccccgggcgcgtcgcccccgccgtgctgcgccagcaccggcgcgcacgcctcggcgtactggttgtaggcgtagctgcactccggctccccctggcactgcagcagcgcctgccagcagatgaggcggcggccgtgcgccagccccgatccccgcggcgccgagcccagcagctgcagcagcgccatcaggcacagccaggcgcccggcactgtccccccgcgggcctcgccgccgccgcccagcagcgcggccaccatcgcgggcagcggcggccgccgggagaggaggggaaaggagacgaggcgcggggagcggcggacgcggagccggtggaaaagtttgtccaagt

SEQ ID NO: 6863 - DNA, 1254 bp, Homo sapiens
  chr9:90112493-90113747
  hyper
agcaatgtgtcacaggtggggcgcccgcgttccgggcggacgcactggctccccggccggcgtgggtgtggggcgagtgggtgtgtgcggggtgtgcgcggtagagcgcgccagcgagcccggagcgcggagctgggaggagcagcgagcgccgcgcagaacccgcagcgccggcctggcagggcagctcggaggtgggtgggccgcgccgccagcccgcttgcagggtccccattggccgcctgccggccgccctccgcccaaaaggcggcaaggagccgagaggctgcttcggagtgtgaggaggacagccggaccgagccaacgccggggactttgttccctccgcggaggggactcggcaactcgcagcggcagggtctggggccggcgcctgggagggatctgcgccccccactcactccctagctgtgttcccgccgccgccccggctagtctccggcgctggcgcctatggtcggcctccgacagcgctccggagggaccgggggagctcccaggcgcccgggtgagtagccaggcgcggctccccggtccccccgacccccggcgccagcttttgctttcccagccagggcgcggtggggtttgtccgggcagtgcctcgagcaactgggaaggccaaggcggagggaaacttggcttcggggagaagtgcgatcgcagccgggaggcttccccagccccgcgggccgggtgagaacaggtggcgccggcccgaccaggcgctttgtgtcggggcgcgaggatctggagcgaactgctgcgcctcggtgggccgctcccttccctcccttgctcccccgggcggccgcacgccgggtcggccgggtaacggagagggagtcgccaggaatgtggctctggggactgcctcgctcggggaaggggagagggtggccacggtgttaggagaggcgcgggagccgagaggtggcgcgggggtgccaccgttgccgcaggctggagagagattgctcccagtgaggcgcgtaccgtctgggcgagggcttcattcttccgcggcgtccctggaggtgggaaagctgggtgggcatgtgtgcagagaaaggggaggcggggaggccagtcacttccggagccggttctgatcccaacagaccgcccagcgtttggggacgccgacctcggggtgccgtggtgcccggccccacgcgcgcgcggggctgaggggtcgggggcgtccctggccgcccagctttaacaaagggt

SEQ ID NO: 6864 - DNA, 30 bp, Homo sapiens
  chr9:90202143-90202173
  hyper
agcattttacatcgacgttaataataacgg

SEQ ID NO: 6865 - DNA, 30 bp, Homo sapiens
  chr9:90282276-90282306
  hyper
ggcaattttgcctcctcccccagcaattgc

SEQ ID NO: 6866 - DNA, 723 bp, Homo sapiens
  chr9:90340839-90341562
  hyper
ccaggtccactgaggcaggcacgcccagctctgggacagtcagtaaacaagccacgaaccgcgccagggatcagagcacccagagtccccgcccagctgccggcacagccaatcgcagcgcagccaggcggcggggcggtgccggccgaacccagacccgaggttttagaagcagagtcaggcgaagctgggccagaaccgcgacctccgcaaccttgagcggcatccgtggagtgcgcctgcgcagctacgaccgcagcaggaaagcgccgccggccaggcccagctgtggccggacagggactggaagagaggacgcggtcgagtaggtgtgcaccagccctggcaacgagagcgtctaccccgaactctgctggccttgaggtggggaagccggggagggcagttgaggaccccgcggaggcgcgtgactggttgagcgggcaggccagcctccgagccgggtggacacaggtaccgcagccaggccgcgccgcgccgactcagggcctggcccggccagacagggaagctcagtccccgcacgccagacagcggtactcctgctggcgtcaccgcaaacatcctctgaccgctacagccagtgtgtggcgcaggcgtcatgtccccggccctgccacgcctggagccctggaagctggctgcagggcgctggcttcccgcgtgcggccatatgaccccgtccctgatttaggggagcag

SEQ ID NO: 6867 - DNA, 140 bp, Homo sapiens
  chr9:90589515-90589655
  hyper
aacggaagctgcgtcgagtcaggggtgacagctccgggccccactgcgccttttcctagccctccgctgtcacgcagcagcaagcttaatcccgcataaaaaacgcatgcgccgagagcgtgcccgcagcagggcccacg

SEQ ID NO: 6868 - DNA, 46 bp, Homo sapiens
  chr9:90691227-90691273
  hyper
gctccagcagcctccacgcctagagggctgcgcgtccgggatcgca

SEQ ID NO: 6869 - DNA, 62 bp, Homo sapiens
  chr9:91002759-91002821
  hyper
ggtgagccggcgacgacgccggcctctacgcagtgcggtggtgaagacgtctcttccaggga

SEQ ID NO: 6870 - DNA, 30 bp, Homo sapiens
  chr9:91149031-91149061
  hyper
ctgcgggacacctgcggcggggcccggcag

SEQ ID NO: 6871 - DNA, 117 bp, Homo sapiens
  chr9:91150522-91150639
  hyper
ggcgcggcggcccgcgcccttcgaagtggtcttcgtgtcagccgacggcagctcccaggagatgctggacttcatgcgcgagctgcatggcgcctggctggcgctgcccttccacga

SEQ ID NO: 6872 - DNA, 30 bp, Homo sapiens
  chr9:91793633-91793663
  hyper
tgcctctgatggagcgcccagctgcttggg

SEQ ID NO: 6873 - DNA, 30 bp, Homo sapiens
  chr9:91926234-91926264
  hyper
gacaagtacttcgacgaacactacgagtac

SEQ ID NO: 6874 - DNA, 31 bp, Homo sapiens
  chr9:92112685-92112716
  hyper
ggctcctgcaggggttcggggagggccccga

SEQ ID NO: 6875 - DNA, 31 bp, Homo sapiens
  chr9:92762428-92762459
  hyper
ctaaggcgctgagcagcgttaggcactcaaa

SEQ ID NO: 6876 - DNA, 31 bp, Homo sapiens
  chr9:92859700-92859731
  hyper
acactagggatggaaccgagaggccactcag

SEQ ID NO: 6877 - DNA, 30 bp, Homo sapiens
  chr9:93564324-93564354
  hyper
ggttccgccagcttcgctcctgaacctacc

SEQ ID NO: 6878 - DNA, 1020 bp, Homo sapiens
  chr9:93955556-93956576
  hyper
ctgacccgcccgcaccgctgggctatttttagcgtccactaaacttagccgactccaccctcttgaataacccacatcttaaaatgctatttttctccaacaggtcaaaagaattctgcgagttagagcgcagattaagttgctagcgacgggcattgaaggttttagaaccgagaaaatgagccggtggcggggagcgcgtcctcagcggccaggcccggcacggggctcgggcactcggggacacacggtggtcgtcgctgtgtctcagcaggaccctgtgcgctggagagcttggggccgcgagtcgcgcagcaaggaggcttctggcttctctatttttagcctctgaacgttttccaaaataattaccaaaaggaaatacacacgcacacatggacctaacacacaaaacgtccttctgcgggaagccagcactaggaaagaaaaaaaaaaaaatccgaagtgaaattatgacacagggttttgtaacccgcggtggcgcgcttctgaaacccgagcccggcagcggcttcttatctgcaccgcgttccaggaagcagccggcgtttcggccgcgcaagggcagccgccgcacgtaggcagcgtcccccagcccgggacccgcaggaatgcgaggggcaagacagatcgccggaggagcaggggtcagaagtcagtgtttaaccactcactggctttcggtgaagccagaatgttagcagcgagtcgcggtcgggggccttggggttgcacacgcttgctccaagcaccgaggctcagctgagcacatgcacaaccctctcgatgcagcggaaagtcgtgtggcttagggccgcaccccgaatttcgccgcacccgccgctgtgccatttacaaccccccaccccgccactgctgtcacgtagcaatcaagagtaaaggttatcacaaagtctgttcttcgaaggaaagagttggaatcaaggacttcggacgggaggaagttggtaagttaccgcttcctccctcctgttttcc

SEQ ID NO: 6879 - DNA, 446 bp, Homo sapiens
  chr9:94183543-94183989
  hyper
ctggctcccgcggcccgggcgaacccagagcgcacccgtacgccggccccggccggtccctagcgcccgggctccacgggccgcgcccccacgcggcgcctcccagagaccctcctccctccgggtgggcggcgcagcggggcctcggcgccgcgaggaccccccgcgccagaacaaaggaatgtggggagggggcagggaggagctcaggccactgagcagccccagtataactgccgttcggaggcgcttctcggtcccgacccgaggtccccgcccgccactaccagacccgcccccagccccggattctcgcagaccccaccggcccgcaggagggagcggcgcactgggggccgcacggactcgccattggagatcgcgatcggaaggtggcgccacgcggcccctacaggcctgggactcccacccgagctcgcaaagta

SEQ ID NO: 6880 - DNA, 39 bp, Homo sapiens
  chr9:94662836-94662875
  hyper
aaagcagccaaggaggcgggaaaacgacaagcttctgga

SEQ ID NO: 6881 - DNA, 540 bp, Homo sapiens
  chr9:94711539-94712079
  hyper
caaaagggatgccaaagagcccgtttccatcaagcggcccgcgggctgggaaagtcaggacccgggagccgccggcgcccccacccccgccgcaagagccgcttctccggggccacgtccaccccaggattctgccaggcatcaggccgccctgggggtggggggacgctccgagacagacgggggacactcggggccgtgtgcccttgaaggaggaagacctcggggaggaagcccgggtcctgggaccctcggggcacatctgcggactcgggtcccgggcccagggcgggtactcacattcacactcgcactcccactcgcgaccctcgggaagcgccaccgagaggctcccagccgccgccgcccgcccccagactctggaaacacttaggcgtccccagagcgcggcttattgtaaccagcccgagggggtccggggtgcgggccgggagcggcgtcgggcgagatgcgaatggccctgcctggcgcccctcgttcaggagcatgggcgccggcgcagcggccgggagcatagtg

SEQ ID NO: 6882 - DNA, 157 bp, Homo sapiens
  chr9:94712294-94712451
  hyper
cggggtcgggcgccaccacccctttctacgatgcgtccgctcctccttctccctggcgcttcgcaaacgggtccacttcgaggacctcgtcgtcgtcctcttctccggcccggatgcgccgctcggctccggccacggcaagggctggctggggagg

SEQ ID NO: 6883 - DNA, 549 bp, Homo sapiens
  chr9:95570232-95570781
  hyper
gctgcaggagctccgcgtctgctgcttctccgacgccagggcgccgccaggatgacaggtgcaggagactgtggctgtgggcagatgtggtttccagccccaggtccccgcggcccctggcttcccagcgcgctgtcctgtgagcaagaagatgaaaaaagccacccgatcaacaggtcagctgccccgcctggcagcccagccagacaaggcaaccgaagttcatcctctctgagttgacttcgtgcgggcagcgggccggcgcccaggatgctggggagccctgcgcgccggaggccgacaagccgtggggctcagaggcgcctcagggcgagaaggcacccgtctcccagcgctttcaccccctggcctgcccggcccgcgtggtgtcccagtggctgcggccacgccaggcattctgccccgcggcggctgcacagggacgagaactgagaacccctgctcaaccccatccggggtgactgccaaatgcctatgccagcggccccgatctccctccggtggaggagtggggggagacacggcctg

SEQ ID NO: 6884 - DNA, 788 bp, Homo sapiens
  chr9:95570893-95571681
  hyper
ggcaatccccgagcccgcccgcactccccgcatctcaaaaccggggctagaggtccctgtagctgcggccaagccaggcggtctgccctgcggcggctgcacaggggcaggaaccggccctcagacccaaccccggtggctgcagagggccactggctagaggtccccagctccagcagaggaggagctgggcgggggcagggcctggcgggctctcaggccaggtgcactcgcgatctagaggcagcccaggccattctccaccacctgggcgcccaagctgcaggcgccctctacctgctggcaacagctgcctggccactcccaagctggctggcgctcccaagcctcgcagaaccggggctagatgtcgccgtggctgcggccaagcccggcggtctgcccggcggcggctgcaccgtggctggaaccgaccccccagtcccatcccccatggctacggagggcccctgtcagcggccccgatctctctttggaggaggagcggggcgggagtcacggccaggagggccctcaggccggaagggatgcacgtctgcgattccgagacgtcccgcgcgagcccaggagaacccgcaagccagcagcgcctgcgcccgagctgcagcagccccctgcaggccacgcgggctcgggagcggtttccggagtccgagctggcgctgagctgcaggcgcgagcctaaaggcttagccggggcccacgctgtctgagagatcggagcgttcagctacaggcacgcgcttaacggcttcgtggagctcact

SEQ ID NO: 6885 - DNA, 82 bp, Homo sapiens
  chr9:95571740-95571822
  hyper
gatcgcggattctgagctacatcgcgggtttggtggtggatcttggatttgggggtggatcgcgggtttgggggtggatctt

SEQ ID NO: 6886 - DNA, 30 bp, Homo sapiens
  chr9:95820739-95820769
  hyper
agccacgcgtgcaacgccccggagtagcaa

SEQ ID NO: 6887 - DNA, 30 bp, Homo sapiens
  chr9:95857689-95857719
  hyper
tccaaggggtggggcgcgaggccgggagcg

SEQ ID NO: 6888 - DNA, 30 bp, Homo sapiens
  chr9:95897000-95897030
  hyper
ctgattgcgggccacgctgacacagggctt

SEQ ID NO: 6889 - DNA, 1198 bp, Homo sapiens
  chr9:95946251-95947449
  hyper
cagaggacaggagcgctacctcgagcaaagaaccgcgggtgggagcccaggtagccggcccgcaggtggccgcgcgcgcctgccagtcagccagcccgtccgcagccaggtgggcgtgccaggcccagccccctgcgccggtccggggcggggcgaacggagccccgccctccccgcgcgccgggtcggagccggtgcgggagcggagccgcgcgaagccggcaggagcacgcgggagcgcggccccgcagtggcccggcccgagagagcagcgcgcaggagctggagcggcgccacggcccccaccccagcgcggacctcgcccggaactcggaccccgtcctcgaagcgtgatctctcccgcctcgcacgccctggccgccgggccgcgggcatggacggcgtccgctcgccctgtgagtgccgagcctcccctcaacgccgctcgccgcctttgtgtgcgcgccgcggcgctgcagccccctccccgcgcgcccctcccgcgccccgggcccgcgtcctttgtggagccgccgccgggccactgccttcctcccacccccgggcttccctatcccctttacagctgcctccgggacagcctagcagaaccctcctgggccagggctgggcagggcgcgagatccctctgccggcctccggggccctcagggacaccctagcaggtcctctctcccagggttccagggacaccacaggcccgtccctctccgcagcctggggctgagcagggcacggacccctcctccccaacccaagcctctggtcccgtctgcagcccccctttcccagggcccccagagacggcccccgcaggctctctccgcggccggggctgggcaggttgcgggcttagggcggcgttgtctcatccggcggcctgggcaggtgcggcagggccggcgctcacgcgggcctgtgtgtccttggcccacagagatggacggcgatggcggccgccgagacgtccccggcacgctgatggagcccgggcgcggcgcggggcccgcgggcatggcggagcctcgggcgaaggcggcgcggccggggccccagcgctttctgcggcgcagcgtggtagagtcggaccaggaggagccgccgggcttggaggcagccgaggcgccgggcccgcagcccccgcagcccctgcagcgccgggtgcttctgctctgca

SEQ ID NO: 6890 - DNA, 30 bp, Homo sapiens
  chr9:96214528-96214558
  hyper
ggcagggcaacgagcgccagacggcacagc

SEQ ID NO: 6891 - DNA, 1 bp, Homo sapiens
  chr9:96588738-96588739
  hyper
g

SEQ ID NO: 6892 - DNA, 45 bp, Homo sapiens
  chr9:96588857-96588902
  hyper
cggggcgggttgccgcccctcccgggagtacgggcggaggcaggg

SEQ ID NO: 6893 - DNA, 158 bp, Homo sapiens
  chr9:96710135-96710293
  hyper
ccccgcccagcggagcgaggagtcccagctcccttacctccctacagtggggttggggaggtggcatttgagaagttttccttcagctcggagatctggccccgggctgagctgggagggagggtgggggctgtaggtgggaccgctggggaacccag

SEQ ID NO: 6894 - DNA, 587 bp, Homo sapiens
  chr9:96710859-96711446
  hyper
tgtgcgtggagcccgcggtaagctggaatatccaagccagctgcaagtggccttccgttccccacacgcctcctgcgtgctgggcccagctgggcgccgcccaaatcttctctctcccgagactctccagctccccttctactgaccaggagaacgtcttgctccggccaggatcacaccagtggagaagcgaccccctcccccatcccgggccggggcccttctgacaagcctccccaaggactccctcattccccaggccaccttgaacaaagcacactgagcgcaaacttcgcgcctctgggggaacgctgcggccaggctaatcccagccctctctcctcccccagcccttcgcgtccccagggtccaggcggtcgcaggcgctccccactcccgcagggccacagctctcgcgagactcctgagccctctccctcccctggctgcggcccccgggctccgggaagctcagccacctgggcccacgccatatctgggtttttttcccaggactttggggatgagaagagacttgtgcatagagcggaagaggaatgggatccaagggacctttccttcaagtc

SEQ ID NO: 6895 - DNA, 143 bp, Homo sapiens
  chr9:96711534-96711677
  hyper
cgggcgccaggtagctccggtcgggcacgcgcagtccgacagactgtgtcaccttggaagacaggatgcggccctttacctagagtggcagctttgtgggctaggtcagcacggggtctccgggccggcgggcaatcgtctgc

SEQ ID NO: 6896 - DNA, 30 bp, Homo sapiens
  chr9:96711975-96712005
  hyper
agttcccctctgtgccgggaggtggctgtt

SEQ ID NO: 6897 - DNA, 86 bp, Homo sapiens
  chr9:96712701-96712787
  hyper
ctcctctccccacgccgccctccccccgccacccccccgcccacccctcattccttccgccttgaggtaccggcaggggaagtgca

SEQ ID NO: 6898 - DNA, 722 bp, Homo sapiens
  chr9:96713311-96714033
  hyper
actcagcagcccaggcgccgccgccctgagtatcctgcggaaaatgtgagaactctggggagccattgctgctgcaaggacccgcgggcgggctaccgcgctggtgggggggctctgtccaaaccttgcgtcctcgacttcccatccgcctcataaagggttggtgaagaccatctcaaggaccgcacgaactggtccttcaagtcccaggaaaccgaaacaacaaccgaggcggctctctgtccgggccacttccggagcgagctctgcggcggacctctggctcccgctcctttgggcacccgcggtgcggccagaccgctcctgccagcgactctctggctggcaagggagaggaggtggagttcagactggcccctcacgcccagagtggaagcgattcctaggatcctgcagccaccgagccgcccgccgtgcctagcccgggcttgatggtgaagagcacagctgccttcgacagagccggaggaaaggaagtttaagaagcaactgcccgcgttccgcttatcttgccgagcccacccccacccccaccctcaccccctgcggattcagaagctgctccaccgagcccgattgtgtcataaaatattttattggaaaaaaagtcaccgtcttcgcaagagggggtaggggccccagcgacatcggggacccggcctccaggccgagccgacgggttgccccggggcaatctcagg

SEQ ID NO: 6899 - DNA, 315 bp, Homo sapiens
  chr9:96714479-96714794
  hyper
ggcacctccgccggtttctctgcatccttggcgcgctcctgctcagtaagctgctcgctcgttggaattgagttcttcttgggccgccccttgggcttggtgggagactccaggccgccgccctgcagcacctgcacgggggaccgccagcacctgggtgagccagcacgtggactggggacccccgaggagacttgaacccaggtaggactaaggagtgcagggtccatatgaggaaatggtggggaaatgtcccgggaaatggcggccatttgtccaaatgccgcctggggagcggcccggcctggggagcat

SEQ ID NO: 6900 - DNA, 340 bp, Homo sapiens
  chr9:96715032-96715372
  hyper
cgattctggtaccacgtcttcacctgcaactggctcaggcccagggactcagcaagatctattctggaaagagcagggcgcaccctcagcaaggcaagtgaccacactcccacagcccgctggccccagccttgtaccgccctacctgtccggcgtggaaaggtacttctgcttctcgaagcgtttctccaggcccatcagctgcagctcggtgaacacagtgcggctccgacgccccttcttggctttggtgcctggctccccagggcctgccgcctccagcttcccgcggagctgcaactcgagcggcaggtgtggcgcacccgcggcgccgggcagc

SEQ ID NO: 6901 - DNA, 15 bp, Homo sapiens
  chr9:96715687-96715702
  hyper
gtgttctgtcctgga

SEQ ID NO: 6902 - DNA, 523 bp, Homo sapiens
  chr9:96716904-96717427
  hyper
cgcctgcactggggatgctcactcggggtccccgggctggaggccgaagggaagcagtgaaggaaagagcgaacaccctccccgggcggcccgcgggcacgaggcctggtttctgtgaggcctggagcttgcaccctccgcctcccgcctggagggctccgagagacggtcccagaacctgcgctcccagagcagcttcccggggctgcttcgatgccggaggaggctcggggcgcccccgcggttcagctcgctgtctcccgccaagcccggcccgcgaccccgcggccgccacacgtacccaggtggctgtggaagggccgcgccgccagcagcgcctgcacgccgaacttcagcagctcgcccgccgcggcagcggcggctgcgggcgcggcgcccttgggcccgggtggctccgtgaggatctcctcaatcatgaagctgcgatagcggtgcggccggtggtccgcgcagccctcgggcgggccgaagcgcgcggcgcccggctcccccggccgctgca

SEQ ID NO: 6903 - DNA, 92 bp, Homo sapiens
  chr9:96717449-96717541
  hyper
cgcggtttggcggcggcggcggcgacggcttggctccggcgcggggcccgcgcggggctctaggccggcccgcagctcggggcggcgcgcgg

SEQ ID NO: 6904 - DNA, 26 bp, Homo sapiens
  chr9:96717780-96717806
  hyper
aaaaggagggggccacgtgaaagagg

SEQ ID NO: 6905 - DNA, 69 bp, Homo sapiens
  chr9:96717840-96717909
  hyper
cgcacgccctggaaggagagagccggagagttcgggaggcaagacccccagagacgagagtcggaggga

SEQ ID NO: 6906 - DNA, 212 bp, Homo sapiens
  chr9:96720673-96720885
  hyper
gctcaggcactgccgcgttggcggccgaaaaaagagggtcccagagaaggggaaccccctccctgtcgaggacaccgaggcccagagaggggaagcctcctccccagtggggtgcagtctgggattgcagtccccaccccaggggcgcagctgccagcccaacgcctgggacacaccccctcccgaggcctctagccgccgccgcgaaaatc

SEQ ID NO: 6907 - DNA, 365 bp, Homo sapiens
  chr9:96721102-96721467
  hyper
gggacagggaggggaccacctcattcccacaaccgaatcccctaagcattcaggtgtaggttccagaaccacctcccctccacccacacccttctcctactccagcgcctcccagacgggattgtgaaatggctccgcgtgcgaacgggtccaggagccgttcgttgtacagaggaggaagctaagtctggaaggagcactcgagcaggctcagcggccagcagccagcggcagggggatcgtgcatcgcttggagggcgctgggctctcctccatccgcctcagccgtgggcagtttgtttccgctcccacttgcagcgggtctgcatcttaattggcaaaacgaagttggggccgcggtggag

SEQ ID NO: 6908 - DNA, 209 bp, Homo sapiens
  chr9:96721688-96721897
  hyper
gggaatggagctcgtttcctcttttcttttttcttcttcttcttttttttttttaaacctttggttctgattgtccttggcccagcaggctgttggtggcgttggtggtgctgctgggactggggcaccggccttggccgcaggtgtgctgtgcccgacagaggccgcctggaccgcgcccggaacgccctgtccgggtgggctgcggc

SEQ ID NO: 6909 - DNA, 44 bp, Homo sapiens
  chr9:96722503-96722547
  hyper
ttagataggaaataaataactcgctcctgtgacccggagatgac

SEQ ID NO: 6910 - DNA, 297 bp, Homo sapiens
  chr9:96722862-96723159
  hyper
ggcgagtgtggacccttcgagaatgctcccttggcccaggactgatccccacgagcatacagcttcggccttccgaggagagtcagggtcggtgcggaccgactccgcaggccctcccttgccccatctgggctggtgccaggccgcagctcgagacctggtttccaccccgggctcccacagagcccatgaagcgctggtcacagcccctggaagctgcagacccggcttttcgaggagcctccccgacgtgcagagcctgagaccccagagagcggccggctcgtgcgggccaga

SEQ ID NO: 6911 - DNA, 39 bp, Homo sapiens
  chr9:96723170-96723209
  hyper
cgcccgcggaaacgactcggcttttctttcttttcccct

SEQ ID NO: 6912 - DNA, 30 bp, Homo sapiens
  chr9:96929091-96929121
  hyper
ctggttgtaggcgccgccaggtgcctctga

SEQ ID NO: 6913 - DNA, 29 bp, Homo sapiens
  chr9:97287278-97287307
  hyper
caggcgtgagccaccgtgccctgccaatc

SEQ ID NO: 6914 - DNA, 355 bp, Homo sapiens
  chr9:97767418-97767773
  hyper
ctgtgtcctcttcccccgcagccgctgcagagggagcgtcgcgccggggcggagtgcgggcttgcgcggcaagtgcgcgccgaggtgagtgcgggcggcgcggtccctgcgccccggtggcgccggcgcgagaccgcggctggcgagaggccctggctctgcgctgcggcgcgcgggtgcggggactacccgccaggctccggctcgggcgcggggagcggccgtgacgaaggtcgcggcccctgcggtgaggcgcccggcgagttccgcgggcgggcgcgggtggcctcccgaggtgcggggaagaccaggtcgcgaggccgggggtctctgctttctcgcgctgggggatggc

SEQ ID NO: 6915 - DNA, 31 bp, Homo sapiens
  chr9:97811372-97811403
  hyper
cttacttgttaaattccgagatgagaatcta

SEQ ID NO: 6916 - DNA, 47 bp, Homo sapiens
  chr9:98268139-98268186
  hyper
ccgcctccgcagccccgcgctgcgcccgcccccggccctccccagcg

SEQ ID NO: 6917 - DNA, 625 bp, Homo sapiens
  chr9:98273068-98273693
  hyper
gggggaggagcagggagaaggcggagctccggtggccacgtgaccccgcgccaggaggcccggtgcgcgcgcgcgcccggctcccggactccccgcgcccgcgcggccggggcagagtaggtagggaggcggatgcgccgggccggctccgggcctccagcgcggtctcccgagagcccaggcgaggcgcgcgcccagccggcgcggacggacgtgccggacgcgccgtagtacattcctgaaggcggaccggcccccttacgctgcccaatgcccgcgccgcctccccgcgaccggccaatggtcgcgctcacgagtccctgcccattcagcggccccgcgctggctgcccgggcgcgctgggggctgcggcggggcgcgccggccaccggggcggtccacgcggctcccgcagggggcccgtccgccggctctccccgcccccttccttcctccccggcggtttcccctccccgcttccttccttcggcctgcgccttctccttcctccctcgccccgctccctccctcaatctcccctcccccaccagcctggccaccttccctccagcctctcctcctccccggcttcagggggaggcccttcccccgaccccctaacccg

SEQ ID NO: 6918 - DNA, 30 bp, Homo sapiens
  chr9:98637869-98637899
  hyper
gaagatttcgttctcgcgagatcccaatga

SEQ ID NO: 6919 - DNA, 30 bp, Homo sapiens
  chr9:98784336-98784366
  hyper
gaagccggcgcccccggccaagtggccgct

SEQ ID NO: 6920 - DNA, 30 bp, Homo sapiens
  chr9:99179786-99179816
  hyper
cgccgtagccggatcgacctcgcgttttca

SEQ ID NO: 6921 - DNA, 940 bp, Homo sapiens
  chr9:99381369-99382309
  hyper
tttaagggggtgggggcgaaggcatttcggcccggccccggaggccccgggcagcccggtgggaggtgggccagggccccgcgccgggtgcggccgtccggggccctccgcgcgcccactggccggctcaccggtgatgtccaggtacacgtcgtcctgggggtcccggcggcgcgggtcttgctgcgtggagctgcggatcttcttcacacccggcgaggtcgacgagcagcgccgcgagcaggggggcgcggcggcccagctcgaccgccgctcgcttttccgcttcatggaggcggccgcggcccgtcagggggccacgaccatggccccgcgcgcccgcgcgcccgccgaggctcccgccagccccgcgcgggcgctcggggcggcgggcgcagagcggcgctgcggggacggcgggcgccggcagagcccggcgggaggcggtcgcgcaggagccggaggaggagcccggcccacagcgcctgccccgctgcctcccgcggccgccgcaggaccggcgccgcagccctcgctacagcgcctcctgccgcggccggcgcccccagcccgcccccaggtgcccgcagccggctggcgcggccgaggcgacggggctgcagctggcggccggagctgcccggggtaaccgtgcgtgcccaccgcggccgcggccgctgctgcgtaggcgccggggcacagcaggacgcggctcgtggggaccccaggagggctgttccgtggcgcttcattcacaaaaaagggcccacaaccctcctcggggcccgcagactgaggcctttcattggccaatgcggcgtgacgtcacggagacggggcctttctacaggcaggtactcggtgacgccataaagaaaactctgagggcttccgccaatcagagataaagtgtgctagcgaccttcgccagccccccaac

SEQ ID NO: 6922 - DNA, 31 bp, Homo sapiens
  chr9:99417093-99417124
  hyper
cagcaccctcgggccccgaaggatccctgta

SEQ ID NO: 6923 - DNA, 306 bp, Homo sapiens
  chr9:99417423-99417729
  hyper
acccgctgcccgcgggcgtccagcaccggcagctcggccacggcggccgccaggggctgcccgctgtcggggccgctcggggccgggaccagggcggcggcgccgctaacctgccgcgtgaccggggccggcgcggccatgacgcggggcggccgagggcctgggtccgctctgtcagcgcggaccggggcggggcgcgcagaggttgggcgcggggggcggggcggggcgtgcagaggtggggcctggcaagtcacggtttccgcggcgcggcgcgggcctgggagctgtcggagtgaaccccac

SEQ ID NO: 6924 - DNA, 719 bp, Homo sapiens
  chr9:99539773-99540492
  hyper
caaagtgtcttccaaatataacgggaatcaacatttacatgctgcttagtaactagcgcttagctaaatgctttacaggggatggcttacctctgaacgacacaaagcagtttttactaatatcctcattttcaaacgctcaagtgacagagccaaaattcacgaggtccttctagctcctaggctcggcctctcaccgcagacccacgggctgtacgcgctttgtggcaggttcatggtcaatacaataaacgcgcattcccctcctgaagccagcaccgcgttttccgacgcctggctgcattctggcgcccatacctcggcccgcaccgagcatcttccaactaggactcagccccacctaacgcccccggagcccgcccccaccggcccttctcaggctgaggtcccgggccggccgaggcacagggagcgacggcctgctttgggggagttcccgggacgtcgcgttcccgccccctggacactagcacatccctccctgcaggtccgcaatccgcgtggaggcccggcgctctcacctgagctgcgaaccctctgcaccagcaaacactaacagggagaagccggaaagtggggttgactgcacatgcgcagacgaaaacgcgcatatccgttcccagcatgctgcgcggtaacccataacatgcaagactacgtttcacatgcagtacggcgccagctgtcagtgttttttt

SEQ ID NO: 6925 - DNA, 177 bp, Homo sapiens
  chr9:99801106-99801283
  hyper
cgcccggtccggtccggcttcagcccacaggatgactgacctgccccgcccgggccctcccagtggtgccggcgcctccctggggtctccaaccgccctcccccgttccccacctcgaggctggcagagctccgggcagaagctctcactcccagaagcgcccgcctcctctcagtg

SEQ ID NO: 6926 - DNA, 44 bp, Homo sapiens
  chr9:99801513-99801557
  hyper
tgggcggggccccgggcgcttagagcccgcgcgtgacgcagccc

SEQ ID NO: 6927 - DNA, 55 bp, Homo sapiens
  chr9:99983677-99983732
  hyper
cccaagatccacccccaaccccgcgatgtagctcagaatccgcgatccagcccgg

SEQ ID NO: 6928 - DNA, 221 bp, Homo sapiens
  chr9:99983767-99983988
  hyper
ccgacctctcagaccgagtgagcttaactaagccgttactcgcgtgccagcagttgggcgctccgacctctcagaccgcgtgagcccagcaaagcggttaggcgcgcgcctgcagctcggcgctagcccggactccgggagccgctctcgagctcgcgtggacggcagagggcggctgcagctcgggcgcaggcgccgctggcttgcgggttctcctgggc

SEQ ID NO: 6929 - DNA, 16 bp, Homo sapiens
  chr9:99984041-99984057
  hyper
cgcctggccgtgactc

SEQ ID NO: 6930 - DNA, 45 bp, Homo sapiens
  chr9:99984107-99984152
  hyper
cgcagccaccggggatggggctgagggtcggttcctgccccggtg

SEQ ID NO: 6931 - DNA, 114 bp, Homo sapiens
  chr9:100263428-100263542
  hyper
gaatgtattcgattgcgtgttggaactacgtgtagacaaaacgatcgcggttaaagcttgcggctcagagcccacctggccgcgctgctgggaaacggacggagcggcgcttca

SEQ ID NO: 6932 - DNA, 670 bp, Homo sapiens
  chr9:100503319-100503989
  hyper
aagggggatgataagtaagggcgtttccggttctgatgcgctggatcttgaagctcttctccaccactagcgccctgcttgtaaccttagcacacgcaactctgaacaggaatagtcctgggagaagggcggaaggttccaggagggcgcctgcctgcctagagtccccttgccggtctcaccctggaaaggtaggcggaactagaacaggcgggccccactgcctgcagcctgcgaggagacgccagggctgcaagcccccccgccctcctccgcccctgccgggacagtcagccgctaggggattaggaacgggcccagcgcccattcaagccattcagcgagacaggaagccaagcgcgctcctgcccgcccgcctctgccgggcaggtctgcgggatgacgcgcattgtgctggggactcgcccaaagggaggcccagccgtggggaaaaccgcgtcccgcgggaatccgacgcccggtgacgggggcacctgcaaggcttcagggcgaatccctgactcccagcccggggctgagtcctcgtggggccgcctccgcgctgcccagtgctgccggttatctgctcacagcgggtggctccgggccttcaggagcgcgacgggcgccatcccttccagtgcctcccgggacaaggccagggtcatcg

SEQ ID NO: 6933 - DNA, 304 bp, Homo sapiens
  chr9:100565761-100566065
  hyper
gcttcctccccaggcccggcccagcgcgggggcggggcaaccgcggggcgtggctgcgcgtgacgtcaccgcccccgccgccccgccccgtccccgctcccgggccttgtgaaatcgcgcgcgctggcggccgtcgtagaccgtgcagctctccttgggtggctgcgagtgccttggccgtgggccctgtgcgcggccagccccggcggcgggagggcgataattgcccagagacgcagcacttacctgggccggttgtgcaaggcgcgcggggggaggccccgggcggcggctctcacgcctc

SEQ ID NO: 6934 - DNA, 95 bp, Homo sapiens
  chr9:100610039-100610134
  hyper
aggacaaaggaggctcgtatgggcaactggaacccggctggagtgtgcagctggccccctcacttccagcccgcaggctgccgcgggggtgactc

SEQ ID NO: 6935 - DNA, 268 bp, Homo sapiens
  chr9:100610200-100610468
  hyper
cggcgaaacctagagagacttgcactccaggcccggggggtgggggggcgggggagaagccttagggagagtggggaggaggccagaggagagctggctgctctctcgtgttgaggttcaagtgtcttccagctccccgcgccccctcctcaccgtgccaccgcccacctcatgctttgggcgccaagcagccaagcaaccgggttgcgttgtagggggaggcaatcagccctgttacccctcctcaggcggccggactgagctgcgg

SEQ ID NO: 6936 - DNA, 134 bp, Homo sapiens
  chr9:100610682-100610816
  hyper
aagtgttccaaagccgcgcacaaatttcggaaccagaccaagaatcctggactctagacgttgcctgggggccgatcctgcgcccagggtcccagaatctaactgaaatgcgcctgcgggccgccaccttcgcc

SEQ ID NO: 6937 - DNA, 466 bp, Homo sapiens
  chr9:100611124-100611590
  hyper
gggcccgcgcagactgggttgggagagggctctgtgggagggcttgcggggagcggggtaagaaaggctaggtgcttcttacctacgtaagaaacgttggtggcgggatctaagcaaacggggaggtgggaagcagaaggttccccttcctgggccccagttcctccatcctgtcccctgggtgacagtgattcgctgttcatagtgtttaagtggaccaacttaaagggagagagcgcttgccgagctctgggaaaccgaaagggtccacgcccgcgggagcctcggagactcaaaatcccccgctagaccgcagaaaatgttacactttaatcaaccgctacttcttccgtggagaggggcggtgggtgggggtgtgcgcatctcatcgcggcctgtgagtggaacaggctagaattatccccagcgtcttttttccatgtccaagtttcgccttaaaacaatt

SEQ ID NO: 6938 - DNA, 105 bp, Homo sapiens
  chr9:100613894-100613999
  hyper
gaaaccaggagttttgtttagcgagtgtaaagcccctctcccttcgttcgaccaaccctctgccgcagaaggttgtcaagcaaacgctttgagcgtttccacaca

SEQ ID NO: 6939 - DNA, 229 bp, Homo sapiens
  chr9:100614192-100614421
  hyper
cgcggctctgcacccacagccccggcccgccccccccccccaccccggaaagctgcgtccgggctggagccactggaacccgcgccaaggcccggaatcctatacgtagcaggggcctcggagatcagcacacgccctccagctgctatttaacagagtagaacactgaggccctgcgaggggacaaggacaggccctggatctcccagtgaatggccagggaacgaac

SEQ ID NO: 6940 - DNA, 189 bp, Homo sapiens
  chr9:100614441-100614630
  hyper
cgcgaggatctcaggttaggaccaagttccggctcagggacagcaggaaaggaactcagaaattggacacccatgaagcaaacgtgtcccgactgcccgccccttcccccggagacgcgcccacccggccaccgctctcttcccactcccccattacccgcagccctcactccccgctgcgggaagggg

SEQ ID NO: 6941 - DNA, 1144 bp, Homo sapiens
  chr9:100614891-100616035
  hyper
cacacagttgggaagcgcagtcctaaaggagacgcaggttggagactccgctaagcggagaagccgcagtggggccatggcaagtcaccttccctttcgggcctaggaatactcattcgaaagatggggggactggagtgccgagtggctgtggcagccacgattggggtttggaaaccatcctgaaaggcccggggagccagtctcctggaacttctccctccccattcccacaaaaaccaagcgccctctcggccaattctcaccctctcaggacaaaaaagtgagatgagcccgtcctttcacctgcgagtccaagcccttggcagaggcctgaaaagtccgaaaactccgagttcgggcgctgaggtctcccgagccggttcctgaactctccgggcctcagtcgatcggggtgcggagggggccgacccgggggatctccaagcgccctccccgccctgacgctgtggggctcctaccgcgccgccacagctgctcctacctggggaggtgcgcccgggccccggggggcgggcagtcggggggcgggcagggaaccggtgccgccccacgcttcgtggcccctttaaggaggggaagccggcggagggaggagccggtccggtgtgtgcaggggagcgcctcgccagcggtccgcagggctggagacccacgccgtggagaggaccagcctcaggtcgccccgcctgggcccgcgccccgacctcgctgcccccgcctcgcctctctgcccgtggcgcttacggccaccttggcctcgggggcagggcatgggcggcccccgccagatcgcccagcgccagtactaactgccctcgctctggccttcgagcccgaagcctcttctgcgcgcacaacctaggcagtaatcctaaactagcgggcaccacagaccagctgcagccaccccaacccagggatcacttccggacccctcgaccgcccggcaccagcgcgcaagggacccttcagccggagaccagagtccagtcccggtcacgaggccaccgccgctgcccgcctcgagaagcaccacgcgggctgagccgtcggctagcgggtcactcccgagcctctgtctgcaccgcgccagccccagaccacggacgctgagcctcca

SEQ ID NO: 6942 - DNA, 198 bp, Homo sapiens
  chr9:100616270-100616468
  hyper
ggcagcaggggccggggtcccaggggaggccacgggccgcggggcgggcgggcggcgccgcaagcgccccctgcagcgcgggaagccgccctacagctacatcgcgctcatcgccatggccatcgcgcacgcgcccgagcgccgcctcacgctgggcggcatctacaagttcatcaccgagcgcttccccttctaccg

SEQ ID NO: 6943 - DNA, 360 bp, Homo sapiens
  chr9:100617285-100617645
  hyper
ggtgggatagatcggttcgtgtccgccatgtgagccagcgtagggacgaaaactcatagacacatcggctgttcacacgttccccgcaatctgagaacgaacaggaatggagagaggactcaactgggacccacgtggaaaagaccgagcaggccacagaggctcggtctccccgcgcacagcgtaggcacccggtgtactctgtaaacgggaggaggtggggcgaggcagccagagcccttggactggcacagggaccctcgatggagcgaagccctcaaacgggatgctttctggtattctatcggggagggtccttggcggtaaccagagggcagcgtagtgtcaacaccagagacc

SEQ ID NO: 6944 - DNA, 30 bp, Homo sapiens
  chr9:100618025-100618055
  hyper
ttggatgctgccctgcgtatttggcagcaa

SEQ ID NO: 6945 - DNA, 872 bp, Homo sapiens
  chr9:100619832-100620704
  hyper
cagggtgggaaagagcggacattttcgtcccccattctacttgtcaacttgcgggacaggtaagattgtgccaaaggcgagggtcagcatcaggagagagaggacgctgcggggagggacctggttgtgtgcttcaggtgccccaagggacacggagacgcgcgagggttgggatcaaggcgttgaagacagagcgacagcccttctcggcctcccaccggccgacgacaccaagagctcgcgcaccggccgggccaggtgggaatgggcgccgcgcaggggagcgagtacctcggagacagtgcgcgccgcccggggcctcatccacagcggggtcgcgggcggcccccttagcccgcgtgactgtgggatcctgagaacattccgctgtatgtcttggaaccttctaaccctaggaatttgcaaacccctcccagtccctcatctgggggctcagagactggaggtgccttttttatttttttcttcttcactttatgaacacagaaaaatcgtttgtccctctccgggccctgcacccgccagcgtcgtgtgcaggcgtccccgggctgtggataattagacacgttcttccctcattgcccaaggctcgttagaattcgccctagagctgtatcatgtattttctttcaaattaactttgcttgcaattaagcttagggaaccagcaacaaaagcaaacttggcccgaggtcgttcaccgcgaaaatggattagagaaacttcttccccgatttaaggggaaagattcctgcggccagcgctttggggaaagtgccccgaccgcagaggcgacgacaggggagcaggaagctgctcacggtagtcggcgttggcggcagcggtggcct

SEQ ID NO: 6946 - DNA, 30 bp, Homo sapiens
  chr9:100746554-100746584
  hyper
accgccgcccctcccgaggccaagtttgaa

SEQ ID NO: 6947 - DNA, 675 bp, Homo sapiens
  chr9:101469582-101470257
  hyper
ctcggccccgttccgcgcgatggaagaggcgccaaccgagcgtactgcacaggaaatcactgcccccttcaggccgcgtctcagacgctgcggtcggagcacaggggctcgctcggtccggaaaaactcgcaaacccgaccttgcgcggccagcgatcgctcctccagacccgctccgcgcgctccagccccggcctggcggtgaaggtccgctctggggcttcaggcagaacccaaaccgagggcgtggggaggggtcttgggatggaaagcccttggctctctggctccgctccggactgctctccaagtctgtgctccggctgctaggtcggatgcttcaagcctgagccgtgagaaactgcctgcagccgcccggccaacagcagcggcgcggccggacaccactgcacgtccgggacgagaactgccagggcactttctgagcaactaacccgaggcaggggtctcctgaaatcgctctggccacaggcagcgccgggcacgtccaggcagaagcgctgcagagccggtggccccacacttgcccgcgcggagcgggctcagagctgctggcgcgcaccaggcgcccagccacgctgcacgctcaagccccttgggttccggagccttccggacctcaaagcgcggctcggcttccctgggggcctgtga

SEQ ID NO: 6948 - DNA, 927 bp, Homo sapiens
  chr9:101470781-101471708
  hyper
cggggagcacaccgcgcccgatgctgcccttggccacctccttggtgagcggcatgaggcccatgatggagagcggcgggctgctgggcggcggccggggggcgccccgcgcccagccccaggccccgggcgccagaggcagcagcagcggcagcagcagtagcagtagcaggcgcgcgggcggcggtggcggcggcggcggcggcccgggctgcccggagctccgcggggaagccatgccgcgccgcgggctgcgggcgccggctcactcggcccgcatggcctggcccggcccgccgccccgcgccaaggtcttcccgcggcgcccgcgcaatggcgccggcccgggccccggctccgtctcgggctagggttccggctcggctcagaacggccgcggcggcggcggcggcagcggcggcgcccgtgacggatcaatcacgccgggaaggggtgggagcgagcggagtgcgggaggcggggagcaagcgagcaaacgcggagaggggggccggcgtctccgcgcgcgcctctctccagcgcggccgccccgcaccgggccgcctccgcccgcccccgtgcgcgctctgaaccgctctcccgccgggagctgctaggcggcagcccctggagctcggccgggggagggcggacggcaggaaacgcgggaggcgaaggcgaggctgctcaggggcggctcgggccgcctccagggacggggacgagccgtgcgcgccgggggagggggaggcgctggcgctgcggcggccgcggggagggccaccttcccagcacacgcacacacgcgcccccggccctccgctgcgccagctgccgctgcccgccgaccgctgacctccaggcaccagagcgcccggggacagcgatctgggaaccgggaccgcgcgctggcacacgcagtggccg

SEQ ID NO: 6949 - DNA, 3 bp, Homo sapiens
  chr9:101471724-101471727
  hyper
cgc

SEQ ID NO: 6950 - DNA, 31 bp, Homo sapiens
  chr9:101558159-101558190
  hyper
tctctacaattctattcgctgtctccagatt

SEQ ID NO: 6951 - DNA, 53 bp, Homo sapiens
  chr9:101558600-101558653
  hyper
ccgggcccggccacctcggcccccgccggctccgcgcccgcctccggctccgc

SEQ ID NO: 6952 - DNA, 65 bp, Homo sapiens
  chr9:101558885-101558950
  hyper
actgtgtgccgggagcgcgccggggctagggccgcgcgcctgctgtgtgccgggagcgcgctagg

SEQ ID NO: 6953 - DNA, 30 bp, Homo sapiens
  chr9:101569828-101569858
  hyper
tgcgcttgggctggcgcggggctggacgga

SEQ ID NO: 6954 - DNA, 249 bp, Homo sapiens
  chr9:101705946-101706195
  hyper
agcccatcccgcttgccccaacgaacgcgggcgcggggctttcctcgcaggttacataaggcagccgcgggtggaggcagcagaggcgagcgcacgtccgtcgagggggaaaggggcgtggggaggcggccggggcggccggtatcccccgggcgtgagtgcgcagcgcgcgggggagcgcagggcgcggcggagtcgggtttcagagcgcgggtgactcggggcgcgggccgggagccgggattctgc

SEQ ID NO: 6955 - DNA, 450 bp, Homo sapiens
  chr9:101706314-101706764
  hyper
cgccttccggggctccgcagacccgcgagatggcaccaaggtaagacccgcttctctgcttcctcgcgtcccgggcccctccaatactcttgcccgcctcaccttttctccctcgggcacatcttgcaggaggaacaacgggcagtgctggtgtctgctgatgctgctctcggtctccacgcccctccctgctgtcacccagacccgcggtgcgacaggtaagcaacccggtcggagggtggcaccggctgcctccgcgcccgtgggggaagtcggttttggcggcggacgcggctgcgatgcgtgcctcattcctggacataaaagggagtcttgccactcagtgcgcactggcggtcccgcgggcggctacctcctggcagtgcaggggttatagctgtgaatgggatccctgggcagctggggcggttggagcgttgtctgggcacc

SEQ ID NO: 6956 - DNA, 97 bp, Homo sapiens
  chr9:101866821-101866918
  hyper
actgaggagggatcttcgggggaatgctgaagttgatgcgtggacttggagaggggaagttgaagtggatgcaggggcctggcgctgcagcggatct

SEQ ID NO: 6957 - DNA, 411 bp, Homo sapiens
  chr9:102586806-102587217
  hyper
gggaatcccccatttcctggtcgtcgagggtttcctggacctgggagccccgagtccctttctctcttcctgcaggcaagccccgggctcaggggcgccaggagatgaccctcgtggccccgcgcacctcggaggtttttggtttggtttgatttggggtttttcggtccctgttcccactcttcgagctgcgcccaccccgggcaaagggggcgctataggccggagtttgggcacccagttccttccctgaggcctgctgagctgcgctttcagctacaaagtttcgctgaggctgtgggctgagacgctggtcccggagctgcgctcggcgccctcaggaatgtgcccccgctaggccgctgggtggccaggagcctccaagccgcccaccctcgaagacaccgccct

SEQ ID NO: 6958 - DNA, 30 bp, Homo sapiens
  chr9:103190004-103190034
  hyper
tcttcccatcccggcgtccccactgtgtgc

SEQ ID NO: 6959 - DNA, 543 bp, Homo sapiens
  chr9:103791056-103791599
  hyper
tggaccctgtgcaagctgcagcgccaggaggaggcagcggaggaagcagagcgcgggatgggcgcccagcggcatctgtgatcccgcgcacctccgccccacgggcgcgcgcacaaacacggacacacacatacacacactcgcgcacacactcgcacaaacacacactcgtacacgcccgcgccgctcgctcgccggcttgctctcccacgcaagcggaatgcagcagcgcctggagagcgtgtctcggaccgccgcctgaatgtacctcgctcccgggagccggacggcccagtagggcgcactggaggacgctccgctgcgggaggtgagtgcggcgcccgcagccgggccgctggggaagtctctgcaccggggcagtagggcagcgcggggcaagctcctggccggacccggcggcgcaggtgtcccatgccttgcttgtgggtgtcgaggtgcagatgaaggcggcgctggggctgtgcagaggagaggacgaacccagggagggtcgcctcctgcgaggtgtcagattgacccagc

SEQ ID NO: 6960 - DNA, 20 bp, Homo sapiens
  chr9:104248629-104248649
  hyper
ttttcctggtcctgggaggg

SEQ ID NO: 6961 - DNA, 872 bp, Homo sapiens
  chr9:104248697-104249569
  hyper
cgcccgcagaaacccaacactgctgccgcgctctcggcgcgcccggcgaacctaaggtgtggacgcgccgcgagggtcccctgcttgcgggcggccattaggcgccaggccccttggcgcttcggccctgctaggctcggcgagggtcttacccagactggcacgcgccccgctcgcgtccttctattgacctgtcagcgcagctggcgcaggcaagggccagggaggcgcccccgagacactcaaccatccccgcactgatgcgggcccctgctgccctggggacccctgcggggtcctcgcaatcctccggcaggaagcggtcggagctgcgggcagggccgctaggcaacccgcctgcccgaggcgcactgcccggggcacaggccctctgcgatgactctccccaacccccagctgccctgcttgtgccagctgtggccacccctaatccttgtcccctcgctctagtgtccagggctccgaccaccgcgccagaagggctgggcagatcgtgcgcaacagaaacctacccggttggggcgaccagctcggtcccctgcgcgcgccgagggccgcctctggtattgcccaggctggctagctcatcccggtggaggcgccatctccggggcccggaaggagcgggcgcagcgcggtttgggtgtgcgccggagcctcacctcctcccgcctcgcagctcaggcgcagggctccccttgctcaggcgggccatgtgacccgcgagctgcggagagaccgcggcccccaaagcggcttggggaaaaaggacggcaaaaggcgccaactgatgggcagccagggaaaagcaggagtcgcccccaagtcacgcaaacaggaagcctgtttct

SEQ ID NO: 6962 - DNA, 881 bp, Homo sapiens
  chr9:104500250-104501131
  hyper
agtctcctcattactgagacccgcagggagaaagcgcgccccctcctgcgcccggctcgcccctctgcagccgctgcctgaggtctccgcctccaggtcccgcgcgcagcttcactccactcggtgaagcggtcccaggagctggagcggtctctaggccatgcaagttggagcgtagcgcgcctccggcagtctcagatcccgctcccaggtccctccgcctggcatcctctgcccgcccggtcactgcgctgagcaggcaggcgggcgggccggcgcctgtcacccgcagctggagcgcccgttccctgcccgccccatctgcagggcgcctcgggcactgcgtccggccccgcgaggcggccgggatgagaagcagccggagttcctcgggggcagcagtgacagaggagcgacgcgctctcgcctggattcttttccttttctgcccaggcgagacccacttatttcctggggtcgcgttggagagggctttcacgcccggggtgcggaaaagaagccaaatccaccttcctccactgttggccaccctcctgcaggctcccccagcgccgacttcattttctctcttctctcgctacttcctctctgcctttctttcgttatttttccaccgagtcgccaccgccgcttgcttcctcggaggagcaacgcgactggccagcaaagggtggctctgctccgagcgccaaagttctccccgcctcagccggcgcctccctgttgctgagccctggcgcctgcctgtcgcttggctgcgctaaacgcccactgttggtgagattcccgagtggcacatcccgcgcccctggaaagtcctctcccctcaaaggctgggcgtcatagtttgcaaaattccc

SEQ ID NO: 6963 - DNA, 30 bp, Homo sapiens
  chr9:105037092-105037122
  hyper
gagatttggagattgagttccctgccattg

SEQ ID NO: 6964 - DNA, 813 bp, Homo sapiens
  chr9:109622403-109623216
  hyper
cccctttttgtcctcttctcccgggacgggagggtggagccaagtccccccgcggccggttcgggagctttctctatctcggtcgctcgaggtgagtgtgaaagggcggcagcccgtttaattgcagcgcaggttaatttcttgagttcaccgcagtcggtccgccagccgcttccccggtctttgccaagtgggtttacgaggtctgaggcgtgttggggcgcgctcacgttctcgcaaaaggctcctccccagggctcaattccccgactgcgggaagccctttggtgccccaggagccttggaaacccaaggtttcctctgacctcgtcgctcctttctccctccccaccgcctggttccctacgtccctgcccccagggaaggacggcccccatcttaggacttacgacccaagccaacccagaaggtaccttcacgtcgatgaagattttatcgcagcctccaaaacccagcagtaataggagctttcaacctgaaatacgattgttattttcccggtgcagagcttgacagaaaaagtcagctttttattaaagacaaagaggtaaattatcagccgggacagtggagggacggcggagacctggcgcgcttcctccggttgccacgaggaatttatggggtggcggcggccagcgctcagacaccccccgggtcccggtggggaggagctcggggcaggaggacttccctaggtccctccgggcactcggaagggggagtcctcccaaagccgcacaaagccgggatcatttcaatccggaacagcctcagcgtcctcctcctctc

SEQ ID NO: 6965 - DNA, 172 bp, Homo sapiens
  chr9:109623574-109623746
  hyper
atgggaaccaactccgcgcgcgtctcctcctcttcctttattgtatggatttataggtatatatcttctcggactgttgcttggggggagggaggagaaagggcgagtatttaaagaggacagacttgcccaggatccttaacaccgcgccttcaccggatgcgcgctcctc

SEQ ID NO: 6966 - DNA, 30 bp, Homo sapiens
  chr9:109624535-109624565
  hyper
cctccagttccccacgtatgttctttgcaa

SEQ ID NO: 6967 - DNA, 30 bp, Homo sapiens
  chr9:109625164-109625194
  hyper
tattagaaaggcttcgcgcaccccctggtg

SEQ ID NO: 6968 - DNA, 579 bp, Homo sapiens
  chr9:110227946-110228525
  hyper
aacagggaggaagaggaggggcgccggctccctccagcaaaggcggcgcggagcgggtagccaggtccggagccgtcctgtgccgggccgtccggtggggggcactgcagaccgcgcgggcgctgcgcccgcctctagctccgggcgcagaggggtggccacgctctcctgagtccctcgcgcccctagccgcgcctgggagagcggactggcctcccagagaggatgcgggggaagccgcacaggggcccactgggactgggtaagggcgcgggatgggatcggctctggatatgggtgccccccgagccgcgccccaccccgcgagcgctcccatttgcacctccacttgagcacggagcttcaagaacgagctattctggggtgcgggttccgacactaggccccacacggatctggggactggtttggctacgacctggcggaaggggggaaacctggcctgagaacggaaactgcgggacgatccggcggcgcacttaaatctggctccgctgcttcctcgccccgcccccgctgtcaccttcctctgcttctgcgcagcgattccacacccca

SEQ ID NO: 6969 - DNA, 121 bp, Homo sapiens
  chr9:110250497-110250618
  hyper
gggaagcactgggggaagtcgcttcatgtgggagagctcctcccgccagcgctgcggggacagggcgggagagacctgtcagtggtggtcccctgttgccacccgacatactgacgtgctg

SEQ ID NO: 6970 - DNA, 1883 bp, Homo sapiens
  chr9:110250630-110252513
  hyper
cgactgcaccgcccagacatggggactggtcaggcaggaagcacccgggaacccagggcgccagcgctgcaatctcggcccactcccgggtcgaagaagaggtgatgcgtctgtattgcgggtgttatgtcctgtctgcccaattgcgtgtgagcgagcgccgcggctggtccctccccctccaggtcccgtggacgtccccggaattggcacaccgaggctctctcggtgcgctctcgccacggggccgcctacgcgctaaactcactctggcccagccagtgtctggggacgcggccacctcccgcccggtggcccgagagcgcccgccctaccgacagcgcgcccggggactggtgaagacccggcttgcgccccaggcggctccgcagtgctcgcaccacgggcatacacagctgagccaaggacacggaagctatcccgggaaggttgcggagtccgcgcggtggccgctccttaccctcgttcagtggctcttggtgaccccaaggctccgcccgcccccaccacacccacgaaaacccaccgggcgttcccggcggcccggagcgatactcacgttattcggggcacctgcttgacgcagtgtcttctcccttcccgccgggccagacgcgaacgtggagaaagatgggagcagcgcgtcgctgacagccatgtcagactcgccaggtggctgcctgcgagcaaggcagggagcggagacaggagagtcaggggcggctttcggccgtcgttccggcgcgtcccaccggtcctcacccctccctgctcccagcgccgcgcgcctcacctacctcattaatgtgggggcccagaaggtcctcggcagcccgaagcagctggggcacctgaaccccaaagtcaacgaagagaagaaacgaagccaaaacccaaaaccccaaattggccgagatccttcttctttggattaaatataacttggaagcgtcttttttaaaaagttcctttgtatacaaaagttcttagaaaagttgtaaacgcaaaaatagacaatcagcaaggcgagtaagtaggtccggtggccgggctgcgctctcttccactcagcagcgtcccccaccactgtcgcggtcgcctcgagtgctgccgtgggcgcaggggctgtggccggggcggtgggcgggcggtgccgccaggtgagactggctgccgtggcgcggagctgcgaactggtcggcggcgcaaggcgcggactccggtgagttgtgtggagcgcgcgcggccatgggcgcgggccacgggcgggtgggagggtggggggccagaggggcgggggagggtcactcggcggctcccggtgccgccgccgcccgccaccgcctctgctccccgcgcgcccgcagacacgttcgttctctctggtcgggaaactgccggccgccggcgcgcgttccttacttataacttccttcgctacagccttttcctccgccttctcccatgccccgcccctccctttcttctctccgccccccccgaggctcccttccatcgttgctatggcagctaaatcaacaaactcggcgcacgtgggggcgggggaggggaaggaggggcgcgggcggggctgggccgggccgtgacgccagccaggcagctggcgggctggagccgagctgacgccggcggcagtggtgtcggcggcggcggcggcgtccgccccagcgcggggcgcgaggaaccgggcgcaggttcggtcgctgcgcgaccagggccgtactcaccgccattgtcggctccctgggttcgaagcccgcgaagactggtggggtcagcgggcggcacggtcacgcgtccgcacccctgctagcatacgcgcttgccgcgctgtctgcgcg

SEQ ID NO: 6971 - DNA, 80 bp, Homo sapiens
  chr9:112081253-112081333
  hyper
agtccaaacatttctcccacccgggaaggcctatatacttccttggaagtccgggtatgttatttcttcccttgacatcc

SEQ ID NO: 6972 - DNA, 532 bp, Homo sapiens
  chr9:112081563-112082095
  hyper
gggggtgcaaccacctgtgggcgggtgcccgggacgcaggcccaggcgccgccgccctgaggtgccccgccgaccccacgcacggtgcccaagggagaaagtcaggcgcgcctggccccccgggcaccccggggtcgactcccagcgccccagcaaagggctctgccggtgcaaggcaggcaggtctgagacagccgactctagagttagctcccaagtcaccctacccgctgcgaggaggctgcggggcagatggggctcagggaatgggaatggggtgtatccagaagggatcagcagagagcagaaatggtctaacccccgcctcccaaacttggggcgcctgccgagcagcaagcgaggggatctcctctctgctgtctcatcaaggcctgatggcgagtttgaggggggacaagctggacaccccaggacggcctcacattgatttgagattttctacccaataacccagtatcaggaagacccctgctggaagctagggacggaaggggagcgccggccacccaca

SEQ ID NO: 6973 - DNA, 823 bp, Homo sapiens
  chr9:112082658-112083481
  hyper
cccgccgcgccccgcgcgtagcgctgcatggagcggcggccaaaggtccggcgcaggaaccgcagcatcctggctgggggcgccccctgcctccgccccctgcgctgccgctgccgctgccgctgccgctgcgccgccgcccgggagcgtcccgcgacgccgtcagtgccctcggccgcccgcgccgcctctcgcgggctacggcccggggcaagcccgcgccgaggccgaggccgcgctctagccgcctgcggggcgcgccggcccggccagcgccggctgcgagtggccgcaggcgggagggcgcgctcggggccgtcccgccgccgccgccgccgcgcgctctcccgggccggcggcctgcgcgggctgccgaggggctgctccggacgggcggctgcgggctgccagggggctgccgggggcgcgggaggcgggctgcgggctgctcccgcgccgcgcgccggccgagggccagccggagcagggcgcctgcgtggtcctggcgcgctcgctcccactcgccgcgccgcgcccggggcccgaggaggccccgccgagcgcccgctcccaaggcgccttttcctgcgcccgcagcccccgcctcccacctgggaggctgcacctccagccgccgccgccgccgccgccgccgctgccgccgggactgcagcacgccctcctccctcggggctgcgccgggtaattgcaagccgggtctgtgctgccccctgccggcccgagcgccccctgctgctgtaggtgtgctcacgtgtgtacacgtaggtgagcacacacgtgtttccggcgcccagagccctgg

SEQ ID NO: 6974 - DNA, 605 bp, Homo sapiens
  chr9:112260063-112260668
  hyper
cgctggcagccgctctcggctagctccccgcgggctgtgtgccccctcggagccccgagccggggtcgcggcggcacggggtcctccggaggtgccggacgcacgggctccgcgggttgcgcccgcccctgcccggctggagcgcacgcccacgctccggcgccgcgtcccggccgccagcccgccccggccgagccccacccggcgccccgcccgcgccctcccgccccggccccgccaggtgagcgcagcggggcgccccctccccgccccgacgtggtgcggggatcccggtgcagccgcacccgccagcccgcccgcgcgtccgccgcgcgccccagggacgggtgggggcggggtggcgccgagcgcgaccccggcccccggcagccccgcaccctgcccccggcccgctggggtcgcacgggcccgtacctgcagcatccgggggcgcggagcgcccaggtaggtcgcgcgtgcgggcggcgcggaagctcgctcgcggcgcgacctggccgccgtctgagcatgcccagtgccgcccgcgggcggttcccgccggccgggctggccgcgacgggcccgcgcgccgggcggggggcggg

SEQ ID NO: 6975 - DNA, 30 bp, Homo sapiens
  chr9:112402500-112402530
  hyper
acgccgcattaaggcgcttcaagatagctg

SEQ ID NO: 6976 - DNA, 30 bp, Homo sapiens
  chr9:112403286-112403316
  hyper
tatagcagccgccgcggcggcaggaggcaa

SEQ ID NO: 6977 - DNA, 30 bp, Homo sapiens
  chr9:112542133-112542163
  hyper
taacagcacgtgctcgggtcccacattcgg

SEQ ID NO: 6978 - DNA, 492 bp, Homo sapiens
  chr9:113341129-113341621
  hyper
ataataggcgggtagcgatgactctggttttgtggatggggacgcttgacttggggtggttatgccttgcccaggactgaaccccgggatagagacgggcaggcagcggtgggtcgaagggcccggggactagggcccgggtcgggaggggcgggcgccttaccgcggcttgctggaaggcgcccttggtgtaggtgccgccacctcggtaggagatggcagggatctcttggaggagcagcgcgcacttgtgctggcgcgcgcggcgggtggagatgtaatcgacgcgcggcaccacgtagttcttggacgagaaggtcacgatggccacgcgcgtggccgtgggcaccacggggaagtcggacagcagcttgcggacgaacatgagctcgctgcggaagttgacttcgcccacgctggacgaatcatccaccaggaagacaagctccaggcgctcgctgagctcccgcagcagccgcacgcgtcgccgga

SEQ ID NO: 6979 - DNA, 168 bp, Homo sapiens
  chr9:113341679-113341847
  hyper
cgcggggatactcccgggggccccgggcgcggtctcggggaagaggcggaagctgaaattgcgcgacggggacatctgctgaaaggtcgcccagcccgaaacgagcgccagaccccagcaacaaaaggccaggcgaggccacatcgcgctggagacagagcggctgcc

SEQ ID NO: 6980 - DNA, 14 bp, Homo sapiens
  chr9:113341926-113341940
  hyper
cggggcagcggcca

SEQ ID NO: 6981 - DNA, 30 bp, Homo sapiens
  chr9:113799921-113799951
  hyper
ggggacaaccgagtcgtcagtgggaagcga

SEQ ID NO: 6982 - DNA, 592 bp, Homo sapiens
  chr9:113800869-113801461
  hyper
caagtcagcaacacccgaacccccagagtccgccctccccgctcccaagctggaccccttacctggtgtggcgcccccagcgcccctgacctctgcgccccctcctccattcattggctcgacagcccacggtggtggcagggccggggctggggggtggccttagcctcccattcattatctcagcagcctcccccgccccgcccccgagtcgacacacccgcagcgggagacccgtggccgccagctcgggtcccacccccgcccctcctgcgcttaccccagcgccggacagctggcaggactccggtggacgccccggcacggggcattttcacgttgtcgctctcctcttcccactcgaaaagctctggaaaacatcgcggggcccgcaaaaccccggaaatgtggcctctctttcgtggctcactttctaaactttccagaaggcgcaaagtttctcccagcgccgccctgcactggaggctgcgaagaacgcagaagcggctttgctgctaggaaggtgcatacgtttctagttctgatttttcacttcactggatctgtaaacgaaagcaagtgtgtctgctcc

SEQ ID NO: 6983 - DNA, 270 bp, Homo sapiens
  chr9:114360504-114360774
  hyper
atgatgaaggctgccccgagctgggggttcaggatgttctgcttggactgaactctgccgaatcacttgggacctgcgccttcccgcgggtgcatccgctacaaacaatccagttacgaaaccatttggagctgccagtgatctccccagctcccctaccggtgccgcgggaggggacacggtgacctggagggagcactcccgcattgcgagggagccaggggggcggtctgatctgcagcccggggttgttccttcttttcttttttt

SEQ ID NO: 6984 - DNA, 143 bp, Homo sapiens
  chr9:114361585-114361728
  hyper
ctggccagccccctcccgggtgcaggaagctaccgggtgtcccgggttgtaaccaagctttcctattccctccggcgcgcggctccaagctctccaaggaactgcgggggcgggaggcgtcgggacgtcggctcccaagatcc

SEQ ID NO: 6985 - DNA, 31 bp, Homo sapiens
  chr9:114937351-114937382
  hyper
gtcctcgaggcccagccgggggccccgccgg

SEQ ID NO: 6986 - DNA, 30 bp, Homo sapiens
  chr9:115142770-115142800
  hyper
tgcctggccgaatgcgtgtgagttctaggt

SEQ ID NO: 6987 - DNA, 30 bp, Homo sapiens
  chr9:115653207-115653237
  hyper
gccagaaaaggccgcgctccaccctgccct

SEQ ID NO: 6988 - DNA, 30 bp, Homo sapiens
  chr9:115774490-115774520
  hyper
cctgcgcacgcggccgccaggaactacatt

SEQ ID NO: 6989 - DNA, 30 bp, Homo sapiens
  chr9:116111661-116111691
  hyper
tacgcatacaatcgcgatttcattcaacaa

SEQ ID NO: 6990 - DNA, 30 bp, Homo sapiens
  chr9:116638745-116638775
  hyper
ggcccggggcgctgcgccacttcattgcaa

SEQ ID NO: 6991 - DNA, 55 bp, Homo sapiens
  chr9:116639070-116639125
  hyper
cccctgaccctctctgcgctcggggtccccgatgaccccccgggaggtctttccc

SEQ ID NO: 6992 - DNA, 95 bp, Homo sapiens
  chr9:116860420-116860515
  hyper
aggtcttcccagagcccgtctggccaaaggtgaaaacagtgcaggagaaactgcgggcggcaagggcgtggctggactccggcggctacccgggg

SEQ ID NO: 6993 - DNA, 241 bp, Homo sapiens
  chr9:116918619-116918860
  hyper
ttgggggaggaggggggtctccgtttggggccgtctcggtgtgttccggtgtctcagtgtctgcaggtcccaagcctgtacgtctccgtttctatctgttcttgtgaaattgtccgcaagtttctaggtcaccaggtctcgggttctgctcctgtctccgtgtctgtgtggctctgcacgtccccgcgtttctggaaatctccgcgtgtttgtgttagtcggcctgggtctgtgtgtctgt

SEQ ID NO: 6994 - DNA, 31 bp, Homo sapiens
  chr9:117160507-117160538
  hyper
ggctccctcccattcccggagcggtgatgcg

SEQ ID NO: 6995 - DNA, 30 bp, Homo sapiens
  chr9:117268157-117268187
  hyper
tccttacaatgtggcgctcccctcctgcac

SEQ ID NO: 6996 - DNA, 353 bp, Homo sapiens
  chr9:118916733-118917086
  hyper
cgggcgctctatttcagcgggcgaggcgagcagctgcgcctccgggccgacctcgagctgccccgggacgcgttcacgctgcaagtgtggctgcgagcggaggggggccagaggtctccggcagtgatcacaggtaggtgagggcgcctcggcgggcgctgcaccgtccctgcggccccagaggctcgcgggtgtctgggcgcgggtggcgggcgggtcgggggcttgcgggcgtgtctgtgcgagagctgccccgcgagcggcgcagagacatccgggcgagctgagagcctcactttgctccatcggtggaatgggcacactcggaaggcgtagctgctccatccctggga

SEQ ID NO: 6997 - DNA, 30 bp, Homo sapiens
  chr9:118918145-118918175
  hyper
caacccacaactgacgtcatcgcatgctat

SEQ ID NO: 6998 - DNA, 490 bp, Homo sapiens
  chr9:120175490-120175980
  hyper
agggctaccaggagagtggagcgtagtccgctgattattctgtgggtcttttcaggcgagcaaggagttaacctcggaagttcagggatcgtaaaggttctcacctggaaggcccctcacctgcggtgcccgaggcggatcccgccgaggaaaagacccggggaagaagagctccgggtctgggcgagcccctggcgcctcacgggcgctgttgttggccagactccgacaaccaataaggccccgcgcccccaagaggggaggggagagcgagcaagcagcgagcgcgggagagctaaggggaacaacatttttgtaaacgctctccgagataattaagctatcaattacccgggtgggaaatcagctgcgcttcccacagctccactgaagggccgactcctccgggattcgcgcagggaaccagcaggcagcaagctgctggcgaacttttctgattaacttttccgttggagccccccacccacac

SEQ ID NO: 6999 - DNA, 840 bp, Homo sapiens
  chr9:120176314-120177154
  hyper
tccatctggaagggcagaacccgcaactccgaggcgagagcgagggggcggtgacggcgggtggccagtgacggtacccggagaagtgggaggctcgacctgaaactggcttaggatctgggatgctccggcccctagccagagcaccttcagtgaatggggtctccggcttccgggatggatcaagcagagctccaggtcgggactgagaggcagaggggcaggttcccactgcgggagggttggcacgcccccaggctcccgccgcgcgctctccaggacctcctcccacatgctcgtttccaaccacctgtgcgacctctgggcccctcctctaccctctgccaaccccactcggggcagccccgggcagggatccccagggcgcccccacccgtccggcatgacgcaggggctcggggttccttgggatctagcgcgtgccggcgcccagccttacccagggtgaagaagggcagctcggtgttgtccaggtcgtcctgcaccgcgatgcgccccggcagctcgttacgcacaaagagcaggaggcgcgactcggcggcggtgccggcagagccaggagagcccggggacgcggcggcggcggcggctccggccccggtcccagccccggccccggcgcgggcgccgctccagccgatgtcgctctcccgcagggcgggcagtgtggacaccgtgacggtcttcagccggcacgggctgtcgggctcccgcgaggcagcggcggtggcgccggccagcagcggcggcggcggcagcaggagcaggaacagcagcagcagcggcagcagtggcggcggccccgggtggaagcagagc

SEQ ID NO: 7000 - DNA, 30 bp, Homo sapiens
  chr9:123639920-123639950
  hyper
gcgcggacccttggcgcagacacagaccca

SEQ ID NO: 7001 - DNA, 31 bp, Homo sapiens
  chr9:124041370-124041401
  hyper
tacagtagagtgtgaccgggcagattagggg

SEQ ID NO: 7002 - DNA, 826 bp, Homo sapiens
  chr9:124131809-124132635
  hyper
gagagttctccaaaacgcagaggaaagcggagggggaaaaatggggcagaaagtggagctagaaagagaggtaagaagaaagccagagagacttcttccttctgcaaatcggtctaagtttcgggaggtgggattgggggaggagggggttcaccctggggccaggccagggctgggtggaggaggcggccttcgagagagtgagtcgggaaagaaggggagtgggcaaagggtgagatgtggggtcccggtccccgcctcgctggctgccagttccctctgcgtttcctagtccgcgtgcgtgacacgagatagtgcagccctggcatggggcttggcatctggcggccgcgagataaccagggcccgtgcgatgggaaacgtgccgttggcagcccgccacccctccatcgtgacctcagtctgccaaacagggttcgtgatgctcagtttactagggaggagccgcggctttgagatctcgcccagcccgaagcagcggagactggccaggagcccggctgtcagacctcggagcgcacgctgcgggcgggggctcggtccacgggggagggtcaggggacgcgggactcacccttgaaggagtcggggagccgctgggcttcggagtcccgtgtgtgccgcttctcggccatgctgcccgagacgcagtcgcactcccccgtcctcgttgccaaacccggagccgccgggaatgccctgaggagccagaggcacaagacccagattgccgccccgcccccaatcgaggtcccgccctcgtgagagttggccaatcaacgcccaggatcgaggaggacccacc

SEQ ID NO: 7003 - DNA, 30 bp, Homo sapiens
  chr9:124261231-124261261
  hyper
ctgccatttccaaacgcggggtggtgtcct

SEQ ID NO: 7004 - DNA, 45 bp, Homo sapiens
  chr9:124262376-124262421
  hyper
gctgggaggggctgcgctgcgctggcgcacggccaaactctggga

SEQ ID NO: 7005 - DNA, 869 bp, Homo sapiens
  chr9:124361490-124362359
  hyper
ctcatagcgccgaaacggaagcagaggttatctctggactcctggaggcctggggactccgggaggggagggggcgtgtggtcccgccggcatctcgggccggcaccaggctggggagcgtgtgctcggagcggagggcctcggctctgcccagtccggcctgggcggggcggtggtggggaggtcgattgaccaaacaggtgcgcccccgcccctctgctccccgcccgcgctgggtcccgggcctggcgggcggagctgtgggcggctgggcctgcgattggcagggctgggcaggccgggtggccgcgggagcccgggagccgtagagcggcggcgccgggggaggcgcggagccggccgtagcgcgctcctgcctggccagccgcctactccgcccgccccgctccactcggcccagctggcgcgaaggaaactttcctgcagccgcccggcgacaccgcgactccgccgcttcgcaaccctggccctgggccgctcaggctccggagcctttgggatggcagcgcccagcggcccggcccgcgcgtagaggtaaaagctgggggccgcggctcaggtggaggggggctcggtggtttgccgggatccgagcggcatcccgggttcgagaggatccgggggctccgatgcgaggtgttggggtaggggactgaggaatgggcggcgactttgctttatttaccccgcttttcccctacagtcccctctcccgcaaggaaatctgcgcgatgcattgagcctttaaactttcctgtgcgccctgcccagatctcgaccgccgggacccagggctggcgctgggttcttgggagagtacaatacaggggatcgcgaggaaggcgccc

SEQ ID NO: 7006 - DNA, 222 bp, Homo sapiens
  chr9:124990563-124990785
  hyper
agcccctcggcgcgccgggtaccggccccgcgtcgggattctcagcgctgcgccggcacaacccccggcgcatcggcgctatcagcgcctattcagacggacaataccggcctcgcctcctcttgattcgcctgtgtctttactaaatcgctttttgagaaattcctccaacatttgcataatgtgttcccgctttccgcgaccccccccccccgctcgcgc

SEQ ID NO: 7007 - DNA, 255 bp, Homo sapiens
  chr9:124990828-124991083
  hyper
cgtacccctccttcctgcaaccgcccgccaccctgctcggcccggctgggtcccggaccctgcccgaccccggcccgggccgctcacccagtcgttcgccggctcacctggtcggtggcggggccgccctcggccggcagccggcagccctcgggcaacgccggggcggcgttctcatgcttccagtacatgggccggggaacctcgggctcagcgggcgcgcagcgcggagagctgcgccgagggggaccacag

SEQ ID NO: 7008 - DNA, 31 bp, Homo sapiens
  chr9:125587779-125587810
  hyper
aagtagggtgaagaaacgccttttaagtaaa

SEQ ID NO: 7009 - DNA, 247 bp, Homo sapiens
  chr9:126759126-126759373
  hyper
agtcagccctggaaagtttcccgtgtgaagtttaaaagcgcctgtgctgaagaggccgactttgaagcagcttgccggggccccttggcaggctcctgcgagtcagagggccggcctcgcctcagatccgctgcgcctgcctccgcagggctgggaaatgggaattgtttttaagttgaaaaattactcatggagctcactcctttgccactgctcttcttttgttctcagtcgtcgccttcctctg

SEQ ID NO: 7010 - DNA, 1416 bp, Homo sapiens
  chr9:126770484-126771900
  hyper
cagcaaacacacacttctgaacgtcttcattttgatttaatggtatatcagcgtcaactatcgcttcctctgctggtacacacggcctgatgccgcgggaggagggtgcccatgtttatcaccgagtgagatgactaattacaccttgtcaatcaccggctatgaagacataaaaccagcgcgcacaatgaagtagttgcctgcagcgtcaattagttggcgattctgaggttattgcgtggccctgctttggccgcctctaataacgggacagagcgccgggcaccgcgcactgatcaatcaccctccttccgcggccgcccggctccctcccctctcccccgccgggtctggcctcactttctccgggcggcttgcgcttcctccctccgcggccccggctccgtggcgccggcagccccgggagccccgggaagtttgcgcgcggcagctccgcagccggcagccgggagccccgcagccttcggggagcgccggggctggtggcccctttgttggaggaggcgtggagggagcgcttttgttctgagttagtcacggtggccggctggaggctgctacctcattatgcgccgggtctgcttgtctgcgaggaagcagatggtggggaggtaggcagcggcgagagtggccagacctgaattccgttcacctgtcacctcccacaaaaggcaggttcgggggacttaggcattcgttgccactttctgggggagggggaggtcgaggggccgccgtttccggcgcctgcgaaggttccgtacctgtcggtgcccgctccccccaccccttgcctttcccttggctgcagcttctcgcaccgcgtaaatgtcactcacgtgtcaggatgtgtgtttacagcctgttcctctgcttgtttagtctcggcggacagggctcagcggttgcgcgacgttccccgccgctgggggagattagcaaagttacccgcctctggaccccggggcctgggcccctagatcccgccccgcggcgggagatgcgtttgagccttttacagacggagcgcgtcccagcctgacgcagagggatgaatagacaagcgcaccgggcgggaatcccgactgcctgtgtatctggggtcggcccagcgttggacgtgggctgctggtccgagaggtggcgacggaatcgcgtgcctatatgtatgggggagtggaaagtcgcagggtgtgtttccacgtttcttgagcagcccgcggcaagagttgctgagtaccccaccccccgcccccagatcctaaggcagcccctcgagctttccaaacgtattgtatccagccctcccgagagtggagttgcaccaaggacaaacactctagcgtcattacaaattttttctgccccttgggcgacctccagatgaaccctggt

SEQ ID NO: 7011 - DNA, 30 bp, Homo sapiens
  chr9:126774208-126774238
  hyper
aaccccgaccgcagccgtcgccgcctcggg

SEQ ID NO: 7012 - DNA, 183 bp, Homo sapiens
  chr9:126779860-126780043
  hyper
cagggttccgaccacggggacacgagcttgtttgtggcagtgtcccacatcctgtggcccagccacgacgaccccttgcaaagcctcttgctctggggacagtccctccgaggcgcggcggcaccttactgaagggcggcgagctgggggccgagtggggagggggcgccgtcggggcgccgg

SEQ ID NO: 7013 - DNA, 452 bp, Homo sapiens
  chr9:126780284-126780736
  hyper
ggaccggccggacgcccggcctcccccagccccagctttttgtgtgtgtgtgcctggcggcgtaattactgatttgattccaatccattatttagacaattgaacctacaatctcgtctttagtaaaatgaggcgaagtcagatttgattacaggttcagtcccagcgacaagagctcgaaacccgatgggttaataacagatcacgagtaaattattcatgattttacgagctctttagctccattgaatcggcctaattgagaggaaaaaaaaaaaaaaggagagagaaagcccgggtcctccccctcccctcggcccctcgctcctccccggatccgatcctggggaatctcgacccgcccccgggcactgggggcgggagtgagggggttcggggcgccggccaaacctgggccccacggctgcctcccccgccgccgccccctgccc

SEQ ID NO: 7014 - DNA, 304 bp, Homo sapiens
  chr9:126783289-126783593
  hyper
aatgtttggcagtgggtggggcgagtgtggatttggcatggggggcgggtcaggaagttcacccaccggctctgtgtctcctccctagcgctaagctgcaacgaaaacgacgcagagcacctggaccgtgaccagccatacccgagcagccagaagaccaagcgcatgcgcacgtccttcaagcaccaccagcttcggaccatgaagtcttactttgccattaaccacaaccccgacgccaaggacttgaagcagctcgcgcaaaagacgggcctcaccaagcgggtcctccaggtcagccagg

SEQ ID NO: 7015 - DNA, 245 bp, Homo sapiens
  chr9:126785000-126785245
  hyper
aaaaaaatgccctctgtggggcgggtggaggctgtgacgcggcgcaactgcagctgcagctgcggggggagccgggagttggggcccctaggctcccgaggcgcccccttgagcagcgctgcccacggggagcgggcgaggggctgcgggagagggaggactgggtgacgtagccgagggagggagcgtcggccaatgggatgccgatgcgcccctctgggcccgcccctccctcatggtctgtt

SEQ ID NO: 7016 - DNA, 86 bp, Homo sapiens
  chr9:126872693-126872779
  hyper
gaacgtcacagaggccgatgaacttggagacacggggaagaatggtagagattgtaatcctttatcagcaccgcggacagcatcca

SEQ ID NO: 7017 - DNA, 172 bp, Homo sapiens
  chr9:127005137-127005309
  hyper
agcccccagaggaaccgctgccttcatactcctccagatggtctaagccctcctgcctcccacccctcccacacacgaatgcaggaagtcctctgagagcctgctggatcagtttcctttccgcttcctttctcttcctctccggtgagggctgggacgcagctggcggagt

SEQ ID NO: 7018 - DNA, 31 bp, Homo sapiens
  chr9:127061459-127061490
  hyper
atgtgtgcatgggtctcgcaggggtgacctg

SEQ ID NO: 7019 - DNA, 30 bp, Homo sapiens
  chr9:127212885-127212915
  hyper
gtggtgggcaaacttcgcatctccctctcg

SEQ ID NO: 7020 - DNA, 30 bp, Homo sapiens
  chr9:127532193-127532223
  hyper
ataaaaacattccgcggcaaacaccgagga

SEQ ID NO: 7021 - DNA, 94 bp, Homo sapiens
  chr9:127534415-127534509
  hyper
tccggaagcaaaatcccgaattttgcagcggctcccggccgaatccacccgctgcggccaccaggtggcgcgcggccaccggtcactaggcccg

SEQ ID NO: 7022 - DNA, 30 bp, Homo sapiens
  chr9:127963166-127963196
  hyper
tcagtggcctaggccgcaggtgagatttat

SEQ ID NO: 7023 - DNA, 31 bp, Homo sapiens
  chr9:128024544-128024575
  hyper
ccagagacgagaggcccggcaggtagggaac

SEQ ID NO: 7024 - DNA, 31 bp, Homo sapiens
  chr9:128096836-128096867
  hyper
gtatttcttatgaatacgtaattgggtattt

SEQ ID NO: 7025 - DNA, 31 bp, Homo sapiens
  chr9:128138375-128138406
  hyper
tcacagatgaggaagccgaggctcagacatg

SEQ ID NO: 7026 - DNA, 421 bp, Homo sapiens
  chr9:128651895-128652316
  hyper
ttaatattcctgtgtaagtgtcgcacaaaagtaaacccaaagagcccgcacatgacacggaggctgctccatttacattaattatgcagtcagggcggtgagaattcgctgtcagccagcagggcgggggcgcgccgcggcggggagcggggccgggccgcggggcctcccggcgcgaacgcgggagggggagccggatcgccgtccgccgctccgcggctccgcgctgcgagaacaatgggcgcgcccgacgcccgcccgcgctcgcgctgcccggcgcgccccgaaagccgcggggcagagcgccctgagcggtcccccgcgccggcggccccggctgcgccccgctgtagcagctgaccttagccggctgcggccgagagaacgcgcgttgcccgccgaccttgtgccctggggtcag

SEQ ID NO: 7027 - DNA, 31 bp, Homo sapiens
  chr9:129296527-129296558
  hyper
gcagatgaaacgctcccggggtgggacatta

SEQ ID NO: 7028 - DNA, 483 bp, Homo sapiens
  chr9:129372554-129373037
  hyper
ccactcctccgaacccggccaggactgcaccctgcgctgccccagatccgtgcctccagctggaatggtaaactgggagggggcagtgtggctctggctctggtcagaagcacaaaacaatccagacagcccggagcgggatggacagggctgggtggggtgggggagggcagctcatagagccgtgctcgagggaggcgggtagcgcagaggagagggtgcaaggccctaagaagaggagcggggggactagggcggggctcaatggagctggggcgtccgcagactggaaggagccgggacccccgctccagagcctccctttccattctcgcttcttccagtgattccgagcccccgactcagtctttcccccaggtagagagaatccgaggctgtttctgccgctgaaatctgagcgggagagcatcccgaagccgcctgcgtggagcgagcagcccccgcgtcatgggccagaggcgc

SEQ ID NO: 7029 - DNA, 75 bp, Homo sapiens
  chr9:129373250-129373325
  hyper
cgaaggacccgagaccggccaactcagctgggagcacgggacacgaggagtgaggacaaagggcaaggaacgggg

SEQ ID NO: 7030 - DNA, 283 bp, Homo sapiens
  chr9:129373384-129373667
  hyper
tgtgtgtgtgtgtgtagggggaatgaatggacagcggggaaggcatgcagaggggcccaaggggtgtggactcagcagccccaccccagaccagagaaggcagccaggctctggcgtccaccgagccagcgcccctatctgggcgcgggccgcatggcggcagaccaccctatatccgccttggtggcgtgggatatgactggcaggagcgcggaagaggcgctgagaatgcatgcgcacccggacagaccagacgcggcacggagggggtacttcccacaag

SEQ ID NO: 7031 - DNA, 403 bp, Homo sapiens
  chr9:129375797-129376200
  hyper
ctccctgccgtccgcgcagtctggcctcgctcggggccactcctcgtagcgctggagctttacaaaatattaataataaagaaggcagaggagaaaaaagaaagccttcgctccccaactcccaaatcaatttttcaagggggtggagcagagggatttgtttcgaagacgatcaaaacttctgcgaggggcccgcggggcggccgggccggggagccggggcctgagctcggggccaggcgcggcgcggggcgcgggccaggggcgcggagccccggggcgcgcgggggggcgggacggcactatttgacgtggagccggcggcgcatcccggcgcagggataccggccgcggggttcaaatgtcaggaagtttcgggaggtgaggcggcccgtatccctcc

SEQ ID NO: 7032 - DNA, 30 bp, Homo sapiens
  chr9:129376493-129376523
  hyper
tggctgcaagtgtccgggagagcgcggcgc

SEQ ID NO: 7033 - DNA, 30 bp, Homo sapiens
  chr9:129386656-129386686
  hyper
ttgagcacagccctcgcccctccccaagcc

SEQ ID NO: 7034 - DNA, 194 bp, Homo sapiens
  chr9:129387554-129387748
  hyper
gaaggggtggttttgcgggtgccttaattggcagcgtctggaaaatggggacagtgaccccacgactagaggatgaatggggggagggttagtgggatgtgtttgcctcctctgaccgagagcacgggtcctgctctgtcccctcttcccaggaaaggtggcactccgggtgcacacccaccacccccattaaa

SEQ ID NO: 7035 - DNA, 906 bp, Homo sapiens
  chr9:129387847-129388753
  hyper
cgcactcctgcaggtctccagggttggccattcccggctgcatgctcggcccctttcttccgagggtgaattcctttgttccacccccacggaaaccctcttctccgccaggcccgtggcgcctttctcgccacctccgccgccgccgccgccaccctcgtcccaccgtttgcagggctttcctgcggcgctctggccgcagagacccagccctgtctgccgactggcccttcgacgtcgccgccgtgcctgagccccgctgcctgctcggacaagcagaactccggcaggcgcagcgggcgccgaggcttgggctttagccgtggcgctcgcctcggcgcagtggggagccgcgggcgtcggagaagcggccgcgctgttccgggtcactgcaccggctgaaaaaaccaaaagcaaaaccaacacccagaaacgaagcctgcgtgcccccgggggctccgttttgctcccctcatggacatgggggtggggagctcgtggggtttcagcccaaaggctccagtcagtggaaccggagggggacttcggaggaatttgtctctgatgtcccggctccctggcctcctattagaactcgtagaggatccgctctggagtccccgtgcgccctggcagaggtcggggacgccagagtgcacgcagtctcctgcgcgccgagcccaggctccgggcgcagggaggatcgggctgagagcagggtgtcacctcgtaaaagcgacaggcaaggactgttttatggggagggagaaggagcaggaagtgatgcttccatctctgacagcatagggaccgggagctccgatggaggaaaccctttccgggcaggacgagtagagggacaggacatggccggggaccatgggattcgctgccattaagtatggg

SEQ ID NO: 7036 - DNA, 68 bp, Homo sapiens
  chr9:129388816-129388884
  hyper
cgtcctctcctggagccccctctgcaatcccggctcagtcggcaaccggcccttccttccaggtcagg

SEQ ID NO: 7037 - DNA, 369 bp, Homo sapiens
  chr9:129400758-129401127
  hyper
ccccacgtcccagctcgggggctcacaaagggagaggagggaagagcaaaatcgcagagatttgtcttgtctggggctgacagcggagcgagtgattgccaggcccgcttggcagtttttaatcattttatctctgttctcggctctcgggggagacagccagtgcttagcagtctgctcagaaagacctcggggcgcgtggcgcagcggcggctcggagctcccattattagctgtgctcttcggagcgcgctccgatctctcccgggggagccggtgaaaaattaacacgggccggcggcgcgggcgcccgatgtaactgtaattactccattgatattcctcacacaatagcgctgtcatcagtca

SEQ ID NO: 7038 - DNA, 31 bp, Homo sapiens
  chr9:129413244-129413275
  hyper
ttctgataaagataaacggaattgtttatta

SEQ ID NO: 7039 - DNA, 521 bp, Homo sapiens
  chr9:129445249-129445770
  hyper
ggctggcctgggatggctccccgggctcccggctgtgcccgtccctccctgtccctggcccgtgacctccagccccggctgggggctcccgacagcgcccctggcgcggatcaaagggccgaggggccggcggccccgcacagctgcgggccgcaggaagcgcaggggcagccctcgctgcaggcccggccccgacgcggcgaggaggccgggggaggccgggaggctgggagaggccccgcgaggcccgcagagcgcgcccgtctcgccgcgcattccagccgcgtgattgacgcgcgtaccggggcccccgcccgcggctcccgccgccgcccgcccggcccgcggccgccgcatcaaagcagatgtttgcagctggtttgagttggatccccatcaacaggcccttttttgtctcaaaataaaaaacagctacgcccggaatgataaggacgcggcaggcacgtgggggagatgtcagcgagtccggcagggaggaggccgggcggctccctctctaa

SEQ ID NO: 7040 - DNA, 30 bp, Homo sapiens
  chr9:129567403-129567433
  hyper
cttggcaggtactgcgtggccaggaccacg

SEQ ID NO: 7041 - DNA, 219 bp, Homo sapiens
  chr9:130159224-130159443
  hyper
cacctgtaccttggaccgctccgccctaggggcggttccagcgcgcttcgctaatcggttctatgctcccattggtctgctttaatgtgaagggcgggtcctagctgattcgctagccccgccttgcgttcctattggctgctcctgctctgcggttccgatcccgcccagcaccgtcccccaccccccgccgcccattggctgcgagaggccggtgcg

SEQ ID NO: 7042 - DNA, 31 bp, Homo sapiens
  chr9:130320411-130320442
  hyper
agcccctcactgtctgcgcatagacgggcct

SEQ ID NO: 7043 - DNA, 317 bp, Homo sapiens
  chr9:130330785-130331102
  hyper
gacccctgccccagctcggccaggggtcgtgggctgggggtccgccaagcccgggctccgaaggggttccgggagagaaggagttccgagtccccttgagccgggaaaggtggcgctcagaagagcgcgggaaggggcgcccaggctcagagggaacgagctcggacgcggggcacgctccctggcagctcccaccggcccggcctgactcccccgagcccccggccccggcgccaactgctggccggggcgggggcgtggtccgggggttccggcaggcccctgggcgcgcgtggcgcggcgcgaccctcacctgc

SEQ ID NO: 7044 - DNA, 30 bp, Homo sapiens
  chr9:130331661-130331691
  hyper
gcgaagagcgcacccgccctgtacctaagc

SEQ ID NO: 7045 - DNA, 30 bp, Homo sapiens
  chr9:130375598-130375628
  hyper
gcttcggtgtccgccgcccagcgccgcagt

SEQ ID NO: 7046 - DNA, 252 bp, Homo sapiens
  chr9:130461686-130461938
  hyper
gggactgggcttggggaggccgggcttccggggctagtaagcgtctactagccgggctgtttagggattggtcgcctctggccctggaggcgggggttcctggagtaagacggttgctgattggctggctttccgaggcggggttgtgaagcgttggtcattctatctgggtgctgggttaggcagtacgaatactaaaattggaaccagtgacacgcagattggtgaagcgttccatattttttccatgtg

SEQ ID NO: 7047 - DNA, 8 bp, Homo sapiens
  chr9:130564941-130564949
  hyper
gggacgcc

SEQ ID NO: 7048 - DNA, 164 bp, Homo sapiens
  chr9:130639866-130640030
  hyper
ggcgcccccccagacacgcgcgggcacgcactgacctggggaggggtgcgggtgggcgccggggccagtgcgtgccctgcccgtcctcgcggcggccggcaaaggcgactatttataaggctgtcagcgcgcggcatgccgggagccggcgttcccgaaggcag

SEQ ID NO: 7049 - DNA, 96 bp, Homo sapiens
  chr9:130661050-130661146
  hyper
cctggaggatccctctcggctggaacgggtcagaggccatggagtgtgtgcccaggacgtggctcggcacaggcaccagggcgggggtctaggggt

SEQ ID NO: 7050 - DNA, 453 bp, Homo sapiens
  chr9:130674525-130674978
  hyper
gcaggcaggccccaggctcaccggttcttgcccgtctcgtcctggaagatctggtcgcagtaggccatcatgcgctccgtgaaggtgtacacctgcaggccggggtacatcctggtgagctgcagcagcgtgcggtaggtgcggccgccgagcacccggtccatgtgcctgccctggccccacaccatgtagagcgtgtctcgggccttctggaagtagtgtgaatagttgcgcagcagcagcggcacgcttgtgtgtgagacgacacgcagggtgctgcgctggcccacatccgcctcaaagcccacggtgggcgcctggttcatgcggaacacgcactcggcactgtcgatctcagcacccaggcctgagcccagcatttggccggagctggacaccacggcacagctgcggcagggctcgcggaccagcggctgcagggcaggcagggag

SEQ ID NO: 7051 - DNA, 377 bp, Homo sapiens
  chr9:130679367-130679744
  hyper
cgggggcggggcctgcgcgccgcaggcggatcctacgagcgcggcctgcgcgacctggggagggctctgcgcggccgggacggggcgggacgtgaatggctggcggcgaggcctccagctaggggcggggcctcagggccgggggcggggcttcagagccggggcggagtctgagtaccagcatctcccttttcggtcctgccgaatttccagcaggctcctgcctgggcgaggctgtcgggccgcaggggaaagagacctagagggtgtcgggggccaccaggcagtggcggcctggctgtccggacttgagtgtctccatttctgaaatggtggttggggagggaaattaagcagggcttcgggtcaggcagccc

SEQ ID NO: 7052 - DNA, 31 bp, Homo sapiens
  chr9:130865695-130865726
  hyper
tgaatggttttctaaccggcacctcccggct

SEQ ID NO: 7053 - DNA, 30 bp, Homo sapiens
  chr9:131038312-131038342
  hyper
ggagccagaggaggcgtaaccagggcgata

SEQ ID NO: 7054 - DNA, 199 bp, Homo sapiens
  chr9:131127288-131127487
  hyper
agccctcgtctttggcggcagtttaacccgagccggggcggatttctttctcactgatctcagcttgacacccaattagcacaagaatgggaggaggaagcctgcgagaggcgcctcccagcctcccggggcgcgcgaggggagcaggcgggaagacaaaggacagcaggcaggggggcacccgcgccctcgcctcccc

SEQ ID NO: 7055 - DNA, 40 bp, Homo sapiens
  chr9:131183033-131183073
  hyper
tgagggtgcactgccccgccctctccgggtctgcctcggc

SEQ ID NO: 7056 - DNA, 43 bp, Homo sapiens
  chr9:131219334-131219377
  hyper
ttcccccggtagccaccggcagtcctccgcgtgggacccgggc

SEQ ID NO: 7057 - DNA, 38 bp, Homo sapiens
  chr9:131709587-131709625
  hyper
tagacctggggcttcacggaggccggggcgactacgga

SEQ ID NO: 7058 - DNA, 303 bp, Homo sapiens
  chr9:131843184-131843487
  hyper
ctcgccccagattgggcgccagctggggcggctcgttggctcccaggggccccgctctctgattcgccgctcgggccagcccccacggcctgcacgctgaatggctgcgccgctacctatattggcctccgattgggtgcacggcgcctccccggcgtgataggtcaggaccaccgcccccctggctccccattggctgctcgaagaagcccggtctccgggtaagatggcagcggacggacagtgctcgctccccgcttcatggcggccggtgaccctcacccacgtcgaatatcctgcagg

SEQ ID NO: 7059 - DNA, 324 bp, Homo sapiens
  chr9:131872520-131872844
  hyper
tcccccttgtctttcctgggtcgttggaactgaatgctccaggacgtgggtttaatcccgcttctgaccttgcgccccaatctcctgctctgccaaacctgggacgcccgcctgaccccaccccatcagctggaggccgggtcgaacagcggccgcaggacgcggtctccgttcccggacgcaaccgcacggcccgcccaggccgtccagggccctcaggcccgggatccgccgcactcaccacggtcctggcagcgaaggctaacatcttcgctgcccgtccgcggacacgcagtccgctccgccccacacaccgggcaaagt

SEQ ID NO: 7060 - DNA, 13 bp, Homo sapiens
  chr9:131872856-131872869
  hyper
cgccgcggctggg

SEQ ID NO: 7061 - DNA, 30 bp, Homo sapiens
  chr9:131938203-131938233
  hyper
gtctccaacgcagtcggcggtcccggcccc

SEQ ID NO: 7062 - DNA, 31 bp, Homo sapiens
  chr9:131997502-131997533
  hyper
acgagggtatggtcctcgagggcaggaactg

SEQ ID NO: 7063 - DNA, 69 bp, Homo sapiens
  chr9:132145664-132145733
  hyper
gcccgggcctggtgggcgaaaggactcaaacgccagagctctctgaccctcggccgccagggttcaagg

SEQ ID NO: 7064 - DNA, 181 bp, Homo sapiens
  chr9:132176627-132176808
  hyper
ggtccttttgttcacgtatccccctccccggattgaaccagcaaagagcacaaagcagaaaatacatccttgccgcccgcaggctccctcatcccgcagaaaactctgaaacagtccacacccgtcccaaagttgagagaaacctggacgtttcataaacaaaacccgccctccagcagcg

SEQ ID NO: 7065 - DNA, 406 bp, Homo sapiens
  chr9:132244507-132244913
  hyper
tcccccgcgctcctcccggaccccaccccgaggcagctttctcacaacgggatcctccccgggcggcgtggggacgcctcccgaccccgaggcccggcaggagagccgccaccgcggccgggtggtctccgcgtcgcatggcccctgccggcccccccgcccatggcagctacataattaattcgcccataaataactgattggggtcgcgcacgcgcccggtgtccctaggactgggatccccgttagggttaggggcgtggggggtcgggggccgcggggctgtgcgtgccggggcgcacggttttgctccgcgggcctctctcgctccctcgcgccggctttttccctttttctctttcctttttttctttcctggagcggagcccggcgccaggagtctgga

SEQ ID NO: 7066 - DNA, 340 bp, Homo sapiens
  chr9:132245128-132245468
  hyper
ggccgggcttcagagccgcagtaaatgaggcccggggcgggcgggggtggacacggcctcggggccacggcctcccccgccgagcaaggcattcctttccgctgaactgggcgcccgggcccgcgccgcgccctgcacgcctcgcgcccggcgatcgggcccagggcgggggagcagggaggcggccccagccggtcgccggcgcccccaggcgctgcttcccaggagctcggctccccgggatggaagggactgatacccagttaatgggcgtggagcctgagcccctgagggtcgtcgctaacgggggtcgctcagcagggccggcctccgctgcctg

SEQ ID NO: 7067 - DNA, 89 bp, Homo sapiens
  chr9:132258285-132258374
  hyper
gggcggaaagggttaacgggctccgccgcattgggctgtccttcaaggggggagccagccaatgagcgcgcgccgcgatgaggtaatgc

SEQ ID NO: 7068 - DNA, 223 bp, Homo sapiens
  chr9:132258618-132258841
  hyper
aagcagagtgggtgatcgctaaagaccctaccagctgtggacgtccttggatcccaggacagttttcagcccttccctgcccttggcccgaactttaacggtcccagccccggcttcccctcaggcggtgcccagtgccaggacctaggagtccctcgggccacggggagagagcctcaccggcccagccacgccctccatgtgaccccgacccatcccttgg

SEQ ID NO: 7069 - DNA, 31 bp, Homo sapiens
  chr9:132318706-132318737
  hyper
ctcttggggtctggatcgggatccatggtgg

SEQ ID NO: 7070 - DNA, 78 bp, Homo sapiens
  chr9:132331031-132331109
  hyper
ggaaaggagagggcagcgggcgggggcgcctggccgcgcggggtcggccgcgggtcgatacggcggcaggatgaatgg

SEQ ID NO: 7071 - DNA, 175 bp, Homo sapiens
  chr9:132373578-132373753
  hyper
gcttcagggaaagaggcggcggctcaaactttctccagggggctggaacgcaggtgtggcaggggcaaacctggtgggcagggtctgccaccttgtctttcgccacctcctgatgcagatttgaacatccaccccctcatccccagactaggagagaaaccgtgggccccagccc

SEQ ID NO: 7072 - DNA, 100 bp, Homo sapiens
  chr9:132382254-132382354
  hyper
tgggtggtggggtggtgggtgcggggacacaagggaccaccccccaccggaaatgactcgggcccgccccccgggccccgcggggcctcactcagtggct

SEQ ID NO: 7073 - DNA, 196 bp, Homo sapiens
  chr9:132382811-132383007
  hyper
cgccaggtcctgggcccctgggcgaagtcgacgccagaacatgcttggccccgcactcagctcaccgcaccctcagcgcgcgtgggtggggggcgccggctgaggtggggagggcatagtccagccccaggccatagtgccccgggcggggcagcgcggtgcggggtgaacgccaccggcccggcggacagcgagt

SEQ ID NO: 7074 - DNA, 378 bp, Homo sapiens
  chr9:132804283-132804661
  hyper
tgctccttcccgggccgccgcactgcccatcccctgcccagtgatttccccaggaatccggggacggcaggaaaagagctccatccacagccagcccctcgcctttccggggacggccctcagccctgagggctgcccgtttaccgtgcgcatcccccggccaagcatccccgcaaggcgcccctcaccgccaactttccccactggaaactattctccgagcaaccgttaaagatcattgaccccgcgaacgcctcttcctgaggtagatcacgtaagatctctccctaactcccactttcccctccagaccagacgtcgcagtgcccacatcccactcaggattgagctaccccgaaagaacaagtgcgcccggag

SEQ ID NO: 7075 - DNA, 285 bp, Homo sapiens
  chr9:132804693-132804978
  hyper
cgaagaccgcactctcgccccagcaccccaaaacccgacccccggcgctcgccccggccgccccgctcccggggaagtgcccgatccgccagcgcctccgcggagccaggacagaactcgcggccggggcgccccgagacccaacgcagcgccgcgcagccggggcctccacgcccccacgcccggtcccggccctccccgggcatccgcggctcgccccgggggattagggctcggcccgacacacacggcccgctccggggcgccggggacagggaggcccgc

SEQ ID NO: 7076 - DNA, 918 bp, Homo sapiens
  chr9:132805028-132805946
  hyper
cgaaggacaagccggcccgcacctcctgctcgggccaaggcggacgaggggcattggaaccccgcctcctccccaggccgcgaggaccccgaccagcgcgccctcgcctccgcccagcagcgcggcccgcgccccctccccaggccgcggggaaacgcagcgcgcgccccgcatctgcccgcgggcccagcccctcactcacccagagctcggtgccccagctcatggtgcaggggacgcgaaggggcgctccgcgcggcgggcgcggctctctggtccccctccccggcgatccctttgccccccgagatccccgcgacggcggaaagcccggagtccgcgcggcctcctccggctcgcagctcctcgcccggggtctcctcggcggctcctcctccccgccgctccacagcaaaatggcccgaggaagcagcagccgcggccgccgcagcgcccgcccgccctacacccggagagcgggggaggggcgggaggggaggggcggggccggtctgacagctcgcgcacgcgcgcccgccccaccccggcccggccccctcccccgggctcccccggccgggtccgcgtcgccctggggtccggaaggacgcggagggaggtgtgagggacggcgggacccggatccctaggactccccctgccaatctggtaatgacttcttagtgaccactgtctgctcgcagtactagcgcttgccttggaacgcggcaggccctgggatcaccgatgctccgccgcggtctgagatcgctcccctgcgcgtatcgccgctctggatttaaggacaatactttcccctggcagccatgcgcgccgagcagagtcagcccgggaggctcttttcccaccgcccgagggaagcccgagagtcccgcaggctggcgcggtgggagtggg

SEQ ID NO: 7077 - DNA, 31 bp, Homo sapiens
  chr9:132809114-132809145
  hyper
tccactctccttcccccgtactccatatatc

SEQ ID NO: 7078 - DNA, 30 bp, Homo sapiens
  chr9:133320766-133320796
  hyper
tgtgggggggctcccgattctctctccctc

SEQ ID NO: 7079 - DNA, 227 bp, Homo sapiens
  chr9:133535706-133535933
  hyper
cgggctcattccggccgatcgatacctgcgcgggacctgcccccgccgctaatatctttttaatgagttcgccaggcttaaagcgagcgcgatctgccctccagggtggattttcccccggcagatgtttcgggaggaggaggcgcgcggagctcccgggaggggggacaaatctctccctccgaggggcgagaacaggagactttcttctaaagttcaaaagaaag

SEQ ID NO: 7080 - DNA, 148 bp, Homo sapiens
  chr9:133535971-133536119
  hyper
cggacaatgggcttctttctgcgcctctgagggccggcggggcgggcagggcggggacccgtgcgctttggccccgcctgaccgactcgcacccccctcccccgcacccaggcccgggccccagagcgagggcgcaggagccgcgaag

SEQ ID NO: 7081 - DNA, 341 bp, Homo sapiens
  chr9:133536149-133536490
  hyper
cgcactgtcgggacctggctctcccggagctaagccccggcgcaccggcgagaacgaaagcgtcgtgcggggccctgggctgtcccacacgcccccgttctcataggtgcctcagccgggccgaagggacgcgcgctggtgcctcaaggggaggacgaacggacctccgggcttgggccgcggcctccttcccctcggcgctccgccctgagcggggcaacaactagaaattagccaaccccgggcggctgccgggccctgagactgtcttgcccgccccggcccagccacccctccgggtcgcccctgctcttctcctccacttccccttcaatgtccct

SEQ ID NO: 7082 - DNA, 100 bp, Homo sapiens
  chr9:133536515-133536615
  hyper
cggccctctctccactcccgtgggctcaggggaagagggcacccgggcggcgaggatgacctccgaagagccgcggcaaattgattcgttccgcccggag

SEQ ID NO: 7083 - DNA, 109 bp, Homo sapiens
  chr9:133536699-133536808
  hyper
cggagcgggaagcggggccattcactcctggcccggcccctcgggaagccgcgccgaagaaagggggccgaggcctattcaagtcctacgagccgcccacaatggaccg

SEQ ID NO: 7084 - DNA, 469 bp, Homo sapiens
  chr9:133537658-133538127
  hyper
agcgctccccgacgtcgtctccctcgctcctagcactttgtcctctccacctaggtcttcccagaagccaagaagtaggccccggtgaggctcccctgcaggagccatcggactccatacgccccctcagactcgagctctggccagggagccgatgcgacccacaagctgcgtcgaaaaatgagtggagggttcggcgaccctaacccacctccctcctcagcagcgctgccctctgctggcgccctgcccaacggtcctgccttctgccaggtgtgcccttccttgggctccagcctcgggcggacccggacgcagggtctgaaggccagctaccgccgccttcctccctttgcgtcccaacggggacgggggatgccggagactactggcaggaactggggaccaggggtctggagtctggacgccaggtgtgagaccctcttagccaaggcgcgtccgggtggtg

SEQ ID NO: 7085 - DNA, 30 bp, Homo sapiens
  chr9:133538377-133538407
  hyper
tcagggcctggggtccgaggcttgaggctg

SEQ ID NO: 7086 - DNA, 30 bp, Homo sapiens
  chr9:133542110-133542140
  hyper
atgggccccttcaccggccgcgtgatcgcc

SEQ ID NO: 7087 - DNA, 30 bp, Homo sapiens
  chr9:133569221-133569251
  hyper
gcgagagactgggccgcgacactaagaaac

SEQ ID NO: 7088 - DNA, 30 bp, Homo sapiens
  chr9:133660745-133660775
  hyper
ctgctgccctgggccagctctggatcacgc

SEQ ID NO: 7089 - DNA, 1217 bp, Homo sapiens
  chr9:133710180-133711397
  hyper
ccttaatcacaggacgcgcgttgagtagaaatgagaccagttagtattggtaactgcagaggaatatgcattttcaccagcgttctcgggtcagagggtttgcctggcaccgcgtactgggaaactcgccaaaagcggtgcaggttggagacgccccaggccgcggtggagttgcgcgcggcttctaaagtggagtggagcaggcctgcaccctccccgccggggctgggacggcgcttccaggcggagaaagacctccgcgggccgcgcgcggccttccccctgcgaggatcgccattggcccgggttggctttggaaagcggcggtggctttgggccgggctcggcctcgggaacgccaggggcccctgggtgcggacgggcgcggccaggagggggttaaggcgcaggcggcggcggggcgggggcgggcctggcgggcgccctctccgggccctttgttaacaggcgcgtcccggccaggcggagacgcggccgcggccatgggcgggcgcgggcgcgcggggcggcggtgagggcggctggcggggccgggggcgccgggggggcgcgcgggccgagccgggcctgagccgggcccgcggaccgagctgggagaggggttccggcccccgacgtgctggcgcgggaaaatgttggagatctgcctgaagctggtgggctgcaaatccaagaaggggctgtcctcgtcctccagctgttatctggaaggtaagcccgggccgcacgggttgggctgagtagccgcgcgccctcccgctgctgctgggcccttcctaggcctcgccgcccgcgcgctcccgcctgcgccctccccgggtcttgtcttttttttctttcttccctcttctcttctcttctcttcagttctcttatattctgtctctctttctttctctctgtgtctgtctcttttctcttctcttgtctctctctttttctctctctctgtctctttctctttctcgcgatggcccctaggcgccgccggcggagcgtggcccccagccccggcaccagccccggtagagccacgccggatggtgacggcggcgtccggggccccacagtgcgggctcccccgaaaaagtttgagaaagccaactcgccaggccttaacatccctgggatcccacgttgtggaatttccaccgttaattgggactgtgtgttaaaaagatcgacccgtgtttgtg

SEQ ID NO: 7090 - DNA, 6 bp, Homo sapiens
  chr9:133972628-133972634
  hyper
tcattt

SEQ ID NO: 7091 - DNA, 596 bp, Homo sapiens
  chr9:134151950-134152546
  hyper
gccgcgccaccctcgcggcagaagcctgacttcctgccctccggccttccgcacgcgctccctccgggccccgcacccgcacccgcccggcgcggtcgaatcaattgcagagcagtttgtgttcacccggccgaggtcccggcgccctcggggcgagcgccgacccgcggcttccaggaggcgagctcagggctccggccgctcgccggtgacgggggagcgcggcgcgggtccccgtcggcgcccactcgcgggcgcgggccggacgtccccacgcaggggcgccgcgtcccttcgccgctgtcgctgccggccgccgtgcagggtcccggggctgcgctccggccgccgccgcctgcttcgccgcggccgccgaggacctggtgggaggtggaagggacagcgcgtcaaggccagcctcaaagttaagccgaactttgctgcggggggcgcgcgggggcggcgacgcgtgtgcgctgggcgcgggctgcggagctgacggcgcagctctgggcggtctccccggaggcggtggcccccgccccccgcgcccgccccgtcagtggcggccgcacgaccgcgcgcaccagcgaata

SEQ ID NO: 7092 - DNA, 173 bp, Homo sapiens
  chr9:134158022-134158195
  hyper
gtccctcgctgcccaccgagggtcccaggtagggctcctggcctcgcactccgccccccgaacccccgcaacaccctccactccccctctggccgggcttccccatcctcctggaggtttctaggagcctccagccaccgccctgagcgcctaaggtcttccccgcccggggc

SEQ ID NO: 7093 - DNA, 47 bp, Homo sapiens
  chr9:134158229-134158276
  hyper
cggaggctcaggcagcccaacgccggcaccgcggagctgcagcgcgc

SEQ ID NO: 7094 - DNA, 30 bp, Homo sapiens
  chr9:134422093-134422123
  hyper
cctggcggaggctccggtgtcaagagcctg

SEQ ID NO: 7095 - DNA, 595 bp, Homo sapiens
  chr9:135036692-135037287
  hyper
actcacttggcccccctccctcgtgccgatggggcagcccccacacccatgggcgctggcaccccggcaggcccccgggttttggaagaggaagctgcagcccggctgcgcctgaccggagccggctgaggatgcgctctgggcgcagggacccgctggcccccgggccgggaggcgatgtttaggcagcgaccccccagaggctgccggggccaccctggccacgggcccgccgggacgcccctgctcgccgcgcccctccccgggccgtggcgcgtcccccgagccgcgcaatatttccttcctgcacctttaagaagaccgttgctccgtggtgggatggtgtgttaaagccacacagaggaagttacgcagcccggatcagaccgagagataaaagccccgatggtgatcgtgagtgatggcaagaggatttagcctcggcattaacttggagcggagtgcaggggggcagtgaagcgcccgccatctggcccgcgccgcgccggggggatgccccggctccccgacgagacgccgcgaagcccacccgggccgggggctgcccggcgcccgagcgcgggtcctccccggg

SEQ ID NO: 7096 - DNA, 31 bp, Homo sapiens
  chr9:135037501-135037532
  hyper
agcggctcgcagccctcggcccgcgccccca

SEQ ID NO: 7097 - DNA, 31 bp, Homo sapiens
  chr9:135077790-135077821
  hyper
ggggcaggtgggctgccggtggctctgagag

SEQ ID NO: 7098 - DNA, 30 bp, Homo sapiens
  chr9:135117913-135117943
  hyper
gcggcggcggaccccgacctccagttgcct

SEQ ID NO: 7099 - DNA, 770 bp, Homo sapiens
  chr9:135286198-135286968
  hyper
cagataggtcgcacacgcccagtctaagtcgtggctgccagccctcccagggtaaaggccgcctctccggttccgctgcacgcctggggtacgtctatgcagcggtggctccgtgtctgtcctggaagcatcacgtcgaatgttcatttccgttcgatcatactaatttcttacccaaattacaaccctaagagaaaaaaagcataatctttggcctaggaggctccgcagacaagaatgagggagctgcggtttcgggctggatcactttcccttccattacacttccctcctccccacctttagcctcgcttcccgctgatgggaaaccaacactgctgtggcggccacaccttcccgggggccactggagaagtcaggctgaggcttgggggtcagggagcaagcctcgaggcgaatttatcttgcgccgctggagggcagtgcgcctttaaaaatgcgccccgcgtcccaggtgcgggagtggaaggcgcaggtggtaaccgtggattcaacaacaattatttgtgtgaccgccaggcgctgagtagagcccagaggtggtggtggcggtttgtttttgttttggggaaaagggaacccgtgctagaattaactgagttaattggctcctggcaaaacattgactccctcctcttgccttccctaaactcggtcctgagaggaggaaggatactgcctaggcgcaggctgcacctgggggaggctggcttcccacactcgtgcctttccatcgaataggctccttt

SEQ ID NO: 7100 - DNA, 30 bp, Homo sapiens
  chr9:135456387-135456417
  hyper
gaagggcgagggggcgcatgattcacaatg

SEQ ID NO: 7101 - DNA, 238 bp, Homo sapiens
  chr9:135462647-135462885
  hyper
cgggcaggagcgggagggcaccggcggcggctgcgaggccgggccctgacatgccgctgtgtccgcagtgaaggaggagggcgaccgcgagatctccagctccagggacagtcccccggtgcgcctgaaaaagccacgcaaggcgcgcacggccttcaccgaccatcagctggcgcagctggagcgcagcttcgagcggcagaagtacctgagcgtgcaggaccgcatggagctcgcc

SEQ ID NO: 7102 - DNA, 30 bp, Homo sapiens
  chr9:135465420-135465450
  hyper
tgaagttatttattcgtgacccatgagccc

SEQ ID NO: 7103 - DNA, 739 bp, Homo sapiens
  chr9:135644984-135645723
  hyper
gtctaaaatggcttttcaaggcggtcatgagcttgcctctaacccagcaaagcgtgtggaagaaacatcggcagtgagggctcccatctctcatttctcaaagagccgagactttcagcgaggccacttgccattcctggtaggtaatcagatcgctgttaattaataaagctgtcaggtggctcgtcctctctggtcattagtatcctttcagaaagagaatcctgccatcaccgccttgtccgcccctccgcttgccagcaattaacttaatgctatgcaaatgagaggctcttctcatcattagcttatagccacgaatgttaatcgcataattgggtcttcaacagggtaattagacacgatttcctccattagtcttacaaggctaattattgttgagcggagagggggactgctcccagggctccaggcgaagaggggcatctggttaaagcgaattcgggcgcatcgtccgccaggtaaaaacagcagtcgcgatccattgtcacagcccactgtccccacccatcgtggggaccgggctagggagggaaacggaaccaggggaaggcctgggggggtcacactcgtgccccttgcctgggtcctgggatgcagacaacgtggcatttaaaagtgaaagcggaaacaaacagcagccccgccagcccgggcccggaggcccagccccgcgccaagggccacccctcggcgcgctcagcttccctgggcctct

SEQ ID NO: 7104 - DNA, 51 bp, Homo sapiens
  chr9:135906505-135906556
  hyper
ggctaagatgctgccgactctgggcggcgaggaaggcgtctcccgggtaag

SEQ ID NO: 7105 - DNA, 257 bp, Homo sapiens
  chr9:136399586-136399843
  hyper
tgtggcccccagttctggacccgggaagaaggcctccctgctcgccgctcctgggccgccgccgccggcagcagccaacaggcagctgggccggcctggccgggctccagaggcgcagagcgggttaaagtgtgcgccaggccggccggcgcgggcgggggagcggcctggtgggaagtgtgagtgttcctccccgtctgcctgacagctataaaggcggccgccggcgcagagccgccactgggctgcgcccctcc

SEQ ID NO: 7106 - DNA, 30 bp, Homo sapiens
  chr9:136400042-136400072
  hyper
ggccacctcgtccccgtccccctcacgttg

SEQ ID NO: 7107 - DNA, 31 bp, Homo sapiens
  chr9:136856334-136856365
  hyper
tcccggtaaggattccgcgacccccggagaa

SEQ ID NO: 7108 - DNA, 30 bp, Homo sapiens
  chr9:136857229-136857259
  hyper
gaggtcgatggagccgggggagaggttgtg

SEQ ID NO: 7109 - DNA, 166 bp, Homo sapiens
  chr9:137255488-137255654
  hyper
cgcacctgtgcggcaccgggtgtggctggcacggtttggctgctgtctgcctgagcactgcctgtgctggccagtgcgtctcccagtccttgggacagccttgtgggaggcccaggccgccctgagcatggggaccccagggccggaggtgcgacctgagcatggg

SEQ ID NO: 7110 - DNA, 30 bp, Homo sapiens
  chr9:137299270-137299300
  hyper
ctgggtggaggcagcggaaccaaaactgct

SEQ ID NO: 7111 - DNA, 30 bp, Homo sapiens
  chr9:137533294-137533324
  hyper
agcatggccaggtgcgggcacctggggtgg

SEQ ID NO: 7112 - DNA, 128 bp, Homo sapiens
  chr9:137533836-137533964
  hyper
cccgtgggcgagcgcgccagccgccccttccagaacagccgccgccacaaagaagaacggggggtgccgaggtccccatgacctcctaaagtggtgcggtccctgctgagtgcgctgcccgggccgtg

SEQ ID NO: 7113 - DNA, 31 bp, Homo sapiens
  chr9:137580399-137580430
  hyper
aggtgccatacatgcccgagggggtgacaga

SEQ ID NO: 7114 - DNA, 30 bp, Homo sapiens
  chr9:137835238-137835268
  hyper
aatcttccaatgatgtatagagtttaccct

SEQ ID NO: 7115 - DNA, 30 bp, Homo sapiens
  chr9:137967291-137967321
  hyper
aggagagaggagggcgcagctcccgcccag

SEQ ID NO: 7116 - DNA, 30 bp, Homo sapiens
  chr9:137980454-137980484
  hyper
cagactggccggaccgggctgggagtgggg

SEQ ID NO: 7117 - DNA, 42 bp, Homo sapiens
  chr9:138024135-138024177
  hyper
cctgcctgggacgggacggctgaagcccgtggctgtctccac

SEQ ID NO: 7118 - DNA, 31 bp, Homo sapiens
  chr9:138120293-138120324
  hyper
ggggagggagggaagacgcctttgaagcggg

SEQ ID NO: 7119 - DNA, 31 bp, Homo sapiens
  chr9:138169316-138169347
  hyper
cccggaatggcctcctcgctcagaccagagc

SEQ ID NO: 7120 - DNA, 31 bp, Homo sapiens
  chr9:138613913-138613944
  hyper
gcccatcacatgtgaacggtgtcttgtgggg

SEQ ID NO: 7121 - DNA, 93 bp, Homo sapiens
  chr9:138800245-138800338
  hyper
tcgagcttccagggagcgggcgcccggcgcggggctcccagcctgtctgtacctggtcgagacaccccgtgccagaggcggaacatgtatgaa

SEQ ID NO: 7122 - DNA, 986 bp, Homo sapiens
  chr9:138986170-138987156
  hyper
aagcggctccacgacgagagtccaagaccaaacttcccccagagcctggcagaggggctgggaggtgacctctgacctccgaccccacacgatcccagcaagagaagcaggaaactccgtcggaaggcctcggtccgccctggccgtgcggggtgcgcggcgggccccgggctccgctgagtttcttagagaaggagctggggccccccgacctcagctccgcagaggcacagaagctggcaagaggcagagccccctccccctgcggccggaccccagtttctccccaggctggggcccgagtgggggaggcgcgggaggcggtgacgacccacgaacgggcccacctggaccgggagggcgaggcgcgggcccggctgggccaggcagctgcgcagatgcgccgggaggggtgggtacctccgccctggccccgggccagtcctgccccggcttccccacccggagggctggatcggccagtcgggtccctggggaggccgcgcgggtccccagaaatccagggaaacccagcaggcggcggggagcgccccgggacgcccggagccggggtctccccgaacgcgcggcgcggcgtcccggcccggggtcgcgggcgcctccgccgggaccccccggccccgcccggcccccctccgcgggctcccgaggccggttcccgcgcgcacgcccgggccggcgcggaactcggccgcacccgccccgcgcggccggcactgcggcagggggctcgcgccaagttgggcggccgcggagtttgcgggaagtgcgggcccggcccgtgggacgaccccgcccggcggcgtaacccgggggcggccgcgcgcgccaagttggcggtacctgcgggcgcccggcccggtccggcctgggcagctgcggcgcgccgcccgcggcaggaagtgcttggcgtcccggcgctccggctcccatggactttctccgacctcgcccagcaccggcgg

SEQ ID NO: 7123 - DNA, 41 bp, Homo sapiens
  chr9:139001728-139001769
  hyper
ctgaatcagctgcacccggacggccccgcctgggcaaggat

SEQ ID NO: 7124 - DNA, 91 bp, Homo sapiens
  chr9:139024429-139024520
  hyper
gagctgggaaacgcccgctgcggggtgcctgggacccccgaaggcgtcgggagttgggggcaaacggccgccgccggcccgcgtcaggcgc

SEQ ID NO: 7125 - DNA, 137 bp, Homo sapiens
  chr9:139024749-139024886
  hyper
gctgcagagcgcggagcccgggagctcgcaccgcctgttcgtggggtccctggggtgcaggggtggaggacataggagtgtgggggtcgtgggcagacccaggcgggacgctgtgccagtgccgccccgaaggccca

SEQ ID NO: 7126 - DNA, 30 bp, Homo sapiens
  chr9:139085087-139085117
  hyper
ccttcccctcacctcgctgcagcccagagc

SEQ ID NO: 7127 - DNA, 152 bp, Homo sapiens
  chr9:139090399-139090551
  hyper
actccatgggaaattcagatccgcgggctccctgggacccctgcgaccccgccgacgcgcgctcgtccccccccgagctccgcgatccctccgcctaccggggaaggagacctcagcgtcgctgtcctgcccctcctgaacgctgtccttgt

SEQ ID NO: 7128 - DNA, 155 bp, Homo sapiens
  chr9:139090586-139090741
  hyper
cggaaatactgcccccagcgctgccggccggcgtccttcttcagcctcttctccttggcccggcggttctggaaccaaacctgggggcggggcggggtgagcggccgcccggctctgcgggggcccccaaggccgcgggcgggagggaagcaggg

SEQ ID NO: 7129 - DNA, 30 bp, Homo sapiens
  chr9:139093837-139093867
  hyper
ccgcgccgcgcccgcgaccccagccttacg

SEQ ID NO: 7130 - DNA, 30 bp, Homo sapiens
  chr9:139096732-139096762
  hyper
tctgccgcccttgccgtttctgtcctcagt

SEQ ID NO: 7131 - DNA, 31 bp, Homo sapiens
  chr9:139294770-139294801
  hyper
gggggccgcctccgcgcgctctggaggggcg

SEQ ID NO: 7132 - DNA, 59 bp, Homo sapiens
  chr9:139334258-139334317
  hyper
gcggagtcagcccggccgggacccagcaaccgccgccgcggggccgcgcccggtccccg

SEQ ID NO: 7133 - DNA, 30 bp, Homo sapiens
  chr9:139377096-139377126
  hyper
ggggtccagcctcccgccccgggaaccggc

SEQ ID NO: 7134 - DNA, 52 bp, Homo sapiens
  chr9:139440853-139440905
  hyper
ggggagggcgaggccgcggacagccgtgtgcaccgtgcgctgggccgggcgg

SEQ ID NO: 7135 - DNA, 105 bp, Homo sapiens
  chr9:139519835-139519940
  hyper
gggtgctggccaagaacgctctgatccaaagaggaagcaaagttcagctgcagcaacttgacccaggacagctggggaaaaatgggcggccggggcaggggcaga

SEQ ID NO: 7136 - DNA, 31 bp, Homo sapiens
  chr9:139580673-139580704
  hyper
actgcccctggaaccacggggaagggggcct

SEQ ID NO: 7137 - DNA, 196 bp, Homo sapiens
  chr9:139581074-139581270
  hyper
gtcccccacctccctgcgaagaggaaagggagagaaaggggaacccgccccacaggtgcgcccatcaccgggcggacagtcaggagggggtcggagggaggccgaggggtgcccccacgccgtcgtgcgccctgatcaatagccctggggcaagtccccgccgccccggcctcggtttccccgctcaggaagcagg

SEQ ID NO: 7138 - DNA, 31 bp, Homo sapiens
  chr9:139838240-139838271
  hyper
acgcggggccgcggggcgggcccccagccag

SEQ ID NO: 7139 - DNA, 195 bp, Homo sapiens
  chr9:139923387-139923582
  hyper
ggcacctgctggggcgccccgggaggtggggcagttcctccgcgtggcctgtagagagcgacagaggacaggctgaccccatgggtggctctgacggcgcttcccagactcagtttcccccctgtgaatggggtggagtagcgctgtgtggtgtccagtgtcagggcgcacatagaaggcgcatcctcaagtgaa

SEQ ID NO: 7140 - DNA, 31 bp, Homo sapiens
  chr9:139948416-139948447
  hyper
cggcggcagcagtgaccgcaccttcccggcc

SEQ ID NO: 7141 - DNA, 31 bp, Homo sapiens
  chr9:139964409-139964440
  hyper
gccgcctcagccggggcgcacagctgctccg

SEQ ID NO: 7142 - DNA, 16 bp, Homo sapiens
  chr9:139964698-139964714
  hyper
agccctccagcacccc

SEQ ID NO: 7143 - DNA, 117 bp, Homo sapiens
  chr9:139964731-139964848
  hyper
cgtcggtgccctgccagcgggactcgatctcgcgcaggtgcacgcagccgcgccgccggtcgtccaggatgtcgaacagggtgcgcaggctctgcaggaaggcgcgcggcagcccct

SEQ ID NO: 7144 - DNA, 15 bp, Homo sapiens
  chr9:140023901-140023916
  hyper
cgcaggctgggaggg

SEQ ID NO: 7145 - DNA, 30 bp, Homo sapiens
  chr9:140063190-140063220
  hyper
ctaaaggaatgtcacgcagttttcggtctg

SEQ ID NO: 7146 - DNA, 99 bp, Homo sapiens
  chr9:140195120-140195219
  hyper
aaactgcaaaacaagccggtttgggggatggtggcctcatccaggaggggcgggggagagaggccctggggcttccaaaactcacggatttgagggaga

SEQ ID NO: 7147 - DNA, 31 bp, Homo sapiens
  chr9:140195551-140195582
  hyper
cctcggggctgctcctcggctgcagccggca

SEQ ID NO: 7148 - DNA, 506 bp, Homo sapiens
  chr9:140195883-140196389
  hyper
ggaccctggggccgggacgcacgcgccgtattcgccgtggccacgggccttctggcggggcctgcgagccgggcgcgcaccgaggtagttggcgggaaggtacagcagagacgacgcgggcgcagggccggggtccggggtcccggcgggcatcaccggccgctggccgcgtacttcgccttggtgatgagatagagcacgatgtcctggtggccaccgaacgcggcgatgtgcagcgcgctccagccgtcgcggttggccaggcggatgtcggcgccgaacttgaccagcagcttcacgagctccaggttgccgtcgatgaccgactggtgcagcgccgtctggccctcgggcccgaacgagttcacgttgaactcgcagttggtcatgttctgcagcagcgactgcagctcctgcgtgttgcccttgcgcacagcctcctggaagatgcgctgcgtctgcggcgcggagcaggtggacagctcggcctggctcatgctgccgcc

SEQ ID NO: 7149 - DNA, 288 bp, Homo sapiens
  chr9:140197129-140197417
  hyper
gcctctcccgggcagggggttcgcgggcatctcaggcccgtggcgaaggagagacccctctgagcggagaggcgcgcggcgaccccggccagcccgcgcctccgggctcaccgtccacgcgggtggcaactccaggccctgacgtggggccttcagccacgcgggtccttcccgcgcgcgggcagcctcatggccgccggctcagcctatgtgtgccccaaccgtactgatgcgaggggcctccggccggccaccgcggcttctatcgcctggcggtgaagggggttc

SEQ ID NO: 7150 - DNA, 30 bp, Homo sapiens
  chr9:140238902-140238932
  hyper
agtggcgtggaacttcgctggcacgtttcc

SEQ ID NO: 7151 - DNA, 122 bp, Homo sapiens
  chr9:140445954-140446076
  hyper
gtcctccccgacctcccgacgccacctcacggcctcagggggactgggctcccgggaaaccgccggccacctggcggacgaacacaggcagtggcgggcagtggagacgccagggaccaccg

SEQ ID NO: 7152 - DNA, 197 bp, Homo sapiens
  chr9:140446278-140446475
  hyper
cctaccagattggggccgctattggacgcggcggccgcggccaatcggagccgctcttgctgcgacgcagcggtcggaagcggagcaaggtcgaggccgggttggcgccggagccggggccgcttggagctcgtgtggggtctccggtccaggtgagtctgtcggattggggcgggcgccgcgcgcggccaggggcg

SEQ ID NO: 7153 - DNA, 31 bp, Homo sapiens
  chr9:140473463-140473494
  hyper
ggccggctgaccgcggcgggcttcaggcgtc

SEQ ID NO: 7154 - DNA, 613 bp, Homo sapiens
  chr9:140703846-140704459
  hyper
cctgggatgtggcggcggccctgcgccctcggagggaggcggggcagagctcaaatggaagcagagcctgcggggtggagaccgcacccctgcaggggtctgccttgggccccgagcctcctcagccgccgcagcaaagcggtcagtcaggcggggcttggtttatggcatctgggaagatcgctgaccattcccgaggggaaggaggctgcagccggcgctcccagacaccagcagagcagaacacacttcaggaacgtgaaacgctcacgtgcttttaatccagcaatcctgcctctgaggatgcatccttgagaaataatgtagaaaatgaaaagcactaaaatatttgctggcattgtattccagaaatataccaacagacataaaccaagtgttcagtaaaggaaaggtccggaagctgagtgactgtgggggaagggtccggaggcggttccgatgccgccctgtgtggaccgtcggtgatgggtccggaggcggttccgatgccgccctgtgtggaccgtcggtgatgggtccggaggtggttccgatgccgccctgtgtggaccgtcggtgatgggtccggaggcggttccgatgctgcccctcg

SEQ ID NO: 7155 - DNA, 48 bp, Homo sapiens
  chr9:140773114-140773162
  hyper
ggtacatgtggctgcgtgtctggagggagcagcgtgcgcctgcgcggg

SEQ ID NO: 7156 - DNA, 30 bp, Homo sapiens
  chr9:140876711-140876741
  hyper
tgtcaatggacctcaaaacatctgcttcca

SEQ ID NO: 7157 - DNA, 31 bp, Homo sapiens
  chr10:1627517-1627548
  hyper
gagttgggaactgcatcggacaaacctgttt

SEQ ID NO: 7158 - DNA, 256 bp, Homo sapiens
  chr10:1778826-1779082
  hyper
gatgggagtagctggcgcgagggctcgttcccccgtttttgggtaattcctttggcactgggagacgagatggcctccggagggtggaaggcagtgccagcccggccggccactggggactgcggggcccggagacgcgcggggtccccggggagctcctcgccgccctcgccccacttcgtccgggtccctcaaacatgtcgcagcgtggctgctcactgtcccctctgggcaagaggaggccccagacatttcc

SEQ ID NO: 7159 - DNA, 1055 bp, Homo sapiens
  chr10:1779111-1780166
  hyper
cggagcagccatcccgccagcaccccaaagtgaagctgctcacaacggacaagcccggagaccccatgagaggccggggtggagaagccgggggtgaaggggggcaggggccggcgcgccacgcggtccttacctttccgcttggacctccgcctcctcctcctcttggacttgcatttgagttgactgctcagccctccagaccctctgccgctccccaggaccgaggccatggccgagacccaggcgcggagcccagagccgcctccctcctgcacctgcacctgcctccttcccggcagccgccgccgccgctgctgcgaagcttgaggttgcaaacccgggagcggctcacttttcaggactgagcaggaaagcgcgctccgtctctctgtctctcgaattgttctctatgacttgctcccactgggctgggggcctcggctgggcgcctggagcgagctgctccctggtcagggagggcggggaagggcgcgcggcgtcctgagtgctccgagcttcccgcgggctctgcctcctgctctgggctcccagcgcagggaggctacttttgcgcctctgctagttgtttggcaccagccactttgaagccaatcacgcagggagcttgtctatttgctgcagcagcgtctaattagatccaatcacaactgctttctggctctgacatcagcagcagcaccagccgcaccgccgcctggccgcttgcaaactcagctcccgtttggacggtgaagctcccaggaccggcggctggagggaggctgctcccggggaacaaggacgcggcgcgggtgcgtctgggagagaccgggggagcctccaggagggaccctgcccgggaggacgaggcctcctgccgcagcctcgcggacagctcagctcgccctgctcagaaagacacagggacgggtttttccaaccaacagtttttaactagtcaattcattaccatgctccttgtgtcaagggggggaaatacctctttcagaaatgcagagaccgcacttcctcagaaacggactgaggtttgc

SEQ ID NO: 7160 - DNA, 583 bp, Homo sapiens
  chr10:3109444-3110027
  hyper
gcgcacctgcgatgcggccccactagcagggacccgcccacctgtggcgctacccctgcctctgccgcctcccgcaccgctagcgcggcccccacctacgacgacccccgcgtagatgctcctgcccacacccgccccagccccggcccctgcccctagccgcgcccgcgccccctcccccgcagcccctcccatacgctcgggccccgcccgtcaccgcccattggcgctggggccgggcgggggcgcgggcggggcggcggttccgagtcaggcgcgcgcgggcagggtccccattgcctgctgcgcacccggacgtgcggctcccctcggcctcctcgccatggacgcggacgactcccgggcccccaagggctccttgcggaagttcctggagcacctctccggggccggcaaggccatcggcgtgctgaccagcggcggggatgctcaaggtgcgcgcccccctcccggcggcgagggagggacggacggacggagctggggagaaccgggcgaaggcgatggggtgaccggagagaagaggggggaagcgatgggggggacccggggaaaggtggcg

SEQ ID NO: 7161 - DNA, 333 bp, Homo sapiens
  chr10:3110422-3110755
  hyper
gggtccccgcgcgcctcctgtcgcctcgtgccctgcgcggcgtgggcggggtcctggctgctgcaatgcgggacgcggcgggggtgcgcggggttcccgcctggcgtctccagggcggtccggcagcccctcgcgtttccgctgggagatttttaaaaagggtttcctgcgctcgcatgtgctgtcgccttccggctcgtgacaaaaacgaaaaccaaaatgggtcccaggccctccccgccagcctccgcagacgggaaggatcaggaagcggggactccgggatgtcagcggcgccgcggcgcgggctccgggcttccctgccctgcaatg

SEQ ID NO: 7162 - DNA, 92 bp, Homo sapiens
  chr10:3111190-3111282
  hyper
gtgccgcaggttgaggcgctgtgggcgccgccccgcccgccacgagcgcctacgtgatgcccggcccgtcgtctccacgagccccggccccg

SEQ ID NO: 7163 - DNA, 115 bp, Homo sapiens
  chr10:3214966-3215081
  hyper
cgcatgacgagcacctggctggcgaggaaccccctcttaacccgacgcagggcgcggggcggggcttgccgtgacagctaccactcctattggtcaacgcgaacagcgacgtcct

SEQ ID NO: 7164 - DNA, 173 bp, Homo sapiens
  chr10:3239421-3239594
  hyper
gaacaggcaatgaggccgaggccaggggcgtcccctcgcttccttccaaggcttccttccgggacctctcatcttggaggctgctttttcttttggttcatttcatctggattttaccaaggagaaaaatgcactgggggaagcaaggagttacaggccgagggctgagtggt

SEQ ID NO: 7165 - DNA, 30 bp, Homo sapiens
  chr10:3827629-3827659
  hyper
tctccatcacggcccgcaccattggctcaa

SEQ ID NO: 7166 - DNA, 31 bp, Homo sapiens
  chr10:3862627-3862658
  hyper
aaatctctgcaaagccgcgttcttcctggat

SEQ ID NO: 7167 - DNA, 30 bp, Homo sapiens
  chr10:5454463-5454493
  hyper
cctaggaaccgctgcgcgctcactgattgg

SEQ ID NO: 7168 - DNA, 30 bp, Homo sapiens
  chr10:5615942-5615972
  hyper
gccaaactgggttcctaggtcagggcccat

SEQ ID NO: 7169 - DNA, 31 bp, Homo sapiens
  chr10:5707984-5708015
  hyper
gtcggggtcacgcggacgcctctgcaggatg

SEQ ID NO: 7170 - DNA, 31 bp, Homo sapiens
  chr10:6018342-6018373
  hyper
aaattattcagggtctcgcttaaaaacacac

SEQ ID NO: 7171 - DNA, 30 bp, Homo sapiens
  chr10:6018595-6018625
  hyper
cttcctctggctgccgggacaaaaccccta

SEQ ID NO: 7172 - DNA, 31 bp, Homo sapiens
  chr10:6019532-6019563
  hyper
ctgggacctgccgccccgccagtcgcattcg

SEQ ID NO: 7173 - DNA, 93 bp, Homo sapiens
  chr10:6245446-6245539
  hyper
gtccttggccgggcggcgggggcgctgtggcccttgtcccggtggctgccccgccggcccggaaacggcgagtgcgcccggccgggctgcgta

SEQ ID NO: 7174 - DNA, 301 bp, Homo sapiens
  chr10:7449888-7450189
  hyper
tgccagagcggtggtcggccgggctcctgcccagtctcggctcctccctcctccccaccagaaggaaaaacttgggcccttcgagaaccctgtggaatgttctttgtaatcaactgtacatccgcttccacggcacggcctcgtgcaaaatcgcgggtttcggggccttggagcaaattgcgcttgtcagcggcgacgtcaggaggacaaggggaggggttcgcggctgaaactgcagcttcgcagcacagagccattttaggctgctccccacctcgcggggcccatgggaaagccggcc

SEQ ID NO: 7175 - DNA, 3166 bp, Homo sapiens
  chr10:7450490-7453656
  hyper
cgcgggcccggaggaggtcctcccacctgcccccgccagccccggggaccgtgcgcggcctccgtgtggcccccgcccacgaggtccctcgggcaggaaccgccgcgcgacctctgttcagcggccgcgtcctggccacgggcgacccctgtcgggaaccctgttcccggctaagctgcgttcccgcattccggtggctctcacccgagctcgcgtttgctggctttccctctggctcctctgcctgaccccgattttgtctccgaactccactcccagatcctccccgccctggaacgccgacctttcccccgcacttcgccgcccactcacatcccccggcgactgcccggcctccatgcccgccaagacaagaagatgcccctctccgatgcgccgagagggttcctaagccgagcaagggacaatttcttccccaaacgctgtccccatcccccaccttccctagagcgcgaaacccaaaagtaaggaaggcaacccctcgcctcgaccctacgtgcttgtctcccagagccgcgcgctcccgcccttctgccccaccccaccaccaccaccaccactttggtcttctccaagcttcggtcccggtcccccacctcccaccccagagcggcgtggaggaaagcaggagcccactattaagtgcagcgcgccccctgcacacacgaaatccggctggcgtctgcagcccgattgcacccaatacccgggacagttagtccttttaataagcacctcctcgccccacctactcggggatctacccgcgcaggatccagcacacacaaggcgagagctagctcgtctcctagaaagacaaaataaatcactccctctgccctcatgtactttacaccacgtgtccgcagtttgtcacgtcaaatcatggcagggtctggttccaagacgcacacacacattcggggtggttctctttgacacacacacccaaaaaaactgcgcacacgcaggcctgcacactaatccacaggcacacacgacagttgcgtttcggtgccctggtccgggccaggggcacttctccatccctttcccccctagcaatggacttgacacacagactctaaccacggaaaaaaaaaaccggacagcccattccttctttttttccccacttaattcgctaaagcgcttcctggggtagccaaagagagtcgaaactaaggggtggaaacttcagctgggttttttcccacctcaaaacctttattttcagtttttaaaagccaccttagcccgccatattgaaactggcacggtttctaaagactccttccccgcagttgtggcgcttccaagaaaacacgagtacggatcaggctctggatgagtgtccggccaccgagaatcagccacttcccaccctccaggatcccccagctccctccagccccttcccaccgcccctggtcaaaatcaataaatacatctcgcagttcctacagttgcattttggcggatttctgcaaaacatacacacacatacacatacccacgcacgcatattaaaaaataaactccagaaccagctcaagtcagcaattttgaaagggggtcgaataagaggagacaaccggaaagcccctaagtgacaggatattactttaaagagaaaataatgaacaaaaagaccatcctcgctggagcacgctccaaaactactactgccaattttatttcagttgctcaggcaaatgtttccaagggagcgattccgaatgtctgcacgatttttacccccatgccggtctccgattccccgtcctcaccatctttttctcccacccaaaccaaaagaaaggggagaccccagcgcggaggagacgcgggagcgcggggtaggtagcagcggcggctgcgtcgctaaaatgagtgcagaaacgaggaaggtgggcggcgggaggggacaggctgcgcccggggaaggaggacactttgcaactccggacggactcccgcacggctcggcttttccgagcccggagacgcaggcgaaggggacccgggaagcaaaaatgacaacctggagcgcacagaggagtttgaagcttcgctcaagtgcagtcgctttcttctcctgcccttctctttcgctcccctgcaccctccccagccttcccccacccgccacctccaaccccagctccctcaggcttccttcctttttttttttttccttttttttcctaggctggaaaaagcccctgaccagcgcactcaacctgcgggccgaagggctgctctccggccagcctgggcgccggggacagcagccggcgcggcgtcctacctggtgaagttcgtcctgccctcggcgtggacccaggccccggtcgccgcccgggagggcaccggcctcgctcgcttgctcgctcgcccgcccttgcccgctcgctccccgcccgccgcctccctcgcgcgcccgctccggtcctccggctcccactacagctcattccaatatggcatcctctctgtgcgcatgctcggcgctcttttttttttttttttttttttttttttaagattttgtgtgtgtgtgtatgtgtgtgcgtgcgcgtgcagcgaactccttcaacgaccttttccagcgcttgcaaaatttcttaagccaattagcctgcgggacgtgatcggctccttccccagccagctccgcgccattccctgcgcctaagcaggcgggcacccccaggaccctgggaccttccacgcccacgcggcctcctccccaccgcgctccccttcctcctttttgtgagctccctccatacatgatctgcagaaagttcccatcgcgggcgtttccgcacacccctccgcaaggacaactgggcaaactcccgtttccctggctgcggttcgtgagctgggtttccaatggctcagtcgaccgtgtgcacaaacttgcgctttatccgccggggatcgctgggagcggagataaattcaatccccagggcaatcttggccccgcccgccccaccccatcctgtgcttaaatagagcctttcttgaagctgcgaacatttccaggccccttgggcagggctggaggggccgaggagagctattcgagggaaaggtgccccgaggggcaggaaattaagttggggctgcccgg

SEQ ID NO: 7176 - DNA, 277 bp, Homo sapiens
  chr10:7708275-7708552
  hyper
caccggtaggtagtcgctaaatgggaaagtcgtgttctcccggttttcaggtgggaaaagctgaggctcccaggagtctagaactcctctcatattgcctttctccctggatcaactgggaatgatgataacagcagactgccccccacgcgtgataaggaaaaaaccttgtaattataataacttttggagctacctcagaaattaacaacgacgaacagaaatctgcgcaatcaacaggagccaagaagaaaaactcggctccgcaggacaagtc

SEQ ID NO: 7177 - DNA, 260 bp, Homo sapiens
  chr10:7708596-7708856
  hyper
cggctcacacagaggtgacgcacgagtgacccacagagagggacccctgggcctctggtgggggcctgggagacggtcgaagggggcccgggcagaagctccgcggccgggccggcggagggaagggggcggccgcgcccgggacccggctcccctcggctccacttacctgctccgaagagtggccccagctctgcgcctcttcctgcgaccccacacacagggacagccccaggcacagccccagcagcaggagcatg

SEQ ID NO: 7178 - DNA, 72 bp, Homo sapiens
  chr10:7729412-7729484
  hyper
atcagctggaaacaggcgagcacctcacgccatctagcggagacacactttgaagaccgcttcaagggattt

SEQ ID NO: 7179 - DNA, 30 bp, Homo sapiens
  chr10:7830833-7830863
  hyper
gatctgtctgagggcggggaagggaaggac

SEQ ID NO: 7180 - DNA, 30 bp, Homo sapiens
  chr10:8079722-8079752
  hyper
tccactcctggaggcgacaccattcatctg

SEQ ID NO: 7181 - DNA, 449 bp, Homo sapiens
  chr10:8085599-8086048
  hyper
ttctccctgggtcctcaaaacgcgccaagaacgtggctctgccacttggtggcggaaggcgggaggcacagggcaggaaggtggaggaggggctgcattcgtgacgacgggggagcagagagggaaggacttagggactccccagagggcagacagacctggccagcttggcaaatcataaatccctctccctggaccctcggcctaaacctacccccagggtgtgcagcggaggcgcacaggggttggctgacgggctggggtgcgcctgggtggaggctggtttggggttctggcgtctggaggcaggccatggaaccagaggagagggcaggagggcccaccgcgcagagctgcggcccggctcctagagtggcgcccccagcctgggcatcgcgctcaactgctctctgaaccccatgtccacgagggttcgccctcaaaccacc

SEQ ID NO: 7182 - DNA, 892 bp, Homo sapiens
  chr10:8091323-8092215
  hyper
agagagccagccttgctgggccgggatcctcaaccagtattgcccactgcccgactgccttttcttcccgtttaggtcttgctccccgctctccgcatttcagctcgcaagggaaagaaaacgggggcccgagtggcagagacagagataatatgtatttaacctgcgcggtccggggcgccctgccgcagcgggctccccgcggtgtggcccgcgcagccggggccagcggcggcgcctggagccgtgtccccggcataaccctcccgcccggcagccggcgagctgtttatacagctttacctgtgctatagtcctatccagtagaaacccttgcgcggccagggtaacctaatccaggggccgaggcggaggagggggcggtgaggctggctgggttggagacggaggtgtgcgcgctccaatacccgggatctctcctttgcccctcctcccaccatagggaaggaaatatggacatggttcgggtgacagaaatggggacccggggctaaggaggaaggaggccagttttcacggcccggtcctccggcttctctcctttgaacaggcgctggggacctccgcggcggccacagctggacgcgcgccgcgaaaggcgcggcggtcccgcgggcgcccggcgtgggctagagaggccggccctggcctggctcaggtcgccctcgccccgctttcatcttgccccagtcgccctttacaattcccacaccgaaggcaaagcaagcaaggaaagaagccggcgcctccccaagcggaccctcccttccgcgcagcctcggccactcttccagagcgccccggtgcgtactgcggcgggcgcagggaatcgaattaaacgtctctgggcggttattgtctttctctaatt

SEQ ID NO: 7183 - DNA, 479 bp, Homo sapiens
  chr10:8092483-8092962
  hyper
tctcctcccccaggcccagctcgccagggcctcgggccgtgctgcagtttctggcctttggtgtcgctccccgccccccagccccgcagattcccggcttcttttctgtctgcgcggccgggaccgcccaggcaggcgccggggctccggggctccggggggagggactcggcggctcggctcggctccgcttctttcttctgcctgcaaatatttgctgcctcgctggaaatccgacgatttcgcgcgcgctctgcttgcaaagtctttaagtaaacacgctcaaatgaccgccccgggcggcccgaggcacgctctctccccctccgcgggattagtaactttaggacttcgaccccggggctccgctttgcctgttacccaggtcgggcagcgcgcgggcgcccggggccgcttctcccggcacctcggccccgcggagctcgcctggaagcgccggttgcctggctctggtgggt

SEQ ID NO: 7184 - DNA, 78 bp, Homo sapiens
  chr10:8093746-8093824
  hyper
ggaagcccggcctgctcttgccggcgaggcgggtcaggccggcgcctggcctggcccggacccccgcagcccggctct

SEQ ID NO: 7185 - DNA, 104 bp, Homo sapiens
  chr10:8093859-8093963
  hyper
cgctcccttcccccttccttccccgtgggtcccgaggccgacctcggccctccctcctcggcatccccctcccatccttttcccttccccgctgccctgtgctc

SEQ ID NO: 7186 - DNA, 22 bp, Homo sapiens
  chr10:8094141-8094163
  hyper
cgggacatccagccccaggccc

SEQ ID NO: 7187 - DNA, 352 bp, Homo sapiens
  chr10:8095106-8095458
  hyper
tgttgttccttcaccgcatgaaaggaatccttcagaacttactttcagggacggcttcttctatctcgaatttttgcatttgtagggaattttatggggtagaggagcgaagagggaacaatgtctccaattcaaataaaaccccaaattaagctctcagccccatcggtgggatagcctgcgggggaacccactccctctcctggcagcattgccctgggggcgagcagagagtggatttggagtcttcttttcccgcctgacccctgctcgcccgagcagcattttcgggccagcggctgcagccacccgggcgccgctaggggatgcagtggctcaaaggaccgagcgg

SEQ ID NO: 7188 - DNA, 915 bp, Homo sapiens
  chr10:8095492-8096407
  hyper
cgcggctcggccacagcctcgcccgctgattggtccctccaggccccgcccccgctcgccccgcccctctcgctggggcgcctcggagccgcgtgccctccgccccggggtgcccattgcgcagagcgtggcctggagacccgcgagccggggaaggtcgccgtggagtcccgaccagaggccggggttggggtcggtgcagaccgagggctggtttccttgactgtgggagaaacgccgggagccggagtaagtagggctccgggcggggcgaaaggaaaagttgggtccctagagtgaagaccgagttctttctgtccgtctacactgagcgtactcggggaatgagttagagccagtctcttcctcccctccccccttctcatccctcactgttgccactcaagtcaaaagcacacattgattacaaatattaggtctggaaagggcagctgcaacagctgaagcgtgttcactctgggggcttgagagcgcagaaggctcgggaaagaggtgacaatgacaacaaaattgacgcggacgctccagtcaaaggcatctcccctttatccgatgactcaccctcttaggaagtcggcccgagaggcaaatctcaaaataccttgacatgaaacattttgtttttctgatcaatttaacgcgcacgtttccccacatcgatgcgctctcccaaacaccctgcattagatcctaataatgatccatgcgtgcctattttttaaaagtctgaaaaagaaaattctgcccatcgaaatgaacttcatgaatggggcaggctggctgcaccgggacggaatcgtccacccgacccgaatgaattggcaggagccgcggccacatttaaagggccagagcgcgcgttccctcccgtccgcccccaagccccgcgggcct

SEQ ID NO: 7189 - DNA, 755 bp, Homo sapiens
  chr10:8096614-8097369
  hyper
aacctccttaagttgcgtcgcgccacagctgtctgcgaacactgagctgcctggcgccgtcttgatactttcagaaagaatgcattccctgtaaaaaaaaaaaaaaaatactgagagagggagagagagagagaagaagagagagagacggagggagagcgagacagagcgagcaacgcaatctgaccgagcaggtcgtacgccgccgcctcctcctcctctctgctcttcgctacccaggttggtactggtgactttttttttttttaagtttgattttttgcccccaaccacttgggaggacctaaatcaattttaaaaactcaactctcctcttttggaggttttctaggggctgagaggacggtcccgggaccggtgtccccgagggagggacttgccctccaagtcgtaacagtcagccctgggacttgccctccaagttgctcagccagccccggctcccgcgagccgggctgcagggacgtccccgagagccctgcgggctccgcggccgtgtccccgcgctcccgtgcgggtctcgggtgcgctgggcgggcgggcggcgcgaggggaggttgtgccactccagcaactcaggggctcatccaggtctcccattctctcccttgcaggtgacccgaggagggactccgcctccgagcggctgaggaccccggtgcagaggagcctggctcgcagaattgcagagtcgtcgcccctttttacaacctggtcccgttttattctgccgt

SEQ ID NO: 7190 - DNA, 30 bp, Homo sapiens
  chr10:9423701-9423731
  hyper
cccatttcatccatatggatgagaacagct

SEQ ID NO: 7191 - DNA, 30 bp, Homo sapiens
  chr10:10043570-10043600
  hyper
aaggtcatcccccacaaagagtgtgagcaa

SEQ ID NO: 7192 - DNA, 235 bp, Homo sapiens
  chr10:11059428-11059663
  hyper
ctcctatatcctttcggtgatcgcccttagttcctgcccgggcaagcacaccacaccgaggagcatcgaagcgaaccctcgggctgctcgcctcccgcggctgggctctgggagcgcggctcgggtatggaagtggagcgggctttggcgcctgggtggccctaaacctactccgagcggccacggcggcctcttgccagggacccccgggcgggggagcagagccaggcgggga

SEQ ID NO: 7193 - DNA, 225 bp, Homo sapiens
  chr10:11059932-11060157
  hyper
ggctcggcggccgccgggggaggccgcgcgcacctgtccctgcccgtctcgcgccgcccgcggccgctcggacgcgcgcagagccgccccccgccgctgccgccgcgtgcgcccgcgaacatgacttctgccttcaagctggatttcctcccggacatgatggtcgagggccgcctgctcgttcctgacagaatgtgagtggcgccgcgtcccgaggccgggcga

SEQ ID NO: 7194 - DNA, 120 bp, Homo sapiens
  chr10:11060314-11060434
  hyper
ggcggtgcagggcgcggggcttcccggagggacgagcggagcgcggcgtcccggggaccgggcggggtccgcgagtccgggtgaggaccagcgggccgagcgcggcgtcccgggtccccg

SEQ ID NO: 7195 - DNA, 116 bp, Homo sapiens
  chr10:11060512-11060628
  hyper
ggggtccgggcggggtccatgagtccaagtgggaccggcgagccgggcgcggagtcccggggtccggtggggcgggcggggaccgggcggggtctgggggtccgggtgaggactga

SEQ ID NO: 7196 - DNA, 14 bp, Homo sapiens
  chr10:11060741-11060755
  hyper
ggagctctggtggc

SEQ ID NO: 7197 - DNA, 407 bp, Homo sapiens
  chr10:11207022-11207429
  hyper
ggagagggagagaaatccagcagacatctagctctgcctttctttcccagccacagccagggtagggctgataaggcgctgatgcgttgatggcagccttgcagagctagacctgcacttaacttgcagctgcctcccgagcctccaagatgtccacgccctgggtgacaggcggcagggcgctgccccgtgctcccccggctctgctcgacagcagcacgcagtgagagcctcgccgccgccgaggagcaactcatggtgcctccgctttgttttagttcatcaaatttctacgactcattaggcactttgccactgctcttcttcctcctccttccgcctccccgctcccccacccccactattttttcttcctgtccctcatcgtgccgccctaactctggctc

SEQ ID NO: 7198 - DNA, 31 bp, Homo sapiens
  chr10:11282875-11282906
  hyper
aggcttgtgctcccaccggacagacctggat

SEQ ID NO: 7199 - DNA, 31 bp, Homo sapiens
  chr10:11652859-11652890
  hyper
aacacctgcgaggaaccgttttcacgcatta

SEQ ID NO: 7200 - DNA, 19 bp, Homo sapiens
  chr10:11909253-11909272
  hyper
actccgtctcaaaaaaaaa

SEQ ID NO: 7201 - DNA, 30 bp, Homo sapiens
  chr10:12111249-12111279
  hyper
ttgcggtggggtgtcggggtcggggaaccg

SEQ ID NO: 7202 - DNA, 1774 bp, Homo sapiens
  chr10:12390891-12392665
  hyper
cgaggcagctgctggcgcgtcctgcgcgtacccgcccagaggctccccggcttgctcctcgcgggtctgtcccgaaactgacgtgaaaccgatttggtgcaatgcgaatgagctcccgcccgcctccgcctccatcccagccgccgccgccgcccgtcgccataacaaccggcccccaccccccccaccccacgccttgcccctcgggtcccccgggccacaggccacagcgcgggaaggcgccccgccctcggcgccccgcatccggccgccgcgcacccccgcccgcccggcgcttccgagccacgcagaggcgccccctcccgccggagacgggaaagccccggcgcccccagactgggctccgtttccagctcccggaggggctggggctctcccgcgtgcgccccgcacctgccgggggcccgtacccgccctcgccggggctccagggggcacgacggccgtggcccggcgctcttgggaggggagcgggacatccccgaaggcggcgcgctggaggcggggagcggccggggcgcacggagagggcggggagcccgcgggagggggaggagggggaggagggggaggaggcgcgaggtgggggggagcgcggcgggcggcagggagggagcgggagggaggcaagaaagtagcagaaagtgaggctggcaggcggcggcaaaggagccggcgcgcggcggcggcaggaagtctgtgcccgagaacagcagaaataagagccagggagggaccgcggccgcggcggcggcggcgagagcgaaagaggaaactgcagaggaggaagctgcgccgcagcccgagccgcccggcatccccgccgcctctgcgcccgcgccgcgcccccggcgccccctccccagcgcgcccccggccgctcctccgcgccgcgctcgtcggccatggcccgggagaacggcgagagcagctcctcctggaaaaagcaagctgaagacatcaagaagatcttcgagttcaaagagaccctcggaacgtaagtggggaccggggaggcgagggtggaggtggccgcggcaggggctgcacgggcagctccagctgccgccgccgccactaccgcggcagaaacccagcctgtcaccgcgtcctcattgtcccgttctcggcgctgcggagcccccccgagcgcgcccgacgcgtgggcctgcgacccccgggtgggcgccgttcccgggagggggagggggcagcgccgggctgtcagggagcagcccacgcgggcgcgcgacttcccacttctcctgccaccgccgccctctccgctgccttctccccacgcgtgactgtgggctgagcatggtggggatggctgtttaccggctgtgtgcgtttactcgccgtgtgcatgggcgcaccgcgttggcgagacgtggtcacgagaagatcagcctccagtcgttcccatttctgtccttacatcatgtatttctatggaattggcatctgcacgtacgaggtgtaggcaagactttgggtggccacgcgaggatggaagggaagggcttcgcagtgctcagggtcacacgtgggcagagcctcaccggagggtctgtgcatttcacgcgggctcggccgcacgcgccggggagcgcgtctccaagggagggtctgtgcgcgtcgctgcgcgggcggtgctctctccgggctgcatcgagtcccatgctgatggctgtgtctcaagaaagcagaaataatccgaagtcgatggcaggaacgctccaagcatgtg

SEQ ID NO: 7203 - DNA, 30 bp, Homo sapiens
  chr10:13043406-13043436
  hyper
gcctcggggtgcagcgccagcaccctggcg

SEQ ID NO: 7204 - DNA, 31 bp, Homo sapiens
  chr10:13142553-13142584
  hyper
gggccggcctcttggccgcaggtaacccctc

SEQ ID NO: 7205 - DNA, 121 bp, Homo sapiens
  chr10:13341451-13341572
  hyper
aactcagtggcaatgccgtagtccagcagggaggccgccctgggcagcgcctgcctggccagctcctgcccgggagggcaccgtcctctcccctccggagaggtcccggtcactgcctgcc

SEQ ID NO: 7206 - DNA, 55 bp, Homo sapiens
  chr10:13515865-13515920
  hyper
acttggggttgatactcgtcattgctgttacactcagggccgatacctgtgatca

SEQ ID NO: 7207 - DNA, 30 bp, Homo sapiens
  chr10:13629004-13629034
  hyper
agtgggttcgcggccgccggcccagtgagg

SEQ ID NO: 7208 - DNA, 206 bp, Homo sapiens
  chr10:13933332-13933538
  hyper
ccatgtcctttcctatctccccgggtagattcagacagcgtgggactgaggtgcccaaggaaagtaggtgtgtgtgtgccgaggggagggttgcagaagaaagcacagtatgtgccccacgtgggatttgcatttaaaaactgtaacatacgcgaaataaacgactccaggcccccagtaaagaagcagcggcgcgtcccttttcc

SEQ ID NO: 7209 - DNA, 338 bp, Homo sapiens
  chr10:13933596-13933934
  hyper
cgcgaccgggaaacaaagacacattaccttttattttttgcgcttccaagggatccgaggaacttctggctgcaagcggctggtaccccggaacgggcgtcccattcgcccgggcgaaggcccttggcctactaggcggccttggcgcccgcagctggcgagcccccgccccgtccccgccgccgcccccgccgcgggccctcggcgtcagcccatagcccgctcgcgcctctcgcgccgagcctggcccggcgccagtgagccccgccgccggcccgcccctcgcccgcgcccggcccgccgcatggtgcgcccagcgcgccccgagccagtccccg

SEQ ID NO: 7210 - DNA, 143 bp, Homo sapiens
  chr10:13933982-13934125
  hyper
cgccaccgcccgccgcccgatcctggacaacaatgcgcgcccccgcccccccagaaagccagggacgcccccagtcgccgccagagctggctcggcttcccagcccctctccgtggcacccgcaggcgagacaaagttcgctc

SEQ ID NO: 7211 - DNA, 1 bp, Homo sapiens
  chr10:13934168-13934169
  hyper
c

SEQ ID NO: 7212 - DNA, 30 bp, Homo sapiens
  chr10:14880317-14880347
  hyper
gtgcctgatggggccgttgggcggccggta

SEQ ID NO: 7213 - DNA, 700 bp, Homo sapiens
  chr10:14995744-14996444
  hyper
gagaggctgaagagcccgactgggacaaggcgtgtgctggccgccccctcgctggcttcccacaggctgcagctccttgctccagggccggccccctcctgtcctctctccagcccccagcgccccgggagcgggcgacgcgcagccctcactcacctttgtggcagtgggacaggaagtaggcgcgggccctcaggttctccctatcgaagcggtctatggagatagttggatactcggccatctgcccctcgaaagaactcatagcgccgccgatcccagagtccgggaccccaaaaccgcagctgaagccaaggccagccctgaccgcgccgccacttccgggaagccgcgcgctgcctcgccattgggcggccgaacgcagccacgtccaatcagaggagtccggagaccgggggcaaagtcaaggagcatccggtcgggttctaggcgcccgctgcttgggtttaaatcacccgcgcttcgctgcacgcgatgggccctgagccctgcccagtgcaaggctcattcccgcccaacaaacacaggtgttgctctggtaaggcgttgcccatgtctgtggaggtgcagtcgcgggaagggaaatcgaaactcccagagcaggtggccccagccgacgaggtgagtgggctgcggaactgcgcttagaaatcattcttcgttccgcttcctgcttgtc

SEQ ID NO: 7214 - DNA, 30 bp, Homo sapiens
  chr10:15139132-15139162
  hyper
cggagactccaccccggggcctaaactcga

SEQ ID NO: 7215 - DNA, 31 bp, Homo sapiens
  chr10:15481460-15481491
  hyper
ccccttcccttcaccacgggaaatgcaggca

SEQ ID NO: 7216 - DNA, 814 bp, Homo sapiens
  chr10:15761292-15762106
  hyper
ctcctttgtaggatgcgtgcgtcttggtacctggaacacccaggacttgcgtgttctatgcaagtggcatgtctctagctcaaaattcacaaggcacatctagcatggcaggggagagaaggggctggtggcggggagagggacgggaccccgggcaggcggcaggacggggatcccaggctgcggggggactccgcggcagagccgctgggacctgacccgggagcgccttcgtccccgcgcgcacctccccgggtcgggcgacttacgtgcgggcgtcgggtatgtggaagtccacggcgtagccgaagtagctgcccttggggccgctgtacactgtgagcttttccacgtccaggttgaacgcctgacaggcgggggaccacagcaacatccccagcgcggccgcggcgcagcagaggggcgcgatcagcggcgcctggcttccccggggaccgcggctggccccgggcgacatctccctccgccccggtgggtggctgctacccaggagcgcgagccgaggacccctgcggggcaaggggggctggtggaatctggcggtccccagctgcccgtgtcccgggtcggtgcgctcggcgcacccgtggtgacagtgcccggcgtctgctcccacccgcccgcccgcccagccggctcggggggctggcccaggggctctagccctcctccggccgcgggcagggaccagctctctcgcggcgcctcctcgcggctggtctagagccagggactcccgggcggcccagctggtggctggagcgctgggtgcctcttcgggctgcccggattt

SEQ ID NO: 7217 - DNA, 31 bp, Homo sapiens
  chr10:16536238-16536269
  hyper
attacactttgtaattcggagccaacttctg

SEQ ID NO: 7218 - DNA, 304 bp, Homo sapiens
  chr10:16562368-16562672
  hyper
cgcgcccttcctccgcgggctcccacccccatttccggggtctcctccctctcgcccgcaccttcccgcgctccctccccgccctccccgccgcccgcccgcgctcacctggttgtttttgcagagatcagcccacatgctggtgccgtcccctccgcgcatcaggacgtggtaggtgaagaagtagatgcccgggatggagcaggtgaacttgccggtggtggggtcgtagtggtttccgaggttggtgaccacgtcgtcgaacttgagcacctcgtagccttcatgctgccgcttgaggccg

SEQ ID NO: 7219 - DNA, 955 bp, Homo sapiens
  chr10:16562709-16563664
  hyper
cggcgctgatggccccggccgcgttcaggccgggcgccccgggcgggcccggcaggccttggcggcccggctcgcccttctcgcccgggggccccatggggccgggtggcccgggctctccggggggcccgcgcggacccgccttcccgggcctgccggcctcgcctttggggccctggatgaaggtgggcagggactgcatgaggccgcggtcgggcgtggcagcggtgctgggcgccttggtgcccccgtaggggtcgcagaccatgcggcaggtgcccagcatctcgtagtgcgccgacgtgccggccgagctcaccagcaccgggatgaggatcaccagcagcagcaccatcaccacccccagcgccccggcggcgatcaggcgcctcctgctgcccaccagccggctcagcgcggggcgatcctcttgtctgcttttggacagaattttgaaggttgggcggggacctcttcagagccgaaaacaaccccctgcgaaccccaactcccctgggcgtgcgtgcgccggccgctgctgccgactcctgctccccccgcggaggctgcggctggggagggagcgcgggcgcccagtgacttgagccgaagtcccgagcccggggtgggggccgggggaggggtgcgcggggcgccctcgccccccgcgagctccttcgcacctgtggctgcagccggcgccggcgcggccaccgggagggcagagccagccgccgcctcctgagctcgcccgggcagctcacacttttatgccgccgccgcctgcgatcgacttttccgtttttgcagactgcgcctgttcgcaccaactttccgtctgaagttgcctttttctgcctcctcctcctcttctttcgctcgctcagttcgcccgtccgctgccttttttttttattgcctcctttctctcttcctcctttgccaccaccacaac

SEQ ID NO: 7220 - DNA, 152 bp, Homo sapiens
  chr10:16563690-16563842
  hyper
cgcgtgggcccgggcgtcccccgggtgcgcccagcggcggcggcggcgggcacggtcggcacggcgaggctcagagctggggcggaggagcgagcgagcagcggcgagcgcctcacggccgggagcggagcgagagagagactgaaggcaga

SEQ ID NO: 7221 - DNA, 179 bp, Homo sapiens
  chr10:16870062-16870241
  hyper
agataaaatagagccacgtgtccaaattttctacagttctatttatgcagaaataaacatgggtattcaaccctaggcagtgcactgacgtcacagagggagcttttttttaaaaaaacagcgtgctgtgactcctccctgggaaatcccgattcagtgggtttcggtgggaactggaa

SEQ ID NO: 7222 - DNA, 30 bp, Homo sapiens
  chr10:17243251-17243281
  hyper
ccaggcgagggtctcgcccctttgataccc

SEQ ID NO: 7223 - DNA, 30 bp, Homo sapiens
  chr10:17243865-17243895
  hyper
tgtagcctgatttacgctccatttccttct

SEQ ID NO: 7224 - DNA, 1182 bp, Homo sapiens
  chr10:17270072-17271254
  hyper
ctattttgaaactacggacgtcgagtttcctctttcacccagaattttcagatcttgtttaaaaagttgggtgtggtttcatggggggagggggaagagcgagaggagaccagagggacgggggcggggactctgcaagaaaaaccttcccggtgcaatcgtgatctgggaggcccacgtatggcgcctctccaaaggctgcagaagtttcttgctaacaaaaagtccgcacattcgagcaaagacaggctttagcgagttattaaaaacttaggggcgctcttgtcccccacagggcccgaccgcacacagcaaggcgatggcccagctgtaagttggtagcactgagaactagcagcgcgcgcggagcccgctgagacttgaatcaatctggtctaacggtttcccctaaaccgctaggagccctcaatcggcgggacagcagggcgcggtgagtcaccgccggtgactaagcgaccccacccctctccctcgggctttcctctgccaccgccgtctcgcaactcccgccgtccgaagctggactgagcccgttaggtccctcgacagaacctcccctccccccaacatctctccgccaaggcaagtcgatggacagaggcgcgggccggagcagcccccctttccaagcgggcggcgcgcgaggctgcggcgaggcctgagccctgcgttcctgcgctgtgcgcgcccccaccccgcgttccaatctcaggcgctctttgtttctttctccgcgacttcagatctgagggattccttactctttcctcttcccgctcctttgcccgcgggtctccccgcctgaccgcagccccgagaccgccgcgcacctcctcccacgcccctttggcgtggtgccaccggacccctctggttcagtcccaggcggacccccccctcaccgcgcgaccccgcctttttcagcaccccagggtgagcccagctcagactatcatccggaaagcccccaaaagtcccagcccagcgctgaagtaacgggaccatgcccagtcccaggccccggagcaggaaggctcgagggcgcccccaccccacccgcccaccctccccgcttctcgctaggtccctattggctggcgcgctccgcggctgggatggcagtgggaggggaccctctttcctaacggggttataaaaaca

SEQ ID NO: 7225 - DNA, 797 bp, Homo sapiens
  chr10:17271443-17272240
  hyper
cgtcctcctaccgcaggatgttcggcggcccgggcaccgcgagccggccgagctccagccggagctacgtgactacgtccacccgcacctacagcctgggcagcgcgctgcgccccagcaccagccgcagcctctacgcctcgtccccgggcggcgtgtatgccacgcgctcctctgccgtgcgcctgcggagcagcgtgcccggggtgcggctcctgcaggactcggtggacttctcgctggccgacgccatcaacaccgagttcaagaacacccgcaccaacgagaaggtggagctgcaggagctgaatgaccgcttcgccaactacatcgacaaggtgcgcttcctggagcagcagaataagatcctgctggccgagctcgagcagctcaagggccaaggcaagtcgcgcctgggggacctctacgaggaggagatgcgggagctgcgccggcaggtggaccagctaaccaacgacaaagcccgcgtcgaggtggagcgcgacaacctggccgaggacatcatgcgcctccgggagaagtaaggctgcgcccatgcaagtagctgggcctcgggagggggctggagggagaggggaacgcccccccggcccccgcgagagctgccacgcccttggggatgtggccggggggaggcctgccagggagacagcggagagcggggctgtggctgtggtggcgcagccccgcccagaacccagaccttgcagttcgcatttcctcctctgtccccacacattgcccaaggacgctccgtttcaagttacagatttctt

SEQ ID NO: 7226 - DNA, 30 bp, Homo sapiens
  chr10:17495119-17495149
  hyper
aatcattcctagcacgcaaaacaaacctga

SEQ ID NO: 7227 - DNA, 59 bp, Homo sapiens
  chr10:17495386-17495445
  hyper
aagggtgcccccccccaaccccgcgccctcttcaaacacacgcacactcttacactcac

SEQ ID NO: 7228 - DNA, 621 bp, Homo sapiens
  chr10:17495474-17496095
  hyper
cgagtccaagccggtgcagccgcgccccatgcccggctcgcagctcccgagccccagtccgcccgcgctgggcgccgctgtacctgttagtggcgcgcggtaccgcggtcgccgggctccggagcgtcctcagcgctgcgggggtgccgtgggtggcctccctgctttcctccaccagaatcctgcacagccggggagaaaacttaagttgctacaccccgccgggagctgttggctgaaaggctgggagtcgcgctccttgcctggcagggagatctcgcactccccggctcccaggccaggtccccagccccagagttggaagagccttagggcgggaaggaagagacagcaaggaccagaatggggagcatgagatcctgatgcggaacccgacggcaggtcccgctccacagctgcctcgcccacagcgatgcgcgctagagcccccgcagccctgaccggtccctctgctccccagccgccgtccaccggtcggagggtcgcctccctgcgaccccctcccccactccactctcaggccgtcgccgcccgtgggctgctccccgccgcggccaaaagtctccgcgcccgaggggaagcgatgggcggcttgggggt

SEQ ID NO: 7229 - DNA, 307 bp, Homo sapiens
  chr10:17496544-17496851
  hyper
ggaggcgctcggagctgctgcgggctccggtcgccgctgccactgctgctgccgccgccgccgcgcggggtcacctgaaggttggggcgcggaagctcaactccgtgctgattgggctccaagttttctgcgccctcgcctcgtcccgagtgcccgcgaatcccccggacgcccacgcagaccacccagccacaccacaactctgcctgcggagagaggagaggagaaaaaggggccgcttcaaaaactttcaaaactgtgcagtcgcttggctggatcctcccacgcatgaagaaagctggggact

SEQ ID NO: 7230 - DNA, 44 bp, Homo sapiens
  chr10:18429104-18429148
  hyper
acaggatcaaggccccctgagcgccgggcctggcttctgtggct

SEQ ID NO: 7231 - DNA, 633 bp, Homo sapiens
  chr10:18429517-18430150
  hyper
ggggcgctgcggggcgctgcgccgagaacggccgggcctgagccctgggcggcccccagagccgatcagagcgcggggaggcgggggcgaggaggaggggacccgccgccgggggctggctgcttcgctccgagccgacttttcgccaatggtccaaagggacatgtccaagtcgcctcccacagcggcggcggcggtggcgcaggagatccagatggaactgctagagaacgtggctcccgcgggggcgctcggagccgccgcacaggtagcgagagcgcggcgccttctccttcctttgtgagccgccgggcagggcaccgacctcgggttctcccggcgcctccactgcagggatctctagcctcgcacctcctcccctcgtcgcctgcccaccctctgctcctctcctggcgccggggaccctgcccctttgcgccttttcctggctctgcctcggcttccatttttctctgcttccgaaaagccagtggggaagggcgggggagacctgccagtcctcccagacttctcccgggttgctccagctggccctcctcgccccttcccgggagaggcacatggagagacatgaatcaggggagtggactggacctgctgaagatcgtgagt

SEQ ID NO: 7232 - DNA, 30 bp, Homo sapiens
  chr10:20104437-20104467
  hyper
ttcctttaaactctcgctttcgcccccgct

SEQ ID NO: 7233 - DNA, 909 bp, Homo sapiens
  chr10:20104770-20105679
  hyper
gctgcccagggcgtgcgagcaggctgcgaggatggcgccccggcggcgcggaggtaccgccccgcgctcccccgatagctccccggcctgtcccctctccccgcgctctggggcagccggctgcctggggcgcacggggctggagtggccctctccctccccttcgctaggctcccccggcttaatctgttggccgcgactcctcagccagccccgaggaaagtgcagccattggacaggtctgtgcgggctgccggtttcagggaggaaggtgggagaagcctggaggagcgaaggggagggcggagggaggagggaggagggtgcggcggcagatctggcaaattgcgagctgccttccctcctcaaagtgtggagaaggagcgcgggggagcgtggcgacggcagcgcctcctccgccaccaaactcctggggctccgcgggggcttggggccacctcctcctgagcccggaggaaccctctcccgataggttccagcgtgactccctcccactccacccttttcctttcttcttcctcttttttttttttttttttaaacacatttttttcctggcttcggacctcagactgctgcagccctaaccttcccagggctcagctctttggagctgcccattcctccggctgcgagaaaggacgcgcgccctgcgtcgggcgaagaaaagaagcaaaacttgtcgggagggtttcgtcatcaacctccttcccgcaaacctaaacctcctgccggggccatccctagacagaggaaagttcctgcagagccgaccagccctagtggatctggggcaggcagcggcgctggctgtggaattagatctgttttgaacccagtggagcgcatcgctggggctcggaagtcaccgtccgcgggcaccgggtt

SEQ ID NO: 7234 - DNA, 30 bp, Homo sapiens
  chr10:20106858-20106888
  hyper
tgtcctggcaggtgcgcgtcctgcggggag

SEQ ID NO: 7235 - DNA, 30 bp, Homo sapiens
  chr10:21462426-21462456
  hyper
cgccgtgcgccctccgcagaggctctgccg

SEQ ID NO: 7236 - DNA, 30 bp, Homo sapiens
  chr10:21462994-21463024
  hyper
ctccggctccgcgccgctggctctgcgtcg

SEQ ID NO: 7237 - DNA, 103 bp, Homo sapiens
  chr10:21463397-21463500
  hyper
ttctcttccccagccgggggcaccctcatcccaggctgactgacgtccctggcacccaaatgtcgcggggagtgcggggccagggtgcgccctccctcctcct

SEQ ID NO: 7238 - DNA, 30 bp, Homo sapiens
  chr10:21785720-21785750
  hyper
cctgagggctcccgcgattgcatcttcttg

SEQ ID NO: 7239 - DNA, 608 bp, Homo sapiens
  chr10:22517900-22518508
  hyper
tgtttaagtcgcaaacggagatgtttacgctgacagggaacagacaaaagggcggccatgcttcaacaaaatgtaggagttttcagtttgcagcttgaacttgacactgttgaaatacatgcatttcggtggccccgttacatttcacgcgtcacgaagccgagcaagaccagcccgggccgccttccccgtgtacgcgcgggcctccggggacgcgcagagctggagcggcgggcgcgcgcggcaaacgggcccgcgcggcctctgcgcgtccccgctccagcaccctggcgaggcctagaccgccgtgaagaccccggggaaggagtggccgcgctcacctgcagccgggagaggacagcgggggagaggaggccgctctgcaccggccgaaagcgaagggctcgccggctggccgcgtagtgtaagggtcggtggtttctttgcttggtccctggaaatccaccccttcttatcccggaggcctgaactcgatttctgcaaaacttcccgcgaccagctcataaaaggagagcgcgtccctgggtgggctcgaaccaccaacctttcggttaacagccgaacgcgctaaccgattgcgccacaga

SEQ ID NO: 7240 - DNA, 30 bp, Homo sapiens
  chr10:22518858-22518888
  hyper
atttgcccagtgcttcgttcgctcatctct

SEQ ID NO: 7241 - DNA, 30 bp, Homo sapiens
  chr10:22519104-22519134
  hyper
tgctaaatctgccctcgtccctggaattag

SEQ ID NO: 7242 - DNA, 20 bp, Homo sapiens
  chr10:22540686-22540706
  hyper
aaaacaaaaagagaaagtat

SEQ ID NO: 7243 - DNA, 1110 bp, Homo sapiens
  chr10:22540740-22541850
  hyper
cgggcgacgctcggctgatgggaccgggccgcgcaagcctcggatgcagccgggtggggggcaccaggcgctaggcgaaggagcgcaggaccaaaggagatgcttggctcctaagataacacctttaaaaagaagaagaagaaagaaagaaaaacaaacaaacaaactcgatacttagcctcacgatccttgccaccccctccctgctccgccacccacacacaaaataaagtgagccgggcgggggagtgcgcgccctgaaagggaacaagaagcaaggcgcctgtgacacaaaatggagaaagaggaaccgggagtggaaaggaagaaggaaaaccgagtaaaggaggttattcataagaacaggaaaggggccgaggggtagagaacacccgaaggaaagcgcaggaggccctcgtgagagggcaagggggaaaagatcgacgaagtaagagcgaaaagaggaaaggaaagaaagactttctagatgcggagtctccattttcagcagcgccatattcgcttttcctctcgccgcttttggctgggttttgtgtgcggcggtggacaggcgccagcacatttctgcagcttcagcagctctgctcagacacctggggagggccgcagggcccgggcgggggacgcgcgctcttggcccaggcccgggcgcggccccctccccggcctggcggttcctgcgcagcgccagccccgcgctcctctaggctgcaaagggggcctccgactcgggcccggcccggaggggacacctcactcggggccccgcggcagcccccaggggacgcgggccctctagtttcgcccacggtgtggctgggcatgcgtgccaaggggatgcgtaaccgagaaccgaaaaagacgaacttaaccttcggggaggaggagagggcgcacgctgcgggtaccggggcttgggggcgctcctggaggtgacggggtcacctccacctgcgcggggccactctctgggagccggcgatcgatgcccgccgcggcgcctggcccaggcccccaggcctctcgcggctcccggaaaaacgtccgaggtcggggctcggccgggagccccaagcgggtcccctggcc

SEQ ID NO: 7244 - DNA, 225 bp, Homo sapiens
  chr10:22542024-22542249
  hyper
gaatccccacctcggtcctcgggtagaggcgcaagcgcgccccaagaccattctcttcgcgcccacccccgttattcttcactttcacttgacatcgttcttcactcaaggttaggtcctcgctagtgccagagaagcccctgggtccccagtgccctcagccccgcagcgtagggagcagccggcccgggagataaggaggccacagccatggaggccccaggc

SEQ ID NO: 7245 - DNA, 30 bp, Homo sapiens
  chr10:22610492-22610522
  hyper
cccattgacagcggcgtctgcagctcgctt

SEQ ID NO: 7246 - DNA, 380 bp, Homo sapiens
  chr10:22614078-22614458
  hyper
agcctttccaaaactttgtatcgctcatttaatctacaggagagcgtcacattagagaaggaagttttaaagaggttcggttcaataaacatctctgcaatttgagccctgacggtttcgggctaagtgcacagttggcaattctcaaaaaatcccttcgtgaaatttctgaccgagtgattgcagacaggacagaccgagagagtcgagatctgaaaccagctctgcgcaccaagtcgacgtgaaaagaggcccccggagtgtccgaaatggccgggagtgcggtttgcattttcctttcgcgggcgctgccgcaggctccggggtccccgccgcccaggactgggtccctggtccccgatccccgctccccgctcccc

SEQ ID NO: 7247 - DNA, 256 bp, Homo sapiens
  chr10:22624049-22624305
  hyper
ctcaagatctgggcaaaggctcgcgtctcgggacgcgaagtcgacgccaaaatgggtccccggacaaggcgaccctgggagtgccggcgcccccggccgggcagaggagcgggtgggccgaggctgggacatcgcctccgaaagctgccgggacgcggcggcttcctgcagagcctgcgcctgccggatccccagaacacagaagcttctcggacatgggagctccccgtgcgccctaaaaccaggagaggaaggg

SEQ ID NO: 7248 - DNA, 559 bp, Homo sapiens
  chr10:22624561-22625120
  hyper
cggcgctccgggtggacggctccggggcgcggctcgtccctcgggtggtgcagcccccgcggcccgagacccggggagggccgggggtactttctgcgaggcgccttccccgcggcttctgcccgcgccaaagcctggtggaatccagcgcagacctaaagcacgcttgacaccccgatttttcgagactaggacgactctctgagccagcagctttcctctccctctcggggagaatctcatttccttggggtggtgagggtgacgggcactgtcttttggccccgcgtgtccgttccccggtctcccgcctcacccctctgcgaggtgaggaggggaaacggcgagcttaggcctggcgggaaggagcctacccgacgagagggctccgcggggagggtcggttggaatcccgccctagcgcctcctgctctgcccggtccccaccggggacggggaatgccagtcatttctgttgagtgctagcagggccggtgtcaccacctcgggtggccgaggcttcgaggttttcatgaaaagcccccgaagcgtgaggcgc

SEQ ID NO: 7249 - DNA, 400 bp, Homo sapiens
  chr10:22625382-22625782
  hyper
cgtctttgccgcacagctgcagtcaaggcccggagggactgcgggacgcgggcgggagcgagagccctgtgggctgccaagccggcgcggccgcgccgcggcagccgcttcccttgccaccttcgttccaggggctgcggggctgcgcgctcggcagaggctcggttgccagtagcaaccacacgacggcgatttgcagccagggccgccgccgcagccgctggtacctctgcctcctcctacacctcgggctcgagcatttgaaaccctgggggttgccttcggtgacatctcccgcccccacctccagtcctcagtctccaaaatcctcagctctgctcaaaagccagcgcccccggctgggccctgcccccaccgcagacaataggagcggctggga

SEQ ID NO: 7250 - DNA, 167 bp, Homo sapiens
  chr10:22625811-22625978
  hyper
cgggcacctgagcccccaaatccgggcgcgtcgctgagtctcagccccaggtgccctcttcgcggagttgatcagcaattctttttcagtggccaattagaaagcttttcttgacatcagaaataagggtggtgccaaagaaagaagtcaaacgcccactccctttc

SEQ ID NO: 7251 - DNA, 83 bp, Homo sapiens
  chr10:22634091-22634174
  hyper
accaggctcccttggcgcgtggggctctcccggcgcttggtcccgacccgcgccgcagtcaggataccacggcaatctggggt

SEQ ID NO: 7252 - DNA, 295 bp, Homo sapiens
  chr10:22634324-22634619
  hyper
gcccaggcaccgcggccgtgacgtcacgcccgggactggccgttgcagcaagacggccgcgttccggttccggtaggttgcccgggagacgcgggtacacagagaagcggctcccgtcggaggccgagtcgtcgccacgatcgcccccttggtggactcgcaggccgagcggcttccccgcagagctcgaggagggcagacggcggcgggggcgccatgagtcagaggcaggtgctgcaaggtagggccgaggcgggcaggtgccctaactagctggcgccgaggagacccgggt

SEQ ID NO: 7253 - DNA, 790 bp, Homo sapiens
  chr10:22764687-22765477
  hyper
ggagtcctcctcatttatgggcgtcggcgctaagcagctctggaaacgggcagacccagctgtgcagcgatgtccagtgtcgccgcatctgccccgcggggtgcagcatgagtcttcctttgtggcgtgcggctccatcggaacgcgcgttgcgacgacaaattccttttttcccccccgcagttaacagttctggggcagaggctggtggagaggtccagagcccactcagaccgagatgaagatgaggaaaagcatgagcaggaagaggctggcggctgcggcggccacagggaagagctcggtgcgcggcgcagcctcccgcgaccgcgactcctgggctgcgtcgaggagccgcgttgccataggaaccgtagcggcgccccagtgaaaccctgcgttcggacaggagaagctaaccgcggccgcccactcccacccgcgcttcctccccgcccccaccggccgtgcgcgaaaagcagagatccgagaaccgcgtgcggtacaaacggcaaaagcttcgcgcgcattttccgggagttgagcgcgcggccgcaggccgggaacctaccgctctcaggctcccagcccgggcgctacgaccctgtgggcgccgcctgtgcagcccctccttccagcccgctcgggcgcatcccccaggccgggccagcgacgcgggcaccgggagcccctcccgccggtccgggctttggcccacacccggggaccgcggagtgggaaaggaaccaaagcgcggcgcctggccgaccgcggacgaaattcgaggccg

SEQ ID NO: 7254 - DNA, 68 bp, Homo sapiens
  chr10:23002244-23002312
  hyper
cccacaccccccacagcgggtgcggccaactcgggaccccctccgcccgcgcccgccgggacccccgc

SEQ ID NO: 7255 - DNA, 30 bp, Homo sapiens
  chr10:23217002-23217032
  hyper
agcagctagctactcggcgggatctcccgg

SEQ ID NO: 7256 - DNA, 30 bp, Homo sapiens
  chr10:23461478-23461508
  hyper
atcactgccggagccgccctgggcgcactg

SEQ ID NO: 7257 - DNA, 559 bp, Homo sapiens
  chr10:23461903-23462462
  hyper
aagacagtaaaaaatgtgtctcgtccaaacgcaccccctctccaagcccattgtgaagtcagtcgccaacaaaggggacgtgtgaatattcaacaccgactctttcacttgttttttccggaatccctgagtcgactcaccccctctcctttttttttttttttaaatgggcgaatacctgtttaagttttaaaagcacatggaaattgcccgcgagcgaccatataatttgatttgccaggcaatctgcagagcgatcgcacgtcatttataatgttcattgagcattttgcctaattgtgtctgtctctgaaagggcagcgcaccccctcccgaccgctagcagcacaagtggcgacattcccatggagcggccgcgccgcagcttgccgcattcagcgcggacggcctggccgcgcgcttccccgcccggacgaccgggcgcgcctgacactaatagctcgcggctcaggtacgagcgggcgccgcatttgactcaattcaattcacaaccggccgcgcttgcaggtgtcgccttttgaaaccgccattcaggcgg

SEQ ID NO: 7258 - DNA, 129 bp, Homo sapiens
  chr10:23462485-23462614
  hyper
cgcgggttctgtagaagcgcaagaatggggctgattattccggtgcccacatgccgcccccacacgcccccacccccgtccggcgcaagacttcccttggccaaaagaggcgtttaattagttctgggg

SEQ ID NO: 7259 - DNA, 305 bp, Homo sapiens
  chr10:23462634-23462939
  hyper
cgacaaagcccggctccccaggtaacccgggttccctgcggacccgggagggggcgcgcggggccggagcaccggccttgggctgcgcgctccctccggcgacactgccgtccccctggcctccggcccggtcccccgcaggccaaaggctcatctgccgggcttgggtggcccgggccagcgccgcctgcggtccccgagtgcggctggctctaaggccggcgccctctccccggctttcagtgctcagagccaggccagcgggaaagaaggcagcatggtccgcaaaagacaggtggcagtgg

SEQ ID NO: 7260 - DNA, 30 bp, Homo sapiens
  chr10:23463731-23463761
  hyper
ggctcaggtaccagcgccttgtgtcgggaa

SEQ ID NO: 7261 - DNA, 66 bp, Homo sapiens
  chr10:23481370-23481436
  hyper
gggagggaggggctcggacgggccttagaaactcaccaagaactaacacgcgcagcccggcagtcc

SEQ ID NO: 7262 - DNA, 40 bp, Homo sapiens
  chr10:23481761-23481801
  hyper
ctgcgagacgggggcgcccccaggcggcttcccctactcg

SEQ ID NO: 7263 - DNA, 252 bp, Homo sapiens
  chr10:23488006-23488258
  hyper
cagcctgacctttgggacatccgccgctgccagggcaaacctcgccaaactttccccaaactccgcaggccggggagggaccctggccggaggcgcgcatgcgccccgcccgctgctccgcgttcccagggttccggagagccggggtggagtcggacgagtgtccccggaggcccgcctagcccttgctcccaggggcattcgggactcctgtgctgcctgtcttcgcttgaggctggaagtggctgcccg

SEQ ID NO: 7264 - DNA, 1024 bp, Homo sapiens
  chr10:23488342-23489366
  hyper
cgaacggccaaaaggagatccggggatgggaccccaggcttcttcggaggaggcccggggcaactacgccccgcggccgggagggaagccctcgggcggccgcctgtagagggccccgtggcccggggcgcaggttgtggcgagctggtttttgcctctgggccgaggcgccagcgctagcagcgacagcagcggggggcgcaggtttctagccagtccccactttcggacctctgggggtctgcccttgcttctcggggagtcttggcccttgactgatccccgcaacttaaggccaatcccatccctagctggccggcacctgttccaaacaacctgttgcgctgacatcgctttggagaggcgccggcgctttgctggtggaggcgggttgtgtggaggccccaagccttcaggaaatagtttagggttccgttgtggtgagaggcaccccctccccgcttcctgtggcatgtggggtgtttcacctctgcctgtgtcccaggaacccaaggcgtcctgggcacctctgcacctcgcccactctagggacttctcatgtagagctcggcagtttgggtggattagacaaagatgaggattagagacacaccgccggctaattaaatgggctcttctcctctcctcgtcccctccccgcaacccgcagccagataggactcttcggttccctacccccactcctaggccctatgtaagtgcggatggagaaagctagttacattagcccttctgtcttagaggtaccggcacctcggggcattctcgctcttaaagatgcgttttctgaattatttctagttttacaatttctcttcggtgactgcacaggatcccttctagctcttttcctgttggagtcgctggacgtctcccaaacagctagttagtcgcctatctctggagcgcaggccttcggaattggattcagggtatgagtctagctaggggatgtttctagaagttttataaaatccatttgggcaagcgttggcattcggat

SEQ ID NO: 7265 - DNA, 35 bp, Homo sapiens
  chr10:23983306-23983341
  hyper
ggaaagagaatgcccaactcccgctctccaactac

SEQ ID NO: 7266 - DNA, 758 bp, Homo sapiens
  chr10:23983617-23984375
  hyper
cgcggggtggggggtggtgggggtgacgtcaggactgcagtccagaagagagcggctggagagggctgcgcgcttctcgccaagcaagcgggaggcgcactggggccgccgccgttcccgcgctcctccctctcctctgcacccactgtcacgctacccgcccgcgggggagcctcgagagcctccaggtgaattgaaagtcgtttccgggggaggacggagagggtgctgcagtcctggcatgccctgaaactgcaagtcgggcagaaacgacccggcggaggagcagggcgcgcagcgccctgcgcagcatccccgggctgccagaagaggccaccactcggctggcagccgcgagcggcggccgaacctcggccccagactcgggcccccggcacgctcgcccgggagataccccttccccctcttgcgcatttcgcagctgcgctggtgtggggcatgagagcgaggtggctccaggtctccgcggagcagctgccagtgggagagcgaggagaggcgagggggcggcagcctcggcccgaagtaagtgcagcagaagtttgcgtcggttgccccgccgctcccccagcgcgagtgggaggcacatctcccctccttggataaggaaaccgaggggagacttacaagggagccttgcgcgggagagcaagtgagcgtttcgagagagggcaaggacccccccaggagggccaggccgggaggggtcccggtgcggtgatggggtgccaaaagga

SEQ ID NO: 7267 - DNA, 165 bp, Homo sapiens
  chr10:25012545-25012710
  hyper
gccccgcccgcccgcccggcgtgagccggaccccgcagccggacgatcccgcgctgcccgccgccgccgccgccgccgccgccgcgctccgaggccgccgcccccggccggccgctcccaggcaccgccgcgacctgccccggccggccccgggctctcggccgc

SEQ ID NO: 7268 - DNA, 65 bp, Homo sapiens
  chr10:25241412-25241477
  hyper
ggaggggagcgggccgagccccaaaatagggagtttgcatttaccacgacgcctcgcccgtagtc

SEQ ID NO: 7269 - DNA, 507 bp, Homo sapiens
  chr10:25463829-25464336
  hyper
ctcgcggtgcgggtctgggcgcgcgccccgcgcctccgggcgaagcggtcgaggaggagccagtgccgggaggcgggaacgacctgcggcgggtgagactatggagcagcgtcttcggcggccgcggcggcagcagcagcagcagcttctgaacgcgcctcaatgagagcggcggtggcggcagccgggccgagagacggactcgggctgactccagccgctgggagcgcgaggccatgtaacccgctcggctccaggctgcgaggtgcgtaatccccagccggcccctcgcgcagcgggcacggccagcgctgccacaggtgacttgatttctgcgacggtagcttagccacccggggccaatctcgaaacattcttattttcaagtcctttggactgggtgccatctggagaagggggaagactcctcgaaaaagtctgactgttgagaaactgacgatccaaatttaaaaagtgattcccccccctcccgttccctcctcttct

SEQ ID NO: 7270 - DNA, 242 bp, Homo sapiens
  chr10:25464555-25464797
  hyper
cttggcgcagaaactcgccgaggaggtgcccatggacgtggcctcttacctctacaccggggactcccaccagctgaagcgagccaactgctccggccgctacgagttggcgggcctgccggggaagtggccagccctggccagcgcgcacccctccttgcaccgggcgctggacacactgacacacgccaccaacttcctcaacgtgatgctgcagagcaataagtcgcgggagcagaact

SEQ ID NO: 7271 - DNA, 259 bp, Homo sapiens
  chr10:25465095-25465354
  hyper
ctggcggcgcaaggacgggctcggcggggacaagagccacttcaagtggtctccgccttatctggagtgcgagaacgggagttacaagcccgggtggctggttactctttcctctgccatctacgggttgcagcctaacctggtcccggaattcaggtagggagggccggggggcaggggggaaggcaaaagcgaagctttccttccggtcttgtgggtgggtgcacgtgtgaggaaggaacccttggctgtgacgcga

SEQ ID NO: 7272 - DNA, 110 bp, Homo sapiens
  chr10:25465408-25465518
  hyper
cgggtgcttgggggcaagaagcgccccacgcccgtcagcttccggcgctcggcgaaagccattcattctctcggaccagtttccccgcactgggcgagggacaggcagcc

SEQ ID NO: 7273 - DNA, 165 bp, Homo sapiens
  chr10:26500705-26500870
  hyper
gggtaggtggggacgcgctgctcactgtggtgaggttgacacttgggccctgggtttcacttgcaggtgctgggcggcggagagccccgagaaggaggaggagagagagccagcagccaacccctacgacttcaggaggctcctgcgcaaaacctcccagcgccg

SEQ ID NO: 7274 - DNA, 46 bp, Homo sapiens
  chr10:26501026-26501072
  hyper
cgctcggccctcaagtgcccgggccggccttcgtgctccgaaacaa

SEQ ID NO: 7275 - DNA, 190 bp, Homo sapiens
  chr10:26503615-26503805
  hyper
aagtctttaggtttccggagttgttattgtggtgacctagagtgtcagagccaggagagcaagaaagaggagccaaactgagccctgagttttcgaccacccgggctcccacagcctggaacagacttcacctagcacgctcagtgccagccttcggcaggacgctatcaacgcccgactggtttcctgc

SEQ ID NO: 7276 - DNA, 138 bp, Homo sapiens
  chr10:26504005-26504143
  hyper
gggtgctcgcccagacgggatccccgggtctctgctttgttagcagctttggtggctggttcaggaggtcagagaaataaaacgacttgtgaacacaatggaaatgacaggcgctctggccaggcgcggggaaggcag

SEQ ID NO: 7277 - DNA, 693 bp, Homo sapiens
  chr10:26504190-26504883
  hyper
cgtctcccccagagccccggagctccgaggtgcacttgaagttcatctccactgccaggagaacgcagcgcaaactgtcaaagggctcccaatccttagggcgtcctccctgtctgcaatagctttttgtagaaaggaaatcatcagaacgattctgactttctcctcctttctttattagaaaaagagaaaccgcctcctaatacgcctcagagagaaccaatctcgcgcttccgggtcacccgctaccgcgaagattctctgggggcgagggggggcattggtttgaagccccttaaaacgagggccctgcaggcgatgccttctttcctactcggatttgtaaagccgagattgcttagttggaaaccctgttctcccctcccaggcgcacacagatcccccttacacgcaagcagcgggcgcttccacgcctccgcgggccaaggtcaccaaatgccctgattccatcccccacccgccatcaatcctgccgactctggccgctctgcctcattctcttccaagaagtttccattcgttttatttttttttccccagcccgaggtcctcagtagactccagcgtggattttaattgcctcaatcagcagtcattctccccagccgtcactcagagcctggacggtgggtcccgcgatctagcccttggctacgcaggaacggtgcgccc

SEQ ID NO: 7278 - DNA, 93 bp, Homo sapiens
  chr10:26505008-26505101
  hyper
cgcccggggcgcgagctctcgaggtcgcagtgacctcagcacctgcttggaggaaaacggcgcgggaaccccgcttccttcccctcagctgga

SEQ ID NO: 7279 - DNA, 16 bp, Homo sapiens
  chr10:26505441-26505457
  hyper
cgctttcctgagtccg

SEQ ID NO: 7280 - DNA, 279 bp, Homo sapiens
  chr10:26727054-26727333
  hyper
gggcctccgcccagcgcgcccttcctccacccccacccgagagacagctgaactccggccgggacgcgcgtgttgccagtccagccctgcaccgcgtcccctgagggcgggctgcaggcggccgggaagccttgcacaaccggcccaaaagaggaagcccagaaagtgctgaagtaaacactttgggagaccgttgcaacataaagcggcctctcagtctttggtggaaccatcactaggccccaatcccttagtccctcttgcgtcgaggctgcaaaa

SEQ ID NO: 7281 - DNA, 233 bp, Homo sapiens
  chr10:26727583-26727816
  hyper
ccttccttgcacctcggagcaaagcagctcggatagcgccacacgtctgcgcgctgcgtgggaagggcagggctgacagcacttcctccccggggcagcgacctggagcccgggtgcggcagtctgcaccgcgcgtcgctttcccggccggagtctcgccgccttcccgcgccccgcagcgccccgcagagcagtcgaggtaagtggcgctcccagtcccgggagccctggga

SEQ ID NO: 7282 - DNA, 184 bp, Homo sapiens
  chr10:26727867-26728051
  hyper
cgggtccgacgccgggggcagctccaggatctggcctcgtgaacgcgtgcccccaggcgtggccctcgagcgcagcgggtccccagggtcccctccgctgatctccactctggacccggctcgcgagggtgggggtgtgagggtttggggttcgggtttgctttttcccgagctattgcaacag

SEQ ID NO: 7283 - DNA, 30 bp, Homo sapiens
  chr10:26986575-26986605
  hyper
cccgggaggaggatcgcgggccagaggcgg

SEQ ID NO: 7284 - DNA, 30 bp, Homo sapiens
  chr10:27928208-27928238
  hyper
aatgtgggtggggacttagccaaaccatat

SEQ ID NO: 7285 - DNA, 30 bp, Homo sapiens
  chr10:28030824-28030854
  hyper
atgcggctggctctcgaaacttccctcggg

SEQ ID NO: 7286 - DNA, 2271 bp, Homo sapiens
  chr10:28031375-28033646
  hyper
actaagcagcgacgccgcagaacaagcagctgatgcaatcgttcaggtggaggcggctaggacggccgcccctccccggcggggcgcccggggagccgccggatcgggccaggcagagcctgccctccactcaccggcagtctgagcagctggcccacccgcaagctaccgccccccccagcatacccctcaccccgctaaactcaaacccggccccgcaggcccggggcctccccctccgggttcgccgcgggcccagccgagccgcgctcacgcccgggactccctggcgggaggcgaccttcccgactccttgggccaggcgagccgcggggctctggcgaggggctcgagtgaccgaagagaagtccgcggagcctgagcctggactccccgactgctcggcttcgcctgtttctctgcaccgagctcagtcctttttcctcgccctcagccgcgcaccggcacccacagtccggagaggggcaaataacccccaactccgaggtccaggcagcggagggccgaggggcagctcctggcgcccttagtctccaccaagctctttggagctgccccgacgaattgatccctcatgttttaagataggagccccttaacatgagaatgcgcgagccctggaggggcagacctgcactcccagggaactccgggccctttcccgtccacccgcccgcgttgccacgggaccccgtcacagctcaccacccccacccctccgggccgcaggcgggcagggcccccaggggagtgcgcatacccggtcctccggtgtctcaggccgaggttgtccttgaggggcgggccgtcgggaatgcccacctcggggcgggcgtgaggactgtccaggacaccgctgtagggccggccaccccgctcccgctccgaggcgcctccgtcctcaaacagcaccgcaccgctgagcttgttgaagacgatggtgttcatggtgtcggttggtagggacgcgcggcgcggccgcagagcctcggggctgggccgccgggagctccgcagcggggctcggcttctaggagaggaaggtgcatctcgttacttactggctgagagtgctcagacccctgcaggttcagggccttgaacttggccgggtcgccgggctgcggagccgaggggaggagcggcgccgccgcaactggcagggaccctgcggctctccccagttggctacacgcccccgcccctgcaggttccccggacaggtacctgccctcttccttgcctgggcgatcgatccccccaatcccttcactccccagaactacaaccgggaatcattcacccgcagaggcaaaggaaacgaattcccaaacgagcctctgggtttcagtttgaatctgggagaggcatactccggactgcggagcgcgaccggcgtgaggccgcgcgtggttcttcaatcacagcagaagactaaagcctctaggaaccccaactcggggcgtcaggaggggttggatggaagggaagatttggggtaatgtgccaaccgtatccacaagaccccccagctcatgagtcccaggccataccgggatttgggggattttcgtgttttctagatcgtggatggtttggttgaaacccccgcatcttctgtccgccaaggtcccccggggtgaggttgggttcaaggacaggaaaaagttaagtggcgtcaggacgaaagcaccacttctcccccttctctcccagaatcttcctatcatcccccaacgcgccccgggaagtgcatggtcctaaggtccaaggcgccaggacccaggtccccagagccctcaatcagtgccattctcttccgcagcgcgggtgtcagccgcgagctcgtagcccctcgacacccgcctctctctggggtctccggggaccctttcagaggctgtaaaggtgtcagaagcccaaggcaggaggcagcttggtcggcgcacctcccgggccactgctgccactgtcggggagagccagcagctcacctctggggtcgcggaggccctgagcctctgcctgccgcgcaccggcgtcaggagcaagtccgcgcggccgcggagccgcagagttacagccccaaggcgcgcggcggacttcgcccgccccatctcctcgcctcgcgcctcgggacagctcccgtttcctccgagcggcctcagcttcgctgccagcgccccctttgcccgtccagccgcggcatgggctgctactccactaacacacgcgcgcgcgcatacacac

SEQ ID NO: 7287 - DNA, 498 bp, Homo sapiens
  chr10:28033688-28034186
  hyper
agcgcccacactcgccaacgcccccgccccgcccttcggccaccgcagcagaggccacgcgtgacatttaggaccacgcgtgaccaccgcgatcaaacgacggctacggtctgtgttcgtagggaagtgaagtcagacctctgctggatgtcgtgtgtcccctaggactgcgtcctcccgcgcagacaggtacgtgcctggggtgtgcacatagcctcggtgataagtgtcaaagagaattttcgtgcttgcagcccctgttctacagtcaagactcgcgttggtgttttcttttaaaatcatgcccttagggatgtgtgttcatgctgctttatttgtacaagacacccttccccggcccggccttctccgagccaccccagcgcgtcctcctagatgcgacgacgtgtttttcctagcgaagtcatcacgaggttagccacctcggacacttccccggcagccccaagcccacgcagagatcgcagacacagacac

SEQ ID NO: 7288 - DNA, 229 bp, Homo sapiens
  chr10:28034326-28034555
  hyper
cgcctcttctcaaatcacttaccccgattcactccagactgtggccggggaggtcactccctgcagaagtgtccccctcccccaacgccggcgaataattttaaagcaaaggaggcgcggccaggtgggctcccaagctccgcgcagacccttgggccagccttggccgctacccgagcgcctctccaccagaccttggagggaagttgggggaagggcgggagagcac

SEQ ID NO: 7289 - DNA, 434 bp, Homo sapiens
  chr10:28034873-28035307
  hyper
ggtatccacgttcccgggcgggtggagaggaagcgtccgcgcccgcccggccgcgggggctgctgttaacccctagcagaggagccgctgccggggagccccgggcccgccgagtcctccggagccgggcgcggctcccagatccgccggccttgcagtcgtggagcagacggggcttttcccttcgcactttaggagagaaattggagaagctgccgggagcgctcggctccggctccagaagctgagaggctgcggtgcaaatcccgtgtcttagctggcccgattgccggaaatttcactgcgcgtggctaggcgggagaggccactgtgacgcgccctgtattttcctctcgattagctggagggaagttagagctccgttttgcacctacagccctggagcgtattgcgggaagtgctagtgcccagga

SEQ ID NO: 7290 - DNA, 30 bp, Homo sapiens
  chr10:28035639-28035669
  hyper
aagtagcgaaagcggcggtttaggtgcaac

SEQ ID NO: 7291 - DNA, 30 bp, Homo sapiens
  chr10:28957635-28957665
  hyper
attttgagacaagtcggggtcgctcaatga

SEQ ID NO: 7292 - DNA, 66 bp, Homo sapiens
  chr10:28966235-28966301
  hyper
agccgggcgccccagccgggcgccccagacgccggcgccgctcggagccgccgggcaggtccccca

SEQ ID NO: 7293 - DNA, 57 bp, Homo sapiens
  chr10:28966637-28966694
  hyper
ttctgggctcctgggcgcgccctgtagccgcgctccatgctccggcagcggcccgaa

SEQ ID NO: 7294 - DNA, 309 bp, Homo sapiens
  chr10:28968984-28969293
  hyper
gacaccttactggggcgttcagagagagggggaagaataaaggtaagggtgggaagaggtttgtaaaacagcagatcccggtgtttaatttcagagtggaggtttcggatcttcagacgggaaactggaagaggcgtgtgcattagtttagtttactcgctgtggcatgtgacagcgaccagggtccactaggtggatattgtattagtgagaacttgaagacccagattatttcaacgagaaactgatattaaagcctccaatcttgccctgcgacaaaatgtgaacggagccatgcaactcacaaaa

SEQ ID NO: 7295 - DNA, 31 bp, Homo sapiens
  chr10:29737771-29737802
  hyper
aacaaaaattaaaaagcgtgtgcatgcaggc

SEQ ID NO: 7296 - DNA, 79 bp, Homo sapiens
  chr10:29738054-29738133
  hyper
cctaggactgtgaagccggaggcggcgctggagttggagccttggcttctgctgtgagcaacagcgccacctgctggcc

SEQ ID NO: 7297 - DNA, 759 bp, Homo sapiens
  chr10:30024793-30025552
  hyper
cgcggggagcgggtccccgctcgggatgattcacttcgctccttacctggaggctcgcgcgtccccaccccttgcgacccgcgcggcggccgggagctggcgccctctgctgggccaccaggcgggagcaccctcggactgggcaaggatcgggcggagagggtggggacacagaggggggccaagcacaagcacccctgcctctctcaacgcgggcaccccttcccaaaacaggggccagtgcgcggggaccacgctgggacgactctcgggggaagcaccagagctgtccccacgccccaggacacgaactcgcgcccggagccgaccccctccacggccagcgggtccagccgcgtcctcggaggtggcccaaggaaaccgcgatgaatcggcataagcacgtcctatcttaaaacaccggaaaggcagattttactttgtttggaaactaagtttgtgtcctgtgtctcagtagctctcagggtggtggcagtcacgcccccccggtcccagggctgggaagatgcttgggctagcccccgctgcagccccggagatgcggggctttaggatcccaggggctggaggccagggccgccctatcgctctcccggccgggggtgtggctgtccaactcgctctgtcgcccgagtgaactcttccagcaggttggcctctcaggctgtcccctgaggacctgagcgaaactctggaggggaccaggaagaagggagagaggacatctccgagaccttc

SEQ ID NO: 7298 - DNA, 187 bp, Homo sapiens
  chr10:31073814-31074001
  hyper
tttcagaataaatccccacttcggatcccgccgcggcgaagctgcgctgggccgcccgcacacacctgcgggtccccgagctcgcccgggcgcccccgccaccgtccccagagcgcgcagggagcggggcgcgcgatcacaccctccgcgctgcgcccgaccactcgggctttcaattaggagccaa

SEQ ID NO: 7299 - DNA, 31 bp, Homo sapiens
  chr10:31388316-31388347
  hyper
gtcccctattatggtccgtgtgtgtgtcagt

SEQ ID NO: 7300 - DNA, 67 bp, Homo sapiens
  chr10:31422658-31422725
  hyper
gcctcgtgggccagcgcagcttgctcctctgcagacccagaagcatttgtgcgtcccgggcgtggca

SEQ ID NO: 7301 - DNA, 30 bp, Homo sapiens
  chr10:31422927-31422957
  hyper
taagcaaggggcttcggagaaattagaacc

SEQ ID NO: 7302 - DNA, 186 bp, Homo sapiens
  chr10:31607135-31607321
  hyper
cttaaggtcctgcacggcgatgaccgctcatttaggaaggaattcatggcctgtggataccttagctctgagtcctgccacctaggatcccacggttctacgcgaggaagagggcggggagcgcggaccgggtgtgggaggccgaggtgacagcaggtgagggccgggtgcggatggggaagtgag

SEQ ID NO: 7303 - DNA, 1719 bp, Homo sapiens
  chr10:31608395-31610114
  hyper
gagccgcgccgcggccgctcgctctccctgaaccgttatgtctcttacctggtctctctccgcctagcggctcccgccgcccctgccgcctccctggaccgttagccggcgccgacgccgccgcatccccggcgcagggcgggcggccgggacgcactggccacttttctggtcccgggtggagcggctgttgcttctttccgcacttttccccactcttgtgcccttcggcgcctccctctccccctcctcctggccccctcagcgcgattctccctcagcgcccaggcccccgggagccgcggaacaaacttgtgcccggcgctgaccgtgcaaagtggcttccgcgcgccgcggccccggccggcgccgtcgctgtcgctcgggccccgcgactcgggccgggctgtgggcgcgcggcaggcgggctgcggcggcggcgggacggggcggccgcgggttgcgtggggtttgtgcgcgcgtgtgcgcgggcgccggctgtgcgcgccgcgggcggacagggttcggccggcggcggtaaagttgggacccgcgggccgggcgcgctcgcgtaacggggattagaggcgcgggggcgcgggtccctaagcgcccctcctccctggcgcctcccgctgcccggcccagagccccggcctggggactccgcggcgagccccgcgagtggggtccacgtttggcggggcgcggcggggcggcgcggggaacaaggcaggaaaggtacccacttaacgccgccgggagccgcgcggatgggggcgagctgggcggcgggtgtgtttgcggagttgttacctgggcttagagaccgggaagcaccacagacagatccccctcccggggcagacgaggtctctgcgccgggatgggccggtgtgcgtgcgcctcgcgcttttctctttcggtttttggggaagttgttacctgggccggacgcacggagcgctgaagccggataatggggcttggatggcgctctgggtctcgggtggaaggagggtgggggagggggcggacggaccgacggacgcgcggggctgctacttgcaccgcagctgcagtgtttattgatttgtgctgctgtgccaagggaaacacacacccctctgcctggcgtgagagttaaaaaaaaagagagacagcccgagggatcgagacctgaacatgtggtggtggttgcacagtcgccttttccagtttggagagacgttgtaagttgattgtatttctggttatctcggggcgatgctatgctttctctccctctcgtgcagcagcgaaatgtctgctgattgttattgtctggacagttcctgtggcgagaggggcgagacttgtccgcccgggggcggcgggagcgcagggagagcagcccccgcctgcgccgccccggtacctgtttgtataataatgggcggcaacggccctgccgccggccgcagcccaggctatataaggaattacacgtacatttcggaccgaggggctcgctttggttcctgcgttatttttaaaacgacttttaagagaggggcaataaatgcgtctataatgggaccgctgcagcgtcgagaaaacgaggaaatacgtgtttaggagaaaactctctcgtgctcccccagccccaccccccgcgcctgggctccctttctccctcccctctgggatgcgaaacgcgaggttttgtaacctttcctg

SEQ ID NO: 7304 - DNA, 30 bp, Homo sapiens
  chr10:31892175-31892205
  hyper
ccatcagcctgggacggaaaagacgcgagg

SEQ ID NO: 7305 - DNA, 30 bp, Homo sapiens
  chr10:32217898-32217928
  hyper
gcccggcggggatccgaatagggggcagcc

SEQ ID NO: 7306 - DNA, 30 bp, Homo sapiens
  chr10:33247469-33247499
  hyper
tgcgttgagacagtcgccgtgcctcagttt

SEQ ID NO: 7307 - DNA, 534 bp, Homo sapiens
  chr10:33623013-33623547
  hyper
acagcccaaggatcaacgtcaggagggagcccaaagacctgaaatcctcctgctctaaaccgcctgatctcatttcttcttctctcctcccagataaaagtttccttcgcccgggagtcggttgttcccggctgatcccgggaagccccgcctgagccccggtccggggcgggcagctgggagccggggcgccgctgtcacccgcgcctctgcctgtcacttaccgttgcgaaaagcgccggccggggcgaggacgagggcgagcacggcgcagaggagcggcagccccctctccattctcccttctccgggtccgcaggcagacgcgggagaacgaggacgtggggggaaatgcagcaaagaggagaatctaagcgatccgaagagccccaactccgcctagagctgtacaatcctcagcccgtcttggagaaaagaaagcagcgaggcaatgcctggatccgagaggaacgcttctctttttgtgtctcaagtcgcctgcatcctgtcatttagctccggcttcctctccct

SEQ ID NO: 7308 - DNA, 2305 bp, Homo sapiens
  chr10:33623746-33626051
  hyper
cgcccaggggaggtccgggtgtctgcgggaaggaggggaacgagcaatgaaaagatgagcgggagacagaggagtttcaccaactgcacccccgcctcccctcctgcggcctccccccactccggagcccttccctcgcttcctcccgcccctctccccgcttgggctcgcctgtaattgcctgacaggagactgggaggaacaactttccctccgagtgctctccccgtccgtctgtctgtctttcccagagaccctgcagggatctccgcgggaaggaaggcgctgggagtctgcgccccggtcgcgtgggtgcgggcgtcggaggaaggggcgcggaggtcagtgccagccgcagggtctggccagcccacctcgcgtgctcgctctgcacccctagagggagagctgggcagctcctgcaggcgcagatcccgccgccgcgcagtgcggagcgcccgggaggtggcggctgcttctcgcaacttcaaatcccggggcccgcgccctcggcggcgaggaacgcagggtcaccccctgccactcctcatcgcgccatcctgagacctgtggcggggagcagcggggcacccctggacgcccctgcccagagctggagggcgaggaggggaaagccgggctggagtgggagccgcaccgcgaagccgggcgaggggcagcagtgtcgctgtggtgtgaagcgaagacagaccgcctgggcgggcgaggccgggctgcagccccacgcggcctccctggcccgcatcagggcgcgcggctgggtgccctctgcgcgccgcggaggcttcattgtttcccgagatttggtgcccgttcctctggggcagagggaacaccggagggtgggaggtgctgcgccttccaagcaggggggcaatcgccgcccgaccccgcccaaccttgtctgggagcccaggtgctagggaggggtgtggaaatcaggggtcgggcggcccccgtttctctgtgcatcccgagggagggaaagagtggcgggggaggggtgctcttcgctgcgccctctcagtgtccgctcccggccacagacaacgtgcacgccggccctggagctcctgccacccccacttcccacagcggctcgtgcccccagcccgctggatgccccccaggcccgtccccgagggttttccgagaagtgctgcaggaagcgtttgtagatgcgaaaagcaaggacatttctgggaagaaacaggttgcggtcaccgatcaggccccggagaagggtcagtgcccacggggcacctcccagggagtttgtgggtaaggtgaaaaggtcacacgcctcctggggattggcgtctacacacacagccaaagtacagcctgattcctacctggcacaaatagctggccaaagggaggtaggaatgctggcaaggagactctggtcaaaggttttggcggaagaaaaaggggcgggcagggagaaagcccaaggcgcgcgggccccaggccaggactgcgcgctcgcgactcgggctgggagcagtgacgtgcgcccctcggggtgcaggccgttcccgggccagtgggaggtgcacccacggagcccgcactcgccactctcttgccccgggtcaagcctgtcttctcctccccacgcgcctcgggattcccagtcgccaagttggaaactcggcccccccgagcgcctctttcctctgccagtttcctccttcttctcagctgtcggacccctgggaggcgcggggtgggaagtgggcaccgaagggctgggagttaaatgcctaagttgagcggaaggagcactgtcgaagccatgggcagccctgcgcccgggcaggcgggcaggcgggaggcgaggcgggggcgccgaccgcgcccagcgcagaccccgggggagtgagcgccgcagaggcagcctgggctctcggctactacccgcgcgcggtcgccgcctccccaggtgcagccccgccagtcccagcccccggctgcgccgggcgagcggcatcatcagatttagggtgacccggagcgacctcggtccaggctcggagggagaggcgcctctcaggacctggcaggttgacagggaaggggaaccgggagggagcggcggccggggcggcctggagtctcggaggcccgcctgcgtcctggggggacccgacctccgcgctcgctccggagcgcccgtttggatagctctgagcctcggcggggtgagcgagggggcacacgagggagacttgagctgtgttgtttttagaaaactgccgccaatctctcttcccctttc

SEQ ID NO: 7309 - DNA, 1921 bp, Homo sapiens
  chr10:35102969-35104890
  hyper
actcccaagtcaggcccggccccgcagcccagccacatggaaccagcccgggataggtaggagctgaggtcctcgcaggaaaacttttcattccgcgactcttccaaggttgtgctttccagagcccagcaagtgggatcagctcagtaaatgctcgcaagcgagtgccaagtgccagcggtggccctcccgggaacgcctccccgaccccaagccggcgactccccaaaccctgcagcccccggacgcgacgggccgcccctgccggcccctaccagcaggggacatggaggaaaagccccccgccgctgttccgcccccgcccgagtaagggagaggaggcagaaggctcgcaacccgcctctgtcggaagggcagtcacgaaactctcctcacaccaaaagttcccagtccccggcctgtgcccccggggcctgggagccgggaaaggcctggggctggatttcccggcctgcgccccccgcgcgctggctcggggcttggctgggtctgcagactccggggaggcgcccagggccggcctatgcgccgctgcccggctcgccccgcgctaccgaggccggagctcccgggcggagggtgagggcgggggccgcgggacccggctgggtgtcccagaggctgcgccccggcccgcgcagagaactttggcgcccgcagtccggggcggggggcgcccgcgaggcccgaccggccgcactttccctttccccgcctccctgcgcctctcctcccccttccaggaagcgccatattgatcccggcgccgtccccgccgccgccccctccccgcccgcgcccccggcccctcaccttggcgatggccttccggtagcgggtcaccgcctgctggatgaggctgaaaactttcatgtggccgtccccgcacggcacgaccacccgggtccgtccgaagcacacggtcactttcatgccgccgccgccgcgggcgggcccgcgcccctcgccgagcgcagccggagcagccgaggccgggaccgaggacgctgggcgcggaggagccgctggggactcgggcgcgcgggcggctaggggcgcgggcaggcggcggcgacgccggggggccgctcagctcgcatgcccggcccggccgccctcgcctcgcctcgcttcgcccggggcttgcctcgcctctccccgccgcggcgcccgcagcctccggccacctgttcggcgtcgcggcgcgctcgccggcggctgcccggggctgtgtggcgctggcgctcgctcggggccgctgggggaggggacggcgggaggggaggggaggggaggggaggggagggggaggagcagggcagggcacacaacaccgcgcacatgcggcagggggaggcgcggccggctacccgcgcggggcggagcgcaggaccgcagctcgcgcccccgccaccgccctcgggggccgacctccttccctccttccctccctccctccctccctccgggggcgcgggacccctcgccccagtgccagcacgggcaggcggccgtctgcccccaccagccctggcccaggcgccccccagcccccttcaccccgcccgcccagcaccctgcagggctgcgtcgcccctcctcggggacgccccttccacgcctccagaagtctccacggagccccccttcccctttctttgtcacttttaatcccattcctcgaactggagggttttgggtgcaggcgctcccggggaaagcagtttgtgctcagtgcggtgagtcccctcctcaccgccccggaggctccagcccgagcctctccgcccgcggggactcgagcctgcagcttgctcggctgggtttctgccctgcccgctccctagctctgctgcagggccggcagcggcagttctgcctgaaacgcaagaattaatag

SEQ ID NO: 7310 - DNA, 121 bp, Homo sapiens
  chr10:35415500-35415621
  hyper
cttggggttggcggcgttaggaagaaaccgacctcgagaccctgaagacctgacaacagccgttactctggctgacaagtcattggatttctggcgcacgcgcggcgcggcacgggcagct

SEQ ID NO: 7311 - DNA, 51 bp, Homo sapiens
  chr10:35929333-35929384
  hyper
cgctgcacgccaccttctcgtggcccgccaccaggcgcactaggtagccca

SEQ ID NO: 7312 - DNA, 200 bp, Homo sapiens
  chr10:35929589-35929789
  hyper
ctggcctgtcttgacgcggttgtagagcgggtggcgctcgctggacacgctcaccataggcgcgcggcactggcacccgggctcgcagggagccgcgccgccgccagggggccgcgccttcccgccaccgccgccgccgcgagctgggggcgccgccgcgtccccgccgccaccgcccctgccgccgccgcggtgcgggg

SEQ ID NO: 7313 - DNA, 93 bp, Homo sapiens
  chr10:35930421-35930514
  hyper
gcccacgagagagccgcagacgggtacagcgggtgatctggggtctcccttatgcttcgcccgggaggggggtctgccgataatctaacccct

SEQ ID NO: 7314 - DNA, 30 bp, Homo sapiens
  chr10:35932103-35932133
  hyper
ccctgtcttcccttcgttctttcaggacgt

SEQ ID NO: 7315 - DNA, 30 bp, Homo sapiens
  chr10:38146515-38146545
  hyper
cagtcgctctcccccgcagccccgcctcct

SEQ ID NO: 7316 - DNA, 30 bp, Homo sapiens
  chr10:38146944-38146974
  hyper
gccgcctccggaggcgagggattgtttccc

SEQ ID NO: 7317 - DNA, 30 bp, Homo sapiens
  chr10:38654417-38654447
  hyper
gacatcatctcgcaatgcaaggaaatctaa

SEQ ID NO: 7318 - DNA, 1210 bp, Homo sapiens
  chr10:43248908-43250118
  hyper
gagtagagttgtaatattttccgccagtttttcccagcccggccccgaagcgtctgatcttaaagtccacgtatcagactccggggggcgtccctgcaagagcgccaggtccccgacacccaccagggaatgaatctgcgcccaggtccccgacacccgccagggaatgaatctccgtcccaggagaagggcgtggcgaggggagaagcaacaaccacaggacccgtgacagtggccaagccttagaggccccgcatgcctgccaggcgcccgagcccacgcagtccaggtttccccatccgggcgggaaccagctgtttcccctgcacgggcgagggcgctggggtcacctccgccgacgccaggcgtgagctccagaacccgctcccaaccgcccggtcccgtgagcgcggggagcctggctctcgcctgacaataaagaaatcatcacggacagaaggaaagaggagcgaggctgggaagggagcggctttaatccggggtccgcccccttcaattctccagcgcagcggccccgaaagtggggtggggacggggattgaggctgagctcgcttcttccttgttttccgggtctcgcgcctctgaagcgaactgggcctggaggggtgctggggatcgagggagcggcgttggtgggtgaccgagggaaaggtggggccagcccctgggcaccggtcggaggaggattacgaggcggagccgctgcctgcccgcgcctcacccgcttggtccacccaatagctccgctgtagactcgcggcggcaggagcggcgggccagatggtgattacaacccggggcgctatccctttggaacctgacccccaactccgctcagtaaccggatttccggaagccgcgacctcgaagcccccagcgtttctccaccgacggcggggccggggctcctggaagcctcggagccgcagctccagcctgcagcgcacgccttggcccccagggagcagagaggcagagtacccccctgcatccggagcatagcaagcatgccccaggctgaggacctgcgacttggtgggacttcggtgcccgcccctccgccactacagggagcagaggcggctctggaagtcggtttagtgcggagaccgcgaccggaggagcgcagaacgctcctcccagcgtcctgggctccgcaggcacaatttttaaaccagaggcgaaat

SEQ ID NO: 7319 - DNA, 617 bp, Homo sapiens
  chr10:43250136-43250753
  hyper
cggggagggagcgtggccgcctagccgagccccttctctggctccgcccgcttttgcgccgcgaggccgcctggtgagttccagggccctgtggtcccccagccgccggcgctctcgggtgtcttttggccgcggcaggaacggagctgggcgctcagacggcgccggggtcgtttctgtgcccccgcccggtggccggagccgcagccttgccccttccccactggggcagcgcctgcctttctcgcggccggaccgcgccggagtcccaggccccaggcagcccgggccgcagctgtcatggagaagcccggcgcgtacttggggtgcccggcaggagccccggccgcctcgcgcccttcttctcacccacgactgtggccggcggcggcctctgcttcccggacaaagctggagatgctgctgcggagtcggccctgggacctgcttcttctcttggctccggggcccgcagccgtcggggcccggaagggctccccggggcgttccctcaggagcggtggccagggctgatggggcgtgtacgacgcgggaccccgagcccggcagcagccaagtatggcaaggaccagcgcgagcatctccccactgcggcc

SEQ ID NO: 7320 - DNA, 13 bp, Homo sapiens
  chr10:43428563-43428576
  hyper
tgccccggggtcg

SEQ ID NO: 7321 - DNA, 88 bp, Homo sapiens
  chr10:43428888-43428976
  hyper
cctgcaggagggcaggatgcccgcccggggcggaagagccgagggcaggccctggggcggggcgctgggctatggagaccacgctcct

SEQ ID NO: 7322 - DNA, 130 bp, Homo sapiens
  chr10:43429066-43429196
  hyper
cgccggccttcccaggccccgggagccaggaaggtctgaatggagtgatgcgcctggacttttgttcggaaatcccgcgtggagggcggcctagcggggagaggctggaaacaggcgaggaggagcaggg

SEQ ID NO: 7323 - DNA, 259 bp, Homo sapiens
  chr10:43429215-43429474
  hyper
cgggaaccgggtcttccctcgctaagaaagggaagggtctcagccttactgagaggagcccctgtggaggaagcgggcctgcacctgcggcttccctgcaccccgcacgccgtgcccaggcacttcctccccaacacaagcaaaggtagcccagctgcagccggatcctccctgagcgcagcgcaggggtcacagcccccgacagctgcgcaagtctattcctcccccggccttttcagcggccgtccagagctcagca

SEQ ID NO: 7324 - DNA, 30 bp, Homo sapiens
  chr10:43572780-43572810
  hyper
tgagttctgccggccgccggctcccgcagg

SEQ ID NO: 7325 - DNA, 318 bp, Homo sapiens
  chr10:43697768-43698086
  hyper
ttgaaagggcgacagcgctgaaaggggtgtgaccccgaggggaggcgacgcgctcccgcgccctagtccacaggcatgcacgaccccacccagcacagggcctagggcatggggactggccctcttggctgaaacgactccgaccctctcggaagatgcccgcgcggcctctgcccccggggagaggggactgtgcccgatgctcaggcgccgcgcccccatcctccaatcccccagaacgcaccacaggccaagcccctcctgcgccagccaagactccgcgccagcccacaccagccccactcagaccgctggacc

SEQ ID NO: 7326 - DNA, 179 bp, Homo sapiens
  chr10:43698114-43698293
  hyper
cgcaactctgcagctttcttcgcccacgccgcacagcctccaaaccagcggattccgcccacgttgccagcctaggccccccaccacccgctcccaccacgcccctaacccggacccaacccacagctccagcccagacctcaccccagcctggtgtggcgtcacgccccaactcagac

SEQ ID NO: 7327 - DNA, 181 bp, Homo sapiens
  chr10:43818334-43818515
  hyper
accatggcaacagcgcgtcctgggctggggcggggccagactgccagtgcctttgtggcgcattaggagctaagccagtgattggccatctgggcgcggggcgggctgagtcagttggagggggcggggctgaggctccggtgaacgccgtaggcccgggctgggccgagggagatgatgg

SEQ ID NO: 7328 - DNA, 1102 bp, Homo sapiens
  chr10:43892053-43893155
  hyper
aagtggtggtggggtcccttccgcaaggtgggaggcccgggcgcgcggtaaacgtgttttggcgggaagcagcgccgaggccccgagacaaggtgacggcgacgttcccgcggcctgctcacggcactccagcagcctcggaccgcccggcccggcaggaaggtcggccccagggcctgcgcgggctcgggcgggagcttccgggcggggggcggagcgagcggcgcagcggggagagtgggggcagggacgggagggttcccggagggaagggcgcctcgcgggagggggaggggaggggaggggaggggagggggcccctggcgggcttccggggccctgagggcgagagcgagggcgacggcaaggtggggtgggggctgctccccggcccgccaagctagcgctgcctaggcgggagctcggggacccgcgggccgagcgcggctgaagggagggaagggaagaggcgctcgtaggtctgcgtccgtctccgagcgaccggggcggcggaaagggacctggggggggcggccgggactggagtggcggggccggggcgcccgcgcggcggctcaccacgccagggactggcccgtcggccccgaggaggcgcggggtccggagtccgggaagcggaggcctcgtgatccaagaccggcagccggacgtgggtcacggggtgcagaggaggaagtgccattgccgggcccgccaagatgtcaccaatgggaaacgcgtgcctgcaggtgcggccccgtggcccgcgcgctgggcccaggcaggaagtgggggaaggagagagtcagggcggcgggaagacatttctccgagttctcccgaagggagccaggcgcgagcgcgacctggggaaagtccagagtgccagccacggggaagggcgggcagtgcagagtggaagagaagccagcaagttagacacagcccctctctgggaggccgcctctaaaatggaactagcggacgtaccttggtttgtacatttgaccatggacacacgtaaagattttgaaaaaaaatctttgaaaaaaaatttttttaacgcaattcctaaacttttaactaacgcaattttgtggac

SEQ ID NO: 7329 - DNA, 30 bp, Homo sapiens
  chr10:43915820-43915850
  hyper
gctgacgtcttttgcggacaaagaaaaaga

SEQ ID NO: 7330 - DNA, 31 bp, Homo sapiens
  chr10:43932786-43932817
  hyper
cgctgggggtggggaccgtggggctgggatt

SEQ ID NO: 7331 - DNA, 55 bp, Homo sapiens
  chr10:44069623-44069678
  hyper
cccctgcaataacgcccgtcacaggcgaggaaaaggccggcgtggccaaccacga

SEQ ID NO: 7332 - DNA, 769 bp, Homo sapiens
  chr10:44185274-44186043
  hyper
cgtggtcagtgactcgtttgcacaaggactttttagggaagagagaagccaggccttcgctgtgggcctagcccctcaaaccgcaagctctcccccttggggtcctcgtcgtgaacgcccttctcgtctcccgccgggctcactctttcgcattttgctgcgaaagtttactggaaataggtccattcactggtcgattcagagggacactagaaacgcgatgcccatatctaacacatcctggccttttgaagagggataaaaaataatacccactagagccccgtgcctccggagagtggggcttcgcatttgcgcgtccgaggcccggcagggagagcttctgggtcctgggggcgcgcacatccggcgcgcgctgtgtcggggagcggcgctctgggctgggccggcagagggcgctgcggggcggccgtggaacaagcaggggagagcgtcaggggacccagcacagcctgcctgctgcgccctgctgccggccgcgccctcctccgtgctgcgttctcctgctcgacgctgcgtcctcatccaacactggcaccgcgcgctccttccagggtcggaggcccacagacccctcacgttcgcttctgtcaggagtagcggcagaatttcgataatttatgtctttgatggagactgggaaggtagcctggccgctgcgcaggagagctgcgcggggtccaggaggggagcgcggagtgggagcagtcgactcgggctgcgcagtgcgtgtcggctgtcacgggac

SEQ ID NO: 7333 - DNA, 31 bp, Homo sapiens
  chr10:44420042-44420073
  hyper
gactcagggaaaacctcgggactgtgtccag

SEQ ID NO: 7334 - DNA, 387 bp, Homo sapiens
  chr10:44806415-44806802
  hyper
gccggctggtccagtgcactccggcgcggccccggcacccgtgggcaccgccatgtccttcgctcagctccgccgcggctacctgcggggtctgcgcggctgcggtggccaggtgaggacgtctctgcccttgcgcggcctgcgctgtatgcttcctgcctggcccgcgcttcccctgcctgcatcacccgctgcccgcgcggctcggagcgcgccctctgctggaccggccacggccggcgggcggctgcctccaggctccaccacaggagggggagcacgcgccctgctgaccgcacgcccacgtgatatcgccttctgccatcgcagaaagcagcggttcagcctctctgcctgcacacttgcgtgatggggagctcacaagca

SEQ ID NO: 7335 - DNA, 30 bp, Homo sapiens
  chr10:44848905-44848935
  hyper
gaggaccctgttgtatgacctgcaccatcc

SEQ ID NO: 7336 - DNA, 1004 bp, Homo sapiens
  chr10:44879450-44880454
  hyper
ctgtgacagcgcagcgagtttctcttcagcgaaagaaaagaaaaaagccctctcccagtgaaacgggacaccacggttcccagtggcccagggccttggagattgaactttgctgcagctctcattctggggcaaagcgcttggccagctggtgacaaaagagcctgtctgcaggtgtgtttggggagctggggagggggcgtgtgaggctcggagggtccctgggcctctctcaggtgaacccgagaagagacaggaagacagcggctggacgcgcgcccaggtccgcgtcgctgcggaccgcggagctgtgcagaagcgcggcctggcgggtggcacaagcccgacagctgcgccgcgcagcccgcccgcgcctggccaagagccccgcgagggtgtggggagaggatcggcttcgcagggagcggaggctgcgcggctgcatcggacctcacagcctcaagtcgcggcatgaggcgaactttgcaaagcgcgctctcgccatgcaccgcccgacctccagcactgtgcgcagcaggacctcggagcccattcgcctgtggaaaccgagcccgcagcgggaaggcagtgggtggagggtgggcaggcaggggtctggggtccgcggctccccaccctcgcgccttcccgcgccagtcccgaacgctctcttggggcgttcctgcccagttgtcccggctgacctcgctctgcagccagcttgaggtcaggcggtcgctctctgcaggtcacaaaccctcggcgcaaaagtagggctttgaacgcgacaccgcaccagagcgcccagctaagcgagctgcctccacccccactgtgtcgggcggcgcaaactgcgggcgcaggcagaggagccgcggctctgcgccgggcgggagccgaagcccagagcctcgccagggcctccccgccgagcgcacttaccgtcgctgaggcagagcgcggtcagcacgaggaccagcacgaccacgaccttggcgttcatg

SEQ ID NO: 7337 - DNA, 125 bp, Homo sapiens
  chr10:44880519-44880644
  hyper
cggctgacggagagtgaaagtgcggcggtgggaggcgcgcgccgggcgctttagaggggagagccaggcggggcggggcggggcgcgcggtgaggggcgggcccggagccgagtgctggccgtgg

SEQ ID NO: 7338 - DNA, 161 bp, Homo sapiens
  chr10:44880673-44880834
  hyper
cggcaccccccacccatccccttcgcccctcctccgctccctctgtgctcccgaggcgcagtgcgctccggcctttgaccttctcaggctccgctgggccccgcaccgctggcccggtctgcagtgaggtccgcagcctgagcgacgccggctggagggcc

SEQ ID NO: 7339 - DNA, 30 bp, Homo sapiens
  chr10:44882325-44882355
  hyper
ctgcgggagccgcgcgcagcctcgcttgcc

SEQ ID NO: 7340 - DNA, 51 bp, Homo sapiens
  chr10:49514478-49514529
  hyper
ctcccgctccaggccacgcccctcacccacagccctcggaggctctctccg

SEQ ID NO: 7341 - DNA, 30 bp, Homo sapiens
  chr10:49515359-49515389
  hyper
tttctttgtgctaacgttctgggcgaacgc

SEQ ID NO: 7342 - DNA, 31 bp, Homo sapiens
  chr10:49731808-49731839
  hyper
ggcggaccctcccctccgctctacccactcc

SEQ ID NO: 7343 - DNA, 30 bp, Homo sapiens
  chr10:49813140-49813170
  hyper
ccgcctggcctgggcgcacgcgtggctgtc

SEQ ID NO: 7344 - DNA, 31 bp, Homo sapiens
  chr10:49892636-49892667
  hyper
tgcaccagtggtcacacggctagtgaagagg

SEQ ID NO: 7345 - DNA, 30 bp, Homo sapiens
  chr10:50323229-50323259
  hyper
gccccaggcgaggtcgggacggggaccgcg

SEQ ID NO: 7346 - DNA, 1309 bp, Homo sapiens
  chr10:50605568-50606877
  hyper
gcggctagcaggtcccgaaggcgggtgaggtggcaggcaggggccggcagggcagccgagggcctttcctacgtcatgccaagagggctgggagcccctagagctgatcctcccttagcccaggtcaagagactggctcgcgcgcgctgtctctctccctgtctccctcagagggcccctgctctctggagctcttgacaagagcccgaggctcctcttgccgcctaggtctgccgaaagtcccctcgggttccctcctgccctaggcagcagttccctgcctgtgcgctttgggaacccggtggccgtgaagtgaggtgcggacagcttctgggccgcctcggccaagatgctcaggcgcacctgggggtgtgtgcgggaaccctcagcggcagcagcccagcccggggtgcagtgttggccccagaaaccaatgaggtccaaacgccagtctcagttccccatccctgacatcgaccgaggcaagttcctattaaggcccagagatgaccccgggacgagacaggctcatccggcgcggatgagacaggctcagacctgcgcggtctgaggacggcgcgctcgccgagcaacccggcaggtcagaaccctggacagcggcgccggtttccgcacccccacccacccccggctgctgcggagaaagaagccgtaccgggggcccagccggggcccctcgctgctcaggggtgggatccgcccggccggaccccaggcgtccggggaccgaccccaatcctctcccagtccaaacctgcgaaagttactccggacatgcgctcagcgctggcaacagagacaaaactcccttctccgcagtaccacgcgccgctcctacccggccgctgcagccggaaaccatctcgcggcccccgaggagagtccggccgcctcactgactagataaccagccgagctccctcaacacacccacctcgcgggggctctaagccggcttgggaccctcggcctcgcctcgcccggcgctcctctcccggagccgctaggctgggctccttcccgttggcaaaacagcgagtaaacaaacaaccaaacaaccttagaaacgaaaggctgcaccaaactttgatgacgccagccccctttttttccgaatgtctcgacacccgggagaaggtgactaataggtgttcgctacggtccccctccccctaaaaaagggcgttagtaacgaaaaggttatttttccttaatttttgtgcggtaaaatgtattttccaattaaccaaattcgccgatctgtctcgcttggacactctgataattt

SEQ ID NO: 7347 - DNA, 118 bp, Homo sapiens
  chr10:50814998-50815116
  hyper
gagagaaaaatgcttccgttttctcctacaggattggacaggaagttctctgttgcctgcaagttatgctcagatagaggagtccggaaaggaatttaccaagcgttcaagtgaagag

SEQ ID NO: 7348 - DNA, 30 bp, Homo sapiens
  chr10:50817291-50817321
  hyper
ctccggggagtgggcgcggcacccaagaag

SEQ ID NO: 7349 - DNA, 119 bp, Homo sapiens
  chr10:50817753-50817872
  hyper
agccttcccctcccctcctggcgggagtgtgtgtgcaaggggccagggggcggagtcggagaaagggttgggggtgtccgtgtccagcgctcctccggacgcggctccacaatccagct

SEQ ID NO: 7350 - DNA, 162 bp, Homo sapiens
  chr10:50818152-50818314
  hyper
cgagagcccttcctgggcctccagccctggagcatctggagagcggacccctgcccggccacgccccgcccccggcccccgccccgccgacgtcgcattagcatgagcgacgtaagtggcccgggcaccactcgggggctgggactcgccgcgtcacagccc

SEQ ID NO: 7351 - DNA, 112 bp, Homo sapiens
  chr10:50818519-50818631
  hyper
ccctcggcgcgcccgacttcccggccgcccctgagcccagcagccgcgggtcccgggatcggctaagagtagctgcaacgcctcgccggacggagtcctttcctttcccggg

SEQ ID NO: 7352 - DNA, 69 bp, Homo sapiens
  chr10:50818986-50819055
  hyper
cggcgagggccccacccggactcccgaggtgtgggagcccaccctgccgctgcccactccggccaatgc

SEQ ID NO: 7353 - DNA, 52 bp, Homo sapiens
  chr10:50821016-50821068
  hyper
gagcccggggatgccgcccgggggagcctgaggacccgctccagctaggcac

SEQ ID NO: 7354 - DNA, 30 bp, Homo sapiens
  chr10:50822160-50822190
  hyper
gttcctccgggaagcgctccgggtagattc

SEQ ID NO: 7355 - DNA, 30 bp, Homo sapiens
  chr10:50969982-50970012
  hyper
cagtctgaagtcctcgggctggagaaaccc

SEQ ID NO: 7356 - DNA, 30 bp, Homo sapiens
  chr10:50970560-50970590
  hyper
gaaccccgtgtgctcgtcctaaaactagga

SEQ ID NO: 7357 - DNA, 119 bp, Homo sapiens
  chr10:52177703-52177822
  hyper
aataaagatttccctttacttcgccgtagtagaattggcactgattgcggtattttaatcggttcacaccgtctgttagtgtattctaatgaaccacagcatctccggagcaacactta

SEQ ID NO: 7358 - DNA, 248 bp, Homo sapiens
  chr10:52178170-52178418
  hyper
gggtgtggcccggcagcagagggtttttggaatgcagggtgtggccctctaccacggcaaaaaagaaatgagtcagcccgttcagtcctaaccaataagcatgttcagtgtcggttaaggcggaactttcctttcttgatttataccaagcttagaagcctttcacagccttttctttacgcctttgacaacttcgacacaacttctagaaaagggtaggttgcctttgaaaacgcttgggaaacaag

SEQ ID NO: 7359 - DNA, 30 bp, Homo sapiens
  chr10:52382203-52382233
  hyper
gcacatcagacattcgccacttccacatcc

SEQ ID NO: 7360 - DNA, 1051 bp, Homo sapiens
  chr10:52750728-52751779
  hyper
agcaactcggctgtcggtggggtggcgcgcgcgtattctcacggagtgactaggagagggggacgagggagggggtctcaggggaggaagggcagctctaattggtttctcaatgaaagataatcacctactccccagagaggctggagattagcactctgcctctcctctccatcgcttttagacttctcatcctcccctcggtgcttttagtccattcagcagaagcggatcgaagcaggaggctccccgcgccgcattaggggcgcactccgccgcgctcgagtacttagcgcccattcactcgctcacccgcgctctccgctgccggctgccgtcccagccgccgccgccgccgccgccgccgccgccgcccgagaaaaagtttcgcggaggggctcagtgaaaaaatgagcgagctagaggaagactttgccaagattctcatgctcaaggaggagaggatcaaagagctggagaagcggctgtcagagaaggaggaagaaattcaggagctgaagaggaaactccacaaatgccagtcggtgctcccagtgccctcgacccacatcggcccccggaccacccgggcgcagggcatctcggccgagccgcagacgtacaggtccttccacgacctccgacaggcattccggaagttcaccaagtccgaaaggtaggcgcggaggccgtgggcccgggcgctcgtcccggcccgcggcgcagaggctgggggctctggccgcggcggcgggggcgggtcggcccagggcgccccctgctcgctgcggcgcgcggagtgggggtggccccgcggcccgggaatgggaagtgtttatttttatttctgcccatcacgtgctgtgcttgtctccgccgggctgggaaaggcgagctgcacggggagacgcgcccctgtggcgtgggggtggggaggaggaccgcggaaagtttactcgcgcgggctaacttgtgccctccacacatggctgcagtcgcgcggctgtccttcgtgcgccccgctgggagcgtccacgcagggacccaaccc

SEQ ID NO: 7361 - DNA, 30 bp, Homo sapiens
  chr10:52833595-52833625
  hyper
ccacctgtgtgaggcgctctgggtgggaaa

SEQ ID NO: 7362 - DNA, 310 bp, Homo sapiens
  chr10:52833894-52834204
  hyper
cccccggcgcgcctcggaggcttatcaggctccccgcacgccccgcaagcttccttgggcgcccggcgcgagggactctgagagcccagccgctgcctcggagcccccattcacgtcccctcctcccgctcccccgccaccgcgcctccgactcttctcccccgcgccgcggcgcccaccgcgtctcaggtttaatcccgggttggacctgctggtttgctctccccgctctgagcctcacagccagcccagagaagtggaatctgcactgaaactctgggtggctggagccggcggactgggcatgctc

SEQ ID NO: 7363 - DNA, 30 bp, Homo sapiens
  chr10:52834483-52834513
  hyper
agctggacaagtaccgctcggtgatccgac

SEQ ID NO: 7364 - DNA, 30 bp, Homo sapiens
  chr10:52834835-52834865
  hyper
actcactgcacatacgttgccttcgtgtct

SEQ ID NO: 7365 - DNA, 30 bp, Homo sapiens
  chr10:53459322-53459352
  hyper
cagacagccgatagcggattcttcgaggcg

SEQ ID NO: 7366 - DNA, 252 bp, Homo sapiens
  chr10:54068357-54068609
  hyper
acccgccccgcagccggatgaatgtgctgagcacaaagtctgctcaaagccgagcaaacggactatttgtgaaaatgccatcctggctcaagtctgattaagaccgggggtccccaggccgtttgatcttcgctcatcaaagagagtctttaaacaagcttcattttacactactgtatgctagcgacgggttgtgacacccaagtgcagccaccgtgagcacccggcactgggagcgcgtgaacaataatg

SEQ ID NO: 7367 - DNA, 31 bp, Homo sapiens
  chr10:54072981-54073012
  hyper
cctagaaagggtattgcgtggtcccgtgcaa

SEQ ID NO: 7368 - DNA, 141 bp, Homo sapiens
  chr10:54073118-54073259
  hyper
ccaccactgagaagggagaaccggggaaaggcgactgacctggcacgttggaccctgtccgctttggtcccggccactttgatctcacgcgtctgcctaatcaagttcatctaccgccgcgattgccctgattcaaagaac

SEQ ID NO: 7369 - DNA, 979 bp, Homo sapiens
  chr10:57390388-57391367
  hyper
cagcgcacccgcagacggcgcgcggcaagaaccaccttctagccctgagcctgcggtgccgggcgggctcaggaggctagtggggtattgtgatcactgggacatcaggatgaaggggtcactccaatcccttggagatcagattctcggggactccatggccagacccgaacggcgcccttcacatggtgggtggagagggtactccttggccgaattgacccctccctgtcccgcagggtcagccccgcgcccacccacacatccagtctccgggaacaaaactctgtctggatctacactgacccgttgacgcgctttcccaaaggaggaacgacaccaacaaaagcagaatcgctcgtgggagattttctaccaagaactgttacctccctccccgtgtaatcggtttccactcaaaaggatgcggaaaggacctcatcctctgctgtccctttcgattggcccgggactgggcgaagccgggagctgcagggaggggagccccggcaccccagcctctgcccaacctcccccagcacggcggccctcggccctcgtcaccaattcctaggcagaaaagcgcgcggccggagcgcgcaagtcttggcgtccggaaacaagtgttttccgctcagtcatggcggcttcgccagtcgaacagagcgaaagggctctgggcgaccctgcgacttccaccagaccgcgagcccggagcaccggcggagggtggccaaacgcgggcctagggctcccccagcgcttccgggcgcgccgggaactgcagctggtgcgccactgccttccccgcgcggtgcccaagagcgccagtagaaggaggaggtcggcacacctgctgttcctgcttccttcccaggaggccgattctctccatcccaactcgctccgtggctcctgcttgctcctgttccccctcccgactccccgggtaacagtcgaccttagggtcacagcaggg

SEQ ID NO: 7370 - DNA, 95 bp, Homo sapiens
  chr10:60028838-60028933
  hyper
ccaggacagctccacgcatgctcagcacctaccagggtcgagctcacacacgtgcctacgacccgccgcggcgcctgcgcggtagcatcgcggag

SEQ ID NO: 7371 - DNA, 30 bp, Homo sapiens
  chr10:60262026-60262056
  hyper
cagaacttattgtcaaccactgcacttacc

SEQ ID NO: 7372 - DNA, 83 bp, Homo sapiens
  chr10:60272064-60272147
  hyper
catggcgatgcctgcgaaagacgggcatgatttcttctccaagccttctttttcctcttcctcacgttcgagcttgtggaacc

SEQ ID NO: 7373 - DNA, 362 bp, Homo sapiens
  chr10:60272471-60272833
  hyper
gtgtgtgtgtgcgcgcgcgagtgtgtgagcgccaggggccgcccgcccgccgcggctccccgtgggctggccgggccaatgagcgcgcggctgtaggggcggcgggcggggagggggcgccgagccctgcggatggaggcgcgggcagcgcggcgcgctcattccgcgcgggcgttgctggcggggggcggcgcagccactggacccggaccggggccgcgacccggggtggcgggtggcgtgggcggcgcccggggctgggatgcgccgggggctcagtggcggcggcggcgttggcggtggcgtcggcggctgcagggggacgagctagcgccgcggcgctgggagccagttgagcccgg

SEQ ID NO: 7374 - DNA, 383 bp, Homo sapiens
  chr10:60272895-60273278
  hyper
cgcccaccatggccgcccagggagagcccggctacctggcggcgcagtcggaccccggctccaacagcgagcgcagcaccgactccccagtgcccggctccgaggacgacttggtcgccggggcgaccctgcacagcccggagtggagcgaggagcgcttccgcgtggacaggaagaaacttgaggccatgttacaaggtaggcatccctcgtgttctcggactctccgactgagcctctaactccttttcggacatccccaccgcgcgctccggcgcccgctactccagcctacggccggccggtttagctccaggcccgctcccccgcggagccggaggacacccagggactggagacttcgcgggactccccacccttcc

SEQ ID NO: 7375 - DNA, 277 bp, Homo sapiens
  chr10:60273346-60273623
  hyper
cgagtttgtactggcgcgcccaagttgcgttctggactttggagatgccaactttagcccggacacctgggctgtgccatccggaccactcgggccgcacagagtatgcgtgaccctccccattccctggcagcctcgagttctgtctctctccgtctgtttcactctctccccttgtcagtatccacttcctccagctgaggggccttgtctcactattgggaaacgctctgcagatgtcaaggcttaagacaggagctcccgcccccacccctgt

SEQ ID NO: 7376 - DNA, 75 bp, Homo sapiens
  chr10:60936010-60936085
  hyper
acaacaaacatgctcgccctcgcctccccgtgcagacgcctcagggccaactcgggcttcgccaggcaccgagag

SEQ ID NO: 7377 - DNA, 30 bp, Homo sapiens
  chr10:60936611-60936641
  hyper
aaatggaggtgccgcgcctggatcatgccc

SEQ ID NO: 7378 - DNA, 22 bp, Homo sapiens
  chr10:60937041-60937063
  hyper
gcagtccggatttcctgggtct

SEQ ID NO: 7379 - DNA, 203 bp, Homo sapiens
  chr10:61122292-61122495
  hyper
gcaaggcaagtctccgggctcgcccggcacgctcgctctaccttgggctgctgtctgcacatgctcgtaacgacacccccagcaggggcccagcggcacgggcgaaccacaaagcccggcagcccgcgaggctgcggggacagagctgggcggggcgcggcggcggggctgggaccccgggatccagcgaggagcacctggag

SEQ ID NO: 7380 - DNA, 30 bp, Homo sapiens
  chr10:61164087-61164117
  hyper
cttaagggtgggaccagatacctgagtggc

SEQ ID NO: 7381 - DNA, 30 bp, Homo sapiens
  chr10:62538220-62538250
  hyper
agtttgaaactgctcgcacttggcttcaaa

SEQ ID NO: 7382 - DNA, 30 bp, Homo sapiens
  chr10:62703726-62703756
  hyper
accctgaagccgagcgagacgcgagctctc

SEQ ID NO: 7383 - DNA, 940 bp, Homo sapiens
  chr10:63211994-63212934
  hyper
tggtcccttcaccagcgttacaacccgttccttgcaagataggcaggccgttagccaagccccaaagccagcaaacccagacacctgaagctggcgctgtgctagagaacgcgcgacgcgcgcggctggagggaagggaagcggatgaaaccacagacgtgcagcgagggtcttctcgtcttaggagggtggccagtgtgctcagctcttgcgaaggtcgctgatgcccagcgaaggacattcccacatgtgcacgcacgcagagtaacccgcgcacactcacacaccccagtttcagaaggcacactacatggcaacctccttgtcccaagactcccctatttgcgggcacattcagcaaaatagaccagcgcttcctctctttactcatcttccaagtttccaaacctgagactgggtgactcttgcctaggctcacagatcgagccttcccagtgttgcactgggaccctagggtggccctggggtgcccaagagatgcgcaagcatctcgcgccttccaagcgatcagcgaggaaaaacggggtccaaattcgagtagaatctgcgggttgcgggaagatggcctgcgagtgcggtgggggacaataccctagggccccgtgcgccctcgctttcccggggcactctcaccatttgtagcctctgccgcgcttgaacttgagggtgagcgcagtctccaggaagagcaagaggttgagcagcgcaagcagccagtaccgcggctccttcttcacctcggtcactcgccagaccccgaccagcgagtgcagcaggaacagcaaccgagtggccagggcgttaaggaagaccagtccctccatgctggccggagcactctgcctacgtccccttgcctgcgcccccaggaccctgccgggcgtgcccggagcccaccggtgagcaggaatatgacaag

SEQ ID NO: 7384 - DNA, 30 bp, Homo sapiens
  chr10:64133868-64133898
  hyper
gtgtaatcctgagtcggatcgggctcccgg

SEQ ID NO: 7385 - DNA, 27 bp, Homo sapiens
  chr10:64565472-64565499
  hyper
ggactgccactattaccgggtgctgga

SEQ ID NO: 7386 - DNA, 376 bp, Homo sapiens
  chr10:64574691-64575067
  hyper
agaagggggtgggtgatttcccggctgctccccatccccggcgccttgtgcctttttctccctccctctcccgctgcgcttcagccgagggctgctggagcgaatgggggatgtagaggaaggagtccgtaggtttccgtgccctcccaatcttctccgcctttcccgacagccgcgcgtccccgcctcagcccaaggccagtggcccggcctcgaggaaggcgcgggggccgcgagagacgactttccacagcatcgccaaggaaaccggcgtcgccggtgcccccgcgggcctccctcggcagtccgggggctgcttcccgccgttgcgcgccctcctccaccacccactcgctgcctccgccggccggagccc

SEQ ID NO: 7387 - DNA, 596 bp, Homo sapiens
  chr10:64575127-64575723
  hyper
cgcaagaagggagcgctccgagattttcccggggtcggctctgcccaggagggagctaccgacgctttcccctggcgcttctccgccgctcggctctccaggcgcgcagctctccccgagagccccgaactttaccgtcactttgcccctgccccgggagaggggaggtcgaagtgctgccggccagagggcctacgcaagcctcgaaacccggggggacgcctcttccacccccatccctgcgctcgcccggggctgggcgcgccggggcgcacgcacgccggtttgctggcgacctggcgcatctgcccgcgcgccctggtctcagctgtcgcaggttcctcctgcacccacttccagtcttcaaagccagtgcagtcagcaccgtccacctggagccccaatcctctcctgcgattcccgcacacccactgcaccccatccaccacctccgggccgcgcaggtccgggcctgcgaagacacgcggcttacctccggccactccgttcatctggtcaaaggggcctcccagttcggcattgggaaagatggtcaccgacgtggcggcgaggtcctccaccgggtagatgttgtc

SEQ ID NO: 7388 - DNA, 358 bp, Homo sapiens
  chr10:64578270-64578628
  hyper
aaaagcaagaaaagatagctgcgttcttaccacgtgcgccagcccactccgcctgcgctctggcgggtcccgcggcccccgcgctgaccatgggcaagacgacgcctcggaagggagtccgactcgcatctcgggccctgagtccgaaagaacgggggaaagccgaattatgcaaatgcggatccctgcgatggggctcgggttacggcccccgccggccccttaggtgaggcacccaccggcagcaagcgcgggcgaggcgactgctcgcgcttcgctcctctctgcgcacgtgggcggaccggcaggcgggcgagttgcccgggccgccccgcgactggcgctgctgccaaacccg

SEQ ID NO: 7389 - DNA, 30 bp, Homo sapiens
  chr10:69523829-69523859
  hyper
aagtgttctgaaggcgacgcccccagtctt

SEQ ID NO: 7390 - DNA, 30 bp, Homo sapiens
  chr10:69834338-69834368
  hyper
cgtctttccctgaacgtgcacccagatcag

SEQ ID NO: 7391 - DNA, 30 bp, Homo sapiens
  chr10:69834886-69834916
  hyper
ctgggaaactttaccgggttccttagagaa

SEQ ID NO: 7392 - DNA, 19 bp, Homo sapiens
  chr10:70091403-70091422
  hyper
tggggccctttccgcgccg

SEQ ID NO: 7393 - DNA, 30 bp, Homo sapiens
  chr10:70092980-70093010
  hyper
tgtttcaagtaggtcgtctgggcccagtga

SEQ ID NO: 7394 - DNA, 30 bp, Homo sapiens
  chr10:70660993-70661023
  hyper
ttatttttccccgccgtgcggtgcgtgtcc

SEQ ID NO: 7395 - DNA, 130 bp, Homo sapiens
  chr10:70749040-70749170
  hyper
ccctgttggcaaatggcgagggatggggaggagcccctgccaaggccaagggcagacgttgtaaggcgcaattcgtccccacgtttttgtagctctggactgagtcccaaagagcgtctgtggtcttcaa

SEQ ID NO: 7396 - DNA, 30 bp, Homo sapiens
  chr10:70883543-70883573
  hyper
gtagggctcccactcgcctcggcaacccaa

SEQ ID NO: 7397 - DNA, 30 bp, Homo sapiens
  chr10:70884405-70884435
  hyper
ccatccaggtggggcgacccgggagccccc

SEQ ID NO: 7398 - DNA, 1174 bp, Homo sapiens
  chr10:71078139-71079313
  hyper
gcgagccctcatttccgaggaatgggaccgccttcgtgcccccggggctgccagtccctagactagccctaggggcttctcgtcccggcggagccgggcggtgcctcctgcctgcgcctcgcacctccccgcctggcacggcccacccgggcacggcgccgccacgcgtgaaggcccgcatcggctccctacgtgggggacgtgcaggatgatgcggggtcgggggggatttcgctgcgtcgcccgccccctttccggcgcaggagggagcggccgccgcgtccccgctccccggccgggacgccaccgccgggcgttgcagaggcgcgccgcaaccaatgggcgtggaggaggtgggtcggctggcggctgtcaccctccaggggacgggagcgcggagaccgggagcgcgcgagctgtcgccgcgccccgggccgagggggaggagccgggggaggaggaggaggaggagccgccgagcagccgccggaggaccacggctcgccagggctgcggaggaccgaccgtccccacgcctgccgccccgcgaccccgaccgccagcatgatcgccgcgcagctcctggcctattacttcacggagctgaaggatgaccaggtcaaaaaggtgagcccccgcccgcgccgccgctggtcctggccgcagccttgcgttccggcatccgctcgccgcctccgctgcctccatcctccggcgcccggccttctccgggccagcatcgagttggactgcagggcgcaaggaaagccttcgccttcgattctaccggcattgtcagtgtctctgtgtgtgtgcgtttttgggaggggggcaatcgggcggaagacccccgagaccgggctgcctgctgcagtgtccttgaaacgggccctggatgtcagataggcccccgggctgtgcggggaggtggccggtgggcccttccgcagggcctgttcgggagggtccgagcgccgtgggaggaggtgtgatcatggagatgctggggaggtgatcgagcagcaggcgggggtgctggctggaggccaggcctcccatatttggggttcctggcggagggtgtcgggtgccccggagaagctgtcgccgggctctcccagttgtttgagctgctcgttaatctgaggacgaggtgacccgcccggcttcccgg

SEQ ID NO: 7399 - DNA, 30 bp, Homo sapiens
  chr10:71122697-71122727
  hyper
ttgaccaggcgttctattactctggcaaca

SEQ ID NO: 7400 - DNA, 30 bp, Homo sapiens
  chr10:71211453-71211483
  hyper
accccagtagggcccggggatgggggtggg

SEQ ID NO: 7401 - DNA, 187 bp, Homo sapiens
  chr10:71267677-71267864
  hyper
tggggtgggggaccagggaagcggagttgcccacaggtccacctaccgcgctccctgcagccctcagtgtgcctaatggctgccgcgcaacgcatgcagagcgtggtgtcggtcgacccctgctggagatgccgggacttgcgtgcgtcagtccactcaaaccttcgggccagaagacatgggatct

SEQ ID NO: 7402 - DNA, 604 bp, Homo sapiens
  chr10:71332279-71332883
  hyper
agtagagggacccccagtccccgggggaaccgcctgggctgcccagctccccgcagtgcggcgccggcggctccagcgcgtacaagctgtggtccgctatgcgcagcgtttgagtcagcgcccagatgtagttgtgggcgaagcgcagcgtctcgatcttggtgagcttcgcgtcgtctgggaaggtgggcaggacaccgcgcagggcgtccagtgccgagttgaggttgtgcattcgattgcgctcgcggtcgttggccttctttcgccgactccgtcgctgcttgctcagtgccaactcgctcttaggccggctgcgtcccccgcgccgtgcccggagcttcctcggggcccctcggcagcctccctcttccgcctctgcgcagttcccccgtgtgcgagtggggctgggcggggcggacgtggggcaggtcacttcgtcttccgaggctctggggaaggaccgctccgtctcacgggtcacttggacagtgggcgcacccgagggttgaggcgtcatcctacggcggggtcagagggaagggtaagtttgagtccgtcactgggcgcagtccgcgattccgaggctaggtgggaaaaaaca

SEQ ID NO: 7403 - DNA, 30 bp, Homo sapiens
  chr10:71336954-71336984
  hyper
tccgtgcagccagccgtcacctgctcctaa

SEQ ID NO: 7404 - DNA, 401 bp, Homo sapiens
  chr10:71389861-71390262
  hyper
acgccccatctccccgacccccagcaccccgcgccgcccccaaccctgggccgggcaggtgcaattcctcaggcggcctacagagggcgatgtgcgccgccactgggccgcgcccctccggcgcgcgcttcctgtgaggtcaggtgggaggaaaccgcctggagccgccgggagtggacgccgccgaggcccggagtcgcgcctgcaggtgagtcgccgcgccggggagggagcgcatccctcgctgcagcccgggccgggacttggagccggtgtcgggctccagaggctggggctggcggccggggcagcgtccctcccgcccccggcccggaatgtcaggtgcgccgcgggccgggcgcgcgggtggcccaccgggcgggggcgcgatgacaaagcac

SEQ ID NO: 7405 - DNA, 30 bp, Homo sapiens
  chr10:71561444-71561474
  hyper
cacttcaaagaggacggggagcgcggcaga

SEQ ID NO: 7406 - DNA, 30 bp, Homo sapiens
  chr10:71561808-71561838
  hyper
cgggagacacgaggcgcccagaaggactga

SEQ ID NO: 7407 - DNA, 30 bp, Homo sapiens
  chr10:71562496-71562526
  hyper
tttatccctccccgcggcgccccctcgcgc

SEQ ID NO: 7408 - DNA, 1344 bp, Homo sapiens
  chr10:71812305-71813649
  hyper
caggagactggatcgcgaccatagcgcgtttgtgcccagttctggggaaagcctcatgttagcgagtggccctcggctcgtctcgcagatcggccaagtacgcggaggccgcgcggtttcaccattaatactcctgaaggacaatagctcatcaagccccaccgaaagccccggacccgtcgcggagcctgggctggcgggggatgaggctgagcaactcctcctagaggtggttatgtggagaaggagcaatcccttctccctcctcctcctccccccgctactatccgcggcccagagaactgccgcttgccgccattgacacgcacagatagaacccaaagaaaggcaaagagtcctgcccggcaccggcgccgcgtgggccaaacctgcgcccgtggaggggcgcgcagagggcaccgggcgccgggagcaggcggcgcagcaccaggtgagcccgccatggcgatggcattattgtttagggtgctccggggtctggaaacaaaacgcgccgccggggcagtgcaggggccggagagaaccacctctgcctctcccccgagcccctgcgggcgcaccctcgatagccgacccaccctctgcaaaaacaaattcttaaatccagctgcccaacttgcttccttgggcgataaagggggggctgctaaagaagtggtcaaattcctgcggccagcgaggggccgggggcgtcgagggtactgagaggggaaggaggagggatgcgaggttcagcagcgggccccaggcgaggctggacccggaggaagcggaggtctcctgggaatgcggagtttcgggcgcaggagcgggaggacggaggcgcccggccgccgatgggcacggggcgatgggtggggggctgcgcagggcccgagggagcccggggagggccgctcgggggcctctgaaggtgcccgggcagggcgccggcggctccaggctgacaatggagggggcgcggagcagccgggcggaggttagggacccgagtccgggggcgggccgcgccggggaaggtcaggtcggggacgccgggtggcggggcgagggctgggggttgctgcgcggacacccgggcgccgcgggcgggcgtgcgccccggggccggcgcggaagagggcgcgaggccgggcactccccttcggttccctttccggggcgcccggtgccgacgcgcgctgcgctttcaccgggaaatggcggcccggccgtggctcgcctgggcagtctggctcccgctttgcgcgggaaaaaataataataataaaaatatcgaaaaagggaataaaagtaaactggctgcggcgcaggaaagggctc

SEQ ID NO: 7409 - DNA, 30 bp, Homo sapiens
  chr10:71993589-71993619
  hyper
gcatttttctgatccgtcgtaacaaagttg

SEQ ID NO: 7410 - DNA, 30 bp, Homo sapiens
  chr10:72237986-72238016
  hyper
taggggctccccttcgacacgtgggaggca

SEQ ID NO: 7411 - DNA, 30 bp, Homo sapiens
  chr10:72238427-72238457
  hyper
aaatctgagccccccgcccctcgcggtggg

SEQ ID NO: 7412 - DNA, 49 bp, Homo sapiens
  chr10:72973131-72973180
  hyper
gacgcccggctctccgcgcgcctggcatccgccccgaaaaagaacattg

SEQ ID NO: 7413 - DNA, 38 bp, Homo sapiens
  chr10:73113222-73113260
  hyper
catttacattggcaagcggtcctcgggttaatctgtcc

SEQ ID NO: 7414 - DNA, 80 bp, Homo sapiens
  chr10:73156362-73156442
  hyper
ccctttgggggattcgtagagttgccacagcagccggtgccatgacatcggcagagggcagcttcgccagcactgaaata

SEQ ID NO: 7415 - DNA, 31 bp, Homo sapiens
  chr10:73437159-73437190
  hyper
agcctgttttaaaccacggtgttccttctct

SEQ ID NO: 7416 - DNA, 30 bp, Homo sapiens
  chr10:73648623-73648653
  hyper
cagcccggcgaacccgtggggctcagcagt

SEQ ID NO: 7417 - DNA, 30 bp, Homo sapiens
  chr10:73723738-73723768
  hyper
cgggcgctccggcacggagaagccaagggg

SEQ ID NO: 7418 - DNA, 79 bp, Homo sapiens
  chr10:73724682-73724761
  hyper
taccccgcacacggcgcaggctgatctgcgcacacccacaccggccaggcacatgccacacaccgaaatgcacattcct

SEQ ID NO: 7419 - DNA, 364 bp, Homo sapiens
  chr10:73847427-73847791
  hyper
gatgccaccctcactgccggccccacccagacctgccggtgctgcagtgccccgtatgtgcagcctgcagcatcccagcggctggggcaggcccgggggcggctcgcacaacgcagctggggaccgggtcggggtccagcggcagccggggtccgggtccccccggccccgcaccccttcccactcccggcccgcaggggagaccccggagcgcgcgaccccggagcgtcgggcaggtgtggagctgggggtcccggggctggggggtcccagggccgccggcccgggccgcagggacaggggaggggcgctgggctgtgacccccagtactgtttactttccgtgtaattagccggccaggct

SEQ ID NO: 7420 - DNA, 59 bp, Homo sapiens
  chr10:74020678-74020737
  hyper
ggagcctccttcctcccgagggtgggcggggccagggccagccccgccctcctccccgt

SEQ ID NO: 7421 - DNA, 205 bp, Homo sapiens
  chr10:74032649-74032854
  hyper
agatttcctgtggccccgcctgaatgatgaaacacgggatggccattgcactccctggcttttccagagatctcggtcctcggtcctgatgcaaccgtctggatcttttacacaaagcgctaggcgagcgctgggtgctaggacccggggggcgcccgggcagggaggtccggctgcgctgcctgcagtccgcggggagggcgga

SEQ ID NO: 7422 - DNA, 260 bp, Homo sapiens
  chr10:74057401-74057661
  hyper
aaagtagatgttcgccgctcccctccctccttcccgctcccccgggcaggaaggctcgcgtgcgcgaggccacagcgcaagcgggtgcagagcaggattcgaacagggttccatgcaactccgtgcccagggtcctaccaccgcctgagctcagcggtcttcagccagcggggcccttccacccccttccttaatagttttcctcctccgcctcctgcacggcctccgcctccgcctgaccgtcctcggaaacctcccag

SEQ ID NO: 7423 - DNA, 296 bp, Homo sapiens
  chr10:74057707-74058003
  hyper
cgccccccagctccgcacctccccagccccgcccgaggcgcgcccagcgagcgtgaccccgacccagggccacggctgcgcccgtaggatcgcgggcgcgcgggtctccatgagggactgggagagatgcgtcacccgctaatccctcaactgggtcgcacccggtctgccttggttggtcccttctgatggcggaggcgggacctcgacttggtggccaatgaggagcctcgtgggggtgctctcggctgccatggcaacggaggggccgcccgcttccccgcggggcgaggccg

SEQ ID NO: 7424 - DNA, 85 bp, Homo sapiens
  chr10:74079288-74079373
  hyper
ccgctcagaccagacggggcaaagggcagccatcaaaggtgtctgggacgagcccggcggggtaatgggccgctagggactcagt

SEQ ID NO: 7425 - DNA, 102 bp, Homo sapiens
  chr10:74079590-74079692
  hyper
cctccagcattggccccgcccccagttccgcagtcgtggctgggtttcggggagggcgcccggtgcggggggcgcccagggcctgcgcacacgggtaggccc

SEQ ID NO: 7426 - DNA, 193 bp, Homo sapiens
  chr10:74079752-74079945
  hyper
cgttcggttccgctcctgtcgcaccaccccctcactgctctgacagataccaggagctggtgccaacccgcagacacacctgggcagccccacgtgggtatcgcacgcgcaggggcacatctgccctgccgggtttggagagcagttgcaagtcagcccctggaatgtggtcccgtgccggctggagcaagaa

SEQ ID NO: 7427 - DNA, 99 bp, Homo sapiens
  chr10:74114946-74115045
  hyper
gtcacgtggtagccgtcgggatgagactggggccttcggagtgcctgttattcccagacggtttactaagtggtgatctatatacgtaatgtaactaca

SEQ ID NO: 7428 - DNA, 30 bp, Homo sapiens
  chr10:74451843-74451873
  hyper
gcgggtcttagctccgccctggccgtccgc

SEQ ID NO: 7429 - DNA, 180 bp, Homo sapiens
  chr10:75385747-75385927
  hyper
aaggcaaccagctctcgcgacactttccttggccatggcgagagcacacgagaagagactctcgcaagaaagtaaatgagtcaggctggaaacagcgaagtatatctcgcgatagcactgtttaaaatggcggcttcaaggcgtttcacgggtgtcccggacaggcgtggaggtggggcg

SEQ ID NO: 7430 - DNA, 13 bp, Homo sapiens
  chr10:75407399-75407412
  hyper
agattctgcaccc

SEQ ID NO: 7431 - DNA, 40 bp, Homo sapiens
  chr10:75639672-75639712
  hyper
tgacaaaactcaccagcgtagctaacgtctagagaaagct

SEQ ID NO: 7432 - DNA, 91 bp, Homo sapiens
  chr10:75670638-75670729
  hyper
ctggggcaggcccccggccaggtgcatgggaggaagcacggagaatttacaagcctctcgattcctcagtccagacgctgttgggtcccct

SEQ ID NO: 7433 - DNA, 30 bp, Homo sapiens
  chr10:75671363-75671393
  hyper
ctccaaagtgagtgcgctcttgctttgact

SEQ ID NO: 7434 - DNA, 30 bp, Homo sapiens
  chr10:76585836-76585866
  hyper
gcggccgccgccagcgatcagctctcacac

SEQ ID NO: 7435 - DNA, 30 bp, Homo sapiens
  chr10:76970498-76970528
  hyper
tgcagggacaggcgcggcggacagccccgg

SEQ ID NO: 7436 - DNA, 138 bp, Homo sapiens
  chr10:77159537-77159675
  hyper
ctcccgggcccccatccggatgctggttcacatccacattaatcccgccgccgcagctaatccggccgtgtgccagccccgtgggtcccccttcggccgaggcgcccccggtgcccttgccaccgccgcccacgtcgg

SEQ ID NO: 7437 - DNA, 244 bp, Homo sapiens
  chr10:77159882-77160126
  hyper
ccggctccttcttatccgagccgggtttggagtacggcttgaaactcgacttgtcctccacgccgatgtcgctcagcttcagggggcccgatttggtgtccttgtcgcccgcagcaccgccgccggcaccgcccgcgccgcccccgttggaggcaaccgaggagagtttggaggagggcgaggggtcgggcttcccgatctgcgaacatgtttgcgccaacagcgccagcgggctcttcttggc

SEQ ID NO: 7438 - DNA, 30 bp, Homo sapiens
  chr10:77160892-77160922
  hyper
gggctgcaggtactcggggtgcaaaatgtg

SEQ ID NO: 7439 - DNA, 2099 bp, Homo sapiens
  chr10:77161557-77163656
  hyper
gggggagattaaagcctttgccgccttccaatcaaatgggagcccgaggtgattggagggtcaaggggatgtgacgcgtcccgcgccgccgccgccgccgctgccaggactctcagtgccggttttaatgggcagctccctcttcgccgcccccctgtgtgtcccctccctcgatttcgctgggaggacgagatggacatttattctacgtttgccatccgccgcctccctcttttttcctcctcgtcgttcttcctttccccagctcgaaaataaactgaaaccttcttttgaaggggggtgcgcgtgaggaacagactgcggggggtgtccagaaggagcaccggtgggagtgtggacaccggccggactgtcaactccaggggcgaagggaacctgcacacccagtgttttttccttcgcagtaatcgagatcccgcgcggcgcagcgcagccaccagggtaagaaggcaaggtggggagccggagctggaagaagcccgcccgcccgctctaatttcctcagattccgcggcggagaaaccagaagctagatgggcagtcgcagcggcggcggctcaacaccgcgaggagcgctgggctctccgcccttcccggccacgtgacgcccggggacgcgtagattggggcagcagcgggggtcacatgtttcctctgtttcaccctcagtctgtcccccaaccccccattcttactctcccaccctgttttcctccctcccccccttctttgggcatctccacccctccatcaattgtcaatgttcctcgaccgcaatcaatcagttatttgtcagctcttgtcaatcctcccgtgatttatgtcagcttttgttgctgattacaaggcgggtgcgacttgaagggaaaaagagagagggagagagagacggagaggaaggaggagattgagagggaactggaggaggggaaaagaggagcggcctcctgggatgggggtggggtgggggctctaagaaaaagaatgaaagaggcgcacggtgtcaggaaaatgaatagcgagagtaaagtgcgcaggtgcgcccagggcgccgagaggggcgcgcaggcctggagtgtgcgcctgccctctcggtgtcggagagacgcccttccacctctgggagcctcggtctgttggggtcgcggagttcgggcgcggctccgggtacccgagaccagcggcggcaacttctaacacgggagatttcccgccaccccaccccgccgccgcgagtcctcgcggggcgtgttgcgtgcggaggtcaggctgccaccctctgtagttccctaaccccaaactcggagacttctaagagccacaccaccaaggaacttctagtcctggaggtcaatggtggggcaaacctcgcctcaattctttgaccccctcgggtcgtaagcagggctaagaggctgcgaagaagaggcctggccatgggtgtatgggggaagaaacatctcaggctcactcatgccccctccccgaccttctcccacctgccgccatccccgcaggctggggagccagggtaactcggggctgctctctcgaatttattggaacgccgagtcggaatgagctgcgctaggagagccgagggaaggagcgagagagggagggggcggctgcctgtgggaacgcgggttcttccagggaagcggagcgggactgccgcgttcccctcgatttgcaccgtcactcgggttgtttgggaagaaaaggggaggcgctgtgcgtgccaccgggtacctggacctggatgcccagtgtgtatgcatgcctgtggcgctgcgtgagttatcggggctctgatagcgtccggagcgggttcgagggtctcctccaggaactcgcagaaattagagggggtggggaggaggacacacccccttcctcggaacgacttagaagactttgaatctcccctcctccgcttttccgccccggctcttcttttgttgtcaagtccttttgataaatggtggggctgggagctctgggagtcgggagccagtctgtgcccgcgtggggggcgggggccgagcctggagacccggtttcgaccggcgcgcacc

SEQ ID NO: 7440 - DNA, 248 bp, Homo sapiens
  chr10:77169124-77169372
  hyper
ggcgcccacacctgcgccctcacttgccgagacttttacctgtgcagtccccggcggcgcctgcagccgcgcaggtaaccgagaaatggaagggagggctggggagtgagaaggacagagagcaccgcccgacacaaccagacgcgcggacccggggcctcctctctggaccggtgctggggccctggtagaaccagctccgggagccgaaattgagccatgaagagtgggccgagggaggggcgagg

SEQ ID NO: 7441 - DNA, 618 bp, Homo sapiens
  chr10:77191083-77191701
  hyper
cggctcagaaagggcgcccctgataggaatacccccacctcaggcgtggcccagacaaacgcgataaagctgtgggcatggagttttgggcattgggacatccgggggagggaggggcgcgggcagtcggggtcaggccgccgtcggggcgcggggcgctgcgggccacctgttgcagcgggcggccagggctcacctgcgcggagaccgggccgaggggcggcggcggcgagcggcggagctgaggtccccgaggctagcccgcgcctccggcttccgccgggtcagctgactgcccagtgcggaactgtgcgcccgccgcgctcccctgccgcgctccccgctgctgccgccgcgcccccgcgctccgtcccgcgcgcccgcagcgtcctggccgccatggccgggctcgtggtgcgtggaactcaagtaagtcccggccagccccgcctccgcccggggcgcagtccgcgtggggagggacagcggggcacagaggctccccagggcctagacacccctgtccccgcctcagggggctgcgtctgcagggggtgagcttcaggtgctcaggctcgccctagtggggctaggacagacctcgtttcgggcctggca

SEQ ID NO: 7442 - DNA, 1904 bp, Homo sapiens
  chr10:79396526-79398430
  hyper
tttcccttctttctgaccccacgaactcatctccccaacaggttcctaaagtatgggcggatgtgctccctctcgcccaccgccaggagccgagccccggcaggtgagcggtgcaaaacacgcacccagctgcccccagcttcctccgtccccgctgagttggctgtccccaccccgcaccacggcacccgagcctgtgagtccccgaccccggccccagccgcagccgccaacaaccctacaataaacaagaggacaggattgagcgtccgcgtcccggagcgcactggctgggggcaactcctcacccccggcgcgccgcccgctgccccgatccgagagcaccgggagagccgagggaagggaaggcggcgaggggaaggcaggcggggatggagggaggcacggcgcggcgcggagcgaggaggtgggctgcaggggacgccgagaagcggtggggctggcgcagagggcgggcgcccggggcgcgcgttaccttcgtcttgcccccgcagtggcagcacacggtccacaggtacttgagcgtccgccagagcaagatgatgaagaggcccccgaagaaagtcaccatggaggaggccaggaaagcccaccacatgcgttggccccggctgtcgcacggcacctccatggtcaccgggatgatgagcgcatccatcttgggctcgtggaccgaggacgaggaggaagaggaggaggaagaagaagaagaggaagaggaggaggaggaggaggaggacgcgtctaggctgagatggttcgcgtggatattgctactcattctaagactgctgcctccgccgccgccgccgccgccgctgctgccgccgccgccgccgccaccatttgccatagctagcaacgggcagccggcgcaggggctcgggggagctcctcccgccgccagcgccaccccaaacacccatcaacagccatattgctgctactgctgccgccgccgccgccgccgcggagcgcgggaggggggcggggaggcgcctgggctcggggcgctgtgcgcgacctggcggggtgcgccgagatatatacagcgagccgccgccgcccgcccgggggggagggggatggagtgcgcgggcagctccccctccccggcccgcgccccgctcgccccgggctgcgctggccccgagcgccgagagccagggggcgccgcgggccgcccgcgcccggggtctgcgccgcccccgggcccgccccggctccgcgcgcggtcccgggtgtcctcggcgccgcgccgcccgccgtgcgccacgggtgtgcgctgcgctcggccggtgacccccttccccgagcgcctcccgcgcggctaacgagccgctctccgcttattaggtggtaactcgttaataatggataatcggccccctccgcccgggcgcccctgcgccagccctcctcccccggctgcgctcggctccggctcgccgcgccagtgcgcgcccggccgcggcaggttcaccgcgtccggccgccggcccgtggccgcctgctagcccatgttctcgggaccccctagtcctgtcgccacgccgctgagcccctcggcctccgctcgctcttcctccttgccgcctccgactcctcctcgtccccgtcctcgccgcccaagcctcttcggcgcgcgccccgcgctccccgcagccgccagcagcagcagctgcagcaactggagcgggcgcggactcaggacgacccaggcgggaggggaggaggctcgccgcgctggctcgcctgggctccgggctgggcaggggtgggcagggcccctcggcagcggcccggcaagcgcccctgacccccagggcgcaaggtagagcgcccccagcccaggcgcggggccaggcgcctctctccaaggt

SEQ ID NO: 7443 - DNA, 30 bp, Homo sapiens
  chr10:79470951-79470981
  hyper
tgaagtcacatcgccggctgctgagtctac

SEQ ID NO: 7444 - DNA, 74 bp, Homo sapiens
  chr10:79606675-79606749
  hyper
gaaatgacacaaagcccggttctgggtggtagcccgcagagcccacctccacaagtgctcggcagaatcaggag

SEQ ID NO: 7445 - DNA, 73 bp, Homo sapiens
  chr10:79685840-79685913
  hyper
aactgggccagaggagcgagtccaccgaggccatcgccaggtggagcggcggccccggcgaggtaccctcggc

SEQ ID NO: 7446 - DNA, 48 bp, Homo sapiens
  chr10:79686981-79687029
  hyper
ctggttcccggtcccccgaggcccaggcgcagccgggggtgggggaca

SEQ ID NO: 7447 - DNA, 30 bp, Homo sapiens
  chr10:80159487-80159517
  hyper
cctattttataaatttaaaaaatcaagacc

SEQ ID NO: 7448 - DNA, 38 bp, Homo sapiens
  chr10:80733745-80733783
  hyper
gcccgccgccacctcccggcgaccgggcagtagcagcc

SEQ ID NO: 7449 - DNA, 34 bp, Homo sapiens
  chr10:80827232-80827266
  hyper
aatccgaagcgggctccgccggctcccggccgaa

SEQ ID NO: 7450 - DNA, 102 bp, Homo sapiens
  chr10:80828550-80828652
  hyper
agagcgcgagccaagccgagcgccggcagcggcggcggcgcggcgcggcgctccactccggcctgactccgcaccggcttttgcgggcggccggcggcgcgg

SEQ ID NO: 7451 - DNA, 30 bp, Homo sapiens
  chr10:80909886-80909916
  hyper
agccagggatgaggcgaaacccaaccctgg

SEQ ID NO: 7452 - DNA, 666 bp, Homo sapiens
  chr10:81741614-81742280
  hyper
ccagaggcagccacacggacacctgagccgcctcttcctgctagagccagcgaggtgtgcccgcagccgagaccccttcctctccacgtctcctcgtctccttgtctcccgtgcccgcgtcaggccgccagcctcgcccacctccccaggaagagcgcgccgggcgccgacttcccctggggcggcggccctggacgtgcggggggtctctctgggccggctgctgcgccttggccctgccctctagctcccgcgctcgctcccgccctcctggctctccgggcgcgcctggcggggcagggcggacatgggcaccaagcagaggagccgcacgcgcacgtactggggctcggatctaccttccagtagcaacggaggagccaatgggaccgcgggcggcggcgggggcgctcgggccaccgcggggcggttcccggctcaggtgcccagtgggcaccagcccagcgcctcgggcggcgctgctgcgaaggccctggcagccccgcgcagccgctcccgcggcggggccgtggggagcgtggctttgggggcccgcgcagcgcagtcctccttcagcatgccgaacagtagcagcggcctatagggcttacaggactcggtgcacagcagcgctgaggaaggtggcgcggccggtccaggccggtg

SEQ ID NO: 7453 - DNA, 30 bp, Homo sapiens
  chr10:81839018-81839048
  hyper
ggggcctgtgcgcacgcgcatctgacggtt

SEQ ID NO: 7454 - DNA, 30 bp, Homo sapiens
  chr10:81892431-81892461
  hyper
agtgcatttcctctcgggccggccgggtgc

SEQ ID NO: 7455 - DNA, 1 bp, Homo sapiens
  chr10:81964767-81964768
  hyper
t

SEQ ID NO: 7456 - DNA, 53 bp, Homo sapiens
  chr10:82213690-82213743
  hyper
tacaagtgcccggccccgggccaggcccggcctgcgccgcgcacccactggga

SEQ ID NO: 7457 - DNA, 30 bp, Homo sapiens
  chr10:83633965-83633995
  hyper
caccccaccgcaaacgggggtttgcttgga

SEQ ID NO: 7458 - DNA, 30 bp, Homo sapiens
  chr10:83636234-83636264
  hyper
tgcagacctgctggcgagctgccggatccc

SEQ ID NO: 7459 - DNA, 30 bp, Homo sapiens
  chr10:84158654-84158684
  hyper
aagtttctcacccccacttaagtacagaag

SEQ ID NO: 7460 - DNA, 30 bp, Homo sapiens
  chr10:85233864-85233894
  hyper
aatgaaacacactataatcagagtgtatat

SEQ ID NO: 7461 - DNA, 30 bp, Homo sapiens
  chr10:85247485-85247515
  hyper
aggtgtcatttttttaaatccacttttcta

SEQ ID NO: 7462 - DNA, 30 bp, Homo sapiens
  chr10:85416512-85416542
  hyper
tctccactgacactataaggggtgggagct

SEQ ID NO: 7463 - DNA, 31 bp, Homo sapiens
  chr10:85899255-85899286
  hyper
gcgtcatgcagtgcgccggaggaactgtgct

SEQ ID NO: 7464 - DNA, 131 bp, Homo sapiens
  chr10:85899675-85899806
  hyper
cagggaagtttgctgccgggttctcatctgaatctagcgggctgggtgaactttctcggggaccaggcacccaaactcatcaatgctcacggaggcataagcccttggattagggtcggtagtattttccc

SEQ ID NO: 7465 - DNA, 837 bp, Homo sapiens
  chr10:85954204-85955041
  hyper
gcaaagggggcgtggcgggcggggagtcctcttgtcacgccctcctgcccccgcccgcggctgggagcctgtcgctccgctctgcgccgctaattggtctcgtcaggcggccggcaggagcagatccgagccgtgtcatcctcttagcgccctcacgccacccgccgctcccgccccgtgccccctcccgccgcggctgcagtcgccgctacccccattgtggtctctgccctccccgcgggcccagggcatgctccgtgcccctgcgcccggtctcggcggcggcaggcgacactccgcgccggcggagacatgaggcgctgccggtgggccgccctggccctggggctgctgcgcctctgcttgggtgagtggccgctgggccgcgctggccgcgtggatggcgagggagatgggcgctggcgtcacccaggtggccagagggacatggtcctggaccacttccagagtgggactcgggctggtggacgggagcggagaagtccttccatcttcctggcccattcggtagtggggagtggggtagcggagtagtggggagctccggggcgcttctccagagctggcatcctagggccccagggtttggcgcccggacccccgctgctctccgcttgctgggaaccagagctgtaggcttggtggcagctccgatgctgcgtggggcaggagatagtgccctgactcgcggcttgaccttggctgggctggggcactgcccctctccgagcgcgggtgcaatctgcccattgatgaaggaggggttggattgctacctgggttctaagcgcccacatgctacgtgtccctgacaag

SEQ ID NO: 7466 - DNA, 43 bp, Homo sapiens
  chr10:86088146-86088189
  hyper
aggtcagtggagggggcggggcccgaagcggaggcggagcttg

SEQ ID NO: 7467 - DNA, 59 bp, Homo sapiens
  chr10:88124921-88124980
  hyper
agcaggtttggtcacgggcccctgaggaggaatcgtagctctccgagcccaggcctagt

SEQ ID NO: 7468 - DNA, 42 bp, Homo sapiens
  chr10:88126258-88126300
  hyper
cgagcccgcccgtgcgtcttcccccgcgcgcccgcccctgcg

SEQ ID NO: 7469 - DNA, 30 bp, Homo sapiens
  chr10:88137193-88137223
  hyper
caggcgctgccgcgcgagccgccccaggag

SEQ ID NO: 7470 - DNA, 31 bp, Homo sapiens
  chr10:88148418-88148449
  hyper
caggacctctttcctgcggtccctatcccct

SEQ ID NO: 7471 - DNA, 30 bp, Homo sapiens
  chr10:88149309-88149339
  hyper
gaccaccgagcctgcgaagacctagctgat

SEQ ID NO: 7472 - DNA, 30 bp, Homo sapiens
  chr10:88392073-88392103
  hyper
caggtccccagcgccgcctcccgggcaagg

SEQ ID NO: 7473 - DNA, 246 bp, Homo sapiens
  chr10:88515315-88515561
  hyper
cctctttcctcacatacgggtcatcgaatacttttaaaagcattttccaccatgaatgaggggaaatggaagaaaagaggtggtgacaattatttgcattttccaaatggacggaatgagcctccggagggtacacgaggtcaccagcgtgagcccgcggtggagctggaggcgtatttatagctggctgacctcagtcctgttgggccctcgccgctccttatcttatgccgctggaattcgcgg

SEQ ID NO: 7474 - DNA, 30 bp, Homo sapiens
  chr10:89577891-89577921
  hyper
cccatgaggccccacgggaaccagctactc

SEQ ID NO: 7475 - DNA, 1214 bp, Homo sapiens
  chr10:89621638-89622852
  hyper
cagctccttttcccacgtttgggaaggcgcagaataggtcgatgtagagcaaggagtgagtctcaggtctcagtcctttggcttgctcttagggtagcaggcgaggagtggcaccagtttggggactctctccccgcgttctgtaagaatcggcggcagccagcaggcggggaggcgggggcacgtgtttggatgtgggtgcttgtgtaaccagttccccaagcgccagccccgacagcgctccttcgggaggctggtccgagcccctgtttccgccgcggcgcaggaagggttggggttccgctgcctgcaccaggcaagagcaccccgagcaaaggaagaagacgacttgcctccggagctatcactggggagtgggaatttggaaagttccccaactagggacacacgtgacctccttcggaaagtagttccgactgtggcccgtgtatccttccacctccttttgaaccctcctaggtctcctcgccccgcccactcgctgggctgcagcttcctaccgttccgtactttccactcaacccggtaaccccaaacgtgcacggtccggccggggcgcgcggagcctggccccgggcgatccatcctgccgggttttcacggcggccaagggggggcggggctaggtggtctctgagaaccgagcttgactccgacgccgcgaaccgacctggagcccgaggggaaagatgctcgactctcttgggggcaccggagcgggcgcaggagaggcctgcggggtgcgtcccactcacagggatcctctttcagttcatttagataggtgccctttgggcccttgaaattcaacggctatgtgttcacgttcagcacgctcggctgagagctttcatttttagggcaaacgagccgagttaccggggaagcgagaggtggggcgctgcaagggagccggatgaggtgatacacgctggcgacacaatagcaggttgctctttgtgctaagactgacaccatgaggacacagatttgggggaagggggaatctctaggcaaaggctgttacagtcaaatctctgcgaacgattgtgatccgacagcggtgcaaaaggaaagagcgaatgcagtccacgccgcggaaatctaggggtagaggcaaggggggagggtattccccttgcagggaccgtccctgcatttccctctacactgagcagcgtggtcacctggtc

SEQ ID NO: 7476 - DNA, 30 bp, Homo sapiens
  chr10:89692890-89692920
  hyper
agctggaaagggacgaactggtgtaatgat

SEQ ID NO: 7477 - DNA, 30 bp, Homo sapiens
  chr10:89717657-89717687
  hyper
attcaggacccacacgacgggaagacaagt

SEQ ID NO: 7478 - DNA, 278 bp, Homo sapiens
  chr10:90342592-90342870
  hyper
ccgggcccccaccctcgcccccaccctcgccccttcttgggccttttcccgggcggcggaagtccccgatcacgtgacgaggcgcgccactcggcgcatgggccgcgctacacggccgctcagggagctgagggtatagcgttttcgccttagactttcttgggtgcaggcccacaccacctcagcagcctgcccggcagtcctcttttcccaggttttggcgtttagacaacccacctgagtcctcagccttgtcccacacagcaaggtacaaggga

SEQ ID NO: 7479 - DNA, 103 bp, Homo sapiens
  chr10:90343138-90343241
  hyper
cgtccttgaggagcaaacctggggctgcggagaaccggggctgtctgtcttctcgctttgggggccgggcgccctgcccctcgcccagaaaagcctggaaatg

SEQ ID NO: 7480 - DNA, 587 bp, Homo sapiens
  chr10:90967460-90968047
  hyper
gtttgtgttttttaatgcatacgtataactgcatccatgtgctttcataaagacgcaagcataatcgcattttaaaaactgtttaaagctacatgcggtctgtagctcgggtgttttctgagaacccggttgcggtctatccagcggcgatcgagaaacgagccctttgcacagggaaccgctggtccccgaacgccggcggtgaccgtcagctcaggaaatcagacgggaagggtggccggatgggaacctccgccagctccagcttgtccccagagttttcctggccggcgggcagcaagctagagagaccacgcacgcaggctctccgggagaggccgcagcccggccgcgtagctaccctcggcggcgcgtcccggggcgccgggcccgcgatcggagccggaggcaccgcacagcggaaagagggctccgcggcggccaggctcagctttgccgggaaaatgctggatttaactcccagtctgcgccaatctggctaaaaagcccgttgtatctcaatttggggcgggaacacttaattcagcaaaccacctgcgttgttcgtcaagggaaagagatgtgag

SEQ ID NO: 7481 - DNA, 77 bp, Homo sapiens
  chr10:91295284-91295361
  hyper
ccgggagcgggggccgccggcgagactgagcccgggacagcccagagctccagcgctccagcgctctgcagcccgcc

SEQ ID NO: 7482 - DNA, 37 bp, Homo sapiens
  chr10:91295628-91295665
  hyper
ccgggagagggaagcgtagcgcggaaaatcccagtgc

SEQ ID NO: 7483 - DNA, 31 bp, Homo sapiens
  chr10:91295738-91295769
  hyper
atttagcgcggggatccgctctaagtactgt

SEQ ID NO: 7484 - DNA, 45 bp, Homo sapiens
  chr10:91403836-91403881
  hyper
gggtagttaaactccacgcctccagacttgcgctctccaatagac

SEQ ID NO: 7485 - DNA, 30 bp, Homo sapiens
  chr10:91461336-91461366
  hyper
cccagcgttcagtgcggtgccctggccgcc

SEQ ID NO: 7486 - DNA, 30 bp, Homo sapiens
  chr10:92617414-92617444
  hyper
ttaacgtccatcatcgcgccgccgtgtgcc

SEQ ID NO: 7487 - DNA, 144 bp, Homo sapiens
  chr10:92981133-92981277
  hyper
ttatagaggaggaagccgagacccaggctcagatatgaaacggtttgctgaaggtcatacaggggtaagggccagaaccctgattccctgtcttttaattatgcttgctttctgttacacgcacgaatacggtttcccaagagg

SEQ ID NO: 7488 - DNA, 48 bp, Homo sapiens
  chr10:93393015-93393063
  hyper
gttctgggactccgcggccagctggaaccagccgcgtaacgggaaccc

SEQ ID NO: 7489 - DNA, 30 bp, Homo sapiens
  chr10:93557960-93557990
  hyper
tatgcaggatcgttcggcttcagcagaacc

SEQ ID NO: 7490 - DNA, 709 bp, Homo sapiens
  chr10:93647031-93647740
  hyper
ctctttgtaacaccccagggccgcgtgaatagcggggaaggtaacgtgactgcggagctcagggccggcccgggaggggcgcgggcctggccagtgggaaggtcggacgccgaggggcgaaatcaccccaccggcatcagaccaccgcctccattcagcggaggaatgtgggcgggcagaggacgcgcggtcccctcgcccggcgttaaccctgtgcgcgccgggagcttcgcccggagcatcgcagcatcgcgcagcgcccggagcccggggccctcacagctccaccggtgcccggagcatctatctccccgcgggcggtgctgccactcgccacgttcacattcctccacgtgcacgcgtgactcttttggtgttatttttaaaaatctcactatttaatcgccatgtttaccttccccagaaccacatagtctcatcgcaattcaaataatttagaaaacattttaagataatcgtggagcccacgaagccagtgcaacgtaggtggcttcccttgctggaagtcaccgcaccgaggccagaagaaggtagccagcgcccaggcaagcgcttaaaactgcagcctcctccacacctttgcacgtggggaaaccgaagcagaaccctgtctctttcacttttcttcccttcgctaagacttttttatatttgtaagtggaggcgcgatccagttagcttttctcca

SEQ ID NO: 7491 - DNA, 31 bp, Homo sapiens
  chr10:94000686-94000717
  hyper
tttcatttagctgcagcgaaccacgagggag

SEQ ID NO: 7492 - DNA, 30 bp, Homo sapiens
  chr10:94333999-94334029
  hyper
gggtttggccggggcgctttaggagccagc

SEQ ID NO: 7493 - DNA, 30 bp, Homo sapiens
  chr10:94353316-94353346
  hyper
ttcttggttctccgcgttctgttcaataaa

SEQ ID NO: 7494 - DNA, 203 bp, Homo sapiens
  chr10:94450516-94450719
  hyper
agcctgaccctttccgttcatacaggaaatcttgagttctcgataggagtaaatctggtttcagaagctgttaagtgttttcctggctgcatgaagcagacccttcccccggagtagtgcacgctgctgattattttatcgacatcctcaatacagacaaattcaggaaacactcgacttctgatagccgggatccgtttttc

SEQ ID NO: 7495 - DNA, 160 bp, Homo sapiens
  chr10:94451442-94451602
  hyper
tccttgggttactgctgggaccgcgcaggaggaagcaaagagtttttcgagctagaccaacaggaaacacattgacggaaatgttgccatagcccatggggtggctttaactggccgcccccgcgggctgggtgtgaaatcagaggaggccgcggctccc

SEQ ID NO: 7496 - DNA, 161 bp, Homo sapiens
  chr10:94607698-94607859
  hyper
gtggacttcttgcaggcggggacatgaatccacctggagcggtcttcatggtcaactgggatctttattcgttcctaaaataaatcttactatcacatgcaattttgcttttcgtgagtgcatgttttcctttctctgactccccacgacccagagtacat

SEQ ID NO: 7497 - DNA, 30 bp, Homo sapiens
  chr10:94609021-94609051
  hyper
ggtgaccctgcgctcgcgggatctaagctg

SEQ ID NO: 7498 - DNA, 470 bp, Homo sapiens
  chr10:94831427-94831897
  hyper
atttattgaccccccaccccccgccctgcccccctacaagatgttctttaatgatcgttcactctcacatttaatcctttcctgccggacgcccccgccggcctcgatgtacagatagattaaaacgtttttttccctgcggcaatttccagcgtgcaggccccgctcatcttgtgacccggcttgagctgaacttggcgaggtggccccgcagagttcactcggatgtcacggtccggcctgcaggggtcacaggcgggtcaggcccgaggattgggaatgggccccaggtcacgtccccattcgtcggctttgcacaccggccggaggcgctgtccagaaaggggcggacccgggatttctgagaattacctccagcgcgattggcctggcttcctgcagtggccagaggttggttcgccgtgtttacagccaccaaatcgtttgccggagactgaaaccctgcccag

SEQ ID NO: 7499 - DNA, 1136 bp, Homo sapiens
  chr10:94833812-94834948
  hyper
ccctcccattgccccccgggactatgggcttccccttctttggggaaaccttgcagatggtactgcaggtaagggagggtggggcgggacaggctgcttccccggagcccggcgcggctctgggcttctgctgaagtcggggtaggcgcccccgggaggcatgctattgcggctaggagcagggctggcgggagcgcggcgctccccggcgccccctcatgcccacttctctcctccgccttcctcccacagcggaggaagttcctgcagatgaagcgcaggaaatacggcttcatctacaagacgcatctgttcgggcggcccaccgtacgggtgatgggcgcggacaatgtgcggcgcatcttgctcggagagcaccggctggtgtcggtccactggccagcgtcggtgcgcaccattctgggatctggctgcctctctaacctgcacgactcctcgcacaagcagcgcaagaaggtgggggcaggaggcgacggctggacagggagggggaccccatttatgagcggaattccggctgatggatgctaggcgcgggctagcagcttgaggtgggctaggaccctctgccagctccaggttagctttcccagctcggagagtgccatgtgtctggcaggactgggggtgtctggaaggggacggcggtagacgagaggggcggatggaggcttttaacgctgtcccctcctcgggactcaggtgattatgcgggccttcagccgcgaggcactcgaatgctacgtgccggtgatcaccgaggaagtgggcagcagcctggagcagtggctgagctgcggcgagcgcggcctcctggtctaccccgaggtgaagcgcctcatgttccgaatcgccatgcgcatcctactgggctgcgaaccccaactggcgggcgacggggactccgagcagcagcttgtggaggccttcgaggaaatgacccgcaatctcttctcgctgcccatcgacgtgcccttcagcgggctgtaccgggtaagggcggcaaacgggctgcggactaggggcgcgggacctgggcgtctgctcaccgccgcgcgctctctgcgctcagggcatgaaggcgcggaacctcattcacgcgcgcatcgagcaga

SEQ ID NO: 7500 - DNA, 30 bp, Homo sapiens
  chr10:95326394-95326424
  hyper
cctccctctttccccgccttggcactcagt

SEQ ID NO: 7501 - DNA, 30 bp, Homo sapiens
  chr10:95326959-95326989
  hyper
catctggggctattcggcggtcgccgctct

SEQ ID NO: 7502 - DNA, 208 bp, Homo sapiens
  chr10:95361193-95361401
  hyper
gcgcggggtggcctcggccaggccaaatgcgccagcggccctggctcagttaccctgcactcgtgccagcggccgccagctgcggtctagggtggcctccggggccagtggctctggcaggaggctcgagtcaacctggcgggaagaccgtggcctcacagagcgagagcggacccgcgaggctccctggtgcgtgagtgcccaggcc

SEQ ID NO: 7503 - DNA, 30 bp, Homo sapiens
  chr10:95754185-95754215
  hyper
atgcaggccgccctcgcaggggctaaagga

SEQ ID NO: 7504 - DNA, 61 bp, Homo sapiens
  chr10:96122755-96122816
  hyper
cttccgtagacaggttcgggctcgcgccctctcgcggtgactgtctcgcggccctggaccg

SEQ ID NO: 7505 - DNA, 30 bp, Homo sapiens
  chr10:96162131-96162161
  hyper
ccgtctctatggttcggggaatctccaggt

SEQ ID NO: 7506 - DNA, 52 bp, Homo sapiens
  chr10:96162364-96162416
  hyper
ccccagatggtgggtccggaggatgccggagcctgctcgggaagaaacccca

SEQ ID NO: 7507 - DNA, 436 bp, Homo sapiens
  chr10:96162849-96163285
  hyper
ccgggagtcgcgccgccgccgcccctacggccgccttcgcctggaggggcctggcgacgaggacgcggacggcgcgggaagcccgtccgattgggcctctccgcttgaggacccgctgcggagctgctgcctggtggccgcggacgcccaggagcccgagggcgcgggcagcgactcgggggacagccccgccagcagctgcagcagtagcgaggactcagagcagcggggagtcggcgccgggggtcccgaggagggcgcgccccctgccacctcggccgagaggactaatgggggtgcggagccgcgcctgggcttttctgacattcacttcaactctcgcaacacgttccaggtgagccgcggtcagagcgcccgcgatcacctgcccccggcggggccgccggtgcccttgcccgccgcggagcagggtcct

SEQ ID NO: 7508 - DNA, 268 bp, Homo sapiens
  chr10:97055028-97055296
  hyper
aggcttctagctgggaccaagcgaaagcgtgtgactcctgactgggaggtccgctctggtatctaagtgaggccaggctctgcgcagccaagcaaagaaccgccggaagctctggtttcaccgcggccgagcgcagatcgcgcaccggttctcacgtctgcaaacgtgcaactgcctgccgcgggcgccctgatcaaacaagcaacttgcttccctttgctgtgaaaagaaccgaaactcaggctcagagcctcgcaaaacaaagaca

SEQ ID NO: 7509 - DNA, 30 bp, Homo sapiens
  chr10:97208010-97208040
  hyper
tccaactacatgctcacttctttagaacca

SEQ ID NO: 7510 - DNA, 59 bp, Homo sapiens
  chr10:97321333-97321392
  hyper
gcgaagaagtgtccggcgcccggctcctggcattgtgagcccgccggcctccgccggta

SEQ ID NO: 7511 - DNA, 30 bp, Homo sapiens
  chr10:97659562-97659592
  hyper
caaagtccttggatttcaggcaccagccac

SEQ ID NO: 7512 - DNA, 30 bp, Homo sapiens
  chr10:97667063-97667093
  hyper
gacacatgggtgagcgtgtctggcatgccc

SEQ ID NO: 7513 - DNA, 395 bp, Homo sapiens
  chr10:98272407-98272802
  hyper
cctgggagcgtgagcgtgagcacccctctgtccgtgctggaactgccccacactcatcagcttgctggaacatgcgcttggcccttcggaggctaacgcttcaacgactccagctcggaagccgctcccctcaggactcacgagccgatcagtggccccgaggaagcgggagctgcagcgcccgggcggcgattgcgcccgaaaggcccgtacgtcctggggcgccgcttcctggagggattagagcacctgccggcttccatctccgcccgcccagagcgaccctcaggccggtaccgctacagggaagtttccggctattcgagtcttgctcattctccctcggcgacccctttccttttgcccgctgtgacgcttttctttttaaaatctcc

SEQ ID NO: 7514 - DNA, 30 bp, Homo sapiens
  chr10:98273888-98273918
  hyper
cacccagcctaaggcgcctgcccggggcgc

SEQ ID NO: 7515 - DNA, 163 bp, Homo sapiens
  chr10:98479976-98480139
  hyper
gagtgggaagtttgcgacagggaacatagaaaagagcagaaagagggcaagatccccgcacagaggacgcaaacagaagcaagcgggggagcgcgcctcaagggatgcggggtacgagagaggggccgggagcccggggacccgcggcgcctgcctacccacc

SEQ ID NO: 7516 - DNA, 807 bp, Homo sapiens
  chr10:98945041-98945848
  hyper
atcccagggatggggaaaccacggcgctcctggctcctggctcgggaaagaccccggcaggcactgacccgtctgtgggctgcggagcccggacgggccccaatggtcctgcccccacccccaagtccggaattgcgtctgggtgggagggcaacctcggagccagggagccaggggcggggaccatactcacaggcgctcggtgttccgaggtatattcttgggaatggcctgcagccccgtgccgtggcagtccaccgtggttccggtgcaggtgcagagggcggggcacgccgaggcacccaggcgccacgcggctgcccacagcagcagccagagctccggccggaccggccccgccgaggacccccacccgggagtcagcgccatggtgccctcacagcgtcccgctcgcgagccagacggcagcagccgctgaccatccccgtccggggccgcctccaggtgcagtcccggggcagagccaccgaagagcccgcgggcttgcgcgcggcgcccctgcgggctgggaggcaccttgctcctccaagcgacggcgcctgtgcgcggacggagggagggcgccttgggcggagggggctcggctcctctgccgtttcgccgcctgcgtctccctctccctccctccagctcccaactgactgctgcgaggaggaaaatgggcaggccccgcgcgcgcacgcaccctgcgcacacaccacacacacacacacgatcacacacacacccgcgcgctcgctcccacccggcagtcatccatcaatcgaaaagcacacatccagggcc

SEQ ID NO: 7517 - DNA, 23 bp, Homo sapiens
  chr10:99042885-99042908
  hyper
cacccgcccggctgttactatgt

SEQ ID NO: 7518 - DNA, 154 bp, Homo sapiens
  chr10:99080262-99080416
  hyper
gcagattttacagagcgcacctcaaacgtacaagtcagtaggactccttatttggcgtgacccgacctggccgcggagcctgcatttcctcgcagcctctcagtgccctccagccccgcgaccatgtggccacaatccacgcttctccggatcg

SEQ ID NO: 7519 - DNA, 249 bp, Homo sapiens
  chr10:99080681-99080930
  hyper
gaaggctgtacgacacgggtggggaaaggaggtgggggcggggagtattgaatggtggtggaagggtagagaggcgcggagtgaaccccacgccctgtctaaagtgtattttcagagccggcccgcctctcctcggttcaaggtcactgtttcctgggcacgcactgggttgcgggacagagtagccaggttctgccggtgctcggagaagagcgcagtgttttgcaagtgctggagtctcctgaggac

SEQ ID NO: 7520 - DNA, 56 bp, Homo sapiens
  chr10:99080989-99081045
  hyper
cggtaggcgaccaccgcccctggccgcgctccgggctttcacggaaactcccgaga

SEQ ID NO: 7521 - DNA, 30 bp, Homo sapiens
  chr10:99258627-99258657
  hyper
cctgcctggtgccccgagcgagccgggagt

SEQ ID NO: 7522 - DNA, 48 bp, Homo sapiens
  chr10:99496856-99496904
  hyper
tgacgtcatgaggacgcagccgcagagcgattcgcgtcccggaagcgg

SEQ ID NO: 7523 - DNA, 30 bp, Homo sapiens
  chr10:99629442-99629472
  hyper
tggctgttgtgacacgtcccccacggctcc

SEQ ID NO: 7524 - DNA, 30 bp, Homo sapiens
  chr10:99789810-99789840
  hyper
ctgggagactctcccgatagcccggcacat

SEQ ID NO: 7525 - DNA, 16 bp, Homo sapiens
  chr10:99790437-99790453
  hyper
cgcggcagctggagcc

SEQ ID NO: 7526 - DNA, 13 bp, Homo sapiens
  chr10:99790746-99790759
  hyper
aggccggagggaa

SEQ ID NO: 7527 - DNA, 260 bp, Homo sapiens
  chr10:99790917-99791177
  hyper
cgtcgccgggccgggccaaagcggccgagcgagccgcgctgatggcgagatttcgactacggagctagagccgagccgatctttatccagcctggggacgtgtccgagcacctcccggggactgctcagtatggagagcagggctccgcgacggcccccgcaggcggggagcgggcgagcgcagctcggagatcaggcgcgcagaggcccaggcggctgcgggcagcgccgcttctaccccaccccgtccccaccagcag

SEQ ID NO: 7528 - DNA, 44 bp, Homo sapiens
  chr10:100206320-100206364
  hyper
gccgccgcggggctcccgtttgcctagcacgccagtttctgtcc

SEQ ID NO: 7529 - DNA, 137 bp, Homo sapiens
  chr10:100992053-100992190
  hyper
cgggtgcttgcttccgctccccaaataaagaatggtaatcaagtttctcaccatcctcatagtttttgagatagtaatccgggcccgggcccccgcggcttttcgccgggttcctcaggttctggaactgcaggaag

SEQ ID NO: 7530 - DNA, 223 bp, Homo sapiens
  chr10:100992221-100992444
  hyper
cgggcgaaagtccccgggccagggtcaccaagcgcttggagctgcagaggaagagaataagagaggaaaggttcccaggacaggacgagagcgcgtggggcacggagaagggccctcttcctactccctgagggcgacctggccggggctagaggctctgtgcctgccccagccggcagtccacgctggcccttggccgctgccctgcgccccagcccgccct

SEQ ID NO: 7531 - DNA, 1349 bp, Homo sapiens
  chr10:100993447-100994796
  hyper
ggagagttttttgagaagagacgtggctaccccagggtcttgtaaccagaatggtcgtttggcagaagtctccgggaccgcactccaggacaggcacagtcagggcgtcgcgtgggcctactgtggcaaaggagacgtccgcgcgaatccggtcctggggaaagggcagttccaacaacctttcatccagaagcctgcacagccaatgcgaatgcgccccgccaggacttcttccccgaaaatctgccttccagactcttttctgaggcaggaaagcattaggcgaacaggcagattttttaaaaaaagaaagaaagctggtgggggaaagggggtctgcgcagctgaaggagttcaatgaaagtgggacaagcgttgcggaaaactccgttgcaccctacattcggacgagctcatagacgcgctctgctgcacgaaagagctttcgaagaggaagctgggccgcgcggagctggctgttccgccctcgcggcaaccgcaccaacaggaaccgaaacggcctcggcaagggcagctacagcctctcagtcctccggctacctttcctccacgtggaaggagcgctccacgtggcgcctcccgctacctgccgcgtccgcagacccgacccgggccagggggacaaccccaagagctgagaggcgggcgcacctcaagaagcaaaactcgaatttcgcaaggagtgaaaaatacgaaggacgcacaacggacctggcctcggggcaaagtgggactgagagcgctgagggctcttcgaggggaacccacagctgaggctccaacttgtagggaatttttaaaaactcaacacttggattcgacattgcagaggatttatttcttattttacactgcaactctgtccctgatgggaagggatcgcagttgcctaactgccaaactgcaacaacccgggaagagtgtgagcccaattagattacaagccctagagcaaaggggatcacaaacctccgggtttgctaatctgctggtgcggagttcagatctccgaagcctccctggagtatttctaggactcttaccgcttcccttataacgctgtgaccccagcgaggattttttttttcctttaaagaaaagctaaactgtgcagttaccgcaggagatttaaggaggaggaactggcggggggaggggggcattccgtctataaaaagcgccttacaaagtcctgaagtctggaaatgacagcggaggatataaaataaaaaattttaactccgatccaacttgcccaccactcaagcctctgcttaaattcgttttctgagagtgggagagaactgacgaaacgatctttccgtgga

SEQ ID NO: 7532 - DNA, 30 bp, Homo sapiens
  chr10:100996332-100996362
  hyper
tgatctctgtgacgcgttggatagccacac

SEQ ID NO: 7533 - DNA, 542 bp, Homo sapiens
  chr10:101088989-101089531
  hyper
aggtggagtctgaatgcccaccgccaccagcccacgcgcgcagtgggcgtacacgtggtgacctgcctgcggctgggttcccagctccggctcctcctccctccagctctcgctcggcttcctgcagtatcacgtgcagctgcgctgggtgcaggatggcggcggccgcggcggcggcagcagcggtgggtgtcaggctccgggactgctgcagccgaggcgctgtgctcctgctcttcttttccctgtctcctcggcccccggccgccgccgcctggctgctgggcctgcggcccgaggacactgctggaggccgcgtgtccctggaggggggcaccctgcgcgccgccgaaggcaccagcttcctcctgcgtgtctatttccagccaggaccgccggccaccgccgcaccggtgccctcaccgaccctcaactcgggggagaatggcaccggcgactgggctccgcggctcgtgttcatcgaggagcccccgggcggtggcggcgtggcccccagcgcggtccccactcgccccccggga

SEQ ID NO: 7534 - DNA, 589 bp, Homo sapiens
  chr10:101089565-101090154
  hyper
cggacgtggaagtcctggggcccttgcgtcccgggggcgtggcaggctcggccctggtccaggtgcgagtgcgggagctgcgcaagggcgaagcggagcggggcggcgcgggcggtggcgggaagctcttttcactctgcgcctgggatgggcgcgcgtggcaccaccacggcgccgccggcggcttcctgctgcgcgttcgcccgcggttgtacggcccaggcggggacctgctgccccctgcgtggctgcgggcgctcggggcgctcctgctgctagccttgtcggccctgttcagcggcctgcgcctgagcctgctgtcgctggacccggtggagttacgggtgctgcggaacagcggctcggccgccgagcaggagcaggcgcgccgcgtgcaggccgttcgcggcagggggacccatctgctctgcaccctactcctgggccaagccggagccaacgcggccctggctggctggctgtacacctcgctgccgccgggcttcgggggcaccggggaagactacagcgaagaggggatccacttcccgtggctgccggcgctcgtgtgcaccggcgcggtattcct

SEQ ID NO: 7535 - DNA, 30 bp, Homo sapiens
  chr10:101190596-101190626
  hyper
ggctgaggcgtgggcgaagactacggttga

SEQ ID NO: 7536 - DNA, 563 bp, Homo sapiens
  chr10:101279929-101280492
  hyper
ccttctccctcacgcggtctatttacaacgccgaaatctccgtgttaatggacctaggataatggtgtttactttaccgcgataaagcgctgggcttcctgggggagcggctgtaaaatgtcctggaggtagggatggaacgggcgccgtaaaagcgggcgctggaagggcgggggcaccaggttctccttcaggccggcgcccccgccctccaccctctaggccaggctgagcagcccaggcctggcgggcgagcaccgttcccacataaatcaccagcgccagagtctcgggaaaaggcgcatttttcattgctggctgcagggcgactccagaccgcgaacgagaaacagaagttgtctttagataaaccgttcaccggagcgcgcgttgtggcagcagggtccgcagagcacagggcaacctgggtctggcgctgcgcccccgccaccgatcacctcccagaggccccgcaagaaacccagatcctctcaagggctggtaccacgtcctcctgccagagaggagatagggagccaagcgggaaggaaaaggagaacttc

SEQ ID NO: 7537 - DNA, 30 bp, Homo sapiens
  chr10:101283464-101283494
  hyper
gcaggcagtccctgcgtggcgcgggggaag

SEQ ID NO: 7538 - DNA, 30 bp, Homo sapiens
  chr10:101291077-101291107
  hyper
gcacccactcctgtcgccgttgcgggaccc

SEQ ID NO: 7539 - DNA, 30 bp, Homo sapiens
  chr10:101293775-101293805
  hyper
tgcttggagctcagcgtccttgaacccgtg

SEQ ID NO: 7540 - DNA, 30 bp, Homo sapiens
  chr10:101380402-101380432
  hyper
ggtcactgattggccgacatgtgcgatcaa

SEQ ID NO: 7541 - DNA, 112 bp, Homo sapiens
  chr10:101381345-101381457
  hyper
caaggccagcgattcccggccttaggacctcctgctctagggagcacgggcgtcttcttccatttgccttccccgagcgtgttggcacaagctgcccgcggtttccagctct

SEQ ID NO: 7542 - DNA, 30 bp, Homo sapiens
  chr10:102046443-102046473
  hyper
gggtgctgcgcatgcgcactgggtgtgccc

SEQ ID NO: 7543 - DNA, 30 bp, Homo sapiens
  chr10:102133150-102133180
  hyper
gccggtcacagacccgggccttcaagagct

SEQ ID NO: 7544 - DNA, 39 bp, Homo sapiens
  chr10:102415296-102415335
  hyper
cgccggagaccttccgcggagagcgctgccttcccaatt

SEQ ID NO: 7545 - DNA, 30 bp, Homo sapiens
  chr10:102416164-102416194
  hyper
cggcgggtccgctccgcccgcctcgggtcc

SEQ ID NO: 7546 - DNA, 30 bp, Homo sapiens
  chr10:102430769-102430799
  hyper
ctccgcggccattacgggaaagttagtgtg

SEQ ID NO: 7547 - DNA, 30 bp, Homo sapiens
  chr10:102440879-102440909
  hyper
ccggctggccttcccgaggccccaggtcat

SEQ ID NO: 7548 - DNA, 62 bp, Homo sapiens
  chr10:102441170-102441232
  hyper
cctcctccggaagccggcccagggcacaattagcagggagcggagacgcccgcgaaggctga

SEQ ID NO: 7549 - DNA, 109 bp, Homo sapiens
  chr10:102469933-102470042
  hyper
ggccgctccccgcgcgcagcccgacccccctcgtatgggtcacggcgcctgcaaaactccctgacacagaaacgccgcggggcctgcgcgtgtcgggaacaatcctgcg

SEQ ID NO: 7550 - DNA, 280 bp, Homo sapiens
  chr10:102473435-102473715
  hyper
gcggacgccaccaggcgtggcgcggggaacagagcagaatgaaatgcagatgcaaaacgtgctcataagagtttcctctctctccccatctgccaaagccgagattttaatctttaatccatgagcaatcagcgagcagcggcgaatggcacattacagatgttttactgtcgcgggcgctcgcagctttcgcgctcggcacaggcgcgccgggcgcccccgctccgcccgccccctcttctccccctctggttcttcttcctctcccctccccaggtcc

SEQ ID NO: 7551 - DNA, 148 bp, Homo sapiens
  chr10:102473759-102473907
  hyper
cggaggtgggactggggagcagggcctgggactccgctggtgggggtacacgcaggggcactggcgggggcggggggcgacggcactcagaattgcgctgaggcaaattccccgccaggtccagattggggggcgcgaggacaggagc

SEQ ID NO: 7552 - DNA, 30 bp, Homo sapiens
  chr10:102475309-102475339
  hyper
cgcaggcaggaagacggacaggagagagag

SEQ ID NO: 7553 - DNA, 31 bp, Homo sapiens
  chr10:102484026-102484057
  hyper
tgtacctgcagatgccgcggccgccgcgccc

SEQ ID NO: 7554 - DNA, 153 bp, Homo sapiens
  chr10:102484092-102484245
  hyper
gacgccggcccggccggcctcggcggctcaggaggcttctgaaatgactctaattacagagttattaattttaagaggagggtgagcggggggtttatgattattaatcgagcgcccgagctcggcgggcggggcttggcgggccgcgggcta

SEQ ID NO: 7555 - DNA, 292 bp, Homo sapiens
  chr10:102484269-102484561
  hyper
cgcggggccccggggcggctccaagcccggcgggctccgcggcggcggcgaccaggctcgcttcccacttgggctgcgggcggcatggtccctctgcgcccatccggctctcctcacccctgccagtctccgacccggccgtccaacgtccctccctggccggctcgcctgcgcagccgagcatcaggctccgcgccggggtaggcgagcaggtccccagccccaggcccgcagctgtaggccggtgaggaacagctctgctagagaaagcgcaccccacccccacccccag

SEQ ID NO: 7556 - DNA, 311 bp, Homo sapiens
  chr10:102489740-102490051
  hyper
tctttccaggggcagatgctccggcgcgccccgcgccctgaagttcaacttggaatccaggtccgcgcgggaccccgcctagcgccccaagcgcacaggctgagcgccccgccctggcctcctgggcctgcggcctcagcgcgagagccctggcccccttcccgccgcgggtcgcggtcgggaaagcgcgccctgcaagggggttttgtagataaacaaaagcgtttgctcttctggttttcttttattttctttattcgcctgtcccttccttcttaatctccctcttcgctcttgtttctttaacttat

SEQ ID NO: 7557 - DNA, 751 bp, Homo sapiens
  chr10:102490393-102491144
  hyper
ggaaaggttttgtgaactaaacgatgctaattacggggtgggggatgcgtcgcccgggaaggggaggcgcgcggggccgagcgcggcctgggaggggagagaccggggctggccgaggccctcccggggcgcctcccctgcacctctcgccctggctttcgcctttccctgggaactttcccgtctgagttaactattaaccaccggcgagaggcaattttcttcggaatttcagcgatttccttttcgcagtggactcagattagcacgcaaacagtgagatgctcggcttgagtctacgcgcgggcgaagatgcctctgtcgcctcaaacagtgtccttcgcgacggcggaaaactacagcccgcccccgctcccgtgcctgctcaggaagccgtgaccaagccagtgcccgccggtgcccggagtgaaggtggaaaaagccgagtgctcctgctcgggggcggggttgagagggggagattaatccgggcaagccaaggggaccttagacttgcagccagggccgccacccgaggagcccgcatgcagggacgcgcctgaaggcttagtcaaacccggggaaatgccctcccccgcctgcagaatccccacgccgtctcttacttcctccctctttgccactggcgagcttacacgtgcacacacacacacccctctctgtctgtgaccgcaacaaactttgtgaaacttgaaccgctgggtgcaaagttcacgcccttttctccttt

SEQ ID NO: 7558 - DNA, 350 bp, Homo sapiens
  chr10:102495095-102495445
  hyper
gggttgggtgagagggtgtgccggcgtctaggctgggctgcggtccgtgggcgcctcaggcagcgagggtggctgcttgcctgcggctggctggggcctcggtgcgtgtgcacgcgtgtgcgcggggcggagaacccgggctcctcggggtgccggagcctctgcgcggccgggagtgagagagcgggcgcgggcggagcacacagccgtggcggcgggcggctcgggttatctgagccgcttggtgttgggtggctgcgcccagatctccgggcggcggcggcggcgaaggcgagacgcgttgtcgggccgcggaggagcgggacagccagacccagccccaggacgcg

SEQ ID NO: 7559 - DNA, 238 bp, Homo sapiens
  chr10:102495452-102495690
  hyper
cggggagcctagcatggaagagcgcgcgggtccggcaggtaagagcggcagagacccgtccgcgccgcaggcgaggactaggggagagggatgggggcggccatggccggggcgggctcctctcctctttcatccctgtgctcagtacccggcgggcgacgtgaaggctggggactgaggctctgcggactctggggcctcctgggccgtccctcccggtgtcctctaaaccttctga

SEQ ID NO: 7560 - DNA, 383 bp, Homo sapiens
  chr10:102497332-102497715
  hyper
ctgtgtttgggaaaaggaaaccgcacttcgaggcggctccgcagagcagagctgcagagtcttccgccctcccagccgccttctccctttgcctctttctcttttcaccgccccctccctcatctcttcggtagccacgtttggccggggcacaactccctggaggccctgcccccctagacggccccgagcccttttggacctcatccggctagtttaaaatgacaatgacagaggcgcgtgaccgaacgtgcctgccggacgtcctggcgcaactgccgcagccgggtttgcgaaggatgcgggttttacttagtctcgctgagcctgttccggagcagcgaaaaccatcaggaaagggcgagagaaggaggaaggggatt

SEQ ID NO: 7561 - DNA, 30 bp, Homo sapiens
  chr10:102499135-102499165
  hyper
tgtggcgcgctctccgcctgctcctcacat

SEQ ID NO: 7562 - DNA, 774 bp, Homo sapiens
  chr10:102501590-102502364
  hyper
tttaatgcatttaatttggtccgcgctgtggggagcatttcctggggagatgcatttaatttcggaatttctaatcccctccctcagaccccggtcctagctcccctagccgctccccgggaagtggaaggaggaaggcaggtcccggccacgggggaggggcgcggctgggatgctcccgcggccccctccgtctcaccaaggctcagccgccttcccaagctactggaggccgggcgcctgggccccgggtcagggccctgcaggaggaggagaggcaaccacgcttctgccttttctcgcctgggcagaaaacgctgggccagggaactggaaaccggaaaacaggagaaagggtttctggaaggcagcgggagcgggtggcagcggggcagcgggcagtggactaggtctacaccggcacttcacttttgcacaacatgcccagaaacgcatttgagagccctggagtcgcgcttggcttggcttggggcgccggtgcgtgggtacactcgaggtgcggggtgcctatccgccaccccgacacctacacccagacagagcaggcgcggcccagccagaaaaccaggccggcagtagctcggcctggagggcggaggcaaggttgggggccgccaggcgcctgggcaagcctggcagggaagggagccgagaaggcaaaggagccgagatccacaaggaagatttattgggcagatcagatgcacagaggcggctaatgaagcaaatcccgagatgggtatcagagcaact

SEQ ID NO: 7563 - DNA, 244 bp, Homo sapiens
  chr10:102504007-102504251
  hyper
tcgggctgcaagagcgctgcgcaagcttcgccgagccgccctttcgcagacccagggaagcggggggagggagcgaaggagggagagagagttaaaacatcagctgaagtgccaagatgatttatgagacgagggaaaatatttcatgaagatctcccggatattctgtacttaaccagttaggagacaaagggcttcttctgcctggtgcgtgcgagcggaccccagcgagcaagggagctag

SEQ ID NO: 7564 - DNA, 30 bp, Homo sapiens
  chr10:102585779-102585809
  hyper
tgtcgaggggggagtcgttaaacagaatct

SEQ ID NO: 7565 - DNA, 357 bp, Homo sapiens
  chr10:102586048-102586405
  hyper
gtcatcacacaggagaaagggcgagggggaaacctggaggcctggcctttctcccgcagagggagggaggtagcttccgacgacggctcccaacccacgggccctccgctcaccgctagcggaccagcgggcagtccacctgcgccgcctccatcccctgccgcgtagcccacgcatccaacctcttgagggaaaggcgggagggcggtgtctcccaaaagagctcccacctcttgtgttggcactgcacattgatgccattcttaggactttctgggagaaaaatgtcccgaaggcctttcttcgccaccgccccccactcccatttccacccattaggggccatgcctcctagaa

SEQ ID NO: 7566 - DNA, 121 bp, Homo sapiens
  chr10:102587491-102587612
  hyper
cgccccagcctcaccccatcccacgacccccgcaacccttcacatcacccccctcgaaggtcggacaggacgggtggagccgtgggcgggaccctcaggcccgggcccgccgcccccagcc

SEQ ID NO: 7567 - DNA, 610 bp, Homo sapiens
  chr10:102587830-102588440
  hyper
cgccaggaggcttcgctggaggggctgggccaaggagattaagaagaaaacgactttctgcaggaggaagagcccgctgccgaatccctgggaaaaattcttttcccccagtgccagccggactgccctcgccttccgggtgtgccctgtcccagaagatggaatgggggtgtgggggtccggctctaggaacgggctttgggggcgtcaggtctttccaaggttgggacccaaggatcggggggcccagcagcccgcaccgatcgagccggactctcggctcttcactgctcctcctggcctgcctagttccccagggcccggcacctcctgctgcgagacccggctctcagccctgccttgcccctacctcagcgtctcttccacctgctggcctcccagtttcccctcctgccagtccttcgcctgtcccttgacgccctgcatcctcctccctgactcgcagccccatcggacgctctcccgggaccgccgcaggaccagtttccatagactgcggactggggtcttcctccagcagttacttgatgccccctcccccgacacagactctcaatctgccggtggtaagaaccggttctgagctggc

SEQ ID NO: 7568 - DNA, 159 bp, Homo sapiens
  chr10:102588941-102589100
  hyper
ctgtaattccgtgttttcgctttttcctccctgcccctctctccctctgcccctctctcctctccgcttctctccccctctgtctctgtctctctccgtctctgtcgctcttgtctgtctgtctctgctctttcctcggcctctctccccagacctggc

SEQ ID NO: 7569 - DNA, 1132 bp, Homo sapiens
  chr10:102589250-102590382
  hyper
gccctgcatgtctcctcacccgtggatcgtgacgactcgaaataacagaaacaaagtcaataaagtgaaaataaataaaaatccttgaacaaatccgaaaaggcttggagtcctcgcccagatctctctcccctgcgagccctttttatttgagaaggaaaaagagaaaagagaatcgtttaagggaacccggcgcccagccaggctccagtggcccgaacggggcggcgagggcggcgagggcgccgaggtccggcccatcccagtcctgtggggctggccgggcagagaccccggacccaggcccaggcctaacctgctaaatgtccccggacggttctggtctcctcggccactttcagtgcgtcggttcgttttgattctttttcttttgtgcacataagaaataaataataataataaataaagaataaaattttgtatgtcactccccatggctccaagtttgtctctccctgtctctgagatgggcctcccctccattggtcgatccccaaaagccccttcaatgatcctcccaactacactcccgctgccacctccaactcctttgccgagacccccttggcggcagctgaaccacggcgaaggccgagactagcctgccctttagtagccaccctcccccacgcaccccggccctggggacaggaagttcttactctccgaaacttcagaataactcctagttaggcgcctatactaggccaactctgtggtcctaccagtacacccgcacccagatttagggtgctggctctcagaacccgaagtctgaggccttctccacgtgggtggaggggtggtcgtctgtcctatctcctccctccgttccctatccagtgcagttgcgcgtgggcgcagcagcaattttatccccgaagtctgcaatgaaacgcgaagaccgcagacgcttgccgcaagtttcctcgctctgcgtttacttctgggcccgaagaatgccccgcagaggccctaggagctggttcatgggacttcacgcgcctccagtgtcttgcggagccccagccccagcaagcagcggctgaaattggtgcgccttgtgctgtggtctgggtgtgtcccggagagggcgcgcaggcgcctatgt

SEQ ID NO: 7570 - DNA, 30 bp, Homo sapiens
  chr10:102671978-102672008
  hyper
atctatgctgcccacgcttaacatggaaaa

SEQ ID NO: 7571 - DNA, 31 bp, Homo sapiens
  chr10:102746537-102746568
  hyper
ggcgtagcccgcggaacgtggtcggcttgtt

SEQ ID NO: 7572 - DNA, 30 bp, Homo sapiens
  chr10:102756780-102756810
  hyper
ccctgggtggggggcgcggcctgagccgcc

SEQ ID NO: 7573 - DNA, 30 bp, Homo sapiens
  chr10:102757011-102757041
  hyper
ggtgcaggaactcccgcctcccgctcatcc

SEQ ID NO: 7574 - DNA, 30 bp, Homo sapiens
  chr10:102792028-102792058
  hyper
caggctgggggcatcgcctcgaatgacacc

SEQ ID NO: 7575 - DNA, 31 bp, Homo sapiens
  chr10:102802970-102803001
  hyper
cctctctccacccttgcgcctaacagtccag

SEQ ID NO: 7576 - DNA, 361 bp, Homo sapiens
  chr10:102822533-102822894
  hyper
ccgcgccgcggggctgcctggcgggcagggtgcgcgacgcgtgcggctgctgctgggaatgcgccaacctcgagggccagctctgcgacctggaccccagtgctcacttctacgggcactgcggcgagcagcttgagtgccggctggacacaggcggcgacctgagccgcggagaggtgccggaacctctgtgtgcctgtcgttcgcagagtccgctctgcgggtccgacggtcacacctactcccagatctgccgcctgcaggaggcggcccgcgctcggcccgatgccaacctcactgtggcacacccggggccctgcgaatcgggtacgcatggcccggggcccccaccccagcactt

SEQ ID NO: 7577 - DNA, 31 bp, Homo sapiens
  chr10:102827419-102827450
  hyper
ctccaaagaagtgttgcgcagccgtgctggt

SEQ ID NO: 7578 - DNA, 30 bp, Homo sapiens
  chr10:102851346-102851376
  hyper
gttgttcgcggggaacgggtagtgggctct

SEQ ID NO: 7579 - DNA, 65 bp, Homo sapiens
  chr10:102891030-102891095
  hyper
gcaccgggctttttcgcctggtgattgatgtcccagagtcaacagcgagcgagcagccggagcgg

SEQ ID NO: 7580 - DNA, 87 bp, Homo sapiens
  chr10:102894090-102894177
  hyper
cgcaggtcaaaacctggttccagaaccggcggacaaagtggaggtgagcaagcggggcgggccggccgcccgcgagcggcgcggtct

SEQ ID NO: 7581 - DNA, 672 bp, Homo sapiens
  chr10:102894555-102895227
  hyper
ttgcagcgctccagccgggctcccggcagagggtctgtggccccagaccgcggccctgctgacggtctcctcccccagacacccggcctttgcgcagccggtccctaccctggaaggagaaaatcaatccgcgccggctgcggcggggtttcgcgggtcccactggaaggggaatcaattaggagcagatgggtgtgtgtgagaaagagaattttccttctcccatagccacaactctagttactacgcaatgggctttttgttttgttttgttttttcacatttacgctcacggacgtgaagcgtccccaacactctcgagcagcctccctctccgcgcgcactgacgctttctccggctgcaccctctggcacgctgcaccctctggcacgctgcaccctcccgcacatctggcccttgcccgccggagtttctcccctagctcaggccccatggggtagcgcgggagagtctgggcgaagtcggcggcgccgagacgggcgggccttggggcaggaggaaggaattggagtttcctctttttctgaacgaaggcgaggaatctgcctgggattccgcctacggggccacaaaggaagccatggccccacgattctaccacaacatttctgacgctgggaaaggagtgggggatgcggcctcagaccttg

SEQ ID NO: 7582 - DNA, 243 bp, Homo sapiens
  chr10:102900262-102900505
  hyper
ggaggctggaggggaggggggctgcgagggtcacagtcaaggccaactactcacaacagaaagctcgaaactctccctctacctcccctgccggaaatgacccgtctctgttcaaaaatagaaaaagaacgatcggaataattgttcgcagaggtgccgggagagaaggggaattaacaaacctgcctgcgcggagaggtctgcttccttctttggcttcagaaccgacggcaatcaccaaat

SEQ ID NO: 7583 - DNA, 58 bp, Homo sapiens
  chr10:102973586-102973644
  hyper
taacctttcccatgccgcggagggtgcgaggaccggaactttgcgagccgagaaagtt

SEQ ID NO: 7584 - DNA, 780 bp, Homo sapiens
  chr10:102976889-102977669
  hyper
agcgcaggccggcccggctcaggtcgctcggccagcgcctggcgccctcgagcgggaccctgactcctgaccctgcttcccaggtgggagccgttttcctccttccaaagccagatgcctcgggcccgcgaaccaaaagccttctttccaggaaatttcacaattaaaaatatttatcgggagcagatttacgtttctgggtttccagtctcggggcgtctgggtaggctattaagagtaattagcatcttttgcgcatgcagatttacttcgctcattgccacataactcatccctaaaagccggcgcaggcgaaagcaggcgccgccggcggagccgctgccacagctaccgccgctgcccgcccgagcccccctcccctcctgcgctgcccgctcccagtctctccggcccgaattgtccgctccaggccccagacgctgaacacggaacgaaaaggcttccatcctggagacctggagacgagtgacgccagagcgacctcgtgcggttggggaaggcccagactaggctctccaggctggggccgcgccgtctggaccccaggcattgcgaccacgcatgtgtgtgcaccaccgagtgggcgcttgtgtgtgtgcacgctcacgtgcgcgcgagtgcacaggagtatggttgctagtgcgcgttcctgagagggcgaaggggcgcgtggaaaacgagctgatcaccatcctccccttccctgcagcccaccggttcccaggacgacgctcaaacgtcagtcctaggccacccacc

SEQ ID NO: 7585 - DNA, 246 bp, Homo sapiens
  chr10:102978827-102979073
  hyper
agggggtgcttgtccctgcctcgtcccttgtcaggccccgcgcggcgctaaagcgggggccgttttccctttaaatcgcggacactttgacaggggacattaaggacccggctgctcaggctgagcagatcataaaaccggacaggcaatttctgctcccgccaaatagccgggcaaactcgttctgcatctttggttttaatgcactaaactggcagctaagcagggagcgagcaaaaggggggt

SEQ ID NO: 7586 - DNA, 438 bp, Homo sapiens
  chr10:102989800-102990238
  hyper
gggttgggggagggggctagtcggagagctcagccttctccacgcggagaggcggaggagggaattgttggcggctctggacgcctctccccggcctgattccgaagcggccgccctacctcctccggcaatcttgctcactttcctccggcagccgctccccaggctggctggggccaccaacggcctgatgatgggcgtctgaagagtagccaggccaggtgccggggctaacggggccggctccgtgcctccctgctgcgctccgcccgggccccggccggggccccgctgccggccccgcctagcccagcgcccggcttgagtgcatggccaggccgactccagctgttccggatgcggggcgggggcccggcgggagccaggccgcggctggggctttgctctcaggaactcgcagggaggccaggcttccag

SEQ ID NO: 7587 - DNA, 30 bp, Homo sapiens
  chr10:102995972-102996002
  hyper
gtctgaccaaaaaccgttaatggtagtcag

SEQ ID NO: 7588 - DNA, 241 bp, Homo sapiens
  chr10:102996239-102996480
  hyper
ccgccgccgccgcgcggcgcccaattccccgcggaggggagtagccaattaaggcacttgaaaagggagtcgggtggaagatcccccgcccaccagtatcctggatttacccaggtcgagttcagagagcctccccggtcccaaccccctcgggccccatgggtcagggggccgcctgctgggaagtgctacctcagctaagccgctcaggtgtcccgagactccgggcaagggaagacag

SEQ ID NO: 7589 - DNA, 216 bp, Homo sapiens
  chr10:103043993-103044209
  hyper
agccggctgagagccgataaagccgagggggagaagggccgacatcagggtaatgggggagcagggccattgaggagctggagccgagccggggaccgctccgcgcgcagctggagcccggcgagagggccgcggaaggggggtgcgaaccggggccggaccccggggaggagccgggaggcgagcggcgaggggcactgcgcggctgggtctgcc

SEQ ID NO: 7590 - DNA, 30 bp, Homo sapiens
  chr10:103347968-103347998
  hyper
ccaatgagagcggacgaaggggggaaggag

SEQ ID NO: 7591 - DNA, 203 bp, Homo sapiens
  chr10:103348787-103348990
  hyper
ccaccctaggattggccgatgccggcccctttgtgcacttgggtcctttctggacccactgggtagccaggatgaattgcgtctgaagttcctgaggctttcaagataacaactggtgactcatgttcacaggcaggggccaatcagggaagcctggagtttgtggaaattaaaatcatttactcgttcgtgcaacatttagg

SEQ ID NO: 7592 - DNA, 30 bp, Homo sapiens
  chr10:103454952-103454982
  hyper
cacatggggcggcgcgggccgagccctggg

SEQ ID NO: 7593 - DNA, 36 bp, Homo sapiens
  chr10:103536026-103536062
  hyper
gggcctggatgcagcccggggcgggggcggggcggc

SEQ ID NO: 7594 - DNA, 141 bp, Homo sapiens
  chr10:103543155-103543296
  hyper
agccttcttcaaactccgcccccgacacgcacaaagccggggaccctcggccagttccggccccgcccattaaaggagacgcacagtcctggaaaagaaaaggcgccgagaccccgcagccctacccggagcccgcagctt

SEQ ID NO: 7595 - DNA, 32 bp, Homo sapiens
  chr10:103576003-103576035
  hyper
agcgagactccgtctcccaaaacaaaaacaac

SEQ ID NO: 7596 - DNA, 30 bp, Homo sapiens
  chr10:103601064-103601094
  hyper
gcgaagcctggcgcgcgcttcagcaccgcg

SEQ ID NO: 7597 - DNA, 30 bp, Homo sapiens
  chr10:103879812-103879842
  hyper
aggggccgagtggccgcacgccccactcac

SEQ ID NO: 7598 - DNA, 30 bp, Homo sapiens
  chr10:103912281-103912311
  hyper
ggagctgtgagttccgggcttggggcgggg

SEQ ID NO: 7599 - DNA, 30 bp, Homo sapiens
  chr10:104155270-104155300
  hyper
ggcttaacccccaccggggcttcccggatt

SEQ ID NO: 7600 - DNA, 61 bp, Homo sapiens
  chr10:104170201-104170262
  hyper
ctttttggctgtccacgcggcgggggagcagtgtggagtgtacccccatccaatccctgtc

SEQ ID NO: 7601 - DNA, 248 bp, Homo sapiens
  chr10:104170407-104170655
  hyper
cgcatgtgcgcatgttccgggagagcctgcgcgtggggcctggggagggggcggtccccaggctgagtcacgagagcccgggcttccgtggcaggagccgggggtcggcaagccccagccctgccctccctccgactctggactccgtcgccgactgggtcctccatccttcccctccagcgacttctaccctgccccgccccccaccttgagcagctccctagggaagtcgccgccatcattgaggc

SEQ ID NO: 7602 - DNA, 30 bp, Homo sapiens
  chr10:104178934-104178964
  hyper
ccgcgccaagcacacggtatgggtgtagac

SEQ ID NO: 7603 - DNA, 30 bp, Homo sapiens
  chr10:104195356-104195386
  hyper
cgggggcggggtcccgctctggcttgaggt

SEQ ID NO: 7604 - DNA, 30 bp, Homo sapiens
  chr10:104220985-104221015
  hyper
cttttaattttggtcgctaagggcaagcgc

SEQ ID NO: 7605 - DNA, 30 bp, Homo sapiens
  chr10:104264834-104264864
  hyper
aggattgaaggggccgacagcttcccacct

SEQ ID NO: 7606 - DNA, 31 bp, Homo sapiens
  chr10:104409284-104409315
  hyper
gaaagccttcctttcccggctggcctggcat

SEQ ID NO: 7607 - DNA, 31 bp, Homo sapiens
  chr10:104951847-104951878
  hyper
cctaaagccttctctacgcaataacactaag

SEQ ID NO: 7608 - DNA, 202 bp, Homo sapiens
  chr10:105036456-105036658
  hyper
ggaaaaacacgacctcgccctcgggaaggctttctgtgcgcctcacctcaggatgagggtgggtgtaggggacacctcccagaaacccctaacctcccagtcggttaaagaagaggggatagggtcaagggatgcgacagagctgtgtggtttccggatgggaaacctcagtcgtttaggcacccctccgctcgagtcactt

SEQ ID NO: 7609 - DNA, 182 bp, Homo sapiens
  chr10:105036700-105036882
  hyper
cgactccgatgcagatggccctgtcccggcgccccaggtcgtcgcgcgcgcagctgcggtagtcactgcgcctccccgcccccactcctggatgccccccttccctctcccggccagactctgagcaggagctccgcccccagcgcgccgccccagccccggcgccttaaaagccgggcgca

SEQ ID NO: 7610 - DNA, 998 bp, Homo sapiens
  chr10:105036893-105037891
  hyper
cgccctgcctgccgcacctctcctttcttctgtagctcgcgttgaagccgcacgtccggccccgatcccggcaccatgagcttcggctcggagcactacctgtgctcctcctcctcctaccgcaaggtgttcggggatggctctcgcctgtccgcccgcctctctggggccggcggcgcgggcggcttccgctcgcagtcgctgtcccgcagcaatgtggcctcctcggccgcctgctcctcggcctcgtcgctcggcctcggcctggcctatcgccggccgccggcgtccgacgggctggacctgagccaggcggcggcgcgcaccaacgagtacaagatcatccgcaccaacgagaaggagcagctgcagggcctcaacgaccgcttcgccgtgttcatcgagaaggtgcatcagctggagacgcagaaccgcgcgttggaggccgagctggccgcgctgcgacagcgccacgctgagccgtcgcgcgtcggcgagctcttccagcgcgagctgcgcgacctgcgcgcgcagctggaggaggccagctcggctcgctcgcaggccctgctggagcgcgacgggctggcggaggaggtgcagcggctgcgggcgcgctgcgaggaggagagccgcggacgcgaaggcgccgagcgcgccctgaaggcgcagcagcgcgacgtggacggcgccacgctggcccgcctggacctggagaagaaggtggagtcgctgctggacgagctggccttcgtacgccaggtgcacgacgaggaggtagccgagctgctggccacgctgcaggcgtcgtcgcaggccgcggccgaggtggacgtgactgtggctaaaccagacctgacctcggctctgagggagatccgcgcccagtatgagtccctggccgctaagaacctgcagtccgcggaagaatggtacaagtccaagtttgccaacctgaacgagcaggcggcgcgcagcaccgaggccatccgggccag

SEQ ID NO: 7611 - DNA, 149 bp, Homo sapiens
  chr10:105037955-105038104
  hyper
cgcggggccaacgagtccttggagaggcagatcctggagctggaggagcggcacagtgccgaggtagctggctaccaggtaagggccggggctgggcgtggggaggggtgccctgccctcttccgcgcgtaccctcttcctctggtaaa

SEQ ID NO: 7612 - DNA, 30 bp, Homo sapiens
  chr10:105615663-105615693
  hyper
cagcgcgcagccagcggcctggcgcagcac

SEQ ID NO: 7613 - DNA, 30 bp, Homo sapiens
  chr10:105726673-105726703
  hyper
aaatgagaaacaatcgtcagggaccgaaga

SEQ ID NO: 7614 - DNA, 125 bp, Homo sapiens
  chr10:105992072-105992197
  hyper
cgccgccgcggggctgcgggccgcgacgccgctgctgtgtacacccgtatcccggagaccgtaagccccgcgcccattggctctgcgctttggcccgctcccttctgagccgagcagattggtgg

SEQ ID NO: 7615 - DNA, 6 bp, Homo sapiens
  chr10:106398825-106398831
  hyper
cgcgcc

SEQ ID NO: 7616 - DNA, 30 bp, Homo sapiens
  chr10:106399242-106399272
  hyper
tttctttcctctccgcgcattcccctccct

SEQ ID NO: 7617 - DNA, 1420 bp, Homo sapiens
  chr10:106399497-106400917
  hyper
accgcagctcgaggtcgtctgtgggtttagctcatttcccttcagcccacctgaagtctccttcttcctacggtcacgaaggatctcagctgcaccaagcgcgcaggctacactcctgcagtagcggattggggaccagataagcccacgcggctcccgcctgagtaccctcttaactggcggccgacactttgaaacaattgagtccgttcagaaacggactggggagagtgagggcacgacctcaaaatcctaggcagcaaaatgaggtctggatcctccctggaagaacagacatctcgactactctctcgccccacctctggccgggaggtcggggcaaggagaatccctcaaccgagaagatctggcaagtccccgatcccaccggggccttccgcctcttttccctcatcccctaggaggctttatcaggttctaaccgcttgtagtgggggccgtgggtgctcggggcgccaagaggagggggctgccgagagcggcctgcctagttctcagcattgcctctttgaccactcgcaggctcctggaaatgcaaacacagcccgtgcgtgatccgcacgcgaccaaaagccgagcgcacacctcccgcccccgccccacttgccatcgctcacactaacgtgcacacatgctcgtgcaaacgcgcacgcacggaaccgcgcgccccctcacacccagccgcgctcccggcccggctcagccaggtgcccccacgcggcagcgcccggtctgcccgccggccccctgcgaacccctcgcctcacgcccgcctgcctgcgcgcacgcacgcgcacgcacgcattccccacgcccccgcgcgggggcgcaggccttgggtggcggggtttggccgggagccggccgggccagggagcggcgagcagagtccagggtgcatcccgcgcttggcttccgtgcgcagcctccccgcgcggaggcacctggctccctctcggctctagaacgcgaacagttggcgttgagcacacaactcctcctccttctcccccgagacccctgtaccctccccgcgcgccatctcccgcccctcataacaggcccgaagagtaaacccccaaacgcgtccagaagcggctcccaactcttcgccgggagcacgttggaggctggatttcggagagactcgggattggggtctattgccggcccctcctggatccggcttgattttcatattttaagaagattttcttattacctttgattactcctttttaccaaatttctggaggagctcagtggggaggattggggggaatctgattttaagaaagaaagcaccgaaggggcaattattaattttcctcgggtttggaatcaccctctggacaagagaacgggcgagcgggagctaggagggaagagtggagaggac

SEQ ID NO: 7618 - DNA, 110 bp, Homo sapiens
  chr10:106401322-106401432
  hyper
gtgctggggcgccgggccggaccagagctgctgccccagcagggcggcggcagaggcggtgagatgcaggtggaagccggagggacatcaccggcaggcgagcggcgggg

SEQ ID NO: 7619 - DNA, 680 bp, Homo sapiens
  chr10:106401510-106402190
  hyper
cggggacgcctgggccactgctccggccgatggttccagaggaagccgtccccttgctaagggttcccgggaggaggtgaaggcgccgcgggctggggggtcggcggctgaagacctccggctgcccagcacctccttcgcgctgaccggggactcggcccacaaccaagccatggtgcactggtcgggacacaacagcagcgtgagtacccacccggcggcgggtccgcctgtttcctgacaccgaaggggaatgggggggtgggtgggagcgagggacagatagttgctcgggggtcgaggcgggggacgcctcgacttttcgagataacaggtttgtccgattccccccacgcccccaacaggttaacggagtttgttgttagacgctgtgtgtgtttgtttactggagaccctaggcttcggccgccgggaggggagtggaggaaggggcttcttaaagatgagtgggggagggatctgtgctcactttctccaatacttggcttggagggtcagttttcctgtttgcggggtgcttgaattcttggatgagaaaaagggctgacttggggcgggagccgctgaacagaccgattcctgcggctgccgggctccccctacccccaccccacccccaccccccctcccgtcacgcgaaagggaacccggaaggccat

SEQ ID NO: 7620 - DNA, 561 bp, Homo sapiens
  chr10:106402271-106402832
  hyper
cggccaagtcggcccccagccttggccttcaggtaaccccggttcctccttcaaagtccagggagcggccctggaaagccgtagcagaggccgtaaaaaaaagtttaaagcgtgaagcgaaattccacacccatccagcgctcatgccacaccgctcgccctcacgcacgcacaggcacacggaagtcgctcagcagaaaactctcgacttcaccattgcgtcctgcgccacaaacggctccctgagcggagttgggtgcctgagcttcctgcacacctctccacccgcttttccccgccaccgggttctcctggacaaggatgtaccgagaggtggcgtcgttgagcccggtctggcctactccggcattccgaactgggcgcccgactgagcatcgcgcctgcctggcagctgcagcggcccgcagcgcgtgcccggaggggctccccctacctcgccggcacccagcgctgtgcagccaagcaaagaaaaggcgggggacaggttcccaccatctccccgacttccctccctcccgcggtccctactagagccagatt

SEQ ID NO: 7621 - DNA, 131 bp, Homo sapiens
  chr10:108923766-108923897
  hyper
tgtgctgagtctcccgtcagcgcaaacgtggtgctggtcagtctcagctcctccatccggaagcgggtggctttgtccgggtcccgctcccgagtcccaggctcctgctgccctccatctcttagcactcc

SEQ ID NO: 7622 - DNA, 114 bp, Homo sapiens
  chr10:108923945-108924059
  hyper
cgctccgctccgtctcctccggccggagcgtgcagcaaccgccatggatgccccagtgccccgagcccgctccagggatagcgctcggtccccgggggccactgagaacagggg

SEQ ID NO: 7623 - DNA, 55 bp, Homo sapiens
  chr10:108924345-108924400
  hyper
cgctggcggctgtggggggccggcgctcaggaccccaactccatccaagttgcgc

SEQ ID NO: 7624 - DNA, 32 bp, Homo sapiens
  chr10:109674175-109674207
  hyper
cccactttcacactccctccccgcttcgctcc

SEQ ID NO: 7625 - DNA, 117 bp, Homo sapiens
  chr10:109674377-109674494
  hyper
cgcccccagtcttcagggactttgcgctcccgcaggctcctgctcacctctcccatcgttgggcgctggtggcaccccaggaggagagaggagcagcaggagcccggtctcgcagtg

SEQ ID NO: 7626 - DNA, 30 bp, Homo sapiens
  chr10:109675079-109675109
  hyper
cacagcagaggctgcgtgtcctggctgaga

SEQ ID NO: 7627 - DNA, 30 bp, Homo sapiens
  chr10:110671594-110671624
  hyper
ccctgcagatggtccgcttcagctactccg

SEQ ID NO: 7628 - DNA, 30 bp, Homo sapiens
  chr10:110671973-110672003
  hyper
ccaagagaggtccccggggatctcagttgg

SEQ ID NO: 7629 - DNA, 168 bp, Homo sapiens
  chr10:111216404-111216572
  hyper
gctgcaaatgggtagctttgccggggtttctctcttgagctccaggcactctcaaggatccggttcatgtcttcgccctggcccgcttggtatagggggcgcacaggaagaggccaagaagtggaaagaacctcatctcgatgtcccaagtgacaaagcccccggggc

SEQ ID NO: 7630 - DNA, 157 bp, Homo sapiens
  chr10:111216610-111216767
  hyper
cgcagacgcccggatgcggaggacccagagcgctgcgcagctgaggagcacctggggagccaccgccggcgccaacttttgccatcccgggagccatagcggcagagagggggtcccggacccgaggtggcagcgaggggctctgctttggcagctg

SEQ ID NO: 7631 - DNA, 22 bp, Homo sapiens
  chr10:111217161-111217183
  hyper
cgcagcttatgccctggcttgg

SEQ ID NO: 7632 - DNA, 40 bp, Homo sapiens
  chr10:111643944-111643984
  hyper
taagatgttaaggggtcgcttgtagcgggagggaagagct

SEQ ID NO: 7633 - DNA, 602 bp, Homo sapiens
  chr10:111767197-111767799
  hyper
cgaggctgactcaaagcggcggctcagcctcgggagtaggagtagggggctcgctcatttagggcgggagacatttccgaggcgcccctcctccccttcgcggtcgggtttctatcggggtcgtttccccctctggccctccggggacgccgcggattcgagctgcacagtcagaagaggacgttgaaaaggcgccaggcagccgccccgaaccaggccctcccggctgccgggcctgcaggcccccaccgctgcggcttcacggacttagagcttgagggcgcggagggggctgcgggggcgggaccaggactcccgaggggcgctcggggcggggccagagagagctcggggctgccagaggcgaggtcttgaggaggcggggccgggaggcttcggagcccaagaggcggggccagaggcgtagggggctgcgaggggcggaccttgggggcgtgaccggggggggcgcttggggacctaggggcggggcgttagggggcgggaccaagggacgctcgaggggcgctcggctagtcccgccagagcgcgagccgccagcccgtaacggtcgccagtgtgaggggcgggagggaaagaag

SEQ ID NO: 7634 - DNA, 30 bp, Homo sapiens
  chr10:111768408-111768438
  hyper
agcttaggtgaccccggggaccttaagccc

SEQ ID NO: 7635 - DNA, 49 bp, Homo sapiens
  chr10:111968982-111969031
  hyper
aactaggcagacagaccgacagatagggggaaaccgggatgtttaatgt

SEQ ID NO: 7636 - DNA, 47 bp, Homo sapiens
  chr10:111969324-111969371
  hyper
ttctcgcctgttttcccggagtgcctgggttgcgagaaaggcgcatc

SEQ ID NO: 7637 - DNA, 30 bp, Homo sapiens
  chr10:112065001-112065031
  hyper
aaccactgcttttccggggcggtggtggtg

SEQ ID NO: 7638 - DNA, 978 bp, Homo sapiens
  chr10:112257499-112258477
  hyper
cgccggcacccgccccgcgcgtccctcgcccccgctgccccgccccctgcagggcgtggccacggcccgaggggcggggaaacacccatatttggccttatatgggcagccgcgtcacggacggcactcattcacataaaacgctgcgcggccggcggaatccccggcttctagggcggcgagcggccgggctggctatcgagcgagcggggcgggaacgcggagttgcgccgccgctcgggcgccgggctccgtcgcggccgcagccccgcgggtcgccctcccgtgcctcgcccgcggacaccctggccgtggacaccctggccgtgggcacccgcggggcgcgcggcgcggggccgctggccggcggcggcggcggcatgaaggtcacgtcgctcgacgggcgccagctgcgcaagatgctccgcaaggaggcggcggcgcgctgcgtggtgctcgactgccggccctatctggccttcgctgcctcgaacgtgcgcggctcgctcaacgtcaacctcaactcggtggtgctgcggcgggcccggggcggcgcggtgtcggcgcgctacgtgctgcccgacgaggcggcgcgcgcgcggctcctgcaggagggcggcggcggcgtcgcggccgtggtggtgctggaccagggcagccgccactggcagaagctgcgagaggagagcgccgcgcgtgtcgtcctcacctcgctactcgcttgcctacccgccggcccgcgggtctacttcctcaaaggtgagcgctcggggtccctgccacgctcgcccctccggcgcccccgggtcccctccctgcgccggggcgccctcctacaccctgggaccgggagagtcaccacctgcaggagtctgcaccctgtggcttgttgtgcgcttgggagggcactgcaaatgtcagcactcagagctccccctcttccccacccgcgttcctcgaaagcgcccggcagcgggt

SEQ ID NO: 7639 - DNA, 142 bp, Homo sapiens
  chr10:112327447-112327589
  hyper
attttgtttggctgaggggagcgagcggcgctttgggggaggggtcgcgtaggcgcctcacctgaccctgcggccgtgcggttgctgctccggggcaggtctccttccaggccaggggcccggaatcatgtacataaagcag

SEQ ID NO: 7640 - DNA, 77 bp, Homo sapiens
  chr10:112328694-112328771
  hyper
ggtgattatccagggttttcgaagttacagagatcaaacaattgtagatcccttcagttcaaaacataatgtgattg

SEQ ID NO: 7641 - DNA, 40 bp, Homo sapiens
  chr10:112333463-112333503
  hyper
gtgggcagaaatggatctggaaaaagtaactttttttatg

SEQ ID NO: 7642 - DNA, 69 bp, Homo sapiens
  chr10:112335092-112335161
  hyper
gcaattcagtttgttctcagtgatgagtttagtcatcttcgtccagaacagcggttggctttattgcat

SEQ ID NO: 7643 - DNA, 73 bp, Homo sapiens
  chr10:112337177-112337250
  hyper
ggaaggtactggtcctcgtgttatttctgcttttgtggagattatttttgataattcagacaaccggttacca

SEQ ID NO: 7644 - DNA, 81 bp, Homo sapiens
  chr10:112337591-112337672
  hyper
gatcgataaagaggaagtttcacttcgaagagttattggtgccaaaaaggatcagtatttcttagacaagaagatggtcac

SEQ ID NO: 7645 - DNA, 80 bp, Homo sapiens
  chr10:112338384-112338464
  hyper
ggaaaaatgatgtgatgaacctccttgaaagcgctggtttttctcgaagcaatccttattatattgttaaacaaggaaag

SEQ ID NO: 7646 - DNA, 119 bp, Homo sapiens
  chr10:112340660-112340779
  hyper
gatcaaccagatggcaacagcaccagattctcagagattaaagctattaagagaagtagctggtactagagtgtatgacgaacgaaaggaagaaagcatctccttaatgaaagaaacag

SEQ ID NO: 7647 - DNA, 177 bp, Homo sapiens
  chr10:112341679-112341856
  hyper
gagggcaaacgggaaaaaatcaatgagttgttaaaatacattgaagagagattacatactctagaggaagaaaaggaagaactagctcagtatcagaagtgggataaaatgagacgagccctggaatataccatttacaatcaggaacttaacgagactcgtgccaaacttgatgag

SEQ ID NO: 7648 - DNA, 82 bp, Homo sapiens
  chr10:112342318-112342400
  hyper
gctttctgctaagcgagagactagtggagaaaaatccagacaattaagagatgctcagcaggatgcaagagataaaatggag

SEQ ID NO: 7649 - DNA, 166 bp, Homo sapiens
  chr10:112343140-112343306
  hyper
ggatatcgaacgccaagttagagaattgaaaacaaaaatttcagctatgaaagaagaaaaagaacagcttagtgctgaaagacaagagcagattaagcagaggactaagttggagcttaaagccaaggatttacaagatgaactagcaggcaatagtgaacaaagg

SEQ ID NO: 7650 - DNA, 123 bp, Homo sapiens
  chr10:112343597-112343720
  hyper
gaaacgtttattaaaagagaggcagaagctgcttgaaaaaatagaagaaaagcagaaagaactggcagaaacagaacccaaattcaacagtgtgaaagagaaagaagaacgaggaattgctag

SEQ ID NO: 7651 - DNA, 215 bp, Homo sapiens
  chr10:112343939-112344154
  hyper
gattggctcaagctacccaggaaagaacggatctttatgcaaagcagggtcgaggaagccagtttacatcaaaagaagaaagggataagtggattaaaaaggaactcaagtctttagatcaggctattaatgacaagaaaagacagattgctgctatacataaggatttggaagacactgaagcaaataaagagaaaaatctggagcagtataat

SEQ ID NO: 7652 - DNA, 388 bp, Homo sapiens
  chr10:112349361-112349749
  hyper
gaaactggaccaggatcttaatgaagtcaaagctcgagtagaagaactggacagaaaatattacgaagtaaaaaataagaaagatgaactacaaagtgaaagaaagttagtatagactaaaatgtgcattaatgttttcagtaatgttcgttactagctgttatgtggtctttaagttacaagttaaccggtcaggcttgttttctgtattttgattctaaactgtatactgttaatgcatcctcatatgtgtttaaaattaaagacagtctactttttatttattagctacttgtggagagaagagaatgcagaacagcaagcacttgctgctaaaagagaagatcttgaaaagaagcaacaacttcttagagcagcaacaggaaag

SEQ ID NO: 7653 - DNA, 162 bp, Homo sapiens
  chr10:112350168-112350330
  hyper
ggccattttaaatggaatagacagcataaacaaagtgctagaccacttccgtcgaaaaggaataaaccagcatgttcaaaatggctatcatggtattgtaatgaataactttgaatgtgaaccagctttctacacatgcgtggaagtcactgctggaaacag

SEQ ID NO: 7654 - DNA, 143 bp, Homo sapiens
  chr10:112350747-112350890
  hyper
ggttattttatcacattgttgattcagatgaagtcagcacgaagattttaatggagtttaataaaatgaatcttcctggagaggttacttttctgcctcttaacaagttagatgtcagggatacagcctatcctgaaaccaat

SEQ ID NO: 7655 - DNA, 152 bp, Homo sapiens
  chr10:112352829-112352981
  hyper
ggatgctattcctatgatcagcaaactgaggtacaatcccagatttgacaaagctttcaaacatgtgtttggaaagactcttatttgtcgtagcatggaagtttcaacccagctggcccgtgctttcactatggactgtattactttggaag

SEQ ID NO: 7656 - DNA, 154 bp, Homo sapiens
  chr10:112356154-112356308
  hyper
ggtgaccaagtcagccatcggggtgctctaactgggggttattatgacacaaggaagtctcgacttgaattgcaaaaagatgttagaaaagcagaagaagaactaggtgaacttgaagcaaagctcaatgaaaacctgcgcagaaatattgaaa

SEQ ID NO: 7657 - DNA, 153 bp, Homo sapiens
  chr10:112357895-112358048
  hyper
tggattaataatgaaattgatcagttgatgaaccaaatgcaacagatcgagacccagcaaaggaaatttaaagcatctagagatagcatattatcagaaatgaagatgctaaaagagaagaggcagcagtcagagaaaaccttcatgcctaag

SEQ ID NO: 7658 - DNA, 160 bp, Homo sapiens
  chr10:112359410-112359570
  hyper
gcaacgtagcttacagagtttggaggcaagcttgcatgctatggagtctaccagagagtcattgaaagcagaactgggaactgatttgctttctcaactgagtttggaagatcagaagagagtagatgcactgaatgatgagattcgtcaacttcagcag

SEQ ID NO: 7659 - DNA, 109 bp, Homo sapiens
  chr10:112360195-112360304
  hyper
ggaaaacagacagttgctaaatgaaagaattaaattagaaggtattattactcgagtagagacttatctcaatgagaatctgagaaaacgcttggaccaagtagaacag

SEQ ID NO: 7660 - DNA, 110 bp, Homo sapiens
  chr10:112360778-112360888
  hyper
ggaacttaatgagctgagagagacagaagggggtactgttctcacagccacaacatcagaacttgaagccatcaataaaagagtaaaagacactatggcacgatcagaag

SEQ ID NO: 7661 - DNA, 543 bp, Homo sapiens
  chr10:112361393-112361936
  hyper
gatttggacaattccattgataaaacagaagctggaattaaggagcttcagaagagtatggagcgctggaaaaatatggaaaaagaacatatggatgctataaatcatgatactaaagaactggaaaagatgacaaatcggcaaggcatgctattgaagaagaaagaagagtgtatgaagaaaattcgagaacttggatcacttccccaggaagcatttgaaaagtaccagacactgagcctcaaacaggttggttttaaatttgaagtcttgttacaaattgctcagtatataaatttatttatatgaatacatattttctctttatagttgtttcgaaaacttgagcagtgcaacacagaattaaagaagtacagccatgttaacaaaaaggctttggatcagtttgtaaatttctccgagcagaaagaaaagttaataaagcgtcaagaagagttagataggggttacaaatcaatcatggaactgatgaatgtacttgaacttcggaaatatgaagctattcagttaactttcaaacag

SEQ ID NO: 7662 - DNA, 818 bp, Homo sapiens
  chr10:112362230-112363048
  hyper
ggtatctaagaacttcagtgaagtattccagaagttagtacctggtggcaaagctactttggtgatgaagaaaggagatgtggagggcagtcagtctcaagatgaaggagaagggagtggtgagagtgagaggggttctggctcacaaagcagtgtcccatcagttgaccagtttactggagttggaattagggtaaaatacctttatattccattttcctcagagcattaccataatagaatttatagtatcttttgcaaatctgattggtgcattatatgcaagttacttttgaaagatggtggtgattctgccctttaggatattaactcataatatgtttatttttaggtgtcatttacaggaaaacaaggtgaaatgagagaaatgcaacagctttcaggtggacagaaatccttggtagcccttgctctgatttttgccattcagaaatgtgacccggctccattttacttgtttgatgaaattgaccaggctctggatgctcagcacagaaaggctgtgtcaggtacagtttcagtacagttttggttttgtatttaacaataagctggtaatatttgctgatgtatatatgaaaaaatcaaactcaggcagttttgaattttagtaagagtaaagatagttgctttttaaattttcagatctgctgaaaagaaatttgttaaagcacaattttctttttacagatatgattatggaacttgctgtacatgctcagtttattacaactacttttaggcctgaactgcttgagtcagctgacaaattctatggtgtaaagttcagaaataag

SEQ ID NO: 7663 - DNA, 405 bp, Homo sapiens
  chr10:112363987-112364392
  hyper
ggttagtcatattgatgtgatcacagcagagatggccaaagactttgtagaagatgataccacacatggttaattggaaaatactacctactggtttgggagatgtatatagtaatatgattctcatacccaggaactgtaaatttaaacctaaatatttggccaatagttttcagacttaaagcatcatagtccttttatatttgtctttgtattttataagatactctgtaatgtcatgtttgtactgatagtttaagaatttaatttcctgtacaactttttgtaaaatgttctgctcctattttaaatgttttgaaacatgctaaatattctttcctaattattttatcacttatactaccttttttatagcttcaattaaataatcggttttatgactaa

SEQ ID NO: 7664 - DNA, 384 bp, Homo sapiens
  chr10:112403518-112403902
  hyper
gttacaatacaagtctgacctcggggcgagtccaggctttcttcccctcagggtcgggtgcctcaagagccagtggcgctggccgggctccagccgcgagcagatgccaggcccggcacactttgcacgggcgatgcgcgcggacgtcccgggcgcgctcggtccgcccggcttggcaggagctgcgagaggccgcgcgcaccgtccccagggacagccggaggactcagggctcccgggtggagcgagagcgcggcggccgaccgcgggctgcgtgtgtcgccttcctcacgcggtatgctgcgccgtggaacgctgggctacggaccctgagggtgcactgtggcgggtggcgtacgccgcgctccctccccgcttcctgcg

SEQ ID NO: 7665 - DNA, 632 bp, Homo sapiens
  chr10:112431814-112432446
  hyper
gactcttcttcctatcttgtccgatgacggctctcggaggctcctggttttgatgtctggcattgcttttacccggtgggcttcagggagccgtccctgccgcgctttgcgtttctccgcgcacttggacagggttctgccacgagggaggcgatgcctggcgccgcgggtgggggcagtggtgagacttcggcccctggtggccggagaggtcgcagcacttgtcagtttatggctccctcggctttccccttcttaatccgctttctgctgagctctccgaataattcaaccctcgtgtttgaaaactagaagcctgagaggtctcagcgagacagtcaaaggggaggctcccctcgccgagtgtcacccgggaccctgcgtccccgctctgcagagaccttctctccgggctgctgccgtcctccctcgcccggcggagcttccgtgatcgtcagccaaagcccccggggcggtgcgccgcaggcggtcttcccgggtgttcgcggaagctgcgcgctcgcgcccccacggttctccagcgacccctgaagatgcttccgtccgcggataggggacgtttcagacctggggtgggcacagcggtccccggtgagatggtcttttctcct

SEQ ID NO: 7666 - DNA, 30 bp, Homo sapiens
  chr10:112631243-112631273
  hyper
tcacttggagtgttcgcctaagcagtttct

SEQ ID NO: 7667 - DNA, 30 bp, Homo sapiens
  chr10:112632666-112632696
  hyper
gtgagaactcgctacgtagccagcaactgt

SEQ ID NO: 7668 - DNA, 30 bp, Homo sapiens
  chr10:112837225-112837255
  hyper
tcggggatgtaaggcgacagacataggacc

SEQ ID NO: 7669 - DNA, 30 bp, Homo sapiens
  chr10:113005648-113005678
  hyper
gggtatccccttcagtccacagaggaggga

SEQ ID NO: 7670 - DNA, 30 bp, Homo sapiens
  chr10:113134325-113134355
  hyper
ttacacagctggggctatctgaggtttgag

SEQ ID NO: 7671 - DNA, 92 bp, Homo sapiens
  chr10:114135996-114136088
  hyper
gacatggcctgactcgggacagctcagagcagggcagaactggggacactctgggccggccttctgcctgcatggacgctctgaagccaccc

SEQ ID NO: 7672 - DNA, 10 bp, Homo sapiens
  chr10:114206783-114206793
  hyper
cgattcccag

SEQ ID NO: 7673 - DNA, 34 bp, Homo sapiens
  chr10:114709863-114709897
  hyper
tccctcctccctctcccggcgcccgaaaggatca

SEQ ID NO: 7674 - DNA, 30 bp, Homo sapiens
  chr10:115803527-115803557
  hyper
ctgcaggagcctgacgcgaggccccggggg

SEQ ID NO: 7675 - DNA, 694 bp, Homo sapiens
  chr10:115804794-115805488
  hyper
gccaacgggcgtgcgggtaagcggcggccctcgcgcctcgtggccctgcgcgagcagaaggcgctcaagacgctgggcatcatcatgggcgtcttcacgctctgctggctgcccttcttcctggccaacgtggtgaaggccttccaccgcgagctggtgcccgaccgcctcttcgtcttcttcaactggctgggctacgccaactcggccttcaaccccatcatctactgccgcagccccgacttccgcaaggccttccagggactgctctgctgcgcgcgcagggctgcccgccggcgccacgcgacccacggagaccggccgcgcgcctcgggctgtctggcccggcccggacccccgccatcgcccggggccgcctcggacgacgacgacgacgatgtcgtcggggccacgccgcccgcgcgcctgctggagccctgggccggctgcaacggcggggcggcggcggacagcgactcgagcctggacgagccgtgccgccccggcttcgcctcggaatccaaggtgtagggcccggcgcggggcgcggactccgggcacggcttcccaggggaacgaggagatctgtgtttacttaagaccgatagcaggtgaactcgaagcccacaatcctcgtctgaatcatccgaggcaaagagaaaagccacggaccgttgcacaaaaaggaaagttt

SEQ ID NO: 7676 - DNA, 30 bp, Homo sapiens
  chr10:116064457-116064487
  hyper
cccctgcaggccggcggtacctcaagcttg

SEQ ID NO: 7677 - DNA, 30 bp, Homo sapiens
  chr10:116163145-116163175
  hyper
ggatcagagccctccgggagtgagattcct

SEQ ID NO: 7678 - DNA, 1158 bp, Homo sapiens
  chr10:116163455-116164613
  hyper
gcacccgggacggcccgcccaccggggtttggcggagatcctggcccccgccaaacccaaagctcgcccagctgcgcactgagctaagccctcgggtccggacgcctccaggagctccacctgccgggcactccattcggcccccgaccctcgcatccctcctttcttggtgtgggggagcaaagaagggcttggagagaaacgatgacccgaacggcaggacgtttggggaggccccacctagcccggggagggtctgcgcgcccactccactgcccaagcgctttgccgggagcaggaagcccctagcccggcgggcgcccgggagaaaggactcaacagcccgaccctttgcccccagcagctcagcacggttcccaccttcttcggggcttcctcggccccaggcatctttcctgtgcggcgggactgagggtggagtggggtgccgggctcaccctctctcctgcaacaggtgagaagccccgccacgccccccactgacgaccccctccttccgcgcccgggaggatcaaagggctcgggccgcagcagccacctaggagcccacccgcccagtccgcggcgccgctgtcgccccctcttaggcccaggtccgggctgggtgggggcagtgggctctgcttatcccgagtcctggcaagacgagtcctagccctgccctccgcgtcgctgggcgaaagggagtgggtgtgcgccgcgcgaggaacccgcgccctcacctttgtaccgctccatcggggccacggagtgcgctcctcgcggctcggcttctgcgctgctctcccggcgctcggctcagcgcccaggccgccgcgctggcccctccccgtgaggtcacgctcgcggccggacctcctggcggggccgccgcgcccagggtcctcggacctggcccccgccagggctcgcccccagcgcccctgtcccagcgcccctgtcccagcgccggagaactccggcccgccgaggctgacagtcggctcttgagtcggtgcgcgcccgcggccccgctcgccgcccccggccgccttggcactcccttcacgtcttgactccgggggcgtcgagagggaacgagactgggacgttcccaaactctgggggaggctccgggaggccgggcttgggtgggcc

SEQ ID NO: 7679 - DNA, 900 bp, Homo sapiens
  chr10:116527433-116528333
  hyper
ggatttcttccatagccgagctgcaaaatggtaactagaaaggaggaaaaaatacctcttcctccctcctggccagcccttccacagctcccggcagggcagccagcgcgagcccatcccccacgcctcccagcccagacgcgcggcgggcacaggtgagcggggcgccgactttggcccttaggctcgcccacatccggggatcaaggtcaagggcgagggcttccttcccctgcccccggcccccggcagccccgagcccggggatccgctgccaaagtttcaggccgggctggggccggcgcggctgtcgcagcccccccgccctcccgcacctgttcggcccgccggggtcagtggacggtgcccacctggtccccactcacctctggcggacatggtgcaggcagcgggagccggagctggaaggcgttggacagccccgcagggcgcggggaagaaggcagccccggagcgcccgcccggccccggccccctccggctcccggtgcggggacgccgcccgcaggacacctggccgcccgctccgcgcagcaaggccgacgggcggggacgcagcggccgcagggacccgccgggcgcggcagcgctgacacccgcggccgcgctgggcggggcgcgcctcccccgccccgagccgccggggcccacccgggtccagcagccgctctgccgcggcgccgggcggggctctgtccccgaggaacgagggtctgcgtcctcccctctccccgcccgtcttcttaataagaagaaaaataacgtgggtgctccgaatggctctccagctctctggtcccagagagagaaagcaagaaagggccgttcgttccttcccctaagtgatgcccttgacaggagagcgaagaccacggtcgc

SEQ ID NO: 7680 - DNA, 30 bp, Homo sapiens
  chr10:116852455-116852485
  hyper
acgtggtcggactgcggtgcctttaaggct

SEQ ID NO: 7681 - DNA, 30 bp, Homo sapiens
  chr10:116853103-116853133
  hyper
gcggcgctcggagccgaggcagttggcgcg

SEQ ID NO: 7682 - DNA, 31 bp, Homo sapiens
  chr10:117350835-117350866
  hyper
ctccaaaattatgaatcttggggcttatata

SEQ ID NO: 7683 - DNA, 166 bp, Homo sapiens
  chr10:118031382-118031548
  hyper
tccttccacatccaccacacccgcgccccaattttggtgcggagggcggggtgggctgctgcaagcgaccctaggaaagactcagagggtaagaaagcccgcggcgggcctcgacttacccaagagcggcagcgcgaagtacagggtcgccaggaacatggtgccg

SEQ ID NO: 7684 - DNA, 605 bp, Homo sapiens
  chr10:118031624-118032229
  hyper
cgatccccggacagctgtgctgctctggccgcccaaagttcagctccatccagtgaaagaggaaactccgggtctggcagcagccaccgccgccggcgactcagctccgggatggcgagggcgggaggcggttccgcttttaggggttcaggtccgacccaacctggaagggagggcgcgctttgagatgagagcggagagcgccggagactccccccacagaaccctctcccctcccccgttcccgcctttggggaatttccaacaccggggtgaggacccacccccacccaggtcggggtgcatgtgcgtgttttccaggggccgctgacacggggatggaggtgagggctggagaggtctgaagagggttcctaaagtccaagggggtgtctgttgggttcaacccgagacgctgaacgcaagcaaataaataaataaacggtactttccgagcgtcgcgagcggagcctgcagctgcctggagtccgagccctcggtggcggcggcggcagctccctagccagccctggcgccgaaagagccccttctcccgggaagttggcctccccctcctcgcgtcagccagcgagctcgctcagccg

SEQ ID NO: 7685 - DNA, 773 bp, Homo sapiens
  chr10:118032412-118033185
  hyper
cgctcctctcacactctcgcccggtgcccaggactcgggcgcttccgcaccccagcccagggcgagcgcgccggcccgcagtcccggcgtgccccggcaggtgcagcccggcgccacgagcgccccccgggccctaaagttgggagacgccagcaaaaagaaaggggtggccggaggaggggggaagaaggagtggggaagagggacgggaagcggcaatgggttcccaaacagaacgaaaaaaactccaaatgccaccaacctggactcaaccgaccgcgtccagctgcggcgaggagccagtttgtttatttacttatttattctttcagggcaatggtgtccccgccccctccttccctttccgggctcactttatctgcgctaggaaaagaaaaaaaagaaaaaaaaatagatgcggtaatcttcgagagctcgaagggccgagttgggccaggacgatttccgagcagagccctcggctcggatgctcgttagggatgttagtggttattggaagcggcgcggagaatggcgtgttccgaggccagatttcttctggccagaggaccctcggcctgctcctgttcccgccgctccgcagctccagctccctcctaagctcgcccgccaggcagccgcagctgcacacgcccgcttgcggtgggacccgcggccggacccgtactcgcgcacaggacacgcagtgttctgcagccggccgcgggtgctgccagacacacacactctctctctctctctctctctctgtc

SEQ ID NO: 7686 - DNA, 749 bp, Homo sapiens
  chr10:118033244-118033993
  hyper
cacaagggctctttcttcttagggcaatcgagccagacccttcttcggaacacaaagttttcccccacgtcactagtggctgtgattcaagacttggtgctttcaagacacactcagacccaggacgctggagcggcgatcctgggatgcgcccatccgttcgtccacgccagcgcgtgcacactcacactcacacgcacacatgcacacgcagtctctacctctctcctggagctccgacaaggagacaaaagcggagcccccagcccactgcatttaaacccggccagacctggctttagaaaatttataagctgacctccattttggctgtttcgagagtaaattaacaacaacaaaaaaagcctaacatgtacacagcccttcgccccaacccctgggaccgctggttcccagtcgtgctgctcaccccccgccccccacgcctgacacacgctccccttcccgcacgccggggggcgcccggggcaccgaagtctacactgggtcgggagaccggtctaggagccagccggcagtgctcgggatctttgctgatgtccaagttcatctctcggggagaccgagtttgaatcaaatctgcgtgcgcccagctgtcaaatctgcaaacctatcacgccagacaatgggccgccgcggaggacagacaagaatggctcattttgatcgaggggggtaaattgaaaagggcacgggctttggttgaagtttgaggcccgggtgtcagg

SEQ ID NO: 7687 - DNA, 108 bp, Homo sapiens
  chr10:118034142-118034250
  hyper
cgccccaaacccgggggacatcctacggatccgcacttctcttgtgctgtacgcgtgttcctccagggtaagtatgaggagacggacgccctcatcagacacccctcc

SEQ ID NO: 7688 - DNA, 31 bp, Homo sapiens
  chr10:118764376-118764407
  hyper
ggaggacgcttctctgcgggtgacggagcta

SEQ ID NO: 7689 - DNA, 114 bp, Homo sapiens
  chr10:118891019-118891133
  hyper
ttcagcttcaggcacagtacacgagtaggggcagtaaggcctggctagggccggtgccgcacgggagctgcgggtccctgcaacacccaggtgtgcaggcgctacaagaaggag

SEQ ID NO: 7690 - DNA, 146 bp, Homo sapiens
  chr10:118891179-118891325
  hyper
cgctttagaagagcgtgtccggaagtgtcctccccggccctcctcgcttcccaagatttgtttgcaacgtctacacccgtcaccaccgcataagcaccagggtgaggaggtctctttgcaggaattaatatcgatttcagtctcct

SEQ ID NO: 7691 - DNA, 82 bp, Homo sapiens
  chr10:118891579-118891661
  hyper
gacagatagagaaatcgagagcgaaacactcaaggaagtggaacaaatcgtcgtagccaggcgtctctgcctctccggaaac

SEQ ID NO: 7692 - DNA, 15 bp, Homo sapiens
  chr10:118891715-118891730
  hyper
cgcactataggggct

SEQ ID NO: 7693 - DNA, 509 bp, Homo sapiens
  chr10:118891947-118892456
  hyper
tacccgcgtttgaatcgttcattattttcttcactatttgcctagaaaaaaaaaaaagatgaaaaagagggggagagtttccgacgtaaataatttacaataaaattactattttaaaaaagtgtttttcgcttgcttcagatggatgaatacattctagacactgcggcacctcgcagtctgggtctgtgattttggttaaaatgtgggtggccgtggctgtagggacgatcgccgctgcgcagggtaaggaaagagggtgtcgcggttcgtgttctgatttgggaccactgaaaccctaagactggggaggcgaggggagtgtctttcctatcaatcacacaagacgctatctggactccgagactactgctagaggaggcccgaccacccagcggcgtccctgcctccccttccgcaaagaactgctcagaaatccagacgtttcctgcgtgcaggaagggttttgtgaatccgggtgtttgggagaggaggcaatgagtgctgac

SEQ ID NO: 7694 - DNA, 79 bp, Homo sapiens
  chr10:118892517-118892596
  hyper
cgccggctgcgcaggctaccgccggcagccgctttgctctttcctggaggagtgggaagctgtcggccaccgccccgaa

SEQ ID NO: 7695 - DNA, 221 bp, Homo sapiens
  chr10:118892932-118893153
  hyper
accgcaggatttgcccgccaggaagctgtgttgtgtaccgactatcccgagaggtccgcaaagcggggcccaggggctcccacaagccctggtttccctggcaagaggaaggaacgtcctccttttttggtctaaagaaacctggaagcccctggggtctgcgcgcagttttcctctttcaaatattcctaggaatagtcggcagcggcagcagccgcagc

SEQ ID NO: 7696 - DNA, 74 bp, Homo sapiens
  chr10:118893506-118893580
  hyper
aaacacttaaaatcagtccagcgcttttttctcggccccttctttattgttggtccgggagtaaggctcgaagg

SEQ ID NO: 7697 - DNA, 146 bp, Homo sapiens
  chr10:118893679-118893825
  hyper
cgagcagcgagggcaccggcaggctgaagaggctgtggcccgcggccggggcgcctgcgtgcaatccccccggcccggcgggcccgggacctggagcaccgcccacagccggcgggtgcggggatgcagcgcccgctgggcccggg

SEQ ID NO: 7698 - DNA, 37 bp, Homo sapiens
  chr10:118894034-118894071
  hyper
cgagtccttgccctggtccttcttctgcttggtgcgc

SEQ ID NO: 7699 - DNA, 756 bp, Homo sapiens
  chr10:118896662-118897418
  hyper
gagatctgctgctggctggggcggcgccgggccggggcccggcctcgcagcctccgccgccggggctaagtgcacgccgcgccatccgagagcggcagagcagagcaccaaagcggcaaccgcggctccgtaaccaagcccagctgcctctcccggcggcagcggtcgggcaccgatcgcggccgtggggtcctcggcccagtgcactaactggcagggccgtagcccgcgatcggcagctgttctccggggctcgcgttcccccttgggtgcgctcagccctccagagcgcgggagtcccctggccggctcccggcaggtcgtccggcccttggagcgcgcacacctcctcccggagttttctgctcctttcccgggtcggaggccgcagcccgatgcccggccgcacccgcgcagcccctcatctccccccgcagcccggtcagcggggcccctccgggcgtggagggccgaggcccctggagagcgcaccggagagtcccaggcgcttgtccccagccggactcggggcggggagggccaacaactttctcccaagtcccagccggcactccttcccaccggcctgtgtcggcggcagcgcgcagctccggccccggagtcgaccccaaagaacgcgcctggcagccctgcccatccctacctcggaccaggatccggcggcagtaatccgggtccgctgcggaattggatttacttttgttacaatcctcagcagcgcccgacgctgagaag

SEQ ID NO: 7700 - DNA, 579 bp, Homo sapiens
  chr10:118897478-118898057
  hyper
cgactctccttgtgcgcgttcttcgagacccgggcagcctcggcgtccgagtggcatcgaacgtccattttgtctggtttcccgaacataggcaagaacaacaacaaaaacagaaaggaaaaaaaaagcaaaaaaaaaaaaaaggggggggggcggagaaggaaaaaaaaaagaggaaaaaggggacaaaacccccgacaacgcggcccgtacgcccggcccggcgacaggcaaggggcaagaatgaatgtccccgcggggaggcttcggcggccgcgcgcgggtcagcggcgacgggagagtggcgcgctcgccgagaggcggccagtctggtccaggatcctggtggagctgcggcgaggccgcctcgtcagcacccgcgtcctctgagcacgtccagtgtccccagcctggcgatcaggtagcgaacagcgcaactccgaaatgctgcggctcccgcctgtttctgagacggcgagttgtagttgtccgacacccggggggacgcacactcgctgttgcaattgattacgggtaatttcgcagcccccacgtttcggttacctcatgaatacacta

SEQ ID NO: 7701 - DNA, 317 bp, Homo sapiens
  chr10:118922606-118922923
  hyper
cgccagcctccgtctgctggccgggtccgggatccgcacccggagaggctgaaccgaggctgaaccgaggcggacgcagccccgggtcggtggctcgcctggccgggtggggtgggagcgattttctggcggtggcgtttgcaggaggggaggagacagcgccacccagggcctccccgagcactgccggccaggccgggctcgggggccggagtgagggtgcaggtggggctccgggttctgcttcttgaaggcggcggcggggcgagaaatgcaaccgcgtgggccccgcctgctccccccggtcctgtctttcc

SEQ ID NO: 7702 - DNA, 457 bp, Homo sapiens
  chr10:118922943-118923400
  hyper
cgcagccccctagtcgcgatgctctcaggtccccggcgtggaccagcacgtgggcccgggagtcgagtggggacgaaggcatgttggccgcctcaacttcctgcgccgacggctggggacgcggagaaccctctccgagctggggtccccgcctgctgggcaacctcacctcaacgtctggcctggcctggggccgcttggactcggcagcggctgcactcctacagagcccagacgcgccttctcgctttttcctttctgggccggggccctaaactcccggaactcgccgcaagaggagcgttgaaaacaaaagggacagcccaagctgtcccgcccgctgcgcccgaggagcatccccttggcgctgcaggctgtcgcctcccccagcacctggcggggcgggtgccaggctgggcctctagacggtttcaccgctgcttatcatttctccttc

SEQ ID NO: 7703 - DNA, 30 bp, Homo sapiens
  chr10:118925439-118925469
  hyper
cggcagattcgctgcgcagcactgccccct

SEQ ID NO: 7704 - DNA, 405 bp, Homo sapiens
  chr10:119000749-119001154
  hyper
cctgctcgcagggcgcggtgccggaggggagcgggcccgggggaggcagggaggcagggaggcccccagagctacgcgggcggggctgcggggaccccggggcagccggggcgcagggcgcagggcgcaaggtgcacggggccgagcgtgcagtttgggaggtggcacagttgggggcggcggggatcagggcagcgtcctgggggttctaggttgggtctccagattgggtccccgacggcgctcgcgggcgctctttccagggagcgcgggctctcgtggggacgcgctcgaggcaggtgagccgaggctggggcgcccgggggtgtccccggatgccggtgcgcgcggctccctgacccgcccttccgcggcctgggggacgggagaatggggggtccacgg

SEQ ID NO: 7705 - DNA, 185 bp, Homo sapiens
  chr10:119001328-119001513
  hyper
cgtgcggacagggcacccctgccccggcaccccagccccagcgccccttccccggcactccacttacccctgcgcggtcccggagctccgccaaggcccgggaaagttggagaactcgctttgcaaaaaagacatcccctccaggctgccgcgccggggctaggaggagccgcgttgtgtggctt

SEQ ID NO: 7706 - DNA, 309 bp, Homo sapiens
  chr10:119256045-119256354
  hyper
cagaaaatcaggtatacgggtctctgttttgttcactaaatcattccaagtgcctaggactctggctgacacatatttcctgctccagaaatatctcttggctgagtgaatgaacctcttcccccagcgagcgagcctgtcggccgaggagaccacgccataccaggattttccagcaggtggcagccgacgcacgccagagacagctgggcgcctacactttgaactcaaggttcttccaattaagtgcaagataaggagcttggagactcatcgcgtttggcttactcctgacgcagacttgcactg

SEQ ID NO: 7707 - DNA, 373 bp, Homo sapiens
  chr10:119293192-119293565
  hyper
gaaaagatctcaaacgaccagctcctcattggggtaaaggagtgaagagattatctctgatagaggtcaaactccaattgggaggagggcaccaattctgtaaatgacacccgagggcacactcaccaggttcactgcaagccctgagcgttttgcgtttggtgccccgagtgtaagcctaagtattctgtctccgacacgtaaaacaacttaaagtgccattttccaacggaggcatttagaggcaatttgaaaattgaaacgaatctttatatgcaagactggaacgttccagaggccctttaaagctgcggttagaaaggcagttagggaactcaatgatgggctggaaggagacgattgaacgcacagc

SEQ ID NO: 7708 - DNA, 55 bp, Homo sapiens
  chr10:119293927-119293982
  hyper
acgacccccagttcccgggtccgaggttctgggcgccagcggcggccaccgcgcc

SEQ ID NO: 7709 - DNA, 581 bp, Homo sapiens
  chr10:119294316-119294897
  hyper
cctccgaggcccaagcgggcttcggctgctgcgagtccccagaggctccctcgggcctcactcgcggtgtctcctccagacgccaggggcaggccacgaagccgagggctccgcgtggccgtgggagaagcggggtgcacggagccttcccgcgcccagacgccgaggggatgcaaacaggggagccgggcctggtatggccaacctccaggatcgaggggccccagaatgtgcgtgtggccgggggcgggggcagctgcgggggccagaactagagtattccttcgctctcccctgggggccgggcccccacgagttgcagcagagcccgtctgtaattagggcctcctggtccggcaaagctgcggctgctcccagagagagttggggtcttctcagggcccgcgatgggggagtggtcgtggtcagacccccgtgagccccttcggaaggtcccagtccctgtccattcttctgtcccgcagctctctccgcgcaggcggggcagagccggggaagaagacgctggacgaggggtcttggggccgcctcgctggctgcggttggaagcacccgttttc

SEQ ID NO: 7710 - DNA, 273 bp, Homo sapiens
  chr10:119294908-119295181
  hyper
cgcaggcgctgctctgtggccaccagcagaggtttcccggccgctgtgagtcgcccacgcgagcgacgtggggatacggggcgcacggagtctcagctgccgccacgcagcgcttgccctgcccgagcttcggctcactggcagcggcgaggccaccgaccaccctccgccttccagtcctaaactcggggctggagaccgcaggagctaaaccaggaagaagaaagagggcagggcctgaggccgggaagagcggcccgggggtcaacggtg

SEQ ID NO: 7711 - DNA, 226 bp, Homo sapiens
  chr10:119295682-119295908
  hyper
caagccccagcccagcccccacgtccagaaaatggggaagtattaaaggaagagacgattaagcccctgagagtgtggctcctgggacgccagcgtttcagaagtagcataggctcctagatggacgctgacaaacccaagtagcgccttacattgtcgggcgaggaccagactccaagttaaaaggccggccgggctatcagtggcagagagcagagcctcaaac

SEQ ID NO: 7712 - DNA, 479 bp, Homo sapiens
  chr10:119295951-119296430
  hyper
cgcttcgctccccatgctggtcctctgggaactcaggagccggtgcacgctctggtgggctcatagagatgtagctttgggggcgatgggaaggacttgccacgctcccacccaccctccatcccgagagagtgcaagggagacgcaactgtcttcatccctatcccgggctggcgcccgaactagagagtgtacttcttccctagctcctgcaccaccgtctgtgtgtacgtctgtctgtccctcccagtccttgctcggtcctaggctttcatttgaaggcagctgagggagaaagaaactgcaaacccctttggttctgtttccttgctttcaataatgaatcgagacagcgtgtgtgtggtgagggagtgacgagtttcaacgtgatgaaggagataaaacccgacggtggggtcctgccagtggctccatgcgtcactgaaacattgggtctcaaaacggatagatctccggag

SEQ ID NO: 7713 - DNA, 119 bp, Homo sapiens
  chr10:119296524-119296643
  hyper
cggagctccaagcagttatgctgagggcgccggtcccaggccgccttgctatgacacgggtttccagtgaagcccaagcggattccacggccccacatcaccggaggagccaggctgcc

SEQ ID NO: 7714 - DNA, 161 bp, Homo sapiens
  chr10:119296755-119296916
  hyper
cgggcgtcttcagccagccgcgagggggcgcggatctgagagagtcgcaccccgggaccccagctcttcctactccaccccaggcagggcccgcgcaggccgtccaaggcctgttctctgaaccacctgggttgggccgcgaaatatgggacctcaggcat

SEQ ID NO: 7715 - DNA, 187 bp, Homo sapiens
  chr10:119300883-119301070
  hyper
ccaccaataaacagagagcagcgccagcagcctggggatgtgatcataattatgccgccgcgcgagccaatggggacgagggaactcggtcctaaaatcatcccaaaaccgaaggcgagctcgaaaatgcggacacggcccgggaccggagatgcgatccgtagtcgttagttgcactgggtttgca

SEQ ID NO: 7716 - DNA, 127 bp, Homo sapiens
  chr10:119301300-119301427
  hyper
agcaccctcccagacagaaaacgctagagaccgtggggcgagagagggagagagttggaagcccactgctccggcggggtcggcagctcccggtctcaactcgcaaacgaacgagccgggtcaagaa

SEQ ID NO: 7717 - DNA, 190 bp, Homo sapiens
  chr10:119301759-119301949
  hyper
cggcgccggccagggactctgcagggaccggggtgccccggagggagtggtgctggtggaggaggaggcggtggctgagggggagtaggtggggaaagaggaggaggaagaagaggaggaggaggaagaagaggaggaggaggagaagaagaaactggaggaagaggaggaggcgaaggaggaggagaag

SEQ ID NO: 7718 - DNA, 109 bp, Homo sapiens
  chr10:119302046-119302155
  hyper
cggcggcgccgactccgttccactctcggcccggatccaggcctccgggttcccaggcgctcacctccctctgacgcactttaaagagtctccccccttccacctcagg

SEQ ID NO: 7719 - DNA, 192 bp, Homo sapiens
  chr10:119302221-119302413
  hyper
cgcactaattaggctcatgaactaacaaatcgtttgcacaacttgtgaagaagcgaacacttccatggattgtccttggacttagggcgccctgcccgccttttgcagaggagaaaaaacttttttttttttttgcctcccccgagaactttccccccttctcctccctgcctctaactccgatccccccac

SEQ ID NO: 7720 - DNA, 1661 bp, Homo sapiens
  chr10:119302458-119304119
  hyper
gaaaaaaaaagaaaaaaaattaccccaatccacgcctgcaaattcttctggaaggattttcccccctctcttcaggttgggcgcgtttggtgcaagattctcgggatcctcggctttgcctctccctctccctcccccctcctttcctttttcctttcctttcctttctttcttcctttccttccccccacccccacccccaccccaaacaaacgagtccccaattctcgtccgtcctcgccgcgggcagcgggcggcggaggcagcgtgcggcggtcgccaggagctgggagcccagggcgcccgctcctcggcgcagcatgttccagccggcgcccaagcgctgcttcaccatcgagtcgctggtggccaaggacagtcccctgcccgcctcgcgctccgaggaccccatccgtcccgcggcactcagctacgctaactccagccccataaatccgttcctcaacggcttccactcggccgccgccgccgccgccggtaggggcgtctactccaacccggacttggtgttcgccgaggcggtctcgcacccgcccaaccccgccgtgccagtgcacccggtgccgccgccgcacgccctggccgcccaccccctaccctcctcgcactcgccacaccccctattcgcctcgcagcagcgggatccgtccaccttctacccctggctcatccaccgctaccgatatctgggtcatcgcttccaaggtacgtgccacgtcgcggaactgcagcgcgccgctcccgccgcatccttcactgcccccggcctgctccgggtgggcgcttggcaaggcctgggcggaggttcctccggctcgcgggccagcgcgccctgttgggaaactaggcggcgcggggccgggcgtggtgtcgatccccagtctccgaagctacgactggtttggagtgatggcctgcgggccgcttgaccctttgggaaggggtgcgaacggagaagttgtcccccagtgcgctcgaatcagagcaggctgggctgtgcgtgcccggcgccgcggagcccagagcccgcgggatccccaggctcctggtaccctcggcaatgcccccaaccgtcctggctccgaggggcgcggacaggactcggccgccaggcttgctttcgactgcgttcgaccctgttcaccacccactttgcgccccttcagtccagacccgcggcttcttagtcttccaccctcttctggaggcgagaggatcctcgcgccccgggagaaaagtatgggatttgttttttctttcctgcttttcggaggcctggggaggggcgggaacccgtgcgggaggaaagctccagggcttggcgctctcgccgcgacctgcttaattggggcgccgagcagccacagcgggaaggcaggttcggtctggtttttgtttttctttctttctttaaaaaaaaaaaaaaagaacctggtcaggaaactgtcttagagggaaatatctgttcgtgtgttttcatttcttgcgatattttttatttgtttgtttttctctgggtacggggtgggaggaggagagttaaaacttcagaaaaaggagtaattagtttacggattggagtcagtaaaagacctacctccggcggcagccgatcaatactccgcggcttgtccattcat

SEQ ID NO: 7721 - DNA, 121 bp, Homo sapiens
  chr10:119304357-119304478
  hyper
ttagggctgcccttcctcattcgctatcagtcatgcttatggtcccctcaccagacccggagccgctgggatcttcctgcgttacagactgtcctggcggtgtctgcaagtcggtaacccc

SEQ ID NO: 7722 - DNA, 327 bp, Homo sapiens
  chr10:119304501-119304828
  hyper
cgtttctcttctagttctcgggagccgggagccccggagcccagttcgcgagaggcagcagcggctgtagccaagcacacccgccggccagatttctgtcccgatcgggcttcaacgactcgccccgcctctatacttttccggaggggcaataaaacaaataatttaaaaataaatctccatgaaaactctggagagcagcccgccgcctttccaccgtgggtcaaagttccccgagaggttagaaagaagagaaagtagtttcttcgggttgtgggcgccaatcccctggccaggctctgcggctccctcccctgcctccagcgc

SEQ ID NO: 7723 - DNA, 135 bp, Homo sapiens
  chr10:119304850-119304985
  hyper
cgcggcgccagggcggctgcggagccggccgaggtcaggagcctggggactggctcctctgcgacagcggctggttgggtgccgcaccggtggagacccggcgttccgggccgggcagctgagcaggcgttccct

SEQ ID NO: 7724 - DNA, 55 bp, Homo sapiens
  chr10:119305061-119305116
  hyper
gggccagcccggctcgggagaagtgcgcggctccggtcagagcagccccccctaa

SEQ ID NO: 7725 - DNA, 30 bp, Homo sapiens
  chr10:119306010-119306040
  hyper
ccagcaaacagtaacgtttttttgggcaga

SEQ ID NO: 7726 - DNA, 30 bp, Homo sapiens
  chr10:119306644-119306674
  hyper
cgtgggatggcagccgactcccacctcatt

SEQ ID NO: 7727 - DNA, 33 bp, Homo sapiens
  chr10:119310341-119310374
  hyper
ggacaggtgcgcctcggggtatcctggaaaccc

SEQ ID NO: 7728 - DNA, 30 bp, Homo sapiens
  chr10:119310949-119310979
  hyper
aacgccccccttcccggcccaaagaaggat

SEQ ID NO: 7729 - DNA, 155 bp, Homo sapiens
  chr10:119312935-119313090
  hyper
gccccagccagccccgtagccagaggaaagtgggagttttgagaaccctctgaccccagccgtgacccctctccgggaggtggcttctcccgcaggacccggtgcgccagaaaactctaggcggcgccacgcttggaagcgcaaggtccattcat

SEQ ID NO: 7730 - DNA, 117 bp, Homo sapiens
  chr10:119494479-119494596
  hyper
tctgctggggtcagcgtctgtacgctaaagccagggcgcaaagtgcgtgggcactgcggacactagaggcttatggcgctggaaatacaaggccgagttgccggcgcaaagagttcc

SEQ ID NO: 7731 - DNA, 75 bp, Homo sapiens
  chr10:119494848-119494923
  hyper
cgggagaagttcaggtgggacaggagacacgggggtgaggagatctttgagagggccggccgggaaagtgggggt

SEQ ID NO: 7732 - DNA, 30 bp, Homo sapiens
  chr10:120006277-120006307
  hyper
ggaccctggcttggcgtcattacattggaa

SEQ ID NO: 7733 - DNA, 30 bp, Homo sapiens
  chr10:120355327-120355357
  hyper
acgggaggaggggccggcaaacctggccag

SEQ ID NO: 7734 - DNA, 30 bp, Homo sapiens
  chr10:120670186-120670216
  hyper
catgaatattaatgattcccctccctcatg

SEQ ID NO: 7735 - DNA, 392 bp, Homo sapiens
  chr10:121301541-121301933
  hyper
ttcgctggctcggaccgcagaagtgcccttctccatcctggggttccgccaccctcgcgatcccaccttttggctcctcgcggcagaagcgaaggcccccgacgccccaggcccaggggcccagtcggatgcccgggtccagccgtgctcccccgggcgctcggcatccttccacccacgcccgcagcggaggcggagagcgtcacggagggagaagcccgcgcgccgttccgctttcggaatctggagccccatgtcacctccaaagtttggagatttggggcgctcctttttctcccagaccatcactaaaaagaaaactgcggctgttcctctttcagccaaacttcctccccggggctcccggaggagctctgcgctcccgtcgcggc

SEQ ID NO: 7736 - DNA, 44 bp, Homo sapiens
  chr10:121356078-121356122
  hyper
acagaggaaaaggcaccgaaccctgctctcgggctctctccccc

SEQ ID NO: 7737 - DNA, 30 bp, Homo sapiens
  chr10:121410460-121410490
  hyper
gatgagagtccccgcgctcctcccggacag

SEQ ID NO: 7738 - DNA, 30 bp, Homo sapiens
  chr10:121632625-121632655
  hyper
ataagagggcaaagcgagtctgcacaacag

SEQ ID NO: 7739 - DNA, 30 bp, Homo sapiens
  chr10:122216833-122216863
  hyper
ttgagatcggggtgcgagccctgctcttcg

SEQ ID NO: 7740 - DNA, 430 bp, Homo sapiens
  chr10:122708489-122708919
  hyper
aaggggatgatcctaaagggacgcagtggtcccgcccatcgccgcctctacagggagggagccgcggccccgagctggccacgcgatggcgctgtgcacccggccgcggagcccctgcacgtccggctcccgctcgcgctctcggctcgagctccggactccaggctcggagcaggggttcgggctacggttcccggctccgagggaccgcggggctctctgcctgggaaggaagcttgcgggcctcctcgggcctcgctgcagcccagctaggttaatcaatcagcagccgctcagtcacccatcccttccgcatcagttgcgtggggctggggatcatgcctagggcgggaggcgtgggagcgcagggcgccccgggtccggatccggctacaggggcgaacagagcgggttctccatcccctggggt

SEQ ID NO: 7741 - DNA, 293 bp, Homo sapiens
  chr10:122739112-122739405
  hyper
gcaactccttccgccgcgtggacaggttcagcactctcggagtcgatgtcattattcgccatcgacgcgaacctcggcaaagagacgggtcttaccggtctccgaatgttctcaggccctaagcgcgcagccccgcacccgggtgcagccggcgcggtcccacgtgtccctaccgcgagccgctccccgcgtccctgctgccgccgcgcgcttaactctgcctgcccgcccgccccgccccgcccggccgttcctgcgcagccctgggtcggcctcgcgcttctgtgtttaaa

SEQ ID NO: 7742 - DNA, 49 bp, Homo sapiens
  chr10:123357021-123357070
  hyper
ccgaaaaaggggtctccgcagggcctggatggtacggaagttcccagga

SEQ ID NO: 7743 - DNA, 30 bp, Homo sapiens
  chr10:123357269-123357299
  hyper
cagaacttccagaacgccggccgtcagcac

SEQ ID NO: 7744 - DNA, 805 bp, Homo sapiens
  chr10:123357527-123358332
  hyper
gtcgggatggagaaagcgacgagcccggggttgcggggagcaactccaaacgcagaagagtggtccttgggtcttcgccggcgccaagcctcccgggcttcacgcgtaccccaggctgcggaggagcgcgggcatgacgcccgcgggctgccctcggatttggggaacgagaggaagaaaggactcaggcttggcgttgcctccaccaaactttgctcgcgagttgcgaaggctcagagcgcgcaggcaagctgcggcctcggggcccccggggctcgcggccggcccccgccagcccggagagcagtcgccgcgccgggccaggtacgccgcatgcagccccgcggcgcccgagctttgtggcggccgcgcgcgctccctcgcccgctccgcacccgccgcccgcccgctcggctctccaccgcgctctcctccagccgccgcccgcgccgccgccgccgcccccgcctcctcgcggcgggtcacgcccccactgaaacccgagccgtttcctggacggcggcgccctctctgccaatcagcgccgcgcgcccgggccgccccgagtcccgcgcggctcccgacgcctccgagcagccggagacaccggcccgggaggcgagggctcggccgcgatgcggccgtagggatgcagcgacagcctccgaataaggcctggtcccgcgccccgcgccacctcctccctcctccccgggcgagcgaggctggccaacggctcgctgagcgactgcgttacgttgttttatgtcaagttagaaaacaaatgaccgaaggctctaaccct

SEQ ID NO: 7745 - DNA, 700 bp, Homo sapiens
  chr10:123872268-123872968
  hyper
gagactcctggaagtctgcagcgcctccaggagcagcggccgggctgtgcgtccatcggtccgtgcgtctctcgcctgccgctctgcggccgcgggcccctcggtgcgtctgggcgcgcccggccccgcgcattcctggccggggaggagagcgcggcgggcgccctgcgcgagcagctggccgagcgctgccccgggtcggagagcccagagctgggggaggagcctggcccggcagccgccgctcgcccagtcattggccttttgtgctgcaacttttcccgagcctttcggggagccacgccggccctgcgccgttgtcccgggaaactttgcgtcccagggccgcaccggaccgtggtgaccccacgcgccgcgccgccaccgggctcggaaaacccagcgcccccgggctctttggcagttgcgactccgaacgaaggcggctccgtgcgggccatcccctatctccccgggcgggtaagtgccggggccacgggcgggcggccggggtcagaagatgggcgcccgaaggaccttggcccccagacaaaggcgtactggaagtggccaaagctcatttcggctttccccggcagggactggccgagggtggaaaagtggctaactgcacattcggtcccctgctggcagaggagtgtggctgcggggaaaccgcgggccccagagtgtctgccca

SEQ ID NO: 7746 - DNA, 38 bp, Homo sapiens
  chr10:123922644-123922682
  hyper
agctgcctccaggacccggggcctgaaggaggcagaag

SEQ ID NO: 7747 - DNA, 82 bp, Homo sapiens
  chr10:123923517-123923599
  hyper
cgcccgggccgccccgagtctcccggggaggaggagaggatgcccgggctttgttagtgtcgcctttcctaatgcctgtgca

SEQ ID NO: 7748 - DNA, 295 bp, Homo sapiens
  chr10:124133757-124134052
  hyper
cagggagagagaagagcgaaaaattggcgcgcagagctgtaaagcgtttttctccaggtcacaccgcagcctgtaaatttgtgacacttggaccgattatgggacagcttgcaaacaaattatctgcaaactaacgaagcctatttttaaagatccctgttcctcgcagctctaggcgatgacatcagagaacccggagttctacctccgagccaagcccagtggtggtcaaaaactacgaataccaggaagcaccgcggcgcggcggcccagagctccgcgcgcaggcctcccc

SEQ ID NO: 7749 - DNA, 581 bp, Homo sapiens
  chr10:124134303-124134884
  hyper
gctccgggccgaggccgcggtaaagtttagcttgaagaacgcggccgcgctggagcaggggtggtggacggggccaggcgcgaggtggcggcggctgcggggctgccgggctgctggagcgcggttcccgctgtggcgagcggggaggcgtccgcagaggggcggtgggtgctggtgagtgcggagccggcgccccctctgcgcacgtccgcgccacgcgccacagcacctggaggccgccgggccggctcacctgccctggcttggggcagcgggagggggcggcgtcttcttcccgtgggtccccgattgttttcccgacgtcagccctcagcggcgcccggcgggggagggcgggaggcccgcggcggtcgcggggccgacgagctcctcggcgtctccgccccccgagaaatcccgctcggggcgcggtgcgcgcagctgcccggggattcccggtggcgccggtcggagcgcctccctccagggctgtgcccgcggggcgcgcgtccccgggcatcctttcctggtgtttaatgcattttggcttcaggacttgccgaggccgaagccggctccgc

SEQ ID NO: 7750 - DNA, 456 bp, Homo sapiens
  chr10:124220608-124221064
  hyper
cggggtccgcggtgccgcaacgccccgggtctgcgcagaggcccctgcagtccctgcccggcccagtccgagcttcccgggcgggcccccagtccggcgatttgcaggaactttccccggcgctcccacgcgaagccgccgcagggcccccttgcaaagttccattagtttgaaggacgcgaatctcagcgagagaacctgcggaaagcgaatatgtggggcgcgcagacggggaaactgagtcccgcgagagggccggcctgtgcgctgccccgcccgcgccccgccagcaccgccgtgcccgggcgcgcccgccctgccccctccgcgggcggtcccggtccagccgcccgccctccctcccgccatccggccagcccccatcccgggcgccgtgcccgtccccaaggcggctcgtcaccgctgcgaggccaatgggctgggccgcgcggccgc

SEQ ID NO: 7751 - DNA, 474 bp, Homo sapiens
  chr10:124221086-124221560
  hyper
cgaggccctcctgcactctccccggcgccgctctccggccctcgccctgtccgccgccaccgccgccgccgccagagtcgccatgcagatcccgcgcgccgctcttctcccgctgctgctgctgctgctggcggcgcccgcctcggcgcagctgtcccgggccggccgctcggcgcctttggccgccgggtgcccagaccgctgcgagccggcgcgctgcccgccgcagccggagcactgcgagggcggccgggcccgggacgcgtgcggctgctgcgaggtgtgcggcgcgcccgagggcgccgcgtgcggcctgcaggagggcccgtgcggcgaggggctgcagtgcgtggtgcccttcggggtgccagcctcggccacggtgcggcggcgcgcgcaggccggcctctgtgtgtgcgccagcagcgagccggtgtgcggcagcgacgccaacacctacgccaacctgtgcca

SEQ ID NO: 7752 - DNA, 31 bp, Homo sapiens
  chr10:124639062-124639093
  hyper
agcgtcgaaaaaccgccgtggtgcccgcgca

SEQ ID NO: 7753 - DNA, 30 bp, Homo sapiens
  chr10:124768777-124768807
  hyper
ggtggcaagggggtcggggctgtctagaag

SEQ ID NO: 7754 - DNA, 378 bp, Homo sapiens
  chr10:124896154-124896532
  hyper
aaagaagtggaattggagccccgggcacggtgcttcccgggaaaagtggcctcgggcgtgaatagggaggcttcggacggccggggcttgggacacggcctggaaggagggggtgattccaatgcgcctaagccgaaagggaaccgttctgccggcccctggcgaggaagctgagggaatggaaggaggtggccgcgctaccaccatctgcttgcctgtcctcgggaggagggggatcccaggactcggcgtcccttctctggcccagccgagaaggaggcagcccgcgggaatggtgaggcctcatggcctgggacctggaggccggcgcgggttgagcctgccgtccccaggcgccgggcctcgctcaaggctgtg

SEQ ID NO: 7755 - DNA, 539 bp, Homo sapiens
  chr10:124896937-124897476
  hyper
ggagcgagccggcctggccgcgtccctgcacctcaccgagacgcaggtcaagatctggttccagaaccgccgcaacaagtggaagcggcagctggcggcggagctggaggcggccaacctgagccatgccgcggcgcagcgcatcgtgcgggtgcccatcctctaccacgagaactcggcggccgagggcgcggcggctgcagccgcgggggccccggtgccagtcagccagccgctgctcaccttcccgcaccccgtctactactcgcacccggtggtctcttccgtgccgctgctacggccggtctgaggccccagaggggtgggggagggagcgcccggcctccttgtccggaccccggaggagactgggccgggccgagggcgccgagaagtccagcggccttcaggaactggggcttgggcgcgcagcctctgcttcccctcccccagtcggtagcattttgtaagtatttgcaatgcattttcgtgcaattcatccctaatggattggaggcgcttcccctcttacttttggt

SEQ ID NO: 7756 - DNA, 399 bp, Homo sapiens
  chr10:124898992-124899391
  hyper
aaaactcttttctgtcttgctcgctgactgcctctgcgctctctaagtacaacctggacgcacaaccctgtattccgggaggcggtggagacagaggcggctttgttcgcgaccagaggcactctctcccctgtactttccgcggcctgaaacgcccagcgagcagggaagaatgctgggcggaaggggagtggacttaggcttatctagtttgcgaaattgagcaaagcgacagcgcgcgaggcgagataccagagacagctggtatttccgaacactggtctgcagcctcccgttctgttcttaaacctgggttccttcgggagccgagagcttttgggcagggcatccctgggcattcgtcagctggttaacttcggtgggctctggttggaggga

SEQ ID NO: 7757 - DNA, 363 bp, Homo sapiens
  chr10:124902205-124902568
  hyper
tgcgcaagggccacgcgctgctgctttcacccccttgcgcccgcggggcacctggactccccttaagagtccccgtggggcctgagcttctgctgggcgctacgctgccctccacgattccattttgccccatttactcgggtcgtccacttcccgcggctcagtgacccagccagggggcgtcttccgctagcggtccaaatgtagactccgcaaagaggctaagaagacctgtctacccgggtgcgcgcgatggggtcagggtgtaagaaccaggagcctcatagaaacctctgcttggggtccaaagcccagccgggcactcccagaggacaacatccgcccccgcatgtacacgtggcc

SEQ ID NO: 7758 - DNA, 254 bp, Homo sapiens
  chr10:124902824-124903078
  hyper
cctgccgggtgtctccgatcggagtctggggttgagatttgggctgcacttgtccccggtgtgtctctccggcggagtaccctgaaggtgcacgaggtggggagcataggctgaggtgggtaatcgggtcctggatagaaacacaaccctcgtcctcactggggcccatgtatgcgcctgggattcctccccacccttccatttccaggacccctaagggtatcactccagcgacggggcggttctggagaccc

SEQ ID NO: 7759 - DNA, 4 bp, Homo sapiens
  chr10:124905875-124905879
  hyper
tgtc

SEQ ID NO: 7760 - DNA, 107 bp, Homo sapiens
  chr10:124905919-124906026
  hyper
cggaggccggcacctgcccctcgctggcctcccgggccgctgcgcgcaccccctggcccccgccccctcgcctgcccctgccccggctgcgcggccgactcctaatc

SEQ ID NO: 7761 - DNA, 378 bp, Homo sapiens
  chr10:124907435-124907813
  hyper
ccctggctgcccctggttagacgccgctgatgcccgccaggccctcggcgcgctctgggggcgcaccggtgctgtgtgcctggccggagcgttttgaaattttccggggccgctcggcggcgctgcgattggccgcgttcgggtaacctctatgcaaatgaggccgcgccgcctccgcgccgccggagacccggcgagttggcgggcgaggaaggggcatttgcaccggggctgggcgggcgcacccagagccaggcgggcaggaacccctgcgcagccatccggtgcctgcatgtccctggcgcggaagggacgcctcaccagcctcggcgccccctccccctagatttcctccccgcccctccccactgcctgcct

SEQ ID NO: 7762 - DNA, 154 bp, Homo sapiens
  chr10:124908224-124908378
  hyper
ccgccaagactcccgcgccgggccccctctggccagagctgcggcagccgggggttcgggaccgcggggagaggggcgcgcactgtggtgcctcctccgcccggtgggcccctgggagcaggcgaacacagacccgtgccggcttgggcttcct

SEQ ID NO: 7763 - DNA, 142 bp, Homo sapiens
  chr10:124908972-124909114
  hyper
aggtgggaccaaggctgcaggcgcttgccaaccgcttggtcccagggagagctggcggtctccgaggctccccaaccaactccatggcctttctgtctgttctcgctcctcaggtacccccaagggcagcggaggctcgggc

SEQ ID NO: 7764 - DNA, 285 bp, Homo sapiens
  chr10:124909252-124909537
  hyper
ggcgcggccaagaagaagacgcgcaccgtcttttcgcgcagccaggtgtaccagctcgagtccaccttcgacatgaagcgctacctgagcagctcggagcgcgcctgcctcgcctccagcctgcagctcacggagacccaggtaaagacttggttccagaaccgccgcaacaagtggaagcggcagctctcggctgagctggaggcggccaacatggcgcacgcgtcggcgcagactctggtgagcatgccgctggtgttccgggacagttcgctgctgcgcgtg

SEQ ID NO: 7765 - DNA, 72 bp, Homo sapiens
  chr10:124909673-124909745
  hyper
gcagagccgggcgcgtactgtactgtaagcagggctccggagcaaggcggcgtgtttccagaaatatgaaga

SEQ ID NO: 7766 - DNA, 182 bp, Homo sapiens
  chr10:124910272-124910454
  hyper
tctgtctgtggaagtttggctcgctccacgtggagggtgggaccggggtcaggggttaaaggtcgggaccttggcgccgcccagactgcacgtggctggagctgcccgcccactctccctcctaacgcccagaatcgtcgcgcgggctggggcgcaccccggctggaatccagctcaagagt

SEQ ID NO: 7767 - DNA, 446 bp, Homo sapiens
  chr10:124910708-124911154
  hyper
cgctgcgcccagctacccggccggtggcagagttatgtgtctcgcgcggagagggaactgggcgcggtgaggcagttctgcggctcaggagagatccgaggcccgggaccaggcaaagaaggtgagggaggcaaaggcgcttccctacactcttttgttgttaatagtttgcattggttcagcgtgtggctggatcaccggctagcacgcggccgcttgctctgaatggaaccttgacgcgcggcgggggcgcccacggacttcctcgccctgacacctgcggccgcgcaggggctgggagggcgctgcaccgagagaatagccgcgggagtatcatgcaaattgcagattctcgctcccaatagattgcagccacctgttcttggcaaaacctcggaaaaggaagcctgagcttggaggaagccggtggttcagcaccacctggg

SEQ ID NO: 7768 - DNA, 31 bp, Homo sapiens
  chr10:125727316-125727347
  hyper
gcaaactgcaggtctccggggagccgctccg

SEQ ID NO: 7769 - DNA, 544 bp, Homo sapiens
  chr10:125851342-125851886
  hyper
gcgcggacctccagccgccagcagccggcaacccagccccagccttcctcctctatacccgccgtcccagccgcgccggccggccccgggcgcagggcgggcgggaacgtgggcacccggacagcgacggggaggtcaagcagctgtgcccaggacccgggcggctccgaagcctcaacacgcacacactcgcgcgcacgccggcccatcggttgcctggaggagtcgggaaggtgcttccacggctcttcattcattttcccaaaggcaaggttcccttcgccccggcgcctctatcctgccatcccagggggccaattgcgccacagcccgccacccagccacccacagccaccgcgtcctatctcccggcacacacaacccaacagactcgcattacatctccaccgccagcgtcgcctccgcgccccggccgctgccatccggctccccagcttcgccgccccgcagccccggctccccgcctctggcctcaccgcgcggctcagagctgcctcgctcggctcgccgcaccaaggccggc

SEQ ID NO: 7770 - DNA, 371 bp, Homo sapiens
  chr10:125852126-125852497
  hyper
tctggcctccccgcccggaaccgccgcaaggctagagccagggttctggaagcgcatccgagctcgcaaccggggagagagtggcggatgcccacttacctgccccgggccgcgcctggaaacttccccaaagtgcgataggggtgtgggggcggagcgcaaggctggggggaatccccgtcccctaccgccaaacgacgcgcgctcacaccgtgaaagcactggtctgtccgtcggtcggtcccccgcctgcggctcccagagctgggcggtgcaggggcgccccgattccgactactgggctccttctcccggacagcccgccggtgcgttccacgcggcttgcgccccccgccggcctccggctatcc

SEQ ID NO: 7771 - DNA, 605 bp, Homo sapiens
  chr10:125852540-125853145
  hyper
cggccgcgtcctctctgcgagggagggggcgtgtgtcgccgctgggtaacccttcccgcggggtcctcaagcgcgcagggcgcccggagcgcggccaggaccaatggcgaagggactcctcccgctggggatcgctgaagcctcggggaggccgggccaaggagcccggggcccaaacctgcctcggctcgtcgagctcgcaagttcattgtctgcctgggccgccgccgccaccgccaccgccaccaccgcgccgggagcgccgcggggagtgaggctgcgcgccgcctccgccggcccggactccctacgcccagccccggccgccgccggcgctgcctggcccgaacccgcggaggggcgccggagccccgagcccagggccagacctcctaccgccgctcctcgccgaccccacctcggcgtctggcacctaacttgtacctgagaagcctgagtccagcccgggagcctctgcggctccggctccgcgggagcgcgcccagccccgagcctctagccccgcatccagggcgcgtcaacctgactccccgagcgctgggaggaaaagtttgggagtgacgtgcagacggcgaatgaaacat

SEQ ID NO: 7772 - DNA, 30 bp, Homo sapiens
  chr10:126077779-126077809
  hyper
attgctctgcagcgcgcggggggactcggc

SEQ ID NO: 7773 - DNA, 30 bp, Homo sapiens
  chr10:126107522-126107552
  hyper
ggctgattctgccccgcccccaagacaccc

SEQ ID NO: 7774 - DNA, 30 bp, Homo sapiens
  chr10:126107766-126107796
  hyper
agaagactgaggcccgaaaaggaaaagtct

SEQ ID NO: 7775 - DNA, 904 bp, Homo sapiens
  chr10:126135877-126136781
  hyper
cgcggcgggcaggggtgcgctgacacccgcgcacctgcacccccggtggaggagccgagggcacacgacgatgccaatccctcgtgaatcccgcgaaagaggggccagggggctccggattcatagacgcggggcgtagaagggggtcaggtaggaaggcccaaggaacggcgcgaaagggctcccgggggcggcagccgtcagcgggaaggaggcggcggacgggaagaggacattggccgcggagtaggaggggaaagtctggaagtgcagagcgccggtgccgggagggccaggactgccccccgagccgccgccgccgccgccccccgccgcccctggctggggcgcgccaccccccacctgcgccgcgccgtcggcacccgggttctgcttcttccacttggtcctgcgattctggaaccagattttgacctgcgtctcggtgaggctgagagacagcgcgaggttcaggcgctcgcacactgacaggtagcgcgtggcccggaacttgttctccaaggccaccagctgctcgtaggtgaaggcggtgcgcgcgcgccgcggcttggcgcagttgggctccaggcgccggcgcctgggacgcggggagccgggggatcccgggggggacctcacagggccgcccccgccgtcctcgcagggctccccagacgccaatgccccggccggggcgtcaggtgagcgcgctaggcccggcagcaagcgcgcagcccgctcccgcagccgcggcctcctcggatcctccgcatcctcctcctcttccgcctcggaaccctccaggggggacgcctggccggcgcctgggcccgcagcatctaggggagaaggggtcggtgaacagaagcctctccaggtccccaaacctcgtcctcgtcctccc

SEQ ID NO: 7776 - DNA, 53 bp, Homo sapiens
  chr10:126847634-126847687
  hyper
gcgcctctgcccaactcgcccggggcgctgggggcagcgcgagggagagaaag

SEQ ID NO: 7777 - DNA, 47 bp, Homo sapiens
  chr10:126848486-126848533
  hyper
cgccgccgctgccctccggacgccgccgcgctcggggtttctttttt

SEQ ID NO: 7778 - DNA, 30 bp, Homo sapiens
  chr10:126849689-126849719
  hyper
acatgggccggcctcgcccccttcagatac

SEQ ID NO: 7779 - DNA, 161 bp, Homo sapiens
  chr10:126849984-126850145
  hyper
gagccccgggtggccccggtcccatggggccccgcccagccagcggcgccaaccagcccccttcccggcccccgggctccaacttcctcctggtgccccgcaccggccgcttctgccttctcaggcccgcggggtcaggcgcgggccggccacagggggca

SEQ ID NO: 7780 - DNA, 30 bp, Homo sapiens
  chr10:127532323-127532353
  hyper
cctgctggaggacagcggagccagcaccag

SEQ ID NO: 7781 - DNA, 30 bp, Homo sapiens
  chr10:127730549-127730579
  hyper
cccctcctgagccccgagaactgtgttgtg

SEQ ID NO: 7782 - DNA, 1109 bp, Homo sapiens
  chr10:128075753-128076862
  hyper
agaaggcggcggcggcggagacccggggaagttgccggatttttaaaaaggcacctgctgggtgagtcctcactgtgcaaacgggagccacaggtgcccgattttaaggggctacaactcgggaaaacctaagtctgtaaaactaagtacgttaaactaagtaagttctcgctgtgcaccaagttgatgggggcgattatttacggcggagaaactgagtggaggaaggagggagaattccgctaaagtttgcctgcgactgacagctagggagtgacctggaagccaggaagaggggcagagaggaaactaaagaagtaggtaagagagtcagtttatgaaaatagagcctgctgtggagagcagcaggcacacctgcggaggagggggctgcctcacctgcggggccgctgcgcgcccccctaagtgtgttagcgggggaggcggggctggaaaggaaacctggtgaagggctggcccggagcctggggtggggatattcactgcgggatagggccagcaagaggacccgacacgcatcgtcccgagtgacacgtgtaaatgtcaagatacagagacatctgcaaatgtcacccaagagggtgaggacgggggagcggtcccgaggctgtgccctccggggcaggtactggctcctgtggggctgcgggccaagtgtcgcccttccccaaggaattggcacctggggggggggggtcggtctcgccgcgctggaagcgcaagccccggggctccggagatgcgccggggcgcgtcgcccctcggggcagccctggacctcggcgcgcccaggcgcagcgtgcggtgccctcggcggggcgggcagcgagccgccctagttcggcgacttacctcgggcctcgcagggcgcgagcagagcaccggccagggcgagcaggagggcgcgggcgggggacacgggcagcgggcgcgctgccatcgtcgccggccttcagtgcagcagctctcgggcccggcggcgagcgctgcaccatcccacgcgggcgccgagccggggccgggcgtcgcgaccggagggatttcctgcctcggcgagtcagctccggagccctcgcgcagcgcccgcg

SEQ ID NO: 7783 - DNA, 300 bp, Homo sapiens
  chr10:128076940-128077240
  hyper
cgttctggcacaagccagccttgaccgttgcaataaatgagcaaactgtccgagttggcccggggactaggaagagcgttagtgagagaaggcaggcctgtgaaatggatccacggccagcagtcaccgttcttattaccgcggaacaaattattgtctcccccgcacccccgccagttggcggcgtcccgcgggtcctagagaccgctcgggtccccccgccagggtcccgccccgagccgcggctcgctcacccccgagggtgggcggctcagacgtggctcagtggcgtccgggcgc

SEQ ID NO: 7784 - DNA, 30 bp, Homo sapiens
  chr10:128593609-128593639
  hyper
cgagctggggacctcgcaccaccaggctcc

SEQ ID NO: 7785 - DNA, 30 bp, Homo sapiens
  chr10:128594402-128594432
  hyper
tcccctccgacgcccgctcctctggacctc

SEQ ID NO: 7786 - DNA, 31 bp, Homo sapiens
  chr10:128850483-128850514
  hyper
tttactgattagaaaacgttttacaggccgt

SEQ ID NO: 7787 - DNA, 68 bp, Homo sapiens
  chr10:128993453-128993521
  hyper
aaccagcaagatgcagactctcgctcttgactttgggctccaggagctgccccgaccccgggctgccc

SEQ ID NO: 7788 - DNA, 631 bp, Homo sapiens
  chr10:128993580-128994211
  hyper
cgttggttggtttcccacgcctgtcccggtctgactcgggctgccaggcaccgggaagccccgcggcgccgaccccaacccgcagccccgggaaggtgccaaccccagcgagtggaggagacgagcatttcacgtgggcatctgccttcactgctgctcgcgcctctcctcaacggccggcgtcagggcccctctgttccaactcatcccccccccgaagttaatcagccgtacttgtactttccagggcgctttagtttggaaaatacttaaaagcctcgaaaccttccggggagacggccgcccccagatctcccagttttgcctggctagggctgtcgggcgctcacgaagctgtggcgtctgtctggaacccacatcgcagaggcgcagccccgctcctccctgacgtcgccaaagttgccagacgcccctcagcgacccggtcgcgccagatgcagttgcataaccttgccccccacctgcgaccgcaccgggtccgctcccggctgcaccggggtgtcccggccccgggagccgccgagtttccggccaagccggtttggggccgagtgtgtgcgcccgaatcggggtcggcgcccgtcccagcggtgctctgcccgcggccaag

SEQ ID NO: 7789 - DNA, 24 bp, Homo sapiens
  chr10:129534561-129534585
  hyper
taacccgggctgcagcaaccccgg

SEQ ID NO: 7790 - DNA, 454 bp, Homo sapiens
  chr10:129534992-129535446
  hyper
cgccctctatccctagccccgagtcccgggtaacccaggggccccggcgaggcgagtttctttggggcgagatgtcccgagccgagcaaaggggccgcgcattggacggggctcccaagccacagccctgggggccttgaggagtcgtggtacggtccagggcagtcggggctgcggggcccgtgaagccagacgaggctacggacttagggtccctgcaaccaagaccgcgagcgactgtggactcgggacggatcgcacaaaggaggaagggggaatcagaggggcgtccggtccaggacgtgtcaggcctgggcggggcggaaaactgacaccagggcgaggacaaggatttcgctcctccagggctgccaggggaggggctcgccaccgtcactctccatgggctctggccccgacggtgtttaaagggcggagggctgggccgggctgg

SEQ ID NO: 7791 - DNA, 41 bp, Homo sapiens
  chr10:129706050-129706091
  hyper
tgccaggatgctgccccgcagccgggcgggcgcccgcgcct

SEQ ID NO: 7792 - DNA, 40 bp, Homo sapiens
  chr10:129923866-129923906
  hyper
aggggaaagtggggaccgtcgaccccgctccttttgatag

SEQ ID NO: 7793 - DNA, 30 bp, Homo sapiens
  chr10:130008570-130008600
  hyper
ccggccgcggacggcgtcccttccagggcc

SEQ ID NO: 7794 - DNA, 31 bp, Homo sapiens
  chr10:130009066-130009097
  hyper
ggcacccctggggccccggggatctctgacg

SEQ ID NO: 7795 - DNA, 30 bp, Homo sapiens
  chr10:130009107-130009137
  hyper
tccaacccccgctgcgatcccacaggtggg

SEQ ID NO: 7796 - DNA, 30 bp, Homo sapiens
  chr10:130066478-130066508
  hyper
tgcagtgaatgcgccgctccaccccgaggg

SEQ ID NO: 7797 - DNA, 226 bp, Homo sapiens
  chr10:130085049-130085275
  hyper
acgcagggtgcaacccggacgcgcccccgggggaagcccgcgacgcagcagccacacccccagcctgcactggcgcccaccccatgacttcgccttcgcggtcgcgggcagggagcgcgcgtttccatcggttgattagaagcgggagtcggaggagcccccgcccgccggcggccagcgcacagcccggccaggggcgccctccctgccgccgccggccctttga

SEQ ID NO: 7798 - DNA, 7 bp, Homo sapiens
  chr10:130085355-130085362
  hyper
cgcacgg

SEQ ID NO: 7799 - DNA, 520 bp, Homo sapiens
  chr10:130339277-130339797
  hyper
catatccatcaaaacgaccagtggccatcagcccgctgcggccatcgatcgggtggcccctgcccccgtgcaggccggcgtgacccggctcctaggtgaggctggagagaaggacctcgttttagcggattttttcctttttttttttttcttttgcctccagctacagctgtgattttctgagcagtcttggctaacgttattaaagttgcatcaggatagatacagagcaaagcagataacaggctccgcgcgcgggagctggaaagaccggcagcctctggttcctgttgttgttttttaagtgcgcggaggcgcaggcgaaactcggagtttccaactcgttgcttattttgcaaagtaaacaagcaaatgttatgtgcataaccttcgctgtctcgctaaaggtcagcgcgcccctgctcatttcccgggctgccttttgggggcactctgatgccggggatttcctcgggtgttggggaaacaagacgtgctcgcctaacaaagactcaatcta

SEQ ID NO: 7800 - DNA, 238 bp, Homo sapiens
  chr10:131757614-131757852
  hyper
gaccccggaacccggggctcccgggccccttcggcattccgcgccgccgccaggccgcgtcctcaggccattgtctacaacgagttccaatctgcatgttgggagaggccgatcagaacgccccgaggctaaagaagcagggaaggatggtcgcggcgcaggagcagtttgccaagggccgagggccgcgcccgccctgccctgcgcgctcccccggctctagcaagtctggcgcccc

SEQ ID NO: 7801 - DNA, 1377 bp, Homo sapiens
  chr10:131761302-131762679
  hyper
gatcggtgtcaggcgcggccaccacgctcggtccccctccgcgaccgaggctctcggcctcacacatggcaggattcctagctcgaagcagcgcggtgatgtcactttcctgctggaagcccagcgttctcctcgccccgagtaagtccgagggcgcagagaagttgcccagccctcggcggtcccgggcggccgcacgtggcggcggcggggtggcctggcggagccgagcccgccgcctaggggggcactcgaacccccgcgcaccggcaccgcctgcctcccgcttctagaaagagagagggtgtgatcgtgtgtttgcacttactttctctttctccacaaagtccacaaaagcggtcctttcaatctccaccggctgcccctgcctatcgtagagcgccagcacgaagtggaagaaattggatttccggaggttggaaggcggctgcttctcgaagtgcgcccgcgccagccccacgccgctgcgggaggaaagagacagcggcccggtgaggagcgcggcgccggccggcggagggggccgggccgggccggggccggggccagggcgcgcgggggcggccggtacgtacctctgggcggccgtgttggcgtccaccacgcccgccgtgtgcatccacgagcgcaccgggttcatgccgctgcccagcggctcctccttcatggtcgtccccccgcgcggaatattctcctgaatcccaaacatgaaaactgctggcggcggccgcagctcccggccgaaagcgtttcctcgagcagcggcgctcggggcttggcggcaggcggctgccctggccgccctcgccctgctcggcgcctgcggtccggccccgccgccggcttcagcccgtcccgggcaggcgcgacatacaccagcggccgggcgctccggacggccaggggcgcggaggcggctccaccggcggcggcggcgcttcgaaggagcaggacgcggtggccgcggcggcgcttgttgttgttgttgtttgcaggcgcgctcaacgtggtgtcatcctagccaggcggcgtccgcggctgcaggacactgcgggatcgcccgcttctggcgcggcccgcctgctccaaagacaaataaacggggcagtgagtgctgcggcgcagtcccgggcgcaggcggggcgcggcggggcctggagcggcgcgcgcagcggacggaggcgcacaaaactcagccctctctccccgaggaatggaccctttcccgggagccaaaactcgaagcccccgggagcggcgctgtcagagggtgacgtcggggggcggtgcctgcgccatatatgggagcggccgcccctcgccgcgcccctcgccgccgccgccgccgcgctcgcc

SEQ ID NO: 7802 - DNA, 178 bp, Homo sapiens
  chr10:131763158-131763336
  hyper
gacctaaggctgctgcagggccggccggtcccggtctgagccccgccaggtaccccaagcttcctaccccggcggaggccgccgagtgccgggcagggaatcacgtcggaggcagggtctgccagatgctccctctcccccggtggccgcggcagaccccggcccctggcctgttctt

SEQ ID NO: 7803 - DNA, 92 bp, Homo sapiens
  chr10:131763632-131763724
  hyper
gggactccgcgcccaggagcgcggcccgcccaaaggacgtctgcgcgacacggagcagagacccaggggacgaccaggaactgtcctaggca

SEQ ID NO: 7804 - DNA, 847 bp, Homo sapiens
  chr10:131769490-131770337
  hyper
gaaaagaagaaagaaagaaaccggcttctcttctagactattaataagcaatttgtcccgctgaaatttacattgcaaagcggagggcgccggcagccgtggcggcgggcctggcgcgggctccgggggtgcgtcggcgcgggggcggggggggtcctccggccatccgggccgccctcgggggcgatccaccggcggctttgaactcggtgtccttgccgccgtgccgccgaccctcgcccgcacacgcgcgcatctgcacgccagggccccgcctgggctgcgcacccggaggccgggactggcgctgcgctagcgccacccgggctgagctgcagccttttgtggggggggcgggaatccctccgctcccagtgacgccttggactcgcggacccccatccgccccaaacgactgcccaggccttaaattaaaaatggcaacaataagcttaatttttttttcctccttagccgcgccgccccggtccaagtctaccgcaagcgtggagccccgagcgccgcgcccccgccggctctcccgcccgcgcgccgcccgacggagccgcggatcccgggcctagcgtggggccagggcgccatctacgggcgccgcgcggctccgggcggccgccgcctcctccctctcagcgtccagagcccgctcctcctcccgccgccgccgccctcgccccgcgccgcctgccacttatcacaattacccgacgctcccgtgccattttgcttatgaaacactgattgctagttatgcggacttttaagcactatattaaaactttcgaaatgaaggcgctctcctgcctgcgatttttaggtacaagattaa

SEQ ID NO: 7805 - DNA, 30 bp, Homo sapiens
  chr10:131770747-131770777
  hyper
cccgtgccggtacgcgcctcccccgcgccg

SEQ ID NO: 7806 - DNA, 31 bp, Homo sapiens
  chr10:132050986-132051017
  hyper
agtccatgttagagggcgtgagagtggactc

SEQ ID NO: 7807 - DNA, 88 bp, Homo sapiens
  chr10:133109172-133109260
  hyper
ctgtgaaagtcctaacttctccgcgatgtcagccacggcccgcggcggtcacggagccacttcagcacctcgcgatggacagtgaccc

SEQ ID NO: 7808 - DNA, 114 bp, Homo sapiens
  chr10:133110553-133110667
  hyper
cgggtcccctggcccggaagttgagccgcgggtgcctggtctgaagttccgcgccccacagtggcccgcgggcctcggcggctcctgccctacgccctccaaggcaccaggcag

SEQ ID NO: 7809 - DNA, 30 bp, Homo sapiens
  chr10:133252504-133252534
  hyper
ctcggcccctcccacggcctcagtttgaac

SEQ ID NO: 7810 - DNA, 364 bp, Homo sapiens
  chr10:133794877-133795241
  hyper
atactggtctgaactacagaccgcggagggcaacgtggactttgaggctgttcggtccaactgcgagacgcagattcacctccaggtggaattctagctcgcgcggagctggagaatcggggctttcccgtgcggtccgacccgggtccaagccaacccccgcccgagtggcgaggccgcgaaccccgggcagtacgcggggtccccacgccccgggctccgcatgcccgcaggaggggtgggtacggaaggggaggatggcgcagcctcgcccggcccgcgatgccccctaggcctccccggcaacctccccttggcgccctcttggccttccccaggcttcccccccgcgccccctcggctc

SEQ ID NO: 7811 - DNA, 571 bp, Homo sapiens
  chr10:133795312-133795883
  hyper
cgccagagggcaactgcggcgatcggagtccgcgccgggctgcgggatgtgcttcagctgcgggcggtgggaaagcggaggtcggagcgccgcggcccagctgcgctcccggactgagcggagccccgcagcccggccggaggaactcacagggcagggcggggccgggcggatctgcggccgcgtcgcccattggccgcgacttggggcctgcgcgtgcgcaggggcgtggggtgcgtgtggcacgtgcggcgcgtgcgcggggcgggtcctgcggtgggcgaggggcagaggcctgcggtgcgcgggacgcgggcggggagaggggcggggcgaggggcgcgcaggcgcgagggcggcagcgaccgcctgaggtgagccggcccgggctggacgccgcgggccgcgtgacgagtgggctgcgcggtcgccgccgcggcgggcggtgggccgggttctcctttgaaggggcggtgggaccggcggactctctgggcactggctaccacggagacgccgctacgcttcggggcggggcccgtctttccatcctgctagtggggaaactgag

SEQ ID NO: 7812 - DNA, 83 bp, Homo sapiens
  chr10:133795975-133796058
  hyper
cgcccggggcgggagctgcgagcggtgggccggagctgagcgtctcgggacgggaccgcgtccccgggtctttgcccgccccg

SEQ ID NO: 7813 - DNA, 30 bp, Homo sapiens
  chr10:134000272-134000302
  hyper
ggggggctttaaagcgaaggagtggctgag

SEQ ID NO: 7814 - DNA, 20 bp, Homo sapiens
  chr10:134045848-134045868
  hyper
caacagagaagagggcgggt

SEQ ID NO: 7815 - DNA, 112 bp, Homo sapiens
  chr10:134045912-134046024
  hyper
cggtggcgtaaagccctgggtttggtgcagtctctgtctggagggacctcagcacccgagatcacgcagagcagtgtttacaaaaaagactggaaaccggcggccttttatg

SEQ ID NO: 7816 - DNA, 30 bp, Homo sapiens
  chr10:134046263-134046293
  hyper
atgaaacgccactgacggggaggccacagc

SEQ ID NO: 7817 - DNA, 769 bp, Homo sapiens
  chr10:134120668-134121437
  hyper
tcactcgcactcgggcggcacaggtgagcgcctctctaactgcaaagtacaaacgagcccgcacgtgggcccgagcggatcacggaaagcggaaagcagggctgccacgggcggtgggcggaggcgcgcgcaagcccggagacgccacagccgcgggggaccctcgccccgagggcccgggcccagcctgctcctcctgcggcgccgccactagaaacggaggacgcgggcgggcgcccagaactcgcgtggggccgcagccacccggcgcgagcttctccggaagccggggcgccccgggaagccgtcccggacaccgggggaacccctgcgggaaaaagccgcccagccgcgcccgcccctgcaatagcgcgcggcccccacgtcgtccccgtgcccgcactcaccgtcctccttgtcgtcaaacaccggcctccgcgcggtggccgccgacatggacgagcccatcctcttcttccacttgctccactgaaacagggggcgcggctgcgagcggacatcgcccgagtcccgggcccggggctggccagcagcgggcggcggcagggccgagggcgcgtcggagccggcggggcgcgcgcggccggggggcggcgagcccggggacgccgcggcgctgctgcccctgcgctcggcgccactcctcatcgccgggtctgggtgcgcgcggcagccggaactcggggcatggccggccggcagggccgggagcggcagtggtagcgggagcgctcggggccggcagcgc

SEQ ID NO: 7818 - DNA, 515 bp, Homo sapiens
  chr10:134121687-134122202
  hyper
ctagggatgggggctgtggttcgccgggacacggggaccacggctcagactagacggcgggtacgagagcgagggaggcagggagcgtccccacgggtatcctggggccccggaggtcggcgtccctggcacggggactgctgtgcccggcacggcggcgggaccttctcgcggtctccgggggcctccctcccctgccttcttcgtgaaaacagccggcgcgcgggcttccgccgcccagtgcggggagccctaaactccagccttctgctttgcgcagggtgaggccgggctgcaggcccgggatgcgggcggcgggaatctgccgggcagagcccggctcacggtcaggaggcggcaggctgagtccaagcgctgcgccagagggtggggtggggcagggcgggcctggctgcgcgcgcgcacacgcgggcgcctggggtgggcgctaagccctgagcacgtgcgcccgcgctctcgggcacccccgtgccatcctcgcgacccccgtccgg

SEQ ID NO: 7819 - DNA, 167 bp, Homo sapiens
  chr10:134209483-134209650
  hyper
ggcgaggtcgacaggcgccagcgacccgacggtccccagtggcaccaggggcggtggtcctcaattcccaggctgggaggagccctgcccggcggcgctgggtcgccaggacaactacgcggtcccccgccccgcctccaggcctcgtcaggcgctgcaagtccggc

SEQ ID NO: 7820 - DNA, 68 bp, Homo sapiens
  chr10:134210585-134210653
  hyper
ctcggctcggctgtggcggccgccccagcggagctttgtgacgtcaggcggccgcggggcggcgtcac

SEQ ID NO: 7821 - DNA, 55 bp, Homo sapiens
  chr10:134351445-134351500
  hyper
ggcccggccgacccgccgagcccgcgatgcgccccggggccgccccccggcgcag

SEQ ID NO: 7822 - DNA, 31 bp, Homo sapiens
  chr10:134564784-134564815
  hyper
tttcccccactggggtcgggtcaggccttgg

SEQ ID NO: 7823 - DNA, 46 bp, Homo sapiens
  chr10:134599792-134599838
  hyper
gaagggcccattagcgcggcaggtgcctcccgggctgtaaattcgc

SEQ ID NO: 7824 - DNA, 942 bp, Homo sapiens
  chr10:134600123-134601065
  hyper
aggacgcgggcctcgagtccacggaatccacgggcctcacggccgggcgaggctcgcacggagctgcctctggtttcgccgacacgcggccggcgcggtggaggagtgaggcaggcgggagcggggcggggaggcgggtcccgggaccacacgcgcggctcggcacttccccgtcatcggcctccaggtctcccgctgggggtcccccaggatgtgacctgggcccacgacttcgcccacgggccgcctctcgcgaatccccggccgggagaacagagaccaggacggcctcagcgcggaagccctgtccagggcccgaacgtgggtgcgggctgggggcgcagcggcagaaacgcggccttagacgcgcgcggggggccggtgtcccccccgcccccacggcaccgggagccgctcgctcatccatcccgcagaccgggcggtgagatgactccgagccccgcgcacggcggccgcgagcaaacgctccgacgtctgtggtgacgtctcgtattgatttagggacacggggcggctgtggctgtggcccacggctcgtggggagcccgagtctgtgcgcagggaacgccgctgcgtggcctctctcgggcctgtgccgcggaggaaggcggcgcccggggttcggggccggggtctcacgtccgccccctcgcccccctccagcgtccgttttcgttttgtgcaggtcgaggcggggacttggcgccgtcggccgctcctggatggcggcttggaaaagccacctgcggccaaactccggggcagtggtgcggccgccgggtgtgtgcgcgctcggggctgccccggcggcttccggctccactgaggtgcagccccgcgttcacggggggttcgcttcccccgtcgactccgcactcgattcgactgggattgggattcgattgggcgcggccgccccac

SEQ ID NO: 7825 - DNA, 179 bp, Homo sapiens
  chr10:134601326-134601505
  hyper
gatcccccactctgcgcggccgggcagaccctgggcgggccgggaggggtgcgggtcgcccgaactgaggcccaggaggcgcgcgcgggcggaacggcgggaggaagccgcgctcgggacaggctctggctcttctcacagcctggaggggcggggcagggggcgtcgctagcgctgtt

SEQ ID NO: 7826 - DNA, 30 bp, Homo sapiens
  chr10:134602460-134602490
  hyper
cgttcgccttcggccgcccaggccatagag

SEQ ID NO: 7827 - DNA, 101 bp, Homo sapiens
  chr10:134901193-134901294
  hyper
agggtcgtgcagtccgcccggcggcgttttcgggcgagggtctggtgctggggagcgagcgcggagcgaggtgtctctttaaatacgctctgcagtgtgac

SEQ ID NO: 7828 - DNA, 164 bp, Homo sapiens
  chr10:134901960-134902124
  hyper
agccgggagtggggcgcagattgatttttaaatatggagaaggagacgcatctgccgctggcgcgttcggtccgagccccccaccggtccccaccggcaccgcctccgccagccccaggcgcagcccccaggccgcccgcggaggggagggagcgacaggggcc

SEQ ID NO: 7829 - DNA, 148 bp, Homo sapiens
  chr10:135043477-135043625
  hyper
acgagcggagccgccggggcttaggcatcgcggcacctccgttgaacgggtctaagaacagaactcctgaggaccctccgtttccaaccgaagccagtctttgctctgcgtcttcccggccgcagcgccaggaccgaccccttaggac

SEQ ID NO: 7830 - DNA, 564 bp, Homo sapiens
  chr10:135043826-135044390
  hyper
cgccccccgcgccgccctcgcccgccagccccgaccccgagccgcggacacccggagacgccccggggaccccgccccggaggcccgcctcgcccagcgcgctgggggaactcgggttgccggtgtccccgggctcggcgcagcgcacgccctggagcgcccgggagacggagctgctgctggggacgctgctgcaaccggccgtgtggcgcgcgctgctcctggaccgccgccaggccctgcccacctaccgccgcgtgtcggccgcgctggcccagcagcaggtgcgccgcacccccgcgcagtgccgccgccgctacaagttccttaaagacaagtttcgcgaggcgcacggccagccgcccgggcccttcgacgagcagatccggaagctcatggggctgctgggcgacaacgggcgcaaacggcctcgccgccgctccccggggtccgggcgcccccagcgcgcccgccgcccggtccccaacgcgcacgcgccggctcccagcgaaccaggtaggcgggggactggggggccaggtggggccgaggactgcggaggaa

SEQ ID NO: 7831 - DNA, 826 bp, Homo sapiens
  chr10:135050031-135050857
  hyper
aggtaggccgccgatcggttcccggctgaggtcccgccccagcgcccgcctcccgggctccaacctctttgctcagcccgggaggctcggctggctggggcgggcgtaaccgtggggcgaggcccgccggtctttctgatttccgcgggcggcgtgggcgctgaggcagccgcggtcaggacctggccgggagtcggggctgctccgtggaccccgcgtctgcgccgaaaccccgcatggcttcgggggccggacctgcgcctccgcctaactccggccgccggagacgccgtgcggaccccaagccagtgcgcggaagacaccgtcctaccctcggcatggctgcctcccacccggtcacgtcggtccccgcgccccacgccgacgcgcaggcgacccggggacgcggagacgcagacagctcgggactcaggttcgtgggagcagcggccgcgcgtggctatgaccgtcccgggggcccgtgctcagggcgtccccgtgaggtttgggcgccacagtcaccggcggctctgcccgcgccctggccacagtggggacagcctggcttggcggggacgcaccagtcccgccgccgacgcggagttcctaccccgccgtgcgaggcagtggctccggcccttccagctcgggatggagtcagggagccgcccgcgcccgaatgcagaggctcctgcgatggccccggagtgagtcccccagaggagccggattagggctggaggcggccgagtcccccgagaggcccctcccgacattcccgcccccgcgcgccgctccccgggtcctccgcgtctctttcccggga

SEQ ID NO: 7832 - DNA, 31 bp, Homo sapiens
  chr10:135075092-135075123
  hyper
agccccgccctgtagtcggacactggagtcc

SEQ ID NO: 7833 - DNA, 30 bp, Homo sapiens
  chr10:135150352-135150382
  hyper
cagctgctgcaggacgcggtcggggaggac

SEQ ID NO: 7834 - DNA, 43 bp, Homo sapiens
  chr10:135170629-135170672
  hyper
tcagagccaggagcaccgctcacccgcccgccctgccctgggg

SEQ ID NO: 7835 - DNA, 30 bp, Homo sapiens
  chr10:135171068-135171098
  hyper
cgcgcggctgcccgcgatgcccggaccagg

SEQ ID NO: 7836 - DNA, 30 bp, Homo sapiens
  chr10:135171488-135171518
  hyper
gggacacccttcagcgccaccatggcccgg

SEQ ID NO: 7837 - DNA, 30 bp, Homo sapiens
  chr11:207281-207311
  hyper
gctccgctctcccgcgctcaccccgagccc

SEQ ID NO: 7838 - DNA, 16 bp, Homo sapiens
  chr11:308230-308246
  hyper
cggccagcctcccaac

SEQ ID NO: 7839 - DNA, 413 bp, Homo sapiens
  chr11:314082-314495
  hyper
atccggacaccacagcggcccttcgctccacgcagaaaaccacacttctcaaaccttcactcaacacttccttccccaaagccagaagatgcacaaggaggaacatgaggtggctgtgctggggccaccccccagcaccatccttccaaggtccaccgtgatcaacatccacagcgagacctccgtgcccgaccatgtcgtctggtccctgttcaacaccctcttcttgaactggtgctgtctgggcttcatagcattcgcctactccgtgaaggtgcgtatggccctggcggaaatccagggggtgccggtgagcctggggctccacctgcccacatgctgcctggggtggggacttgtgtgtccctgtgactgtgagtttgtgtgcacctctgccccgtgtgtgctcacgt

SEQ ID NO: 7840 - DNA, 31 bp, Homo sapiens
  chr11:320543-320574
  hyper
attccctggggccatacgcaccttcacggag

SEQ ID NO: 7841 - DNA, 272 bp, Homo sapiens
  chr11:406792-407064
  hyper
ccatctctaacccgccgctagccccggaccctcccgcgcctgctccgcaccacggagccgggcctccagagcagcaaggtcaccaggtggcggtgctggcgcagcaggcggagcgccgggtgcgcggggtcgcgcctctggccctcgaaggtgatgaagatgggtctgcgggtgagctccagcagccggcacaggccctccctgcggggcgggaccgtcaggggggtgggtgctacgctggggcccacccaaccccgcgcgggacccaccgg

SEQ ID NO: 7842 - DNA, 30 bp, Homo sapiens
  chr11:407427-407457
  hyper
cgcgcggcaggaggtcgcggtcgtccagga

SEQ ID NO: 7843 - DNA, 31 bp, Homo sapiens
  chr11:417443-417474
  hyper
cgccccgcagtcagggcgggggcggacccca

SEQ ID NO: 7844 - DNA, 124 bp, Homo sapiens
  chr11:441968-442092
  hyper
agagtggctgccagcggcgggtgctcctacctgacttccgcgtggggctcgcccctccctcctcctcctccagcgtcctgcagctgccgcgcctgggtgtagtcggggcggagccagcatccag

SEQ ID NO: 7845 - DNA, 37 bp, Homo sapiens
  chr11:450010-450047
  hyper
gctgggctccgggatccgtcggcgaggaaggggcgaa

SEQ ID NO: 7846 - DNA, 33 bp, Homo sapiens
  chr11:450246-450279
  hyper
gcccagcatgccccgcgcggactacaagcccca

SEQ ID NO: 7847 - DNA, 30 bp, Homo sapiens
  chr11:518711-518741
  hyper
ggaaacgcagccagcgcggaaccggacgcc

SEQ ID NO: 7848 - DNA, 536 bp, Homo sapiens
  chr11:537026-537562
  hyper
cggtgtgtgtttcctggtcctcgggggcgcttcccccggtgcttccttttgccgtcggcctcacttccaaccgaaggtcaggacggcaggcctcggccccaggggcgacccttccacctgggaaaggtgggcgcgagcctccagcagagaccgcctttacccgccccgcgtgggaagcgccaggatcgcgaggaaacgcgacacgtgcatcgcgacggcccaggcacggagccgcaggaagctggcacctgacgcgcctgcgcccacccaactcgagttggtggcgcgtcaccttcccctgggatcgcccgcagcaggggcgcccacgcacgtgccagtccacgtggccccgccctagcgaccgttgctaaggggcgtggctcagccgcacggaacccgagcccccggcgacttataaatatttgcgtattcaaatgaggcctggctcccgttgctatggcgcccaggccgcaaccccgcggcggccggaagaacagcctggagtaggagacagcgcctggaggtggagggcgccc

SEQ ID NO: 7849 - DNA, 47 bp, Homo sapiens
  chr11:575193-575240
  hyper
taaacacagacacccacgatgagacgtgaacacgctcctcagtgagc

SEQ ID NO: 7850 - DNA, 82 bp, Homo sapiens
  chr11:575649-575731
  hyper
tggagccaaatccacacgggacggcacagcagcgtcctgccgagcccgcctcgtccgccagcgcgcacgattcaccgcgcct

SEQ ID NO: 7851 - DNA, 53 bp, Homo sapiens
  chr11:581817-581870
  hyper
tgtgcccccaccttgccggccctggggaagccgttagccgtttggcaggtgct

SEQ ID NO: 7852 - DNA, 30 bp, Homo sapiens
  chr11:809720-809750
  hyper
tttcggtggcccttcgccccacgctataag

SEQ ID NO: 7853 - DNA, 30 bp, Homo sapiens
  chr11:826927-826957
  hyper
cacacactttttggcgccttaagtcgggct

SEQ ID NO: 7854 - DNA, 35 bp, Homo sapiens
  chr11:832780-832815
  hyper
ccccagggctgcagctcgcccggcctccgcagtgc

SEQ ID NO: 7855 - DNA, 30 bp, Homo sapiens
  chr11:842930-842960
  hyper
gttgtgggggcgtgcggccagggtcccgtg

SEQ ID NO: 7856 - DNA, 30 bp, Homo sapiens
  chr11:844070-844100
  hyper
ccaggatgagtggacgcacatcctgctctg

SEQ ID NO: 7857 - DNA, 76 bp, Homo sapiens
  chr11:1357369-1357445
  hyper
caaaactcctgcataacgaagcccaggtttctgtgttttcgtgggtgttcccgggcaccttcgggcaggtggcccc

SEQ ID NO: 7858 - DNA, 312 bp, Homo sapiens
  chr11:1411221-1411533
  hyper
cgcgggcctcggcggcggcggcggcggcggcggcggaagccaggtgcccccgcccgccctgtcctctcgacgaggcggaggcgtcgccgcgggccaggcctcggactgccgcgtcggagtggacgcggggggcggcggcgcgggcggacgcgggcggcgcgaagcagcggggcccgcgggggcgccccggccgggtcggcgcggacggcactcggcggacgcgggcggacgctgggcggcccctccctgcccgcgcgcccgggcgcccctggccggcgccgggccccagagcgatgacatcgacggggaagg

SEQ ID NO: 7859 - DNA, 235 bp, Homo sapiens
  chr11:1411549-1411784
  hyper
cgcgcagtatgttgggccctaccggctggagaagacgctgggcaaggggcagacaggtgcgtgcggccggggcggggaccggggccggggaggccgcgctggcagcgcgctgggtggggggcgcccgagggaggccccggccgcgaagccgcaggcccggcccgggccccggccgcgaacaatgggcggcccgtgcgcccccgtccgctcgtgcgccccggttccgccgcggatc

SEQ ID NO: 7860 - DNA, 335 bp, Homo sapiens
  chr11:1411841-1412176
  hyper
cggggcgcgcaggcggacaggggcgcacgggacggcgcccctcgggccccgctgcaggtgcgcggcccgggccgcattgtgcgccccagcgaccgggcccattgtgccgcgggaggagggggccgcgcgggcgcccatctgccgtctgccgcggccgcgctaataggcgtgctgcccgagcagctgcgcccccggcgggactcccacctccgcgcgccggccaccggggcctccgggcaggcccgatctccctccgcggtgggggcgggagagtgcggggacctgcagagggctggacagcgccttgcgctgctccggctcgggctcgggcgggc

SEQ ID NO: 7861 - DNA, 298 bp, Homo sapiens
  chr11:1592947-1593245
  hyper
gcctccctgtccctggcgtcctggacggccgtggccgctcattccggggccgcctcctcctcccgggcgcccaccgggtgccgctgccccagcgcccccgacgcggcgccctccgccccccggcccgggccggtgaaccccatccccggcgcccgcccccgccccgccggcgcctccgctcacctcgctcgcgctcgcctcgggggcgctccggggacccgcgccgcgctcagggcgcccgctcggccgcgccgtccatgggcccggcgggggcccgcgcagccggggcaggggccgg

SEQ ID NO: 7862 - DNA, 96 bp, Homo sapiens
  chr11:1593576-1593672
  hyper
ctgcagccaatcagcgcgcgcggctcgggggcaggtgacgtcagcggagcccgggctcggggtgaagctgaggcggctgccgcggggggggggcgg

SEQ ID NO: 7863 - DNA, 118 bp, Homo sapiens
  chr11:1594038-1594156
  hyper
cggatccccctgcactcgggcggacctgggaccctcagaggcgagccggctgcctcgggtcacacatccgcgaactccgggggcgggctccccaggacgccgccgaccccccacgacc

SEQ ID NO: 7864 - DNA, 66 bp, Homo sapiens
  chr11:1674133-1674199
  hyper
ctccgcgctggagaaccgggccgggctgcgcggaagccctggagggccagccgggtggagggagct

SEQ ID NO: 7865 - DNA, 97 bp, Homo sapiens
  chr11:1770262-1770359
  hyper
cgcgcggccggaccccctgagcctcggtgcgcgcgtccttccgccgtcccgcgggccgctgtctgtccactgatccgcctcccagcggcccaacctt

SEQ ID NO: 7866 - DNA, 36 bp, Homo sapiens
  chr11:1856742-1856778
  hyper
ccagagcccagggcagcgaggcgagttcagccccag

SEQ ID NO: 7867 - DNA, 176 bp, Homo sapiens
  chr11:1970023-1970199
  hyper
tgggcccacaagggttcgagaacaaaagagaggccttagagccctgtcctggggccctgggtgtcgacagtgcagattgttccagatctgcaggctccatgcacaggcagctggcgctccagcctggagaggctcggcctgtgggaacaaggacagtgaatcgtcctggcccaacc

SEQ ID NO: 7868 - DNA, 171 bp, Homo sapiens
  chr11:2290846-2291017
  hyper
ctcgggcctggcgctcggctccgcgggctcctgggggcgcgacccgccgggcctgcccaccccgtccctccaccccggcccccggccctccctcctccctgcctcccggctgttacctcataggtcgagggcgctcagtagccccctaaccagctggagaagtcgagtagc

SEQ ID NO: 7869 - DNA, 421 bp, Homo sapiens
  chr11:2291072-2291493
  hyper
cggaacgcggggagccgggctccgagctgcccccgcggcccggggacgaagaagcgcgggagggcgaggcggcgaccggggtggtccctggcggcccgcggggcgcagacggccgcacggcctgcggcctcagccctcccgccagcgcgttgcgcacggcgtcgtgctcggccagcaggcgctgcagcgcgcggatgtactccacggctgagcgcagcgtctccaccttgctcagcttcttgctggcgccgccgtgcggcacgtgctgccgcagcgcctggaagcccaagttcaccagcttcacgcggttgcgctcgcgctcattgcgccgcgctacggccgctgcgccgcctccggtctctgcggtggccggtcgccgccgccggctgcagcgcaacagttccggggacgcgggtctccg

SEQ ID NO: 7870 - DNA, 124 bp, Homo sapiens
  chr11:2291800-2291924
  hyper
ggactctcccaggtctccgcaggcgcggcgcaggcggctggtttttaaatgtatagataaccctcctccgcgccgccgccgtcgcctttctcacgccctccttccttcgcctcgccctcccgcc

SEQ ID NO: 7871 - DNA, 113 bp, Homo sapiens
  chr11:2291944-2292057
  hyper
cgcgatcacattctgtaaggcccaaagcgtgcgcatgtccccctagcccatcccccggacgcagtccacagatccccagtgcgcccaactggcgaaatctgcgagttcccggt

SEQ ID NO: 7872 - DNA, 254 bp, Homo sapiens
  chr11:2292105-2292359
  hyper
cgcaggtcctgggttgagccttcccgtacccccaccctaaccccgcgcgcagccccgccagtcccaagagccgccagaccttcgcacgcgcagcgcgcgctgtgggagggaaggcgcggccctggcgacaacacggctgttcgggaggcgcgcaagatccccgggggcagcacgcgccgcgcagcccacacccacgccccaccctcctggggccgaggaggcgggggccagggtctcagccaatcgtgggccac

SEQ ID NO: 7873 - DNA, 324 bp, Homo sapiens
  chr11:2292391-2292715
  hyper
cgcccggccccattgaggaagcgcgtacgcgtggcgcgtggctcacggggagcatcgctaacaaagctgggttcctgctgggccccgccctgctcctcgcccccgcgactgggctgggcgcgctgtcccctagcgcagctatgtcccgagcgcgcccccacctgtgcgttaatctactgggaatgggggtggactgcgccttacctggggcggggtggggcttaaggagtggtcgagactgaggcggggtgggaggttcaggttcccggggcgccttccccaacccgccccgctttccccgtccctccacgcgcaccctgcctg

SEQ ID NO: 7874 - DNA, 31 bp, Homo sapiens
  chr11:2398444-2398475
  hyper
ggggccgggggcggggcgtgagctggccggg

SEQ ID NO: 7875 - DNA, 64 bp, Homo sapiens
  chr11:2421389-2421453
  hyper
gggctgcccccttcaccgtggcccagcggtcacgaccccacgtcctcatcgcgggctgggactg

SEQ ID NO: 7876 - DNA, 30 bp, Homo sapiens
  chr11:2466773-2466803
  hyper
gagctctgtcccagcgccacctgccccgtc

SEQ ID NO: 7877 - DNA, 30 bp, Homo sapiens
  chr11:2554395-2554425
  hyper
cgtttcttttcgtacgcccagctttgcagt

SEQ ID NO: 7878 - DNA, 244 bp, Homo sapiens
  chr11:2883683-2883927
  hyper
cggggtcgggggtccggcgagctttaatgcgcgcacaaagcctcatttgcaggtcaatgccgcggcacactcgcctctcccctcgcccggcgccctttgtccggccgcgcccgctcctcgcgccagatggccgcggaaatgctaatttcgggcgcccctgcccccccacccccgcgtttaattgcgcctttgcagatgggccgcgagtgtgcgcttcatgcagatgagcgcggcctcgccgcct

SEQ ID NO: 7879 - DNA, 135 bp, Homo sapiens
  chr11:2905947-2906082
  hyper
tggcggccgcggtgccggccgcgggacgtcccgaaatccccgagtgcagctggtcagcgagaggctcctggccgcgctgcccctggttcgcgccctgctcggcgctctcttgaggcgccgcgtccggggccgggg

SEQ ID NO: 7880 - DNA, 773 bp, Homo sapiens
  chr11:2906315-2907088
  hyper
tgctccggcgcctcctcgaggccgtcgagggactcagcggccggctcgaggggcgggctgacagccaccgcgaccgcgacgggccgcggcgccagcagcaggcggcagcgccccacctgcaccgtctcgcggtagaacgcgggcaccgagtcgctgtccacttcggtccactgcaggcgtccagggccccgcagcggcatgtcctgctggaagtcgtaatcccagcggttctggtcctcggcgttcagctcggccaggcgggcctgcagctcgcggctcagctcctcgtggtccaccggcccgaagaggctgcggcaggcgctggtgcgcactagtactgggaaggtcccacgggcgacaagacgctccatcgtggatgtgctgcggagggacgcgtcggacatggcccggggctgcgcaaacgcgggcagcgagagaggagaggacagcgagaagaaggggaaaggagaggaggagagggcggaggccgggcgcaagggagaccccgcgccgcccgactctgcgtgtgcgagggacgcggcggctacctggctgtccggtggtggactcttctgcgtcgggttcgcctgtctcgtccggacggcagccgcgccccctcgatgcctgctggctagctcgctcgctcaggcctggccggcacccctcgagcacagcgcacttggcctgtggaacgcccagcccgcctgcgccccctttatacgcgcgggccccacccccgtgcgcgcgggcccggccgcgattagcataatgta

SEQ ID NO: 7881 - DNA, 31 bp, Homo sapiens
  chr11:2950231-2950262
  hyper
tgcggcgggtgcggtgcgttcctggcggctg

SEQ ID NO: 7882 - DNA, 30 bp, Homo sapiens
  chr11:3014198-3014228
  hyper
catctcttcccccacgccctgagccccgca

SEQ ID NO: 7883 - DNA, 31 bp, Homo sapiens
  chr11:3112953-3112984
  hyper
cagccaaggagataccgcggcccccagcttg

SEQ ID NO: 7884 - DNA, 588 bp, Homo sapiens
  chr11:3186115-3186703
  hyper
ccaccaagtggggagccgagctgggcgcgccgcttcccactcgcgggccccacccgccccaacccgccaggcgccgacccgtcctggcccggggcgcccccaggctcccgcgctccccagctccccagcgcgcgaccggccccgcggcgtggttccccgcactggctactgccagggtccgcggggctgcggcgcgagctcctggatcccttcggccggccccccgcggccctcggttcgctccggccctgcccggcggggccctccggatccttcccagcccgccatccccccgccgccctgccgccccccgggccgccgcgctcctacctcctaccgtgccgcgagctcggtgctccgggccggccgggcgcgcgggggctccactggcggcgcgggcctggctgcaggaaatgccagcagatggtccccccgcgcgaggcggagcgagggcgcggcggagggaggaggcccagggagcccggaggcgggaggaggaggcgcggcggccgcaaaacccgggccgaatcgccgcgcggagcgggcgcccaggggctgccccccaccggctgccgcttctcctcatcc

SEQ ID NO: 7885 - DNA, 30 bp, Homo sapiens
  chr11:3427830-3427860
  hyper
tgaacttcaagtggcaggagcagaacccga

SEQ ID NO: 7886 - DNA, 199 bp, Homo sapiens
  chr11:3444565-3444764
  hyper
gagcgtggctcaagttcgggaggcgttacctgcggagagtttgaggcaggcccaggagcgagcccacggtctgccgacgcggagccagggacgggccccaggatccggagcttcaggcggggccgagtccgggtttggggcccgggagtcggggccggttagggcgagggtccccgggatcgtccggtcaggccttggg

SEQ ID NO: 7887 - DNA, 27 bp, Homo sapiens
  chr11:3602557-3602584
  hyper
ccgcggacacgccgggccctggcctgc

SEQ ID NO: 7888 - DNA, 30 bp, Homo sapiens
  chr11:3829956-3829986
  hyper
agggccgggccccacgctgtgggagtcctg

SEQ ID NO: 7889 - DNA, 31 bp, Homo sapiens
  chr11:3887889-3887920
  hyper
tgcgatccgcctgcctcggcctctcaagata

SEQ ID NO: 7890 - DNA, 30 bp, Homo sapiens
  chr11:6341702-6341732
  hyper
tcatgatccctgaccgctctgctccgtctg

SEQ ID NO: 7891 - DNA, 30 bp, Homo sapiens
  chr11:6440455-6440485
  hyper
cggccctcggacctcggtgagccccgcggt

SEQ ID NO: 7892 - DNA, 31 bp, Homo sapiens
  chr11:6502786-6502817
  hyper
taagtgagaactaagtcgtttcgaggccaga

SEQ ID NO: 7893 - DNA, 461 bp, Homo sapiens
  chr11:6947597-6948058
  hyper
agggccagagttccaagtgtgcggcgtgggcggggcctgcagaaagggacggggcctgcagaaagggacggggctggcaaaggcctggtctacctcaccgatccgggtcgcgggggctcctagggggttccttccacagctggtgcgcgtgcgcaagagtgcgtcgaggttgttccgcggcaatttatgaaactcggagccggcagtgagttgagggttcggcgaggtcagggattcctagttgcagcgtgattaccaacgccagctcccttcactgtccaagacagcgattccgcggctcctctgagaactggcgcttgtgagtgactgaacgggccactggagaggagcggtgctcacgggtatcgttctcgtcagcgggcggtggggacgcggggtcttggaattgggaatcacgcttgagggcgtccatgcggaacgtgcagcttacctcagcttgc

SEQ ID NO: 7894 - DNA, 215 bp, Homo sapiens
  chr11:7041670-7041885
  hyper
ccagaagtatcccgcgcctcccgacctttggccgctggcattcctgcgcgggcgggagctgcgggcgctcgggggataaggcgaggacgcaccagcattaatggaataggagaactcccgaagcttttagggccctgggaaagggggcgtggctggaaacggagctactggcttcggagaattctgtgaccctcaccaccgcgacgaccccgagg

SEQ ID NO: 7895 - DNA, 176 bp, Homo sapiens
  chr11:7272752-7272928
  hyper
ccaggcggctctttccaagttcgaagcagggactcggttctgcgcatctggcgggtgtgcccagattgtaaccttcgcactaggcatccaagaacgtgctttggacacactcggcggtgggagcgggtgcttggtttgcatcagggatgaggggtggagtagcgaaagcgcccgga

SEQ ID NO: 7896 - DNA, 193 bp, Homo sapiens
  chr11:7273066-7273259
  hyper
cgcgcactcctgacctggccccgccccccggcggccgcgagtagcgggcggagcgcaagcagagaggcgctctgggctgtgcggcaccgcctctcctcggtgtctggggagggacggagggaccgggcgggagagagagaaagcctgaccgaccggctggcgaagagctgcatgcaaccggtgggaggccggg

SEQ ID NO: 7897 - DNA, 219 bp, Homo sapiens
  chr11:7273679-7273898
  hyper
cgagccaggagagtgatcaagaaccagcgcactgtggcctgatgctgtaaccaggcggggacccgggcggtggctactgcacggaggccgactccgggtcggctagggcagggttggagggaccacgcccgccacctgcgctcccatcgccaaggctcctgggggcggctccctagctccgagctacgctctccacttcccgggctatctgcactcaga

SEQ ID NO: 7898 - DNA, 180 bp, Homo sapiens
  chr11:7274075-7274255
  hyper
cgcgatccggcgttgggccggggacagggtgcttctggccttgggcagacgggcctgaacccgttcccggcgggtcgcacggcatggaggtggcctgggcctgggcgctaggctcgaccagcgactaccgccggccacgatggggttcgtagactcgtcggtcctggcttgtgcacctgt

SEQ ID NO: 7899 - DNA, 31 bp, Homo sapiens
  chr11:7534832-7534863
  hyper
gcgccgggtacccacccgggcctccccgcaa

SEQ ID NO: 7900 - DNA, 30 bp, Homo sapiens
  chr11:8040448-8040478
  hyper
ggcgacagcggatccgggactcccaagcaa

SEQ ID NO: 7901 - DNA, 30 bp, Homo sapiens
  chr11:8103086-8103116
  hyper
tccctacaggtacgcgggcgccgggccggg

SEQ ID NO: 7902 - DNA, 700 bp, Homo sapiens
  chr11:8190058-8190758
  hyper
gggaacccttgactcaaagcacgtgaacaaatggtgacgagatgagttaagccagcggggtaagagagaagggactgcgcctaaacgggagtacgcaaggccacctagaggatgcacagacctgcatgcatacgttcctgacccttccagcagcagaaccatctgggccgccacccgctgataacaacggaaccgtgggcattggcccttcaacgccgtctcgcccgccctctccagtcagtttggtggatatttcggtgaaggctgcagactctcagagtcacccctccctcaagcagcgttctccgtactcttcggcgccgggaagctcagagggagctggcctgctcttaccttcaggtgtcggcggcggctcctgccgcttcccgcgggacaggaaggccttgggcagcagcagcgacagagccaggacaagcccagaagccagagcgactctctgcactgtggagtacgccatgactgctcacggtggtcgcaggtgcagacgccagccggaaccggaaccggaaccggagcacgggctgccgctcccgaccgaaccgcgggcggcgcggacggcgtcgcgcgagggacaaggtgcgcgaggcgcacgcatcttcacctccactgtcgggagttgacctgctcctcccgcgtggttacccgtcgctgtaaatggtaccctcgccttcccgttcat

SEQ ID NO: 7903 - DNA, 398 bp, Homo sapiens
  chr11:8284261-8284659
  hyper
agggagctagcgggccggcacaagaggcggctctctttctcaccgagtcacgctcatgcagatgtcccccggagggtccaacccgccttcccctcgcctgccgggcaccctggcgctcgcgccgtcctcccgcgctcccgcttgccccgagctctggagcccgattctccccgaagccgctgatttgctcggcgctcagcgcctctcgggttacgcggcggctggcgcgagggtgatggctgcggtgagagcagcagcctcagacacgaaatgctcagagcgaacctccgcggcgcggagatcgcaagggagccccagcctccgcgcggccccgcggcgcagcacacggccagtgcacagctcctcggctcgcggccgggacccggggggcgtgcggc

SEQ ID NO: 7904 - DNA, 145 bp, Homo sapiens
  chr11:8284859-8285004
  hyper
gtcgagaccccggcccgccacctaccgtcctccttgtccagcaccatcatctcgggcgctccgtgtccagccgcagctaggctcggccgggagaagggcgccgactcggggcgcgctttggaggggcggccggtcttcgggcagc

SEQ ID NO: 7905 - DNA, 30 bp, Homo sapiens
  chr11:8305026-8305056
  hyper
aaggcaggaaacttcggcggaatatttatg

SEQ ID NO: 7906 - DNA, 30 bp, Homo sapiens
  chr11:8305287-8305317
  hyper
cggaggcggccctccggacgtgacagctcc

SEQ ID NO: 7907 - DNA, 411 bp, Homo sapiens
  chr11:8615341-8615752
  hyper
gggtgaaggtgagacggtggagatgaaccggggcagacagagaccaccccaaataccggacccgggggaaatggggtaccaacggctgggccccaggagacactcggaggggtccgcgggctcggcccggtccctccgctggggggttaccagccggccggcagcgagatacccagaggcccgtttttccaccgcgttgccatagcaacggcctggccggctgcgccccgggccgcccgccccatcccgcgggcccgccctgagccagtgactccagggaccactcaccgcggccggcggactggcgggtctccgacaggtgcgcacactcggcgcaggctgtcgctgagcccggaattctgcaccgggagaaacttttcagcccgcagagcaaccgcagggcagtggacg

SEQ ID NO: 7908 - DNA, 30 bp, Homo sapiens
  chr11:8616001-8616031
  hyper
ccactcttctcactcggagtcaagcccatc

SEQ ID NO: 7909 - DNA, 141 bp, Homo sapiens
  chr11:8710628-8710769
  hyper
agccggccagtggtgcgcgagcgcagataactcccctggagaggcgggatgttcaactccacccctggtccttgggcggccgtgggtccccttcgaagcggaggaatggccaacctcgccgcacttcgagcccctttaggg

SEQ ID NO: 7910 - DNA, 340 bp, Homo sapiens
  chr11:8892252-8892592
  hyper
tccccacccccaaccgcgcggcccccgccgggccggaaagcagagccggcggctactgaccgcccgggagggcggaccccaccagccccgctcctctgcgcctgcggcggcccccacgcgcgtactcacggagctggacaccgctgccggggccgggagtcgggagcagagggaaaagggctgggagggcaggggcgggaccgggcgcgcacgcgggaaccggggccacccggcccggaggcgcttacctctgcgttccccagccgggccgggcgcggcgcctggatggggtctcgccgggagccgcgcggcccggaggaggagccgctcctgcagagag

SEQ ID NO: 7911 - DNA, 974 bp, Homo sapiens
  chr11:9025074-9026048
  hyper
catccagggaggaggcacagccgaggggagcgcaagctagaaaagctacgacggaatccccaccgaaaccgcagcaggggtactggaaggggaggaatccgcgacgcagcgaccgcgagccaagggcagcggcgggccgggccgtgactcagtgaaagccgcaacggccgggcctcggaaaacggcgggcgcgaagccgccggggccggggcgagaacggcggcgggggctcaccatgtccttggacgagcccagcttcttgaggccgtccaggggcagcaggtcggcggagtccttgtggatgaactgcaccgcctgcttcatccggcgctgctgtcgcagtgacgccgcctcccgcatgtcggtctccttgcggccgccctcagtgaggagccctgagtaaaacatcgctgaggcgccggcggcccggtagcccacagccccccggcagcctcagcctcgagctcctccagcgccgcaagggccccgagccgcgccttttatagccgagcgtgacgtcgcggggagcagccagtgcgcgcgcggggggcggggccggcacagagtccacgccccgcgcggctccctcgcgtcccgcgtcccgcgtcccgcgtcccctgctcacccggtggcaaagccggcgaggaggcggcggcgctggtggggactgacccggcagtccgagaatccaccgcggccttttcacccaaccgccccctcctgcgtgggggccccgcatcccctggactggcgtgggctctggggcccgatgccctggcagccccggccatctctgccgctggccgcgggtacctgctcacctgtccacgccgtggccgacccggggatcaccgacagccgggccatgcctcgagtcccgccgcccgcgccgctgctcggcttctcagaaacgcacctccacgccgccagccggggctccagggtccaccgcccgggcccggaggactggcgac

SEQ ID NO: 7912 - DNA, 30 bp, Homo sapiens
  chr11:9112700-9112730
  hyper
accggggcgggaaccgtcagcagctccggg

SEQ ID NO: 7913 - DNA, 30 bp, Homo sapiens
  chr11:9285571-9285601
  hyper
cttaaagtacaacccgacaaacctccaccc

SEQ ID NO: 7914 - DNA, 30 bp, Homo sapiens
  chr11:9287058-9287088
  hyper
actgcttggtcgcccgcaactgccactccc

SEQ ID NO: 7915 - DNA, 30 bp, Homo sapiens
  chr11:9482579-9482609
  hyper
gcatggtggtcggacgaaggaattgttgga

SEQ ID NO: 7916 - DNA, 210 bp, Homo sapiens
  chr11:9596557-9596767
  hyper
gcatgcagggagactacgcttggacttgggagtaaaggctggccttccaagcatttacagtcctacagactcatcctaagtccaggcagtactgaggcctgtttctggacaaggtcttggcccagcatttgtttttatcgtgggtttgcggtgcccagagtttggccggcctccgtgtgattaggaacatcctaccgtagataaggtatc

SEQ ID NO: 7917 - DNA, 31 bp, Homo sapiens
  chr11:9685558-9685589
  hyper
gggcgcggcactggaccggcgccggcagcag

SEQ ID NO: 7918 - DNA, 180 bp, Homo sapiens
  chr11:9685848-9686028
  hyper
cccacccgaccctccccggcgcgctctgtacttcccttgggtggaagcgggacctggcgggccgtgaccgcagggcggggcgggtcggaatgcgcccggtaggcccgcttggggcggagtgggtctgagaccgggatttggtgtttactgcctcccccttgccttcgggccatgccctcg

SEQ ID NO: 7919 - DNA, 30 bp, Homo sapiens
  chr11:10316446-10316476
  hyper
ggtcccagggctctcgcagcccgagcaggt

SEQ ID NO: 7920 - DNA, 31 bp, Homo sapiens
  chr11:10814227-10814258
  hyper
ccagctcagcctcctgcgctccccctgggtc

SEQ ID NO: 7921 - DNA, 981 bp, Homo sapiens
  chr11:11642616-11643597
  hyper
acgcacatttggacacgtgcgcagcgcgcccccataccgccagctagctgcacacatccgctcgtgcagccctgcgcacacacgtgtgccccggggaagagcgcacggccgcagacagaaggtcccgaacgcaggcaggagctcacacgcaggccccacgactaccacgcatctgcggccccagagccccgccgtggctgagttgatgcgcaccagccccagcgcaccccgcgccgcgcggggcactcccgggcctcatgggcgacccaagtttccggggcgcccgtaccttgaatgtgctgcttgatgacattctccaggtggtccagccgctcaataatcttcagagtgtcccctttgtcttcctccagcttcttgtcgggcgccggctcctgcccccgcacatacacgctggcgatgtagttggtgacccagcccacgtagagcaggcagatgatgttagtcatgccgctcaggatcacgcaagtggacaccaaagttttggtcttcctggtgcacaccattctgggctccttcctccatatagagctcccgggggcccttccttgtcgtgcgccccgaactcccccgcgctcgcaccccgtagcacgtccggagccgctgggcacctcagcacctgagtcccgaggttctccaaagcccggtccgctgccggtgtagccgccgtgcccaagtttgcagctcctgccgctggccacccggagagaccttgacaaaggaaaccaggtggatttttttccaaattaaaaatccctgaacccttcctagaggggtcacgggtagccggcagccgcgcgtccagatgtgtacgtctgggaaactttgccactgcctgtgtcggcggccacgccgcttcccatcgccagcgccggctgccttggcggtccgaccggcccgcgctgctaggagaacagcggcagcggcagcggcggcggggagagccgcgaagcagagcggccc

SEQ ID NO: 7922 - DNA, 1075 bp, Homo sapiens
  chr11:12029931-12031006
  hyper
gcgcaatttgtgctgcgtgtcctccatcagttcctcaacctcgcggaacatctcattgagggtggcctcctcctgcgggtagctgagagccgggccgggcttgactggagccgaggtcgccgtcggagcgggcgcgggggccgtggggaccgccgccgccagcagcaggcacagcagggtggccccaagccgctgcatctccgctctgcgcccgcagccgccgcctgtgtgtcccggaacgcgatcagaggcgcgcggaccacccccctcgctgggcccgccgccccgccccgttccgccccgccgcccgcccctggcgcccctctttcccgcacccgcccggagacgggaggaaaccgaggcccctgaaaacgcagctcccctacacccgaaaagacgcgaccccacccgctccagcccgagccccgatcgccccaggaccccgcacccccatcctcgagcacaagctgagctctgctcctcacctgtgatgctggagccctcgccagagcaaccgaacccggatcctctacgctaatagctcccaagccccagctcacctagactctgtccccggttcaaaccctagcccctcctcgaccaggtcagagtgcccgacccccacttccacctcaagcctctctcagcccctacctggggtggaccaagcacaggtcagccccctccccttggcgtcgggtcctactcgagcgccccgccccacatccaccaagagaggctgagctcagcagagtcgtcccctcccccgccgccgcccctcacccaccccgactggaccgagttgcgctgcgggccggactggatctgctcgctcccgccgggaggccgccgggctgcgggtgcagatgcgggagcggcgcggtgggcgggccgcgggtgcgggagcgcggcggggtgcggcagcgccggtacccgagggagcccgcaagacgcgccccgcccgcccaccaggctccctctccgcccccgccccgagccccgcccgcccaccaggcccaccccgccccgcggaggggccgcagcccggccattggccagccggggcgccggccac

SEQ ID NO: 7923 - DNA, 846 bp, Homo sapiens
  chr11:12131780-12132626
  hyper
tccaaaaggggatgccgtgtcttgctttccagccgcctagaccaagaagcgtgaggcccaggccctcgccgctcccttgatacccgcttaccaacaccgggggtttcatctcgcagcgccaccacgccccactcccagcagccctcccctggtctccgccctgtgcgggtcagggtgggagcgcccggccactccctgcgttctgggccgggctacagcccacgtgcgccggcggcagcggcggtgacagccggccccacgggggcggggcgggctccgtgctgtcctgtcattggccgcgccgctgtcgggggcgttccccagcccggtccaccgcgcggcgcagaaccgcaggcgctcggctggctaagcctgcgccgggccgcctcgctcgctcccagctctgtcagtggcccgcggggcccgatcgctgcgcccgcggccagggccgaggcaggcctgacccggggccgggcagcccgcgcgactttcggtaaggcgggggcggcgctggcctcagggtggggagggcgggcgggcgcgggtggggaccgtgccagcctcggctggactctgcgccgtgtccaacgcccgggagggtcaggtgcggccgcagcatcccccgcctcaaacccacccggcggggcgcacagtgagcaggtggcgctgcgacgaagcccggggcggccctggccggcctctgaaccaattagaacgcaataaaagcctcccaccggcacgccgaactacctcttactccgctccgcaacacccaaaccctgcagttccaagcctagaaaatcgcaagcgccaaaacggggtgggagtgacgcgcctgcagtgctg

SEQ ID NO: 7924 - DNA, 30 bp, Homo sapiens
  chr11:12260402-12260432
  hyper
gtttctaaattaaaatttttctttaaaaag

SEQ ID NO: 7925 - DNA, 711 bp, Homo sapiens
  chr11:12399081-12399792
  hyper
gaataattccgcttccgtttggaaagccgcagcctcagtcccgccgccgcccgctgcgtccgcccagcgccagctccgcgtcccgaccggcccgcggcagcctgcgccgcgccatggccacctccccgcagaagtcgccttctgtccccaagtctcccactcccaagtcgcccccgtcccgcaagaaagatgattccttcttggggaaactcggagggaccctggcccggaggaagaaagccaaggagggtgagtgcggccaggccggccgggcgggcggtaggagccgggggtgccgtaggggccgaggggccggggcactgggaccgggcgggagcgcgccgcgggtgcccggcgcggtggggcgcgcggcgatgcgtgcgcgcgcttcccgggtacgtcgggcaggagcgacgcgcaccccacactgagcccggggctcgcgggccatcgaggccaccccgcccgctcgcggtcgcccgggcgctgccctcctgggccggggaccaggccaacgcccccgccgggccgtgggcgggcgccgcttggcggccggaggcggcgggaccggagcccaggcggggccccagcccgcagacagtgcgatccagtaggccctgccccgccctctgcgcccgaaggctggcatttcccaagtttccgctgcagctttcctgggcgccgtcgctcttactcgttgccttcattggt

SEQ ID NO: 7926 - DNA, 96 bp, Homo sapiens
  chr11:12695399-12695495
  hyper
gctgggaatctggcccggagacggcgtccaccgcgctcgagagcaacaatctgcatcaccagaaaggcaacttctctaccctacacttgcagactt

SEQ ID NO: 7927 - DNA, 1422 bp, Homo sapiens
  chr11:12695572-12696994
  hyper
cgtcgcgcgcaactcccgcctcggcgcctgccccctggaagaaacccaggcttccagagttcttcgcgcgagcgcagggacttccaagccgcgcagctcccgtccgccccgccccgccccgccccggctcgggacaaagcccggagcccgcgccgggagacggagggcggctcccgcgcgagccacgctcccccgtgggcgcgagactccgcccagctgccgaaagcccgcgccccaacggcgaagcagccgcgccggtccgccccgattccccatgacgtcaccggcggcggcaggccccgcctccagccccgggcggcaggccgcatgacgtcaccgaggccccacccctccggagcgagttcggtcctggcgttcatttcattcctgtcctcattccgaacattcttagcatcgctcgcgccgcgccgcgccgcctgagccgagccgagcctctgctgccgccgccgcggccccgccgcccgccgcgggcgcccaccaagcactttgcagactcgcttccaccctgcgggccattccgcgcggcggggcccgggcccggggcggccgcgtccaggcacaggccatgcagtgacgcccccccacccctccacctttgcccggagcgcgggcagcagcccagcgcgccagccggccccggggcaggagcggtgctaggcaggggtggggtggccgggcccagggaccgggagccggggagggagccgggcaccgagcagagggcgggggaagcggcgccgaagtttgcctcggactcgccgggcgctgcggtggctccctgggccgaggtaagttggcgcgcggggcggatgctggggtgcggggggcgcacggggcagcggggggccggcggcgcgtccctcgcgggccgctctttctttgcgggctctgctttgtgtgcgacggcgggcgggcacgcggagggccgcggccgggcccccacacccgcctccccgcgccccctccgaggtgagcggccgggcgccgccgcgcgacttgccaggacgccaagttgggccgcgcgctgggagcccgcgcggcaacaggcggcccccggccggccgcgccgcgccccccgcgcgccccctctcccgccgcctgcacgcgcacacacgcacacaccctcgggcgccttggacggggtgcgctggggagccagaagttcggagcgagcgcgggcgggcagagccgccgcctcggagcccggagccggcctgcacccccctgctttcgccgccgccccccggcgccgggtacccccgaggccggcccgggtctgcgcagacttgtgccgctggcggggggttcgctccttcttctcaaagatgaaaaagggcacggtcgtctttgccgcttctccaggactgttgctgccgctgccgccgccgcttcattgcacat

SEQ ID NO: 7928 - DNA, 422 bp, Homo sapiens
  chr11:13030496-13030918
  hyper
gagaagataaagtcacgatgcgtccagctagctatagacacaagcagaggagccagtaggccaaaggagacgcacagctgatccgtgccgaggcgcgggctccactccctgaagtggagggacccttgaatctttccttgcgtaggcgcgcggcagagcagcgatttggcgaaaagggccgagactcaggatgcctgcaatgcgagcgaggggcggacagggcgcacggggcgcggcaaggctgcgaggggcgggcctgggccctgagcctcctgcacttccagccacagctctgggccttgggggcgggaaggggtggagccacgtggggaggagcaaaacccggaggtcccgggcaccttgggcagagccagagcggcgggagccggtcctgggcgcgttgccccgggagcgcccgtcgt

SEQ ID NO: 7929 - DNA, 770 bp, Homo sapiens
  chr11:13031244-13032014
  hyper
ggcggcgacggagacagcggcggagccggcggctggggtcggccggcgacccgcatggcccgggagagctgcccgaacccccgaacgaggacgacgaggacgacgacgaggcgctgccgcagggcatgctgtgcgggcccccgcagtgctattgcatcgtggagaagtggcgcggctttgagcgcatcctccccaacaagacgcgcatcttgcgcctctgggctgcctggggcgaagagcaagagaatgtgcgcttcgtgctagtgcgcagcgaggcatcgctgcctaacgccggcccccgcagcgccgaggcgcgcgtagtgctgagccgagagcgcccctgtccggcccgcggggccccggcgcggcccagcctggccatgacccaggagaaacagcggcgagtggtgcgcaaggcctttcgcaaactggccaagctcaaccggcggcgccagcagcagacaccgtcgtcctgttcgtccacttcgtcgtccactgcctcgtcctgctcttcgtcgccgcggacccacgagagcgcgtcggtggagcgcatggagacgctggtgcatctggtgctttcccaggaccacacaattcgccagcaggtgcagcggctccacgagctggaccgcgagatcgatcactacgaggccaaggtgcacctggaccgcatgcggcgtcacggggtcaactacgtgcaggacacttacttggttggggcaggcatcgagctcgacgggtccagaccgggagaggagccagaagaggtg

SEQ ID NO: 7930 - DNA, 332 bp, Homo sapiens
  chr11:13032093-13032425
  hyper
ggcgctgcgacgacttgctgcggcttcaggagcaacgggttcagcaggaggagttgctggagcgcctttcagccgagattcaggaggaactcaaccagaggtggatgcgacggcgccaggaggagctggcggcgcgggaggagcccctggagcccgacggtggccccgacggcgagctgctgctggagcaggaacgggtcaggacgcagctcagtaccagcctttacattgggctgcggctcaacacggacctagaggccgtcaagtcggacttggattacagccagcagcaatgggacagcaagaagcgcgagctacagggccttctgcaa

SEQ ID NO: 7931 - DNA, 31 bp, Homo sapiens
  chr11:13298792-13298823
  hyper
ttttcgtcggaatgcccggaggggagaagaa

SEQ ID NO: 7932 - DNA, 30 bp, Homo sapiens
  chr11:13300577-13300607
  hyper
aagttctcgccggccggtgagagacccgct

SEQ ID NO: 7933 - DNA, 779 bp, Homo sapiens
  chr11:13689626-13690405
  hyper
cgctctcaccgacccgggccacacccgccaagctggtagttctccgaacggatccctcacgcccagcaatggccggagggcccccgggccccaccataatagcgctaagcacgccacaatggcagccccgctgtctcccgcgcgggcctcgctgcgtgctcccaaccttgggagttggcgcccctcccgcgcgacggacagccgggcgtggccctgggcgcgacccgacaggacgccagcagccggcgggggcgctccaggactcgagatgtggggcgcgggcccattggctgagcattcccccgcgagcctcccggccgcagggcccacctcccggccctctctccgcgcccccattggccgttcgcgttccgcgggcgtccgctcccgccccactcccgcccggagggaaaccgggttgggggtgagaggctaaagcagggaggaggatgactggtcctgcggataagggtgtgcgcgagagccaatcaaaagcggatgtcgaaaagaggcgccgctccagccagtcacgtcgcgaggtgcggtcggggccggctgacgcgactgcgggcctcagccaatgggcgtgccactgcccgtccgctcttcagcagccggtcgcgggcggtggaaaagcgagtgaagagagcgcgacggcggcggcggcggcggcgcagctattgctggacggccagtgggagagcgaggcctgagcctctgcgtctaggtgagaagggggtgcgccagcgggagcggccgggctgcgggctcctcctcgc

SEQ ID NO: 7934 - DNA, 81 bp, Homo sapiens
  chr11:13690636-13690717
  hyper
cctggggtgggaggccgctagaggtggcgaaggtggggcggggtggttagccgagcagcgggctccgcgtgctcgcgggag

SEQ ID NO: 7935 - DNA, 30 bp, Homo sapiens
  chr11:14086442-14086472
  hyper
caggcatgaaaatcaaggcttctactttag

SEQ ID NO: 7936 - DNA, 713 bp, Homo sapiens
  chr11:14665235-14665948
  hyper
ggggcagtcgcgggggaggagcgcccgcccgccgctcgcgcgcccaacggaccaggctggggccgtgaggtaactgttgcagccagcggaggtgggaggcgacactgagtctccagtcccgagaggtgcccgagggaaaaggaggcggcagctaaactggtcctggagagaagccccttccgcccctctcctcagccagcatgtcccggactccgccgctcctcagtccgcgcggtggggaccccgggccgtggcggccggcgcagccctgacgggttgcgaaccagggggcgccccgaacgcgggggttggggtctgggagcgcgagcggccgctacggtacgagcggggtgtgctgagtcccgtggccacccccggccccagccatgaggagggacgagcgagacgccaaagccatgcggtccctgcagccgccggatggggccggctcgccccccgagagtctgaggaacggctacgtgaagagctgcgtgagccccttgcggcaggaccctccgcgcggcttcttcttccacctctgccgcttctgcaacgtggagctgcggccgccgccggcctctccccagcagccgcggcgctgctcccccttctgccgggcgcgcctctcgctgggcgccctggctgcctttgtcctcgccctgctgctgggcgcggaacccgagagctgggctgccggggccgcctggctgcgg

SEQ ID NO: 7937 - DNA, 121 bp, Homo sapiens
  chr11:14665995-14666116
  hyper
cgcctgtgccttcttcttcctcacctgcttcctcacccggaccaagcggggacccggcccgggccggagctgcggctcctggtggctgctggcgctgcccgcctgctgttacctgggggac

SEQ ID NO: 7938 - DNA, 30 bp, Homo sapiens
  chr11:15136361-15136391
  hyper
tccttgggaggctgcgaccgcctcggagag

SEQ ID NO: 7939 - DNA, 252 bp, Homo sapiens
  chr11:15671675-15671927
  hyper
tcccagaggcctgccgcgctcggcctgcagttctccgctgcggacggtaggtggcagcgggtcgtgagaaatggccctcgcctggccctggctgcggagacccagcctggagaaaaacgtggctgggcttcggccgccgagcgagggagaaccgcgcccccggggtggggcttgggggccgccctgggactcggtggcttctgcccgagcggaggtcagcgaggacccgggaggcagcgcctggatggagct

SEQ ID NO: 7940 - DNA, 195 bp, Homo sapiens
  chr11:16626017-16626212
  hyper
ggttgctggctgggccgtgcagccagggccaaagcccggccgcaggagtacgcggctagcaccggcgcccgggacgcggacgtcatccgagcgcccattgacagtacagcgggaggtccggagcccagcccagtttgccgcaaggacggcttcgggccacctctagccctaaacttcaagcgcggccctcacagg

SEQ ID NO: 7941 - DNA, 340 bp, Homo sapiens
  chr11:16626439-16626779
  hyper
tatcttaaagctctgcggagcgccggggaagcagcccggcaccgagctaatctgccctcagcagccccgggccgctcctcccggcatcggagcacaaccccagcagcctttgcacaagccctttcccttctctgcccggccctttaagggagaaggaagaaagcagctcccgcgggagcggccgggctcgggctgggtcccggggcgggtggcagcaccgccccctgccctgggccgagcccgggagcagcggaccgcggccccggctgcagaggaacggcgggtggcggggccccggcagggcgccgagaaggacggagggcgccggctgggctcaggg

SEQ ID NO: 7942 - DNA, 335 bp, Homo sapiens
  chr11:16628320-16628655
  hyper
cgcacagttatctacggctacaacatgtgttttctcagggtggattttttggaggggaggtgaaggggagaaaaacagacccccgccacgcagatctgtcactccggaacaaggcgcaactctccaagagggggacgcatcctcgggatcagcgcgtccaccagcgagcggcgggcgcccgggcccctttctctccctccactccccctccgcgtcggcccctcggagcgccctcctcccgctcctcctcctcctttcccctccccagccaagtacgcaaacccgccccggcccggcagccgcggctcccggccacccgcgccctctcggggctc

SEQ ID NO: 7943 - DNA, 303 bp, Homo sapiens
  chr11:16628929-16629232
  hyper
cttgtgcgctgcgccgcaggagtaaatggcattaaagaaaaagggaaagatacaaataaaaaaaattaaaaggaaggggagtcggtgctaggtcaattgtcacagtccggggagcaagggaacagaaccccccagcgccgcggccggcgtagcccgttaactcaagtctgcgggggtgtcccgccccgggtgggggcagcgcagagcggcagaagtttgccgccggggttccaggaggtgcgcgcggagcggggtgactaggggcttcaccctggaacaagtgaaggcgatggttagtgctgt

SEQ ID NO: 7944 - DNA, 30 bp, Homo sapiens
  chr11:16759978-16760008
  hyper
cacatccgcgggaacgcttcctccaccagc

SEQ ID NO: 7945 - DNA, 35 bp, Homo sapiens
  chr11:17035837-17035872
  hyper
gcgtccccgggtcctcgcgccgcacttgatgaaga

SEQ ID NO: 7946 - DNA, 30 bp, Homo sapiens
  chr11:17297717-17297747
  hyper
gaaagagctgtctgcgaatgggcaagagag

SEQ ID NO: 7947 - DNA, 572 bp, Homo sapiens
  chr11:17372998-17373570
  hyper
tttaaagtaatgtaagtttatcgcgccaacggtaagatgtcgctctggacgcgtgcacctgctctcgcaatcaccgactgcggtcagcatcttccttagagcagcgccccgggccacttggatcccggtctcaatttactaagcgaacccagaggatgccccgagtcctggaccgcagagccgctcgcgagaggcaccggggctgtaaccgcgcaacctcgtgccgcgggcggaggcgagggaggattccccggccggtgcccgcccccgggctaaagtgcggcgcgggtggggctggtcacgcgcctggcttcctgcagtgcgaacctgggaaatccaggcgacttcgcagttgccgaagggatctgaagaagtgggatgtgcaaaagcgccggctggaaatcccggctgtgtctccgtcaactctttacgcaacagaggtctccccctgcccttggtttctaccgggccgcctgctcccactcggcgaaaaaaattacacaacagcagccgcggcgatgacgtggagggctgccgcctccacgtgcgcggcgctcctgattctgctgtgg

SEQ ID NO: 7948 - DNA, 116 bp, Homo sapiens
  chr11:17373642-17373758
  hyper
cgggtcggctccctagcatcccgccaggggacctcaacttcctgggggctgagagctctattttcttttctatttcttctcctttttttttttttttttttttgagacggagtctc

SEQ ID NO: 7949 - DNA, 194 bp, Homo sapiens
  chr11:17373997-17374191
  hyper
aggcgtgagcccccgcgcccggcctgggggctctattttcaagcgtccctcctttgtgagaagcggagtccccgatgcaacaggtttacattgaaggcctgccctgtgcagggtcgacacctgtgagagcggaaacggtgcttccttggatgtcgcgcgtttggtgcctcggtatttggcgcctctctcgcatc

SEQ ID NO: 7950 - DNA, 30 bp, Homo sapiens
  chr11:17411255-17411285
  hyper
aatcccagggctggcggaaattaggcggtc

SEQ ID NO: 7951 - DNA, 30 bp, Homo sapiens
  chr11:17497678-17497708
  hyper
tgcgcggctcagcccggtgaaagcataggg

SEQ ID NO: 7952 - DNA, 30 bp, Homo sapiens
  chr11:17498221-17498251
  hyper
caccacgttgagcgcgtccacaaagcagcc

SEQ ID NO: 7953 - DNA, 336 bp, Homo sapiens
  chr11:17740334-17740670
  hyper
attcctaacctgggcaggatccgagtttggagagattggcgcgaagctttagcagcaatctccgattcctgtacaaccatagctgggtttctaagcgtctagggaagaaggactgggcccacgacctgctgagcaactcccaggtcggggactggcggaatatcagagcctctacgacccgtttgtctcgggctcgcccacttcaactctcggggtctctccgcctgttgttgcactcgtgcgtttctctgcccctgacgctctaagctttctgctttctgcgtgtctctcagcctctttcggtccctctttcacggtctcactcctcagctctgt

SEQ ID NO: 7954 - DNA, 123 bp, Homo sapiens
  chr11:17740962-17741085
  hyper
tctgcgggcccctgcggccaccccggggacccccccaagccccgccccgcagtgttcctattggcctcggactccccctcccccagctgcccgcctgggctccggggcgtttaggctactacg

SEQ ID NO: 7955 - DNA, 30 bp, Homo sapiens
  chr11:17742120-17742150
  hyper
gttttggaagtgtgcgggcaagcgttcgag

SEQ ID NO: 7956 - DNA, 8 bp, Homo sapiens
  chr11:17756993-17757001
  hyper
cgaccacc

SEQ ID NO: 7957 - DNA, 799 bp, Homo sapiens
  chr11:18416098-18416897
  hyper
cccagctcagagtgctgcagccgctgccgccgattccggatctcattgccacgcgcccccgacgaccgcccgacgtgcattcccggtacggtagggccctgcgcgcacggcgccagagggatgggcgggtagagccaactgcctctggttctgctggcctccgctgctcgcgaagggattcctgctcccgggaggtgtaggagccgctttccagaagcacagcccagagacgtctgggcggcggcccacacaacgcatgtgttcggagctcgccgcgctctgcttttgctctaagcgggaaccatggcttctggccacgctggggaaccgaggaggtggccgcacccaagcaggggtcgaaagcccgggtggatgcggaacaaggatatgataggccttaagggtgggggatacctctgggctcgaaatcggcgggcggtgcaaaactcgaggtccagttctcggagcccatagagccaaaaaagcctcagcttgtccggggcgggttcttgaaagacggaaagcggctgagtaccacgcggcttgcatttttctcttgggacgctcgagaggtgggctccgtgagggcagctgctgcctgcagattatagggagccctttgcgcatttattaagaagctactggtgtatctcgggctgcgctaggcacggcgcatgcaaagatgaagcaggcagcatcccagcccttccgcacctcagacggtcagttgagtaggatccgccggtaccaactcctccttttaacaaatagggagaccgaaagctaggagacagtcagg

SEQ ID NO: 7958 - DNA, 30 bp, Homo sapiens
  chr11:18610407-18610437
  hyper
gagtgggcaagtgacgagggcacggccaga

SEQ ID NO: 7959 - DNA, 39 bp, Homo sapiens
  chr11:18610705-18610744
  hyper
tcaggaggagccttgccggagaagcggagataggacagc

SEQ ID NO: 7960 - DNA, 31 bp, Homo sapiens
  chr11:18720185-18720216
  hyper
ttctccgagcagcagccgggggcctggccgg

SEQ ID NO: 7961 - DNA, 969 bp, Homo sapiens
  chr11:18742723-18743692
  hyper
tggtcccgccctccatggctacgcccaccgtcttggtcccgcgttccttttggctcactcgccttgtggacacgccccttcgcttccattgcgtcccgccccgccacgttctggctctgcccctgctctgctctgccccgggggtactttgggtcctctgctcattccggcaatatcccggttcctgactcggcctctcttatcctgccgcgcctctcgggcaatgacagctgcttttcccactgcccggctctcgggccgccgttaaggctctcatcggtgagaagactggcggcccgccctgggggtccctgcctctggccttctcggtaactggacttgggcttggcccccgcaccttcagcacgtgttccttgttaatgctgtcgtagaatatcttggcggactccttgatggggatgccgctctccctcttccaggagatgtggggtttggcgttcccctgcacccgggctcggaacacggctttgtcccctgcgatgagcacaggacgcgttttcgcctcttagccaccaggctagagcctctgccaccctctgccggctctctgcctcctcccagacacctgggcctggccccgggcaggggaggaaccctcggccaggctctgccagggtttagcattggaggtcgttggggtaggacggagggtgggggcactcgattagaaagcgaagcactggagcccggtgagccacaggcagcaacacaccctcgggcgcggtgaccggttgaggcttctccacgaactcagggacgctgtcgcccgcagggatgtttgagctccgggtcactaagctgaagaactccactatgctcgaggacttcctcctcacgacctcctctgtgggggcaggcgagaggtcagaatgggctccaggtagaagcccagctcgcgatgggaggacagagctttcttgagaggacggtggagcatgggaacaaaga

SEQ ID NO: 7962 - DNA, 928 bp, Homo sapiens
  chr11:18812614-18813542
  hyper
ctaaagctaaagggtcggtggaggcgaagcaatgggaaggctgggagccgcgctttagaggccagaaggctagcggcgatttccaatctccctcaggggcttcaggctccggagaggcgatgcagcccagagccgcgcaccagcctccgccggccgcagaggctcagaccccaaaccactatcccgattcctccccggaaccgcgcacgggcttcgtggggagtggctgccgctccctcccggctaccaagcgacaagccccctcctctgcatgggggacccctcccccagcatgcgggcgcccagagccccacgggggcgtggcgggggcgggcgccggctcctcggccgggagggctggagaaggtgtcagttgcggggccgcccgaaggagggacccgcgccctccaccttccggctccgcacacaaaggcgcagacggaggcgccgcacttaccggccagagcgggctccgggcgccggcgagcaggcgggcaggctggcgggaggatgcgcgcgcgagtgtgcgtgtgtctgcgtgtgtccctgcttgtgtctgtgccagtgtgtatgcgacgggggccgcgccgagctctgtgcgtctgcgtgtgcgggggcgtccgtccttcggtgcctccgtccttcggtccgtccgcctggcgctccgtcccgcgctccgtgcgcgctccctcgcccgaccgcctcaccaaatgcgcttcagctgcagagtcgctggcgcagccgccgggtgggtttggcaccccccagccccggctccgccccgcccccgggcgggcttccgccgctcgccgggaattgcgcagggctggcggggcgggggaccgggagagcggcctgctcccggggcacgaagggggccggatcacagacccttaacccctgacctcatctcaggtgcctccctctc

SEQ ID NO: 7963 - DNA, 345 bp, Homo sapiens
  chr11:18813609-18813954
  hyper
cggaggagtgggagcagcgcatccatttcattcatgattttttctcctcttgggagccccgggtcgggccgcgcggctacggcaactgccagagggaccccggcagggccgtgcgcgctgaacctgggacgggacagacaggcagacagaaggagtaggggccagcgagacaaagggggcagagttgggggagggagtcggctcattgggggcatgccgtggcgctccccgcatgttgccaacacctgcgcaagtggagcggccccatactagggcgcatgcaataccaggtgccgaggactcgttctaggacgctgaggaggcgtcctttttcccagttctccc

SEQ ID NO: 7964 - DNA, 137 bp, Homo sapiens
  chr11:19093002-19093139
  hyper
tggtgtgtgtgcctgcgcgcaagagggaatagggagggagggtgaggacagagggagggaacaggaagatgaatccaagtgagacgaatgccctgtgaagtttgggaaccggtctctactcactgtctacttaccca

SEQ ID NO: 7965 - DNA, 637 bp, Homo sapiens
  chr11:19263418-19264055
  hyper
aataaaatttggcccgtccggggctcgcgggctgggccgcaggcgccctgcgattccccgcttggggctatctcacccctgcccagccccaggccggctcacctgccctcggactccagccggacctctcccccttgcacccctggcatgcatgattgtgctgcccaccgtctgccccgtgcctcgcagaaactggcgcgaggagggagaagcttggctactggtgcctaagctccgtgggctctgggccttggcccagcggtgagaactcaggtgtaggaggaagaggaggaaggcggaaaaccctccaaccctgtcctcgccgtctttcctcagggtctcccacccactcctccctttctcttccctgttgtctttccctctttttccggtctccgagcctcaggcagctttagcctggttccctgtagagccctagcagggtcggggagacacttcgatccttcgtcctcactttgcagaacgggacaccgaggcccggggcggcggcgctgcctcggctgcacctggatcatttgcgcccgcgttggctccctttgctctcctctgccttagacttttctgcggactggtgctgagtgttgcccaaccgcgccgagatctgggcgccggtctc

SEQ ID NO: 7966 - DNA, 49 bp, Homo sapiens
  chr11:19264093-19264142
  hyper
cgcgtgtctttaggctccagcagggcccggggccacacttccccactcc

SEQ ID NO: 7967 - DNA, 162 bp, Homo sapiens
  chr11:19366972-19367134
  hyper
gggatgctctgtgctgagctccggggtccagagcagggtggggactgccgttggggagagggccggcccctcattgagaggctcgggggccacacctctgctgcgggactctgaccgagggccagggcctctcaagccacccggccgcagcatagataccgg

SEQ ID NO: 7968 - DNA, 99 bp, Homo sapiens
  chr11:19367267-19367366
  hyper
cgggggcgcactttcccggcctccagcgacactgcgcacgcccctatccggagtgggtgtgtgtccctctgggcgtacgtgcctgaggctgtgccacct

SEQ ID NO: 7969 - DNA, 30 bp, Homo sapiens
  chr11:19733779-19733809
  hyper
gagctgtctcggggcgggaagcttccctgc

SEQ ID NO: 7970 - DNA, 1290 bp, Homo sapiens
  chr11:19734194-19735484
  hyper
aagcggccaccagcccgctttgtactcgcggccaagcgcggccccagagtttcggcggcggccagagtttaggccacaccctctttgcagtgagacccgcggccgctgattggcgcaccgtggaccaatgggcgcgccggggcggccccggctgtcagcgcgcgccgcagcagcgccggcagcagcctgtcctcccctgcgctgagccccgcagccagcgcagccttcccgggaagcgcggcggccgctcccgagcgcagccctgcccggcccgccagccgcgcgtcccggcgcccgcgccccacggccacagccttgcctctatctagctcacggagcatgtgcagacccgcaggcgctaaggtgctctcagtccgggggccttctgggcagcggtgactgtcaccccaagagagacctttcgggggctcttgccgcacctctgctgcgtcgcgggtgacactgcggtgctcgcgagcagggtggcagctgcctctcggtggagacgtcttgggacccttgcgcccttcttctctccttccttcgctgctgtctcctttccttccttggctgctcgctctttctctcgccggctcagacccgtagcctccggaacgggactcgtgggtcgccgccgcctctgtctcttccaaaggggcctcctcacttcggagatgcagtgacaagttaatatgggcgtccaagcctctgtttcccaggaggaaatttgcaagaggcggcagcccctgagcgcccagagctcttgaaaggccacccaggagaggtgtgagacccggcggcagcatccgtccaggtgggacccgctgagcgccgtggccagtcccccattcccatcccggcaccccaaaggcgcgctcgcccgattgcttcgagttccccgacctggggattttttttttagccgctggtggtgggcgcctcgtgggctaaggcccggcgcctgctctgctacccgcgctgcctttagcggtcgcccccgccgccgctgccagggacgtgctgggaaagcccaagccccgggagaagatgccggccatcctggtcgcctccaaaatgaagtcgggactgcccaaacccgtgcacagcgccgcgcccatcctgcacgtgcccccggcccgggcgggcccccagccctgctacctgaagttgggaagcaaggtggaggtgagcaagaccacctatcctagccagatccccctgaaatcgcaggtgctgcaggggctgcaggagccagcgggggaggggctcccgctgcggaagagcggctcg

SEQ ID NO: 7971 - DNA, 662 bp, Homo sapiens
  chr11:19798534-19799196
  hyper
cttcgcgcccaccggcggcagtggcgaagggcccactgaagcgccgggtgccacgcggggcggcccgcgggccagctagggggcggggaactcaccagccgccgacccccccccccaccccgccctcggccgccgcggccccagcggcctccgcgctgcgaggagcgggcgcttggacacagggcgagttgtttgatttggcggaggcggggaggccggcggggagcgagcgagggaggcacgagagctgggcagcgcgggcgccggtctccagggtagggtccccgcgcgcagcagcggccccggggcgggggcgaggcgaccgcgggcgccggggatgcctggaggggccgcggccgagaggagacccgggactggacggccagacctgccgggcgcgcgggcaggtgcttcggctttttttttttttcccctcctcctttttcctctgccccttccttcctcgccctgaagtaagatgagcgtgatgctgtggcgctgggaacagaataacaccaccatgaagctggtaagggtggattgcagaccgcaccccctgggcgctgctctactttttaaccccccaccccgccccccatcccctttaggaactggcccgggtggtggaaagcccctgaaatgcattccgcacttggtatttc

SEQ ID NO: 7972 - DNA, 30 bp, Homo sapiens
  chr11:19799396-19799426
  hyper
cctcacagcctgtcccgggacagcgtggtc

SEQ ID NO: 7973 - DNA, 255 bp, Homo sapiens
  chr11:20177587-20177842
  hyper
gaaatgtctctttggggctaccgcagggccggtggcgccctcaatgaggtgatggtttctaccgtcgggagaggcagcatctgggcacggggacaaagtgaatgcgcagactggaccccacctcttcgatttcaaagcacttaaaaatagtactctggcgtgcgagcggcttctaggacacggtgatttcctcctgttcctcgccctcctcttcctcctcggaatctgagaagtccgaaggtttcccgggactgc

SEQ ID NO: 7974 - DNA, 599 bp, Homo sapiens
  chr11:20178093-20178692
  hyper
cgtcggttctggaaccagattttcacctggaatgtcccggccggcgagaagaagggagaagcagaggtcagatcaggggctccgggggacgcacgggggcggggagtggagtcgggtgcaggctctgtccttcgggctgtgtcctctccccacccccagaaatgagttccggtggattcccgcattgactccgcccccgcctcagctcgcggttccgtttgcctcatccgctgccaccctgccccgaagggcggggttgggggccggtgaggccgggagagaaggcggggagtcggggtggggagagaagagggctatcctgcggagcttcgagggtagtggcccgtgtactcactccctctctaggcctcggttttcccatctgtacagtgggacctaagccgtttccgaacccttgcaattgacgggtgcgccggggaggggtgaagggcgggggcggggggggtgctgtggaggaaatgcgctcacctgcgagtctttcaggcccagcttggccgccagcttcttgcggtcgggcttgctgatgtacttctgcttctggaacatcttctccagcgccttccgctgcacgtcggaga

SEQ ID NO: 7975 - DNA, 30 bp, Homo sapiens
  chr11:20180685-20180715
  hyper
cggggctggggcgccgccctgcctcgcgca

SEQ ID NO: 7976 - DNA, 30 bp, Homo sapiens
  chr11:20182006-20182036
  hyper
gtctgcgagtcctccgtggtcctctcgtcg

SEQ ID NO: 7977 - DNA, 565 bp, Homo sapiens
  chr11:20184872-20185437
  hyper
ctctttcaagagaaaagaagacgggaggggaaaagagagaatcggagtccctggtttggggtttaaggtccttgcctacgctgcgggggaggccgcagcagatccggctggggctccccgggcctaggtggccaaagctgccgaaacctgccttggatagtagaaagagcgtgtcggaacgcactctgggggtttcgttccccccgcgcaggggagagcgagcatgttcctgccccgggcgccgtgcggtcgcagcagcagcgcggccctctccagtgcgagccgtgcctggaatgtctcgggtaagcgaagggccagcaagcgaggcgaaacggacactataaagcagagagtggtgtgagcttccccgccctctgaaaagatggcaagtctccgtttcgggaaggctgcaacgctaaggtcaccctttgcaggcttcggacccccagtcctccatgctccctgccggagcagccaacagagtgagagcgcattttggaaagattggccggatgccgggcggcgacagggaaaagcgcccgacgcctggctttggggtgggggg

SEQ ID NO: 7978 - DNA, 35 bp, Homo sapiens
  chr11:20618357-20618392
  hyper
tgtttttgttttttaatactgcggttccatcctct

SEQ ID NO: 7979 - DNA, 502 bp, Homo sapiens
  chr11:20618422-20618924
  hyper
cgcacgacctgctgccccagggcctggcttcctgcctccgcatgctctctcccgcccctgaagcccaaccttcaagccctgctgatgcccgcccctccgtcccagcgttggcctcatagcgaaccctcttaggcctctccgttccagaccctccctccattctccacgtagcccctcccttctagaatcttgcggctgaaagtgggggcaggcggggagcccgaatagcgcctcagccaaaccccgcagccgttcctgcgcgtcacccgcctctgcagagcctgacgcgcggcagtctccacgccggaacccaagtgctcactgggccggggagggccagcgggcgaaatatcaggcctgggggctgagcgggggcgctgggcgtcactcaggcccagggccgcagctgggggaagtgagaaggccggcaggattctgcccactctgcgcagttctcccttcctcccggggcagccaagtctgtgcgccctggaacgtccgg

SEQ ID NO: 7980 - DNA, 119 bp, Homo sapiens
  chr11:20619219-20619338
  hyper
cgtcccccaagatgccaagagcctgcggggtgcttctcagcgccagccggaacttgagcaggcacccctgcggaattctcagtcccacccactcagacgaccctcctccagccagagtc

SEQ ID NO: 7981 - DNA, 93 bp, Homo sapiens
  chr11:20622699-20622792
  hyper
ataaactgccagccaacagcccggaggcggcggcggcgcagggccacccggatggcccatgcgctcccaggacgagcccggagcaggagcttc

SEQ ID NO: 7982 - DNA, 245 bp, Homo sapiens
  chr11:20623258-20623503
  hyper
cgcgagagaggccagccgggccgtggcgggtgcacgtatgctgatggggaaaccggttggcagtgccaggtgatggatgcgggaggcggctttggggcttcggaagctcgcactgcgctggggtcggcagttcagggcgcgagggctgcagtgaccctgccagaggggccacgacctgccccttcccagccttggcggtagcgggaatacaggtccagatccacgaaagagttgaggaagataga

SEQ ID NO: 7983 - DNA, 319 bp, Homo sapiens
  chr11:20690558-20690877
  hyper
ctccccacccagttgacagagcgaatcccgagtaattgttttccgagggggtccgtgcgcgctcggtggcgccgcctcggtctgggttcccccgaggaaaaatacccacccgcgagggctcggcggcttttcgactcggcggggatgaactgtggcaacttcggcagcccccaccgcggtgcggaagtaaagagggcaacattggcgactgcggctcggaggggctggagcgcgtgaagccgtgggggcgccgtgcgcctcccgctctctcgtttcggccgcaggtcctgggactccgacttcggtgctccgggtgata

SEQ ID NO: 7984 - DNA, 103 bp, Homo sapiens
  chr11:20690982-20691085
  hyper
cgcgctcctgcccgggctcccagacgaacgcagccgcagcggggggccgggccccgagccccacgccgccgccgccgcgccagcggtggggggcgggctgggg

SEQ ID NO: 7985 - DNA, 258 bp, Homo sapiens
  chr11:20691121-20691379
  hyper
cgagcgcagcacccggcgctgccgagccacctcccccgccgcccgctagcaagtttggcggctccaagccaggcgcgcctcaggatccaggctcatttgcttccacctagcttcggtgccccctgctaggcggggaccctcgagagcgatgccgatggatttgattttagttgtgtggttctgtgtgtgcactgccaggacaggtaagcatgactgtggcggttagagggatccgggaaatgggggtgcccacagacc

SEQ ID NO: 7986 - DNA, 184 bp, Homo sapiens
  chr11:20691431-20691615
  hyper
cggtagcgtggaccggttcctgggatctctttgccctgctcggagtgacagggtgaaaatagggactcacgggcttgaagatgtccccgttgagtgccccttctcaggggacccggcctcaggggcgcaggagtgaggggcgcggccgagtaggcgcaccctcttgctgctagtaaccggcttt

SEQ ID NO: 7987 - DNA, 118 bp, Homo sapiens
  chr11:20691747-20691865
  hyper
cgcagagggagcgcttccggctggcgggcgcggccggggcccgggagggcgcggtgcggcgagggcagagagctgcgggagaaccctgggatcccgcgatctcctcctgtgccttcct

SEQ ID NO: 7988 - DNA, 30 bp, Homo sapiens
  chr11:20692852-20692882
  hyper
ctactggctctgagcgcgagagtctggtgc

SEQ ID NO: 7989 - DNA, 899 bp, Homo sapiens
  chr11:22214523-22215422
  hyper
tctccgagggtggggcgccggccggtcttgcggtctggaggcggggaaagaggcgtggaaacagggacgcagcgaaggggaaaggaaagctgccagagggcaggagtggaaaggatcctggcgagcaccgggaggagtggcggctgcgggatcagctgccgagcaggcacagggacaggtgcctggagaagtactgggagagcgcccaggagcgctaccggctgagggtggggaagcgcagggccaagcgcgcgaagcaggttgtgggggaccgggtcgagtggaagtacccgccggagaggaaggccggctggctgtggcgcccagagacggtggagtccgaggaggaggagaaggaggcctgcagaaggaagagcaggcccttagaagtccagcagcagcaactccggcggcccacagtcagattcagcacctgcctcagatctccacgtctgtctcagctgcccctctcctgctgcctctcaggcaccagtgccattaacgagctggcgaagatgggcgacccggatctcctggaagtgttggcggaggaaggtaggaccgcgccaagaggcgtcaagggagagccaggctggctgcctgcacccctccacccgcggcgcagaggccccgggggacgttggcggccctgcggcctgagtcctagggaggttcgctgcgtggcgtgctcagcgcgaaaccgggactgcggggcagagtcccccgcctggggtgagtggggttggtttcggcgccccacagatttctctgctgctcctgcgcgccagggacctgcgacctgtgacccctatggttccggaacaccctccttgctcccctgcaggcctgggaaccgccgagtaattcagggctgctaggctagcgctgcagtgcttggg

SEQ ID NO: 7990 - DNA, 30 bp, Homo sapiens
  chr11:22688459-22688489
  hyper
ctggcccagttctgcgccaacgccgccgca

SEQ ID NO: 7991 - DNA, 112 bp, Homo sapiens
  chr11:22850873-22850985
  hyper
gcaatgtcttttcgcgccgaattccatctaccacatcccccggaatgtcccacgcgtaacgccctctgcgtgcgccggcgccctatgaagatccggcgcagctaaagtcagt

SEQ ID NO: 7992 - DNA, 150 bp, Homo sapiens
  chr11:27493799-27493949
  hyper
ccgagcagccccagggcgaggaagcagagcagccctagcgggcccggcattgctgcggccgcctcccgcgccggcctctcccgcggcgctgctcgctccgctgccctccgatgtcccccgccgcccccgggcagccggcctgcgggctgg

SEQ ID NO: 7993 - DNA, 273 bp, Homo sapiens
  chr11:27494202-27494475
  hyper
cagccttcagccatgccggccactcgccccagcccccgccgtggctctcgcacaaacacccagactctggctcgctgtctcccagccgcggctcaatctcttcccgtccttttcccttctagggttgcacgctctggttcccaaacccccggccgctggcttatgcaaatcacttaggtacatgcaaaagtatcccttctcccggagcgccattggcccggggaggtctcgagctcattactatgcagagaggagagccgccattggccaaga

SEQ ID NO: 7994 - DNA, 30 bp, Homo sapiens
  chr11:27739812-27739842
  hyper
ataataattccggccggttgccgcctgatt

SEQ ID NO: 7995 - DNA, 30 bp, Homo sapiens
  chr11:27740146-27740176
  hyper
tctgactgagaaaacgactggatctcggaa

SEQ ID NO: 7996 - DNA, 30 bp, Homo sapiens
  chr11:27741062-27741092
  hyper
ctcagtgaggcatccggcccggctggggag

SEQ ID NO: 7997 - DNA, 30 bp, Homo sapiens
  chr11:27744744-27744774
  hyper
accatgattttactcgctctgagttcccac

SEQ ID NO: 7998 - DNA, 30 bp, Homo sapiens
  chr11:30037681-30037711
  hyper
cacgcaaatccaaacgttggaagaggcagc

SEQ ID NO: 7999 - DNA, 54 bp, Homo sapiens
  chr11:30038271-30038325
  hyper
gctccaaatatccacggaacaagttctgttgcctggcccgaggggtgcacagag

SEQ ID NO: 8000 - DNA, 57 bp, Homo sapiens
  chr11:30038989-30039046
  hyper
gttgggttgggagccgggtgcatctccggcgaggccacgggcggggagccctcctgt

SEQ ID NO: 8001 - DNA, 30 bp, Homo sapiens
  chr11:30393948-30393978
  hyper
tatcaccaaggatggttgtgccagtttgca

SEQ ID NO: 8002 - DNA, 149 bp, Homo sapiens
  chr11:30606011-30606160
  hyper
ctcgctcagtcccccgttgccacctccgtcacctcctcggccgccgctcctgctggcactgctggcgctagcgctggcggccccgggctccgctggacgcctatcttttttctctccctcttccctagctctggattgattgatgacca

SEQ ID NO: 8003 - DNA, 157 bp, Homo sapiens
  chr11:30606597-30606754
  hyper
tattttcttgctgacggattccaaccggctcctgagcctctagaaaaatgcccccttcacctcctaggccgcaaaaccccggaattcaaaggctttacaaagataaccttgttatacgtaaatagcaaagaaactcctgcctctgtagagaagaaat

SEQ ID NO: 8004 - DNA, 863 bp, Homo sapiens
  chr11:30606795-30607658
  hyper
cgcctagcctcgaccccagcttgggtcgccgggtcgctccgcaggctgcgagcgcggagacccaggcagcggcggagagtgaggttggggcgcggggacggggtgagaaagagccccgagcgagagcggcgcgcgcgggcggccccgggggcggccgcggggcgcagccggagcacaaagctgcgcggtgccttcccctcgtcactgcacctggcctcgggccgccgcgggagcccggggatcgggccaacacaatgcacccaggcctaggccggggcggctcgaacacatcaccccgggactttctagtaaacagctcgctgagccctcgtccccacccccatccccgccgcccggcttccccagcttctcgccgataccccctcctctcctcctaagaaatcctggcggaggagggagcgaagaggtggggacccccagaggtcgggggactgatggctggagggggtggagaagagaagaggcgcaggatggggagtcggagggaagacacctcctaaaaaagaatttgctttcgctcaggggttgaaaatcagccctccccgagcgccgaattgcccgggaggcgcccgctcgtgcggatgtcaggggcaccggggcagcccgggtccgcagcctccgagcccctcgcacgcgcctctgacaaggcacctctcacccgggctccgctttgtgtgtgcatttttttcccttcctctagtgctcggcaccgggctcccggccgcctcctccccctcccccgccctccgcctcccttcccggggcggattacctttcccgggctgcgctccggatcccggggatgccttcagcgcccggcgagcaggcgatccatagccgag

SEQ ID NO: 8005 - DNA, 122 bp, Homo sapiens
  chr11:30607872-30607994
  hyper
gagccggagggagagcgagcggtgcagtgacagggactgccactggggtcaaaggagcacagctccaggaagcagggcggccgaggcgccgctccgtgcgcgctccccggcgggaccccgcg

SEQ ID NO: 8006 - DNA, 30 bp, Homo sapiens
  chr11:31391318-31391348
  hyper
tctgagctgtgccacggccacatcagctcg

SEQ ID NO: 8007 - DNA, 30 bp, Homo sapiens
  chr11:31819429-31819459
  hyper
cttccagcctaatccgtgagaaagcgagtg

SEQ ID NO: 8008 - DNA, 557 bp, Homo sapiens
  chr11:31819803-31820360
  hyper
aaaccaccaaatcgccggagaattggggctggatagagttgtctcttgttgttgtcagcccacgtcgtcgcgattttattcaccgccgcatggcgttgatcagatggaaaccatatttgtctccctctgagacctaacccccgccttatgcttttggagtatggactctttaaaacccaagaaaggcttcctgggctgggaaagggggctagggagggagggggaccctcttagcaccaaaaagtctgaggattccccgggaacgtgaagcgaagctcaccaccggtgcccgctacccccacgccggcaactctgtgcttcgtttggcccacgtgtcctccccacgcaactaggggcgacggtcctgtgcctgaggtgacaatcaccccccaaaaacctcacttgcgggtgggggggtggtgattgccagttgacccagaattttctagcaactaggcgcgttaaagtgaaaagcccctggactagctccacctccggccccaaccatcacaggcggaccctagctgatttgactctcacttcccgccctcagactg

SEQ ID NO: 8009 - DNA, 1247 bp, Homo sapiens
  chr11:31820460-31821707
  hyper
cgccccaagctcatgggagcccacgcaccggggagagcccggagtggaggctctgggctcagccctcccaggcctaggccaccgtgccctgagtccctccccaagacttctcggactaagtgggccagactcttgtcaggggagggatcaccaggacctcagattgctgggggcggaggggtggacgctcgtgagtgcgaagttcgggtgtcacttgggtgtgtccagtgtctacaagtgggaatcctacggtttcaaaagtcaggcagggatggggttgcctacactcggtggggtcaatcgctagtctcaccagaggcgggagcgggcctgggggccctctgagctcgcggaggcggcgggttcggggcccgtgcgggcggggtcgcccaggggagcccgggccccgcgcgtcaggaggcctccgccggccgagcggccgcgctgggaaacaagaagcgagcgctttgctccctatcttcccagtgtccgtcctatattgttttctgctcttaaaactgacatgtctaattggcaattggtgccgaatcgtgtccagaggtctcttgtggaacatttctacagctgtctccttcaactagacgcttattcatgtcgccttaatgagaaacaaaacgttctctaatgagcaattacagagcgacaggattgttcccataacaaattcttgcgagtgacagaagcatcctttgtaccagatatttcgcatactgttaccgattttcccttccctcgcccgactccatggaggcgccgggcatccggagccggtccgagagctcacggatgcgccggcagcctcctcgcagtcccgcgcgccgcccctggccccgagcccctcggctccgttgtgctcctgggagtgagacgccacgtcccattatcccgcatattatctccttgtcacgaggacaacaaataccgattaatcttcggagtaaactgtttcctattcttgaccaagctacctcggggtgtggaggggagcggaggggagccaactgaccctcccctccgccccaccccccccatcccccgctcttcttcctccagcccttctcacagaacctggggtgtttcaggtcccatctctcctcccagaccagagcggctcccggcatcccgccgtcctgctcacagtatcttcacctcaccacttccacatagtcgccacccacagagagtgagaaagtgggacccagaggggcgaacgggggaggggcaag

SEQ ID NO: 8010 - DNA, 30 bp, Homo sapiens
  chr11:31821978-31822008
  hyper
ccacaaacacacacacgcacccaccagcca

SEQ ID NO: 8011 - DNA, 80 bp, Homo sapiens
  chr11:31822245-31822325
  hyper
aggttgccctggcaccgaagtccccggataccaaccagggcgggtgccccagcttccggtctgcccgttcaacatcctta

SEQ ID NO: 8012 - DNA, 30 bp, Homo sapiens
  chr11:31824247-31824277
  hyper
tcacctgcagaattcgggaaatgtcgcacg

SEQ ID NO: 8013 - DNA, 28 bp, Homo sapiens
  chr11:31826042-31826070
  hyper
acaggcgtttgggggatctgggctccgg

SEQ ID NO: 8014 - DNA, 197 bp, Homo sapiens
  chr11:31826106-31826303
  hyper
cgcttctccaacagagcaaggcctggcccacgtttccggtttctcctaacttccttttattgccttcctttgcttcgcaagttccatctacccctccagctacagagccccacctctaggcacaggaagcttcccggaaaaagaaaggctgtcccagaaagagaccgagagagactttccaaacttcgggcatagcc

SEQ ID NO: 8015 - DNA, 324 bp, Homo sapiens
  chr11:31826408-31826732
  hyper
cgcagataccgccggctggtgcttgcccaggagacgccagggccagagcgccactcccagcatcgaaatggcagagagaaagcgcagctccaaattccccttcagaggttaagcctcaatcattgtgtcccttccctagggactgctggcgctctcgcccactggcgatgattatgcgcctagaactcgaccgcgaagcaactaataggaaaacatatggtgtcaatttggatgctccgcgcctcgcgcacacccgggaacgagcggcacaaagccctgccggccggcccgcgaccccgcgcccctcggggcctgccagccggg

SEQ ID NO: 8016 - DNA, 50 bp, Homo sapiens
  chr11:31827113-31827163
  hyper
gggcctggtttcgctgggcctccaggctcccaggtcggagctctagacta

SEQ ID NO: 8017 - DNA, 408 bp, Homo sapiens
  chr11:31827597-31828005
  hyper
cgccctgatcagcccagcccctctctccggggtcagagcccgggcaggggcgagagggggtgtgagttacaggatttgggggggatggggtttctctaccgcagcttcgaaaactcgggcgggctgttcttaagggcccagcccctgcttctccagtatcgagaagagccaagcaaacgccctcccctcccgggctgccgggcgcggagcggggagcagccgccgcaggtccccgggcctcagtcggtcggcggccgggccagcgcgggcgtcgcgagtccctgtgtcctcccctgaccctcgggtccgcgcaccccgagcccgaagtcccagaaagaccagaggcacttactgttctgcatgctggctctggctgggggccgcgggattccacggggctcgaatatg

SEQ ID NO: 8018 - DNA, 845 bp, Homo sapiens
  chr11:31831436-31832281
  hyper
caaggaaaaatacccaccaagcgcagggggccggagaacagggaagagccccagcctccgcaaggcaagggagatgagagtcgggggaagcctggggagcagagagttttcaagttccgagctcagcgctccagtggagttgggggcaagagcccgggggctgggtggaagctgacagtcctcccgctcggctctgagctccctcggagcgcgcgttccaccgccttggcctggtggcttccttcccggctcgcgctagctcgctcttccctctacctccagcgtgcggctgccttgccgactgactccactcgggctggtggcgggcgcggtgcccccctcggcgctcgagtgccggctgactcttctgcgccggagcccagtgcggcacaaagcccgagggccggcgggcgggcggagacgcggcgagcaggttccctcggcgctccctcggcgagtcctcggagcgcccgctctctgcgcgttcgctgggcctcgggctggacaaagcagccggcagcggttgctctctgcggccgttccagggccttgggcaccacagagcctcttcgtcttttcccgcgggtcgggagcattgggcgacgctggggctaggagccgcggctgctgtcgcgcctggagtctcccttcttcccgcgagctcagcccgcgctggcgctggcgctggcgctggggctgagctggccgcccgccccgagccctgcgccgctcccgctcgccggcagtcgccctccgacgcgggctttcgctggaagtagaaagtttgggctcctgcgtggaaacttctccggcccaactctcccggcgtagcagtgggggagggg

SEQ ID NO: 8019 - DNA, 461 bp, Homo sapiens
  chr11:31832775-31833236
  hyper
ccagcaaaacacttcctcctgcgcctgaaccagagcgggaaatgaggccgagccacggttcccttttcaaacccactaatcactccgcaacatgcaaatgcaccgctcgctctcacacaaaatattgctttatgcaaagcagcgccggggcctcgcgccagccgattggatgctccctctccccgcctggtgcaattggtccgtttgtttgaatatgaatacacttgttttcggctccgccggtgggtcccggctcctctccccggcgcagggcccccgagcccgggctctggcgctcgcctgcatctccccgctccgcgcacgccgagattcggcgcggcccgccctgctgccgcgaacttgagcggtcaagtgaaggtttctgggttgggggtcgcgcccccactccccctaagctggactcgggactcccagtcctcggagggtgcaagtttctgtgc

SEQ ID NO: 8020 - DNA, 994 bp, Homo sapiens
  chr11:31834080-31835074
  hyper
agaagtccatttgttgaatgccgcacgattaggacacacctcagtacactccaaaggcgcccctcggagcctgcagttaaggtgacaggagagcgagcggctgcctggtcctgcgctgtcccgagctctctcggcggcttcgggccacggagccgggaaggagaaggaaggcctgggctgctgtacacaccccaggacagggcgagggggaatagggctgaagagctgaggcagggaggctgaaatgaagcagccgaagggtacgctagactcttcttgacttagggaaagtgctgaaagtcagagctcatcaataaaatctgcgcgacctgaactcgctgctgactggccgcgtcgccgcagcccctggcagccgggacagtgaggacgctgcaagccgccctgggccgccgggccacatgtgggcctcaccctctcgttcctgcctgggacccagcagccctgcgaccaaggagcccgggcagggctcccgggaagcaaaggcctccccggccctagccagaggtggggtcgcataaccctctcccctccccgggctggggagggctgccggctctaacccttccccgggagctcgcagcgccgggaggaaacctgggtcagaggtgaaggaggtggcgccgggtgtccaggtccgcggcctcctgggcgaggtttcatttcgcaggagcgcgactttcggaggatgccggcaagtggggccgcggccctgagtcccagaccagcgaaagtcggctttctctttctctctccttttactttccaagcgagcattaaagaagcttggactcaagactcaagtccgctgtgcatgagcgagggacttgcgggggggcgggggggggggaagtgattctgtccgaactggaggcgagtatcatttttacaacctctcaattagcgaccgagtggattagcaccttcttaagctttgcctcggaaagaagcagccgtaatcttgttgctatttccc

SEQ ID NO: 8021 - DNA, 30 bp, Homo sapiens
  chr11:31836319-31836349
  hyper
ggttcccgctaacccggcagcctcgccgag

SEQ ID NO: 8022 - DNA, 30 bp, Homo sapiens
  chr11:31837592-31837622
  hyper
gcagccctcgttcccggccagaccccgctc

SEQ ID NO: 8023 - DNA, 1282 bp, Homo sapiens
  chr11:31838096-31839378
  hyper
gagaaggtccacttcccactgcgaagcaggcgacctgctcgccgcccagctccagggagaggaacccgcggaggagaggatcccggcccaggtaaggcgtgcggccggactgccactgcgctcgtcccccgtttccaggtgaggtgagcagggggcgccaccgctcggagtcgggcggaggtcccaacacctgtcacaggtgactgagctccgaaggtgctcccagaagacctagaaagggggcgcaggagcgcgagtgggagtgggggttgggggctagccggggcctggcccagaggccgccccaaactcccgggcggggttcttgggtgccccgcctaagccggcctgggcgtctccagctgcttttagggccgggctcccaggactttcgcccggctgaaccacaagttagtctaagtttgggtcgtcccttccctgactcactaaggggacacttccgggccccggctctggccctccaagggccgcagggtggtgggcgcttctctttcccgggcttggcggcccggctcccatggcgcccgcgcgcttcccgccgaggcagccagcgcagcgcccgcagtaaccggagcccgcgttctagctcagtgagaatcgctaattattaggtcttccgaagtgaagctcaaatcacacgctgggagctttacgcgctgcccagctctgtcggccgcattctttcgtactccgcgtctttctgagaaacgaaccccatctctagactttgttgcggtccagccatctgcactttgcaaccgcgggaaacttctgctgcacctcgcccgacccgcggcagggtgtctttaagcgctccaggcgcgggtacggactttcccaagcgtggatgtcgtgaactgcgatgcagaggaggtctggatgcaaagtgcgtccccacctcctgcatttttcgcggtcgcgagtggctttagcagacagcagcagcagactcccgccccctactcccagctcagggccggactggaagtccactcttaggagtggaacattttgctacttttgcagaagagcacactcggcaaagacaagtccctcctccaccccccttcctatccctccctcagtaactcgcttccatctttgtatgcctccttttaaaagcaaaaatcaagccccggggccacttggggcgggctttgatttggggacagcagtcgctggcagcggagaggccccgcgggccccgagccgggccggggccggagcccgggcggttacctgggagcggagggcggggagg

SEQ ID NO: 8024 - DNA, 5 bp, Homo sapiens
  chr11:31840878-31840883
  hyper
gactt

SEQ ID NO: 8025 - DNA, 314 bp, Homo sapiens
  chr11:31841774-31842088
  hyper
ctctggagaccctaccagaaatctagtgctgggggctcctctccgcgcctgccaccagccttggaggaagctgggcagggccccgtgtggtgcccagcctacgaggtcccacctcgcctctccctggcagaggcatcctctctaggccacactggctcgcattgcgggaagaagggcaccgcgggcggcccgggggcatcatcgacgactcgtagagccccaaatgccgagtgctacctgaggcaggctgtagctggggtgaaaaggaccggaagcgggaaagaaacctcttttctttcaggcctcccttcagc

SEQ ID NO: 8026 - DNA, 2 bp, Homo sapiens
  chr11:31842174-31842176
  hyper
cg

SEQ ID NO: 8027 - DNA, 30 bp, Homo sapiens
  chr11:31846518-31846548
  hyper
ggctccggggatcccggcttttccctgagt

SEQ ID NO: 8028 - DNA, 40 bp, Homo sapiens
  chr11:31847672-31847712
  hyper
tggggactcacccccacatcccgctaccccccggggaaaa

SEQ ID NO: 8029 - DNA, 103 bp, Homo sapiens
  chr11:31847769-31847872
  hyper
cggcctcggtggagcctcagggccagggcggggtgtggcggggtgtggcccggtggggtgagggagggacccggggtgcaagccaggccaaggcctcctcagt

SEQ ID NO: 8030 - DNA, 83 bp, Homo sapiens
  chr11:31847895-31847978
  hyper
cgccccctcccaaggcgtggggtcccggggacagaccccgagcccctctctgcgcaactaccgcctctaaaaaaaagaccatc

SEQ ID NO: 8031 - DNA, 30 bp, Homo sapiens
  chr11:31849247-31849277
  hyper
tgcagaagacccagcggcctgacacctttt

SEQ ID NO: 8032 - DNA, 16 bp, Homo sapiens
  chr11:32354943-32354959
  hyper
aaagctcccccttccg

SEQ ID NO: 8033 - DNA, 165 bp, Homo sapiens
  chr11:32354999-32355164
  hyper
cgagcaggcggcttctcctgaccggggagacgcgggaggtttgcaaacagaccttggcctgggctgcgcagggacaaagtgttcaagggcagcaggggaggctgagggagtacacggctgggaacaagggacactgccgcccccagccacgcaggagcggtgtct

SEQ ID NO: 8034 - DNA, 30 bp, Homo sapiens
  chr11:32456054-32456084
  hyper
ggggccagtgcctgcgtgcactcccactct

SEQ ID NO: 8035 - DNA, 440 bp, Homo sapiens
  chr11:32456758-32457198
  hyper
cgcctaacttggcccagatgccgcccgggtcccggactccctgctgctctggctgctgtaggcacccaggcccggagcggagcgtgtgctgagacgccggctccgggacacacgtggaagccgggtcctgcagcaagaggaagtccaggatcgcggcgaggagacggcggggcccgggcgcctgggctgccgtcccggctctgggtgggtgggtgggtgaatgagtaggtgggagggagggcgggaagtgggggagcggacaggcggtcgggttgcggagagcccccgggtgtgggcgctgccttgaactccttaccccagctgcctggctgccctcagcttcccaaagctcaaataagaggggccggcggcgcggggaagaggaggagccaggaggctcggccgctccattcactcagcagcccaagcccggccaggca

SEQ ID NO: 8036 - DNA, 53 bp, Homo sapiens
  chr11:32457219-32457272
  hyper
cgccctcgcagctggggtgagggcgggtccgagggagcgtccctctcggagac

SEQ ID NO: 8037 - DNA, 30 bp, Homo sapiens
  chr11:32457863-32457893
  hyper
agccgggaaaacagcggctagtttaggagg

SEQ ID NO: 8038 - DNA, 30 bp, Homo sapiens
  chr11:32458641-32458671
  hyper
ttaaattctggctgcggacccgaagtgtgt

SEQ ID NO: 8039 - DNA, 30 bp, Homo sapiens
  chr11:32459413-32459443
  hyper
gaagagcaccggtgcgaaccccggggtgcc

SEQ ID NO: 8040 - DNA, 2 bp, Homo sapiens
  chr11:32605264-32605266
  hyper
tt

SEQ ID NO: 8041 - DNA, 94 bp, Homo sapiens
  chr11:32851552-32851646
  hyper
ccttcccaggtttgcgcgcgggggccatccagaccctgcggagagcgaggcccggagcgtcgccgaggtttgagggcgccggagaccgagggcc

SEQ ID NO: 8042 - DNA, 30 bp, Homo sapiens
  chr11:32851935-32851965
  hyper
gccgggcgctcttgcgcctaggctttgagt

SEQ ID NO: 8043 - DNA, 804 bp, Homo sapiens
  chr11:32915114-32915918
  hyper
gggagtcgtggggctccgtcacctcttgggtcctgggctctcacatggtgaagtttgggctcgtggctgaactcgggatctgtgagacccaggattggcgccgggggtccgaagggggcgccggagagtttggggcagtggcgatccattgtattggaacctgggtggccgacaatgcggtcttggggactccggcgtgtgagggttgcggaggcgggagaggaagagtcgcggaaccgcgtcccggagacactggggggcccgggagggctgggctacgggagaatccccggggcgcagggcagaagagggggcccggcagggcgcgaacgcggctccagggccgggtgacatatgtttgcgctggtggccaagatttaggcgatttttcttccacgcgttcaaagttgctcttaggtttcctccccttttaacaacagcaggaagtaaggaatctttctttgccttctatgcctcggggtgactgagagttgggaagaaatggggcgggggttggggtgggggtagtgaaggccgtaaaggttgaagaaccaaagcatgcttctccatctcggcctttaaggtccgggtgcattatgtagcgtggggttcaagagttcatcttgcatgaccaagggaatctaaaattttgactcctacttgatatttaagctcgcgggaaatgtgtagtagtgccacactgtgaaacggtcccatttgaatgataactggaaggcgtggtctggtttggagaattggtgagcggggtgttttaaagccacctctcccgaacaatacagaatc

SEQ ID NO: 8044 - DNA, 30 bp, Homo sapiens
  chr11:33183095-33183125
  hyper
cggggctaatttcgcgactctggttattcc

SEQ ID NO: 8045 - DNA, 30 bp, Homo sapiens
  chr11:33398158-33398188
  hyper
gcagagcgaggcagcggcctggatgtgtga

SEQ ID NO: 8046 - DNA, 30 bp, Homo sapiens
  chr11:33890356-33890386
  hyper
ccgaggtggacggtcggacccctcacccgc

SEQ ID NO: 8047 - DNA, 40 bp, Homo sapiens
  chr11:33892221-33892261
  hyper
cacctttcagaaagcggactcctgcggttaaactgccccc

SEQ ID NO: 8048 - DNA, 30 bp, Homo sapiens
  chr11:34073472-34073502
  hyper
gtgtcctttatctccggacccgctggagct

SEQ ID NO: 8049 - DNA, 30 bp, Homo sapiens
  chr11:35160385-35160415
  hyper
atcctctgtcctgacgccgcggggccagcg

SEQ ID NO: 8050 - DNA, 30 bp, Homo sapiens
  chr11:35161330-35161360
  hyper
gggctggaacagggcgagtggctgttatca

SEQ ID NO: 8051 - DNA, 137 bp, Homo sapiens
  chr11:35440237-35440374
  hyper
tctcaggcccccagcgcaccttaccctttttatcaaaataaaacaaccctccacctctcgcattttcaaaggattaagcagcaatctccaggaaagaaaatcaatcccctccccaccatcccatccccagccaagct

SEQ ID NO: 8052 - DNA, 415 bp, Homo sapiens
  chr11:35440469-35440884
  hyper
cgcgggtacagataaaaatcccctcacccttccgtagatgccatggtctggggaacgccccctcctcttcagcactatccggcagctgtgggcgagggagaaagcggacgccggggtgagcgcgaagtgcggccgggagcggtatttaagaggagcctctgcccgcccttccacccgcctccggggtaagccctttagcgcctcaacgggcgcaggaggctcctgcgggcgctaatccgcgtcccggctctccacggcgcgcgacccgcgctcccctccgcccgcggggatggcgcttggcggggagctccgggggctccgagggtggcttccccgagagagcgatgcgcccagggctgcaggagggcgcacgccggcgatgcgcccctgcagccgctgccacctgtgctttgct

SEQ ID NO: 8053 - DNA, 345 bp, Homo sapiens
  chr11:35440936-35441281
  hyper
cggtgagcgtgcgtgcgcgtgtgcgggtgtgtgcgcgcctggggaggcggtggaggccgctgcgctctggctcggcgccggccagggagggattgcaaggtttagccccgccggagctggggatttgcaggcgatccctctctattttcgtcgagagctgacatcacccgcgccgccgcctcgggcaactcctttaaccgccgccccccgcccccatctccagtcgcggtccctcctctgccatccctccccccagcctctcgccataaattagccaaataagaaaagaggccccgccgctcgtccgggaaggcttgggcagccggtggcaggagcccaggatct

SEQ ID NO: 8054 - DNA, 65 bp, Homo sapiens
  chr11:35441543-35441608
  hyper
tggtgcagcctaaacgcggcccagctgcgctccctcccccgccgaagctcgaataaatctctggc

SEQ ID NO: 8055 - DNA, 555 bp, Homo sapiens
  chr11:35547020-35547575
  hyper
gggtgtcctcctagggtgtcccggacgctactcacagtacctcttggcaaggacgagatgagaaggagctgaagaaaagtgagccccaactgcgtccagcaacccagctccatccttgccgcggctggtgcccgagcgtctactggggagggagaggagggacccagggaggccgggggcaggcgggttttacagggacctccccgagccccagctgagcgggagctcgggtttcagctcgccaggctctcccatcctcatctgaggggaaccaccttcagccagagcgacgtcagcccaaacctctcctctctgctgccttaacccttgcggggccccgggaggtgtggccacgcctggagacccgcggacggcggctgcaaaggaagctgcgggggagggaggccagcctgggtacaggtggggtcccagtgttgggtgctgggaggaggggccataggaccctgggcgggagcagaggtacccagggctgcggggcgctcaggtgaggccgggagatcttcctacgggaggctgagacgggagctggctttg

SEQ ID NO: 8056 - DNA, 557 bp, Homo sapiens
  chr11:35639631-35640188
  hyper
cgctgcctaggcaaagggacccggcgaccaagacacccccgcgagggcccagggcgcgtccctcccgccaggccccagactccggctctgcgccaccccctcctacgccccggcgcgggcgcagccagtccggcttcctccaggcccccaagtcccggaccgagtgtggggccgcctctccctctcggaaggagccatcgccgctttaagtggaagaggagaggaagggggcgggggagcggggggcggggagcggaggcggaggagggggagggggatccccctggctcccacgtggtccgggcgcctgtgaatcgcgcccaccggagggtctcacagcgaaatacaaaagcagctgggaagcggcggggactcgagttcccagcgccgggcggagcgccggacagagccccgcagcgccccgcggccgcgatggggccgaagcgcccgaagccccggagcccacaaactgccgggcccgcctcgccgccgggacccgggtgcctgggctcggcttgaagcggcggcggcgcaccggcacagccgcgggagcatgg

SEQ ID NO: 8057 - DNA, 760 bp, Homo sapiens
  chr11:35640493-35641253
  hyper
cacgtgtcagccaggcagccccggccggaggagagcgccgcggtgcacgggggcgtcttctggagccgcggcctggaggagcaggtgcccccgggcttttcggaggcccaggcggcggcgtggctggaggcggctcgcggcgcccggatggtggccctggagcgcgggggttgcgggcgcagctccaaccgactggcccgttttgccgacggcacccgcgcctgcgtgcgctacggcatcaacccggagcagattcagggcgaggccctgtcttactatctggcgcgcctgctgggcctccagcgccacgtgccgccgctggcactggctcgggtggaggctcggggcgcgcagtgggcgcaggtgcaggaggagctgcgcgctgcgcactggaccgagggcagcgtggtgagcctgacacgctggctgcccaacctcacggacgtggtggtgcccgcgccctggcgctcggaggacggccgtctgcgccccctccgggatgccgggggtgagctggccaacctcagccaggcggagctggtggacctagtacaatggaccgacttaatccttttcgactacctgacggccaacttcgaccggctcgtaagcaacctcttcagcctgcagtgggacccgcgcgtcatgcagcgtgccaccagcaacctgcaccgcggtccgggcggggcgctggtctttctggacaatgaggcgggcttggtgcacggctaccgggtagcaggcatgtgggacaagtata

SEQ ID NO: 8058 - DNA, 235 bp, Homo sapiens
  chr11:35641291-35641526
  hyper
cggaccgcgcggcgcgtcctggagctgcaccgcggacaggacgccgcggcccggctgctgcgcctctaccggcgccacgagcctcgcttccccgagctggccgcccttgcagacccccacgctcagctgctacagcgccgcctcgacttcctcgccaagcacattttgcactgtaaggccaagtacggccgccggtctgggacttagtgtcaccgggaggaaaagagagagatct

SEQ ID NO: 8059 - DNA, 77 bp, Homo sapiens
  chr11:35966123-35966200
  hyper
cctctgggcctcttcccgagtctctggcgtgcactccgtgcctcagtttccccacctgcaccgcggagggagtagca

SEQ ID NO: 8060 - DNA, 30 bp, Homo sapiens
  chr11:36397581-36397611
  hyper
ggctgcagatctcccgttgtgtgagagaaa

SEQ ID NO: 8061 - DNA, 1063 bp, Homo sapiens
  chr11:36398051-36399114
  hyper
agctgggggaggagggagggacggagggagggagagctgggcagagcgcgacggggagaaccatccaggtcgctcatttctctccggtgagaaaacttcctcgggaagaccggaaactttttcctaggcgcgcggagtctggggcggaggcgagcggcgggtgtgcgcgactcggggtgattcacgccggggaccccaaggaggtgagtggtgggtggggggcgtctctgggaggggccggagtcataggctcagcaaccgcgcaggattgagcgaaaattaccgcgcgctaatctgacggggcgcggcgtggcgggggtaggagctagggaaaagtgtcacgtttgggggggcaaccaggtgggaactcctgcatggttaaggatcctccgatcggacgctgcaggcaggcgtaggggatcttactcgagaccaccatggtggggaggtgggcaggccacgctcccggtctgctctttagggtggttgaagtaccgccgtgaggtgggatgcggatgctggtgatcatgggacctaggctgagccgggaggtcgaaaaagaaagtcggcttgtttgactctctcgttctccctctggggggcaaatctaaagagctgaccccgcttaagcacgggagatttcgcgcctgcagcagccttttcccggcggtccccctttttctggagggaggcgtgggagagaagggcagggcagggagccactttgtcccgtgcgctgctgcacgcgcgcgctctgcggactagggtgggccagggcccagccagtggggatcccgccgggacgggctgtgagcaagccctgggacggcccggctgcggaccccgcgctgggagtccgcagtatcccccttccgttttatttctcccgcctgccttcctttcggcgaggctttcctctgcgcgcttactgtgcgcgcatgccgggctcgctgcacgcagggggcgctctaggggccccgcccgggcagctgggaccctgcctgcccaaccctccggcccattttccttgaggccgccgcccggggtgggaccaggctgtgtg

SEQ ID NO: 8062 - DNA, 228 bp, Homo sapiens
  chr11:36616033-36616261
  hyper
atttcccaagaatccgttctctctgggatgtgtagctttggaaatctgtctttgttgctctgggagaggggactcctggaatgtgtctgtgaataaagactagccgaaggtgcgaagtgactagacgggagcaaaggaggaaaactagggaatgggaggtgagagtggctgacaccgacccaacgtccgggttgccggaaggctgcagcgcccggagcggtgtcgggc

SEQ ID NO: 8063 - DNA, 183 bp, Homo sapiens
  chr11:40314603-40314786
  hyper
atcacaacccagtgcgcaattgaatttttgatttcagccacccggccagccaccttcccctctcccctccaaactccggttatatcctgtctccttccctccaccgcctctgcaatttcataatctcacgttaaatggagtgcggggggcgggggcgggggcgggggcggaggtagtggagga

SEQ ID NO: 8064 - DNA, 30 bp, Homo sapiens
  chr11:43333497-43333527
  hyper
cgtgcgcgtctttacgtagacgtcgggggc

SEQ ID NO: 8065 - DNA, 199 bp, Homo sapiens
  chr11:43597026-43597225
  hyper
gagtttgcattgggcgtcttgggagagtttggggagggggctgtcctgctgggcacgcccctcggggccccgcttgcccggtgcagactaggctgcagcctgctctgcagctgcccagcccaagcctggggtggcgcccgcctcggccgcctcgcctgctcagtggctgcgtggaacacaaagcgctgtctccgagcag

SEQ ID NO: 8066 - DNA, 1380 bp, Homo sapiens
  chr11:43600094-43601474
  hyper
ccaaagctgctcacagcctctcggcccaccccgcggcctcctcgtcattcactgggacctactggttccctttcccaagcctcgcccctctcagccctgcaagttgcgtggttgtgtttacaaattctgccacaattgcaaaggaaataggggtggggggagcggtcggggcgggagtggtggtagcgccaataaagcacttgcaacacgtggagcggtggttggggggaggtgtccaagagtcaagaagggggcggagggacaccccatggcctcatttccacctccccattcttccccaccccttctcattgcttggcacaatgcacaagtttaccccccgaactggatcctattaaataattcaatggtagcggtgtaattttggttggaaccagcacggattcccaagtcgtgactgcaaaaagtgagtaatgcgcgctggctgcgtcatggctctagtcacagttcattccgaactgagaaggaatcgtgacttcgcctggagacgtcccctacatgggagatggggggcgggggggcaccaaatcagtggggacgggggtgggggggaagacctatccaatgaaaaccgctgccaggggggcatttgaactccgtcgcttgctgtctcgctgtcccctctctgccccgcgcacctcgctccccctcccggccggcgctcgcagtggcgcgcctgctcgctctcccgctaagcgacgagtcttcaacaagttggaggaaggcaggaacgcaggggttaagctcggaaagccgcaattaccaagatcgtgaccctcccacacagtacagtaacttatatacttacctggaagaacccgctttgccgccgggcaaacacccgtggggggcggggaggggccggagggagcgggccggcaggagaggggctgcttccagctggctgcagtgcggacgggaccggcgcgctcccgtggcccccagaccgaggtaaggagcagggagtcggcgcccgggtcggctggtggtcggtcggctcactggtagtcggtcggctcacgggtagtctgagcagaacttttttttcccagttgccccgcgccgcggcggcggcgggcgcagaccgcggagcccctctggcgcggcgggcgcgcagacgctcggagggtgtgtgcttgcgtctgtcagtcccggagccgaggggatgccgtgggagggtgagtgggtcgcggagctgcaggagggtgatggatgggcgaagggggtgggtcgacagggacttgaagacagtgcctccaccgtcgagagacgttttctccgggcgtgctgggcgagggtgggagtgtgtgtgcgcgcgcgcgcgcccgcccgcacgtcgattccagggtgccaaagaac

SEQ ID NO: 8067 - DNA, 610 bp, Homo sapiens
  chr11:43602426-43603036
  hyper
atgagctggcggcctcgtctgtatttatttagtgctctgggggagtttttctctttacgcagcgcctgtagtcacggctggaaccttggctgggggactctgagggataagaggggattcggggggaatccgaactgtacctgttcagagatccgcgaccttgcagccggggctggcggaactctgatagggagatagagggataggacaggcaggcggggaggctccgggtgctggggcgacaggaaaggggtggaggctgggctccgggatccgggtgcccctctgcggtccccttctcgccctccacacacttctctcggggctgagttgggggatcgcggacggtctggagaaatggagacacgagtccaggggcgcggaggggcgggcagcgcgcggagtggtgagactgagccgcgatggaacgcgctggggagacccagcctgttcggctccagggttcggagacatcctgggctgaaggcggcggcgaaccgaagaagccggcatattctgcccttcgcgaatctttttgcggtctgggcttgctgtacataactcaatagccggaagcccttaccccaaaaagcatttgcggagggcgcac

SEQ ID NO: 8068 - DNA, 159 bp, Homo sapiens
  chr11:43603076-43603235
  hyper
cgcaccttcccgaagctgctccatccgagccttacccggccctttccccgttttccacggaagattcggccctttcccccgtcctttccgcggtgcccgaggctttggtcacctgtcttccctccgagcgagtcccccgcccccaactttttaacagac

SEQ ID NO: 8069 - DNA, 30 bp, Homo sapiens
  chr11:43604845-43604875
  hyper
gcaacggccgaacccggcgtcgtgcggcac

SEQ ID NO: 8070 - DNA, 601 bp, Homo sapiens
  chr11:43964780-43965381
  hyper
gaggaacagcctggactccagcgactccgactcggccctgtaaggggcgccgcccgcgggggggacgcgcgcgtccgcggtccgcgcggggaccggcgtgtgaaccccgagagtgcccgcgccctgctcccgggggacccgcaaggacccgggaccgccgctcctcgcgcgctcggactcccgccccgctgcgaaccggtcggtgcgcccctcgccgcgctcgccctggcccgggagcgccgggagcggggccgctttcctcgtccttgtaaatgtttattttttaactcttcccagtgcgaactctgctgtgagtgtgtgcggggaggcgcgcccgcgctgagtcggcggcgggtagccactccatgcccttgtccgatggtttgcaactccgattttgcacaccgctccaccgtgccccccagcgcacacccattcacactcacgccaacactctcgctgaacacttttataattgttaggcgtggccgttgggactttgggcgcagcgcggctgctactgcgtctggaggattgatatttatttttgcattgcgatggctgaaggcatttatttaacgatctttttacctggatatgt

SEQ ID NO: 8071 - DNA, 129 bp, Homo sapiens
  chr11:44087989-44088118
  hyper
cctggaaacctggagccgtctctcgcgagacgtcctccgccctgtagaaggccgtttcggttcttcgtgcgcggtagccgccccacttgcgggattccaaggcctcatcgagtgcgggtatctggctgt

SEQ ID NO: 8072 - DNA, 562 bp, Homo sapiens
  chr11:44330877-44331439
  hyper
cggtttggggaaatgccgaagggaccgggaaaaacaaactccaagtcgagtttaacagccgaaacgctccgtgcctaggccggcggacaagaaggagacagaacagatcccttggctccctcgcagcgatcgatcccgtttaccgaccagagtcaccaccccgcccccagcccgccaactcatacctcccgcaagccaccagtttcaagggatgcggaagccaagcaccccgtggtccccagcaccaggtgacccgcacgtgcactcaccgtagcagggaacctgcaaggccgcgctgtggccgctgctgccttcctggagtttgaggctgccgtccgggggcgtcttgcaggcgcctcgctgcaagtaaagatgcggttgcgcgggcggctggggctgcggctgctgctgctgcggctgcggctgcggcggcggctggggctgcggggtcgacggctggggctggaacttgttaaaggagccccgcgccccagctccactctccaggggtgtcgccaggtcctgctgcccagcgccgtaacgggcccggctcttggcgtcc

SEQ ID NO: 8073 - DNA, 299 bp, Homo sapiens
  chr11:44331482-44331781
  hyper
cgaacttgtcgcctccgggaaatgccctaaaaggcgacgagccctcccgactctgcgacaccgggctgtagtaggcgtccatggcagcggccggcgactcgcagtaagagacgcaagtctcagcattcatgcctggcttgcgcaggcggcgggcggggacgcgagcgagggcgcgaggacgccaccgcgcgccttggctgggagtttggggaggcgaggaggctgtggctgtgcactccttgcccggcctgctcgctctccctcctcccctccacgccggcctctctctctctccccct

SEQ ID NO: 8074 - DNA, 99 bp, Homo sapiens
  chr11:44332670-44332769
  hyper
cgtctgcgcccaggcgaggggatttcctgccaggcgaagtacagagagcggactctggagaccccctgaccttgcccgatagtcgcgctgtcacctgtt

SEQ ID NO: 8075 - DNA, 31 bp, Homo sapiens
  chr11:44587386-44587417
  hyper
ggaactagtgacaggtcggggcagctggtgg

SEQ ID NO: 8076 - DNA, 1005 bp, Homo sapiens
  chr11:44748189-44749194
  hyper
cccctctccccactcccgcaacgatcttccgaattcagacgcagagagggcccgcgagcagagcgggaggtggtcggaggcggaggaaggggagatgggcagagggtgggcccagggacccccagacaaggcctggacgcggggttggaggaggaggcggaggctggcgggaggcgaggggcagcccgcagaggagacgcgcttctcggcagcaacggcgtctggagccgggaggggcggaggtttggggagggggagggagggcgggggaggggagggacggacggcggcggaggtggggccggcgggctggcgggcgtgcagctgccgccggcgtcgcggggctccaggctgcggggcggacgtagcgccgagcgatccaccgcggagccgcgcgaggccgcccgagccccagccccggccccggccccagccccggccccggccccggccccggccccggccccggtcccggccccgagccccgagcgagcgccgccgcctcgcgctgcgggtccccggacgcgccgccaccgccgggaaggcagccggcgccgggcaagttgcgagcgcgcccctccgaccaggaaagtttccccccggccgccggcgggatttggcgcggggtccggcagccgccgctggaaggtatggggctccgcacctccgtgccctccgcacgccgccgccgcgcccccggggacctggggacccccccgcgcgccgccccgggggtgctgctggacgcggcggggaattggggtggagtagggatcccaggacggaagcccggcaaccaagttccactcaaactagcacgcgggggctggggggccggggacggtctccaccccgtgcctgcccggagtccgctgagggccgggggctgcgcccaggacaggtgcagagccggtgggctcccagtgctccgggtggaggagtgggggcttctggagaacggcgcggggtggcaggtgtggttacaaggttcggggtttcggccag

SEQ ID NO: 8077 - DNA, 254 bp, Homo sapiens
  chr11:45307671-45307925
  hyper
caggcaggtgaccccgcacaacgcgaggatgctggtggctgtgcccagcgtggcgcccagcgcgatcacaggcaccgacagcaccatggtgcccgctcccggcgaggggctgggtcccgcagccgctcaccttccccgggccgggcccgcctccaggcagctcccgggatccgggcgagccagcagctctcccgccgccagaggggcggggacggagggagggaggacggctgcgaggacgtcagaggaggctg

SEQ ID NO: 8078 - DNA, 13 bp, Homo sapiens
  chr11:45377064-45377077
  hyper
aagtcttcttcct

SEQ ID NO: 8079 - DNA, 97 bp, Homo sapiens
  chr11:45684298-45684395
  hyper
gaggtagccatgagcccgggcacctagccagaaggtccgtgggagaagcagcagcctgccaagagtcacagcagcagctgagcggcatccaatggca

SEQ ID NO: 8080 - DNA, 215 bp, Homo sapiens
  chr11:45825502-45825717
  hyper
tcctcctggtctccccggctgcctggtgagtggcagaccacaggctagacttcccaggccccggccctggaaggggcggggaaccctccccctcactgccagctggaagaatccgagcggtccccgcacgcacttctggaagtgcaagccggtagcgcggcgggccagggatacagccaagtcccgggacgtgccagctgcggtaactgaagccg

SEQ ID NO: 8081 - DNA, 217 bp, Homo sapiens
  chr11:45907276-45907493
  hyper
gcggcggctgccctctcgccgcgcctccgcctccttcgcagccgccgcctcctccgcgccgcgctccgcccggatggccagggctgtgcccgagaatggcggagcgagaaagcggcggcctgggagggggggccgcgtccccgcccgccgcctccccgttcctggggctgcacatcgcttcgcctcccaatttcaggtgagagtccccggccgccgc

SEQ ID NO: 8082 - DNA, 63 bp, Homo sapiens
  chr11:46264957-46265020
  hyper
gagttgagtcctgctgcggggcgccgggaaccgggccgacgcgcatgcgcgggctgcggcccc

SEQ ID NO: 8083 - DNA, 31 bp, Homo sapiens
  chr11:46299560-46299591
  hyper
cccgcccgtttgccagcgctcaggcaggagc

SEQ ID NO: 8084 - DNA, 20 bp, Homo sapiens
  chr11:46316812-46316832
  hyper
gagctggtaccattactgcc

SEQ ID NO: 8085 - DNA, 460 bp, Homo sapiens
  chr11:46316895-46317355
  hyper
cgagatggagctgcaaggggatttaaggcccggctcgccctttgagtcggggtcgtcggggagaccctcggtctccacttctccctgcgggggtgggggcggggccgcgctactgatgaggggtttaggacaccgtgagacggccaggccatttctgcctcggccccagacgcagaaggggtcccatgcaggcccgagccagtgcaccctgcgctccctcagccgcgggccgtcggcgcaggccgggaccctcctccgcgcgagccctgcactcctccggtgccctccacgccgccaccggctgctgctcgcagcctcccgccattggccaggagctctgcggctcccaccagtgagcaggccggattccggtgaggggcggccccgggtgttcccgggttaaccctttgtgggccgctccaggacggcggcacccggatccttctctaaaatttaaagg

SEQ ID NO: 8086 - DNA, 297 bp, Homo sapiens
  chr11:46317407-46317704
  hyper
cgcaggtctgcaagcaggagagctcgggaacctctcctccaagggagggaagccggcgccggctgcgcgtgacagccgagaaggagcttatattggcacgactataggaaaaagtctttaacgaggagggaaacaaatcataatatgtccttctccggcttcccacccccgttgcctggaaaggcacccctgtaggacgctcaccccctgcagaaccctgtcgccctcagagcgttgacacatggctcccctgaagttcgtgaactcctggccgccgaccccttgctcttgctcccc

SEQ ID NO: 8087 - DNA, 30 bp, Homo sapiens
  chr11:46330245-46330275
  hyper
tccctagatgggagcgtggctggccctgcc

SEQ ID NO: 8088 - DNA, 49 bp, Homo sapiens
  chr11:46413560-46413609
  hyper
agggggcgctgccctccggggggtgggggtgtccgcgttgtcatgggga

SEQ ID NO: 8089 - DNA, 16 bp, Homo sapiens
  chr11:46414468-46414484
  hyper
cggggaaacaactcaa

SEQ ID NO: 8090 - DNA, 30 bp, Homo sapiens
  chr11:46638954-46638984
  hyper
gagaagaaagcttacgtggaatgaaaatca

SEQ ID NO: 8091 - DNA, 722 bp, Homo sapiens
  chr11:47208474-47209196
  hyper
gcagggctgggactccaaaaccgtgccctaccgttccacagctgccctgctaatctggggcgccttctaaggcctgagacgaacacgcggtgggggtgggacaaaaaggcctaagctcctcccgctccgagttcttatttccagattttgtaccacgattcattcttacccttcgcccctccaccccctttatcagtctggtacatttttccatatcgccacgatgccaccccacgctaaataaatcccttctccctcctctctccctacttccctctccccgctttcccccgggggtgagattttgcagagcggctccgtctgttatttatatccactggagcggtccaagaatgttccgaagctgacctaatcgccacctgctcggcctctccgcccctcccactctctcctgggcccggtgacccagcggcggtgccctgagccttgaagaccagggggagcgcggaccaacggggtcgaacgcccgggcgcagaaggtcccggacgcagaaggtcccgggcgcgcagaatcgcagcgggtcggagagccccggcgctctcagaggagtgcgcccccagggacgcggctctgagccctgggaagctgaggcgcctggctgcgccctctgaagctcgtacttttcctcccaccctcagctccctgaagagtgtgagtgcgtgcgcgcggagttttaaacggcagctttaaaaatagcaaa

SEQ ID NO: 8092 - DNA, 52 bp, Homo sapiens
  chr11:47237125-47237177
  hyper
ctggatttcatagtcacgcttgttagctgcacgtcctcggtggtcagttgtg

SEQ ID NO: 8093 - DNA, 30 bp, Homo sapiens
  chr11:47448241-47448271
  hyper
tcagaccgtgaccccgctaggaataagggg

SEQ ID NO: 8094 - DNA, 30 bp, Homo sapiens
  chr11:47574975-47575005
  hyper
gaatctgaagttctcgactccgcccatcgc

SEQ ID NO: 8095 - DNA, 30 bp, Homo sapiens
  chr11:47587657-47587687
  hyper
agctgctttgcctccggtctgtgcctctaa

SEQ ID NO: 8096 - DNA, 37 bp, Homo sapiens
  chr11:47661386-47661423
  hyper
atctcaaaaacaaacaaacaaacgaacaaacaaaaaa

SEQ ID NO: 8097 - DNA, 30 bp, Homo sapiens
  chr11:48294280-48294310
  hyper
tccctgatggcacattaactttttgcaaat

SEQ ID NO: 8098 - DNA, 30 bp, Homo sapiens
  chr11:48561464-48561494
  hyper
tttccttcactccagagcttccagaccacc

SEQ ID NO: 8099 - DNA, 252 bp, Homo sapiens
  chr11:57194355-57194607
  hyper
aacctggtccccgccgcccttcctcgcatcaacttctaccaggaaagcctccgggggccgctccccgccagcctccgcaccccgctccagcctgcggcctgccctccccgcagaggagcccgaggggccaggccgcgctcggcgccccatggcgcccgaaaggggacccttcgccctacccgcctgctccgcgccggggctctccgcgccctttccgcacgggccaggttcgcattcgcgcctctcgcagcc

SEQ ID NO: 8100 - DNA, 541 bp, Homo sapiens
  chr11:57243624-57244165
  hyper
ccccacccaggatgacttgttcgcggacctggccaacctgagccacctcttcctccacgggaaccgcctgcggctgctcacagagcacgtgtttcgcggcctgggcagcctggaccggctgctgctgcacgggaaccggctgcagggcgtgcaccgcgcggccttccgcggcctcagccgcctcaccatcctctacctgttcaacaacagcctggcctcgctgcccggcgaggcgctcgccgacctgccctcgctcgagttcctgcggctcaacgctaacccctgggcgtgcgactgccgcgcgcggccgctctgggcctggttccagcgcgcgcgcgtgtccagctccgacgtgacctgcgccacccccccggagcgccagggccgagacctgcgcgcgctccgcgaggccgacttccaggcgtgtccgcccgcggcacccacgcggccgggcagccgcgcccgcggcaacagctcctccaaccacctgtacggggtggccgaggccggggcgcccccagccgatccctccaccctctac

SEQ ID NO: 8101 - DNA, 38 bp, Homo sapiens
  chr11:57365702-57365740
  hyper
aggctggctggctccgcaggtccgctgacgtcgccgcc

SEQ ID NO: 8102 - DNA, 30 bp, Homo sapiens
  chr11:57405800-57405830
  hyper
ggagcctgggggagcggatcctgctcactc

SEQ ID NO: 8103 - DNA, 40 bp, Homo sapiens
  chr11:57417003-57417043
  hyper
aaccgagagagaggagcggaggcagcggggagggggaagg

SEQ ID NO: 8104 - DNA, 30 bp, Homo sapiens
  chr11:57424758-57424788
  hyper
aggctgtcttcctccgctttctctatccct

SEQ ID NO: 8105 - DNA, 30 bp, Homo sapiens
  chr11:57425066-57425096
  hyper
cctcccacctttggcgtcacgttcaaaaca

SEQ ID NO: 8106 - DNA, 31 bp, Homo sapiens
  chr11:57434948-57434979
  hyper
cgtcggtaattggctgcgctggaagcctgtc

SEQ ID NO: 8107 - DNA, 30 bp, Homo sapiens
  chr11:58345690-58345720
  hyper
tgtacggcacgcgtcgcgacctaacccgga

SEQ ID NO: 8108 - DNA, 67 bp, Homo sapiens
  chr11:58668429-58668496
  hyper
aggttagttctctggcgccatcagctggcagcacgcgggaatataccaaacgcggaaacgcgccttc

SEQ ID NO: 8109 - DNA, 309 bp, Homo sapiens
  chr11:58672873-58673182
  hyper
cgtcccgccaccgccgccgacccatcagcggcagaagggcagcaatggccacacaccgaagcaccttggcgggctattccccttgcagctctcctcagcgcgctgctcccactcgcaatcaaaaggcggaaaaagcgcgaaaccgccaggcatctcccatacccacccggctgccgcgcaacccctccttggcttccactgggagacaggggacgccgatgagcaggaagaagcagggcagtgactgcttagtttatcctggtacgcgggaactggctgtggaccgagtggttcgggggaggggatcgc

SEQ ID NO: 8110 - DNA, 30 bp, Homo sapiens
  chr11:58911100-58911130
  hyper
cgttttcccaactacgcttctttccaggat

SEQ ID NO: 8111 - DNA, 30 bp, Homo sapiens
  chr11:58939938-58939968
  hyper
ccggggcggcggggcgcggggcagggggcg

SEQ ID NO: 8112 - DNA, 203 bp, Homo sapiens
  chr11:58940403-58940606
  hyper
aggtggtggtgggaggcgattcactccgctgaatcctcgcaggatcctccctcccccttaaacatccatgcaaatagtatcagtgttgtggttttgcaaacccagcttcaacctagtcggtaacaatccactccccacccctttcatgcccccgcttttcagcagttggtggccctaagtctttctatgtagaaattctaggg

SEQ ID NO: 8113 - DNA, 270 bp, Homo sapiens
  chr11:58940666-58940936
  hyper
cggccggcaccttggctgacctgaccctgttttgcttcaggcacgctggggcttgccacacgtcccctcacccccgatctcactgcctctgcgtctcctgtgtgggatgcctccccgcagctgggtcctgggtgtgggaactgggggaggaagaagggattccccggaggttctcgctacagtcgggtaagggaagcgccgggctccctgggaggagagactagggctggggtaccctggacgccgcggcattggcgaatgcctctgcta

SEQ ID NO: 8114 - DNA, 253 bp, Homo sapiens
  chr11:59333370-59333623
  hyper
aagcccgtgcgccgaacgctttcgaggacttctttggccaagagggggcccgggctgtcaccattcccggcaagcccgcgaccaagcaggcagcggaggcggcgcaggccgagagctcccgcccctctgacagtgagagaagggtcgcagcgcccacggctgcctagaacccgaaagaagaggagcggggtgcggggacacagggttgctcaagaaagtgagctatgcgcagtgctccggaagagcttgtctc

SEQ ID NO: 8115 - DNA, 30 bp, Homo sapiens
  chr11:59521707-59521737
  hyper
gagacccgcggggccggctcaaagcccgac

SEQ ID NO: 8116 - DNA, 131 bp, Homo sapiens
  chr11:59523185-59523316
  hyper
aggctggaggggggcccgagccggaggcttgccctccccaagcccccaccgcttcccgcgccggttccgcaccctcccctcccctcccctgcggggtcatgtgcccggtgattcatcgctaggcaatgatt

SEQ ID NO: 8117 - DNA, 50 bp, Homo sapiens
  chr11:60692120-60692170
  hyper
gccggtcgcacaacagcggcccctcgggggccctacggcccctggctctg

SEQ ID NO: 8118 - DNA, 215 bp, Homo sapiens
  chr11:60718638-60718853
  hyper
agctgcggccgtcggggaaggcggtggcgggcagcaggcccgaggcggccaggtagagcagcaggctgagcgcgaccgcgcggtagcggcccaggtacacgtcggccagccagccgcccacgggcgccagcaggtaggaggcgcccaggaataccagcgcggcgcgcgtcgcctgctcgccggtccagttgaagttggtgctgttgaggtacagc

SEQ ID NO: 8119 - DNA, 152 bp, Homo sapiens
  chr11:60718976-60719128
  hyper
cgctccccgggcacgcggggctgctcccgggcgcgcggcgcgggcatcctggctccgggctgggccccccgcggctcttctctcctctcctctccccgcctcagagccctgcactcctgcccccgggcctcggccctctcccccacccaact

SEQ ID NO: 8120 - DNA, 334 bp, Homo sapiens
  chr11:61062689-61063023
  hyper
ggggacgcggcggacgattgtggggagggtctctggcacctcgaagcgaaacacacaaaggcaacgccgcccgcctgctgatgcctctccgagaggcgcggagcccggggcgggggcaaagatcagggacccctgggggcggggtttcgccctcggcccacaccccctgccccggtttgggagtcggcttcctgcgaagcgctgactgaaggcgtcagaccgaggccccgggaggaaacagacttcgggaacaaggctagcaccagaggctgcgcgccccgggcatggcccctgtcggtgggacccgagacgccttgttgtgacgaggtgggaa

SEQ ID NO: 8121 - DNA, 22 bp, Homo sapiens
  chr11:61063061-61063083
  hyper
cgctgagcagttctaggcctgc

SEQ ID NO: 8122 - DNA, 30 bp, Homo sapiens
  chr11:61129505-61129535
  hyper
ttcttctccaagtccgaagtcagggtccag

SEQ ID NO: 8123 - DNA, 30 bp, Homo sapiens
  chr11:61159822-61159852
  hyper
caactggccacttccgcccaacgcccggta

SEQ ID NO: 8124 - DNA, 31 bp, Homo sapiens
  chr11:61160872-61160903
  hyper
gaaccttcttattttccgttcttttctgccc

SEQ ID NO: 8125 - DNA, 30 bp, Homo sapiens
  chr11:61275811-61275841
  hyper
cccagcaggtaggccggccgcacgccgctg

SEQ ID NO: 8126 - DNA, 295 bp, Homo sapiens
  chr11:61276208-61276503
  hyper
cgaaccctagccagtcggcctccggcggaggcaacgggggaggcccgagggcgggcggtggagcgcggcgcgcggcggcggtgccccaagtgggtgcctcctcccggccccgcacggcccccctcccggcgcgggggaaggccggggcggggggcccgggggccggcgcggctccggcaccgtcggggcggctggggggcggccggggcggggcgatgcctggcggtggcagtggcggcggccccggccggggcccgtgaccatgggcatcgccgagtccacgccggatgagctg

SEQ ID NO: 8127 - DNA, 584 bp, Homo sapiens
  chr11:61276535-61277119
  hyper
cgaccagcagctggagctgagcgggcggcggttgcggcggctgcccagcgcagtgtgcgcgctgagccgcctgcagaagctgtatgtgagcggcacggggctgcgcgagctgccggaggagatcgaggagctgcgcgagctgcgcatcctggcgctggacttcaacaagctcgagcgactgcctgacggcctgtgccgcctgccgcgcctcacgcgcctctatctgggcggcaaccggctgctggcgctgcccgccgacttcgcgcagttgcagagcctgcgctgcctctggatcgagggcaacttcttgcggcgcttcccgcggccgctgctgcgcctggtggcgctgcagtcgctccagatgggcgacaaccggctgcgcgcgctgccggccgagctgccgcgcatgacgggcttgcgcggcctctggctctacggcaaccgcttcgaggagttcccgcccgcgctgctgcgcatgggccgcctgcacatcctcgacctcgaccgcaaccgcctgggcggcttccccgacctgcacccgctgcgcgcgctgcgcgtcttctcctacgaccacaaccccgtca

SEQ ID NO: 8128 - DNA, 37 bp, Homo sapiens
  chr11:61355114-61355151
  hyper
ggggcgggggacgaggcgtctccgctcttaatagctg

SEQ ID NO: 8129 - DNA, 34 bp, Homo sapiens
  chr11:61520127-61520161
  hyper
actgtcgcgcgggccgcgccggcgatgccgcgcc

SEQ ID NO: 8130 - DNA, 211 bp, Homo sapiens
  chr11:61595256-61595467
  hyper
ctctaggatctcctccggcgcccggggccggagagtgggggagggaggaggtcggacacgtagcctgcctcgcagcagggctcgactccacgcgggagggcgggggagccggggacccgccgctccagcccgctggccttcgaaagatcctcctgggccaatggcaggcggggcgacgcgaccggattggtgcaggcgctctgctgatcgc

SEQ ID NO: 8131 - DNA, 509 bp, Homo sapiens
  chr11:61595682-61596191
  hyper
actcccgagcgcaggcgagaaggctgggggagggggcgcggtgggaggagtaggagaagacaaaagccgaaagcgaagagggcccgggctgcacacaccggctgggaggcagccgtctgtgcagcgagcagccggcgcggggaggccgcagtgcacggggcgtcacagtcggcaggcagcatggggaagggagggaaccagggcgagggggccgccgagcgcgaggtgtcggtgcccaccttcagctgggaggagattcagaagcataacctgcgcaccgacaggtggctggtcattgaccgcaaggtttacaacatcaccaaatggtccatccagcacccggggggccagcgggtcatcgggcactacgctggagaagatgcaacggtaagggtctgggggcgccccagccacccttctctgctgcaggcggagtcaggatccctggctccccgtgggccaaacagacctccggcgctgaatggagcttgggacgtcctgtagggaag

SEQ ID NO: 8132 - DNA, 251 bp, Homo sapiens
  chr11:61596390-61596641
  hyper
ctccccaagaggggcgctcgggccagacggctttggcgcccccagcggggaagatggccgcccctgcgcgccgctgaaaggagcgggagcgcaggcagccaggtgtgggactccgcgcttgtcccgcactctccatccagactgggtggcgagaaggaaagctcgtccccggccggagatcgctcctgctgggactcttgtctaagaagttcctcaatggccacctgggaaaaaccgcccagcagctcggg

SEQ ID NO: 8133 - DNA, 30 bp, Homo sapiens
  chr11:61659450-61659480
  hyper
gcccagaggggggacgctgtctcggggtgc

SEQ ID NO: 8134 - DNA, 30 bp, Homo sapiens
  chr11:62312705-62312735
  hyper
gcaagcacacacatcgcacacaaccctcag

SEQ ID NO: 8135 - DNA, 305 bp, Homo sapiens
  chr11:62313702-62314007
  hyper
ctgggggccgcggtggcgatctcggaaatttcccctccagtaaacatgggatacgaacggagcagcccccgagccaccgccccatgcagggagaggaggtgggacagaggccaccaggcccggaacggggcgccctgccttgcagtggagccaacagtccgccctccggagaaataaagagtggagcaaagcacttcggagcgattttccaactttaaccaacttgcgccccaactccagaggcagaactccgctcccagagagcgacgcgtcgccgccccgggtggccccgcttgctccaaact

SEQ ID NO: 8136 - DNA, 30 bp, Homo sapiens
  chr11:62342061-62342091
  hyper
cctggaggggctgacgctggaagacctgac

SEQ ID NO: 8137 - DNA, 30 bp, Homo sapiens
  chr11:62359276-62359306
  hyper
gccacaaaggccggcgccgggtggcatctt

SEQ ID NO: 8138 - DNA, 209 bp, Homo sapiens
  chr11:62369473-62369682
  hyper
ggcttaactctgtcctcgctggagccctgcagctcctcctcgcgccccaaagactcgcgcgccttagcgcttcgccaggttatttgcaagcggctttgcctgtcatttgcataaatggtctacgctcccttaccctttccgcacgcctcttttccttcgtccccaccccacagagccccggaggcgcccggcagcgccccacaaaagca

SEQ ID NO: 8139 - DNA, 50 bp, Homo sapiens
  chr11:62369883-62369933
  hyper
ccagggaagggcagggcggggcggggccacgccgccgggccagtcggtcc

SEQ ID NO: 8140 - DNA, 30 bp, Homo sapiens
  chr11:62380530-62380560
  hyper
cctcggcctaggggcggagtttctcgtaag

SEQ ID NO: 8141 - DNA, 30 bp, Homo sapiens
  chr11:62493994-62494024
  hyper
cgagaacaaggactcggaccctgcggtgca

SEQ ID NO: 8142 - DNA, 30 bp, Homo sapiens
  chr11:62495746-62495776
  hyper
gcttgcagctgtgacgcttatgtggacacc

SEQ ID NO: 8143 - DNA, 30 bp, Homo sapiens
  chr11:62539148-62539178
  hyper
aggatgcgcgttgccgaggcccggcccgcg

SEQ ID NO: 8144 - DNA, 37 bp, Homo sapiens
  chr11:62623642-62623679
  hyper
ggcgatcctggactgacggtcacgactgcctaccctc

SEQ ID NO: 8145 - DNA, 44 bp, Homo sapiens
  chr11:63258494-63258538
  hyper
gctcaggcccatcccgcctctgcggcctcgccggcccccaggcc

SEQ ID NO: 8146 - DNA, 54 bp, Homo sapiens
  chr11:63258764-63258818
  hyper
gtgggtcttttaggcggagaggggcgaaggaggttattcgttttggggaaggtc

SEQ ID NO: 8147 - DNA, 30 bp, Homo sapiens
  chr11:63536315-63536345
  hyper
aaatttaaaggggccgcgcgctatttcctc

SEQ ID NO: 8148 - DNA, 106 bp, Homo sapiens
  chr11:63655733-63655839
  hyper
gtctttggcagggccgccactctgggtcagcacatctgagtcacacatgttcctccccagccctattggaggctttgttaaagtcatctgcccctacccaggtccc

SEQ ID NO: 8149 - DNA, 30 bp, Homo sapiens
  chr11:63684149-63684179
  hyper
gcagaagtgggggacgcaagggatgagcgc

SEQ ID NO: 8150 - DNA, 30 bp, Homo sapiens
  chr11:63684896-63684926
  hyper
gtcagccccacccacgcgcacaccaacacc

SEQ ID NO: 8151 - DNA, 5 bp, Homo sapiens
  chr11:63742038-63742043
  hyper
cgcgc

SEQ ID NO: 8152 - DNA, 30 bp, Homo sapiens
  chr11:63753583-63753613
  hyper
aataacaaaatccgcgtttcaaactccagg

SEQ ID NO: 8153 - DNA, 36 bp, Homo sapiens
  chr11:63803824-63803860
  hyper
ccaagcaccagtagcggtggcgctggccccgccgcg

SEQ ID NO: 8154 - DNA, 30 bp, Homo sapiens
  chr11:63952876-63952906
  hyper
cgccctcgcggtcacgtggcatttccggaa

SEQ ID NO: 8155 - DNA, 30 bp, Homo sapiens
  chr11:64008409-64008439
  hyper
tccgccggaagtgacgcagggcagcggcgt

SEQ ID NO: 8156 - DNA, 46 bp, Homo sapiens
  chr11:64038084-64038130
  hyper
acccagaagatgagaccgcaattcgagaatcaaagggccgggagcg

SEQ ID NO: 8157 - DNA, 30 bp, Homo sapiens
  chr11:64059922-64059952
  hyper
ggacggagaagccgcggagatgctgtcaca

SEQ ID NO: 8158 - DNA, 30 bp, Homo sapiens
  chr11:64072074-64072104
  hyper
aagggctcaagaagcgccggagcaagaggc

SEQ ID NO: 8159 - DNA, 30 bp, Homo sapiens
  chr11:64410377-64410407
  hyper
gggtagggatgaagcggaggtaaaccaggg

SEQ ID NO: 8160 - DNA, 33 bp, Homo sapiens
  chr11:64480297-64480330
  hyper
agccctggagcgctcgcacccactcacaagccc

SEQ ID NO: 8161 - DNA, 893 bp, Homo sapiens
  chr11:64480379-64481272
  hyper
cgaagcgccccaggccctcacccccgcgcccaggcaccgggcggccgctccccggggctcaccttcgctgcagaacttgccgccgaagcccgtgtggctgcagtcgcagcccacctcgccgggggccagcacggtgcagaggccgccgttggcgcaggggttgcgcgcgggcgcgcacagcgggtcggcggtggcgccgcgcaggccctggctgcccagcagcgcggggggccgctcgcccagcttcaggttggccaagaggccgcggaagggcggctcgtacttgacggtgctcagcgtaagcgccgagaggcgcacgtcgggcgggatgccgcccacgaacaggtcgctggccacctgcatctcgcgccgcttggagcgcacctcggcggcgcgggcctcgccgtccaccgccagcgccgtgcggcgcgcgtcgcgggtcagcagcaccatgtgccagcggtcgtcggccaccggcgtgtccagctgcagcgtggccggctcggcgcacgaaagcgtgaagcgcagccgcaggcggccgtccaccagcagcagctccaggaagtcgcagtcgccgccgtcgtccaggtagagcagcagcgcgcgcgtggcgttggtgcgcaggctgaagctgagctcgccgctgctcgccgcgcccgcccagcgcgcgtagcgagcccactgcccggggccgccgccgaactccaggccgtccgcgcgcgccgccagcgccagcagcagcagcaacagcagcggcggcggtgtcggccgccaccggctcccggacgccatgcctacggcggccccggccccgcccggcccccggcccccgctcaggcttcagagccgcgggcgcatggggcgggagggggccgggcgctccccgcgctgag

SEQ ID NO: 8162 - DNA, 21 bp, Homo sapiens
  chr11:64509740-64509761
  hyper
agagaggaaaggtgtggtggg

SEQ ID NO: 8163 - DNA, 387 bp, Homo sapiens
  chr11:64509801-64510188
  hyper
cccgagccgcccatcgtccggaggggaaccagctggggcggaaggagcctgggttccccggggtcaagaatccagaggtcatttcctgagcgcttggggggaaggggcaccccttcaccagataagccgccccccattagccggaaacagctcccaggccggagatagcgagttcctccggattccccgggagacagataatgcccctcaagtgtcagagtccgggacccggccctcccttcgccgccgctggggaaggctagagaagggaaacctcatctgtctgaagggcgtgcatctctctgccctgcgttgcggaggaggctttcgttaaagagactgcacgctgcggagcagggtgggtccgggtcagggctgtgccctgga

SEQ ID NO: 8164 - DNA, 91 bp, Homo sapiens
  chr11:64511956-64512047
  hyper
gccaaatgggggtacgcgggggagggccccgctggaaggtggctgggaaaagctgggtgcaccgtggaggtcctccgccctccggggatcc

SEQ ID NO: 8165 - DNA, 1300 bp, Homo sapiens
  chr11:64512373-64513673
  hyper
cccccctccgcccctgcgcggagctccgcaccgccggctgcgccacccccaccgggggctccctctcgccccgcacgcggcggtccctgcggcagcttaacccctcccctgccgcgccgcccgggaggccagggccgcgggcggggggctgcgccactagctgccccgagggcgggcgaccggaggccccgccgcccgggacgcggaggggggaccgaaacgaagagcccctcccccaaccgcggacgccccagtgccccccgccctgcctgggtgtcgggcggaggaagccgggaggggcaggaagcggactgcggtggggaaggggcgccccgcccagcccccagctcgggttcctgttttcgagacaaaccgttcccatggggctaacccggcccgggaccgggcgtcttcctgcaggcagcgggtggcacaggcctagtggaggtcgggggcgtggggacagctggtccttgagatagtctgggggatgggctaggacaagatgggaatattttggggagagggacctgtggggagcgaggaatgaaatcgtggctatctggagacgcggccttgatgtctgggaatgggggcggggggcccagttcacacaggaggaacggggccccggaagcctggctccccacagggtcgaatggaaaggggcagccgcatgtggcggtgggttctccgcagctcggagactggagacctggatgcctggccaacagggaggaacttgggaggggcagccgcaggcggttggggtccccactagccgggcctaggagagcgggtaacggtttccgaccatttggcttcagacacactcactgtgaaaccaccgaccccaaacctcccttccgaggcgtgcccctcccagccttggggcgggggatccaggaccgcccccgcacctcagtcttggtaatgtaagacttagaaacaggacctttctgttcctcagtttccccataatgagggcctagactaggcggtctgcgagtgttccctgccgtaacactcccccgactttggatccagtgtagccacctgctaagagacccttaaacgccgcagtagggcggggctaagggcggagccaagaaggcgccgagcatcctctgcttcctccccctcctgggtcctgccctcgacagcgcggatcctccgtggtccgggaagcctcagcccaagtcccggctcccagccccggtgggccccacccaggcagacgccccgcccccggccagcgaggctggccgctgacctagtatggacacggcactgggaagag

SEQ ID NO: 8166 - DNA, 30 bp, Homo sapiens
  chr11:64645541-64645571
  hyper
aaagcgttgccaaacgcgttgagcttgcgg

SEQ ID NO: 8167 - DNA, 440 bp, Homo sapiens
  chr11:64739288-64739728
  hyper
agaaataaacagaaacgcaaagacaacttcccgagggcccgggccgtcgtgtgccgttacctcagccccaggtggttcccaggctcggccaggctatgtctcacacactgactaggggtccttcggcctcagaaaagtggccccggacggaatacccactaagaagtgctctctgaaaaaggcgggcgccaacctcgaacgaagtcgttttgagggactggctcgccagctcctaagcaacttcggggctcgtgccgcgcacccaccaggccttctgcgcacgcgcaagtgcgcttcccaccgccccttcgggcgcagctccaaggcctggccgcggtctgcgcgtgcgcatttcattgtcgacaccgagaggacgccttggcgccttcaggtccctcctggatttaccagcccattgtttatttcgcgcctgctttagc

SEQ ID NO: 8168 - DNA, 31 bp, Homo sapiens
  chr11:64759021-64759052
  hyper
cattcatttattcattcgtttgccaccttca

SEQ ID NO: 8169 - DNA, 30 bp, Homo sapiens
  chr11:64880120-64880150
  hyper
ctgctgctgtggctcgcctggctcggcctg

SEQ ID NO: 8170 - DNA, 30 bp, Homo sapiens
  chr11:64902549-64902579
  hyper
tgcgataagttacgcggcccaataagaaaa

SEQ ID NO: 8171 - DNA, 30 bp, Homo sapiens
  chr11:65149402-65149432
  hyper
acaaattcctccaccggcattgtctgggct

SEQ ID NO: 8172 - DNA, 30 bp, Homo sapiens
  chr11:65185669-65185699
  hyper
tagtgaggaaagggcgtgcacagaccccac

SEQ ID NO: 8173 - DNA, 30 bp, Homo sapiens
  chr11:65188769-65188799
  hyper
cagggctaagcaggcgccagggagcaagcc

SEQ ID NO: 8174 - DNA, 99 bp, Homo sapiens
  chr11:65189905-65190004
  hyper
cgcccactcaagagggcgcccccgcccgccacgcccccagcccctctcggggaagcgcgtcccccgcccgacctcaacaacatccgggaagaaaagggg

SEQ ID NO: 8175 - DNA, 30 bp, Homo sapiens
  chr11:65197761-65197791
  hyper
gctggctgcctgcccgcctggcgctggacc

SEQ ID NO: 8176 - DNA, 31 bp, Homo sapiens
  chr11:65267144-65267175
  hyper
cagaagtacgggaaggcgaagaaaagaatag

SEQ ID NO: 8177 - DNA, 83 bp, Homo sapiens
  chr11:65267948-65268031
  hyper
aggactgaggagcaagcgagcaagcagcagttcgtggtgaagataggaaaagagtccaggagccagtgcgatttggtgaagga

SEQ ID NO: 8178 - DNA, 31 bp, Homo sapiens
  chr11:65276133-65276164
  hyper
aggcagaaaagtaggccggaagtcatttcca

SEQ ID NO: 8179 - DNA, 30 bp, Homo sapiens
  chr11:65339688-65339718
  hyper
agcgtcaggtggcacgttaggcaccaagtg

SEQ ID NO: 8180 - DNA, 174 bp, Homo sapiens
  chr11:65342124-65342298
  hyper
gaggggtggcagaggccgaggggagtgaagtcgcggcacctcgggccttcccggaggccaagcatgagactccgcggcggtgaagtttgattggggttccagggacccgtattccccgctcagtctgtgaagaccgccggctctccccacagcactagcggtctttacagttat

SEQ ID NO: 8181 - DNA, 30 bp, Homo sapiens
  chr11:65343103-65343133
  hyper
tgctctggttaagacgtgggtggctgcacc

SEQ ID NO: 8182 - DNA, 30 bp, Homo sapiens
  chr11:65343550-65343580
  hyper
ctcgccacccgacgcgccccaggcgacccc

SEQ ID NO: 8183 - DNA, 30 bp, Homo sapiens
  chr11:65343818-65343848
  hyper
gccaagttccagttcgtggcctgttaccac

SEQ ID NO: 8184 - DNA, 31 bp, Homo sapiens
  chr11:65344969-65345000
  hyper
agcaggctgagggtgccggcagtgtcaacgc

SEQ ID NO: 8185 - DNA, 30 bp, Homo sapiens
  chr11:65405888-65405918
  hyper
ccggtgagtggaagcggcggctcctgactc

SEQ ID NO: 8186 - DNA, 50 bp, Homo sapiens
  chr11:65419933-65419983
  hyper
gtttccctctgggcctcgggtcgcggacctccggtcggggtccctgcgca

SEQ ID NO: 8187 - DNA, 101 bp, Homo sapiens
  chr11:65420273-65420374
  hyper
ctgttcctaggagactcgctgaattttgggacgcgtcccgctgacgataactccttttcccctgctattgtcctcccgcgacggtgcgaagcccaaacgaa

SEQ ID NO: 8188 - DNA, 30 bp, Homo sapiens
  chr11:65487490-65487520
  hyper
aagacggaactcctcgtctactcaccgctg

SEQ ID NO: 8189 - DNA, 916 bp, Homo sapiens
  chr11:65554042-65554958
  hyper
ggcggcttcgcgcctccccaggagcctcgggcgcgccgggttgggccggccccagtggggcgagtttcgtgtcatcacccgcggagcgtgccagcgccggtgcaaataacgttgccccctccctcccggctccgctcgctccgaaactcctgtttgcaaacgccagtacgcctggctaggaggtcccgcgggggccgggccggctgggcagccaggggctgagtgcccgaagctcgccccccgaccccgccccgcccggccgccccgcccgggccgcgaggccacctcacccgcagcggaatggaaaccggttcgacaggtaacaaataggtgggttgtcaccgttatttcccaacgcatgcgccgtcgctccccgggccaccccaagctaattagatcagatcaccgccccccacccccacccccccccgccccagccaccaacacacaccgccgcgagccaataaagcgtgaacccgtccgtccggctcgcactttaagacttcccgagcggcggcggggacgccagtcgagccgggagacgcttacctgccgcttccccgcgccgcccggtgcacctggccgcaagggacctcgttctcagggaagacggcgacattccgcggaggtggaaccgccgcgcgccgtccgggctcggaccttccccggaacgtgggggcgccttagcgactccttccctgttgtgcccccgttcccggcgttcagcccggccccgcaaaggtgggacggctcccggcttcagttacggaagcggcccgtgtccagcgacgagggttcgaaaatgccccgcgcgttcctggtgaagaagccgtgcgtctccacgtgcaagaggaactggagcgagctccccgacgaggagcgcggcgagatctacgtgccaggtgaggctccaacc

SEQ ID NO: 8190 - DNA, 66 bp, Homo sapiens
  chr11:65600795-65600861
  hyper
ccagtggcgaccgttcgcggaccccggcctcgcttggggcgccctggccgcgggacttgtggagct

SEQ ID NO: 8191 - DNA, 476 bp, Homo sapiens
  chr11:65601095-65601571
  hyper
caggccgcacgtggccgttggaaggaggggcccggaacggcggcacggggttgttgtgggggtcagtcccccggggactggagggagacgcggcacgcggcctctgcgaccctatgaactctgaccccagctcccacactgtcgcctatcaccggcccactctccgtgccgcgtgtcccttaaaagctggggcctgggacaggaacgacagacaatgcagccaatggcgtcacgcgcggtgccccgctacccaatcgaaaggcgtggctgagggaaacgcggtgggaaccgcccccgactccaggcgactccttggccgggcgggggagagcgtccccgtcagctgagagcatcctcactcggtcagttcctcgggcgagttacggggacgacctgcgggagcacgcgggcagtggccggacgctgaagcccaggagagcgatggagacgtatgcggaggttgggaaggagggcaa

SEQ ID NO: 8192 - DNA, 30 bp, Homo sapiens
  chr11:65657807-65657837
  hyper
gagtcaggggcggacgcctgaatcttgttt

SEQ ID NO: 8193 - DNA, 30 bp, Homo sapiens
  chr11:65658811-65658841
  hyper
cagcgtgggcagtccggatcagttgcccct

SEQ ID NO: 8194 - DNA, 410 bp, Homo sapiens
  chr11:65666907-65667317
  hyper
tccttccctcccctgtcgacacgtgctcgcagcccctcgacaggaaatgggcacctgcagcctcccgggtgccccccggcgggcagcgggcgccgttaggggctgagagtggggtcgcgagagtcgcccgcagcctgaccccgcgcacgtcccggaacctcgaggtctctattcgccgcattcggcaaagggatcgagggccggtctccggggacctggcaggttccactgcccggacccccctggactccccaggccgagaaacgatagggacttggcgacggaggggcgaaggacagacagacggacggacacgcggagggtcgcagaccgggccgggactcccaccctggcccagctgctctcccgacggatcccgcctccctcccgtgtggggaccctcaccccag

SEQ ID NO: 8195 - DNA, 30 bp, Homo sapiens
  chr11:66026144-66026174
  hyper
gactggagactctgcgtggggagcatcgtg

SEQ ID NO: 8196 - DNA, 30 bp, Homo sapiens
  chr11:66049840-66049870
  hyper
gtctttccatctgtcgtgggctgggggtgg

SEQ ID NO: 8197 - DNA, 475 bp, Homo sapiens
  chr11:66079556-66080031
  hyper
cagggccaggttcaagggcatcgtggtgagagatgaggggttcggaggactggtggatctgggcatatcgcgaaggtggtaagggacccaggggtggagtgggcggtgcttgcgccaagagggtgagcctgagtgtgggcggggcgtgcgataagaggctcgctcggtagcgctcttcgcagagccgtatttgtgcgctacgccgcagccagggcgctctgggtgggcgggactccagggcccccaggggcgtggcttgcatctttcgtgggcggccccgggggcggggctccgtgtaggtgaaccgctacctccgctcgatgtgtgaggtgtgacagtcctacgagggcgcagttcttccacttttgtgagcttgagagggggcggagcttgtagctggggacggagcctgaagaggaggttgaggggaacttcacacgtttccctggagggcggagtttacatcatcccccaa

SEQ ID NO: 8198 - DNA, 31 bp, Homo sapiens
  chr11:66107464-66107495
  hyper
tgacaccaagcaaccacgagtgcatctagtg

SEQ ID NO: 8199 - DNA, 30 bp, Homo sapiens
  chr11:66176593-66176623
  hyper
cccttctgctgatgcgcgcgcgctggcgcc

SEQ ID NO: 8200 - DNA, 74 bp, Homo sapiens
  chr11:66186334-66186408
  hyper
ctctttcagcaccacggacagcggtcggcgcagtattccttcactgcagattcgctcagattgctggaggccat

SEQ ID NO: 8201 - DNA, 424 bp, Homo sapiens
  chr11:66187402-66187826
  hyper
ctcccccatcttgcccgcctaggcagggcggggagccctccggagcggtgcggaggcagccaggccccgcccgccgcagccgcggcagccgccggaggattcctgtcctaatatggagctgggattcccccggccccgcccccgcccccggcccgcggggagacagaggctggcagcagggcggggggaagcgctcgcttgggggccggcaacggggggaagggatgcctaagtgcagacccaggtcctcgccgtgcccccacgtccctgcctcagtttccccttcagtaaggttaattagctgagagggaaaccacgaatcactgcagactacagcgctgatgttggtttctattcttggctgtgggaaaacaggatcaacgccaaattcagctggtccctttcccaccggactccctttcca

SEQ ID NO: 8202 - DNA, 356 bp, Homo sapiens
  chr11:66188128-66188484
  hyper
tgcggactcctgccgcgggcttcaggccgccctaaacctggccctgtcgcttccctcaactgaacgcattcagacgccagggtccccacactccattcaagctttcctaacgcagcgccttcctctccgctcagctcccgccaggcttggccccctccgcagcctcctgctcccccctcgcccgcctccctccctctctcattctacgtcatgagatgacgtcggaagccgggcgggaggaggagcccccctccccagtcagcggctcccgctgcagcttgcttagcccagcctcccgctctcccgcccccccggctctaaaacgagccccccacgcctggcaggagctatataag

SEQ ID NO: 8203 - DNA, 213 bp, Homo sapiens
  chr11:66188570-66188783
  hyper
cggaggaggaagccgccggtgcgtcgggacgggagcgcaggtgctcgggcacccgagctggagctccgcagccgccggtcatgtaccgctccaccaagggcgcctccaaggcgcgccgggaccagatcaacgccgagatccggaacctcaaggagctgctgccgctggccgaagcggacaaggtccggctgtcctacctgcacatcatgagcc

SEQ ID NO: 8204 - DNA, 129 bp, Homo sapiens
  chr11:66188852-66188981
  hyper
cgagctgccaggcgccggagaccctggagctgagggaacccgctggggctgtcgcatgtctagggcagcgtgctggcgagctggggagattcgggactcgggagattcgggactttctacttttcctcc

SEQ ID NO: 8205 - DNA, 30 bp, Homo sapiens
  chr11:66189282-66189312
  hyper
cccacagtcggcttcggagctctgtccgcg

SEQ ID NO: 8206 - DNA, 30 bp, Homo sapiens
  chr11:66233890-66233920
  hyper
ctctaattgcgtggcgtccccagatggtag

SEQ ID NO: 8207 - DNA, 30 bp, Homo sapiens
  chr11:66346724-66346754
  hyper
cttctcacctcccacgcagccactgcactc

SEQ ID NO: 8208 - DNA, 30 bp, Homo sapiens
  chr11:66445297-66445327
  hyper
cgctcgagcctggacgcgaccgggcccttt

SEQ ID NO: 8209 - DNA, 31 bp, Homo sapiens
  chr11:66725361-66725392
  hyper
tgagccacatccagtacgatggggacaactt

SEQ ID NO: 8210 - DNA, 390 bp, Homo sapiens
  chr11:66725845-66726235
  hyper
acagagaacagctgcggtctccgtgcaaccgaacttgctgcagtcccggccccgccttacggacttcctattggcccagacagcccaacccctcccgttattgggcagtgttctccgtcactcctcgcccctaggctctggactcctccctgtgcccgcctgtccgtcacgtttaagccttggcgccccacgtcagccccgcccctcccgtccccggcgagcgcctggataagtggcgaggctgggagagcccgcccctggcgcaccaccgcctactcccttgtctccggagcctcacgtgggccgccggaccctagccgacgcccgcaataggcggaagtggccgggctgtggctcgcagttattggctgtcggcgggggtggggacgt

SEQ ID NO: 8211 - DNA, 86 bp, Homo sapiens
  chr11:66790600-66790686
  hyper
ggggatctccggctcggaccccaggagcagagacagcgctcgagcttgtcactttaaattcaagagggagcgggcgggcaagcggg

SEQ ID NO: 8212 - DNA, 67 bp, Homo sapiens
  chr11:66824137-66824204
  hyper
cgcggccagctcacagtaggtgctcgggcagcgtttcttcagggacctagacggcctggagaggaag

SEQ ID NO: 8213 - DNA, 30 bp, Homo sapiens
  chr11:66886903-66886933
  hyper
gggaggaggggcaacgccagggggcccatc

SEQ ID NO: 8214 - DNA, 121 bp, Homo sapiens
  chr11:66897391-66897512
  hyper
aaaaaattaaagtttagtctgaattttaagctctcctattctttttttttttttcttttgtgagacagtttcactgtggtcactcaggctggagtgcaatggtgcgatctctgctcactgc

SEQ ID NO: 8215 - DNA, 32 bp, Homo sapiens
  chr11:66897571-66897603
  hyper
tacaggcgtccgccaccccacctggctaattt

SEQ ID NO: 8216 - DNA, 30 bp, Homo sapiens
  chr11:67084674-67084704
  hyper
ttccaagagactaacgcgggagcggggaag

SEQ ID NO: 8217 - DNA, 31 bp, Homo sapiens
  chr11:67141092-67141123
  hyper
ctttaataatcccatccgccaggcccactcg

SEQ ID NO: 8218 - DNA, 194 bp, Homo sapiens
  chr11:67141613-67141807
  hyper
ctcccaaatgccagcgagctggcctgggagcaagtgatggtgtttttcctgctgccctttgtctgggctgaccgccccccctgcctattgtcccgccgcttgtcccatttccaaaagctagagctaagcgaggcgctggggctggggcaggtgactaaccagctcacaatgccccctgcgggggaggaagaggg

SEQ ID NO: 8219 - DNA, 170 bp, Homo sapiens
  chr11:67183097-67183267
  hyper
ctgggcatgccccaggcgtttctatataaagcggcgccgcttgggccgggcgctgtgccactgccaccgccgccgccgctgcatcccgcccggtccgagtccgcccgccacgcccgccgagccgctgccgccgccaggtaccccagctccggccccgccccggggagagc

SEQ ID NO: 8220 - DNA, 154 bp, Homo sapiens
  chr11:67210850-67211004
  hyper
tagccccggccctgccgcgctcaccgggggcaccgggggcgcagggggctgcggcaccggcttcgggcggctccggatcccggcctctgggaagcaggaagcaggattcaggaagtgacagagggacccggagcgggggcggggcaggggctcg

SEQ ID NO: 8221 - DNA, 259 bp, Homo sapiens
  chr11:67232142-67232401
  hyper
cagtagatgaagatcacgtgatagactgcggggcggggcctgtcagcgcagaagccccgcccctccccgcaacaccgcccccagtgccgccccacagcccccgccccttccgccccggtgcccgctcgcacctccaggcaccaacaacaggaagcccggcacgaagaagatggcgctggagacacctgcgggagggaccagagcccggtcagggcgagggggcggaggcttcgaggccttccgggctgccgctgactgc

SEQ ID NO: 8222 - DNA, 62 bp, Homo sapiens
  chr11:67232464-67232526
  hyper
cgtggacccgtggacacaagacaggggtgtcctctgcctgtgggggcgggagggtcgctcac

SEQ ID NO: 8223 - DNA, 376 bp, Homo sapiens
  chr11:67271841-67272217
  hyper
cgccggggccgggagccgcagcgaggctgagcgctgacctcttttccgcgcagcccccgccccccgcccgcccgtcgccatggcaaccgcgcgctgacgcgggccccccggagcgccaggctccggccggcgggcgggagggccacctcacctctcccgctgcgaccgcgtcctaaccccgggaaacggcatccctctgggcgcgcccccgaagccccggggcccctccttccgggcccgccttccgcgaccggcccctcggggacccgccccttgcatccccttcccggagtcggcggggtcccaagtcccccactctcggacgtccacctagagctttgttccccgagtgtctctgcgcggagtggcccagtgc

SEQ ID NO: 8224 - DNA, 45 bp, Homo sapiens
  chr11:67275124-67275169
  hyper
ctcctggcactgagcccgacggcgacgggacgcttcctgcagcaa

SEQ ID NO: 8225 - DNA, 30 bp, Homo sapiens
  chr11:67350961-67350991
  hyper
agggaatttccccccgcgatgtcccggcgc

SEQ ID NO: 8226 - DNA, 31 bp, Homo sapiens
  chr11:67351439-67351470
  hyper
cctaggggacccaggacgtccccagtgccgt

SEQ ID NO: 8227 - DNA, 96 bp, Homo sapiens
  chr11:67777601-67777697
  hyper
tgtggctctagcctggcgccctctgggcgttgacttcttctctgtggtctgggaggagatgtcgaggcccccgagggaggcggtggtgaaatcttg

SEQ ID NO: 8228 - DNA, 30 bp, Homo sapiens
  chr11:67806348-67806378
  hyper
cctcaggacccgtccgccaggccacagcct

SEQ ID NO: 8229 - DNA, 30 bp, Homo sapiens
  chr11:67895827-67895857
  hyper
aattccaaggccagcggctgcccgctgaga

SEQ ID NO: 8230 - DNA, 90 bp, Homo sapiens
  chr11:68080740-68080830
  hyper
agttctgagcccgggcgcggggcggcctggccggtggcgctgctcctgtgagccgcgtggctgtgggtttccaagcggactgacacctgc

SEQ ID NO: 8231 - DNA, 33 bp, Homo sapiens
  chr11:68451834-68451867
  hyper
gagggggggctctccgccgcacccgcctatgat

SEQ ID NO: 8232 - DNA, 786 bp, Homo sapiens
  chr11:68606632-68607418
  hyper
caacaaaggaaaaaatgcaaacgatcaaagtgcagaagcagcccttggcccgcgcaggctccggtttccgcctcccgccgccgctgccaccgcccctgcgcctttagatttcgggcagcaagtttaattgctcgcttggaaagcgtcctcggaagggcaccgccagcaactgcggcttcgcgccccgccccttcccccaagccccgggcggcgtcacgtgacggctgagaaaagtaggggaaaggtcagcagcagccccgcccccaggctggcgcgtcccaggcgctcggatcctgttccacccgccgtgcccacagagaccttccggagcgagttggcgcgcgtccctgtggccaccccagcgacagcgggagaaatgcaacgcacctctccgtgggaaggtcgagccctgcggtgcccagctgtggggacagctcggtgctcagtgcttctgatgacagatgctgcatccaacgagccagaaacgcaggcaccgcgctcaagagcccagggcgcgtctaaaaggggctcactgtgaagcctcagtgaaaactgacggtgtttttatgaatgagcactcggggccagggttgggtaagggcaggccctcgttccagggctccccggaggcccaacttgaccgctcggtgaccactggtccggggccggggccaaacgcagcagccgcagcagtatcggaagggacccagtttaattctcttcccctccagggtaggcggcttgtttttagtaccaactcgaaacgttattttggcctgtgcatga

SEQ ID NO: 8233 - DNA, 30 bp, Homo sapiens
  chr11:68608210-68608240
  hyper
ctctcctgacaaaccgaaagaagccggctg

SEQ ID NO: 8234 - DNA, 30 bp, Homo sapiens
  chr11:68671473-68671503
  hyper
gcttgagagagacgcggaggtggaggagcg

SEQ ID NO: 8235 - DNA, 31 bp, Homo sapiens
  chr11:68801618-68801649
  hyper
gctcaagactgtctggcggccttctccttgc

SEQ ID NO: 8236 - DNA, 161 bp, Homo sapiens
  chr11:69062211-69062372
  hyper
cagtgggacccacagacggctcgggagtgaccaagcctctgctgagctgcccaggtcccctctggtggacacctcctacccggagccccccaaggtggtgccaaagctagaccaccatacagccagaggcctccaggccctacccacgacagcccagctgg

SEQ ID NO: 8237 - DNA, 724 bp, Homo sapiens
  chr11:69452651-69453375
  hyper
ctgaaactaattgatctggagcggaaacgcacgtctgcggttggggcgatggggggggcggtgcggctgtccatgtgccgagcgtgtggctgtctcgggtgggcactggggccggagttcgccccggcccacctcgcagttttggggcgcctgggatcggcgctacgtaagcgaagcagagctgccatagcacgtgggccgccacgcgcaccccaaaagcaagcagtgtggggggaaggggagctcgagcgccttcggagcccaggggccggctttcggaagcgttttcccgggcgacttaagggcttaacaatggaaaactcgcggagcctgagccaagtcctttcaagtcgccgccaggtatgcggctgcaggtgaccccacctgggtgcgcccgcccgccagccgccctggtggaaaagcgggtgcgggaggtcgctggcgaaaggtcgggactggtccctgcaccacccgcccccaacccaagccccgagccccgcggcgcgcagccgcgctgagtcccggggtctgcgtcgcggcgcgccggttcctgaatgaacgcgctcccttcccccgcctgaatgaaggttcccacagccagggacggtggcgaacacgcgcctgcagcggaattcgctttctcctgaccgaccatccgcccaggccgcggtcaccggggcgggggccagggggcgaggaaagcgtgaaggtgatttcagttaat

SEQ ID NO: 8238 - DNA, 140 bp, Homo sapiens
  chr11:69453762-69453902
  hyper
cccgcgggttcctggacggctctttacgctcgctaaccgggcttgcaattttgcgctcgtccctgagccgggaaatcaacgaagttcctagtcgagatctgcccggtccgcctagtaacagcgccgcgcccccattggct

SEQ ID NO: 8239 - DNA, 32 bp, Homo sapiens
  chr11:69477504-69477536
  hyper
tgggagagacttctccgcggtgttgtgaggcc

SEQ ID NO: 8240 - DNA, 479 bp, Homo sapiens
  chr11:69516890-69517369
  hyper
gttgcaagggtgggtttggagcggctctgggtgggagtcagcgtccagcgtgccgaccaccccctttctctgcagtcctctcacgcaggactccgccataaaacctgaaacaggcgctccgagtacacggagcacggcagaggcaccgagcaattttgagactctaaaatgctttgtcccgctgttcacaaaggagctggttgggccggaggcggccccgcctctgcatcctttctggggtgggggccccgggcaggcgcggccacccccgccctggcccctgctccgccagggagtccggggctgcgtgtgaggcctgcgcgggccgagacctcacacagcctcctctgcgcgcggggccgcgggaggggcgcgggttcgttcctttgaactcccagcctttgttcccggccaccagagccccagcgctcgtacacttccggccccgggacctctgcggttacctgggccttccctgc

SEQ ID NO: 8241 - DNA, 465 bp, Homo sapiens
  chr11:69517819-69518284
  hyper
ctggctgagaccctaaatttccgtaggaaatcgtcggacatgcacttaatcggtctttgcaatctttccctcgaagttgcacgcgggtctgggcggaggaggcgaggaaaccctggattcgaaccagcgcctttctctccttcaggcctccgcccggggacaggcgccggtcccccgccccggcgcatccgccccgtggggacacttaccagcccctgcatcttgccgtcggcgcccatgcagaggtaccgcacgctgtgcacgcccttgatggccacggtccgcagagcgactgccttgatctccagcaaacctaggcgcaggggaagcgagaagctgcagcaaggaccgctgggcccgcaccacgtgggtgcggtcggtccacaagcctgtgcttctccctagcgtcccgcgctgtttggggactaacggagggatcctaacgtccaggtgccaaaacctggg

SEQ ID NO: 8242 - DNA, 156 bp, Homo sapiens
  chr11:69519415-69519571
  hyper
atcttcttgcaattcctgccccgccccttttatccgggtaaattgccccccgacggggggccgggcgcgctctcggccggcggggaaacaatggaagccgcgcggactgtaggtggcgccgcagcctcggcgtccgcctgggctttgcgctcctgg

SEQ ID NO: 8243 - DNA, 30 bp, Homo sapiens
  chr11:69589445-69589475
  hyper
tgagcgggttggcccggcggccgttgcccc

SEQ ID NO: 8244 - DNA, 31 bp, Homo sapiens
  chr11:70016124-70016155
  hyper
ccccagaggcagctcccgggtgggatgatcc

SEQ ID NO: 8245 - DNA, 30 bp, Homo sapiens
  chr11:70049947-70049977
  hyper
ccgggtttgatttgcgtgggttttctccgt

SEQ ID NO: 8246 - DNA, 104 bp, Homo sapiens
  chr11:70117684-70117788
  hyper
aaaacacttctaccagcgtttaacgaatccggttccttttagtgctcaccaaatccagcccaagaattcagggagccgtcagttcttcccgggagctgactgca

SEQ ID NO: 8247 - DNA, 31 bp, Homo sapiens
  chr11:71163704-71163735
  hyper
gaaaaggcaaacagtgcgctacctgagctac

SEQ ID NO: 8248 - DNA, 31 bp, Homo sapiens
  chr11:71274923-71274954
  hyper
ttgtgtggtatatgaacgatatgtcaataaa

SEQ ID NO: 8249 - DNA, 30 bp, Homo sapiens
  chr11:71814373-71814403
  hyper
ccgcccccaccccccgtaccccctgtcccg

SEQ ID NO: 8250 - DNA, 30 bp, Homo sapiens
  chr11:71951699-71951729
  hyper
agtctgctctagcccggctctcttcggccc

SEQ ID NO: 8251 - DNA, 147 bp, Homo sapiens
  chr11:71955307-71955454
  hyper
ggaggcccagacaccgcccaaagccgccccgacccccaccccgaagggtccccgccgccgtcttagggctcagaggtgtggagctgggatgcgcgggaccctatccccggagtccctatcctgccccaatccggaccagaccttcgg

SEQ ID NO: 8252 - DNA, 328 bp, Homo sapiens
  chr11:72432831-72433159
  hyper
cctcccagggcctccctcctacgtgcccaacagcaacaacagcaacggcggcacctcgcttaccctcagacgcctgctgggtcttggggctgaggactcccacagctccggccaggcgggctgcgtatgcccaagaatgtcgtgtacctgcccgtgcaagcctgggtcccgcctgggctggtctcgcaaacagcctggcccctggcccctgggtgggtctgaggctgcgttctcttggaggtttttgagcccaggtatggctttgcacctgtgatttatgtctttaagtgtttgtgaatcacttctctacgtgcgtgtgtgtttgttt

SEQ ID NO: 8253 - DNA, 30 bp, Homo sapiens
  chr11:72433402-72433432
  hyper
tcacccagaatcccccggggcagacacttc

SEQ ID NO: 8254 - DNA, 30 bp, Homo sapiens
  chr11:72492523-72492553
  hyper
gactgcgtatgggacgcggtggccggcggg

SEQ ID NO: 8255 - DNA, 33 bp, Homo sapiens
  chr11:72929152-72929185
  hyper
cccggcagtgagagcgtcgccgcccgaccctcc

SEQ ID NO: 8256 - DNA, 1393 bp, Homo sapiens
  chr11:73018831-73020224
  hyper
cgacggacccttcagttagcccgcggctccccgggctctccctggcgccgagtcccacccctttcccggcccagagagtgtgcgtctgcgtgcacctgagtgtcagtgtgtacgagagtttgtgagtccgaggttgccatgttggagcccctgggcaggaggtgtttccgcgcggaggctggtggcccgcggtggacgcggcgccctggctgcgagtctgcggagctgagcacgctcagcggttgtgtgtgtctcagcgactccctgggggcagctcggcctgctgggctcccgagggacctctctggagggccagagggtcgcctcagtctgcaagtcctccagcaggctttttcttcttcggctcctccctgattccctcccaccacgcggttcccaggctcgcgcacgcccggagcccaccccctcttttgggcgcgaggccccgccccccgcccccttgcctctgccgcaaagtttatttgcaacaaaagggtgccaggagcgagcagccaagggcgttgggcaggcggacgcagagtcgaggaaccaagcgctgggatcccgcccaggcggtgccgcggtgcccctggtcgctccagccgcggcgggggctgggcctgggggtcggcgctgaggcgggaggggccgcccgggatggagacgttgcggccggtggccacagaaacttgagccgcggcagagaaacctctgctccggtctctgcgtcctcttcccacactcccgtgcgctgctttcggcgtgggccgctgcgctcctagggagtgggggcgcagggggggttggccgcggctgcccgaggccagcccccccggagtgagttacgccactatggcggacggggcaccccggccccagctttaccgcagcgtctcgttcaagctgctggagcgctggagcggcggccccgggctgagggaggaggacacggacacccccggcttgaggcgacgcgcctcgtgccggccgaccacggctgcccggggccagccctctcggcgcgtgtccaagctggcgtctgggcccctggccgcccccgcgcagccgcgcccgctccgcagcctctcgccgtcggttcgccagctctcccggcgcttcgacgcgccgcgtctggacgacggctccgctgggacccgagacggaggcgtcttacccgcggccgcggaagaagcggccgagggcccagcgcgaggagcctggcccagcgtcaccgagatgcgcaagctcttcggcggtcctggctccaggaggcccagcgccgactctgaatccccaggaacgcccagccccgacggtgccgcgtgggagcctccggctcgggagtcgcggcagccaccgacgccaccccctcggacatgcttccccctggcgg

SEQ ID NO: 8257 - DNA, 218 bp, Homo sapiens
  chr11:73087924-73088142
  hyper
gggctggacggcggcgcctcggcgcggctgcggcgcggggcggccaagggggggtctggatggtgtcagcccgtgactgtgggtgacacggcgcgtgaggcggcctggccgggcgaacgtgtggctgggacactgggcggtgacgccgggccgagcgggcgacacagaggggctctgtgtgtgggagacaggcagcgtgtgtgcgtgtgttgtgtgag

SEQ ID NO: 8258 - DNA, 30 bp, Homo sapiens
  chr11:73490689-73490719
  hyper
ttgacttgaactggcgggtcttgttgtgcc

SEQ ID NO: 8259 - DNA, 863 bp, Homo sapiens
  chr11:73693776-73694639
  hyper
gagaacacggcagtgcgtgcggctgtgtctgtcggctggcggagggcgcgtcggacgagccgggcgagcgtggacagtcaatcccaaggcgcgcgcagctgggcttcgcagtggggctccgcgcaggcggcggcgcggcttaagcctcgggggcggggcccggggtggggcctgcggggcggggccgggcctgccagctcctacttgggtgcggagaccctggagcagccgcctttccgcggggaccgccccgcctagggttctctccatgactttctccactcccgtttccgtgcgtcccatcaccgcgtttactccttcgttccccgagatggtcactcccttgccactccccgcctctgcctcacactctctcgggccgccaacctctgtgaggatggcaagactgaccgccagaaacaagtcttgtccagtcacacacctcttgccttcccagccaggacggtttctaacagcgtccagcggggccgtgtcttaagtgcacttcctcttttatgggcccagcccccctacgctgggcaaactacccaccctcctgcgagcgagcgcgcggctggctcctgcagggcgggactggggcctcgcgaccggcctcgctgtcgattggttacagccgccgcgttgtcgggggaaggaaccaatcagaactgcagcaacaggtggcccggcaaccgacaacagccgttgggctcggctggggttcgcgccttctcccccggtggagcggcctggcgtttagggaccaggacactaaaggccccggcggggcgggagcacccagcgtgacctcacgctcctacacacagacaagcaaacgggccggcccccgcacgtgacaaggc

SEQ ID NO: 8260 - DNA, 30 bp, Homo sapiens
  chr11:74022627-74022657
  hyper
agcgccgccagccgcgccccaggacccata

SEQ ID NO: 8261 - DNA, 30 bp, Homo sapiens
  chr11:74204887-74204917
  hyper
caggaccaaaagcgcggggccagactcatc

SEQ ID NO: 8262 - DNA, 30 bp, Homo sapiens
  chr11:74304076-74304106
  hyper
tttaaggtggttggcgtttaaagttttaag

SEQ ID NO: 8263 - DNA, 30 bp, Homo sapiens
  chr11:74660250-74660280
  hyper
cgcgcggcgcgtcacgctgtcagctccagc

SEQ ID NO: 8264 - DNA, 1001 bp, Homo sapiens
  chr11:74951727-74952728
  hyper
ccccgcctcccacggcgaggagggcgcggagactccgctgggggcggaggacgagaccgggaggcggggaggggggaggcaaaccctgcccactcggctcggagcccggagcggccgcggaagccggaggccggcgcgcagggcgagggcaccgggggcggggggctccgctccccgtctgacccctcttgcccccggccagtcagccagtaagtgcggctcctcagactttcgagacagcgaacggaccgaccgggactgccagccgctccgggtcaaggactcgccccacccgtgccccccaccaggcgctcccaactcactggtgagcgcggcggcccgggcgctggatgcgggggcggccgcgatggccccgcgcgcgggacagccggggctccaggggctgctgctcgtggcggcggcgctgagccagcccgcggcaccctgccccttccagtgctactgcttcggcggccccaagctgctgctgcgctgcgcgtcgggagccgagctccgccagcctccgcgggacgtgccgcccgacgcgcgcaacctcaccatcgtaggcgccaacctgacggtgctgcgcgcggccgccttcgccggcggggacggggacggcgaccaggcggcgggcgtgcgcctgccgctcctgagcgcgctgcgcctcacgcacaaccacatcgaggtggtggaggacggcgccttcgacgggctgcccagcctggcggcgctcgacctcagccacaacccgctgcgcgccctgggcggcggcgccttccgcgggctgcccgcgctgcgctcgctgcagctcaaccacgcgctggtgcgcggcggccccgcgctgctggccgcgctggacgctgcgctggcaccgctggccgagcttcgcctgctgggcctagcgggcaacgcgctgagccgtctgccgccagccgccctgcgcctggcgcgcctggagcagctggacgtgcgcctcaacgcgctggccggcctggacc

SEQ ID NO: 8265 - DNA, 193 bp, Homo sapiens
  chr11:74952948-74953141
  hyper
cgcggacagcggcgccgacgctcgcggagaggaggcggaggccgccggcccggagctggaagcctcctacgtgttcttcgggctggtgctggcactcatcggcctcatcttcctcatggtgctctacctaaaccgccgcggcatccagcgctggatgcgcaacctgcgcgaggcgtgccgggaccagatggag

SEQ ID NO: 8266 - DNA, 580 bp, Homo sapiens
  chr11:75062338-75062918
  hyper
tcaacctgcccccgtgcgtctctgcggctgccggccaatgctgggtgtcagcgagctgtgtgtccgggccaggagctgcggcccacatggggcggcccggccctcgccctttgggtccccccgcccacggccctgccggggagaccacacaggagacctcgggtggaggagagctggtactagatcccgcggtggccgcgaacgcagaaccaggacgcaatcggagcccccgcccgtgtcctcgccgaggtcgcccccacgcgccccccgccgggcggccgccctgcactcaccgggtccctttgtcgcccatggtccgcgacggtcgcagggaggtccgcggcgtcagcgcccaggctggaaaatccccagccagcaggaggagcgcgggccagcccgctcccggctccctgctccgcctcctccgctctcccggccgccgccgccgcccccgcccccggtccccgcccgccgcccgccgcgtcgagcagcgcagcgcccgggccgcggccaggggcgtggaaccgcgcggggtgtgtgcgtgtgtgtatgtgtgtgtgtgtgcgcgtctgcgtgtgcg

SEQ ID NO: 8267 - DNA, 15 bp, Homo sapiens
  chr11:75095705-75095720
  hyper
cgccccctagcggcg

SEQ ID NO: 8268 - DNA, 199 bp, Homo sapiens
  chr11:75140939-75141138
  hyper
cggcaggcgcacgtgctccagcaggcgtcgcagctggccgcggcgggccggcgcgtcgtggcgcacccagcgcatggccgcttcaaacacggcctcctcgcgcgccacgcccagcgcggggtccgccagcagcgccaccacctcgtcaggcgccagctccaggaagtcggcgtggcgcgccacctcggcgaaggcctga

SEQ ID NO: 8269 - DNA, 43 bp, Homo sapiens
  chr11:75141707-75141750
  hyper
aagccacctggctgcgcccgggagaggcgacagccctcatccg

SEQ ID NO: 8270 - DNA, 31 bp, Homo sapiens
  chr11:75237128-75237159
  hyper
gccgcaggagccaatccgagggtgggagcgg

SEQ ID NO: 8271 - DNA, 853 bp, Homo sapiens
  chr11:75378395-75379248
  hyper
tgggactggagggaggctgcacgctaggcctgcgctggggatcctgggccccgggcagcccgcggggagggtctgcgtggtgactcccccgcgctagcagcggccgcgtctcacctgtaggagctgctcactgcactcgccacctcctcgcggatttgccggttgagggcgtccgccgcggcgcgccccctgccagcctcggggccggtggcctggacctgggcctgggccgcgggcagcggcgtctgctcgtgccccaggccctcggcgcggcgcacaatccaggcaggcccggccttcctgcgcgtgtcgcgctcgtccgccccggacgcctttccggccgccaggccacccgctccgccgggggccgcctcctgctcccgggcctcagcggcggcctgcactggccagcgctcctggctctgcggccggcgcttgggcgccccgagaatgggcgccgacgcctgggaggccgcagagatctgcacgggcttggggatccacgggtggtccccgcggcgcggcagcggccaggcgcggaagtccttctggtactgggtctcgcgctcgaagggagcgtcggagggctggtattcgctgcgcggccggcagctgggctcgggccgctgcaccttccaggctcggtaatcctgccgcatcaccgagtccgcggggccggaggtggagccggagcccaggcccgggcccggcccgctccggccggggcccgccgccggctcgcgctcgccggtaggcccaggcgctggccccgttgcccgggcaactgcatccaactcgccctgggctggctgcgtctctatggcaaccgcgcgcgccgaggggggcgcgagcg

SEQ ID NO: 8272 - DNA, 835 bp, Homo sapiens
  chr11:75379282-75380117
  hyper
cggcggggcgcccgggtgctcggtggcctccgagtacttggtgaaaaccagcggcacagcgatgtccgctttgtccaactggttccagaagcgggcgatgcagcaggccctcgtgatgcacggccacgccatgatgctagctgaaaagccggcctcctctttcttcttgtggttctaaagcaagtctctataatcttccttcagcctccgatcctgaccggccaatgtggttcccaccgttttctacccccgatcagccggagctagttcgccctcctccctcagcgagcacccggggagagctgtcctaggagagtctgtagagtccctcgattaccggtcgcaaacgcctttgggagcgcagtctgctgcgagcgccgaagggtgagacgcacggcgttcccgagtccccggcgagggtgtctgggacgcgcccctccctgcggctgcggcggcgcacagacctcggtcgagcgaggcgacgtgaggagaggtggctacaggcttaagccatggcgcagaggaggggccgggcggtgtggccgcagggtccgcggaccgggctcgagtctccttcctgccggcgtcctagtgcagccggccacctagcagggctgggaggccatcacctccagcggagaccgagcattgctgcctccgccgctgcccgcgaggatgccgcagccgccgccgccaccgcctcttctcctgggaagcgaccccacccttttctgcagctctcggtctccgccgctgcccgcgaatgatgctgcagccgctgccgccgccgcctctgcctctgctgcagggaagcggccccacccttttatgctgc

SEQ ID NO: 8273 - DNA, 44 bp, Homo sapiens
  chr11:75863324-75863368
  hyper
cctgacctcagccctgcgggccccgttcccgccattccttcctg

SEQ ID NO: 8274 - DNA, 30 bp, Homo sapiens
  chr11:76155906-76155936
  hyper
ctcccagcaccctccgcgatgtctgtcctt

SEQ ID NO: 8275 - DNA, 30 bp, Homo sapiens
  chr11:76381597-76381627
  hyper
aggcgcgcgacagtgcgccccccgagggcc

SEQ ID NO: 8276 - DNA, 463 bp, Homo sapiens
  chr11:76381852-76382315
  hyper
cccctctggcgaggccgtggggtcctagcgcctggccccgtgcctcggtttatccggagccggcgggggcggagtggggtggggcggcgaagcatcttcaccaccctgggacctcggccgggaaggggcgggggcccagtgtggggggatgagagggcgggagggagaggggttgcagaggaagcgccgtgggagcgaggcccatcccagcggccgccgcacgtgcagttcgcggccccgcggggtccggaggggggcgcggtggctctaggagccgcaggtccacagaggaaatccggcctggccccgatttcccagctgctggcgccgccgcacttaacgcgggggcaaacaggcgaggtgacggcggggctgaatgcggaaggaaatgacccttcgctggccctggggcggccgcggagggggttccccgcaccaagccgtccactctggtgggtcctgg

SEQ ID NO: 8277 - DNA, 367 bp, Homo sapiens
  chr11:76494602-76494969
  hyper
gacgcctagggctgggcgggagtggggaacgccgacccaggggagaggtcttgcgggagacaaaggctacgcccaggggccgtgtgggtctttgtgcggacacgtgcatctcacgtttgtgggtctttgtggatttgcggtcggggacgcgccgctgtcggtgcctttgtgtgtccgtggctttgcgcggctgctttgcgcccgtgtccacgtttgcgggcctgcgcttggctgtgggcgtcggtgggcgcatcgcgtgtctccgcgtacgtggtcggtgcctgccgacgtgtctgggctgggtgtccgcagagggtgtgcgcaccgagagcccaacgccgccccacccccccgctcccccgccgtc

SEQ ID NO: 8278 - DNA, 30 bp, Homo sapiens
  chr11:76510451-76510481
  hyper
ccgcagcgccacctcgtgctcacgcatggc

SEQ ID NO: 8279 - DNA, 136 bp, Homo sapiens
  chr11:77184521-77184657
  hyper
acccgtccccacccccgcgccccagccctggcagcccgggacgcgaggggtactgggcggtaggcccgctctcaccttccgcgctcgctcagctcctctcggctcctcctcctcctcccggcggtgggtgccgcct

SEQ ID NO: 8280 - DNA, 31 bp, Homo sapiens
  chr11:77185064-77185095
  hyper
gtgcagccaccaccttcggctccggctgcag

SEQ ID NO: 8281 - DNA, 31 bp, Homo sapiens
  chr11:77185365-77185396
  hyper
ctggcccgcatgagggcgaacgcctgggatt

SEQ ID NO: 8282 - DNA, 30 bp, Homo sapiens
  chr11:77531376-77531406
  hyper
gggggcctccgccccgcctccccactgccc

SEQ ID NO: 8283 - DNA, 30 bp, Homo sapiens
  chr11:77899895-77899925
  hyper
cgcggggtggcccccgctccggctccgccc

SEQ ID NO: 8284 - DNA, 30 bp, Homo sapiens
  chr11:79150891-79150921
  hyper
gggagccctccaagcgtccatctggcggct

SEQ ID NO: 8285 - DNA, 195 bp, Homo sapiens
  chr11:82443373-82443568
  hyper
aaaaatctggtttcatctccacgtgcattttcccatcgttcttcagatttaggagaaacccacggaggcgcggcgctctccacagccgtctctaatgaagggaagcgtgcctcgaagtcagtcccggtgcgccccctcctcccccggcgccccttcccaaaccccgtcggatctccaaaggctggaataggcggt

SEQ ID NO: 8286 - DNA, 285 bp, Homo sapiens
  chr11:82443651-82443936
  hyper
cgaaagaggccaaatggccccgcccgtcctccccgccgggagaatccgcagcggcggggtacagggggctcaagggctcgttcaaggtcaagccgccgcggggggcagtcagggggctctttttggtcggggagcagcccgggacgctccagggctcggggtacagtaggtttcccaccactgccggcggcggctcaaagaggccgggctccagctccgggggtccccgcagtacggaggctccggcggggaacacgtcgagaggctcggcggcaagcaagactg

SEQ ID NO: 8287 - DNA, 182 bp, Homo sapiens
  chr11:82443948-82444130
  hyper
cggcgccgtagtcgggccccagcagctcaaagaactccacggcctccgcgcccttctccaggtcgcccaagctcacgtccggccccgacgggccacacccgccgccgcctgcccgggacggctccgtgaagaaggacggaggcagattgcgtgcccgcagcgggaccttcctggcccctggg

SEQ ID NO: 8288 - DNA, 604 bp, Homo sapiens
  chr11:82444392-82444996
  hyper
gtttggctggcgtgtcggcggcgctcggggagggcgggccggggggcgcggcgcccatgaggccgctgcagcgcttgatctgcttctgcaggtacttgcggtggttcaccttccgcttcgacttgcccggcttgtccagcgccagcttgatgttgctggacgccgagtcaatgaagctgagtagatcgcgggtggcctcgcgcacgtcccctccttcggctcccgacagcagcgcacccgccggagccccggtctcatcgtcctcgaaacagcagcccttgtccagggctccgaaggcgccccctagcccgtccggggagcccccgaagccgaagggcacgaaagggtgcgtgctgaggagcgccgcctgcaccgccatcgccgcggctcccgggctgtccgcagcgctgcccgtgcgcccccgccagctcctgcccgccgcccagacccagctcccgccccggcgcggcgcgcgcggcgcagcctactagttccgggcctggctcgctgcgctgcctcccgggggagctcattaggtcttgtaagcaaggggcggagggagggagcgcgcggcgaccgtcccggtggtagaggggaggggctt

SEQ ID NO: 8289 - DNA, 30 bp, Homo sapiens
  chr11:82997453-82997483
  hyper
gttctgggtgattgcgtagtgcgagggcca

SEQ ID NO: 8290 - DNA, 493 bp, Homo sapiens
  chr11:84148447-84148940
  hyper
tcctggcattgtgcacgaacctgcgacccagcttcttagcataccagatagaggcaaacatagcgatgccaatggaaggaattcacaatgaagctgccgcacaatcaacttcccacctcggctcagagacgaacagaatcaggctggagctgtcacttgcaggctgttgctttctcagttcctctcatgctggttagctgagggagagggtgggaggagggaggggttgggggagaaaaggcagtcctgtttggccagtctgcaggtatatttacatcctgccagcaggaggtccgggtgaggcaggcgctgcctttgtagccagctcacacacatccagttggctaagtatttgtctgcagttcttcggcaccggcaccgtcgccaccaaactccatgtgtgtcaggaggaagggaagctgcagtcaagtccggaggcagctcacctccctctctaggcttgggcagttacaatcctcgctttggcttccct

SEQ ID NO: 8291 - DNA, 30 bp, Homo sapiens
  chr11:84431520-84431550
  hyper
ccgagctgccgcttcgatcactgccccctg

SEQ ID NO: 8292 - DNA, 30 bp, Homo sapiens
  chr11:84432297-84432327
  hyper
gctcaaaatgatttcgctggtgccctacga

SEQ ID NO: 8293 - DNA, 161 bp, Homo sapiens
  chr11:85780825-85780986
  hyper
tctactccgaaaacccgacacgttgctgccattctaaatttagatactagctggccggtattcattctctagggtgtggaataggacaggaaacacatagcttcactggaatttgaaaagggaagtagtaggatgatgtcaacagcgattagcttgaccct

SEQ ID NO: 8294 - DNA, 145 bp, Homo sapiens
  chr11:85955559-85955704
  hyper
tgcgcatcccctgacgggtactttccattcgccagatgggggaagccagggggaagcaggttactgtttttgcatttctatcttcaaggaagaattaggttatgaatagttccgtgaatagtcaggaagcgctgtcctccaagtt

SEQ ID NO: 8295 - DNA, 932 bp, Homo sapiens
  chr11:86382674-86383606
  hyper
gcaaggcaaaaacagaaaaaccgctggaagggcgcccgggaggatcctttctgggtccagggggcggggcgcaattttccggcagccacgggatcgcaacgcgggccgtcctgccctctggcccattaccttgttgagatgagggttcctggtgacatcgtatccgcgcttcttcaggggcacagggcgcgccgggccaggcttggagtggcagccttgggcgggcgcggtgggtgtccagcgcgggagggcgccgcaggcccggcccggccagggagccagccgcgtgcctgtccccagcgcggcacccatggtccttggcagacctggcacgggagagaaagcaaggtcagggcctccttccagccagccaggacccacgcgcgctgcggggcaccgggcctgatccggggacgcgccctctgggagagggcaggtgctcccaaagggttaaatgttccagcccccgccactcctcggctgccacctgctcggctccgcgcggggcgccaggcctagccaagagccaggcaaagcgaaaccaagccctggaagcagatccggtgcgggtgacagccggcgccacccctgcccccatccctgtgaaaaagaggcgactgcgcggcgaggggtccccgtacccctaatcccgcgtggtggcttgcctcggtcctctccttccctggcccacctgcgctgctcggggagctgaggtctacgcggtcccgctgcggagcaggcggggtgaggagctgcggtctgtgagtcctctcccgccaatgggtggaccgcgctggcggccgcgagctcgcggagctggtgagttcctcaaagagcggtcccacaacctttgttctcagtgcctggcttcccctgaggacgcgcgtggggcgcctcagcactgcgtgcacgtggttttccccagtgacaag

SEQ ID NO: 8296 - DNA, 659 bp, Homo sapiens
  chr11:86511288-86511947
  hyper
cccgggcaggagagcccgccagagccggtgctgcctggcgccgagaggcccggactggcgactgctgccgcgccaccggggcccacctgcgcagggacgctcggcctcaggccctctgggctgctccaccctgctccggccgcaggcgagcggcgaggggaggggggcacggtttatgtgcagtggggcgggcggcgtccgcgcggcttccccgaggccggaggcggggcgggcgggcctcgggtggcgcggggggcggacccgccagctgcctgcgctgctcgccagcttgctcgcactcggctgtgcggcggggcaggcatgggagccgcgcgctctctcccggcgcccacacctgtctgagcggcgcagcgagccgcggcccgggcgggctgctcggcgcgggtgagtgcgggcaccgactggggcatccgcccgggcgcgggagaggcgaggcgccgggaggagcgggacaaagggccgggtatgcgcggggtagggtaactgcgggctgccggaggcaccgcaggacttcgccagggcagtcctcggggttccaggacacgggctgggggcctgaaggagctctggggagacggcgggggctgcaggtcatttggattcatgcagtgtcacccatgaaacggatggggaaagaa

SEQ ID NO: 8297 - DNA, 30 bp, Homo sapiens
  chr11:86512316-86512346
  hyper
tgtaggcattcatcacgagttaacttttaa

SEQ ID NO: 8298 - DNA, 95 bp, Homo sapiens
  chr11:86513413-86513508
  hyper
actgtaattcttaaacgattatgtgattaggtctgttttgccttaatagggtctgtgattcaggaaaacgagaacaagcccgactgcagagtatt

SEQ ID NO: 8299 - DNA, 30 bp, Homo sapiens
  chr11:86514121-86514151
  hyper
aggtgaaatgatgcacggaaacacttggtt

SEQ ID NO: 8300 - DNA, 282 bp, Homo sapiens
  chr11:86666231-86666513
  hyper
cgggagtgtgatgcggcgacgagggggcagcggccggctctccagcagctgcgcgcgactgtgtgggattttagacgtcccgggccgaggccgagggacaggctgcgagggtcatggctgcaggcggcgagcccacaagccggcgccggccgcgtccgttcggcgtctccgcgaggccagccagcagccagcgctgcgcagctctcaccgccggagccctgcgcggcgctggaggctcgcggcgcggcggcggggcgggacggacagcgggcctctccaatg

SEQ ID NO: 8301 - DNA, 482 bp, Homo sapiens
  chr11:87908222-87908704
  hyper
gcccaccaggaaaaactgcctcgcgacctagtgattttaatctcacgcttggccgcaagccgctgcctcgagactggaaaccggccgcgaggcgctctatccccctgaccccctccccccgcgctcacctgcgatatcccagagctgcaggcgcaccacagtctccgggtcccagtggagcaccttgagcgcgaagtccacgccgattgtggcccggtagtgcgaagagaagttctggtgcacgtagcgcttgatgatactggtcttccccacgcccaggtcgccaatcaccagcaacttgtacaggtgctccttgtgcggggcctgcatcctggcggccggccagacgtgccgtgcctgaccagggaagcgcagcctgggctctgcgcacgagagagacttggggagcgcaagtgtaggtgcagagagaggcgtgggcggcggggcgggggctggggggcggaactcctcccctaggggtt

SEQ ID NO: 8302 - DNA, 30 bp, Homo sapiens
  chr11:88071022-88071052
  hyper
cggggacttgggagcgcgcgctgcccctca

SEQ ID NO: 8303 - DNA, 177 bp, Homo sapiens
  chr11:88241798-88241975
  hyper
aagagtgtcatatttgggagacgacgggatacagagggccgactcggacactggcgagttgggggttgtgctccccgagtccaccgagtctctgaagggggacggcggggtgagagccaccagctcctccaggtctggcttggcggccgcagcctcgggaccggccgcggggctctc

SEQ ID NO: 8304 - DNA, 144 bp, Homo sapiens
  chr11:88242130-88242274
  hyper
cgacgccggggctgggggccgcggtggacagcatcatggagttgagctcgctgatgttggccgtgaagcgggtgaccacactgctgatctgctccatgagggagccctgcgaggagctgctgcgcgccacaggctccgagtgca

SEQ ID NO: 8305 - DNA, 224 bp, Homo sapiens
  chr11:88242358-88242582
  hyper
cgggcgccgggaagtgctcctcagcctcggccacatcatacagcgccttggggccggcgtctggggactcgggcccgcctgggccggcgcctgcgcagcccgcaccgcccgtggcccccacgcccccagcgctcccgcctgcgccagcgccagcgcccaggccacggctctccgtgctcttggggaagggcttgatgacggccgtttggttggggttttctttc

SEQ ID NO: 8306 - DNA, 439 bp, Homo sapiens
  chr11:89224223-89224662
  hyper
gttttgtaagttgagaatgttcgaattaagacaaaacttccacttccagcttcccacccgtgcacgctcagagaatgaatcaaaatcactgcaggacagagagaacgcaaggagagcctagcccgccatcctaccaggcagaggtgtttaaccccttcgttggcgagccagctcctccaggacacagccatgccgccggccccgccgcgctgcgctctgtgcccgccggaccgagaaggagcgggcggcggccggggcagcggttacagttgtgcggcctgccgggccgctgagcgaggaccgagggtcaaagactgagtggaagcccgaaggcccggcgccgagccagcccgggcggggtctgctacccagagccgggttttccgggcgccctgactcccacccgcaccgggtcagctctgcccactcagctgcccag

SEQ ID NO: 8307 - DNA, 85 bp, Homo sapiens
  chr11:89224735-89224820
  hyper
cgagcctgttgttgtggctgctgctgttcaggatgtcccgggtgggaacttggaggcgtcccccgcagcctctacccaggcctgc

SEQ ID NO: 8308 - DNA, 544 bp, Homo sapiens
  chr11:91957645-91958189
  hyper
gcggcaggaaagtacgttggtgtcatcctagagccccagagggctgagggaagactcgagctctaaaattagccgcttccaggcccggcgccgggaatgccctccagttcgccgcgcctcctccgccgccccctcccgcgcgccccctctcccctgcgccacgctcctagatcgctagtcatccccgccgccgaggctcctctccccctcgcccttttcgctcgcggtttgggaggaggagactgcgagagacaagcgcgagggggagactggagaggggcttggccgtgcgtcggcgtcggctgtgatggggagcccggagcagccaggcggcgagcagtagcggcggcggctgcagctcggagcagacaggagagccggcgctcctccccgcaggctgcgctgtgaactggcctgcggattgggatctcgcgcctcccgtccctctcctcccgctgctgttctcttcatctcggctcccctcctccgcttgcgaacccccggcggcggcggcggcggcgtcccgagcgcagagcgcttctgc

SEQ ID NO: 8309 - DNA, 405 bp, Homo sapiens
  chr11:91958214-91958619
  hyper
gcggtgggcgctgcggcggcagcagccgggggaccggctcgcccggagcaagagcgccgagcaccgggtgaagaagaccacgggggaggcgcctcgtagagccgtggatcgccagcggaggcaagggtgcgtggggatttgtagcgtgatgatttggctgcctggtgcaccgactggagcgcgcctgccggagcacagcctcagctgctgggtgcaaatgggctgcgaggtgggctggggaggcgagagccgacgaagcgcgtgggggaaacttttcaccttgtaaagttccaacctccgcgcagccccgagccgccgttgctaccgctgcaaacaggagaagagggtggcttggccccgcggcgggagccgggaggtttacacggagagttggccaagtttggg

SEQ ID NO: 8310 - DNA, 30 bp, Homo sapiens
  chr11:91958893-91958923
  hyper
cgggtccgttccccacgcctgactcgggct

SEQ ID NO: 8311 - DNA, 30 bp, Homo sapiens
  chr11:91959685-91959715
  hyper
tgtgggtgtgctggcggtgacatcctgagg

SEQ ID NO: 8312 - DNA, 30 bp, Homo sapiens
  chr11:91960274-91960304
  hyper
ctggggttcctgtgcgtgggtccttaatgt

SEQ ID NO: 8313 - DNA, 95 bp, Homo sapiens
  chr11:92675279-92675374
  hyper
ccttctctcctaccccgacatcactgaatgtattttcccttctctaccactgggagtcgcaagtgcccacaataatgctccgtttctttttaata

SEQ ID NO: 8314 - DNA, 30 bp, Homo sapiens
  chr11:93063919-93063949
  hyper
cgagcgcggcgcagcgcaggtaatggctcc

SEQ ID NO: 8315 - DNA, 30 bp, Homo sapiens
  chr11:93861764-93861794
  hyper
tgttgggggtggggcgtaaagggggccatc

SEQ ID NO: 8316 - DNA, 32 bp, Homo sapiens
  chr11:94134431-94134463
  hyper
cccctgggagcctgcgggccgggcgtcccctc

SEQ ID NO: 8317 - DNA, 72 bp, Homo sapiens
  chr11:94134682-94134754
  hyper
cgacggtgacgcgctctggctctgacaagcctggctccccccaccctaccgggtggcgccgttgctgacccc

SEQ ID NO: 8318 - DNA, 30 bp, Homo sapiens
  chr11:94246021-94246051
  hyper
caagccctccttcccgatagcctgcctgaa

SEQ ID NO: 8319 - DNA, 18 bp, Homo sapiens
  chr11:94277135-94277153
  hyper
cgcggcagctgctttaga

SEQ ID NO: 8320 - DNA, 217 bp, Homo sapiens
  chr11:94473551-94473768
  hyper
gaggattccgccagccgggagttgggaggccgcgcgcgcctctgcggagcgtgacggccacggtcgcctagcaacgagcggggatgcgcggggcgcctgggtgggcgaggggtgctcgccgccgccgccgcgcgccctcgggcccccgggaccgcgggaaaacttcgcggctcctcggcgctggggcgtcggcgccaggcccggcagacagagcaat

SEQ ID NO: 8321 - DNA, 717 bp, Homo sapiens
  chr11:94473802-94474519
  hyper
cggcccagcgcccggccgggggagccgcggggtggcacgcggggaaagttggcgcgcgcctgaccgcgcctggaagccgcgcggtgccagggccgagttgtcccccaagtttctgcggcgatttgtcactccctggggatctggcggtctgaatcccgcggggcctccggctcagggattctgagcgctgggagagagaagcccgcgcttttcccggggacctgcgcttgagctggtgcttgtgcgggttcgtcctgaatggtagcgattcgagttgttttctgcttttcttctcccccagacagtgagtttgtggaagcctcgcccgcatcctacagcccagacgagttaggtaagtctgctcattttgtcttttatttcttggtcgcaattctgcccgagaactgcgagtttggggggcgtccataggaactcagctagggatggggctggggttggagggcggagggaaagggtcaggggacacctgctgccttcgcggccggaaccggcctttcctcggcgctgtgctttcgggggtggcagggcaagtgtccaatgagccgtgcgtgtgtgtgtgtgtgcgtgcgtgtgcgtgtgtgtgtgtgtgagtgcgtgtgtgtgcgtgttcgtctggggcagtggtgctgctccgaggagcctggcacagcaaacttccagagctggggcttctgaaacctgcgctcatcttgccgg

SEQ ID NO: 8322 - DNA, 804 bp, Homo sapiens
  chr11:94501253-94502057
  hyper
agtctgaaattaatcaaaacccggcaggggacaaaggaagggatgctgtcgccctcctaagtctcagggagacacgtcagcttgagctctgggcaatttcagcctggcagtctcgcggcccggggaggggcggcgggtgtctgcagacgggctctagggcccagcggccgggcgccacggcgggggtggagtgtagggttctagtgacgagcccgggcgaccctccccggcccgcgcgcggggagcggggagcgcggacggcggcgggagcgcgcgagaagctctaggacccagcagcggttgtcgggtttggggctggaggtgaagccctgtgtgaatggggttgattgtccggcgccacttccccgcgctgcccggcagccgtcttccccagccgagggactgaactagccatgatcgcctcatgtggagggcaaagttgcgccggggaacttgtgagcctgcggtgaaaggtaaccagcccccactcgaggtgccgggagggcgtctccgagtctcccacgcgaagaacccagtcgccccgggctccccgggcccctgctgctcacggaagggggcagcttctgggggcccggggctgagatcccagattgttgtttttaagcgggttcccttgccccgctccaggtccagttgcctgcgggccgggcctcagcgtcttgccgccccgcgacccacgttgactgaagttgtggccccggggtttgggccccggggtgctgcgcgcccgacgcggggctggcctttcctgaggggcgcagccatatggccagacactccgag

SEQ ID NO: 8323 - DNA, 451 bp, Homo sapiens
  chr11:94502100-94502551
  hyper
cggaagggggtgtccggtgcagctttccccggcgcgagacaaaggcgcgcgcaccggcccgcccgacgggctctggcgctgtggactggaccctttctgcccgccggccagacccggctctggcgggtgggggcgacgaaagggtcgcaccccagccccagacgctcggatcgcgttagctgctgctccttctttgttctctccccagacaagtttctttgacaaactggagagttacatccagctcccgcttgcctgttagggctgcctttacaataatctgctttcgcggggagaaaatttaaactttccaaatggaactgttttttcttggaatgtgacatttgtggcaggagggagagtggtacgttggccgatgacagccgagcggaacggtggcctagtgccgggacagggaccgagcgtgccccataggcggccgggctggagg

SEQ ID NO: 8324 - DNA, 172 bp, Homo sapiens
  chr11:94883964-94884136
  hyper
cggcggctccaatctggggtcccgccggcgccgacccctcagctctctcccgatacctgctggcctctctcatctttggtggcactcgccgccacggggacggtgagatcaaagaggtagacctaggccaggagggactgccagggctccttcccgcgggccagcctctcgt

SEQ ID NO: 8325 - DNA, 34 bp, Homo sapiens
  chr11:95523018-95523052
  hyper
caactcccaacttccgcgacgcaggaagcgccca

SEQ ID NO: 8326 - DNA, 30 bp, Homo sapiens
  chr11:95831955-95831985
  hyper
gaacaaggaaaatcctgcacagcagaactg

SEQ ID NO: 8327 - DNA, 1331 bp, Homo sapiens
  chr11:96122354-96123685
  hyper
caacagtccacaatttcgcaaagtggatcctgccagcatggtatccgggataactatattattcattaaaatccgttaacaatgaaggttaatgcagcaggaatgagtggtagacagtggaatagatcctctcaggaattaacacccggaagggtgactttcatgattacaaacctctttggcgggacgcaggaacccagcgcccgctagcccactagtccgtcactctgcctccaggagggaggggcacagtagctaggaaaccggaccctcaggccaagcttcgcgatgacgcgcgcaggacgacggaaacccccagaccccaaaagagctctgcaccgagaaaacaattacaagggtctggaaaggccagaaacccgagaaatcaccaaccgagctccctacatcagttccaagcacctccccaaggcggaaataacgggcaccgcgcccactgcagctcagctgaggagggttagaggcgcaaagggctgaggggcgttctccggcccacccaaagagcgcccgcgggaatttttctcttagtccgcgaggaggcacggcttcccccgcccctctcataaaccattagcaccgggagcgcgagcgagtcccagccgggagacagccccgcaccgccctcgcgctctcacctttcaaagcgcctccacctctgcctccgcctccgcccctgccccggcaaccagctcaggacaagcgatgctcctcccccccttccggggaccaagggaagtcccgcctctgggtggggcgaggggtggggccaggcggcgggagggatcatcttccgggagcgtggctaggggcggagcgactgccgcgcgatagtcagggagctgtgcgggtcctggttgcaagagaggtggggagaggggcctggcgggttttgagggactgggaggactgtcccggctaaagctggcgcgggaaactggggctgcgcggcgggagggccctgctgctggggaaggaatctaatatatccgttcccctgaggaagggtgccagtccttgactcctaggctcttcggctctctgtcgtaactttggggtgtggcaggggttagtgacgcgcggttacccgggatctggacgtgcaggaggttcgtggccacaatgggggtatagtctttctcacggctgctggggtaataaaacacatgcttttaatccggattatccgcggtgacatggggcctccgctactgcccgtataagttaaagaaaggcctgttctctcaaacttcctcctctttcaccttcttctgcagtctatttgccagccaaccccagcccgggaggggatcagg

SEQ ID NO: 8328 - DNA, 693 bp, Homo sapiens
  chr11:98891196-98891889
  hyper
ccgacctaagtgaacgcgtcagtctgtgctgctgctgtcagaggtgtgagccggggactacaggaatcagagtgaagacaggagcggaggaagggactctcgcctggatctcccgtgccgactccagccagcacgtttgctttgtaatctatgaatgttaaatacggaggggttgcagagcagaaacgctcggggaaggggggcaggtcctctgtacttagcagggaaggaaaatgccggttgactagtgagacgagtggagaaacacagagcaccctccgggaggcgcacagttcgttaagcccagggacatgctcaatgaacctttgcagcaagaggcagtgaggcgctggacgcgggcgccggtgacagcgcgggcggccggggaggggcgaggggccgccccgggaggacacagccagtcagaggcgcggggcgcagggcgcgcggacgcattggaggaaaacacgcgagccccaaacacaccagccgcaggaggcgccgcacctacttcccaatataaccaactacggcgtgggggagcggaactgcgagaaggcggcagccaaagtgccattaaagctcggggcggagaggatgcgttacctgggtcccgtctgctgcgagaggcagggcaagctggaggattccctctgaatgattaagaactccgcaattcgcctctgccacagg

SEQ ID NO: 8329 - DNA, 506 bp, Homo sapiens
  chr11:100997784-100998290
  hyper
cccccaactcgccgcgcactttctgccccactgggctacagcggacctagtgtgacgctgcacgttttaaatcggggttggttctgcttcggaatctggaagattcggaaagttaaaaaacaaacaaaaaaacagctttcagggaggcacgccccaaaaatagtatattctgcgcccaccttcgtgtccccaagagtgaggagaggagggaagaagaagggaggcaactgcccctgtgctgtgtcccgctgcccaccctctccggccgccccggggagcgcagcggtgcgctggggctggggctgagggttggcggccgccgccgccaacggaaccgctactcccggacgcgctgggcgtgccccgtcccgggccctcacctcaggtagttgagatagggcgggtagacctgcggcaggccctccttgagcacggcggcctggtagccgagctgcgggagcccgttgaggccgagtgcagggtagagcgcgggggccgccccggcg

SEQ ID NO: 8330 - DNA, 389 bp, Homo sapiens
  chr11:100998355-100998744
  hyper
cgccttgcagggcggcggcgcgaacgggccctgctggggcggcgcgccctccgctttgtacaggatgcactccagggtcgaccccgaggaggacgcagacgagactgaggcactggcgggtgcggccgtcaccgccgcttccccgggtctggatggggtcgctcgcggcggcagcgggggcggtggccccaacgggaaatccgggaaggctgcggggttggcaccggccacaaggtaggaacgcggggagcgcgcggaggcctccgcgccttcctcctcctcctttatctttagagcgggcggctggaagtcgctatagagagggtacgcgtcgtccttgggctcggcgtcgggcgggtacgcgcagtcggggaagtcgcctacagcga

SEQ ID NO: 8331 - DNA, 18 bp, Homo sapiens
  chr11:100999022-100999040
  hyper
gcccccggcgggacagcc

SEQ ID NO: 8332 - DNA, 339 bp, Homo sapiens
  chr11:100999159-100999498
  hyper
cggagacggcttcactggggccccggaccagtgagggctctcagaggccgggagcagcagctgccgggctggtgacaggccccggggcagcactttatgggcagctgccgtcccggagctgtctccaaccttgcacccggaccggctcatgagcggggacaacacccgctgggtggcgggggcagccggtggatcttcgggaagttcggggccaaacaggcaccaagagctggtgacctcgcaggcgggagggctgggttggctctgcccgggacctgagggcgccaacagagtgtccaagacactgtccagcagtccgctgtccttttctgggggact

SEQ ID NO: 8333 - DNA, 241 bp, Homo sapiens
  chr11:100999938-101000179
  hyper
tcctgggtcgggggcgggggagggcggcgctggtcagctcctgcccttggcctccatcctgtcgtcaggggaactgtggctgtcgtttgtcccagcgagcggcaagtggggagcgcaagaaaaagtagtaattgttaggagatctcgtctcctaactcggggagttctccaagagagttctccaacttctgtccgaggactggagacgcagagtactcacaagtccggcacttgagtggct

SEQ ID NO: 8334 - DNA, 30 bp, Homo sapiens
  chr11:101918289-101918319
  hyper
tcaccagccggctccgccagtggtgaggaa

SEQ ID NO: 8335 - DNA, 98 bp, Homo sapiens
  chr11:101981891-101981989
  hyper
tcccgacaggtaacctcgttgcccctctccccgtttccccgtcgggcgggcctcagaccgggggggcgctcgggagccgcggccgccagctctggtca

SEQ ID NO: 8336 - DNA, 30 bp, Homo sapiens
  chr11:102188131-102188161
  hyper
ggaggagtgcggaacgcctggtacagatag

SEQ ID NO: 8337 - DNA, 30 bp, Homo sapiens
  chr11:102323924-102323954
  hyper
gagctttcccctcgcgtgacccagcctaag

SEQ ID NO: 8338 - DNA, 31 bp, Homo sapiens
  chr11:102962428-102962459
  hyper
cccggcaggccgggcccgactccttttcctc

SEQ ID NO: 8339 - DNA, 45 bp, Homo sapiens
  chr11:102962689-102962734
  hyper
cagagacagcagcaagcggaggagcagagtcgccagcccgcaccg

SEQ ID NO: 8340 - DNA, 30 bp, Homo sapiens
  chr11:102980451-102980481
  hyper
tcctcagggtgcagcgatccgacgcaggaa

SEQ ID NO: 8341 - DNA, 30 bp, Homo sapiens
  chr11:104034043-104034073
  hyper
ctgctagattgaaacgcacgatttctcctc

SEQ ID NO: 8342 - DNA, 850 bp, Homo sapiens
  chr11:104034316-104035166
  hyper
atccccatcagcacgcgtcccacacctctcagtcccattccggaaatggagctctctcaggactggatacaggcaggagacctccctccccaaacaatgcattcagcccgagttcacattcaagattcaaaaagaaaggggaaaaacatagaaagaacaataacaatagcaaacatgatttttttttcagttaaaaaataaaatgagtctcttaccatctcgcctgaggttggcgttgcgcaaagctttgatggatgcgctctgcggggttgcagaagtgtcccgacagctgcaaaagtttgcgcagattagagtgtagacaaagatgagccggtgcatttgggatcagcgactagagacagcgtcgctccaagaaaaagccgggttctgctcccgggaccgacgccgcgccgccctgcgctctcgccgcctgcgctcgccctgcgctggcccgggtcgctgtgctaatcgccgagctctccccaaacttcctgcatgctgaactttccgagcgcgtgtgggtgccgcacttccttgtggtgctgagctgataaatggtgacgggacaaacaacaggttgacgtttgtttgttcgccccctccggtggccggcagctgcagcacaggctgcagggggcgggcagcgccgaatctagcggggcaggcgagcggagcagcagcgttctccagccccggccgcggcccctgagaggcgcgcactcgggctcagagcggcggcgcgagcacctcagctccccagtttcccaggccgggcctaaacctgctctgccactgagcatgcccagtttaatcgccggccgggactcttcccaccgccctgggctttacc

SEQ ID NO: 8343 - DNA, 30 bp, Homo sapiens
  chr11:105480964-105480994
  hyper
gattttctgcctagcgcagccgagaagcag

SEQ ID NO: 8344 - DNA, 256 bp, Homo sapiens
  chr11:105481268-105481524
  hyper
ttgctgggggatgtcggctgatgcgagctggagagcgcgtgtggcggccgcggcgccagtgtttgtgtgtatgtgagaaagcaaggggcgagcgcgagtgcgagtgaggcaaagatagagcgcatgtctcatccctgcgagcagccactagacgctccaccaccatcttttgcatgtgcaacatttgcagccggacagaaaacctctcccagggctatggagactgcgggaaaaatctggcggctcgcgatggatt

SEQ ID NO: 8345 - DNA, 30 bp, Homo sapiens
  chr11:105481848-105481878
  hyper
ttgtagcagatatccgaaagtgagttaaat

SEQ ID NO: 8346 - DNA, 30 bp, Homo sapiens
  chr11:105892730-105892760
  hyper
aggcgacagacgcgcgtggcacttctcccg

SEQ ID NO: 8347 - DNA, 159 bp, Homo sapiens
  chr11:106888277-106888436
  hyper
cagtgctgtagtcccctcttccgccctagcctaggggatcctctgtcgccggagccactggaaccctaggccgtgcagggtaaggccgggccgccccccagcggtcgggctctgcgctcgcgccccggctcgcccagcgccaactttacagatccgcgt

SEQ ID NO: 8348 - DNA, 170 bp, Homo sapiens
  chr11:106888641-106888811
  hyper
tccagcggcccgggcgggctccggctgccattccagcagagcctagacagggggcactccccctcctcctccgggctggtctccaggtagtcggagcccagggagctgaaggactcggacgaaatcttccttcgagacatgctgccggcggagctgcagcggccgaggcg

SEQ ID NO: 8349 - DNA, 1082 bp, Homo sapiens
  chr11:107461624-107462706
  hyper
caccatcttcctgtcgtgggctcctccagggaggccacccgggagcaattaaactgggccacaccagccacctcccacagcagcggggtccgcagatttaaccctttccccccagattccggcactgggtgccgcgctctctcccccagcaccgcgcccgcgcccccggctcccggactgggcatgctcagtagccgcccgcttcgtgctcccagggaagcctctgcacgccctcccccgctgctctcggtcgcctcctcgccgccagccgccccgggtgcatcccggcttgctccgctccacgcgacccagattcctgccccgcccccgccccttccgcgcccgcagccagtgcggcagccgcggccgcccctgtccagcctcggcgcccgggaccgagcgcgtcgctcgccgccgcggagcgcgtagccggagcgcctggggaaggcggagatgaagaccacgccgccgcgcgccgggagctgctgagcctaccgccgccagagtccaggtgattggcgaccccagaggagcctagggagtaggggcgaatgcccttggggaggagagaggtgcggcgaggacgcgaggcatcacgcaagctgcgctgtgcctgggaggcagcagaaatgctaagcatcgggggcagagagggaacgggaatgaaagtgcactctgccttggtgcaggggctccggggtcacccaggacagtgatttccccttctatcctgtcctcccaattaacacccgagaggctgcaggtcggcgcgagaggctgtttgcatctcggcccgggcgtaggtcgcctagcgacctaacgccgagggctcggggaagggatcccagacagagccaaaatggaaggcgggacaagggcggcctggctggggcgaggggctggtctgggtccctgggaaccccttgccttgtgggcttcggtctccagggaggagctaggcagccgggctgcggggccgccggactgtggggtcctccgcgcagcgagctgggaggagcggtcggctgggctgttgagctgcgcctcctccaactgctgggaaactccgcacttcaatattg

SEQ ID NO: 8350 - DNA, 30 bp, Homo sapiens
  chr11:107730474-107730504
  hyper
tcagttgtctccgccgtgccagggagagag

SEQ ID NO: 8351 - DNA, 778 bp, Homo sapiens
  chr11:107799215-107799993
  hyper
aggtgctgaaaggacagttcccgccgccgaacttagcccgcgggtggggcggcccgggagccagcggggcacgtgagcgatggagaccatctggatctaccagttccgcctcatcgtgatcggggactccaccgtgggcaagtcctgcctcctgcaccgcttcacccagggccgcttccccgggctgcgctcccccgcctgcgaccccaccgtcggcgtggacttcttctcccgcctgctggagatcgagccgggcaagaggatcaagctacagctctgggacacggcgggacaggagcggttcaggtagggaccccggggaccttgggcaccgcgccgccccctcagcccgcccggacgccccttccccaggcgtccgccccgccggccctggtcgggagaggctctggcccttccctctcgaaagtgcaaacactccattctcgcttcccctttgcccctcctcttccagggacgacttcctcctccgcaatttctcacttctttctttggcgcccatttcctgcgccccctttccatctttcctttcccgcctgaaccggggtcgtcctcgccgccccctcttccccaactctttcagcccctgtgggtatttttatcccctccggctccccggctgccttcttcccaaactcggcttccctggctgcgcacagcatgacccgaccaccctcctccaagcaggcgccccttttcctaccctaacccagcggctcccacgctgtgtggccggggagaaccgcgagggagggttccc

SEQ ID NO: 8352 - DNA, 30 bp, Homo sapiens
  chr11:108093234-108093264
  hyper
agccgggctacgtccgagggtaacaacatg

SEQ ID NO: 8353 - DNA, 470 bp, Homo sapiens
  chr11:108463470-108463940
  hyper
tccccacagcaccacgcacaagaagacccacccattccagccaaccccgtgtgtccaagtcccattcgcccacataagcctctatttgacaaattcctcgagctcctacccttggggtggggacctttcgcctcccgtgaggtgccggctctcccgtgcttcgctgactgcccgcattgggtggggagattcgcctctggtgccgagggaaaactgcgttaggcgagggtggaagctctgtcggacccgtgcgagcacgtgggtgcgcgcgggccgcggagtgagcagcagccaggattcctctccagatcgcgcccccgccgcatttcattgcctgaaacggcccacgccccgcgatggcccagcagacacccggcacagcacagcgtcactgcgcggcccccgcagcgcacggacccccccaccctgcccgaccccagacccgcagccgagcccgtctggtatgtggt

SEQ ID NO: 8354 - DNA, 75 bp, Homo sapiens
  chr11:108464241-108464316
  hyper
acgccggaggaactttcgtcattttctttactgtgtgtgagttacacttaagctccttggcgcctcctgttagga

SEQ ID NO: 8355 - DNA, 227 bp, Homo sapiens
  chr11:109293004-109293231
  hyper
tgagtaaaggcttctgatggccgggtggcctgacggccaggtgcgagtggggaggacagctcacgcggcctgagcagccacccctggccatagctccagcccccgcccctgcccccggcccctgccctggcttgcttgcgcgctacctcgctactccgcagtgcaacagtttgcagctgcctcttgggagcagcaaggaggctctcctgtgcgctgcgggtctaccg

SEQ ID NO: 8356 - DNA, 171 bp, Homo sapiens
  chr11:109293592-109293763
  hyper
aatgggacccaagggatctgacgctgtccagggagggcgagtctggacggggagggaaaggaagggaggactgcgtacccggagcccgcgcggcggcccggagtgggtgctgggaagggtaggatccaggcgaagacatcaaccgagagggcgcagaaaagaggagagccg

SEQ ID NO: 8357 - DNA, 217 bp, Homo sapiens
  chr11:109293873-109294090
  hyper
cgcggtgccggcgcagaccccatcctgtcgagtggcatgagcaggctgctggtggctctggtgcacggccacgggccggcaggctggggtccgctgaccgaaaatacaggcagcgcccagctcaggcagtgtgcccagagggccgctttgcggtggtggttgatctttcccgacagcactcccctgggcagcggccgagattctaactaagctttgt

SEQ ID NO: 8358 - DNA, 932 bp, Homo sapiens
  chr11:110166500-110167432
  hyper
gcggcctcaagggcccgagaaagttacagggctccgagagctgcaacagcagcaggtagagctgcggccgggaaccgcggccctggcctggcgggtgcgagcggcgggagcgactggcgccccaaagcctgtcatgcaacatcccctttgccactggggcggaacgcacgctctctagtaatttaacacccctcctttcaaactggaggccggggaacaagttctaataaatgtaaaatcgaattctacctacgctgaatatctggattttcaaacaacccttgggaccatgccagcccgggcccggggcccagtccaggcagcgggagcccaccgtccccagggcgctgggggtccgacaccggcgctgaaggcagactccgcgccccgaggaaaggagaatcccgcggcggcgaaggtcgactttggcccggccaggcacgttcgggccgcggctcagccacgactcgggcagggcctcgcggcccctaccagccccgggaggagcctggccggccgggccgttaccacagtggcgcctcggccagctgggcgcgagcggaggcgcgccaagccctggcggcggcgccacggccgggcagcacgggccccgcaacttcgcgccgccaccttagcgtctccggaggaaccgggagcggggagtgggggaagggagggcgccgcgccttacccggagagcgggcggcttctgcccgccggcgtgtggctggggcgctgcgcggcggcgcggctgcgacagggagggagaagcggtggtgcgagcgctggcccgcgggagacgagaggcgccgccgccaccgcagacagctccgcaatatggccgctcggcgcctccgcgggaaaaggcggggctgcccggcgcccccccgcctccccctgccggccggccgtcctcgcgccgcggactgagc

SEQ ID NO: 8359 - DNA, 30 bp, Homo sapiens
  chr11:110300617-110300647
  hyper
gcggggcggggccgcgctctgcttgccaat

SEQ ID NO: 8360 - DNA, 1204 bp, Homo sapiens
  chr11:110581824-110583028
  hyper
caattcctcagggagcgaaacggcagaggccggcagcccgcggcccacgtgcacttgctcagggaaccgttccagcgaaacctgacccggatcggaatcctcccgcagcacagcggccgtgtttatcggaatggaacgctacaagttgtcacctgcatccctctcccagctttgacagggaacacgcgctgcccccacgcccacaccgacacccggatccctatccagcccggccagagtcccaggggccagggaccagtgcagggagaaggtcccccacctcagccctcaggacccccaaccacagcccacccgcccccaccctgctcggttctaggcccagccgaacctacatgtccccgtagtgtcgagcgttatcatccacagtcgcccctcaaactgtgacccccacctgggagacccggaatcatccaggaccctggtgtggggggcagtactccccatatctgccccccgaaaactgctatggagcagccgcgcctcggcgggcaggtgagggggccgagcccaccagcgccgcagccccgctgcctaccttcttcagcgccggctgccgctcccgggcagacatcgccggccctgactttggggctgacaccgccaaagggcagtcagtgctcgcccaggccacttcgggaggcccaggggcacggcgaggggtcggggaaaggcgatcgcccactacagcccgcgcgcctagactgagggaggagccgggctgcagaaccggcggcggatggagacgggagggaggctgcgaggtcgctcgaggagagactaaggctctagaaacggagaagcgggcgctctgcgggaggcggcggcgctgccgctggccgtcaagggcgggaagtgttctgggactctcattaggggccgcgagcctcgagcgtcaaattcccgcggcgtccgcctagcgcgctgctgtggcgggcgcggagggcgcgcgccggcagtgggggctgcggcggcggagggcacgggcccccgctcagcgtcctcaccttcttggtgcagctgcctcccgcgagccgagacactcctgtcagggaagaggagcgccccggctgtccccctagagtctcctgctggggggacatcgcttccatgaagaaaatcttcaaacaaatcccagcccaggaggaggctacacgatcatgtccgcgggctgccggccggaggg

SEQ ID NO: 8361 - DNA, 1005 bp, Homo sapiens
  chr11:110583043-110584048
  hyper
cggaggcgcggctgccgtgctcaggcagggagccgagctccgggtgctcgccgcgcgcctcccgtcggggccatgtacctccgcctgcgctcgacaccgcgggctggaggcgagtgcagcggcgacagcccgtcagcgccgcggcccgccccgcctcgggcccgccccctccgctccgggcgccctgcgccggggcccgcccccgcagccctcctcagccctcctccagcctgggccctcctagcctcgtcccagcctgcggcgcgcctggcgggcgtctctctatatatgttagcacaccggccaccggctgaccttttcggtctgtgactccgcgtgggtgcagcccgcaggagctcatcggcctgtgtcacgcacgggggcctctagtgcacggacacgcgcctctcccgccacctgcccactcccaccagaccccatcccttcccgcgccgtgcccgcggcggaaggcgcccctgcagcgcgtgcatccgcggagcggtggcgacctcagcctgagcagaggagttgcagtgattcctgcctcgctttcagcggactgcggagggaatcccccaccccaccccactggggatagggtggcacgtcgcagagtgtcgcagctgtacaaatttggaagcccacagcatcgcctgacctcttgtgcaatcccgaacgctagcctgttcgggtaaccctgagtgggcttctgcagccggtcatgtcagcggcccctgcacatttgcacccgcggtttccgctgtctgcaggctgcagagacgggggcattccaaacgtgaaagagcaatgaaggaaaatgcagacagagcgaggacgccgaaatttggctaagctattgagaaggctacaatatgtggaagtgtttatcagatatctgcgccgagagcataacttcctgtcagcccaaatagaggcaaaaatattttaaaggccaaagaataatcagagggagaggatttggagctgacccgcgttgagctgagt

SEQ ID NO: 8362 - DNA, 649 bp, Homo sapiens
  chr11:111169608-111170257
  hyper
ctgcgcgcccagaagctgctacggggggagctagaggctcacagtgagcctgggacgggggcagagcgcaccgactgcactgagccgagctgtggcggtccctgcgcggaccccgaggggcgcccgctgcccgcggagtccggagccgatcggggaacggggtggtggggctgcggtaggctggagcgcggagagggcgcggcgcctgggccctgcgggcggggcacgggattccctgggtccgggctaggaagagcgcaatctcctttcctggggagaccctaactcctggaacccggcttgagggggatccctgctgtccagctgcggtccccgcagtgaccaggcgaggcgctggcatcctggcactatctccaggcgtccaggctgaacgcgcggtcaccctcggccgccgcacccagcgcacttcccggcgcgattcctggacgcacactgcagggtagtggtcagggccggagccgccccggactcctgcggccacctccaccttgaaagctcgcccggctcggcttggcctaacagccagtccccaacctactcactgcggcttttcggggcccggggctgaggctgcccctgctcccagcgctcaggggtccctcccagcgaacccctcttgagcgcgccc

SEQ ID NO: 8363 - DNA, 304 bp, Homo sapiens
  chr11:111383227-111383531
  hyper
cggggcgcacggggtcgagagagccagctctagggtttggggctgggaactgaagcctggcgtgaaggaagtgggagcccgggccgaggaggcgaaggggaaaggaaaagcgaggggaacctgagcgggagggccctgagaggagcgggaggctgcgggaaggggaggcctggcactcctgggggtcatgggggtcggggcgcggctcccggcctgggagggcgcgggtcctccccggcagcgccgcccgctggcccagctacgcgtgttgtgcgctgcgaggccggcgggggtcccgctgggc

SEQ ID NO: 8364 - DNA, 336 bp, Homo sapiens
  chr11:111383557-111383893
  hyper
cgcccagccatggtagggcgtcccccggtgaaatggggtccgaggcgggccccgaccccgcgtcggcgctgcggaccgtccgggagctgcagccgcgggtgcccggtgctcggtttgtaggcagtgtcattagctgattgtactgtggtggttacaatcactaactccactgccatcaaaacaaggcacagcatcaccgccgcccggccgggaagaagacgccggctcgggcagcccgcagccttcgagagaagatgcctgagaagcgcggcgtcggcgtgggtcctgcgcagcctgccccgcgagcgcccgctgcaagtgcgaggaaacccgcgg

SEQ ID NO: 8365 - DNA, 380 bp, Homo sapiens
  chr11:111411201-111411581
  hyper
ctgaagtattcctccgcccagcgcctcgggcaaacgcgggatctcccagggaagctcggagggggacagggagctggttcccctctgcgactcgcccctctctggctggccgagtgtctggcgccaacctcgctggaggaggctgtcgggggcgggccagccagcggggctgccctcctcgcagtgacgtcccagggggcggaggggcgaccgactgactccgcgccctcccccccgcctcccgtgcggtccgtcggtggcctagagatgctgctgccgcggttgcagttgtcgcgcacgcctctgcccgccagcccgctccaccgccgtagcgcccgagtgtcggggggcgcacccgagtcgggccatgaggccgggaa

SEQ ID NO: 8366 - DNA, 361 bp, Homo sapiens
  chr11:111411821-111412182
  hyper
cgtctgagacccacgccagttcccggagctgcgcagttccctgcgcgtcctggaacgctcgaagcccgttcccagtccagagttatgggggtgggttggagaatgtaggagaggtggggcagtgggcaaacctgccccagtgggtgccccttcggcccgctcctttacacgcatcgaatcagtccttgggaccacccccgcggggcaggcttgccagctggcccccgcctaccgcccgctccgggaggcggccgcagagacagcggggtagggatgctggatccccggtgccgtgggaaccctgcctgttactcctcgtctcttctgcggggttggatggctgggtcgagcgcccggtatg

SEQ ID NO: 8367 - DNA, 31 bp, Homo sapiens
  chr11:111945412-111945443
  hyper
agagagatctgcctgtcggtctgggctgggg

SEQ ID NO: 8368 - DNA, 30 bp, Homo sapiens
  chr11:112045967-112045997
  hyper
actttattctgtgtcggaatcttccagaag

SEQ ID NO: 8369 - DNA, 31 bp, Homo sapiens
  chr11:112046231-112046262
  hyper
tccaggcagttctgtgcgtgttcactgttta

SEQ ID NO: 8370 - DNA, 102 bp, Homo sapiens
  chr11:112096984-112097086
  hyper
agagattcagatagcgagagacacccttaactgtctcccgaggccgggattggccagagcggaagcggagacgcacttcctaggggcgcgtctggcacgcac

SEQ ID NO: 8371 - DNA, 621 bp, Homo sapiens
  chr11:113345303-113345924
  hyper
agaaactgaaaagggtcaggtcgcaccaacacagagttgccaaaaacagcccttcttcctccggaagaagtcggaaactctggccgcgagccccgggtctcgcgcttgggtgctgggggaagtgccctcccgagattgtggggagcggcctccctcccgccctccgatgccgcggctccgccgtgctgccctgggcgccccgcggggaggctgccccagctgcgcccgctcgtgctcggggagaggattcccttctaagtggcgaggaggctactgagaaggagggagaggggatagcagccgcgggctccagacgccctctgcccccgcccgacggggagcccatgcagagccggatcccaggcgggcgctcccgagcaggcggccaggagtggccgcacaaacttctggtcctggcctcgctccccttggaggtccctcctcctctccccgtgacactgagtcgcccgccgctccatccggccggtgcttaccttcaagccatagggcgcccgggggcagagacggcgccggctgcttgaggcttccagctcccgccgcatccacgcgcggccgcccctccggcagccgtccggggccgccactctcctcggccggtcc

SEQ ID NO: 8372 - DNA, 30 bp, Homo sapiens
  chr11:113745707-113745737
  hyper
acggtgattaattccggactttaagtgaga

SEQ ID NO: 8373 - DNA, 31 bp, Homo sapiens
  chr11:113746651-113746682
  hyper
gttaaaactgttcccccgccgtgggaaactg

SEQ ID NO: 8374 - DNA, 30 bp, Homo sapiens
  chr11:113907091-113907121
  hyper
gggctaagaggggacgccgcaagggggcag

SEQ ID NO: 8375 - DNA, 231 bp, Homo sapiens
  chr11:113929795-113930026
  hyper
ttgggctaggaaagcggccttttaaaacagatgtcagggggactgcagccccgagccatgagaaaaaagttaaaggcgagatgacacgcactgaattggggcaaacattggaagaggagacaaaactgcgtgcttgagcaccggggtgcggggagggggggacaaaacccgtatccagtgcaaattaaaatcttgggagtaggtgggggctgctgcgcgcccttcaccctc

SEQ ID NO: 8376 - DNA, 100 bp, Homo sapiens
  chr11:113930415-113930515
  hyper
tgatttgctaacctcgcagcagagaggagttgagggcgatgagagcgggtactgcgaactgccgggcgatgctgtcgctgccgccgtgatacggagagca

SEQ ID NO: 8377 - DNA, 30 bp, Homo sapiens
  chr11:113932174-113932204
  hyper
tccccaccccggggcgggcagcaaaaatgt

SEQ ID NO: 8378 - DNA, 2468 bp, Homo sapiens
  chr11:115373433-115375901
  hyper
tttgggggcaagcagccaacccggcgtcccccaaatctcaagctagcacccccacacatcccccgtctcctacagcgtgtctcctgcggtgtttacataactgtgtgtcctctagcgtgtaaacaaaaggcacagcccaagcggagaggcgcccctgaagcagcaccgtggccccaacgctgtgcccgcccgggcctggggctccgcaggtgggggctgagctctcggcgtcctccgccacttgttgctcccgggtcctgcagctctggagctgcaaggaggggctttgcaggctcagagccctgctgcatcccctcctgcatcgccgctcgcaccccgcggccccgtgccactcggtcccggcgcccgcctggagcctgcagcaggggccagaggacgccgcgcggctgccaagcgcggcgaggtggcgggaagggaggctgggtgcagcacagccggcctctccgctgaggaagagctccggctcccttttgttagcaaaagcaaacactgccctcttctttcccgaccgcgccaacgcgcccggcacacgggcagccacacatcgggctccagccgagtgctcggtgtcttcagggaaggcaccgggcgtgcagagccgcccctgggcaaattcccaagactgctcttcacgcagggagcgcgcggaggcccgcagggtgcccgcctggccgcagaggccgcgacgccccctccgccaccctcgggccgccgaaagaacgggcagccgggaaatcccgtgtccccactcgtggcagaggacgctgtggggcgggcgggctgcgggctcccggcgccttcccgcagaggcggcgacagcggccgccccccccgcggggccgggccggggaactttccccgcctggagccgggccaaaaagacccgcagcagagccgagggggcggagggctgcgaacggccggagggaaacacgagaggcgtgcagtttggggacaggggagaaaggcagagcgcgttgggggaaggggcaggggagatcagacaagtctggggatgtcctggggaccggggagaaatcacgccgcgggcggctgggagtcagccaccaggaggcttcggggatggagaactgggggggccctctggagaggtgggggcgaatggacagccctgggaggtgggaggacctgcaagttacggggagaacggcgagtttagaagggtccggaagggttgaggttgtctttgaaccatccccttcccccatgctttacagcccccgggccccccattctcactccactctgcaccccgcgccaagccggggagagaaggtgtgggtgcagccatccctggggactctcattcacacttagccgggcaggggagaaggggctcacagatgccctcagccccttccctctcagccctgagtttcctctccacactccctccgcttcggatgtaggaagtggggggaggttgtcatggaaacgtttcccccctctgtggccaaggctactggggtgccttcggagatttaggggccaaccggtcggtgcccacacctacctgtggggatcagtgccgcggcggagaagagcaacagcagaagccggagccggagcccgggaggcgccgccgccgccgctgccgccgcacactgggatccgctcggcagcactacactcgccatgtcgggcacctgcctcagactggcggcgttggctgcctccggagcccgagcggacagctaatgagatgctaatgacatgcgctggaggcggagtccgggcagaccaatcacagcgccgcgagcccaacccggctctcggagggcctcgctccctcccccaccccgccccctggcgctggcgttcggcggcgcgcccgcgccacctaggggcggggccaaggggaggggcgtatgcaaatatgtttatgttaaaattcgggttttgctttccccggatcaaggaaaaagtgttctcccgggcgcctggcgtgcaaggactcgggctccagggggcgggtctagcttcttgtacacctttattaggaatgtttatagcaatcgctgtatcagaccgacgactggagaatctcccttaagagggtcctctgtcccgcacaccgagtgcatctggcctagcgaaccagacgttgcaaatttccgtcactcaccttgcaccgaaggaatagatctttgggaacgggggctgtgcgggagtggagagtaagaaggcaggtccccggattgacaaaacaatctgggagaagtgcatgcgtgctttgcacgtccggcggagcgggagagcccgctcaacagcctagcggtagactcggggatagttggagaaggcagccgtagagtcgggttctgagattttccagtcggtctttttgcggcagaatctcgggaaaggtagatcgaggagggtatgctcaggctcctccgcttgtcgagggtctcctccctggtttt

SEQ ID NO: 8379 - DNA, 30 bp, Homo sapiens
  chr11:115376167-115376197
  hyper
ctctcctgctaaagcgacttgcatctccgg

SEQ ID NO: 8380 - DNA, 119 bp, Homo sapiens
  chr11:115529976-115530095
  hyper
gaccatctcccatctctacagcgactcccctatgaccgtcccccacccggtgctctcgggccacggggaagggacactcgggaaagacaccagagaccgggagggtgcagctgggctct

SEQ ID NO: 8381 - DNA, 402 bp, Homo sapiens
  chr11:115530221-115530623
  hyper
cgtcccttagccgtgtgggctgtagcacagagggggcaaacacctccaggggcttgtgccaagtaattaccaagcaaattcccggcgatttcctctcctccccccgcccccccgggcagtgcccgctgcgtgttccctgattcggcccccggctgtgcaatcagctccaggtaacctgcggggacccgtaattgctctggagttgcctgcgagtttgcaaggtaagcacgcgcggcgcttctccctggccctggggcgcgcggtggagcgccttgcgcccgcccccgatgggccggatgccggggacctgcggaagcagaggctgcgggggtagagatccaactccacggagtgagagagcagctttgcgctaatggggccgggtgcaggaagctggtgcag

SEQ ID NO: 8382 - DNA, 471 bp, Homo sapiens
  chr11:115630614-115631085
  hyper
cagcgcgagagcagcgggcagtggcggaccagcgccagggcagggcaggggtggacagagggctctccccacccttccctcctccagtgaaagtaccagaagagatggcggccgctccgccgagtgtcattaccgcggaagcagcagaagccggcggcaggagcgggcccgagagcccgcggccagtggcctgcgcaccccgcgcccagcgcccccgccgcgggtcatcagtgtcagcgttgaggggtcccggggagcggttgcagggcggcggcggcggccgggtcatcagaagcacagtggagccgccccctgctttgggaggagcaaaagagcctctcgcttgcctcccgctcgagctccttctcctcttccttttcctagcgcttctctccctccctcggcggggtccgcagagacagctgggcaggcggaggctgcgcgcctctcgcacctccacgcccaccctcc

SEQ ID NO: 8383 - DNA, 30 bp, Homo sapiens
  chr11:115791602-115791632
  hyper
tggcagcatgtttgattgaggcagggccct

SEQ ID NO: 8384 - DNA, 31 bp, Homo sapiens
  chr11:115936675-115936706
  hyper
tgctaacacaaagacacgccctgctgtgctc

SEQ ID NO: 8385 - DNA, 178 bp, Homo sapiens
  chr11:116706357-116706535
  hyper
gagttgttgagatccggcaggaagtccctgctccagggccaaaggccccacccgggctcccccggatgtccccgcacccccctctattctcccaaaagaaagaagctgcttcccactttggaaacgtttattctgagcaccgggaaggggggcggcggcgggcgcctcactgggtgtt

SEQ ID NO: 8386 - DNA, 489 bp, Homo sapiens
  chr11:117186648-117187137
  hyper
gccctgggccagcccccgggtccgggctgtggagagcggtcaggggagatccgcagagcacgggagcaggggagaggctgggatccggagcccgctacatcggcacggcggcggccagcctgggcagcgggcgcgggctcccggcggggctgggaggggcgggcatggcgggccggtggcggcttccctggtccccccggcgggcggcggcgcgggcaggggcaagggctccgggctcctgcggctgcgttggctgctcaggccaccataatccagctcgcggctcgcagctcccgggcgggctggggaggcggaaagacttgtggcggcggctgtcaaagccaaaaggttttcgcttttccctgggatcgctgggaagtgtagtcttcccatggcaggcaatccggcttccggggctggagaggggtctgggatgccctctgccgaggtggagtccgccctgcaaggccctggcgggaagggccagac

SEQ ID NO: 8387 - DNA, 30 bp, Homo sapiens
  chr11:117789330-117789360
  hyper
ctggagatgcctgggctggagatgcccggc

SEQ ID NO: 8388 - DNA, 31 bp, Homo sapiens
  chr11:118023498-118023529
  hyper
gccgccggtcggggctcgggaaagttagcgg

SEQ ID NO: 8389 - DNA, 30 bp, Homo sapiens
  chr11:118992029-118992059
  hyper
ggaggccgagcctgcgcagttaggggaact

SEQ ID NO: 8390 - DNA, 30 bp, Homo sapiens
  chr11:118992398-118992428
  hyper
ccgagccacctcggcgagtattcttgccgc

SEQ ID NO: 8391 - DNA, 65 bp, Homo sapiens
  chr11:119039731-119039796
  hyper
ccggaactgggcagccgcgggtaaaggcctagcgggcttgataacccctgcgccctggctgggag

SEQ ID NO: 8392 - DNA, 30 bp, Homo sapiens
  chr11:119077264-119077294
  hyper
cccgccggggacggtggacaagaagatggt

SEQ ID NO: 8393 - DNA, 237 bp, Homo sapiens
  chr11:119103175-119103412
  hyper
aacccaaagctggcgctaaagaatagcccaccttatatcttagacctgctaccagatacctaccagcatctccgtactatcttgtcaagatatgaggggaagatggagacacttggagaaaatgagtattttagggtgtttatggagaatttgatgaagaaaactaagcaaaccataagcctcttcaaggagggaaaagaaagaatgtatgaggagaattctcagcctaggtaatgg

SEQ ID NO: 8394 - DNA, 84 bp, Homo sapiens
  chr11:119142430-119142514
  hyper
ctgatcatttgtaggcgaaacctaaccaaactgtccctcatcttcagccacatgctggcagaactaaaaggaatctttccaagt

SEQ ID NO: 8395 - DNA, 107 bp, Homo sapiens
  chr11:119144574-119144681
  hyper
caggacaatagtcccttggaagagctttcgacaggctctacatgaagtgcatcccatcagttctgggctggaggccatggctctgaaatccactattgatctgacct

SEQ ID NO: 8396 - DNA, 131 bp, Homo sapiens
  chr11:119145546-119145677
  hyper
gtcctctttgctcaggaattggaacagccttgctgtaactcatcctggctacatggcttttttgacgtatgacgaagtgaaagctcggctccagaaattcattcacaaacctggcaggtcagttcaatgac

SEQ ID NO: 8397 - DNA, 143 bp, Homo sapiens
  chr11:119146701-119146844
  hyper
catagttatatcttccggctgagctgtactcgtctgggtcagtgggctattgggtatgttactgctgatgggaacattctccagacaatccctcacaataaacctctcttccaagcactgattgatggcttcagggaaggctt

SEQ ID NO: 8398 - DNA, 103 bp, Homo sapiens
  chr11:119148461-119148564
  hyper
tacagctatttgtttcctgatggacgaaatcagaatcctgatctgactggcttatgtgaaccaactccccaagaccatatcaaagtgacccaggtgagttttg

SEQ ID NO: 8399 - DNA, 563 bp, Homo sapiens
  chr11:119148860-119149423
  hyper
tttttttaatcaaaggaacaatatgaattatactgtgagatgggctccacattccaactatgtaaaatatgtgctgaaaatgataaggatgtaaagattgagccctgtggacacctcatgtgcacatcctgtcttacatcctggcaggtacggatctaaacagcgacttttttcagctatgtaataaccttggaaaattcggtattatatagcctttactgatacaaggggtggcctggcttttggggttaggtttaaacttttacttttttttgatctctaggaaatgtattttctagtagattaatattttaagtattttcagatgcatctgttactatcttttgcttcttctgcaggaatcagaaggtcagggctgtcctttctgccgatgtgaaattaaaggtactgaacccatcgtggtagatccgtttgatcctagagggagtggcagcctgttgaggcaaggagcagagggagctccctccccaaattatgatgatgatgatgatgaacgagctgatgatactctcttcatgatgaaggaattggctggtgccaag

SEQ ID NO: 8400 - DNA, 493 bp, Homo sapiens
  chr11:119155747-119156240
  hyper
gaccttctgccgcagcgagtatgtgttccctcaagtgcttctgctcttggaactgcttctaaggtaaagcattttccattactgcagtttttggattctttgctgtgtactagtgggtttttactgatttgctttcaccctgcttccacaggctgcttctggctcccttcataaagacaaaccattgccagtacctcccacacttcgagatcttccaccaccaccgcctccagaccggccatattctgttggagcagaatcccgacctcaaagacgccccttgccttgtacaccaggcgactgtccctccagagacaaactgccccctgtcccctctagccgccttggagactcatggctgccccggccaatccccaaagtaccagtatctgccccaagttccagtgatccctggacaggaagagaattaaccaaccggcactcacttccattttcattgccctcacaaatggagcccagaccagatgtgcct

SEQ ID NO: 8401 - DNA, 127 bp, Homo sapiens
  chr11:119167630-119167757
  hyper
tcttcctgtgccaaaactgccacctggggagcaatgtgagggtgaagaggacacagagtacatgactccctcttccaggcctctacggcctttggatacatcccagagttcacggtaggttcacaac

SEQ ID NO: 8402 - DNA, 87 bp, Homo sapiens
  chr11:119168097-119168184
  hyper
tgtgattgcgaccagcagattgatagctgtacgtatgaagcaatgtataatattcagtcccaggcgccatctatcaccgagagcagc

SEQ ID NO: 8403 - DNA, 176 bp, Homo sapiens
  chr11:119169060-119169236
  hyper
tctccaggtgaagggaatttggccgcagcccatgccaacactggtcccgaggagtcagaaaatgaggatgatgggtatgatgtcccaaagccacctgtgccggccgtgctggcccgccgaactctctcagatatctctaatgccagctcctcctttggctggttgtctctggatgg

SEQ ID NO: 8404 - DNA, 101 bp, Homo sapiens
  chr11:119170360-119170461
  hyper
tcatgagtcaggggtactcctaccaggacatccagaaagctttggtcattgcccagaacaacatcgagatggccaaaaacatcctccgggaatttgtttcc

SEQ ID NO: 8405 - DNA, 31 bp, Homo sapiens
  chr11:119187862-119187893
  hyper
gctgacgtcaggggggcgggggagggggccc

SEQ ID NO: 8406 - DNA, 30 bp, Homo sapiens
  chr11:119192140-119192170
  hyper
cccgctgctgtcagcggtgacaccctgggt

SEQ ID NO: 8407 - DNA, 46 bp, Homo sapiens
  chr11:119209336-119209382
  hyper
gcagaggtatgtgtggcgcaggcagcccctacgtggttcagttggc

SEQ ID NO: 8408 - DNA, 30 bp, Homo sapiens
  chr11:119211032-119211062
  hyper
ggggatcttgttgtcgtccagtgggggcga

SEQ ID NO: 8409 - DNA, 774 bp, Homo sapiens
  chr11:119293352-119294126
  hyper
cggcactgcggcttccttctcctccggtgccccgcacccagcccgccgcgaggtcacccggcagattccctctagctcgccatcctccatcctctccccgcagtttcatccgtcctcctccccgcctctgcgagctgggtttggggacgtctgggtggaatgtagacccacaggctgtccttggtgcccttcctccctgttctccagcgccccagccccagacaccagtcccccagcgggcgaaagcccgggagcgccttccccgaaagacatcagggtgccacgcggcccctgccctgcagaagcatccccctcccgcccctgcctggaaagcaggcccctccctaagctctgcgcccttcttccctgggcgccctcggaccgtggcccgaagcctagtgttgggaagtcttgcatgggcgcctgacggcggtccccgagccccaggtcccaccggctccagttcccacctggactggggtcttccgctgctgcagcctcctccagacgcgccgccgcctccggttgctgcacccagctcggagcccgcagttttcaccggggatggaggagagggggagcggggagccgggggctcagccaatcagaggcggagattgggggagaaaggacggcagggtggggtggggggtggggaaggaagagaaggcggtcccgcattggtgtgagagtggcaggttgcggcggaagggggccctcaccctgtggctggcaggcctggccagggacgggagggttcgggaccccggggat

SEQ ID NO: 8410 - DNA, 240 bp, Homo sapiens
  chr11:119455326-119455566
  hyper
gggagaaaatgaatcgccttgagtgacacaggacatggcagattggatgtttaatttgggtatctctttagaacgccccccacgcccacctcctctgctcccacttagcatccagccggcgagaaagccctgctcctcacaaattgccttgtcggctcggagaaaaatgccagcgtgactgattgctaggtgggtccctccaagtgcgcgggaaggaaccggcacgaccgcacaatgctc

SEQ ID NO: 8411 - DNA, 127 bp, Homo sapiens
  chr11:119455793-119455920
  hyper
gcgcagaggcagaacgcagcccgcagcagacggacagccttccccagactgcctggagctcggagcccggcgccgaaacctgcagatcacaacctgtcagtcgcgctttcccggcagcctcacctgc

SEQ ID NO: 8412 - DNA, 172 bp, Homo sapiens
  chr11:119587895-119588067
  hyper
ccttcaggactggccacgaggcccatcatctgacccctgggagggtggggaacggtgctgtggtcagggcagaggcaggccgggagcagggggctgtcgcacacgttcccccaaaggcctatccatcacgccagtggagaccatcagagtgctctgccggcccaggacactg

SEQ ID NO: 8413 - DNA, 73 bp, Homo sapiens
  chr11:119598372-119598445
  hyper
agggccaccccggggtcgggcgcgaggttaacccctcggctgccggcagcccgcacctcgaggaaggacacgc

SEQ ID NO: 8414 - DNA, 314 bp, Homo sapiens
  chr11:119599011-119599325
  hyper
cggcttctcaacctctttctccgccgtgccacctcccaccccctttacccaagccgtgacccaacttttctggctcctttcactccccacaatccagtcgtgcccgccatccggctcccagccccggggaggcattggatgggggtggggacagcagaggtgagcgctcttacctgggaggaagaatgcggtcaagccgagagcgagtccccaccagcgtccagcggcgcccgcaagccccatccgagccatcgggggccgggggtccggcgagaggggcggcgagggcagcgctcctcgcgcagcagaaacca

SEQ ID NO: 8415 - DNA, 58 bp, Homo sapiens
  chr11:119600031-119600089
  hyper
agcgcacgcgccttcccgaccgaagcagaggcggatcgcgagcgcgggctgcggggtc

SEQ ID NO: 8416 - DNA, 145 bp, Homo sapiens
  chr11:119612122-119612267
  hyper
gcgcctgggaccctgcggggcctcctggaggcgggacgggcacggcgccacctagcggtcgtgggccgcggagagagcgtccctgtccttccccgtgtgggacctgcaaccgccccatagcgcagagtccgggaggctccagcca

SEQ ID NO: 8417 - DNA, 162 bp, Homo sapiens
  chr11:119612323-119612485
  hyper
cgtacttttactggggtacggggagccctgccccacggctgtcagctcgggtcgggcgcgccgggtgcccaggaggcagcctcccaccctcccccgcacacgtcgttccagtccctccgccacaaagagaccattgattgggaagagcggccgggttgtggt

SEQ ID NO: 8418 - DNA, 164 bp, Homo sapiens
  chr11:120196356-120196520
  hyper
ctcgccgccagccacgcctgctccaaggctcctcctcgccagtctggccctggaacgggagaaaccaggagaggagccttggacctctgagccgcgatggccttccaaatgcccttccgttctttggcaaaaaccaagagcaaaaagccgaaacccacacaggg

SEQ ID NO: 8419 - DNA, 31 bp, Homo sapiens
  chr11:120206517-120206548
  hyper
aggtgagcggggcctgcggaggcagcgaggg

SEQ ID NO: 8420 - DNA, 30 bp, Homo sapiens
  chr11:120207924-120207954
  hyper
aaaggaggacctctcgccaagggccccaat

SEQ ID NO: 8421 - DNA, 481 bp, Homo sapiens
  chr11:120435128-120435609
  hyper
ttgcccgtggccctcctttcccgattccccgacgtttcgggaggagtggggtcggagcgcagggctgggaagggtcttaggacccaggaaggagacgggtgcctcccagagaggaccccatcccctccgaggtccgggcggctcccggcctctccctggggtgccgtagcccccctcgacccgccttcccgcagccgcagtcgttcgggcctggaggtggccgggcatcggtgccgacgccgcgagggcagcgcccgcggcgggaatactaatgcaccctaaagggcacggccgccgccgcagcaggtaattagctggaccgcggcggagcgcgcggaggtggctgctggctgcaaggactgcgcccagcctccgcctcgcccctcgaggctcccgcgtgggccggcgggcagtgcgtgggccacaggaagcgggctgactggacccggctcaggacttcgcacaagggcagctctttgtt

SEQ ID NO: 8422 - DNA, 507 bp, Homo sapiens
  chr11:120894618-120895125
  hyper
actcaatgggtgggcacgagaaagagcagatgaggtgtttgtggtaaagcctaagccagtgcagccatccccgtcgccatggcaaccccagcgcggttggggaggacccgctcctccggcgccccctcccattcacgcagcggacgtgacacgtgcggcggggtcacgtgttgttgttgggccgggaaagctgcttccgggtcaatgcaggacactgggctccggcggccagagtgggggactaggtgaagcggcgccgggccggggctggccgggaccaggcccgaggctgagcggcggcgacagcggtggccgggaggggggaggagaggcgcagccagaggagccgccgcagtagctcccccgcctcccgggctgaggggtgagtggagccgggcccgctggctctgccgggctctcgaggcccgaggcgttcccctctggagccgaggcgcggagggtcgctcctgcagggtgctgggataggacactcggggaagggtgaaa

SEQ ID NO: 8423 - DNA, 265 bp, Homo sapiens
  chr11:121526457-121526722
  hyper
ttctggatctggcatgtgactcgcagttcagcaatgcgccgacataacccagagttgtacgtccccatcatcccccgcaaaataaaaatcctgaacttaaacgagccttcctcctaggcgagccactgacacatgatctgtgtaatccacccggcacgtgtttaatcggactccaactgcaactgcctttgtagccagccccggctctataattgggaagttgtctttttttcagcgaagacacgggacagccagactagctatc

SEQ ID NO: 8424 - DNA, 30 bp, Homo sapiens
  chr11:121593823-121593853
  hyper
tctgctcattagcccggaggatggctcgca

SEQ ID NO: 8425 - DNA, 30 bp, Homo sapiens
  chr11:122311278-122311308
  hyper
accttagcaggcgccgtggctttgaaaaga

SEQ ID NO: 8426 - DNA, 31 bp, Homo sapiens
  chr11:122626283-122626314
  hyper
ctgggttgtaccaaagcggctctcagccctg

SEQ ID NO: 8427 - DNA, 291 bp, Homo sapiens
  chr11:122848021-122848312
  hyper
gagaaaacagagagccgagagctgaatttccagtctgggacgcggtacttgggctggtccctgaccccaaggacgacggacgcaggaaaatgggcgcccgggcgcacagtctcccgtggctgggaccgggagggctagaggggaggcgggaggccgggccgcgggccgtgctggctccgcaccggcctggaggacaggtgggttttgtttgtcttccaggagcggatttccaaggcccgccacgagactggagtctgagtcttccggtccaggagggaaccgcgctcggcc

SEQ ID NO: 8428 - DNA, 253 bp, Homo sapiens
  chr11:122848368-122848621
  hyper
cggccctgagcccagctccccctcgtctccaatgtccacctcgtcctctggctcggtcagcacgaagggaccggcgggcaggctcagccgagcctcggcggcggtggcggcctctgaaccgcgggggctgccctcggggctttctggcccgtctggtgctttgggttcgtcttggcttttccgcagttgctttttatgcttcatccgccggttctggaaccacgttttcacctgatttcggggagataaaaat

SEQ ID NO: 8429 - DNA, 315 bp, Homo sapiens
  chr11:122849808-122850123
  hyper
gccaggtgtaggtaattttacgaaagctcttgggaaaggcttagaataagcgtcagcggggtctatttctactcgaactccacaaggtcccgaaggtattaagacttgaaggcagagaggaacgaagcagagatcagggcctccctctcctcccgcccacctgcgtctcggacaggctgagggccgtggccagctccactcgttctggcgtggacaggtagcgctggatctcgaacctcttctccaagcccgagagctgcgagtcagagaaaaccgtgcgggctttgcggcggcggcagtgcttccccggcagct

SEQ ID NO: 8430 - DNA, 74 bp, Homo sapiens
  chr11:122850148-122850222
  hyper
cgctgggactggcatccctgcagagagaagagcaaccaagtgggcagagcgtgggtcgccggagagcaatctcc

SEQ ID NO: 8431 - DNA, 274 bp, Homo sapiens
  chr11:122850933-122851207
  hyper
gtctttcctgaccctcgcaggcttgactctgtctgagacgcaccaagcagagagaagctgccacaagcaacatcggccaatcccagagaaaataaacaaacataacaacaaccagtgcgggtacttagggctttggccactgctgtatgggaggaccaccggagcagctgagaatagattgtcaccggcgggtggtgaagccagtgcagagatgcggacctggatttacaaacacttttagctttgttctggattccagcgcgcacaaactgcc

SEQ ID NO: 8432 - DNA, 295 bp, Homo sapiens
  chr11:122852414-122852709
  hyper
gacgaagtggaggacgcaggcagagtctccaagcctgctcgaaagccggcaaccaccctccgaggctcgaatctccgctgctctctcccgggcctgggctaccccgggcgctggagaggcaagaagacaagctcctgggtaggttgggtctctgtgttggagaattggcagcttggagaggggggccgggagagccaatgacgaggctgccagaggcagaggggagggtgcgggaggctcggggcggggcggggagctgtccgcggtgctgaacaccaccggccgagcctgggaa

SEQ ID NO: 8433 - DNA, 30 bp, Homo sapiens
  chr11:122855008-122855038
  hyper
agagggactcggggcgcagccgccccgcct

SEQ ID NO: 8434 - DNA, 30 bp, Homo sapiens
  chr11:122855277-122855307
  hyper
gccgcccccttctccgggggtgccctgagg

SEQ ID NO: 8435 - DNA, 30 bp, Homo sapiens
  chr11:123066093-123066123
  hyper
cggtcggggagaagcgtgagctggccgggc

SEQ ID NO: 8436 - DNA, 31 bp, Homo sapiens
  chr11:123084067-123084098
  hyper
cctgtagatatggatccggtagggaagcaaa

SEQ ID NO: 8437 - DNA, 418 bp, Homo sapiens
  chr11:123172444-123172862
  hyper
tgtgctgtggcgcagcgggcagggacggaggcgcccaggggcaggcggcagcacgggaagaggccagcaggtggcgcggtcgcccaacccggccgccccccgggcgccgagggaagcgggtcaggggcgtccccacctgcccaagcgccggctctcccaggcagcaggggcggcggcggcctggctggctgcgctgcagagcggagagcaggagcggcgtgggaggaattcggagcactttcgccgcctgcctccttttactgctggttgccctcaaaggagccctctccctccacacgcctttgggccttaccagccgccggaagcggcggcatccatcccagcaaagcgtgcattccatcctctggaaaaaaagtctttgagcttcctttacagtgaccttactttggggactgaa

SEQ ID NO: 8438 - DNA, 75 bp, Homo sapiens
  chr11:123172915-123172990
  hyper
cgtggttgacgaagccattccctccttgctacttgccttgtgtgatacactgtcacggcccgggcttctggcttg

SEQ ID NO: 8439 - DNA, 364 bp, Homo sapiens
  chr11:123228999-123229363
  hyper
agggaccaagaccggcgagcgggagacaggagcggaaaccacagaggtagagtcagggccgacactgaagaaacgtagatgcacagggaggggccaatattagtgtacagagagaaagagggaacacggtgcggtgacacctagcctcggagacagtgggagctccgagcccacggagagcgggggagttccgcttcctcccgccccagcggctcccgccccgcctgggcgcagccggccgtcccggctccgagggtgcagcgcgcccgggcgcagcgcgagtgcgtggagccgggctccagcacgaccccgccgctcgggtttgggtgtcctcaggctccgcgctcctcctcccctcctccag

SEQ ID NO: 8440 - DNA, 205 bp, Homo sapiens
  chr11:123300823-123301028
  hyper
ggtcgagtccctccccgagggaatccgtgtacagttacactagcggtcgctgccagtgctagcccattcaggatagcccccctcaccccgcccccagcccccgctcctcctcctccttttttgtttttatccagtgtctcgcttcctctctctctctctctctctgtctctctctccctttccctcctaccactgcctcttcctc

SEQ ID NO: 8441 - DNA, 979 bp, Homo sapiens
  chr11:123301082-123302061
  hyper
cgcaaaccgctgagagtttgctgcaccgccccctggggcccctggctgccgagtcccgctaaggcaaagacgccagcaagcgaggaagcgcagcggaagaaaaacaagcgggcgcgcgaggggagccccaggagggctgccgagtggctggcaggcggctcccgcccctcccgggtggcctcgccggcggctgacggcccggaggacgcgcgctccgaaaagttagactccgggcggcggcgcgctacgccgcgtcccctcgcgtcccttcctcgctgcgctccgggaaaggaacttgttccttcggccccaggattggggagtgtgccgcggggccgagggtggggaacagccagagggagacgcgaaccaggccgctggcggagggctcagggggagcgcagaggcgacggcccccatgccggcggccaacatgatggagaaccggccgctgcccgccctgcaggtgcccgagccgcagggtgcgcccgagggcagcccggtctggtccagttcgtcgacccccacgcttcgccgccggcgcttcaagatgcgccgcatgaagaacgtacaggagcagagcctggaggccgggctggcccgggacctgcccgccgtcttggcccccggcaaggagttcctgcagctgccgtccatcgagatcacgccctccagcgacgaggacaccccgtggtccaactgctccacacccagcgcgtccccgcgccgaaaacgcttcctcctccgcaagtggctgagggtgagggagcggaaggagtgcagtgaaagcaggtacgtccccgttccgcccgtctccttcccttccctcccgtcctctccagagccgtccagggccccggggcattctgggggaaacgtcctgggggagaacaggagcccgtcaccagaggcgcttctggagggcgctgcgcctggtcccagggatggtggcattcagcttccacgcgtgccacccgct

SEQ ID NO: 8442 - DNA, 31 bp, Homo sapiens
  chr11:123326582-123326613
  hyper
aaacactcaaccaggccgggtggggtggctc

SEQ ID NO: 8443 - DNA, 30 bp, Homo sapiens
  chr11:123524923-123524953
  hyper
gttgattcacctctcgcctccccaggatcg

SEQ ID NO: 8444 - DNA, 250 bp, Homo sapiens
  chr11:124616910-124617160
  hyper
cttgtttatgcaaacgccgagcgcctgggaggctcggtaggaggagtcttccacggccccgccccgcccctgtcggtcccgccctcccccccgccgggctcctggggctgtggccgaaaggtttctgatctccgtgtgtgcatgtgactgtgctgggttggaatgtgaacaataaagaggaatgtccaagtgttcagagggtgccgggggagggagtttgggtgcacaaggcctccgcttgcaacttgaa

SEQ ID NO: 8445 - DNA, 198 bp, Homo sapiens
  chr11:124630146-124630344
  hyper
ctggtccgtttttttcggtcccagggtccacggagccactgggagagaaaaggagtctggttgggtctgatcgaaggacactgggacagcccaagaaagggacccttccggcccacagccctctccgaggccagagtgagggagccggcaggggccgaaggagagcgaaatgggcccgctccccggggctatttttag

SEQ ID NO: 8446 - DNA, 30 bp, Homo sapiens
  chr11:124631651-124631681
  hyper
cggctcagctcatccggctctgctgggtgg

SEQ ID NO: 8447 - DNA, 593 bp, Homo sapiens
  chr11:124709384-124709977
  hyper
ggagacccggcgtcacccccacgcgcacacaatggcgcgggggccaggccgaggacggcccattagcggctgatggaggaggcgggagcccggcgggccgcctaatccccgcacgcggacacctgggtgggagcgcgggcgagtggagggcgcgcctgcacgcaggatcccgggctgggcaacggcctagaccgcctctcgccaaacctcccacgccagcgccagtccgacgaacaggagctggtccagcgaacaataaaaggccccggggctggggagggatggaagcgcccttggagcgcgcaggctacgggcgcccccggcagcgcccccgcgccttcccctcccgccccgcggccgctgattgcctattgtgcgtcccctctgcggccgcccgcgcgatgcactctgcgagctggccccttcgtttctaaatgagcagccagcgccgcagacacgtgccaagggaagggtagttcactgcgtggggcggggggacatgcaataagacaagagaccgcacggaaatagctccgtgcccgtctgctgcactgtccttctcacgtgccttcggacaaggggactttcactct

SEQ ID NO: 8448 - DNA, 135 bp, Homo sapiens
  chr11:124736200-124736335
  hyper
cagagctgtggcgggcgggcggagctggcggcgaggtcgttaccgctaattacggtgattaataaatgactgggacagcgcgctctcccctagcgccgcggggaagctgcgggagccggccgccgccagcctgcg

SEQ ID NO: 8449 - DNA, 445 bp, Homo sapiens
  chr11:124738650-124739095
  hyper
cccacaatttccctgtctgaacgctctgcgccaccccctgtccccagggtcaagggtaggaccggaggacgctatgccccgcatcgtggagcagccgccagatctgctggtctcccgaggcgagcccgccacgttgccctgccgcgctgaaggccgaccccgacccaacattgagtggtacaagaacggggcgcgtgtggccactgtgcgggaggatccgcgtgcgcaccgcctgctgctgcccagcggcgccctcttcttcccgcgcatcgtgcacgggcgccgcgcgcggccggacgaaggtgtctacacttgcgtggctcgcaactacctgggggcagcagcgagcagaaacgcctcgctggaagtggcaggtgagagtcagttgaccgtcagctggttgcttccagagcctggggtaggcgggagggcactgggcaatcag

SEQ ID NO: 8450 - DNA, 295 bp, Homo sapiens
  chr11:125133320-125133615
  hyper
agcccccactcccgcggtaacagctgcagtccagctgctggcatccctgctgggggagcgtgctaaacctctccggggtcagcactgtggtatgtcggtttccatagcaaccagccaacgggccactttctcagaacaattcccctactcagccgggttctggacttagctcagcccaagggcatgtggctgaggagcagcgcgggagggggagagctgccgagggccagactgggccccacagaacgtggctatctcagtccggtcttcgcacggagggcgtggagccgaggat

SEQ ID NO: 8451 - DNA, 567 bp, Homo sapiens
  chr11:125365116-125365683
  hyper
tggctggcactctgaggaagccggactcatcccgtgcaggccgcatacacactccactgcccttccggccaaacaagcccggacacgggagagggatgagagtcggggatgcctagcggcgaggagagaagggataggcaaaagggaagaagagcgggctgtgatacctcctcgacgccgtcaaacactgctccccgcattccagagcccggggcccacccgacggcagcgcgccccgccaccgcgcagccgccccggtcccttctcccgcccgtctgtagtaaaacaatcgctctcccggcgtctgcggccgctgccagcggttctgacactgcaggaatgcgcggtctggggaaggctccgcactctggggaggggcacgagcggggtcgggggtaagtttttagggacaaagatgatcttggggcgtttacggtgactggaccagataacggtcccgggacgaggtaccgacccactgccccagcgcgatcgggcggcgttcccttcttcccccagcccccatacctcgccgccctgccttcacacgcgcgcacacacgcgggc

SEQ ID NO: 8452 - DNA, 370 bp, Homo sapiens
  chr11:125365742-125366112
  hyper
ggagggccgatgctgagatgatactggaagtgcccatcatcccacatctccagggcctggcgcggcgtcccagctgcgctccctgaagggctgggcaggaaggcgacggcctcccgttgttcctttctaatcccagaatgggaccaggtgaggggagctgcggcgaccccagaccgtcctgtcagagaatcccggggcctccttaccacccccaccagaccccacccccagcagtgagtcgggtcctaactaaagtcaacccccgcgacggcacctgtgcgggtcctggcggagggaggcggatcccggggctcagccggacacccccatccacgggccgcgggagcggccggagcgcagcgcagcgcag

SEQ ID NO: 8453 - DNA, 54 bp, Homo sapiens
  chr11:125757380-125757434
  hyper
catgctcccgccggcggagaaggcccagacaaaatgtgcgccaatcaggataca

SEQ ID NO: 8454 - DNA, 30 bp, Homo sapiens
  chr11:125774349-125774379
  hyper
gccagcaccgcctcgcgccggtggtggaag

SEQ ID NO: 8455 - DNA, 56 bp, Homo sapiens
  chr11:125932493-125932549
  hyper
gcctccagacctcctgcgctgcagccggctcggaaagccacccccaggtcatcccc

SEQ ID NO: 8456 - DNA, 436 bp, Homo sapiens
  chr11:125932556-125932992
  hyper
cgcgcggcggcggctacggtggcggcggctgcgatccgaacgggcccctccatgcaccgcgcagggcagaggagggagcggcgcctcgcacgccggggctggggcgctgggcagggcgggcgggcgtggggtcccgggtctcctcgcacctagccgcgcgagccgggctcccgggctcaggggaggggagctgaggggcggagtcaccggggcgcgcccccgcggctgcgctcctccccgccggggagcgcgggcacgtaactcggagggtgctgggccggcccggagcacgcgagcagcgggaggagggaccggggaatgactgacggaggcgggccgtagaggccgctgtgccccgccggcccgcacccggccggagtgtgcgcgcgcagcctgccagatcagcggcgggggcacgggccgtaccaagtgacgg

SEQ ID NO: 8457 - DNA, 31 bp, Homo sapiens
  chr11:125933297-125933328
  hyper
gccccgcccctcgccccgccccgcccctcgc

SEQ ID NO: 8458 - DNA, 30 bp, Homo sapiens
  chr11:126173622-126173652
  hyper
ggctccaacactaccgtggcccaagggcgt

SEQ ID NO: 8459 - DNA, 102 bp, Homo sapiens
  chr11:126225981-126226083
  hyper
gcgggacagttctgcggaaagtttccgcccccaatcccccagccctgcgcccggactgaagcggcggcccccacctccagcatcctcgagcgatggtttctc

SEQ ID NO: 8460 - DNA, 362 bp, Homo sapiens
  chr11:126873124-126873486
  hyper
cgtggggcagagaacgcgagcagtacctgcaggacccacagccggtcgggctctggcgccagcctcgacggcggccccgccatctccgcccggctgcccgcggcctcacctcctccgggggctcggttagcctcctggcgctgcaaggctgcctgcgcgcggttcgctccgggggagggaggaggagggaggcggcgaggagccgacggctccacctgatggagaagcgcggagagtccctagacctcggagtgcgctgcaagaggggagaggagagagaccgccgcccctgctggaagccttcgcgtccgggggcggcgcgcgggggaaggggtctctggacagtcggtggaggcggcagc

SEQ ID NO: 8461 - DNA, 30 bp, Homo sapiens
  chr11:127423281-127423311
  hyper
caaaaaaaaaaaaaatagtgtacttaataa

SEQ ID NO: 8462 - DNA, 761 bp, Homo sapiens
  chr11:128391961-128392722
  hyper
ttagtaacagggggaaggggacgggggaaatccgactttcttcccaaaaatctcaaattcccgctgcctttctttcccccgcgcccggacggtgcgcgcccggcactccaggggaagttggcactttgcggcgaagtgagcgcgctcgggtcccagcctcgcccgcgccgcgcccgctcctcctgcccggccctcgcccgctccctcctctccgccggcggctgcctcgttcgctctcgatctcccggccgctctccctccctctcgccctcccgcgctctcccctcctctttagggcgtttctcgcggcgccgcgtctcggccgctgggtccgcgcgccctgggccgggcgatgtccgcttgggggagcgaggggcggggcgtcggggcagggcggggagccgggggcggggccgagcaccgcggccaatctccgcccgcggcccaaagcgaaaggaagggctggcgagcgcggggccgggccgcgaccgcggaggagcagtgcgtggagccccgggcctcggagcccaggcaggggcgggaagggccgggagcgggtgtgcaggctgggtgcacaggccgcctccaccgtttcgggaaagtccgtctgattctccacgcattcttgagggcttggtcacccgctctcgccccctcccagtagcagcatagttttccaagtgcgtgtacatcattcattcacaaagactgacacacaggacgtgaggcatgtggatgaaggcgagcgtgcaggcaggcgc

SEQ ID NO: 8463 - DNA, 449 bp, Homo sapiens
  chr11:128562736-128563185
  hyper
aagggcccagcccctcgaggctgctccaactggggcgcgcggcggcccaggagggaggcggggaggtctccgggttgggccggggaacgccggcctccaggctgggtagggaggacggtccagagcgcgggcctccgggtctcaccccgggaaaagtctgggtctgctctgcgctgttgcgtgctgcgctcctgggacctgctgactgtcctagagggaacgtcccgcggtagtgtcagttccctggggaccaggaagggcgactcttgcctgggagtcagtgcttgggccgtcgggtccgggtaagcgctgggggtttggctcgagaagatgcggataggtggcctagggcgccgcggatctccgccctctgcgggcaccgggagcccagggtcgaggcgcgccgccccgaggggccccttctcctaacaatgcgcccggaatggagt

SEQ ID NO: 8464 - DNA, 392 bp, Homo sapiens
  chr11:128563336-128563728
  hyper
cggttttcgtccgagtcttccccggcagtaggcgctgggttacccgcagccctagccaactctccctccataccccccctaccccacccccaaaaagtttgtctccggctggaaaaagcattaatgaacgtatctgtgggaagaaacggaaagtgaatgagtcaggagggccaccttcggccaaccgcctcaggaaaagcaaagaagccaaaggtctttggctttggattttgggggaaggtgatggggggaggttcagacttcgggaatcagggcgcggacgctgggcgtggaccccgtcattgttcccggctagctcttatctcccaggagcaagtatcctgtgtgcgcagcgcatgaatgtgtctgggcatctccgcgtatatttatat

SEQ ID NO: 8465 - DNA, 609 bp, Homo sapiens
  chr11:128563934-128564543
  hyper
agctgaaaaaaaagtttcatccggttaactgtctctttcgctccgctacaacaacaaacgtgcacaggggagtgagggcagggcgctcgcagggggcacgcagggagggcccagggcgccagggaggccgcgccgggctaatccgaaggggctgcgaggtcaggctgtaaccgggtcaatgtgtggaatattggggggctcggctgcagacttggccaaatggacgggactattaaggtaagcggcggggcaacggacgcgggcggcggggaccggccggggaggcgaagcggcgggcgggtaggtgcggggcccgcgtcccggaagacgtggcctctctcccttccctccgcgccccggcttcgcgccggctcctccggcgctcgggtggcgagtcctactcgcgggccagccggccaggcgcccgcattgagggcgaccctcccccgaaatcccagcccccaaagtggagccccggcccccctcccacctcgctgcccgccggggctgcaggaggggacggcgggaaaccgggggaccccagggtacggaacggagtcaagggcgagagacctcggggtccaccactcccaccgacacccggggctc

SEQ ID NO: 8466 - DNA, 274 bp, Homo sapiens
  chr11:128564602-128564876
  hyper
cgggggctgcagtcgcccgggctcgggtccctgcctggtgggccctggggtgggtaagtggcctcgttgcacgagggtaggggtgcaagtgagtgtgtcgggggatctatctgagcgggctcctccagatggaagcccctgtttacatgtcagcgctttcccttcctctcggcactcagtcgcccggctctaggcgctggagagccgccggctccgcgggactcctgggccggcctcgccgcctctccggcggggaaccttccccagcccccgt

SEQ ID NO: 8467 - DNA, 296 bp, Homo sapiens
  chr11:128564991-128565287
  hyper
cgcctccgttgcaggggccggctgtgagcccgcgccccgcgcccgcccggccattcccaccccagccgccgccgccaagcctgggtctaggttgcaaagtgcaacccaggcggaaaggtgagggtttgggttcgcgtctcacttcagaaaagttgactgctgtctctgaaagggttcgccaagtagggccaggagcagagaggagggacaccccctaacgtgacgggccttagaggacctaggggaatgaatgggaccaggggttagcttcgaggctgccgcgcaacaccaagcgg

SEQ ID NO: 8468 - DNA, 30 bp, Homo sapiens
  chr11:128565504-128565534
  hyper
taaaagacaccaaccgaaggaacttgcaaa

SEQ ID NO: 8469 - DNA, 30 bp, Homo sapiens
  chr11:128775011-128775041
  hyper
tgggtggctggggccgctggcccgcccttc

SEQ ID NO: 8470 - DNA, 541 bp, Homo sapiens
  chr11:129148498-129149039
  hyper
gtcgtccaacatgcagcggcaacttcagtcaatcggaaagacgaggggggaactccacgggagcctaagggagcagagacctctggccccgcggggcccacgcacacctgggggcgggacccgcgatgtcgcccgcgggcagcggagggaaacgctcccgcggctcctccgggagcgccggtgtccctggagcccccactcggccgctcccaggagtcgcggctgccgcccgccttgggcccggggcggagagcgctgcggcaggccagaacgccgtccgaacgcccggctcgcggaggccgcggggagcgcggggcgcgggcgcgggaggcggtgggcccgcagcgccgtccgccccgggaggccggggagatggggccgggggcggggggacaaccgagaggctcctccgggagcatgcgatccggaaccctcactctaaaaagaatattttaagaaggaaagagaggccccccgcagccttccccgcggggcctgcccacgtcaccggcgcccccggccctcccgcgcgcccgcctta

SEQ ID NO: 8471 - DNA, 634 bp, Homo sapiens
  chr11:129149096-129149730
  hyper
cgtgtctgccctccgcgggccgggcccgacgccctccgcccgccgccgccgccgccgagcgccgcccgcgccgccgagcctagcgcctggccgccgagggcagccgcgggggctcggccgggcgtcccccgcgccagcgcctcatcccgcctcgcgccccgtcaggctcgggggcgggggcgccgggccgcggcctccaagtccccacctccggcacgcaccgcgctcgccctcccgcggcggagtcggcccccggggacgcgggtcctcgggctccagagcctctcaccctgacgccttcgggccgcccccgcagcgcccccgcccagctggccggcgcgtgcccccgccggagcccgccgcccgcccagcctccgcctcctccgctccgcctcctcctgcacccgcgacgcccgcagcggggagaagaggcgcgccgccgcggccgcgggcacgagcacgcgcgaggagggcgggcggcgggcggagcgcgcgcgcggccgagggggcgggggcgcgccgaagcctcgcctgctgttgtcccgggagcgcacgtgcgctgcggtggggcgccgaggggcgttcggcgggtgcccctaggggactgggggacagggaacgcgaagtgggtaga

SEQ ID NO: 8472 - DNA, 30 bp, Homo sapiens
  chr11:129234362-129234392
  hyper
aggtgaaaaactttcgagaactcagagcaa

SEQ ID NO: 8473 - DNA, 411 bp, Homo sapiens
  chr11:129242830-129243241
  hyper
gggcggggagcaatgcggggaagggagaagtgggagggaagaagaggagaggagtcagtggcggtggaaggaaggggaagaaccagagagaagaaaagaggttaaggaaaagaagagcaatgcaaagtcggggccccgaatagtgccgcattctgtgggcacacgccgggcagatagaaagtatagacgcgacgcgctcggcccctcgtcgggcgtcgggtcctggtgctgtcgctcaggtgctggtccccagctccaagcccgcctcgtagtcggcgctgcgggtgagatcgcccgcaagcactcagtttactggcggctgcctaccagcggctcactttcctcggggcgcctaaagctccccgcccggcattgccccgggagcgaacgctgagcccctgggacccagcc

SEQ ID NO: 8474 - DNA, 352 bp, Homo sapiens
  chr11:129243304-129243656
  hyper
cggacggcgatgccagggctgagcggtgagctgtcccgggtcccgcgctttgaccgcggaccagcctcagggtcccgccgcggaagcagggggcgcgcctggggccagcctgtagaccccagagtccggcggcaggacccccggcgccacccggacacctggcagcagttctcgcctgccctgcagccgcctctgcatggagaaagagaatgaaagaaaacaattctagatggagaggaggggaggggaggccagtttgcaaatacttcgggaatgaagttcctcaaagacgcgttgcgggccttgtctaatgctaggctgtgacttggcctcttaacatctattttctcac

SEQ ID NO: 8475 - DNA, 405 bp, Homo sapiens
  chr11:129243895-129244300
  hyper
gacagagtgaggctcggtctcaaaaaaaaaagaaaaaatctattttctctaacagcctaatgattagtcctctgggcgtgtccctccctcctagtttaatcaccggcccaggcgccctcatttacttgcttccgcggccaccagggccccctgggcaagcagctccgcagagagcccgccggcactcgcggacgcttctaggctgggagcggggaggaaatgtcaccggccccaaactcggccctagggaaggccatccgcgtctatacttctcagtgtccctgtcgtgcgttttccttccaaccccatgcacactcattccaacataaagtcgtggaaacgggcgtgcactgggctgttcccgccgaacaccgggcgcgactcaggctgccggaggcttcccgg

SEQ ID NO: 8476 - DNA, 126 bp, Homo sapiens
  chr11:129244440-129244566
  hyper
cgactctctaacccggtcgtatcgcgagggatccggatattgaaagcccctttgccggaagactcgggcgctgggagaagcccgcatgggacaggctgccccagtgcccgccggctccctagaatc

SEQ ID NO: 8477 - DNA, 140 bp, Homo sapiens
  chr11:129765636-129765776
  hyper
gttccagcctgcttgcgcgtctcacctgatttaggagcttccagaggccccagacagtgcctgtctttgcctgaccgcgaatcaaagttccatagcccgtgagcgaaggcacgtctattagctgacgtttgcagagagca

SEQ ID NO: 8478 - DNA, 30 bp, Homo sapiens
  chr11:129873363-129873393
  hyper
gagcggccgggcgccgcctatcaccctgac

SEQ ID NO: 8479 - DNA, 172 bp, Homo sapiens
  chr11:130029946-130030118
  hyper
cggcacgaggtgagcgcgggccggggacccggggcgctgggaagctcctgcccgcccgaccctgcagcgcggcgctgggctcggccggctcccctggcgtgtccgtcggtggccgagctctgggcgcacaggtggaatttcctgttcagcgggtgccgggccgcgggcgggc

SEQ ID NO: 8480 - DNA, 31 bp, Homo sapiens
  chr11:130064639-130064670
  hyper
ctatggggcgtgtgaacgtgtgtgtgtgtga

SEQ ID NO: 8481 - DNA, 42 bp, Homo sapiens
  chr11:130066273-130066315
  hyper
tctacctgctggagcccggcgtgcctgcgggcacctgcccca

SEQ ID NO: 8482 - DNA, 970 bp, Homo sapiens
  chr11:130297498-130298468
  hyper
tcggccaccagcagcgtctccacgaagcgcgcctcagacacaaaccgcttggtcctactcgtggcccccaggggcggtggcggctcgctagcgccttctgcctcctcttcttggctctcctcctcgctgtcctcctggtggtctcctctctcctgcctctgaccctctcccgtctccacctcccactcgggtcctcgcgggagggggcgggctccggcgggaccccagcgctgcaggcggtgcggctgagccagggagccccccgcgccctgcggctggatggtgaactcctcgccgtccagcaggaaggagccgctcagcccgcggcacaggctgaccgccgccagcgactcgggctccccattcacggtgccggagaagaagcagccgcgcagcccccgctcgcccccggtcgcccggccggagcccccgaggcgctcgatcttgaactcgggcgctaggaagctgtcgtcgggcgccaggcgcagcacgaagcccttgccgaaggcggacaggtggagcgcgagctcgcccgcgctgccgggcaaccgcgtgggcaccaccagctccgaggcctgccccccggctgcgggccgggccggggcgccgcgggccagcggcagcagcagcagcagcagcagcaggagcggaggccaccggggggcggcgggggcggggagcatgggggctgcggcggtggctgcgcgcaggagagggaagaagcccgccaggcgcgggcaggtgctggcggcccgagcgcggcccggccgctctctccaggaaaagcggaatcaatcgggtgcaaggccgactcggcccgcggggcccggcggcgggagcgctcccccggcggcccctctggctggcgcagcccgctcctcccgcgccgccgcccccgagccgagcgcgagcagctggccccggcccgcgtgcgcccgtcctccgcccctgcccgcgccagccccgcgca

SEQ ID NO: 8483 - DNA, 189 bp, Homo sapiens
  chr11:130318691-130318880
  hyper
gggtgcacgctcgccgccctgggaggagtctccctcccttggctctcctttctgggaactgccggctgtcccgtagcgttggcggttccagagtgcgggctgcacggagaccgcggcagcggccggagagcccggcccagccccttcccacagcgcggcggtgcgctgcccggcgccatgcttctgctg

SEQ ID NO: 8484 - DNA, 138 bp, Homo sapiens
  chr11:130319511-130319649
  hyper
ctatcccgcggtacgtggagacgctggtggtcgcggacgagtcaatggtcaagttccacggcgcggacctggaacattatctgctgacgctgctggcaacggcggcgcgactctaccgccatcccagcatcctcaacc

SEQ ID NO: 8485 - DNA, 178 bp, Homo sapiens
  chr11:130786365-130786543
  hyper
gcgacagcttccgggtcgacgtcgacgggagcgaggcatgctgggagagcgtccgcgcgcgccccgaggagcggcgctgcccggcgccctctgctggcgaggagccgccctgacggccctgcgcgaggtagtctctgagcctgagcgtgagcctgagcgcgcacggggcgcgtgctcg

SEQ ID NO: 8486 - DNA, 30 bp, Homo sapiens
  chr11:131056922-131056952
  hyper
taggggttgcccacgcggtcgtggcaggct

SEQ ID NO: 8487 - DNA, 142 bp, Homo sapiens
  chr11:131564787-131564929
  hyper
ctgcccttgggactcgctcagcgccctcgcagccggaatggggcctgggaagggaggagccccagcagaggggcagtcggagagccatgaaattgcgacctgctgccaccagagggcagtgttggacgggctgggaggagcg

SEQ ID NO: 8488 - DNA, 30 bp, Homo sapiens
  chr11:131780931-131780961
  hyper
gagggactgcagaccgcctctgggtagctg

SEQ ID NO: 8489 - DNA, 126 bp, Homo sapiens
  chr11:132934113-132934239
  hyper
agcgcaacccagcgcggttcccagacgctgccgggtaactgatgccgccggcacagcttctgttctcacttgtggagctttgtctcccctcgctgggcagcccctggtaccgcaacccgcctggcc

SEQ ID NO: 8490 - DNA, 310 bp, Homo sapiens
  chr11:132952690-132953000
  hyper
tcctcgcggcccgggcggggcccaccaacccggagaggtcgccagcctgcagggtgccgggggcccctccgagccgacctcgtcccaggcagacgcgctgcccggagaccgccgcaagggggcgccaggggccggggcggacgtcgcgccagtgcctcgccgggaccgcacctcgtccgcgcggccgccagagggcgcccgtcagcgccggagcccgcggcggacgccccagccgagcccagccactgcctggtggagccacagggcacccgcccggaaacaccgcctgcgccccgacggcacccgtgtg

SEQ ID NO: 8491 - DNA, 95 bp, Homo sapiens
  chr11:132953232-132953327
  hyper
cgcatgcgtgtgtgctcccactgccccagcctgagtcccggatactggtgcccctgtctcgggtcgctggctgcggagagggctggcctgaggga

SEQ ID NO: 8492 - DNA, 30 bp, Homo sapiens
  chr11:133402231-133402261
  hyper
gtgctctcagctgccgggcttgctactgct

SEQ ID NO: 8493 - DNA, 1320 bp, Homo sapiens
  chr11:133825338-133826658
  hyper
gcccccctgcacagacgagtgacgaggggaccccgtgagaggcgcctccagcccacccggcgccccatgccgctgggagagggttctctgtcggcgagtcctgcctgctgactcccacccacagcgggttctctcccgccgccatctcctccggcttggtgaacttgcccgcagccgggtcgtgtctgcgcgctgacagccctgagctcacagtcctggcaccctccaggctccgctcccacttccatacaagggccgagagccgggggtgccacccagaggcttgtaggtcgctctgcccatctccaaagcaaaagcccgcgcgctcacgcacgcatcacccaactcggtggctccccccttgcgtctcccccagctcagacccaggaaagcggaaagagaaaatcccccctccgctcggattcacagcgtggggacccccccttccccgcccctcccctcccccgccgccgcccccagccagctctgcctcgcagcctggggagggcggcgtggggcccgcgcggctgcggcgcgctcccggggaacttttgcctggccggggcccaggtgcggctgagaggcgcgggggccggcggggtccagccaaaagcggacacacctcgaagctggcctcatcaatcctcctctcaccgggcgcccctgctagggggatccgacctccagctgccaagatgtgtgggcaggaggggcgcgagcggagcgatggacgcccgcagggccgcgcgaacccggggccttagacgcgggtgccgccagtcccagggatcctccgggtcgcgcctccctgcaggcgctcctcgcggcgcggggctctagcgtgctgcagcctgcccggagaccgcaaactcccgcagccagagtttcccgcagctctgggaggcggccgccgggcaggaggcgacgggctaggcgcgccggtgtgcaccgtggggcccgtggtgggcgaagtcgacccaggttccactgcgtcctttccccgagtgcccggcagcccgtgggctctggccccttcccgcccgcccctccagcccacggcccccaggccctccccggcaatgctcccgggccgcctggcccgcgtcggagcccaagcctcacccgcgggaaggcgcgccggggagctggggaaccggggggccaaggagccgggaaaccgaggggccgggcgcgaggggccgagggcgccgggaggggcaggggagggacgccgcacttcaactcaccttcagccgcaagccctcgggtgccgatcacacttgctatgaaagtggccacataccaaatcatagtactacc

SEQ ID NO: 8494 - DNA, 651 bp, Homo sapiens
  chr11:133826702-133827353
  hyper
cgcacgcgcctcgcgcccgagcgcccgcctcgcgcccgcctcgcgccgcctacgccccgcgccggtgctcctgcagcccgggtggccagctctccatccctcctaggctccgctcggctcggcgcgcgcctccccggccccggcgcagcggcacctgcactactcgcccgggcggagcgcagccaggtccacggtgaagcctagccgggccgggcctccggaaccgcccccgccgcccgcctattgggcgccgcccgcaagccgggggtccgattggctcagccttccgcccgtcgcggcgcgaaggaggcgagcccatttcaaggtgcgttgaagtgtggcgagcacagagccgcagaatcatgcgcattgccggggagaaggtggtatagcgtctctgcccgcttctctctcggctcacactgcgtggcaagtttctggtgagggaaatggtagcttctaacgggaccctggcgggtctcaattaccccggacaggtctgagggaagtggagcccccgcccactcatggaacccaacatccggtttccatccggcaaaaagcagttcccgagaggaccatgctgattctatgatggggaaacccaggagccggcggcccgggagagccggggaacgtccttcgccggag

SEQ ID NO: 8495 - DNA, 279 bp, Homo sapiens
  chr11:133920425-133920704
  hyper
aaaaaatactgggatgctatacacaaaattgccttgaaaacttgagcacggaacaccaaacagctaagcgtgccggtttggggagggcgggggaggaataaggagctgcaacggtaagaggccgccacacggtggcgcagtgaggctgggaaacggtgcaccccgcgcaggagggggcactccccgtcgcggccacccggggtgggcaggaggcggcgcgggctggctggtctctcccgagaaggttctctcccgagaagggtgcgtctcagggcttgt

SEQ ID NO: 8496 - DNA, 768 bp, Homo sapiens
  chr11:133938773-133939541
  hyper
gagaacccatgtgccggtccagagcatcgctgcatccgtaagcagctagacctcagcttcctctgtcaccatggtgccggctcggctgggcccggcggtcgccatggtaactggggcgggtcgcagggtcctggcaggctgggcgcatgcgcgcggggactacaagccgcgccgcgctgccgctggcccctcagcaaccctcgacatggcgctgaggcggccaccgcgactccggctctgcgctcggctgcctgacttcttcctgctgctgcttttcaggggtgagtttgcgcgtttccgctgttgggagactagggtctgggggcgacggaagcagagcgggccgaagctgctggagccggtccgggcgaggatagcggtcctggctccgagggctcccggggtcccgggccggaggggcggcgcgcgcccgcgtccccgcagccagggctgggactcgggcctggctagggcgggggccctgggacgcccggcagttggaccggggcggggagctaatttgggatggggggcccgtcccaggcagtgagtcggtcccggacagccgtcggaccccgggggcgggctcttctcgggcggggtcctgtgctgggcggtgggctcatcccccgggtgggctcctcccaggcggggtcctgtgctgggcggtgggctcatcccccgggtgggctcctcccaggcggggtcctgtgctgggcggtgggctcgtccccggggtggacccctcccgggcggtgggcacggccc

SEQ ID NO: 8497 - DNA, 30 bp, Homo sapiens
  chr11:134094636-134094666
  hyper
ccccacccggcaggcgcaggccacccacac

SEQ ID NO: 8498 - DNA, 958 bp, Homo sapiens
  chr11:134145468-134146426
  hyper
cataggctgtgttctttgcaacggaagaagcaaagacttcaaagggagaaatcggaagatttcttttttcatcgtagggacttcacatcagcgtttccaaaaccgagtccatcgccttttccctctgcgcagcctctatcccttcctgtgtttcgcatctcaataaacgtccccgccaagtgacttcagcctgaaacatgcggcctcccggactcctctctgtgtcaccgacctcttgcgctcagttctccggagctgccggtttaacctcgcaagtcttcccggaacccgtgccctcctcctgggcagcgttaccaccacgagcgcctacctgagaggacgcctgttctcatccagcctccaccctgcagccgagcaatctccgtaaaacgaacacctggcttagtttctgctggaaaccgttgaatagtccccactgtcttctggaagggtctgggcagctcggcgtggcgtccacggccccaccaggcctctgcctcctgcaggtcccgctacttcgtcaccaaagcgcccgccgcgctcgcatctgctgtgaggctgtgctcgggccgctcccgccgagggaacggccctcccaaggctctgcgccccaattctcgctcgtttgccaagaggtagccgtgtcggggagctagagttctccggggactctctcctgcccctcgtggccctctgtggaaccctcgttttaggatctgcacgccgtttccagtcgcgcgcgcggcacggagaccgcccgctgtgccccgcgctgcgctctctccgcccctctcccgcgcaggcctccctgtgccagccggctgtcgacccaggttaggaagcccgaggtcggggcgttaccccaagggccctcccgcttcccctccgagggcagagaggcgtccgcgcccggacgcactgcgggaacacctggagcgccggcggagctcggctgtcc

SEQ ID NO: 8499 - DNA, 155 bp, Homo sapiens
  chr11:134146444-134146599
  hyper
cgcgcatccttgggacccggacccggcgcccgcgcctcgggacggatttctgcctcggctgcaggcgcagcgcgcagacctgagcctgccccgcggaaccggggctcgagtcccggcccgagcgcggcgtcggggccagcggagaggggcggaag

SEQ ID NO: 8500 - DNA, 81 bp, Homo sapiens
  chr11:134146621-134146702
  hyper
cggcctggccgcgatgaagtccccgcccctcctcaggtgacggatcgccgctgccgtcccgggctgcccaccaccccggcg

SEQ ID NO: 8501 - DNA, 115 bp, Homo sapiens
  chr11:134201475-134201590
  hyper
tagcgctgcgaggggcgactttacctcggcgtttgacaggtacgcagcattcccgcacccgcctgcgcctcgcgagcagaaagacggcggactctgcaccgctccacgacactgg

SEQ ID NO: 8502 - DNA, 518 bp, Homo sapiens
  chr11:134201850-134202368
  hyper
cccaggcgaccagtgcgcggctccgccccccgcggcgaggctcccgcgcgcggctgagtgcggactggagtgggaacccgggtccccgcgcttagagaacacgcgatgaccacgtggagcctccggcggaggccggcccgcacgctgggactcctgctgctggtcgtcttgggcttcctggtgctccgcaggtgagagagagcttcgcgcagcacctgccggaccccacattccccagccctccgcacctcgggttctctcctcccgcgacccgcgaatcccgagttcccggggggagcagccccagctgcttctttctgggagctccccaatacccccgagttcccctgcggctgcaggcactctactcctgccgcgcgatccaggcctctgggcgacacccggcgtgccctcgggagccggcgtctgtgccccgagccgcccaccccgccgcgcctgtgacgccgggctctgccccccgtggacgcccgcagccctccagccgtcagagccctctc

SEQ ID NO: 8503 - DNA, 30 bp, Homo sapiens
  chr11:134281376-134281406
  hyper
gggccgggaactgacgactgagagcccggg

SEQ ID NO: 8504 - DNA, 31 bp, Homo sapiens
  chr11:134738700-134738731
  hyper
ctcagaaaggaaaagccgggagcataaacac

SEQ ID NO: 8505 - DNA, 43 bp, Homo sapiens
  chr12:568902-568945
  hyper
tcggtcacccagagtccgcatcatcactcgccccctcctcatc

SEQ ID NO: 8506 - DNA, 210 bp, Homo sapiens
  chr12:694939-695149
  hyper
aaaggaatagctcagacggagtttgtgattaattacgggaatgggtgccaagtgagagatacaaagggtggaagagcaggagcgcctccatccaggggcgtggaggaggctctgtggatctcagggccatctcagctggctccagacagacaagaagactccttcagtgttcttctggtaatcacagaagctctgcgctgggaaccagta

SEQ ID NO: 8507 - DNA, 62 bp, Homo sapiens
  chr12:1059284-1059346
  hyper
tcccagattccgcccgggccgaggcagcggtggacctggtggttctcgcggcctctcaccac

SEQ ID NO: 8508 - DNA, 31 bp, Homo sapiens
  chr12:1639826-1639857
  hyper
catcggggggggggcccgagacgcctcggcg

SEQ ID NO: 8509 - DNA, 373 bp, Homo sapiens
  chr12:1640390-1640763
  hyper
gcggcctctgagcttcgcgctcactctcccgggtctggtcgggcccagccccgaccctccgccgaggtctgcgccggcatcgaggaccccatctgggttactttacccgccggacgcgggtgggagcctgcgtttctgcccggaccgcgcaggtagagcccgagcgccgctcggctttgtgcttctccggtcgctccggcgctccacgtccccgccgtgggagaggcgggacgagacctcctccttcactttcttggagcctcggtggacgcgtagcccgcgctccagtcggagccgaacccccgggtatttgctgcagaccgctgggagaggcagttcggtttgcggggagcctgcccggccctgttttaca

SEQ ID NO: 8510 - DNA, 31 bp, Homo sapiens
  chr12:1714947-1714978
  hyper
tgtcagcactgagggccgaagtgggcgtgga

SEQ ID NO: 8511 - DNA, 30 bp, Homo sapiens
  chr12:1799955-1799985
  hyper
aggagttgtgtgagcgcctaaggagcgcac

SEQ ID NO: 8512 - DNA, 795 bp, Homo sapiens
  chr12:1905620-1906415
  hyper
gcccacggtcataagcgggggagcgcagagccagttttcaattcaggagtgtctactctgaagccctcgcttcactccggagcccgctggctctatcctcgcaccgagcctttgcgacaagtgcacagggaacgctaaccccagccctcaacgctgcacagaacccggggtgaaacccgcgcagcacgacgcgcagggagtgggggagaagggagccccgatgccagcgccgcaggtgccgcactgttaaatggtgtgccacgggcccgggggtctagggaccgcctggcgagcggcacgtctggctgaggcgaccctcgaggaggccgccgcattcccagcgtgggggtcctcccgggcttgggtgcggggggtcagcaggagagacccttccgcgcggcctccctgcctccccggggccagggcgggttataactagcggcttccacacagcaggaagcctgacagaggctgcccgcggggctcccagcgacccgaggacatcgcacacttccggccttctcttctcacactccctctgccttccaagttctccccacgcagctcaggcgcgggcactggcaccgccctgggcaccgcctgagcagggctgggggagacccgccgaagggcccactcgcccagagacgccgtggggtcacggctgcggcctcggcggggtgggctcgacacacagggtcaggcctcgggaccacctctccccatcccggctgtcccggtccccagccgtcctgcccgcctcagaccgtccgcctcctgcgtgtctcctccact

SEQ ID NO: 8513 - DNA, 241 bp, Homo sapiens
  chr12:2144134-2144375
  hyper
aggaggtctgggcactggaagcggcacacgtggaaacggtaaaggccgacgccggttcagagccgcaaccgcgacagccccgtcgtccacctcaggtgccggcgccccctgctggtgcgcggagatgcgcggagaccgcaaggcccgggggcgtggcctcccctgcgccggcgcgtgtgcccgggccctccgcggggcgccggcgtctgcgccaaggcacgttctcctgctgctccagaac

SEQ ID NO: 8514 - DNA, 30 bp, Homo sapiens
  chr12:2161625-2161655
  hyper
cctccttggaattccgctcacagaggcctt

SEQ ID NO: 8515 - DNA, 97 bp, Homo sapiens
  chr12:2161956-2162053
  hyper
cgggctccagtccgccgccgtgcgccccgcgccgtgcgcccggctccctgcgcgccgccgcagccacatctggaagcgttcagcgcgtctgcctccg

SEQ ID NO: 8516 - DNA, 1199 bp, Homo sapiens
  chr12:2162067-2163266
  hyper
cgggcgggcggcgcgggcaggggcgggcgcgggcgcggcggggctgggccggggggagtgagcgcggcgctctcgcgcgcccggtgtctccctctcgctgcctctgcagaaacagctcctgccagagcggcgctcggcgcggcgcggcgggcccggagcggcggcggcggctcttcctgcctccgcgcccaggagttgccggctccctttgacagcagagagccgggcaggggcctcaggaggactcgctgggagtgggcagaggcgcctcggcccctgccggcccaggcgggccccgcgcgccccccgcccctcctctccgcctcttctcgccctgcctctcccgatttattttttcaaatggtgtagccgccggaggtgcggtgctcagttcttggaaggggcccggatgtactgaggatgcgttacagtttcactcgaggaggcagtagtggaaaggagcagtttttggggtttgatgccataatgggaatcaggtaatcgtcggcggggaagaagaaacgctgcagaccacggcttcctcgaatcttgcgcgaaagccgccggcctcggaggagggattaatccagacccgccggggggtgttttcacatttcttcctcttcgtggctgctcctcctattaaaaccatttttggtccatggtcaatgagaatacgaggatgtacattccagaggaaaaccaccaaggtaaggctggaccccgccgcctcgccggggctccctgccttttccaccgggttcctgccctacccgcgctccccgcggccccggggccggtccctgcggagtggcccggggccgcgtccgcgaggggcgcctccgcctcgtcggagcgcccgggagcccggcgggaccggggcccgaaccgccgcgcgagacggagcggaaaattcccgcccctccccctccgggccccagcttctccagagcatgtgtttcctgtgaaattccaggcgaggggggaaaagttccccaagtggctgccgccgcctcgctttctcgcgtccgcctggagagcccggctgcctggccagccgcgcggggggcagagggcgccggcgccgcggagcccagaggcccggggtccctcgcccggctcggggcgcggctgggagcgcgcgcgcgcgcaccctgcgccggcagagcccggcgcccacggccgcccctggggcgccc

SEQ ID NO: 8517 - DNA, 204 bp, Homo sapiens
  chr12:2163279-2163483
  hyper
cgtccactctcgtccaggcgcccctgccctgggcggcgcgctccaggtggcgggtgggggcggcggtgcagatgtgaagcccagcgcgcccctctggttccccctctgtaggtccccttcttcctctctccctccctcctccgccgctcacctacacccacccacctctccactgctgttgaccccgagcgcgcccacgccgcg

SEQ ID NO: 8518 - DNA, 228 bp, Homo sapiens
  chr12:2692286-2692514
  hyper
ggttcaccttcctgaaccctccgggcccgcagcggcgccgcgctccgggcgggctgtcgccgtaatctgggtgagcggcgccccctggcgttgcggcgtgtgcggccactcacaccgcctgcgatagggacgcgcgggagcgggccggctgccctggggccgcggcgtctgctcagaggcgggacgctccgggagggaggatgagccgttgtccttcaagtgaccttc

SEQ ID NO: 8519 - DNA, 156 bp, Homo sapiens
  chr12:2800288-2800444
  hyper
cgggctgtgtgcgcgcgcggggtcgaccgagtgaggaggagctccaggacagcagggtctacgtcagcagcctgtagtgggcgctgccagatgcgggcttttttttatttgtttcaatgttcctaatgggttcgtttcagaagtgcctcactgttc

SEQ ID NO: 8520 - DNA, 237 bp, Homo sapiens
  chr12:2800603-2800840
  hyper
gcctgccctctcccagctcgcaggccccgggcccggccgcgcctccgcggggagagcaccccggcttcccgcgcgccctcaccaaaaggaccctacagcaaacgggtgtctttcgactctgcttgtagaaaccatttgcacatattctgtacgagcctcgctgtctccctagagccagggccctgcggatttggagaagggagcggggcaggacttccaggaggaccccaacccggc

SEQ ID NO: 8521 - DNA, 154 bp, Homo sapiens
  chr12:2801019-2801173
  hyper
gccggctccgcccaaccaggtggtgctgagcttccgctgagcgctcttttgttttgtggtttgacacttttcttgacagcatgttgcagtttcttttcggttttggttttttttaaatgttttattttgctttcccagcgggaggggaggaaga

SEQ ID NO: 8522 - DNA, 170 bp, Homo sapiens
  chr12:3067871-3068041
  hyper
cacatggacttcaaaccgagtgccctttctcccatgtggtttactcgtagtggcggttttacagatgcccaaggggcaggagagaaaaacggaaagagctaaagccggggagggcaagcgagggggcactggcagcggatctgggaatggagcccgcgagttcctgcttc

SEQ ID NO: 8523 - DNA, 426 bp, Homo sapiens
  chr12:3068911-3069337
  hyper
caggaatagggatccccgtgttttcccgtcagtcccattctgggaaaactcctccctccgcgcgctccgctccgctccgctgggcgcaccggggccggtcggcgcggggtgggcttggccccgcggccccgccttcactgcgccgcccgtcggccccggccggagcccggctctgcgcgctgacgccctgtcgtccccgcagaacgatcgccgcggccggaagagttggcgctcggggcggactccttggaactggcttagcgcacccatcccaccttcccgcaccctgggaccggtaaggctggggcgcggggacttggtaggactttgccggagggcaggagtctgcgcggtgcgtgcggagctccctcccgggacgagactgggaagagcgaggcacgtggaggcggcgcgactgaggctgct

SEQ ID NO: 8524 - DNA, 45 bp, Homo sapiens
  chr12:3129560-3129605
  hyper
agagtgctgagtggcccgagttgtaccaggcgagcccctccccac

SEQ ID NO: 8525 - DNA, 240 bp, Homo sapiens
  chr12:3186500-3186740
  hyper
ccccgccccgcaggctcgccattcccgggcaggccccgccccctgtttccgctggcggcggcggcggcggcggtgccggagcgcgagcagagcggagacccccaggtcctgcgggcgcggtgagtgcggcccgggcggcgggcggcgaggcgggtctcgagagcgtgcggagtcgcgcggccttgagccggcgccgggcgggctgggcacccccaggccgagacccgagaagggggagcg

SEQ ID NO: 8526 - DNA, 30 bp, Homo sapiens
  chr12:3187000-3187030
  hyper
ggccagggggccttcgggcagggctgggat

SEQ ID NO: 8527 - DNA, 31 bp, Homo sapiens
  chr12:3474950-3474981
  hyper
agaaggcggactcaggcgtgtggttaaggac

SEQ ID NO: 8528 - DNA, 39 bp, Homo sapiens
  chr12:3475439-3475478
  hyper
gggaaccccgcacgcgggcgggccgcctctttgttagca

SEQ ID NO: 8529 - DNA, 74 bp, Homo sapiens
  chr12:3600258-3600332
  hyper
gcgctgggggccctcggtctgcgcccagccgccgccggctccagcgaacctcctaccccgcccccactcacccg

SEQ ID NO: 8530 - DNA, 30 bp, Homo sapiens
  chr12:3600651-3600681
  hyper
actgtgccggccgacgctccagctgagggg

SEQ ID NO: 8531 - DNA, 30 bp, Homo sapiens
  chr12:3601291-3601321
  hyper
tgcagtgccttgaccgtctcctgccgctgc

SEQ ID NO: 8532 - DNA, 30 bp, Homo sapiens
  chr12:3601895-3601925
  hyper
accttcctggagaaacggtgcgccgagatg

SEQ ID NO: 8533 - DNA, 535 bp, Homo sapiens
  chr12:3602181-3602716
  hyper
aaaacccctaccccacggcgtaggcagcaaagctttataaatcccccttctctgagagactagaagcagcatgcatctgacaattgtcaatttcaaaacaaacacgctccgggacttgaacgcagcggggcattcagtagcgaatgctgtctccttgagttagggcaaagcctgcgtgcccgccgtcccctcaccacttcctcttccccagcccccacctgagagcagacattcggaatgatgtgtagtgcgaggcggctagcctcccagcagaaagccatccttaccattcccctcaccctccgccctctgatcgcccacccgccgaaagggtttctaaaaatagcccagggcttcaaggccgcgcttctgtgaagtgtggagcgagcgggcacgtagcggtctctgccaggtggctggagccctggaagcgagaaggcgcttcctccctgcatttccacctcaccccacccccggctcatttttctaagaaaaagtttttgcggttccctttgcctcctacccccgctgccgc

SEQ ID NO: 8534 - DNA, 88 bp, Homo sapiens
  chr12:3602864-3602952
  hyper
cgctcccccttctcagcagttgcacatgccagctctgctgaaggcatcaatgaaaacagcagtaggggcggccgggctcctgcgaaca

SEQ ID NO: 8535 - DNA, 321 bp, Homo sapiens
  chr12:4140413-4140734
  hyper
agcctcccgcccgcccgccgcgcccccgcccggggccgggaaacgagcagggacaactccccgcccgcgcctccccgcgcccggcggcccggctagcaacccagaggcgcggcgctgcgattggctgcgcgggggagaaggggcgctgcgctgctccaatcgccggccgcgcccggaggccgcgccgccaggaggccgcggacgcgtgctcgcatgcctgtggtatttgctcagaggggcatgaccacttcgggcaagcctttaaatgtgagtcagctttcggccgatccctgggaaaaattccttcggtgttgtcaggca

SEQ ID NO: 8536 - DNA, 81 bp, Homo sapiens
  chr12:4273804-4273885
  hyper
actcttcctgcctctcggctccggggtctcctcgcttccccgcagtccccgccccccagttcccaaagcggcacccgggcc

SEQ ID NO: 8537 - DNA, 418 bp, Homo sapiens
  chr12:4274001-4274419
  hyper
cgtccgccccggggagagctggaaggtgggcccggatctcccacatcactatgagctcattccagccccggccaagcaaagcctggccctactcgctccacatgcatttcagtctcctctcgcctttcatgcgcggaggagccgggagggagaggatgtgacctcatctgcgcggcatctgagcccaggggtgccccagctcttccacccaggccgctccccgagcccagctccccgcgcccctctctctatccaggagagacgcattggacagccaggagggctcgacgtggaaggaaaggaagctgcaattctgggacaggggcagacgggagaggaagtgaacgtggctaaacgctcactttatgtaaaacgtcccccagactagaatctcgtccacagagctgcacacatacac

SEQ ID NO: 8538 - DNA, 1954 bp, Homo sapiens
  chr12:4377788-4379742
  hyper
aatttaggggaaatgaaggtgcgtgggctcactctgcagctgcagttttcagcccttgcagtttagaagattctgcatgagcacggatgccacgagggtatccagcgagtgggaagggagtcgccctacatgttttcacatcgatttgtaaaactgttttgaaagggtatttctagatccatttgttccaaatgcagcaaaattcatccgatatcgctcacaatgcatgcacgggttatcttacatgtaatagccatcgtattaaccaacccagctgatactgagatggtgaatggggcgggggagcagggaggaatatgtcgcgcatgaaaaactccgggtgtaaaagtcaatgcagaactcactccccgaggaaccgaaaaagacattcacgactctcaagtggagagaggatagaaagtcaagtggcgggggtcgcgaccagtgatcgggatttcagtctgatctcagtacccagcggaacaggaccataacctaaagaaatgagctttttccggagcaaagagcggccccgatttcaaagtagaaaaaataaactgcttgggggtggaagatggcgaggggcggggggcggggagggaggcgggtcgcggcgctggctccggggtccgcggcacggcctcctctgccgcgctgcccagggcccggaccctgcccggcgctgcgcccaccgcgagggtgccagacccgccgcgccgccgccgcgctctcccagccgcggccccctcccccgccgcttcctcttgctctcccagccccttcccccacgtgtggatgacgtcaaaattccgcgaaaaagccgcgtggtggctccccgagcggaggcgcgattccgccgcccagcggccccctcccgggggcgcctggagggggagaagggcggaggcggccggttccttctcctcccgggaggcaggaccccccgacgccgaccgccggacgccccccgccccaaagcttattggaaaattcacttttgtaaagcaaatgtatttccagagctattttcggccgcgtgaggcgtgtcctaagctgaatcagacaggaagagggggaagttcgggtcttttaattttttttttttccgaagggaggggagtgagatgctaggtgggtgacagacggcaggcgctcgccttcttaactcacgcctgtcgcatctgccgcctcagtaatccagccccgtccaagccgaaattcgccgaagggagtgcggatgcacaggcctggcggactctgcccccctccagaacgcagcggcccagcgccccggcgggcgcggctgcgaccagagggtcccggaagcgagtgaacacctgcaatcgcactgcccgtccccacccaccctgctcccccgtgctctccgcttcccgacgttttcctcttctccttgtccgcatttttctactttgcctgcactccctccttcctcttgatgtgcctcctatgtgtcccctcggatttatgtgtcccctcgcattttgccagtcgggttttcggttttgattgaccgtccatccctccacggagaaacacaaacacagctccactctttgggggagccgaggggaaggcagtggctcccatttctgagcctgaactcagtcactacccgctccccacctggcctaggcgcccctgcgcggagaaggcgggactcgaactcgcgctgctcccgggccttgagccgaccgcggaatcacctggctgggaggcatcctccaggtaagcttgggagtatgtgtgcttagtgctgcaggctcctgcagaaaagtgcctataaacacccaacaccctgctgcaccctccacctccaggctttgtacactttccaaccgaaactccaaaacgctagcgtagagggtggggagccggccggaaaaagaataaaagtccaataaaactggcgttcgctaaagtttatcaccagtcc

SEQ ID NO: 8539 - DNA, 136 bp, Homo sapiens
  chr12:4380094-4380230
  hyper
tcacgccccaccccacgtgtgagagtctgcaaaaccaccggggattggattcgatggcgagcttcacgctcgggaacagtcagtaatcggaaggggaagtggacaggggaacttcaagaggcgagcctgccacgcg

SEQ ID NO: 8540 - DNA, 31 bp, Homo sapiens
  chr12:4380524-4380555
  hyper
tctggatgcctttccccggagaagggggggt

SEQ ID NO: 8541 - DNA, 967 bp, Homo sapiens
  chr12:4381420-4382387
  hyper
acctctagtttattcgctcccctcctccgccttgcagggaacctagtgtacggctcacccagcccgcgccccaccccgccttgctggctctccgcgcccctgcccgggccccctctctcggtgagggaggcactcagtcggcctcggtgtgcccagagagctcgagccacgccatgcccgctgcacgtgccagcttggccagcacatcagggcgctggtctctccccttcctcctggagtgaaatacaccaaagggcgcggtgggggtggggggtgacgggaggaaggaggtgaagaaacgccaccagatcgtatctcctgtaaagacagccttgactcaagcatgcgttagagcacgtgtcagggccgaccgtgctggcggcgacttcaccgcagtcggctcccagggagaaagcctggcgagtgaggcgcgaaaccggaggggtcggcgaggatgcgggcgaaggaccgagcgtggaggcctcatgcctccggggaaaggaaggggtggtggtgtttgcgcagggggagcgagggggagccggacctaatccctcactcgccccctccccctcccgggccatttcctagaaagctgcatcggtgtggccacgctcagcgcagacacctcgggcggcttgtcagcagatgcaggggcgaggaagcgggtttttcctgcgtggccgctggccgcgggggaaccgctgggagccctgcccccggcctgcggcggccctagacgctgcaccgcgtcgccccacggcgcccgaagagcccccagaaacacgatggtttctgctcgaggatcacattctatccctccagagaagcaccccccttccttcctaatacccacctctccctccctcttcttcctctgcacacactctgcaggggggggcagaagggacgttgttctggtccctttaatcggggctttcgaaacagcttcgaagttatcaggaac

SEQ ID NO: 8542 - DNA, 1594 bp, Homo sapiens
  chr12:4382969-4384563
  hyper
aggggaggaccggtgcgagtgaggcagccccgaggctctgctcgcccaccacccaatcctcgcctcccttctgctccaccttctctctctgccctcacctctcccccgaaaaccccctatttagccaaaggaaggaggtcaggggaacgctctcccctccccttccaaaaaacaaaaacagaaaaacctttttccaggccggggaaagcaggagggagaggggccgccgggctggccatggagctgctgtgccacgaggtggacccggtccgcagggccgtgcgggaccgcaacctgctccgagacgaccgcgtcctgcagaacctgctcaccatcgaggagcgctaccttccgcagtgctcctacttcaagtgcgtgcagaaggacatccaaccctacatgcgcagaatggtggccacctggatgctggaggtaggtcggggggtggcgctcgccaggagccaggacccctccggatgctcgggtccccggccggagccctaaacctgggagagggcaatccccgcgccggcctcccggctcctgtgcgggagtttaccgcgcgccttctggcgagacgcgtggctttatttctgttcctctccagataaactggggaggcagaggggggaggaaaatctgggagaagcgaggctgtcctgggcgggggtaggggagcatcccgcgcgcgtgttcctgcatgtggctgcctcttcttcccacccccctcgcgacctgtcttttgcgaagccgccgcggctgcttgcgctgcggccaggaagagagtcggggcctgaaatcgggaccccgagtagaaaggcaaccccccccaaaaggccagagcaaattcgtcttggcctcaggtccccgcctgtggtcgcgactccgcgctggcacttcaccggggaggtggagggaggagggagaaggagagaaacggggaattcgggagccccggaagtcccattgaagaaacgcgtgtttcaggggaacccaaaagaaccgcttcttgcccctcactccaagtctttgcccagcgagccgtgtgcccacgtatgcacagctctggacctgccgtggtttcgccatgttgctttgcaaactccctttggaaaggctgggaaacgtcgcccgcttaccctcgcaccccattatcccggccaccccacttctaatcgtgccctctcccccaccccccacctcacgaagattacttacagtttggttttccagcttcctcggtgcggagatttgggtggggtaggaagggggggagggggtgtgtgtaggggggataccgggtcacccctgaaggagaggtgggagccccccgtgcctctttccagggctctctgctcccgtctttcccctcgctcgtcaccgcgttccctagtttctgtccttgtgggccgcagccggacactcccgccgcggcgctcaccccttcaagtttcctcccgggatccaaagccccaggggtcggaatacagacctttctggcacccgaaacctctgtttcgggaagcctggctcttctttggggttttcacgccaaaagggcttttctaggatatttcctcgatttttaattatt

SEQ ID NO: 8543 - DNA, 30 bp, Homo sapiens
  chr12:4429984-4430014
  hyper
cacagtctgttggtcgctgtacacccgtga

SEQ ID NO: 8544 - DNA, 30 bp, Homo sapiens
  chr12:4647830-4647860
  hyper
agacagggcaaatccgccgttgtgacgaaa

SEQ ID NO: 8545 - DNA, 125 bp, Homo sapiens
  chr12:4918557-4918682
  hyper
ggaggtgggtccccgcgctcgggcgccggggcagccccgggccctctgcgaggcctgcggcgcggctcctagggaggaggtggcggctgtggcggccggaaccgcgaccttggccggacccagcc

SEQ ID NO: 8546 - DNA, 175 bp, Homo sapiens
  chr12:4918713-4918888
  hyper
cgccaggagtctttgccgagccggagggaggcgcatctggcgcttcggtaccagcggcagccgggggtccggagcggctggaggagcgcagtgggaactgggaagagctagcccggctggagggcggacctctgcgtccgggagccgggtctcaggcaccgctgggggcgaagcc

SEQ ID NO: 8547 - DNA, 468 bp, Homo sapiens
  chr12:4920340-4920808
  hyper
gctcatcttcttcctcttcatcggggtcatcctcttctccagtgccgtctacttcgcagaggctgacgatgacgattcgctttttcccagcatcccggatgccttctggtgggcagtggttacaatgaccacggtaggttacggggacatgtaccccatgactgtggggggaaagatcgtgggctcgctgtgtgccatcgctggggtcctcaccattgccctgcctgtgcccgtcatcgtctccaacttcaactacttctaccaccgggagacggagcaggaggagcaaggccagtatacccacgtcacttgtgggcagcctgcgccggacctgagggcaactgacaacggacttggcaagcctgacttccccgaggctaaccgggaacggagacccagctaccttcctacaccacatcgggcctatgcagagaaaagaatgctcacggaggtctgacccatgcaggc

SEQ ID NO: 8548 - DNA, 1017 bp, Homo sapiens
  chr12:5018017-5019034
  hyper
gggtggtcccaaggccgcgggaggagccaatcagcggcgactctgggctcttgcagcctccttagagactccgcagccctggaggtaccaagctgcctgctgccttttctcgcgctgcaggcgcggagatgcagcgcctctgggggcgcagctccagccgcactcgcagggcaaggcacacgcccccggctcctgctgccatgcgcctctgcgggggaccctttccaaataaattgcaagctttgaaagtggccctgtggaggcactaggctggggaaaaaggctgcgggaggagggacatagggtgggaggtgagtaggcgacttgcttctcagattattcccaattagcaccaagttggcagacaaccccacaaacccacgaagccttcggtcccccacaagtcacattccctgtatttcagaataatcggatcgtaagaaaacttcaagtcccatcgtaggttaaagagggacaggctcttagtaccgccgccgcccagtaaaactacatggaacaaacccagggatcctcatctgcacagctctgcccaaagtctgcagctctgcgagtccagccggcgggggaagctgggtgggccccgcagagagcaagggccttcttgggggaggagcgggatggggcgcagagcagtgcgatcgaagagggttactgtgggactgcacaaaagcaaacccgtcggaggagttttgccagaaacaccaccgcctgcattgcgtcggacctgaccatttccaatgtgaaattcccggggaaggtcgcgagccgctaggggccgttcgtgggcggggcggcgggccacaggggaagtagagttagcggtcggcttttctggtaggagaggaaaaagctgtgctggcaagggtgggaactgaatgacaaccccgctctcttccaaaccaccccctcatattttccatccacctcctcgctcctgccctcccccgccctccccaacccacgcccgggtgggccaatcgctgctcggtattccag

SEQ ID NO: 8549 - DNA, 658 bp, Homo sapiens
  chr12:5019084-5019742
  hyper
cggacccgccgccgcacgcaccctgctccactccaagctcctaagggctcctggcgcgccgcgtagccttggcgaggtccgcgctggggtgcggagagcgaagggaactggagagccatgtagatccaggctctcgcccgcccgcctccttcgggatcgaatcaagggctcccatagtgttaggagggggcgagagtgctgtttatcgtcatttgcctcggagcttcgagagagggtggtattttgcttttccgccccgcatcctccggaactccctgcaccggagagaggacggcgtctccaggttgctggcaaccggtgagaatgggggtagggaaggaacattttcgccgtagctgctccgtaaagcgattgtccaactgagaggggcgtcggacgagtggaccagggcggcgagtttgcccggcgcgtctcggatgctgctgcggcggccgccgcggctcccgccagggcactgcaaagacgacctgccgcattcccactcgggctctccgctgactcagcaccgcccctgcgccaagccagccggccaggtagggggttccccagctcggggatgcagaagcgggggttggggggaccgggtgggggaggccgggggtgcggggatgctgtccgggaccctgagcttcccccg

SEQ ID NO: 8550 - DNA, 438 bp, Homo sapiens
  chr12:5019793-5020231
  hyper
cggctgttgggcattggggaaagtgggatggaagagccccaaacttggatttccgggtgtctgcgtgtcgtctgtccgtgtgtgtgtgatagccctagcaaacgtccagtgctttctcaagctagaggtctgtgttcttcggtgtctgtaggtccgtcccatctgaatgcttctgattttctacccccgtatcactttctatttctctgcagcgtgcatcgatcgccctggtgggagcttagaaggcggcaggcgaagaggggtaggaggggggagagccgaggagaagcagagagggtggcaggcgtggggatctgccgagccggcactgcaccgggtcctaggaaggctctcggaggggaggggaggccagggcgacccccgaagcaatggcccagtccgctagaacggcactgcgttaaggcacctgggatcagg

SEQ ID NO: 8551 - DNA, 55 bp, Homo sapiens
  chr12:5131853-5131908
  hyper
ttgacaggtaagatcccggacccatgggctcctgtatatccgtcagccaaatctg

SEQ ID NO: 8552 - DNA, 30 bp, Homo sapiens
  chr12:5153039-5153069
  hyper
cagccagagaggggcggctgaaggttgcat

SEQ ID NO: 8553 - DNA, 13 bp, Homo sapiens
  chr12:5153273-5153286
  hyper
ccggtcagctggg

SEQ ID NO: 8554 - DNA, 48 bp, Homo sapiens
  chr12:5540931-5540979
  hyper
aacatgtaacctgttacgatacatttaacgtttcgttttttcctggat

SEQ ID NO: 8555 - DNA, 658 bp, Homo sapiens
  chr12:5541082-5541740
  hyper
caggagaaatgaccccttccccgccacgggtcccgaagtgagggcggggggggggctctggggcgcgggcgcgcgcggcgcggcgcgggccggcgggggagggcggcgcggcgcggaaggggttaaggcgctgagcgcggagccatctggccgggttggctggttataaccgcgcagattctgttcacgggactcagagttgaagctcctctcccttccgaacagctccgcgcaccgccccgcgacgcagcccggcgcaactactttcttctctctcctttctttcttcctctcctttttcccctgctgggtagtggctgcggcggggtgggggagactttgaatgaccgagctcgcgtccacctttctcttcatgtcgacgtccctggaaacggccacacggatgccatggttacttttgccacggtaaggggaggcggcgggcaccttgggtgggcaggtttggggatgggggtccacgtggggagggattttccagtggactggtgcggggggccccagatccgcatcccgccccacccccatcgcgccgcgctcactcactttcccgggcttgtgtcttccccaaagtttgcgctgggatctgctcaggccgaagcgcaaccgcagccaccccgctacacacacacacacacac

SEQ ID NO: 8556 - DNA, 1091 bp, Homo sapiens
  chr12:5541940-5543031
  hyper
caaccacccaccactcccaaccgacccgcctgctcctccgagaaagctcctagcgcatcctataacaaaagggggtggcagacagaactccgggcggggaggtgccgcggcagctcccctgcacacgccctgcactctgccggccgctgagcctgattctcagctcgccccagcaccactctggcccgggcgtgggctggggggaggggacgcgcagctcaggacccggaacctcgcgttccagttttgggagttgggactcactgccacgcgccgcgtacctgcgttggagttccccgaaagggttttttcagaaaagacctcgcgccccgggctcctcttggccagcgcccacccggtggccaccccaccctgggcctttgcgcagatgttggagctccgtacgcagcccgcacatctgggacccctccggggagcggcgggcacccgggcccggccatcccaggggatctccttgcggtatcgtccagcctgttctcggactttgagcggtggcgtgggaggccgggagacctgggcacccgcgcagccagccaggtcggagtttaaaggtcccacgacggaccgaactgtcccattgccccagagctttactcagtggtggatgctcctgatgaaatttgggacgcttgggagttgaaggttagggacaggaggggcgagggccgagggcatgggatgggggagtaggattctgcttgttgctctccgcgggagtgggtgcgcgtccaggaggcgctgcttctttgcgggagtttggctgctgcgttcattcgtcgtctgcgcttcagatgcacggcactgagacccttgcgtccgacggtgtcggggctgtggactagaaaggatcccttttgctggaatcgaggctggggtgggattgccggtgggggaaacaccgaaaagatcgtctggcctcggcctctggcggcgggcggcaggttctgagtccgaatggaggttgctcccgggagcgccgggctcagagctagagagctcgggagactgtgcgcctgtggacttgtttatgtgtgtgaagaggcgggggcgagggcctgctgagaggggag

SEQ ID NO: 8557 - DNA, 31 bp, Homo sapiens
  chr12:6189830-6189861
  hyper
gaaaggcacagctgcccgctgagaggctgtt

SEQ ID NO: 8558 - DNA, 638 bp, Homo sapiens
  chr12:6309447-6310085
  hyper
cgggaggcgtggccggcggggggagtgggggcggcttttcccggcacatgcgcaccgcagcgggtcgcgcgccctaaggagtggcactttttaaaagtgcagccggagaccagcctacagccgcctgcatctgtatccagcgccaggtcccgccagtcccagctgcgcgcgccccccagtcccgcacccgttcggcccaggctaagttagccctcaccatgccggtcaaaggaggcaccaagtgcatcaaatacctgctgttcggatttaacttcatcttctgggtgagtgagcgcgactgccgcgcgctcctctcagggcccacctgttcgcgggccccggacactggccgcggccgcgagtgccggcagctggcactgcccgcaccgggcaggcaccgggcgggaagagagagcgccctgcggctgccagctggctccaaggccgggtccagagccgggcgggacggccgcgacgggcgcattcgggtgggggctcatcaccgcccagccggcgtggggagccgggccctcttgagatgaggcgtgcgggagggtcctgagcactttagctcgcctaggatttgagctggggtgtgtgtctgctcccagctcaagtccctccgagtgccagagagg

SEQ ID NO: 8559 - DNA, 185 bp, Homo sapiens
  chr12:6387949-6388134
  hyper
aggggcggagggggcgcggtaagcccacggagggctgactcatcctggcgccgccctgactcacccgcggccgccctggcagccccgtcctgccgcgccccctcgcggccacgcgcggaagcgcagccggggtgccccgccccgccccgtccgcgccctcctcggagcgccgagctggctttgag

SEQ ID NO: 8560 - DNA, 165 bp, Homo sapiens
  chr12:6419607-6419772
  hyper
tcgcgggggtctggcccggagtggagggcgcgcggtcccagccctcccgctcggccggcgggtgtcgagttcaggtgcgaccgaaaaggggaaaggagggcaccgccacgtgagctgtcctctccggggaaggcggtggctgcgtgagggcgggggctgctcggt

SEQ ID NO: 8561 - DNA, 404 bp, Homo sapiens
  chr12:6449619-6450023
  hyper
ggctggtggggagaccgtgggggaaggacagtgggaagaagggaagagcgggtgggactaaggaggcaggaggaggcagaagaagaagagtgagaccctgaccagagacgtgctgcctggggacctggggccgggaccagagcggagcagagaggaggggaaggaggattagcgagaaaagatttcaaaaaaagaggctctgagaagtctgaggagagtctggggagattgctggaagaaaggaatggtaggagaggaagagtataaggcactaaagagaggggaggtaggcgcagccttcagaggccgggcagggcagggaaaatctgcctgactagatgggcccaggacatctgaacaggatgattcccggaccaagacgtggaggacgatcaaggatacat

SEQ ID NO: 8562 - DNA, 30 bp, Homo sapiens
  chr12:6451115-6451145
  hyper
gggcatagagatcacggcctggtcccagtg

SEQ ID NO: 8563 - DNA, 494 bp, Homo sapiens
  chr12:6472499-6472993
  hyper
ggtgtcactgggctgcgcgggcgggtcaggaaaggagcggagcccatgggtgggcggggccaggggccggcgaggggcggggcgggcccctcggcgctgcgggcctcaccagctggaagccgatcttccagtccttccagtccacctgggggttgttgtcccgcaagctggaggccacgctacgggctcgacgggccccgtgaggcgggggcgggaccctcaggcgctgcaaggggtgcggcagagtcccccgcaggtcgcgacggctgcgggagccggccacgagagtggtgaaggagctgtatttgtacaggtcaaagagcgtctgctctgtgatgcggtccagctcctccagctcctctttaatttccgggtacctgaaggggcgaggggaagagggtcaggccaggggccctggagcgagtgtctggcccctccggggtcagggtcctcatctgtgccccgggaggccggtccatcccggagaagcctgg

SEQ ID NO: 8564 - DNA, 14 bp, Homo sapiens
  chr12:6473162-6473176
  hyper
gcccggacctagaa

SEQ ID NO: 8565 - DNA, 44 bp, Homo sapiens
  chr12:6493249-6493293
  hyper
tcttccctgggctgcgattgcgacaggccggcctggctcccagc

SEQ ID NO: 8566 - DNA, 31 bp, Homo sapiens
  chr12:6493330-6493361
  hyper
cccacttcctgagctccgccatgggagccct

SEQ ID NO: 8567 - DNA, 31 bp, Homo sapiens
  chr12:6532774-6532805
  hyper
acagtgctgcgataaacgtatcttcaaaata

SEQ ID NO: 8568 - DNA, 31 bp, Homo sapiens
  chr12:6560919-6560950
  hyper
aatccagtttcctggccgcctcctggctcag

SEQ ID NO: 8569 - DNA, 30 bp, Homo sapiens
  chr12:6579633-6579663
  hyper
tcgggagcttggggcgagagttgtcaagga

SEQ ID NO: 8570 - DNA, 103 bp, Homo sapiens
  chr12:6664242-6664345
  hyper
cttctgcattctctgcggattctagtctccctgcatccaattgcttccaagctcctcattacacagcacaaactttactctcattcttttcacccctgattct

SEQ ID NO: 8571 - DNA, 152 bp, Homo sapiens
  chr12:6664370-6664522
  hyper
cgttgtgagtggtatgacacagagagacctgtccccctttcccaatccctacctccgcttgtactcgtcccgctcccgcttcactttggccagcacgttgtagagagcgcggatctcgggcgtgatggtgtcgatctggacgcccaccccat

SEQ ID NO: 8572 - DNA, 30 bp, Homo sapiens
  chr12:6863000-6863030
  hyper
cctggaccctcccccgttacccatctgtga

SEQ ID NO: 8573 - DNA, 164 bp, Homo sapiens
  chr12:7261084-7261248
  hyper
ggggggagggcaaggtggggccgcgcagctatggccggaagcctgtgggtgtgggaggagcgggggagccgcgctaggactcagaggcctcgcgaggcagggctagaagctgtggcctcacccttgaggcccgggcacttcccgtctcctcccttgctcccctt

SEQ ID NO: 8574 - DNA, 226 bp, Homo sapiens
  chr12:8088726-8088952
  hyper
gcaagttttctccacgtcctcaggaaggatccaaagtcttaccattacagcatctctgggtctcgctgggatcatgactatttataatctccgcaaagggtggagcctgaaagggcgacaagcccccagccccaccccaccccaccccacccccctgaagcaatcttgtgatctctcggaattctgtgttatcagaactacccccgcccccgccccacagacaata

SEQ ID NO: 8575 - DNA, 522 bp, Homo sapiens
  chr12:8171288-8171810
  hyper
tgcacaaatctggccccaggccgccgccgccgcgcccggcagtgacagcgaccgcgccgctgcgctcccgccggccccgcccgcagccgctgggacccactaactgcctcgaaaagcctaggattcgactttgaatggtccgttaatgtggtcgcaaaacgtgactcggttcatcgggcgctccctgtaagcaagacaagcacccacctgcggtcagagcaggggtccggctcgcggtcggggttgtccaggccctcccggcttctcacctgcgcaccacacggtccagccctggcggctgcaggggatccctccgagcgccccctcaggcgtcttcctgcgaccggggagagggaaccctttacggggaaacagttttggggcccaccacccttggcgccgccgttaggagggtgtgaacatttctgctttaagagatacccgagcccctcaccgcctgcggcagggaggtggtgccccggctatcgccgcgggctggccggctgggctgggaagaaggct

SEQ ID NO: 8576 - DNA, 30 bp, Homo sapiens
  chr12:8185009-8185039
  hyper
actagggactctcccgacggggagcagtga

SEQ ID NO: 8577 - DNA, 30 bp, Homo sapiens
  chr12:8332866-8332896
  hyper
catggtcagggaggcgccatcgccctggct

SEQ ID NO: 8578 - DNA, 971 bp, Homo sapiens
  chr12:8850277-8851248
  hyper
ttttcgctccccgcgcgcgatccatcgcctctcttcccccgaggccagcgatggctcgggtgcgggcgaggagctgggagggcggctctcgacgcaggtgtcagatccgctcggcagtgctcggcgcgctggcccggcccccagctcctccggccgccgccccccgcccgccgcgccgcggcgccaggagggcggggccggggcgcgcgccgctcctcagcaagcgggcgggcggcgttcggtctgagggagcggggcggtctccgccggcgtcgcgcgcgctgtgtgtgagcggggtcgcgcgcgcgcgcggcaggcgagtgagggaacgaggagcggccgggtgtgagtgtgtgggagtgagagtgtgtgggagtggggtgagggagaagctgacgggacgcgaggctgtgagaaactgggcgagtgtgcgaggacgcccggccagcctgcgggagccgcagtcggcggaggagaaaggaggcggctcccggtatcccgaccccctccccctcctctccttcccccacttccagccgcccggcggcccgcgcttcctcgaaggccccagcccggctcagtcggccgagagcgagggaggagccccccgacccaggtgagcggtacgaccgctgttgccctcgggtgtagagcagtgaggcgaaggcgcgccctcccgagtgggcgagttcagcggaatggatcccccgattagcgggggctgggccggggaggggaccggcccgagcgcgcccggggtccggggctagttgaggccggtggtcgccgctccgcggagtcggtggggagcgaggcggggcccggccttcgcgcgtgtgccgggaggcgccggcccgtggcgtgtgcgtgcgaccgggcgagccgtgtcgagggggcggcgacttcgggcgtgtaaggagtatggtttccccgccggcgagggggtgtggtaaccccgggaacgccggctg

SEQ ID NO: 8579 - DNA, 30 bp, Homo sapiens
  chr12:9620959-9620989
  hyper
ttttttgaatatttttgctgcatatctaga

SEQ ID NO: 8580 - DNA, 491 bp, Homo sapiens
  chr12:10875432-10875923
  hyper
ccctggcctgactcaccgagaacttttttctccgcgtcttcgctgccggcggcggtggctaaagaggcggcggccgcggtgcccgtggctgcgggggccgcgtccccaccggggtttcctgcgacgtgggcggcgggcgccggggccgcggcctggggcgcaccgctgcccaccgggctcttgggcgcggggtcctggggagccgcggcggccgcctccgtcggagcctgcgggagggtggtggtggtggtggtggtggcctcgcccgcctcactcatgcctcctcctcctctgctctcgctcaggcgcctcggtggcggttggtcggcggttagcgcggctggtggtcgcggcggccggggctcgctctcggggaggccggggcggatctcgcggcgcaggcggcggcggccgaggtggggtcgcgcggcggaggcggctcgagcttcgtgctgcgcgctctctcttgggctcctcgctcgatcttactg

SEQ ID NO: 8581 - DNA, 30 bp, Homo sapiens
  chr12:11053581-11053611
  hyper
ccattcacctggctcagcagcctatcctcc

SEQ ID NO: 8582 - DNA, 31 bp, Homo sapiens
  chr12:11653356-11653387
  hyper
cccaccgccgcccaggcgcaggaagggctca

SEQ ID NO: 8583 - DNA, 45 bp, Homo sapiens
  chr12:11801642-11801687
  hyper
atcaaccggccaatgacggtttcagagaagcggtcctggggaggg

SEQ ID NO: 8584 - DNA, 308 bp, Homo sapiens
  chr12:11802786-11803094
  hyper
tgcgtcccgggtccccgcgccgcgccgcgacctgcagaccccgccgccgcgctcgggcccgtctcccacgcccccgccgccccgcgcgcccaactccgccggccgccccgccccgccccgcgcgctccagacccccggggcggctgccgggagagatgctggaagaaacttcttaaatgaccgcgtctggctggccgtggagcctttctgggttggggagaggaaaggaaagtggaaaaaacctgagaacttcctgatctctctcgctgtgagacatgtctgagactcctgctcagtgtagcattaag

SEQ ID NO: 8585 - DNA, 131 bp, Homo sapiens
  chr12:11905382-11905513
  hyper
gcaggaacgaatttcatatacacctccagagagcccagtgccgagttacgcttcctcgacgccacttcatgttccagtgcctcgagcgctcaggatggaggaagactcgatccgcctgcctgcgcacctgc

SEQ ID NO: 8586 - DNA, 166 bp, Homo sapiens
  chr12:11992072-11992238
  hyper
ggcttgcagccaatttactggagcagggatgacgtagcccagtggctcaagtgggctgaaaatgagttttctttaaggccaattgacagcaacacgtttgaaatgaatggcaaagctctcctgctgctgaccaaagaggactttcgctatcgatctcctcattcag

SEQ ID NO: 8587 - DNA, 383 bp, Homo sapiens
  chr12:12006112-12006495
  hyper
cctgtctcagaaaaaaagtatacgattttcataatcaaaaaagtttgatttacaacttcacatcgctctgaccttttgagtttcaagtgctgcattctgtgccccatgagcttggtgagggtaggaggtggcaggtgcgctccaattgtatctttggcaccgtgccaggcacttagctgctgctccgtagatcgttgttggaaaaacatctttccatttctcgatttccctttcctttttctttccaggtgatgtgctctatgaactccttcagcatattctgaagcagaggaaacctcggattcttttttcaccattcttccaccctggaaactctatacacacacagccggaggtcatactgcatcagaaccatgaagaag

SEQ ID NO: 8588 - DNA, 547 bp, Homo sapiens
  chr12:12022356-12022903
  hyper
gataactgtgtccagaggacccccaggccatccgtggataatgtgcaccataaccctcccaccattgaactgttgcaccgctccaggtcacctatcacgacaaatcaccggccttctcctgaccccgagcagcggcccctccggtcccccctggacaacatgatccgccgcctctccccggctgagagagctcagggacccaggccgcaccaggagaacaaccaccaggagtcctaccctctgtcagtgtctcccatggagaataatcactgcccagcgtcctccgagtcccacccgaagccatccagcccccggcaggagagcacacgcgtgatccagctgatgcccagccccatcatgcaccctctgatcctgaacccccggcactccgtggatttcaaacagtccaggctctccgaggacgggctgcatagggaagggaagcccatcaacctctctcatcgggaagacctggcttacatgaaccacatcatggtctctgtctccccgcctgaagagcacgccatgcccattgggagaatagcag

SEQ ID NO: 8589 - DNA, 148 bp, Homo sapiens
  chr12:12037377-12037525
  hyper
gactgtagactgctttgggattacgtctatcagttgctttctgacagccggtacgaaaacttcatccgatgggaggacaaagaatccaaaatattccggatagtggatcccaacggactggctcgactgtggggaaaccataaggtaa

SEQ ID NO: 8590 - DNA, 102 bp, Homo sapiens
  chr12:12038858-12038960
  hyper
gaacagaacaaacatgacctatgagaaaatgtccagagccctgcgccactactacaaactaaacattatcaggaaggagccaggacaaaggcttttgttcag

SEQ ID NO: 8591 - DNA, 2802 bp, Homo sapiens
  chr12:12043873-12046675
  hyper
ggtttatgaaaaccccagatgaaatcatgagtggccgaacagaccgtctggagcacctagagtcccaggagctggatgaacaaatataccaagaagatgaatgctgaaggaaccaacagtccacctcagcgggccagcagcccagggaacccctgcccaccaggattgctggaagtgtgacggagcaggcgggctgaggagagtggaaaaggaagcgacccagaaatggcagggacacttctcttgcagaccaagagggaccctggagcaccttagacaaactacccagcacaggcggggctggaattctggcggagggcatgagcctgggactccatgtcacgtttccttctgatttggaatctctccatctgtaattcctcaccctcacccttccaccgttgttagtatcatggtgtttttgtttttgtttttgttttaagaacctgcagtttgactcttcatcgttcatctaggggaagacatctgatgttgttttcctatggaaatatatatctattatatatatattttttgcaaatctcacaaagtgcggcaagcccagctggtcaggaaagagaatacttgcagaggggttcaggttcctctttttcctgccacgtggatcaggtctgttcctgttactgttgggtcttggctgaaaaaaaaaaatgcttttaaaaaagataaaatgaaaaggagagctctctttttctctctcttgctctgttcttcccttggtcccctctgtcctcccgccctgcctgcagttgagattcagatgccttctgacagagttcagcctcttggagagtcttggggattgttggcacctaaacagaatcagtgacccgggtgctttgtggccagcagcacagaatcaaacccgcatcccagcattgggccacccatctgagggaggccaaaatcatcacagatgctgctgtgctgcagacagatacatgctagtccagagagccgcccctgagatggctgtgagaaccatgtgtctaaggcgtaagataaggatggaaggctgtccaagttatttggaaggcctcggcagcttgggattagcttgggagcgcagcgctgcaaagtggaaaatatgaaaagaccacacaggcccagcagtccagaaactgggcaaaaatattctgcagtggggatttatttttccaaagcaggtaacagaggctagtgagaaagaaaagctcctctctgctccattccaaaggccatcttgtggtcagtttcatgccctcacctgatttttttttttttttttttttttcaattcctaaccttttttaaagtttcctggtctccactggacacagagctttggagacggaggatcccagagggcagtctcagttgcaatcagtgtgtgcccagcctgggcagacaggaaattcctcggatacattattttttctttctttcatagctgtgtctcagaaaggacccatttgtggctctttttcacctcaaaataagatcgatggtatcttgtaaaatgagggtagtgccacttcttagtatttttgaaagctgttttagattttttttttttttccttttctagccatctaaattgactcttccaatataggtctcagaaatccaatatttggagtacaatttcttttaatccagattacacctgccttacaaagcaccccctccttgttcccctctgtttcctctactcagttgggggagaaactcacagctcctccgggatacatatgtgccctcagcagcagctcccaggtgaagttaccagacccctgggcttctccccagctttttctgagttgagtcagacatgtagagtttgggtcacacaggcaagaggaattttccctcggccttactgacaaggacaccaacctagggtgcaaacagatggactatggttcaaggacactggaattgaggagctgatcaaggctctcttcagccttgctctgtccctgcctcttatcagagcacaggtagacacacgggcatagccagcccactcctactgtcacaggcgccccaccattcaaccttccgggaggtcagggaccttctatatgaggcgagtgggtctcagtctgcttgaatggtgatgagattctgctggatctcagcacgctgcaggtgtcttttgagagcattcagtaggacatggtgatccctatttcagcctctaagatgactggtattctatctgaaatgcagagattaagccaaatacctgatgtattgtgaaagccactgattttaagaatggagagaaagggattttttactgcatccctctgtatgaatatgaaatcagagaccagggcatgatgttgctaggattagagcctctcagtctggcctcttcacccaagtgcaagaactcagtctcttactgttcaaagaatcttaacagttgaattatggagggaaattcccttttgccccaagcatttctatatttaaagcaatatcccaggagaatatgttagacttaggatgataccttcagccacttgaagaagaaatagaaggcgctcattccaatatagtctttatttcccattcagatacaggttgagcatccctaatctgaacagttaaaacccccaaatgccccaaaatccaaaccttcctgaacgctatgacaccatgagtggaaaattccacacctaacaaacacatttgctttcttatggttcaatgtacacaaactgttttatatagaaaatgatttcaaatatcataaaattaccttcaggctatgtgtataaagtatatatgagc

SEQ ID NO: 8592 - DNA, 1482 bp, Homo sapiens
  chr12:12046854-12048336
  hyper
cccaagcatttcagataagggatatcaatctgtactaccaataaggatttcgtaattcccctaactgcaaatgtcctcttcatttgttctttatgagaaaacccgggtagtgccagcacctggatacagtatttacaccctgcagaccctaaagatttcagattcagttagcaaaccttgatgaagcacctgctggacactgagggacccaaagctcaatcagccataatccctgctttcagagtttatattgtacctgcctaatccacccggcgtgactcatttcaacactaagtactaggggtgttgtcaggagacaaatctgaagtcaggagaggaaaatgcaaaggagccctgccgtgtgatggatgtgcattctcacttgggtcttgaagttctcattcctacatctcaagctagccaggcagtctcctctctatcagaagaaagcactggtaattggctagactggctatgttgaaggtaacatgaactctaagatcttgacccagggcgacttggttttgcttaaggtggcatcaccaatgttccaaatcctttagggagatgagggtatccccacagaaaaagaggaataatagaccaatggattttctcctttcaccagtatgtttggaaccctctgatccaatgtcttttgatactgatctcttgtccaaatgagaatgtcgctttagctgaaattcaaatggctgtgacaatttaccgaaatgatgaagtaaccaccattcccacctttcactgcctaggctccaagtctgaatacatttttgaaataggaactcccttttgcaaaaaagaaacctgggtgtcagggaggtgaagtgacttgccctaggagcagacagcatgccaagaatggaattaggctcaggatccagcctgggctcaccctgtgtggctcattcccacccaggaaactgaagataaaagatttgggaaaacacaccaagaaaaaggggcagttttctttgcccaagcatttggtgctagttagaggctgttcactctctcctgctcctcttcggagtagaaataaaggctgtgacacaaggaagccagtggggtgggagggaggcaccataatccctccctaaaacccacagaagactaacctgatactcttttgacccaactgcatcaacactaaacagctgcagaccccctgaatctttcacacatgccaagtgaacattcttgatgatttctctttgtgaccgcaaccacctgcaaaccagaacgactctagaatttccttccccgcccccctttttgtttagtttctaatctcttgtttatgaggtgtggggtttataagggactgaatcaaatgaatgtaacaaaaaagaaaaaaaaaacaaaaaaaaatgccttttctcagggccagtgagttgcaaataatttttaaagaaaagcctataattacatcatctcaataaattttttataaaaaaaaaaaaa

SEQ ID NO: 8593 - DNA, 52 bp, Homo sapiens
  chr12:12419643-12419695
  hyper
aggaggctcctcaggacggcccccatcttcccttctcgcgttctcttctctc

SEQ ID NO: 8594 - DNA, 49 bp, Homo sapiens
  chr12:12420197-12420246
  hyper
cgcttcggccctccccgcggagggcgtgaggcggcgttgaacaacattg

SEQ ID NO: 8595 - DNA, 174 bp, Homo sapiens
  chr12:12871789-12871963
  hyper
aacagaagaaaatgtttcagacggttccccaaatgccggttctgtggagcagacgcccaagaagcctggcctcagaagacgtcaaacgtaaacagctcggtgggttgatcactaaaggagcacgcactggaacccggggccttcagacctcacgatacctgatcttactggttg

SEQ ID NO: 8596 - DNA, 79 bp, Homo sapiens
  chr12:12877457-12877536
  hyper
gcgtgggcttcacaggcgaggagcggggcgagaggcctctcaggccggggtgcgcccaccgccccggcctcagggagcg

SEQ ID NO: 8597 - DNA, 30 bp, Homo sapiens
  chr12:12939504-12939534
  hyper
gccttctaataccacgcccctcccagttta

SEQ ID NO: 8598 - DNA, 57 bp, Homo sapiens
  chr12:13153040-13153097
  hyper
cccaacatgttgtagccgagacgctcccgacgcacgggaggacgtgaggtggcgggg

SEQ ID NO: 8599 - DNA, 38 bp, Homo sapiens
  chr12:13153354-13153392
  hyper
gggcgggtcagtgatgcgaagggcgggcagcagggcag

SEQ ID NO: 8600 - DNA, 31 bp, Homo sapiens
  chr12:13197533-13197564
  hyper
ctgtgccaccagagggcgagaggggcgccca

SEQ ID NO: 8601 - DNA, 1569 bp, Homo sapiens
  chr12:14133388-14134957
  hyper
ggggggaggaaaccccgcatttcccacagagtgcacacgagaggaattgaaaacagctggtaccggtctataaataattcagaaaaggtctggctataccattcctgggacaggcacggatgagaggtgggaaagccaacctgaatggaagaggagagagggagggagcgagcgaaggagggaagtgggaaggaaggaggaagggggggagaagcggcaccatacagcaacacacactcacacacacgcagaaacacaattcccacttaactcgccagcgagtgcggcccccagccccatctgcattgctgctgacttgtctcgctcgctctccccatcgcctccagcagcagcgccgcctcccaccccgggcttgtgctgaatgggttctgattgtgcacggggtgcacactgggcatttcttggaaggggcacactgacgcgcgcacacacgcccccgacgcgcacgcgccccgcgcgcactcacactcacccccgcgcacactcacccccgcgcacactcacgctgccgccgcgctgaggtgcagcgcacggggcttcacctgcaacgtgtcgattggacggatgggctcggcgcgtgggtccggcccggggcgccgctgccctgcccctctgctaggtgaagggatgaaaccccccaaaagaccagagacagccctacccagtcacagcaccccctcccccacaaaaaaaaaaaacctttaaaaaagccacgtccaaattagcaagtgccgggttctgctggatttcagagctttacctcatgccagattcgttcacgatttcacggcttcgaccctttatctgcctgacacccccaaacccctacattcaaaggagagactccaaagcccatctttacgtaccggctccgagcgcctccgcggttgcagtctgcggagaggggtggccggtggctgggaatggagggttttcctttcctgcaaagcaggattaatgatccgtctcgggggttttgaagttcatgactcttctttgcaaggcaaaaggatatgcattcggacgccagcactactggatggtggtgatcaagaatcacccttgacgagcactctcgatagagcgaagccccgagatttcctagaggtgaagaagccggaggaagtggtttttgaaagggggtggggggaaccttcctttctcaaaaagaggtggggggtggagaggcaggagcccagattccagttggtgaggatcggagccgggggaagggaagcgggcgggggcaggctgtgcaagtcaaccgcgcggcagccggagagggagagcaggaggggaggaggggagcgtcagaaaaatgggtattaatcaccggggacggggggaggcgcggggaacgcaggttgcctggtctggatttgggtctcacactcaaaaacgtgccgcgcacacacacacagacacacacacaccccctacctcgcacaccctgactccggggggaggagaaacccacgaagctggggaagatactgcttctgctcccaggggcgggtgtgagcgcgcgtgtcctctttctccacaccc

SEQ ID NO: 8602 - DNA, 31 bp, Homo sapiens
  chr12:14135187-14135218
  hyper
cccgtgggcggcccgcgggctgcggaaagca

SEQ ID NO: 8603 - DNA, 30 bp, Homo sapiens
  chr12:14720790-14720820
  hyper
ctgaggggcgaggacgcttcacgtggtggc

SEQ ID NO: 8604 - DNA, 56 bp, Homo sapiens
  chr12:14923204-14923260
  hyper
gacctcccatttcctgcgacttagcaagccctgcacacgcacgaaccgcccttgac

SEQ ID NO: 8605 - DNA, 1206 bp, Homo sapiens
  chr12:14927126-14928332
  hyper
tgagccggctggcctcgttatttatgtgagcggctatgtaaatgaggattcggagattgctctattgattggagagagctggaggaggcggtctctcttccagagcgctagttgggagcggagcctgcctgtcattggtcaccagagccaatggaaaggggctgccgcgcggccgtaaagagtttgtagaggcagttcgggtgcggtacgttgcattccggtaccggacgccgagagcggtttgtctccgtctctggagttgtaggcgagaggtgatcatgtccggtcgcgggaaacagggcggcaaagtgcgagcaaaggccaaatcccgctcctcccgcgcgggcctgcagttcccggtgggccgagtgcacagactgctgcgcaaagggaactacgcggagcgagtgggcgccggggcgccggtgtacctggcggcggtgttggagtaccttacggcggagatcctggagctggctggcaacgccgcgcgtgacaacaagaagaccaggataattccccgccacctgcagctcgccatccgcaacgacgaggagttaaacaagctgctgggcaaagtgaccatcgctcagggcggcgtcctgcccaacatccaggccgtgctgctgcccaagaagacggagagtcagaagacgaagagcaaatgaccctgacgccgccctcagggagctggctcccccagcaaaggcccttttcatggtcgtcccgcaatgcttttgaatgtgctggatgtcatggagggccggtgacatctagcggggaggtgggcggcgagggtcccggcgggagccaataaagttggtgaaaatcgtttggtcgagagagctgtgtagtcgcggggacatgtcggatggccccaggggaggggggcgaccgggaaacccctggagcaggcactggtgggtgggcttgagccactctggacggctttagtccgcaggtcaccctcgaggcgtcaggggagggtggcctggaggtgggcagggtggaagccacctcgctgtcagtagggcaaaggggaggcagagtcggtgcggtgaggcctccttcggaattatttttacttccctttcacagagccttcgctctcctgccagtttgtgagcactcaggaccaagttctgggaagataccgtcggatcgagctgagctcggggcaggaagtgtctgcggccatatttttca

SEQ ID NO: 8606 - DNA, 539 bp, Homo sapiens
  chr12:15374052-15374591
  hyper
agcgcgctcagggctcggaatgggtctgcaggaagtcgtcccgaaagagctgcctggacacgtgcgtgacactcacctgttcacactctccaggccaggagagctacggtcctctgcaagttcggaatgggtcccccaagatcgcgaagccctcccacactgcgcagcccaggcttcaggttgcgtttgcgagttgctgggctgcggtcgtgggtgggactcgccgcagaagcaagtgccagtggcccggcgggggtctcctcactcgcgctcgctccgactagcggcggagggactgcggcaggacgcgagctgagcccggccaaggccgctgcgctcagcggccaggatgctgcagtgcggcgcttcggcgccccctactgggggcaggggcaggctcctcccgccgcgctgcctcccaggcttgcgagcttgggtctttaacgtgctgcacccaagacgggcttccctttttcactggttatttccaagcctccaggctcccaccgaagggcggctttcctcggtcaaaaccttgc

SEQ ID NO: 8607 - DNA, 284 bp, Homo sapiens
  chr12:15475221-15475505
  hyper
agcaagcagcgggccgatcctggtggagggttgggaggctgctgtcattttatgggtcggcagccagagtgagagtgtccctgctgccagaggactacggcgggctgggcgcggggtccccgcctctcgctcaccacacagaccccgcgcctcctctggcagccgcggtggtggcggcggcagagcctcgcccactccaatccccaccctctccatccttagtcattaaagaacagcagcgcctggcacgttcttggaggaccccgggcgcagaggaggaaagg

SEQ ID NO: 8608 - DNA, 30 bp, Homo sapiens
  chr12:15475752-15475782
  hyper
cccctttttcccagcggtccgggcggcagc

SEQ ID NO: 8609 - DNA, 1019 bp, Homo sapiens
  chr12:15941608-15942627
  hyper
aattcgagggggtaaacgggggtgggaccctgccctaaagggtcattttgaaaagaacccctccccatttgaggcgggttggcagagcagcgcacaaatcccaagtctaacgtaataagccgagatcgggatactcggtctgcagtcgccccacggaccagatgagcgcaggtgtatctgcggaagctcaggttaccatgaatatcactgggccacggcgaaccctccctgcccagcctcccggagccctgggcgcgggtctgcacgggccccacagcttgcccggacccggcgagcggacgcctccggccgcagcgccctaccgcacctggctgccaacaccagttgaaagcagtcaaagtgaagggaggcggacgcggctcctggcaccgctccgattccagcacacaaaggcggatttttaaaatcgagaaagtcaaagccgccggaccccgggaccggcgcctttcgccaaggggctcttacctcggatccgccctcggggccacggctttccccggagacgccgcgagcccagacgaggtgggaggggaccgggagaaagccccccaatctgattcgcgcccagccagtcgtccgcgagccgcggagccgccttctgcacccagctaaagagcagcgatctccgaggcgagcacagcgccggcctcgcgccgggcgagaccgcctcgctagctgctgcctgtgaagtctggagccgcccgcccgctcgcagccagtgccaaccgcgcgccgcgcatgcccagtgcccgcgcgaggaacgagcgagcgggcgggcgggcgagtgcgcgccccgcagccaggagcgaaatccgctatccgggtcttgccggcagccgagccgcagagttctggtcgactccagcgcttgaggcgaagtggccggtgaggccgggtgggcgggagagggaccggaggaaaggagacggggcgctgcgccaagttatcaaggccgcgatcaaagtcggaccaaggcagcgagtcgacagcaggtttcc

SEQ ID NO: 8610 - DNA, 647 bp, Homo sapiens
  chr12:16500381-16501028
  hyper
aggaaccagagtttctaagggcgccaaatagaagggctcaaagggaatcagcaggcgatggttactgtgggcgggtaaatcaggtgatttagaggaggggtttggcgaggttggggtcgggctttaaacgtgggagggctaattaacaggagattaactggagaggggcggtgcctgcgtccggcccgcgcggccacagtccctgcattgcgcgcgacccggcggcgggacaggcttgctgcttcctcctcctcggcctcaccgtgcgtactgggaggggagaaggggaccgcatgcaaagggtggcaggcagggagggccagggtgggtggcagatggaagacttgggggggtctctgccagctggaagtgcttggctccacttagcagctaaacttagcttttcaatcgatcgcttttgaaagggaattgtatttctgtccccgtgcgggtaagttttcccatttctcaaactccaggaatgaaacgagagagtcttttcatgcttgagtgatgatttccaaacttagccttttcaagtcaaagtaacctcctgtttgaaagggtcccttgaactctggggaaggaggaaaaggcacgtgtagtaatggaggaaatgcctgtagtttgaacgactgctgttctcc

SEQ ID NO: 8611 - DNA, 30 bp, Homo sapiens
  chr12:16758252-16758282
  hyper
atctgagtagtccccgtaaaaaatgtgctg

SEQ ID NO: 8612 - DNA, 30 bp, Homo sapiens
  chr12:16758928-16758958
  hyper
cgcacgcgcgcacccgcagacacacacacc

SEQ ID NO: 8613 - DNA, 1617 bp, Homo sapiens
  chr12:19282356-19283973
  hyper
gccctgggggcaggacgcgtttttttttttttttttttttttttttaatcgatcccggaaccttcgcgcggcggagggggcgggcgcgccgcaggggcccgagggaggggtctggggcgcggcgccgcttgcccatcccccgagcgcgcggcggggcggccggccggcggccgccgggatgcggaggggcggcgacgggggccggaccctgccggggcggcggggcgggcaccgcccgagggggtagggcgcgcgcgggggcgcgccgggccggggaggcgcgctcgctccgcgctcccttcgctcgctcgttccctcctccctcggcagccgcggcggcagcaggagaaggcggcggcggcggctagggatcagacatggcggcggatctgaacctggagtggatctccctgccccggtcctggacttacgggatcaccaggggcggccgagtcttcttcatcaagtaaagagccggggacggcacgggggcccgcgggggcgggagggcaggaggcgggcggctggcgacacgggggagagcccgggtctgtgctcctgcagcccctcggctcgcccccgcgtcccctctcacgctccgtgtctgccccttctctcacccctgcagcgaggaggccaagagcaccacctggctgcaccccgtcaccggcgaggcggtggtcaccggacaccggcggcagagcacaggtaacgccgggcccaaacggagttgggctccgcctggaggaggcggcagagcccgggccgcccggctccccgcaacctgccccgcgccgcgggccccgggaggcggcgaggcggggcggaggccgggcgggagcggccgcaggtagaggggccacggggactccgccgccgggagttctctccagtctcggggcgcctctttctcctcagcctttcatcagcacttggagacggcgccctcttcctgcgccttctccccccatcccagcctagacgaccctcgcgaccctagagtggcgacgctcccctccctgaaacctggagtcctgagtttttcctccgcggccgctactcactccccggtgacccccagctgccgtcttgccccccagcaatcttcaggcagtccttacccactcccctccctgcagccccggaccccgatcgcccgccgggataacgtaaccacatcctccccctcctcccaggagcgctgcctcctgccgtgcagcttcctcctcctaggtgggacttgtgggtaggtggctgatgaaggaggaggaggaggaggagaggagttcgggggtgctgcgatcctctctgtgacagggaacggctcgggaaacgcttggcgcgttccctcctgccacgggaggagcagccggagccggaggaggcgttcgcagcctcagttgctggcgatccggatctaaagtccccgccagccgcacggaggttgcacagactgccaggaggcggtgggcgtgcgagggggtgtcccgtatgggggcacccgggccctgtttggagggagtccgtggggaagcggctctctcgggtggctttgggagcttgtttgaatgctaagtgtgagtggagctggaaaaggctcctcgtagtttctgtact

SEQ ID NO: 8614 - DNA, 30 bp, Homo sapiens
  chr12:20183925-20183955
  hyper
agatggacttgcctgtgtgcagagctatgc

SEQ ID NO: 8615 - DNA, 578 bp, Homo sapiens
  chr12:20521072-20521650
  hyper
tgcggtgggctgcgcggtggatcagcctcagcagcccctgctccagcctgtagggtgaaccggccgctttcccagcaaaggagcaatcgagctgagggtagcgcctcctccgcaggagggggcgggagctcggctgagaaagctttcctagggagttgccttaaagaaagaaagcggaattgtcgatcactccagttgccagttttatacaattttaagcagtcgtcgccactcgtttcccctttgcaaaactgcaaatcaccaccaaccttgcatcaaatagaagtggggagggaaaaaaaaagcaaatctccttctcccttctcaccctccctttcttctcaccctcccttcctctcttactcgctccttctccctccctcccttctgcggctgccgctagtctctcggtctggctctctctccgacgggacttagcaacttcttatttctcagccccttgtccatttttttttttccatcctttgccatgaattggattgacagaggcgggggaggctttgctttctgccccagggaatggcgattcgcgtcctggggccgtgccggggagaatc

SEQ ID NO: 8616 - DNA, 30 bp, Homo sapiens
  chr12:20521969-20521999
  hyper
gttttcaacttgagcgtgctagcctttaac

SEQ ID NO: 8617 - DNA, 23 bp, Homo sapiens
  chr12:20522208-20522231
  hyper
accctataccatggcagtgcccg

SEQ ID NO: 8618 - DNA, 811 bp, Homo sapiens
  chr12:20522347-20523158
  hyper
cgtggctgctggggagacctggtgctgcagccgctccggagctctcggaaactttcctccgcgctgtgcgcgggctccctgtcctttctgctggcgctgctggtgaggctggtccgcggggaggtcggctgtgacctggagcagtgtaaggaggcggcggcggcggaggaggaggaagcagccccgggagcagaagggggcgtcttcccggggcctcggggaggtgctcccgggggcggtgcgcggctcagcccctggctgcagccctcggcgctgctcttcagtctcctgtgtgccttcttctggatgggcttgtacctcctgcgcgccggggtgcgcctgcctctggctgtcgcgctgctggccgcctgctgcgggggggaagcgctcgtccagattgggctgggcgtcggggaggatcacttactctcactccccgccgcgggggtggtgctcagctgcttggccgccgcgacatggctggtgctgaggctgaggctgggcgtcctcatgatcgccttgactagcgcggtcaggaccgtgtccctcatttccttagagaggttcaaggtcgcctggagaccttacctggcgtacctggccggcgtgctggggatcctcttggccaggtacgtggaacaaatcttgccgcagtccgcggaggcggctccaagggagcatttggggtcccagctgattgctgggaccaaggaagatatcccggtgtttaagaggaggaggcggtccagctccgtcgtgtccgccgagatgtccggctgcagcagcaagtcccatcggaggacctccctgc

SEQ ID NO: 8619 - DNA, 404 bp, Homo sapiens
  chr12:21590453-21590857
  hyper
aaagctctgaacaccacgagacaattcgttgcttccgaaacgcagccggcagcaggtactcgagatgagtagtgtgagctcccgagcacccgtaggtcggattatctggtaaggcaccggaagtgaccgcctcgcggctgcttcctctcctggagtccagagtcccgttgctccgccgcgatattcagtaaaccactgggagtccggcagcatggaggcagcgcgccctcccccgacggcagggaagttcgtggtggtcggcggcggcatcgcgggcgtcacttgtgcggagcaggtagggcggtgctcaggcggttccgcctctttccccgaccccaaaggggatagcactggaggccttcctcccaccccctccctttttcttcttccgggttccttttttg

SEQ ID NO: 8620 - DNA, 30 bp, Homo sapiens
  chr12:21654649-21654679
  hyper
accgaacaacattacgagttattggttgag

SEQ ID NO: 8621 - DNA, 793 bp, Homo sapiens
  chr12:21680358-21681151
  hyper
ctcttggtccaaatggggactcgggttgcctgggaaatatctcagtaacccgacctccgctccaaagcgcccttgcggcgtccggtcaggcgcggggctttcctccagagctccagggcccctggctcagcccggggttgcgctgggagcgctggaaactcggcagccccgcgcgaccctatcctggagcaacctgccccctccccacgcccggggactgcgctgtgccgggaggagctgaggtttaagcccgggttgtcccgggccaggctgtcgctgagccccaggtctcgtttttgcagagggtcgccgcttcatctccgaccagagccggagaaaggacctctccgaccggccactgccgggtgagtgaccaagggtgcaagggcgctagtcctgcgcttttggaataggatggggcgggcagggcttgctccgcgctggtgccgaaagaaagcgtctcctcaccggaaagacgcggctctgaggcgccctcagatacagtccgcccgagggcagcccgggttggcagcagcagcagctggatgccgagcgccggagctgggagctcgcgcgtccagccccgcgccaatggtggcaagggcggcccaggctggcgctgcggctccccaagccttattggcttgcggctgttcagccagccctctggctgccagggtgtgcagaggtccccagggagttaggacctgaggtgcagctcagaggggtaaggcgagataggaagaactatgcaaatgcttctagaaatgtatctgcgcgtttgtgcaggaac

SEQ ID NO: 8622 - DNA, 309 bp, Homo sapiens
  chr12:21810585-21810894
  hyper
ttcttcctccttcccgcgtctccccatacaagtactaccccgcacgtcccatcaggcttgcctgtgggccaggattcagggtcctgagccgaaacctaccaggagagagaaggctctggagacctctgtaacagtcgtgcggagaagacaaagtcagctgcgtgcgtctcctccggcgccggctctgcaaggagggaggagggggcggggccccacaaccaccgcagcctcttaggtttctccattgtgattggaaatccgagtaccgcctacccctcccctcggctcgctcaatccccttcaaggaca

SEQ ID NO: 8623 - DNA, 420 bp, Homo sapiens
  chr12:21927418-21927838
  hyper
catttacgggaacacggacagcctcccccctccgctcccccggagcagctttgaaacttacagactccgggtagcgggcgcggcggctggacctccttgcacacgccggcgggccgcgggcaggtccctcgctctcccatgctggcgcgcgggaccaggggccgcccaggccggagggacaaattgggggctgcgtgtcctaaggagaagagttaaaataataaaaggtgcaactgaatctaaacgcagggagggctagaggaagggggatgggtgtagatcttcccctccccctgctcagctcaactcccttggccacttcagtggaaggaggagggactgggggggcgggggcgggggggcgatgctccacaaatcagcctcccagttagggctttgacgcacgccagacctcggaag

SEQ ID NO: 8624 - DNA, 128 bp, Homo sapiens
  chr12:21927877-21928005
  hyper
cgagcgcaagtccccgggaggtagggagcaggccagagggagggacgacccgggggagggcgggacctgcagagccagctcctttccagtagccgcgaccccctgccgccagcgtgacacacaagtct

SEQ ID NO: 8625 - DNA, 104 bp, Homo sapiens
  chr12:22093945-22094049
  hyper
ttcacttctcgagccgggcctcgtcccttaattctagaaatagcgatcgcgaaagctaagtgccgagaagtgcgagagagtgcgagggcgtttttggatagcag

SEQ ID NO: 8626 - DNA, 470 bp, Homo sapiens
  chr12:22094577-22095047
  hyper
cgctgtttccccctgaacggatccgggaaatgaagggctcattctaggtagaggcacccactgctgggttatgagtgcacgaatgtctcacaggagcaaggctggctcaagtctaattttccgcttttccccggcgacctagaaaacttggtttctctggtggaccagccgccgcgctatcgaagggcgacccttgcccaccgtcccctaaagtgagacgctgattcccatggactgcgtaaacagtcaccctcttctcctgtttccaaccagagacataattaactctcgagataacgtgtttatattaagatcaccccacaaccactcccccgcgaaacacaagccgtgaattttgtccccgacaaccctctttaattaacaccggattttctcaagagccagttttgagtcagcttgagataagcattgttttcaggaactgtcgtattttaataaaggatggtcag

SEQ ID NO: 8627 - DNA, 5 bp, Homo sapiens
  chr12:22095181-22095186
  hyper
cgact

SEQ ID NO: 8628 - DNA, 31 bp, Homo sapiens
  chr12:22198510-22198541
  hyper
tgagggaaaccctcaccggatgagagaggga

SEQ ID NO: 8629 - DNA, 88 bp, Homo sapiens
  chr12:22486793-22486881
  hyper
gagggaaaggacatggaagagcggatgaaagggatgcctctgcgagacggtgcaaggcggtcctcgccggtgaccctgtcctctgcac

SEQ ID NO: 8630 - DNA, 1133 bp, Homo sapiens
  chr12:22487133-22488266
  hyper
cgtttgtcgccgggcccgcccgcaggggctcatcgcagccccggcgtcccaggggcgggggccggggcctcagcacaaagctaggcgaagtggcagcggagggtcccccaccgccagccccccatgcacacacacctttggttctcttacttgcaaacgcacgcacgcttcttcggccccgtcggccccaaaggtcagcgcaaggattttttcaaatgcaacttttccaaggatttctttctaggggaagtggctgggggtgaagtcacgatctatggccatggtcgcttcccctgcagaaggcgggcgctggggtctccgagtgcgcagagagcggcggcggcgagtcgctcccgccggttctgcagcatcacggtcgccctcggcgagggtccgggagaaggctcggctccctcctaaacatgtggcccgtggcgtccccttgtcccctccgagcgatgctcctgcgcccttcgccgcctcccgcgctgctgcgccgccaggcaacccccccccccccaccccgccccgagacgcgctctctgcgccgcaccaagtccttggaaatttccacggcggcccgggaccgctatcctgccccgggctcctccgcctcgcccgccgggaccctcgctccccacccctcccggagaagaaaagaactcgctctcatcagttaattcagcggcgcgccgcagccttccgctgcgccccggacttcgcagacaaacgcccggggattggtggaaatcaaggtctccccctccctcccccacccgcaaaattgcctccttcgacccgatccgagccgcgacactcgcccagagcgcgcacccctcactcgtgcccttgttctttggagataacggcagacaataaaaaccaacagccccccgccaatagaaatatatcagtccctgagtgtggcggagactggctaatatcctgatccttcgacaagcggccggtgtgcccaggctgtcaccctgctgccgtcaccctagtctttctctagctggttggatattaacccgcagccaggcgcgaggaggctggcggagatttattccttcctgggcccccacccccattagccggtcccggagccgcggcccgtgtgtgtgcgcgcgcgc

SEQ ID NO: 8631 - DNA, 421 bp, Homo sapiens
  chr12:22488339-22488760
  hyper
cgaggaggtgcgtgcactccggggtcctccgcctcgcctcctccctgaaaggaagtgctgcatccagatgtgcaggcagctggtgcccaaacactagacctcaagatgtcacattgccttggaggcgcgcggccttttagattaaaggaccgttggttcttagacgtccttcttgcccttcttgcttgtgataagcgataagcttatcgcaaccccgaccttggaaaagcaccacccgccttgacccaccgagccgagagagtcgctgttagccatttctgctcgccccggcggccgacgcatagctcgggtacctcctagcggtcgcctattctatttgcttaagcatctcgtcaagcataaagtgtgcaaggacaaagaagaaacctggtcagcttagtcatcacgaaaacaaaatcta

SEQ ID NO: 8632 - DNA, 1922 bp, Homo sapiens
  chr12:24714491-24716413
  hyper
gagatttcccaaacccgcgcttaaagtgacacaacacgtgagtggtcttcacttggtacactgagtgaggtggggggaaaaagtagttgcaattagaattaaagcttccggtctctgaaatccctagaatcctgaaggatgagacttgtttcagaaattccgggcgggagggagggggagtggtagggagaaggattgcagaaagcgaaacaaaaagacgaaagagtcgggaggtgggggtgactaaggttagggggtgggccaggggtcgctctgatatcctagaagggttaaggggctttgtccaacttttagggtctggccttggacattggccgcgatgcccagcacagcccagggttctccccgcactctcctctcgcatcaaccacctccaccgccaccacttacaaaacaataccagcaacagtacgcaggcttcccaacaaaaatagaaagttatcccgtctccgggtcggggtccaagccggcgctccagggtcccccggccagccgcccccggggatgacagggccactccgcgcctcgggccgcctcccacctctccgccacccccagcccagtccccctccctctgtacttgaggaaactccggcggcggccccctccctcctccgcggctctccagctggagccgggaaggagtgctgagtggcgggcccggcgagcggcagaggggagctctgcgccttggaggtctgcccacaacaacatcgggacgaacaacaaagttaaaacgcagcgattcacgcaccttacccggtctcgttaatgcctcctccggcgtgggatgcaaagtggcacagaggcgggctgggggcccccgggaggagactggagatgggttttggtggctcgcctttttcactctgtgtgtgtgtgtctgtgtgtgtgcgtgtgtgccggtgtgtgtgtgtgtgcgcgcgcgtgtccctctctctccccccgtctctcgctcgcccgctcgctcgcgctccccgtgttgctctcaaggacgaggtgaaatccctttgctggtcatgaggcggcttcagagacaaacaacacaatgcgagtgcaaataacaaaaggcaaaaagacagtaggaacaatgggggaggcgagggcagcgcaccagccggcggtcaccgcggcccggcgcccgccccggggggtgcggcgggggcggggggggggcgcgggggcggtgccgggggctcccgctccctccaggtcgcccccgagctcccgcaagcccaccctgacctccttcttgcagctcgccgcccggccgccctctctatccatccgaagggaaggagccccagagttttcttccccgtctgctgcagagtaactagattgtaaataacgcggcgattacccacaccgtgcaggaattttttttttatctgccctccacttaaaggagcgataaaaatgaaatggcaggagtggaaggagccagggagagcgggatatctctagatctcgatggagctcgcatctataaatacgcattcatgtttagtcaagtccctttgtcaacttcttcccggcgcctgagcctcagccgctgctctgcgcccaggacctggcccctcccggccccctagtccagtggtcaggcggtcgggccggcagggagggcgcgcgcggggggctgcggggtccgtggaacctttccgggaggcgagccgcgggctgctgggcgcggaggctggagccgcgagaggttcggctgctgaagcggccactgcctcccagagccaggctccgcgccgcgcgtccccgccgccgccggcactgtgcacccacctactcctcggagattggggtaggggaaaaaagttttgaggcgctctcatctctgcctccggggtggttgaactggtttggttttgtgttaagcgaagccaaaa

SEQ ID NO: 8633 - DNA, 115 bp, Homo sapiens
  chr12:24716472-24716587
  hyper
acacacacaccccaacccaatgcccaagaaccagggaatgaaatttagtgatatttagggagaaataaggctgggcgctgggctccgactctttctgccgcgacacttgagtggg

SEQ ID NO: 8634 - DNA, 92 bp, Homo sapiens
  chr12:25056242-25056334
  hyper
cgcgagcatccttgtttattaaacaacctctaggtgaatggccgggaagcgcccctcggtcaaggctaaggaaacctcggagaaactacatt

SEQ ID NO: 8635 - DNA, 583 bp, Homo sapiens
  chr12:25101414-25101997
  hyper
ggtcaactcttccagccgctccctcctgcatcacgaacacacgctgcaggaaagcgcatttacagcccgggacatccccagacctcctctccaaaattccccacctcctgtgcataggagaaactgagagaagccctcacttcctttccaaacttcacaagcaggggagggagctgtagcagactttcacctccgttcccaaaagcgaatgtgaaaaagtccgagaaggcacgtcctgcgagtggaggttaaaccgaaatctgaacagaatgcacggtccccgcaaactacgattgataaagaagatactgagacgtttgcgggggatataagccatggttgtctcgccttcctcccctccctgccaactatgtttcttggagaaatcgccggttcgattcacgcacacatttttgtaaaacacggacaaaaccataagtagttaccttcattgttccgtcggccacgagggaagctcgagctgagcggagggcagatcccaagggtcgtagcccctggccgtgtggaccgggtctgcggctgcagagcgcggtcccggctgcagcaagacctggggcagtgc

SEQ ID NO: 8636 - DNA, 323 bp, Homo sapiens
  chr12:25102009-25102332
  hyper
cgagtacacgtggcgggctggattgcagaccggccctctcgcggcggagactcgcgacctagcggattgcatcagcaggaagacactaaggctgctcccccaggccgcccccagatggtggagtctctcccagcccgaagattcggagccagcgcccagacccgagcctcactcactgctcactcccggggtgcagggcagaggtgccagtgttgcaagcaaatgacacggttacccccgaatcagccactgtgggtgcgtatccgagtgtggggatgcccgtgtaacatttatatggagacgtcaaggaggaggaaataaac

(The sequence listing continues in the following parts.)
